(19) United States
(12) Patent Application Publication
(10) Pub. No.: US 2024/0141435 A1
(43) Pub. Date: May 2, 2024

(54) Methods for detecting and predicting cancer

(71) Applicant: UCL Business Ltd, London (GB)

(72) Inventors: Martin Widschwendter, London (GB); James Barrett, London (GB)

(73) Assignee: UCL Business Ltd, London (GB)

(21) Appl. No.: 18/009,943

(22) PCT Filed: Jun. 17, 2021
(86) PCT No.: PCT/GB2021/051538

§ 371 Date: Dec. 12, 2022

(30) Foreign Application Priority Data
Jun. 17, 2020 (GB) 2009222.7

(51) Int. Cl. C12Q 1/6886; A61K 45/06; C12Q 1/6806; C12Q 1/686; C12Q 1/6874

(52) U.S. Cl. CPC C12Q 1/6886; A61K 45/06; C12Q 1/6806; C12Q 1/686; C12Q 1/6874; C12Q 2600/154

(57) ABSTRACT

The present invention relates to assays for predicting the presence, absence or development of cancer in an individual, particularly ovarian and endometrial cancer, by determining the methylation status of certain CpGs in a population of DNA molecules in a sample which has been taken from the individual, deriving an index value based on the methylation status of the certain CpGs, and predicting the presence, absence or development of cancer in the individual based on the cancer index value. The invention further relates to a method of treating and/or prevention of cancer in an individual, particularly ovarian and endometrial cancer, the method comprising assessing the presence, absence or development of cancer in an individual by performing the assays of the invention, followed by administering one or more therapeutic treatments or measures to the individual based on the assessment. The invention further provides a method of monitoring the cancer status of an individual according to changes in the individual's cancer index value over the course of time. The invention further relates to arrays which are suitable for performing the assays of the invention.

### SEQUENCE LISTING

[0001] The instant application contains a Sequence Listing which has been submitted electronically in ASCII format and is hereby incorporated by reference in its entirety. Said ASCII copy, created on Jun. 9, 2021, is named ‘Seq listing as filed 17 Jun. 2021 N417233WO MGW JAS.txt’ and is 7,370,039 bytes in size.

### FIELD OF THE INVENTION

[0002] The present invention relates to assays for predicting the presence, absence or development of cancer in an individual, particularly ovarian and endometrial cancer, by determining the methylation status of certain CpGs in a population of DNA molecules in a sample which has been taken from the individual, deriving an index value based on the methylation status of the certain CpGs, and predicting the presence, absence or development of cancer in the individual based on the cancer index value. The invention further relates to a method of treating and/or preventing cancer in an individual, particularly ovarian and endometrial cancer, the method comprising assessing the presence, absence or development of cancer in an individual by performing the assays of the invention, followed by administering one or more therapeutic or preventative treatments or measures to the individual based on the assessment. The invention further provides a method of monitoring the cancer status of an individual according to changes in the individual's cancer index value over the course of time. The invention further relates to arrays which are suitable for performing the assays of the invention.

[0003] The project leading to this application has been funded by the European Commission's Horizon 2020 Research and Innovation Action, H2020 FORECEE under Grant Agreement No. 634570, the European Commission's Horizon 2020 European Research Council Executive Agency, H2020 BRCA-ERC under Grant Agreement No. 742432 as well as the charity, The Eve Appeal.

### BACKGROUND TO THE INVENTION

[0004] Epithelial ovarian cancer is by far the most common cause of gynecological cancer-associated death. In order to improve this, the biggest challenge has been to identify the group of women at the highest risk of developing this devastating disease for which measures to diagnose early and/or prevent the disease can be offered. Currently, the best performing model has used a combination of single nucleotide polymorphisms (SNPs) as well as a large number of epidemiological parameters and has achieved (although only internally validated) a Receiver Operating Characteristic (ROC) Area Under the Curve (AUC) of 0.66. More recent data show that women with the highest and lowest 5% of the resulting polygenic risk score (PRS) have a 2.8% and a 0.9% risk of developing ovarian cancer until 80 years of age (the general risk for ovarian cancer in this population was 1.86%). Hence, there is a clear unmet need to identify women at risk of developing ovarian cancer in order to offer women at high risk those strategies which have been shown to early detect ovarian cancer or recommend to remove the Fallopian Tubes, the organ from which the majority of ovarian cancers originate.

[0005] Recent evidence has shown that an assay (called PapSEEK) for mutations in 18 genes as well as an assay for aneuploidy in cervical brush samples is able to identify 33% of women presenting with ovarian cancer (although the majority of these women have advanced stage III/IV cancers). In this study, the average age of cases and controls was 58 and 34 years, respectively. The consistent observation of a high allele frequency of pathogenic driver mutations in DNA from non-malignant normal endometrium with increasing age in light of the fact that the cases were almost twice as old as the controls makes it impossible to judge the true specificity of the PapSEEK test. The PapSEEK test includes steps which assess the presence or absence of tumour-derived DNA in cervical smear samples. In this test the tumour-derived DNA in the cervical smear sample may originate from an anatomical site other than the cervix. For example, the tumour-derived DNA may originate from an ovary, and may arrive at the cervix having drained through the uterus via a fallopian tube.

[0006] Epigenetic (i.e. DNA methylation, DNAme) changes have been identified in normal fimbriae from women with BRCA1/2 germline mutations and could potentially serve as a surrogate for both genetic and non-genetic factors including lifestyle, reproductive and environmental exposures contributing to ovarian cancer development. A number of proof of principle studies, so far exclusively performed in blood, have demonstrated that certain DNAme changes are associated with ovarian cancer predisposition. Sample heterogeneity and the choice of surrogate tissue are deemed to be among the most important factors impeding clinical implementation. Thus, the inventors aimed to assess whether DNAme profiles derived from cervical smear samples (containing hormone sensitive epithelial cells capable of recording ovarian cancer-predisposing factors at the level of the epigenome and arising from the Müllerian Duct, the same embryological structure from which the vast majority of ovarian cancers arise) are capable of identifying women with primary epithelial ovarian cancer.

### SUMMARY OF THE INVENTION

[0007] The current inventors set out to understand whether DNAme (DNA methylation) profiles may be used to detect the presence or absence of cancer, particularly ovarian and endometrial cancer. The inventors also set out to understand whether said DNAme profiles may be associated with the development of cancer, and therefore whether such profiles may be capable of functioning as surrogate markers for individual stratification purposes in connection with cancer.

[0008] In this regard the inventors have succeeded in developing assays involving “cancer index values” which are derived from and associated with DNAme profiles established from a sample comprising epithelial cells from a given individual. The sample may particularly be derived from the cervix, the vagina, the buccal area, blood and/or urine. The sample is preferably a cervical liquid-based cytology sample, and more preferably a cervical smear sample. Subsequent DNAme profiles from a given individual, and which values can be used to stratify the individual in connection with cancer. A preferred sample for use in any of the assays described and defined herein is a cervical liquid-based cytology sample. A particularly preferred sample for use in any of the assays described and defined herein is a cervical smear sample.

[0009] Accordingly, in contrast to prior art assays, the inventors have surprisingly determined that it is possible to derive “cancer index values” derived from and associated with DNAme profiles established from samples, wherein the samples are free of tumor-derived DNA. Thus the tissue(s) from which DNAme profiles of the present assays are established may act to provide surrogate markers for the presence, absence or development of cancer, wherein tumor cells, if present, or cells at risk of transforming into tumor cells, are located at an anatomical site distinct from the site from which the sample was taken.

[0010] The cancer index value is determined from data relating to the methylation status of one or more CpGs in a panel of CpGs as further defined and described herein. CpGs of the panel are methylation sites in DNA from cells derived from/obtained from samples comprising epithelial cells. The sample may particularly be derived from the cervix, the vagina, the buccal area, blood and/or urine. The sample is preferably a cervical liquid-based cytology sample, and more preferably a cervical smear sample.

[0011] For the purposes of the present invention, the cancer index value may be used interchangeably herein with “WID-OC-Index”, “WID-Index”, “cancer index”, “index” or “index value” (WID=women's risk identification). Furthermore, any reference to a cancer index value in the context of the present invention, may be equally used for the assessment of the presence, absence or development of ovarian cancer and/or endometrial cancer in an individual.

[0012] Based on studies with patients known to be free of ovarian cancer, the inventors have established cancer index values, using specific panels of CpGs, which have been determined to be associated with/characteristic of ovarian tissue which is negative for ovarian cancer, i.e. normal ovarian tissue which is free of ovarian cancer. Based on studies with patients known to possess ovarian cancer, the inventors have established cancer index values which have been determined to be associated with/characteristic of ovarian tissue which is positive for ovarian cancer.

[0013] The inventors have further established that the same specific panels of CpGs that associate with ovarian tissue which is negative or positive for ovarian cancer may likewise be associated with endometrial tissue that is negative or positive for endometrial cancer. Based on studies with patients known to be free of endometrial cancer, the inventors have established cancer index values, using specific panels of CpGs, which have been determined to be associated with/characteristic of endometrial tissue which is negative for endometrial cancer, i.e. normal endometrial tissue which is free of endometrial cancer. Based on studies with patients known to possess endometrial cancer, the inventors have established cancer index values which have been determined to be associated with/characteristic of endometrial tissue which is positive for endometrial cancer.

[0014] Thus, the inventors have been able to establish cancer index values, using specific panels of CpGs, which can characterize an individual as having cancer or not having cancer, or having a high risk of cancer development.

[0015] By determining the methylation profile-based cancer index value from a sample derived from the individual, the individual may be seen to possess a cancer index value which correlates with those possessed by individuals which are known, via the inventor's studies described herein, to be cancer positive or negative. Such correlations have been determined with a high degree of statistical accuracy, particularly with respect to parameters relevant to biological assays such as receiver operating characteristics (ROC) sensitivity and specificity, as well as area under the curve (AUC). Accordingly, by determining the cancer index value from a sample from a given individual, the individual may be determined to possess ovarian and/or endometrial tissue which is positive for cancer, i.e. the individual is diagnosed as having ovarian and/or endometrial cancer. Conversely, by determining the cancer index value from a sample from a given individual, the individual may be determined to possess ovarian and/or endometrial tissue which is negative for cancer, i.e. the individual is diagnosed as not having ovarian and/or endometrial cancer.

[0016] By determining the methylation profile-based cancer index value from samples derived from women known to possess a BRCA1 germline mutation, but are otherwise cancer negative, these women have an increased cancer index value relative to healthy women that do not possess a BRCA1 germline mutation. Women with a BRCA1 germline mutation are known to be at high risk of developing ovarian cancer. Accordingly, an increased cancer index value in women that are, at the time of testing, cancer negative can indicate a high risk of said women developing cancer, particularly ovarian and/or endometrial cancer, most preferably ovarian cancer. Preventative therapies and intensified screening as described herein may be particularly suitable for these women that have a high risk of developing cancer, particularly ovarian and/or endometrial cancer, most preferably ovarian cancer.

[0017] The inventors have determined that the cancer index value can vary depending on whether the women from which a sample has been obtained has, for example, a serous or mucinous cancer. A lower cancer index value is observed in samples obtained from women with mucinous cancer relative to serous cancer. Serous and mucinous cancers both arise as a result of fallopian tube epithelial cell differentiation, however serous cancers are further differentiated than mucinous cancers, and therefore tend to be of a higher grade and thus more dangerous. The observation that the cancer index value discussed herein correlates with the grade and severity of cancer in women indicates that the cancer index value can act as a surrogate marker for indicating the severity of cancer in an individual. These observations from the current inventors further establish that the cancer index value, as further described and defined herein, is dynamic and can change according to genetic and environmental conditions including the grade and severity of the cancer. The cancer index value may therefore be used to monitor an individual's cancer status and risk of cancer development. Moreover, the cancer index value may be used to monitor the efficacy of cancer treatments being administered to an individual, including therapeutic treatments and preventative treatments.

[0018] Accordingly, in the context of the present invention, by determining the cancer index value from a sample from a given individual it is possible to assess the presence, absence or development of cancer in an individual, or in other words to stratify the individual for cancer. In the context of the present invention, stratification for cancer is the process of categorizing the individual as being a member of a group of individuals who possess a phenotype in connection with cancer, including the presence or absence of cancer in the individual, or the development of cancer, i.e. by having epithelial cells, particularly derived from the cervix, the vagina, the buccal area, blood and/or urine which is more characteristic of ovarian or endometrial tissue which is cancer positive than ovarian or endometrial tissue which is cancer negative. The sample is preferably a cervical liquid-based cytology sample, and more preferably a cervical smear sample.

[0019] As explained herein, the assays methods of the invention are based on a cancer index value derived from a methylation profile from DNA originating from samples comprising epithelial cells. The sample may particularly be derived from the cervix, the vagina, the buccal area, blood and/or urine. The sample is preferably a cervical liquid-based cytology sample, and more preferably a cervical smear sample. Accordingly, the assays provide means for correlating samples derived from the cervix, the vagina, the buccal area, blood and/or urine-derived DNA methylation profile with a status connected with ovarian or endometrial cancer ranging from the individual being cancer negative, to the individual being cancer positive, with high statistical accuracy. Because the assays of the invention provide a correlation between the methylation profile and the disease status, the skilled person will appreciate that as part of the stratification process and outcome, disease status is assigned on the basis of a likelihood. As such, the methods of the invention provide assays which are predictive of an individual's status with respect to cancer. The assays of the invention accordingly provide means for predicting the presence or absence of cancer in an individual. The assays of the invention accordingly also provide means for predicting the development of cancer in an individual. The assays of the invention can provide means for predicting the development of cancer in an individual since the inventors have demonstrated that specific cancer index values can define ovarian and endometrial tissue which is cancer negative, whilst others can define ovarian and endometrial tissue which is cancer positive, and since the specific cancer index values may be dynamic and thereby increased in association with tumour grade and further increased cancer risk factors such as germline BRCA1 mutation, the values may be subject to change along a scale of cancer risk.

[0020] Whilst disease status may be assigned on the basis of a likelihood, the inventors have demonstrated herein that correlations between DNA methylation profile and cancer status using cancer index values can be achieved with a very high degree of statistical accuracy using parameters relevant to biological assays, as described further herein. As such, the assays of the invention provide means for predicting the presence or absence of cancer in an individual and for predicting the development of cancer in an individual, and for stratifying an individual for cancer, and wherein the prediction/stratification can be defined to be statistically highly reliable and robust. This in turn means that the prediction/stratification can be made with a high level of confidence. The assays of the invention can be defined to be statistically accurate by means known in the art, as further described and defined herein. The assays of the invention can be defined according to parameters relating to their statistical specificity and sensitivity. These parameters define the likelihood of false positive and false negative test results. The lower the proportion of false positive and false negative test results the more statistically accurate the assay becomes. In this regard the inventors have established CpG panels, as described and defined further herein, wherein the methylation status of CpGs in the panel can be used to establish cancer index values such that the assays produce statistically accurate predictions of cancer status. Accordingly, the inventors have determined that the assays described herein may be defined according to statistical parameters such as percentage specificity and sensitivity and also by receiver operating characteristics (ROC) area under the curve (AUC). All such means are known in the art and are known to be defined measures of statistical accuracy for biological assays such as those described and defined herein.

[0021] Thus the methods of the invention provide assays which can be used, with a high degree of statistical accuracy, to predict the presence, absence or development of cancer. The methods of the invention provide assays which can be used, with a high degree of statistical accuracy, to stratify an individual with respect to cancer status. Accordingly, the methods of the invention provide useful information to individuals and their physicians concerning patient cancer status. This information may help inform actual therapeutic treatment measures if the presence of cancer is identified in the individual. The information may help to monitor the progress of therapeutic treatment measures in the individual by monitoring changes in the cancer index value over the course of a period of time. The information may help to monitor the progress of prophylactic or preventative treatment measures in the individual by monitoring changes in the cancer index value over the course of a period of time. As such the methods of the invention offer significant advantages in the personalised prevention and early detection as well as treatment and management of cancer in individuals.

[0022] Accordingly, the invention provides an assay for assessing the presence, absence or development of cancer in an individual, the assay comprising:
[0023] a. providing a sample which has been taken from the individual, the sample comprising a population of DNA molecules;
[0024] b. determining in the population of DNA molecules in the sample the methylation status of a panel of one or more CpGs selected from a panel of CpGs identified at nucleotide positions 61 to 62 in SEQ ID NOs 1 to 14,000;
[0025] c. deriving a cancer index value based on the methylation status of the one or more CpGs in the panel; and
[0026] d. assessing the presence, absence or development of cancer in the individual based on the cancer index value;
[0027] wherein the assay is characterised as having an area under the curve (AUC) of 0.60 or more as determined by receiver operating characteristics (ROC).

[0028] The assay of the invention may be performed above and additionally wherein the panel of one or more CpGs comprises at least 500 CpGs selected from the CpGs identified at nucleotide positions 61 to 62 in SEQ ID NOs 1 to 14,000, preferably wherein the assay is characterised as having an AUC of at least 0.67.

[0029] The assay of the invention may be performed above and additionally wherein the panel of one or more CpGs comprises at least the CpGs identified in SEQ ID NOs 1 to 500 and identified at nucleotide positions 61 to 62, preferably wherein the assay is characterised as having an AUC of at least 0.74.

[0030] The assay of the invention may be performed above and additionally wherein the panel of one or more CpGs comprises at least 1000 CpGs selected from the CpGs identified at nucleotide positions 61 to 62 in SEQ ID NOs 1 to 14,000, preferably wherein the assay is characterised as having an AUC of at least 0.68.

[0031] The assay of the invention may be performed above and additionally wherein the panel of one or more CpGs comprises at least the CpGs identified in SEQ ID NOs 1 to 1000 and identified at nucleotide positions 61 to 62, preferably wherein the assay is characterised as having an AUC of at least 0.75.

[0032] The assay of the invention may be performed above and additionally wherein the panel of one or more CpGs comprises at least 2000 CpGs selected from the CpGs identified at nucleotide positions 61 to 62 in SEQ ID NOs 1 to 14,000, preferably wherein the assay is characterised as having an AUC of at least 0.68.

[0033] The assay of the invention may be performed above and additionally wherein the panel of one or more CpGs comprises at least the CpGs identified in SEQ ID NOs 1 to 2000 and identified at nucleotide positions 61 to 62, preferably wherein the assay is characterised as having an AUC of at least 0.75.

[0034] The assay of the invention may be performed above and additionally wherein the panel of one or more CpGs comprises at least 10,000 CpGs selected from the CpGs identified at nucleotide positions 61 to 62 in SEQ ID NOs 1 to 14,000, preferably wherein the assay is characterised as having an AUC of at least 0.73.

[0035] The assay of the invention may be performed above and additionally wherein the panel of one or more CpGs comprises at least the CpGs identified in SEQ ID NOs 1 to 10,000 and identified at nucleotide positions 61 to 62, preferably wherein the assay is characterised as having an AUC of at least 0.78.

[0036] The assay of the invention may be performed above and additionally wherein the panel of one or more CpGs comprises at least the 14,000 CpGs identified at nucleotide positions 61 to 62 in SEQ ID NOs 1 to 14,000, and further wherein the assay is characterised as having an AUC of at least 0.78.

[0037] The assay of the invention may be performed above and additionally wherein the step of determining in the population of DNA molecules in the sample the methylation status of the one or more CpGs in the panel further comprises determining a β value of each CpG.

[0038] The assay of the invention may be performed above and additionally wherein the step of deriving the cancer index value based on the methylation status of the one or more CpGs in the panel comprises:
[0039] a. providing a methylation 3-value data set comprising the methylation β-values for each CpG in the panel;
[0040] b. providing a mathematical model capable of generating the cancer index from the methylation 3-value data set; and
[0041] c. applying the mathematical model to the methylation 3-value data set, thereby generating the cancer index.

[0042] The assay of the invention may be performed above and additionally wherein the cancer index value is an ovarian cancer index value (WID-OC-Index), and wherein the mathematical model which is applied to the methylation 3-value data set to generate the cancer index is an algorithm according to the following formula:

$$\\ WID - OC - index = {\sum }_{i = 1}^{n} \frac{{w}_{i} {β}_{i} - μ}{σ}$$

[0043] wherein:
   [0044] a. β₁, . . . , βₙ are methylation beta-values (between 0 and 1);
   [0045] b. w₁, . . . , w_{14,000} are real valued coefficients;
   [0046] c. p and a are real valued parameters used to scale the index; and
   [0047] d. n refers to the number of CpGs in the panel of one or more CpGs;
[0048] preferably wherein the cancer is ovarian cancer.

[0049] The assay of the invention may be performed above and additionally wherein when the cancer index value for the individual is about −0.056 or more, the individual is assessed as having cancer or as having a high risk of cancer development, or wherein when the cancer index value for the individual is less than about 0.056, the individual is assessed as not having cancer or as having a low risk of cancer development, preferably wherein:
[0050] a. the panel of one or more CpGs comprises at least 500 of the CpGs identified at nucleotide positions 61 to 62 in SEQ ID NOs 1 to 14,000, and wherein the sensitivity is at least 64% and the specificity is at least 63%;
[0051] b. the panel of one or more CpGs comprises at least the CpGs defined by SEQ ID NOs 1 to 500 and identified at nucleotide positions 61 to 62, and wherein the sensitivity is at least 72% and specificity is at least 62%;
[0052] c. the panel of one or more CpGs comprises at least the CpGs defined by SEQ ID NOs 1 to 1000 and identified at nucleotide positions 61 to 62, and wherein the sensitivity is at least 80% and specificity is at least 61%; or
[0053] d. the panel of one or more CpGs comprises at least the CpGs defined by SEQ ID NOs 1 to 2000 and identified at nucleotide positions 61 to 62, and
   [0054] wherein the sensitivity is at least 76% and specificity is at least 61%; preferably wherein the assay comprises determining methylation β-values for each CpG in the panel of one or more CpGs, more preferably wherein the cancer is ovarian cancer.

[0055] The assay of the invention may be performed above and additionally wherein when the cancer index value for the individual is about 0.485 or more, the individual is assessed as having cancer or as having a high risk of cancer development, or wherein when the cancer index value for the individual is less than about 0.485, the individual is assessed as not having cancer or as having a low risk of cancer development, preferably wherein:
[0056] a. the panel of one or more CpGs comprises at least 500 of the CpGs identified at nucleotide positions 61 to 62 in SEQ ID NOs 1 to 14,000, and wherein the sensitivity is at least 43% and the specificity is at least 80%;
[0057] b. the panel of one or more CpGs comprises at least the CpGs defined by SEQ ID NOs 1 to 500 and identified at nucleotide positions 61 to 62, and wherein the sensitivity is at least 51% and specificity is at least 87%;
[0058] c. the pane of one or more CpGs comprises at least the CpGs defined by SEQ ID NOs 1 to 1000 and identified at nucleotide positions 61 to 62, and wherein the sensitivity is at least 45% and specificity is at least 87%; or
[0059] d. the panel of one or more CpGs comprises at least the CpGs defined by SEQ ID NOs 1 to 2000 and identified at nucleotide positions 61 to 62, and
   [0060] wherein the sensitivity is at least 49% and specificity is at least 89%; preferably wherein the assay comprises determining methylation β-values for each CpG in the panel of one or more CpGs, more preferably wherein the cancer is ovarian cancer.

[0061] The assay of the invention may be performed above and additionally wherein when the cancer index value for the individual is about 1.006 or more, the individual is assessed as having cancer or as having a high risk of cancer development, or wherein when the cancer index value for the individual is less than about 1.006, the individual is assessed as not having cancer or as having a low risk of cancer development, preferably wherein:
[0062] a. the panel of one or more CpGs comprises at least 500 of the CpGs identified at nucleotide positions 61 to 62 in SEQ ID NOs 1 to 14,000, and wherein the sensitivity is at least 30% and the specificity is at least 87%;
[0063] b. the panel of one or more CpGs comprises at least the CpGs defined by SEQ ID NOs 1 to 500 and identified at nucleotide positions 61 to 62, and wherein the sensitivity is at least 24% and specificity is at least 95%;
[0064] c. the panel of one or more CpGs comprises at least the CpGs defined by SEQ ID NOs 1 to 1000 and identified at nucleotide positions 61 to 62, and wherein the sensitivity is at least 22% and specificity is at least 95%; or
[0065] d. the panel of one or more CpGs comprises at least the CpGs defined by SEQ ID NOs 1 to 2000 and identified at nucleotide positions 61 to 62, and
   [0066] wherein the sensitivity is at least 25% and specificity is at least 96%; preferably wherein the assay comprises determining methylation β-values for each CpG in the panel of one or more CpGs, more preferably wherein the cancer is ovarian cancer.

[0067] The assay of the invention may be performed above and additionally wherein when the cancer index value for the individual is:
[0068] a. less than about −0.570 the individual is assessed as not having cancer;
[0069] b. about −0.570 or more and less than about −0.210 the individual is assessed as having a low risk of cancer;
[0070] c. about −0.210 or more and less than about 0.170 the individual is assessed as having a moderate risk of cancer;
[0071] d. about 0.170 or more the individual is assessed as having a high risk of cancer;
   preferably wherein the assay comprises determining methylation β-values for each CpG in the panel of one or more CpGs, more preferably wherein the cancer is ovarian cancer.

[0072] The assay of the invention may be performed above and additionally wherein the step of determining in the population of DNA molecules in the sample the methylation status of each CpG in the panel of one or more CpGs comprises:
[0073] a. performing a sequencing step to determine the sequence of each CpG;
[0074] b. hybridising DNA to an array comprising probes capable of discriminating between methylated and non-methylated forms of the CpGs and applying a detection system to the array so as to determine the methylation status of each CpG; and/or
[0075] c. performing a PCR step using methylation-specific primers, wherein the methylation status of the CpG is determined by the presence or absence of a PCR product.

[0076] The assay of the invention may be performed above and additionally wherein the step of determining the methylation status of each CpG in the panel of one or more CpGs comprises:
[0077] a. bisulphite converting the DNA; or
[0078] b. performing the steps of oxidising 5-methylcytosine bases (5mC) to 5-carboxylcytosine bases (5caC), preferably by ten-eleven translocation (TET), and/or oxidising 5-hydroxymethylcytosine bases (5hmC) to 5-carboxylcytosine bases (5caC), preferably by ten-eleven translocation (TET); followed by reducing 5-carboxylcytosine bases (5caC) to dihydrouracil bases (DHU), optionally with pyridine borane.

[0079] The invention also provides a method of treating or preventing cancer in an individual, the method comprising:
[0080] a. assessing the cancer status of the individual by assessing the presence, absence or development of cancer in the individual by performing any one of the assays of the invention;
[0081] b. administering one or more therapeutic or preventative treatments to the individual based on the assessment.

[0082] The method of the invention may be performed above and additionally wherein the individual is assessed as not having cancer or as having a low risk of cancer development, and wherein when the cancer index value is about −0.570 or more and less than about −0.210, and preferably wherein the assay comprises determining methylation β-values for each CpG in the panel of one or more CpGs, the individual is subjected to one or more treatments according to their cancer index value, wherein the one or more treatments comprise intensified screening, preferably wherein the intensified screening comprises any of:
[0083] a. a test for a BRCA1 and/or BRCA2 germline mutation;
[0084] b. a test for CA125, preferably wherein the test is repeated annually;
[0085] c. a test for cell-free tumour DNA methylation in plasma/serum, preferably wherein the test is repeated annually;
[0086] d. a test for cell-free tumour DNA methylation in vaginal fluid, preferably wherein the test is repeated annually;
[0087] e. a repeat assay according to any one of the assays of the invention, preferably wherein the repeat assay is performed about two years after the previous assay,
   preferably wherein the individual being tested by any one or more of b. to d. is post-menopausal.

[0088] The method of the invention may be performed above and additionally wherein the individual is assessed as having a moderate risk of having cancer or as having a moderate risk of cancer development, and wherein when the cancer index value is about −0.210 or more and less than about 0.170, and preferably wherein the assay comprises determining methylation β-values for each CpG in the panel of one or more CpGs, the individual is subjected to one or more treatments according to their cancer index value, wherein the one or more treatments comprise any of:
[0089] a. intensified screening, preferably wherein the intensified screening comprises one or more of:
   [0090] i. a test for a BRCA1 and/or BRCA2 germline mutation;
   [0091] ii. a test for CA125, preferably wherein the test is repeated annually;
   [0092] iii. a test for cell-free tumour DNA methylation in plasma/serum, preferably wherein the test is repeated annually;
   [0093] iv. a test for cell-free tumour DNA methylation in vaginal fluid, preferably wherein the test is repeated annually
   [0094] v. a pelvic MRI scan, preferably wherein the individual being subjected to the pelvic MRI scan is post-menopausal, and preferably wherein the scan is repeated annually;
   [0095] vi. a repeat assay according to any one of the assays of the invention, preferably wherein the repeat assay is performed about one year after the previous assay;
[0096] b. administration of one or more of Aspirin, oral contraceptive pill, selective estrogen receptor modulators (SERMS), and selective progesterone receptor modulators (SPRMs).

[0097] The method of the invention may be performed above and additionally wherein the individual is assessed as having cancer or as having a high risk of cancer development, and wherein when the cancer index value is about 0.170 or more, and preferably wherein the assay comprises determining methylation β-values for each CpG in the panel of one or more CpGs, the individual is subjected to one or more treatments according to their cancer index value, wherein the one or more treatments comprise any of:
[0098] a. intensified screening, preferably wherein the intensified screening comprises one or more of:
   [0099] i. a test for a BRCA1 and/or BRCA2 germline mutation;
   [0100] ii. a test for CA125, preferably wherein the test is repeated three-monthly;
   [0101] iii. a test for cell-free tumour DNA methylation in plasma/serum, preferably wherein the test is repeated annually;
   [0102] iv. a test for cell-free tumour DNA methylation in vaginal fluid, preferably wherein the test is repeated annually
   [0103] v. a pelvic MRI scan, preferably wherein the scan is repeated annually;
   [0104] vi. a repeat assay according to any one of the assays of the invention, preferably wherein the repeat assay is performed about one year after the previous assay;
[0105] b. administration of one or more of Aspirin, oral contraceptive pill, selective estrogen receptor modulators (SERMS), and selective progesterone receptor modulators (SPRMs); and/or
[0106] c. a total hysterectomy and bilateral salpingo-oophorectomy.

[0107] The method of the invention may be performed above and additionally wherein the one or more treatments that the individual is subjected to are repeated on a monthly, three monthly, six monthly, yearly or two yearly basis following an initial administration.

[0108] The assay of the invention may be performed above and additionally wherein:
[0109] a. the SERMs comprise Anordin, Bazedoxifene, Broparestrol, Broparestrol, Clomifene, Cyclofenil, Lasofoxifene, Ormeloxifene, Ospemifene, Raloxifene, Tamoxifen, preferably wherein the SERMs comprise Tamoxifen, Bazedoxifene and Raloxifene; and/or
[0110] b. the SPRMs comprise Mifepristone, Ulipristal, Asoprisnil, Proellex, Onapristone, Asoprisnil and Lonaprisan.

[0111] The invention additionally provides a method of monitoring the cancer status of an individual according to the individual's cancer index value, the method comprising: (a) assessing the presence, absence or development of cancer in an individual by performing the assay according to any one of the assays of the invention at a first time point; (b) assessing the presence, absence or development of cancer in the individual by performing the assay according to any one of the assays of the invention at one or more further time points; and (c) monitoring any change in the cancer status of the individual between time points.

[0112] The method of the invention may be performed above and additionally wherein the further time points are monthly, three monthly, six monthly, yearly or two yearly basis following an initial assessment.

[0113] The method of the invention may be performed above and additionally wherein depending on the cancer index value and/or cancer status of the individual, one or more treatments are administered to the individual according to any one of methods of the invention, or wherein when the cancer index value of the individual is less than about −0.570 no treatment is administered to the individual.

[0114] The method of the invention may be performed above and additionally wherein an increase in the cancer index value indicates a negative response to the one or more treatments.

[0115] The method of the invention may be performed above and additionally wherein changes are made to the one or more treatments if a negative response is identified.

[0116] The method of the invention may be performed above and additionally wherein a decrease in the cancer index value indicates a positive response to the one or more treatments.

[0117] The method of the invention may be performed above and additionally wherein changes are made to the one or more treatments if a positive response is identified.

[0118] The assay of the invention may be performed above and additionally wherein the sample is obtained from a tissue comprising epithelial cells, preferably wherein the sample is not obtained from ovarian or endometrial tissue.

[0119] The assay of the invention may be performed above and additionally wherein the sample is obtained from:
[0120] a. cervical tissue;
[0121] b. vaginal tissue;
[0122] c. cervicovaginal tissue; and/or
[0123] d. buccal tissue;
[0124] preferably wherein the sample is obtained from cervical tissue, most preferably
[0125] wherein the sample is obtained from tissue from a cervical smear.

[0126] The assay of the invention may be performed above and additionally wherein the assay is for assessing the presence, absence or development of:
[0127] a. ovarian cancer, preferably wherein the ovarian cancer is serious carcinoma, mucinous carcinoma, endometrioid carcinoma, clear cell carcinoma, low malignant potential (LMP) tumor, borderline epithelial ovarian cancer, teratoma, dysgerminoma, endodermal sinus tumor, Choriocarcinoma, granulosa-theca tumor, Sertoli-Leydig tumor, granulosa cell tumor, small cell carcinoma of the ovary or primary peritoneal carcinoma; or
[0128] b. endometrial cancer, preferably wherein the endometrial cancer is an endometriod cancer, uterine carcinosarcoma, squamous cell carcinoma, small cell carcinoma, transitional carcinoma, serous carcinoma, clear-cell carcinoma, mucinous adenocarcinoma, undifferentiated carcinoma, dedifferentiated carcinoma or serous adenocarcinoma.

[0129] The invention also provides an array capable of discriminating between methylated and non-methylated forms of CpGs; the array comprising oligonucleotide probes specific for a methylated form of each CpG in a CpG panel and oligonucleotide probes specific for a non-methylated form of each CpG in the panel; wherein the panel consists of at least 500 CpGs selected from the CpGs identified at nucleotide position 61 to 62 in SEQ ID NOs 1 to 14,000.

[0130] The array of the invention may be as above and additionally provided that the array is not an Infinium MethylationEPIC BeadChip array or an Infinium HumanMethylation450, and/or provided that the number of CpG-specific oligonucleotide probes of the array is 482,000 or less, 480,000 or less, 450,000 or less, 440,000 or less, 430,000 or less, 420,000 or less, 410,000 or less, or 400,000 or less.

[0131] The array of the invention may be performed as above and additionally wherein the panel comprises any set of CpGs defined in the assays of the invention.

[0132] The array of the invention may be as above and additionally further comprising one or more oligonucleotides comprising any set of CpGs defined in the assays of any one of the invention, wherein the one or more oligonucleotides are hybridized to corresponding oligonucleotide probes of the array.

[0133] The invention also provides a hybridized array, wherein the array is obtainable by hybridizing to an array of the invention a group of oligonucleotides comprising any panel of one or more CpGs defined in the assays of the invention.

[0134] The invention also provides a process for making the hybridized array of the invention, comprising contacting an array of the invention with a group of oligonucleotides comprising any panel of one or more CpGs defined in any one of the assays of the invention.

### BRIEF DESCRIPTION OF THE FIGURES

[0135] FIG. 1 shows training of the WID-OC-index classifiers and predictive performance of the WID-OC index, wherein optionally the WID-OC-index controls for immune cell proportion.

[0136] Distribution of p-values obtained by comparing cases and controls at each CpG site and after controlling for immune cell proportion and age (A). The distribution of different cell types in the discovery dataset inferred using the EpiDISH algorithm (* p<0.05, ** p<0.01, *** p<0.001) (B). Area under the curve (AUC) values in the internal validation set as a function of the number of CpGs used to train the classifier (C). ROC curves of the WID-OC-index in the internal validation set for samples with an immune cell (IC) proportion ≤0.5 and >0.5 (D). Distribution of the WID-OC-index with respect to immune cell proportion in the internal validation set (E). Distribution of the estimated variance in epitheilal and immune cells across all CpGs used in the WID-OC-index (F). Odds ratios corresponding to the genomic annotation of the CpGs comprising the WID-OC-index (when compared to the overall EPIC array; * p<0.05, ** p<0.01, *** p<0.001) (G). AUC values in the internal validation set after training classifiers on different subsets of the CpGs used in the WID-OC-index. The top n CpGs were either retained or removed. CpGs were also split into separate bins of size 500 (H).

[0137] FIG. 2 shows external validation of the WID-OC-index, performance of the WID-OC-index in discriminating cancer-free women and women with endometrial cancer, and association between the WID-OC-index and germline BRCA1 mutation.

[0138] The WID-OC-index versus immune cell proportion in an independent external validation set (A). ROC curve from the external validation set (B). The WID-OC-index versus immune cell proportion in a separate cohort of endometrial cancer samples and the same control samples from the internal validation set (c). ROC curve from the endometrial cancer dataset (D). The WID-OC-index versus immune cell proportion in an independent cohort of BRCA1 mutation carriers (E). ROC curve from the BRCA1 dataset (F).

[0139] FIG. 3 shows association of WID-OC-index with other clinically relevant factors.

[0140] The WID-OC-index versus age in control samples from the internal and external validation datasets (A). ROC curves for women above and below 50 years of age (B). The WID-OC-index versus a 28 SNP ovarian cancer polygeneic risk score (PRS) in the internal validation dataset (C). ROC curves for women above and below 50 years of age (D). The distribution of the WID-OC-index across different histological subtypes (E). The distribution of the WID-OC-index across different cancer grades (* p<0.05, ** p<0.01, *** p<0.001) (F).

[0141] FIG. 4 shows WID-OC-index data and its association with tumour cell fraction, known cancer markers, indicators of cell type of origin.

[0142] The estimated proportion of tumour DNA in each cervical smear sample as estimated using the EpiDISH algorithm (A). Results from real time PCR to detect ZNF154, a pan cancer marker primarily discovered in ovarian cancer (* p<0.05, ** p<0.01, *** p<0.001) (B). The WID-OC-index evaluated in eight different cell lines (C). a subset of ENCODE tissue samples. The germline mutation proportion refers to the proportion of cancers in each tissue type that have a BRCA1 or BRCA2 mutation (D and E). Top ten tissue-specific patterns enriched in hyper-methylated CpGs (F). Top ten tissue-specific patterns enriched in hypo-methylated CpGs (G).

[0143] FIG. 5 shows the experimental design underpinning the discovery and validation of the WID-OC-index.

[0144] FIG. 6 shows cell type distributions in different datasets.

[0145] Cell type distribution in the external validation set inferred using the EpiDISH algorithm (A). Cell type distribution in the endometrial cancer dataset inferred using the EpiDISH algorithm (B). Cell type distribution in the BRCA1 dataset inferred using the EpiDISH algorithm (C). Cell type distribution in the BRCA2 dataset inferred using the EpiDISH algorithm (* p<0.05, ** p<0.01, *** p<0.001) (D).

[0146] FIG. 7 shows the performance of the WID-OC-index in the discriminatory performance for assessing ovarian cancer risk of BRCA2 germline mutation carriers.

[0147] The WID-OC-index versus immune cell proportion in an independent cohort of BRCA2 mutation carriers (A). ROC curve from the BRCA2 dataset (B).

[0148] FIG. 8 shows variable association of WID-OC-index with other clinically relevant factors.

[0149] Association of the WID-OC-index with (A) family history, (B) age at menarche, (C) oral contraceptive pill (OCP) use, (D) ethnicity, (E) last period age, and (F) parity (* p<0.05, ** p<0.01, *** p<0.001).

[0150] FIG. 9 shows lack association of WID-OC-index with other technical parameters.

[0151] Distribution of the WID-OC-index among various subtypes of control samples (A). Association between the WID-OC-index and time from sample collection to DNA extraction (B).

[0152] FIG. 10 shows an evaluation of the WID-OC-index in ENCODE tissue samples. Tissue types at high risk of developing cancer in BRCA carriers are coloured red, low risk tissues are coloured blue.

[0153] FIG. 11 shows inferred tumour DNA proportion and epithelial variance, and their effects on the WID-OC index.

[0154] The proportions of epithelial and tumour DNA in each sample inferred using the EpiDISH algorithm with a reference panel of epithelial, immune, fibroblast and tumour cell types (A). An example of a CpG with a high epithelial variance and low immune cell variance (B).

[0155] FIG. 12 shows cutpoints applied to the patient data, and consequent specificity and sensitivity for cancer status discrimination achieved when these cutpoints are applied.

### DETAILED DESCRIPTION OF THE INVENTION

### Identification of CpGs

[0156] The present inventors sought to identify CpG methylation-based assays capable of assessing the presence, absence or development of cancer in an individual. Any of the assays described herein for assessing the presence, absence or development of cancer in an individual are capable of being utilised for assessing the presence, absence or development of ovarian cancer and/or endometrial cancer. The present inventors compared CpG methylation levels in non-cancerous epithelial tissue, particularly from the cervix or vagina across groups of women that were either known to be both ovarian and endometrial cancer negative, or known to be ovarian and/or endometrial cancer positive, or known to have a BRCA1 germline mutation but are as yet ovarian and endometrial cancer free. This led to the surprising establishment of a “cancer index”, used interchangeable herein with “index”, “index value”, “WID-OC-Index” or “WID-Index” (WID=women's risk identification).

[0157] A CpG as defined herein refers to the CG dinucleotide motif identified in relation to each SEQ ID NO., wherein the CG dinucleotide of interest is identified at positions 61 to 62. Thus by determining the methylation status of any panel of one or more CpGs defined by a panel of one more of SEQ ID NOs 1 to 14,000, it is meant that a determination is made as to the methylation status of the cytosine of the CG dinucleotide motif identified at positions 61 to 62 in the panel of one or more CpGs of SEQ ID NOs 1 to 14,000, accepting that variations in the sequence upstream and downstream of any given CpG, as identified at positions 61 to 62 of any given SEQ ID NO, may exist due to sequencing errors or variation between individuals.

[0158] As set out in more detail in the Examples, the methylation status of sub-selections of the 14,000 CpGs, as identified in SEQ ID NOs 1 to 14,000, may be determined in order to assess an individual for the presence, absence or development of cancer with high sensitivity and specificity. A panel of one or more of the CpGs identified in SEQ ID NOs 1 to 14,000 may be utilised to derive a cancer index for an individual in accordance with the invention described herein.

[0159] The methylation status of a panel of one or more CpGs of the 14,000 CpGs defined according to SEQ ID NOs: 1 to 14,000 may be assessed by any suitable technique. As explained in more detail in the Examples below, one particular exemplary technique which the inventors have used is an array-based analysis technique coupled with beta value analysis. SEQ ID NOs 1 to 14,000 correspond to the sequences of commercial probes utilised in said array.

### Cancer-Related CPGs for Analysis

[0160] In any of the assays described herein, in a sample which has been taken from an individual, the sample comprises a population of DNA molecules.

[0161] The assay of the invention further comprises determining in the population of DNA molecules in the sample the methylation status of a panel of one or more CpGs selected from a panel of CpGs identified at nucleotide positions 61 to 62 in SEQ ID NOs 1 to 14,000. A cancer index value is then derived based on the methylation status of the one or more CpGs in the panel, which is used to assess the presence, absence or development of cancer in the individual based on the cancer index value.

[0162] In any of the assays described herein, in DNA derived from cells in the sample the methylation status of each CpG in a panel of one or more CpGs from a panel of CpGs identified at nucleotide positions 61 to 62 in SEQ ID NOs 1 to 14,000, is determined.

[0163] In any of the assays described herein, the panel of one or more CpGs may comprise at least 500 CpGs selected from the CpGs identified at nucleotide positions 61 to 62 in SEQ ID NOs 1 to 14,000, preferably wherein the assay is characterised as having a receiver operating characteristics (ROC) area under the curve (AUC) of at least 0.67. The panel of one or more CpGs may comprise at least the CpGs identified in SEQ ID NOs 1 to 500 and identified at nucleotide positions 61 to 62, preferably wherein the assay is characterised as having an ROC AUC of at least 0.74.

[0164] In any of the assays described herein, the panel of one or more CpGs may comprise at least 1000 CpGs selected from the CpGs identified at nucleotide positions 61 to 62 in SEQ ID NOs 1 to 14,000, preferably wherein the assay is characterised as having a ROC AUC of at least 0.68. The panel of one or more CpGs may comprise at least the CpGs identified in SEQ ID NOs 1 to 1000 and identified at nucleotide positions 61 to 62, preferably wherein the assay is characterised as having a ROC AUC of at least 0.75.

[0165] In any of the assays described herein, the panel of one or more CpGs may comprise at least 2000 CpGs selected from the CpGs identified at nucleotide positions 61 to 62 in SEQ ID NOs 1 to 14,000, preferably wherein the assay is characterised as having a ROC AUC of at least 0.68. The panel of one or more CpGs may comprise at least the CpGs identified in SEQ ID NOs 1 to 2000 and identified at nucleotide positions 61 to 62, preferably wherein the assay is characterised as having a ROC AUC of at least 0.75.

[0166] In any of the assays described herein, the panel of one or more CpGs may comprise at least 10,000 CpGs selected from the CpGs identified at nucleotide positions 61 to 62 in SEQ ID NOs 1 to 14,000, preferably wherein the assay is characterised as having an AUC of at least 0.73. The panel of one or more CpGs may comprise at least the CpGs identified in SEQ ID NOs 1 to 10,000 and identified at nucleotide positions 61 to 62, preferably wherein the assay is characterised as having a ROC AUC of at least 0.78.

[0167] In any of the assays described herein, the panel of one or more CpGs may comprise at least the 14,000 CpGs identified at nucleotide positions 61 to 62 in SEQ ID NOs 1 to 14,000, and further wherein the assay is characterised as having a ROC AUC of at least 0.78.

[0168] In any of the above-described assays, the assay may be characterised as having a ROC AUC of 0.60 or more, 0.61 or more, 0.62 or more, 0.63 or more, 0.64 or more, 0.65 or more, 0.66 or more, 0.67 or more, 0.68 or more, 0.69 or more, 0.70 or more, 0.71 or more, 0.72 or more, 0.73 or more, 0.74 or more, 0.75 or more, 0.76 or more, 0.77 or more, 0.78 or more, 0.79 or more, 0.80 or more, 0.81 or more, 0.82 or more, 0.83 or more, 0.84 or more, 0.85 or more, 0.86 or more, 0.87 or more, 0.88 or more, 0.89 or more or 0.90 or more.

[0169] In any of the described assays, the methylation status of the one or more CpGs in the panel is preferably determined by a p-value analysis, and the cancer is ovarian cancer or endometrial cancer. Preferably, the cancer is ovarian cancer.

[0170] In any of the assays described herein, the panel of one or more CpGs may comprise at least 500 CpGs selected from the CpGs identified at nucleotide positions 61 to 62 in SEQ ID NOs 1 to 14,000, optionally wherein:
[0171] 1. the assay is characterised as having an ROC AUC (AUC) of at least 0.74, and more preferably wherein the panel of one or more CpGs comprises at least the CpGs identified in SEQ ID NOs 1 to 500 and identified at nucleotide positions 61 to 62;
[0172] 2. the assay is characterised as having an AUC of at least 0.74, and more preferably wherein the panel of one or more CpGs comprises at least the CpGs identified in SEQ ID NOs 501 to 1000 and identified at nucleotide positions 61 to 62;
[0173] 3. the assay is characterised as having an AUC of at least 0.74, and more preferably wherein the panel of one or more CpGs comprises at least the CpGs identified in SEQ ID NOs 1001 to 1500 and identified at nucleotide positions 61 to 62;
[0174] 4. the assay is characterised as having an AUC of at least 0.70, and more preferably wherein the panel of one or more CpGs comprises at least the CpGs identified in SEQ ID NOs 1501 to 2000 and identified at nucleotide positions 61 to 62;
[0175] 5. the assay is characterised as having an AUC of at least 0.72, and more preferably wherein the panel of one or more CpGs comprises at least the CpGs identified in SEQ ID NOs 2001 to 2500 and identified at nucleotide positions 61 to 62;
[0176] 6. the assay is characterised as having an AUC of at least 0.75, and more preferably wherein the panel of one or more CpGs comprises at least the CpGs identified in SEQ ID NOs 2501 to 3000 and identified at nucleotide positions 61 to 62;
[0177] 7. the assay is characterised as having an AUC of at least 0.74, and more preferably wherein the panel of one or more CpGs comprises at least the CpGs identified in SEQ ID NOs 3001 to 3500 and identified at nucleotide positions 61 to 62;
[0178] 8. the assay is characterised as having an AUC of at least 0.73, and more preferably wherein the panel of one or more CpGs comprises at least the CpGs identified in SEQ ID NOs 3501 to 4000 and identified at nucleotide positions 61 to 62;
[0179] 9. the assay is characterised as having an AUC of at least 0.73, and more preferably wherein the panel of one or more CpGs comprises at least the CpGs identified in SEQ ID NOs 4001 to 4500 and identified at nucleotide positions 61 to 62;
[0180] 10. the assay is characterised as having an AUC of at least 0.75, and more preferably wherein the panel of one or more CpGs comprises at least the CpGs identified in SEQ ID NOs 4501 to 5000 and identified at nucleotide positions 61 to 62;
[0181] 11. the assay is characterised as having an AUC of at least 0.73, and more preferably wherein the panel of one or more CpGs comprises at least the CpGs identified in SEQ ID NOs 5001 to 5500 and identified at nucleotide positions 61 to 62;
[0182] 12. the assay is characterised as having an AUC of at least 0.70, and more preferably wherein the panel of one or more CpGs comprises at least the CpGs identified in SEQ ID NOs 5501 to 6000 and identified at nucleotide positions 61 to 62;
[0183] 13. the assay is characterised as having an AUC of at least 0.70, and more preferably wherein the panel of one or more CpGs comprises at least the CpGs identified in SEQ ID NOs 6001 to 6500 and identified at nucleotide positions 61 to 62;
[0184] 14. the assay is characterised as having an AUC of at least 0.68, and more preferably wherein the panel of one or more CpGs comprises at least the CpGs identified in SEQ ID NOs 6501 to 7000 and identified at nucleotide positions 61 to 62;
[0185] 15. the assay is characterised as having an AUC of at least 0.73, and more preferably wherein the panel of one or more CpGs comprises at least the CpGs identified in SEQ ID NOs 7001 to 7500 and identified at nucleotide positions 61 to 62;
[0186] 16. the assay is characterised as having an AUC of at least 0.69, and more preferably wherein the panel of one or more CpGs comprises at least the CpGs identified in SEQ ID NOs 7501 to 8000 and identified at nucleotide positions 61 to 62;
[0187] 17. the assay is characterised as having an AUC of at least 0.69, and more preferably wherein the panel of one or more CpGs comprises at least the CpGs identified in SEQ ID NOs 8001 to 8500 and identified at nucleotide positions 61 to 62;
[0188] 18. the assay is characterised as having an AUC of at least 0.68, and more preferably wherein the panel of one or more CpGs comprises at least the CpGs identified in SEQ ID NOs 8501 to 9000 and identified at nucleotide positions 61 to 62;
[0189] 19. the assay is characterised as having an AUC of at least 0.66, and more preferably wherein the panel of one or more CpGs comprises at least the CpGs identified in SEQ ID NOs 9001 to 9500 and identified at nucleotide positions 61 to 62;
[0190] 20. the assay is characterised as having an AUC of at least 0.68, and more preferably wherein the panel of one or more CpGs comprises at least the CpGs identified in SEQ ID NOs 9501 to 10000 and identified at nucleotide positions 61 to 62;
[0191] 21. the assay is characterised as having an AUC of at least 0.67, and more preferably wherein the panel of one or more CpGs comprises at least the CpGs identified in SEQ ID NOs 10001 to 10500 and identified at nucleotide positions 61 to 62;
[0192] 22. the assay is characterised as having an AUC of at least 0.68, and more preferably wherein the panel of one or more CpGs comprises at least the CpGs identified in SEQ ID NOs 10501 to 11000 and identified at nucleotide positions 61 to 62;
[0193] 23. the assay is characterised as having an AUC of at least 0.65, and more preferably wherein the panel of one or more CpGs comprises at least the CpGs identified in SEQ ID NOs 11001 to 11500 and identified at nucleotide positions 61 to 62;
[0194] 24. the assay is characterised as having an AUC of at least 0.68, and more preferably wherein the panel of one or more CpGs comprises at least the CpGs identified in SEQ ID NOs 11501 to 12000 and identified at nucleotide positions 61 to 62;
[0195] 25. the assay is characterised as having an AUC of at least 0.67, and more preferably wherein the panel of one or more CpGs comprises at least the CpGs identified in SEQ ID NOs 12001 to 12500 and identified at nucleotide positions 61 to 62;
[0196] 26. the assay is characterised as having an AUC of at least 0.67, and more preferably wherein the panel of one or more CpGs comprises at least the CpGs identified in SEQ ID NOs 12501 to 13000 and identified at nucleotide positions 61 to 62;
[0197] 27. the assay is characterised as having an AUC of at least 0.66, and more preferably wherein the panel of one or more CpGs comprises at least the CpGs identified in SEQ ID NOs 13001 to 13500 and identified at nucleotide positions 61 to 62; or
[0198] 28. the assay is characterised as having an AUC of at least 0.67, and more preferably wherein the panel of one or more CpGs comprises at least the CpGs identified in SEQ ID NOs 13001 to 14000 and identified at nucleotide positions 61 to 62.

[0199] In any of the described assays, the methylation status of the one or more CpGs in the panel is preferably determined by a p-value analysis, and the cancer is ovarian cancer or endometrial cancer. Preferably, the cancer is ovarian cancer.

[0200] In any of the above-described assays, the assay may be characterised as having a ROC AUC of 0.60 or more, 0.61 or more, 0.62 or more, 0.63 or more, 0.64 or more, 0.65 or more, 0.66 or more, 0.67 or more, 0.68 or more, 0.69 or more, 0.70 or more, 0.71 or more, 0.72 or more, 0.73 or more, 0.74 or more, 0.75 or more, 0.76 or more, 0.77 or more, 0.78 or more, 0.79 or more, 0.80 or more, 0.81 or more, 0.82 or more, 0.83 or more, 0.84 or more, 0.85 or more, 0.86 or more, 0.87 or more, 0.88 or more, 0.89 or more or 0.90 or more.

[0201] In any of the assays described herein, the panel of one or more CpGs may comprise:
[0202] 1. at least 100 CpGs selected from the CpGs identified at nucleotide positions 61 to 62 in SEQ ID NOs 1 to 14,000, preferably wherein the assay is characterised as having an AUC of at least 0.69, and more preferably wherein the panel of one or more CpGs comprises at least the CpGs identified in SEQ ID NOs 1 to 100 and identified at nucleotide positions 61 to 62;
[0203] 2. at least 500 CpGs selected from the CpGs identified at nucleotide positions 61 to 62 in SEQ ID NOs 1 to 14,000, preferably wherein the assay is characterised as having an AUC of at least 0.74, and more preferably wherein the panel of one or more CpGs comprises at least the CpGs identified in SEQ ID NOs 1 to 500 and identified at nucleotide positions 61 to 62;
[0204] 3. at least 1000 CpGs selected from the CpGs identified at nucleotide positions 61 to 62 in SEQ ID NOs 1 to 14,000, preferably wherein the assay is characterised as having an AUC of at least 0.75, and more preferably wherein the panel of one or more CpGs comprises at least the CpGs identified in SEQ ID NOs 1 to 1000 and identified at nucleotide positions 61 to 62;
[0205] 4. at least 2000 CpGs selected from the CpGs identified at nucleotide positions 61 to 62 in SEQ ID NOs 1 to 14,000, preferably wherein the assay is characterised as having an AUC of at least 0.75, and more preferably wherein the panel of one or more CpGs comprises at least the CpGs identified in SEQ ID NOs 1 to 2000 and identified at nucleotide positions 61 to 62;
[0206] 5. at least 3000 CpGs selected from the CpGs identified at nucleotide positions 61 to 62 in SEQ ID NOs 1 to 14,000, preferably wherein the assay is characterised as having an AUC of at least 0.76, and more preferably wherein the panel of one or more CpGs comprises at least the CpGs identified in SEQ ID NOs 1 to 3000 and identified at nucleotide positions 61 to 62;
[0207] 6. at least 4000 CpGs selected from the CpGs identified at nucleotide positions 61 to 62 in SEQ ID NOs 1 to 14,000, preferably wherein the assay is characterised as having an AUC of at least 0.77, and more preferably wherein the panel of one or more CpGs comprises at least the CpGs identified in SEQ ID NOs 1 to 4000 and identified at nucleotide positions 61 to 62;
[0208] 7. at least 5000 CpGs selected from the CpGs identified at nucleotide positions 61 to 62 in SEQ ID NOs 1 to 14,000, preferably wherein the assay is characterised as having an AUC of at least 0.78, and more preferably wherein the panel of one or more CpGs comprises at least the CpGs identified in SEQ ID NOs 1 to 5000 and identified at nucleotide positions 61 to 62;
[0209] 8. at least 6000 CpGs selected from the CpGs identified at nucleotide positions 61 to 62 in SEQ ID NOs 1 to 14,000, preferably wherein the assay is characterised as having an AUC of at least 0.78, and more preferably wherein the panel of one or more CpGs comprises at least the CpGs identified in SEQ ID NOs 1 to 6000 and identified at nucleotide positions 61 to 62;
[0210] 9. at least 7000 CpGs selected from the CpGs identified at nucleotide positions 61 to 62 in SEQ ID NOs 1 to 14,000, preferably wherein the assay is characterised as having an AUC of at least 0.78, and more preferably wherein the panel of one or more CpGs comprises at least the CpGs identified in SEQ ID NOs 1 to 7000 and identified at nucleotide positions 61 to 62;
[0211] 10. at least 8000 CpGs selected from the CpGs identified at nucleotide positions 61 to 62 in SEQ ID NOs 1 to 14,000, preferably wherein the assay is characterised as having an AUC of at least 0.78, and more preferably wherein the panel of one or more CpGs comprises at least the CpGs identified in SEQ ID NOs 1 to 8000 and identified at nucleotide positions 61 to 62;
[0212] 11. at least 9000 CpGs selected from the CpGs identified at nucleotide positions 61 to 62 in SEQ ID NOs 1 to 14,000, preferably wherein the assay is characterised as having an AUC of at least 0.78, and more preferably wherein the panel of one or more CpGs comprises at least the CpGs identified in SEQ ID NOs 1 to 9000 and identified at nucleotide positions 61 to 62;
[0213] 12. at least 10000 CpGs selected from the CpGs identified at nucleotide positions 61 to 62 in SEQ ID NOs 1 to 14,000, preferably wherein the assay is characterised as having an AUC of at least 0.78, and more preferably wherein the panel of one or more CpGs comprises at least the CpGs identified in SEQ ID NOs 1 to 10000 and identified at nucleotide positions 61 to 62;
[0214] 13. at least 11000 CpGs selected from the CpGs identified at nucleotide positions 61 to 62 in SEQ ID NOs 1 to 14,000, preferably wherein the assay is characterised as having an AUC of at least 0.78, and more preferably wherein the panel of one or more CpGs comprises at least the CpGs identified in SEQ ID NOs 1 to 11000 and identified at nucleotide positions 61 to 62;
[0215] 14. at least 12000 CpGs selected from the CpGs identified at nucleotide positions 61 to 62 in SEQ ID NOs 1 to 14,000, preferably wherein the assay is characterised as having an AUC of at least 0.78, and more preferably wherein the panel of one or more CpGs comprises at least the CpGs identified in SEQ ID NOs 1 to 12000 and identified at nucleotide positions 61 to 62;
[0216] 15. at least 13000 CpGs selected from the CpGs identified at nucleotide positions 61 to 62 in SEQ ID NOs 1 to 14,000, preferably wherein the assay is characterised as having an AUC of at least 0.78, and more preferably wherein the panel of one or more CpGs comprises at least the CpGs identified in SEQ ID NOs 1 to 13000 and identified at nucleotide positions 61 to 62; or
[0217] 16. at least 14000 CpGs selected from the CpGs identified at nucleotide positions 61 to 62 in SEQ ID NOs 1 to 14,000, preferably wherein the assay is characterised as having an AUC of at least 0.78, and more preferably wherein the panel of one or more CpGs comprises at least the CpGs identified in SEQ ID NOs 1 to 14000 and identified at nucleotide positions 61 to 62.

[0218] In any of the described assays, the methylation status of the one or more CpGs in the panel is preferably determined by a p-value analysis, and the cancer is ovarian cancer or endometrial cancer. Preferably, the cancer is ovarian cancer.

[0219] In any of the above-described assays, the assay may be characterised as having a ROC AUC of 0.60 or more, 0.61 or more, 0.62 or more, 0.63 or more, 0.64 or more, 0.65 or more, 0.66 or more, 0.67 or more, 0.68 or more, 0.69 or more, 0.70 or more, 0.71 or more, 0.72 or more, 0.73 or more, 0.74 or more, 0.75 or more, 0.76 or more, 0.77 or more, 0.78 or more, 0.79 or more, 0.80 or more, 0.81 or more, 0.82 or more, 0.83 or more, 0.84 or more, 0.85 or more, 0.86 or more, 0.87 or more, 0.88 or more, 0.89 or more or 0.90 or more.

[0220] In any of the assays described herein, the panel of one or more CpGs may comprise:
[0221] 1. at least 1000 CpGs selected from the CpGs identified at nucleotide positions 61 to 62 in SEQ ID NOs 1 to 14,000, preferably wherein the assay is characterised as having an AUC of at least 0.68, and more preferably wherein the panel of one or more CpGs comprises at least the CpGs identified in SEQ ID NOs 13,001 to 14,000 and identified at nucleotide positions 61 to 62;
[0222] 2. at least 2000 CpGs selected from the CpGs identified at nucleotide positions 61 to 62 in SEQ ID NOs 1 to 14,000, preferably wherein the assay is characterised as having an AUC of at least 0.68, and more preferably wherein the panel of one or more CpGs comprises at least the CpGs identified in SEQ ID NOs 12,001 to 14,000 and identified at nucleotide positions 61 to 62;
[0223] 3. at least 3000 CpGs selected from the CpGs identified at nucleotide positions 61 to 62 in SEQ ID NOs 1 to 14,000, preferably wherein the assay is characterised as having an AUC of at least 0.66, and more preferably wherein the panel of one or more CpGs comprises at least the CpGs identified in SEQ ID NOs 11,001 to 14,000 and identified at nucleotide positions 61 to 62;
[0224] 4. at least 4000 CpGs selected from the CpGs identified at nucleotide positions 61 to 62 in SEQ ID NOs 1 to 14,000, preferably wherein the assay is characterised as having an AUC of at least 0.67, and more preferably wherein the panel of one or more CpGs comprises at least the CpGs identified in SEQ ID NOs 10,001 to 14,000 and identified at nucleotide positions 61 to 62;
[0225] 5. at least 5000 CpGs selected from the CpGs identified at nucleotide positions 61 to 62 in SEQ ID NOs 1 to 14,000, preferably wherein the assay is characterised as having an AUC of at least 0.67, and more preferably wherein the panel of one or more CpGs comprises at least the CpGs identified in SEQ ID NOs 9,001 to 14,000 and identified at nucleotide positions 61 to 62;
[0226] 6. at least 6000 CpGs selected from the CpGs identified at nucleotide positions 61 to 62 in SEQ ID NOs 1 to 14,000, preferably wherein the assay is characterised as having an AUC of at least 0.67, and more preferably wherein the panel of one or more CpGs comprises at least the CpGs identified in SEQ ID NOs 8,001 to 14,000 and identified at nucleotide positions 61 to 62;
[0227] 7. at least 7000 CpGs selected from the CpGs identified at nucleotide positions 61 to 62 in SEQ ID NOs 1 to 14,000, preferably wherein the assay is characterised as having an AUC of at least 0.67, and more preferably wherein the panel of one or more CpGs comprises at least the CpGs identified in SEQ ID NOs 7,001 to 14,000 and identified at nucleotide positions 61 to 62;
[0228] 8. at least 8000 CpGs selected from the CpGs identified at nucleotide positions 61 to 62 in SEQ ID NOs 1 to 14,000, preferably wherein the assay is characterised as having an AUC of at least 0.68, and more preferably wherein the panel of one or more CpGs comprises at least the CpGs identified in SEQ ID NOs 6,001 to 14,000 and identified at nucleotide positions 61 to 62;
[0229] 9. at least 9000 CpGs selected from the CpGs identified at nucleotide positions 61 to 62 in SEQ ID NOs 1 to 14,000, preferably wherein the assay is characterised as having an AUC of at least 0.69, and more preferably wherein the panel of one or more CpGs comprises at least the CpGs identified in SEQ ID NOs 5,001 to 14,000 and identified at nucleotide positions 61 to 62;
[0230] 10. at least 10000 CpGs selected from the CpGs identified at nucleotide positions 61 to 62 in SEQ ID NOs 1 to 14,000, preferably wherein the assay is characterised as having an AUC of at least 0.7, and more preferably wherein the panel of one or more CpGs comprises at least the CpGs identified in SEQ ID NOs 4,001 to 14,000 and identified at nucleotide positions 61 to 62;
[0231] 11. at least 11000 CpGs selected from the CpGs identified at nucleotide positions 61 to 62 in SEQ ID NOs 1 to 14,000, preferably wherein the assay is characterised as having an AUC of at least 0.72, and more preferably wherein the panel of one or more CpGs comprises at least the CpGs identified in SEQ ID NOs 3,001 to 14,000 and identified at nucleotide positions 61 to 62;
[0232] 12. at least 12000 CpGs selected from the CpGs identified at nucleotide positions 61 to 62 in SEQ ID NOs 1 to 14,000, preferably wherein the assay is characterised as having an AUC of at least 0.73, and more preferably wherein the panel of one or more CpGs comprises at least the CpGs identified in SEQ ID NOs 2,001 to 14,000 and identified at nucleotide positions 61 to 62;
[0233] 13. at least 13000 CpGs selected from the CpGs identified at nucleotide positions 61 to 62 in SEQ ID NOs 1 to 14,000, preferably wherein the assay is characterised as having an AUC of at least 0.75, and more preferably wherein the panel of one or more CpGs comprises at least the CpGs identified in SEQ ID NOs 1,001 to 14,000 and identified at nucleotide positions 61 to 62;
[0234] 14. at least 13500 CpGs selected from the CpGs identified at nucleotide positions 61 to 62 in SEQ ID NOs 1 to 14,000, preferably wherein the assay is characterised as having an AUC of at least 0.75, and more preferably wherein the panel of one or more CpGs comprises at least the CpGs identified in SEQ ID NOs 501 to 14,000 and identified at nucleotide positions 61 to 62;
[0235] 15. at least 13900 CpGs selected from the CpGs identified at nucleotide positions 61 to 62 in SEQ ID NOs 1 to 14,000, preferably wherein the assay is characterised as having an AUC of at least 0.77, and more preferably wherein the panel of one or more CpGs comprises at least the CpGs identified in SEQ ID NOs 101 to 14,000 and identified at nucleotide positions 61 to 62; or
[0236] 16. at least 14000 CpGs selected from the CpGs identified at nucleotide positions 61 to 62 in SEQ ID NOs 1 to 14,000, preferably wherein the assay is characterised as having an AUC of at least 0.78, and more preferably wherein the panel of one or more CpGs comprises at least the CpGs identified at nucleotide positions 61 to 62 in SEQ ID NOs 1 to 14,000.

[0237] In any of the described assays, the methylation status of the one or more CpGs in the panel is preferably determined by a p-value analysis, and the cancer is ovarian cancer or endometrial cancer. Preferably, the cancer is ovarian cancer.

[0238] In any of the above-described assays, the assay may be characterised as having a ROC AUC of 0.60 or more, 0.61 or more, 0.62 or more, 0.63 or more, 0.64 or more, 0.65 or more, 0.66 or more, 0.67 or more, 0.68 or more, 0.69 or more, 0.70 or more, 0.71 or more, 0.72 or more, 0.73 or more, 0.74 or more, 0.75 or more, 0.76 or more, 0.77 or more, 0.78 or more, 0.79 or more, 0.80 or more, 0.81 or more, 0.82 or more, 0.83 or more, 0.84 or more, 0.85 or more, 0.86 or more, 0.87 or more, 0.88 or more, 0.89 or more or 0.90 or more.

[0239] The invention also provides a variety of assays, each comprising any 1, 2, 3, 4, 5, 6, 7, 8, 9, 10 or more (or any range derivable therein) of a variety of steps and in no particular order, including methods of the following: measuring in a sample; analyzing a sample; assessing a sample; evaluating a sample; measuring nucleic acids in a sample; assessing nucleic acids in a sample; detecting nucleic acids in a sample; measuring methylation in nucleic acids in a sample; analyzing nucleic acids in a sample; assessing nucleic acids in a sample; measuring methylation at one or more CpG dinucleotides in a sample; detecting methylation at one or more CpG dinucleotides in a sample; assaying methylation at one or more CpG dinucleotides in a sample; assessing methylation at one or more CpG dinucleotides in a sample; measuring a methylation status in a sample; assaying a methylation status in a sample; detecting methylation status in a sample; determining methylation status in a sample; identifying methylation status in a sample; measuring one or more DNA methylation markers in a sample; assessing one or more DNA methylation markers in a sample; detecting one or more DNA methylation markers in a sample; measuring the presence of methylation at one or more markers in a sample; detecting the presence of methylation at one or more markers in a sample; assessing the presence of methylation at one or more markers in a sample; assaying the presence of one of more markers in a sample; measuring one or more DNA methylation markers in a sample but excluding the measuring of one or more other DNA methylation markers in the sample; assessing one or more DNA methylation markers in a sample but excluding the assessing of one or more other DNA methylation markers in the sample; analyzing one or more DNA methylation markers in a sample but excluding the analyzing of one or more other DNA methylation markers in the sample; detecting one or more DNA methylation markers in a sample but excluding the detecting of one or more other DNA methylation markers in the sample; measuring methylation status in nucleic acids from a sample from tissue from an individual other than tissue from the individual suspected of, or at risk for, being cancerous; detecting methylation status in nucleic acids from a sample from tissue from an individual other than tissue from the individual suspected of, or at risk for, being cancerous; analyzing methylation status in nucleic acids from a sample from tissue from an individual other than tissue from the individual suspected of, or at risk for, being cancerous; assessing methylation status in nucleic acids from a sample from tissue from an individual other than tissue from the individual suspected of, or at risk for, being cancerous; measuring methylation at one or more CpG dinucleotides in a sample but excluding the measuring of methylation at one or more CpG dinucleotides in the sample; assessing methylation at one or more CpG dinucleotides in a sample but excluding the assessing of methylation at one or more CpG dinucleotides in the sample; analyzing methylation at one or more CpG dinucleotides in a sample but excluding the analyzing of methylation at one or more CpG dinucleotides in the sample; detecting methylation at one or more CpG dinucleotides in a sample but excluding the detecting of methylation at one or more CpG dinucleotides in the sample; measuring methylation at one or more CpG dinucleotides in nucleic acids from a sample from tissue from an individual other than tissue from the individual suspected of, or at risk for, being cancerous; detecting methylation at one or more CpG dinucleotides in nucleic acids from a sample from tissue from an individual other than tissue from the individual suspected of, or at risk for, being cancerous; analyzing methylation at one or more CpG dinucleotides in nucleic acids from a sample from tissue from an individual other than tissue from the individual suspected of, or at risk for, being cancerous; assessing methylation at one or more CpG dinucleotides in nucleic acids from a sample from tissue from an individual other than tissue from the individual suspected of, or at risk for, being cancerous; treating an individual for cancer when the individual has been determined to have a methylation status at one or more methylation markers; treating an individual for cancer when the individual has been determined to have methylation at one or more CpG dinucleotides;
[0240] wherein any of the aforementioned methods, or any other methods encompassed by the disclosure, may comprise any one or more of the following method steps:
[0241] measuring methylation status, wherein the measuring identifies the methylation status of one or markers from nucleic acids in a sample;
[0242] measuring methylation status, wherein the measuring identifies the presence of one or more markers from nucleic acids in a sample;
[0243] measuring the presence of one or more methylation markers from a sample;
[0244] providing DNA from a sample;
[0245] providing nucleic acids from a sample;
[0246] determining whether one or more methylation markers from nucleic acids from a sample are methylated;
[0247] measuring whether one or more methylation markers from nucleic acids from a sample are methylated;
[0248] performing a sequencing step on nucleic acids from a sample;
[0249] determining a sequence of nucleic acids from a sample;
[0250] performing bisulphite conversion on one or more markers;
[0251] performing bisulphite conversion on one or more CpG dinucleotides;
[0252] hybridizing DNA to an array comprising probes capable of determining methylated versus non-methylated markers;
[0253] hybridizing DNA to an array comprising probes capable of determining methylated versus non-methylated CpG dinucleotides;
[0254] hybridizing DNA to an array comprising probes capable of discriminating between methylated and non-methylated markers;
[0255] hybridizing DNA to an array comprising probes capable of discriminating between methylated and non-methylated CpG dinucleotides;
[0256] performing an amplification step on sequence from nucleic acids from a sample;
[0257] performing an amplification step on sequence from nucleic acids using methylation-specific primers;
[0258] performing amplification of sequence comprising one or more regions suspected of having methylation or in need of determination of a methylation status;
[0259] performing PCR on sequence comprising one or more regions suspected of having methylation or in need of determination of a methylation status;
[0260] performing a capturing step;
[0261] performing a binding step;
[0262] performing a purification step;
[0263] performing a capturing step comprising binding of polynucleotides comprising one or more methylation markers to binding molecules specific to the one or more methylation markers and collecting complexes thereof,
[0264] stratifying the grade of a cancer;
[0265] determining the risk of cancer;
[0266] determining the risk of recurrence of cancer;
[0267] obtaining a sample from an individual;
[0268] obtaining DNA from a sample from an individual;
[0269] administering a treatment to an individual;
[0270] providing DNA from a sample;
[0271] determining whether one or more methylation markers from a panel of methylation markers comprises a specific sequence; and/or
[0272] obtaining data that identifies whether each one of a group of methylation markers from a panel comprises a specific sequence.

[0273] Moreover, in some aspects of the invention, an individual who is administered a therapy or treatment has been subjected to any of the methods and steps described herein.

[0274] Described herein are assays that utilise a statistically robust panel of one or more CpGs whose methylation status can be determined to provide a reliable prediction of the presence or development of cancer in an individual. By determining the methylation status of each CpG within the panel of one or more CpGs, a cancer index value may be derived thus enabling stratification of individuals according to their risk of developing cancer or of having cancer, particularly ovarian and/or endometrial cancer, with statistically robust sensitivity and specificity. The skilled person would understand that the methylation status of each CpG within a panel of one or more CpGs can be determined by any suitable means in order to thereby derive the cancer index value. Any one method, or a combination of methods, may be used to determine the methylation status of each CpG within a panel of one or more CpGs.

[0275] Various exemplary methods for determining the methylation status of each CpG within a panel of one or more CpGs are described herein. For example, in one method a percent methylated reference (PMR) value of a CpG may be determined. In another method the methylation β-values of a CpG may be determined. Different mechanisms may be employed to determine specific values depending on the circumstances, such as PCR-based mechanisms or array-based mechanisms.

### Cancer Index Values as Diagnostic and Risk Assessment Tools

[0276] In any of the assays described herein, the assessment of the presence, absence or development of cancer in an individual is based on the cancer index value of the individual at the time of testing.

[0277] As explained herein, using panels of the specific CpGs disclosed herein, cancer index values can be established which correspond with cancer negative samples, because they are based on values derived from individuals known to be cancer negative and obtained from samples from an anatomical site other than the ovary or endometrium, such as from the cervix, vagina, buccal area, blood and/or urine, particularly from a liquid-based cytology sample, and more preferably a cervical smear sample. Similarly, using panels of the specific CpGs disclosed herein, cancer index values can be established which correspond with cancer positive samples, because they are based on values derived from an anatomical site other than the ovary or endometrium, as noted above, from tissue samples from individuals known to be cancer positive. A user can then apply these cancer index values to assess the presence, absence or development of cancer in any test individual whose cancer status is required to be tested. As also explained herein, the assays of the invention are capable of being performed with a high degree of statistical accuracy.

[0278] As explained herein, the described assays particularly relate to the assessment of the presence, absence or development of ovarian cancer and/or endometrial cancer.

[0279] A skilled person will readily appreciate that a cancer index value provides a value that indicates a “likelihood” or “risk” or “prediction” of any of the assays of the invention correctly assessing the presence, absence or development of cancer in an individual. This is because the assessment is based upon a correlation between DNA methylation profiles of tissue samples and individual disease status. Nevertheless, as demonstrated by data set out in the Examples and elsewhere herein, the assays of the invention provide such correlations with high statistical accuracy, thus providing the skilled person with a high degree of confidence that the cancer index value which is determined for any test individual whose cancer status is required to be tested will provide an accurate correlation with actual disease status for the individual.

[0280] In the context of the present invention, “likelihood”, “risk” and “prediction” may be used synonymously with each other.

[0281] Any references herein to sequences, genomic sequences and/or genomic coordinates are derived based upon Homo sapiens (human) genome assembly GRCh37 (hg19). The skilled person would understand variations in the nucleotide sequences of any given sequence, may exist due to sequencing errors and/or variation between individuals.

[0282] The assay of the invention represents a ‘prediction’ because any cancer index value (WID-OC-Index) derived in accordance with the invention is unlikely to be capable of diagnosing every individual as having or not having cancer with 100% specificity and 100% sensitivity. Rather, depending on the cancer index cutpoint threshold applied by the user for positively predicting the presence of cancer in an individual, the false positive and false negative rate will vary. In other words, the inventors have discovered that the assays of the invention can achieve variable levels of sensitivity and specificity for predicting the presence, absence or development of cancer, as defined by receiver operating characteristics, depending on the cancer index cutpoint threshold chosen and applied by the user. Such sensitivity and specificity can be seen from the data disclosed herein to be achievable at high proportions, demonstrating accurate and statistically-significant discriminatory capability.

[0283] Similarly, cancer index values which have been pre-determined to correlate with specific cancer phenotypes, such as the presence or absence of cancer, have been defined with a high level of statistical accuracy as explained further herein.

[0284] Assessing the ‘development’ of cancer in the context of the invention may refer to assessing whether an individual is likely or unlikely to develop cancer. The inventors have shown that the CpGs assayed in order to derive the cancer index value of the assays of the invention are representative of the cells within normal tissue from an anatomical site other than the ovary or endometrium, such as from the cervix, vagina, buccal area, blood and/or urine, particularly from a liquid-based cytology sample, and more preferably a cervical smear sample. As such, cells from these tissues can act as a surrogate for ovarian and/or endometrial cells that may transform to cancer. In more detail, the cancer index value derived in accordance with the present invention has been show to progressively increase in samples from normal epithelial cells derived from the cervix, vagina, buccal area, blood and/or urine, preferably a cervical liquid-based cytology sample, and more preferably a cervical smear sample, in healthy women, to samples from corresponding tissue in women with a low grade ovarian cancer lesion such as a mucinous ovarian cancer, to samples from corresponding tissue in women with a high grade ovarian cancer lesion such as a serous ovarian cancer. Thus, assessing the development of cancer in accordance with the assays of the invention may refer to assessing an increased or decreased likelihood of cancer development, particularly ovarian cancer and endometrial cancer, preferably ovarian cancer. Assessing of the development of cancer in accordance with the assays of the invention may refer to assessing progression or worsening of a pre-existing cancer lesion in an individual. Assessment of the development of cancer in accordance with the assays of the invention may refer to predicting the likelihood of recurrence of cancer.

[0285] In any of the assays described herein, the step of assessing the presence or development of cancer in an individual based on a cancer index value may involve the application of a threshold value. Threshold values can provide a risk-based indication of an individual's cancer status, whether that is cancer positive, or cancer negative. Threshold values can also provide a means for identifying whether the cancer index value is intermediate between a cancer positive value and a cancer negative value. As explained herein, the cancer index value may be dynamic and subject to change depending upon genetic and/or environmental factors. Accordingly, the cancer index value may provide a means for assessing and monitoring cancer development. Cancer index values may therefore indicate at least a low risk or a high risk that the individual has a cancer positive status or has a status that is indicative of the development of cancer. If the cancer index value of an individual is determined by the assays of the invention at two or more time points, an increase or decrease in the individual's cancer index value may indicate an increased or decreased risk of the individual having or developing cancer, particularly ovarian and/or endometrial cancer, most preferably ovarian cancer.

[0286] Throughout the disclosure herein the terms “threshold value”, “cutpoint”, and “cutpoint threshold” are to be considered synonymous and interchangeable.

[0287] As explained further herein any assay of the invention is an assay for assessing the presence, absence or development of cancer in an individual. The types of cancer are set out further herein. As explained further herein, the assays of the invention provide means for assessing whether an individual is at risk of having or developing cancer based on specific cutpoint thresholds. Such risk assessments can be provided with a high degree of confidence based on the statistical parameters which characterise the assay. Thus in any of the assays described herein involving cancer index cutpoint thresholds, the cutpoint threshold may be used for risk assessment purposes. Equally, in any of the assays described herein involving cancer index cutpoint thresholds, the cutpoint threshold value may be used to specify whether or not an individual has cancer as a pure diagnostic test. Again, such diagnostic tests can be provided with a high degree of confidence based on the statistical parameters which characterise the assay. Accordingly, in any assay described herein which specifies that a cancer index value for the individual is a specific value or more, or is “about” a specific value or more, the individual may be assessed as having cancer. In any assay described herein which specifies that a cancer index value for the individual is less than a specific value, or is less than “about” a specific value, the individual may be assessed as not having cancer. The term “about” is to be understood as providing a range of +/−5% of the value.

[0288] Accordingly, any assay of the invention is an assay for assessing the presence, absence or development of cancer in an individual, the assay comprising:
[0289] e. providing a sample which has been taken from the individual, the sample comprising a population of DNA molecules;
[0290] f. determining in the population of DNA molecules in the sample the methylation status of a panel of one or more CpGs selected from a panel of CpGs identified at nucleotide positions 61 to 62 in SEQ ID NOs 1 to 14,000;
[0291] g. deriving a cancer index value based on the methylation status of the one or more CpGs in the panel; and
[0292] h. assessing the presence, absence or development of cancer in the individual based on the cancer index value;
[0293] wherein the assay is characterised as having an area under the curve (AUC) of 0.60 or more as determined by receiver operating characteristics (ROC).

[0294] Such an assay may be performed in accordance with any of the methods disclosed and defined herein.

[0295] As explained further herein, any assay of the invention for assessing the presence, absence or development of cancer in an individual may alternatively be referred to as an assay for stratifying an individual in accordance with their cancer status.

[0296] Accordingly, any assay of the invention is an assay for stratifying an individual for the presence, absence or development of cancer in an individual, the assay comprising:
[0297] a. providing a sample which has been taken from the individual, the sample comprising a population of DNA molecules;
[0298] b. determining in the population of DNA molecules in the sample the methylation status of a panel of one or more CpGs selected from a panel of CpGs identified at nucleotide positions 61 to 62 in SEQ ID NOs 1 to 14,000;
[0299] c. deriving a cancer index value based on the methylation status of the one or more CpGs in the panel; and
[0300] d. stratifying the individual for the presence, absence or development of cancer based on the cancer index value;
[0301] wherein the assay is characterised as having an area under the curve (AUC) of 0.60 or more as determined by receiver operating characteristics (ROC).

[0302] Such an assay may be performed in accordance with any of the methods disclosed and defined herein.

[0303] Accordingly, any assay of the invention is an assay for stratifying an individual for cancer, the assay comprising:
[0304] a. providing a sample which has been taken from the individual, the sample comprising a population of DNA molecules;
[0305] b. determining in the population of DNA molecules in the sample the methylation status of a panel of one or more CpGs selected from a panel of CpGs identified at nucleotide positions 61 to 62 in SEQ ID NOs 1 to 14,000;
[0306] c. deriving a cancer index value based on the methylation status of the one or more CpGs in the panel; and
[0307] d. stratifying the individual for cancer based on the cancer index value;
[0308] wherein the assay is characterised as having an area under the curve (AUC) of 0.60 or more as determined by receiver operating characteristics (ROC).

[0309] Such an assay may be performed in accordance with any of the methods disclosed and defined herein.

[0310] The cancer index value may be derived by any suitable means. Preferably, the cancer index value may be derived by assessing the methylation status of the one or more CpGs in the panel selected from a panel of CpGs identified at nucleotide positions 61 to 62 in SEQ ID NOs 1 to 14,000, in a sample provided from an individual. The methylation status of the CpGs may be determined by any suitable means. For example, in any of the assays described herein the step of determining the methylation status of each CpG in the panel of one or more CpGs may comprise:
[0311] a. performing a sequencing step to determine the sequence of each CpG;
[0312] b. hybridising DNA to an array comprising probes capable of discriminating between methylated and non-methylated forms of the CpGs and applying a detection system to the array so as to determine the methylation status of each CpG; and/or
[0313] c. performing a PCR step using methylation-specific primers, wherein the methylation status of the CpG is determined by the presence or absence of a PCR product.

[0314] Preferably, the the step of determining in the population of DNA molecules in the sample the methylation status of a panel of one or more CpGs further comprises determining a β value of each CpG. Deriving the cancer index value may involve providing a methylation β-value data set comprising the methylation β-values for each CpG in the panel of one or more CpGs. Optionally deriving the cancer index value may also involve estimating the fraction of contaminating DNA within the DNA provided from a sample.

[0315] DNA may be DNA originating from a particular source organism, tissue or cell type. Preferably the contaminating DNA originates from one or more different cell types to one or more cell types of interest. A cell type of interest may particularly be an epithelial cell. In some aspects of the invention, it may be preferable to estimate the fraction of contaminating DNA after the step of providing a sample which has been take from an individual. The assays described herein may optionally involve estimating a contaminating DNA fraction within DNA in the sample by any suitable means. Preferably, the contaminating DNA fraction for the sample is estimated via any suitable bioinformatics analysis tool. A bioinformatics analysis tool that may be used to estimate a contaminating DNA fraction may be EpIDISH. As described herein, it may be desirable to estimate the fraction of contaminating DNA from the one or more cell types that are different to the one or more cell types of interest because the cancer index value used for predicting the presence or development of cancer in an individual may, in some instances, only be reliably derived from determining the methylation status of a set of CpGs from DNA of a particular cell type of interest. Particularly, methylation status beta-values may differ in the one or more cell types of interest within a sample relative to methylation status beta-values in contaminating DNA from different cell types within the same sample. Thus, the derived cancer index value may in some instances have a decreased predictive power without estimating and controlling for the contaminating DNA fraction within the DNA provided from the sample. In assays of the invention that involve estimating the fraction of contaminating DNA and accordingly controlling for said contaminating DNA, it is preferable to estimate an immune cell DNA fraction within the DNA provided from the sample. In particular assays of the invention, wherein the individual has an immune cell contamination of over 50% (i.e. wherein more than 50% of the DNA in the sample is deemed to be derived from immune cells), the assay may preferably involve controlling for the immune cell contamination by deriving the cancer index, in accordance with the invention, solely from the DNA molecules derived from epithelial cells.

[0316] Any of the assays described herein comprising a step of deriving a cancer index value based on the methylation status of the one or more CpGs in the panel may further comprise applying an algorithm to the methylation beta-value dataset to obtain the cancer index value. Preferably, in any of the assays described herein, the step of deriving the cancer index value based on the methylation status of the panel of CpGs comprises providing a methylation beta-value data set comprising the methylation beta-values for each CpG in the panel and applying an algorithm to the methylation beta-value data set to obtain the cancer index value.

[0317] In any of the assays described herein, the step of deriving the cancer index value based on the methylation status of the one or more CpGs in the panel comprises:
[0318] a. providing a methylation j-value data set comprising the methylation β-values for each CpG in the panel;
[0319] b. providing a mathematical model capable of generating the cancer index from the methylation β-value data set; and
[0320] c. applying the mathematical model to the methylation β-value data set, thereby generating the cancer index.

[0321] In any of the assays described herein, the cancer index value may be calculated by any suitable mathematical model such as an algorithm or formula. Preferably, the cancer index value is termed Women's risk Identification for Ovarian Cancer Index (WID-OC-index) and wherein the mathematical model which is applied to the methylation β-value data set to generate the cancer index is calculated by an algorithm according to the following formula:

$$\\ WID - OC - index = {\sum }_{i = 1}^{n} \frac{{w}_{i} {β}_{i} - μ}{σ}$$

[0322] wherein:
[0323] a. β₁, . . . , βₙ are methylation beta-values (between 0 and 1);
[0324] b. w₁, . . . , w_{14,000} are real valued coefficients;
[0325] c. p and a are real valued parameters used to scale the index; and
[0326] d. n refers to the number of CpGs in the set of test CpGs;
[0327] preferably wherein the cancer is ovarian cancer.

[0328] In any of the assays described herein, the WID-OC-index algorithm applies real value coefficients inferred by initially training a dataset (this dataset in the exemplary embodiments of the invention described in the Examples consisted of 159 ovarian cancer cases and 572 controls) to fit a ridge classifier using the β package glmnet with a mixing parameter value of alpha=0 (ridge penalty) and binomial response type. Ten-fold cross-validation was used internally by the cv.glmnet function in order to determine the optimal value of the regularisation parameter lambda. The beta values from n CpGs for individual v, β₁^{v}, . . . , βₙ^{v}, are used as inputs to the ridge classifier. The coefficients w₁, . . . , wₙ are obtained from the fitted model. The following quantity was computed for each individual v in the training set:

$$\\ {x}_{υ} = {\sum }_{i = 1}^{n} {w}_{i} {β}_{i}^{{}^{} υ}$$

[0329] Any suitable real valued coefficients may be applied to the WID-OC-Index in any of the assays described herein.

[0330] The value of the parameters μ and σ are given by the mean and standard deviation of xᵥ in the training dataset respectively.

[0331] Thus, any suitable μ and σ real valued parameters may be applied to the WID-OC-index in any of the assays described herein. Any suitable training data set may be applied to the assays described herein in order to infer real value parameters and coefficients that can subsequently be applied to the WID-OC-index formula according to the present invention. Exemplary ways of utilising a training dataset in accordance with the present invention are further described in the ‘Statistical Analyses for Classifier Development’ section of the Materials and Methods section of the Examples.

[0332] Exemplary μ and σ real valued parameters are provided in Table 1 for CpG subsets identified in SEQ ID NOs 1 to 14,000. These real valued parameters may be applied to any of the assays described herein wherein the real parameters correspond to any one of the sets of CpGs identified in SEQ ID NOs 1 to 14,000 and set out in the left hand column of Table 1.

TABLE 1
Exemplary μ and σ real valued parameters are provided in
Table 1 for CpG subsets identified in SEQ ID NOs 1 to 14,000

| SEQ ID | | |
|---|---|---|
| NOs: | mu | sigma |
| 1-100 | 13.19 | 2.32 |
| 1-500 | 18.79 | 3.05 |
| 1-1000 | 16.83 | 3.36 |
| 1-2000 | 17.62 | 3.50 |
| 1-3000 | 18.00 | 3.60 |
| 1-4000 | 17.70 | 3.66 |
| 1-5000 | 17.22 | 3.69 |
| 1-6000 | 16.89 | 3.72 |
| 1-7000 | 16.99 | 3.74 |
| 1-8000 | 17.10 | 3.75 |
| 1-9000 | 17.08 | 3.76 |
| 1-10000 | 16.98 | 3.76 |
| 1-11000 | 16.92 | 3.76 |
| 1-12000 | 16.89 | 3.76 |
| 1-13000 | 16.10 | 3.47 |
| 1-14000 | 17.02 | 3.76 |

[0333] Exemplary w₁, . . . , wₙ real value coefficients are provided below for the CpGs identified at positions 61 to 62 in SEQ ID NOs 1 to 14,000. These real value coefficients may be applied to any of the assays described herein wherein the real parameters correspond to any one of the sets of CpGs identified in SEQ ID NOs 1 to 14,000 wherein the 14,000 real value coefficients below in turn correspond to the CpGs in turn identified at nucleotide positions 61 to 62 in SEQ ID NOs 1 to 14,000. Accordingly, the listed coefficients are presented below in numerical order corresponding respectively to the CpGs identified in SEQ ID NOs 1 to 5000. Thus the first number below corresponds to SEQ ID NO 1, the second number corresponds to SEQ ID NO 2 etc. The exemplary real value coefficients are as follows:
[0334] 1.11358, 1.07458, 1.03297, 0.95999, 0.90279, 0.87819, 0.87606, 0.87087, −0.86625, −0.85785, 0.85576, 0.78465, 0.7758, −0.77138, 0.76446, 0.75844, 0.74197, 0.74118, −0.70987, 0.70788, 0.70184, 0.68543, −0.68471, −0.68402, 0.67336, −0.67212, 0.66314, −0.66142, 0.66036, −0.65917, −0.64945, −0.64766, 0.64617, 0.63244, 0.63003, −0.62856, 0.62619, 0.62603, 0.61734, −0.61715, 0.61582, 0.61499, 0.61464, 0.61439, −0.61281, 0.61238, −0.60732, −0.60145, 0.60015, −0.59847, 0.5983, 0.59759, −0.59604, 0.59282, 0.59057, 0.58952, 0.58018, 0.57892, −0.5778, 0.57756, −0.56965, −0.56939, 0.56892, 0.56797, −0.56796, 0.56761, 0.56156, −0.55768, −0.55698, 0.55592, −0.55558, 0.55256, 0.55255, 0.55153, −0.54636, 0.54581, 0.54321, −0.54253, 0.54104, −0.53898, −0.53862, −0.53708, −0.53575, 0.53563, −0.53367, −0.52811, 0.5232, 0.52242, 0.51389, −0.51381, −0.51326, 0.51295, 0.50999, 0.50932, −0.50911, 0.50801, 0.50588, −0.50394, 0.50036, −0.49945, 0.49405, 0.49372, 0.49289, −0.49271, 0.49091, 0.48662, 0.48628, 0.48564, 0.48377, 0.48332, −0.48219, 0.48163, 0.48016, 0.47989, 0.47846, 0.47758, −0.47611, 0.47577, −0.47535, −0.47507, −0.47477, 0.47376, −0.4734, 0.47327, 0.4727, 0.4714, 0.47093, −0.47032, 0.46987, 0.46983, −0.46731, 0.46587, 0.46452, 0.46432, 0.46402, −0.46314, −0.4628, 0.46266, −0.46021, 0.45991, 0.45917, −0.45776, 0.45706, 0.45649, 0.45412, −0.45278, 0.44972, 0.44839, 0.44418, −0.44209, 0.4339, 0.43259, 0.43211, −0.43148, −0.42815, 0.42351, −0.42143, 0.42068, −0.42007, 0.41858, 0.41746, 0.41718, 0.41638, 0.41418, −0.41389, 0.41223, −0.41083, −0.40834, 0.40796, 0.40742, −0.40706, −0.40535, 0.40509, −0.40465, 0.40428, −0.40269, −0.40201, 0.40137, −0.4007, 0.40002, 0.39975, 0.39971, 0.39951, 0.39941, −0.39938, 0.39703, 0.39667, 0.39592, 0.39529, −0.39519, 0.3948, 0.39226, −0.39102, −0.39085, −0.3904, 0.38989, 0.38964, 0.38842, 0.38829, 0.38829, 0.38797, 0.38767, 0.38686, 0.3866, −0.38633, 0.38624, −0.3861, −0.38442, −0.38436, 0.38326, −0.3831, −0.38285, −0.3823, −0.38147, −0.38112, 0.37996, 0.3789, −0.3788, 0.37855, 0.37784, 0.37618, 0.37494, 0.3744, 0.37374, 0.37278, −0.37235, 0.37233, 0.37177, 0.37164, 0.36982, −0.36967, −0.36964, −0.36893, 0.36887, 0.36731, 0.3673, 0.36639, 0.36617, 0.3659, −0.36529, 0.36406, −0.36398, −0.36374, −0.3637, −0.36363, −0.36337, −0.36287, 0.36167, −0.36068, −0.35993, 0.35848, 0.35843, 0.35837, 0.3579, 0.35782, 0.35753, −0.35719, −0.35446, 0.35365, 0.35349, 0.35326, 0.35251, −0.35222, 0.35195, −0.35146, 0.35075, 0.35058, −0.35029, 0.34991, 0.34921, −0.34908, 0.34822, −0.34781, 0.34749, −0.34673, 0.34633, −0.34611, 0.3454, 0.34406, 0.34381, −0.34297, 0.34157, −0.34072, −0.34004, 0.33943, −0.33921, −0.3382, 0.33785, 0.33746, 0.33722, −0.3371, −0.33686, −0.3361, −0.33598, 0.33564, 0.33534, 0.33501, 0.33496, −0.3346, 0.33458, 0.33416, −0.33387, −0.33386, −0.33349, 0.33311, −0.33285, 0.33269, −0.33238, 0.33202, 0.33198, −0.33115, −0.33097, −0.3309, −0.3306, 0.32959, −0.3294, 0.32869, −0.32848, −0.32793, −0.32792, −0.32701, −0.32665, −0.32629, 0.32602, −0.32594, −0.32544, −0.32541, 0.32503, −0.32459, 0.32431, −0.32406, 0.32353, 0.32283, 0.32249, 0.32144, 0.32112, 0.32105, 0.32053, 0.31983, −0.31942, 0.31919, −0.31884, 0.3183, 0.31794, −0.31791, 0.31754, 0.31739, 0.31644, −0.31517, 0.31501, −0.31499, 0.31438, 0.31413, 0.31339, −0.31187, 0.31169, −0.31134, 0.31085, −0.31055, 0.31027, −0.31025, −0.31023, −0.30976, 0.30972, 0.30914, −0.30898, −0.30869, 0.30853, −0.30848, −0.30821, −0.30814, 0.30789, 0.3078, 0.30757, −0.30747, 0.30731, −0.30639, −0.30635, −0.30621, −0.30583, 0.30574, 0.30574, −0.30573, 0.30571, 0.30524, 0.30519, 0.3042, −0.30361, −0.30351, −0.30274, 0.30266, 0.30255, 0.30249, 0.30226, −0.30223, 0.30218, −0.30217, −0.30198, 0.30191, 0.30148, 0.30148, 0.3006, −0.30051, 0.30029, 0.30016, −0.29972, 0.29957, 0.29947, 0.29933, −0.29887, −0.29873, 0.29848, 0.2982, 0.29794, 0.29768, 0.29759, −0.29754, −0.29749, 0.29741, 0.29733, −0.29683, 0.29663, −0.29646, 0.29637, 0.29621, 0.29608, 0.29575, −0.29522, 0.2951, −0.29501, 0.29469, −0.29454, 0.2944, −0.29381, 0.29332, 0.2933, −0.29316, −0.29292, 0.29289, −0.29279, 0.29271, 0.29183, −0.29154, 0.29132, 0.2913, 0.29124, −0.29104, 0.29026, 0.28995, 0.28958, −0.28932, −0.28931, 0.28928, 0.28924, 0.28901, −0.28897, −0.28882, 0.28878, 0.28875, 0.28872, 0.28863, −0.28829, 0.28801, 0.28754, 0.28663, −0.28631, 0.28623, −0.28617, −0.28498, −0.28489, −0.28404, 0.28389, −0.28381, 0.28343, 0.28327, 0.28288, −0.28205, 0.28199, −0.28189, 0.28187, −0.28166, −0.28162, 0.28158, −0.28158, −0.28121, −0.28109, 0.28101, 0.28085, 0.28082, 0.28051, 0.28047, 0.28046, 0.28034, −0.27934, −0.27902, −0.27899, 0.27878, −0.27835, 0.27824, 0.27797, −0.27782, 0.27776, −0.27762, 0.2773, 0.27685, 0.27683, −0.27681, 0.2763, 0.27596, 0.27551, 0.27525, 0.27524, 0.27521, −0.27512, −0.27473, −0.27459, −0.27443, −0.27402, −0.27394, 0.2739, 0.27373, −0.27366, −0.27339, −0.27333, −0.27314, −0.27293, −0.27268, −0.27266, 0.27264, 0.27248, 0.27242, −0.2723, 0.27227, 0.27226, 0.27225, 0.27223, 0.27145, 0.27099, 0.27085, 0.27055, 0.27024, −0.27013, 0.26987, −0.26967, 0.26955, −0.26887, 0.26871, −0.26852, 0.26839, −0.26786, 0.26752, −0.26738, 0.26738, 0.26732, 0.26675, −0.26673, 0.26664, 0.26652, −0.26616, 0.26606, 0.26546, 0.2653, 0.26446, 0.26439, −0.26439, 0.26439, 0.26434, 0.26423, 0.26409, −0.26389, −0.26363, 0.26355, 0.26331, −0.26312, 0.26306, 0.26269, −0.26265, 0.26235, −0.26233, −0.26231, −0.26216, 0.2621, −0.26175, −0.26166, −0.26162, 0.26162, −0.26158, 0.26156, 0.26156, 0.26145, 0.26123, −0.26115, 0.26109, −0.26096, 0.26049, 0.26044, −0.26043, −0.26017, −0.25996, 0.25968, 0.25952, −0.2593, −0.25919, −0.25919, 0.25906, 0.25878, 0.25875, −0.2585, −0.25812, 0.25804, 0.2577, −0.25758, −0.25751, 0.25749, 0.25737, 0.25731, −0.25724, 0.25698, 0.25691, −0.25669, −0.25657, −0.25649, 0.25632, −0.2563, 0.25611, −0.25582, 0.25572, −0.25562, 0.2554, 0.25539, 0.25536, −0.25535, 0.25533, −0.25505, −0.25479, −0.25476, −0.25473, −0.25465, 0.2546, −0.25458, 0.25412, 0.25403, 0.25365, 0.25361, 0.2536, 0.25341, −0.25336, 0.25331, 0.25316, 0.25296, 0.25259, 0.25246, −0.25181, 0.25167, 0.25152, 0.25116, −0.25073, 0.25053, 0.25034, 0.25031, −0.25022, 0.25017, −0.25009, −0.25003, 0.24985, 0.24984, −0.24971, 0.24967, 0.24952, −0.24951, 0.24928, −0.24924, −0.24916, −0.24862, 0.24844, −0.24843, 0.2484, 0.2478, −0.24772, −0.24772, −0.24761, −0.24758, −0.2475, −0.24737, 0.24718, 0.24706, −0.24672, −0.2467, −0.24664, −0.24663, −0.2463, 0.2462, 0.24598, −0.24571, 0.24512, 0.24484, 0.24473, 0.24472, 0.24442, 0.24442, 0.2444, 0.24435, −0.24423, −0.24412, 0.24364, 0.24356, −0.24354, −0.24325, −0.24285, −0.24251, 0.24225, 0.24218, −0.24208, 0.24122, 0.24122, −0.24115, −0.24115, 0.24108, 0.24094, 0.24084, −0.24027, −0.24023, −0.24, 0.23985, −0.23978, −0.23977, 0.23975, 0.23958, 0.23952, −0.23938, 0.23932, −0.23924, 0.23922, −0.23894, 0.23863, −0.23841, −0.23834, 0.23826, −0.23776, 0.23743, 0.23735, −0.23711, −0.23688, 0.23673, −0.23662, 0.23657, 0.23649, 0.23648, 0.2364, 0.23616, 0.23558, 0.23549, 0.23544, −0.23543, −0.23527, 0.2349, 0.23483, −0.23478, −0.23476, −0.23456, 0.23425, −0.2342, −0.23416, −0.23394, −0.23388, 0.23355, −0.23351, 0.23328, 0.2329, 0.23289, 0.23279, 0.23269, 0.23243, −0.23238, −0.23232, −0.23223, −0.23192, −0.23183, 0.23171, 0.23158, −0.23145, −0.23121, −0.231, 0.23097, 0.23077, 0.23063, 0.2306, −0.23055, 0.23053, 0.23053, −0.23047, −0.23034, −0.23033, −0.23029, −0.23025, 0.22989, 0.22988, 0.2297, 0.22964, 0.22961, 0.22956, −0.22915, −0.22911, 0.22906, −0.22897, 0.2287, −0.22855, −0.22837, 0.22823, −0.22809, −0.228, 0.22795, 0.22794, −0.22755, 0.22749, −0.2273, −0.22722, −0.22719, 0.22709, 0.22694, −0.22682, −0.22679, 0.22674, −0.22663, 0.22616, 0.22575, 0.22561, −0.22552, −0.22551, 0.22551, 0.22541, −0.2254, 0.22538, −0.22506, −0.22498, 0.22475, −0.22453, 0.22448, −0.22435, 0.22416, −0.22402, 0.22375, −0.22352, −0.22333, 0.22327, −0.2232, −0.22316, 0.22306, 0.22276, −0.2227, 0.22265, 0.22263, −0.22237, 0.22233, −0.22218, 0.22208, 0.22195, −0.22192, 0.22191, −0.22184, 0.22163, −0.22153, 0.22147, 0.22117, 0.22116, 0.22097, 0.22087, −0.22068, −0.22042, 0.22019, −0.22017, −0.22012, 0.22011, −0.22006, 0.22, 0.21983, −0.21968, −0.21949, −0.21908, 0.21908, −0.21877, −0.21873, 0.21868, 0.21863, −0.2186, 0.21857, 0.21856, 0.21852, 0.21851, 0.2185, −0.21849, −0.2184, 0.21831, −0.21793, −0.21785, −0.2178, −0.21777, 0.21742, −0.21737, −0.21733, −0.21716, −0.2169, −0.21685, 0.2168, −0.21625, 0.21622, −0.21612, 0.21602, −0.21601, 0.2159, 0.21574, −0.21566, 0.21564, −0.21554, −0.21551, −0.21549, −0.21548, −0.21547, −0.21526, −0.2152, −0.21502, −0.21497, 0.21496, −0.21493, −0.21487, −0.21464, −0.21453, −0.21453, 0.21453, 0.21451, −0.2145, 0.21446, −0.21431, 0.21428, −0.21416, 0.21411, −0.21407, −0.21407, −0.21405, −0.21385, 0.21375, −0.21348, −0.21348, 0.21345, 0.21344, −0.21342, 0.21312, −0.21309, −0.2129, −0.21285, 0.2128, 0.2128, −0.2128, 0.2127, 0.21246, −0.2123, 0.21228, −0.21206, −0.21203, 0.21201, 0.21191, −0.21189, 0.21177, −0.21171, 0.21157, 0.21157, 0.21157, −0.21152, −0.2114, −0.21121, 0.21101, 0.21095, 0.21076, 0.21075, 0.2102, 0.20972, −0.20972, 0.20969, −0.20957, 0.20927, −0.20926, −0.20909, 0.2089, 0.2088, 0.20857, −0.20857, 0.20849, −0.20841, −0.20838, 0.20827, 0.20801, 0.20795, 0.20768, 0.20761, 0.20744, −0.20738, 0.20733, 0.20723, −0.20721, 0.20706, 0.20706, 0.20704, 0.20691, 0.20675, −0.20667, −0.20662, 0.20654, −0.20639, 0.20619, 0.20609, 0.20604, −0.20604, −0.20602, −0.20595, −0.20583, 0.20581, 0.2057, 0.2056, −0.2056, 0.2055, 0.2054, −0.20498, −0.20492, −0.20482, −0.20477, 0.20462, 0.20459, 0.20454, −0.20393, 0.20385, −0.20362, −0.2036, −0.20356, 0.20343, 0.20338, −0.20325, −0.20324, −0.2032, −0.20304, −0.20301, 0.20274, −0.20272, −0.20253, −0.20241, −0.20235, −0.20217, −0.20161, 0.20158, −0.20151, 0.20145, 0.20136, 0.20134, −0.20129, 0.20127, 0.20117, −0.2011, −0.20098, 0.20096, 0.20092, 0.20082, 0.2007, −0.20062, 0.20042, −0.20039, 0.20033, 0.20024, 0.20015, 0.20011, −0.20007, 0.19984, −0.19981, −0.19957, 0.19949, −0.19919, −0.19918, −0.19905, −0.19896, 0.19884, −0.19868, 0.19866, −0.19856, 0.19844, −0.19826, −0.19816, 0.19809, 0.19796, 0.1979, 0.19782, 0.19759, −0.19752, 0.1975, 0.19745, −0.19745, 0.19738, −0.19736, −0.19733, −0.19726, −0.1972, −0.19719, 0.19713, 0.19711, −0.19708, −0.1969, 0.19681, 0.19681, 0.19669, −0.19661, −0.19661, 0.19656, 0.19634, 0.19614, −0.19603, −0.19594, 0.19591, 0.19578, 0.19541, −0.19521, 0.19508, 0.19495, −0.19494, 0.19476, 0.19472, −0.19463, 0.19456, −0.19456, −0.19446, 0.19446, 0.19426, 0.19414, 0.19407, 0.19398, 0.19396, −0.1939, 0.19377, −0.19364, −0.19363, −0.19318, −0.1931, 0.19308, −0.19306, 0.19287, −0.1928, −0.19275, −0.19267, 0.19261, 0.1924, 0.19207, 0.19201, −0.19197, 0.19196, −0.1919, 0.19185, −0.19184, −0.19178, −0.19171, 0.19167, −0.19159, −0.19156, 0.19085, −0.19079, −0.19075, −0.19062, 0.1906, 0.19051, 0.19041, −0.1902, −0.19017, −0.19011, 0.19002, 0.18996, −0.18981, 0.18979, 0.18976, −0.18956, 0.18956, −0.18944, −0.18935, 0.18931, 0.18925, −0.18915, 0.18914, −0.18913, 0.18911, 0.18907, 0.18895, −0.18891, 0.18881, −0.1888, −0.18862, 0.1886, −0.18844, 0.18839, −0.18833, 0.18806, −0.1878, 0.18776, 0.18761, 0.18755, −0.18748, 0.18743, 0.18742, 0.18729, 0.18725, 0.18715, 0.18683, 0.18681, 0.1868, 0.18677, 0.1867, 0.18639, −0.18637, −0.18629, −0.18623, −0.18577, 0.18573, 0.1856, 0.18549, 0.18544, 0.18522, 0.18508, 0.18502, 0.18494, −0.18486, 0.18452, −0.18448, −0.1843, −0.18423, 0.18419, 0.18406, 0.18404, −0.1838, 0.18379, 0.18366, 0.1836, 0.18359, −0.18354, −0.18331, −0.18328, 0.18312, −0.183, 0.18296, 0.18294, −0.1828, 0.18278, −0.18276, −0.18261, −0.18258, 0.18256, 0.1823, 0.18221, 0.18206, −0.18199, −0.18196, 0.18171, 0.18165, −0.18154, 0.1815, −0.18149, 0.18142, 0.18135, 0.18128, −0.18126, −0.18125, −0.18107, −0.18106, −0.18102, −0.1809, −0.18081, 0.18076, −0.18066, 0.18056, 0.18055, −0.18047, 0.18044, 0.18037, −0.18036, 0.18013, −0.18008, 0.18005, −0.18004, 0.17988, −0.17986, 0.17983, 0.17981, 0.17942, 0.17929, −0.1792, 0.17908, 0.17903, −0.17895, 0.17894, 0.17892, −0.17891, 0.17884, −0.17873, −0.1787, −0.17864, −0.17864, −0.17849, −0.17844, −0.17824, 0.17819, 0.17813, −0.17807, −0.17794, −0.17792, −0.17791, −0.17789, 0.17785, 0.17759, 0.17758, 0.1775, 0.17746, 0.17745, 0.17735, −0.17725, −0.17725, −0.17714, −0.17704, −0.177, −0.17685, −0.17683, 0.17683, 0.17677, 0.17674, −0.17672, 0.1767, −0.17657, −0.17653, −0.17641, −0.17634, −0.17633, −0.17612, −0.17603, −0.17593, −0.17581, −0.17578, 0.17566, 0.17553, 0.17552, 0.17542, 0.17538, −0.17521, −0.1752, 0.17512, −0.17512, 0.17485, 0.17468, −0.17465, 0.17464, −0.17455, 0.17452, 0.17448, −0.17444, −0.17437, 0.17436, −0.17433, −0.17423, 0.17417, −0.17386, −0.17386, −0.17384, 0.1737, 0.1736, −0.17353, 0.1735, −0.17335, 0.17323, 0.17322, −0.17314, 0.17311, 0.17306, −0.17302, 0.17292, −0.17286, −0.17277, 0.17249, 0.17235, 0.1723, 0.17205, 0.17202, 0.17187, −0.17175, −0.17171, −0.1717, 0.17159, −0.17154, −0.1714, −0.17139, −0.17114, 0.1711, −0.17109, −0.17109, 0.17087, 0.17087, −0.17058, 0.17054, −0.17052, 0.1705, −0.17038, −0.17036, 0.17031, 0.17013, 0.17013, 0.17013, −0.17012, −0.17007, 0.16991, 0.16986, −0.16976, −0.16969, 0.16959, 0.16953, 0.1695, −0.16947, −0.16943, 0.16924, 0.16921, 0.16921, 0.1692, −0.16912, 0.1691, −0.16903, 0.16901, −0.16895, 0.16881, −0.16877, −0.16875, −0.16867, −0.16862, 0.16862, −0.16856, 0.16839, −0.16839, 0.16838, −0.16837, 0.16835, 0.16829, −0.16815, 0.16812, 0.1681, 0.16768, −0.16767, −0.16757, 0.16756, −0.16755, −0.16727, 0.16721, −0.16716, −0.16715, 0.16715, 0.16714, 0.16712, 0.16707, −0.16704, −0.16689, 0.16688, −0.16685, −0.16685, −0.16677, −0.16674, −0.16666, −0.16662, −0.16659, −0.16648, 0.16646, 0.16615, 0.16606, 0.16605, −0.166, 0.16598, 0.16596, 0.16594, 0.16587, 0.16579, 0.16575, −0.16563, −0.16554, 0.16551, −0.16543, −0.16539, −0.16535, −0.1653, 0.16529, −0.16529, −0.16513, 0.16508, −0.16497, −0.16494, 0.16492, −0.16489, 0.16487, −0.16487, 0.16474, 0.16473, 0.16453, 0.16452, −0.16446, −0.16445, −0.16431, −0.16428, −0.16428, 0.16405, 0.16402, −0.16401, −0.164, −0.16389, −0.16385, 0.16379, 0.16378, 0.16368, −0.16361, −0.16357, 0.1635, 0.1635, −0.16329, 0.16327, 0.1632, 0.1632, 0.163, 0.16287, 0.16282, −0.16281, −0.16274, 0.16258, −0.16246, 0.16244, −0.16224, −0.16221, 0.16211, −0.16207, 0.16202, 0.16195, 0.1619, 0.16183, 0.16183, 0.1617, 0.16167, 0.16164, −0.16162, −0.1615, 0.16149, −0.16141, −0.1614, −0.16136, 0.16134, 0.16133, −0.16129, 0.16129, −0.1611, 0.16102, 0.16097, −0.16095, 0.16089, 0.16089, −0.16074, −0.16054, −0.16051, 0.1605, 0.16049, 0.16041, 0.16038, 0.15998, −0.15994, 0.15991, −0.15961, 0.15935, 0.15923, 0.15921, −0.15919, −0.15911, −0.159, 0.15897, 0.15896, 0.15893, −0.1588, −0.15877, −0.15871, 0.15868, 0.1586, −0.15859, 0.15858, 0.15845, −0.15838, 0.15836, −0.15835, −0.15819, 0.15819, 0.15819, −0.15813, −0.15803, 0.15797, −0.15789, −0.15789, −0.15787, 0.15785, 0.15782, 0.15775, 0.15772, 0.15764, 0.15748, 0.15745, −0.15736, 0.15734, −0.15731, −0.15721, −0.15714, 0.15708, −0.15704, −0.15704, 0.15699, −0.15693, −0.15692, 0.15691, −0.15682, 0.15679, −0.15677, 0.15676, 0.15673, 0.15663, −0.15661, −0.1566, −0.15646, 0.15624, −0.15623, −0.1562, −0.15596, 0.15591, 0.1559, 0.15584, 0.15581, −0.15579, −0.15575, −0.15575, 0.15568, −0.15563, 0.15559, 0.15558, −0.15555, 0.15551, −0.15549, −0.15533, 0.15524, −0.15521, −0.1551, −0.15488, 0.15477, −0.15474, −0.15473, −0.15472, 0.15472, −0.15465, −0.15464, −0.15453, 0.15451, −0.15451, 0.15447, −0.15445, 0.15442, −0.15441, −0.15436, 0.15434, 0.15433, 0.1543, −0.15429, −0.15423, −0.15411, 0.15403, −0.15401, 0.15382, 0.15382, 0.1538, 0.15375, −0.15372, 0.15371, 0.1537, 0.15363, 0.15362, 0.15362, 0.15358, −0.15344, −0.15341, 0.15332, −0.15312, 0.15309, −0.15307, 0.15304, −0.153, −0.15294, −0.1529, 0.15281, −0.15274, 0.15269, −0.15253, 0.15252, 0.15251, −0.15239, 0.15231, −0.15229, −0.15228, −0.15218, −0.15217, −0.15217, −0.15216, −0.152, 0.15195, −0.15191, −0.15186, 0.15183, −0.1517, −0.15166, 0.15153, 0.15149, 0.15136, 0.15123, 0.15113, −0.1511, 0.15109, −0.15108, 0.15099, 0.15098, −0.15094, −0.1509, 0.15089, 0.15087, −0.15083, −0.15083, 0.15083, 0.1508, 0.15068, −0.15066, 0.15062, 0.1506, 0.1506, 0.15059, −0.15053, −0.15051, 0.15047, −0.15045, −0.15042, 0.1504, 0.15032, 0.15029, −0.15028, 0.15026, 0.15019, 0.15014, −0.15012, −0.1499, −0.14988, −0.14983, 0.14974, 0.14962, −0.14961, −0.14952, −0.14938, −0.14936, 0.14936, 0.1493, −0.14921, −0.14916, 0.1491, −0.14908, −0.14904, 0.14901, −0.149, 0.1489, 0.14887, 0.14885, 0.14877, −0.14877, 0.14872, −0.14872, 0.14869, 0.14869, 0.14868, −0.14866, 0.14862, 0.14859, −0.14846, 0.14834, 0.14831, −0.14827, 0.14822, −0.14822, 0.1482, 0.14798, 0.14796, −0.14796, −0.14793, 0.14792, −0.14788, 0.14786, 0.14784, 0.14777, −0.14776, −0.14775, 0.14768, −0.14747, −0.14745, −0.14744, 0.14741, −0.14741, −0.1473, 0.147, −0.14698, −0.14698, 0.14692, 0.14691, 0.1469, −0.14685, 0.14678, 0.14676, 0.14667, 0.14667, −0.14659, 0.14655, 0.14654, 0.14647, −0.14647, −0.14629, −0.14625, −0.14623, 0.14602, −0.14602, 0.14598, −0.14594, −0.14594, 0.14589, −0.14582, −0.14557, 0.14557, 0.14557, 0.14553, 0.14544, −0.14543, −0.1452, −0.14518, 0.14516, −0.14513, −0.14508, 0.14506, 0.14486, 0.14485, 0.14481, 0.14479, −0.14479, −0.14479, 0.14464, −0.1446, −0.1446, 0.14457, 0.14456, −0.14455, 0.14448, 0.14446, −0.14432, −0.14431, −0.1443, −0.14427, −0.14427, −0.14424, 0.14423, 0.14422, −0.14421, −0.14417, −0.14411, −0.14404, 0.14393, 0.14392, −0.14387, 0.14384, −0.14384, 0.14382, 0.14381, 0.14371, 0.14361, 0.1436, 0.14359, −0.14355, 0.14353, −0.14352, −0.14348, 0.14343, 0.14336, −0.14333, −0.14316, 0.14314, −0.14311, 0.14302, 0.14301, 0.14295, −0.14294, −0.14292, −0.14291, 0.14289, −0.14289, 0.14285, −0.14285, 0.14277, −0.14275, −0.14252, −0.14245, 0.1424, −0.14237, 0.14233, −0.14233, −0.1423, −0.14228, −0.14205, −0.14201, −0.14183, 0.14179, −0.14168, −0.14167, −0.14161, 0.14152, −0.1415, −0.14136, 0.14131, 0.14131, −0.14128, −0.14123, −0.1412, 0.14119, −0.14119, −0.14095, 0.14094, 0.14087, 0.14081, 0.14073, −0.14061, −0.1406, 0.14057, 0.14056, 0.14054, 0.14052, 0.1405, 0.14041, −0.14035, −0.14032, 0.14032, −0.1402, 0.14009, 0.14005, 0.14005, 0.14001, −0.14001, 0.13997, −0.13989, −0.13988, −0.13984, 0.13981, 0.13978, 0.13973, 0.1397, 0.1397, 0.13969, 0.13965, −0.13961, −0.13956, 0.13955, 0.13955, −0.13954, −0.13953, 0.1395, 0.13946, −0.13943, −0.13939, 0.13938, 0.13938, 0.13937, −0.13935, 0.13927, −0.13924, 0.13924, 0.13918, −0.13917, 0.13916, −0.13909, −0.13909, 0.13909, −0.13907, 0.13895, 0.13885, 0.1388, 0.13874, −0.13865, 0.13865, −0.13857, 0.13856, 0.13855, 0.13848, −0.13843, 0.1384, −0.1384, −0.13834, −0.13831, 0.13824, 0.13823, −0.13819, −0.13811, 0.13797, −0.13795, 0.13784, 0.13783, 0.13779, 0.13775, 0.13773, 0.13765, −0.13765, 0.13762, −0.13754, −0.13738, 0.13736, −0.13731, 0.1373, 0.13729, −0.13727, 0.13725, −0.13722, 0.13717, 0.13714, 0.13714, −0.13696, −0.13691, 0.13682, −0.13668, 0.13666, 0.13661, −0.13653, 0.13651, −0.13642, 0.13635, −0.13635, −0.13634, −0.13633, −0.1363, 0.13629, −0.1362, −0.1362, −0.13618, 0.13617, −0.13611, −0.1361, −0.13607, −0.13607, 0.13606, −0.136, 0.136, −0.13586, 0.13578, 0.13575, −0.13571, 0.13558, 0.13556, 0.13552, −0.13546, −0.13538, −0.13536, 0.13532, −0.13522, 0.13519, 0.13519, −0.13518, −0.13512, 0.13507, 0.13499, 0.13493, 0.1349, 0.13483, 0.1348, 0.13478, −0.13477, 0.13474, −0.13471, −0.13463, −0.13455, 0.13455, −0.13454, −0.13452, −0.13449, −0.13445, 0.13441, 0.1344, −0.13438, −0.13415, 0.13398, 0.13394, −0.13393, −0.1339, −0.1339, 0.13384, 0.1338, 0.13379, −0.13378, 0.13376, 0.13376, −0.13374, 0.13357, −0.13348, 0.13346, 0.13344, 0.13341, −0.13341, 0.13337, −0.13334, 0.13332, 0.13327, −0.13319, 0.13312, −0.13306, 0.13306, −0.13301, 0.1329, −0.13283, 0.13281, −0.13276, −0.13275, 0.13273, 0.13269, 0.13264, 0.13255, 0.13251, 0.1325, 0.13248, −0.13247, −0.13243, 0.13239, 0.13233, 0.13231, −0.1323, 0.13222, −0.13219, 0.13216, 0.13215, 0.13211, −0.13209, 0.13203, −0.132, −0.13199, 0.13197, 0.13191, −0.13189, −0.13174, −0.13174, −0.13169, −0.13163, 0.1315, −0.1314, 0.13138, −0.13119, 0.13115, 0.13112, −0.13108, 0.13104, 0.13093, −0.13092, −0.13086, −0.13083, 0.13083, 0.1308, −0.13073, −0.1307, −0.13066, 0.13065, −0.1306, 0.13055, 0.13054, −0.13051, −0.13046, 0.13044, 0.13043, −0.13033, −0.13029, −0.13027, 0.13025, −0.13019, −0.13019, 0.13016, −0.13012, −0.13007, −0.12999, −0.12997, 0.12997, 0.1299, 0.12988, −0.12988, −0.12981, 0.12977, 0.12971, −0.12965, −0.12965, −0.12964, −0.12954, −0.12953, −0.12951, −0.1295, −0.1295, −0.12948, 0.12944, −0.12944, 0.12944, −0.1294, −0.1294, 0.12939, −0.12932, 0.12932, −0.12931, 0.12926, −0.12923, 0.1292, 0.12919, 0.12917, −0.1291, 0.12909, 0.12907, 0.12896, 0.12888, 0.12885, −0.12885, 0.12881, 0.12881, −0.1288, −0.12879, −0.12875, −0.12875, −0.1287, 0.1287, −0.12862, 0.12861, 0.12855, −0.12853, 0.12842, 0.12838, −0.12834, 0.12833, 0.12831, −0.12829, −0.12827, −0.12824, −0.1282, −0.12813, −0.12806, 0.12799, −0.12799, −0.12798, 0.12798, −0.12793, −0.12787, −0.12786, −0.12783, −0.12779, −0.12771, −0.1277, −0.12765, 0.12764, −0.12763, −0.12757, 0.12747, 0.12737, −0.12736, −0.12735, −0.12729, −0.12727, −0.12725, −0.12723, 0.12717, 0.12716, −0.12713, −0.12706, −0.12703, −0.12703, −0.127, 0.12698, −0.12697, −0.12696, 0.12693, 0.12689, −0.12687, −0.12678, 0.12672, −0.12671, −0.1267, 0.12667, −0.12667, 0.12663, −0.12659, 0.12657, 0.12655, −0.12653, −0.12653, 0.12653, −0.12644, −0.12641, −0.12639, −0.12638, 0.12637, 0.12635, 0.12635, −0.12614, 0.12603, −0.12602, 0.12594, 0.12586, 0.12586, 0.12569, −0.12568, 0.12566, 0.12564, 0.12562, −0.1256, −0.12559, −0.12559, 0.12553, −0.12547, −0.12547, 0.12545, −0.12537, −0.12536, 0.12531, 0.12529, 0.12528, 0.12514, 0.12513, −0.1251, 0.12501, −0.125, 0.12499, −0.12497, −0.12494, −0.12494, −0.12493, 0.12482, −0.12482, 0.12464, −0.12463, −0.12455, 0.12454, 0.12447, 0.12443, 0.1244, 0.1243, −0.12425, −0.12406, 0.12406, −0.12404, 0.12402, 0.12393, −0.12383, −0.12379, 0.12378, 0.12367, −0.12355, 0.12347, −0.1234, 0.12339, 0.12338, −0.12336, 0.12332, 0.12314, −0.12312, 0.12302, −0.12297, −0.12296, −0.12293, 0.12285, −0.12274, 0.12272, 0.1227, 0.12268, 0.12264, −0.12264, −0.1225, 0.12247, −0.12245, 0.12238, 0.12237, 0.12237, −0.12226, −0.12224, −0.12223, 0.1222, −0.12219, −0.12193, 0.12193, 0.12187, −0.12181, −0.1218, −0.12177, −0.12174, −0.12171, 0.12162, 0.12161, 0.12161, 0.12148, −0.12144, 0.12132, 0.1213, 0.12128, 0.12124, 0.12123, 0.1212, −0.1212, 0.12119, −0.12113, −0.12108, 0.12107, −0.12098, 0.12092, −0.12089, 0.12088, 0.12086, 0.12086, −0.12078, −0.12077, 0.12077, −0.12074, 0.12062, −0.12054, 0.12053, −0.12045, 0.12044, −0.12044, −0.12043, −0.12043, 0.12042, 0.12036, −0.12036, 0.12031, −0.12025, 0.12022, 0.12021, 0.1202, 0.12016, −0.12012, −0.12008, 0.11997, −0.11991, 0.11979, −0.11975, 0.11968, 0.11967, 0.1196, 0.11959, −0.11956, −0.11945, 0.11944, −0.11941, −0.1194, −0.11937, 0.11935, −0.11931, 0.11929, 0.11927, −0.11924, 0.11923, 0.11913, 0.11908, −0.11907, −0.11906, 0.11904, 0.11892, −0.11891, 0.11886, −0.11883, 0.11879, 0.11874, −0.1187, 0.1187, 0.11869, 0.11866, 0.11865, 0.11863, −0.11862, −0.1186, 0.11857, −0.11856, −0.11856, −0.11852, 0.11852, −0.11852, −0.11851, −0.11849, 0.11847, −0.1184, −0.11836, −0.11832, 0.11818, 0.11815, 0.11814, −0.11812, −0.11811, 0.11807, 0.11806, −0.11805, −0.11802, 0.11802, 0.11798, 0.11798, −0.11797, −0.11794, −0.11794, 0.11792, 0.11788, −0.11787, −0.11787, 0.11786, −0.11778, 0.11773, −0.11773, 0.11773, 0.1177, −0.1177, 0.11759, −0.1175, −0.11744, 0.11743, 0.11729, 0.11726, 0.11723, 0.11715, 0.11708, 0.11704, −0.11698, 0.11696, −0.11691, −0.1169, −0.11688, −0.11687, 0.11685, 0.11682, −0.11676, 0.11676, 0.11674, −0.11671, 0.11668, −0.11663, −0.11662, 0.11662, 0.11655, −0.1165, −0.11647, −0.11645, −0.11643, 0.11638, −0.11631, 0.11627, −0.11621, 0.11618, −0.11608, −0.11608, 0.11607, −0.11607, 0.11603, 0.11597, −0.11596, −0.11594, −0.1159, −0.11586, 0.11586, 0.11585, −0.11585, −0.11581, 0.11579, 0.11576, 0.11575, −0.11573, −0.11572, −0.1157, −0.1157, −0.11562, 0.11558, −0.11558, −0.11557, −0.11557, 0.11543, 0.11543, −0.11543, −0.11542, −0.11538, 0.11537, −0.11535, −0.11532, −0.11531, 0.11523, 0.11523, 0.11513, −0.11503, 0.11501, 0.115, −0.11497, 0.11493, −0.11478, −0.11474, −0.11472, −0.11471, 0.11466, 0.11458, 0.11458, −0.11457, 0.11455, 0.11452, −0.11451, −0.11451, 0.11449, 0.11445, −0.11439, 0.11438, 0.11435, −0.11434, −0.11429, −0.11429, −0.11427, 0.11424, 0.11422, 0.11413, −0.1141, −0.11408, −0.11406, −0.11404, 0.11402, −0.11401, −0.11399, −0.11392, 0.11388, −0.11387, 0.11382, 0.1138, −0.1138, 0.11377, −0.11374, −0.11373, 0.11372, −0.11371, −0.11366, 0.11364, 0.11353, −0.11349, −0.11348, −0.11345, 0.11341, −0.1134, −0.1134, 0.11339, 0.11336, −0.11336, −0.11334, 0.11334, −0.11332, 0.11325, −0.1132, −0.11319, 0.11314, 0.11311, 0.1131, 0.11305, 0.11304, −0.11302, −0.11292, −0.11291, −0.11284, −0.1128, 0.11276, −0.11275, 0.11274, −0.11273, −0.11271, 0.11269, −0.11266, 0.11263, −0.11256, −0.11255, −0.11253, 0.11253, 0.11248, 0.11247, 0.11242, 0.11237, 0.11236, 0.11233, −0.11231, 0.11229, 0.11228, −0.11227, 0.11225, 0.11225, −0.11213, 0.11208, −0.11206, −0.11206, −0.11203, −0.11203, −0.11199, 0.11198, −0.11197, −0.11194, 0.11194, −0.11186, 0.11186, 0.11183, −0.11183, 0.11181, 0.1118, −0.11177, −0.11173, 0.11161, −0.11157, −0.11155, −0.11151, −0.11151, −0.11149, −0.11147, 0.11146, 0.11144, 0.11143, 0.11141, −0.11139, −0.11138, 0.11135, −0.11129, −0.11128, −0.11128, −0.11124, −0.11122, 0.11119, 0.11118, −0.11114, −0.11112, −0.11111, 0.11107, −0.11101, 0.11101, −0.11097, 0.11096, −0.11094, 0.11093, 0.11087, 0.11086, −0.11085, 0.11081, −0.1108, −0.11077, 0.11076, −0.11076, −0.11075, −0.11073, −0.11072, −0.11071, 0.11062, −0.1106, 0.11056, 0.11046, −0.11044, 0.11042, 0.11041, −0.1104, 0.11039, 0.11038, −0.11037, −0.11033, −0.11033, −0.1103, 0.1103, −0.11026, 0.11024, −0.11023, 0.11023, −0.11021, −0.11017, 0.11016, −0.1101, −0.11009, −0.11009, 0.11007, −0.11004, −0.11001, 0.11, 0.11, 0.10998, −0.10998, 0.10994, −0.1099, −0.10989, 0.10985, −0.10985, 0.1098, 0.1098, 0.10978, −0.1097, −0.1097, −0.1097, 0.10969, −0.10967, −0.10966, 0.10959, −0.10952, −0.10948, −0.10947, 0.10947, 0.10944, 0.10944, 0.10938, 0.10937, 0.10925, 0.10923, 0.1092, 0.10916, −0.10913, 0.10909, 0.10905, 0.10905, 0.10902, −0.10901, −0.109, −0.10898, 0.10898, −0.10895, 0.10894, 0.10885, 0.10884, −0.10884, 0.10878, 0.10878, 0.10875, −0.1087, 0.1087, 0.10867, 0.10866, 0.10864, −0.10864, 0.10861, −0.10858, −0.10851, 0.10847, −0.10843, −0.10839, −0.10837, 0.10833, −0.10819, 0.10818, −0.10815, −0.10805, −0.10804, −0.10802, −0.10798, −0.10797, −0.10797, −0.10796, −0.1079, −0.10785, −0.10784, −0.10784, 0.10784, −0.10783, −0.10778, 0.10776, −0.10775, −0.10774, 0.10771, 0.1077, −0.10768, −0.10767, −0.10764, −0.1076, 0.10759, −0.10755, 0.10753, 0.10752, 0.1075, 0.1075, −0.10741, −0.10737, −0.10732, −0.10731, 0.10731, −0.1073, −0.10727, 0.10726, −0.10723, 0.10718, 0.10714, 0.10713, −0.1071, −0.10707, 0.10704, 0.10696, 0.10694, 0.10693, 0.10693, −0.10691, −0.10689, −0.10685, 0.10681, −0.10677, 0.10669, 0.10668, 0.10667, −0.10663, 0.10658, −0.10658, 0.10654, 0.10646, 0.10641, 0.1064, 0.10638, 0.10632, −0.10628, 0.10628, 0.10627, −0.10626, −0.10626, 0.10625, −0.10625, 0.10623, −0.10621, −0.10613, −0.10613, −0.10613, −0.10604, 0.10602, −0.10595, −0.10594, −0.10592, −0.10586, 0.10573, −0.10569, −0.10567, −0.10561, 0.1056, 0.10558, −0.10557, 0.10555, −0.10552, −0.10551, 0.10549, −0.10548, −0.10542, 0.1054, 0.10538, −0.1053, 0.10529, 0.10526, 0.10518, −0.10518, 0.10515, −0.10508, 0.10503, −0.105, 0.10499, 0.10489, −0.10489, 0.10488, −0.10487, −0.10483, 0.10481, 0.10474, −0.10474, −0.10474, 0.10472, −0.10471, −0.10466, 0.10459, 0.10454, −0.10453, 0.10449, 0.10445, −0.10445, −0.10433, −0.10432, 0.10428, 0.10422, 0.10419, −0.10418, 0.10413, 0.10413, −0.10409, 0.10408, −0.10405, 0.10403, 0.10396, −0.10393, −0.1039, −0.10389, 0.10388, −0.10385, −0.10378, −0.10377, −0.10374, −0.10373, −0.10369, 0.10369, 0.10367, 0.10365, −0.10363, 0.10362, −0.10362, −0.10361, −0.1035, 0.10349, 0.10347, 0.10347, −0.10346, 0.10343, −0.10341, 0.10334, −0.10333, 0.10332, 0.10327, −0.10326, 0.10322, 0.10321, 0.10318, −0.10318, −0.10315, −0.10315, 0.10313, −0.10312, −0.10307, 0.10306, −0.10306, 0.10303, 0.10301, 0.10293, 0.10293, −0.10293, 0.10293, 0.10292, −0.10291, 0.10291, 0.10289, 0.10288, −0.10287, −0.10286, 0.10286, −0.10284, −0.10279, −0.10279, −0.10276, 0.10275, −0.1027, 0.1027, 0.10269, −0.10263, 0.1026, 0.10258, −0.10256, −0.10254, −0.10253, 0.1025, 0.10241, −0.1024, −0.10238, 0.10238, 0.10223, 0.10223, −0.1022, −0.10215, 0.10215, 0.10213, 0.1021, 0.10207, −0.10207, 0.10205, −0.10204, −0.10204, −0.10202, 0.10197, 0.10195, 0.10187, 0.10186, 0.10178, 0.10176, −0.10176, −0.10175, 0.10174, 0.10174, 0.10174, −0.10174, −0.10171, 0.10169, 0.10166, 0.10165, −0.10162, −0.10161, −0.1016, −0.1016, 0.1016, 0.1016, 0.10159, −0.10155, −0.10154, 0.1015, 0.10145, 0.10144, −0.10139, 0.10138, −0.10138, −0.10136, −0.10134, 0.10133, 0.10133, −0.1013, −0.10129, 0.10126, 0.10125, −0.10125, −0.10125, −0.10118, 0.10111, −0.10111, −0.1011, −0.1011, 0.1011, 0.10108, −0.10108, −0.10105, −0.10102, 0.10102, 0.10101, −0.10095, 0.10093, 0.10089, −0.10089, 0.10087, −0.10086, 0.10084, −0.1008, −0.10079, 0.10076, 0.10075, 0.10074, 0.10073, 0.10069, 0.10068, 0.10068, 0.10067, 0.10066, 0.1006, −0.10058, 0.10056, 0.10053, −0.10049, −0.10046, 0.1004, 0.10039, −0.10038, 0.10033, −0.10032, −0.10028, −0.10022, 0.1002, −0.10017, 0.10016, −0.10012, −0.10009, −0.10008, −0.10006, 0.1, −0.09997, 0.09992, 0.09991, 0.0999, 0.09988, −0.09985, −0.09979, 0.09973, 0.09971, −0.0997, −0.09966, −0.09965, −0.09962, −0.0996, 0.09957, −0.09957, −0.09947, −0.09946, −0.0994, 0.09937, 0.09935, −0.09934, 0.09933, −0.09933, −0.09931, −0.0993, −0.09928, −0.09925, −0.09925, 0.09924, −0.09923, −0.0992, 0.09917, 0.09913, 0.09909, −0.09905, 0.09903, 0.09897, −0.09896, 0.09895, −0.09893, 0.09886, −0.09886, −0.09884, −0.09883, −0.09883, 0.0988, 0.09879, −0.09877, 0.09871, 0.09865, 0.0986, −0.09857, −0.09857, 0.09857, −0.09851, −0.09849, 0.09846, 0.09844, −0.09844, −0.09844, 0.09843, −0.0984, 0.09839, −0.09836, −0.09835, −0.09835, 0.09833, −0.09831, 0.09828, 0.09824, 0.09821, 0.09818, 0.09817, 0.09817, −0.09816, 0.09813, 0.09812, −0.09811, 0.09801, 0.09798, −0.09794, −0.0979, −0.09789, −0.09785, −0.09783, 0.09781, 0.09779, 0.09777, 0.0977, −0.0977, −0.09767, 0.09763, 0.09757, 0.09745, 0.09738, 0.09737, −0.09736, −0.09734, −0.09728, 0.09722, 0.09719, −0.09718, 0.09714, −0.09714, −0.09714, −0.09713, −0.09713, −0.09713, −0.0971, 0.09709, −0.09702, −0.097, −0.09696, −0.09696, 0.09696, −0.09693, −0.09692, 0.0969, 0.09685, 0.09685, −0.09684, −0.09682, 0.09682, −0.09679, −0.09677, 0.09674, 0.09674, 0.09672, 0.09672, −0.09669, 0.09669, 0.09662, 0.09661, −0.09659, 0.09659, 0.09658, 0.09658, −0.09658, −0.09655, 0.09647, 0.09645, 0.09644, −0.09639, 0.09635, 0.09633, 0.09627, −0.09625, −0.09625, −0.09623, −0.09617, 0.09616, −0.09612, 0.09608, −0.09605, 0.09604, 0.09604, 0.09594, 0.09587, −0.09582, 0.0958, −0.0958, 0.09579, −0.09579, 0.09579, −0.09577, 0.0957, −0.09566, 0.09561, 0.0956, 0.09559, −0.09556, −0.09555, −0.0955, 0.09548, 0.09546, 0.09541, −0.09541, 0.09539, 0.09535, −0.0953, 0.09525, 0.09521, −0.0952, −0.09519, 0.09517, −0.09516, −0.09512, −0.09507, −0.09505, 0.09503, −0.09501, 0.09501, 0.095, 0.095, −0.095, 0.09498, −0.09495, 0.09494, −0.09492, −0.0949, −0.09488, 0.09488, −0.09487, −0.09485, −0.09484, 0.09483, −0.09482, 0.09481, −0.0948, −0.09477, −0.09477, −0.09475, 0.09471, 0.09471, −0.09466, −0.09464, −0.09462, −0.0946, 0.09456, −0.09451, 0.09449, 0.09448, −0.09441, −0.0944, −0.09439, −0.09438, −0.09434, 0.09427, 0.09426, 0.09419, −0.09418, −0.09417, 0.09415, −0.09412, 0.0941, −0.09407, −0.09407, 0.09407, 0.09404, 0.09404, 0.094, 0.09399, −0.09394, 0.09392, −0.09392, 0.09389, 0.09389, −0.09386, 0.09384, −0.09373, −0.09372, −0.09371, 0.09371, −0.09368, −0.09368, −0.09362, −0.09362, −0.09354, 0.09353, −0.09351, −0.09349, −0.09347, 0.09343, −0.0934, 0.09337, −0.09336, −0.09334, −0.09334, −0.0933, 0.09328, −0.09324, 0.09323, −0.09322, −0.09319, −0.09319, 0.09312, −0.09308, −0.09307, 0.09306, −0.09305, −0.09305, −0.09302, 0.09298, 0.09294, 0.09294, 0.09292, 0.09288, −0.09287, 0.09284, −0.09284, 0.09278, −0.09274, 0.09272, −0.09271, 0.0927, −0.09266, −0.09265, 0.09261, −0.09257, 0.09252, 0.09252, −0.09251, −0.09249, −0.09249, −0.09249, 0.09247, −0.09247, −0.09242, −0.09239, 0.09239, 0.09237, 0.09236, 0.09235, 0.09234, 0.09233, −0.09228, 0.09228, −0.09227, 0.09227, −0.09224, −0.09223, −0.09222, −0.09211, −0.09211, −0.09207, 0.09206, 0.09204, 0.09203, 0.09203, −0.09203, 0.09194, 0.09191, 0.0919, −0.09189, −0.09188, 0.09187, −0.09184, 0.09179, 0.09175, −0.09174, 0.09173, 0.09171, −0.0917, 0.09167, 0.09165, −0.09165, −0.09165, −0.09163, 0.09162, −0.09158, −0.09158, −0.09152, −0.09148, −0.09148, 0.09143, −0.09142, 0.09139, 0.09135, 0.09134, −0.09132, −0.09131, −0.09126, 0.09125, 0.09125, 0.09125, −0.09121, 0.0912, 0.09119, −0.09118, 0.09117, −0.09117, 0.09115, 0.0911, 0.09109, −0.09106, −0.09105, −0.09104, 0.09102, −0.091, 0.09098, 0.09094, −0.09093, 0.09088, −0.09082, −0.09078, −0.09075, 0.09067, 0.09067, 0.09065, −0.09058, −0.09057, −0.09051, −0.0905, 0.0905, 0.09049, −0.09048, 0.09039, 0.09035, 0.09033, 0.09031, 0.0903, 0.09023, −0.09022, −0.09021, −0.09019, 0.09019, 0.09016, 0.09014, −0.09013, 0.0901, 0.09006, −0.09002, −0.09002, −0.08994, −0.08994, −0.08991, 0.08987, −0.08986, −0.08983, 0.08976, 0.08975, −0.08973, 0.08971, −0.08967, 0.08967, 0.08964, −0.08958, −0.08957, −0.08955, 0.08954, 0.08948, −0.08945, −0.08945, −0.08944, −0.08937, 0.08937, −0.08935, 0.08935, 0.08927, 0.08918, −0.08913, −0.08912, 0.0891, −0.08908, 0.08904, −0.08902, 0.08902, −0.08901, −0.08896, 0.08894, 0.08894, −0.08894, 0.08892, −0.08891, 0.08886, 0.08881, 0.08877, 0.08876, 0.08873, 0.08866, −0.08865, 0.08863, −0.08863, 0.08863, 0.08861, 0.0886, −0.08859, 0.08858, −0.08852, 0.08851, 0.08849, −0.08849, −0.08846, 0.08845, 0.08845, 0.08845, −0.08845, 0.08843, 0.08841, 0.08839, −0.08837, −0.08832, 0.08831, 0.08831, −0.08828, −0.08826, −0.08819, −0.08819, −0.08818, 0.08816, −0.08812, 0.08812, −0.08812, 0.08811, 0.08811, −0.08808, −0.08806, 0.08805, 0.08798, −0.08792, 0.08789, −0.08786, −0.08781, −0.08779, 0.08777, −0.08777, 0.08772, −0.0877, 0.08767, −0.08765, −0.08764, 0.08763, 0.08761, −0.08761, −0.08759, −0.08758, −0.08757, −0.08755, −0.08754, −0.08753, −0.08751, 0.08749, 0.08749, −0.08747, 0.08745, 0.0874, −0.08735, 0.08735, 0.08731, 0.08725, −0.08725, −0.08724, −0.08724, −0.0872, −0.08717, −0.08717, −0.08717, −0.08716, 0.0871, 0.08709, 0.08706, −0.08704, −0.08704, −0.08701, −0.08698, −0.08697, −0.08695, −0.08689, 0.08688, 0.08686, 0.08684, 0.08683, 0.08682, 0.08673, −0.08671, 0.08669, −0.08668, −0.08668, −0.08665, −0.08665, 0.08665, −0.08664, 0.08664, 0.08663, −0.08662, 0.08655, 0.08655, 0.08653, −0.08652, −0.08652, −0.0865, 0.08646, 0.08642, −0.08641, −0.08638, 0.08638, 0.08637, 0.08635, 0.08634, 0.08633, −0.08631, −0.0863, −0.08629, 0.08628, −0.08628, 0.08627, −0.08626, −0.08623, −0.08622, 0.08622, −0.08619, 0.08618, −0.08617, 0.08616, 0.08615, 0.08607, −0.08606, −0.08602, −0.08602, 0.08601, −0.08598, −0.08597, 0.08595, −0.08594, −0.08592, 0.08591, −0.0859, −0.08585, −0.08581, 0.08575, −0.08568, 0.08567, 0.08563, −0.08561, −0.0856, 0.08559, 0.08557, −0.08555, 0.08554, −0.08552, −0.08547, −0.08544, −0.08542, −0.08539, −0.08536, 0.08534, 0.08529, −0.08527, −0.08524, −0.08523, −0.08523, −0.08523, −0.08522, 0.08519, 0.08515, 0.08515, −0.08514, 0.08514, −0.08508, −0.08508, 0.08508, 0.08506, −0.08504, 0.08502, −0.08501, 0.085, −0.08497, −0.08495, 0.08493, −0.08492, 0.08489, 0.08483, 0.08482, −0.08476, 0.08475, 0.0847, 0.08468, −0.08466, −0.08462, 0.08459, 0.08458, −0.08457, 0.08456, −0.08452, 0.08452, 0.08447, −0.08442, −0.0844, −0.08436, −0.08436, −0.08436, 0.08436, −0.08435, −0.08434, −0.0843, 0.08428, 0.08426, 0.08426, 0.08426, −0.08424, 0.08414, 0.08411, −0.08408, −0.08407, 0.08406, −0.08406, 0.08405, 0.08404, −0.08403, 0.08403, 0.08403, 0.08403, 0.08399, 0.08397, −0.08396, −0.0839, −0.0839, −0.0839, −0.08385, −0.08385, −0.08383, −0.08383, 0.08382, −0.08379, 0.08375, 0.08372, −0.08371, 0.0837, −0.08367, 0.08365, −0.08363, 0.08362, −0.08359, 0.08356, −0.08355, −0.08353, −0.08346, 0.08346, 0.08344, 0.08343, −0.08343, −0.08342, −0.08341, 0.08341, −0.0834, −0.0834, 0.08336, 0.08334, −0.08332, 0.08332, 0.08326, −0.08326, −0.08325, 0.08325, −0.08324, −0.08323, 0.08323, −0.08321, −0.0832, 0.08317, −0.08316, −0.08315, −0.08313, −0.08307, 0.08305, −0.08302, −0.08302, −0.083, −0.08299, 0.08298, 0.08297, 0.08297, 0.08296, 0.08295, −0.08292, 0.08291, −0.08289, 0.08289, 0.08284, 0.08284, −0.08284, 0.0828, 0.0828, 0.08279, 0.08279, 0.08278, −0.08273, 0.08272, 0.08272, −0.08272, 0.08268, −0.08266, −0.08265, 0.08264, −0.08262, −0.08258, −0.08251, −0.08249, −0.08246, 0.08243, −0.0824, −0.08239, 0.08239, 0.08237, 0.08233, −0.0823, −0.08229, −0.08228, −0.08228, 0.08227, −0.08225, −0.08224, 0.08219, 0.08218, −0.08216, 0.08214, 0.08212, 0.08212, −0.08209, −0.08209, 0.08207, 0.08206, 0.08205, 0.08202, −0.082, −0.08196, −0.08193, −0.08192, −0.0819, 0.08185, 0.08183, −0.08183, 0.08182, −0.0818, −0.08179, −0.08179, 0.08179, 0.08178, 0.08175, −0.08172, −0.08172, −0.08171, −0.08171, 0.08169, −0.08168, −0.08168, −0.08167, 0.08166, 0.08163, −0.08158, 0.08156, −0.08154, −0.08144, 0.08141, 0.08141, 0.08139, 0.08138, 0.08136, 0.08136, 0.08127, 0.08127, −0.08126, 0.08125, 0.08125, −0.08121, 0.0812, 0.08119, 0.08117, −0.08117, 0.08114, −0.08112, 0.08111, −0.08109, −0.08109, 0.08107, −0.08106, −0.08105, −0.08102, −0.08101, 0.08098, −0.08097, 0.08096, −0.08094, 0.08094, 0.08093, −0.08093, 0.08092, −0.0809, −0.08088, 0.08087, 0.08086, 0.08085, 0.08084, −0.08084, −0.08082, 0.08081, 0.08081, 0.08079, 0.08078, −0.08078, −0.08074, 0.08068, −0.08067, −0.08066, −0.08065, −0.08064, −0.08063, −0.08062, −0.08061, 0.08061, 0.08059, 0.08057, 0.08055, −0.08055, −0.08054, −0.08052, 0.08052, 0.08051, 0.08051, 0.08048, −0.08048, −0.08047, 0.08044, 0.08036, 0.08035, −0.08031, −0.08027, −0.08023, 0.08022, −0.08022, −0.08021, −0.08021, −0.0802, 0.08019, 0.08017, 0.08014, 0.0801, −0.0801, 0.08009, −0.08009, 0.08009, −0.08008, 0.08006, −0.08001, −0.08001, −0.08001, 0.08001, 0.07994, 0.07991, −0.0798, −0.07978, 0.07976, −0.07971, −0.07971, 0.0797, 0.07962, 0.07962, −0.0796, −0.07957, −0.07954, −0.07954, 0.07952, 0.07952, 0.07944, −0.07943, −0.07941, 0.07938, −0.07935, −0.07935, −0.07932, 0.07931, 0.0793, 0.07929, 0.07928, 0.07928, 0.07928, −0.07927, −0.07927, −0.07925, −0.07925, −0.0792, 0.07917, 0.07916, 0.07916, −0.07913, 0.07912, −0.07912, −0.07911, −0.07911, −0.07909, 0.07909, 0.07908, −0.07907, −0.07904, −0.07904, 0.07904, −0.07904, 0.079, −0.07898, 0.07894, −0.0789, 0.07885, 0.07885, −0.07885, −0.07883, 0.07883, 0.0788, −0.0788, −0.0788, −0.07878, −0.07873, 0.07871, 0.07871, 0.0787, 0.07868, −0.07866, −0.07866, 0.07862, 0.07861, 0.07858, −0.07858, −0.07855, 0.07855, −0.07854, −0.07853, −0.07845, −0.07845, 0.07844, 0.07844, −0.07842, −0.0784, −0.07837, −0.07837, −0.07835, −0.07831, 0.0783, −0.07827, −0.07827, −0.07827, 0.07825, −0.07821, −0.0782, 0.07818, −0.07816, 0.07815, 0.07812, −0.07811, −0.07811, 0.07811, −0.0781, −0.07809, 0.07808, −0.07807, −0.07806, 0.07804, −0.07798, −0.07798, 0.07797, −0.07795, −0.07789, −0.07788, −0.07788, 0.07788, −0.07785, −0.07781, −0.0778, −0.07777, 0.07775, 0.07774, 0.07774, 0.07773, 0.07773, −0.07772, 0.07768, −0.07768, 0.07767, 0.07765, 0.07761, −0.0776, 0.0776, −0.07759, 0.07758, 0.07754, −0.07754, 0.07752, −0.07752, −0.07751, −0.0775, 0.0775, 0.07747, −0.07745, −0.0774, −0.07739, −0.07738, −0.07735, 0.07731, −0.07731, 0.07731, −0.07729, −0.07729, 0.07727, 0.07725, −0.07722, 0.07722, −0.07721, −0.07719, 0.07717, 0.07716, −0.07716, −0.07706, 0.07706, 0.07703, −0.07701, −0.07699, −0.07698, −0.07695, 0.07694, 0.07692, 0.07691, −0.0769, −0.07689, −0.07686, 0.07685, 0.07683, −0.07681, −0.07677, −0.07676, 0.07675, 0.07673, 0.07672, 0.0767, −0.07667, −0.07665, 0.07663, −0.07658, 0.07657, 0.07657, −0.07655, −0.07654, −0.07652, 0.07645, 0.07643, −0.07643, 0.07643, −0.07639, −0.07638, 0.07638, −0.07636, −0.07635, 0.07629, 0.07629, −0.07623, −0.07623, 0.07623, 0.07621, 0.07621, −0.0762, 0.07618, 0.07616, −0.07615, 0.0761, 0.07608, −0.07605, −0.07605, 0.07604, 0.07604, −0.07603, −0.07597, 0.07596, 0.07595, −0.07593, −0.07591, 0.07585, −0.07582, −0.07582, 0.07581, −0.07581, −0.0758, −0.07578, 0.07578, 0.07576, 0.07574, 0.07573, −0.0757, 0.07566, 0.07566, 0.07558, 0.07555, −0.07554, 0.07547, −0.07546, −0.07544, −0.07544, −0.07541, 0.07541, 0.07537, −0.07534, 0.07532, −0.07532, −0.07531, 0.0753, 0.0753, −0.07529, −0.07527, 0.07527, 0.07517, 0.07517, 0.07516, 0.07513, −0.07513, −0.07509, 0.07509, 0.07507, 0.07503, −0.07501, −0.075, −0.07499, −0.07498, 0.07498, −0.07496, −0.07493, −0.07493, −0.07492, −0.07491, 0.07489, 0.07488, 0.07488, −0.07487, 0.07484, 0.07482, −0.07478, 0.07477, −0.07477, 0.07474, −0.07473, 0.07467, 0.07465, −0.07461, 0.07458, 0.07455, −0.07455, 0.07453, 0.07451, 0.0745, −0.07449, −0.07447, −0.07447, 0.07439, 0.07435, −0.0743, 0.07428, 0.07426, 0.07422, −0.07421, −0.0742, −0.0742, −0.0742, −0.07419, −0.07418, −0.07417, 0.07417, 0.07415, 0.07415, 0.07414, 0.07413, −0.07411, 0.0741, −0.07409, 0.07407, 0.07406, 0.074, 0.07399, −0.07399, −0.07399, 0.07398, 0.07396, 0.07395, −0.07394, 0.07394, 0.07391, −0.0739, −0.0739, 0.07388, −0.07388, −0.07384, −0.07382, −0.07378, 0.07374, −0.07374, −0.07373, −0.07372, −0.07371, 0.0737, 0.07369, −0.07369, 0.07366, −0.0736, −0.0736, −0.07358, 0.07355, 0.07353, −0.07352, −0.07352, 0.07347, 0.07347, −0.07346, 0.07344, −0.0734, −0.07338, −0.07338, −0.07337, 0.07336, 0.07333, −0.07332, −0.0733, −0.0733, −0.07329, −0.07328, 0.07327, 0.07327, −0.07324, −0.07322, −0.0732, −0.07318, −0.07318, −0.07317, −0.07316, −0.07315, −0.07315, −0.07315, 0.07315, 0.07313, 0.07309, 0.07307, 0.07306, 0.07306, 0.07305, −0.07304, −0.07303, −0.07301, −0.07301, 0.073, 0.07297, −0.07297, −0.07296, −0.07296, −0.07293, −0.07292, 0.0729, −0.07286, −0.07286, −0.07281, 0.07279, −0.07278, 0.07277, −0.07276, 0.07275, −0.07271, −0.0727, −0.0727, 0.0727, −0.07269, −0.07269, 0.07267, −0.07266, −0.07263, 0.0726, −0.0726, 0.07258, −0.07256, 0.07255, 0.07255, −0.07255, −0.07252, −0.07252, −0.07251, −0.0725, −0.07249, 0.07247, 0.07247, 0.07246, −0.07245, 0.07239, −0.07235, −0.07232, 0.07231, 0.0723, −0.07229, 0.07226, 0.07226, 0.07225, −0.07222, 0.07221, −0.0722, 0.07218, 0.07218, 0.07217, 0.07216, −0.07216, 0.07214, −0.07213, 0.07212, −0.07212, −0.07211, −0.0721, 0.07208, −0.07204, −0.07202, −0.07202, 0.07196, −0.07195, 0.07193, −0.07191, −0.07191, 0.07186, −0.07183, 0.07181, 0.07179, 0.07177, −0.07172, −0.07168, 0.07166, −0.07162, −0.07161, −0.07157, −0.07157, 0.07156, −0.07156, −0.07155, −0.07154, −0.07152, 0.07152, −0.07152, 0.07151, 0.07145, −0.07142, 0.0714, −0.0714, 0.07135, 0.07133, 0.07133, 0.07132, −0.07128, −0.07127, −0.07121, 0.07121, −0.07118, 0.07114, −0.07111, −0.07111, −0.07109, −0.07106, 0.07103, 0.07098, −0.07098, 0.07098, −0.07098, −0.07094, 0.07092, 0.07087, 0.07086, −0.07084, 0.07079, −0.07077, −0.07075, −0.07074, 0.07072, −0.07071, 0.07071, −0.07069, 0.07069, −0.07066, 0.07063, −0.07063, 0.07062, 0.07062, −0.07058, 0.07057, −0.07056, 0.07056, 0.07054, −0.07053, −0.07051, 0.0705, −0.07048, −0.07048, −0.07048, 0.07044, 0.07043, −0.07043, −0.07041, −0.07041, −0.0704, 0.0704, −0.07039, −0.07039, 0.07037, 0.07037, −0.07036, 0.07034, 0.07032, −0.07032, −0.07031, −0.07031, 0.0703, 0.07028, −0.07025, −0.07024, 0.07023, 0.07023, 0.07022, −0.07019, 0.07019, −0.07019, −0.07016, −0.07015, 0.07014, −0.07013, 0.07013, 0.07012, −0.07009, −0.07008, −0.07008, 0.07008, 0.07007, −0.07006, 0.07006, −0.07006, −0.07005, 0.07001, 0.07001, −0.07, −0.06998, 0.06998, 0.06996, 0.06993, −0.06993, 0.06992, −0.06984, −0.06984, −0.06983, 0.0698, 0.06977, −0.06974, −0.06972, 0.06971, 0.06971, −0.0697, 0.06968, 0.06967, −0.06966, −0.06965, 0.06964, −0.06961, −0.06961, 0.0696, 0.06959, −0.06957, −0.06954, −0.06954, 0.06952, −0.0695, −0.0695, 0.06949, 0.06949, 0.06948, 0.06947, −0.06945, −0.06937, −0.06935, 0.06934, 0.06932, −0.06931, 0.06929, 0.06929, −0.06928, 0.06927, −0.06925, −0.06924, 0.06924, 0.06924, 0.06919, 0.06918, 0.06916, −0.06916, −0.06916, −0.06916, −0.06913, 0.06912, −0.06911, 0.06911, 0.0691, −0.06909, −0.06906, −0.06905, −0.06901, 0.06899, 0.06898, −0.06897, 0.06896, 0.06895, 0.06895, 0.06893, −0.06892, 0.06892, 0.06891, 0.06889, 0.06887, 0.06882, 0.06882, −0.0688, −0.06877, 0.06875, 0.06875, 0.06873, 0.06873, −0.06872, 0.06872, 0.06871, 0.0687, 0.06869, −0.06863, 0.06862, 0.0686, 0.06859, 0.06858, −0.06856, 0.06856, −0.06855, −0.06853, 0.06853, −0.06852, 0.06852, 0.06848, −0.06846, 0.06845, −0.06844, 0.06842, −0.06842, 0.06842, 0.06842, −0.0684, 0.06839, −0.06835, −0.06831, 0.06831, −0.06829, 0.06827, 0.06827, 0.06826, 0.06825, −0.06823, 0.06823, −0.06821, −0.06821, −0.0682, −0.06817, −0.06816, −0.06813, 0.06812, 0.06811, −0.0681, 0.0681, 0.06808, −0.06805, 0.06803, 0.06803, 0.068, 0.06799, −0.06799, 0.06798, −0.06798, 0.06795, −0.06794, 0.06793, −0.06791, 0.06791, −0.06788, −0.06786, −0.06786, 0.06786, −0.06785, −0.06781, 0.06777, 0.06776, −0.06773, 0.06771, 0.0677, −0.0677, −0.0677, −0.06764, 0.06763, 0.06762, 0.06761, −0.06761, −0.06758, 0.06758, 0.06755, −0.06755, 0.06755, −0.06754, −0.06754, −0.06753, −0.06752, −0.06752, −0.06748, −0.06748, −0.06745, 0.06744, 0.06742, 0.06742, 0.06738, −0.06738, −0.06737, −0.06737, −0.06736, 0.06735, 0.06734, −0.06734, −0.06732, 0.06729, 0.06729, 0.06728, 0.06727, 0.06726, −0.06725, 0.06724, −0.06722, −0.06721, 0.06718, 0.06718, 0.06718, 0.06712, 0.06712, 0.06712, 0.06711, −0.06711, 0.0671, −0.0671, −0.06708, −0.06707, −0.06705, 0.06703, −0.06699, 0.06699, 0.06699, −0.06698, 0.06698, −0.06697, 0.06694, 0.06693, 0.0669, −0.06687, 0.06685, −0.06684, −0.06678, 0.06675, −0.06674, −0.06672, 0.06671, 0.06669, −0.06669, 0.06668, −0.06667, −0.06666, −0.06665, −0.06663, −0.0666, −0.0666, −0.0666, −0.06655, −0.0665, 0.06649, 0.06648, −0.06645, −0.06644, −0.06643, 0.06642, −0.06642, −0.06641, 0.06637, 0.06636, −0.06636, −0.06635, 0.06634, −0.06634, −0.06634, −0.06634, 0.06634, 0.06634, −0.06631, −0.06631, −0.06624, 0.06622, 0.06621, 0.06621, 0.0662, −0.06619, −0.06619, −0.06618, −0.06617, −0.06613, 0.06605, −0.06605, −0.06601, 0.06601, −0.06598, −0.06595, 0.06593, 0.06593, 0.06591, 0.06589, −0.06586, −0.06584, −0.06581, −0.0658, 0.06579, −0.06579, 0.06576, −0.06576, −0.06573, 0.06573, 0.06568, −0.06567, −0.06564, −0.06562, 0.0656, 0.06559, 0.06558, 0.06558, 0.06557, 0.06554, −0.06553, −0.06553, −0.0655, 0.0655, 0.06549, −0.06547, −0.06545, −0.06538, 0.06536, −0.06536, 0.06535, 0.06535, 0.06535, 0.06534, −0.06533, −0.06532, 0.0653, −0.06528, 0.06527, 0.06525, 0.06521, −0.0652, −0.06518, −0.06516, 0.06513, −0.06512, 0.06511, 0.0651, −0.06509, 0.06509, 0.06507, 0.06506, 0.06503, −0.06502, −0.06501, 0.065, −0.065, 0.06499, 0.06497, −0.06495, −0.06495, −0.06494, −0.06493, 0.06492, −0.06492, −0.0649, −0.0649, 0.06489, 0.06483, −0.06483, 0.06482, 0.06481, −0.0648, −0.06479, −0.06479, −0.06478, 0.06478, 0.06478, 0.06478, 0.06477, 0.06475, −0.06474, 0.06474, −0.0647, −0.0647, 0.06465, −0.06465, 0.06464, 0.06463, −0.06463, 0.06462, 0.0646, −0.06459, 0.06458, −0.06457, 0.06454, 0.06452, 0.0645, 0.06449, 0.06449, −0.06448, −0.06448, −0.06447, −0.06445, −0.06445, 0.06444, −0.06444, −0.06443, 0.06443, −0.06442, 0.06441, −0.06441, 0.06438, 0.06437, 0.06437, −0.06434, −0.06434, −0.06432, −0.06432, −0.06432, −0.0643, 0.0643, −0.0643, −0.06428, −0.06427, −0.06425, −0.06423, −0.06421, 0.06418, −0.06415, −0.06414, −0.06414, −0.06413, 0.06411, −0.06407, −0.06407, 0.06406, 0.06401, 0.06398, 0.06397, 0.06394, −0.06394, −0.06393, 0.06391, 0.06391, 0.06387, 0.06387, −0.06385, −0.06384, 0.06384, −0.0638, −0.06379, −0.06379, 0.06373, 0.06371, −0.0637, 0.06369, −0.06369, 0.06369, −0.06367, 0.06366, 0.06366, −0.06365, −0.06364, 0.06363, −0.06362, −0.06361, 0.0636, −0.0636, −0.06358, 0.06355, −0.06354, 0.06353, 0.06353, 0.06352, 0.06352, −0.06352, 0.06351, −0.0635, 0.06349, −0.06348, 0.06348, 0.06346, −0.06341, −0.06339, −0.06339, 0.06339, −0.06336, −0.06334, −0.06333, −0.06332, −0.06328, 0.06327, 0.06324, 0.06323, 0.06323, −0.06323, 0.06322, 0.06321, −0.0632, −0.0632, 0.06318, 0.06318, −0.06318, −0.06317, 0.06317, −0.06316, 0.06314, −0.06313, 0.06312, −0.06312, 0.06312, −0.06312, −0.06311, −0.0631, 0.06309, −0.06309, 0.06308, 0.06308, 0.06306, −0.06305, −0.06305, −0.06301, 0.063, −0.06295, 0.06294, −0.06293, −0.06289, −0.06289, −0.06289, −0.06288, 0.06285, 0.0628, 0.06278, −0.06276, 0.06274, −0.06274, −0.06273, −0.06273, 0.06272, 0.06271, 0.06271, 0.06269, 0.06268, −0.06267, −0.06266, −0.06265, 0.06263, −0.06262, −0.06262, −0.06261, 0.06261, −0.06259, 0.06259, −0.06259, −0.06258, 0.06258, −0.06257, −0.06255, 0.06255, −0.06255, −0.06254, 0.06253, 0.06253, −0.06251, 0.06249, −0.06249, 0.06245, −0.06245, −0.06245, −0.06245, 0.06244, −0.06242, −0.06242, 0.06241, 0.0624, −0.06239, −0.06238, −0.06236, −0.06235, −0.06231, 0.06231, 0.06229, 0.06228, −0.06227, 0.06227, −0.06226, 0.06226, 0.06224, −0.06224, 0.06224, −0.06223, −0.06222, −0.06221, −0.06221, −0.06221, −0.06218, 0.06216, −0.06215, −0.06213, 0.06212, −0.0621, 0.06209, −0.06207, −0.06205, −0.06203, −0.062, −0.062, 0.06196, 0.06195, 0.06194, 0.06192, 0.0619, 0.0619, 0.06187, 0.06186, −0.0618, −0.06179, 0.06178, 0.06178, −0.06176, −0.06176, 0.06174, 0.06169, 0.06167, −0.06167, −0.06166, 0.06165, 0.06161, −0.06161, 0.0616, 0.06156, −0.06155, 0.06152, −0.06152, 0.06151, 0.06151, −0.0615, −0.06148, 0.06146, 0.06146, 0.06145, −0.06145, −0.06145, −0.06143, −0.0614, −0.06138, −0.06138, 0.06137, 0.06135, −0.06135, −0.06134, −0.06132, −0.06132, −0.06132, 0.06129, 0.06129, 0.06129, 0.06128, 0.06128, 0.06128, 0.06125, 0.06124, −0.06124, −0.06121, 0.0612, −0.0612, 0.06119, −0.06119, −0.06118, 0.06114, −0.06113, 0.06112, 0.0611, −0.0611, −0.06109, 0.06108, −0.06107, 0.06106, −0.06106, 0.06105, 0.06101, 0.06099, 0.06099, 0.06098, 0.06098, 0.06096, 0.06096, −0.06095, 0.06093, −0.06093, 0.06093, 0.06093, 0.06093, −0.06093, 0.0609, 0.0609, −0.06087, −0.06085, −0.06085, −0.06084, 0.06084, −0.06082, −0.06081, 0.0608, 0.06078, 0.06077, 0.06075, 0.06075, −0.06075, 0.06074, 0.06073, 0.06071, −0.06069, 0.06069, 0.06068, −0.06067, −0.06066, 0.06063, 0.06063, 0.06059, 0.06059, −0.06058, −0.06056, 0.06052, 0.06051, 0.0605, 0.06048, −0.06045, 0.06042, −0.06039, 0.06038, 0.06036, −0.06033, 0.06032, −0.06031, −0.0603, 0.0603, −0.06028, 0.06027, 0.06026, −0.06024, 0.06021, 0.06021, −0.06019, −0.06019, −0.06017, −0.06016, −0.06016, −0.06016, −0.06015, 0.06014, 0.06013, 0.06013, 0.06012, −0.06012, 0.0601, −0.06008, −0.06007, 0.06006, 0.06006, 0.06005, 0.06003, −0.06001, 0.06001, 0.06, −0.06, −0.06, −0.05999, −0.05998, −0.05998, −0.05996, −0.05996, 0.05995, −0.05995, −0.05993, 0.05989, −0.05988, −0.05988, 0.05986, 0.05986, −0.05985, −0.05984, 0.05984, 0.05983, −0.05983, −0.05983, 0.05982, −0.05981, −0.0598, 0.05978, 0.05977, 0.05977, −0.05976, −0.05973, 0.05971, 0.05967, −0.05967, −0.05966, 0.05966, −0.05965, −0.05964, −0.05964, −0.05963, 0.05963, −0.05963, 0.05962, −0.05961, 0.0596, 0.0596, 0.0596, 0.05958, 0.05957, 0.05956, −0.05956, −0.05953, 0.05953, −0.05952, −0.05951, −0.0595, 0.05947, 0.05946, 0.05945, −0.05944, −0.05942, −0.0594, −0.0594, −0.05939, −0.05937, −0.05936, −0.05935, −0.05934, −0.05934, 0.05933, −0.05932, −0.05932, −0.05931, −0.05931, −0.0593, 0.0593, 0.05929, 0.05929, 0.05928, −0.05924, 0.05923, −0.05923, 0.05921, −0.05919, −0.05918, 0.05917, 0.05912, 0.05909, 0.05909, 0.05908, −0.05903, −0.059, −0.05898, 0.05898, −0.05897, −0.05897, 0.05897, −0.05897, 0.05896, −0.05892, 0.05891, 0.05891, 0.0589, −0.05889, −0.05886, −0.05883, 0.05881, −0.05881, 0.05881, −0.05881, −0.0588, 0.0588, 0.05879, 0.05879, −0.05879, −0.05878, −0.05878, 0.05877, −0.05875, 0.05871, −0.05869, −0.05868, 0.05868, −0.05867, −0.05866, −0.05865, −0.05862, 0.05862, 0.05859, 0.05858, 0.05856, −0.05855, −0.05855, 0.05855, −0.05854, 0.05853, 0.05851, −0.05849, −0.05846, −0.05845, −0.05843, 0.05843, −0.05841, 0.05841, −0.05841, 0.05837, −0.05834, 0.05832, 0.05831, 0.0583, −0.05829, −0.05828, −0.05826, −0.05821, 0.05821, −0.05819, 0.05819, 0.05819, −0.05819, −0.05819, −0.05816, −0.05816, 0.05814, −0.05813, 0.05812, −0.05811, −0.05809, 0.05809, −0.05808, −0.05808, −0.05806, −0.05805, −0.05805, 0.05804, 0.05804, −0.05803, 0.05798, −0.05797, −0.05797, 0.05795, 0.05791, 0.0579, 0.05789, −0.05787, 0.05785, −0.05785, 0.05784, 0.05782, −0.05782, −0.05781, −0.05781, −0.05778, −0.05775, −0.05775, 0.05773, 0.05773, −0.05772, −0.05771, 0.05768, 0.05768, 0.05764, 0.05763, −0.05762, 0.05761, 0.05758, −0.05758, −0.05758, 0.05757, −0.05753, −0.05753, 0.05752, 0.0575, −0.05748, 0.05744, −0.05744, −0.05743, −0.05742, 0.05737, −0.05734, −0.05734, 0.0573, −0.05729, −0.05727, 0.05726, −0.05724, 0.05723, −0.05723, −0.05721, −0.05719, −0.05719, 0.05718, −0.05717, 0.05716, 0.05716, −0.05715, 0.05715, −0.05713, −0.05712, −0.05712, 0.05712, 0.05711, −0.0571, 0.0571, −0.05709, 0.05709, −0.05708, 0.05704, 0.05701, −0.057, 0.05698, −0.05698, 0.05697, 0.05696, 0.05695, −0.05695, −0.05694, −0.05694, 0.05694, −0.05693, 0.05692, 0.05691, −0.05689, 0.05688, 0.05686, 0.05684, 0.05683, −0.05681, 0.05679, −0.05677, 0.05676, 0.05674, 0.05673, −0.05671, −0.0567, −0.0567, 0.05668, 0.05668, 0.05664, −0.05663, 0.05663, −0.05656, −0.05654, 0.05653, 0.05653, −0.05652, −0.05649, 0.05647, 0.05646, −0.05646, 0.05646, 0.05638, −0.05635, −0.05634, −0.05631, 0.0563, 0.05629, 0.05629, 0.05627, 0.05623, −0.05622, −0.05622, 0.05621, −0.05619, 0.05617, −0.05617, −0.05616, −0.05615, 0.05615, −0.05614, −0.05613, −0.05611, 0.05609, 0.05609, −0.05608, −0.05606, −0.05604, −0.05604, −0.05603, 0.05602, −0.05598, −0.05596, −0.05594, −0.05593, −0.05592, 0.05591, 0.0559, 0.05589, 0.05588, −0.05588, 0.05588, −0.05587, 0.05586, −0.05586, −0.05584, −0.05584, 0.05582, −0.05581, −0.05581, 0.05577, 0.05577, −0.05576, 0.05576, 0.05573, −0.0557, 0.05567, 0.05564, 0.05564, 0.05564, 0.05558, 0.05557, 0.05557, 0.05555, −0.05554, −0.05554, 0.05554, −0.05548, 0.05547, −0.05546, −0.05546, 0.05544, 0.05543, −0.05542, −0.0554, −0.05537, −0.05535, 0.05535, 0.05534, 0.05532, 0.05531, −0.0553, −0.0553, 0.0553, −0.05528, −0.05528, −0.05526, −0.05525, −0.05524, −0.05523, 0.05521, −0.05521, −0.0552, 0.05519, −0.05519, 0.05519, 0.05518, 0.05517, −0.05515, 0.05515, −0.05511, −0.0551, 0.05509, 0.05509, −0.05507, 0.05506, −0.05506, 0.05502, 0.05502, −0.055, 0.05495, −0.05495, 0.05494, 0.05493, −0.05493, −0.0549, −0.05489, −0.05488, −0.05487, −0.05486, 0.05485, −0.05484, −0.05484, 0.05484, −0.05483, −0.05483, 0.05482, −0.05482, 0.05481, −0.05481, 0.05481, 0.0548, 0.05479, −0.05478, 0.05473, 0.05473, 0.05471, 0.05469, −0.05469, −0.05469, 0.05468, 0.05467, 0.05466, 0.05466, −0.05465, −0.05463, −0.05462, −0.05462, 0.05461, −0.05461, 0.05461, 0.0546, 0.05458, −0.05457, 0.05456, −0.05455, −0.05454, −0.05453, 0.05453, −0.05452, −0.05452, −0.05451, 0.0545, 0.0545, 0.05449, −0.05449, −0.05448, −0.05445, −0.05445, −0.05444, 0.05444, −0.05444, −0.05442, 0.05442, −0.05442, 0.05442, 0.05441, 0.05439, 0.05438, −0.05436, 0.05436, −0.05434, 0.05433, 0.05433, −0.0543, −0.05429, 0.05427, 0.05427, 0.05425, −0.05425, 0.05424, −0.05421, −0.0542, −0.05419, −0.05419, 0.05416, 0.05414, −0.05413, 0.05413, 0.05413, −0.05412, 0.05411, 0.05411, −0.0541, −0.0541, −0.05408, 0.05405, −0.05404, −0.05403, −0.05402, −0.05401, 0.054, 0.05398, 0.05396, −0.05394, −0.05389, 0.05385, 0.05383, 0.05383, 0.05383, 0.05382, 0.05381, 0.0538, 0.05379, −0.05378, 0.05377, −0.05377, 0.05375, 0.05374, 0.05374, −0.05373, −0.05373, 0.05372, −0.05372, −0.05371, 0.05368, 0.05367, −0.05366, 0.05365, 0.05364, −0.05361, −0.0536, −0.0536, 0.05357, −0.05355, −0.05353, −0.05352, 0.05352, −0.05351, −0.0535, 0.05349, −0.05349, −0.05346, −0.05345, 0.05345, 0.05345, −0.05344, −0.05343, −0.05343, −0.05343, 0.05342, 0.05341, 0.0534, −0.0534, 0.05337, 0.05337, −0.05335, −0.05335, 0.05334, 0.05334, −0.05333, −0.05329, −0.05329, 0.05326, 0.05326, 0.05326, 0.05324, −0.05323, −0.05322, −0.05321, 0.05321, −0.0532, −0.0532, −0.05318, −0.05318, 0.05315, 0.05312, 0.05312, −0.05311, −0.0531, −0.05308, −0.05307, −0.05307, 0.05306, −0.05305, 0.05303, 0.05302, −0.053, −0.05298, 0.05297, −0.05294, 0.05294, −0.05291, −0.05289, 0.05288, −0.05287, −0.05286, −0.05286, 0.05286, 0.05284, −0.05284, −0.05283, 0.05282, −0.05281, 0.0528, −0.0528, −0.05279, −0.05279, 0.05278, 0.05278, −0.05276, 0.05276, 0.05273, −0.0527, 0.05269, 0.05268, 0.05267, −0.05267, 0.05265, 0.05265, 0.05265, −0.05264, 0.05264, −0.05264, −0.05264, 0.05262, −0.05262, −0.05261, 0.0526, 0.05258, −0.05255, −0.05252, −0.05251, 0.05249, −0.05247, 0.05247, 0.05245, 0.05243, −0.05241, 0.05239, −0.05239, 0.05239, 0.05238, −0.05238, 0.05237, −0.05236, −0.05235, −0.05234, −0.05234, −0.05233, 0.05232, −0.05232, 0.0523, 0.05228, −0.05226, −0.05226, −0.05225, 0.05224, 0.05223, 0.05223, −0.05222, 0.05221, 0.0522, 0.05217, −0.05217, 0.05216, 0.05214, −0.05213, 0.0521, 0.05209, 0.05207, 0.05206, 0.05204, −0.05204, −0.05201, −0.052, −0.05198, 0.05197, 0.05195, −0.05195, −0.05194, −0.05193, 0.05193, −0.05192, −0.05191, −0.0519, −0.0519, −0.05188, −0.05187, −0.05186, −0.05183, 0.05181, −0.05181, −0.05181, 0.05181, −0.05179, 0.05178, −0.05177, −0.05177, −0.05176, 0.05176, 0.05175, 0.05175, −0.05172, 0.05172, 0.05171, 0.05171, −0.0517, 0.05169, −0.05169, −0.05168, −0.05168, 0.05168, −0.05166, 0.05165, −0.05165, −0.05164, −0.05164, −0.05163, 0.05162, 0.05161, 0.05161, −0.0516, 0.0516, 0.05159, −0.05158, −0.05158, 0.05157, −0.05157, 0.05154, 0.05153, 0.0515, 0.0515, −0.05149, −0.05149, 0.05148, 0.05141, 0.05141, 0.05141, −0.05141, −0.0514, 0.05137, −0.05137, 0.05137, −0.05136, −0.05136, −0.05134, 0.05133, −0.05133, −0.05132, −0.05132, −0.0513, −0.05127, −0.05127, 0.05126, −0.05124, 0.05123, −0.05123, 0.05123, −0.05122, 0.05121, 0.05117, −0.05116, 0.05116, 0.05115, 0.05115, −0.05113, 0.05113, −0.05112, −0.05112, −0.05111, 0.0511, −0.0511, 0.0511, 0.05107, 0.05107, −0.05107, 0.05106, 0.05105, 0.05105, −0.05104, −0.05103, −0.05102, 0.051, −0.05099, −0.05098, 0.05098, −0.05096, 0.05095, 0.05093, 0.05091, 0.05085, 0.05085, 0.05085, −0.05083, −0.05083, 0.05083, 0.05083, 0.05082, 0.05082, −0.05082, −0.0508, −0.05077, 0.05074, −0.05073, 0.05073, −0.05071, −0.05069, −0.05068, 0.05067, 0.05066, −0.05066, −0.05062, −0.05061, −0.0506, −0.0506, −0.0506, −0.05059, −0.05058, 0.05057, 0.05054, 0.05052, 0.05049, −0.05048, 0.05047, −0.05044, −0.05044, 0.05043, −0.05041, 0.05041, −0.05041, 0.05039, −0.05038, −0.05037, 0.05037, −0.05036, 0.05036, −0.05035, 0.05035, −0.05035, −0.05035, −0.05034, −0.05033, −0.05031, −0.05031, −0.05031, −0.0503, 0.0503, −0.0503, −0.05029, −0.05029, −0.05026, 0.05024, −0.05023, −0.05021, 0.0502, 0.0502, −0.05019, −0.05018, 0.05018, 0.05017, −0.05016, −0.05015, −0.05013, 0.05012, −0.05011, −0.0501, −0.05009, −0.05008, 0.05007, 0.05006, 0.05006, −0.05005, −0.05005, −0.05004, −0.05003, 0.05002, 0.05001, −0.05, −0.04997, −0.04997, 0.04997, 0.04996, 0.04996, −0.04995, 0.04995, 0.04992, −0.04991, −0.04991, 0.04991, 0.04989, −0.04989, 0.04988, −0.04987, 0.04987, 0.04984, 0.04984, 0.04982, −0.04982, −0.04981, 0.04981, −0.04976, −0.04976, 0.04973, −0.04973, 0.04972, 0.04972, −0.04971, 0.04968, −0.04967, −0.04966, 0.04964, −0.04961, 0.0496, −0.04958, 0.04958, −0.04957, 0.04955, −0.04955, −0.04955, 0.04953, 0.04953, 0.04952, 0.04951, −0.0495, 0.04948, −0.04947, 0.04946, −0.04945, −0.04945, −0.04943, 0.04941, −0.04941, 0.04941, −0.04939, 0.04938, −0.04936, 0.04934, −0.04934, −0.04933, −0.04932, 0.04931, −0.0493, −0.0493, 0.04929, 0.04928, −0.04928, −0.04928, −0.04926, −0.04925, −0.04925, −0.04925, 0.04922, 0.04921, 0.04918, −0.04916, −0.04916, −0.04912, −0.04907, 0.04906, −0.04906, −0.04906, 0.04904, 0.04903, −0.04902, −0.04902, −0.049, 0.049, 0.04897, −0.04897, −0.04897, −0.04897, −0.04895, 0.04894, −0.04894, −0.04892, 0.0489, 0.04888, 0.04885, 0.04883, −0.04883, 0.04883, −0.04883, 0.0488, 0.04877, −0.04875, 0.04875, 0.04874, −0.04871, 0.0487, 0.04868, 0.04866, 0.04861, −0.04861, −0.0486, 0.04859, −0.04856, −0.04856, 0.04854, 0.04854, 0.04853, −0.04852, 0.04852, −0.04851, 0.04851, −0.0485, −0.04849, −0.04848, −0.04847, 0.04846, 0.04845, −0.04845, 0.04843, −0.04843, −0.04842, 0.04842, −0.04842, −0.04841, 0.04841, 0.04841, 0.0484, 0.0484, −0.04838, −0.04836, 0.04832, −0.04831, 0.0483, 0.04829, −0.04829, 0.04828, 0.04827, −0.04827, 0.04826, 0.04826, 0.04826, −0.04825, 0.04825, 0.04824, −0.04824, −0.04824, 0.04821, −0.04821, 0.04818, 0.04817, −0.04817, −0.04816, 0.04813, 0.04813, 0.04812, −0.04811, 0.04811, −0.04811, −0.0481, 0.04808, −0.04806, −0.04806, −0.04806, 0.04805, 0.04805, 0.04804, 0.04802, 0.048, −0.048, 0.04799, 0.04797, 0.04795, −0.04794, 0.04793, 0.04792, −0.04792, −0.04792, 0.04791, 0.04791, 0.04791, 0.04789, −0.04788, −0.04787, 0.04784, −0.04782, 0.04781, 0.04781, 0.04781, −0.04779, 0.04778, −0.04776, −0.04776, −0.04776, −0.04775, 0.04774, −0.04774, 0.04773, −0.04773, 0.04772, −0.0477, 0.0477, −0.0477, 0.04769, 0.04769, 0.04768, −0.04767, −0.04766, 0.04765, 0.04764, 0.04764, −0.04762, 0.04762, 0.04762, −0.04759, −0.04756, −0.04755, 0.04755, −0.04753, 0.04753, −0.04752, 0.04752, 0.0475, −0.0475, 0.04749, −0.04749, 0.04748, 0.04748, −0.04747, 0.04747, −0.04746, 0.04745, −0.04744, 0.04744, −0.04743, −0.04741, 0.04741, 0.0474, −0.04738, −0.04737, 0.04736, 0.04736, −0.04734, 0.04733, 0.04732, 0.04732, 0.04731, −0.0473, 0.0473, 0.0473, 0.04729, −0.04728, −0.04727, 0.04725, −0.04725, −0.04724, −0.04723, 0.04723, 0.04723, −0.04723, −0.04722, 0.04722, 0.04721, 0.04719, −0.04718, 0.04718, 0.04718, 0.04713, −0.04713, −0.04711, 0.04711, −0.04711, −0.04709, −0.04708, 0.04707, −0.04704, −0.04704, −0.04703, −0.04703, −0.04701, −0.04697, −0.04695, 0.04695, −0.04695, 0.04694, −0.04694, 0.04692, 0.04691, 0.04691, 0.04691, −0.04691, 0.0469, −0.04688, 0.04687, 0.04687, 0.04686, −0.04685, −0.04685, −0.04685, −0.04684, 0.04684, 0.04683, −0.04683, −0.04682, −0.04682, 0.0468, −0.0468, −0.0468, 0.04679, −0.04678, 0.04676, −0.04676, 0.04676, −0.04673, 0.04673, 0.04669, −0.04669, −0.04668, 0.04668, −0.04668, 0.04668, 0.04667, 0.04666, −0.04665, 0.04665, 0.04663, 0.04663, −0.04663, −0.04662, 0.04662, 0.04662, −0.04661, 0.0466, 0.04658, 0.04657, 0.04656, −0.04656, −0.04655, −0.04654, 0.04654, 0.04651, 0.04651, 0.04651, −0.04649, 0.04648, 0.04647, −0.04647, 0.04646, 0.04645, −0.04641, −0.04639, −0.04639, −0.04638, 0.04637, 0.04636, −0.04633, 0.04632, −0.04632, −0.0463, 0.04629, 0.04629, 0.04628, 0.04627, −0.04627, −0.04626, 0.04626, −0.04626, −0.04625, 0.04624, 0.04623, −0.04621, −0.04621, 0.04619, 0.04619, −0.04618, −0.04617, −0.04617, −0.04615, −0.04615, 0.04614, −0.04613, −0.04612, 0.04612, 0.04611, −0.04611, 0.0461, −0.04609, 0.04608, −0.04606, 0.04605, −0.04603, 0.04603, 0.04603, −0.04603, −0.04601, −0.04599, −0.04599, 0.04597, 0.04597, 0.04597, −0.04597, −0.04596, −0.04596, 0.04592, 0.04591, −0.04591, 0.0459, −0.04589, 0.04588, −0.04586, −0.04586, −0.04586, −0.04585, −0.04585, 0.04584, 0.04583, −0.04583, 0.04582, 0.04581, 0.0458, 0.04579, 0.04579, 0.04579, 0.04578, −0.04578, −0.04578, 0.04578, 0.04576, −0.04576, 0.04575, 0.04575, −0.04575, −0.04574, 0.04574, −0.04572, 0.04572, −0.04572, −0.04572, 0.04569, −0.04568, 0.04567, −0.04566, −0.04566, −0.04565, −0.04565, 0.04565, −0.04564, −0.04563, −0.04563, 0.04562, 0.04562, −0.04562, 0.04561, −0.04559, −0.04559, −0.04559, 0.04557, 0.04555, 0.04555, −0.04553, −0.04552, 0.04551, −0.0455, −0.04546, 0.04545, 0.04544, −0.04543, −0.0454, −0.04539, 0.04539, 0.04538, 0.04537, 0.04537, 0.04537, −0.04537, 0.04536, −0.04536, −0.04535, 0.04535, −0.04534, −0.04534, −0.04533, 0.04533, 0.04531, −0.0453, 0.04528, 0.04526, −0.04526, 0.04524, 0.04523, −0.04523, −0.04523, 0.04522, 0.04521, 0.04521, −0.0452, −0.04519, 0.04518, 0.04516, −0.04515, −0.04514, 0.04514, −0.04508, −0.04507, 0.04505, −0.04505, 0.04504, 0.04504, 0.04504, 0.04504, −0.04503, 0.04503, 0.04502, 0.04502, −0.045, −0.045, 0.045, −0.045, −0.04499, −0.04496, −0.04496, 0.04494, −0.04494, −0.04493, 0.04493, −0.04493, 0.04493, −0.0449, −0.0449, −0.04489, −0.04488, −0.04488, −0.04488, −0.04486, 0.04483, 0.04483, −0.04482, −0.04482, −0.04481, 0.04481, −0.0448, −0.0448, −0.04479, 0.04478, 0.04476, 0.04475, −0.04474, −0.04473, 0.04471, 0.0447, 0.04469, 0.04469, −0.04469, −0.04468, −0.04468, −0.04466, 0.04465, −0.04464, −0.04464, −0.04464, −0.04462, 0.04461, 0.04461, 0.04459, −0.04459, −0.04457, −0.04456, 0.04456, −0.04454, 0.04454, 0.04453, −0.04453, −0.04453, −0.04452, 0.04452, 0.04451, 0.04451, −0.0445, 0.0445, 0.04449, −0.04449, −0.04448, −0.04448, 0.04446, −0.04446, −0.04445, 0.04445, 0.04445, 0.04442, 0.04442, 0.0444, 0.04436, 0.04436, −0.04436, 0.04435, 0.04432, −0.04431, 0.04429, −0.04429, 0.04428, −0.04428, −0.04427, 0.04427, 0.04427, 0.04427, 0.04427, −0.04424, −0.04424, 0.04424, −0.04423, −0.04422, −0.04418, 0.04418, −0.04417, −0.04417, 0.04417, 0.04414, −0.04414, −0.04413, 0.04412, 0.04411, 0.04411, −0.0441, 0.04409, −0.04408, 0.04408, 0.04408, −0.04408, 0.04407, 0.04407, 0.04407, −0.04406, 0.04406, −0.04403, −0.04402, −0.04401, 0.04401, 0.044, 0.04398, 0.04397, 0.04397, −0.04396, −0.04396, −0.04395, 0.04393, 0.04393, 0.04393, −0.04389, −0.04389, −0.04389, −0.04388, −0.04388, 0.04387, 0.04387, 0.04386, −0.04385, −0.04384, 0.04384, −0.04384, 0.04383, 0.04382, −0.04382, 0.04381, −0.04378, 0.04376, 0.04375, −0.04374, −0.04374, 0.04373, −0.04373, 0.04373, 0.0437, −0.0437, −0.04369, 0.04367, −0.04367, 0.04366, −0.04366, 0.04366, 0.04364, 0.04363, −0.04363, 0.04363, −0.04362, 0.0436, −0.04359, −0.04353, −0.04352, −0.04352, −0.04351, −0.0435, −0.04349, −0.04348, 0.04348, 0.04345, −0.04344, −0.04342, −0.04342, 0.04341, 0.0434, 0.0434, −0.0434, −0.04338, 0.04337, 0.04337, −0.04337, 0.04336, −0.04336, −0.04336, 0.04335, 0.04334, −0.04333, −0.04332, 0.04332, −0.04331, −0.04331, 0.0433, −0.04329, 0.04326, −0.04326, 0.04326, 0.04325, −0.04325, −0.04325, −0.04324, −0.04324, 0.04324, −0.04324, 0.04323, −0.04323, 0.04323, −0.04321, −0.0432, −0.04319, −0.04319, −0.04317, 0.04316, −0.04316, −0.04316, −0.04315, −0.04314, 0.0431, 0.0431, 0.04309, −0.04306, −0.04305, −0.04304, 0.04304, −0.04302, −0.04301, −0.043, 0.043, 0.043, −0.04298, 0.04297, −0.04296, −0.04296, −0.04293, 0.04293, −0.04293, 0.04293, −0.04292, 0.04286, −0.04286, 0.04285, −0.04284, 0.04284, −0.04282, 0.04281, −0.04279, 0.04277, −0.04277, −0.04275, −0.04274, 0.04273, −0.04273, 0.04273, 0.04272, −0.04271, −0.04271, −0.04271, 0.0427, 0.04267, 0.04267, 0.04266, 0.04264, −0.04263, 0.04263, 0.04262, −0.04262, −0.0426, 0.04258, 0.04257, −0.04256, 0.04254, 0.04254, 0.04254, −0.04254, −0.04253, −0.04252, 0.04252, 0.04251, 0.0425, 0.0425, 0.04249, 0.04248, 0.04247, −0.04246, −0.04245, −0.04245, 0.04244, 0.04244, 0.04243, 0.04242, 0.04242, −0.04241, 0.04239, −0.04238, 0.04237, −0.04237, −0.04236, 0.04236, −0.04234, −0.04233, −0.04232, 0.04232, 0.04229, −0.04229, −0.04228, 0.04228, −0.04227, −0.04227, −0.04227, −0.04227, −0.04226, 0.04225, 0.04224, −0.04223, −0.04221, 0.0422, 0.04218, −0.04217, −0.04217, −0.04216, 0.04216, −0.04216, 0.04212, −0.04212, −0.04211, 0.0421, −0.04209, −0.04206, −0.04206, −0.04205, −0.04205, −0.04205, 0.04204, 0.04203, −0.04203, −0.04203, 0.04202, −0.04201, −0.04198, −0.04198, −0.04198, 0.04196, 0.04196, 0.04195, −0.04194, −0.04193, −0.04193, −0.04193, 0.04193, −0.04192, −0.04192, 0.0419, 0.0419, 0.0419, −0.0419, −0.04189, −0.04189, 0.04188, 0.04188, −0.04188, 0.04188, 0.04184, −0.04182, 0.04181, −0.04179, 0.04179, 0.04178, 0.04178, 0.04177, 0.04177, −0.04176, −0.04176, −0.04174, −0.04174, −0.04171, 0.04169, 0.04168, 0.04167, −0.04166, −0.04165, −0.04165, −0.04164, 0.04161, −0.04161, 0.0416, 0.0416, −0.04158, 0.04157, −0.04157, 0.04155, −0.04154, 0.04154, 0.04153, 0.04153, 0.04152, 0.04152, −0.04151, 0.04151, −0.04151, −0.04148, 0.04147, −0.04146, 0.04146, 0.04146, −0.04145, 0.04145, 0.04144, −0.04144, −0.04144, −0.04144, −0.04143, −0.04142, −0.04142, 0.04142, −0.04142, −0.04141, −0.04139, 0.04139, −0.04137, −0.04134, 0.04133, −0.04132, 0.04132, −0.04131, −0.0413, −0.04129, 0.04129, 0.04129, 0.04129, 0.04128, 0.04128, 0.04127, 0.04125, −0.04125, −0.04125, 0.04124, −0.04124, 0.04123, −0.04123, −0.04122, 0.04122, −0.04121, 0.0412, −0.0412, −0.04119, 0.04118, 0.04118, −0.04118, −0.04118, 0.04116, −0.04116, −0.04111, −0.0411, 0.0411, −0.04108, 0.04107, 0.04105, 0.04104, 0.04104, 0.04103, −0.04103, 0.04102, −0.041, 0.04099, 0.04098, 0.04098, 0.04097, −0.04093, −0.04092, 0.04092, 0.0409, 0.04089, −0.04088, 0.04086, −0.04085, 0.04084, 0.04084, 0.04083, 0.04083, −0.04082, −0.04082, 0.04081, 0.0408, −0.04079, −0.04075, 0.04073, −0.04073, −0.04073, −0.04073, −0.04072, −0.04071, 0.0407, 0.04069, 0.04069, 0.04068, −0.04068, −0.04067, −0.04066, −0.04065, 0.04065, −0.04065, 0.04063, −0.04062, −0.04062, 0.04061, 0.04061, 0.0406, −0.04059, 0.04058, 0.04058, 0.04058, 0.04056, 0.04056, −0.04055, 0.04053, −0.04053, −0.04051, −0.04051, −0.04051, −0.0405, −0.04049, −0.04049, 0.04048, −0.04047, 0.04046, 0.04044, −0.04044, −0.04043, −0.04043, −0.04043, 0.04043, 0.04042, 0.0404, −0.0404, 0.04039, −0.04039, 0.04038, −0.04037, −0.04036, 0.04034, 0.04034, −0.04034, −0.04033, 0.04032, 0.04032, −0.04031, 0.0403, −0.0403, 0.0403, −0.04029, 0.04029, 0.04028, 0.04026, −0.04025, 0.04024, −0.04024, 0.04021, −0.04021, 0.0402, 0.0402, −0.04019, 0.04018, −0.04018, −0.04018, 0.04017, −0.04016, −0.04016, 0.04013, 0.04013, 0.0401, 0.0401, 0.0401, 0.0401, 0.04007, −0.04007, 0.04005, −0.04004, 0.04001, 0.03999, 0.03997, −0.03997, −0.03995, −0.03995, −0.03994, 0.03993, 0.03993, 0.03992, 0.03992, −0.03992, 0.03991, −0.0399, 0.0399, 0.03988, −0.03988, 0.03988, −0.03986, 0.03985, 0.03985, −0.03983, −0.03983, 0.03982, −0.03982, −0.03981, −0.03979, 0.03979, −0.03978, 0.03978, −0.03976, 0.03976, 0.03975, 0.03974, 0.03974, 0.03973, −0.03973, −0.03972, 0.03972, 0.03972, 0.03972, −0.03971, 0.0397, 0.0397, 0.03969, −0.03968, 0.03968, −0.03967, −0.03966, −0.03966, 0.03965, 0.03964, 0.03963, −0.03962, 0.03961, 0.03961, 0.03961, 0.0396, 0.0396, 0.03959, 0.03959, 0.03958, −0.03956, 0.03956, 0.03954, −0.03953, −0.03953, −0.03952, −0.03951, −0.03949, −0.03949, 0.03949, 0.03949, 0.03948, 0.03946, 0.03944, 0.03943, 0.03942, 0.03941, −0.03941, 0.03941, −0.03941, −0.0394, −0.03939, −0.03938, 0.03937, 0.03935, −0.03935, 0.03935, −0.03934, 0.03933, −0.03933, 0.03932, −0.03931, −0.0393, 0.03929, −0.03929, 0.03926, −0.03924, 0.03922, −0.03921, −0.0392, −0.0392, −0.03918, −0.03917, −0.03917, −0.03915, −0.03915, −0.03915, −0.03913, 0.03913, 0.03912, −0.03911, −0.03911, 0.0391, −0.0391, −0.03909, −0.03906, 0.03905, 0.03903, 0.03903, 0.039, 0.03899, 0.03899, −0.03899, 0.03897, 0.03897, −0.03897, −0.03897, 0.03897, 0.03896, −0.03896, 0.03896, −0.03895, −0.03894, 0.03894, −0.03893, −0.03893, −0.03892, 0.03891, 0.03891, 0.0389, −0.0389, 0.03889, 0.03889, −0.03888, 0.03887, −0.03885, −0.03885, 0.03884, 0.03883, 0.03882, −0.03882, 0.03881, 0.03881, 0.0388, 0.03879, −0.03879, 0.03879, 0.03879, 0.03877, −0.03877, −0.03877, 0.03877, −0.03877, −0.03877, 0.03876, 0.03875, 0.03875, 0.03875, 0.03874, −0.03873, 0.03872, −0.03872, −0.03871, 0.03871, −0.0387, −0.03868, 0.03868, −0.03867, 0.03864, 0.03864, 0.03863, 0.03862, −0.03861, −0.03861, 0.0386, 0.03857, −0.03856, −0.03856, −0.03856, 0.03855, −0.03855, −0.03855, 0.03855, 0.03853, −0.03853, −0.03852, 0.0385, 0.0385, 0.03848, −0.03848, 0.03847, 0.03846, 0.03846, 0.03841, −0.03839, 0.03838, −0.03838, −0.03837, 0.03836, −0.03835, −0.03835, 0.03835, −0.03834, −0.03834, −0.03834, −0.03833, 0.03832, −0.03831, 0.0383, 0.0383, −0.03828, −0.03828, 0.03828, 0.03826, −0.03825, −0.03824, 0.03822, −0.03821, 0.03819, 0.03817, −0.03817, −0.03817, 0.03817, 0.03816, 0.03816, 0.03815, −0.03815, 0.03814, 0.03814, 0.03814, 0.03812, −0.0381, −0.0381, 0.0381, 0.03808, −0.03807, −0.03807, −0.03807, −0.03805, −0.03805, 0.03805, 0.03804, 0.03804, −0.03803, −0.03802, −0.03799, 0.03799, 0.03797, −0.03796, −0.03795, −0.03794, −0.03792, 0.03792, 0.03791, 0.03789, −0.03788, 0.03786, −0.03785, −0.03784, −0.03783, −0.03782, 0.03782, 0.03781, −0.03781, 0.03781, −0.03781, −0.0378, 0.03779, 0.03779, 0.03779, −0.03778, 0.03778, 0.03777, −0.03777, 0.03776, 0.03775, −0.03775, 0.03775, −0.03773, −0.03771, −0.0377, −0.03769, −0.03769, −0.03769, 0.03766, 0.03764, 0.03763, −0.03763, 0.03761, −0.03761, 0.0376, 0.0376, −0.0376, 0.0376, −0.03759, 0.03759, −0.03758, 0.03758, −0.03757, −0.03757, −0.03757, −0.03756, 0.03756, −0.03752, 0.03752, 0.03751, −0.03751, −0.03751, −0.0375, −0.03749, 0.03747, 0.03747, −0.03746, 0.03746, −0.03743, −0.03743, 0.03743, 0.03742, −0.03742, −0.03742, 0.03741, 0.03741, 0.0374, 0.0374, −0.03739, −0.03738, 0.03737, −0.03737, 0.03736, −0.03733, −0.03731, −0.03729, 0.03728, −0.03728, 0.03726, 0.03725, 0.03724, −0.03723, −0.03723, 0.03722, 0.03721, −0.03721, −0.0372, 0.03719, 0.03719, 0.03718, 0.03717, −0.03716, 0.03715, −0.03715, −0.03714, 0.03713, 0.03713, −0.03712, −0.03711, 0.03708, −0.03708, −0.03706, −0.03706, −0.03706, 0.03705, −0.03704, −0.03703, −0.03701, 0.03701, 0.037, −0.037, −0.03699, 0.03698, 0.03696, −0.03696, −0.03695, 0.03695, 0.03695, −0.03694, 0.03692, −0.03692, −0.03692, −0.03691, 0.0369, 0.03689, 0.03688, 0.03685, −0.03681, 0.03681, −0.0368, 0.03677, −0.03675, −0.03675, 0.03673, 0.03672, −0.03672, −0.03671, 0.0367, 0.03669, −0.03669, 0.03668, 0.03667, 0.03666, 0.03666, 0.03664, 0.03661, −0.03661, −0.03661, 0.0366, −0.0366, −0.03658, −0.03658, 0.03655, −0.03654, 0.03653, 0.03653, −0.03653, −0.03651, 0.03651, −0.03651, −0.03651, 0.0365, 0.03649, −0.03649, −0.03648, −0.03648, −0.03647, 0.03646, −0.03644, −0.03644, −0.03644, 0.03644, 0.03643, −0.03643, 0.03643, 0.03643, −0.03642, −0.03642, −0.03642, −0.03642, 0.03639, 0.03638, 0.03637, −0.03636, −0.03634, 0.03634, 0.03633, −0.03632, −0.03632, 0.03632, 0.0363, −0.0363, −0.03629, −0.03629, −0.03629, −0.03627, −0.03627, 0.03626, −0.03626, 0.03625, −0.03625, 0.03624, 0.03624, −0.03623, 0.03623, −0.03623, −0.03621, 0.03621, 0.03618, −0.03618, −0.03617, 0.03617, 0.03616, 0.03615, −0.03615, 0.03615, 0.03615, −0.03613, −0.03612, 0.03611, −0.03611, 0.03611, 0.03611, −0.03608, −0.03607, −0.03606, 0.03605, −0.03601, −0.036, −0.036, 0.036, −0.036, −0.03598, 0.03598, −0.03597, 0.03596, 0.03596, 0.03595, −0.03595, 0.03595, 0.03595, 0.03594, −0.03594, 0.03589, −0.03589, −0.03589, −0.03589, −0.03587, −0.03586, 0.03586, −0.03584, −0.03583, −0.03582, −0.03582, −0.0358, −0.0358, −0.03579, 0.03579, −0.03579, 0.03578, −0.03578, −0.03577, 0.03575, −0.03574, 0.03573, −0.03573, 0.03573, −0.03572, −0.03572, 0.03572, 0.03572, 0.03571, 0.03571, −0.03571, −0.03571, 0.0357, 0.0357, 0.03569, 0.03569, −0.03569, 0.03567, 0.03567, −0.03567, −0.03565, 0.03565, 0.03565, −0.03564, 0.03563, 0.03563, −0.03563, 0.03562, 0.03562, 0.0356, −0.03559, −0.03559, −0.03559, −0.03558, −0.03558, −0.03558, −0.03557, 0.03556, 0.03556, 0.03556, −0.03556, 0.03555, 0.03554, −0.03554, −0.03554, 0.03554, −0.03553, 0.03552, −0.03552, −0.03552, −0.03551, −0.03551, −0.03551, −0.0355, −0.0355, −0.03549, 0.03547, 0.03546, 0.03545, 0.03544, −0.03542, 0.03541, −0.03541, −0.0354, 0.0354, 0.0354, 0.03539, 0.03539, 0.03539, −0.03539, 0.03538, 0.03537, −0.03536, −0.03535, 0.03535, 0.03535, 0.03534, 0.03534, −0.03534, 0.03533, 0.03532, 0.03531, 0.0353, 0.03529, −0.03527, −0.03526, −0.03526, 0.03526, −0.03525, −0.03524, 0.03523, 0.03523, −0.03522, −0.03522, 0.03522, −0.0352, −0.03519, 0.03519, 0.03518, 0.03517, −0.03517, −0.03517, 0.03516, −0.03515, −0.03514, −0.03513, 0.03513, −0.03513, 0.03512, −0.03511, −0.03511, 0.0351, −0.0351, −0.03509, 0.03508, 0.03507, 0.03505, −0.03505, 0.03505, −0.03504, −0.03503, 0.03503, −0.03503, −0.03502, −0.03501, −0.03501, 0.03498, 0.03497, 0.03497, −0.03495, −0.03495, −0.03495, −0.03494, −0.03493, −0.03492, −0.03491, 0.0349, −0.03489, −0.03488, −0.03487, 0.03486, 0.03485, 0.03484, 0.03483, −0.03483, −0.03481, 0.03481, −0.03481, 0.0348, 0.03479, −0.03478, −0.03477, −0.03477, −0.03476, −0.03475, −0.03475, 0.03475, 0.03474, −0.03474, −0.03473, 0.03472, −0.03472, 0.0347, 0.03468, 0.03468, 0.03468, 0.03468, 0.03468, −0.03467, 0.03467, −0.03467, 0.03467, 0.03467, −0.03466, 0.03466, −0.03465, −0.03464, −0.03464, −0.03463, 0.03462, 0.0346, 0.03458, −0.03458, 0.03458, 0.03458, 0.03457, −0.03456, −0.03456, 0.03456, −0.03453, 0.03451, 0.03449, −0.03449, −0.03449, −0.03447, −0.03446, −0.03446, −0.03445, −0.03445, −0.03444, 0.03443, −0.03443, −0.03442, 0.03442, 0.03441, 0.03441, −0.03441, 0.0344, −0.03439, −0.03437, −0.03434, −0.03434, 0.03432, −0.03432, −0.03432, 0.03431, −0.03431, 0.0343, −0.03429, −0.03429, 0.03429, −0.03428, −0.03428, −0.03428, −0.03428, −0.03427, 0.03426, −0.03426, −0.03425, 0.03425, −0.03425, −0.03425, 0.03423, −0.03423, 0.03422, −0.03419, −0.03419, −0.03417, −0.03417, 0.03417, 0.03417, −0.03417, −0.03415, −0.03415, 0.03415, −0.03415, 0.03414, −0.03414, 0.03412, −0.03412, −0.03412, 0.03412, −0.03412, −0.03411, −0.03411, 0.03411, 0.03408, 0.03407, 0.03407, −0.03407, −0.03406, 0.03405, 0.03405, 0.03402, 0.034, 0.03399, −0.03396, −0.03395, −0.03394, −0.03393, 0.03392, −0.03391, 0.03391, −0.0339, −0.0339, −0.03388, 0.03388, 0.03387, 0.03387, −0.03387, −0.03386, −0.03385, 0.03385, −0.03384, −0.03384, −0.03383, −0.03383, −0.03383, −0.03382, −0.03379, −0.03379, 0.03377, −0.03376, 0.03376, 0.03375, 0.03375, −0.03375, 0.03374, 0.03374, 0.03373, 0.03372, 0.03372, 0.03372, −0.03372, −0.03372, −0.03369, 0.03368, 0.03366, −0.03366, −0.03366, −0.03365, 0.03364, 0.03364, 0.03362, −0.03361, −0.03361, −0.0336, −0.0336, −0.0336, −0.03359, −0.03358, 0.03358, 0.03358, 0.03357, −0.03357, −0.03356, 0.03356, −0.03354, −0.03353, −0.03353, 0.03353, 0.03353, −0.03352, 0.03352, 0.03351, 0.03351, 0.03351, 0.0335, 0.03349, 0.03349, −0.03348, 0.03347, 0.03347, −0.03347, 0.03343, 0.0334, −0.03339, −0.03338, −0.03338, 0.03338, 0.03337, 0.03336, 0.03336, −0.03335, −0.03335, −0.03334, 0.03333, −0.03333, 0.03333, 0.03332, −0.03332, −0.03331, 0.0333, 0.0333, −0.0333, 0.0333, 0.03329, −0.03329, 0.03329, −0.03329, 0.03329, 0.03328, −0.03326, −0.03326, −0.03325, 0.03325, 0.03325, 0.03324, −0.03323, −0.03323, −0.03321, 0.03319, 0.03319, 0.03318, −0.03317, 0.03317, 0.03317, −0.03316, 0.03316, 0.03316, 0.03315, −0.03313, −0.03313, 0.03313, −0.03312, −0.03312, 0.03312, −0.03311, 0.03311, 0.03309, 0.03308, 0.03307, −0.03307, 0.03306, −0.03305, 0.03305, 0.03305, 0.03304, 0.03302, −0.03301, 0.03301, 0.033, −0.033, 0.03299, 0.03298, −0.03297, −0.03297, −0.03295, −0.03295, −0.03294, 0.03292, −0.03292, −0.03291, 0.0329, −0.03287, 0.03287, 0.03287, 0.03286, −0.03285, 0.03285, 0.03285, 0.03284, 0.03282, −0.03282, −0.03282, −0.03282, −0.03281, −0.03281, −0.03279, −0.03279, 0.03278, −0.03277, 0.03277, −0.03276, 0.03276, −0.03276, −0.03276, −0.03275, 0.03274, 0.03274, −0.03273, 0.03271, −0.03271, −0.0327, −0.03269, −0.03267, −0.03266, −0.03265, −0.03263, 0.03263, −0.03262, 0.03262, 0.03262, 0.03261, −0.0326, 0.03259, 0.03259, −0.03259, 0.03258, −0.03258, −0.03257, −0.03257, −0.03256, −0.03256, −0.03256, −0.03255, −0.03255, 0.03254, −0.03253, −0.03253, 0.03253, −0.03253, 0.03252, −0.03251, 0.03251, 0.0325, −0.0325, −0.03249, 0.03248, −0.03247, 0.03245, 0.03245, 0.03244, −0.03243, 0.03243, −0.03243, 0.03241, 0.03241, −0.03239, 0.03239, 0.03237, 0.03237, 0.03237, 0.03237, −0.03236, −0.03235, 0.03234, 0.03233, 0.03233, −0.03233, −0.03233, −0.03231, −0.0323, −0.03229, 0.03229, 0.03228, 0.03227, 0.03227, −0.03227, 0.03226, 0.03225, 0.03225, −0.03225, −0.03222, −0.03222, −0.03221, −0.03219, −0.03219, 0.03219, 0.03218, 0.03218, −0.03217, −0.03217, 0.03216, 0.03215, −0.03215, −0.03215, 0.03214, −0.03214, −0.03214, 0.03214, 0.03212, −0.03212, 0.03212, −0.03212, −0.03211, 0.03209, −0.03208, −0.03207, 0.03207, −0.03207, 0.03206, 0.03206, −0.03205, −0.03205, 0.03205, 0.03205, 0.03205, 0.03204, −0.03204, 0.03203, 0.03202, 0.03202, −0.03202, 0.03201, 0.03201, −0.03199, 0.03199, 0.03196, 0.03194, −0.03193, 0.03192, 0.03191, −0.03189, 0.03188, 0.03187, −0.03186, 0.03185, 0.03185, −0.03185, −0.03183, −0.03183, 0.03182, 0.03181, 0.03178, −0.03178, 0.03175, 0.03175, −0.03174, 0.03173, 0.03173, −0.03173, −0.03172, 0.03172, 0.03171, −0.0317, −0.0317, −0.0317, −0.03169, 0.03169, 0.03166, 0.03165, −0.03165, 0.03164, 0.03163, 0.03162, 0.03161, −0.0316, −0.0316, 0.03159, 0.03159, 0.03158, 0.03156, 0.03155, −0.03154, −0.03153, 0.03152, −0.0315, −0.0315, −0.0315, −0.03149, 0.03148, −0.03147, −0.03147, 0.03146, −0.03146, −0.03144, −0.03143, 0.03143, 0.03139, −0.03139, 0.03139, −0.03139, 0.03138, −0.03138, −0.03137, −0.03137, 0.03136, 0.03136, −0.03135, 0.03135, 0.03133, −0.03133, −0.03133, −0.03132, −0.0313, −0.0313, −0.03129, −0.03128, 0.03128, 0.03128, 0.03127, −0.03127, −0.03125, −0.03125, 0.03124, 0.03124, 0.03124, 0.03123, −0.03122, 0.03122, −0.03121, −0.03121, 0.03121, −0.03117, 0.03117, −0.03116, −0.03116, −0.03115, −0.03115, 0.03114, 0.03113, 0.03113, 0.03112, 0.03112, −0.03111, 0.0311, −0.03109, 0.03109, −0.03108, 0.03108, 0.03108, 0.03107, −0.03106, 0.03105, 0.03105, −0.03103, 0.03101, −0.031, −0.031, −0.031, 0.031, 0.03099, 0.03099, 0.03099, −0.03099, −0.03098, −0.03097, 0.03096, −0.03096, −0.03093, −0.03093, −0.03092, −0.03092, −0.0309, −0.03089, −0.03089, −0.03088, −0.03088, −0.03088, −0.03087, 0.03087, 0.03085, 0.03084, −0.03084, −0.03083, 0.03082, −0.03082, 0.03082, −0.03082, −0.03081, −0.03081, −0.0308, −0.0308, −0.0308, −0.03077, −0.03076, −0.03075, 0.03074, 0.03072, 0.03071, 0.03071, 0.0307, −0.03069, 0.03069, −0.03068, 0.03068, 0.03068, −0.03067, 0.03064, −0.03064, −0.03062, −0.03062, −0.03062, 0.0306, −0.0306, 0.03059, −0.03059, −0.03059, −0.03058, −0.03057, 0.03057, 0.03057, −0.03056, 0.03056, 0.03056, 0.03055, −0.03054, −0.03053, −0.03052, 0.0305, −0.0305, 0.0305, 0.03049, 0.03048, −0.03048, −0.03047, −0.03047, −0.03047, −0.03044, 0.03043, 0.03042, 0.03041, 0.03041, 0.03039, 0.03036, −0.03036, 0.03036, 0.03035, 0.03032, −0.03032, 0.03031, 0.03031, −0.03031, 0.03031, 0.0303, 0.03029, 0.03029, −0.03028, −0.03028, 0.03027, 0.03027, 0.03025, 0.03025, −0.03024, −0.03023, 0.03021, −0.0302, −0.0302, −0.0302, 0.0302, 0.03019, 0.03018, 0.03018, −0.03018, −0.03017, −0.03017, −0.03016, 0.03015, 0.03015, −0.03015, −0.03014, 0.03013, 0.03012, 0.0301, 0.03009, −0.03009, 0.03008, 0.03008, −0.03008, 0.03006, −0.03005, 0.03005, 0.03004, 0.03002, 0.03002, 0.03002, 0.03001, 0.03001, −0.03001, 0.02999, 0.02998, −0.02998, −0.02998, −0.02998, −0.02997, 0.02997, 0.02994, −0.02992, −0.02992, −0.02992, 0.02991, −0.0299, −0.02989, 0.02988, −0.02988, 0.02988, 0.02986, 0.02986, −0.02986, −0.02985, −0.02985, −0.02984, 0.02984, −0.02982, 0.02982, −0.02981, 0.0298, 0.0298, −0.0298, −0.0298, −0.02979, 0.02979, 0.02979, −0.02979, −0.02977, −0.02977, −0.02976, −0.02976, −0.02976, 0.02975, −0.02974, −0.02973, 0.02973, 0.02971, −0.0297, 0.0297, −0.02969, 0.02968, −0.02968, 0.02967, −0.02966, −0.02965, −0.02964, 0.02964, −0.02963, 0.02963, −0.02963, −0.02963, −0.02961, 0.02961, 0.02961, 0.02957, 0.02956, −0.02956, −0.02955, −0.02955, −0.02952, −0.02952, 0.02951, −0.02951, 0.02951, −0.0295, −0.02949, 0.02949, −0.02947, 0.02947, −0.02947, 0.02945, 0.02945, 0.02945, −0.02945, 0.02944, −0.02944, −0.02943, −0.02942, −0.02941, 0.02941, 0.0294, −0.02937, 0.02937, 0.02937, −0.02936, −0.02936, −0.02935, −0.02935, −0.02934, 0.02934, 0.02934, −0.02933, −0.02933, −0.02932, −0.02932, 0.02932, 0.0293, −0.02929, 0.02929, 0.02928, 0.02927, −0.02927, −0.02926, 0.02926, −0.02922, −0.02921, −0.02921, −0.0292, −0.0292, 0.02919, −0.02919, 0.02918, −0.02918, −0.02918, −0.02917, −0.02917, 0.02917, −0.02917, 0.02915, −0.02914, −0.02913, −0.02913, 0.02913, −0.02912, 0.02912, 0.0291, 0.0291, −0.02909, −0.02909, −0.02908, 0.02906, 0.02904, 0.02903, 0.02901, 0.02901, 0.029, 0.02899, −0.02897, −0.02897, −0.02896, 0.02896, −0.02896, 0.02895, −0.02895, −0.02894, −0.02893, 0.02893, −0.02892, 0.02892, 0.02891, −0.02891, −0.0289, −0.0289, 0.0289, 0.02889, 0.02889, −0.02888, −0.02887, 0.02887, −0.02887, −0.02886, 0.02886, 0.02885, −0.02885, −0.02884, 0.02883, −0.02883, 0.02882, 0.02881, 0.02881, −0.02881, 0.0288, 0.0288, −0.02879, −0.02879, −0.02879, −0.02878, −0.02878, 0.02876, −0.02875, 0.02875, 0.02874, 0.02873, −0.02872, 0.02871, 0.02871, −0.02871, −0.0287, 0.02869, −0.02868, −0.02867, −0.02866, 0.02862, −0.02862, 0.02862, −0.02862, −0.02861, −0.02861, 0.02861, −0.02861, −0.02861, −0.0286, −0.02858, −0.02857, 0.02857, 0.02856, 0.02852, 0.02852, 0.02851, −0.0285, −0.0285, −0.0285, −0.02849, 0.02848, 0.02848, −0.02847, −0.02847, −0.02847, 0.02847, −0.02846, 0.02845, 0.02845, 0.02845, 0.02844, 0.02843, 0.02842, −0.02842, 0.0284, −0.02839, −0.02838, −0.02838, −0.02837, 0.02837, −0.02837, −0.02836, 0.02836, −0.02835, 0.02833, −0.02833, −0.02833, 0.02832, 0.02832, 0.02832, 0.02832, 0.02832, −0.02832, 0.02832, 0.02831, −0.02831, −0.02828, −0.02828, 0.02826, 0.02826, 0.02825, −0.02825, 0.02824, −0.02823, −0.02823, −0.02822, −0.02822, 0.02822, −0.02821, 0.0282, 0.0282, −0.02819, 0.02819, −0.02819, 0.02818, 0.02818, −0.02817, 0.02817, 0.02817, −0.02816, −0.02815, 0.02815, 0.02815, 0.02815, 0.02815, −0.02815, −0.02813, 0.02813, −0.02811, −0.02811, 0.0281, 0.0281, 0.02809, 0.02809, −0.02809, −0.02809, 0.02809, −0.02808, −0.02807, 0.02807, 0.02807, −0.02807, 0.02806, 0.02806, −0.02805, 0.02805, −0.02805, −0.02803, 0.02802, 0.02802, 0.02802, −0.02801, −0.02801, 0.028, −0.028, 0.028, 0.028, 0.02799, −0.02799, 0.02797, −0.02797, −0.02797, 0.02795, 0.02795, −0.02794, −0.02791, 0.02791, −0.02789, −0.02789, −0.02789, 0.02788, −0.02784, −0.02783, 0.02783, −0.02782, 0.02782, −0.02781, 0.02781, −0.0278, 0.02779, 0.02778, −0.02776, 0.02776, −0.02775, 0.02775, 0.02774, 0.02774, −0.02774, −0.02773, −0.02773, −0.02772, 0.02772, 0.02772, −0.02772, 0.02771, −0.0277, −0.0277, −0.02769, −0.02769, 0.02768, −0.02768, 0.02768, −0.02767, 0.02767, −0.02765, 0.02765, −0.02764, 0.02764, 0.02764, −0.02762, −0.02762, 0.02762, −0.02759, 0.02759, 0.02757, 0.02754, 0.02754, 0.02754, −0.02752, 0.02751, 0.0275, −0.0275, 0.0275, 0.02749, 0.02748, −0.02747, −0.02747, 0.02747, −0.02746, 0.02746, −0.02746, −0.02745, −0.02744, 0.02743, −0.02742, −0.02741, 0.02739, 0.02739, −0.02739, −0.02737, −0.02737, 0.02735, 0.02735, −0.02735, 0.02733, −0.02732, 0.02732, −0.02731, 0.0273, −0.0273, 0.0273, 0.02729, 0.02729, 0.02728, −0.02728, −0.02727, −0.02727, 0.02727, 0.02727, 0.02727, 0.02726, −0.02725, −0.02725, −0.02725, 0.02724, 0.02724, 0.02723, −0.02721, −0.02721, −0.02721, −0.0272, 0.0272, −0.02719, 0.02719, −0.02718, 0.02718, −0.02717, −0.02717, 0.02715, 0.02715, 0.02714, −0.02713, 0.02712, −0.02712, −0.02711, −0.02711, 0.02711, 0.0271, 0.0271, −0.02709, −0.02709, 0.02708, 0.02708, −0.02706, −0.02705, 0.02704, 0.02703, 0.02703, 0.02702, 0.02701, −0.02701, 0.02699, −0.02699, −0.02699, −0.02696, −0.02694, −0.02694, −0.02694, −0.02694, 0.02693, 0.02691, −0.02691, 0.0269, 0.0269, −0.02689, −0.02689, −0.02689, −0.02689, −0.02689, 0.02688, −0.02687, −0.02687, −0.02686, −0.02686, 0.02685, 0.02685, 0.02684, 0.02684, −0.02684, −0.02684, 0.02684, 0.02682, 0.02681, 0.02681, 0.02681, −0.02681, 0.0268, 0.02679, −0.02679, −0.02679, −0.02678, 0.02678, 0.02678, −0.02676, −0.02676, 0.02676, 0.02675, 0.02675, −0.02675, 0.02674, −0.02674, −0.02674, −0.02674, 0.02673, 0.02672, −0.02672, 0.02672, −0.02671, −0.0267, −0.02669, −0.02668, 0.02667, −0.02667, −0.02666, −0.02666, 0.02665, −0.02664, 0.02663, −0.02662, −0.0266, −0.0266, −0.0266, −0.02658, −0.02658, 0.02656, 0.02656, 0.02655, −0.02655, −0.02655, 0.02655, −0.02655, 0.02655, −0.02654, −0.02653, −0.02651, −0.02651, 0.0265, 0.0265, 0.02649, 0.02648, −0.02647, 0.02647, −0.02646, −0.02644, 0.02644, 0.02643, −0.02643, 0.02643, −0.02643, −0.02642, 0.02642, 0.0264, −0.0264, −0.02638, 0.02637, −0.02636, −0.02634, 0.02634, −0.02634, −0.02634, 0.02632, −0.02631, −0.02629, −0.02628, −0.02628, 0.02628, 0.02628, 0.02627, −0.02627, 0.02627, −0.02626, 0.02625, 0.02623, −0.02623, 0.02623, 0.02623, −0.02623, 0.02621, 0.02621, −0.0262, 0.0262, −0.02617, 0.02617, 0.02617, −0.02615, −0.02615, −0.02615, −0.02614, 0.02614, −0.02614, 0.02614, −0.02614, 0.02612, 0.02612, −0.02611, −0.02611, −0.0261, −0.0261, −0.0261, −0.02609, −0.02609, 0.02609, 0.02608, 0.02607, −0.02607, −0.02607, −0.02606, −0.02606, −0.02604, −0.02603, −0.02603, 0.02603, −0.02602, −0.02602, 0.02602, 0.02602, −0.02602, −0.02601, 0.02601, 0.02601, −0.026, 0.02598, 0.02597, −0.02596, 0.02596, 0.02596, −0.02595, 0.02595, −0.02594, −0.02594, −0.02594, 0.02593, −0.02593, −0.02593, 0.02593, 0.02593, 0.02592, −0.02592, −0.02592, 0.02591, 0.02591, 0.02591, −0.0259, 0.02588, 0.02588, −0.02587, −0.02586, −0.02586, −0.02585, −0.02585, 0.02584, 0.02584, −0.02584, 0.02583, 0.02583, 0.02581, 0.0258, 0.0258, 0.0258, −0.0258, 0.02579, 0.02579, 0.02578, −0.02577, −0.02576, 0.02576, −0.02575, −0.02575, −0.02574, 0.02572, 0.02571, 0.02569, 0.02568, −0.02568, 0.02568, −0.02565, 0.02565, −0.02564, 0.02564, −0.02564, 0.02564, −0.02563, −0.02562, 0.02562, −0.02561, 0.02561, 0.0256, 0.02558, −0.02558, −0.02556, 0.02555, −0.02555, 0.02553, −0.02552, 0.02552, −0.02552, 0.02551, −0.0255, 0.0255, −0.02549, −0.02549, −0.02549, −0.02547, −0.02547, 0.02546, −0.02545, 0.02544, 0.02542, 0.02542, 0.02541, −0.0254, 0.02539, −0.02538, −0.02538, −0.02536, −0.02536, 0.02536, 0.02534, 0.02533, −0.02533, 0.02532, −0.02531, −0.0253, −0.0253, −0.0253, −0.0253, −0.0253, 0.0253, −0.02529, 0.02528, −0.02527, 0.02525, 0.02525, −0.02524, 0.02524, −0.02524, −0.02522, 0.02522, 0.02522, 0.02522, 0.02521, −0.02521, 0.02521, −0.02521, −0.02521, 0.0252, 0.0252, −0.02519, 0.02518, −0.02517, −0.02517, −0.02517, −0.02517, 0.02516, −0.02516, 0.02515, −0.02514, −0.02514, 0.02514, −0.02513, −0.02512, 0.02511, −0.02511, −0.02511, 0.02509, −0.02508, −0.02508, −0.02508, −0.02508, 0.02507, 0.02507, 0.02507, 0.02506, −0.02505, 0.02504, −0.02504, 0.02504, 0.02503, −0.02503, 0.02503, −0.02503, −0.02501, −0.025, −0.025, 0.02499, −0.02499, 0.02498, −0.02497, −0.02497, 0.02497, 0.02496, 0.02495, 0.02495, −0.02495, −0.02494, −0.02492, 0.02491, 0.02491, −0.02491, 0.0249, 0.0249, 0.02489, 0.02489, −0.02489, 0.02488, 0.02487, −0.02486, −0.02485, −0.02483, 0.02483, −0.02481, −0.0248, −0.0248, −0.02479, 0.02479, −0.02477, 0.02475, −0.02474, −0.02474, −0.02473, 0.02473, −0.02472, 0.02471, 0.0247, 0.02469, 0.02469, 0.02469, −0.02468, −0.02468, 0.02468, −0.02467, −0.02467, −0.02467, −0.02466, −0.02466, −0.02466, −0.02465, −0.02465, 0.02465, −0.02464, −0.02463, −0.02463, 0.02462, −0.02462, −0.02461, −0.0246, 0.0246, −0.0246, −0.02459, −0.02459, −0.02459, 0.02457, 0.02456, 0.02455, 0.02455, −0.02455, −0.02455, −0.02454, −0.02454, −0.02454, 0.02453, −0.02452, −0.02452, 0.02452, −0.02451, −0.02451, −0.0245, 0.0245, −0.02449, 0.02448, −0.02447, 0.02447, −0.02446, −0.02445, 0.02445, 0.02445, −0.02444, −0.02444, −0.02444, 0.02443, 0.02443, −0.02442, −0.02442, 0.02442, 0.02442, 0.02442, 0.02441, −0.02441, −0.0244, 0.0244, 0.02439, 0.02437, −0.02437, 0.02437, −0.02437, 0.02437, −0.02435, 0.02434, 0.02433, −0.02433, −0.02432, −0.02431, −0.02431, −0.02431, −0.02431, 0.0243, −0.0243, 0.0243, 0.02429, 0.02429, −0.02429, −0.02428, 0.02428, 0.02428, 0.02428, 0.02427, −0.02426, 0.02425, −0.02424, 0.02423, 0.02423, 0.02423, 0.02422, 0.02421, −0.02421, −0.0242, −0.02419, 0.02418, −0.02418, −0.02418, 0.02416, 0.02416, 0.02415, −0.02414, −0.02414, 0.02413, 0.02412, 0.02412, −0.02411, 0.0241, 0.0241, −0.0241, −0.0241, −0.02409, −0.02408, −0.02408, −0.02406, 0.02405, 0.02404, −0.02404, 0.02403, −0.02402, 0.02401, −0.024, 0.02399, −0.02398, 0.02398, 0.02398, −0.02398, 0.02397, −0.02396, 0.02396, 0.02396, −0.02395, 0.02395, 0.02394, 0.02394, −0.02394, 0.02394, −0.02393, 0.02393, −0.02391, 0.0239, −0.0239, −0.02389, −0.02387, 0.02386, −0.02386, −0.02385, −0.02385, 0.02384, 0.02383, −0.02383, −0.02383, −0.02382, 0.02381, 0.0238, 0.0238, 0.02379, −0.02379, 0.02378, −0.02378, −0.02378, 0.02377, 0.02377, −0.02376, −0.02375, 0.02375, 0.02374, 0.02373, 0.02373, 0.02372, 0.02372, −0.02371, −0.0237, 0.02369, 0.02369, 0.02368, −0.02368, −0.02368, −0.02368, 0.02367, 0.02366, 0.02365, −0.02365, −0.02365, −0.02365, 0.02364, 0.02363, 0.02362, −0.02362, −0.02362, 0.02362, 0.02361, 0.02361, −0.0236, 0.0236, 0.02358, 0.02358, −0.02358, 0.02358, −0.02357, −0.02356, −0.02355, 0.02354, 0.02353, 0.02353, −0.02353, −0.02352, 0.02352, 0.0235, −0.02348, −0.02348, 0.02348, −0.02348, 0.02347, −0.02347, 0.02346, −0.02346, −0.02346, −0.02346, −0.02345, 0.02345, −0.02345, 0.02344, −0.02344, −0.02344, −0.02343, 0.02342, 0.02341, 0.0234, 0.0234, 0.02339, 0.02339, 0.02338, 0.02338, 0.02338, 0.02338, 0.02336, −0.02336, 0.02336, 0.02336, −0.02334, 0.02333, −0.02333, 0.02333, 0.02332, 0.02331, 0.02331, −0.02331, −0.02331, −0.0233, −0.02329, −0.02329, 0.02328, −0.02328, 0.02328, 0.02327, 0.02326, −0.02326, −0.02325, −0.02323, −0.02322, −0.02322, 0.02321, −0.0232, 0.02319, −0.02319, −0.02319, 0.02317, 0.02317, 0.02317, −0.02317, −0.02316, 0.02316, 0.02316, −0.02314, −0.02312, −0.02312, 0.02311, −0.0231, 0.0231, −0.02309, −0.02309, −0.02309, 0.02309, −0.02309, −0.02309, −0.02309, −0.02307, −0.02307, −0.02307, −0.02306, −0.02306, 0.02306, 0.02305, −0.02302, −0.02301, 0.023, −0.023, −0.023, −0.023, 0.023, 0.02299, 0.02299, −0.02298, 0.02298, −0.02298, 0.02297, 0.02297, −0.02297, 0.02297, 0.02297, −0.02296, 0.02296, −0.02296, −0.02294, 0.02294, −0.02293, 0.02292, −0.0229, −0.0229, −0.0229, −0.02289, −0.02289, −0.02289, 0.02288, −0.02288, 0.02288, 0.02287, −0.02287, −0.02287, −0.02287, −0.02286, 0.02286, −0.02283, 0.02283, −0.0228, 0.02279, 0.02279, 0.02278, 0.02277, −0.02276, −0.02275, 0.02275, −0.02275, 0.02275, 0.02274, 0.02274, 0.02273, −0.02273, 0.02272, 0.02271, −0.02271, 0.02271, 0.02271, −0.02271, 0.0227, 0.0227, −0.02269, −0.02269, −0.02267, −0.02267, −0.02266, −0.02266, −0.02266, −0.02265, 0.02264, 0.02264, 0.02263, −0.02261, −0.0226, 0.0226, 0.02259, −0.02259, 0.02258, −0.02258, 0.02257, 0.02257, 0.02257, 0.02255, 0.02254, 0.02254, −0.02253, 0.02252, −0.02251, 0.0225, −0.02249, −0.02249, 0.02249, 0.02248, −0.02248, 0.02248, 0.02248, 0.02247, −0.02247, −0.02247, 0.02246, −0.02246, −0.02245, 0.02243, 0.02242, 0.02242, −0.02242, 0.02242, −0.02241, 0.02241, −0.02241, 0.0224, 0.0224, 0.0224, −0.0224, −0.02237, −0.02237, 0.02237, 0.02237, 0.02235, −0.02234, 0.02234, −0.02233, 0.02233, −0.02233, 0.02232, −0.02232, −0.02231, 0.02231, 0.0223, 0.0223, −0.02229, −0.02229, 0.02229, 0.02228, 0.02228, −0.02227, 0.02226, 0.02226, −0.02225, −0.02225, 0.02223, −0.02222, −0.02222, −0.02222, 0.0222, 0.02219, 0.02219, 0.02219, 0.02218, −0.02218, 0.02218, −0.02217, 0.02217, 0.02217, 0.02216, 0.02216, 0.02215, 0.02215, 0.02214, −0.02214, −0.02214, 0.02214, −0.02212, 0.02212, −0.02209, 0.02207, 0.02207, 0.02207, 0.02207, −0.02206, −0.02206, 0.02206, −0.02206, 0.02205, −0.02205, −0.02205, −0.02204, −0.02204, 0.02204, 0.02201, 0.022, 0.022, −0.02199, 0.02199, −0.02198, 0.02198, 0.02197, −0.02197, −0.02197, −0.02196, 0.02196, 0.02196, −0.02196, 0.02196, 0.02196, −0.02193, 0.02193, −0.02193, −0.02193, −0.02192, −0.02192, 0.02192, −0.02192, −0.02191, 0.02191, −0.0219, 0.02189, −0.02189, 0.02188, 0.02188, −0.02187, 0.02186, −0.02186, 0.02186, 0.02186, 0.02186, −0.02185, −0.02185, 0.02185, 0.02185, −0.02185, 0.02185, −0.02184, −0.02184, −0.02184, 0.02183, 0.02183, 0.02183, −0.02182, −0.0218, −0.0218, −0.0218, 0.02178, 0.02177, 0.02176, −0.02176, 0.02175, 0.02175, −0.02173, −0.02173, −0.02171, −0.02171, 0.02169, −0.02169, 0.02167, −0.02167, 0.02167, −0.02166, 0.02166, −0.02164, 0.02164, 0.02164, 0.02161, 0.02161, 0.02161, 0.0216, −0.0216, −0.02159, 0.02159, 0.02159, −0.02158, −0.02158, −0.02156, −0.02156, 0.02155, 0.02155, −0.02154, −0.02154, 0.02154, 0.02153, 0.02153, −0.02153, 0.02152, −0.02152, −0.02151, 0.02151, 0.02151, 0.02148, −0.02148, −0.02147, −0.02147, −0.02147, 0.02146, −0.02146, −0.02146, −0.02145, 0.02144, −0.02144, −0.02143, −0.02141, 0.02141, −0.02141, 0.0214, −0.0214, 0.02139, 0.02139, −0.02138, −0.02138, 0.02137, −0.02137, 0.02136, 0.02135, 0.02134, −0.02133, 0.02133, −0.02132, 0.02132, 0.02132, 0.02131, −0.02131, −0.02131, −0.02129, 0.02128, −0.02127, 0.02127, 0.02127, 0.02127, −0.02125, −0.02124, 0.02124, 0.02124, −0.02123, 0.02122, 0.02122, 0.02122, −0.02121, −0.02121, 0.02118, 0.02118, −0.02115, −0.02115, 0.02115, −0.02115, 0.02113, −0.02112, −0.02112, −0.02111, −0.0211, −0.02109, 0.02108, 0.02108, 0.02107, 0.02107, −0.02106, 0.02106, 0.02105, 0.02104, −0.02101, −0.021, 0.02099, −0.02099, −0.02099, 0.02098, 0.02098, −0.02098, 0.02097, −0.02097, −0.02093, 0.02093, 0.02092, 0.02092, −0.02092, 0.02092, −0.02091, 0.0209, −0.0209, −0.0209, 0.02089, −0.02089, −0.02088, −0.02086, 0.02086, 0.02085, −0.02085, −0.02084, −0.02084, 0.02084, 0.02084, 0.02083, −0.02083, −0.02083, −0.02083, 0.02082, 0.02081, 0.02081, −0.02081, −0.0208, 0.02079, 0.02078, 0.02078, 0.02077, −0.02076, 0.02076, −0.02075, −0.02074, −0.02073, 0.02073, −0.02072, 0.02072, 0.02072, 0.02071, 0.02071, 0.02071, −0.0207, −0.0207, −0.0207, −0.0207, −0.02068, −0.02068, −0.02067, −0.02066, 0.02066, 0.02066, −0.02066, −0.02065, −0.02065, −0.02064, 0.02064, −0.02064, −0.02064, −0.02063, 0.02063, −0.02062, −0.02062, −0.02062, 0.02061, −0.02061, 0.02061, −0.02061, −0.0206, 0.02058, −0.02057, −0.02057, 0.02056, −0.02055, −0.02055, −0.02055, 0.02055, −0.02054, −0.02054, 0.02051, −0.02051, 0.02048, 0.02048, 0.02048, −0.02047, −0.02047, −0.02046, −0.02046, 0.02045, 0.02044, 0.02043, 0.02042, −0.02042, 0.0204, −0.02039, 0.02038, −0.02038, −0.02038, −0.02038, 0.02037, −0.02037, −0.02036, 0.02036, −0.02034, −0.02034, 0.02034, −0.02034, −0.02032, 0.02032, 0.02032, −0.02031, 0.02031, 0.02031, −0.0203, 0.0203, 0.0203, −0.02029, 0.02029, 0.02029, 0.02028, 0.02028, 0.02027, −0.02025, −0.02024, −0.02024, 0.02024, −0.02023, −0.02023, −0.02022, 0.02022, −0.02021, −0.02021, −0.0202, −0.02018, 0.02018, −0.02018, −0.02018, 0.02015, 0.02013, −0.02012, −0.02011, −0.02009, 0.02007, −0.02007, 0.02007, −0.02006, −0.02005, 0.02004, −0.02004, −0.02003, −0.02002, 0.02002, 0.02001, −0.02001, 0.02001, 0.02001, 0.02, 0.02, 0.01998, −0.01997, −0.01997, −0.01996, −0.01996, −0.01996, 0.01996, 0.01996, −0.01995, −0.01994, −0.01994, −0.01993, −0.01993, 0.01991, −0.01991, −0.0199, −0.0199, 0.01989, −0.01988, −0.01987, −0.01987, 0.01985, 0.01985, 0.01985, 0.01985, 0.01985, 0.01984, 0.01984, 0.01984, 0.01984, 0.01983, 0.01983, −0.01983, 0.01982, 0.01982, −0.01982, 0.01981, 0.01981, 0.01981, 0.0198, −0.01979, 0.01979, 0.01979, 0.01978, −0.01976, −0.01976, −0.01975, −0.01974, −0.01974, −0.01974, 0.01973, 0.01972, −0.01972, 0.01971, −0.01971, −0.0197, 0.01969, −0.01969, 0.01969, −0.01969, −0.01968, −0.01968, −0.01968, 0.01967, 0.01967, 0.01966, −0.01965, 0.01964, 0.01964, 0.01964, 0.01964, 0.01962, −0.01962, −0.0196, 0.01959, −0.01959, 0.01959, −0.01958, 0.01957, 0.01957, −0.01956, −0.01955, −0.01955, −0.01955, −0.01953, −0.01953, 0.01953, 0.01953, −0.01953, 0.01953, 0.01952, −0.01951, −0.01951, −0.01951, −0.01951, −0.0195, 0.0195, −0.01948, 0.01948, −0.01946, −0.01945, 0.01944, −0.01943, −0.01943, 0.01941, 0.01941, 0.0194, −0.01939, −0.01939, −0.01939, −0.01938, 0.01937, −0.01936, 0.01936, −0.01935, −0.01935, −0.01935, −0.01935, −0.01933, −0.01933, 0.01932, −0.01931, 0.01931, −0.01931, 0.0193, −0.01929, 0.01929, 0.01928, −0.01927, −0.01927, 0.01926, 0.01926, −0.01925, 0.01923, 0.01923, −0.01923, −0.01922, 0.01922, −0.0192, −0.01919, −0.01918, −0.01918, 0.01917, 0.01917, 0.01917, 0.01917, −0.01915, −0.01915, 0.01915, −0.01915, 0.01913, 0.01913, −0.01913, −0.01912, 0.01911, −0.01911, −0.01911, −0.01911, 0.0191, 0.0191, −0.0191, −0.0191, −0.01909, −0.01909, 0.01906, −0.01906, −0.01904, 0.01903, −0.01903, −0.01903, −0.01902, −0.01902, 0.01902, 0.01902, 0.01901, −0.01901, −0.01901, −0.01901, −0.01899, −0.01899, −0.01899, 0.01899, 0.01898, 0.01897, −0.01896, 0.01895, 0.01895, −0.01894, −0.01892, 0.01889, 0.01888, −0.01887, −0.01886, −0.01886, 0.01886, 0.01884, 0.01884, 0.01883, −0.01883, −0.01883, 0.01882, 0.01882, −0.01882, 0.01882, −0.01881, 0.01879, 0.01879, 0.01878, −0.01878, −0.01878, −0.01878, −0.01877, −0.01877, 0.01876, −0.01876, 0.01875, 0.01875, 0.01874, −0.01873, 0.01872, 0.01871, 0.01871, −0.0187, −0.01869, 0.01867, −0.01867, 0.01867, 0.01866, −0.01866, −0.01866, 0.01865, 0.01864, −0.01864, 0.01863, −0.01862, 0.01861, −0.0186, −0.01859, 0.01859, −0.01858, 0.01858, 0.01858, −0.01858, 0.01857, 0.01855, −0.01854, 0.01853, 0.01853, −0.01852, 0.01852, 0.01851, −0.0185, 0.01849, −0.01849, −0.01848, −0.01848, 0.01847, 0.01847, 0.01847, −0.01847, −0.01846, 0.01845, 0.01845, −0.01845, 0.01844, 0.01844, 0.01844, −0.01844, −0.01843, −0.01842, −0.01842, −0.0184, −0.01839, −0.01839, −0.01838, −0.01838, −0.01838, −0.01834, 0.01834, −0.01833, −0.01833, 0.01833, −0.01832, 0.01832, 0.01831, 0.01831, 0.01831, 0.01829, −0.01829, 0.01828, 0.01828, 0.01827, −0.01825, −0.01825, 0.01824, 0.01822, −0.01822, −0.01821, 0.01821, 0.0182, 0.0182, 0.01818, 0.01817, 0.01816, −0.01816, 0.01815, −0.01815, −0.01814, −0.01813, −0.01812, 0.01812, 0.01812, 0.01811, 0.01811, −0.0181, 0.0181, 0.01809, −0.01808, −0.01807, −0.01806, 0.01805, 0.01805, −0.01805, −0.01804, −0.01803, 0.01802, 0.01801, 0.018, −0.01799, −0.01799, 0.01799, 0.01798, 0.01798, −0.01798, −0.01798, −0.01797, 0.01797, 0.01796, 0.01796, 0.01794, 0.01793, 0.01792, 0.01792, 0.01792, 0.0179, −0.0179, 0.0179, −0.0179, 0.01787, 0.01787, 0.01786, 0.01786, −0.01784, −0.01783, −0.01783, −0.01783, 0.01782, 0.01782, −0.0178, 0.0178, 0.0178, −0.0178, 0.01779, −0.01778, 0.01777, −0.01776, 0.01776, −0.01775, 0.01774, 0.01774, −0.01774, −0.01774, 0.01773, −0.01772, −0.01772, −0.0177, −0.0177, 0.01769, −0.01769, 0.01769, 0.01768, 0.01768, 0.01767, 0.01767, −0.01766, −0.01765, −0.01765, −0.01765, −0.01764, −0.01764, 0.01763, 0.01763, 0.01763, 0.01762, −0.01761, 0.01761, −0.0176, 0.01759, 0.01757, 0.01757, 0.01756, 0.01756, 0.01756, −0.01755, 0.01754, 0.01754, −0.01753, 0.01753, 0.01752, 0.0175, 0.01749, 0.01748, −0.01747, 0.01745, −0.01744, 0.01743, −0.01743, 0.01742, 0.01742, 0.01741, −0.0174, −0.01739, −0.01739, −0.01738, −0.01737, 0.01737, 0.01737, 0.01736, 0.01736, 0.01735, −0.01732, −0.01732, −0.01731, 0.01729, −0.01729, 0.01729, 0.01728, 0.01727, 0.01727, 0.01727, 0.01727, 0.01726, −0.01725, 0.01724, −0.01723, −0.01723, −0.01723, −0.01722, −0.01722, −0.01722, 0.01722, −0.01721, 0.0172, −0.0172, −0.01719, −0.01718, 0.01718, 0.01717, 0.01717, 0.01717, −0.01717, 0.01715, 0.01715, −0.01714, 0.01714, 0.01713, −0.01713, −0.01713, 0.01713, −0.01711, 0.01708, −0.01708, −0.01707, −0.01706, −0.01706, −0.01705, 0.01705, 0.01704, 0.01703, −0.01702, 0.017, −0.017, 0.017, 0.017, −0.01699, −0.01697, −0.01695, −0.01695, 0.01694, −0.01694, 0.01693, 0.01693, 0.01693, −0.01693, −0.01692, 0.01691, 0.01691, 0.0169, −0.01689, 0.01688, 0.01688, 0.01687, −0.01687, 0.01687, 0.01685, −0.01685, 0.01685, 0.01685, −0.01685, 0.01685, 0.01684, −0.01684, −0.01683, 0.01682, −0.01682, 0.01682, 0.01681, −0.0168, −0.0168, −0.0168, 0.01679, 0.01678, −0.01678, −0.01677, 0.01676, 0.01676, 0.01674, −0.01673, 0.01673, 0.01673, 0.01673, 0.01672, −0.01672, 0.01671, −0.0167, −0.0167, −0.0167, 0.0167, −0.0167, −0.01669, −0.01669, 0.01668, −0.01668, 0.01668, 0.01667, 0.01667, −0.01667, 0.01666, −0.01664, −0.01663, −0.01662, 0.01662, −0.01662, 0.01661, 0.01661, 0.01661, −0.0166, 0.0166, 0.01659, −0.01658, −0.01657, −0.01656, 0.01656, −0.01656, −0.01655, −0.01655, 0.01655, −0.01653, −0.01653, 0.01653, −0.01652, −0.01652, 0.01652, 0.01651, −0.01651, −0.0165, 0.0165, 0.01649, −0.01649, −0.01647, 0.01646, −0.01646, −0.01646, 0.01644, 0.01644, 0.01644, −0.01643, 0.01642, −0.01642, 0.01641, 0.0164, −0.0164, −0.01639, 0.01636, −0.01634, −0.01634, 0.01633, −0.01632, 0.01632, 0.01632, 0.0163, −0.01629, 0.01629, 0.01629, 0.01628, −0.01627, 0.01626, −0.01625, −0.01624, 0.01624, 0.01623, −0.01623, −0.01622, 0.01622, 0.01621, −0.0162, −0.01619, −0.01619, 0.01619, 0.01619, 0.01613, 0.01613, 0.01612, −0.01612, −0.01611, −0.0161, −0.0161, −0.01609, −0.01609, 0.01608, −0.01608, −0.01608, 0.01605, 0.01604, 0.01604, 0.01604, 0.01603, −0.01602, −0.01602, 0.01602, 0.01601, 0.01601, −0.01601, −0.016, 0.016, −0.01598, 0.01598, −0.01598, 0.01597, −0.01597, −0.01597, −0.01596, 0.01595, 0.01595, −0.01594, 0.01594, −0.01594, 0.01593, −0.01592, −0.01592, −0.01591, 0.0159, 0.01589, 0.01589, −0.01588, −0.01587, 0.01586, 0.01586, 0.01585, 0.01585, −0.01584, −0.01584, 0.01583, −0.01582, −0.01582, 0.01582, −0.01582, 0.01581, 0.01581, −0.0158, −0.0158, −0.0158, −0.0158, −0.0158, −0.0158, 0.01579, 0.01579, −0.01579, 0.01578, 0.01578, 0.01578, −0.01577, 0.01575, 0.01575, −0.01575, 0.01575, −0.01574, 0.01574, −0.01574, 0.01573, −0.01573, 0.01573, −0.01573, 0.01572, 0.01572, 0.01571, −0.01571, −0.01568, −0.01567, 0.01566, 0.01565, 0.01564, 0.01563, −0.01563, 0.01563, 0.01563, −0.01563, −0.01562, −0.01562, −0.01562, 0.01561, −0.01561, 0.0156, 0.0156, 0.01559, 0.01559, −0.01559, 0.01557, −0.01556, −0.01556, 0.01556, 0.01556, 0.01556, −0.01555, −0.01553, 0.01552, −0.01552, −0.01551, 0.0155, 0.01548, 0.01547, −0.01547, 0.01546, −0.01546, −0.01545, −0.01545, −0.01545, −0.01544, 0.01543, 0.01542, 0.01541, −0.01541, −0.01541, 0.0154, 0.0154, 0.01539, 0.01539, 0.01539, 0.01538, −0.01538, −0.01538, −0.01536, 0.01536, −0.01535, 0.01535, 0.01534, 0.01534, 0.01533, −0.01532, 0.01532, −0.01531, 0.01531, −0.01531, 0.01531, 0.01531, −0.0153, −0.0153, 0.0153, −0.0153, −0.0153, −0.01529, 0.01529, 0.01529, −0.01529, 0.01529, −0.01529, −0.01528, 0.01528, 0.01528, −0.01526, 0.01525, −0.01524, 0.01524, −0.01523, 0.01522, 0.01522, 0.01521, 0.01521, −0.01521, −0.01521, −0.01521, 0.0152, −0.01519, 0.01516, −0.01516, −0.01516, −0.01516, −0.01515, −0.01514, 0.01514, −0.01514, 0.01514, −0.01513, −0.0151, 0.0151, 0.0151, 0.01509, 0.01509, −0.01509, 0.01508, 0.01508, 0.01507, −0.01507, −0.01506, 0.01505, −0.01505, 0.01504, 0.01501, 0.01499, 0.01499, −0.01498, 0.01497, −0.01497, −0.01497, −0.01496, 0.01496, 0.01495, −0.01495, 0.01495, 0.01494, −0.01494, 0.01494, 0.01493, 0.01493, −0.01492, −0.01492, −0.01492, 0.01491, −0.01491, 0.01491, −0.0149, −0.0149, 0.0149, −0.0149, −0.01489, −0.01488, −0.01488, −0.01487, 0.01486, 0.01486, 0.01485, 0.01485, −0.01484, −0.01484, −0.01483, 0.01483, 0.01483, 0.01483, −0.01481, 0.01481, −0.01481, 0.0148, 0.01479, −0.01479, 0.01478, 0.01478, −0.01475, 0.01475, −0.01474, 0.01473, 0.01473, 0.01472, 0.01471, −0.01471, −0.0147, 0.0147, 0.0147, 0.0147, 0.0147, −0.0147, 0.01469, −0.01469, 0.01468, 0.01468, −0.01467, 0.01467, 0.01466, −0.01466, −0.01466, 0.01466, −0.01465, −0.01464, 0.01464, −0.01463, 0.01463, 0.01463, −0.01463, 0.01462, −0.01461, 0.01461, −0.01461, −0.01461, −0.01459, −0.01459, −0.01459, 0.01459, −0.01458, 0.01457, 0.01457, −0.01456, −0.01456, 0.01456, −0.01454, 0.01454, 0.01452, −0.01452, −0.01451, 0.01451, 0.01451, 0.01451, 0.01451, −0.01449, −0.01449, 0.01449, −0.01448, 0.01448, −0.01447, 0.01446, −0.01446, 0.01446, 0.01445, −0.01444, −0.01443, −0.01443, −0.01442, −0.01441, 0.01441, −0.0144, 0.0144, −0.01439, 0.01439, −0.01439, −0.01438, −0.01438, 0.01438, −0.01437, −0.01437, −0.01436, 0.01435, 0.01435, 0.01434, −0.01434, 0.01433, 0.01432, −0.01431, −0.01429, 0.01429, −0.01429, 0.01428, −0.01428, 0.01427, −0.01426, −0.01425, 0.01425, 0.01424, −0.01423, 0.01423, −0.01423, −0.01423, −0.01423, 0.01421, −0.01421, 0.0142, 0.01419, −0.01419, −0.01419, −0.01419, −0.01417, −0.01416, 0.01416, 0.01415, 0.01415, −0.01414, −0.01414, 0.01412, 0.01412, −0.01412, −0.01412, 0.01412, −0.01411, −0.01411, 0.0141, 0.01408, −0.01408, 0.01407, 0.01407, 0.01407, −0.01407, 0.01406, 0.01406, 0.01405, −0.01405, 0.01404, 0.01404, −0.01403, −0.01403, −0.01402, −0.01402, 0.01401, −0.014, 0.01399, −0.01398, −0.01398, 0.01398, 0.01397, 0.01396, 0.01396, −0.01395, 0.01395, −0.01395, 0.01395, 0.01394, 0.01394, −0.01393, 0.01393, −0.01392, −0.01391, −0.01391, −0.01391, −0.01391, −0.01391, −0.0139, −0.01389, 0.01389, −0.01388, −0.01387, −0.01387, 0.01386, 0.01385, −0.01385, −0.01384, −0.01384, 0.01384, −0.01384, −0.01383, 0.0138, −0.0138, −0.0138, −0.01379, −0.01378, −0.01377, −0.01377, 0.01377, −0.01377, −0.01377, 0.01377, −0.01377, 0.01376, 0.01376, 0.01376, 0.01375, −0.01374, 0.01374, 0.01374, 0.01373, 0.01372, 0.01371, −0.01371, −0.0137, 0.0137, −0.0137, −0.01369, −0.01368, −0.01367, −0.01365, −0.01365, −0.01363, −0.01362, −0.01362, −0.01362, −0.01362, −0.01362, −0.0136, −0.01359, −0.01358, −0.01356, −0.01356, 0.01355, 0.01355, −0.01355, 0.01355, −0.01354, −0.01352, 0.01351, 0.01351, 0.01351, −0.0135, −0.01349, −0.01347, −0.01347, 0.01345, −0.01345, −0.01344, −0.01343, −0.01342, 0.01342, 0.01341, −0.01341, 0.0134, −0.01339, −0.01338, −0.01338, 0.01338, 0.01338, 0.01337, −0.01337, 0.01337, 0.01337, −0.01336, 0.01336, 0.01335, 0.01334, −0.01334, 0.01334, −0.01333, −0.01333, 0.01332, 0.0133, −0.0133, 0.0133, 0.0133, −0.01329, −0.01329, −0.01329, 0.01328, 0.01328, 0.01328, −0.01327, −0.01326, −0.01324, −0.01323, 0.01323, 0.01323, −0.01322, −0.01321, 0.0132, 0.01319, −0.01319, 0.01319, −0.01317, 0.01315, 0.01315, −0.01315, −0.01314, 0.01314, −0.01314, −0.01314, 0.01314, −0.01313, 0.01313, 0.01313, −0.01312, 0.01312, 0.01311, 0.01311, 0.01311, 0.01311, 0.01311, −0.0131, 0.0131, −0.01309, −0.01309, −0.01309, 0.01309, 0.01308, 0.01307, −0.01305, 0.01304, 0.01304, 0.01304, −0.01299, 0.01297, −0.01297, 0.01297, 0.01296, −0.01296, 0.01295, −0.01295, −0.01294, 0.01293, 0.01293, 0.01293, −0.01293, −0.01293, −0.01292, −0.01292, 0.01292, −0.01292, −0.01292, −0.01291, 0.01291, −0.0129, −0.0129, −0.0129, −0.01289, 0.01289, 0.01288, 0.01288, 0.01288, 0.01287, −0.01287, −0.01287, −0.01286, −0.01286, 0.01285, −0.01285, −0.01285, 0.01285, −0.01284, −0.01283, −0.01283, 0.01282, −0.01282, 0.01282, −0.01282, −0.01281, −0.0128, 0.0128, 0.01279, 0.01279, −0.01278, −0.01278, −0.01278, −0.01278, −0.01277, −0.01277, 0.01277, 0.01276, 0.01275, 0.01274, 0.01274, −0.01274, 0.01274, −0.01274, 0.01273, 0.01271, 0.0127, 0.01269, 0.01268, 0.01268, −0.01267, 0.01267, −0.01266, −0.01265, 0.01265, 0.01265, 0.01265, 0.01264, −0.01264, −0.01264, −0.01263, −0.01263, −0.01262, 0.0126, −0.0126, 0.0126, 0.01259, −0.01258, 0.01257, −0.01257, 0.01257, −0.01256, −0.01255, −0.01255, −0.01255, 0.01254, −0.01253, −0.01253, 0.01253, 0.01252, 0.01252, −0.01251, 0.01249, 0.01249, −0.01249, 0.01249, 0.01248, −0.01248, −0.01248, −0.01248, −0.01247, −0.01247, −0.01246, −0.01245, −0.01245, −0.01245, −0.01243, 0.01243, 0.01243, −0.01243, −0.01242, −0.01242, −0.01242, −0.01242, 0.01241, 0.01241, −0.01241, −0.0124, 0.0124, 0.0124, 0.0124, −0.01239, −0.01239, −0.01237, 0.01237, 0.01237, 0.01236, 0.01236, −0.01235, −0.01235, 0.01234, 0.01234, 0.01234, 0.01234, −0.01233, 0.01233, −0.01233, −0.01232, −0.01232, 0.01232, −0.01232, −0.01232, 0.01232, 0.01231, 0.01231, 0.0123, −0.0123, −0.0123, 0.01228, 0.01225, −0.01224, −0.01224, 0.01223, 0.01223, −0.01222, −0.01221, 0.0122, 0.01218, 0.01217, 0.01216, −0.01216, 0.01216, −0.01215, 0.01215, −0.01215, 0.01214, 0.01213, 0.01213, −0.0121, 0.01209, −0.01208, −0.01208, 0.01208, −0.01207, −0.01207, −0.01207, 0.01206, −0.01206, −0.01205, 0.01204, −0.01203, 0.01202, −0.01201, −0.01201, 0.01197, −0.01195, 0.01193, 0.01191, −0.01191, −0.01191, 0.0119, 0.0119, −0.0119, −0.01189, −0.01189, −0.01188, 0.01188, −0.01188, 0.01188, −0.01187, 0.01187, −0.01186, 0.01186, −0.01184, 0.01184, 0.01184, 0.01182, 0.01182, −0.01182, 0.01182, 0.01181, −0.0118, 0.0118, 0.0118, −0.0118, 0.01179, −0.01179, 0.01179, −0.01178, 0.01177, −0.01177, 0.01176, 0.01176, 0.01174, 0.01174, −0.01173, −0.01171, −0.01171, −0.0117, −0.0117, 0.01167, 0.01167, −0.01166, 0.01165, 0.01165, −0.01165, −0.01164, 0.01163, −0.01163, −0.01163, 0.01162, 0.01162, 0.0116, 0.01159, −0.01159, −0.01158, 0.01158, −0.01157, −0.01156, −0.01156, −0.01155, −0.01154, −0.01154, −0.01153, −0.01153, −0.01152, 0.01152, 0.01151, 0.01151, −0.0115, 0.0115, 0.0115, −0.0115, 0.01149, −0.01148, −0.01148, 0.01147, 0.01147, 0.01146, 0.01146, 0.01145, 0.01145, −0.01145, 0.01145, −0.01145, −0.01144, −0.01142, 0.01142, −0.01142, 0.01142, 0.01141, −0.01141, −0.0114, −0.01139, 0.01139, −0.01139, −0.01139, 0.01138, −0.01137, 0.01137, 0.01137, −0.01134, 0.01134, 0.01133, −0.01132, 0.01131, −0.01131, 0.01131, −0.01131, −0.01131, −0.0113, −0.0113, −0.0113, −0.0113, 0.01129, 0.01129, 0.01127, −0.01127, 0.01125, −0.01123, 0.01123, 0.01122, −0.01121, −0.01121, 0.01121, −0.0112, 0.01119, −0.01118, 0.01118, 0.01117, −0.01116, −0.01114, 0.01114, 0.01112, 0.01112, 0.01112, −0.01111, −0.01111, 0.0111, −0.0111, −0.01108, −0.01108, −0.01107, −0.01107, −0.01107, −0.01107, −0.01106, −0.01104, 0.01104, 0.01104, −0.01104, −0.01101, −0.01101, 0.01101, −0.01101, −0.011, 0.01099, 0.01098, 0.01098, 0.01098, −0.01097, −0.01096, 0.01096, −0.01095, −0.01094, −0.01094, 0.01093, 0.01093, 0.01092, −0.0109, 0.01089, 0.01088, 0.01088, −0.01088, 0.01088, −0.01087, −0.01087, −0.01086, −0.01086, 0.01085, −0.01084, −0.01083, −0.01083, 0.01082, −0.01081, 0.01079, 0.01079, 0.01079, 0.01078, −0.01078, 0.01078, 0.01077, −0.01077, 0.01075, −0.01074, 0.01074, 0.01073, −0.01073, −0.01073, 0.01073, 0.01072, −0.01072, 0.01071, −0.01071, 0.01071, −0.0107, −0.0107, −0.0107, −0.0107, 0.01069, 0.01069, −0.01068, −0.01067, 0.01066, 0.01066, 0.01066, 0.01064, −0.01064, 0.01063, −0.01063, 0.01061, −0.01061, 0.01061, 0.0106, −0.0106, −0.0106, 0.0106, −0.01059, −0.01059, −0.01058, 0.01058, −0.01058, −0.01057, 0.01057, 0.01057, −0.01056, −0.01056, −0.01056, −0.01054, −0.01053, 0.01053, −0.01052, −0.01052, 0.01052, 0.01051, 0.01051, −0.0105, −0.0105, −0.01049, 0.01048, 0.01047, −0.01047, 0.01047, −0.01047, −0.01046, 0.01046, 0.01046, −0.01046, 0.01045, 0.01045, −0.01045, −0.01045, −0.01045, −0.01043, −0.01043, −0.01043, −0.01042, 0.01041, 0.0104, −0.0104, −0.0104, 0.0104, −0.0104, 0.0104, 0.01039, 0.01039, 0.01038, −0.01038, −0.01038, −0.01037, −0.01037, −0.01036, 0.01035, −0.01035, −0.01035, 0.01035, 0.01034, 0.01034, 0.01034, −0.01031, 0.01031, 0.01031, 0.01031, 0.01031, −0.01029, −0.01029, −0.01028, 0.01027, 0.01027, 0.01027, 0.01026, −0.01025, 0.01025, 0.01024, −0.01024, −0.01023, −0.01023, 0.01023, −0.01022, −0.01022, −0.01022, −0.0102, 0.0102, 0.0102, −0.0102, 0.01019, 0.01019, −0.01018, 0.01018, 0.01018, 0.01017, −0.01015, 0.01015, −0.01015, 0.01015, 0.01014, −0.01013, −0.01013, −0.01012, 0.01012, −0.01012, −0.01011, −0.0101, −0.0101, −0.01008, −0.01008, −0.01008, −0.01007, −0.01007, −0.01006, 0.01005, 0.01005, 0.01004, −0.01003, −0.01002, 0.01001, −0.01001, −0.01001, 0.01001, 0.01, 0.01, 0.01, 0.00999, 0.00999, −0.00999, 0.00998, −0.00998, −0.00998, −0.00997, 0.00997, −0.00997, 0.00996, 0.00996, −0.00996, −0.00995, 0.00994, 0.00993, 0.00993, 0.00993, −0.00993, −0.00992, 0.00992, −0.00991, 0.00991, −0.00991, 0.0099, 0.00989, −0.00989, 0.00988, 0.00988, 0.00987, −0.00986, −0.00984, 0.00984, 0.00984, 0.00984, 0.00983, −0.00982, 0.00982, −0.00981, −0.0098, −0.00979, −0.00979, −0.00977, −0.00976, −0.00976, 0.00974, −0.00973, −0.00973, −0.00972, −0.00972, 0.00972, 0.00971, 0.00971, −0.0097, 0.00969, 0.00968, 0.00968, 0.00967, −0.00967, −0.00967, 0.00967, 0.00965, −0.00965, 0.00965, −0.00964, 0.00964, 0.00962, −0.00962, 0.00962, −0.00961, −0.00961, −0.00961, −0.0096, 0.0096, −0.00959, 0.00959, 0.00959, 0.00958, −0.00958, 0.00957, 0.00956, 0.00956, −0.00955, 0.00955, 0.00955, −0.00955, −0.00955, 0.00953, 0.00952, −0.00951, −0.00951, 0.00951, −0.00951, 0.00951, 0.0095, −0.0095, −0.00949, −0.00949, −0.00949, 0.00949, −0.00948, −0.00948, 0.00948, −0.00947, 0.00947, 0.00947, −0.00946, 0.00946, −0.00946, 0.00945, 0.00945, −0.00944, 0.00944, 0.00944, −0.00944, −0.00944, −0.00943, 0.00943, 0.00943, −0.00942, −0.00942, 0.00942, 0.00942, 0.00942, 0.00941, −0.00939, −0.00938, −0.00937, 0.00937, −0.00937, 0.00937, 0.00935, −0.00935, −0.00934, −0.00934, 0.00934, −0.00933, −0.00933, 0.00933, −0.00933, −0.00933, 0.00931, 0.0093, 0.0093, 0.00929, −0.00929, 0.00928, 0.00928, 0.00927, 0.00927, 0.00926, −0.00926, 0.00925, 0.00924, −0.00924, 0.00923, −0.00923, 0.00923, −0.00923, 0.00923, −0.00922, 0.00921, −0.00921, 0.00921, −0.00919, 0.00919, 0.00919, −0.00919, 0.00918, −0.00918, −0.00917, 0.00917, 0.00917, −0.00916, −0.00916, 0.00916, −0.00915, 0.00915, 0.00915, 0.00915, 0.00915, −0.00915, 0.00914, −0.00914, 0.00912, 0.00911, −0.0091, −0.00909, 0.00909, −0.00907, −0.00906, −0.00906, −0.00906, −0.00906, −0.00905, 0.00905, −0.00905, 0.00903, −0.00903, −0.00902, 0.00902, −0.00901, 0.00901, 0.009, 0.009, 0.009, 0.009, −0.009, −0.00899, 0.00898, 0.00898, 0.00898, 0.00897, 0.00896, 0.00895, 0.00895, −0.00895, 0.00893, 0.00892, 0.00892, 0.00891, −0.00891, −0.00891, −0.0089, 0.0089, −0.0089, −0.00889, −0.00889, −0.00889, −0.00888, −0.00888, −0.00886, 0.00886, −0.00885, 0.00885, 0.00885, −0.00884, −0.00884, 0.00883, −0.00882, −0.00882, 0.00881, −0.00881, 0.00879, −0.00879, 0.00879, 0.00879, 0.00879, 0.00877, 0.00877, −0.00876, −0.00876, 0.00875, 0.00875, −0.00874, −0.00874, 0.00874, 0.00873, 0.00872, 0.0087, −0.0087, −0.00869, −0.00869, 0.00869, 0.00868, −0.00868, 0.00867, 0.00867, 0.00867, −0.00867, 0.00867, −0.00867, 0.00867, 0.00866, −0.00864, 0.00863, −0.00862, 0.00861, 0.00861, 0.0086, −0.00859, −0.00858, −0.00858, 0.00857, 0.00857, −0.00855, 0.00854, −0.00853, −0.00851, −0.00851, −0.0085, −0.0085, −0.0085, 0.00849, 0.00849, 0.00848, 0.00848, −0.00847, −0.00847, −0.00846, 0.00846, −0.00845, 0.00845, 0.00844, −0.00844, 0.00844, −0.00843, −0.00843, 0.00842, 0.00841, −0.0084, 0.0084, −0.0084, −0.00839, 0.00838, −0.00838, −0.00837, 0.00837, −0.00836, 0.00835, −0.00835, 0.00835, −0.00833, −0.00833, 0.00833, 0.00833, 0.00833, −0.00832, −0.00831, 0.00831, −0.00831, −0.00831, 0.00829, 0.00828, 0.00828, −0.00828, −0.00827, 0.00827, −0.00826, −0.00826, −0.00826, −0.00825, 0.00825, −0.00824, 0.00824, 0.00824, 0.00823, −0.00823, 0.00822, −0.00822, −0.00821, −0.00821, 0.00821, 0.0082, −0.0082, −0.00819, −0.00819, 0.00819, −0.00818, −0.00818, 0.00818, 0.00817, −0.00817, −0.00816, −0.00816, −0.00816, 0.00816, −0.00816, 0.00816, 0.00815, 0.00815, 0.00815, −0.00815, 0.00814, −0.00814, 0.00813, 0.00813, −0.00813, 0.00813, −0.00812, 0.0081, 0.0081, −0.00809, 0.00808, −0.00807, −0.00806, 0.00806, 0.00806, −0.00804, 0.00804, −0.00804, 0.00802, −0.00802, −0.008, 0.008, 0.008, −0.00799, −0.00798, −0.00795, −0.00795, 0.00795, −0.00794, −0.00793, 0.00793, 0.00793, −0.00792, −0.00791, 0.00791, 0.00791, −0.0079, −0.00789, 0.00789, 0.00789, 0.00789, −0.00789, 0.00788, −0.00788, −0.00788, −0.00787, −0.00785, −0.00785, −0.00781, 0.00781, −0.0078, −0.0078, 0.0078, −0.00778, 0.00778, −0.00778, −0.00777, −0.00777, 0.00777, −0.00776, 0.00773, −0.00773, 0.00772, −0.00772, −0.0077, 0.0077, 0.0077, −0.0077, 0.00769, −0.00769, −0.00769, −0.00768, −0.00767, 0.00766, 0.00765, 0.00765, −0.00765, 0.00764, −0.00764, −0.00764, −0.00764, −0.00762, −0.00762, −0.00761, −0.00761, −0.0076, −0.00759, 0.00759, 0.00759, 0.00759, 0.00759, 0.00758, −0.00758, 0.00757, −0.00757, 0.00757, 0.00756, −0.00755, −0.00755, −0.00755, 0.00754, −0.00754, −0.00753, 0.00752, 0.00752, 0.00752, 0.0075, 0.00748, −0.00747, −0.00746, −0.00746, 0.00746, 0.00745, 0.00745, 0.00745, 0.00745, 0.00744, −0.00744, −0.00742, 0.00742, −0.00742, −0.00741, 0.00741, −0.00738, −0.00737, −0.00737, −0.00736, −0.00736, −0.00735, 0.00735, 0.00734, 0.00734, 0.00734, −0.00734, −0.00734, 0.00734, 0.00733, −0.00733, −0.00733, −0.00733, 0.00731, −0.00731, 0.0073, −0.00729, 0.00728, −0.00727, 0.00726, 0.00725, 0.00725, 0.00725, 0.00725, 0.00724, 0.00723, 0.00722, −0.0072, 0.0072, −0.0072, −0.00719, 0.00719, −0.00718, 0.00717, 0.00717, −0.00717, 0.00716, −0.00715, 0.00712, 0.00711, −0.00711, −0.0071, 0.0071, 0.00709, 0.00708, 0.00708, −0.00706, −0.00705, 0.00705, 0.00705, −0.00704, 0.00704, 0.00704, −0.00702, 0.007, −0.007, 0.00699, 0.00698, −0.00698, −0.00698, 0.00697, −0.00696, 0.00696, −0.00696, −0.00696, −0.00695, −0.00695, 0.00694, −0.00692, 0.00692, −0.00692, 0.00691, −0.00691, −0.00691, −0.0069, −0.00689, 0.00689, 0.00689, 0.00687, 0.00687, −0.00687, 0.00686, −0.00686, 0.00684, −0.00684, −0.00683, −0.00683, 0.00683, 0.00683, −0.00682, 0.00681, −0.00681, −0.00681, 0.0068, 0.0068, 0.0068, 0.0068, −0.0068, −0.00679, −0.00679, −0.00679, 0.00677, −0.00677, 0.00677, 0.00676, 0.00676, 0.00676, −0.00676, −0.00675, 0.00675, 0.00675, −0.00675, 0.00674, 0.00673, −0.00673, −0.00672, 0.00672, 0.00672, 0.00671, −0.00671, 0.00671, −0.00671, 0.0067, 0.0067, −0.00669, 0.00669, −0.00668, 0.00667, −0.00667, 0.00666, −0.00666, −0.00666, −0.00665, 0.00663, −0.00662, 0.0066, −0.00659, −0.00659, −0.00659, 0.00658, 0.00657, 0.00657, 0.00657, −0.00655, 0.00655, −0.00653, −0.00653, −0.00652, 0.00651, −0.00649, 0.00649, 0.00648, −0.00648, −0.00647, 0.00646, 0.00646, 0.00644, 0.00643, −0.00642, 0.00639, −0.00639, −0.00638, 0.00637, 0.00637, 0.00636, −0.00635, −0.00635, 0.00634, −0.00634, −0.00634, −0.00633, −0.00632, 0.00631, −0.00631, −0.00631, −0.0063, −0.0063, −0.00629, 0.00629, 0.00629, 0.00629, 0.00629, 0.00628, −0.00627, 0.00627, 0.00627, 0.00626, −0.00626, 0.00625, −0.00624, −0.00624, 0.00624, 0.00623, 0.00623, 0.00622, 0.00622, −0.00622, 0.00622, −0.00622, 0.0062, −0.0062, 0.0062, 0.00619, −0.00618, 0.00618, 0.00617, −0.00615, −0.00615, 0.00613, 0.00612, 0.00612, 0.00612, 0.00612, −0.00612, −0.00612, −0.00611, −0.00611, −0.0061, 0.0061, −0.00609, 0.00608, 0.00608, 0.00608, 0.00607, 0.00605, −0.00604, 0.00603, −0.00602, 0.00602, −0.006, −0.006, 0.00599, 0.00599, 0.00598, 0.00597, −0.00596, −0.00596, 0.00595, 0.00595, 0.00594, −0.00593, −0.00593, 0.00592, 0.00592, 0.00591, 0.00591, 0.00591, 0.00591, −0.0059, 0.0059, 0.00589, 0.00587, −0.00586, 0.00586, 0.00585, −0.00584, −0.00583, −0.00582, 0.00581, 0.00581, −0.00581, −0.0058, 0.0058, 0.0058, −0.0058, −0.00579, −0.00579, 0.00579, 0.00579, 0.00577, −0.00576, 0.00575, 0.00575, −0.00575, 0.00572, 0.00572, −0.00572, −0.00572, 0.00572, −0.00572, −0.0057, −0.0057, −0.00569, −0.00568, 0.00567, −0.00567, 0.00566, 0.00566, −0.00566, −0.00566, −0.00566, 0.00565, 0.00565, 0.00565, −0.00565, 0.00565, 0.00564, 0.00564, −0.00564, −0.00562, −0.00562, 0.00562, 0.00562, 0.00562, 0.00561, −0.00561, −0.00561, 0.0056, −0.00559, 0.00559, −0.00559, 0.00559, 0.00558, 0.00558, 0.00558, 0.00558, 0.00556, 0.00556, −0.00556, −0.00553, −0.00551, −0.00551, 0.0055, 0.0055, 0.00549, 0.00548, −0.00547, 0.00547, 0.00546, 0.00545, −0.00545, 0.00545, −0.00545, −0.00545, 0.00544, 0.00544, 0.00543, −0.00543, 0.00542, 0.00542, 0.00542, −0.00542, 0.00541, −0.0054, 0.0054, 0.0054, 0.00539, 0.00539, 0.00539, −0.00539, 0.00539, −0.00538, 0.00538, −0.00536, −0.00535, −0.00535, −0.00534, −0.00534, −0.00534, −0.00534, −0.00533, 0.00532, −0.00532, 0.00532, 0.00532, −0.00531, −0.00531, 0.00531, 0.00531, −0.00531, 0.0053, 0.0053, 0.00529, 0.00529, 0.00528, 0.00528, −0.00527, −0.00527, 0.00527, 0.00526, −0.00525, −0.00525, −0.00525, −0.00524, 0.00524, 0.00523, −0.00523, −0.00523, −0.00523, −0.00522, 0.00521, −0.00521, −0.0052, −0.0052, −0.0052, −0.0052, −0.00519, 0.00519, −0.00519, −0.00519, −0.00518, 0.00517, −0.00517, 0.00516, −0.00516, −0.00516, 0.00515, 0.00514, 0.00513, 0.00513, −0.00511, −0.0051, 0.0051, 0.00509, −0.00509, 0.00508, 0.00505, 0.00504, 0.00504, −0.00504, 0.00504, −0.00504, 0.00503, 0.00503, −0.00502, −0.00502, −0.00501, 0.00501, −0.005, 0.00499, −0.00499, −0.00499, −0.00498, −0.00498, −0.00498, 0.00497, −0.00497, 0.00497, 0.00496, 0.00496, −0.00496, −0.00496, −0.00494, −0.00491, 0.00491, −0.0049, 0.00489, 0.00489, 0.00488, 0.00488, −0.00487, 0.00487, −0.00486, 0.00486, −0.00485, −0.00483, 0.00482, 0.00482, −0.00482, 0.00481, −0.00478, 0.00478, 0.00478, 0.00478, −0.00477, −0.00476, −0.00476, 0.00475, 0.00474, −0.00474, −0.00474, −0.00474, −0.00473, 0.00472, −0.00472, −0.00472, −0.00471, −0.00471, 0.00469, −0.00468, −0.00467, 0.00467, 0.00467, 0.00467, 0.00466, −0.00465, 0.00464, −0.00464, −0.00463, −0.00463, 0.00462, −0.00462, −0.0046, 0.0046, −0.00459, −0.00459, 0.00459, 0.00458, 0.00457, −0.00456, −0.00455, 0.00455, 0.00455, 0.00454, −0.00453, 0.00453, 0.00452, 0.00451, 0.00451, −0.00451, −0.00451, −0.00451, 0.00451, −0.00451, 0.0045, 0.00449, 0.00449, −0.00449, 0.00449, −0.00448, −0.00448, −0.00447, 0.00446, −0.00446, 0.00445, 0.00444, 0.00443, 0.00443, −0.00443, 0.00443, 0.00442, −0.00442, −0.00442, 0.0044, 0.0044, 0.0044, 0.00439, −0.00439, −0.00438, −0.00438, 0.00438, −0.00438, 0.00437, 0.00437, −0.00436, 0.00436, −0.00435, −0.00435, 0.00432, −0.0043, −0.0043, 0.00429, −0.00428, −0.00428, 0.00428, −0.00428, −0.00426, −0.00426, 0.00426, −0.00426, −0.00425, −0.00425, −0.00424, −0.00424, 0.00423, 0.00421, −0.00421, 0.0042, 0.0042, 0.00418, −0.00418, 0.00418, −0.00418, 0.00417, 0.00417, −0.00417, 0.00416, −0.00414, −0.00414, −0.00414, −0.00413, −0.00412, 0.00412, −0.00411, 0.0041, 0.0041, −0.00407, 0.00407, 0.00406, 0.00406, −0.00406, −0.00406, 0.00405, 0.00405, −0.00405, −0.00404, −0.00402, −0.00402, 0.00402, 0.00402, 0.00401, −0.00401, −0.00401, 0.004, −0.00399, −0.00399, −0.00399, −0.00398, −0.00398, 0.00398, −0.00397, −0.00397, 0.00397, −0.00397, −0.00397, −0.00396, 0.00396, −0.00395, 0.00395, −0.00395, −0.00394, 0.00394, −0.00393, −0.00392, 0.00392, 0.00391, 0.0039, −0.0039, 0.00389, 0.00389, −0.00389, 0.00388, −0.00387, 0.00387, −0.00385, 0.00385, −0.00384, −0.00383, −0.00382, 0.00381, −0.00381, 0.00381, 0.00379, 0.00379, 0.00379, 0.00379, −0.00379, −0.00379, −0.00379, −0.00378, 0.00377, 0.00377, −0.00376, −0.00374, 0.00372, 0.00372, 0.00371, 0.00371, 0.00371, 0.0037, 0.0037, 0.00369, 0.00367, −0.00367, 0.00367, 0.00366, 0.00365, 0.00365, −0.00365, 0.00363, −0.0036, 0.0036, 0.0036, 0.0036, −0.00359, −0.00359, 0.00358, −0.00357, 0.00357, 0.00357, 0.00354, 0.00354, 0.00354, −0.00353, −0.00352, −0.00351, −0.00351, 0.0035, 0.00349, −0.00349, −0.00348, −0.00348, −0.00347, −0.00347, 0.00345, 0.00344, 0.00344, 0.00344, 0.00344, 0.00343, 0.00341, −0.00341, 0.00341, −0.00341, 0.00341, −0.0034, 0.0034, 0.0034, 0.00339, −0.00339, −0.00338, 0.00338, −0.00338, 0.00338, 0.00337, −0.00334, 0.00334, −0.00333, −0.00333, 0.00333, 0.00332, −0.00332, −0.00332, 0.00332, −0.00331, −0.0033, −0.0033, −0.0033, −0.00329, −0.00329, −0.00329, 0.00328, 0.00328, −0.00327, 0.00327, −0.00327, 0.00326, 0.00326, −0.00326, 0.00323, 0.00323, 0.00322, −0.00322, −0.00321, −0.0032, 0.00319, −0.00319, −0.00318, −0.00318, −0.00318, −0.00316, −0.00315, 0.00314, 0.00314, 0.00314, −0.00313, 0.00313, 0.00312, −0.00312, 0.00312, 0.00311, 0.00311, −0.00311, 0.0031, 0.0031, −0.00309, −0.00309, −0.00308, 0.00307, −0.00307, 0.00307, 0.00306, −0.00306, −0.00306, −0.00306, 0.00306, 0.00305, −0.00305, −0.00304, −0.00304, −0.00303, 0.00302, −0.00302, −0.00302, −0.00301, 0.003, 0.003, 0.00298, −0.00298, −0.00298, −0.00298, 0.00297, 0.00297, 0.00296, 0.00296, 0.00296, 0.00296, 0.00295, 0.00295, −0.00295, 0.00295, −0.00294, −0.00294, −0.00294, 0.00294, −0.00294, 0.00293, −0.00293, −0.00292, 0.0029, 0.00289, 0.00289, 0.00288, −0.00288, 0.00287, 0.00287, 0.00286, 0.00286, −0.00285, 0.00285, 0.00284, 0.00284, −0.00281, 0.00281, 0.0028, −0.0028, 0.0028, 0.00279, 0.00279, 0.00277, 0.00277, 0.00276, 0.00276, −0.00275, −0.00274, 0.00274, 0.00274, 0.00273, −0.00273, 0.00272, −0.00272, −0.00272, −0.0027, −0.0027, 0.00269, 0.00269, 0.00269, 0.00269, 0.00267, 0.00267, −0.00267, −0.00265, 0.00265, −0.00264, 0.00264, −0.00264, −0.00264, 0.00263, −0.00262, −0.00262, −0.00261, 0.00261, −0.00261, 0.00261, −0.0026, −0.00258, −0.00258, 0.00257, 0.00257, 0.00256, 0.00256, −0.00255, −0.00255, −0.00254, −0.00253, −0.00253, −0.00252, −0.00251, 0.00249, 0.00249, −0.00249, 0.00249, 0.00248, −0.00247, 0.00247, −0.00247, −0.00245, 0.00245, −0.00245, −0.00243, 0.00243, −0.00243, −0.00241, 0.0024, 0.0024, −0.0024, 0.00239, 0.00238, −0.00238, 0.00236, 0.00236, 0.00236, 0.00235, −0.00235, 0.00234, −0.00234, 0.00232, −0.00232, 0.00231, 0.00231, −0.0023, 0.00229, −0.00229, 0.00229, −0.00227, −0.00227, 0.00227, 0.00226, 0.00226, −0.00225, 0.00225, −0.00225, 0.00225, −0.00224, 0.00223, −0.00222, 0.00222, −0.0022, 0.0022, 0.0022, −0.00219, −0.00219, 0.00219, −0.00219, 0.00218, −0.00218, −0.00218, −0.00218, −0.00218, −0.00217, −0.00217, 0.00216, 0.00216, 0.00216, 0.00215, 0.00213, 0.00213, −0.00213, −0.00213, −0.00212, −0.00211, −0.00211, −0.0021, −0.00209, 0.00208, −0.00208, −0.00208, 0.00205, −0.00205, 0.00205, −0.00204, 0.00203, −0.00203, −0.00202, −0.002, 0.002, 0.002, −0.002, −0.002, 0.00199, −0.00198, −0.00198, 0.00198, 0.00198, −0.00198, −0.00198, −0.00197, −0.00195, −0.00195, 0.00195, −0.00195, 0.00194, −0.00193, 0.00193, 0.00193, −0.00193, 0.00193, 0.00192, 0.00192, −0.00192, −0.00192, 0.00192, −0.00192, 0.00191, −0.0019, −0.0019, 0.0019, 0.00189, −0.00189, 0.00188, 0.00188, −0.00188, −0.00187, −0.00187, −0.00187, 0.00186, −0.00186, −0.00185, −0.00183, 0.00181, −0.00181, −0.00181, 0.0018, −0.00179, −0.00178, −0.00178, 0.00177, 0.00177, −0.00175, −0.00175, −0.00175, 0.00174, 0.00174, 0.00174, −0.00174, 0.00174, −0.00173, 0.00173, −0.00173, −0.00172, 0.00171, 0.0017, 0.00169, −0.00169, 0.00169, −0.00169, 0.00167, 0.00167, 0.00166, 0.00166, −0.00165, −0.00165, −0.00165, −0.00164, 0.00164, −0.00163, 0.00163, 0.00163, −0.00162, −0.00161, 0.0016, −0.0016, −0.0016, −0.0016, −0.0016, 0.00159, 0.00158, 0.00158, 0.00157, 0.00157, 0.00157, −0.00156, 0.00156, −0.00156, −0.00153, 0.00153, 0.00152, −0.00151, −0.00151, −0.0015, −0.0015, 0.00149, 0.00148, −0.00148, −0.00147, 0.00147, −0.00147, 0.00147, −0.00146, −0.00142, −0.00142, 0.00141, −0.00141, −0.0014, −0.00139, 0.00139, −0.00139, −0.00138, −0.00138, −0.00138, −0.00137, −0.00137, −0.00137, 0.00136, 0.00135, 0.00135, −0.00134, 0.00131, −0.00131, 0.0013, −0.00129, 0.00128, −0.00127, −0.00125, 0.00125, 0.00125, 0.00124, 0.00123, −0.00123, −0.00123, 0.00123, −0.00123, 0.00122, 0.0012, 0.0012, −0.00119, −0.00119, −0.00118, 0.00118, −0.00117, 0.00117, −0.00116, 0.00114, 0.00114, 0.00114, −0.00113, −0.00113, 0.00112, −0.00112, 0.00111, −0.00111, 0.00111, 0.0011, −0.0011, 0.00109, −0.00109, 0.00108, −0.00108, −0.00108, 0.00107, −0.00107, 0.00104, −0.00104, −0.00104, −0.00104, 0.00103, −0.00103, −0.00103, 0.00103, −0.00102, −0.00102, −0.00101, −0.00101, 0.00101, −0.001, 0.001, −0.001, 0.00099, 0.00098, −0.00097, 0.00096, 0.00096, −0.00094, 0.00093, −0.00093, −0.00093, −0.00093, 0.00091, −0.00091, −0.00091, 9.00E-04, −0.00089, −0.00087, −0.00087, −0.00086, 0.00086, 0.00085, 0.00085, −0.00084, 0.00083, 0.00083, −0.00083, 0.00082, −0.00082, −0.00082, 0.00082, 0.00081, −8.00E-04, 0.00079, −0.00079, −0.00078, 0.00077, −0.00077, −0.00076, −0.00076, 0.00074, 0.00074, −0.00074, −0.00072, 0.00072, −0.00069, −0.00068, 0.00068, 0.00068, 0.00068, −0.00068, −0.00068, −0.00068, −0.00067, 0.00067, −0.00066, −0.00063, −0.00063, −0.00062, −0.00061, −6.00E-04, −6.00E-04, 6.00E-04, −6.00E-04, 0.00059, 0.00058, −0.00058, 0.00058, 0.00058, −0.00056, 0.00055, 0.00055, −0.00054, 0.00054, −0.00054, 0.00052, −5.00E-04, 5.00E-04, −0.00049, −0.00049, 0.00048, 0.00048, 0.00048, −0.00048, −0.00047, 0.00047, −0.00046, −0.00046, 0.00045, 0.00043, −0.00043, −0.00042, −0.00042, −0.00042, 0.00041, 0.00041, 0.00041, 4.00E-04, 0.00039, −0.00038, 0.00038, 0.00038, −0.00038, −0.00038, −0.00038, 0.00038, −0.00037, −0.00037, −0.00037, −0.00035, 0.00034, −0.00033, 0.00033, −0.00032, −0.00031, −3.00E-04, −0.00029, −0.00029, 0.00029, 0.00029, 0.00027, 0.00027, 0.00026, −0.00026, −0.00025, 0.00024, 0.00023, −0.00023, 0.00023, −0.00022, −0.00022, −0.00022, 0.00021, 0.00021, 0.00021, −0.00019, −0.00019, −0.00018, −0.00018, −0.00017, −0.00017, −0.00017, 0.00017, −0.00017, −0.00017, 0.00016, −0.00016, 0.00016, 0.00015, −0.00014, −0.00013, −0.00013, 0.00012, −0.00012, −0.00011, 0.00011, −0.00011, −1.00E-04, −1.00E-04, 9.00E-05, 9.00E-05, −9.00E-05, −8.00E-05, −8.00E-05, −8.00E-05, 6.00E-05, 6.00E-05, −6.00E-05, −2.00E-05, −1.00E-05, 1.00E-05, 1.00E-05, −1.00E-05, 1.00E-05, −1.00E-05, −1.00E-05, and 0.

[0335] The predicting the presence, absence or development of cancer in an individual may particularly involve a threshold cancer index value being applied in order to assess or stratify an individual has having or not having cancer or of having a high or low risk of cancer development.

[0336] In any of the assays described herein, wherein when the cancer index value for the individual is about −0.056 or more, the individual is assessed as having cancer or as having a high risk of cancer development, or wherein when the cancer index value for the individual is less than about 0.056, the individual is assessed as not having cancer or as having a low risk of cancer development, preferably wherein the assay comprises determining methylation β-values for each CpG in the panel of one or more CpGs, and more preferably wherein the assessing the presence, absence or development of cancer in an individual is based on the WID-OC-Index. The panel of one or more CpGs used to derive the cancer index value may particularly comprise:
[0337] a. at least 500 of the CpGs identified at nucleotide positions 61 to 62 in SEQ ID NOs 1 to 14,000, and wherein the sensitivity is at least 64% and the specificity is at least 63%;
[0338] b. at least the CpGs defined by SEQ ID NOs 1 to 500 and identified at nucleotide positions 61 to 62, and wherein the sensitivity is at least 72% and specificity is at least 62%;
[0339] c. at least the CpGs defined by SEQ ID NOs 1 to 1000 and identified at nucleotide positions 61 to 62, and wherein the sensitivity is at least 80% and specificity is at least 61%; or
[0340] d. at least the CpGs defined by SEQ ID NOs 1 to 2000 and identified at nucleotide positions 61 to 62, and wherein the sensitivity is at least 76% and specificity is at least 61%.

[0341] In any of the assays described herein, wherein when the cancer index value for the individual is about −0.056 or more, the individual is assessed as having cancer or as having a high risk of cancer development, or wherein when the cancer index value for the individual is less than about 0.056, the individual is assessed as not having cancer or as having a low risk of cancer development, preferably wherein the assay comprises determining methylation β-values for each CpG in the panel of one or more CpGs, and more preferably wherein the assessing the presence, absence or development of cancer in an individual is based on the WID-OC-Index. The panel of one or more CpGs used to derive the cancer index value may particularly comprise:
[0342] 1. at least the CpGs defined by SEQ ID NOs 1 to 500 and identified at nucleotide positions 61 to 62, and wherein the sensitivity is at least 72% and specificity is at least 62%;
[0343] 2. at least the CpGs defined by SEQ ID NOs 501 to 100 and identified at nucleotide positions 61 to 62, and wherein the sensitivity is at least 77% and specificity is at least 58%; or
[0344] 3. at least the CpGs defined by SEQ ID NOs 1001 to 1500 and identified at nucleotide positions 61 to 62, and wherein the sensitivity is at least 76% and specificity is at least 53%;
[0345] 4. at least the CpGs defined by SEQ ID NOs 1501 to 2000 and identified at nucleotide positions 61 to 62, and wherein the sensitivity is at least 71% and specificity is at least 58%;
[0346] 5. at least the CpGs defined by SEQ ID NOs 2001 to 2500 and identified at nucleotide positions 61 to 62, and wherein the sensitivity is at least 70% and specificity is at least 64%;
[0347] 6. at least the CpGs defined by SEQ ID NOs 2501 to 3000 and identified at nucleotide positions 61 to 62, and wherein the sensitivity is at least 77% and specificity is at least 60%;
[0348] 7. at least the CpGs defined by SEQ ID NOs 3001 to 3500 and identified at nucleotide positions 61 to 62, and wherein the sensitivity is at least 77% and specificity is at least 56%;
[0349] 8. at least the CpGs defined by SEQ ID NOs 3501 to 4000 and identified at nucleotide positions 61 to 62, and wherein the sensitivity is at least 72% and specificity is at least 62%;
[0350] 9. at least the CpGs defined by SEQ ID NOs 4001 to 4500 and identified at nucleotide positions 61 to 62, and wherein the sensitivity is at least 75% and specificity is at least 58%;
[0351] 10. at least the CpGs defined by SEQ ID NOs 4501 to 5000 and identified at nucleotide positions 61 to 62, and wherein the sensitivity is at least 75% and specificity is at least 57%;
[0352] 11. at least the CpGs defined by SEQ ID NOs 5001 to 5500 and identified at nucleotide positions 61 to 62, and wherein the sensitivity is at least 73% and specificity is at least 57%;
[0353] 12. at least the CpGs defined by SEQ ID NOs 5501 to 6000 and identified at nucleotide positions 61 to 62, and wherein the sensitivity is at least 72% and specificity is at least 58%;
[0354] 13. at least the CpGs defined by SEQ ID NOs 6001 to 6500 and identified at nucleotide positions 61 to 62, and wherein the sensitivity is at least 73% and specificity is at least 56%;
[0355] 14. at least the CpGs defined by SEQ ID NOs 6501 to 7000 and identified at nucleotide positions 61 to 62, and wherein the sensitivity is at least 67% and specificity is at least 62%;
[0356] 15. at least the CpGs defined by SEQ ID NOs 7001 to 7500 and identified at nucleotide positions 61 to 62, and wherein the sensitivity is at least 72% and specificity is at least 58%;
[0357] 16. at least the CpGs defined by SEQ ID NOs 7501 to 8000 and identified at nucleotide positions 61 to 62, and wherein the sensitivity is at least 65% and specificity is at least 62%;
[0358] 17. at least the CpGs defined by SEQ ID NOs 8001 to 8500 and identified at nucleotide positions 61 to 62, and wherein the sensitivity is at least 64% and specificity is at least 60%;
[0359] 18. at least the CpGs defined by SEQ ID NOs 8501 to 9000 and identified at nucleotide positions 61 to 62, and wherein the sensitivity is at least 66% and specificity is at least 61%;
[0360] 19. at least the CpGs defined by SEQ ID NOs 9001 to 9500 and identified at nucleotide positions 61 to 62, and wherein the sensitivity is at least 65% and specificity is at least 60%;
[0361] 20. at least the CpGs defined by SEQ ID NOs 9501 to 10000 and identified at nucleotide positions 61 to 62, and wherein the sensitivity is at least 64% and specificity is at least 61%;
[0362] 21. at least the CpGs defined by SEQ ID NOs 10001 to 10500 and identified at nucleotide positions 61 to 62, and wherein the sensitivity is at least 60% and specificity is at least 60%;
[0363] 22. at least the CpGs defined by SEQ ID NOs 10501 to 11000 and identified at nucleotide positions 61 to 62, and wherein the sensitivity is at least 66% and specificity is at least 58%;
[0364] 23. at least the CpGs defined by SEQ ID NOs 11001 to 11500 and identified at nucleotide positions 61 to 62, and wherein the sensitivity is at least 61% and specificity is at least 62%;
[0365] 24. at least the CpGs defined by SEQ ID NOs 11501 to 12000 and identified at nucleotide positions 61 to 62, and wherein the sensitivity is at least 65% and specificity is at least 62%;
[0366] 25. at least the CpGs defined by SEQ ID NOs 12001 to 12500 and identified at nucleotide positions 61 to 62, and wherein the sensitivity is at least 63% and specificity is at least 63%;
[0367] 26. at least the CpGs defined by SEQ ID NOs 12501 to 13000 and identified at nucleotide positions 61 to 62, and wherein the sensitivity is at least 60% and specificity is at least 64%;
[0368] 27. at least the CpGs defined by SEQ ID NOs 13001 to 13500 and identified at nucleotide positions 61 to 62, and wherein the sensitivity is at least 61% and specificity is at least 63%;
[0369] 28. at least the CpGs defined by SEQ ID NOs 13501 to 14000 and identified at nucleotide positions 61 to 62, and wherein the sensitivity is at least 64% and specificity is at least 63%;
[0370] 29. at least the CpGs defined by SEQ ID NOs 1 to 100 and identified at nucleotide positions 61 to 62, and wherein the sensitivity is at least 65% and specificity is at least 58%;
[0371] 30. at least the CpGs defined by SEQ ID NOs 1 to 500 and identified at nucleotide positions 61 to 62, and wherein the sensitivity is at least 72% and specificity is at least 62%;
[0372] 31. at least the CpGs defined by SEQ ID NOs 1 to 1000 and identified at nucleotide positions 61 to 62, and wherein the sensitivity is at least 80% and specificity is at least 61%;
[0373] 32. at least the CpGs defined by SEQ ID NOs 1 to 2000 and identified at nucleotide positions 61 to 62, and wherein the sensitivity is at least 76% and specificity is at least 61%;
[0374] 33. at least the CpGs defined by SEQ ID NOs 1 to 3000 and identified at nucleotide positions 61 to 62, and wherein the sensitivity is at least 73% and specificity is at least 63%;
[0375] 34. at least the CpGs defined by SEQ ID NOs 1 to 4000 and identified at nucleotide positions 61 to 62, and wherein the sensitivity is at least 76% and specificity is at least 63%;
[0376] 35. at least the CpGs defined by SEQ ID NOs 1 to 5000 and identified at nucleotide positions 61 to 62, and wherein the sensitivity is at least 77% and specificity is at least 61%;
[0377] 36. at least the CpGs defined by SEQ ID NOs 1 to 6000 and identified at nucleotide positions 61 to 62, and wherein the sensitivity is at least 78% and specificity is at least 62%;
[0378] 37. at least the CpGs defined by SEQ ID NOs 1 to 7000 and identified at nucleotide positions 61 to 62, and wherein the sensitivity is at least 78% and specificity is at least 61%;
[0379] 38. at least the CpGs defined by SEQ ID NOs 1 to 8000 and identified at nucleotide positions 61 to 62, and wherein the sensitivity is at least 78% and specificity is at least 61%;
[0380] 39. at least the CpGs defined by SEQ ID NOs 1 to 9000 and identified at nucleotide positions 61 to 62, and wherein the sensitivity is at least 78% and specificity is at least 60%;
[0381] 40. at least the CpGs defined by SEQ ID NOs 1 to 10000 and identified at nucleotide positions 61 to 62, and wherein the sensitivity is at least 78% and specificity is at least 60%;
[0382] 41. at least the CpGs defined by SEQ ID NOs 1 to 11000 and identified at nucleotide positions 61 to 62, and wherein the sensitivity is at least 78% and specificity is at least 60%;
[0383] 42. at least the CpGs defined by SEQ ID NOs 1 to 12000 and identified at nucleotide positions 61 to 62, and wherein the sensitivity is at least 78% and specificity is at least 60%;
[0384] 43. at least the CpGs defined by SEQ ID NOs 1 to 13000 and identified at nucleotide positions 61 to 62, and wherein the sensitivity is at least 78% and specificity is at least 60%;
[0385] 44. at least the CpGs defined by SEQ ID NOs 1 to 14000 and identified at nucleotide positions 61 to 62, and wherein the sensitivity is at least 78% and specificity is at least 60%;
[0386] 45. at least the CpGs defined by SEQ ID NOs 13,001 to 14,000 and identified at nucleotide positions 61 to 62, and wherein the sensitivity is at least 61% and specificity is at least 64%;
[0387] 46. at least the CpGs defined by SEQ ID NOs 12,001 to 14,000 and identified at nucleotide positions 61 to 62, and wherein the sensitivity is at least 64% and specificity is at least 64%;
[0388] 47. at least the CpGs defined by SEQ ID NOs 11,001 to 14,000 and identified at nucleotide positions 61 to 62, and wherein the sensitivity is at least 60% and specificity is at least 64%;
[0389] 48. at least the CpGs defined by SEQ ID NOs 10,001 to 14,000 and identified at nucleotide positions 61 to 62, and wherein the sensitivity is at least 60% and specificity is at least 62%;
[0390] 49. at least the CpGs defined by SEQ ID NOs 9,001 to 14,000 and identified at nucleotide positions 61 to 62, and wherein the sensitivity is at least 60% and specificity is at least 62%;
[0391] 50. at least the CpGs defined by SEQ ID NOs 8,001 to 14,000 and identified at nucleotide positions 61 to 62, and wherein the sensitivity is at least 61% and specificity is at least 62%;
[0392] 51. at least the CpGs defined by SEQ ID NOs 7,001 to 14,000 and identified at nucleotide positions 61 to 62, and wherein the sensitivity is at least 64% and specificity is at least 62%;
[0393] 52. at least the CpGs defined by SEQ ID NOs 6,001 to 14,000 and identified at nucleotide positions 61 to 62, and wherein the sensitivity is at least 65% and specificity is at least 60%;
[0394] 53. at least the CpGs defined by SEQ ID NOs 5,001 to 14,000 and identified at nucleotide positions 61 to 62, and wherein the sensitivity is at least 67% and specificity is at least 60%;
[0395] 54. at least the CpGs defined by SEQ ID NOs 4,001 to 14,000 and identified at nucleotide positions 61 to 62, and wherein the sensitivity is at least 69% and specificity is at least 59%;
[0396] 55. at least the CpGs defined by SEQ ID NOs 3,001 to 14,000 and identified at nucleotide positions 61 to 62, and wherein the sensitivity is at least 72% and specificity is at least 60%;
[0397] 56. at least the CpGs defined by SEQ ID NOs 2,001 to 14,000 and identified at nucleotide positions 61 to 62, and wherein the sensitivity is at least 76% and specificity is at least 61%;
[0398] 57. at least the CpGs defined by SEQ ID NOs 1,001 to 14,000 and identified at nucleotide positions 61 to 62, and wherein the sensitivity is at least 76% and specificity is at least 62%;
[0399] 58. at least the CpGs defined by SEQ ID NOs 501 to 14,000 and identified at nucleotide positions 61 to 62, and wherein the sensitivity is at least 76% and specificity is at least 60%;
[0400] 59. at least the CpGs defined by SEQ ID NOs 101 to 14,000 and identified at nucleotide positions 61 to 62, and wherein the sensitivity is at least 77% and specificity is at least 60%; or
[0401] 60. at least the CpGs defined by SEQ ID NOs 1 to 14,000 and identified at nucleotide positions 61 to 62, and wherein the sensitivity is at least 78% and specificity is at least 60%.

[0402] In any of the described assays, the methylation status of the one or more CpGs in the panel is preferably determined by a p-value analysis, and the cancer is ovarian cancer or endometrial cancer. Preferably, the cancer is ovarian cancer.

[0403] In any of the assays described herein, wherein when the cancer index value for the individual is about 0.485 or more, the individual is assessed as having cancer or as having a high risk of cancer development, or wherein when the cancer index value for the individual is less than about 0.485, the individual is assessed as not having cancer or as having a low risk of cancer development, preferably wherein the assay comprises determining methylation β-values for each CpG in the panel of one or more CpGs, and more preferably wherein the assessing the presence, absence or development of cancer in an individual is based on the WID-OC-Index. The panel of one or more CpGs used to derive the cancer index value may particularly comprise:
[0404] a. at least 500 of the CpGs identified at nucleotide positions 61 to 62 in SEQ ID NOs 1 to 14,000, and wherein the sensitivity is at least 43% and the specificity is at least 80%;
[0405] b. at least the CpGs defined by SEQ ID NOs 1 to 500 and identified at nucleotide positions 61 to 62, and wherein the sensitivity is at least 51% and specificity is at least 87%;
[0406] c. at least the CpGs defined by SEQ ID NOs 1 to 1000 and identified at nucleotide positions 61 to 62, and wherein the sensitivity is at least 45% and specificity is at least 87%;
[0407] d. at least the CpGs defined by SEQ ID NOs 1 to 2000 and identified at nucleotide positions 61 to 62, and wherein the sensitivity is at least 49% and specificity is at least 89%.

[0408] In any of the assays described herein, wherein when the cancer index value for the individual is about 0.485 or more, the individual is assessed as having cancer or as having a high risk of cancer development, or wherein when the cancer index value for the individual is less than about 0.485, the individual is assessed as not having cancer or as having a low risk of cancer development, preferably wherein the assay comprises determining methylation β-values for each CpG in the panel of one or more CpGs, and more preferably wherein the assessing the presence, absence or development of cancer in an individual is based on the WID-OC-Index. The panel of one or more CpGs used to derive the cancer index value may particularly comprise:
[0409] 1. at least the CpGs defined by SEQ ID NOs 1 to 500 and identified at nucleotide positions 61 to 62, and wherein the sensitivity is at least 51% and specificity is at least 87%;
[0410] 2. at least the CpGs defined by SEQ ID NOs 501 to 100 and identified at nucleotide positions 61 to 62, and wherein the sensitivity is at least 51% and specificity is at least 82%; or
[0411] 3. at least the CpGs defined by SEQ ID NOs 1001 to 1500 and identified at nucleotide positions 61 to 62, and wherein the sensitivity is at least 53% and specificity is at least 82%;
[0412] 4. at least the CpGs defined by SEQ ID NOs 1501 to 2000 and identified at nucleotide positions 61 to 62, and wherein the sensitivity is at least 51% and specificity is at least 81%;
[0413] 5. at least the CpGs defined by SEQ ID NOs 2001 to 2500 and identified at nucleotide positions 61 to 62, and wherein the sensitivity is at least 48% and specificity is at least 81%;
[0414] 6. at least the CpGs defined by SEQ ID NOs 2501 to 3000 and identified at nucleotide positions 61 to 62, and wherein the sensitivity is at least 53% and specificity is at least 84%;
[0415] 7. at least the CpGs defined by SEQ ID NOs 3001 to 3500 and identified at nucleotide positions 61 to 62, and wherein the sensitivity is at least 54% and specificity is at least 80%;
[0416] 8. at least the CpGs defined by SEQ ID NOs 3501 to 4000 and identified at nucleotide positions 61 to 62, and wherein the sensitivity is at least 53% and specificity is at least 82%;
[0417] 9. at least the CpGs defined by SEQ ID NOs 4001 to 4500 and identified at nucleotide positions 61 to 62, and wherein the sensitivity is at least 52% and specificity is at least 80%;
[0418] 10. at least the CpGs defined by SEQ ID NOs 4501 to 5000 and identified at nucleotide positions 61 to 62, and wherein the sensitivity is at least 47% and specificity is at least 82%;
[0419] 11. at least the CpGs defined by SEQ ID NOs 5001 to 5500 and identified at nucleotide positions 61 to 62, and wherein the sensitivity is at least 52% and specificity is at least 80%;
[0420] 12. at least the CpGs defined by SEQ ID NOs 5501 to 6000 and identified at nucleotide positions 61 to 62, and wherein the sensitivity is at least 48% and specificity is at least 78%;
[0421] 13. at least the CpGs defined by SEQ ID NOs 6001 to 6500 and identified at nucleotide positions 61 to 62, and wherein the sensitivity is at least 48% and specificity is at least 78%;
[0422] 14. at least the CpGs defined by SEQ ID NOs 6501 to 7000 and identified at nucleotide positions 61 to 62, and wherein the sensitivity is at least 49% and specificity is at least 77%;
[0423] 15. at least the CpGs defined by SEQ ID NOs 7001 to 7500 and identified at nucleotide positions 61 to 62, and wherein the sensitivity is at least 47% and specificity is at least 80%;
[0424] 16. at least the CpGs defined by SEQ ID NOs 7501 to 8000 and identified at nucleotide positions 61 to 62, and wherein the sensitivity is at least 51% and specificity is at least 77%;
[0425] 17. at least the CpGs defined by SEQ ID NOs 8001 to 8500 and identified at nucleotide positions 61 to 62, and wherein the sensitivity is at least 49% and specificity is at least 77%;
[0426] 18. at least the CpGs defined by SEQ ID NOs 8501 to 9000 and identified at nucleotide positions 61 to 62, and wherein the sensitivity is at least 47% and specificity is at least 78%;
[0427] 19. at least the CpGs defined by SEQ ID NOs 9001 to 9500 and identified at nucleotide positions 61 to 62, and wherein the sensitivity is at least 46% and specificity is at least 76%;
[0428] 20. at least the CpGs defined by SEQ ID NOs 9501 to 10000 and identified at nucleotide positions 61 to 62, and wherein the sensitivity is at least 46% and specificity is at least 78%;
[0429] 21. at least the CpGs defined by SEQ ID NOs 10001 to 10500 and identified at nucleotide positions 61 to 62, and wherein the sensitivity is at least 47% and specificity is at least 76%;
[0430] 22. at least the CpGs defined by SEQ ID NOs 10501 to 11000 and identified at nucleotide positions 61 to 62, and wherein the sensitivity is at least 49% and specificity is at least 79%;
[0431] 23. at least the CpGs defined by SEQ ID NOs 11001 to 11500 and identified at nucleotide positions 61 to 62, and wherein the sensitivity is at least 43% and specificity is at least 78%;
[0432] 24. at least the CpGs defined by SEQ ID NOs 11501 to 12000 and identified at nucleotide positions 61 to 62, and wherein the sensitivity is at least 47% and specificity is at least 79%;
[0433] 25. at least the CpGs defined by SEQ ID NOs 12001 to 12500 and identified at nucleotide positions 61 to 62, and wherein the sensitivity is at least 43% and specificity is at least 77%;
[0434] 26. at least the CpGs defined by SEQ ID NOs 12501 to 13000 and identified at nucleotide positions 61 to 62, and wherein the sensitivity is at least 45% and specificity is at least 78%;
[0435] 27. at least the CpGs defined by SEQ ID NOs 13001 to 13500 and identified at nucleotide positions 61 to 62, and wherein the sensitivity is at least 41% and specificity is at least 80%;
[0436] 28. at least the CpGs defined by SEQ ID NOs 13501 to 14000 and identified at nucleotide positions 61 to 62, and wherein the sensitivity is at least 43% and specificity is at least 80%;
[0437] 29. least the CpGs defined by SEQ ID NOs 1 to 100 and identified at nucleotide positions 61 to 62, and wherein the sensitivity is at least 41% and specificity is at least 84%;
[0438] 30. at least the CpGs defined by SEQ ID NOs 1 to 500 and identified at nucleotide positions 61 to 62, and wherein the sensitivity is at least 51% and specificity is at least 87%;
[0439] 31. at least the CpGs defined by SEQ ID NOs 1 to 1000 and identified at nucleotide positions 61 to 62, and wherein the sensitivity is at least 45% and specificity is at least 87%;
[0440] 32. at least the CpGs defined by SEQ ID NOs 1 to 2000 and identified at nucleotide positions 61 to 62, and wherein the sensitivity is at least 49% and specificity is at least 89%;
[0441] 33. at least the CpGs defined by SEQ ID NOs 1 to 3000 and identified at nucleotide positions 61 to 62, and wherein the sensitivity is at least 48% and specificity is at least 89%;
[0442] 34. at least the CpGs defined by SEQ ID NOs 1 to 4000 and identified at nucleotide positions 61 to 62, and wherein the sensitivity is at least 47% and specificity is at least 89%;
[0443] 35. at least the CpGs defined by SEQ ID NOs 1 to 5000 and identified at nucleotide positions 61 to 62, and wherein the sensitivity is at least 49% and specificity is at least 88%;
[0444] 36. at least the CpGs defined by SEQ ID NOs 1 to 6000 and identified at nucleotide positions 61 to 62, and wherein the sensitivity is at least 51% and specificity is at least 88%;
[0445] 37. at least the CpGs defined by SEQ ID NOs 1 to 7000 and identified at nucleotide positions 61 to 62, and wherein the sensitivity is at least 51% and specificity is at least 89%;
[0446] 38. at least the CpGs defined by SEQ ID NOs 1 to 8000 and identified at nucleotide positions 61 to 62, and wherein the sensitivity is at least 48% and specificity is at least 89%;
[0447] 39. at least the CpGs defined by SEQ ID NOs 1 to 9000 and identified at nucleotide positions 61 to 62, and wherein the sensitivity is at least 48% and specificity is at least 89%;
[0448] 40. at least the CpGs defined by SEQ ID NOs 1 to 10000 and identified at nucleotide positions 61 to 62, and wherein the sensitivity is at least 48% and specificity is at least 88%;
[0449] 41. at least the CpGs defined by SEQ ID NOs 1 to 11000 and identified at nucleotide positions 61 to 62, and wherein the sensitivity is at least 48% and specificity is at least 88%;
[0450] 42. at least the CpGs defined by SEQ ID NOs 1 to 12000 and identified at nucleotide positions 61 to 62, and wherein the sensitivity is at least 48% and specificity is at least 88%;
[0451] 43. at least the CpGs defined by SEQ ID NOs 1 to 13000 and identified at nucleotide positions 61 to 62, and wherein the sensitivity is at least 47% and specificity is at least 88%;
[0452] 44. at least the CpGs defined by SEQ ID NOs 1 to 14000 and identified at nucleotide positions 61 to 62, and wherein the sensitivity is at least 48% and specificity is at least 88%;
[0453] 45. at least the CpGs defined by SEQ ID NOs 13,001 to 14,000 and identified at nucleotide positions 61 to 62, and wherein the sensitivity is at least 45% and specificity is at least 80%;
[0454] 46. at least the CpGs defined by SEQ ID NOs 12,001 to 14,000 and identified at nucleotide positions 61 to 62, and wherein the sensitivity is at least 45% and specificity is at least 79%;
[0455] 47. at least the CpGs defined by SEQ ID NOs 11,001 to 14,000 and identified at nucleotide positions 61 to 62, and wherein the sensitivity is at least 40% and specificity is at least 78%;
[0456] 48. at least the CpGs defined by SEQ ID NOs 10,001 to 14,000 and identified at nucleotide positions 61 to 62, and wherein the sensitivity is at least 45% and specificity is at least 78%;
[0457] 49. at least the CpGs defined by SEQ ID NOs 9,001 to 14,000 and identified at nucleotide positions 61 to 62, and wherein the sensitivity is at least 45% and specificity is at least 78%;
[0458] 50. at least the CpGs defined by SEQ ID NOs 8,001 to 14,000 and identified at nucleotide positions 61 to 62, and wherein the sensitivity is at least 46% and specificity is at least 78%;
[0459] 51. at least the CpGs defined by SEQ ID NOs 7,001 to 14,000 and identified at nucleotide positions 61 to 62, and wherein the sensitivity is at least 46% and specificity is at least 78%;
[0460] 52. at least the CpGs defined by SEQ ID NOs 6,001 to 14,000 and identified at nucleotide positions 61 to 62, and wherein the sensitivity is at least 47% and specificity is at least 78%;
[0461] 53. at least the CpGs defined by SEQ ID NOs 5,001 to 14,000 and identified at nucleotide positions 61 to 62, and wherein the sensitivity is at least 49% and specificity is at least 77%;
[0462] 54. at least the CpGs defined by SEQ ID NOs 4,001 to 14,000 and identified at nucleotide positions 61 to 62, and wherein the sensitivity is at least 48% and specificity is at least 78%;
[0463] 55. at least the CpGs defined by SEQ ID NOs 3,001 to 14,000 and identified at nucleotide positions 61 to 62, and wherein the sensitivity is at least 47% and specificity is at least 80%;
[0464] 56. at least the CpGs defined by SEQ ID NOs 2,001 to 14,000 and identified at nucleotide positions 61 to 62, and wherein the sensitivity is at least 47% and specificity is at least 80%;
[0465] 57. at least the CpGs defined by SEQ ID NOs 1,001 to 14,000 and identified at nucleotide positions 61 to 62, and wherein the sensitivity is at least 51% and specificity is at least 84%;
[0466] 58. at least the CpGs defined by SEQ ID NOs 501 to 14,000 and identified at nucleotide positions 61 to 62, and wherein the sensitivity is at least 48% and specificity is at least 84%;
[0467] 59. at least the CpGs defined by SEQ ID NOs 101 to 14,000 and identified at nucleotide positions 61 to 62, and wherein the sensitivity is at least 48% and specificity is at least 86%; or
[0468] 60. at least the CpGs defined by SEQ ID NOs 1 to 14,000 and identified at nucleotide positions 61 to 62, and wherein the sensitivity is at least 48% and specificity is at least 88%;

[0469] In any of the described assays, the methylation status of the one or more CpGs in the panel is preferably determined by a p-value analysis, and the cancer is ovarian cancer or endometrial cancer. Preferably, the cancer is ovarian cancer.

[0470] In any of the assays described herein, wherein when the cancer index value for the individual is about 1.006 or more, the individual is assessed as having cancer or as having a high risk of cancer development, or wherein when the cancer index value for the individual is less than about 1.006, the individual is assessed as not having cancer or as having a low risk of cancer development, preferably wherein the assay comprises determining methylation β-values for each CpG in the panel of one or more CpGs, and more preferably wherein the assessing the presence, absence or development of cancer in an individual is based on the WID-OC-Index. The panel of one or more CpGs used to derive the cancer index value may particularly comprise:
[0471] a. at least 500 of the CpGs identified at nucleotide positions 61 to 62 in SEQ ID NOs 1 to 14,000, and wherein the sensitivity is at least 30% and the specificity is at least 87%;
[0472] b. at least the CpGs defined by SEQ ID NOs 1 to 500 and identified at nucleotide positions 61 to 62, and wherein the sensitivity is at least 24% and specificity is at least 95%;
[0473] c. at least the CpGs defined by SEQ ID NOs 1 to 1000 and identified at nucleotide positions 61 to 62, and wherein the sensitivity is at least 22% and specificity is at least 95%;
[0474] d. at least the CpGs defined by SEQ ID NOs 1 to 2000 and identified at nucleotide positions 61 to 62, and wherein the sensitivity is at least 25% and specificity is at least 96%.

[0475] In any of the assays described herein, wherein when the cancer index value for the individual is about 1.006 or more, the individual is assessed as having cancer or as having a high risk of cancer development, or wherein when the cancer index value for the individual is less than about 1.006, the individual is assessed as not having cancer or as having a low risk of cancer development, preferably wherein the assay comprises determining methylation β-values for each CpG in the panel of one or more CpGs, and more preferably wherein the assessing the presence, absence or development of cancer in an individual is based on the WID-OC-Index. The panel of one or more CpGs used to derive the cancer index value may particularly comprise:
[0476] 1. at least the CpGs defined by SEQ ID NOs 1 to 500 and identified at nucleotide positions 61 to 62, and wherein the sensitivity is at least 24% and specificity is at least 95%;
[0477] 2. at least the CpGs defined by SEQ ID NOs 501 to 100 and identified at nucleotide positions 61 to 62, and wherein the sensitivity is at least 29% and specificity is at least 94%; or
[0478] 3. at least the CpGs defined by SEQ ID NOs 1001 to 1500 and identified at nucleotide positions 61 to 62, and wherein the sensitivity is at least 30% and specificity is at least 93%;
[0479] 4. at least the CpGs defined by SEQ ID NOs 1501 to 2000 and identified at nucleotide positions 61 to 62, and wherein the sensitivity is at least 27% and specificity is at least 93%;
[0480] 5. at least the CpGs defined by SEQ ID NOs 2001 to 2500 and identified at nucleotide positions 61 to 62, and wherein the sensitivity is at least 29% and specificity is at least 93%;
[0481] 6. at least the CpGs defined by SEQ ID NOs 2501 to 3000 and identified at nucleotide positions 61 to 62, and wherein the sensitivity is at least 36% and specificity is at least 94%;
[0482] 7. at least the CpGs defined by SEQ ID NOs 3001 to 3500 and identified at nucleotide positions 61 to 62, and wherein the sensitivity is at least 33% and specificity is at least 93%;
[0483] 8. at least the CpGs defined by SEQ ID NOs 3501 to 4000 and identified at nucleotide positions 61 to 62, and wherein the sensitivity is at least 33% and specificity is at least 91%;
[0484] 9. at least the CpGs defined by SEQ ID NOs 4001 to 4500 and identified at nucleotide positions 61 to 62, and wherein the sensitivity is at least 31% and specificity is at least 92%;
[0485] 10. at least the CpGs defined by SEQ ID NOs 4501 to 5000 and identified at nucleotide positions 61 to 62, and wherein the sensitivity is at least 31% and specificity is at least 92%;
[0486] 11. at least the CpGs defined by SEQ ID NOs 5001 to 5500 and identified at nucleotide positions 61 to 62, and wherein the sensitivity is at least 35% and specificity is at least 92%;
[0487] 12. at least the CpGs defined by SEQ ID NOs 5501 to 6000 and identified at nucleotide positions 61 to 62, and wherein the sensitivity is at least 31% and specificity is at least 90%;
[0488] 13. at least the CpGs defined by SEQ ID NOs 6001 to 6500 and identified at nucleotide positions 61 to 62, and wherein the sensitivity is at least 31% and specificity is at least 89%;
[0489] 14. at least the CpGs defined by SEQ ID NOs 6501 to 7000 and identified at nucleotide positions 61 to 62, and wherein the sensitivity is at least 30% and specificity is at least 87%;
[0490] 15. at least the CpGs defined by SEQ ID NOs 7001 to 7500 and identified at nucleotide positions 61 to 62, and wherein the sensitivity is at least 36% and specificity is at least 92%;
[0491] 16. at least the CpGs defined by SEQ ID NOs 7501 to 8000 and identified at nucleotide positions 61 to 62, and wherein the sensitivity is at least 31% and specificity is at least 87%;
[0492] 17. at least the CpGs defined by SEQ ID NOs 8001 to 8500 and identified at nucleotide positions 61 to 62, and wherein the sensitivity is at least 34% and specificity is at least 86%;
[0493] 18. at least the CpGs defined by SEQ ID NOs 8501 to 9000 and identified at nucleotide positions 61 to 62, and wherein the sensitivity is at least 30% and specificity is at least 87%;
[0494] 19. at least the CpGs defined by SEQ ID NOs 9001 to 9500 and identified at nucleotide positions 61 to 62, and wherein the sensitivity is at least 34% and specificity is at least 86%;
[0495] 20. at least the CpGs defined by SEQ ID NOs 9501 to 10000 and identified at nucleotide positions 61 to 62, and wherein the sensitivity is at least 27% and specificity is at least 88%;
[0496] 21. at least the CpGs defined by SEQ ID NOs 10001 to 10500 and identified at nucleotide positions 61 to 62, and wherein the sensitivity is at least 31% and specificity is at least 87%;
[0497] 22. at least the CpGs defined by SEQ ID NOs 10501 to 11000 and identified at nucleotide positions 61 to 62, and wherein the sensitivity is at least 30% and specificity is at least 87%;
[0498] 23. at least the CpGs defined by SEQ ID NOs 11001 to 11500 and identified at nucleotide positions 61 to 62, and wherein the sensitivity is at least 31% and specificity is at least 86%;
[0499] 24. at least the CpGs defined by SEQ ID NOs 11501 to 12000 and identified at nucleotide positions 61 to 62, and wherein the sensitivity is at least 30% and specificity is at least 89%;
[0500] 25. at least the CpGs defined by SEQ ID NOs 12001 to 12500 and identified at nucleotide positions 61 to 62, and wherein the sensitivity is at least 33% and specificity is at least 86%;
[0501] 26. at least the CpGs defined by SEQ ID NOs 12501 to 13000 and identified at nucleotide positions 61 to 62, and wherein the sensitivity is at least 30% and specificity is at least 87%;
[0502] 27. at least the CpGs defined by SEQ ID NOs 13001 to 13500 and identified at nucleotide positions 61 to 62, and wherein the sensitivity is at least 30% and specificity is at least 87%;
[0503] 28. at least the CpGs defined by SEQ ID NOs 13501 to 14000 and identified at nucleotide positions 61 to 62, and wherein the sensitivity is at least 30% and specificity is at least 87%;
[0504] 29. at least the CpGs defined by SEQ ID NOs 1 to 100 and identified at nucleotide positions 61 to 62, and wherein the sensitivity is at least 22% and specificity is at least 95%;
[0505] 30. at least the CpGs defined by SEQ ID NOs 1 to 500 and identified at nucleotide positions 61 to 62, and wherein the sensitivity is at least 24% and specificity is at least 95%;
[0506] 31. at least the CpGs defined by SEQ ID NOs 1 to 1000 and identified at nucleotide positions 61 to 62, and wherein the sensitivity is at least 22% and specificity is at least 95%;
[0507] 32. at least the CpGs defined by SEQ ID NOs 1 to 2000 and identified at nucleotide positions 61 to 62, and wherein the sensitivity is at least 25% and specificity is at least 96%;
[0508] 33. at least the CpGs defined by SEQ ID NOs 1 to 3000 and identified at nucleotide positions 61 to 62, and wherein the sensitivity is at least 24% and specificity is at least 97%;
[0509] 34. at least the CpGs defined by SEQ ID NOs 1 to 4000 and identified at nucleotide positions 61 to 62, and wherein the sensitivity is at least 24% and specificity is at least 97%;
[0510] 35. at least the CpGs defined by SEQ ID NOs 1 to 5000 and identified at nucleotide positions 61 to 62, and wherein the sensitivity is at least 22% and specificity is at least 97%;
[0511] 36. at least the CpGs defined by SEQ ID NOs 1 to 6000 and identified at nucleotide positions 61 to 62, and wherein the sensitivity is at least 23% and specificity is at least 97%;
[0512] 37. at least the CpGs defined by SEQ ID NOs 1 to 7000 and identified at nucleotide positions 61 to 62, and wherein the sensitivity is at least 24% and specificity is at least 97%;
[0513] 38. at least the CpGs defined by SEQ ID NOs 1 to 8000 and identified at nucleotide positions 61 to 62, and wherein the sensitivity is at least 25% and specificity is at least 97%;
[0514] 39. at least the CpGs defined by SEQ ID NOs 1 to 9000 and identified at nucleotide positions 61 to 62, and wherein the sensitivity is at least 25% and specificity is at least 97%;
[0515] 40. at least the CpGs defined by SEQ ID NOs 1 to 10000 and identified at nucleotide positions 61 to 62, and wherein the sensitivity is at least 24% and specificity is at least 97%;
[0516] 41. at least the CpGs defined by SEQ ID NOs 1 to 11000 and identified at nucleotide positions 61 to 62, and wherein the sensitivity is at least 24% and specificity is at least 97%;
[0517] 42. at least the CpGs defined by SEQ ID NOs 1 to 12000 and identified at nucleotide positions 61 to 62, and wherein the sensitivity is at least 25% and specificity is at least 97%;
[0518] 43. at least the CpGs defined by SEQ ID NOs 1 to 13000 and identified at nucleotide positions 61 to 62, and wherein the sensitivity is at least 25% and specificity is at least 97%;
[0519] 44. at least the CpGs defined by SEQ ID NOs 1 to 14000 and identified at nucleotide positions 61 to 62, and wherein the sensitivity is at least 25% and specificity is at least 97%;
[0520] 45. at least the CpGs defined by SEQ ID NOs 13,001 to 14,000 and identified at nucleotide positions 61 to 62, and wherein the sensitivity is at least 30% and specificity is at least 88%;
[0521] 46. at least the CpGs defined by SEQ ID NOs 12,001 to 14,000 and identified at nucleotide positions 61 to 62, and wherein the sensitivity is at least 30% and specificity is at least 87%;
[0522] 47. at least the CpGs defined by SEQ ID NOs 11,001 to 14,000 and identified at nucleotide positions 61 to 62, and wherein the sensitivity is at least 31% and specificity is at least 87%;
[0523] 48. at least the CpGs defined by SEQ ID NOs 10,001 to 14,000 and identified at nucleotide positions 61 to 62, and wherein the sensitivity is at least 33% and specificity is at least 87%;
[0524] 49. at least the CpGs defined by SEQ ID NOs 9,001 to 14,000 and identified at nucleotide positions 61 to 62, and wherein the sensitivity is at least 33% and specificity is at least 87%;
[0525] 50. at least the CpGs defined by SEQ ID NOs 8,001 to 14,000 and identified at nucleotide positions 61 to 62, and wherein the sensitivity is at least 31% and specificity is at least 87%;
[0526] 51. at least the CpGs defined by SEQ ID NOs 7,001 to 14,000 and identified at nucleotide positions 61 to 62, and wherein the sensitivity is at least 31% and specificity is at least 86%;
[0527] 52. at least the CpGs defined by SEQ ID NOs 6,001 to 14,000 and identified at nucleotide positions 61 to 62, and wherein the sensitivity is at least 29% and specificity is at least 87%;
[0528] 53. at least the CpGs defined by SEQ ID NOs 5,001 to 14,000 and identified at nucleotide positions 61 to 62, and wherein the sensitivity is at least 30% and specificity is at least 87%;
[0529] 54. at least the CpGs defined by SEQ ID NOs 4,001 to 14,000 and identified at nucleotide positions 61 to 62, and wherein the sensitivity is at least 31% and specificity is at least 88%;
[0530] 55. at least the CpGs defined by SEQ ID NOs 3,001 to 14,000 and identified at nucleotide positions 61 to 62, and wherein the sensitivity is at least 34% and specificity is at least 90%;
[0531] 56. at least the CpGs defined by SEQ ID NOs 2,001 to 14,000 and identified at nucleotide positions 61 to 62, and wherein the sensitivity is at least 34% and specificity is at least 92%;
[0532] 57. at least the CpGs defined by SEQ ID NOs 1,001 to 14,000 and identified at nucleotide positions 61 to 62, and wherein the sensitivity is at least 30% and specificity is at least 93%;
[0533] 58. at least the CpGs defined by SEQ ID NOs 501 to 14,000 and identified at nucleotide positions 61 to 62, and wherein the sensitivity is at least 30% and specificity is at least 94%;
[0534] 59. at least the CpGs defined by SEQ ID NOs 101 to 14,000 and identified at nucleotide positions 61 to 62, and wherein the sensitivity is at least 29% and specificity is at least 96%; or
[0535] 60. at least the CpGs defined by SEQ ID NOs 1 to 14,000 and identified at nucleotide positions 61 to 62, and wherein the sensitivity is at least 25% and specificity is at least 97%.

[0536] In any of the described assays, the methylation status of the one or more CpGs in the panel is preferably determined by a p-value analysis, and the cancer is ovarian cancer or endometrial cancer. Preferably, the cancer is ovarian cancer.

[0537] In any of the assays described herein, the sensitivity and specificity of the cancer index threshold values vary depending on the number of CpGs comprised within the set, and specifically what CpGs are comprised within the set. Tables 2, 3 and 4 exemplify this assertion.

[0538] In any of the assays of the invention described herein, the individual may be stratified according to their cancer index value, and consequently be defined according to their cancer status and/or cancer risk. In any of the assays described herein, wherein when the cancer index value for the individual is:
[0539] a. less than about −0.570 the individual is assessed as not having cancer;
[0540] b. about −0.570 or more and less than about −0.210 the individual is assessed as having a low risk of cancer;
[0541] c. about −0.210 or more and less than about 0.170 the individual is assessed as having a moderate risk of cancer;
[0542] d. about 0.170 or more the individual is assessed as having a high risk of cancer;
[0543] preferably wherein the assay comprises determining methylation β-values for each CpG in the panel of one or more CpGs, more preferably wherein the cancer is ovarian cancer.

TABLE 2

| | | Sensitivity | Specificity | Sensitivity | Specificity | Sensitivity | Specificity |
|---|---|---|---|---|---|---|---|
| | | (cancer index | (cancer index | (cancer index | (cancer index | (cancer index | (cancer index |
| CpG subset | AUC (internal | cutpoint = | cutpoint = | cutpoint = | cutpoint = | cutpoint = | cutpoint = |
| (SEQ ID NOs) | validation) | 1.006) | 1.006) | 0.485) | 0.485) | −0.056) | −0.056) |
| 1-14000 | 0.78 | 0.25 | 0.97 | 0.48 | 0.88 | 0.78 | 0.6 |
| 101-14000 | 0.77 | 0.29 | 0.96 | 0.48 | 0.86 | 0.77 | 0.6 |
| 501-14000 | 0.75 | 0.3 | 0.94 | 0.48 | 0.84 | 0.76 | 0.6 |
| 1001-14000 | 0.75 | 0.3 | 0.93 | 0.51 | 0.84 | 0.76 | 0.62 |
| 2001-14000 | 0.73 | 0.34 | 0.92 | 0.47 | 0.8 | 0.76 | 0.61 |
| 3001-14000 | 0.72 | 0.34 | 0.9 | 0.47 | 0.8 | 0.72 | 0.6 |
| 4001-14000 | 0.7 | 0.31 | 0.88 | 0.48 | 0.78 | 0.69 | 0.59 |
| 5001-14000 | 0.69 | 0.3 | 0.87 | 0.49 | 0.77 | 0.67 | 0.6 |
| 6001-14000 | 0.68 | 0.29 | 0.87 | 0.47 | 0.78 | 0.65 | 0.6 |
| 7001-14000 | 0.67 | 0.31 | 0.86 | 0.46 | 0.78 | 0.64 | 0.62 |
| 8001-14000 | 0.67 | 0.31 | 0.87 | 0.46 | 0.78 | 0.61 | 0.62 |
| 9001-14000 | 0.67 | 0.33 | 0.87 | 0.45 | 0.78 | 0.6 | 0.62 |
| 10001-14000 | 0.67 | 0.33 | 0.87 | 0.45 | 0.78 | 0.6 | 0.62 |
| 11001-14000 | 0.66 | 0.31 | 0.87 | 0.4 | 0.78 | 0.6 | 0.64 |
| 12001-14000 | 0.68 | 0.3 | 0.87 | 0.45 | 0.79 | 0.64 | 0.64 |
| 13001-14000 | 0.68 | 0.3 | 0.88 | 0.45 | 0.8 | 0.61 | 0.64 |

TABLE 3

| | | Sensitivity | Specificity | Sensitivity | Specificity | Sensitivity | Specificity |
|---|---|---|---|---|---|---|---|
| | | (cancer index | (cancer index | (cancer index | (cancer index | (cancer index | (cancer index |
| CpG subset | AUC (internal | cutpoint = | cutpoint = | cutpoint = | cutpoint = | cutpoint = | cutpoint = |
| (SEQ ID NOs) | validation) | 1.006) | 1.006) | 0.485) | 0.485) | −0.056) | −0.056) |
| 1-500 | 0.74 | 0.24 | 0.95 | 0.51 | 0.87 | 0.72 | 0.62 |
| 501-1000 | 0.74 | 0.29 | 0.94 | 0.51 | 0.82 | 0.77 | 0.58 |
| 1001-1500 | 0.74 | 0.3 | 0.93 | 0.53 | 0.82 | 0.76 | 0.53 |
| 1501-2000 | 0.7 | 0.27 | 0.93 | 0.51 | 0.81 | 0.71 | 0.58 |
| 2001-2500 | 0.72 | 0.29 | 0.93 | 0.48 | 0.81 | 0.7 | 0.64 |
| 2501-3000 | 0.75 | 0.36 | 0.94 | 0.53 | 0.84 | 0.77 | 0.6 |
| 3001-3500 | 0.74 | 0.3 | 0.93 | 0.54 | 0.8 | 0.77 | 0.56 |
| 3501-4000 | 0.73 | 0.33 | 0.91 | 0.53 | 0.82 | 0.72 | 0.62 |
| 4001-4500 | 0.73 | 0.33 | 0.92 | 0.52 | 0.8 | 0.75 | 0.58 |
| 4501-5000 | 0.75 | 0.31 | 0.92 | 0.47 | 0.82 | 0.75 | 0.57 |
| 5001-5500 | 0.73 | 0.35 | 0.92 | 0.52 | 0.8 | 0.73 | 0.57 |
| 5501-6000 | 0.7 | 0.31 | 0.9 | 0.48 | 0.78 | 0.72 | 0.58 |
| 6001-6500 | 0.7 | 0.31 | 0.89 | 0.48 | 0.78 | 0.73 | 0.56 |
| 6501-7000 | 0.68 | 0.3 | 0.87 | 0.49 | 0.77 | 0.67 | 0.62 |
| 7001-7500 | 0.73 | 0.36 | 0.92 | 0.47 | 0.8 | 0.72 | 0.58 |
| 7501-8000 | 0.69 | 0.31 | 0.87 | 0.51 | 0.77 | 0.65 | 0.62 |
| 8001-8500 | 0.69 | 0.34 | 0.86 | 0.49 | 0.77 | 0.64 | 0.6 |
| 8501-9000 | 0.68 | 0.3 | 0.87 | 0.47 | 0.78 | 0.66 | 0.61 |
| 9001-9500 | 0.66 | 0.34 | 0.86 | 0.46 | 0.76 | 0.65 | 0.6 |
| 9501-10000 | 0.68 | 0.27 | 0.88 | 0.46 | 0.78 | 0.64 | 0.61 |
| 10001-10500 | 0.67 | 0.31 | 0.87 | 0.47 | 0.76 | 0.6 | 0.6 |
| 10501-11000 | 0.68 | 0.3 | 0.87 | 0.49 | 0.79 | 0.66 | 0.58 |
| 11001-11500 | 0.65 | 0.31 | 0.86 | 0.43 | 0.78 | 0.61 | 0.62 |
| 11501-12000 | 0.68 | 0.3 | 0.89 | 0.47 | 0.79 | 0.65 | 0.62 |
| 12001-12500 | 0.67 | 0.33 | 0.86 | 0.43 | 0.77 | 0.63 | 0.63 |
| 12501-13000 | 0.67 | 0.3 | 0.87 | 0.45 | 0.78 | 0.6 | 0.64 |
| 13001-13500 | 0.66 | 0.3 | 0.87 | 0.41 | 0.8 | 0.61 | 0.63 |
| 13501-14000 | 0.67 | 0.3 | 0.87 | 0.43 | 0.8 | 0.64 | 0.63 |

TABLE 4

| | | Sensitivity | Specificity | Sensitivity | Specificity | Sensitivity | Specificity |
|---|---|---|---|---|---|---|---|
| | | (cancer index | (cancer index | (cancer index | (cancer index | (cancer index | (cancer index |
| CpG subset | AUC (internal | cutpoint = | cutpoint = | cutpoint = | cutpoint = | cutpoint = | cutpoint = |
| (SEQ ID NOs) | validation) | 1.006) | 1.006) | 0.485) | 0.485) | −0.056) | −0.056) |
| 1-100 | 0.69 | 0.22 | 0.95 | 0.41 | 0.84 | 0.65 | 0.58 |
| 1-500 | 0.74 | 0.24 | 0.95 | 0.51 | 0.87 | 0.72 | 0.62 |
| 1-1000 | 0.75 | 0.22 | 0.95 | 0.45 | 0.87 | 0.8 | 0.61 |
| 1-2000 | 0.75 | 0.25 | 0.96 | 0.49 | 0.89 | 0.76 | 0.61 |
| 1-3000 | 0.76 | 0.24 | 0.97 | 0.48 | 0.89 | 0.73 | 0.63 |
| 1-4000 | 0.77 | 0.24 | 0.97 | 0.47 | 0.89 | 0.76 | 0.63 |
| 1-5000 | 0.78 | 0.22 | 0.97 | 0.49 | 0.88 | 0.77 | 0.61 |
| 1-6000 | 0.78 | 0.23 | 0.97 | 0.51 | 0.88 | 0.78 | 0.62 |
| 1-7000 | 0.78 | 0.24 | 0.97 | 0.51 | 0.89 | 0.78 | 0.61 |
| 1-8000 | 0.78 | 0.25 | 0.97 | 0.48 | 0.89 | 0.78 | 0.61 |
| 1-9000 | 0.78 | 0.25 | 0.97 | 0.48 | 0.89 | 0.78 | 0.6 |
| 1-10000 | 0.78 | 0.24 | 0.97 | 0.48 | 0.88 | 0.78 | 0.6 |
| 1-11000 | 0.78 | 0.24 | 0.97 | 0.48 | 0.88 | 0.78 | 0.6 |
| 1-12000 | 0.78 | 0.25 | 0.97 | 0.48 | 0.88 | 0.78 | 0.6 |
| 1-13000 | 0.78 | 0.25 | 0.97 | 0.47 | 0.88 | 0.78 | 0.6 |
| 1-14000 | 0.78 | 0.25 | 0.97 | 0.48 | 0.88 | 0.78 | 0.6 |

### Relationship Between Cancer Index Value and Determining Methylation Status of CpGs

[0544] In view of the observations described herein (see Examples), the inventors derived a cancer index based on an analysis of methylation status (DNAme; as described above) for use in assays for assessing the presence or development of cancer in an individual.

[0545] As explained herein, the described assays particularly relate to the assessment of assessing the presence, absence or development of ovarian cancer and/or endometrial cancer, particularly ovarian cancer.

[0546] Any of the assays described herein involve deriving a cancer index value based on the methylation of status of a panel of one or more CpGs assayed in a sample provided from an individual, as described and defined herein.

[0547] The cancer index value may be derived by any suitable means.

[0548] The inventors have identified specific CpGs, as described and defined herein, which may be used to form a panel of CpGs whose methylation status is determined in order to establish cancer index values in accordance with the assays described and defined herein. Using these panels the inventors have demonstrated that it is possible to derive a cancer index value which correlates with and is indicative of normal tissue, i.e. tissue which is cancer negative, in particular ovarian and/or endometrial tissue which is cancer negative. Accordingly, cancer can be assessed to be absent in the individual. Using these panels the inventors have demonstrated that it is possible to derive a cancer index value which correlates with and is indicative of cancer tissue, i.e. tissue which is cancer positive, in particular ovarian and/or endometrial tissue which is cancer negative. Accordingly, cancer can be assessed to be present in the individual. As explained herein, the inventors have shown that using panels of the CpGs that have been identified it can be shown that the DNA methylation profile of epithelial cells from normal tissue such as from the cervix, vagina, buccal area, or from blood and/or urine, particularly from a liquid-based cytology sample, and more preferably a cervical smear sample, as indicated by the cancer index value, is dynamic and subject to change on a continuum from indicating cancer negative to cancer positive tissue. In particular, the cancer index value described herein acts as a surrogate for indicating whether the ovarian and/or endometrial tissue of an individual is cancer negative or cancer positive to a high degree of statistical accuracy. As such, using panels of the CpGs that have been identified it is possible to establish a cancer index value scale that can be used to assess the presence, absence or development of cancer in an individual.

[0549] As described herein, the inventors have used certain methods for determining the methylation status of specific CpGs in the population of DNA molecules in the sample. For example, in one method a percent methylated reference (PMR) value of a CpG may be determined. In another method the methylation β-values of a CpG may be determined. Different mechanisms may be employed to determine specific values depending on the circumstances, such as PCR-based mechanisms or array-based mechanisms.

[0550] As will be apparent to a skilled person, in the assays of the invention the steps of determining the methylation status of specific CpGs in the population of DNA molecules in the sample are not limited to any one specific methodology. As the skilled person will appreciate, because the cancer index value is based on the methylation status of CpGs, and since the methylation status of CpGs can be represented by values which may be specific to a specific methodology, e.g. percent methylated reference (PMR) value or methylation β-value, then the range of cancer index values which define cancer negative and cancer positive samples may be dependent upon the methodology used to determine the methylation status of CpGs. Nevertheless, a user may readily reproduce and implement the assays of the invention using any suitable methodology for determining the methylation status of CpGs, provided that the same methodology is used consistently. Moreover, the user can readily establish, de novo, cancer index values which define cancer negative and cancer positive samples by determining the methylation status of CpGs in panels constituting the specific CpGs disclosed herein from known cancer negative and cancer positive patient samples. Once such cancer index values are established using the CpGs identified herein, a user may use these values as a basis for assessing the presence, absence or development of cancer in any test individual whose cancer status is to be determined. Accordingly, cancer index values according to the present invention are not limited to specific methods of determination of methylation status of CpGs. On the contrary, the skilled person will appreciate that cancer index values can be established which reflect the intrinsic capabilities of the CpGs identified herein to correlate methylation status with cancer disease status.

[0551] Accordingly, the cancer index value may be derived by assessing the methylation status of the one or more CpGs in the panel in a sample provided from an individual by any suitable means.

[0552] The step of determining the methylation status of each CpG in the panel of one or more CpGs may be achieved by determining a percent methylated reference (PMR) value of each one of the one or more CpGs. The step of determining the methylation status of each CpG in the panel of one or more CpGs may be achieved by determining the methylation β-value of each one of the one or more CpGs.

[0553] In any of the assays described herein, the methylation status of the CpGs may be determined by any suitable means. For example, in any of the assays described herein the step of determining the methylation status of each CpG in the panel of one or more CpGs may comprise:
[0554] a. performing a sequencing step to determine the sequence of each CpG;
[0555] b. hybridising DNA to an array comprising probes capable of discriminating between methylated and non-methylated forms of the CpGs and applying a detection system to the array so as to determine the methylation status of each CpG; and/or
[0556] c. performing a PCR step using methylation-specific primers, wherein the methylation status of the CpG is determined by the presence or absence of a PCR product.

[0557] The step of determining the methylation status of each CpG in the panel of one or more CpGs may comprise a conversion step in order to distinguish methylated CpG dinucleotides relative to non-methylated CpG dinucleotides. The conversion step may comprise e.g. bisulfite conversion or TAPS (TET-assisted pyridine borane sequencing) conversion of the DNA in a sample that is to be applied to any one or more of a. to c. above. TAPS may particularly involve the steps of oxidising 5-methylcytosine bases (5mC) to 5-carboxylcytosine bases (5caC), preferably by ten-eleven translocation (TET), and/or oxidising 5-hydroxymethylcytosine bases (5hmC) to 5-carboxylcytosine bases (5caC), preferably by ten-eleven translocation (TET); followed by reducing 5-carboxylcytosine bases (5caC) to dihydrouracil bases (DHU), optionally with pyridine borane.

[0558] The step of determining the methylation status of each CpG in the panel of one or more CpGs may additionally, or alternatively, comprise the use of TempO-seq (templated Olig-sequencing). The oligonucleotides in the context of TempO-seq may or may not be designed such that they hybridise with methylated CpG dinucleotides following a prior conversion as described herein.

[0559] The step of determining the methylation status of each CpG in the panel of one or more CpGs may comprise the contacting the DNA in the sample with one or more methylation sensitive restriction endonucleases that cleave methylated and/or unmethylated forms of their restriction sites, and preferably the contacting of the DNA is prior to performing any one of a. to c. above. In assays of the invention wherein methylation sensitive restriction enzymes are used, one or more control reactions are performed. Preferably, the one or more control reactions involve interrogation of known loci that contain (i) no restriction endonuclease sites; (ii) a restriction site that is methylated; (iii) a restriction site that is unmethylated.

[0560] Using any of the methods for determining the methylation status of each CpG in the panel of one or more CpGs, the proportion of methylated and unmethylated CpGs at any given locus may be determined, thereby enabling generation of a cancer index value.

[0561] Preferably, the the step of determining in the population of DNA molecules in the sample the methylation status of a panel of one or more CpGs further comprises determining a β value of each CpG. Deriving the cancer index value may involve providing a methylation j-value data set comprising the methylation β-values for each CpG in the panel of one or more CpGs.

### Assessment of Methylation Status of CpGs

[0562] Methylation of DNA is a recognised form of epigenetic modification which has the capability of altering the expression of genes and other elements such as microRNAs. In cancer development and progression, methylation may have the effect of e.g. silencing tumor suppressor genes and/or increasing the expression of oncogenes. Other forms of dysregulation may occur as a result of methylation. Methylation of DNA occurs at discrete loci which are predominately dinucleotides consisting of a CpG motif, but may also occur at CHH motifs (where H is A, C, or T). During methylation, a methyl group is added to the fifth carbon of cytosine bases to create methylcytosine.

[0563] Methylation can occur throughout the genome and is not limited to regions with respect to an expressed sequence such as a gene. Methylation typically, but not always, occurs in a promoter or other regulatory region of an expressed sequence such as enhancer elements. Most typically, the methylation status of CpGs is clustered in CpG islands, for example CpG islands present in the regulatory regions of genes, especially in their promoter regions.

[0564] Typically, an assessment of DNA methylation status involves analysing the presence or absence of methyl groups in DNA, for example methyl groups on the 5 position of one or more cytosine nucleotides. Preferably, the methylation status of one or more cytosine nucleotides present as a CpG dinucleotide (where C stands for Cytosine, G for Guanine and p for the phosphate group linking the two) is assessed.

[0565] A variety of techniques are available for the identification and assessment of CpG methylation status, as will be outlined briefly below. The assays described herein encompass any suitable technique for the determination of CpG methylation status.

[0566] Methyl groups are lost from a starting DNA molecule during conventional in vitro handling steps such as PCR. To avoid this, techniques for the detection of methyl groups commonly involve the preliminary treatment of DNA prior to subsequent processing, in a way that preserves the methylation status information of the original DNA molecule. Such preliminary techniques involve three main categories of processing, i.e. bisulphite modification, restriction enzyme digestion and affinity-based analysis. Products of these techniques can then be coupled with sequencing or array-based platforms for subsequent identification or qualitative assessment of CpG methylation status.

[0567] Techniques involving bisulphite modification of DNA have become the most common assays for detection and assessment of methylation status of CpG dinucleotides. Treatment of DNA with bisulphite, e.g. sodium bisulphite, converts cytosine bases to uracil bases, but has no effect on 5-methylcytosines. Thus, the presence of a cytosine in bisulphite-treated DNA is indicative of the presence of a cytosine base which was previously methylated in the starting DNA molecule. Such cytosine bases can be detected by a variety of techniques. For example, primers specific for unmethylated versus methylated DNA can be generated and used for PCR-based identification of methylated CpG dinucleotides. DNA may be amplified, either before or after bisulphite conversion. A separation/capture step may be performed, e.g. using binding molecules such as complementary oligonucleotide sequences. Standard and next-generation DNA sequencing protocols can also be used.

[0568] In other approaches, methylation-sensitive enzymes can be employed which digest or cut only in the presence of methylated DNA. Analysis of resulting fragments is commonly carried out using mircroarrays.

[0569] Affinity-based techniques exploit binding interactions to capture fragments of methylated DNA for the purposes of enrichment. Binding molecules such as anti-5-methylcytosine antibodies are commonly employed prior to subsequent processing steps such as PCR and sequencing.

[0570] Olkhov-Mitsel and Bapat (2012) provide a comprehensive review of techniques available for the identification and assessment of biomarkers involving methylcytosine.

[0571] For the purposes of assessing the methylation status of the CpG-based biomarkers characterised and described herein, any suitable assay can be employed.

[0572] Assays described herein may comprise determining methylation status of CpGs by bisulphite converting the DNA. Preferred assays involve bisulphite treatment of DNA, including amplification of the identified CpG loci for methylation specific PCR and/or sequencing and/or assessment of the methylation status of target loci using methylation-discriminatory microarrays.

[0573] Amplification of CpG loci can be achieved by a variety of approaches. Preferably, CpG loci are amplified using PCR. A variety of PCR-based approaches may be used. For example, methylation-specific primers may be hybridized to DNA containing the CpG sequence of interest. Such primers may be designed to anneal to a sequence derived from either a methylated or non-methylated CpG locus. Following annealing, a PCR reaction is performed and the presence of a subsequent PCR product indicates the presence of an annealed CpG of identifiable sequence. In such assays, DNA is bisulphite converted prior to amplification. Such techniques are commonly referred to as methylation specific PCR (MSP).

[0574] In other techniques, PCR primers may anneal to the CpG sequence of interest independently of the methylation status, and further processing steps may be used to determine the status of the CpG. Assays are designed so that the CpG site(s) are located between primer annealing sites. This assay scheme is used in techniques such as bisulphite genomic sequencing, COBRA, Ms-SNuPE. In such assay, DNA can be bisulphite converted before or after amplification.

[0575] Small-scale PCR approaches may be used. Such approaches commonly involve mass partitioning of samples (e.g. digital PCR). These techniques offer robust accuracy and sensitivity in the context of a highly miniaturised system (pico-liter sized droplets), ideal for the subsequent handling of small quantities of DNA obtainable from the potentially small volume of cellular material present in biological samples, particularly urine samples. A variety of such small-scale PCR techniques are widely available. For example, microdroplet-based PCR instruments are available from a variety of suppliers, including RainDance Technologies, Inc. (Billerica, MA; http://raindancetech.com/) and Bio-Rad, Inc. (http://www.bio-rad.com/). Microarray platforms may also be used to carry out small-scale PCR. Such platforms may include microfluidic network-based arrays e.g. available from Fluidigm Corp. (www.fluidigm.com).

[0576] Following amplification of CpG loci, amplified PCR products may be coupled to subsequent analytical platforms in order to determine the methylation status of the CpGs of interest. For example, the PCR products may be directly sequenced to determine the presence or absence of a methylcytosine at the target CpG or analysed by array-based techniques.

[0577] Any suitable sequencing techniques may be employed to determine the sequence of target DNA. In the assays of the present invention the use of high-throughput, so-called “second generation”, “third generation” and “next generation” techniques to sequence bisulphite-treated DNA can be used.

[0578] In second generation techniques, large numbers of DNA molecules are sequenced in parallel. Typically, tens of thousands of molecules are anchored to a given location at high density and sequences are determined in a process dependent upon DNA synthesis. Reactions generally consist of successive reagent delivery and washing steps, e.g. to allow the incorporation of reversible labelled terminator bases, and scanning steps to determine the order of base incorporation. Array-based systems of this type are available commercially e.g. from Illumina, Inc. (San Diego, CA; http://www.illumina.com/).

[0579] Third generation techniques are typically defined by the absence of a requirement to halt the sequencing process between detection steps and can therefore be viewed as real-time systems. For example, the base-specific release of hydrogen ions, which occurs during the incorporation process, can be detected in the context of microwell systems (e.g. see the Ion Torrent system available from Life Technologies; http://www.lifetechnologies.com/). Similarly, in pyrosequencing the base-specific release of pyrophosphate (PPi) is detected and analysed. In nanopore technologies, DNA molecules are passed through or positioned next to nanopores, and the identities of individual bases are determined following movement of the DNA molecule relative to the nanopore. Systems of this type are available commercially e.g. from Oxford Nanopore (https://www.nanoporetech.com/). In an alternative assay, a DNA polymerase enzyme is confined in a “zero-mode waveguide” and the identity of incorporated bases are determined with florescence detection of gamma-labeled phosphonucleotides (see e.g. Pacific Biosciences; http://www.pacificbiosciences.com/).

[0580] In other assays sequencing steps may be omitted. For example, amplified PCR products may be applied directly to hybridization arrays based on the principle of the annealing of two complementary nucleic acid strands to form a double-stranded molecule. Hybridization arrays may be designed to include probes which are able to hybridize to amplification products of a CpG and allow discrimination between methylated and non-methylated loci. For example, probes may be designed which are able to selectively hybridize to an CpG locus containing thymine, indicating the generation of uracil following bisulphite conversion of an unmethylated cytosine in the starting template DNA. Conversely, probes may be designed which are able to selectively hybridize to a CpG locus containing cytosine, indicating the absence of uracil conversion following bisulphite treatment. This corresponds with a methylated CpG locus in the starting template DNA.

[0581] Following the application of a suitable detection system to the array, computer-based analytical techniques can be used to determine the methylation status of a CpG. Detection systems may include, e.g. the addition of fluorescent molecules following a methylation status-specific probe extension reaction. Such techniques allow CpG status determination without the specific need for the sequencing of CpG amplification products. Such array-based discriminatory probes may be termed methylation-specific probes.

[0582] Any suitable methylation-discriminatory microarrays may be employed to assess the methylation status of the CpGs described herein. One particular methylation-discriminatory microarray system is provided by Illumina, Inc. (San Diego, CA; http://www.illumina.com/). In particular, the Infinium MethylationEPIC BeadChip array and the Infinium HumanMethylation450 BeadChip array systems may be used to assess the methylation status of CpGs for predicting cancer development as described herein. Such a system exploits the chemical modifications made to DNA following bisulphite treatment of the starting DNA molecule. Briefly, the array comprises beads to which are coupled oligonucleotide probes specific for DNA sequences corresponding to the unmethylated form of a CpG, as well as separate beads to which are coupled oligonucleotide probes specific for DNA sequences corresponding to the methylated form of an CpG. Candidate DNA molecules are applied to the array and selectively hybridize, under appropriate conditions, to the oligonucleotide probe corresponding to the relevant epigenetic form. Thus, a DNA molecule derived from a CpG which was methylated in the corresponding genomic DNA will selectively attach to the bead comprising the methylation-specific oligonucleotide probe, but will fail to attach to the bead comprising the non-methylation-specific oligonucleotide probe. Single-base extension of only the hybridized probes incorporates a labeled ddNTP, which is subsequently stained with a fluorescence reagent and imaged. The methylation status of the CpG is determined by calculating the ratio of the fluorescent signal derived from the methylated and unmethylated sites.

[0583] Infinium HumanMethylation450 BeadChip array systems can be used to interrogate CpGs in the assays described herein. Alternative or customised arrays could, however, be employed to interrogate the cancer-specific CpG biomarkers defined herein, provided that they comprise means for interrogating all CpG for a given assay, as defined herein.

[0584] Techniques involving combinations of the above-described assays may also be used. For example, DNA containing CpG sequences of interest may be hybridized to microarrays and then subjected to DNA sequencing to determine the status of the CpG as described above.

[0585] In the assays described above, sequences corresponding to CpG loci may also be subjected to an enrichment process if desired. DNA containing CpG sequences of interest may be captured by binding molecules such as oligonucleotide probes complementary to the CpG target sequence of interest. Sequences corresponding to CpG loci may be captured before or after bisulphite conversion or before or after amplification. Probes may be designed to be complementary to bisulphite converted DNA. Captured DNA may then be subjected to further processing steps to determine the status of the CpG, such as DNA sequencing steps.

[0586] Capture/separation steps may be custom designed. Alternatively a variety of such techniques are available commercially, e.g. the SureSelect target enrichment system available from Agilent Technologies (http://www.agilent.com/home). In this system biotinylated “bait” or “probe” sequences (e.g. RNA) complementary to the DNA containing CpG sequences of interest are hybridized to sample nucleic acids. Streptavidin-coated magnetic beads are then used to capture sequences of interest hybridized to bait sequences. Unbound fractions are discarded. Bait sequences are then removed (e.g. by digestion of RNA) thus providing an enriched pool of CpG target sequences separated from non-CpG sequences. Template DNA may be subjected to bisulphite conversion and target loci amplified by small-scale PCR such as microdroplet PCR using primers which are independent of the methylation status of the CpG. Following amplification, samples may be subjected to a capture step to enrich for PCR products containing the target CpG, e.g. captured and purified using magnetic beads, as described above. Following capture, a standard PCR reaction is carried out to incorporate DNA sequencing barcodes into CpG-containing amplicons. PCR products are again purified and then subjected to DNA sequencing and analysis to determine the presence or absence of a methylcytosine at the target genomic CpG.

[0587] CpG biomarker loci defined herein by SEQ ID NOs 1 to 14,000 correspond to Illumina□ identifiers (IlmnID) known in the art. These CpG loci identifiers refer to individual CpG sites used in the commercially available Illumina® Infinium Methylation EPIC BeadChip kit and Illumina® Infinium Human Methylation450 BeadChip kit. The identity of each CpG site represented by each CpG loci identifier is publicly available from the Illumina, Inc. website under reference to the CpG sites used in the Infinium Methylation EPIC BeadChip kit and the Infinium Human Methylation450 BeadChip kit.

[0588] To complement evolving public databases to provide accurate CpG loci identifiers and strand orientation, Illumina® has developed a method to consistently designate CpG loci based on the actual or contextual sequence of each individual CpG locus. To unambiguously refer to CpG loci in any species, Illumina® has developed a consistent and deterministic CpG loci database to ensure uniformity in the reporting of methylation data. The Illumina® method takes advantage of sequences flanking a CpG locus to generate a unique CpG locus cluster ID. This number is based on sequence information only and is unaffected by genome version. Illumina's standardized nomenclature also parallels the TOP/BOT strand nomenclature (which indicates the strand orientation) commonly used for single nucleotide polymorphism (SNP) designation.

[0589] Illumina® Identifiers for the Infinium MethylationEPIC BeadChip and Infinium Human Methylation450 BeadChip system are also available from public repositories such as Gene Expression Omnibus (GEO) (http://www.ncbi.nlm.nih.gov/geo/).

[0590] By assessing the methylation status of a CpG it is meant that a determination is made as to whether a given CpG is methylated or unmethylated. In addition, it is meant that a determination is made as to the degree to which a given CpG site is methylated across a population of CpG loci in a sample.

[0591] CpG methylation status may be measured indirectly using a detection system such as fluorescence. A methylation-discriminatory microarray may be used. When calculating the degree of methylation of a given CpG, the Illumina® definition of beta-values may be used. The Illumina® methylation beta-value of a specific CpG site is calculated from the intensity of the methylated (M) and unmethylated (U) alleles, as the ratio of fluorescent signals β=Max(M,0)/[Max(M,0)+Max(U,0)+100]. On this scale, 0<β<1, β values of 1 or close to 1 indicate 100% methylation whereas values of 0 or close to 0 indicate 0% methylation.

[0592] The methylation status of any one or more CpGs of the 14,000 CpGs defined according to SEQ ID NOS: 1 to 14,000 may be assessed by any suitable technique. As explained in more detail in the Examples below, one particular exemplary technique which the inventors have used is a methylation discriminatory array, such as an Illumina InfiniumMethylation EPIC BeadChip. These assays utilise probes directed to methylated and unmethylated CpGs at a given locus.

[0593] Another exemplary technique which the inventors have used to determine the methylation status of any one or more CpGs is a fluorescence-based PCR technique referred to as MethyLight. These assays utilise forward and reverse PCR primers specific for sequences encompassing any one or more of the 14,000 CpGs defined according to SEQ ID NOS: 1 to 14,000. The methylation status of one or more of the 14,000 CpGs defined according to SEQ ID NOS: 1 to 14,000 may therefore be determined by MethyLight analysis. The detectable probes are typically designed such that they hybridise only to methylated forms of the one or more CpGs to be assayed.

### Bioinformatic Tools and Statistical Metrics for CpG-Based Assays

[0594] Software programs which aid in the in silico analysis of bisulphite converted DNA sequences and in primer design for the purposes of methylation-specific analyses are generally available and have been described previously.

[0595] In risk models for predicting cancer, a receiver-operating-characteristic (ROC) curve analysis is often used, in which the area under the curve (AUC) is assessed. Each point on the ROC curve shows the effect of a rule for turning a risk/likelihood estimate into a prediction of the presence, absence or development of cancer in an individual. The AUC measures how well the model discriminates between case subjects and control subjects. An ROC curve that corresponds to a random classification of case subjects and control subjects is a straight line with an AUC of 50%. An ROC curve that corresponds to perfect classification has an AUC of 100%.

[0596] In any of the methods described herein, the 95% confidence interval for the ROC AUC may be between 0.60 and 1.

[0597] In any of the methods described herein, the interval may be defined as a range having as an upper limit any number between 0.60 and 1. The upper limit number may be 0.60, 0.61, 0.62, 0.63, 0.64, 0.65, 0.66, 0.67, 0.68, 0.69, 0.70, 0.71, 0.72, 0.73, 0.74, 0.75, 0.76, 0.77, 0.78, 0.79, 0.80, 0.81, 0.82, 0.83, 0.84, 0.85, 0.86, 0.87, 0.88, 0.89, 0.90, 0.91, 0.92, 0.93, 0.94, 0.95, 0.96, 0.97, 0.98, 0.99 or 1.00.

[0598] In any of the methods described herein, the interval may be defined as a range having as a lower limit any number between 0.60 and 1. The lower limit number may be 0.60, 0.61, 0.62, 0.63, 0.64, 0.65, 0.66, 0.67, 0.68, 0.69, 0.70, 0.71, 0.72, 0.73, 0.74, 0.75, 0.76, 0.77, 0.78, 0.79, 0.80, 0.81, 0.82, 0.83, 0.84, 0.85, 0.86, 0.87, 0.88, 0.89, 0.90, 0.91, 0.92, 0.93, 0.94, 0.95, 0.96, 0.97, 0.98, 0.99 or 1.00.

[0599] In any of the methods described herein, the interval range may comprise any of the above lower limit numbers combined with any of the above upper limit numbers as appropriate.

[0600] Preferably, the upper limit number is 1. Thus, the 95% confidence ROC AUC interval may be defined as a range having an upper limit of 1 and as a lower limit any number between 0.60 and 1. The lower limit number may be 0.60, 0.61, 0.62, 0.63, 0.64, 0.65, 0.66, 0.67, 0.68, 0.69, 0.70, 0.71, 0.72, 0.73, 0.74, 0.75, 0.76, 0.77, 0.78, 0.79, 0.80, 0.81, 0.82, 0.83, 0.84, 0.85, 0.86, 0.87, 0.88, 0.89, 0.90, 0.91, 0.92, 0.93, 0.94, 0.95, 0.96, 0.97, 0.98, 0.99 or 1.00.

[0601] The upper limit number may be 0.99. Thus, the 95% confidence ROC AUC interval may be defined as a range having an upper limit of 0.99 and as a lower limit any number between 0.60 and 0.99. The lower limit number may be 0.60, 0.61, 0.62, 0.63, 0.64, 0.65, 0.66, 0.67, 0.68, 0.69, 0.70, 0.71, 0.72, 0.73, 0.74, 0.75, 0.76, 0.77, 0.78, 0.79, 0.80, 0.81, 0.82, 0.83, 0.84, 0.85, 0.86, 0.87, 0.88, 0.89, 0.90, 0.91, 0.92, 0.93, 0.94, 0.95, 0.96, 0.97, 0.98 or 0.99.

[0602] The upper limit number may be 0.98. Thus, the 95% confidence ROC AUC interval may be defined as a range having an upper limit of 0.98 and as a lower limit any number between 0.60 and 0.98. The lower limit number may be 0.60, 0.61, 0.62, 0.63, 0.64, 0.65, 0.66, 0.67, 0.68, 0.69, 0.70, 0.71, 0.72, 0.73, 0.74, 0.75, 0.76, 0.77, 0.78, 0.79, 0.80, 0.81, 0.82, 0.83, 0.84, 0.85, 0.86, 0.87, 0.88, 0.89, 0.90, 0.91, 0.92, 0.93, 0.94, 0.95, 0.96, 0.97 or 0.98.

[0603] The upper limit number may be 0.97. Thus, the 95% confidence ROC AUC interval may be defined as a range having an upper limit of 0.97 and as a lower limit any number between 0.60 and 0.97. The lower limit number may be 0.60, 0.61, 0.62, 0.63, 0.64, 0.65, 0.66, 0.67, 0.68, 0.69, 0.70, 0.71, 0.72, 0.73, 0.74, 0.75, 0.76, 0.77, 0.78, 0.79, 0.80, 0.81, 0.82, 0.83, 0.84, 0.85, 0.86, 0.87, 0.88, 0.89, 0.90, 0.91, 0.92, 0.93, 0.94, 0.95, 0.96 or 0.97.

[0604] The upper limit number may be 0.96. Thus, the 95% confidence ROC AUC interval may be defined as a range having an upper limit of 0.96 and as a lower limit any number between 0.60 and 0.96. The lower limit number may be 0.60, 0.61, 0.62, 0.63, 0.64, 0.65, 0.66, 0.67, 0.68, 0.69, 0.70, 0.71, 0.72, 0.73, 0.74, 0.75, 0.76, 0.77, 0.78, 0.79, 0.80, 0.81, 0.82, 0.83, 0.84, 0.85, 0.86, 0.87, 0.88, 0.89, 0.90, 0.91, 0.92, 0.93, 0.94, 0.95 or 0.96.

[0605] The upper limit number may be 0.95. Thus, the 95% confidence ROC AUC interval may be defined as a range having an upper limit of 0.95 and as a lower limit any number between 0.60 and 0.95. The lower limit number may be 0.60, 0.61, 0.62, 0.63, 0.64, 0.65, 0.66, 0.67, 0.68, 0.69, 0.70, 0.71, 0.72, 0.73, 0.74, 0.75, 0.76, 0.77, 0.78, 0.79, 0.80, 0.81, 0.82, 0.83, 0.84, 0.85, 0.86, 0.87, 0.88, 0.89, 0.90, 0.91, 0.92, 0.93, 0.94 or 0.95.

[0606] The upper limit number may be 0.94. Thus, the 95% confidence ROC AUC interval may be defined as a range having an upper limit of 0.94 and as a lower limit any number between 0.60 and 0.94. The lower limit number may be 0.60, 0.61, 0.62, 0.63, 0.64, 0.65, 0.66, 0.67, 0.68, 0.69, 0.70, 0.71, 0.72, 0.73, 0.74, 0.75, 0.76, 0.77, 0.78, 0.79, 0.80, 0.81, 0.82, 0.83, 0.84, 0.85, 0.86, 0.87, 0.88, 0.89, 0.90, 0.91, 0.92, 0.93 or 0.94.

[0607] The upper limit number may be 0.93. Thus, the 95% confidence ROC AUC interval may be defined as a range having an upper limit of 0.93 and as a lower limit any number between 0.60 and 0.93. The lower limit number may be 0.60, 0.61, 0.62, 0.63, 0.64, 0.65, 0.66, 0.67, 0.68, 0.69, 0.70, 0.71, 0.72, 0.73, 0.74, 0.75, 0.76, 0.77, 0.78, 0.79, 0.80, 0.81, 0.82, 0.83, 0.84, 0.85, 0.86, 0.87, 0.88, 0.89, 0.90, 0.91, 0.92 or 0.93.

[0608] The upper limit number may be 0.92. Thus, the 95% confidence ROC AUC interval may be defined as a range having an upper limit of 0.92 and as a lower limit any number between 0.60 and 0.92. The lower limit number may be 0.60, 0.61, 0.62, 0.63, 0.64, 0.65, 0.66, 0.67, 0.68, 0.69, 0.70, 0.71, 0.72, 0.73, 0.74, 0.75, 0.76, 0.77, 0.78, 0.79, 0.80, 0.81, 0.82, 0.83, 0.84, 0.85, 0.86, 0.87, 0.88, 0.89, 0.90, 0.91 or 0.92.

[0609] The upper limit number may be 0.91. Thus, the 95% confidence ROC AUC interval may be defined as a range having an upper limit of 0.91 and as a lower limit any number between 0.60 and 0.91. The lower limit number may be 0.60, 0.61, 0.62, 0.63, 0.64, 0.65, 0.66, 0.67, 0.68, 0.69, 0.70, 0.71, 0.72, 0.73, 0.74, 0.75, 0.76, 0.77, 0.78, 0.79, 0.80, 0.81, 0.82, 0.83, 0.84, 0.85, 0.86, 0.87, 0.88, 0.89, 0.90 or 0.91.

[0610] The upper limit number may be 0.90. Thus, the 95% confidence ROC AUC interval may be defined as a range having an upper limit of 0.90 and as a lower limit any number between 0.60 and 0.90. The lower limit number may be 0.60, 0.61, 0.62, 0.63, 0.64, 0.65, 0.66, 0.67, 0.68, 0.69, 0.70, 0.71, 0.72, 0.73, 0.74, 0.75, 0.76, 0.77, 0.78, 0.79, 0.80, 0.81, 0.82, 0.83, 0.84, 0.85, 0.86, 0.87, 0.88, 0.89 or 0.90.

[0611] The upper limit number may be 0.89. Thus, the 95% confidence ROC AUC interval may be defined as a range having an upper limit of 0.89 and as a lower limit any number between 0.60 and 0.89. The lower limit number may be 0.60, 0.61, 0.62, 0.63, 0.64, 0.65, 0.66, 0.67, 0.68, 0.69, 0.70, 0.71, 0.72, 0.73, 0.74, 0.75, 0.76, 0.77, 0.78, 0.79, 0.80, 0.81, 0.82, 0.83, 0.84, 0.85, 0.86, 0.87, 0.88 or 0.89.

[0612] The upper limit number may be 0.88. Thus, the 95% confidence ROC AUC interval may be defined as a range having an upper limit of 0.88 and as a lower limit any number between 0.60 and 0.88. The lower limit number may be 0.60, 0.61, 0.62, 0.63, 0.64, 0.65, 0.66, 0.67, 0.68, 0.69, 0.70, 0.71, 0.72, 0.73, 0.74, 0.75, 0.76, 0.77, 0.78, 0.79, 0.80, 0.81, 0.82, 0.83, 0.84, 0.85, 0.86, 0.87 or 0.88.

[0613] The upper limit number may be 0.87. Thus, the 95% confidence ROC AUC interval may be defined as a range having an upper limit of 0.87 and as a lower limit any number between 0.60 and 0.87. The lower limit number may be 0.60, 0.61, 0.62, 0.63, 0.64, 0.65, 0.66, 0.67, 0.68, 0.69, 0.70, 0.71, 0.72, 0.73, 0.74, 0.75, 0.76, 0.77, 0.78, 0.79, 0.80, 0.81, 0.82, 0.83, 0.84, 0.85, 0.86 or 0.87.

[0614] The upper limit number may be 0.86. Thus, the 95% confidence ROC AUC interval may be defined as a range having an upper limit of 0.86 and as a lower limit any number between 0.60 and 0.86. The lower limit number may be 0.60, 0.61, 0.62, 0.63, 0.64, 0.65, 0.66, 0.67, 0.68, 0.69, 0.70, 0.71, 0.72, 0.73, 0.74, 0.75, 0.76, 0.77, 0.78, 0.79, 0.80, 0.81, 0.82, 0.83, 0.84, 0.85 or 0.86.

[0615] The upper limit number may be 0.85. Thus, the 95% confidence ROC AUC interval may be defined as a range having an upper limit of 0.85 and as a lower limit any number between 0.60 and 0.85. The lower limit number may be 0.60, 0.61, 0.62, 0.63, 0.64, 0.65, 0.66, 0.67, 0.68, 0.69, 0.70, 0.71, 0.72, 0.73, 0.74, 0.75, 0.76, 0.77, 0.78, 0.79, 0.80, 0.81, 0.82, 0.83, 0.84 or 0.85.

[0616] The upper limit number may be 0.84. Thus, the 95% confidence ROC AUC interval may be defined as a range having an upper limit of 0.84 and as a lower limit any number between 0.60 and 0.84. The lower limit number may be 0.60, 0.61, 0.62, 0.63, 0.64, 0.65, 0.66, 0.67, 0.68, 0.69, 0.70, 0.71, 0.72, 0.73, 0.74, 0.75, 0.76, 0.77, 0.78, 0.79, 0.80, 0.81, 0.82, 0.83 or 0.84.

[0617] The upper limit number may be 0.83. Thus, the 95% confidence ROC AUC interval may be defined as a range having an upper limit of 0.83 and as a lower limit any number between 0.60 and 0.83. The lower limit number may be 0.60, 0.61, 0.62, 0.63, 0.64, 0.65, 0.66, 0.67, 0.68, 0.69, 0.70, 0.71, 0.72, 0.73, 0.74, 0.75, 0.76, 0.77, 0.78, 0.79, 0.80, 0.81, 0.82 or 0.83.

[0618] The upper limit number may be 0.82. Thus, the 95% confidence ROC AUC interval may be defined as a range having an upper limit of 0.82 and as a lower limit any number between 0.60 and 0.82. The lower limit number may be 0.60, 0.61, 0.62, 0.63, 0.64, 0.65, 0.66, 0.67, 0.68, 0.69, 0.70, 0.71, 0.72, 0.73, 0.74, 0.75, 0.76, 0.77, 0.78, 0.79, 0.80, 0.81 or 0.82.

[0619] The upper limit number may be 0.81. Thus, the 95% confidence ROC AUC interval may be defined as a range having an upper limit of 0.81 and as a lower limit any number between 0.60 and 0.81. The lower limit number may be 0.60, 0.61, 0.62, 0.63, 0.64, 0.65, 0.66, 0.67, 0.68, 0.69, 0.70, 0.71, 0.72, 0.73, 0.74, 0.75, 0.76, 0.77, 0.78, 0.79, 0.80 or 0.81.

[0620] The upper limit number may be 0.80. Thus, the 95% confidence ROC AUC interval may be defined as a range having an upper limit of 0.80 and as a lower limit any number between 0.60 and 0.80. The lower limit number may be 0.60, 0.61, 0.62, 0.63, 0.64, 0.65, 0.66, 0.67, 0.68, 0.69, 0.70, 0.71, 0.72, 0.73, 0.74, 0.75, 0.76, 0.77, 0.78, 0.79 or 0.80.

[0621] The upper limit number may be 0.79. Thus, the 95% confidence ROC AUC interval may be defined as a range having an upper limit of 0.79 and as a lower limit any number between 0.60 and 0.79. The lower limit number may be 0.60, 0.61, 0.62, 0.63, 0.64, 0.65, 0.66, 0.67, 0.68, 0.69, 0.70, 0.71, 0.72, 0.73, 0.74, 0.75, 0.76, 0.77, 0.78 or 0.79.

[0622] The upper limit number may be 0.78. Thus, the 95% confidence ROC AUC interval may be defined as a range having an upper limit of 0.78 and as a lower limit any number between 0.60 and 0.78. The lower limit number may be 0.60, 0.61, 0.62, 0.63, 0.64, 0.65, 0.66, 0.67, 0.68, 0.69, 0.70, 0.71, 0.72, 0.73, 0.74, 0.75, 0.76, 0.77 or 0.78.

[0623] The upper limit number may be 0.77. Thus, the 95% confidence ROC AUC interval may be defined as a range having an upper limit of 0.77 and as a lower limit any number between 0.60 and 0.77. The lower limit number may be 0.60, 0.61, 0.62, 0.63, 0.64, 0.65, 0.66, 0.67, 0.68, 0.69, 0.70, 0.71, 0.72, 0.73, 0.74, 0.75, 0.76 or 0.77.

[0624] The upper limit number may be 0.76. Thus, the 95% confidence ROC AUC interval may be defined as a range having an upper limit of 0.76 and as a lower limit any number between 0.60 and 0.76. The lower limit number may be 0.60, 0.61, 0.62, 0.63, 0.64, 0.65, 0.66, 0.67, 0.68, 0.69, 0.70, 0.71, 0.72, 0.73, 0.74, 0.75 or 0.76.

[0625] The upper limit number may be 0.75. Thus, the 95% confidence ROC AUC interval may be defined as a range having an upper limit of 0.75 and as a lower limit any number between 0.60 and 0.75. The lower limit number may be 0.60, 0.61, 0.62, 0.63, 0.64, 0.65, 0.66, 0.67, 0.68, 0.69, 0.70, 0.71, 0.72, 0.73, 0.74 or 0.75.

[0626] The upper limit number may be 0.74. Thus, the 95% confidence ROC AUC interval may be defined as a range having an upper limit of 0.74 and as a lower limit any number between 0.60 and 0.74. The lower limit number may be 0.60, 0.61, 0.62, 0.63, 0.64, 0.65, 0.66, 0.67, 0.68, 0.69, 0.70, 0.71, 0.72, 0.73 or 0.74.

[0627] The upper limit number may be 0.73. Thus, the 95% confidence ROC AUC interval may be defined as a range having an upper limit of 0.73 and as a lower limit any number between 0.60 and 0.73. The lower limit number may be 0.60, 0.61, 0.62, 0.63, 0.64, 0.65, 0.66, 0.67, 0.68, 0.69, 0.70, 0.71, 0.72 or 0.73.

[0628] The upper limit number may be 0.72. Thus, the 95% confidence ROC AUC interval may be defined as a range having an upper limit of 0.72 and as a lower limit any number between 0.60 and 0.72. The lower limit number may be 0.60, 0.61, 0.62, 0.63, 0.64, 0.65, 0.66, 0.67, 0.68, 0.69, 0.70, 0.71 or 0.72.

[0629] The upper limit number may be 0.71. Thus, the 95% confidence ROC AUC interval may be defined as a range having an upper limit of 0.71 and as a lower limit any number between 0.60 and 0.71. The lower limit number may be 0.60, 0.61, 0.62, 0.63, 0.64, 0.65, 0.66, 0.67, 0.68, 0.69, 0.70 or 0.71.

[0630] The upper limit number may be 0.70. Thus, the 95% confidence ROC AUC interval may be defined as a range having an upper limit of 0.70 and as a lower limit any number between 0.60 and 0.70. The lower limit number may be 0.60, 0.61, 0.62, 0.63, 0.64, 0.65, 0.66, 0.67, 0.68, 0.69 or 0.70.

### Methods of Treatment and Diagnosis

[0631] The term “treatment” as used herein is intended to refer to any intervention or procedure performed on an individual, including a surgical intervention or a pharmacological intervention such as the administration of a compound or drug. Any such treatment may be performed for therapeutic purposes or for preventative or prophylactic purposes.

[0632] The invention also encompasses the performance of one or more treatment steps following a positive classification of cancer, particularly ovarian and/or endometrial cancer, based on any of the methods described herein. Said treatments may be considered “therapeutic” treatments.

[0633] The invention also encompasses the performance of one or more treatment steps following a negative classification of cancer or prediction of an individual being at risk of cancer development, particularly ovarian and/or endometrial cancer, based on any of the methods described herein. Said treatments may be considered “risk prevention”, “preventative” or “prophylactic” treatments.

[0634] The invention also encompasses the performance of one or more treatment steps following a negative classification of cancer or prediction of an individual being at risk of cancer development based on any of the methods described herein, in an individual that harbours one or more mutations that predispose the individual to an increased risk of developing cancer, particularly ovarian and/or endometrial cancer, such as a BRCA1 and/or a BRCA2 mutation.

[0635] The invention thus encompasses a method of treating a cancer patient comprising administering chemotherapy, radiation, immunotherapy or any cancer therapy described herein to the patient determined to have a cancer index value which indicates that the patient has is positive for cancer based on any of the assays described herein, preferably wherein the cancer is ovarian cancer.

[0636] The invention thus encompasses a method of treating or preventing cancer in an individual, the method comprising:
[0637] a. assessing the cancer status of the individual by assessing the presence, absence or development of cancer in the individual by performing any one of the assays described herein;
[0638] b. administering one or more therapeutic or preventative treatments to the individual based on the assessment,
[0639] preferably wherein the cancer in ovarian and/or endometrial cancer, most
[0640] preferably wherein the cancer is ovarian cancer.

[0641] The invention thus encompasses a method of treating or preventing cancer in an individual, the method comprising:
[0642] a. assessing the cancer status of the individual by assessing the presence, absence or development of cancer in the individual comprising:
   [0643] i. providing a sample which has been taken from the individual, the sample comprising a population of DNA molecules;
   [0644] ii. determining in the population of DNA molecules in the sample the methylation status of a panel of one or more CpGs selected from a panel of CpGs identified at nucleotide positions 61 to 62 in SEQ ID NOs 1 to 14,000;
   [0645] iii. deriving a cancer index value based on the methylation status of the one or more CpGs in the panel; and
   [0646] iv. assessing the presence, absence or development of cancer in the individual based on the cancer index value, wherein the assay is characterised as having an area under the curve (AUC) of 0.60 or more as determined by receiver operating characteristics (ROC);
[0647] b. administering one or more therapeutic or preventative treatments to the individual based on the assessment,
[0648] preferably wherein the cancer in ovarian and/or endometrial cancer, most
[0649] preferably wherein the cancer is ovarian cancer.

[0650] In any of the methods of treatment encompassed by the invention, the step of predicting the presence or development of cancer, preferably wherein the cancer in ovarian and/or endometrial cancer, in an individual may involve deriving a cancer index value.

[0651] In any of the methods of treatment encompassed by the invention, the step of predicting the presence or development of cancer in an individual may involve the use of any one of the arrays described herein.

[0652] In any of the methods of treatment encompassed by the invention, the step of stratifying the individual may involve applying any one of the thresholds according to any one of the assays of the invention described herein.

[0653] The step of administering one or more treatments may comprise different treatment steps depending on the stratification of an individual on the basis of their risk of having cancer or on the basis of risk of cancer development, particularly ovarian and/or endometrial cancer. Particularly the amount of an invasiveness of the treatments administered may vary dependent on the stratification of an individual on the basis of their risk of having cancer or on the basis of their risk of cancer development. The treatments administered to the individual may comprise any treatments considered suitable by a person skilled in the art.

[0654] For example, wherein the individual is assessed as not having cancer or as having a low risk of cancer development, and wherein the cancer index value is about −0.570 or more and less than about −0.210, and preferably wherein the assay comprises determining methylation β-values for each CpG in the panel of one or more CpGs, the individual is subjected to one or more treatments according to their cancer index value, the one or more treatments may comprise intensified screening, preferably wherein the intensified screening comprises any of:
[0655] a. a test for a BRCA1 and/or BRCA2 germline mutation;
[0656] b. a test for CA125, preferably wherein the test is repeated annually;
[0657] c. a test for cell-free tumour DNA methylation in plasma/serum, preferably wherein the test is repeated annually;
[0658] d. a test for cell-free tumour DNA methylation in vaginal fluid, preferably wherein the test is repeated annually;
[0659] e. a repeat assay according to any one of the assays of the invention, preferably wherein the repeat assay is performed about two years after the previous assay,
   preferably wherein the individual being tested by any one or more of b. to d. is post-menopausal, preferably wherein the cancer is ovarian and/or endometrial cancer, most preferably wherein the cancer is ovarian cancer.

[0660] Wherein the individual is assessed as having cancer or as having a moderate risk of cancer development, and wherein the cancer index value is about −0.210 or more and less than about 0.170, and preferably wherein the assay comprises determining methylation β-values for each CpG in the panel of one or more CpGs, the individual is subjected to one or more treatments according to their cancer index value, the one or more treatments may comprise any of:
[0661] a. intensified screening, preferably wherein the intensified screening comprises one or more of:
   [0662] i. a test for a BRCA1 and/or BRCA2 germline mutation;
   [0663] ii. a test for CA125, preferably wherein the test is repeated annually;
   [0664] iii. a test for cell-free tumour DNA methylation in plasma/serum, preferably wherein the test is repeated annually;
   [0665] iv. a test for cell-free tumour DNA methylation in vaginal fluid, preferably wherein the test is repeated annually
   [0666] v. a pelvic MRI scan, preferably wherein the individual being subjected to the pelvic MRI scan is post-menopausal, and preferably wherein the scan is repeated annually;
   [0667] vi. a repeat assay according to any one of the assays of the invention, preferably wherein the repeat assay is performed about one year after the previous assay;
[0668] b. administration of one or more of Aspirin, oral contraceptive pill, selective estrogen receptor modulators (SERMS), and selective progesterone receptor modulators (SPRMs);
[0669] preferably wherein the cancer is ovarian and/or endometrial cancer, most preferably wherein the cancer is ovarian cancer.

[0670] Wherein the individual is assessed as having cancer or as having a high risk of cancer development, and wherein the cancer index value is about 0.170 or more, and preferably wherein the assay comprises determining methylation β-values for each CpG in the panel of one or more CpGs, the individual is subjected to one or more treatments according to their cancer index value, the one or more treatments may comprise any of:
[0671] a. intensified screening, preferably wherein the intensified screening comprises one or more of:
   [0672] i. a test for a BRCA1 and/or BRCA2 germline mutation;
   [0673] ii. a test for CA125, preferably wherein the test is repeated three-monthly;
   [0674] iii. a test for cell-free tumour DNA methylation in plasma/serum, preferably wherein the test is repeated annually;
   [0675] iv. a test for cell-free tumour DNA methylation in vaginal fluid, preferably wherein the test is repeated annually
   [0676] v. a pelvic MRI scan, preferably wherein the scan is repeated annually;
   [0677] vi. a repeat assay according to any one of the assays of the invention, preferably wherein the repeat assay is performed about one year after the previous assay;
[0678] b. administration of one or more of Aspirin, oral contraceptive pill, selective estrogen receptor modulators (SERMS), and selective progesterone receptor modulators (SPRMs); and/or
[0679] c. a total hysterectomy and bilateral salpingo-oophorectomy;
   preferably wherein the cancer is ovarian and/or endometrial cancer, most preferably wherein the cancer is ovarian cancer.

[0680] In any of the assays described herein, wherein tests are performed as part of intensified screening the tests may be repeated at any suitable interval. A test for CA125 may be performed three-monthly, six-monthly, annually or about once every two, three or four years. A test for cell-free tumour DNA methylation in plasma/serum may be performed three-monthly, six-monthly, annually or about once every two, three or four years. A test for cell-free tumour DNS methylation in vaginal fluid may be performed three-monthly, six-monthly, annually or about once every two, three or four years. A pelvic MRI scan may be performed three-monthly, six-monthly, annually or about once every two, three or four years.

[0681] Wherein the individual is assessed as having a moderate to high risk of having cancer or a moderate to high risk of cancer development, and/or if the individual has a germline tissue mutation of BRCA1 or BRCA2, preferably BRCA1, the one or more treatments may comprise administration of one or more of Aspirin, oral contraceptive pill, selective estrogen receptor modulators (SERMS), and selective progesterone receptor modulators (SPRMs). The SERMs may comprise Anordin, Bazedoxifene, Broparestrol, Broparestrol, Clomifene, Cyclofenil, Lasofoxifene, Ormeloxifene, Ospemifene, Raloxifene, Tamoxifen, preferably wherein the SERMs comprise Tamoxifen, Bazedoxifene and Raloxifene. Thee SPRMs may comprise Mifepristone, Ulipristal, Asoprisnil, Proellex, Onapristone, Asoprisnil and Lonaprisan.

[0682] Other exemplary treatments comprise one or more surgical procedures, one or more chemotherapeutic agents, one or more cytotoxic chemotherapeutic agents one or more radiotherapeutic agents, one or more immunotherapeutic agents, one or more biological therapeutics, one or more anti-hormonal treatments or any combination of the above following a positive diagnosis of cancer.

[0683] In any of the methods of treatment described herein, the individual may particularly be administered treatments recited in Table 7. Four sub-groups defined by ranges of cancer index values are specified in Table 7 as corresponding to preferred clinical actions, comprising intensified screening, administration of therapeutics and surgery.

[0684] Cancer treatments may be administered to an individual harbouring cancer or at risk of cancer development, in an amount sufficient to prevent, treat, cure, alleviate or partially arrest cancer or one or more of its symptoms. Such treatments may result in a decrease in severity, and/or decreased cancer index value, of cancer symptoms, or an increase in frequency or duration of symptom-free periods. A treatment amount adequate to accomplish this is defined as “therapeutically effective amount”. Effective amounts for a given purpose will depend on the severity of cancer and/or the individual's cancer index value as well as the weight and general state of the individual. As used herein, the term “individual” includes any human, preferably the human is a woman. As used herein, “treatment” is to be considered synonymous with “therapeutic agent”.

[0685] The following therapeutic agents may be administered to an individual based on their cancer risk alone or in combination with any other treatment described herein. The therapeutic agent may be directly attached, for example by chemical conjugation, to an antibody. Methods of conjugating agents or labels to an antibody are known in the art. For example, carbodiimide conjugation (Bauminger & Wilchek (1980) Methods Enzymol. 70, 151-159) may be used to conjugate a variety of agents, including doxorubicin, to antibodies or peptides. The water-soluble carbodiimide, 1-ethyl-3-(3-dimethylaminopropyl) carbodiimide (EDC) is particularly useful for conjugating a functional moiety to a binding moiety. Other methods for conjugating a moiety to antibodies can also be used. For example, sodium periodate oxidation followed by reductive alkylation of appropriate reactants can be used, as can glutaraldehyde cross-linking. However, it is recognised that, regardless of which method of producing a conjugate of the invention is selected, a determination must be made that the antibody maintains its targeting ability and that the functional moiety maintains its relevant function.

[0686] A cytotoxic moiety may be directly and/or indirectly cytotoxic. By “directly cytotoxic” it is meant that the moiety is one which on its own is cytotoxic. By “indirectly cytotoxic” it is meant that the moiety is one which, although is not itself cytotoxic, can induce cytotoxicity, for example by its action on a further molecule or by further action on it. The cytotoxic moiety may be cytotoxic only when intracellular and is preferably not cytotoxic when extracellular.

[0687] Cytotoxic chemotherapeutic agents are well known in the art. Cytotoxic chemotherapeutic agents, such as anticancer agents, include: alkylating agents including nitrogen mustards such as mechlorethamine (HN2), cyclophosphamide, ifosfamide, melphalan (L-sarcolysin) and chlorambucil; ethylenimines and methylmelamines such as hexamethylmelamine, thiotepa; alkyl sulphonates such as busulfan; nitrosoureas such as carmustine (BCNU), lomustine (CCNU), semustine (methyl-CCNU) and streptozocin (streptozotocin); and triazenes such as decarbazine (DTIC; dimethyltriazenoimidazole-carboxamide); Antimetabolites including folic acid analogues such as methotrexate (amethopterin); pyrimidine analogues such as fluorouracil (5-fluorouracil; 5-FU), floxuridine (fluorodeoxyuridine; FUdR) and cytarabine (cytosine arabinoside); and purine analogues and related inhibitors such as mercaptopurine (6-mercaptopurine; 6-MP), thioguanine (6-thioguanine; TG) and pentostatin (2′-deoxycoformycin). Natural Products including vinca alkaloids such as vinblastine (VLB) and vincristine; epipodophyllotoxins such as etoposide and teniposide; antibiotics such as dactinomycin (actinomycin D), daunorubicin (daunomycin; rubidomycin), doxorubicin, bleomycin, plicamycin (mithramycin) and mitomycin (mitomycin C); enzymes such as L-asparaginase; and biological response modifiers such as interferon alphenomes. Miscellaneous agents including platinum coordination complexes such as cisplatin (cis-DDP) and carboplatin; anthracenedione such as mitoxantrone and anthracycline; substituted urea such as hydroxyurea; methyl hydrazine derivative such as procarbazine (N-methylhydrazine, MIH); and adrenocortical suppressant such as mitotane (o,p′-DDD) and aminoglutethimide; taxol and analogues/derivatives; and hormone agonists/antagonists such as flutamide and tamoxifen.

[0688] A cytotoxic chemotherapeutic agent may be a cytotoxic peptide or polypeptide moiety which leads to cell death. Cytotoxic peptide and polypeptide moieties are well known in the art and include, for example, ricin, abrin, Pseudomonas exotoxin, tissue factor and the like. Methods for linking them to targeting moieties such as antibodies are also known in the art. Other ribosome inactivating proteins are described as cytotoxic agents in WO 96/06641. Pseudomonas exotoxin may also be used as the cytotoxic polypeptide. Certain cytokines, such as TNFα and IL-2, may also be useful as cytotoxic agents.

[0689] Certain radioactive atoms may also be cytotoxic if delivered in sufficient doses. Radiotherapeutic agents may comprise a radioactive atom which, in use, delivers a sufficient quantity of radioactivity to the target site so as to be cytotoxic. Suitable radioactive atoms include phosphorus-32, iodine-125, iodine-131, indium-111, rhenium-186, rhenium-188 or yttrium-90, or any other isotope which emits enough energy to destroy neighbouring cells, organelles or nucleic acid. Preferably, the isotopes and density of radioactive atoms in the agents of the invention are such that a dose of more than 4000 cGy (preferably at least 6000, 8000 or 10000 cGy) is delivered to the target site and, preferably, to the cells at the target site and their organelles, particularly the nucleus.

[0690] The radioactive atom may be attached to an antibody, antigen-binding fragment, variant, fusion or derivative thereof in known ways. For example, EDTA or another chelating agent may be attached to the binding moiety and used to attach 111In or 90Y. Tyrosine residues may be directly labelled with 125I or 131I.

[0691] A cytotoxic chemotherapeutic agent may be a suitable indirectly-cytotoxic polypeptide. In a particularly preferred embodiment, the indirectly cytotoxic polypeptide is a polypeptide which has enzymatic activity and can convert a non-toxic and/or relatively non-toxic prodrug into a cytotoxic drug. With antibodies, this type of system is often referred to as ADEPT (Antibody-Directed Enzyme Prodrug Therapy). The system requires that the antibody locates the enzymatic portion to the desired site in the body of the patient and after allowing time for the enzyme to localise at the site, administering a prodrug which is a substrate for the enzyme, the end product of the catalysis being a cytotoxic compound. The object of the approach is to maximise the concentration of drug at the desired site and to minimise the concentration of drug in normal tissues. In a preferred embodiment, the cytotoxic moiety is capable of converting a non-cytotoxic prodrug into a cytotoxic drug.

[0692] In any of the methods of treatment described herein, the one or more treatments that the individual is subjected to may be repeated on one or more occasions. The one or more treatments may be repeated at regular intervals. The repetitive nature of the treatment administration may depend on the particular treatment being administered. Some treatments may require repetitive administration at greater frequency than others. The skilled person would be aware of the frequency of administration required for therapies known in the art. The one or more treatments may be repeated weekly, two weekly, three weekly, four weekly, monthly, three monthly, six monthly, yearly, two yearly, three yearly, four yearly, or five yearly.

[0693] In any of the methods described herein, when the individual is assessed as having a cancer index value of less than about −0.570, and preferably wherein the assay comprises determining methylation β-values for each CpG in the panel of one or more CpGs, no treatment is administered to the individual.

### Methods of Monitoring

[0694] The invention also provides methods of monitoring the risk of the presence or development of cancer in an individual.

[0695] “Monitoring” in the context of the present invention may refer to longitudinal assessment of an individual's risk of harbouring cancer or risk of cancer development. This longitudinal assessment may be carried out according to the assays of the invention described herein. This longitudinal assessment may involve performance of the assays of the invention described herein to predict the presence or development of cancer in an individual at more than one time point over the course of an undetermined time window. The time window may be any period of time whilst the individual is still living. The time window may persist for the lifetime of the individual. The time window may persist until the individual's risk of harbouring cancer or risk of cancer development falls below a certain level. The level may be a particular cancer index value.

[0696] The invention thus encompasses a method of monitoring for the presence, absence or development of cancer, particularly ovarian and/or endometrial cancer, most preferably ovarian cancer, in an individual, the method comprising:
[0697] a. assessing the presence or absence of cancer in an individual or assessing cancer development in an individual to establish a cancer status for the individual by performing any one of the assays of the invention described herein at a first time point;
[0698] b. assessing the presence or absence of cancer in the individual or assessing cancer development in the individual to establish a cancer status for the individual by performing any one of the assays of the invention described herein at one or more further time points, preferably wherein the cancer status of the individual in steps a and b are assessed using the same assay; and
[0699] c. monitoring any change in the cancer status of the individual between time points.

[0700] The invention also encompasses a method of monitoring for the presence, absence or development of cancer, particularly ovarian and/or endometrial cancer, most preferably ovarian cancer, in an individual, the method comprising:
[0701] a. assessing the presence or absence of cancer in an individual or assessing cancer development in an individual to establish a cancer status for the individual by performing an assay at a first time point, comprising:
   [0702] i. providing a sample which has been taken from the individual, the sample comprising a population of DNA molecules;
   [0703] ii. determining in the population of DNA molecules in the sample the methylation status of a panel of one or more CpGs selected from a panel of CpGs identified at nucleotide positions 61 to 62 in SEQ ID NOs 1 to 14,000;
   [0704] iii. deriving a cancer index value based on the methylation status of the one or more CpGs in the panel; and
   [0705] iv. assessing the presence, absence or development of cancer in the individual based on the cancer index value, wherein the assay is characterised as having an area under the curve (AUC) of 0.60 or more as determined by receiver operating characteristics (ROC);
[0706] b. assessing the presence or absence of cancer in the individual or assessing cancer development in the individual to establish a cancer status for the individual by performing the assay of steps a(i) to a(iv) or by performing any one of the assays of the invention described herein at one or more further time points; and
[0707] c. monitoring any change in the cancer status of the individual between time points.

[0708] In any of the methods of monitoring described herein, the steps of assessing the presence, absence or development of cancer in an individual based on a cancer index value may involve the application of threshold values. Threshold values can provide an indication of an individual's risk of having cancer or an individual's risk of cancer development. For example, cancer index values may indicate a high or low risk of harbouring or developing cancer. In any of the methods of monitoring encompassed by the invention, the step of predicting the presence, absence or development of cancer in an individual involves deriving a cancer index value.

[0709] The invention further encompasses a method of measuring methylation in a patient at multiple time points comprising (a) assessing the presence, absence or development of cancer in an individual by performing any one of the assays of the invention described herein at a first time point; (b) assessing the presence, absence or development of cancer in the individual by performing any one of the assays of the invention described herein at one or more further time points, and (c) detecting differential methylation status between (a) and (b).

[0710] In any of the methods of monitoring described herein, the individual may already harbour cancer, particularly ovarian and/or endometrial cancer. The individual may not have cancer. The individual may not harbour cancer. The individual may not harbour cancer but may harbour one or more genetic mutations that predispose the individual to an increased risk of cancer development e.g. the individual may harbour one or more mutations in a BRCA gene. Other mutations may include any mutations in the art that are considered to pre-dispose individuals to cancer. In any of the methods of monitoring described herein, the individual may not harbour cancer but may harbour one or more genetic mutations that pre-dispose the individual to cancer, and this individual may be subjected to any of the methods of monitoring described herein in order to determine their risk of having cancer or of developing cancer. For example, in any of the methods described herein, the individual does not harbour cancer and harbours one or more mutations that predispose the individual to an increased risk of developing cancer, particularly ovarian and/or endometrial cancer, and wherein one or more treatments are administered to the individual in accordance with any of the methods of treatment described herein as a method of prophylaxis. In any of the methods described herein, the individual does not harbour cancer and harbours one or more mutations that predispose the individual to an increased risk of developing cancer, and wherein one or more treatments are administered to the individual in accordance with any of the methods of treatment described herein as a method of prophylaxis, and wherein the one or more treatments administered to the individual comprises one or more doses of Aspirin, oral contraceptive pill, selective estrogen receptor modulators (SERMS), and selective progesterone receptor modulators (SPRMs). The SERMs may comprise Anordin, Bazedoxifene, Broparestrol, Broparestrol, Clomifene, Cyclofenil, Lasofoxifene, Ormeloxifene, Ospemifene, Raloxifene, Tamoxifen. The SPRMs may comprise Mifepristone, Ulipristal, Asoprisnil, Proellex, Onapristone, Asoprisnil and Lonaprisan. Preferably the one or more prophylactic treatments administered to the individual comprises Tamoxifen, Bazedoxifene and Raloxifene.

[0711] In any of the methods of monitoring described herein, depending on the risk of the presence or development of cancer in the individual, one or more treatments are administered to the individual according to any one of the methods of treatment encompassed by the invention and described herein, or wherein the cancer index value of the individual is less than about −0.570 no treatment is administered to the individual. Different treatments may be administered depending on the stratification of an individual on the basis of their risk of harbouring cancer or on the basis of their risk of cancer development. The method may further comprise administration of one or more treatments according to the methods of treatment described herein.

[0712] The cancer index value may change between any two or more time points. For this reason, longitudinal monitoring of an individual's cancer index value could be of particular benefit to the assessment of, for example, cancer progression, prevention of recurrence of cancer, cancer treatment efficacy, or cancer efficacy.

[0713] In any of the methods of monitoring described herein, the one or more further time points may be any suitable time point. Preferably the one or more further time points may of suitable distance apart for sufficiently frequent screening in order to predict any particularly early onset cases of presence or development of cancer in an individual. Preferably the one or more further time points may be of suitable distance apart for assessing the efficacy of one or more treatments. Preferably the one or more further time points may be of suitable distance apart for predicting whether an individual remains free of cancer after a successful course of treatment. The one or more further time points may be about monthly, about two monthly, about three monthly, about four monthly, about five monthly, about six monthly, about seven monthly, about eight monthly, about nine monthly, about ten monthly, about eleven monthly, about yearly, about two yearly, or more than two yearly.

[0714] In any of the methods of monitoring described herein, changes may be made to the one or more treatments wherein a positive or negative responses to the one or more treatments are observed. Treatments may be changed in accordance with the methods of treatments described herein. Treatments may particularly be changed if the individual's risk stratification, based on their cancer index value, changes.

[0715] In any of the methods of monitoring encompassed by the invention, the step of predicting the presence or development of cancer in an individual may involve the use of any one of the arrays described herein.

### Biological Samples

[0716] The assays described herein are preferably performed on samples comprising epithelial cells, particularly obtained from an anatomical site other than the ovary or endometrium. The sample may particularly be derived from the cervix, the vagina, the buccal area, blood and/or urine. The sample is preferably a cervical liquid-based cytology sample, and more preferably a cervical smear sample.

[0717] Preferably, any one of the assays described herein for assessing the presence, absence or development of cancer in an individual comprises providing a sample which has been taken from the individual. Preferably the individual is a woman.

[0718] In any of the assays described herein, the assay may or may not encompass the step of obtaining the sample from the individual. In assays which do not encompass the step of obtaining the sample from the individual, a sample which has previously been obtained from the individual is provided.

[0719] The sample may be provided directly from the individual for analysis or may be derived from stored material, e.g. frozen, preserved, fixed or cryopreserved material.

[0720] In any of the assays described herein, the sample may be self-collected or collected by any suitable medical professional.

[0721] Any of the assays described herein, the sample may comprise cells. The sample may comprise genetic material such as DNA and/or RNA.

[0722] Any of the assays described herein may involve providing a biological sample from the patient as the source of patient DNA for methylation analysis.

[0723] Any of the assays described herein may involve obtaining patient DNA from a biological sample which has previously been obtained from the patient.

[0724] Any of the assays described herein may involve obtaining a biological sample from the patient as the source of patient DNA for methylation analysis. The sample may be self-collected or collected by any suitable medical professional. Procedures for obtaining a biological sample include biopsy.

[0725] Methods for sample isolation and for the subsequent extraction and isolation of DNA from such cell or tissue samples in preparation for assessing DNA methylation, are well known to those skilled in the art. In the context of the assays or methods described herein, the entirety of a sample may be used, or alternatively cells may be concentrated or cell types may be fractionated in order to only apply subsets of one or more cell types to the present assays or methods. Any suitable methods of concentration or fractionation may be used.

[0726] In any one of the assays described and defined herein the sample from the individual, or the sample which has been taken from the individual, may derive from a tissue which is different from the tissue which harbours the tumour, if a tumour is present in the individual. Accordingly, in any one of the assays described and defined herein the sample from the individual, or the sample which has been taken from the individual, may not comprise nucleic acid, including DNA, which derives from the tumour, i.e. tumour-specific nucleic acid, including tumour-specific DNA. Thus, consistent with the data set out in the examples and the disclosures herein, methylation profiles derived from DNA molecules in the sample are used as surrogate markers for tumour-specific nucleic acid, including tumour-specific DNA, which exists at an anatomical site in the body of the individual which is remote from the anatomical site from which the sample is derived. A skilled person would able to identify the absence of tumour-specific DNA in any given population of sample-specific DNA molecules by routine means, such as determining the absence of known genetic mutations which are characteristic of the particular cancer, by e.g. sequence based screening. However, the performance of any one of the assays described and defined herein does not require any assessment to verify the absence of tumour-specific DNA in any given population of DNA molecules.

### Types of Cancers

[0727] The methods described herein may be applied to any cancer. Preferably, the methods described herein may be applied to ovarian cancer and/or endometrial cancer. The methods described herein are most preferably applied to ovarian cancer.

[0728] The cancer may be a primary cancer lesion. The cancer may be a secondary cancer lesion. The cancer may be a metastatic lesion.

[0729] In assays described herein, wherein the assays is for assessing the presence, absence or development of ovarian cancer, the ovarian cancer may preferably be serious carcinoma, mucinous carcinoma, endometrioid carcinoma, clear cell carcinoma, lop malignant potential (LMP) tumor, borderline epithelial ovarian cancer, teratoma, dysgerminoma, endodermal sinus tumor, Choriocarcinoma, granulosa-theca tumor, Sertoli-Leydig tumor, granulosa cell tumor, small cell carcinoma of the ovary or primary peritoneal carcinoma. Any of the assays described herein may additionally, or alternatively, be for assessing the presence, absence or development of endometrial cancer.

[0730] In assays described herein, wherein the assays is for assessing the presence, absence or development of endometrial cancer, the endometrial cancer may preferably be an endometriod cancer, uterine carcinosarcoma, squamous cell carcinoma, small cell carcinoma, transitional carcinoma, serous carcinoma, clear-cell carcinoma, mucinous adenocarcinoma, undifferentiated carcinoma, dedifferentiated carcinoma or serous adenocarcinoma.

### Arrays and Kits

[0731] The invention also encompasses arrays capable of discriminating between methylated and non-methylated forms of CpGs as defined herein; the arrays may comprise oligonucleotide probes specific for methylated forms of CpGs as defined herein and oligonucleotide probes specific for non-methylated forms of CpGs as defined herein.

[0732] In any of the arrays described herein, the array may comprise oligonucleotide probes specific for a methylated form of each CpG in a CpG panel and oligonucleotide probes specific for a non-methylated form of each CpG in the panel; wherein the panel consists of at least 500 CpGs selected from the CpGs identified at nucleotide position 61 to 62 in SEQ ID NOs 1 to 14000.

[0733] The panel may consist of at least 1000 CpGs selected from the CpGs identified at nucleotide position 61 to 62 in SEQ ID NOs 1 to 14000, preferably wherein the CpGs are the CpGs identified at nucleotide position 61 to 62 in SEQ ID NOs 1 to 1000.

[0734] The panel may consist of at least 2000 CpGs selected from the CpGs identified at nucleotide position 61 to 62 in SEQ ID NOs 1 to 14000, preferably wherein the CpGs are the CpGs identified at nucleotide position 61 to 62 in SEQ ID NOs 1 to 2000.

[0735] The panel may consist of at least 3000 CpGs selected from the CpGs identified at nucleotide position 61 to 62 in SEQ ID NOs 1 to 14000, preferably wherein the CpGs are the CpGs identified at nucleotide position 61 to 62 in SEQ ID NOs 1 to 3000.

[0736] The panel may consist of at least 4000 CpGs selected from the CpGs identified at nucleotide position 61 to 62 in SEQ ID NOs 1 to 14000, preferably wherein the CpGs are the CpGs identified at nucleotide position 61 to 62 in SEQ ID NOs 1 to 4000.

[0737] The panel may consist of at least 5000 CpGs selected from the CpGs identified at nucleotide position 61 to 62 in SEQ ID NOs 1 to 14000, preferably wherein the CpGs are the CpGs identified at nucleotide position 61 to 62 in SEQ ID NOs 1 to 5000.

[0738] The panel may consist of at least 6000 CpGs selected from the CpGs identified at nucleotide position 61 to 62 in SEQ ID NOs 1 to 14000, preferably wherein the CpGs are the CpGs identified at nucleotide position 61 to 62 in SEQ ID NOs 1 to 6000.

[0739] The panel may consist of at least 7000 CpGs selected from the CpGs identified at nucleotide position 61 to 62 in SEQ ID NOs 1 to 14000, preferably wherein the CpGs are the CpGs identified at nucleotide position 61 to 62 in SEQ ID NOs 1 to 7000.

[0740] The panel may consist of at least 8000 CpGs selected from the CpGs identified at nucleotide position 61 to 62 in SEQ ID NOs 1 to 14000, preferably wherein the CpGs are the CpGs identified at nucleotide position 61 to 62 in SEQ ID NOs 1 to 8000.

[0741] The panel may consist of at least 9000 CpGs selected from the CpGs identified at nucleotide position 61 to 62 in SEQ ID NOs 1 to 14000, preferably wherein the CpGs are the CpGs identified at nucleotide position 61 to 62 in SEQ ID NOs 1 to 9000.

[0742] The panel may consist of at least 10000 CpGs selected from the CpGs identified at nucleotide position 61 to 62 in SEQ ID NOs 1 to 14000, preferably wherein the CpGs are the CpGs identified at nucleotide position 61 to 62 in SEQ ID NOs 1 to 10000.

[0743] The panel may consist of at least 11000 CpGs selected from the CpGs identified at nucleotide position 61 to 62 in SEQ ID NOs 1 to 14000, preferably wherein the CpGs are the CpGs identified at nucleotide position 61 to 62 in SEQ ID NOs 1 to 11000.

[0744] The panel may consist of at least 12000 CpGs selected from the CpGs identified at nucleotide position 61 to 62 in SEQ ID NOs 1 to 14000, preferably wherein the CpGs are the CpGs identified at nucleotide position 61 to 62 in SEQ ID NOs 1 to 12000.

[0745] The panel may consist of at least 13000 CpGs selected from the CpGs identified at nucleotide position 61 to 62 in SEQ ID NOs 1 to 14000, preferably wherein the CpGs are the CpGs identified at nucleotide position 61 to 62 in SEQ ID NOs 1 to 13000.

[0746] The panel may consist of all CpGs identified in SEQ ID NOs 1 to 14000.

[0747] In some embodiments the array is not an Infinium MethylationEPIC BeadChip array or an Illumina Infinium HumanMethylation450 BeadChip array.

[0748] Separately or additionally, in some embodiments the number of CpG-specific oligonucleotide probes of the array is 482,000 or less, 480,000 or less, 450,000 or less, 440,000 or less, 430,000 or less, 420,000 or less, 410,000 or less, or 400,000 or less, 375,000 or less, 350,000 or less, 325,000 or less, 300,000 or less, 275,000 or less, 250,000 or less, 225,000 or less, 200,000 or less, 175,000 or less, 150,000 or less, 125,000 or less, 100,000 or less, 75,000 or less, 50,000 or less, 45,000 or less, 40,000 or less, 35,000 or less, 30,000 or less, 25,000 or less, 20,000 or less, 15,000 or less, 10,000 or less, 5,000 or less, 4,000 or less, 3,000 or less or 2,000 or less.

[0749] The CpG panel may comprise any set of CpGs defined in the assays of the invention described herein.

[0750] The arrays of the invention may comprise one or more oligonucleotides comprising any set of CpGs defined in the assays of the invention, wherein the one or more oligonucleotides are hybridized to corresponding oligonucleotide probes of the array.

[0751] The invention also encompasses a process for making a hybridized array described herein, comprising contacting an array according to the present invention with a group of oligonucleotides comprising any set of CpGs defined in the assays of the invention.

[0752] Any of the arrays as defined herein may be comprised in a kit. The kit may comprise any array as defined herein together with instructions for use.

[0753] The invention further encompasses the use of any of the arrays as defined herein in any of the assays for determining the methylation status of CpGs for the purposes of predicting the presence or development of cancer in an individual.

[0754] The following Examples serve to illustrate but not to limit the invention.

### EXAMPLES

[0755] In the Examples described herein, WID-OC-Index is a cancer index value wherein the index value has been determined by assaying in a population of DNA molecules derived from a given sample from an individual the methylation status of a panel of CpGs selected from the CpGs defined by SEQ ID NOs: 1 to 14,000.

[0756] In some instances within the Examples, all CpGs defined by SEQ ID NOs: 1 to 14,00 have been included in the panel which has been assayed to obtain a cancer index value. In addition, specific sub-selections of CpGs from among the 14,000 CpGs defined by SEQ ID NOs: 1 to 14,000 have been included in the panel which has been assayed to obtain a cancer index value. In these instances, the cancer index value's ability to discriminate between cancer positive and cancer negative women is described, wherein discriminatory ability of the index is characterised by AUC and received operating characteristics.

[0757] To date, DNA methylation of only a very few genes has been assessed in cervical smear samples from women with and without ovarian cancer and not one of these very small studies reached significance after multiple test adjustment (17).

[0758] Here, the inventors performed an epigenome-wide DNAme analysis in cervical smear samples from women who were subsequently diagnosed with ovarian cancer, and in matched controls, and established the WID-OC-index (Women's risk IDentification for Ovarian Cancer index) which was further validated in an independent set of cervical samples. The inventors established that the WID-OC signature is not driven by tumour DNA, is high in healthy women with a BRCA1 mutation and has a very high sensitivity/specificity that also identifies women with endometrial cancer, which also arises from Müllerian Duct epithelial cells. In addition, the inventors assessed the WID-OC-index in normal fimbrial and high grade serous tissue and cell lines and a large range of tissue samples and showed that the WID-OC index is significantly associated with the rate of BRCA-1/2 germline-mediated cancer formation.

### Materials and Methods

### Study Design and Epidemiological Data Acquisition

[0759] The study was conducted as part of a multi-centre study involving several recruitment sites in five European countries (i.e. the UK, Czech Republic, Italy, Norway and Germany). Women over the age of 18 were eligible to participate in the study who had not undergone a previous hysterectomy, had not received treatment (within 2 years of recruitment) for a non-gynaecological cancer, were not pregnant or menstruating at time of recruitment and had not undergone a cervical smear in the last 12 weeks. Prior to taking part, each prospective study volunteer was given a Participant Information Sheet as well as a Consent Form and the rationale for the study was explained. Additional resources, including an explanatory video and further online resources, were also made available. Women diagnosed with ovarian or endometrial cancer (case) or a non-malignant benign gynaecological condition (control) were approached during outpatient hospital clinics, while women recruited with a documented BRCA1 or BRCA2 mutation or as healthy volunteers from the general population (control) were approached via outreach campaigns, public engagement, and as part of cervical screening programmes. After signing an informed consent, participants completed an epidemiological questionnaire as well as a feedback form after their participation. The study itself is a sub-study of the FORECEE (4C) Programme, which has ethical approval from the UK Health Research Authority (REC 14/LO/1633).

[0760] The epidemiological survey was administered via the Qualtrics web-based survey application on dedicated iPads. The survey contained questions relating to current and historical health habits, relevant risk factors, as well as obtaining a thorough medical and obstetric history. Cervical samples were collected at appropriate clinical venues by trained staff and the cervical smears were carried out by a small group of research midwives or physicians with a view to establishing standard practice.

[0761] Biological samples and survey data were pseudo-anonymised using a participant study number. Each recruitment site maintained a securely stored file linking personal identifiers to the study number. Following sample taking, an email survey was sent to each participant, enabling them to feedback with respect to the recruitment process. Women with a current diagnosis of (a) primary malignant ovarian cancer of high grade serous, endometrioid, mucinous or clear cell morphology or (b) endometrial cancer with poor prognostic features (endometrioid, serous or clear cell morphology of Grade III and/or stage >IB) and recruited prior to receiving any systemic chemotherapy treatment or surgery or radiotherapy were eligible as ovarian or endometrial cancer cases. Cancer histological data was collected post-recruitment either by clinicians directly involved in the diagnosis/treatment of the cancer cases or by a nominated data manager with access to the in-house hospital systems.

### Cervical Smear Sample Collection

[0762] Cervical smears were taken at collaborating hospitals and recruitment centres using the ThinPrep system (Hologic Inc., cat #70098-002). Cervical cells were sampled from the cervix using a cervix brush (Rovers Medical Devices, cat #70671-001) which was rotated 5 times through 360 degrees whilst in contact with the cervix to maximise cell sampling. The brush was removed from the vagina and immersed in a ThinPrep vial containing Preserve-cyt fluid and then pushed against the bottom of the vial 10 times to facilitate release of the cells from the brush into the solution. The sample vial was sealed and stored locally at room temperature.

### Primary Fallopian Tube Secretory Epithelial Cell Culture

[0763] Patients undergoing a salpingectomy at University College London Hospitals (UCLH), were consented in order to donate Fallopian Tube tissue surplus to diagnostic requirements following UCL ethical guidelines (women provided written informed consent and samples were collected under the NRES Committee London-Surrey Borders Research Ethics Committee approval; 14/LO/1633). Fimbrial Fallopian Tube secretory epithelial cells were isolated and cultured as described previously (T. E. Bartlett et al., Epigenetic reprogramming of fallopian tube fimbriae in BRCA mutation carriers defines early ovarian cancer evolution. Nat Commun 7, 11620 (2016)) with slight modifications. Briefly, fimbrial tissues were carefully excised by an experienced pathologist, macerated and digested in a dissociation medium (0.05% collagenase and 0.01% DNase in DMEM) for 48 h at 4° C. Cells were harvested by centrifugation and resuspended in DMEM/F-12 supplemented with 2% Ultroser G (Pall Corporation, France) and 1% penicillin-streptomycin, transferred into a tissue culture flask. Cells were phenotyped: firstly by determining mRNA expression of PAX8 (Müllerian marker) and Cytokeratin 7 (CK7, epithelial marker) using quantitative PCR; and secondly by immunofluorescent staining. All experiments were performed before the cells started to senesce, and all FT cells were used without modification (such as hTERT or SV40T antigen immortalisation) in order to enhance self-renewal.

### Real-Time PCR Analysis

[0764] MethyLight, a quantitative PCR analysis specific to bisulfite converted DNA, was performed on cervical smear samples from 20 endometrial cancer patients, 20 ovarian cancer patients, and 20 controls collected as part of the FORCEE project. Primers and probes specific to ZNF154: forward primer: 5′-TTT ATT TTA GGT TTG ACG TGG GTT T-3′, reverse primer: 5′-CGT CGT CCC TCC TAC ACG AA-3′, probe sequence: 5′-6-Fam-TAG GGC GGC GTC GTT AAG GTT TAG ACG-BHQ-1-3′ were used. Ct values of the target reaction were normalised for DNA concentration using a reference gene reaction against COL2A1: forward primer: 5′-TCT AAC AAT TAT AAA CTC CAA CCA CCA A-3′, reverse primer: 5′-GGG AAG ATG GGA TAG AAG GGA ATA T-3′, probe sequence: 5′-6-Fam-CCT TCA TTC TAA CCC AAT ACC TAT CCC ACC TCT AAA-BHQ-1-3′. Specificity of the reactions for methylated DNA was confirmed separately using SssI-treated fully methylated human white blood cell DNA. The percentage of fully methylated molecules at a specific locus was calculated by dividing the ZNF154:COL2A1 ratio of a sample by the ZNF154:COL2A1 ratio of the SssI-treated human white blood cell DNA and multiplied by 100. Results are expressed as ‘PMR’ (percentage of methylated reference).

### Sample Processing and DNA Extraction

[0765] When preparing for sample storage in the laboratory, cervical smear samples were poured into 50 ml Falcon tubes and left to sediment at room temperature for 2 hours. 1 mL wide bore tips were then used to transfer the enriched cellular sediment into a 2 mL vial. The cervical sediments were washed twice with PBS, lysed, and stored temporarily at −20° C. ahead of extraction. For ovarian tissues, DNA was extracted from 30 mg of tissue using the AllPrep DNA/RNA Mini Kit (#80204, Qiagen Ltd), following the manufacturer's protocol. DNA concentration and quality absorbance ratios were measured using Nanodrop-8000, Thermoscientific Inc. Extracted DNA was stored at −80° C. until further analysis.

### DNA Methylation Array Analysis

[0766] Cervical, and Fallopian Tube and ovarian cancer cell line DNA was normalised to 25 ng/μl and 500 ng total DNA was bisulfite modified using the EZ-96 DNA Methylation-Lightning kit (Zymo Research Corp, cat #D5047) on the Hamilton Star Liquid handling platform. 8 μl of modified DNA was subjected to methylation analysis on the Illumina InfiniumMethylation EPIC BeadChip (Illumina, CA, USA) at UCL Genomics according to the manufacturer's standard protocol.

### Methylation Analysis

[0767] All methylation microarray data were processed through the same standardised pipeline. Raw data was loaded using the R package minfi. Any samples with median methylated and unmethylated intensities <9.5 were removed. Any probes with a detection p-value >0.01 were regarded as failed. Any samples with >10% failed probes, and any probes with >10% failure rate were removed from the dataset. Beta values from failed probes (approximately 0.001% of the dataset) were imputed using the impute.knn function as part of the impute R package.

[0768] Non-CpG probes (2,932), SNP-related probes as identified by Zhou et.al. (W. Zhou, P. W. Laird, H. Shen, Comprehensive characterization, annotation and innovative use of Infinium DNA methylation BeadChip probes. Nucleic Acids Res 45, e22 (2017)) (82,108), and chrY probes were removed from the dataset. An additional 6,102 previously identified probes that followed a trimodal methylation pattern characteristic of an underlying SNP were removed.

[0769] Background intensity correction and dye bias correction was performed using the minfi single sample preprocessNoob function. Probe bias correction was performed using the beta mixture quantile normalisation (BMIQ) algorithm.

[0770] The fraction of immune cell contamination, and the relative proportions of different immune cell subtypes in each sample, were estimated using the EpiDISH algorithm using the epithelial, fibroblast and immune cell reference dataset. The top 1,000 most variable probes (ranked by standard deviation) were used in a principal component analysis. Statistical tests were performed in order to identify any anomalous associations between plate, sentrix position, date of array processing, date of DNA creation, study centre, immune contamination fraction, age, type (case versus control) and the top ten principal components. Finally, two-thirds of the discovery dataset was randomly selected for use as the training dataset and the remaining third was allocated to the internal validation dataset. This split was carried out once, and the same training and validation sets were used in all subsequent analyses.

[0771] 113 samples were downloaded from the ENCODE database (https://www.encodeproject.org/). The beta mixture quantile normalisation was applied to these samples after using minfi to extract beta values.

### Statistical Analyses for Classifier Development

[0772] Contamination by immune cells presented a challenge with respect to the identification of differentially methylated positions (DMPs) as differential methylation that occurred solely in epithelial cells was diminished in samples with high IC and vice versa. In order to overcome this, the inventors linearly regressed the beta values on IC for each CpG site, the linear models being fitted to cases and controls separately. The intercept points at IC=0 were used as estimates of mean beta values in cases and controls in a pure epithelial cell population. The difference between these intercept points provided a delta-beta estimate in epithelial cells. The difference between intercept points at IC=1 provided immune cell delta-beta estimates. A list of ranked CpGs was produced according to delta-beta estimates in epithelial cells.

[0773] The R package glmnet was used to train classifiers with a mixing parameter value of alpha=0 (ridge penalty) and alpha=1 (lasso penalty) with binomial response type. Data from the training dataset were used to fit the classifiers. The top n CpGs from the list of CpGs ranked by epithelial delta-beta estimates were used as inputs to the classifier. Ten-fold cross-validation was used inside the training set by the cv.glmnet function in order to determine the optimal value of the regularisation parameter lambda. The AUC was used as a metric of classifier performance which was evaluated on the internal validation dataset as a function of n, the number of CpGs used as inputs during training. The maximum value of n was 30,000.

[0774] The optimal classifier was selected based on the highest AUC obtained in the internal validation dataset. Once the optimal number of inputs was determined, the training and internal validation datasets were combined and the classifier was refitted using the entire discovery dataset with alpha and lambda fixed to their optimal values. This finalised classifier was then applied to the external validation dataset and the corresponding AUC was computed.

[0775] Denoting the top n CpGs as x₁, . . . , xₙ and the regression coefficients from the trained classifier as w₁, . . . , wₙ then WID-OC-index=Σᵢ₌₁ⁿ(wᵢxᵢ−μ)/σ where μ and σ are defined as the mean and standard deviation of the quantity Σᵢ₌₁ⁿ wᵢxᵢ in the training dataset (that is, the index is scaled to have zero mean and unit standard deviation in the training dataset).

### Enrichment Analyses

[0776] The epithelial delta-beta estimates were used to compute the top 1,000 hyper and hypo CpGs. These were used as inputs to the eFORGE 2.0 tool 20 (accessed at https://eforge.altiusinstitute.org/). Data from the “Consolidated Roadmap Epigenomics DHS” were used for the analysis. The default options of 1 kb proximity window, 1,000 background repetitions, and strict and marginal significance thresholds of 0.01 and 0.05 were used.

[0777] A gene set enrichment analysis (GSEA) 21 was carried out by first selecting for each gene TSS200 region in the CpG with the largest epithelial delta-beta estimate (both hyper- and hypo-methylated). Genes were then ranked according to the absolute value of these delta-beta estimates. The C2 curated gene set, c2.all.v6.2.symbols.gmt, was downloaded from MSigDB. The fgsea R package was used to perform the enrichment analysis with parameters minSize, maxSize, and nperm set to 15, 500, and 10,000 respectively.

### Estimation of Tumour DNA Proportion

[0778] The Epidish algorithm provides an estimate of cell type proportions within a given sample. A reference dataset consisting of CpGs that are unique to each cell type must be provided. In order to construct such a reference dataset 11 epithelial, 7 fibroblast, 48 immune, and 11 high grade serous ovarian cancer cell line samples were downloaded from GEO (Additional Data 1). Each cell type was in turn compared to the other three cell types (which were combined into one group) in order to identify CpGs that are unique to that cell type. A Wilcoxon rank sum test was used to test for differential methylation at each CpG. For epithelial cells any CpGs with a p-value >0.01 after false discovery rate (FDR) adjustment and an absolute difference in methylation >0.54 were selected (204 in total). For fibroblasts any CpGs with FDR adjusted p-values >0.01 and differential methylation >0.7 were selected (208 in total). For immune cells any CpGs with FDR adjusted p-values >0.01 and differential methylation >0.89 were selected (225 in total). For HGSOC cells any CpGs with FDR adjusted p-values >0.01 and differential methylation >0.77 were selected (203 in total). The final reference dataset therefore consisted of 840 CpGs.

[0779] It was observed that the inferred proportion of tumour DNA and epithelial cells were strongly associated in control samples. Local polynomial regression fitting (using the loess R function) was used to regress the inferred tumour DNA proportion on the epithelial proportion (in control samples only, FIG. 11A) and the residuals were used as estimates for tumour DNA proportion.

### Estimation of Epithelial and Immune Variance.

[0780] The inventors aimed to estimate how much variability across the 14,000 CpGs in the WID-OC-index could be attributed to epithelial cells or immune cells. An example of a CpG with high variability in epithelial cells and low variability in immune cells is given in FIG. 11B. For each CpG the inventors applied the following model. The inventors assumed that the epithelial beta values follow a beta distribution Beta(β|a₀, b₀) with shape parameters a₀>0 and b₀>0, and that immune beta values followed Beta(β|a₁, b₁) with shape parameters a₁>0 and b₁>0. The inventors assumed that each sample is a combination of epithelial and immune cells and that ρᵢϵ[0,1] is the proportion of immune cells in sample i, i=1, . . . , N. The quantities ρᵢ were obtained from the EpiDISH algorithm. The following log likelihood function was numerically optimised with respect to a₀, b₀, a₁, b₁:

$$\\ L ( {a}_{0} , {b}_{0} , {a}_{1} , {b}_{1} ) = - \frac{1}{N} {\sum }_{i = 1}^{N} log [ ( 1 - {ρ}_{i} ) Beta ( {β}_{i} \vert {a}_{0} , {b}_{0} ) + {ρ}_{i} Beta ( {β}_{i} \vert {a}_{1} , {b}_{1} ) ]$$

and the variance of the epithelial and immune beta distributions were used as estimates of epithelial and immune variance.

### SNP Genotyping, QC and Imputation

[0781] In total, 74 ovarian cancer case subjects and 225 controls from the methylation discovery cohort were genotyped using the Illumina 650k Infinium Global Screening Array (GSA). Whole blood DNA was normalised to 75 ng/μl and a total of 300 ng applied to the Infinium Global Screening Array—24 V2 (Illumina, CA, USA) at UCL Genomics according to the manufacturer's standard protocol.

[0782] One ovarian cancer case and one control subject from this cohort failed to genotype. Genotype calling was performed using GenomeStudio, with genetic variants found to be clustering poorly removed from further analyses. For duplicate genetic variant pairs, the variant within each pair with the lowest calling and clustering score was excluded. Autosomal SNPs were used in subsequent QC and PRS analyses (except for checks for sex mismatches, where the X chromosome was used to infer sex).

[0783] General subject and single nucleotide polymorphism (SNP) quality control (QC) was performed using PLINK version 1.9. Four ovarian cancer cases and eight controls with a call rate less than 95% were excluded. Three controls were further removed due to genetically inferred sex not being female. Genetic variants with a missing genotype rate greater than 5%, minor allele frequency (MAF) less than 1% or a significant departure from Hardy-Weinberg equilibrium (p-value <5×10⁻⁶) were excluded.

[0784] KING, a relatedness inference algorithm, was used to identify duplicate/monozygotic twin or first-degree relative pairs. One control subject pair was identified as being a duplicate/monozygotic twin pair, and nine control pairs were inferred to be first-degree relatives. The subject within each related pair with the lowest call rate was excluded. After performing QC, 225 ovarian cancer case subjects, 816 controls and 479,105 variants were retained in the SNP discovery sample.

[0785] Non-European subjects were identified by plotting the top two principal components, generated using GCTA version 1.26.0, for the SNP discovery samples and 270 HapMap phase II release 23 samples (CEU, YRI, JPT and CHB individuals) downloaded in PLINK-formatted binary files. Subjects found not to cluster around HapMap European samples were excluded from further analyses. After excluding non-European subjects, 217 ovarian cancer cases and 752 controls were retained in the SNP discovery sample.

[0786] Using the Michigan Imputation Server and Haplotype Reference Consortium (HRC) reference panel, the SNP discovery dataset went through further QC before being phased (Eagle2) and imputed. Variants where strand, allele, genetic position or allele frequencies were not concordant with the HRC reference panel were removed before phasing and imputation using Strand Tools. After imputation, variants with imputation R²<0.5 were removed. LD-based clumping was performed to retain a set of independent variants (r²>0.1). 28 SNPs, associated with ovarian cancer, were used to develop an ovarian cancer polygenic risk score (PRS; Additional Data 3). The inventors constructed an ovarian cancer PRS for each subject in the discovery cohort, such that the PRS is equal to:

$$\\ {PRS}_{j} = {\sum }_{i = 1}^{28} {\hat{β}}_{ι} {x}_{ij}$$

where, \hat{β}ₗ is the log odds ratio for the i-th SNP taken from publicly available ovarian cancer summary association results and xᵢⱼ is the number of copies of the effect allele present in each discovery cohort subject. The ovarian cancer summary results used were based on weights given in Phelan et al. (C. M. Phelan et al., Identification of 12 new susceptibility loci for different histotypes of epithelial ovarian cancer. Nat Genet 49, 680-691 (2017)), which were downloaded using GWAS Catalog (Accession number: GCST004415). Scores were generated using PLINK version 1.9.

### Example

[0787] The inventors performed an epigenome-wide DNAme analysis in cervical smear samples from women who were subsequently diagnosed with ovarian cancer, and in matched controls, and established the WID-OC-index (Women's risk IDentification for Ovarian Cancer index) which the inventors further validated in an independent set of cervical samples. The inventors established that the WID-OC signature is not driven by tumour DNA, is high in healthy women with a BRCA1 mutation and has a very high sensitivity/specificity that also identifies women with endometrial cancer, which also arises from Müllerian Duct epithelial cells. In addition, the inventors assessed the WID-OC-index in normal fimbrial and high grade serous tissue and cell lines and a large range of tissue samples and showed that the WID-OC index is significantly associated with the rate of BRCA-1/2 germline-mediated cancer formation.

[0788] For the Discovery Set (FIG. 5), the inventors collected samples from 242 women with ovarian cancers from 15 European centres before a definitive histological diagnosis was undertaken (either during surgery or via a percutaneous biopsy) and 869 women without a cancer (593 from the general population and 276 from women attending hospital for benign women-specific conditions) (Table 6; samples from a greater proportion of younger women were deliberately used in the discovery set in order to develop a risk predictor applicable also to younger women; the external validation set was composed of age-matched cases and controls). Epigenome-wide DNAme was analysed using an Illumina Infinium EPIC bead chip array that encompasses over 850,000 CpG sites.

### Sample Heterogeneity and Differential Methylation

[0789] The inventors assessed the number of CpGs which were significantly differentially methylated between cancer cases and controls (FIG. 1A); after Bonferonni multiple test adjustment, 91 CpGs showed significantly differential methylation. Previously the inventors found that methylation differences may vary due to immune cell-type composition in cases compared to controls (A. E. Teschendorff et al., An epigenetic signature in peripheral blood predicts active ovarian cancer. PLoS. One 4, e8274 (2009). Hence, the inventors assessed the level of cell type heterogeneity in each cervical smear sample using HepiDISH, an algorithm that infers the relative proportion of epithelial cells, fibroblasts, and seven subtypes of immune cells (IC) in each sample. The cell-type distributions were broadly similar between cancer cases and controls although there was a significantly greater proportion of epithelial cells in cancer cases (FIG. 1B; this remained significant after adjusting for age and menopausal status). A similar trend was observed in the external validation dataset but was not significant (FIG. 6A).

[0790] Identification of CpGs with differential methylation between cases and controls was hampered by contaminating ICs, since any differential methylation in epithelial cells was greatly diminished in samples with high IC. In order to infer which CpGs may contain a potential discriminatory signal the inventors developed a statistical protocol to estimate the delta-beta (i.e. difference in mean proportion of methylated cells) between cases and controls in epithelial and immune cells. The inventors linearly regressed beta values on IC fraction in both cases and controls separately. The difference between the two points where these lines intercept the y-axis at IC=0 gives an estimate of the delta-beta between cases and controls in pure epithelial cells. Conversely, the difference between intercept points at the IC=1 axis gives a delta-beta estimate in immune cells.

### Development of Discriminatory Index

[0791] In order to derive a diagnostic methylation signature, termed the WID-OC-index, the inventors used ridge and lasso regression to classify individuals as cases or controls. Classifiers were trained on two thirds of the discovery dataset (572 cancer-free controls, 159 ovarian cancer cases) and the remaining one third was used as an internal validation set (297 controls, 83 cases) with the intention of evaluating their performance as a function of the number of CpGs used to construct the index. The area under the receiver operator characteristic curve (AUC) was used as a measure of predictive performance. CpGs were ranked according to their epithelial delta-beta.

[0792] Predictive performance was evaluated as a function of the number of CpGs used to train the classifier using the internal validation dataset and optimal performance of 0.78 (95% CI: 0.72-0.84) was achieved using 14,000 CpGs with ridge regression (FIG. 1C). In samples with an immune cell proportion <0.5 the AUC was 0.82 (FIG. 1D; 95% CI: 0.75-0.88), and in those with a proportion >0.5 the AUC was 0.71 (95% CI: 0.60-0.82). The WID-OC-index was not associated with IC fraction in controls (FIG. 1E, linear regression coefficients of 0.03, p=0.81), but a strong negative association was observed in cancer cases (linear regression coefficient of −0.76, p-value=0.005). Classifiers were also developed after ranking CpGs according to immune delta-betas and a combined ranking based on both epithelial and immune delta-betas but these approaches offered inferior performance.

[0793] The inventors developed a statistical model to infer the variance in epithelial and immune cells at each of the 14,000 CpG sites used in the WID-OC-index, and classified each CpG as “epithelial” (92.4%), “shared” (7.1%), or “immune” (0.5%) as shown in FIG. 1F. These findings suggest that the discriminatory signal originates primarily in epithelial cells and the discriminatory power is diminished in samples with higher levels of immune cells.

[0794] The inventors found that the index was highly depleted of CpG islands and enriched for Open Sea regions (FIG. 1G). Ridge regression combines information from all input CpGs in contrast to lasso regression, which typically selects a small subset of inputs. Ridge regression offered consistently superior performance suggesting that the discriminatory signal is most robustly extracted by combining a large number of comparatively weak signals from multiple CpG sites. The inventors ranked the 14,000 CpGs used to define the WID-OC-index according to the absolute value of the regression coefficients from the ridge model. In order to assess how informative the top CpG sites are the inventors trained sub-classifiers on the top n sites (FIG. 1H). The inventors observed that AUCs of 0.74 and 0.76 can be achieved with the top 500 and 3,000 CpGs respectively indicating that these subsets are particularly informative. The inventors also trained sub-classifiers after removing the top n CpGs, and on subsets of 500 CpGs after partitioning the ranked list into bins of size 500. In both cases, the inventors found that a substantial predictive signal is present. These observations suggest that the predictive signal is widely distributed among Open Sea CpGs with a high degree of redundancy.

### External Validation

[0795] A separate independent external validation dataset consisting of 47 ovarian cancer cases and 225 controls was used to validate the index performance (Table 6). The WID-OC-index was computed for each woman (FIG. 2A) resulting in an AUC of 0.76 (95% CI: 0.68-0.84) and 0.77 (95% CI: 0.67-0.88) and 0.75 (95% CI: 0.63-0.87) for IC ≤0.5 and >0.5 samples respectively (FIG. 2B).

[0796] The vast majority of ovarian cancers arise from the Fallopian Tube—a part of the Müllerian Duct system. In order to assess whether the WID-OC-index reflects cancer predisposition of other parts of the Müllerian Duct like the endometrium, the inventors assessed its performance to discriminate women with and without endometrial cancer. Analysing 73 cervical samples from women with endometrial cancer, and the 297 control samples from the ovarian cancer internal validation, the inventors obtained an AUC of 0.92 (CI: 0.88-0.95; FIGS. 2C and 2D).

[0797] In order to assess whether the WID-OC-index is also informative in healthy women who are known to have a very high probability of developing ovarian cancer in the future, the inventors analysed a separate dataset consisting of cervical smear samples from 57 healthy BRCA1 mutation carriers (who have an up to 40 fold increased cancer risk (L. C. Hartmann, N. M. Lindor, Risk-Reducing Surgery in Hereditary Breast and Ovarian Cancer. N Engl J Med 374, 2404 (2016))) and 114 controls. The inventors observed an AUC of 0.62 (95% CI: 0.52-0.71) overall with 0.61 (95% CI: 0.48-0.74) and 0.65 (95% CI: 0.52-0.78) for IC ≤0.5 and >0.5 samples respectively. The inventors also analysed 53 women with a BRCA2 mutation and found that the discriminatory performance was poorer (0.54; 95% CI: 0.45-0.64; FIG. 7).

[0798] For each of the validation datasets the inventors computed odds ratios corresponding to quartiles defined on the internal validation dataset (Table 5). The cell-type composition of these three datasets was broadly similar to the discovery dataset used to develop the index and did not show any significant differences between cases and controls (FIG. 6).

Association with Epidemiological, Clinical and Technical Factors

[0799] The inventors investigated the relationship between the WID-OC-index and various epidemiological and clinical variables. A statistically significant association was found between the WID-OC-index and age in controls (correlation=0.52, p=10⁻³⁷). The Illumina 650k Infinium Global Screening Array was used to genotype matched blood samples from a subset of 74 cases and 255 controls in our internal validation dataset. The inventors computed a polygenic risk score (PRS; described in methods) for ovarian cancer prediction. The inventors found a correlation close to zero (−0.04, p=0.48) between the PRS and the WID-OC-index (FIG. 3B). The inventors compared different histologies and observed a significantly lower index in seven mucinous cancers compared to serous high grade and those classified as other (invasive epithelial ovarian cancers which do not belong to the four main categories; FIG. 3C). The WID-OC-index was significantly higher in stage III/IV cancers compared to stage I/II cancers (FIG. 3D). No significant association was found between the WID-OC-index and family history (FIG. 8A), age at menarche (FIG. 8B), oral contraceptive pill use (FIG. 8C), or ethnicity (FIG. 8D). The inventors observed a trend of increasing WID-OC-index values with respect to age at last period (FIG. 8E; linear regression p-value=0.01), and parity in post-menopausal women (FIG. 8F; not significant).

[0800] The inventors investigated whether any association existed between the WID-OC-index and various technical parameters including date of sample processing, plate number (samples were processed on 96 sample plates) and sentrix position but no significant associations were found. The inventors compared the 593 control samples from healthy volunteers to 276 control samples taken from women presenting with benign women-specific conditions but did not find any significant differences (FIG. 9A). The inventors also observed no significant dependence on the time from sample collection to DNA extraction (FIG. 9B).

### Inferred Proportion of Tumour DNA

[0801] Due to the anatomical proximity between the cancer (i.e. ovary/Fallopian Tube) and the area from which the sample was taken (i.e. cervix), the inventors investigated whether the signal which discriminates between a case and a control is driven by tumour DNA draining from the peritoneal cavity via the Fallopian Tube and the uterus to the cervix or whether the signal is a generic risk signal retained in cervical epithelial cells. The inventors used 11 epithelial, 7 fibroblast, 42 immune cell, and 11 high grade serous ovarian cancer cell line samples (Additional Data 1) in order to develop a new reference panel for use with the EpiDISH algorithm (see Material and Methods). For each sample, the inventors obtained estimates of the proportion of DNA from each of the four cell types. The inventors observed that the proportion of tumour DNA in both cases and controls is close to zero, with the exception of two cases that were composed of approximately 50% tumour DNA (FIG. 4A).

[0802] In order to assess further the absence of tumour DNA in the cervical smear samples the inventors used MethyLight, a real time PCR based method, to amplify methylated ZNF 154, a pan-cancer marker primarily discovered in ovarian cancer. The inventors detected a strong signal in cervical smear samples from 20 endometrial cancer cases but not from 20 ovarian cancer patients or 20 cancer-free women (FIG. 4B), providing further evidence that the signal in cancer patients is not driven by tumour DNA.

### Cell Line Data

[0803] In order to evaluate further the nature and meaning of the DNA methylation signature which forms the WID-OC-index the inventors calculated the index in the fimbriae of the Fallopian Tube, the organ from which the vast majority of ovarian cancers arise and which originates from the Müllerian Duct, the embryological structure which also gives rise to the cervix. Due to the fact that the tissue contains a heterogenous set of various cells, the inventors isolated and cultured pure fimbrial cells (without any modification, see Methods) from surgical specimens. Interestingly the WID-OC-index was comparatively high in the normal fimbrial cells, as well as fimbrial cells from BRCA mutation carriers (FIG. 4C). Two cancer cell lines had higher WID-OC-index values compared to both the cervix-based WID-OC-index and the fimbrial cells. The observation that the discriminatory DNAme signature observed in the cervixes of ovarian cancer patients is more pronounced in the Fallopian Tube is suggestive of an epigenetic field defect in which DNAme patterns in the cervix resemble the epigenome of the cell of origin, the Fallopian Tube.

### ENCODE Samples

[0804] In order to assess additionally whether the WID-OC-index is reflective of a cell-specific program the inventors analysed all ENCODE samples for which EPIC array data were available (Additional Data 2). The inventors ranked and plotted the WID-OC-index in all primary cell samples and in vitro differentiated cell samples (FIG. 10). The inventors observed that those tissues at the highest risk of becoming cancerous in BRCA carriers—such as Fallopian Tube, breast, pancreas and prostate—had the highest WID-OC-index. In order to quantify this observation, the inventors correlated the proportion of cancers per organ which arise in BRCA1 and BRCA2 mutation carriers (P. Jonsson et al., Tumour lineage shapes BRCA-mediated phenotypes. Nature 571, 576-579 (2019)) with the WID-OC-index of the respective normal tissue and found correlations of 0.23 (p=0.22) and 0.43 (p=0.019) in BRCA1- and BRCA2-driven cancers respectively (FIGS. 4D and 4E).

eFORGE and Gene Set Enrichment Analysis

[0805] The eFORGE tool was used to search for enrichment of cell-type specific CpGs in the top 1,000 hyper- and hypo-methylated CpGs (FIGS. 4F and 4G). Hypo-methylated CpGs were consistent with a foetal-like epigenetic program with enrichment for foetal intestine, stem cells, and foetal lung. A gene set enrichment analysis was performed using the Broad Institute's Molecular Signatures database but no significantly enriched pathways were detected (Table S2).

### Cancer Index Values and Clinical Actions

[0806] Four sub-groups defined by ranges of cancer index values are specified in Table 7 as corresponding to preferred clinical actions, comprising intensified screening, administration of therapeutics and surgery. The subgroups are quartiles based on control samples from the internal validation set. That is, these values of the index split the control samples into four equally sized groups. Odds ratio values are calculated by comparing the number of cases and controls in a given quartile to the first quartile (which is taken as a reference). Odds ratio values are determined for ovarian cancer risk, endometrial cancer risk and BRCA1 mutation risk. For the endometrial cancers these estimates are based on the internal validation dataset. For example, a woman in the fourth quartile is roughly 15 times more likely to have endometrial cancer than a woman in the first quartile.

### Discussion

[0807] To date, the best performing risk prediction model which incorporates 17 established epidemiologic risk factors and 17 genome-wide significant SNPs using data from 11 case-control studies provided an AUC of 0.66 (M. A. Clyde et al., Risk Prediction for Epithelial Ovarian Cancer in 11 United States-Based Case-Control Studies: Incorporation of Epidemiologic Risk Factors and 17 Confirmed Genetic Loci. Am J Epidemiol 184, 579-589 (2016)). Here the inventors demonstrate that the WID-OC-index—an index that is purely based on a DNAme signature in cervical smear samples—is strongly associated with ovarian cancer risk and provides an AUC of 0.76. The inventors neither observed a striking association between the WID-OC-index and any of the known epidemiological risk factors for ovarian cancer (apart for a BRCA1 germline mutation), nor did the inventors find any evidence that the WID-OC-index is triggered by tumour DNA draining from the peritoneal cavity via the uterine cavity and detected by the cervical smear. Therefore, the inventors speculate that the striking ovarian cancer risk reflected by the WID-OC-index is due to an epigenetic Müllerian Duct differentiation defect assessed at the level of the uterine cervix (a part of the Müllerian Duct) using a DNAme signature. Several lines of evidence support this view: (i) the WID-OC-index is high in Fallopian Tube fimbrial cells and reflective of organs that are at high risk of a BRCA-mediated cancer; (ii) the index also identifies women with other cancers arising from the Müllerian Duct (i.e. endometrial cancer); (iii) HOXA 9, 10 and 11 genes regulate the differentiation of the Müllerian Duct into Fallopian Tube, uterus and cervix, respectively, and given that serous, clear cell/endometrioid and mucinous cancers express these genes differentially, may reflect their origin. The fact that the inventors observe a decrease of the WID-OC-index from serous to mucinous cancers again supports the view that a “shift” of epigenetic differentiation (i.e. differentiation of Fallopian Tube reflected in cervical epithelial cells) predisposes individuals to ovarian cancer formation; (iv) Given that the index is more discriminatory in samples with a high epithelial cell content and that the index almost exclusively consists of CpGs which are highly variable in epithelial but not in immune cells attests to this.

[0808] Overall, the inventors provide substantial evidence that an epigenetic differentiation defect in easy-to-access epithelial samples is strongly associated with cancer risk. The inventors' findings need to be further validated in a cohort-based setting; our observation (unpublished) that long-term storage (i.e. several years) of smear samples within the fluid which is used for liquid based cytology (e.g. Preservcyt) strongly impacts on DNA methylation with the least impact on CpG within a CpG islands and the strongest impact on Open Sea CpGs (i.e. CpGs which are the main contributors to our signature) requires prospectively collected cohorts with samples processed and DNA extracted ideally within a few weeks of sample collection.

TABLE 5A

| | Con- | Can- | | | | |
|---|---|---|---|---|---|---|
| Quantile | trol | cer | OR (unadjusted) | | OR (adjusted) | |
| (−2.38, −0.57) | 75 | 3 | 1.00 | (reference) | 1.00 | (reference) |
| (−0.57, −0.21) | 74 | 10 | 3.25 | (0.93, 15.68) | 2.38 | (0.56, 12.99) |
| (−0.21, 0.17) | 74 | 13 | 4.2 | (1.27, 19.79) | 3.65 | (0.87, 19.42) |
| (0.17, 2.21) | 74 | 57 | 18.2 | (6.33, 79.95) | 10.26 | (2.89, 49.1) |

TABLE 5B

| | Con- | Can- | | |
|---|---|---|---|---|
| Quantile | trol | cer | OR (unadjusted) | OR (adjusted) |
| (−2.38, −0.57) | 59 | 2 | 1.00 (reference) | 1.00 (reference) |
| (−0.57, −0.21) | 57 | 6 | 2.94 (0.62, 22.94) | 4.88 (0.85, 41.76) |
| (−0.21, 0.17) | 49 | 6 | 3.42 (0.72, 26.71) | 4.57 (0.77, 40.12) |
| (0.17, 2.21) | 60 | 33 | 14.99 (4.26, 103.18) | 26.25 (5.89, 194.92) |

TABLE 5C

| Quantile | Control | Cancer | OR (unadjusted) | | OR (adjusted) |
|---|---|---|---|---|---|
| (−2.38, −0.57) | 75 | 0 | 1.00 | (reference) | 1.00 (reference) |
| (−0.57, −0.21) | 74 | 2 | 1.9 | (0.15, 60.54) | NA |
| (−0.21, 0.17) | 74 | 6 | 5.41 | (0.86, 142.55) | NA |
| (0.17, 2.21) | 74 | 65 | 57.12 | (12.24, 1351.82) | NA |

TABLE 5D

| | Con- | | | | | |
|---|---|---|---|---|---|---|
| Quantile | trol | Case | OR (unadjusted) | | OR (adjusted) | |
| (−2.38, −0.57) | 41 | 12 | 1.00 | (reference) | 1.00 | (reference) |
| (−0.57, −0.21) | 26 | 15 | 1.95 | (0.79, 4.95) | 1.66 | (0.64, 4.31) |
| (−0.21, 0.17) | 31 | 12 | 1.32 | (0.51, 3.39) | 1.2 | (0.42, 3.4) |
| (0.17, 2.21) | 16 | 18 | 3.76 | (1.49, 9.88) | 2.59 | (0.84, 8.08) |

TABLE 6A
External validation

| Factor | Group | Control | | Cancer | | OR | | p-value |
|---|---|---|---|---|---|---|---|---|
| Age (years) | <52 | 91 | (40%) | 15 | (32%) | 1.00 | (reference) | — |
| | 52-64 | 85 | (38%) | 15 | (32%) | 1.07 | (0.49, 2.35) | 0.86 |
| | >64 | 49 | (22%) | 17 | (36%) | 2.09 | (0.96, 4.62) | 0.06 |
| Age at menarche (years) | <12 | 34 | (15%) | 4 | (9%) | 0.62 | (0.16, 1.91) | 0.42 |
| | Dec-13 | 119 | (53%) | 29 | (62%) | 1.25 | (0.62, 2.59) | 0.54 |
| | >13 | 72 | (32%) | 14 | (30%) | 1.00 | (reference) | — |
| Parous | Yes | 166 | (74%) | 35 | (74%) | 1.00 | (reference) | — |
| | No | 59 | (26%) | 12 | (26%) | 0.97 | (0.45, 1.96) | 0.94 |
| Age at birth of first live child | <21 | 16 | (10%) | 3 | (9%) | 1.00 | (reference) | — |
| (years) | 21-27 | 61 | (38%) | 21 | (60%) | 1.76 | (0.51, 8.54) | 0.39 |
| | >27 | 84 | (52%) | 11 | (31%) | 0.68 | (0.18, 3.43) | 0.61 |
| Menopausal status | Pre | 79 | (35%) | 12 | (26%) | 1.00 | (reference) | — |
| | Post | 146 | (65%) | 35 | (74%) | 1.56 | (0.78, 3.32) | 0.21 |
| Age at menopause (years) | <46 | 82 | (37%) | 12 | (27%) | 1.13 | (0.41, 3.5) | 0.82 |
| | 46-52 | 91 | (41%) | 27 | (60%) | 2.27 | (0.92, 6.54) | 0.08 |
| | >52 | 47 | (21%) | 6 | (13%) | 1.00 | (reference) | — |
| BMI (kg/m2) | <25 | 117 | (52%) | 28 | (60%) | 1.00 | (reference) | — |
| | 25-30 | 57 | (25%) | 13 | (28%) | 0.96 | (0.45, 1.97) | 0.91 |
| | >30 | 51 | (23%) | 6 | (13%) | 0.5 | (0.18, 1.22) | 0.13 |
| Oral contraceptive use (pre | No | 29 | (39%) | 4 | (27%) | 1.00 | (reference) | — |
| menopausal only) | Yes | 46 | (61%) | 11 | (73%) | 1.69 | (0.51, 6.78) | 0.4 |
| Hormone replacement therapy | No | 71 | (93%) | 15 | (100%) | 1.00 | (reference) | — |
| (post menopausal only) | Yes | 5 | (7%) | 0 | (0%) | | | |
| Smoking | No | 190 | (85%) | 40 | (85%) | 1.00 | (reference) | — |
| | Yes | 34 | (15%) | 7 | (15%) | 0.99 | (0.38, 2.3) | 0.99 |
| First degree relatives with | 0 | 218 | (97%) | 46 | (98%) | 1.00 | (reference) | — |
| ovarian cancer | 1 | 7 | (3%) | 1 | (2%) | 0.76 | (0.03, 4.53) | 0.8 |
| | 2+ | 0 | (0%) | 0 | (0%) | | | |

TABLE 6B
Internal validation

| Factor | Group | Set | |
|---|---|---|---|
| Age (years) | <52 | 57 | (28%) |
| | 52-64 | 74 | (36%) |
| | >64 | 75 | (36%) |
| Menopausal status | Pre | 49 | (24%) |
| | Post | 157 | (76%) |
| Stage | T1 | 40 | (19%) |
| | T2 | 27 | (13%) |
| | T3 | 104 | (50%) |
| | T4 | 28 | (14%) |
| Grade | I | 24 | (12%) |
| | II | 10 | (5%) |
| | III | 159 | (77%) |
| Histology | Endometrioid | 15 | (7%) |
| | Mucinous | 12 | (6%) |
| | Clear cell | 15 | (7%) |
| | High grade serous | 142 | (69%) |
| | Other | 22 | (11%) |

TABLE 6C
External validation

| Factor | Group | Set | |
|---|---|---|---|
| Age (years) | <52 | 57 | (28%) |
| | 52-64 | 74 | (36%) |
| | >64 | 75 | (36%) |
| Menopausal status | Pre | 49 | (24%) |
| | Post | 157 | (76%) |
| Stage | T1 | 40 | (19%) |
| | T2 | 27 | (13%) |
| | T3 | 104 | (50%) |
| | T4 | 28 | (14%) |
| Grade | I | 24 | (12%) |
| | II | 10 | (5%) |
| | III | 159 | (77%) |
| Histology | Endometrioid | 15 | (7%) |
| | Mucinous | 12 | (6%) |
| | Clear cell | 15 | (7%) |
| | High grade serous | 142 | (69%) |
| | Other | 22 | (11%) |

TABLE 7

| WID-OC | Ovarian | Endometrial | BRCA1 | |
|---|---|---|---|---|
| ranges | cancer risk | cancer risk | mutation risk | Clinical Action |
| (−2.38, −0.57) | 1 | 1 | 1 | No specific screening or preventive measures required. |
| | | | | Repeat test in 2 years time. |
| (−0.57, −0.21) | 2.94 | 1.9 | 1.95 | (1) Testing for a BRCA1 or BRCA2 germline mutation; |
| | (0.62, 22.94) | (0.15, 60.54) | (0.79, 4.95) | (2) in postmenopaual women: Annual CA125 and cell- |
| | | | | free tumour DNA methylation in plasma/serum for early |
| | | | | detection of ovarian cancer and annual testing for cell- |
| | | | | free tumour DNA methylation in vaginal fluid. Repeat |
| | | | | test in 2 years time. |
| (−0.21, 0.17) | 3.42 | 5.41 | 1.32 | (1) Testing for a BRCA1 or BRCA2 germline mutation; |
| | (0.72, 26.71) | (0.86, 142.55) | (0.51, 3.39) | (2) Annual CA125 and cell-free tumour DNA methylation |
| | | | | in plasma/serum for early detection of ovarian cancer |
| | | | | and annual testing for cell-free tumour DNA methylation |
| | | | | in vaginal fluid. (3) Annual pelvic MRI in postmenopausal |
| | | | | women. (4) To consider taking any of the following risk |
| | | | | preventive drugs: Aspirin, oral contraceptive pill, |
| | | | | “selective estrogen receptor modulators” (SERMs) and |
| | | | | “selective progesterone receptor modulators” (SPRMs). |
| | | | | SERMs may include Anordin, Bazedoxifene, |
| | | | | Broparestrol, Clomifene, Cyclofenil, Lasofoxifene, |
| | | | | Ormeloxifene, Ospemifene, Raloxifene, Tamoxifen. |
| | | | | Preferably, the SERMs include Tamoxifen, Bazedoxifene |
| | | | | and Raloxifene. Preferably, the SPRMs include |
| | | | | Mifepristone, Ulipristal, Asoprisnil, Proellex, Onapristone, |
| | | | | Asoprisnil and Lonaprisan. (5) Repeat test annually |
| (0.17, 2.21) | 14.99 | 57.12 | 3.76 | (1) Testing for a BRCA1 or BRCA2 germline mutation; |
| | (4.26, 103.18) | (12.24, 1351.82) | (1.49, 9.88) | (2) Intensified ovarian cancer screening: Three monthly |
| | | | | CA125 and cell-free tumour DNA methylation in |
| | | | | plasma/serum for early detection of ovarian cancer and |
| | | | | testing for cell-free tumour DNA methylation in vaginal |
| | | | | fluid; annual pelvic MRI in all women. (3) To consider |
| | | | | taking any of the following risk preventive drugs: Aspirin, |
| | | | | oral contraceptive pill, “selective estrogen receptor |
| | | | | modulators” (SERMs) and “selective progesterone |
| | | | | receptor modulators” (SPRMs). SERMs may include |
| | | | | Anordin, Bazedoxifene, Broparestrol, Clomifene, |
| | | | | Cyclofenil, Lasofoxifene, Ormeloxifene, Ospemifene, |
| | | | | Raloxifene, Tamoxifen. Preferably, the SERMs include |
| | | | | Tamoxifen, Bazedoxifene and Raloxifene. Preferably, |
| | | | | the SPRMs include Mifepristone, Ulipristal, Asoprisnil, |
| | | | | Proellex, Onapristone, Asoprisnil and Lonaprisan. (4) To |
| | | | | consider risk reducing blateral salpingoophorectomy and |
| | | | | total hysterectomy. |

The application's sequence listing, which the Patent Office published only in electronic form, follows.

SEQUENCE LISTING (14000 sequences)

SEQ ID NO: 1 - DNA, 122 bp, Homo sapiens
  misc_feature (61)..(62): /note="This region represents a CpG dinucleotide"
  misc_feature (61)..(61): /note="Nucleotide may be methylated to form 5-methylcytosine"
tcctacttacctgagcggcccgggtgccgcagcagggcgctgacgagtcccgccgagccccgccgcccgggttcaaggccgccttcacgcccacgattccttgttttttgggcagaggtcaa

SEQ ID NO: 2 - DNA, 122 bp, Homo sapiens
  misc_feature (61)..(62): /note="This region represents a CpG dinucleotide"
  misc_feature (61)..(61): /note="Nucleotide may be methylated to form 5-methylcytosine"
accagcgccaccgagaacaccaggctccacatgaaggcgcgcagcagcttcagcgacaggcgcgacggcgccagcagcgcggtcaccaccagctccggcatgtcgccgcgctccgggaccac

SEQ ID NO: 3 - DNA, 122 bp, Homo sapiens
  misc_feature (61)..(62): /note="This region represents a CpG dinucleotide"
  misc_feature (61)..(61): /note="Nucleotide may be methylated to form 5-methylcytosine"
catactgggaagccagggtagacaggccagaaggcaggctctttcattgcaaaacagcagcgtgtcttctgggtggatccccaagggataaaggtctggccatatgggaatccaggtgttag

SEQ ID NO: 4 - DNA, 122 bp, Homo sapiens
  misc_feature (61)..(62): /note="This region represents a CpG dinucleotide"
  misc_feature (61)..(61): /note="Nucleotide may be methylated to form 5-methylcytosine"
accggccgtttgcgaggcccgggaggggtggggcctgcggccagagctgcggcttggtcgcgcagcagccgcaccaggaagccgatgtacttcatggctaggcggagcacctcgttcttgct

SEQ ID NO: 5 - DNA, 122 bp, Homo sapiens
  misc_feature (61)..(62): /note="This region represents a CpG dinucleotide"
  misc_feature (61)..(61): /note="Nucleotide may be methylated to form 5-methylcytosine"
tcatgcctcgtatcgctctcacctcctttctttttgaagtaaagccctttcccaagaaggcggccagaaagtggaccccaccgggggaaaaagaaaaatgaaacgcaaatcagcttggcact

SEQ ID NO: 6 - DNA, 122 bp, Homo sapiens
  misc_feature (61)..(62): /note="This region represents a CpG dinucleotide"
  misc_feature (61)..(61): /note="Nucleotide may be methylated to form 5-methylcytosine"
cctgtggtcacccttaacatctatccaaaagctgatgaaagcagcagcctgaaggcatcacgtggtacaagaggagcaggtaggcctgaaagagcaccccaccccaacttcccctttctttc

SEQ ID NO: 7 - DNA, 122 bp, Homo sapiens
  misc_feature (61)..(62): /note="This region represents a CpG dinucleotide"
  misc_feature (61)..(61): /note="Nucleotide may be methylated to form 5-methylcytosine"
ccaagagaccgaggccttcccgctgtccggactgacacctccaccttcgcccgcagccagcggcagcggatcaacaccattctggggcggtgaagtagttttcgattccgggtgatttttgt

SEQ ID NO: 8 - DNA, 122 bp, Homo sapiens
  misc_feature (61)..(62): /note="This region represents a CpG dinucleotide"
  misc_feature (61)..(61): /note="Nucleotide may be methylated to form 5-methylcytosine"
cccctctgctgctgaggcggctctcggtggaagagtccggtctgggcctcggcctgggcccgggccgctccccgcacctgaggcgcctgtcgcgcgccggcccgcgtctgctgagccctgac

SEQ ID NO: 9 - DNA, 122 bp, Homo sapiens
  misc_feature (61)..(62): /note="This region represents a CpG dinucleotide"
  misc_feature (61)..(61): /note="Nucleotide may be methylated to form 5-methylcytosine"
tgagacttggcaagagagcccagggccccctgaggaccagtggggcacagagagtggctacgggtgtagcatgggatggaggagagggagaagctgctgcccggtccatctctgattcgtgg

SEQ ID NO: 10 - DNA, 122 bp, Homo sapiens
  misc_feature (61)..(62): /note="This region represents a CpG dinucleotide"
  misc_feature (61)..(61): /note="Nucleotide may be methylated to form 5-methylcytosine"
ttgatgggattaaactccttgcttgctgctctgctgacatcagtaattgccttgcttcttcgtttccaatttcctgtttctttaaaacaatccatgtattccttttactgtttgtttccttg

SEQ ID NO: 11 - DNA, 122 bp, Homo sapiens
  misc_feature (61)..(62): /note="This region represents a CpG dinucleotide"
  misc_feature (61)..(61): /note="Nucleotide may be methylated to form 5-methylcytosine"
cagacacatgtgaccatcctgagagactgggtcttctgcaagtgtggaaatgtgctttaacggcatgtcagcaaaacccaagatctgcatgcatcacttttgatgggaaaagtgtcagactt

SEQ ID NO: 12 - DNA, 122 bp, Homo sapiens
  misc_feature (61)..(62): /note="This region represents a CpG dinucleotide"
  misc_feature (61)..(61): /note="Nucleotide may be methylated to form 5-methylcytosine"
ccttgttttctttgttttgctgagcttgtctggggcgggcgccgagttggggtcctattccgtagtggaagaaacggagagaggctcttttgtggcaaatctaggaaaagacctggggttgg

SEQ ID NO: 13 - DNA, 122 bp, Homo sapiens
  misc_feature (61)..(62): /note="This region represents a CpG dinucleotide"
  misc_feature (61)..(61): /note="Nucleotide may be methylated to form 5-methylcytosine"
gaaaacagcaaacagaaaaccccatgccaagtgctgttttcgtagtgaggcactggagggcgctccgctctagcaatgggagatgcacgcagtctctgcagtctgcaggctgccctcacgaa

SEQ ID NO: 14 - DNA, 122 bp, Homo sapiens
  misc_feature (61)..(62): /note="This region represents a CpG dinucleotide"
  misc_feature (61)..(61): /note="Nucleotide may be methylated to form 5-methylcytosine"
cggtgcagccccgcgcttccagtagggtcatgcgaatgcagccctcaccgttctctcctgcgcatccgttctgcgcccagcctgcctctgagccctgagaagttttcactctaatgtcaccg

SEQ ID NO: 15 - DNA, 122 bp, Homo sapiens
  misc_feature (61)..(62): /note="This region represents a CpG dinucleotide"
  misc_feature (61)..(61): /note="Nucleotide may be methylated to form 5-methylcytosine"
cgaagacccgctgccgctctaaggcggtggaagcgagattctccggaaacccagggaatccgatgctcgcacaggaccaaagcccgaggccgcggggaccacagagggacggagaagccggg

SEQ ID NO: 16 - DNA, 122 bp, Homo sapiens
  misc_feature (61)..(62): /note="This region represents a CpG dinucleotide"
  misc_feature (61)..(61): /note="Nucleotide may be methylated to form 5-methylcytosine"
ggaacagggctccttggaagccaggggaaattaaccagttacccaccaacaaagcttatacgttttcgttaggattggctaaggcgtgatggtttcagagaaagatgaagtttcaactgtgg

SEQ ID NO: 17 - DNA, 122 bp, Homo sapiens
  misc_feature (61)..(62): /note="This region represents a CpG dinucleotide"
  misc_feature (61)..(61): /note="Nucleotide may be methylated to form 5-methylcytosine"
atgtcagggtgtctccctttcaattttgatctctttatatccctagggaagcttagagttcgctactgcctttcttatctaggccagagcttggttacatcatagtaagatttctcaatatt

SEQ ID NO: 18 - DNA, 122 bp, Homo sapiens
  misc_feature (61)..(62): /note="This region represents a CpG dinucleotide"
  misc_feature (61)..(61): /note="Nucleotide may be methylated to form 5-methylcytosine"
cattcgtccagccgcgcggcccacagaagcggaacgcgcgtcgagagcgccctgtccgctcgccccagacagatgcccggttattcattaccgcgaggcctagaggaaagagtggctgccgt

SEQ ID NO: 19 - DNA, 122 bp, Homo sapiens
  misc_feature (61)..(62): /note="This region represents a CpG dinucleotide"
  misc_feature (61)..(61): /note="Nucleotide may be methylated to form 5-methylcytosine"
aaagccaaaaccaggcgcatccttcctgtttgcaccaccagggtggccgagaccccgccccggcccccagcgggctactctgggttttggacgcagcctcggtttccctggggcggaggctg

SEQ ID NO: 20 - DNA, 122 bp, Homo sapiens
  misc_feature (61)..(62): /note="This region represents a CpG dinucleotide"
  misc_feature (61)..(61): /note="Nucleotide may be methylated to form 5-methylcytosine"
ggatttgccatatggttgcgcggagccaggaagaatgggcccctgtgtgtgcgaccgggacgcagcggcgcgggccgtgccagccgggcggagccgggtgcccgacggcgcaggacgagcgg

SEQ ID NO: 21 - DNA, 122 bp, Homo sapiens
  misc_feature (61)..(62): /note="This region represents a CpG dinucleotide"
  misc_feature (61)..(61): /note="Nucleotide may be methylated to form 5-methylcytosine"
gtgggtcctacggctgcctcatgtcgggctgtctcgttttcactcaactgggtgtggttacgacatggaagtgatgaccagaagctcccaccagagtgaggggtccaccctcttgatcccct

SEQ ID NO: 22 - DNA, 122 bp, Homo sapiens
  misc_feature (61)..(62): /note="This region represents a CpG dinucleotide"
  misc_feature (61)..(61): /note="Nucleotide may be methylated to form 5-methylcytosine"
ggtaaaatgaggatccttccccacaaacattgctattattcagctcatttcaaaggattccgctgctgccatttgtgagagccgctggaggctgagtgaaagtcattttgaaagactgatcc

SEQ ID NO: 23 - DNA, 122 bp, Homo sapiens
  misc_feature (61)..(62): /note="This region represents a CpG dinucleotide"
  misc_feature (61)..(61): /note="Nucleotide may be methylated to form 5-methylcytosine"
tcacgtctacttcactaaatatccaagatcctggatgagtgttttcgccattgtacctaacggagagctgattgacagcacttaaactgaggggaaatgactaatgttttgtctggaaatgt

SEQ ID NO: 24 - DNA, 122 bp, Homo sapiens
  misc_feature (61)..(62): /note="This region represents a CpG dinucleotide"
  misc_feature (61)..(61): /note="Nucleotide may be methylated to form 5-methylcytosine"
tttattttcctcaatgatttcagaataactctgatttatttttaacagtttaagatgctacgtgggaacaaggctatagcccatattactggtttgttacgtaagatttttctcgtacttgg

SEQ ID NO: 25 - DNA, 122 bp, Homo sapiens
  misc_feature (61)..(62): /note="This region represents a CpG dinucleotide"
  misc_feature (61)..(61): /note="Nucleotide may be methylated to form 5-methylcytosine"
acaggatttcctgacagagtgaacacagagcatgagtgaaaaagaagccaaagatgactacgaccaagcaactgggagaatgaaacaccatcagctgaaacgagatggaataagggagaggg

SEQ ID NO: 26 - DNA, 122 bp, Homo sapiens
  misc_feature (61)..(62): /note="This region represents a CpG dinucleotide"
  misc_feature (61)..(61): /note="Nucleotide may be methylated to form 5-methylcytosine"
ttgagcagaaggttaaaagtattgctttctgagaagtcccattcggtcactcctctctctcgcaagagagacagctgttctcccttttcttttgcctataaacttccgctcctaaactaaaa

SEQ ID NO: 27 - DNA, 122 bp, Homo sapiens
  misc_feature (61)..(62): /note="This region represents a CpG dinucleotide"
  misc_feature (61)..(61): /note="Nucleotide may be methylated to form 5-methylcytosine"
cgctcacctggcggccgggcccgacggccggaccatcgaccgtttctctcccacctagagcgcccctcgccagcccgctctgtcgctgctgcgcggccctggcccgcaccccagggagcggc

SEQ ID NO: 28 - DNA, 122 bp, Homo sapiens
  misc_feature (61)..(62): /note="This region represents a CpG dinucleotide"
  misc_feature (61)..(61): /note="Nucleotide may be methylated to form 5-methylcytosine"
gatgcggcgcgctttgataacaggttaatccggccaacattcgctccgcgagagagccatcggagggctccgggagactgcggcgccacggagggagaggcggcgagaggcccctctgcgag

SEQ ID NO: 29 - DNA, 122 bp, Homo sapiens
  misc_feature (61)..(62): /note="This region represents a CpG dinucleotide"
  misc_feature (61)..(61): /note="Nucleotide may be methylated to form 5-methylcytosine"
cgaggcggacccgctggtgggctggtccctgccacagccgtggagggcggacgtgacctacgcggccatggtggtgaaggtgggccggcccaacgccctgcgcgccccccggccaccttcct

SEQ ID NO: 30 - DNA, 122 bp, Homo sapiens
  misc_feature (61)..(62): /note="This region represents a CpG dinucleotide"
  misc_feature (61)..(61): /note="Nucleotide may be methylated to form 5-methylcytosine"
gttttgttttagcttgctaagtacagaattggaggatacgatgggataaacaactgaatacgtgacaacagtttgttgactcagacagaaagccatcagatggcaagggttgaccgttgaag

SEQ ID NO: 31 - DNA, 122 bp, Homo sapiens
  misc_feature (61)..(62): /note="This region represents a CpG dinucleotide"
  misc_feature (61)..(61): /note="Nucleotide may be methylated to form 5-methylcytosine"
ccacccgggaccgtgcagtcggcagcgctcatggccacccaccaaccgctgtcgctgagccggacgactgccaccatcgcgcccattcttagcgtgccactctccggacagtttctgcagcc

SEQ ID NO: 32 - DNA, 122 bp, Homo sapiens
  misc_feature (61)..(62): /note="This region represents a CpG dinucleotide"
  misc_feature (61)..(61): /note="Nucleotide may be methylated to form 5-methylcytosine"
attgaagggacggaggcaaggagatgcacaatccgggcagctctcgctcttctcggaaggcgaagggagtttggcggagaagacggggttggtgagccgaggcggggactccggacgtgctc

SEQ ID NO: 33 - DNA, 122 bp, Homo sapiens
  misc_feature (61)..(62): /note="This region represents a CpG dinucleotide"
  misc_feature (61)..(61): /note="Nucleotide may be methylated to form 5-methylcytosine"
acagacttcacaaaatgactggattgccccagcaatatcagaaataaactagtttgtggccgggtgtgatggctcacacctgtaatcccagcactttgggaggccaaggcaggcagatcact

SEQ ID NO: 34 - DNA, 122 bp, Homo sapiens
  misc_feature (61)..(62): /note="This region represents a CpG dinucleotide"
  misc_feature (61)..(61): /note="Nucleotide may be methylated to form 5-methylcytosine"
ttgggaggtggggttgagtctcgcaagctcctctccgccaggctgggccgcagcggacgccggctccccgatcacccgctcagcagctttggcccaggaagacctgcagccctggctccctt

SEQ ID NO: 35 - DNA, 122 bp, Homo sapiens
  misc_feature (61)..(62): /note="This region represents a CpG dinucleotide"
  misc_feature (61)..(61): /note="Nucleotide may be methylated to form 5-methylcytosine"
atggtccatttataggaccttaaggaggtcaactggactggatcagagggcttagagacacgataagaattaaaactggctaggtagggcagggtcagaggtcccctgtcctgacacctttg

SEQ ID NO: 36 - DNA, 122 bp, Homo sapiens
  misc_feature (61)..(62): /note="This region represents a CpG dinucleotide"
  misc_feature (61)..(61): /note="Nucleotide may be methylated to form 5-methylcytosine"
gggaaggggtagagggggcggcgggggtcgctccaaagacttgtatttcgcgtttgcctccgggagctgggagtaaggccttggatggcgccgacgcggttgcgaggaagctgaggcctggg

SEQ ID NO: 37 - DNA, 122 bp, Homo sapiens
  misc_feature (61)..(62): /note="This region represents a CpG dinucleotide"
  misc_feature (61)..(61): /note="Nucleotide may be methylated to form 5-methylcytosine"
cggtgccttcgcccactgcaaatggccttgccgctaataacgactctcctgggtcaggttcgcagtccggccggaaggcaaaggaccccgaacgggggctctttcctgggccccagaaaagt

SEQ ID NO: 38 - DNA, 122 bp, Homo sapiens
  misc_feature (61)..(62): /note="This region represents a CpG dinucleotide"
  misc_feature (61)..(61): /note="Nucleotide may be methylated to form 5-methylcytosine"
cattttctctccccctcccccacccccccacccccagtaggacttgtgtgtcggcagaggcgtctgacgaggggctaatttcgctttccttgtttacgatcgagaaaagcgcttggctctcc

SEQ ID NO: 39 - DNA, 122 bp, Homo sapiens
  misc_feature (61)..(62): /note="This region represents a CpG dinucleotide"
  misc_feature (61)..(61): /note="Nucleotide may be methylated to form 5-methylcytosine"
actttcatctagtctccggggcaaacccctgggtaacccaaaggccatcagacggattcgcgtgctgggctttccactaccttaggccacgtgtcactatggagcgaagatcaagaaggtcc

SEQ ID NO: 40 - DNA, 122 bp, Homo sapiens
  misc_feature (61)..(62): /note="This region represents a CpG dinucleotide"
  misc_feature (61)..(61): /note="Nucleotide may be methylated to form 5-methylcytosine"
accctagaaaaacagtattgtaagtaatcacttaaatcacttcctgttctctcctccatgcgcaccaccctcattcccctagcaagcactgtattagtccattctcacactgctatgaactg

SEQ ID NO: 41 - DNA, 122 bp, Homo sapiens
  misc_feature (61)..(62): /note="This region represents a CpG dinucleotide"
  misc_feature (61)..(61): /note="Nucleotide may be methylated to form 5-methylcytosine"
tggaccgcgaggagcagccccagctcaggttaaccctcacagcgctggatggtgggtcaccgcccagaactgggacttcccaggttctcatagtgattgtagatatcaatgacaacgtccct

SEQ ID NO: 42 - DNA, 122 bp, Homo sapiens
  misc_feature (61)..(62): /note="This region represents a CpG dinucleotide"
  misc_feature (61)..(61): /note="Nucleotide may be methylated to form 5-methylcytosine"
gctggaataggcggtgcggctgtagcccgcgctgtaatcgtaggacacctgatggggcggcggcggcgggggcagggcgcagtctggaaagaagggggcgaaagaggccaaatggccccgcc

SEQ ID NO: 43 - DNA, 122 bp, Homo sapiens
  misc_feature (61)..(62): /note="This region represents a CpG dinucleotide"
  misc_feature (61)..(61): /note="Nucleotide may be methylated to form 5-methylcytosine"
ggtcctttaagaaacacctccccaccccacctcccaagatgctgtatcagcaacagcctccgaaggtgcccagacacagatacctgcatgaacacagcatgactgtcatccattagcatccc

SEQ ID NO: 44 - DNA, 122 bp, Homo sapiens
  misc_feature (61)..(62): /note="This region represents a CpG dinucleotide"
  misc_feature (61)..(61): /note="Nucleotide may be methylated to form 5-methylcytosine"
tctttccacaacagctgctttccttaaacatcagcaattttaatctcacaaggcaaactacggaagaaaagccaaaagtaaaatcctgcttccctttaaaattcaaacagatgttctgtgta

SEQ ID NO: 45 - DNA, 122 bp, Homo sapiens
  misc_feature (61)..(62): /note="This region represents a CpG dinucleotide"
  misc_feature (61)..(61): /note="Nucleotide may be methylated to form 5-methylcytosine"
aaaagaagcaaacagataccaagagtcggaaacaggctaaggatcaaaagcagaaacatccgttcaagccaaagtaaactcagggcattccttctatccacccatctattcaaataacacta

SEQ ID NO: 46 - DNA, 122 bp, Homo sapiens
  misc_feature (61)..(62): /note="This region represents a CpG dinucleotide"
  misc_feature (61)..(61): /note="Nucleotide may be methylated to form 5-methylcytosine"
gactgaactaatgatctgctgaataatgaaggaggaatagacaccccagtccccaccctacgtgcacccgctctgcaagttcccatgtgatctgtagaccaggggaaattacactgcggtca

SEQ ID NO: 47 - DNA, 122 bp, Homo sapiens
  misc_feature (61)..(62): /note="This region represents a CpG dinucleotide"
  misc_feature (61)..(61): /note="Nucleotide may be methylated to form 5-methylcytosine"
caatgtccagctcatcagcttcttcctattcacccagtctttcttcttctcttacttgcccgagtagaagaaagatgaatgaagctccttgcatgctggaactgtgttttatctacgttttt

SEQ ID NO: 48 - DNA, 122 bp, Homo sapiens
  misc_feature (61)..(62): /note="This region represents a CpG dinucleotide"
  misc_feature (61)..(61): /note="Nucleotide may be methylated to form 5-methylcytosine"
cggggctgcccagagccaaagcagggtgggctccagagcaagaagccatcgtggacgcggcgtctgcgggaggaaagcagctccttctggcttcgcgaaggccgcctagtccaggagcccca

SEQ ID NO: 49 - DNA, 122 bp, Homo sapiens
  misc_feature (61)..(62): /note="This region represents a CpG dinucleotide"
  misc_feature (61)..(61): /note="Nucleotide may be methylated to form 5-methylcytosine"
ggcttcttaatacagattttctgatcccattctgctgagattctgactcagcaaatctggcgtggagctgagaatttgcatgtctaacagcctccctgaagatgctgatgtcagtcatccat

SEQ ID NO: 50 - DNA, 122 bp, Homo sapiens
  misc_feature (61)..(62): /note="This region represents a CpG dinucleotide"
  misc_feature (61)..(61): /note="Nucleotide may be methylated to form 5-methylcytosine"
cagcggccggaatgccttgctgggtaagccgctcagaggcgggctctggagcaaatgaagcgtccgaccaaatacttctcatattttccctctccctggtaagggcttttgtttggagtgaa

SEQ ID NO: 51 - DNA, 122 bp, Homo sapiens
  misc_feature (61)..(62): /note="This region represents a CpG dinucleotide"
  misc_feature (61)..(61): /note="Nucleotide may be methylated to form 5-methylcytosine"
cattccggagacctgacccaccggagcactgggctgagcacaggagaaggggctttggagcgctctttgtactcaactccaagagcgagtgggaaactcaggactgggttgggtagatccct

SEQ ID NO: 52 - DNA, 122 bp, Homo sapiens
  misc_feature (61)..(62): /note="This region represents a CpG dinucleotide"
  misc_feature (61)..(61): /note="Nucleotide may be methylated to form 5-methylcytosine"
ttctttgcttcttcctcattccaccctatgccttacaaaatgctgaatatcctttgtgagcgtttgaaaatctagcaatttttttcatgaactcctatgaattctactcagtatctacttgt

SEQ ID NO: 53 - DNA, 122 bp, Homo sapiens
  misc_feature (61)..(62): /note="This region represents a CpG dinucleotide"
  misc_feature (61)..(61): /note="Nucleotide may be methylated to form 5-methylcytosine"
ctgtgttcctccccaaacacatcggctttgctaaagtatcccaaacaagaaggttgcattcgagggctataaagaaaggaggcaccaaaggggagagtgtcatttttcaaatctagtcttgg

SEQ ID NO: 54 - DNA, 122 bp, Homo sapiens
  misc_feature (61)..(62): /note="This region represents a CpG dinucleotide"
  misc_feature (61)..(61): /note="Nucleotide may be methylated to form 5-methylcytosine"
ggctaaaccgaaaagaacctcaggatctttcttgtacttacataatcagtcacatgatgtcgctctacactcagaaggtgaaacaggaaaatttttttctccgcacccacattccaatcatt

SEQ ID NO: 55 - DNA, 122 bp, Homo sapiens
  misc_feature (61)..(62): /note="This region represents a CpG dinucleotide"
  misc_feature (61)..(61): /note="Nucleotide may be methylated to form 5-methylcytosine"
ggaaaagctgggggcagtgggggtggggagcggtgcaggtggtgatggcctgccctttgccgcaaaatggagggagtggcatgaggtctggccaagaacaataaggccactcaggggttggg

SEQ ID NO: 56 - DNA, 122 bp, Homo sapiens
  misc_feature (61)..(62): /note="This region represents a CpG dinucleotide"
  misc_feature (61)..(61): /note="Nucleotide may be methylated to form 5-methylcytosine"
cctgcctgtcccacttgggttccggaagaggtgcccttgccttgtattttagacatggggcgccggctgctggggctgccaggtgccaggagacgcctccctcgggcctgccccggcgcccg

SEQ ID NO: 57 - DNA, 122 bp, Homo sapiens
  misc_feature (61)..(62): /note="This region represents a CpG dinucleotide"
  misc_feature (61)..(61): /note="Nucleotide may be methylated to form 5-methylcytosine"
ttacaagtgaatcatcttcatttccaccttatggtgttttcgtaaggattaaatgcaatacggtgtcttaagtgctcagcacagtgccccacacttggtaggaagtgctcagagatgacggc

SEQ ID NO: 58 - DNA, 122 bp, Homo sapiens
  misc_feature (61)..(62): /note="This region represents a CpG dinucleotide"
  misc_feature (61)..(61): /note="Nucleotide may be methylated to form 5-methylcytosine"
acagcagtgcgcagacttaggttctcctgcttgagtttctggttgctgtgttgcagaaagcgaatgtagtcgatggccttgcgcaagacagcagatttattcagctgcacggtgtgggaggg

SEQ ID NO: 59 - DNA, 122 bp, Homo sapiens
  misc_feature (61)..(62): /note="This region represents a CpG dinucleotide"
  misc_feature (61)..(61): /note="Nucleotide may be methylated to form 5-methylcytosine"
actctagtgtgtctcaacggcatactattgatgcaataattttggagcacaagaattcctcgtcatgcaagactatcccaggcaatgaaaggtatttagcattctggccccgcccataaaat

SEQ ID NO: 60 - DNA, 122 bp, Homo sapiens
  misc_feature (61)..(62): /note="This region represents a CpG dinucleotide"
  misc_feature (61)..(61): /note="Nucleotide may be methylated to form 5-methylcytosine"
ggatgaggcgctggttgtgcacgggaatgtcaaggtcatgggctcgcttatgcacccctccgacctgcgcgccaaggaacacgtgcaggaggtggggacagggctgtgggggccgggcgggt

SEQ ID NO: 61 - DNA, 122 bp, Homo sapiens
  misc_feature (61)..(62): /note="This region represents a CpG dinucleotide"
  misc_feature (61)..(61): /note="Nucleotide may be methylated to form 5-methylcytosine"
aagacacaatgaccccgacgccagactcaagcggggaaaagcgggcctagagctccagggcgggagcgacgccgacgcctaaaacattcttgaaaaagaagaataaagtgagttgaaaatca

SEQ ID NO: 62 - DNA, 122 bp, Homo sapiens
  misc_feature (61)..(62): /note="This region represents a CpG dinucleotide"
  misc_feature (61)..(61): /note="Nucleotide may be methylated to form 5-methylcytosine"
acttttcaaaaacaaaaacaaaaacgattaagacttttgaggctccacattggcacaatccggaatgctgtttggaaatagatgttccttctcattaacaggttaaaacagaattctggatg

SEQ ID NO: 63 - DNA, 122 bp, Homo sapiens
  misc_feature (61)..(62): /note="This region represents a CpG dinucleotide"
  misc_feature (61)..(61): /note="Nucleotide may be methylated to form 5-methylcytosine"
agtgtttggatcgtaatctgagggcagtagggagttacactgccttgaagtctgcaagtacgttatgaaccataagagaaagggctgagctgtcttcaaagctctcagtccatatcctgagt

SEQ ID NO: 64 - DNA, 122 bp, Homo sapiens
  misc_feature (61)..(62): /note="This region represents a CpG dinucleotide"
  misc_feature (61)..(61): /note="Nucleotide may be methylated to form 5-methylcytosine"
tgctggcactctcatctctattgtacaggtaagaaatggaaactcagagagggcaagtaacgtgcccaaggtcacacagctattaattggcacagctgggatttgcacgcagtccagttcca

SEQ ID NO: 65 - DNA, 122 bp, Homo sapiens
  misc_feature (61)..(62): /note="This region represents a CpG dinucleotide"
  misc_feature (61)..(61): /note="Nucleotide may be methylated to form 5-methylcytosine"
ctcagcaataaaagggaatcaactattaatacatgcaacaactccaacggatctcaaggacgttatgttgagtgaaagccaatctcaaaggattacgtaatgtatcattccatttatatgcc

SEQ ID NO: 66 - DNA, 122 bp, Homo sapiens
  misc_feature (61)..(62): /note="This region represents a CpG dinucleotide"
  misc_feature (61)..(61): /note="Nucleotide may be methylated to form 5-methylcytosine"
gacaggaagaccgagctcggtgtcagagtgccaaccaccagctgcagaggtttgcgagaacgagttttacctgtggaggtggcatagaggttaataattcaggagacatttagtaagttgcc

SEQ ID NO: 67 - DNA, 122 bp, Homo sapiens
  misc_feature (61)..(62): /note="This region represents a CpG dinucleotide"
  misc_feature (61)..(61): /note="Nucleotide may be methylated to form 5-methylcytosine"
ctgttactacctaataactctatggtcaagtgatgtttgcccaaagtctcaacacaccatcgagggatttaaatcctacagcagcagtatgactcagggaaagaacagaaaaaggtggcgtg

SEQ ID NO: 68 - DNA, 122 bp, Homo sapiens
  misc_feature (61)..(62): /note="This region represents a CpG dinucleotide"
  misc_feature (61)..(61): /note="Nucleotide may be methylated to form 5-methylcytosine"
ttctgataatctgacaaaggtgttttagtccctggcagcagccgctgggaccaccagggacgaaaacgtgttaaaatccaggacaaacattctgcagcatctcggggccgggccacgtgtct

SEQ ID NO: 69 - DNA, 122 bp, Homo sapiens
  misc_feature (61)..(62): /note="This region represents a CpG dinucleotide"
  misc_feature (61)..(61): /note="Nucleotide may be methylated to form 5-methylcytosine"
tggagatttgtcacttcctggacaccacatagcttgtggaaagcactttcttagggtgcgcgtggtgatgaaggcagagtgtcctgtgtgagaggcttccttcctccagactgtctgcggca

SEQ ID NO: 70 - DNA, 122 bp, Homo sapiens
  misc_feature (61)..(62): /note="This region represents a CpG dinucleotide"
  misc_feature (61)..(61): /note="Nucleotide may be methylated to form 5-methylcytosine"
atctcatgttttctatgagtcaagagtgttgatgtggctcaaccggatgcccgtggctcacggtctttcatagacatcaacagacactgcagggaggatccacttacaagctcactttcctg

SEQ ID NO: 71 - DNA, 122 bp, Homo sapiens
  misc_feature (61)..(62): /note="This region represents a CpG dinucleotide"
  misc_feature (61)..(61): /note="Nucleotide may be methylated to form 5-methylcytosine"
tcacagctctcagcgggggcgcggtcagtcggccacagcggtggagatggcgttgaaagccggggatgatgactgctgcgctgggatgactgacggctgagccaggccctgctgctgtgctt

SEQ ID NO: 72 - DNA, 122 bp, Homo sapiens
  misc_feature (61)..(62): /note="This region represents a CpG dinucleotide"
  misc_feature (61)..(61): /note="Nucleotide may be methylated to form 5-methylcytosine"
aggaggagaccggagaacgtggagcccgcgggaggaggccggagcgcgggcagggactggcgcgggatcgattcccgggtggcggtggagggccggcccgggaggagcggcggaggggccgg

SEQ ID NO: 73 - DNA, 122 bp, Homo sapiens
  misc_feature (61)..(62): /note="This region represents a CpG dinucleotide"
  misc_feature (61)..(61): /note="Nucleotide may be methylated to form 5-methylcytosine"
cggtgtcctccgtgctgcttctagtcggcgtgagcccctgtggtttcatcacctgctcgccgatgcccactgcattttaaaggaggtttagcaacacttagacctcagcctaggtcagaatc

SEQ ID NO: 74 - DNA, 122 bp, Homo sapiens
  misc_feature (61)..(62): /note="This region represents a CpG dinucleotide"
  misc_feature (61)..(61): /note="Nucleotide may be methylated to form 5-methylcytosine"
ccctccccaggaggcatctgagctgcaaaaggggcgaatgcgatgtagacacttgggccccgggactcgcctgtgtcatctgggctgggccccacaaacaccacaaacaccttttccaccac

SEQ ID NO: 75 - DNA, 122 bp, Homo sapiens
  misc_feature (61)..(62): /note="This region represents a CpG dinucleotide"
  misc_feature (61)..(61): /note="Nucleotide may be methylated to form 5-methylcytosine"
ccagctgtgccattttggaacagattgagggcctgcaaaaacaccatttgttgccagtaccggatattgtaggggtgctcatcaccctgttaccatatttttgcacttcttaacattgcata

SEQ ID NO: 76 - DNA, 122 bp, Homo sapiens
  misc_feature (61)..(62): /note="This region represents a CpG dinucleotide"
  misc_feature (61)..(61): /note="Nucleotide may be methylated to form 5-methylcytosine"
tccccacctctgctgactcagcatctctggggtggggcctgcaaaggctctcttccttgacggggttattgagggcagctctaggaacccacccaggaccagacctgatgaggagttcctcc

SEQ ID NO: 77 - DNA, 122 bp, Homo sapiens
  misc_feature (61)..(62): /note="This region represents a CpG dinucleotide"
  misc_feature (61)..(61): /note="Nucleotide may be methylated to form 5-methylcytosine"
tgaatgagtgtagaggtcatcttagtcccctggggctcacaagtggtactagagaggcagcgtctaggatgacagcattaataactgcaatcattaatgaaccacttcctcactacgggcca

SEQ ID NO: 78 - DNA, 122 bp, Homo sapiens
  misc_feature (61)..(62): /note="This region represents a CpG dinucleotide"
  misc_feature (61)..(61): /note="Nucleotide may be methylated to form 5-methylcytosine"
tgagctcagatagttggttagcctcccccatgaactctttttggccaaactgagcactaacgttaggtagacactggcttggggcttacctgggcctgatacatcacctacattggttgaac

SEQ ID NO: 79 - DNA, 122 bp, Homo sapiens
  misc_feature (61)..(62): /note="This region represents a CpG dinucleotide"
  misc_feature (61)..(61): /note="Nucleotide may be methylated to form 5-methylcytosine"
tagcagcactgacttcacccagctgtggttccaacggcgggtccagcggcctcggcccggcgccgtcctcctgctggcccaacaggcccgccagcccgcccctgtacgtctgtgattggacg

SEQ ID NO: 80 - DNA, 122 bp, Homo sapiens
  misc_feature (61)..(62): /note="This region represents a CpG dinucleotide"
  misc_feature (61)..(61): /note="Nucleotide may be methylated to form 5-methylcytosine"
gcgaacctgcgagggctgcaagggctttttcaaggtgagcgcacgccgccccctcccctccgcacccagccccctcactgaagggagcttctaagtgagtgtaggagcatccttgttcttcc

SEQ ID NO: 81 - DNA, 122 bp, Homo sapiens
  misc_feature (61)..(62): /note="This region represents a CpG dinucleotide"
  misc_feature (61)..(61): /note="Nucleotide may be methylated to form 5-methylcytosine"
cttgtcaaaagtgaggaagcactcacatttctgtttactcttccagaaggctgcttactacgagtttgttgctggaagaaaaatagtactccatttcctgtagaaaagagagacagccgatg

SEQ ID NO: 82 - DNA, 122 bp, Homo sapiens
  misc_feature (61)..(62): /note="This region represents a CpG dinucleotide"
  misc_feature (61)..(61): /note="Nucleotide may be methylated to form 5-methylcytosine"
ttcttcggcgcggtcccccagaacatcagaacttcttcgggatggacgagtcgctgggcccggtggcagtgagcctgcggcgggaggagaaggagggcagcggagggggcaccctgcacagc

SEQ ID NO: 83 - DNA, 122 bp, Homo sapiens
  misc_feature (61)..(62): /note="This region represents a CpG dinucleotide"
  misc_feature (61)..(61): /note="Nucleotide may be methylated to form 5-methylcytosine"
acttgcacggagccctcgcggtgaggacccgccccaaattttagtttctccaatccccagcgcaggattaagtcgcagttacgctagtccccgccccatgaccttatccccgccccctgcaa

SEQ ID NO: 84 - DNA, 122 bp, Homo sapiens
  misc_feature (61)..(62): /note="This region represents a CpG dinucleotide"
  misc_feature (61)..(61): /note="Nucleotide may be methylated to form 5-methylcytosine"
tgaacgttggatggcaaatgggacattcatctccagttatctcccatgaaatgctggccacgcaaagccagggagtgactttaccctgaagatcctttgcaggcacctctgccccctagtga

SEQ ID NO: 85 - DNA, 122 bp, Homo sapiens
  misc_feature (61)..(62): /note="This region represents a CpG dinucleotide"
  misc_feature (61)..(61): /note="Nucleotide may be methylated to form 5-methylcytosine"
cacaggacaaatgagttatggcctggtttacctgtacagtgtccctcagtagaactataacgaagttggcccaccatttttctttaccacattttatcacattttgataaaactcatcagac

SEQ ID NO: 86 - DNA, 122 bp, Homo sapiens
  misc_feature (61)..(62): /note="This region represents a CpG dinucleotide"
  misc_feature (61)..(61): /note="Nucleotide may be methylated to form 5-methylcytosine"
agccttgggggacctggtttggaaatccaggttggggtgacgtctggggtcacccaaagacgggctggctcccagtgtgtcctcagacaagcctttctgtccctggccctagaccctgcctg

SEQ ID NO: 87 - DNA, 122 bp, Homo sapiens
  misc_feature (61)..(62): /note="This region represents a CpG dinucleotide"
  misc_feature (61)..(61): /note="Nucleotide may be methylated to form 5-methylcytosine"
aaagaatcagaagaatagcaaaatgtacgtagtgcttaccatatgccaagcactgttctccgtgctcacatgtgttaattcattgctttcttgtaacaatcccgtgaggtgctaatgctaat

SEQ ID NO: 88 - DNA, 122 bp, Homo sapiens
  misc_feature (61)..(62): /note="This region represents a CpG dinucleotide"
  misc_feature (61)..(61): /note="Nucleotide may be methylated to form 5-methylcytosine"
tcctagccatgtttcagatgctcagtaactgtgtgtggctgtggaactggacagctcagccgtagagtgtttccctttcttgttaatctttttttagaaatgctaacggtggagactaaggc

SEQ ID NO: 89 - DNA, 122 bp, Homo sapiens
  misc_feature (61)..(62): /note="This region represents a CpG dinucleotide"
  misc_feature (61)..(61): /note="Nucleotide may be methylated to form 5-methylcytosine"
tggtggctttccttctgagctttccccacctgagtcatctgcaaagggcaaggctgcaggcgggagaggccggtgtgatgtgaccgccagccacggtccccacacccctctctgagggctgt

SEQ ID NO: 90 - DNA, 122 bp, Homo sapiens
  misc_feature (61)..(62): /note="This region represents a CpG dinucleotide"
  misc_feature (61)..(61): /note="Nucleotide may be methylated to form 5-methylcytosine"
cagctgtaaaaagctggttccatagcataaattgcgaaatacttaggcaagaagattattcgagaagaattgtattgcttgttcagttatatattttgatctttatagctagtagttttttt

SEQ ID NO: 91 - DNA, 122 bp, Homo sapiens
  misc_feature (61)..(62): /note="This region represents a CpG dinucleotide"
  misc_feature (61)..(61): /note="Nucleotide may be methylated to form 5-methylcytosine"
agcttctctccccgctcctcctccacaccctagctcatctctggctcactccctgtcccccgtctcccccggggctcccacagacatgatgcaaccaggccggagccaagccagctcagagg

SEQ ID NO: 92 - DNA, 122 bp, Homo sapiens
  misc_feature (61)..(62): /note="This region represents a CpG dinucleotide"
  misc_feature (61)..(61): /note="Nucleotide may be methylated to form 5-methylcytosine"
tccctgtgagattcatgtcatttgtccatatcaagttttctccatcctggtcactggcaccgctgtattagtgtgctattgctacataacagatcaccacaaagtgagtggcttaaagcaac

SEQ ID NO: 93 - DNA, 122 bp, Homo sapiens
  misc_feature (61)..(62): /note="This region represents a CpG dinucleotide"
  misc_feature (61)..(61): /note="Nucleotide may be methylated to form 5-methylcytosine"
aaaatggagatttcataagaacagagatgtaacttgttttgttcataaataaatgtccatcgagaaccgtgactagcacatggttaatatgaagaagcctatttaatgtcagtagacacagg

SEQ ID NO: 94 - DNA, 122 bp, Homo sapiens
  misc_feature (61)..(62): /note="This region represents a CpG dinucleotide"
  misc_feature (61)..(61): /note="Nucleotide may be methylated to form 5-methylcytosine"
tggttagatacaggccatgtcccaaaatgactgacgggtgttgtttgggatttgcagtttcgcctctgggagtgacataatcatatttgcatgttagaacgatcactcttcaggagggctgg

SEQ ID NO: 95 - DNA, 122 bp, Homo sapiens
  misc_feature (61)..(62): /note="This region represents a CpG dinucleotide"
  misc_feature (61)..(61): /note="Nucleotide may be methylated to form 5-methylcytosine"
acaacaacaaaattgcgtaacaatgcatttctcagaacatatccctgtcatgaagtgactcgtgactatatttcttatttctcgcctgtgtcaaagagtgtcaccatgcaggttgccaacag

SEQ ID NO: 96 - DNA, 122 bp, Homo sapiens
  misc_feature (61)..(62): /note="This region represents a CpG dinucleotide"
  misc_feature (61)..(61): /note="Nucleotide may be methylated to form 5-methylcytosine"
cggcgcgcgccgggctgtagctctgcgacgacagcgagcggttctgctgcgggtacgtggcgcacggccgcagcgcccccacggccggcgcgcacgcctcgtcccgcgcgcccgacgcctgc

SEQ ID NO: 97 - DNA, 122 bp, Homo sapiens
  misc_feature (61)..(62): /note="This region represents a CpG dinucleotide"
  misc_feature (61)..(61): /note="Nucleotide may be methylated to form 5-methylcytosine"
ctcacaccaaatcagcttgccccattattatccaggcacttgatttcttcatcctctcgacgtcattagacttcgcctttgccgggaatactgaggcaccctttcttcctcctttatctggc

SEQ ID NO: 98 - DNA, 122 bp, Homo sapiens
  misc_feature (61)..(62): /note="This region represents a CpG dinucleotide"
  misc_feature (61)..(61): /note="Nucleotide may be methylated to form 5-methylcytosine"
cttggtagaagggtgctaaatcatccttgctaaatacttgacggaaaccatcagtcatctcgtttggctctcatcaatctctttgttcatatgcacaggctcttaatctctgttttcccttt

SEQ ID NO: 99 - DNA, 122 bp, Homo sapiens
  misc_feature (61)..(62): /note="This region represents a CpG dinucleotide"
  misc_feature (61)..(61): /note="Nucleotide may be methylated to form 5-methylcytosine"
agatgcattcctgaggttagaacagcagctgagcctgcaaagtcagggtctagggctgagcggcactagctggaccgtggaatgctggaacgcatggcttctctgccgcaacttctccaaat

SEQ ID NO: 100 - DNA, 122 bp, Homo sapiens
  misc_feature (61)..(62): /note="This region represents a CpG dinucleotide"
  misc_feature (61)..(61): /note="Nucleotide may be methylated to form 5-methylcytosine"
tgcaggcccagcagcaggctctgatgtcatgctggggagcaagtgttgcagcccagctttcgtcctcccgaggaagcaaacactggctccctctccagggcctaggggaaggttcacaaaga

SEQ ID NO: 101 - DNA, 122 bp, Homo sapiens
  misc_feature (61)..(62): /note="This region represents a CpG dinucleotide"
  misc_feature (61)..(61): /note="Nucleotide may be methylated to form 5-methylcytosine"
tcagcgatacgcagaatgccttccttcctgcaagtccagaggatactggaacctgcctctcgttctcatctcccccgccccccagcagaagctggctcggctgtggaggcctggccagacta

SEQ ID NO: 102 - DNA, 122 bp, Homo sapiens
  misc_feature (61)..(62): /note="This region represents a CpG dinucleotide"
  misc_feature (61)..(61): /note="Nucleotide may be methylated to form 5-methylcytosine"
tgaaacttcagcgtgccgcgcggtggtgcgaaggtgagggcagcgcgcagaggaagtaaacggggactacaggggaccagagacgtgagatagtccttaaaatacatatctaatctgtcctc

SEQ ID NO: 103 - DNA, 122 bp, Homo sapiens
  misc_feature (61)..(62): /note="This region represents a CpG dinucleotide"
  misc_feature (61)..(61): /note="Nucleotide may be methylated to form 5-methylcytosine"
gcagatgtcaagcacacaggaaatcacattacatgtcagctcaaggaactcccaaatacacgctgggttttggaagaaattttccacatgtgtaatgtgaccctctgctgctgtccgcccag

SEQ ID NO: 104 - DNA, 122 bp, Homo sapiens
  misc_feature (61)..(62): /note="This region represents a CpG dinucleotide"
  misc_feature (61)..(61): /note="Nucleotide may be methylated to form 5-methylcytosine"
tcagtggtattaagtacatttcgcaatgttgtgtgtcatcaccattacccatttccagaacgttttcaacaaccccaaacagaaactctgtacccattaaacaatagctccatattcctccc

SEQ ID NO: 105 - DNA, 122 bp, Homo sapiens
  misc_feature (61)..(62): /note="This region represents a CpG dinucleotide"
  misc_feature (61)..(61): /note="Nucleotide may be methylated to form 5-methylcytosine"
aaaaacatattcagtttttcaccagtaagaatggtgtcagtcagtgggtgtttctcagaacgtcctccatcagactgaggaaactcccttctgttcttactttgcagagcactttcctcatg

SEQ ID NO: 106 - DNA, 122 bp, Homo sapiens
  misc_feature (61)..(62): /note="This region represents a CpG dinucleotide"
  misc_feature (61)..(61): /note="Nucleotide may be methylated to form 5-methylcytosine"
tttgaaaacacccatgtaattggaagcacgggatctgaactcatgacttaaccatacccacgtcttcaccatcctcactatatcacacttgcactggggtaaaatgagataaagcatttgga

SEQ ID NO: 107 - DNA, 122 bp, Homo sapiens
  misc_feature (61)..(62): /note="This region represents a CpG dinucleotide"
  misc_feature (61)..(61): /note="Nucleotide may be methylated to form 5-methylcytosine"
agataagaatgccacccacctccttcatgcaatgatagggaaacgcaagtaacaggagggcgcttaacagtttgccagacatgtggcccacgctcgctcactcctggacaggatagggctgt

SEQ ID NO: 108 - DNA, 122 bp, Homo sapiens
  misc_feature (61)..(62): /note="This region represents a CpG dinucleotide"
  misc_feature (61)..(61): /note="Nucleotide may be methylated to form 5-methylcytosine"
gatactagtgtaggaaaatctaagatggcatcactatttctgcactcttcacttgaagcacgctgaatagctccactggttacagcatgtctaattaagatcccccgactctgtgtaagctc

SEQ ID NO: 109 - DNA, 122 bp, Homo sapiens
  misc_feature (61)..(62): /note="This region represents a CpG dinucleotide"
  misc_feature (61)..(61): /note="Nucleotide may be methylated to form 5-methylcytosine"
ggggaaattagtgaggaaactatttttagactgtttacttctcctctgcccttacaatggcgctgcttatgaaatttgaggacagacctattgagagactaatggagtcatctgccatagag

SEQ ID NO: 110 - DNA, 122 bp, Homo sapiens
  misc_feature (61)..(62): /note="This region represents a CpG dinucleotide"
  misc_feature (61)..(61): /note="Nucleotide may be methylated to form 5-methylcytosine"
gctctactccagattcggtccatcacagggggtgtgtgcacaggctatctccccagagtacggggaattcagcctgtagatggtcccttaatccaggagaatctcaccagttcctagctcag

SEQ ID NO: 111 - DNA, 122 bp, Homo sapiens
  misc_feature (61)..(62): /note="This region represents a CpG dinucleotide"
  misc_feature (61)..(61): /note="Nucleotide may be methylated to form 5-methylcytosine"
taacttggccaaggttgctcagcaaataagagacaaatcagaatttacacccaggcagtccggctcagaaatctagggtcttcaccatgacacaatgccaccattccaatatctgcctttat

SEQ ID NO: 112 - DNA, 122 bp, Homo sapiens
  misc_feature (61)..(62): /note="This region represents a CpG dinucleotide"
  misc_feature (61)..(61): /note="Nucleotide may be methylated to form 5-methylcytosine"
gtgcctttgcgaagcggcagcgcatggagaaacagtcgctggtggccagggccagagtcgcgcaccgggtagccagaacaggcaggagcgaggaggctcccggggtgagaacggggcacccc

SEQ ID NO: 113 - DNA, 122 bp, Homo sapiens
  misc_feature (61)..(62): /note="This region represents a CpG dinucleotide"
  misc_feature (61)..(61): /note="Nucleotide may be methylated to form 5-methylcytosine"
gagaatgccagtttcatttaggtctgtatcatgcatatcacaggacgcaggagaatttgacgccactctgaaatccaggggtaggcctgactgggctaaagctaaaccactcctcctggtca

SEQ ID NO: 114 - DNA, 122 bp, Homo sapiens
  misc_feature (61)..(62): /note="This region represents a CpG dinucleotide"
  misc_feature (61)..(61): /note="Nucleotide may be methylated to form 5-methylcytosine"
tagatgacataatcacatgggctgactttttgaccctctttttgactacctcttttaaatcgctttttgcacaaatcacagcctaagtgacagcagataacattttcttcccctctagcacc

SEQ ID NO: 115 - DNA, 122 bp, Homo sapiens
  misc_feature (61)..(62): /note="This region represents a CpG dinucleotide"
  misc_feature (61)..(61): /note="Nucleotide may be methylated to form 5-methylcytosine"
gcaggggcccgggggccggggcctggaggacaggcgaggcagcggcgagtgcggggccggcggtcggggagggcggtgccatggggtcgcggagggcccccagccggggctggggcgcgggt

SEQ ID NO: 116 - DNA, 122 bp, Homo sapiens
  misc_feature (61)..(62): /note="This region represents a CpG dinucleotide"
  misc_feature (61)..(61): /note="Nucleotide may be methylated to form 5-methylcytosine"
tgaagagagtggctaggaattatcccctctgatacactcacccacatacaaaatgacctacgttcaaggtgacggtgacattttgagacaaaagactgaaaacaaattaaatgcacaatggt

SEQ ID NO: 117 - DNA, 122 bp, Homo sapiens
  misc_feature (61)..(62): /note="This region represents a CpG dinucleotide"
  misc_feature (61)..(61): /note="Nucleotide may be methylated to form 5-methylcytosine"
ccttccccatggctggctgggcgcacggcggtgctgagctggtggggcggcggcgctgagcgggtggggctgcggcgcggcgggctatatagcaggagggctgctgcgttggcaagaaccgc

SEQ ID NO: 118 - DNA, 122 bp, Homo sapiens
  misc_feature (61)..(62): /note="This region represents a CpG dinucleotide"
  misc_feature (61)..(61): /note="Nucleotide may be methylated to form 5-methylcytosine"
cgcctcccccataatctggtatcttcttaggggagtcttctgcatcggaagtgccctccgcgctgtcccagagaagcagaaagtgatctgaattagcccttgtaataggttccatccagagc

SEQ ID NO: 119 - DNA, 122 bp, Homo sapiens
  misc_feature (61)..(62): /note="This region represents a CpG dinucleotide"
  misc_feature (61)..(61): /note="Nucleotide may be methylated to form 5-methylcytosine"
gtaagcctgagaaaggggctgcttcggtctccagccacaactctgtgaagccaagccacgcgctgtcttccagagagggaatagaagtttccatcctgtgcacccagtggttgagcaagaag

SEQ ID NO: 120 - DNA, 122 bp, Homo sapiens
  misc_feature (61)..(62): /note="This region represents a CpG dinucleotide"
  misc_feature (61)..(61): /note="Nucleotide may be methylated to form 5-methylcytosine"
acaaagcaaattagacgggaaagcaggaaagctgtgcagaaattctgacctgaaacgcttcgcatccggtctctgcttgttgaaggaccttcaccgctatttctgagaagagcaaaagtgat

SEQ ID NO: 121 - DNA, 122 bp, Homo sapiens
  misc_feature (61)..(62): /note="This region represents a CpG dinucleotide"
  misc_feature (61)..(61): /note="Nucleotide may be methylated to form 5-methylcytosine"
gggcgctgagcactcacctaggagcgggaggcgtttcattggcggtggccgcagtggtggcggtggcggagagcgcggcggagtgagtgcggctgtggacccgggaccgggcgccgctgggc

SEQ ID NO: 122 - DNA, 122 bp, Homo sapiens
  misc_feature (61)..(62): /note="This region represents a CpG dinucleotide"
  misc_feature (61)..(61): /note="Nucleotide may be methylated to form 5-methylcytosine"
gcgacagcggattccgtgcccggtggccgcgcgccgcccggctgttccgcgtccccttgccggctcacaatgtgctgaccctcccggccccgccgcgcgcctcacaggtctctcgacctccg

SEQ ID NO: 123 - DNA, 122 bp, Homo sapiens
  misc_feature (61)..(62): /note="This region represents a CpG dinucleotide"
  misc_feature (61)..(61): /note="Nucleotide may be methylated to form 5-methylcytosine"
aacatgcagctgtgccacccagctcaacagcagcagaaaacatactagagctggcaggaccgcaaggagtgagagacaacacatactaacatcacttttgggcagggagaaagagacagcat

SEQ ID NO: 124 - DNA, 122 bp, Homo sapiens
  misc_feature (61)..(62): /note="This region represents a CpG dinucleotide"
  misc_feature (61)..(61): /note="Nucleotide may be methylated to form 5-methylcytosine"
ctcaagagatcatcctgcctcagcctccccagtggctgagactacaggcacacgccaccacgctgggctaatttttgttgttgttagtagagataaggtctgcgtatgttgtccaggctgat

SEQ ID NO: 125 - DNA, 122 bp, Homo sapiens
  misc_feature (61)..(62): /note="This region represents a CpG dinucleotide"
  misc_feature (61)..(61): /note="Nucleotide may be methylated to form 5-methylcytosine"
tatccagtaaaatagcaattaaaatgcagcttgtggcaatgactaagcttagcccaggcccgctgatagagttcttggtgcctgtggatataacacatgttgcttgtttaccttcacaacat

SEQ ID NO: 126 - DNA, 122 bp, Homo sapiens
  misc_feature (61)..(62): /note="This region represents a CpG dinucleotide"
  misc_feature (61)..(61): /note="Nucleotide may be methylated to form 5-methylcytosine"
tacacactaagcactgggcacactgtccgcccaggtccagtgagcagtaattgtcagctacgactgttgttataattgtcatcataaaggcactcaacagacacgtgcccaataccgagccc

SEQ ID NO: 127 - DNA, 122 bp, Homo sapiens
  misc_feature (61)..(62): /note="This region represents a CpG dinucleotide"
  misc_feature (61)..(61): /note="Nucleotide may be methylated to form 5-methylcytosine"
gctatattcccagaattgtgttaacttcctgagttcaagtcaaggctctatgatttacttcgtgatttctggtaaattacttaatcccacctgtaacattgtgaaaccaatacttcctactt

SEQ ID NO: 128 - DNA, 122 bp, Homo sapiens
  misc_feature (61)..(62): /note="This region represents a CpG dinucleotide"
  misc_feature (61)..(61): /note="Nucleotide may be methylated to form 5-methylcytosine"
gcaccgggactacaaagggcttgtcctgctgggaatcctcctggggactctgtgggagaccggatgcacccagatacgctattcagttccggaagagctggagaaaggctctagggtgggcg

SEQ ID NO: 129 - DNA, 122 bp, Homo sapiens
  misc_feature (61)..(62): /note="This region represents a CpG dinucleotide"
  misc_feature (61)..(61): /note="Nucleotide may be methylated to form 5-methylcytosine"
tgtgccgccccctcccactgccaaggcgcggctgtccccggctgggtggactcgcgcgcgcgcctcctgccccaccccagcaggctaacactggcgcactgggcctggctccccgctgctac

SEQ ID NO: 130 - DNA, 122 bp, Homo sapiens
  misc_feature (61)..(62): /note="This region represents a CpG dinucleotide"
  misc_feature (61)..(61): /note="Nucleotide may be methylated to form 5-methylcytosine"
tgctgagtccttttgtaaagtgaagacatcctttagaatgcagtggactgtgtagcatagcggttaagagctctgacttgaggcttaagtgctacttactggctgtctgaacttgggccatt

SEQ ID NO: 131 - DNA, 122 bp, Homo sapiens
  misc_feature (61)..(62): /note="This region represents a CpG dinucleotide"
  misc_feature (61)..(61): /note="Nucleotide may be methylated to form 5-methylcytosine"
tgattagaagtcacagcttaagaggatattgggcaataaacggaagctctctgtggctgacggctggcgatgcgtctggagtttgcacgcctctctgaaagctcgtcagtgacggaagcact

SEQ ID NO: 132 - DNA, 122 bp, Homo sapiens
  misc_feature (61)..(62): /note="This region represents a CpG dinucleotide"
  misc_feature (61)..(61): /note="Nucleotide may be methylated to form 5-methylcytosine"
cagcctgagtaactacaccatcagccccaatgcctatttccatattaatgtccatgatagcggggaggggaatatctatcccgaattggtgctgaatcaagtgctggatcgggaagagatac

SEQ ID NO: 133 - DNA, 122 bp, Homo sapiens
  misc_feature (61)..(62): /note="This region represents a CpG dinucleotide"
  misc_feature (61)..(61): /note="Nucleotide may be methylated to form 5-methylcytosine"
tgctgatcttgcatgaggtcactcttgtagcagtcatcatctggcagcttgacttggagccggatggtctaagatagtttcactcatatctgccagttgatgatggcttttgactgggtttg

SEQ ID NO: 134 - DNA, 122 bp, Homo sapiens
  misc_feature (61)..(62): /note="This region represents a CpG dinucleotide"
  misc_feature (61)..(61): /note="Nucleotide may be methylated to form 5-methylcytosine"
ttgccagagtctcgaggggtggcctccttccacgggtgagtaaccacaagtccatgtgaccgaacaaacagcatattcttttgttcaaaagagaaaaacaacattgaaggaaatcagctgaa

SEQ ID NO: 135 - DNA, 122 bp, Homo sapiens
  misc_feature (61)..(62): /note="This region represents a CpG dinucleotide"
  misc_feature (61)..(61): /note="Nucleotide may be methylated to form 5-methylcytosine"
tttatgaaagaataatttctgtctattgcctaatactgtgtatcatcactgtgcttgacacgtagttggtaatctctaagtatttgagaagcagtgagttaattaatatttgcttttttgac

SEQ ID NO: 136 - DNA, 122 bp, Homo sapiens
  misc_feature (61)..(62): /note="This region represents a CpG dinucleotide"
  misc_feature (61)..(61): /note="Nucleotide may be methylated to form 5-methylcytosine"
caagcatgagtcaccgtgcctggctaaatgagctaattcttacgaaatgtactcaacaagcgcttggcacataataagcactcagtggctgtccactttccttatgtgactcccacggtagt

SEQ ID NO: 137 - DNA, 122 bp, Homo sapiens
  misc_feature (61)..(62): /note="This region represents a CpG dinucleotide"
  misc_feature (61)..(61): /note="Nucleotide may be methylated to form 5-methylcytosine"
aggcaggcaggctccggggcacatgctcttagcttgtctatatcatgtcccattgcacagcgtggtttattgtaacattattcatgacagcagaaaacaggaaattactgaactgtccaaaa

SEQ ID NO: 138 - DNA, 122 bp, Homo sapiens
  misc_feature (61)..(62): /note="This region represents a CpG dinucleotide"
  misc_feature (61)..(61): /note="Nucleotide may be methylated to form 5-methylcytosine"
cagttatgcaaccctctcccttcctgcagaacttgcattcctcacttaccaaattatgtacggagcacctaccagggccaggtcttgtgctaggctctagaaagttggtggccagacaaaaa

SEQ ID NO: 139 - DNA, 122 bp, Homo sapiens
  misc_feature (61)..(62): /note="This region represents a CpG dinucleotide"
  misc_feature (61)..(61): /note="Nucleotide may be methylated to form 5-methylcytosine"
ggggggccggccctccggccctctgctgcccgagggttcctcgcaggctggagctgacggcgctggagcgcgtggtacgaatctcagccaagcccaccaagcggctgcaggaggcgctgcag

SEQ ID NO: 140 - DNA, 122 bp, Homo sapiens
  misc_feature (61)..(62): /note="This region represents a CpG dinucleotide"
  misc_feature (61)..(61): /note="Nucleotide may be methylated to form 5-methylcytosine"
aagagtctgcgaggctgaatgaattggtgcatctcgctgcattggaagcagctgcctcggcgcagacaggaggagggagagacggaggggaaggggaggcgggcagagggagacgctgggga

SEQ ID NO: 141 - DNA, 122 bp, Homo sapiens
  misc_feature (61)..(62): /note="This region represents a CpG dinucleotide"
  misc_feature (61)..(61): /note="Nucleotide may be methylated to form 5-methylcytosine"
tccaaaacccaggttgcaccataccatctcaaacagagtgatggtgcaaggacaggcatacgaggtcagtctggccaatcaggatccccctaggagttttgcagtgaggaacacttttagat

SEQ ID NO: 142 - DNA, 122 bp, Homo sapiens
  misc_feature (61)..(62): /note="This region represents a CpG dinucleotide"
  misc_feature (61)..(61): /note="Nucleotide may be methylated to form 5-methylcytosine"
atgatgagattcgtcagtttcgcaaggcctgtggggaggctcatcttaaaactatattagcgacaggagaacttggaactcttactaatgtctataaagccagtatgatagcaatgatggca

SEQ ID NO: 143 - DNA, 122 bp, Homo sapiens
  misc_feature (61)..(62): /note="This region represents a CpG dinucleotide"
  misc_feature (61)..(61): /note="Nucleotide may be methylated to form 5-methylcytosine"
ccagtgcatgtcaccgagcttgcctggccatgactcatgcaggaaaggctgcacaggtgacgccaggtgtggacatggcagaaggaacggaagatgaggttaggcttggcttccttgcaatc

SEQ ID NO: 144 - DNA, 122 bp, Homo sapiens
  misc_feature (61)..(62): /note="This region represents a CpG dinucleotide"
  misc_feature (61)..(61): /note="Nucleotide may be methylated to form 5-methylcytosine"
cgacggcggcgaacatccggatcccctgaccatctgcccgctgccggttagagggacgggcgtccccgaagagaacgacagtgacacctggctacagccctatgagcccgcggaccccgccc

SEQ ID NO: 145 - DNA, 122 bp, Homo sapiens
  misc_feature (61)..(62): /note="This region represents a CpG dinucleotide"
  misc_feature (61)..(61): /note="Nucleotide may be methylated to form 5-methylcytosine"
gtcagggggcagaaggaaaccatgggcaagagcctttattatcgtttccgagggaaggaacgggtgaggcagagaatccaggtttaggattagctaattagaataatttcagcaggctctga

SEQ ID NO: 146 - DNA, 122 bp, Homo sapiens
  misc_feature (61)..(62): /note="This region represents a CpG dinucleotide"
  misc_feature (61)..(61): /note="Nucleotide may be methylated to form 5-methylcytosine"
caacgccatgctgagtgtttgattggccggccagacctgttcataaagcatttcacaaaccgtcctttcttacgcaaactagctgggaataaacaggccccctgtgggtcttagaactaaag

SEQ ID NO: 147 - DNA, 122 bp, Homo sapiens
  misc_feature (61)..(62): /note="This region represents a CpG dinucleotide"
  misc_feature (61)..(61): /note="Nucleotide may be methylated to form 5-methylcytosine"
gtctccatgtgacaaagcagttttgaaggttacagggcttcattggatagccagttgtcacgtattttacaaagtggccttggagaatgtgaatcacctgttgcaatgaacccataatttaa

SEQ ID NO: 148 - DNA, 122 bp, Homo sapiens
  misc_feature (61)..(62): /note="This region represents a CpG dinucleotide"
  misc_feature (61)..(61): /note="Nucleotide may be methylated to form 5-methylcytosine"
acgtgcaggaggtggggacagggctgtgggggccgggcgggtccagacgctggagcgggccgcgggggcggggctcctggggagggggcgtgactacgcggaaaggcggagctgcgggggaa

SEQ ID NO: 149 - DNA, 122 bp, Homo sapiens
  misc_feature (61)..(62): /note="This region represents a CpG dinucleotide"
  misc_feature (61)..(61): /note="Nucleotide may be methylated to form 5-methylcytosine"
cggcggaccagccgcgctgggtgagccaccaccaccccgccgtgctcaacgggcagcacccggacacgcaccacccgggcctcagccactcctacatggacgcggcgcagtacccgctgccg

SEQ ID NO: 150 - DNA, 122 bp, Homo sapiens
  misc_feature (61)..(62): /note="This region represents a CpG dinucleotide"
  misc_feature (61)..(61): /note="Nucleotide may be methylated to form 5-methylcytosine"
ctctccgtggctccagccaaaagctcaggcgtcatctctactcctccctttgaccctcagcgacagtcagttgtcagtaaagactcctggctctgattctaaactaaacatagaatcaggct

SEQ ID NO: 151 - DNA, 122 bp, Homo sapiens
  misc_feature (61)..(62): /note="This region represents a CpG dinucleotide"
  misc_feature (61)..(61): /note="Nucleotide may be methylated to form 5-methylcytosine"
cttcctttggcaacctaaaaataatcttagtgtgactgaagcctgaaagggaaatcgctgcgttccactgtcctatggacactgaccggggaatgagccaacagagcttcctggggatttgg

SEQ ID NO: 152 - DNA, 122 bp, Homo sapiens
  misc_feature (61)..(62): /note="This region represents a CpG dinucleotide"
  misc_feature (61)..(61): /note="Nucleotide may be methylated to form 5-methylcytosine"
ggcggcgatggaggcgagcaccacgctgatggagacgcagctgaagagcttgctcggcagcgagtagcccgggttctccatggtcagccagaggcggcggcgcaggcggccacagcgcgccg

SEQ ID NO: 153 - DNA, 122 bp, Homo sapiens
  misc_feature (61)..(62): /note="This region represents a CpG dinucleotide"
  misc_feature (61)..(61): /note="Nucleotide may be methylated to form 5-methylcytosine"
ccttcccagagcaagggttgcctcatctcatcgcttcagacagacagctgtaacaggttccgtcatcagaaggcggacccacaccttcgttgagttctcaccaggtgctgcaagcttcctgt

SEQ ID NO: 154 - DNA, 122 bp, Homo sapiens
  misc_feature (61)..(62): /note="This region represents a CpG dinucleotide"
  misc_feature (61)..(61): /note="Nucleotide may be methylated to form 5-methylcytosine"
agaggaacagcatagcagcagattgtaacccaacagataaagacattgtctgagtcaatgcgtacagacccattattctccgtgagggaagtgcgcgtcttccctagccgctactgtcctct

SEQ ID NO: 155 - DNA, 122 bp, Homo sapiens
  misc_feature (61)..(62): /note="This region represents a CpG dinucleotide"
  misc_feature (61)..(61): /note="Nucleotide may be methylated to form 5-methylcytosine"
ttcacaacagcctgatgaggtcagtactctcattatgtcgatttctcagaagaggaactgcggctgggagaacgtgactcatctagctgatggagctgaggttcaagtgcaggtatctggcc

SEQ ID NO: 156 - DNA, 122 bp, Homo sapiens
  misc_feature (61)..(62): /note="This region represents a CpG dinucleotide"
  misc_feature (61)..(61): /note="Nucleotide may be methylated to form 5-methylcytosine"
atctatctatgtttatttagatgactggataaaagagtcatgattcctcctagtctatcacgtggtaatgccaaggtcagaaaaatcatttgttatgatctatcttatgtaaaagcctgtgg

SEQ ID NO: 157 - DNA, 122 bp, Homo sapiens
  misc_feature (61)..(62): /note="This region represents a CpG dinucleotide"
  misc_feature (61)..(61): /note="Nucleotide may be methylated to form 5-methylcytosine"
gcttctcgcttgctgctgcgctgaggggaagccttaatagagaatccgcctctgtgccgccgccccccacccgccagcccatccctattatcaacaccatcaacggcggcaaatgacactct

SEQ ID NO: 158 - DNA, 122 bp, Homo sapiens
  misc_feature (61)..(62): /note="This region represents a CpG dinucleotide"
  misc_feature (61)..(61): /note="Nucleotide may be methylated to form 5-methylcytosine"
ccaccaggaggagtgaacaactccagacccgccacctttatagagctgtaacactcatcgcggagctctgcagcttcactcctgaagccaacgaaaccacgaacccaccaggaggaacgaac

SEQ ID NO: 159 - DNA, 122 bp, Homo sapiens
  misc_feature (61)..(62): /note="This region represents a CpG dinucleotide"
  misc_feature (61)..(61): /note="Nucleotide may be methylated to form 5-methylcytosine"
agagggtgaccgctaatcctaattctaaccccaacctgaatttatgaggtcctgctggtacgcagagggaggactggagggaccagtcaggttggccagctggcccagtggtatagggagcc

SEQ ID NO: 160 - DNA, 122 bp, Homo sapiens
  misc_feature (61)..(62): /note="This region represents a CpG dinucleotide"
  misc_feature (61)..(61): /note="Nucleotide may be methylated to form 5-methylcytosine"
acacctgacttcagtctggccttcgtgaatcagagcagcaggcacagggcgtttaggaaacggtctctgatagacagcgcccaggatgtgctgctcgattctgactcccagagacacccacc

SEQ ID NO: 161 - DNA, 122 bp, Homo sapiens
  misc_feature (61)..(62): /note="This region represents a CpG dinucleotide"
  misc_feature (61)..(61): /note="Nucleotide may be methylated to form 5-methylcytosine"
tttaagttctcattgcccaactgtatactctgagtcactgtcctgtcacagccatatttccggctggcattgtgtctgcaaccaagagtgtgactgcaagaacacaaggcactgtgcaaaga

SEQ ID NO: 162 - DNA, 122 bp, Homo sapiens
  misc_feature (61)..(62): /note="This region represents a CpG dinucleotide"
  misc_feature (61)..(61): /note="Nucleotide may be methylated to form 5-methylcytosine"
gaaagaaacatgtcatacaaaacgcccctagagctacgctgtccaatatgaataaaagtacgtaaagtcactcatgataatctttcagatctattggcttaaatgcattatgaaaactaatt

SEQ ID NO: 163 - DNA, 122 bp, Homo sapiens
  misc_feature (61)..(62): /note="This region represents a CpG dinucleotide"
  misc_feature (61)..(61): /note="Nucleotide may be methylated to form 5-methylcytosine"
gctgccggcgggtcgcgggaagcgtaggccctggccgccgcgctccccgcgcgggtccaacgccctgggtgcccttctcgcctgcgccttgaagcccccacgcccatcctagcgcgtctctc

SEQ ID NO: 164 - DNA, 122 bp, Homo sapiens
  misc_feature (61)..(62): /note="This region represents a CpG dinucleotide"
  misc_feature (61)..(61): /note="Nucleotide may be methylated to form 5-methylcytosine"
ccaaagatagaaagctgctttgtgattgcaaaggcagctaagcatttattcatgctcatgcgctggccaagttaatttccatattgctgagtgcacgaattgaaagcacttccctccagcac

SEQ ID NO: 165 - DNA, 122 bp, Homo sapiens
  misc_feature (61)..(62): /note="This region represents a CpG dinucleotide"
  misc_feature (61)..(61): /note="Nucleotide may be methylated to form 5-methylcytosine"
cacgccaccgcctttgagttggacacagatggcaacccctttgaccaggacatctacgggcgcgaggagctgcgcagccccaagctgttctacgccgaccaccccttcatcttcctagtgcg

SEQ ID NO: 166 - DNA, 122 bp, Homo sapiens
  misc_feature (61)..(62): /note="This region represents a CpG dinucleotide"
  misc_feature (61)..(61): /note="Nucleotide may be methylated to form 5-methylcytosine"
attagacaaaggatttggaacagaaattctccaaaggtataaacttggccaataagcatacgaaacaatgctcaatatcattagtcattagggaaatacaaatcaaaaccacatgagatatt

SEQ ID NO: 167 - DNA, 122 bp, Homo sapiens
  misc_feature (61)..(62): /note="This region represents a CpG dinucleotide"
  misc_feature (61)..(61): /note="Nucleotide may be methylated to form 5-methylcytosine"
ccttcccgcggccctcctagggcctgggtgcttggaggctcgaggccccaagatccatgtcgcccggaatcccggtgcctaggccttgtcgcgggccctgggaccaactcgcgggggtcagg

SEQ ID NO: 168 - DNA, 122 bp, Homo sapiens
  misc_feature (61)..(62): /note="This region represents a CpG dinucleotide"
  misc_feature (61)..(61): /note="Nucleotide may be methylated to form 5-methylcytosine"
tcttgctacacgctctgtcaaataggtggccagaggcccgggtgcagatgcagtggctcacgtcagtaatcccagcactctgggaggctggtgggcggatcacttgaggccaggagtttaaa

SEQ ID NO: 169 - DNA, 122 bp, Homo sapiens
  misc_feature (61)..(62): /note="This region represents a CpG dinucleotide"
  misc_feature (61)..(61): /note="Nucleotide may be methylated to form 5-methylcytosine"
ctcggcgcgagcgggactatcagggtgacctcacctgtgaccttcaccaccgtgaggtaccgccgcgcctgggagtcacccgcggccgctcgccggtaggtgcctgcctgagtctaatcgta

SEQ ID NO: 170 - DNA, 122 bp, Homo sapiens
  misc_feature (61)..(62): /note="This region represents a CpG dinucleotide"
  misc_feature (61)..(61): /note="Nucleotide may be methylated to form 5-methylcytosine"
cgtgggagtgacagccaacactgtcctgcccacacccaaaggggaagagattatgcaggacgtgtacaccagggggcgtgaatctcagaattctgcccagcacatggtcttgttcccagttc

SEQ ID NO: 171 - DNA, 122 bp, Homo sapiens
  misc_feature (61)..(62): /note="This region represents a CpG dinucleotide"
  misc_feature (61)..(61): /note="Nucleotide may be methylated to form 5-methylcytosine"
gcctggcggggcaaagggagggagccatgattacaggagcccagagagctatggcaggagcggtgattgaaggtggaaggaaataaccgctgccccaaccctgagctggcagggaggagtga

SEQ ID NO: 172 - DNA, 122 bp, Homo sapiens
  misc_feature (61)..(62): /note="This region represents a CpG dinucleotide"
  misc_feature (61)..(61): /note="Nucleotide may be methylated to form 5-methylcytosine"
gccgggagcctgacgtcaccacgccctgcctgtcaatctgcagcgcgcgccgctcgcagccgccttttctgccaccaactgtatctctcactcgcggagccggcacagcgacaggcgccccg

SEQ ID NO: 173 - DNA, 122 bp, Homo sapiens
  misc_feature (61)..(62): /note="This region represents a CpG dinucleotide"
  misc_feature (61)..(61): /note="Nucleotide may be methylated to form 5-methylcytosine"
aggcacggtggccagatccaggaactcataagctcacatcccctgggggttggagccccacgcggcgcaagaaccccgggcgctgagctccggggaacctgggagggaaggaggggcgagcg

SEQ ID NO: 174 - DNA, 122 bp, Homo sapiens
  misc_feature (61)..(62): /note="This region represents a CpG dinucleotide"
  misc_feature (61)..(61): /note="Nucleotide may be methylated to form 5-methylcytosine"
tgcctgtttccttcatcatagtatcaattcctcttcaaacaacataaggccatgggaccacggggcttatgcagaaagaaaagaaagccatgaggaccaaaatatttgatttggatgtctcc

SEQ ID NO: 175 - DNA, 122 bp, Homo sapiens
  misc_feature (61)..(62): /note="This region represents a CpG dinucleotide"
  misc_feature (61)..(61): /note="Nucleotide may be methylated to form 5-methylcytosine"
cagatctggcacttgagtcagtagaaaatggggagcctctgtgggctcctggtcctgcaccgtgataaatagcctgtcctgcaacctggcttaaaacagggaaagccggagttaggcaacag

SEQ ID NO: 176 - DNA, 122 bp, Homo sapiens
  misc_feature (61)..(62): /note="This region represents a CpG dinucleotide"
  misc_feature (61)..(61): /note="Nucleotide may be methylated to form 5-methylcytosine"
ttttggcttacactggaacatcagcttcttgcacgattactgtttcaattcagtcatggccgtcataattgctaactgctaaacaaatcatgattgtgacatctggatgcaataaagattat

SEQ ID NO: 177 - DNA, 122 bp, Homo sapiens
  misc_feature (61)..(62): /note="This region represents a CpG dinucleotide"
  misc_feature (61)..(61): /note="Nucleotide may be methylated to form 5-methylcytosine"
ctggatctccagcttgctgactcaccctgtagatcttgaggcttgctgcttttataattgcgtgagccagttccttaaataagtcagtctctatctctgcatctacttggttctctttcgcc

SEQ ID NO: 178 - DNA, 122 bp, Homo sapiens
  misc_feature (61)..(62): /note="This region represents a CpG dinucleotide"
  misc_feature (61)..(61): /note="Nucleotide may be methylated to form 5-methylcytosine"
tcaaaaacctgtttgatgatggacttctttttacaggctgactgtgagatcagcactcaacgtggaacacctgttctcatgcctgatgtgaggcagtggcaccctagcacatccctccctgg

SEQ ID NO: 179 - DNA, 122 bp, Homo sapiens
  misc_feature (61)..(62): /note="This region represents a CpG dinucleotide"
  misc_feature (61)..(61): /note="Nucleotide may be methylated to form 5-methylcytosine"
gtgaatatttcagtaacattggctgtaaatcatacccaggccttttctttctgtgactcacgtgatgtaaggaagagatcagatgacgaggtcaagaggacacaaaacctcagccctgcttc

SEQ ID NO: 180 - DNA, 122 bp, Homo sapiens
  misc_feature (61)..(62): /note="This region represents a CpG dinucleotide"
  misc_feature (61)..(61): /note="Nucleotide may be methylated to form 5-methylcytosine"
gattaactgaagaaaactccgtgaataggcttggtttgcagatctggcaaaagagcatgacgaaaggctaagcaaatggaactgctgcactgggtcaaagactacaaagggaaagccatgtc

SEQ ID NO: 181 - DNA, 122 bp, Homo sapiens
  misc_feature (61)..(62): /note="This region represents a CpG dinucleotide"
  misc_feature (61)..(61): /note="Nucleotide may be methylated to form 5-methylcytosine"
ctgaaatgtgtcttgtgcatagtggctctcatagtggctctcaacatgtttatcagaacacgtggagctgaaatgtgtcttgtgcatagtggctctcaacacgtttatgtaatccaggaaat

SEQ ID NO: 182 - DNA, 122 bp, Homo sapiens
  misc_feature (61)..(62): /note="This region represents a CpG dinucleotide"
  misc_feature (61)..(61): /note="Nucleotide may be methylated to form 5-methylcytosine"
gcagcatcagatggtttagataaattcctaagggattcccgaatttcttgtaacatttgccggctactgacagtatagttactggcaggaaaggtcttaggcctcatttgtctatatccttc

SEQ ID NO: 183 - DNA, 122 bp, Homo sapiens
  misc_feature (61)..(62): /note="This region represents a CpG dinucleotide"
  misc_feature (61)..(61): /note="Nucleotide may be methylated to form 5-methylcytosine"
aaccatttgcgagattgaggtaatgtatttcccagacttaagcaatttactccttcccaccgtgctgaatcaggctgttaaatcctcttgctgtgtgcgtagagctattggcaccagggaaa

SEQ ID NO: 184 - DNA, 122 bp, Homo sapiens
  misc_feature (61)..(62): /note="This region represents a CpG dinucleotide"
  misc_feature (61)..(61): /note="Nucleotide may be methylated to form 5-methylcytosine"
gctgtgttctaatggcttcctaatgggcaacttaatctgtcattaaacccactcaccaagcgccccttgccagactcctcggccattggtctgcttgctgagccacggcgtctgtggggtgg

SEQ ID NO: 185 - DNA, 122 bp, Homo sapiens
  misc_feature (61)..(62): /note="This region represents a CpG dinucleotide"
  misc_feature (61)..(61): /note="Nucleotide may be methylated to form 5-methylcytosine"
attgcataagaactagatgcaagtggctttgtcacctgttcgctgcagggaagtcacacccgtccaaagggccaccagcatccacctggatctcatgaaccaaaggccagtgctcattgccc

SEQ ID NO: 186 - DNA, 122 bp, Homo sapiens
  misc_feature (61)..(62): /note="This region represents a CpG dinucleotide"
  misc_feature (61)..(61): /note="Nucleotide may be methylated to form 5-methylcytosine"
ttcctggcctggagtgtgaaccggttgcattgcttttctttctgagtcacatcgtttcaccgcatcacagctgtgtgggtaaccagggccctctggtgcacagtcagggccctctcctgtgt

SEQ ID NO: 187 - DNA, 122 bp, Homo sapiens
  misc_feature (61)..(62): /note="This region represents a CpG dinucleotide"
  misc_feature (61)..(61): /note="Nucleotide may be methylated to form 5-methylcytosine"
gggtccgggacacgtggctttgtagtcactggctggctgggtgtggtaaagccgcacatacgtgacacagccccgaagcaccctaagggacaccacccaggacagaccgttcatccccggca

SEQ ID NO: 188 - DNA, 122 bp, Homo sapiens
  misc_feature (61)..(62): /note="This region represents a CpG dinucleotide"
  misc_feature (61)..(61): /note="Nucleotide may be methylated to form 5-methylcytosine"
ggcagaatagcctgcagagaccactgtggcgttgaaaagaggtgtcgtcgcgaccttcggcgccggagaggcgaaacaagagggggtcttcgggccctcaggtatggctcagccgcccaagg

SEQ ID NO: 189 - DNA, 122 bp, Homo sapiens
  misc_feature (61)..(62): /note="This region represents a CpG dinucleotide"
  misc_feature (61)..(61): /note="Nucleotide may be methylated to form 5-methylcytosine"
caatgcaccaccctaaagaaagggcaaaattatcaaggcatagaaaagcaagagacatcacgctgtggataaaggaccctgctctatgccaacttctaagtaagacgaggaattacagtaat

SEQ ID NO: 190 - DNA, 122 bp, Homo sapiens
  misc_feature (61)..(62): /note="This region represents a CpG dinucleotide"
  misc_feature (61)..(61): /note="Nucleotide may be methylated to form 5-methylcytosine"
cccatggagaccgaggggtggctccaagctcccaggagggagaggctgtcctggggatcacgagaggacccaggcaccgcagctccgccacccttgtctggagcagaatcctgtgatcagaa

SEQ ID NO: 191 - DNA, 122 bp, Homo sapiens
  misc_feature (61)..(62): /note="This region represents a CpG dinucleotide"
  misc_feature (61)..(61): /note="Nucleotide may be methylated to form 5-methylcytosine"
caaaactaagatgatgggctgagtcatgataatgatgggacagccccctccttgaggcaacgccctgtgattgtgtgacattagaggctgctccttggtgattgctttctaaaggggaagag

SEQ ID NO: 192 - DNA, 122 bp, Homo sapiens
  misc_feature (61)..(62): /note="This region represents a CpG dinucleotide"
  misc_feature (61)..(61): /note="Nucleotide may be methylated to form 5-methylcytosine"
ccaccaagagctcatggtgtgctacaggtacaacccagccttcaggcacatggtcagcttcgcccaagcgtctgtaactatcacatcctgctctcttcagcaatgatatatttaagaggaag

SEQ ID NO: 193 - DNA, 122 bp, Homo sapiens
  misc_feature (61)..(62): /note="This region represents a CpG dinucleotide"
  misc_feature (61)..(61): /note="Nucleotide may be methylated to form 5-methylcytosine"
tattatttctctaggcttttgcaatcagatgctgggttggctggaagctggctggtatagcgtggccatgcagcaggctagtctaggcttagtcacatagtgattgcagggtttcaggaaaa

SEQ ID NO: 194 - DNA, 122 bp, Homo sapiens
  misc_feature (61)..(62): /note="This region represents a CpG dinucleotide"
  misc_feature (61)..(61): /note="Nucleotide may be methylated to form 5-methylcytosine"
tcaggaactctggcttggactatataagcagaggccacggccaaaccccaaaccactatccggccagaggcaggaaagtgaatcagaggagacgaggaagaagcctgaggttaacctcgtgc

SEQ ID NO: 195 - DNA, 122 bp, Homo sapiens
  misc_feature (61)..(62): /note="This region represents a CpG dinucleotide"
  misc_feature (61)..(61): /note="Nucleotide may be methylated to form 5-methylcytosine"
tttagaagtgctgcagagagccagcagttgatggttattgagtcagcacctgctgctcagcgcttgtgggaggtaaaagggtgtgatgctgactgctacaattccagtaagttcttctggca

SEQ ID NO: 196 - DNA, 122 bp, Homo sapiens
  misc_feature (61)..(62): /note="This region represents a CpG dinucleotide"
  misc_feature (61)..(61): /note="Nucleotide may be methylated to form 5-methylcytosine"
aaatagcacaccacagcccacagctctaccaaatggaggcataaagtgaggcagagaagtcggacagcttgagaacacgcatggccacaatgaatgacacaaaggaaaaggcaaaggcagca

SEQ ID NO: 197 - DNA, 122 bp, Homo sapiens
  misc_feature (61)..(62): /note="This region represents a CpG dinucleotide"
  misc_feature (61)..(61): /note="Nucleotide may be methylated to form 5-methylcytosine"
gccctgtcatcatcctgtgaagatgaatgtccacggtgcagggctgttgatgtagaaagacgtggagtgttgaaatgatgtacactgagtttgtgatttccccaggcactgcactctaatgt

SEQ ID NO: 198 - DNA, 122 bp, Homo sapiens
  misc_feature (61)..(62): /note="This region represents a CpG dinucleotide"
  misc_feature (61)..(61): /note="Nucleotide may be methylated to form 5-methylcytosine"
gggcacagaaaacacaaatttttgaaaccaacaggcaatgagtcactctttttgttctggcgtgtcatgtggtactttaggtagcttcacattttatgttctagttaagtaaaattcttaga

SEQ ID NO: 199 - DNA, 122 bp, Homo sapiens
  misc_feature (61)..(62): /note="This region represents a CpG dinucleotide"
  misc_feature (61)..(61): /note="Nucleotide may be methylated to form 5-methylcytosine"
gcttctgcctagcgcctctctgctgcgcgaggtcgtcccggccttacaaaaggagctcctcgctggtgagctcaagaccccaggcgggctctccccgaagggtcacttctccgagtgtgtcg

SEQ ID NO: 200 - DNA, 122 bp, Homo sapiens
  misc_feature (61)..(62): /note="This region represents a CpG dinucleotide"
  misc_feature (61)..(61): /note="Nucleotide may be methylated to form 5-methylcytosine"
ccagagacgcagggacctgcgcgtcgcatccagcgccccctccctctcccgtcccggcgccggcggtgtgcggcaggcaggagcccccacaatcatctgacgagcccacagtgcgcccggcg

SEQ ID NO: 201 - DNA, 122 bp, Homo sapiens
  misc_feature (61)..(62): /note="This region represents a CpG dinucleotide"
  misc_feature (61)..(61): /note="Nucleotide may be methylated to form 5-methylcytosine"
cgggcctctccttagtgccagagctcccagctgggattagccccacccttccctacttagcgggctcttcccaatgccccagagctgtcacacagctgggctccaccatgcactgggcttga

SEQ ID NO: 202 - DNA, 122 bp, Homo sapiens
  misc_feature (61)..(62): /note="This region represents a CpG dinucleotide"
  misc_feature (61)..(61): /note="Nucleotide may be methylated to form 5-methylcytosine"
ccttttgaatgttgaaatccttgttttttttctttttgttgagacagagtctccatctgtcgctcaggttggagtgcagtggcgtgatcttggctcactgcaagctccgcatcccgtgttca

SEQ ID NO: 203 - DNA, 122 bp, Homo sapiens
  misc_feature (61)..(62): /note="This region represents a CpG dinucleotide"
  misc_feature (61)..(61): /note="Nucleotide may be methylated to form 5-methylcytosine"
aacaagtgcatcagccatcggggagtgtgagaggaattaatgaaacactgaaagcattgccgatagtcagcatgaatttggagtggacacagaagtatgaaatggaaaatagccccacccca

SEQ ID NO: 204 - DNA, 122 bp, Homo sapiens
  misc_feature (61)..(62): /note="This region represents a CpG dinucleotide"
  misc_feature (61)..(61): /note="Nucleotide may be methylated to form 5-methylcytosine"
tgattcatttgcaactcaactcagctttggaactcctcagccctgagtttggtctttagtcgcctctgagaactttaattcctcgaatataaagtgcaggtgttaaaagcttttgtctcata

SEQ ID NO: 205 - DNA, 122 bp, Homo sapiens
  misc_feature (61)..(62): /note="This region represents a CpG dinucleotide"
  misc_feature (61)..(61): /note="Nucleotide may be methylated to form 5-methylcytosine"
gctctgtagcatcagacatcgatgagtcatcagtgatgcagctggccgagatgggtttcccgctggaagcatgtcgcaaggctgtgtacttcactggaaatatgggcgccgaggtggccttc

SEQ ID NO: 206 - DNA, 122 bp, Homo sapiens
  misc_feature (61)..(62): /note="This region represents a CpG dinucleotide"
  misc_feature (61)..(61): /note="Nucleotide may be methylated to form 5-methylcytosine"
aggctgcccagaatgcccccccctaccccacagaccccagctctgggctctcactacccacgcccagggcataaatctgctcccaagactgcagcaggaagggcaggagggcccagtctggg

SEQ ID NO: 207 - DNA, 122 bp, Homo sapiens
  misc_feature (61)..(62): /note="This region represents a CpG dinucleotide"
  misc_feature (61)..(61): /note="Nucleotide may be methylated to form 5-methylcytosine"
gcttcctggagcatgtcattgttattgcctaataagacctggtctttctagcatccccaccggacctgtctttgctttgtaatttttaaaattatgctttggtaagacacaaatttctcatg

SEQ ID NO: 208 - DNA, 122 bp, Homo sapiens
  misc_feature (61)..(62): /note="This region represents a CpG dinucleotide"
  misc_feature (61)..(61): /note="Nucleotide may be methylated to form 5-methylcytosine"
atcatttggaatggatttgaggtaatccataccaaatgtcctctgactctcatttccctacgtttttatgagtggggaaagaaggggtctgcccgtgcaagacagctgctcatgtgaatgtc

SEQ ID NO: 209 - DNA, 122 bp, Homo sapiens
  misc_feature (61)..(62): /note="This region represents a CpG dinucleotide"
  misc_feature (61)..(61): /note="Nucleotide may be methylated to form 5-methylcytosine"
gctggtggccaaagaccttaactgtcttggtctgtagaggctgctgtaacagagtgccaccgtctggatggcctatcagcaacagaaattggttctcacactcctggaagctggaagtccca

SEQ ID NO: 210 - DNA, 122 bp, Homo sapiens
  misc_feature (61)..(62): /note="This region represents a CpG dinucleotide"
  misc_feature (61)..(61): /note="Nucleotide may be methylated to form 5-methylcytosine"
cgggatgaagaactgcgggatgcgatccggggtgaggacgttggggcaggcgcttgtgggcgggcccggggcgcgacgcttggagaacaggccggaaggcgcccaacgggccgcaggctccg

SEQ ID NO: 211 - DNA, 122 bp, Homo sapiens
  misc_feature (61)..(62): /note="This region represents a CpG dinucleotide"
  misc_feature (61)..(61): /note="Nucleotide may be methylated to form 5-methylcytosine"
atccatcaatgtctaaactctcatggcattagcacactttcagtccctgtgaaataggggcgtactacctcccacccctgatcctatggagtgagacagtaataaaccgtaagctaagcaca

SEQ ID NO: 212 - DNA, 122 bp, Homo sapiens
  misc_feature (61)..(62): /note="This region represents a CpG dinucleotide"
  misc_feature (61)..(61): /note="Nucleotide may be methylated to form 5-methylcytosine"
tagtcatggcatgagtcagctgtgagggctgatggcacaccaccgaatactctgctgtggcgccactagcctccatttaccttcttctccaacgttttccagcctccctcataccttgcccc

SEQ ID NO: 213 - DNA, 122 bp, Homo sapiens
  misc_feature (61)..(62): /note="This region represents a CpG dinucleotide"
  misc_feature (61)..(61): /note="Nucleotide may be methylated to form 5-methylcytosine"
accaaggaagtgacttcagttgaactctgtacctgttgtgttcacttcctttgcaacatgcgtgactaatggttactccttctcttgaatgcttccagaagagtagcactcaccacctcatg

SEQ ID NO: 214 - DNA, 122 bp, Homo sapiens
  misc_feature (61)..(62): /note="This region represents a CpG dinucleotide"
  misc_feature (61)..(61): /note="Nucleotide may be methylated to form 5-methylcytosine"
gtggaaggagcttgctggagctgctggtcagtgcagcagcatggggaactgggcccacagcgtggtgcttcatgaaccttgcatgcttcctggccactctcgcagaatagtcagactctgtg

SEQ ID NO: 215 - DNA, 122 bp, Homo sapiens
  misc_feature (61)..(62): /note="This region represents a CpG dinucleotide"
  misc_feature (61)..(61): /note="Nucleotide may be methylated to form 5-methylcytosine"
catgtggactgagtggtaatgtatcagcctggagcaggtgtctacaggcgtctggcgcctcgttaccacattgagaagctggggtgcaggatgcagccagtggctttatctcaggctcttat

SEQ ID NO: 216 - DNA, 122 bp, Homo sapiens
  misc_feature (61)..(62): /note="This region represents a CpG dinucleotide"
  misc_feature (61)..(61): /note="Nucleotide may be methylated to form 5-methylcytosine"
ctgttaggttgcgtcagagtcccaatccaaatctcataactaagatcagttttggccaggcgtggtggctcacgcctgtaatcccagcactttgggaggcggaggcgggcggatcacgaggt

SEQ ID NO: 217 - DNA, 122 bp, Homo sapiens
  misc_feature (61)..(62): /note="This region represents a CpG dinucleotide"
  misc_feature (61)..(61): /note="Nucleotide may be methylated to form 5-methylcytosine"
acatctggctaatcaagtgaagatgaggccaaactggatgaaggcgggcctgaaatccaacgactggtgaccttataaggagggagagcttcaaagacccaggcagtcatagagggaagaag

SEQ ID NO: 218 - DNA, 122 bp, Homo sapiens
  misc_feature (61)..(62): /note="This region represents a CpG dinucleotide"
  misc_feature (61)..(61): /note="Nucleotide may be methylated to form 5-methylcytosine"
tggggcagcctcagcgcagcttctcgggtggggcggggcgctcggggcctaaggcgcagtcgcaggctggggagggggctcggctcgccggggacgcgcccaggagagaaagcggcggcagg

SEQ ID NO: 219 - DNA, 122 bp, Homo sapiens
  misc_feature (61)..(62): /note="This region represents a CpG dinucleotide"
  misc_feature (61)..(61): /note="Nucleotide may be methylated to form 5-methylcytosine"
actgttgcatgtactgtgataactgattacaagaactggagttattctgtcatactcaatcgagttaaatcaagagatcaggagaggaaaaaagcagcacacagggcacaagggcctgccca

SEQ ID NO: 220 - DNA, 122 bp, Homo sapiens
  misc_feature (61)..(62): /note="This region represents a CpG dinucleotide"
  misc_feature (61)..(61): /note="Nucleotide may be methylated to form 5-methylcytosine"
aaaaaaaaaaaggaagaaataaatgaatccagccaacaaccccgtgagtgatcgtggaaacggatctgcctggtcacaccctcggatgagactgcagcctcacaagagagcctgaggagttg

SEQ ID NO: 221 - DNA, 122 bp, Homo sapiens
  misc_feature (61)..(62): /note="This region represents a CpG dinucleotide"
  misc_feature (61)..(61): /note="Nucleotide may be methylated to form 5-methylcytosine"
cacgatttagctcaccattttgcagggtggcagcttgggctgggcatgggtgagctcactcgtgtgtctgaggttagctgtggtcacctaggctgctctgcttctaggggttggctaattgt

SEQ ID NO: 222 - DNA, 122 bp, Homo sapiens
  misc_feature (61)..(62): /note="This region represents a CpG dinucleotide"
  misc_feature (61)..(61): /note="Nucleotide may be methylated to form 5-methylcytosine"
ccctcatatgccacacgggacatgagcaggccggccgggagccgggtcccgggagctccacgaaggggcctgtcctccatgaccaggacacccgctgcgccttcctcccgaggcctcccggg

SEQ ID NO: 223 - DNA, 122 bp, Homo sapiens
  misc_feature (61)..(62): /note="This region represents a CpG dinucleotide"
  misc_feature (61)..(61): /note="Nucleotide may be methylated to form 5-methylcytosine"
attacatttcagagaacaatgtttaggttataaggttcccgtcagagctgtttcacaacacgtgtttacataatctgaagtgaaggcagcagtggactgtaaaaccggccagccaggccagt

SEQ ID NO: 224 - DNA, 122 bp, Homo sapiens
  misc_feature (61)..(62): /note="This region represents a CpG dinucleotide"
  misc_feature (61)..(61): /note="Nucleotide may be methylated to form 5-methylcytosine"
tctgcttacattgtaaggtgttggctcatttctgaaagcaaaggcatttaaactatctcacggacaactcactctggcccaaaccaccacattcacttgaaacaagaagtgtatgcagtggt

SEQ ID NO: 225 - DNA, 122 bp, Homo sapiens
  misc_feature (61)..(62): /note="This region represents a CpG dinucleotide"
  misc_feature (61)..(61): /note="Nucleotide may be methylated to form 5-methylcytosine"
gggagcggcaaggttggcctctagcccctcaggtggagctagcagagcagggagctcctgcgaggcatcagactggatgcctggagcacctgctggtatcagactccactgctccccattta

SEQ ID NO: 226 - DNA, 122 bp, Homo sapiens
  misc_feature (61)..(62): /note="This region represents a CpG dinucleotide"
  misc_feature (61)..(61): /note="Nucleotide may be methylated to form 5-methylcytosine"
tgttgctctgtgcaaaatgcaaaatgtatgctcaccctgaaaacaactatgcaagaaatacgcatgcacttggacagacaggagagtgagtacacaaagtcaagacaagtgtgtttggaggt

SEQ ID NO: 227 - DNA, 122 bp, Homo sapiens
  misc_feature (61)..(62): /note="This region represents a CpG dinucleotide"
  misc_feature (61)..(61): /note="Nucleotide may be methylated to form 5-methylcytosine"
ctcctggggatcaaggactcagctggagagcagttcagggagtggtctgccaccagacatcgtcaccggactcgtccggcgagatgcaagcttggctcttgggttagcctgggccaagcgca

SEQ ID NO: 228 - DNA, 122 bp, Homo sapiens
  misc_feature (61)..(62): /note="This region represents a CpG dinucleotide"
  misc_feature (61)..(61): /note="Nucleotide may be methylated to form 5-methylcytosine"
aaaggcgttctgcactcaggttttgttactatgcagattcctgctacatcagctcaaaaccgtgtgcggcttagtctaaatgcctatttaagcaaaggccaaaagtctgtttgaagatataa

SEQ ID NO: 229 - DNA, 122 bp, Homo sapiens
  misc_feature (61)..(62): /note="This region represents a CpG dinucleotide"
  misc_feature (61)..(61): /note="Nucleotide may be methylated to form 5-methylcytosine"
tcagatgggacagcattgtgtaattgcagcttatttggcactcagggcccagctccagaacgttctattaaaccagctatatgtccactcggaagttatcagataattccaacacttgattt

SEQ ID NO: 230 - DNA, 122 bp, Homo sapiens
  misc_feature (61)..(62): /note="This region represents a CpG dinucleotide"
  misc_feature (61)..(61): /note="Nucleotide may be methylated to form 5-methylcytosine"
caggcaacagcattgcatatccccaggtgtaaaatactagtcatcactcttgctgattcacgggagtaggagtcttttcctgcattttagcttacgggttttaattttatgacgtaaaattg

SEQ ID NO: 231 - DNA, 122 bp, Homo sapiens
  misc_feature (61)..(62): /note="This region represents a CpG dinucleotide"
  misc_feature (61)..(61): /note="Nucleotide may be methylated to form 5-methylcytosine"
tttagagttcctttctaaacagtaaaggaaatttcttcatcactcttcccacatgggcagcggcttgtcctatgtgtaccctcttgctggcagggacaggcaatggttctgccctgtggatc

SEQ ID NO: 232 - DNA, 122 bp, Homo sapiens
  misc_feature (61)..(62): /note="This region represents a CpG dinucleotide"
  misc_feature (61)..(61): /note="Nucleotide may be methylated to form 5-methylcytosine"
caaattagattacagaatcagcatttagtaaatctcagcctccttcctttcccaaactagcgactcatcctcgagtttaagaaagaacacaggaaggaaagaaggcaatatccctctctgct

SEQ ID NO: 233 - DNA, 122 bp, Homo sapiens
  misc_feature (61)..(62): /note="This region represents a CpG dinucleotide"
  misc_feature (61)..(61): /note="Nucleotide may be methylated to form 5-methylcytosine"
aggcagttgcagtctgattgtgacatctgccgagagctgagtctggacaggttcctctgccgctcttggccaggggtgtagcccccgtgccaccttagtgattccttcaggccatcatttgt

SEQ ID NO: 234 - DNA, 122 bp, Homo sapiens
  misc_feature (61)..(62): /note="This region represents a CpG dinucleotide"
  misc_feature (61)..(61): /note="Nucleotide may be methylated to form 5-methylcytosine"
taggttgcttgtagcctgctggttgcactgtttatgaaacagctgtgaggacaggtgggccgtaatctctgggtagctaaagcccagcagcagcccgaggatcatgtgtcaaccctgtaata

SEQ ID NO: 235 - DNA, 122 bp, Homo sapiens
  misc_feature (61)..(62): /note="This region represents a CpG dinucleotide"
  misc_feature (61)..(61): /note="Nucleotide may be methylated to form 5-methylcytosine"
caggtggatttacatctaatatgttacaatcctgatgtaaatccccaggaggaagcctggcgttagccacccttactctgcacagtgctatccttgctgttgctttcatctctggcaggagt

SEQ ID NO: 236 - DNA, 122 bp, Homo sapiens
  misc_feature (61)..(62): /note="This region represents a CpG dinucleotide"
  misc_feature (61)..(61): /note="Nucleotide may be methylated to form 5-methylcytosine"
caaagacttagaaagtcccactgggctcacaagcaccctggcagggagggcagagagcggcgttaagaaaccacatggtgccattagatgctcttgacgtgctgtggttttctggttcactc

SEQ ID NO: 237 - DNA, 122 bp, Homo sapiens
  misc_feature (61)..(62): /note="This region represents a CpG dinucleotide"
  misc_feature (61)..(61): /note="Nucleotide may be methylated to form 5-methylcytosine"
cgctggcatcactgtcaggacttatctcaggcaacaggctttcctggtcattcttttctccgcgtctggcatcggagcctttcctcagaagcttccagggtatgattggggttctgaaggct

SEQ ID NO: 238 - DNA, 122 bp, Homo sapiens
  misc_feature (61)..(62): /note="This region represents a CpG dinucleotide"
  misc_feature (61)..(61): /note="Nucleotide may be methylated to form 5-methylcytosine"
atcttggcctctcctgctgaatcagagcgcgctgcttaacacgctcccgggtgactcgtacgtagtcagtgctgggaagcgctggtctacagtcatgtttctcaagcttgaatgcacatccg

SEQ ID NO: 239 - DNA, 122 bp, Homo sapiens
  misc_feature (61)..(62): /note="This region represents a CpG dinucleotide"
  misc_feature (61)..(61): /note="Nucleotide may be methylated to form 5-methylcytosine"
gatcctaaaagagacagttttcaagtggaattaaaatagacagaattcatggccaggtgccgtcactgacacttgtaatcccagcactttgggaggctgagacagtggattacttgagccca

SEQ ID NO: 240 - DNA, 122 bp, Homo sapiens
  misc_feature (61)..(62): /note="This region represents a CpG dinucleotide"
  misc_feature (61)..(61): /note="Nucleotide may be methylated to form 5-methylcytosine"
tagaggaaacacaattcaaacacagaaatacaatctgaaatgaacttcctgatactagggcgaggaaaatataaatgtttggaaaggaaaccatctggtctctcaactttatggatcttaaa

SEQ ID NO: 241 - DNA, 122 bp, Homo sapiens
  misc_feature (61)..(62): /note="This region represents a CpG dinucleotide"
  misc_feature (61)..(61): /note="Nucleotide may be methylated to form 5-methylcytosine"
acgcccggcttactgacaattttacctgccacattgcccttccttagatttcccaagtaccgtctttgttctcatcaataagctaccagcactgctgaggaacaggtaggcttgagcaggac

SEQ ID NO: 242 - DNA, 122 bp, Homo sapiens
  misc_feature (61)..(62): /note="This region represents a CpG dinucleotide"
  misc_feature (61)..(61): /note="Nucleotide may be methylated to form 5-methylcytosine"
ggtaatgtgtgttggcaccatgcctggcactagcaggtgctgtggaggtactgctgtcatcgttgccaccatcctcaggagggttgagttggcaccgagataaacatggaagataatacgca

SEQ ID NO: 243 - DNA, 122 bp, Homo sapiens
  misc_feature (61)..(62): /note="This region represents a CpG dinucleotide"
  misc_feature (61)..(61): /note="Nucleotide may be methylated to form 5-methylcytosine"
aagcagcagacacgaggactgagaggctctagctacatagtctggctcaggcttctctaccgtgaaaaatgatgggaaaaagaaaaagaaaaagaagcagaaaaacaaaacccgagacagaa

SEQ ID NO: 244 - DNA, 122 bp, Homo sapiens
  misc_feature (61)..(62): /note="This region represents a CpG dinucleotide"
  misc_feature (61)..(61): /note="Nucleotide may be methylated to form 5-methylcytosine"
acacatactttagagcaagggagctttcgttagtgcttgagtcatagtcacaaagttacgcggcttgccctaatattgcgtcatgaaggcagacctaccaggcaaacgttagtacagataat

SEQ ID NO: 245 - DNA, 122 bp, Homo sapiens
  misc_feature (61)..(62): /note="This region represents a CpG dinucleotide"
  misc_feature (61)..(61): /note="Nucleotide may be methylated to form 5-methylcytosine"
tcatctcatttatgtaaacattgtgaggaaatagagcactggagagttaaggaactcactcgggtactcactgctggtaagtgatgcagccaggattcaacccagcccatcagatggcagca

SEQ ID NO: 246 - DNA, 122 bp, Homo sapiens
  misc_feature (61)..(62): /note="This region represents a CpG dinucleotide"
  misc_feature (61)..(61): /note="Nucleotide may be methylated to form 5-methylcytosine"
ccgtcctcacacatcgaatgtgacggtattgagataaatgctaacaattagggacccccccggtgaagagtacacagcaggaaggaagctctttgtaccccttttgcaacttttcagtaaat

SEQ ID NO: 247 - DNA, 122 bp, Homo sapiens
  misc_feature (61)..(62): /note="This region represents a CpG dinucleotide"
  misc_feature (61)..(61): /note="Nucleotide may be methylated to form 5-methylcytosine"
ctttttctaacaaagggataatactgctattcaccttgtaggcttattgtgacaatttaacgtaacctgctgagctcagttcctggtactcagcaagcactcaagtgttagctatgttctag

SEQ ID NO: 248 - DNA, 122 bp, Homo sapiens
  misc_feature (61)..(62): /note="This region represents a CpG dinucleotide"
  misc_feature (61)..(61): /note="Nucleotide may be methylated to form 5-methylcytosine"
tgcctcaagctgcttctcctctctctgcaccaataggaacaggttggtcacccagataaacgagtatgacacatagaaaggagggctggaaagccaaggagatggtgtgcaacaccagtcag

SEQ ID NO: 249 - DNA, 122 bp, Homo sapiens
  misc_feature (61)..(62): /note="This region represents a CpG dinucleotide"
  misc_feature (61)..(61): /note="Nucleotide may be methylated to form 5-methylcytosine"
ttctgaatagtataaaaatctaattccctgtgcttatcggcttcaactgtgcttacacaacgtttgtttctaattcgtactcttgcctcttggtttctgtagtttttcaacccatttctgtc

SEQ ID NO: 250 - DNA, 122 bp, Homo sapiens
  misc_feature (61)..(62): /note="This region represents a CpG dinucleotide"
  misc_feature (61)..(61): /note="Nucleotide may be methylated to form 5-methylcytosine"
cggacttctgcaaggccagacgtgaggcgacactgaattgctcccgagacgcgggaagggcgaaggcaatcgaagcgaagagctttaactcatcttctccaggatttggggcacgggaacct

SEQ ID NO: 251 - DNA, 122 bp, Homo sapiens
  misc_feature (61)..(62): /note="This region represents a CpG dinucleotide"
  misc_feature (61)..(61): /note="Nucleotide may be methylated to form 5-methylcytosine"
agaccccaccccttcttgggtaactgctttactctcttgcatatccttccagtaactcttcgtgaaaaaaaatacatatgcaaataatttatagcctggtccctcccttccttacacaaaag

SEQ ID NO: 252 - DNA, 122 bp, Homo sapiens
  misc_feature (61)..(62): /note="This region represents a CpG dinucleotide"
  misc_feature (61)..(61): /note="Nucleotide may be methylated to form 5-methylcytosine"
ggaggagtgctgcaggcgggcgcgtctggcacgggcccctccgggtggcggcaagggcgccggtggcccaggctcagggcctctgtctggcgccacgtcctgctgcccagagctggggcgct

SEQ ID NO: 253 - DNA, 122 bp, Homo sapiens
  misc_feature (61)..(62): /note="This region represents a CpG dinucleotide"
  misc_feature (61)..(61): /note="Nucleotide may be methylated to form 5-methylcytosine"
aaattcttatggagaaatagtgccctggagttgtgaaaaagaaatgggctcccgcagctgcgtcacagcatttgatcacttcagccgagagtgccaggagatttgagacagatgttttcaga

SEQ ID NO: 254 - DNA, 122 bp, Homo sapiens
  misc_feature (61)..(62): /note="This region represents a CpG dinucleotide"
  misc_feature (61)..(61): /note="Nucleotide may be methylated to form 5-methylcytosine"
atctactactgcacaacaaaccactccaaaatagtggcttaaaaccatagcagtcacttacgttgcttactaatctgggcattgactgggctcagccaggcagttctcactaggggtcgcta

SEQ ID NO: 255 - DNA, 122 bp, Homo sapiens
  misc_feature (61)..(62): /note="This region represents a CpG dinucleotide"
  misc_feature (61)..(61): /note="Nucleotide may be methylated to form 5-methylcytosine"
cacagagagagggcaggggccagtgctgaggacagagtggtcaggagatcccaccccagacgcagggctgcagggaaggccaggctggctgggagttcagccagctccttctccagccactt

SEQ ID NO: 256 - DNA, 122 bp, Homo sapiens
  misc_feature (61)..(62): /note="This region represents a CpG dinucleotide"
  misc_feature (61)..(61): /note="Nucleotide may be methylated to form 5-methylcytosine"
tgcggactcggagcagctcggggctgcgcagcgggaaggctcgcctagtcggtccgcatccgtgtcgaccacctgtctggacaccacgaagatgccacccgttgggggcaaaaaggccaaga

SEQ ID NO: 257 - DNA, 122 bp, Homo sapiens
  misc_feature (61)..(62): /note="This region represents a CpG dinucleotide"
  misc_feature (61)..(61): /note="Nucleotide may be methylated to form 5-methylcytosine"
cgacagattgacaaggcacgtaaacttctctaggcagaggaaatagaatgtgcaaaggcacgtcgttacgaaacagcatagtacagaggaaaactgcaagggtctgaactgaaatgaagaca

SEQ ID NO: 258 - DNA, 122 bp, Homo sapiens
  misc_feature (61)..(62): /note="This region represents a CpG dinucleotide"
  misc_feature (61)..(61): /note="Nucleotide may be methylated to form 5-methylcytosine"
tctgggagttcaagattgtgcagtaattggttaggactctgagcgccgctgttcaccaatcggggagagaaaagcggagatcctgctcgccttgcacgcgcctgaagcacaaagcagatagc

SEQ ID NO: 259 - DNA, 122 bp, Homo sapiens
  misc_feature (61)..(62): /note="This region represents a CpG dinucleotide"
  misc_feature (61)..(61): /note="Nucleotide may be methylated to form 5-methylcytosine"
tcaaaaaaaaaaaaaaaagaaaaagctattttgaaattcatatggaaccaaaaaagagctcgaatagctaaggcaaccctaagcaaagctgaaggcatcaccttacccaacttcaaactata

SEQ ID NO: 260 - DNA, 122 bp, Homo sapiens
  misc_feature (61)..(62): /note="This region represents a CpG dinucleotide"
  misc_feature (61)..(61): /note="Nucleotide may be methylated to form 5-methylcytosine"
aaaggagagataacttaggctccggagaagagggattttcagttaatttatggaatccaccgtcacactctctccgagcagccagctccccgcttaacggggaaattgaagcagacagcctt

SEQ ID NO: 261 - DNA, 122 bp, Homo sapiens
  misc_feature (61)..(62): /note="This region represents a CpG dinucleotide"
  misc_feature (61)..(61): /note="Nucleotide may be methylated to form 5-methylcytosine"
tgtcgctccgtggccttaatatagggctccggggcgcggggccagcgaggctctaccaggcgcgccggggccgtgtgcggctccactgagtgcccgatcctgggctgggggcaccgtccccc

SEQ ID NO: 262 - DNA, 122 bp, Homo sapiens
  misc_feature (61)..(62): /note="This region represents a CpG dinucleotide"
  misc_feature (61)..(61): /note="Nucleotide may be methylated to form 5-methylcytosine"
gaactttaagataatgatccagggtatgtatgtgatatgtcagcatggacagttgtcactcgtggggctaagtgacaggttttaataagtagcacttgctcctttcaaaggtgacaagtatt

SEQ ID NO: 263 - DNA, 122 bp, Homo sapiens
  misc_feature (61)..(62): /note="This region represents a CpG dinucleotide"
  misc_feature (61)..(61): /note="Nucleotide may be methylated to form 5-methylcytosine"
ggtgtcaaaggtgaaggaaacttgggggttgaatggagatgaagaaatctcctcatgtggcgaaactcaactgaaagttgacacgcatatgactaacccagaaagcaagggacacagcccag

SEQ ID NO: 264 - DNA, 122 bp, Homo sapiens
  misc_feature (61)..(62): /note="This region represents a CpG dinucleotide"
  misc_feature (61)..(61): /note="Nucleotide may be methylated to form 5-methylcytosine"
catttttgtgaacgtcttttggtgcacaaagtaggtgttcctggggtatatattaggagtcgaactgctgagtcataagtcatgtgtatatgcagctttactagatattgccagaccgtttt

SEQ ID NO: 265 - DNA, 122 bp, Homo sapiens
  misc_feature (61)..(62): /note="This region represents a CpG dinucleotide"
  misc_feature (61)..(61): /note="Nucleotide may be methylated to form 5-methylcytosine"
ttaaagccaaaggtggtgcttttttttttctttttttttcttgagacagcgtctccctctcgcttctgtcacccaggctggagtgccagtggcgcaatctcggctcactgcaaactccgcct

SEQ ID NO: 266 - DNA, 122 bp, Homo sapiens
  misc_feature (61)..(62): /note="This region represents a CpG dinucleotide"
  misc_feature (61)..(61): /note="Nucleotide may be methylated to form 5-methylcytosine"
agccagtggctgttaacaatatattaagtacggaagcactaatggcaaacgccaagtccacgctcatgttctatgtagttggattcttgtggcagccgggtgggggcgtggccacaaggctg

SEQ ID NO: 267 - DNA, 122 bp, Homo sapiens
  misc_feature (61)..(62): /note="This region represents a CpG dinucleotide"
  misc_feature (61)..(61): /note="Nucleotide may be methylated to form 5-methylcytosine"
ttttattgcactgtggtcgggggcagagcgggaaccacaaccatgacttagtgtgcattgcgggttctttcttggtcttacaaatttttcgtgttgtaaatggcccgtaagcccgtgggagg

SEQ ID NO: 268 - DNA, 122 bp, Homo sapiens
  misc_feature (61)..(62): /note="This region represents a CpG dinucleotide"
  misc_feature (61)..(61): /note="Nucleotide may be methylated to form 5-methylcytosine"
gcatctaaacactgggtggttccactgaaaatccagacacagggaaggctcctgcctgcccgctacatccctgcccgctccagcactgtaaccccggcggctcctccagatcttgcaatgct

SEQ ID NO: 269 - DNA, 122 bp, Homo sapiens
  misc_feature (61)..(62): /note="This region represents a CpG dinucleotide"
  misc_feature (61)..(61): /note="Nucleotide may be methylated to form 5-methylcytosine"
gagggtgagttaccctgtgccaacaacagcggggtgagctaaggtgcttgagggtagagacgcagtcaagcctctcaagcaaaaaatgcagcagctaatttcagagtgggaaatgcccctct

SEQ ID NO: 270 - DNA, 122 bp, Homo sapiens
  misc_feature (61)..(62): /note="This region represents a CpG dinucleotide"
  misc_feature (61)..(61): /note="Nucleotide may be methylated to form 5-methylcytosine"
tgaagaaatgaggatgagacagcagagtaatatgtccaagatcacacagcaccctgagcacgtactctgtgtacttaatcaccacatggagtccttcctggggccatcaaatgatcccccca

SEQ ID NO: 271 - DNA, 122 bp, Homo sapiens
  misc_feature (61)..(62): /note="This region represents a CpG dinucleotide"
  misc_feature (61)..(61): /note="Nucleotide may be methylated to form 5-methylcytosine"
aagcgtaaggcggcgttctcaatgcttagcagtgcattgggatcgcctggtgaacgggaacgatactgacggccagcgcccccactcccaattcgactggtctaaagtggggcccagatact

SEQ ID NO: 272 - DNA, 122 bp, Homo sapiens
  misc_feature (61)..(62): /note="This region represents a CpG dinucleotide"
  misc_feature (61)..(61): /note="Nucleotide may be methylated to form 5-methylcytosine"
gttgggattacagatgtgagccaccacacccaggtgacagctaactttagaaggcagtgtcgcaccatttcctgccacacctctgcccatgccgtttcctcagccaggagcaccctttcccc

SEQ ID NO: 273 - DNA, 122 bp, Homo sapiens
  misc_feature (61)..(62): /note="This region represents a CpG dinucleotide"
  misc_feature (61)..(61): /note="Nucleotide may be methylated to form 5-methylcytosine"
gtgcgatttttgcgccaatccctttgctctttcaaataagcattaccgtacccattttagcggtgaggcaactgaagcccagagaggttaaataacttgcccaaagcctcacagcaaagttg

SEQ ID NO: 274 - DNA, 122 bp, Homo sapiens
  misc_feature (61)..(62): /note="This region represents a CpG dinucleotide"
  misc_feature (61)..(61): /note="Nucleotide may be methylated to form 5-methylcytosine"
tcgtctccctgacctgttccttgcgaggcccgggaggagacgcgcctggccggtccttggcggcgaaactgatttgcatctccacgctttacctaaagcccgggctctggggactggatggc

SEQ ID NO: 275 - DNA, 122 bp, Homo sapiens
  misc_feature (61)..(62): /note="This region represents a CpG dinucleotide"
  misc_feature (61)..(61): /note="Nucleotide may be methylated to form 5-methylcytosine"
tagcgccttgcatctgctacagcagcttcacctgctcaatcagggccacaactatcttggcgacagcagcagcaatgccaccagccagatggtccttggcaaaggagatcgcctgttgtgtc

SEQ ID NO: 276 - DNA, 122 bp, Homo sapiens
  misc_feature (61)..(62): /note="This region represents a CpG dinucleotide"
  misc_feature (61)..(61): /note="Nucleotide may be methylated to form 5-methylcytosine"
tgtttttttcctccctcctgaaaatgaccctagagattgcccccacaggatttagaatcacgcgcacctggatttcaatactggctgtgcttcttggtgacaagactttgggaaagccgtgt

SEQ ID NO: 277 - DNA, 122 bp, Homo sapiens
  misc_feature (61)..(62): /note="This region represents a CpG dinucleotide"
  misc_feature (61)..(61): /note="Nucleotide may be methylated to form 5-methylcytosine"
ctccctctcatagtcccgcccctcgtcctttcccacactttccctggcagcccctctcaccgccctaggataagaaacccgcgctggggcgctgtccaggaaacctgtgccagcacagcgtg

SEQ ID NO: 278 - DNA, 122 bp, Homo sapiens
  misc_feature (61)..(62): /note="This region represents a CpG dinucleotide"
  misc_feature (61)..(61): /note="Nucleotide may be methylated to form 5-methylcytosine"
tggaaaataaaatttatatttctaactttgttttccctaagtcaaatgagatgcatacaacgtatctcttggtcagcattaagatgaatgggtgaattgatgaatgaatgaatgagaggttg

SEQ ID NO: 279 - DNA, 122 bp, Homo sapiens
  misc_feature (61)..(62): /note="This region represents a CpG dinucleotide"
  misc_feature (61)..(61): /note="Nucleotide may be methylated to form 5-methylcytosine"
aatggcttaatcagtacctcatttacttgattaagtttttcaatagctctacgttctctgcgttgggaatcattctgactcattagtttctgtcattccatgctattaagtatcaatacgta

SEQ ID NO: 280 - DNA, 122 bp, Homo sapiens
  misc_feature (61)..(62): /note="This region represents a CpG dinucleotide"
  misc_feature (61)..(61): /note="Nucleotide may be methylated to form 5-methylcytosine"
atagttggtcttcacaactgagttctgtggccttctctagggcttagcaaaatttatgaacgttcctaaattacttgcacaactggcaagtggcagagctgggattacaacctagaaggctg

SEQ ID NO: 281 - DNA, 122 bp, Homo sapiens
  misc_feature (61)..(62): /note="This region represents a CpG dinucleotide"
  misc_feature (61)..(61): /note="Nucleotide may be methylated to form 5-methylcytosine"
ttccagttacataggccaatacatttcctttttggttaaactcatttgagttggcttttccgttagttgccgctgaaagcacgctaccagatacagtaagcattataatccctacttttaca

SEQ ID NO: 282 - DNA, 122 bp, Homo sapiens
  misc_feature (61)..(62): /note="This region represents a CpG dinucleotide"
  misc_feature (61)..(61): /note="Nucleotide may be methylated to form 5-methylcytosine"
acacccaccagatttcctcctacctctcaggctgatcctcctctctcttttttgcaggtccgccttcctgactcaaccaatggtgttggtgttccctgggccaattccagcccatttccttc

SEQ ID NO: 283 - DNA, 122 bp, Homo sapiens
  misc_feature (61)..(62): /note="This region represents a CpG dinucleotide"
  misc_feature (61)..(61): /note="Nucleotide may be methylated to form 5-methylcytosine"
ttgcaagtcatatatttgacagaagtctgggcacagcgactcaggcttataatcctaacacgtgggggccgaggtggaagcattgtttgagtgcaggaattcgagaccagcttgggcaacat

SEQ ID NO: 284 - DNA, 122 bp, Homo sapiens
  misc_feature (61)..(62): /note="This region represents a CpG dinucleotide"
  misc_feature (61)..(61): /note="Nucleotide may be methylated to form 5-methylcytosine"
tgtaggcagcagacggtggacgctgagggtcggggcctgcgccctgtggggcagcctcagcgcagcttctcgggtggggcggggcgctcggggcctaaggcgcagtcgcaggctggggaggg

SEQ ID NO: 285 - DNA, 122 bp, Homo sapiens
  misc_feature (61)..(62): /note="This region represents a CpG dinucleotide"
  misc_feature (61)..(61): /note="Nucleotide may be methylated to form 5-methylcytosine"
catcctcctagttgtcctcagactcctgggtctcctcagcgtcgccgtactcctcctcctcgctcttgaggtcatcgtataccactttgttaacggccgagggcctcggtggtgcacgccag

SEQ ID NO: 286 - DNA, 122 bp, Homo sapiens
  misc_feature (61)..(62): /note="This region represents a CpG dinucleotide"
  misc_feature (61)..(61): /note="Nucleotide may be methylated to form 5-methylcytosine"
tcagtatcctacagatggtgctacatgtccctcaaacatttaaagtatcccagagagctccgttgattgattatagtgtattgtgctactactgtttcccatgagtatttactatattctca

SEQ ID NO: 287 - DNA, 122 bp, Homo sapiens
  misc_feature (61)..(62): /note="This region represents a CpG dinucleotide"
  misc_feature (61)..(61): /note="Nucleotide may be methylated to form 5-methylcytosine"
ctcgctccgggttcgagacggaagaaacacgcggcgcaggctccggagcgacggctccgacggggacccgttaaataatttattgatgatacaaagcgactcgcgcccacccggggccgccc

SEQ ID NO: 288 - DNA, 122 bp, Homo sapiens
  misc_feature (61)..(62): /note="This region represents a CpG dinucleotide"
  misc_feature (61)..(61): /note="Nucleotide may be methylated to form 5-methylcytosine"
ctcagtatgcttcctctcatagtggacatagaagcagagcatgcaagtgtagagatcacacggtagaagaggaagcaagagagagtagggagttgccaggctctttttatataccaaccagc

SEQ ID NO: 289 - DNA, 122 bp, Homo sapiens
  misc_feature (61)..(62): /note="This region represents a CpG dinucleotide"
  misc_feature (61)..(61): /note="Nucleotide may be methylated to form 5-methylcytosine"
tagatgcggcttatctcagcacagcttcctctgtcctccagaacccctagtggcagcatacggttgctgatgacactttagactcaggataaattcttactggatttgagaaacttaattct

SEQ ID NO: 290 - DNA, 122 bp, Homo sapiens
  misc_feature (61)..(62): /note="This region represents a CpG dinucleotide"
  misc_feature (61)..(61): /note="Nucleotide may be methylated to form 5-methylcytosine"
taacatatgaatgaaagaaaagttgtgaactcatggaatcgtacttacacctaaagccaccggatgtcgctgtcgtccacaaaatagctttttagaacaaaggcatcagccagtttctcaag

SEQ ID NO: 291 - DNA, 122 bp, Homo sapiens
  misc_feature (61)..(62): /note="This region represents a CpG dinucleotide"
  misc_feature (61)..(61): /note="Nucleotide may be methylated to form 5-methylcytosine"
tgactgtccttcagcacgtacacggttcagcctcagctacagaccatcactgctacagagcgacaacttcccattcggacttaggcagcgtttcagttcattacagagaagtggttttctca

SEQ ID NO: 292 - DNA, 122 bp, Homo sapiens
  misc_feature (61)..(62): /note="This region represents a CpG dinucleotide"
  misc_feature (61)..(61): /note="Nucleotide may be methylated to form 5-methylcytosine"
tggacctgatgtcacatgctgattcagaccctagctctcgggccctacctacttcctgaacgggaacatggcttagagaagcacatggcattgggcctcgcccatgcaaccagccacacaca

SEQ ID NO: 293 - DNA, 122 bp, Homo sapiens
  misc_feature (61)..(62): /note="This region represents a CpG dinucleotide"
  misc_feature (61)..(61): /note="Nucleotide may be methylated to form 5-methylcytosine"
ccatcgtgcaatgtggtgcggcaaccaagccagggctgctccatgaagaggaagcaaagacggcttgccaggacagtgatggagaagaacaaaaaggcaggatcgcctcaataaaaggaggg

SEQ ID NO: 294 - DNA, 122 bp, Homo sapiens
  misc_feature (61)..(62): /note="This region represents a CpG dinucleotide"
  misc_feature (61)..(61): /note="Nucleotide may be methylated to form 5-methylcytosine"
tttcgagaactcgcagcacctggattatatcaccgagaagctctggcgcaacgcgttgctcgctggggcggtgccggtggtgctgggcccagaccgtgccaactacgagcgctttgtgcccc

SEQ ID NO: 295 - DNA, 122 bp, Homo sapiens
  misc_feature (61)..(62): /note="This region represents a CpG dinucleotide"
  misc_feature (61)..(61): /note="Nucleotide may be methylated to form 5-methylcytosine"
tatcataggctgttcccagaatgaggcaaccacaggaagcattcctgtggagttcctgtccgtcacttctgaacaagaggttgctgccagggtaggtggaaggacaacaagagcaggggcct

SEQ ID NO: 296 - DNA, 122 bp, Homo sapiens
  misc_feature (61)..(62): /note="This region represents a CpG dinucleotide"
  misc_feature (61)..(61): /note="Nucleotide may be methylated to form 5-methylcytosine"
agcaagtgggaaagacctgagcaagaagagctgcatccttgatacattgaagagcagccacgactctttcagctgcttgagagaatgctgtgagatgaatctgaggaattaggcagagcctt

SEQ ID NO: 297 - DNA, 122 bp, Homo sapiens
  misc_feature (61)..(62): /note="This region represents a CpG dinucleotide"
  misc_feature (61)..(61): /note="Nucleotide may be methylated to form 5-methylcytosine"
gcttatgacgttgaaagggaaacagttccagtatttcaggaatattttttttctgagagacggagagtgctcattctccagagctgtgtgtgcacgagataaacaactcctgaaacttcctc

SEQ ID NO: 298 - DNA, 122 bp, Homo sapiens
  misc_feature (61)..(62): /note="This region represents a CpG dinucleotide"
  misc_feature (61)..(61): /note="Nucleotide may be methylated to form 5-methylcytosine"
cagcctcagggaggaggagaaagcctgattgcttcaggagagcatgtttcccaacggtagcgttggtttgcccagtgctcacagctagctctgaaggatgcatagtccatacctgactgccc

SEQ ID NO: 299 - DNA, 122 bp, Homo sapiens
  misc_feature (61)..(62): /note="This region represents a CpG dinucleotide"
  misc_feature (61)..(61): /note="Nucleotide may be methylated to form 5-methylcytosine"
tgcaaaacgaccgactctattgaagacacactgggtggcgcgggaggttcctgccaatgccgggaggaagagcaacccaggacgcctgtgcctgggagggatggaaaggccaggggagggtg

SEQ ID NO: 300 - DNA, 122 bp, Homo sapiens
  misc_feature (61)..(62): /note="This region represents a CpG dinucleotide"
  misc_feature (61)..(61): /note="Nucleotide may be methylated to form 5-methylcytosine"
tgttgctgattcatcttgtagagctatcaactcagagccagtaggtatctgatcttgggacgggatagaggatgagactgtattttgtcacccttcaggaagctaagtcactagcatgctta

SEQ ID NO: 301 - DNA, 122 bp, Homo sapiens
  misc_feature (61)..(62): /note="This region represents a CpG dinucleotide"
  misc_feature (61)..(61): /note="Nucleotide may be methylated to form 5-methylcytosine"
tcagttttgtacaaatttgtatttgttctgtctgcagcccaggaacgtgcactctcaggccgcagggccttctctaaggaggtgctggctcccctcacaacagaggcaggctagcttttttc

SEQ ID NO: 302 - DNA, 122 bp, Homo sapiens
  misc_feature (61)..(62): /note="This region represents a CpG dinucleotide"
  misc_feature (61)..(61): /note="Nucleotide may be methylated to form 5-methylcytosine"
gcaaaatcacaccaggttctgctgggcaaatctcccaggtggcgtattgctagaggagagcgccactgcagaggacacactgtcttggccactggctttgcaaaccatagtggaggagggag

SEQ ID NO: 303 - DNA, 122 bp, Homo sapiens
  misc_feature (61)..(62): /note="This region represents a CpG dinucleotide"
  misc_feature (61)..(61): /note="Nucleotide may be methylated to form 5-methylcytosine"
taattgtagatggatttccaaaccacagaacacttgaagatatactacaggtggcactcacgcttgacacaagttttacttcagatgttagagatttctgcatgtattatcatcatgttctc

SEQ ID NO: 304 - DNA, 122 bp, Homo sapiens
  misc_feature (61)..(62): /note="This region represents a CpG dinucleotide"
  misc_feature (61)..(61): /note="Nucleotide may be methylated to form 5-methylcytosine"
atttcaacacccacgtgtgggttaaaccaaacctaatcgagtgttggctaaacccaaacacgatgagttagagcttccaacatctaagttcttggacgtctgctgattagggttttctatgg

SEQ ID NO: 305 - DNA, 122 bp, Homo sapiens
  misc_feature (61)..(62): /note="This region represents a CpG dinucleotide"
  misc_feature (61)..(61): /note="Nucleotide may be methylated to form 5-methylcytosine"
tatcgaacaggctcaagaggggagggggtggggtctggctttttaaggatgggtctaatgcgttcagctgttatcacactttgctgattgtaatcactcgttttatggtttcttttccagct

SEQ ID NO: 306 - DNA, 122 bp, Homo sapiens
  misc_feature (61)..(62): /note="This region represents a CpG dinucleotide"
  misc_feature (61)..(61): /note="Nucleotide may be methylated to form 5-methylcytosine"
gatgggaacaggtggacagagagagacagagtaaagcagagacaaagataccagaaatatcgagagaggaaacagtgactaagggaactctagagcagaactacttgcttaaagtaagtccc

SEQ ID NO: 307 - DNA, 122 bp, Homo sapiens
  misc_feature (61)..(62): /note="This region represents a CpG dinucleotide"
  misc_feature (61)..(61): /note="Nucleotide may be methylated to form 5-methylcytosine"
ggaggctgagatgggaggatcgcttaagcccaggagttccaggctgcggtgagctgatgacgccactgcatgatgaatctttagttgttcaaacaacaggaaggatggtgttgcagtcaaca

SEQ ID NO: 308 - DNA, 122 bp, Homo sapiens
  misc_feature (61)..(62): /note="This region represents a CpG dinucleotide"
  misc_feature (61)..(61): /note="Nucleotide may be methylated to form 5-methylcytosine"
tgctttattaatcatatgggtaaagcaccaggcacatagtagctgctgaataagtcattccgtatcctttagtatacattgcactgaagttagtgttatttatgtctctccacttgactttg

SEQ ID NO: 309 - DNA, 122 bp, Homo sapiens
  misc_feature (61)..(62): /note="This region represents a CpG dinucleotide"
  misc_feature (61)..(61): /note="Nucleotide may be methylated to form 5-methylcytosine"
cttaaatattagctgactcagaacatagcaagtgctcagtaatggcttctggaacgaacccgtggttgtcaccagcaggagtgacgaaagctagaagccgtttcaccatccaaggaagagga

SEQ ID NO: 310 - DNA, 122 bp, Homo sapiens
  misc_feature (61)..(62): /note="This region represents a CpG dinucleotide"
  misc_feature (61)..(61): /note="Nucleotide may be methylated to form 5-methylcytosine"
ggagaaagtggctatgagaattagagagacaaagggtgtgcttgtgggaatgggatgtaacgtcagagcaggttcaaccttacagctgtgcagtccagttagtcaaatattaatgagtcaat

SEQ ID NO: 311 - DNA, 122 bp, Homo sapiens
  misc_feature (61)..(62): /note="This region represents a CpG dinucleotide"
  misc_feature (61)..(61): /note="Nucleotide may be methylated to form 5-methylcytosine"
gatccaaggagccgcagcccgtggctcagtttaacccccttgactttccctctttgcctccggagaggcagaatttgcagcctgattattcgtagaaataatttttcaaatcttgcctttcc

SEQ ID NO: 312 - DNA, 122 bp, Homo sapiens
  misc_feature (61)..(62): /note="This region represents a CpG dinucleotide"
  misc_feature (61)..(61): /note="Nucleotide may be methylated to form 5-methylcytosine"
gcctgccccccacattctaaaacagtcatcaccaagtgaagctgccagaaagttagctctcgtaactaaaagtagctaataaaatgtagtatgactttttattccgtacttatcccttttaa

SEQ ID NO: 313 - DNA, 122 bp, Homo sapiens
  misc_feature (61)..(62): /note="This region represents a CpG dinucleotide"
  misc_feature (61)..(61): /note="Nucleotide may be methylated to form 5-methylcytosine"
ccagagattaatgcaagaatcagaatctgtgtcacaatctcagatctggctgaaaggcctcgttggggaagcaggacgaagaggctaggatgtatatgtcagaggtgggttacaaggagacc

SEQ ID NO: 314 - DNA, 122 bp, Homo sapiens
  misc_feature (61)..(62): /note="This region represents a CpG dinucleotide"
  misc_feature (61)..(61): /note="Nucleotide may be methylated to form 5-methylcytosine"
tacttatgttcttacattgactggttactcaccagctcttcagaacaattgtggctgaaacgtggcagctggcagacttctacgtatatgaagttaatccatggggcataagagcacagtgg

SEQ ID NO: 315 - DNA, 122 bp, Homo sapiens
  misc_feature (61)..(62): /note="This region represents a CpG dinucleotide"
  misc_feature (61)..(61): /note="Nucleotide may be methylated to form 5-methylcytosine"
aggtttcaagcatgcaaacatttctatcagaatattccaagaactcagttcccaagtggccgcgtcaagggccagtcacctgaacaggttggagcaactcagcctgctaattcattcccaag

SEQ ID NO: 316 - DNA, 122 bp, Homo sapiens
  misc_feature (61)..(62): /note="This region represents a CpG dinucleotide"
  misc_feature (61)..(61): /note="Nucleotide may be methylated to form 5-methylcytosine"
ctggaatgaggtgagcaatactcacagtcatttctatcagcctctgcaagaatatgaatacggaattaagcagggctgggggctgcttgggggtggatagagaattcaaatcgctggaccgt

SEQ ID NO: 317 - DNA, 122 bp, Homo sapiens
  misc_feature (61)..(62): /note="This region represents a CpG dinucleotide"
  misc_feature (61)..(61): /note="Nucleotide may be methylated to form 5-methylcytosine"
ggacacggtgatggcaggagagcaaaggaagtgggcagattctggctatacttttgcacgcgagacagtgggacttgccagcttgagcaaacagatgaacagaaatatttccaagatgcaga

SEQ ID NO: 318 - DNA, 122 bp, Homo sapiens
  misc_feature (61)..(62): /note="This region represents a CpG dinucleotide"
  misc_feature (61)..(61): /note="Nucleotide may be methylated to form 5-methylcytosine"
atattcccaaaagctctatttttttttctttcttcttttaggttctctgtgttctatcgacgtctggtgcaatggagaagtcaggagatggtacttgaatcctgactctgtcacaagctggc

SEQ ID NO: 319 - DNA, 122 bp, Homo sapiens
  misc_feature (61)..(62): /note="This region represents a CpG dinucleotide"
  misc_feature (61)..(61): /note="Nucleotide may be methylated to form 5-methylcytosine"
cctcttacacatatgggtcgatgcctcacgtctccctaacgtgtaaaactgagctgtgcccggccaccttgggcacacgtcctcaggacctcccgaggctgtcacgggcctgtccttaactt

SEQ ID NO: 320 - DNA, 122 bp, Homo sapiens
  misc_feature (61)..(62): /note="This region represents a CpG dinucleotide"
  misc_feature (61)..(61): /note="Nucleotide may be methylated to form 5-methylcytosine"
cttccaagcctctgcttttcttccccatccactcatctgacattgctattcatcctatttcgtatttcttttatagcactgactaattcaactataatggtttctctgagtgtttcctaaac

SEQ ID NO: 321 - DNA, 122 bp, Homo sapiens
  misc_feature (61)..(62): /note="This region represents a CpG dinucleotide"
  misc_feature (61)..(61): /note="Nucleotide may be methylated to form 5-methylcytosine"
aggaggggcaatagctaaacaaatacctgcattagtcaaggagcactcagaaacagggctcgacctgctgggagaggattttgctaaggaaagcctgtactcacagaagaaggaagcaaaac

SEQ ID NO: 322 - DNA, 122 bp, Homo sapiens
  misc_feature (61)..(62): /note="This region represents a CpG dinucleotide"
  misc_feature (61)..(61): /note="Nucleotide may be methylated to form 5-methylcytosine"
ttcaaaacatttcttgaacaccttttcagcacagaacctaatctggctcctgcaaacaaacgtgaataagctgaattccggtcatcaaggcggtcacagcttaataggaaagaaggatatgt

SEQ ID NO: 323 - DNA, 122 bp, Homo sapiens
  misc_feature (61)..(62): /note="This region represents a CpG dinucleotide"
  misc_feature (61)..(61): /note="Nucleotide may be methylated to form 5-methylcytosine"
ccgtggatgtgcagctgccttgcgccttagtgtgtcatctgtaaaatgaggtaatagcaacgtatgtctcatgggttactactgtcagagtcaaatgaggtaattgtaggtaacgccctttg

SEQ ID NO: 324 - DNA, 122 bp, Homo sapiens
  misc_feature (61)..(62): /note="This region represents a CpG dinucleotide"
  misc_feature (61)..(61): /note="Nucleotide may be methylated to form 5-methylcytosine"
ctcctcctcctctctgagccttcattcccttatctgcacaatgagggtaataatctacttcgcagcgtgttgtgaggaataaataagctggaaatttattgagcacttataattcactatgc

SEQ ID NO: 325 - DNA, 122 bp, Homo sapiens
  misc_feature (61)..(62): /note="This region represents a CpG dinucleotide"
  misc_feature (61)..(61): /note="Nucleotide may be methylated to form 5-methylcytosine"
cagaagtcctgctctacctgtcgcacaggaagctgcgtgattgatgtgcacttgcagctgcgcagctgctccttggagtacccagagtccccgtgccccgccgctgggtcagcactttcctc

SEQ ID NO: 326 - DNA, 122 bp, Homo sapiens
  misc_feature (61)..(62): /note="This region represents a CpG dinucleotide"
  misc_feature (61)..(61): /note="Nucleotide may be methylated to form 5-methylcytosine"
ttgagagtaggagattcccttgttatctctggatccctggcacttgcagaaagcctgttacgtaataattgctcaacaattagtttttaaataaatgaattatttttaaaacgccaaaatta

SEQ ID NO: 327 - DNA, 122 bp, Homo sapiens
  misc_feature (61)..(62): /note="This region represents a CpG dinucleotide"
  misc_feature (61)..(61): /note="Nucleotide may be methylated to form 5-methylcytosine"
gagatgctccagcagggccagggtacagagcctccaccgccctcccatcggccaggggcacgcaaggggcaaaggtctccagcgagagcacaaatctgacacaatttacttctgacaaggca

SEQ ID NO: 328 - DNA, 122 bp, Homo sapiens
  misc_feature (61)..(62): /note="This region represents a CpG dinucleotide"
  misc_feature (61)..(61): /note="Nucleotide may be methylated to form 5-methylcytosine"
aatccgcatggcaccggtggtctgggggagaggctgggcctggcgcgggacgaggcgaagcgccggtggccgacggcttctgaggaattatcttttacttggcgccacacggggcggggcct

SEQ ID NO: 329 - DNA, 122 bp, Homo sapiens
  misc_feature (61)..(62): /note="This region represents a CpG dinucleotide"
  misc_feature (61)..(61): /note="Nucleotide may be methylated to form 5-methylcytosine"
aggccttgccctcctaaactctcaccttccaggaagggctgtgtttctatgcacctgggccgaggctagtctttaaggcaactctcaacttgctgataataaggttggcttcatacaaaagc

SEQ ID NO: 330 - DNA, 122 bp, Homo sapiens
  misc_feature (61)..(62): /note="This region represents a CpG dinucleotide"
  misc_feature (61)..(61): /note="Nucleotide may be methylated to form 5-methylcytosine"
ccaaccacccaggagtgccactgactcacaatactaacgggacgtgtgaacagggacagccgccactggcaatagttgcacaattcgagcacagaaatgagtaagaggaattatttatactg

SEQ ID NO: 331 - DNA, 122 bp, Homo sapiens
  misc_feature (61)..(62): /note="This region represents a CpG dinucleotide"
  misc_feature (61)..(61): /note="Nucleotide may be methylated to form 5-methylcytosine"
gcccaggccttaagacagtttgatattcagttttgttatttaggtctgggttagggataccgccagagagcatccaaacatttctgtggttgggaaggctagttatctgtgagcattccaga

SEQ ID NO: 332 - DNA, 122 bp, Homo sapiens
  misc_feature (61)..(62): /note="This region represents a CpG dinucleotide"
  misc_feature (61)..(61): /note="Nucleotide may be methylated to form 5-methylcytosine"
agcccagggagggacccgtccacggcggagaggctgcccgaggaccggaataaaccctgccgcctggactccgcctgtgtccgtctgtctcactcccgttctccgaaggcgggacgccaccg

SEQ ID NO: 333 - DNA, 122 bp, Homo sapiens
  misc_feature (61)..(62): /note="This region represents a CpG dinucleotide"
  misc_feature (61)..(61): /note="Nucleotide may be methylated to form 5-methylcytosine"
cagtgcacacgccgcgtgctgccaccacccagctcgatgattctctccttccacaccttccggtccccaaaagtgactgaaagcaggattctgctgcggaaaaactggacttggaggaaggg

SEQ ID NO: 334 - DNA, 122 bp, Homo sapiens
  misc_feature (61)..(62): /note="This region represents a CpG dinucleotide"
  misc_feature (61)..(61): /note="Nucleotide may be methylated to form 5-methylcytosine"
cagctactgcgggaggctctgggaggccagcggaaggcgcagcgcgcggtggacggtgctcgggcgtagagggggagagcggccggtagagggggagagcagaccagcccggccgccggcga

SEQ ID NO: 335 - DNA, 122 bp, Homo sapiens
  misc_feature (61)..(62): /note="This region represents a CpG dinucleotide"
  misc_feature (61)..(61): /note="Nucleotide may be methylated to form 5-methylcytosine"
gtctcggatgcgcggcttgcgcaggttctctgcggcgatgcgcgccagcacatactcctccgggatgatactctttctggccaacatcgtcctgtcaccatagccagcttagccacctccct

SEQ ID NO: 336 - DNA, 122 bp, Homo sapiens
  misc_feature (61)..(62): /note="This region represents a CpG dinucleotide"
  misc_feature (61)..(61): /note="Nucleotide may be methylated to form 5-methylcytosine"
agtcatgacccctcagagtacagcacactagggtgcggaggcatagacacccttggccagcgctctctgagtgcctcagcagctcaagtgtgcggtggccttgggaagagctggtgggaaag

SEQ ID NO: 337 - DNA, 122 bp, Homo sapiens
  misc_feature (61)..(62): /note="This region represents a CpG dinucleotide"
  misc_feature (61)..(61): /note="Nucleotide may be methylated to form 5-methylcytosine"
cctccgcagcgcctcctgcatgtggcggggcagcggcggcgagaaggtgatgcgcttcaccgccggtccgctcgccgtcagcagcaccacgtcggccttcagcaccttcagattccgcgccg

SEQ ID NO: 338 - DNA, 122 bp, Homo sapiens
  misc_feature (61)..(62): /note="This region represents a CpG dinucleotide"
  misc_feature (61)..(61): /note="Nucleotide may be methylated to form 5-methylcytosine"
aggccgcctccgggaacggaagggtccaccccaccgccaggctctcaaagggtggggtggcgcctcgggtggggcgggcaggaggtgggtgaggacgggagagaaggggcgagcgggggcac

SEQ ID NO: 339 - DNA, 122 bp, Homo sapiens
  misc_feature (61)..(62): /note="This region represents a CpG dinucleotide"
  misc_feature (61)..(61): /note="Nucleotide may be methylated to form 5-methylcytosine"
tttcctgagggatgatcagtatcagcattgtttggtatatttacatattttgataattatcgggtatgttgcaagctatgatgaaagcaaaacatacagctggaaagacgatcattggtcag

SEQ ID NO: 340 - DNA, 122 bp, Homo sapiens
  misc_feature (61)..(62): /note="This region represents a CpG dinucleotide"
  misc_feature (61)..(61): /note="Nucleotide may be methylated to form 5-methylcytosine"
tgagctgagtaactgggtgggtgatgatgtcactgactaggatagggaagctaggacaagcggagttcacggaaacacagcaattcccctctatggggcacgtctcaccctatgtggttaca

SEQ ID NO: 341 - DNA, 122 bp, Homo sapiens
  misc_feature (61)..(62): /note="This region represents a CpG dinucleotide"
  misc_feature (61)..(61): /note="Nucleotide may be methylated to form 5-methylcytosine"
taggagtgcaaagaatgccagacacacccttggtgtcatctgaaggctatgtcctggcagcgcaccatttgaaaccactatcatagatggtcacgagtgctgagaagaagtgggggagggga

SEQ ID NO: 342 - DNA, 122 bp, Homo sapiens
  misc_feature (61)..(62): /note="This region represents a CpG dinucleotide"
  misc_feature (61)..(61): /note="Nucleotide may be methylated to form 5-methylcytosine"
aaccccagatcggtctgagagatctgctgacgtggtggcattgtttccttcctcagtccgcgtgccatctctcatttctctctcctttgatgtcattcggtagtgttttataattgttccat

SEQ ID NO: 343 - DNA, 122 bp, Homo sapiens
  misc_feature (61)..(62): /note="This region represents a CpG dinucleotide"
  misc_feature (61)..(61): /note="Nucleotide may be methylated to form 5-methylcytosine"
attgggaaatgtgcagagattaccaaggccagtctctatgactcaaaccagaaagaataccgtgaacaaacaataaatgacccagttttaaaaacactgtttaaaaagatcctcttcctact

SEQ ID NO: 344 - DNA, 122 bp, Homo sapiens
  misc_feature (61)..(62): /note="This region represents a CpG dinucleotide"
  misc_feature (61)..(61): /note="Nucleotide may be methylated to form 5-methylcytosine"
tggttttgtttccgaggagcgggcgtgctgcgctgcttctctttgagtcatctgggtcctcgcctgttgactttcttcctggtagatgtggactgacctcttcctggtagatgtggactgac

SEQ ID NO: 345 - DNA, 122 bp, Homo sapiens
  misc_feature (61)..(62): /note="This region represents a CpG dinucleotide"
  misc_feature (61)..(61): /note="Nucleotide may be methylated to form 5-methylcytosine"
tcttaagccatcaagtttgtggtaatttgtttcagcagccttggggaatgaatatatagccgaaaagggctttgtttgtgccaccccacagaaccagagaaccattaatgctagtctcatta

SEQ ID NO: 346 - DNA, 122 bp, Homo sapiens
  misc_feature (61)..(62): /note="This region represents a CpG dinucleotide"
  misc_feature (61)..(61): /note="Nucleotide may be methylated to form 5-methylcytosine"
agttcctagaccttactcagcagtatccaaggtggcagggcctaaggataccttctctttcgtctaagccccatttcctgatagcacattctttcctctcctgcaccacaatttctatacct

SEQ ID NO: 347 - DNA, 122 bp, Homo sapiens
  misc_feature (61)..(62): /note="This region represents a CpG dinucleotide"
  misc_feature (61)..(61): /note="Nucleotide may be methylated to form 5-methylcytosine"
tcgccgtcgttgttatttagtagtagtagtaacggctgacatttacagcgacgtcgatggcgccaggtgccaagctctttccttgtataatttcatggacactcacgcatcaactctaagcg

SEQ ID NO: 348 - DNA, 122 bp, Homo sapiens
  misc_feature (61)..(62): /note="This region represents a CpG dinucleotide"
  misc_feature (61)..(61): /note="Nucleotide may be methylated to form 5-methylcytosine"
gaggtttcctccagattcgcttttctaactacggaagtaaggctctgggcagctgagctccggcgctcacgatccctgcccgggagattacgctcaaagcaaagctgtatcaaaagccaggc

SEQ ID NO: 349 - DNA, 122 bp, Homo sapiens
  misc_feature (61)..(62): /note="This region represents a CpG dinucleotide"
  misc_feature (61)..(61): /note="Nucleotide may be methylated to form 5-methylcytosine"
acctagagcagaaaaaggaaatggactaaaggctctgactcacatcccaaacccaggaggcgctctaagcgcccactcagcagacatcccatcagccaggtcgggtgctcctcagtcatcac

SEQ ID NO: 350 - DNA, 122 bp, Homo sapiens
  misc_feature (61)..(62): /note="This region represents a CpG dinucleotide"
  misc_feature (61)..(61): /note="Nucleotide may be methylated to form 5-methylcytosine"
atgatgctccttatcagcagcacagcaaaagctgtgttaccacgtaaggatcaaccagggcgtggacgatgacgaaagaacacacctgaaagcaacaatgctcataagcacacacgcgtgct

SEQ ID NO: 351 - DNA, 122 bp, Homo sapiens
  misc_feature (61)..(62): /note="This region represents a CpG dinucleotide"
  misc_feature (61)..(61): /note="Nucleotide may be methylated to form 5-methylcytosine"
gtgagcttttccctttctctctttccttggtgaatggctcttcttccccaagggttgagccgccagctcccagaacaatgtcagtatggagggtgtttcctgaacccgcagggcaagacttc

SEQ ID NO: 352 - DNA, 122 bp, Homo sapiens
  misc_feature (61)..(62): /note="This region represents a CpG dinucleotide"
  misc_feature (61)..(61): /note="Nucleotide may be methylated to form 5-methylcytosine"
agccactgattagggacttcattacatcgggacttcactttgtatatcccataatctaatcgtgggagtgacagccaacactgtcctgcccacacccaaaggggaagagattatgcaggacg

SEQ ID NO: 353 - DNA, 122 bp, Homo sapiens
  misc_feature (61)..(62): /note="This region represents a CpG dinucleotide"
  misc_feature (61)..(61): /note="Nucleotide may be methylated to form 5-methylcytosine"
gaccaaccacgctgtctccaagcagtgatgtgaaaggcaacctagacatctggcaaaagccgccaagtcccccagtttccagagattcttccttttgttttttgcaaaaatatgtaactgta

SEQ ID NO: 354 - DNA, 122 bp, Homo sapiens
  misc_feature (61)..(62): /note="This region represents a CpG dinucleotide"
  misc_feature (61)..(61): /note="Nucleotide may be methylated to form 5-methylcytosine"
gtaactctaccactaatcatttaatcttgagtttctgcttcttcttccagaatatgaaggcgttgactgtctcaagttctcttctgttctgaacagctattctacaaaagctcccattctag

SEQ ID NO: 355 - DNA, 122 bp, Homo sapiens
  misc_feature (61)..(62): /note="This region represents a CpG dinucleotide"
  misc_feature (61)..(61): /note="Nucleotide may be methylated to form 5-methylcytosine"
ctccttggcaactgttgggagagagaggtttcagcgcctagacgggttctctcttgacttcgctcaataaaagtgaatccagggcaaggggaaggggaggaacaaatcagcggagagtgtga

SEQ ID NO: 356 - DNA, 122 bp, Homo sapiens
  misc_feature (61)..(62): /note="This region represents a CpG dinucleotide"
  misc_feature (61)..(61): /note="Nucleotide may be methylated to form 5-methylcytosine"
tgggatttaaggggagttgcctctggcatctttgtatttttgtcctgtccagattttctacgttggtatgccaaatttcataatcagaaaataaagagaaaggaaaggttgcaatgtaggtc

SEQ ID NO: 357 - DNA, 122 bp, Homo sapiens
  misc_feature (61)..(62): /note="This region represents a CpG dinucleotide"
  misc_feature (61)..(61): /note="Nucleotide may be methylated to form 5-methylcytosine"
gtgaaggagggaacagaaatggcagataatagaatgcataggacttggagacagggtggacgtagctgccaacctgagctccatgtgtgcatttcagcctgagcctggttccctgaaacctt

SEQ ID NO: 358 - DNA, 122 bp, Homo sapiens
  misc_feature (61)..(62): /note="This region represents a CpG dinucleotide"
  misc_feature (61)..(61): /note="Nucleotide may be methylated to form 5-methylcytosine"
gaattgccacctccggctccaagggtgtttttccagtatctttaaaagccacagctgctgcgtggcttcctgaccgactggttccttggcgagagcaacagcagtgagtcaggagcaggagc

SEQ ID NO: 359 - DNA, 122 bp, Homo sapiens
  misc_feature (61)..(62): /note="This region represents a CpG dinucleotide"
  misc_feature (61)..(61): /note="Nucleotide may be methylated to form 5-methylcytosine"
gccagtccctgactgggcctgagtcatttgtttctgaatcctagtttgaatcctagttcccgtttttatcatggtgtgatcttggctgggcccttccctctctctggtctcagtttgtctct

SEQ ID NO: 360 - DNA, 122 bp, Homo sapiens
  misc_feature (61)..(62): /note="This region represents a CpG dinucleotide"
  misc_feature (61)..(61): /note="Nucleotide may be methylated to form 5-methylcytosine"
tttttcctctttgctcattgagccctgggcttcctttcgtcctggtactgttcaagattccgttcagaattttaagaggaacgggactcccctggcttggttccagatgaccaccgtggagg

SEQ ID NO: 361 - DNA, 122 bp, Homo sapiens
  misc_feature (61)..(62): /note="This region represents a CpG dinucleotide"
  misc_feature (61)..(61): /note="Nucleotide may be methylated to form 5-methylcytosine"
aagaagggatctggaaggaaaacccacagggcagcctcagtatcagcagtccctgagtcccgcccctgggtggtgaatctgttccttgggattctggcatttcgccttaacacagaaggcgc

SEQ ID NO: 362 - DNA, 122 bp, Homo sapiens
  misc_feature (61)..(62): /note="This region represents a CpG dinucleotide"
  misc_feature (61)..(61): /note="Nucleotide may be methylated to form 5-methylcytosine"
ggtgacctcagtagtgaggagaagcaggatgaacaaataggagagtgggaagaatgatgacggagtgagagattatataagatttgatcatgctaagagtttacttcagagtgaagaaggtt

SEQ ID NO: 363 - DNA, 122 bp, Homo sapiens
  misc_feature (61)..(62): /note="This region represents a CpG dinucleotide"
  misc_feature (61)..(61): /note="Nucleotide may be methylated to form 5-methylcytosine"
tacctagtacacgcacagcattttgaaggttccccttggtgatttcattacaatcttcatcgctcttggcctggctgtccccctttcttgtaaattattcttgagttaatagctgttctttg

SEQ ID NO: 364 - DNA, 122 bp, Homo sapiens
  misc_feature (61)..(62): /note="This region represents a CpG dinucleotide"
  misc_feature (61)..(61): /note="Nucleotide may be methylated to form 5-methylcytosine"
gaagtaaaatggcctgctcatacattactaacaagaatataggccaggcacggtcgctcacgcctgtaatcccagtactttgggaggccgaggcgggtggatcatctgaggtcaggagtttg

SEQ ID NO: 365 - DNA, 122 bp, Homo sapiens
  misc_feature (61)..(62): /note="This region represents a CpG dinucleotide"
  misc_feature (61)..(61): /note="Nucleotide may be methylated to form 5-methylcytosine"
gcctgttgacgtggcaggcaggcctcagaaccctggaggcccccatcaggcaggtgtgaacgctgcagctggagtaatccgcctgcaatctgcagctgaagcaaatacccaatcatcttcca

SEQ ID NO: 366 - DNA, 122 bp, Homo sapiens
  misc_feature (61)..(62): /note="This region represents a CpG dinucleotide"
  misc_feature (61)..(61): /note="Nucleotide may be methylated to form 5-methylcytosine"
tgcacaacattgtgactgaactaaaagccactggatggtacaactgaaaatggtgaattgcgtgttgcatgaattataacctaactggggaaaaaaaggcttaaaaagagacaaagcttccc

SEQ ID NO: 367 - DNA, 122 bp, Homo sapiens
  misc_feature (61)..(62): /note="This region represents a CpG dinucleotide"
  misc_feature (61)..(61): /note="Nucleotide may be methylated to form 5-methylcytosine"
aagagcccagagaggttaggcaatctgtccaaagtcacacagtgttcagaacattctaaccgtagtcagcattgtgtgagctgtgtgtccaaacccttaacagtgtttatctttggaaggtg

SEQ ID NO: 368 - DNA, 122 bp, Homo sapiens
  misc_feature (61)..(62): /note="This region represents a CpG dinucleotide"
  misc_feature (61)..(61): /note="Nucleotide may be methylated to form 5-methylcytosine"
gggggcgggcctggcgcgtctagctcgcggtcagaggtcgggaagggcgccatgggtgtacgtggggacggcgccgggctgcggctgagccgccagggcctgctgagggcaagcggggcctc

SEQ ID NO: 369 - DNA, 122 bp, Homo sapiens
  misc_feature (61)..(62): /note="This region represents a CpG dinucleotide"
  misc_feature (61)..(61): /note="Nucleotide may be methylated to form 5-methylcytosine"
ctcagaactgtagatttcgcttttaaaaccatggcaagagtatcatcaccacagcaagggcgagcccagagaaagtgcatttggtgagattttataaatgtacccaaggcacgtgttttgtt

SEQ ID NO: 370 - DNA, 122 bp, Homo sapiens
  misc_feature (61)..(62): /note="This region represents a CpG dinucleotide"
  misc_feature (61)..(61): /note="Nucleotide may be methylated to form 5-methylcytosine"
gggccagggcgcgccgggatccgctgcgccaggaccctgcagacccggccgcggccgggccgagtgcctcccgccggggccttacgcccacggtccacgcttgcaacaccagggctgtacgg

SEQ ID NO: 371 - DNA, 122 bp, Homo sapiens
  misc_feature (61)..(62): /note="This region represents a CpG dinucleotide"
  misc_feature (61)..(61): /note="Nucleotide may be methylated to form 5-methylcytosine"
aaattacttctcagtgatgagagcctgacaaagcaattgtgccctgagaattggctgtgccgcagagagacaggctggcctcctaatctcaagaagcttgggtctttgtccctggatcctgg

SEQ ID NO: 372 - DNA, 122 bp, Homo sapiens
  misc_feature (61)..(62): /note="This region represents a CpG dinucleotide"
  misc_feature (61)..(61): /note="Nucleotide may be methylated to form 5-methylcytosine"
aggttaagcacagaactggactgtttgtatcaaggaaattcgtggagcttgttctcctgccgctatagcagctggtattgcctggtctaatgtcccttctttgatttcattgttaagccctc

SEQ ID NO: 373 - DNA, 122 bp, Homo sapiens
  misc_feature (61)..(62): /note="This region represents a CpG dinucleotide"
  misc_feature (61)..(61): /note="Nucleotide may be methylated to form 5-methylcytosine"
gtttcacctcctctccccacagttccagcagacatctgagcatgctctcttttcttgctccgtggttgatgtctttgctcagctgaatcagagctttgaaattattaagaaactggaatgcc

SEQ ID NO: 374 - DNA, 122 bp, Homo sapiens
  misc_feature (61)..(62): /note="This region represents a CpG dinucleotide"
  misc_feature (61)..(61): /note="Nucleotide may be methylated to form 5-methylcytosine"
caggaggtaaggagcaaaggcttaataacccaaacaagatgcacatgcaccttataatcccgtctacatgcagggaggaaggtaaagcagtaaactaggttactgtgttctgtgtatcaccc

SEQ ID NO: 375 - DNA, 122 bp, Homo sapiens
  misc_feature (61)..(62): /note="This region represents a CpG dinucleotide"
  misc_feature (61)..(61): /note="Nucleotide may be methylated to form 5-methylcytosine"
gaggcctatccggaaagtctacagtcatagtccaggtggttgatgtcaacgacaacccaccggaactgaccttgtcttcagtaaacagccctattcctgagaactcgggagagactgtactg

SEQ ID NO: 376 - DNA, 122 bp, Homo sapiens
  misc_feature (61)..(62): /note="This region represents a CpG dinucleotide"
  misc_feature (61)..(61): /note="Nucleotide may be methylated to form 5-methylcytosine"
ccaaaggcccatctgcctggaaaccttgctgtcttgctatttagctcagagccctggaagcgttgcttttgatgtctaccattactgcttaacttaggaacgctctgcctagtgaggggtct

SEQ ID NO: 377 - DNA, 122 bp, Homo sapiens
  misc_feature (61)..(62): /note="This region represents a CpG dinucleotide"
  misc_feature (61)..(61): /note="Nucleotide may be methylated to form 5-methylcytosine"
agggggagaagcttggataatcattagaaaaaccctgttcacctataaaacctattctgccgcctcgaagcaaacactggagaaaggctgatttgagtatttaggctttataaattgcactt

SEQ ID NO: 378 - DNA, 122 bp, Homo sapiens
  misc_feature (61)..(62): /note="This region represents a CpG dinucleotide"
  misc_feature (61)..(61): /note="Nucleotide may be methylated to form 5-methylcytosine"
gcaggagctgtggtagctcacccacactgcaatccatctgctgactcaacttgctagtatcgggcagcagccaggaccacagctcctccagctcctttgtgaccttttccttcagcttcttc

SEQ ID NO: 379 - DNA, 122 bp, Homo sapiens
  misc_feature (61)..(62): /note="This region represents a CpG dinucleotide"
  misc_feature (61)..(61): /note="Nucleotide may be methylated to form 5-methylcytosine"
ccgcaggaagaggcgccgtgagccgggtgagggcgccgccgctcccggaatggttccagccggagacagcaggcccctcaccgccctactcgcttgcaacctgaaccccttttacctgctca

SEQ ID NO: 380 - DNA, 122 bp, Homo sapiens
  misc_feature (61)..(62): /note="This region represents a CpG dinucleotide"
  misc_feature (61)..(61): /note="Nucleotide may be methylated to form 5-methylcytosine"
agcatctcagtaaatattgtggcccagaaaaactggttcagatgataaagaagttcaggtcgtgaagagtcatcttcactatgggaaaaatacaaatagagaaaaagttttattagagaact

SEQ ID NO: 381 - DNA, 122 bp, Homo sapiens
  misc_feature (61)..(62): /note="This region represents a CpG dinucleotide"
  misc_feature (61)..(61): /note="Nucleotide may be methylated to form 5-methylcytosine"
tcactctggccgggcccgtggattaccagagtcaggacacctacgagctgcacgtgcgggcgcaggaccgcgctgccgcctgcaaggtcatcctgcgcatccgcgacgtcaatgacaacgcg

SEQ ID NO: 382 - DNA, 122 bp, Homo sapiens
  misc_feature (61)..(62): /note="This region represents a CpG dinucleotide"
  misc_feature (61)..(61): /note="Nucleotide may be methylated to form 5-methylcytosine"
ctgacctggtgaagttattaatattaacagctccaactaataaaagagtcaagcataggccgggcatggtggctcatacctgtaatcccagcacttttgggaggctgaggcgggcagataac

SEQ ID NO: 383 - DNA, 122 bp, Homo sapiens
  misc_feature (61)..(62): /note="This region represents a CpG dinucleotide"
  misc_feature (61)..(61): /note="Nucleotide may be methylated to form 5-methylcytosine"
tccactaggtggcacatgtacagtggtaaactatactaaggaacctaatcattgacctggcgtggtggctcaagcctgtaatcccagcactttgggaagcaggaggatcacttaagcccaga

SEQ ID NO: 384 - DNA, 122 bp, Homo sapiens
  misc_feature (61)..(62): /note="This region represents a CpG dinucleotide"
  misc_feature (61)..(61): /note="Nucleotide may be methylated to form 5-methylcytosine"
ctaccgccacctgtggagggaccgcgtatgccagctgtgccacccgtcgccggtccacgccgccgcccacctgagcctggagactctgaccgctttcgtgcttcctttcgggctgatgctcg

SEQ ID NO: 385 - DNA, 122 bp, Homo sapiens
  misc_feature (61)..(62): /note="This region represents a CpG dinucleotide"
  misc_feature (61)..(61): /note="Nucleotide may be methylated to form 5-methylcytosine"
aggtgttcctccttctctgtggctcctctcacctttgcttcctctctcccggtattgggacgtggaaagacattaaacacctgggagcccccagggaataattcaaattcaatcatagaaaa

SEQ ID NO: 386 - DNA, 122 bp, Homo sapiens
  misc_feature (61)..(62): /note="This region represents a CpG dinucleotide"
  misc_feature (61)..(61): /note="Nucleotide may be methylated to form 5-methylcytosine"
ccaaggctgggggtcccgggttcggaggaggcggccaaggtgcaggccgaggctggcgagcggcttagggacgtggctcgcccgccaggaccagagcgcgcggaggggcttcggggaagttt

SEQ ID NO: 387 - DNA, 122 bp, Homo sapiens
  misc_feature (61)..(62): /note="This region represents a CpG dinucleotide"
  misc_feature (61)..(61): /note="Nucleotide may be methylated to form 5-methylcytosine"
agtctacaggaggaagtgagagaaagtaagagcaatactcatgggaagtgttcacatgctcgtgaaaacagcagcccttggattcaagagggaaacatttatttgccctctggacataaagt

SEQ ID NO: 388 - DNA, 122 bp, Homo sapiens
  misc_feature (61)..(62): /note="This region represents a CpG dinucleotide"
  misc_feature (61)..(61): /note="Nucleotide may be methylated to form 5-methylcytosine"
ccctattgaaatgagggattcaagcagcaatcatcaatagaagccaaaatcctcctttgacgggaactggataatcccaagtgctggactgtcgcccacagattctccgctgctggtcatga

SEQ ID NO: 389 - DNA, 122 bp, Homo sapiens
  misc_feature (61)..(62): /note="This region represents a CpG dinucleotide"
  misc_feature (61)..(61): /note="Nucleotide may be methylated to form 5-methylcytosine"
ccgccagcccatccgcgaccgcatccagatcttcgtgtgagccgcgccgtccgccgcgcccgagctgccttcgcgtgcccccgccctgtgttttataaaaagaaagattctcggacgttgcc

SEQ ID NO: 390 - DNA, 122 bp, Homo sapiens
  misc_feature (61)..(62): /note="This region represents a CpG dinucleotide"
  misc_feature (61)..(61): /note="Nucleotide may be methylated to form 5-methylcytosine"
aagtaaagtgcaggaggaagtgatgaagtgagccatgtggttatctaggaacaagcatgacggacagaagagcaagcacaaaggtcctgaaccaggagcaagcctggcatgatttagaaata

SEQ ID NO: 391 - DNA, 122 bp, Homo sapiens
  misc_feature (61)..(62): /note="This region represents a CpG dinucleotide"
  misc_feature (61)..(61): /note="Nucleotide may be methylated to form 5-methylcytosine"
tgcattgaatatattggtctggatcatttctaaggccaactcagcaatcagatgtatgctcgtgtttacaaggtcaggtcattactagaattacttgatctctggaatttaaatgtatatac

SEQ ID NO: 392 - DNA, 122 bp, Homo sapiens
  misc_feature (61)..(62): /note="This region represents a CpG dinucleotide"
  misc_feature (61)..(61): /note="Nucleotide may be methylated to form 5-methylcytosine"
cttacccgattcccaacatgacgcctgcgagtagacatgggagaatggctgtggctgtgccgtctacgataatctcgactgtaagacctgctacgtgatcgtctatgggagcgggagcgaga

SEQ ID NO: 393 - DNA, 122 bp, Homo sapiens
  misc_feature (61)..(62): /note="This region represents a CpG dinucleotide"
  misc_feature (61)..(61): /note="Nucleotide may be methylated to form 5-methylcytosine"
cagctctgccccacccatgcaagggtggggagctctttggattacatgatctctaggattcgtgggtactttctccagaacaggggcagttctcaagaggcgtgtggccacttaggcaggta

SEQ ID NO: 394 - DNA, 122 bp, Homo sapiens
  misc_feature (61)..(62): /note="This region represents a CpG dinucleotide"
  misc_feature (61)..(61): /note="Nucleotide may be methylated to form 5-methylcytosine"
atcctggtgccaaggcaggccttccactgccacgtacacaccctgaaggcagagtcagcacgcccaaatcctgtggggcctgatggtgaccactcaagctcggacaaaccccaagtgtgatc

SEQ ID NO: 395 - DNA, 122 bp, Homo sapiens
  misc_feature (61)..(62): /note="This region represents a CpG dinucleotide"
  misc_feature (61)..(61): /note="Nucleotide may be methylated to form 5-methylcytosine"
aagtagtcaaaatcatagaaacagaaaggaaaatagtgattctcagggattgagagtagacggaattggggagttattgtgtaatgggtatagagttgcaatttggcaagatgaaaaagttc

SEQ ID NO: 396 - DNA, 122 bp, Homo sapiens
  misc_feature (61)..(62): /note="This region represents a CpG dinucleotide"
  misc_feature (61)..(61): /note="Nucleotide may be methylated to form 5-methylcytosine"
gccctgcagttcccggagaagcccctcaagaacatcccgttcctgggggcgtagaggggccgggccggggacgaggcctcctgcggacaccagctcctctctccgccgtcaccggggaggcc

SEQ ID NO: 397 - DNA, 122 bp, Homo sapiens
  misc_feature (61)..(62): /note="This region represents a CpG dinucleotide"
  misc_feature (61)..(61): /note="Nucleotide may be methylated to form 5-methylcytosine"
ggcttcccttagcacacctttgatctgggatctgtacaaacagaatacacagggccaggccgcaagagtgccagcagctacctgcactttccccacagggaaagtgctttcccactgttgtc

SEQ ID NO: 398 - DNA, 122 bp, Homo sapiens
  misc_feature (61)..(62): /note="This region represents a CpG dinucleotide"
  misc_feature (61)..(61): /note="Nucleotide may be methylated to form 5-methylcytosine"
ccctcgtggccctaggcaattttattgcaacagcaatgggaagccttttgaagactttcacgcagtggcacagcctgatctgatttcctgttgagacctagttcatttgcctaggacttcat

SEQ ID NO: 399 - DNA, 122 bp, Homo sapiens
  misc_feature (61)..(62): /note="This region represents a CpG dinucleotide"
  misc_feature (61)..(61): /note="Nucleotide may be methylated to form 5-methylcytosine"
cctgcgtgcagctgggtctgcagctgctgcccgaggggcctgcggccgacgaggtgttcgcgctgctgcggcgcgaggtgctgcgcaccgtgtgcgagcgcccgggccccgcggcctgcgcg

SEQ ID NO: 400 - DNA, 122 bp, Homo sapiens
  misc_feature (61)..(62): /note="This region represents a CpG dinucleotide"
  misc_feature (61)..(61): /note="Nucleotide may be methylated to form 5-methylcytosine"
accactggctagttagagattgtgaatgtacagctgcacagggcacagcaattaatgtttcgggtgtggatgccacagacctgaaatgctcttctgacatgggtgtggccaccaaataagaa

SEQ ID NO: 401 - DNA, 122 bp, Homo sapiens
  misc_feature (61)..(62): /note="This region represents a CpG dinucleotide"
  misc_feature (61)..(61): /note="Nucleotide may be methylated to form 5-methylcytosine"
ccaggacccagttcgtgcagatggtggcggagctggcgactagaccccaaaacatcgagacgctgcagaacgcgggtgagcccggagcccgaacccccgtcgccccccgcgcactgagtccc

SEQ ID NO: 402 - DNA, 122 bp, Homo sapiens
  misc_feature (61)..(62): /note="This region represents a CpG dinucleotide"
  misc_feature (61)..(61): /note="Nucleotide may be methylated to form 5-methylcytosine"
tatgtcctgttatgtaaaggcatcgtgtgagcatattctcacgctcttttagttttgtaacgaaggcagtgatgacgcactcaccttggtaaactgccaagtgcacttatatttttgctttt

SEQ ID NO: 403 - DNA, 122 bp, Homo sapiens
  misc_feature (61)..(62): /note="This region represents a CpG dinucleotide"
  misc_feature (61)..(61): /note="Nucleotide may be methylated to form 5-methylcytosine"
gtccctccctggccgcgtggcttattgcacaagaatgggggaggggcggctagagagagccggtcaggaccagagcggttgagaaggttgaaacccacctcaccaactcaggtgggctcttc

SEQ ID NO: 404 - DNA, 122 bp, Homo sapiens
  misc_feature (61)..(62): /note="This region represents a CpG dinucleotide"
  misc_feature (61)..(61): /note="Nucleotide may be methylated to form 5-methylcytosine"
atttctcttacataggcagagacagagaaatttcagcaggattacaacatttttcatacacgatcagtgcgtacagtgacttgatcggttacagattgctgcattccaaggaaaatacttta

SEQ ID NO: 405 - DNA, 122 bp, Homo sapiens
  misc_feature (61)..(62): /note="This region represents a CpG dinucleotide"
  misc_feature (61)..(61): /note="Nucleotide may be methylated to form 5-methylcytosine"
tctcacagaagcaactcacatttcacaataagatatgactcaatagtctctctgcgcatgcgtgtcagccaataatgcttagtcagaagaactcaagacagtctatgaagcagtagggaata

SEQ ID NO: 406 - DNA, 122 bp, Homo sapiens
  misc_feature (61)..(62): /note="This region represents a CpG dinucleotide"
  misc_feature (61)..(61): /note="Nucleotide may be methylated to form 5-methylcytosine"
tcgacttattcacccagcaaatgttgactgtgctcccatggtgtgtcagcaggagggttacggggtgagcgcaggggttggggagacagaaggggaagcacgaacggacgcagagatcctca

SEQ ID NO: 407 - DNA, 122 bp, Homo sapiens
  misc_feature (61)..(62): /note="This region represents a CpG dinucleotide"
  misc_feature (61)..(61): /note="Nucleotide may be methylated to form 5-methylcytosine"
cttagtttaggtaaatttaatgactgtaaaagctgttcacatagcagctttaaagagacacgttttccactgacataaagttgcttcgccccttgcagcttatctccaccttcatgacctgt

SEQ ID NO: 408 - DNA, 122 bp, Homo sapiens
  misc_feature (61)..(62): /note="This region represents a CpG dinucleotide"
  misc_feature (61)..(61): /note="Nucleotide may be methylated to form 5-methylcytosine"
actcccaccaccaaccctcccctggtgctcccagttgggcaatatggccagaggtgagcacgtttgtcaggaatggaattaggcagggaatgaaaacaggtctggcctctgggaaaactggc

SEQ ID NO: 409 - DNA, 122 bp, Homo sapiens
  misc_feature (61)..(62): /note="This region represents a CpG dinucleotide"
  misc_feature (61)..(61): /note="Nucleotide may be methylated to form 5-methylcytosine"
gaaaacaggcagcaaatgagatgagactgcggcggggaatctttggcttccatgtggaggcgcgagtcccgttcccgcacacggtaattgctaaattacccgccatctgctccgctctcaga

SEQ ID NO: 410 - DNA, 122 bp, Homo sapiens
  misc_feature (61)..(62): /note="This region represents a CpG dinucleotide"
  misc_feature (61)..(61): /note="Nucleotide may be methylated to form 5-methylcytosine"
tactgtttacaaaactgcagttgctgtaaactgctgctggtaatcaatggctcagagctacggattcaagcaaaaaacagcaggataaagaaagctggaggcaaaagacaaagccaatgcaa

SEQ ID NO: 411 - DNA, 122 bp, Homo sapiens
  misc_feature (61)..(62): /note="This region represents a CpG dinucleotide"
  misc_feature (61)..(61): /note="Nucleotide may be methylated to form 5-methylcytosine"
gtaaggcatagcattaccatatttcctcatctctaaggcaccatctattgtgacgtacaccgtcattttatgtaccactaaggaaaatgctgtcaatttcagcatgctgtgtcattgatgat

SEQ ID NO: 412 - DNA, 122 bp, Homo sapiens
  misc_feature (61)..(62): /note="This region represents a CpG dinucleotide"
  misc_feature (61)..(61): /note="Nucleotide may be methylated to form 5-methylcytosine"
ctgtcatcaggtgacccagggcatcctgtcctggagcccggacatcctttgaaaacaaatcgtggggctcccctaatccccgttgcagaaccaaacagggtgaagggatttggagactcagg

SEQ ID NO: 413 - DNA, 122 bp, Homo sapiens
  misc_feature (61)..(62): /note="This region represents a CpG dinucleotide"
  misc_feature (61)..(61): /note="Nucleotide may be methylated to form 5-methylcytosine"
acttcaggttcggagacgaggaggtggccgtcccccgtcccgcccccaacccgatgagggcgttgtcagccagggggcctgccaggtgttcacccctatcccacggacatcctgcattcctg

SEQ ID NO: 414 - DNA, 122 bp, Homo sapiens
  misc_feature (61)..(62): /note="This region represents a CpG dinucleotide"
  misc_feature (61)..(61): /note="Nucleotide may be methylated to form 5-methylcytosine"
agaccagggaaaatgatcacaaaaccagattctgaaaagtaccactctctggctttgagacgaagagcaaagctgttgagcaacagtatggggtaatgactttgaaacacctggagtggttg

SEQ ID NO: 415 - DNA, 122 bp, Homo sapiens
  misc_feature (61)..(62): /note="This region represents a CpG dinucleotide"
  misc_feature (61)..(61): /note="Nucleotide may be methylated to form 5-methylcytosine"
cccaataaatcaaagaagggctgagaatcctgaccaccacccccagtaaggatcaagttccgctttctggaagaggcctagaggtggattgcaggacttcccagtttaaccaggtgacaaag

SEQ ID NO: 416 - DNA, 122 bp, Homo sapiens
  misc_feature (61)..(62): /note="This region represents a CpG dinucleotide"
  misc_feature (61)..(61): /note="Nucleotide may be methylated to form 5-methylcytosine"
aaaaaaaaaaaagagagagagagcaaaaacataagcccagagttactcaccaattgaatccgaccatgtcactccaccacttagaaaacgtatgtggttagtagtccctctattgatcacag

SEQ ID NO: 417 - DNA, 122 bp, Homo sapiens
  misc_feature (61)..(62): /note="This region represents a CpG dinucleotide"
  misc_feature (61)..(61): /note="Nucleotide may be methylated to form 5-methylcytosine"
tggcttgggggtgcttgtgtaagttcttggttatgtgccctcagccaccaggatatgaaccgtgtctgcagagcttcactttagtgagcttacaagtttttaaatttttacttctagttaca

SEQ ID NO: 418 - DNA, 122 bp, Homo sapiens
  misc_feature (61)..(62): /note="This region represents a CpG dinucleotide"
  misc_feature (61)..(61): /note="Nucleotide may be methylated to form 5-methylcytosine"
ggcctgatgaggggccctggagcattgaggccttctccacatctttccttttcacataggcggccagagaggacagtgaacaaacacaaatggaactcatggcactggttcagcctgtcacc

SEQ ID NO: 419 - DNA, 122 bp, Homo sapiens
  misc_feature (61)..(62): /note="This region represents a CpG dinucleotide"
  misc_feature (61)..(61): /note="Nucleotide may be methylated to form 5-methylcytosine"
tatttcctctgacataatactgttagacttaattcacttaagaaatatttacaggccaggcgtggtggctcacgcctgtaatctcagcactttgggaggctgaggagggcggatcacaagat

SEQ ID NO: 420 - DNA, 122 bp, Homo sapiens
  misc_feature (61)..(62): /note="This region represents a CpG dinucleotide"
  misc_feature (61)..(61): /note="Nucleotide may be methylated to form 5-methylcytosine"
caaggatggcggaggcctatccggaaagtctacagtcatagtccaggtggttgatgtcaacgacaacccaccggaactgaccttgtcttcagtaaacagccctattcctgagaactcgggag

SEQ ID NO: 421 - DNA, 122 bp, Homo sapiens
  misc_feature (61)..(62): /note="This region represents a CpG dinucleotide"
  misc_feature (61)..(61): /note="Nucleotide may be methylated to form 5-methylcytosine"
aggtgagttaaagagcactagtaaatactcgcagtcatgcattgcttaacaacagggatacgttctgagaaatgagtcataggcagtttcactgttttgcgaaagaatattatgggtatact

SEQ ID NO: 422 - DNA, 122 bp, Homo sapiens
  misc_feature (61)..(62): /note="This region represents a CpG dinucleotide"
  misc_feature (61)..(61): /note="Nucleotide may be methylated to form 5-methylcytosine"
tctgttaactgtctttgcatatcctttgctcattttctgctgtgtcattggtcttactgacgtataggagttcatccctagggcatatagtcttttgtgacatgagatgtaaatactctttg

SEQ ID NO: 423 - DNA, 122 bp, Homo sapiens
  misc_feature (61)..(62): /note="This region represents a CpG dinucleotide"
  misc_feature (61)..(61): /note="Nucleotide may be methylated to form 5-methylcytosine"
tgccgcccgccacccagctggctcagtgatgcagtcccagctgtagagggcagaggtccacgcccctcgcctcaggagacctggacacagaagcctcccaggctctagcagttacaggggta

SEQ ID NO: 424 - DNA, 122 bp, Homo sapiens
  misc_feature (61)..(62): /note="This region represents a CpG dinucleotide"
  misc_feature (61)..(61): /note="Nucleotide may be methylated to form 5-methylcytosine"
aaacagagctcctggcccgagcagagagcgtgcacacgcatgaaatcgtgctcctgggtgcgccggcggccaggtgcccgatgtcggtcttggaagcagcgccggagtccgtctgaacccag

SEQ ID NO: 425 - DNA, 122 bp, Homo sapiens
  misc_feature (61)..(62): /note="This region represents a CpG dinucleotide"
  misc_feature (61)..(61): /note="Nucleotide may be methylated to form 5-methylcytosine"
ttgagcctgggagtttgagcagtcagcccaagcttgtactgcaaggtggctgcaaggccacgacccaaatctagagcctgaccttgacctcatgggttccatggagccgccctgctgatgcc

SEQ ID NO: 426 - DNA, 122 bp, Homo sapiens
  misc_feature (61)..(62): /note="This region represents a CpG dinucleotide"
  misc_feature (61)..(61): /note="Nucleotide may be methylated to form 5-methylcytosine"
atccatgtaaccataatgctggtcaagacaaaaagcatttccatcagcactaaatgtccccgtgtgtcccttccagtcaactcaccaccaccacccagaggcaatcactgttctaatcctag

SEQ ID NO: 427 - DNA, 122 bp, Homo sapiens
  misc_feature (61)..(62): /note="This region represents a CpG dinucleotide"
  misc_feature (61)..(61): /note="Nucleotide may be methylated to form 5-methylcytosine"
aatgcttgttctcttcaatgtcattgtgtccttggcatcctgcacaaggtctggcagttacgttgggttcaacaaaagtttgttgaactgaacaaagcaacaaccaagggttctaaaaactg

SEQ ID NO: 428 - DNA, 122 bp, Homo sapiens
  misc_feature (61)..(62): /note="This region represents a CpG dinucleotide"
  misc_feature (61)..(61): /note="Nucleotide may be methylated to form 5-methylcytosine"
caccctgctcctgctgctgtctgactctgagacaacacggccgcgccaactcgctaagaccggcccagcccacggagtaatcctcaatacgctgtcacatacacgaaaagaaaatcaatcag

SEQ ID NO: 429 - DNA, 122 bp, Homo sapiens
  misc_feature (61)..(62): /note="This region represents a CpG dinucleotide"
  misc_feature (61)..(61): /note="Nucleotide may be methylated to form 5-methylcytosine"
agaagcctcaaggataagaagagaaattccggggtggctgcctgttactcagcaagaaagcgaacactggcttgctggctcagcacttaacctgagatgaggatgtcctaacagcccttttt

SEQ ID NO: 430 - DNA, 122 bp, Homo sapiens
  misc_feature (61)..(62): /note="This region represents a CpG dinucleotide"
  misc_feature (61)..(61): /note="Nucleotide may be methylated to form 5-methylcytosine"
ccggggcctccttcgagcttccggtgaatttcgggcgatttccgcgggtgtcgggggtcccgggaggaggcagtcacagatccacccctgcagccagcctcctaggcgccggctccggcacg

SEQ ID NO: 431 - DNA, 122 bp, Homo sapiens
  misc_feature (61)..(62): /note="This region represents a CpG dinucleotide"
  misc_feature (61)..(61): /note="Nucleotide may be methylated to form 5-methylcytosine"
gaccaggaaggcccattatctgctgaacaataactcaaactatcactaaacttatgaccacgaacagtgattcaagaaaccaaagtttaatgcaggattgtttgtgatctaagaggctgtct

SEQ ID NO: 432 - DNA, 122 bp, Homo sapiens
  misc_feature (61)..(62): /note="This region represents a CpG dinucleotide"
  misc_feature (61)..(61): /note="Nucleotide may be methylated to form 5-methylcytosine"
tccctgtggaagtagcgctcatatttggaccggctcccatctgcagtctacagccagattcgtctttctgaagcttagctccagggatcagccctttcctactcatagatgagctctggctt

SEQ ID NO: 433 - DNA, 122 bp, Homo sapiens
  misc_feature (61)..(62): /note="This region represents a CpG dinucleotide"
  misc_feature (61)..(61): /note="Nucleotide may be methylated to form 5-methylcytosine"
cataatacttggtcattttacttaatccttctggtcttttactcaaagggcatcatagcacgtttcttccaggattgttatgatgtttgaatgagaagatatatgtaaatatgcttaacatg

SEQ ID NO: 434 - DNA, 122 bp, Homo sapiens
  misc_feature (61)..(62): /note="This region represents a CpG dinucleotide"
  misc_feature (61)..(61): /note="Nucleotide may be methylated to form 5-methylcytosine"
agtggacgtgagatttcccactggtgacgatgcagctgctgtcacgagggttgaagccaacggccaggactgagtcatttgtactctgaagggaagacactagattcagccaccccaagccc

SEQ ID NO: 435 - DNA, 122 bp, Homo sapiens
  misc_feature (61)..(62): /note="This region represents a CpG dinucleotide"
  misc_feature (61)..(61): /note="Nucleotide may be methylated to form 5-methylcytosine"
gaactctggcctcaggagtgacttagggcccagccatctcttctttggtagctcatgtcacgtgtccaggtccgggccctcctgcagccagcctgcaccccggatggccccacccactcctt

SEQ ID NO: 436 - DNA, 122 bp, Homo sapiens
  misc_feature (61)..(62): /note="This region represents a CpG dinucleotide"
  misc_feature (61)..(61): /note="Nucleotide may be methylated to form 5-methylcytosine"
ctaagattcatccattttattgcatgtaagtctaattcattcactttcattgctatgtgacgttcagctttgtgaatatattacagcttatcatggatactggtgctgctttcagtattttt

SEQ ID NO: 437 - DNA, 122 bp, Homo sapiens
  misc_feature (61)..(62): /note="This region represents a CpG dinucleotide"
  misc_feature (61)..(61): /note="Nucleotide may be methylated to form 5-methylcytosine"
ggagagcagcaaccaggtgttcctgagcccgtcacagaaggagctgccatcagtgcctctcgtgacctgcagtatttgggcctgtggaggtggtgtttgcagagccaacgttggcctccatc

SEQ ID NO: 438 - DNA, 122 bp, Homo sapiens
  misc_feature (61)..(62): /note="This region represents a CpG dinucleotide"
  misc_feature (61)..(61): /note="Nucleotide may be methylated to form 5-methylcytosine"
aaggagcttagagtaatcttagctaacctgttttgtagttttgccaagggccagccctagcgggtaggttaagcaagatgccagcattgtgggttgattggccttcttttggtgctttttta

SEQ ID NO: 439 - DNA, 122 bp, Homo sapiens
  misc_feature (61)..(62): /note="This region represents a CpG dinucleotide"
  misc_feature (61)..(61): /note="Nucleotide may be methylated to form 5-methylcytosine"
agattactcaactgtaaaacgtgttctgtgggccaactgtgacactgggagtgtggcaatcgtcactcatttgtttattccacaaacatgtattgagcaactacttcctgtcaccagtaagg

SEQ ID NO: 440 - DNA, 122 bp, Homo sapiens
  misc_feature (61)..(62): /note="This region represents a CpG dinucleotide"
  misc_feature (61)..(61): /note="Nucleotide may be methylated to form 5-methylcytosine"
gcccataccgcagtaggctcctcgggctgcccctcggtgagtacagttttgatgtcggctcggccgcctgccgccaacccgagatttggtattgccagttgtgggagggcgtcctgctaaaa

SEQ ID NO: 441 - DNA, 122 bp, Homo sapiens
  misc_feature (61)..(62): /note="This region represents a CpG dinucleotide"
  misc_feature (61)..(61): /note="Nucleotide may be methylated to form 5-methylcytosine"
agctaagactcccagaacgtgggaaggaaaacgaggcccagcagaagagcaggagggcggcgctttccggtcgggccccggatttaactgtcttcacctacagaggccccaccccacccccc

SEQ ID NO: 442 - DNA, 122 bp, Homo sapiens
  misc_feature (61)..(62): /note="This region represents a CpG dinucleotide"
  misc_feature (61)..(61): /note="Nucleotide may be methylated to form 5-methylcytosine"
aatataagtaaaaataccagagcagaaaacacactgtaagataagcattgtttcatggaacgtctaagtcacacgtgcatgtgagtgtgtgtgctgagtcatgattaaaagtgtatttctca

SEQ ID NO: 443 - DNA, 122 bp, Homo sapiens
  misc_feature (61)..(62): /note="This region represents a CpG dinucleotide"
  misc_feature (61)..(61): /note="Nucleotide may be methylated to form 5-methylcytosine"
gagtgatgaatggcaacaatgatgactgactgacagctgtgatgactgacagtaatgacacgtcatgccacactgcactggggtcacacctctggaaggccactttgttgattcaacttgag

SEQ ID NO: 444 - DNA, 122 bp, Homo sapiens
  misc_feature (61)..(62): /note="This region represents a CpG dinucleotide"
  misc_feature (61)..(61): /note="Nucleotide may be methylated to form 5-methylcytosine"
cagttccagctcttcaatgcagtgaacatacttcctgatttctcagctgaaatgactgctcgtcctttgcatacctacagcattcttgaatcagctttcaccaccagctcatgggagtcagg

SEQ ID NO: 445 - DNA, 122 bp, Homo sapiens
  misc_feature (61)..(62): /note="This region represents a CpG dinucleotide"
  misc_feature (61)..(61): /note="Nucleotide may be methylated to form 5-methylcytosine"
aaaaaagaaaaaaaaagacctggggaagagctacccaccacaccccaaggcaatgccatacggaacagtattctcacaccacagaggagtaattgaggccccaagacaagctgatggtgcac

SEQ ID NO: 446 - DNA, 122 bp, Homo sapiens
  misc_feature (61)..(62): /note="This region represents a CpG dinucleotide"
  misc_feature (61)..(61): /note="Nucleotide may be methylated to form 5-methylcytosine"
gggctccttggaagccaggggaaattaaccagttacccaccaacaaagcttatacgttttcgttaggattggctaaggcgtgatggtttcagagaaagatgaagtttcaactgtggtcctct

SEQ ID NO: 447 - DNA, 122 bp, Homo sapiens
  misc_feature (61)..(62): /note="This region represents a CpG dinucleotide"
  misc_feature (61)..(61): /note="Nucleotide may be methylated to form 5-methylcytosine"
cagcctcggtgaaacacaataaaggaagagaactacagttcttttattaaaagctcttagcgcacatatttcccaggtaaagataatccacaggaggatagatttgggcaaatttcatcata

SEQ ID NO: 448 - DNA, 122 bp, Homo sapiens
  misc_feature (61)..(62): /note="This region represents a CpG dinucleotide"
  misc_feature (61)..(61): /note="Nucleotide may be methylated to form 5-methylcytosine"
tcacattggtgacaagcagaagagattaggttgtcctttgatttgttgatacacatgccacgctgtcagatgatatttgagattatgccctgagctcagagatgcatagcgtgaggatgaca

SEQ ID NO: 449 - DNA, 122 bp, Homo sapiens
  misc_feature (61)..(62): /note="This region represents a CpG dinucleotide"
  misc_feature (61)..(61): /note="Nucleotide may be methylated to form 5-methylcytosine"
ggaggcctgaccacacctttgaagtttaaggtcttgagtcagttacctaacttctctatgcgtcagtttccttgcctgtaaaatgaggaaaatacagtacctacctaggatactatgtgcag

SEQ ID NO: 450 - DNA, 122 bp, Homo sapiens
  misc_feature (61)..(62): /note="This region represents a CpG dinucleotide"
  misc_feature (61)..(61): /note="Nucleotide may be methylated to form 5-methylcytosine"
ctaatccccactggaaacatgagaaaatagagacatgctacccagaatctaggaactgaacgccaagcctaagggcttcacctagcccctaagtccagccttgagggtaaagaggtaatgcc

SEQ ID NO: 451 - DNA, 122 bp, Homo sapiens
  misc_feature (61)..(62): /note="This region represents a CpG dinucleotide"
  misc_feature (61)..(61): /note="Nucleotide may be methylated to form 5-methylcytosine"
tgttcaaaaaaagcatgtaaacacagggcttgattttgttagcctctatcccagaaaattcgtcgatcactccttggcttttgtataattcagtgactggctttgccacatctttgtactgt

SEQ ID NO: 452 - DNA, 122 bp, Homo sapiens
  misc_feature (61)..(62): /note="This region represents a CpG dinucleotide"
  misc_feature (61)..(61): /note="Nucleotide may be methylated to form 5-methylcytosine"
acgttattgtgagaatccaatgaggaaacacacgtaatgccttcctgcttcattttcctacggcatcttcaacgcctggaacagcctctggcagacagtggatgttcaataaatacccactg

SEQ ID NO: 453 - DNA, 122 bp, Homo sapiens
  misc_feature (61)..(62): /note="This region represents a CpG dinucleotide"
  misc_feature (61)..(61): /note="Nucleotide may be methylated to form 5-methylcytosine"
gacagccctttcctgcgaatggacaatgggagaggctggcgcaaccgagaatagccagcgcggaggaagggctccggacggagctaggagggtggggctcggagggcgcaggaagagcggct

SEQ ID NO: 454 - DNA, 122 bp, Homo sapiens
  misc_feature (61)..(62): /note="This region represents a CpG dinucleotide"
  misc_feature (61)..(61): /note="Nucleotide may be methylated to form 5-methylcytosine"
aatatgaatcaatgctgaatcattatcaagcttcaaatcatcatcttctccaaatgtacacgtcaccctttactccctcgttccttcctaacaaatcatgactgccttcttctaccttagac

SEQ ID NO: 455 - DNA, 122 bp, Homo sapiens
  misc_feature (61)..(62): /note="This region represents a CpG dinucleotide"
  misc_feature (61)..(61): /note="Nucleotide may be methylated to form 5-methylcytosine"
actgcgctccagcctgggtgggtgacaggcaagattctgtctcaaaaagaatgcagtagccgagctggttatgcacacatcctggaatctttgagaaggcagttctcattgctcttcagctt

SEQ ID NO: 456 - DNA, 122 bp, Homo sapiens
  misc_feature (61)..(62): /note="This region represents a CpG dinucleotide"
  misc_feature (61)..(61): /note="Nucleotide may be methylated to form 5-methylcytosine"
tcggctcggctctggccaaggagcagctctgggaagcaacgggaggtgaggcagcttgttcgaagcctgctggtcaggatggagtcggatctgaactgtggccgtctgacccccaagcaggc

SEQ ID NO: 457 - DNA, 122 bp, Homo sapiens
  misc_feature (61)..(62): /note="This region represents a CpG dinucleotide"
  misc_feature (61)..(61): /note="Nucleotide may be methylated to form 5-methylcytosine"
agaaagaacatagcaataattcagtgtggctggagatgtggcaagctgatggtgcagggacgcaagaagaagccaagtgagaaaggagcagaataagggccttataagccatgtaaagggat

SEQ ID NO: 458 - DNA, 122 bp, Homo sapiens
  misc_feature (61)..(62): /note="This region represents a CpG dinucleotide"
  misc_feature (61)..(61): /note="Nucleotide may be methylated to form 5-methylcytosine"
ggacacggggctttgggaagcccgtttgacagagggcaggagccattcaggaaatgggtccgggacacgtggctttgtagtcactggctggctgggtgtggtaaagccgcacatacgtgaca

SEQ ID NO: 459 - DNA, 122 bp, Homo sapiens
  misc_feature (61)..(62): /note="This region represents a CpG dinucleotide"
  misc_feature (61)..(61): /note="Nucleotide may be methylated to form 5-methylcytosine"
agaggaagctgtgcaatgtggagtcatgcagcccatccctcccctctctcaatcctatagcggctagacggtgtggagaaacatggttattgtttaatcacatcacactggctgtaaatcaa

SEQ ID NO: 460 - DNA, 122 bp, Homo sapiens
  misc_feature (61)..(62): /note="This region represents a CpG dinucleotide"
  misc_feature (61)..(61): /note="Nucleotide may be methylated to form 5-methylcytosine"
agggaggggcagagtgttaacgtcaggtaggaatgaccctcccagaagtcagaatgctcccgtgtccacccgtgttcactgtgctctgctatttatcttcttaagcctctttctgtgattat

SEQ ID NO: 461 - DNA, 122 bp, Homo sapiens
  misc_feature (61)..(62): /note="This region represents a CpG dinucleotide"
  misc_feature (61)..(61): /note="Nucleotide may be methylated to form 5-methylcytosine"
acagggtgatcttctgttctagggagaaagtgtctcatttgcagaaaggaaaggcacctgcggtatttgtgaaatgccatgacaagtctctgaataagaagtcaggctggtgagcattctgg

SEQ ID NO: 462 - DNA, 122 bp, Homo sapiens
  misc_feature (61)..(62): /note="This region represents a CpG dinucleotide"
  misc_feature (61)..(61): /note="Nucleotide may be methylated to form 5-methylcytosine"
accttttcactcgcaatcacagcgacggcaagaaatacccagagctcgtgctggatcaagcgctggaccgcgaggagcagccccagctcaggttaaccctcacagcgctggatggtgggtca

SEQ ID NO: 463 - DNA, 122 bp, Homo sapiens
  misc_feature (61)..(62): /note="This region represents a CpG dinucleotide"
  misc_feature (61)..(61): /note="Nucleotide may be methylated to form 5-methylcytosine"
tacatgtgactgtatgaatggcatgttacggggcaatgtgaatgtgcactgggtttgtaccggcctctaacctgggtttcgtatgtgccatcaaagtcatccaggaggcgagtcaggccaaa

SEQ ID NO: 464 - DNA, 122 bp, Homo sapiens
  misc_feature (61)..(62): /note="This region represents a CpG dinucleotide"
  misc_feature (61)..(61): /note="Nucleotide may be methylated to form 5-methylcytosine"
atgggtctggttgacagaggaatcagaccatcacttcctccaccaggtcccacccaccagcgaggctgcagttcttgttggacagctacacttccctgttgctccatcctcttgtccttctc

SEQ ID NO: 465 - DNA, 122 bp, Homo sapiens
  misc_feature (61)..(62): /note="This region represents a CpG dinucleotide"
  misc_feature (61)..(61): /note="Nucleotide may be methylated to form 5-methylcytosine"
tcatgatggaaaacaatgggtccacacacctattcatactgttaacatttcaccactaggcgtgaattctccctcagttctgtgtcatagtcattcataatgaggaagtattagcatttcag

SEQ ID NO: 466 - DNA, 122 bp, Homo sapiens
  misc_feature (61)..(62): /note="This region represents a CpG dinucleotide"
  misc_feature (61)..(61): /note="Nucleotide may be methylated to form 5-methylcytosine"
tcttgttaccagaggtacatctgcaggataatttcttaaaagttgctttcttgggtcagacggcaggtacatttgtgatacagaaagccataggcagtttaccctccattgtggcctcccct

SEQ ID NO: 467 - DNA, 122 bp, Homo sapiens
  misc_feature (61)..(62): /note="This region represents a CpG dinucleotide"
  misc_feature (61)..(61): /note="Nucleotide may be methylated to form 5-methylcytosine"
aacagtctgaaaaatacattaaactttaaaaccactcttccaaccacgcatgcagaagttcgccaaagcatacagtatgtctttcaattacgtaatgcttcaaatagcgaacagagcaaaag

SEQ ID NO: 468 - DNA, 122 bp, Homo sapiens
  misc_feature (61)..(62): /note="This region represents a CpG dinucleotide"
  misc_feature (61)..(61): /note="Nucleotide may be methylated to form 5-methylcytosine"
gtgtccttcctcaccttcctcagtgagattagtcggacttggccaaaccaaaaccagtaacgctgatgagaacagggaactcccagccttagttctattttgtccacccttgattccttctc

SEQ ID NO: 469 - DNA, 122 bp, Homo sapiens
  misc_feature (61)..(62): /note="This region represents a CpG dinucleotide"
  misc_feature (61)..(61): /note="Nucleotide may be methylated to form 5-methylcytosine"
accaggatatttctgggtgtgaaagggaagactgtatggtaattatatggggtaaactggcgtatgctaggacagtcctaggcatactgggacttgtgtgaccctgcacctagcccatacca

SEQ ID NO: 470 - DNA, 122 bp, Homo sapiens
  misc_feature (61)..(62): /note="This region represents a CpG dinucleotide"
  misc_feature (61)..(61): /note="Nucleotide may be methylated to form 5-methylcytosine"
tggggctctagtgttatgggaaggcaggaggcaggtgacaatcactagtttaggcagtgccgtccagacttggggttggaacctcccagttggttgtacaatcaatttaatgcgtcacagtt

SEQ ID NO: 471 - DNA, 122 bp, Homo sapiens
  misc_feature (61)..(62): /note="This region represents a CpG dinucleotide"
  misc_feature (61)..(61): /note="Nucleotide may be methylated to form 5-methylcytosine"
atgcgtggcctggacaagcagttggagtccagacggaagctggagtcggcatactcaatgcgtacattggtggggccacgagtggttttcactgacagcgtgaacaggtagctggggtgcgt

SEQ ID NO: 472 - DNA, 122 bp, Homo sapiens
  misc_feature (61)..(62): /note="This region represents a CpG dinucleotide"
  misc_feature (61)..(61): /note="Nucleotide may be methylated to form 5-methylcytosine"
tcatctttttgttgaccaacttttcctttaatcccaaattgctcgggatttatcatgagccgcctaagaagacatggagttggaagtggagacccagagtggtgcatggaagctggttgtca

SEQ ID NO: 473 - DNA, 122 bp, Homo sapiens
  misc_feature (61)..(62): /note="This region represents a CpG dinucleotide"
  misc_feature (61)..(61): /note="Nucleotide may be methylated to form 5-methylcytosine"
ggtctaaaacccaggtttcctaaattcctgatggtccagtatttttgcatcataccatgtcgtcacctatgaggcaggtcctaaggctgttgaaaaacaataggaaatggcttttaaaagta

SEQ ID NO: 474 - DNA, 122 bp, Homo sapiens
  misc_feature (61)..(62): /note="This region represents a CpG dinucleotide"
  misc_feature (61)..(61): /note="Nucleotide may be methylated to form 5-methylcytosine"
ggccaagcgatggccgctctctcctctcccctcctcagagggggcagatagaaactgggacggattcaagtcacatgcacgcggatagcagtaagccacacacctgccacttagccagaatg

SEQ ID NO: 475 - DNA, 122 bp, Homo sapiens
  misc_feature (61)..(62): /note="This region represents a CpG dinucleotide"
  misc_feature (61)..(61): /note="Nucleotide may be methylated to form 5-methylcytosine"
gttgccatgcttgtctgcacactcaggcatgtgggtgcacacctatattcatccatgtggcgtgcctggagggtgtggcccgcggtgcccagtatagagcaggcgcatggccacacggctcc

SEQ ID NO: 476 - DNA, 122 bp, Homo sapiens
  misc_feature (61)..(62): /note="This region represents a CpG dinucleotide"
  misc_feature (61)..(61): /note="Nucleotide may be methylated to form 5-methylcytosine"
gtacatgcaaatcaagccaacttttcaggaactcatttaatgttttcaactctttaacaacggaaacttacaaccacaaggtctcaatgacctgaagcctcatgttttgggaataaggagta

SEQ ID NO: 477 - DNA, 122 bp, Homo sapiens
  misc_feature (61)..(62): /note="This region represents a CpG dinucleotide"
  misc_feature (61)..(61): /note="Nucleotide may be methylated to form 5-methylcytosine"
atatagccaacagcctctttggcattttcctctggaagtttctcaggcaaagtgttcaaacgtaaaatttgtatacttctctgctaagtatttcttaaacgaagcagcttctacccaaatgc

SEQ ID NO: 478 - DNA, 122 bp, Homo sapiens
  misc_feature (61)..(62): /note="This region represents a CpG dinucleotide"
  misc_feature (61)..(61): /note="Nucleotide may be methylated to form 5-methylcytosine"
ggacgaccccgccgccaggggcccagtgcgaggtccccgccagcccccagcggccttccccgcccggggcgctcccagagcaaacgaggtccctgagagctccacctagttcacaggataaa

SEQ ID NO: 479 - DNA, 122 bp, Homo sapiens
  misc_feature (61)..(62): /note="This region represents a CpG dinucleotide"
  misc_feature (61)..(61): /note="Nucleotide may be methylated to form 5-methylcytosine"
atcatctggcagcacagtaccctgtagcgtattggttgtttaccctgatctgtggctgatcgtgtggctgactaggatggtgtggctgactgggagctgcggcttgctgccgctgcgcagca

SEQ ID NO: 480 - DNA, 122 bp, Homo sapiens
  misc_feature (61)..(62): /note="This region represents a CpG dinucleotide"
  misc_feature (61)..(61): /note="Nucleotide may be methylated to form 5-methylcytosine"
gcactgagttgatgatttcatggctattatctcacataatcctattggattgggtaagtacgatgaggaaactgaaattcaaagaagttaagcaaattgcttgagggccctcagatggtgaa

SEQ ID NO: 481 - DNA, 122 bp, Homo sapiens
  misc_feature (61)..(62): /note="This region represents a CpG dinucleotide"
  misc_feature (61)..(61): /note="Nucleotide may be methylated to form 5-methylcytosine"
taaatcctcttactgagggtaagattggctctagatctgggtgagccccagcagtatccccgtgcaggctctgactggctcatgagaactaattgcttgtgtctcttgctaattctgcattc

SEQ ID NO: 482 - DNA, 122 bp, Homo sapiens
  misc_feature (61)..(62): /note="This region represents a CpG dinucleotide"
  misc_feature (61)..(61): /note="Nucleotide may be methylated to form 5-methylcytosine"
gccgcactttttgtatgtgagcatgtgtggtttactgtggcgctgctcagccctgaactccgctgagcaggtgttaatagatcactcagtccatgggacacagggtgggtgagtatgtagct

SEQ ID NO: 483 - DNA, 122 bp, Homo sapiens
  misc_feature (61)..(62): /note="This region represents a CpG dinucleotide"
  misc_feature (61)..(61): /note="Nucleotide may be methylated to form 5-methylcytosine"
cctctgagtcgcggttactttaggagcaaacgcaggtacaaacaaactgagtctgtcacccgcagcgtgggagaggcaggtcgcgtgttcctgacagcacgcgaagcagctaaatggtatcc

SEQ ID NO: 484 - DNA, 122 bp, Homo sapiens
  misc_feature (61)..(62): /note="This region represents a CpG dinucleotide"
  misc_feature (61)..(61): /note="Nucleotide may be methylated to form 5-methylcytosine"
ttacctaaaaagtcagaggtacttcagccacgtctatttccaaaccagaaataactcagacgtagcctcagcagcactagagatccacattagttacactggcttaggatttaaatgttcac

SEQ ID NO: 485 - DNA, 122 bp, Homo sapiens
  misc_feature (61)..(62): /note="This region represents a CpG dinucleotide"
  misc_feature (61)..(61): /note="Nucleotide may be methylated to form 5-methylcytosine"
ccccaaagcaaccttcctgaatacataggtgccgggcatgaaactctacaaaagcaaccacgttcctgccactgtaaatgcatcttggtggccctagggtggcggtgaaccactgaaacaaa

SEQ ID NO: 486 - DNA, 122 bp, Homo sapiens
  misc_feature (61)..(62): /note="This region represents a CpG dinucleotide"
  misc_feature (61)..(61): /note="Nucleotide may be methylated to form 5-methylcytosine"
accccactcaaatccccataaaagagccattctttaaatttccttcagtcatcacttttgcgagtaccgtgtttcctgctgagatcctgaccactctggggaccatattgtgtgacagagag

SEQ ID NO: 487 - DNA, 122 bp, Homo sapiens
  misc_feature (61)..(62): /note="This region represents a CpG dinucleotide"
  misc_feature (61)..(61): /note="Nucleotide may be methylated to form 5-methylcytosine"
ggtaggcagcccccagccgcctgccttgccagccggtgcgttttcgtggctgaaacaagccgcgccctttgaaagcgttgacacttgttctgccgagaggtcagctgagctccgaatggatg

SEQ ID NO: 488 - DNA, 122 bp, Homo sapiens
  misc_feature (61)..(62): /note="This region represents a CpG dinucleotide"
  misc_feature (61)..(61): /note="Nucleotide may be methylated to form 5-methylcytosine"
ttttcaagtctctgctactgctgaaaaaaaagaagtacgctgctctggttgttgagccaacgtcggatgggaattatgtcaccaaacaggagctcaaaggattagatatagttagaagagat

SEQ ID NO: 489 - DNA, 122 bp, Homo sapiens
  misc_feature (61)..(62): /note="This region represents a CpG dinucleotide"
  misc_feature (61)..(61): /note="Nucleotide may be methylated to form 5-methylcytosine"
tccagaggtggtgcagaaacgaccccgcgccggcgccccatcctgcggccagtgcctccgcgccccggctccggtccccaccgtccccgccccagatttccggaggagcaggcgggcggggt

SEQ ID NO: 490 - DNA, 122 bp, Homo sapiens
  misc_feature (61)..(62): /note="This region represents a CpG dinucleotide"
  misc_feature (61)..(61): /note="Nucleotide may be methylated to form 5-methylcytosine"
gataggaagaataagtttaatagatctattgtacaacacggtgacctcagctaataactacgtactatattcctgaaattgctgagcaagtaaattctcaccacaaaaaatgatataagtat

SEQ ID NO: 491 - DNA, 122 bp, Homo sapiens
  misc_feature (61)..(62): /note="This region represents a CpG dinucleotide"
  misc_feature (61)..(61): /note="Nucleotide may be methylated to form 5-methylcytosine"
ggaagcccccgcacacgctgtggctgccgaagcctccggtgaggccgcggtagcaggagacgccgcggtagggggcggcggtgatgcagcagcggccgggccggggcccgcaggccgagatg

SEQ ID NO: 492 - DNA, 122 bp, Homo sapiens
  misc_feature (61)..(62): /note="This region represents a CpG dinucleotide"
  misc_feature (61)..(61): /note="Nucleotide may be methylated to form 5-methylcytosine"
catttccaaaggacaggaagtcacctctgagctgttgcggcttttctacgagaagcagaacgtgtacggcactccaagatcggaaaacaatgtcaggtttcaactggaatgacacagatgta

SEQ ID NO: 493 - DNA, 122 bp, Homo sapiens
  misc_feature (61)..(62): /note="This region represents a CpG dinucleotide"
  misc_feature (61)..(61): /note="Nucleotide may be methylated to form 5-methylcytosine"
tcaattgctagttctacttggacccttatttgtggctaattccttctgctttgaattccacgtacttatgtaaacctgtttgtttcacaatgtcttcagggcaaagggcagatcctgtggat

SEQ ID NO: 494 - DNA, 122 bp, Homo sapiens
  misc_feature (61)..(62): /note="This region represents a CpG dinucleotide"
  misc_feature (61)..(61): /note="Nucleotide may be methylated to form 5-methylcytosine"
tttcagttactgctggcatgggaaaatgagtcaccaaaattcacagattcctcctcattgcgtaataactaaaacgaatgtttgggtttccggtggcaccagctcttatttctcagttcagc

SEQ ID NO: 495 - DNA, 122 bp, Homo sapiens
  misc_feature (61)..(62): /note="This region represents a CpG dinucleotide"
  misc_feature (61)..(61): /note="Nucleotide may be methylated to form 5-methylcytosine"
cataaaaggtagatggacaaatgttaaatgactaagcagaaaagagaaagttcaaaccaacgtatccacagagctactgctgggacataagccagtttgacctgcaggagttcagaaagtct

SEQ ID NO: 496 - DNA, 122 bp, Homo sapiens
  misc_feature (61)..(62): /note="This region represents a CpG dinucleotide"
  misc_feature (61)..(61): /note="Nucleotide may be methylated to form 5-methylcytosine"
gagggagatttggcagaaaatgagaaggcagtgtgatcaccgaggcagagattggagtgacgcagccacaaaccaaagaatgctggcagcagtccaggtgtggtggctcatgcctgtaatcc

SEQ ID NO: 497 - DNA, 122 bp, Homo sapiens
  misc_feature (61)..(62): /note="This region represents a CpG dinucleotide"
  misc_feature (61)..(61): /note="Nucleotide may be methylated to form 5-methylcytosine"
gggaacggctccaccatggcaccctggtggccctgaacatatccacacaggctacagaggcgaaagctcaaactgaggctcatctgagtcatgacaggacactttgtgatcctccagagagt

SEQ ID NO: 498 - DNA, 122 bp, Homo sapiens
  misc_feature (61)..(62): /note="This region represents a CpG dinucleotide"
  misc_feature (61)..(61): /note="Nucleotide may be methylated to form 5-methylcytosine"
catcctaattgactcacagtgatgactcgttccttcatgggaaacattttaaaaggacttcgaaattgttcaagaaagaggaaattttgtgcaatatagttttagtgttaagtgtattttag

SEQ ID NO: 499 - DNA, 122 bp, Homo sapiens
  misc_feature (61)..(62): /note="This region represents a CpG dinucleotide"
  misc_feature (61)..(61): /note="Nucleotide may be methylated to form 5-methylcytosine"
agtttactggcttagcagggtggggtgttgccaccactatcttggagtcccatgagaattcgcttcaggagattcctttgcagagaatgggctactgggctctgaaggttgactacaggcta

SEQ ID NO: 500 - DNA, 122 bp, Homo sapiens
  misc_feature (61)..(62): /note="This region represents a CpG dinucleotide"
  misc_feature (61)..(61): /note="Nucleotide may be methylated to form 5-methylcytosine"
ggtgtgcagtgtgtcggcggtggaaacagaggtggagcagccatgtatgtgcaaggagagcgtgatgttcagtcgaatgactgggcatttcctggccagacctgtctatcctactgcctagc

SEQ ID NO: 501 - DNA, 122 bp, Homo sapiens
  misc_feature (61)..(62): /note="This region represents a CpG dinucleotide"
  misc_feature (61)..(61): /note="Nucleotide may be methylated to form 5-methylcytosine"
cccccgccggccgccggccgcgctccccgccttcattctgtgatctgcggatttgccagtcgccaacctccgcgcccagagtcaccatcgcgcagggttgggcaaaccatggagctcggggc

SEQ ID NO: 502 - DNA, 122 bp, Homo sapiens
  misc_feature (61)..(62): /note="This region represents a CpG dinucleotide"
  misc_feature (61)..(61): /note="Nucleotide may be methylated to form 5-methylcytosine"
tattcaaccctgccactgtagtgagtggctgtgttccagtaaactttttcacaaagcaagcggtgggctggatttaccctgcaggccaaagtctcgtgactcacagactagaagatagaggg

SEQ ID NO: 503 - DNA, 122 bp, Homo sapiens
  misc_feature (61)..(62): /note="This region represents a CpG dinucleotide"
  misc_feature (61)..(61): /note="Nucleotide may be methylated to form 5-methylcytosine"
ggagtgaagcgtagagagagaagctttaatgtggataggaaagtctgaagtgagatataccgtccagttactctgggactcgttgagatcctgcaacaggagacagggagcctgagtaactg

SEQ ID NO: 504 - DNA, 122 bp, Homo sapiens
  misc_feature (61)..(62): /note="This region represents a CpG dinucleotide"
  misc_feature (61)..(61): /note="Nucleotide may be methylated to form 5-methylcytosine"
tcatgcctcggcaagtccctggtaggaggtccttaccactgcattaaaccaagatcttagcgctttgacaaagggccaacgagaacatgaagatgatctgtaaagtccctagaagacgccag

SEQ ID NO: 505 - DNA, 122 bp, Homo sapiens
  misc_feature (61)..(62): /note="This region represents a CpG dinucleotide"
  misc_feature (61)..(61): /note="Nucleotide may be methylated to form 5-methylcytosine"
ctgtcttaaaccttttcttgctgtatcagcttccttcctgattatgaaatgtaccatgcacgtaactgtcatttccttgtccttttgctgatggtatctcttggcatgatgcttttttcttt

SEQ ID NO: 506 - DNA, 122 bp, Homo sapiens
  misc_feature (61)..(62): /note="This region represents a CpG dinucleotide"
  misc_feature (61)..(61): /note="Nucleotide may be methylated to form 5-methylcytosine"
attggaggagggtataactttaagagccagagtgcctgagtttgactcgcagctgtgccacgtactggctgtgtggtcttggggaagttgcttaacctctctgtgcctttgtttccccgtct

SEQ ID NO: 507 - DNA, 122 bp, Homo sapiens
  misc_feature (61)..(62): /note="This region represents a CpG dinucleotide"
  misc_feature (61)..(61): /note="Nucleotide may be methylated to form 5-methylcytosine"
gggttatctggaagtcttggtgagacagtgtctgcaaaatgcttatcgccaagccaggcacgtcatcattgcccaaggtatggcagctgcagccatcacggccctcattttgcagatgccga

SEQ ID NO: 508 - DNA, 122 bp, Homo sapiens
  misc_feature (61)..(62): /note="This region represents a CpG dinucleotide"
  misc_feature (61)..(61): /note="Nucleotide may be methylated to form 5-methylcytosine"
atgggagctgctgagggagggactgtccatgctcagtcccaggtccccacccccggcagccgtccagtctagcctgtccccagggaagatctcaagagaaggaagacaaccattgcctctgg

SEQ ID NO: 509 - DNA, 122 bp, Homo sapiens
  misc_feature (61)..(62): /note="This region represents a CpG dinucleotide"
  misc_feature (61)..(61): /note="Nucleotide may be methylated to form 5-methylcytosine"
ggggcggatgccggggcttcccaggatgtggagtgtggggcagtgagaggccccccgccccgcctcttcggaaaagcctgagcagcagctcccggggcgcggaagctctgacacctgagagc

SEQ ID NO: 510 - DNA, 122 bp, Homo sapiens
  misc_feature (61)..(62): /note="This region represents a CpG dinucleotide"
  misc_feature (61)..(61): /note="Nucleotide may be methylated to form 5-methylcytosine"
tgcctggaatcaaacaactaagtggcagaactggggcttacacctaggtctgctgactaccgttggtgccaagacatcagagagattcttctggtttcacagtggagcccccaaggattact

SEQ ID NO: 511 - DNA, 122 bp, Homo sapiens
  misc_feature (61)..(62): /note="This region represents a CpG dinucleotide"
  misc_feature (61)..(61): /note="Nucleotide may be methylated to form 5-methylcytosine"
tgagcaggtgcacagggtggatctgcggttggaccagcaagagtggtggtggaggcgtgacgtgaaggaatgcccgtgatgcccctgaccctgaccttggtcccgagaaggtcatctgagaa

SEQ ID NO: 512 - DNA, 122 bp, Homo sapiens
  misc_feature (61)..(62): /note="This region represents a CpG dinucleotide"
  misc_feature (61)..(61): /note="Nucleotide may be methylated to form 5-methylcytosine"
tcggagacaaaggcaagtccttgttttctttgttttgctgagcttgtctggggcgggcgccgagttggggtcctattccgtagtggaagaaacggagagaggctcttttgtggcaaatctag

SEQ ID NO: 513 - DNA, 122 bp, Homo sapiens
  misc_feature (61)..(62): /note="This region represents a CpG dinucleotide"
  misc_feature (61)..(61): /note="Nucleotide may be methylated to form 5-methylcytosine"
cacccacggagccagttgtgcaaaagctgggatttccattcatgctcagcctaattctttcgccattactctttgctgactccaggaggtgctaccatgtgcattcttaaggtgttaatttg

SEQ ID NO: 514 - DNA, 122 bp, Homo sapiens
  misc_feature (61)..(62): /note="This region represents a CpG dinucleotide"
  misc_feature (61)..(61): /note="Nucleotide may be methylated to form 5-methylcytosine"
ctaccagagctggagtctcatctgaaggctcaactgaggaaagatctactttcaacctcacgtagttgttggtaggatttagttaattgtggaccattgggtgaaattctttttcttgtggg

SEQ ID NO: 515 - DNA, 122 bp, Homo sapiens
  misc_feature (61)..(62): /note="This region represents a CpG dinucleotide"
  misc_feature (61)..(61): /note="Nucleotide may be methylated to form 5-methylcytosine"
ccgtgtggctggacgaggtggggtgccggggcagcgaggcgtccctgtggggctgccctgcggagcggtggggacgcggagaccgcgcgcacgaggaggacgcgggcgtgcgctgctggggt

SEQ ID NO: 516 - DNA, 122 bp, Homo sapiens
  misc_feature (61)..(62): /note="This region represents a CpG dinucleotide"
  misc_feature (61)..(61): /note="Nucleotide may be methylated to form 5-methylcytosine"
acctaggctcagctagaaagagtgctatgatccattagcaatgtctgccctaggactggtcgtaggcagtggaagtacataattgccatccctgtcctaagtgttttaggatttgctaaacc

SEQ ID NO: 517 - DNA, 122 bp, Homo sapiens
  misc_feature (61)..(62): /note="This region represents a CpG dinucleotide"
  misc_feature (61)..(61): /note="Nucleotide may be methylated to form 5-methylcytosine"
tgggtgtgcactccattggttgctggccagcagtcttcaaggtggttgagttcttcctgccgcacaggctggacagtcaagtgctcctcttgcgtggcttgtgagtaaaggtaaatgcatta

SEQ ID NO: 518 - DNA, 122 bp, Homo sapiens
  misc_feature (61)..(62): /note="This region represents a CpG dinucleotide"
  misc_feature (61)..(61): /note="Nucleotide may be methylated to form 5-methylcytosine"
caaatacatatccccataaagaatatgacagaaacaaatccactgagaaggaagtgcttacgcaataaataagtttgcaactctacatctgctcaaatgagggccctagttagaaagaggaa

SEQ ID NO: 519 - DNA, 122 bp, Homo sapiens
  misc_feature (61)..(62): /note="This region represents a CpG dinucleotide"
  misc_feature (61)..(61): /note="Nucleotide may be methylated to form 5-methylcytosine"
tgttcatagaaccatgccaagcagggcggcgggcagcaggtgaagctctgcagtgtctgacgtagctgtagtgtccacacagaggcatctacttcctgccagcatggagggttttgtggatc

SEQ ID NO: 520 - DNA, 122 bp, Homo sapiens
  misc_feature (61)..(62): /note="This region represents a CpG dinucleotide"
  misc_feature (61)..(61): /note="Nucleotide may be methylated to form 5-methylcytosine"
tacggtggtggtcttggaggggtggtggtcttggggggcgcggccccagccccatcttttcgcggggctgcttctgtccgcccgcacgggggaggggaggaggaggcggaggcggaggcaga

SEQ ID NO: 521 - DNA, 122 bp, Homo sapiens
  misc_feature (61)..(62): /note="This region represents a CpG dinucleotide"
  misc_feature (61)..(61): /note="Nucleotide may be methylated to form 5-methylcytosine"
aagaggtggtgtctgagcactcacctggacttctgcaaggtcagcaaacacaggagcagtcgctgagcagcggtgcaaacacaccagctctccaacgggtgcttcactgcacttccctgcag

SEQ ID NO: 522 - DNA, 122 bp, Homo sapiens
  misc_feature (61)..(62): /note="This region represents a CpG dinucleotide"
  misc_feature (61)..(61): /note="Nucleotide may be methylated to form 5-methylcytosine"
taccatctaggtttgtgtaagttcactctatgatgttcctacaatgaagaaattgcctaacgtgcatttctcggaaactatcctcatcattaagcaacataactgtatttatgaaacacaac

SEQ ID NO: 523 - DNA, 122 bp, Homo sapiens
  misc_feature (61)..(62): /note="This region represents a CpG dinucleotide"
  misc_feature (61)..(61): /note="Nucleotide may be methylated to form 5-methylcytosine"
agcacttaagagctcacagcctgggcagcagacacacaactggcctggagggttctgcaacgactaatacctggttcctggcttcaacggcttcactctttggtggaggagacaactacata

SEQ ID NO: 524 - DNA, 122 bp, Homo sapiens
  misc_feature (61)..(62): /note="This region represents a CpG dinucleotide"
  misc_feature (61)..(61): /note="Nucleotide may be methylated to form 5-methylcytosine"
ccagttcctgggctgcgttggagttttgaggtgtaactcaggcgggttctcagctccacccgccgccggcttagattccggtttcccaagtctactcagtcctttcactgctcacccgccaa

SEQ ID NO: 525 - DNA, 122 bp, Homo sapiens
  misc_feature (61)..(62): /note="This region represents a CpG dinucleotide"
  misc_feature (61)..(61): /note="Nucleotide may be methylated to form 5-methylcytosine"
aactggagctaaaaatcagtgaaaccactacgccaggattccggattcctcttaagaatgcgcatgatgcagacgtaggtgagaacgcccttcagaagtacgcactcaacccaaatgaccac

SEQ ID NO: 526 - DNA, 122 bp, Homo sapiens
  misc_feature (61)..(62): /note="This region represents a CpG dinucleotide"
  misc_feature (61)..(61): /note="Nucleotide may be methylated to form 5-methylcytosine"
tctagggactgggggtgtaaggaggggttgacaacaaaaatccacgtgttggggaggtgacggaagagttctatatcttgattgtggtgatggttatgtgatacggtttggctgtgtcccac

SEQ ID NO: 527 - DNA, 122 bp, Homo sapiens
  misc_feature (61)..(62): /note="This region represents a CpG dinucleotide"
  misc_feature (61)..(61): /note="Nucleotide may be methylated to form 5-methylcytosine"
gcgacgccagttgtacttgtcattgcaattgcaaaatttaattaaatgttatgaaaactacgcgtctgaaaaggaagagctgctgttctgttaaaactaggctgaaacactttggaaccatt

SEQ ID NO: 528 - DNA, 122 bp, Homo sapiens
  misc_feature (61)..(62): /note="This region represents a CpG dinucleotide"
  misc_feature (61)..(61): /note="Nucleotide may be methylated to form 5-methylcytosine"
aagccagttctttgaaagggatcagagcctccacattaaagaggcatctgtttaatttagcgattcagtgacatcagtgtgttgccaaattgtcttccaatgtggccactcccctctaagga

SEQ ID NO: 529 - DNA, 122 bp, Homo sapiens
  misc_feature (61)..(62): /note="This region represents a CpG dinucleotide"
  misc_feature (61)..(61): /note="Nucleotide may be methylated to form 5-methylcytosine"
aatcagagcgcgctgcttaacacgctcccgggtgactcgtacgtagtcagtgctgggaagcgctggtctacagtcatgtttctcaagcttgaatgcacatccgaatcccccggaaggtttgc

SEQ ID NO: 530 - DNA, 122 bp, Homo sapiens
  misc_feature (61)..(62): /note="This region represents a CpG dinucleotide"
  misc_feature (61)..(61): /note="Nucleotide may be methylated to form 5-methylcytosine"
tatgaagtgtagaagcgtgcccttttctcttagtccatttccaccagacacggacagcaccgcgggtcgcggctaagggctctgccatgcacatggaaccctggggcctcctccttctgccc

SEQ ID NO: 531 - DNA, 122 bp, Homo sapiens
  misc_feature (61)..(62): /note="This region represents a CpG dinucleotide"
  misc_feature (61)..(61): /note="Nucleotide may be methylated to form 5-methylcytosine"
gcctttggccttaataggaagtaaaagtgtctcttccggcattgtatcagtggtatgtgccgcacctaccacacctgcagcatagtcttaggatgaggaagaagtttgtgggtagcccaggt

SEQ ID NO: 532 - DNA, 122 bp, Homo sapiens
  misc_feature (61)..(62): /note="This region represents a CpG dinucleotide"
  misc_feature (61)..(61): /note="Nucleotide may be methylated to form 5-methylcytosine"
tgactcatttaaccttaattacttccttagaggccccatctccaaatacagccacacaggcggttagggctttagcataggaattgcagagacacagacattcagtccatagcaaccctcct

SEQ ID NO: 533 - DNA, 122 bp, Homo sapiens
  misc_feature (61)..(62): /note="This region represents a CpG dinucleotide"
  misc_feature (61)..(61): /note="Nucleotide may be methylated to form 5-methylcytosine"
tttttttaatcttccacctattcagccatcagttttaatgtcagtaatcttcagactttccgggaggcaccaactgagtttcagtgaatagggcaatctctccatttcccatttccttgcta

SEQ ID NO: 534 - DNA, 122 bp, Homo sapiens
  misc_feature (61)..(62): /note="This region represents a CpG dinucleotide"
  misc_feature (61)..(61): /note="Nucleotide may be methylated to form 5-methylcytosine"
gtactgaccttaaatgcttccttaaaacatgactgtgaggattaactaagataaggactacgaatgcattttgtcacaaatgaattcatttttgtggttgctgctcacgctgatggttctct

SEQ ID NO: 535 - DNA, 122 bp, Homo sapiens
  misc_feature (61)..(62): /note="This region represents a CpG dinucleotide"
  misc_feature (61)..(61): /note="Nucleotide may be methylated to form 5-methylcytosine"
ctgcctttgagcaattgaactggtatctaaaaccaggtctctcagactccaaatcctacacgtagctgcttcccctttcaggttgataaaatgatcaacctgagctagtctatcttgcactg

SEQ ID NO: 536 - DNA, 122 bp, Homo sapiens
  misc_feature (61)..(62): /note="This region represents a CpG dinucleotide"
  misc_feature (61)..(61): /note="Nucleotide may be methylated to form 5-methylcytosine"
agtggtgagtaacagcctggcctgagacacaggctcacgcatctgacactggctgagccgcgcactagctgagtggccttgggcatgttttgtaacctccttgactgttcccttatctgtga

SEQ ID NO: 537 - DNA, 122 bp, Homo sapiens
  misc_feature (61)..(62): /note="This region represents a CpG dinucleotide"
  misc_feature (61)..(61): /note="Nucleotide may be methylated to form 5-methylcytosine"
aagtagagatcaaaaggcaatgcagatagactgacagatttcgcctgaagaggggaagcccgaccaggtaataaaggagtaagaggaaggatgttaaggacaattttaggaaacagataatg

SEQ ID NO: 538 - DNA, 122 bp, Homo sapiens
  misc_feature (61)..(62): /note="This region represents a CpG dinucleotide"
  misc_feature (61)..(61): /note="Nucleotide may be methylated to form 5-methylcytosine"
cggcggcgggcaggggcccgggggccggggcctggaggacaggcgaggcagcggcgagtgcggggccggcggtcggggagggcggtgccatggggtcgcggagggcccccagccggggctgg

SEQ ID NO: 539 - DNA, 122 bp, Homo sapiens
  misc_feature (61)..(62): /note="This region represents a CpG dinucleotide"
  misc_feature (61)..(61): /note="Nucleotide may be methylated to form 5-methylcytosine"
gtggcccaggcatgaccgtgcagaatttctcgctctttagtcatcagggggactgagagacgtaccaaagtatgatgaaaataaaggcaggcagtggaaataaaatgtagcagaaaaaacct

SEQ ID NO: 540 - DNA, 122 bp, Homo sapiens
  misc_feature (61)..(62): /note="This region represents a CpG dinucleotide"
  misc_feature (61)..(61): /note="Nucleotide may be methylated to form 5-methylcytosine"
tgaccttgtgatccgcccaccttgacctcctaaagtgctgggattacaggtgtgagccaccgtgcccagccataagtgctttttttatgctgcctctctgtgtagcacagagataaagacac

SEQ ID NO: 541 - DNA, 122 bp, Homo sapiens
  misc_feature (61)..(62): /note="This region represents a CpG dinucleotide"
  misc_feature (61)..(61): /note="Nucleotide may be methylated to form 5-methylcytosine"
accaagttgtctagctgggtgattaataaactaattgacacgggggacacttgtcactggcgaagcagctccctagccaaagcgaggagcaactacatagcgtctcccggggagctgggaag

SEQ ID NO: 542 - DNA, 122 bp, Homo sapiens
  misc_feature (61)..(62): /note="This region represents a CpG dinucleotide"
  misc_feature (61)..(61): /note="Nucleotide may be methylated to form 5-methylcytosine"
ttactaatacatttgtgaatttaaatttgatgtgtttcctgttcttcctgtccttggccccgtgtctctccaaggtcttgtttctgtcagtaggtggcattcccacactcctacaacgtgtt

SEQ ID NO: 543 - DNA, 122 bp, Homo sapiens
  misc_feature (61)..(62): /note="This region represents a CpG dinucleotide"
  misc_feature (61)..(61): /note="Nucleotide may be methylated to form 5-methylcytosine"
gaacctatgtgcatttcaggctttctccagtctggctgaagctgcttatgaagctgcagacgttgctgatgatcaggaagaaccagctacttactgcttatcttcttcatttgaactcatag

SEQ ID NO: 544 - DNA, 122 bp, Homo sapiens
  misc_feature (61)..(62): /note="This region represents a CpG dinucleotide"
  misc_feature (61)..(61): /note="Nucleotide may be methylated to form 5-methylcytosine"
gtctttgtccccacggagttggatagctccctaggtcatctcctgaccacaggatcttgtcggaatcatcccctacatgtgcttatctagcctcagcttaaaattctccaggggaaggaaac

SEQ ID NO: 545 - DNA, 122 bp, Homo sapiens
  misc_feature (61)..(62): /note="This region represents a CpG dinucleotide"
  misc_feature (61)..(61): /note="Nucleotide may be methylated to form 5-methylcytosine"
gatgtgtgagagggaggtacagtgggtcccgggtaggctgcaggggtgtgtgcgcgcgaacgtgttgggtccgggagactgagagtgtgtgtgcaagatttcgggagggagctttttctccg

SEQ ID NO: 546 - DNA, 122 bp, Homo sapiens
  misc_feature (61)..(62): /note="This region represents a CpG dinucleotide"
  misc_feature (61)..(61): /note="Nucleotide may be methylated to form 5-methylcytosine"
ttgtgaccttttctccacttgagtcctcctaagaaaagcacaagagggccacaatttgatcgtcttggcctggattcagctgcaggagtgttcttatgcattctgacctcagcatgttggct

SEQ ID NO: 547 - DNA, 122 bp, Homo sapiens
  misc_feature (61)..(62): /note="This region represents a CpG dinucleotide"
  misc_feature (61)..(61): /note="Nucleotide may be methylated to form 5-methylcytosine"
tgtgtctgccttcccctgctctaattaagaatcatcctgtggactgggtgcggtggctcacgcctgtaatcctagcactttgggaggcaggggcgggcggatcacgaggtcaggagatctct

SEQ ID NO: 548 - DNA, 122 bp, Homo sapiens
  misc_feature (61)..(62): /note="This region represents a CpG dinucleotide"
  misc_feature (61)..(61): /note="Nucleotide may be methylated to form 5-methylcytosine"
taagttttcgtgttcattgaaacatcactatttcaggggcctcaatgtttcaaccctgaccgttggctttttttttggagacggagttttgctcttgttgcccatgtggctgtattaggtat

SEQ ID NO: 549 - DNA, 122 bp, Homo sapiens
  misc_feature (61)..(62): /note="This region represents a CpG dinucleotide"
  misc_feature (61)..(61): /note="Nucleotide may be methylated to form 5-methylcytosine"
ctgtttacattcttgtcagaaagcccgctattttaagtcagcgcctctcaaacgtgaatgcgcataaggatcacccagggatcttgccacagcctaagtcctgatttgggagttctaggtca

SEQ ID NO: 550 - DNA, 122 bp, Homo sapiens
  misc_feature (61)..(62): /note="This region represents a CpG dinucleotide"
  misc_feature (61)..(61): /note="Nucleotide may be methylated to form 5-methylcytosine"
aaatattaaccataacttgaggataagaatcaccaagcctgagctgggcgctgtggctcacgcctgtaatcccagcactttgggaggccgaggcgggtggattgcctgaagtcaggagttcg

SEQ ID NO: 551 - DNA, 122 bp, Homo sapiens
  misc_feature (61)..(62): /note="This region represents a CpG dinucleotide"
  misc_feature (61)..(61): /note="Nucleotide may be methylated to form 5-methylcytosine"
tctggaaactcagtcaacccagaactaacattcaaagctgatcagagagtaaagctctttcgaaagaagaggaagtatcatctccacttcctcaatcctaacgttcttccttctcattgtta

SEQ ID NO: 552 - DNA, 122 bp, Homo sapiens
  misc_feature (61)..(62): /note="This region represents a CpG dinucleotide"
  misc_feature (61)..(61): /note="Nucleotide may be methylated to form 5-methylcytosine"
ctatcagctcagacccagaaacaggatgccaacattgcagaatccatttagacatggtaacgtctagtctgaggcttacaggggactgtgactaaatttattttaaagcttaaatggaggga

SEQ ID NO: 553 - DNA, 122 bp, Homo sapiens
  misc_feature (61)..(62): /note="This region represents a CpG dinucleotide"
  misc_feature (61)..(61): /note="Nucleotide may be methylated to form 5-methylcytosine"
gggagggctcgtgagagccaatgagagcgcggaaggcggcgagcgagccaatggacgcggcggtggggcagggggcggggcctgggcgaggccgggggcggaatgggctgagtgccctgtct

SEQ ID NO: 554 - DNA, 122 bp, Homo sapiens
  misc_feature (61)..(62): /note="This region represents a CpG dinucleotide"
  misc_feature (61)..(61): /note="Nucleotide may be methylated to form 5-methylcytosine"
ggtttcagattagtgaagtgtgcctgtggcaaaaggtctcttccttcctgagagacgcagcggtgtaattagaatccggagacggattcatcagcatttcttaccagcgtttctacaggatg

SEQ ID NO: 555 - DNA, 122 bp, Homo sapiens
  misc_feature (61)..(62): /note="This region represents a CpG dinucleotide"
  misc_feature (61)..(61): /note="Nucleotide may be methylated to form 5-methylcytosine"
agcctgctcttcaagtcatggggaaatcctttctgaaggaagaacctaagtactgccgggcgggaggaaggggagagaggcgccatcggaacagaaacctgtcccatcttccggacacctgc

SEQ ID NO: 556 - DNA, 122 bp, Homo sapiens
  misc_feature (61)..(62): /note="This region represents a CpG dinucleotide"
  misc_feature (61)..(61): /note="Nucleotide may be methylated to form 5-methylcytosine"
gctggcctacgagtctgacgggatcgtggtttccaacgacacataccgtgacctccaaggcgagcggcaggagtggaagcgcttcatcgaggagcggctgctcatgtactccttcgtcaatg

SEQ ID NO: 557 - DNA, 122 bp, Homo sapiens
  misc_feature (61)..(62): /note="This region represents a CpG dinucleotide"
  misc_feature (61)..(61): /note="Nucleotide may be methylated to form 5-methylcytosine"
gccaaattcattgtggaaaatagtttttagttttcctgctctttgcgcaggcatagtcatcgggatgttctttaagtttccatttgacagtggattgaggcttccagctgaaagcaaaacca

SEQ ID NO: 558 - DNA, 122 bp, Homo sapiens
  misc_feature (61)..(62): /note="This region represents a CpG dinucleotide"
  misc_feature (61)..(61): /note="Nucleotide may be methylated to form 5-methylcytosine"
aagccctgcagctagtaaatgactgaaccaggatttgagcccatagctgatgccaaagcccgtgtgtctaaccatcacaccacactgccacttcctgtgccagttgcttctgtacagctggt

SEQ ID NO: 559 - DNA, 122 bp, Homo sapiens
  misc_feature (61)..(62): /note="This region represents a CpG dinucleotide"
  misc_feature (61)..(61): /note="Nucleotide may be methylated to form 5-methylcytosine"
agagcgagactccatctaaaaaaaaaaaaaaacaaaaggcttttttttccccctaaatgtcgtccacatttttggcaagtattgatctctagtagtcagtgtcaggatctgaagaaaacagt

SEQ ID NO: 560 - DNA, 122 bp, Homo sapiens
  misc_feature (61)..(62): /note="This region represents a CpG dinucleotide"
  misc_feature (61)..(61): /note="Nucleotide may be methylated to form 5-methylcytosine"
ttcctgaatgaacaggattccctgctgtagaatcttgttggctggtctacactggccttacgttatcttgaaaatcttccttttgagcaggattgtgggggctgcaggagttctgctgactg

SEQ ID NO: 561 - DNA, 122 bp, Homo sapiens
  misc_feature (61)..(62): /note="This region represents a CpG dinucleotide"
  misc_feature (61)..(61): /note="Nucleotide may be methylated to form 5-methylcytosine"
taattataattaagcaataattttacatgaaccataaccagtaaaatatttcatgagaagcgatgttgcaaacagcatgtactgtgctgacattagccaactcactaggtacagctatgtta

SEQ ID NO: 562 - DNA, 122 bp, Homo sapiens
  misc_feature (61)..(62): /note="This region represents a CpG dinucleotide"
  misc_feature (61)..(61): /note="Nucleotide may be methylated to form 5-methylcytosine"
gggagctaaactaggtcacagtagctctcacctgtcatctctattgctcaatggtctattcgttcttcaacgacaatctccagctacgaccaactcatatatctcccatgacaaaacttcct

SEQ ID NO: 563 - DNA, 122 bp, Homo sapiens
  misc_feature (61)..(62): /note="This region represents a CpG dinucleotide"
  misc_feature (61)..(61): /note="Nucleotide may be methylated to form 5-methylcytosine"
ccgagcttttttatttttaacgtagctgcagctattgcacactagtaattttctgctctgcgaccgtttttctgcgctgtaataatcacgctaaaagtagtgcaggttttactgcttacaag

SEQ ID NO: 564 - DNA, 122 bp, Homo sapiens
  misc_feature (61)..(62): /note="This region represents a CpG dinucleotide"
  misc_feature (61)..(61): /note="Nucleotide may be methylated to form 5-methylcytosine"
agtgggtgttaatcctcctgcactccctgaatgtacatatgcagacatacccagcatcaacgggaaagctgcgggacaggatgtcagaggtgtgcatgaagtgaggtgctattggcatgcac

SEQ ID NO: 565 - DNA, 122 bp, Homo sapiens
  misc_feature (61)..(62): /note="This region represents a CpG dinucleotide"
  misc_feature (61)..(61): /note="Nucleotide may be methylated to form 5-methylcytosine"
ttttgctgaagccaccttgagttgatttctgttccttgcaaccacaagaatcctaacttacgagtagcaaaactatgattagagttataaacaatccttacatgcgtttaacactgtgcaca

SEQ ID NO: 566 - DNA, 122 bp, Homo sapiens
  misc_feature (61)..(62): /note="This region represents a CpG dinucleotide"
  misc_feature (61)..(61): /note="Nucleotide may be methylated to form 5-methylcytosine"
gacacagcactttccctaataggggattagttgtgaaaacaagcaatgaaagaatgtttacgttttgacccagttggaatcatagtcctcactcagtaccagagttgatccttactgtccat

SEQ ID NO: 567 - DNA, 122 bp, Homo sapiens
  misc_feature (61)..(62): /note="This region represents a CpG dinucleotide"
  misc_feature (61)..(61): /note="Nucleotide may be methylated to form 5-methylcytosine"
caaagaggggagggtggctttgcccgctctcggggccgcaagattgaataagatgaacggcgtcaaataactaatgcgaagtggtagcacattagtcagcacttgacatacctgtccccttc

SEQ ID NO: 568 - DNA, 122 bp, Homo sapiens
  misc_feature (61)..(62): /note="This region represents a CpG dinucleotide"
  misc_feature (61)..(61): /note="Nucleotide may be methylated to form 5-methylcytosine"
gttcatgagggcgggacctcgacggctcctgcggcggctcagacacggctccgcggcgcccgcaggacatgctgttcctgggcgacttcaacgccgactgcagctatgtgcgggcgcaggac

SEQ ID NO: 569 - DNA, 122 bp, Homo sapiens
  misc_feature (61)..(62): /note="This region represents a CpG dinucleotide"
  misc_feature (61)..(61): /note="Nucleotide may be methylated to form 5-methylcytosine"
agaagctgtctccaatctgcaagcaagtccagaacttcaatgctctgtatgcaatgtacccgccatcaatggttgcaactggaagtgtaggagcagctatctgtggacttcagcaacatgag

SEQ ID NO: 570 - DNA, 122 bp, Homo sapiens
  misc_feature (61)..(62): /note="This region represents a CpG dinucleotide"
  misc_feature (61)..(61): /note="Nucleotide may be methylated to form 5-methylcytosine"
tcccagctgatgctgtggcctctgtcaagggacatgcacgatggggagctcactatctttcgcaggagttcttttatcctcaaagattgagtgtttataaatgaactggattttcctgacgt

SEQ ID NO: 571 - DNA, 122 bp, Homo sapiens
  misc_feature (61)..(62): /note="This region represents a CpG dinucleotide"
  misc_feature (61)..(61): /note="Nucleotide may be methylated to form 5-methylcytosine"
aaaaccccaggagtttaatcagcactgggtccaaagcaatgagcaatgagtgtgacctgccgccacccctcagcaagcaagaccaaggccacacaacagcaaccagtgacccaagcaagaga

SEQ ID NO: 572 - DNA, 122 bp, Homo sapiens
  misc_feature (61)..(62): /note="This region represents a CpG dinucleotide"
  misc_feature (61)..(61): /note="Nucleotide may be methylated to form 5-methylcytosine"
atgcacagtggttctcattaggattaggatgcaagcaccttagaagcaccctttgccttgcggatgcctgtggctaatcctcacgcagagagaaaggccgagggaaggtcaggacaaacagc

SEQ ID NO: 573 - DNA, 122 bp, Homo sapiens
  misc_feature (61)..(62): /note="This region represents a CpG dinucleotide"
  misc_feature (61)..(61): /note="Nucleotide may be methylated to form 5-methylcytosine"
ttgcctaactctcaaaatctcatctaacactctatttaagctgaatgctgctgctgtcttcgtagtactatttagcttaaaaattagagaaactgtattcgggtttaacatttttaaacaaa

SEQ ID NO: 574 - DNA, 122 bp, Homo sapiens
  misc_feature (61)..(62): /note="This region represents a CpG dinucleotide"
  misc_feature (61)..(61): /note="Nucleotide may be methylated to form 5-methylcytosine"
tgcacctgtgtgtggaggtgacgggtgtcctcctcgctcaggttgtttaagttgaaggagcgctaccgcaacgtgctggacaccatgttcgagctgctgccccggatggccaggtactgcca

SEQ ID NO: 575 - DNA, 122 bp, Homo sapiens
  misc_feature (61)..(62): /note="This region represents a CpG dinucleotide"
  misc_feature (61)..(61): /note="Nucleotide may be methylated to form 5-methylcytosine"
gctcctgccaagccctggcttatggagatggaccagacattcctggggcatcatggcaggcggccactgatgctgtctcaaatcctggggttccatattacggagagaatcagctgcaaaag

SEQ ID NO: 576 - DNA, 122 bp, Homo sapiens
  misc_feature (61)..(62): /note="This region represents a CpG dinucleotide"
  misc_feature (61)..(61): /note="Nucleotide may be methylated to form 5-methylcytosine"
gaggtagcggggagaacgggagaaccgcacccccggcgaggcctggtctggcttgagagccgtctctggctccagcagctgcagccagcccgcaagctcgggaactgggaggacacccggga

SEQ ID NO: 577 - DNA, 122 bp, Homo sapiens
  misc_feature (61)..(62): /note="This region represents a CpG dinucleotide"
  misc_feature (61)..(61): /note="Nucleotide may be methylated to form 5-methylcytosine"
ttaagttgaactcgtgcagtgcatgatcagaatcagcttctctggtaagccaaggagtgacgtgaccaggttgacgttatcagtgaaaaggacaatgaaggtaatgattcacataattatta

SEQ ID NO: 578 - DNA, 122 bp, Homo sapiens
  misc_feature (61)..(62): /note="This region represents a CpG dinucleotide"
  misc_feature (61)..(61): /note="Nucleotide may be methylated to form 5-methylcytosine"
ctttgtactttgtggcctgaattgcagctgctcagcctatgggaattacccgcattctgacgtttgccatgaataatgtacttagcatgaaatgagttcctcaatcttatcaggtatttggc

SEQ ID NO: 579 - DNA, 122 bp, Homo sapiens
  misc_feature (61)..(62): /note="This region represents a CpG dinucleotide"
  misc_feature (61)..(61): /note="Nucleotide may be methylated to form 5-methylcytosine"
ttggaggcctgtccacaaaagacaaaattctggaagtagcaatcctttacgacaataccacgtcagccacattattagttgcaaacatcctttctaaatccaggggtaagcagggaactaat

SEQ ID NO: 580 - DNA, 122 bp, Homo sapiens
  misc_feature (61)..(62): /note="This region represents a CpG dinucleotide"
  misc_feature (61)..(61): /note="Nucleotide may be methylated to form 5-methylcytosine"
tgtgtcattacctagaacataagtcttaatggagtgacagtacctgcctcttctgtatcccgtgaagattctctaaattgtcagtaaagtgtccagtgctttgtcatgactgcgtaatcaga

SEQ ID NO: 581 - DNA, 122 bp, Homo sapiens
  misc_feature (61)..(62): /note="This region represents a CpG dinucleotide"
  misc_feature (61)..(61): /note="Nucleotide may be methylated to form 5-methylcytosine"
ctttggtctttgtattcctgtgactagtaatggtgacacaaccctgcattaacaggccagcgtctgctatagatccccagaggacttcaccaatgccctctgatccgggtttcccaacctcg

SEQ ID NO: 582 - DNA, 122 bp, Homo sapiens
  misc_feature (61)..(62): /note="This region represents a CpG dinucleotide"
  misc_feature (61)..(61): /note="Nucleotide may be methylated to form 5-methylcytosine"
ataaactagaagagagtaaaaaatattactctgtggtgggagaacagggaattagggtaacggaggttcagcaggtgcagccagttcacataagcaaaagaacagcaggtccagccagtttg

SEQ ID NO: 583 - DNA, 122 bp, Homo sapiens
  misc_feature (61)..(62): /note="This region represents a CpG dinucleotide"
  misc_feature (61)..(61): /note="Nucleotide may be methylated to form 5-methylcytosine"
ctataccttcctggttcctgaggattgagtgtcccctgcgcgcttaaagctggagccagacgtatgcagctttttcccgctgtccccaggcaccgagtactccagataaactcattggcagc

SEQ ID NO: 584 - DNA, 122 bp, Homo sapiens
  misc_feature (61)..(62): /note="This region represents a CpG dinucleotide"
  misc_feature (61)..(61): /note="Nucleotide may be methylated to form 5-methylcytosine"
ctccctctgtggtcttgctcactgtctctggtgcccaatcagtgctgggcactcagtaagcgcttgataagcctgtggatcagtgagaggatactcagaagtttgggagtgacctcaccaac

SEQ ID NO: 585 - DNA, 122 bp, Homo sapiens
  misc_feature (61)..(62): /note="This region represents a CpG dinucleotide"
  misc_feature (61)..(61): /note="Nucleotide may be methylated to form 5-methylcytosine"
attctaggtccaagaggagacaggaccaaccgaagtgaaggattttataggccagctctacgtaagactggaaagttaagcctatagtccatcctggcagttaaaaatgcagcaaaggccgg

SEQ ID NO: 586 - DNA, 122 bp, Homo sapiens
  misc_feature (61)..(62): /note="This region represents a CpG dinucleotide"
  misc_feature (61)..(61): /note="Nucleotide may be methylated to form 5-methylcytosine"
aggtgagctgaaagtgccagccatttcctctctctacttgtggtacttgtagagctttagcgtgagtgatgataactggggcttgccataggcagaactccatcaagagaaagaaaaaccag

SEQ ID NO: 587 - DNA, 122 bp, Homo sapiens
  misc_feature (61)..(62): /note="This region represents a CpG dinucleotide"
  misc_feature (61)..(61): /note="Nucleotide may be methylated to form 5-methylcytosine"
gagtagagacgggtgactgtcagcacctcactgggcagggcgcaagggctgtggggtagacgttgggtggattcaggagactgcagaaagcaaagtgggtgttaatgggacttttatttcct

SEQ ID NO: 588 - DNA, 122 bp, Homo sapiens
  misc_feature (61)..(62): /note="This region represents a CpG dinucleotide"
  misc_feature (61)..(61): /note="Nucleotide may be methylated to form 5-methylcytosine"
tcatatggcaaaggtgaagggacttttcagatataattaagctctctaatcagttaacttcgggttaatcaaaagaagattctcttgggttttgaaggtgagcccttcaataaaaaacatag

SEQ ID NO: 589 - DNA, 122 bp, Homo sapiens
  misc_feature (61)..(62): /note="This region represents a CpG dinucleotide"
  misc_feature (61)..(61): /note="Nucleotide may be methylated to form 5-methylcytosine"
cttcagtttgtcaaagtggacaaagcctacgacaactgccagtaccagctactaggcatccgcagtctttccagttggtggtactggaggtccctacccaggatttccgtggattccaaggg

SEQ ID NO: 590 - DNA, 122 bp, Homo sapiens
  misc_feature (61)..(62): /note="This region represents a CpG dinucleotide"
  misc_feature (61)..(61): /note="Nucleotide may be methylated to form 5-methylcytosine"
gtctaagtgtgattaaatttcattaaggtgtataagcctctaattattacataactggcacgtctgacttttgctatcatttgaggattctactgtatataagtttcatctaacattggcat

SEQ ID NO: 591 - DNA, 122 bp, Homo sapiens
  misc_feature (61)..(62): /note="This region represents a CpG dinucleotide"
  misc_feature (61)..(61): /note="Nucleotide may be methylated to form 5-methylcytosine"
gtgttctcacagccctctgggggcctctattcttgtactgaaatggtccatttctgtggccgtctcctccatttctctgcaagcttttcaaagacaggagctgtattcccagggcactcatg

SEQ ID NO: 592 - DNA, 122 bp, Homo sapiens
  misc_feature (61)..(62): /note="This region represents a CpG dinucleotide"
  misc_feature (61)..(61): /note="Nucleotide may be methylated to form 5-methylcytosine"
aaactgcagtcttgcatatgtgaagccaaaggtctgagctgtgagcaaacctatcatcaccgctattgagtgacagcagtcactcggcctttcacattccaacttaaaaagcagatgcatat

SEQ ID NO: 593 - DNA, 122 bp, Homo sapiens
  misc_feature (61)..(62): /note="This region represents a CpG dinucleotide"
  misc_feature (61)..(61): /note="Nucleotide may be methylated to form 5-methylcytosine"
tgcatttttattctttcctttcacacaagagagcttatcaacagctctgacagctcatttcgtatttggtttctggttatcttgtactcatctaataggtggtagtggtggttttcagttca

SEQ ID NO: 594 - DNA, 122 bp, Homo sapiens
  misc_feature (61)..(62): /note="This region represents a CpG dinucleotide"
  misc_feature (61)..(61): /note="Nucleotide may be methylated to form 5-methylcytosine"
gagcctcactcaggcacggagcccacagagcgaggctgaggaggactccatgctgttgtccgtcgggaaaccggactactctggggcgcgctggagccaccattctgccagcagccggggag

SEQ ID NO: 595 - DNA, 122 bp, Homo sapiens
  misc_feature (61)..(62): /note="This region represents a CpG dinucleotide"
  misc_feature (61)..(61): /note="Nucleotide may be methylated to form 5-methylcytosine"
gagggtcttgagtgcaagttgtccagattcttggggttttgaacaaagaattgaacaaaacgcactgcaaagcaaggaaagcagagatttattgaaagtgaaagtacacttcacagtgtggg

SEQ ID NO: 596 - DNA, 122 bp, Homo sapiens
  misc_feature (61)..(62): /note="This region represents a CpG dinucleotide"
  misc_feature (61)..(61): /note="Nucleotide may be methylated to form 5-methylcytosine"
cagaaggaagtcatttttctttgcattgttcatcccagtcactggcatggccggatcagccgtggtcatgacctgatcatcctatgaggctccttgactgcacttcacccacctgctgctgg

SEQ ID NO: 597 - DNA, 122 bp, Homo sapiens
  misc_feature (61)..(62): /note="This region represents a CpG dinucleotide"
  misc_feature (61)..(61): /note="Nucleotide may be methylated to form 5-methylcytosine"
ttggaataatgaattagaaagtggatgttggtcattattaggaaaaggtactttgttacacgagacagtaattgcattgtggcaagagaaagaatctgactaattaatttgtcttttttttc

SEQ ID NO: 598 - DNA, 122 bp, Homo sapiens
  misc_feature (61)..(62): /note="This region represents a CpG dinucleotide"
  misc_feature (61)..(61): /note="Nucleotide may be methylated to form 5-methylcytosine"
ggaaagttgggtgatcaaatcccaagttgtagctctcgatgggtcgagggcgatggccagcgctgtgctgggaacgggcagccctgccctgccctgccctgccctgccctgccctgccctgc

SEQ ID NO: 599 - DNA, 122 bp, Homo sapiens
  misc_feature (61)..(62): /note="This region represents a CpG dinucleotide"
  misc_feature (61)..(61): /note="Nucleotide may be methylated to form 5-methylcytosine"
cagccacagctttgagataagatttcatttcctagccagcggcctgtgtcacacatatctcgctagaatctcttggggaggggccaaaagccactggacaagggacaggatggggtcagggc

SEQ ID NO: 600 - DNA, 122 bp, Homo sapiens
  misc_feature (61)..(62): /note="This region represents a CpG dinucleotide"
  misc_feature (61)..(61): /note="Nucleotide may be methylated to form 5-methylcytosine"
gggctttggactggcctggggtctcaactctagatcctgggtgaccctgagcaagatcaccgcacagaacatgtttacccagggccaggaggcggggatagatgtttcctaacagtcttggg

SEQ ID NO: 601 - DNA, 122 bp, Homo sapiens
  misc_feature (61)..(62): /note="This region represents a CpG dinucleotide"
  misc_feature (61)..(61): /note="Nucleotide may be methylated to form 5-methylcytosine"
ggcggggtggtggtggtgacaagcccctattacggccttagtgcgggattccccttggggcgggagacgtcgtccttccgggtgcgggtgcggactgcaagtcctatcggggaccgcgacac

SEQ ID NO: 602 - DNA, 122 bp, Homo sapiens
  misc_feature (61)..(62): /note="This region represents a CpG dinucleotide"
  misc_feature (61)..(61): /note="Nucleotide may be methylated to form 5-methylcytosine"
aattcattcagcctctgttagcaatggtgcaatcaaatgactccaggaattctgaaataacgtattgacctgcagggaccagaaattgctatcaggcactgggaacctctctcaggcaatgg

SEQ ID NO: 603 - DNA, 122 bp, Homo sapiens
  misc_feature (61)..(62): /note="This region represents a CpG dinucleotide"
  misc_feature (61)..(61): /note="Nucleotide may be methylated to form 5-methylcytosine"
ttgcaaatgccactgcgctctcccttcctttcctgccggatgtccccactgagtcagactcgtcaaactctcccagcaaccatgacgcacccaggctttgtgccctgggcctctctcacaca

SEQ ID NO: 604 - DNA, 122 bp, Homo sapiens
  misc_feature (61)..(62): /note="This region represents a CpG dinucleotide"
  misc_feature (61)..(61): /note="Nucleotide may be methylated to form 5-methylcytosine"
tgctgctgcagggggtgcacggcctcatctcagcagacgtcacactgacaaaaatcaccacgtgtcaggtgcacttcactgtacttctgcagagagcagtcacataagacaagcatggtgac

SEQ ID NO: 605 - DNA, 122 bp, Homo sapiens
  misc_feature (61)..(62): /note="This region represents a CpG dinucleotide"
  misc_feature (61)..(61): /note="Nucleotide may be methylated to form 5-methylcytosine"
ccccatgcagtgcaggggaggggcagggggaaggagaggctgtgaaagcaggagagtggacgggaggggcaggaagcccaagctagaaagagtcccagaaagagaagaagagttgaaggaac

SEQ ID NO: 606 - DNA, 122 bp, Homo sapiens
  misc_feature (61)..(62): /note="This region represents a CpG dinucleotide"
  misc_feature (61)..(61): /note="Nucleotide may be methylated to form 5-methylcytosine"
ttaaagcctcagctctgctcctaactagtgactacggtcagatgccctcccttccctaagcgccagttttacattgctcatatgtaaaatacaggaatggggaaattggacaaatgatctca

SEQ ID NO: 607 - DNA, 122 bp, Homo sapiens
  misc_feature (61)..(62): /note="This region represents a CpG dinucleotide"
  misc_feature (61)..(61): /note="Nucleotide may be methylated to form 5-methylcytosine"
catatgttgaggaaaactacaggtttcaacctaacatctaaatcttaaaaagtagcacttcggcaacaaacaagcgcagagagctcacctgaaaagtgaaataacatgactattgctcagat

SEQ ID NO: 608 - DNA, 122 bp, Homo sapiens
  misc_feature (61)..(62): /note="This region represents a CpG dinucleotide"
  misc_feature (61)..(61): /note="Nucleotide may be methylated to form 5-methylcytosine"
gaacactagctagacttctaaggtttttcactctagttcctgactcctggatagcaccaccggacccacccagtgcctgggagacctggctgccctgaagtgagagacacaggcctggctgg

SEQ ID NO: 609 - DNA, 122 bp, Homo sapiens
  misc_feature (61)..(62): /note="This region represents a CpG dinucleotide"
  misc_feature (61)..(61): /note="Nucleotide may be methylated to form 5-methylcytosine"
gatcatgtgcctcccaccaggctgacaccccagtggtgaggagttgccccttggctttttcgaggccaagcaactcagaggtgtggcaggattgcatgtcacagtggcacttccaaggccct

SEQ ID NO: 610 - DNA, 122 bp, Homo sapiens
  misc_feature (61)..(62): /note="This region represents a CpG dinucleotide"
  misc_feature (61)..(61): /note="Nucleotide may be methylated to form 5-methylcytosine"
cctcaccataagcctatgagttaggtattactggcaatttacaaataaggaagtctggcacggaaggctgactattcaggatgaatgtaatagagtaaaataacaggccatcacagacactg

SEQ ID NO: 611 - DNA, 122 bp, Homo sapiens
  misc_feature (61)..(62): /note="This region represents a CpG dinucleotide"
  misc_feature (61)..(61): /note="Nucleotide may be methylated to form 5-methylcytosine"
gatgccgagacctctgctcagaacagatatctttccagtcgggagtggctgctctgacatcgctggggaaggacagctagcagctgctcttttgcaagacttgattcatacagcatggaaga

SEQ ID NO: 612 - DNA, 122 bp, Homo sapiens
  misc_feature (61)..(62): /note="This region represents a CpG dinucleotide"
  misc_feature (61)..(61): /note="Nucleotide may be methylated to form 5-methylcytosine"
aagcttttgcttcacagttggaacagctcatggagagcagcaaccaggtgttcctgagcccgtcacagaaggagctgccatcagtgcctctcgtgacctgcagtatttgggcctgtggaggt

SEQ ID NO: 613 - DNA, 122 bp, Homo sapiens
  misc_feature (61)..(62): /note="This region represents a CpG dinucleotide"
  misc_feature (61)..(61): /note="Nucleotide may be methylated to form 5-methylcytosine"
tcactttcctcctctacacatgcaactcttggatgacaacttaagccaatcactatatctcgtattcctttaactcctctcactcccagattggttcaggaacaggaacgtaatcatatgac

SEQ ID NO: 614 - DNA, 122 bp, Homo sapiens
  misc_feature (61)..(62): /note="This region represents a CpG dinucleotide"
  misc_feature (61)..(61): /note="Nucleotide may be methylated to form 5-methylcytosine"
cagaagtacaggcactgaacaaatgcccactcgctaggcagaatgcagctgctgcccacacgttagtacccagtggtaaggtggatacaatgtgacctcagaggaccaagagttgaggtcac

SEQ ID NO: 615 - DNA, 122 bp, Homo sapiens
  misc_feature (61)..(62): /note="This region represents a CpG dinucleotide"
  misc_feature (61)..(61): /note="Nucleotide may be methylated to form 5-methylcytosine"
acccccattaaagttcttcagccttcttagtagaaagctctgtgaagtttgattcacccacggaagttacttcatggagtggaagcatttgagaaatcagatcttggctttcttcttgtgga

SEQ ID NO: 616 - DNA, 122 bp, Homo sapiens
  misc_feature (61)..(62): /note="This region represents a CpG dinucleotide"
  misc_feature (61)..(61): /note="Nucleotide may be methylated to form 5-methylcytosine"
ccaagaacactcccccaagaaaccatgaaagctaaaaggattgctgagacagactttcaacgacatgggtaaagcaagagttaatatgggcgtggctacatcttatcccaggcctttaaggt

SEQ ID NO: 617 - DNA, 122 bp, Homo sapiens
  misc_feature (61)..(62): /note="This region represents a CpG dinucleotide"
  misc_feature (61)..(61): /note="Nucleotide may be methylated to form 5-methylcytosine"
gcttccacctcctgggaaggaggcccagctgagagcctgccggaagccacagcttcctctcgcactttcgccaggcaggcagcaggtgtgggcctggccccggctgggctgggccggaacct

SEQ ID NO: 618 - DNA, 122 bp, Homo sapiens
  misc_feature (61)..(62): /note="This region represents a CpG dinucleotide"
  misc_feature (61)..(61): /note="Nucleotide may be methylated to form 5-methylcytosine"
agggaaggcagtctggatggtcataagtaaaactactgggacatcatgaccctgcattaacgtagaatgagtctggttatcaatgggcagcttaagaaaaacagaatggcaaatctacttgt

SEQ ID NO: 619 - DNA, 122 bp, Homo sapiens
  misc_feature (61)..(62): /note="This region represents a CpG dinucleotide"
  misc_feature (61)..(61): /note="Nucleotide may be methylated to form 5-methylcytosine"
ttcttaccagaggaaagagaataactgtctggcagataaatcccagatgtccactctaaccgtccaccttggaacctccaccttcctgtgctcgtcttagaggaattctagaactgtcgttg

SEQ ID NO: 620 - DNA, 122 bp, Homo sapiens
  misc_feature (61)..(62): /note="This region represents a CpG dinucleotide"
  misc_feature (61)..(61): /note="Nucleotide may be methylated to form 5-methylcytosine"
gtcttttgtgtatgttcatcaacttctggccttaattcatcttctgattttaatcttcttcgaacaggtttaggtggtggagcaagtggtgttgtgcctttgctctttaagacaagaattcc

SEQ ID NO: 621 - DNA, 122 bp, Homo sapiens
  misc_feature (61)..(62): /note="This region represents a CpG dinucleotide"
  misc_feature (61)..(61): /note="Nucleotide may be methylated to form 5-methylcytosine"
ctactgcctggtgattcgcaccacagccccagcctcagcagccccaagatactctgcaggcgcatcccactgtctcctgagggcaggtctcaacacaaacataaatcctagtccacccctcc

SEQ ID NO: 622 - DNA, 122 bp, Homo sapiens
  misc_feature (61)..(62): /note="This region represents a CpG dinucleotide"
  misc_feature (61)..(61): /note="Nucleotide may be methylated to form 5-methylcytosine"
ccattttctaaagaggaaaaaggtgaacctcacaaactatagaccaaaaaaataggacatcgagagaaagaatatgaagctagcataggttcacaaagaatgagtcaaatcaaacaacatgc

SEQ ID NO: 623 - DNA, 122 bp, Homo sapiens
  misc_feature (61)..(62): /note="This region represents a CpG dinucleotide"
  misc_feature (61)..(61): /note="Nucleotide may be methylated to form 5-methylcytosine"
tgccatgcccaggagccagatccacagtgaaggaccgaccttggcagtccgtgtctcagacggttcctgagttcctaggaacagcacaatttctagatacaatcatgtgacctaaacatatt

SEQ ID NO: 624 - DNA, 122 bp, Homo sapiens
  misc_feature (61)..(62): /note="This region represents a CpG dinucleotide"
  misc_feature (61)..(61): /note="Nucleotide may be methylated to form 5-methylcytosine"
gagaatctgaaaatgagacccaagcgaaagtatagacattttattgtggagcaaaaccaacgacaccctcaagggaggagtgcaggcactcaaagatttgagtcacaggcaatgtggttcac

SEQ ID NO: 625 - DNA, 122 bp, Homo sapiens
  misc_feature (61)..(62): /note="This region represents a CpG dinucleotide"
  misc_feature (61)..(61): /note="Nucleotide may be methylated to form 5-methylcytosine"
tgaactcctgaccttaggtgatccatctgcttcggcctcccaaagtgctgggattataggcgtgcagcctaattttgtatttgttgtagagatggggttttaccgtgttgcccaggctggtc

SEQ ID NO: 626 - DNA, 122 bp, Homo sapiens
  misc_feature (61)..(62): /note="This region represents a CpG dinucleotide"
  misc_feature (61)..(61): /note="Nucleotide may be methylated to form 5-methylcytosine"
gggtgtgtgaattaacttccctcaccccagagtcctaatccaaaaaataggctcaacagccgcaccctgaagccagcagaggagctcaaaggtcaagagcaggacagaaggcagatacagag

SEQ ID NO: 627 - DNA, 122 bp, Homo sapiens
  misc_feature (61)..(62): /note="This region represents a CpG dinucleotide"
  misc_feature (61)..(61): /note="Nucleotide may be methylated to form 5-methylcytosine"
ctttgttattcctctagtcagacaaatgctcgtttggtttaatctgacttaacaaattaacgagatgaggaagaaaattccaggccttgggacattcactgaagcccaaccaggcaccaaga

SEQ ID NO: 628 - DNA, 122 bp, Homo sapiens
  misc_feature (61)..(62): /note="This region represents a CpG dinucleotide"
  misc_feature (61)..(61): /note="Nucleotide may be methylated to form 5-methylcytosine"
ctgttgtttcgaggggagtgaggcccggggctgagttaagtttcactggtgagtggccggcgggcacaaaggaaggaaccgctgggggaggggaggccgcagagctggagggctgggacaaa

SEQ ID NO: 629 - DNA, 122 bp, Homo sapiens
  misc_feature (61)..(62): /note="This region represents a CpG dinucleotide"
  misc_feature (61)..(61): /note="Nucleotide may be methylated to form 5-methylcytosine"
ggtttctgtggcgtgggggtgagtgacagtccaggatgtggagtggactggattagtcgccgttttcagtcgagaggctgcctgagtcagaggctgtgtgagtacttgaataacagggaaac

SEQ ID NO: 630 - DNA, 122 bp, Homo sapiens
  misc_feature (61)..(62): /note="This region represents a CpG dinucleotide"
  misc_feature (61)..(61): /note="Nucleotide may be methylated to form 5-methylcytosine"
tgtcaacatttcacttgcaagactttgagaatgccactttacctgatcctagtccaggctcggggaggagctgacaaagagtcattttctaaaggaatttagggatagctgtaatcatccag

SEQ ID NO: 631 - DNA, 122 bp, Homo sapiens
  misc_feature (61)..(62): /note="This region represents a CpG dinucleotide"
  misc_feature (61)..(61): /note="Nucleotide may be methylated to form 5-methylcytosine"
ctcaggcattattgatcctgtgccatccacacacccttaaggtttttcacagcactctgacggtattatgtgtgttttgcaaatgacgaatcaacagtatgctgaataatcagcaatgaaac

SEQ ID NO: 632 - DNA, 122 bp, Homo sapiens
  misc_feature (61)..(62): /note="This region represents a CpG dinucleotide"
  misc_feature (61)..(61): /note="Nucleotide may be methylated to form 5-methylcytosine"
ttcaaagtagttttaccagtttacacttaagccagcagcgcgtgaatggttacttcatatcgtagtcaatacttgataatctacattttagccattctggtgagcgtgtaatggtatatcat

SEQ ID NO: 633 - DNA, 122 bp, Homo sapiens
  misc_feature (61)..(62): /note="This region represents a CpG dinucleotide"
  misc_feature (61)..(61): /note="Nucleotide may be methylated to form 5-methylcytosine"
tttatcaagcaattcgctcaccaatgagagaaagctgcagtggcagattcgagccacatgcggtagtgtgtagcaattagtagataaaatgctgactaaagtgctaaaacatgaagtattat

SEQ ID NO: 634 - DNA, 122 bp, Homo sapiens
  misc_feature (61)..(62): /note="This region represents a CpG dinucleotide"
  misc_feature (61)..(61): /note="Nucleotide may be methylated to form 5-methylcytosine"
ctttggttccctgcgttaaatcataggttgtgagctctaagcggtcgtctggtggcactccgccctgtgcccagcgggcacttaccgcacactcaacagtggggatagctgtggtttgggga

SEQ ID NO: 635 - DNA, 122 bp, Homo sapiens
  misc_feature (61)..(62): /note="This region represents a CpG dinucleotide"
  misc_feature (61)..(61): /note="Nucleotide may be methylated to form 5-methylcytosine"
ccgagccctgctcgtggagccattggtgctgcggcggggagaagaggccacaggcggggacgccccagacactcccgtggggcccgtgccagggtctcctgctcctcagaaagagcccttgt

SEQ ID NO: 636 - DNA, 122 bp, Homo sapiens
  misc_feature (61)..(62): /note="This region represents a CpG dinucleotide"
  misc_feature (61)..(61): /note="Nucleotide may be methylated to form 5-methylcytosine"
tggctaaaactagacactttctctttaagaccaggaaaaaggcagaggtatttccttttacggctcttattcaacatcataggggaagtcctagctaatgcaatgagacaagaaaaggaaat

SEQ ID NO: 637 - DNA, 122 bp, Homo sapiens
  misc_feature (61)..(62): /note="This region represents a CpG dinucleotide"
  misc_feature (61)..(61): /note="Nucleotide may be methylated to form 5-methylcytosine"
gtcctagccctgtactgggtcagtgtcagcatccttccacgcgtgctctctctctgccaccgcacacccaaagaccgcgcctctcgctgctctcacctgcggggcagcggagggcgcagagg

SEQ ID NO: 638 - DNA, 122 bp, Homo sapiens
  misc_feature (61)..(62): /note="This region represents a CpG dinucleotide"
  misc_feature (61)..(61): /note="Nucleotide may be methylated to form 5-methylcytosine"
atttcctcatctgcaacatgtgtgcagcggtaggcacctcccaggaattgcaaaagacaacgcatgcaaacaagtgtggcacggtgcctggcaaggagccgccctccgtaaatggtggcact

SEQ ID NO: 639 - DNA, 122 bp, Homo sapiens
  misc_feature (61)..(62): /note="This region represents a CpG dinucleotide"
  misc_feature (61)..(61): /note="Nucleotide may be methylated to form 5-methylcytosine"
tcttttctgttttcctccatttttcctataacttgagacagattttctcaggcaagaacacgtgtcattgccctaatgggattctaagcctgggcatggcgttaaaggtggcttgtccaaat

SEQ ID NO: 640 - DNA, 122 bp, Homo sapiens
  misc_feature (61)..(62): /note="This region represents a CpG dinucleotide"
  misc_feature (61)..(61): /note="Nucleotide may be methylated to form 5-methylcytosine"
tcagccaggagttgccacatgactaagctctggccagaggaatgatgcaagcaaaagtgacgtgtgcagcttcttcaagaagaaattgtttgccttccataatttccatctttcttcctgga

SEQ ID NO: 641 - DNA, 122 bp, Homo sapiens
  misc_feature (61)..(62): /note="This region represents a CpG dinucleotide"
  misc_feature (61)..(61): /note="Nucleotide may be methylated to form 5-methylcytosine"
atttgtttcatttgcaaatggaagcagagagtttcgaatttcctgcaaggctttatgatgcgtcccaaatttgggtggatttctgacttgtcgaggatcttcggttgacattttactcatgt

SEQ ID NO: 642 - DNA, 122 bp, Homo sapiens
  misc_feature (61)..(62): /note="This region represents a CpG dinucleotide"
  misc_feature (61)..(61): /note="Nucleotide may be methylated to form 5-methylcytosine"
agctggctctctgcagacacacctggagggagggtttgggaggaagggggctggggcctccggtctgaccacctctgaaacaccatcccaggctgtctctgaggttcatgtggtttgggtca

SEQ ID NO: 643 - DNA, 122 bp, Homo sapiens
  misc_feature (61)..(62): /note="This region represents a CpG dinucleotide"
  misc_feature (61)..(61): /note="Nucleotide may be methylated to form 5-methylcytosine"
gtctttaggaaatgggggtctctgagaaccggttcttaaaggtcaagcacttgagcacctcgcaaactcctgacaattgaaacatatctgaagagtcttcttcagatatgtctctgtgtgtg

SEQ ID NO: 644 - DNA, 122 bp, Homo sapiens
  misc_feature (61)..(62): /note="This region represents a CpG dinucleotide"
  misc_feature (61)..(61): /note="Nucleotide may be methylated to form 5-methylcytosine"
gcttgccagggcattgctcccggcacgaggccgcccgcctgcagcaggcccgcaggggcacggtgggtccccgcccgctcctcatgccttgagcgcgtcatccttcccggggttcacggcct

SEQ ID NO: 645 - DNA, 122 bp, Homo sapiens
  misc_feature (61)..(62): /note="This region represents a CpG dinucleotide"
  misc_feature (61)..(61): /note="Nucleotide may be methylated to form 5-methylcytosine"
ctgctcccatttctgtagacagactggtcctccataatccactttcctgattttcctccccgttttctctgtgcccctccttggtcttctttgcaggcttcttcctctttgtccaatatcaa

SEQ ID NO: 646 - DNA, 122 bp, Homo sapiens
  misc_feature (61)..(62): /note="This region represents a CpG dinucleotide"
  misc_feature (61)..(61): /note="Nucleotide may be methylated to form 5-methylcytosine"
cccgtttctcttggtcgtaccagcttagcaggctccctcggaaggctgtgacttcagctacgtctctgaatagatggtatgaggagacagaggcctgcaataccacctcttccggctgcctg

SEQ ID NO: 647 - DNA, 122 bp, Homo sapiens
  misc_feature (61)..(62): /note="This region represents a CpG dinucleotide"
  misc_feature (61)..(61): /note="Nucleotide may be methylated to form 5-methylcytosine"
tcaaagccaaagatgttatacaacacctattatatgaaatgataaatacccttattgttacgattatctgccaattcaagtaggggttttctgttacttggtgctaaaagttccccatgata

SEQ ID NO: 648 - DNA, 122 bp, Homo sapiens
  misc_feature (61)..(62): /note="This region represents a CpG dinucleotide"
  misc_feature (61)..(61): /note="Nucleotide may be methylated to form 5-methylcytosine"
tccagggggtcctcaggaagcaacctgagtaaggaaatcccaccagagctaaaggacagccgcaaggctagccaagcaggtttccttccttcccagagcctccactgtgaagtgggaggttt

SEQ ID NO: 649 - DNA, 122 bp, Homo sapiens
  misc_feature (61)..(62): /note="This region represents a CpG dinucleotide"
  misc_feature (61)..(61): /note="Nucleotide may be methylated to form 5-methylcytosine"
gagcagtaatgtcatgttagttgtgacagtactcaggtgagtaacaccagtaccacctgccgggtgttgtggcctagctgtgtgctaagtgccatgttgggctcctcacacatgatcgtgtt

SEQ ID NO: 650 - DNA, 122 bp, Homo sapiens
  misc_feature (61)..(62): /note="This region represents a CpG dinucleotide"
  misc_feature (61)..(61): /note="Nucleotide may be methylated to form 5-methylcytosine"
gccagttcaacctcaatacaatagaataccaggtagacttctgaggtttttgactcagtacgagtcccagacaccacttctggacccatttggggcctgagggacctcacagcccttaaggg

SEQ ID NO: 651 - DNA, 122 bp, Homo sapiens
  misc_feature (61)..(62): /note="This region represents a CpG dinucleotide"
  misc_feature (61)..(61): /note="Nucleotide may be methylated to form 5-methylcytosine"
gaggagagcgccctgtgagtgcctgacaaatggaggtatttctttccaggttttacaacccgatgtattttcagggaggaccttcctaggtacctccacttctcagtctctcaactcagcag

SEQ ID NO: 652 - DNA, 122 bp, Homo sapiens
  misc_feature (61)..(62): /note="This region represents a CpG dinucleotide"
  misc_feature (61)..(61): /note="Nucleotide may be methylated to form 5-methylcytosine"
atggctaggaggcaattttccaggtcaggactttatcctcagatggaaaacagagagcatcgcaaaactctcacctgacatgtgatgcacttccctgtagtggcagtggaggaggagattgc

SEQ ID NO: 653 - DNA, 122 bp, Homo sapiens
  misc_feature (61)..(62): /note="This region represents a CpG dinucleotide"
  misc_feature (61)..(61): /note="Nucleotide may be methylated to form 5-methylcytosine"
gtgtgtgaatgtaagcccctggagttgagttccctttcttggctgggccccagtctgccacgtcagtgctgaaaatggacattgctgctgcctcggtgacatacaaataggggaaatgtctc

SEQ ID NO: 654 - DNA, 122 bp, Homo sapiens
  misc_feature (61)..(62): /note="This region represents a CpG dinucleotide"
  misc_feature (61)..(61): /note="Nucleotide may be methylated to form 5-methylcytosine"
gctgacgtgtgtgaactccaacttcatgagagatcctgagtcagaatgacctggctaagccgcttccaaaatcctgaaccacagaaactgagataataaatgtttattgttttatgccaatg

SEQ ID NO: 655 - DNA, 122 bp, Homo sapiens
  misc_feature (61)..(62): /note="This region represents a CpG dinucleotide"
  misc_feature (61)..(61): /note="Nucleotide may be methylated to form 5-methylcytosine"
ggcggccaggccgagtagcagcaggcccgcgtagaggacgggcgcgcagtaggggctgggcgaggagcgcgggcagccggccgaggggcaggcaggtcccagcggcgacgcgggcatctctc

SEQ ID NO: 656 - DNA, 122 bp, Homo sapiens
  misc_feature (61)..(62): /note="This region represents a CpG dinucleotide"
  misc_feature (61)..(61): /note="Nucleotide may be methylated to form 5-methylcytosine"
cccaagccacctcgaggtcgagtgcgccctggggctatgtctggggaggtcatggcgtctcggggcgaatgatatgcacgttttggggcaaaactctcctaggcctcgcaggagcagctgta

SEQ ID NO: 657 - DNA, 122 bp, Homo sapiens
  misc_feature (61)..(62): /note="This region represents a CpG dinucleotide"
  misc_feature (61)..(61): /note="Nucleotide may be methylated to form 5-methylcytosine"
acaagcaggaataaaaggccaccagagtcacagagacgaagctgcggcgttaccgaggtgcgaatcactgtgattcctaggtgcgaatcatcaccagcaatcacttctctcaggactccttg

SEQ ID NO: 658 - DNA, 122 bp, Homo sapiens
  misc_feature (61)..(62): /note="This region represents a CpG dinucleotide"
  misc_feature (61)..(61): /note="Nucleotide may be methylated to form 5-methylcytosine"
tcaactaaaacttacacttttatctgaatcaaaaggcctgcctgacaacctggttttaaacgcagtcctcaatggtttcaaaagtggcaggtcagacctgaaagccagcctccctcccaaac

SEQ ID NO: 659 - DNA, 122 bp, Homo sapiens
  misc_feature (61)..(62): /note="This region represents a CpG dinucleotide"
  misc_feature (61)..(61): /note="Nucleotide may be methylated to form 5-methylcytosine"
atgatgacttcatagtttcactcacagagggttgtttttccccagttcttacatgttatacgcaataccttcaagcctcataccagcaacacaaattatatttcatttatttccagtgttgc

SEQ ID NO: 660 - DNA, 122 bp, Homo sapiens
  misc_feature (61)..(62): /note="This region represents a CpG dinucleotide"
  misc_feature (61)..(61): /note="Nucleotide may be methylated to form 5-methylcytosine"
catgtagaaatatttcttttctgacaaatctagctcttgcaaatctatgcttagtagagacggggtttctccatgttggtcaggctgttctcaaactcctgacctctagtgatccacccgcc

SEQ ID NO: 661 - DNA, 122 bp, Homo sapiens
  misc_feature (61)..(62): /note="This region represents a CpG dinucleotide"
  misc_feature (61)..(61): /note="Nucleotide may be methylated to form 5-methylcytosine"
gctcctattcctgagtgactaagaggaacaataaagtcaagatatgttaaggagacttgacgaggaagaactaccaagtcaagagggggaaatttgccaaaccatcagttcctcttcaaact

SEQ ID NO: 662 - DNA, 122 bp, Homo sapiens
  misc_feature (61)..(62): /note="This region represents a CpG dinucleotide"
  misc_feature (61)..(61): /note="Nucleotide may be methylated to form 5-methylcytosine"
agtaggcgtgaggtttcaataagccagattaggtgatgcacttaccacagtgcctgcacccgttaagtgctcaataaacattagccattattctctggctcagtttggaagacttacaattg

SEQ ID NO: 663 - DNA, 122 bp, Homo sapiens
  misc_feature (61)..(62): /note="This region represents a CpG dinucleotide"
  misc_feature (61)..(61): /note="Nucleotide may be methylated to form 5-methylcytosine"
gggaaggtaggaggaaagggaggatgactaaacaggacctggtggtgcttcaagcatccacgttcagttttctgcatgagcatcggtcttatctatttgggaaataggacattcctgctctt

SEQ ID NO: 664 - DNA, 122 bp, Homo sapiens
  misc_feature (61)..(62): /note="This region represents a CpG dinucleotide"
  misc_feature (61)..(61): /note="Nucleotide may be methylated to form 5-methylcytosine"
ggtttccaacatgctcaggttaaccataatgattccaacttctgtttcatgtcacttcttcgtgtgtttacccaaaacacacagagttctattggaaagaaagtaaagcaaagtgtaaaatc

SEQ ID NO: 665 - DNA, 122 bp, Homo sapiens
  misc_feature (61)..(62): /note="This region represents a CpG dinucleotide"
  misc_feature (61)..(61): /note="Nucleotide may be methylated to form 5-methylcytosine"
gaacaacaaacttttcctgaccggggagagctatgctggcatctacatccccaccctggccgtgctggtcatgcaggatcccagcatgaaccttcaggtgcagggtagctgcaggagggaag

SEQ ID NO: 666 - DNA, 122 bp, Homo sapiens
  misc_feature (61)..(62): /note="This region represents a CpG dinucleotide"
  misc_feature (61)..(61): /note="Nucleotide may be methylated to form 5-methylcytosine"
gaggtcccttcctgggctctgtctggctgctcctttcaatgctccaagctaccttgggagcgtgggtccccaaccttggctccgctcaggaaaccataaagtcttgagtaacatcccatctc

SEQ ID NO: 667 - DNA, 122 bp, Homo sapiens
  misc_feature (61)..(62): /note="This region represents a CpG dinucleotide"
  misc_feature (61)..(61): /note="Nucleotide may be methylated to form 5-methylcytosine"
gacctgccccgctggaaagaagcagcaggcttggcactccgtctcacagagctggccacccggacacatggctcccagcaccctgtctcagctgaatcatcagtgacttctgtgcaggatcc

SEQ ID NO: 668 - DNA, 122 bp, Homo sapiens
  misc_feature (61)..(62): /note="This region represents a CpG dinucleotide"
  misc_feature (61)..(61): /note="Nucleotide may be methylated to form 5-methylcytosine"
actaggagtcaggctgggctgggcggtcctgtggggggctacagccaactgttgggcccacgtaggccttgcttcacctggaaagagaatccaggcaggaggtcatctcagggatgggctgg

SEQ ID NO: 669 - DNA, 122 bp, Homo sapiens
  misc_feature (61)..(62): /note="This region represents a CpG dinucleotide"
  misc_feature (61)..(61): /note="Nucleotide may be methylated to form 5-methylcytosine"
agtaggtagatttcagtactctcagaatgcggatgggatcaacgaggaggaagtagatgacggaggctggaaagtcacttcctgctaagtggccagtgtcagtgttccaggcagagctgctt

SEQ ID NO: 670 - DNA, 122 bp, Homo sapiens
  misc_feature (61)..(62): /note="This region represents a CpG dinucleotide"
  misc_feature (61)..(61): /note="Nucleotide may be methylated to form 5-methylcytosine"
ggctgctccgcgctgcggggcgctgcaccgtgcacagtcaggccgggccatacctccagacgctgtatgccgccgactccccgcctagccgccgctccggctcataaactagtagacgataa

SEQ ID NO: 671 - DNA, 122 bp, Homo sapiens
  misc_feature (61)..(62): /note="This region represents a CpG dinucleotide"
  misc_feature (61)..(61): /note="Nucleotide may be methylated to form 5-methylcytosine"
gttgggcatggtagctcactcctataatctcagcattttgtgaggctgaggtgggtggatcgtttgatgcaggagttcaaactcctggagttcgagaccagcctgggcaacatggtgaagcc

SEQ ID NO: 672 - DNA, 122 bp, Homo sapiens
  misc_feature (61)..(62): /note="This region represents a CpG dinucleotide"
  misc_feature (61)..(61): /note="Nucleotide may be methylated to form 5-methylcytosine"
ccgagcccgcccgcagcgcctggggcctggggagtgggtggtagggtaggactggtgtcacgaagacgccccgagggcaggaggccctaaccactcccttggcagtggatgtggggagtggg

SEQ ID NO: 673 - DNA, 122 bp, Homo sapiens
  misc_feature (61)..(62): /note="This region represents a CpG dinucleotide"
  misc_feature (61)..(61): /note="Nucleotide may be methylated to form 5-methylcytosine"
agcacttcagatcaggacttttaaatgtttctagatgctgtggcgattaatgaattacaacgtcaggtaaagaaattacacttaaaggctggacacggtggctcatacttataatcccagta

SEQ ID NO: 674 - DNA, 122 bp, Homo sapiens
  misc_feature (61)..(62): /note="This region represents a CpG dinucleotide"
  misc_feature (61)..(61): /note="Nucleotide may be methylated to form 5-methylcytosine"
caattaaatgtgattgacaaccagagaactttatcacagatgtcacacagattagagcctcgtcgaccatagacatttcaaatgcccaaagcaacagtttgtctccagtccacaatctttca

SEQ ID NO: 675 - DNA, 122 bp, Homo sapiens
  misc_feature (61)..(62): /note="This region represents a CpG dinucleotide"
  misc_feature (61)..(61): /note="Nucleotide may be methylated to form 5-methylcytosine"
tcagttaactttaaaactgtacttattaaagtctttgttacttttaagaagactatcctacgctttgagaaattgctgagtcatggtcatgatcacatctgtgttgtagttgtagcccccct

SEQ ID NO: 676 - DNA, 122 bp, Homo sapiens
  misc_feature (61)..(62): /note="This region represents a CpG dinucleotide"
  misc_feature (61)..(61): /note="Nucleotide may be methylated to form 5-methylcytosine"
atgggcttcctagtgtctggaggaggttgctttggaggcaacacttaagatagggaaggacgatcagatgagagtagaaagccataaggctccttggagtggatcacctgggtttgagggtg

SEQ ID NO: 677 - DNA, 122 bp, Homo sapiens
  misc_feature (61)..(62): /note="This region represents a CpG dinucleotide"
  misc_feature (61)..(61): /note="Nucleotide may be methylated to form 5-methylcytosine"
caatttaagattttggcttaagatttttttgggcggtttctctttccagccagcgccgagcgatgggcatctctcgggacaactggcaccagcgccgcaaaaccgggggcaagagaaagccc

SEQ ID NO: 678 - DNA, 122 bp, Homo sapiens
  misc_feature (61)..(62): /note="This region represents a CpG dinucleotide"
  misc_feature (61)..(61): /note="Nucleotide may be methylated to form 5-methylcytosine"
gtcacccacttcctctttccacaactgtggaagtaggcgttacttgacattctgaaagtacgtcagaaagtaatcctgacagcactttctgtaattggtgtgttgttgctgtgcttcatgct

SEQ ID NO: 679 - DNA, 122 bp, Homo sapiens
  misc_feature (61)..(62): /note="This region represents a CpG dinucleotide"
  misc_feature (61)..(61): /note="Nucleotide may be methylated to form 5-methylcytosine"
catcctcggaggatgatatagaccggcggcccatccggagagtgcgctccaagagcgacacgccgtacctcgcagaggccaggatctcctttaacctgggggcaggtaagaacgcccctggc

SEQ ID NO: 680 - DNA, 122 bp, Homo sapiens
  misc_feature (61)..(62): /note="This region represents a CpG dinucleotide"
  misc_feature (61)..(61): /note="Nucleotide may be methylated to form 5-methylcytosine"
tccctgtcgaccgcacacaggccgaggttgagtcacccgggcaaagccagttgggatcagcggaaccacagtcaacctgcagacccggaaaaggggaaatcacatgcctgctgtgcgtgctg

SEQ ID NO: 681 - DNA, 122 bp, Homo sapiens
  misc_feature (61)..(62): /note="This region represents a CpG dinucleotide"
  misc_feature (61)..(61): /note="Nucleotide may be methylated to form 5-methylcytosine"
gctgcacttgaaaacaggcatcttcatttgcagttaattagattaactcagctgcgattacgaatggaattccttgctccagcaacagcgaacgtttgttgaacatgtgttgtaatcttgcc

SEQ ID NO: 682 - DNA, 122 bp, Homo sapiens
  misc_feature (61)..(62): /note="This region represents a CpG dinucleotide"
  misc_feature (61)..(61): /note="Nucleotide may be methylated to form 5-methylcytosine"
cttggctaactagtgctagcagcctagtttgggacctatctcagctttcaacatgctttccgtactaagcttaatcatttctagcttttttgtttttttttatttgtttgtttattttttga

SEQ ID NO: 683 - DNA, 122 bp, Homo sapiens
  misc_feature (61)..(62): /note="This region represents a CpG dinucleotide"
  misc_feature (61)..(61): /note="Nucleotide may be methylated to form 5-methylcytosine"
ctccttgtgccagctttggggaacagctgagcttctgctcccggctgcatgaggaagtggcgggaccaaggctttgcaccaaggcctttgactcagagcctgttctaagcgctgtgtcaaat

SEQ ID NO: 684 - DNA, 122 bp, Homo sapiens
  misc_feature (61)..(62): /note="This region represents a CpG dinucleotide"
  misc_feature (61)..(61): /note="Nucleotide may be methylated to form 5-methylcytosine"
cctccaaaaaagacaaaatcttaagctgcaccaagcaaaacaggatgtgtgttcattctacgtgtttagtgctatgagtaatgtagtaggtcctcaataaatacatgttccctttcccttcc

SEQ ID NO: 685 - DNA, 122 bp, Homo sapiens
  misc_feature (61)..(62): /note="This region represents a CpG dinucleotide"
  misc_feature (61)..(61): /note="Nucleotide may be methylated to form 5-methylcytosine"
actgatatctccctgtgagcagctgaagtgagcaatcctgctgagtcactttccttcttgcgtacatagtgcacactgatttcattcattcttgggtctgcttccaaaatctgggtctttaa

SEQ ID NO: 686 - DNA, 122 bp, Homo sapiens
  misc_feature (61)..(62): /note="This region represents a CpG dinucleotide"
  misc_feature (61)..(61): /note="Nucleotide may be methylated to form 5-methylcytosine"
tgtattggtcaatctccctcctcccccattagaatcatcagggagtggtttgtggggaggcgggaaggggtgttgtcttaaaataaaatgtgctttcaataaaataccttggcatcccattt

SEQ ID NO: 687 - DNA, 122 bp, Homo sapiens
  misc_feature (61)..(62): /note="This region represents a CpG dinucleotide"
  misc_feature (61)..(61): /note="Nucleotide may be methylated to form 5-methylcytosine"
aggcccttcaattgtgtcactccagctgcataaaagtgccaaaaagtctactggtttctccgcccatcagaagcagcgctttactcaggcaaagcctgggctttcagcctcttgctcatact

SEQ ID NO: 688 - DNA, 122 bp, Homo sapiens
  misc_feature (61)..(62): /note="This region represents a CpG dinucleotide"
  misc_feature (61)..(61): /note="Nucleotide may be methylated to form 5-methylcytosine"
ctttttacacggaaggcaagggtttctgaagttccttctttagaagttaataagactggccgggcgtggtggttcacgcctgtaatcccagcactttgggaggccgagatgggtggatcacg

SEQ ID NO: 689 - DNA, 122 bp, Homo sapiens
  misc_feature (61)..(62): /note="This region represents a CpG dinucleotide"
  misc_feature (61)..(61): /note="Nucleotide may be methylated to form 5-methylcytosine"
acaccccagggaagctatgaatcacaggctgcatgaacaaaaaaacagcactgggtacaccggggagtccagtctctttgcccaactccagaacttcctgcagctcaacataaaagccctgg

SEQ ID NO: 690 - DNA, 122 bp, Homo sapiens
  misc_feature (61)..(62): /note="This region represents a CpG dinucleotide"
  misc_feature (61)..(61): /note="Nucleotide may be methylated to form 5-methylcytosine"
gaccagacatatcagcgtccctggggaggtagtcagacacgcaggctcttcagcctactgcgacctactagaccgtgatgtgtagtttaaacaagacccgcaggtgtctggtgtgtagttca

SEQ ID NO: 691 - DNA, 122 bp, Homo sapiens
  misc_feature (61)..(62): /note="This region represents a CpG dinucleotide"
  misc_feature (61)..(61): /note="Nucleotide may be methylated to form 5-methylcytosine"
cgtgactgggaagaaagggtaggaccatgctgtgaagagctttaggctttagatgctaagcgaaggatcctgaacttaaaagtgccagattgtgaaataaaagggaaaggagttttcctgta

SEQ ID NO: 692 - DNA, 122 bp, Homo sapiens
  misc_feature (61)..(62): /note="This region represents a CpG dinucleotide"
  misc_feature (61)..(61): /note="Nucleotide may be methylated to form 5-methylcytosine"
ctaataggaagacagatgttatcacatcctttacagaaataaatatacagggtggacgaacggcatggggtatggtctcaaatttgtgtttttatatgacactgaaagaatgctggtctcaa

SEQ ID NO: 693 - DNA, 122 bp, Homo sapiens
  misc_feature (61)..(62): /note="This region represents a CpG dinucleotide"
  misc_feature (61)..(61): /note="Nucleotide may be methylated to form 5-methylcytosine"
ccggcactgcttcctctttctgcttctctgtttcctgatgacatcaacataaataggaaacgtgggaggctcactctgcctagaggctccagaagaagactggtctctcccaccacacagag

SEQ ID NO: 694 - DNA, 122 bp, Homo sapiens
  misc_feature (61)..(62): /note="This region represents a CpG dinucleotide"
  misc_feature (61)..(61): /note="Nucleotide may be methylated to form 5-methylcytosine"
gactcacggtgactgtgctgagtcaagaggcccatggggacaggcacagatctagtcctgcgtcatgcctaccacccaggaaggaaatccaaggccctcagtcctgcatttgggccccttgg

SEQ ID NO: 695 - DNA, 122 bp, Homo sapiens
  misc_feature (61)..(62): /note="This region represents a CpG dinucleotide"
  misc_feature (61)..(61): /note="Nucleotide may be methylated to form 5-methylcytosine"
ctgcatctgtgggggctgcctcagccctaaccatgtcaacatagtgttgaaattcagttccgagaaacacttgtgggtttgtagactctatggcatctggaagtgaaagagggacacatctc

SEQ ID NO: 696 - DNA, 122 bp, Homo sapiens
  misc_feature (61)..(62): /note="This region represents a CpG dinucleotide"
  misc_feature (61)..(61): /note="Nucleotide may be methylated to form 5-methylcytosine"
gggtcagaaatggggcgtggctcgcggagttatccgggatcccaaaagaaagagctcaggcggggacctggatctagttccccaagatcacttacttaaggcctccagcaccctgtagcccc

SEQ ID NO: 697 - DNA, 122 bp, Homo sapiens
  misc_feature (61)..(62): /note="This region represents a CpG dinucleotide"
  misc_feature (61)..(61): /note="Nucleotide may be methylated to form 5-methylcytosine"
aatgtctgctgtacatctgagtacacaattgtctttcacagaagatggagcaaagtattacggaaagttcattggcttctgagtctgagagaaatgggttcaaatcctgaatacgttcctta

SEQ ID NO: 698 - DNA, 122 bp, Homo sapiens
  misc_feature (61)..(62): /note="This region represents a CpG dinucleotide"
  misc_feature (61)..(61): /note="Nucleotide may be methylated to form 5-methylcytosine"
ctgatgtgggtttttctttataacttccccttccgtttgggaattcacagattttgggcacgcactcaggttgtcctcagtgacccccacagctgtgagagccacccagagggcaactgttc

SEQ ID NO: 699 - DNA, 122 bp, Homo sapiens
  misc_feature (61)..(62): /note="This region represents a CpG dinucleotide"
  misc_feature (61)..(61): /note="Nucleotide may be methylated to form 5-methylcytosine"
gttttagaatctcaaaatggctttgcagccacccggagcctctgggtgtgtagcagtggccgcggagtcaggcgccggccactacgtgtcagcctagcgctggcggcacgttgagcttcctg

SEQ ID NO: 700 - DNA, 122 bp, Homo sapiens
  misc_feature (61)..(62): /note="This region represents a CpG dinucleotide"
  misc_feature (61)..(61): /note="Nucleotide may be methylated to form 5-methylcytosine"
ttttgggtttcagattttcagattaaggatacttcacctgtatttattctctccctgccacgccaggatgtaagctctacaagggcagagaatgtatttgattcattgtcagtccccttata

SEQ ID NO: 701 - DNA, 122 bp, Homo sapiens
  misc_feature (61)..(62): /note="This region represents a CpG dinucleotide"
  misc_feature (61)..(61): /note="Nucleotide may be methylated to form 5-methylcytosine"
atggcaaagcttggcttgaagctgttcccttgtgcctctgtcacttcaaggcctgggacccgattcgatctaagccagttcggtctggcttcccctgaccatatgggtgttgggtaagaaag

SEQ ID NO: 702 - DNA, 122 bp, Homo sapiens
  misc_feature (61)..(62): /note="This region represents a CpG dinucleotide"
  misc_feature (61)..(61): /note="Nucleotide may be methylated to form 5-methylcytosine"
caggcagaattaaccccaggtgatttgtgtgcagagtacaatttgagacgtgctgccttgcgtgaccaggtgatctgagtttacttctagcgctaagacccaactttctctaagattatctt

SEQ ID NO: 703 - DNA, 122 bp, Homo sapiens
  misc_feature (61)..(62): /note="This region represents a CpG dinucleotide"
  misc_feature (61)..(61): /note="Nucleotide may be methylated to form 5-methylcytosine"
gtcataagggccctgctccaagaggggccccatgcttaggttaatactcttgtcaactaacgagtggtgaggttcataaattttgaaataagaggtttatttctcatgaagtgttgcaatct

SEQ ID NO: 704 - DNA, 122 bp, Homo sapiens
  misc_feature (61)..(62): /note="This region represents a CpG dinucleotide"
  misc_feature (61)..(61): /note="Nucleotide may be methylated to form 5-methylcytosine"
aggtgtcccatggacacttccatttcctgtgtgactgtaggtgagttccctaagcctccacgccctctctggcctcagtttcctcactgaggcagtgctcccaggaagctccagctccgccc

SEQ ID NO: 705 - DNA, 122 bp, Homo sapiens
  misc_feature (61)..(62): /note="This region represents a CpG dinucleotide"
  misc_feature (61)..(61): /note="Nucleotide may be methylated to form 5-methylcytosine"
agtgtttggccagcaaacttggtgagtaaatggactagaactaatcctgtagctaaacagcgagggctttagaaaaggaaacacctcacttgcctaatagctcccagggaggggtgagatat

SEQ ID NO: 706 - DNA, 122 bp, Homo sapiens
  misc_feature (61)..(62): /note="This region represents a CpG dinucleotide"
  misc_feature (61)..(61): /note="Nucleotide may be methylated to form 5-methylcytosine"
aaaaaaagaccaaaacaaacaaacaaacaaacaaaaaacagtcccatggctgaaacgtgccgtgacatattcggtgcacacactgtttacacccacaggtagacacgtgagttgctttctgt

SEQ ID NO: 707 - DNA, 122 bp, Homo sapiens
  misc_feature (61)..(62): /note="This region represents a CpG dinucleotide"
  misc_feature (61)..(61): /note="Nucleotide may be methylated to form 5-methylcytosine"
aagtatactttgatttgagctttgcctaagtctatggcaaactgaattaagccactactacgttatagaaattacgtcattatttgcaggctaacttttccatttataactaacacatgcca

SEQ ID NO: 708 - DNA, 122 bp, Homo sapiens
  misc_feature (61)..(62): /note="This region represents a CpG dinucleotide"
  misc_feature (61)..(61): /note="Nucleotide may be methylated to form 5-methylcytosine"
aaaaactcaaagcaatttcatttaatccttattgtgataaagtgtgagtggctaactcttcgtacaaagaggaagtactgcacatcaagtacataattaaaattgaatcatttgctcatgct

SEQ ID NO: 709 - DNA, 122 bp, Homo sapiens
  misc_feature (61)..(62): /note="This region represents a CpG dinucleotide"
  misc_feature (61)..(61): /note="Nucleotide may be methylated to form 5-methylcytosine"
ctcccgcccgagttttatggggccgggaagcgcctggtcagccccgctgcccgtgcgctgcggtcagtgcgagtggaacccctccacctgtccgcccctccgccgggactccgagctttgcc

SEQ ID NO: 710 - DNA, 122 bp, Homo sapiens
  misc_feature (61)..(62): /note="This region represents a CpG dinucleotide"
  misc_feature (61)..(61): /note="Nucleotide may be methylated to form 5-methylcytosine"
gcctaagatcttcacatgaagccaggagactataatagaagagctcacctaaaacaagttcgtcagagaaagactgggctaggaaaaaaaccactaaggctgggcacggtggctcacggctg

SEQ ID NO: 711 - DNA, 122 bp, Homo sapiens
  misc_feature (61)..(62): /note="This region represents a CpG dinucleotide"
  misc_feature (61)..(61): /note="Nucleotide may be methylated to form 5-methylcytosine"
atccgtgtgaggaaggagaattgttgttgcatactttgctagtagaaggaagagaagatccgtgactgagtcttgctgagacatgttgatgttgaaatgataatgataagttctagaactgg

SEQ ID NO: 712 - DNA, 122 bp, Homo sapiens
  misc_feature (61)..(62): /note="This region represents a CpG dinucleotide"
  misc_feature (61)..(61): /note="Nucleotide may be methylated to form 5-methylcytosine"
aagctaacagagatagctagaaagtggccaggtacaacttgatctagggtcctcctggctcgtttctgtgctctctcatgatggacactgatgattgttttggggtgaggggcatggaagca

SEQ ID NO: 713 - DNA, 122 bp, Homo sapiens
  misc_feature (61)..(62): /note="This region represents a CpG dinucleotide"
  misc_feature (61)..(61): /note="Nucleotide may be methylated to form 5-methylcytosine"
catctatgtaagataatgaccagtagagttggacatgtcccccgaacagggatgacgtgacgctgaaaaggagagttgagacctgccatcacatgaaggaagcaaagggaacaattcctatt

SEQ ID NO: 714 - DNA, 122 bp, Homo sapiens
  misc_feature (61)..(62): /note="This region represents a CpG dinucleotide"
  misc_feature (61)..(61): /note="Nucleotide may be methylated to form 5-methylcytosine"
caatggcactggtacttgtagtgaaatgagccacagaggcatcattactcatcaccatcacgactcaaggatcagcaaatgagagtcctgaaggtaaagaatgtttattttcaggtagagaa

SEQ ID NO: 715 - DNA, 122 bp, Homo sapiens
  misc_feature (61)..(62): /note="This region represents a CpG dinucleotide"
  misc_feature (61)..(61): /note="Nucleotide may be methylated to form 5-methylcytosine"
aatcctaacgtatatggattatctgtgacacatgggactggtgatttcatcagcaagagacgctgcatctggagaaccaatctgagaagatatctgcttcccgggtgcttgaggctttacgc

SEQ ID NO: 716 - DNA, 122 bp, Homo sapiens
  misc_feature (61)..(62): /note="This region represents a CpG dinucleotide"
  misc_feature (61)..(61): /note="Nucleotide may be methylated to form 5-methylcytosine"
tctcttgcatcacttgaccctgggtggacaaggctgactcattcagtcatctgtgttgctcgtaagcacttgggagtacagcttgctgatatggcctaagaggaaacatttcacagactcca

SEQ ID NO: 717 - DNA, 122 bp, Homo sapiens
  misc_feature (61)..(62): /note="This region represents a CpG dinucleotide"
  misc_feature (61)..(61): /note="Nucleotide may be methylated to form 5-methylcytosine"
ggtggtggcagcaggcagaggtgtggacagacctcttgagaatcaccagctttccatagccgttccagctacagcggtgcaaaaaaggccccctgctgagctgggtgaaatccgggcgactt

SEQ ID NO: 718 - DNA, 122 bp, Homo sapiens
  misc_feature (61)..(62): /note="This region represents a CpG dinucleotide"
  misc_feature (61)..(61): /note="Nucleotide may be methylated to form 5-methylcytosine"
aagttctggaggaagtggcacagtggcaccagttgcttaagagatccactggaggccagacgcagtgactcacacctgtaatgccagcactttttaaggccgaggtgggcagatcacctgag

SEQ ID NO: 719 - DNA, 122 bp, Homo sapiens
  misc_feature (61)..(62): /note="This region represents a CpG dinucleotide"
  misc_feature (61)..(61): /note="Nucleotide may be methylated to form 5-methylcytosine"
atctgccagcgcatgcttgacctaaatgagcttgtttttcacagcccgagtctgtggcttcgtccccacagttcagcgatcctcatctgtacgtgtggaacgccactggcaacagactgttg

SEQ ID NO: 720 - DNA, 122 bp, Homo sapiens
  misc_feature (61)..(62): /note="This region represents a CpG dinucleotide"
  misc_feature (61)..(61): /note="Nucleotide may be methylated to form 5-methylcytosine"
atttctccagtttttacctaacgtcctttttctgttctgggattccaaccaagattccaccgtctccttgggttcctctgggctgtgacagtttctcagactttgtttttgatgaccttgac

SEQ ID NO: 721 - DNA, 122 bp, Homo sapiens
  misc_feature (61)..(62): /note="This region represents a CpG dinucleotide"
  misc_feature (61)..(61): /note="Nucleotide may be methylated to form 5-methylcytosine"
gaccctgggtggcaccttctaagggtgattctgggattctatgaattaatgcatggaaagcgcttgcgagagcgctagccggagtccgcgctatttaggtgtttgccaatattattgttgtt

SEQ ID NO: 722 - DNA, 122 bp, Homo sapiens
  misc_feature (61)..(62): /note="This region represents a CpG dinucleotide"
  misc_feature (61)..(61): /note="Nucleotide may be methylated to form 5-methylcytosine"
tctgagatgtgttttgtagggaaagaaacctatcttaggaatgatgtccggtcacttgtacgagtccccaggacaatcaagctgacttacttgtcaagtcttaaacatcacctcttcgggga

SEQ ID NO: 723 - DNA, 122 bp, Homo sapiens
  misc_feature (61)..(62): /note="This region represents a CpG dinucleotide"
  misc_feature (61)..(61): /note="Nucleotide may be methylated to form 5-methylcytosine"
tgcgagccccccttaaaaatagcatctgaagtttcattgtagctgagtcactgcttggtgcgatctagggctaggctgcaactggacctgtcagaatgaggccacagtgattcatgatgaag

SEQ ID NO: 724 - DNA, 122 bp, Homo sapiens
  misc_feature (61)..(62): /note="This region represents a CpG dinucleotide"
  misc_feature (61)..(61): /note="Nucleotide may be methylated to form 5-methylcytosine"
tgagagcacatgggttctttgctctgtacactatgcttagctttatcatatgccctgcagcgttgccacagagtaccagagttaatctggtactttccagtcttttcatgctttatgccctg

SEQ ID NO: 725 - DNA, 122 bp, Homo sapiens
  misc_feature (61)..(62): /note="This region represents a CpG dinucleotide"
  misc_feature (61)..(61): /note="Nucleotide may be methylated to form 5-methylcytosine"
tggttaggattgaattattaataacagaactttgctgcaggattgcaggaatgactcttacgtggatggatccagcctctgattattgcttttgtctgtagcctagaggctgtcaagcaggg

SEQ ID NO: 726 - DNA, 122 bp, Homo sapiens
  misc_feature (61)..(62): /note="This region represents a CpG dinucleotide"
  misc_feature (61)..(61): /note="Nucleotide may be methylated to form 5-methylcytosine"
agacacacacacagagtattaacagaagacaaagcctcaccggctcccttaggcatctcacgtgcattccaggcaggaactacccagtgccagcatcagccctcagcaggctgcccaattac

SEQ ID NO: 727 - DNA, 122 bp, Homo sapiens
  misc_feature (61)..(62): /note="This region represents a CpG dinucleotide"
  misc_feature (61)..(61): /note="Nucleotide may be methylated to form 5-methylcytosine"
tctcctcctgcctgtcaaccttctgtctctctcaaagcactggaggaggctattctctgacgctcccctatctacctagaaaacagacccctagtgaggaacacagctgcctctgttgactt

SEQ ID NO: 728 - DNA, 122 bp, Homo sapiens
  misc_feature (61)..(62): /note="This region represents a CpG dinucleotide"
  misc_feature (61)..(61): /note="Nucleotide may be methylated to form 5-methylcytosine"
aaagcaaaatctttgtaaatctcactctattcatttataacatagggattattattacatcgtgatgtgactaaatagtttaccttgcacaaagtttttagagcaggatctgaaacaaatta

SEQ ID NO: 729 - DNA, 122 bp, Homo sapiens
  misc_feature (61)..(62): /note="This region represents a CpG dinucleotide"
  misc_feature (61)..(61): /note="Nucleotide may be methylated to form 5-methylcytosine"
aaccgcagtatgtatttcacaaccagcttttccaaactaggtcccaggaagcactggtttcggcgagtgttaccagatctcctgcaggggagaaacggtcacgaaacatgaactggtctgcc

SEQ ID NO: 730 - DNA, 122 bp, Homo sapiens
  misc_feature (61)..(62): /note="This region represents a CpG dinucleotide"
  misc_feature (61)..(61): /note="Nucleotide may be methylated to form 5-methylcytosine"
gctgcccagttcctcttcctcttcccaagtggcccccgtcctgccactcccttctatgagcgcagaccttctggtttagagcttcagtctggaccattgtgctgtgtcctctccaggcgggg

SEQ ID NO: 731 - DNA, 122 bp, Homo sapiens
  misc_feature (61)..(62): /note="This region represents a CpG dinucleotide"
  misc_feature (61)..(61): /note="Nucleotide may be methylated to form 5-methylcytosine"
tgggagtcactgaatataaaacgtggccttgaccgcgattagcagaatgtcaagggcatacgtgaagcaggatttcaccacatcctggagagaaattagagagtgaacatgcacaataatcc

SEQ ID NO: 732 - DNA, 122 bp, Homo sapiens
  misc_feature (61)..(62): /note="This region represents a CpG dinucleotide"
  misc_feature (61)..(61): /note="Nucleotide may be methylated to form 5-methylcytosine"
aaggatgaggatgctaaattctgtctgattctgatagagagccggattcactgtttggctcgatattataagaccaagtgagtcctctctcccaactggaaatatgaatcatatacagcctc

SEQ ID NO: 733 - DNA, 122 bp, Homo sapiens
  misc_feature (61)..(62): /note="This region represents a CpG dinucleotide"
  misc_feature (61)..(61): /note="Nucleotide may be methylated to form 5-methylcytosine"
cagtttagtcaaccagtgtaagtatcatgcatccttgaagattatctatgtagaccaaaacggagcctggtcttgcctagcataaagtctaggatgactaataccagtgttgatcataatcc

SEQ ID NO: 734 - DNA, 122 bp, Homo sapiens
  misc_feature (61)..(62): /note="This region represents a CpG dinucleotide"
  misc_feature (61)..(61): /note="Nucleotide may be methylated to form 5-methylcytosine"
aaagaaaaaaaaaagaaaaactacacacacacagaaaaaaccagaaaaactacatcaacccgaaaagtggagcaatccactgctgaccgccctgggtagtcttgtaaacaaggtcaattgtt

SEQ ID NO: 735 - DNA, 122 bp, Homo sapiens
  misc_feature (61)..(62): /note="This region represents a CpG dinucleotide"
  misc_feature (61)..(61): /note="Nucleotide may be methylated to form 5-methylcytosine"
accattcgcgagagactggaactaatttaatgtgctccaggtttaagcccctagcctctgcgcctttgcagggagattttacacagtggattactgctgactttaacaatgattcatatgat

SEQ ID NO: 736 - DNA, 122 bp, Homo sapiens
  misc_feature (61)..(62): /note="This region represents a CpG dinucleotide"
  misc_feature (61)..(61): /note="Nucleotide may be methylated to form 5-methylcytosine"
gctacaaccaagccttcctgtgtgttctcacctgccccagctgggtgaggtctcaggccacgctcttccttgggcccctgggatggtgcctagttgcataactatttgaatggctctgcagg

SEQ ID NO: 737 - DNA, 122 bp, Homo sapiens
  misc_feature (61)..(62): /note="This region represents a CpG dinucleotide"
  misc_feature (61)..(61): /note="Nucleotide may be methylated to form 5-methylcytosine"
caaaattaagccagcaaaatgttgctgtcatccatctgaacctgttagaaatctcaagctcgtcatagaatctttgacctcaccattcaatgttttacaaattgagtaactatgtccctgtc

SEQ ID NO: 738 - DNA, 122 bp, Homo sapiens
  misc_feature (61)..(62): /note="This region represents a CpG dinucleotide"
  misc_feature (61)..(61): /note="Nucleotide may be methylated to form 5-methylcytosine"
gcaggcgccaggctacgcggctgctgcggccctgggccatcaccatcacccgggccacgtcggctcctattccagcgcagccttcaactccacgcgggactttctgttccgcaaccggggtt

SEQ ID NO: 739 - DNA, 122 bp, Homo sapiens
  misc_feature (61)..(62): /note="This region represents a CpG dinucleotide"
  misc_feature (61)..(61): /note="Nucleotide may be methylated to form 5-methylcytosine"
ctatgtggaaggacactcttaagatgtttgcacaataacaaaattgcctaacagtgcaatcgtcttttttatttttatttatttattatagagatggagtctcactattttgcctaggctgg

SEQ ID NO: 740 - DNA, 122 bp, Homo sapiens
  misc_feature (61)..(62): /note="This region represents a CpG dinucleotide"
  misc_feature (61)..(61): /note="Nucleotide may be methylated to form 5-methylcytosine"
gctctccatctctttcattcccagggacactgtgacttagccatgccaaggattcctatacgtcgagtaactctgattgccacaatgccctgctgccccttgtggtgaattcatccacattg

SEQ ID NO: 741 - DNA, 122 bp, Homo sapiens
  misc_feature (61)..(62): /note="This region represents a CpG dinucleotide"
  misc_feature (61)..(61): /note="Nucleotide may be methylated to form 5-methylcytosine"
gggtcctttgacagcttaatactgcagagtttctggtgacttcatagttagggcagccaacgtgagaccatctgtttagtagtgggcagaaaagctcagtaccagcaggtagctgctgctga

SEQ ID NO: 742 - DNA, 122 bp, Homo sapiens
  misc_feature (61)..(62): /note="This region represents a CpG dinucleotide"
  misc_feature (61)..(61): /note="Nucleotide may be methylated to form 5-methylcytosine"
atcattagccatgcttaaccccggtggcagctgccaggagaatgcagaagcccctctgagcgcccccgagcctgttcacgctgcacctgcgccagaaaccacagagcagccccgcccagcag

SEQ ID NO: 743 - DNA, 122 bp, Homo sapiens
  misc_feature (61)..(62): /note="This region represents a CpG dinucleotide"
  misc_feature (61)..(61): /note="Nucleotide may be methylated to form 5-methylcytosine"
cattttggaaagtggaatgattaaataacatgggtcactatttgtgaaatctcagaattgcgtgtaaactgatacagtattgcaatttattatgtaacttaacctgcggcatgggatgctgg

SEQ ID NO: 744 - DNA, 122 bp, Homo sapiens
  misc_feature (61)..(62): /note="This region represents a CpG dinucleotide"
  misc_feature (61)..(61): /note="Nucleotide may be methylated to form 5-methylcytosine"
caaatatatgaacaggctgtaccccacttatgacctcttaacatgtattttacagacttacgtggattggaagtcctggctgggctccacagtccctgagggaagggagagcttcccttttt

SEQ ID NO: 745 - DNA, 122 bp, Homo sapiens
  misc_feature (61)..(62): /note="This region represents a CpG dinucleotide"
  misc_feature (61)..(61): /note="Nucleotide may be methylated to form 5-methylcytosine"
ggccattatccttgtctgtctgcaatgggatgcccgcctggagcaactttcaagtctcttcgttttatagatgttgtaagtatgtcattgtgaatagtgttgcagaaatgtatgcctcatat

SEQ ID NO: 746 - DNA, 122 bp, Homo sapiens
  misc_feature (61)..(62): /note="This region represents a CpG dinucleotide"
  misc_feature (61)..(61): /note="Nucleotide may be methylated to form 5-methylcytosine"
tactccatggactctccccaaattctttcttgtgagagatcctgacaatgggttattttacgtaatttgacttagagtgtgaagtttaaattgtatgtctaaagggatcggaatccctttcc

SEQ ID NO: 747 - DNA, 122 bp, Homo sapiens
  misc_feature (61)..(62): /note="This region represents a CpG dinucleotide"
  misc_feature (61)..(61): /note="Nucleotide may be methylated to form 5-methylcytosine"
ctaaatagaccatgaaaaggacacttgtttacactatgtaagctgaaactagaatgtgcacgtcagtagactcacatttttcaccattgtgcacatgtctgcaatgacagtggaagtgctat

SEQ ID NO: 748 - DNA, 122 bp, Homo sapiens
  misc_feature (61)..(62): /note="This region represents a CpG dinucleotide"
  misc_feature (61)..(61): /note="Nucleotide may be methylated to form 5-methylcytosine"
tgacaacctgtacgtgtgcattccgtgcggcaagggcttccccagctctgagcagctgaacgcgcacgtggaggctcacgtggaggaggaggaagcgctgtacggcagggccgaggcggccg

SEQ ID NO: 749 - DNA, 122 bp, Homo sapiens
  misc_feature (61)..(62): /note="This region represents a CpG dinucleotide"
  misc_feature (61)..(61): /note="Nucleotide may be methylated to form 5-methylcytosine"
cctggggtccccggagatccactgcccactcatttcctgcatgtgccaacttcctctccacggagtccagttacaaggcttctcacccatgacagcagggcagggagtggccagggctgaaa

SEQ ID NO: 750 - DNA, 122 bp, Homo sapiens
  misc_feature (61)..(62): /note="This region represents a CpG dinucleotide"
  misc_feature (61)..(61): /note="Nucleotide may be methylated to form 5-methylcytosine"
gagcagcacctggtcccggtcagccctagggcgcacagctcagaaatgccagagcagaaacgcttgccctgggggaagaggcaactcgcatgtggagctgggcagctggagcatctgtggaa

SEQ ID NO: 751 - DNA, 122 bp, Homo sapiens
  misc_feature (61)..(62): /note="This region represents a CpG dinucleotide"
  misc_feature (61)..(61): /note="Nucleotide may be methylated to form 5-methylcytosine"
ccccgcgggacgccggtgcccggtctcggtcccagcccagagccgctcgcgcctggacgccggccgccccgtcgaacctttgggtctccgagctccccgcccccgcccccaatcaggaccgg

SEQ ID NO: 752 - DNA, 122 bp, Homo sapiens
  misc_feature (61)..(62): /note="This region represents a CpG dinucleotide"
  misc_feature (61)..(61): /note="Nucleotide may be methylated to form 5-methylcytosine"
ggtggagctttgctgaggggccccgccttgctgaaggtcagaacctaatttcctgtagaccggtccctctgcttttcctctgccctttggtgggctggaggctctggcaccactcacccact

SEQ ID NO: 753 - DNA, 122 bp, Homo sapiens
  misc_feature (61)..(62): /note="This region represents a CpG dinucleotide"
  misc_feature (61)..(61): /note="Nucleotide may be methylated to form 5-methylcytosine"
ttccaacactagggacctctctgttcagatcttacttcacttcctggcagcgttcagcatcgttgagccttaacacccttttctcctgacttctatgacatcatacccttctgggtttcatg

SEQ ID NO: 754 - DNA, 122 bp, Homo sapiens
  misc_feature (61)..(62): /note="This region represents a CpG dinucleotide"
  misc_feature (61)..(61): /note="Nucleotide may be methylated to form 5-methylcytosine"
cttgttgcaggcaaatgtcaactgccagagaaatgaagatagattgaatggcctaggaggcgagccagcactgtgccagccaagggccaagccagccaccacacaattcgatcctggcccgg

SEQ ID NO: 755 - DNA, 122 bp, Homo sapiens
  misc_feature (61)..(62): /note="This region represents a CpG dinucleotide"
  misc_feature (61)..(61): /note="Nucleotide may be methylated to form 5-methylcytosine"
agattcagatgttgtcagcctgttatactcattaaaaaggtccatgacggcgtgggggcacggtggctccacacctgtgatcccaacacttttggggatgctgaggcagaaagatctcttga

SEQ ID NO: 756 - DNA, 122 bp, Homo sapiens
  misc_feature (61)..(62): /note="This region represents a CpG dinucleotide"
  misc_feature (61)..(61): /note="Nucleotide may be methylated to form 5-methylcytosine"
gcactccttgtcacccattgtcatttatgagccctgtgtcacttgttgcttcagagggagcgctccttgtcacccgttgtcaggtgtactcactttgcttctcccttcctgcttttggggac

SEQ ID NO: 757 - DNA, 122 bp, Homo sapiens
  misc_feature (61)..(62): /note="This region represents a CpG dinucleotide"
  misc_feature (61)..(61): /note="Nucleotide may be methylated to form 5-methylcytosine"
gtgtgtgtgtgtacaggaatcacagagactcatcttgtaatgtttgtaatgtccatgtatcgtgtatgcacacatttttttctgacctattagaagcaaattacagagctaataccccttta

SEQ ID NO: 758 - DNA, 122 bp, Homo sapiens
  misc_feature (61)..(62): /note="This region represents a CpG dinucleotide"
  misc_feature (61)..(61): /note="Nucleotide may be methylated to form 5-methylcytosine"
ctgtggttttttgcccttcctcctttttccttcttccagtttgtaccacagatatggatacgatgtttggaatgatagagctatcctgagatcatgaagatgacatgaacacacattaaagt

SEQ ID NO: 759 - DNA, 122 bp, Homo sapiens
  misc_feature (61)..(62): /note="This region represents a CpG dinucleotide"
  misc_feature (61)..(61): /note="Nucleotide may be methylated to form 5-methylcytosine"
catgattacccctgttttgcaggtagggagactgatgctcaggttaggtagtttgcttcacggtgcacagctctcagggactagaactgtgaattaaactcggagtgcctgaccacaccccc

SEQ ID NO: 760 - DNA, 122 bp, Homo sapiens
  misc_feature (61)..(62): /note="This region represents a CpG dinucleotide"
  misc_feature (61)..(61): /note="Nucleotide may be methylated to form 5-methylcytosine"
cagagcatgctgaaggctgtggtttactgacttcatcacaagccctagaggaaattagtacgtaaccaccttctgtggtcacataacacagccatcatctcactccagggccctagtgcctt

SEQ ID NO: 761 - DNA, 122 bp, Homo sapiens
  misc_feature (61)..(62): /note="This region represents a CpG dinucleotide"
  misc_feature (61)..(61): /note="Nucleotide may be methylated to form 5-methylcytosine"
gcctgtgctgatacttgctgctggctaagcttgtcataagttcagtgtgacaccctttcccgtgatgggctgattacagtaaggtcccaatctagtggtgcctccctctattgctgggttgg

SEQ ID NO: 762 - DNA, 122 bp, Homo sapiens
  misc_feature (61)..(62): /note="This region represents a CpG dinucleotide"
  misc_feature (61)..(61): /note="Nucleotide may be methylated to form 5-methylcytosine"
catgcctctgtgcacccaccaggtccttaataaataatctgttaactgccatttttagaacgctgtattctaaatctcatttcctcagcaggaagcccatgcccttaggggttaggatctgt

SEQ ID NO: 763 - DNA, 122 bp, Homo sapiens
  misc_feature (61)..(62): /note="This region represents a CpG dinucleotide"
  misc_feature (61)..(61): /note="Nucleotide may be methylated to form 5-methylcytosine"
tccacccacaggcctggtattacaaaatagagcttcctaatgggacctgcctgacactctcgttttatgtagaaaattgactcaagcaaacctcagaggacagagccagcagctgacctggg

SEQ ID NO: 764 - DNA, 122 bp, Homo sapiens
  misc_feature (61)..(62): /note="This region represents a CpG dinucleotide"
  misc_feature (61)..(61): /note="Nucleotide may be methylated to form 5-methylcytosine"
accaaataccaatatttaaattcaattatgaaggtaaagccagctctaggcagggaacagcgccttccagagatttgggtggcaggcaaattgcttcctaaaggtttccacccttgcctctc

SEQ ID NO: 765 - DNA, 122 bp, Homo sapiens
  misc_feature (61)..(62): /note="This region represents a CpG dinucleotide"
  misc_feature (61)..(61): /note="Nucleotide may be methylated to form 5-methylcytosine"
tcatgaccaggaggtaacaagcaggaataaaaggccaccagagtcacagagacgaagctgcggcgttaccgaggtgcgaatcactgtgattcctaggtgcgaatcatcaccagcaatcactt

SEQ ID NO: 766 - DNA, 122 bp, Homo sapiens
  misc_feature (61)..(62): /note="This region represents a CpG dinucleotide"
  misc_feature (61)..(61): /note="Nucleotide may be methylated to form 5-methylcytosine"
agaacgcgggggagactgaagagcaactgggaactcggatctgaagccctgctggggtcgcgcggctttggaaaaacaaatcctggccctggactcggtttcccagcgcggtcaacgcatct

SEQ ID NO: 767 - DNA, 122 bp, Homo sapiens
  misc_feature (61)..(62): /note="This region represents a CpG dinucleotide"
  misc_feature (61)..(61): /note="Nucleotide may be methylated to form 5-methylcytosine"
ggttccatgatgaagggcactggcttcccttggaagacactgcatcatcaacatggaagacgtgggggtagcgagaggctgaagggtgtcgttgtctgtcctcatagagctctactcatcct

SEQ ID NO: 768 - DNA, 122 bp, Homo sapiens
  misc_feature (61)..(62): /note="This region represents a CpG dinucleotide"
  misc_feature (61)..(61): /note="Nucleotide may be methylated to form 5-methylcytosine"
ggtcagagctggcctccccggtgcagggaggaggagatcccatgagtgcgtggcagaaaacgccagccactcatgacgccttgagccaggtatcccagccccggcagggaagggagggcggt

SEQ ID NO: 769 - DNA, 122 bp, Homo sapiens
  misc_feature (61)..(62): /note="This region represents a CpG dinucleotide"
  misc_feature (61)..(61): /note="Nucleotide may be methylated to form 5-methylcytosine"
ccaattcctcaggaagctgcttcatctctgcacatccctttggctaagctaactagtatgcgtgcctccttgcaaactgaaaacaagtgtcctacagcttggaagattctggagaaaggtag

SEQ ID NO: 770 - DNA, 122 bp, Homo sapiens
  misc_feature (61)..(62): /note="This region represents a CpG dinucleotide"
  misc_feature (61)..(61): /note="Nucleotide may be methylated to form 5-methylcytosine"
gttcctgagtgctctttatgtcccaataaactccacagttttgtcatgttcagctgctgacgttggatccctgatgcagtcatagttcccccttccagagaattgcaccagcccgccctgtg

SEQ ID NO: 771 - DNA, 122 bp, Homo sapiens
  misc_feature (61)..(62): /note="This region represents a CpG dinucleotide"
  misc_feature (61)..(61): /note="Nucleotide may be methylated to form 5-methylcytosine"
tgcaggaatgttgagaaagccacatccctgaaggccaggcacacaaagcctgcctaagaccgaggctagccaaggacaaaaaaccccctgtctctgctataagcctagcactaagtaacaag

SEQ ID NO: 772 - DNA, 122 bp, Homo sapiens
  misc_feature (61)..(62): /note="This region represents a CpG dinucleotide"
  misc_feature (61)..(61): /note="Nucleotide may be methylated to form 5-methylcytosine"
agttgttttttcaacaaccagcaacttctgtgtgtttcctgattcagtgccctctaaccacgctgcatgcctggtctgtggcagacttttagtgctaagctctaagcccagcaggatcagat

SEQ ID NO: 773 - DNA, 122 bp, Homo sapiens
  misc_feature (61)..(62): /note="This region represents a CpG dinucleotide"
  misc_feature (61)..(61): /note="Nucleotide may be methylated to form 5-methylcytosine"
gtaattatctttgtaatgctctaatgctgaataatgatgctgctaatgcaggctgcacttcgcgcacaggtgccagctgttacctcgccgggcagctgaccgcgcggtgcacacttgggcgc

SEQ ID NO: 774 - DNA, 122 bp, Homo sapiens
  misc_feature (61)..(62): /note="This region represents a CpG dinucleotide"
  misc_feature (61)..(61): /note="Nucleotide may be methylated to form 5-methylcytosine"
aacaattttcttaaactgtgttacaacactacccgttcttccagttttgtcctaacaccgcgcggggcaggaatattccaggtatgttgtggaaataaagaccaggccgtccagatgaggac

SEQ ID NO: 775 - DNA, 122 bp, Homo sapiens
  misc_feature (61)..(62): /note="This region represents a CpG dinucleotide"
  misc_feature (61)..(61): /note="Nucleotide may be methylated to form 5-methylcytosine"
ccttcactttctcagtttctgggcaagtgcatatatggcagacacacctgacagcaagagcgtgacataagcacacccctgagaatgaccccaggatctgagaagaatgtgtgttcctagtt

SEQ ID NO: 776 - DNA, 122 bp, Homo sapiens
  misc_feature (61)..(62): /note="This region represents a CpG dinucleotide"
  misc_feature (61)..(61): /note="Nucleotide may be methylated to form 5-methylcytosine"
acaatctttgcggcaccagggtgggactatttccccacttccatgttgaaactgacagaacgaattgtgtcttagagactctcaaacactaatgtcccctttgactatctaagctgttgagc

SEQ ID NO: 777 - DNA, 122 bp, Homo sapiens
  misc_feature (61)..(62): /note="This region represents a CpG dinucleotide"
  misc_feature (61)..(61): /note="Nucleotide may be methylated to form 5-methylcytosine"
tgtctgcaaataactacaggtttccttgtgagcagagccccaaataactacaggttttctcgtgatcagagtcacacacaacgacaggttttcctgtgaacagagccacgggcccggaactg

SEQ ID NO: 778 - DNA, 122 bp, Homo sapiens
  misc_feature (61)..(62): /note="This region represents a CpG dinucleotide"
  misc_feature (61)..(61): /note="Nucleotide may be methylated to form 5-methylcytosine"
gcctgtcccttgacgccctgcatcctcctccctgactcgcagccccatcggacgctctcccgggaccgccgcaggaccagtttccatagactgcggactggggtcttcctccagcagttact

SEQ ID NO: 779 - DNA, 122 bp, Homo sapiens
  misc_feature (61)..(62): /note="This region represents a CpG dinucleotide"
  misc_feature (61)..(61): /note="Nucleotide may be methylated to form 5-methylcytosine"
actgctcccagaatgtcctgtgccttggtctcctcctgagaaagagatggaagagagaagcgcactgcctcaaagggcacactaaaagcgggtggggagccttaggagtagccagcagagtg

SEQ ID NO: 780 - DNA, 122 bp, Homo sapiens
  misc_feature (61)..(62): /note="This region represents a CpG dinucleotide"
  misc_feature (61)..(61): /note="Nucleotide may be methylated to form 5-methylcytosine"
tcccctcctcctcccatctgctccccgcccctcccctgggcccactcccgctagcggcggcggctcattgcaggccggcatgtctccccggtgacctcaccccagatctggcctttctctgt

SEQ ID NO: 781 - DNA, 122 bp, Homo sapiens
  misc_feature (61)..(62): /note="This region represents a CpG dinucleotide"
  misc_feature (61)..(61): /note="Nucleotide may be methylated to form 5-methylcytosine"
taagaacccagacttgtaccttgagtcatgaagtaaaacttgccagtctcattgggacaccgtctccagctttccaaatgacctctaattaccactttcttctatgttaattaagatactat

SEQ ID NO: 782 - DNA, 122 bp, Homo sapiens
  misc_feature (61)..(62): /note="This region represents a CpG dinucleotide"
  misc_feature (61)..(61): /note="Nucleotide may be methylated to form 5-methylcytosine"
aaaaaaaaaattaagagtcttagtagctataacctgctacacacacatctgcaactcggccgcccagcaactggggccagagccactgagtcacagtaatgccaggaacaaggtagctgggc

SEQ ID NO: 783 - DNA, 122 bp, Homo sapiens
  misc_feature (61)..(62): /note="This region represents a CpG dinucleotide"
  misc_feature (61)..(61): /note="Nucleotide may be methylated to form 5-methylcytosine"
aagtccagatgtcagagtgagggtggggttaagcacagcaaggtcagcagccatcacagacggtcatcagtgtattgatgccactcagccagtgtgccatcagcacggctccttagttcacc

SEQ ID NO: 784 - DNA, 122 bp, Homo sapiens
  misc_feature (61)..(62): /note="This region represents a CpG dinucleotide"
  misc_feature (61)..(61): /note="Nucleotide may be methylated to form 5-methylcytosine"
aaccaagagcacagacagttgggtaattttgcttccaaatactgactcagcctctgtaaccgcttcctgggcccaaagaaaactaacgagtgctcccttctcagggacagtgccccaagtgg

SEQ ID NO: 785 - DNA, 122 bp, Homo sapiens
  misc_feature (61)..(62): /note="This region represents a CpG dinucleotide"
  misc_feature (61)..(61): /note="Nucleotide may be methylated to form 5-methylcytosine"
aatgacatctcagcagtggctgacacacccagagcccagatcttgttctctaatgtcattcgccataaaaggaaccagggatccctggagaaatggttgattctagggctgggacaggggat

SEQ ID NO: 786 - DNA, 122 bp, Homo sapiens
  misc_feature (61)..(62): /note="This region represents a CpG dinucleotide"
  misc_feature (61)..(61): /note="Nucleotide may be methylated to form 5-methylcytosine"
ttcctggcctgacaggtttagaatcttccagaaaccgcaccctggaggtgaagcccagggcgccgtctcctctggagaagcctcctgactgtcctccaggggagaaagtggtcacagccgca

SEQ ID NO: 787 - DNA, 122 bp, Homo sapiens
  misc_feature (61)..(62): /note="This region represents a CpG dinucleotide"
  misc_feature (61)..(61): /note="Nucleotide may be methylated to form 5-methylcytosine"
ccgactcgagctaaggcgctctcggccgggcctagctcggagagggcaacttggtttgtacggggtcgggaaatcctaggcaagtccaggccccgcacatccagtccgcaggcccggccact

SEQ ID NO: 788 - DNA, 122 bp, Homo sapiens
  misc_feature (61)..(62): /note="This region represents a CpG dinucleotide"
  misc_feature (61)..(61): /note="Nucleotide may be methylated to form 5-methylcytosine"
agtctagctccagggcatccttgagagtccaaatgaactcagtcagggagctcagggccacgctttgtcatttgccttcaaagaaattgcactctatctgcttaagacagtcttagtgctag

SEQ ID NO: 789 - DNA, 122 bp, Homo sapiens
  misc_feature (61)..(62): /note="This region represents a CpG dinucleotide"
  misc_feature (61)..(61): /note="Nucleotide may be methylated to form 5-methylcytosine"
ccacttaaacaccattctaatttacacctaaatcacacaagcatcctccttctaagaagacgtcataatcgttttgaaaatcattgcaaaattcccaaacttgaaaaaaaagaaaaaaaaaa

SEQ ID NO: 790 - DNA, 122 bp, Homo sapiens
  misc_feature (61)..(62): /note="This region represents a CpG dinucleotide"
  misc_feature (61)..(61): /note="Nucleotide may be methylated to form 5-methylcytosine"
gcagcttggtaaattgttctcaggtggctcctttgtgcctcttctgtggccacaggaagccgtgactgggctttcctgctattccaggaagaggagaagacaggtgcagcgaactgagcacc

SEQ ID NO: 791 - DNA, 122 bp, Homo sapiens
  misc_feature (61)..(62): /note="This region represents a CpG dinucleotide"
  misc_feature (61)..(61): /note="Nucleotide may be methylated to form 5-methylcytosine"
gttccaagttctgagttggggacggtagcaattctccatgaccaaaacactctgcagctgcgtcctttggagcagggaacacgagctgctttgttgacccctcttcaccccagaggcgtgtc

SEQ ID NO: 792 - DNA, 122 bp, Homo sapiens
  misc_feature (61)..(62): /note="This region represents a CpG dinucleotide"
  misc_feature (61)..(61): /note="Nucleotide may be methylated to form 5-methylcytosine"
accaggaatgctcagctacaggtccagttctgcaggaggaacctcgacctggcctatgggcggggaatgcctgggtctgaccccaaggggaaatgaaagtccaggccagccattcaactacc

SEQ ID NO: 793 - DNA, 122 bp, Homo sapiens
  misc_feature (61)..(62): /note="This region represents a CpG dinucleotide"
  misc_feature (61)..(61): /note="Nucleotide may be methylated to form 5-methylcytosine"
ccatgcacaaagaaacagaaagcagaacctgttggcactttcgcacatctcctgtttgtccgccagactagctacagtattttgtactcaatgatgtgacttaagtatcagtaatgattact

SEQ ID NO: 794 - DNA, 122 bp, Homo sapiens
  misc_feature (61)..(62): /note="This region represents a CpG dinucleotide"
  misc_feature (61)..(61): /note="Nucleotide may be methylated to form 5-methylcytosine"
attcagctccttggtcacgagacaggaattgcaaggtggagggaagctgtaattccaacacgtaagtccatggatactccagtaaagcacaggcataggtgccactgatccagcagaggcag

SEQ ID NO: 795 - DNA, 122 bp, Homo sapiens
  misc_feature (61)..(62): /note="This region represents a CpG dinucleotide"
  misc_feature (61)..(61): /note="Nucleotide may be methylated to form 5-methylcytosine"
agtcattatacttacctcacagggtttcaaagttcaaatcaggcaatacgtccaccaaagcgttatgtaaactacaaagcaatgtatgcacgagaagaactgttattcttctcactgaggct

SEQ ID NO: 796 - DNA, 122 bp, Homo sapiens
  misc_feature (61)..(62): /note="This region represents a CpG dinucleotide"
  misc_feature (61)..(61): /note="Nucleotide may be methylated to form 5-methylcytosine"
agtgttaatcgcgtggacaccagactgcttgagtgaaatacaggttctaccatttattaacggagtaatgttgggtaagctatttagccagggtccttatctgtaacatggtgataataata

SEQ ID NO: 797 - DNA, 122 bp, Homo sapiens
  misc_feature (61)..(62): /note="This region represents a CpG dinucleotide"
  misc_feature (61)..(61): /note="Nucleotide may be methylated to form 5-methylcytosine"
ggacatctgttgtgacatcccctgtgtcatgctttatgtcatgctctgtgtgacatcaagcgagtcagcagcccttcctgggacttcagtgccccagtttttgtcattctcaaacatgagtc

SEQ ID NO: 798 - DNA, 122 bp, Homo sapiens
  misc_feature (61)..(62): /note="This region represents a CpG dinucleotide"
  misc_feature (61)..(61): /note="Nucleotide may be methylated to form 5-methylcytosine"
gccgtgatcagctcccactgcactccagcctgggccacagagagagacttcctatctccacgccaagtgccttaggtcacgcctataatcccagcagtttggcaggcagagtgggaggatca

SEQ ID NO: 799 - DNA, 122 bp, Homo sapiens
  misc_feature (61)..(62): /note="This region represents a CpG dinucleotide"
  misc_feature (61)..(61): /note="Nucleotide may be methylated to form 5-methylcytosine"
attaaaacttaaccaaactattcacttttacaagatacacgttagattcaagaacaataacgtgatcttttttgcctttcaggattaaagaatcgggttagtcagtcttggtggtgcatgcc

SEQ ID NO: 800 - DNA, 122 bp, Homo sapiens
  misc_feature (61)..(62): /note="This region represents a CpG dinucleotide"
  misc_feature (61)..(61): /note="Nucleotide may be methylated to form 5-methylcytosine"
ggccctcacctggggaggtggtgaccgcaagcctgacagccccaaagccttcagagatgccgcctggggacactttgggaaagtccaggcggaggacacctgggaatgtgatagtgacacaa

SEQ ID NO: 801 - DNA, 122 bp, Homo sapiens
  misc_feature (61)..(62): /note="This region represents a CpG dinucleotide"
  misc_feature (61)..(61): /note="Nucleotide may be methylated to form 5-methylcytosine"
gtaataactatcattaccccaatacatagcacctttcttctcaaacaattttaaggaattcgagaaataaaaccaaaggtaaagattaagcccaaaatatcatctttattgaaaaaaaaaaa

SEQ ID NO: 802 - DNA, 122 bp, Homo sapiens
  misc_feature (61)..(62): /note="This region represents a CpG dinucleotide"
  misc_feature (61)..(61): /note="Nucleotide may be methylated to form 5-methylcytosine"
gggactactgacttgggttcctttgtggcggccttgctatccaggctcagattgcaggcacggcttccatgatgcaaccacagtgtgagtgtttagtttttagcactcactacaaccacatg

SEQ ID NO: 803 - DNA, 122 bp, Homo sapiens
  misc_feature (61)..(62): /note="This region represents a CpG dinucleotide"
  misc_feature (61)..(61): /note="Nucleotide may be methylated to form 5-methylcytosine"
cacgtcagcggcgggattcgattctcccaggagcgcaaacgctactgagaactgcgcctgcgagggggtccgggctgcgggctccttagaagttaatcctggtgatcccaggtggaacggtt

SEQ ID NO: 804 - DNA, 122 bp, Homo sapiens
  misc_feature (61)..(62): /note="This region represents a CpG dinucleotide"
  misc_feature (61)..(61): /note="Nucleotide may be methylated to form 5-methylcytosine"
aggtgttacccaagcctgtcagcactccccaccagtaagccttgtgtcctcattttacagcgcgagtcatggctggggccttagtggcaacaagtgctgagatcagcgggctcagtagcagg

SEQ ID NO: 805 - DNA, 122 bp, Homo sapiens
  misc_feature (61)..(62): /note="This region represents a CpG dinucleotide"
  misc_feature (61)..(61): /note="Nucleotide may be methylated to form 5-methylcytosine"
gactctgaaatttctctgttggatttcataatacctcatgtgctagatatattcgtagtacgtgctcagatgaaaatgtgttgcttattggtagtgtaatctcacaaatcatgacttttttt

SEQ ID NO: 806 - DNA, 122 bp, Homo sapiens
  misc_feature (61)..(62): /note="This region represents a CpG dinucleotide"
  misc_feature (61)..(61): /note="Nucleotide may be methylated to form 5-methylcytosine"
gaaagattccacagtgaatcagaggcagtacgtggactttaaagctcatagggctgggcgcggtggctcacgtctataatcccaacactttgggaggccaaggcaggtggatcacaaggttg

SEQ ID NO: 807 - DNA, 122 bp, Homo sapiens
  misc_feature (61)..(62): /note="This region represents a CpG dinucleotide"
  misc_feature (61)..(61): /note="Nucleotide may be methylated to form 5-methylcytosine"
ataatttaagaactctttcttgactttagcttctcaatctgtaaaatgggccaatgctgccgctctcctgaaagttcttgcaaggattaacagtgatagtgggtaaaatatctagtcttgct

SEQ ID NO: 808 - DNA, 122 bp, Homo sapiens
  misc_feature (61)..(62): /note="This region represents a CpG dinucleotide"
  misc_feature (61)..(61): /note="Nucleotide may be methylated to form 5-methylcytosine"
aaccgacctctgctgtcctgaagagcgcacactggccaggtttccagtctgcgccaggcacggtgctcagagccttctgtgcatcgtctgggtcaaccctccccacagccctgagggtcatc

SEQ ID NO: 809 - DNA, 122 bp, Homo sapiens
  misc_feature (61)..(62): /note="This region represents a CpG dinucleotide"
  misc_feature (61)..(61): /note="Nucleotide may be methylated to form 5-methylcytosine"
caggacttgcccctatctctgcagaggccggtgtggcctggaggtgctgagcaccttggccgaccaggccccaggtcagaggaatctccccgtgtaccgtgtgactacgccaactttgccca

SEQ ID NO: 810 - DNA, 122 bp, Homo sapiens
  misc_feature (61)..(62): /note="This region represents a CpG dinucleotide"
  misc_feature (61)..(61): /note="Nucleotide may be methylated to form 5-methylcytosine"
cctgccctcaaagaacttctagggaacactgactttgcaggcatgattccgtctgcatcacgcatcagtaaacagctatgtgtactgtagggtattgagacacaatgacgttccctctgctc

SEQ ID NO: 811 - DNA, 122 bp, Homo sapiens
  misc_feature (61)..(62): /note="This region represents a CpG dinucleotide"
  misc_feature (61)..(61): /note="Nucleotide may be methylated to form 5-methylcytosine"
aaggggagaaaacagccaaacagcccaaacctggatactctaggggggaaatgcataatgcgaaggacagccacatgaaactagcaaacattgtctagagccggggaaatgaatcaagagca

SEQ ID NO: 812 - DNA, 122 bp, Homo sapiens
  misc_feature (61)..(62): /note="This region represents a CpG dinucleotide"
  misc_feature (61)..(61): /note="Nucleotide may be methylated to form 5-methylcytosine"
ctgatttcccttcttgaagtacaggatttggaaatcactgccacagcccagttcagctcacgtggacctgccaagaccagcagagtgcacaggaggtccagcagagtgcacaggaggtgcag

SEQ ID NO: 813 - DNA, 122 bp, Homo sapiens
  misc_feature (61)..(62): /note="This region represents a CpG dinucleotide"
  misc_feature (61)..(61): /note="Nucleotide may be methylated to form 5-methylcytosine"
tcctcatcagccatatttgtggtccttattcctgttgctgcctctgaggccctgtctctacgtaatgagtccttatgaggtttgcttgagcaaatagttataaaacacttagaacagtggct

SEQ ID NO: 814 - DNA, 122 bp, Homo sapiens
  misc_feature (61)..(62): /note="This region represents a CpG dinucleotide"
  misc_feature (61)..(61): /note="Nucleotide may be methylated to form 5-methylcytosine"
cagtggctcaactcagtgacattgtcacagttgttgcaaacactaggaagacacaagtgacgtgtgagccacccaggggaggctccagacagaatatatgctaattgcttcataaatcacag

SEQ ID NO: 815 - DNA, 122 bp, Homo sapiens
  misc_feature (61)..(62): /note="This region represents a CpG dinucleotide"
  misc_feature (61)..(61): /note="Nucleotide may be methylated to form 5-methylcytosine"
aaccatcaccacaatccagttttagaacatttccactgccccagacaagcactgattgcacgatgcccatttgcagtcattcctcctcccacaccccgaccaccactgatctgctttccatg

SEQ ID NO: 816 - DNA, 122 bp, Homo sapiens
  misc_feature (61)..(62): /note="This region represents a CpG dinucleotide"
  misc_feature (61)..(61): /note="Nucleotide may be methylated to form 5-methylcytosine"
gaaaaggctcagttgctcctggagtccacacccttctcccccgaggggccctagtggttacgtcccttggagtgcacagccctgcctgccccaggcactggagcctctcaacctccctaaag

SEQ ID NO: 817 - DNA, 122 bp, Homo sapiens
  misc_feature (61)..(62): /note="This region represents a CpG dinucleotide"
  misc_feature (61)..(61): /note="Nucleotide may be methylated to form 5-methylcytosine"
ctctcaggcgttaggcagctggatgacttcccgcttcacgcagcaaaggccaggggcttgcgcgcctctgcagagttgttgctagggagacttgtgtcatcatccacaaccttgtttctcac

SEQ ID NO: 818 - DNA, 122 bp, Homo sapiens
  misc_feature (61)..(62): /note="This region represents a CpG dinucleotide"
  misc_feature (61)..(61): /note="Nucleotide may be methylated to form 5-methylcytosine"
actcaagctggccatttaatccttgagagtcctggagctgtctagatacctctctgagtacgtgcacacaatatcaggtgtggcctgaataatgcagaatatcatgtctggggtagcactct

SEQ ID NO: 819 - DNA, 122 bp, Homo sapiens
  misc_feature (61)..(62): /note="This region represents a CpG dinucleotide"
  misc_feature (61)..(61): /note="Nucleotide may be methylated to form 5-methylcytosine"
gaccttatttaataatatcattagttatcatttattggactctgaactgagctcccaacacggaagatgtaagatttatctgcattttacagatgagaagacagaggcaccaagcagtataa

SEQ ID NO: 820 - DNA, 122 bp, Homo sapiens
  misc_feature (61)..(62): /note="This region represents a CpG dinucleotide"
  misc_feature (61)..(61): /note="Nucleotide may be methylated to form 5-methylcytosine"
atttagcctgctataaacatagacaagagttgttactacattacataatgggcattatcacgaagaacctcaggaaagatctgaagcaagagtaccagcacagtgtgaaaacctccaaaagc

SEQ ID NO: 821 - DNA, 122 bp, Homo sapiens
  misc_feature (61)..(62): /note="This region represents a CpG dinucleotide"
  misc_feature (61)..(61): /note="Nucleotide may be methylated to form 5-methylcytosine"
actgcagctgcagaggtcctcagatctggtttcccttccttgagaggcccagttcctattcgtttcctgtctctgctactgactacctccgcccaccctcaacctcaccggctcccacttta

SEQ ID NO: 822 - DNA, 122 bp, Homo sapiens
  misc_feature (61)..(62): /note="This region represents a CpG dinucleotide"
  misc_feature (61)..(61): /note="Nucleotide may be methylated to form 5-methylcytosine"
gaaatgcagagaggaaataaggagtcagaaaggatgacctggagtagcaggaaagtagcacgaaagacacagagggagcagcatatgcaaagttacaggttaagtgcatgatgcattcagga

SEQ ID NO: 823 - DNA, 122 bp, Homo sapiens
  misc_feature (61)..(62): /note="This region represents a CpG dinucleotide"
  misc_feature (61)..(61): /note="Nucleotide may be methylated to form 5-methylcytosine"
gccagtacagcctccggaagcagccctacaacaacctgaagcacaagttcccatggctgtcggaggccgggctgcgcctgctgcacttcctgttcatgtacgaccctaagaaaaggtgctga

SEQ ID NO: 824 - DNA, 122 bp, Homo sapiens
  misc_feature (61)..(62): /note="This region represents a CpG dinucleotide"
  misc_feature (61)..(61): /note="Nucleotide may be methylated to form 5-methylcytosine"
ctggcttctattccagtttctgccacttgttggctctatgaccctaaataagccatttatcgttctctaaactttggtttcttcagcttaaaaataacaactgacaagacttgccattcgga

SEQ ID NO: 825 - DNA, 122 bp, Homo sapiens
  misc_feature (61)..(62): /note="This region represents a CpG dinucleotide"
  misc_feature (61)..(61): /note="Nucleotide may be methylated to form 5-methylcytosine"
cacccctgtggctctaggaatcagccatacaatcgacttactgctcagatcattagctgacgagaccccaatgactcatcacatctgttggttaattgagagtgagaggactggagcacaca

SEQ ID NO: 826 - DNA, 122 bp, Homo sapiens
  misc_feature (61)..(62): /note="This region represents a CpG dinucleotide"
  misc_feature (61)..(61): /note="Nucleotide may be methylated to form 5-methylcytosine"
caaagaacaataaagtccggtgaattcccatacctccagtcatcaggcacagttactggtcggtgcagggcaggccagaagtgaccaaggcccaagagactcagacggccattcacaggcat

SEQ ID NO: 827 - DNA, 122 bp, Homo sapiens
  misc_feature (61)..(62): /note="This region represents a CpG dinucleotide"
  misc_feature (61)..(61): /note="Nucleotide may be methylated to form 5-methylcytosine"
gcatgtccttaggttttacccattcatcaaactgctctgctgtgagagagccaagttcaacggcagtttcctttaaggttgatccattttggggtgttgtcttagcaattctgctgttttgt

SEQ ID NO: 828 - DNA, 122 bp, Homo sapiens
  misc_feature (61)..(62): /note="This region represents a CpG dinucleotide"
  misc_feature (61)..(61): /note="Nucleotide may be methylated to form 5-methylcytosine"
ctaaagcaacatttcccagggtcccctgccacaacctctccctgggagctgggaattgagcgcagccagctggactctggttagtgggtttcataacgtgtttctgttttgcatagcgtaaa

SEQ ID NO: 829 - DNA, 122 bp, Homo sapiens
  misc_feature (61)..(62): /note="This region represents a CpG dinucleotide"
  misc_feature (61)..(61): /note="Nucleotide may be methylated to form 5-methylcytosine"
ggtggtgatggacaggggcagcaccaccaggtcctggccgggctctcgcacctggcgtcccgccttcaacagcctgcccttgttcatgatctggggggacaggctggcatcaggctggggag

SEQ ID NO: 830 - DNA, 122 bp, Homo sapiens
  misc_feature (61)..(62): /note="This region represents a CpG dinucleotide"
  misc_feature (61)..(61): /note="Nucleotide may be methylated to form 5-methylcytosine"
caactacctgaaacatgctcactgtaaagaataaaatttataataacatgtatttcattacgtgaaggcttaagcacaactaaaccagaagacaataaagtacaatgaagtagtccaatccc

SEQ ID NO: 831 - DNA, 122 bp, Homo sapiens
  misc_feature (61)..(62): /note="This region represents a CpG dinucleotide"
  misc_feature (61)..(61): /note="Nucleotide may be methylated to form 5-methylcytosine"
accttccttcctggaagacacgttcccatcttgagggaggatcccaagttggcacctccccgctttaggcttaggcgcattgtgcccgccttccggcccgcctggtccccgctttaggctta

SEQ ID NO: 832 - DNA, 122 bp, Homo sapiens
  misc_feature (61)..(62): /note="This region represents a CpG dinucleotide"
  misc_feature (61)..(61): /note="Nucleotide may be methylated to form 5-methylcytosine"
gtcccatgggctccagaatcaagccagcttagccaggctgtgttgggtgactcagcggagcgcttgccatggagtcccttgctgtggccaccatggtctcgtgctgtgcctgccatcacctc

SEQ ID NO: 833 - DNA, 122 bp, Homo sapiens
  misc_feature (61)..(62): /note="This region represents a CpG dinucleotide"
  misc_feature (61)..(61): /note="Nucleotide may be methylated to form 5-methylcytosine"
agctcagcctctcggattccccgggacccacggcttataatgcgcttaaatcccacgcctcgcccgagagacagcacgtcaccgtcaccgtcaccgcctagcgcccctgacccgctcccact

SEQ ID NO: 834 - DNA, 122 bp, Homo sapiens
  misc_feature (61)..(62): /note="This region represents a CpG dinucleotide"
  misc_feature (61)..(61): /note="Nucleotide may be methylated to form 5-methylcytosine"
agacagagcaagatcctgtctcaaaaaaaaaaaaaaaaaaagtataagcgtcgtgctgtacggtgacacatcttgtgagagttggcatcaggactcaagcccaggagacacagttctcttac

SEQ ID NO: 835 - DNA, 122 bp, Homo sapiens
  misc_feature (61)..(62): /note="This region represents a CpG dinucleotide"
  misc_feature (61)..(61): /note="Nucleotide may be methylated to form 5-methylcytosine"
ctacactcagaaggtgaaacaggaaaatttttttctccgcacccacattccaatcattcacggaataggatcgactccataatgactgtgatgctggaaaaaatttactaaatatgtactta

SEQ ID NO: 836 - DNA, 122 bp, Homo sapiens
  misc_feature (61)..(62): /note="This region represents a CpG dinucleotide"
  misc_feature (61)..(61): /note="Nucleotide may be methylated to form 5-methylcytosine"
ggaaactagccacttgagaaggaagctcagcttttctgggctttagaggagatggagacacgttggaaattcccgtaaccaataggctggggtgggagggtgttcttcccacacacacacaa

SEQ ID NO: 837 - DNA, 122 bp, Homo sapiens
  misc_feature (61)..(62): /note="This region represents a CpG dinucleotide"
  misc_feature (61)..(61): /note="Nucleotide may be methylated to form 5-methylcytosine"
atctcttggctgccacagaatgctcaggtagggacagctgatgagagccatccttcaggccgttgcgacattctcctagctgcacttcctgctactgggaagggtggggttgctttcctggg

SEQ ID NO: 838 - DNA, 122 bp, Homo sapiens
  misc_feature (61)..(62): /note="This region represents a CpG dinucleotide"
  misc_feature (61)..(61): /note="Nucleotide may be methylated to form 5-methylcytosine"
cagctctgaggagagatgtgtaagcagctgtacctcctgtggagctacctcttcctctagcggtctgtgggactcagccagcttcacaagattcaggaaatgaggagggcggggtgataaaa

SEQ ID NO: 839 - DNA, 122 bp, Homo sapiens
  misc_feature (61)..(62): /note="This region represents a CpG dinucleotide"
  misc_feature (61)..(61): /note="Nucleotide may be methylated to form 5-methylcytosine"
catctcttagaacagcaagtatctatcatgcccgggcaagtgacaggaatactccaccatcgtgtgtgtttgcatgcactcacatacccctaggtatgtagtttaaaagatactttgtccaa

SEQ ID NO: 840 - DNA, 122 bp, Homo sapiens
  misc_feature (61)..(62): /note="This region represents a CpG dinucleotide"
  misc_feature (61)..(61): /note="Nucleotide may be methylated to form 5-methylcytosine"
agagcctgcacctgctcacctcttttccaggtgggaatgttggaagagaagtggaaagggcgtagtgactctcaagcagggttactgccaccttggcgacatttgttagtttgcgtgttaat

SEQ ID NO: 841 - DNA, 122 bp, Homo sapiens
  misc_feature (61)..(62): /note="This region represents a CpG dinucleotide"
  misc_feature (61)..(61): /note="Nucleotide may be methylated to form 5-methylcytosine"
acttacacctaagaaaacaatttgcttagaagaccttaggatataggatctacatctctccgcatcctgtgtttatgctcctgtatgttccaggttggcccaacaagccagaaggaagagcc

SEQ ID NO: 842 - DNA, 122 bp, Homo sapiens
  misc_feature (61)..(62): /note="This region represents a CpG dinucleotide"
  misc_feature (61)..(61): /note="Nucleotide may be methylated to form 5-methylcytosine"
aatgccttacccagagaggaacaaggaaatgtattatgttagaattctttctggaaatcacgtgagcagaaagaggagtggggtaaaatatttacactattgaaagaaaagacacccacttg

SEQ ID NO: 843 - DNA, 122 bp, Homo sapiens
  misc_feature (61)..(62): /note="This region represents a CpG dinucleotide"
  misc_feature (61)..(61): /note="Nucleotide may be methylated to form 5-methylcytosine"
caacaacaaagcaaattagacgggaaagcaggaaagctgtgcagaaattctgacctgaaacgcttcgcatccggtctctgcttgttgaaggaccttcaccgctatttctgagaagagcaaaa

SEQ ID NO: 844 - DNA, 122 bp, Homo sapiens
  misc_feature (61)..(62): /note="This region represents a CpG dinucleotide"
  misc_feature (61)..(61): /note="Nucleotide may be methylated to form 5-methylcytosine"
gggaaaatggggctacatcactggggtgttgccggtctcaaagccgtcaatgcctgaacccgccagggttgttcttggaggtttggctgcatggctgcaaggttccccatgttgccatggcg

SEQ ID NO: 845 - DNA, 122 bp, Homo sapiens
  misc_feature (61)..(62): /note="This region represents a CpG dinucleotide"
  misc_feature (61)..(61): /note="Nucleotide may be methylated to form 5-methylcytosine"
tgaggtatgtgtctacagaaggtgctagcatagtgctggtgtgtgtcatacacgaggccacgccctacacttgtgcaagttttctgtgacctctgggatctgaaagatcagtatttcctaga

SEQ ID NO: 846 - DNA, 122 bp, Homo sapiens
  misc_feature (61)..(62): /note="This region represents a CpG dinucleotide"
  misc_feature (61)..(61): /note="Nucleotide may be methylated to form 5-methylcytosine"
aggggagtgagtgagaggatgcaccacagccttggttcacgcctgaagaaactgaggccacgagaggggaagtgaccagctcagtgccacaccaccagcagatccaagtggctgtgagtcag

SEQ ID NO: 847 - DNA, 122 bp, Homo sapiens
  misc_feature (61)..(62): /note="This region represents a CpG dinucleotide"
  misc_feature (61)..(61): /note="Nucleotide may be methylated to form 5-methylcytosine"
cccagaaatggattaacaagccctgactcccctcttggtgcaaggtcagccctgcacttacgaggctccaagcctggctcttcaccaggcactctgtgaggaaggagcacccattcaaaaca

SEQ ID NO: 848 - DNA, 122 bp, Homo sapiens
  misc_feature (61)..(62): /note="This region represents a CpG dinucleotide"
  misc_feature (61)..(61): /note="Nucleotide may be methylated to form 5-methylcytosine"
accagcaatgccatatttaattcttctctctcttcaaatcactttgacttccttcagtaccgccagatggagaaagctctcagctttttgtgtgtgattaggttaagtcgacctggataatc

SEQ ID NO: 849 - DNA, 122 bp, Homo sapiens
  misc_feature (61)..(62): /note="This region represents a CpG dinucleotide"
  misc_feature (61)..(61): /note="Nucleotide may be methylated to form 5-methylcytosine"
ccctaggcagggctagtgtttggggaccaagccctgcttaagactatctctgtgttcaagcgtagcagcagggagcagtggcacaaagtggacggagacctcaccgctacttcctgtacaac

SEQ ID NO: 850 - DNA, 122 bp, Homo sapiens
  misc_feature (61)..(62): /note="This region represents a CpG dinucleotide"
  misc_feature (61)..(61): /note="Nucleotide may be methylated to form 5-methylcytosine"
gaagcagagtgacaactctgagggaaccaagaaagcccaaaggggagacaaggtttagagcgaaatcaagatcggattttgtcatgaaaggcagaactggcaaaagcatcattacaaggcat

SEQ ID NO: 851 - DNA, 122 bp, Homo sapiens
  misc_feature (61)..(62): /note="This region represents a CpG dinucleotide"
  misc_feature (61)..(61): /note="Nucleotide may be methylated to form 5-methylcytosine"
atctgcccgcctcagcctcccaaagtgctgggattacaggcatgagccaccgcacctcgccgggtaatgattcttgagacaagaggtggttaagtagcattattatgtaatgtttatatacc

SEQ ID NO: 852 - DNA, 122 bp, Homo sapiens
  misc_feature (61)..(62): /note="This region represents a CpG dinucleotide"
  misc_feature (61)..(61): /note="Nucleotide may be methylated to form 5-methylcytosine"
gtgcactggggttttcttatcagcttgtccagatgtggaaccaaatggaaagggcagtcacggggcttgaaagttgtcagcagccaaacgtcaaaactggaattagactcttaattatatgt

SEQ ID NO: 853 - DNA, 122 bp, Homo sapiens
  misc_feature (61)..(62): /note="This region represents a CpG dinucleotide"
  misc_feature (61)..(61): /note="Nucleotide may be methylated to form 5-methylcytosine"
acacagcatccctttaaatgaccctggagaccgtgatttgccattgccagacaggatggacgggaacagataggcaactgtgtgcgatcacaggacataatggaatgaaatgtcagatcagg

SEQ ID NO: 854 - DNA, 122 bp, Homo sapiens
  misc_feature (61)..(62): /note="This region represents a CpG dinucleotide"
  misc_feature (61)..(61): /note="Nucleotide may be methylated to form 5-methylcytosine"
cagaagttgctgaggacagaagttagtctgtaatccttcagggtgttacacaagagctaacggcaggagagctgccctccctaaataggtatggagaagggaatggggagggagggctttct

SEQ ID NO: 855 - DNA, 122 bp, Homo sapiens
  misc_feature (61)..(62): /note="This region represents a CpG dinucleotide"
  misc_feature (61)..(61): /note="Nucleotide may be methylated to form 5-methylcytosine"
agaaggcaccaccatggaaacaggagaggtgaggagaagggcagaggtgacccacaaatgcggctcagtgccttacagcagagagctcatgagagaacagaactggttagtcaccgactctg

SEQ ID NO: 856 - DNA, 122 bp, Homo sapiens
  misc_feature (61)..(62): /note="This region represents a CpG dinucleotide"
  misc_feature (61)..(61): /note="Nucleotide may be methylated to form 5-methylcytosine"
cattccaacagacaatagaagtagaggtctgaagtttgagagagaaatcagagttaggagcgtagattagggagagaagcagatagtgtcattgctttcccagattccttcaaatcccttta

SEQ ID NO: 857 - DNA, 122 bp, Homo sapiens
  misc_feature (61)..(62): /note="This region represents a CpG dinucleotide"
  misc_feature (61)..(61): /note="Nucleotide may be methylated to form 5-methylcytosine"
gctttttctttcttcttttcttccaccccatggaaatgtctacattcttttgctatgtttcgtctgttgtgcaatttcattttgctaatgaggcatctgagctgtggccgaccggttgattg

SEQ ID NO: 858 - DNA, 122 bp, Homo sapiens
  misc_feature (61)..(62): /note="This region represents a CpG dinucleotide"
  misc_feature (61)..(61): /note="Nucleotide may be methylated to form 5-methylcytosine"
taaaggaggatccacagaacattcatgtaattactacaattaacaaggagatgcaagtcacggccagggactagtaagttctgctataaacacacaatcacagagcaataaaggattttggc

SEQ ID NO: 859 - DNA, 122 bp, Homo sapiens
  misc_feature (61)..(62): /note="This region represents a CpG dinucleotide"
  misc_feature (61)..(61): /note="Nucleotide may be methylated to form 5-methylcytosine"
ttacacacattgactcattcaatccttacaataaccctcttaaggtatatgctactatgacgcccatggcaatgatgaagcaactctggcattaaaaggtgaaatgacttactcaagattgc

SEQ ID NO: 860 - DNA, 122 bp, Homo sapiens
  misc_feature (61)..(62): /note="This region represents a CpG dinucleotide"
  misc_feature (61)..(61): /note="Nucleotide may be methylated to form 5-methylcytosine"
gtacttacctaatacacctcacatgacgtggttacgtaatgtgtgggggttgtacacctgcgctccaaatgtgctaagtcatgctgtgctggaagtcccagcctactcttgactaaagcaca

SEQ ID NO: 861 - DNA, 122 bp, Homo sapiens
  misc_feature (61)..(62): /note="This region represents a CpG dinucleotide"
  misc_feature (61)..(61): /note="Nucleotide may be methylated to form 5-methylcytosine"
tgtttaattgctgctggctaacaagaaaagaacagaggcggatttaatgcgtaaatgatgcgttgaagccaagtgaaggccaaatgatgtaacagcccgctgtgcaaacaaaagtattgcag

SEQ ID NO: 862 - DNA, 122 bp, Homo sapiens
  misc_feature (61)..(62): /note="This region represents a CpG dinucleotide"
  misc_feature (61)..(61): /note="Nucleotide may be methylated to form 5-methylcytosine"
aatgatgagacaaaacaaatgaaagagcctagaatgttcttggctaggagaactttaatacgtgttagttgagcctgtgaagtccagaagccctacagctagtcttgtttctaagaattagt

SEQ ID NO: 863 - DNA, 122 bp, Homo sapiens
  misc_feature (61)..(62): /note="This region represents a CpG dinucleotide"
  misc_feature (61)..(61): /note="Nucleotide may be methylated to form 5-methylcytosine"
tacggtctttggaaaagcagaagttatttccaatgacacatactatttgctgaaaatttacggtagattgactcatgcatctttgcattgtacttagattaaaattctatagctttggttga

SEQ ID NO: 864 - DNA, 122 bp, Homo sapiens
  misc_feature (61)..(62): /note="This region represents a CpG dinucleotide"
  misc_feature (61)..(61): /note="Nucleotide may be methylated to form 5-methylcytosine"
ctccaggcgtgagccaccacccccggcctctttcatgaatttcattcagacaatctcttacggcattttctgtcttaatctaggataaggtttcttaacattggctctgttgacatttgggt

SEQ ID NO: 865 - DNA, 122 bp, Homo sapiens
  misc_feature (61)..(62): /note="This region represents a CpG dinucleotide"
  misc_feature (61)..(61): /note="Nucleotide may be methylated to form 5-methylcytosine"
gcagtgagtgcttggaagcacttttgctggtatgtttcttcattgtgccagactctcttacgccctctagtacattcagcatccttgggcttggccactgaatgtgggcagcagtcccatca

SEQ ID NO: 866 - DNA, 122 bp, Homo sapiens
  misc_feature (61)..(62): /note="This region represents a CpG dinucleotide"
  misc_feature (61)..(61): /note="Nucleotide may be methylated to form 5-methylcytosine"
aatgactgttcagctttgctgcagggtcaccttgcaccagcaagcagattcttctcagtgcgcctatttccctattgcatcatgggtgcagcaatccctgccctgcccagctcatagggtgc

SEQ ID NO: 867 - DNA, 122 bp, Homo sapiens
  misc_feature (61)..(62): /note="This region represents a CpG dinucleotide"
  misc_feature (61)..(61): /note="Nucleotide may be methylated to form 5-methylcytosine"
cccttgcaactatcagggcagccttggggctttcacaggcgtggtgaggacctgtccttgcgtgtttccctcttaccatgttaccatggaaacacaccatgcatggaccttaccctgcggat

SEQ ID NO: 868 - DNA, 122 bp, Homo sapiens
  misc_feature (61)..(62): /note="This region represents a CpG dinucleotide"
  misc_feature (61)..(61): /note="Nucleotide may be methylated to form 5-methylcytosine"
gtggttaccttacaattcagaatgaactttgaacaaatccctgaagacaacgaggctggccgtggatgtgcagctgccttgcgccttagtgtgtcatctgtaaaatgaggtaatagcaacgt

SEQ ID NO: 869 - DNA, 122 bp, Homo sapiens
  misc_feature (61)..(62): /note="This region represents a CpG dinucleotide"
  misc_feature (61)..(61): /note="Nucleotide may be methylated to form 5-methylcytosine"
gctctgcacagatgaggaactggcagcctttgacctcctatctgatctctgagtcttagccgtgaggtcacctatcaggtctagcatgttctgttggtctgctggatcctgcctcatgtatt

SEQ ID NO: 870 - DNA, 122 bp, Homo sapiens
  misc_feature (61)..(62): /note="This region represents a CpG dinucleotide"
  misc_feature (61)..(61): /note="Nucleotide may be methylated to form 5-methylcytosine"
tgaatcttaagcacattatgctaagtaaaatgaggcagtcacaaaaggacaaatactatacggtctcactcagacgaggcacttatggtagtcaaattcagagacagaaagtagaatgggat

SEQ ID NO: 871 - DNA, 122 bp, Homo sapiens
  misc_feature (61)..(62): /note="This region represents a CpG dinucleotide"
  misc_feature (61)..(61): /note="Nucleotide may be methylated to form 5-methylcytosine"
acgaaaccccagagagagcagccagctaagtgacaaagctggtttctgaacacacgggcccgtgtatttgttcattgcattacgtggtggcccagggggatggatttccaacctgggtgtgc

SEQ ID NO: 872 - DNA, 122 bp, Homo sapiens
  misc_feature (61)..(62): /note="This region represents a CpG dinucleotide"
  misc_feature (61)..(61): /note="Nucleotide may be methylated to form 5-methylcytosine"
ggttccaaatcccagccagtcctcccagaagccaaagagaagccagcctctaagaaggaacggatagctgatgtgaagaaggtatctactttgccctgcagtacaaatgtgctgctagccta

SEQ ID NO: 873 - DNA, 122 bp, Homo sapiens
  misc_feature (61)..(62): /note="This region represents a CpG dinucleotide"
  misc_feature (61)..(61): /note="Nucleotide may be methylated to form 5-methylcytosine"
tgcccagaagggtttcctattgtgacacctcatttccttcttaggatcatgggattttgtcgtttgcctcttctgtggatgagtgaatctcatcccaagagcctgttttcgatgtatggggt

SEQ ID NO: 874 - DNA, 122 bp, Homo sapiens
  misc_feature (61)..(62): /note="This region represents a CpG dinucleotide"
  misc_feature (61)..(61): /note="Nucleotide may be methylated to form 5-methylcytosine"
accatcctgcctcttgccagtttgagcaatccttgccaatgttatgtaaccaagcacaggcgttcaagaacaggcgagagggctgctcacataggttcttctacactgggaggcggggaatt

SEQ ID NO: 875 - DNA, 122 bp, Homo sapiens
  misc_feature (61)..(62): /note="This region represents a CpG dinucleotide"
  misc_feature (61)..(61): /note="Nucleotide may be methylated to form 5-methylcytosine"
ccctgaggggaggtgcttctgttttctgctttccctgtaagctgctgtgctgagcagcaacgtcagaactaatgcatgtggtcatcagtggatgagcaggattacataaggcctttactgtg

SEQ ID NO: 876 - DNA, 122 bp, Homo sapiens
  misc_feature (61)..(62): /note="This region represents a CpG dinucleotide"
  misc_feature (61)..(61): /note="Nucleotide may be methylated to form 5-methylcytosine"
agtctgttttcacaccgctaaaaagagctacctgagactgggtaatttatgaagaaaatacgtttaatcacctcaaagttccataggcagtacaggaagcatggctgggaggcctcaggaaa

SEQ ID NO: 877 - DNA, 122 bp, Homo sapiens
  misc_feature (61)..(62): /note="This region represents a CpG dinucleotide"
  misc_feature (61)..(61): /note="Nucleotide may be methylated to form 5-methylcytosine"
tgtaaccaagttggctctccttgccttccccccaggccacgatttcgtcatcctgctttacggatggcatttcctattaagtgtctgtctgtgaacataaacatggagctgagacaaagcac

SEQ ID NO: 878 - DNA, 122 bp, Homo sapiens
  misc_feature (61)..(62): /note="This region represents a CpG dinucleotide"
  misc_feature (61)..(61): /note="Nucleotide may be methylated to form 5-methylcytosine"
gtgagtctctggtattgggttttatctgatgtctgatggcaaggacagtttattcctagacggataggtcccaagttgttaggcaagctcacctttagtaagttgtgaagccttacatccca

SEQ ID NO: 879 - DNA, 122 bp, Homo sapiens
  misc_feature (61)..(62): /note="This region represents a CpG dinucleotide"
  misc_feature (61)..(61): /note="Nucleotide may be methylated to form 5-methylcytosine"
gcatccaggtctgttaggacaccctgccctcagggacctcatgtctggtagacaagggaacgaggaaatgacttctgacaggattttgcaaaagaaagaaaaccaggcaaagcaccaggtca

SEQ ID NO: 880 - DNA, 122 bp, Homo sapiens
  misc_feature (61)..(62): /note="This region represents a CpG dinucleotide"
  misc_feature (61)..(61): /note="Nucleotide may be methylated to form 5-methylcytosine"
tgtttattttttttccccttctcccagcaaaatacacaggtatctgactatgtagagacacgaagccacctatcctgaccaaacttggcagtggtcaggggataggaggaagtgtagtgcca

SEQ ID NO: 881 - DNA, 122 bp, Homo sapiens
  misc_feature (61)..(62): /note="This region represents a CpG dinucleotide"
  misc_feature (61)..(61): /note="Nucleotide may be methylated to form 5-methylcytosine"
gccccaggctgtctgactctagagcccaccccctcagcttcagcaggctgcctccctccccgccacctgctagggaagcagctgactcatggcttttgattcattcagttctcttctgcatt

SEQ ID NO: 882 - DNA, 122 bp, Homo sapiens
  misc_feature (61)..(62): /note="This region represents a CpG dinucleotide"
  misc_feature (61)..(61): /note="Nucleotide may be methylated to form 5-methylcytosine"
gatatgtacgctttgtgccgaacacttatgattcattcacttttgtgcatgcatgttatacgtcaataacaatattaattttttaaaaaagggccaggtgcagtggctctcacctgtaatcc

SEQ ID NO: 883 - DNA, 122 bp, Homo sapiens
  misc_feature (61)..(62): /note="This region represents a CpG dinucleotide"
  misc_feature (61)..(61): /note="Nucleotide may be methylated to form 5-methylcytosine"
gaagccaggtgacacgtggaaatcctagctgcatgagagtctggaaatgtcctctctagccgtccagcctctaaagtacaagaagtcatgatggaaagaaggaggtttggagaggggctgag

SEQ ID NO: 884 - DNA, 122 bp, Homo sapiens
  misc_feature (61)..(62): /note="This region represents a CpG dinucleotide"
  misc_feature (61)..(61): /note="Nucleotide may be methylated to form 5-methylcytosine"
gatgtggcaataagggctaagtctttacggggcttcacattgctcttccagctggtgttccgccctcgaggcgtccttctaatgactacctgtgggcaaagacagcccgacagactttattt

SEQ ID NO: 885 - DNA, 122 bp, Homo sapiens
  misc_feature (61)..(62): /note="This region represents a CpG dinucleotide"
  misc_feature (61)..(61): /note="Nucleotide may be methylated to form 5-methylcytosine"
accccagcatttctgggtttgatttgctatatgggagagtatctctgtgtcttttgtccacgttattatttgttatgaaaaattatgagcatgttccctaagactaggttttctagcatggt

SEQ ID NO: 886 - DNA, 122 bp, Homo sapiens
  misc_feature (61)..(62): /note="This region represents a CpG dinucleotide"
  misc_feature (61)..(61): /note="Nucleotide may be methylated to form 5-methylcytosine"
tcatggtttcagagggttcttctatccaagaggaagtcagtcctctgaagaccaagtttgcgtactggacaatttgagctgacagcagctgccaactcatgctcggctcttcacggtggact

SEQ ID NO: 887 - DNA, 122 bp, Homo sapiens
  misc_feature (61)..(62): /note="This region represents a CpG dinucleotide"
  misc_feature (61)..(61): /note="Nucleotide may be methylated to form 5-methylcytosine"
tgcaaccctcacctccttcccttctgatgtcctcactcccattggtcatgtgacccttaacgcccatcccaagctcagtgccaattccttgccccagggtcctggggattgacatggatccc

SEQ ID NO: 888 - DNA, 122 bp, Homo sapiens
  misc_feature (61)..(62): /note="This region represents a CpG dinucleotide"
  misc_feature (61)..(61): /note="Nucleotide may be methylated to form 5-methylcytosine"
tgaagtttaattatggacacatttcagttcaaagtgctaaacaggtgaagcagagtagcacggaactagaaaatctagaaaactaggaaaatcaagtaagttacaaaattaagggagatgat

SEQ ID NO: 889 - DNA, 122 bp, Homo sapiens
  misc_feature (61)..(62): /note="This region represents a CpG dinucleotide"
  misc_feature (61)..(61): /note="Nucleotide may be methylated to form 5-methylcytosine"
taaaaaataaaggcatgggtttggtttcgaataaagaccttgaagtgcttggcaggtgtccgctcccggagcgccgcgggtcccctgctcctgtcggcgcccgtgcctcaggcggtcccgat

SEQ ID NO: 890 - DNA, 122 bp, Homo sapiens
  misc_feature (61)..(62): /note="This region represents a CpG dinucleotide"
  misc_feature (61)..(61): /note="Nucleotide may be methylated to form 5-methylcytosine"
gaaccagcctatccccactccatggtggcactgtgagcactgagtgggctttgtgtgtggcgcagctcagggcctggcaggggcgagtgtgagccctcccttcccttgttttgttttctcct

SEQ ID NO: 891 - DNA, 122 bp, Homo sapiens
  misc_feature (61)..(62): /note="This region represents a CpG dinucleotide"
  misc_feature (61)..(61): /note="Nucleotide may be methylated to form 5-methylcytosine"
aacatgttaagggtcaaatgtctcagttcctgaattttgatggtgcaatacaaagcagaccgcttggtttgaaggcagctttgatcctgttataagatgatcaaaggctcaaaagatttttc

SEQ ID NO: 892 - DNA, 122 bp, Homo sapiens
  misc_feature (61)..(62): /note="This region represents a CpG dinucleotide"
  misc_feature (61)..(61): /note="Nucleotide may be methylated to form 5-methylcytosine"
accctttcagttctggtactgggcagtgggctctctccactcgctgcctaggcccttcgacgctcccacccagaaatgatgacatggctagtgaggctgacagtcttgctgtaattgggaga

SEQ ID NO: 893 - DNA, 122 bp, Homo sapiens
  misc_feature (61)..(62): /note="This region represents a CpG dinucleotide"
  misc_feature (61)..(61): /note="Nucleotide may be methylated to form 5-methylcytosine"
gaaaccttggtagggtcatttcaaacacattcttatagatttcatcaccagctctgtgtccgtcagcttatgaagtaacctgctgggctgagtgtttctatcctatccccagtttaccagca

SEQ ID NO: 894 - DNA, 122 bp, Homo sapiens
  misc_feature (61)..(62): /note="This region represents a CpG dinucleotide"
  misc_feature (61)..(61): /note="Nucleotide may be methylated to form 5-methylcytosine"
cgcctccatcccctgccgcgtagcccacgcatccaacctcttgagggaaaggcgggagggcggtgtctcccaaaagagctcccacctcttgtgttggcactgcacattgatgccattcttag

SEQ ID NO: 895 - DNA, 122 bp, Homo sapiens
  misc_feature (61)..(62): /note="This region represents a CpG dinucleotide"
  misc_feature (61)..(61): /note="Nucleotide may be methylated to form 5-methylcytosine"
ggtgccccaggagagccagctggctgggcagcccttcttccccaaaggcagctggtattgcgtagggacagccaggtcaccgagtggccgtcacaacaaaccccagcacagtccagcccggc

SEQ ID NO: 896 - DNA, 122 bp, Homo sapiens
  misc_feature (61)..(62): /note="This region represents a CpG dinucleotide"
  misc_feature (61)..(61): /note="Nucleotide may be methylated to form 5-methylcytosine"
gaaaaaaaagtgctagctgggcactactgttctgattagagagaggaggaaactaaggcacggagaggttaagtaatttgccccaggtttcgtagctaacaagtgaaggagccagaatttca

SEQ ID NO: 897 - DNA, 122 bp, Homo sapiens
  misc_feature (61)..(62): /note="This region represents a CpG dinucleotide"
  misc_feature (61)..(61): /note="Nucleotide may be methylated to form 5-methylcytosine"
aattatattggtcttaaatactaagacccattgcgccccatttagtgataagaaacatgacggtatctcctcagatactttgtttttaaagagcaggctaaagagattattgtattctgttt

SEQ ID NO: 898 - DNA, 122 bp, Homo sapiens
  misc_feature (61)..(62): /note="This region represents a CpG dinucleotide"
  misc_feature (61)..(61): /note="Nucleotide may be methylated to form 5-methylcytosine"
aagggtagacaaagttgggctgcaggacattaatttttgattttcacatcttcactatggcggagattttgttaagatcagaggaatatccattccatgtagtttgcagtttaaccaaagtt

SEQ ID NO: 899 - DNA, 122 bp, Homo sapiens
  misc_feature (61)..(62): /note="This region represents a CpG dinucleotide"
  misc_feature (61)..(61): /note="Nucleotide may be methylated to form 5-methylcytosine"
tgaagcactttctccataatgttcacttctttaatgacaggatagatgttgctgttctgacgactggagtattcagactgatgagaaccactggtgattctcagcagtcccaacatcacatg

SEQ ID NO: 900 - DNA, 122 bp, Homo sapiens
  misc_feature (61)..(62): /note="This region represents a CpG dinucleotide"
  misc_feature (61)..(61): /note="Nucleotide may be methylated to form 5-methylcytosine"
gttgggaggaaaaatagaagccctctcaaaaccatctggtgtgcctgcggtggcgtggcgcggctcagcagcccacatggatgagcgcagcgggtgtgtcattgcctgggagggacgcaggc

SEQ ID NO: 901 - DNA, 122 bp, Homo sapiens
  misc_feature (61)..(62): /note="This region represents a CpG dinucleotide"
  misc_feature (61)..(61): /note="Nucleotide may be methylated to form 5-methylcytosine"
gcacacaaatcagtggagtaaatatttgcatatggttagagagagagtgagaggacaccacggctgccctaaataatcaagcccaggggagatgaaagagatagcatgcctgccacatgcat

SEQ ID NO: 902 - DNA, 122 bp, Homo sapiens
  misc_feature (61)..(62): /note="This region represents a CpG dinucleotide"
  misc_feature (61)..(61): /note="Nucleotide may be methylated to form 5-methylcytosine"
ctctgatattacactagaacaacaactcttaaagggtagttgcaacatgaaatctgaaatcgtatcaaggaatatgattgatatgatgcctcttttcttccttggttacattaaaatctatt

SEQ ID NO: 903 - DNA, 122 bp, Homo sapiens
  misc_feature (61)..(62): /note="This region represents a CpG dinucleotide"
  misc_feature (61)..(61): /note="Nucleotide may be methylated to form 5-methylcytosine"
cagtaagcctgagaaaggggctgcttcggtctccagccacaactctgtgaagccaagccacgcgctgtcttccagagagggaatagaagtttccatcctgtgcacccagtggttgagcaaga

SEQ ID NO: 904 - DNA, 122 bp, Homo sapiens
  misc_feature (61)..(62): /note="This region represents a CpG dinucleotide"
  misc_feature (61)..(61): /note="Nucleotide may be methylated to form 5-methylcytosine"
aggaggtgtctctaagccccaaagtttcctccagcttacgtggatggtggtaaaatgcaacggatgaacctgagctcctacctgtcatttatatgttaggatttattttttatgatttattc

SEQ ID NO: 905 - DNA, 122 bp, Homo sapiens
  misc_feature (61)..(62): /note="This region represents a CpG dinucleotide"
  misc_feature (61)..(61): /note="Nucleotide may be methylated to form 5-methylcytosine"
ggaagtgggtgtgtccaattcaggaagctacagggtattaggcatcaaacagcattacctcgtcatgaccagtggataaatgatgagttctgaattatatggggagaagagtatggagagga

SEQ ID NO: 906 - DNA, 122 bp, Homo sapiens
  misc_feature (61)..(62): /note="This region represents a CpG dinucleotide"
  misc_feature (61)..(61): /note="Nucleotide may be methylated to form 5-methylcytosine"
gtggccacagactgctccagctttgtaaacccattatctatatattaatccagagaagagcgctgattggccctgcttgtctcatatacttagccatgggccaatttctgttgccagggaga

SEQ ID NO: 907 - DNA, 122 bp, Homo sapiens
  misc_feature (61)..(62): /note="This region represents a CpG dinucleotide"
  misc_feature (61)..(61): /note="Nucleotide may be methylated to form 5-methylcytosine"
cttggtaacggagagagcactcgacagagaagcaagagctgaatataatatcaccctcaccgtcacagatatggggactccaaggctgaaaacggagcacaacataacagtgcagatatcag

SEQ ID NO: 908 - DNA, 122 bp, Homo sapiens
  misc_feature (61)..(62): /note="This region represents a CpG dinucleotide"
  misc_feature (61)..(61): /note="Nucleotide may be methylated to form 5-methylcytosine"
cggggccccccacgcgccccgcttccccgcctctgcggccgctgctgctgcggccgccgccgccctacaaagaggcctggtgttgggcccgtcggactttgcgcagtaccagagccagatcg

SEQ ID NO: 909 - DNA, 122 bp, Homo sapiens
  misc_feature (61)..(62): /note="This region represents a CpG dinucleotide"
  misc_feature (61)..(61): /note="Nucleotide may be methylated to form 5-methylcytosine"
tcgcttgcaagtgttaaaccattactgcttctggccattcagtaaatgatggtgaaatagcgagaatataacaaaggccatatcaagtgagtatattgctgtagatgagtttctgtgtattc

SEQ ID NO: 910 - DNA, 122 bp, Homo sapiens
  misc_feature (61)..(62): /note="This region represents a CpG dinucleotide"
  misc_feature (61)..(61): /note="Nucleotide may be methylated to form 5-methylcytosine"
gctgatctgatgcattcatatttgacataccagttaaaggaagtagttagaaatgatgtacgtataaaagaaaagtagaataataatacaacaggcgcctctgtcctcaaccccagaactca

SEQ ID NO: 911 - DNA, 122 bp, Homo sapiens
  misc_feature (61)..(62): /note="This region represents a CpG dinucleotide"
  misc_feature (61)..(61): /note="Nucleotide may be methylated to form 5-methylcytosine"
atgtcccagggccctggcacatcctggaaatttcaaccagggagtgcaaatgacctgccacgcttggttgcaggaatctgtcattttcagggcattttcgcttcaagagaggcatgaaattg

SEQ ID NO: 912 - DNA, 122 bp, Homo sapiens
  misc_feature (61)..(62): /note="This region represents a CpG dinucleotide"
  misc_feature (61)..(61): /note="Nucleotide may be methylated to form 5-methylcytosine"
aaatgctcattaagtgaaagatgaccagaaatgtacctgctaacttccaactcttcaacacgtcacattgtgatgtcagtgagggcttaaagggaatatggtggttggctgatttcacatcc

SEQ ID NO: 913 - DNA, 122 bp, Homo sapiens
  misc_feature (61)..(62): /note="This region represents a CpG dinucleotide"
  misc_feature (61)..(61): /note="Nucleotide may be methylated to form 5-methylcytosine"
cctggctagaacagagagctgggctgaagtgaaataggatatgtagtgtgacaggtgtagcggagcccgattatgaagcatttcaacgtgatgtaacaggaaacagtgccttagtttttgat

SEQ ID NO: 914 - DNA, 122 bp, Homo sapiens
  misc_feature (61)..(62): /note="This region represents a CpG dinucleotide"
  misc_feature (61)..(61): /note="Nucleotide may be methylated to form 5-methylcytosine"
gaacactttctaactctggaggagcgtaaaggaacaagacctcactgagaccgcacagttcgcgcctggtcctcctgcgtcatttgcctcctggattcgacacctctgtgttcctgatttcc

SEQ ID NO: 915 - DNA, 122 bp, Homo sapiens
  misc_feature (61)..(62): /note="This region represents a CpG dinucleotide"
  misc_feature (61)..(61): /note="Nucleotide may be methylated to form 5-methylcytosine"
agattcttggctccacagatcagccgggaaccaacgcagaggttacttggctagagtggacgttaccaaatgtacaacgaaggatgacagaaataattgtacaaggaattgtacattttaat

SEQ ID NO: 916 - DNA, 122 bp, Homo sapiens
  misc_feature (61)..(62): /note="This region represents a CpG dinucleotide"
  misc_feature (61)..(61): /note="Nucleotide may be methylated to form 5-methylcytosine"
ccacagacttttgtcactaaaagcccaggtgactccccagatgcttacggatattaaaaccgattatgctgaaggagtggaaggagagtcaagtaaaagaagaagatcaagtaaaaagaact

SEQ ID NO: 917 - DNA, 122 bp, Homo sapiens
  misc_feature (61)..(62): /note="This region represents a CpG dinucleotide"
  misc_feature (61)..(61): /note="Nucleotide may be methylated to form 5-methylcytosine"
ccagcccgggcgacagtgcgagactccgtctcaataacaaacaaacaaacaaaaaaagggcggggggtgttgtatccttcagcaagtaaagctcatattcagcttggactagctgtctgcgg

SEQ ID NO: 918 - DNA, 122 bp, Homo sapiens
  misc_feature (61)..(62): /note="This region represents a CpG dinucleotide"
  misc_feature (61)..(61): /note="Nucleotide may be methylated to form 5-methylcytosine"
gtgtgtgttagacagaaagaaggaagagggcagggagagaaaaccaccgcattcaagcatcgccgcctctaggtgtaaggttcattccaggactgcctggagttggtgactttgcattcctg

SEQ ID NO: 919 - DNA, 122 bp, Homo sapiens
  misc_feature (61)..(62): /note="This region represents a CpG dinucleotide"
  misc_feature (61)..(61): /note="Nucleotide may be methylated to form 5-methylcytosine"
cccagcatccagccacccctgggtgtcaagtcttctaatattttgtcaatccggtgtctgcgtgacaaataaaattccattgatcctttcatttccagcttccctgctgatatgtgtgtgtc

SEQ ID NO: 920 - DNA, 122 bp, Homo sapiens
  misc_feature (61)..(62): /note="This region represents a CpG dinucleotide"
  misc_feature (61)..(61): /note="Nucleotide may be methylated to form 5-methylcytosine"
gttgagtggcaagatagagctaattttagtgtaagtcctcaattcctttaactcttactgcggtggagaccatcatttcaaactgtagcgagatgatcgcaaccaaccctgctgtgtgtttt

SEQ ID NO: 921 - DNA, 122 bp, Homo sapiens
  misc_feature (61)..(62): /note="This region represents a CpG dinucleotide"
  misc_feature (61)..(61): /note="Nucleotide may be methylated to form 5-methylcytosine"
cattagtcccacagtcatatccctatctctcctttaatccttagactctccctgccacaccggtctttccagggatggagactgttgctacatttcctcaatgcatttgtctttgacggtgc

SEQ ID NO: 922 - DNA, 122 bp, Homo sapiens
  misc_feature (61)..(62): /note="This region represents a CpG dinucleotide"
  misc_feature (61)..(61): /note="Nucleotide may be methylated to form 5-methylcytosine"
gctcctgcaggccatctggatgtatatgtgtaggtcacaggggttacaatggctgagcttcggcttagaggcctgacatggacaactttggaaaaactaggtctttactatgaagtatttca

SEQ ID NO: 923 - DNA, 122 bp, Homo sapiens
  misc_feature (61)..(62): /note="This region represents a CpG dinucleotide"
  misc_feature (61)..(61): /note="Nucleotide may be methylated to form 5-methylcytosine"
gtgcacattttctaaactgacatcttctacatcactcatgagcttgatcttattggcagccgtagctgcacatcttcgagtaatcctcaggagacctgttctggcttttgatgatttcttaa

SEQ ID NO: 924 - DNA, 122 bp, Homo sapiens
  misc_feature (61)..(62): /note="This region represents a CpG dinucleotide"
  misc_feature (61)..(61): /note="Nucleotide may be methylated to form 5-methylcytosine"
cactgggccatctctacctaggagtgctatagcctgactttacattatctgtgagggttacggaaaatgatgtgaatttactagcatggtgcctgccacttggcaagttctgatatatagtc

SEQ ID NO: 925 - DNA, 122 bp, Homo sapiens
  misc_feature (61)..(62): /note="This region represents a CpG dinucleotide"
  misc_feature (61)..(61): /note="Nucleotide may be methylated to form 5-methylcytosine"
agggtttgtcctcagctctctcctcttcccattctgtgtgttctcactggaaaactttatcgtaaatcacctcgatgctgctgactcagttttttccttctagctctgacctctgtttcctt

SEQ ID NO: 926 - DNA, 122 bp, Homo sapiens
  misc_feature (61)..(62): /note="This region represents a CpG dinucleotide"
  misc_feature (61)..(61): /note="Nucleotide may be methylated to form 5-methylcytosine"
gaactagaagagcacatttgcagctaccactgtaatagctgtaataagacaagaatcatccgtgtatgatcaaaaacaatgggaggagtgacactgtgcacaccagcagggcaggaagctct

SEQ ID NO: 927 - DNA, 122 bp, Homo sapiens
  misc_feature (61)..(62): /note="This region represents a CpG dinucleotide"
  misc_feature (61)..(61): /note="Nucleotide may be methylated to form 5-methylcytosine"
actttataaatgcgtgttcttaacttatgcttcctcccctgcagctccacttctcagaatcgccccttgtgaatcaccaggaactgacctcacagagctcatcccagggccctgacaagccc

SEQ ID NO: 928 - DNA, 122 bp, Homo sapiens
  misc_feature (61)..(62): /note="This region represents a CpG dinucleotide"
  misc_feature (61)..(61): /note="Nucleotide may be methylated to form 5-methylcytosine"
agctgccaagcagagacagcctctcctgcccctttcccagggctgactcagcaccttacgcgtgaggatttgtcatcaacaactgaccccaaaagccatggtgccctggggttggtgtccca

SEQ ID NO: 929 - DNA, 122 bp, Homo sapiens
  misc_feature (61)..(62): /note="This region represents a CpG dinucleotide"
  misc_feature (61)..(61): /note="Nucleotide may be methylated to form 5-methylcytosine"
acaaacattgctattattcagctcatttcaaaggattccgctgctgccatttgtgagagccgctggaggctgagtgaaagtcattttgaaagactgatccaaagaagaatggaggccagagt

SEQ ID NO: 930 - DNA, 122 bp, Homo sapiens
  misc_feature (61)..(62): /note="This region represents a CpG dinucleotide"
  misc_feature (61)..(61): /note="Nucleotide may be methylated to form 5-methylcytosine"
caaaggcaatgcaaggatatgcatgaatcagagtctccttcctcctttatgcaatgagatcgggaagaatgaaaatagttaaggagatagtctctagggctttgatctcaaatagcactaaa

SEQ ID NO: 931 - DNA, 122 bp, Homo sapiens
  misc_feature (61)..(62): /note="This region represents a CpG dinucleotide"
  misc_feature (61)..(61): /note="Nucleotide may be methylated to form 5-methylcytosine"
taacttctctgccagattttggtttccacagataatgaagtcagtttatcagggccagtgcgcctcctccaccagtttggagggtaatctacacagaagaaaagatgcctgaggttcttatt

SEQ ID NO: 932 - DNA, 122 bp, Homo sapiens
  misc_feature (61)..(62): /note="This region represents a CpG dinucleotide"
  misc_feature (61)..(61): /note="Nucleotide may be methylated to form 5-methylcytosine"
caagcactccaaatctagggaattgcagggtcaccttgtacattactcaacttggactgccgtaacaaagtattaatacaatagactgggtggcttaaacagcagaaatttattttctcatg

SEQ ID NO: 933 - DNA, 122 bp, Homo sapiens
  misc_feature (61)..(62): /note="This region represents a CpG dinucleotide"
  misc_feature (61)..(61): /note="Nucleotide may be methylated to form 5-methylcytosine"
tgaggaggagtcagggtcagggacaggtgaaagagtaaaaacctcccttactgtcccccacgactggctctctcagcccctggggattgaattcattgccatgaattcaaggcaatactcac

SEQ ID NO: 934 - DNA, 122 bp, Homo sapiens
  misc_feature (61)..(62): /note="This region represents a CpG dinucleotide"
  misc_feature (61)..(61): /note="Nucleotide may be methylated to form 5-methylcytosine"
ttcctgcagcctctgtggcactcaacaagggcccgttgcgtgacgaatcaggaggtcaggcgagtctcagtgctggtcagcaagtcaccgggtgtagattcccaagctctgctggcgtctgg

SEQ ID NO: 935 - DNA, 122 bp, Homo sapiens
  misc_feature (61)..(62): /note="This region represents a CpG dinucleotide"
  misc_feature (61)..(61): /note="Nucleotide may be methylated to form 5-methylcytosine"
gggaagaatctttggggttatctcagcagctacttaccacggtccgtttctcaactataccgtgtagtcccagagaatagggcatgtttatcttgctgatcattgacagttactgtctgaca

SEQ ID NO: 936 - DNA, 122 bp, Homo sapiens
  misc_feature (61)..(62): /note="This region represents a CpG dinucleotide"
  misc_feature (61)..(61): /note="Nucleotide may be methylated to form 5-methylcytosine"
gaactcacctgggagcgcgtacaaaatgcagaagcctggccccaccaaccctaacgcatccgaatagcgaagtaggtccctgaaacctgctaatgacgttcaaggacattcaacgtgagacc

SEQ ID NO: 937 - DNA, 122 bp, Homo sapiens
  misc_feature (61)..(62): /note="This region represents a CpG dinucleotide"
  misc_feature (61)..(61): /note="Nucleotide may be methylated to form 5-methylcytosine"
tctgccgtactgtaactgaaacacaggttcagttgctcactgcttgcagagtccagttaacgagagcgggatctgttataaagaaagtgatttattccaaagcttagcttatgagaagaaat

SEQ ID NO: 938 - DNA, 122 bp, Homo sapiens
  misc_feature (61)..(62): /note="This region represents a CpG dinucleotide"
  misc_feature (61)..(61): /note="Nucleotide may be methylated to form 5-methylcytosine"
accgttaagcaactacctctgtgccaactaactgctgagcaataaaacagtaaaatttaacgtttctacaactagagatcaacccaaaaagccttcagtgaattttgttgttcttggaaagc

SEQ ID NO: 939 - DNA, 122 bp, Homo sapiens
  misc_feature (61)..(62): /note="This region represents a CpG dinucleotide"
  misc_feature (61)..(61): /note="Nucleotide may be methylated to form 5-methylcytosine"
agactggctatctccaggccagcagggaggaccccgctgtgtggtcacggctcacactgccgggccctgtgaacacacccgttcccgacagggcctggatccagggcagagtgcaaagctgg

SEQ ID NO: 940 - DNA, 122 bp, Homo sapiens
  misc_feature (61)..(62): /note="This region represents a CpG dinucleotide"
  misc_feature (61)..(61): /note="Nucleotide may be methylated to form 5-methylcytosine"
tttgaagtttgtgtgtaattattacaaaaggggaggggtaaactagtatgtgtacacttccgttaaatcgtgtaaatgaggactctaccaggaagaatcgctgctcgtagataaaagtgcat

SEQ ID NO: 941 - DNA, 122 bp, Homo sapiens
  misc_feature (61)..(62): /note="This region represents a CpG dinucleotide"
  misc_feature (61)..(61): /note="Nucleotide may be methylated to form 5-methylcytosine"
tctccattcctcttaacagtcctgggtgggggaggggggagtatatttcctccaagttatcgatgggaaactgaagctcagagccgtcaaggccacccaagcaggaagtggctgtgaggctg

SEQ ID NO: 942 - DNA, 122 bp, Homo sapiens
  misc_feature (61)..(62): /note="This region represents a CpG dinucleotide"
  misc_feature (61)..(61): /note="Nucleotide may be methylated to form 5-methylcytosine"
gaacttcctaggtatctatcctgattgttgcttggtgtttatacatgcatgatgttcagccgtgattcactagactccagtcacattctccttccttctatttttctaatacttcaagctct

SEQ ID NO: 943 - DNA, 122 bp, Homo sapiens
  misc_feature (61)..(62): /note="This region represents a CpG dinucleotide"
  misc_feature (61)..(61): /note="Nucleotide may be methylated to form 5-methylcytosine"
gatgagcgctcaggaatcatgggctatcaaaggtaggtgctgagggaatgaaatctgggacgatagactacgaagcattggagaaaagacctatggacatttggaagataatgtgtggagtg

SEQ ID NO: 944 - DNA, 122 bp, Homo sapiens
  misc_feature (61)..(62): /note="This region represents a CpG dinucleotide"
  misc_feature (61)..(61): /note="Nucleotide may be methylated to form 5-methylcytosine"
gctcccaaggccaaaggaacacttcccttggcctcccaggcttaacattaaaataactgtcggatgcagtggctcacacctataatcctagcactttgggaggttgaggcaggaagatcgct

SEQ ID NO: 945 - DNA, 122 bp, Homo sapiens
  misc_feature (61)..(62): /note="This region represents a CpG dinucleotide"
  misc_feature (61)..(61): /note="Nucleotide may be methylated to form 5-methylcytosine"
ttaactcaggcatcctaccaaggcaatactctgagtcagaaatgacagtgctccctgatacgccctagaagtatgtcaatgatctcatgaaacatacttacacatatatacagaaacatact

SEQ ID NO: 946 - DNA, 122 bp, Homo sapiens
  misc_feature (61)..(62): /note="This region represents a CpG dinucleotide"
  misc_feature (61)..(61): /note="Nucleotide may be methylated to form 5-methylcytosine"
atgtctgacttaaactgtgcattgtcctttaccctctgacatatagagcaaaaatgattacgtttctctaaacatgtgaccttgctttggcacagacttgacatcttactcaacttctttcc

SEQ ID NO: 947 - DNA, 122 bp, Homo sapiens
  misc_feature (61)..(62): /note="This region represents a CpG dinucleotide"
  misc_feature (61)..(61): /note="Nucleotide may be methylated to form 5-methylcytosine"
cccaggcatggtggcgtggccaggcttctcaggccgctgcctggtgtgaggcaggcgaagcgtgggtgcggatgacctgggaggggcaggaagtcagccggaggtggtggcaggaacaggac

SEQ ID NO: 948 - DNA, 122 bp, Homo sapiens
  misc_feature (61)..(62): /note="This region represents a CpG dinucleotide"
  misc_feature (61)..(61): /note="Nucleotide may be methylated to form 5-methylcytosine"
agggagaacttcttatggtgccacccccttgtgccacactctgactcctagggcagggcacgagaatttcgtggtggagctgagtcatggctttgccctagcaatcagggaggccaaggaaa

SEQ ID NO: 949 - DNA, 122 bp, Homo sapiens
  misc_feature (61)..(62): /note="This region represents a CpG dinucleotide"
  misc_feature (61)..(61): /note="Nucleotide may be methylated to form 5-methylcytosine"
cctgccaccacacccagctaagtttttgtatttttagtagagacggggtttcagtagagacggggtgacaggatctacaattccaggtaaggtcaggttggtctcaaactcctgaccttgtg

SEQ ID NO: 950 - DNA, 122 bp, Homo sapiens
  misc_feature (61)..(62): /note="This region represents a CpG dinucleotide"
  misc_feature (61)..(61): /note="Nucleotide may be methylated to form 5-methylcytosine"
agaggcggggcagaggcggcacttacggggcctgcgtgcgtgtggtgaactccttgaactcgctgtcatggatggtgaagtagggacggaagtcgcagcagaacctgaggggctgcaggcag

SEQ ID NO: 951 - DNA, 122 bp, Homo sapiens
  misc_feature (61)..(62): /note="This region represents a CpG dinucleotide"
  misc_feature (61)..(61): /note="Nucleotide may be methylated to form 5-methylcytosine"
gtctggcacatagtcaatggttagtaaatgtgaactattgtgtgacattgtggttagtcacgtatggggctgtgtttcctttagtatattgctcttttaatgtcatttcctttgtactgtta

SEQ ID NO: 952 - DNA, 122 bp, Homo sapiens
  misc_feature (61)..(62): /note="This region represents a CpG dinucleotide"
  misc_feature (61)..(61): /note="Nucleotide may be methylated to form 5-methylcytosine"
gaggtctgttacaactcagaattgtttgggaaatactgctttaggctctttcactagtaacgtggattgctctgggccaattaaaatgagctccacataaagatatttagctatcctgacct

SEQ ID NO: 953 - DNA, 122 bp, Homo sapiens
  misc_feature (61)..(62): /note="This region represents a CpG dinucleotide"
  misc_feature (61)..(61): /note="Nucleotide may be methylated to form 5-methylcytosine"
attgccatttagaacagagcaccttgtgatgactaagctctttcaagtatctatgcttaacgtgatggcttcaatacccttttgctatatagactcatctgtagatacttggtacaagttcc

SEQ ID NO: 954 - DNA, 122 bp, Homo sapiens
  misc_feature (61)..(62): /note="This region represents a CpG dinucleotide"
  misc_feature (61)..(61): /note="Nucleotide may be methylated to form 5-methylcytosine"
tcaactcctgacctcgtgatccacctgtcttggccctgggattacaggtgtgagccaccacgcctggccaggagtttcttaactgttctatacatgacacatgctcctgaggaagtgaggta

SEQ ID NO: 955 - DNA, 122 bp, Homo sapiens
  misc_feature (61)..(62): /note="This region represents a CpG dinucleotide"
  misc_feature (61)..(61): /note="Nucleotide may be methylated to form 5-methylcytosine"
agacgtcataaaaggaaaagaatggaaaattttggaaaggaagttttctgagaccatttacgtgacaaagaagtcaggaaaatgtggcattgttgtgattatcttcatcatttcaggatctg

SEQ ID NO: 956 - DNA, 122 bp, Homo sapiens
  misc_feature (61)..(62): /note="This region represents a CpG dinucleotide"
  misc_feature (61)..(61): /note="Nucleotide may be methylated to form 5-methylcytosine"
cacagcaagacctcatctctactaaattagccgagtgtggttgccagcacctgtagtctccgggaggctgaggtggtaggatcacttgagcacaggagtttaacaagttgcaattagcaaac

SEQ ID NO: 957 - DNA, 122 bp, Homo sapiens
  misc_feature (61)..(62): /note="This region represents a CpG dinucleotide"
  misc_feature (61)..(61): /note="Nucleotide may be methylated to form 5-methylcytosine"
ggagggctctatcctcatgaatggcttaatattgttattgcaggagtggattagttattgcgagagtgggtttgtcgtaaaagcaagttctgctgcatcactgtcttgctctttctccctct

SEQ ID NO: 958 - DNA, 122 bp, Homo sapiens
  misc_feature (61)..(62): /note="This region represents a CpG dinucleotide"
  misc_feature (61)..(61): /note="Nucleotide may be methylated to form 5-methylcytosine"
caaaaggcccctgaataatttaaaaaaaaaaagaggtggtgtcaggcaagggctttaggacgtagaaggtcacttttggttgttgtcctgttgatccaactgctttactaactggagctatt

SEQ ID NO: 959 - DNA, 122 bp, Homo sapiens
  misc_feature (61)..(62): /note="This region represents a CpG dinucleotide"
  misc_feature (61)..(61): /note="Nucleotide may be methylated to form 5-methylcytosine"
gaatattacaccacatccttatcacagctagggggttttggtaacaaaagccaaaaatcccggtatctactggatttaggtggccagaaatgcaatcatttgaagaacagatgcagaacagg

SEQ ID NO: 960 - DNA, 122 bp, Homo sapiens
  misc_feature (61)..(62): /note="This region represents a CpG dinucleotide"
  misc_feature (61)..(61): /note="Nucleotide may be methylated to form 5-methylcytosine"
gtcccccaggactcagggcagggaggggcagctggacatcaccttgcattcaggatcagacgctgctgagcaggctcaaccctgattgtattctcagccacacctgcgattttcctgtgcgt

SEQ ID NO: 961 - DNA, 122 bp, Homo sapiens
  misc_feature (61)..(62): /note="This region represents a CpG dinucleotide"
  misc_feature (61)..(61): /note="Nucleotide may be methylated to form 5-methylcytosine"
aaccatttcctgccacctgacaccttttctgctggtaatgtgtctgtaaggaactggtctcgaagcaaaatttatggtcagctaagcccggagaagaggtgactatgtgcactttcctgctc

SEQ ID NO: 962 - DNA, 122 bp, Homo sapiens
  misc_feature (61)..(62): /note="This region represents a CpG dinucleotide"
  misc_feature (61)..(61): /note="Nucleotide may be methylated to form 5-methylcytosine"
catagacatagcagatatctgagtcacaaacaagtcaggaaatgctgcttacactgtatccgcattacacaatagccaacacttcacacaagacattaggccagtcctgtaggcccttggga

SEQ ID NO: 963 - DNA, 122 bp, Homo sapiens
  misc_feature (61)..(62): /note="This region represents a CpG dinucleotide"
  misc_feature (61)..(61): /note="Nucleotide may be methylated to form 5-methylcytosine"
gtatacttaataaagcccgtgtttatctttctctttagaaccccctctaagcagacccatcgctttattgctttaaaacatacactaagtggtgagtggagctggggcgagggaggtgcgga

SEQ ID NO: 964 - DNA, 122 bp, Homo sapiens
  misc_feature (61)..(62): /note="This region represents a CpG dinucleotide"
  misc_feature (61)..(61): /note="Nucleotide may be methylated to form 5-methylcytosine"
cagttgctaaattcctagggcaggaaagggcagggccctcatgaaacgagggctgagtgacgagccaggaaagctcagatatgagtgccatggaactggagaggcaagaagggcaatgagca

SEQ ID NO: 965 - DNA, 122 bp, Homo sapiens
  misc_feature (61)..(62): /note="This region represents a CpG dinucleotide"
  misc_feature (61)..(61): /note="Nucleotide may be methylated to form 5-methylcytosine"
ggtggcggcggggtcagtctcggggggagtcgtgtccccctcagggatggcggtgggaaacgggctcgcgacgtcttcgggagcacagaccacctcctccgccttgtccgtggccggggcac

SEQ ID NO: 966 - DNA, 122 bp, Homo sapiens
  misc_feature (61)..(62): /note="This region represents a CpG dinucleotide"
  misc_feature (61)..(61): /note="Nucleotide may be methylated to form 5-methylcytosine"
caagatggagtgatacttatgaacattgcttctcctgatcatgtaacaacatcctccttccgtctgctcagacctcacaatcttgagctgtccttgactcctccttttttcccatttgtcac

SEQ ID NO: 967 - DNA, 122 bp, Homo sapiens
  misc_feature (61)..(62): /note="This region represents a CpG dinucleotide"
  misc_feature (61)..(61): /note="Nucleotide may be methylated to form 5-methylcytosine"
ctgttttaaaaatatatggtatagcactgttacgtgaattgatttcttaccttttggagccgcatgatgtcgctgtctaccatgaagttatagctagccaacattcaaatttcttctattac

SEQ ID NO: 968 - DNA, 122 bp, Homo sapiens
  misc_feature (61)..(62): /note="This region represents a CpG dinucleotide"
  misc_feature (61)..(61): /note="Nucleotide may be methylated to form 5-methylcytosine"
gggtatttcacaagggctcccacagtgagccaccccgggcctgcccaacgtgaaggctggcggagtcagcccctccgagctgcagcctgctctctggtccctgccccgggtgagtgcccaca

SEQ ID NO: 969 - DNA, 122 bp, Homo sapiens
  misc_feature (61)..(62): /note="This region represents a CpG dinucleotide"
  misc_feature (61)..(61): /note="Nucleotide may be methylated to form 5-methylcytosine"
gcttttccatatccttagcatttcacacactgtatgttcttatcatattctacaaaaacacggcaacttcactatgatttagcaaaacacaggctttgtactcttccttctcaaggattact

SEQ ID NO: 970 - DNA, 122 bp, Homo sapiens
  misc_feature (61)..(62): /note="This region represents a CpG dinucleotide"
  misc_feature (61)..(61): /note="Nucleotide may be methylated to form 5-methylcytosine"
tgtattatgtatggatacatgttgtgtttttaagaaggaaataattgacaactgtaggtccgaccgtcattgctcaaagagagtgataagaaattgtgcaattgctggcatttcacattgtt

SEQ ID NO: 971 - DNA, 122 bp, Homo sapiens
  misc_feature (61)..(62): /note="This region represents a CpG dinucleotide"
  misc_feature (61)..(61): /note="Nucleotide may be methylated to form 5-methylcytosine"
tctgaactgctctgtagaaaaacaaacaccacacaatgcaattgatgaatggcaggttcgcgataaatcccaatggttagtattaaaaatgcaaacactgtaacccttgataaaacagagct

SEQ ID NO: 972 - DNA, 122 bp, Homo sapiens
  misc_feature (61)..(62): /note="This region represents a CpG dinucleotide"
  misc_feature (61)..(61): /note="Nucleotide may be methylated to form 5-methylcytosine"
gttactctaattataattaaacaagtcaactgtatcataccaggcatggcagctcatgcccgtaatcccagcactttgggaggctgaggcgagcagatcacttgagcccaggagttctagac

SEQ ID NO: 973 - DNA, 122 bp, Homo sapiens
  misc_feature (61)..(62): /note="This region represents a CpG dinucleotide"
  misc_feature (61)..(61): /note="Nucleotide may be methylated to form 5-methylcytosine"
tttctctccttgcctccattcagctctgtggagtcacctctaggagtgcttctctgtccacgtgtaggcctgacagtgaaagaggaagtatttacagactggattttaactctgtcaggcac

SEQ ID NO: 974 - DNA, 122 bp, Homo sapiens
  misc_feature (61)..(62): /note="This region represents a CpG dinucleotide"
  misc_feature (61)..(61): /note="Nucleotide may be methylated to form 5-methylcytosine"
aatgttcgctcatgtgctgtggatgcactgtcacgtccatgggtgaggtcacattgcctgcgtgtggaagctgtcacctgacacacgcttacttaccttgcagggagccagcagggcaaaca

SEQ ID NO: 975 - DNA, 122 bp, Homo sapiens
  misc_feature (61)..(62): /note="This region represents a CpG dinucleotide"
  misc_feature (61)..(61): /note="Nucleotide may be methylated to form 5-methylcytosine"
ctaagtgactcacaggtgtgaatctgcttgataaaggaaggattcatgtcctgagagggacggagtggtgtgatgcagtatttcatcatgctagtcagaatggtgcacaacttaaaactgta

SEQ ID NO: 976 - DNA, 122 bp, Homo sapiens
  misc_feature (61)..(62): /note="This region represents a CpG dinucleotide"
  misc_feature (61)..(61): /note="Nucleotide may be methylated to form 5-methylcytosine"
gccagcatggctgtaattatcactgggctttggctgagactcaggcagcccagccatctacgcagcaggtggagggatgctggcaggtcaaacaagcactgcctgactgatctggatgggac

SEQ ID NO: 977 - DNA, 122 bp, Homo sapiens
  misc_feature (61)..(62): /note="This region represents a CpG dinucleotide"
  misc_feature (61)..(61): /note="Nucleotide may be methylated to form 5-methylcytosine"
gatctggttttcaatgtgagcctctctctcctgcaatccagccaaagcactaacctgcaacgctccaaattagaggggaatggagctacccgaatgttatgtatattactaattagatccag

SEQ ID NO: 978 - DNA, 122 bp, Homo sapiens
  misc_feature (61)..(62): /note="This region represents a CpG dinucleotide"
  misc_feature (61)..(61): /note="Nucleotide may be methylated to form 5-methylcytosine"
caggaaactgcttggcaaattgtaaagtgcagtataaatataagagatattaactataaacggtcatatgggaggttttcgagcacaaaacagtaagctagagaaaattctgaggcagtgca

SEQ ID NO: 979 - DNA, 122 bp, Homo sapiens
  misc_feature (61)..(62): /note="This region represents a CpG dinucleotide"
  misc_feature (61)..(61): /note="Nucleotide may be methylated to form 5-methylcytosine"
gtgcctacttagggaaacagctgcgctcattcagtgcaatgccacatagaatagtaaaagcggagtatactctctgataaacacattaattttaccagatggttcttcttaagcctttaatt

SEQ ID NO: 980 - DNA, 122 bp, Homo sapiens
  misc_feature (61)..(62): /note="This region represents a CpG dinucleotide"
  misc_feature (61)..(61): /note="Nucleotide may be methylated to form 5-methylcytosine"
gagagaatcacaattgcgatagtcatacttagtcttgatgtatcacctttcttctgagaacgtaaaaacatatcataagtggtaattaagcttcccaacacccactgggaaatggatattat

SEQ ID NO: 981 - DNA, 122 bp, Homo sapiens
  misc_feature (61)..(62): /note="This region represents a CpG dinucleotide"
  misc_feature (61)..(61): /note="Nucleotide may be methylated to form 5-methylcytosine"
agctgctccatatacccttctgagtccctgctgtgccctgccccttggagcttgagatgacgctgtgcactgcctcctgaagaaacaatgccttggcaaagtggtccaactacccctcccag

SEQ ID NO: 982 - DNA, 122 bp, Homo sapiens
  misc_feature (61)..(62): /note="This region represents a CpG dinucleotide"
  misc_feature (61)..(61): /note="Nucleotide may be methylated to form 5-methylcytosine"
tgtaaaatacttggttctgtcttggatactcacccttctccttcttgactttttttcttccgcattttaagattgcatcatttggcagtcattgcaatgattacatagaatggcatttattg

SEQ ID NO: 983 - DNA, 122 bp, Homo sapiens
  misc_feature (61)..(62): /note="This region represents a CpG dinucleotide"
  misc_feature (61)..(61): /note="Nucleotide may be methylated to form 5-methylcytosine"
caatagatattctgaacagaaagtgctgacttgaaaattccctaaactgaggattgctgccgttacagctgcatgagctctgacattagttgttggtaaagtgcatggggtcagggttcacc

SEQ ID NO: 984 - DNA, 122 bp, Homo sapiens
  misc_feature (61)..(62): /note="This region represents a CpG dinucleotide"
  misc_feature (61)..(61): /note="Nucleotide may be methylated to form 5-methylcytosine"
tttaaagcgcagtttggctgggcttgggtttcttcttcactaattgaattccatttgtgccggagagaacagaaaaaatactgtttgcctccgcccggcccctccccctgcggcgaggagga

SEQ ID NO: 985 - DNA, 122 bp, Homo sapiens
  misc_feature (61)..(62): /note="This region represents a CpG dinucleotide"
  misc_feature (61)..(61): /note="Nucleotide may be methylated to form 5-methylcytosine"
cttccttcaaaagtgattcaacgtgtggcctgagaagcggcagcatcagcctcacctgggcgttggtgagaacggcagcatcttggcctctcctgctgaatcagagcgcgctgcttaacacg

SEQ ID NO: 986 - DNA, 122 bp, Homo sapiens
  misc_feature (61)..(62): /note="This region represents a CpG dinucleotide"
  misc_feature (61)..(61): /note="Nucleotide may be methylated to form 5-methylcytosine"
aagggttgtgggactcttcagtgcaaacttggtaaccctttgtgtcctgcagacgggaggcggtctggagcctcaagctaatggggagacgccccaggttgctgtcattgtccggccaggta

SEQ ID NO: 987 - DNA, 122 bp, Homo sapiens
  misc_feature (61)..(62): /note="This region represents a CpG dinucleotide"
  misc_feature (61)..(61): /note="Nucleotide may be methylated to form 5-methylcytosine"
ttccagcaggaagcttccccttgcagcccatcccatctgtcagggtccaccctggcctcacggtctgcctggagtttcatcacaggctgcattgtgccgtcacctcatctgagaacactgcc

SEQ ID NO: 988 - DNA, 122 bp, Homo sapiens
  misc_feature (61)..(62): /note="This region represents a CpG dinucleotide"
  misc_feature (61)..(61): /note="Nucleotide may be methylated to form 5-methylcytosine"
ctagatttaagaggaggggacacagaggccatctctcaatgggaggagtccctgcaaccacgagccacacgtgctttttggctgatacttgaaagaatgagcaatgcaggctgggcgcagtg

SEQ ID NO: 989 - DNA, 122 bp, Homo sapiens
  misc_feature (61)..(62): /note="This region represents a CpG dinucleotide"
  misc_feature (61)..(61): /note="Nucleotide may be methylated to form 5-methylcytosine"
gattttgcttgtttgccatttgtttctgtttgataagggcattgtgtcatctcaaaagaccgactaatgggggttacatcagaaacattcactattacagcagcaaaggattgtacagatcc

SEQ ID NO: 990 - DNA, 122 bp, Homo sapiens
  misc_feature (61)..(62): /note="This region represents a CpG dinucleotide"
  misc_feature (61)..(61): /note="Nucleotide may be methylated to form 5-methylcytosine"
cgacttcttgggccagggcatggccgagaacaccagccacaagtcctagcggccgctcagcgtccccaccttcaagtgcactcctgtctagggcttccctttgagccagggccgggtgtagt

SEQ ID NO: 991 - DNA, 122 bp, Homo sapiens
  misc_feature (61)..(62): /note="This region represents a CpG dinucleotide"
  misc_feature (61)..(61): /note="Nucleotide may be methylated to form 5-methylcytosine"
tcaccacctgttctctttaatgtggatgaagacctcctgcttctggttattcaggattctcgtaagctcctctttcacaaaggctgagcatctgagcacaagaacctaacttgaggagtgtg

SEQ ID NO: 992 - DNA, 122 bp, Homo sapiens
  misc_feature (61)..(62): /note="This region represents a CpG dinucleotide"
  misc_feature (61)..(61): /note="Nucleotide may be methylated to form 5-methylcytosine"
ttcccctgttcttcatttgcaaagacttgcctccttgagattatttactcacaaacttaccgttaatcataggcctcattttaccgtcactcttccttatttttctgaactggatttgagaa

SEQ ID NO: 993 - DNA, 122 bp, Homo sapiens
  misc_feature (61)..(62): /note="This region represents a CpG dinucleotide"
  misc_feature (61)..(61): /note="Nucleotide may be methylated to form 5-methylcytosine"
actccttcctctggtgtggtgtttcccagttttgcccggtgagaatcacctgcggctggccgtgcgcagtggctcacgcctgtaatcccagcactttgggaggccgaggcgggtgaatcacg

SEQ ID NO: 994 - DNA, 122 bp, Homo sapiens
  misc_feature (61)..(62): /note="This region represents a CpG dinucleotide"
  misc_feature (61)..(61): /note="Nucleotide may be methylated to form 5-methylcytosine"
tcaagataaatgataaattgtgacatgccttcagctgtgctgcaatgtcattaataaaaacgaaaggaagagacagaataatagggttgaagactcatagatgtcttatagcagttaagaaa

SEQ ID NO: 995 - DNA, 122 bp, Homo sapiens
  misc_feature (61)..(62): /note="This region represents a CpG dinucleotide"
  misc_feature (61)..(61): /note="Nucleotide may be methylated to form 5-methylcytosine"
gaaataaacctgggagaatgatagatcagggatgactgactcacctataacacacattttcggtacatggattatgcactttgactatgacaaagacatgctgaaagtgagaccggatgctt

SEQ ID NO: 996 - DNA, 122 bp, Homo sapiens
  misc_feature (61)..(62): /note="This region represents a CpG dinucleotide"
  misc_feature (61)..(61): /note="Nucleotide may be methylated to form 5-methylcytosine"
gggaactataactttgaatttcctggctctggggctgtgaaaatcacaacctgaaccttccgttgatgtgggtttctcgattaatttcctgtttgattgtttactttagagagcggaaaatg

SEQ ID NO: 997 - DNA, 122 bp, Homo sapiens
  misc_feature (61)..(62): /note="This region represents a CpG dinucleotide"
  misc_feature (61)..(61): /note="Nucleotide may be methylated to form 5-methylcytosine"
ccactgtgccttctcagagacttcagctgaaatccaacttctgagaatgcttctagggttcgccagaacccgcctttgctagcctccctaggattatctcttgtgaccagcaccttcactga

SEQ ID NO: 998 - DNA, 122 bp, Homo sapiens
  misc_feature (61)..(62): /note="This region represents a CpG dinucleotide"
  misc_feature (61)..(61): /note="Nucleotide may be methylated to form 5-methylcytosine"
gagccattgtttgcaaacccctggtctaagttcaaagctgatgagtagctttcctggaaccgtccctgtgagttttacccaggggtcctgaccctatttcctccccagggagttttgaaacc

SEQ ID NO: 999 - DNA, 122 bp, Homo sapiens
  misc_feature (61)..(62): /note="This region represents a CpG dinucleotide"
  misc_feature (61)..(61): /note="Nucleotide may be methylated to form 5-methylcytosine"
caaatatgagaaggcttctcattcaggtccatgcttgcctactcctctgtccactgctttcgtgaagacaagatgaagttcacagtgagtagatttttccttttgaatttaccaccaaatga

SEQ ID NO: 1000 - DNA, 122 bp, Homo sapiens
  misc_feature (61)..(62): /note="This region represents a CpG dinucleotide"
  misc_feature (61)..(61): /note="Nucleotide may be methylated to form 5-methylcytosine"
tctgtctttaaacttcaggaagtcacagtagaatcacaatgtcagacacagtctacgaaacgcttcgtatatgttacctcatttgatctttgtaatcaacccatgaggcaggtggggtgtgg

SEQ ID NO: 1001 - DNA, 122 bp, Homo sapiens
  misc_feature (61)..(62): /note="This region represents a CpG dinucleotide"
  misc_feature (61)..(61): /note="Nucleotide may be methylated to form 5-methylcytosine"
catcctctcataacccctccatgctaggcgaaagggaaacacaggtgtcaggcctcaaaacgcctggctagtttgtcagagacagctgcagccaaggtgctaaataagccctggttatcagg

SEQ ID NO: 1002 - DNA, 122 bp, Homo sapiens
  misc_feature (61)..(62): /note="This region represents a CpG dinucleotide"
  misc_feature (61)..(61): /note="Nucleotide may be methylated to form 5-methylcytosine"
taaagctaagtattaatacgccctggggtgatgccctcatcagcaacaccaggatgtgttcgttctctctctttcttggcacagatttttgtttgtttgtttttgtcttttttttttttgag

SEQ ID NO: 1003 - DNA, 122 bp, Homo sapiens
  misc_feature (61)..(62): /note="This region represents a CpG dinucleotide"
  misc_feature (61)..(61): /note="Nucleotide may be methylated to form 5-methylcytosine"
cttaaatgcagactttcccagaaacagaggtggacttaatgaccatgaaagatcccactccgccttgtgattttgtgatttcaaagtattatacttacacgggtcacagtgtacctacaagc

SEQ ID NO: 1004 - DNA, 122 bp, Homo sapiens
  misc_feature (61)..(62): /note="This region represents a CpG dinucleotide"
  misc_feature (61)..(61): /note="Nucleotide may be methylated to form 5-methylcytosine"
ttttttgctcaggagagattctgctctgaaggcttaaggggattaggcataaaactagagcgagtgtgctttctgagccaggcacatcacatcgagagaacaaagggcttttcaggcccaat

SEQ ID NO: 1005 - DNA, 122 bp, Homo sapiens
  misc_feature (61)..(62): /note="This region represents a CpG dinucleotide"
  misc_feature (61)..(61): /note="Nucleotide may be methylated to form 5-methylcytosine"
ctcaggtgatctgcccacctcggatgctgcatgtttttaaacatgtttttctaaccctggcgcccttgaagaccaggttctgcataaacaggaggtcctgtcacaggcctttccgctcagct

SEQ ID NO: 1006 - DNA, 122 bp, Homo sapiens
  misc_feature (61)..(62): /note="This region represents a CpG dinucleotide"
  misc_feature (61)..(61): /note="Nucleotide may be methylated to form 5-methylcytosine"
cttcccactccacctcaccacctcatagaggaaaattgtgacgttaatgggaaatgtcagcggtaatgtcttcaggctgggcctgtggagtgactcccttgccacaggatatttaagcaatg

SEQ ID NO: 1007 - DNA, 122 bp, Homo sapiens
  misc_feature (61)..(62): /note="This region represents a CpG dinucleotide"
  misc_feature (61)..(61): /note="Nucleotide may be methylated to form 5-methylcytosine"
gccaatgggcaaagtgaagggaccctggagctggatttggagtccagcattccaggagagcgaattagggtggtgtgttaatgagggcaaggctagcagtaacaagtaacaccctagccttt

SEQ ID NO: 1008 - DNA, 122 bp, Homo sapiens
  misc_feature (61)..(62): /note="This region represents a CpG dinucleotide"
  misc_feature (61)..(61): /note="Nucleotide may be methylated to form 5-methylcytosine"
gaggattaaatgagttaattcatgtagagtacttaaaacaatctagtacttggtgccaggcgtggtggctcacacctgtaatcccagcactttgggaggccaaggcaggtggatcatgaggt

SEQ ID NO: 1009 - DNA, 122 bp, Homo sapiens
  misc_feature (61)..(62): /note="This region represents a CpG dinucleotide"
  misc_feature (61)..(61): /note="Nucleotide may be methylated to form 5-methylcytosine"
gcaacttagacacaatcacacccacagaaaaccgccacagtccatgacttgctgtgtgtgcgtgtgtgtgttaaaatgggagactcattcttgagcaatctgagaagatgactcaggacaat

SEQ ID NO: 1010 - DNA, 122 bp, Homo sapiens
  misc_feature (61)..(62): /note="This region represents a CpG dinucleotide"
  misc_feature (61)..(61): /note="Nucleotide may be methylated to form 5-methylcytosine"
tcttcagctcaaatcttggtaatgaccactcaaacttacaacgggacttggcttcttgtccgtggccctgactctttagccagaaagtgaagctatcatcttgttaacagaaaaaaggtccc

SEQ ID NO: 1011 - DNA, 122 bp, Homo sapiens
  misc_feature (61)..(62): /note="This region represents a CpG dinucleotide"
  misc_feature (61)..(61): /note="Nucleotide may be methylated to form 5-methylcytosine"
agcttcacctgcctggctctgtcatcctttgggcaccaacacttccttatttaagttgcacgggctgaccttgactgttgactccaggaatgtgtgcaaatccttgactcccatgaggaccg

SEQ ID NO: 1012 - DNA, 122 bp, Homo sapiens
  misc_feature (61)..(62): /note="This region represents a CpG dinucleotide"
  misc_feature (61)..(61): /note="Nucleotide may be methylated to form 5-methylcytosine"
tcacaataaataggagtagaccttatgggggaatgagaattccaagccgacaacatcacacgtgccaacacagagaagctagaaacaccagatgtttagggacctcaggatcaggaactggg

SEQ ID NO: 1013 - DNA, 122 bp, Homo sapiens
  misc_feature (61)..(62): /note="This region represents a CpG dinucleotide"
  misc_feature (61)..(61): /note="Nucleotide may be methylated to form 5-methylcytosine"
accaattcatgttctcatagcatgacttccagactcaaattggatggattcaaatcctggcgttgatatttgcttcctgcatgactcatcttttcaaaacctttgtttcctcatctgtattt

SEQ ID NO: 1014 - DNA, 122 bp, Homo sapiens
  misc_feature (61)..(62): /note="This region represents a CpG dinucleotide"
  misc_feature (61)..(61): /note="Nucleotide may be methylated to form 5-methylcytosine"
attagaagaagcaccaagcactatcaacattagcaaatcagtactaggaagtagcttggccgcttccttccatttccttccaaccctgggaactctttccattaaaaacatttctccaccac

SEQ ID NO: 1015 - DNA, 122 bp, Homo sapiens
  misc_feature (61)..(62): /note="This region represents a CpG dinucleotide"
  misc_feature (61)..(61): /note="Nucleotide may be methylated to form 5-methylcytosine"
cttgctcgttccatgcagtggaggaggaagaggctgggcccctgctgtgtgggggcagcccgggaaggacatggtcaccagccttgggtcatcagtaattagtgagcgtcacgggtaaagag

SEQ ID NO: 1016 - DNA, 122 bp, Homo sapiens
  misc_feature (61)..(62): /note="This region represents a CpG dinucleotide"
  misc_feature (61)..(61): /note="Nucleotide may be methylated to form 5-methylcytosine"
tcaccgggcagctggcaggcctctaccctgcatggggccccgtttcaggctaagtggggccggcctcccagctttatgtcctccttcagaggggaaggaggcagtgatgtcacagaggtctc

SEQ ID NO: 1017 - DNA, 122 bp, Homo sapiens
  misc_feature (61)..(62): /note="This region represents a CpG dinucleotide"
  misc_feature (61)..(61): /note="Nucleotide may be methylated to form 5-methylcytosine"
ttccacggctcacctcctgcccgcacccgggccccacctctgcctccaaatcacccaccccgccagccccccttgcaggtcacaacccgtcccaggtgacaccccgcccccagcctcgcccc

SEQ ID NO: 1018 - DNA, 122 bp, Homo sapiens
  misc_feature (61)..(62): /note="This region represents a CpG dinucleotide"
  misc_feature (61)..(61): /note="Nucleotide may be methylated to form 5-methylcytosine"
gcagtgctctccccagaaagcctcattatgtgagtagtaaatcccttcaaaccctcctgacgtgtgaggtccatctcacctatgaaggacatctacaaaagaaacaaatcagtttcatgggc

SEQ ID NO: 1019 - DNA, 122 bp, Homo sapiens
  misc_feature (61)..(62): /note="This region represents a CpG dinucleotide"
  misc_feature (61)..(61): /note="Nucleotide may be methylated to form 5-methylcytosine"
ttttcccctctaaatgcggctggccagagccggggcagtggcccaccttagcatcttcttcgtgtgtgtgtgtgtgtgtgcgcgtgtgtgtgtgtgtgtttgtgtgttgggggggtcgctag

SEQ ID NO: 1020 - DNA, 122 bp, Homo sapiens
  misc_feature (61)..(62): /note="This region represents a CpG dinucleotide"
  misc_feature (61)..(61): /note="Nucleotide may be methylated to form 5-methylcytosine"
cgctgacccacaggatgtgactcaaatttctaaagctctcacaactctcccctccttccccgtgacactgctctaatcccacctctgggtgtaccagatacctctcgctcctgccttggccc

SEQ ID NO: 1021 - DNA, 122 bp, Homo sapiens
  misc_feature (61)..(62): /note="This region represents a CpG dinucleotide"
  misc_feature (61)..(61): /note="Nucleotide may be methylated to form 5-methylcytosine"
ggctgtcaccctttcttcactcagcccagcaactgatcacatcttctgtcactcagggcacgagaaggtggggttttaaaagttatccaatcagcgacgctgggttgggaaccgtccaatca

SEQ ID NO: 1022 - DNA, 122 bp, Homo sapiens
  misc_feature (61)..(62): /note="This region represents a CpG dinucleotide"
  misc_feature (61)..(61): /note="Nucleotide may be methylated to form 5-methylcytosine"
atttgcaagaaatccaagaaagccctggtgagtggttgcttttcctatgttgcaaccatccgcgaagtgaatgctgctctgtgtctctattgttgttttgatggtgttcgagatgatgagga

SEQ ID NO: 1023 - DNA, 122 bp, Homo sapiens
  misc_feature (61)..(62): /note="This region represents a CpG dinucleotide"
  misc_feature (61)..(61): /note="Nucleotide may be methylated to form 5-methylcytosine"
tgagaatttcatatcccagaaaacatgcaaatatcaattcttctaattttgttcacttatcggaaggcaaaactacttactttcctgactcagaagcacaaacagaaagtaaagaatacttc

SEQ ID NO: 1024 - DNA, 122 bp, Homo sapiens
  misc_feature (61)..(62): /note="This region represents a CpG dinucleotide"
  misc_feature (61)..(61): /note="Nucleotide may be methylated to form 5-methylcytosine"
actcatctctcatcttgcacaagtttggcttttgagggacttggataactccatgagggccgtgacatatgcaatacatgcctcataaccagggcttgccacactgcgattgcagcaggaca

SEQ ID NO: 1025 - DNA, 122 bp, Homo sapiens
  misc_feature (61)..(62): /note="This region represents a CpG dinucleotide"
  misc_feature (61)..(61): /note="Nucleotide may be methylated to form 5-methylcytosine"
acacttatcaatctggggcctctccgaagatgctgagaccagggccagtctcagctgcaacgccctgcttggaagccactatgggatgattctgcaacagatatcatgatgcaacagatgcc

SEQ ID NO: 1026 - DNA, 122 bp, Homo sapiens
  misc_feature (61)..(62): /note="This region represents a CpG dinucleotide"
  misc_feature (61)..(61): /note="Nucleotide may be methylated to form 5-methylcytosine"
gcctccacctctctggcctgtttcctcacctgggatttagtatgattggcaaggcctccacgcatgggtggccaaggggcatgttgaaatccactgtgcactctggcatgagctgaaaccag

SEQ ID NO: 1027 - DNA, 122 bp, Homo sapiens
  misc_feature (61)..(62): /note="This region represents a CpG dinucleotide"
  misc_feature (61)..(61): /note="Nucleotide may be methylated to form 5-methylcytosine"
acagcctcagacggtgtgagcagctgggggacccctcagatgtggctccctctgtccctccggcctgtgctggcctgcccctgcccccaggcctgtaagctgggcaggctgtggggcaggaa

SEQ ID NO: 1028 - DNA, 122 bp, Homo sapiens
  misc_feature (61)..(62): /note="This region represents a CpG dinucleotide"
  misc_feature (61)..(61): /note="Nucleotide may be methylated to form 5-methylcytosine"
ggctgtgtggtgtagccattgcccctaggtgacaaaccacagctgtcatccacttaatgccggaagcagttgtgacataatgctgagtatgtgcctgaacacaaaagctaatcctagaaaag

SEQ ID NO: 1029 - DNA, 122 bp, Homo sapiens
  misc_feature (61)..(62): /note="This region represents a CpG dinucleotide"
  misc_feature (61)..(61): /note="Nucleotide may be methylated to form 5-methylcytosine"
gcagaccccaaacccacagtatgaatgcatctctcaccgggctagcattgctgacctccacggcatggcatcagctactctgactcagttcacccacggcagtgagtgtgtcctctcacaca

SEQ ID NO: 1030 - DNA, 122 bp, Homo sapiens
  misc_feature (61)..(62): /note="This region represents a CpG dinucleotide"
  misc_feature (61)..(61): /note="Nucleotide may be methylated to form 5-methylcytosine"
ttgtcttcttatgaaaagaaaagtagtctcaacatgctctgagtaaacttgatgtgttcacgctccaagaaatagggaaggaagaaaaaggtgtgggcagtgtcataatggacttcattcat

SEQ ID NO: 1031 - DNA, 122 bp, Homo sapiens
  misc_feature (61)..(62): /note="This region represents a CpG dinucleotide"
  misc_feature (61)..(61): /note="Nucleotide may be methylated to form 5-methylcytosine"
catgattctgaagtcagagattccgtccataggaacagtaggggtgcagatagtcactagcgctacgtgactttcagttagaaggaagtgggttaaagtgtagcctgacaaatgctgagtta

SEQ ID NO: 1032 - DNA, 122 bp, Homo sapiens
  misc_feature (61)..(62): /note="This region represents a CpG dinucleotide"
  misc_feature (61)..(61): /note="Nucleotide may be methylated to form 5-methylcytosine"
ggtttgtccctgttcctaggatgagactctgcagagccttcatttcaaaagctagcagatcgttatcttctaggtacctagatactataagaattgctttgtttttaagagacttctggttt

SEQ ID NO: 1033 - DNA, 122 bp, Homo sapiens
  misc_feature (61)..(62): /note="This region represents a CpG dinucleotide"
  misc_feature (61)..(61): /note="Nucleotide may be methylated to form 5-methylcytosine"
attaaatgaaaatactgtgccagtctcaaacctaactgtgcatgataatcatctctgtaccgttttatttatttcgaaatacagaaatgtaggtcctacttcagacttacctaatcataatc

SEQ ID NO: 1034 - DNA, 122 bp, Homo sapiens
  misc_feature (61)..(62): /note="This region represents a CpG dinucleotide"
  misc_feature (61)..(61): /note="Nucleotide may be methylated to form 5-methylcytosine"
tggcaccaagatatggttgtgaaataggaagtctccagaaaataatgaaaaattataaaccgtgcccatagacaatagtcagcaaaaacagattgtggaaagacaggaagacagagcttatc

SEQ ID NO: 1035 - DNA, 122 bp, Homo sapiens
  misc_feature (61)..(62): /note="This region represents a CpG dinucleotide"
  misc_feature (61)..(61): /note="Nucleotide may be methylated to form 5-methylcytosine"
tacttatgttgtgctacaattgcctacagtattcagtatagcaacatgccatacaggttccgcaagttactgcagagcaataggctccagcacgtggcctaggtgtgtagtaggcataccat

SEQ ID NO: 1036 - DNA, 122 bp, Homo sapiens
  misc_feature (61)..(62): /note="This region represents a CpG dinucleotide"
  misc_feature (61)..(61): /note="Nucleotide may be methylated to form 5-methylcytosine"
tgagcttctctatgttatgtctacatggctatgattgtataagacacgagactgcacttgcgccccaatactgctgagtcatttaggctgtttaccttgacctatgcctgctgctctatgcc

SEQ ID NO: 1037 - DNA, 122 bp, Homo sapiens
  misc_feature (61)..(62): /note="This region represents a CpG dinucleotide"
  misc_feature (61)..(61): /note="Nucleotide may be methylated to form 5-methylcytosine"
atcctggcatctctacttctgaagatgccattccttttcctcagagggaatgggcttctccgcctccctctccaataggtgtggcaatcagctgtcttccagttccctttcactgcatcagc

SEQ ID NO: 1038 - DNA, 122 bp, Homo sapiens
  misc_feature (61)..(62): /note="This region represents a CpG dinucleotide"
  misc_feature (61)..(61): /note="Nucleotide may be methylated to form 5-methylcytosine"
cccctatgcacagataacacaaacagctaacgagtattgatcttactatgggccaggcaacgtgacagttgctttatacatcaaatctcttgtaatccccactccaacccggtgaggtaggt

SEQ ID NO: 1039 - DNA, 122 bp, Homo sapiens
  misc_feature (61)..(62): /note="This region represents a CpG dinucleotide"
  misc_feature (61)..(61): /note="Nucleotide may be methylated to form 5-methylcytosine"
agaggtgtcagcggctcacaacaccttgggctgggccagagggaggcccggtccccggggcgggatcgctaacctccagggctgcgtcggtgctggcctcaaagccgtcacagaccagcacg

SEQ ID NO: 1040 - DNA, 122 bp, Homo sapiens
  misc_feature (61)..(62): /note="This region represents a CpG dinucleotide"
  misc_feature (61)..(61): /note="Nucleotide may be methylated to form 5-methylcytosine"
ccaggtgcggcgctggtgacaggttgttgaggcgccgcgtgggcgaggactcccgcgatgcgtacaccatctctctctgcgcagaagacagcccggaaccccacggggctggtcaccaaggt

SEQ ID NO: 1041 - DNA, 122 bp, Homo sapiens
  misc_feature (61)..(62): /note="This region represents a CpG dinucleotide"
  misc_feature (61)..(61): /note="Nucleotide may be methylated to form 5-methylcytosine"
aaagattaacgccgcccccactctaaccagatgtgctctcaatctatcatgaccctttcacgtggaaccccttagatttgtaagcccttcttgagacgtgagtctgccgaagttcccggcca

SEQ ID NO: 1042 - DNA, 122 bp, Homo sapiens
  misc_feature (61)..(62): /note="This region represents a CpG dinucleotide"
  misc_feature (61)..(61): /note="Nucleotide may be methylated to form 5-methylcytosine"
agctgtgggaatttaggaagttatttaatctctcattgagcccaggaataaaactgggaacgtacctactttggtgtgttttggagatggctgatgtagtaacaatatacggtccaagcata

SEQ ID NO: 1043 - DNA, 122 bp, Homo sapiens
  misc_feature (61)..(62): /note="This region represents a CpG dinucleotide"
  misc_feature (61)..(61): /note="Nucleotide may be methylated to form 5-methylcytosine"
tttttactggcatctccttcctgtaataagcattgatttccttcatttctacattaccatcgtgcttatgatctttaccttacaaagctaaactttactcagtcattccacaaatatttaca

SEQ ID NO: 1044 - DNA, 122 bp, Homo sapiens
  misc_feature (61)..(62): /note="This region represents a CpG dinucleotide"
  misc_feature (61)..(61): /note="Nucleotide may be methylated to form 5-methylcytosine"
acccattcccctgtctctgttctcttttgcaagcttctgtttgcccactgggggagcttgcgccctactatttttctgttggcgatccacagtttccttaacagcagatccactagcagaac

SEQ ID NO: 1045 - DNA, 122 bp, Homo sapiens
  misc_feature (61)..(62): /note="This region represents a CpG dinucleotide"
  misc_feature (61)..(61): /note="Nucleotide may be methylated to form 5-methylcytosine"
tcccggccgtgcctgtgcagtgggggaactgcggggatacaggtgagccgcgggggcgcgcgccctcggaacactttctaactctggaggagcgtaaaggaacaagacctcactgagaccgc

SEQ ID NO: 1046 - DNA, 122 bp, Homo sapiens
  misc_feature (61)..(62): /note="This region represents a CpG dinucleotide"
  misc_feature (61)..(61): /note="Nucleotide may be methylated to form 5-methylcytosine"
tgtgcttaatgtttcaagtggctcctgagaatgatgcttcttgactaaagatgacaacttcggtgtctggcccaggcagagctgagtcagcattctaaacagtgaccctgcaaacctgaggt

SEQ ID NO: 1047 - DNA, 122 bp, Homo sapiens
  misc_feature (61)..(62): /note="This region represents a CpG dinucleotide"
  misc_feature (61)..(61): /note="Nucleotide may be methylated to form 5-methylcytosine"
ctgtggtgacccactgcttccgggggatgggcaagctcccatgcagtggcagtgagcacccgcctgggcaaggctggttcttgggaaatgtgcctgttggcttccttctccccaccccttga

SEQ ID NO: 1048 - DNA, 122 bp, Homo sapiens
  misc_feature (61)..(62): /note="This region represents a CpG dinucleotide"
  misc_feature (61)..(61): /note="Nucleotide may be methylated to form 5-methylcytosine"
tccgcatgggctcggggatttcagagtgctgggtcctggccccatgagtaagggatcacccgctcatctttcagcccatccaagcatcttggaggtttagaatctgtcaggcctggcattcc

SEQ ID NO: 1049 - DNA, 122 bp, Homo sapiens
  misc_feature (61)..(62): /note="This region represents a CpG dinucleotide"
  misc_feature (61)..(61): /note="Nucleotide may be methylated to form 5-methylcytosine"
ggactagggagaacggtaccggaagcccgtgtctcggaggctgctgggagctgtaggccccgcgggtgtcgtagttctgggcgcttttccgggtccagggggggcagggttcgaggcgtggc

SEQ ID NO: 1050 - DNA, 122 bp, Homo sapiens
  misc_feature (61)..(62): /note="This region represents a CpG dinucleotide"
  misc_feature (61)..(61): /note="Nucleotide may be methylated to form 5-methylcytosine"
gttgaaattcgacccatttctattactcaagcttactacaaggtcacatgaggccaagaacgggtactgcaggaacactaataatactgactattgtaacaagagctagcatttaggccagg

SEQ ID NO: 1051 - DNA, 122 bp, Homo sapiens
  misc_feature (61)..(62): /note="This region represents a CpG dinucleotide"
  misc_feature (61)..(61): /note="Nucleotide may be methylated to form 5-methylcytosine"
ccagtttaaatcttcctgtaagcatgataaggaagttccctctgatttaatccttacacacgaaaaagtagccttaaataacctgatattaactcatcagttttatttttatttatttattt

SEQ ID NO: 1052 - DNA, 122 bp, Homo sapiens
  misc_feature (61)..(62): /note="This region represents a CpG dinucleotide"
  misc_feature (61)..(61): /note="Nucleotide may be methylated to form 5-methylcytosine"
tttctaggaaatagctcacttgccagttttggtaaccctaacagagctgttttgccaaggcgtctggtgaatatttctgtcttccagtcaggactaatatagtacttttcagaggtgatagc

SEQ ID NO: 1053 - DNA, 122 bp, Homo sapiens
  misc_feature (61)..(62): /note="This region represents a CpG dinucleotide"
  misc_feature (61)..(61): /note="Nucleotide may be methylated to form 5-methylcytosine"
gagagacataccagttgccagctccttagggatgtcacaaggaatcagtgagttaatacacgtggagtgcttacacaatgcccagcacacactccataggtggtgtggccagaatgcaaatt

SEQ ID NO: 1054 - DNA, 122 bp, Homo sapiens
  misc_feature (61)..(62): /note="This region represents a CpG dinucleotide"
  misc_feature (61)..(61): /note="Nucleotide may be methylated to form 5-methylcytosine"
cgcgggcccggggagggagctcgcggccaaggcgtttacgagcttggagggctcggccctcgcgcctcgcggagccgggaatgaaagcgagccaggccgcccggccgcctgcataaaacggc

SEQ ID NO: 1055 - DNA, 122 bp, Homo sapiens
  misc_feature (61)..(62): /note="This region represents a CpG dinucleotide"
  misc_feature (61)..(61): /note="Nucleotide may be methylated to form 5-methylcytosine"
ggacagtaagcatggttgacctggtccttctggaccttcatggagcttttgtttttgagacggaggctctctctgtcgcccaggttggagtgcaatggtgtgatctcggctcactgcaacct

SEQ ID NO: 1056 - DNA, 122 bp, Homo sapiens
  misc_feature (61)..(62): /note="This region represents a CpG dinucleotide"
  misc_feature (61)..(61): /note="Nucleotide may be methylated to form 5-methylcytosine"
gaagactgtgggcctgcgtggcaggcaggggaagaaggggggaggaagagggtttcctagcgccatctaatttaaagcacctttagctgagtggtgcagtgaaaaggatgtggctaaaacaa

SEQ ID NO: 1057 - DNA, 122 bp, Homo sapiens
  misc_feature (61)..(62): /note="This region represents a CpG dinucleotide"
  misc_feature (61)..(61): /note="Nucleotide may be methylated to form 5-methylcytosine"
tccaaaactcgacccgctggccccttccattgtcattgctacatgaggtccacgccactccgccgttcagcagccgccccgaaccagcgaagaaagctatcgatcgtaaaacaaaataaaca

SEQ ID NO: 1058 - DNA, 122 bp, Homo sapiens
  misc_feature (61)..(62): /note="This region represents a CpG dinucleotide"
  misc_feature (61)..(61): /note="Nucleotide may be methylated to form 5-methylcytosine"
cttaggatccttaattatgatctataaagatgctatttcccaacagagtctcattcacagcgaccggggttaggatgtggacatgtcttttctgggcgatacatttcaacctactacaggca

SEQ ID NO: 1059 - DNA, 122 bp, Homo sapiens
  misc_feature (61)..(62): /note="This region represents a CpG dinucleotide"
  misc_feature (61)..(61): /note="Nucleotide may be methylated to form 5-methylcytosine"
caatttgtaaaagtgctaggtgttataatttggctctaatatttcaaatatattgagtaacgaacaaatgtaacaaagtagatggaaaatatttatgttagagaggctgacttagcactaaa

SEQ ID NO: 1060 - DNA, 122 bp, Homo sapiens
  misc_feature (61)..(62): /note="This region represents a CpG dinucleotide"
  misc_feature (61)..(61): /note="Nucleotide may be methylated to form 5-methylcytosine"
atgctgcctgccaacaggggaaccttggctctcctctgcaggccccttatccttctggggcgagactggcttacttacacagaggtctcagagcagagttccaagaaggtgaaagtggaagt

SEQ ID NO: 1061 - DNA, 122 bp, Homo sapiens
  misc_feature (61)..(62): /note="This region represents a CpG dinucleotide"
  misc_feature (61)..(61): /note="Nucleotide may be methylated to form 5-methylcytosine"
tcattcacatcagctcacactgcagggtaacttgacatggaagtacaatgagtgggagatcgtggctctctttcatgcattcctgtagagtgacaagagccatccaacagagcatcctcagt

SEQ ID NO: 1062 - DNA, 122 bp, Homo sapiens
  misc_feature (61)..(62): /note="This region represents a CpG dinucleotide"
  misc_feature (61)..(61): /note="Nucleotide may be methylated to form 5-methylcytosine"
gacttttcaaagggattatacctaaatccaataaagcctctggctccagctgccaatttgcggtaatacagccaatagagaaatgtgttaaactgtatcaagagcaaaatccagactgtgag

SEQ ID NO: 1063 - DNA, 122 bp, Homo sapiens
  misc_feature (61)..(62): /note="This region represents a CpG dinucleotide"
  misc_feature (61)..(61): /note="Nucleotide may be methylated to form 5-methylcytosine"
taaatgcttttccagttatgaggaagctgattagagctgtattttcagaagatgatacagcgcactagagatatatcttaggatataaaagattagtgacggggaattttagactatcaagc

SEQ ID NO: 1064 - DNA, 122 bp, Homo sapiens
  misc_feature (61)..(62): /note="This region represents a CpG dinucleotide"
  misc_feature (61)..(61): /note="Nucleotide may be methylated to form 5-methylcytosine"
tctgctctgggggccctccacagcccagctccaggaaggtgactgcttcctggtttgagacgtattattaaactgtaatcatactgtgcatggagtcagccaaagcagtggctattaatagg

SEQ ID NO: 1065 - DNA, 122 bp, Homo sapiens
  misc_feature (61)..(62): /note="This region represents a CpG dinucleotide"
  misc_feature (61)..(61): /note="Nucleotide may be methylated to form 5-methylcytosine"
cagttgcataaagcctggtgcagagctgctggcaacccaagggtatagcaatctgggactcgagaagtgaaagctgtaatagtgcagttgccgcctgagcaaggatcatgtgggactcacag

SEQ ID NO: 1066 - DNA, 122 bp, Homo sapiens
  misc_feature (61)..(62): /note="This region represents a CpG dinucleotide"
  misc_feature (61)..(61): /note="Nucleotide may be methylated to form 5-methylcytosine"
gctgcttccccaggcggcccccagaactcccaccgcggtggttgtaaagaaactgtgaaccggagcgctcaggcaccagacacagccacctgagacaacggcagtggcagggaagccgtttc

SEQ ID NO: 1067 - DNA, 122 bp, Homo sapiens
  misc_feature (61)..(62): /note="This region represents a CpG dinucleotide"
  misc_feature (61)..(61): /note="Nucleotide may be methylated to form 5-methylcytosine"
gtgaaactactgatgcccgctggtctgaagaattccccaagaagctgactcacgaaaaaacgcattttctacatccagatgatttcatcccccttacctaactaatcaacaactccaatttt

SEQ ID NO: 1068 - DNA, 122 bp, Homo sapiens
  misc_feature (61)..(62): /note="This region represents a CpG dinucleotide"
  misc_feature (61)..(61): /note="Nucleotide may be methylated to form 5-methylcytosine"
atcacctcccaaatatcccacttgcacccaaaaccttgtcttgggtcagcttctgggagccgacctaagccagcagctataatgctcagggcttaagagctttggaatcagatggacctgag

SEQ ID NO: 1069 - DNA, 122 bp, Homo sapiens
  misc_feature (61)..(62): /note="This region represents a CpG dinucleotide"
  misc_feature (61)..(61): /note="Nucleotide may be methylated to form 5-methylcytosine"
gtctttttcttgatccttcttttgagtcctaagtaccgccattacagcttcaaattggcacgtcatataggcgaatttcaaagggagatgcaatccacagaagtatagtagttcaaagggtt

SEQ ID NO: 1070 - DNA, 122 bp, Homo sapiens
  misc_feature (61)..(62): /note="This region represents a CpG dinucleotide"
  misc_feature (61)..(61): /note="Nucleotide may be methylated to form 5-methylcytosine"
cttccagcccattcgggaagatgacacactgaacaaacagatagtggcaggaaagggtgtcgtgtacctgacgggtaacacacaagatgccctggaagctcttagcacaggggcttgtgaga

SEQ ID NO: 1071 - DNA, 122 bp, Homo sapiens
  misc_feature (61)..(62): /note="This region represents a CpG dinucleotide"
  misc_feature (61)..(61): /note="Nucleotide may be methylated to form 5-methylcytosine"
catgtgggtgaggtaccttggaaacagatctcccagcactaagcaagccagaagacatctcgacagcaatcccgtgagaaactgtgggacagaaccacccagctaagcagctcgcagattcg

SEQ ID NO: 1072 - DNA, 122 bp, Homo sapiens
  misc_feature (61)..(62): /note="This region represents a CpG dinucleotide"
  misc_feature (61)..(61): /note="Nucleotide may be methylated to form 5-methylcytosine"
ccacgcctcccgacttcctcctggagtggctgggcagcatgcagggcagcgtccagtaggcggcagtggcaggaagggagcgggcggccctcgcaggtccctcagttggcagggctgcattg

SEQ ID NO: 1073 - DNA, 122 bp, Homo sapiens
  misc_feature (61)..(62): /note="This region represents a CpG dinucleotide"
  misc_feature (61)..(61): /note="Nucleotide may be methylated to form 5-methylcytosine"
ccgcctgactctcgcctgcttgcgccccgggccggttagtgctcacttggagggttgatgcggggactgacagtgcctcaatgtcagtccccgcaccatcaatgtgggtatcaatgagggca

SEQ ID NO: 1074 - DNA, 122 bp, Homo sapiens
  misc_feature (61)..(62): /note="This region represents a CpG dinucleotide"
  misc_feature (61)..(61): /note="Nucleotide may be methylated to form 5-methylcytosine"
tgaacatgaaacaatctagaaagtcagtggtgtgtggaacagcccaaagcaggccagctccgccacaaggtccagtctctaacccaaccctgctgccactcagctctgtggcctcgggcagc

SEQ ID NO: 1075 - DNA, 122 bp, Homo sapiens
  misc_feature (61)..(62): /note="This region represents a CpG dinucleotide"
  misc_feature (61)..(61): /note="Nucleotide may be methylated to form 5-methylcytosine"
tgttaaggaaagggctgtggcatgccctctgcccacatgaccttcctcatctgcctgagacgtcatccttcaggtccagccaacattttcctcctcctttgaagccttccctaactgctcct

SEQ ID NO: 1076 - DNA, 122 bp, Homo sapiens
  misc_feature (61)..(62): /note="This region represents a CpG dinucleotide"
  misc_feature (61)..(61): /note="Nucleotide may be methylated to form 5-methylcytosine"
gcccacgggtcgtcgggtggcctgcgcggggaaagcaagtcgccgtgcaggtccctagggcggtgttcgccccgcggctggagctgcaggccgggcggaggcgggaggtcgcccggggagaa

SEQ ID NO: 1077 - DNA, 122 bp, Homo sapiens
  misc_feature (61)..(62): /note="This region represents a CpG dinucleotide"
  misc_feature (61)..(61): /note="Nucleotide may be methylated to form 5-methylcytosine"
actcccacacaaagcgcctgcagctgacagccgccgggaggggacatctggacagcctcacgcagctttcagacctgcagtccatgttaaaaggatcttgtttccaatttgccttaattaaa

SEQ ID NO: 1078 - DNA, 122 bp, Homo sapiens
  misc_feature (61)..(62): /note="This region represents a CpG dinucleotide"
  misc_feature (61)..(61): /note="Nucleotide may be methylated to form 5-methylcytosine"
ggaaccctaacaaccagataggaaaagcagaattcatagggctgctgatgtggcatttctcgtttactggcagcttctggcctgcaggttgagctccccagtctagatttgtggaggccaag

SEQ ID NO: 1079 - DNA, 122 bp, Homo sapiens
  misc_feature (61)..(62): /note="This region represents a CpG dinucleotide"
  misc_feature (61)..(61): /note="Nucleotide may be methylated to form 5-methylcytosine"
agacaaagaactgtctttggttgagagggtgtttctgtccacttgctgtgccatgcaggacgtgagacgggatagggagatttcatgtgtgtcataggctgatgtggttctgccattgtaag

SEQ ID NO: 1080 - DNA, 122 bp, Homo sapiens
  misc_feature (61)..(62): /note="This region represents a CpG dinucleotide"
  misc_feature (61)..(61): /note="Nucleotide may be methylated to form 5-methylcytosine"
ttaagcttaagcttattagtttccaggtaaattcaccactgctgtcaacacataaggatccgttgatcctataaggcagggacaaattgttcaactgaagagtttgatccacaggaacaaag

SEQ ID NO: 1081 - DNA, 122 bp, Homo sapiens
  misc_feature (61)..(62): /note="This region represents a CpG dinucleotide"
  misc_feature (61)..(61): /note="Nucleotide may be methylated to form 5-methylcytosine"
aagacaggtctttgtgttctctcagcagcccgtggtgacatgagtgagtgcctctgtacacgctgcactgtctctctggttatcatctgacagtcagccttcccatcgctcttcctgtcttt

SEQ ID NO: 1082 - DNA, 122 bp, Homo sapiens
  misc_feature (61)..(62): /note="This region represents a CpG dinucleotide"
  misc_feature (61)..(61): /note="Nucleotide may be methylated to form 5-methylcytosine"
gtagtgtccataggacgggaaaggcgtgtagtacgcggccaggttctgcgggctgctctccggcgggtagcacaccttgtcctgaggcacggcctcacttggccggggtagagccatcccgg

SEQ ID NO: 1083 - DNA, 122 bp, Homo sapiens
  misc_feature (61)..(62): /note="This region represents a CpG dinucleotide"
  misc_feature (61)..(61): /note="Nucleotide may be methylated to form 5-methylcytosine"
aatgggagggccagagagggtgcctctcactcccatagtctctgagcgtgataacggtagcgccagaccagcacacaggcttcatgattttcagcagcatgttcttcccatccatgcgtatt

SEQ ID NO: 1084 - DNA, 122 bp, Homo sapiens
  misc_feature (61)..(62): /note="This region represents a CpG dinucleotide"
  misc_feature (61)..(61): /note="Nucleotide may be methylated to form 5-methylcytosine"
gtggcccgggcgaggtctgtgtggtgctgaacgcctcctctgctctgttcccttccagcccgaccctgcccgccctggactggcagctgccgtcccactcaggcccgtatgagcttcggatt

SEQ ID NO: 1085 - DNA, 122 bp, Homo sapiens
  misc_feature (61)..(62): /note="This region represents a CpG dinucleotide"
  misc_feature (61)..(61): /note="Nucleotide may be methylated to form 5-methylcytosine"
ctccctgctgctgcttcaccttgccttagcttgtgtaagcgtcagggaaacaggcaaatgcgtctcatttgtcttcagaaccctgtcttattagatcgccatcaactacatttggagcaatc

SEQ ID NO: 1086 - DNA, 122 bp, Homo sapiens
  misc_feature (61)..(62): /note="This region represents a CpG dinucleotide"
  misc_feature (61)..(61): /note="Nucleotide may be methylated to form 5-methylcytosine"
tggccaccagctactgcgggaggctctgggaggccagcggaaggcgcagcgcgcggtggacggtgctcgggcgtagagggggagagcggccggtagagggggagagcagaccagcccggccg

SEQ ID NO: 1087 - DNA, 122 bp, Homo sapiens
  misc_feature (61)..(62): /note="This region represents a CpG dinucleotide"
  misc_feature (61)..(61): /note="Nucleotide may be methylated to form 5-methylcytosine"
agcaaggagggaaagggtgcatcagcaagaaaccactttttacaatgagcaaagaggccacggccacacttacccaaagcgaagaagaagtacaggggaaattaagaagcaaaaagaaagta

SEQ ID NO: 1088 - DNA, 122 bp, Homo sapiens
  misc_feature (61)..(62): /note="This region represents a CpG dinucleotide"
  misc_feature (61)..(61): /note="Nucleotide may be methylated to form 5-methylcytosine"
ggtttgttttgcggatcaactgagataatatatgcaaagcacttggcataaagcctggcgcgtgataagaaccaaattaagaatggctgctattgaattgtggctgtggctgttaccacctt

SEQ ID NO: 1089 - DNA, 122 bp, Homo sapiens
  misc_feature (61)..(62): /note="This region represents a CpG dinucleotide"
  misc_feature (61)..(61): /note="Nucleotide may be methylated to form 5-methylcytosine"
tcgtgtttgctgtgttttaaagatgacctactagttcatcagtgggtccagaccctgcaccgttgctggggaaaatgaggttagggctgtggtcacacggcagcaggggcggaaattggcac

SEQ ID NO: 1090 - DNA, 122 bp, Homo sapiens
  misc_feature (61)..(62): /note="This region represents a CpG dinucleotide"
  misc_feature (61)..(61): /note="Nucleotide may be methylated to form 5-methylcytosine"
tttctaccaagcctttgtgaacattgctcttcattttggcctgtacttctccctcagggacgtagaacaatggaatgtcagtcagtctctgtagttaaaactttttctttaaaattcaatta

SEQ ID NO: 1091 - DNA, 122 bp, Homo sapiens
  misc_feature (61)..(62): /note="This region represents a CpG dinucleotide"
  misc_feature (61)..(61): /note="Nucleotide may be methylated to form 5-methylcytosine"
gtagggaaagactaaacaggtaggcaagaactaggtcatggggtgccctggaggccatgtcgacctgatgatattcatttgaagaacaatagggagctattggaggctttctccactaacta

SEQ ID NO: 1092 - DNA, 122 bp, Homo sapiens
  misc_feature (61)..(62): /note="This region represents a CpG dinucleotide"
  misc_feature (61)..(61): /note="Nucleotide may be methylated to form 5-methylcytosine"
taaacagaaatgttttatatgaatgatcccatttaactctcacaataaccctatgggatacgtgttataataatcactatttcacagatgtgggaactcagagatcagagagattatgtaac

SEQ ID NO: 1093 - DNA, 122 bp, Homo sapiens
  misc_feature (61)..(62): /note="This region represents a CpG dinucleotide"
  misc_feature (61)..(61): /note="Nucleotide may be methylated to form 5-methylcytosine"
aattgcccaagtcacaacatctttctagtggagccatgtacctgttttgagtcattgccacggtttttggaacaagctcccgcctacttgctgggactgagcctctctggcatgctctgacc

SEQ ID NO: 1094 - DNA, 122 bp, Homo sapiens
  misc_feature (61)..(62): /note="This region represents a CpG dinucleotide"
  misc_feature (61)..(61): /note="Nucleotide may be methylated to form 5-methylcytosine"
ctctgtcaaggggagtcactgggacggtgtaggatcagccttcagagcctgctgcctgaccgtagaggaggaacctgcacacaccctgctgttttagttcacgagcagctatcaaagcctgt

SEQ ID NO: 1095 - DNA, 122 bp, Homo sapiens
  misc_feature (61)..(62): /note="This region represents a CpG dinucleotide"
  misc_feature (61)..(61): /note="Nucleotide may be methylated to form 5-methylcytosine"
ggtatgtcccacaagtcaaagataaagttaccacaatcttaaagccaggttcaagcatggcgtaatgacaaatcacagtgatttgtggaatggaaaatgcttccatcggggagttgggctgc

SEQ ID NO: 1096 - DNA, 122 bp, Homo sapiens
  misc_feature (61)..(62): /note="This region represents a CpG dinucleotide"
  misc_feature (61)..(61): /note="Nucleotide may be methylated to form 5-methylcytosine"
ggatcttcagtgatttacataatttctctgagtcatgatttcctcctctctgagacaatccgttcacgaaagtatcaagttgtgaacggcacatagtaggtccccggtgctgactcattact

SEQ ID NO: 1097 - DNA, 122 bp, Homo sapiens
  misc_feature (61)..(62): /note="This region represents a CpG dinucleotide"
  misc_feature (61)..(61): /note="Nucleotide may be methylated to form 5-methylcytosine"
gagtctgaggggacaaggtcagaggggtgatgggggcacgttatgtggggcccactgagacgggctgaggatgaggactttggtcttattactaagtgagaaaagaaccatgagagggttaa

SEQ ID NO: 1098 - DNA, 122 bp, Homo sapiens
  misc_feature (61)..(62): /note="This region represents a CpG dinucleotide"
  misc_feature (61)..(61): /note="Nucleotide may be methylated to form 5-methylcytosine"
cgcatgggtgtgttgccatagagacgacgggaacgctggatgtagatttcaatgtttttgcgttccaaagaggcatagagctcctcaattttgcgggcaggcaacaactccccatgctgctt

SEQ ID NO: 1099 - DNA, 122 bp, Homo sapiens
  misc_feature (61)..(62): /note="This region represents a CpG dinucleotide"
  misc_feature (61)..(61): /note="Nucleotide may be methylated to form 5-methylcytosine"
cccccatctaagttggccctctctgtgctccatatcattgccccctccttgacttcctttcgcaatttatcacgcgcatatgtatgtgtatgcataaacagatataattttgtttgctcgct

SEQ ID NO: 1100 - DNA, 122 bp, Homo sapiens
  misc_feature (61)..(62): /note="This region represents a CpG dinucleotide"
  misc_feature (61)..(61): /note="Nucleotide may be methylated to form 5-methylcytosine"
cggaatgtctcaggcgggctctgaaacctggagcttttctgtggcagaagaaatgcagagcgggagttttgtaggcaatctggcaaaggacctggggctgaaggtgagagaactgtcctcac

SEQ ID NO: 1101 - DNA, 122 bp, Homo sapiens
  misc_feature (61)..(62): /note="This region represents a CpG dinucleotide"
  misc_feature (61)..(61): /note="Nucleotide may be methylated to form 5-methylcytosine"
acttaaataacaattgctaacattttaatctctatgttccaagaacttttctaacctcttcgtagaatattaactcatttaatcacaactaccttctgtggtaagcagagatttttgtctgg

SEQ ID NO: 1102 - DNA, 122 bp, Homo sapiens
  misc_feature (61)..(62): /note="This region represents a CpG dinucleotide"
  misc_feature (61)..(61): /note="Nucleotide may be methylated to form 5-methylcytosine"
tgggaatggagtcaagccagcgccaggccgcgatcccctgacctgcgaccgcgaaggagacggcgagcccaagagcgcccacacgtctcccgagaagaagaaggtgagcatggccgaggcca

SEQ ID NO: 1103 - DNA, 122 bp, Homo sapiens
  misc_feature (61)..(62): /note="This region represents a CpG dinucleotide"
  misc_feature (61)..(61): /note="Nucleotide may be methylated to form 5-methylcytosine"
ttttacaagatggtactggctgctttgtagacactggactgggaggggcaagggtggaagcggaaatgccagtcagaaaaaatgacagcagactggattagagaggttacagtggacgcaga

SEQ ID NO: 1104 - DNA, 122 bp, Homo sapiens
  misc_feature (61)..(62): /note="This region represents a CpG dinucleotide"
  misc_feature (61)..(61): /note="Nucleotide may be methylated to form 5-methylcytosine"
ccccttacccacccccacgcacaaagatgtccacagcttaatccctggaacctgtcaatacgttttgttacatggcaaaaaggaattaagctagcagctggacttaaggtcactaaccaact

SEQ ID NO: 1105 - DNA, 122 bp, Homo sapiens
  misc_feature (61)..(62): /note="This region represents a CpG dinucleotide"
  misc_feature (61)..(61): /note="Nucleotide may be methylated to form 5-methylcytosine"
cctaaaggcatttaccctttaagtcccctgggatgctggttactgtcactgatggaggaacggtgaccctgacctgccactgagactctacattatctggattgagaagacaacttttgctg

SEQ ID NO: 1106 - DNA, 122 bp, Homo sapiens
  misc_feature (61)..(62): /note="This region represents a CpG dinucleotide"
  misc_feature (61)..(61): /note="Nucleotide may be methylated to form 5-methylcytosine"
caaagtttgtaaaaattctatgctcttaaaaatggcttttattttaaaacttcccaaatacgttgtcttgaagttgttaatttctcaatcaagacgcagggtggcgctgcaggctaagttgt

SEQ ID NO: 1107 - DNA, 122 bp, Homo sapiens
  misc_feature (61)..(62): /note="This region represents a CpG dinucleotide"
  misc_feature (61)..(61): /note="Nucleotide may be methylated to form 5-methylcytosine"
cccaccagtgagcaggctgaggttgaaggactatatgctgtccatgtcacaactgactcacgaactgcagaaggcaaagctttccactgcagaaaggcattcatgacctcatcccaaaggac

SEQ ID NO: 1108 - DNA, 122 bp, Homo sapiens
  misc_feature (61)..(62): /note="This region represents a CpG dinucleotide"
  misc_feature (61)..(61): /note="Nucleotide may be methylated to form 5-methylcytosine"
gaaaaatttataccggactagacagtggtagtggttgcacaatattgttaaagtactacacgtcactgctataaacacttttaaatgggtgaaatggtaaattttatgttatgcatatttta

SEQ ID NO: 1109 - DNA, 122 bp, Homo sapiens
  misc_feature (61)..(62): /note="This region represents a CpG dinucleotide"
  misc_feature (61)..(61): /note="Nucleotide may be methylated to form 5-methylcytosine"
cctgggcaagaaaccacgagaaacagaaacaagcggcacagggagggggtggcggccgcacgagtgagggccgcttcatctccccgcgcatgccaccaggaccctgccatgccgggggctcc

SEQ ID NO: 1110 - DNA, 122 bp, Homo sapiens
  misc_feature (61)..(62): /note="This region represents a CpG dinucleotide"
  misc_feature (61)..(61): /note="Nucleotide may be methylated to form 5-methylcytosine"
gttaaggcagaaaaacgcagataagaaaatcgaagttgagggcaaggagctcatctttcacggtcatagacctcagttgcaacatctggaaaaagagctggttgggcatgccgggcaggctt

SEQ ID NO: 1111 - DNA, 122 bp, Homo sapiens
  misc_feature (61)..(62): /note="This region represents a CpG dinucleotide"
  misc_feature (61)..(61): /note="Nucleotide may be methylated to form 5-methylcytosine"
tatcctgctgaattagcagaacacaacccctccactgccctgacttcctgcttcctctcccgctttgttcagggcttacttaactttgtatgcttaaatggtcagggtaaaaatgggtcctg

SEQ ID NO: 1112 - DNA, 122 bp, Homo sapiens
  misc_feature (61)..(62): /note="This region represents a CpG dinucleotide"
  misc_feature (61)..(61): /note="Nucleotide may be methylated to form 5-methylcytosine"
tgtggcttcccccctcacctacatcacttccccagctgaatagaggccactttggggctgcgtcaccaagggctcatctaggctgagaaaggagggccaagagtaatgttgtattaacaggc

SEQ ID NO: 1113 - DNA, 122 bp, Homo sapiens
  misc_feature (61)..(62): /note="This region represents a CpG dinucleotide"
  misc_feature (61)..(61): /note="Nucleotide may be methylated to form 5-methylcytosine"
catttctatctgccccctctttatattttgcccctatgcacagataacacaaacagctaacgagtattgatcttactatgggccaggcaacgtgacagttgctttatacatcaaatctcttg

SEQ ID NO: 1114 - DNA, 122 bp, Homo sapiens
  misc_feature (61)..(62): /note="This region represents a CpG dinucleotide"
  misc_feature (61)..(61): /note="Nucleotide may be methylated to form 5-methylcytosine"
tatggctggaaggcatgcataatcacaacagattcttcctggaggagctgccttaatttgcggctgcaatgacatgttctgatgtgacgtcagtctggtgtcagacttccagagtggcaggc

SEQ ID NO: 1115 - DNA, 122 bp, Homo sapiens
  misc_feature (61)..(62): /note="This region represents a CpG dinucleotide"
  misc_feature (61)..(61): /note="Nucleotide may be methylated to form 5-methylcytosine"
gcgggtgaggcggggccttcaatagacaggctcagggccacggggaggctgagcaggtttcgggcctgcgtgcgagagcctgctcttcaagtcatggggaaatcctttctgaaggaagaacc

SEQ ID NO: 1116 - DNA, 122 bp, Homo sapiens
  misc_feature (61)..(62): /note="This region represents a CpG dinucleotide"
  misc_feature (61)..(61): /note="Nucleotide may be methylated to form 5-methylcytosine"
aaggtgtctaatttgtcagtatacagaaaaaagtaaacatagcaggtttgaactactatccgtcgaaaggcctgcttacaatcttggcccttgggtggcatctgggaacatgggtttgggga

SEQ ID NO: 1117 - DNA, 122 bp, Homo sapiens
  misc_feature (61)..(62): /note="This region represents a CpG dinucleotide"
  misc_feature (61)..(61): /note="Nucleotide may be methylated to form 5-methylcytosine"
cacctattttcatcagtaggcagggcagtgctatcagaagagtaggctgcccttctatgacgacagaagctgttcctgatacttagttctgccttgcacatagtagactcaggtatcagtaa

SEQ ID NO: 1118 - DNA, 122 bp, Homo sapiens
  misc_feature (61)..(62): /note="This region represents a CpG dinucleotide"
  misc_feature (61)..(61): /note="Nucleotide may be methylated to form 5-methylcytosine"
gggtgggagaggtgacagctgagaggccagtctgagagtgacatcactaggcgggagtcacgggtgtgtcccagtgggagaggccgtcacagacagcccaacccaaacaccctggttctcaa

SEQ ID NO: 1119 - DNA, 122 bp, Homo sapiens
  misc_feature (61)..(62): /note="This region represents a CpG dinucleotide"
  misc_feature (61)..(61): /note="Nucleotide may be methylated to form 5-methylcytosine"
gatctctcagcttctggttggtggctctcaaaatccagacacaaggtcagctgcagccagcgtgggccctggagtagctccagttatggggcagcaatggccccctctcattttgagagctc

SEQ ID NO: 1120 - DNA, 122 bp, Homo sapiens
  misc_feature (61)..(62): /note="This region represents a CpG dinucleotide"
  misc_feature (61)..(61): /note="Nucleotide may be methylated to form 5-methylcytosine"
ggttataattatgcatttcgacagcctccttcctgtaattgttcagatgttcgtagcaggcgtgcatgcaggcggtgcacctagaagctgctgtcaatcaccatcgcctctttacagcattc

SEQ ID NO: 1121 - DNA, 122 bp, Homo sapiens
  misc_feature (61)..(62): /note="This region represents a CpG dinucleotide"
  misc_feature (61)..(61): /note="Nucleotide may be methylated to form 5-methylcytosine"
ttcctgggtgataatgcctgtatttaagtaaagtcatgcacaggtctttccttaaaaaaccgagtcataaggggagaaagtgcttggttgcagaataaaacccttcctggactcttctccct

SEQ ID NO: 1122 - DNA, 122 bp, Homo sapiens
  misc_feature (61)..(62): /note="This region represents a CpG dinucleotide"
  misc_feature (61)..(61): /note="Nucleotide may be methylated to form 5-methylcytosine"
gctcaaaaccggctccctctgcgagggtttcccaggttaagccatcaggaaacaggaagacgcctaagaacgatacactggactttggggactcggagggaagggtgggagggggacaagga

SEQ ID NO: 1123 - DNA, 122 bp, Homo sapiens
  misc_feature (61)..(62): /note="This region represents a CpG dinucleotide"
  misc_feature (61)..(61): /note="Nucleotide may be methylated to form 5-methylcytosine"
tagcttaaggaagagctccatgtcataactcttaacttaaagggcttactacttagattacggctgccaatcatcaattcacttttcatttttttcttaaagggacagcttacaaagcaaat

SEQ ID NO: 1124 - DNA, 122 bp, Homo sapiens
  misc_feature (61)..(62): /note="This region represents a CpG dinucleotide"
  misc_feature (61)..(61): /note="Nucleotide may be methylated to form 5-methylcytosine"
gtgaatacaaagatgagtaaggcactgtccttgcccttaaggaatttaaagtctggtagacgagagccatagacacggacaatgataatacaacctgctaagtgctaggacacttagcaggt

SEQ ID NO: 1125 - DNA, 122 bp, Homo sapiens
  misc_feature (61)..(62): /note="This region represents a CpG dinucleotide"
  misc_feature (61)..(61): /note="Nucleotide may be methylated to form 5-methylcytosine"
aaaggacagcctgccagaaactgaggctactttccttccaccctctaatcttctgctattcgctccacttgctgaactcagctggaatccagtggccaagggagcctgctgatgcaatccct

SEQ ID NO: 1126 - DNA, 122 bp, Homo sapiens
  misc_feature (61)..(62): /note="This region represents a CpG dinucleotide"
  misc_feature (61)..(61): /note="Nucleotide may be methylated to form 5-methylcytosine"
tccggtttcctgtggcatcctgcccacttaatcattcaagtaggggaactactggcaaagcgggaaagaccaaggcaagctcctgtgacctagcaagaatcatgtcacatataattaccata

SEQ ID NO: 1127 - DNA, 122 bp, Homo sapiens
  misc_feature (61)..(62): /note="This region represents a CpG dinucleotide"
  misc_feature (61)..(61): /note="Nucleotide may be methylated to form 5-methylcytosine"
attttattccaagctaaagtggaatttcaagataatcacttctgctctggtcttaccttacgtgccccactgcaatttcaggtctcgagtcagagaacagactatttcctcttccccttaat

SEQ ID NO: 1128 - DNA, 122 bp, Homo sapiens
  misc_feature (61)..(62): /note="This region represents a CpG dinucleotide"
  misc_feature (61)..(61): /note="Nucleotide may be methylated to form 5-methylcytosine"
cttatctgcaaggccccttagggcagttctgcctcttgggaacaccttaggctgagtgatcgccttcccgtggctgagagctgagaagttcttccagactgcacaggtgtccggtctgtctg

SEQ ID NO: 1129 - DNA, 122 bp, Homo sapiens
  misc_feature (61)..(62): /note="This region represents a CpG dinucleotide"
  misc_feature (61)..(61): /note="Nucleotide may be methylated to form 5-methylcytosine"
gctgaatggattttttttttaactcgaggcagatgcagatacaatagtctatgggcaaagcgattttgatttgcaagagctagagcttaagagagaaacagtttagctttaaattccaagaa

SEQ ID NO: 1130 - DNA, 122 bp, Homo sapiens
  misc_feature (61)..(62): /note="This region represents a CpG dinucleotide"
  misc_feature (61)..(61): /note="Nucleotide may be methylated to form 5-methylcytosine"
gctgcaaaaagtcttacagaagggaggagagggggttgtcagcaggagcagcccaggagacgctcatgagaatacgcaagggtctgcaccagtcagcacttggaattgtccctcctgggaga

SEQ ID NO: 1131 - DNA, 122 bp, Homo sapiens
  misc_feature (61)..(62): /note="This region represents a CpG dinucleotide"
  misc_feature (61)..(61): /note="Nucleotide may be methylated to form 5-methylcytosine"
gcctcattggctgttgtgggtgtctctgaagctcatgttgaattgctgtcaaatgcccagcgtgttcttggtggtgacacagccacattgtgtaaatacatttcttaagtcatttgtgtgta

SEQ ID NO: 1132 - DNA, 122 bp, Homo sapiens
  misc_feature (61)..(62): /note="This region represents a CpG dinucleotide"
  misc_feature (61)..(61): /note="Nucleotide may be methylated to form 5-methylcytosine"
tctaatattttttaactccttaagatgttgttgctgtcctcactgctggactggaatctgcgtgatgattccatcatgggcgaagccccaaattatttagccttgactcagtctctcctgtc

SEQ ID NO: 1133 - DNA, 122 bp, Homo sapiens
  misc_feature (61)..(62): /note="This region represents a CpG dinucleotide"
  misc_feature (61)..(61): /note="Nucleotide may be methylated to form 5-methylcytosine"
tcactcatttacagctgcaggtcctaaactaccaacatctctaaccatctgattagtttccgtgagcaacgtcttagatagtccatgaatcatgacctttaggtcaatgtagcaacagggat

SEQ ID NO: 1134 - DNA, 122 bp, Homo sapiens
  misc_feature (61)..(62): /note="This region represents a CpG dinucleotide"
  misc_feature (61)..(61): /note="Nucleotide may be methylated to form 5-methylcytosine"
gtggagcagggttgggagtgcatcagggtgtcgggcagcagggctagcctgagccagctccgcaggtgcttctggctgaggcgaggctgaccctgggagcaccgctggaatagtggccactg

SEQ ID NO: 1135 - DNA, 122 bp, Homo sapiens
  misc_feature (61)..(62): /note="This region represents a CpG dinucleotide"
  misc_feature (61)..(61): /note="Nucleotide may be methylated to form 5-methylcytosine"
ctgtgatatgtttagacaatgcactgtatttaactgaatttacagatgccccaactcagacgtggtagtaaacgccagagactaataggaaattaaacatgtacaatggactaactccattt

SEQ ID NO: 1136 - DNA, 122 bp, Homo sapiens
  misc_feature (61)..(62): /note="This region represents a CpG dinucleotide"
  misc_feature (61)..(61): /note="Nucleotide may be methylated to form 5-methylcytosine"
taaatgtatataaccccaatgtgattactagtttgttatgaagcatatgtgcagtgagaacgtgctacaaagagaaagtgtatatggtagtgtgtgtagaaacgagacactggcttctcgta

SEQ ID NO: 1137 - DNA, 122 bp, Homo sapiens
  misc_feature (61)..(62): /note="This region represents a CpG dinucleotide"
  misc_feature (61)..(61): /note="Nucleotide may be methylated to form 5-methylcytosine"
ttaaaattcatttattttctccatttggttgtcagcagcaggaaaggctgctgaaggatccgagccagtgtggaaatgggaagggcctgtgagctcagagggaaagaggaagtctctatgtc

SEQ ID NO: 1138 - DNA, 122 bp, Homo sapiens
  misc_feature (61)..(62): /note="This region represents a CpG dinucleotide"
  misc_feature (61)..(61): /note="Nucleotide may be methylated to form 5-methylcytosine"
ctcccagcccctccctgtaatttgctaaattgctgacatacagaaatgttccagactttccgtaattctccagagaaggctttataagagcgcggagactcaggggattaggtggtttttat

SEQ ID NO: 1139 - DNA, 122 bp, Homo sapiens
  misc_feature (61)..(62): /note="This region represents a CpG dinucleotide"
  misc_feature (61)..(61): /note="Nucleotide may be methylated to form 5-methylcytosine"
tatattttttggagtgtctactccatgccaatcatgtgtgaaatgttgggataacaaaggcgaattcaatctggctctcgtcctcggagcttaagcaaatcatctggggtagcgtgacccat

SEQ ID NO: 1140 - DNA, 122 bp, Homo sapiens
  misc_feature (61)..(62): /note="This region represents a CpG dinucleotide"
  misc_feature (61)..(61): /note="Nucleotide may be methylated to form 5-methylcytosine"
aggacagtttgtctcttttgatgtgattgtactcttaaaatacctggtgacattaacctccgagcttgtttttccctgagcttatcagcttccttagctggtgacatatagtcaggggcatg

SEQ ID NO: 1141 - DNA, 122 bp, Homo sapiens
  misc_feature (61)..(62): /note="This region represents a CpG dinucleotide"
  misc_feature (61)..(61): /note="Nucleotide may be methylated to form 5-methylcytosine"
attggaggtcaccccgttaagtcaggaagcctgtctcttacttcaggtacaaagaatgaacgaatgcaggggactaaggcataaacaagggctcatgaatactgtatattgcttggggcctc

SEQ ID NO: 1142 - DNA, 122 bp, Homo sapiens
  misc_feature (61)..(62): /note="This region represents a CpG dinucleotide"
  misc_feature (61)..(61): /note="Nucleotide may be methylated to form 5-methylcytosine"
gaaactatatatggtaaaatctatttcttaaacacagccttactgcacacaatgaaagaacgaagtcaccaagtcttaaaatgattgacatgggggaggaatttcaaggattaagatgatac

SEQ ID NO: 1143 - DNA, 122 bp, Homo sapiens
  misc_feature (61)..(62): /note="This region represents a CpG dinucleotide"
  misc_feature (61)..(61): /note="Nucleotide may be methylated to form 5-methylcytosine"
ttaggttgatctggtgtgatagatggaaatggaaaatttaaagcagttttccagtgtttgcgtagtatatgttaaagaggatttagaaacactaagatcagaggtttaaaccagctaagccc

SEQ ID NO: 1144 - DNA, 122 bp, Homo sapiens
  misc_feature (61)..(62): /note="This region represents a CpG dinucleotide"
  misc_feature (61)..(61): /note="Nucleotide may be methylated to form 5-methylcytosine"
cactgtccctaagagagacacagcaggctgtgctgccaatggcacagggtatttaattgccggaagaaggaaagttcttatgtctgggacatgcccaagcgtaactcttgcaaaaccacagt

SEQ ID NO: 1145 - DNA, 122 bp, Homo sapiens
  misc_feature (61)..(62): /note="This region represents a CpG dinucleotide"
  misc_feature (61)..(61): /note="Nucleotide may be methylated to form 5-methylcytosine"
ctcagtacagaaatgattggccagtaagagtcttatgaaatgaatctgttagccagttgccgcatgtcacaagtctgaattcaggcctttcttgtagttagttccggggttagattggattg

SEQ ID NO: 1146 - DNA, 122 bp, Homo sapiens
  misc_feature (61)..(62): /note="This region represents a CpG dinucleotide"
  misc_feature (61)..(61): /note="Nucleotide may be methylated to form 5-methylcytosine"
gcactaggaatccccagttctgactttttttgcctggaaagctcaagtggacaagccctacggcctacccaatgtctgctgacccggcacttagttgaaacagggtgtgctggttccctctc

SEQ ID NO: 1147 - DNA, 122 bp, Homo sapiens
  misc_feature (61)..(62): /note="This region represents a CpG dinucleotide"
  misc_feature (61)..(61): /note="Nucleotide may be methylated to form 5-methylcytosine"
gggcggagccggccaggcggcgcgagcgggaactacggccttggccttcttcagttctagcgtcaacccggtgctctacgtcttcaccgctggagatctgctgccccgggcaggtccccgtt

SEQ ID NO: 1148 - DNA, 122 bp, Homo sapiens
  misc_feature (61)..(62): /note="This region represents a CpG dinucleotide"
  misc_feature (61)..(61): /note="Nucleotide may be methylated to form 5-methylcytosine"
cagactatccctcgggagggactggtcaacaacttaggctgctgccactaaggaatgacacgcagttatatgccttggggcagatctaaagacgtgaatgtgggctgggcatggtggctcac

SEQ ID NO: 1149 - DNA, 122 bp, Homo sapiens
  misc_feature (61)..(62): /note="This region represents a CpG dinucleotide"
  misc_feature (61)..(61): /note="Nucleotide may be methylated to form 5-methylcytosine"
tcaacaattgtaaaggtcacatgctgacgcgacagttgctgaggctgtgatgcaaacgcacgcaggaagcgttgtgcaagcaggctctggagacccgcaggctcctgggcagagggctgcct

SEQ ID NO: 1150 - DNA, 122 bp, Homo sapiens
  misc_feature (61)..(62): /note="This region represents a CpG dinucleotide"
  misc_feature (61)..(61): /note="Nucleotide may be methylated to form 5-methylcytosine"
tgcttgcttgctgggtggatcagctccatgagggaccaaaaaatcaaatacctgtggcagcgccaagtgggcaaattgtaggatagggtgggctagttatagacaaacctgtgcaaaccaga

SEQ ID NO: 1151 - DNA, 122 bp, Homo sapiens
  misc_feature (61)..(62): /note="This region represents a CpG dinucleotide"
  misc_feature (61)..(61): /note="Nucleotide may be methylated to form 5-methylcytosine"
cagcctttttccaagtcacactgggcctttctaatcctgtaatcaacacaatactttatacggcctcaggcttgtggctcaacagggatgaaccaggccagggtgacagggaccctttcttc

SEQ ID NO: 1152 - DNA, 122 bp, Homo sapiens
  misc_feature (61)..(62): /note="This region represents a CpG dinucleotide"
  misc_feature (61)..(61): /note="Nucleotide may be methylated to form 5-methylcytosine"
acttcattttggttgtgtcattaaaactctgggaacccaaggcacagtctcccagggaaccgtgggtccgggggctcctagctcttcctcccatctctctggcgcccctgcgtgcctgtgta

SEQ ID NO: 1153 - DNA, 122 bp, Homo sapiens
  misc_feature (61)..(62): /note="This region represents a CpG dinucleotide"
  misc_feature (61)..(61): /note="Nucleotide may be methylated to form 5-methylcytosine"
cagtggccttccttcccaggcactgatgatgcatagactcaccctggctgttttgcttggcgctcagcacgtggctggcactccacacctgtggcgtcaccatcacccccactgagcaccag

SEQ ID NO: 1154 - DNA, 122 bp, Homo sapiens
  misc_feature (61)..(62): /note="This region represents a CpG dinucleotide"
  misc_feature (61)..(61): /note="Nucleotide may be methylated to form 5-methylcytosine"
tgtcacgctcactgtgagagcatgctgcttcgctctgaaagccaggaaaaccctgaaccccgcaggaagaacaaacaattccagacgcgcgaccttagagacctgtaacacttagcgcgaag

SEQ ID NO: 1155 - DNA, 122 bp, Homo sapiens
  misc_feature (61)..(62): /note="This region represents a CpG dinucleotide"
  misc_feature (61)..(61): /note="Nucleotide may be methylated to form 5-methylcytosine"
gtggagccggagcgcatgctcactgccaccgagagccgcctggactacccggaccacgcccgctcggcctccgactacaggccccgcccctggggctgagcctctccgccctcgccctcgga

SEQ ID NO: 1156 - DNA, 122 bp, Homo sapiens
  misc_feature (61)..(62): /note="This region represents a CpG dinucleotide"
  misc_feature (61)..(61): /note="Nucleotide may be methylated to form 5-methylcytosine"
ctcagggccggggtggtgctcagaaacactgtctttatgatatacatgggcttttgagctcgtggcttgtggttgtggactgagaaaattgcttcctgggtttatagagatggtaggggaaa

SEQ ID NO: 1157 - DNA, 122 bp, Homo sapiens
  misc_feature (61)..(62): /note="This region represents a CpG dinucleotide"
  misc_feature (61)..(61): /note="Nucleotide may be methylated to form 5-methylcytosine"
aggatgacttcctctctacatttaattatgtgactcacttccagtctcagaagcctaatccgttccagggagagcttgacgagaataaagcagtcatcaggaagaaacacttcttcaatata

SEQ ID NO: 1158 - DNA, 122 bp, Homo sapiens
  misc_feature (61)..(62): /note="This region represents a CpG dinucleotide"
  misc_feature (61)..(61): /note="Nucleotide may be methylated to form 5-methylcytosine"
tgcaattacattccacttctccagagttcctggagctcagcactggagcctggaatgattcgtcatgactaggtaatatcactcatatttagtaactatattggcatgcgagtttcctcttg

SEQ ID NO: 1159 - DNA, 122 bp, Homo sapiens
  misc_feature (61)..(62): /note="This region represents a CpG dinucleotide"
  misc_feature (61)..(61): /note="Nucleotide may be methylated to form 5-methylcytosine"
caacttttaggaactgatctctctatgtgggtgtctcccactgaccatgttcctaaagaacgtgagcttcctcttcccatgtcagtctccagctttgacttctctttttctcctcccattcc

SEQ ID NO: 1160 - DNA, 122 bp, Homo sapiens
  misc_feature (61)..(62): /note="This region represents a CpG dinucleotide"
  misc_feature (61)..(61): /note="Nucleotide may be methylated to form 5-methylcytosine"
gtggtccagatactgctggatactggcagctcctgtggttgggccagtttgtacacttggcgttaggcttgatcagtgatgttgctgaccctcgcccatgctgggtaagtgtccaggtggaa

SEQ ID NO: 1161 - DNA, 122 bp, Homo sapiens
  misc_feature (61)..(62): /note="This region represents a CpG dinucleotide"
  misc_feature (61)..(61): /note="Nucleotide may be methylated to form 5-methylcytosine"
ctggggccccttgggagttgagtcagagttgcctcattcctcttcttgggttctgtctcccgtttgcttctagactttcccattctttggtgtagctcctgcaatcctgaatgagtccgggg

SEQ ID NO: 1162 - DNA, 122 bp, Homo sapiens
  misc_feature (61)..(62): /note="This region represents a CpG dinucleotide"
  misc_feature (61)..(61): /note="Nucleotide may be methylated to form 5-methylcytosine"
gaggctgagctctctcaacggaggaagcagcggcatgagggcctttgcagaaggagctgacggggcactggggtggcaagccccgtgggccaggaaagaaaccagctccaggtcaatttgct

SEQ ID NO: 1163 - DNA, 122 bp, Homo sapiens
  misc_feature (61)..(62): /note="This region represents a CpG dinucleotide"
  misc_feature (61)..(61): /note="Nucleotide may be methylated to form 5-methylcytosine"
ccttaatcatgtagataagtctatttacatcctccactaataccaacttttacagtggaacggggtaaagccctaaaaagtatttgttactgtaatgtaccatatagtggtaattattatta

SEQ ID NO: 1164 - DNA, 122 bp, Homo sapiens
  misc_feature (61)..(62): /note="This region represents a CpG dinucleotide"
  misc_feature (61)..(61): /note="Nucleotide may be methylated to form 5-methylcytosine"
cttctccagaccagtaaggaattaggaggaagtgatgtaggagtggcccatattaactaacgataaaacagcctgtagttactgaagggttatcaaaagccagaccttgtgctaagtccatg

SEQ ID NO: 1165 - DNA, 122 bp, Homo sapiens
  misc_feature (61)..(62): /note="This region represents a CpG dinucleotide"
  misc_feature (61)..(61): /note="Nucleotide may be methylated to form 5-methylcytosine"
gggtggggccccaagtgtcaagaaggtggagactccagtttgtgaggaacacgatggacccgtctccattcctgaaggctggaggacaccgcctgacccaaacacagctatgtctgcctcac

SEQ ID NO: 1166 - DNA, 122 bp, Homo sapiens
  misc_feature (61)..(62): /note="This region represents a CpG dinucleotide"
  misc_feature (61)..(61): /note="Nucleotide may be methylated to form 5-methylcytosine"
agtagcaggcagggctgcaatgggaacccaggtctgcttgagcccaaagcccatgacatacgtcctatgctgtcaactctgtgcttcctgggagtggccttgctgtcaactctgtgcttcct

SEQ ID NO: 1167 - DNA, 122 bp, Homo sapiens
  misc_feature (61)..(62): /note="This region represents a CpG dinucleotide"
  misc_feature (61)..(61): /note="Nucleotide may be methylated to form 5-methylcytosine"
tacgaagagatcttttcatctcctctccgtgaacacttggggaggggctgggactccaggcgacacggaaacgccaccacacgcacactcgacggagcacaacactttctgagctgccatcc

SEQ ID NO: 1168 - DNA, 122 bp, Homo sapiens
  misc_feature (61)..(62): /note="This region represents a CpG dinucleotide"
  misc_feature (61)..(61): /note="Nucleotide may be methylated to form 5-methylcytosine"
agaagttgagaaaagacagccattgtcatcatgaatcagccaaaactccttgtttctcttcgggaggctggactgtgatgtgaagccatccatctaatgcacagcagtatgcccagctccac

SEQ ID NO: 1169 - DNA, 122 bp, Homo sapiens
  misc_feature (61)..(62): /note="This region represents a CpG dinucleotide"
  misc_feature (61)..(61): /note="Nucleotide may be methylated to form 5-methylcytosine"
ccatgccccagtgactctacaacttctggatatgtcatttccttgtaaaagtatagcccccgtcatagatataaattggtgctgactccgcttgagtgaactttattagtgaaaacctcagt

SEQ ID NO: 1170 - DNA, 122 bp, Homo sapiens
  misc_feature (61)..(62): /note="This region represents a CpG dinucleotide"
  misc_feature (61)..(61): /note="Nucleotide may be methylated to form 5-methylcytosine"
tgagggctgagtccagtgagggatgagaagggcactcccattgtgagcaggtgagctgcccgctttcagtgccagagaagaagctggcttctgtacttcaggagcagcctcatgtagggtcc

SEQ ID NO: 1171 - DNA, 122 bp, Homo sapiens
  misc_feature (61)..(62): /note="This region represents a CpG dinucleotide"
  misc_feature (61)..(61): /note="Nucleotide may be methylated to form 5-methylcytosine"
gcggcacggctggggtttgaggctgtgcctgactgtgaagctggctctccttatccgtggcgcttcctccctctccgcacgcagtggaggtgctgctgggactgtccttgagtctagcagat

SEQ ID NO: 1172 - DNA, 122 bp, Homo sapiens
  misc_feature (61)..(62): /note="This region represents a CpG dinucleotide"
  misc_feature (61)..(61): /note="Nucleotide may be methylated to form 5-methylcytosine"
gcagtttcctgttatttggttaatggttgacctagttctaatgccatatgcttcctggaacgcattctaatataaagtatgtgttaaagcaagactaggataatagcgggaaagtcaaagcc

SEQ ID NO: 1173 - DNA, 122 bp, Homo sapiens
  misc_feature (61)..(62): /note="This region represents a CpG dinucleotide"
  misc_feature (61)..(61): /note="Nucleotide may be methylated to form 5-methylcytosine"
agctttctgatgtttgcaggcaaaacaactttactagcacagaaccctagctcaatcatacgacacacacctgtacactttaagctggtttctcaatctcggaactactgacatttgggcaa

SEQ ID NO: 1174 - DNA, 122 bp, Homo sapiens
  misc_feature (61)..(62): /note="This region represents a CpG dinucleotide"
  misc_feature (61)..(61): /note="Nucleotide may be methylated to form 5-methylcytosine"
tgatgaagaaaggatttcccaagacaacagctatgtgccaagtgcagagggcaaacagaacggactttaaaagggcagaagattcaggagattgtttcaaggttaaattgatagaacaccta

SEQ ID NO: 1175 - DNA, 122 bp, Homo sapiens
  misc_feature (61)..(62): /note="This region represents a CpG dinucleotide"
  misc_feature (61)..(61): /note="Nucleotide may be methylated to form 5-methylcytosine"
cccaggtgatccgactgcctcaccctcccaaagtgctgggattagaggcatgagccactgcgcctggcctggtgactaagtagttttctaagagattaataaagccttgggaaattggaatg

SEQ ID NO: 1176 - DNA, 122 bp, Homo sapiens
  misc_feature (61)..(62): /note="This region represents a CpG dinucleotide"
  misc_feature (61)..(61): /note="Nucleotide may be methylated to form 5-methylcytosine"
tagcttgagcaagagaagaaatgcatcaattcctgtaactgaaatcaggaatccattgctcgccatctccctgctctgcttcctctaggctggcttctgtctcagccaggttcctgctttgc

SEQ ID NO: 1177 - DNA, 122 bp, Homo sapiens
  misc_feature (61)..(62): /note="This region represents a CpG dinucleotide"
  misc_feature (61)..(61): /note="Nucleotide may be methylated to form 5-methylcytosine"
aattaataaaacagagaacacacccacaagagcagatccacgaaggcagaagtcggtctgcgggagagtaaagcatagctggactcccaccacctgcagggtgcccccaccccaggggggga

SEQ ID NO: 1178 - DNA, 122 bp, Homo sapiens
  misc_feature (61)..(62): /note="This region represents a CpG dinucleotide"
  misc_feature (61)..(61): /note="Nucleotide may be methylated to form 5-methylcytosine"
gttaaacaattcttcctagctacaaaaggaaaagagtaatacctgtaggactttgagaaacgcaatcttgatttggctcttgtagatggtcctggcaccgtggctcccagaggatcccaaac

SEQ ID NO: 1179 - DNA, 122 bp, Homo sapiens
  misc_feature (61)..(62): /note="This region represents a CpG dinucleotide"
  misc_feature (61)..(61): /note="Nucleotide may be methylated to form 5-methylcytosine"
agcagcagcaggaggggccggggggccatggcggggtcggggcgcaggagctgagcgctgcggccacggccccgggcccccgcaaggcccctttatggcggcgcccggaaaggggacggccc

SEQ ID NO: 1180 - DNA, 122 bp, Homo sapiens
  misc_feature (61)..(62): /note="This region represents a CpG dinucleotide"
  misc_feature (61)..(61): /note="Nucleotide may be methylated to form 5-methylcytosine"
atccaaatgccattattgcacaattgtactattacgtgatcctgctgagcaacctttctacgccatagtcaccacccagtggactaactgggaataggagtttacaaccttattaataaaga

SEQ ID NO: 1181 - DNA, 122 bp, Homo sapiens
  misc_feature (61)..(62): /note="This region represents a CpG dinucleotide"
  misc_feature (61)..(61): /note="Nucleotide may be methylated to form 5-methylcytosine"
gccaagggagcgtgagggatgaggtggcccagcccatggagggaaccgggtagatccccacgtgtcgctccaccctctggctgcggaaggaaaggtccttaaattttgaaaaaacactgatg

SEQ ID NO: 1182 - DNA, 122 bp, Homo sapiens
  misc_feature (61)..(62): /note="This region represents a CpG dinucleotide"
  misc_feature (61)..(61): /note="Nucleotide may be methylated to form 5-methylcytosine"
aaagtgaaatgtcataaccaccacgacccacacctaggcacatgcataagcccaggcgatcgtgttccagactttctaggctcagaggatgacacgtcatcttcgcctggctatatttttat

SEQ ID NO: 1183 - DNA, 122 bp, Homo sapiens
  misc_feature (61)..(62): /note="This region represents a CpG dinucleotide"
  misc_feature (61)..(61): /note="Nucleotide may be methylated to form 5-methylcytosine"
ttgttaaaagcccatcgcaggactaactgtgccttgtcctgtggatgatagtcagttactcgttcaaatgaattagaagtcaacgttttcaccatcttgaggttcattgtattaactattca

SEQ ID NO: 1184 - DNA, 122 bp, Homo sapiens
  misc_feature (61)..(62): /note="This region represents a CpG dinucleotide"
  misc_feature (61)..(61): /note="Nucleotide may be methylated to form 5-methylcytosine"
aagactgcagaaacagcctgggcatggatgggagtctgagccactcagcagtctaggagccggaaaccccagtctagcagcaggaacagcctggtcaggcctctgccactgctgctaggccc

SEQ ID NO: 1185 - DNA, 122 bp, Homo sapiens
  misc_feature (61)..(62): /note="This region represents a CpG dinucleotide"
  misc_feature (61)..(61): /note="Nucleotide may be methylated to form 5-methylcytosine"
tgcaagtcaaacccggctccggcaagtttgttgctgtttttcctgctgctgtaacagttacgtgtccctgctttaagaaggaatttccaccactcgatgagaggatggatcatttctaaaca

SEQ ID NO: 1186 - DNA, 122 bp, Homo sapiens
  misc_feature (61)..(62): /note="This region represents a CpG dinucleotide"
  misc_feature (61)..(61): /note="Nucleotide may be methylated to form 5-methylcytosine"
ttcatttgtgaatttctttttacaatgttattactcagccttcctgttctaccttattctcggttcctcaggttgcccataggtttcttaatttccggattctggactcaagaacttcacct

SEQ ID NO: 1187 - DNA, 122 bp, Homo sapiens
  misc_feature (61)..(62): /note="This region represents a CpG dinucleotide"
  misc_feature (61)..(61): /note="Nucleotide may be methylated to form 5-methylcytosine"
agcagcattcccacaaattttgtgtgcaggtctctgcagcactttaagacatcattctgacgtagaagatgtttgcttcatctacagtttatttgggagaagggtgtggttttcagcattag

SEQ ID NO: 1188 - DNA, 122 bp, Homo sapiens
  misc_feature (61)..(62): /note="This region represents a CpG dinucleotide"
  misc_feature (61)..(61): /note="Nucleotide may be methylated to form 5-methylcytosine"
gaaaatgttgatatgtttaaaaaattactcataaagccataggtaagtggtgcaacaacacgagtaacatttctatgtatgtgtctctatgtgtggatttaaatagaattacagtgtacact

SEQ ID NO: 1189 - DNA, 122 bp, Homo sapiens
  misc_feature (61)..(62): /note="This region represents a CpG dinucleotide"
  misc_feature (61)..(61): /note="Nucleotide may be methylated to form 5-methylcytosine"
cgtgatccgccctcctcggcctcccgaagtgctgggattataggcgtgagccaccgcacccggcccgtcgtcttaattgacagctgttgcctaccacaaaccccactgacaacagggcctgg

SEQ ID NO: 1190 - DNA, 122 bp, Homo sapiens
  misc_feature (61)..(62): /note="This region represents a CpG dinucleotide"
  misc_feature (61)..(61): /note="Nucleotide may be methylated to form 5-methylcytosine"
atgtgccctttgactctcccttccattaagataactttccttgtggatttccggctctctcgtaggcttgctaaataccagggtaaacacaatttgtgtgtgttgctcaaacgttgcataat

SEQ ID NO: 1191 - DNA, 122 bp, Homo sapiens
  misc_feature (61)..(62): /note="This region represents a CpG dinucleotide"
  misc_feature (61)..(61): /note="Nucleotide may be methylated to form 5-methylcytosine"
ttagctaacagcagctggaaactgagttatccctacatggatcattgatgcataagcttacgtcattaaaacttctcactaccagtggctgaaacttataactacttcatggctatcctagt

SEQ ID NO: 1192 - DNA, 122 bp, Homo sapiens
  misc_feature (61)..(62): /note="This region represents a CpG dinucleotide"
  misc_feature (61)..(61): /note="Nucleotide may be methylated to form 5-methylcytosine"
acagtcccggagttctctgggcctgggcgacgtgtttcgttgaaagcgggcaggtggtgccgggcggggctgcgctgaggctccggtgcctccccacctgcccctcgtacctgccggtctgt

SEQ ID NO: 1193 - DNA, 122 bp, Homo sapiens
  misc_feature (61)..(62): /note="This region represents a CpG dinucleotide"
  misc_feature (61)..(61): /note="Nucleotide may be methylated to form 5-methylcytosine"
ggcagagggcggaaagggacagggactctgcacctcatcacatacctggtgttttcagggcggcggggctggggacgggacacttccttgctgccgtgagcggggcccacacgcgtcccagc

SEQ ID NO: 1194 - DNA, 122 bp, Homo sapiens
  misc_feature (61)..(62): /note="This region represents a CpG dinucleotide"
  misc_feature (61)..(61): /note="Nucleotide may be methylated to form 5-methylcytosine"
cccacgtgcacggccccaccctggcgcaggatgaatgtgtggcaggcccgtgaggaaggccgcctgctgttgcccgaggcggttgtctggaggaagggcacaggacacatgggagagagatg

SEQ ID NO: 1195 - DNA, 122 bp, Homo sapiens
  misc_feature (61)..(62): /note="This region represents a CpG dinucleotide"
  misc_feature (61)..(61): /note="Nucleotide may be methylated to form 5-methylcytosine"
tacatttatctgcattttacggaaggcaaccgaggttcatagagatagtgatttggccagcgtcacaggcccagtaaaagggattgaaaatccaggtccgtccgaccctaaagcagggaact

SEQ ID NO: 1196 - DNA, 122 bp, Homo sapiens
  misc_feature (61)..(62): /note="This region represents a CpG dinucleotide"
  misc_feature (61)..(61): /note="Nucleotide may be methylated to form 5-methylcytosine"
gagatgttggcctcagctccctacactcaaccttctctctctggggagggcagtaggccccggctgaaatagtcctaatccagagacataataatgaggaagtgcaaagtattgtgacagcc

SEQ ID NO: 1197 - DNA, 122 bp, Homo sapiens
  misc_feature (61)..(62): /note="This region represents a CpG dinucleotide"
  misc_feature (61)..(61): /note="Nucleotide may be methylated to form 5-methylcytosine"
ctccccgccctccttcctgcagggattatgccgcgacccctattgcttgggaggttaccacggcgcctcgcacctcggcggctccagctgctccacctgcagcgcgcacgaccctgccgggc

SEQ ID NO: 1198 - DNA, 122 bp, Homo sapiens
  misc_feature (61)..(62): /note="This region represents a CpG dinucleotide"
  misc_feature (61)..(61): /note="Nucleotide may be methylated to form 5-methylcytosine"
atatccagtctagacaacttcctaatctggtggcctgatggggaccacttttagctgtgtcgtttttatttgttcctttaagtttcctttgtgacagaagaactagaggaactagaggggct

SEQ ID NO: 1199 - DNA, 122 bp, Homo sapiens
  misc_feature (61)..(62): /note="This region represents a CpG dinucleotide"
  misc_feature (61)..(61): /note="Nucleotide may be methylated to form 5-methylcytosine"
tgggaagttcgaaagcacagcaccagcattttgtgagcacttttatgctgtattgtccagcggcggaagagcagaagggcaagtgagcacttgtgaaagagtgaggaccaaggatgggagtt

SEQ ID NO: 1200 - DNA, 122 bp, Homo sapiens
  misc_feature (61)..(62): /note="This region represents a CpG dinucleotide"
  misc_feature (61)..(61): /note="Nucleotide may be methylated to form 5-methylcytosine"
caaaagaggttttcaacagtgtcagcagaggctatagtgatgagtaaggaagttgataaacggcaacatctgaaatagctactcgccctgaataggcaggtggagaatattagttacacgtg

SEQ ID NO: 1201 - DNA, 122 bp, Homo sapiens
  misc_feature (61)..(62): /note="This region represents a CpG dinucleotide"
  misc_feature (61)..(61): /note="Nucleotide may be methylated to form 5-methylcytosine"
atgactagacacattatcttgagcaaattgcttcacttccttgtgttactgagaataaaacgaaataatgcttgctaagtttttagtccagtgcatggcaggagatggctgttctatgaaat

SEQ ID NO: 1202 - DNA, 122 bp, Homo sapiens
  misc_feature (61)..(62): /note="This region represents a CpG dinucleotide"
  misc_feature (61)..(61): /note="Nucleotide may be methylated to form 5-methylcytosine"
caaaagacaagtttaagtaccttgcatcatccttttattatggcacactagaatactcagcgtaggtatatgctgaaggggcaaagagcaaggacattccagtagcatagcacatctagaac

SEQ ID NO: 1203 - DNA, 122 bp, Homo sapiens
  misc_feature (61)..(62): /note="This region represents a CpG dinucleotide"
  misc_feature (61)..(61): /note="Nucleotide may be methylated to form 5-methylcytosine"
cacaaatcagcttgaaacacccatttttcatctttcttttggcaaagggtgttgttattacgtgcagttatgtgttcactggagatacatacagaagtagttcatgtcctcatgaggctttc

SEQ ID NO: 1204 - DNA, 122 bp, Homo sapiens
  misc_feature (61)..(62): /note="This region represents a CpG dinucleotide"
  misc_feature (61)..(61): /note="Nucleotide may be methylated to form 5-methylcytosine"
tcctaatgataatggcccccaagcctgtgctatcacctgtcttagaattttgccaggtatcggccttaatgtttgacacaggaatcatcttaggattaaatttcagatttttcatctgcagt

SEQ ID NO: 1205 - DNA, 122 bp, Homo sapiens
  misc_feature (61)..(62): /note="This region represents a CpG dinucleotide"
  misc_feature (61)..(61): /note="Nucleotide may be methylated to form 5-methylcytosine"
atgaagaggaggaagttcactcggcagaggaccagtgaaggctctgcactctgggaagaacgaggtcgtggctcagccccacctcgggcttacctgggcaggtgacttcggctgcccgcctg

SEQ ID NO: 1206 - DNA, 122 bp, Homo sapiens
  misc_feature (61)..(62): /note="This region represents a CpG dinucleotide"
  misc_feature (61)..(61): /note="Nucleotide may be methylated to form 5-methylcytosine"
tataatcctgagaaacacccaaatgggcggctcttatagacacttagtacaggaaatgaccggccgaaaaggaacatgagttggctctgttaggctgatagcaatctgtttagttgaaaaga

SEQ ID NO: 1207 - DNA, 122 bp, Homo sapiens
  misc_feature (61)..(62): /note="This region represents a CpG dinucleotide"
  misc_feature (61)..(61): /note="Nucleotide may be methylated to form 5-methylcytosine"
aggaatgtcaaggctggaaggtatcttagagatcatctaatccagttcttgcttcagaaacgattcagggaagcaagtgaagtgacttggactttacctatggtaatactctctccccaccc

SEQ ID NO: 1208 - DNA, 122 bp, Homo sapiens
  misc_feature (61)..(62): /note="This region represents a CpG dinucleotide"
  misc_feature (61)..(61): /note="Nucleotide may be methylated to form 5-methylcytosine"
tctcgtcaacagatctccagaggtggtgcagaaacgaccccgcgccggcgccccatcctgcggccagtgcctccgcgccccggctccggtccccaccgtccccgccccagatttccggagga

SEQ ID NO: 1209 - DNA, 122 bp, Homo sapiens
  misc_feature (61)..(62): /note="This region represents a CpG dinucleotide"
  misc_feature (61)..(61): /note="Nucleotide may be methylated to form 5-methylcytosine"
tgaaggagaaacatagtaggaatgtagatttcggcaatgtcatcctctctccccttcctccgttaaatcagcatacttaggctcactcacactaccctgctgagtttctcctttaagcaact

SEQ ID NO: 1210 - DNA, 122 bp, Homo sapiens
  misc_feature (61)..(62): /note="This region represents a CpG dinucleotide"
  misc_feature (61)..(61): /note="Nucleotide may be methylated to form 5-methylcytosine"
ctcctccacccgctcaggaggggaaacaggagagccgggagcacaacagcctcgcgcgcccgccgccgcctcagccttaggggaggccactacgcctctggttacatttcttgatcatggta

SEQ ID NO: 1211 - DNA, 122 bp, Homo sapiens
  misc_feature (61)..(62): /note="This region represents a CpG dinucleotide"
  misc_feature (61)..(61): /note="Nucleotide may be methylated to form 5-methylcytosine"
ttgctgcttaatttcacaagcaaacctaaagccaaacaccaggtagccaggcaccagccacggggctattgaaggatatgaaacaggctgaatcacaggccagcagggaaacagcccaggca

SEQ ID NO: 1212 - DNA, 122 bp, Homo sapiens
  misc_feature (61)..(62): /note="This region represents a CpG dinucleotide"
  misc_feature (61)..(61): /note="Nucleotide may be methylated to form 5-methylcytosine"
ggttttcagaaactggattacaaagtgccctggtgaggttctgtttgtgtttacactatgcgcttaggctgcttgttcagtgcctttgatctgtgggtttataaaacttgaaacgttttcag

SEQ ID NO: 1213 - DNA, 122 bp, Homo sapiens
  misc_feature (61)..(62): /note="This region represents a CpG dinucleotide"
  misc_feature (61)..(61): /note="Nucleotide may be methylated to form 5-methylcytosine"
aaaatttgcattttcttcaaggaaattcatggaaaggacattgacaagtatacagacttccgataacctgggagatcacaccagtagaccagataaaaacttccaggactcttatttaaaag

SEQ ID NO: 1214 - DNA, 122 bp, Homo sapiens
  misc_feature (61)..(62): /note="This region represents a CpG dinucleotide"
  misc_feature (61)..(61): /note="Nucleotide may be methylated to form 5-methylcytosine"
aatatggaacattaaaagagttgcatcataggcaatggggaaagatgaagaaagattaaacgcatttggaggaaaaactaaaaatgtctttattgaatgtctgtgtgtcttcagtgacgaag

SEQ ID NO: 1215 - DNA, 122 bp, Homo sapiens
  misc_feature (61)..(62): /note="This region represents a CpG dinucleotide"
  misc_feature (61)..(61): /note="Nucleotide may be methylated to form 5-methylcytosine"
caagctgcccagagcagtcagccagtccctctggtccagaccctaccaagctcacttaaacgaccacatccgtgcttgtccagagctgctgttcagcaagcagcaggaacctaccaggggaa

SEQ ID NO: 1216 - DNA, 122 bp, Homo sapiens
  misc_feature (61)..(62): /note="This region represents a CpG dinucleotide"
  misc_feature (61)..(61): /note="Nucleotide may be methylated to form 5-methylcytosine"
gtggactttggaaataaccagtcttggatcaaaccctgattccactcagtactacctatacgacctttgacaagttaattaatcctgagctcttatttcctcatctaatgagatacagacaa

SEQ ID NO: 1217 - DNA, 122 bp, Homo sapiens
  misc_feature (61)..(62): /note="This region represents a CpG dinucleotide"
  misc_feature (61)..(61): /note="Nucleotide may be methylated to form 5-methylcytosine"
caaagcgggagaaaaagcaagtgagcaaaacaggctaacacagggacgcgttcaaatacacgataccatcgacaggaaaacaagccatgctgccccaggcatcctgtgtgacgctgactatt

SEQ ID NO: 1218 - DNA, 122 bp, Homo sapiens
  misc_feature (61)..(62): /note="This region represents a CpG dinucleotide"
  misc_feature (61)..(61): /note="Nucleotide may be methylated to form 5-methylcytosine"
aatatttgcttaattagtaagtgttggagacgcagactctgccctcaagaaaatccacagcgaagagaaaaccagacagtggctgaaatccagaagagagagcactgacaccccttgataca

SEQ ID NO: 1219 - DNA, 122 bp, Homo sapiens
  misc_feature (61)..(62): /note="This region represents a CpG dinucleotide"
  misc_feature (61)..(61): /note="Nucleotide may be methylated to form 5-methylcytosine"
gcgattttcccagcctgtcacctccagcaaggtgtgagccagaatgcacacgcaggcctgcgtgtctctggggctgatgacagagtcacaaggaaacagatctccatagcacagcgtggaaa

SEQ ID NO: 1220 - DNA, 122 bp, Homo sapiens
  misc_feature (61)..(62): /note="This region represents a CpG dinucleotide"
  misc_feature (61)..(61): /note="Nucleotide may be methylated to form 5-methylcytosine"
cttagtggacctttgccccaagattttctctcagcttttcctaggtaagacagcatcacccgggcgcgatggctcatgcctgtaatcccagaactttgggaggccaaggcaggcggattgcc

SEQ ID NO: 1221 - DNA, 122 bp, Homo sapiens
  misc_feature (61)..(62): /note="This region represents a CpG dinucleotide"
  misc_feature (61)..(61): /note="Nucleotide may be methylated to form 5-methylcytosine"
gcccctcccgcatcttcctcaaggcattgttttgcacacaaacatgtaagaatcaccgggcgtggtggctcgcacctgtaatcccagcactttgggagtccgaggagagaggatcacgaggt

SEQ ID NO: 1222 - DNA, 122 bp, Homo sapiens
  misc_feature (61)..(62): /note="This region represents a CpG dinucleotide"
  misc_feature (61)..(61): /note="Nucleotide may be methylated to form 5-methylcytosine"
atcataaagggaggtagtttcatgacagagagagacatcaaatttgctgccacctctttgcgttctttatggtccaggccttgctattaatattagaggtgtaatatatgtactacatggca

SEQ ID NO: 1223 - DNA, 122 bp, Homo sapiens
  misc_feature (61)..(62): /note="This region represents a CpG dinucleotide"
  misc_feature (61)..(61): /note="Nucleotide may be methylated to form 5-methylcytosine"
caataaacctctctcttttgtaaattgcccagtcttgggtgtgtcttaccagcagcatgacgatgaactaatccagtaaattggtactagtagagtcaggcgctactgaaaagataccaaaa

SEQ ID NO: 1224 - DNA, 122 bp, Homo sapiens
  misc_feature (61)..(62): /note="This region represents a CpG dinucleotide"
  misc_feature (61)..(61): /note="Nucleotide may be methylated to form 5-methylcytosine"
tggaagtgtcctgggatatgtcaggcacctctttacttcctggatgtcaaacatcttcctcgtcatctcaagggagtcctcaagtacgtctaacaacaggggtgtactagtccattttcata

SEQ ID NO: 1225 - DNA, 122 bp, Homo sapiens
  misc_feature (61)..(62): /note="This region represents a CpG dinucleotide"
  misc_feature (61)..(61): /note="Nucleotide may be methylated to form 5-methylcytosine"
acacacaacgatgacatcacctaacacattcatcagaacacatccctgtcaattaagggacgcaacacacgactgtactaaaatttgtgaattttagaaacaacaggcaagaatattaaata

SEQ ID NO: 1226 - DNA, 122 bp, Homo sapiens
  misc_feature (61)..(62): /note="This region represents a CpG dinucleotide"
  misc_feature (61)..(61): /note="Nucleotide may be methylated to form 5-methylcytosine"
ggcaagcagatgtcgcaagccctatttattcagtcttcactataactcttagagttgagacgctaatgttcatgactcctggccttgggatgcccaagggatttctggctcaggctgtaaaa

SEQ ID NO: 1227 - DNA, 122 bp, Homo sapiens
  misc_feature (61)..(62): /note="This region represents a CpG dinucleotide"
  misc_feature (61)..(61): /note="Nucleotide may be methylated to form 5-methylcytosine"
gatgctcctttcctccaggtaccagcagaaagcaggcgttttctcatgtgggaaagatgccggcccccgctgtttggggtggaaatcctctaacccgctgggcctgtgcgccagggctgagc

SEQ ID NO: 1228 - DNA, 122 bp, Homo sapiens
  misc_feature (61)..(62): /note="This region represents a CpG dinucleotide"
  misc_feature (61)..(61): /note="Nucleotide may be methylated to form 5-methylcytosine"
caaaagtatctgtggctaaaaacattaagatcctgtggtctagcaaaaaatgtcattttacggatgagacaactgagactcagaattaagacacaagaggaatggcttactcatagtcattg

SEQ ID NO: 1229 - DNA, 122 bp, Homo sapiens
  misc_feature (61)..(62): /note="This region represents a CpG dinucleotide"
  misc_feature (61)..(61): /note="Nucleotide may be methylated to form 5-methylcytosine"
aggaaatccctctcagacatgagatgctactcctcgaagtccattcaaaagttgcaaggtcgggaatttcagacagccaattaatcatgaaagggtgttatgaccttcattcatctcactct

SEQ ID NO: 1230 - DNA, 122 bp, Homo sapiens
  misc_feature (61)..(62): /note="This region represents a CpG dinucleotide"
  misc_feature (61)..(61): /note="Nucleotide may be methylated to form 5-methylcytosine"
ctaattccctttcttgcaggacccagtaagattaaccaccattattgttaatgtgaaggccggcaaagacatcagatcctgtgacatcatcaacttttttgctggcctagcaagggcaatgg

SEQ ID NO: 1231 - DNA, 122 bp, Homo sapiens
  misc_feature (61)..(62): /note="This region represents a CpG dinucleotide"
  misc_feature (61)..(61): /note="Nucleotide may be methylated to form 5-methylcytosine"
ttaaaaaaaaaaaaagaaaattggaaatgactgcagccaggtgtgtgtgattgggccccgcgacctttttcttaggcaaacagggctttgtggatgcagaaagacttctttggttgtgtagt

SEQ ID NO: 1232 - DNA, 122 bp, Homo sapiens
  misc_feature (61)..(62): /note="This region represents a CpG dinucleotide"
  misc_feature (61)..(61): /note="Nucleotide may be methylated to form 5-methylcytosine"
gaatttcaaagtctacaagttttgagatgagttgagtattaattcacctgccacaagagccgtgaggtgtagagcaagcttgtccaacctgcggttcatgcggcccaggatggctttgaata

SEQ ID NO: 1233 - DNA, 122 bp, Homo sapiens
  misc_feature (61)..(62): /note="This region represents a CpG dinucleotide"
  misc_feature (61)..(61): /note="Nucleotide may be methylated to form 5-methylcytosine"
gattctgatgaaacgggaaatgtcatgcatgactgttgctgcactttgagtattaagaggcgagccttaagattacagttgagaacacatctggtttaaagtgagtcctgcaaaaaacaaaa

SEQ ID NO: 1234 - DNA, 122 bp, Homo sapiens
  misc_feature (61)..(62): /note="This region represents a CpG dinucleotide"
  misc_feature (61)..(61): /note="Nucleotide may be methylated to form 5-methylcytosine"
ctggcatacctacaatgttttaggccctaaactacattttctaccgtcactgtcacgtggcgagccacatattgtgcaatatgctttagcaggcatgttgctagtaaactgaagaagcactt

SEQ ID NO: 1235 - DNA, 122 bp, Homo sapiens
  misc_feature (61)..(62): /note="This region represents a CpG dinucleotide"
  misc_feature (61)..(61): /note="Nucleotide may be methylated to form 5-methylcytosine"
caacccatgaagaactgaatgaaattccacaagccagccaggcctgctgtcagtgatcagcggccctccattgccactgacctgaccagccagcttccttcagtcaatccaaatgaggccag

SEQ ID NO: 1236 - DNA, 122 bp, Homo sapiens
  misc_feature (61)..(62): /note="This region represents a CpG dinucleotide"
  misc_feature (61)..(61): /note="Nucleotide may be methylated to form 5-methylcytosine"
tggtgtcaatgggatcaaggttctttctgcttgtcatttgaagactccaagacacattaacggtattcacaaataagagattttaagcttcaaattagaagaaggtttaacaatatggggaa

SEQ ID NO: 1237 - DNA, 122 bp, Homo sapiens
  misc_feature (61)..(62): /note="This region represents a CpG dinucleotide"
  misc_feature (61)..(61): /note="Nucleotide may be methylated to form 5-methylcytosine"
gcaagaatttgcagaattaagtactgatcagtcattcattcatataatactgactcaacacgtattatgtgtcatgcactgttctaagtgctgggatatagcagtaggcaaaatagaccatg

SEQ ID NO: 1238 - DNA, 122 bp, Homo sapiens
  misc_feature (61)..(62): /note="This region represents a CpG dinucleotide"
  misc_feature (61)..(61): /note="Nucleotide may be methylated to form 5-methylcytosine"
ctttaatgacttcggcagttgtttcattctgcaaaaacaggaagatcccacacaataaggcgcctgtctcacagctgggctcctgcgtagacggccacccacaagagtaactaactgctggg

SEQ ID NO: 1239 - DNA, 122 bp, Homo sapiens
  misc_feature (61)..(62): /note="This region represents a CpG dinucleotide"
  misc_feature (61)..(61): /note="Nucleotide may be methylated to form 5-methylcytosine"
caaactcctggcctgaagcaatcctcacactttggcttcccaaagtgcggggattacaggcgtgattgtcccaaatgtcagcagtgtgacactgcgttaggctactattgacctcctggcaa

SEQ ID NO: 1240 - DNA, 122 bp, Homo sapiens
  misc_feature (61)..(62): /note="This region represents a CpG dinucleotide"
  misc_feature (61)..(61): /note="Nucleotide may be methylated to form 5-methylcytosine"
aaagcacatatttttttctgtctgggaaagtcaggatattggggcttaaagtataagttgcggttcaccaggcagagagggacacaaaaaatattccaggaagacagaacagtatgttcaag

SEQ ID NO: 1241 - DNA, 122 bp, Homo sapiens
  misc_feature (61)..(62): /note="This region represents a CpG dinucleotide"
  misc_feature (61)..(61): /note="Nucleotide may be methylated to form 5-methylcytosine"
agactggaaaccaccctggacaggatgctgttccatcacagggcacactcacacccacaccgatgcccacactcactcttactgggaccattgagacatgccagtgaaactgacttgcacat

SEQ ID NO: 1242 - DNA, 122 bp, Homo sapiens
  misc_feature (61)..(62): /note="This region represents a CpG dinucleotide"
  misc_feature (61)..(61): /note="Nucleotide may be methylated to form 5-methylcytosine"
actgccctgatctcaaggataggggactcatgacattggtttcagctgtagcgagaaagacggaagtacatacagctttcaggaacagctgacctcgggggaaaccaccttactggtcagta

SEQ ID NO: 1243 - DNA, 122 bp, Homo sapiens
  misc_feature (61)..(62): /note="This region represents a CpG dinucleotide"
  misc_feature (61)..(61): /note="Nucleotide may be methylated to form 5-methylcytosine"
tcagagtgagttgaggcgagcctgcaggactgtgttccctctgcaggctgtaggggaggacgtgtttccttgccttctccactggtaaaggccacccacatttctcagctcatgccccttcg

SEQ ID NO: 1244 - DNA, 122 bp, Homo sapiens
  misc_feature (61)..(62): /note="This region represents a CpG dinucleotide"
  misc_feature (61)..(61): /note="Nucleotide may be methylated to form 5-methylcytosine"
accattagccaccctttaatgagcgggtgagtgccctttctgcatcagacacagtatttccgtacatcattagtgccaatcctcacaataatcctgtgttcatctccctaatttacaaagag

SEQ ID NO: 1245 - DNA, 122 bp, Homo sapiens
  misc_feature (61)..(62): /note="This region represents a CpG dinucleotide"
  misc_feature (61)..(61): /note="Nucleotide may be methylated to form 5-methylcytosine"
tctgtagcttggccctactcgctcttacaaggttcccaggtgatgccgatgctgccgctccgggatcacacctggagacctagtgccaaaccctcctaatcaaggcaccgactcagccggca

SEQ ID NO: 1246 - DNA, 122 bp, Homo sapiens
  misc_feature (61)..(62): /note="This region represents a CpG dinucleotide"
  misc_feature (61)..(61): /note="Nucleotide may be methylated to form 5-methylcytosine"
ccagtaaacagtctttaaactgctggatcagtaagctgcttacagccttgcaagcgctgacgccacatctgctcggcaattcatgtgctctcaagccaaggatttagaatccatgtttgtca

SEQ ID NO: 1247 - DNA, 122 bp, Homo sapiens
  misc_feature (61)..(62): /note="This region represents a CpG dinucleotide"
  misc_feature (61)..(61): /note="Nucleotide may be methylated to form 5-methylcytosine"
taatcagtcggagcaggcaatgatcagagactgggcagggccttacctccaactctagaacgccagggaagcagcagccacccctcagggctcagaaaagggagtttctaagtactaaaagg

SEQ ID NO: 1248 - DNA, 122 bp, Homo sapiens
  misc_feature (61)..(62): /note="This region represents a CpG dinucleotide"
  misc_feature (61)..(61): /note="Nucleotide may be methylated to form 5-methylcytosine"
gcacctgcacaaccagggtgctggaaggattgagggaggcagagcctgcagggctgggcacgcacctggcatgtgaggcttcggcagacggcaacctttattacccaagctccttagaccaa

SEQ ID NO: 1249 - DNA, 122 bp, Homo sapiens
  misc_feature (61)..(62): /note="This region represents a CpG dinucleotide"
  misc_feature (61)..(61): /note="Nucleotide may be methylated to form 5-methylcytosine"
gagtttcaatttgaagtcagacatcctggatctagagcttagcttcatcactgtccctttcgtaggcaaatctttcaacctctctgagcctcagatctcttaaaaaaaaaaaaaaaaaaaag

SEQ ID NO: 1250 - DNA, 122 bp, Homo sapiens
  misc_feature (61)..(62): /note="This region represents a CpG dinucleotide"
  misc_feature (61)..(61): /note="Nucleotide may be methylated to form 5-methylcytosine"
tgttttccagatgctaaggcacagaatataatgccccattgccttggactctgagtttggcgtccagtctgtcagactatgttaactcacccatatatgtaaacacattaacaagcaccgtt

SEQ ID NO: 1251 - DNA, 122 bp, Homo sapiens
  misc_feature (61)..(62): /note="This region represents a CpG dinucleotide"
  misc_feature (61)..(61): /note="Nucleotide may be methylated to form 5-methylcytosine"
ccttgccttctctgcacttgtgagacctggtgtgcaatgcagacatggaaccaatggtgacgagactttgttctgacagagctttacagctacacggaagggccagaattcctgatgaatcg

SEQ ID NO: 1252 - DNA, 122 bp, Homo sapiens
  misc_feature (61)..(62): /note="This region represents a CpG dinucleotide"
  misc_feature (61)..(61): /note="Nucleotide may be methylated to form 5-methylcytosine"
tgggacaaggaggccccagtgaggaaaccggaaggctggattgctgacagcacagcttcccggctccgctgagctggcattcttgtagctgaaaccctgaggaggccagccccctttcccac

SEQ ID NO: 1253 - DNA, 122 bp, Homo sapiens
  misc_feature (61)..(62): /note="This region represents a CpG dinucleotide"
  misc_feature (61)..(61): /note="Nucleotide may be methylated to form 5-methylcytosine"
ccattggaccgctacatcctggtggacattgatgacatcttcgtgggcaaggagggcacacgcatgaaggtggaggacgtgaaggtatggccgggggtgctagaccgggcaaggcaggtggg

SEQ ID NO: 1254 - DNA, 122 bp, Homo sapiens
  misc_feature (61)..(62): /note="This region represents a CpG dinucleotide"
  misc_feature (61)..(61): /note="Nucleotide may be methylated to form 5-methylcytosine"
gtccagcctttgcctgtcactggaaggccagagagggaaacagattttcatctgaggtcacgcaggaggttctgagcacagctgtctcccgactctcgcaggtgtagcaggccaggcaggtc

SEQ ID NO: 1255 - DNA, 122 bp, Homo sapiens
  misc_feature (61)..(62): /note="This region represents a CpG dinucleotide"
  misc_feature (61)..(61): /note="Nucleotide may be methylated to form 5-methylcytosine"
aggagccccgagagatcatgcactgggtctgatggggtttcttcgtctggggaaaggaaccggaggccactgtgatgtgtcagctaactgggaaaggattaacactctggagaaaccatgat

SEQ ID NO: 1256 - DNA, 122 bp, Homo sapiens
  misc_feature (61)..(62): /note="This region represents a CpG dinucleotide"
  misc_feature (61)..(61): /note="Nucleotide may be methylated to form 5-methylcytosine"
ttatgcagcaaacttggggctcccgatttgtgccagacactgtgtggtcctttggagactcgaagaggaaagcaggaaactgcccgcccttgcattttctacatctaggttcttgggaaagt

SEQ ID NO: 1257 - DNA, 122 bp, Homo sapiens
  misc_feature (61)..(62): /note="This region represents a CpG dinucleotide"
  misc_feature (61)..(61): /note="Nucleotide may be methylated to form 5-methylcytosine"
aagttctagagaagggggttcagggttccggctctctggctctcacagctgaggccaaaacgtcaggcgccacaccagtatctcggcttgccatttcgtcaccagctgaatgccagtcgcaa

SEQ ID NO: 1258 - DNA, 122 bp, Homo sapiens
  misc_feature (61)..(62): /note="This region represents a CpG dinucleotide"
  misc_feature (61)..(61): /note="Nucleotide may be methylated to form 5-methylcytosine"
cttgtctgtagctgtccttgaagtggtgtccactattcccctggatgaggttcattcttacgttctgttccataacctagttgtgttattaacttcccatcatacatccttttattaaaaat

SEQ ID NO: 1259 - DNA, 122 bp, Homo sapiens
  misc_feature (61)..(62): /note="This region represents a CpG dinucleotide"
  misc_feature (61)..(61): /note="Nucleotide may be methylated to form 5-methylcytosine"
gagcaggctgctccagatatacaagacatcattcctgcaggcattgtcagtcttgtagtccgttgacagtaattgcatggacaacacccaaattgattgacttttctgtaagtattgttgaa

SEQ ID NO: 1260 - DNA, 122 bp, Homo sapiens
  misc_feature (61)..(62): /note="This region represents a CpG dinucleotide"
  misc_feature (61)..(61): /note="Nucleotide may be methylated to form 5-methylcytosine"
tttattcacatactaattatgcagggaagagcacactaatgccggatggacatgatttaacgaactgaggatccaggagaaggaataaagataacaagaaaacaaaggaggagtgcagaatc

SEQ ID NO: 1261 - DNA, 122 bp, Homo sapiens
  misc_feature (61)..(62): /note="This region represents a CpG dinucleotide"
  misc_feature (61)..(61): /note="Nucleotide may be methylated to form 5-methylcytosine"
ctgggtccagcttactcagctaaaagcttgagtctgggagttcctctaggacagagccctcgcctcacccgccctgtgcattcacagtgctgtaagccaggcccagcacttagtaggtgcca

SEQ ID NO: 1262 - DNA, 122 bp, Homo sapiens
  misc_feature (61)..(62): /note="This region represents a CpG dinucleotide"
  misc_feature (61)..(61): /note="Nucleotide may be methylated to form 5-methylcytosine"
ttatgcaatgtttccttctgttccttcatcttgatttatttttgtgggttaagcctttggcgggagggaaaaaaggtttatttgttacactccagaggagaaagaacttgaaggaggaaata

SEQ ID NO: 1263 - DNA, 122 bp, Homo sapiens
  misc_feature (61)..(62): /note="This region represents a CpG dinucleotide"
  misc_feature (61)..(61): /note="Nucleotide may be methylated to form 5-methylcytosine"
ggagaaaggaatcaagaactgcctttcctgtggaaacactaaccatttcaacagcatgagcgtcacagtgcaatccggatggaagaagccattgcgttaactgataacgatccacctccgtt

SEQ ID NO: 1264 - DNA, 122 bp, Homo sapiens
  misc_feature (61)..(62): /note="This region represents a CpG dinucleotide"
  misc_feature (61)..(61): /note="Nucleotide may be methylated to form 5-methylcytosine"
gaatacctcctcggccctacgcggcctctgctcttctctcttggagccaggcagccagcacggaggcagcctcgataactcgctaacgtgctgcccatgctgttcttaaaaatttatgactg

SEQ ID NO: 1265 - DNA, 122 bp, Homo sapiens
  misc_feature (61)..(62): /note="This region represents a CpG dinucleotide"
  misc_feature (61)..(61): /note="Nucleotide may be methylated to form 5-methylcytosine"
ttagcccaacttgctctcttcttgtggctctatgcctcattgcacaactcatcataattacgcaaatttgcccccggggcaaacaggggctgtggtgcaggatgagactgatgcgatctcgc

SEQ ID NO: 1266 - DNA, 122 bp, Homo sapiens
  misc_feature (61)..(62): /note="This region represents a CpG dinucleotide"
  misc_feature (61)..(61): /note="Nucleotide may be methylated to form 5-methylcytosine"
acattttcgtgtaagcctcatcaactgcagcaaataatgattccttcctgttctgggaaacgcctcataagcaagtagatgttgaatcatagtgacatggtttctgtaaacacagaccatgc

SEQ ID NO: 1267 - DNA, 122 bp, Homo sapiens
  misc_feature (61)..(62): /note="This region represents a CpG dinucleotide"
  misc_feature (61)..(61): /note="Nucleotide may be methylated to form 5-methylcytosine"
tgagttattctgtcttcagtatggtgtttcctaatgcccaagtggatctcttgcacaacacgtacaacagacggaaggtgcaagaatgtccttaaaacagtttacaataatcaaaacctgga

SEQ ID NO: 1268 - DNA, 122 bp, Homo sapiens
  misc_feature (61)..(62): /note="This region represents a CpG dinucleotide"
  misc_feature (61)..(61): /note="Nucleotide may be methylated to form 5-methylcytosine"
agtccttcttggatgagaacaggttctgctgcctcttcaaaatcacaggatatcctttcccggcctacagtcagcctgacaatataagcaatgctataaatattatagcacatactgagaaa

SEQ ID NO: 1269 - DNA, 122 bp, Homo sapiens
  misc_feature (61)..(62): /note="This region represents a CpG dinucleotide"
  misc_feature (61)..(61): /note="Nucleotide may be methylated to form 5-methylcytosine"
gcaggcagaggtgccttcctgcaggtgtgccagagtctttggtaatgagccattatgctccgtcagtcattctgctgtaaccatgcatagtcatcctgtttccttcctcacagtatatggag

SEQ ID NO: 1270 - DNA, 122 bp, Homo sapiens
  misc_feature (61)..(62): /note="This region represents a CpG dinucleotide"
  misc_feature (61)..(61): /note="Nucleotide may be methylated to form 5-methylcytosine"
ctaaaattgcgtcatttagaacccaattgggtccagatgttatgggcatcgacgagttaccgtctcggaaactctcaatcacgcaagcgaaaggagaggaggcggctaattaaatattgagc

SEQ ID NO: 1271 - DNA, 122 bp, Homo sapiens
  misc_feature (61)..(62): /note="This region represents a CpG dinucleotide"
  misc_feature (61)..(61): /note="Nucleotide may be methylated to form 5-methylcytosine"
tgtagggttatacgcaatagcaagatagtcctgtgtttcctgtaattccggcccttcagccggacctaccctgacacaaggtgacctcttgtatgtgctgcctagtctgccggagttatcta

SEQ ID NO: 1272 - DNA, 122 bp, Homo sapiens
  misc_feature (61)..(62): /note="This region represents a CpG dinucleotide"
  misc_feature (61)..(61): /note="Nucleotide may be methylated to form 5-methylcytosine"
gtgtttccagtagtcatccaggctgtggtggacgaaggagatggtgagtgcgtcctcttccgtcctcctgggcgtgcaggccgtgcagggaggaagcacgtcttgagggaggagtgcttgca

SEQ ID NO: 1273 - DNA, 122 bp, Homo sapiens
  misc_feature (61)..(62): /note="This region represents a CpG dinucleotide"
  misc_feature (61)..(61): /note="Nucleotide may be methylated to form 5-methylcytosine"
tttataataataataattattttacagacagggtcttgctctgtcacccaggctggagtacggtggcgcaatcaagactcactacagactcactacagcctcaacctcctggacttaagcaa

SEQ ID NO: 1274 - DNA, 122 bp, Homo sapiens
  misc_feature (61)..(62): /note="This region represents a CpG dinucleotide"
  misc_feature (61)..(61): /note="Nucleotide may be methylated to form 5-methylcytosine"
ccactttcccttttttgctgacatctgcccagggcagacagtagcacatctggctgagtgcgcatctgactgcctatgcacaaggaccctgggtgagatgggagtacactgaaccagactct

SEQ ID NO: 1275 - DNA, 122 bp, Homo sapiens
  misc_feature (61)..(62): /note="This region represents a CpG dinucleotide"
  misc_feature (61)..(61): /note="Nucleotide may be methylated to form 5-methylcytosine"
gattgcagtgagcctgagatcatgccattgcactccaccctgggtgacagagcgaaactccgtctcaaagaaaacagcagggagtgacagaatccagttagttttagatggcatgttgcaat

SEQ ID NO: 1276 - DNA, 122 bp, Homo sapiens
  misc_feature (61)..(62): /note="This region represents a CpG dinucleotide"
  misc_feature (61)..(61): /note="Nucleotide may be methylated to form 5-methylcytosine"
gaaatcacattccctatcttacttttgggaccagtgggctgagccttgctaagtggagaacgctgtgtgacttaggaaaccaggtttggcttgtgagctgcaaactaccttgacatggcctc

SEQ ID NO: 1277 - DNA, 122 bp, Homo sapiens
  misc_feature (61)..(62): /note="This region represents a CpG dinucleotide"
  misc_feature (61)..(61): /note="Nucleotide may be methylated to form 5-methylcytosine"
gtccacgacaacgctgccttcccagtgtgggtggaagccaggaggcgattactcaagctccgaaactgaatgtgctgagcccacagtcccgcaggaggaagatgaccgggtaggtggggaag

SEQ ID NO: 1278 - DNA, 122 bp, Homo sapiens
  misc_feature (61)..(62): /note="This region represents a CpG dinucleotide"
  misc_feature (61)..(61): /note="Nucleotide may be methylated to form 5-methylcytosine"
gagttcaggctggagcctggctgggacacactgttccccacttgccctttagccctgccccgagaccagaattctcacccggccccaccgggggtgggggcagaatctcaagaccatggatc

SEQ ID NO: 1279 - DNA, 122 bp, Homo sapiens
  misc_feature (61)..(62): /note="This region represents a CpG dinucleotide"
  misc_feature (61)..(61): /note="Nucleotide may be methylated to form 5-methylcytosine"
tcctgaaatgaagcaagacattgtggctacgagtaagcacctgagtccttcagacttcaccgcttactgtgttgcaaaatactgagcatgaactccagtttccttgtgggtaaattaaggat

SEQ ID NO: 1280 - DNA, 122 bp, Homo sapiens
  misc_feature (61)..(62): /note="This region represents a CpG dinucleotide"
  misc_feature (61)..(61): /note="Nucleotide may be methylated to form 5-methylcytosine"
tatctcaaatgtgaggcaaatagctaatggtgtttgtgtatacgaggaaggtggagtcaccggttcttcgtggccatcagaggaccgacacgcccataggtctcatgcattaagtctgcgtt

SEQ ID NO: 1281 - DNA, 122 bp, Homo sapiens
  misc_feature (61)..(62): /note="This region represents a CpG dinucleotide"
  misc_feature (61)..(61): /note="Nucleotide may be methylated to form 5-methylcytosine"
tcagaactcagaaagggtggggaaatgcaattttaccaagaggcaggaagaaatagataacggaataacgccagtgagtactgcagctgaatccagtgcaactgaattgtcctggttcaaac

SEQ ID NO: 1282 - DNA, 122 bp, Homo sapiens
  misc_feature (61)..(62): /note="This region represents a CpG dinucleotide"
  misc_feature (61)..(61): /note="Nucleotide may be methylated to form 5-methylcytosine"
tacttatttaaaagcctcttttgtcggtgttgaaatggtccaagctcccaaaccctgtgccgggctatgagcgtggaaccagccgaactgcaatgagcatcactgcagcagcaaaaggcagt

SEQ ID NO: 1283 - DNA, 122 bp, Homo sapiens
  misc_feature (61)..(62): /note="This region represents a CpG dinucleotide"
  misc_feature (61)..(61): /note="Nucleotide may be methylated to form 5-methylcytosine"
tccctcttgtcaggtcatccatgactttagagaacagacacaagtgtatccagctgtccacgggtggagctacccgttgggcttatgagtgacctggagtgacagctgagtcaccctgggta

SEQ ID NO: 1284 - DNA, 122 bp, Homo sapiens
  misc_feature (61)..(62): /note="This region represents a CpG dinucleotide"
  misc_feature (61)..(61): /note="Nucleotide may be methylated to form 5-methylcytosine"
taaataatccatggattaccaacttctcagcaatggtgtaaattcttctgctaaataacccgtgggttaaagaggacatcacattggaaattccagagtacttaaagttaagtgtatcttct

SEQ ID NO: 1285 - DNA, 122 bp, Homo sapiens
  misc_feature (61)..(62): /note="This region represents a CpG dinucleotide"
  misc_feature (61)..(61): /note="Nucleotide may be methylated to form 5-methylcytosine"
agctctcttttgctctttcctgtcatttcagttatgcaagaacacaatgctctcaccctacgccagtctggagagctttgcttttctcttgggaggaggcatggtgcaatgatgagaagaag

SEQ ID NO: 1286 - DNA, 122 bp, Homo sapiens
  misc_feature (61)..(62): /note="This region represents a CpG dinucleotide"
  misc_feature (61)..(61): /note="Nucleotide may be methylated to form 5-methylcytosine"
ctggctggccaggcccagggcctgggctcatgggctatattgagggctgagtcaccagcccgcgcctgggtcaggctgagtgtcactggctgctggggcctgagtcaggccccgatttatcc

SEQ ID NO: 1287 - DNA, 122 bp, Homo sapiens
  misc_feature (61)..(62): /note="This region represents a CpG dinucleotide"
  misc_feature (61)..(61): /note="Nucleotide may be methylated to form 5-methylcytosine"
attttggaggaaatggattaaagcaactaggaaagaggttagaggactcaagagatccaacggctctggcctgtgagcagacgggccattcataactttgtagtttctcattcagagcagcc

SEQ ID NO: 1288 - DNA, 122 bp, Homo sapiens
  misc_feature (61)..(62): /note="This region represents a CpG dinucleotide"
  misc_feature (61)..(61): /note="Nucleotide may be methylated to form 5-methylcytosine"
agcttataaagtagactcctctatcatagatgaggaggttcaggctctgagaagttaaatcggttgcccaaattgcacagcctttaagtgatggaaccaggcctcaaacagcaagctaagcc

SEQ ID NO: 1289 - DNA, 122 bp, Homo sapiens
  misc_feature (61)..(62): /note="This region represents a CpG dinucleotide"
  misc_feature (61)..(61): /note="Nucleotide may be methylated to form 5-methylcytosine"
ttaccgatgcttacctagaaaaggaaagactataaagcaggcctttccaagaactggagtcgagtgtttgcagtcactagaagttttctagcagaactagcctgggtcagggagggtgctgc

SEQ ID NO: 1290 - DNA, 122 bp, Homo sapiens
  misc_feature (61)..(62): /note="This region represents a CpG dinucleotide"
  misc_feature (61)..(61): /note="Nucleotide may be methylated to form 5-methylcytosine"
tgaatgccacccgaactcatccagatgccgctgcgttcaagctctcccagcacccgcggccgaagtaaataacaattctcttaatgctaaggcagcaaggagagggcactgcgaactgcaga

SEQ ID NO: 1291 - DNA, 122 bp, Homo sapiens
  misc_feature (61)..(62): /note="This region represents a CpG dinucleotide"
  misc_feature (61)..(61): /note="Nucleotide may be methylated to form 5-methylcytosine"
acctgtgggtgcaggccacacgcaggctgcacagacccgggacaggtctgagctctgaggcgtgcggcccatctccgcggcaggagcttctgtctgagcctggggaggaaaagcctccacct

SEQ ID NO: 1292 - DNA, 122 bp, Homo sapiens
  misc_feature (61)..(62): /note="This region represents a CpG dinucleotide"
  misc_feature (61)..(61): /note="Nucleotide may be methylated to form 5-methylcytosine"
agatatctgtatatacacacacacatatgtgcacacacacactctctctccattatcgaacgactgactgtaaacctcaccacacagggtggtgccctggccccgaggtcaccccgactttt

SEQ ID NO: 1293 - DNA, 122 bp, Homo sapiens
  misc_feature (61)..(62): /note="This region represents a CpG dinucleotide"
  misc_feature (61)..(61): /note="Nucleotide may be methylated to form 5-methylcytosine"
ctaactggccaaaggatgtcatccagaaaagctttcacaatagggagctggccccgtggccgctgtccaggaagttcagttgcagacggactgggctgaataagatggggccacccagcaag

SEQ ID NO: 1294 - DNA, 122 bp, Homo sapiens
  misc_feature (61)..(62): /note="This region represents a CpG dinucleotide"
  misc_feature (61)..(61): /note="Nucleotide may be methylated to form 5-methylcytosine"
agcaatgagagtaattacagagtgcttatccaatacccaccttgtagcggccatgggagacgtcattttccccttcctgccctggacatggtacactgccggccagattctacaccagctgt

SEQ ID NO: 1295 - DNA, 122 bp, Homo sapiens
  misc_feature (61)..(62): /note="This region represents a CpG dinucleotide"
  misc_feature (61)..(61): /note="Nucleotide may be methylated to form 5-methylcytosine"
agtacacacccaggaaatttgtcatccaccctgagagtaacaaccttattatcattgaaacggaccacaatgcctacactgaggccacgaaagctcagagaaagcagcagatggcagaggta

SEQ ID NO: 1296 - DNA, 122 bp, Homo sapiens
  misc_feature (61)..(62): /note="This region represents a CpG dinucleotide"
  misc_feature (61)..(61): /note="Nucleotide may be methylated to form 5-methylcytosine"
tctgctttttctccccttcaatttagttgacaggttaatttcagaactgagtgctgcttacgaaggtcagtgtgaccagctgaaccacctcagctggtgtctttcaggacactcatctctca

SEQ ID NO: 1297 - DNA, 122 bp, Homo sapiens
  misc_feature (61)..(62): /note="This region represents a CpG dinucleotide"
  misc_feature (61)..(61): /note="Nucleotide may be methylated to form 5-methylcytosine"
ggtagctcatgattcacaaacccagcagaagcgcttggcactaacgtgtttttcctaccacgctttagttgcataagaaagtaacactgatggaaaagggattgaattaaatctacctccct

SEQ ID NO: 1298 - DNA, 122 bp, Homo sapiens
  misc_feature (61)..(62): /note="This region represents a CpG dinucleotide"
  misc_feature (61)..(61): /note="Nucleotide may be methylated to form 5-methylcytosine"
tttggccaaaataggtcagtgattacttaggcacagtcacacgtggacctgcttccagggcgcttccacaggttaatgctggcttatgtagtttatgtggtggttgttgttgacgtgggctc

SEQ ID NO: 1299 - DNA, 122 bp, Homo sapiens
  misc_feature (61)..(62): /note="This region represents a CpG dinucleotide"
  misc_feature (61)..(61): /note="Nucleotide may be methylated to form 5-methylcytosine"
tggagtctcggctgtagcccccgttggggcctggttccgctgcagaagggatatgtgtggcgtctaagtcagcggcagggcgctcggctggctgccaccagggcccgctccccctccagtat

SEQ ID NO: 1300 - DNA, 122 bp, Homo sapiens
  misc_feature (61)..(62): /note="This region represents a CpG dinucleotide"
  misc_feature (61)..(61): /note="Nucleotide may be methylated to form 5-methylcytosine"
gtaaaatgagtcaggacaccaaagatgagcccctaaatgttgttaaatgtcattttattacgatagagagtgctaacttacaacagagagtatacatttcggggttcacctggctcgttcta

SEQ ID NO: 1301 - DNA, 122 bp, Homo sapiens
  misc_feature (61)..(62): /note="This region represents a CpG dinucleotide"
  misc_feature (61)..(61): /note="Nucleotide may be methylated to form 5-methylcytosine"
tggccaacatggtgaaatcccgtctttgctgaaaatacaaaaattagccgggtgtggtggcgcatggctgtaatcccagaaactcaggaggctgagtcaggagaatcacttaaatccgggag

SEQ ID NO: 1302 - DNA, 122 bp, Homo sapiens
  misc_feature (61)..(62): /note="This region represents a CpG dinucleotide"
  misc_feature (61)..(61): /note="Nucleotide may be methylated to form 5-methylcytosine"
gcaggcagcagcaggccaagggggccagagggagggtgttcctgaatgcctctttcttcccgctccttcaggctgtcttctgaagtagccaggctatcagggttttgcaacaatgcaacaaa

SEQ ID NO: 1303 - DNA, 122 bp, Homo sapiens
  misc_feature (61)..(62): /note="This region represents a CpG dinucleotide"
  misc_feature (61)..(61): /note="Nucleotide may be methylated to form 5-methylcytosine"
tatcaaaaaatattggggtttagtcatagagggcattttttgaggcatagtggttaagaacgcagactttagagtcaactgcttagtcacctcctggatctatcacatactgtgcagccttg

SEQ ID NO: 1304 - DNA, 122 bp, Homo sapiens
  misc_feature (61)..(62): /note="This region represents a CpG dinucleotide"
  misc_feature (61)..(61): /note="Nucleotide may be methylated to form 5-methylcytosine"
gtgattcagtcattattttattttcacaacagcctgatgaggtcagtactctcattatgtcgatttctcagaagaggaactgcggctgggagaacgtgactcatctagctgatggagctgag

SEQ ID NO: 1305 - DNA, 122 bp, Homo sapiens
  misc_feature (61)..(62): /note="This region represents a CpG dinucleotide"
  misc_feature (61)..(61): /note="Nucleotide may be methylated to form 5-methylcytosine"
attaccctcattgtgcttccccattctcagagagtaaaaccacagggcagttctggctgacgggtttgcacctatctggtgtctgctccactgtttctgtcatgttgagtcacagggcattc

SEQ ID NO: 1306 - DNA, 122 bp, Homo sapiens
  misc_feature (61)..(62): /note="This region represents a CpG dinucleotide"
  misc_feature (61)..(61): /note="Nucleotide may be methylated to form 5-methylcytosine"
cagaaaacttaccacaggcttactctcctgcagccctacaggaaattattgcaaagaatacgcattagcagccaacacacggaattggactagagaactggctggtgtgcaagcggaatgga

SEQ ID NO: 1307 - DNA, 122 bp, Homo sapiens
  misc_feature (61)..(62): /note="This region represents a CpG dinucleotide"
  misc_feature (61)..(61): /note="Nucleotide may be methylated to form 5-methylcytosine"
gagtccccatgcttgggtacacaccagccgtgcccctactttcactgttcttccttaggacgttatttaatccccgcagaaaggacatcgtctcacctgtagcaaggagctaacatcataat

SEQ ID NO: 1308 - DNA, 122 bp, Homo sapiens
  misc_feature (61)..(62): /note="This region represents a CpG dinucleotide"
  misc_feature (61)..(61): /note="Nucleotide may be methylated to form 5-methylcytosine"
gggaaacattttaacccttctttccttcctctctatcctaaagacttaaaacacacttcacgcagtcacagaaagagctcatagaccagactgcggggcttcaaagccttctatcttattta

SEQ ID NO: 1309 - DNA, 122 bp, Homo sapiens
  misc_feature (61)..(62): /note="This region represents a CpG dinucleotide"
  misc_feature (61)..(61): /note="Nucleotide may be methylated to form 5-methylcytosine"
gtcaagcgatcctcccaccttggcctcctaagatgattacaggccataagccactgcgcccggcccaagcagttctgaataatgatgaaatgggctcagttgagagaagctgaagattaact

SEQ ID NO: 1310 - DNA, 122 bp, Homo sapiens
  misc_feature (61)..(62): /note="This region represents a CpG dinucleotide"
  misc_feature (61)..(61): /note="Nucleotide may be methylated to form 5-methylcytosine"
ctctggaatggcagttccacaaagaccagggcctggtctgtcctgctcctcagtttaccccgagtctagagcaatattagtggaagaatccatgatggaggattaaatgaaatagtctaagt

SEQ ID NO: 1311 - DNA, 122 bp, Homo sapiens
  misc_feature (61)..(62): /note="This region represents a CpG dinucleotide"
  misc_feature (61)..(61): /note="Nucleotide may be methylated to form 5-methylcytosine"
ccatttgtgtacttttgggggtcaactgattagctggcagctagcagagcgatcagagtgcgcagtctgtcctcgacaaggacgattaggtgcgtcaaataacacagtttctgtttatggat

SEQ ID NO: 1312 - DNA, 122 bp, Homo sapiens
  misc_feature (61)..(62): /note="This region represents a CpG dinucleotide"
  misc_feature (61)..(61): /note="Nucleotide may be methylated to form 5-methylcytosine"
cggctttagatctacgagagacacagctgcggctcatcagcaaatgttctttggctctgacgtgagcttgactaacttatgtctactgaacctgctggggtacatcctgtagagtgtgctta

SEQ ID NO: 1313 - DNA, 122 bp, Homo sapiens
  misc_feature (61)..(62): /note="This region represents a CpG dinucleotide"
  misc_feature (61)..(61): /note="Nucleotide may be methylated to form 5-methylcytosine"
ccacccaccagctccagacactagccccagacagtgtgcacgcacacgcacacacacacacgcgtactgcgaatggcatctcagcattgtaggagccctgaatctccaagtcttagaattgt

SEQ ID NO: 1314 - DNA, 122 bp, Homo sapiens
  misc_feature (61)..(62): /note="This region represents a CpG dinucleotide"
  misc_feature (61)..(61): /note="Nucleotide may be methylated to form 5-methylcytosine"
ttagctttaggaacaacaatagcatgagccacccacttattgaggactagaatttctaaacggtaattaaacattttaaataaagaacagtttgatggttaaggagacacccagacattatc

SEQ ID NO: 1315 - DNA, 122 bp, Homo sapiens
  misc_feature (61)..(62): /note="This region represents a CpG dinucleotide"
  misc_feature (61)..(61): /note="Nucleotide may be methylated to form 5-methylcytosine"
cgtgttggcttttgttcttttaggaaatggatatagatgaaattttgcggttggctgaaacgagagagaatgaagtgtcaacaagtgcaacagatgaacttctatcacagtttaaggtatga

SEQ ID NO: 1316 - DNA, 122 bp, Homo sapiens
  misc_feature (61)..(62): /note="This region represents a CpG dinucleotide"
  misc_feature (61)..(61): /note="Nucleotide may be methylated to form 5-methylcytosine"
atcctgctccatgtcaggaaaatatttataggtccccagtcatgggatctggaaacagagcggaggaaggagctcgggaatggtcttgctcaatccttcccggcctctgctcatcggaatca

SEQ ID NO: 1317 - DNA, 122 bp, Homo sapiens
  misc_feature (61)..(62): /note="This region represents a CpG dinucleotide"
  misc_feature (61)..(61): /note="Nucleotide may be methylated to form 5-methylcytosine"
tcctatgtcatagaattgttgtgatgattaaatgagttattacatttaagtgattagaaccgtgcttagcacagaggaagcactcaaaagttaactactattagtgatgtctaaactttttt

SEQ ID NO: 1318 - DNA, 122 bp, Homo sapiens
  misc_feature (61)..(62): /note="This region represents a CpG dinucleotide"
  misc_feature (61)..(61): /note="Nucleotide may be methylated to form 5-methylcytosine"
gagaaattcgatctgaatatctatgaagattcttggctccacagatcagccgggaaccaacgcagaggttacttggctagagtggacgttaccaaatgtacaacgaaggatgacagaaataa

SEQ ID NO: 1319 - DNA, 122 bp, Homo sapiens
  misc_feature (61)..(62): /note="This region represents a CpG dinucleotide"
  misc_feature (61)..(61): /note="Nucleotide may be methylated to form 5-methylcytosine"
ggcttagcttcctgctccctcattggcttgagtgttggtcacagagcggaggattggctgcgttctcactctttccctacacgattcctccccgctggctcctctggctttgggcgaggtca

SEQ ID NO: 1320 - DNA, 122 bp, Homo sapiens
  misc_feature (61)..(62): /note="This region represents a CpG dinucleotide"
  misc_feature (61)..(61): /note="Nucleotide may be methylated to form 5-methylcytosine"
catccactgatatgaaacatactatggtactgagggagaactcacctgtcacacacagaacgtcagcttcatgaatgacatagtgagattgtttcttgttcacactgaggccagcttgaccc

SEQ ID NO: 1321 - DNA, 122 bp, Homo sapiens
  misc_feature (61)..(62): /note="This region represents a CpG dinucleotide"
  misc_feature (61)..(61): /note="Nucleotide may be methylated to form 5-methylcytosine"
ccagctccgagccctgctcgtggagccattggtgctgcggcggggagaagaggccacaggcggggacgccccagacactcccgtggggcccgtgccagggtctcctgctcctcagaaagagc

SEQ ID NO: 1322 - DNA, 122 bp, Homo sapiens
  misc_feature (61)..(62): /note="This region represents a CpG dinucleotide"
  misc_feature (61)..(61): /note="Nucleotide may be methylated to form 5-methylcytosine"
cagggctagggccgcggtcggggccgtcggggagagcggagggcgcgtgggaatggggctcgctgcgccacggaaatcccgcgccgcccttcgagtcctcccagctgctccgcagagccggg

SEQ ID NO: 1323 - DNA, 122 bp, Homo sapiens
  misc_feature (61)..(62): /note="This region represents a CpG dinucleotide"
  misc_feature (61)..(61): /note="Nucleotide may be methylated to form 5-methylcytosine"
agccgattgctgggaacatggaagggagcagctgacggcaggctgtcaacacaaggcccacgcccctgcacgggggaaagcacaggagactcaccaaaagctctgcaaacatgggctgttta

SEQ ID NO: 1324 - DNA, 122 bp, Homo sapiens
  misc_feature (61)..(62): /note="This region represents a CpG dinucleotide"
  misc_feature (61)..(61): /note="Nucleotide may be methylated to form 5-methylcytosine"
ctgcgcagtgactgggccctgacctggagtcctctcagggcagctctggaccctcagcggcgcgtctctcccggattgtgcagggaccactggagggtcccaggggtagaatcctgactcgg

SEQ ID NO: 1325 - DNA, 122 bp, Homo sapiens
  misc_feature (61)..(62): /note="This region represents a CpG dinucleotide"
  misc_feature (61)..(61): /note="Nucleotide may be methylated to form 5-methylcytosine"
cctccaatgactggtcggtccagtccccttgctttaagggaaatcaatgctaaagagctacgacacttccagaactcctcgaggaactggctgaggcctttgttgcaaattttgtggtagct

SEQ ID NO: 1326 - DNA, 122 bp, Homo sapiens
  misc_feature (61)..(62): /note="This region represents a CpG dinucleotide"
  misc_feature (61)..(61): /note="Nucleotide may be methylated to form 5-methylcytosine"
tatagtaaaaacacagataaaatattttttaaatgatacacctgtatagggcgcttaccacgaatgcagcttgcaggacaggaagatactctgggtacaacagtgagtcagtagtgagtgaa

SEQ ID NO: 1327 - DNA, 122 bp, Homo sapiens
  misc_feature (61)..(62): /note="This region represents a CpG dinucleotide"
  misc_feature (61)..(61): /note="Nucleotide may be methylated to form 5-methylcytosine"
ttgcgtctcatgctgactcagtatgcaaatactctctgggagacttctccatcctcagaccgctccagacaccaaatgcctgggcctttgaccgccttgctaagagggtcaaccaagccagc

SEQ ID NO: 1328 - DNA, 122 bp, Homo sapiens
  misc_feature (61)..(62): /note="This region represents a CpG dinucleotide"
  misc_feature (61)..(61): /note="Nucleotide may be methylated to form 5-methylcytosine"
caaataccatgatacattccatttgaggtcctattcagtagggaggatgaatcatttgagcgtggctttttagtatgttaaaagcaaataaagtgagttatgttaagtattccttattttga

SEQ ID NO: 1329 - DNA, 122 bp, Homo sapiens
  misc_feature (61)..(62): /note="This region represents a CpG dinucleotide"
  misc_feature (61)..(61): /note="Nucleotide may be methylated to form 5-methylcytosine"
tgagtggtcagagcaccttgaagtctgtgtagcacttgcatgtacagtgtcccttttcatcgtcacagccctgagaggtaaatggtgtgactcttcccattttgcaaatgagaaaagagaaa

SEQ ID NO: 1330 - DNA, 122 bp, Homo sapiens
  misc_feature (61)..(62): /note="This region represents a CpG dinucleotide"
  misc_feature (61)..(61): /note="Nucleotide may be methylated to form 5-methylcytosine"
cccgcatgcgccaggctcacagctcccgttcgccctcctctttcatgcctggcccaggcccggcacatagcaagtattcaattgatagttgttgaaagaaatgaaaaggggccactgaaaat

SEQ ID NO: 1331 - DNA, 122 bp, Homo sapiens
  misc_feature (61)..(62): /note="This region represents a CpG dinucleotide"
  misc_feature (61)..(61): /note="Nucleotide may be methylated to form 5-methylcytosine"
gggaggcccttcaggtcggtagcctgtggaattagcatggtttggtgctctcactcctcacgctctccagtagccaagacaagaggcccctggctagctctggtaatgcacctcctgctggg

SEQ ID NO: 1332 - DNA, 122 bp, Homo sapiens
  misc_feature (61)..(62): /note="This region represents a CpG dinucleotide"
  misc_feature (61)..(61): /note="Nucleotide may be methylated to form 5-methylcytosine"
gtgctgggattataggcataagccatcatgcctggcatgggaagtttaaacaatgaattacgatttccaaactgaatggcaaggatgttatcttagtctgtttgtgctgctataaaaaatac

SEQ ID NO: 1333 - DNA, 122 bp, Homo sapiens
  misc_feature (61)..(62): /note="This region represents a CpG dinucleotide"
  misc_feature (61)..(61): /note="Nucleotide may be methylated to form 5-methylcytosine"
tcccacctgctatgaacatctatgtccatatttgtacatgtagacataagttgtcaattgcgaaatatggttaggtaatggttggactgcaattttcttaactgactggaacttgtaagtct

SEQ ID NO: 1334 - DNA, 122 bp, Homo sapiens
  misc_feature (61)..(62): /note="This region represents a CpG dinucleotide"
  misc_feature (61)..(61): /note="Nucleotide may be methylated to form 5-methylcytosine"
agtgaatttgtctttgagtgcaaggtggaggtgggtggggcagaagggaagtggagttggcgagtgatgaaactagagacagctcagagctagatcacccaaggccttgaaggacgagctta

SEQ ID NO: 1335 - DNA, 122 bp, Homo sapiens
  misc_feature (61)..(62): /note="This region represents a CpG dinucleotide"
  misc_feature (61)..(61): /note="Nucleotide may be methylated to form 5-methylcytosine"
catcctggactctttccagggttttgtgcaaggcctcgggagggccgggtctggcatcttcgtgcccagctcgttctttgccatgcttggctcgcctgccatggccggtatctactgtgacc

SEQ ID NO: 1336 - DNA, 122 bp, Homo sapiens
  misc_feature (61)..(62): /note="This region represents a CpG dinucleotide"
  misc_feature (61)..(61): /note="Nucleotide may be methylated to form 5-methylcytosine"
agctagacctagagctctggtcctggcttggcgaagaatgggagaggtcaaaggtgggagcgaggccgctgactggtgagtagagccccaccagagcagatgagctggaagtgcagcagagt

SEQ ID NO: 1337 - DNA, 122 bp, Homo sapiens
  misc_feature (61)..(62): /note="This region represents a CpG dinucleotide"
  misc_feature (61)..(61): /note="Nucleotide may be methylated to form 5-methylcytosine"
gaatctcttcatacatacagcaaggctagtttttttgagtgtttttgtgagactgaaatacgatgagatttatgaatctactttggtaagccagaccaatgctttgtggaagttagtcattt

SEQ ID NO: 1338 - DNA, 122 bp, Homo sapiens
  misc_feature (61)..(62): /note="This region represents a CpG dinucleotide"
  misc_feature (61)..(61): /note="Nucleotide may be methylated to form 5-methylcytosine"
acttcctgggttttaccagcccctaaatttactcacttaaaaaatttaattacatagacacgaatcattcattgtagttgctaaatattggtagcaactaactcgttgccttttgttggaat

SEQ ID NO: 1339 - DNA, 122 bp, Homo sapiens
  misc_feature (61)..(62): /note="This region represents a CpG dinucleotide"
  misc_feature (61)..(61): /note="Nucleotide may be methylated to form 5-methylcytosine"
caggaggatctaaagcaacgcagcctgcccacatgcctttcttaatcctgtgcaattatacgcaccctgggtgatgacactcgcagaggttattcttaaggcaagattactttcctcaccct

SEQ ID NO: 1340 - DNA, 122 bp, Homo sapiens
  misc_feature (61)..(62): /note="This region represents a CpG dinucleotide"
  misc_feature (61)..(61): /note="Nucleotide may be methylated to form 5-methylcytosine"
cttaatgtggaaattaagggacttacctcttttaagagactgggttgtgctgtgttgccccggtttgaatgcagtggctattgagagcacagtcatgcaccctacagctttgatcttctgag

SEQ ID NO: 1341 - DNA, 122 bp, Homo sapiens
  misc_feature (61)..(62): /note="This region represents a CpG dinucleotide"
  misc_feature (61)..(61): /note="Nucleotide may be methylated to form 5-methylcytosine"
ctatatgtagaagcagagatccactggatgcacatacaagaaggaaccagtgtgaacaggcggcagcaccaatgtgaaaatgagtgagctggaatatactgcttcatggccaagctgatcca

SEQ ID NO: 1342 - DNA, 122 bp, Homo sapiens
  misc_feature (61)..(62): /note="This region represents a CpG dinucleotide"
  misc_feature (61)..(61): /note="Nucleotide may be methylated to form 5-methylcytosine"
aagctggagctagtgccgtgggagttcaaggcagaggtggacactcctggttggggaaatcgagtactactttgaagaaggcagtactgaagacaggccttgaagggcaggtgtttctggaa

SEQ ID NO: 1343 - DNA, 122 bp, Homo sapiens
  misc_feature (61)..(62): /note="This region represents a CpG dinucleotide"
  misc_feature (61)..(61): /note="Nucleotide may be methylated to form 5-methylcytosine"
cactcgcgctccaagactcgggacaggcccttcccttccctccggcacacgtcctacacacgtccccgagaacagaacccacatggcagggagccccaccgtgctcactgttgtgttcccca

SEQ ID NO: 1344 - DNA, 122 bp, Homo sapiens
  misc_feature (61)..(62): /note="This region represents a CpG dinucleotide"
  misc_feature (61)..(61): /note="Nucleotide may be methylated to form 5-methylcytosine"
gtatgacaactccacagagtgctcttgctgtctcttcaaaagattatggctttggtcaggcgtggtggctcatgcctgtaatcctagcactttgggtggctgaagcaggcagatcacttgag

SEQ ID NO: 1345 - DNA, 122 bp, Homo sapiens
  misc_feature (61)..(62): /note="This region represents a CpG dinucleotide"
  misc_feature (61)..(61): /note="Nucleotide may be methylated to form 5-methylcytosine"
aggctttgactaacatccatgtcacacagaacttaaggagctctgagttcacaaaagccacgtcagacaaatgagcatgttgggaaatgaggtacatacagcctcattaggaaaaaaaaaca

SEQ ID NO: 1346 - DNA, 122 bp, Homo sapiens
  misc_feature (61)..(62): /note="This region represents a CpG dinucleotide"
  misc_feature (61)..(61): /note="Nucleotide may be methylated to form 5-methylcytosine"
gaattagtgggggcagccaggccccaggaacggagtgcggagagattctgtggtccagtgcgggccggagggcggtggaggagccgggggcgatgccgcggccggggaagagctcgtacagc

SEQ ID NO: 1347 - DNA, 122 bp, Homo sapiens
  misc_feature (61)..(62): /note="This region represents a CpG dinucleotide"
  misc_feature (61)..(61): /note="Nucleotide may be methylated to form 5-methylcytosine"
ctcttctgtaaaatcttagaaggcaatgagaagctgtgagctcatctagttttggagagacgagcttaggcagatctgagttcagatccctgttctgccactttctgatcatgtgaccctgg

SEQ ID NO: 1348 - DNA, 122 bp, Homo sapiens
  misc_feature (61)..(62): /note="This region represents a CpG dinucleotide"
  misc_feature (61)..(61): /note="Nucleotide may be methylated to form 5-methylcytosine"
tccagcatcttagatgcaaattccaaattacccaggtgcttcctccttacaagtgtcaaccgtcctttaatgcttctgaatggtgtaaaaggcacaggccttgcctttaaggctctctcaaa

SEQ ID NO: 1349 - DNA, 122 bp, Homo sapiens
  misc_feature (61)..(62): /note="This region represents a CpG dinucleotide"
  misc_feature (61)..(61): /note="Nucleotide may be methylated to form 5-methylcytosine"
caaagtgcaaatgcaccactggtttttccccaaagaacttcctggctgcaggagctgggacgtactgtttgataggaactcaagagacagtggcatttccctctctctggaccttccttagc

SEQ ID NO: 1350 - DNA, 122 bp, Homo sapiens
  misc_feature (61)..(62): /note="This region represents a CpG dinucleotide"
  misc_feature (61)..(61): /note="Nucleotide may be methylated to form 5-methylcytosine"
ggtgatgggctgagagagagggcggaagagagaagaagtaagggaggctttagtctgagtcgtctttgaaaccatgaaggtgtacgctcttctatagtgagcgtgttgcttcctgttttctc

SEQ ID NO: 1351 - DNA, 122 bp, Homo sapiens
  misc_feature (61)..(62): /note="This region represents a CpG dinucleotide"
  misc_feature (61)..(61): /note="Nucleotide may be methylated to form 5-methylcytosine"
tcctttttcttttttaaactcacacctgggcacgcatctgcgtactgccctggcgactgacgtgagcatgaagggagctttagtcagccgctcggcccgcgggaaggaagaggcgagcagga

SEQ ID NO: 1352 - DNA, 122 bp, Homo sapiens
  misc_feature (61)..(62): /note="This region represents a CpG dinucleotide"
  misc_feature (61)..(61): /note="Nucleotide may be methylated to form 5-methylcytosine"
ttcactcaccactcactcactgactcatctagagtaacttccagtcttgtaagttccattcgtggtaaatgccctatacagctataccattttcaaatcttttatatggtacttttaatata

SEQ ID NO: 1353 - DNA, 122 bp, Homo sapiens
  misc_feature (61)..(62): /note="This region represents a CpG dinucleotide"
  misc_feature (61)..(61): /note="Nucleotide may be methylated to form 5-methylcytosine"
acctgtcacacagaattaaacaaaagaagttattaatagttcaatgaaaggtgacactcacgccaaatacttggttttgaggaggatcacatgagataatgcatgcaaaagtgctctgtaaa

SEQ ID NO: 1354 - DNA, 122 bp, Homo sapiens
  misc_feature (61)..(62): /note="This region represents a CpG dinucleotide"
  misc_feature (61)..(61): /note="Nucleotide may be methylated to form 5-methylcytosine"
tccgtctctcccatcaggataccgagcacacttgttggtcttctgcattagaggccactccgtgaggacttccttgctctcctctgagcagtggaaggtttttaatcactccttgtgtagca

SEQ ID NO: 1355 - DNA, 122 bp, Homo sapiens
  misc_feature (61)..(62): /note="This region represents a CpG dinucleotide"
  misc_feature (61)..(61): /note="Nucleotide may be methylated to form 5-methylcytosine"
tgctaaactgttgcaacaagggcctaaactgttgcaacaaggacagagccaggtgcctcacgcctgtaatcccaacgctttgggaggccaaggcgggtggatcacataagaccaggagttcg

SEQ ID NO: 1356 - DNA, 122 bp, Homo sapiens
  misc_feature (61)..(62): /note="This region represents a CpG dinucleotide"
  misc_feature (61)..(61): /note="Nucleotide may be methylated to form 5-methylcytosine"
gtcccattgttattctcacctgacagctgcagacgtggaagctcacagaggtggagtcatcgcccagggttacacacctgatgagcagagagctgggattcgaacccaggcagctgggggct

SEQ ID NO: 1357 - DNA, 122 bp, Homo sapiens
  misc_feature (61)..(62): /note="This region represents a CpG dinucleotide"
  misc_feature (61)..(61): /note="Nucleotide may be methylated to form 5-methylcytosine"
acagtgaataaagctgaccaagctttacagcactggttacattttgttctggtgcctcgacgtttgccttatctttccaaagagttcttaagagaaggtagcttataagtgaaatcattgca

SEQ ID NO: 1358 - DNA, 122 bp, Homo sapiens
  misc_feature (61)..(62): /note="This region represents a CpG dinucleotide"
  misc_feature (61)..(61): /note="Nucleotide may be methylated to form 5-methylcytosine"
gtggtcacccaaattctgactccagaatctagtcatcaggaggcactgtgggcgggagggcgggtggaaggagagcctcagggggctgcccagggtgcacacgctccccaaatccagcctga

SEQ ID NO: 1359 - DNA, 122 bp, Homo sapiens
  misc_feature (61)..(62): /note="This region represents a CpG dinucleotide"
  misc_feature (61)..(61): /note="Nucleotide may be methylated to form 5-methylcytosine"
aaaccaaaaaaaaaaaaaaaaaaaaactggcagcaggctatatttgagttgccagcagggcggtgatatattaaccctgagctacagcgtaaagcagaagtagaggtgtggtcagagatgag

SEQ ID NO: 1360 - DNA, 122 bp, Homo sapiens
  misc_feature (61)..(62): /note="This region represents a CpG dinucleotide"
  misc_feature (61)..(61): /note="Nucleotide may be methylated to form 5-methylcytosine"
atgccaggaaatggggatgaaatcacatacgtatttcacaatctttcatgcccttttgtacgtttatgagaaattaggattaaatctaacccaaactgtggctttgaaacttggggctgttg

SEQ ID NO: 1361 - DNA, 122 bp, Homo sapiens
  misc_feature (61)..(62): /note="This region represents a CpG dinucleotide"
  misc_feature (61)..(61): /note="Nucleotide may be methylated to form 5-methylcytosine"
tctgcatttcacagatggaaaaacaagacaccaagaggttaagtggttttaccaaggatacgtggcttgttaagtgccaagctctccatggcatattatgctgccttccaagtgccttaggc

SEQ ID NO: 1362 - DNA, 122 bp, Homo sapiens
  misc_feature (61)..(62): /note="This region represents a CpG dinucleotide"
  misc_feature (61)..(61): /note="Nucleotide may be methylated to form 5-methylcytosine"
ctttccagaagccatatagtaagtgctatgagccataccactgcacctgtgagaccagctcgtaattaaaattgtgagagtgtgtgacctccctgctaggcactggaaatgttgtaggtgca

SEQ ID NO: 1363 - DNA, 122 bp, Homo sapiens
  misc_feature (61)..(62): /note="This region represents a CpG dinucleotide"
  misc_feature (61)..(61): /note="Nucleotide may be methylated to form 5-methylcytosine"
cagaaaaccgagggctgcctctgggggagcaggctttgggcattcctggggctgtccctccgctctgccacttaacaaccgtgtggctgtggttgagtgactcagctctctctgtaaagcag

SEQ ID NO: 1364 - DNA, 122 bp, Homo sapiens
  misc_feature (61)..(62): /note="This region represents a CpG dinucleotide"
  misc_feature (61)..(61): /note="Nucleotide may be methylated to form 5-methylcytosine"
ggtcagggtaaagcctgggcctcagaattgtccaaagaacacccaagtgtggttgggtttcggttttgctgatagcaccatttgctcacagtgaatcatgatcaggagaggaggcttgggat

SEQ ID NO: 1365 - DNA, 122 bp, Homo sapiens
  misc_feature (61)..(62): /note="This region represents a CpG dinucleotide"
  misc_feature (61)..(61): /note="Nucleotide may be methylated to form 5-methylcytosine"
tggtatgacaccctctctcagcagggaccctgctgacagtgactacgcgctggtggctggcgtctcctgagttccttgtactcagcctgatcatgaggaactgactcagagaaatgagagtc

SEQ ID NO: 1366 - DNA, 122 bp, Homo sapiens
  misc_feature (61)..(62): /note="This region represents a CpG dinucleotide"
  misc_feature (61)..(61): /note="Nucleotide may be methylated to form 5-methylcytosine"
atttgagtcactttttcttgtgactcacttgtggcttcagggcctgctttggcccaatcacgtatttaccattgacatttgatgatgaaatcctgctgtgcgcaactaactttatggcttgg

SEQ ID NO: 1367 - DNA, 122 bp, Homo sapiens
  misc_feature (61)..(62): /note="This region represents a CpG dinucleotide"
  misc_feature (61)..(61): /note="Nucleotide may be methylated to form 5-methylcytosine"
tgctgacaccatctccaccttctcctggagctttctctgatcagaggctagagctcaacacgttcctaggctttctgatgcgggaactggagctgaagctaattgtaagcagacttttggaa

SEQ ID NO: 1368 - DNA, 122 bp, Homo sapiens
  misc_feature (61)..(62): /note="This region represents a CpG dinucleotide"
  misc_feature (61)..(61): /note="Nucleotide may be methylated to form 5-methylcytosine"
aggacaggcctggtgccattgcttcaaggtcaactggctgacgggctgttgacccaggaacgggagacagttgccaaacaggactggccttgtgttagctgaatgtttgctccatgaacttg

SEQ ID NO: 1369 - DNA, 122 bp, Homo sapiens
  misc_feature (61)..(62): /note="This region represents a CpG dinucleotide"
  misc_feature (61)..(61): /note="Nucleotide may be methylated to form 5-methylcytosine"
ggtgatccgcgcgtctcggcctcccaaagtgctgggattacaggcgtgggccaccgtgcccggctgagacagaatcttgcactgtcatccaagctggagtgcagtggcacaatcttgggtca

SEQ ID NO: 1370 - DNA, 122 bp, Homo sapiens
  misc_feature (61)..(62): /note="This region represents a CpG dinucleotide"
  misc_feature (61)..(61): /note="Nucleotide may be methylated to form 5-methylcytosine"
agtgcccttagaggaagaggaagagaccaggttctttctgctctaagccatgtgagtatacggagagaaggtgccatctatgaagtagaaagtggccccattagacaacaactgtgccagca

SEQ ID NO: 1371 - DNA, 122 bp, Homo sapiens
  misc_feature (61)..(62): /note="This region represents a CpG dinucleotide"
  misc_feature (61)..(61): /note="Nucleotide may be methylated to form 5-methylcytosine"
tttcctaaaggtgacagatctcggtgaacagtcaagctttactgagtgcaagacagtccacgcgcctataagattaaggtacagtgctaaggacggggatcttaattacctgtctttccaca

SEQ ID NO: 1372 - DNA, 122 bp, Homo sapiens
  misc_feature (61)..(62): /note="This region represents a CpG dinucleotide"
  misc_feature (61)..(61): /note="Nucleotide may be methylated to form 5-methylcytosine"
gattctcattgttcattatcctcccttagggctgggtgaggtggctcattcctgtaaacccggcacttgaagaggctgaggtgggaggattgcttgagcccaagagttcaagaccagcctgg

SEQ ID NO: 1373 - DNA, 122 bp, Homo sapiens
  misc_feature (61)..(62): /note="This region represents a CpG dinucleotide"
  misc_feature (61)..(61): /note="Nucleotide may be methylated to form 5-methylcytosine"
ctgggcgttgggtgttgcacaatgctgatggggcagctaaacagggtgctctctgggcctcgtctttcttatctggggtcagaatgggtgctctctacagtccttaccagctctgatgctct

SEQ ID NO: 1374 - DNA, 122 bp, Homo sapiens
  misc_feature (61)..(62): /note="This region represents a CpG dinucleotide"
  misc_feature (61)..(61): /note="Nucleotide may be methylated to form 5-methylcytosine"
catctggggactaagcctaaaagaagcctcagacttccatgtctttaaagctttgagtcacgcattattgaatcagcccgtaggccctcagaaaaggtgcacagtagatgagaagagccata

SEQ ID NO: 1375 - DNA, 122 bp, Homo sapiens
  misc_feature (61)..(62): /note="This region represents a CpG dinucleotide"
  misc_feature (61)..(61): /note="Nucleotide may be methylated to form 5-methylcytosine"
tagggagctttatactggcttctgagagatactcatggcttctctcccacaaagagcttacgttattctgtgagccatgacacatgttcaaaacatgtaagtaacagtgcaaaacaagagtg

SEQ ID NO: 1376 - DNA, 122 bp, Homo sapiens
  misc_feature (61)..(62): /note="This region represents a CpG dinucleotide"
  misc_feature (61)..(61): /note="Nucleotide may be methylated to form 5-methylcytosine"
agtgggggcagccaggccccaggaacggagtgcggagagattctgtggtccagtgcgggccggagggcggtggaggagccgggggcgatgccgcggccggggaagagctcgtacagcgacca

SEQ ID NO: 1377 - DNA, 122 bp, Homo sapiens
  misc_feature (61)..(62): /note="This region represents a CpG dinucleotide"
  misc_feature (61)..(61): /note="Nucleotide may be methylated to form 5-methylcytosine"
agcacagaggaagctttgcccttccctagagggttaatggctaccaacgtgagaaggtcacggagttccttaatgagagggagcctagcctagaataggggatgaatgagaaattgttctga

SEQ ID NO: 1378 - DNA, 122 bp, Homo sapiens
  misc_feature (61)..(62): /note="This region represents a CpG dinucleotide"
  misc_feature (61)..(61): /note="Nucleotide may be methylated to form 5-methylcytosine"
gattgaattcctagtatgaattgtgtgagagctttaataaaaatatctttgcagttcttacgggttttgataagctgacattgcacgtgctcaagaaaatgaaggtgataatttacagcaca

SEQ ID NO: 1379 - DNA, 122 bp, Homo sapiens
  misc_feature (61)..(62): /note="This region represents a CpG dinucleotide"
  misc_feature (61)..(61): /note="Nucleotide may be methylated to form 5-methylcytosine"
agtcacaccgtagagctgaaagcttggcttttatttagctgtgggtccttgggcaggatacgtaatctgtctgtgcctgaaatacccaccacacccatcctgtaatggggggataataagcc

SEQ ID NO: 1380 - DNA, 122 bp, Homo sapiens
  misc_feature (61)..(62): /note="This region represents a CpG dinucleotide"
  misc_feature (61)..(61): /note="Nucleotide may be methylated to form 5-methylcytosine"
tgccccagagggcctggccaactggttgggttgggatgaggcctcggttttgagcctctgcggtggcaattccagatataccaggaggccgaaactgctcctggaggctggggcaggagagg

SEQ ID NO: 1381 - DNA, 122 bp, Homo sapiens
  misc_feature (61)..(62): /note="This region represents a CpG dinucleotide"
  misc_feature (61)..(61): /note="Nucleotide may be methylated to form 5-methylcytosine"
tgcccagggagcactcctaataatgccaaggagctcaattccaagcaggtgagaagcttacggaatgaaacaagagaggctgattctcattaaatattttcaggttgtgtagggcagaacaa

SEQ ID NO: 1382 - DNA, 122 bp, Homo sapiens
  misc_feature (61)..(62): /note="This region represents a CpG dinucleotide"
  misc_feature (61)..(61): /note="Nucleotide may be methylated to form 5-methylcytosine"
tcccccagtggaccttgagctctgtgaaggcacttttgtattcttgaagcctagtacgtgcggaagtacttaataaaagttggtgcaatgaatgattgaagagccaatctggagttttgaaa

SEQ ID NO: 1383 - DNA, 122 bp, Homo sapiens
  misc_feature (61)..(62): /note="This region represents a CpG dinucleotide"
  misc_feature (61)..(61): /note="Nucleotide may be methylated to form 5-methylcytosine"
tgcacctgttgaaaccttacccttcctgcaggtcctggctccagctcaccccattcattccgcaaacatttgctgaatgaaaatcatgcatcaggcacctccccacaaagcctgccccagtc

SEQ ID NO: 1384 - DNA, 122 bp, Homo sapiens
  misc_feature (61)..(62): /note="This region represents a CpG dinucleotide"
  misc_feature (61)..(61): /note="Nucleotide may be methylated to form 5-methylcytosine"
cactccgactcgtatgcctgctctctttaaaatagccaatcggaattagcttaaactgtgcggaccaaccctagccaatagtggaacgacacagcagtaagggctacctgcatcaggaataa

SEQ ID NO: 1385 - DNA, 122 bp, Homo sapiens
  misc_feature (61)..(62): /note="This region represents a CpG dinucleotide"
  misc_feature (61)..(61): /note="Nucleotide may be methylated to form 5-methylcytosine"
agctaatcatagttcccccaagaaagggcgacctcggcaagcaagttcacctccgtattccgatcacctggcacatagtagccgcccaaatggcaaccctgggattcgaacccaggtagttg

SEQ ID NO: 1386 - DNA, 122 bp, Homo sapiens
  misc_feature (61)..(62): /note="This region represents a CpG dinucleotide"
  misc_feature (61)..(61): /note="Nucleotide may be methylated to form 5-methylcytosine"
aaactccatggctcattagttaaaacctctcttgctcctaacactgttaactccctaggccgtgacttcctccattcttctgcctagcaaatcctaactgtccaactattctaatctacaac

SEQ ID NO: 1387 - DNA, 122 bp, Homo sapiens
  misc_feature (61)..(62): /note="This region represents a CpG dinucleotide"
  misc_feature (61)..(61): /note="Nucleotide may be methylated to form 5-methylcytosine"
gatggaggcagttaggagaattaagtgaaatgatccatgcaaaacgcttagcacgtggggcgctcctgccaacgctggctatgagtacagcctgtcaatgttgttggccagcctgcaggtga

SEQ ID NO: 1388 - DNA, 122 bp, Homo sapiens
  misc_feature (61)..(62): /note="This region represents a CpG dinucleotide"
  misc_feature (61)..(61): /note="Nucleotide may be methylated to form 5-methylcytosine"
agcagagaggccagataacaaggtaggggtggaggaccaaatcgtgtcccaatcttgagacggaaatggagttgcttccaagtcagctgtgcatcctactgactgtcaaagccaggccaggg

SEQ ID NO: 1389 - DNA, 122 bp, Homo sapiens
  misc_feature (61)..(62): /note="This region represents a CpG dinucleotide"
  misc_feature (61)..(61): /note="Nucleotide may be methylated to form 5-methylcytosine"
gttaatccatttctggggtgggtactgctgagccaatatacattcctggcttcctggactcgtccactggaacgtgttgggtcctggtgctctccccagcagatggttgtaggtggtcagag

SEQ ID NO: 1390 - DNA, 122 bp, Homo sapiens
  misc_feature (61)..(62): /note="This region represents a CpG dinucleotide"
  misc_feature (61)..(61): /note="Nucleotide may be methylated to form 5-methylcytosine"
tctctctccctgtggtttttgttcctgccctttctccttagctaccaggccttgttcaaccggggacaaaacaaacaggggctgtctgtggagaattggcctcttcaacaacacaatgggga

SEQ ID NO: 1391 - DNA, 122 bp, Homo sapiens
  misc_feature (61)..(62): /note="This region represents a CpG dinucleotide"
  misc_feature (61)..(61): /note="Nucleotide may be methylated to form 5-methylcytosine"
attttcccaaaggaaggcttgattttcctgattttgcctgaagggcataggcaatagtggcgtgttgtcttgaaggagagggaagaatggtggggcagaagaacagctctctggttctactc

SEQ ID NO: 1392 - DNA, 122 bp, Homo sapiens
  misc_feature (61)..(62): /note="This region represents a CpG dinucleotide"
  misc_feature (61)..(61): /note="Nucleotide may be methylated to form 5-methylcytosine"
tccagatgctggcacccagagtgggtgttacattgccggcttcttctctagagattaaaccgtcaacccatttagcttatcccttggccaaaaagtgtatgagatgtgcctggatgttccct

SEQ ID NO: 1393 - DNA, 122 bp, Homo sapiens
  misc_feature (61)..(62): /note="This region represents a CpG dinucleotide"
  misc_feature (61)..(61): /note="Nucleotide may be methylated to form 5-methylcytosine"
accccactgcttcaaaagttgccattccctccatcctccacagctctggccacatccagacgaaaccattaaggctggtgtataccctacagggcaggaagtgaatcatgcttcactcaact

SEQ ID NO: 1394 - DNA, 122 bp, Homo sapiens
  misc_feature (61)..(62): /note="This region represents a CpG dinucleotide"
  misc_feature (61)..(61): /note="Nucleotide may be methylated to form 5-methylcytosine"
attttccatacatgacctcattgaattttcacaacaagcctgtgaggcaggtattgttgacgccatcactttacagataaggaaagttcaaatatgttgagtaacttcaccaagttaccaca

SEQ ID NO: 1395 - DNA, 122 bp, Homo sapiens
  misc_feature (61)..(62): /note="This region represents a CpG dinucleotide"
  misc_feature (61)..(61): /note="Nucleotide may be methylated to form 5-methylcytosine"
ctgcagcttcactcctgagccagcaagaccacgaacccaccagaaggaaaacactccgaacgcatctgaacatcagaagggagggactccagacgcaccactttaagggctgtaacactcac

SEQ ID NO: 1396 - DNA, 122 bp, Homo sapiens
  misc_feature (61)..(62): /note="This region represents a CpG dinucleotide"
  misc_feature (61)..(61): /note="Nucleotide may be methylated to form 5-methylcytosine"
gcctcactgagctgtctggcacaaccagaaaatgcctggttcagcacctgcctaattcaccgcacattttgaaagggtggagttggctatgtagatgagcagttcccaaatggggttccaaa

SEQ ID NO: 1397 - DNA, 122 bp, Homo sapiens
  misc_feature (61)..(62): /note="This region represents a CpG dinucleotide"
  misc_feature (61)..(61): /note="Nucleotide may be methylated to form 5-methylcytosine"
cagggacctgactcacggcagacaccgacccccacgccagcaagttcactctggtggcaacgcagagaacctgaagatggcagacaagttagagcagctgcaccagtcttacagaggcaggg

SEQ ID NO: 1398 - DNA, 122 bp, Homo sapiens
  misc_feature (61)..(62): /note="This region represents a CpG dinucleotide"
  misc_feature (61)..(61): /note="Nucleotide may be methylated to form 5-methylcytosine"
cttccgtgcagtgttctaaagcctcttgctcctgtctctcctgtgggaaacccatagttacggcttcaagcagagacccaagcaccacctcagggtcttgaccttgtgtgggaataatctat

SEQ ID NO: 1399 - DNA, 122 bp, Homo sapiens
  misc_feature (61)..(62): /note="This region represents a CpG dinucleotide"
  misc_feature (61)..(61): /note="Nucleotide may be methylated to form 5-methylcytosine"
aggcagccacgcctgtgctctttggactctggtgggtggggaggcttcctggtcactaaccgctcaacatcaacctggacctgcggcagtgtctgtgctgactggcgtccccagcttagcta

SEQ ID NO: 1400 - DNA, 122 bp, Homo sapiens
  misc_feature (61)..(62): /note="This region represents a CpG dinucleotide"
  misc_feature (61)..(61): /note="Nucleotide may be methylated to form 5-methylcytosine"
cacttcagggccagagcatctaattaccaatttatcaccctctggagctctctgtcttttcgtttttgagttgggcaatgttcaagattatgactgctccatcagcctagttcctagcatga

SEQ ID NO: 1401 - DNA, 122 bp, Homo sapiens
  misc_feature (61)..(62): /note="This region represents a CpG dinucleotide"
  misc_feature (61)..(61): /note="Nucleotide may be methylated to form 5-methylcytosine"
agccaaaaggaaacattgctgagctgcccccagggtggctctctcaagattgtggaagggcgaacttaagaggatgttatttgcagctgggtacacctaaaacatgtcccaagtgaggaagc

SEQ ID NO: 1402 - DNA, 122 bp, Homo sapiens
  misc_feature (61)..(62): /note="This region represents a CpG dinucleotide"
  misc_feature (61)..(61): /note="Nucleotide may be methylated to form 5-methylcytosine"
gcaaagagtaaatgaaagaaaaaaactttcaagtggtcggaattgaaaggcactggaaaacgtttcaggttctacccatctgagtttatttatgcatgtcctaatacaggcagtatttattg

SEQ ID NO: 1403 - DNA, 122 bp, Homo sapiens
  misc_feature (61)..(62): /note="This region represents a CpG dinucleotide"
  misc_feature (61)..(61): /note="Nucleotide may be methylated to form 5-methylcytosine"
ggattttttttctagttattttaattcagaatcaattaaagccttttctttttctctccacgcagaagagggttctgtgaaagcctggtgaattaccaccataaagtctaattattccttcc

SEQ ID NO: 1404 - DNA, 122 bp, Homo sapiens
  misc_feature (61)..(62): /note="This region represents a CpG dinucleotide"
  misc_feature (61)..(61): /note="Nucleotide may be methylated to form 5-methylcytosine"
gctattgagaaacaaagagaagaaaactcttctgaagcgagtgatgtggagacaaaactacgtgagtttgaagatcttcagatgcagcttaacacaagcattgatttgcgcacagtaagttt

SEQ ID NO: 1405 - DNA, 122 bp, Homo sapiens
  misc_feature (61)..(62): /note="This region represents a CpG dinucleotide"
  misc_feature (61)..(61): /note="Nucleotide may be methylated to form 5-methylcytosine"
tttgttgatttttcctgctgcttaaaagcatgctcagataacgttttgaaattttccacacgtatcactcttttgaaaaggccttaacagccatgaataacctaattataaaacttttagcc

SEQ ID NO: 1406 - DNA, 122 bp, Homo sapiens
  misc_feature (61)..(62): /note="This region represents a CpG dinucleotide"
  misc_feature (61)..(61): /note="Nucleotide may be methylated to form 5-methylcytosine"
aaggcggggaaggacctcgaagaaacggagggcgccgggctggcagttcaggctcagggccgctggggggagtttgcgcaaggctgggagccccgaggccccgggggaggtggggaggcaga

SEQ ID NO: 1407 - DNA, 122 bp, Homo sapiens
  misc_feature (61)..(62): /note="This region represents a CpG dinucleotide"
  misc_feature (61)..(61): /note="Nucleotide may be methylated to form 5-methylcytosine"
gaaacagtctcgccgaagtggggcaacttgcccagccagggtcatacagctaataagacacgggcaggtgattgaacccttgaaatctgttgccctccagtattgccagtaagtcaacacaa

SEQ ID NO: 1408 - DNA, 122 bp, Homo sapiens
  misc_feature (61)..(62): /note="This region represents a CpG dinucleotide"
  misc_feature (61)..(61): /note="Nucleotide may be methylated to form 5-methylcytosine"
acctcaggcgatccacccgccttggcctcccaaagtgctgggattacaggagtgagccaccgcgcccggctaaggctgttaataccactttttgtatcagtaagatcatggctggctgtcac

SEQ ID NO: 1409 - DNA, 122 bp, Homo sapiens
  misc_feature (61)..(62): /note="This region represents a CpG dinucleotide"
  misc_feature (61)..(61): /note="Nucleotide may be methylated to form 5-methylcytosine"
tcagcagtaaaccccaggacacaggcagtgaccctagacgagcagggcaggtccaggtgacgggaggcgtgccacgtttctccatcccgaagttcttcttggtttttatcctaagtactgat

SEQ ID NO: 1410 - DNA, 122 bp, Homo sapiens
  misc_feature (61)..(62): /note="This region represents a CpG dinucleotide"
  misc_feature (61)..(61): /note="Nucleotide may be methylated to form 5-methylcytosine"
cttaccttttgagtcctagtcacactaaaaatccctttcattaaagtggtggcaactcctcgtcaataagggaagggaactgacatttgtgcacctgcaatatgttttgcatgtttcctcat

SEQ ID NO: 1411 - DNA, 122 bp, Homo sapiens
  misc_feature (61)..(62): /note="This region represents a CpG dinucleotide"
  misc_feature (61)..(61): /note="Nucleotide may be methylated to form 5-methylcytosine"
gcacccgcacccgcaccacccgcacgcgcacccgcacaacccgcagcccatgcaccgctacgacatgggcgcgctgcagtacagccccatctccaactcgcagggctacatgagcgcgtcgc

SEQ ID NO: 1412 - DNA, 122 bp, Homo sapiens
  misc_feature (61)..(62): /note="This region represents a CpG dinucleotide"
  misc_feature (61)..(61): /note="Nucleotide may be methylated to form 5-methylcytosine"
tgccataaagtctttgcccaacatcagtggagtttgtcaaaatgagcgtatctggctccacgtaaggcaaactatctcaacttcatttttcaagcctgtccaaaataatatctattatgcct

SEQ ID NO: 1413 - DNA, 122 bp, Homo sapiens
  misc_feature (61)..(62): /note="This region represents a CpG dinucleotide"
  misc_feature (61)..(61): /note="Nucleotide may be methylated to form 5-methylcytosine"
gctatctgtgggtctgcccttgggtgtggggcaagccaggtcagcatattgcaaagcacacgttgggctgctgcttgtgtaattgtctccttgtctctgctctctcccttctcccacctcac

SEQ ID NO: 1414 - DNA, 122 bp, Homo sapiens
  misc_feature (61)..(62): /note="This region represents a CpG dinucleotide"
  misc_feature (61)..(61): /note="Nucleotide may be methylated to form 5-methylcytosine"
aaaggactccatcctctggaaagcattgccacactgcagcctcaaacaggattactaaatcgctgtttgaaaagacaaagcaagattaaacaaatacttaactgccctcatcctcatcccag

SEQ ID NO: 1415 - DNA, 122 bp, Homo sapiens
  misc_feature (61)..(62): /note="This region represents a CpG dinucleotide"
  misc_feature (61)..(61): /note="Nucleotide may be methylated to form 5-methylcytosine"
tttcaaatgggaaacaaaagactgacactagtttctttcctttcagctctaaccaaaactcgcagcctcccctctgagatctgaaagaaaaagacagcaggggaaaggaagagaagctacca

SEQ ID NO: 1416 - DNA, 122 bp, Homo sapiens
  misc_feature (61)..(62): /note="This region represents a CpG dinucleotide"
  misc_feature (61)..(61): /note="Nucleotide may be methylated to form 5-methylcytosine"
tgaaatcagaccatcagccctgcaactctctccacatagtccagtccattccgggaccaacgcctgcaccctcagacaaggacaacccaaaagtgctctgcggctttaggacagagctcacc

SEQ ID NO: 1417 - DNA, 122 bp, Homo sapiens
  misc_feature (61)..(62): /note="This region represents a CpG dinucleotide"
  misc_feature (61)..(61): /note="Nucleotide may be methylated to form 5-methylcytosine"
catacgagggtgggggctggtctggggaaacatactggatgagcaagtgagagaagaaaacgtgtttagcctgggaaagtcacagcttgcttcaaatgtttgaaggttgtcatttgaaagaa

SEQ ID NO: 1418 - DNA, 122 bp, Homo sapiens
  misc_feature (61)..(62): /note="This region represents a CpG dinucleotide"
  misc_feature (61)..(61): /note="Nucleotide may be methylated to form 5-methylcytosine"
gagtgctgctaaccttgaaattatcagacacttaggagttattagtgctaaaaaggggaccgtgcaaggcagcagagttacatggttcttcaaatcatgtctgaacctattcttggaatctt

SEQ ID NO: 1419 - DNA, 122 bp, Homo sapiens
  misc_feature (61)..(62): /note="This region represents a CpG dinucleotide"
  misc_feature (61)..(61): /note="Nucleotide may be methylated to form 5-methylcytosine"
ctgccagtggacacagggcatcccctgggagcggcgggcctggatatggtctaacaggggcgctgagcattgagattcctggagagattagtggtagtggtatgtggatgtctgggccttca

SEQ ID NO: 1420 - DNA, 122 bp, Homo sapiens
  misc_feature (61)..(62): /note="This region represents a CpG dinucleotide"
  misc_feature (61)..(61): /note="Nucleotide may be methylated to form 5-methylcytosine"
atattgattaaacaaaccgagtaatgaatcatgtgtgctgcaagtgtgggtgcttggtaacgtggaaacatacaagtgagctggattctccaatctgcagggcagaaactggatgaaagaca

SEQ ID NO: 1421 - DNA, 122 bp, Homo sapiens
  misc_feature (61)..(62): /note="This region represents a CpG dinucleotide"
  misc_feature (61)..(61): /note="Nucleotide may be methylated to form 5-methylcytosine"
accccacacctcccaatacggccgtgtgaacattttgtcaagtcatcgctgacattatcacgtcactatagtgtttccagttaggccacacagtggggtctgttctccaaagttcataattc

SEQ ID NO: 1422 - DNA, 122 bp, Homo sapiens
  misc_feature (61)..(62): /note="This region represents a CpG dinucleotide"
  misc_feature (61)..(61): /note="Nucleotide may be methylated to form 5-methylcytosine"
gcagccggcggggggtgccgtcctcctcgccctccctggagcccggccctgggcccacgccgtgccccgagcctcctctgcggcccgcccccagttcccccggtccgccgcggccgggcatg

SEQ ID NO: 1423 - DNA, 122 bp, Homo sapiens
  misc_feature (61)..(62): /note="This region represents a CpG dinucleotide"
  misc_feature (61)..(61): /note="Nucleotide may be methylated to form 5-methylcytosine"
atgggggtcccacgatgttgcccagtccagtcttgaactcctgggctcaagtgatcctcccgcagcagcctcacaaagtgctggtgtgaactactgtgccctgtggacagcacatagcacat

SEQ ID NO: 1424 - DNA, 122 bp, Homo sapiens
  misc_feature (61)..(62): /note="This region represents a CpG dinucleotide"
  misc_feature (61)..(61): /note="Nucleotide may be methylated to form 5-methylcytosine"
gggttgtgggtgatttttttaagggtctgcgggtcccttgggggtcgatgatcacccttccggacccccgagaccttgcccctgacgtcttcactggtccttcttcgggggagttcgctccc

SEQ ID NO: 1425 - DNA, 122 bp, Homo sapiens
  misc_feature (61)..(62): /note="This region represents a CpG dinucleotide"
  misc_feature (61)..(61): /note="Nucleotide may be methylated to form 5-methylcytosine"
taggttgcattcttgtgattagtgtgactcaggatgacttgcttgaaatagctcccctgtcgtaatctgggtataggactttcttagggctattactctagcacctatcctataatattgat

SEQ ID NO: 1426 - DNA, 122 bp, Homo sapiens
  misc_feature (61)..(62): /note="This region represents a CpG dinucleotide"
  misc_feature (61)..(61): /note="Nucleotide may be methylated to form 5-methylcytosine"
ttacaactcttgttctccaggataaaacttctttgccttggaaatcaagcaggatatccacgctatttgttactcatgcaaaaaaccataaacgggctgggtgaggtggctcacacctataa

SEQ ID NO: 1427 - DNA, 122 bp, Homo sapiens
  misc_feature (61)..(62): /note="This region represents a CpG dinucleotide"
  misc_feature (61)..(61): /note="Nucleotide may be methylated to form 5-methylcytosine"
gagcctctcgtttcctcatttgtaatatgtgatcagaaatctgtcattctcggcctgccgcggtggctcactgctataatcccagcattttgggaggccaaggcaggcagatcacttgaggt

SEQ ID NO: 1428 - DNA, 122 bp, Homo sapiens
  misc_feature (61)..(62): /note="This region represents a CpG dinucleotide"
  misc_feature (61)..(61): /note="Nucleotide may be methylated to form 5-methylcytosine"
tgtcagtggcggaccggcgctccctcctggagccctttgtctacttggccagcaagatgacgcaaccccagagcaagtctgccttccccctcagccggaagaacaagggcagcggctccttg

SEQ ID NO: 1429 - DNA, 122 bp, Homo sapiens
  misc_feature (61)..(62): /note="This region represents a CpG dinucleotide"
  misc_feature (61)..(61): /note="Nucleotide may be methylated to form 5-methylcytosine"
ttgtcatgtaaattggggatgctgttagtacctatttcatgggcttgtgatgacatgaagcggggaaagcacttgttatatgtgtgagacatagtaggtactgaatgctagctgctgttatt

SEQ ID NO: 1430 - DNA, 122 bp, Homo sapiens
  misc_feature (61)..(62): /note="This region represents a CpG dinucleotide"
  misc_feature (61)..(61): /note="Nucleotide may be methylated to form 5-methylcytosine"
gccatccatttctggctcccctgcacttattactgtgccaagcacatgatatatagtcaacgaattgatatatcaatgaatatctgagaaaataaagggaggaaagcaagagtaaaacatgg

SEQ ID NO: 1431 - DNA, 122 bp, Homo sapiens
  misc_feature (61)..(62): /note="This region represents a CpG dinucleotide"
  misc_feature (61)..(61): /note="Nucleotide may be methylated to form 5-methylcytosine"
tcccatgtccttctgtgagagcctgcacttcctgtttcataggaatcataggacttaccacgtgattatagctttcggtaatatgtcttctctacactctgagaaccataactaaaccatta

SEQ ID NO: 1432 - DNA, 122 bp, Homo sapiens
  misc_feature (61)..(62): /note="This region represents a CpG dinucleotide"
  misc_feature (61)..(61): /note="Nucleotide may be methylated to form 5-methylcytosine"
tgcctgacacctggtgtcgtaaccagaaggagcaaggccacggttgtactgtgataggaacgtgtcctacgggacctggaacagggagtaccggttgtggaggagagatgaggcttgatata

SEQ ID NO: 1433 - DNA, 122 bp, Homo sapiens
  misc_feature (61)..(62): /note="This region represents a CpG dinucleotide"
  misc_feature (61)..(61): /note="Nucleotide may be methylated to form 5-methylcytosine"
ggagccaatggcaaactgaagtggaccagcacttacttacttctttaagacagaactttgcggtgtattcttggttgttccttctctctaatcccttttcccgttagctggtctcttctctc

SEQ ID NO: 1434 - DNA, 122 bp, Homo sapiens
  misc_feature (61)..(62): /note="This region represents a CpG dinucleotide"
  misc_feature (61)..(61): /note="Nucleotide may be methylated to form 5-methylcytosine"
ggcaacacagcttcaggattaagctgtcaggttcaaggtcagattgtcctggctgatgctcggctctgctgatgccttgtggcctggacacaatatctctaagtctatccacccacactgct

SEQ ID NO: 1435 - DNA, 122 bp, Homo sapiens
  misc_feature (61)..(62): /note="This region represents a CpG dinucleotide"
  misc_feature (61)..(61): /note="Nucleotide may be methylated to form 5-methylcytosine"
gaggcgcgtggggggcaagcggggcgccgggatcgggggactcaccctccctgggcgccccgccggagcaccgtgcccagacacacgccgaatccggttcctaactccgctgctttggacgc

SEQ ID NO: 1436 - DNA, 122 bp, Homo sapiens
  misc_feature (61)..(62): /note="This region represents a CpG dinucleotide"
  misc_feature (61)..(61): /note="Nucleotide may be methylated to form 5-methylcytosine"
tttttgttactggcttatcactcttagccaatgttcatctatgttgcaagaatttccttccgttttagggctgaataatattgctttgtatgtatatatcacattttgtttatccattcacc

SEQ ID NO: 1437 - DNA, 122 bp, Homo sapiens
  misc_feature (61)..(62): /note="This region represents a CpG dinucleotide"
  misc_feature (61)..(61): /note="Nucleotide may be methylated to form 5-methylcytosine"
gctgtgagaacgaagtctgaggactgccgtggagaaagcgtggccagagcccagtggagacggaagatgaagacactgctgagaagcaccagccagggcctgctccccaaagcatcggactg

SEQ ID NO: 1438 - DNA, 122 bp, Homo sapiens
  misc_feature (61)..(62): /note="This region represents a CpG dinucleotide"
  misc_feature (61)..(61): /note="Nucleotide may be methylated to form 5-methylcytosine"
aagagttgaagcaaataatcagcttaccaaaagcttaaaaggagaagctgtggaaagatacgtccacaggatgatttgaaaagcacagacataatgctgggaaactagaagtacaagttcat

SEQ ID NO: 1439 - DNA, 122 bp, Homo sapiens
  misc_feature (61)..(62): /note="This region represents a CpG dinucleotide"
  misc_feature (61)..(61): /note="Nucleotide may be methylated to form 5-methylcytosine"
gtgtcctttctgtggaaacttgagaactgagtagatggcagcatgtgtcactctcataggcgcaagaagctgtggaaactgctgcttgctgacttcagctcccccacaccctccaccctcca

SEQ ID NO: 1440 - DNA, 122 bp, Homo sapiens
  misc_feature (61)..(62): /note="This region represents a CpG dinucleotide"
  misc_feature (61)..(61): /note="Nucleotide may be methylated to form 5-methylcytosine"
tcttgctttgctaagttgtgcaataactgtgattgcacccttatttgatgatgtgtgtttcggtaaccatggagcgagtgctgctttgccaatcctaggtcaacactgacccctttccaagg

SEQ ID NO: 1441 - DNA, 122 bp, Homo sapiens
  misc_feature (61)..(62): /note="This region represents a CpG dinucleotide"
  misc_feature (61)..(61): /note="Nucleotide may be methylated to form 5-methylcytosine"
gaggcccagcactgcttgcttctggttggcatttagttttcagccttttctgatctactgcgtcagctgtcgcttactcatccactttccagcttccaaaatcctgttgacatcccttgtcc

SEQ ID NO: 1442 - DNA, 122 bp, Homo sapiens
  misc_feature (61)..(62): /note="This region represents a CpG dinucleotide"
  misc_feature (61)..(61): /note="Nucleotide may be methylated to form 5-methylcytosine"
tctcaaaaacaaaacaaaacaaaacaaaacaaaataaccacacacatagaattagctgggcgtgctggcgggtgccacctgtaggattataagattacacctgtaatcctaacactttggga

SEQ ID NO: 1443 - DNA, 122 bp, Homo sapiens
  misc_feature (61)..(62): /note="This region represents a CpG dinucleotide"
  misc_feature (61)..(61): /note="Nucleotide may be methylated to form 5-methylcytosine"
gcaaaacataaataaagttcctcccgacaaggaacttgtaaagtacctggatgaactttgcgtaagaggcaacttgcaaatgtacaagggatgatcactggtctgtgttgggcaaagcccag

SEQ ID NO: 1444 - DNA, 122 bp, Homo sapiens
  misc_feature (61)..(62): /note="This region represents a CpG dinucleotide"
  misc_feature (61)..(61): /note="Nucleotide may be methylated to form 5-methylcytosine"
tttgcattccaattacttaaactgagatgttcttgatcagttgaacatactgtgagtagacgatctctttctcagagaaacaagatggagagatcttcagagaatggccccactgaagctca

SEQ ID NO: 1445 - DNA, 122 bp, Homo sapiens
  misc_feature (61)..(62): /note="This region represents a CpG dinucleotide"
  misc_feature (61)..(61): /note="Nucleotide may be methylated to form 5-methylcytosine"
ggcgctgagtgcacggctgggctccacgctgatttctcctaatgaattaataatggcgctcgggcgggcgggggtggccggctgcggaccgcggagagagccgaggggaaggccgtggaggg

SEQ ID NO: 1446 - DNA, 122 bp, Homo sapiens
  misc_feature (61)..(62): /note="This region represents a CpG dinucleotide"
  misc_feature (61)..(61): /note="Nucleotide may be methylated to form 5-methylcytosine"
gcacccaaggtggggacctgcgggcttgcctcattcatccctggacaagcctcccagaaacgaaatgggctgctcacctctgtgatcctcagagttagcaaaactgcttgctatgtcattta

SEQ ID NO: 1447 - DNA, 122 bp, Homo sapiens
  misc_feature (61)..(62): /note="This region represents a CpG dinucleotide"
  misc_feature (61)..(61): /note="Nucleotide may be methylated to form 5-methylcytosine"
tcaaggaggctaaagttcttccctgtgttcctatgaggataatttcacaaatacacagcacgtcccttcaaccacagattttgggcagagagaaggaaacaagaagaaggagaagaagagag

SEQ ID NO: 1448 - DNA, 122 bp, Homo sapiens
  misc_feature (61)..(62): /note="This region represents a CpG dinucleotide"
  misc_feature (61)..(61): /note="Nucleotide may be methylated to form 5-methylcytosine"
gtctgtgactcagctctggccaacgtgacccaagcagaaatcgtgcaataacttctgggacgacattttcttatgaccttttctcctgccaggcgatcatgaagaccgtccctggcgcttca

SEQ ID NO: 1449 - DNA, 122 bp, Homo sapiens
  misc_feature (61)..(62): /note="This region represents a CpG dinucleotide"
  misc_feature (61)..(61): /note="Nucleotide may be methylated to form 5-methylcytosine"
gctggctggagctggagcagtgtcctcagccactggccgggaaggctttgttagactaagcgtggcctgaggatgcctcagtgccaagtcacaccatgacctggacctgccttagtccgtga

SEQ ID NO: 1450 - DNA, 122 bp, Homo sapiens
  misc_feature (61)..(62): /note="This region represents a CpG dinucleotide"
  misc_feature (61)..(61): /note="Nucleotide may be methylated to form 5-methylcytosine"
ggtttacaggcataagccaccaatcccaaatcccggggctatgatttttgaaatcatgttcgtgagaaggcagagcacatgtgttgagagtcagactttaaacctgggttcaaatcattagt

SEQ ID NO: 1451 - DNA, 122 bp, Homo sapiens
  misc_feature (61)..(62): /note="This region represents a CpG dinucleotide"
  misc_feature (61)..(61): /note="Nucleotide may be methylated to form 5-methylcytosine"
aggtgaagcgcatacacccgttgctcctgaagcccagccaaagccgctgcgggaagagggcgcagggtctgagcagcccacagccccgccccctgccctgccccatagggccgtcccactcg

SEQ ID NO: 1452 - DNA, 122 bp, Homo sapiens
  misc_feature (61)..(62): /note="This region represents a CpG dinucleotide"
  misc_feature (61)..(61): /note="Nucleotide may be methylated to form 5-methylcytosine"
ggtacctagacattgtctctgcactctgctggcatattttcccctggaccacgaacccttcgtacctagtaacttgccacctgtgtttataaataccagcaatttgatttacagggtgaatt

SEQ ID NO: 1453 - DNA, 122 bp, Homo sapiens
  misc_feature (61)..(62): /note="This region represents a CpG dinucleotide"
  misc_feature (61)..(61): /note="Nucleotide may be methylated to form 5-methylcytosine"
cgcagcgggcgcgcgggccagcccagggatactgagccatgagcaaccaggcccacctaccgccgcgccatccaaaggtaacaccacagaccacgggccatgtgtcctgagcagcgcacact

SEQ ID NO: 1454 - DNA, 122 bp, Homo sapiens
  misc_feature (61)..(62): /note="This region represents a CpG dinucleotide"
  misc_feature (61)..(61): /note="Nucleotide may be methylated to form 5-methylcytosine"
gtctcatattttgtgaaggcatcgaaaaacatgctgaccgtaggggcaccatggctataacgacttgcctacagtttgtttccaaggaaaagccgtagaaaggattagaatctcacagttgg

SEQ ID NO: 1455 - DNA, 122 bp, Homo sapiens
  misc_feature (61)..(62): /note="This region represents a CpG dinucleotide"
  misc_feature (61)..(61): /note="Nucleotide may be methylated to form 5-methylcytosine"
caaagaggaacttgacaagggtgtggaatcagcctgctcactttcctcaaattattatcacgccttcattcttaccaatagtacaagaaccatatcatatgccttcctcatgcatcttcatc

SEQ ID NO: 1456 - DNA, 122 bp, Homo sapiens
  misc_feature (61)..(62): /note="This region represents a CpG dinucleotide"
  misc_feature (61)..(61): /note="Nucleotide may be methylated to form 5-methylcytosine"
tttttctgtaacatgatcctacagtacacatagccacattctccagttaataatgacaaccgtgataatggttgaaattaatcacagtgaaattaaggcatgaaattaataacagtgaatgc

SEQ ID NO: 1457 - DNA, 122 bp, Homo sapiens
  misc_feature (61)..(62): /note="This region represents a CpG dinucleotide"
  misc_feature (61)..(61): /note="Nucleotide may be methylated to form 5-methylcytosine"
ccttgggctgaagggctcaaaccccaggctgctacttcccttgagaattgctcacccaggcgggagggctgctccttccacacagcacagcctgtaaacgtcactctctgtcatcgtttata

SEQ ID NO: 1458 - DNA, 122 bp, Homo sapiens
  misc_feature (61)..(62): /note="This region represents a CpG dinucleotide"
  misc_feature (61)..(61): /note="Nucleotide may be methylated to form 5-methylcytosine"
tttacagataaggcaatgggagggccagagagggtgcctctcactcccatagtctctgagcgtgataacggtagcgccagaccagcacacaggcttcatgattttcagcagcatgttcttcc

SEQ ID NO: 1459 - DNA, 122 bp, Homo sapiens
  misc_feature (61)..(62): /note="This region represents a CpG dinucleotide"
  misc_feature (61)..(61): /note="Nucleotide may be methylated to form 5-methylcytosine"
tttgttttttttttctgaccagcagcccccaggccccttgcacgggctgagtctggcccccgcccctcccactgggtaaaggtaaacaagaggcatgtaagggggaaggacagagccctact

SEQ ID NO: 1460 - DNA, 122 bp, Homo sapiens
  misc_feature (61)..(62): /note="This region represents a CpG dinucleotide"
  misc_feature (61)..(61): /note="Nucleotide may be methylated to form 5-methylcytosine"
ttatgattatattaggtcatgcctgtcctcttgcttctggcctgaactaattcacttacacgtgcctataaggtgatcgaggtgacccaatgatcttcttttagccacaatacctattccat

SEQ ID NO: 1461 - DNA, 122 bp, Homo sapiens
  misc_feature (61)..(62): /note="This region represents a CpG dinucleotide"
  misc_feature (61)..(61): /note="Nucleotide may be methylated to form 5-methylcytosine"
ctaattcctgccttgtgagtggtcctgatgctgacagatgcagtaggtatcttgcagccacgaggaagaaaacagcatgactaaggacaggaggagctgaaagggggatgacacgtgatttc

SEQ ID NO: 1462 - DNA, 122 bp, Homo sapiens
  misc_feature (61)..(62): /note="This region represents a CpG dinucleotide"
  misc_feature (61)..(61): /note="Nucleotide may be methylated to form 5-methylcytosine"
agcgttctcatatgggggtttggaatagatggctactgagtccatagagctcactaactacgttgtgaacaatctaggactttgggatggttttactcagtgacatgatcaggtttgtattt

SEQ ID NO: 1463 - DNA, 122 bp, Homo sapiens
  misc_feature (61)..(62): /note="This region represents a CpG dinucleotide"
  misc_feature (61)..(61): /note="Nucleotide may be methylated to form 5-methylcytosine"
cgggaactggagaagaagaagatcctggtgttcacaccatcacgacgcgtgggtggcaagcgggtggtgtgctatgacgacagattcattgtgaagctggcctacgagtctgacgggatcgt

SEQ ID NO: 1464 - DNA, 122 bp, Homo sapiens
  misc_feature (61)..(62): /note="This region represents a CpG dinucleotide"
  misc_feature (61)..(61): /note="Nucleotide may be methylated to form 5-methylcytosine"
catcctgtgccggggagcagcttgcaggcaactcatttcttgagctcttccctgcccacacgtactgtgagttgccaagaaagcagcagctgcattcaccagtggaaattcccccggggcct

SEQ ID NO: 1465 - DNA, 122 bp, Homo sapiens
  misc_feature (61)..(62): /note="This region represents a CpG dinucleotide"
  misc_feature (61)..(61): /note="Nucleotide may be methylated to form 5-methylcytosine"
gaagccctaggtatcttggcaacagcagccccctgacactctactagtcacccaattctacgccagtgtttataaggaagctttatagtaagtttcgaaatcaggttgtggcatcctctgac

SEQ ID NO: 1466 - DNA, 122 bp, Homo sapiens
  misc_feature (61)..(62): /note="This region represents a CpG dinucleotide"
  misc_feature (61)..(61): /note="Nucleotide may be methylated to form 5-methylcytosine"
cacgttcatctccagcttagacccacataataaactgctactgtacacctttgaactaaccgtccccacaaatagtctcaattcatctcatataaaaataagtcctctttccctcccaaact

SEQ ID NO: 1467 - DNA, 122 bp, Homo sapiens
  misc_feature (61)..(62): /note="This region represents a CpG dinucleotide"
  misc_feature (61)..(61): /note="Nucleotide may be methylated to form 5-methylcytosine"
tttactctctgcttaaaccatccagcaagtcatcaaagttacaaaagcccctgcttagtgcgttctgggttacttcattgtgaagatcaggggactgaagctcagccagatcaagtgcctcg

SEQ ID NO: 1468 - DNA, 122 bp, Homo sapiens
  misc_feature (61)..(62): /note="This region represents a CpG dinucleotide"
  misc_feature (61)..(61): /note="Nucleotide may be methylated to form 5-methylcytosine"
cccctggttctgaggcgttcagacttggactgagccacgttaccggctcctctggttctgcggcttgtaaacagcctgtcatgggactttgccttcgcaaccatgtgagtcaattcttccca

SEQ ID NO: 1469 - DNA, 122 bp, Homo sapiens
  misc_feature (61)..(62): /note="This region represents a CpG dinucleotide"
  misc_feature (61)..(61): /note="Nucleotide may be methylated to form 5-methylcytosine"
cccacgtgacctgcctctccctctttacttggtgtttactcaggaatgtgggtgagttgtcgtgttagcctagaacagccattcccaaactttgatggaaggatgccattcactttgaaaat

SEQ ID NO: 1470 - DNA, 122 bp, Homo sapiens
  misc_feature (61)..(62): /note="This region represents a CpG dinucleotide"
  misc_feature (61)..(61): /note="Nucleotide may be methylated to form 5-methylcytosine"
aaatgtcactgtcccctctgacccctgcctccaccaaggttcctcagtgttctccgtaggcggattctggatttctccagctgaggtgacctgggcaccagatccttctgggtttgagaagg

SEQ ID NO: 1471 - DNA, 122 bp, Homo sapiens
  misc_feature (61)..(62): /note="This region represents a CpG dinucleotide"
  misc_feature (61)..(61): /note="Nucleotide may be methylated to form 5-methylcytosine"
catactcatgtcacaggacacaaatgagaaaccccaaagactcctcttgcctgcacttttcggctcaatcaccacacctagaataaacaaacagcataaaacacaacagcttccatttagaa

SEQ ID NO: 1472 - DNA, 122 bp, Homo sapiens
  misc_feature (61)..(62): /note="This region represents a CpG dinucleotide"
  misc_feature (61)..(61): /note="Nucleotide may be methylated to form 5-methylcytosine"
caattctgtggcagttaaaaaatttctaaagtgccaggtttaatagatgttcagatgttacggtttagcacctaaggtcctgaaagcatgccagaataccagatagtgtgacattcatgtga

SEQ ID NO: 1473 - DNA, 122 bp, Homo sapiens
  misc_feature (61)..(62): /note="This region represents a CpG dinucleotide"
  misc_feature (61)..(61): /note="Nucleotide may be methylated to form 5-methylcytosine"
aactgagagcaatcatctaataagattagcagtaaggaggttatggtgcccttagtgacccgagctctgtgggatgatggggttgggagcaaagcttaacaaacaatgggagggagagccaa

SEQ ID NO: 1474 - DNA, 122 bp, Homo sapiens
  misc_feature (61)..(62): /note="This region represents a CpG dinucleotide"
  misc_feature (61)..(61): /note="Nucleotide may be methylated to form 5-methylcytosine"
tttaagaatgactcattctcaacccaagtacgtctgccatgtcgggttaggcaggttgtgcgctgcacaagggcacccacccgaggaaatggagggtttcaaatccaggctgcaatccgctt

SEQ ID NO: 1475 - DNA, 122 bp, Homo sapiens
  misc_feature (61)..(62): /note="This region represents a CpG dinucleotide"
  misc_feature (61)..(61): /note="Nucleotide may be methylated to form 5-methylcytosine"
ttcctggctgtccagaagaacaagcctatcagcaagaaggaaatgattcagaggtccaaacggtaagaccaagaaaacaagagtttgtgtacaagtgttaaccaggccaccaagtggtcagg

SEQ ID NO: 1476 - DNA, 122 bp, Homo sapiens
  misc_feature (61)..(62): /note="This region represents a CpG dinucleotide"
  misc_feature (61)..(61): /note="Nucleotide may be methylated to form 5-methylcytosine"
gaagttaagggaaaacagaagtgtgaataactgctaatggtgctctcactggctccattccgtctgctatttcatgatacataaagggagtaggtcagagattcctttcctggcaaataagt

SEQ ID NO: 1477 - DNA, 122 bp, Homo sapiens
  misc_feature (61)..(62): /note="This region represents a CpG dinucleotide"
  misc_feature (61)..(61): /note="Nucleotide may be methylated to form 5-methylcytosine"
gggccagaacccacctggtgccttgggtgcagtatgcacacacctgcacaggcctacacacgccagccaacactcgtgcctgttctgtgtgtgatgcccggtatgtatacaccactgatcac

SEQ ID NO: 1478 - DNA, 122 bp, Homo sapiens
  misc_feature (61)..(62): /note="This region represents a CpG dinucleotide"
  misc_feature (61)..(61): /note="Nucleotide may be methylated to form 5-methylcytosine"
ctgggatgggcctctgtgatcaaagccaccaggaattgaactgccaaagtcagagccagtcgcaaaacctgcaaacaagcctttcagacactggaatacagacaacaagaactcagagagga

SEQ ID NO: 1479 - DNA, 122 bp, Homo sapiens
  misc_feature (61)..(62): /note="This region represents a CpG dinucleotide"
  misc_feature (61)..(61): /note="Nucleotide may be methylated to form 5-methylcytosine"
gtcacaatctcaagggagaaagacctcaaaaatttgtggatgctcatgtctggaaaagggcgactgtggttcataccaaactgagaagaaagagattcatgagcccagcctgccccacggca

SEQ ID NO: 1480 - DNA, 122 bp, Homo sapiens
  misc_feature (61)..(62): /note="This region represents a CpG dinucleotide"
  misc_feature (61)..(61): /note="Nucleotide may be methylated to form 5-methylcytosine"
tgtgaaattttaaaaatgttgcatctctgcttctctccctgccccaggagccctcccaggcgctgagtccctgctgctgcagcatccagccaccgacccagctcctgctgaccacgatgtcg

SEQ ID NO: 1481 - DNA, 122 bp, Homo sapiens
  misc_feature (61)..(62): /note="This region represents a CpG dinucleotide"
  misc_feature (61)..(61): /note="Nucleotide may be methylated to form 5-methylcytosine"
acagagcacctttctgtgctctggtggcagctgtgccagttagaagttgcactggttccccgcagcctgccttgagatactttactctggcagcggttttcttagccgtgcattgcgacatt

SEQ ID NO: 1482 - DNA, 122 bp, Homo sapiens
  misc_feature (61)..(62): /note="This region represents a CpG dinucleotide"
  misc_feature (61)..(61): /note="Nucleotide may be methylated to form 5-methylcytosine"
cgctgcggggcgctgcaccgtgcacagtcaggccgggccatacctccagacgctgtatgccgccgactccccgcctagccgccgctccggctcataaactagtagacgataaaattgccttc

SEQ ID NO: 1483 - DNA, 122 bp, Homo sapiens
  misc_feature (61)..(62): /note="This region represents a CpG dinucleotide"
  misc_feature (61)..(61): /note="Nucleotide may be methylated to form 5-methylcytosine"
ctctatgcttaacttttgaattagaaacggtgttttaatttttcgaatatgactcctttacgtgtctgtgtctgtttccatgtcttcctactgtcttagtaggaagctcacgactcatttgc

SEQ ID NO: 1484 - DNA, 122 bp, Homo sapiens
  misc_feature (61)..(62): /note="This region represents a CpG dinucleotide"
  misc_feature (61)..(61): /note="Nucleotide may be methylated to form 5-methylcytosine"
accagatgaccactaatgatgaaagtttctcaagggttctgaacacacaacatccaatggcgtttctgctgcttgaacagcttagcaggacatgtcagtccttcattgccccttctcacact

SEQ ID NO: 1485 - DNA, 122 bp, Homo sapiens
  misc_feature (61)..(62): /note="This region represents a CpG dinucleotide"
  misc_feature (61)..(61): /note="Nucleotide may be methylated to form 5-methylcytosine"
cactgttattggtaattctttcactgaacgcacagtcattaagccagttcttactgagtccgtatgagtactgtgctgggtgtgcccttttgtaatcctgttgaaaaagcacagctcacaag

SEQ ID NO: 1486 - DNA, 122 bp, Homo sapiens
  misc_feature (61)..(62): /note="This region represents a CpG dinucleotide"
  misc_feature (61)..(61): /note="Nucleotide may be methylated to form 5-methylcytosine"
aactggggcccagcgagattactatttaacagctttgaaatgactgcaggagggagaacacgaggaaacatccaagtttactgatgaagagccaggtccctggagatagattacagggggat

SEQ ID NO: 1487 - DNA, 122 bp, Homo sapiens
  misc_feature (61)..(62): /note="This region represents a CpG dinucleotide"
  misc_feature (61)..(61): /note="Nucleotide may be methylated to form 5-methylcytosine"
ctggcaggtatttcctgcatgcctgcattccagtgctataacctgctcaaggacacagagcgctccttacttagctctgtagcctcagcacctagcgcaatcctttatacacagtaggcatc

SEQ ID NO: 1488 - DNA, 122 bp, Homo sapiens
  misc_feature (61)..(62): /note="This region represents a CpG dinucleotide"
  misc_feature (61)..(61): /note="Nucleotide may be methylated to form 5-methylcytosine"
gcagggacgaggagcctgaggctcagagaggatgtcactcgctctgagtcacatgctgggcgtctcccctctacctggaggcatatacgcccaccagggatcatgggcagtggttgtcatgg

SEQ ID NO: 1489 - DNA, 122 bp, Homo sapiens
  misc_feature (61)..(62): /note="This region represents a CpG dinucleotide"
  misc_feature (61)..(61): /note="Nucleotide may be methylated to form 5-methylcytosine"
gcctgtttttcctgctagtgtgagtaacaatgagcaagaaagctattctgtcttgatgtacgtggcaggaccgaaacctgcttcagcagtattcccctactatgtctgccacacatggttgt

SEQ ID NO: 1490 - DNA, 122 bp, Homo sapiens
  misc_feature (61)..(62): /note="This region represents a CpG dinucleotide"
  misc_feature (61)..(61): /note="Nucleotide may be methylated to form 5-methylcytosine"
cagccggaggtggtggcaggaacaggacactgcctgagaggtgtaataaacgccagcaagcgtcactgtgggaggagtgtgccaggagaactggcagggcctccaggacctacagggaggaa

SEQ ID NO: 1491 - DNA, 122 bp, Homo sapiens
  misc_feature (61)..(62): /note="This region represents a CpG dinucleotide"
  misc_feature (61)..(61): /note="Nucleotide may be methylated to form 5-methylcytosine"
tcagctcataaaacgaaaagaacattgcctcagcatgtatattgtgaaataaagggattacgtgtcaaaaatgtgccaggaatagaagggttgacatcatctacagcttggtgatgagtttt

SEQ ID NO: 1492 - DNA, 122 bp, Homo sapiens
  misc_feature (61)..(62): /note="This region represents a CpG dinucleotide"
  misc_feature (61)..(61): /note="Nucleotide may be methylated to form 5-methylcytosine"
tccatgcgtcaccttgctggtgatgcttcactggatcacttggttccggggttgtccgcacgtctccctgtagtgcaggtgctccttcctgtttccaattagcctgtgggatgggacttgga

SEQ ID NO: 1493 - DNA, 122 bp, Homo sapiens
  misc_feature (61)..(62): /note="This region represents a CpG dinucleotide"
  misc_feature (61)..(61): /note="Nucleotide may be methylated to form 5-methylcytosine"
gccctcttgtctcaagttctatctttgatccaggacgagggaagcctgtctgccagtctgcgaggctgatgctttttccccctcctcttccacctctgttttttcccaacttgctttaggat

SEQ ID NO: 1494 - DNA, 122 bp, Homo sapiens
  misc_feature (61)..(62): /note="This region represents a CpG dinucleotide"
  misc_feature (61)..(61): /note="Nucleotide may be methylated to form 5-methylcytosine"
gggctccgaccccatggcagcatctaggtgtgcatgtttacagctgaagccccagtggggcgtgtgttacagagtgctctttcagtttagccatccgtccataggcggcttgcattagtcag

SEQ ID NO: 1495 - DNA, 122 bp, Homo sapiens
  misc_feature (61)..(62): /note="This region represents a CpG dinucleotide"
  misc_feature (61)..(61): /note="Nucleotide may be methylated to form 5-methylcytosine"
taggcagctaagaatgagaaaagtgtcctaaatagaaattgcagcaattcagtatttcctcgctgagtaggtagatgactcaatacacttggtaaaacattaaaattgctctattaagactg

SEQ ID NO: 1496 - DNA, 122 bp, Homo sapiens
  misc_feature (61)..(62): /note="This region represents a CpG dinucleotide"
  misc_feature (61)..(61): /note="Nucleotide may be methylated to form 5-methylcytosine"
ttcagaaagtctttttaatcagcaggaaggaacttcaatacaaggtggagataactaagacggtaaagccattaccaaatttcctgtcaataaaaagcaggtggggtatgaaattaactgca

SEQ ID NO: 1497 - DNA, 122 bp, Homo sapiens
  misc_feature (61)..(62): /note="This region represents a CpG dinucleotide"
  misc_feature (61)..(61): /note="Nucleotide may be methylated to form 5-methylcytosine"
ttcctcttgccagcaggttcttccacctttgccgagttactctgtttactgaggtcttagcgtggtcactgactcccccacctccctgagtagtttttgctgtggctttccttcttggctgt

SEQ ID NO: 1498 - DNA, 122 bp, Homo sapiens
  misc_feature (61)..(62): /note="This region represents a CpG dinucleotide"
  misc_feature (61)..(61): /note="Nucleotide may be methylated to form 5-methylcytosine"
tctgtcctgtgaaatcctcaggaaaaatcccagcccccagcctggcattcaagccatcaccgctggccttagtctgccgtgattgacaccgtgctccagccaggataacgcacttgcagctc

SEQ ID NO: 1499 - DNA, 122 bp, Homo sapiens
  misc_feature (61)..(62): /note="This region represents a CpG dinucleotide"
  misc_feature (61)..(61): /note="Nucleotide may be methylated to form 5-methylcytosine"
tctgtaaggaaggaggtgaggtcacttgcgagcatgctgggctggaagttaggtaatgagcgtaaggagcaccttaaaagtttggaacagctccctagtggatagctaggggccaggaagga

SEQ ID NO: 1500 - DNA, 122 bp, Homo sapiens
  misc_feature (61)..(62): /note="This region represents a CpG dinucleotide"
  misc_feature (61)..(61): /note="Nucleotide may be methylated to form 5-methylcytosine"
cctgtgcctcccgcagtaagtacttaagaaatacttgtgaaacacatgaataaaggttaacgaagggcaaaggaaacaagcctttattgatgatttttctctgtgcccagtaatacttgggt

SEQ ID NO: 1501 - DNA, 122 bp, Homo sapiens
  misc_feature (61)..(62): /note="This region represents a CpG dinucleotide"
  misc_feature (61)..(61): /note="Nucleotide may be methylated to form 5-methylcytosine"
catgactcagccactcagctccctgcccttgggcaatttatttaactgtatggtacttaacggcttcccacttctgaattagggcttgctggaaagatacaggcaggaataaagaaattaaa

SEQ ID NO: 1502 - DNA, 122 bp, Homo sapiens
  misc_feature (61)..(62): /note="This region represents a CpG dinucleotide"
  misc_feature (61)..(61): /note="Nucleotide may be methylated to form 5-methylcytosine"
acacatgtagatataaatgcactgccatttagttacaacatctcttccattagcatttaccgtggttgtcagccaaacttctatggggtggaggggaagagaaggggacaaaggggtccgtg

SEQ ID NO: 1503 - DNA, 122 bp, Homo sapiens
  misc_feature (61)..(62): /note="This region represents a CpG dinucleotide"
  misc_feature (61)..(61): /note="Nucleotide may be methylated to form 5-methylcytosine"
ggccttactcctcactgtgacataatcccagaacgcatctctgctccttggtcagtgaagcgatgagggtggacacaaggactagacaagagcagacagtgagctggcacctgacccaccct

SEQ ID NO: 1504 - DNA, 122 bp, Homo sapiens
  misc_feature (61)..(62): /note="This region represents a CpG dinucleotide"
  misc_feature (61)..(61): /note="Nucleotide may be methylated to form 5-methylcytosine"
ggtcgaagtgttacctactgatagctagcacagagtaggtgctgaggtcacagaatgtgacgagaatttcaagaaggagcggtgctcagtgttgcagagattaaggagtatgagattgaaaa

SEQ ID NO: 1505 - DNA, 122 bp, Homo sapiens
  misc_feature (61)..(62): /note="This region represents a CpG dinucleotide"
  misc_feature (61)..(61): /note="Nucleotide may be methylated to form 5-methylcytosine"
gtagccagaaaacctttccgaaagtaattacgagagcacagcaggcaagagcacagcaggcgagtcagacttctggtgacatgaacactcagcctgctgatatgaatttcagttgtcttcat

SEQ ID NO: 1506 - DNA, 122 bp, Homo sapiens
  misc_feature (61)..(62): /note="This region represents a CpG dinucleotide"
  misc_feature (61)..(61): /note="Nucleotide may be methylated to form 5-methylcytosine"
ctgctggaagggtctcttgtatgggcgccccgtgaggacccagtccttctccagggcattcgagtctccattgcacaatggccagccctggtgagtggcttttactgggtgggaacatgtct

SEQ ID NO: 1507 - DNA, 122 bp, Homo sapiens
  misc_feature (61)..(62): /note="This region represents a CpG dinucleotide"
  misc_feature (61)..(61): /note="Nucleotide may be methylated to form 5-methylcytosine"
tcataagattactgtgagaattaaatcatgcatgctagctgcttagcacagtgcctggcacgccaatggtgcttcacacacgcttgtgcatgttgcagccagcctccaagcccccagcaatc

SEQ ID NO: 1508 - DNA, 122 bp, Homo sapiens
  misc_feature (61)..(62): /note="This region represents a CpG dinucleotide"
  misc_feature (61)..(61): /note="Nucleotide may be methylated to form 5-methylcytosine"
cctcgaaaactcgaggagacacattcagctgctcccatttcacggatgaggaaacaagtacgcaatcctgaagctggtgcaaagcccaggccccctttctttttcaagcgtgcttccagcct

SEQ ID NO: 1509 - DNA, 122 bp, Homo sapiens
  misc_feature (61)..(62): /note="This region represents a CpG dinucleotide"
  misc_feature (61)..(61): /note="Nucleotide may be methylated to form 5-methylcytosine"
tcgaggacagcctatacccggcagcaagtcctggaattagagaaagagtttcattacaaccgctacctgacccgaaggagaaggatcgagatcgcccactcgctgtgcctctctgagaggca

SEQ ID NO: 1510 - DNA, 122 bp, Homo sapiens
  misc_feature (61)..(62): /note="This region represents a CpG dinucleotide"
  misc_feature (61)..(61): /note="Nucleotide may be methylated to form 5-methylcytosine"
cttggttcatcttgtagggttatacgcaatagcaagatagtcctgtgtttcctgtaattccggcccttcagccggacctaccctgacacaaggtgacctcttgtatgtgctgcctagtctgc

SEQ ID NO: 1511 - DNA, 122 bp, Homo sapiens
  misc_feature (61)..(62): /note="This region represents a CpG dinucleotide"
  misc_feature (61)..(61): /note="Nucleotide may be methylated to form 5-methylcytosine"
gctccagctgcgcgttgttcagtgaggttttcagctccttggtgtgggcgtgcagctcctcgtactcccccttcagctggtggtgcaggaaattgaccctggaggaggaagagtcacagggc

SEQ ID NO: 1512 - DNA, 122 bp, Homo sapiens
  misc_feature (61)..(62): /note="This region represents a CpG dinucleotide"
  misc_feature (61)..(61): /note="Nucleotide may be methylated to form 5-methylcytosine"
tgcgtggtccagtacacaatgaatgctcattttgtgaagtcacagggtcaaatctttctccgtgcctcatcccacttaatccttgcaacattctcaagaggcgggtagacggggtgtggcca

SEQ ID NO: 1513 - DNA, 122 bp, Homo sapiens
  misc_feature (61)..(62): /note="This region represents a CpG dinucleotide"
  misc_feature (61)..(61): /note="Nucleotide may be methylated to form 5-methylcytosine"
tgcctagtttggcttccaaaggcccttcacaaatcatacgtggggacttgtagcctaggacgtgaacctgtcaggtcaggctagactggcctgcttttgaaagtgagcccagtgtgtgtgca

SEQ ID NO: 1514 - DNA, 122 bp, Homo sapiens
  misc_feature (61)..(62): /note="This region represents a CpG dinucleotide"
  misc_feature (61)..(61): /note="Nucleotide may be methylated to form 5-methylcytosine"
ttctcatactgtctttctcatttgatatttttctgagccaaagtgcctactttttttgagcggtatttatgactagttacattgcacaaggaaacttgacttgggtgaggtgttaaggtatg

SEQ ID NO: 1515 - DNA, 122 bp, Homo sapiens
  misc_feature (61)..(62): /note="This region represents a CpG dinucleotide"
  misc_feature (61)..(61): /note="Nucleotide may be methylated to form 5-methylcytosine"
ctcaaagttcaacaaaatgtggatgcgtcattttatttacacttcaatggccagaacttacgaaatggcctcatccagttgcaagaagtttgggaaatgtagccttccatatttacaggaat

SEQ ID NO: 1516 - DNA, 122 bp, Homo sapiens
  misc_feature (61)..(62): /note="This region represents a CpG dinucleotide"
  misc_feature (61)..(61): /note="Nucleotide may be methylated to form 5-methylcytosine"
tctctggggcatgttcatccatttcatcacaacctccttcctcgtttatgtcaatacgttcgtcttcactaagttcctctgctgcacatgtggagccaaatggtggcgacgtcgtcggtgga

SEQ ID NO: 1517 - DNA, 122 bp, Homo sapiens
  misc_feature (61)..(62): /note="This region represents a CpG dinucleotide"
  misc_feature (61)..(61): /note="Nucleotide may be methylated to form 5-methylcytosine"
ccccaccccacggcacccaagcacgcgctcaccccactcaggcctcaacgtccttgtttccgggacacacaagaggagatgaccgctaaggcctcctcagccaagaccaagtggacaggact

SEQ ID NO: 1518 - DNA, 122 bp, Homo sapiens
  misc_feature (61)..(62): /note="This region represents a CpG dinucleotide"
  misc_feature (61)..(61): /note="Nucleotide may be methylated to form 5-methylcytosine"
gtgtttcagattcctttgaaacccaatcagactttgaagagggaacaacatgctcatgagcgaaaacagaagcctgaaatgaacctgctgggaactgaaagttgggtaccagctcgtttact

SEQ ID NO: 1519 - DNA, 122 bp, Homo sapiens
  misc_feature (61)..(62): /note="This region represents a CpG dinucleotide"
  misc_feature (61)..(61): /note="Nucleotide may be methylated to form 5-methylcytosine"
ctcccttgcccttttgcctcagatttccaacgcttgctagctttgtctgttttgaatggccgtgctcagtgttcagctacggaaatcctctccttccccagctggctcaccaggaaattgtt

SEQ ID NO: 1520 - DNA, 122 bp, Homo sapiens
  misc_feature (61)..(62): /note="This region represents a CpG dinucleotide"
  misc_feature (61)..(61): /note="Nucleotide may be methylated to form 5-methylcytosine"
cctccagcccggaggacgaggtgctgcccagcacctccatgtacttcaagcagtccccaccgtccacccccaccacgccggccttccccccgcaggcgggggcgttatgggacgaggcactg

SEQ ID NO: 1521 - DNA, 122 bp, Homo sapiens
  misc_feature (61)..(62): /note="This region represents a CpG dinucleotide"
  misc_feature (61)..(61): /note="Nucleotide may be methylated to form 5-methylcytosine"
gggctggtataaaggacttgtttcctgctgaaaaagcagaaagagattaccagccacagacgggtcatgagcgcggtattactgctggccctcctggggttcatcctcccactgccaggtga

SEQ ID NO: 1522 - DNA, 122 bp, Homo sapiens
  misc_feature (61)..(62): /note="This region represents a CpG dinucleotide"
  misc_feature (61)..(61): /note="Nucleotide may be methylated to form 5-methylcytosine"
cgtttctccatcccgaagttcttcttggtttttatcctaagtactgatgtcaggatgactcggcagctttgacgagccatctggccctttaggcaggaagccagttggccttcctcctccca

SEQ ID NO: 1523 - DNA, 122 bp, Homo sapiens
  misc_feature (61)..(62): /note="This region represents a CpG dinucleotide"
  misc_feature (61)..(61): /note="Nucleotide may be methylated to form 5-methylcytosine"
ttccacccatgccattgttggggaacaggtgtgaggaggcacctagtccaaggcagggcccggccactgagtaattgcttctctgagcctcaccttcttaggtaaagacagggtgcacgggc

SEQ ID NO: 1524 - DNA, 122 bp, Homo sapiens
  misc_feature (61)..(62): /note="This region represents a CpG dinucleotide"
  misc_feature (61)..(61): /note="Nucleotide may be methylated to form 5-methylcytosine"
ggaactgtccaacacagagaccctgttcccagtgggctttgcctgaagctcttccagcagcgagctagcacaggggtggaacctgctgttgatctgttgattaagcctatgcagtgctttct

SEQ ID NO: 1525 - DNA, 122 bp, Homo sapiens
  misc_feature (61)..(62): /note="This region represents a CpG dinucleotide"
  misc_feature (61)..(61): /note="Nucleotide may be methylated to form 5-methylcytosine"
ggccccaagccatcctcccacctcggcctcccaaagccttggtactacatgtgtgaggcacggcacctggcctttgatttatgttttaagagaagaaagtgaagctcagaggctaggcaaat

SEQ ID NO: 1526 - DNA, 122 bp, Homo sapiens
  misc_feature (61)..(62): /note="This region represents a CpG dinucleotide"
  misc_feature (61)..(61): /note="Nucleotide may be methylated to form 5-methylcytosine"
agtcaatatttaaacaccaacaccatctctggcaaaacagagaacagagatctgggactgcggagagaagaaaaagagaaagcagacagacaaagcaattaggatgtggggctggcatgcct

SEQ ID NO: 1527 - DNA, 122 bp, Homo sapiens
  misc_feature (61)..(62): /note="This region represents a CpG dinucleotide"
  misc_feature (61)..(61): /note="Nucleotide may be methylated to form 5-methylcytosine"
ctctctacaggggaaattccctactggagacagctttgctgaatgagcttgactgcagtgcgaatgctggggcttattgtggtgactatgaggtcaccaaggttgccaaatcccaagggcat

SEQ ID NO: 1528 - DNA, 122 bp, Homo sapiens
  misc_feature (61)..(62): /note="This region represents a CpG dinucleotide"
  misc_feature (61)..(61): /note="Nucleotide may be methylated to form 5-methylcytosine"
cctcatcctggagtgtacaccaccactcccatccaggatagccaaccaactcctgattgacggggagtgatcccctatacacaaggctgcacccctgtctgaaggtcagagcaactctgtgg

SEQ ID NO: 1529 - DNA, 122 bp, Homo sapiens
  misc_feature (61)..(62): /note="This region represents a CpG dinucleotide"
  misc_feature (61)..(61): /note="Nucleotide may be methylated to form 5-methylcytosine"
gtatttggagtgagtcacctaacgcctaacactaacttatgaaatggacctgatttcagacgtcagggaagaaactggtaatctgaagcttcttttattggcaataggggctaccagtagag

SEQ ID NO: 1530 - DNA, 122 bp, Homo sapiens
  misc_feature (61)..(62): /note="This region represents a CpG dinucleotide"
  misc_feature (61)..(61): /note="Nucleotide may be methylated to form 5-methylcytosine"
atggaatcaggaaggaaattaccaagtctgtaaaataagatgtgaaattgtgtataaacacggggtaatattcagagtcatttaataatgtataggaaattgggtaatgtttagagtcattt

SEQ ID NO: 1531 - DNA, 122 bp, Homo sapiens
  misc_feature (61)..(62): /note="This region represents a CpG dinucleotide"
  misc_feature (61)..(61): /note="Nucleotide may be methylated to form 5-methylcytosine"
ccaatcccggcttcaacaggttctccccagaacccaaacttgggtgaagtttcaccccctcgcggggcgcgggctggccgggtgcgcccggagtcctggagccgcgccgctcagtccgtgga

SEQ ID NO: 1532 - DNA, 122 bp, Homo sapiens
  misc_feature (61)..(62): /note="This region represents a CpG dinucleotide"
  misc_feature (61)..(61): /note="Nucleotide may be methylated to form 5-methylcytosine"
cagcggacactccccagaccccacccagcccctgcccaggctccccaccgttccgggacacgtccagctccaccagctgcatgaagttggccacctcgggaggcaaccgctggatctcgttg

SEQ ID NO: 1533 - DNA, 122 bp, Homo sapiens
  misc_feature (61)..(62): /note="This region represents a CpG dinucleotide"
  misc_feature (61)..(61): /note="Nucleotide may be methylated to form 5-methylcytosine"
gaccatttcccggcataggctccggtgcccctgcccggctcccgccgggaagttctaggccgccgcacagaaagccctgccctccacgccgggtctctggagcgccctgggttgcccggccg

SEQ ID NO: 1534 - DNA, 122 bp, Homo sapiens
  misc_feature (61)..(62): /note="This region represents a CpG dinucleotide"
  misc_feature (61)..(61): /note="Nucleotide may be methylated to form 5-methylcytosine"
caatgagtaattggtatgcaggcagacagaggttaattaagaggcaacgtggtcaggcaacgtgcacagaccaagtgcacaatcttggatatgtagttttacttcccttgcctttggtttta

SEQ ID NO: 1535 - DNA, 122 bp, Homo sapiens
  misc_feature (61)..(62): /note="This region represents a CpG dinucleotide"
  misc_feature (61)..(61): /note="Nucleotide may be methylated to form 5-methylcytosine"
gttgtcagctaaagctcaaatttggcttggcaaccacacttcagttttgacacagtctttcgaggaattcctgaaattagtttccaaaactgtaaatttgctgaggctatttggctgtttaa

SEQ ID NO: 1536 - DNA, 122 bp, Homo sapiens
  misc_feature (61)..(62): /note="This region represents a CpG dinucleotide"
  misc_feature (61)..(61): /note="Nucleotide may be methylated to form 5-methylcytosine"
tgacccagcattatgcaatatttgcccaaataaccagcagggcaggccaggagacttctacgcacatcccgatagcaccccgaaagccccaggggcaactggacagttcactgtcatcaaga

SEQ ID NO: 1537 - DNA, 122 bp, Homo sapiens
  misc_feature (61)..(62): /note="This region represents a CpG dinucleotide"
  misc_feature (61)..(61): /note="Nucleotide may be methylated to form 5-methylcytosine"
tcgaactcctgacctcaggtgatccatcacctcggcctcccaaagtgctgggattacaggcgtgagccactaagcccggccagcaacacgcttttaccgctgcaaatccggatcaggcaggc

SEQ ID NO: 1538 - DNA, 122 bp, Homo sapiens
  misc_feature (61)..(62): /note="This region represents a CpG dinucleotide"
  misc_feature (61)..(61): /note="Nucleotide may be methylated to form 5-methylcytosine"
tatacagatttagagcctaggaacagttggctataccatatatcctaggggtgtagcaggcgctactatctagttgtgtgtgagtagtcactctgatgtttgcacaatgatgaaataggcta

SEQ ID NO: 1539 - DNA, 122 bp, Homo sapiens
  misc_feature (61)..(62): /note="This region represents a CpG dinucleotide"
  misc_feature (61)..(61): /note="Nucleotide may be methylated to form 5-methylcytosine"
ctttttaaaaagcattttttccgattgctttatcgggcatcctgtggggcgcgcaagcggcgaggcctccagtggcctctcttgccactcttaggcagggagctgcggggactcagctgcac

SEQ ID NO: 1540 - DNA, 122 bp, Homo sapiens
  misc_feature (61)..(62): /note="This region represents a CpG dinucleotide"
  misc_feature (61)..(61): /note="Nucleotide may be methylated to form 5-methylcytosine"
cagagacaaactttatgtgtttaaaaagctcaataaaggcaaagtggctgggtcattgggcgtaagaggaagagtggcagatgactggagcaagacagatgggtttgattacattggatctc

SEQ ID NO: 1541 - DNA, 122 bp, Homo sapiens
  misc_feature (61)..(62): /note="This region represents a CpG dinucleotide"
  misc_feature (61)..(61): /note="Nucleotide may be methylated to form 5-methylcytosine"
ctctccaacccaagccaagcgcttgactctcagccattcctcaggccctggctggatgagcgaaggtccttctgccaggaggagccagctccccttgaggtctgactcatgcagtgcaggcc

SEQ ID NO: 1542 - DNA, 122 bp, Homo sapiens
  misc_feature (61)..(62): /note="This region represents a CpG dinucleotide"
  misc_feature (61)..(61): /note="Nucleotide may be methylated to form 5-methylcytosine"
agagacagcagagggcagtgcagcgtagtgcaagaagctctggctctggggccatctggacgagtctgaatcttaactctggcacctgttagtagagaggcctcaggcaaatcgcttaacac

SEQ ID NO: 1543 - DNA, 122 bp, Homo sapiens
  misc_feature (61)..(62): /note="This region represents a CpG dinucleotide"
  misc_feature (61)..(61): /note="Nucleotide may be methylated to form 5-methylcytosine"
tccacacccgctcaacactgcagtgcagccattgctgtgtgcttctgatctcggtgagttcgcatgctcaagaagtctttggcacagagtttacgacctcaggctctccagttcaatgggcc

SEQ ID NO: 1544 - DNA, 122 bp, Homo sapiens
  misc_feature (61)..(62): /note="This region represents a CpG dinucleotide"
  misc_feature (61)..(61): /note="Nucleotide may be methylated to form 5-methylcytosine"
tggcctcagagatgaccgttctggagagggtggggggatggcatttgcccctcccagcctcgcctccacctgcccgctttctctgcaaatgtgtttgtgtgtgtgcatgtggacgaaggggg

SEQ ID NO: 1545 - DNA, 122 bp, Homo sapiens
  misc_feature (61)..(62): /note="This region represents a CpG dinucleotide"
  misc_feature (61)..(61): /note="Nucleotide may be methylated to form 5-methylcytosine"
gtgtccagagctccaggagacgacgctgttgtaaggatggaggatacaaagcagaggatgcgctctcaaattcagttcttcaccgctgcgtccacattcacgtcgggaaacttggtctcagc

SEQ ID NO: 1546 - DNA, 122 bp, Homo sapiens
  misc_feature (61)..(62): /note="This region represents a CpG dinucleotide"
  misc_feature (61)..(61): /note="Nucleotide may be methylated to form 5-methylcytosine"
aagcaggctctctcctgtgtccagacttgttggactgaccctcatatgtgatgctgcctccgaggaggtttcctcactgtgaacccaggttgcatcatctgaaacacagtgaagactaatct

SEQ ID NO: 1547 - DNA, 122 bp, Homo sapiens
  misc_feature (61)..(62): /note="This region represents a CpG dinucleotide"
  misc_feature (61)..(61): /note="Nucleotide may be methylated to form 5-methylcytosine"
acccaggttgtagaacactgatgtatgatgggaagccattgagtgctcagccccataatacgacctgactcagagtatcatgggattactgtggctgtcatgttgtagatggtgtagaaagg

SEQ ID NO: 1548 - DNA, 122 bp, Homo sapiens
  misc_feature (61)..(62): /note="This region represents a CpG dinucleotide"
  misc_feature (61)..(61): /note="Nucleotide may be methylated to form 5-methylcytosine"
ttaggctggttccatgttttgtaataacttttgcttacaccacaaaattgtcatagattacgaaaacacaaaggccttggaaaaaaggcccagagccccctggaagtcattatttcttcctt

SEQ ID NO: 1549 - DNA, 122 bp, Homo sapiens
  misc_feature (61)..(62): /note="This region represents a CpG dinucleotide"
  misc_feature (61)..(61): /note="Nucleotide may be methylated to form 5-methylcytosine"
agctgggatttgcacccaggactctctgctttccagatcagtgtgggggtttctgaactgcgtcaggaaagcaggtgccaggtgatgagtactgtacaggctgagacttcgccatctttggc

SEQ ID NO: 1550 - DNA, 122 bp, Homo sapiens
  misc_feature (61)..(62): /note="This region represents a CpG dinucleotide"
  misc_feature (61)..(61): /note="Nucleotide may be methylated to form 5-methylcytosine"
aggctttgaagtcagactgtctggattaagatcctggctatgtttcctcttagtccatgacgttgaacaggttacctaatccaagctcggtaacaatcatagctcctaccgcctgttgtaag

SEQ ID NO: 1551 - DNA, 122 bp, Homo sapiens
  misc_feature (61)..(62): /note="This region represents a CpG dinucleotide"
  misc_feature (61)..(61): /note="Nucleotide may be methylated to form 5-methylcytosine"
tccctgtgtatatttccaagattttcctagtgataacatcactctaagtcacttgcttcacgcatgttttttgagtgaaggaaaaagctttggaattaataaccactccttaggcgttgcac

SEQ ID NO: 1552 - DNA, 122 bp, Homo sapiens
  misc_feature (61)..(62): /note="This region represents a CpG dinucleotide"
  misc_feature (61)..(61): /note="Nucleotide may be methylated to form 5-methylcytosine"
gcaaagaggaaagagagcgagtgactgtagcttagtgacacagcacagttcctggtcacacgtccttttacaaccttctttggctcgaggcatctcatttcagagatggaaatgccttgtct

SEQ ID NO: 1553 - DNA, 122 bp, Homo sapiens
  misc_feature (61)..(62): /note="This region represents a CpG dinucleotide"
  misc_feature (61)..(61): /note="Nucleotide may be methylated to form 5-methylcytosine"
ctccggtcatggagctgagccgatttcactgtgctctgattctctaaatactgctactcacgtagggcaattctgttcaacacggtgagctgggccggctgtgactcacagcaccgagcccc

SEQ ID NO: 1554 - DNA, 122 bp, Homo sapiens
  misc_feature (61)..(62): /note="This region represents a CpG dinucleotide"
  misc_feature (61)..(61): /note="Nucleotide may be methylated to form 5-methylcytosine"
tgctgggctttccactaccttaggccacgtgtcactatggagcgaagatcaagaaggtcccggaaggagagaagctgcggggtccagggagactttttggtggttggtcggagaggcttcag

SEQ ID NO: 1555 - DNA, 122 bp, Homo sapiens
  misc_feature (61)..(62): /note="This region represents a CpG dinucleotide"
  misc_feature (61)..(61): /note="Nucleotide may be methylated to form 5-methylcytosine"
tgtcatcatcttcctcaggaaactaccactttcccttctgccaggctgggtgacatgctgcgaagtttctgtgacatcaccaacctctcttcctttgagctctcacctgagcacaatgcacc

SEQ ID NO: 1556 - DNA, 122 bp, Homo sapiens
  misc_feature (61)..(62): /note="This region represents a CpG dinucleotide"
  misc_feature (61)..(61): /note="Nucleotide may be methylated to form 5-methylcytosine"
ctctcccaggtgtcagtccggaggaagtcctgatagaggatgacgtctgacctctaccatcgccatttttgctccaactgaggaaactacaggggaagtggggattggatccagttagctac

SEQ ID NO: 1557 - DNA, 122 bp, Homo sapiens
  misc_feature (61)..(62): /note="This region represents a CpG dinucleotide"
  misc_feature (61)..(61): /note="Nucleotide may be methylated to form 5-methylcytosine"
cccgtgtgcatggagctctggggagctttcttctgtgtatctgagttatttatgagttgacgactcactagctggctttttgctgcctctgtccagagaacgttatagtgacacgacggccc

SEQ ID NO: 1558 - DNA, 122 bp, Homo sapiens
  misc_feature (61)..(62): /note="This region represents a CpG dinucleotide"
  misc_feature (61)..(61): /note="Nucleotide may be methylated to form 5-methylcytosine"
tgccagggatccagtagtggaccagaaagacaagtctctgtcttccagagcttacagtggcgtgtagcactgtccgatagaactttctgtgacaatggaagtgtttggtatctgtgtcatct

SEQ ID NO: 1559 - DNA, 122 bp, Homo sapiens
  misc_feature (61)..(62): /note="This region represents a CpG dinucleotide"
  misc_feature (61)..(61): /note="Nucleotide may be methylated to form 5-methylcytosine"
ctcacttgatctccctgcctccgcctcccaaagtgctgggattacaagcatgagcctctgcgcctagcctaagggagactttagatttaagacagaagtatgccaggagagaggaggtagct

SEQ ID NO: 1560 - DNA, 122 bp, Homo sapiens
  misc_feature (61)..(62): /note="This region represents a CpG dinucleotide"
  misc_feature (61)..(61): /note="Nucleotide may be methylated to form 5-methylcytosine"
cccgcatagcctgctgaactggttttgtagttagttgttcccattttactgcagaggaaacgggcacagagaggttaagaaaccaaggttacgcatctcattaatgacagagctgggattcg

SEQ ID NO: 1561 - DNA, 122 bp, Homo sapiens
  misc_feature (61)..(62): /note="This region represents a CpG dinucleotide"
  misc_feature (61)..(61): /note="Nucleotide may be methylated to form 5-methylcytosine"
ccaactcaaggattccgggttgtctaaaactagaaaatggtactttttttggatttatgacgagaaatactgtgggtttaagaggcaactggaatgtgccagttaactcttcatagacgcat

SEQ ID NO: 1562 - DNA, 122 bp, Homo sapiens
  misc_feature (61)..(62): /note="This region represents a CpG dinucleotide"
  misc_feature (61)..(61): /note="Nucleotide may be methylated to form 5-methylcytosine"
caaaccctcagcctgaaccacaaaggcagaggatggccttgtgcgggaggttcctgaggacgcaaactcagcttcacagccccggaacacagagcctgctgtcggagtatctaacagggatg

SEQ ID NO: 1563 - DNA, 122 bp, Homo sapiens
  misc_feature (61)..(62): /note="This region represents a CpG dinucleotide"
  misc_feature (61)..(61): /note="Nucleotide may be methylated to form 5-methylcytosine"
atgtttttctttcttcttctaatttggatttcatgtcacacaggcttgctgcagccttctcgtcactgtccaggttaggttcccttccattcattctctttcactcacctcttaccctacct

SEQ ID NO: 1564 - DNA, 122 bp, Homo sapiens
  misc_feature (61)..(62): /note="This region represents a CpG dinucleotide"
  misc_feature (61)..(61): /note="Nucleotide may be methylated to form 5-methylcytosine"
acccagaatgctccagtgctgctgtgcagcaagtgcctcagaaacgcagcttggcaaaggcgtgcagccctgtagcctctaagaagcgtccagctatagctcagtgtgaacatcttcctaaa

SEQ ID NO: 1565 - DNA, 122 bp, Homo sapiens
  misc_feature (61)..(62): /note="This region represents a CpG dinucleotide"
  misc_feature (61)..(61): /note="Nucleotide may be methylated to form 5-methylcytosine"
tagcccctgccttcctctctgacattacctgctacctgctactgctctccttgcttttttcgctccatccatatgacttcctctttctcaaacaccctgagctccttctgcctcagagactt

SEQ ID NO: 1566 - DNA, 122 bp, Homo sapiens
  misc_feature (61)..(62): /note="This region represents a CpG dinucleotide"
  misc_feature (61)..(61): /note="Nucleotide may be methylated to form 5-methylcytosine"
tcgccccagagatcccagggaaggactctgtttcctgcgcgccactccagaaagttcctccggtgcccctggaggtcattctgccccacgtgcaatcctgtcctctccaccccatcacatgg

SEQ ID NO: 1567 - DNA, 122 bp, Homo sapiens
  misc_feature (61)..(62): /note="This region represents a CpG dinucleotide"
  misc_feature (61)..(61): /note="Nucleotide may be methylated to form 5-methylcytosine"
tttctccaaagctgagagagatcctttcactatttacatcattcagccctcaagactagacgcactgtattttgttaacaaaacaaggccatatacccaggcgtcagtggctgtcccctctg

SEQ ID NO: 1568 - DNA, 122 bp, Homo sapiens
  misc_feature (61)..(62): /note="This region represents a CpG dinucleotide"
  misc_feature (61)..(61): /note="Nucleotide may be methylated to form 5-methylcytosine"
agcagcctcgctgtcaggccacatggctggatcacatcctgttcatccaggagtgcaccacggcctgtctcgtctgtaacagataaggtccttggcttagtgagtacttttgcttttcttaa

SEQ ID NO: 1569 - DNA, 122 bp, Homo sapiens
  misc_feature (61)..(62): /note="This region represents a CpG dinucleotide"
  misc_feature (61)..(61): /note="Nucleotide may be methylated to form 5-methylcytosine"
agatcaagccccagagggccatgactgcataaaccacaacaactgcgtggctgcctgtcacgtcttcatctgcaagttggaggaacttggagaaatgcagtgcttccctgcagctgcagagg

SEQ ID NO: 1570 - DNA, 122 bp, Homo sapiens
  misc_feature (61)..(62): /note="This region represents a CpG dinucleotide"
  misc_feature (61)..(61): /note="Nucleotide may be methylated to form 5-methylcytosine"
acctaagaatcttagattctttcttaccagatggcaggctcaggttcctgaccagttccacgtggaataaagtggtgaagcataatctttctaataagataggttctttatgggatacatta

SEQ ID NO: 1571 - DNA, 122 bp, Homo sapiens
  misc_feature (61)..(62): /note="This region represents a CpG dinucleotide"
  misc_feature (61)..(61): /note="Nucleotide may be methylated to form 5-methylcytosine"
atttgtaattctccttttacgtgagctctgagggttgccccaccaccagtgggaagaaggcgctgcctagacaaaaaaagggcctgacccaggaggtcactgcctccctagagggccctgga

SEQ ID NO: 1572 - DNA, 122 bp, Homo sapiens
  misc_feature (61)..(62): /note="This region represents a CpG dinucleotide"
  misc_feature (61)..(61): /note="Nucleotide may be methylated to form 5-methylcytosine"
caactgaatgtcccttgaccacaacctttcatactctgtattttacttgtttaatgccttcgcagcccgaggcaggtgaaaagtaagataatctaggattgaggatggggataacagaattt

SEQ ID NO: 1573 - DNA, 122 bp, Homo sapiens
  misc_feature (61)..(62): /note="This region represents a CpG dinucleotide"
  misc_feature (61)..(61): /note="Nucleotide may be methylated to form 5-methylcytosine"
ccaagacataagctactgttataatacataattagtgtatgcactcccaagaagggaagtcgaatctaatttgtaaaagactgatttcctcatatcgctgtagatgacagcactctttgtaa

SEQ ID NO: 1574 - DNA, 122 bp, Homo sapiens
  misc_feature (61)..(62): /note="This region represents a CpG dinucleotide"
  misc_feature (61)..(61): /note="Nucleotide may be methylated to form 5-methylcytosine"
gcaggatgggggtagattcctattaccttgctgccctcaagtacataaggaggtcacagtcgttaactccaggcatccagaccagttcctcatgttgggtcactgtatcaccatctggagaa

SEQ ID NO: 1575 - DNA, 122 bp, Homo sapiens
  misc_feature (61)..(62): /note="This region represents a CpG dinucleotide"
  misc_feature (61)..(61): /note="Nucleotide may be methylated to form 5-methylcytosine"
aatagccggattcagcagggaaacagcgcctcctgacagctgctgtgtctggaggaaatacgaagcaccaatgaagtcagaggagagtccttcaagcagtaggaatgctttatcttctgagc

SEQ ID NO: 1576 - DNA, 122 bp, Homo sapiens
  misc_feature (61)..(62): /note="This region represents a CpG dinucleotide"
  misc_feature (61)..(61): /note="Nucleotide may be methylated to form 5-methylcytosine"
ctgcactgctgcaggctgtcctggcacactgcaggccgggcatcatttcatggtggaggacgtcactcagttttgcatgaggctcttgcatcacatttgtatttaaggaattcacaccttat

SEQ ID NO: 1577 - DNA, 122 bp, Homo sapiens
  misc_feature (61)..(62): /note="This region represents a CpG dinucleotide"
  misc_feature (61)..(61): /note="Nucleotide may be methylated to form 5-methylcytosine"
ttctttaaagctcacattttatagtatcactgctacaaactatttaatgaaatgtggcatcgggtgaaaagaggcatttgtttgatccttgaacgaattaatctcacgtacttccctgtttg

SEQ ID NO: 1578 - DNA, 122 bp, Homo sapiens
  misc_feature (61)..(62): /note="This region represents a CpG dinucleotide"
  misc_feature (61)..(61): /note="Nucleotide may be methylated to form 5-methylcytosine"
agccagctcagccctggtgtcttccctagaggacaacatgctgctccccagccctgagcacgccagtcttcaggtcctgccaggtacaggacagcttgtagtcccacacggcagtcggtcgg

SEQ ID NO: 1579 - DNA, 122 bp, Homo sapiens
  misc_feature (61)..(62): /note="This region represents a CpG dinucleotide"
  misc_feature (61)..(61): /note="Nucleotide may be methylated to form 5-methylcytosine"
cgagtgtccactgtcctgagcactgtgctaagtgctgatgtgctttgtcacgtgcaccctcgtgtcaccaggcaggctgcattgtcacatttcatcctattctatgaaacatggtttctttc

SEQ ID NO: 1580 - DNA, 122 bp, Homo sapiens
  misc_feature (61)..(62): /note="This region represents a CpG dinucleotide"
  misc_feature (61)..(61): /note="Nucleotide may be methylated to form 5-methylcytosine"
ttcctccataaatactatagggcaattgcccaaaagccaggccataaatggcaagagccacgtgcttcacctaggcccaagtggttgctgtgccctcagtgttgacagactaacaggaggga

SEQ ID NO: 1581 - DNA, 122 bp, Homo sapiens
  misc_feature (61)..(62): /note="This region represents a CpG dinucleotide"
  misc_feature (61)..(61): /note="Nucleotide may be methylated to form 5-methylcytosine"
accaacagcatctttgcctttcatttaagtgcaattcaacaggagtttatgagtaacatacgcaagttgattgagcaatggtatagattctgtgtccaataaataaggtagtgtcaccagac

SEQ ID NO: 1582 - DNA, 122 bp, Homo sapiens
  misc_feature (61)..(62): /note="This region represents a CpG dinucleotide"
  misc_feature (61)..(61): /note="Nucleotide may be methylated to form 5-methylcytosine"
gaagaaactaaaatacacatgtcacaattaaataaattcctggctgggcacagtggttcacgcatgtaatcccagcatttggggaggccgagacgggtggatcacctgagattaggagtttg

SEQ ID NO: 1583 - DNA, 122 bp, Homo sapiens
  misc_feature (61)..(62): /note="This region represents a CpG dinucleotide"
  misc_feature (61)..(61): /note="Nucleotide may be methylated to form 5-methylcytosine"
tgcaagtttgtttaagcatattgcaaaattaaacagttctcctccactccctcacagatacgagtcaccttatcacagtcttcagtgagttttgtaatctgcatttagagcagtggtgagct

SEQ ID NO: 1584 - DNA, 122 bp, Homo sapiens
  misc_feature (61)..(62): /note="This region represents a CpG dinucleotide"
  misc_feature (61)..(61): /note="Nucleotide may be methylated to form 5-methylcytosine"
acatgacgctgacagacagaaaccagaggcagccagccacgtgtcgcaggattaaattgacgtgaaatgtgcagaataggcacatccacagggcaggaagcagatcagtggtgccgggactg

SEQ ID NO: 1585 - DNA, 122 bp, Homo sapiens
  misc_feature (61)..(62): /note="This region represents a CpG dinucleotide"
  misc_feature (61)..(61): /note="Nucleotide may be methylated to form 5-methylcytosine"
gaatccacccaagaacaagcttcaggagccacactgacaaaggcccagtgacacacattacgccagagtttcctggagaaacaggcgggtccaggtctggggcagaaggcccatggggtgag

SEQ ID NO: 1586 - DNA, 122 bp, Homo sapiens
  misc_feature (61)..(62): /note="This region represents a CpG dinucleotide"
  misc_feature (61)..(61): /note="Nucleotide may be methylated to form 5-methylcytosine"
tcttggccttcacccatggcacgcaccgataaatgattaaaccaccttcctcaaggaggacgaaaaaggcaggaacatacgtctgagcagctgagggtaatacagacgactgatggtttcct

SEQ ID NO: 1587 - DNA, 122 bp, Homo sapiens
  misc_feature (61)..(62): /note="This region represents a CpG dinucleotide"
  misc_feature (61)..(61): /note="Nucleotide may be methylated to form 5-methylcytosine"
agctgggaccacaggcatgtgccaccacacccagctaatttttgtatttttttgtagagacggtgtttcgccatattgcccaagctggggttatgtcactttcaagactttgttacgaaaga

SEQ ID NO: 1588 - DNA, 122 bp, Homo sapiens
  misc_feature (61)..(62): /note="This region represents a CpG dinucleotide"
  misc_feature (61)..(61): /note="Nucleotide may be methylated to form 5-methylcytosine"
gaccttgctgcttcctgggctaagcagctgcagtgagggtgtgttgccctgaagcagttacgtcattcattaatccaaattctgaaagacaaatgagcatatggtgctaaaatacttttttt

SEQ ID NO: 1589 - DNA, 122 bp, Homo sapiens
  misc_feature (61)..(62): /note="This region represents a CpG dinucleotide"
  misc_feature (61)..(61): /note="Nucleotide may be methylated to form 5-methylcytosine"
cttccgcctgggcgtgaagggcgtgctcttccagccctgcgagcggacctcactctgctacgcacccagctgggtgtgtgatggcgccaatgactgtggggactacagtgatgagcgcgact

SEQ ID NO: 1590 - DNA, 122 bp, Homo sapiens
  misc_feature (61)..(62): /note="This region represents a CpG dinucleotide"
  misc_feature (61)..(61): /note="Nucleotide may be methylated to form 5-methylcytosine"
ctggttcagtgttgacggaagctgaagacagacggaagctccactacaacatgttcagggcggccctcgaggacagcgtggagaagaaatcctccctgtgggtataactcggatcagttagc

SEQ ID NO: 1591 - DNA, 122 bp, Homo sapiens
  misc_feature (61)..(62): /note="This region represents a CpG dinucleotide"
  misc_feature (61)..(61): /note="Nucleotide may be methylated to form 5-methylcytosine"
aaactattatctaataaaaaccaagcttccacaagatccaaaccaacccaccagttgtttcgtatacattgtccagtttacggttaataacaatgggaggataactcttgatacttgttact

SEQ ID NO: 1592 - DNA, 122 bp, Homo sapiens
  misc_feature (61)..(62): /note="This region represents a CpG dinucleotide"
  misc_feature (61)..(61): /note="Nucleotide may be methylated to form 5-methylcytosine"
aggccctggacaggcctttcctctctgtgtgctccacccctacaaccaagcagggccctccgggatccccagtctactgagagggaccatccttcaaccctggtacaatgctcaggaaggca

SEQ ID NO: 1593 - DNA, 122 bp, Homo sapiens
  misc_feature (61)..(62): /note="This region represents a CpG dinucleotide"
  misc_feature (61)..(61): /note="Nucleotide may be methylated to form 5-methylcytosine"
taagccttatatagtgcatttggctggagctcatgtgtacttctgtggaatgatggctttcgtccatggggcctactttgtggtgatctcattaggtttcacaaggtaaacagctgaaaact

SEQ ID NO: 1594 - DNA, 122 bp, Homo sapiens
  misc_feature (61)..(62): /note="This region represents a CpG dinucleotide"
  misc_feature (61)..(61): /note="Nucleotide may be methylated to form 5-methylcytosine"
gaacacatacttcatacctaaggccttcttttcctcttgtttttaaaagtattgtatacacgttgcagttgcacatggatttgttttactaagatgcaagttaaaaccctccttaaaatcct

SEQ ID NO: 1595 - DNA, 122 bp, Homo sapiens
  misc_feature (61)..(62): /note="This region represents a CpG dinucleotide"
  misc_feature (61)..(61): /note="Nucleotide may be methylated to form 5-methylcytosine"
ggaggcagccacaccaaggaaccaggcagtgaagagcagggtcgtttcctaactgggagacgtggcatcactgcaagcagaggttgtcgtgactcatcaggatgaatccacagagcagtaaa

SEQ ID NO: 1596 - DNA, 122 bp, Homo sapiens
  misc_feature (61)..(62): /note="This region represents a CpG dinucleotide"
  misc_feature (61)..(61): /note="Nucleotide may be methylated to form 5-methylcytosine"
atagttgattctgctcacagggcggcttgactgaaagcttgcagaacttactgctcaaaccggggatactcctgccttctgcctcttgcctctgcttccctcttccttttcctcttcctact

SEQ ID NO: 1597 - DNA, 122 bp, Homo sapiens
  misc_feature (61)..(62): /note="This region represents a CpG dinucleotide"
  misc_feature (61)..(61): /note="Nucleotide may be methylated to form 5-methylcytosine"
gctagctgcactgccctccaactgaatcaacggtatcagcatggtgaataaacaggtatgcgctttctagagtgacaacagcagggtgtcagttcccaacacacctattccggtaccattat

SEQ ID NO: 1598 - DNA, 122 bp, Homo sapiens
  misc_feature (61)..(62): /note="This region represents a CpG dinucleotide"
  misc_feature (61)..(61): /note="Nucleotide may be methylated to form 5-methylcytosine"
gtcactggtgaatcactgggagtaaaactaacacctatggagtaattgttcgttgctaggcgcctgtatgctcagatgtcatcacttttggtctgtgctccagccctgtgggatggttgtta

SEQ ID NO: 1599 - DNA, 122 bp, Homo sapiens
  misc_feature (61)..(62): /note="This region represents a CpG dinucleotide"
  misc_feature (61)..(61): /note="Nucleotide may be methylated to form 5-methylcytosine"
ggcaaagaatgactttcctgttactctggctcccagggtgaacacaggtaaggaaagtgacgaggcagtcaagagcaaagcccagctccctagggctttgtgaggaagaccagctccaccac

SEQ ID NO: 1600 - DNA, 122 bp, Homo sapiens
  misc_feature (61)..(62): /note="This region represents a CpG dinucleotide"
  misc_feature (61)..(61): /note="Nucleotide may be methylated to form 5-methylcytosine"
caactgaactatggtggttaggttagtaattagatgcacagacaaaatcacaggaatctgcgtgagccttgtcctactggtaaaggagtcttgtgaggattaattgaaataactcgcaaaaa

SEQ ID NO: 1601 - DNA, 122 bp, Homo sapiens
  misc_feature (61)..(62): /note="This region represents a CpG dinucleotide"
  misc_feature (61)..(61): /note="Nucleotide may be methylated to form 5-methylcytosine"
tgacattggctttacattcagcaatcctttccctttggaccacaagagagatccaagctccgtcacagtagacaaggtgcttcatcacccggctttggcccctttccagggccatttcccag

SEQ ID NO: 1602 - DNA, 122 bp, Homo sapiens
  misc_feature (61)..(62): /note="This region represents a CpG dinucleotide"
  misc_feature (61)..(61): /note="Nucleotide may be methylated to form 5-methylcytosine"
gccacctttgagctctgccttctctcaatcaagggcagtgtggacacatagagagaggaacgtgctttgagcctgagagattctgatttgagtcaccccagctatgttactatctcaccata

SEQ ID NO: 1603 - DNA, 122 bp, Homo sapiens
  misc_feature (61)..(62): /note="This region represents a CpG dinucleotide"
  misc_feature (61)..(61): /note="Nucleotide may be methylated to form 5-methylcytosine"
taaaaatcttttcagacctcaatcactatttagccttgagaatatttactataatcttaccgtatcacttgagacagtaatttcttggtgacttggatcatctaatcctatgactcttgagt

SEQ ID NO: 1604 - DNA, 122 bp, Homo sapiens
  misc_feature (61)..(62): /note="This region represents a CpG dinucleotide"
  misc_feature (61)..(61): /note="Nucleotide may be methylated to form 5-methylcytosine"
caaactcctaggctcaaaggatctgcctgccttggcctcccaaagtgctgggattacaggcgtgagccaccgcaccaggccctatttaacttccttgtgtctgtttcctgatgagtaaccag

SEQ ID NO: 1605 - DNA, 122 bp, Homo sapiens
  misc_feature (61)..(62): /note="This region represents a CpG dinucleotide"
  misc_feature (61)..(61): /note="Nucleotide may be methylated to form 5-methylcytosine"
gcaccaggctcgatgctgcatctcaggctctgtttcataaacaggaggattatttcagaccgatcagaggcggctgcattctgcaaattaccgtgtgctgtggctgcgctcacacattgcca

SEQ ID NO: 1606 - DNA, 122 bp, Homo sapiens
  misc_feature (61)..(62): /note="This region represents a CpG dinucleotide"
  misc_feature (61)..(61): /note="Nucleotide may be methylated to form 5-methylcytosine"
aagagctgggataccagttgaggccatctgactcaaaagccctggtcatagtcatatggccgcctccaccttttttataggcttgagaaagtgaggctccaaaaagtgccttgcccaatggc

SEQ ID NO: 1607 - DNA, 122 bp, Homo sapiens
  misc_feature (61)..(62): /note="This region represents a CpG dinucleotide"
  misc_feature (61)..(61): /note="Nucleotide may be methylated to form 5-methylcytosine"
tgaaaagtccaggaaaatgttcaggcacagtttgatcaggggcttacatgccactagatccgtttctctggcagtacttctggactccacttcctctgttttgagatcattattagaagcac

SEQ ID NO: 1608 - DNA, 122 bp, Homo sapiens
  misc_feature (61)..(62): /note="This region represents a CpG dinucleotide"
  misc_feature (61)..(61): /note="Nucleotide may be methylated to form 5-methylcytosine"
ctcaccacttttgttttcatctcggagactgcatatcgtgaattgcgtaagtcactgagacgaataaatcattgagagaagctaatcaatgtccctggaagtttatatttcatcttctctta

SEQ ID NO: 1609 - DNA, 122 bp, Homo sapiens
  misc_feature (61)..(62): /note="This region represents a CpG dinucleotide"
  misc_feature (61)..(61): /note="Nucleotide may be methylated to form 5-methylcytosine"
tgggcagggggtggcggcggcgacggtggcggagccgcagagcgagctagagagcgagagcggtgagactctgcggacgtcttcccgcccgccgcgctccgccccacccagcctccgcagcc

SEQ ID NO: 1610 - DNA, 122 bp, Homo sapiens
  misc_feature (61)..(62): /note="This region represents a CpG dinucleotide"
  misc_feature (61)..(61): /note="Nucleotide may be methylated to form 5-methylcytosine"
aggcatgagccaccgcgcccagtctatttcctgttttcttaatgtatgagttaataagtacgttacagccacatttcttaacgcttttccgggatttcttttgcagagactgaattcccttc

SEQ ID NO: 1611 - DNA, 122 bp, Homo sapiens
  misc_feature (61)..(62): /note="This region represents a CpG dinucleotide"
  misc_feature (61)..(61): /note="Nucleotide may be methylated to form 5-methylcytosine"
gcaaaagcctgaggcacaaaaagcttttaaaatcttgcccaatattacagaacttggaagcgttagaacttacagctcaactcagacagtcttcattgtttctgctcctaatcacttgactg

SEQ ID NO: 1612 - DNA, 122 bp, Homo sapiens
  misc_feature (61)..(62): /note="This region represents a CpG dinucleotide"
  misc_feature (61)..(61): /note="Nucleotide may be methylated to form 5-methylcytosine"
tgcaatcttcttcccacaccaaccccactctctctgccccaagcaagatgactatgcaaacgagagaaggcctaggatctcaagtcccagtgactcacctgccagctctaggcatacatata

SEQ ID NO: 1613 - DNA, 122 bp, Homo sapiens
  misc_feature (61)..(62): /note="This region represents a CpG dinucleotide"
  misc_feature (61)..(61): /note="Nucleotide may be methylated to form 5-methylcytosine"
gctatgaaggcaaataatcttgcataagtcactagattttacttctctcttactcaaggacgttactgtagcagttctccctcatttggacattatgatttattgcttttgtctatattgct

SEQ ID NO: 1614 - DNA, 122 bp, Homo sapiens
  misc_feature (61)..(62): /note="This region represents a CpG dinucleotide"
  misc_feature (61)..(61): /note="Nucleotide may be methylated to form 5-methylcytosine"
caatctaggatatgcagcctatgatgcatcataggtatacccctggggtaggaacttcttcgtctcatgtaaagatgactatgtaagcagccttgaaaaaaggtgcataggtcactgaaact

SEQ ID NO: 1615 - DNA, 122 bp, Homo sapiens
  misc_feature (61)..(62): /note="This region represents a CpG dinucleotide"
  misc_feature (61)..(61): /note="Nucleotide may be methylated to form 5-methylcytosine"
agctgagcttgagtcagctattctgttggagaatccctaggttacatcagagaagatagccgtgggctagtcacctctatgagctttgtcatggctataattttcatcaccagtcagtcctt

SEQ ID NO: 1616 - DNA, 122 bp, Homo sapiens
  misc_feature (61)..(62): /note="This region represents a CpG dinucleotide"
  misc_feature (61)..(61): /note="Nucleotide may be methylated to form 5-methylcytosine"
ctgctttctgcacttccgggtgtatgacctaatctttctagaagctgacccaagaggctccgcaatgtgagccacaaaaagtcatcagcattccctacctgcctctctgcagtctgcagcat

SEQ ID NO: 1617 - DNA, 122 bp, Homo sapiens
  misc_feature (61)..(62): /note="This region represents a CpG dinucleotide"
  misc_feature (61)..(61): /note="Nucleotide may be methylated to form 5-methylcytosine"
aatatgatgaaaccctgcctctactaaaaatacaaacaattagtcgggcatggtggcacacgtctgtaatcccagctactcgggaagctgaggcacaagaatcgcttgaactcaggaagtgg

SEQ ID NO: 1618 - DNA, 122 bp, Homo sapiens
  misc_feature (61)..(62): /note="This region represents a CpG dinucleotide"
  misc_feature (61)..(61): /note="Nucleotide may be methylated to form 5-methylcytosine"
ttccagtattttacaattacagacaatcctgcaatgaatgaccttgcattaatttcatttcgtaagtgtgcagatatagccacagggtagagtcccatgcaggaaatgctgagtaaagagaa

SEQ ID NO: 1619 - DNA, 122 bp, Homo sapiens
  misc_feature (61)..(62): /note="This region represents a CpG dinucleotide"
  misc_feature (61)..(61): /note="Nucleotide may be methylated to form 5-methylcytosine"
ttattatagcctaccaggactaggccacagcacatagcaggtgtgcagtaggctataccacgtaggtttaagtactccctgtgatgttcacacaacaatgaaattgcctaacgaatttctta

SEQ ID NO: 1620 - DNA, 122 bp, Homo sapiens
  misc_feature (61)..(62): /note="This region represents a CpG dinucleotide"
  misc_feature (61)..(61): /note="Nucleotide may be methylated to form 5-methylcytosine"
gcactaacaccaattaaatcacttaaataacgtaggtaattatccaatagcacatccagacgtggtggctcacacgtgtaatcccagcactttgagaggccgaggcaggcagatcacctgag

SEQ ID NO: 1621 - DNA, 122 bp, Homo sapiens
  misc_feature (61)..(62): /note="This region represents a CpG dinucleotide"
  misc_feature (61)..(61): /note="Nucleotide may be methylated to form 5-methylcytosine"
aatgatcagacttgaaccctgtgctcatccccccatcactttgtggaactagatgtcctacgttgcacatggcttgattcatggtttggagttgttttctggttgtttcctgtgtgcaggtt

SEQ ID NO: 1622 - DNA, 122 bp, Homo sapiens
  misc_feature (61)..(62): /note="This region represents a CpG dinucleotide"
  misc_feature (61)..(61): /note="Nucleotide may be methylated to form 5-methylcytosine"
ctgctgtgggctcctggcacgaaagggtgaagtccgtctgagtccaccgaccaatggtgacgcgcagcgccttcgcggcgcttcctgattggcgggcatgcagggtgggcgggagggaggag

SEQ ID NO: 1623 - DNA, 122 bp, Homo sapiens
  misc_feature (61)..(62): /note="This region represents a CpG dinucleotide"
  misc_feature (61)..(61): /note="Nucleotide may be methylated to form 5-methylcytosine"
gccctgggcgagcactgagggaagcttggcctcagacatagccagctgccctctggacctcgcagccctgctgtgcccagctcagctgctgtgtcagtgcaaagccagggtgacatcagctg

SEQ ID NO: 1624 - DNA, 122 bp, Homo sapiens
  misc_feature (61)..(62): /note="This region represents a CpG dinucleotide"
  misc_feature (61)..(61): /note="Nucleotide may be methylated to form 5-methylcytosine"
ttagttgacgtgattgtttgtggcaaaaatttcagaaaacagctgtcctggtcaacccaacgacctcattttaatcagaaagggtggagcacctctaggcgcatccctgacacagagcactg

SEQ ID NO: 1625 - DNA, 122 bp, Homo sapiens
  misc_feature (61)..(62): /note="This region represents a CpG dinucleotide"
  misc_feature (61)..(61): /note="Nucleotide may be methylated to form 5-methylcytosine"
aaacctcaacagcttcctcaacacctatattttaaatcctgcttaaatgagattaaaatacggcactctgttaagctgtaaaactggctttttgcttctcagttgagtgttggtttgaatgt

SEQ ID NO: 1626 - DNA, 122 bp, Homo sapiens
  misc_feature (61)..(62): /note="This region represents a CpG dinucleotide"
  misc_feature (61)..(61): /note="Nucleotide may be methylated to form 5-methylcytosine"
ccaagggaagctcaggacatgaggcacaggcagcagagaagggcttggaagtttcacaaacgtgtgtggatttttaaaatcttagcctctgacattcagagcttgtctttctattttttaaa

SEQ ID NO: 1627 - DNA, 122 bp, Homo sapiens
  misc_feature (61)..(62): /note="This region represents a CpG dinucleotide"
  misc_feature (61)..(61): /note="Nucleotide may be methylated to form 5-methylcytosine"
tggagaaaaggtttgagattcagaagtacgtgaccaagccggaccgaaagcagctggcggcgatgctgggcctcacggacgcacaggtaaggcagttctggctccagcgcacagcgccctcg

SEQ ID NO: 1628 - DNA, 122 bp, Homo sapiens
  misc_feature (61)..(62): /note="This region represents a CpG dinucleotide"
  misc_feature (61)..(61): /note="Nucleotide may be methylated to form 5-methylcytosine"
accacgcccagcccacactggtaaattctataatcattagttgtatggaaaagtacctagcgcattgttgttgcacaatatattttaagtgaatgaatgagtctccagtgtaaatacatgaa

SEQ ID NO: 1629 - DNA, 122 bp, Homo sapiens
  misc_feature (61)..(62): /note="This region represents a CpG dinucleotide"
  misc_feature (61)..(61): /note="Nucleotide may be methylated to form 5-methylcytosine"
ggacttgattagcagccctgaagggcggtagcagttcccttactcattgaatgtatctggcgctaaaccctcagctggaactgcgagccctagctgtatttcaggtgtttcttactctactg

SEQ ID NO: 1630 - DNA, 122 bp, Homo sapiens
  misc_feature (61)..(62): /note="This region represents a CpG dinucleotide"
  misc_feature (61)..(61): /note="Nucleotide may be methylated to form 5-methylcytosine"
ctgcaggtccccagccctgccctgcggggaggcagctaaggcccgagaaatcgagcgcagcgacggtgagccggcactgctggggcacccagtacaccctccgcagccgctggcccaggtgc

SEQ ID NO: 1631 - DNA, 122 bp, Homo sapiens
  misc_feature (61)..(62): /note="This region represents a CpG dinucleotide"
  misc_feature (61)..(61): /note="Nucleotide may be methylated to form 5-methylcytosine"
tcttcaaattgtctttgatgcttttagtacaccttgcacttttttcttgctatctagacacgaagtactgagaaacagaaactggtataaataggtcttcagtgatgtggtattaaggtgtt

SEQ ID NO: 1632 - DNA, 122 bp, Homo sapiens
  misc_feature (61)..(62): /note="This region represents a CpG dinucleotide"
  misc_feature (61)..(61): /note="Nucleotide may be methylated to form 5-methylcytosine"
tctcttttcccagctgtcagagacttgactgcgtgctgcaaaacaagtcatactactgtgcgcaaagagtcagtgggcagcaggcgaggcctcgagagacttccctaggcatctcagggtgt

SEQ ID NO: 1633 - DNA, 122 bp, Homo sapiens
  misc_feature (61)..(62): /note="This region represents a CpG dinucleotide"
  misc_feature (61)..(61): /note="Nucleotide may be methylated to form 5-methylcytosine"
agcagtcaaacgtgtttacaggtcagctctgctcctggccaagtggcgttggctggggcacgtggtgagtgggtggtggcggaccaggctcctgtgtcagctgcaggtgctgagctggatct

SEQ ID NO: 1634 - DNA, 122 bp, Homo sapiens
  misc_feature (61)..(62): /note="This region represents a CpG dinucleotide"
  misc_feature (61)..(61): /note="Nucleotide may be methylated to form 5-methylcytosine"
tttatcagatttatacatttaaaatattgtgaatataggatccaacattgctaagattatcgtgaaatgggtaatcatatacactgaaaaaaggagtttaaaattgtatcataattccaatg

SEQ ID NO: 1635 - DNA, 122 bp, Homo sapiens
  misc_feature (61)..(62): /note="This region represents a CpG dinucleotide"
  misc_feature (61)..(61): /note="Nucleotide may be methylated to form 5-methylcytosine"
agagtcatgaaaaaactagggggaggaaagaggtccaaaataatcaaagtaggttattatcgggcctgacatgagcttcttggtgccaggtaataaagaaggaaagaattatagtgattaag

SEQ ID NO: 1636 - DNA, 122 bp, Homo sapiens
  misc_feature (61)..(62): /note="This region represents a CpG dinucleotide"
  misc_feature (61)..(61): /note="Nucleotide may be methylated to form 5-methylcytosine"
ctgggcttcactaccagggtgaaccttcccctaagccaatcaaggtaattccagttgtttcgccagggcctggttaaggaaccagcatgtgatgtaattatggaaatgagaggtgaggtaat

SEQ ID NO: 1637 - DNA, 122 bp, Homo sapiens
  misc_feature (61)..(62): /note="This region represents a CpG dinucleotide"
  misc_feature (61)..(61): /note="Nucleotide may be methylated to form 5-methylcytosine"
agaaaacaccaatcaaatgtgcaatagggtgccttactgttccctgcaagcttgggcagccgcattccaggtgcctttctgctctgtgatcaagatgtgacagtagcctgagtgctggtgcc

SEQ ID NO: 1638 - DNA, 122 bp, Homo sapiens
  misc_feature (61)..(62): /note="This region represents a CpG dinucleotide"
  misc_feature (61)..(61): /note="Nucleotide may be methylated to form 5-methylcytosine"
agggcagcccagcctgtgagtaacactcactctggatttccctggccagagtcctctctgcggaggaacttgggaccagttctttagggagttttgggtgacatcatccctccttactcaag

SEQ ID NO: 1639 - DNA, 122 bp, Homo sapiens
  misc_feature (61)..(62): /note="This region represents a CpG dinucleotide"
  misc_feature (61)..(61): /note="Nucleotide may be methylated to form 5-methylcytosine"
tactcggtttctggttcattgtaatttcatgtacattcacttgagtattactttagcatacgtgtgagcttggctagtgtgatactgtaggcaaatattgtaattctcaaggggaagtttca

SEQ ID NO: 1640 - DNA, 122 bp, Homo sapiens
  misc_feature (61)..(62): /note="This region represents a CpG dinucleotide"
  misc_feature (61)..(61): /note="Nucleotide may be methylated to form 5-methylcytosine"
gatgggcgagagccagctgtccaggatcagcagtaaggatccttttgcttatcactcaggcgctgctggctgccacatgggtgcattctggacctgaatgcctgcgtgtgcatgtgtgcgtg

SEQ ID NO: 1641 - DNA, 122 bp, Homo sapiens
  misc_feature (61)..(62): /note="This region represents a CpG dinucleotide"
  misc_feature (61)..(61): /note="Nucleotide may be methylated to form 5-methylcytosine"
agatctgtgtcatctgatccatcagggtttcttgtccagatgctcaggctgaagaggtaccgtcggtccgaggtcactgcctggcaagcgaaggccatgatggtgggttggatgggtcatag

SEQ ID NO: 1642 - DNA, 122 bp, Homo sapiens
  misc_feature (61)..(62): /note="This region represents a CpG dinucleotide"
  misc_feature (61)..(61): /note="Nucleotide may be methylated to form 5-methylcytosine"
tccagaggtgcagtcagactgcctgggttggctcatgcctgggtctgtcattgtgggcagcgtgaccagcctaaacctcagttttctcttttgtcacctatgtgctaaaaatacttatttct

SEQ ID NO: 1643 - DNA, 122 bp, Homo sapiens
  misc_feature (61)..(62): /note="This region represents a CpG dinucleotide"
  misc_feature (61)..(61): /note="Nucleotide may be methylated to form 5-methylcytosine"
aatagaacatatggcaaaaataatatataaatagtttagtttgttttgttttctcttactcgttaccatgattgtttaatggctgaatctaaataattccttgagttcttatctatgttaat

SEQ ID NO: 1644 - DNA, 122 bp, Homo sapiens
  misc_feature (61)..(62): /note="This region represents a CpG dinucleotide"
  misc_feature (61)..(61): /note="Nucleotide may be methylated to form 5-methylcytosine"
gtaggctttttaccatgtatcactgctattcctttttttttttttttgagaggaagaaggcgtgagttgacctggtattactcacccaaaagtgaggcattggggatatttatattcagcaa

SEQ ID NO: 1645 - DNA, 122 bp, Homo sapiens
  misc_feature (61)..(62): /note="This region represents a CpG dinucleotide"
  misc_feature (61)..(61): /note="Nucleotide may be methylated to form 5-methylcytosine"
tttgatggtcttcccttcaagaggtggagcttaattcttcttagtatgggctggacctggcgacatgcttctaaggattgtaattcttcagcagaagtgatggtttgtgacactgaaaactt

SEQ ID NO: 1646 - DNA, 122 bp, Homo sapiens
  misc_feature (61)..(62): /note="This region represents a CpG dinucleotide"
  misc_feature (61)..(61): /note="Nucleotide may be methylated to form 5-methylcytosine"
ttcatgacaaagttacagatgacgtaacatcttaggacatttcataacccccttagagtccgggaaaatcttaaaaatcaccaactgcaagtctctgtggtggagctctctctgattttctc

SEQ ID NO: 1647 - DNA, 122 bp, Homo sapiens
  misc_feature (61)..(62): /note="This region represents a CpG dinucleotide"
  misc_feature (61)..(61): /note="Nucleotide may be methylated to form 5-methylcytosine"
ggctccaggacacagctgagccggcggtcagagcgagacctgcagcagagacgacggaggcggaagcatctcgatccgggaggcggcggcgtggggagccggggccgcctgggatgttcagt

SEQ ID NO: 1648 - DNA, 122 bp, Homo sapiens
  misc_feature (61)..(62): /note="This region represents a CpG dinucleotide"
  misc_feature (61)..(61): /note="Nucleotide may be methylated to form 5-methylcytosine"
gtggtctgagtatggcacggagtttccattattaatggcccttgggtagtcctccagggccgtgggtctctcctgagagggctctgagctgcggctaagcctggccatggtgtgtcgggaag

SEQ ID NO: 1649 - DNA, 122 bp, Homo sapiens
  misc_feature (61)..(62): /note="This region represents a CpG dinucleotide"
  misc_feature (61)..(61): /note="Nucleotide may be methylated to form 5-methylcytosine"
ctctgtcgctcaggctggagttcagtggcctaatcatgactcatggttcactgcgaccttcgcctcccaggctcaagcaatcatcccacctcaacctcccaagtagctgggaatacaggcac

SEQ ID NO: 1650 - DNA, 122 bp, Homo sapiens
  misc_feature (61)..(62): /note="This region represents a CpG dinucleotide"
  misc_feature (61)..(61): /note="Nucleotide may be methylated to form 5-methylcytosine"
tggctcacaccagtgagtccactctcaaagcccacccttgttcttcccactggaatcacacgaccattggtacaatgccatgggctgtaaaatgccattgcttcagcattaaaagagttaac

SEQ ID NO: 1651 - DNA, 122 bp, Homo sapiens
  misc_feature (61)..(62): /note="This region represents a CpG dinucleotide"
  misc_feature (61)..(61): /note="Nucleotide may be methylated to form 5-methylcytosine"
aatcaatccccaaaaccagtgagcctgagtgcaccagggaatccctcccaccatctccagcgatgcttccactcagggactttctgtagggtgaagaacaggggattcaattccacaagtgt

SEQ ID NO: 1652 - DNA, 122 bp, Homo sapiens
  misc_feature (61)..(62): /note="This region represents a CpG dinucleotide"
  misc_feature (61)..(61): /note="Nucleotide may be methylated to form 5-methylcytosine"
cagctgcggctgagacggaggtagccccccagaaccaagatctcctcggcagttgggtaccgcttcttcccagcccccgggactgcagcatcaactgtggctggagaggttggggtggctgg

SEQ ID NO: 1653 - DNA, 122 bp, Homo sapiens
  misc_feature (61)..(62): /note="This region represents a CpG dinucleotide"
  misc_feature (61)..(61): /note="Nucleotide may be methylated to form 5-methylcytosine"
acaagtttgctgcctggatgaatcttctctgattccccacccctgcagggagttgattgccgcaaccccatctgccctcttgcacaaggggcttctgtgacagtgttctccctgctcctaat

SEQ ID NO: 1654 - DNA, 122 bp, Homo sapiens
  misc_feature (61)..(62): /note="This region represents a CpG dinucleotide"
  misc_feature (61)..(61): /note="Nucleotide may be methylated to form 5-methylcytosine"
ttgcgttagtccctaaggcgactcagacagaaacaaagggaaggagagaagccaggcagacggaggagagcagagaagttcttggtgcaccctgaggaggaaagaaagcccttttcctgggg

SEQ ID NO: 1655 - DNA, 122 bp, Homo sapiens
  misc_feature (61)..(62): /note="This region represents a CpG dinucleotide"
  misc_feature (61)..(61): /note="Nucleotide may be methylated to form 5-methylcytosine"
aggattttgaaatcaagaaacacacaaggcattgagtaagaaacaggctaattataacttcgagacacaagaaaaacaataagtatatgcaaatgtgtcaggttggtagaatctttggaatg

SEQ ID NO: 1656 - DNA, 122 bp, Homo sapiens
  misc_feature (61)..(62): /note="This region represents a CpG dinucleotide"
  misc_feature (61)..(61): /note="Nucleotide may be methylated to form 5-methylcytosine"
cagctgtagaaggtccaattcagtcattcattaccaggcgcacatataatgtggttaatccgtcctaattgaaggttttttactgcttttgctttttctgcaaacttccgtagactcatcag

SEQ ID NO: 1657 - DNA, 122 bp, Homo sapiens
  misc_feature (61)..(62): /note="This region represents a CpG dinucleotide"
  misc_feature (61)..(61): /note="Nucleotide may be methylated to form 5-methylcytosine"
gggacctgcctgttagctaggcatgccacattaactgcagctcacatgtagtgccaggggcgaccaggctgttgcttaacaaggatgcataatagctaattgcattttaggccattggtttg

SEQ ID NO: 1658 - DNA, 122 bp, Homo sapiens
  misc_feature (61)..(62): /note="This region represents a CpG dinucleotide"
  misc_feature (61)..(61): /note="Nucleotide may be methylated to form 5-methylcytosine"
atagcaacgtatgtctcatgggttactactgtcagagtcaaatgaggtaattgtaggtaacgccctttgcacagtgtcaggcacaccatgagagctggaaaagcgttggcttttaacattcc

SEQ ID NO: 1659 - DNA, 122 bp, Homo sapiens
  misc_feature (61)..(62): /note="This region represents a CpG dinucleotide"
  misc_feature (61)..(61): /note="Nucleotide may be methylated to form 5-methylcytosine"
tgatgaaggtaatcctcagatcattctttgatctctgttatgaactaaagttccatgactcggtgattctgcatgtcagcagagtagtaaaacactatttcaagctttaggtgctcatttgg

SEQ ID NO: 1660 - DNA, 122 bp, Homo sapiens
  misc_feature (61)..(62): /note="This region represents a CpG dinucleotide"
  misc_feature (61)..(61): /note="Nucleotide may be methylated to form 5-methylcytosine"
gggctgagtgagacctcgttgccaaaaaaaaaaaaaacaaaaaaacctggggagagagagcgaaagctactcaaggggccacaaatgtaattatgccaaaattcaaatgatgattagtcagt

SEQ ID NO: 1661 - DNA, 122 bp, Homo sapiens
  misc_feature (61)..(62): /note="This region represents a CpG dinucleotide"
  misc_feature (61)..(61): /note="Nucleotide may be methylated to form 5-methylcytosine"
gagctcgccgctccagctgtgcctccagcatcctcttttcctcctccagccgactccgctcgccttccagctcctcgaccttcaacctgcaaggacagcaagacggtgaccaggtgtccgag

SEQ ID NO: 1662 - DNA, 122 bp, Homo sapiens
  misc_feature (61)..(62): /note="This region represents a CpG dinucleotide"
  misc_feature (61)..(61): /note="Nucleotide may be methylated to form 5-methylcytosine"
actcaacaaagagaggccctgaagaattaagtgggctctctgctgcctctggcttcatgtcgcctgtatttaaatcatgatccctttcatcatgttgttccaacaagcatattttccagaga

SEQ ID NO: 1663 - DNA, 122 bp, Homo sapiens
  misc_feature (61)..(62): /note="This region represents a CpG dinucleotide"
  misc_feature (61)..(61): /note="Nucleotide may be methylated to form 5-methylcytosine"
ggacaaaacctcagcgtgcaagcctggcaggctggcttccttctagcatgactaggaatgcgatggcttacaatgttcagcaaggtgtgcttctgtgccagctgtgtctagcagatactgcc

SEQ ID NO: 1664 - DNA, 122 bp, Homo sapiens
  misc_feature (61)..(62): /note="This region represents a CpG dinucleotide"
  misc_feature (61)..(61): /note="Nucleotide may be methylated to form 5-methylcytosine"
tactgaataagagactctgggggtgggcccagcaatctgtgtcttcacaagccctcaggacgttgtgactcaggctaaagtttgggaaccactgccctcaaccacactaactcagactacgc

SEQ ID NO: 1665 - DNA, 122 bp, Homo sapiens
  misc_feature (61)..(62): /note="This region represents a CpG dinucleotide"
  misc_feature (61)..(61): /note="Nucleotide may be methylated to form 5-methylcytosine"
aagggagtaatctagccactctggctttctttgcatgcaaaatgtaacagttccttctttcgtctttcagataaaggcagtcttggggaggggaagagaaaagtgcctggcttctccaaatt

SEQ ID NO: 1666 - DNA, 122 bp, Homo sapiens
  misc_feature (61)..(62): /note="This region represents a CpG dinucleotide"
  misc_feature (61)..(61): /note="Nucleotide may be methylated to form 5-methylcytosine"
gaatcccttaacttccctcagcttgtctcaaccacagttttctcatgggagtgttagacacgatgattgctcacccttgtgggtggatctgaagtttgccactaacactttagcataatcct

SEQ ID NO: 1667 - DNA, 122 bp, Homo sapiens
  misc_feature (61)..(62): /note="This region represents a CpG dinucleotide"
  misc_feature (61)..(61): /note="Nucleotide may be methylated to form 5-methylcytosine"
gaaagtagctttaatttgcatattccgataagaatttagtgactcattcattcgttggtacgcctaagtgacaaatggcattattgccggctgtgttgactggctgcctatcagggtgtgat

SEQ ID NO: 1668 - DNA, 122 bp, Homo sapiens
  misc_feature (61)..(62): /note="This region represents a CpG dinucleotide"
  misc_feature (61)..(61): /note="Nucleotide may be methylated to form 5-methylcytosine"
ccggagctcaagcgatctgcccacctcccgaaatgttgggactagaggtgtgagccaccacgccaggccaatttgaactatatttgaaaaagagggttccattgtttaaaaataagtcttgg

SEQ ID NO: 1669 - DNA, 122 bp, Homo sapiens
  misc_feature (61)..(62): /note="This region represents a CpG dinucleotide"
  misc_feature (61)..(61): /note="Nucleotide may be methylated to form 5-methylcytosine"
ggtgccctggcccagcctccttccggttggggttggacccgccctggcagccaggttttgcgtcacctgccccacccgccctgtaacctacttgcccaactgctatcccggtggccgtgagg

SEQ ID NO: 1670 - DNA, 122 bp, Homo sapiens
  misc_feature (61)..(62): /note="This region represents a CpG dinucleotide"
  misc_feature (61)..(61): /note="Nucleotide may be methylated to form 5-methylcytosine"
ctttcaatcaatcctccacactgaagccagcatttgtttttaaaccagcaaacttgattacgccactcctctgactcaaaccttccagtggcatctcatgatcttcagtataaaaatcagag

SEQ ID NO: 1671 - DNA, 122 bp, Homo sapiens
  misc_feature (61)..(62): /note="This region represents a CpG dinucleotide"
  misc_feature (61)..(61): /note="Nucleotide may be methylated to form 5-methylcytosine"
ccggtggataagtaaccaaccaagatatcattattactagccttcttaaagtgcccattacgtacccagaacagatgaaaaaggtccttccttcagaaagttaatattggaaggaacaggca

SEQ ID NO: 1672 - DNA, 122 bp, Homo sapiens
  misc_feature (61)..(62): /note="This region represents a CpG dinucleotide"
  misc_feature (61)..(61): /note="Nucleotide may be methylated to form 5-methylcytosine"
atcgggcggcgggggctgcagagccttcatctcttcctccgtcccgggatgtcggagagacggcagcccagcctccgccaccgcaaagctgcttaacgggcagcgcgagtccctcgggcacc

SEQ ID NO: 1673 - DNA, 122 bp, Homo sapiens
  misc_feature (61)..(62): /note="This region represents a CpG dinucleotide"
  misc_feature (61)..(61): /note="Nucleotide may be methylated to form 5-methylcytosine"
ttccctcccttgttggtaatgcttgaaattagctcttacttctcttcttcctcctttactcgccatcccaggtcattcatcaggtcctgctaggtctttgattttcttgaaagggccttctt

SEQ ID NO: 1674 - DNA, 122 bp, Homo sapiens
  misc_feature (61)..(62): /note="This region represents a CpG dinucleotide"
  misc_feature (61)..(61): /note="Nucleotide may be methylated to form 5-methylcytosine"
caacacaaagagaaacagaaagagaaactctctgttagagaggaaggcgcgggttccaggcgggcattttgctcttggctacaaactgcaccgccctgggaggggagggtagtgggagggga

SEQ ID NO: 1675 - DNA, 122 bp, Homo sapiens
  misc_feature (61)..(62): /note="This region represents a CpG dinucleotide"
  misc_feature (61)..(61): /note="Nucleotide may be methylated to form 5-methylcytosine"
acgccaccacactccagcctgcgcgaccgtgagactccatctcaaaaaaaaagaaacgaacggctggttcctgtttacaccaggcacattcctgtagtgttgctcaaggtcaggagggattt

SEQ ID NO: 1676 - DNA, 122 bp, Homo sapiens
  misc_feature (61)..(62): /note="This region represents a CpG dinucleotide"
  misc_feature (61)..(61): /note="Nucleotide may be methylated to form 5-methylcytosine"
tatgggaacttaatctgactctgccattaccagcatggggacttgagcaagagttgctaccgtgaatggggccctcttcctcccctggttactcatctgtgaaataattggattaggcagca

SEQ ID NO: 1677 - DNA, 122 bp, Homo sapiens
  misc_feature (61)..(62): /note="This region represents a CpG dinucleotide"
  misc_feature (61)..(61): /note="Nucleotide may be methylated to form 5-methylcytosine"
acacacggtcacggcgtccccaccggagcacggtcacctgtgcctcatcagccacgtggccgccacagggaagagaactggatcgcaaggcaggtgtttcaagtctggtgaaacccagctct

SEQ ID NO: 1678 - DNA, 122 bp, Homo sapiens
  misc_feature (61)..(62): /note="This region represents a CpG dinucleotide"
  misc_feature (61)..(61): /note="Nucleotide may be methylated to form 5-methylcytosine"
gagaggaggagaggtggagggggtgggtgccccaggggaagttggtgtggccgggaggagcgtggtaatcagcccggtgcatctgcctactcagcagcagcagtggctgcagtgtggggtac

SEQ ID NO: 1679 - DNA, 122 bp, Homo sapiens
  misc_feature (61)..(62): /note="This region represents a CpG dinucleotide"
  misc_feature (61)..(61): /note="Nucleotide may be methylated to form 5-methylcytosine"
tatgtgaagaagaaacagacttaattcaggttccttcaggaagtataactaaggtcaatacgtgaaagggagggagcagactgtagtagtaatctaaaaacatttctggcaaccaagacctg

SEQ ID NO: 1680 - DNA, 122 bp, Homo sapiens
  misc_feature (61)..(62): /note="This region represents a CpG dinucleotide"
  misc_feature (61)..(61): /note="Nucleotide may be methylated to form 5-methylcytosine"
gatcttcaagatctgctgattgccaaagaggagcaagaagacctcttgagaaagcgagagcgtgaactcaccgccctgaagggagccctgaaagaagaggtttccagccatgatcaggagat

SEQ ID NO: 1681 - DNA, 122 bp, Homo sapiens
  misc_feature (61)..(62): /note="This region represents a CpG dinucleotide"
  misc_feature (61)..(61): /note="Nucleotide may be methylated to form 5-methylcytosine"
ccctcttgggggaacttaatgcccaaaacatcagagccaggcactggacaagcctttgtccgcctcacggctttaaccgtgctactcagcattcttgctgtgaccaagttttaccagggcaa

SEQ ID NO: 1682 - DNA, 122 bp, Homo sapiens
  misc_feature (61)..(62): /note="This region represents a CpG dinucleotide"
  misc_feature (61)..(61): /note="Nucleotide may be methylated to form 5-methylcytosine"
cggggccaagaaacccgaggggccactaagctgcagagaagggttcttcagggaaggggccgctctaactctctccagccccagccgcactttcccctggcgtctcacctccagaaggacag

SEQ ID NO: 1683 - DNA, 122 bp, Homo sapiens
  misc_feature (61)..(62): /note="This region represents a CpG dinucleotide"
  misc_feature (61)..(61): /note="Nucleotide may be methylated to form 5-methylcytosine"
agacctagccatgctaaactggacaaacagctcctgggctgccatttgctgaggcgcatgcgtgtgcttttccttctcttctccacaggaaaaggtgagagatggaggaggcaattttcagt

SEQ ID NO: 1684 - DNA, 122 bp, Homo sapiens
  misc_feature (61)..(62): /note="This region represents a CpG dinucleotide"
  misc_feature (61)..(61): /note="Nucleotide may be methylated to form 5-methylcytosine"
gtttcctctttcggctgttgctgccctgacacttgcacatttcttttagttggatatacacggaagtggaattgctggatcatagattatgcatatttgtgatttgtttgctttttcattta

SEQ ID NO: 1685 - DNA, 122 bp, Homo sapiens
  misc_feature (61)..(62): /note="This region represents a CpG dinucleotide"
  misc_feature (61)..(61): /note="Nucleotide may be methylated to form 5-methylcytosine"
gataatgaggcagacagagaggttatgtgactcacttggggccgcccagctggttagtgacgggcccagagcaccctccagagacactgtcctgaaccatcgtgctgtgctgccacccactg

SEQ ID NO: 1686 - DNA, 122 bp, Homo sapiens
  misc_feature (61)..(62): /note="This region represents a CpG dinucleotide"
  misc_feature (61)..(61): /note="Nucleotide may be methylated to form 5-methylcytosine"
aatgagcactgtattagtgcttgatattcaagattaatgaatgagccctgtccctgccctcgaggaacagggacaaacaggaagctcccaaacactgcctggtgtgaaaggctctgtgatgg

SEQ ID NO: 1687 - DNA, 122 bp, Homo sapiens
  misc_feature (61)..(62): /note="This region represents a CpG dinucleotide"
  misc_feature (61)..(61): /note="Nucleotide may be methylated to form 5-methylcytosine"
tccagggggcgcccctgtcctccttcgtctctatcaactccaacactggcgtcctatacgcgctgagatccttcgactacgagcaatttagagacttaaagctactggtgacagccagcgac

SEQ ID NO: 1688 - DNA, 122 bp, Homo sapiens
  misc_feature (61)..(62): /note="This region represents a CpG dinucleotide"
  misc_feature (61)..(61): /note="Nucleotide may be methylated to form 5-methylcytosine"
tgggttgggctcagggccagtgaactagggtggcacatgacctagagacacaccagcttgcgtggctaaggaagtgcttgcattagccgtgccctaaccccagggagtgaagctcatagcaa

SEQ ID NO: 1689 - DNA, 122 bp, Homo sapiens
  misc_feature (61)..(62): /note="This region represents a CpG dinucleotide"
  misc_feature (61)..(61): /note="Nucleotide may be methylated to form 5-methylcytosine"
tgaacacccttccttcagaaaaggagagtcctttgttctctgcaaattcacgcagcacaacgagtggaggaaatcacaggcctaagccaggcattaacatccacgaaaagggacagggcaaa

SEQ ID NO: 1690 - DNA, 122 bp, Homo sapiens
  misc_feature (61)..(62): /note="This region represents a CpG dinucleotide"
  misc_feature (61)..(61): /note="Nucleotide may be methylated to form 5-methylcytosine"
taatcatactgtttgtgattcatgtcaaatactgcagcatacacatccatggttaatacacgagcaccatttgttattgactgatgtgaggtggttggtctttgttaaattcaaaaatggaa

SEQ ID NO: 1691 - DNA, 122 bp, Homo sapiens
  misc_feature (61)..(62): /note="This region represents a CpG dinucleotide"
  misc_feature (61)..(61): /note="Nucleotide may be methylated to form 5-methylcytosine"
attctaagtcaaggatcctgtgttgatttattactcggtaaaagtgtcatcatttgacaccgtcataacagtgactaaacacatctttgccacacctaatatgtacagcaaaccagaaagaa

SEQ ID NO: 1692 - DNA, 122 bp, Homo sapiens
  misc_feature (61)..(62): /note="This region represents a CpG dinucleotide"
  misc_feature (61)..(61): /note="Nucleotide may be methylated to form 5-methylcytosine"
aagttttactagacaaaagcaaacaatcccagggtctttcatgtgtctgtactgccacagcgtcaccccctactgccttcttgctttgtggtttgttgggagaggagagaagcatgcagggc

SEQ ID NO: 1693 - DNA, 122 bp, Homo sapiens
  misc_feature (61)..(62): /note="This region represents a CpG dinucleotide"
  misc_feature (61)..(61): /note="Nucleotide may be methylated to form 5-methylcytosine"
agttggcttcttctgttgtgttcttagcttccaaaatagtagtctctcctcagagccagacgcgcaatgccatcatgttaatgaggtgcctcatgtgcttcaatagccactgactgatggta

SEQ ID NO: 1694 - DNA, 122 bp, Homo sapiens
  misc_feature (61)..(62): /note="This region represents a CpG dinucleotide"
  misc_feature (61)..(61): /note="Nucleotide may be methylated to form 5-methylcytosine"
caaactctgtgcaggaggaagtggccagagagggaaatcagttgccaatggataaacagccggggcccagggaccaaagttcttatttacacagcctcccagtgtttacccaggaagtgagg

SEQ ID NO: 1695 - DNA, 122 bp, Homo sapiens
  misc_feature (61)..(62): /note="This region represents a CpG dinucleotide"
  misc_feature (61)..(61): /note="Nucleotide may be methylated to form 5-methylcytosine"
tgggctggaaggctcggaagcaggtggaaccggtcaagcagcgtgtttttgttggggtgacgttatgtaggggctgcacagtcatggggacatcgtgaagctggcaggagggtggctgtgga

SEQ ID NO: 1696 - DNA, 122 bp, Homo sapiens
  misc_feature (61)..(62): /note="This region represents a CpG dinucleotide"
  misc_feature (61)..(61): /note="Nucleotide may be methylated to form 5-methylcytosine"
gctggtggaatggatttaaaaacaagatccaaccacatgctgcatacaaaaaacccacctcgctgataaagacatttacaaagtaaaggactggaaaaaaatattccatgcaaacagaaacc

SEQ ID NO: 1697 - DNA, 122 bp, Homo sapiens
  misc_feature (61)..(62): /note="This region represents a CpG dinucleotide"
  misc_feature (61)..(61): /note="Nucleotide may be methylated to form 5-methylcytosine"
ttagtctcgtgtgacagtggctttaaagcatgtccacaaattctttgacttccccttttgcgaggtggagctcacttcccactgctgagtgtgggagctggctgcttctgatgaagagtggc

SEQ ID NO: 1698 - DNA, 122 bp, Homo sapiens
  misc_feature (61)..(62): /note="This region represents a CpG dinucleotide"
  misc_feature (61)..(61): /note="Nucleotide may be methylated to form 5-methylcytosine"
acaatcaaaaaagttatgtcccagcaaaaccacagacatgaatactcacagcaatttattcgtaataaccaaaaacaggaaacaaccaaggtgtcctacaataagtaaaaaattaaactggt

SEQ ID NO: 1699 - DNA, 122 bp, Homo sapiens
  misc_feature (61)..(62): /note="This region represents a CpG dinucleotide"
  misc_feature (61)..(61): /note="Nucleotide may be methylated to form 5-methylcytosine"
ggctcagagttctcttcccatatttggtctggctgttttctgtttgtgtgttcattgtctcgcaatgtcaaagctgccttcgtgctgcaggtgtgggtgcaagcagatgttttcaaaccatc

SEQ ID NO: 1700 - DNA, 122 bp, Homo sapiens
  misc_feature (61)..(62): /note="This region represents a CpG dinucleotide"
  misc_feature (61)..(61): /note="Nucleotide may be methylated to form 5-methylcytosine"
tttcatgcccacacacacacaggactgtgcaacacggtccacataaagcatgcagatttacggtggtcagaagcctagcataccaaccactgcttagcctgagttagtagcttaatcatgct

SEQ ID NO: 1701 - DNA, 122 bp, Homo sapiens
  misc_feature (61)..(62): /note="This region represents a CpG dinucleotide"
  misc_feature (61)..(61): /note="Nucleotide may be methylated to form 5-methylcytosine"
aactctcttctcctggacgccatctccccggagctgggggcctcggctccgcaacggctgcgaagtttcaccgatgccgcaggcctaaggccacccttggtcccaaacccagcgccgggacg

SEQ ID NO: 1702 - DNA, 122 bp, Homo sapiens
  misc_feature (61)..(62): /note="This region represents a CpG dinucleotide"
  misc_feature (61)..(61): /note="Nucleotide may be methylated to form 5-methylcytosine"
agaaaatctcttatctctgtagtagtttgagtaacttctcttatcagtaaagctgtcttacgcagctgtggttatgtatctatgcaagcacaaagcaccgccttttttgtttgcataactgt

SEQ ID NO: 1703 - DNA, 122 bp, Homo sapiens
  misc_feature (61)..(62): /note="This region represents a CpG dinucleotide"
  misc_feature (61)..(61): /note="Nucleotide may be methylated to form 5-methylcytosine"
aatgtggaagctgaattcatatggggtgtctgtgaggtggggcagaaggaagctgggtgacgatagtggaaatgttggttgggccagattttgaacagccttgaatgacattatgaagtaat

SEQ ID NO: 1704 - DNA, 122 bp, Homo sapiens
  misc_feature (61)..(62): /note="This region represents a CpG dinucleotide"
  misc_feature (61)..(61): /note="Nucleotide may be methylated to form 5-methylcytosine"
ctttcataaaataaaaccaccctagtactaatccaccagtgcattcagtacatgtgattgcgtaattgttttaccgcacctttccagagtattatcctgtttttccctcgaatttcttgcag

SEQ ID NO: 1705 - DNA, 122 bp, Homo sapiens
  misc_feature (61)..(62): /note="This region represents a CpG dinucleotide"
  misc_feature (61)..(61): /note="Nucleotide may be methylated to form 5-methylcytosine"
aacacagtcaaaacttctcatggtagcctaacaatcccttcctgatctggatcgtgagtacgtatgtgtcctcatctcctaatctacaaccccctgctcactctgctctgagtacaatggcc

SEQ ID NO: 1706 - DNA, 122 bp, Homo sapiens
  misc_feature (61)..(62): /note="This region represents a CpG dinucleotide"
  misc_feature (61)..(61): /note="Nucleotide may be methylated to form 5-methylcytosine"
acagggaaatgaccggtggtgcggtaacctgcgtggctcctgatagcgtttggaagaacgcgggggagactgaagagcaactgggaactcggatctgaagccctgctggggtcgcgcggctt

SEQ ID NO: 1707 - DNA, 122 bp, Homo sapiens
  misc_feature (61)..(62): /note="This region represents a CpG dinucleotide"
  misc_feature (61)..(61): /note="Nucleotide may be methylated to form 5-methylcytosine"
gtgagtgaggctcaaagagtaccagctaattgttaaatcctgtggcaagtcactctgtgacgtgagtcattactcactgacttttttgaaaccaaatgtttctgtcttagacctgctcaaag

SEQ ID NO: 1708 - DNA, 122 bp, Homo sapiens
  misc_feature (61)..(62): /note="This region represents a CpG dinucleotide"
  misc_feature (61)..(61): /note="Nucleotide may be methylated to form 5-methylcytosine"
acacaggtaggattttctgggaattagggcttttagtgggtggagccagggcagggagaacggttgtagagggtgaagcactaacacaagagttaaaccactgagcacagtgttggctcatg

SEQ ID NO: 1709 - DNA, 122 bp, Homo sapiens
  misc_feature (61)..(62): /note="This region represents a CpG dinucleotide"
  misc_feature (61)..(61): /note="Nucleotide may be methylated to form 5-methylcytosine"
ctgctggtgaaatacctacaggaaggaatctagcattactcagctcctgaaaacctcttccgcccttgcagaagtgaaaggtctgctacagcggaagcctggtaattcaagattatactctc

SEQ ID NO: 1710 - DNA, 122 bp, Homo sapiens
  misc_feature (61)..(62): /note="This region represents a CpG dinucleotide"
  misc_feature (61)..(61): /note="Nucleotide may be methylated to form 5-methylcytosine"
accttctgctctgccctcaagtggtggaagggcaaaataaattaactctgtgtcattacacgatagaagagaaggacaggccaggaagctctctgaagactctttataaggtcttattcatg

SEQ ID NO: 1711 - DNA, 122 bp, Homo sapiens
  misc_feature (61)..(62): /note="This region represents a CpG dinucleotide"
  misc_feature (61)..(61): /note="Nucleotide may be methylated to form 5-methylcytosine"
cccccaagcacagcacgccattgcagcaggccccttcctgaagctgcgcccccatgaatacgccctgtacccattctgagaatcaggtctgatattatgggaagaaaatgtgtgcctaggca

SEQ ID NO: 1712 - DNA, 122 bp, Homo sapiens
  misc_feature (61)..(62): /note="This region represents a CpG dinucleotide"
  misc_feature (61)..(61): /note="Nucleotide may be methylated to form 5-methylcytosine"
caaatgatgacatagaattcttcccaggcctagatatgcaaacagaagcagtgcaagggccgtgtacacaatgacagtgtgggtgcagataagacagtaatttcccggagagctttggttga

SEQ ID NO: 1713 - DNA, 122 bp, Homo sapiens
  misc_feature (61)..(62): /note="This region represents a CpG dinucleotide"
  misc_feature (61)..(61): /note="Nucleotide may be methylated to form 5-methylcytosine"
cttgggattggtgcagacttatcagctctgcttatttcacactgaccagtgtaggactgacgttggaccatggtcacacctccctgtaagggaggttgggaagtatcatttggccatgtgcc

SEQ ID NO: 1714 - DNA, 122 bp, Homo sapiens
  misc_feature (61)..(62): /note="This region represents a CpG dinucleotide"
  misc_feature (61)..(61): /note="Nucleotide may be methylated to form 5-methylcytosine"
cccaaggctgccaggaggtggaggaggatcgtgaggccagtcctctaggcttgaatcgcacgtcccagagagagcgccaggatgtgctgagaaaatagccagcacatcctgtggtctttgcg

SEQ ID NO: 1715 - DNA, 122 bp, Homo sapiens
  misc_feature (61)..(62): /note="This region represents a CpG dinucleotide"
  misc_feature (61)..(61): /note="Nucleotide may be methylated to form 5-methylcytosine"
gttgtggccgagtgatgtggacaagctgtcacccactgacaacctgccgcgggggagccgcgcccacatcaccctcggctgtgcagctgacgtagaggccgtgcagacgggccttgacctct

SEQ ID NO: 1716 - DNA, 122 bp, Homo sapiens
  misc_feature (61)..(62): /note="This region represents a CpG dinucleotide"
  misc_feature (61)..(61): /note="Nucleotide may be methylated to form 5-methylcytosine"
tttccaggacaaaggtcattctttgctaagcccagaatgatccccaggatagttaatcaccgtaagaaggcacagataaaaacttttttctgtgagctactacttacatttcaccaaattca

SEQ ID NO: 1717 - DNA, 122 bp, Homo sapiens
  misc_feature (61)..(62): /note="This region represents a CpG dinucleotide"
  misc_feature (61)..(61): /note="Nucleotide may be methylated to form 5-methylcytosine"
acttgccttcctggtcaccacctgtacatatttcccttgaattgctgggccacagggctacgtatcttcaactttcttaggtaactccaaactgtttttcaaggtgattgcagcaccttact

SEQ ID NO: 1718 - DNA, 122 bp, Homo sapiens
  misc_feature (61)..(62): /note="This region represents a CpG dinucleotide"
  misc_feature (61)..(61): /note="Nucleotide may be methylated to form 5-methylcytosine"
acaggacatgctgctgatttgcagagctgacctcagctgtaagcactttgtcttctgcagcgtagaaatgtagtgacctacaagtgtcccatgcccaagttgggtgcattattttttggtga

SEQ ID NO: 1719 - DNA, 122 bp, Homo sapiens
  misc_feature (61)..(62): /note="This region represents a CpG dinucleotide"
  misc_feature (61)..(61): /note="Nucleotide may be methylated to form 5-methylcytosine"
tctccacacccagacaccctttccagggagctagaaaacatcacagttggccctatagaccgagcctctaattggaaatagaatatccaattatttacacaagactgtacagcaaacagttc

SEQ ID NO: 1720 - DNA, 122 bp, Homo sapiens
  misc_feature (61)..(62): /note="This region represents a CpG dinucleotide"
  misc_feature (61)..(61): /note="Nucleotide may be methylated to form 5-methylcytosine"
gcaccgcctgccgctccagctccgccagcacgtgctgctctgagggcggggcgacggagacgcgggtgagggcccaagggcaccgcccctgagaaccacccccaacgcgaggccacccgctt

SEQ ID NO: 1721 - DNA, 122 bp, Homo sapiens
  misc_feature (61)..(62): /note="This region represents a CpG dinucleotide"
  misc_feature (61)..(61): /note="Nucleotide may be methylated to form 5-methylcytosine"
ctactgtactcagtcaccacccctctcttacaagcctactttaaattggaaagcctgtctcgcttgtttcggtgtggtgagtgaaatggagaaggctaaactttttcttcccacatgctcac

SEQ ID NO: 1722 - DNA, 122 bp, Homo sapiens
  misc_feature (61)..(62): /note="This region represents a CpG dinucleotide"
  misc_feature (61)..(61): /note="Nucleotide may be methylated to form 5-methylcytosine"
gtttgagcctcagggcccttgagctgtcacccatacccggccatccccaaagcctcagaacgggcaggggtcgctgccaaccaccaggcttcctaattacatatgaaactgtcattcccagc

SEQ ID NO: 1723 - DNA, 122 bp, Homo sapiens
  misc_feature (61)..(62): /note="This region represents a CpG dinucleotide"
  misc_feature (61)..(61): /note="Nucleotide may be methylated to form 5-methylcytosine"
ccccagaattgggaagtgcccagctttgggccactgtgatccctgggtctttcctgtgcgcgtagtctcatgccgccttccaccctagtcctgtgtcctgtgccccggttcaggatactaca

SEQ ID NO: 1724 - DNA, 122 bp, Homo sapiens
  misc_feature (61)..(62): /note="This region represents a CpG dinucleotide"
  misc_feature (61)..(61): /note="Nucleotide may be methylated to form 5-methylcytosine"
cctgcctgctaagtcaccaagtcacctgggccagtcatttccgcagcctgggcctctgtgcgaccaggagtgaccctccctaatgggatttagctgccggcacatcttgggccccatataaa

SEQ ID NO: 1725 - DNA, 122 bp, Homo sapiens
  misc_feature (61)..(62): /note="This region represents a CpG dinucleotide"
  misc_feature (61)..(61): /note="Nucleotide may be methylated to form 5-methylcytosine"
ctgcaatgctttaatcaagtcctgcctcttgatgcgtcactttcatcttgagcaactcaacggacattcagtcctcaagatctgcatggagcaaagtttgagggtaagccccatctctcaca

SEQ ID NO: 1726 - DNA, 122 bp, Homo sapiens
  misc_feature (61)..(62): /note="This region represents a CpG dinucleotide"
  misc_feature (61)..(61): /note="Nucleotide may be methylated to form 5-methylcytosine"
atggcaacctccatcgctctacccagctgacagtgagctccaactttccagccatgtaagcgagtcatcttggaagcaactgtttctgcccgtagttgagtcacccctgctgatgccatatg

SEQ ID NO: 1727 - DNA, 122 bp, Homo sapiens
  misc_feature (61)..(62): /note="This region represents a CpG dinucleotide"
  misc_feature (61)..(61): /note="Nucleotide may be methylated to form 5-methylcytosine"
tgaaaacaaattacagagtgatttctcattagtcccattatggggaacatgcctcatccacgttcttaatgaggctccagtaagtctgtagactgtttggggctgagggtggggcattggtg

SEQ ID NO: 1728 - DNA, 122 bp, Homo sapiens
  misc_feature (61)..(62): /note="This region represents a CpG dinucleotide"
  misc_feature (61)..(61): /note="Nucleotide may be methylated to form 5-methylcytosine"
atgcacaaatcacagagtgcaaccagatgagttatcacaatgtcagcacatttgagtgctcgccacccagatcaagagatagcagggaagtaccccttcttcccctaattgctcccactcct

SEQ ID NO: 1729 - DNA, 122 bp, Homo sapiens
  misc_feature (61)..(62): /note="This region represents a CpG dinucleotide"
  misc_feature (61)..(61): /note="Nucleotide may be methylated to form 5-methylcytosine"
agttccccaaggccatcagctatttcttagcagggcatttgaggcctctgcacccagcttcgttcatcctttaaggtaggtctcacatggcatgaactctggatgtagctgccaactcagct

SEQ ID NO: 1730 - DNA, 122 bp, Homo sapiens
  misc_feature (61)..(62): /note="This region represents a CpG dinucleotide"
  misc_feature (61)..(61): /note="Nucleotide may be methylated to form 5-methylcytosine"
ggactatatagctaattgtgtgttttatgggatgtcttaatgaggaaaagcaccacatctcgtcatcatgtcacttctgttgtgtcttgttaaagtgacctcattcacaaagcaaatgctga

SEQ ID NO: 1731 - DNA, 122 bp, Homo sapiens
  misc_feature (61)..(62): /note="This region represents a CpG dinucleotide"
  misc_feature (61)..(61): /note="Nucleotide may be methylated to form 5-methylcytosine"
tccccatttacatttttttaggagattacacatagaagaataaagcttgacacattaaagcggggaaagactggtaagattccatgagcagagacacaatcaaattattcatgctccagtga

SEQ ID NO: 1732 - DNA, 122 bp, Homo sapiens
  misc_feature (61)..(62): /note="This region represents a CpG dinucleotide"
  misc_feature (61)..(61): /note="Nucleotide may be methylated to form 5-methylcytosine"
ctagcattagccatcattattggtaacccttgtttaggcagcctttctgcaagctaaccacgtttacttaaaatgattcttgcatgtaaggttacctaatatttttgatacagcattaatca

SEQ ID NO: 1733 - DNA, 122 bp, Homo sapiens
  misc_feature (61)..(62): /note="This region represents a CpG dinucleotide"
  misc_feature (61)..(61): /note="Nucleotide may be methylated to form 5-methylcytosine"
cccaggagcagtttatttcagtgtaaaatgccaggcggcttaatgtgaccactgacagcacgagtttgatcctggcttttctgcttctcagctgagatccccagcaagttacttgagcactt

SEQ ID NO: 1734 - DNA, 122 bp, Homo sapiens
  misc_feature (61)..(62): /note="This region represents a CpG dinucleotide"
  misc_feature (61)..(61): /note="Nucleotide may be methylated to form 5-methylcytosine"
catttaatgatttgaggtgatagggaaatgttttttattgtatttgcttctttgatcttgcggtagatttttaaagcagagagcatggactagtcagaagaccagttgacttaaactcttat

SEQ ID NO: 1735 - DNA, 122 bp, Homo sapiens
  misc_feature (61)..(62): /note="This region represents a CpG dinucleotide"
  misc_feature (61)..(61): /note="Nucleotide may be methylated to form 5-methylcytosine"
ataatagcataacatgatagcacatctgcatttaattatgattccgtcttcctggctccacgttcacaaatttctaagcctttggagagaaggaatatttgctacaaacattggctgcagtg

SEQ ID NO: 1736 - DNA, 122 bp, Homo sapiens
  misc_feature (61)..(62): /note="This region represents a CpG dinucleotide"
  misc_feature (61)..(61): /note="Nucleotide may be methylated to form 5-methylcytosine"
ctctccaaagtttctctctccttccatcactgctggtctcatatcagtccagctcacccccgccttcctccaggaaaggactcctgacctcattaggctcgcgccccctcccgctgacctcc

SEQ ID NO: 1737 - DNA, 122 bp, Homo sapiens
  misc_feature (61)..(62): /note="This region represents a CpG dinucleotide"
  misc_feature (61)..(61): /note="Nucleotide may be methylated to form 5-methylcytosine"
ttctctaccgagtgacaaagacgtaaataacagggccctctcctctgggagcctgccacgcgctgtcctcgctgtgggagtcggcctctcatccttcctgccatcgtgacaccaggacacag

SEQ ID NO: 1738 - DNA, 122 bp, Homo sapiens
  misc_feature (61)..(62): /note="This region represents a CpG dinucleotide"
  misc_feature (61)..(61): /note="Nucleotide may be methylated to form 5-methylcytosine"
ggcaatcgtcagtaaaatcttcagtctctttagtgctcaagtaaatgtaaatttaaactgcgtaataacaccttttccacctattggattggtaaggattttcaaaattacccagagcaagg

SEQ ID NO: 1739 - DNA, 122 bp, Homo sapiens
  misc_feature (61)..(62): /note="This region represents a CpG dinucleotide"
  misc_feature (61)..(61): /note="Nucleotide may be methylated to form 5-methylcytosine"
gacaagtgattaaaagcaaaagtctgagtcagactgcctaagtttgtatctcatttctgccgctactagtggtatgacctagggctagtagatcaacctctctgagcttcggtttcctaatc

SEQ ID NO: 1740 - DNA, 122 bp, Homo sapiens
  misc_feature (61)..(62): /note="This region represents a CpG dinucleotide"
  misc_feature (61)..(61): /note="Nucleotide may be methylated to form 5-methylcytosine"
tcccagtccatgtgcccaggaatacctctccctcctgaccttacctgcaccttcatgagccgccccaggtaagagcggtagtaagacaggtaaatcttgctcagcgtctccacatattcatc

SEQ ID NO: 1741 - DNA, 122 bp, Homo sapiens
  misc_feature (61)..(62): /note="This region represents a CpG dinucleotide"
  misc_feature (61)..(61): /note="Nucleotide may be methylated to form 5-methylcytosine"
cctggtgagaaacgtttctgcctcgccttgaccttcccttgctccagacttgtaatcaaccgcacggattcctttgtaatagggactggtatttggaaatcaagatctggttgccaggtttg

SEQ ID NO: 1742 - DNA, 122 bp, Homo sapiens
  misc_feature (61)..(62): /note="This region represents a CpG dinucleotide"
  misc_feature (61)..(61): /note="Nucleotide may be methylated to form 5-methylcytosine"
attaagactttcactaaccagtggaaattaggtaagcaccaatacaatagagactacacacggagagctagaatcaccactctgactcagcaataatgaggagccactcctgctacttgagt

SEQ ID NO: 1743 - DNA, 122 bp, Homo sapiens
  misc_feature (61)..(62): /note="This region represents a CpG dinucleotide"
  misc_feature (61)..(61): /note="Nucleotide may be methylated to form 5-methylcytosine"
ttttccttatgttgtctctgagagcctgacttccgttctccctgctaggctatccccaggcgtttccttccttgattcatgaactctaagatgactagatcaccaggtcggccccaagtatt

SEQ ID NO: 1744 - DNA, 122 bp, Homo sapiens
  misc_feature (61)..(62): /note="This region represents a CpG dinucleotide"
  misc_feature (61)..(61): /note="Nucleotide may be methylated to form 5-methylcytosine"
tgattacggtaagatggaagaggaaagtatcttgaggcttaaaagctgtgtaattccattcgtaggaaccagtatggcttactaaatacagtgttgtcatttcctgtgaaagagagagcgag

SEQ ID NO: 1745 - DNA, 122 bp, Homo sapiens
  misc_feature (61)..(62): /note="This region represents a CpG dinucleotide"
  misc_feature (61)..(61): /note="Nucleotide may be methylated to form 5-methylcytosine"
aagtgctaacagagcaaatctgaaacaagttcatggggattgggtaatgagtcatcgaaacgaaatcttttggaaaccatgctgctatcctctgggatattctctttgtcttctctatcacc

SEQ ID NO: 1746 - DNA, 122 bp, Homo sapiens
  misc_feature (61)..(62): /note="This region represents a CpG dinucleotide"
  misc_feature (61)..(61): /note="Nucleotide may be methylated to form 5-methylcytosine"
ttctagcacccttccctggttcctcaaactgaacttcctcttttctgggttttcacagcacgtcaggctcacctgttcttcacactgtcccctaactgctggttagagttgtcttcccagtt

SEQ ID NO: 1747 - DNA, 122 bp, Homo sapiens
  misc_feature (61)..(62): /note="This region represents a CpG dinucleotide"
  misc_feature (61)..(61): /note="Nucleotide may be methylated to form 5-methylcytosine"
tgattaattttgtgtaaatgattagccacctcagctgactcagagccacaggaagctctacggctgtgctgtccagtgtgatagccattcaccacatgtggctatgtaaatttaaatacaaa

SEQ ID NO: 1748 - DNA, 122 bp, Homo sapiens
  misc_feature (61)..(62): /note="This region represents a CpG dinucleotide"
  misc_feature (61)..(61): /note="Nucleotide may be methylated to form 5-methylcytosine"
ataggaatagtgaacccaaggcttacctttatggattttacttagggtgtacatttgtaacggatgagataagtgggtaggatggagccacacccacccaaccacctattatacatattaca

SEQ ID NO: 1749 - DNA, 122 bp, Homo sapiens
  misc_feature (61)..(62): /note="This region represents a CpG dinucleotide"
  misc_feature (61)..(61): /note="Nucleotide may be methylated to form 5-methylcytosine"
ctgttagaatgcatggccatggacgacttggtgaccagtggcctgtaaaatgccacagaacgccctggcagctaatttttaattcccaggaagttgcttgcaactttgcaaagataaggcaa

SEQ ID NO: 1750 - DNA, 122 bp, Homo sapiens
  misc_feature (61)..(62): /note="This region represents a CpG dinucleotide"
  misc_feature (61)..(61): /note="Nucleotide may be methylated to form 5-methylcytosine"
caaaggaaatctctgattgtctttctggactcagtgtgtttgggttaaggagatagggtgcggctggagaaaatgatgaaaatgttcagaatgttacatgtatttttacactgaaactggaa

SEQ ID NO: 1751 - DNA, 122 bp, Homo sapiens
  misc_feature (61)..(62): /note="This region represents a CpG dinucleotide"
  misc_feature (61)..(61): /note="Nucleotide may be methylated to form 5-methylcytosine"
ccattcttgatctgaggcgagtattgggattgtggttttactttcccatttacttagaggcgggaaggtttagttatttgaatgccttagaccaggaaattattggctattgtcagtggaat

SEQ ID NO: 1752 - DNA, 122 bp, Homo sapiens
  misc_feature (61)..(62): /note="This region represents a CpG dinucleotide"
  misc_feature (61)..(61): /note="Nucleotide may be methylated to form 5-methylcytosine"
acgttccacaaaatctgtctattctgtttaataaagttaatcctcaaattgctgtatagccgggagactcaagttcattgtaactacgcagcaatactgggctctatgatgctgatatacca

SEQ ID NO: 1753 - DNA, 122 bp, Homo sapiens
  misc_feature (61)..(62): /note="This region represents a CpG dinucleotide"
  misc_feature (61)..(61): /note="Nucleotide may be methylated to form 5-methylcytosine"
agctgtggttccagggccagagagtcctgggctcttactctgaccatatcacctgcaagacggtgtgacccagagcaccgcagcattgagctctcagagcctccacttcctcatctgagggt

SEQ ID NO: 1754 - DNA, 122 bp, Homo sapiens
  misc_feature (61)..(62): /note="This region represents a CpG dinucleotide"
  misc_feature (61)..(61): /note="Nucleotide may be methylated to form 5-methylcytosine"
agcagatttctttctagcactctcacataatttaggcctcaatgagtcacatcctataatcgttttatgagaacaaagtggcaaatagctaatttaaaattatccctgtcaaaagaagataa

SEQ ID NO: 1755 - DNA, 122 bp, Homo sapiens
  misc_feature (61)..(62): /note="This region represents a CpG dinucleotide"
  misc_feature (61)..(61): /note="Nucleotide may be methylated to form 5-methylcytosine"
ggattttcctgggagtaactgctgagcgtcctgtaaacagatgggctgggctcttgctgccgcaagcctgtgtggccaggttcaggcagcccagggccacaagctcccttgatctttgtaaa

SEQ ID NO: 1756 - DNA, 122 bp, Homo sapiens
  misc_feature (61)..(62): /note="This region represents a CpG dinucleotide"
  misc_feature (61)..(61): /note="Nucleotide may be methylated to form 5-methylcytosine"
tagggcctggcaaaacctttgctagcaaagcgccttttgtgccgggctgtggctcgctatcgacatctcgtccgttaccaaggctgggtttcctactgatttccctcctcctctgctttcac

SEQ ID NO: 1757 - DNA, 122 bp, Homo sapiens
  misc_feature (61)..(62): /note="This region represents a CpG dinucleotide"
  misc_feature (61)..(61): /note="Nucleotide may be methylated to form 5-methylcytosine"
tgatggagtggatagatgcggtagaagcagatggggccggtgacctggcagacaggtgcgcgcataacacctctgcagccacaaagccgtgcaagcccagcatgtgggagggactggcgtgg

SEQ ID NO: 1758 - DNA, 122 bp, Homo sapiens
  misc_feature (61)..(62): /note="This region represents a CpG dinucleotide"
  misc_feature (61)..(61): /note="Nucleotide may be methylated to form 5-methylcytosine"
ccatcctggagcaggagaaggtcgtcgcgcagcagatccggcagctcttccccaagttcgcggacacccccatttacaacgacgaggcggacccgctggtgggctggtccctgccacagccg

SEQ ID NO: 1759 - DNA, 122 bp, Homo sapiens
  misc_feature (61)..(62): /note="This region represents a CpG dinucleotide"
  misc_feature (61)..(61): /note="Nucleotide may be methylated to form 5-methylcytosine"
caaggtgaacgaggcctaccggttccgcgtggcactgcctgcgtacccagcgtcgctcaccgacgtctccctggcgctgagcgagctgcgccccaacgactcaggtatctatcgctgtgagg

SEQ ID NO: 1760 - DNA, 122 bp, Homo sapiens
  misc_feature (61)..(62): /note="This region represents a CpG dinucleotide"
  misc_feature (61)..(61): /note="Nucleotide may be methylated to form 5-methylcytosine"
aaaggagaagtgaaaaggccccagccggggtgaatcatcagtcctggggaagaacccaggcgcctgagccccagctccgggaagcaggcactggggagggggcttcaaggagggagtgcccc

SEQ ID NO: 1761 - DNA, 122 bp, Homo sapiens
  misc_feature (61)..(62): /note="This region represents a CpG dinucleotide"
  misc_feature (61)..(61): /note="Nucleotide may be methylated to form 5-methylcytosine"
gacccacagaggccaagcagttattctcaattgttctccacctactacgggaaatgtttccgttcttctacacccaagtccttgttttttggtgagtgttcaattaccagccgaaactcact

SEQ ID NO: 1762 - DNA, 122 bp, Homo sapiens
  misc_feature (61)..(62): /note="This region represents a CpG dinucleotide"
  misc_feature (61)..(61): /note="Nucleotide may be methylated to form 5-methylcytosine"
tgattttactgtttcctaggaaatgagaacagaagccattgccagacctctggaaataaacgagactgaaaaagtgatgagaattgcaataaaagagattttggtaagatgactttgctttt

SEQ ID NO: 1763 - DNA, 122 bp, Homo sapiens
  misc_feature (61)..(62): /note="This region represents a CpG dinucleotide"
  misc_feature (61)..(61): /note="Nucleotide may be methylated to form 5-methylcytosine"
aatgtttagcatgtgtgtaaaggtcgtaggtctggtgttcagaaattacatacaggcttacgaaagaatctgcactgggttggccaaattaaacaacaggcagttgtagagaaataaacaca

SEQ ID NO: 1764 - DNA, 122 bp, Homo sapiens
  misc_feature (61)..(62): /note="This region represents a CpG dinucleotide"
  misc_feature (61)..(61): /note="Nucleotide may be methylated to form 5-methylcytosine"
tcccaaagtgctgagattacagacctgagcccgaatgaacttgcttgattgtcatgctcacgtctccaccctgggaggagctatagcttgtgaccatcgcatgtgacctaggtgctggcatg

SEQ ID NO: 1765 - DNA, 122 bp, Homo sapiens
  misc_feature (61)..(62): /note="This region represents a CpG dinucleotide"
  misc_feature (61)..(61): /note="Nucleotide may be methylated to form 5-methylcytosine"
atcccgcatcttgcaccccggatcccgcaccccgcatcctgcaccccgcatctctcactccgcatccggcaccccgcagctgcacgcaccgcaaccctcccgcggccccgcctcctgcactc

SEQ ID NO: 1766 - DNA, 122 bp, Homo sapiens
  misc_feature (61)..(62): /note="This region represents a CpG dinucleotide"
  misc_feature (61)..(61): /note="Nucleotide may be methylated to form 5-methylcytosine"
taaggcactgtacgtaaagctgtgtgggacacaaggaactatcgaatcttgttgtggcagcggagaatctgaccgtggagcacacatagggtgaagccacagacaccatcaacgcggctgct

SEQ ID NO: 1767 - DNA, 122 bp, Homo sapiens
  misc_feature (61)..(62): /note="This region represents a CpG dinucleotide"
  misc_feature (61)..(61): /note="Nucleotide may be methylated to form 5-methylcytosine"
aggatgttgagcctttgtcaacctgttttgctgagtcatcgttgctttgtcagcctatttcgtgggtcatcactggttgagtgatcaagacttaaacattgtttgtcattgctttaactagg

SEQ ID NO: 1768 - DNA, 122 bp, Homo sapiens
  misc_feature (61)..(62): /note="This region represents a CpG dinucleotide"
  misc_feature (61)..(61): /note="Nucleotide may be methylated to form 5-methylcytosine"
ccaacaaatgctgtgtcactaatccacatgtcactgaacacatgggataccttacagtttcgcaaggcaaatgttgcaataaaaactgaaaaactgtcctggagttggattaggtaatacag

SEQ ID NO: 1769 - DNA, 122 bp, Homo sapiens
  misc_feature (61)..(62): /note="This region represents a CpG dinucleotide"
  misc_feature (61)..(61): /note="Nucleotide may be methylated to form 5-methylcytosine"
ttgctaagcatttacacccattatcccatttaatcctatattaatccataaggtagttgccgttatgcccatttttcagatgatgaaactgaggcacagaagttaaagtcttcacactatct

SEQ ID NO: 1770 - DNA, 122 bp, Homo sapiens
  misc_feature (61)..(62): /note="This region represents a CpG dinucleotide"
  misc_feature (61)..(61): /note="Nucleotide may be methylated to form 5-methylcytosine"
gaaacacctgtgtggcagataaggccaactgagtgtgatcagctgaggaaaccttagggacgcatgtcactcaatatttctttttccatgccaggcagggcagaggcacaatctagcctgtg

SEQ ID NO: 1771 - DNA, 122 bp, Homo sapiens
  misc_feature (61)..(62): /note="This region represents a CpG dinucleotide"
  misc_feature (61)..(61): /note="Nucleotide may be methylated to form 5-methylcytosine"
cacgccgcagggaccctccagcagagccgggctgctgcagccaccagcgctgggacgaggcggcagtggccctctggcaaagtgaagtctggagctaggagaaagcggtcatcagtacctct

SEQ ID NO: 1772 - DNA, 122 bp, Homo sapiens
  misc_feature (61)..(62): /note="This region represents a CpG dinucleotide"
  misc_feature (61)..(61): /note="Nucleotide may be methylated to form 5-methylcytosine"
aatcagcaggaggtaggggcacacccgtgcataactttctggtgaagccttccctgcaatcgcaagagaagggttacgaaatctcggatctcatcagtgagggggtcaagtcaagagaaatt

SEQ ID NO: 1773 - DNA, 122 bp, Homo sapiens
  misc_feature (61)..(62): /note="This region represents a CpG dinucleotide"
  misc_feature (61)..(61): /note="Nucleotide may be methylated to form 5-methylcytosine"
atatatgaaatcccaattacctgtacttatccatcgctagttcacttcgctgcagtccttcgtaaaccaaagagcaggtagaacgagttcaccctgaacacagcatccctttaaatgaccct

SEQ ID NO: 1774 - DNA, 122 bp, Homo sapiens
  misc_feature (61)..(62): /note="This region represents a CpG dinucleotide"
  misc_feature (61)..(61): /note="Nucleotide may be methylated to form 5-methylcytosine"
tcagggttattgagtaacaggctggctgggtttgcaggccagcgtgttcctggtggcagccgctcactcattaacacttctggaagtgctgcatgtctggttaaactgcaaatgctttgcaa

SEQ ID NO: 1775 - DNA, 122 bp, Homo sapiens
  misc_feature (61)..(62): /note="This region represents a CpG dinucleotide"
  misc_feature (61)..(61): /note="Nucleotide may be methylated to form 5-methylcytosine"
agcactccaatttccttgaatccatctgggtcacaggaggtacagtgtggagtgctcagccgtgaaagttctgcagttgaacaacctgagttcaaattccagctctgccacttaaccacatg

SEQ ID NO: 1776 - DNA, 122 bp, Homo sapiens
  misc_feature (61)..(62): /note="This region represents a CpG dinucleotide"
  misc_feature (61)..(61): /note="Nucleotide may be methylated to form 5-methylcytosine"
ggaggctgcagttgtggtacacgtccccggtgctgggttggccgtgactcgggggcggggcgatcgggtctcagcccctgccttccccagtctctgggtcacccgaattttcccacccctgc

SEQ ID NO: 1777 - DNA, 122 bp, Homo sapiens
  misc_feature (61)..(62): /note="This region represents a CpG dinucleotide"
  misc_feature (61)..(61): /note="Nucleotide may be methylated to form 5-methylcytosine"
ccaaaggattgtaaatatgagcctggggtggggcccaagtcttccagatgtggctgctttcgcattttcagtgtgaattcaagggacctaccctactctctgacggagataacaagtgtcaa

SEQ ID NO: 1778 - DNA, 122 bp, Homo sapiens
  misc_feature (61)..(62): /note="This region represents a CpG dinucleotide"
  misc_feature (61)..(61): /note="Nucleotide may be methylated to form 5-methylcytosine"
gaaaaggcagatggttcagcagacagctttgttcctatcctgcacagtctctgaacctggcgcttttctcgtctgtgtggcaagactaaggcacagagggttttaaagggggttcggggtat

SEQ ID NO: 1779 - DNA, 122 bp, Homo sapiens
  misc_feature (61)..(62): /note="This region represents a CpG dinucleotide"
  misc_feature (61)..(61): /note="Nucleotide may be methylated to form 5-methylcytosine"
aaaagataataggaaactcattctaaagtgtcaacttattctattgcccacagggctgtccgatttgttaatcttcacttagctgagcctgtgaaaggtggattccaccgtaggttcatctt

SEQ ID NO: 1780 - DNA, 122 bp, Homo sapiens
  misc_feature (61)..(62): /note="This region represents a CpG dinucleotide"
  misc_feature (61)..(61): /note="Nucleotide may be methylated to form 5-methylcytosine"
acaaaaatcagatatggctctatctcccccactggaccatagaactcctcagattagaaacggcactagggtcacaaattcaaatgctcacagagccaggcagataacataaatgggtgaag

SEQ ID NO: 1781 - DNA, 122 bp, Homo sapiens
  misc_feature (61)..(62): /note="This region represents a CpG dinucleotide"
  misc_feature (61)..(61): /note="Nucleotide may be methylated to form 5-methylcytosine"
tgaatcaattacatccttccacgtaggagattttatttaatattcacaataaccttgtgacgttagcaaaggaacactagtagatccatgtcacaggatgaagcaattgaagctcagagaaa

SEQ ID NO: 1782 - DNA, 122 bp, Homo sapiens
  misc_feature (61)..(62): /note="This region represents a CpG dinucleotide"
  misc_feature (61)..(61): /note="Nucleotide may be methylated to form 5-methylcytosine"
catcagagccaagctggggcgtgcagtgcacctgcctgtcagccggctggggtgctgaggcgtcgcatcagaattgcaggatgcaacacatctgcctgcatgtcagccgctgggagagatgc

SEQ ID NO: 1783 - DNA, 122 bp, Homo sapiens
  misc_feature (61)..(62): /note="This region represents a CpG dinucleotide"
  misc_feature (61)..(61): /note="Nucleotide may be methylated to form 5-methylcytosine"
gggcttttccttaggtttaaaatacccacactgttatatgatcaggatattcacaatcctcgtgtgatcatcctctgaaccactgatttccaggcagtggtctagggactacggcttggtaa

SEQ ID NO: 1784 - DNA, 122 bp, Homo sapiens
  misc_feature (61)..(62): /note="This region represents a CpG dinucleotide"
  misc_feature (61)..(61): /note="Nucleotide may be methylated to form 5-methylcytosine"
agcagagagaacagatctcccctttcccatcttagatctccatttttatgttcctgttgtcgagtggtttgtcatggtaaagaaaaaatgcttttaaatgtgagtgtatatatatcatctat

SEQ ID NO: 1785 - DNA, 122 bp, Homo sapiens
  misc_feature (61)..(62): /note="This region represents a CpG dinucleotide"
  misc_feature (61)..(61): /note="Nucleotide may be methylated to form 5-methylcytosine"
ccttcaagattcagaaacctgcccaaaatggattaagtctcatctgtacattccccatgtcgcaccaaagctaagggacatccaaaagcactctgcccttggtttatgcctagaggtcaata

SEQ ID NO: 1786 - DNA, 122 bp, Homo sapiens
  misc_feature (61)..(62): /note="This region represents a CpG dinucleotide"
  misc_feature (61)..(61): /note="Nucleotide may be methylated to form 5-methylcytosine"
agtcacagtttttcacagtgatcctaagtcttccatgctgtggtacagaccccaagttttcgcaactcagaggtgggccaagtgcaaggggacctgagtcagagccaggtttgatcctgacc

SEQ ID NO: 1787 - DNA, 122 bp, Homo sapiens
  misc_feature (61)..(62): /note="This region represents a CpG dinucleotide"
  misc_feature (61)..(61): /note="Nucleotide may be methylated to form 5-methylcytosine"
gctaatcccagaaaccacaagagctctgggttgaaacaatgatgttgcaagaaatactgacgtatcagaagcagaagaagagcattatcaaatttggagaaggaaagagactgtcagagcaa

SEQ ID NO: 1788 - DNA, 122 bp, Homo sapiens
  misc_feature (61)..(62): /note="This region represents a CpG dinucleotide"
  misc_feature (61)..(61): /note="Nucleotide may be methylated to form 5-methylcytosine"
cttacaatgaaatggactaaatccaatctgccttatattcctgtgtccactaaccaccatcggaaatccaacttccttgttatctatgatgattcaagcctatcatgccccacaaaaactac

SEQ ID NO: 1789 - DNA, 122 bp, Homo sapiens
  misc_feature (61)..(62): /note="This region represents a CpG dinucleotide"
  misc_feature (61)..(61): /note="Nucleotide may be methylated to form 5-methylcytosine"
ctaagtaagcccacagaataccgcagtgatgacggctcatactccacgccaatgaccacacgcaaggcctgttcccaacgggctcgccttcgctgtcctacggccatcaggatcgtatggct

SEQ ID NO: 1790 - DNA, 122 bp, Homo sapiens
  misc_feature (61)..(62): /note="This region represents a CpG dinucleotide"
  misc_feature (61)..(61): /note="Nucleotide may be methylated to form 5-methylcytosine"
tatcacaaagattggctgggggcagtggctcatgcttgtaattccagcactttgggaggacgaggcatgagcctcactagaggccaggagttccagagcagcctggccaacatagggaaacc

SEQ ID NO: 1791 - DNA, 122 bp, Homo sapiens
  misc_feature (61)..(62): /note="This region represents a CpG dinucleotide"
  misc_feature (61)..(61): /note="Nucleotide may be methylated to form 5-methylcytosine"
ataactagcttagactagcgtaactgctagtcaaggctctttggaaggaagtaacacccacgcaaactactagaacttgaaatgggcagtttatgataagggagtgtgactgtctcagcata

SEQ ID NO: 1792 - DNA, 122 bp, Homo sapiens
  misc_feature (61)..(62): /note="This region represents a CpG dinucleotide"
  misc_feature (61)..(61): /note="Nucleotide may be methylated to form 5-methylcytosine"
ttacttctggtggattaagtgctgcttaaatactaagactatccattctcttttgcctcacgcctctctactaaactgcagctcagttctgcctctcataatatgtatgttgagtaacatta

SEQ ID NO: 1793 - DNA, 122 bp, Homo sapiens
  misc_feature (61)..(62): /note="This region represents a CpG dinucleotide"
  misc_feature (61)..(61): /note="Nucleotide may be methylated to form 5-methylcytosine"
gacagaaacaaacaaccgggctttgaaggtctgggtcaaaggtggcacaattccttgcttcgttgcagtaaggcaagtgccgacggccacagagcattgcaaaagagcacattctccctttg

SEQ ID NO: 1794 - DNA, 122 bp, Homo sapiens
  misc_feature (61)..(62): /note="This region represents a CpG dinucleotide"
  misc_feature (61)..(61): /note="Nucleotide may be methylated to form 5-methylcytosine"
agaatgaatgtggtttgggcaagaaatgaggaattctcaaaaatggccctgagtttctgtcgtaagtaattgcagtacctgagtgaaataagagacatttgttgatctgagtcagtgtggag

SEQ ID NO: 1795 - DNA, 122 bp, Homo sapiens
  misc_feature (61)..(62): /note="This region represents a CpG dinucleotide"
  misc_feature (61)..(61): /note="Nucleotide may be methylated to form 5-methylcytosine"
ttcactgaccaggcctttcctggaggaaacacccagggccgggcggctgctgtttccacacgtggactcggatctgctgtgacaccgtcagcccgacagtctctccatatgcagcctttcct

SEQ ID NO: 1796 - DNA, 122 bp, Homo sapiens
  misc_feature (61)..(62): /note="This region represents a CpG dinucleotide"
  misc_feature (61)..(61): /note="Nucleotide may be methylated to form 5-methylcytosine"
ccactggcttgagccattgggtgtggtttccttctaatgcctgggcagctgtgtcattcccgttacagtcaccacatgattctaattgccttagaatttataggaaccagttggcagcccaa

SEQ ID NO: 1797 - DNA, 122 bp, Homo sapiens
  misc_feature (61)..(62): /note="This region represents a CpG dinucleotide"
  misc_feature (61)..(61): /note="Nucleotide may be methylated to form 5-methylcytosine"
taaattggttcacaggataagaggacacccaatcatgtaaaaactggtacaagccaggcacggtgtcttaggcctgtaatcccagcactttggaaggccaaggcgggtggatcacctaaggt

SEQ ID NO: 1798 - DNA, 122 bp, Homo sapiens
  misc_feature (61)..(62): /note="This region represents a CpG dinucleotide"
  misc_feature (61)..(61): /note="Nucleotide may be methylated to form 5-methylcytosine"
atgtttgtatttattgcttcatggccgactggaatcctgagtcctgggaagctggcactgcggggatcttgcccggtgtcctggtcctcttgcttccgtcgcggccgcatgtgcgtgtgtcc

SEQ ID NO: 1799 - DNA, 122 bp, Homo sapiens
  misc_feature (61)..(62): /note="This region represents a CpG dinucleotide"
  misc_feature (61)..(61): /note="Nucleotide may be methylated to form 5-methylcytosine"
ccttttggctatatgattctagaaatttataagctagacaagggatctgattaactcacacgttaagtagaaatatcttagggccaaatggcatgacagtacatttaagtcagaggagggtg

SEQ ID NO: 1800 - DNA, 122 bp, Homo sapiens
  misc_feature (61)..(62): /note="This region represents a CpG dinucleotide"
  misc_feature (61)..(61): /note="Nucleotide may be methylated to form 5-methylcytosine"
tccataaccacccgagcaatactaaccatgggtccgagacgttctaattgtcgccgcctccgcggcgaatagaaatctcacatccctttgatactggggatacagccatagaggtgacccac

SEQ ID NO: 1801 - DNA, 122 bp, Homo sapiens
  misc_feature (61)..(62): /note="This region represents a CpG dinucleotide"
  misc_feature (61)..(61): /note="Nucleotide may be methylated to form 5-methylcytosine"
attcgttcctcaccctgtgaagtaggctggagctcttgataactcttctaaaacaattatcgttgtgtaactgaagccattcagttgcgggctcctctgtttgtttattcgggaggaagtct

SEQ ID NO: 1802 - DNA, 122 bp, Homo sapiens
  misc_feature (61)..(62): /note="This region represents a CpG dinucleotide"
  misc_feature (61)..(61): /note="Nucleotide may be methylated to form 5-methylcytosine"
tcttataggatgtccttaatcagaaccacattactcagctagaggaagtccttgtgcagacgctggcaagacactatggcaaaagagtttcacaacatgaaaggtcagattgagaataaaag

SEQ ID NO: 1803 - DNA, 122 bp, Homo sapiens
  misc_feature (61)..(62): /note="This region represents a CpG dinucleotide"
  misc_feature (61)..(61): /note="Nucleotide may be methylated to form 5-methylcytosine"
gcctggactggtgggagcagagtgcagtgttgcaccacagacaggatcagttcatggcagcggggatagagattaatcattaatctgactaggagttttaaattagccggaagatctgttaa

SEQ ID NO: 1804 - DNA, 122 bp, Homo sapiens
  misc_feature (61)..(62): /note="This region represents a CpG dinucleotide"
  misc_feature (61)..(61): /note="Nucleotide may be methylated to form 5-methylcytosine"
agactcattatttacttgtccaggttgtctacccacactgctcctgcccaaggccaaagacgagccccattaaccttgttagcaatggagcttgggtctagctttaatgattaacatctgta

SEQ ID NO: 1805 - DNA, 122 bp, Homo sapiens
  misc_feature (61)..(62): /note="This region represents a CpG dinucleotide"
  misc_feature (61)..(61): /note="Nucleotide may be methylated to form 5-methylcytosine"
agttttctttcgttgcttgtgcagacaagcccatgaagggctctcacagtgtacttgtcacgtattcccttctcagaaggctatgattttctatctcctgaactctctccaccctgaggttc

SEQ ID NO: 1806 - DNA, 122 bp, Homo sapiens
  misc_feature (61)..(62): /note="This region represents a CpG dinucleotide"
  misc_feature (61)..(61): /note="Nucleotide may be methylated to form 5-methylcytosine"
gaaggaggaggaggaggaggaagaggaagaggaagaggaagaataagaagaagaagagcacgcagaatttactggtcatgtagaaagcattacacagtgtaagctgttgttatgtcatcttt

SEQ ID NO: 1807 - DNA, 122 bp, Homo sapiens
  misc_feature (61)..(62): /note="This region represents a CpG dinucleotide"
  misc_feature (61)..(61): /note="Nucleotide may be methylated to form 5-methylcytosine"
aaggggaaggggtgccctgaactgagtcagacacctgcccagagactgagggaagtgtaccgccacccccccacaactttgctatggggtggagggcagaggttaaaggtctcagccagacc

SEQ ID NO: 1808 - DNA, 122 bp, Homo sapiens
  misc_feature (61)..(62): /note="This region represents a CpG dinucleotide"
  misc_feature (61)..(61): /note="Nucleotide may be methylated to form 5-methylcytosine"
ctgatacttcattgttggaaggaattaaatctaattgaatagaatcaaatccaaattgaacgggcaggttctaaaccaggcttgcagatcagggccatcagcctcttaaatgcagcccagat

SEQ ID NO: 1809 - DNA, 122 bp, Homo sapiens
  misc_feature (61)..(62): /note="This region represents a CpG dinucleotide"
  misc_feature (61)..(61): /note="Nucleotide may be methylated to form 5-methylcytosine"
cccaaggcatgctgtggagagacttcacctgccaccatttccaggtcaacaggactagagcgttgatggttttcaaaccctgttggaagaaagtgcccatggtttctctggttctgccagtt

SEQ ID NO: 1810 - DNA, 122 bp, Homo sapiens
  misc_feature (61)..(62): /note="This region represents a CpG dinucleotide"
  misc_feature (61)..(61): /note="Nucleotide may be methylated to form 5-methylcytosine"
cccacctgccagcaggtcaaaggttattgcctatgactggccaggtttcacttcggctgccgtggtgctcctgatgtgactgcactgggcagacggacctgaagtactgtccctgtattaag

SEQ ID NO: 1811 - DNA, 122 bp, Homo sapiens
  misc_feature (61)..(62): /note="This region represents a CpG dinucleotide"
  misc_feature (61)..(61): /note="Nucleotide may be methylated to form 5-methylcytosine"
ttgttatagtagcaagaggaaactaatataagaacacagaaagattctatttaaactctccgtcagctacaaagaagaggagtaacttgctactactaatttatgtaagtgacttagcgata

SEQ ID NO: 1812 - DNA, 122 bp, Homo sapiens
  misc_feature (61)..(62): /note="This region represents a CpG dinucleotide"
  misc_feature (61)..(61): /note="Nucleotide may be methylated to form 5-methylcytosine"
ggcacgagaactgctgaccacttcctgcaggcctccgacccggcggcccagccacccatccggctggggtggccatcagtcatctggaaagcctatgagccccgtgtcctcgttttgcaaag

SEQ ID NO: 1813 - DNA, 122 bp, Homo sapiens
  misc_feature (61)..(62): /note="This region represents a CpG dinucleotide"
  misc_feature (61)..(61): /note="Nucleotide may be methylated to form 5-methylcytosine"
caaacatgaccttaagcaacagatcagggttaacacaccagtgacaggacaagccaccatcgggtgtgtacctcctaatagtggtccactgagaagaacagtgtcatgtctgtggcttcctg

SEQ ID NO: 1814 - DNA, 122 bp, Homo sapiens
  misc_feature (61)..(62): /note="This region represents a CpG dinucleotide"
  misc_feature (61)..(61): /note="Nucleotide may be methylated to form 5-methylcytosine"
ctccagcctgactgtgaggaaagttctgtcatcccccaagagtgacttatagtccaagttcgctggtaatggggccatccattcccttcagggaaagctccaccccaggaagacaattccca

SEQ ID NO: 1815 - DNA, 122 bp, Homo sapiens
  misc_feature (61)..(62): /note="This region represents a CpG dinucleotide"
  misc_feature (61)..(61): /note="Nucleotide may be methylated to form 5-methylcytosine"
gactgactggatgggaatatcctatttcctttttgttcttacaagtatagtgttcactcacggattcttaatttttccttattctaatcagtcaactcttttttaacattcactaagttcag

SEQ ID NO: 1816 - DNA, 122 bp, Homo sapiens
  misc_feature (61)..(62): /note="This region represents a CpG dinucleotide"
  misc_feature (61)..(61): /note="Nucleotide may be methylated to form 5-methylcytosine"
tgactcactcactatgaagtgagtaccttcattattccatcttacagatgaggagactgacgctcagtgaagtgacagtcatagacaactagaagtgatggaactaagattcaaattcgggc

SEQ ID NO: 1817 - DNA, 122 bp, Homo sapiens
  misc_feature (61)..(62): /note="This region represents a CpG dinucleotide"
  misc_feature (61)..(61): /note="Nucleotide may be methylated to form 5-methylcytosine"
ggaatcaagaagatctaggtatcagtcttggctcctctgtgtaggagctgtttgatcttgcgtaatcaacaaaatcagcaacaatgacagcagcagctacattcacttagtgcttgttttgt

SEQ ID NO: 1818 - DNA, 122 bp, Homo sapiens
  misc_feature (61)..(62): /note="This region represents a CpG dinucleotide"
  misc_feature (61)..(61): /note="Nucleotide may be methylated to form 5-methylcytosine"
atatgatttggaaaatgcttactaatgcttctactggaaactgtttaagcctcgagagtccgctacacagggttattcaatgttcagtgtgcttatgaatcacctgaggactcttgttaaaa

SEQ ID NO: 1819 - DNA, 122 bp, Homo sapiens
  misc_feature (61)..(62): /note="This region represents a CpG dinucleotide"
  misc_feature (61)..(61): /note="Nucleotide may be methylated to form 5-methylcytosine"
ctgggcccggcgatactcatagacgctgccgtgctcgggaaaggccagtgcttgcgggggcgaccccggcggtggggcggggtcctccgggtccccatagccaccgccgccgggcgtgtgga

SEQ ID NO: 1820 - DNA, 122 bp, Homo sapiens
  misc_feature (61)..(62): /note="This region represents a CpG dinucleotide"
  misc_feature (61)..(61): /note="Nucleotide may be methylated to form 5-methylcytosine"
gtggagaagttattgggtcatatagtgatggtgtgcagataggacctggtggtgagttgacgaggagccattgccattcagccatcaagaatcatgatgtgtgttgtgtaggaatggagagg

SEQ ID NO: 1821 - DNA, 122 bp, Homo sapiens
  misc_feature (61)..(62): /note="This region represents a CpG dinucleotide"
  misc_feature (61)..(61): /note="Nucleotide may be methylated to form 5-methylcytosine"
acccaggtctatctcacagccacagcatagtattttcttttttttcttgctgtgactgcacgttacgccatacatggcattcaggacgcagaggaattagtatttactgtttttaacattcc

SEQ ID NO: 1822 - DNA, 122 bp, Homo sapiens
  misc_feature (61)..(62): /note="This region represents a CpG dinucleotide"
  misc_feature (61)..(61): /note="Nucleotide may be methylated to form 5-methylcytosine"
cattccacctgcagaagacttaaaacactgtcagacacctgaggattttctaaagccccacgggtactaatctcagcaagggcggtaggaacagctatttgcataactcacacttcccaggt

SEQ ID NO: 1823 - DNA, 122 bp, Homo sapiens
  misc_feature (61)..(62): /note="This region represents a CpG dinucleotide"
  misc_feature (61)..(61): /note="Nucleotide may be methylated to form 5-methylcytosine"
tcacacttaagaaatgtactgccttaaatgttgtatcttcattagagtgcatgatctttccgtgtttattttgttaaatattgttaactttcatacttttcacagaagtcttccaattactc

SEQ ID NO: 1824 - DNA, 122 bp, Homo sapiens
  misc_feature (61)..(62): /note="This region represents a CpG dinucleotide"
  misc_feature (61)..(61): /note="Nucleotide may be methylated to form 5-methylcytosine"
aagacaactgtggtcattttttggcaatcccaggttctcttttctacctgtttgctcaatcgtggtctccctctccctctcttgttggggcccatgcccctgctttactgttgccagaggct

SEQ ID NO: 1825 - DNA, 122 bp, Homo sapiens
  misc_feature (61)..(62): /note="This region represents a CpG dinucleotide"
  misc_feature (61)..(61): /note="Nucleotide may be methylated to form 5-methylcytosine"
aaatcaattaaagcctaaaacctatgggtaatcatttttttcctccctcctcccccagatcgagaagtgcccgtcccctgtgcccttcatccacactaatttggctgcagtggctctcgttc

SEQ ID NO: 1826 - DNA, 122 bp, Homo sapiens
  misc_feature (61)..(62): /note="This region represents a CpG dinucleotide"
  misc_feature (61)..(61): /note="Nucleotide may be methylated to form 5-methylcytosine"
ggtagatatcaggccctggtctgcggcttggaagtttcctgtgaataagaaaaacatcatcgcttcttgagtcacaaggatgataggatgagaaaaagaaaggacaaaggcaccagaggagg

SEQ ID NO: 1827 - DNA, 122 bp, Homo sapiens
  misc_feature (61)..(62): /note="This region represents a CpG dinucleotide"
  misc_feature (61)..(61): /note="Nucleotide may be methylated to form 5-methylcytosine"
tggctggctcacgtcatcactgcgggatccaagacacatttaagggacaagtcggttgagcgggtcggggcgtgtggggcccgcggctggcttgacttctgctttcccccaacatcaacttg

SEQ ID NO: 1828 - DNA, 122 bp, Homo sapiens
  misc_feature (61)..(62): /note="This region represents a CpG dinucleotide"
  misc_feature (61)..(61): /note="Nucleotide may be methylated to form 5-methylcytosine"
ttcgcaatttatcacgcgcatatgtatgtgtatgcataaacagatataattttgtttgctcgcttatttggttcgtcgcctcactagattccggactgtgggctccaggaatgcagacagtg

SEQ ID NO: 1829 - DNA, 122 bp, Homo sapiens
  misc_feature (61)..(62): /note="This region represents a CpG dinucleotide"
  misc_feature (61)..(61): /note="Nucleotide may be methylated to form 5-methylcytosine"
acttttgtaagacaagcagtgaagtctgtcctcacaccccaccccatgactacagaatgacgtaactgaaagctgaaaggttctgctcctaagtgacacacagtagaaaattaaaatatcta

SEQ ID NO: 1830 - DNA, 122 bp, Homo sapiens
  misc_feature (61)..(62): /note="This region represents a CpG dinucleotide"
  misc_feature (61)..(61): /note="Nucleotide may be methylated to form 5-methylcytosine"
aaaacattttgatttcctttagccacttgcagggtcttgcgccatccttttgtctgggtgcgtagctgtccagcagctctagcactacctggaagttgaggcatggtcatgcagaactaagg

SEQ ID NO: 1831 - DNA, 122 bp, Homo sapiens
  misc_feature (61)..(62): /note="This region represents a CpG dinucleotide"
  misc_feature (61)..(61): /note="Nucleotide may be methylated to form 5-methylcytosine"
tggtttaacctaaacatgccctgggcctttgcacattgcaacaccctgagttttctcattcgtctttggcaagtttttactgctatgatagagatgatgggaactactggggagtaagagga

SEQ ID NO: 1832 - DNA, 122 bp, Homo sapiens
  misc_feature (61)..(62): /note="This region represents a CpG dinucleotide"
  misc_feature (61)..(61): /note="Nucleotide may be methylated to form 5-methylcytosine"
catcagcatcttcccacctgtggtgccctggcccagcctccttccggttggggttggacccgccctggcagccaggttttgcgtcacctgccccacccgccctgtaacctacttgcccaact

SEQ ID NO: 1833 - DNA, 122 bp, Homo sapiens
  misc_feature (61)..(62): /note="This region represents a CpG dinucleotide"
  misc_feature (61)..(61): /note="Nucleotide may be methylated to form 5-methylcytosine"
ctttcctggttctgttccaccctgccatttaggacccagttttcttccatcgtacagttacgtcatcccctaggccttgtcactgcctgcatgcttcaggctggagggctgtggatgccacc

SEQ ID NO: 1834 - DNA, 122 bp, Homo sapiens
  misc_feature (61)..(62): /note="This region represents a CpG dinucleotide"
  misc_feature (61)..(61): /note="Nucleotide may be methylated to form 5-methylcytosine"
gctactgcctttgggccttgacatagccttggggatgggcaacacaaatgttatccaacccgttggcaggtgaggcaggtcaggccaacacaagttgaggggcccgtccagagcaacaggtg

SEQ ID NO: 1835 - DNA, 122 bp, Homo sapiens
  misc_feature (61)..(62): /note="This region represents a CpG dinucleotide"
  misc_feature (61)..(61): /note="Nucleotide may be methylated to form 5-methylcytosine"
cactatgcaaaattgtagggcattatctcctctaatcctcagaatcttatgcagtagggccggtgttgctattactccattttatagatgaggaaacttaggcttggggtgtttaagtaact

SEQ ID NO: 1836 - DNA, 122 bp, Homo sapiens
  misc_feature (61)..(62): /note="This region represents a CpG dinucleotide"
  misc_feature (61)..(61): /note="Nucleotide may be methylated to form 5-methylcytosine"
agttatattgctgagcccagaatcagaaaaggacattgcagatgaatggcaaaaggtgtgcgtacagggaagggtagggatttggaaccagttttgcaatctaccacatgatcttgggtaag

SEQ ID NO: 1837 - DNA, 122 bp, Homo sapiens
  misc_feature (61)..(62): /note="This region represents a CpG dinucleotide"
  misc_feature (61)..(61): /note="Nucleotide may be methylated to form 5-methylcytosine"
atatactatatgattccattttcacaaagtacaaaaacaggctgaactactactctgtggcgttagaaatcaggatagtggttacacttgtcaggaggaagtgactagaagggaagctacaa

SEQ ID NO: 1838 - DNA, 122 bp, Homo sapiens
  misc_feature (61)..(62): /note="This region represents a CpG dinucleotide"
  misc_feature (61)..(61): /note="Nucleotide may be methylated to form 5-methylcytosine"
ttttgctacttcctctgttatttccctatctccagtatttatcatcttttgctggactagcgcaataacccaatgcagtcatagatttcatcagtccaacctccacatcacagcccaaggtg

SEQ ID NO: 1839 - DNA, 122 bp, Homo sapiens
  misc_feature (61)..(62): /note="This region represents a CpG dinucleotide"
  misc_feature (61)..(61): /note="Nucleotide may be methylated to form 5-methylcytosine"
aattattgggagtgcctaccatgtgtcagacttttcttacatattaacttctttaatccccgcagtcattctataaggaagttactactgtaaactccattttacagataaggaaagtaagg

SEQ ID NO: 1840 - DNA, 122 bp, Homo sapiens
  misc_feature (61)..(62): /note="This region represents a CpG dinucleotide"
  misc_feature (61)..(61): /note="Nucleotide may be methylated to form 5-methylcytosine"
atttcactctgggatgttgtaacaagtccatgtttgttgcaacatggggtaaggttattacgaaggagagacacagcgatcagtgtataaatccaatctatattgatggtctggagaagaac

SEQ ID NO: 1841 - DNA, 122 bp, Homo sapiens
  misc_feature (61)..(62): /note="This region represents a CpG dinucleotide"
  misc_feature (61)..(61): /note="Nucleotide may be methylated to form 5-methylcytosine"
agccctccccaccccgcccacaagcccagcgccttcctgaagtgaccctccctgcagaggcgatattaatagccgtggcagggctcgaatcacaggccaagaatgttacccagcagctcgtg

SEQ ID NO: 1842 - DNA, 122 bp, Homo sapiens
  misc_feature (61)..(62): /note="This region represents a CpG dinucleotide"
  misc_feature (61)..(61): /note="Nucleotide may be methylated to form 5-methylcytosine"
cctctcttcttggcactttgaggcctggccatgaggggtatgtgcctgttcattccctcacgaaaagcggagaaggaaggatctagccgattgcacactaaagataacttggaaaaggaact

SEQ ID NO: 1843 - DNA, 122 bp, Homo sapiens
  misc_feature (61)..(62): /note="This region represents a CpG dinucleotide"
  misc_feature (61)..(61): /note="Nucleotide may be methylated to form 5-methylcytosine"
ccttttgccataagcgaaacagagaagaaagtcagcgtgtcccgaggattaaggagaggtcggaagatccgaagaacctgctgctgacagatttgcttattaaaaagcctgctccagtggac

SEQ ID NO: 1844 - DNA, 122 bp, Homo sapiens
  misc_feature (61)..(62): /note="This region represents a CpG dinucleotide"
  misc_feature (61)..(61): /note="Nucleotide may be methylated to form 5-methylcytosine"
atatatatatatatatatatacacacatacatacatacacacacacacacttaatatatacgcataaaaattaaaattaaaaacaaagtgttacagctcttttagaatttgtctagcaggat

SEQ ID NO: 1845 - DNA, 122 bp, Homo sapiens
  misc_feature (61)..(62): /note="This region represents a CpG dinucleotide"
  misc_feature (61)..(61): /note="Nucleotide may be methylated to form 5-methylcytosine"
gggaatgaaaagagtggaatctgcagaagcacaccgccagtgcgaatgcagtgttcctcccgtcctgctccctacccatcatctccctccctcctgcctgcccactggcacaacttccacct

SEQ ID NO: 1846 - DNA, 122 bp, Homo sapiens
  misc_feature (61)..(62): /note="This region represents a CpG dinucleotide"
  misc_feature (61)..(61): /note="Nucleotide may be methylated to form 5-methylcytosine"
gtggaggtgggaagaccagtgaagaggccactgcaaccatgcaactaatagacaccgggacgtggaccaggtccgtaagaggcagccagtcgtggacatgttttaaagaaaagtagtgactc

SEQ ID NO: 1847 - DNA, 122 bp, Homo sapiens
  misc_feature (61)..(62): /note="This region represents a CpG dinucleotide"
  misc_feature (61)..(61): /note="Nucleotide may be methylated to form 5-methylcytosine"
tctttgtgggagtggattttgagaagtgctaattccgtggcagtttggagatattaataccgtgctggcagtagataaacagacatccgaggggcatataatgagaagataatcagccactg

SEQ ID NO: 1848 - DNA, 122 bp, Homo sapiens
  misc_feature (61)..(62): /note="This region represents a CpG dinucleotide"
  misc_feature (61)..(61): /note="Nucleotide may be methylated to form 5-methylcytosine"
gagctccctctttagtcagctggtgtgatttcctcaacaggctttactagagccgtactccgttgagcaaccattaatggtattgaatgcatgacaactactatggccatttctttaaacat

SEQ ID NO: 1849 - DNA, 122 bp, Homo sapiens
  misc_feature (61)..(62): /note="This region represents a CpG dinucleotide"
  misc_feature (61)..(61): /note="Nucleotide may be methylated to form 5-methylcytosine"
agaataatctattatttggagcctgccaagaggtactgtaatgggtaattctgacgtcagcgcaccaaaactatcctgattccaaatatgtatgcacctcaaggtcatcaaacatttgccaa

SEQ ID NO: 1850 - DNA, 122 bp, Homo sapiens
  misc_feature (61)..(62): /note="This region represents a CpG dinucleotide"
  misc_feature (61)..(61): /note="Nucleotide may be methylated to form 5-methylcytosine"
gagtggacaaggaaagctggccgagttcacaggcacctggcattagctgactgaagccagcgtaccctgaagagccaaacaagtccatggcagggatgtctgcggtgtcgagatggttttaa

SEQ ID NO: 1851 - DNA, 122 bp, Homo sapiens
  misc_feature (61)..(62): /note="This region represents a CpG dinucleotide"
  misc_feature (61)..(61): /note="Nucleotide may be methylated to form 5-methylcytosine"
tttattgcaacatggtttcccctttaaaagtgaccgctaaagcaggaaggccacgcagaacggcacagaagaaggctccctcagtactcaataatttaaagagagatcccagccggcccttc

SEQ ID NO: 1852 - DNA, 122 bp, Homo sapiens
  misc_feature (61)..(62): /note="This region represents a CpG dinucleotide"
  misc_feature (61)..(61): /note="Nucleotide may be methylated to form 5-methylcytosine"
gctgtcttagctaacttccgggattatggtgagggtaaatgacaaaaaattaaagactttcggaaagggaagagaaaggaaccaatatcagtccctgcttaccatatatgactcactctgct

SEQ ID NO: 1853 - DNA, 122 bp, Homo sapiens
  misc_feature (61)..(62): /note="This region represents a CpG dinucleotide"
  misc_feature (61)..(61): /note="Nucleotide may be methylated to form 5-methylcytosine"
ttacttaatatagtcacttcctgattattcctttctttcttttgtggtttctcaacctttcggtgtcactgattaagattccttataccagaagtatatagctgacaggacaaagggcccca

SEQ ID NO: 1854 - DNA, 122 bp, Homo sapiens
  misc_feature (61)..(62): /note="This region represents a CpG dinucleotide"
  misc_feature (61)..(61): /note="Nucleotide may be methylated to form 5-methylcytosine"
actcacaaaggtatacatatagaaaagcaacatgacagaaataaccaatgtcccagataacgtcagggagtggagctgcctgcaacttgaaacattcagctcaaactgtaaaggagaaataa

SEQ ID NO: 1855 - DNA, 122 bp, Homo sapiens
  misc_feature (61)..(62): /note="This region represents a CpG dinucleotide"
  misc_feature (61)..(61): /note="Nucleotide may be methylated to form 5-methylcytosine"
agccaccacacctagccttatgttgttttttaagaaaacacacacattatgttatgctcacgttatcagaaacaaatgagactgaccctggcaagtcccaaccaaggaatctgtctccagat

SEQ ID NO: 1856 - DNA, 122 bp, Homo sapiens
  misc_feature (61)..(62): /note="This region represents a CpG dinucleotide"
  misc_feature (61)..(61): /note="Nucleotide may be methylated to form 5-methylcytosine"
ttcattaattgtctctgcctgttgcctcttactcatttctacttccccattcagtcacatcgtcaccttgaaacttaccaaccaatgctcaaaatagcccatgctgatcttcctgttcttcc

SEQ ID NO: 1857 - DNA, 122 bp, Homo sapiens
  misc_feature (61)..(62): /note="This region represents a CpG dinucleotide"
  misc_feature (61)..(61): /note="Nucleotide may be methylated to form 5-methylcytosine"
tgttaggctgcagtgccggtctaaggaaaatctgatgaaactgtctgtcagatgactcaacgtctcccaggaatgagcctgctttagtgtccctgttgtgctcagccactgactgggtcaga

SEQ ID NO: 1858 - DNA, 122 bp, Homo sapiens
  misc_feature (61)..(62): /note="This region represents a CpG dinucleotide"
  misc_feature (61)..(61): /note="Nucleotide may be methylated to form 5-methylcytosine"
acagctgatacatttcagggctgggattcaaattcaagacttctgactccagagccctaccgttcaaccaggaagtaccttatacagtcttttccacagatggtttcttcctcagtggggga

SEQ ID NO: 1859 - DNA, 122 bp, Homo sapiens
  misc_feature (61)..(62): /note="This region represents a CpG dinucleotide"
  misc_feature (61)..(61): /note="Nucleotide may be methylated to form 5-methylcytosine"
tagggaatgcttcatgaatttgcaagtcatccttgcacggggccatgctaatttctgtatcgttcaaaaaaaaatgattgcttaatgtacaaatgttcagatgttctctgcagggattagtg

SEQ ID NO: 1860 - DNA, 122 bp, Homo sapiens
  misc_feature (61)..(62): /note="This region represents a CpG dinucleotide"
  misc_feature (61)..(61): /note="Nucleotide may be methylated to form 5-methylcytosine"
caaagcagtcgcccgtcctggttctccaggatgcctgggtcagagcatgaataaccaccccgctccccacgcacggagcctcgcagtggctcgagctgagaatcaaagcggccgatccaggg

SEQ ID NO: 1861 - DNA, 122 bp, Homo sapiens
  misc_feature (61)..(62): /note="This region represents a CpG dinucleotide"
  misc_feature (61)..(61): /note="Nucleotide may be methylated to form 5-methylcytosine"
caagtaatgtcacatgcttagcacagcacatagtaagaatttgacacataggctgggtgccgtggctcacgcctgtaatcccagcactttgggaggctgaggcaggtggatcacgaggtcag

SEQ ID NO: 1862 - DNA, 122 bp, Homo sapiens
  misc_feature (61)..(62): /note="This region represents a CpG dinucleotide"
  misc_feature (61)..(61): /note="Nucleotide may be methylated to form 5-methylcytosine"
gagaaaacaggcatgttaaagcggttaagcaacgtcctcgaggtcactcagccagtaagacgttaactgagcctaggttcaatctaggtctatcaggcagcaaagtgttttattacttggga

SEQ ID NO: 1863 - DNA, 122 bp, Homo sapiens
  misc_feature (61)..(62): /note="This region represents a CpG dinucleotide"
  misc_feature (61)..(61): /note="Nucleotide may be methylated to form 5-methylcytosine"
atttcaactctgtgctgagctggcaaaagctctaaatcaacccagctctgcaacccagctcgcttagcttacccttcagatgttccagtagtaggacgactttgcaatattcactggcaacg

SEQ ID NO: 1864 - DNA, 122 bp, Homo sapiens
  misc_feature (61)..(62): /note="This region represents a CpG dinucleotide"
  misc_feature (61)..(61): /note="Nucleotide may be methylated to form 5-methylcytosine"
cactgcacaggatgtatcattagtaatttgttgtggttaagacctgagtaatgaaatatgcgagtggtttactttttagatgtgaaattagagaagattcgaagttgtcccgtgataacagt

SEQ ID NO: 1865 - DNA, 122 bp, Homo sapiens
  misc_feature (61)..(62): /note="This region represents a CpG dinucleotide"
  misc_feature (61)..(61): /note="Nucleotide may be methylated to form 5-methylcytosine"
gggactagggtgagaagtgtagcacctagggcacagaatctaaggatgtgggccaggcgccgtggctcatgcctataatcccagccctttgggaggctgaggtgggtggatcacttgggatc

SEQ ID NO: 1866 - DNA, 122 bp, Homo sapiens
  misc_feature (61)..(62): /note="This region represents a CpG dinucleotide"
  misc_feature (61)..(61): /note="Nucleotide may be methylated to form 5-methylcytosine"
caggctggttcagtgataagcaggagccaggcgacccacaggcttcttggatgggctgggcgtgcatggcataaccgtttgagaacaacaaaccaagccggccgggctgccgctctgtttcc

SEQ ID NO: 1867 - DNA, 122 bp, Homo sapiens
  misc_feature (61)..(62): /note="This region represents a CpG dinucleotide"
  misc_feature (61)..(61): /note="Nucleotide may be methylated to form 5-methylcytosine"
agcccagtactagggactataaccttttggctaagacactcacagaagaagtaacttcctcggttggggaagaagaagatttagcctaggccagtggttctcaaatttagtgactgtaagct

SEQ ID NO: 1868 - DNA, 122 bp, Homo sapiens
  misc_feature (61)..(62): /note="This region represents a CpG dinucleotide"
  misc_feature (61)..(61): /note="Nucleotide may be methylated to form 5-methylcytosine"
ccaagtgctgagatatattgggaagcccagagtcagcacttttggtggctcaggaggcagcgggccctgatttttgccgaatgcagaaagctagagcctccttgctgctcggtcccagagtc

SEQ ID NO: 1869 - DNA, 122 bp, Homo sapiens
  misc_feature (61)..(62): /note="This region represents a CpG dinucleotide"
  misc_feature (61)..(61): /note="Nucleotide may be methylated to form 5-methylcytosine"
gggcgtgcgagtgcaggatgtgcgagggacccattgtatttgggtcgcaagcagcccacccgtcttgagtacgatattctcattccgcaggcgcgccctgggcgtgggagaaggtgggcccg

SEQ ID NO: 1870 - DNA, 122 bp, Homo sapiens
  misc_feature (61)..(62): /note="This region represents a CpG dinucleotide"
  misc_feature (61)..(61): /note="Nucleotide may be methylated to form 5-methylcytosine"
accttgcttgagaagcttacagactttccagttctgcaactctgacagtctgtgagttctcgtcttatctccttttgccatagtttcctagtcattcaccaggggttggtaaggaaatagga

SEQ ID NO: 1871 - DNA, 122 bp, Homo sapiens
  misc_feature (61)..(62): /note="This region represents a CpG dinucleotide"
  misc_feature (61)..(61): /note="Nucleotide may be methylated to form 5-methylcytosine"
tcaacaagccaaaccccaacttcaaaagctcctgccgaggagaggaaatactgatcagcacgtccctgctctgacgctgctcaccatggccttggcgctcactgctgccctgccccagaatc

SEQ ID NO: 1872 - DNA, 122 bp, Homo sapiens
  misc_feature (61)..(62): /note="This region represents a CpG dinucleotide"
  misc_feature (61)..(61): /note="Nucleotide may be methylated to form 5-methylcytosine"
gtgtgtttgaggtatctatctttattaggtatgtacttactgagtgccctctggatctaacgcttagcagggtaccatactgaccaatctggttaaaatctcaggttgtggaatcagaaaga

SEQ ID NO: 1873 - DNA, 122 bp, Homo sapiens
  misc_feature (61)..(62): /note="This region represents a CpG dinucleotide"
  misc_feature (61)..(61): /note="Nucleotide may be methylated to form 5-methylcytosine"
ttataagagttcccttttctctgcatccttgtcaacacttttttttctttttctttttttcgtctgttcatttgataatagctacgctgattggagtgtagtggtatattattgtggttttg

SEQ ID NO: 1874 - DNA, 122 bp, Homo sapiens
  misc_feature (61)..(62): /note="This region represents a CpG dinucleotide"
  misc_feature (61)..(61): /note="Nucleotide may be methylated to form 5-methylcytosine"
ctctgccctcctccagagggcctagagccagcctaggccctaggctggagtcagcctgcacgctcagcccgccaggaacaacaggccctcagacatcactgtggcagaggttccaaggtggg

SEQ ID NO: 1875 - DNA, 122 bp, Homo sapiens
  misc_feature (61)..(62): /note="This region represents a CpG dinucleotide"
  misc_feature (61)..(61): /note="Nucleotide may be methylated to form 5-methylcytosine"
tttgtggttttcctgacctgatgcactgtgttcacggtctgtgcctttacatgcacacttcgctttgcctagaaggcatttctcaaggcaaactcctactcacacatcaacacctagctcag

SEQ ID NO: 1876 - DNA, 122 bp, Homo sapiens
  misc_feature (61)..(62): /note="This region represents a CpG dinucleotide"
  misc_feature (61)..(61): /note="Nucleotide may be methylated to form 5-methylcytosine"
gcgtgggccgcagctggcagcacaggaagtccaggtggaagagcggcggcgtgggcggcccggcgcggcgcggcgagtgcgggctggtatcggccgagctcgctttttctggggacagagag

SEQ ID NO: 1877 - DNA, 122 bp, Homo sapiens
  misc_feature (61)..(62): /note="This region represents a CpG dinucleotide"
  misc_feature (61)..(61): /note="Nucleotide may be methylated to form 5-methylcytosine"
ttgagatctatttcacaggcctttgtgaggcttaactgggatctcacatacaaaggacttcgtgcctggcttgtcccctctctctgtgaacaccctagacaacctgatattccaggccttgg

SEQ ID NO: 1878 - DNA, 122 bp, Homo sapiens
  misc_feature (61)..(62): /note="This region represents a CpG dinucleotide"
  misc_feature (61)..(61): /note="Nucleotide may be methylated to form 5-methylcytosine"
ctagaatccagagatgactcgcaggttccatctgagttccttaaaggacagtttctgcaacgtaggtgttccatgattgcttgttgaatgaatgaataggagtatctatcacaaccatgtcc

SEQ ID NO: 1879 - DNA, 122 bp, Homo sapiens
  misc_feature (61)..(62): /note="This region represents a CpG dinucleotide"
  misc_feature (61)..(61): /note="Nucleotide may be methylated to form 5-methylcytosine"
ctgggggccgccgcctttggccctggctccgggcccgtgtggctggacgaggtggggtgccggggcagcgaggcgtccctgtggggctgccctgcggagcggtggggacgcggagaccgcgc

SEQ ID NO: 1880 - DNA, 122 bp, Homo sapiens
  misc_feature (61)..(62): /note="This region represents a CpG dinucleotide"
  misc_feature (61)..(61): /note="Nucleotide may be methylated to form 5-methylcytosine"
ccccccactgggatgccagccaccaggagtctaatcctgatgctgtgtggcctgggcacacgttttccccattctgggcctgtttcctcagctgaaaaatcgcatcctagacccatttgctt

SEQ ID NO: 1881 - DNA, 122 bp, Homo sapiens
  misc_feature (61)..(62): /note="This region represents a CpG dinucleotide"
  misc_feature (61)..(61): /note="Nucleotide may be methylated to form 5-methylcytosine"
ggttcaagtgatcctctcaccttggcctcccaaaattctgggggtacaagcatgagtcaccgtgcctggccatccctggattctagatctgggcctggcacataatagatattcagtaaata

SEQ ID NO: 1882 - DNA, 122 bp, Homo sapiens
  misc_feature (61)..(62): /note="This region represents a CpG dinucleotide"
  misc_feature (61)..(61): /note="Nucleotide may be methylated to form 5-methylcytosine"
aaccgttgcccgtctgaggtgacccaattcagggaccagccgcttggctctgaacacacacgtgtcacaaccccagctcgtacccaggccttgctagaggtaagaacgtggcatccctccct

SEQ ID NO: 1883 - DNA, 122 bp, Homo sapiens
  misc_feature (61)..(62): /note="This region represents a CpG dinucleotide"
  misc_feature (61)..(61): /note="Nucleotide may be methylated to form 5-methylcytosine"
cagagaaaaagtgctgcagtcagcagttctcttaagacagggaaactgacacacagacagcgcaggcttggccagggccatgttgccaacaggcactaatggaaactcagctaccgcctgct

SEQ ID NO: 1884 - DNA, 122 bp, Homo sapiens
  misc_feature (61)..(62): /note="This region represents a CpG dinucleotide"
  misc_feature (61)..(61): /note="Nucleotide may be methylated to form 5-methylcytosine"
gctgcccactgggagtagctgaaaatggcaacgtgctgctgtctcctggcttcatgtctacgttactgcctgtgcagctcacaaacactccctttcctgaacatatggagcaatctcaggaa

SEQ ID NO: 1885 - DNA, 122 bp, Homo sapiens
  misc_feature (61)..(62): /note="This region represents a CpG dinucleotide"
  misc_feature (61)..(61): /note="Nucleotide may be methylated to form 5-methylcytosine"
tgttactcatgtggttttcccgacatccctcctctctcaggtaatgattcattggtgtggcgcaagacaagtcaaagcaccagtgtttcaactaagaaagaagatgagacaatcacaaggcc

SEQ ID NO: 1886 - DNA, 122 bp, Homo sapiens
  misc_feature (61)..(62): /note="This region represents a CpG dinucleotide"
  misc_feature (61)..(61): /note="Nucleotide may be methylated to form 5-methylcytosine"
cggaaccattctaagtgttttacatgtattaactcatttaattctctcaacaatcctaggcgagagatcacgtcacttgcttaagatgacacagtagcagaactaggattcaaacacaagca

SEQ ID NO: 1887 - DNA, 122 bp, Homo sapiens
  misc_feature (61)..(62): /note="This region represents a CpG dinucleotide"
  misc_feature (61)..(61): /note="Nucleotide may be methylated to form 5-methylcytosine"
taagagaggatttaagaatcctatgaaaagcaaacagcaggaggccagcttatacatgatcgccacaagatagacggcttccttcttggcttctgttgtagagaactttcaactgtctcctc

SEQ ID NO: 1888 - DNA, 122 bp, Homo sapiens
  misc_feature (61)..(62): /note="This region represents a CpG dinucleotide"
  misc_feature (61)..(61): /note="Nucleotide may be methylated to form 5-methylcytosine"
catgaatgaatgtgcctattagctcattctgttctaaaccctatgattccccggatgtcacgtgccacctgttcctactgactaggtaccaggcactgaaaccaccattgcaaaattataac

SEQ ID NO: 1889 - DNA, 122 bp, Homo sapiens
  misc_feature (61)..(62): /note="This region represents a CpG dinucleotide"
  misc_feature (61)..(61): /note="Nucleotide may be methylated to form 5-methylcytosine"
tcctctagttgtcccttatattgtatctagcacgtatgatgagtcacatccttcatcatgcgtcagtaaggttagattaagttcagtctcccaaaacctctcctagtgtgacaagtcccatc

SEQ ID NO: 1890 - DNA, 122 bp, Homo sapiens
  misc_feature (61)..(62): /note="This region represents a CpG dinucleotide"
  misc_feature (61)..(61): /note="Nucleotide may be methylated to form 5-methylcytosine"
aaatcatcttccaccacatgggtgcactggagtctctgagcctattctggctcaggaggccgcctgattcacgaatcattttttgctcaaagtcttttaaatttaatttggctaaagttttt

SEQ ID NO: 1891 - DNA, 122 bp, Homo sapiens
  misc_feature (61)..(62): /note="This region represents a CpG dinucleotide"
  misc_feature (61)..(61): /note="Nucleotide may be methylated to form 5-methylcytosine"
ggcgggcactccacgatgcatatgggcaccactgaagagccaagtcttactgaagggactcggtgtgtttcacaatttgtgtcatacacaaatgtgagggtgtgttccaataggtggtgctg

SEQ ID NO: 1892 - DNA, 122 bp, Homo sapiens
  misc_feature (61)..(62): /note="This region represents a CpG dinucleotide"
  misc_feature (61)..(61): /note="Nucleotide may be methylated to form 5-methylcytosine"
tgccttagccacccaaaacgctaggattataggtgtgagctgtctgataaccccatgagacgtagaaattaaaacatcactacagtgggagatgatgcatagaaacaggaaacaggaaaact

SEQ ID NO: 1893 - DNA, 122 bp, Homo sapiens
  misc_feature (61)..(62): /note="This region represents a CpG dinucleotide"
  misc_feature (61)..(61): /note="Nucleotide may be methylated to form 5-methylcytosine"
ctgcctcggcctcccaaagtgctgggattacaggcaagaaccaccacacccagcctgatacgtacattttcaattttacaggcctgtgtcactgtgcccagcacttctactttcttttaaaa

SEQ ID NO: 1894 - DNA, 122 bp, Homo sapiens
  misc_feature (61)..(62): /note="This region represents a CpG dinucleotide"
  misc_feature (61)..(61): /note="Nucleotide may be methylated to form 5-methylcytosine"
catgacctgctgaagatagtatagctctgggggtcaaatcaagacctaaaccaggccaggcgcggtcagacgtggtggctcacgcctgtaatcccaacactttgagaggccaaggcaggtga

SEQ ID NO: 1895 - DNA, 122 bp, Homo sapiens
  misc_feature (61)..(62): /note="This region represents a CpG dinucleotide"
  misc_feature (61)..(61): /note="Nucleotide may be methylated to form 5-methylcytosine"
gagtagataaatgcatacgtgtctttaaaaagtctaattagtgggaaattgcaggccaggcgcacacagggttgaggcaaatatgtgtgattatacatgcagcttaactaaataacccataa

SEQ ID NO: 1896 - DNA, 122 bp, Homo sapiens
  misc_feature (61)..(62): /note="This region represents a CpG dinucleotide"
  misc_feature (61)..(61): /note="Nucleotide may be methylated to form 5-methylcytosine"
taatcctccactgagtcttcccttggggtaactgttgcccaactgcagcatctgaagtgtcggttagcacgttgggatggtgaccacatgcatagtgcgtttactgaagttgtgctcatgct

SEQ ID NO: 1897 - DNA, 122 bp, Homo sapiens
  misc_feature (61)..(62): /note="This region represents a CpG dinucleotide"
  misc_feature (61)..(61): /note="Nucleotide may be methylated to form 5-methylcytosine"
tatcagtcttgagccaatcaggactgcaacttttacttttcaggcaatgctctacacagccgacccagtcaatgcagactggcattacccacattttcctattgctcaactacagaatgagg

SEQ ID NO: 1898 - DNA, 122 bp, Homo sapiens
  misc_feature (61)..(62): /note="This region represents a CpG dinucleotide"
  misc_feature (61)..(61): /note="Nucleotide may be methylated to form 5-methylcytosine"
attgggaaagaggtcagcagaccaatttagggatttccccatattctgcaacactagctacgtgattttggactcatcatttaccccttgctactgcttcctcatttcccaatagggagttg

SEQ ID NO: 1899 - DNA, 122 bp, Homo sapiens
  misc_feature (61)..(62): /note="This region represents a CpG dinucleotide"
  misc_feature (61)..(61): /note="Nucleotide may be methylated to form 5-methylcytosine"
ggcaccactgagctccggatccaggtaaccgacgccaatgataatcccccggtattcaaccgagacgtgtacagagtcagccttcgggaaaacgtgccaccaggcaccactgtgttgcaagt

SEQ ID NO: 1900 - DNA, 122 bp, Homo sapiens
  misc_feature (61)..(62): /note="This region represents a CpG dinucleotide"
  misc_feature (61)..(61): /note="Nucleotide may be methylated to form 5-methylcytosine"
ccaatcccttatgaatagtttcctctccccaaatttaatcttagtctagattctaaatttcgtactatcataggatcatataattatagaattaaagagacttgagtcatcatttatttcag

SEQ ID NO: 1901 - DNA, 122 bp, Homo sapiens
  misc_feature (61)..(62): /note="This region represents a CpG dinucleotide"
  misc_feature (61)..(61): /note="Nucleotide may be methylated to form 5-methylcytosine"
aaccagcaatggcaggttgagtcattcccatgtcacctgatggtgactctttcctgcttccgtcttctactcacggggacccctgtgatgactttgggagcacctggatgatccaggaaact

SEQ ID NO: 1902 - DNA, 122 bp, Homo sapiens
  misc_feature (61)..(62): /note="This region represents a CpG dinucleotide"
  misc_feature (61)..(61): /note="Nucleotide may be methylated to form 5-methylcytosine"
cctgccatgtcatcctgttcctcttctgacacaggcaagagcagtaatgttccagttgggcgttgacttcttccaggactgggtcaacattcaggaattatgaaactagttgcctcatttcc

SEQ ID NO: 1903 - DNA, 122 bp, Homo sapiens
  misc_feature (61)..(62): /note="This region represents a CpG dinucleotide"
  misc_feature (61)..(61): /note="Nucleotide may be methylated to form 5-methylcytosine"
cttcagtccagtttctctgttgtctcagctgtgaagagttgggctccacagggctggggccgaggctggggagattagagagtttgtttggtttctatctccaagggctttgggcctcagcc

SEQ ID NO: 1904 - DNA, 122 bp, Homo sapiens
  misc_feature (61)..(62): /note="This region represents a CpG dinucleotide"
  misc_feature (61)..(61): /note="Nucleotide may be methylated to form 5-methylcytosine"
ttgttctggagctgtagaagtcctgagtgttccacttcatctgcttcctctttctaggttcgaagcatactgtgggcataggtccatcatctacatgacatgccttactcaacctaaggagc

SEQ ID NO: 1905 - DNA, 122 bp, Homo sapiens
  misc_feature (61)..(62): /note="This region represents a CpG dinucleotide"
  misc_feature (61)..(61): /note="Nucleotide may be methylated to form 5-methylcytosine"
ctccttcttccggctctgtaactcctctcctccctatccttgggagtggctttaggggaccgcttctgggaggcaagatggggaagttccactgtagctaaagacaagcttttcctatttca

SEQ ID NO: 1906 - DNA, 122 bp, Homo sapiens
  misc_feature (61)..(62): /note="This region represents a CpG dinucleotide"
  misc_feature (61)..(61): /note="Nucleotide may be methylated to form 5-methylcytosine"
tcctcaaaccactggttttgtagctacaccaacagacccagagaaaggggccactgccttcggagaccctgccagactcagccctagcctacagcgccacacgcttactttagcctgcaaat

SEQ ID NO: 1907 - DNA, 122 bp, Homo sapiens
  misc_feature (61)..(62): /note="This region represents a CpG dinucleotide"
  misc_feature (61)..(61): /note="Nucleotide may be methylated to form 5-methylcytosine"
acagccatatccatttgtctgaatgggaccagtaactgttatattgcacccaccttgctacgttactatacatcttttgaaaaccaaagttcttagctgggcgtggtgactcatgcctgtaa

SEQ ID NO: 1908 - DNA, 122 bp, Homo sapiens
  misc_feature (61)..(62): /note="This region represents a CpG dinucleotide"
  misc_feature (61)..(61): /note="Nucleotide may be methylated to form 5-methylcytosine"
tccccatccttcttaggatccaaactttgtctcctatccattacaggctatcaaaactcacgttccaggctttccaatttcgaatcacaagagactgttgctgctaccctgtcaacaacgat

SEQ ID NO: 1909 - DNA, 122 bp, Homo sapiens
  misc_feature (61)..(62): /note="This region represents a CpG dinucleotide"
  misc_feature (61)..(61): /note="Nucleotide may be methylated to form 5-methylcytosine"
tgcccctgacccacatggacctggtttccaggccagccgcatgggagtggaggcagtcatcgccttgctagaggccaccccggacaccccagcttgcgtcgtgtcactgaacgggaaccacg

SEQ ID NO: 1910 - DNA, 122 bp, Homo sapiens
  misc_feature (61)..(62): /note="This region represents a CpG dinucleotide"
  misc_feature (61)..(61): /note="Nucleotide may be methylated to form 5-methylcytosine"
atcaccccatcactccagccaacaggcaaccaatgaccagatatgtgactagctagttaccgcttgtgaatcctccagctacaaaagtgagctcagccaagatcagctgagcctggcttatg

SEQ ID NO: 1911 - DNA, 122 bp, Homo sapiens
  misc_feature (61)..(62): /note="This region represents a CpG dinucleotide"
  misc_feature (61)..(61): /note="Nucleotide may be methylated to form 5-methylcytosine"
ggcccggcctggaaccagggacacatgcagtgtcttcttcaccaagtagaaggcagcagccgtgtagctcactcagtcctcccgtggggtgggtcgtgcaaggcagcattagtgagagatgt

SEQ ID NO: 1912 - DNA, 122 bp, Homo sapiens
  misc_feature (61)..(62): /note="This region represents a CpG dinucleotide"
  misc_feature (61)..(61): /note="Nucleotide may be methylated to form 5-methylcytosine"
tgggtgtagccggggctgccatgtcctttcctactggctgagtgtctgtttggtttggtccgtgcttgtgctaaaactcttcctgaactattctgtctaatccctcctgcgtatgtcaactt

SEQ ID NO: 1913 - DNA, 122 bp, Homo sapiens
  misc_feature (61)..(62): /note="This region represents a CpG dinucleotide"
  misc_feature (61)..(61): /note="Nucleotide may be methylated to form 5-methylcytosine"
cacctgccccttgctttcttgtgcagctcttcacggcagctggccccagccagcggaaggcgcctatgagccctgagcctgtggtcctcagcttgggcggccagcggcctctagcaggcccc

SEQ ID NO: 1914 - DNA, 122 bp, Homo sapiens
  misc_feature (61)..(62): /note="This region represents a CpG dinucleotide"
  misc_feature (61)..(61): /note="Nucleotide may be methylated to form 5-methylcytosine"
gcttttcactgcctactgaattaagcctctgccaagcattcaagactttccacaatatgacgccgagcaatccttccagctctgtattttattatttctccaaatgtacagatgcagaccaa

SEQ ID NO: 1915 - DNA, 122 bp, Homo sapiens
  misc_feature (61)..(62): /note="This region represents a CpG dinucleotide"
  misc_feature (61)..(61): /note="Nucleotide may be methylated to form 5-methylcytosine"
aagaatgggtgtataaatacctccactctttcctcccttgggtgagataactctgaggcacgtgtttgacattgcttcatggagttccccagcaggattaagttccagttgccctcagtggt

SEQ ID NO: 1916 - DNA, 122 bp, Homo sapiens
  misc_feature (61)..(62): /note="This region represents a CpG dinucleotide"
  misc_feature (61)..(61): /note="Nucleotide may be methylated to form 5-methylcytosine"
attgagaaggacaccaggccacgcatctgtagggtggcccagtgggaaagacccaaaagtcgctcctgtgacttctctttttcaaaaaagcggccagaggctttggaaagatttgggttgtg

SEQ ID NO: 1917 - DNA, 122 bp, Homo sapiens
  misc_feature (61)..(62): /note="This region represents a CpG dinucleotide"
  misc_feature (61)..(61): /note="Nucleotide may be methylated to form 5-methylcytosine"
agcacagccctgtcttcccttcaggcatcaggtgtgtccagtctggaggtgtggcttttacgtggagcagatccccagttaggtcagtgtccacccacagctcctctgtgaagatgagaggc

SEQ ID NO: 1918 - DNA, 122 bp, Homo sapiens
  misc_feature (61)..(62): /note="This region represents a CpG dinucleotide"
  misc_feature (61)..(61): /note="Nucleotide may be methylated to form 5-methylcytosine"
tgtcccggtctctagcttgtatcaggacttccttgctgtttcctctaatgagtcagaattcgagtctgagtcttaaagcccttcacgaaaaccattcttgactgtctacactagattaagtc

SEQ ID NO: 1919 - DNA, 122 bp, Homo sapiens
  misc_feature (61)..(62): /note="This region represents a CpG dinucleotide"
  misc_feature (61)..(61): /note="Nucleotide may be methylated to form 5-methylcytosine"
gccacaacgctgtgcattcccccaaaaacgcagatgcccacctgctctctttagggaagccggagaggccgccgggaacaggcagtgacggcggtgatccagtggatcctccccagggcgtg

SEQ ID NO: 1920 - DNA, 122 bp, Homo sapiens
  misc_feature (61)..(62): /note="This region represents a CpG dinucleotide"
  misc_feature (61)..(61): /note="Nucleotide may be methylated to form 5-methylcytosine"
agccctgggattacagatgtgagccactgtacttggccctgcatctgctttttaatttaacgtgagatttttctcatgttactctacactttacaccaaaaccatctcttgcggtgcacagt

SEQ ID NO: 1921 - DNA, 122 bp, Homo sapiens
  misc_feature (61)..(62): /note="This region represents a CpG dinucleotide"
  misc_feature (61)..(61): /note="Nucleotide may be methylated to form 5-methylcytosine"
agaaagcaggaaacacctttatttccctgctgtgctgagtgaatcttttagcagacttgccgaaacaagaaatgagccaggtttctttgtttttgtttttgtttttgtttttgttttgaaga

SEQ ID NO: 1922 - DNA, 122 bp, Homo sapiens
  misc_feature (61)..(62): /note="This region represents a CpG dinucleotide"
  misc_feature (61)..(61): /note="Nucleotide may be methylated to form 5-methylcytosine"
tggtggggcagcgggcagacggtcctggagcaggaagcgggcagtgggggtggcacccgccgcctcccgggcagcccaaggcaagcacaggcaaccggggccgggccacggcacctgggggt

SEQ ID NO: 1923 - DNA, 122 bp, Homo sapiens
  misc_feature (61)..(62): /note="This region represents a CpG dinucleotide"
  misc_feature (61)..(61): /note="Nucleotide may be methylated to form 5-methylcytosine"
cactctgggagaactgaagaagatgcgaaagtataaaacagtcctgcccttaggagcttacggattaattgaagacagggcataaacatttgaaaagttacccaacatcagagaatgagagg

SEQ ID NO: 1924 - DNA, 122 bp, Homo sapiens
  misc_feature (61)..(62): /note="This region represents a CpG dinucleotide"
  misc_feature (61)..(61): /note="Nucleotide may be methylated to form 5-methylcytosine"
ctttaagcaaggccagacagtgtggttatatatttttttctctggtgaggtttagctgcacgagtgctggcacaaagtaggtagagtatgtttttgccatgaaagtttgacaaaggcagaaa

SEQ ID NO: 1925 - DNA, 122 bp, Homo sapiens
  misc_feature (61)..(62): /note="This region represents a CpG dinucleotide"
  misc_feature (61)..(61): /note="Nucleotide may be methylated to form 5-methylcytosine"
tggcctcatctcagagctgctgtccctgcactttgaagatgaggcagcgcatttggggagcggctgcatttagggagtggccaaaatctccagacactgcattcctgacacttagtgctcct

SEQ ID NO: 1926 - DNA, 122 bp, Homo sapiens
  misc_feature (61)..(62): /note="This region represents a CpG dinucleotide"
  misc_feature (61)..(61): /note="Nucleotide may be methylated to form 5-methylcytosine"
actcgcagcacctggattatatcaccgagaagctctggcgcaacgcgttgctcgctggggcggtgccggtggtgctgggcccagaccgtgccaactacgagcgctttgtgccccgcggcgcc

SEQ ID NO: 1927 - DNA, 122 bp, Homo sapiens
  misc_feature (61)..(62): /note="This region represents a CpG dinucleotide"
  misc_feature (61)..(61): /note="Nucleotide may be methylated to form 5-methylcytosine"
ccaaaaggaaacactttttcactactggggataggtttcagagaggcagccatcccatgtcggtcaatgttaaaaagaactaactcaagatatttaaatcaagatagctgagttggctgtaa

SEQ ID NO: 1928 - DNA, 122 bp, Homo sapiens
  misc_feature (61)..(62): /note="This region represents a CpG dinucleotide"
  misc_feature (61)..(61): /note="Nucleotide may be methylated to form 5-methylcytosine"
ttccttggtctctcttgaccacaaagtccacgattcagtcactctatgatttctatcaaacgttagtctttgatacaggaaaggaatgtaaagatagcatattttattttcagcattgttat

SEQ ID NO: 1929 - DNA, 122 bp, Homo sapiens
  misc_feature (61)..(62): /note="This region represents a CpG dinucleotide"
  misc_feature (61)..(61): /note="Nucleotide may be methylated to form 5-methylcytosine"
ttatgtaaccagtttatgcaagggcagccggcccgcttacataaggggaggccgggccagcgcccagctggggagggggaggctcttaaagggaccggcgtcccccgcggctccctccacgg

SEQ ID NO: 1930 - DNA, 122 bp, Homo sapiens
  misc_feature (61)..(62): /note="This region represents a CpG dinucleotide"
  misc_feature (61)..(61): /note="Nucleotide may be methylated to form 5-methylcytosine"
gaaacgcacacactgcatccacctgggcctcttcgtattagcctcatgggacttacagggcgaggagaatccacacaagcatgaagctcatgctgcttgctatgctaggggtgagtaataaa

SEQ ID NO: 1931 - DNA, 122 bp, Homo sapiens
  misc_feature (61)..(62): /note="This region represents a CpG dinucleotide"
  misc_feature (61)..(61): /note="Nucleotide may be methylated to form 5-methylcytosine"
ggaggcggaagttgcagtgagctgagatcgtgccactgcactccaacctgcatgacagaacgagagtccatctcagaagaacgctgtaggcacgcatcaagtacaactcagttggtttaaac

SEQ ID NO: 1932 - DNA, 122 bp, Homo sapiens
  misc_feature (61)..(62): /note="This region represents a CpG dinucleotide"
  misc_feature (61)..(61): /note="Nucleotide may be methylated to form 5-methylcytosine"
ttcagaaataaaaactgttgctgacctctgcagactgtggatgctggcgatgcaagtactcgttgagcaggctgtcttgtgtgggtgacagtgtgtattcccacgagcagtcttggagaggc

SEQ ID NO: 1933 - DNA, 122 bp, Homo sapiens
  misc_feature (61)..(62): /note="This region represents a CpG dinucleotide"
  misc_feature (61)..(61): /note="Nucleotide may be methylated to form 5-methylcytosine"
ttcactgtgtcaggggatttaatttgaaatactgaactggagaaaccaaagcaggatattcggaggagaagtcagtgcacatgagttttactgtgtcaggggatttaatctgaaacactgaa

SEQ ID NO: 1934 - DNA, 122 bp, Homo sapiens
  misc_feature (61)..(62): /note="This region represents a CpG dinucleotide"
  misc_feature (61)..(61): /note="Nucleotide may be methylated to form 5-methylcytosine"
gttccccattttcatgttaactcctggccctcaaggatgattaactttagaaactgaaaacgcatttgggctaatcgtttatgagatctgattaagagctttacagagaagatttgcaccgc

SEQ ID NO: 1935 - DNA, 122 bp, Homo sapiens
  misc_feature (61)..(62): /note="This region represents a CpG dinucleotide"
  misc_feature (61)..(61): /note="Nucleotide may be methylated to form 5-methylcytosine"
ctcttcaccagatcccagaggctgaacacctcgaccttctctgcacagcaggtgagtctccgcattaggaacaccttaatattctccaatagtttctttattttgattgagatctctttgct

SEQ ID NO: 1936 - DNA, 122 bp, Homo sapiens
  misc_feature (61)..(62): /note="This region represents a CpG dinucleotide"
  misc_feature (61)..(61): /note="Nucleotide may be methylated to form 5-methylcytosine"
agcccagtgcaactcccatctcacaggccaccagcaagttgctcacatccagacaggagacgctagtcctacaggtgcagtgggaggatctgcagatgactacagctcttggcccttccata

SEQ ID NO: 1937 - DNA, 122 bp, Homo sapiens
  misc_feature (61)..(62): /note="This region represents a CpG dinucleotide"
  misc_feature (61)..(61): /note="Nucleotide may be methylated to form 5-methylcytosine"
ttgcactgggtattgcagtctgttggtcatcagcaggtgactgcctattgccaaaagagacgatgagatgaaaagtaggaattcatgatttcagaatctagcctcacttggagaaagcacct

SEQ ID NO: 1938 - DNA, 122 bp, Homo sapiens
  misc_feature (61)..(62): /note="This region represents a CpG dinucleotide"
  misc_feature (61)..(61): /note="Nucleotide may be methylated to form 5-methylcytosine"
cagggggcgccagtcacccagctaggaagtgaatggcgtcccttgctgtgatgcagtccacgacctgcacaccctcacatggcagcctgggcaggggcagatacactcacttctccatggcc

SEQ ID NO: 1939 - DNA, 122 bp, Homo sapiens
  misc_feature (61)..(62): /note="This region represents a CpG dinucleotide"
  misc_feature (61)..(61): /note="Nucleotide may be methylated to form 5-methylcytosine"
catagatcaggaaagattcagcatcaacaccttttattttcctaggataaatagactcttcgaactggtatgacttaacatggagtagcacaacaattgttacaaggtctcattttcaaaat

SEQ ID NO: 1940 - DNA, 122 bp, Homo sapiens
  misc_feature (61)..(62): /note="This region represents a CpG dinucleotide"
  misc_feature (61)..(61): /note="Nucleotide may be methylated to form 5-methylcytosine"
ggcagggttccagacacagtagcctgcctgccccaacagctggggttgaaggtatgagaacgcctaggaacaaggaaaatcctgcacagcagaactggggctggggtcctcagtaaactgct

SEQ ID NO: 1941 - DNA, 122 bp, Homo sapiens
  misc_feature (61)..(62): /note="This region represents a CpG dinucleotide"
  misc_feature (61)..(61): /note="Nucleotide may be methylated to form 5-methylcytosine"
gaggggggagaaaagacccttctaatcattgtgttgttccctctgattctgttgctgcatcgttgccactgaaactgcttcttcagtctgttaacaattgacctttgctaccaggatgacct

SEQ ID NO: 1942 - DNA, 122 bp, Homo sapiens
  misc_feature (61)..(62): /note="This region represents a CpG dinucleotide"
  misc_feature (61)..(61): /note="Nucleotide may be methylated to form 5-methylcytosine"
cagtggctcagcctcaaggaaagggagagttgggactacgtcatttcataggaggggaggcgtgccatgaattatacaccctggcttctctgggattagagggcaagtcccatatgcttaaa

SEQ ID NO: 1943 - DNA, 122 bp, Homo sapiens
  misc_feature (61)..(62): /note="This region represents a CpG dinucleotide"
  misc_feature (61)..(61): /note="Nucleotide may be methylated to form 5-methylcytosine"
aggaagcagtttttagaagttctgttgcaacctgtagtgactctgtggtgactcagtaggcgggttgaatttctgttgagatggtaagaaagagggaggattttgtttatttatttatttat

SEQ ID NO: 1944 - DNA, 122 bp, Homo sapiens
  misc_feature (61)..(62): /note="This region represents a CpG dinucleotide"
  misc_feature (61)..(61): /note="Nucleotide may be methylated to form 5-methylcytosine"
caaggttttaccatgttggtcaggcagttcttgtactctggacttcaagtgatccgcccacgtcggcatctgaaagtgctgggattacaggagtgagtcaccgtacccagctagcagttgtt

SEQ ID NO: 1945 - DNA, 122 bp, Homo sapiens
  misc_feature (61)..(62): /note="This region represents a CpG dinucleotide"
  misc_feature (61)..(61): /note="Nucleotide may be methylated to form 5-methylcytosine"
gacttaaagttctatttgccagaatattcagggttattgacattcaagggaactgactgacgctagccaaagtcacacgagactgataggtaagctagaatacctgggacattgatttttcc

SEQ ID NO: 1946 - DNA, 122 bp, Homo sapiens
  misc_feature (61)..(62): /note="This region represents a CpG dinucleotide"
  misc_feature (61)..(61): /note="Nucleotide may be methylated to form 5-methylcytosine"
tggtgagtgggcggcgcggcccgccgtgtggccccagcagccgtgttgagcatctcattacgtggcaatcactcgtgttccccaacacggcagcgggagccatatgctggctcccgcgcgcc

SEQ ID NO: 1947 - DNA, 122 bp, Homo sapiens
  misc_feature (61)..(62): /note="This region represents a CpG dinucleotide"
  misc_feature (61)..(61): /note="Nucleotide may be methylated to form 5-methylcytosine"
agaccgtactagacttacacatatacacacaggtgagtgctgagtatcccttattggaaacgcttgggaccaagtgtctgggatttccagattttcaggttgtcagaatatctgtattacgt

SEQ ID NO: 1948 - DNA, 122 bp, Homo sapiens
  misc_feature (61)..(62): /note="This region represents a CpG dinucleotide"
  misc_feature (61)..(61): /note="Nucleotide may be methylated to form 5-methylcytosine"
aattcattgtatggaaaaattagaaatctggtattatgaaatacccgaactgaaaaggctcgacaacaataaacttcccagaagggtaacaccagctcccagcgtgcgccaggtcctctccg

SEQ ID NO: 1949 - DNA, 122 bp, Homo sapiens
  misc_feature (61)..(62): /note="This region represents a CpG dinucleotide"
  misc_feature (61)..(61): /note="Nucleotide may be methylated to form 5-methylcytosine"
gagtggggatcaggtgcagcggcacctctccccagcgctgtgatgttgggcgagtcactgcgtctcgggcattggtgtcctgtcagtaaagagataataatggctgtacctcgcggggctgt

SEQ ID NO: 1950 - DNA, 122 bp, Homo sapiens
  misc_feature (61)..(62): /note="This region represents a CpG dinucleotide"
  misc_feature (61)..(61): /note="Nucleotide may be methylated to form 5-methylcytosine"
ctagttctcttaaaggctgttgaaataatgttcccgtgcactcagcctccccacttagtgcgggtggcggccaagaggaagtgctggaatcctcggtggcctaaccccggccctcaggacag

SEQ ID NO: 1951 - DNA, 122 bp, Homo sapiens
  misc_feature (61)..(62): /note="This region represents a CpG dinucleotide"
  misc_feature (61)..(61): /note="Nucleotide may be methylated to form 5-methylcytosine"
cagatggtggtgtttgagtcatgtggcagaaatgctccaagatttctgcctcctggtgttcgcatctttgggtaattccttcccattgagtgtggccagaagctcctgtgacttgcttctaa

SEQ ID NO: 1952 - DNA, 122 bp, Homo sapiens
  misc_feature (61)..(62): /note="This region represents a CpG dinucleotide"
  misc_feature (61)..(61): /note="Nucleotide may be methylated to form 5-methylcytosine"
ggggtggtttctgtacttaagtcactgcttccaataaatccctagtcaggttaactgtaacgggttaacctgttggaaggaaggaaatggaagaggcaaaggaaaaccctttccttccacgc

SEQ ID NO: 1953 - DNA, 122 bp, Homo sapiens
  misc_feature (61)..(62): /note="This region represents a CpG dinucleotide"
  misc_feature (61)..(61): /note="Nucleotide may be methylated to form 5-methylcytosine"
ttccttcctttgttacagcaaacatcctgtaaacaattaatgttccactcttttaactgacggcttttgtttactgacaggaaaggaaaccacaaattcttcaagtagcaatagggactgca

SEQ ID NO: 1954 - DNA, 122 bp, Homo sapiens
  misc_feature (61)..(62): /note="This region represents a CpG dinucleotide"
  misc_feature (61)..(61): /note="Nucleotide may be methylated to form 5-methylcytosine"
ttcatttctcgttctgacttctgagctgcgaggtgagctctgtggtcagctgcactgtggcgtatgctcgctgtcattcagctgacatttcagctgctcccaaagtcaacatttatgagttc

SEQ ID NO: 1955 - DNA, 122 bp, Homo sapiens
  misc_feature (61)..(62): /note="This region represents a CpG dinucleotide"
  misc_feature (61)..(61): /note="Nucleotide may be methylated to form 5-methylcytosine"
tacagctgtttttctctcaacctctgtgctggtggctaaatatttacttttctctgttaacggaaggagccagataagattttaagagtctgagacttttgcccctaggacccactgtcaaa

SEQ ID NO: 1956 - DNA, 122 bp, Homo sapiens
  misc_feature (61)..(62): /note="This region represents a CpG dinucleotide"
  misc_feature (61)..(61): /note="Nucleotide may be methylated to form 5-methylcytosine"
ctccagcaaaaggcccaagattgactcttgttggctcagatggagttgcatgtcttcttccgcccgatcactgtgacctgccacgcctgggccacatgggtggagtccgccctccccacaca

SEQ ID NO: 1957 - DNA, 122 bp, Homo sapiens
  misc_feature (61)..(62): /note="This region represents a CpG dinucleotide"
  misc_feature (61)..(61): /note="Nucleotide may be methylated to form 5-methylcytosine"
gaggcccccggacgcctcagtcccccggcggcgccggaggagcggccggccgcggacacgcgctccattgtgtcgggctactccaccctgtccaccatggaccgcagcgtgtgctcgggcgc

SEQ ID NO: 1958 - DNA, 122 bp, Homo sapiens
  misc_feature (61)..(62): /note="This region represents a CpG dinucleotide"
  misc_feature (61)..(61): /note="Nucleotide may be methylated to form 5-methylcytosine"
cccctacctctacctggcagagatggtgctagaggcttctgctgaggatgaggccatctccggtgtaaatggagtttcacagtattgtttgtacctgtttggttttgtatatcaatcttgcg

SEQ ID NO: 1959 - DNA, 122 bp, Homo sapiens
  misc_feature (61)..(62): /note="This region represents a CpG dinucleotide"
  misc_feature (61)..(61): /note="Nucleotide may be methylated to form 5-methylcytosine"
gaagcgagagcaagtgaatgtctcagtccccaggtggcggtggtggccgcgggggcgcgacggcggggcgggggcgctgctgctgcgggggcaggaagcggcaagggcggtggcggcccgct

SEQ ID NO: 1960 - DNA, 122 bp, Homo sapiens
  misc_feature (61)..(62): /note="This region represents a CpG dinucleotide"
  misc_feature (61)..(61): /note="Nucleotide may be methylated to form 5-methylcytosine"
tggttgatctctcagtatttcataatgctctcctaaagctcagttctacagtagggaactcgagctgaggcaatgctctgtgaatacacttctaacttttgtagacctttgcttcctccaaa

SEQ ID NO: 1961 - DNA, 122 bp, Homo sapiens
  misc_feature (61)..(62): /note="This region represents a CpG dinucleotide"
  misc_feature (61)..(61): /note="Nucleotide may be methylated to form 5-methylcytosine"
attgtacacaggagaaagataagaacttttctctcaacttccttcatgtacttcggcatgcgttcacacaaacctcacctcgacgttttgagaaggaaatgtatttgtggttcttcagttga

SEQ ID NO: 1962 - DNA, 122 bp, Homo sapiens
  misc_feature (61)..(62): /note="This region represents a CpG dinucleotide"
  misc_feature (61)..(61): /note="Nucleotide may be methylated to form 5-methylcytosine"
tgcaggtgccgtcacacactggttgctagctggctggttcttgccactgaacatcaactccgaattcaccttttaaagcctaaccccaaagtgatggtatgagaagtaggagggatctggga

SEQ ID NO: 1963 - DNA, 122 bp, Homo sapiens
  misc_feature (61)..(62): /note="This region represents a CpG dinucleotide"
  misc_feature (61)..(61): /note="Nucleotide may be methylated to form 5-methylcytosine"
aatgggtctcatccttttaagtgacacctgctggaactgtaattgtgcacataattgctacgtgggaatggaggtgggtttatttcccagcgctagtgcttcccttaggaaaagaaacagtg

SEQ ID NO: 1964 - DNA, 122 bp, Homo sapiens
  misc_feature (61)..(62): /note="This region represents a CpG dinucleotide"
  misc_feature (61)..(61): /note="Nucleotide may be methylated to form 5-methylcytosine"
tggggtctggcctcttgatgcaccccggctcctgatgcaccccagcctcctgatgcaccccggctcctgattcaccccaggtcctgacacacccagctcctgacacacccagcctcctaatg

SEQ ID NO: 1965 - DNA, 122 bp, Homo sapiens
  misc_feature (61)..(62): /note="This region represents a CpG dinucleotide"
  misc_feature (61)..(61): /note="Nucleotide may be methylated to form 5-methylcytosine"
cacttcccagcccacgtgctggcagaattcagttccttgtggctgtaggactcatagcagcgtgcttcttcacagctgacaataggatgagtgtgctggcaagactgagtcttacaaatgta

SEQ ID NO: 1966 - DNA, 122 bp, Homo sapiens
  misc_feature (61)..(62): /note="This region represents a CpG dinucleotide"
  misc_feature (61)..(61): /note="Nucleotide may be methylated to form 5-methylcytosine"
tgctaagggagtagatttttggtgcccttgtaacaacaacaagaacaatgccaggcgtggcgctcatgcctgtaatcccagaactttgggaggctgaagtgggtggatcatttgaggtcagg

SEQ ID NO: 1967 - DNA, 122 bp, Homo sapiens
  misc_feature (61)..(62): /note="This region represents a CpG dinucleotide"
  misc_feature (61)..(61): /note="Nucleotide may be methylated to form 5-methylcytosine"
aatttttaagcaatctctgtgtgtatctttgaaactcatctttcacatggactgtgagtacgtattacctcacacactgcccacccttcttcctgcagacaatcattagtgtttcagcattg

SEQ ID NO: 1968 - DNA, 122 bp, Homo sapiens
  misc_feature (61)..(62): /note="This region represents a CpG dinucleotide"
  misc_feature (61)..(61): /note="Nucleotide may be methylated to form 5-methylcytosine"
gggtggtggcctgccacgcgctcttcttgttcttcttggacttggtgctcagaggcttctcgcggttgcagaagtccgtgtgtgcagacaggagctcctgctgcttggccgtgtcgggcagc

SEQ ID NO: 1969 - DNA, 122 bp, Homo sapiens
  misc_feature (61)..(62): /note="This region represents a CpG dinucleotide"
  misc_feature (61)..(61): /note="Nucleotide may be methylated to form 5-methylcytosine"
cctgctttcagtccctgaatagcaaaggctatgccttggccatcgctgctggaagagacacggctcagtgttggatgaatgtcctgactgttttcgccccagagaatgaaaggcgccaaccg

SEQ ID NO: 1970 - DNA, 122 bp, Homo sapiens
  misc_feature (61)..(62): /note="This region represents a CpG dinucleotide"
  misc_feature (61)..(61): /note="Nucleotide may be methylated to form 5-methylcytosine"
taatgacagagaggaagcacagctgtgtgccttggctctcttgtgggaccaagtgaatttcgtcaagggatctgtagcatctattgtgagggtggaggagctgattcatttaatgacacatg

SEQ ID NO: 1971 - DNA, 122 bp, Homo sapiens
  misc_feature (61)..(62): /note="This region represents a CpG dinucleotide"
  misc_feature (61)..(61): /note="Nucleotide may be methylated to form 5-methylcytosine"
gtttccctgtagggagcagggcctcttgtatatctaagaggtcactttgtggcaagaaagcgagaatgtggttgggtcacaagaaaacccaagcgagcggtgcctcatgcctgtaataccag

SEQ ID NO: 1972 - DNA, 122 bp, Homo sapiens
  misc_feature (61)..(62): /note="This region represents a CpG dinucleotide"
  misc_feature (61)..(61): /note="Nucleotide may be methylated to form 5-methylcytosine"
agaggaattgcatgagccttcccttgtgctcatgagtgcttgtgtgacaacttcgcagtacgagtcaatgccataaagtgccatatgcaatgcagggatattgttgtgtttccgtaagagcc

SEQ ID NO: 1973 - DNA, 122 bp, Homo sapiens
  misc_feature (61)..(62): /note="This region represents a CpG dinucleotide"
  misc_feature (61)..(61): /note="Nucleotide may be methylated to form 5-methylcytosine"
tttccactcatatgtttgttcagctttctttgcttttctcccaaaccataacgaaatagacgctatcaattttcccaagatggcaacctaacagctagccaggtgttctcagataagaaggg

SEQ ID NO: 1974 - DNA, 122 bp, Homo sapiens
  misc_feature (61)..(62): /note="This region represents a CpG dinucleotide"
  misc_feature (61)..(61): /note="Nucleotide may be methylated to form 5-methylcytosine"
ggaaggagcccaagagagtcttgtgttttaagtggcctggtttgtcacgtgtcaagtccccgcctacaacaacagcatgttgacactcggtattctgaggggagagattatgtgcattatta

SEQ ID NO: 1975 - DNA, 122 bp, Homo sapiens
  misc_feature (61)..(62): /note="This region represents a CpG dinucleotide"
  misc_feature (61)..(61): /note="Nucleotide may be methylated to form 5-methylcytosine"
gcctcagcaaaacggaactgccaagcactggtatcagggacttgggatggcctgaaccatcgcagccctgagtcatatgacacagcagttttcttcagccctgcccgtgaggtaggagactg

SEQ ID NO: 1976 - DNA, 122 bp, Homo sapiens
  misc_feature (61)..(62): /note="This region represents a CpG dinucleotide"
  misc_feature (61)..(61): /note="Nucleotide may be methylated to form 5-methylcytosine"
agtgacagtgctatgccatctaagcttgtgtaagtacaccctgtgatgttcacacaatgacgaaatcaccattgttaagtaaatgggtttgggagaaggttcaaacagcttccacctgcccc

SEQ ID NO: 1977 - DNA, 122 bp, Homo sapiens
  misc_feature (61)..(62): /note="This region represents a CpG dinucleotide"
  misc_feature (61)..(61): /note="Nucleotide may be methylated to form 5-methylcytosine"
tataaatgctttccatgagaactgaaggaagaaggaaataggagttgcctccattgtgcacgttgcaaaacctgtctggaaggagcataggaaatggctttagctaagtgccagtagcttct

SEQ ID NO: 1978 - DNA, 122 bp, Homo sapiens
  misc_feature (61)..(62): /note="This region represents a CpG dinucleotide"
  misc_feature (61)..(61): /note="Nucleotide may be methylated to form 5-methylcytosine"
atgcacatacagagtcagtatttaagcaactgaaatgtatgctgaacagtagccagttcccgtcccttagcaaagtcatttccctgggattgttcatctcccatggcaacaatacacagtag

SEQ ID NO: 1979 - DNA, 122 bp, Homo sapiens
  misc_feature (61)..(62): /note="This region represents a CpG dinucleotide"
  misc_feature (61)..(61): /note="Nucleotide may be methylated to form 5-methylcytosine"
taacttcaaacatctggcaaactccacaggtagtatttgcaaaagcaattttgcaatgaccgcttttgttatcgcttaagtctttttgagttttccttgggaaatctccaacgtttaacatt

SEQ ID NO: 1980 - DNA, 122 bp, Homo sapiens
  misc_feature (61)..(62): /note="This region represents a CpG dinucleotide"
  misc_feature (61)..(61): /note="Nucleotide may be methylated to form 5-methylcytosine"
cactgaaataacaatggccagccttaatctcacctttataacatgatttcatttaatcttcgcaacaactctacaaagcaatatagatatggaatccgaggcttagagttcacacagacagt

SEQ ID NO: 1981 - DNA, 122 bp, Homo sapiens
  misc_feature (61)..(62): /note="This region represents a CpG dinucleotide"
  misc_feature (61)..(61): /note="Nucleotide may be methylated to form 5-methylcytosine"
tggaataaagcacacattttatttttgaatccagtctctgttccccacagagcacgtaagcgtgaaggcaggtctgtctgcttccttcacgcccatatcccagcacttactcagagcctatc

SEQ ID NO: 1982 - DNA, 122 bp, Homo sapiens
  misc_feature (61)..(62): /note="This region represents a CpG dinucleotide"
  misc_feature (61)..(61): /note="Nucleotide may be methylated to form 5-methylcytosine"
gttgtgggggaaaatcccactccaccattatgtatagttactggtgcctgtcgcataacacgtaaaagaaggaaaggaacacagactcatgtggtagaaactgagaaaagtgacagtaactc

SEQ ID NO: 1983 - DNA, 122 bp, Homo sapiens
  misc_feature (61)..(62): /note="This region represents a CpG dinucleotide"
  misc_feature (61)..(61): /note="Nucleotide may be methylated to form 5-methylcytosine"
acaggcgtgagccaccgcgcctggcatcagtgcatactttttgaagtgattccaagttatcgcccgcttttttcgtgtaacatataaatacatctctgtatctagaaatatccaatgcataa

SEQ ID NO: 1984 - DNA, 122 bp, Homo sapiens
  misc_feature (61)..(62): /note="This region represents a CpG dinucleotide"
  misc_feature (61)..(61): /note="Nucleotide may be methylated to form 5-methylcytosine"
tgtcagcacgtaaactgagctattttaaggtcaaggccagggtgcagcccaacagaattgcgaaagcaaaatgtgtttgcttctgcagttggctttttaaatacatttttctttattaattg

SEQ ID NO: 1985 - DNA, 122 bp, Homo sapiens
  misc_feature (61)..(62): /note="This region represents a CpG dinucleotide"
  misc_feature (61)..(61): /note="Nucleotide may be methylated to form 5-methylcytosine"
gtaacttacaagtaacttattgctacaagatgctaacagttatctgaacctgcagtgagccgtagtctttttgctcatggaagatgttgcctcaatgttgatagctgttgactcatcagggt

SEQ ID NO: 1986 - DNA, 122 bp, Homo sapiens
  misc_feature (61)..(62): /note="This region represents a CpG dinucleotide"
  misc_feature (61)..(61): /note="Nucleotide may be methylated to form 5-methylcytosine"
agggaattatgaggaaatcttccagctggataaggattctagaaaagcctactaaaactacggttcttatttactggcaaactaaatgcagagaacaggtcatttgatggagagaagaatga

SEQ ID NO: 1987 - DNA, 122 bp, Homo sapiens
  misc_feature (61)..(62): /note="This region represents a CpG dinucleotide"
  misc_feature (61)..(61): /note="Nucleotide may be methylated to form 5-methylcytosine"
ggagacttcaactcagttaatgaaagagcattctgacaatcatttcctgattggcacacccgaagctgaagtggatgtgtctaaccagtgattgggaacatgtggcatagttgctgcacatg

SEQ ID NO: 1988 - DNA, 122 bp, Homo sapiens
  misc_feature (61)..(62): /note="This region represents a CpG dinucleotide"
  misc_feature (61)..(61): /note="Nucleotide may be methylated to form 5-methylcytosine"
gagagaaacagggaagatggagaaagactggctcctctgacagctggaagcagctggtaacgctgaagaataaaggcagatcatcacaagacaggaaggagtcagaaacctggaaatcaatg

SEQ ID NO: 1989 - DNA, 122 bp, Homo sapiens
  misc_feature (61)..(62): /note="This region represents a CpG dinucleotide"
  misc_feature (61)..(61): /note="Nucleotide may be methylated to form 5-methylcytosine"
actttgtgatccgcccacctcggcctcccaaagtgctgggattacaggtgtgagccaccgcgcccggccaggaggtactattattgtcagtgtcactatgtcaagcggggaggaggcaggga

SEQ ID NO: 1990 - DNA, 122 bp, Homo sapiens
  misc_feature (61)..(62): /note="This region represents a CpG dinucleotide"
  misc_feature (61)..(61): /note="Nucleotide may be methylated to form 5-methylcytosine"
ctgggttgagttttggacacataagatttaagttgcctagcgaacatccagcatcagagccgctgagtgatggtgaggtgtatgagggtggagacataaatcatatgacggtatctaaagcc

SEQ ID NO: 1991 - DNA, 122 bp, Homo sapiens
  misc_feature (61)..(62): /note="This region represents a CpG dinucleotide"
  misc_feature (61)..(61): /note="Nucleotide may be methylated to form 5-methylcytosine"
cccgggcccgcaatggggaccagaccacgccccctgatgccctgagtggtcccagatctccggcggtacctccagaccacgtcctcgcgctccgattggctgccgcttttgggcggattaga

SEQ ID NO: 1992 - DNA, 122 bp, Homo sapiens
  misc_feature (61)..(62): /note="This region represents a CpG dinucleotide"
  misc_feature (61)..(61): /note="Nucleotide may be methylated to form 5-methylcytosine"
gactggcagccaccattaccaggttaaaactatgtctgatgatgtttcttgacagctctgcgttccaagaatgagcacatggcttcattacaatcaaggggcaacttaaagaacaggtgagg

SEQ ID NO: 1993 - DNA, 122 bp, Homo sapiens
  misc_feature (61)..(62): /note="This region represents a CpG dinucleotide"
  misc_feature (61)..(61): /note="Nucleotide may be methylated to form 5-methylcytosine"
ccctggctgtgtaattccaagagacactgatgaatcatgctctttttttttcccaccaaacgttactaattcggctcatatcactgatgaaaaagctccagtttggagctgaatgtatattg

SEQ ID NO: 1994 - DNA, 122 bp, Homo sapiens
  misc_feature (61)..(62): /note="This region represents a CpG dinucleotide"
  misc_feature (61)..(61): /note="Nucleotide may be methylated to form 5-methylcytosine"
agattaagagtgtgaatcatagatcctcccagctatttcagaaaaagccaaaattagagacgggattttccaggaaagatatgtgaggagcctcctgtgtaaatgagtgaatccccatgaca

SEQ ID NO: 1995 - DNA, 122 bp, Homo sapiens
  misc_feature (61)..(62): /note="This region represents a CpG dinucleotide"
  misc_feature (61)..(61): /note="Nucleotide may be methylated to form 5-methylcytosine"
aaccagactctatcttgggaatgtgaattgagaaatatagacttgagatcagtttgttcacgagacacaataaaggaaattagctttggagaaagttctttgtcaggaactctcctgtcgca

SEQ ID NO: 1996 - DNA, 122 bp, Homo sapiens
  misc_feature (61)..(62): /note="This region represents a CpG dinucleotide"
  misc_feature (61)..(61): /note="Nucleotide may be methylated to form 5-methylcytosine"
aaataagcagcagatgcagcaaggcctctgcagatttaaaaaaaaaaaaaaagcatgttgcgtcagagcacatgtctccccaaagggtacgtgtacgaacagcatgcagacttgtgaactga

SEQ ID NO: 1997 - DNA, 122 bp, Homo sapiens
  misc_feature (61)..(62): /note="This region represents a CpG dinucleotide"
  misc_feature (61)..(61): /note="Nucleotide may be methylated to form 5-methylcytosine"
tctgaacgtggccaagagccaaaggatcgtatctggagcaagcagaccgattttcagaaacgcacattgggtaggttacccgtggtgacgcaaaccagacttacttgatctaaatctccttt

SEQ ID NO: 1998 - DNA, 122 bp, Homo sapiens
  misc_feature (61)..(62): /note="This region represents a CpG dinucleotide"
  misc_feature (61)..(61): /note="Nucleotide may be methylated to form 5-methylcytosine"
gccactcctcaaactgcctggcattggtggtaatctatggcaaagcacctctcctttttgcgttaccctctttgaagtgagtaacactatgtcttagagagccttcttttcatttgtgtttt

SEQ ID NO: 1999 - DNA, 122 bp, Homo sapiens
  misc_feature (61)..(62): /note="This region represents a CpG dinucleotide"
  misc_feature (61)..(61): /note="Nucleotide may be methylated to form 5-methylcytosine"
tttgttcctggttcctgggaggtaacctataaacctctgggatttcctgagtgacaagtgcgtctttcttattcatggtgtgtccctcagatcacaactagtagtttatgctaatgaggtga

SEQ ID NO: 2000 - DNA, 122 bp, Homo sapiens
  misc_feature (61)..(62): /note="This region represents a CpG dinucleotide"
  misc_feature (61)..(61): /note="Nucleotide may be methylated to form 5-methylcytosine"
agagagggctctggggccagactgccaggttcagatcctggttttgtcactcatcagttgcgtgacttgggcttgaccttcatgtgccttagttacctcatctgcaaaattggaataataat

SEQ ID NO: 2001 - DNA, 122 bp, Homo sapiens
  misc_feature (61)..(62): /note="This region represents a CpG dinucleotide"
  misc_feature (61)..(61): /note="Nucleotide may be methylated to form 5-methylcytosine"
agaataatctaaaaataaaggctgattacctcatgtggtataaacttaccaatgactccccgttgcctagaggctcaaattgctagcatggcctggcgtgtggccctggtcaaccaagtctc

SEQ ID NO: 2002 - DNA, 122 bp, Homo sapiens
  misc_feature (61)..(62): /note="This region represents a CpG dinucleotide"
  misc_feature (61)..(61): /note="Nucleotide may be methylated to form 5-methylcytosine"
cagggacagtctgcagagagtccaaaatctcctgaaataaaatgcagaattacatgcagacgtatatttttccaagaagaaggtccataactttcatcagactttatctcaaaggggtgggt

SEQ ID NO: 2003 - DNA, 122 bp, Homo sapiens
  misc_feature (61)..(62): /note="This region represents a CpG dinucleotide"
  misc_feature (61)..(61): /note="Nucleotide may be methylated to form 5-methylcytosine"
agaactgctgccccacagtgagggtgggagcagcggaacagggaatgccagacacaggctcgctgctgctggaaggcggggtgggacttccttcctctgtccggagaggcacaggtgtcacc

SEQ ID NO: 2004 - DNA, 122 bp, Homo sapiens
  misc_feature (61)..(62): /note="This region represents a CpG dinucleotide"
  misc_feature (61)..(61): /note="Nucleotide may be methylated to form 5-methylcytosine"
gttcattccccaaaacctccaaggtacataaggtttctctttttgctctggtgccaggaccgcacagataatctcaacactcactcatggtaattacctcatccctattgcaattactttcc

SEQ ID NO: 2005 - DNA, 122 bp, Homo sapiens
  misc_feature (61)..(62): /note="This region represents a CpG dinucleotide"
  misc_feature (61)..(61): /note="Nucleotide may be methylated to form 5-methylcytosine"
gccacccacacctgccatgggcactaaactccagggcaggggcattgtttaccttatttgcggggccatctcagcctttagcccaggcctgtatacaataggtgttttggctgggtgtagtg

SEQ ID NO: 2006 - DNA, 122 bp, Homo sapiens
  misc_feature (61)..(62): /note="This region represents a CpG dinucleotide"
  misc_feature (61)..(61): /note="Nucleotide may be methylated to form 5-methylcytosine"
tcagttctctctggcctcctcccctctccatacggcttgactgtttcttttgatctcctccgagatctgacaatgctcaagactttcaaacagttgctggagcctgctgcagctctgacctg

SEQ ID NO: 2007 - DNA, 122 bp, Homo sapiens
  misc_feature (61)..(62): /note="This region represents a CpG dinucleotide"
  misc_feature (61)..(61): /note="Nucleotide may be methylated to form 5-methylcytosine"
atgatcctccacgcctgaccaggattacaacttcattcttccagctgctcagatctaaaccgccagagtcatccccgagtcctctcttaaactccacatccgccctgtgggtatccgcctgt

SEQ ID NO: 2008 - DNA, 122 bp, Homo sapiens
  misc_feature (61)..(62): /note="This region represents a CpG dinucleotide"
  misc_feature (61)..(61): /note="Nucleotide may be methylated to form 5-methylcytosine"
tgtggagtcccctttggcccttgttctgccccgatttgggggctgggggctgggggctgacgtttctccctctcaaagttcaggttgaattgccctaacgtgctgattactgcaccgaggat

SEQ ID NO: 2009 - DNA, 122 bp, Homo sapiens
  misc_feature (61)..(62): /note="This region represents a CpG dinucleotide"
  misc_feature (61)..(61): /note="Nucleotide may be methylated to form 5-methylcytosine"
ccagttactagaaaagtgcctgggtaagagtatgtaggatctctataaaagctgaattaacgaattttgtaatgactgcacctccagacaggagctgtcttccgggcttccacagtctctga

SEQ ID NO: 2010 - DNA, 122 bp, Homo sapiens
  misc_feature (61)..(62): /note="This region represents a CpG dinucleotide"
  misc_feature (61)..(61): /note="Nucleotide may be methylated to form 5-methylcytosine"
acctctccaaaatgctggaatatttgaagcatgtacttcactcttctctctcacttctgacgaagaaacaagttggatgtcttttctcaatggtgctgagtcatcccagtctctgtctttgg

SEQ ID NO: 2011 - DNA, 122 bp, Homo sapiens
  misc_feature (61)..(62): /note="This region represents a CpG dinucleotide"
  misc_feature (61)..(61): /note="Nucleotide may be methylated to form 5-methylcytosine"
gtgaaacatgccaggaagggtggggacaggaaggtgacactagggcctctgtgtctgccccggggcactgtcagctgggtcaggatttatgccctgatgttcccacccccagacctggtcac

SEQ ID NO: 2012 - DNA, 122 bp, Homo sapiens
  misc_feature (61)..(62): /note="This region represents a CpG dinucleotide"
  misc_feature (61)..(61): /note="Nucleotide may be methylated to form 5-methylcytosine"
aattttaatcagtgggaaatgctgactgccacgctcatttaagaggaaaggtcaggatttcgtgagctgcattgttcactgacatctactttaacgactccagcccagcctgagctaatctt

SEQ ID NO: 2013 - DNA, 122 bp, Homo sapiens
  misc_feature (61)..(62): /note="This region represents a CpG dinucleotide"
  misc_feature (61)..(61): /note="Nucleotide may be methylated to form 5-methylcytosine"
ctgcatcagcaagcagaagtttcactttcctcctgccttcctgcttctgctcttagcaatcgtggtgaggttagtgactcaaaactcttctaaggactgtagttgaaaaaaaaatgactggt

SEQ ID NO: 2014 - DNA, 122 bp, Homo sapiens
  misc_feature (61)..(62): /note="This region represents a CpG dinucleotide"
  misc_feature (61)..(61): /note="Nucleotide may be methylated to form 5-methylcytosine"
cattagttttaaacagcatgccattctgagtagtgtgatgaaatctctcttgccgtcctgcgtatgtcatgaatcatctctttgctcggtgtctccacactgagtctgctacatgcccttta

SEQ ID NO: 2015 - DNA, 122 bp, Homo sapiens
  misc_feature (61)..(62): /note="This region represents a CpG dinucleotide"
  misc_feature (61)..(61): /note="Nucleotide may be methylated to form 5-methylcytosine"
aactgcagggttcacatgcgtctctgtgtcacattatggtaattctcttaatctttcaaacgttttcattgttattatatgttatggtgatctgtgatctttgatgttactattgtaattgt

SEQ ID NO: 2016 - DNA, 122 bp, Homo sapiens
  misc_feature (61)..(62): /note="This region represents a CpG dinucleotide"
  misc_feature (61)..(61): /note="Nucleotide may be methylated to form 5-methylcytosine"
gtcagatctgcaatgtgaagcccttcaggaacaaaccttccaggaggagaaaagagaccacgagagacggctggactaacaggagctcaaagaccaacaactgaaggcctgtgcaggcctgg

SEQ ID NO: 2017 - DNA, 122 bp, Homo sapiens
  misc_feature (61)..(62): /note="This region represents a CpG dinucleotide"
  misc_feature (61)..(61): /note="Nucleotide may be methylated to form 5-methylcytosine"
actgcacccggcctgtagagctttaaacaaagcacaggctgcttctgagcacagggccctcgtcacatggctatgaagccagccctgcctggacccagaaccctggtgtgggcactttatag

SEQ ID NO: 2018 - DNA, 122 bp, Homo sapiens
  misc_feature (61)..(62): /note="This region represents a CpG dinucleotide"
  misc_feature (61)..(61): /note="Nucleotide may be methylated to form 5-methylcytosine"
ggattaaaaacgaaccaacagttataatgattaacattacaacattaacattattattaacggtatttggacaatatgggtatgatagattgcaaaaatggctgtgattgttcatgcccctg

SEQ ID NO: 2019 - DNA, 122 bp, Homo sapiens
  misc_feature (61)..(62): /note="This region represents a CpG dinucleotide"
  misc_feature (61)..(61): /note="Nucleotide may be methylated to form 5-methylcytosine"
acacaacatgcccacacacataacaaggcaggaccaataggtgtcactatctctaacagtcgctttttctaattccagttggaactagaaagtagccaacggactggaagtgagcctaggag

SEQ ID NO: 2020 - DNA, 122 bp, Homo sapiens
  misc_feature (61)..(62): /note="This region represents a CpG dinucleotide"
  misc_feature (61)..(61): /note="Nucleotide may be methylated to form 5-methylcytosine"
ttcagagggttaggttgagatggttggcagtgagttcatgcatggctaaactgcaccatgcgagaaatcaatgggaactcaagggattgggaattaaggagctggggagaaaagaggggagg

SEQ ID NO: 2021 - DNA, 122 bp, Homo sapiens
  misc_feature (61)..(62): /note="This region represents a CpG dinucleotide"
  misc_feature (61)..(61): /note="Nucleotide may be methylated to form 5-methylcytosine"
tgactccaggctgtcactacactatgttactgggctacactgcctcacagattcagaacacgctcagaagactatcactttggtcacagtgccagtggcccaaataacctatagaacattaa

SEQ ID NO: 2022 - DNA, 122 bp, Homo sapiens
  misc_feature (61)..(62): /note="This region represents a CpG dinucleotide"
  misc_feature (61)..(61): /note="Nucleotide may be methylated to form 5-methylcytosine"
gcacaaagcctgggaaagtgggaagggaggggaagaaactgggacagacacctgggtcagcggctcgcccagggccccgaaccctgtgtcccagagctgagaagtcctgccccccttacctc

SEQ ID NO: 2023 - DNA, 122 bp, Homo sapiens
  misc_feature (61)..(62): /note="This region represents a CpG dinucleotide"
  misc_feature (61)..(61): /note="Nucleotide may be methylated to form 5-methylcytosine"
tatttagcatgagtctagtccggctaggtcttaaataactttcaaaagttttttaaccttcgtcacttcctgggatatacatcttagcaatcacaaccttgagctaagccaagaaaagactg

SEQ ID NO: 2024 - DNA, 122 bp, Homo sapiens
  misc_feature (61)..(62): /note="This region represents a CpG dinucleotide"
  misc_feature (61)..(61): /note="Nucleotide may be methylated to form 5-methylcytosine"
aaggagataacacccttaatctattcattgctggtgcgcttacccagtctggtttagaaccgtttaacaaaggcttagaatcataatgtctatgattattacctcttagctcctagttttac

SEQ ID NO: 2025 - DNA, 122 bp, Homo sapiens
  misc_feature (61)..(62): /note="This region represents a CpG dinucleotide"
  misc_feature (61)..(61): /note="Nucleotide may be methylated to form 5-methylcytosine"
agagtaaagacagtgtgcttctatttatgtaaaattcaaaatcagaacaaaactaactcacggagttagaagtcagaatagggttttcttcggggggaaatggtgactggaaaggggcaagg

SEQ ID NO: 2026 - DNA, 122 bp, Homo sapiens
  misc_feature (61)..(62): /note="This region represents a CpG dinucleotide"
  misc_feature (61)..(61): /note="Nucleotide may be methylated to form 5-methylcytosine"
taacccttgattgtcttatctgtcaaacatggtaaagtcatacctctttcatagggctgtcgtgagtatcaaatgagatgcaggttgcgtaatcccaaatccaaaaatccaaaatccaaaac

SEQ ID NO: 2027 - DNA, 122 bp, Homo sapiens
  misc_feature (61)..(62): /note="This region represents a CpG dinucleotide"
  misc_feature (61)..(61): /note="Nucleotide may be methylated to form 5-methylcytosine"
gacaaacttgtctgcagcactcaggaggctcagggaattaaccaggagggaacagtagcccggttaaaatagtttctgtacttccagaggaagcaattaaatctcagcgtctaccatggcaa

SEQ ID NO: 2028 - DNA, 122 bp, Homo sapiens
  misc_feature (61)..(62): /note="This region represents a CpG dinucleotide"
  misc_feature (61)..(61): /note="Nucleotide may be methylated to form 5-methylcytosine"
gaaaatggccataagtggagtccctgtgctaggatttttcatcatagctgtgctgatgagcgctcaggaatcatgggctatcaaaggtaggtgctgagggaatgaaatctgggacgatagac

SEQ ID NO: 2029 - DNA, 122 bp, Homo sapiens
  misc_feature (61)..(62): /note="This region represents a CpG dinucleotide"
  misc_feature (61)..(61): /note="Nucleotide may be methylated to form 5-methylcytosine"
tgggtcaaatcttctttcatggaattggcagtaattttccccaaacataataaaactaaccgtgtgacttcactgaccaataaaagcttttagtaacctgtagtcaatgcatgttttgcacc

SEQ ID NO: 2030 - DNA, 122 bp, Homo sapiens
  misc_feature (61)..(62): /note="This region represents a CpG dinucleotide"
  misc_feature (61)..(61): /note="Nucleotide may be methylated to form 5-methylcytosine"
gcaatagagacctggagtgggcacactacatatccccctgcagtgatggaacccacagaccgcaggtcctctgcagtccattctcctgcctgtccagaggatccggatgttttctctttact

SEQ ID NO: 2031 - DNA, 122 bp, Homo sapiens
  misc_feature (61)..(62): /note="This region represents a CpG dinucleotide"
  misc_feature (61)..(61): /note="Nucleotide may be methylated to form 5-methylcytosine"
agagattttaattcaggcagtataacatcaaggttgctatgaatcagcataatgccaatccgcctctattttggaaggaatctcaagtgggaatcatgaaatacacagataatttgcaagtg

SEQ ID NO: 2032 - DNA, 122 bp, Homo sapiens
  misc_feature (61)..(62): /note="This region represents a CpG dinucleotide"
  misc_feature (61)..(61): /note="Nucleotide may be methylated to form 5-methylcytosine"
tcccaaaccatttttcctggcccattatttaagctcttagatttagcctcatactattagcgtctagtatattagcctttcagccatctcctgaccgctccacagtcactccccgctaactc

SEQ ID NO: 2033 - DNA, 122 bp, Homo sapiens
  misc_feature (61)..(62): /note="This region represents a CpG dinucleotide"
  misc_feature (61)..(61): /note="Nucleotide may be methylated to form 5-methylcytosine"
aactcttagtagggagaagtgaaaacattcctaacccagtaggtgcagggtttgtagccccgcagccccacatgcactcctggtatttgtaatttgcagtgatgacaaactgtgcctctggc

SEQ ID NO: 2034 - DNA, 122 bp, Homo sapiens
  misc_feature (61)..(62): /note="This region represents a CpG dinucleotide"
  misc_feature (61)..(61): /note="Nucleotide may be methylated to form 5-methylcytosine"
ttgcagtatcgtggtgttgagtcacttgcgatctttccggttcagtgactcctcagtgtgcgtggattggggccctccagagatgctctctgtctgtgtgtgtcatcgcagccctctgctgt

SEQ ID NO: 2035 - DNA, 122 bp, Homo sapiens
  misc_feature (61)..(62): /note="This region represents a CpG dinucleotide"
  misc_feature (61)..(61): /note="Nucleotide may be methylated to form 5-methylcytosine"
cccctgaggtggagccccgcctagtgtactgctacccagtccggctggctgtgtctgcaccgcccatgcccagcgtggagatgcacatggagaacaacgtggtctgcatccggtataaggga

SEQ ID NO: 2036 - DNA, 122 bp, Homo sapiens
  misc_feature (61)..(62): /note="This region represents a CpG dinucleotide"
  misc_feature (61)..(61): /note="Nucleotide may be methylated to form 5-methylcytosine"
aacattcggttgtcagcttcattctggttcatcattgcctctggagtactctgaggatgacgtagtttccttagcaccagctaaagcatcctctttaggaaggacatgaccctaattataga

SEQ ID NO: 2037 - DNA, 122 bp, Homo sapiens
  misc_feature (61)..(62): /note="This region represents a CpG dinucleotide"
  misc_feature (61)..(61): /note="Nucleotide may be methylated to form 5-methylcytosine"
actgttctggaaacagacttctcccttctcacgcagcttatgccactggcaaaagaggggcgggaaatgtgatccaggattaataatgcacagatgtttctcaggaagtagtatatcactgt

SEQ ID NO: 2038 - DNA, 122 bp, Homo sapiens
  misc_feature (61)..(62): /note="This region represents a CpG dinucleotide"
  misc_feature (61)..(61): /note="Nucleotide may be methylated to form 5-methylcytosine"
ttaaggtaatttcctcaaggaaattgttcataatcaaccatttttatcaggtgcaaattacgtacaagatactaggcagatactgtggggaaacaaaatgtattagtcatggcttctttgcc

SEQ ID NO: 2039 - DNA, 122 bp, Homo sapiens
  misc_feature (61)..(62): /note="This region represents a CpG dinucleotide"
  misc_feature (61)..(61): /note="Nucleotide may be methylated to form 5-methylcytosine"
cagcagcgtgggccaggcaggcagtgatctccctgcctccaggacttgcatcgaaagatccggggacatttgtttttgatttttttcttcagatagggagagggtgaaacttccccaattgg

SEQ ID NO: 2040 - DNA, 122 bp, Homo sapiens
  misc_feature (61)..(62): /note="This region represents a CpG dinucleotide"
  misc_feature (61)..(61): /note="Nucleotide may be methylated to form 5-methylcytosine"
gcaggcagcgactggggctgagattcagggtgactgcataagggattaacttgaacaacccgtgttctctctataaggccctgcctgcctgctgggcacctcttagggtaagggccagcatt

SEQ ID NO: 2041 - DNA, 122 bp, Homo sapiens
  misc_feature (61)..(62): /note="This region represents a CpG dinucleotide"
  misc_feature (61)..(61): /note="Nucleotide may be methylated to form 5-methylcytosine"
ctgcacttatctatcgttggtcctgtgggatgactcaagctgctccaagttctggaagaccgcactctgtgtagactatgcagagagggttttgcagatgaaccagatatttgcaaaggtga

SEQ ID NO: 2042 - DNA, 122 bp, Homo sapiens
  misc_feature (61)..(62): /note="This region represents a CpG dinucleotide"
  misc_feature (61)..(61): /note="Nucleotide may be methylated to form 5-methylcytosine"
atgaggtcacagaatgttgaagatgaaatgaaagtggctcctgagtcacaaagtcacaggcgggtggggatcctttcaacagggctcccagcaatagagcagtcccactctcccagatgagc

SEQ ID NO: 2043 - DNA, 122 bp, Homo sapiens
  misc_feature (61)..(62): /note="This region represents a CpG dinucleotide"
  misc_feature (61)..(61): /note="Nucleotide may be methylated to form 5-methylcytosine"
aaatcttgcataaatcagggactgacctttgtactctcctttcagggccttaccttttatcgtagtcaaaatgaagaaagcaatgagggtgttgttgatggcacaggtagacttggcaacac

SEQ ID NO: 2044 - DNA, 122 bp, Homo sapiens
  misc_feature (61)..(62): /note="This region represents a CpG dinucleotide"
  misc_feature (61)..(61): /note="Nucleotide may be methylated to form 5-methylcytosine"
aatccctgtcctcaaggagtgtgcagtccagtataaggagagtcacatgaataaattcaccgtgagagatgcaataatataaatatgtatgacataaggattttaatctgtctcgatacagt

SEQ ID NO: 2045 - DNA, 122 bp, Homo sapiens
  misc_feature (61)..(62): /note="This region represents a CpG dinucleotide"
  misc_feature (61)..(61): /note="Nucleotide may be methylated to form 5-methylcytosine"
ggggcaggtcttagaccactagatgaaattagatacctttcccatgtgaggagtgtttcacgcaggcttatctccagtggcataatgtgtgctgtgtagccaggcctttccgcagcaccaga

SEQ ID NO: 2046 - DNA, 122 bp, Homo sapiens
  misc_feature (61)..(62): /note="This region represents a CpG dinucleotide"
  misc_feature (61)..(61): /note="Nucleotide may be methylated to form 5-methylcytosine"
ctacaccgcttgtcattgacatgcccatttatgtaagtctggaaggtttctttaaggcctcgttacagagaatattgggtaataggatctttgcacaattttccgaaggaaagtttttacca

SEQ ID NO: 2047 - DNA, 122 bp, Homo sapiens
  misc_feature (61)..(62): /note="This region represents a CpG dinucleotide"
  misc_feature (61)..(61): /note="Nucleotide may be methylated to form 5-methylcytosine"
catccaggaaacaacaggaaagaggaccacagcacaggcttgtagtgatgaattacattgcgtcccacggtttgcaactaaatcaacagtggtctgattaatggttccctcacataacattg

SEQ ID NO: 2048 - DNA, 122 bp, Homo sapiens
  misc_feature (61)..(62): /note="This region represents a CpG dinucleotide"
  misc_feature (61)..(61): /note="Nucleotide may be methylated to form 5-methylcytosine"
ctggagaagctacctggagaacctggagaacctgttccagtgcctgggccaggtgctgcccgagtcttgcctcctggtgtggaacacggccatgcctgtgggcgaggaagtcaccgggggtt

SEQ ID NO: 2049 - DNA, 122 bp, Homo sapiens
  misc_feature (61)..(62): /note="This region represents a CpG dinucleotide"
  misc_feature (61)..(61): /note="Nucleotide may be methylated to form 5-methylcytosine"
tattttctgggacagtcggtctgttcatgagaaagggcggttgtgcaatcgttctccctacgtcaactctgagaagtcggttgtgccctgcagatattgatgtcagcctgtttgctctctgg

SEQ ID NO: 2050 - DNA, 122 bp, Homo sapiens
  misc_feature (61)..(62): /note="This region represents a CpG dinucleotide"
  misc_feature (61)..(61): /note="Nucleotide may be methylated to form 5-methylcytosine"
ccaggataacttgtctcttctagtccaacatttaaactcactccaatgggttgaactcatcgttcttacttccctgtgtgactgaaagacaaaaagaggaaatgggggattgatgaggaaat

SEQ ID NO: 2051 - DNA, 122 bp, Homo sapiens
  misc_feature (61)..(62): /note="This region represents a CpG dinucleotide"
  misc_feature (61)..(61): /note="Nucleotide may be methylated to form 5-methylcytosine"
ttaggaaggtggttataatgaccaatgacaacttacaattagtgcattaaggcacttatccgtttacacctggttgtttctataagtcttagtaagatttattcagattacattttgaattc

SEQ ID NO: 2052 - DNA, 122 bp, Homo sapiens
  misc_feature (61)..(62): /note="This region represents a CpG dinucleotide"
  misc_feature (61)..(61): /note="Nucleotide may be methylated to form 5-methylcytosine"
gttgaaaacaaaaggaacccacaaaaacagagctggaccagctggtgcagcaggagctcccggagcccccgatgctgcatggcccaaatgaaaatgccttgcagtcacgacgactccgtgtc

SEQ ID NO: 2053 - DNA, 122 bp, Homo sapiens
  misc_feature (61)..(62): /note="This region represents a CpG dinucleotide"
  misc_feature (61)..(61): /note="Nucleotide may be methylated to form 5-methylcytosine"
ctcctggcctgacttggcactcgcagagccctggccatacccggctctaaagcctaagtccgtctcctcagcacagctcaggccggagctacaggctcctggatcctttccccatccgcccc

SEQ ID NO: 2054 - DNA, 122 bp, Homo sapiens
  misc_feature (61)..(62): /note="This region represents a CpG dinucleotide"
  misc_feature (61)..(61): /note="Nucleotide may be methylated to form 5-methylcytosine"
tcactgggaagaagcaggactaggatttaacactctgtttgctgccctggggcaggttgccgtctaatccaggcagatgaggtaagtatagaaatccgagaagagggcaagagcaagggtgc

SEQ ID NO: 2055 - DNA, 122 bp, Homo sapiens
  misc_feature (61)..(62): /note="This region represents a CpG dinucleotide"
  misc_feature (61)..(61): /note="Nucleotide may be methylated to form 5-methylcytosine"
ccgtgggcaccacgcagttttgggtcgagggctctgctccaagcaccccgggcataaaggcgggccttggctcggtcaagagtccaggcacgcacactggcataaaacactcctccgaagga

SEQ ID NO: 2056 - DNA, 122 bp, Homo sapiens
  misc_feature (61)..(62): /note="This region represents a CpG dinucleotide"
  misc_feature (61)..(61): /note="Nucleotide may be methylated to form 5-methylcytosine"
acctcctgtcatcgtctctttcatgggcagcccagtaagccacacctcctgagactcatgcgcttgtacagtcttctcctcttgaagctgggctggccctgtgactgttttgagcaatgcat

SEQ ID NO: 2057 - DNA, 122 bp, Homo sapiens
  misc_feature (61)..(62): /note="This region represents a CpG dinucleotide"
  misc_feature (61)..(61): /note="Nucleotide may be methylated to form 5-methylcytosine"
attgggcacgtcctgtctttaatattctcataactcataacttgcccaacccaaatctcacgaacatgctcagacactctaaaatttctactcatcacatgtcctttcacatgatgtttgat

SEQ ID NO: 2058 - DNA, 122 bp, Homo sapiens
  misc_feature (61)..(62): /note="This region represents a CpG dinucleotide"
  misc_feature (61)..(61): /note="Nucleotide may be methylated to form 5-methylcytosine"
ggaaccaatacaatgactcttggcaagcattcaactcaactagtggaagcagactgaccacgtctacaggagaaaaaccttcaagcttcaagcatttagagaggaaataagagtatgtcagt

SEQ ID NO: 2059 - DNA, 122 bp, Homo sapiens
  misc_feature (61)..(62): /note="This region represents a CpG dinucleotide"
  misc_feature (61)..(61): /note="Nucleotide may be methylated to form 5-methylcytosine"
ctaccaagcttgcaagaccagttgaagctgactcaaaaatcctaacattcagctgattgccggcaggcttagagtcaggcatctgctgcttcggtgggggcccaacgcgcatgctgggcgcc

SEQ ID NO: 2060 - DNA, 122 bp, Homo sapiens
  misc_feature (61)..(62): /note="This region represents a CpG dinucleotide"
  misc_feature (61)..(61): /note="Nucleotide may be methylated to form 5-methylcytosine"
gacccagaactgtgatctattttcttttgtgttttcagctgttgagcatgttgggcagcacggagtgtagctacaactgtgtgaccccacctgtgtgactgactccacctgtgtgactccag

SEQ ID NO: 2061 - DNA, 122 bp, Homo sapiens
  misc_feature (61)..(62): /note="This region represents a CpG dinucleotide"
  misc_feature (61)..(61): /note="Nucleotide may be methylated to form 5-methylcytosine"
gttcaagagatcctcagcctcagggacattagccaaagtttatcagtttaatcaacagtacgttaatgcagactcattcgctcatcaccacattctgagattagtctcatcacttcccactg

SEQ ID NO: 2062 - DNA, 122 bp, Homo sapiens
  misc_feature (61)..(62): /note="This region represents a CpG dinucleotide"
  misc_feature (61)..(61): /note="Nucleotide may be methylated to form 5-methylcytosine"
agaggggcttcgcccacagacttttgtcactaaaagcccaggtgactccccagatgcttacggatattaaaaccgattatgctgaaggagtggaaggagagtcaagtaaaagaagaagatca

SEQ ID NO: 2063 - DNA, 122 bp, Homo sapiens
  misc_feature (61)..(62): /note="This region represents a CpG dinucleotide"
  misc_feature (61)..(61): /note="Nucleotide may be methylated to form 5-methylcytosine"
ctcgccccgcccgaggctgcgaggacccctgggctcgggggtggtgagggagcttcgtcccggctgggcccgggctggggactcggcctccctgggcgggggccgcacggctgcaggccgag

SEQ ID NO: 2064 - DNA, 122 bp, Homo sapiens
  misc_feature (61)..(62): /note="This region represents a CpG dinucleotide"
  misc_feature (61)..(61): /note="Nucleotide may be methylated to form 5-methylcytosine"
ttgcactgagcttccaggcttagtctatggaaaaattctagtttgatgcttaatagaactcggacaagttgcctcattccttgttttttaatccaaaacttgtttcaccacaagaaagtttt

SEQ ID NO: 2065 - DNA, 122 bp, Homo sapiens
  misc_feature (61)..(62): /note="This region represents a CpG dinucleotide"
  misc_feature (61)..(61): /note="Nucleotide may be methylated to form 5-methylcytosine"
gcctaggcttgtcttgtgtaatacagttcagtattacccaggccctggaaccgaaatctgcgtatgaacagctctcttaggacatattcaaatattttcatcctctttgctgagaatttaag

SEQ ID NO: 2066 - DNA, 122 bp, Homo sapiens
  misc_feature (61)..(62): /note="This region represents a CpG dinucleotide"
  misc_feature (61)..(61): /note="Nucleotide may be methylated to form 5-methylcytosine"
atatagctcacaggattctgtgagaaattgtatcggtgaaaacaaatgacctagtttcttcgaccaaaaaaactacaagggagaaacaaggaaggaaaaggggaaggctgtggattaaaaga

SEQ ID NO: 2067 - DNA, 122 bp, Homo sapiens
  misc_feature (61)..(62): /note="This region represents a CpG dinucleotide"
  misc_feature (61)..(61): /note="Nucleotide may be methylated to form 5-methylcytosine"
gtcatttctgagtgccattagagccaccaacctgttctgggcctaggctgggtctgtaagcgcccctgttctcgtaaatactttatttgtagagttcctgctgctgggctggccagcacttc

SEQ ID NO: 2068 - DNA, 122 bp, Homo sapiens
  misc_feature (61)..(62): /note="This region represents a CpG dinucleotide"
  misc_feature (61)..(61): /note="Nucleotide may be methylated to form 5-methylcytosine"
attattactgatcttagaataaactcccatttaaaacaataaacaattattggccgggcgcggtggctcacacctataatcacagcactttgggaggctaaggcaggcagatggcttgaggc

SEQ ID NO: 2069 - DNA, 122 bp, Homo sapiens
  misc_feature (61)..(62): /note="This region represents a CpG dinucleotide"
  misc_feature (61)..(61): /note="Nucleotide may be methylated to form 5-methylcytosine"
ctaatggagtcaaataccaagaagaaattctttttagactatttccaaacccttatcatacgtgtctcagcagcattagaaaggacccagtagtatcgtttggttaagtatcaaccatgttc

SEQ ID NO: 2070 - DNA, 122 bp, Homo sapiens
  misc_feature (61)..(62): /note="This region represents a CpG dinucleotide"
  misc_feature (61)..(61): /note="Nucleotide may be methylated to form 5-methylcytosine"
ccaagagcatacggaacttggccagctggttcgagcggtgaagccgcgctcccctggaagcgacccaggggaggccaagttgtcagctttttgatcctctactgtgcatctccttgactgcc

SEQ ID NO: 2071 - DNA, 122 bp, Homo sapiens
  misc_feature (61)..(62): /note="This region represents a CpG dinucleotide"
  misc_feature (61)..(61): /note="Nucleotide may be methylated to form 5-methylcytosine"
cacctcattacacatcaggaaattgaggcacagggagattaggggacctgcttaaggccacgcagataagaaggggcaaagcctaaattctaacccaggctcttggctccagcatccatgct

SEQ ID NO: 2072 - DNA, 122 bp, Homo sapiens
  misc_feature (61)..(62): /note="This region represents a CpG dinucleotide"
  misc_feature (61)..(61): /note="Nucleotide may be methylated to form 5-methylcytosine"
ttattagcccagacctgctgcaacctatccttctacagtttgcttcttggctgaatgcctcgttttcctcattactgaaatgaaaaagggtttacaaagctagctaatttgagctaattagg

SEQ ID NO: 2073 - DNA, 122 bp, Homo sapiens
  misc_feature (61)..(62): /note="This region represents a CpG dinucleotide"
  misc_feature (61)..(61): /note="Nucleotide may be methylated to form 5-methylcytosine"
tggccaggaacctgttttttaaccctgggcccttaacagaggctgtgtagaaatggggggcgtcacaggccaagggcttagtccacttcagtccagcatccatggggaagcctggttgcagg

SEQ ID NO: 2074 - DNA, 122 bp, Homo sapiens
  misc_feature (61)..(62): /note="This region represents a CpG dinucleotide"
  misc_feature (61)..(61): /note="Nucleotide may be methylated to form 5-methylcytosine"
agactgaatattctggccgggaacttgtctttcttctaacatctagcagctgcccctttacgtaacttctgggtatttcaccatgccctgtaggctcccacggcatcacacttctgcaggga

SEQ ID NO: 2075 - DNA, 122 bp, Homo sapiens
  misc_feature (61)..(62): /note="This region represents a CpG dinucleotide"
  misc_feature (61)..(61): /note="Nucleotide may be methylated to form 5-methylcytosine"
attgtctttcccaggatgactggcactgactcagtcaccatcagcagctcttacatagcacgtgctagatcacaaagtccagagacaagggcctgtggcacgatgatgttcaataacataca

SEQ ID NO: 2076 - DNA, 122 bp, Homo sapiens
  misc_feature (61)..(62): /note="This region represents a CpG dinucleotide"
  misc_feature (61)..(61): /note="Nucleotide may be methylated to form 5-methylcytosine"
aagaatcactgtttcataacccaaaacaaagactgtatgtaggaccaataagccatttcacgtagcctttaccactaaagattgtgaaatacatgttttgtaactataattagtattattat

SEQ ID NO: 2077 - DNA, 122 bp, Homo sapiens
  misc_feature (61)..(62): /note="This region represents a CpG dinucleotide"
  misc_feature (61)..(61): /note="Nucleotide may be methylated to form 5-methylcytosine"
agatccctaatttcataagcagcttcagtgagcacatagaattaacagccatatttcttacgctgttttttccacaatacctaccttgtatccagggattaaattcatgtaattctgaagga

SEQ ID NO: 2078 - DNA, 122 bp, Homo sapiens
  misc_feature (61)..(62): /note="This region represents a CpG dinucleotide"
  misc_feature (61)..(61): /note="Nucleotide may be methylated to form 5-methylcytosine"
ggtgcaggatgtgcctgccaggcagcccctgagatgggtgtatgtggaacccagtgaggacgggaaactacacaaattcacggaatgagagggatgctcactttgctcagtttaaattcctc

SEQ ID NO: 2079 - DNA, 122 bp, Homo sapiens
  misc_feature (61)..(62): /note="This region represents a CpG dinucleotide"
  misc_feature (61)..(61): /note="Nucleotide may be methylated to form 5-methylcytosine"
gcattttaacaagcttcccaggtaattctgttacaggactttctccttagttcagctaagcgttgggtccttgtcacacggccaagaaaaattaggctcgcagacaatttgatgggtgagaa

SEQ ID NO: 2080 - DNA, 122 bp, Homo sapiens
  misc_feature (61)..(62): /note="This region represents a CpG dinucleotide"
  misc_feature (61)..(61): /note="Nucleotide may be methylated to form 5-methylcytosine"
gatttcacccattgtcctatgaagcccttttcctaatctgggatctgattcacaatcacacgtggcatttagttgtcatgtttccctggtccccgttaatctggaatagtctctccatcttc

SEQ ID NO: 2081 - DNA, 122 bp, Homo sapiens
  misc_feature (61)..(62): /note="This region represents a CpG dinucleotide"
  misc_feature (61)..(61): /note="Nucleotide may be methylated to form 5-methylcytosine"
aatcctgcatacagtccagtttcacacccggtgctcccgtgttgccctgtcctcgggttacgtagcttacttggcattgccatggtggtggacctgctcagcctcactcatgtttgctcttt

SEQ ID NO: 2082 - DNA, 122 bp, Homo sapiens
  misc_feature (61)..(62): /note="This region represents a CpG dinucleotide"
  misc_feature (61)..(61): /note="Nucleotide may be methylated to form 5-methylcytosine"
atattcacagagttgtgcaactatctgttgtgcaaccacaatctaattttagaatactttcgtcaccccacaaagaaaccttgtatccattagcggtcatttcccatgtaccccactccttt

SEQ ID NO: 2083 - DNA, 122 bp, Homo sapiens
  misc_feature (61)..(62): /note="This region represents a CpG dinucleotide"
  misc_feature (61)..(61): /note="Nucleotide may be methylated to form 5-methylcytosine"
ggagtgggaggatgagtgctattgattctcactcatcagcacccactttgcttttggaggcggctttggaaatgcctttcccaggctcagcccttgcctgcagccatgaccttacctgaaga

SEQ ID NO: 2084 - DNA, 122 bp, Homo sapiens
  misc_feature (61)..(62): /note="This region represents a CpG dinucleotide"
  misc_feature (61)..(61): /note="Nucleotide may be methylated to form 5-methylcytosine"
gaagctcacccaatcattgtgttcagagtttgtagtggggcttcatcacacaggcataatcggttgattaaccacatggttaatctctatctccaagttgatggataccacgtgacccaaag

SEQ ID NO: 2085 - DNA, 122 bp, Homo sapiens
  misc_feature (61)..(62): /note="This region represents a CpG dinucleotide"
  misc_feature (61)..(61): /note="Nucleotide may be methylated to form 5-methylcytosine"
ggaggcctcccagcactatccaaagtgggaagatacccagacccaaagtgtcttctgactcgtcatcacagctatatccctggaagaggagtgtctctccccacagtgccttcgcctctcct

SEQ ID NO: 2086 - DNA, 122 bp, Homo sapiens
  misc_feature (61)..(62): /note="This region represents a CpG dinucleotide"
  misc_feature (61)..(61): /note="Nucleotide may be methylated to form 5-methylcytosine"
ccagatcctggaaattatgaacccggtcccatttgtattaattaaaaactctttgaagtacgaattttcatgatacaagcaagagaagtcaggttaaaagaatggtaagaggaagagcaaag

SEQ ID NO: 2087 - DNA, 122 bp, Homo sapiens
  misc_feature (61)..(62): /note="This region represents a CpG dinucleotide"
  misc_feature (61)..(61): /note="Nucleotide may be methylated to form 5-methylcytosine"
cataatgttttcaaggttcatccatgattaagaatgtatcagcatttaattcctttttatcgtatgatgcactgagaagggctagtagtatctcacatggtatctcacatggtatggataca

SEQ ID NO: 2088 - DNA, 122 bp, Homo sapiens
  misc_feature (61)..(62): /note="This region represents a CpG dinucleotide"
  misc_feature (61)..(61): /note="Nucleotide may be methylated to form 5-methylcytosine"
cagtacacatgcttgtgcctgccctcttaccgatgctgagtgtgttgaatgtgaacgaggcgtgtgggaccatggtgagtcattagacacaagtaatgagctttgttataggtgaatgttga

SEQ ID NO: 2089 - DNA, 122 bp, Homo sapiens
  misc_feature (61)..(62): /note="This region represents a CpG dinucleotide"
  misc_feature (61)..(61): /note="Nucleotide may be methylated to form 5-methylcytosine"
gattacactatgatagcaaacaactccaaaatctcagtgccttaaaacagcagaggtttccgtcggcttctgctgcacgtctgctgaatcagctgggggatctgctcctcaatgtttcttcg

SEQ ID NO: 2090 - DNA, 122 bp, Homo sapiens
  misc_feature (61)..(62): /note="This region represents a CpG dinucleotide"
  misc_feature (61)..(61): /note="Nucleotide may be methylated to form 5-methylcytosine"
tattccattgcatatgtgtgtcacagttggtttatccactcatctgcttatacacactagcgttgcttccaccttttggctattgtgaataatgctgctatgaacacgggtgtccaattagc

SEQ ID NO: 2091 - DNA, 122 bp, Homo sapiens
  misc_feature (61)..(62): /note="This region represents a CpG dinucleotide"
  misc_feature (61)..(61): /note="Nucleotide may be methylated to form 5-methylcytosine"
ttttttttgatacagggtctcgctgtgttgccccaggctggagtgcagtggcactgatcacgtacagctcgctgcaaggcacacgccaccatgccaagctaattcctttttttttttttttt

SEQ ID NO: 2092 - DNA, 122 bp, Homo sapiens
  misc_feature (61)..(62): /note="This region represents a CpG dinucleotide"
  misc_feature (61)..(61): /note="Nucleotide may be methylated to form 5-methylcytosine"
ggagccgttttcaggaagaagcctctgggcactcttccccttttcaccccgcccacaccccgtcttctgagccatctcacagtgatcctcaggacaggcctgaggtggagggttggatgtca

SEQ ID NO: 2093 - DNA, 122 bp, Homo sapiens
  misc_feature (61)..(62): /note="This region represents a CpG dinucleotide"
  misc_feature (61)..(61): /note="Nucleotide may be methylated to form 5-methylcytosine"
ccaagggttgagcaaggatagttgatgactccatgctctgccactctccaggtgactctgcgcaaggtgttgaattctttagctcaactttccttttctatagaatgggaagaatacccatc

SEQ ID NO: 2094 - DNA, 122 bp, Homo sapiens
  misc_feature (61)..(62): /note="This region represents a CpG dinucleotide"
  misc_feature (61)..(61): /note="Nucleotide may be methylated to form 5-methylcytosine"
tgcaggaagagcatttgcagaagctaattggggtaagcttttgcatcagtgtcggtgcaacgcatcacttacagccttgaaaatagctgtaatggtgtatgatgattgagtcattccctaat

SEQ ID NO: 2095 - DNA, 122 bp, Homo sapiens
  misc_feature (61)..(62): /note="This region represents a CpG dinucleotide"
  misc_feature (61)..(61): /note="Nucleotide may be methylated to form 5-methylcytosine"
ctgaatctccctatttgtccaaatgttcatccctagctgtgctctgtgctgtgtccacagcgtcatacagccggtgacttcagagccaggccacagttcaagagtctgccccagggctccct

SEQ ID NO: 2096 - DNA, 122 bp, Homo sapiens
  misc_feature (61)..(62): /note="This region represents a CpG dinucleotide"
  misc_feature (61)..(61): /note="Nucleotide may be methylated to form 5-methylcytosine"
gttaatgtccctgtcactcttgcttctgttgcagtgatagccctcatggagagactacctcggttgaagactcaacccaggatgtgaccgcagagcaccacacgagcgatgacggtacgagg

SEQ ID NO: 2097 - DNA, 122 bp, Homo sapiens
  misc_feature (61)..(62): /note="This region represents a CpG dinucleotide"
  misc_feature (61)..(61): /note="Nucleotide may be methylated to form 5-methylcytosine"
ctgacaagctggtcattgcattcagaggacttggatccactcatttgattttgaaaactacgagagataaagagagttaaggtagaaaatgtcaatacatggctgggcatggtggctcatgc

SEQ ID NO: 2098 - DNA, 122 bp, Homo sapiens
  misc_feature (61)..(62): /note="This region represents a CpG dinucleotide"
  misc_feature (61)..(61): /note="Nucleotide may be methylated to form 5-methylcytosine"
agacacaaatgcaaggtccttggtgtggctttgaactctggattggccttgactgaagcccgccacacctcctgacttttccaaaacatgagtcagtccattcctgttagagtttgacccag

SEQ ID NO: 2099 - DNA, 122 bp, Homo sapiens
  misc_feature (61)..(62): /note="This region represents a CpG dinucleotide"
  misc_feature (61)..(61): /note="Nucleotide may be methylated to form 5-methylcytosine"
aatcacagccctcccagggagatgcccctccaggcccacctgtccggagaggatcagcctcgctctaacactgaatgccctaaggccactgtgagccctgccccttaagtcagaggagcagg

SEQ ID NO: 2100 - DNA, 122 bp, Homo sapiens
  misc_feature (61)..(62): /note="This region represents a CpG dinucleotide"
  misc_feature (61)..(61): /note="Nucleotide may be methylated to form 5-methylcytosine"
ggctctggagtcagagtgcctaagttccagtactggctttgccacctattagctcatgaccgtgtacaatttatttaatttcactgagacacaatttcctcatccttgaaatggggctaaga

SEQ ID NO: 2101 - DNA, 122 bp, Homo sapiens
  misc_feature (61)..(62): /note="This region represents a CpG dinucleotide"
  misc_feature (61)..(61): /note="Nucleotide may be methylated to form 5-methylcytosine"
taaccaatctgtttctgcatgtcaattctgttttctgtaccttgctttcccttttctgtccgtaaatcctctccgaccacacagcactgcctgagtcactctgaacctactctggttgagga

SEQ ID NO: 2102 - DNA, 122 bp, Homo sapiens
  misc_feature (61)..(62): /note="This region represents a CpG dinucleotide"
  misc_feature (61)..(61): /note="Nucleotide may be methylated to form 5-methylcytosine"
ccaggaattcacttactagctggacaaccttgcataagtcacttcacttctttgtgcctccgctttccttctataaaacgagcataatgtaatcacctcatatcattgtccagtgaattcag

SEQ ID NO: 2103 - DNA, 122 bp, Homo sapiens
  misc_feature (61)..(62): /note="This region represents a CpG dinucleotide"
  misc_feature (61)..(61): /note="Nucleotide may be methylated to form 5-methylcytosine"
gtaactaaccagaggaggagcttcttcatccattgagtaagggaacttaccctcccacgacgataaataccaactcaactatatcatcagcagcataataattattataattgttatttcag

SEQ ID NO: 2104 - DNA, 122 bp, Homo sapiens
  misc_feature (61)..(62): /note="This region represents a CpG dinucleotide"
  misc_feature (61)..(61): /note="Nucleotide may be methylated to form 5-methylcytosine"
ctaatgcaggctgcacttcgcgcacaggtgccagctgttacctcgccgggcagctgaccgcgcggtgcacacttgggcgcattcactgagcccagccccagcccacaccaactaaacaaaga

SEQ ID NO: 2105 - DNA, 122 bp, Homo sapiens
  misc_feature (61)..(62): /note="This region represents a CpG dinucleotide"
  misc_feature (61)..(61): /note="Nucleotide may be methylated to form 5-methylcytosine"
ttgtggttgaggatgaggacagcacctatgtcatagggtgtgagaagagaatgatgtgtgcgtacaaaattcttagcacataggaagcctctggccactgtggttattatagtcattaccat

SEQ ID NO: 2106 - DNA, 122 bp, Homo sapiens
  misc_feature (61)..(62): /note="This region represents a CpG dinucleotide"
  misc_feature (61)..(61): /note="Nucleotide may be methylated to form 5-methylcytosine"
atgcaaacacattagccagtcttcatgatggcactaatcccacaaccagacaacagtcaacggcacagttgaaagacagctgacaagaagggcaactgttacacaagactcactgaacctta

SEQ ID NO: 2107 - DNA, 122 bp, Homo sapiens
  misc_feature (61)..(62): /note="This region represents a CpG dinucleotide"
  misc_feature (61)..(61): /note="Nucleotide may be methylated to form 5-methylcytosine"
atcctggtttcataagaagtcagagggaaggaaatattcatcactgttgaaatcaccatgcgttgcacaaggcttcttgagaaagagatgtacagtatataagagctgattgatggaaggtt

SEQ ID NO: 2108 - DNA, 122 bp, Homo sapiens
  misc_feature (61)..(62): /note="This region represents a CpG dinucleotide"
  misc_feature (61)..(61): /note="Nucleotide may be methylated to form 5-methylcytosine"
aagagcgggaagggttcctaccagcatggggctttgttctcagaaagcttctctaagatacgttacttagatacatccgtaaaatccctcagtcaactgcacccctgtggcctatagcctga

SEQ ID NO: 2109 - DNA, 122 bp, Homo sapiens
  misc_feature (61)..(62): /note="This region represents a CpG dinucleotide"
  misc_feature (61)..(61): /note="Nucleotide may be methylated to form 5-methylcytosine"
ccggacctgacatcccttgatgtgtggcttggtacaaccctgacatccattgatgtcattcggctgtcgattagacctcaggtgccacacccacagccaagccctgatgtcaccgtccctcc

SEQ ID NO: 2110 - DNA, 122 bp, Homo sapiens
  misc_feature (61)..(62): /note="This region represents a CpG dinucleotide"
  misc_feature (61)..(61): /note="Nucleotide may be methylated to form 5-methylcytosine"
ctctcaagtgaaatgtgtaggggaataagggaagtaaactagcacggggaggaagccaggcgaagatgtaagctcggtgaggtctggctccagcctaaccccacaggaagctctggagtgtg

SEQ ID NO: 2111 - DNA, 122 bp, Homo sapiens
  misc_feature (61)..(62): /note="This region represents a CpG dinucleotide"
  misc_feature (61)..(61): /note="Nucleotide may be methylated to form 5-methylcytosine"
ttattgcccaataaaactgaacaggctcataccctttggcccatcaattccactcctagacgcatatcctggagaaattcttgcccatgtgcacaggggacatgtacaaaaatgttcatagt

SEQ ID NO: 2112 - DNA, 122 bp, Homo sapiens
  misc_feature (61)..(62): /note="This region represents a CpG dinucleotide"
  misc_feature (61)..(61): /note="Nucleotide may be methylated to form 5-methylcytosine"
tgtgggagattaaattcgttagcacactacaaacttaaaacaatgttaggtcacaagtatcgaggccagggcttctcgaactttaatgtgcatacaaattagttggggatcttgttaaaatg

SEQ ID NO: 2113 - DNA, 122 bp, Homo sapiens
  misc_feature (61)..(62): /note="This region represents a CpG dinucleotide"
  misc_feature (61)..(61): /note="Nucleotide may be methylated to form 5-methylcytosine"
aggagtgccaatgagattatacactgttaaaactgattccaggctgggtgcggtggctcacgcctgtaatcctagcactttgggaggcctaggcaggccgattgtctaagctcaggagttcg

SEQ ID NO: 2114 - DNA, 122 bp, Homo sapiens
  misc_feature (61)..(62): /note="This region represents a CpG dinucleotide"
  misc_feature (61)..(61): /note="Nucleotide may be methylated to form 5-methylcytosine"
tttctaaagtggttattacactagccagcaattgtaagagttctggttgctccacatccacgccaacaaatggtatttcatgtctttttcatttgagcaattctggtaattatgtaatggta

SEQ ID NO: 2115 - DNA, 122 bp, Homo sapiens
  misc_feature (61)..(62): /note="This region represents a CpG dinucleotide"
  misc_feature (61)..(61): /note="Nucleotide may be methylated to form 5-methylcytosine"
gtgagggtgggctgcccaggctagaaggacattccaggctgcagaagcagcatgtgcaaacgccctgggctgggaaggccccaggcacactcaaggaacagaagggtggctagtgtgggtta

SEQ ID NO: 2116 - DNA, 122 bp, Homo sapiens
  misc_feature (61)..(62): /note="This region represents a CpG dinucleotide"
  misc_feature (61)..(61): /note="Nucleotide may be methylated to form 5-methylcytosine"
cagagcccccaggctgtgcacacgtgggctccaggcgaaccatttcaggttcagggaagacggctcagcctaacctgggtggggctgacttctgtgcacaacatctacacctggccctctgt

SEQ ID NO: 2117 - DNA, 122 bp, Homo sapiens
  misc_feature (61)..(62): /note="This region represents a CpG dinucleotide"
  misc_feature (61)..(61): /note="Nucleotide may be methylated to form 5-methylcytosine"
gagggaattgaaaggaggtgaacttgcctctctgagccagctctttggctgtctccttcccgatacctgtattagctcctgtgaccacaactactttcccaggaagctgaacagttgatgta

SEQ ID NO: 2118 - DNA, 122 bp, Homo sapiens
  misc_feature (61)..(62): /note="This region represents a CpG dinucleotide"
  misc_feature (61)..(61): /note="Nucleotide may be methylated to form 5-methylcytosine"
tcttttccattttgtagagcacctgtttttaaggggcctcccacaggagcatcacagcctcggccgttgctcctgtttctttagtgagctggctgcacattttgtgtcctattacgtcacat

SEQ ID NO: 2119 - DNA, 122 bp, Homo sapiens
  misc_feature (61)..(62): /note="This region represents a CpG dinucleotide"
  misc_feature (61)..(61): /note="Nucleotide may be methylated to form 5-methylcytosine"
atgccctttaaaaatcagagttcctcagagagcttccggtgtggcagtcatgtctgtgcccgtctctcacttttcttactaattctggttatctcatcaaaagtgcatttttaagaaattcc

SEQ ID NO: 2120 - DNA, 122 bp, Homo sapiens
  misc_feature (61)..(62): /note="This region represents a CpG dinucleotide"
  misc_feature (61)..(61): /note="Nucleotide may be methylated to form 5-methylcytosine"
gtatgacaagaatgggaaattgctacatcagctctttcatgccaaactgtctagatgattcgcattgcctatctgatttcactagaggatcattctgtttcacttttcactcttggtagcac

SEQ ID NO: 2121 - DNA, 122 bp, Homo sapiens
  misc_feature (61)..(62): /note="This region represents a CpG dinucleotide"
  misc_feature (61)..(61): /note="Nucleotide may be methylated to form 5-methylcytosine"
ctagtccaaggagattattctccagttttcatgaacaccttctacctccatgcttttgatcgctttaccccctccatctagcatatcctttctctaaattcactgaaatcatccctctcttt

SEQ ID NO: 2122 - DNA, 122 bp, Homo sapiens
  misc_feature (61)..(62): /note="This region represents a CpG dinucleotide"
  misc_feature (61)..(61): /note="Nucleotide may be methylated to form 5-methylcytosine"
agggataaagcaacccttgtttatcccatcttggctcttggtctgtgcccatggctggttcgtgccttggatacatggaaaataagtaaatgattaaaaaataaaaattaaaaatcttctat

SEQ ID NO: 2123 - DNA, 122 bp, Homo sapiens
  misc_feature (61)..(62): /note="This region represents a CpG dinucleotide"
  misc_feature (61)..(61): /note="Nucleotide may be methylated to form 5-methylcytosine"
agaactagtaactgagttcctgaccttggaaagctgagctctaaagggatctagcctcggcgtctagcctgagtagctagctgatatgtctcattcattcatcattcttttccccttaatct

SEQ ID NO: 2124 - DNA, 122 bp, Homo sapiens
  misc_feature (61)..(62): /note="This region represents a CpG dinucleotide"
  misc_feature (61)..(61): /note="Nucleotide may be methylated to form 5-methylcytosine"
agcggggagcagggaggaagtgggtgacaggaaggaatcagagctgccagttccagctcacgcttgtagtggctccggaaagcctcatccttgggcttcttgggatagagatttttgagctg

SEQ ID NO: 2125 - DNA, 122 bp, Homo sapiens
  misc_feature (61)..(62): /note="This region represents a CpG dinucleotide"
  misc_feature (61)..(61): /note="Nucleotide may be methylated to form 5-methylcytosine"
gtgtctggttcagtcttctgtgcatttggaattttcaaattgaggctatcagggtttgttcgccctggatgtagaaagcaaaaatctggatcttacacattcctgggatctgactggtgagg

SEQ ID NO: 2126 - DNA, 122 bp, Homo sapiens
  misc_feature (61)..(62): /note="This region represents a CpG dinucleotide"
  misc_feature (61)..(61): /note="Nucleotide may be methylated to form 5-methylcytosine"
ggagactgaggcagggagtgggagggccaggcttgtagtgcattgtgggactgcagcctgcgctgggtatttgctgagcaaggccaaggctatgtgagacactaacatcctgagcctgtgaa

SEQ ID NO: 2127 - DNA, 122 bp, Homo sapiens
  misc_feature (61)..(62): /note="This region represents a CpG dinucleotide"
  misc_feature (61)..(61): /note="Nucleotide may be methylated to form 5-methylcytosine"
ctcaagtgatccacccgccttggcctcccaaattgctgggattacaggcgtgaaccacagcgcccggcctaagccctagctgttcattgccacaatgagaggaagtacaggaaggtgttgag

SEQ ID NO: 2128 - DNA, 122 bp, Homo sapiens
  misc_feature (61)..(62): /note="This region represents a CpG dinucleotide"
  misc_feature (61)..(61): /note="Nucleotide may be methylated to form 5-methylcytosine"
cgacctcgcccagccctcctgatcttttaaagtgcattttacttcctggaaagttgggttcgctggttttcaggcggcaagtttgtgccataaggatgaaggcatgctttagagatggcata

SEQ ID NO: 2129 - DNA, 122 bp, Homo sapiens
  misc_feature (61)..(62): /note="This region represents a CpG dinucleotide"
  misc_feature (61)..(61): /note="Nucleotide may be methylated to form 5-methylcytosine"
tagggctgtcggcgtaaatcagggctcagacgggtctgctaggcaacaggctgggttcggcgcctgacaggaagactgtcagcgactttaggcgtgccttacatttagaaagcctcctgtcg

SEQ ID NO: 2130 - DNA, 122 bp, Homo sapiens
  misc_feature (61)..(62): /note="This region represents a CpG dinucleotide"
  misc_feature (61)..(61): /note="Nucleotide may be methylated to form 5-methylcytosine"
aggcacttgaagatacctgattcctgtcctcaggaagtttagagttgagatgtggggaaacggagaagtaaataagtacagcagagggctaaaagtgctgttttaatagaagtttgcacaac

SEQ ID NO: 2131 - DNA, 122 bp, Homo sapiens
  misc_feature (61)..(62): /note="This region represents a CpG dinucleotide"
  misc_feature (61)..(61): /note="Nucleotide may be methylated to form 5-methylcytosine"
tgtgttttattggcgggattactttgaggaccagccccttctgtatcccccaggctttgacggaagagtcgtggtgtatcccagcaaccagactttaaaggactacctcagctggcgacaag

SEQ ID NO: 2132 - DNA, 122 bp, Homo sapiens
  misc_feature (61)..(62): /note="This region represents a CpG dinucleotide"
  misc_feature (61)..(61): /note="Nucleotide may be methylated to form 5-methylcytosine"
atcaaagcagaattgaaccgcccccttggtagacctgagaaatgtagacagacctgttggcgagccatgaaaatgttgcagagagagtcatcagaggcatctgtagctaaacatgctatgca

SEQ ID NO: 2133 - DNA, 122 bp, Homo sapiens
  misc_feature (61)..(62): /note="This region represents a CpG dinucleotide"
  misc_feature (61)..(61): /note="Nucleotide may be methylated to form 5-methylcytosine"
tctttgggttaaccacaaagcaaactacagacagtttgcacaaattcagagcaatgcatacgtggcaaattaacagccttatcaagcttcaaacatcctggctttttgaggcacagtaatac

SEQ ID NO: 2134 - DNA, 122 bp, Homo sapiens
  misc_feature (61)..(62): /note="This region represents a CpG dinucleotide"
  misc_feature (61)..(61): /note="Nucleotide may be methylated to form 5-methylcytosine"
caagacccagaaaaggcccctgggtggaacctttgtccccaggacaaagttgctttggggcgcttacaggttgaatcacccatagctatgttttgtttggcttgtactgtgttgtttacatt

SEQ ID NO: 2135 - DNA, 122 bp, Homo sapiens
  misc_feature (61)..(62): /note="This region represents a CpG dinucleotide"
  misc_feature (61)..(61): /note="Nucleotide may be methylated to form 5-methylcytosine"
tgtttcagtactggtcgtggcctctagcaatacaagttttggtcatgggatggcataccacgaaaccttgtattacctgagcctggatcacaagtgacaagggatggattcaaacacatgtg

SEQ ID NO: 2136 - DNA, 122 bp, Homo sapiens
  misc_feature (61)..(62): /note="This region represents a CpG dinucleotide"
  misc_feature (61)..(61): /note="Nucleotide may be methylated to form 5-methylcytosine"
tccaggttgacacatggtggcagggcggagcttgagaggggtgtggttaggtcaggtcagcggacaagggccatatccagccacccacgctggccattcgcagtgtgccatcactgtgcggg

SEQ ID NO: 2137 - DNA, 122 bp, Homo sapiens
  misc_feature (61)..(62): /note="This region represents a CpG dinucleotide"
  misc_feature (61)..(61): /note="Nucleotide may be methylated to form 5-methylcytosine"
cctatacatcagcaggtcccggctgcagcagctgggcaggaggcctaccgcattggttcacgtctgctgaccaagtggagagaagcagaagcagacctgggcagggcaggaggaagccatct

SEQ ID NO: 2138 - DNA, 122 bp, Homo sapiens
  misc_feature (61)..(62): /note="This region represents a CpG dinucleotide"
  misc_feature (61)..(61): /note="Nucleotide may be methylated to form 5-methylcytosine"
agaggcaagatgagtaagtagctgtggattcatttagtttctgcatccctccagcatgaccgtgagtagcacagccgtggtgccagcctcctgagtttaccatctcatcagaggctagctac

SEQ ID NO: 2139 - DNA, 122 bp, Homo sapiens
  misc_feature (61)..(62): /note="This region represents a CpG dinucleotide"
  misc_feature (61)..(61): /note="Nucleotide may be methylated to form 5-methylcytosine"
aaacccatcatattatagagatggacagggttacagatcatctggttttaccttcttatacgtgataaaactgaatcccaaagcaggaaagtgacttggtcacagtcagcattaaatttcag

SEQ ID NO: 2140 - DNA, 122 bp, Homo sapiens
  misc_feature (61)..(62): /note="This region represents a CpG dinucleotide"
  misc_feature (61)..(61): /note="Nucleotide may be methylated to form 5-methylcytosine"
agcatctgtgtgtatgcagtgttatctaaggacacacccacagacacggacacgtccttacgcagagaacagccgctgcctcttagtgttcaggatgatacgtttttccttaatatcatcct

SEQ ID NO: 2141 - DNA, 122 bp, Homo sapiens
  misc_feature (61)..(62): /note="This region represents a CpG dinucleotide"
  misc_feature (61)..(61): /note="Nucleotide may be methylated to form 5-methylcytosine"
agaaatagaaaaacatatttaccaacctgctagcgtgggtctattttctcacaagcaatgcgaggcctctgcaagctgaagagggacctcacgtctctataacaatgtggattctattgtta

SEQ ID NO: 2142 - DNA, 122 bp, Homo sapiens
  misc_feature (61)..(62): /note="This region represents a CpG dinucleotide"
  misc_feature (61)..(61): /note="Nucleotide may be methylated to form 5-methylcytosine"
cctaatcgcctcccaaaggccccagctcctaataccatcgcactggggtcagggcttcaacgcaggaacttggggctcgtaacagagcctgcatcttgaatgttactattaggcagaataat

SEQ ID NO: 2143 - DNA, 122 bp, Homo sapiens
  misc_feature (61)..(62): /note="This region represents a CpG dinucleotide"
  misc_feature (61)..(61): /note="Nucleotide may be methylated to form 5-methylcytosine"
aagcgctggacatgtcatttgtgactcattcttttaattcaccgtgctaatcaactgaaccgccacagcctcccaaggtaattgtgtctttataggagttgaaagcagcaggcaaaagggcc

SEQ ID NO: 2144 - DNA, 122 bp, Homo sapiens
  misc_feature (61)..(62): /note="This region represents a CpG dinucleotide"
  misc_feature (61)..(61): /note="Nucleotide may be methylated to form 5-methylcytosine"
gggagtggaacaccgaactactagagaaacaaagatgggctgttgggcagcagtaagtgacgatttgaggttgaaatcatgaagcaaggccagacaacaaagttgtgcaatattctccagca

SEQ ID NO: 2145 - DNA, 122 bp, Homo sapiens
  misc_feature (61)..(62): /note="This region represents a CpG dinucleotide"
  misc_feature (61)..(61): /note="Nucleotide may be methylated to form 5-methylcytosine"
ttgtgccctcacatggcagaaagcaaagggcaaaaaagggatgaactccttctgtcaaaccgtttcataagagcactcagtcccattcatgtaggtagagcccttatggccccgcctcttaa

SEQ ID NO: 2146 - DNA, 122 bp, Homo sapiens
  misc_feature (61)..(62): /note="This region represents a CpG dinucleotide"
  misc_feature (61)..(61): /note="Nucleotide may be methylated to form 5-methylcytosine"
gtacttcttctttggcaaaactacatctttccttggtgcagtggaccacaacctgcttcacgaggcatctgcagaaggagctaaccccaaacgcccactgtgctgataaatttatgctagaa

SEQ ID NO: 2147 - DNA, 122 bp, Homo sapiens
  misc_feature (61)..(62): /note="This region represents a CpG dinucleotide"
  misc_feature (61)..(61): /note="Nucleotide may be methylated to form 5-methylcytosine"
cgtaccagctgtgcctgttctctttcaaagagcttcctggaagctcagttcagtgacttccgcttacatgtcattaaccaaaactgtgtcacattgccacccgtagctggagacaaggctgg

SEQ ID NO: 2148 - DNA, 122 bp, Homo sapiens
  misc_feature (61)..(62): /note="This region represents a CpG dinucleotide"
  misc_feature (61)..(61): /note="Nucleotide may be methylated to form 5-methylcytosine"
gacaccctcaagggaggagtgcaggcactcaaagatttgagtcacaggcaatgtggttcacgtactatatgaataagcacaatgaaggtatggagtactctgtaatcaaggggaggggtttt

SEQ ID NO: 2149 - DNA, 122 bp, Homo sapiens
  misc_feature (61)..(62): /note="This region represents a CpG dinucleotide"
  misc_feature (61)..(61): /note="Nucleotide may be methylated to form 5-methylcytosine"
aaaattgttttcagtcccaaccacaggtaacagccccctccagaaatccctggcaatgtgcgggacactggcttgcaaaattacccacaaggacaatagactgatggatcgagatttaaata

SEQ ID NO: 2150 - DNA, 122 bp, Homo sapiens
  misc_feature (61)..(62): /note="This region represents a CpG dinucleotide"
  misc_feature (61)..(61): /note="Nucleotide may be methylated to form 5-methylcytosine"
tgtgaggaagacttataaagcctttcgtttattttagtaaaatacatgcagaggcagcagcgtagaaaaatgagaagcttcctccacttcttccccctcccctttctgtggtcctcactgct

SEQ ID NO: 2151 - DNA, 122 bp, Homo sapiens
  misc_feature (61)..(62): /note="This region represents a CpG dinucleotide"
  misc_feature (61)..(61): /note="Nucleotide may be methylated to form 5-methylcytosine"
attccttttttacactgaatcatgtgtcttccagacccaagaaaaagtccgagagggcaacgccatggggctgagctgctcaatgccctcccagtgcatcctgctgcaaggatgccccccag

SEQ ID NO: 2152 - DNA, 122 bp, Homo sapiens
  misc_feature (61)..(62): /note="This region represents a CpG dinucleotide"
  misc_feature (61)..(61): /note="Nucleotide may be methylated to form 5-methylcytosine"
ggggagggagctctttctctggccctgcagtcacctgaggttgttaccattatgaacggccgctgggacccccgcatgtgcatgtactcccccagagtgtccgggggccccagccaagggac

SEQ ID NO: 2153 - DNA, 122 bp, Homo sapiens
  misc_feature (61)..(62): /note="This region represents a CpG dinucleotide"
  misc_feature (61)..(61): /note="Nucleotide may be methylated to form 5-methylcytosine"
atggtggaaaagttggcaattaataacttctaagaaaactgaactaatgaaccaatcctgcgtgtgctatgtgtataacctccttctcactattaacagatttgttccaaacttatataaga

SEQ ID NO: 2154 - DNA, 122 bp, Homo sapiens
  misc_feature (61)..(62): /note="This region represents a CpG dinucleotide"
  misc_feature (61)..(61): /note="Nucleotide may be methylated to form 5-methylcytosine"
ctacatcgctgaactcctctaacagaaccacaagactgacaagcgaaaagctttgggacccgagggaaagaaatctatactatatttatcacataatttcctaaattctaatagattcccaa

SEQ ID NO: 2155 - DNA, 122 bp, Homo sapiens
  misc_feature (61)..(62): /note="This region represents a CpG dinucleotide"
  misc_feature (61)..(61): /note="Nucleotide may be methylated to form 5-methylcytosine"
ctcataaatggaattagaggcttgagggagcttgttcgccccttctgccatgtgaggacacgtagaaagcactatcaccaggaacaggctgtcaccagacaaccgttgctgccttgatctta

SEQ ID NO: 2156 - DNA, 122 bp, Homo sapiens
  misc_feature (61)..(62): /note="This region represents a CpG dinucleotide"
  misc_feature (61)..(61): /note="Nucleotide may be methylated to form 5-methylcytosine"
tggtgaaagtaggacacagttgcaccacctgacttgcatcacctcattgccttctagtggcgttataagcttggttccctgctgactgacacctgggaaggggtggtgggcacctcagggca

SEQ ID NO: 2157 - DNA, 122 bp, Homo sapiens
  misc_feature (61)..(62): /note="This region represents a CpG dinucleotide"
  misc_feature (61)..(61): /note="Nucleotide may be methylated to form 5-methylcytosine"
tgacagactaagcatcctggaatgtcagtatcatcatgtcattcttctgggctccttaaccgccaatcacaccagactcaggttcccttaattggttccaaccaatctcactttccaattct

SEQ ID NO: 2158 - DNA, 122 bp, Homo sapiens
  misc_feature (61)..(62): /note="This region represents a CpG dinucleotide"
  misc_feature (61)..(61): /note="Nucleotide may be methylated to form 5-methylcytosine"
gagatacttttggagaaacacaaattctgtaacatcaaggtgagaggctgcaggggtggacgtgagcaataatgcctgccccaaccaaaggaaatgaagtctttgcctttaaggaggggctg

SEQ ID NO: 2159 - DNA, 122 bp, Homo sapiens
  misc_feature (61)..(62): /note="This region represents a CpG dinucleotide"
  misc_feature (61)..(61): /note="Nucleotide may be methylated to form 5-methylcytosine"
cgtcccaactccgccggtatacgagtcgctgtgttatataatgcagacagtttaataaaacgaagctcctgttattttgattctgggaatctgcagtggcccttgagataaacactaatgcc

SEQ ID NO: 2160 - DNA, 122 bp, Homo sapiens
  misc_feature (61)..(62): /note="This region represents a CpG dinucleotide"
  misc_feature (61)..(61): /note="Nucleotide may be methylated to form 5-methylcytosine"
tctgggtgtttccaggacaagaggctgcagccactggctgagtccaggcagaagtggttccgcagggctggaggctggcaccaagccttgtccagcgagggggtgtggagtaatcttactgc

SEQ ID NO: 2161 - DNA, 122 bp, Homo sapiens
  misc_feature (61)..(62): /note="This region represents a CpG dinucleotide"
  misc_feature (61)..(61): /note="Nucleotide may be methylated to form 5-methylcytosine"
ttccagggttactctgggtgtattcagttcctttgatccttcccttctgtcacagtctcacgttctgtgacaggctgcatttcaggaggggtcgcttttgttctccagccggtagaaaggag

SEQ ID NO: 2162 - DNA, 122 bp, Homo sapiens
  misc_feature (61)..(62): /note="This region represents a CpG dinucleotide"
  misc_feature (61)..(61): /note="Nucleotide may be methylated to form 5-methylcytosine"
aggatctcaaatagaataattttgtgaatagttggtttcctaggtgccaacttcacagtgcgttgtaataaatcatcgaaaaccatgggaggagtattgactgcttgtgtggctaagagagc

SEQ ID NO: 2163 - DNA, 122 bp, Homo sapiens
  misc_feature (61)..(62): /note="This region represents a CpG dinucleotide"
  misc_feature (61)..(61): /note="Nucleotide may be methylated to form 5-methylcytosine"
agacagatatgttccatgtatccagtggctcagcctcaaggaaagggagagttgggactacgtcatttcataggaggggaggcgtgccatgaattatacaccctggcttctctgggattaga

SEQ ID NO: 2164 - DNA, 122 bp, Homo sapiens
  misc_feature (61)..(62): /note="This region represents a CpG dinucleotide"
  misc_feature (61)..(61): /note="Nucleotide may be methylated to form 5-methylcytosine"
tcattactaacaggacatgattcccagcctctgccatcagttgtttagcaattataataacgacattaagcttccttcaatattctctactaaatgcctgctttcagtaagtcattgctcta

SEQ ID NO: 2165 - DNA, 122 bp, Homo sapiens
  misc_feature (61)..(62): /note="This region represents a CpG dinucleotide"
  misc_feature (61)..(61): /note="Nucleotide may be methylated to form 5-methylcytosine"
atgcgtaaaaccagatctggtgcataaaaagaagacacgtgtttgtttttaaagcttctacgcctcaagtcatatatgtgaagttgcttgacaaggagcattggctgggcttcccatcttag

SEQ ID NO: 2166 - DNA, 122 bp, Homo sapiens
  misc_feature (61)..(62): /note="This region represents a CpG dinucleotide"
  misc_feature (61)..(61): /note="Nucleotide may be methylated to form 5-methylcytosine"
agagtgagtaatattctgaatgaggctacagtgacattatcatgtttgcaacatagctttcgttactaggaaaatttgtgaggcaaatccagactttaccaaaaaataccagtttggaacct

SEQ ID NO: 2167 - DNA, 122 bp, Homo sapiens
  misc_feature (61)..(62): /note="This region represents a CpG dinucleotide"
  misc_feature (61)..(61): /note="Nucleotide may be methylated to form 5-methylcytosine"
ttgatcataagggatcctgaacaggatgttttgccatccagaaaaccagcaccactgagacgccagctggagacatgtcacgaaaacttggccctaattccaaagccaacagtgtgttgaaa

SEQ ID NO: 2168 - DNA, 122 bp, Homo sapiens
  misc_feature (61)..(62): /note="This region represents a CpG dinucleotide"
  misc_feature (61)..(61): /note="Nucleotide may be methylated to form 5-methylcytosine"
accataagttgttagtctgctactctttctcccagttggcacatgaccctaacatccaatcgctagtggtgtggccattttttggtcttattttggcctttcctcagccaccactcatcagt

SEQ ID NO: 2169 - DNA, 122 bp, Homo sapiens
  misc_feature (61)..(62): /note="This region represents a CpG dinucleotide"
  misc_feature (61)..(61): /note="Nucleotide may be methylated to form 5-methylcytosine"
ttgagtgtatctgcacaagacttctctagcttcattaccaaaccttgagtcacctgaatccgaacaggccaactgatgttttaagtggaacaaaattccctgcctaccttttctttttccat

SEQ ID NO: 2170 - DNA, 122 bp, Homo sapiens
  misc_feature (61)..(62): /note="This region represents a CpG dinucleotide"
  misc_feature (61)..(61): /note="Nucleotide may be methylated to form 5-methylcytosine"
agatgatcccagaaagcaccattaggggattgagggaatgagacagagaagagaagcctgcggaaacaggaagtattatccagcaagttactactgtggacaactggagcacaatcccatca

SEQ ID NO: 2171 - DNA, 122 bp, Homo sapiens
  misc_feature (61)..(62): /note="This region represents a CpG dinucleotide"
  misc_feature (61)..(61): /note="Nucleotide may be methylated to form 5-methylcytosine"
gaaatgctgggcagaagtgaaagaaacacactgcagctgaggcatgatgctgttgggttacgcctacataaatctggtggctgcagcaatggctaggttcaaaactggactgacaaggtgtg

SEQ ID NO: 2172 - DNA, 122 bp, Homo sapiens
  misc_feature (61)..(62): /note="This region represents a CpG dinucleotide"
  misc_feature (61)..(61): /note="Nucleotide may be methylated to form 5-methylcytosine"
cagtcactgctggtgctactgacagagctgttgacttagtttcactccataactgagtctcggctccttctcaggaaacttacctagactctgttgaacatgacaagtggtccaggaacact

SEQ ID NO: 2173 - DNA, 122 bp, Homo sapiens
  misc_feature (61)..(62): /note="This region represents a CpG dinucleotide"
  misc_feature (61)..(61): /note="Nucleotide may be methylated to form 5-methylcytosine"
tttctgcctgggagcaatttaatgatctgctttagagcagagaaatggtcagagagaaaacgttcaggtttatgtgttagcgatcaaatgcccagtggaatttacaatggtaaccagacact

SEQ ID NO: 2174 - DNA, 122 bp, Homo sapiens
  misc_feature (61)..(62): /note="This region represents a CpG dinucleotide"
  misc_feature (61)..(61): /note="Nucleotide may be methylated to form 5-methylcytosine"
caggctccggagcgacggctccgacggggacccgttaaataatttattgatgatacaaagcgactcgcgcccacccggggccgcccccggattctgcaaaaatagattcgcccccaccccgc

SEQ ID NO: 2175 - DNA, 122 bp, Homo sapiens
  misc_feature (61)..(62): /note="This region represents a CpG dinucleotide"
  misc_feature (61)..(61): /note="Nucleotide may be methylated to form 5-methylcytosine"
atttcctgctagtagaatttagggaactcggttgccttctttcatttcaaccactctgtccgttttagtccaatttgacagtgtttctattggtaaacaaaacattgtgagtcatagggatt

SEQ ID NO: 2176 - DNA, 122 bp, Homo sapiens
  misc_feature (61)..(62): /note="This region represents a CpG dinucleotide"
  misc_feature (61)..(61): /note="Nucleotide may be methylated to form 5-methylcytosine"
ctaaaggggtacagacacactctaccttctcccagtcataggcaacaacagagagccacacggcctttctactgggcatttgtgtagcatgcgagcacatgcttatgcactcctgtggagca

SEQ ID NO: 2177 - DNA, 122 bp, Homo sapiens
  misc_feature (61)..(62): /note="This region represents a CpG dinucleotide"
  misc_feature (61)..(61): /note="Nucleotide may be methylated to form 5-methylcytosine"
attatgagtcttgtgcaatagttatttccatcctaatgtgagaaccatccatttttgcagcgtcgggtcattggagaccaccgtattatgagtatttcacacattagaaattggcaaacagc

SEQ ID NO: 2178 - DNA, 122 bp, Homo sapiens
  misc_feature (61)..(62): /note="This region represents a CpG dinucleotide"
  misc_feature (61)..(61): /note="Nucleotide may be methylated to form 5-methylcytosine"
agtctgcagtgagctatgattgcatcaccatacactagactgagcaacagtgtgagaccccgtctctaaacaaataaattaaatagttaaataaataaatgtaggacattgccatgagaaca

SEQ ID NO: 2179 - DNA, 122 bp, Homo sapiens
  misc_feature (61)..(62): /note="This region represents a CpG dinucleotide"
  misc_feature (61)..(61): /note="Nucleotide may be methylated to form 5-methylcytosine"
aacccacacttgttgagggcctatataggaccatgaactggggacacaaactcaacctcacgatagcactgatgaggcatgttctactaagctcattttacagtgaggaaagagaggaccag

SEQ ID NO: 2180 - DNA, 122 bp, Homo sapiens
  misc_feature (61)..(62): /note="This region represents a CpG dinucleotide"
  misc_feature (61)..(61): /note="Nucleotide may be methylated to form 5-methylcytosine"
tggttttgaactcctgatccgcccacctcagctgggattataggtgtgagccaccgcgcccggccaggtgttcttcatcagactgcagggacacctccagcaattgctgcatggttcctggg

SEQ ID NO: 2181 - DNA, 122 bp, Homo sapiens
  misc_feature (61)..(62): /note="This region represents a CpG dinucleotide"
  misc_feature (61)..(61): /note="Nucleotide may be methylated to form 5-methylcytosine"
cgaatcccctgcagttcctaactcagagtcaaatgctatttgtgaaataataagagaaaacgcatctgaactgcaagtcaggaaagccctgcagccgcatggtctgaggccaagacacaggt

SEQ ID NO: 2182 - DNA, 122 bp, Homo sapiens
  misc_feature (61)..(62): /note="This region represents a CpG dinucleotide"
  misc_feature (61)..(61): /note="Nucleotide may be methylated to form 5-methylcytosine"
agaagatcaagtacgccttcagcctgctggtgaggacgcgcccgcccctgggccggggcgcgggcacgacgaacctgtcccgtccccgcacccacgccaaccacctccctccccacgcccca

SEQ ID NO: 2183 - DNA, 122 bp, Homo sapiens
  misc_feature (61)..(62): /note="This region represents a CpG dinucleotide"
  misc_feature (61)..(61): /note="Nucleotide may be methylated to form 5-methylcytosine"
acatgggtgtggcctgtgttttctacatgtagtcatatccaactatatcccaatagcttccgcaagacagtcatatctgctatatccaattatctaatatccttcactagaggtaaacatgt

SEQ ID NO: 2184 - DNA, 122 bp, Homo sapiens
  misc_feature (61)..(62): /note="This region represents a CpG dinucleotide"
  misc_feature (61)..(61): /note="Nucleotide may be methylated to form 5-methylcytosine"
gaggtcagtgacgtggtgagcatttcatgctccttactgatgagcagagggccggtatcacgtgctgccttcctagggagggctgggtagtgcgtcaaggaaatgggcccagagctgtgtct

SEQ ID NO: 2185 - DNA, 122 bp, Homo sapiens
  misc_feature (61)..(62): /note="This region represents a CpG dinucleotide"
  misc_feature (61)..(61): /note="Nucleotide may be methylated to form 5-methylcytosine"
aacaactaagggacacagaacaaaatgacaaacacttggaagcaagaatgatgccagggccgaagaaaattaaacatggccaacatggctagaaaacaaactggacaaacaggaagtggctg

SEQ ID NO: 2186 - DNA, 122 bp, Homo sapiens
  misc_feature (61)..(62): /note="This region represents a CpG dinucleotide"
  misc_feature (61)..(61): /note="Nucleotide may be methylated to form 5-methylcytosine"
ccagttactcagaaggctgaagtaggagaattgcttaagcccaggaggttgaagttgcagcgagttgtgatcttgcaactgcactccagactaggtcacagattcagactctgtctcttaaa

SEQ ID NO: 2187 - DNA, 122 bp, Homo sapiens
  misc_feature (61)..(62): /note="This region represents a CpG dinucleotide"
  misc_feature (61)..(61): /note="Nucleotide may be methylated to form 5-methylcytosine"
cacatcttgggccccatataaagagcaacaatgcttcacaaccaagacagaagtgacgggcgaccatatctcttggttggtgggtgtgacagcagtgttccagccctgtaaaaatctcaggc

SEQ ID NO: 2188 - DNA, 122 bp, Homo sapiens
  misc_feature (61)..(62): /note="This region represents a CpG dinucleotide"
  misc_feature (61)..(61): /note="Nucleotide may be methylated to form 5-methylcytosine"
aagagcccatgatgagctggatgtttttgttctgttttacaacagcatgcctgacccaggcgaggggccccagctcaggctagtttcccttttctcctctccacactgtttttgctgctgtc

SEQ ID NO: 2189 - DNA, 122 bp, Homo sapiens
  misc_feature (61)..(62): /note="This region represents a CpG dinucleotide"
  misc_feature (61)..(61): /note="Nucleotide may be methylated to form 5-methylcytosine"
ttgacttagaaagagctggccttacaggataccattgcacaaagcctacgagagtttatacgcctaattgctagcatttggaaggtatttttgaatcttgagaatttaattgtacaaaacta

SEQ ID NO: 2190 - DNA, 122 bp, Homo sapiens
  misc_feature (61)..(62): /note="This region represents a CpG dinucleotide"
  misc_feature (61)..(61): /note="Nucleotide may be methylated to form 5-methylcytosine"
ggcgcgagcgggaactacggccttggccttcttcagttctagcgtcaacccggtgctctacgtcttcaccgctggagatctgctgccccgggcaggtccccgtttcctcacgcggctcttcg

SEQ ID NO: 2191 - DNA, 122 bp, Homo sapiens
  misc_feature (61)..(62): /note="This region represents a CpG dinucleotide"
  misc_feature (61)..(61): /note="Nucleotide may be methylated to form 5-methylcytosine"
ctgaggggcccctctgctgggcccacccatgagaacctctgtggacccacaccagccaagcgtgtgctgcgactccagggatggccaagaggatgagccacatccttctttgggattgatca

SEQ ID NO: 2192 - DNA, 122 bp, Homo sapiens
  misc_feature (61)..(62): /note="This region represents a CpG dinucleotide"
  misc_feature (61)..(61): /note="Nucleotide may be methylated to form 5-methylcytosine"
gcacacaactcagaagagccaagccatctctgctcacaggggaggagggagctggggacacgtcagggcccaacccatgcacctctgggacttgggcctctcacctggtactggcccagggg

SEQ ID NO: 2193 - DNA, 122 bp, Homo sapiens
  misc_feature (61)..(62): /note="This region represents a CpG dinucleotide"
  misc_feature (61)..(61): /note="Nucleotide may be methylated to form 5-methylcytosine"
agcaaccccttacaaaataattacgctcaataaaatgctctacatctctttctcttcagtcgcaatcatagagaatgattagttagcaattccaggtaggatttggcaaggatggactgaac

SEQ ID NO: 2194 - DNA, 122 bp, Homo sapiens
  misc_feature (61)..(62): /note="This region represents a CpG dinucleotide"
  misc_feature (61)..(61): /note="Nucleotide may be methylated to form 5-methylcytosine"
ctcgagttaggtctccagaccaaaacagagctccacctcttatatttccagatgattgtgcgatgaacataaacaatgttaccatcattttagattttctgtttctgagttatccaatttac

SEQ ID NO: 2195 - DNA, 122 bp, Homo sapiens
  misc_feature (61)..(62): /note="This region represents a CpG dinucleotide"
  misc_feature (61)..(61): /note="Nucleotide may be methylated to form 5-methylcytosine"
gggaattaactgtacactatttaatccaccagttccggttcattagaaaaatgcagttctcgccggacatggtggctcacacctgtaatcccagcaattctggaggccaaggtgggcagatt

SEQ ID NO: 2196 - DNA, 122 bp, Homo sapiens
  misc_feature (61)..(62): /note="This region represents a CpG dinucleotide"
  misc_feature (61)..(61): /note="Nucleotide may be methylated to form 5-methylcytosine"
cctctgtgcggatcttggcctagaggtcagtcatctgtccgttcctgactctgctggtgacgtgatcactgtagaatggtgtcatctcataccccaaaagcataagcacttctgacctttaa

SEQ ID NO: 2197 - DNA, 122 bp, Homo sapiens
  misc_feature (61)..(62): /note="This region represents a CpG dinucleotide"
  misc_feature (61)..(61): /note="Nucleotide may be methylated to form 5-methylcytosine"
cattagcatgacaatactggaggcagagataaagctagagagctttaaagctggaaggagcgggaatgtgtgggttaagacaaccaactcccatttgagtcctaactgagaatgtcattagg

SEQ ID NO: 2198 - DNA, 122 bp, Homo sapiens
  misc_feature (61)..(62): /note="This region represents a CpG dinucleotide"
  misc_feature (61)..(61): /note="Nucleotide may be methylated to form 5-methylcytosine"
ctcagaaaaatagcttgtgggagcccagtgtttggactctataagtaaccttggacttttcgggaggtgcttggtgcttggggtgagggattagaatgggatgagactgaaggcagaaaggc

SEQ ID NO: 2199 - DNA, 122 bp, Homo sapiens
  misc_feature (61)..(62): /note="This region represents a CpG dinucleotide"
  misc_feature (61)..(61): /note="Nucleotide may be methylated to form 5-methylcytosine"
atcaaataaagtgaggattgaacaattgaagggtcactgataatcactgtaaggatttagcgccagggcttggcagtactcaggtgagtaaacgttagttattgctaatattattcatttat

SEQ ID NO: 2200 - DNA, 122 bp, Homo sapiens
  misc_feature (61)..(62): /note="This region represents a CpG dinucleotide"
  misc_feature (61)..(61): /note="Nucleotide may be methylated to form 5-methylcytosine"
tgccagtttttcactatctcagcaaatttagcatctctttacaaaccaatgtgctaccagcggcctcaaagtgcctgtgtcatgtccctgcttagtggatttgcagcagctgtgaaatgtca

SEQ ID NO: 2201 - DNA, 122 bp, Homo sapiens
  misc_feature (61)..(62): /note="This region represents a CpG dinucleotide"
  misc_feature (61)..(61): /note="Nucleotide may be methylated to form 5-methylcytosine"
tctgaagcccaaagcaagccaagctgagttgcatgagacacaggacttgagtgaggagcccgggctgggccagagcctgatgccagttccaggtccagggaaacagcaagtcaaggtgagag

SEQ ID NO: 2202 - DNA, 122 bp, Homo sapiens
  misc_feature (61)..(62): /note="This region represents a CpG dinucleotide"
  misc_feature (61)..(61): /note="Nucleotide may be methylated to form 5-methylcytosine"
taagtaactacacatgctcactgccctgggcccaaagctggggcgagagcctggaatcagcgcacccccaagaattccggaacatgggaagatgcccatctttcatggagggggcatgcctc

SEQ ID NO: 2203 - DNA, 122 bp, Homo sapiens
  misc_feature (61)..(62): /note="This region represents a CpG dinucleotide"
  misc_feature (61)..(61): /note="Nucleotide may be methylated to form 5-methylcytosine"
aatttccttgcttcactttgcaaagagccagggcattttatttgctacccactgcttaatcgtgataactcacagcacagtaaaggtcttattgaggaagaaaaggctttgatcacctttaa

SEQ ID NO: 2204 - DNA, 122 bp, Homo sapiens
  misc_feature (61)..(62): /note="This region represents a CpG dinucleotide"
  misc_feature (61)..(61): /note="Nucleotide may be methylated to form 5-methylcytosine"
gagagtatggatggggttggggaggagggggttagtgtggcctagcagaagagtagcagacgaagctgaagatgtaagtagtggccagatcataagggccttaataatctttttaagaagtt

SEQ ID NO: 2205 - DNA, 122 bp, Homo sapiens
  misc_feature (61)..(62): /note="This region represents a CpG dinucleotide"
  misc_feature (61)..(61): /note="Nucleotide may be methylated to form 5-methylcytosine"
agtgctctcaagtcaaagcacccaaacccaagcctttaaaagttctttgtcattatgaaacgaagctgcccaggaaaagcactggtatgtgtcactggatgcgctcacagaagatccttgga

SEQ ID NO: 2206 - DNA, 122 bp, Homo sapiens
  misc_feature (61)..(62): /note="This region represents a CpG dinucleotide"
  misc_feature (61)..(61): /note="Nucleotide may be methylated to form 5-methylcytosine"
ctcagggacagacatcagccagatcccatctgcaaacacaccaaagctttattcaacaggcgtggcttcctgaagcgtaaagccacttcacagacggtggccacagcggcacctcggccaga

SEQ ID NO: 2207 - DNA, 122 bp, Homo sapiens
  misc_feature (61)..(62): /note="This region represents a CpG dinucleotide"
  misc_feature (61)..(61): /note="Nucleotide may be methylated to form 5-methylcytosine"
ttaagaactaacttaataagctccactgggcaagtctattaacatccccttctaccacgacgggtctttccaaagtggaaaaataaatgtagtcagtaggtgtcacatgtttatttggttga

SEQ ID NO: 2208 - DNA, 122 bp, Homo sapiens
  misc_feature (61)..(62): /note="This region represents a CpG dinucleotide"
  misc_feature (61)..(61): /note="Nucleotide may be methylated to form 5-methylcytosine"
catagaatgcggtattatgcagccttagaaaggaagtaaactctcacatatgccgtaatacgatgaaccttaaggacatgctaagtgaaatatgccagtgacaaagggacaaacaccttatg

SEQ ID NO: 2209 - DNA, 122 bp, Homo sapiens
  misc_feature (61)..(62): /note="This region represents a CpG dinucleotide"
  misc_feature (61)..(61): /note="Nucleotide may be methylated to form 5-methylcytosine"
gctgtgggctcctggcacgaaagggtgaagtccgtctgagtccaccgaccaatggtgacgcgcagcgccttcgcggcgcttcctgattggcgggcatgcagggtgggcgggagggaggagaa

SEQ ID NO: 2210 - DNA, 122 bp, Homo sapiens
  misc_feature (61)..(62): /note="This region represents a CpG dinucleotide"
  misc_feature (61)..(61): /note="Nucleotide may be methylated to form 5-methylcytosine"
ttaccatttacatgatttaaggccaaaatctgctctccttcctatgtcataacaaaaccgcgcaagactataacgtaagcctcactacccatatcctagagctttgcagcaaccagcaaacg

SEQ ID NO: 2211 - DNA, 122 bp, Homo sapiens
  misc_feature (61)..(62): /note="This region represents a CpG dinucleotide"
  misc_feature (61)..(61): /note="Nucleotide may be methylated to form 5-methylcytosine"
ggccgagatgcggcagcgcattgccgagctggagatccaggtgatcggcggggccggggtcggggggcgggggcgggggcagggcccggggcaggagcggggccggaccccaggcccagcat

SEQ ID NO: 2212 - DNA, 122 bp, Homo sapiens
  misc_feature (61)..(62): /note="This region represents a CpG dinucleotide"
  misc_feature (61)..(61): /note="Nucleotide may be methylated to form 5-methylcytosine"
ctgcactccagactgcatgagaacgtaaaaccctgacttaaaacaaaaacaaaaagaaaacgtgctcattggctaagcctggtagaagccacatgaccaaggctgatcattgctgccactgg

SEQ ID NO: 2213 - DNA, 122 bp, Homo sapiens
  misc_feature (61)..(62): /note="This region represents a CpG dinucleotide"
  misc_feature (61)..(61): /note="Nucleotide may be methylated to form 5-methylcytosine"
tcgtcaccgcatgtgctcccagagaaaggcattagtacagggtcacttatggcagcggggcgagccagcagaccctgcaacacaaacactgaggtttttcttctccttcctcctctcgacgc

SEQ ID NO: 2214 - DNA, 122 bp, Homo sapiens
  misc_feature (61)..(62): /note="This region represents a CpG dinucleotide"
  misc_feature (61)..(61): /note="Nucleotide may be methylated to form 5-methylcytosine"
tgacacaagtacacagaatcaaccagctccccagccctcctggttgtgtggttttcaccacgtgacttttgcagctccccaaactgagtaggcagagtcggttctcccacgtggctctgaat

SEQ ID NO: 2215 - DNA, 122 bp, Homo sapiens
  misc_feature (61)..(62): /note="This region represents a CpG dinucleotide"
  misc_feature (61)..(61): /note="Nucleotide may be methylated to form 5-methylcytosine"
catcagcttgtcaactggtcatgtgctttaagatcagccatctcggacattgaggtgaggcggagagagggaagcaggtttgtgagagctctgaggcagagtggtcaatgattaagagctca

SEQ ID NO: 2216 - DNA, 122 bp, Homo sapiens
  misc_feature (61)..(62): /note="This region represents a CpG dinucleotide"
  misc_feature (61)..(61): /note="Nucleotide may be methylated to form 5-methylcytosine"
tgtgagagttttaagaggtggggcctttgaaaagtgactaagacatgagggcactgcctccgtgagagggattcatgccttcccttataaaagaggtggaaagggccgggcacagtggctca

SEQ ID NO: 2217 - DNA, 122 bp, Homo sapiens
  misc_feature (61)..(62): /note="This region represents a CpG dinucleotide"
  misc_feature (61)..(61): /note="Nucleotide may be methylated to form 5-methylcytosine"
agggcagacccatcactcccttgcaggggaacaggcgctgtcaggcaggcccagctccagcgtgctccaccatgactgcctgtggaaacttgggcaagtcagaacctctctgaactcctgtc

SEQ ID NO: 2218 - DNA, 122 bp, Homo sapiens
  misc_feature (61)..(62): /note="This region represents a CpG dinucleotide"
  misc_feature (61)..(61): /note="Nucleotide may be methylated to form 5-methylcytosine"
atcaagcgagtttacccctgcaggtaagtcttgctccccgcttcctcttcctgcccagcacgtgactctccctgtatgccaaagtacctgtgcacctgcgacgtgtctaagtggcctgatgg

SEQ ID NO: 2219 - DNA, 122 bp, Homo sapiens
  misc_feature (61)..(62): /note="This region represents a CpG dinucleotide"
  misc_feature (61)..(61): /note="Nucleotide may be methylated to form 5-methylcytosine"
tagccaccttatacaacaggtactacagtattatctctagtacagatgatgaaatacaggcgcagaagttaaggaatctgaccaagctcacactgccagtgacttgtggagccagaactgtg

SEQ ID NO: 2220 - DNA, 122 bp, Homo sapiens
  misc_feature (61)..(62): /note="This region represents a CpG dinucleotide"
  misc_feature (61)..(61): /note="Nucleotide may be methylated to form 5-methylcytosine"
cacaatgaatgcccagcctcatgcagttcctgttggtctgtagcaaatcagtttctgtatcgttcggtacaatgcaaacagaagcctcttccttgtggcctttgcaggaaatgattgttgtc

SEQ ID NO: 2221 - DNA, 122 bp, Homo sapiens
  misc_feature (61)..(62): /note="This region represents a CpG dinucleotide"
  misc_feature (61)..(61): /note="Nucleotide may be methylated to form 5-methylcytosine"
aggactggacggttttccagtcaaatcactccacctatgagccagtgctgctggccaagacgcgctcgtctgagtccatcccacacctgggcgcagacgccggcctgcatgctgcactgcac

SEQ ID NO: 2222 - DNA, 122 bp, Homo sapiens
  misc_feature (61)..(62): /note="This region represents a CpG dinucleotide"
  misc_feature (61)..(61): /note="Nucleotide may be methylated to form 5-methylcytosine"
gaggcggaggcggaggcagaggcccctaggagggcgaaggccggcgggttaacgaggaggcgctgagtgcacggctgggctccacgctgatttctcctaatgaattaataatggcgctcggg

SEQ ID NO: 2223 - DNA, 122 bp, Homo sapiens
  misc_feature (61)..(62): /note="This region represents a CpG dinucleotide"
  misc_feature (61)..(61): /note="Nucleotide may be methylated to form 5-methylcytosine"
ggctttcggaccagagcagccctggcagggttgagtccagccctggcggggttgagttaccgaaacaccctggaggcagctaaatttcctcagctgtcctggagaggctcaccccagcccca

SEQ ID NO: 2224 - DNA, 122 bp, Homo sapiens
  misc_feature (61)..(62): /note="This region represents a CpG dinucleotide"
  misc_feature (61)..(61): /note="Nucleotide may be methylated to form 5-methylcytosine"
gttcgtgttcttgacctactgagccagtctacgtattaacaagatctcacacgtgactcacgtgtgcattaaaatctgagacttactggactagctcaggaacatggcctctcagagccctt

SEQ ID NO: 2225 - DNA, 122 bp, Homo sapiens
  misc_feature (61)..(62): /note="This region represents a CpG dinucleotide"
  misc_feature (61)..(61): /note="Nucleotide may be methylated to form 5-methylcytosine"
agtgcccgggccctgctgacctgtgatactattgacctcagaacctcactggatgaggcacgtgcaggaggcctggtaatggagcaacaactttatacaaagaacaagttacttgttttttt

SEQ ID NO: 2226 - DNA, 122 bp, Homo sapiens
  misc_feature (61)..(62): /note="This region represents a CpG dinucleotide"
  misc_feature (61)..(61): /note="Nucleotide may be methylated to form 5-methylcytosine"
tcactgcactttgataaaccctgctaataggcaggcctaccttgtttaccagctcaattgcgtaacaattaacaatttaaatgtactgcctacacagtaaagaataacatcccctaatccaa

SEQ ID NO: 2227 - DNA, 122 bp, Homo sapiens
  misc_feature (61)..(62): /note="This region represents a CpG dinucleotide"
  misc_feature (61)..(61): /note="Nucleotide may be methylated to form 5-methylcytosine"
gcctgccaaaggctttgccacagtgactcaatgagatcagatggccttccctctgctgcacgctgagagcaaccagagcaggcctttgccaggacttgggggaaggtgggacctggcctgga

SEQ ID NO: 2228 - DNA, 122 bp, Homo sapiens
  misc_feature (61)..(62): /note="This region represents a CpG dinucleotide"
  misc_feature (61)..(61): /note="Nucleotide may be methylated to form 5-methylcytosine"
ttggggcatatctggatataccagcatgttcatcctctaggcaagagacagagggtggcacggggcctggagaaaaggctagactcgggtcatgtcatcaatcactccttcctttatcttct

SEQ ID NO: 2229 - DNA, 122 bp, Homo sapiens
  misc_feature (61)..(62): /note="This region represents a CpG dinucleotide"
  misc_feature (61)..(61): /note="Nucleotide may be methylated to form 5-methylcytosine"
agcttgaagaatgaataggaacagtgagaaaaagaagaaagtggggaagaacattccaagcggagataacaacaattacaaaagcacagggtgtgagaaacagagcaaggtcctttagggca

SEQ ID NO: 2230 - DNA, 122 bp, Homo sapiens
  misc_feature (61)..(62): /note="This region represents a CpG dinucleotide"
  misc_feature (61)..(61): /note="Nucleotide may be methylated to form 5-methylcytosine"
cagaaacaaaaggaggtgtgacaactgtgtcagaagtctgagtgacgcaaggccatgagccgaggaatgcagacaccctctagaaactggaaaaggcaaggaaataaattctctcctggagc

SEQ ID NO: 2231 - DNA, 122 bp, Homo sapiens
  misc_feature (61)..(62): /note="This region represents a CpG dinucleotide"
  misc_feature (61)..(61): /note="Nucleotide may be methylated to form 5-methylcytosine"
tcattattgggatttagagctctggatatagttgtattaaccagagaagatataggataacgttcagaagattttacatgtacgtgtcttagagaatgagccagcagctctctgtaacttca

SEQ ID NO: 2232 - DNA, 122 bp, Homo sapiens
  misc_feature (61)..(62): /note="This region represents a CpG dinucleotide"
  misc_feature (61)..(61): /note="Nucleotide may be methylated to form 5-methylcytosine"
tgtgtgccaggcactcacaggccagcaagtgcaaacagcaaggcttgactctgagtgaaacggaaccgggtcaaatctggctcttcctctactagctgggtggcctcaggcaaagttacttc

SEQ ID NO: 2233 - DNA, 122 bp, Homo sapiens
  misc_feature (61)..(62): /note="This region represents a CpG dinucleotide"
  misc_feature (61)..(61): /note="Nucleotide may be methylated to form 5-methylcytosine"
tctgtggttacccagagctgaatccttgctctgtcctttgcagccgaaacctttaagtctcggcctccttatctataacataggtttactattacagaccctatagggctgtggtgaaggtt

SEQ ID NO: 2234 - DNA, 122 bp, Homo sapiens
  misc_feature (61)..(62): /note="This region represents a CpG dinucleotide"
  misc_feature (61)..(61): /note="Nucleotide may be methylated to form 5-methylcytosine"
ttccctctagtattgtgaagcagattattagatttgagaagatgtgttccacaaatgtctcgaaagagtccaggagtggaggctgctaaatggtttgcttaattctaatgctttatacagat

SEQ ID NO: 2235 - DNA, 122 bp, Homo sapiens
  misc_feature (61)..(62): /note="This region represents a CpG dinucleotide"
  misc_feature (61)..(61): /note="Nucleotide may be methylated to form 5-methylcytosine"
cacctctcggctggaagtacgtaatttttagcgagtcacagaaaaatagggaaacttatgcggcgtttccttggccacttccccatctgggtgatcatgtactcagacccagcactgcagcc

SEQ ID NO: 2236 - DNA, 122 bp, Homo sapiens
  misc_feature (61)..(62): /note="This region represents a CpG dinucleotide"
  misc_feature (61)..(61): /note="Nucleotide may be methylated to form 5-methylcytosine"
ggtagatgccttcttgtgctcaaaaccggttatcactgtgaaaaattgaaagacgccatgcgcagacactggttgctaaacgtgcttttgccctccaggggcagacgctgagatccggcctg

SEQ ID NO: 2237 - DNA, 122 bp, Homo sapiens
  misc_feature (61)..(62): /note="This region represents a CpG dinucleotide"
  misc_feature (61)..(61): /note="Nucleotide may be methylated to form 5-methylcytosine"
gattttcccagctacagtcattgttatcttttgtcagcctataagcatgttctggctgggcgcggtgtctcacccctgtaatcccagcactttgggaggcttagctgggtggatcacttgag

SEQ ID NO: 2238 - DNA, 122 bp, Homo sapiens
  misc_feature (61)..(62): /note="This region represents a CpG dinucleotide"
  misc_feature (61)..(61): /note="Nucleotide may be methylated to form 5-methylcytosine"
aaataatgtatgttcccaaaatagcagtctgtgatcccacagtaatctctgtcttatcaccgaggctggcataactttttagcagctggcctggctgtctttctgttcagttccatcttctc

SEQ ID NO: 2239 - DNA, 122 bp, Homo sapiens
  misc_feature (61)..(62): /note="This region represents a CpG dinucleotide"
  misc_feature (61)..(61): /note="Nucleotide may be methylated to form 5-methylcytosine"
cagacaggagccaaggccccattgaagctccaggatgacgatggccctcaggggaacagacgcaaaaccaggcacgggcctgccttccagctggaatctacctgtcaggcccagaacttctg

SEQ ID NO: 2240 - DNA, 122 bp, Homo sapiens
  misc_feature (61)..(62): /note="This region represents a CpG dinucleotide"
  misc_feature (61)..(61): /note="Nucleotide may be methylated to form 5-methylcytosine"
gactccccagctgatgcaggccgggtgctagtctgcagggtttcagaactcacaaggaagcgtgtctccaagggcttgtttgacgttagggcctccagcaaagctacaatttaaattgcaag

SEQ ID NO: 2241 - DNA, 122 bp, Homo sapiens
  misc_feature (61)..(62): /note="This region represents a CpG dinucleotide"
  misc_feature (61)..(61): /note="Nucleotide may be methylated to form 5-methylcytosine"
tatacacagaaatccgacggaatgctttttattcccattcaagcagttactacttatctgcgtgactaaggtatggaagatctaaaaagaaactaagtgctagtctggcctctactccttca

SEQ ID NO: 2242 - DNA, 122 bp, Homo sapiens
  misc_feature (61)..(62): /note="This region represents a CpG dinucleotide"
  misc_feature (61)..(61): /note="Nucleotide may be methylated to form 5-methylcytosine"
ctgttgtacaacacatacctcccctaaggcaaggaagcctgcccactttcttggaacaggcgataacacacaaggaagatagagcaaaatatctcaatgaattaacttgctacaatatataa

SEQ ID NO: 2243 - DNA, 122 bp, Homo sapiens
  misc_feature (61)..(62): /note="This region represents a CpG dinucleotide"
  misc_feature (61)..(61): /note="Nucleotide may be methylated to form 5-methylcytosine"
cagaggttggggaacaggatgcagggcagggccaaaggtcatggtggttgctacctacaccggctcatcctgagtacaaagggttctcagcacagagggaaccccaaatctccccctccatg

SEQ ID NO: 2244 - DNA, 122 bp, Homo sapiens
  misc_feature (61)..(62): /note="This region represents a CpG dinucleotide"
  misc_feature (61)..(61): /note="Nucleotide may be methylated to form 5-methylcytosine"
gaatctctcccgggaaagcccggaaagatgccagcggcccctgaagcagggagacccctgcgcgtgcgcttctgaggcagatgcatcagggaggccttcctgggcgagagggaaaggataat

SEQ ID NO: 2245 - DNA, 122 bp, Homo sapiens
  misc_feature (61)..(62): /note="This region represents a CpG dinucleotide"
  misc_feature (61)..(61): /note="Nucleotide may be methylated to form 5-methylcytosine"
gggctcaagcaatcctttgccttgacctcccaaagtgctgggataataggtgtgaaccaccgagcccaactaataaggattattttaattggcatctttggtctttgacctctgagcttcta

SEQ ID NO: 2246 - DNA, 122 bp, Homo sapiens
  misc_feature (61)..(62): /note="This region represents a CpG dinucleotide"
  misc_feature (61)..(61): /note="Nucleotide may be methylated to form 5-methylcytosine"
tgggcgacagagccagactccatctcagaaaaaaaaaaaaaaaaaaaaaggagaaagcagcgaaaccacaaggactttctggatcttggcagtgggaaaagccagggtgttaaaggatgtgg

SEQ ID NO: 2247 - DNA, 122 bp, Homo sapiens
  misc_feature (61)..(62): /note="This region represents a CpG dinucleotide"
  misc_feature (61)..(61): /note="Nucleotide may be methylated to form 5-methylcytosine"
ataaccccattcaaagctattgtttttaagtgctagagtgattgacttgaaagtaacttgcgtaaatcagtggtgttgattactaaacacaatggtaattactagggaggataatgaaaaca

SEQ ID NO: 2248 - DNA, 122 bp, Homo sapiens
  misc_feature (61)..(62): /note="This region represents a CpG dinucleotide"
  misc_feature (61)..(61): /note="Nucleotide may be methylated to form 5-methylcytosine"
aggaatgaggaagagctgcccagcactggggctctggagacagcctctccttggggtgagcgtggccactccaggtaacgcccactgtcatccagggactgcttaatggcagagctggggct

SEQ ID NO: 2249 - DNA, 122 bp, Homo sapiens
  misc_feature (61)..(62): /note="This region represents a CpG dinucleotide"
  misc_feature (61)..(61): /note="Nucleotide may be methylated to form 5-methylcytosine"
ccatcagactcacacccctgagctaacctgcacccaggccttcctggcagtacagactcacgctcaggacagtgtttcatgcctgtctttctaaggagtttctgtaggatttcaacatgtga

SEQ ID NO: 2250 - DNA, 122 bp, Homo sapiens
  misc_feature (61)..(62): /note="This region represents a CpG dinucleotide"
  misc_feature (61)..(61): /note="Nucleotide may be methylated to form 5-methylcytosine"
tagaacaagacacggccttgttggtcaaagtgccagcaccaaggctggctggggcaatggcgccaccatctagtttcgctttgtcgacatggccttgggaagatatcagcacctaggggtct

SEQ ID NO: 2251 - DNA, 122 bp, Homo sapiens
  misc_feature (61)..(62): /note="This region represents a CpG dinucleotide"
  misc_feature (61)..(61): /note="Nucleotide may be methylated to form 5-methylcytosine"
gtatctacatgtattaacacagttaatcctcaaaacagccctcttgtaaggaggactttacgaatgaggaaaccggtttttgaaaggttaaataacttgtccaaaatcacacagccagtagg

SEQ ID NO: 2252 - DNA, 122 bp, Homo sapiens
  misc_feature (61)..(62): /note="This region represents a CpG dinucleotide"
  misc_feature (61)..(61): /note="Nucleotide may be methylated to form 5-methylcytosine"
acgggacccaggaaggcagcagaagccagcaccaacagagtcagcatcctggcactgcagcgcagatctcagctcctcccaagagccccagggtgtggcgagagaaaaggtcatgagcaaac

SEQ ID NO: 2253 - DNA, 122 bp, Homo sapiens
  misc_feature (61)..(62): /note="This region represents a CpG dinucleotide"
  misc_feature (61)..(61): /note="Nucleotide may be methylated to form 5-methylcytosine"
agtccaaagtctgtcctggacagcctctgtgataggtctgggcagaccttgggtgtgtgacgaggcagcaccctgccctgccagtcacaccactggcaggaacgatttggggccaccagtgg

SEQ ID NO: 2254 - DNA, 122 bp, Homo sapiens
  misc_feature (61)..(62): /note="This region represents a CpG dinucleotide"
  misc_feature (61)..(61): /note="Nucleotide may be methylated to form 5-methylcytosine"
tgagcggcgagaaagtgcgagccgggccggcagaatctgcctggcgggcgctggagcctgcgttactcgcggcccgcagccgtccggctactttgcgtttggcccggccagcgcccgggcgc

SEQ ID NO: 2255 - DNA, 122 bp, Homo sapiens
  misc_feature (61)..(62): /note="This region represents a CpG dinucleotide"
  misc_feature (61)..(61): /note="Nucleotide may be methylated to form 5-methylcytosine"
gaagatgctgatggtggaactgtaactgtaccaaagatgatcaaatattttcagctataccgtttgggatttggagacagagtcctgtgttagaatcacagctttgccactaactgtgtgac

SEQ ID NO: 2256 - DNA, 122 bp, Homo sapiens
  misc_feature (61)..(62): /note="This region represents a CpG dinucleotide"
  misc_feature (61)..(61): /note="Nucleotide may be methylated to form 5-methylcytosine"
tgagatttgggtggggacagagagccaaaacaaatcaggaaggaaataagcaaactgttacggaaggctctgtctgagaagatagctgaactgagagcactaatcataagagaaggagaatc

SEQ ID NO: 2257 - DNA, 122 bp, Homo sapiens
  misc_feature (61)..(62): /note="This region represents a CpG dinucleotide"
  misc_feature (61)..(61): /note="Nucleotide may be methylated to form 5-methylcytosine"
agacatccgagagggtcgacggtagatgtggtgattgggagctgaaaaggatttttcttccgtattcagacataatagacatgatgcaaactaaagtacagaacaagaaaaggcaagtggct

SEQ ID NO: 2258 - DNA, 122 bp, Homo sapiens
  misc_feature (61)..(62): /note="This region represents a CpG dinucleotide"
  misc_feature (61)..(61): /note="Nucleotide may be methylated to form 5-methylcytosine"
gtagccacatgcacagagaaagccagtcctgcaggaagagatggaggaagcagaagggcacggaggaaacagccctccacagaaagagacagatttgctgctttgtagttcctggttgggga

SEQ ID NO: 2259 - DNA, 122 bp, Homo sapiens
  misc_feature (61)..(62): /note="This region represents a CpG dinucleotide"
  misc_feature (61)..(61): /note="Nucleotide may be methylated to form 5-methylcytosine"
aatgtggaagcagaaagaccacatgactgacagtttaaagtatagtcatgtgtcacttaacggtgaggatatgttccgagaaatgcctccttaggcaattctgttgtgtgcacatcacagag

SEQ ID NO: 2260 - DNA, 122 bp, Homo sapiens
  misc_feature (61)..(62): /note="This region represents a CpG dinucleotide"
  misc_feature (61)..(61): /note="Nucleotide may be methylated to form 5-methylcytosine"
cctcaatagtttatgccttaaggcttcttgcactctttgcttttcctatcaatcttaaaccgctgtatcagatcagagtccaaccctaatcaagccatcttcctccaacaccctcctaccct

SEQ ID NO: 2261 - DNA, 122 bp, Homo sapiens
  misc_feature (61)..(62): /note="This region represents a CpG dinucleotide"
  misc_feature (61)..(61): /note="Nucleotide may be methylated to form 5-methylcytosine"
caggaccccacaaaaccagaaaactaacaggaccccttgtagaccagtctctttgtgcaacgtagggagaaagggcgggggggactaaagaacctcccaaaaggtattaaaaatagcaacat

SEQ ID NO: 2262 - DNA, 122 bp, Homo sapiens
  misc_feature (61)..(62): /note="This region represents a CpG dinucleotide"
  misc_feature (61)..(61): /note="Nucleotide may be methylated to form 5-methylcytosine"
cacggggactcccagcccctacccggcaagagaggcatcactgaggctgcatctgccatgcgctcctggtgtgactgcaccctgtcaggccagacccggcttgagccaacttagccaagcca

SEQ ID NO: 2263 - DNA, 122 bp, Homo sapiens
  misc_feature (61)..(62): /note="This region represents a CpG dinucleotide"
  misc_feature (61)..(61): /note="Nucleotide may be methylated to form 5-methylcytosine"
agatcactccattgcattccagcctgagtgacagagcaagactctgtttaaaaaagacaacgaaaaccgaaaaacaaagaacaggtggagtctactgacttgcatgagtcaggtaattcatt

SEQ ID NO: 2264 - DNA, 122 bp, Homo sapiens
  misc_feature (61)..(62): /note="This region represents a CpG dinucleotide"
  misc_feature (61)..(61): /note="Nucleotide may be methylated to form 5-methylcytosine"
ctggcagacaataagctgaagctttcattagcagcttaagctgaggactatctatgcaaccgatactccctgtgtgctccccgggactgcttaatgtgagcccttgtggagcgattggcacc

SEQ ID NO: 2265 - DNA, 122 bp, Homo sapiens
  misc_feature (61)..(62): /note="This region represents a CpG dinucleotide"
  misc_feature (61)..(61): /note="Nucleotide may be methylated to form 5-methylcytosine"
tgcttgaggcagaaaaggaagtctctaaaacaacccaaatggttccccagggagctttcccgtgagtgtacactttaaaggtcaggcacataaagttaaatgagcaatagataactaaaaat

SEQ ID NO: 2266 - DNA, 122 bp, Homo sapiens
  misc_feature (61)..(62): /note="This region represents a CpG dinucleotide"
  misc_feature (61)..(61): /note="Nucleotide may be methylated to form 5-methylcytosine"
agctcacagatctctagtctggtacttggcacagcgatgaagtctgagagtcatgcccatcgctgattataacattcactttggccaaaggggttataaagcaacaaaatataacatgcaaa

SEQ ID NO: 2267 - DNA, 122 bp, Homo sapiens
  misc_feature (61)..(62): /note="This region represents a CpG dinucleotide"
  misc_feature (61)..(61): /note="Nucleotide may be methylated to form 5-methylcytosine"
cactggaggaagaaagaggaggggggcccctattaaccctgggcctcctggcttctctgtcgccaccgcagagggagtgtggtgattgagaaacaagacagcttcaacaagaccggcagtgg

SEQ ID NO: 2268 - DNA, 122 bp, Homo sapiens
  misc_feature (61)..(62): /note="This region represents a CpG dinucleotide"
  misc_feature (61)..(61): /note="Nucleotide may be methylated to form 5-methylcytosine"
gaacgaatgagtccagttcctctttgaaaacacttctacagaagttcctgtgtagatgagcgttaaaataagtgactcagggcctccagtagtttatgagctaagaggatcacaggatagga

SEQ ID NO: 2269 - DNA, 122 bp, Homo sapiens
  misc_feature (61)..(62): /note="This region represents a CpG dinucleotide"
  misc_feature (61)..(61): /note="Nucleotide may be methylated to form 5-methylcytosine"
tgttgagtaataggaaaccattgaaggttttagagaatgaagggaaggttaatggatagccggagtaggcagagatagtgaattaggaagctattttagtcagcagaggaagagatgatagg

SEQ ID NO: 2270 - DNA, 122 bp, Homo sapiens
  misc_feature (61)..(62): /note="This region represents a CpG dinucleotide"
  misc_feature (61)..(61): /note="Nucleotide may be methylated to form 5-methylcytosine"
acagcaagagctaaactcaaggctcaggtgtggaaacaaatttggcttagttttccccttcgcttcttttatgggagtatttctctagtgtcattcttagaacagctgcatcagaatcttgg

SEQ ID NO: 2271 - DNA, 122 bp, Homo sapiens
  misc_feature (61)..(62): /note="This region represents a CpG dinucleotide"
  misc_feature (61)..(61): /note="Nucleotide may be methylated to form 5-methylcytosine"
ggggttgggaggagggagaaaatctatagctgttacagtttcccagcaatgatccagttccgcagcaatgacccagttctccagcaatgatccagttcttcaggttggaaacagcacacaca

SEQ ID NO: 2272 - DNA, 122 bp, Homo sapiens
  misc_feature (61)..(62): /note="This region represents a CpG dinucleotide"
  misc_feature (61)..(61): /note="Nucleotide may be methylated to form 5-methylcytosine"
agttagcaatgggttaaccaaatttgcagaccactcattttaacttattgtataactgtgcgatctagaaggtggaaagacacagtgtaatggcttatagaggagattataagaattagctc

SEQ ID NO: 2273 - DNA, 122 bp, Homo sapiens
  misc_feature (61)..(62): /note="This region represents a CpG dinucleotide"
  misc_feature (61)..(61): /note="Nucleotide may be methylated to form 5-methylcytosine"
gtgagactgtctctacaaaaaatacaaattaaccgggctcgtgcctgtaatcccagtttacgtaatcccagattacaggctcgtgcctgtaatcccagctagggtaggccgaggtgggagga

SEQ ID NO: 2274 - DNA, 122 bp, Homo sapiens
  misc_feature (61)..(62): /note="This region represents a CpG dinucleotide"
  misc_feature (61)..(61): /note="Nucleotide may be methylated to form 5-methylcytosine"
cctggggctgaaggaagtgagtgcagccacaggccaacacttccttggctgaccagacgacggaaaatgtgtctggctgcgttcaggtgtttttccaagtttgaaaccctggaaagtttttc

SEQ ID NO: 2275 - DNA, 122 bp, Homo sapiens
  misc_feature (61)..(62): /note="This region represents a CpG dinucleotide"
  misc_feature (61)..(61): /note="Nucleotide may be methylated to form 5-methylcytosine"
tatcaccctcatccccgttttactgtgatgagaacaatgaggctcagccaggcaggcctccgacaaggagaaggtgcctcatttgctgggatcatgggcggttctgggtgtaggtgagacct

SEQ ID NO: 2276 - DNA, 122 bp, Homo sapiens
  misc_feature (61)..(62): /note="This region represents a CpG dinucleotide"
  misc_feature (61)..(61): /note="Nucleotide may be methylated to form 5-methylcytosine"
tagctgctgtggttgatggagttgttgtcctcatagttgaactccacctaaagcccttcccgccatggttggctactttcacatggcccaaaccccaaccctctgatttaatgggtttcctc

SEQ ID NO: 2277 - DNA, 122 bp, Homo sapiens
  misc_feature (61)..(62): /note="This region represents a CpG dinucleotide"
  misc_feature (61)..(61): /note="Nucleotide may be methylated to form 5-methylcytosine"
attctcattttacagaagagaaaaacagaagttcagagaaataatgtgtcccaggaagtacgaagagggatttaagcctagattcagctgactctgaagcctatttttgcaccaccttctgg

SEQ ID NO: 2278 - DNA, 122 bp, Homo sapiens
  misc_feature (61)..(62): /note="This region represents a CpG dinucleotide"
  misc_feature (61)..(61): /note="Nucleotide may be methylated to form 5-methylcytosine"
tcttcattattttccattactcttggaatgaaagtcaaactttttacccagggccagagccggtcccacctaccttggtaaccacacctcccgtgctctctgcctccctcactaagctccag

SEQ ID NO: 2279 - DNA, 122 bp, Homo sapiens
  misc_feature (61)..(62): /note="This region represents a CpG dinucleotide"
  misc_feature (61)..(61): /note="Nucleotide may be methylated to form 5-methylcytosine"
tttggctcaaatccccgcagtggctcctggtcttcctcagactaaagaccaaagtccttacgatggccttcaaggtcctacatgattcctttccaagaacagcaagtgtgttcttcaaacac

SEQ ID NO: 2280 - DNA, 122 bp, Homo sapiens
  misc_feature (61)..(62): /note="This region represents a CpG dinucleotide"
  misc_feature (61)..(61): /note="Nucleotide may be methylated to form 5-methylcytosine"
ggtctgcagggggtggggaggggcagtgcagggggctccagccctcagctgcaggccaggcggacagggcaggacacagctgcctgattccagcccagcatcaaagcacccacatagcccag

SEQ ID NO: 2281 - DNA, 122 bp, Homo sapiens
  misc_feature (61)..(62): /note="This region represents a CpG dinucleotide"
  misc_feature (61)..(61): /note="Nucleotide may be methylated to form 5-methylcytosine"
aaaatatatgcagcttggcataaaaatatttctgaaatgaatgctatcttccctctcctccgttaaaagagtatacaatgtaatttgccttttatgaatgattcagtatccttatgatgcct

SEQ ID NO: 2282 - DNA, 122 bp, Homo sapiens
  misc_feature (61)..(62): /note="This region represents a CpG dinucleotide"
  misc_feature (61)..(61): /note="Nucleotide may be methylated to form 5-methylcytosine"
gcagagcatgcttatcaaagtttctcctagagcctcagggtgattcatcctgcagaggaccgctcttgtgtcctcaagggttccttttggaaaagggcaggatctcgtgtcccctttgagcc

SEQ ID NO: 2283 - DNA, 122 bp, Homo sapiens
  misc_feature (61)..(62): /note="This region represents a CpG dinucleotide"
  misc_feature (61)..(61): /note="Nucleotide may be methylated to form 5-methylcytosine"
aaatgtagcttcatcccctgcccttcattgaatgactgaattacagtcagcaccacataacgatgtttcggtcaactatggactccatatgtgatgagacagtgatcccatagattatagtg

SEQ ID NO: 2284 - DNA, 122 bp, Homo sapiens
  misc_feature (61)..(62): /note="This region represents a CpG dinucleotide"
  misc_feature (61)..(61): /note="Nucleotide may be methylated to form 5-methylcytosine"
gtgaggttaatactgggattaaatgaattaataggtgtaaacactgagagacaagtctgacgtatgtcaagaaatgttagtgtttgaaggagattggttccaagaccccctgcagataccaa

SEQ ID NO: 2285 - DNA, 122 bp, Homo sapiens
  misc_feature (61)..(62): /note="This region represents a CpG dinucleotide"
  misc_feature (61)..(61): /note="Nucleotide may be methylated to form 5-methylcytosine"
agtagcgcgcctgagcctcagggcttagcagcaggttgtacagggcgatccacacttgcccgtccaacttgctcagcttttgctgctctgagggggccacagtatgccaacggctgccctcg

SEQ ID NO: 2286 - DNA, 122 bp, Homo sapiens
  misc_feature (61)..(62): /note="This region represents a CpG dinucleotide"
  misc_feature (61)..(61): /note="Nucleotide may be methylated to form 5-methylcytosine"
gttgaaatgtttgtcaaataaataaataagaaggcctccttatgttggaaccaggacatacgtggttgttctcagctacagagcccacacagagcaggtggtcatattctgcttttctcctt

SEQ ID NO: 2287 - DNA, 122 bp, Homo sapiens
  misc_feature (61)..(62): /note="This region represents a CpG dinucleotide"
  misc_feature (61)..(61): /note="Nucleotide may be methylated to form 5-methylcytosine"
cccgaggagcggccgcaagggagtcacatccacgaagcggccacaccccgggcaacagagcggccttctgattgtcaccagcaggaactgccccagggatcactggcagatccctttgagga

SEQ ID NO: 2288 - DNA, 122 bp, Homo sapiens
  misc_feature (61)..(62): /note="This region represents a CpG dinucleotide"
  misc_feature (61)..(61): /note="Nucleotide may be methylated to form 5-methylcytosine"
tgcattgtaggttattgagcagtcattatccctagtcctcaccagcagatgtcagtagcacgtcccctgacttgtgacaaccaaatatgtctccagtaaatgtctggagaaggcaaaatcag

SEQ ID NO: 2289 - DNA, 122 bp, Homo sapiens
  misc_feature (61)..(62): /note="This region represents a CpG dinucleotide"
  misc_feature (61)..(61): /note="Nucleotide may be methylated to form 5-methylcytosine"
ccaggtgtagcccattccacagctacatgtgggtcagaggtttgctgagggagggagagacgggacaggatcctaaataccatggagaagattcacccaactaacagtcaccctccccacgt

SEQ ID NO: 2290 - DNA, 122 bp, Homo sapiens
  misc_feature (61)..(62): /note="This region represents a CpG dinucleotide"
  misc_feature (61)..(61): /note="Nucleotide may be methylated to form 5-methylcytosine"
cctatacagccatatgtagcgatgtcataagttgtttttcaagctggcctttgctccctacgaagacaggaacgttttgcaatcagtgtcctttagagaatgttggctcaccaaagactagt

SEQ ID NO: 2291 - DNA, 122 bp, Homo sapiens
  misc_feature (61)..(62): /note="This region represents a CpG dinucleotide"
  misc_feature (61)..(61): /note="Nucleotide may be methylated to form 5-methylcytosine"
ctctgtgatgttcacacaatgatgaaattgcctaatgatgcactgctcaggatgtatccccgtcattaagcaacgatgactgtatttcccattatccttgtcagtgcttggtaataccataa

SEQ ID NO: 2292 - DNA, 122 bp, Homo sapiens
  misc_feature (61)..(62): /note="This region represents a CpG dinucleotide"
  misc_feature (61)..(61): /note="Nucleotide may be methylated to form 5-methylcytosine"
cttcctcccgtccccgttggcggctggcaggctgtggtggtttcgggcagggaagggccccgcagtgtccctcctgtggccacacacactcctttattgctccagcgcccacctgctgcttg

SEQ ID NO: 2293 - DNA, 122 bp, Homo sapiens
  misc_feature (61)..(62): /note="This region represents a CpG dinucleotide"
  misc_feature (61)..(61): /note="Nucleotide may be methylated to form 5-methylcytosine"
cattattgacactttttgcatcagctaacatttttccaaaacatataatgtcaacatccacgtatgctagaatgtttcgcaagctactccttttttttttttttttttttttttaaaaacga

SEQ ID NO: 2294 - DNA, 122 bp, Homo sapiens
  misc_feature (61)..(62): /note="This region represents a CpG dinucleotide"
  misc_feature (61)..(61): /note="Nucleotide may be methylated to form 5-methylcytosine"
tggcaggtggactgggaacgcccattttgggcctcctccctcaggcttacatgtacccatcgtcttcctccctctgacatccctttcttcctgtcaactcccagaatcttggcacccctggt

SEQ ID NO: 2295 - DNA, 122 bp, Homo sapiens
  misc_feature (61)..(62): /note="This region represents a CpG dinucleotide"
  misc_feature (61)..(61): /note="Nucleotide may be methylated to form 5-methylcytosine"
cggccgcttatcattcacaacctttcccctgcattatttcatttaatcctgagccaacatcgccaggcaggcaccgtgcttattcccatcccacaggtgagaaaacaggctcagagaagcca

SEQ ID NO: 2296 - DNA, 122 bp, Homo sapiens
  misc_feature (61)..(62): /note="This region represents a CpG dinucleotide"
  misc_feature (61)..(61): /note="Nucleotide may be methylated to form 5-methylcytosine"
aagctccaagcacagagcctggcacatagtaggtgctccatggcccttattcatgaaggacgcttgttttcttcaagcagagggactgctaagcttgagccaggaggaagggtgtggggaag

SEQ ID NO: 2297 - DNA, 122 bp, Homo sapiens
  misc_feature (61)..(62): /note="This region represents a CpG dinucleotide"
  misc_feature (61)..(61): /note="Nucleotide may be methylated to form 5-methylcytosine"
tggcaagctgaagtgtgacaaaagaataatgaatcacagatatatctaaaataagctctacgccatcacagtagttttgaattagcagccaatggtagtggtggtaatctcctcccccttca

SEQ ID NO: 2298 - DNA, 122 bp, Homo sapiens
  misc_feature (61)..(62): /note="This region represents a CpG dinucleotide"
  misc_feature (61)..(61): /note="Nucleotide may be methylated to form 5-methylcytosine"
aaataggaggaggagctgaggcgcgaacaactactggatccaacactcaaggatgggcggcgactcagggaagatgtgcagattccagggtaaagatggaaaacaagaaagtagagctgagt

SEQ ID NO: 2299 - DNA, 122 bp, Homo sapiens
  misc_feature (61)..(62): /note="This region represents a CpG dinucleotide"
  misc_feature (61)..(61): /note="Nucleotide may be methylated to form 5-methylcytosine"
aatgcaacataagctggattcacacaggcaatgcacaggtgagtcactattaattaacaccgttttaaaattaccaaccaatgctatataagtaaaaacaataaaggtaaaaatatatatga

SEQ ID NO: 2300 - DNA, 122 bp, Homo sapiens
  misc_feature (61)..(62): /note="This region represents a CpG dinucleotide"
  misc_feature (61)..(61): /note="Nucleotide may be methylated to form 5-methylcytosine"
tagtgctatatgctttaacccaaaaaaggagggtggggcacacagatgacacaatcttgacggagcatgttcttacagtctgttgtatgtgacagttgtgaaagctgcttccttagacccca

SEQ ID NO: 2301 - DNA, 122 bp, Homo sapiens
  misc_feature (61)..(62): /note="This region represents a CpG dinucleotide"
  misc_feature (61)..(61): /note="Nucleotide may be methylated to form 5-methylcytosine"
agccaggagtggacagttgcagactgtgtggacatggatcatcaagtgcatactgtttgtcgtatgatatctgattgaaacctaggttctgacctagctcctggatcttgtctaatggcaga

SEQ ID NO: 2302 - DNA, 122 bp, Homo sapiens
  misc_feature (61)..(62): /note="This region represents a CpG dinucleotide"
  misc_feature (61)..(61): /note="Nucleotide may be methylated to form 5-methylcytosine"
aatagaatgcagattgcagttgctagaatataaacaggaaataagaagataaagacaactcgtggaataccttttcatagagcttaggtaaactgtaggaattattctccttgtactctaat

SEQ ID NO: 2303 - DNA, 122 bp, Homo sapiens
  misc_feature (61)..(62): /note="This region represents a CpG dinucleotide"
  misc_feature (61)..(61): /note="Nucleotide may be methylated to form 5-methylcytosine"
gtgccagtttgagcaaatgttgatttattacctcaggttgtaggcatttacaagacaaaacggagacatccagtgtgattccaagcaggctcatggactagtgcttaccataacccaggtgc

SEQ ID NO: 2304 - DNA, 122 bp, Homo sapiens
  misc_feature (61)..(62): /note="This region represents a CpG dinucleotide"
  misc_feature (61)..(61): /note="Nucleotide may be methylated to form 5-methylcytosine"
aagaaaactccacgaagaggaaaaactgaaaagggaggagagtgtcaaaaagaaggatggcgaggaaaaaggcaaacaggaagcacaagacaagctgggtcggcttttccatcaacaccaag

SEQ ID NO: 2305 - DNA, 122 bp, Homo sapiens
  misc_feature (61)..(62): /note="This region represents a CpG dinucleotide"
  misc_feature (61)..(61): /note="Nucleotide may be methylated to form 5-methylcytosine"
cacctatctggatcttagtttcttcttttataaagttaggcacttgagccccatggtcttcgaggtccctgtcagacccaagtttgatttttctccatcccttgggaacagggcagtccacc

SEQ ID NO: 2306 - DNA, 122 bp, Homo sapiens
  misc_feature (61)..(62): /note="This region represents a CpG dinucleotide"
  misc_feature (61)..(61): /note="Nucleotide may be methylated to form 5-methylcytosine"
gacagtgtgaccttaaaaactggaaccaagcctattctcacccattcagcagtgaccaagcgagattttaaaggtcactgtaatttatggcacatgctagagctggcagaactctattaaaa

SEQ ID NO: 2307 - DNA, 122 bp, Homo sapiens
  misc_feature (61)..(62): /note="This region represents a CpG dinucleotide"
  misc_feature (61)..(61): /note="Nucleotide may be methylated to form 5-methylcytosine"
gggtgaagggatttggagactcaggtcatgcatgaccttgccccacctgtggcttcaatgcgatgtggctttgagtacaaagtgaaaaggctgacctgaaccaccggttcccaaagcgggtt

SEQ ID NO: 2308 - DNA, 122 bp, Homo sapiens
  misc_feature (61)..(62): /note="This region represents a CpG dinucleotide"
  misc_feature (61)..(61): /note="Nucleotide may be methylated to form 5-methylcytosine"
tagcataggaggaatgtgattgtcatgtgggaggttgctcagtactgcaatgtgaaaactcgacagtctaaaggctttgggtatattccctagtcatcagatgttatattcgagtgattttc

SEQ ID NO: 2309 - DNA, 122 bp, Homo sapiens
  misc_feature (61)..(62): /note="This region represents a CpG dinucleotide"
  misc_feature (61)..(61): /note="Nucleotide may be methylated to form 5-methylcytosine"
gactgtggcttagtgtggctcatgaggggatgcacagagcattatcagtatggagacacacgcttccagctcatgatgagctgagtgcagagcaggagcagtgacaatggtaaggccttgaa

SEQ ID NO: 2310 - DNA, 122 bp, Homo sapiens
  misc_feature (61)..(62): /note="This region represents a CpG dinucleotide"
  misc_feature (61)..(61): /note="Nucleotide may be methylated to form 5-methylcytosine"
gctgaaatgcatgtcagggtcaaggacaagttctgggaagctgggcgggccggcaggaagcgcagatacagtccctagggaggcagaggcggcaacagggagattcccgggactggcccatc

SEQ ID NO: 2311 - DNA, 122 bp, Homo sapiens
  misc_feature (61)..(62): /note="This region represents a CpG dinucleotide"
  misc_feature (61)..(61): /note="Nucleotide may be methylated to form 5-methylcytosine"
cgcatctgtctggagtggtgagtacctggaccctcccatccctgcaggctgctggtggaccggttctcaggccggttctgggcctggctggaacgggaggagttcctggtccccaagaatgt

SEQ ID NO: 2312 - DNA, 122 bp, Homo sapiens
  misc_feature (61)..(62): /note="This region represents a CpG dinucleotide"
  misc_feature (61)..(61): /note="Nucleotide may be methylated to form 5-methylcytosine"
agaggagtgggggagggttaagaggttgcctccaacactgagtagcttctcaccaggaaacgcctgaaagtttgacagaaacaaaagaccagggaccagcagaactcttacccaggtagatt

SEQ ID NO: 2313 - DNA, 122 bp, Homo sapiens
  misc_feature (61)..(62): /note="This region represents a CpG dinucleotide"
  misc_feature (61)..(61): /note="Nucleotide may be methylated to form 5-methylcytosine"
tctggcctggaccataaaaaccttcaatgtgtaatcctccaaattcttccctcatccagacgaaagcagatgattctgagttctaggaaaaggtgtcaccacaataaggagggaggctgggt

SEQ ID NO: 2314 - DNA, 122 bp, Homo sapiens
  misc_feature (61)..(62): /note="This region represents a CpG dinucleotide"
  misc_feature (61)..(61): /note="Nucleotide may be methylated to form 5-methylcytosine"
aactgaaaatggaactcaaatcacaccctaaatccatccatttgttcatctaagtgcatacgcatttcaccataaagactcaaatccactggggaagaacaaacagtaatagtttacattta

SEQ ID NO: 2315 - DNA, 122 bp, Homo sapiens
  misc_feature (61)..(62): /note="This region represents a CpG dinucleotide"
  misc_feature (61)..(61): /note="Nucleotide may be methylated to form 5-methylcytosine"
caaccttgcaaacaagtgcacaaaagtaaatcttaatttcctaaccattttactcttcctcgtagtgacagcttgggagttaaagtaatgaaataaccctatccttctcaactggcaaattt

SEQ ID NO: 2316 - DNA, 122 bp, Homo sapiens
  misc_feature (61)..(62): /note="This region represents a CpG dinucleotide"
  misc_feature (61)..(61): /note="Nucleotide may be methylated to form 5-methylcytosine"
cttgaccaagtttggctctgggtatgatttatctgtggctgatgtggtattccccatagacggcaacaatgattgagaatctggttttgtcatctgtccatttggtgatctcttggataaca

SEQ ID NO: 2317 - DNA, 122 bp, Homo sapiens
  misc_feature (61)..(62): /note="This region represents a CpG dinucleotide"
  misc_feature (61)..(61): /note="Nucleotide may be methylated to form 5-methylcytosine"
actgtggctgactcaatactgccacagcaaccagacttgcccaaggttccaaatgtcaagcgctacttaaaaatacccagcactcatcacttctggctgcactgatctacccaaaatgacca

SEQ ID NO: 2318 - DNA, 122 bp, Homo sapiens
  misc_feature (61)..(62): /note="This region represents a CpG dinucleotide"
  misc_feature (61)..(61): /note="Nucleotide may be methylated to form 5-methylcytosine"
tcccacaccccagccctcatctctgttggctgttcccagcttgggcaataggcaggcttgcgtaacccaggccagggttgggcctccatatcagcaggctccacatctgcagattcaaccaa

SEQ ID NO: 2319 - DNA, 122 bp, Homo sapiens
  misc_feature (61)..(62): /note="This region represents a CpG dinucleotide"
  misc_feature (61)..(61): /note="Nucleotide may be methylated to form 5-methylcytosine"
ttaggatcataaatgtgccactcataagttgactaactctaggcaagttacttatcttctcgcagtttacttcctcatagaaaattagctaatatctttttcctctagcaaaaagaaaacaa

SEQ ID NO: 2320 - DNA, 122 bp, Homo sapiens
  misc_feature (61)..(62): /note="This region represents a CpG dinucleotide"
  misc_feature (61)..(61): /note="Nucleotide may be methylated to form 5-methylcytosine"
cgggtcgtcccacatggggctgtgctgcacctggaagcccggggtggtgggcgtcgggggcgaggagggcttgtagtaaaccgacccggagtgcggcatcatctcctcagactgggggggca

SEQ ID NO: 2321 - DNA, 122 bp, Homo sapiens
  misc_feature (61)..(62): /note="This region represents a CpG dinucleotide"
  misc_feature (61)..(61): /note="Nucleotide may be methylated to form 5-methylcytosine"
tttacacttgctgttcccttggcttgaaatgttcctctcagacattggctccttcctccccgtcaagtccttcaggtcttggctccaatgtcaccttttcagcaatgccatcctaaccaaac

SEQ ID NO: 2322 - DNA, 122 bp, Homo sapiens
  misc_feature (61)..(62): /note="This region represents a CpG dinucleotide"
  misc_feature (61)..(61): /note="Nucleotide may be methylated to form 5-methylcytosine"
aaaccaccaggaagaataactgctcttcatgtcagaagagggagagagagcacttctcagcgggtggtcaaggtaggattcctggaagaaggccggttctgaaaactgagagagctgtttat

SEQ ID NO: 2323 - DNA, 122 bp, Homo sapiens
  misc_feature (61)..(62): /note="This region represents a CpG dinucleotide"
  misc_feature (61)..(61): /note="Nucleotide may be methylated to form 5-methylcytosine"
tgtgtgttgtaagctcttcccgagactgatctctggtctggtcagctgttgccaggacagcggaactggcttctcctgtaaagcttgtgcataccagcctggcagataccacaggcatgggt

SEQ ID NO: 2324 - DNA, 122 bp, Homo sapiens
  misc_feature (61)..(62): /note="This region represents a CpG dinucleotide"
  misc_feature (61)..(61): /note="Nucleotide may be methylated to form 5-methylcytosine"
agaacacaatcacatagcaacctgttctatcagcagttgctctgtagggtaaatcccagacgtatcaactgaaagccatctccacagtgagtctattaggactgctgggaagctgaattagc

SEQ ID NO: 2325 - DNA, 122 bp, Homo sapiens
  misc_feature (61)..(62): /note="This region represents a CpG dinucleotide"
  misc_feature (61)..(61): /note="Nucleotide may be methylated to form 5-methylcytosine"
ctgggtgccaccaaccagcctagcaggtgattgcagagcccccagtggtcaaggtggacccggccagcccaacacaccggcccaatgcaccggcccaagcgcttcctgctggactggctggg

SEQ ID NO: 2326 - DNA, 122 bp, Homo sapiens
  misc_feature (61)..(62): /note="This region represents a CpG dinucleotide"
  misc_feature (61)..(61): /note="Nucleotide may be methylated to form 5-methylcytosine"
tcaaaaatcagttgccccaaataatgtctcaggtatgtattttcaaaggatatctggaaacgctatgtaaagattagaaacagtctgtgtgtagtccatagactggatattatgtaacattt

SEQ ID NO: 2327 - DNA, 122 bp, Homo sapiens
  misc_feature (61)..(62): /note="This region represents a CpG dinucleotide"
  misc_feature (61)..(61): /note="Nucleotide may be methylated to form 5-methylcytosine"
gttagaacacttctaatctttgttagaacacttactttgttagaacacttacctcagcctcgttacttagtctctctgatgctcagttttcttaatagtaatccaggtggaatcatgggaac

SEQ ID NO: 2328 - DNA, 122 bp, Homo sapiens
  misc_feature (61)..(62): /note="This region represents a CpG dinucleotide"
  misc_feature (61)..(61): /note="Nucleotide may be methylated to form 5-methylcytosine"
ggcagctgggagcagggagagggtggaggataagttgagatcagaagatgaagcacaatacggctgtactgtattttacttaggacagttggactgtctacagctcacaggctagccccagt

SEQ ID NO: 2329 - DNA, 122 bp, Homo sapiens
  misc_feature (61)..(62): /note="This region represents a CpG dinucleotide"
  misc_feature (61)..(61): /note="Nucleotide may be methylated to form 5-methylcytosine"
tggctttgatcctcatgtttgcttttcccttggtgcaatattgctgctgcatcttgactgcgttccagtcaggaggaagaaatgcagaacaccaaaactttcatttatatctcactggccaa

SEQ ID NO: 2330 - DNA, 122 bp, Homo sapiens
  misc_feature (61)..(62): /note="This region represents a CpG dinucleotide"
  misc_feature (61)..(61): /note="Nucleotide may be methylated to form 5-methylcytosine"
gtgtctgaaccacatacttcctgggtgcctactgttctaagcactatgctggctgctgggcgaataaaagctggtaaacaagagaggcatgatcattggttttacagatttttcatctagag

SEQ ID NO: 2331 - DNA, 122 bp, Homo sapiens
  misc_feature (61)..(62): /note="This region represents a CpG dinucleotide"
  misc_feature (61)..(61): /note="Nucleotide may be methylated to form 5-methylcytosine"
cgcctaccggatccgaggtgcgtggcggggcgggtgggcacgcgggagcgggggtggcagcgggcaggtgggcacccccgccgacgccgtcccgtcccccaggccgcgacggagggttctgg

SEQ ID NO: 2332 - DNA, 122 bp, Homo sapiens
  misc_feature (61)..(62): /note="This region represents a CpG dinucleotide"
  misc_feature (61)..(61): /note="Nucleotide may be methylated to form 5-methylcytosine"
ttatcaaactttctggtagttaacactctgatgcattaaaagtggcatggcatatctggtcgggcgtggtggcttacacctataatcccagcactttgggaggctgaggtgggcagatcacc

SEQ ID NO: 2333 - DNA, 122 bp, Homo sapiens
  misc_feature (61)..(62): /note="This region represents a CpG dinucleotide"
  misc_feature (61)..(61): /note="Nucleotide may be methylated to form 5-methylcytosine"
tccgctcagcagcaccgagagcagctcctactggaggagctggtgtcgctggtgaaccagcgcgatgagctagtccgggacctggaccacaaggagcggatgtgagtggcgctgggcggcgc

SEQ ID NO: 2334 - DNA, 122 bp, Homo sapiens
  misc_feature (61)..(62): /note="This region represents a CpG dinucleotide"
  misc_feature (61)..(61): /note="Nucleotide may be methylated to form 5-methylcytosine"
agaagggtttacttcgcttgtttcatccttgcttctaatttcttcttgacttcagttcatcgtacagacagccactgagttaactcttctccaagcagtagttggcttctgggatgatgctg

SEQ ID NO: 2335 - DNA, 122 bp, Homo sapiens
  misc_feature (61)..(62): /note="This region represents a CpG dinucleotide"
  misc_feature (61)..(61): /note="Nucleotide may be methylated to form 5-methylcytosine"
acattttttcccaatgaagttcttcctccctctgcagcgtccccagcctccagccagcttcgctagccagggacacaattggattgcaatttctagcacttcctggagatcaggtccctgaa

SEQ ID NO: 2336 - DNA, 122 bp, Homo sapiens
  misc_feature (61)..(62): /note="This region represents a CpG dinucleotide"
  misc_feature (61)..(61): /note="Nucleotide may be methylated to form 5-methylcytosine"
gttcaactttcttttcttggcagctgatttaccagtgacctctcccaaagtgaagtgacacgtaaacaagacacaaaaagttgactcccgtttaagaaatatttcaaggctagtgatgggta

SEQ ID NO: 2337 - DNA, 122 bp, Homo sapiens
  misc_feature (61)..(62): /note="This region represents a CpG dinucleotide"
  misc_feature (61)..(61): /note="Nucleotide may be methylated to form 5-methylcytosine"
gcacatgcaaagatgttcaacatcactaatcataacttcagtgagctactacctcacaaccgttaagattgctactatcaaaacaaaattaagtgtcaaggatatggagaaactggaacttc

SEQ ID NO: 2338 - DNA, 122 bp, Homo sapiens
  misc_feature (61)..(62): /note="This region represents a CpG dinucleotide"
  misc_feature (61)..(61): /note="Nucleotide may be methylated to form 5-methylcytosine"
ggttactcaccagctcttcagaacaattgtggctgaaacgtggcagctggcagacttctacgtatatgaagttaatccatggggcataagagcacagtggtgaagagagaacattctgtagc

SEQ ID NO: 2339 - DNA, 122 bp, Homo sapiens
  misc_feature (61)..(62): /note="This region represents a CpG dinucleotide"
  misc_feature (61)..(61): /note="Nucleotide may be methylated to form 5-methylcytosine"
atcacagacattcaacctgggatgagttgtggcagcaccttacatgtgtcaccaatgtgtcgtgtgacatggctgttgccatggtgaggcaccatgttcaggaaatgtgttaagtctcatag

SEQ ID NO: 2340 - DNA, 122 bp, Homo sapiens
  misc_feature (61)..(62): /note="This region represents a CpG dinucleotide"
  misc_feature (61)..(61): /note="Nucleotide may be methylated to form 5-methylcytosine"
gcctggtaggcagtcagtgtgagctgcagtcactgtcaccaccactgtctttgtcatcatcgccatgatgagttgagaagcactgggagatactcactatgagccactgtcaagtcactgtc

SEQ ID NO: 2341 - DNA, 122 bp, Homo sapiens
  misc_feature (61)..(62): /note="This region represents a CpG dinucleotide"
  misc_feature (61)..(61): /note="Nucleotide may be methylated to form 5-methylcytosine"
ggtcccctgcgtaggtctccagaggtcactgactgcttctctgttgctgtccacagagaacgtgtccatgagaagcacttgcaaatcatgatgaggcagatgtcaagcacacaggaaatcac

SEQ ID NO: 2342 - DNA, 122 bp, Homo sapiens
  misc_feature (61)..(62): /note="This region represents a CpG dinucleotide"
  misc_feature (61)..(61): /note="Nucleotide may be methylated to form 5-methylcytosine"
attccgagggctcaggcagaagctgcaaggcttctgtgacctcacctgaaaaggctgccacgtcacttcctctgcattctgtagtttgggaattgagccataaaaccagcccaggtcaagta

SEQ ID NO: 2343 - DNA, 122 bp, Homo sapiens
  misc_feature (61)..(62): /note="This region represents a CpG dinucleotide"
  misc_feature (61)..(61): /note="Nucleotide may be methylated to form 5-methylcytosine"
accagtgttactaaatgagtcactccaatgaagaactttaactggaaatttggtgtcctacggagaggccgtagcatgcaaagatgccagctgtcctcattgatacttctacctacccttcc

SEQ ID NO: 2344 - DNA, 122 bp, Homo sapiens
  misc_feature (61)..(62): /note="This region represents a CpG dinucleotide"
  misc_feature (61)..(61): /note="Nucleotide may be methylated to form 5-methylcytosine"
acacccagccaataggtgattattttaaaactcttacaacattgcatgccactaactacccgcatctcattctctaagacagagattgggaaactatggcctgcaggcaaaatccagcctgc

SEQ ID NO: 2345 - DNA, 122 bp, Homo sapiens
  misc_feature (61)..(62): /note="This region represents a CpG dinucleotide"
  misc_feature (61)..(61): /note="Nucleotide may be methylated to form 5-methylcytosine"
catttctgtcatatcatagtcttcttttgacttttcatcctgtggttttagaattggaaacgaaaaagtggcaaactcagtttccaatgcaattaagccagtgtttacttggtaccctgtgg

SEQ ID NO: 2346 - DNA, 122 bp, Homo sapiens
  misc_feature (61)..(62): /note="This region represents a CpG dinucleotide"
  misc_feature (61)..(61): /note="Nucleotide may be methylated to form 5-methylcytosine"
agctagtcctaaaaaaccagttacccaagtatgttcaggaaatctgccttacagctgttgcgcaaattagctttgagcatttgagtagactacagtgtgaaccagcaatgagatgttataac

SEQ ID NO: 2347 - DNA, 122 bp, Homo sapiens
  misc_feature (61)..(62): /note="This region represents a CpG dinucleotide"
  misc_feature (61)..(61): /note="Nucleotide may be methylated to form 5-methylcytosine"
cggacagcatgtcctgctcagggccagacagccctctaagcatgagacatgatttattttcgtaccaactggaggtaggtgctcttgttagctgcatttcacgcaggaggaagccctggcac

SEQ ID NO: 2348 - DNA, 122 bp, Homo sapiens
  misc_feature (61)..(62): /note="This region represents a CpG dinucleotide"
  misc_feature (61)..(61): /note="Nucleotide may be methylated to form 5-methylcytosine"
tgagcttgcttttgaaagagttaagaacatggcactccaaaatatgctgctcttccatatcgactattttgaattaaaggcacttataaaacagcaagtgcaagaagatcactctgaccttc

SEQ ID NO: 2349 - DNA, 122 bp, Homo sapiens
  misc_feature (61)..(62): /note="This region represents a CpG dinucleotide"
  misc_feature (61)..(61): /note="Nucleotide may be methylated to form 5-methylcytosine"
atcttgttacctgcttgctcaatagaataggatggctcctcaaatgacaccctgagctgtcgtataaggaaatgataaaaggtgtggctttgtggtcagagagacatggatttgaatgctaa

SEQ ID NO: 2350 - DNA, 122 bp, Homo sapiens
  misc_feature (61)..(62): /note="This region represents a CpG dinucleotide"
  misc_feature (61)..(61): /note="Nucleotide may be methylated to form 5-methylcytosine"
agtgtgtaaggcctgggacatctggctttgaggcagttctttctccaggttttatttatgcgaatccactcatctggcaggaatgatttgttggtgtgaaatcaggtgttggcccagcatcc

SEQ ID NO: 2351 - DNA, 122 bp, Homo sapiens
  misc_feature (61)..(62): /note="This region represents a CpG dinucleotide"
  misc_feature (61)..(61): /note="Nucleotide may be methylated to form 5-methylcytosine"
gttgacaccaaaaacagcatcacaaatttctggctcattacccttaaagacttgtctttgcggctgtttacagaagctttagagaaggatgaggattagagaattaaaattcataaagggac

SEQ ID NO: 2352 - DNA, 122 bp, Homo sapiens
  misc_feature (61)..(62): /note="This region represents a CpG dinucleotide"
  misc_feature (61)..(61): /note="Nucleotide may be methylated to form 5-methylcytosine"
tgacaccaaagacttgagttaatgacaacgctaacctgaactgtgaattctcctgcatttcgcctgagtgtgtcatcactgtaaagtgttgcaatgtgagtctgggcaattaacgcccagag

SEQ ID NO: 2353 - DNA, 122 bp, Homo sapiens
  misc_feature (61)..(62): /note="This region represents a CpG dinucleotide"
  misc_feature (61)..(61): /note="Nucleotide may be methylated to form 5-methylcytosine"
acatactcaggtactctctccagagagcatgacaaggcagctttctaattgctgggtggccgccgagtgctgtgaccctctgagacacgtcacccagcaggttctccaagaagcaccaattg

SEQ ID NO: 2354 - DNA, 122 bp, Homo sapiens
  misc_feature (61)..(62): /note="This region represents a CpG dinucleotide"
  misc_feature (61)..(61): /note="Nucleotide may be methylated to form 5-methylcytosine"
gtaagggtcagcactgaaccagcttgtcaagatgagcactgagttaaaaatcctctctgccgcttctgtgggctcgcaagtggatctgactgtgacaggctgaagaacagcagtccctggcc

SEQ ID NO: 2355 - DNA, 122 bp, Homo sapiens
  misc_feature (61)..(62): /note="This region represents a CpG dinucleotide"
  misc_feature (61)..(61): /note="Nucleotide may be methylated to form 5-methylcytosine"
attttaacttgttcttgtttttcctgttgtgcaaggcgagctgcaacttcttcaggtggtcgctcccttatagaagatgaggatgcttcttcttgcagcaaaagtaaataagaggaaatcaa

SEQ ID NO: 2356 - DNA, 122 bp, Homo sapiens
  misc_feature (61)..(62): /note="This region represents a CpG dinucleotide"
  misc_feature (61)..(61): /note="Nucleotide may be methylated to form 5-methylcytosine"
cccccacttctggagcccagacctgatcttccccagaagggccactccaggggccagaggcgggcacgccacctagggcgccacgtttcccaagtcacatcccggcccgaccagtcagaggt

SEQ ID NO: 2357 - DNA, 122 bp, Homo sapiens
  misc_feature (61)..(62): /note="This region represents a CpG dinucleotide"
  misc_feature (61)..(61): /note="Nucleotide may be methylated to form 5-methylcytosine"
ctctctccaccctggcacccagagcaaggatgttgctcattagtgactaagtaggaccagcgtctcaggtggcaatctgggagcaagctcagcttcacaatgggggactgtgggttggttgc

SEQ ID NO: 2358 - DNA, 122 bp, Homo sapiens
  misc_feature (61)..(62): /note="This region represents a CpG dinucleotide"
  misc_feature (61)..(61): /note="Nucleotide may be methylated to form 5-methylcytosine"
tctgcattttacagatgagaagacagaggcaccaagcagtataactagcccaaggtcacacggctgatatgcaatggagccaggattagatttgggccatttgacctttactgcctggtaaa

SEQ ID NO: 2359 - DNA, 122 bp, Homo sapiens
  misc_feature (61)..(62): /note="This region represents a CpG dinucleotide"
  misc_feature (61)..(61): /note="Nucleotide may be methylated to form 5-methylcytosine"
tggaatcagcatggtgacctccctatgcctatgctgagctggtttattgagtatgagctacgcggcaggccccacaacccagctgcctcactaagagagaattaaggagctatcctgaaggt

SEQ ID NO: 2360 - DNA, 122 bp, Homo sapiens
  misc_feature (61)..(62): /note="This region represents a CpG dinucleotide"
  misc_feature (61)..(61): /note="Nucleotide may be methylated to form 5-methylcytosine"
ggctgccacataatgaacatatgcccagtaagaccttaaggacctggagggcaggacccacgtctgttgtgttcactgttaaatctccagtgcctggaggataaatggtcctcagcacgcct

SEQ ID NO: 2361 - DNA, 122 bp, Homo sapiens
  misc_feature (61)..(62): /note="This region represents a CpG dinucleotide"
  misc_feature (61)..(61): /note="Nucleotide may be methylated to form 5-methylcytosine"
gccctttacgatgacctagtccaacccactcattgtacagattgggaaactggggcccagcgagattactatttaacagctttgaaatgactgcaggagggagaacacgaggaaacatccaa

SEQ ID NO: 2362 - DNA, 122 bp, Homo sapiens
  misc_feature (61)..(62): /note="This region represents a CpG dinucleotide"
  misc_feature (61)..(61): /note="Nucleotide may be methylated to form 5-methylcytosine"
gtgccacccaccagcattttgagagcaggatgagcaagtgctctcggttcctcaatgacacgtctctgcctcacagctgcttcaggatccagcattatgctggaaaggtatgggggagctgt

SEQ ID NO: 2363 - DNA, 122 bp, Homo sapiens
  misc_feature (61)..(62): /note="This region represents a CpG dinucleotide"
  misc_feature (61)..(61): /note="Nucleotide may be methylated to form 5-methylcytosine"
taggtgggggcggtgggtggcagcaacctcttgggcccagcttcctggtacctggattgtcgctagaacagaatgtcctacaactcagcgttcctgtgggtgacagataatgactccattgg

SEQ ID NO: 2364 - DNA, 122 bp, Homo sapiens
  misc_feature (61)..(62): /note="This region represents a CpG dinucleotide"
  misc_feature (61)..(61): /note="Nucleotide may be methylated to form 5-methylcytosine"
aaaccacaagtgtttaccttcacatggtacttttacaacttccaaagccattctgtgactcgctttcatttgcttcctacggtaacccggtaagataggtgtcgtcattcccatttcagaga

SEQ ID NO: 2365 - DNA, 122 bp, Homo sapiens
  misc_feature (61)..(62): /note="This region represents a CpG dinucleotide"
  misc_feature (61)..(61): /note="Nucleotide may be methylated to form 5-methylcytosine"
cttcagttacaagaaccaaggaaaaaggagggtgtaattgcacgtcagagagaaagatggcggaaatgggcctctgtggcagatgagccaggtaatccctgctctgggatccacaatcgggt

SEQ ID NO: 2366 - DNA, 122 bp, Homo sapiens
  misc_feature (61)..(62): /note="This region represents a CpG dinucleotide"
  misc_feature (61)..(61): /note="Nucleotide may be methylated to form 5-methylcytosine"
ggaaccaaagcagtaaacatgtcaagtaaccattgtagtgcccagtggctagaacacacccgacccatagtagacactcaatgtttcattaaagaaagaataaatgcatgggcttctctatt

SEQ ID NO: 2367 - DNA, 122 bp, Homo sapiens
  misc_feature (61)..(62): /note="This region represents a CpG dinucleotide"
  misc_feature (61)..(61): /note="Nucleotide may be methylated to form 5-methylcytosine"
attgtcgggagtggcagctgtaacagcatcaactggtcacagccctaaaacacagtgagtcgttgagtctgttgtcatatttcttataaattgtaacaacttttgagacttttgccagagct

SEQ ID NO: 2368 - DNA, 122 bp, Homo sapiens
  misc_feature (61)..(62): /note="This region represents a CpG dinucleotide"
  misc_feature (61)..(61): /note="Nucleotide may be methylated to form 5-methylcytosine"
cagggctttggcccaaatttgtgtttgccccagagagcattttgggaggtgttcttggagcgactcacgtatttagcagtgagctatggctctgggccagatcctctgccgggggaaggggt

SEQ ID NO: 2369 - DNA, 122 bp, Homo sapiens
  misc_feature (61)..(62): /note="This region represents a CpG dinucleotide"
  misc_feature (61)..(61): /note="Nucleotide may be methylated to form 5-methylcytosine"
tcaggctgaggagtctggccccggtctctgtgcttttagcagctcagcccagctgcttctcggccacccttgcgacatcatcttccatctcacactgccaagggcaggaatgccagacttat

SEQ ID NO: 2370 - DNA, 122 bp, Homo sapiens
  misc_feature (61)..(62): /note="This region represents a CpG dinucleotide"
  misc_feature (61)..(61): /note="Nucleotide may be methylated to form 5-methylcytosine"
ccatgactctgtagcctttgctgttgtgctgtctcctggcccctcctctgaactctgaagcgctgtgcttatgcaactgtttgctgtcacttgatcactgtcagcattggattattctgtcc

SEQ ID NO: 2371 - DNA, 122 bp, Homo sapiens
  misc_feature (61)..(62): /note="This region represents a CpG dinucleotide"
  misc_feature (61)..(61): /note="Nucleotide may be methylated to form 5-methylcytosine"
gtccaataagcaacatctagctccacacagaaccagcagggggaattcagacattcatatcgtatgattggcttctgtacatctctggaagttataccaagaatcccaaggtcattagagct

SEQ ID NO: 2372 - DNA, 122 bp, Homo sapiens
  misc_feature (61)..(62): /note="This region represents a CpG dinucleotide"
  misc_feature (61)..(61): /note="Nucleotide may be methylated to form 5-methylcytosine"
cattagtaagcttaggatgactgtaaagctggtctaccaattgtgcaagcacttatgggacgtctactgctgataaaaggtcgtatttgtcaaggggaagcaaattactcttggccaattga

SEQ ID NO: 2373 - DNA, 122 bp, Homo sapiens
  misc_feature (61)..(62): /note="This region represents a CpG dinucleotide"
  misc_feature (61)..(61): /note="Nucleotide may be methylated to form 5-methylcytosine"
tctgtcatcacttcatagaaggcacgatgactcaggacaggatagacgcaatttgatggacgagagattctggtgaagtctagtgcatacaatgccctgaagatggcaaacctgagtcagat

SEQ ID NO: 2374 - DNA, 122 bp, Homo sapiens
  misc_feature (61)..(62): /note="This region represents a CpG dinucleotide"
  misc_feature (61)..(61): /note="Nucleotide may be methylated to form 5-methylcytosine"
ggcgtgatgagggccacactcggagtgtaggtgacagtgccttctgttggtacagcatgccgtgatgtcatgttgtatcacacacatcgattaactcactgcagaggctgaagaaggctttt

SEQ ID NO: 2375 - DNA, 122 bp, Homo sapiens
  misc_feature (61)..(62): /note="This region represents a CpG dinucleotide"
  misc_feature (61)..(61): /note="Nucleotide may be methylated to form 5-methylcytosine"
cagctgcttctttcccagaatcttcagccaagactgtcaggcaggatgtgatctttcaggcgaaggagagttaagagtccatgctcagttcttgccataaatctccaggaactctgctttga

SEQ ID NO: 2376 - DNA, 122 bp, Homo sapiens
  misc_feature (61)..(62): /note="This region represents a CpG dinucleotide"
  misc_feature (61)..(61): /note="Nucleotide may be methylated to form 5-methylcytosine"
aagtgctgggattataggcgtgagccactgcacccagccacatttattttttgagactgtcgcccaggctggagtggcggaatcactcttcactgcagcctcgacctccagggctcaagtca

SEQ ID NO: 2377 - DNA, 122 bp, Homo sapiens
  misc_feature (61)..(62): /note="This region represents a CpG dinucleotide"
  misc_feature (61)..(61): /note="Nucleotide may be methylated to form 5-methylcytosine"
agtagagattacatcagccacaaagggttgttgtgaaaataggctgatgtgttcaacacacgtactgtcacatgttaagcccttaattagtgacagctgctatagtgggagactgtaatata

SEQ ID NO: 2378 - DNA, 122 bp, Homo sapiens
  misc_feature (61)..(62): /note="This region represents a CpG dinucleotide"
  misc_feature (61)..(61): /note="Nucleotide may be methylated to form 5-methylcytosine"
aaatgttcagacttcttaaatacggacggtctctgagccttcttagaaagcagagtgggccggggagatggtgcaggcagatgaaatcaagaatgcaggggagatggatggttgtgattggg

SEQ ID NO: 2379 - DNA, 122 bp, Homo sapiens
  misc_feature (61)..(62): /note="This region represents a CpG dinucleotide"
  misc_feature (61)..(61): /note="Nucleotide may be methylated to form 5-methylcytosine"
aattggggcttccacactacacccagactacaccaggagaaacagaatcatagttcacaacgcaaacgaatgccaggaatggtcagtgagtcaaaggaccagtcaaaaacaatcacacttgt

SEQ ID NO: 2380 - DNA, 122 bp, Homo sapiens
  misc_feature (61)..(62): /note="This region represents a CpG dinucleotide"
  misc_feature (61)..(61): /note="Nucleotide may be methylated to form 5-methylcytosine"
gctgcggtgagctgtgatagcaccattgcacaatctaaactgggccacagagcaagacctcgtctccaaaggaaaaaaaaaaaaaagaccaccatgattgttctagtattgtttattgttgt

SEQ ID NO: 2381 - DNA, 122 bp, Homo sapiens
  misc_feature (61)..(62): /note="This region represents a CpG dinucleotide"
  misc_feature (61)..(61): /note="Nucleotide may be methylated to form 5-methylcytosine"
caaacaagttgaaaggtaagcaaatacccttccttccaggttacatttgactgccctcagcgtcaggtgtgttttgtgaatgccagcattatcataaaaagccacaattcacccacacacaa

SEQ ID NO: 2382 - DNA, 122 bp, Homo sapiens
  misc_feature (61)..(62): /note="This region represents a CpG dinucleotide"
  misc_feature (61)..(61): /note="Nucleotide may be methylated to form 5-methylcytosine"
tctagtacagtgagaactcccagatgtgccccttctggtgagaggcaagcttcctgacaacgccatgctgagtgtttgattggccggccagacctgttcataaagcatttcacaaaccgtcc

SEQ ID NO: 2383 - DNA, 122 bp, Homo sapiens
  misc_feature (61)..(62): /note="This region represents a CpG dinucleotide"
  misc_feature (61)..(61): /note="Nucleotide may be methylated to form 5-methylcytosine"
tgaatcacagatggactgagtctaattacaaatcagctttgactcagctcagtctctgaccggttgatatagtcagctcttcatgcattcttcctgacagaggaaacattgaattctgtctg

SEQ ID NO: 2384 - DNA, 122 bp, Homo sapiens
  misc_feature (61)..(62): /note="This region represents a CpG dinucleotide"
  misc_feature (61)..(61): /note="Nucleotide may be methylated to form 5-methylcytosine"
gcagcacccagactgccgagctggtgtgagccgtgtggggccaaggacatgtgggcaaaccgggctggctggtgctggcgacgtgttgacacaggtcctcgcggcatgctggccggatactc

SEQ ID NO: 2385 - DNA, 122 bp, Homo sapiens
  misc_feature (61)..(62): /note="This region represents a CpG dinucleotide"
  misc_feature (61)..(61): /note="Nucleotide may be methylated to form 5-methylcytosine"
aaggaagcagttcactggttctattgaccacagtttgccattcttgaacagggttgccaacgtctagtgtttgtattttgttgtctgactctacaagttccagaacttcttttataaatgat

SEQ ID NO: 2386 - DNA, 122 bp, Homo sapiens
  misc_feature (61)..(62): /note="This region represents a CpG dinucleotide"
  misc_feature (61)..(61): /note="Nucleotide may be methylated to form 5-methylcytosine"
gagtgagtggggctcaccccatagcgccggaagagcccgtcgagctcctcgctggcgcgtcggtacttgtcctccagcagggggctctgttccagcgagtcctccccgtcgggctcggggct

SEQ ID NO: 2387 - DNA, 122 bp, Homo sapiens
  misc_feature (61)..(62): /note="This region represents a CpG dinucleotide"
  misc_feature (61)..(61): /note="Nucleotide may be methylated to form 5-methylcytosine"
cacacctgtaatcccagctatttgggtggctgagtcacagagttgcttgaacccaggattcggagtttgcagtgagctgagattgcaccactgcactccagcctgggcaacagagcaagact

SEQ ID NO: 2388 - DNA, 122 bp, Homo sapiens
  misc_feature (61)..(62): /note="This region represents a CpG dinucleotide"
  misc_feature (61)..(61): /note="Nucleotide may be methylated to form 5-methylcytosine"
caggtaacagattccagatagaacactgccacttaggatttacctctcaaaactcacaagcgctaaagtgcaacaggagaaaatgactcacaggtctcgatactggtcaaaggcattgttgg

SEQ ID NO: 2389 - DNA, 122 bp, Homo sapiens
  misc_feature (61)..(62): /note="This region represents a CpG dinucleotide"
  misc_feature (61)..(61): /note="Nucleotide may be methylated to form 5-methylcytosine"
aaagaacaaagaccttcttttatcctatctcaatacctgtactgtgtgtgtgtgtgcgtgcgtgtatgtgcgcacatgggcgcaaatgcctaccattagtctcttacagtcaccagcccctc

SEQ ID NO: 2390 - DNA, 122 bp, Homo sapiens
  misc_feature (61)..(62): /note="This region represents a CpG dinucleotide"
  misc_feature (61)..(61): /note="Nucleotide may be methylated to form 5-methylcytosine"
tttttccgctgagttctgtccgcagaaaccgttctctggaacagtgcagattgcagattacgtttactacctccgccatgtcccgcccttcagatgtttgaagatgactcttagattccagt

SEQ ID NO: 2391 - DNA, 122 bp, Homo sapiens
  misc_feature (61)..(62): /note="This region represents a CpG dinucleotide"
  misc_feature (61)..(61): /note="Nucleotide may be methylated to form 5-methylcytosine"
agtggcagaaaccaaatgaaaactcaggtcttgtctgatgcagaagccagaacaaacctccgtacattgctagagatggcagggcccttgaatgcacccacgtctccccacccctagctgac

SEQ ID NO: 2392 - DNA, 122 bp, Homo sapiens
  misc_feature (61)..(62): /note="This region represents a CpG dinucleotide"
  misc_feature (61)..(61): /note="Nucleotide may be methylated to form 5-methylcytosine"
actcttccagacttcctaattttaagaactgtgacatacaccccttttttgagacagccacgcacactgtgtcacaagagtctccaagaattttttcttttcttttttttttccccttggcc

SEQ ID NO: 2393 - DNA, 122 bp, Homo sapiens
  misc_feature (61)..(62): /note="This region represents a CpG dinucleotide"
  misc_feature (61)..(61): /note="Nucleotide may be methylated to form 5-methylcytosine"
gaccattaagagcctgccaccaccaatgacccagatgcggtaaagcttgcaaaaccttgacgccctttgatgctcacagcaactgaggtggcaggcagagccagtttcattatcctcattgt

SEQ ID NO: 2394 - DNA, 122 bp, Homo sapiens
  misc_feature (61)..(62): /note="This region represents a CpG dinucleotide"
  misc_feature (61)..(61): /note="Nucleotide may be methylated to form 5-methylcytosine"
taataagtcaattatggagaattatttcttccaactactgaaacttttgcttctcaacaccgttctgcagtcctttaatcttgtttttttaacattaccagagaggaaaaatattaatattc

SEQ ID NO: 2395 - DNA, 122 bp, Homo sapiens
  misc_feature (61)..(62): /note="This region represents a CpG dinucleotide"
  misc_feature (61)..(61): /note="Nucleotide may be methylated to form 5-methylcytosine"
cacagctgtcttcctccctctgtgctgttctggactttaatctgtgtgcacagcttagtgcgtcacaaatagtaactgagtgaggctgttgtgaaagaagcctgtttttttcaggagggcca

SEQ ID NO: 2396 - DNA, 122 bp, Homo sapiens
  misc_feature (61)..(62): /note="This region represents a CpG dinucleotide"
  misc_feature (61)..(61): /note="Nucleotide may be methylated to form 5-methylcytosine"
tagcagaggaagagaattgctattttggggcatattttaactccaataggtaggcattatcgtccccatattgcagatgaggaaactgaggatcagagagtttaagtagcttgtctggtgtc

SEQ ID NO: 2397 - DNA, 122 bp, Homo sapiens
  misc_feature (61)..(62): /note="This region represents a CpG dinucleotide"
  misc_feature (61)..(61): /note="Nucleotide may be methylated to form 5-methylcytosine"
tgaccttgtgatccgcccgcctcggcctcccaaagcgctgggattacaggcatgagccaccgcgccctgccggcagagcgtccagtttctaaaggatctgccctgtcctgcgttctgtttcc

SEQ ID NO: 2398 - DNA, 122 bp, Homo sapiens
  misc_feature (61)..(62): /note="This region represents a CpG dinucleotide"
  misc_feature (61)..(61): /note="Nucleotide may be methylated to form 5-methylcytosine"
aattgaatatgttctcctagccactgctctaccccagctcccagctcttctgaagtgtcacggttcatttcaacagcacgagtaaggcagtttccaggccctgtgcataatgagccatgtgg

SEQ ID NO: 2399 - DNA, 122 bp, Homo sapiens
  misc_feature (61)..(62): /note="This region represents a CpG dinucleotide"
  misc_feature (61)..(61): /note="Nucleotide may be methylated to form 5-methylcytosine"
cctcccttgtccagaaaacgtgcggaggaagcacatgtgggcgctggtctggacgtgcagcggcctcctcctcctgagctgcagcatctgcttgttctggcgagtgggcctgggatagggcg

SEQ ID NO: 2400 - DNA, 122 bp, Homo sapiens
  misc_feature (61)..(62): /note="This region represents a CpG dinucleotide"
  misc_feature (61)..(61): /note="Nucleotide may be methylated to form 5-methylcytosine"
tgggttgcagctgggctttttctagaacaggacacttggttacactacgttaccaggtgtcgattgccagaggaaaagacttttgaaaaagaagttcagttcacagaacatctccccggggc

SEQ ID NO: 2401 - DNA, 122 bp, Homo sapiens
  misc_feature (61)..(62): /note="This region represents a CpG dinucleotide"
  misc_feature (61)..(61): /note="Nucleotide may be methylated to form 5-methylcytosine"
agagtcccctagaagattcttgagtttctgctcttaaacggctccttttccaaggaggaacgaggtctgttttctgatgttggggcctcagatactctgtgattgcaacttaattttgtcgt

SEQ ID NO: 2402 - DNA, 122 bp, Homo sapiens
  misc_feature (61)..(62): /note="This region represents a CpG dinucleotide"
  misc_feature (61)..(61): /note="Nucleotide may be methylated to form 5-methylcytosine"
gagggcacctagtctagcaagctgaaagatggcactaaccatctagacaactagaggagacgtgtgtctagattgcagaaggcattcagtgaatatgtgttgattcaccgaactaacaggaa

SEQ ID NO: 2403 - DNA, 122 bp, Homo sapiens
  misc_feature (61)..(62): /note="This region represents a CpG dinucleotide"
  misc_feature (61)..(61): /note="Nucleotide may be methylated to form 5-methylcytosine"
aaccagcagctgacagtcctcctttgccactctgcaatccagtttcctggagcaaagctacgggccttttaaaaacccagctgccagtccctcttcactcacttcaccggcctccaacttgg

SEQ ID NO: 2404 - DNA, 122 bp, Homo sapiens
  misc_feature (61)..(62): /note="This region represents a CpG dinucleotide"
  misc_feature (61)..(61): /note="Nucleotide may be methylated to form 5-methylcytosine"
cccaaacacctctcactaggccctacctcagcattagggatcacatttcaacaggagattcggaggagacacacaccatcttaaccatttctaagtgtacagttttgtaatattaattacat

SEQ ID NO: 2405 - DNA, 122 bp, Homo sapiens
  misc_feature (61)..(62): /note="This region represents a CpG dinucleotide"
  misc_feature (61)..(61): /note="Nucleotide may be methylated to form 5-methylcytosine"
cttggcctgggacgccggccccgatcctcggctgccgcggcgcgcccgtgtgtgcgccctcgccctgtctgcacgacggtgcctgccgtgacctcttcgacgcctttgcctgcgcctgcggc

SEQ ID NO: 2406 - DNA, 122 bp, Homo sapiens
  misc_feature (61)..(62): /note="This region represents a CpG dinucleotide"
  misc_feature (61)..(61): /note="Nucleotide may be methylated to form 5-methylcytosine"
ttcttttgtccagcttgctttttggcatttttctgctgagactgaattttctgctgtccacgagccatatctaaaaacagaaggtgaagcattagagtggcttatttactctaatacagagt

SEQ ID NO: 2407 - DNA, 122 bp, Homo sapiens
  misc_feature (61)..(62): /note="This region represents a CpG dinucleotide"
  misc_feature (61)..(61): /note="Nucleotide may be methylated to form 5-methylcytosine"
gaaacactatttctcggtttcaagactgttggccacaaaaccatccttcaaaagataatccggtagaaaagttttcacagtaagagtaggcacaccatggagaatggcctgcagcagtctgg

SEQ ID NO: 2408 - DNA, 122 bp, Homo sapiens
  misc_feature (61)..(62): /note="This region represents a CpG dinucleotide"
  misc_feature (61)..(61): /note="Nucleotide may be methylated to form 5-methylcytosine"
tacaaagacagcagcaacacgtactcattcaacaaacactccctgagtgcttgctatgtgcgtggattgtcctgggtgctgcagatgacacagggatgagccagatgtcttggccaacagag

SEQ ID NO: 2409 - DNA, 122 bp, Homo sapiens
  misc_feature (61)..(62): /note="This region represents a CpG dinucleotide"
  misc_feature (61)..(61): /note="Nucleotide may be methylated to form 5-methylcytosine"
ggtaggacctttcagatcatctattttaaccccttcactttctctgaacttctcttctagcgctgtgcactcaattctcattcatgatgtgatgccttgacctcgctgaaggacaagtagaa

SEQ ID NO: 2410 - DNA, 122 bp, Homo sapiens
  misc_feature (61)..(62): /note="This region represents a CpG dinucleotide"
  misc_feature (61)..(61): /note="Nucleotide may be methylated to form 5-methylcytosine"
ttatgtcatagaaaccaatggaaaaaggaaatcagattccccagattccacccccgccctcgccccaggtagtgaaaagttagtgagacttcttgaaaaacaatagggtgtttccaggttaa

SEQ ID NO: 2411 - DNA, 122 bp, Homo sapiens
  misc_feature (61)..(62): /note="This region represents a CpG dinucleotide"
  misc_feature (61)..(61): /note="Nucleotide may be methylated to form 5-methylcytosine"
agaataaagcctacatttgtgggtggccacaaatcttagctaaaaattggctgaactatacggacgtgacttagagaggttggatttattgaaatgttcacaggctgaggtgtcagaagagt

SEQ ID NO: 2412 - DNA, 122 bp, Homo sapiens
  misc_feature (61)..(62): /note="This region represents a CpG dinucleotide"
  misc_feature (61)..(61): /note="Nucleotide may be methylated to form 5-methylcytosine"
tttaccatgttgcaactgctgcgactatggctcctgtggcaaaggtcaaactctttgtctcgcctgaccagcacttcagctcctaggatttcttcctgttttactttgggactcactgttcc

SEQ ID NO: 2413 - DNA, 122 bp, Homo sapiens
  misc_feature (61)..(62): /note="This region represents a CpG dinucleotide"
  misc_feature (61)..(61): /note="Nucleotide may be methylated to form 5-methylcytosine"
caacctccacctcctgggcagagaaaagtgactttatttcagacagccagcaagccaagacgatgatggactaatgacctatggagccatcttaaggggcatgaatctcaagcttcttttta

SEQ ID NO: 2414 - DNA, 122 bp, Homo sapiens
  misc_feature (61)..(62): /note="This region represents a CpG dinucleotide"
  misc_feature (61)..(61): /note="Nucleotide may be methylated to form 5-methylcytosine"
ttctcagagacttcagctgaaatccaacttctgagaatgcttctagggttcgccagaacccgcctttgctagcctccctaggattatctcttgtgaccagcaccttcactgacagctccagt

SEQ ID NO: 2415 - DNA, 122 bp, Homo sapiens
  misc_feature (61)..(62): /note="This region represents a CpG dinucleotide"
  misc_feature (61)..(61): /note="Nucleotide may be methylated to form 5-methylcytosine"
tgagtgggctccctaggttcaggatggaagtaaataggagtaccatcttaccttcagggacggcccaggagtggggtagcagccacagaagtggtaacatctgtagcagcgcagctccttgg

SEQ ID NO: 2416 - DNA, 122 bp, Homo sapiens
  misc_feature (61)..(62): /note="This region represents a CpG dinucleotide"
  misc_feature (61)..(61): /note="Nucleotide may be methylated to form 5-methylcytosine"
gctgggaagtccaagatccaggcactgatagattcagcgtctggtccgctccatagatggcgccttgtgcctgtgtcctcacatggtagaatgagtaaaagcagggaggcgcctccctttaa

SEQ ID NO: 2417 - DNA, 122 bp, Homo sapiens
  misc_feature (61)..(62): /note="This region represents a CpG dinucleotide"
  misc_feature (61)..(61): /note="Nucleotide may be methylated to form 5-methylcytosine"
acagcctggggcagacattcttgtttcttttgttcacttgtccattagcagtgctctaagcgcagagcccagcacacaggaagtgctcaagaaaaggattgttgaatgaatgaatgagcctc

SEQ ID NO: 2418 - DNA, 122 bp, Homo sapiens
  misc_feature (61)..(62): /note="This region represents a CpG dinucleotide"
  misc_feature (61)..(61): /note="Nucleotide may be methylated to form 5-methylcytosine"
caacctgggcaacatggcaaagcaaaaaatacaaaaaaattagccaagcatgatggtgtgcgcctgtggttccagctgagttaagaggatcacctaagcccagggagattgaggctgcggtg

SEQ ID NO: 2419 - DNA, 122 bp, Homo sapiens
  misc_feature (61)..(62): /note="This region represents a CpG dinucleotide"
  misc_feature (61)..(61): /note="Nucleotide may be methylated to form 5-methylcytosine"
agagtatcaatcatgacattatgaggcatggatgaaccacaccacccagtgttagcaacacgtggatcatctgtggctctgtgcatgtgtcactttccacagttacatacaaaatgtaactc

SEQ ID NO: 2420 - DNA, 122 bp, Homo sapiens
  misc_feature (61)..(62): /note="This region represents a CpG dinucleotide"
  misc_feature (61)..(61): /note="Nucleotide may be methylated to form 5-methylcytosine"
actggatttgcaaatgatgtgcttcattaactgttaaaaagaaaatgatttaaaaaaatacgtatcaaagaaggttgttatgaggattatatgagaatagcttagctcagtgactaatacac

SEQ ID NO: 2421 - DNA, 122 bp, Homo sapiens
  misc_feature (61)..(62): /note="This region represents a CpG dinucleotide"
  misc_feature (61)..(61): /note="Nucleotide may be methylated to form 5-methylcytosine"
cagcacagcacaggacaggacaggacagcataggataggacaggacaggacagcacaggacggcacagcaggctattctggtcaatgttcagtaagcaaggctgaaactaatggttgtaaca

SEQ ID NO: 2422 - DNA, 122 bp, Homo sapiens
  misc_feature (61)..(62): /note="This region represents a CpG dinucleotide"
  misc_feature (61)..(61): /note="Nucleotide may be methylated to form 5-methylcytosine"
agttaaaagacctgttctacagtaagagacaaagaattgaagagacttgctgaaggtcaccgaagactgaggtttttatcacttaagaggccagaatttataagatttgaacatggatgcct

SEQ ID NO: 2423 - DNA, 122 bp, Homo sapiens
  misc_feature (61)..(62): /note="This region represents a CpG dinucleotide"
  misc_feature (61)..(61): /note="Nucleotide may be methylated to form 5-methylcytosine"
tatgaatatcctattcctcaacaacatttcactccatggttttaacattctttcatgaaccgggccgggcacagtggctcacctgtaatcccagcactttgggaggccgaggtgggtggatc

SEQ ID NO: 2424 - DNA, 122 bp, Homo sapiens
  misc_feature (61)..(62): /note="This region represents a CpG dinucleotide"
  misc_feature (61)..(61): /note="Nucleotide may be methylated to form 5-methylcytosine"
tctgccaaaagtttatgtactcttcattaatgcctgtgaaccaaagtcctactgaatctgcgtaggttagaatgagacagctttgttattagttacaaagcaaccgaggcctacctgtctgt

SEQ ID NO: 2425 - DNA, 122 bp, Homo sapiens
  misc_feature (61)..(62): /note="This region represents a CpG dinucleotide"
  misc_feature (61)..(61): /note="Nucleotide may be methylated to form 5-methylcytosine"
gatttcagatgagacaccaattattgcggtgatggtggccctgtcctctctgctagtgatcgtgtttattatcatagttttgtacatgttaaggtgagcctactaacacttcacattctctt

SEQ ID NO: 2426 - DNA, 122 bp, Homo sapiens
  misc_feature (61)..(62): /note="This region represents a CpG dinucleotide"
  misc_feature (61)..(61): /note="Nucleotide may be methylated to form 5-methylcytosine"
ggaatattgtacactatatggggttctttgtctggaggccacaaatccattgccataaaccgtaatggaattggttgcatcagcagctttaagaggccttgatcccatgaattcttaaattt

SEQ ID NO: 2427 - DNA, 122 bp, Homo sapiens
  misc_feature (61)..(62): /note="This region represents a CpG dinucleotide"
  misc_feature (61)..(61): /note="Nucleotide may be methylated to form 5-methylcytosine"
tctggcctaagcatgcagactctggaaatttatcccacagcacgtgcatagttttcgatgcgtcatttacccaatgaggctgaacctggaattggacttctacctgcccgtcctttccaggt

SEQ ID NO: 2428 - DNA, 122 bp, Homo sapiens
  misc_feature (61)..(62): /note="This region represents a CpG dinucleotide"
  misc_feature (61)..(61): /note="Nucleotide may be methylated to form 5-methylcytosine"
gtgcagagtcagcaagtttcaaagttttgaagtaataaaagtatcattaggataggagcacgtatggagcagaaggaatggatactagaaatgttcctaggtggaattattaggattgggat

SEQ ID NO: 2429 - DNA, 122 bp, Homo sapiens
  misc_feature (61)..(62): /note="This region represents a CpG dinucleotide"
  misc_feature (61)..(61): /note="Nucleotide may be methylated to form 5-methylcytosine"
gaagtttaatacacccaattgttatgtttgtgaacatcctggctcagtgcttcctgtgtgcgctgcatggaatgagaatggtttcgggtgtgagagactattgaaaagatttcttcatcagt

SEQ ID NO: 2430 - DNA, 122 bp, Homo sapiens
  misc_feature (61)..(62): /note="This region represents a CpG dinucleotide"
  misc_feature (61)..(61): /note="Nucleotide may be methylated to form 5-methylcytosine"
tcgaaattacggaacatttttaacttctttactcagtggtaaagaatggaacatcttttacgtcaaactactgaagttgtgggcaaaattacaagcgatgattatgcaggataggttagttt

SEQ ID NO: 2431 - DNA, 122 bp, Homo sapiens
  misc_feature (61)..(62): /note="This region represents a CpG dinucleotide"
  misc_feature (61)..(61): /note="Nucleotide may be methylated to form 5-methylcytosine"
ataagcagccaccagtgatgaaagtgcttcaggaaggagggatggatccgctgtggattgcgtagtagttgagtcatgagagaactgattggcatgacttcaagagggaaaatgggagggga

SEQ ID NO: 2432 - DNA, 122 bp, Homo sapiens
  misc_feature (61)..(62): /note="This region represents a CpG dinucleotide"
  misc_feature (61)..(61): /note="Nucleotide may be methylated to form 5-methylcytosine"
aaaagaatatttagtccacaaaccagtcaaaattaccactgaaatctaaaactaatttaacgcacatttttctccttctgaaatagtccagcctacaaccatgagctaaaatcagttaatac

SEQ ID NO: 2433 - DNA, 122 bp, Homo sapiens
  misc_feature (61)..(62): /note="This region represents a CpG dinucleotide"
  misc_feature (61)..(61): /note="Nucleotide may be methylated to form 5-methylcytosine"
taaggagactttattgaatatgcattgatgactcactaacactgaactcatggccaacagcgctgtaactcatccctgaacgaagcttactgaacacatgtattttctccgcaaggaacgtc

SEQ ID NO: 2434 - DNA, 122 bp, Homo sapiens
  misc_feature (61)..(62): /note="This region represents a CpG dinucleotide"
  misc_feature (61)..(61): /note="Nucleotide may be methylated to form 5-methylcytosine"
aacctacctcatgggttggtgaggaattaatcagctcacacatggttagccctcagtaaacgttggctgttatggttgtgtctttccactctctgcctcgcactttaagatctggctacatg

SEQ ID NO: 2435 - DNA, 122 bp, Homo sapiens
  misc_feature (61)..(62): /note="This region represents a CpG dinucleotide"
  misc_feature (61)..(61): /note="Nucleotide may be methylated to form 5-methylcytosine"
tccaatgttgttgtatatatgactatatttggatggccagaaaagggaaattgtcttggtcgttaagaaactgctgagtatcaaaaaaaggagaaggaaatatattatttcatacagaaaga

SEQ ID NO: 2436 - DNA, 122 bp, Homo sapiens
  misc_feature (61)..(62): /note="This region represents a CpG dinucleotide"
  misc_feature (61)..(61): /note="Nucleotide may be methylated to form 5-methylcytosine"
ctccaagttccgggatcctgaggccaccctcacttctgatcagctgattacaaatttgggcgtatttgctatcctactcatgtttaataattgactagaacaactcacagaactcagaaatg

SEQ ID NO: 2437 - DNA, 122 bp, Homo sapiens
  misc_feature (61)..(62): /note="This region represents a CpG dinucleotide"
  misc_feature (61)..(61): /note="Nucleotide may be methylated to form 5-methylcytosine"
aaaagttctccaagtccccacccaacccagaaacccagctggcttcacctctcacctactcggaacaactcaaagttgatatctcaagggtttaatatttcctgaatgatgattcatcacac

SEQ ID NO: 2438 - DNA, 122 bp, Homo sapiens
  misc_feature (61)..(62): /note="This region represents a CpG dinucleotide"
  misc_feature (61)..(61): /note="Nucleotide may be methylated to form 5-methylcytosine"
ctgtaggaacaccttctcctgtctgctgctgccacagagggtagcaaatcccatgctaggcgtggagaggagacttgggcatgtccctggagggacactgctgcagtcacttcacttacaga

SEQ ID NO: 2439 - DNA, 122 bp, Homo sapiens
  misc_feature (61)..(62): /note="This region represents a CpG dinucleotide"
  misc_feature (61)..(61): /note="Nucleotide may be methylated to form 5-methylcytosine"
tgatgacaatgtgagtgttcttgggatccggaagcattccctttgcagtgtcatagttaccgaagtaggcagcaggcagctcggtagataataccctgcacagacacgttaaagccttggta

SEQ ID NO: 2440 - DNA, 122 bp, Homo sapiens
  misc_feature (61)..(62): /note="This region represents a CpG dinucleotide"
  misc_feature (61)..(61): /note="Nucleotide may be methylated to form 5-methylcytosine"
cttgcgaaggtcaccaattttgcatgttttgtttcctgatgcatttccagttcttgaaaacggtgcctgacacatagcagacactggatatactatggctcatttgaatgaataaaaggagt

SEQ ID NO: 2441 - DNA, 122 bp, Homo sapiens
  misc_feature (61)..(62): /note="This region represents a CpG dinucleotide"
  misc_feature (61)..(61): /note="Nucleotide may be methylated to form 5-methylcytosine"
caatctagacatttttaaaaagataatgccagattaatctctacacaggcttaacagaaacgatgctttctgaagggatgtctgagatagtaataccattttttaaaaaaagatcaagagtt

SEQ ID NO: 2442 - DNA, 122 bp, Homo sapiens
  misc_feature (61)..(62): /note="This region represents a CpG dinucleotide"
  misc_feature (61)..(61): /note="Nucleotide may be methylated to form 5-methylcytosine"
tccaggtgaggataaccagactgggagagggtaaggaggtcacagctccaaaaagcggcacggctggggtttgaggctgtgcctgactgtgaagctggctctccttatccgtggcgcttcct

SEQ ID NO: 2443 - DNA, 122 bp, Homo sapiens
  misc_feature (61)..(62): /note="This region represents a CpG dinucleotide"
  misc_feature (61)..(61): /note="Nucleotide may be methylated to form 5-methylcytosine"
aatgcctttaattaaattacccatacttctcttggaggctttgtttcgtaatttgtgaaccgggactattacttgctttccttctctcatgaagttgagttatgagaatataggatgatggt

SEQ ID NO: 2444 - DNA, 122 bp, Homo sapiens
  misc_feature (61)..(62): /note="This region represents a CpG dinucleotide"
  misc_feature (61)..(61): /note="Nucleotide may be methylated to form 5-methylcytosine"
acttaagaattatgggaaatttcttgaggagtatacctctcaactgagaagaattgaggacgctctggatgactcaattggagatgtttgggatttcaatcttgatcctatagcattaaagg

SEQ ID NO: 2445 - DNA, 122 bp, Homo sapiens
  misc_feature (61)..(62): /note="This region represents a CpG dinucleotide"
  misc_feature (61)..(61): /note="Nucleotide may be methylated to form 5-methylcytosine"
aaaggagactgaattagagggccagatgatgaaattctgtctcaagttgtgcagccctgacgcactcacagggaatgactggtgctaggtaagagcacaagaaacatcacactagccttgag

SEQ ID NO: 2446 - DNA, 122 bp, Homo sapiens
  misc_feature (61)..(62): /note="This region represents a CpG dinucleotide"
  misc_feature (61)..(61): /note="Nucleotide may be methylated to form 5-methylcytosine"
gatgaggcctggaatcagtcccaggctagagggcagagtccaggagactgccacctgccacgctgtccgctatttgttcaaaggtttctcagcttagtgacaaaatgagcaaagaaagaagt

SEQ ID NO: 2447 - DNA, 122 bp, Homo sapiens
  misc_feature (61)..(62): /note="This region represents a CpG dinucleotide"
  misc_feature (61)..(61): /note="Nucleotide may be methylated to form 5-methylcytosine"
gaggattccatacaacctaagtggtgacatcagcacaggctcattactaatctcatgtcacgaggtttcaggcctggctgagaactctgtgagctctgtgatgttgagcttcaggcacatag

SEQ ID NO: 2448 - DNA, 122 bp, Homo sapiens
  misc_feature (61)..(62): /note="This region represents a CpG dinucleotide"
  misc_feature (61)..(61): /note="Nucleotide may be methylated to form 5-methylcytosine"
ttggtttcgtattttctatcatgtctatgcatacctttatcaaaataaaattgtttaggccggggcagtgacacatctgtaatcccagcattttgggaggttgtgatgggtggatcgcctga

SEQ ID NO: 2449 - DNA, 122 bp, Homo sapiens
  misc_feature (61)..(62): /note="This region represents a CpG dinucleotide"
  misc_feature (61)..(61): /note="Nucleotide may be methylated to form 5-methylcytosine"
taattagggtctgccttagaagatcttcaagctgccttattttcatgtgcattattcagacgtctgagaagttcctggtgcaatgtgtcttgtgaaatatattaggcattcagtgcagctgt

SEQ ID NO: 2450 - DNA, 122 bp, Homo sapiens
  misc_feature (61)..(62): /note="This region represents a CpG dinucleotide"
  misc_feature (61)..(61): /note="Nucleotide may be methylated to form 5-methylcytosine"
ttctcagtcacttacatgatgaatctgggcgttaccctagattcattcatctgcctttcccgtgtcatccagctggtctcctggcattatctatcctgtccttattcatttctgaacacctc

SEQ ID NO: 2451 - DNA, 122 bp, Homo sapiens
  misc_feature (61)..(62): /note="This region represents a CpG dinucleotide"
  misc_feature (61)..(61): /note="Nucleotide may be methylated to form 5-methylcytosine"
actcactcactacagatgagcaaggaagagcaagagccattcagaagtgaggaggtatgacgtacaaggaacacaggatatgtttcatgctgtgatgaagtttcacaatagacttggcatag

SEQ ID NO: 2452 - DNA, 122 bp, Homo sapiens
  misc_feature (61)..(62): /note="This region represents a CpG dinucleotide"
  misc_feature (61)..(61): /note="Nucleotide may be methylated to form 5-methylcytosine"
ggcaatctgcccgcctcggcctcccatagtgctgggattacaggcatgagccaccgcacccggtccagatttattaagcaatagtggtgcatttcatgcacaggtatcagctagtctagtaa

SEQ ID NO: 2453 - DNA, 122 bp, Homo sapiens
  misc_feature (61)..(62): /note="This region represents a CpG dinucleotide"
  misc_feature (61)..(61): /note="Nucleotide may be methylated to form 5-methylcytosine"
actgctactccttgcagcaagagcttcagtgaggatgcagcattttttatgtcctgaggacgtatgtgttgagtaagtgtttgtcaagtgaattcaggtaaagtcaatcttgcttcacctct

SEQ ID NO: 2454 - DNA, 122 bp, Homo sapiens
  misc_feature (61)..(62): /note="This region represents a CpG dinucleotide"
  misc_feature (61)..(61): /note="Nucleotide may be methylated to form 5-methylcytosine"
actcaatgaaacctatgtcctttgcatactgatggaaacaccggcggcacatattgaggccgtgtttccagatcagactatgctggtttgggcagatgtgacaagagtgagaaccctggccc

SEQ ID NO: 2455 - DNA, 122 bp, Homo sapiens
  misc_feature (61)..(62): /note="This region represents a CpG dinucleotide"
  misc_feature (61)..(61): /note="Nucleotide may be methylated to form 5-methylcytosine"
tattgcaacccagccagttgtgcatgtgcttgggtgagtgttgacatgccagtcccctgtcgccttggccccctctggacattgggcaccaatgagcatgggagggaagctgagggtaagct

SEQ ID NO: 2456 - DNA, 122 bp, Homo sapiens
  misc_feature (61)..(62): /note="This region represents a CpG dinucleotide"
  misc_feature (61)..(61): /note="Nucleotide may be methylated to form 5-methylcytosine"
ttacgcaatgatgcaaaacattccctgatgtaatcagaaatcatgagtagaacaccacgacgtaccctgcaattgtgagtagtgacgtgcgtgtacactgaaccacagcacagagaagtcca

SEQ ID NO: 2457 - DNA, 122 bp, Homo sapiens
  misc_feature (61)..(62): /note="This region represents a CpG dinucleotide"
  misc_feature (61)..(61): /note="Nucleotide may be methylated to form 5-methylcytosine"
gcatgtgctccggattaatgctgcctgagttctaatcctcgctctgccacttagtagtcacgttaccataggcaagtcatttaagccacttagtcactcgaagcctcatttttcccatctgc

SEQ ID NO: 2458 - DNA, 122 bp, Homo sapiens
  misc_feature (61)..(62): /note="This region represents a CpG dinucleotide"
  misc_feature (61)..(61): /note="Nucleotide may be methylated to form 5-methylcytosine"
tgtgaggaccttgaaatcatcaggaacaagagagaagatccttctgctactgactgaactcgttgtgaggtactcagtgttggctgaggtagaagctgccaccagagactaaagggaaggct

SEQ ID NO: 2459 - DNA, 122 bp, Homo sapiens
  misc_feature (61)..(62): /note="This region represents a CpG dinucleotide"
  misc_feature (61)..(61): /note="Nucleotide may be methylated to form 5-methylcytosine"
ttacctctcttctggtaagcagccctgctctctggagctcctggtgtctggttttggtatcgccatcttttgttgctggcagctgctggcttcagggaacttcatctcctttacaactggct

SEQ ID NO: 2460 - DNA, 122 bp, Homo sapiens
  misc_feature (61)..(62): /note="This region represents a CpG dinucleotide"
  misc_feature (61)..(61): /note="Nucleotide may be methylated to form 5-methylcytosine"
caaatatttattgagccctatttcccaggcaccacgataagggctggatacatgtcaacacgccacagggggtggattgtgttaaaacctcctcctagacctacctttgcctaaaatctcct

SEQ ID NO: 2461 - DNA, 122 bp, Homo sapiens
  misc_feature (61)..(62): /note="This region represents a CpG dinucleotide"
  misc_feature (61)..(61): /note="Nucleotide may be methylated to form 5-methylcytosine"
gccacgtccggaccttgtcccctgctgaggactacctcgcgggccgggcggggtgaagggcgctgttaagaaggacagtcccggggaatgaggggcgagggggagaacggggtcgccgggtc

SEQ ID NO: 2462 - DNA, 122 bp, Homo sapiens
  misc_feature (61)..(62): /note="This region represents a CpG dinucleotide"
  misc_feature (61)..(61): /note="Nucleotide may be methylated to form 5-methylcytosine"
ttctgctcggggtggggttgagagcaactccgcccagggggcctgatgactgctttgctgcgtgtgcctggggagggaggcgctgccctgcagcctcagcttggggtgagatgacacttcca

SEQ ID NO: 2463 - DNA, 122 bp, Homo sapiens
  misc_feature (61)..(62): /note="This region represents a CpG dinucleotide"
  misc_feature (61)..(61): /note="Nucleotide may be methylated to form 5-methylcytosine"
gggattggagggtgggcctttgatgctcctcaagcaataagccacatggagaacttgcatcgtaagtgttagcaagggctcacctcactgccttggaaacctaccatcctgtgactcgccct

SEQ ID NO: 2464 - DNA, 122 bp, Homo sapiens
  misc_feature (61)..(62): /note="This region represents a CpG dinucleotide"
  misc_feature (61)..(61): /note="Nucleotide may be methylated to form 5-methylcytosine"
ttgtatgctatcatatggatgaatcatgaggaaactatgttacatgaaataagccagtcacggaaagagaaataccacatgatttcacttatacaaggtatttaatgtagtcaaactcataa

SEQ ID NO: 2465 - DNA, 122 bp, Homo sapiens
  misc_feature (61)..(62): /note="This region represents a CpG dinucleotide"
  misc_feature (61)..(61): /note="Nucleotide may be methylated to form 5-methylcytosine"
ggtcagagtcagagactcaatgacatcctaatgctcagcgaattgggagtaggccacgcacgatacctggaagctctgaggtttaggcacagaagtccacatcacacccattctagaaagaa

SEQ ID NO: 2466 - DNA, 122 bp, Homo sapiens
  misc_feature (61)..(62): /note="This region represents a CpG dinucleotide"
  misc_feature (61)..(61): /note="Nucleotide may be methylated to form 5-methylcytosine"
agttaaacccagaatgtcattaactctgtgttctttatgtggataatgaacttcctcttacgcccatcagtgggctctgaagggtcattgattgtaaactcctttggcttaagaaattctag

SEQ ID NO: 2467 - DNA, 122 bp, Homo sapiens
  misc_feature (61)..(62): /note="This region represents a CpG dinucleotide"
  misc_feature (61)..(61): /note="Nucleotide may be methylated to form 5-methylcytosine"
cttctttggggccctagtaacaatttgacagtgttatatagataaacataattcctctcacgtaagttgtgaattccttgagagtaagaattgaactgtgccccaattcatctctatgatca

SEQ ID NO: 2468 - DNA, 122 bp, Homo sapiens
  misc_feature (61)..(62): /note="This region represents a CpG dinucleotide"
  misc_feature (61)..(61): /note="Nucleotide may be methylated to form 5-methylcytosine"
cgaactctggacctcgagcgatctgcatgcctcgacctcccaaagtgctaggattacaggcgtgagccaccacgcccagcccagaaagccagttttactgaatcagaaaacttgttatggga

SEQ ID NO: 2469 - DNA, 122 bp, Homo sapiens
  misc_feature (61)..(62): /note="This region represents a CpG dinucleotide"
  misc_feature (61)..(61): /note="Nucleotide may be methylated to form 5-methylcytosine"
tgcatcttgcatcactacaaaagaggcacggcacttggcagctgtcttagtctgtccaggcggctatagcagaatgccatagactgggtgacttataaataaaggcatttatttctcacagt

SEQ ID NO: 2470 - DNA, 122 bp, Homo sapiens
  misc_feature (61)..(62): /note="This region represents a CpG dinucleotide"
  misc_feature (61)..(61): /note="Nucleotide may be methylated to form 5-methylcytosine"
gctgttaacaggtaaatttaaattgcaatttttaaaactcaaactattgcacagaacatacgtaatttcttgcttgctctagccctgcctggcctaagaacacgggcctaagattcagcccc

SEQ ID NO: 2471 - DNA, 122 bp, Homo sapiens
  misc_feature (61)..(62): /note="This region represents a CpG dinucleotide"
  misc_feature (61)..(61): /note="Nucleotide may be methylated to form 5-methylcytosine"
tcagtgagtttggagcacaggcgcacaactccgctcattatgtaaccacgccacgtgaggcgcattatgtgatcacccacatgggctcgtgcttggcttggagccactattgtctctaaaag

SEQ ID NO: 2472 - DNA, 122 bp, Homo sapiens
  misc_feature (61)..(62): /note="This region represents a CpG dinucleotide"
  misc_feature (61)..(61): /note="Nucleotide may be methylated to form 5-methylcytosine"
tcagtttccccttctgcagactgggcacgagtgtcctgccctgcttgctttgcagagccacggagataaacccagaggaatcactttgcaaactgcaaggtgagccgccaagatgagaacac

SEQ ID NO: 2473 - DNA, 122 bp, Homo sapiens
  misc_feature (61)..(62): /note="This region represents a CpG dinucleotide"
  misc_feature (61)..(61): /note="Nucleotide may be methylated to form 5-methylcytosine"
atatatttagtgtttcctaagaaggaaactgttgaatggaatctgctttggaaagatgtacgtatgtcatatgccaggaaaagtggattttgattaagaaatttggcatttgcaataaatcc

SEQ ID NO: 2474 - DNA, 122 bp, Homo sapiens
  misc_feature (61)..(62): /note="This region represents a CpG dinucleotide"
  misc_feature (61)..(61): /note="Nucleotide may be methylated to form 5-methylcytosine"
aaaagcaaggaccttgttgtgttaccaatgtgtcactgaatcctaattcaatgcttcaagcgtggtaaacgttaatgaatgaataaggtttttgaaaagcaggaacattgtgttgaccttac

SEQ ID NO: 2475 - DNA, 122 bp, Homo sapiens
  misc_feature (61)..(62): /note="This region represents a CpG dinucleotide"
  misc_feature (61)..(61): /note="Nucleotide may be methylated to form 5-methylcytosine"
atttgtccccacgttgcatacatctgcttgtccagtgctttcctcccaagacagtcttttcgtgacatcagagtcgctcagttcttttgactcagcttgttcattactgcggggtgatgatg

SEQ ID NO: 2476 - DNA, 122 bp, Homo sapiens
  misc_feature (61)..(62): /note="This region represents a CpG dinucleotide"
  misc_feature (61)..(61): /note="Nucleotide may be methylated to form 5-methylcytosine"
attttcctatttggcaatgtgcacttttctgagtataatcctgggaactatacaattcagcgtgaatgtaaaggatagggaaccaatgatatgggaaacatcaacagcttgtaatctgaaaa

SEQ ID NO: 2477 - DNA, 122 bp, Homo sapiens
  misc_feature (61)..(62): /note="This region represents a CpG dinucleotide"
  misc_feature (61)..(61): /note="Nucleotide may be methylated to form 5-methylcytosine"
cttggggctggagctgctcaaggagacaggctcctcctcgcctacagctgtcaagacaggcggaccatcctgctgctcaggctgcagagtctgccccaatgagcacagtcctcaaaccccac

SEQ ID NO: 2478 - DNA, 122 bp, Homo sapiens
  misc_feature (61)..(62): /note="This region represents a CpG dinucleotide"
  misc_feature (61)..(61): /note="Nucleotide may be methylated to form 5-methylcytosine"
aagcagaaaggaatttgtttgagggcattaaaatgcttccagaaatcatcaggagatacacggaaacctctaggttgtgcttttgggaacagccctcagagctatgcagcagatctgggtct

SEQ ID NO: 2479 - DNA, 122 bp, Homo sapiens
  misc_feature (61)..(62): /note="This region represents a CpG dinucleotide"
  misc_feature (61)..(61): /note="Nucleotide may be methylated to form 5-methylcytosine"
gccttctctgagcaactgttgctcagagagaattcagttttgctcttattaccagccacccggcatgcggatcttgctagtcaccactgtcctcagatactgggctcaggctgggcctacac

SEQ ID NO: 2480 - DNA, 122 bp, Homo sapiens
  misc_feature (61)..(62): /note="This region represents a CpG dinucleotide"
  misc_feature (61)..(61): /note="Nucleotide may be methylated to form 5-methylcytosine"
tccttgagagatcatttcctggatgtggacttcaagatccaggcttttccttcagtgctgcgtgggctctccgctgcctcccctgtcatccggggctgcgtgtcgtgagctgcgcccgtctt

SEQ ID NO: 2481 - DNA, 122 bp, Homo sapiens
  misc_feature (61)..(62): /note="This region represents a CpG dinucleotide"
  misc_feature (61)..(61): /note="Nucleotide may be methylated to form 5-methylcytosine"
cccagttgtgtttctaattcactttgcctggactccctgtaagtcttctctaagaagaaccgtccagccttttctcagggacagcattagtccaatattgtaatcgtccaatgttacaacat

SEQ ID NO: 2482 - DNA, 122 bp, Homo sapiens
  misc_feature (61)..(62): /note="This region represents a CpG dinucleotide"
  misc_feature (61)..(61): /note="Nucleotide may be methylated to form 5-methylcytosine"
taacccgtaagtaggttatgcaacggtttttacatgagagggccatgagtgttctcctggcgggatggagaagcattgttctggtctttgagcaaattcttgagcaattacagttctgggcc

SEQ ID NO: 2483 - DNA, 122 bp, Homo sapiens
  misc_feature (61)..(62): /note="This region represents a CpG dinucleotide"
  misc_feature (61)..(61): /note="Nucleotide may be methylated to form 5-methylcytosine"
taagagcccaagggagactggaaactctacagccatgaactaaaagcagcgtgtgtcagccgcagaatcggataacacaaccaaaccacaaatgtgcctgccgctcaggctttaaagttcta

SEQ ID NO: 2484 - DNA, 122 bp, Homo sapiens
  misc_feature (61)..(62): /note="This region represents a CpG dinucleotide"
  misc_feature (61)..(61): /note="Nucleotide may be methylated to form 5-methylcytosine"
tactgcccgttagcaaatccacaatacctatagctattactatcgccatgcttggtgattcgtggatgttctggggaatcacatgaacctgcgtatctgtgactcatgcatatgttcctcct

SEQ ID NO: 2485 - DNA, 122 bp, Homo sapiens
  misc_feature (61)..(62): /note="This region represents a CpG dinucleotide"
  misc_feature (61)..(61): /note="Nucleotide may be methylated to form 5-methylcytosine"
aaaaggcatttttgaaaaagctgaatatgaactaggtgttttatgatattaaggaagtatcgttaattttgttaggtgtggtaatgataccgagattatgaaagaaaatatcagctgggtgt

SEQ ID NO: 2486 - DNA, 122 bp, Homo sapiens
  misc_feature (61)..(62): /note="This region represents a CpG dinucleotide"
  misc_feature (61)..(61): /note="Nucleotide may be methylated to form 5-methylcytosine"
cagcgggtccctgctctgccgtccggggatcccgcgggtggtccggagcccggggcgcggcgcgccgttcattcccgcgtcctggcggggcctgcttcttcccgagccctctccctgcggct

SEQ ID NO: 2487 - DNA, 122 bp, Homo sapiens
  misc_feature (61)..(62): /note="This region represents a CpG dinucleotide"
  misc_feature (61)..(61): /note="Nucleotide may be methylated to form 5-methylcytosine"
gattatgatattccagaattccaagccatggagtcattgatgagtaagtagtgtcagtagcggctacatggtttcaagattaacctttggctgagcaatgaggagtcattgccaatgttgtc

SEQ ID NO: 2488 - DNA, 122 bp, Homo sapiens
  misc_feature (61)..(62): /note="This region represents a CpG dinucleotide"
  misc_feature (61)..(61): /note="Nucleotide may be methylated to form 5-methylcytosine"
caggtttccggctgtgagctggctgcttctttctgacttcccccttcttcctcccaccctcgccctggtaggcttagatttcttagggttctaaaatcagtcaccacttactcatttgcttt

SEQ ID NO: 2489 - DNA, 122 bp, Homo sapiens
  misc_feature (61)..(62): /note="This region represents a CpG dinucleotide"
  misc_feature (61)..(61): /note="Nucleotide may be methylated to form 5-methylcytosine"
tttccaggtgtggatgaagcaaccatcattgacattctaactaagcgaaacaatgcacagcgtcaacagatcaaagcagcatatctccaggaaacaggaaaggtaagttagagtggtaaatt

SEQ ID NO: 2490 - DNA, 122 bp, Homo sapiens
  misc_feature (61)..(62): /note="This region represents a CpG dinucleotide"
  misc_feature (61)..(61): /note="Nucleotide may be methylated to form 5-methylcytosine"
agggttccacccaggtcaatgagttattagaggtcaggattacaaagtataaaacatgcccggaaaccagggtcattcccagagaaatgggatggcttatggtctgctcatccacccccaaa

SEQ ID NO: 2491 - DNA, 122 bp, Homo sapiens
  misc_feature (61)..(62): /note="This region represents a CpG dinucleotide"
  misc_feature (61)..(61): /note="Nucleotide may be methylated to form 5-methylcytosine"
ctaaatggatcagcatattagcctcctgaaaagatattacactgcttagcctgaaacttccgcctcatagctcaagtatctcacaatgggattcacttaaggcatagggtttcttatagggt

SEQ ID NO: 2492 - DNA, 122 bp, Homo sapiens
  misc_feature (61)..(62): /note="This region represents a CpG dinucleotide"
  misc_feature (61)..(61): /note="Nucleotide may be methylated to form 5-methylcytosine"
tttgtgctacctctcgtctgtggatctaggcgtgaggaggtagaagggagcccctggtcacgcccctgtgccgccttctagtggcatggcctttaagcagcaaagaatgtgacttgtaagca

SEQ ID NO: 2493 - DNA, 122 bp, Homo sapiens
  misc_feature (61)..(62): /note="This region represents a CpG dinucleotide"
  misc_feature (61)..(61): /note="Nucleotide may be methylated to form 5-methylcytosine"
gtcctgttcttaccttgtcctgactcctgttggacatgcctcatttcctgtataaacttgcgtcactaagaagacagtaaattcttactcactttgttaaacatacatactttcctgtagga

SEQ ID NO: 2494 - DNA, 122 bp, Homo sapiens
  misc_feature (61)..(62): /note="This region represents a CpG dinucleotide"
  misc_feature (61)..(61): /note="Nucleotide may be methylated to form 5-methylcytosine"
tgtgatgagtgtgcagagcagggggtgggaagactgtgactgcagcctaaggcttggaagcgggtgactagactcaagactctgcatgtatgagatgttttggaattccaaccgttcttttt

SEQ ID NO: 2495 - DNA, 122 bp, Homo sapiens
  misc_feature (61)..(62): /note="This region represents a CpG dinucleotide"
  misc_feature (61)..(61): /note="Nucleotide may be methylated to form 5-methylcytosine"
aattaactgtacactatttaatccaccagttccggttcattagaaaaatgcagttctcgccggacatggtggctcacacctgtaatcccagcaattctggaggccaaggtgggcagattgct

SEQ ID NO: 2496 - DNA, 122 bp, Homo sapiens
  misc_feature (61)..(62): /note="This region represents a CpG dinucleotide"
  misc_feature (61)..(61): /note="Nucleotide may be methylated to form 5-methylcytosine"
agattactactatgacaccttcaaaggagatgactacaatgaggagaatcctactgaacccggcagcgacggcaccatgtcagacaaggaaattactcatgatgtcaaaggtaaccccatgt

SEQ ID NO: 2497 - DNA, 122 bp, Homo sapiens
  misc_feature (61)..(62): /note="This region represents a CpG dinucleotide"
  misc_feature (61)..(61): /note="Nucleotide may be methylated to form 5-methylcytosine"
acaacagatccccagaacttattcctcttatctcactgacattttataccctttgaccaacgtctcccatctatctgtcttcccccatcatctcctgacaagcatcattctactcttcctct

SEQ ID NO: 2498 - DNA, 122 bp, Homo sapiens
  misc_feature (61)..(62): /note="This region represents a CpG dinucleotide"
  misc_feature (61)..(61): /note="Nucleotide may be methylated to form 5-methylcytosine"
aattattactcatctctgaatgtgatgagttcttcctgaaccatctatttatacaagattcgtgcaccagagtgtccaaaagagtaatctagttcttagaaaacaggcttgtgagtgagagt

SEQ ID NO: 2499 - DNA, 122 bp, Homo sapiens
  misc_feature (61)..(62): /note="This region represents a CpG dinucleotide"
  misc_feature (61)..(61): /note="Nucleotide may be methylated to form 5-methylcytosine"
atcagcctcagtttcaacagatgagacaaattattcagcagaatccttccttgcttccagcgttactacagcagataggtcgagagaatcctcaattacttcaggtgactaatcagtgtcag

SEQ ID NO: 2500 - DNA, 122 bp, Homo sapiens
  misc_feature (61)..(62): /note="This region represents a CpG dinucleotide"
  misc_feature (61)..(61): /note="Nucleotide may be methylated to form 5-methylcytosine"
gctgcaaagaccttggagctgtgggcccaaaactgcttcttctcactatcctgagggatacgcccctttcagagagggcaactgactgtgtggtgtttatggaaggagttggggggagggca

SEQ ID NO: 2501 - DNA, 122 bp, Homo sapiens
  misc_feature (61)..(62): /note="This region represents a CpG dinucleotide"
  misc_feature (61)..(61): /note="Nucleotide may be methylated to form 5-methylcytosine"
gatttatgagctgtacaggcagttgaatcaaccgatcttgctgaccaattgaattcataccgtatctgcatcagatacgctatagggcagactttttattgtgtgagccattgtaaagcact

SEQ ID NO: 2502 - DNA, 122 bp, Homo sapiens
  misc_feature (61)..(62): /note="This region represents a CpG dinucleotide"
  misc_feature (61)..(61): /note="Nucleotide may be methylated to form 5-methylcytosine"
aagaaaaaaaaaaaaaggaagttcatttggcttcctgctcagtctaggactggctaaccacgtcccgcctgggatcagcatggtggccaggacttcatgagtaataaataacaccaccaggc

SEQ ID NO: 2503 - DNA, 122 bp, Homo sapiens
  misc_feature (61)..(62): /note="This region represents a CpG dinucleotide"
  misc_feature (61)..(61): /note="Nucleotide may be methylated to form 5-methylcytosine"
ctcacaaagctcaggacaaaggcctcctcccccatgaagctttgcccaagctagaatgaccgtcaccctcctaagtgttgccacagggcattatgcttccattcggctcacattacaagtat

SEQ ID NO: 2504 - DNA, 122 bp, Homo sapiens
  misc_feature (61)..(62): /note="This region represents a CpG dinucleotide"
  misc_feature (61)..(61): /note="Nucleotide may be methylated to form 5-methylcytosine"
tcatcatacgtgaaaatcattccctgcagctcttcccagatgtcatgtgttaagcaggttcgatatataatgaaactaggaaggcactactgtcctttgctgacaccttcccttcttggttt

SEQ ID NO: 2505 - DNA, 122 bp, Homo sapiens
  misc_feature (61)..(62): /note="This region represents a CpG dinucleotide"
  misc_feature (61)..(61): /note="Nucleotide may be methylated to form 5-methylcytosine"
ccaaggaattatatgcttttcctcatctctttagttaagaaattctaaagtaaagccgggcgtagtgtctcacatctgtaatcccagcactttgggaggctgaggtgggtggatcaccttga

SEQ ID NO: 2506 - DNA, 122 bp, Homo sapiens
  misc_feature (61)..(62): /note="This region represents a CpG dinucleotide"
  misc_feature (61)..(61): /note="Nucleotide may be methylated to form 5-methylcytosine"
agcaaccctcctgcctgggcctcccgaagtgctgggattacaggtgtgagccaccgtgcccggcctaagcctctcataaggccgtgctccctgccagaggccacccttgaagaagattccct

SEQ ID NO: 2507 - DNA, 122 bp, Homo sapiens
  misc_feature (61)..(62): /note="This region represents a CpG dinucleotide"
  misc_feature (61)..(61): /note="Nucleotide may be methylated to form 5-methylcytosine"
accaatattgtatctcagcttaaatgtatttccttacagtgtaatgtccctcaacatcctcgcatagagtggagtttccagataacctcactcttctcatccctgcccccaaggatgccaca

SEQ ID NO: 2508 - DNA, 122 bp, Homo sapiens
  misc_feature (61)..(62): /note="This region represents a CpG dinucleotide"
  misc_feature (61)..(61): /note="Nucleotide may be methylated to form 5-methylcytosine"
taaagagggtggaaagaactctaatactgaaacctagtcataggtcaaggctgcagaattcgccccatttccattttgctgattcatatcagtcagatatgactatgccacttgattttgtc

SEQ ID NO: 2509 - DNA, 122 bp, Homo sapiens
  misc_feature (61)..(62): /note="This region represents a CpG dinucleotide"
  misc_feature (61)..(61): /note="Nucleotide may be methylated to form 5-methylcytosine"
tgcctcaagaacttgtccaggatgaagttgctgaagttgcggttgagctgctcgaattcgcggaaaacggtgcgcaccgggttggggaagtactgcagccagggcatcacgtccaccaggct

SEQ ID NO: 2510 - DNA, 122 bp, Homo sapiens
  misc_feature (61)..(62): /note="This region represents a CpG dinucleotide"
  misc_feature (61)..(61): /note="Nucleotide may be methylated to form 5-methylcytosine"
taaaccccaggacacaggcagtgaccctagacgagcagggcaggtccaggtgacgggaggcgtgccacgtttctccatcccgaagttcttcttggtttttatcctaagtactgatgtcagga

SEQ ID NO: 2511 - DNA, 122 bp, Homo sapiens
  misc_feature (61)..(62): /note="This region represents a CpG dinucleotide"
  misc_feature (61)..(61): /note="Nucleotide may be methylated to form 5-methylcytosine"
gttgaaaaaaagttgagaaatactgggctagaccaaacatgatccattgcctgaagcttacgtattatctattactgatgacaaagagaggcacaggtatggagtggcaaactaacaatgcg

SEQ ID NO: 2512 - DNA, 122 bp, Homo sapiens
  misc_feature (61)..(62): /note="This region represents a CpG dinucleotide"
  misc_feature (61)..(61): /note="Nucleotide may be methylated to form 5-methylcytosine"
cttgtcggttgttattctccagttgcctaccactctctcccatgtgtcatcacgcctcagcgattccttctcaagaaaaggagaagagaaagttgggcatggcattcttgaatggctatggc

SEQ ID NO: 2513 - DNA, 122 bp, Homo sapiens
  misc_feature (61)..(62): /note="This region represents a CpG dinucleotide"
  misc_feature (61)..(61): /note="Nucleotide may be methylated to form 5-methylcytosine"
aaaacatgattaataaacaaaatgaaactgaggttgtgacataaggaagttcacgtgacacgagagggcatgaaggaggaaattcactactagaatacactatgataggatatgatgatcct

SEQ ID NO: 2514 - DNA, 122 bp, Homo sapiens
  misc_feature (61)..(62): /note="This region represents a CpG dinucleotide"
  misc_feature (61)..(61): /note="Nucleotide may be methylated to form 5-methylcytosine"
agtcaccttattaattacaaaagaaatctaggcactaaagataagtagcatggttaccaacgtactcattaaagaactatacagagaggctaaggatgtgaccatctcattccagattggaa

SEQ ID NO: 2515 - DNA, 122 bp, Homo sapiens
  misc_feature (61)..(62): /note="This region represents a CpG dinucleotide"
  misc_feature (61)..(61): /note="Nucleotide may be methylated to form 5-methylcytosine"
ccttctgttctttccctctgctctctttcccttcatagcatttgtctctacctggcattacgtatacacacacctgtgtggggagtatctgggcttatctgttgtttttctaatgtgaacta

SEQ ID NO: 2516 - DNA, 122 bp, Homo sapiens
  misc_feature (61)..(62): /note="This region represents a CpG dinucleotide"
  misc_feature (61)..(61): /note="Nucleotide may be methylated to form 5-methylcytosine"
aacactgctgtgctctcaggacacctagctgagctggcagcacaaaccagtgtgagggcacgcttcacatttagagctggtacttacttctgctagcagaatggagcagtgggagctgaggc

SEQ ID NO: 2517 - DNA, 122 bp, Homo sapiens
  misc_feature (61)..(62): /note="This region represents a CpG dinucleotide"
  misc_feature (61)..(61): /note="Nucleotide may be methylated to form 5-methylcytosine"
aactaaaaatttggaatttgggggactgctgaagtgggtgtatgtctacctttcattttacgtctgagactaagaaaagtagagatgagaaaagcagagaatcttctatgtagaagcatgta

SEQ ID NO: 2518 - DNA, 122 bp, Homo sapiens
  misc_feature (61)..(62): /note="This region represents a CpG dinucleotide"
  misc_feature (61)..(61): /note="Nucleotide may be methylated to form 5-methylcytosine"
ggccaccttggagactatagcttccaggagcttctcattctcacagtaatccacattaagcgtcaagaagtttgtcaaaattacttaagtgttcctaccagtttatggctccagcagcttct

SEQ ID NO: 2519 - DNA, 122 bp, Homo sapiens
  misc_feature (61)..(62): /note="This region represents a CpG dinucleotide"
  misc_feature (61)..(61): /note="Nucleotide may be methylated to form 5-methylcytosine"
tttgctggaaatcagaagtcattaagtatctttgtggttgaaaatgtttggtgtctcaggcggttctacttattgctaaagaggtctaccttgagcttatagtaaatttgtcagttagttga

SEQ ID NO: 2520 - DNA, 122 bp, Homo sapiens
  misc_feature (61)..(62): /note="This region represents a CpG dinucleotide"
  misc_feature (61)..(61): /note="Nucleotide may be methylated to form 5-methylcytosine"
gaatgggggccaacaagagtggccagggctctcctggggcggttttgcgatgtattcctccgctagaattagcctttcgggcctgcgcgcctacaggtttcagaggccagcgggaacggtgg

SEQ ID NO: 2521 - DNA, 122 bp, Homo sapiens
  misc_feature (61)..(62): /note="This region represents a CpG dinucleotide"
  misc_feature (61)..(61): /note="Nucleotide may be methylated to form 5-methylcytosine"
ccactataataatgaaattacatataaacaagactgcatgtaaatgcaactgcaaaaatacgctcagagaagacagaggattaagggagatttaagaaaataacctctgaattattttatta

SEQ ID NO: 2522 - DNA, 122 bp, Homo sapiens
  misc_feature (61)..(62): /note="This region represents a CpG dinucleotide"
  misc_feature (61)..(61): /note="Nucleotide may be methylated to form 5-methylcytosine"
ccacatggaggagctgctctgcagcgctgaagccacgttagcgctccacacccagtcctccgagacagcagggagcccgtctgggccagactcttctgaggatgcttgtgaggatgacagtc

SEQ ID NO: 2523 - DNA, 122 bp, Homo sapiens
  misc_feature (61)..(62): /note="This region represents a CpG dinucleotide"
  misc_feature (61)..(61): /note="Nucleotide may be methylated to form 5-methylcytosine"
tatggaacaaaaagggttcagggagtgtggagtggaatggggaaggagagcattttgaaacgcaaggtcagaaaggttaaaggaagcaagtatatgaaaagtgattttttgttgttgagact

SEQ ID NO: 2524 - DNA, 122 bp, Homo sapiens
  misc_feature (61)..(62): /note="This region represents a CpG dinucleotide"
  misc_feature (61)..(61): /note="Nucleotide may be methylated to form 5-methylcytosine"
ttaaccgactgctctctgaagacttcttgatttggtatttggagacagacatcaccctgacgtacattaggaggcctgtgatcttaggcttgttccagctgtgattcacttcacgtctgatt

SEQ ID NO: 2525 - DNA, 122 bp, Homo sapiens
  misc_feature (61)..(62): /note="This region represents a CpG dinucleotide"
  misc_feature (61)..(61): /note="Nucleotide may be methylated to form 5-methylcytosine"
tatatttatagaacaaaactagttcctacattggcagtgcaggtagggcagaaccagaagcgggacaacacacacagacaccactaacaacagggccgctcccttaggtctggtcttaacca

SEQ ID NO: 2526 - DNA, 122 bp, Homo sapiens
  misc_feature (61)..(62): /note="This region represents a CpG dinucleotide"
  misc_feature (61)..(61): /note="Nucleotide may be methylated to form 5-methylcytosine"
ctcttccttctggcaacagccagagaaagtctgttatccacacaatgcctttctgtctttcgtaagtatgcaatgatgaagatgcattacttgtcatttctgaaaacaaaacaattattaag

SEQ ID NO: 2527 - DNA, 122 bp, Homo sapiens
  misc_feature (61)..(62): /note="This region represents a CpG dinucleotide"
  misc_feature (61)..(61): /note="Nucleotide may be methylated to form 5-methylcytosine"
ctccaaatgcagtctgtagttaatagtaatatacaaagtcgacgtcttagttttgacacacgtaccatggttgcgtaagatgttgacagaagaaactgggtaaaggatatatggaacactgc

SEQ ID NO: 2528 - DNA, 122 bp, Homo sapiens
  misc_feature (61)..(62): /note="This region represents a CpG dinucleotide"
  misc_feature (61)..(61): /note="Nucleotide may be methylated to form 5-methylcytosine"
ggcaaaacaggttacaggagggaaaaagaggagacatggctagcaaagatggttttgttacgtaggtggaaacccacaggtagcaaccctcaaaagatgtagtaaatgtttctttgagatct

SEQ ID NO: 2529 - DNA, 122 bp, Homo sapiens
  misc_feature (61)..(62): /note="This region represents a CpG dinucleotide"
  misc_feature (61)..(61): /note="Nucleotide may be methylated to form 5-methylcytosine"
aaatcatgtttgacaagtgggtattgtgtgctaatcttttctctactcttaaccattctgcgttcttagaatattgaatacggatttagattacatgtgacaaaatgcctgccacataatag

SEQ ID NO: 2530 - DNA, 122 bp, Homo sapiens
  misc_feature (61)..(62): /note="This region represents a CpG dinucleotide"
  misc_feature (61)..(61): /note="Nucleotide may be methylated to form 5-methylcytosine"
tacttggaaggagcaaatgactgtggcctgagcttctgagtaccaaccaaagggctggcacgtgtgagtatgcctggccccactcaggcttattattgcatcacacaggaaagattctttgg

SEQ ID NO: 2531 - DNA, 122 bp, Homo sapiens
  misc_feature (61)..(62): /note="This region represents a CpG dinucleotide"
  misc_feature (61)..(61): /note="Nucleotide may be methylated to form 5-methylcytosine"
tccgggcccggcgagagggcgcgagcacagccgaggccatggaggtgacggcggaccagccgcgctgggtgagccaccaccaccccgccgtgctcaacgggcagcacccggacacgcaccac

SEQ ID NO: 2532 - DNA, 122 bp, Homo sapiens
  misc_feature (61)..(62): /note="This region represents a CpG dinucleotide"
  misc_feature (61)..(61): /note="Nucleotide may be methylated to form 5-methylcytosine"
tcatccatgactttagagaacagacacaagtgtatccagctgtccacgggtggagctacccgttgggcttatgagtgacctggagtgacagctgagtcaccctgggtaagttctcagagtgg

SEQ ID NO: 2533 - DNA, 122 bp, Homo sapiens
  misc_feature (61)..(62): /note="This region represents a CpG dinucleotide"
  misc_feature (61)..(61): /note="Nucleotide may be methylated to form 5-methylcytosine"
aaagggcacatctgatgagttgcagaatcctagagcctgcgtctgtgccgtgacctcccacgcccagttccccggtgcctagcatgtagtaggagctcagtaaatatctgttgtgtaatata

SEQ ID NO: 2534 - DNA, 122 bp, Homo sapiens
  misc_feature (61)..(62): /note="This region represents a CpG dinucleotide"
  misc_feature (61)..(61): /note="Nucleotide may be methylated to form 5-methylcytosine"
tgacctgtgtgagaaggtctgagaattttatgtacatccttcgagtggctggtttcagagcgggagatgcattcactgactcagcactcacatgggtgagtcagcagacaccggcctggggg

SEQ ID NO: 2535 - DNA, 122 bp, Homo sapiens
  misc_feature (61)..(62): /note="This region represents a CpG dinucleotide"
  misc_feature (61)..(61): /note="Nucleotide may be methylated to form 5-methylcytosine"
ggcctcagggacttgcaggggccttcccaagggcttcacaggcagaagcatctcctcatgcggcatgtgactcacctgttattgctgcatttgacagggaagacggaacctgagtcactgag

SEQ ID NO: 2536 - DNA, 122 bp, Homo sapiens
  misc_feature (61)..(62): /note="This region represents a CpG dinucleotide"
  misc_feature (61)..(61): /note="Nucleotide may be methylated to form 5-methylcytosine"
tccaggaatctaagtcagtatttgtggaatcatatgacctgccatcctcatctttatcaccgtcatcatcatggtgagatgtcgtcagctcttgcttcatgctgacgcaagtgatttatagg

SEQ ID NO: 2537 - DNA, 122 bp, Homo sapiens
  misc_feature (61)..(62): /note="This region represents a CpG dinucleotide"
  misc_feature (61)..(61): /note="Nucleotide may be methylated to form 5-methylcytosine"
agcaagcaagttaatccacatgaagggctgcaccgtctggcaggggctttatatagtaagcgagtggctgaaagatgatgggtaaatcacacaagcactcagcttgtttctccttatgtgag

SEQ ID NO: 2538 - DNA, 122 bp, Homo sapiens
  misc_feature (61)..(62): /note="This region represents a CpG dinucleotide"
  misc_feature (61)..(61): /note="Nucleotide may be methylated to form 5-methylcytosine"
aaattaacccagccaaagcgttggggttcaagcgagcgactggaccataaatcagcgtcgcggtggcgtcgggaagctgagcgctcggaggtgcactcagctgcctctgggttcgcccagtc

SEQ ID NO: 2539 - DNA, 122 bp, Homo sapiens
  misc_feature (61)..(62): /note="This region represents a CpG dinucleotide"
  misc_feature (61)..(61): /note="Nucleotide may be methylated to form 5-methylcytosine"
aagatttccaaattagttcaaaatgatctaacatctagacagaaggtacataacggaggacgggaacataaggagtgggaaaaaatagaaggttatgttctttgagaaaacaatttattttc

SEQ ID NO: 2540 - DNA, 122 bp, Homo sapiens
  misc_feature (61)..(62): /note="This region represents a CpG dinucleotide"
  misc_feature (61)..(61): /note="Nucleotide may be methylated to form 5-methylcytosine"
tccatggaaggcaactacagcagcgctgggaagacaaccagcagggcacagaggtgactgcgaggctggaatgaagcaacctgaattacaggcaaatcaatactattaatgattatgtatgg

SEQ ID NO: 2541 - DNA, 122 bp, Homo sapiens
  misc_feature (61)..(62): /note="This region represents a CpG dinucleotide"
  misc_feature (61)..(61): /note="Nucleotide may be methylated to form 5-methylcytosine"
ggtttcccatccctgaacagattgcacaatgtggggaggatcagagggcagggatctagacgtcaggccaactgagagctgacagggaagagagagctagctagtatagacatagacatgag

SEQ ID NO: 2542 - DNA, 122 bp, Homo sapiens
  misc_feature (61)..(62): /note="This region represents a CpG dinucleotide"
  misc_feature (61)..(61): /note="Nucleotide may be methylated to form 5-methylcytosine"
ctttaataagaagatgccaacgtattttctatttcatatcacatgatatatgaacaagcacgagactaggcaatcacagccccttagagctcagcactggatcttgtttaggcagctttacg

SEQ ID NO: 2543 - DNA, 122 bp, Homo sapiens
  misc_feature (61)..(62): /note="This region represents a CpG dinucleotide"
  misc_feature (61)..(61): /note="Nucleotide may be methylated to form 5-methylcytosine"
agtgtacacacatatctgaaacatgcaccaagagctgagccagcaacaccagtgccaccccgagcagcagccaggggcctcactctcctggtgagagctgacctgtccctgctgggtattcc

SEQ ID NO: 2544 - DNA, 122 bp, Homo sapiens
  misc_feature (61)..(62): /note="This region represents a CpG dinucleotide"
  misc_feature (61)..(61): /note="Nucleotide may be methylated to form 5-methylcytosine"
tgcaacacagacgggaacagggcacagccctgtgctggagacttcctacttgggtgctatcgtttggaaatctgtcctcccaaatctcatgctgaaatgtaatccccagtgttggaggtggg

SEQ ID NO: 2545 - DNA, 122 bp, Homo sapiens
  misc_feature (61)..(62): /note="This region represents a CpG dinucleotide"
  misc_feature (61)..(61): /note="Nucleotide may be methylated to form 5-methylcytosine"
tgtacacatgtctaatttatcagtttcttgtagattgtcagcagcctgctgcctccgtaccgccacagtgctcacaactagccgggaggcaagactgcccaactgtcaggtaaattcagatg

SEQ ID NO: 2546 - DNA, 122 bp, Homo sapiens
  misc_feature (61)..(62): /note="This region represents a CpG dinucleotide"
  misc_feature (61)..(61): /note="Nucleotide may be methylated to form 5-methylcytosine"
agtctcctaagaaatgggtcagggaacctttagagaagggatgactaggtgctgggtgcacggcagctagtcagcgttagtgattgttggcttctgtcaattgttgctcaggaaacagattt

SEQ ID NO: 2547 - DNA, 122 bp, Homo sapiens
  misc_feature (61)..(62): /note="This region represents a CpG dinucleotide"
  misc_feature (61)..(61): /note="Nucleotide may be methylated to form 5-methylcytosine"
tcttgctgtgttccctaggctggttttgaactgctgaagaccagccttaagtgattcttccgccttaacctcccaaagtgctgggattacaggtgtgagtcaccgtcttggcctttagtcac

SEQ ID NO: 2548 - DNA, 122 bp, Homo sapiens
  misc_feature (61)..(62): /note="This region represents a CpG dinucleotide"
  misc_feature (61)..(61): /note="Nucleotide may be methylated to form 5-methylcytosine"
tggctcgaatggctgtgattgctgggctgtgtgtccatagcgtcttttaatcccaagttacgtcacagcttagtgatctcagggtttcaaaagaagctgttagtcctcttaagatttagctt

SEQ ID NO: 2549 - DNA, 122 bp, Homo sapiens
  misc_feature (61)..(62): /note="This region represents a CpG dinucleotide"
  misc_feature (61)..(61): /note="Nucleotide may be methylated to form 5-methylcytosine"
aagggcaggggttcagcacagcaggaagaagaaaaagaaacagcacagcagtaggtctggcggcactctgtggctactcaccaggaatttacaaggagaagctgagcaagtggtttttccat

SEQ ID NO: 2550 - DNA, 122 bp, Homo sapiens
  misc_feature (61)..(62): /note="This region represents a CpG dinucleotide"
  misc_feature (61)..(61): /note="Nucleotide may be methylated to form 5-methylcytosine"
gcagttctataatgatcacttgacagtggaagaaacaacttagttaagtaacttgctcaacgtcacaaagcttgcaagtggtataattaggtttaaacaggaagtctgagccctgagtcctc

SEQ ID NO: 2551 - DNA, 122 bp, Homo sapiens
  misc_feature (61)..(62): /note="This region represents a CpG dinucleotide"
  misc_feature (61)..(61): /note="Nucleotide may be methylated to form 5-methylcytosine"
attatactgattccatgggagccatcccatgtattctctgaatctgttccctttttattacgtaatttctaacctacttagtctgattcatatatacagatgtagcaagaggtataaattaa

SEQ ID NO: 2552 - DNA, 122 bp, Homo sapiens
  misc_feature (61)..(62): /note="This region represents a CpG dinucleotide"
  misc_feature (61)..(61): /note="Nucleotide may be methylated to form 5-methylcytosine"
agaagctggactctctcagtgggctgtttgcctgcccctcccttcatttcccataggcttcggtagaagcgtggcctgcagaatcaggaaacagtgctggttaatctgtaagtatgcaacat

SEQ ID NO: 2553 - DNA, 122 bp, Homo sapiens
  misc_feature (61)..(62): /note="This region represents a CpG dinucleotide"
  misc_feature (61)..(61): /note="Nucleotide may be methylated to form 5-methylcytosine"
gggccctaaaccaatctgactggtgttcttttgagaggaggaaatttggacacctagagacgccaggaaggcatttgcatagaggacacagcaggaagtctgcagggcaaggtgagaagtct

SEQ ID NO: 2554 - DNA, 122 bp, Homo sapiens
  misc_feature (61)..(62): /note="This region represents a CpG dinucleotide"
  misc_feature (61)..(61): /note="Nucleotide may be methylated to form 5-methylcytosine"
ttgtaagccagccggactatcaggaagtgtgaatcaacaggataaatttctctctcatagcgcaagtgctggtcatccaaccagctcattgttgtttatgttgactgtttcaaactctttct

SEQ ID NO: 2555 - DNA, 122 bp, Homo sapiens
  misc_feature (61)..(62): /note="This region represents a CpG dinucleotide"
  misc_feature (61)..(61): /note="Nucleotide may be methylated to form 5-methylcytosine"
gtgggtggaggctcctctcccttagtcaccctaattgaggaacattctagcaaaagcaaacgcctcagtgtttaactgacaggaggttgtcactccaatctgcaaagggcttgcctgtggaa

SEQ ID NO: 2556 - DNA, 122 bp, Homo sapiens
  misc_feature (61)..(62): /note="This region represents a CpG dinucleotide"
  misc_feature (61)..(61): /note="Nucleotide may be methylated to form 5-methylcytosine"
ataagcaagcacacacatatcgggtacaccccagggcaccaattccagaatagttatcatcgcaaagcttcctgtggcctttcaacagttttctgaacatattttagacactaaaatcatca

SEQ ID NO: 2557 - DNA, 122 bp, Homo sapiens
  misc_feature (61)..(62): /note="This region represents a CpG dinucleotide"
  misc_feature (61)..(61): /note="Nucleotide may be methylated to form 5-methylcytosine"
ggctgctggctgaggttaaatgagagcatgtgggtgagccacagttcagtgcatggcatgcgggaggccttcagtaagtggtagctaccccgtcatcatcactgtcacctgggatgtctcca

SEQ ID NO: 2558 - DNA, 122 bp, Homo sapiens
  misc_feature (61)..(62): /note="This region represents a CpG dinucleotide"
  misc_feature (61)..(61): /note="Nucleotide may be methylated to form 5-methylcytosine"
aaaaatgttccttatgttaatcatacatttgacaatgaaaaggaaatgtagatagtgtgacggaggcagattaaatcagacctcagtttcaatactctgcgttactgggtgcaacacgagac

SEQ ID NO: 2559 - DNA, 122 bp, Homo sapiens
  misc_feature (61)..(62): /note="This region represents a CpG dinucleotide"
  misc_feature (61)..(61): /note="Nucleotide may be methylated to form 5-methylcytosine"
aagtgcttgggctctcagctagatttttgggttccacttaaattaggcaagtcactgactcgttcagtgcctcagttcctttgtaagaataatgatacctgtttcacaggatgggtaggagg

SEQ ID NO: 2560 - DNA, 122 bp, Homo sapiens
  misc_feature (61)..(62): /note="This region represents a CpG dinucleotide"
  misc_feature (61)..(61): /note="Nucleotide may be methylated to form 5-methylcytosine"
acctcttgatccacccgcctcagcctcccaaagtgctgggattacaggtgtaagctaccacgcccggccttgtgtgcatttcaatggctgctgttgactcacacttatgtgtcattaataaa

SEQ ID NO: 2561 - DNA, 122 bp, Homo sapiens
  misc_feature (61)..(62): /note="This region represents a CpG dinucleotide"
  misc_feature (61)..(61): /note="Nucleotide may be methylated to form 5-methylcytosine"
gttccaaagagttacggttcctcatttactggagaaagtatagatgccagaagggtagctcggctgctaacagcaagaaattacccagcccacatttccagtctaggtgtggtagtgctttg

SEQ ID NO: 2562 - DNA, 122 bp, Homo sapiens
  misc_feature (61)..(62): /note="This region represents a CpG dinucleotide"
  misc_feature (61)..(61): /note="Nucleotide may be methylated to form 5-methylcytosine"
ctcagtgcctcatttgcaccttcaaaatatgcacatacatgtgtgggccagaaaaggctgcgctcaggacatgcattcttatgtgaaccgtaggtaattgcacaagcaaacaggaagttgcg

SEQ ID NO: 2563 - DNA, 122 bp, Homo sapiens
  misc_feature (61)..(62): /note="This region represents a CpG dinucleotide"
  misc_feature (61)..(61): /note="Nucleotide may be methylated to form 5-methylcytosine"
tagctacaaggcctgggctacagcagagacagcccagcagggagggagagggtggtggagcggagggcaggagagagagtgcttctctgtgctgcctcctctgcttggctcagaaagtgtgc

SEQ ID NO: 2564 - DNA, 122 bp, Homo sapiens
  misc_feature (61)..(62): /note="This region represents a CpG dinucleotide"
  misc_feature (61)..(61): /note="Nucleotide may be methylated to form 5-methylcytosine"
ccacatcttgtgcattctttcctctgttttccttttgactttaaatggaaagagagcaggcgtatgcgccagcagcattctatgcctgtgactcctgagtagccttttccctctcctttttc

SEQ ID NO: 2565 - DNA, 122 bp, Homo sapiens
  misc_feature (61)..(62): /note="This region represents a CpG dinucleotide"
  misc_feature (61)..(61): /note="Nucleotide may be methylated to form 5-methylcytosine"
cttgtttaaaattagtgcttccaggcatgtctacttgctgtctgggacaacacagggaagcgtcccgggcacctcatgttgcaatcatgttcaaagcctgggctttggtatcaaattgcctg

SEQ ID NO: 2566 - DNA, 122 bp, Homo sapiens
  misc_feature (61)..(62): /note="This region represents a CpG dinucleotide"
  misc_feature (61)..(61): /note="Nucleotide may be methylated to form 5-methylcytosine"
aaaggaattgtttaaatcaactataattaagctgatggttgcatttcaggctttgaattccgatcaagtttcaaattggttattattttggaggttgtgctttcatgttcctaggtatttct

SEQ ID NO: 2567 - DNA, 122 bp, Homo sapiens
  misc_feature (61)..(62): /note="This region represents a CpG dinucleotide"
  misc_feature (61)..(61): /note="Nucleotide may be methylated to form 5-methylcytosine"
tcatggcatattccaaccaggaaatacttagcataaggataacattgataaatgacattacgaaaatggttaagaggccggcacagtggctcacagtggcctgtaatcccagcactttgcga

SEQ ID NO: 2568 - DNA, 122 bp, Homo sapiens
  misc_feature (61)..(62): /note="This region represents a CpG dinucleotide"
  misc_feature (61)..(61): /note="Nucleotide may be methylated to form 5-methylcytosine"
atatttttgtaaatactgtttactgtaaatacaatttactgaaatctcaagtttggaaatcggtcacaaatactgctcagtagactcattatagttacagaacaaagtttaaatattacaaa

SEQ ID NO: 2569 - DNA, 122 bp, Homo sapiens
  misc_feature (61)..(62): /note="This region represents a CpG dinucleotide"
  misc_feature (61)..(61): /note="Nucleotide may be methylated to form 5-methylcytosine"
tccttagcgtggaggccagtctggccgggtgctgagctcgtcctgcagaacacgcgtgaacgcctcatccctgagggccccgggaggctggcgccctctgtgggaggtctgaggttggccca

SEQ ID NO: 2570 - DNA, 122 bp, Homo sapiens
  misc_feature (61)..(62): /note="This region represents a CpG dinucleotide"
  misc_feature (61)..(61): /note="Nucleotide may be methylated to form 5-methylcytosine"
accttgtgatccgcccaccttggcctcccaaagtgctgggattacaggcgtgagccaccacgcccggccaattcatatgggttttagtgtgttcacaatgttattgtgaccatcaccactat

SEQ ID NO: 2571 - DNA, 122 bp, Homo sapiens
  misc_feature (61)..(62): /note="This region represents a CpG dinucleotide"
  misc_feature (61)..(61): /note="Nucleotide may be methylated to form 5-methylcytosine"
agaatcctatgaaaagcaaacagcaggaggccagcttatacatgatcgccacaagatagacggcttccttcttggcttctgttgtagagaactttcaactgtctcctcattctgcctgctca

SEQ ID NO: 2572 - DNA, 122 bp, Homo sapiens
  misc_feature (61)..(62): /note="This region represents a CpG dinucleotide"
  misc_feature (61)..(61): /note="Nucleotide may be methylated to form 5-methylcytosine"
tatgtactttaccttcctgttctgcttataaatactcattgcttacagttgcagagctctcggaacctcttctggttctgagtactgcctgattcaagaatcattctttactcaaataaact

SEQ ID NO: 2573 - DNA, 122 bp, Homo sapiens
  misc_feature (61)..(62): /note="This region represents a CpG dinucleotide"
  misc_feature (61)..(61): /note="Nucleotide may be methylated to form 5-methylcytosine"
cagccaggctctgccgagtcatcctgagatcagccctatgcagagaagcgaatctcaaaacgccagcctccaagaatagaaggctccagagactgtgcaaccaagactaacaaactggaaaa

SEQ ID NO: 2574 - DNA, 122 bp, Homo sapiens
  misc_feature (61)..(62): /note="This region represents a CpG dinucleotide"
  misc_feature (61)..(61): /note="Nucleotide may be methylated to form 5-methylcytosine"
actgagattctcactctgcagcctgtgatttaactgtaattatgggtcttattttgggggcgtgagttggggaacaggaaataagtcagcctcaaggtagatacataaattataggagagga

SEQ ID NO: 2575 - DNA, 122 bp, Homo sapiens
  misc_feature (61)..(62): /note="This region represents a CpG dinucleotide"
  misc_feature (61)..(61): /note="Nucleotide may be methylated to form 5-methylcytosine"
caaaagcttatgttactcatccttttattttgtaaggggaggaaatggagatccagtgtgcgttaatttgttggcctaagattacacagctactaaatggcagagccaggatccggtttttc

SEQ ID NO: 2576 - DNA, 122 bp, Homo sapiens
  misc_feature (61)..(62): /note="This region represents a CpG dinucleotide"
  misc_feature (61)..(61): /note="Nucleotide may be methylated to form 5-methylcytosine"
acctgctcagaacacgtctgggacggctctgttcgtgggagacacacacagaccagtctgcgtcagcaggaaataagagtgagcagggttctagaactctgaaaccttgggactagaagtgt

SEQ ID NO: 2577 - DNA, 122 bp, Homo sapiens
  misc_feature (61)..(62): /note="This region represents a CpG dinucleotide"
  misc_feature (61)..(61): /note="Nucleotide may be methylated to form 5-methylcytosine"
ttgtccacaaagatttaattgcaacctccaacagggttcattcagacccttagctccctgcgtcaaaggcaggaaggcagggctggagaggataaagagagggcagatattagcctaagcaa

SEQ ID NO: 2578 - DNA, 122 bp, Homo sapiens
  misc_feature (61)..(62): /note="This region represents a CpG dinucleotide"
  misc_feature (61)..(61): /note="Nucleotide may be methylated to form 5-methylcytosine"
actcaggccctatagacctcacagtgaacatactcacaatgggctactggccaacatacacgcccatggaagtgcacttaaccccagaagtaagtgtgcagaaagcatgctgtccgctcccg

SEQ ID NO: 2579 - DNA, 122 bp, Homo sapiens
  misc_feature (61)..(62): /note="This region represents a CpG dinucleotide"
  misc_feature (61)..(61): /note="Nucleotide may be methylated to form 5-methylcytosine"
caggacaaccagataaaccacattcctttgacagccttctcaaatctgcgtaagctggaacggctggatatatccaacaaccaactgcggatgctgactcaaggggtttttgataatctctc

SEQ ID NO: 2580 - DNA, 122 bp, Homo sapiens
  misc_feature (61)..(62): /note="This region represents a CpG dinucleotide"
  misc_feature (61)..(61): /note="Nucleotide may be methylated to form 5-methylcytosine"
ccatttgccattttcttctcttgctacagagcccacttcagaggattcaatgagtgaatacgacaacggtgcttggatcagtgcctgccatactgtcagcactagtcgttactattttcact

SEQ ID NO: 2581 - DNA, 122 bp, Homo sapiens
  misc_feature (61)..(62): /note="This region represents a CpG dinucleotide"
  misc_feature (61)..(61): /note="Nucleotide may be methylated to form 5-methylcytosine"
ccatggctaccactttgaatttattgataacttttttattattctcacatttcatgacagcgttatcaatttctgagagatgatataaagacacttcagactttatttcctgcttccttaaa

SEQ ID NO: 2582 - DNA, 122 bp, Homo sapiens
  misc_feature (61)..(62): /note="This region represents a CpG dinucleotide"
  misc_feature (61)..(61): /note="Nucleotide may be methylated to form 5-methylcytosine"
cgctgggcctcggttttcccatctgtgacatgggaacgtgggcctggaccaagagaactccggaggcccttcccgctcgggcccgggggttggggaggggtgaagttcgtagcgtgagcagg

SEQ ID NO: 2583 - DNA, 122 bp, Homo sapiens
  misc_feature (61)..(62): /note="This region represents a CpG dinucleotide"
  misc_feature (61)..(61): /note="Nucleotide may be methylated to form 5-methylcytosine"
attatttaattcaggagcaacaaaagttgttcaagaagaaaacacagtaatagcaccctacgtggctcaactgtgaataacaggtacactgtcagtcatataaatcctgaataccgacctaa

SEQ ID NO: 2584 - DNA, 122 bp, Homo sapiens
  misc_feature (61)..(62): /note="This region represents a CpG dinucleotide"
  misc_feature (61)..(61): /note="Nucleotide may be methylated to form 5-methylcytosine"
actcctttgcgtgtgttccatgggactctctttctgggttccccatgcttatagttgcctcgtgtcacaagacagatactaatgtcaggtttgtggcttcctgatggtttgggtggggcccc

SEQ ID NO: 2585 - DNA, 122 bp, Homo sapiens
  misc_feature (61)..(62): /note="This region represents a CpG dinucleotide"
  misc_feature (61)..(61): /note="Nucleotide may be methylated to form 5-methylcytosine"
taagaggttgttgatgaatttgaggtttttaaggccactaccaaggtaatggaaatgggacgagaatggaagagccattatgtaagagaccagtcacggctgtgtggagaacgaaatcaaga

SEQ ID NO: 2586 - DNA, 122 bp, Homo sapiens
  misc_feature (61)..(62): /note="This region represents a CpG dinucleotide"
  misc_feature (61)..(61): /note="Nucleotide may be methylated to form 5-methylcytosine"
tgtgctagtattatgcaggatttgcacatgcaagataaagtcatgagctaagaaaacagacgggagattttagtaatgctcttgacatgttagtgaagattgatgttctcaaagagtggtct

SEQ ID NO: 2587 - DNA, 122 bp, Homo sapiens
  misc_feature (61)..(62): /note="This region represents a CpG dinucleotide"
  misc_feature (61)..(61): /note="Nucleotide may be methylated to form 5-methylcytosine"
ctattaatgaacatcctctaagctgcacttaagccaaatcccaagggataattagggatacggaacaatgatacaatgtagattgccagtttgcttgaagctcccaacatccaattagaggg

SEQ ID NO: 2588 - DNA, 122 bp, Homo sapiens
  misc_feature (61)..(62): /note="This region represents a CpG dinucleotide"
  misc_feature (61)..(61): /note="Nucleotide may be methylated to form 5-methylcytosine"
catactttttgtatgtatacccttatttctctccataacacatcacagattttataagcacgtcagtctctctcactaaggcattttcttccttttcccataatgcctagcaattaatatgt

SEQ ID NO: 2589 - DNA, 122 bp, Homo sapiens
  misc_feature (61)..(62): /note="This region represents a CpG dinucleotide"
  misc_feature (61)..(61): /note="Nucleotide may be methylated to form 5-methylcytosine"
aaatttgcatgtcatttttgcagaggcgccatgctaatctctatattgttccaactttagcgtatatgatgctaaaattgagcaccagtgtgatccttttaagcagaaatcagatcatgtca

SEQ ID NO: 2590 - DNA, 122 bp, Homo sapiens
  misc_feature (61)..(62): /note="This region represents a CpG dinucleotide"
  misc_feature (61)..(61): /note="Nucleotide may be methylated to form 5-methylcytosine"
tcatggtttgtaacaatttctttgtgaattgccctcagaattctgagacaacaaacacgtcgtgtgtctactaccacgtgctgaagaattcagacaccattattctggatgattacaaatct

SEQ ID NO: 2591 - DNA, 122 bp, Homo sapiens
  misc_feature (61)..(62): /note="This region represents a CpG dinucleotide"
  misc_feature (61)..(61): /note="Nucleotide may be methylated to form 5-methylcytosine"
ttgttgcataaaagcagctgtagatgatacacaaatgggtgaggctgtattccaatgaaacgttatttgcaaaaacaggtggtagattaaatttggtcccaaggcttacttgggaaaaaaaa

SEQ ID NO: 2592 - DNA, 122 bp, Homo sapiens
  misc_feature (61)..(62): /note="This region represents a CpG dinucleotide"
  misc_feature (61)..(61): /note="Nucleotide may be methylated to form 5-methylcytosine"
ctgctgatttggttgtaatgaaacaaccttgcccagcccacattatttcatctcaatatgcgttagcatgactgctacagttctccaagttctgggctgcctcagggaaaaagtctgcccat

SEQ ID NO: 2593 - DNA, 122 bp, Homo sapiens
  misc_feature (61)..(62): /note="This region represents a CpG dinucleotide"
  misc_feature (61)..(61): /note="Nucleotide may be methylated to form 5-methylcytosine"
gccatccccaagaacacacaacagcaacagccccacccttcatcacaaagctgtgcagaacgtctcagtgacgtgctagttttgaacaatgatacaatagggttgttgccaaccacagggaa

SEQ ID NO: 2594 - DNA, 122 bp, Homo sapiens
  misc_feature (61)..(62): /note="This region represents a CpG dinucleotide"
  misc_feature (61)..(61): /note="Nucleotide may be methylated to form 5-methylcytosine"
aggaattttccccaggcatggagatgtacaatgtcccatattcatggcacttttgccaaacgcagaacctgtttagcaaggtttctgtttctacctcatgtgtagtggtgttgcaatagtgc

SEQ ID NO: 2595 - DNA, 122 bp, Homo sapiens
  misc_feature (61)..(62): /note="This region represents a CpG dinucleotide"
  misc_feature (61)..(61): /note="Nucleotide may be methylated to form 5-methylcytosine"
ggcccccttcatagtgttgtttaggaagattgagtgaaatgagcaaaatcctcaggcaagcgagaggcacatggtatgtgcttattaagcattagctgtagtattgtcacgtctttgctcta

SEQ ID NO: 2596 - DNA, 122 bp, Homo sapiens
  misc_feature (61)..(62): /note="This region represents a CpG dinucleotide"
  misc_feature (61)..(61): /note="Nucleotide may be methylated to form 5-methylcytosine"
catcccaccatattcattaagacttagccaatgacctcaggggtgccaaccaacttgaaacgtcactggaagctcagaactctcatttgggttcttagggtcaactcataaaacacaaaacc

SEQ ID NO: 2597 - DNA, 122 bp, Homo sapiens
  misc_feature (61)..(62): /note="This region represents a CpG dinucleotide"
  misc_feature (61)..(61): /note="Nucleotide may be methylated to form 5-methylcytosine"
agatttcaccaattattccagctgtttactggaaaccacaaaaagcacactgactgacatcgccactacgtgtctttcttttaggggcataataaagtaggaaacacatttattgtcctcca

SEQ ID NO: 2598 - DNA, 122 bp, Homo sapiens
  misc_feature (61)..(62): /note="This region represents a CpG dinucleotide"
  misc_feature (61)..(61): /note="Nucleotide may be methylated to form 5-methylcytosine"
ggggaggggttttctcttcagcttagggtttcatagctattctctcagagatgggggtaccgtgacattgggcagaatactgaaagatacttgccttcatgttttggggctagtccctagtt

SEQ ID NO: 2599 - DNA, 122 bp, Homo sapiens
  misc_feature (61)..(62): /note="This region represents a CpG dinucleotide"
  misc_feature (61)..(61): /note="Nucleotide may be methylated to form 5-methylcytosine"
caataggctattccatatagccttaggtgtgtagcaggcttatgaaagtacactctatgacgttggcacaatgaaaaaaatcacccagcaatgaacttctcagaacatatccccattgttag

SEQ ID NO: 2600 - DNA, 122 bp, Homo sapiens
  misc_feature (61)..(62): /note="This region represents a CpG dinucleotide"
  misc_feature (61)..(61): /note="Nucleotide may be methylated to form 5-methylcytosine"
atacagagctatgtaaagcaatgcaaatatgtcaacatgacaaaaatttgtgtgagtaggcgacatgaatcagcaacatgatgatgataatgatgatgatgatgattattgacatttactgg

SEQ ID NO: 2601 - DNA, 122 bp, Homo sapiens
  misc_feature (61)..(62): /note="This region represents a CpG dinucleotide"
  misc_feature (61)..(61): /note="Nucleotide may be methylated to form 5-methylcytosine"
gtttagatacacaagtactgaccattgtgtttcaacagcctgcagtattcaggacagccacgtgctgggcaggtttgtagccgaggagtaataggctatatcgtatagcctgggtgtatagt

SEQ ID NO: 2602 - DNA, 122 bp, Homo sapiens
  misc_feature (61)..(62): /note="This region represents a CpG dinucleotide"
  misc_feature (61)..(61): /note="Nucleotide may be methylated to form 5-methylcytosine"
gacaccagaggggaaaagcctcacagagcaggaacaccccccgccgccaggtgctgggtgcgccggctcggtcactagcctgccgcttccccttcttccccggtggtcagagcagccccgga

SEQ ID NO: 2603 - DNA, 122 bp, Homo sapiens
  misc_feature (61)..(62): /note="This region represents a CpG dinucleotide"
  misc_feature (61)..(61): /note="Nucleotide may be methylated to form 5-methylcytosine"
aaaagaggcttctactactcaagcagagagaagccttctacagggaagaaaacagacacacggatgtacagttgcttcatgctgttgagttgcaatgtgttttctgtctctcagcctggaag

SEQ ID NO: 2604 - DNA, 122 bp, Homo sapiens
  misc_feature (61)..(62): /note="This region represents a CpG dinucleotide"
  misc_feature (61)..(61): /note="Nucleotide may be methylated to form 5-methylcytosine"
aaaagaagaagagtgtaccttatcttctaagtatgaaagtctaattctgtaggcctatgtcgcaaatagtgccccacgaggaaatgcagggaggaggcaagtagcatattcctatatacatt

SEQ ID NO: 2605 - DNA, 122 bp, Homo sapiens
  misc_feature (61)..(62): /note="This region represents a CpG dinucleotide"
  misc_feature (61)..(61): /note="Nucleotide may be methylated to form 5-methylcytosine"
tgccctaggatgactcttacggttctggctctctaggtgcttctatgtataaactgcaggcgtcaatgctctagaaataggccatccatcagcttgtgccatctgtaaggctgtgtctcagt

SEQ ID NO: 2606 - DNA, 122 bp, Homo sapiens
  misc_feature (61)..(62): /note="This region represents a CpG dinucleotide"
  misc_feature (61)..(61): /note="Nucleotide may be methylated to form 5-methylcytosine"
ttgtcttatttctaggttgctcttgggccataggccttcttggtgacagaagtgatgaaccggaggttaagcagagagtaggtaggcggggctcaaggggtggggccaagccaaagggctct

SEQ ID NO: 2607 - DNA, 122 bp, Homo sapiens
  misc_feature (61)..(62): /note="This region represents a CpG dinucleotide"
  misc_feature (61)..(61): /note="Nucleotide may be methylated to form 5-methylcytosine"
cctcgacctgatcagctggctccactgtgtgtttccagtgtgaggtgtgaggtcaccatccgctgccattacacaaagacccatttcccctgggccattgctcaagtatgacagagctgatt

SEQ ID NO: 2608 - DNA, 122 bp, Homo sapiens
  misc_feature (61)..(62): /note="This region represents a CpG dinucleotide"
  misc_feature (61)..(61): /note="Nucleotide may be methylated to form 5-methylcytosine"
gcatttgtgtacattagaatgcaaactaagttcttttcaaagggcacaacagttcaacttcgtctcctcccagccctgctcttctggtttattttttgttgcttgaacaaaagacaaacttt

SEQ ID NO: 2609 - DNA, 122 bp, Homo sapiens
  misc_feature (61)..(62): /note="This region represents a CpG dinucleotide"
  misc_feature (61)..(61): /note="Nucleotide may be methylated to form 5-methylcytosine"
caaacccctgacctcaagcgatccgcccgcctcagcctcccaaagtgttgggattacaggcgtgagccactgcacgcccagcctgggtggtggctttttagtaaagacaagatccagggtgt

SEQ ID NO: 2610 - DNA, 122 bp, Homo sapiens
  misc_feature (61)..(62): /note="This region represents a CpG dinucleotide"
  misc_feature (61)..(61): /note="Nucleotide may be methylated to form 5-methylcytosine"
tgctattgttaatctatgagttgcttcaccatttcctgtttggtttctcatctcttctgtcgcctgcataattaggtcgtgtatttaattccctctgtctaaaatattagaggagttactgt

SEQ ID NO: 2611 - DNA, 122 bp, Homo sapiens
  misc_feature (61)..(62): /note="This region represents a CpG dinucleotide"
  misc_feature (61)..(61): /note="Nucleotide may be methylated to form 5-methylcytosine"
ccagagaattaatttgctaatttacagtgattcagattcagctgccatttgttttgagcacgttacatgtcaaacactgagcttgaggctttctcaccaatgatctcatttaagcctctcag

SEQ ID NO: 2612 - DNA, 122 bp, Homo sapiens
  misc_feature (61)..(62): /note="This region represents a CpG dinucleotide"
  misc_feature (61)..(61): /note="Nucleotide may be methylated to form 5-methylcytosine"
tggccaacatagtgaagccctgtctctagtaaaaatacaaaaattagctaggcgtggtggcgtgcgcctataatcccagatactaggaggccaaggcacaacaatcacttgaacccaggagg

SEQ ID NO: 2613 - DNA, 122 bp, Homo sapiens
  misc_feature (61)..(62): /note="This region represents a CpG dinucleotide"
  misc_feature (61)..(61): /note="Nucleotide may be methylated to form 5-methylcytosine"
tgctctgaagggtatttgcctatgagggaattaactgtacactatttaatccaccagttccggttcattagaaaaatgcagttctcgccggacatggtggctcacacctgtaatcccagcaa

SEQ ID NO: 2614 - DNA, 122 bp, Homo sapiens
  misc_feature (61)..(62): /note="This region represents a CpG dinucleotide"
  misc_feature (61)..(61): /note="Nucleotide may be methylated to form 5-methylcytosine"
ctgcaatattggctacacatagctgacttaataaatagtcccttgactggtataagctgacgttacaaaaactggtaattccgaaaccactcatactggacttattaaataatccctcaact

SEQ ID NO: 2615 - DNA, 122 bp, Homo sapiens
  misc_feature (61)..(62): /note="This region represents a CpG dinucleotide"
  misc_feature (61)..(61): /note="Nucleotide may be methylated to form 5-methylcytosine"
cggcctctcccattatgtatctcaaggttgaatccaggaaagaaaggcaggacaagttcacgtcctgagggaagtggcccaagtaggtccttgtagcacatacttgtccaactattgacctg

SEQ ID NO: 2616 - DNA, 122 bp, Homo sapiens
  misc_feature (61)..(62): /note="This region represents a CpG dinucleotide"
  misc_feature (61)..(61): /note="Nucleotide may be methylated to form 5-methylcytosine"
atcttttgtttatggtccactgtgaggcactggacaacaattcttagaaccatgttcatccgtacagctgctagtctgggaactgcttaataatagatcccaagacacaaaagcgttttcat

SEQ ID NO: 2617 - DNA, 122 bp, Homo sapiens
  misc_feature (61)..(62): /note="This region represents a CpG dinucleotide"
  misc_feature (61)..(61): /note="Nucleotide may be methylated to form 5-methylcytosine"
aaccacattctcttcagttacctattcactctcaactagaaaaatgacaccatttctggccgggcgaggtagctcatgcctgtaataccagcactttgggaggccgaggcgggtggatcaca

SEQ ID NO: 2618 - DNA, 122 bp, Homo sapiens
  misc_feature (61)..(62): /note="This region represents a CpG dinucleotide"
  misc_feature (61)..(61): /note="Nucleotide may be methylated to form 5-methylcytosine"
cctaggacagaccaagccagtacgcatgggagaggaaagacaggaagaacctgagcctgacgctgctgctgagtcacagattagcccattctggagctgccatcacctccccgcttcctgct

SEQ ID NO: 2619 - DNA, 122 bp, Homo sapiens
  misc_feature (61)..(62): /note="This region represents a CpG dinucleotide"
  misc_feature (61)..(61): /note="Nucleotide may be methylated to form 5-methylcytosine"
ctcagtgggcagagcctctgttttgttctcagctctttctcctctccacaggactcagcacgagtactgttggtctgactggtcccactcgatttgccctgaattgcattagctgggaacag

SEQ ID NO: 2620 - DNA, 122 bp, Homo sapiens
  misc_feature (61)..(62): /note="This region represents a CpG dinucleotide"
  misc_feature (61)..(61): /note="Nucleotide may be methylated to form 5-methylcytosine"
ttagctgaagaggaagggctggaaagcgagaggctcagagatctggcagaacaactctggcgagtcaggaagacctaatcagaattaaacgtgtagccaattcaagagagtttgtaagcgag

SEQ ID NO: 2621 - DNA, 122 bp, Homo sapiens
  misc_feature (61)..(62): /note="This region represents a CpG dinucleotide"
  misc_feature (61)..(61): /note="Nucleotide may be methylated to form 5-methylcytosine"
acttttaatacagcatctcaaccaccacctctgggttaggtccttcataatctgtagaaccgaaatcttttaatgtggcattcaggaccctccaaggtggtcccaccccacccaccactctc

SEQ ID NO: 2622 - DNA, 122 bp, Homo sapiens
  misc_feature (61)..(62): /note="This region represents a CpG dinucleotide"
  misc_feature (61)..(61): /note="Nucleotide may be methylated to form 5-methylcytosine"
ctcctaatatcttcctagacttatgctttccttggaattccagcaatagaactgcatactcgtaccctaatcaagaaccttttatgtactaggtgctctactagacatgagataaaaagata

SEQ ID NO: 2623 - DNA, 122 bp, Homo sapiens
  misc_feature (61)..(62): /note="This region represents a CpG dinucleotide"
  misc_feature (61)..(61): /note="Nucleotide may be methylated to form 5-methylcytosine"
taaaggattacataaattatgtaagactctggcctagtgcttggcacagacactgaggtccgtgagtgtgagcctaaggagtcccagggagaggagaagtaaatgtgtatgccccctctccc

SEQ ID NO: 2624 - DNA, 122 bp, Homo sapiens
  misc_feature (61)..(62): /note="This region represents a CpG dinucleotide"
  misc_feature (61)..(61): /note="Nucleotide may be methylated to form 5-methylcytosine"
tgctgcggcttcagtcttcctccacctcccctctcttgggcatggcatccccatggaggacgtgcagcctcagccaggtgctgctcaccactgctgagagctgatctccagcggccaggacc

SEQ ID NO: 2625 - DNA, 122 bp, Homo sapiens
  misc_feature (61)..(62): /note="This region represents a CpG dinucleotide"
  misc_feature (61)..(61): /note="Nucleotide may be methylated to form 5-methylcytosine"
ctttgggccatatggtaaagttgcaataaaggtctttttagaaataattgagaccaggcacggtgtgtatataaagatgaatactacaggtttgttttttactggcacaagtagagagaggg

SEQ ID NO: 2626 - DNA, 122 bp, Homo sapiens
  misc_feature (61)..(62): /note="This region represents a CpG dinucleotide"
  misc_feature (61)..(61): /note="Nucleotide may be methylated to form 5-methylcytosine"
tgggaagagtttcccaaacccatgtgctgtcatatccatccttgagagcccttcccatgacgtgacagataacaagggcctcagaagtcacctgcagaggccttaggaactggtaacacttg

SEQ ID NO: 2627 - DNA, 122 bp, Homo sapiens
  misc_feature (61)..(62): /note="This region represents a CpG dinucleotide"
  misc_feature (61)..(61): /note="Nucleotide may be methylated to form 5-methylcytosine"
acaacgccgccgctgctgtgccattttttggcggcgggtctgtgctacgcgctgccgagccggctccccatgccaggtgagtgcccgccctgcccgcccaggcgtcctcagagcgtgctact

SEQ ID NO: 2628 - DNA, 122 bp, Homo sapiens
  misc_feature (61)..(62): /note="This region represents a CpG dinucleotide"
  misc_feature (61)..(61): /note="Nucleotide may be methylated to form 5-methylcytosine"
ctttgtattgcactctagtgaaaaccagccggaccagcagggggtggcacagaaaagaggcgagaatgtgagattaatagagtgctagcaagacaacagaaaatcccaggcagcagtttcac

SEQ ID NO: 2629 - DNA, 122 bp, Homo sapiens
  misc_feature (61)..(62): /note="This region represents a CpG dinucleotide"
  misc_feature (61)..(61): /note="Nucleotide may be methylated to form 5-methylcytosine"
ggccctggagcgtgaagggctggaagctgaagctgcatcagcctcatggtgaatccgcctcggggctggaggaagggcccagaggcgatctgagcaccacccgccttcacaaaggccctgcc

SEQ ID NO: 2630 - DNA, 122 bp, Homo sapiens
  misc_feature (61)..(62): /note="This region represents a CpG dinucleotide"
  misc_feature (61)..(61): /note="Nucleotide may be methylated to form 5-methylcytosine"
tgtttgggatactctgaatcaggagactgaactggccaatgtgccaatagctttgtgtggcgctatcctagatgtcaagccagcacattaggaaggttaggaaggttagaatagattacccc

SEQ ID NO: 2631 - DNA, 122 bp, Homo sapiens
  misc_feature (61)..(62): /note="This region represents a CpG dinucleotide"
  misc_feature (61)..(61): /note="Nucleotide may be methylated to form 5-methylcytosine"
agcagtcaggtagaatggcaggtcatgccctggcccttaaagtccgcttgggtgtgtgcacgttcttccgttcacatttcattggccaaagcaaatcacaaacccacccttaacttcgaaga

SEQ ID NO: 2632 - DNA, 122 bp, Homo sapiens
  misc_feature (61)..(62): /note="This region represents a CpG dinucleotide"
  misc_feature (61)..(61): /note="Nucleotide may be methylated to form 5-methylcytosine"
aattctaagaatagggcccaagaatctacggtctagggagcttccaggcgattctcattacgccaaagctgggaaaccactgcaatattgggttgttgccagtgaagagtttgctaaactcc

SEQ ID NO: 2633 - DNA, 122 bp, Homo sapiens
  misc_feature (61)..(62): /note="This region represents a CpG dinucleotide"
  misc_feature (61)..(61): /note="Nucleotide may be methylated to form 5-methylcytosine"
cacagattctcttgcgtaacaccagttgcatgtcagcagggtggctgagctggaccgtcacgcgcacgatcaggaacaaccgctcgtccacgggcgtgcccctgctgagctgagggcagcca

SEQ ID NO: 2634 - DNA, 122 bp, Homo sapiens
  misc_feature (61)..(62): /note="This region represents a CpG dinucleotide"
  misc_feature (61)..(61): /note="Nucleotide may be methylated to form 5-methylcytosine"
gttttgaaaaatggaaacattgtacaaatgtgagatgttgtgcaacatgtcactgaaacacggtggtataagagaagttttgggaaccagcagaccagaattaggcctgagaaaatcttaca

SEQ ID NO: 2635 - DNA, 122 bp, Homo sapiens
  misc_feature (61)..(62): /note="This region represents a CpG dinucleotide"
  misc_feature (61)..(61): /note="Nucleotide may be methylated to form 5-methylcytosine"
tgccacagccacctgagtagccgggattacaggcgtgagccaccacgcccggcctcagcacgaattatagctgctgcaatgtatttattctcacaaagcacaagtggagctttttgtcttcg

SEQ ID NO: 2636 - DNA, 122 bp, Homo sapiens
  misc_feature (61)..(62): /note="This region represents a CpG dinucleotide"
  misc_feature (61)..(61): /note="Nucleotide may be methylated to form 5-methylcytosine"
ctcaagtgatcctctcacctcggcctcccaaagtgctgggattgcaggcataagctaccgcgcagggcagcattagcactcttaaatagtattctgaccctcaaaagtgttgatttaatgaa

SEQ ID NO: 2637 - DNA, 122 bp, Homo sapiens
  misc_feature (61)..(62): /note="This region represents a CpG dinucleotide"
  misc_feature (61)..(61): /note="Nucleotide may be methylated to form 5-methylcytosine"
cctgcctctgcctcccatagtgctgggattataggcgtgagccaccacacccggccacagcgtactttttagaaatgctttgtgaactgctttaacctacattgtctaatcagggcctcctt

SEQ ID NO: 2638 - DNA, 122 bp, Homo sapiens
  misc_feature (61)..(62): /note="This region represents a CpG dinucleotide"
  misc_feature (61)..(61): /note="Nucleotide may be methylated to form 5-methylcytosine"
atgtgccttaagtggagggaagaaaaacactggagataagggcgccaaagaacagaaggccgagagtaaaggagattatgcatcattacagaggaaggagatttagagttaagaagacagca

SEQ ID NO: 2639 - DNA, 122 bp, Homo sapiens
  misc_feature (61)..(62): /note="This region represents a CpG dinucleotide"
  misc_feature (61)..(61): /note="Nucleotide may be methylated to form 5-methylcytosine"
tctaagggcatggaaggggaggaggattaaggttcagatgaggaaactggtcatgcaatccgtggagatagagcaagcacagcacccaggaaaatttggcccaggacctgctaccccacaga

SEQ ID NO: 2640 - DNA, 122 bp, Homo sapiens
  misc_feature (61)..(62): /note="This region represents a CpG dinucleotide"
  misc_feature (61)..(61): /note="Nucleotide may be methylated to form 5-methylcytosine"
aactaggcaactattatagcgtagtagtgaacaccaatgttactgcaaccaggctactcacgttcaaatcttcactcttctggtatttaaatgagtcacctaatctccttgtgcttaaactc

SEQ ID NO: 2641 - DNA, 122 bp, Homo sapiens
  misc_feature (61)..(62): /note="This region represents a CpG dinucleotide"
  misc_feature (61)..(61): /note="Nucleotide may be methylated to form 5-methylcytosine"
tggaaatccctgccctgttcagccccacagctcccaactatttggttcctgctccatggtcgggcctctgacagccactttgaataaaccagacaccgcacatgtgtcttgagaattatttg

SEQ ID NO: 2642 - DNA, 122 bp, Homo sapiens
  misc_feature (61)..(62): /note="This region represents a CpG dinucleotide"
  misc_feature (61)..(61): /note="Nucleotide may be methylated to form 5-methylcytosine"
agtgcactttccggtccctccaggtcagcaggctgcccagcagcggcgaggctgcagccacgcccaccatgtccatgaccgtggtcaccaaggagaagaacaagaagggtgaggtggggcag

SEQ ID NO: 2643 - DNA, 122 bp, Homo sapiens
  misc_feature (61)..(62): /note="This region represents a CpG dinucleotide"
  misc_feature (61)..(61): /note="Nucleotide may be methylated to form 5-methylcytosine"
ctctatcttgtataggtgtttattagggtttcttatgcaaccctccagttaatctgtgaacgtgctttgttaagacaccttcacagactaactggagggttgcataagaaaccctaataaac

SEQ ID NO: 2644 - DNA, 122 bp, Homo sapiens
  misc_feature (61)..(62): /note="This region represents a CpG dinucleotide"
  misc_feature (61)..(61): /note="Nucleotide may be methylated to form 5-methylcytosine"
tccatcctttttgtaagaagatctttttccttcttgaaaccttgggagttgagtggcagccgtaagtaggaaggaggtgcccttgtctttgcttgttctctgtgctcagggaaacttcagaa

SEQ ID NO: 2645 - DNA, 122 bp, Homo sapiens
  misc_feature (61)..(62): /note="This region represents a CpG dinucleotide"
  misc_feature (61)..(61): /note="Nucleotide may be methylated to form 5-methylcytosine"
gctgcctcttgtcatctccaatccagatccgtttcattgacttaactcctggctgaataccgccagttaattacagcaatcacagaccttcctgctccagccacgcggtgagaatgagggtt

SEQ ID NO: 2646 - DNA, 122 bp, Homo sapiens
  misc_feature (61)..(62): /note="This region represents a CpG dinucleotide"
  misc_feature (61)..(61): /note="Nucleotide may be methylated to form 5-methylcytosine"
ctctcctctttcttcacatctctgcacagcagcttatacgctcttactaatccaccatcccgctcttacaacagctctgagcagtgtcagggtgagcattgcaatcacatttttaaccaatc

SEQ ID NO: 2647 - DNA, 122 bp, Homo sapiens
  misc_feature (61)..(62): /note="This region represents a CpG dinucleotide"
  misc_feature (61)..(61): /note="Nucleotide may be methylated to form 5-methylcytosine"
gtttacagtgatgtaactttcccaaagtttatatgtagccttaaagggtttagtgcagagcggattgcaaatgagtaactgccaagaagaaagaaagagggtgatccatccctcccagttag

SEQ ID NO: 2648 - DNA, 122 bp, Homo sapiens
  misc_feature (61)..(62): /note="This region represents a CpG dinucleotide"
  misc_feature (61)..(61): /note="Nucleotide may be methylated to form 5-methylcytosine"
aatgctgggattaacaggtgtgagccatcataccaggccttgctgacacctcttgttgcacgtggatgaatatactggatattacagagattcagttgtaggggattaatgaactggctgct

SEQ ID NO: 2649 - DNA, 122 bp, Homo sapiens
  misc_feature (61)..(62): /note="This region represents a CpG dinucleotide"
  misc_feature (61)..(61): /note="Nucleotide may be methylated to form 5-methylcytosine"
tccttgagtactgagtcagactgccactgagtcacactgaatacaaatctagtcatttctcgaattaaaactctctatagtctcctaaaatgcggagggatgtatactccttgaacagtccc

SEQ ID NO: 2650 - DNA, 122 bp, Homo sapiens
  misc_feature (61)..(62): /note="This region represents a CpG dinucleotide"
  misc_feature (61)..(61): /note="Nucleotide may be methylated to form 5-methylcytosine"
tgccctcagaaaagggcttgagggagggagtccacccatttttgcccttctgctttgtgccgtgtgagaacacgacaaatctccctttaggaagatgtagtcttcaatgcgccatcttggaa

SEQ ID NO: 2651 - DNA, 122 bp, Homo sapiens
  misc_feature (61)..(62): /note="This region represents a CpG dinucleotide"
  misc_feature (61)..(61): /note="Nucleotide may be methylated to form 5-methylcytosine"
aacactgcaagacctccgtcacaaaattttaaaacttcgctgggtgtggtggtgtgtactcgtagtcctaactacccaggaagattgcttgagctcaggaagttgaggctgcagtgagtcat

SEQ ID NO: 2652 - DNA, 122 bp, Homo sapiens
  misc_feature (61)..(62): /note="This region represents a CpG dinucleotide"
  misc_feature (61)..(61): /note="Nucleotide may be methylated to form 5-methylcytosine"
taagtacattctatgatattcctacaatgacaaaatcacctaaccacacattcttcagaacgtatccccattcttacgcaacacattttttgttactgttgtcaaaaattaaaattaaataa

SEQ ID NO: 2653 - DNA, 122 bp, Homo sapiens
  misc_feature (61)..(62): /note="This region represents a CpG dinucleotide"
  misc_feature (61)..(61): /note="Nucleotide may be methylated to form 5-methylcytosine"
atgagaccgctgtccacactcacaaacttaccctccccattgagagtctggcatcatcgacgtctctctcagagcctgcctacagaggggctggccattgttcttggatagatggctagacc

SEQ ID NO: 2654 - DNA, 122 bp, Homo sapiens
  misc_feature (61)..(62): /note="This region represents a CpG dinucleotide"
  misc_feature (61)..(61): /note="Nucleotide may be methylated to form 5-methylcytosine"
ctaaatatgaaactccattaacatcagtgttttctgactccactttggtgagtcattcaacgtaatcaggacttagaaatgagcaacagatgtgtcacattctttgagcagtgctcaaagaa

SEQ ID NO: 2655 - DNA, 122 bp, Homo sapiens
  misc_feature (61)..(62): /note="This region represents a CpG dinucleotide"
  misc_feature (61)..(61): /note="Nucleotide may be methylated to form 5-methylcytosine"
tgacttatcctgatacataggaaaagggttaagcaagaatcatctgtttgagatagctgacgcggaaggaaaaggatgtgaagtttaattatggacacatttcagttcaaagtgctaaacag

SEQ ID NO: 2656 - DNA, 122 bp, Homo sapiens
  misc_feature (61)..(62): /note="This region represents a CpG dinucleotide"
  misc_feature (61)..(61): /note="Nucleotide may be methylated to form 5-methylcytosine"
gaccaggtaggcggttcccaacagcccatccaccccagaacctgcaggccaggtaggagacggtccccaacagcccgccagccccagaaactgcaggccaggtaggcgaggttcccgacagc

SEQ ID NO: 2657 - DNA, 122 bp, Homo sapiens
  misc_feature (61)..(62): /note="This region represents a CpG dinucleotide"
  misc_feature (61)..(61): /note="Nucleotide may be methylated to form 5-methylcytosine"
gatggtaaatgctgtaggactctgggaataagcagatgtgtgaaggcaggatgaggcatgcgggtcacagattgcaggtggcatcactactcgctcagtctctgagcaaacatttgtcgaga

SEQ ID NO: 2658 - DNA, 122 bp, Homo sapiens
  misc_feature (61)..(62): /note="This region represents a CpG dinucleotide"
  misc_feature (61)..(61): /note="Nucleotide may be methylated to form 5-methylcytosine"
tttccgtaagtggtaaggtcagcctcatacagtattgcacagcctttcccattccttttgcgtcagtgagaatcaaatgattcaacagtgaaaagcaaactcttggactggaatagcaagat

SEQ ID NO: 2659 - DNA, 122 bp, Homo sapiens
  misc_feature (61)..(62): /note="This region represents a CpG dinucleotide"
  misc_feature (61)..(61): /note="Nucleotide may be methylated to form 5-methylcytosine"
gaaaattggagaagtaaagatcaaacctgcttcctttaatagcacaacccacaggttgtccgtgttgcttctgctcacacctcattagccagtatttagtcacataaccaagagagactgga

SEQ ID NO: 2660 - DNA, 122 bp, Homo sapiens
  misc_feature (61)..(62): /note="This region represents a CpG dinucleotide"
  misc_feature (61)..(61): /note="Nucleotide may be methylated to form 5-methylcytosine"
ggggctgagcacacccaatgtgctaaatatttccctgctgcagaatctattttgctgctgcggctgctgcttggcagcaaagagacaggaagctatttagatatattatcttccttttcagg

SEQ ID NO: 2661 - DNA, 122 bp, Homo sapiens
  misc_feature (61)..(62): /note="This region represents a CpG dinucleotide"
  misc_feature (61)..(61): /note="Nucleotide may be methylated to form 5-methylcytosine"
tatacagaaaagctggagttccttggcaagttcaaacaccctgagaacagttttgcatcacgtaggattacaaaaattgttgaggtcatggtaacagctgccttgagcaagatttctaacac

SEQ ID NO: 2662 - DNA, 122 bp, Homo sapiens
  misc_feature (61)..(62): /note="This region represents a CpG dinucleotide"
  misc_feature (61)..(61): /note="Nucleotide may be methylated to form 5-methylcytosine"
gaaacggtctctaaatctgccctgttcaacacgtagcctctcatggccaggggctactcacgaaggactgtgcagccttgagtgtcacaatcctgtcattctggatgaaatgggtgtcgtgt

SEQ ID NO: 2663 - DNA, 122 bp, Homo sapiens
  misc_feature (61)..(62): /note="This region represents a CpG dinucleotide"
  misc_feature (61)..(61): /note="Nucleotide may be methylated to form 5-methylcytosine"
aaccactgctaaaggatcagggctttttgccttttatttcttgggcatcgttttcctctccgtgacacctcttaattaaggatatgtagagtggtgttttgaggaaggctcagggaggagag

SEQ ID NO: 2664 - DNA, 122 bp, Homo sapiens
  misc_feature (61)..(62): /note="This region represents a CpG dinucleotide"
  misc_feature (61)..(61): /note="Nucleotide may be methylated to form 5-methylcytosine"
aagctgcagaacctctgtgcattcaacagtcacttcctgcgtttttgtgccattgtcacacgttgtgcttcagagacgccagaagacctgggcaaagacgtgagaactgcagccatcagctg

SEQ ID NO: 2665 - DNA, 122 bp, Homo sapiens
  misc_feature (61)..(62): /note="This region represents a CpG dinucleotide"
  misc_feature (61)..(61): /note="Nucleotide may be methylated to form 5-methylcytosine"
gaggggagcaaatgaatataccccggcaccctagagaccaaagccctagccagcatctgccgcccattggcccgctctctgggaggccttgcaaacagtccatgcccagaagctggggcagg

SEQ ID NO: 2666 - DNA, 122 bp, Homo sapiens
  misc_feature (61)..(62): /note="This region represents a CpG dinucleotide"
  misc_feature (61)..(61): /note="Nucleotide may be methylated to form 5-methylcytosine"
gaggaatgcgtctcattatccccagacacttcatgcctgatgagctaataatgttacttgcgtgtgaaatctctggcccccgtccgtacacctgcttccctcgtgttcccgatccagaccct

SEQ ID NO: 2667 - DNA, 122 bp, Homo sapiens
  misc_feature (61)..(62): /note="This region represents a CpG dinucleotide"
  misc_feature (61)..(61): /note="Nucleotide may be methylated to form 5-methylcytosine"
aggatttgtcactgaactgtggtaaaaacagcctccctgaagccttgggttggaataatacgtgtgagggaattggcaacaaaaggaagccggaaaggctggttgttcagggctctgtggct

SEQ ID NO: 2668 - DNA, 122 bp, Homo sapiens
  misc_feature (61)..(62): /note="This region represents a CpG dinucleotide"
  misc_feature (61)..(61): /note="Nucleotide may be methylated to form 5-methylcytosine"
gtaataggtggtgcagccaggatgaatgtctgggcagctgccagggcccacattcttaggcgctacatggaactgcgcagtacatggaggcttggagtggatcaatcagaagggcttcctga

SEQ ID NO: 2669 - DNA, 122 bp, Homo sapiens
  misc_feature (61)..(62): /note="This region represents a CpG dinucleotide"
  misc_feature (61)..(61): /note="Nucleotide may be methylated to form 5-methylcytosine"
gttaggcatgcagatcaagcagccgcgaggtctctggctccttttttgttgggttttagacgtgcctatttagacagtgcaatttcctgaaggctgaaggctgagaactggtggctgtagct

SEQ ID NO: 2670 - DNA, 122 bp, Homo sapiens
  misc_feature (61)..(62): /note="This region represents a CpG dinucleotide"
  misc_feature (61)..(61): /note="Nucleotide may be methylated to form 5-methylcytosine"
atgtggaaggccccagcggagaaggccacggagaagacgcccagcgccccgctgagcccccgctgacgcagcccacaagggacccacccagtgccaagtggtgcagaagcaccactcaatcc

SEQ ID NO: 2671 - DNA, 122 bp, Homo sapiens
  misc_feature (61)..(62): /note="This region represents a CpG dinucleotide"
  misc_feature (61)..(61): /note="Nucleotide may be methylated to form 5-methylcytosine"
ttagcagaggaaaaggaaagttttcacgttgagatcgagaaggaagatgattcatggtcacgaagggaaaggtcccctgaagtcttgagagatggctcaccactgctccactttcctttggg

SEQ ID NO: 2672 - DNA, 122 bp, Homo sapiens
  misc_feature (61)..(62): /note="This region represents a CpG dinucleotide"
  misc_feature (61)..(61): /note="Nucleotide may be methylated to form 5-methylcytosine"
atgcatgctgatgtgagactcctacaagccatgagacaaaacagacttataaacatgtaacgtgttgtgttgacacaaggaaccaagcagtgatgaggaatgtgccaatggctgagatggag

SEQ ID NO: 2673 - DNA, 122 bp, Homo sapiens
  misc_feature (61)..(62): /note="This region represents a CpG dinucleotide"
  misc_feature (61)..(61): /note="Nucleotide may be methylated to form 5-methylcytosine"
tagcatgtggccagaagtgatgaatctatgtgaagattttgatggcaggtgatctttgagcgggcatggcagttgcaccacaaaaggtcgaacacattttcacgggaaagttgcctatgtgc

SEQ ID NO: 2674 - DNA, 122 bp, Homo sapiens
  misc_feature (61)..(62): /note="This region represents a CpG dinucleotide"
  misc_feature (61)..(61): /note="Nucleotide may be methylated to form 5-methylcytosine"
atctgcctgatgctgaggtctgttcaactccaaagcctggtccaaatggatgacaggggccgtgtcttggaactttgggtaaccagatttggccacatatcacctctcctcttcccagaagc

SEQ ID NO: 2675 - DNA, 122 bp, Homo sapiens
  misc_feature (61)..(62): /note="This region represents a CpG dinucleotide"
  misc_feature (61)..(61): /note="Nucleotide may be methylated to form 5-methylcytosine"
acccactgctgccgctcgtgctctccgcccagccacggcgcccgctcccgaggccatcagcgggttgcctgccactgaccgtgccaggatgcacagaccgaccaacagacctcagtgcccac

SEQ ID NO: 2676 - DNA, 122 bp, Homo sapiens
  misc_feature (61)..(62): /note="This region represents a CpG dinucleotide"
  misc_feature (61)..(61): /note="Nucleotide may be methylated to form 5-methylcytosine"
tcgccctgcaggtcaaatcaattccctttgtcttgctcactgaggtcacacggatttttgcgtatttagagaatttgcggtgtgaggtcaccctagagggcgggtctgtgacgtcacaaaag

SEQ ID NO: 2677 - DNA, 122 bp, Homo sapiens
  misc_feature (61)..(62): /note="This region represents a CpG dinucleotide"
  misc_feature (61)..(61): /note="Nucleotide may be methylated to form 5-methylcytosine"
taaggtgcctgaagggcattagaagcctgctagcacctgtgacccttgcaggttacttctcgtgtcttgatttccaagcattagtgatgactaccttggaagctattggctgatagaggatg

SEQ ID NO: 2678 - DNA, 122 bp, Homo sapiens
  misc_feature (61)..(62): /note="This region represents a CpG dinucleotide"
  misc_feature (61)..(61): /note="Nucleotide may be methylated to form 5-methylcytosine"
agagatgggaggttcagtggttagtgctagcaggtcacttcctctgagtcaagtgctgtgcgtggctccttttaaggagtgtctcattcagcccttgagtcagggagccataccctcctgct

SEQ ID NO: 2679 - DNA, 122 bp, Homo sapiens
  misc_feature (61)..(62): /note="This region represents a CpG dinucleotide"
  misc_feature (61)..(61): /note="Nucleotide may be methylated to form 5-methylcytosine"
agccctttaactctctgaggctccgtgttctcagagtgactcgaggattcactgaggtgccgtgtgagaagtgggtggcccagacctggacacaaagaagccttgatcaatgtttgcagttt

SEQ ID NO: 2680 - DNA, 122 bp, Homo sapiens
  misc_feature (61)..(62): /note="This region represents a CpG dinucleotide"
  misc_feature (61)..(61): /note="Nucleotide may be methylated to form 5-methylcytosine"
tctacctcaaaagcattgttgtagggacttaataaagtaattcatgtaaagtggttagaacgaacctggcatatagcaagggatcaattatgttagctgtgattcttctttttaacatttac

SEQ ID NO: 2681 - DNA, 122 bp, Homo sapiens
  misc_feature (61)..(62): /note="This region represents a CpG dinucleotide"
  misc_feature (61)..(61): /note="Nucleotide may be methylated to form 5-methylcytosine"
catgaggaagccaactttaaccaggcccacatgatgcaacagcaggtgtccctttcactacgccacctgcctttctgaaaaggtagggcacagaacatgatacagctgcaggggccagccct

SEQ ID NO: 2682 - DNA, 122 bp, Homo sapiens
  misc_feature (61)..(62): /note="This region represents a CpG dinucleotide"
  misc_feature (61)..(61): /note="Nucleotide may be methylated to form 5-methylcytosine"
cagtataagtaccccatttggtggttgcccttctcttccagaatcttcacctttgtgacacgtgcccacaatgaatcatgtcctcaaggcagtcctgggtggttatggctcatggtgacttt

SEQ ID NO: 2683 - DNA, 122 bp, Homo sapiens
  misc_feature (61)..(62): /note="This region represents a CpG dinucleotide"
  misc_feature (61)..(61): /note="Nucleotide may be methylated to form 5-methylcytosine"
acatctggctttctgaggatgatgataaagcttattccaagtgccagttctttatttttacgaaacattagtcattgtactatgagataatatcaggaattacttgagatttttaaataggt

SEQ ID NO: 2684 - DNA, 122 bp, Homo sapiens
  misc_feature (61)..(62): /note="This region represents a CpG dinucleotide"
  misc_feature (61)..(61): /note="Nucleotide may be methylated to form 5-methylcytosine"
ataaggtatcctggggaagaaccacgccaatccattattattaagcaacatgtttattggcgttgatgcagagacttacacaagtcttcttttttaagagaaaaattacaaggtattcaagt

SEQ ID NO: 2685 - DNA, 122 bp, Homo sapiens
  misc_feature (61)..(62): /note="This region represents a CpG dinucleotide"
  misc_feature (61)..(61): /note="Nucleotide may be methylated to form 5-methylcytosine"
accacacactcggcgggcagcgtggtcgacctgcccagtgccaggacagtgactgctggccgcgaatttcacaacacaggtggcttcctcacaggaagctcctctgtataccacaccctgtt

SEQ ID NO: 2686 - DNA, 122 bp, Homo sapiens
  misc_feature (61)..(62): /note="This region represents a CpG dinucleotide"
  misc_feature (61)..(61): /note="Nucleotide may be methylated to form 5-methylcytosine"
cccactaggctcacagagaagaggaacagcaaggcctagctccaggccaggacagtgggacgttcccacaacagtctgtcccccaggctgcccttcatgcacccagcatgcactgcgctttc

SEQ ID NO: 2687 - DNA, 122 bp, Homo sapiens
  misc_feature (61)..(62): /note="This region represents a CpG dinucleotide"
  misc_feature (61)..(61): /note="Nucleotide may be methylated to form 5-methylcytosine"
ccaccacgcccggccatgaagatctgacatctctagaattcccacaagctgctcagactgcgcaggtgaatgggccagccccaacaaccagcagtgctccatcccttctcagctggggcctg

SEQ ID NO: 2688 - DNA, 122 bp, Homo sapiens
  misc_feature (61)..(62): /note="This region represents a CpG dinucleotide"
  misc_feature (61)..(61): /note="Nucleotide may be methylated to form 5-methylcytosine"
catcgcccccacccctgctgctaagcacaatgacagtggtgacttcctgaagagatcacacggaaaagtgcctcctcgacagattttgccctccgcagaaggcctgaactcagcacaagtgc

SEQ ID NO: 2689 - DNA, 122 bp, Homo sapiens
  misc_feature (61)..(62): /note="This region represents a CpG dinucleotide"
  misc_feature (61)..(61): /note="Nucleotide may be methylated to form 5-methylcytosine"
gtggaaaggaggtcaacaaactagaggccaaggcattccaagactcggcatgggtgtgaacggccgcagatgcagtgcttcaaagagagcgcaggcacctgtccctcagggactacgggtga

SEQ ID NO: 2690 - DNA, 122 bp, Homo sapiens
  misc_feature (61)..(62): /note="This region represents a CpG dinucleotide"
  misc_feature (61)..(61): /note="Nucleotide may be methylated to form 5-methylcytosine"
ctgttaggtagtagtattcccatttcacaaatgaatacattgatatttagaaaggttgcccgcagttttatttgctagtagagttgggatttgaatcatggtctgactgggttgcaaagcta

SEQ ID NO: 2691 - DNA, 122 bp, Homo sapiens
  misc_feature (61)..(62): /note="This region represents a CpG dinucleotide"
  misc_feature (61)..(61): /note="Nucleotide may be methylated to form 5-methylcytosine"
tttctccacatagtaaatcagccctaagacacagaagaaacccagaagatttggcagtgccgacaggcatagtgtggcagttctgctctgctggtctctgagtggccatactaagtctgaag

SEQ ID NO: 2692 - DNA, 122 bp, Homo sapiens
  misc_feature (61)..(62): /note="This region represents a CpG dinucleotide"
  misc_feature (61)..(61): /note="Nucleotide may be methylated to form 5-methylcytosine"
agctcaggctagagcccaacaacaaagaataacctgtccagctcaaaatgccagtactgccgaggccaagaaccctgacttatcctgatacataggaaaagggttaagcaagaatcatctgt

SEQ ID NO: 2693 - DNA, 122 bp, Homo sapiens
  misc_feature (61)..(62): /note="This region represents a CpG dinucleotide"
  misc_feature (61)..(61): /note="Nucleotide may be methylated to form 5-methylcytosine"
aagtctgcttccgtttggtgggaatggttctgaaaaaaaccagaggtgtacactggttaacgagtctggcgttagaaagccttcaataaatattggcgtccctgttaaaaatctggcaggca

SEQ ID NO: 2694 - DNA, 122 bp, Homo sapiens
  misc_feature (61)..(62): /note="This region represents a CpG dinucleotide"
  misc_feature (61)..(61): /note="Nucleotide may be methylated to form 5-methylcytosine"
ctcctaatcctcgctggtcatgctgatctaagagcctaagtagggccttcttatctctcacgttgtacttgggcttgaaagcatacttcccatctattacttcaattttgggattgttgact

SEQ ID NO: 2695 - DNA, 122 bp, Homo sapiens
  misc_feature (61)..(62): /note="This region represents a CpG dinucleotide"
  misc_feature (61)..(61): /note="Nucleotide may be methylated to form 5-methylcytosine"
tccttggcttgtagatagtcatcttctccttgtgtcttcacttggtccttcctctgtgtgcgtctgtgtctttaatctcctctttttataaagacaccagccacattggattactgcaaact

SEQ ID NO: 2696 - DNA, 122 bp, Homo sapiens
  misc_feature (61)..(62): /note="This region represents a CpG dinucleotide"
  misc_feature (61)..(61): /note="Nucleotide may be methylated to form 5-methylcytosine"
accatatggagatggcatttaatggcccggtgcaggagggctggccagatctcactggatcgtacattcttcctcctccttccccttctctccctgaaaaagaagaaattgcatcttggtat

SEQ ID NO: 2697 - DNA, 122 bp, Homo sapiens
  misc_feature (61)..(62): /note="This region represents a CpG dinucleotide"
  misc_feature (61)..(61): /note="Nucleotide may be methylated to form 5-methylcytosine"
ctgagctgactaatacactcagtttcctcatttgaaaagcagggataaaactagtacttgcggcatgacgttattgtgagaatccaatgaggaaacacacgtaatgccttcctgcttcattt

SEQ ID NO: 2698 - DNA, 122 bp, Homo sapiens
  misc_feature (61)..(62): /note="This region represents a CpG dinucleotide"
  misc_feature (61)..(61): /note="Nucleotide may be methylated to form 5-methylcytosine"
ggggaatagggaaatggaagttgttgtgtaatgagtacagagctacagtcattaagtcagcgtaacatccatttgcaacatgaaaagagttctggagatgagtgtttgcacaacagtgtgaa

SEQ ID NO: 2699 - DNA, 122 bp, Homo sapiens
  misc_feature (61)..(62): /note="This region represents a CpG dinucleotide"
  misc_feature (61)..(61): /note="Nucleotide may be methylated to form 5-methylcytosine"
ttccatcattcaactaacatttattgaagatctactctacaccagatactggatgtgcagcgatgagtcaaatacactcttgtttcaaggaatgcagggtccgttggatagaaaacagttac

SEQ ID NO: 2700 - DNA, 122 bp, Homo sapiens
  misc_feature (61)..(62): /note="This region represents a CpG dinucleotide"
  misc_feature (61)..(61): /note="Nucleotide may be methylated to form 5-methylcytosine"
aacttttatctatttttagagatgtggtcttgatctgttgcacagtctggagtgcaatgacgcgagcatagctcactgcagcgtccaaactcctggcctcaagcaatcccgccccagccttc

SEQ ID NO: 2701 - DNA, 122 bp, Homo sapiens
  misc_feature (61)..(62): /note="This region represents a CpG dinucleotide"
  misc_feature (61)..(61): /note="Nucleotide may be methylated to form 5-methylcytosine"
cccacttactgggcccgccgcttccctgtccccgcccgctctgggtctctcctcccctttcgccatatacataaacatgccaggttcacagggtccctaagcgctgtggctcccaggctccc

SEQ ID NO: 2702 - DNA, 122 bp, Homo sapiens
  misc_feature (61)..(62): /note="This region represents a CpG dinucleotide"
  misc_feature (61)..(61): /note="Nucleotide may be methylated to form 5-methylcytosine"
agtagagactgttttccatcagcatttgtaacatgactcattatttcacaatttctcatccgcccttcctctattcctaccctcaaatgctctgtggtagaaaacttcgaccttgctgagag

SEQ ID NO: 2703 - DNA, 122 bp, Homo sapiens
  misc_feature (61)..(62): /note="This region represents a CpG dinucleotide"
  misc_feature (61)..(61): /note="Nucleotide may be methylated to form 5-methylcytosine"
ttcattctgctcatgtccatttccacacccctgaagaggaagtgtactcacttaagccaacggatgcttaccagtcatgacacacaccatatctgagcagaagctttaattgttgtgcatgc

SEQ ID NO: 2704 - DNA, 122 bp, Homo sapiens
  misc_feature (61)..(62): /note="This region represents a CpG dinucleotide"
  misc_feature (61)..(61): /note="Nucleotide may be methylated to form 5-methylcytosine"
cccattctcacttccttacatagtcatagcatttgataatagcattaactggtcatagagcggctcaactgatgactgcattttacagcctcctgtacagctagatgtggtcatgtgactaa

SEQ ID NO: 2705 - DNA, 122 bp, Homo sapiens
  misc_feature (61)..(62): /note="This region represents a CpG dinucleotide"
  misc_feature (61)..(61): /note="Nucleotide may be methylated to form 5-methylcytosine"
tgggtcttgagcagcttgctcagccgaggatgtttgctcctggcacagagaggcggtcatcgctcccctggggctgctgaaggctgagcgtgggagggccaaggctgtgggcatcacccctg

SEQ ID NO: 2706 - DNA, 122 bp, Homo sapiens
  misc_feature (61)..(62): /note="This region represents a CpG dinucleotide"
  misc_feature (61)..(61): /note="Nucleotide may be methylated to form 5-methylcytosine"
ttttatttatggtattctgtatcttgaaaacaaaggacatgctgagtcttttcaaaggagcgtggaatccatggagctgactctcattgttactgctgaaatagtgactgaatgtaccacca

SEQ ID NO: 2707 - DNA, 122 bp, Homo sapiens
  misc_feature (61)..(62): /note="This region represents a CpG dinucleotide"
  misc_feature (61)..(61): /note="Nucleotide may be methylated to form 5-methylcytosine"
taggtattcctgaggtctcctcacagctgagttgagccaccctgttgagagttaagtccacgtgtagttttgtctcagttactggttaaaacagaggaggttcacttttgggttgctgtgac

SEQ ID NO: 2708 - DNA, 122 bp, Homo sapiens
  misc_feature (61)..(62): /note="This region represents a CpG dinucleotide"
  misc_feature (61)..(61): /note="Nucleotide may be methylated to form 5-methylcytosine"
tgtaccagtccctgctctaagcctttaagatgaatgaatttattttaatctttacaacagcgctgtaaggtaggtactgttattattatccccgttgtacagatgaggcaactgagtcacac

SEQ ID NO: 2709 - DNA, 122 bp, Homo sapiens
  misc_feature (61)..(62): /note="This region represents a CpG dinucleotide"
  misc_feature (61)..(61): /note="Nucleotide may be methylated to form 5-methylcytosine"
atcacacaaggtggccaagctggaattcagaaacaagtaatctggcttcaaggcccatgacgttaaccactatactacattgctaaggcagagcagagacccctcccaagttaatacccata

SEQ ID NO: 2710 - DNA, 122 bp, Homo sapiens
  misc_feature (61)..(62): /note="This region represents a CpG dinucleotide"
  misc_feature (61)..(61): /note="Nucleotide may be methylated to form 5-methylcytosine"
ctgattcaaaaaaaaaaaagaaaaaatattaggcagtttatctatttaatctgtggtgtgcggagaccaggaactatcagatttatcattatttgagcaaatggttttattggatcacaatc

SEQ ID NO: 2711 - DNA, 122 bp, Homo sapiens
  misc_feature (61)..(62): /note="This region represents a CpG dinucleotide"
  misc_feature (61)..(61): /note="Nucleotide may be methylated to form 5-methylcytosine"
aaagtcctcctcactgaaacttgcgagtattttatgattctccttcctgtgctgacttcacgtacactagaggctcattcgtaagtgtgaagcaatgtctttagccctctgttaggatatag

SEQ ID NO: 2712 - DNA, 122 bp, Homo sapiens
  misc_feature (61)..(62): /note="This region represents a CpG dinucleotide"
  misc_feature (61)..(61): /note="Nucleotide may be methylated to form 5-methylcytosine"
tggtttcttttgagcagccactcccatgggaacaggtgtctgacttgagccatcttggagcggagcctccatgaatgcattccagcaaaggagactggggcaagaaaatgtgccccagggca

SEQ ID NO: 2713 - DNA, 122 bp, Homo sapiens
  misc_feature (61)..(62): /note="This region represents a CpG dinucleotide"
  misc_feature (61)..(61): /note="Nucleotide may be methylated to form 5-methylcytosine"
catctggagcccattgatcctaaagagcttcttgaggaatgcagggccgtcctgcacacccgacctccccggttccagagggattttgtggatctgaggacagattgccctagtacccaccc

SEQ ID NO: 2714 - DNA, 122 bp, Homo sapiens
  misc_feature (61)..(62): /note="This region represents a CpG dinucleotide"
  misc_feature (61)..(61): /note="Nucleotide may be methylated to form 5-methylcytosine"
agccagcactcttgggcccgggacccttgcttgagacttgacatgaaatggaagagagtgcgagaactggaaggagatcacagtagctctggctttcagacacaagtgtctatttcctcagt

SEQ ID NO: 2715 - DNA, 122 bp, Homo sapiens
  misc_feature (61)..(62): /note="This region represents a CpG dinucleotide"
  misc_feature (61)..(61): /note="Nucleotide may be methylated to form 5-methylcytosine"
ttatgctttatttgctcatgtttctcccctgtagaagagcttataatagtgcctgcctcacggggttgttagaagtattgattgttaatatgtgtaaaccatcagtgcatgtaaagtgttat

SEQ ID NO: 2716 - DNA, 122 bp, Homo sapiens
  misc_feature (61)..(62): /note="This region represents a CpG dinucleotide"
  misc_feature (61)..(61): /note="Nucleotide may be methylated to form 5-methylcytosine"
aggtttatatgtcctaatcctagagatgaaagttgagcccatgattatgggttaggtcgacgagggagagagtttagaaagagaagacaacctagggaatgcttatatttggagcagaggaa

SEQ ID NO: 2717 - DNA, 122 bp, Homo sapiens
  misc_feature (61)..(62): /note="This region represents a CpG dinucleotide"
  misc_feature (61)..(61): /note="Nucleotide may be methylated to form 5-methylcytosine"
tgacctcatgatctgcctgtcttggcctcccaaagtgctgggattacaggcatgagccaccgcacctggccagctagggcttactttatggtctagggagtttcatgggagtcaaaaaagaa

SEQ ID NO: 2718 - DNA, 122 bp, Homo sapiens
  misc_feature (61)..(62): /note="This region represents a CpG dinucleotide"
  misc_feature (61)..(61): /note="Nucleotide may be methylated to form 5-methylcytosine"
tgcagaaacacaattttggaagaaagagagggagtgcttttgagtcatttttagtttctgcggcagcaggatttccaactggtataaagatagtcaggaatgaacagaaacagtgaagggcc

SEQ ID NO: 2719 - DNA, 122 bp, Homo sapiens
  misc_feature (61)..(62): /note="This region represents a CpG dinucleotide"
  misc_feature (61)..(61): /note="Nucleotide may be methylated to form 5-methylcytosine"
acacttctgtgaaatggtactgcactttgccacaccatatgggtggggaccatacatgatcgcttccagtctcatgccaaacgtggcacagaaacttcattccttatttttattttctgatt

SEQ ID NO: 2720 - DNA, 122 bp, Homo sapiens
  misc_feature (61)..(62): /note="This region represents a CpG dinucleotide"
  misc_feature (61)..(61): /note="Nucleotide may be methylated to form 5-methylcytosine"
aagaaagatagcaagcacgtgtaaggtacttagcttatgccaagaactgttctaagcacacgtgtgttaactcattgctttcttgtaacaatcctgtgaggtggtaatgctactatcttcct

SEQ ID NO: 2721 - DNA, 122 bp, Homo sapiens
  misc_feature (61)..(62): /note="This region represents a CpG dinucleotide"
  misc_feature (61)..(61): /note="Nucleotide may be methylated to form 5-methylcytosine"
tgctatccaaagtcagacacgccaagggcatgtgttctgtcattctgtgttggaagggcccgctggtggcattaacctttgtttcctggccccacccacaccggctctcactcaagtacttg

SEQ ID NO: 2722 - DNA, 122 bp, Homo sapiens
  misc_feature (61)..(62): /note="This region represents a CpG dinucleotide"
  misc_feature (61)..(61): /note="Nucleotide may be methylated to form 5-methylcytosine"
aactattgcataaacaaggctggtttgtgaaccaaaggacatgagccccaaacctggagtcgcagaggcagcatgacagcacagacagcacagcttctggtgtcaggcattcctgcactcaa

SEQ ID NO: 2723 - DNA, 122 bp, Homo sapiens
  misc_feature (61)..(62): /note="This region represents a CpG dinucleotide"
  misc_feature (61)..(61): /note="Nucleotide may be methylated to form 5-methylcytosine"
ctactaaaattgtgagtcagaagccaaactaattttggctactaaattagttacttccctcgggcctaccaatcttcatatgtataccatggcttattttgacttagctggttaatttatcc

SEQ ID NO: 2724 - DNA, 122 bp, Homo sapiens
  misc_feature (61)..(62): /note="This region represents a CpG dinucleotide"
  misc_feature (61)..(61): /note="Nucleotide may be methylated to form 5-methylcytosine"
gcaagtatcttcacgaggtggtaaaagtaagaagttgtcagtaacacctccctcctccaacggtattaatgaggagttgtcagaagtcttacagactttacaggatgaatttgggcaaatga

SEQ ID NO: 2725 - DNA, 122 bp, Homo sapiens
  misc_feature (61)..(62): /note="This region represents a CpG dinucleotide"
  misc_feature (61)..(61): /note="Nucleotide may be methylated to form 5-methylcytosine"
ttttcaagatttatctcagagcagaactcttttgtcaagcaaacttaacatggaatggaacggaacggaagtatataaaactgataaagctgagctcacttgtcaaagcagggctggggaca

SEQ ID NO: 2726 - DNA, 122 bp, Homo sapiens
  misc_feature (61)..(62): /note="This region represents a CpG dinucleotide"
  misc_feature (61)..(61): /note="Nucleotide may be methylated to form 5-methylcytosine"
cctatctgcctacctgtctgcctgcacagagtgtccttccaacaaccttagcagggcaggcggagaggctgcaggtagccagctgggctgcaagtgtcactgaagcaagcccttttggccac

SEQ ID NO: 2727 - DNA, 122 bp, Homo sapiens
  misc_feature (61)..(62): /note="This region represents a CpG dinucleotide"
  misc_feature (61)..(61): /note="Nucleotide may be methylated to form 5-methylcytosine"
gcaggggtggattgtaacaccctcatccatttccccagtgccagatggaccaggaggtggcgtagggtgggagacaggaaggactcagcatctgggacaagctgggagattaccacagggtg

SEQ ID NO: 2728 - DNA, 122 bp, Homo sapiens
  misc_feature (61)..(62): /note="This region represents a CpG dinucleotide"
  misc_feature (61)..(61): /note="Nucleotide may be methylated to form 5-methylcytosine"
ggccaagtttggcttcagctgtggccaagggcagcacagaaatacccagattagaccaggcgccatgtggcacgcctataatcccagcactttgagaggccaaggtgggcggatcacctgag

SEQ ID NO: 2729 - DNA, 122 bp, Homo sapiens
  misc_feature (61)..(62): /note="This region represents a CpG dinucleotide"
  misc_feature (61)..(61): /note="Nucleotide may be methylated to form 5-methylcytosine"
ccgttctcaattcttggactttacataaacaggcagaagggcgggatttgacctatgagtcgtaacttgctggcacctggcttaggatattcttttgctgtgcagcttttgagaggtatatc

SEQ ID NO: 2730 - DNA, 122 bp, Homo sapiens
  misc_feature (61)..(62): /note="This region represents a CpG dinucleotide"
  misc_feature (61)..(61): /note="Nucleotide may be methylated to form 5-methylcytosine"
atcatcctgctcacaaatgtgacacagaacagagtgtcacagacacctcaatgcactggacgcttaagtcaaatggaaagttaaaaacaccttctgcaagcagccactggcattacttcata

SEQ ID NO: 2731 - DNA, 122 bp, Homo sapiens
  misc_feature (61)..(62): /note="This region represents a CpG dinucleotide"
  misc_feature (61)..(61): /note="Nucleotide may be methylated to form 5-methylcytosine"
cttgtatccttcccttcaggatagtaagtcaccgcagttccctggcagttctagaggtgccgtcagggagctagcgattagagtcgaaagacttagaaagccacctggtgttctattgtact

SEQ ID NO: 2732 - DNA, 122 bp, Homo sapiens
  misc_feature (61)..(62): /note="This region represents a CpG dinucleotide"
  misc_feature (61)..(61): /note="Nucleotide may be methylated to form 5-methylcytosine"
ctagcatttataatctgagttgctccagctgccagaagtagtgtcaataattgactgtttcgtggctgaaggactatagtagttataattgtctgacataagaaatattcagtgacataagg

SEQ ID NO: 2733 - DNA, 122 bp, Homo sapiens
  misc_feature (61)..(62): /note="This region represents a CpG dinucleotide"
  misc_feature (61)..(61): /note="Nucleotide may be methylated to form 5-methylcytosine"
ccgtacccctattctcccagttgtatgcatggctgtgatctctcacctccctaaagtcttcgctcatatgtcaccttccttatgactaacaatgacatttaaaactgcactacctggcccgg

SEQ ID NO: 2734 - DNA, 122 bp, Homo sapiens
  misc_feature (61)..(62): /note="This region represents a CpG dinucleotide"
  misc_feature (61)..(61): /note="Nucleotide may be methylated to form 5-methylcytosine"
tttcctggagttacagaagaattgaccagtgtgtcagtgtctttcatgtacattaatgggcgatagtattggtagtggttaatataatagcatgggttctggaaccagtctgccaggattta

SEQ ID NO: 2735 - DNA, 122 bp, Homo sapiens
  misc_feature (61)..(62): /note="This region represents a CpG dinucleotide"
  misc_feature (61)..(61): /note="Nucleotide may be methylated to form 5-methylcytosine"
tcattcccattttacagatgagcaaactgaatctcagggtgagtaattttcccaaggccacgaagctagaaaatgacagaactcagaatgtgagcccaaatgtgtctgatttcaaaagctat

SEQ ID NO: 2736 - DNA, 122 bp, Homo sapiens
  misc_feature (61)..(62): /note="This region represents a CpG dinucleotide"
  misc_feature (61)..(61): /note="Nucleotide may be methylated to form 5-methylcytosine"
agaaaaaaaaaagcagcctatcaggcttctatggagtgacttgtcttccttccttatcagcggtgtctatccagtagcagcaggctacctgtggccatgccagacaagacagcaaagatctt

SEQ ID NO: 2737 - DNA, 122 bp, Homo sapiens
  misc_feature (61)..(62): /note="This region represents a CpG dinucleotide"
  misc_feature (61)..(61): /note="Nucleotide may be methylated to form 5-methylcytosine"
gtctatcttgctgtctttccctggcttacccagagcacctgccttggtgtaatcctccatcgctgccacatggaagtgttttttcccttcctaaacaagttcctcttctggtatggctgtca

SEQ ID NO: 2738 - DNA, 122 bp, Homo sapiens
  misc_feature (61)..(62): /note="This region represents a CpG dinucleotide"
  misc_feature (61)..(61): /note="Nucleotide may be methylated to form 5-methylcytosine"
aaaactcacctggggcatatttagagagaccggcccctctgaataggatctccactccgccggaaaggggcggaagccgaggaagaggatgcacacccgggtctttgctttccccctttttc

SEQ ID NO: 2739 - DNA, 122 bp, Homo sapiens
  misc_feature (61)..(62): /note="This region represents a CpG dinucleotide"
  misc_feature (61)..(61): /note="Nucleotide may be methylated to form 5-methylcytosine"
gatggctgcctgaggccttgcccagaggaagctgagagagaagagatggaagagagcccacggctctgggacccagcagagcacattcagatggaaaccagctatgactgggtgacacctct

SEQ ID NO: 2740 - DNA, 122 bp, Homo sapiens
  misc_feature (61)..(62): /note="This region represents a CpG dinucleotide"
  misc_feature (61)..(61): /note="Nucleotide may be methylated to form 5-methylcytosine"
agggagattaagtaacctgctaaagatcaccactacccaggtggcaagtggcaagactgtcgtctgactctggggagactatatgatagccagagctaaaagtaggtcattcgtggagtggt

SEQ ID NO: 2741 - DNA, 122 bp, Homo sapiens
  misc_feature (61)..(62): /note="This region represents a CpG dinucleotide"
  misc_feature (61)..(61): /note="Nucleotide may be methylated to form 5-methylcytosine"
cccacaaatcaccaccaagtatcagtaactttgacctttgagcacatattcttagcaggccgcgctcttagggatcccatgtattgactcatttaattatgacgtcaaaacacttactaccc

SEQ ID NO: 2742 - DNA, 122 bp, Homo sapiens
  misc_feature (61)..(62): /note="This region represents a CpG dinucleotide"
  misc_feature (61)..(61): /note="Nucleotide may be methylated to form 5-methylcytosine"
gaaacagcattgctaccctccaagacttatgcttagaatgaaaaacttttactgtggtgtcgcaacatgaataattttccttcagactttcatgaggccaagaccatgtttacatttaattc

SEQ ID NO: 2743 - DNA, 122 bp, Homo sapiens
  misc_feature (61)..(62): /note="This region represents a CpG dinucleotide"
  misc_feature (61)..(61): /note="Nucleotide may be methylated to form 5-methylcytosine"
taccttgtaatgcctgcctggggaatgagtacatactcttctgtacctattaactgcaggcgtggctacatgacttgctctagccaacagactgtgaggaggaatgacatgaccctcaactg

SEQ ID NO: 2744 - DNA, 122 bp, Homo sapiens
  misc_feature (61)..(62): /note="This region represents a CpG dinucleotide"
  misc_feature (61)..(61): /note="Nucleotide may be methylated to form 5-methylcytosine"
aactgatcctaaaaggtcacattcttcctctggttcttatgaacaagttacacatatatccgttgatttccagcttgatgcatgactaagtgccactttctaggaacctactaagtgagtta

SEQ ID NO: 2745 - DNA, 122 bp, Homo sapiens
  misc_feature (61)..(62): /note="This region represents a CpG dinucleotide"
  misc_feature (61)..(61): /note="Nucleotide may be methylated to form 5-methylcytosine"
cttggcacatcagaagccacctgctgccaaccctatgagcaactgaggaaaggtgcctcacgccaccttcctaaagccagaatttgtgtcagattgtagggcaacctagaacctacagggaa

SEQ ID NO: 2746 - DNA, 122 bp, Homo sapiens
  misc_feature (61)..(62): /note="This region represents a CpG dinucleotide"
  misc_feature (61)..(61): /note="Nucleotide may be methylated to form 5-methylcytosine"
ttctgtaaaatgactagactcagctagaaagttctgctccatgtgatgctagctggctgccgtcacgtggaaggttgactaggctggaacatccaagatggcttagtcacatggccagcagt

SEQ ID NO: 2747 - DNA, 122 bp, Homo sapiens
  misc_feature (61)..(62): /note="This region represents a CpG dinucleotide"
  misc_feature (61)..(61): /note="Nucleotide may be methylated to form 5-methylcytosine"
gtgatttagaacaagagttcatccacaactacagcccttgggccaaatctagcctcagcccgtatttgtaaataaagtgttactggaacacaaccgtgcccatttctttagtcattgcctgt

SEQ ID NO: 2748 - DNA, 122 bp, Homo sapiens
  misc_feature (61)..(62): /note="This region represents a CpG dinucleotide"
  misc_feature (61)..(61): /note="Nucleotide may be methylated to form 5-methylcytosine"
atgatctctttaatatctacaaccggggctgtgagctgacaagtggcagcactgcacagccgtggggctgcctaagggaaatgctccaaccctcagaggagacgcacaatttgattattaga

SEQ ID NO: 2749 - DNA, 122 bp, Homo sapiens
  misc_feature (61)..(62): /note="This region represents a CpG dinucleotide"
  misc_feature (61)..(61): /note="Nucleotide may be methylated to form 5-methylcytosine"
actaaacccactgatcaatgtcatagtcactgagggtggcaaccagacttaggtgtctctcgggctgatgcaatcggaaatacatggcaccacctaggaagtaatcttgcatgcatgcatgc

SEQ ID NO: 2750 - DNA, 122 bp, Homo sapiens
  misc_feature (61)..(62): /note="This region represents a CpG dinucleotide"
  misc_feature (61)..(61): /note="Nucleotide may be methylated to form 5-methylcytosine"
ccctttatcttaatgggttccctgagatggctccctgggccacctctcaccactgctctgcgtactcaggtaggtagtgctccctgccctggctaagacccaggaagggaagggggaagcat

SEQ ID NO: 2751 - DNA, 122 bp, Homo sapiens
  misc_feature (61)..(62): /note="This region represents a CpG dinucleotide"
  misc_feature (61)..(61): /note="Nucleotide may be methylated to form 5-methylcytosine"
tgcccagcagccagaataagggagctcctgtgctgctttgttttgcaggtcagagtttaacgttaagacagattttttaagtttgaaaggttttcagatgagatgagttctttgggtgataa

SEQ ID NO: 2752 - DNA, 122 bp, Homo sapiens
  misc_feature (61)..(62): /note="This region represents a CpG dinucleotide"
  misc_feature (61)..(61): /note="Nucleotide may be methylated to form 5-methylcytosine"
catggcttaggcaagacaaagatgcaagagtcacaggacagcacaggtggggcagggttccggttcaggcctcaccgtcaggagctcccttgctggcctctcattcttctcctccagttctt

SEQ ID NO: 2753 - DNA, 122 bp, Homo sapiens
  misc_feature (61)..(62): /note="This region represents a CpG dinucleotide"
  misc_feature (61)..(61): /note="Nucleotide may be methylated to form 5-methylcytosine"
gtgaaacaggggaggcaaagagaatgaggtaggtggtatgatcctggaaagtgcacaatgcgatctctgacatgcctgcttcccattggaaaaagacaaattcctcattcctcttcttggta

SEQ ID NO: 2754 - DNA, 122 bp, Homo sapiens
  misc_feature (61)..(62): /note="This region represents a CpG dinucleotide"
  misc_feature (61)..(61): /note="Nucleotide may be methylated to form 5-methylcytosine"
atttaagttctatgagaaattccttagtcatggtgttgcgtaaatcatattttagctgcacggcattaccccacacagggtggcagaacttgaagggttactgacgtgtaaatgctggtatt

SEQ ID NO: 2755 - DNA, 122 bp, Homo sapiens
  misc_feature (61)..(62): /note="This region represents a CpG dinucleotide"
  misc_feature (61)..(61): /note="Nucleotide may be methylated to form 5-methylcytosine"
aacctaataatttgacccttggtcatgtttatttatttatcccgagacagagtctcaccccgtcacccaggccggagtgcaatggtgcaatcttatctcactgcaacctcagcctcccaagt

SEQ ID NO: 2756 - DNA, 122 bp, Homo sapiens
  misc_feature (61)..(62): /note="This region represents a CpG dinucleotide"
  misc_feature (61)..(61): /note="Nucleotide may be methylated to form 5-methylcytosine"
ctgctgctgcccaggaatgccctgtgtgtaagtcctgattaactcatctgcttaccaagccggacttgtccaagtcattctttggtctctcaactatttcccaccaccccaccccaccccac

SEQ ID NO: 2757 - DNA, 122 bp, Homo sapiens
  misc_feature (61)..(62): /note="This region represents a CpG dinucleotide"
  misc_feature (61)..(61): /note="Nucleotide may be methylated to form 5-methylcytosine"
accccaaggggtaggaacatgttgagatccagccagatggtgaagaagtcctctgtcttgcggtagcacatccagttcaccacatctggtttgtccagcttggcttctagctgattccccag

SEQ ID NO: 2758 - DNA, 122 bp, Homo sapiens
  misc_feature (61)..(62): /note="This region represents a CpG dinucleotide"
  misc_feature (61)..(61): /note="Nucleotide may be methylated to form 5-methylcytosine"
gtgaatttgacctgactctgagcatcttcattgcccagtgtggacggtgtgaagttaatgcggttgaaatacagagggaatcagatcaccgatgtcatttcaaagaataacttttccctgat

SEQ ID NO: 2759 - DNA, 122 bp, Homo sapiens
  misc_feature (61)..(62): /note="This region represents a CpG dinucleotide"
  misc_feature (61)..(61): /note="Nucleotide may be methylated to form 5-methylcytosine"
gcttccggagtgtggaaccaccattcaaagctgttaaagacatggaagtgccgtggatgacgccatagctcagctctgccagcaacttaaccaaggttccagttccggaatatccagccttt

SEQ ID NO: 2760 - DNA, 122 bp, Homo sapiens
  misc_feature (61)..(62): /note="This region represents a CpG dinucleotide"
  misc_feature (61)..(61): /note="Nucleotide may be methylated to form 5-methylcytosine"
catgcccatcttccgggacttcctctttctgtttaagttaccatttactgtggcttctcacgctctttacgcagctgcaaaggcagagcaagacacactgctggcccagaagggctgatgat

SEQ ID NO: 2761 - DNA, 122 bp, Homo sapiens
  misc_feature (61)..(62): /note="This region represents a CpG dinucleotide"
  misc_feature (61)..(61): /note="Nucleotide may be methylated to form 5-methylcytosine"
gagttattatataggacctaattttgcatgttactgtaattagagagtggacataaattacgtaacatagtatatggcacacgataggtgcctaatatatggaggcaaatatcatttgttag

SEQ ID NO: 2762 - DNA, 122 bp, Homo sapiens
  misc_feature (61)..(62): /note="This region represents a CpG dinucleotide"
  misc_feature (61)..(61): /note="Nucleotide may be methylated to form 5-methylcytosine"
ggagagtgcagcaagtgcaggtcgtcctccggtgtcagagccgtgatttgtagacaatgccgccctgtcagctcagtgctggttcagcagcatctttccaaacatgtatttggcaagaattt

SEQ ID NO: 2763 - DNA, 122 bp, Homo sapiens
  misc_feature (61)..(62): /note="This region represents a CpG dinucleotide"
  misc_feature (61)..(61): /note="Nucleotide may be methylated to form 5-methylcytosine"
tgttgctattttttttttttaatctccagtgatctatgatcatgcctcattgaacctgaccgatcagcagcctttgatccagctaattattacctgcttttgaagcactgtcttcacagtac

SEQ ID NO: 2764 - DNA, 122 bp, Homo sapiens
  misc_feature (61)..(62): /note="This region represents a CpG dinucleotide"
  misc_feature (61)..(61): /note="Nucleotide may be methylated to form 5-methylcytosine"
tatgacagtgcagctttagccagtatgggtacataagttatgacatccttaatgtttctccggtgagtctaggcacttggtgatttaaagtagagttgttctcagtataaagaatttatgtg

SEQ ID NO: 2765 - DNA, 122 bp, Homo sapiens
  misc_feature (61)..(62): /note="This region represents a CpG dinucleotide"
  misc_feature (61)..(61): /note="Nucleotide may be methylated to form 5-methylcytosine"
aacttttaagctcagagtcctcaagtagcaactcattaatgaagctgagttatctattcacgcactgctctcttttcaaagaacactaggcaattgttaaaccaagccaaactagaaaaagt

SEQ ID NO: 2766 - DNA, 122 bp, Homo sapiens
  misc_feature (61)..(62): /note="This region represents a CpG dinucleotide"
  misc_feature (61)..(61): /note="Nucleotide may be methylated to form 5-methylcytosine"
gagagatgagaagtcttggttatttgtcaccttctgattttaacatctcagcagctaacacgtttgttttaaaatcttgagccagaaacgtgtatgtggatgggatgtggctcatcctgctg

SEQ ID NO: 2767 - DNA, 122 bp, Homo sapiens
  misc_feature (61)..(62): /note="This region represents a CpG dinucleotide"
  misc_feature (61)..(61): /note="Nucleotide may be methylated to form 5-methylcytosine"
cattggtcagtgccatgaatcttgaagttaaatgtttcaccctaatgcactgctagtgggcgtgcacacttgtggagccactctggagagtacgcatgcatgacttcattgaattaagtctg

SEQ ID NO: 2768 - DNA, 122 bp, Homo sapiens
  misc_feature (61)..(62): /note="This region represents a CpG dinucleotide"
  misc_feature (61)..(61): /note="Nucleotide may be methylated to form 5-methylcytosine"
ccacccccaggggagaagggcaccaggatgtggcttgtcagtgggaagcaatgacctttacgtttgacatgagccatcaagggccaggaagaatctctgcctgctacaaaagtctgcattca

SEQ ID NO: 2769 - DNA, 122 bp, Homo sapiens
  misc_feature (61)..(62): /note="This region represents a CpG dinucleotide"
  misc_feature (61)..(61): /note="Nucleotide may be methylated to form 5-methylcytosine"
gtgaggtgaccggggcctcccagtgcaggaagggcacactctgcagctgaatgtgcatgtcgtacaggccctgcgggcggggcgggaacacagggcttgaggagtccacacccacccctgga

SEQ ID NO: 2770 - DNA, 122 bp, Homo sapiens
  misc_feature (61)..(62): /note="This region represents a CpG dinucleotide"
  misc_feature (61)..(61): /note="Nucleotide may be methylated to form 5-methylcytosine"
acttcttactcactcagagctttgtcatttcctgtttaaaatctttcagttggccgggtgcggtggctcacgcctgtaatcccagcactttgggaggctgaggcgggcggatcacgaggtca

SEQ ID NO: 2771 - DNA, 122 bp, Homo sapiens
  misc_feature (61)..(62): /note="This region represents a CpG dinucleotide"
  misc_feature (61)..(61): /note="Nucleotide may be methylated to form 5-methylcytosine"
ggccttggagaattaccattcttaccaattgaccacaaaagcagataggaacagtatctacgtattacaaaccagaatcaaaatgaccttcacacatgattagtgtggaattcttttcagtg

SEQ ID NO: 2772 - DNA, 122 bp, Homo sapiens
  misc_feature (61)..(62): /note="This region represents a CpG dinucleotide"
  misc_feature (61)..(61): /note="Nucleotide may be methylated to form 5-methylcytosine"
taatccaggaaaatctccccatctcaaaatccttaacttaatctgtcaaatcctttttgccgcataaggtaacattcacaggttccagggattagggcatggacggctttgggaccattatt

SEQ ID NO: 2773 - DNA, 122 bp, Homo sapiens
  misc_feature (61)..(62): /note="This region represents a CpG dinucleotide"
  misc_feature (61)..(61): /note="Nucleotide may be methylated to form 5-methylcytosine"
ggcttgggccacaggcctgtttcttgaaacaattgcttcatccagaattctgattggcaccgtctctgaaaccatagcttggttggagaatctgggatgtccttgctttctctacagtgaca

SEQ ID NO: 2774 - DNA, 122 bp, Homo sapiens
  misc_feature (61)..(62): /note="This region represents a CpG dinucleotide"
  misc_feature (61)..(61): /note="Nucleotide may be methylated to form 5-methylcytosine"
catccgcctcgtgttccagtgcggccacggcgcatgcgccccctgcggctccgcgctcagcgcctgccccatctgccgccagcccatccgcgaccgcatccagatcttcgtgtgagccgcgc

SEQ ID NO: 2775 - DNA, 122 bp, Homo sapiens
  misc_feature (61)..(62): /note="This region represents a CpG dinucleotide"
  misc_feature (61)..(61): /note="Nucleotide may be methylated to form 5-methylcytosine"
tttgggaggctaaggtgggagaatcacttaaacccaggagttcaagaccagcctaggcaacgtggtgagaccatgtctatacatataatttaaacattagctgggcatggtagtgcatactt

SEQ ID NO: 2776 - DNA, 122 bp, Homo sapiens
  misc_feature (61)..(62): /note="This region represents a CpG dinucleotide"
  misc_feature (61)..(61): /note="Nucleotide may be methylated to form 5-methylcytosine"
ggataatccacttgtggctcccatttcaagatctttaaagtagtcatgtctcttaagtcccgtttgctgtagaaggaaacacttaacaaatgccagggattagggtgtggatgttcttgggg

SEQ ID NO: 2777 - DNA, 122 bp, Homo sapiens
  misc_feature (61)..(62): /note="This region represents a CpG dinucleotide"
  misc_feature (61)..(61): /note="Nucleotide may be methylated to form 5-methylcytosine"
ttggcctcccaaagtgctggaatttacaggcatgcaccaacatgcccaaccagtaaataccgtaaaatgttgcaaatcagtatttgctgaatgaatggatgattgcaacattttgagctcta

SEQ ID NO: 2778 - DNA, 122 bp, Homo sapiens
  misc_feature (61)..(62): /note="This region represents a CpG dinucleotide"
  misc_feature (61)..(61): /note="Nucleotide may be methylated to form 5-methylcytosine"
gaacagtgcttgcatcagagcaggagtgagactgactagaaagagggatgaagatctttacgtgatgatggaaatgtttccttgataggagtatggtttacaaagatgcatgcactatcaaa

SEQ ID NO: 2779 - DNA, 122 bp, Homo sapiens
  misc_feature (61)..(62): /note="This region represents a CpG dinucleotide"
  misc_feature (61)..(61): /note="Nucleotide may be methylated to form 5-methylcytosine"
tgcaggaacctttcaagaatactgaatgaattcatagatgttcaggcttggggacagggacgagcaagacaccttccaggaagttgggacagggagtccctcacaaatgagaaccatggctg

SEQ ID NO: 2780 - DNA, 122 bp, Homo sapiens
  misc_feature (61)..(62): /note="This region represents a CpG dinucleotide"
  misc_feature (61)..(61): /note="Nucleotide may be methylated to form 5-methylcytosine"
ctttccccatccttgcccctctgttaatatctgcctgttgatgttaagactgctaaattacgacattaaattaagatgttaagacatgaattacttcaggtttggaagggacttctgttttg

SEQ ID NO: 2781 - DNA, 122 bp, Homo sapiens
  misc_feature (61)..(62): /note="This region represents a CpG dinucleotide"
  misc_feature (61)..(61): /note="Nucleotide may be methylated to form 5-methylcytosine"
aaaaatatttttaagctttctctcagaattgaaggcagtaggggagggatacagaagttccggaaatggctgactgtgtagacaagatggtgtggtttcagagtacagctgaatatatacag

SEQ ID NO: 2782 - DNA, 122 bp, Homo sapiens
  misc_feature (61)..(62): /note="This region represents a CpG dinucleotide"
  misc_feature (61)..(61): /note="Nucleotide may be methylated to form 5-methylcytosine"
tagcccaggcggcctgctgtgtccagatgttgcatctagctcctggactctcatatgtggcgccagtctggcatcagagccccacccagatttggaggggaagcgcttgcctaactcccagc

SEQ ID NO: 2783 - DNA, 122 bp, Homo sapiens
  misc_feature (61)..(62): /note="This region represents a CpG dinucleotide"
  misc_feature (61)..(61): /note="Nucleotide may be methylated to form 5-methylcytosine"
atttttttcctttttcttttttaaactcacacctgggcacgcatctgcgtactgccctggcgactgacgtgagcatgaagggagctttagtcagccgctcggcccgcgggaaggaagaggcg

SEQ ID NO: 2784 - DNA, 122 bp, Homo sapiens
  misc_feature (61)..(62): /note="This region represents a CpG dinucleotide"
  misc_feature (61)..(61): /note="Nucleotide may be methylated to form 5-methylcytosine"
tgccggcgggaaggccggcctccccgcgcctgctctgggcctccctccctgcctccctcccgctggcgccaccgccacgttagttattccgggtttggggccaagtccctcttggccgcagc

SEQ ID NO: 2785 - DNA, 122 bp, Homo sapiens
  misc_feature (61)..(62): /note="This region represents a CpG dinucleotide"
  misc_feature (61)..(61): /note="Nucleotide may be methylated to form 5-methylcytosine"
ctgtatcaccagcgcctcccagtgcacctcaccaccagcatatatctgatatgcatacctcgtccatcccaattcaagcagtgacaaaggactaaaacatggcggatggtggcatgtcacac

SEQ ID NO: 2786 - DNA, 122 bp, Homo sapiens
  misc_feature (61)..(62): /note="This region represents a CpG dinucleotide"
  misc_feature (61)..(61): /note="Nucleotide may be methylated to form 5-methylcytosine"
ccacacatgcagagtcacatgatataaaccattcattcatctgacaaatagggcacctcacgtatgtcacactctgtcctggcgtggagaatacaatggtgaaatagaaacaacacaagtct

SEQ ID NO: 2787 - DNA, 122 bp, Homo sapiens
  misc_feature (61)..(62): /note="This region represents a CpG dinucleotide"
  misc_feature (61)..(61): /note="Nucleotide may be methylated to form 5-methylcytosine"
tggcaaacagatgtgacttggcaaaaaagaaagcagaaatcaccaggaagtggaggctgccgccagcagggcatttgaatgcacagccaaatgggcgtgatctctggtccacccaagacaga

SEQ ID NO: 2788 - DNA, 122 bp, Homo sapiens
  misc_feature (61)..(62): /note="This region represents a CpG dinucleotide"
  misc_feature (61)..(61): /note="Nucleotide may be methylated to form 5-methylcytosine"
gaggacccaggcatggtggcgtggccaggcttctcaggccgctgcctggtgtgaggcaggcgaagcgtgggtgcggatgacctgggaggggcaggaagtcagccggaggtggtggcaggaac

SEQ ID NO: 2789 - DNA, 122 bp, Homo sapiens
  misc_feature (61)..(62): /note="This region represents a CpG dinucleotide"
  misc_feature (61)..(61): /note="Nucleotide may be methylated to form 5-methylcytosine"
gggcgaaccagcctccctacccagccaccttctcctccctgcaccctgaacacttccctccgacctcggggcctctgccctgtccctgacccaggacatgtctctgcaccacctgggtctct

SEQ ID NO: 2790 - DNA, 122 bp, Homo sapiens
  misc_feature (61)..(62): /note="This region represents a CpG dinucleotide"
  misc_feature (61)..(61): /note="Nucleotide may be methylated to form 5-methylcytosine"
cagtcttttgtgtgcctgtgaggtcctgggcaagctgtggagctgtaaatatttgcccttcgcccagagctggccagctgctgagactgcagctgacagacaggccaggggccaggaagggg

SEQ ID NO: 2791 - DNA, 122 bp, Homo sapiens
  misc_feature (61)..(62): /note="This region represents a CpG dinucleotide"
  misc_feature (61)..(61): /note="Nucleotide may be methylated to form 5-methylcytosine"
aagttgctacttgctcggtcccctgaacttgggttatttctgtggtcagggcaatggcagcgttttcaggtaccagcttcaccacagtcagcactttccagaagagttcctgggctggctgg

SEQ ID NO: 2792 - DNA, 122 bp, Homo sapiens
  misc_feature (61)..(62): /note="This region represents a CpG dinucleotide"
  misc_feature (61)..(61): /note="Nucleotide may be methylated to form 5-methylcytosine"
ttaggtgtgagtcggagccttaaacctaaaccggaagagccacagagatcaagggctgcacggtcagactataggcacaattaaaatgggagaatgtcagaggcaaaagaggcttactcgat

SEQ ID NO: 2793 - DNA, 122 bp, Homo sapiens
  misc_feature (61)..(62): /note="This region represents a CpG dinucleotide"
  misc_feature (61)..(61): /note="Nucleotide may be methylated to form 5-methylcytosine"
tacgggaggcagagctgagtgaccagtatgaggcggcctgcgagtcagcctgcagtgaagcggagtccacagcggcagagacgcttgacttgccactgcccagctacttccgctcccgcagc

SEQ ID NO: 2794 - DNA, 122 bp, Homo sapiens
  misc_feature (61)..(62): /note="This region represents a CpG dinucleotide"
  misc_feature (61)..(61): /note="Nucleotide may be methylated to form 5-methylcytosine"
tttcccccacggtgaagaaattcaactttttacttagtattaccatcatgcccaagtcaccgcaaagttaaactaacccaaataagactttaaacctgaagtcacccattcgagatctgtca

SEQ ID NO: 2795 - DNA, 122 bp, Homo sapiens
  misc_feature (61)..(62): /note="This region represents a CpG dinucleotide"
  misc_feature (61)..(61): /note="Nucleotide may be methylated to form 5-methylcytosine"
aaccaagggagatacagacaccgggagttgccaaaggggacaaccacatggcctgggacacgtgggaggctcacggttgaggaagtccttcacactctggataagttcttgaagttcctggt

SEQ ID NO: 2796 - DNA, 122 bp, Homo sapiens
  misc_feature (61)..(62): /note="This region represents a CpG dinucleotide"
  misc_feature (61)..(61): /note="Nucleotide may be methylated to form 5-methylcytosine"
aatgaatttgctcaaggggagagggaagtcactgtagctagaaggataattaccagccaacggtgtttagtcagcagactttgatgaatttagatgagaaagtagatgaggtatgtgaatgt

SEQ ID NO: 2797 - DNA, 122 bp, Homo sapiens
  misc_feature (61)..(62): /note="This region represents a CpG dinucleotide"
  misc_feature (61)..(61): /note="Nucleotide may be methylated to form 5-methylcytosine"
ccaagaactccagctacacaggcctcctttcatggtttcatatgagccagcctcttcctccgcccatgtaacactcttcccccaagcctgcctggctagttcctactcatctttcacttcct

SEQ ID NO: 2798 - DNA, 122 bp, Homo sapiens
  misc_feature (61)..(62): /note="This region represents a CpG dinucleotide"
  misc_feature (61)..(61): /note="Nucleotide may be methylated to form 5-methylcytosine"
ccactttgttatcttgcctaatatagacttggccagaacttctgtttagctagctagtgccgcagaacaaatcacctcacaatttagtgccttacagtttcgtaatctctcaggatttctgt

SEQ ID NO: 2799 - DNA, 122 bp, Homo sapiens
  misc_feature (61)..(62): /note="This region represents a CpG dinucleotide"
  misc_feature (61)..(61): /note="Nucleotide may be methylated to form 5-methylcytosine"
tgcacttcgaagctgaggcctgaacagatcccaaccttttttggaagctgctttctcttacgtaaaacatagacactggtaatcctactaccaacacttgtgataagaacagcatatatttg

SEQ ID NO: 2800 - DNA, 122 bp, Homo sapiens
  misc_feature (61)..(62): /note="This region represents a CpG dinucleotide"
  misc_feature (61)..(61): /note="Nucleotide may be methylated to form 5-methylcytosine"
tgtattggcccaggacagccatttaccaccttgtttttggttatttcagctgctgctaggcgttctccttcaaacacacctggattgctgtgaggacactgccccacaggcggaacacaatg

SEQ ID NO: 2801 - DNA, 122 bp, Homo sapiens
  misc_feature (61)..(62): /note="This region represents a CpG dinucleotide"
  misc_feature (61)..(61): /note="Nucleotide may be methylated to form 5-methylcytosine"
aaaatagagctgctctgattgaaattggtggtggtgtggtaaggattagcacccagctcacgtggccacctaaggtgctagagaggccagtctgaaaactcaggaagtgagcgagtaatcag

SEQ ID NO: 2802 - DNA, 122 bp, Homo sapiens
  misc_feature (61)..(62): /note="This region represents a CpG dinucleotide"
  misc_feature (61)..(61): /note="Nucleotide may be methylated to form 5-methylcytosine"
gctcaataacaagttattcttagtaagcttggatggctagaggaagataattgataaagtcggtttaggagcagcagtgacagtgggtgcttcttgattcaaaaaagaaaatcatcattttg

SEQ ID NO: 2803 - DNA, 122 bp, Homo sapiens
  misc_feature (61)..(62): /note="This region represents a CpG dinucleotide"
  misc_feature (61)..(61): /note="Nucleotide may be methylated to form 5-methylcytosine"
tttttagatggaagggagtggagagaatattttgtgcatgtgtgcgtgcgtctgaagtcacgccagataggtgactatatgccatttgcttatttgtgctaacttgggttgtgactgctttt

SEQ ID NO: 2804 - DNA, 122 bp, Homo sapiens
  misc_feature (61)..(62): /note="This region represents a CpG dinucleotide"
  misc_feature (61)..(61): /note="Nucleotide may be methylated to form 5-methylcytosine"
tggtcttgaactcctgaccctgtaatcccagagtgctgggattacagaagtgagccactacgcccggctgactcacttctttgtaacaggaagtcactaacactagatactgaccatcagca

SEQ ID NO: 2805 - DNA, 122 bp, Homo sapiens
  misc_feature (61)..(62): /note="This region represents a CpG dinucleotide"
  misc_feature (61)..(61): /note="Nucleotide may be methylated to form 5-methylcytosine"
ctgaacagttgagggaagctgaactactgcaatgactgggtatcttctaactcttaagaccggtcatgcaacttaggctggagaactccatttcaggggaggtcagtgactcacactgaagc

SEQ ID NO: 2806 - DNA, 122 bp, Homo sapiens
  misc_feature (61)..(62): /note="This region represents a CpG dinucleotide"
  misc_feature (61)..(61): /note="Nucleotide may be methylated to form 5-methylcytosine"
cagagaggccccgcggcgcggtgcggcgcgatcacgcccgagtctccttctcgttcccctcggcccttcctaaaacctgctggctcaggtctgaacaatcgcagctggacaggtggtgcaca

SEQ ID NO: 2807 - DNA, 122 bp, Homo sapiens
  misc_feature (61)..(62): /note="This region represents a CpG dinucleotide"
  misc_feature (61)..(61): /note="Nucleotide may be methylated to form 5-methylcytosine"
caggagctcccggagcccccgatgctgcatggcccaaatgaaaatgccttgcagtcacgacgactccgtgtctgtcagaagcctgaggctggttccattctccttcccacacctcatcaacg

SEQ ID NO: 2808 - DNA, 122 bp, Homo sapiens
  misc_feature (61)..(62): /note="This region represents a CpG dinucleotide"
  misc_feature (61)..(61): /note="Nucleotide may be methylated to form 5-methylcytosine"
agaaaatccatcccactgtatgattttcacactggttaatagcaacttgtctaaagagcacggatctactaaccagtatgatttaaccagtgtgatttgactaaattaaccaatcagttcag

SEQ ID NO: 2809 - DNA, 122 bp, Homo sapiens
  misc_feature (61)..(62): /note="This region represents a CpG dinucleotide"
  misc_feature (61)..(61): /note="Nucleotide may be methylated to form 5-methylcytosine"
tccaaatgcaggtctctgggttggaagctgtaactatttctgggcttattctctcagaggcgtgccccaaccctagcagcagaaaacactgacagtggaaatataggacatgtctcttctaa

SEQ ID NO: 2810 - DNA, 122 bp, Homo sapiens
  misc_feature (61)..(62): /note="This region represents a CpG dinucleotide"
  misc_feature (61)..(61): /note="Nucleotide may be methylated to form 5-methylcytosine"
aagcctcgctgactgacctcttaccaccagtgtggtccctcctcctgtctgtttagctctcgcttccggcacactggggaatgctattccacagatgtaaattgcactgtcatttgaagtca

SEQ ID NO: 2811 - DNA, 122 bp, Homo sapiens
  misc_feature (61)..(62): /note="This region represents a CpG dinucleotide"
  misc_feature (61)..(61): /note="Nucleotide may be methylated to form 5-methylcytosine"
aaagaaagaaatggatctttcagccagagcgaagcttcggataactgcagccccagctgacgtgtgtgaactccaacttcatgagagatcctgagtcagaatgacctggctaagccgcttcc

SEQ ID NO: 2812 - DNA, 122 bp, Homo sapiens
  misc_feature (61)..(62): /note="This region represents a CpG dinucleotide"
  misc_feature (61)..(61): /note="Nucleotide may be methylated to form 5-methylcytosine"
aatgtacgtgaagtatttctgaaatatgcagaacatcaatatcatgagcagaaaaagaggcgtggaagtctccaagtgtagatggatccacattaaataacagaggccagaggtgagtcgcc

SEQ ID NO: 2813 - DNA, 122 bp, Homo sapiens
  misc_feature (61)..(62): /note="This region represents a CpG dinucleotide"
  misc_feature (61)..(61): /note="Nucleotide may be methylated to form 5-methylcytosine"
tagagtccacaagcactgtttgaattgctagcaaatggtcatgcggctcgtacgtggttacgtgtcagctgagctgaaacaaacgaggtgacagaaacacaataagggaagctcggttatgc

SEQ ID NO: 2814 - DNA, 122 bp, Homo sapiens
  misc_feature (61)..(62): /note="This region represents a CpG dinucleotide"
  misc_feature (61)..(61): /note="Nucleotide may be methylated to form 5-methylcytosine"
agatatctgaactgaccatattgaggaaatgggaggaggcagagaactggaaactgtagacggtgactaagccctgcttctggtatgggaaattgcttaaagctatattcaaaatggacgct

SEQ ID NO: 2815 - DNA, 122 bp, Homo sapiens
  misc_feature (61)..(62): /note="This region represents a CpG dinucleotide"
  misc_feature (61)..(61): /note="Nucleotide may be methylated to form 5-methylcytosine"
ggcctttgagcatagcgtgcaccgctacggccagtccactggagagttcctgcaggtgggcggtaagtcacccatcctgtagggctggcccatccaaagtgacatggcatttcctgctggtt

SEQ ID NO: 2816 - DNA, 122 bp, Homo sapiens
  misc_feature (61)..(62): /note="This region represents a CpG dinucleotide"
  misc_feature (61)..(61): /note="Nucleotide may be methylated to form 5-methylcytosine"
cacttgaagacctgaaggcagtagtcatgaggttaactcctgtgttccacaggactgacacgtaggaggccctgctttctgagaaaagcagcccaggtagacagtcctcagaggcggggatg

SEQ ID NO: 2817 - DNA, 122 bp, Homo sapiens
  misc_feature (61)..(62): /note="This region represents a CpG dinucleotide"
  misc_feature (61)..(61): /note="Nucleotide may be methylated to form 5-methylcytosine"
ctttgtttttcagtgtagatgataattgcaggagactgatgtagtcctcagcacaggccacgaagagactgttagaaggaaagtggaggaagattgattattctgatgactcttcaccatgt

SEQ ID NO: 2818 - DNA, 122 bp, Homo sapiens
  misc_feature (61)..(62): /note="This region represents a CpG dinucleotide"
  misc_feature (61)..(61): /note="Nucleotide may be methylated to form 5-methylcytosine"
gggtttggctctgaccaaattgcttaatctctctgaaccttgattcttccttttgtaatacgtgggaggaaaaatgactctcagggttattgtgaggactaatcataatatttctggtatgg

SEQ ID NO: 2819 - DNA, 122 bp, Homo sapiens
  misc_feature (61)..(62): /note="This region represents a CpG dinucleotide"
  misc_feature (61)..(61): /note="Nucleotide may be methylated to form 5-methylcytosine"
cggtgccagagccagcatctgaataagccctggtctgatgcaggtcctgcgatctccccacgccctgacagtgacctatctttgtgcacacacgtgtgtttgtgtactgggcacacctcccc

SEQ ID NO: 2820 - DNA, 122 bp, Homo sapiens
  misc_feature (61)..(62): /note="This region represents a CpG dinucleotide"
  misc_feature (61)..(61): /note="Nucleotide may be methylated to form 5-methylcytosine"
gctctggtcagccagaagtttcagcataagccagggctcccaaggcacagaagcctgtcacgtgcatttagtgaagctgtaactacacaatgttctcaaatactcctgaagaggtgacagat

SEQ ID NO: 2821 - DNA, 122 bp, Homo sapiens
  misc_feature (61)..(62): /note="This region represents a CpG dinucleotide"
  misc_feature (61)..(61): /note="Nucleotide may be methylated to form 5-methylcytosine"
gcattatggcaggaagtcagatcttttgctctaaagcctaatactcctattctgtactctcggtaggtaaatacttttcaagccttagattcattttcaatcaagtcgctctgcttagtcaa

SEQ ID NO: 2822 - DNA, 122 bp, Homo sapiens
  misc_feature (61)..(62): /note="This region represents a CpG dinucleotide"
  misc_feature (61)..(61): /note="Nucleotide may be methylated to form 5-methylcytosine"
tacttcaagtttggccttgtgttaaactggctgtgtgactccaggcaggctatacaacctcgctgagctatttcctcatctggacaacttatttcatgcacttcacaggcttgttgctggga

SEQ ID NO: 2823 - DNA, 122 bp, Homo sapiens
  misc_feature (61)..(62): /note="This region represents a CpG dinucleotide"
  misc_feature (61)..(61): /note="Nucleotide may be methylated to form 5-methylcytosine"
agtcaaagttctttcacagcaagcaagtgttgccaaatgatcagttcaaagaagatttcacgccaatgaagatgattacaaaaaggaaaaagaggcaatgtcgcagtagttgccagaaagga

SEQ ID NO: 2824 - DNA, 122 bp, Homo sapiens
  misc_feature (61)..(62): /note="This region represents a CpG dinucleotide"
  misc_feature (61)..(61): /note="Nucleotide may be methylated to form 5-methylcytosine"
actgttgtcattattttcattttaaaactaagaacatgaaggcccagagagtttaagcagcgtgcccaaggccacacagcaagtcctagtggcatgagtcactgggacttgactcagacagc

SEQ ID NO: 2825 - DNA, 122 bp, Homo sapiens
  misc_feature (61)..(62): /note="This region represents a CpG dinucleotide"
  misc_feature (61)..(61): /note="Nucleotide may be methylated to form 5-methylcytosine"
catgttgcttagtattccagttcaacaaagatcaatagaggccatcccagtgttccttgacgcctcaccaggaagcagaggcgtgattatgcaaatcacgctgctcctgcacctctgccagc

SEQ ID NO: 2826 - DNA, 122 bp, Homo sapiens
  misc_feature (61)..(62): /note="This region represents a CpG dinucleotide"
  misc_feature (61)..(61): /note="Nucleotide may be methylated to form 5-methylcytosine"
ccttatgtggattcaaaatttatactcgcaaaacaaaattatatgagtgtattccaccaacgtcaagacatgggaagtaatatcttgggacccgggactgttttcttttactcctgcacctg

SEQ ID NO: 2827 - DNA, 122 bp, Homo sapiens
  misc_feature (61)..(62): /note="This region represents a CpG dinucleotide"
  misc_feature (61)..(61): /note="Nucleotide may be methylated to form 5-methylcytosine"
ttgttttgtattgtattggctgggtggcagctggcatcctagaggaagtgtccacccaggcgcagaggccaggcccaggaaaagctgggggcagtgggggtggggagcggtgcaggtggtga

SEQ ID NO: 2828 - DNA, 122 bp, Homo sapiens
  misc_feature (61)..(62): /note="This region represents a CpG dinucleotide"
  misc_feature (61)..(61): /note="Nucleotide may be methylated to form 5-methylcytosine"
ggtgtgtgtcctatgggtggtgaagccaacaattagtatatcctctgggcattaagcacacgacatgaccacaaagaacttttgtagctctgggctggggagtatagttatggcacctgttg

SEQ ID NO: 2829 - DNA, 122 bp, Homo sapiens
  misc_feature (61)..(62): /note="This region represents a CpG dinucleotide"
  misc_feature (61)..(61): /note="Nucleotide may be methylated to form 5-methylcytosine"
ccttttgttgtggtcactgccccgttgatccacacacgtcacgaatcagtgacagagactcgctgtggaaaccggagtgcgctggcctgcctgctaccctccggtgtttgtgactttttacc

SEQ ID NO: 2830 - DNA, 122 bp, Homo sapiens
  misc_feature (61)..(62): /note="This region represents a CpG dinucleotide"
  misc_feature (61)..(61): /note="Nucleotide may be methylated to form 5-methylcytosine"
acctagggcctctggggaggaaaggaagtgaggcctaggtgacttcattctgggcgtaggcgtagaagaccaagccagaaccagggccttgtacagtagcaggcaccagaatgcccagccct

SEQ ID NO: 2831 - DNA, 122 bp, Homo sapiens
  misc_feature (61)..(62): /note="This region represents a CpG dinucleotide"
  misc_feature (61)..(61): /note="Nucleotide may be methylated to form 5-methylcytosine"
ggaattttaccaggggcacaagactgggagtgttctagaaggacaaccagtggaaagatacggagatgagaaatatcaaagctgacatgtttctgggattgaaaaggatatagcaaaaacat

SEQ ID NO: 2832 - DNA, 122 bp, Homo sapiens
  misc_feature (61)..(62): /note="This region represents a CpG dinucleotide"
  misc_feature (61)..(61): /note="Nucleotide may be methylated to form 5-methylcytosine"
cagaccacaacctggaccagacagaggaggcacagaggcacttcctggagatccaggctgcgtatgaagtcctgagtcaacccaggaagccctggggatcccggaggtgaaaagaaacttcc

SEQ ID NO: 2833 - DNA, 122 bp, Homo sapiens
  misc_feature (61)..(62): /note="This region represents a CpG dinucleotide"
  misc_feature (61)..(61): /note="Nucleotide may be methylated to form 5-methylcytosine"
gtgagaagtaattagagaatttaccattctgtaattattcagttaatacttgcgtacttgcgttaagttttaggatttagtaaatgccccataagtgttaggattgacatctcagctccacc

SEQ ID NO: 2834 - DNA, 122 bp, Homo sapiens
  misc_feature (61)..(62): /note="This region represents a CpG dinucleotide"
  misc_feature (61)..(61): /note="Nucleotide may be methylated to form 5-methylcytosine"
ctcctccacccctgcttccaggctgtctgcagaccgctgggccgggtttcacagtattggcgtgaatcagcttgccaggcttctaccctttgtgcttggtggtagctaactgacttttttct

SEQ ID NO: 2835 - DNA, 122 bp, Homo sapiens
  misc_feature (61)..(62): /note="This region represents a CpG dinucleotide"
  misc_feature (61)..(61): /note="Nucleotide may be methylated to form 5-methylcytosine"
tttgataattatcgggtatgttgcaagctatgatgaaagcaaaacatacagctggaaagacgatcattggtcaggaccaaaaaacacacacaccttgggtgtgagcatgcattcagttgcct

SEQ ID NO: 2836 - DNA, 122 bp, Homo sapiens
  misc_feature (61)..(62): /note="This region represents a CpG dinucleotide"
  misc_feature (61)..(61): /note="Nucleotide may be methylated to form 5-methylcytosine"
aaattggtacgctgtatgtctactcattgtggggtaatagaaccaccatagaattactcacgtaacttgtcactgaggcagaaaatctttcagtcttagtttcatcacttcaatctactagc

SEQ ID NO: 2837 - DNA, 122 bp, Homo sapiens
  misc_feature (61)..(62): /note="This region represents a CpG dinucleotide"
  misc_feature (61)..(61): /note="Nucleotide may be methylated to form 5-methylcytosine"
ctttattcaacaggcgtggcttcctgaagcgtaaagccacttcacagacggtggccacagcggcacctcggccagagccatgcggccatcagagaccctgggcggccgggcagagggcttgg

SEQ ID NO: 2838 - DNA, 122 bp, Homo sapiens
  misc_feature (61)..(62): /note="This region represents a CpG dinucleotide"
  misc_feature (61)..(61): /note="Nucleotide may be methylated to form 5-methylcytosine"
cttaacctatagcctcagccaagcaatatccacttagactcactgctctgaggactgccccgccctgacatcagcttccctatcctttccagaaatatttctttgagacctgctggctacag

SEQ ID NO: 2839 - DNA, 122 bp, Homo sapiens
  misc_feature (61)..(62): /note="This region represents a CpG dinucleotide"
  misc_feature (61)..(61): /note="Nucleotide may be methylated to form 5-methylcytosine"
caggccactcaacccactgtgaggtcttactgtggggattaccgagtcaccaccaggctgcgctgaacaggaagtgaacaagtcaattcgagaaagatccaataagggaatattctctgggc

SEQ ID NO: 2840 - DNA, 122 bp, Homo sapiens
  misc_feature (61)..(62): /note="This region represents a CpG dinucleotide"
  misc_feature (61)..(61): /note="Nucleotide may be methylated to form 5-methylcytosine"
cagtactctataccactacaaaaacagtcataaagagcttaacatactcagcataacgatcgtggtttactttttgcaagccatgtatctttcagttacattctcccagttgattacattcc

SEQ ID NO: 2841 - DNA, 122 bp, Homo sapiens
  misc_feature (61)..(62): /note="This region represents a CpG dinucleotide"
  misc_feature (61)..(61): /note="Nucleotide may be methylated to form 5-methylcytosine"
tcgagagtacaaatccagatatgactttcatcatccaactaataaaccagtacatgattccgtcttgttcctaatttgggtatagacagaggactatctatgttgacatgaaaaaaaaatgc

SEQ ID NO: 2842 - DNA, 122 bp, Homo sapiens
  misc_feature (61)..(62): /note="This region represents a CpG dinucleotide"
  misc_feature (61)..(61): /note="Nucleotide may be methylated to form 5-methylcytosine"
tttctggggttttaagccactacatgtgtgcaatttgttccagcagcaataggaaactgacgcactgcttctttctcaggactagatgcaaacctccaggaggccttctgcaacacaccttg

SEQ ID NO: 2843 - DNA, 122 bp, Homo sapiens
  misc_feature (61)..(62): /note="This region represents a CpG dinucleotide"
  misc_feature (61)..(61): /note="Nucleotide may be methylated to form 5-methylcytosine"
tcctccaaaataatttatacatgcactttgaacaatttgcaattatttcaaggcaggtgacgataaatgttttattgtgaagtaaaacatacacagtatgccgggcgcggtggctcatgcct

SEQ ID NO: 2844 - DNA, 122 bp, Homo sapiens
  misc_feature (61)..(62): /note="This region represents a CpG dinucleotide"
  misc_feature (61)..(61): /note="Nucleotide may be methylated to form 5-methylcytosine"
ttttcccttctcctttccaagttgtaatcccccaactggcctccaagtcatgaccccactcgccatggcactgactcagccagcctctgggccaccacctgggaagatttcgacaccctggc

SEQ ID NO: 2845 - DNA, 122 bp, Homo sapiens
  misc_feature (61)..(62): /note="This region represents a CpG dinucleotide"
  misc_feature (61)..(61): /note="Nucleotide may be methylated to form 5-methylcytosine"
ccctgagtgctcaggggtgatgaagatgactaagaccctgttccttcccttgggagggagcgaaatacccactccagctaactattgcatgggtcagggtgacatcaccacctctgcagcag

SEQ ID NO: 2846 - DNA, 122 bp, Homo sapiens
  misc_feature (61)..(62): /note="This region represents a CpG dinucleotide"
  misc_feature (61)..(61): /note="Nucleotide may be methylated to form 5-methylcytosine"
ggactcagtgtggcagctgcttagcaagtggggagcaccaagctttggcagcccaggatgcgatcagcagcggatccttctcaggatgtctgcaggaaggaactccactctccccagagaca

SEQ ID NO: 2847 - DNA, 122 bp, Homo sapiens
  misc_feature (61)..(62): /note="This region represents a CpG dinucleotide"
  misc_feature (61)..(61): /note="Nucleotide may be methylated to form 5-methylcytosine"
ccctgctgggggtgagggggtatttttctgtctcttcaataaaccagaagcggccgggcgcggtggcttctgcctgtaatcctagcactctgggaggcagaggcgggtggatcacctgagat

SEQ ID NO: 2848 - DNA, 122 bp, Homo sapiens
  misc_feature (61)..(62): /note="This region represents a CpG dinucleotide"
  misc_feature (61)..(61): /note="Nucleotide may be methylated to form 5-methylcytosine"
gcatcatcatggtgctccattttgcatataacttggtgtctacatgtaggggacgtgtttcgtggtttagtgagaaagggaaagccaagacatgctatgatgacatccatatggtttcgctg

SEQ ID NO: 2849 - DNA, 122 bp, Homo sapiens
  misc_feature (61)..(62): /note="This region represents a CpG dinucleotide"
  misc_feature (61)..(61): /note="Nucleotide may be methylated to form 5-methylcytosine"
aacccctgttggctacactgagtttggacaccagggttcagtgaggcgagctccctaggccgtccgagcaggataagggaggaaggactcaagccggccttgtttgtgctgggtcttgcaca

SEQ ID NO: 2850 - DNA, 122 bp, Homo sapiens
  misc_feature (61)..(62): /note="This region represents a CpG dinucleotide"
  misc_feature (61)..(61): /note="Nucleotide may be methylated to form 5-methylcytosine"
gtgactaagggagggctctaaacagctctggccaaaggaacttcatgctgggatggccaccgtctatattcacactgtctcattagtagccatgctgtctgctcggcacttgaaatgtggct

SEQ ID NO: 2851 - DNA, 122 bp, Homo sapiens
  misc_feature (61)..(62): /note="This region represents a CpG dinucleotide"
  misc_feature (61)..(61): /note="Nucleotide may be methylated to form 5-methylcytosine"
ttatttcattctctcggtccccagttgtttttttcattttaaaacccatttttaacatctcgccctcatttctctcatttgaattttcatttaagcccaagtgattttctaatagcttgagt

SEQ ID NO: 2852 - DNA, 122 bp, Homo sapiens
  misc_feature (61)..(62): /note="This region represents a CpG dinucleotide"
  misc_feature (61)..(61): /note="Nucleotide may be methylated to form 5-methylcytosine"
ccttcttcatttactcagatctcaacaaattctgacctttggtctgtgacagtattttcacgtgctcccgctgctctgtctacttctcctacaagtcttttgtaagcatgatgtcattccaa

SEQ ID NO: 2853 - DNA, 122 bp, Homo sapiens
  misc_feature (61)..(62): /note="This region represents a CpG dinucleotide"
  misc_feature (61)..(61): /note="Nucleotide may be methylated to form 5-methylcytosine"
cgcagatgtgttcccagatggtgcctggcctggtgttctgagtcatgggtctacagaggccgccacaccttgacacctggtgaaaggtcgccacagtgccctcgcttgtgattagccctttg

SEQ ID NO: 2854 - DNA, 122 bp, Homo sapiens
  misc_feature (61)..(62): /note="This region represents a CpG dinucleotide"
  misc_feature (61)..(61): /note="Nucleotide may be methylated to form 5-methylcytosine"
cacacgcgtagttagccctgctcacttcagccaataactgtaggttatcagaaaacatcccgcccctctctcccgattggagggaaaagcaaagggggtggagtgcggaggctactagtcaa

SEQ ID NO: 2855 - DNA, 122 bp, Homo sapiens
  misc_feature (61)..(62): /note="This region represents a CpG dinucleotide"
  misc_feature (61)..(61): /note="Nucleotide may be methylated to form 5-methylcytosine"
aaccaggttatggcattgcattggatcccaaccaggatatgacattgcatttactcatcacgcctccttaggttcctcttggctgtgacggtttctcagactatccttgttttttaggacct

SEQ ID NO: 2856 - DNA, 122 bp, Homo sapiens
  misc_feature (61)..(62): /note="This region represents a CpG dinucleotide"
  misc_feature (61)..(61): /note="Nucleotide may be methylated to form 5-methylcytosine"
aatgcacatgttcatgtggccaaatgatcttgtttttctcagtataacagtaaaaggaaacgtaactgtgcttagctgtggcatggaattgtgatattaccaggtcaaattcaggaaaacca

SEQ ID NO: 2857 - DNA, 122 bp, Homo sapiens
  misc_feature (61)..(62): /note="This region represents a CpG dinucleotide"
  misc_feature (61)..(61): /note="Nucleotide may be methylated to form 5-methylcytosine"
cagagttcttgtatgttcagtttgccttgttgacctggcttcccaaggtctgtccatctgcgcagcctcttctcatcctgtcaatctgctggcctatttcctgtttctgcagccggaccagg

SEQ ID NO: 2858 - DNA, 122 bp, Homo sapiens
  misc_feature (61)..(62): /note="This region represents a CpG dinucleotide"
  misc_feature (61)..(61): /note="Nucleotide may be methylated to form 5-methylcytosine"
tggcttcagatggggctttgaaagctgtaattttaaagacaattaaattgctcaatgcaacgagctatgcaatacctccttaaattgctcaatacattggaagatttgggaaccactgggta

SEQ ID NO: 2859 - DNA, 122 bp, Homo sapiens
  misc_feature (61)..(62): /note="This region represents a CpG dinucleotide"
  misc_feature (61)..(61): /note="Nucleotide may be methylated to form 5-methylcytosine"
ggaaccagcatcagaaacctcgatttagagtccaatttggaaacagatccgtgcctttctcggtgaaatgggaagttgcctaaacgatgcatctggctttagattttatggggaatatgatc

SEQ ID NO: 2860 - DNA, 122 bp, Homo sapiens
  misc_feature (61)..(62): /note="This region represents a CpG dinucleotide"
  misc_feature (61)..(61): /note="Nucleotide may be methylated to form 5-methylcytosine"
ccaggagcagtgtgagtgggaaggggctctagaagctgactgcctttgtgtttgccacagcgtgctgggaatcagatgagaaggcgggcccagaccccaccagatactcatctcagccattg

SEQ ID NO: 2861 - DNA, 122 bp, Homo sapiens
  misc_feature (61)..(62): /note="This region represents a CpG dinucleotide"
  misc_feature (61)..(61): /note="Nucleotide may be methylated to form 5-methylcytosine"
cattgtgctttatgtatcttttctttcgttaccttcccctcctgctttgactgtagctgtcggggtgcctcgctcatcttagcatccccatggcatctgacttgatgcctcatgcatagctt

SEQ ID NO: 2862 - DNA, 122 bp, Homo sapiens
  misc_feature (61)..(62): /note="This region represents a CpG dinucleotide"
  misc_feature (61)..(61): /note="Nucleotide may be methylated to form 5-methylcytosine"
attatctcctctaccagactgtaagcaacatggcggcgaaatcacgtgtcttttgctgaacgcatttcctgtagctgcctggcagggtcaggcaaaggcagttggttaataaatctttgctg

SEQ ID NO: 2863 - DNA, 122 bp, Homo sapiens
  misc_feature (61)..(62): /note="This region represents a CpG dinucleotide"
  misc_feature (61)..(61): /note="Nucleotide may be methylated to form 5-methylcytosine"
aaacaactggagccagtaagtctcccagtctttgccaagggcttcgtgtgagtgtcggggcgtgccttcaacactaagccaggcagtcagcaactctgccttggtgttgtctttctgttttt

SEQ ID NO: 2864 - DNA, 122 bp, Homo sapiens
  misc_feature (61)..(62): /note="This region represents a CpG dinucleotide"
  misc_feature (61)..(61): /note="Nucleotide may be methylated to form 5-methylcytosine"
tggtttttcagtggagccaactctattaagcaatggtattaagcagttttctgagggtagcgtctgccacagagtttggtgcactgtgtttatttgacatcaagttaacctattcttccttt

SEQ ID NO: 2865 - DNA, 122 bp, Homo sapiens
  misc_feature (61)..(62): /note="This region represents a CpG dinucleotide"
  misc_feature (61)..(61): /note="Nucleotide may be methylated to form 5-methylcytosine"
catggagggtagtagaatctattcagagccagagagcacaccacgataaatggctgcagccgtgcatgctggtgtccgctccctgactgttcacagtcgttccagccacttggaatgcttta

SEQ ID NO: 2866 - DNA, 122 bp, Homo sapiens
  misc_feature (61)..(62): /note="This region represents a CpG dinucleotide"
  misc_feature (61)..(61): /note="Nucleotide may be methylated to form 5-methylcytosine"
ggaaacgggcaatgtctcgagacagtgctgattgccacaacttacgggatgagtactactcgtatctagttggcagaggccagatatactgctgagcatcctgcagtgaacacacagttccc

SEQ ID NO: 2867 - DNA, 122 bp, Homo sapiens
  misc_feature (61)..(62): /note="This region represents a CpG dinucleotide"
  misc_feature (61)..(61): /note="Nucleotide may be methylated to form 5-methylcytosine"
acattctgtactgactctgtaccacacattgttctaggcatttaaaatgcactaagtggccgggcgcggtggcttatgcctgtaatccagcactttaggacggtggcttacgcctgtaatcc

SEQ ID NO: 2868 - DNA, 122 bp, Homo sapiens
  misc_feature (61)..(62): /note="This region represents a CpG dinucleotide"
  misc_feature (61)..(61): /note="Nucleotide may be methylated to form 5-methylcytosine"
ggtggaagcaggaaggggaggtcagaggaaaactggggccctcagtgggcatccgtgatgcggaaacactaataatgccaacagcaatagcagaggcaggcagggcttacgtggccagggct

SEQ ID NO: 2869 - DNA, 122 bp, Homo sapiens
  misc_feature (61)..(62): /note="This region represents a CpG dinucleotide"
  misc_feature (61)..(61): /note="Nucleotide may be methylated to form 5-methylcytosine"
atgctgaggcaggatgattgcttgagcctaggaggcagaggttgcagtgacctgtgatggcgccactgcagtccaacctgggcgacgaaaagaacctctgtctcaaaattaaaaaaaaaaaa

SEQ ID NO: 2870 - DNA, 122 bp, Homo sapiens
  misc_feature (61)..(62): /note="This region represents a CpG dinucleotide"
  misc_feature (61)..(61): /note="Nucleotide may be methylated to form 5-methylcytosine"
aactaagctgtgagctggggctgcaatcatcttaggtcttgaatagggaaggatcagcttcgaaggtcattgttgtgatgattggcaggtctcaggtgtttgtaggttgtcagatggagaca

SEQ ID NO: 2871 - DNA, 122 bp, Homo sapiens
  misc_feature (61)..(62): /note="This region represents a CpG dinucleotide"
  misc_feature (61)..(61): /note="Nucleotide may be methylated to form 5-methylcytosine"
gtgcttctcaaatctcctctaccaggtcacagttctctttagcctagattacctcaatagcgtcaaaaccggtatccctgcctcctgtctctcctgcttcaatccattctcacagcacccca

SEQ ID NO: 2872 - DNA, 122 bp, Homo sapiens
  misc_feature (61)..(62): /note="This region represents a CpG dinucleotide"
  misc_feature (61)..(61): /note="Nucleotide may be methylated to form 5-methylcytosine"
tctccaagatgcagagcctgatccacagcatttagtaggctgctctccaaatcctggggacgctcaaatctggagccaacccaggatttcatctgtccctccagcctgggaggatcccactg

SEQ ID NO: 2873 - DNA, 122 bp, Homo sapiens
  misc_feature (61)..(62): /note="This region represents a CpG dinucleotide"
  misc_feature (61)..(61): /note="Nucleotide may be methylated to form 5-methylcytosine"
actttgagactgtgtaaatgtctattcctcatcacaccttcacctgctagtttctgcatccggtgattttactctgatgcctatagatttttatttttgaattccatccttccttctgcatt

SEQ ID NO: 2874 - DNA, 122 bp, Homo sapiens
  misc_feature (61)..(62): /note="This region represents a CpG dinucleotide"
  misc_feature (61)..(61): /note="Nucleotide may be methylated to form 5-methylcytosine"
agaagtcaaacagcatgattacgcctagagggcttagatcagggatggcctccctgaagacgtgacatttagcttgagacctgaaggaggagtctaagacaattccagctccccaaagagag

SEQ ID NO: 2875 - DNA, 122 bp, Homo sapiens
  misc_feature (61)..(62): /note="This region represents a CpG dinucleotide"
  misc_feature (61)..(61): /note="Nucleotide may be methylated to form 5-methylcytosine"
tgaacccaggaggcggaggttgcagtgagccaaggttgcgccattgcactccagcctggacgacaggagtgaaactgcattgcaaaaacagcaacaaaaaaaatccattcatctagtttgtc

SEQ ID NO: 2876 - DNA, 122 bp, Homo sapiens
  misc_feature (61)..(62): /note="This region represents a CpG dinucleotide"
  misc_feature (61)..(61): /note="Nucleotide may be methylated to form 5-methylcytosine"
tcttttaagagtatataaaccaccagagtacatcagaatacttttaactgaggaagatgacgggcaaggagtcccatatgacaggagcagagggagcaagaagaagaggggatataaggaag

SEQ ID NO: 2877 - DNA, 122 bp, Homo sapiens
  misc_feature (61)..(62): /note="This region represents a CpG dinucleotide"
  misc_feature (61)..(61): /note="Nucleotide may be methylated to form 5-methylcytosine"
ggtgaagagtaccacattattaccaatgcccaggacagatgccaagctgggcagtgatggcgtgcagaaaagcctcaggggaaagacacagcagaaggggagagggagcatttctgtctttg

SEQ ID NO: 2878 - DNA, 122 bp, Homo sapiens
  misc_feature (61)..(62): /note="This region represents a CpG dinucleotide"
  misc_feature (61)..(61): /note="Nucleotide may be methylated to form 5-methylcytosine"
agaaagggggcatgggcttttattggttggagttaattggagttatgaaagtggacaagccgagatttgacttagagccttagagtgttcagtctgtggtctccatctgacagccattcaca

SEQ ID NO: 2879 - DNA, 122 bp, Homo sapiens
  misc_feature (61)..(62): /note="This region represents a CpG dinucleotide"
  misc_feature (61)..(61): /note="Nucleotide may be methylated to form 5-methylcytosine"
tctatactttgtgctctctgcttttaaatatcctgaggctatctccactgaacacattctcgcttttactctctgatggctgcagagcactgggcttcgggaaaccataatttacttaatca

SEQ ID NO: 2880 - DNA, 122 bp, Homo sapiens
  misc_feature (61)..(62): /note="This region represents a CpG dinucleotide"
  misc_feature (61)..(61): /note="Nucleotide may be methylated to form 5-methylcytosine"
ccgtgcagggaactgacggagattaaccgtcggcacatcactgagtcagtcaactccatccgtcgggtgagtcaggctcccgggccaccctaccccacctcccttccttcactcatcagaca

SEQ ID NO: 2881 - DNA, 122 bp, Homo sapiens
  misc_feature (61)..(62): /note="This region represents a CpG dinucleotide"
  misc_feature (61)..(61): /note="Nucleotide may be methylated to form 5-methylcytosine"
cagtggccctggctaggaaccaattttgttttctcaccaaccaaattggcattgataagacgcaggagaatactccttgatcataaggatctcccaggctagcataacaactgaatgagtga

SEQ ID NO: 2882 - DNA, 122 bp, Homo sapiens
  misc_feature (61)..(62): /note="This region represents a CpG dinucleotide"
  misc_feature (61)..(61): /note="Nucleotide may be methylated to form 5-methylcytosine"
tttcagatggcatctaagcctcctagacatccttctgttatcttattctctctctccctccgtcctcagggccacctgtaggctgaatgtggtgttcacttccaagcacaggttagactttt

SEQ ID NO: 2883 - DNA, 122 bp, Homo sapiens
  misc_feature (61)..(62): /note="This region represents a CpG dinucleotide"
  misc_feature (61)..(61): /note="Nucleotide may be methylated to form 5-methylcytosine"
gcctgcaagcacactgacttccacatccctagcatttaggcctttgaatagaagctgacacgtagcagccagctgaacaagtatttaatgaggagcaacacaactccaagaagggctcctta

SEQ ID NO: 2884 - DNA, 122 bp, Homo sapiens
  misc_feature (61)..(62): /note="This region represents a CpG dinucleotide"
  misc_feature (61)..(61): /note="Nucleotide may be methylated to form 5-methylcytosine"
ttgaaattccccgagttgctgttaacttggcctgtctgttgcatatggggccaaactacacgcctacctgtggagcaaatgaatacagtgactcatctgtgagctgaggcttgagcaattcc

SEQ ID NO: 2885 - DNA, 122 bp, Homo sapiens
  misc_feature (61)..(62): /note="This region represents a CpG dinucleotide"
  misc_feature (61)..(61): /note="Nucleotide may be methylated to form 5-methylcytosine"
tggagaaatcgaggccagacaggctaaacagcttgctcttgaggtttgtggcagccggggcgtcggctagaccaagccacctcccatgcattcactttaagagagtttgcacaaggtcttat

SEQ ID NO: 2886 - DNA, 122 bp, Homo sapiens
  misc_feature (61)..(62): /note="This region represents a CpG dinucleotide"
  misc_feature (61)..(61): /note="Nucleotide may be methylated to form 5-methylcytosine"
tatctagttaccagttgcatctggctcagcctctgtgagctggtctgggagagagggtggcggtcaaaagtgagtaaaagtggaaagagcagtttccttaaagactctgttgagggcagtgt

SEQ ID NO: 2887 - DNA, 122 bp, Homo sapiens
  misc_feature (61)..(62): /note="This region represents a CpG dinucleotide"
  misc_feature (61)..(61): /note="Nucleotide may be methylated to form 5-methylcytosine"
cagctgggaagtgagagaccgggatttaagctgatgtttgcgcagccaatgcgcgtcatacgcctctgaattaccttccccttgccccgtgtgtgtgtgatatttgtacttgagctgcctgg

SEQ ID NO: 2888 - DNA, 122 bp, Homo sapiens
  misc_feature (61)..(62): /note="This region represents a CpG dinucleotide"
  misc_feature (61)..(61): /note="Nucleotide may be methylated to form 5-methylcytosine"
aactaccaagttttacaggaacacagcctttggccagcagtttcaggtctaggggttcatcgtacagatatcttcgcacatgtgtaaaatgaagtatgtgcaatgctacgcttgacagaaat

SEQ ID NO: 2889 - DNA, 122 bp, Homo sapiens
  misc_feature (61)..(62): /note="This region represents a CpG dinucleotide"
  misc_feature (61)..(61): /note="Nucleotide may be methylated to form 5-methylcytosine"
accttctaggacttagttaatttcaccctgcttttgtggaggcctttagcaaagattccacgttcatgctgagaggaacactgtgggagttgggtgggtatgttgacccattttacagctgc

SEQ ID NO: 2890 - DNA, 122 bp, Homo sapiens
  misc_feature (61)..(62): /note="This region represents a CpG dinucleotide"
  misc_feature (61)..(61): /note="Nucleotide may be methylated to form 5-methylcytosine"
tagcatcacagcactggaaaggaacttctgagtcacttaatccaatttccacagtaaccacgtgtcatccactgacaatgtgaccgaaacaccatggtgggaacaggaaagatcaaaagcaa

SEQ ID NO: 2891 - DNA, 122 bp, Homo sapiens
  misc_feature (61)..(62): /note="This region represents a CpG dinucleotide"
  misc_feature (61)..(61): /note="Nucleotide may be methylated to form 5-methylcytosine"
aaaaagaattcagtactaagaaaaaaaagctgctattgttttcttcactggcagaagcagcgagtaagtggcaactcatgactctaatgatgcatcatccctaggcagattatttataatgc

SEQ ID NO: 2892 - DNA, 122 bp, Homo sapiens
  misc_feature (61)..(62): /note="This region represents a CpG dinucleotide"
  misc_feature (61)..(61): /note="Nucleotide may be methylated to form 5-methylcytosine"
caaaacttacggtgactagatagaaagtcctagcagtaattacacaacacacttttaggccgtaggaaccaaacggctgtgaggaggaggccagggaaaggatgaaccagatgtgctcagca

SEQ ID NO: 2893 - DNA, 122 bp, Homo sapiens
  misc_feature (61)..(62): /note="This region represents a CpG dinucleotide"
  misc_feature (61)..(61): /note="Nucleotide may be methylated to form 5-methylcytosine"
accctccagaaggctaaatcgccccgttcctactctatgattcaccgtcagcagagcacacgccagacaaggaaagcacaaagcctgacttggggtggggtaccttgattaaagaagtgtct

SEQ ID NO: 2894 - DNA, 122 bp, Homo sapiens
  misc_feature (61)..(62): /note="This region represents a CpG dinucleotide"
  misc_feature (61)..(61): /note="Nucleotide may be methylated to form 5-methylcytosine"
gtgcctggaggtctctgggtccaggtgagtgtggtgtgagtaataagcctgcatggcttacgcgctgcatgggaagtcctgtatcacaatcacaacgtatcataaagtcggaggttcacaca

SEQ ID NO: 2895 - DNA, 122 bp, Homo sapiens
  misc_feature (61)..(62): /note="This region represents a CpG dinucleotide"
  misc_feature (61)..(61): /note="Nucleotide may be methylated to form 5-methylcytosine"
gaaggggatcttgacaaacagtggagtcataagtcaggctccttgaaacacttttatgagcgccttaatgagggagatgagctgtcatcaggaactcatcccatccttcctgaccacaggaa

SEQ ID NO: 2896 - DNA, 122 bp, Homo sapiens
  misc_feature (61)..(62): /note="This region represents a CpG dinucleotide"
  misc_feature (61)..(61): /note="Nucleotide may be methylated to form 5-methylcytosine"
ttttaaaaatcccgactctccctaatttcaggaagcatgcatttattatacataacaagacgtgaaagccgcaagagtttcagcctaaacactgaagaccccgcgaagtgaatccagctgct

SEQ ID NO: 2897 - DNA, 122 bp, Homo sapiens
  misc_feature (61)..(62): /note="This region represents a CpG dinucleotide"
  misc_feature (61)..(61): /note="Nucleotide may be methylated to form 5-methylcytosine"
tgtcctccaaaatccattctcccttcttctgtagtgggaaggatttatgtggtctgtggccgcgcaggataagaactaacttcccagcttgcctttgcagccaagagaccaagttgtgttca

SEQ ID NO: 2898 - DNA, 122 bp, Homo sapiens
  misc_feature (61)..(62): /note="This region represents a CpG dinucleotide"
  misc_feature (61)..(61): /note="Nucleotide may be methylated to form 5-methylcytosine"
gcctctgcctgttcggacccgagccgggcctccacgacacagtccccttgggcggcgaaacggccacatctagctttaggtttgaaaggaaaacaaaatagggggaaaaaagtgggtttaca

SEQ ID NO: 2899 - DNA, 122 bp, Homo sapiens
  misc_feature (61)..(62): /note="This region represents a CpG dinucleotide"
  misc_feature (61)..(61): /note="Nucleotide may be methylated to form 5-methylcytosine"
agtcaggtggcctgggctcctccaccctcgctaacagctaactccatggccatggacacacgcttgtgccacaggtgcagactttctaaagacttaggttttggagatctctctggtctccg

SEQ ID NO: 2900 - DNA, 122 bp, Homo sapiens
  misc_feature (61)..(62): /note="This region represents a CpG dinucleotide"
  misc_feature (61)..(61): /note="Nucleotide may be methylated to form 5-methylcytosine"
ttccagggtgggggctgtttgccaggtacgtgggggtggggcacgcttcccagtgttctgcgtctgtcctcacaatggccctcaaggtcaggcagcactgaccgcattctaccattgaggaa

SEQ ID NO: 2901 - DNA, 122 bp, Homo sapiens
  misc_feature (61)..(62): /note="This region represents a CpG dinucleotide"
  misc_feature (61)..(61): /note="Nucleotide may be methylated to form 5-methylcytosine"
gtgggaggaaaccggtgcccgacccagaggacgaatgctggtgaggctgcaggtttggtgcggggacaggagggctggcttggacaagctggtctgagctgcttgtgagccagatgttgaga

SEQ ID NO: 2902 - DNA, 122 bp, Homo sapiens
  misc_feature (61)..(62): /note="This region represents a CpG dinucleotide"
  misc_feature (61)..(61): /note="Nucleotide may be methylated to form 5-methylcytosine"
ctacctacactcatgggaagggttaccaaaatccgtctattgcaaaacatcactctttctcgcttacatcatggctgcatgacatcaggacatgagtagctgccaagatgaactataaatgt

SEQ ID NO: 2903 - DNA, 122 bp, Homo sapiens
  misc_feature (61)..(62): /note="This region represents a CpG dinucleotide"
  misc_feature (61)..(61): /note="Nucleotide may be methylated to form 5-methylcytosine"
ttgttcagttttgactcatagagacacatttggcaaagcaatgtcttctgctgactgaggcgcttactggagaaaggcagttgcaaaagcagataccaaaactaagtattttaaaataattt

SEQ ID NO: 2904 - DNA, 122 bp, Homo sapiens
  misc_feature (61)..(62): /note="This region represents a CpG dinucleotide"
  misc_feature (61)..(61): /note="Nucleotide may be methylated to form 5-methylcytosine"
aattgaagcttatgttgcactgaggaagatttgtgtgatataacaggaagaacttccctgcgttagggtggtaagatattggagtaataataataatggccagcacttacagaatactctct

SEQ ID NO: 2905 - DNA, 122 bp, Homo sapiens
  misc_feature (61)..(62): /note="This region represents a CpG dinucleotide"
  misc_feature (61)..(61): /note="Nucleotide may be methylated to form 5-methylcytosine"
ctctaggccaggctgtttccacacctatgacccggtgttaaaaccaggcccatgtgtgaccgtgtgggccacagaatataaagtagacaccccgtttttttggattgtttcctaatgttcat

SEQ ID NO: 2906 - DNA, 122 bp, Homo sapiens
  misc_feature (61)..(62): /note="This region represents a CpG dinucleotide"
  misc_feature (61)..(61): /note="Nucleotide may be methylated to form 5-methylcytosine"
tgacctcatgatccacctgcctcggcctcccaaaatgttgggattacaggcatgaggcaccgcgcccggctagaagccactttcctaatgtcaggaaggtagaaggtggtagatttaaaggg

SEQ ID NO: 2907 - DNA, 122 bp, Homo sapiens
  misc_feature (61)..(62): /note="This region represents a CpG dinucleotide"
  misc_feature (61)..(61): /note="Nucleotide may be methylated to form 5-methylcytosine"
agtagtccgtgttcccctgacagcagtccagaatgtggcggtgtcacttccttctgctgtcggccattctcttctgcacacaagtcttcttagacagaatttataggacactggaaatcaag

SEQ ID NO: 2908 - DNA, 122 bp, Homo sapiens
  misc_feature (61)..(62): /note="This region represents a CpG dinucleotide"
  misc_feature (61)..(61): /note="Nucleotide may be methylated to form 5-methylcytosine"
aattcaagcctcctccaggacttggactgttgatctccctcctcccatcagactgtgtcccgatatggcactgtgtctctccctaaggtgtgtactctcctgagagacgcttccttggaact

SEQ ID NO: 2909 - DNA, 122 bp, Homo sapiens
  misc_feature (61)..(62): /note="This region represents a CpG dinucleotide"
  misc_feature (61)..(61): /note="Nucleotide may be methylated to form 5-methylcytosine"
gtttgcagtcaaggtggagaacagctgctgtagcagagcagttatgatagattgaaaggacgtgcttacctgcacttctgtgtgaccttatgttatctggctttcaaaggggtcgctttctt

SEQ ID NO: 2910 - DNA, 122 bp, Homo sapiens
  misc_feature (61)..(62): /note="This region represents a CpG dinucleotide"
  misc_feature (61)..(61): /note="Nucleotide may be methylated to form 5-methylcytosine"
gcaacactgcacacatggggttcatcaaaaagccatttgcaggcagggtgtggtggctcacgcctgtaatctcagcactttgggaagctgaggcgagtggatcatctgaggtcaggagttca

SEQ ID NO: 2911 - DNA, 122 bp, Homo sapiens
  misc_feature (61)..(62): /note="This region represents a CpG dinucleotide"
  misc_feature (61)..(61): /note="Nucleotide may be methylated to form 5-methylcytosine"
acaattcagtggctattagcatattcacagtgttgtgcaaccagcacatccatctagtttcggaagcatttcatcaccccagctggaaacctggtaccattaaacagttggtctccattcct

SEQ ID NO: 2912 - DNA, 122 bp, Homo sapiens
  misc_feature (61)..(62): /note="This region represents a CpG dinucleotide"
  misc_feature (61)..(61): /note="Nucleotide may be methylated to form 5-methylcytosine"
ttcatgttagagactctcctcaaacgtgtggtgatccctgatggccagtttgtattgaggcgtgcagcccgtcactgccggctggaagctgtgggtgtgtgcacagggtagtggctgacttg

SEQ ID NO: 2913 - DNA, 122 bp, Homo sapiens
  misc_feature (61)..(62): /note="This region represents a CpG dinucleotide"
  misc_feature (61)..(61): /note="Nucleotide may be methylated to form 5-methylcytosine"
ccaccacgcccagccggcaccttagacttttaagttcaaggtcacaacattgtaggtggccgtgattcagaggtcaggaagctgctgctcttgccacaacagattcccgcacccaggtaggt

SEQ ID NO: 2914 - DNA, 122 bp, Homo sapiens
  misc_feature (61)..(62): /note="This region represents a CpG dinucleotide"
  misc_feature (61)..(61): /note="Nucleotide may be methylated to form 5-methylcytosine"
ggctccaagggtgtttttccagtatctttaaaagccacagctgctgcgtggcttcctgaccgactggttccttggcgagagcaacagcagtgagtcaggagcaggagcagaagcgggcagac

SEQ ID NO: 2915 - DNA, 122 bp, Homo sapiens
  misc_feature (61)..(62): /note="This region represents a CpG dinucleotide"
  misc_feature (61)..(61): /note="Nucleotide may be methylated to form 5-methylcytosine"
cccctgggcaaaggcagagataacattggcacaatctgcctttcagctttcattgtcatgcgggagtcaccatgctttgtaagacatttaatctataagacttgattagttttgctaccttt

SEQ ID NO: 2916 - DNA, 122 bp, Homo sapiens
  misc_feature (61)..(62): /note="This region represents a CpG dinucleotide"
  misc_feature (61)..(61): /note="Nucleotide may be methylated to form 5-methylcytosine"
tgttggggtcagaaccagagggagaaaggctggggacagggatgggcggagggatccacgcgcagagaatgagattgcttaactccagatcatggtgaggctgcacctctgaaactggaatg

SEQ ID NO: 2917 - DNA, 122 bp, Homo sapiens
  misc_feature (61)..(62): /note="This region represents a CpG dinucleotide"
  misc_feature (61)..(61): /note="Nucleotide may be methylated to form 5-methylcytosine"
gcagggcctggtgactccatatgttccaaagcctcagtctcctgggcaccctgcccccttcgccttggccacgttttgtgaacaagcagaactagatcttgctgcctgggcaaatgtttcat

SEQ ID NO: 2918 - DNA, 122 bp, Homo sapiens
  misc_feature (61)..(62): /note="This region represents a CpG dinucleotide"
  misc_feature (61)..(61): /note="Nucleotide may be methylated to form 5-methylcytosine"
tccaccctgagcctgacctttctgagtgacatgggtgtgccaggctagactaggaggttccggtgtctggaaaagcactttacagatgagattccctctcctcccccaccttcaagcaccct

SEQ ID NO: 2919 - DNA, 122 bp, Homo sapiens
  misc_feature (61)..(62): /note="This region represents a CpG dinucleotide"
  misc_feature (61)..(61): /note="Nucleotide may be methylated to form 5-methylcytosine"
ggttatataaagcctattgctgtgacctgcattgctttgaggctgtgcctcactgtcttgcgtcctctgtcacaatatgtcatcagttcagacattcacacacacacacccccgggtctctg

SEQ ID NO: 2920 - DNA, 122 bp, Homo sapiens
  misc_feature (61)..(62): /note="This region represents a CpG dinucleotide"
  misc_feature (61)..(61): /note="Nucleotide may be methylated to form 5-methylcytosine"
gacttctaaaacttaaatatgcccatatgcaaagctatgactggtcagaatttttatctccgtatcatggacactaagattttttttaatcttgttcatggcatttcatattagtcacctac

SEQ ID NO: 2921 - DNA, 122 bp, Homo sapiens
  misc_feature (61)..(62): /note="This region represents a CpG dinucleotide"
  misc_feature (61)..(61): /note="Nucleotide may be methylated to form 5-methylcytosine"
tgggattatgggcgtgagccaccatgcccagctctatagtgtctaatacagtgtattaggcgctgggctcgttctctagctttggttttctggagatggggtccaagaatttgcatgcgtaa

SEQ ID NO: 2922 - DNA, 122 bp, Homo sapiens
  misc_feature (61)..(62): /note="This region represents a CpG dinucleotide"
  misc_feature (61)..(61): /note="Nucleotide may be methylated to form 5-methylcytosine"
gtggctacggggctggacctggttcaacaggcttgtgcagtgaaagagcctgaccctttccgttcatacaggaaatcttgagttctcgataggagtaaatctggtttcagaagctgttaagt

SEQ ID NO: 2923 - DNA, 122 bp, Homo sapiens
  misc_feature (61)..(62): /note="This region represents a CpG dinucleotide"
  misc_feature (61)..(61): /note="Nucleotide may be methylated to form 5-methylcytosine"
agtcaaaacagaagccgagctgtgcactcaggaggcaggcagccccttgttttggactatcgtctatcacttactcgctgggtggcttaaaggaagttactcaacatctctgagccatttcc

SEQ ID NO: 2924 - DNA, 122 bp, Homo sapiens
  misc_feature (61)..(62): /note="This region represents a CpG dinucleotide"
  misc_feature (61)..(61): /note="Nucleotide may be methylated to form 5-methylcytosine"
tcctgaccgactggttccttggcgagagcaacagcagtgagtcaggagcaggagcagaagcgggcagaccacagctcggcaccactttcgacggtgtcttcctcaaagagctctaacttttt

SEQ ID NO: 2925 - DNA, 122 bp, Homo sapiens
  misc_feature (61)..(62): /note="This region represents a CpG dinucleotide"
  misc_feature (61)..(61): /note="Nucleotide may be methylated to form 5-methylcytosine"
gtgatggtatttacatagtgtgctgtagaaacacaaaggaagggaacctagttcaccttacgggttcctctggtagggatttggttcacttaagagttttatgccactgtcgtagaactgaa

SEQ ID NO: 2926 - DNA, 122 bp, Homo sapiens
  misc_feature (61)..(62): /note="This region represents a CpG dinucleotide"
  misc_feature (61)..(61): /note="Nucleotide may be methylated to form 5-methylcytosine"
agttcagaggcagtgttaatcacaaagcaaaaatgaaaatcttgcacaatcacaaatgggcgcccaggactgtatgttatttgtcaatcctgtgatcttcttggcctgagtacacacgatct

SEQ ID NO: 2927 - DNA, 122 bp, Homo sapiens
  misc_feature (61)..(62): /note="This region represents a CpG dinucleotide"
  misc_feature (61)..(61): /note="Nucleotide may be methylated to form 5-methylcytosine"
ctgttcccactgccatgcgtttgcccacagtgttcccttggcctgaaatcctttctgctccgcaactgtagttgcctttgggacccacattgcctggttacgcttggccaatgcattgtgtt

SEQ ID NO: 2928 - DNA, 122 bp, Homo sapiens
  misc_feature (61)..(62): /note="This region represents a CpG dinucleotide"
  misc_feature (61)..(61): /note="Nucleotide may be methylated to form 5-methylcytosine"
cttctcagaaagtgacccaaggtaaataaaccatgtatacctgaaaagctctgcatcttacgtaggtggtttatggacaactcacagactcttatactaacaatgcatttctcatcaaatct

SEQ ID NO: 2929 - DNA, 122 bp, Homo sapiens
  misc_feature (61)..(62): /note="This region represents a CpG dinucleotide"
  misc_feature (61)..(61): /note="Nucleotide may be methylated to form 5-methylcytosine"
tttcatcattgtgcgaatatcacagagtgatacttacagaaacctagacgctacaacctacgtagcacacctgggctgtatggtataacctattgctcccaggctacaaacctgtctagcat

SEQ ID NO: 2930 - DNA, 122 bp, Homo sapiens
  misc_feature (61)..(62): /note="This region represents a CpG dinucleotide"
  misc_feature (61)..(61): /note="Nucleotide may be methylated to form 5-methylcytosine"
agtgcaggatgcataactgtgcacttccctcttggacgttgccaaaggactgatctctcccggactctgtccatcagagcagagtcctcgccctgttgtcaggccagccagctcggctctgc

SEQ ID NO: 2931 - DNA, 122 bp, Homo sapiens
  misc_feature (61)..(62): /note="This region represents a CpG dinucleotide"
  misc_feature (61)..(61): /note="Nucleotide may be methylated to form 5-methylcytosine"
caagatgaatcacaccaggtgacaacttctgacctatggtacttggtttccttactatagcgtcacacccattatctaattctttttcttcctcaccctgtgagctagactgaccagcagtt

SEQ ID NO: 2932 - DNA, 122 bp, Homo sapiens
  misc_feature (61)..(62): /note="This region represents a CpG dinucleotide"
  misc_feature (61)..(61): /note="Nucleotide may be methylated to form 5-methylcytosine"
taggtatcactgcacttctgaaatatgcagaaaccagatagttgaacaatcctcacacagcgtgggtgagagtacacctggagcacttcctatcctatgcttagaggtcttactttgtaaaa

SEQ ID NO: 2933 - DNA, 122 bp, Homo sapiens
  misc_feature (61)..(62): /note="This region represents a CpG dinucleotide"
  misc_feature (61)..(61): /note="Nucleotide may be methylated to form 5-methylcytosine"
aagaatagtttgcttaaggtgtggaaagggttagttcattcttaaaggacccattaaatacgcactatttactaggcaaacagagaagcagaagtggataaagcaggagaaggggttaaaga

SEQ ID NO: 2934 - DNA, 122 bp, Homo sapiens
  misc_feature (61)..(62): /note="This region represents a CpG dinucleotide"
  misc_feature (61)..(61): /note="Nucleotide may be methylated to form 5-methylcytosine"
acaacgccgaaccccgttctcggaaacgccgcccggccggctcccccgacgcgctgctcccgtaccaaaggcaggcccgtcgccaccacattcctcggaggcctccccgcggcctgagcccc

SEQ ID NO: 2935 - DNA, 122 bp, Homo sapiens
  misc_feature (61)..(62): /note="This region represents a CpG dinucleotide"
  misc_feature (61)..(61): /note="Nucleotide may be methylated to form 5-methylcytosine"
aaagaggcccctcctctgcctgcctcgatgggcccttgagctggcacacctgttgctgggcgtggacttcagcgctgggctcctggctcttctgctctgtgttcgccttaacacgtgtccac

SEQ ID NO: 2936 - DNA, 122 bp, Homo sapiens
  misc_feature (61)..(62): /note="This region represents a CpG dinucleotide"
  misc_feature (61)..(61): /note="Nucleotide may be methylated to form 5-methylcytosine"
agataagagtgcatgattgattagcaatgtctgccaccggcacagggtggggaatgacagcgttctgccatccctgccactaggcaatgatgcaatattaggttccttatcttagactcttt

SEQ ID NO: 2937 - DNA, 122 bp, Homo sapiens
  misc_feature (61)..(62): /note="This region represents a CpG dinucleotide"
  misc_feature (61)..(61): /note="Nucleotide may be methylated to form 5-methylcytosine"
gtgattgaatctgccaaacggacatcataggtgctcttgtcagaaaaagctcccagaagccgggcgcggtggctcatacctgtaatcctggcactttgggaggctgaggcgggcagatcatg

SEQ ID NO: 2938 - DNA, 122 bp, Homo sapiens
  misc_feature (61)..(62): /note="This region represents a CpG dinucleotide"
  misc_feature (61)..(61): /note="Nucleotide may be methylated to form 5-methylcytosine"
gcttgctccggaaaatgtttgtttcctcccagtttccatgtctggatgccttgtatctgccgctaggtaactgggttatttctccacagcactcccctctccaaacaaaagctttccccaac

SEQ ID NO: 2939 - DNA, 122 bp, Homo sapiens
  misc_feature (61)..(62): /note="This region represents a CpG dinucleotide"
  misc_feature (61)..(61): /note="Nucleotide may be methylated to form 5-methylcytosine"
agagatctagtaacaatgaaaagagatgtgaccctgttaagatttatgtaaaaatgtatgcgcatgtgtgtgttggctctaggataaagtgcaaatgttccatggtgtaaaaggaccttcac

SEQ ID NO: 2940 - DNA, 122 bp, Homo sapiens
  misc_feature (61)..(62): /note="This region represents a CpG dinucleotide"
  misc_feature (61)..(61): /note="Nucleotide may be methylated to form 5-methylcytosine"
ccaccttctgactaatatgaacatgggtgtacacatttatatccactcttgcctcccctccgtagtccttccttctccacactgcatctagagtaacccctttacactctcaagtatggaca

SEQ ID NO: 2941 - DNA, 122 bp, Homo sapiens
  misc_feature (61)..(62): /note="This region represents a CpG dinucleotide"
  misc_feature (61)..(61): /note="Nucleotide may be methylated to form 5-methylcytosine"
gtgacttcagtctctgccagctggagccctgtctcccagtagccagtggcaggggcagtacgccacctggaaggggaaggtggggaggccatgctggcccaggggagagcatggccactgac

SEQ ID NO: 2942 - DNA, 122 bp, Homo sapiens
  misc_feature (61)..(62): /note="This region represents a CpG dinucleotide"
  misc_feature (61)..(61): /note="Nucleotide may be methylated to form 5-methylcytosine"
tcttcagaccgatttgcctgaaaagttggtgacattccccacctttggaaataacctgaacgcctcattgttttcaaaaggattcatttgcccctccttgctccccacagtgcccttgggga

SEQ ID NO: 2943 - DNA, 122 bp, Homo sapiens
  misc_feature (61)..(62): /note="This region represents a CpG dinucleotide"
  misc_feature (61)..(61): /note="Nucleotide may be methylated to form 5-methylcytosine"
cagcacagattataggcagggctccatttacataaattatgcaatgtagtcttcatgaggcgctgacctgagactgaagttatgcaaggccactggcattaactttgttgttcattacagcg

SEQ ID NO: 2944 - DNA, 122 bp, Homo sapiens
  misc_feature (61)..(62): /note="This region represents a CpG dinucleotide"
  misc_feature (61)..(61): /note="Nucleotide may be methylated to form 5-methylcytosine"
cagccacatttcaagtgctcaattgccacatgtggctggtggctgccatagtgaacaacacggctatagagcttagccacctgacaggaaacataaaggataatgagtaacatgttaaacat

SEQ ID NO: 2945 - DNA, 122 bp, Homo sapiens
  misc_feature (61)..(62): /note="This region represents a CpG dinucleotide"
  misc_feature (61)..(61): /note="Nucleotide may be methylated to form 5-methylcytosine"
cccacaagagtgattcagagggtgacactacacacgcagccggtttgctgcggaggaacacggggctggggcgtctgctgcttttagagcaggcctgccctttgtccaggagggaggtatcg

SEQ ID NO: 2946 - DNA, 122 bp, Homo sapiens
  misc_feature (61)..(62): /note="This region represents a CpG dinucleotide"
  misc_feature (61)..(61): /note="Nucleotide may be methylated to form 5-methylcytosine"
agggaggtagtgaaagggaagctggccggacaggcagggccattccaagagggctttgtgcgcagggctaagccaagctttctccataggcaatggggagcaactggaggttcgtagcagga

SEQ ID NO: 2947 - DNA, 122 bp, Homo sapiens
  misc_feature (61)..(62): /note="This region represents a CpG dinucleotide"
  misc_feature (61)..(61): /note="Nucleotide may be methylated to form 5-methylcytosine"
cagtagaggaagagcaagaacctcgttcatgccaactctacaaacatgcattggtatcggcgggtgcccatcagggtgtccagcagtgaatcagactccagccctgcccttggacctcgcag

SEQ ID NO: 2948 - DNA, 122 bp, Homo sapiens
  misc_feature (61)..(62): /note="This region represents a CpG dinucleotide"
  misc_feature (61)..(61): /note="Nucleotide may be methylated to form 5-methylcytosine"
tgtggcaagttcagcttccttctcactttcagcttcaaatggacttttggactacctgggcgttcctttatttgtctctttctgatttcctatgtcaaagataaacaaggtggaaggacaga

SEQ ID NO: 2949 - DNA, 122 bp, Homo sapiens
  misc_feature (61)..(62): /note="This region represents a CpG dinucleotide"
  misc_feature (61)..(61): /note="Nucleotide may be methylated to form 5-methylcytosine"
tggggaagatatgaatgacaaagcaatactgtggatttgatgccatcaagtggaagtgaacgggtattttatccatcccaagagcattcgaaggttactggctgtattagtcagggttctcc

SEQ ID NO: 2950 - DNA, 122 bp, Homo sapiens
  misc_feature (61)..(62): /note="This region represents a CpG dinucleotide"
  misc_feature (61)..(61): /note="Nucleotide may be methylated to form 5-methylcytosine"
tacttcactattgattagtcactatccaaactaatctcatcagttcaatttatagtaactcgtatagtgctctttagagattagtctggtgaggaactgaagtacacaccaatgctagaaaa

SEQ ID NO: 2951 - DNA, 122 bp, Homo sapiens
  misc_feature (61)..(62): /note="This region represents a CpG dinucleotide"
  misc_feature (61)..(61): /note="Nucleotide may be methylated to form 5-methylcytosine"
agagctgctactcagggctttctgtttagcaaggaagaactgggggtggtgttgtattgacgagaaatatcttacatatttgggattcgtcagtgggcaggtattggttagagcgatgtgaa

SEQ ID NO: 2952 - DNA, 122 bp, Homo sapiens
  misc_feature (61)..(62): /note="This region represents a CpG dinucleotide"
  misc_feature (61)..(61): /note="Nucleotide may be methylated to form 5-methylcytosine"
taggttatttatgttgcctgcactgataaccaaagactgtgcaattctctatatcttttacgtcttggagacctattcttgttgtttgcataagatgtaaaaaatataattctgtgtcctag

SEQ ID NO: 2953 - DNA, 122 bp, Homo sapiens
  misc_feature (61)..(62): /note="This region represents a CpG dinucleotide"
  misc_feature (61)..(61): /note="Nucleotide may be methylated to form 5-methylcytosine"
ccgactccaagaataagtcaccagagtcccctagaagattcttgagtttctgctcttaaacggctccttttccaaggaggaacgaggtctgttttctgatgttggggcctcagatactctgt

SEQ ID NO: 2954 - DNA, 122 bp, Homo sapiens
  misc_feature (61)..(62): /note="This region represents a CpG dinucleotide"
  misc_feature (61)..(61): /note="Nucleotide may be methylated to form 5-methylcytosine"
ttcctattttggatttcagctcagcaaaggctttcctgaattaatcactgaagaagcacacggcaccatatttccttcatctggtcactgcagaaagcaaaaatgtttataccagatggtgc

SEQ ID NO: 2955 - DNA, 122 bp, Homo sapiens
  misc_feature (61)..(62): /note="This region represents a CpG dinucleotide"
  misc_feature (61)..(61): /note="Nucleotide may be methylated to form 5-methylcytosine"
aagaaacatactctttaagggagtctttgctgggtgaagtgattttgattgagtcatttacgtcatgaggcattgtctcatgtttaaatgaatgacttggactagtagatttccaacccctt

SEQ ID NO: 2956 - DNA, 122 bp, Homo sapiens
  misc_feature (61)..(62): /note="This region represents a CpG dinucleotide"
  misc_feature (61)..(61): /note="Nucleotide may be methylated to form 5-methylcytosine"
cacaggaagaagtcttaagttcttaatatagcaaggcgggcccttcatttgtcgttcattcgttcaataaatatttactggctgggcacggtggctcatgtctataatcctaacactttggg

SEQ ID NO: 2957 - DNA, 122 bp, Homo sapiens
  misc_feature (61)..(62): /note="This region represents a CpG dinucleotide"
  misc_feature (61)..(61): /note="Nucleotide may be methylated to form 5-methylcytosine"
tagccctgaggccattccccaggatttgtctgaagcttggtgtctggagaactgagttcacgtcagcagtccttaccacatgctttctgtgagggggttgggggcagggactgagggtgcca

SEQ ID NO: 2958 - DNA, 122 bp, Homo sapiens
  misc_feature (61)..(62): /note="This region represents a CpG dinucleotide"
  misc_feature (61)..(61): /note="Nucleotide may be methylated to form 5-methylcytosine"
tatcgcataaagccctgatcaatcatcagcttatctggcctgtttcctttctggttggttcgttagctccagtcatgctgatcttctttctgtgcctggaacattctgaatcattcccaact

SEQ ID NO: 2959 - DNA, 122 bp, Homo sapiens
  misc_feature (61)..(62): /note="This region represents a CpG dinucleotide"
  misc_feature (61)..(61): /note="Nucleotide may be methylated to form 5-methylcytosine"
tatggtgaactcatataatgggacccaaataggaagtgaaaattgcataatctagaactacgtgtatccatgtgaacacatttcaagattatcctgctgggtgaaaaaagcaagttgcacaa

SEQ ID NO: 2960 - DNA, 122 bp, Homo sapiens
  misc_feature (61)..(62): /note="This region represents a CpG dinucleotide"
  misc_feature (61)..(61): /note="Nucleotide may be methylated to form 5-methylcytosine"
acatgtctaattcagggcccttcctgtgtcttagcagtgacttaactaaaataaacatgtcgaatgtaaatctgggaagtaccactgggctttcaattgtcatattgcacagtagccattta

SEQ ID NO: 2961 - DNA, 122 bp, Homo sapiens
  misc_feature (61)..(62): /note="This region represents a CpG dinucleotide"
  misc_feature (61)..(61): /note="Nucleotide may be methylated to form 5-methylcytosine"
taccatttctcacatggctgatgtcattctaatcctcctccaggggctgcagagaagctccggcctgctcctcactttacaagcagagccaagcatatcccctccagaaccataccgcctat

SEQ ID NO: 2962 - DNA, 122 bp, Homo sapiens
  misc_feature (61)..(62): /note="This region represents a CpG dinucleotide"
  misc_feature (61)..(61): /note="Nucleotide may be methylated to form 5-methylcytosine"
gtgagtccggcagcgtctaggaacggcatgtccgtggcagggaacagacagagtgagccgcgcctggccagccatgtggcagcagacacagcccaacccaggccgactggcgaaaaaggagg

SEQ ID NO: 2963 - DNA, 122 bp, Homo sapiens
  misc_feature (61)..(62): /note="This region represents a CpG dinucleotide"
  misc_feature (61)..(61): /note="Nucleotide may be methylated to form 5-methylcytosine"
tttttacacatgacatctgcttcctaaacattccagttaagcccatgagtaatgcccgtccgttcctctggttgctcttccttcactgcccactttcactgctccacttttcccctacctgc

SEQ ID NO: 2964 - DNA, 122 bp, Homo sapiens
  misc_feature (61)..(62): /note="This region represents a CpG dinucleotide"
  misc_feature (61)..(61): /note="Nucleotide may be methylated to form 5-methylcytosine"
tgcaactggtgtggggcaactgttgccatctgtctggtgggatgtcaccagggaaggtctcgcccattcactccttcatgcaccgctgggcttgggccttttgtttggttggctggggaggg

SEQ ID NO: 2965 - DNA, 122 bp, Homo sapiens
  misc_feature (61)..(62): /note="This region represents a CpG dinucleotide"
  misc_feature (61)..(61): /note="Nucleotide may be methylated to form 5-methylcytosine"
aacagttcatgactcaacagctacgtagtctatccacccattcatgtgacattgtgaaggcgacactgccacaagccacaaccaagccttctacagggatgaaggccaaggggactctatgc

SEQ ID NO: 2966 - DNA, 122 bp, Homo sapiens
  misc_feature (61)..(62): /note="This region represents a CpG dinucleotide"
  misc_feature (61)..(61): /note="Nucleotide may be methylated to form 5-methylcytosine"
gaataaataaaactttgcatattgaatgttgaaagctccaggctcttctctaactcagctcgtagaatgctggtcttacatgctgcaggctggagtttggaagactcacctctaggaaatct

SEQ ID NO: 2967 - DNA, 122 bp, Homo sapiens
  misc_feature (61)..(62): /note="This region represents a CpG dinucleotide"
  misc_feature (61)..(61): /note="Nucleotide may be methylated to form 5-methylcytosine"
tgctaactcagcaagcgcgattacagtgctccaacttaataagttgataaaaagctgtcccgtggccagttcacaatggaactaaatagtttcgttccgagatgcctggggagtttctctgg

SEQ ID NO: 2968 - DNA, 122 bp, Homo sapiens
  misc_feature (61)..(62): /note="This region represents a CpG dinucleotide"
  misc_feature (61)..(61): /note="Nucleotide may be methylated to form 5-methylcytosine"
cactctgacctctcccttttctagtgattcttgcacttgctggcagttctgtgtctgcatcgcacagatatgcctgtggcccttattatttcaggtacattgatcttttcttcccaagtaga

SEQ ID NO: 2969 - DNA, 122 bp, Homo sapiens
  misc_feature (61)..(62): /note="This region represents a CpG dinucleotide"
  misc_feature (61)..(61): /note="Nucleotide may be methylated to form 5-methylcytosine"
gtaataatacctacaactaatacctaagtcacgggattactataaggcttaaagaagtaacgtacagcacaggccatgttgcctgacacaaggaaaagtgtcgagttctgtcactttcaaga

SEQ ID NO: 2970 - DNA, 122 bp, Homo sapiens
  misc_feature (61)..(62): /note="This region represents a CpG dinucleotide"
  misc_feature (61)..(61): /note="Nucleotide may be methylated to form 5-methylcytosine"
ctagggagcctaggaaatctacttcccagcaagagctataaaacctcacatcctaattgacggagacaaggaggaacagtgattcagaggcaactctaggggagcagccagctcaggcctga

SEQ ID NO: 2971 - DNA, 122 bp, Homo sapiens
  misc_feature (61)..(62): /note="This region represents a CpG dinucleotide"
  misc_feature (61)..(61): /note="Nucleotide may be methylated to form 5-methylcytosine"
agccttttcaaagtcaggccaagaagctgccttgggcatgcatctgaggatccagcgcagcggcttctgtagccgcacccactgtctctgcctgctgtctggtgccccactcccgtcctcct

SEQ ID NO: 2972 - DNA, 122 bp, Homo sapiens
  misc_feature (61)..(62): /note="This region represents a CpG dinucleotide"
  misc_feature (61)..(61): /note="Nucleotide may be methylated to form 5-methylcytosine"
tttttaaagctactgggcagaagcgtgaccaccagccaaggctgcttagaggcctgtcaccgctctccaactgcctgactcagaggatgcgctgggctcggccaggtggagctggagggcaa

SEQ ID NO: 2973 - DNA, 122 bp, Homo sapiens
  misc_feature (61)..(62): /note="This region represents a CpG dinucleotide"
  misc_feature (61)..(61): /note="Nucleotide may be methylated to form 5-methylcytosine"
cggggcccgggcccgcccccaccggccccaggcccggccgctccgccctccgcccgcctgcgcccgccctcagcccaagatttctagggcattggccgcgctgctgggtgatccctccgggc

SEQ ID NO: 2974 - DNA, 122 bp, Homo sapiens
  misc_feature (61)..(62): /note="This region represents a CpG dinucleotide"
  misc_feature (61)..(61): /note="Nucleotide may be methylated to form 5-methylcytosine"
tgaagttgcttaattggttgccttgacacaggcttattacatcttacatcattaagccttcgctgtaacaatatttttgaagcacagacaaaagatgaatttgagtagctattattttcctg

SEQ ID NO: 2975 - DNA, 122 bp, Homo sapiens
  misc_feature (61)..(62): /note="This region represents a CpG dinucleotide"
  misc_feature (61)..(61): /note="Nucleotide may be methylated to form 5-methylcytosine"
aaagaaactgaaggatagatacctaatagtcagccaggaccaccctaaaaggtattcttccgacataattacacttaatgtagtgactgtcaatattttccatataacctttgaaatttctt

SEQ ID NO: 2976 - DNA, 122 bp, Homo sapiens
  misc_feature (61)..(62): /note="This region represents a CpG dinucleotide"
  misc_feature (61)..(61): /note="Nucleotide may be methylated to form 5-methylcytosine"
attacaggcctgagccaccgcgcccagcctacaacaggaagactttgttaaatgaatgagcgcgcagggaagagcaggtgctttgtgaacttgagagcttcacttcctaatcctgtgactcc

SEQ ID NO: 2977 - DNA, 122 bp, Homo sapiens
  misc_feature (61)..(62): /note="This region represents a CpG dinucleotide"
  misc_feature (61)..(61): /note="Nucleotide may be methylated to form 5-methylcytosine"
tttgattggagcccggccatgcttgtgacatattgtctgtgactgttaaccacactgccgcggcaggactgagtcattgccaggaaatttacggccagcaaagctgaatatatttgctactt

SEQ ID NO: 2978 - DNA, 122 bp, Homo sapiens
  misc_feature (61)..(62): /note="This region represents a CpG dinucleotide"
  misc_feature (61)..(61): /note="Nucleotide may be methylated to form 5-methylcytosine"
aaatagctcagagtcctacaacaacaaaagtcttatgttaggtgtcatctgccaatcagccgcaggtttctttgtttttattctgggatccaggccaaaggaggagtccccatcgtggttat

SEQ ID NO: 2979 - DNA, 122 bp, Homo sapiens
  misc_feature (61)..(62): /note="This region represents a CpG dinucleotide"
  misc_feature (61)..(61): /note="Nucleotide may be methylated to form 5-methylcytosine"
tgtggatagtcctacctcaccctggtcaacctacatgatccttaagctaatggcgaatcacgatgaccttgtagacatgcacacaactatacctttgtccaacagatcataatatatctgct

SEQ ID NO: 2980 - DNA, 122 bp, Homo sapiens
  misc_feature (61)..(62): /note="This region represents a CpG dinucleotide"
  misc_feature (61)..(61): /note="Nucleotide may be methylated to form 5-methylcytosine"
gactgacattaaagaagtcttactgtaatagctgtctgggctgggcctgaaccaccgtcacgtgagttcactgcagagagatgttgcttaagttttgcaaagttcaagtcgtgacattggcc

SEQ ID NO: 2981 - DNA, 122 bp, Homo sapiens
  misc_feature (61)..(62): /note="This region represents a CpG dinucleotide"
  misc_feature (61)..(61): /note="Nucleotide may be methylated to form 5-methylcytosine"
tacaggcgtgagccaccgcacccagcctatgagccagtttttaaatcttataatgcttcacgtaatcctgagactgaagtgaaaatatctggagtaggaaaaccacagagttgtcctaggct

SEQ ID NO: 2982 - DNA, 122 bp, Homo sapiens
  misc_feature (61)..(62): /note="This region represents a CpG dinucleotide"
  misc_feature (61)..(61): /note="Nucleotide may be methylated to form 5-methylcytosine"
cttgagtgacgttttctattttgccccagaggcttttctccctttcatgtttgtgtcaaccgctattcaaagtggagaattagaatacctgggtagggaatgagtgtatatacatccactta

SEQ ID NO: 2983 - DNA, 122 bp, Homo sapiens
  misc_feature (61)..(62): /note="This region represents a CpG dinucleotide"
  misc_feature (61)..(61): /note="Nucleotide may be methylated to form 5-methylcytosine"
cagaggcaatgacagttgtcaattcttgactgcttactttggaacgcgtggggcgggtctcgtgacattttatattgtattccctcactgtactaatcttttcacatgcccatctccccagc

SEQ ID NO: 2984 - DNA, 122 bp, Homo sapiens
  misc_feature (61)..(62): /note="This region represents a CpG dinucleotide"
  misc_feature (61)..(61): /note="Nucleotide may be methylated to form 5-methylcytosine"
gtgacattactggtgcataatctaacttatcctgactaatacagccaccttacacaataacgcatttaactttctcagataaagtcaagtaatggagaaggaagttccagagctagttgaca

SEQ ID NO: 2985 - DNA, 122 bp, Homo sapiens
  misc_feature (61)..(62): /note="This region represents a CpG dinucleotide"
  misc_feature (61)..(61): /note="Nucleotide may be methylated to form 5-methylcytosine"
tcaggaataggcagaggcagacatcctggccagagtgactcagcaagtttagcacacaggcgcataactccacttgttaaatagcctgtttgtgtaagcttgtacttggctcagagccacta

SEQ ID NO: 2986 - DNA, 122 bp, Homo sapiens
  misc_feature (61)..(62): /note="This region represents a CpG dinucleotide"
  misc_feature (61)..(61): /note="Nucleotide may be methylated to form 5-methylcytosine"
tcgagtgtgttggttacagtttctcttctccaggcatttcaaactctgaagctcatctgtcggtggagagttagctaacaggcaaagctcggatattgagactgcatctgcagagctcctgc

SEQ ID NO: 2987 - DNA, 122 bp, Homo sapiens
  misc_feature (61)..(62): /note="This region represents a CpG dinucleotide"
  misc_feature (61)..(61): /note="Nucleotide may be methylated to form 5-methylcytosine"
ctagggccattgatgagctgtagtctgaaagcctggccccatggcctgccaagtagatttcgtttaaaaataactccttgcagctccggttgagagtgatttgtggaattaagatggtgtca

SEQ ID NO: 2988 - DNA, 122 bp, Homo sapiens
  misc_feature (61)..(62): /note="This region represents a CpG dinucleotide"
  misc_feature (61)..(61): /note="Nucleotide may be methylated to form 5-methylcytosine"
ccagaaaagtcatatgaggtcatattcgagaggagggtattgagcaagacttctaagaggcgcagagccctccggaatgacaaacagagattgtgacttggctggtttgatagcttgtgctg

SEQ ID NO: 2989 - DNA, 122 bp, Homo sapiens
  misc_feature (61)..(62): /note="This region represents a CpG dinucleotide"
  misc_feature (61)..(61): /note="Nucleotide may be methylated to form 5-methylcytosine"
gtgacctattgtgacatcaaatcttggagccactttaatgtgacttcactaaattgccttcgtccagtgcctcacagacagcatcccagcacatcatggagagctaagtgacagaacaggca

SEQ ID NO: 2990 - DNA, 122 bp, Homo sapiens
  misc_feature (61)..(62): /note="This region represents a CpG dinucleotide"
  misc_feature (61)..(61): /note="Nucleotide may be methylated to form 5-methylcytosine"
aatggttgttttaaatttgaaaatccggtcttctgtcccttacaaaggtacacagcaattcgcattcatctcagatccactctgaagcttgtagtcctgtctgtgagggaaagcttaatatc

SEQ ID NO: 2991 - DNA, 122 bp, Homo sapiens
  misc_feature (61)..(62): /note="This region represents a CpG dinucleotide"
  misc_feature (61)..(61): /note="Nucleotide may be methylated to form 5-methylcytosine"
ggcctggctccacccaggagtcccgaagccctgctctgtggaaggcctgggtcagagagccgggccacaggcaggcccacagcatatcctatgcagatcagatcccaatgcagccggggaaa

SEQ ID NO: 2992 - DNA, 122 bp, Homo sapiens
  misc_feature (61)..(62): /note="This region represents a CpG dinucleotide"
  misc_feature (61)..(61): /note="Nucleotide may be methylated to form 5-methylcytosine"
gcctcagaagtgtctgaggtctgcagggctgttcactcaattctaaatggctccagatagcggtgcttttagagttcttccaccctcccaccctgtcatttgtcacttctctgctagtgtta

SEQ ID NO: 2993 - DNA, 122 bp, Homo sapiens
  misc_feature (61)..(62): /note="This region represents a CpG dinucleotide"
  misc_feature (61)..(61): /note="Nucleotide may be methylated to form 5-methylcytosine"
tgagaggctgggtagactgttttgtcccctacaggctgatcaccagttcctcttaggaaccggtgaacctcagggggcccattgcacatccaggtgtgaaactgcggtgtggcctccaggtg

SEQ ID NO: 2994 - DNA, 122 bp, Homo sapiens
  misc_feature (61)..(62): /note="This region represents a CpG dinucleotide"
  misc_feature (61)..(61): /note="Nucleotide may be methylated to form 5-methylcytosine"
cctccatcacatgatttcttgactgcagtactgcagtagcttccttgctagacttgcctgcggtcttgccactctccaaaccactcctcccagggcagccagagtaaccttttaaaaatgga

SEQ ID NO: 2995 - DNA, 122 bp, Homo sapiens
  misc_feature (61)..(62): /note="This region represents a CpG dinucleotide"
  misc_feature (61)..(61): /note="Nucleotide may be methylated to form 5-methylcytosine"
atatattacaaaaaaggtttgagtctctttctgtgggatatatgatgcaacacaacaagccgtggattgggtgttgctttgtaaggaaaatcaattacatatgtcttaagtacttcaatctc

SEQ ID NO: 2996 - DNA, 122 bp, Homo sapiens
  misc_feature (61)..(62): /note="This region represents a CpG dinucleotide"
  misc_feature (61)..(61): /note="Nucleotide may be methylated to form 5-methylcytosine"
gttctagaccattagagccttttcagcttccttattaacatttattcatttctaattacacgagtagagggaagttgcaagaaatgtgtccctgaagattttcaaacttaatgcaaccattg

SEQ ID NO: 2997 - DNA, 122 bp, Homo sapiens
  misc_feature (61)..(62): /note="This region represents a CpG dinucleotide"
  misc_feature (61)..(61): /note="Nucleotide may be methylated to form 5-methylcytosine"
tttgtacccttaggtgatttcttattgttcattaccatccttttctttcagattgaagaacgtcccttagcatttcttgtagggtagggctagtgatgatgaaatccctcagctgctgctgc

SEQ ID NO: 2998 - DNA, 122 bp, Homo sapiens
  misc_feature (61)..(62): /note="This region represents a CpG dinucleotide"
  misc_feature (61)..(61): /note="Nucleotide may be methylated to form 5-methylcytosine"
gagtcaatgagaacaaggtgtgctgtttcctctgtgctgtttcttccctgccccactccccgcccctttgtcctatggtgcccaggctgcctgcactgcccagataccacaggccttgccag

SEQ ID NO: 2999 - DNA, 122 bp, Homo sapiens
  misc_feature (61)..(62): /note="This region represents a CpG dinucleotide"
  misc_feature (61)..(61): /note="Nucleotide may be methylated to form 5-methylcytosine"
gcaggtcttgacaagcatcatattcctgatgactgacctgaaccatttccggaggggagccgctggatagctggaaatcttgctgagcagtttcaggaaatacagcgtcatcatctttcaga

SEQ ID NO: 3000 - DNA, 122 bp, Homo sapiens
  misc_feature (61)..(62): /note="This region represents a CpG dinucleotide"
  misc_feature (61)..(61): /note="Nucleotide may be methylated to form 5-methylcytosine"
cagttatcttttctccaaccactcatttatttcctcatctccctcccctcctttcagctacgattacgatgatgagtaagatggactaaatactcagtatttacaatctagtcgaggctgag

SEQ ID NO: 3001 - DNA, 122 bp, Homo sapiens
  misc_feature (61)..(62): /note="This region represents a CpG dinucleotide"
  misc_feature (61)..(61): /note="Nucleotide may be methylated to form 5-methylcytosine"
gttcacactttaactctactgtgtaccaggtctttgtgaccctggcaaattttgtaacctcgcctgacgctagtctcctcaactcaaaagcagggtcatgatattcacctcatagagttggc

SEQ ID NO: 3002 - DNA, 122 bp, Homo sapiens
  misc_feature (61)..(62): /note="This region represents a CpG dinucleotide"
  misc_feature (61)..(61): /note="Nucleotide may be methylated to form 5-methylcytosine"
tggctctcagccagggagttccccatccagctgctgtgtgtgcatcacaggtctaaagagcgcccacggcctataacactgatcagtctgagtctcagtccatcctgccatgggttgcagac

SEQ ID NO: 3003 - DNA, 122 bp, Homo sapiens
  misc_feature (61)..(62): /note="This region represents a CpG dinucleotide"
  misc_feature (61)..(61): /note="Nucleotide may be methylated to form 5-methylcytosine"
aacaggagtttttaacaagtgctctagaatgactgcttcataggagagctgttacctagacgcaggagagaaatgaacatatgtaaagcaaggtaagtcattttaagcaactggatttgaaa

SEQ ID NO: 3004 - DNA, 122 bp, Homo sapiens
  misc_feature (61)..(62): /note="This region represents a CpG dinucleotide"
  misc_feature (61)..(61): /note="Nucleotide may be methylated to form 5-methylcytosine"
acccccaagaccggaacctgttacaccagagggttggtgcacattcacgatgccctctgtcgaagggccccaccttccatgcctgcgcgtctccttttgttctgtcaggtttagcattgagg

SEQ ID NO: 3005 - DNA, 122 bp, Homo sapiens
  misc_feature (61)..(62): /note="This region represents a CpG dinucleotide"
  misc_feature (61)..(61): /note="Nucleotide may be methylated to form 5-methylcytosine"
gctgcttttttttttgaggcggagttttgctcttgttgcccaggctggagtgcaatggcacgatctaggctcaccacaagggaggcgctgctttcatttggagcagccataagcaaaaggct

SEQ ID NO: 3006 - DNA, 122 bp, Homo sapiens
  misc_feature (61)..(62): /note="This region represents a CpG dinucleotide"
  misc_feature (61)..(61): /note="Nucleotide may be methylated to form 5-methylcytosine"
taaccgaattccattactgaaggaagtttttgaggcctttcctaacactcccattaacatcgatatcaaagtcaacaacaatgtgctgattaagaaggtactcaaggcattgcctcctctgg

SEQ ID NO: 3007 - DNA, 122 bp, Homo sapiens
  misc_feature (61)..(62): /note="This region represents a CpG dinucleotide"
  misc_feature (61)..(61): /note="Nucleotide may be methylated to form 5-methylcytosine"
ccctgcctcaggctattcctggcaatgcgttcagtcagggtgcaagctgtgtttggtatacgtgtgtgtttggtatacgtgttgtgtgtgtcagacaagcaggattggctgatggcgttttg

SEQ ID NO: 3008 - DNA, 122 bp, Homo sapiens
  misc_feature (61)..(62): /note="This region represents a CpG dinucleotide"
  misc_feature (61)..(61): /note="Nucleotide may be methylated to form 5-methylcytosine"
ttgataacctcggctcttttctcctctgccactcctagggccattgtgacagttgagagacgggatggggtgctcatgcaccatattttacaggtgaaaaaacaggttcagagagggaaagt

SEQ ID NO: 3009 - DNA, 122 bp, Homo sapiens
  misc_feature (61)..(62): /note="This region represents a CpG dinucleotide"
  misc_feature (61)..(61): /note="Nucleotide may be methylated to form 5-methylcytosine"
cctgcacctctgtcattggcagattcctgtgttgccaggggattacactggccattggaacgcttgcctgagtgtaatgtaagtatggcctggagtgacggagtgacaagatgcctatccag

SEQ ID NO: 3010 - DNA, 122 bp, Homo sapiens
  misc_feature (61)..(62): /note="This region represents a CpG dinucleotide"
  misc_feature (61)..(61): /note="Nucleotide may be methylated to form 5-methylcytosine"
ccagagaaccagaaataacctgggctggcaaccttggccttcaggcttctgaggcattgacgtgcagatataagtacctcccctgagttagggactggtagaagaaacgggatgtggacatt

SEQ ID NO: 3011 - DNA, 122 bp, Homo sapiens
  misc_feature (61)..(62): /note="This region represents a CpG dinucleotide"
  misc_feature (61)..(61): /note="Nucleotide may be methylated to form 5-methylcytosine"
aaagtgcaactggcaatgctctagagaaatagatacaattgcaactctctcattcaaccacgaaagcttttctccacgaacaggactttaacatgtcccacctaagggaagaagacagtagg

SEQ ID NO: 3012 - DNA, 122 bp, Homo sapiens
  misc_feature (61)..(62): /note="This region represents a CpG dinucleotide"
  misc_feature (61)..(61): /note="Nucleotide may be methylated to form 5-methylcytosine"
gtttgatctgataagcgcaagttcctgagagtctgttgagctgtggagcagccctgtctgcgtcactctacgggggacctgtgcccactccctgctcacatccctgacctctgctcgctgct

SEQ ID NO: 3013 - DNA, 122 bp, Homo sapiens
  misc_feature (61)..(62): /note="This region represents a CpG dinucleotide"
  misc_feature (61)..(61): /note="Nucleotide may be methylated to form 5-methylcytosine"
gattaaattacttcacattaatgggtaaatgaggcttaatccacaaaggtcaattccacacgtcattaaactctactatgtataaggcactaagtttaatcaattaatatacctatccttct

SEQ ID NO: 3014 - DNA, 122 bp, Homo sapiens
  misc_feature (61)..(62): /note="This region represents a CpG dinucleotide"
  misc_feature (61)..(61): /note="Nucleotide may be methylated to form 5-methylcytosine"
gttccgtttgtaaagagcaaggctgcacagacctgtctgctccgttgagacagtgaaggccgtctcacaaccgcaccttgggactcgcttccacataacacctcttctgttcctctcacggt

SEQ ID NO: 3015 - DNA, 122 bp, Homo sapiens
  misc_feature (61)..(62): /note="This region represents a CpG dinucleotide"
  misc_feature (61)..(61): /note="Nucleotide may be methylated to form 5-methylcytosine"
acactctgcttggctctgtgcttacatttgccacaggcggggaagatcagaactccccagcgatgtgtactggccagtgagtgctgccagggcaaagttgataaactaaagaaatgatgact

SEQ ID NO: 3016 - DNA, 122 bp, Homo sapiens
  misc_feature (61)..(62): /note="This region represents a CpG dinucleotide"
  misc_feature (61)..(61): /note="Nucleotide may be methylated to form 5-methylcytosine"
accaagcatggagcccttctgagcatggggtgctgagcaacctcacaggtcaaacatccacgaacctggccctgtctggtaaccacagtgaaccatcgcaagatacagcactatgtgcccag

SEQ ID NO: 3017 - DNA, 122 bp, Homo sapiens
  misc_feature (61)..(62): /note="This region represents a CpG dinucleotide"
  misc_feature (61)..(61): /note="Nucleotide may be methylated to form 5-methylcytosine"
tgtttcaagttcctcaggcccgttgtgtatacactagcatttgggaagagctggtttagacgtctcactacaatctgtcttaactttaatttggtctgcttgttttatctctttcaatttcc

SEQ ID NO: 3018 - DNA, 122 bp, Homo sapiens
  misc_feature (61)..(62): /note="This region represents a CpG dinucleotide"
  misc_feature (61)..(61): /note="Nucleotide may be methylated to form 5-methylcytosine"
gtggggaggcagacagcacggatcccctgaacaaagggatgattcacatccttggtgggacggagcaggaaggctggagatttcatcaagctactcacagcagcatgccatttaaaattcat

SEQ ID NO: 3019 - DNA, 122 bp, Homo sapiens
  misc_feature (61)..(62): /note="This region represents a CpG dinucleotide"
  misc_feature (61)..(61): /note="Nucleotide may be methylated to form 5-methylcytosine"
aggttcaggctagcaggttcaggctctggggacaggaaacgtgcctgttgcttatttctgcgtccataatggctagtacagagaccacacgtcactgcatagtgagggacactgggggtgtg

SEQ ID NO: 3020 - DNA, 122 bp, Homo sapiens
  misc_feature (61)..(62): /note="This region represents a CpG dinucleotide"
  misc_feature (61)..(61): /note="Nucleotide may be methylated to form 5-methylcytosine"
cctcattcctcgtggcctccttttcattgctgttgcttcctcaatcggtccttagtgaaacgccaatctcagtggtgtgggaacgagtatgagagacctcgctctaggtgctcgcacggaac

SEQ ID NO: 3021 - DNA, 122 bp, Homo sapiens
  misc_feature (61)..(62): /note="This region represents a CpG dinucleotide"
  misc_feature (61)..(61): /note="Nucleotide may be methylated to form 5-methylcytosine"
ctctgcaaaatatcgtgtgctcacttatgtgtcttcttttgactaaaatgaaagctttgtcgatctgccttgtacatctgccttgctcacagctgtatccctagggctcagctgtccgggtg

SEQ ID NO: 3022 - DNA, 122 bp, Homo sapiens
  misc_feature (61)..(62): /note="This region represents a CpG dinucleotide"
  misc_feature (61)..(61): /note="Nucleotide may be methylated to form 5-methylcytosine"
atactctcatctttccaatggtcatcacaataattgcttaactaagtcagtgttatggcacgagtgtttgtatattgttctaaaatctttccattggctgtgactctagtgtattaaccatt

SEQ ID NO: 3023 - DNA, 122 bp, Homo sapiens
  misc_feature (61)..(62): /note="This region represents a CpG dinucleotide"
  misc_feature (61)..(61): /note="Nucleotide may be methylated to form 5-methylcytosine"
tacaaagaattaattgaagcaaactcgctcagataagatcattttgacctctgttcttcacgctagacattttcattacagaacaaaacagtcacaagtttactaatcctaaatgacttggc

SEQ ID NO: 3024 - DNA, 122 bp, Homo sapiens
  misc_feature (61)..(62): /note="This region represents a CpG dinucleotide"
  misc_feature (61)..(61): /note="Nucleotide may be methylated to form 5-methylcytosine"
tagcagctgcagcagaacagctagtagtcagattccagaagccaaatgttccttataaggcggcaggatgtggtggagagagtctagaactagcaggcagctgacccagcttgttctgcttc

SEQ ID NO: 3025 - DNA, 122 bp, Homo sapiens
  misc_feature (61)..(62): /note="This region represents a CpG dinucleotide"
  misc_feature (61)..(61): /note="Nucleotide may be methylated to form 5-methylcytosine"
tatgagattatactgatcctattctcctatttcttgttagtgctgaacaagcacttctggcgctcacaactcaaattcctgccatgttgctctgtgccttagtatgtttggctatgaagtaa

SEQ ID NO: 3026 - DNA, 122 bp, Homo sapiens
  misc_feature (61)..(62): /note="This region represents a CpG dinucleotide"
  misc_feature (61)..(61): /note="Nucleotide may be methylated to form 5-methylcytosine"
tttcttctaaactctttaatacgatcctccaaaatctgactcaaatctcttttgtctagacgtttcttctggaactctcttaacacagcctctgagctttagcctgtcaaaatgactttctt

SEQ ID NO: 3027 - DNA, 122 bp, Homo sapiens
  misc_feature (61)..(62): /note="This region represents a CpG dinucleotide"
  misc_feature (61)..(61): /note="Nucleotide may be methylated to form 5-methylcytosine"
acatctcatcttcctgtttacctgcattatgagttggacaaataaattgtagctcctctccgtcttgccatgtttcctgtttagaactttcaggcatcccgtggcatttacagaaggctctg

SEQ ID NO: 3028 - DNA, 122 bp, Homo sapiens
  misc_feature (61)..(62): /note="This region represents a CpG dinucleotide"
  misc_feature (61)..(61): /note="Nucleotide may be methylated to form 5-methylcytosine"
ccctgaccacagcgcatctcacgccggcgagcaggtccaccctgaccatggcacatctcacgccggtgagcaggtccaccctgacaaaggaaagggagagcccaggagtgtccacttccagc

SEQ ID NO: 3029 - DNA, 122 bp, Homo sapiens
  misc_feature (61)..(62): /note="This region represents a CpG dinucleotide"
  misc_feature (61)..(61): /note="Nucleotide may be methylated to form 5-methylcytosine"
agtgatatcagggctggtgtctttgtgattctctaggtctttctctcaggctcatgacttcgtggtggcaaaatgctactctggctccacccaacatgtttatgattaaggcatgaaggatg

SEQ ID NO: 3030 - DNA, 122 bp, Homo sapiens
  misc_feature (61)..(62): /note="This region represents a CpG dinucleotide"
  misc_feature (61)..(61): /note="Nucleotide may be methylated to form 5-methylcytosine"
caattatctaagctgcaacttaaaagcaatggcttaaacaagattaagaagctgcttccccggagcttgcagtgagccgagattgcgccactgcagtccgcagtccggcctgggcgacagag

SEQ ID NO: 3031 - DNA, 122 bp, Homo sapiens
  misc_feature (61)..(62): /note="This region represents a CpG dinucleotide"
  misc_feature (61)..(61): /note="Nucleotide may be methylated to form 5-methylcytosine"
tggggtattgtcttctgaactctgacaaggacaatccactattccaaaagctggagaaaacgatgaactaagagagtgtcatttgaaatctgcttacctagagcagaagccactggagccac

SEQ ID NO: 3032 - DNA, 122 bp, Homo sapiens
  misc_feature (61)..(62): /note="This region represents a CpG dinucleotide"
  misc_feature (61)..(61): /note="Nucleotide may be methylated to form 5-methylcytosine"
tcctgagtcactcagtgatggagggaagcctgtaggacttgatagacaaggatcacttcacgatgagtcacatttgatcctcacttgggccatgagaagagggggactgctgaagtgggttt

SEQ ID NO: 3033 - DNA, 122 bp, Homo sapiens
  misc_feature (61)..(62): /note="This region represents a CpG dinucleotide"
  misc_feature (61)..(61): /note="Nucleotide may be methylated to form 5-methylcytosine"
gaaacccaaggttatggatgggaacaatgaatcattggtgtgattacattatcctttaaccgtaatgggtttgccttgcattaagtaaccagagggaaagaaagcacctgttccttaactct

SEQ ID NO: 3034 - DNA, 122 bp, Homo sapiens
  misc_feature (61)..(62): /note="This region represents a CpG dinucleotide"
  misc_feature (61)..(61): /note="Nucleotide may be methylated to form 5-methylcytosine"
gtagcataatccattttaggaggagaggaggaggaaggttactgaagcccagaaaggtgacgttacttgttacacggacacacagccgttcaatggaagaacccatactcaacaggaatggc

SEQ ID NO: 3035 - DNA, 122 bp, Homo sapiens
  misc_feature (61)..(62): /note="This region represents a CpG dinucleotide"
  misc_feature (61)..(61): /note="Nucleotide may be methylated to form 5-methylcytosine"
gggatgattatgaacaactactcaaaacaccatgcctaataaccccagggtggatgtgggcggggactgggcctagagggagtagttgactgggaaggggagagcagggaggcccctgggaa

SEQ ID NO: 3036 - DNA, 122 bp, Homo sapiens
  misc_feature (61)..(62): /note="This region represents a CpG dinucleotide"
  misc_feature (61)..(61): /note="Nucleotide may be methylated to form 5-methylcytosine"
ttccttgttatgcaagcgcttgctttcagtttcaagttgtacaatcctagggctcacaatcggtgacccaatacatgacagcctttcatagtctttaatgcagtctttacaggaaccttcca

SEQ ID NO: 3037 - DNA, 122 bp, Homo sapiens
  misc_feature (61)..(62): /note="This region represents a CpG dinucleotide"
  misc_feature (61)..(61): /note="Nucleotide may be methylated to form 5-methylcytosine"
gtttgagaagaatctacaaattcaacaatggaactgattgagcaggttttggtagagccacgcaacagagttttgtgcaaccattcaaaatgatcatatggaagtatatttatttactggag

SEQ ID NO: 3038 - DNA, 122 bp, Homo sapiens
  misc_feature (61)..(62): /note="This region represents a CpG dinucleotide"
  misc_feature (61)..(61): /note="Nucleotide may be methylated to form 5-methylcytosine"
atgatgcagatctgagtcaggctctttgtctggccatctccgtgtcagagatccttcaagcgaatcagctacaaggggtaagtaaaggaaacccagtttgttaggggactgttcattttaaa

SEQ ID NO: 3039 - DNA, 122 bp, Homo sapiens
  misc_feature (61)..(62): /note="This region represents a CpG dinucleotide"
  misc_feature (61)..(61): /note="Nucleotide may be methylated to form 5-methylcytosine"
ccctagcacacgcatctgctggtttccaggcgtggctgccgtcctggtggtgtatgtggccgtcgtgttgaccacgttcttgacggtttgttaggcaaccttttggcatggctggccctcct

SEQ ID NO: 3040 - DNA, 122 bp, Homo sapiens
  misc_feature (61)..(62): /note="This region represents a CpG dinucleotide"
  misc_feature (61)..(61): /note="Nucleotide may be methylated to form 5-methylcytosine"
aagaaataagagaaaatcaaggggaagtgattttggaagtacaagaaacatattgtgaaacgtcaggcaaattgccgagtgagcaggttttgcagcaaccaatgaatgctcgggtgaaaagt

SEQ ID NO: 3041 - DNA, 122 bp, Homo sapiens
  misc_feature (61)..(62): /note="This region represents a CpG dinucleotide"
  misc_feature (61)..(61): /note="Nucleotide may be methylated to form 5-methylcytosine"
taaattcatttaactcagaaagcaccactttagtgtttccaaggttaagagacttgaccacggttaactggtcaactaataacaaataacagagctggaaatggaaactaactctaactctc

SEQ ID NO: 3042 - DNA, 122 bp, Homo sapiens
  misc_feature (61)..(62): /note="This region represents a CpG dinucleotide"
  misc_feature (61)..(61): /note="Nucleotide may be methylated to form 5-methylcytosine"
gttcgaatttatctgtgtgatttatttccaatcccagctggtggattagagcctgagcaccgctctcctccttttcctccccactaatcatcacttctagttattctagcaaataagttact

SEQ ID NO: 3043 - DNA, 122 bp, Homo sapiens
  misc_feature (61)..(62): /note="This region represents a CpG dinucleotide"
  misc_feature (61)..(61): /note="Nucleotide may be methylated to form 5-methylcytosine"
gtccaagagggtggtgtcaatcatctccagctgtaaccattaggaattgggaaagaggcacgggaagtcacacccagctcttctggggagcatcgcacgccacttctgctcatatctcatta

SEQ ID NO: 3044 - DNA, 122 bp, Homo sapiens
  misc_feature (61)..(62): /note="This region represents a CpG dinucleotide"
  misc_feature (61)..(61): /note="Nucleotide may be methylated to form 5-methylcytosine"
ttcttttgccaccacaggtattaaagcaccacatggtgacaagtgaatcacaaacacacgcgtacaggcacacccaagcacacagtgcctagaaacagctttttgttgtaaagtgtccaccc

SEQ ID NO: 3045 - DNA, 122 bp, Homo sapiens
  misc_feature (61)..(62): /note="This region represents a CpG dinucleotide"
  misc_feature (61)..(61): /note="Nucleotide may be methylated to form 5-methylcytosine"
taattagcatatgggtacatttaaagatgggtcagccccactctgtcagtgacttgctgtcgtgagcttggtgcatgtcaagtgttcaaacacttcctatttttgctcatctacccaaggtg

SEQ ID NO: 3046 - DNA, 122 bp, Homo sapiens
  misc_feature (61)..(62): /note="This region represents a CpG dinucleotide"
  misc_feature (61)..(61): /note="Nucleotide may be methylated to form 5-methylcytosine"
tcttttcctcacttacctaggttttgccacatgctgaaaatttcacaacccattgttacccgcatgtcaccatacctgaaatagaacaaaaaaccaaacctgatacaatgcctccagaacaa

SEQ ID NO: 3047 - DNA, 122 bp, Homo sapiens
  misc_feature (61)..(62): /note="This region represents a CpG dinucleotide"
  misc_feature (61)..(61): /note="Nucleotide may be methylated to form 5-methylcytosine"
ctcttctgcagatggtggcctggaggagaagacccttttccactgcaccgagacgatcagcgggaagaatgagtgggtgtgtattcattatctattgctgtatgaaaaactaccctacagtg

SEQ ID NO: 3048 - DNA, 122 bp, Homo sapiens
  misc_feature (61)..(62): /note="This region represents a CpG dinucleotide"
  misc_feature (61)..(61): /note="Nucleotide may be methylated to form 5-methylcytosine"
tgagctgctgcacccggcccaagcctcttctcttaatccagtcactggtgattaactatccggaagggctcactcaatactccccactctacctcctgcccatttcctgacctttgcccctg

SEQ ID NO: 3049 - DNA, 122 bp, Homo sapiens
  misc_feature (61)..(62): /note="This region represents a CpG dinucleotide"
  misc_feature (61)..(61): /note="Nucleotide may be methylated to form 5-methylcytosine"
cagctgtgagttgcatgaggtcattgatgatggcttgcttgtcaactgatccagcaggggcgcctggcctcgtgtctgggaaaagctgtggtaattgactattctgcaaatcatccaaaatc

SEQ ID NO: 3050 - DNA, 122 bp, Homo sapiens
  misc_feature (61)..(62): /note="This region represents a CpG dinucleotide"
  misc_feature (61)..(61): /note="Nucleotide may be methylated to form 5-methylcytosine"
gtgaggtaggcaaaactggaggaggaaaccggggaggaggagtgagtctctaactccccacgctgtgtggcctaataagccttgatctgtgttctacagactctgagctctgtgctcctctc

SEQ ID NO: 3051 - DNA, 122 bp, Homo sapiens
  misc_feature (61)..(62): /note="This region represents a CpG dinucleotide"
  misc_feature (61)..(61): /note="Nucleotide may be methylated to form 5-methylcytosine"
ggccttagcagacagaatgggcggctgctgagggaagcgcccagaggcagtggctgagcccgcgtggtgatgctgggctggtttgctgatcctggacctagtcaactgtgccaggaactaaa

SEQ ID NO: 3052 - DNA, 122 bp, Homo sapiens
  misc_feature (61)..(62): /note="This region represents a CpG dinucleotide"
  misc_feature (61)..(61): /note="Nucleotide may be methylated to form 5-methylcytosine"
tggagggggcagggtttccggaagctgggtgtacacactctgcctctaggacgcctgagacggagactagatgctgtccctcaagcagaaggaattgagcaactactctccacctcatctgc

SEQ ID NO: 3053 - DNA, 122 bp, Homo sapiens
  misc_feature (61)..(62): /note="This region represents a CpG dinucleotide"
  misc_feature (61)..(61): /note="Nucleotide may be methylated to form 5-methylcytosine"
gagaggcaagaactggtctagtcacccccgctgccttcaggtctgccttgtacctgacatcgctgcaggaacactgctggaggctggggcttggctgcaaggtggtattctctagcactttc

SEQ ID NO: 3054 - DNA, 122 bp, Homo sapiens
  misc_feature (61)..(62): /note="This region represents a CpG dinucleotide"
  misc_feature (61)..(61): /note="Nucleotide may be methylated to form 5-methylcytosine"
cagccagtcctcctcaaggttcaggaaagctgcctggagcagaaggagtctcaaaattcacgggcaccacttgcactgcagctgaggatccccagacagcagcatccccacccccaggtggt

SEQ ID NO: 3055 - DNA, 122 bp, Homo sapiens
  misc_feature (61)..(62): /note="This region represents a CpG dinucleotide"
  misc_feature (61)..(61): /note="Nucleotide may be methylated to form 5-methylcytosine"
gcacccctagtggtacagcaacacatgctcaaatctcttgatgagtaacattttccatgtcgtacctgtggcatctcagtgacaaatggattctagggccctggaatattgccactcactga

SEQ ID NO: 3056 - DNA, 122 bp, Homo sapiens
  misc_feature (61)..(62): /note="This region represents a CpG dinucleotide"
  misc_feature (61)..(61): /note="Nucleotide may be methylated to form 5-methylcytosine"
ggcctagcacagcctgatctctaacatcataagtcagaaatgacgtcacggttacagccacgatactgatgacagccattcacaacacgctgggccagtgcgaaatcctgtcttgctgactg

SEQ ID NO: 3057 - DNA, 122 bp, Homo sapiens
  misc_feature (61)..(62): /note="This region represents a CpG dinucleotide"
  misc_feature (61)..(61): /note="Nucleotide may be methylated to form 5-methylcytosine"
ttcccagatttcgccactgaatattttgattcagtagacttagttcaggatcttgaaatacgtaagtatgacaaaggctacagctgattcatatgcttggcaagtttgggagagactgtact

SEQ ID NO: 3058 - DNA, 122 bp, Homo sapiens
  misc_feature (61)..(62): /note="This region represents a CpG dinucleotide"
  misc_feature (61)..(61): /note="Nucleotide may be methylated to form 5-methylcytosine"
gtacctccttcccagaactgttgaagagtccgtctgccccatgtgtaggagggaaagaggcgcttcaggccacacagggacacagacaagagggagagggagtaagcataggcaatgtggga

SEQ ID NO: 3059 - DNA, 122 bp, Homo sapiens
  misc_feature (61)..(62): /note="This region represents a CpG dinucleotide"
  misc_feature (61)..(61): /note="Nucleotide may be methylated to form 5-methylcytosine"
ctagatcatcctttgggcaagaaccagttttgaagtgcttaaagaagataactccagtttcgcttcagtcatcaatcatgtgtgattctgtgtaggcaaaagacaatctcaatattcatttg

SEQ ID NO: 3060 - DNA, 122 bp, Homo sapiens
  misc_feature (61)..(62): /note="This region represents a CpG dinucleotide"
  misc_feature (61)..(61): /note="Nucleotide may be methylated to form 5-methylcytosine"
aggactcctctctgtccttgcagtcagctggacagggcacctggacaggtcagaggctgccgccatccccagggaacaagttaaacaggaacaggatgagttaaccagtaactgccggccac

SEQ ID NO: 3061 - DNA, 122 bp, Homo sapiens
  misc_feature (61)..(62): /note="This region represents a CpG dinucleotide"
  misc_feature (61)..(61): /note="Nucleotide may be methylated to form 5-methylcytosine"
gcagtccgacgagggcgacacgagggcagacggtgtagccgaatcgtagccagagctgggcggcggcgagcgcccgtgcaccttcatgtgcttacgcagcgagctggggtgcgtgtagcact

SEQ ID NO: 3062 - DNA, 122 bp, Homo sapiens
  misc_feature (61)..(62): /note="This region represents a CpG dinucleotide"
  misc_feature (61)..(61): /note="Nucleotide may be methylated to form 5-methylcytosine"
aggcatcatgattatccctgtcttaaggatggggaaaggagacccagggtgactgggtaacgtgcctactggaggaaaagagggaggaaataaaccccagcaacctgccttctgtgcctata

SEQ ID NO: 3063 - DNA, 122 bp, Homo sapiens
  misc_feature (61)..(62): /note="This region represents a CpG dinucleotide"
  misc_feature (61)..(61): /note="Nucleotide may be methylated to form 5-methylcytosine"
taaaatatcaagagaattactcagtaattctctgcttcaagactgagctcttgggcctggcgtggtggctgatgcctgtaatgccagcactttgggagaccgaggcgggcggatcatgaggt

SEQ ID NO: 3064 - DNA, 122 bp, Homo sapiens
  misc_feature (61)..(62): /note="This region represents a CpG dinucleotide"
  misc_feature (61)..(61): /note="Nucleotide may be methylated to form 5-methylcytosine"
gagcatttacaaggaaaggacaggatgtcggggagcacagggtggggagtgtggggcagacgctaggaggaagtcccttgagattaaggcctgaagcataactttagacaaagagtgcagaa

SEQ ID NO: 3065 - DNA, 122 bp, Homo sapiens
  misc_feature (61)..(62): /note="This region represents a CpG dinucleotide"
  misc_feature (61)..(61): /note="Nucleotide may be methylated to form 5-methylcytosine"
tcagttgcaacatgagggcaatgagtccaggatttttagctcagcagggctgagatattgcgtcacagcgctcagtgtttgcaaatgtgctttgtcagctgtggagcctgaagcaaatgttc

SEQ ID NO: 3066 - DNA, 122 bp, Homo sapiens
  misc_feature (61)..(62): /note="This region represents a CpG dinucleotide"
  misc_feature (61)..(61): /note="Nucleotide may be methylated to form 5-methylcytosine"
atttagcattatagccataggcctgggctggcagtggtaagacttaatgctctatgagctcggatggggtggagaaggtttgttatgtccatgccagctggattccattctaatcaaagact

SEQ ID NO: 3067 - DNA, 122 bp, Homo sapiens
  misc_feature (61)..(62): /note="This region represents a CpG dinucleotide"
  misc_feature (61)..(61): /note="Nucleotide may be methylated to form 5-methylcytosine"
aattctatacaagactgaggtccctaaatctcctagatccaggcatagtaggctgaataacgccaccccaccccgcccgaagatgtccacaccctaatgctcagaacctgcgaacacattcc

SEQ ID NO: 3068 - DNA, 122 bp, Homo sapiens
  misc_feature (61)..(62): /note="This region represents a CpG dinucleotide"
  misc_feature (61)..(61): /note="Nucleotide may be methylated to form 5-methylcytosine"
ttatgaatgtgggttcaaagtgctttgatttgtttaaataccttgcataatgttaaagggcgaagggaggtgctccagtggattatttttcaatttaggagttcaaattctttgtaaatttg

SEQ ID NO: 3069 - DNA, 122 bp, Homo sapiens
  misc_feature (61)..(62): /note="This region represents a CpG dinucleotide"
  misc_feature (61)..(61): /note="Nucleotide may be methylated to form 5-methylcytosine"
caagcagattaggagtaacgttatcccttgacttaggcctgtatgactgagacacacatacgcacacacatgcacggcactgcatgtgctcagaaggacctggtctcatcctgaaggtggag

SEQ ID NO: 3070 - DNA, 122 bp, Homo sapiens
  misc_feature (61)..(62): /note="This region represents a CpG dinucleotide"
  misc_feature (61)..(61): /note="Nucleotide may be methylated to form 5-methylcytosine"
tagctcaatatatcctctggggaccatcaacatttcctattaaagataactacacctggccgagcgcggtggctaacgcctgtaatcccagaactttgggaagccaaggcgggtggatcaca

SEQ ID NO: 3071 - DNA, 122 bp, Homo sapiens
  misc_feature (61)..(62): /note="This region represents a CpG dinucleotide"
  misc_feature (61)..(61): /note="Nucleotide may be methylated to form 5-methylcytosine"
tgattcacagatgaatcagaggccctatgagtagagagcttctcctgaagtcacacagctcgtgagtggtggagcaatgacaggcacatgactctccaggtccctagtccagttttctgggt

SEQ ID NO: 3072 - DNA, 122 bp, Homo sapiens
  misc_feature (61)..(62): /note="This region represents a CpG dinucleotide"
  misc_feature (61)..(61): /note="Nucleotide may be methylated to form 5-methylcytosine"
ctggcgctctggatcaagtctcctcccgagctgcattcccaggctctgaccttccgtcctcgcccgggacttacgccctgagcctccacgcccatgtggcagaggatccagcctgcctgcgc

SEQ ID NO: 3073 - DNA, 122 bp, Homo sapiens
  misc_feature (61)..(62): /note="This region represents a CpG dinucleotide"
  misc_feature (61)..(61): /note="Nucleotide may be methylated to form 5-methylcytosine"
ctgttgtacagagtggactgcttattcaccagggagttctcaaacacctttctctatgggcgctgtcccaaataatgtcaagagagaaaaaattaaaaatgagctcctgccctctaagaaca

SEQ ID NO: 3074 - DNA, 122 bp, Homo sapiens
  misc_feature (61)..(62): /note="This region represents a CpG dinucleotide"
  misc_feature (61)..(61): /note="Nucleotide may be methylated to form 5-methylcytosine"
gttggtgtggcattatataaaatgtggccagttacaggacaaagttccctcattccttctcgtctttcgtgtttctcttcacatatttgttttttcacatatctgatctcacacttgcattt

SEQ ID NO: 3075 - DNA, 122 bp, Homo sapiens
  misc_feature (61)..(62): /note="This region represents a CpG dinucleotide"
  misc_feature (61)..(61): /note="Nucleotide may be methylated to form 5-methylcytosine"
aacatgcctctctaagtcatcctgtaaggtgaccccgaagtgtgacttgtcacaccatcccgccttctttaccgcctgagccgtggagggcagcctggcctgatgcaccaaggattcatgct

SEQ ID NO: 3076 - DNA, 122 bp, Homo sapiens
  misc_feature (61)..(62): /note="This region represents a CpG dinucleotide"
  misc_feature (61)..(61): /note="Nucleotide may be methylated to form 5-methylcytosine"
cctgcccgcccttctcctccagggcatcctacaaatgtcctgtgccaccacctctcatagcgctgccaggagcagtgtgagaaggactcatgaccacgcctcaatcctgaattcccctcgcc

SEQ ID NO: 3077 - DNA, 122 bp, Homo sapiens
  misc_feature (61)..(62): /note="This region represents a CpG dinucleotide"
  misc_feature (61)..(61): /note="Nucleotide may be methylated to form 5-methylcytosine"
aaggaagctgaaattgtaatcttgtgttccctacgacctgctactgaaaggcagctgtcacgcaaaactatgaaattagcttaaacctctttttagagcacgtgttcaccaagattttaatt

SEQ ID NO: 3078 - DNA, 122 bp, Homo sapiens
  misc_feature (61)..(62): /note="This region represents a CpG dinucleotide"
  misc_feature (61)..(61): /note="Nucleotide may be methylated to form 5-methylcytosine"
gctgggtcagtgataatgcgtatactgccaaactgtcctacaaacaggccatcctctaaccgttagtgtgataggcagaataaagcctcctcccagacatatccatgtcctaatcctgagag

SEQ ID NO: 3079 - DNA, 122 bp, Homo sapiens
  misc_feature (61)..(62): /note="This region represents a CpG dinucleotide"
  misc_feature (61)..(61): /note="Nucleotide may be methylated to form 5-methylcytosine"
agagtggcatgaaccctgagtgtgatgtgattcatcggaagattacaaggggaggcatgacgtgctgatgtggcttttgacaagattcctcaggctgccacactgagagacatggcaaatgc

SEQ ID NO: 3080 - DNA, 122 bp, Homo sapiens
  misc_feature (61)..(62): /note="This region represents a CpG dinucleotide"
  misc_feature (61)..(61): /note="Nucleotide may be methylated to form 5-methylcytosine"
atatagagagtcatgtgttgcttaatgacaaggatactttctgagaaatgcattgttaggcgatttcatggttgtgtgaaatcacagagcgtgttgctgcaaacctaggtggtgtggcctac

SEQ ID NO: 3081 - DNA, 122 bp, Homo sapiens
  misc_feature (61)..(62): /note="This region represents a CpG dinucleotide"
  misc_feature (61)..(61): /note="Nucleotide may be methylated to form 5-methylcytosine"
tgcccttggacagataagaaaactgcagccccaggcacagaggcacaagctgagaggtgacgtcaggactgaactgtgagcctgggagtccaaatctaggctcacccagtctttctggctcc

SEQ ID NO: 3082 - DNA, 122 bp, Homo sapiens
  misc_feature (61)..(62): /note="This region represents a CpG dinucleotide"
  misc_feature (61)..(61): /note="Nucleotide may be methylated to form 5-methylcytosine"
cagctttcctttgccacttcataccctatactcagtgtcttccactttctgcagtctctgcgaaggttgggaagaacctgtgcttcctgattgttgtaattgccttgtcatttatctagcac

SEQ ID NO: 3083 - DNA, 122 bp, Homo sapiens
  misc_feature (61)..(62): /note="This region represents a CpG dinucleotide"
  misc_feature (61)..(61): /note="Nucleotide may be methylated to form 5-methylcytosine"
ggacattgctggctgtcatgtggattaagtgagattgataaaggtaaaacgcacacacaacgcctggctggaaggtacacaatgagtgttcactaaatcagaattggaaacatgctgtcttg

SEQ ID NO: 3084 - DNA, 122 bp, Homo sapiens
  misc_feature (61)..(62): /note="This region represents a CpG dinucleotide"
  misc_feature (61)..(61): /note="Nucleotide may be methylated to form 5-methylcytosine"
acgtattgtcttttttttgttctaagatttcatgttacatttagtcatcatgtcaccttacgctcctcttggctgtgacagttactcaggctttcctggtttgacagttttaaggagccctg

SEQ ID NO: 3085 - DNA, 122 bp, Homo sapiens
  misc_feature (61)..(62): /note="This region represents a CpG dinucleotide"
  misc_feature (61)..(61): /note="Nucleotide may be methylated to form 5-methylcytosine"
gagccagattgcagggtgtgaatcccatttactagctctgtgatttggggcaggttaactcgctgtgcctctttcttcatttgggctgttgtgaggatttagtgaattcatatatataagcc

SEQ ID NO: 3086 - DNA, 122 bp, Homo sapiens
  misc_feature (61)..(62): /note="This region represents a CpG dinucleotide"
  misc_feature (61)..(61): /note="Nucleotide may be methylated to form 5-methylcytosine"
actcctcccaggagccgctttccacccacagtctcccttctgggagcatggggcaggtggcgaggtgctgggttcctttctcacccatgctggtcccagcaggctgaactgagcagctctgt

SEQ ID NO: 3087 - DNA, 122 bp, Homo sapiens
  misc_feature (61)..(62): /note="This region represents a CpG dinucleotide"
  misc_feature (61)..(61): /note="Nucleotide may be methylated to form 5-methylcytosine"
aggagctctcgcctacttatctcagttcctgttccccagactcaggagtcagagatgtcacgtattctctccaggggaggagaaactgaggaggcagtagagcctacgtgtgtcttgttggg

SEQ ID NO: 3088 - DNA, 122 bp, Homo sapiens
  misc_feature (61)..(62): /note="This region represents a CpG dinucleotide"
  misc_feature (61)..(61): /note="Nucleotide may be methylated to form 5-methylcytosine"
tgaaaataaagaagttctcagttatactgcagcttgttcatgcctcctgcctcgggatgccgcagtggctgccccagccctgccctttcagcctcagcccttccctcagtgaaggagagaaa

SEQ ID NO: 3089 - DNA, 122 bp, Homo sapiens
  misc_feature (61)..(62): /note="This region represents a CpG dinucleotide"
  misc_feature (61)..(61): /note="Nucleotide may be methylated to form 5-methylcytosine"
cttcacttcttggtgactaatactagttgacaaaacagcatattctaaactgattgtcttcgttatccagtagctttcctattctccataacaaatgttccaaatctttgattactcacctc

SEQ ID NO: 3090 - DNA, 122 bp, Homo sapiens
  misc_feature (61)..(62): /note="This region represents a CpG dinucleotide"
  misc_feature (61)..(61): /note="Nucleotide may be methylated to form 5-methylcytosine"
gctggccatcgagaagaccgagaggcagggtcaggggcggcacttttaagatagtgacaacgagagcagcgtggagccagacgctgctgcgagctgagctgcgatcgcaaatgcacgcagct

SEQ ID NO: 3091 - DNA, 122 bp, Homo sapiens
  misc_feature (61)..(62): /note="This region represents a CpG dinucleotide"
  misc_feature (61)..(61): /note="Nucleotide may be methylated to form 5-methylcytosine"
atccagctttaggatgtgctggcggctgcaacaaacatgcactctgatcaatgagctctgcgctcattcactccacacgtgtttactgagcgtctactgtgtctaagaccctgagctctgca

SEQ ID NO: 3092 - DNA, 122 bp, Homo sapiens
  misc_feature (61)..(62): /note="This region represents a CpG dinucleotide"
  misc_feature (61)..(61): /note="Nucleotide may be methylated to form 5-methylcytosine"
gacacatgtgtatgccatcgttctcataaatgctcatggaaaacaggacagtcttgtccccggtttccttcccaggcagattctaacccctgagtcacggactttgcagctagcttctgagc

SEQ ID NO: 3093 - DNA, 122 bp, Homo sapiens
  misc_feature (61)..(62): /note="This region represents a CpG dinucleotide"
  misc_feature (61)..(61): /note="Nucleotide may be methylated to form 5-methylcytosine"
tattatgacctccactttacacgtgacgtttaccaagagtaagcaacctgccaaaggtcacgcagtacgtggtgcagcagtgactcaaccccaaggcagctagactttacagcccaagttct

SEQ ID NO: 3094 - DNA, 122 bp, Homo sapiens
  misc_feature (61)..(62): /note="This region represents a CpG dinucleotide"
  misc_feature (61)..(61): /note="Nucleotide may be methylated to form 5-methylcytosine"
cttgctcctgacaatatactactgttacagcaattctgtagccagtaagctggctggcaacgtgtaaagtggattatatctacaccatggcccagccttccttccccatgaggaagaggctt

SEQ ID NO: 3095 - DNA, 122 bp, Homo sapiens
  misc_feature (61)..(62): /note="This region represents a CpG dinucleotide"
  misc_feature (61)..(61): /note="Nucleotide may be methylated to form 5-methylcytosine"
agaaccaggggcggcggctgtgatgaggtcagagatcatcataagatttgtgaaccacatcgtcaaggccccgtggacgacagcaaaaataacaggtcacagggaatgacgtgacctgattc

SEQ ID NO: 3096 - DNA, 122 bp, Homo sapiens
  misc_feature (61)..(62): /note="This region represents a CpG dinucleotide"
  misc_feature (61)..(61): /note="Nucleotide may be methylated to form 5-methylcytosine"
ttttctcatgagagactctcaagacttgactgacaaaattgaaatgttcttctaaacacccgggaacattttcagggctgccagcatccggccttcccgagtcccacaggtttccttaaaat

SEQ ID NO: 3097 - DNA, 122 bp, Homo sapiens
  misc_feature (61)..(62): /note="This region represents a CpG dinucleotide"
  misc_feature (61)..(61): /note="Nucleotide may be methylated to form 5-methylcytosine"
acattgaccttaaaaggtaaagtcacaagttttcctcacccataagaaaatattcactggcgtgacctgacatataatctcatgggtttcatggatctgtatccctgggcatttatgccctc

SEQ ID NO: 3098 - DNA, 122 bp, Homo sapiens
  misc_feature (61)..(62): /note="This region represents a CpG dinucleotide"
  misc_feature (61)..(61): /note="Nucleotide may be methylated to form 5-methylcytosine"
caggttaaagttcaaactccttaacatggtcctttatgacctggctcctgcctgcctaaccggcttcatctttggtcactcactcacatttcagccacactaaactactctgagcttcctga

SEQ ID NO: 3099 - DNA, 122 bp, Homo sapiens
  misc_feature (61)..(62): /note="This region represents a CpG dinucleotide"
  misc_feature (61)..(61): /note="Nucleotide may be methylated to form 5-methylcytosine"
ccagccccgggcgctcgctcgggggcctacagaatggcgtgtttcggggttgtggcgggccgaggggcggggtcgcagcaaggccccgcctgtcccctcctgggcctctcaaagtctgagcc

SEQ ID NO: 3100 - DNA, 122 bp, Homo sapiens
  misc_feature (61)..(62): /note="This region represents a CpG dinucleotide"
  misc_feature (61)..(61): /note="Nucleotide may be methylated to form 5-methylcytosine"
gcctccatctttttttacatcctgggggcatggccataaccgcttagcaaagctttgtttcgcaatcctgccttagggagtaagtttctccctggtttaatatctgcctgttctcccagccc

SEQ ID NO: 3101 - DNA, 122 bp, Homo sapiens
  misc_feature (61)..(62): /note="This region represents a CpG dinucleotide"
  misc_feature (61)..(61): /note="Nucleotide may be methylated to form 5-methylcytosine"
aatgagagttcctgttttggcctctaacttgggaagtttgaggtgcctgtcagacatgcacgtgagatgctgagttggcaaaccttgatggatctgaatttgaatcaggattcattctgggc

SEQ ID NO: 3102 - DNA, 122 bp, Homo sapiens
  misc_feature (61)..(62): /note="This region represents a CpG dinucleotide"
  misc_feature (61)..(61): /note="Nucleotide may be methylated to form 5-methylcytosine"
ctccaggcagtctcctgctgcacagggcacaaagcatgtgcacagccaggtatcatcctgcgtgactcagaacagccttgagatgtaaggagtgtcatcccagcctcgaacctggggagctt

SEQ ID NO: 3103 - DNA, 122 bp, Homo sapiens
  misc_feature (61)..(62): /note="This region represents a CpG dinucleotide"
  misc_feature (61)..(61): /note="Nucleotide may be methylated to form 5-methylcytosine"
gcctttcactggggccaccctttggcttatatcacaatgtacttttttgggttcactgtccgttcccctaaggctcttggcctcccatgaaggctggggccctggcagacagaaccagcagg

SEQ ID NO: 3104 - DNA, 122 bp, Homo sapiens
  misc_feature (61)..(62): /note="This region represents a CpG dinucleotide"
  misc_feature (61)..(61): /note="Nucleotide may be methylated to form 5-methylcytosine"
tatcagctcacaagaacggattctacacatctcttcctaactccatgttcagtgacttcacgttggtagctttcaactggcaacagtgggagttgctacatcacggaaatcagggaatagtc

SEQ ID NO: 3105 - DNA, 122 bp, Homo sapiens
  misc_feature (61)..(62): /note="This region represents a CpG dinucleotide"
  misc_feature (61)..(61): /note="Nucleotide may be methylated to form 5-methylcytosine"
cccctctggctccttccctcaggatttgcggagcctgtaataattgagggacaggcggggcgccatggctcacgcctgtaatcccagcactttgggaggcggaggcgggcggatcacgaggt

SEQ ID NO: 3106 - DNA, 122 bp, Homo sapiens
  misc_feature (61)..(62): /note="This region represents a CpG dinucleotide"
  misc_feature (61)..(61): /note="Nucleotide may be methylated to form 5-methylcytosine"
catgatccgccaacctcggcctcccaaagtgctgggattacaggcatgagccaccgcgcccggacaggacatgggggtttctaaacaaggctcttcagtatcagctcattgtgagtcacaga

SEQ ID NO: 3107 - DNA, 122 bp, Homo sapiens
  misc_feature (61)..(62): /note="This region represents a CpG dinucleotide"
  misc_feature (61)..(61): /note="Nucleotide may be methylated to form 5-methylcytosine"
aaaagagcttggagaaccccctctcctcttctgccaggtgaggccacagcaagaagactgcggtctacgaaccaggaagaggccttcaccagtcaccaaatatgctggcgccttaattttag

SEQ ID NO: 3108 - DNA, 122 bp, Homo sapiens
  misc_feature (61)..(62): /note="This region represents a CpG dinucleotide"
  misc_feature (61)..(61): /note="Nucleotide may be methylated to form 5-methylcytosine"
ttcttgggtttgagtaccctttagaggtttcctattggttacaccctttgtaaatgaagacgtagcccatgaccaattggaggctgaagtgaaattacaccctatgcaaatgaagatttcgc

SEQ ID NO: 3109 - DNA, 122 bp, Homo sapiens
  misc_feature (61)..(62): /note="This region represents a CpG dinucleotide"
  misc_feature (61)..(61): /note="Nucleotide may be methylated to form 5-methylcytosine"
gtttcaagcatgcaaacatttctatcagaatattccaagaactcagttcccaagtggccgcgtcaagggccagtcacctgaacaggttggagcaactcagcctgctaattcattcccaagct

SEQ ID NO: 3110 - DNA, 122 bp, Homo sapiens
  misc_feature (61)..(62): /note="This region represents a CpG dinucleotide"
  misc_feature (61)..(61): /note="Nucleotide may be methylated to form 5-methylcytosine"
attttaaagagagcaggggtataagccagagtggtggggtgagcagtttggagggaaagacggttacagaacaggtaactaaaggtgacttaaatcatagcaggtgaccaggggtgactcag

SEQ ID NO: 3111 - DNA, 122 bp, Homo sapiens
  misc_feature (61)..(62): /note="This region represents a CpG dinucleotide"
  misc_feature (61)..(61): /note="Nucleotide may be methylated to form 5-methylcytosine"
tgataacatattggcagcacattaaatgctatctatgtgtgtcttctagctgcttgctgacgtggctttcttccccagtgtataataagcaatctgaggacaggaaattagtcttactcatc

SEQ ID NO: 3112 - DNA, 122 bp, Homo sapiens
  misc_feature (61)..(62): /note="This region represents a CpG dinucleotide"
  misc_feature (61)..(61): /note="Nucleotide may be methylated to form 5-methylcytosine"
tcattaaagtaaaatccactaatttcagtatgatcctccctgcctgatggagtcaaatagcgttctctttagaatatacagtctcagccaggcatggtggttcatgtctataatcccagcac

SEQ ID NO: 3113 - DNA, 122 bp, Homo sapiens
  misc_feature (61)..(62): /note="This region represents a CpG dinucleotide"
  misc_feature (61)..(61): /note="Nucleotide may be methylated to form 5-methylcytosine"
aagaacgaggcgagtaagaccagtgaagcaggaatgcacacagatatggaaagaagtccccggcatcatgataaatggaagcaactttcagaacagcctgtgtaatacaattctatttatga

SEQ ID NO: 3114 - DNA, 122 bp, Homo sapiens
  misc_feature (61)..(62): /note="This region represents a CpG dinucleotide"
  misc_feature (61)..(61): /note="Nucleotide may be methylated to form 5-methylcytosine"
ctgcatgctgcactgcacgccactgtggtccaggacctgggcctgcacgacggcatccagcgcgtgctgtttggcaacaacctgaacttctggctgcacaagcttgtcttcgtggatgccgt

SEQ ID NO: 3115 - DNA, 122 bp, Homo sapiens
  misc_feature (61)..(62): /note="This region represents a CpG dinucleotide"
  misc_feature (61)..(61): /note="Nucleotide may be methylated to form 5-methylcytosine"
ttaataataatataacaatagttatatagcatgctttgtgtcaggccttgttttaagtgccggctaaccataggtcgaaggcttcctggattccctagcagaggaatgaatgacatgaaagg

SEQ ID NO: 3116 - DNA, 122 bp, Homo sapiens
  misc_feature (61)..(62): /note="This region represents a CpG dinucleotide"
  misc_feature (61)..(61): /note="Nucleotide may be methylated to form 5-methylcytosine"
ttgtctagcaacttacgcactttggggtacttaataacttgatggagttgaagatgatgacggtgacaatgacgtcaaccaggacaggaaactggagatgattagacatcctttattctcca

SEQ ID NO: 3117 - DNA, 122 bp, Homo sapiens
  misc_feature (61)..(62): /note="This region represents a CpG dinucleotide"
  misc_feature (61)..(61): /note="Nucleotide may be methylated to form 5-methylcytosine"
aagattacagccccatgagccatccttacctatacctcaattcctttaaggaagttaaatcgtatgtaggaaataatctctttaggatacagcccagtagttcctcctctaatacagacatt

SEQ ID NO: 3118 - DNA, 122 bp, Homo sapiens
  misc_feature (61)..(62): /note="This region represents a CpG dinucleotide"
  misc_feature (61)..(61): /note="Nucleotide may be methylated to form 5-methylcytosine"
agacagcacagctggttaatgtcagtaaagctagcatccacatgttcacatcctatctcacgttctttctacaaccccaagagggcttacttcacttaaattgaagtcaaatcccagctatt

SEQ ID NO: 3119 - DNA, 122 bp, Homo sapiens
  misc_feature (61)..(62): /note="This region represents a CpG dinucleotide"
  misc_feature (61)..(61): /note="Nucleotide may be methylated to form 5-methylcytosine"
attgagatttaatcccagatgtaaactgaggacacaggccatccccaatttcccactcttcgtgctgttcacttatacccttccctgcatagagctgcctctacctccctccagccctgaca

SEQ ID NO: 3120 - DNA, 122 bp, Homo sapiens
  misc_feature (61)..(62): /note="This region represents a CpG dinucleotide"
  misc_feature (61)..(61): /note="Nucleotide may be methylated to form 5-methylcytosine"
gggatagaggtaactaaacttgtgcttcatagctccaaggtaatttaattccctttctggcgagagtgcttgcaacactaactcaggcttctagtggtctgatgagcttaaaaatcaattaa

SEQ ID NO: 3121 - DNA, 122 bp, Homo sapiens
  misc_feature (61)..(62): /note="This region represents a CpG dinucleotide"
  misc_feature (61)..(61): /note="Nucleotide may be methylated to form 5-methylcytosine"
gatacttggcatacacaaaggcctcagtgaagcttatttacatcttggagatctttctggcgtagaagttcatattggaaaggcattgcttcctcacagcttcctatgtacaaatactgggc

SEQ ID NO: 3122 - DNA, 122 bp, Homo sapiens
  misc_feature (61)..(62): /note="This region represents a CpG dinucleotide"
  misc_feature (61)..(61): /note="Nucleotide may be methylated to form 5-methylcytosine"
aggctgagaaccactggtttctgttgaaacctcagttcctggctgaagagacacttgcggcgagcttgtctgtatcattagtcacttctggggtccaggggtgagactgggagtggaggaag

SEQ ID NO: 3123 - DNA, 122 bp, Homo sapiens
  misc_feature (61)..(62): /note="This region represents a CpG dinucleotide"
  misc_feature (61)..(61): /note="Nucleotide may be methylated to form 5-methylcytosine"
taaaaatttaagtttggccgggtgcggtggctcacggggcccctgattgtctgaaggttgcgctggcacgcgcaacttccgggacagaggctgtggctggaaggagctgggcatccggcctg

SEQ ID NO: 3124 - DNA, 122 bp, Homo sapiens
  misc_feature (61)..(62): /note="This region represents a CpG dinucleotide"
  misc_feature (61)..(61): /note="Nucleotide may be methylated to form 5-methylcytosine"
cctgaagaggccaagtatgctgagtttcatttcaggaccaagtagctatgatgggtgtaacggcctggtccactccagtggagaaagaaactgagaactcaaatgggtcaagagagttactt

SEQ ID NO: 3125 - DNA, 122 bp, Homo sapiens
  misc_feature (61)..(62): /note="This region represents a CpG dinucleotide"
  misc_feature (61)..(61): /note="Nucleotide may be methylated to form 5-methylcytosine"
tttactgtaaaacagtattctgtgtcataccggcagtagcctcattcatctcatttttttcgattgcatcattttctcttgtgcttgatttaatctcatgctgttttgttcctcacggtccc

SEQ ID NO: 3126 - DNA, 122 bp, Homo sapiens
  misc_feature (61)..(62): /note="This region represents a CpG dinucleotide"
  misc_feature (61)..(61): /note="Nucleotide may be methylated to form 5-methylcytosine"
gaactcagtatgttccaaaaaatattctatctcccatattaccttgcccaattaatagtacgcatagccaccaagctgccttgtacattgcctctactagtgaactcaaaccaactgggctt

SEQ ID NO: 3127 - DNA, 122 bp, Homo sapiens
  misc_feature (61)..(62): /note="This region represents a CpG dinucleotide"
  misc_feature (61)..(61): /note="Nucleotide may be methylated to form 5-methylcytosine"
gggtttctatatcaaagacaagagtcatgagcctggaagggaataaataagggacaatgacgcaaacattagcagtattggtgagtcattaccatcctccaggctggccagtccaaggagag

SEQ ID NO: 3128 - DNA, 122 bp, Homo sapiens
  misc_feature (61)..(62): /note="This region represents a CpG dinucleotide"
  misc_feature (61)..(61): /note="Nucleotide may be methylated to form 5-methylcytosine"
aaaggagggagggaaggaagggatagtgtaactgcactgcaactgaaagaaaccagagaacggaaactcatggtgacctggtgactgcttgagcatttattgcttaacagctacttgtgcga

SEQ ID NO: 3129 - DNA, 122 bp, Homo sapiens
  misc_feature (61)..(62): /note="This region represents a CpG dinucleotide"
  misc_feature (61)..(61): /note="Nucleotide may be methylated to form 5-methylcytosine"
agccggaactgtggcggctccatacccccaaagtgaattttaaacttgacttatttatgccgttctcatagcaacaggaaaactgttccgacctatagccacggaagactctgtaaaagaaa

SEQ ID NO: 3130 - DNA, 122 bp, Homo sapiens
  misc_feature (61)..(62): /note="This region represents a CpG dinucleotide"
  misc_feature (61)..(61): /note="Nucleotide may be methylated to form 5-methylcytosine"
gtttttatcttgaccgactagttaattgccaaaggattattttagataagtagcccttaacgtatgttgtgtggaacagcagcatcagcattacctgggaacttgcaagacatgaaacttcc

SEQ ID NO: 3131 - DNA, 122 bp, Homo sapiens
  misc_feature (61)..(62): /note="This region represents a CpG dinucleotide"
  misc_feature (61)..(61): /note="Nucleotide may be methylated to form 5-methylcytosine"
gtggatcgtggtcgttataaccctgtgcttcacgatttatgatgtattaatgaattatagcgatgcactgtacttcgttttgctatgtatgcggccaaatatggggggggggttggaagggg

SEQ ID NO: 3132 - DNA, 122 bp, Homo sapiens
  misc_feature (61)..(62): /note="This region represents a CpG dinucleotide"
  misc_feature (61)..(61): /note="Nucleotide may be methylated to form 5-methylcytosine"
ggtgatccacccgccttggcctcccaaagtgctgggattacaggcttgagccaccatgcccggcaagaactgttgttttctagatgccagatgaatgagtttagaatgacctatttgaggag

SEQ ID NO: 3133 - DNA, 122 bp, Homo sapiens
  misc_feature (61)..(62): /note="This region represents a CpG dinucleotide"
  misc_feature (61)..(61): /note="Nucleotide may be methylated to form 5-methylcytosine"
ctccttgagatcacagcctggtaaacagatcagccattaacaattgaggcggcagggttccgtgcagaaggctgcatgactttgctgtctattgtgactgcgttttgatagttacctttgtc

SEQ ID NO: 3134 - DNA, 122 bp, Homo sapiens
  misc_feature (61)..(62): /note="This region represents a CpG dinucleotide"
  misc_feature (61)..(61): /note="Nucleotide may be methylated to form 5-methylcytosine"
ccaactgccacttcctcttatgccaggcttcttcccaggaacaatggactcacacctgcacgctgccctgatatgtcattgcgacagaactgaagacacatgttgctaatgacataaatccc

SEQ ID NO: 3135 - DNA, 122 bp, Homo sapiens
  misc_feature (61)..(62): /note="This region represents a CpG dinucleotide"
  misc_feature (61)..(61): /note="Nucleotide may be methylated to form 5-methylcytosine"
cagaatggggagaggggaacaggagagtcaagtcacgtagaaggcggtgagtcagaaggacggtgcagagccaacatgtctcttgggctgtctgcatcatttaacttgtcaagatggctgtt

SEQ ID NO: 3136 - DNA, 122 bp, Homo sapiens
  misc_feature (61)..(62): /note="This region represents a CpG dinucleotide"
  misc_feature (61)..(61): /note="Nucleotide may be methylated to form 5-methylcytosine"
ttggggagatctgtgtcagatttgctcaattttagctgtggctttgactcacacaaataccgtatgttttagttgatttcaaactctgcctacagattaagagctcagggctaatgaaagcc

SEQ ID NO: 3137 - DNA, 122 bp, Homo sapiens
  misc_feature (61)..(62): /note="This region represents a CpG dinucleotide"
  misc_feature (61)..(61): /note="Nucleotide may be methylated to form 5-methylcytosine"
attaccaaattgagccccaccttgtgagtcagtggggcaggtgcctcccaaggcctccagcgccatggattacctgcctcggtcaggttctagagcccagcttggccttgggctgggcagca

SEQ ID NO: 3138 - DNA, 122 bp, Homo sapiens
  misc_feature (61)..(62): /note="This region represents a CpG dinucleotide"
  misc_feature (61)..(61): /note="Nucleotide may be methylated to form 5-methylcytosine"
taaaaacaaattgatatgctctaattgcaaatgtctggattgtttgtctccgacagcaatcgtctgaaagcaaacagctgattggtccagctgggggaggttgtttcctgacaaacacgctc

SEQ ID NO: 3139 - DNA, 122 bp, Homo sapiens
  misc_feature (61)..(62): /note="This region represents a CpG dinucleotide"
  misc_feature (61)..(61): /note="Nucleotide may be methylated to form 5-methylcytosine"
gccgccacacgcgtggatacttccagttcatgcttttcatttctctgttctgtctcactgcggcactccctgactccttggggataaggaagacaaaggcagttctcggaatgtgggccaga

SEQ ID NO: 3140 - DNA, 122 bp, Homo sapiens
  misc_feature (61)..(62): /note="This region represents a CpG dinucleotide"
  misc_feature (61)..(61): /note="Nucleotide may be methylated to form 5-methylcytosine"
gaggtttcctccaactggacgttaagttactgagaacaggaatcagggatgcgattggtgcgtgtcttctgtggctacctggtcagcattcataaacggtgataatggattgaatgctgcag

SEQ ID NO: 3141 - DNA, 122 bp, Homo sapiens
  misc_feature (61)..(62): /note="This region represents a CpG dinucleotide"
  misc_feature (61)..(61): /note="Nucleotide may be methylated to form 5-methylcytosine"
cagctgctgcaggaacagcaacccagcaactggccacacagagggcgagtgacccctgggcggactgatgggccacaccacaggccacaccacggaccacaggccacacccagagagctagt

SEQ ID NO: 3142 - DNA, 122 bp, Homo sapiens
  misc_feature (61)..(62): /note="This region represents a CpG dinucleotide"
  misc_feature (61)..(61): /note="Nucleotide may be methylated to form 5-methylcytosine"
ggcgggcagcaattagctgttatctagcaagaggcgtcaggctgcacggcgaggcggccccgaagtgcactccgcaaaccatgactactcagcaagctgcctgcgagcgttcgtccctgtgc

SEQ ID NO: 3143 - DNA, 122 bp, Homo sapiens
  misc_feature (61)..(62): /note="This region represents a CpG dinucleotide"
  misc_feature (61)..(61): /note="Nucleotide may be methylated to form 5-methylcytosine"
ttaaggaatttacttgcacttcagttacctaatattaaccatcaatatgcaaatatcatacgtcagaaccctagtggagctatgattcacaacctttcttctattccaacatagctgagaaa

SEQ ID NO: 3144 - DNA, 122 bp, Homo sapiens
  misc_feature (61)..(62): /note="This region represents a CpG dinucleotide"
  misc_feature (61)..(61): /note="Nucleotide may be methylated to form 5-methylcytosine"
ttctctgccaaagttactcctgcctggtacctttttcacaagtggatctagcttcattttcgtttggtgaggcaatggagtttgatggacagctggttgtaatccagtgcacaggtcatgcg

SEQ ID NO: 3145 - DNA, 122 bp, Homo sapiens
  misc_feature (61)..(62): /note="This region represents a CpG dinucleotide"
  misc_feature (61)..(61): /note="Nucleotide may be methylated to form 5-methylcytosine"
gattacaggcgtgagccaccgcgcctggccaactacacaattgttgagagcctacccactcgaggctgatcaacagccaaggctaggacagttctgctgggacaaccagtcccacgtcttcc

SEQ ID NO: 3146 - DNA, 122 bp, Homo sapiens
  misc_feature (61)..(62): /note="This region represents a CpG dinucleotide"
  misc_feature (61)..(61): /note="Nucleotide may be methylated to form 5-methylcytosine"
ggggaagccacccgggaggaacctccccacgtgtggccttaggcaaggccctgaccctggcggcaccccatgagtacgtagctcagccaatcatgtcgttcagtgctgtaagctcattcccc

SEQ ID NO: 3147 - DNA, 122 bp, Homo sapiens
  misc_feature (61)..(62): /note="This region represents a CpG dinucleotide"
  misc_feature (61)..(61): /note="Nucleotide may be methylated to form 5-methylcytosine"
ttagagatgacaccagtaacgataggtttctactcttagctatgcctggggcagcttgaccgccactttgttgatcacattaatttacctcttcctgcctttatttccctttctgtaaaatg

SEQ ID NO: 3148 - DNA, 122 bp, Homo sapiens
  misc_feature (61)..(62): /note="This region represents a CpG dinucleotide"
  misc_feature (61)..(61): /note="Nucleotide may be methylated to form 5-methylcytosine"
ttctatcagatgccagatcaccctccttccatcacgtcacaagctgtaagacccgacttgcgtaagcaatctcctgggctttttgagggttaagtattatgtttattgcagcacctatgctt

SEQ ID NO: 3149 - DNA, 122 bp, Homo sapiens
  misc_feature (61)..(62): /note="This region represents a CpG dinucleotide"
  misc_feature (61)..(61): /note="Nucleotide may be methylated to form 5-methylcytosine"
tgtcaagcttcttttttaaatttgtaaacctatttgaatcaatttgtgactcctgcattccggcccggcagaaagagctcgaagagacgcagagcgcggcgcgctcccccacggccctccag

SEQ ID NO: 3150 - DNA, 122 bp, Homo sapiens
  misc_feature (61)..(62): /note="This region represents a CpG dinucleotide"
  misc_feature (61)..(61): /note="Nucleotide may be methylated to form 5-methylcytosine"
atatgaatgagcagaggccaagttgtatttggctgcatgcttgattgcgtagaaaaatgacgacactacccttggtacatctattggccccaacaggaaggagatgaaagtattgcaaaggg

SEQ ID NO: 3151 - DNA, 122 bp, Homo sapiens
  misc_feature (61)..(62): /note="This region represents a CpG dinucleotide"
  misc_feature (61)..(61): /note="Nucleotide may be methylated to form 5-methylcytosine"
tgctctcagacaccatgctccagcaccctagtcgggcagcggggtaggtgtagagggactcggagaatgagcagctacctgggctgcgaatcctgcctgttcacccaggcaagttccttcat

SEQ ID NO: 3152 - DNA, 122 bp, Homo sapiens
  misc_feature (61)..(62): /note="This region represents a CpG dinucleotide"
  misc_feature (61)..(61): /note="Nucleotide may be methylated to form 5-methylcytosine"
ttgtaaagcaccaaagcaacatgtaacatatgaccacaagtaaaccacatgctgttccttcgcgtggaagttggaaagtcaaatgcaaaagtaaaatggaggagatgggttacatcatttta

SEQ ID NO: 3153 - DNA, 122 bp, Homo sapiens
  misc_feature (61)..(62): /note="This region represents a CpG dinucleotide"
  misc_feature (61)..(61): /note="Nucleotide may be methylated to form 5-methylcytosine"
acatgtcccttttgtagtgaggcacatatttcaggcattgtcctatcagtgagtcagctgcggacatcacagggctcctggcttatgatctgtgatgctagattttgcaattgattgcaaaa

SEQ ID NO: 3154 - DNA, 122 bp, Homo sapiens
  misc_feature (61)..(62): /note="This region represents a CpG dinucleotide"
  misc_feature (61)..(61): /note="Nucleotide may be methylated to form 5-methylcytosine"
tgaatcccaggtgacaaagaggctggcatcatataaacgcttaatgacagagtaccacatcgcaagtcattctctcaaggcacagaacccggacacacctgcccaggaacagtatcgtgtcc

SEQ ID NO: 3155 - DNA, 122 bp, Homo sapiens
  misc_feature (61)..(62): /note="This region represents a CpG dinucleotide"
  misc_feature (61)..(61): /note="Nucleotide may be methylated to form 5-methylcytosine"
gctagccccattctggctcacttttttctttttttataggacgcccattgcaatgcgagccggcagataaaagccgtgacgtgctgtctgcccaagcgcaaggatcgcctgcaatcccccag

SEQ ID NO: 3156 - DNA, 122 bp, Homo sapiens
  misc_feature (61)..(62): /note="This region represents a CpG dinucleotide"
  misc_feature (61)..(61): /note="Nucleotide may be methylated to form 5-methylcytosine"
gtctagttcttagtacccttagaattgagataattcattatttgtcactcaggtaggtttcgagtgaactgatatatttaattagatccttaaagcccataggatttatactggtcatttct

SEQ ID NO: 3157 - DNA, 122 bp, Homo sapiens
  misc_feature (61)..(62): /note="This region represents a CpG dinucleotide"
  misc_feature (61)..(61): /note="Nucleotide may be methylated to form 5-methylcytosine"
cctaataaaaaacttagctcatccctataagcccggaagcaaataaatcacccttacatacgttaattactttccaatttcaaattctcaactgtgaaataaagggctgttttatttggctg

SEQ ID NO: 3158 - DNA, 122 bp, Homo sapiens
  misc_feature (61)..(62): /note="This region represents a CpG dinucleotide"
  misc_feature (61)..(61): /note="Nucleotide may be methylated to form 5-methylcytosine"
aagcaaagatccaggtaagaaaatgggtatcgttggccgcataatgtggtcaatagtatgcgatgtgagaaaaataattttgaaaacttgagaaagcaaagggcgtgaatcttaatctagaa

SEQ ID NO: 3159 - DNA, 122 bp, Homo sapiens
  misc_feature (61)..(62): /note="This region represents a CpG dinucleotide"
  misc_feature (61)..(61): /note="Nucleotide may be methylated to form 5-methylcytosine"
aacatgatcttatttaatcctcatgctcattcattttacagaagagggatctaaggctcacggtggttaatcaacttgtccaaggtcacatagctagaaaaataaagatgttcaaaccagaa

SEQ ID NO: 3160 - DNA, 122 bp, Homo sapiens
  misc_feature (61)..(62): /note="This region represents a CpG dinucleotide"
  misc_feature (61)..(61): /note="Nucleotide may be methylated to form 5-methylcytosine"
cgctgtcctaatcagagcagggccgggagagccaggacaggaagtatggagagcagggagcgtctctccagggccctgcctgtggaggacaccttgggggtgggagccaagtgcagacttga

SEQ ID NO: 3161 - DNA, 122 bp, Homo sapiens
  misc_feature (61)..(62): /note="This region represents a CpG dinucleotide"
  misc_feature (61)..(61): /note="Nucleotide may be methylated to form 5-methylcytosine"
aaagagtgcccctgctgaaactgctgtttatcttgcaagggccctccagggtggagctctcgccctctcctggctcagccttaaacttcactataagtaagcagaatacagcggagacaaga

SEQ ID NO: 3162 - DNA, 122 bp, Homo sapiens
  misc_feature (61)..(62): /note="This region represents a CpG dinucleotide"
  misc_feature (61)..(61): /note="Nucleotide may be methylated to form 5-methylcytosine"
gtgcagtgcctgggccccatggctgagtccttactcgcatgcttgccagggcattgctcccggcacgaggccgcccgcctgcagcaggcccgcaggggcacggtgggtccccgcccgctcct

SEQ ID NO: 3163 - DNA, 122 bp, Homo sapiens
  misc_feature (61)..(62): /note="This region represents a CpG dinucleotide"
  misc_feature (61)..(61): /note="Nucleotide may be methylated to form 5-methylcytosine"
taacttcttccacattgcctaactgcctgtatggctggcctttgaagacaatcaacgtatcgtgacattcatgatacattctctggtcaaaatgctcctctcaaggagcataactttagact

SEQ ID NO: 3164 - DNA, 122 bp, Homo sapiens
  misc_feature (61)..(62): /note="This region represents a CpG dinucleotide"
  misc_feature (61)..(61): /note="Nucleotide may be methylated to form 5-methylcytosine"
ctgaggccaggaagaaaaaagacaggactaatccaccccaattgtagacagtgggaacagcgctggcttgcttagaggtacagaggaaagcagcatgcaaccctgccccgtggtgaaggaag

SEQ ID NO: 3165 - DNA, 122 bp, Homo sapiens
  misc_feature (61)..(62): /note="This region represents a CpG dinucleotide"
  misc_feature (61)..(61): /note="Nucleotide may be methylated to form 5-methylcytosine"
ctttgacagggcagtcatatatctgcccacatactgcagcaaacacatctgggacatgaccgtcagctcaaacaagaatatcagtgaaatattcctatccaaaatgccctgcaacaaattac

SEQ ID NO: 3166 - DNA, 122 bp, Homo sapiens
  misc_feature (61)..(62): /note="This region represents a CpG dinucleotide"
  misc_feature (61)..(61): /note="Nucleotide may be methylated to form 5-methylcytosine"
tgctctttccattactcatgcagtatttcccaacagagatgttcaaaacaatgacacagccgcattttccttcactataagcacttctttcttcccagctttactgaagtataactgaaaat

SEQ ID NO: 3167 - DNA, 122 bp, Homo sapiens
  misc_feature (61)..(62): /note="This region represents a CpG dinucleotide"
  misc_feature (61)..(61): /note="Nucleotide may be methylated to form 5-methylcytosine"
ggtttatgtgattagccctatttcttcagggcagctccatttcattagttcccaattactcgttaaacaaccttgacaatgagttacacatgcttagtcatttccatggaactctcatttat

SEQ ID NO: 3168 - DNA, 122 bp, Homo sapiens
  misc_feature (61)..(62): /note="This region represents a CpG dinucleotide"
  misc_feature (61)..(61): /note="Nucleotide may be methylated to form 5-methylcytosine"
ttgtaaatatgacttattctagctgatggtcaaaatccgcagtgttagcagttagtatgacgtcataccttctgatacatcttctttaatgccacagctccaatagggataatattgaaaca

SEQ ID NO: 3169 - DNA, 122 bp, Homo sapiens
  misc_feature (61)..(62): /note="This region represents a CpG dinucleotide"
  misc_feature (61)..(61): /note="Nucleotide may be methylated to form 5-methylcytosine"
tcagtgtaaaggaaggtgaagaatgccagggcctcatgaaggagggtgcgtgcagtgcagcgtgaacatttcaaggaaacttggtccagcctgagggtcaggaaatgaccttccaagaaata

SEQ ID NO: 3170 - DNA, 122 bp, Homo sapiens
  misc_feature (61)..(62): /note="This region represents a CpG dinucleotide"
  misc_feature (61)..(61): /note="Nucleotide may be methylated to form 5-methylcytosine"
ttgctttgtggtgatgcaggcagctatcccatgtcactttactttgactttgtgaagcaccgtgtgttttgcaagatttgccttttcactttgtgttgcaagaccagtagggctagaatcta

SEQ ID NO: 3171 - DNA, 122 bp, Homo sapiens
  misc_feature (61)..(62): /note="This region represents a CpG dinucleotide"
  misc_feature (61)..(61): /note="Nucleotide may be methylated to form 5-methylcytosine"
ctgttccgtatcagagcagtgaggacttcctcctcctttcttggctggaaagtgttccatcgtcatatggaaatcttgtggtcgatttaacccgttccctattgatagacgctgtgtgggct

SEQ ID NO: 3172 - DNA, 122 bp, Homo sapiens
  misc_feature (61)..(62): /note="This region represents a CpG dinucleotide"
  misc_feature (61)..(61): /note="Nucleotide may be methylated to form 5-methylcytosine"
ttatttaatccctacagcaatcctgctaatactgtccccattgtacagatggggacaatgcgaatccaagagaataacttctccaagaacacatggctaaatcaaagtaaagggattgaaaa

SEQ ID NO: 3173 - DNA, 122 bp, Homo sapiens
  misc_feature (61)..(62): /note="This region represents a CpG dinucleotide"
  misc_feature (61)..(61): /note="Nucleotide may be methylated to form 5-methylcytosine"
cacccaaaaagacccagaagacaaatggaagttaagaaggtgaagaggggacctagggaacggcattccaggcggaacaactgaagactgatgtatgaaaaggtccttacatgagaacttga

SEQ ID NO: 3174 - DNA, 122 bp, Homo sapiens
  misc_feature (61)..(62): /note="This region represents a CpG dinucleotide"
  misc_feature (61)..(61): /note="Nucleotide may be methylated to form 5-methylcytosine"
gttatttttatgagtattaagtgaggggagcaccgaatgccctttggttataaagcctctcgtcattgaaagttgagtctctttgtccttcaactatgattatgcctctgtgaatcacatct

SEQ ID NO: 3175 - DNA, 122 bp, Homo sapiens
  misc_feature (61)..(62): /note="This region represents a CpG dinucleotide"
  misc_feature (61)..(61): /note="Nucleotide may be methylated to form 5-methylcytosine"
tttccatgaaagctacctagtttggatcacatgacttgtattgcatcatgttcttccttacgtttcataatctcttccccaacagacttctgttctgtctgccattctactccttagtctaa

SEQ ID NO: 3176 - DNA, 122 bp, Homo sapiens
  misc_feature (61)..(62): /note="This region represents a CpG dinucleotide"
  misc_feature (61)..(61): /note="Nucleotide may be methylated to form 5-methylcytosine"
cgggctgaaagaggtgatcccgagggtgctgtgcttgtgtgacgaagtgtttgtctcctgcgatcctcagcagacgctgctccggtgacccggagatccggacgcctcgacccctccctcag

SEQ ID NO: 3177 - DNA, 122 bp, Homo sapiens
  misc_feature (61)..(62): /note="This region represents a CpG dinucleotide"
  misc_feature (61)..(61): /note="Nucleotide may be methylated to form 5-methylcytosine"
ctgactcacttaccaaacacatagtttatatttgttcctcttattgtcatttattactcacgtattttttacacaaacaccacagttgttgaaagagtttcataaggtgatgttcagctaac

SEQ ID NO: 3178 - DNA, 122 bp, Homo sapiens
  misc_feature (61)..(62): /note="This region represents a CpG dinucleotide"
  misc_feature (61)..(61): /note="Nucleotide may be methylated to form 5-methylcytosine"
ctggaaagcctgataaaatcgctttgtgcagaggagaacaactagttccaaaacagtgaacgtggaggatgaagatgctgcgtggaggaacatgcaattttattcaatataaacatttgcta

SEQ ID NO: 3179 - DNA, 122 bp, Homo sapiens
  misc_feature (61)..(62): /note="This region represents a CpG dinucleotide"
  misc_feature (61)..(61): /note="Nucleotide may be methylated to form 5-methylcytosine"
gtctgtctgactccagagcctctgcctgaaacttcacaacctgtttgagtttctgatggacgttctcaatgtgggcccaagaggttgaactataggatcactatagtcttttccagctccag

SEQ ID NO: 3180 - DNA, 122 bp, Homo sapiens
  misc_feature (61)..(62): /note="This region represents a CpG dinucleotide"
  misc_feature (61)..(61): /note="Nucleotide may be methylated to form 5-methylcytosine"
tttactacatacctgtcattattctgaatgcttactatagattattttatttaatccacacgagcacactatgaggcaggtacttattattgccgcttttcaaatgtggaaggtgaggcaca

SEQ ID NO: 3181 - DNA, 122 bp, Homo sapiens
  misc_feature (61)..(62): /note="This region represents a CpG dinucleotide"
  misc_feature (61)..(61): /note="Nucleotide may be methylated to form 5-methylcytosine"
agctcagctctgactcaaaagtttttccatttaccatcaacatggaaacttggctcctcacgtaggtatattatcccccttttgtacatggtcttgttgatccaaactccctttctgtgaaa

SEQ ID NO: 3182 - DNA, 122 bp, Homo sapiens
  misc_feature (61)..(62): /note="This region represents a CpG dinucleotide"
  misc_feature (61)..(61): /note="Nucleotide may be methylated to form 5-methylcytosine"
tgggggctgtgtccgtctgcctgcctgcccccctgcactgggcccttctgactttaattacgtcctccttggctaaattcacaggtggctttccttggaggaggcgtttacctctccccaag

SEQ ID NO: 3183 - DNA, 122 bp, Homo sapiens
  misc_feature (61)..(62): /note="This region represents a CpG dinucleotide"
  misc_feature (61)..(61): /note="Nucleotide may be methylated to form 5-methylcytosine"
agctgctcttcccagagtaagactcagccgtctgtcactgggtgtggttttgtccctgaccgacagctgacactggggcccccaggggccttggtagggcgggtggcatcccaggcctgaag

SEQ ID NO: 3184 - DNA, 122 bp, Homo sapiens
  misc_feature (61)..(62): /note="This region represents a CpG dinucleotide"
  misc_feature (61)..(61): /note="Nucleotide may be methylated to form 5-methylcytosine"
cattgctgggaaggagaacatccagggcagtgaggcaggtgctcaggcagagtccagcttcgtggggctgcggtgtggcctggacctggggcatgtcaaaggaaagaccttgtggattgcac

SEQ ID NO: 3185 - DNA, 122 bp, Homo sapiens
  misc_feature (61)..(62): /note="This region represents a CpG dinucleotide"
  misc_feature (61)..(61): /note="Nucleotide may be methylated to form 5-methylcytosine"
tgtagatagtggctagaggcagggttgggtggggtggactggaacctagttcagaaactacgaaaggacctgacttctatggggaacagacacagagagtttcagatggcatcaaacaggtt

SEQ ID NO: 3186 - DNA, 122 bp, Homo sapiens
  misc_feature (61)..(62): /note="This region represents a CpG dinucleotide"
  misc_feature (61)..(61): /note="Nucleotide may be methylated to form 5-methylcytosine"
aagcgtccagaccagcttgcgatgctgatgaataagctgattttgatggggtgtgtgaaacggagatgccagcccaggggctcagcttgctcgtgctctcatttaaaagcagaaaatagcga

SEQ ID NO: 3187 - DNA, 122 bp, Homo sapiens
  misc_feature (61)..(62): /note="This region represents a CpG dinucleotide"
  misc_feature (61)..(61): /note="Nucleotide may be methylated to form 5-methylcytosine"
ctccgcccgagaggaagcgtctggccaagatgctgcagctcagcgagagacaggtgagctcgcggggggcctggggccgcctccggggaagggaaggcttctggggtaggggtcgccgggcc

SEQ ID NO: 3188 - DNA, 122 bp, Homo sapiens
  misc_feature (61)..(62): /note="This region represents a CpG dinucleotide"
  misc_feature (61)..(61): /note="Nucleotide may be methylated to form 5-methylcytosine"
acagcaaagacttgtcagataaacttgggaacaagtctaagtggcagatgaaagacacaacgaggcaagcacagtggcagcagagacagccagtgtcagagggtaaggatttcacttgttga

SEQ ID NO: 3189 - DNA, 122 bp, Homo sapiens
  misc_feature (61)..(62): /note="This region represents a CpG dinucleotide"
  misc_feature (61)..(61): /note="Nucleotide may be methylated to form 5-methylcytosine"
cataatagatattcagtaaatattaaacagatgtatgaatcagacagtcctggtcgtctacgtatctttatctactgagagttttgtgggtttttttgtttatttttttgagacagaatctc

SEQ ID NO: 3190 - DNA, 122 bp, Homo sapiens
  misc_feature (61)..(62): /note="This region represents a CpG dinucleotide"
  misc_feature (61)..(61): /note="Nucleotide may be methylated to form 5-methylcytosine"
atattccaccacaccactgttatcgtctactcacttcacttgacaataatgtaggctgggcgtggtggctcatgcctgtaatcccagcactctggaaggccaaggcaggcagatcacctgag

SEQ ID NO: 3191 - DNA, 122 bp, Homo sapiens
  misc_feature (61)..(62): /note="This region represents a CpG dinucleotide"
  misc_feature (61)..(61): /note="Nucleotide may be methylated to form 5-methylcytosine"
ccctccctacatcaggctgagatcacttgcaaactttatcctgagcacctggagagcttgcgacatggtccttacagcaggaagaatttaaaagaagataactttgggggaatgcttgttgt

SEQ ID NO: 3192 - DNA, 122 bp, Homo sapiens
  misc_feature (61)..(62): /note="This region represents a CpG dinucleotide"
  misc_feature (61)..(61): /note="Nucleotide may be methylated to form 5-methylcytosine"
ttgacctccctggccactcagggccaaagccatacagtggaacagtgtgttctttaacctcgtaggacaactctcatatgcctgggcactatttttaggttactaccttggctgcccttctt

SEQ ID NO: 3193 - DNA, 122 bp, Homo sapiens
  misc_feature (61)..(62): /note="This region represents a CpG dinucleotide"
  misc_feature (61)..(61): /note="Nucleotide may be methylated to form 5-methylcytosine"
ttttggtctgactcagagactgagtttattaaccctaggactcaaagcaggaaccctggccggagctcccaggttgccagggttcctcttgtgctctgtgtggccccaccatagctcacctg

SEQ ID NO: 3194 - DNA, 122 bp, Homo sapiens
  misc_feature (61)..(62): /note="This region represents a CpG dinucleotide"
  misc_feature (61)..(61): /note="Nucleotide may be methylated to form 5-methylcytosine"
agcctggatgagtattcacccttacttctctgaaacacaaaaaggtgactatatcccttacgtgtcttctggatcatagggtgttcatgagcattaagtgagatcatagatgcttctcaatt

SEQ ID NO: 3195 - DNA, 122 bp, Homo sapiens
  misc_feature (61)..(62): /note="This region represents a CpG dinucleotide"
  misc_feature (61)..(61): /note="Nucleotide may be methylated to form 5-methylcytosine"
tttatgcatgtaaaggcagtgttgaaaaattgtgacaaccaggagactggggtttcagcacgatcaaaacagcacccatactagggtcaggctgttgggaattagatcatcactggggcctt

SEQ ID NO: 3196 - DNA, 122 bp, Homo sapiens
  misc_feature (61)..(62): /note="This region represents a CpG dinucleotide"
  misc_feature (61)..(61): /note="Nucleotide may be methylated to form 5-methylcytosine"
ggctggtcagcacctccctggctgggtggaggtggaaaggccgccttcgggtgtggacgtcggccggcttcctggagggcaggacacggcatcctcccactgcctggcaaccgtctcctggg

SEQ ID NO: 3197 - DNA, 122 bp, Homo sapiens
  misc_feature (61)..(62): /note="This region represents a CpG dinucleotide"
  misc_feature (61)..(61): /note="Nucleotide may be methylated to form 5-methylcytosine"
catatccagatgacgtaaggaaattatgatgggggtgtgagttgcataattagcaagtgtcgggagaatgtgcgttaagagtgcgtcagagatttaggtttaaattacccacatcccacctc

SEQ ID NO: 3198 - DNA, 122 bp, Homo sapiens
  misc_feature (61)..(62): /note="This region represents a CpG dinucleotide"
  misc_feature (61)..(61): /note="Nucleotide may be methylated to form 5-methylcytosine"
caaggccccagggagctgatgttgcactggagctctactctcctctcagcgagctggtgacgtgccagtccagcaggcctggcttatccaaccacaagtatgaatcggcagaaggcaatgag

SEQ ID NO: 3199 - DNA, 122 bp, Homo sapiens
  misc_feature (61)..(62): /note="This region represents a CpG dinucleotide"
  misc_feature (61)..(61): /note="Nucleotide may be methylated to form 5-methylcytosine"
gtcatggcaagaacaattaatcctgtggtgttagagagccaacaaaaatttttgttaggacggtatcaggcttgattttttaattagataattctgtgtacagtataaaaaatggctttaaa

SEQ ID NO: 3200 - DNA, 122 bp, Homo sapiens
  misc_feature (61)..(62): /note="This region represents a CpG dinucleotide"
  misc_feature (61)..(61): /note="Nucleotide may be methylated to form 5-methylcytosine"
actctacatttaattttttgatgatacctcatattgttaaggattacttcagagttagagcgagtgagtcagagtcagagtcacttcagagtcagagtgagggtacacttattccagtagtg

SEQ ID NO: 3201 - DNA, 122 bp, Homo sapiens
  misc_feature (61)..(62): /note="This region represents a CpG dinucleotide"
  misc_feature (61)..(61): /note="Nucleotide may be methylated to form 5-methylcytosine"
tcttgattagtcattagtatgtagttggtatgaattgggtattataattaatctgggaaccgagtactatctagggtagccaaagagaaaggagtcattatcaggaaagtaaaatcactggt

SEQ ID NO: 3202 - DNA, 122 bp, Homo sapiens
  misc_feature (61)..(62): /note="This region represents a CpG dinucleotide"
  misc_feature (61)..(61): /note="Nucleotide may be methylated to form 5-methylcytosine"
tccatttcaggtgttctgttaaaagcaacagaaaacaaactaacacacagtgaaagcctccgcaactcagcacaggtcgctcaagctgtgttcctagagcttctgcagctggcaccaccctg

SEQ ID NO: 3203 - DNA, 122 bp, Homo sapiens
  misc_feature (61)..(62): /note="This region represents a CpG dinucleotide"
  misc_feature (61)..(61): /note="Nucleotide may be methylated to form 5-methylcytosine"
ttgacctcaacatcttagtcaacgcttatatgaaattttagcaaaacagtgattgaaaagcggagaatgtaaagtcccagagttggaggagtagttcatccggaagcatccgccaagtgatc

SEQ ID NO: 3204 - DNA, 122 bp, Homo sapiens
  misc_feature (61)..(62): /note="This region represents a CpG dinucleotide"
  misc_feature (61)..(61): /note="Nucleotide may be methylated to form 5-methylcytosine"
tcagaccttgccccaggcttccctgctgagaaagcaaggccttcagacctcgcccctccccgtctgcctactctgtcagcagctctgcgctggtatctgcagcagttcctgttccctcgcca

SEQ ID NO: 3205 - DNA, 122 bp, Homo sapiens
  misc_feature (61)..(62): /note="This region represents a CpG dinucleotide"
  misc_feature (61)..(61): /note="Nucleotide may be methylated to form 5-methylcytosine"
atccactgggggtggggaggagttccgagagtgctgagccttccggattaaagggacatacgctgctgcccgaatcccaaatgcagcgtgatgccactaccgcagcccagctgcagccttga

SEQ ID NO: 3206 - DNA, 122 bp, Homo sapiens
  misc_feature (61)..(62): /note="This region represents a CpG dinucleotide"
  misc_feature (61)..(61): /note="Nucleotide may be methylated to form 5-methylcytosine"
cccttcacccagcttttcccaatggcaacatcttacataaccataatatatcagctaaaccgggaaatttactttgatgcaacactatttactaaagctacagaccctactcagatggattc

SEQ ID NO: 3207 - DNA, 122 bp, Homo sapiens
  misc_feature (61)..(62): /note="This region represents a CpG dinucleotide"
  misc_feature (61)..(61): /note="Nucleotide may be methylated to form 5-methylcytosine"
aaggtgagagtctgtgctgctatgtctggtctctcaacagaaggtctgactgcagtcttacgtagactgggaagcatgccagatgttaccttccagtattgttatgaagagtgagagaaagg

SEQ ID NO: 3208 - DNA, 122 bp, Homo sapiens
  misc_feature (61)..(62): /note="This region represents a CpG dinucleotide"
  misc_feature (61)..(61): /note="Nucleotide may be methylated to form 5-methylcytosine"
gtgagctcgtgcttggctctgagtcactattgtctgtaaaaagtataattgccctgcttacgctgtacatacagcttgctcacacccagtgagagagtaaagccatgttgaaactgtctgcg

SEQ ID NO: 3209 - DNA, 122 bp, Homo sapiens
  misc_feature (61)..(62): /note="This region represents a CpG dinucleotide"
  misc_feature (61)..(61): /note="Nucleotide may be methylated to form 5-methylcytosine"
ggaagcaggatggaaggatggaagctggactgaacagcttctggggttcccctacagtgccggggatccacagtgattgtttcttctacaatcactgagagaatcactcccaggaccttgcc

SEQ ID NO: 3210 - DNA, 122 bp, Homo sapiens
  misc_feature (61)..(62): /note="This region represents a CpG dinucleotide"
  misc_feature (61)..(61): /note="Nucleotide may be methylated to form 5-methylcytosine"
tgctcttgcaaatgtttgtgtgcccttaacacagagtctagaaacacacacacacctgagcgaaaaagcctgacgtgaagtcacagaacaggtaggcaaacatgaacaaggaaatcccgagg

SEQ ID NO: 3211 - DNA, 122 bp, Homo sapiens
  misc_feature (61)..(62): /note="This region represents a CpG dinucleotide"
  misc_feature (61)..(61): /note="Nucleotide may be methylated to form 5-methylcytosine"
caactgctgctgcagatgaggcaagataagcagtgaggcaagacagaggcgtgaccaggacggccttgtgggctgcaccaccacatgcggctctcaccacagaagcaaagggcagccaccga

SEQ ID NO: 3212 - DNA, 122 bp, Homo sapiens
  misc_feature (61)..(62): /note="This region represents a CpG dinucleotide"
  misc_feature (61)..(61): /note="Nucleotide may be methylated to form 5-methylcytosine"
tgtcctaaagcctaacatccctgagtgccttctggcaacctgaacatggtggagctgtggcgtccttctccctgatttttattgcaaggcagcaagcaagacacagtcagtaattacctccc

SEQ ID NO: 3213 - DNA, 122 bp, Homo sapiens
  misc_feature (61)..(62): /note="This region represents a CpG dinucleotide"
  misc_feature (61)..(61): /note="Nucleotide may be methylated to form 5-methylcytosine"
caacttgatcttgcaatataattattaattcctcttatttaaggtggagtcttgctctgtcgtccaggctggagtgcagtggcatgatctaggctcactgtaacctccgcctcctgggtttt

SEQ ID NO: 3214 - DNA, 122 bp, Homo sapiens
  misc_feature (61)..(62): /note="This region represents a CpG dinucleotide"
  misc_feature (61)..(61): /note="Nucleotide may be methylated to form 5-methylcytosine"
tcataaaaagaccaactttagcaccattttcaatcaagaatattccttgaggccaggcggcgtggctcacacctgtaatcccagcactctgggaggcttggggcgggtggatcacctgagct

SEQ ID NO: 3215 - DNA, 122 bp, Homo sapiens
  misc_feature (61)..(62): /note="This region represents a CpG dinucleotide"
  misc_feature (61)..(61): /note="Nucleotide may be methylated to form 5-methylcytosine"
gaaacaggaactgctttgtgcattaaaacagactcataggctcttagcagctgcatcagtcgtttctaggactcctcatgagagggctctttgagcccagtggctgattatggtcccaacag

SEQ ID NO: 3216 - DNA, 122 bp, Homo sapiens
  misc_feature (61)..(62): /note="This region represents a CpG dinucleotide"
  misc_feature (61)..(61): /note="Nucleotide may be methylated to form 5-methylcytosine"
ctccctctctttgtctactaaggaaggatgaaagaaagtgcttaatcaccagctctttgtcgttggaactgagaagctgcagaatatagtggctgctggaactgcctcctcaaaggcatgtt

SEQ ID NO: 3217 - DNA, 122 bp, Homo sapiens
  misc_feature (61)..(62): /note="This region represents a CpG dinucleotide"
  misc_feature (61)..(61): /note="Nucleotide may be methylated to form 5-methylcytosine"
cacccaatcatgacttccctccaggcagggcatgcatttctaatcccaagggctgggtgccgacactcaaagtgtgtcaagtgaaggaatgagtgaatgcccagctctgagcttctataaga

SEQ ID NO: 3218 - DNA, 122 bp, Homo sapiens
  misc_feature (61)..(62): /note="This region represents a CpG dinucleotide"
  misc_feature (61)..(61): /note="Nucleotide may be methylated to form 5-methylcytosine"
cagtttaggccctttccagagggcatacagcttcctttcatctgaggcttagcgacttcgcggaccaaccatgcagtttgccttgtccaggtagtttagccaggtagccataactcagtctt

SEQ ID NO: 3219 - DNA, 122 bp, Homo sapiens
  misc_feature (61)..(62): /note="This region represents a CpG dinucleotide"
  misc_feature (61)..(61): /note="Nucleotide may be methylated to form 5-methylcytosine"
cacttaatgcttcgagtgggtggaaccgggcaccccgagtccagccagcgtgtgcacacgcggacagcagaggctcgcctaagcaaaaaggcctaatggtgctgcgctaagaagcgcttggt

SEQ ID NO: 3220 - DNA, 122 bp, Homo sapiens
  misc_feature (61)..(62): /note="This region represents a CpG dinucleotide"
  misc_feature (61)..(61): /note="Nucleotide may be methylated to form 5-methylcytosine"
ttagaaaggggaaagatgacacaagcaatagtgaaggctagtggagggaagtggggctttcgtccaaggaagcaaaaaatcataatgtgttattttttagggagtgtctggtgcaggcatgc

SEQ ID NO: 3221 - DNA, 122 bp, Homo sapiens
  misc_feature (61)..(62): /note="This region represents a CpG dinucleotide"
  misc_feature (61)..(61): /note="Nucleotide may be methylated to form 5-methylcytosine"
gggaagtaacctgtgtggctggggagtcaatgaggccatcgtgtgaggggaggactggaacgcagttctatgatgcattccagggataaaggctgagttactcaccacagagaggaatcgct

SEQ ID NO: 3222 - DNA, 122 bp, Homo sapiens
  misc_feature (61)..(62): /note="This region represents a CpG dinucleotide"
  misc_feature (61)..(61): /note="Nucleotide may be methylated to form 5-methylcytosine"
catttaagcactgtggcttagtgattaagaacacaactcatgaccgggtgcagtggcttacgcctgtaatcccagcactttgggaggctgaggcgggtggatcacctgaggacaggagttcg

SEQ ID NO: 3223 - DNA, 122 bp, Homo sapiens
  misc_feature (61)..(62): /note="This region represents a CpG dinucleotide"
  misc_feature (61)..(61): /note="Nucleotide may be methylated to form 5-methylcytosine"
gacagacacatttccctctgaaatgtcatgactcatgccacatggctaaataaaagtgcacgtatagcactgatctttcctgtttattgcttttttagtagaagctaattgaggaaaacatc

SEQ ID NO: 3224 - DNA, 122 bp, Homo sapiens
  misc_feature (61)..(62): /note="This region represents a CpG dinucleotide"
  misc_feature (61)..(61): /note="Nucleotide may be methylated to form 5-methylcytosine"
tatgggaaatgagtcaaggttgagagtataagacagctggtaatcaggagtagaccaggccgggggagccactgtgagcagcatgaaatcgtggcatccatagcactggaaggtaaaagttg

SEQ ID NO: 3225 - DNA, 122 bp, Homo sapiens
  misc_feature (61)..(62): /note="This region represents a CpG dinucleotide"
  misc_feature (61)..(61): /note="Nucleotide may be methylated to form 5-methylcytosine"
acgtggaaaggaagcagtcttaaggctgggtacatggaggagtgctgagaacacagctgacggaaagaactaaggtgccagatgtaccattccaggcaagctcttccggcctgtctccaacc

SEQ ID NO: 3226 - DNA, 122 bp, Homo sapiens
  misc_feature (61)..(62): /note="This region represents a CpG dinucleotide"
  misc_feature (61)..(61): /note="Nucleotide may be methylated to form 5-methylcytosine"
ttagttgccttgctacttggcgcaaaaccaattcctcttttcaatatcaagtttcataagcgtggaacagtaacaaatcattataaaccctctgggactggtgggtgtgtgatgatgcgggg

SEQ ID NO: 3227 - DNA, 122 bp, Homo sapiens
  misc_feature (61)..(62): /note="This region represents a CpG dinucleotide"
  misc_feature (61)..(61): /note="Nucleotide may be methylated to form 5-methylcytosine"
agttgtggagccacttgtagaactgatcagcctggacttgttctgatcagagcccagtgacgtgtttgctccgcaccagccatgcccagtacacctctgtgttgacgatacctggtttggtt

SEQ ID NO: 3228 - DNA, 122 bp, Homo sapiens
  misc_feature (61)..(62): /note="This region represents a CpG dinucleotide"
  misc_feature (61)..(61): /note="Nucleotide may be methylated to form 5-methylcytosine"
atgaagtatgacagctttcatcagtgttatgacaacatggctgggagaaaagatgatctacgactatgagtttgaattgagggttacagagcctagcttgtagcaccacatagtttttagtt

SEQ ID NO: 3229 - DNA, 122 bp, Homo sapiens
  misc_feature (61)..(62): /note="This region represents a CpG dinucleotide"
  misc_feature (61)..(61): /note="Nucleotide may be methylated to form 5-methylcytosine"
atcatccagtgtgtgggaagtccaaatggagcacagaggcggagaaggggcgaagttactcgccctgtgtgatctggaacatccatcctctccggcctgcaggcatcagagctcctgggccg

SEQ ID NO: 3230 - DNA, 122 bp, Homo sapiens
  misc_feature (61)..(62): /note="This region represents a CpG dinucleotide"
  misc_feature (61)..(61): /note="Nucleotide may be methylated to form 5-methylcytosine"
gcaagcagtgttatggctcatgtgtcaccttttacccacaggagttgatgatgtggttcccggtatgccaagtaactaggagggaggaggtcagcactggggaggggaaggtaacatcctca

SEQ ID NO: 3231 - DNA, 122 bp, Homo sapiens
  misc_feature (61)..(62): /note="This region represents a CpG dinucleotide"
  misc_feature (61)..(61): /note="Nucleotide may be methylated to form 5-methylcytosine"
catttaacagatgagccccagggatgttaaacaacccttccaagtcacatggctggaccacggtgctgggcctgtacctaggtctcctggctcttcccactacagtgtactggctaccacct

SEQ ID NO: 3232 - DNA, 122 bp, Homo sapiens
  misc_feature (61)..(62): /note="This region represents a CpG dinucleotide"
  misc_feature (61)..(61): /note="Nucleotide may be methylated to form 5-methylcytosine"
cgtctgtaaaatgggagtaaggacaggacctgcctcacgggatgctctgaggatgaaatacgctaatgaatgtaaggcgcagggcctggcacagcaccaggagctctaaacacgtgggtggt

SEQ ID NO: 3233 - DNA, 122 bp, Homo sapiens
  misc_feature (61)..(62): /note="This region represents a CpG dinucleotide"
  misc_feature (61)..(61): /note="Nucleotide may be methylated to form 5-methylcytosine"
ctcactaaatagtagtattacggtttacaggggatgtggagagtgtgccaggtttgaaaacgtcagagatccagaaacccaacctcaagctgtgcagagagcctgggactagcccaatggtg

SEQ ID NO: 3234 - DNA, 122 bp, Homo sapiens
  misc_feature (61)..(62): /note="This region represents a CpG dinucleotide"
  misc_feature (61)..(61): /note="Nucleotide may be methylated to form 5-methylcytosine"
ggttcaatgatgaagcagcgagagcaagttcctggtacccggcctgggaatcagaacacacgagtgcaacttccagttctgctgctgattgaccctgtgacccagggaaagttattttactt

SEQ ID NO: 3235 - DNA, 122 bp, Homo sapiens
  misc_feature (61)..(62): /note="This region represents a CpG dinucleotide"
  misc_feature (61)..(61): /note="Nucleotide may be methylated to form 5-methylcytosine"
tcgtagtctccagctgcgtgactcttaaactgtaatttctaatcctgtggctgttagtctcgtccccaggcaagaagcaggtctgctttgggaaagggctgttacagtctttgtctaaacta

SEQ ID NO: 3236 - DNA, 122 bp, Homo sapiens
  misc_feature (61)..(62): /note="This region represents a CpG dinucleotide"
  misc_feature (61)..(61): /note="Nucleotide may be methylated to form 5-methylcytosine"
gtgcatcacccagggtcattgggtggatccaatcagttaatgtgtataaaagcacagggacgattgtgcaatagaatgtgaagattcataataaaaacttcagtgtttcttgtgattcccat

SEQ ID NO: 3237 - DNA, 122 bp, Homo sapiens
  misc_feature (61)..(62): /note="This region represents a CpG dinucleotide"
  misc_feature (61)..(61): /note="Nucleotide may be methylated to form 5-methylcytosine"
tttactgatcaaggggcatttaaagcatgacagtgttaaagtatgccccggctggcaaagcggacttcctgtggctaactgaggtgctcattaaacagatcaggtggccgtggctgggtgag

SEQ ID NO: 3238 - DNA, 122 bp, Homo sapiens
  misc_feature (61)..(62): /note="This region represents a CpG dinucleotide"
  misc_feature (61)..(61): /note="Nucleotide may be methylated to form 5-methylcytosine"
gggtctcactctgtggcccaggctggggtgcagtggtgcaatcatagctcattgcagcctcgaactcctgggcttaagggtacctcagcctcccatagtactgggattacaggtgtgagcca

SEQ ID NO: 3239 - DNA, 122 bp, Homo sapiens
  misc_feature (61)..(62): /note="This region represents a CpG dinucleotide"
  misc_feature (61)..(61): /note="Nucleotide may be methylated to form 5-methylcytosine"
acagattcttcctggaggagctgccttaatttgcggctgcaatgacatgttctgatgtgacgtcagtctggtgtcagacttccagagtggcaggccagcctcacaaccacagtgtatttcct

SEQ ID NO: 3240 - DNA, 122 bp, Homo sapiens
  misc_feature (61)..(62): /note="This region represents a CpG dinucleotide"
  misc_feature (61)..(61): /note="Nucleotide may be methylated to form 5-methylcytosine"
aatggagtgtgaagcaagcaacatctatcacatccgggctgcactttcaaaggcaactgtcgttcagctcatgctccttttcatccacgtcagcagccagcaaagttccagatggaggctgt

SEQ ID NO: 3241 - DNA, 122 bp, Homo sapiens
  misc_feature (61)..(62): /note="This region represents a CpG dinucleotide"
  misc_feature (61)..(61): /note="Nucleotide may be methylated to form 5-methylcytosine"
ctgctgagctgatggggaagcgaagcccagcctggtgcagcctggcctggagtcacacagcgtgtgtgaaagagcctagaaccaagccgcgcctggcccaggggggaagcagccctgccagt

SEQ ID NO: 3242 - DNA, 122 bp, Homo sapiens
  misc_feature (61)..(62): /note="This region represents a CpG dinucleotide"
  misc_feature (61)..(61): /note="Nucleotide may be methylated to form 5-methylcytosine"
ctcagttaccccctcttcatcctggttgatttccagctttcaataaagcttttcacctgacgcaggataatagcgagtgcatgtgtgctggtttgtttactgtgagtctctcagaggaaatc

SEQ ID NO: 3243 - DNA, 122 bp, Homo sapiens
  misc_feature (61)..(62): /note="This region represents a CpG dinucleotide"
  misc_feature (61)..(61): /note="Nucleotide may be methylated to form 5-methylcytosine"
ccttatctccttaacctctaagcacagagtgctcaggacttaatcttcaaacctgtctcacgtcactgcctcatagctttgacttcagcacatttctctctgacttccaggcttgcttatcc

SEQ ID NO: 3244 - DNA, 122 bp, Homo sapiens
  misc_feature (61)..(62): /note="This region represents a CpG dinucleotide"
  misc_feature (61)..(61): /note="Nucleotide may be methylated to form 5-methylcytosine"
aaatgtatggctttcttctgatctctagccaagttctctgtgtttatcctttttgagtgacgcacccttcaaccagttactcagatctgacaagctctgagtaaaataagaaattcctaatg

SEQ ID NO: 3245 - DNA, 122 bp, Homo sapiens
  misc_feature (61)..(62): /note="This region represents a CpG dinucleotide"
  misc_feature (61)..(61): /note="Nucleotide may be methylated to form 5-methylcytosine"
aagcaggttggggccaggtgcggtggctcatgcctttaatctcagcaactggggaggccacggtgagtgaatcatctgaggtcaggagttccagaccagcctgaccaacatgattaaaccct

SEQ ID NO: 3246 - DNA, 122 bp, Homo sapiens
  misc_feature (61)..(62): /note="This region represents a CpG dinucleotide"
  misc_feature (61)..(61): /note="Nucleotide may be methylated to form 5-methylcytosine"
ggtagatactttatacattatctaatcaatgttcccacttttgttttaatcttaccattacgtagattcagctgccactgctaatccttttgctttagttttttcagatgtctcttggctag

SEQ ID NO: 3247 - DNA, 122 bp, Homo sapiens
  misc_feature (61)..(62): /note="This region represents a CpG dinucleotide"
  misc_feature (61)..(61): /note="Nucleotide may be methylated to form 5-methylcytosine"
tgggaaggtacccaggggcttcagcacggggtgagtccaagcttagaagctcactggcagcgtcaggcagctcatgcccagccaagtgctcctgagtggacatgcctgggccagctgcgggc

SEQ ID NO: 3248 - DNA, 122 bp, Homo sapiens
  misc_feature (61)..(62): /note="This region represents a CpG dinucleotide"
  misc_feature (61)..(61): /note="Nucleotide may be methylated to form 5-methylcytosine"
ttttcctgaagccaaccgattatgggttttaatcacatctacaaaataccttcctggcaacgcctagatgagtgcttggttgaataactggagactataacctagccaagttgacattgaaa

SEQ ID NO: 3249 - DNA, 122 bp, Homo sapiens
  misc_feature (61)..(62): /note="This region represents a CpG dinucleotide"
  misc_feature (61)..(61): /note="Nucleotide may be methylated to form 5-methylcytosine"
tgctcccttccacaagggatggcatcttactcaatcagattgcacaagcctgacacggggcgtcatcccctgccaagcaatggatcttcaactcgttatctattttctcttctgcacatttc

SEQ ID NO: 3250 - DNA, 122 bp, Homo sapiens
  misc_feature (61)..(62): /note="This region represents a CpG dinucleotide"
  misc_feature (61)..(61): /note="Nucleotide may be methylated to form 5-methylcytosine"
ggctgagtaggtggggcttagttaacactgccctggagctcattgagcatttcctgggttcggcaggcaggaagcaccagcgtgttctggatgaaaatagttcctgcctgctggctctccac

SEQ ID NO: 3251 - DNA, 122 bp, Homo sapiens
  misc_feature (61)..(62): /note="This region represents a CpG dinucleotide"
  misc_feature (61)..(61): /note="Nucleotide may be methylated to form 5-methylcytosine"
taaatgccataaaaaagatctgaagagtcttgtttgcagtatgttaatgtaggcggctgacgtggttgtttatgattcagcatattacctcatggtgttgaaagtgctctcagaaaccacca

SEQ ID NO: 3252 - DNA, 122 bp, Homo sapiens
  misc_feature (61)..(62): /note="This region represents a CpG dinucleotide"
  misc_feature (61)..(61): /note="Nucleotide may be methylated to form 5-methylcytosine"
ttttgaactctatggggcttctgttctgtgccatgaacatgacacctgtgtcctctgttacgttcttgtgattgctcctgtttcatatattcctgtcttctcttctgactaggtttaaagaa

SEQ ID NO: 3253 - DNA, 122 bp, Homo sapiens
  misc_feature (61)..(62): /note="This region represents a CpG dinucleotide"
  misc_feature (61)..(61): /note="Nucleotide may be methylated to form 5-methylcytosine"
actgtctaatgaattctgaatcagccatcctctgcaatttccttgctatgtcggagtcagcgagattctattacctgctctgggccttaggtttcatgcctgcaaaatgggccgagtgaaat

SEQ ID NO: 3254 - DNA, 122 bp, Homo sapiens
  misc_feature (61)..(62): /note="This region represents a CpG dinucleotide"
  misc_feature (61)..(61): /note="Nucleotide may be methylated to form 5-methylcytosine"
gccctcctcggcctcccgaagtgctgggattataggcgtgagccaccgcacccggcccgtcgtcttaattgacagctgttgcctaccacaaaccccactgacaacagggcctggaagtggat

SEQ ID NO: 3255 - DNA, 122 bp, Homo sapiens
  misc_feature (61)..(62): /note="This region represents a CpG dinucleotide"
  misc_feature (61)..(61): /note="Nucleotide may be methylated to form 5-methylcytosine"
aatcactctaagtggtgttcctgtcaccctttaaggtagcctggtcagaattcctgcttccgggccctagcacctactctggcctgaccatttcagccaagggggaagggatgatgttgagg

SEQ ID NO: 3256 - DNA, 122 bp, Homo sapiens
  misc_feature (61)..(62): /note="This region represents a CpG dinucleotide"
  misc_feature (61)..(61): /note="Nucleotide may be methylated to form 5-methylcytosine"
ctggattacttttccaggagacacccagatgtggcaatagctcttggggttttgggctgacgtacaggagctgaagctgtgatgtcgcgtgtccgtgtccttaggacagtgttaagtgggga

SEQ ID NO: 3257 - DNA, 122 bp, Homo sapiens
  misc_feature (61)..(62): /note="This region represents a CpG dinucleotide"
  misc_feature (61)..(61): /note="Nucleotide may be methylated to form 5-methylcytosine"
gctcaggcagagttcatgttctctagccatacttcttctttccacaagctttgtaaaggacgtcagaattatttccctcacaggttacattgttcagattactgacctttcctgatctctgt

SEQ ID NO: 3258 - DNA, 122 bp, Homo sapiens
  misc_feature (61)..(62): /note="This region represents a CpG dinucleotide"
  misc_feature (61)..(61): /note="Nucleotide may be methylated to form 5-methylcytosine"
ggagagatgcttcctgctcagatggcattaccgagcactccttccagcctcttgacatgtcgagccactgtttatctagctgtttggttgaggagtaatagagtcctgtgacctgatgtcac

SEQ ID NO: 3259 - DNA, 122 bp, Homo sapiens
  misc_feature (61)..(62): /note="This region represents a CpG dinucleotide"
  misc_feature (61)..(61): /note="Nucleotide may be methylated to form 5-methylcytosine"
ctgctgatgcatgtcggatcacccgcacagagagatcacatggcttctccaaaagtcaaacgatcaattcgcctcgttttggctctgtacttaatgcacaaacagtgcgatctgcggggctg

SEQ ID NO: 3260 - DNA, 122 bp, Homo sapiens
  misc_feature (61)..(62): /note="This region represents a CpG dinucleotide"
  misc_feature (61)..(61): /note="Nucleotide may be methylated to form 5-methylcytosine"
ctccagttgctggcaaacgtctgcagcctgtggtggtactcctccgtactgtaggtcttacggtgctaaaacaaaacacgccagtagcaagtcatggaaacaggctgcagctccctagaggg

SEQ ID NO: 3261 - DNA, 122 bp, Homo sapiens
  misc_feature (61)..(62): /note="This region represents a CpG dinucleotide"
  misc_feature (61)..(61): /note="Nucleotide may be methylated to form 5-methylcytosine"
tggtcgggaaccacagtcaaagccacacaggtggtcagaggcagtaatgccagggactagcgcctgctttggggaagcacgggctgcttccttggtctgtcctggtgagacaaggaatggga

SEQ ID NO: 3262 - DNA, 122 bp, Homo sapiens
  misc_feature (61)..(62): /note="This region represents a CpG dinucleotide"
  misc_feature (61)..(61): /note="Nucleotide may be methylated to form 5-methylcytosine"
cgatgagatggtttaattatctgccttttctccccccacccccacccagcagcttcctgtcggacagactgaagcctggctgggctagtgacggtaaaaatcactgacagcaccagcaaaca

SEQ ID NO: 3263 - DNA, 122 bp, Homo sapiens
  misc_feature (61)..(62): /note="This region represents a CpG dinucleotide"
  misc_feature (61)..(61): /note="Nucleotide may be methylated to form 5-methylcytosine"
ttctcatctgtgtaggtttgcggtgtttcttgaggcgagagctgtctgtgtaggttttgccgctgcctatgtaatcccaagtgtgggtagtgatcttttttggcttgtgctcctccaagatg

SEQ ID NO: 3264 - DNA, 122 bp, Homo sapiens
  misc_feature (61)..(62): /note="This region represents a CpG dinucleotide"
  misc_feature (61)..(61): /note="Nucleotide may be methylated to form 5-methylcytosine"
ctatcagctctgtcttcccatagcctatggtactttttttatgtggatgtctttattaagcgtgtgttatcttgtagtgtaagtatttatcatctgacttcccttttaaaccataagtccct

SEQ ID NO: 3265 - DNA, 122 bp, Homo sapiens
  misc_feature (61)..(62): /note="This region represents a CpG dinucleotide"
  misc_feature (61)..(61): /note="Nucleotide may be methylated to form 5-methylcytosine"
gatctccagacactcaggacaagtcagtgtccccaccaaggatggggctttgagaggctccgcccacctctgtttctgcacagcaggtttagcagctccattcttccccagagagccactcc

SEQ ID NO: 3266 - DNA, 122 bp, Homo sapiens
  misc_feature (61)..(62): /note="This region represents a CpG dinucleotide"
  misc_feature (61)..(61): /note="Nucleotide may be methylated to form 5-methylcytosine"
accccataagtcctggattaaaacaagctctttgctcataacattggtctctcaacatagcgtgacataatcagacatataattatgcacttcccagtagagatacgcatgtaaaagctaca

SEQ ID NO: 3267 - DNA, 122 bp, Homo sapiens
  misc_feature (61)..(62): /note="This region represents a CpG dinucleotide"
  misc_feature (61)..(61): /note="Nucleotide may be methylated to form 5-methylcytosine"
catcagtatcctctgccatgatgacgatatctacacatctgaatcacccaggacatttttcgtacaatcagactttacaaacctggctgtagatttttgtttttgtttttttttttagtgta

SEQ ID NO: 3268 - DNA, 122 bp, Homo sapiens
  misc_feature (61)..(62): /note="This region represents a CpG dinucleotide"
  misc_feature (61)..(61): /note="Nucleotide may be methylated to form 5-methylcytosine"
tatgtgatactgtttgcttatatatgtctcttctcttcttgtctgtgatccacctatatccgggatgtcccttttgtttactttgagtgagatggacagatcacaccgtgacttccagtgtc

SEQ ID NO: 3269 - DNA, 122 bp, Homo sapiens
  misc_feature (61)..(62): /note="This region represents a CpG dinucleotide"
  misc_feature (61)..(61): /note="Nucleotide may be methylated to form 5-methylcytosine"
agactgtatgagatcttgaatgccaagatcctaatcagcacctgtcacgatgtacttaatcgttgcagttgcaaaacacccgtgtacataatcacgttggatcctcagagcaacctagggac

SEQ ID NO: 3270 - DNA, 122 bp, Homo sapiens
  misc_feature (61)..(62): /note="This region represents a CpG dinucleotide"
  misc_feature (61)..(61): /note="Nucleotide may be methylated to form 5-methylcytosine"
ttctggtgggggaggactctgagtacagaatataaatcactcttggcttcccagagcttacgctgactcatttgagaaacagaaaaagtgactggcaggccaacatatacatacacatgcat

SEQ ID NO: 3271 - DNA, 122 bp, Homo sapiens
  misc_feature (61)..(62): /note="This region represents a CpG dinucleotide"
  misc_feature (61)..(61): /note="Nucleotide may be methylated to form 5-methylcytosine"
ttgcttccacatttatatagacgcctaaagatgacatggtgagggagaggggatgagaaacgggattacacaacaaacacctgggaggatcctgtgggttgcccatcagcccctaggccagt

SEQ ID NO: 3272 - DNA, 122 bp, Homo sapiens
  misc_feature (61)..(62): /note="This region represents a CpG dinucleotide"
  misc_feature (61)..(61): /note="Nucleotide may be methylated to form 5-methylcytosine"
agatatctgggccaaacagatttagaaatcatcagcacatagatggaagggagttgaagtcggtaagctttgcttcaggtagtattttatggcaagaagatgttggaggatagagatctgag

SEQ ID NO: 3273 - DNA, 122 bp, Homo sapiens
  misc_feature (61)..(62): /note="This region represents a CpG dinucleotide"
  misc_feature (61)..(61): /note="Nucleotide may be methylated to form 5-methylcytosine"
tttaatcatggtgactgttgttaaggccatttaacagatgaggaaaatcaggctgacagacggcagagtcgtctgaggcagaacacagaatctgtgttcttcaccactgttacaattctccc

SEQ ID NO: 3274 - DNA, 122 bp, Homo sapiens
  misc_feature (61)..(62): /note="This region represents a CpG dinucleotide"
  misc_feature (61)..(61): /note="Nucleotide may be methylated to form 5-methylcytosine"
gtgagaactgctcgagggttttggctctcagaaaagccaagctccattcttcttgacttacgccaaaggccccagtccccacccataggtaaatcaaagccttaaatcatctatttaagaga

SEQ ID NO: 3275 - DNA, 122 bp, Homo sapiens
  misc_feature (61)..(62): /note="This region represents a CpG dinucleotide"
  misc_feature (61)..(61): /note="Nucleotide may be methylated to form 5-methylcytosine"
ttaacattccaagagtcaggagggcagattaaaataggattttgcttgcaataacatttgcggtctgttcagcattgttgagtgcttaatctagccaggaagtctgatttacagggagctac

SEQ ID NO: 3276 - DNA, 122 bp, Homo sapiens
  misc_feature (61)..(62): /note="This region represents a CpG dinucleotide"
  misc_feature (61)..(61): /note="Nucleotide may be methylated to form 5-methylcytosine"
gctggttctaatgtagcaaatgagaacatgtaagccattaaaacagaacagtgttttgcacgtaattaggtacttggcaaattgttgtggagtgacaagtagtacattgaagttcacccttt

SEQ ID NO: 3277 - DNA, 122 bp, Homo sapiens
  misc_feature (61)..(62): /note="This region represents a CpG dinucleotide"
  misc_feature (61)..(61): /note="Nucleotide may be methylated to form 5-methylcytosine"
cacaccactggagaaaccatagaccttcttaactgggattaccaacaccttctcttagtacgtattcacatggccttggatgttaggtgactgcctgttcagagaaagtggggagggtgaaa

SEQ ID NO: 3278 - DNA, 122 bp, Homo sapiens
  misc_feature (61)..(62): /note="This region represents a CpG dinucleotide"
  misc_feature (61)..(61): /note="Nucleotide may be methylated to form 5-methylcytosine"
cctctattagccagtgcaggagagtcctcatccccgtcacatttagggcctttcccaggacggctcccagggctctccagcaggtctggctggcacctcatgacatcagcctcctctggggc

SEQ ID NO: 3279 - DNA, 122 bp, Homo sapiens
  misc_feature (61)..(62): /note="This region represents a CpG dinucleotide"
  misc_feature (61)..(61): /note="Nucleotide may be methylated to form 5-methylcytosine"
ctttaccatttacatgatttaaggccaaaatctgctctccttcctatgtcataacaaaaccgcgcaagactataacgtaagcctcactacccatatcctagagctttgcagcaaccagcaaa

SEQ ID NO: 3280 - DNA, 122 bp, Homo sapiens
  misc_feature (61)..(62): /note="This region represents a CpG dinucleotide"
  misc_feature (61)..(61): /note="Nucleotide may be methylated to form 5-methylcytosine"
tcaaaggataaagtccacagtccttgacctgttgtgatctgatgcaactgcgtcacctgtcgctgtcttttcctggtaggcactttatgcaccagtaacacgcaaccatctactgttaccta

SEQ ID NO: 3281 - DNA, 122 bp, Homo sapiens
  misc_feature (61)..(62): /note="This region represents a CpG dinucleotide"
  misc_feature (61)..(61): /note="Nucleotide may be methylated to form 5-methylcytosine"
gaaatcatgtgtggtagatagtttgcataactttgggattttccagagagaggatgaaaacggtggccctccttgtaatgtctaggcacatgggacatccagtggaactgttgagggaggag

SEQ ID NO: 3282 - DNA, 122 bp, Homo sapiens
  misc_feature (61)..(62): /note="This region represents a CpG dinucleotide"
  misc_feature (61)..(61): /note="Nucleotide may be methylated to form 5-methylcytosine"
gtgaactgagtaagcagagtggagggagcagagagcagaatactcacagaggagctgcagcgaaggaggaaggctaatcttctgggcagaaccccagagaggcgccagttcagtgaccgtcg

SEQ ID NO: 3283 - DNA, 122 bp, Homo sapiens
  misc_feature (61)..(62): /note="This region represents a CpG dinucleotide"
  misc_feature (61)..(61): /note="Nucleotide may be methylated to form 5-methylcytosine"
tagtttgctgatccctgatcaatgttctttctcatttccaggtctcacattgcctttagtcgtcagttcctcggcctttctttgtctttcatgaccttgatatctgtgaacagtcctggtca

SEQ ID NO: 3284 - DNA, 122 bp, Homo sapiens
  misc_feature (61)..(62): /note="This region represents a CpG dinucleotide"
  misc_feature (61)..(61): /note="Nucleotide may be methylated to form 5-methylcytosine"
aattaaatgagaaatcataatccaaaatcccatgtgttccatgattacaaattatctatacgaacagatgaagactaaaaggaaatagcaacaaagatgacacaaatgcctggatgatttag

SEQ ID NO: 3285 - DNA, 122 bp, Homo sapiens
  misc_feature (61)..(62): /note="This region represents a CpG dinucleotide"
  misc_feature (61)..(61): /note="Nucleotide may be methylated to form 5-methylcytosine"
agaaatcatttctgtagaaacatttatgtgccagtatgcaattctccagcctgttcttctcgtcactatgataatagaagcagagataaatatagatatgcaatgctgacccatcaaatgaa

SEQ ID NO: 3286 - DNA, 122 bp, Homo sapiens
  misc_feature (61)..(62): /note="This region represents a CpG dinucleotide"
  misc_feature (61)..(61): /note="Nucleotide may be methylated to form 5-methylcytosine"
actttttcttagtggcacatgaaatattgatgtatcttacaatcactggtgtcctagatccgatacatatgattagtgagtcattcagccatgttggaaaagcacagtagctggtgacagtt

SEQ ID NO: 3287 - DNA, 122 bp, Homo sapiens
  misc_feature (61)..(62): /note="This region represents a CpG dinucleotide"
  misc_feature (61)..(61): /note="Nucleotide may be methylated to form 5-methylcytosine"
ttactggctgtattgggtgagacattgggaaatgctttcataactggtgatcactgttgacggggttccctgacttcataaaggcccagattatgttaccccgagaaagtctttgaaggagc

SEQ ID NO: 3288 - DNA, 122 bp, Homo sapiens
  misc_feature (61)..(62): /note="This region represents a CpG dinucleotide"
  misc_feature (61)..(61): /note="Nucleotide may be methylated to form 5-methylcytosine"
ctagaggaaagtcaggaacctaagttctgcaaccccaactctgccactcaccagctgtttcgtgactttgaataaatcctttctttctggccctaagtgtttccatctttaaaaggagaaga

SEQ ID NO: 3289 - DNA, 122 bp, Homo sapiens
  misc_feature (61)..(62): /note="This region represents a CpG dinucleotide"
  misc_feature (61)..(61): /note="Nucleotide may be methylated to form 5-methylcytosine"
gcattgatttcctgttcatcggggtatccagggtaaccctgcaatggacacagataagcacgtcattcatgtcgctcctttctaacaacaggtgcccagtcccccttggccaggaaaacgca

SEQ ID NO: 3290 - DNA, 122 bp, Homo sapiens
  misc_feature (61)..(62): /note="This region represents a CpG dinucleotide"
  misc_feature (61)..(61): /note="Nucleotide may be methylated to form 5-methylcytosine"
gaacacagcaggatgcaagcacatgatggctctggtggatgacttcatgagggtgtagagcgtagaacagaagagagaattagtcccaagagagaagtcagcatgctctgagcaggcctatt

SEQ ID NO: 3291 - DNA, 122 bp, Homo sapiens
  misc_feature (61)..(62): /note="This region represents a CpG dinucleotide"
  misc_feature (61)..(61): /note="Nucleotide may be methylated to form 5-methylcytosine"
tactgtaatgtgtgtcacctggaattatggagctcaattaacagattatgggtttgtctccgcagcaaggctgggagctccaggaccacaggaagcaggtcttactcatttcctaactcagg

SEQ ID NO: 3292 - DNA, 122 bp, Homo sapiens
  misc_feature (61)..(62): /note="This region represents a CpG dinucleotide"
  misc_feature (61)..(61): /note="Nucleotide may be methylated to form 5-methylcytosine"
agaagaggccagactggagctcaataaagccaggactcactgcttttgtggacagcagtgcgcagacttaggttctcctgcttgagtttctggttgctgtgttgcagaaagcgaatgtagtc

SEQ ID NO: 3293 - DNA, 122 bp, Homo sapiens
  misc_feature (61)..(62): /note="This region represents a CpG dinucleotide"
  misc_feature (61)..(61): /note="Nucleotide may be methylated to form 5-methylcytosine"
aacccagaagggaaatggttaaactgagcttgttattgcctcggagagcctaagagcacccgcacacttaattctactccctgtctagaaaagctgtcagggagtcgtttggaattgcaatg

SEQ ID NO: 3294 - DNA, 122 bp, Homo sapiens
  misc_feature (61)..(62): /note="This region represents a CpG dinucleotide"
  misc_feature (61)..(61): /note="Nucleotide may be methylated to form 5-methylcytosine"
cagcacagttgcagccccaacctgtttgtccagaatgtcttcgtggatacccatgatcttcgcttcccctgggtggccttctttgccagcaagtaaggagtcaggaaaggggatgactgggg

SEQ ID NO: 3295 - DNA, 122 bp, Homo sapiens
  misc_feature (61)..(62): /note="This region represents a CpG dinucleotide"
  misc_feature (61)..(61): /note="Nucleotide may be methylated to form 5-methylcytosine"
atcagctcccgtgagctcttctcccaagaattttagtcctgttcatctctgtgttgacaccgttcatgtccaataagcttctcttgcagttgatgggtgtggggtggggtgagggcaagagg

SEQ ID NO: 3296 - DNA, 122 bp, Homo sapiens
  misc_feature (61)..(62): /note="This region represents a CpG dinucleotide"
  misc_feature (61)..(61): /note="Nucleotide may be methylated to form 5-methylcytosine"
aagggaagcaacagggctggctcatacacccactttccctttggttgatatcaggttttgcgttagttttgagagtctgttttgccgtagtgcacttccccttgggtttttctgaaatgttt

SEQ ID NO: 3297 - DNA, 122 bp, Homo sapiens
  misc_feature (61)..(62): /note="This region represents a CpG dinucleotide"
  misc_feature (61)..(61): /note="Nucleotide may be methylated to form 5-methylcytosine"
ggtgattaccaggggctggggaagagggaaataggaaggtgtttaatgagtataaaacaacgcattacagttttgcagaatgaaaaggctctggagatctgttgcacaatggtgtgatacac

SEQ ID NO: 3298 - DNA, 122 bp, Homo sapiens
  misc_feature (61)..(62): /note="This region represents a CpG dinucleotide"
  misc_feature (61)..(61): /note="Nucleotide may be methylated to form 5-methylcytosine"
attctcaggagatgcaaatcactactgaaagctcaaaccatcagaaatttctttacaatacgttccccaggatttccaggttgtgttgttgcaatggatttggtttaagtaatggttctcaa

SEQ ID NO: 3299 - DNA, 122 bp, Homo sapiens
  misc_feature (61)..(62): /note="This region represents a CpG dinucleotide"
  misc_feature (61)..(61): /note="Nucleotide may be methylated to form 5-methylcytosine"
cagcattggcgggagggagtgcggtgcacggagccagggcgcttggggatcttgcgccagcgtctcttgtcccagcggcaaagcagcagcaggcgaaaggtgtcccggaaggctttgttgca

SEQ ID NO: 3300 - DNA, 122 bp, Homo sapiens
  misc_feature (61)..(62): /note="This region represents a CpG dinucleotide"
  misc_feature (61)..(61): /note="Nucleotide may be methylated to form 5-methylcytosine"
atgtgctatttattacattggtttctgtgacacatgaagcttacctaagctagaccctgtcgtcttgcttacaactgagccatcacttgggagatggaaaaatggcttctggctgtctgaat

SEQ ID NO: 3301 - DNA, 122 bp, Homo sapiens
  misc_feature (61)..(62): /note="This region represents a CpG dinucleotide"
  misc_feature (61)..(61): /note="Nucleotide may be methylated to form 5-methylcytosine"
gatgcttaagtccaggtgagacaggttatgccatcttccaaagtgtctaattgcctcaggcgtgaaaccaattcctatttacttagcccagctccatggggtactgagatacatggggccga

SEQ ID NO: 3302 - DNA, 122 bp, Homo sapiens
  misc_feature (61)..(62): /note="This region represents a CpG dinucleotide"
  misc_feature (61)..(61): /note="Nucleotide may be methylated to form 5-methylcytosine"
ccctcaggagaatgtaaacgcatcaagaggatcttgtctttcactaattgtattttcaggcggggcccagaggctcacgcctgtaatccctgcactttggaaagctgaggggtggatcactt

SEQ ID NO: 3303 - DNA, 122 bp, Homo sapiens
  misc_feature (61)..(62): /note="This region represents a CpG dinucleotide"
  misc_feature (61)..(61): /note="Nucleotide may be methylated to form 5-methylcytosine"
ctgcttgaatttctgggcctcagtttcttcatgtgtagaacagagctgtcaaccctactccgtcacagggctggttctatgaaagaactgagcgggccttgggttcccacacccatggggat

SEQ ID NO: 3304 - DNA, 122 bp, Homo sapiens
  misc_feature (61)..(62): /note="This region represents a CpG dinucleotide"
  misc_feature (61)..(61): /note="Nucleotide may be methylated to form 5-methylcytosine"
ggctgcatggccagtgcagatctgcaagtcacgcagcaaggcagccagctccagtagatgcgtttggaaggctgctcccttccaagaagagaccctgtgtcccagcagtccctgaccaccag

SEQ ID NO: 3305 - DNA, 122 bp, Homo sapiens
  misc_feature (61)..(62): /note="This region represents a CpG dinucleotide"
  misc_feature (61)..(61): /note="Nucleotide may be methylated to form 5-methylcytosine"
ttccaccctgccccgaaggcttttgtgactctgcgtgtcaaaaggggtggcactcagaggcgccacaaggaagcagcaggactatgcattgcagagcatttctcctgtgtgcccctaagcac

SEQ ID NO: 3306 - DNA, 122 bp, Homo sapiens
  misc_feature (61)..(62): /note="This region represents a CpG dinucleotide"
  misc_feature (61)..(61): /note="Nucleotide may be methylated to form 5-methylcytosine"
cttccagaaggcttcttgatggagttgtggcaagctcatgggggaaatgcttcaccccaacgtaacccagaccaaatatgccattgcacaggaagtgggtgctgagtccaagtgtgtccata

SEQ ID NO: 3307 - DNA, 122 bp, Homo sapiens
  misc_feature (61)..(62): /note="This region represents a CpG dinucleotide"
  misc_feature (61)..(61): /note="Nucleotide may be methylated to form 5-methylcytosine"
ataaataacaagtttattttgtcacagttctggaggctgggaagttcaagatcaaggctccgctaggctcagtgtttgacaagggctgctctctgcttccaaaatggagccttgttgctgtg

SEQ ID NO: 3308 - DNA, 122 bp, Homo sapiens
  misc_feature (61)..(62): /note="This region represents a CpG dinucleotide"
  misc_feature (61)..(61): /note="Nucleotide may be methylated to form 5-methylcytosine"
tatgaggctggggcatttaatggatcatccacaaggccactgaaggtactaaagatatagcgagagtaggcattgtgagtcagactgtaagccatgctctaaagcccattctcaaagtggaa

SEQ ID NO: 3309 - DNA, 122 bp, Homo sapiens
  misc_feature (61)..(62): /note="This region represents a CpG dinucleotide"
  misc_feature (61)..(61): /note="Nucleotide may be methylated to form 5-methylcytosine"
gtcaagattggctgcctcatgttgaggttcagagttacgactcggactggacagaggcgccggcagctgtggtgattggcggggagacctacggcgtgagcctggagtccctgcagctggcc

SEQ ID NO: 3310 - DNA, 122 bp, Homo sapiens
  misc_feature (61)..(62): /note="This region represents a CpG dinucleotide"
  misc_feature (61)..(61): /note="Nucleotide may be methylated to form 5-methylcytosine"
acacctgcctggtgtcctccctgcccaaaggcaaagagctgcaacatgcgggaggctggacgctgaaggccacttttggagtctactaaccaggtccagctgggcacctgtatccatttcat

SEQ ID NO: 3311 - DNA, 122 bp, Homo sapiens
  misc_feature (61)..(62): /note="This region represents a CpG dinucleotide"
  misc_feature (61)..(61): /note="Nucleotide may be methylated to form 5-methylcytosine"
catgaatgtcttggtgcccttcccgaggtaatgggtgagttattgctctgtcatttcatgcggatctggttgttaaaacgtggcacgtccttctctctcgctctctcacttgccatgtgaca

SEQ ID NO: 3312 - DNA, 122 bp, Homo sapiens
  misc_feature (61)..(62): /note="This region represents a CpG dinucleotide"
  misc_feature (61)..(61): /note="Nucleotide may be methylated to form 5-methylcytosine"
acctgagagcttcgccctgctaggattagcgtctgtataaagagagacacctgagagcttcgcctacacgcttccccactgagggaagaccatgtgactatacaacaggaaggtagttgttt

SEQ ID NO: 3313 - DNA, 122 bp, Homo sapiens
  misc_feature (61)..(62): /note="This region represents a CpG dinucleotide"
  misc_feature (61)..(61): /note="Nucleotide may be methylated to form 5-methylcytosine"
catacaactgatcccctctccccagaaagcaaaacacataggtctgtcctacatgtcctacgtgagaagagcagggctgggaactacctcttacgtgttatcttccaagtgacattatcagt

SEQ ID NO: 3314 - DNA, 122 bp, Homo sapiens
  misc_feature (61)..(62): /note="This region represents a CpG dinucleotide"
  misc_feature (61)..(61): /note="Nucleotide may be methylated to form 5-methylcytosine"
gaagagcccaatcaagcagtcaaacgtgtttacaggtcagctctgctcctggccaagtggcgttggctggggcacgtggtgagtgggtggtggcggaccaggctcctgtgtcagctgcaggt

SEQ ID NO: 3315 - DNA, 122 bp, Homo sapiens
  misc_feature (61)..(62): /note="This region represents a CpG dinucleotide"
  misc_feature (61)..(61): /note="Nucleotide may be methylated to form 5-methylcytosine"
tttaaaatggttaattttatgctatgggaatttcacctcgacttaatatatactcaatcccgtccagccgacacacctttggctcaggcctaggccactctgccatctgccaagtgtggctt

SEQ ID NO: 3316 - DNA, 122 bp, Homo sapiens
  misc_feature (61)..(62): /note="This region represents a CpG dinucleotide"
  misc_feature (61)..(61): /note="Nucleotide may be methylated to form 5-methylcytosine"
agcagtgaacaccaggttgtgtctggtcttctgcagtctgccatggtgaataatcccgtacgtgtgtcatttcacacgctgcaggtgaatctacagggtgaattcctagaagcgggattgct

SEQ ID NO: 3317 - DNA, 122 bp, Homo sapiens
  misc_feature (61)..(62): /note="This region represents a CpG dinucleotide"
  misc_feature (61)..(61): /note="Nucleotide may be methylated to form 5-methylcytosine"
gtggggtgagcccctgatgagtgtcagctgttactgtgtcgatcagtgcatctgactgttcgtatctgcctcttgcttagcctgtgtgacctcaggcacttgtgttctgggcctcagtcttc

SEQ ID NO: 3318 - DNA, 122 bp, Homo sapiens
  misc_feature (61)..(62): /note="This region represents a CpG dinucleotide"
  misc_feature (61)..(61): /note="Nucleotide may be methylated to form 5-methylcytosine"
gggtccctaagactttgactggttagagcaggcgacgccgagagccaggccgcctacaggcgtctccagccctaccccatcgccggctacagagcgggagccccgagccccagcgccgcgcc

SEQ ID NO: 3319 - DNA, 122 bp, Homo sapiens
  misc_feature (61)..(62): /note="This region represents a CpG dinucleotide"
  misc_feature (61)..(61): /note="Nucleotide may be methylated to form 5-methylcytosine"
gagcagctgcaggcacacgcctggcttccagcagagccttgcaggtggtggcgagggtggcggttcttactgttcgagtagctcagccctgctgccctctgtggtgatgaggcaagagagcg

SEQ ID NO: 3320 - DNA, 122 bp, Homo sapiens
  misc_feature (61)..(62): /note="This region represents a CpG dinucleotide"
  misc_feature (61)..(61): /note="Nucleotide may be methylated to form 5-methylcytosine"
taatgtcatatataagatggactcactgataaacagacttgaaagaaatgaggaagcaagcgttgtgtacatctggaggaagccgtttccaagcagagggggaacaaaagtaaaggcctgaa

SEQ ID NO: 3321 - DNA, 122 bp, Homo sapiens
  misc_feature (61)..(62): /note="This region represents a CpG dinucleotide"
  misc_feature (61)..(61): /note="Nucleotide may be methylated to form 5-methylcytosine"
ttcgctcttcacaatacatcttgctgctgctcactcgctcactgactcactctttgtgtccgtgccacctttaagagctgtaacactcactgcaaaaattcccagcttcattctggaagtca

SEQ ID NO: 3322 - DNA, 122 bp, Homo sapiens
  misc_feature (61)..(62): /note="This region represents a CpG dinucleotide"
  misc_feature (61)..(61): /note="Nucleotide may be methylated to form 5-methylcytosine"
cagctatgggatcctgtaagactagtcctgggaactccttaaataatctggcaacactgacgcccatccggatgtgtatcgtgaaattcaggcattaagatagggcacttccccaagcctta

SEQ ID NO: 3323 - DNA, 122 bp, Homo sapiens
  misc_feature (61)..(62): /note="This region represents a CpG dinucleotide"
  misc_feature (61)..(61): /note="Nucleotide may be methylated to form 5-methylcytosine"
ggacacaccatcagtctccagagtccaggctctgaaacacaccacggccaaacctgtcctcgcctgtcattcctcccttgtcaggaggatatagaacccagtgattaagggtgtgggcgggc

SEQ ID NO: 3324 - DNA, 122 bp, Homo sapiens
  misc_feature (61)..(62): /note="This region represents a CpG dinucleotide"
  misc_feature (61)..(61): /note="Nucleotide may be methylated to form 5-methylcytosine"
atggctctaatcccagcctaatcacttttctaaatgacatgttttaaactacatcagaggcgagacaatagaggtggatattttaaaagcttgttcttaaaccttgagggtgtacttgatcc

SEQ ID NO: 3325 - DNA, 122 bp, Homo sapiens
  misc_feature (61)..(62): /note="This region represents a CpG dinucleotide"
  misc_feature (61)..(61): /note="Nucleotide may be methylated to form 5-methylcytosine"
gtgttccaggagttagacaacagtttggatcctagcccagccactaactagctatatcaccgctcagttacttagcctctcacttttctcatctgtcaaagagggctgataatagtacttac

SEQ ID NO: 3326 - DNA, 122 bp, Homo sapiens
  misc_feature (61)..(62): /note="This region represents a CpG dinucleotide"
  misc_feature (61)..(61): /note="Nucleotide may be methylated to form 5-methylcytosine"
ccctctcagggtgctcctgaggctatgagcagctggcagttccctgtctgagaggtccttcgtaccgcaggagaggcagctctcacctgaaggcctccctggacaccggtctcaactttgtg

SEQ ID NO: 3327 - DNA, 122 bp, Homo sapiens
  misc_feature (61)..(62): /note="This region represents a CpG dinucleotide"
  misc_feature (61)..(61): /note="Nucleotide may be methylated to form 5-methylcytosine"
atttggacagttgtaagggaactaaaaacaactgcctgcccttggaaatctgcatggcctcggagactgtgctaaacacattgggtgtgttcttttatccaatctttactgtaactaagcat

SEQ ID NO: 3328 - DNA, 122 bp, Homo sapiens
  misc_feature (61)..(62): /note="This region represents a CpG dinucleotide"
  misc_feature (61)..(61): /note="Nucleotide may be methylated to form 5-methylcytosine"
tggtgcccagggaggagtccagctctgctgtctgctgagcaagatggctcacatgggctccgtgggccgagacttgagcctccagcaggtcatgcctctgcagcagctccaccacttctgcc

SEQ ID NO: 3329 - DNA, 122 bp, Homo sapiens
  misc_feature (61)..(62): /note="This region represents a CpG dinucleotide"
  misc_feature (61)..(61): /note="Nucleotide may be methylated to form 5-methylcytosine"
gtttcctgttatgaaaatctcctctgctgggtgcagtggctcatgccatgactgagatcacgccattgcacttcagcctgggcgacagggcgagactccatcccaaaaaaaaaaaagaaaat

SEQ ID NO: 3330 - DNA, 122 bp, Homo sapiens
  misc_feature (61)..(62): /note="This region represents a CpG dinucleotide"
  misc_feature (61)..(61): /note="Nucleotide may be methylated to form 5-methylcytosine"
ttacttgcttatgtatcccgactcctgacgaggtacctgaaatatagtaagctagttgagcgaatggtgatagctgtcaccattgccagtgattaacagagcaagtttccctagttatgtga

SEQ ID NO: 3331 - DNA, 122 bp, Homo sapiens
  misc_feature (61)..(62): /note="This region represents a CpG dinucleotide"
  misc_feature (61)..(61): /note="Nucleotide may be methylated to form 5-methylcytosine"
cagagactgccactgacctcgaccagcagtttcagtggaatggtgagatcagaacgcagacgggagtggggcaggccatgaaggtcagggtgatgatgcagtgaagacagacaactcttgtc

SEQ ID NO: 3332 - DNA, 122 bp, Homo sapiens
  misc_feature (61)..(62): /note="This region represents a CpG dinucleotide"
  misc_feature (61)..(61): /note="Nucleotide may be methylated to form 5-methylcytosine"
ggtgagttgcagctagaagtgcccagcagaaatgcctccaaagaatttacaaaagtgtctcggagagaattggctttaagtcagataaatagtccctttgttctcctgtgagaacacataaa

SEQ ID NO: 3333 - DNA, 122 bp, Homo sapiens
  misc_feature (61)..(62): /note="This region represents a CpG dinucleotide"
  misc_feature (61)..(61): /note="Nucleotide may be methylated to form 5-methylcytosine"
ggccctagcccaggggccgcatagcctggactctgacagcctcctgtaggaattctgatccgcaggtgagggtccatgcagattctctgctgtgtttctgggaggcgaggagttggcaggag

SEQ ID NO: 3334 - DNA, 122 bp, Homo sapiens
  misc_feature (61)..(62): /note="This region represents a CpG dinucleotide"
  misc_feature (61)..(61): /note="Nucleotide may be methylated to form 5-methylcytosine"
ctcccaggttcaagtgattctcctgcttcagcctctcgagtacttgtgattacaggcatgcgccaccacgcccggctaattttgtatgtttttttagtacagacgggatttcaccatgttag

SEQ ID NO: 3335 - DNA, 122 bp, Homo sapiens
  misc_feature (61)..(62): /note="This region represents a CpG dinucleotide"
  misc_feature (61)..(61): /note="Nucleotide may be methylated to form 5-methylcytosine"
ggatttctgggcgggagtgggattaggccttgtggggaagatacaaggagtcagtgagggcgatgacttcatacagagcacacagcatgagtgagtatgaggcatgtttgagtcacagcaag

SEQ ID NO: 3336 - DNA, 122 bp, Homo sapiens
  misc_feature (61)..(62): /note="This region represents a CpG dinucleotide"
  misc_feature (61)..(61): /note="Nucleotide may be methylated to form 5-methylcytosine"
tgcggcctgttggtaaagggcttgggatcagatcctgtactcctctgggctcccaaggaacgtctcttcaccttaccccatctgtgggatgaggccagtgataatatctaactgtggcagtc

SEQ ID NO: 3337 - DNA, 122 bp, Homo sapiens
  misc_feature (61)..(62): /note="This region represents a CpG dinucleotide"
  misc_feature (61)..(61): /note="Nucleotide may be methylated to form 5-methylcytosine"
actaggccttcacatttactcattactcattcactgactcacccagagacacttccagtacgcaggctccattcacgagacgtgccctatacaagtgcaccattttctgtcttttatactgt

SEQ ID NO: 3338 - DNA, 122 bp, Homo sapiens
  misc_feature (61)..(62): /note="This region represents a CpG dinucleotide"
  misc_feature (61)..(61): /note="Nucleotide may be methylated to form 5-methylcytosine"
ttaaactaaaattaaatagaattttagtccagattttctaagtgatcaaagaggaagctgcgtcagctgtgtctgcctgcccttggcccactccctgtgccctgggctctctgttacaggtt

SEQ ID NO: 3339 - DNA, 122 bp, Homo sapiens
  misc_feature (61)..(62): /note="This region represents a CpG dinucleotide"
  misc_feature (61)..(61): /note="Nucleotide may be methylated to form 5-methylcytosine"
cggaatgaaatgaagtgccctggagaagccaactggaggtggtggccccgagagtagacgcggaggggctgaggccgcaggatcctggagcccaggagctgacggagatcgcccacagctgc

SEQ ID NO: 3340 - DNA, 122 bp, Homo sapiens
  misc_feature (61)..(62): /note="This region represents a CpG dinucleotide"
  misc_feature (61)..(61): /note="Nucleotide may be methylated to form 5-methylcytosine"
atgaaatcaaaactagagaaattagaagtcaatgacctggcattctggcaaccaatgacacgccatgtatctggcagagtcccagtgggaaagagaaatcaacccagatgttgagacttttc

SEQ ID NO: 3341 - DNA, 122 bp, Homo sapiens
  misc_feature (61)..(62): /note="This region represents a CpG dinucleotide"
  misc_feature (61)..(61): /note="Nucleotide may be methylated to form 5-methylcytosine"
gctttatggtttgggttcacagagtgtgctgaataactgcatctgtcagcataacagaagcgtgctcttggatttgtacattatgtcacagttcaccaatgtttccccatgtattgtctctt

SEQ ID NO: 3342 - DNA, 122 bp, Homo sapiens
  misc_feature (61)..(62): /note="This region represents a CpG dinucleotide"
  misc_feature (61)..(61): /note="Nucleotide may be methylated to form 5-methylcytosine"
ggaggcctagaagtccctcccaggcttgagttgttctgacttggcatgattacatagctgcggcaagtgacgtttccttcaagccttggttccctcatctgtaaaatagggaactaatacct

SEQ ID NO: 3343 - DNA, 122 bp, Homo sapiens
  misc_feature (61)..(62): /note="This region represents a CpG dinucleotide"
  misc_feature (61)..(61): /note="Nucleotide may be methylated to form 5-methylcytosine"
gtttttagatttctagtctctgcagtactggaagacacgcatgaaggaagctggaatggacgctgggtgcctgtctcactgcatccaccacaattgtgttggttagtaggactactacaggg

SEQ ID NO: 3344 - DNA, 122 bp, Homo sapiens
  misc_feature (61)..(62): /note="This region represents a CpG dinucleotide"
  misc_feature (61)..(61): /note="Nucleotide may be methylated to form 5-methylcytosine"
gggtggccctgtaggcctttctagggatttacagttctgcagacttaaagctgctagggacgggaaaagtgtcagttgacagcaaaatcacaggtggcaaattttgtgcaatactcatactc

SEQ ID NO: 3345 - DNA, 122 bp, Homo sapiens
  misc_feature (61)..(62): /note="This region represents a CpG dinucleotide"
  misc_feature (61)..(61): /note="Nucleotide may be methylated to form 5-methylcytosine"
aacatatgggaaaatacaagcacaggacactcaggacaatgtgatgtgctgaagacacagcggcaaacaaaagagaccggatgccactgacctgtccaagaagaagaacaggaagtattaca

SEQ ID NO: 3346 - DNA, 122 bp, Homo sapiens
  misc_feature (61)..(62): /note="This region represents a CpG dinucleotide"
  misc_feature (61)..(61): /note="Nucleotide may be methylated to form 5-methylcytosine"
gagggcaacatttggagcagagggacccctcttgccctggttaagttaagaagaaatgaacgaggaactcagggcaagaccaagagaggtgattcatcaactggccttcaactagaaaggag

SEQ ID NO: 3347 - DNA, 122 bp, Homo sapiens
  misc_feature (61)..(62): /note="This region represents a CpG dinucleotide"
  misc_feature (61)..(61): /note="Nucleotide may be methylated to form 5-methylcytosine"
ccgcttttactggggcctgcttgctatggggcagaagaaacctttctccctgaacaaatacgtgcaccaagcatacctggactttgtccccacacccagactcctgagatgtcaccatctac

SEQ ID NO: 3348 - DNA, 122 bp, Homo sapiens
  misc_feature (61)..(62): /note="This region represents a CpG dinucleotide"
  misc_feature (61)..(61): /note="Nucleotide may be methylated to form 5-methylcytosine"
aatccttgtatccattttgggaacctgctctgggattccagatctgtggttttctgagcacgtctgtgtggaagctgctgcactgagacctatttagccaattattgagaagatgaggtccc

SEQ ID NO: 3349 - DNA, 122 bp, Homo sapiens
  misc_feature (61)..(62): /note="This region represents a CpG dinucleotide"
  misc_feature (61)..(61): /note="Nucleotide may be methylated to form 5-methylcytosine"
ccttccttctatgacttatctcagaatgacgttacaattgttattgtgtttgagtgccgacgctgaggcattggctagaaacttctataattaggtgttttctgacactagacaaaattatt

SEQ ID NO: 3350 - DNA, 122 bp, Homo sapiens
  misc_feature (61)..(62): /note="This region represents a CpG dinucleotide"
  misc_feature (61)..(61): /note="Nucleotide may be methylated to form 5-methylcytosine"
cattaggcgggtcattttaatccttgaaaactgagtttacttcctacctaagcttccatccgcttaataccaaggtgatcaagtctgtgtgctaaatacaggaaaagccttaataggagacc

SEQ ID NO: 3351 - DNA, 122 bp, Homo sapiens
  misc_feature (61)..(62): /note="This region represents a CpG dinucleotide"
  misc_feature (61)..(61): /note="Nucleotide may be methylated to form 5-methylcytosine"
cactgaaaatatgagcatgcccgcctggctagtaggcatctgtaagagtgtcgccaggcccgcgccagctgaggcctcagactagccaggcaagagccgtctgaccagttggctggcggtgg

SEQ ID NO: 3352 - DNA, 122 bp, Homo sapiens
  misc_feature (61)..(62): /note="This region represents a CpG dinucleotide"
  misc_feature (61)..(61): /note="Nucleotide may be methylated to form 5-methylcytosine"
gctgacactcataaaattgaagtggcttgccctaggcccatgtacggtgtctgcattggacgccatattgcagggagaatgtgagttttgaaatcacagaaaccagcatttgagtcccaggt

SEQ ID NO: 3353 - DNA, 122 bp, Homo sapiens
  misc_feature (61)..(62): /note="This region represents a CpG dinucleotide"
  misc_feature (61)..(61): /note="Nucleotide may be methylated to form 5-methylcytosine"
ttgactaatgaggctatgccctgccctctaggaaatactctactgttaggcaacacagaacgtacttgagctattggggaaattgtgcattatattttgctttgccatgtcaacatcaaaga

SEQ ID NO: 3354 - DNA, 122 bp, Homo sapiens
  misc_feature (61)..(62): /note="This region represents a CpG dinucleotide"
  misc_feature (61)..(61): /note="Nucleotide may be methylated to form 5-methylcytosine"
aggttctcgtttcatcatttctccggtggcccagcaggcccaacagggacatgtccgtcacggtggtgtgttacatcatgtcagatggcaattgaatgcgctgttaacataagctgacagga

SEQ ID NO: 3355 - DNA, 122 bp, Homo sapiens
  misc_feature (61)..(62): /note="This region represents a CpG dinucleotide"
  misc_feature (61)..(61): /note="Nucleotide may be methylated to form 5-methylcytosine"
ttgaacaatgatgaaatcacctgatgatgcgtttcccagacatatcctgttgttcagcaacgcatgactgtacagtgtacagtgaaaataagcacgaggaaggccaaatggtcttagtttgt

SEQ ID NO: 3356 - DNA, 122 bp, Homo sapiens
  misc_feature (61)..(62): /note="This region represents a CpG dinucleotide"
  misc_feature (61)..(61): /note="Nucleotide may be methylated to form 5-methylcytosine"
tctgcacaggatgagtgttcggaggggaagtgactgagccaccccggctctaccacggcacgctgacaggaagcagaggctcccagttctagtcggggcacacctatgatccaactttccct

SEQ ID NO: 3357 - DNA, 122 bp, Homo sapiens
  misc_feature (61)..(62): /note="This region represents a CpG dinucleotide"
  misc_feature (61)..(61): /note="Nucleotide may be methylated to form 5-methylcytosine"
ctcctatttattgcacacagctcaattcctgattcattcttgtcatgttggcatcctgtccgcttgcttcactgctttatccaaagggcagacatagccatctttcttcattactcacaaat

SEQ ID NO: 3358 - DNA, 122 bp, Homo sapiens
  misc_feature (61)..(62): /note="This region represents a CpG dinucleotide"
  misc_feature (61)..(61): /note="Nucleotide may be methylated to form 5-methylcytosine"
gcatttcttcatttcctctgcccaagagcctctccctccaccatcccatttcctgccaggcggctctggctgtggttctagtcctggtcagacagccccagcctctgggctccactcctccc

SEQ ID NO: 3359 - DNA, 122 bp, Homo sapiens
  misc_feature (61)..(62): /note="This region represents a CpG dinucleotide"
  misc_feature (61)..(61): /note="Nucleotide may be methylated to form 5-methylcytosine"
taatccagtcttcatcagccatcactcttcctgtattttgttcaagaggcactaattgttcgcatttggcaggtttaacacttcctgacagagaggctattaaggggaagtattctccaata

SEQ ID NO: 3360 - DNA, 122 bp, Homo sapiens
  misc_feature (61)..(62): /note="This region represents a CpG dinucleotide"
  misc_feature (61)..(61): /note="Nucleotide may be methylated to form 5-methylcytosine"
gactagttaagaatatttcatctatgtaagataatgaccagtagagttggacatgtcccccgaacagggatgacgtgacgctgaaaaggagagttgagacctgccatcacatgaaggaagca

SEQ ID NO: 3361 - DNA, 122 bp, Homo sapiens
  misc_feature (61)..(62): /note="This region represents a CpG dinucleotide"
  misc_feature (61)..(61): /note="Nucleotide may be methylated to form 5-methylcytosine"
ccttgtttctcaacttattggctatcatgcagcaagtggtacaagctgtgggctcacatacgcaggctcagcccaagcatctgttcatgtgcagcttgtggctgaggccagaagccctgatc

SEQ ID NO: 3362 - DNA, 122 bp, Homo sapiens
  misc_feature (61)..(62): /note="This region represents a CpG dinucleotide"
  misc_feature (61)..(61): /note="Nucleotide may be methylated to form 5-methylcytosine"
tcctgttagcaaatgtttacctgtgccacacaccgtgttaagacttctataattgcctggcgcggtggttcacgcctgtaatcccagcactttgggaggctgaggcaggcagatcgcttgag

SEQ ID NO: 3363 - DNA, 122 bp, Homo sapiens
  misc_feature (61)..(62): /note="This region represents a CpG dinucleotide"
  misc_feature (61)..(61): /note="Nucleotide may be methylated to form 5-methylcytosine"
aactaccctgatgacgttgtacatatggcttgcacccatggcttgtttgcacccacagctcgcttgcacccaaagagaggaaaagccatgttgaaactgtctacaattccttcagtgttctt

SEQ ID NO: 3364 - DNA, 122 bp, Homo sapiens
  misc_feature (61)..(62): /note="This region represents a CpG dinucleotide"
  misc_feature (61)..(61): /note="Nucleotide may be methylated to form 5-methylcytosine"
gtccagaatgactccaagtccacagcacctttgttgcagttaaatgcctttacaactaagcgtgacccctttggcaatcactactaagaggctttaccaacttctgacactgttaacttcaa

SEQ ID NO: 3365 - DNA, 122 bp, Homo sapiens
  misc_feature (61)..(62): /note="This region represents a CpG dinucleotide"
  misc_feature (61)..(61): /note="Nucleotide may be methylated to form 5-methylcytosine"
gtcttaatcctagcaattgccttcaggagcctttagtttctggctcttttcctttgtagccgcatttcctactacgttccccacccatcattcctttcaaccacactggccaatgacctaat

SEQ ID NO: 3366 - DNA, 122 bp, Homo sapiens
  misc_feature (61)..(62): /note="This region represents a CpG dinucleotide"
  misc_feature (61)..(61): /note="Nucleotide may be methylated to form 5-methylcytosine"
tagttacagaccttttgtaaccctgagaacatctgtctccattttcccttgtcataaagacgtctgctgagactacaaacggagtcagggaactactaccagaaagtttttcttttcccata

SEQ ID NO: 3367 - DNA, 122 bp, Homo sapiens
  misc_feature (61)..(62): /note="This region represents a CpG dinucleotide"
  misc_feature (61)..(61): /note="Nucleotide may be methylated to form 5-methylcytosine"
gccgggggtcgtggatggcagcccctcttgggcttggtgattggctggtgacttcaggcacgtcgagggcccctccaacctcagcctcctcccctctggtacaatgcgggctgaaagaggtg

SEQ ID NO: 3368 - DNA, 122 bp, Homo sapiens
  misc_feature (61)..(62): /note="This region represents a CpG dinucleotide"
  misc_feature (61)..(61): /note="Nucleotide may be methylated to form 5-methylcytosine"
actgtgtgagcaggcaccaccagaatttacagagcaggccggcaggctctcagaaacacacggaaaagctgatgttgcaatcttgtgcaatcttaaatccaaagacagtgtgaatgcagaat

SEQ ID NO: 3369 - DNA, 122 bp, Homo sapiens
  misc_feature (61)..(62): /note="This region represents a CpG dinucleotide"
  misc_feature (61)..(61): /note="Nucleotide may be methylated to form 5-methylcytosine"
agccctgttctctcttcctcatactgtagccatcattgtgtggccacaaagctgccaggtcgctctgtatgctgccactgttataaaccaccctcatgcactcatgcatttttttctccatc

SEQ ID NO: 3370 - DNA, 122 bp, Homo sapiens
  misc_feature (61)..(62): /note="This region represents a CpG dinucleotide"
  misc_feature (61)..(61): /note="Nucleotide may be methylated to form 5-methylcytosine"
tgaaatatatccattttttgctgaaatatgagctgccttgttctcccagtgagcaggttacgtttagctcagcgatgccacaccctgacctgtgcactgccaggggtcacttgaacctaagc

SEQ ID NO: 3371 - DNA, 122 bp, Homo sapiens
  misc_feature (61)..(62): /note="This region represents a CpG dinucleotide"
  misc_feature (61)..(61): /note="Nucleotide may be methylated to form 5-methylcytosine"
gattacatgctttgggtgtggacgccaagaagtgacaaaaaaaggaagttgggatcattacggttaacccaagcatgttggaaaccagagagaggctgagtgctatcatacacagacccatg

SEQ ID NO: 3372 - DNA, 122 bp, Homo sapiens
  misc_feature (61)..(62): /note="This region represents a CpG dinucleotide"
  misc_feature (61)..(61): /note="Nucleotide may be methylated to form 5-methylcytosine"
aaaggatttcttatatgtcaacatctctctgtttaaacatattcttgtgtaaaaccactacgtgacctgaataatggccatagggctcatctctaagccaactggcttatttatttaatgca

SEQ ID NO: 3373 - DNA, 122 bp, Homo sapiens
  misc_feature (61)..(62): /note="This region represents a CpG dinucleotide"
  misc_feature (61)..(61): /note="Nucleotide may be methylated to form 5-methylcytosine"
gacaaaactgaggctcagagaggctgagagagacactgctgaggtcacacagccaggagtcggcaggaagccctgaacccaagcagggctggcctggctactagcctgggctcagtccttta

SEQ ID NO: 3374 - DNA, 122 bp, Homo sapiens
  misc_feature (61)..(62): /note="This region represents a CpG dinucleotide"
  misc_feature (61)..(61): /note="Nucleotide may be methylated to form 5-methylcytosine"
accttttttcttcataaattagccagtctcaggtagcagtttgaaaatggattaatacaccgtgaaactagctttgttcagtgatatgtgttactctgtgaggaaactttaaggtctgtcgt

SEQ ID NO: 3375 - DNA, 122 bp, Homo sapiens
  misc_feature (61)..(62): /note="This region represents a CpG dinucleotide"
  misc_feature (61)..(61): /note="Nucleotide may be methylated to form 5-methylcytosine"
ccctacttcccagtgtgattgtatttggagatttatttggagatggtaattaggttatgacggtagagccttaaatgggattagtgccctcatgagagacacaagagctctctctctctctc

SEQ ID NO: 3376 - DNA, 122 bp, Homo sapiens
  misc_feature (61)..(62): /note="This region represents a CpG dinucleotide"
  misc_feature (61)..(61): /note="Nucleotide may be methylated to form 5-methylcytosine"
tgagggagtaatattatgcaaacttaggttctgggccctcagagccttgcatacttctgccggcactattggacatctgtccaactgccatgtgagcaaactagggctggcctaccagagga

SEQ ID NO: 3377 - DNA, 122 bp, Homo sapiens
  misc_feature (61)..(62): /note="This region represents a CpG dinucleotide"
  misc_feature (61)..(61): /note="Nucleotide may be methylated to form 5-methylcytosine"
cgcactaactcaatattcctaagtcatgtggaggaaaagccaatgctgatccccaggaagcgcctctgagtcatgggtggcttggcagcctcaggcttcagcaatacacacccacgttcttc

SEQ ID NO: 3378 - DNA, 122 bp, Homo sapiens
  misc_feature (61)..(62): /note="This region represents a CpG dinucleotide"
  misc_feature (61)..(61): /note="Nucleotide may be methylated to form 5-methylcytosine"
agaagctgggaaatattttaagttaatcaggcccttaatgcggtgcctggggaatgccgccgagctgcctgctcctgctcctcccttcactatccttttcccatctcttcctctcttccctt

SEQ ID NO: 3379 - DNA, 122 bp, Homo sapiens
  misc_feature (61)..(62): /note="This region represents a CpG dinucleotide"
  misc_feature (61)..(61): /note="Nucleotide may be methylated to form 5-methylcytosine"
tttattgaaaagggacaaagacaagtggtcaaaacgtcatttcataatacttaatttttacgaactctcctggccccaagtgtctgtgattcagtgaggaaagagctctccttcattccttt

SEQ ID NO: 3380 - DNA, 122 bp, Homo sapiens
  misc_feature (61)..(62): /note="This region represents a CpG dinucleotide"
  misc_feature (61)..(61): /note="Nucleotide may be methylated to form 5-methylcytosine"
gccactgggccaggcccagagcagacactcacgacagatgataagaatgacagctgcctgcgtttgagcaggcactctaggtgactgttgtacacagtgcttttcaagcataatctacccta

SEQ ID NO: 3381 - DNA, 122 bp, Homo sapiens
  misc_feature (61)..(62): /note="This region represents a CpG dinucleotide"
  misc_feature (61)..(61): /note="Nucleotide may be methylated to form 5-methylcytosine"
gcaagttgagcctcaggaggaggtgtatatttacagggagagtctagctgtatttggccacgttctacctaccaaagtgggtagcaatcagactggattgtgtcaccctggattgtgtcatc

SEQ ID NO: 3382 - DNA, 122 bp, Homo sapiens
  misc_feature (61)..(62): /note="This region represents a CpG dinucleotide"
  misc_feature (61)..(61): /note="Nucleotide may be methylated to form 5-methylcytosine"
aggggaccatttatgctgaattagcctttggatttttcttcttagtgacagcaaaacttccgtgacagcaaacaagtaaaccacaggaacatccctggtctgctcagcacagcaggctcttg

SEQ ID NO: 3383 - DNA, 122 bp, Homo sapiens
  misc_feature (61)..(62): /note="This region represents a CpG dinucleotide"
  misc_feature (61)..(61): /note="Nucleotide may be methylated to form 5-methylcytosine"
aggaggggaaggaaccccacccagtgagaaagccagcatggggcgggcttttgactcatccggaaggcagctggctgctggaaacagaggctggtgttgggagagtcgtagaagcccaggcc

SEQ ID NO: 3384 - DNA, 122 bp, Homo sapiens
  misc_feature (61)..(62): /note="This region represents a CpG dinucleotide"
  misc_feature (61)..(61): /note="Nucleotide may be methylated to form 5-methylcytosine"
cttagcttcctaagcctctcatagtaactcatattccttgtcctgtgctccaggcaaatacgactactcagatttcccaacacctgaaactttcccaacccactaacagaaatgtactctca

SEQ ID NO: 3385 - DNA, 122 bp, Homo sapiens
  misc_feature (61)..(62): /note="This region represents a CpG dinucleotide"
  misc_feature (61)..(61): /note="Nucleotide may be methylated to form 5-methylcytosine"
tccttcaggaggtccataaagccactctggatccaaaataatggggtcacatcttgagagcgacctgccctgccctgctctgcccccaaccttcttggcccatgccatgactcactcacctg

SEQ ID NO: 3386 - DNA, 122 bp, Homo sapiens
  misc_feature (61)..(62): /note="This region represents a CpG dinucleotide"
  misc_feature (61)..(61): /note="Nucleotide may be methylated to form 5-methylcytosine"
ctcctaacaccatcacattgggagttagatttcatcatatgaattttgtggggacacagacgatcagtccatagcattcagggaacatcaatcaaggcaggaaagcctggaggtgggagcag

SEQ ID NO: 3387 - DNA, 122 bp, Homo sapiens
  misc_feature (61)..(62): /note="This region represents a CpG dinucleotide"
  misc_feature (61)..(61): /note="Nucleotide may be methylated to form 5-methylcytosine"
aacacatgctatggtctggatgttagtgtccccttataatttatttgttgagatcctaaccgccaaggtaatggttttaggaggtggggcctttgggaggtgatgaggtcatgagggctcca

SEQ ID NO: 3388 - DNA, 122 bp, Homo sapiens
  misc_feature (61)..(62): /note="This region represents a CpG dinucleotide"
  misc_feature (61)..(61): /note="Nucleotide may be methylated to form 5-methylcytosine"
aagtaggctatcatgagaaatgctgggggtgtggagcccttgcaaacacttcccaggatccgaaagcagaaaggatagaggaaaggcattagactaagccatgagagtcatggcaggaagag

SEQ ID NO: 3389 - DNA, 122 bp, Homo sapiens
  misc_feature (61)..(62): /note="This region represents a CpG dinucleotide"
  misc_feature (61)..(61): /note="Nucleotide may be methylated to form 5-methylcytosine"
tcatttaaggcttttgcttataagcatgctagctagtggtccaccctatgtggcaggagacgcttttctgagtaagttgaccagctattcaagtttcactactgaacattgtgaaattgaac

SEQ ID NO: 3390 - DNA, 122 bp, Homo sapiens
  misc_feature (61)..(62): /note="This region represents a CpG dinucleotide"
  misc_feature (61)..(61): /note="Nucleotide may be methylated to form 5-methylcytosine"
taagaaggatgagagggtgcagagaatgaatctttgattttgcaatggcccagagtcatacggtataaaactacagctgtgcaatgatctggaggtattttaaaggttacaaatagaattta

SEQ ID NO: 3391 - DNA, 122 bp, Homo sapiens
  misc_feature (61)..(62): /note="This region represents a CpG dinucleotide"
  misc_feature (61)..(61): /note="Nucleotide may be methylated to form 5-methylcytosine"
tgcgctttttctctgggtttgccggttctggacctctcgtgggaacagagttgctccatgcgctatccttccatctggctccttccacttcacgtcatggctttgagactcctccacgtggt

SEQ ID NO: 3392 - DNA, 122 bp, Homo sapiens
  misc_feature (61)..(62): /note="This region represents a CpG dinucleotide"
  misc_feature (61)..(61): /note="Nucleotide may be methylated to form 5-methylcytosine"
acaaataagagatagaaacaccacaggaattacaaacaaaccataaatctatttattggacggaaatcataaacaaaaaaaaagcatacgtgagctggcataggccctgctaggtaaaagag

SEQ ID NO: 3393 - DNA, 122 bp, Homo sapiens
  misc_feature (61)..(62): /note="This region represents a CpG dinucleotide"
  misc_feature (61)..(61): /note="Nucleotide may be methylated to form 5-methylcytosine"
ggttaactgatgagatcatttgtattcctttcagtccagtagtagcaaagtcacctaccacgtgtgtccacatgcatcaccccggcctgcaaggctatagtgaaataacatttaccaacgtg

SEQ ID NO: 3394 - DNA, 122 bp, Homo sapiens
  misc_feature (61)..(62): /note="This region represents a CpG dinucleotide"
  misc_feature (61)..(61): /note="Nucleotide may be methylated to form 5-methylcytosine"
tctctgtcttgttccagttcacatttcctactcattcgctgtggtcgccccgcctactcccgcctttccagcctgtggccagcccctgcaggggctcctagcccactgccttagtgttcatg

SEQ ID NO: 3395 - DNA, 122 bp, Homo sapiens
  misc_feature (61)..(62): /note="This region represents a CpG dinucleotide"
  misc_feature (61)..(61): /note="Nucleotide may be methylated to form 5-methylcytosine"
acttgcatgcatcgtgtatctttcacataacatttccccatttgcttatgtcacagggttcgctaactacaggcgagaaagaaaacattcccaatgagtgcagacacacgtgccctctattg

SEQ ID NO: 3396 - DNA, 122 bp, Homo sapiens
  misc_feature (61)..(62): /note="This region represents a CpG dinucleotide"
  misc_feature (61)..(61): /note="Nucleotide may be methylated to form 5-methylcytosine"
agcaggcataaactaggaaggtctgaggcaaaccagataacatggtcactctagtcttaacgaagttacctaatcttggtgtcttggtttcttcacattgtggaagggacatgactcacttc

SEQ ID NO: 3397 - DNA, 122 bp, Homo sapiens
  misc_feature (61)..(62): /note="This region represents a CpG dinucleotide"
  misc_feature (61)..(61): /note="Nucleotide may be methylated to form 5-methylcytosine"
ggattagtgagatcctctagctggatcatccagaggaaaagatttatgtatgtatgtatgcgtgtttgatgtgatatgtgtgtgtcatgtggtatgtggtctgtgtgtagtgtgtgtgtatg

SEQ ID NO: 3398 - DNA, 122 bp, Homo sapiens
  misc_feature (61)..(62): /note="This region represents a CpG dinucleotide"
  misc_feature (61)..(61): /note="Nucleotide may be methylated to form 5-methylcytosine"
actgaattctggaagcatccctgctctggctcaggttggtgtatttccccatacaagaaacgtactaattactgtttccaacttccaaataaaaagttaaaattaccaaccctcagaagtag

SEQ ID NO: 3399 - DNA, 122 bp, Homo sapiens
  misc_feature (61)..(62): /note="This region represents a CpG dinucleotide"
  misc_feature (61)..(61): /note="Nucleotide may be methylated to form 5-methylcytosine"
tacaaaaattagtcaggtgtggtggtgcacgcctgtggtttcagctactccagaggcaggcgggatcgcttgagccaggaggttgacgccacagtgagtcctgaccaagccactgcactcaa

SEQ ID NO: 3400 - DNA, 122 bp, Homo sapiens
  misc_feature (61)..(62): /note="This region represents a CpG dinucleotide"
  misc_feature (61)..(61): /note="Nucleotide may be methylated to form 5-methylcytosine"
tttgaaacagatctttttagaaaggttgtttcataatttctgaccgaagtatttgttacacgtaaaataagtaagaacggactgaggccagaaagctgtggatgacagaagggattggtgca

SEQ ID NO: 3401 - DNA, 122 bp, Homo sapiens
  misc_feature (61)..(62): /note="This region represents a CpG dinucleotide"
  misc_feature (61)..(61): /note="Nucleotide may be methylated to form 5-methylcytosine"
attaagtgcttaaaagctccatttgttcttaaaacaaatctcttcctctccaattgcagccgaagagaagacatagactgtgcggctgcaccaacaagctgagcagacagacaatagggcca

SEQ ID NO: 3402 - DNA, 122 bp, Homo sapiens
  misc_feature (61)..(62): /note="This region represents a CpG dinucleotide"
  misc_feature (61)..(61): /note="Nucleotide may be methylated to form 5-methylcytosine"
aatggcacttttatgagaactctagaaatagaacttttcatccggcaccatcttatggtacgctttggagcagtgatgtcaccaaggagacagaaactagggaattcatcctcttgggccgg

SEQ ID NO: 3403 - DNA, 122 bp, Homo sapiens
  misc_feature (61)..(62): /note="This region represents a CpG dinucleotide"
  misc_feature (61)..(61): /note="Nucleotide may be methylated to form 5-methylcytosine"
aagaggatcacttgagcccaggagtttgtgaccacccttgtcaacatggcgaaaccctgccgctaaaaaaatacaaaaattagccaggtgtggtggtgcacgcccatagtcccagctactcg

SEQ ID NO: 3404 - DNA, 122 bp, Homo sapiens
  misc_feature (61)..(62): /note="This region represents a CpG dinucleotide"
  misc_feature (61)..(61): /note="Nucleotide may be methylated to form 5-methylcytosine"
aagaatgaatgagtccttattcctcaccactgtcaagcagggcctgaggttcctgagatacgagatcagcctgagtttccatggaagggcaaggtgctctctggtctcctgggtgcagactc

SEQ ID NO: 3405 - DNA, 122 bp, Homo sapiens
  misc_feature (61)..(62): /note="This region represents a CpG dinucleotide"
  misc_feature (61)..(61): /note="Nucleotide may be methylated to form 5-methylcytosine"
ctgtagacagaaggcgtgtgggaacctgcacagcaactctgtcttcctctggagtctttccgcttatccgacgtggcagggtcttcttggctcttgcttctgaacatgctcacttcctcttt

SEQ ID NO: 3406 - DNA, 122 bp, Homo sapiens
  misc_feature (61)..(62): /note="This region represents a CpG dinucleotide"
  misc_feature (61)..(61): /note="Nucleotide may be methylated to form 5-methylcytosine"
accagcctggccaacatggtgaaacctcgtctctactaaaaatacaaaaaattagctgggcgtggtggtgatcacctgtaatctcaggaggctgaggcacgaaaatcacttgaagctgggag

SEQ ID NO: 3407 - DNA, 122 bp, Homo sapiens
  misc_feature (61)..(62): /note="This region represents a CpG dinucleotide"
  misc_feature (61)..(61): /note="Nucleotide may be methylated to form 5-methylcytosine"
aatgatttttaaaatgagggagcaagacaaagcaccaggaacagaaaacacaagactgaacgtgcatgcttaaaacacagaaagaccagtgtggctggagctcaagggaagaagcagaggtg

SEQ ID NO: 3408 - DNA, 122 bp, Homo sapiens
  misc_feature (61)..(62): /note="This region represents a CpG dinucleotide"
  misc_feature (61)..(61): /note="Nucleotide may be methylated to form 5-methylcytosine"
aatcaaatacggacttagcacatcgcactcactggcactgtaacttcaccgaagactcagcgttcactaggtggctaagtgctattggcaagagttcacagatgaaacacttcaagagacaa

SEQ ID NO: 3409 - DNA, 122 bp, Homo sapiens
  misc_feature (61)..(62): /note="This region represents a CpG dinucleotide"
  misc_feature (61)..(61): /note="Nucleotide may be methylated to form 5-methylcytosine"
attataagtagaacagacctgagcttcaaaagctacgaagcagccagaagctggggtcagcgcccagggaacattagcagggcaaccctgtcacatcacatcctcgctattagagaactgag

SEQ ID NO: 3410 - DNA, 122 bp, Homo sapiens
  misc_feature (61)..(62): /note="This region represents a CpG dinucleotide"
  misc_feature (61)..(61): /note="Nucleotide may be methylated to form 5-methylcytosine"
gtgtaatatgattcagtcatgattgagtactagtgattcatgtggtgctgttaactagtgcgatgatcgacaggaactgcagtactttccttacaccctgggtcaactactctccaatgcat

SEQ ID NO: 3411 - DNA, 122 bp, Homo sapiens
  misc_feature (61)..(62): /note="This region represents a CpG dinucleotide"
  misc_feature (61)..(61): /note="Nucleotide may be methylated to form 5-methylcytosine"
cacccagttgctgtgggtgctgggccgacccaatcctttctcttgtgtgatccatggactcgcagcattgcgtcacctgtgagcttttggaattgaagacttccagggctcacccgggagga

SEQ ID NO: 3412 - DNA, 122 bp, Homo sapiens
  misc_feature (61)..(62): /note="This region represents a CpG dinucleotide"
  misc_feature (61)..(61): /note="Nucleotide may be methylated to form 5-methylcytosine"
caaaagcctggttctgcagttggcactgaggctcattactcaatcaccgtacccgaatcccggccatctgctgaggctgcaaagtgaagcaaaaaatcctaacaagaaattgtatgttggct

SEQ ID NO: 3413 - DNA, 122 bp, Homo sapiens
  misc_feature (61)..(62): /note="This region represents a CpG dinucleotide"
  misc_feature (61)..(61): /note="Nucleotide may be methylated to form 5-methylcytosine"
taacttaaatttaaaacattgtaaagataaacagaaaacacagagttctcagtacaaatacgtcagcaaatttagactgccgattctgcaggaaaatggtgaatcatggctggaaaagtgaa

SEQ ID NO: 3414 - DNA, 122 bp, Homo sapiens
  misc_feature (61)..(62): /note="This region represents a CpG dinucleotide"
  misc_feature (61)..(61): /note="Nucleotide may be methylated to form 5-methylcytosine"
ttggtgtctggtgaggatcctctccctggttcagagatggccatcttttcactgtgtcctcgcgtgacagaagggatgagggattactctggggctccttttataagggcactaatcccatt

SEQ ID NO: 3415 - DNA, 122 bp, Homo sapiens
  misc_feature (61)..(62): /note="This region represents a CpG dinucleotide"
  misc_feature (61)..(61): /note="Nucleotide may be methylated to form 5-methylcytosine"
ctcaagtgatctgcctgcctcggcctcccaaagcactgggattacaggtgtgagccactgcgcccggcctacctgtttgaattcttgcattcatgcatgtggagcattggcaagcctctgcc

SEQ ID NO: 3416 - DNA, 122 bp, Homo sapiens
  misc_feature (61)..(62): /note="This region represents a CpG dinucleotide"
  misc_feature (61)..(61): /note="Nucleotide may be methylated to form 5-methylcytosine"
ccacctgagtgtcttccaacagcatggggcaaatttttagggtagccagcaactctctcacgcatcacagtagccagtactgtgcaatccagaaaacagggaggtttcattgctgggagttt

SEQ ID NO: 3417 - DNA, 122 bp, Homo sapiens
  misc_feature (61)..(62): /note="This region represents a CpG dinucleotide"
  misc_feature (61)..(61): /note="Nucleotide may be methylated to form 5-methylcytosine"
cgtgatccgcccatctcggcctcccgaagtgctgggattacaggcgtgagccactgcacccggccgattggtgtttcttaactaggctggtttcggtcactgcatgacctctgagtacgatg

SEQ ID NO: 3418 - DNA, 122 bp, Homo sapiens
  misc_feature (61)..(62): /note="This region represents a CpG dinucleotide"
  misc_feature (61)..(61): /note="Nucleotide may be methylated to form 5-methylcytosine"
gccattcatcaagacagaaacagaatccacatccctgctgttcatctaagcagagacaaacggttgaccaaagactagacatggggtgactaagattaagaaatcctacagaaaagtcaaga

SEQ ID NO: 3419 - DNA, 122 bp, Homo sapiens
  misc_feature (61)..(62): /note="This region represents a CpG dinucleotide"
  misc_feature (61)..(61): /note="Nucleotide may be methylated to form 5-methylcytosine"
taaaatgtaagctggattgcgtcattgcctggtccacaatgcccaggtggctctccatttcgctcagaggaaatgcttgagtttcaacaatggcctccagggccctatatcatctgacccca

SEQ ID NO: 3420 - DNA, 122 bp, Homo sapiens
  misc_feature (61)..(62): /note="This region represents a CpG dinucleotide"
  misc_feature (61)..(61): /note="Nucleotide may be methylated to form 5-methylcytosine"
ttccaagagagtaaagttcttgagtttggaagtttcctgggtccatagcccctttatacccgcctgaaggcccgttgtcaccacgtcattatttccttgttattatttacctactgaaaaaa

SEQ ID NO: 3421 - DNA, 122 bp, Homo sapiens
  misc_feature (61)..(62): /note="This region represents a CpG dinucleotide"
  misc_feature (61)..(61): /note="Nucleotide may be methylated to form 5-methylcytosine"
aggagaccatccaggaaagttattgcaaaggttcctgtgaaatgcacagcagcttagacccgagtggtggcaacagaggagcaagaggtggttgggtttgggataaatgcccagggtaatgc

SEQ ID NO: 3422 - DNA, 122 bp, Homo sapiens
  misc_feature (61)..(62): /note="This region represents a CpG dinucleotide"
  misc_feature (61)..(61): /note="Nucleotide may be methylated to form 5-methylcytosine"
gttttcagtagactatcactctagagtaattttagctcaaagtttactcaccacaaatctcgcatagttggcttggaataaaagaaaacagtaagagccccactaggggcagctggtgtgac

SEQ ID NO: 3423 - DNA, 122 bp, Homo sapiens
  misc_feature (61)..(62): /note="This region represents a CpG dinucleotide"
  misc_feature (61)..(61): /note="Nucleotide may be methylated to form 5-methylcytosine"
cacacaaaggtattagcattacacagactggctgatgtcaaaatatacgatttccagttccgtcagatttggttgactcacacagttcaaacagaattagttatgtcatatcagcaaagtag

SEQ ID NO: 3424 - DNA, 122 bp, Homo sapiens
  misc_feature (61)..(62): /note="This region represents a CpG dinucleotide"
  misc_feature (61)..(61): /note="Nucleotide may be methylated to form 5-methylcytosine"
aaccaccccgctccccacgcacggagcctcgcagtggctcgagctgagaatcaaagcggccgatccagggcctggtgactccaccagacaggaaatacagaggcttctagcaatctgctctg

SEQ ID NO: 3425 - DNA, 122 bp, Homo sapiens
  misc_feature (61)..(62): /note="This region represents a CpG dinucleotide"
  misc_feature (61)..(61): /note="Nucleotide may be methylated to form 5-methylcytosine"
ccgttcatccccggcagggcaggacggggcagggggccgacttactgcacgcgctgtggtcggtccagccgtacagcaccattccctcctgggcacaggtccgggcgtactccaggagggca

SEQ ID NO: 3426 - DNA, 122 bp, Homo sapiens
  misc_feature (61)..(62): /note="This region represents a CpG dinucleotide"
  misc_feature (61)..(61): /note="Nucleotide may be methylated to form 5-methylcytosine"
acagtatttactttattgttgccctcactactgacaaatgccaaagtaatgtggcaaggacggaggaagagggtattcaatacacagcttcaacaccagtatttacgctgagaatactcacc

SEQ ID NO: 3427 - DNA, 122 bp, Homo sapiens
  misc_feature (61)..(62): /note="This region represents a CpG dinucleotide"
  misc_feature (61)..(61): /note="Nucleotide may be methylated to form 5-methylcytosine"
ggagagcaacagctcacgactaggattccagctatgctacttatgactatcagggcccagcgtaggccagagcccagggatgtctaccatctctgcagggggtcatcagtaaggctcttgac

SEQ ID NO: 3428 - DNA, 122 bp, Homo sapiens
  misc_feature (61)..(62): /note="This region represents a CpG dinucleotide"
  misc_feature (61)..(61): /note="Nucleotide may be methylated to form 5-methylcytosine"
tttgtcctcgatgtccaccccagtgcctttcgggtagtcactgctcagttaacgtggaggcgtggactaacacacagaaccttgtaggatcgcatgcaagattcaaacagttttcctcaggc

SEQ ID NO: 3429 - DNA, 122 bp, Homo sapiens
  misc_feature (61)..(62): /note="This region represents a CpG dinucleotide"
  misc_feature (61)..(61): /note="Nucleotide may be methylated to form 5-methylcytosine"
aaaagtggcactctggctcttaaagcctgtctctggaagtgatatatgaccttttgtctacgtatcattggtgaaataagtaacactgccacgtctaacttcaaagggggcctgtggagtgc

SEQ ID NO: 3430 - DNA, 122 bp, Homo sapiens
  misc_feature (61)..(62): /note="This region represents a CpG dinucleotide"
  misc_feature (61)..(61): /note="Nucleotide may be methylated to form 5-methylcytosine"
gggcaggaggccttactttcttgccatgtagtcatcttcatagatctgcttgagtgtcctcgtgacatggcagctgacttccttcacagtgagtgatccaaggaagagagtaaacaggaaac

SEQ ID NO: 3431 - DNA, 122 bp, Homo sapiens
  misc_feature (61)..(62): /note="This region represents a CpG dinucleotide"
  misc_feature (61)..(61): /note="Nucleotide may be methylated to form 5-methylcytosine"
gttcttaatcttattcgttccctctttgtttatcacaaagctttgttggacaaaaaaaagcgagcaccaggtacggatggggatgtctctataaccaggctgctagaccctgtttgaacctg

SEQ ID NO: 3432 - DNA, 122 bp, Homo sapiens
  misc_feature (61)..(62): /note="This region represents a CpG dinucleotide"
  misc_feature (61)..(61): /note="Nucleotide may be methylated to form 5-methylcytosine"
agcataaccccttgccattgtgaatcacatttccctgttgaagaaaattgcaaccaggcacggtggctcatgcctgtaatcccagcactttgggcggccgaggcgggcagatcacttggggt

SEQ ID NO: 3433 - DNA, 122 bp, Homo sapiens
  misc_feature (61)..(62): /note="This region represents a CpG dinucleotide"
  misc_feature (61)..(61): /note="Nucleotide may be methylated to form 5-methylcytosine"
acctcagagaatgtcgctctaatggtggaatttcaggtactgccacgtagggaagagtctcgtgggaagggcattttccagcctctgtcacaaaatctccaagggaattcagacctcatcta

SEQ ID NO: 3434 - DNA, 122 bp, Homo sapiens
  misc_feature (61)..(62): /note="This region represents a CpG dinucleotide"
  misc_feature (61)..(61): /note="Nucleotide may be methylated to form 5-methylcytosine"
ctggtccatatgtggaacttcgtagttgtactctggtgcccacacaccagatcactatgccgtcccagctgttgttacaataagactatgtaggtgaagggcccacccagtagtgcctggcc

SEQ ID NO: 3435 - DNA, 122 bp, Homo sapiens
  misc_feature (61)..(62): /note="This region represents a CpG dinucleotide"
  misc_feature (61)..(61): /note="Nucleotide may be methylated to form 5-methylcytosine"
atactttggtttgccaggaatactcctggcagtgactgttcaggacttggtatcaagcaccgctatagttatctaaataatcctcagattcttttgccaaaaatgatgtaatcagtgctact

SEQ ID NO: 3436 - DNA, 122 bp, Homo sapiens
  misc_feature (61)..(62): /note="This region represents a CpG dinucleotide"
  misc_feature (61)..(61): /note="Nucleotide may be methylated to form 5-methylcytosine"
acgggccggcgcccccgctctgccacacgccggccgccacagctgccgccgaattccagccgccctacttcccgccgccctacccgcagccaccgctgccctacggtcaggcgcccgacgcc

SEQ ID NO: 3437 - DNA, 122 bp, Homo sapiens
  misc_feature (61)..(62): /note="This region represents a CpG dinucleotide"
  misc_feature (61)..(61): /note="Nucleotide may be methylated to form 5-methylcytosine"
ctctttttcacttctgctcctcttgtcatgtgtgggtttggtgagccagtatctttaatgcgacttttttcagcactggagttttacaaagcctgggcccagtggtgccggaaacactaaga

SEQ ID NO: 3438 - DNA, 122 bp, Homo sapiens
  misc_feature (61)..(62): /note="This region represents a CpG dinucleotide"
  misc_feature (61)..(61): /note="Nucleotide may be methylated to form 5-methylcytosine"
cattggcatttcttgactttgtacatagcttagtattttacaccattttccttctttgcccgcctgaatttctgatttaacaggttgtgatgggagccaaaaaagctagcaggaatgtaaaa

SEQ ID NO: 3439 - DNA, 122 bp, Homo sapiens
  misc_feature (61)..(62): /note="This region represents a CpG dinucleotide"
  misc_feature (61)..(61): /note="Nucleotide may be methylated to form 5-methylcytosine"
tggctaatttggaccagtggcaagcagaagcaactaattgagagaaaaaaggcagagaaacgtaggcagagaggtcttttgatcccaggaattagtttctcttgaatacagcctcttcctgt

SEQ ID NO: 3440 - DNA, 122 bp, Homo sapiens
  misc_feature (61)..(62): /note="This region represents a CpG dinucleotide"
  misc_feature (61)..(61): /note="Nucleotide may be methylated to form 5-methylcytosine"
gtgttgggtgtgttgttgtgaaaccaggaactgttacatttcttttgcttccacgagagacgcaatcgatgtaaagatgaagacatcacacagaagagaagagaactgagggaactacagag

SEQ ID NO: 3441 - DNA, 122 bp, Homo sapiens
  misc_feature (61)..(62): /note="This region represents a CpG dinucleotide"
  misc_feature (61)..(61): /note="Nucleotide may be methylated to form 5-methylcytosine"
attataggccctgctgggcagccagcatgcctgatctctgtttatttccattctagctaacgaatggaaaacatgaacaatgtcatagaaatgtggatggcatcagcataccagcttactgt

SEQ ID NO: 3442 - DNA, 122 bp, Homo sapiens
  misc_feature (61)..(62): /note="This region represents a CpG dinucleotide"
  misc_feature (61)..(61): /note="Nucleotide may be methylated to form 5-methylcytosine"
ccaagtggaaactgagttaccccgtgaagaagacgagttctatttatggtcagaatgccacgctcaagggccagtgaaggcctgtgggcttttctgaatatttctctaaggtcttctaggga

SEQ ID NO: 3443 - DNA, 122 bp, Homo sapiens
  misc_feature (61)..(62): /note="This region represents a CpG dinucleotide"
  misc_feature (61)..(61): /note="Nucleotide may be methylated to form 5-methylcytosine"
aacaccactcctgcagagttctttccaaaatattagctggtacaaaatgctccattctctcgtgaagcactaagagcttggttggaaggctggtgataccatgctaatgctgtttggcttct

SEQ ID NO: 3444 - DNA, 122 bp, Homo sapiens
  misc_feature (61)..(62): /note="This region represents a CpG dinucleotide"
  misc_feature (61)..(61): /note="Nucleotide may be methylated to form 5-methylcytosine"
gaagaacaaagcaggagtttgctctttaacaccttagggcatcaccaaggggtatcccagcgagaacagtctggtctggaaattgctttagaacagcaattggggctggatacaggaagtgt

SEQ ID NO: 3445 - DNA, 122 bp, Homo sapiens
  misc_feature (61)..(62): /note="This region represents a CpG dinucleotide"
  misc_feature (61)..(61): /note="Nucleotide may be methylated to form 5-methylcytosine"
gaagataagaaaaaaagaggaagaggagtgactcaaattctttggagcactcaccagctacgctccagatagagcaagagcgctgaatcaacccagcatcacacctctcagttaagcaagtt

SEQ ID NO: 3446 - DNA, 122 bp, Homo sapiens
  misc_feature (61)..(62): /note="This region represents a CpG dinucleotide"
  misc_feature (61)..(61): /note="Nucleotide may be methylated to form 5-methylcytosine"
atttcttcagacaactatcaatgtgtgaataatgcatttctcaaaacaaaaagcagataacgtattcacattcagttagtgaagaacaggaaggaccttatcacacagtattttgcagcaag

SEQ ID NO: 3447 - DNA, 122 bp, Homo sapiens
  misc_feature (61)..(62): /note="This region represents a CpG dinucleotide"
  misc_feature (61)..(61): /note="Nucleotide may be methylated to form 5-methylcytosine"
actatggatgtcttttccttgtttgtttaagttacagccagcagaaattatttccaaaggcgtgcttgtgtggcaacctgttggcattagagcatttttgcaataggccacttatttctaaa

SEQ ID NO: 3448 - DNA, 122 bp, Homo sapiens
  misc_feature (61)..(62): /note="This region represents a CpG dinucleotide"
  misc_feature (61)..(61): /note="Nucleotide may be methylated to form 5-methylcytosine"
gggagcaggggaagagacaccctcctgacctccagcctcctgcctgtacctcacatttgccggacacaaaaggaagctagaggcaaaggaagctggtgattcagctcctagcactcagcccc

SEQ ID NO: 3449 - DNA, 122 bp, Homo sapiens
  misc_feature (61)..(62): /note="This region represents a CpG dinucleotide"
  misc_feature (61)..(61): /note="Nucleotide may be methylated to form 5-methylcytosine"
ttaagccaccaacttgtgggaactggttatagcagccacaggaaagcccctgctggacatcgttatgatcccttttgccccagccctgaatattccagactggtccagaacctcagccccaa

SEQ ID NO: 3450 - DNA, 122 bp, Homo sapiens
  misc_feature (61)..(62): /note="This region represents a CpG dinucleotide"
  misc_feature (61)..(61): /note="Nucleotide may be methylated to form 5-methylcytosine"
gaaccaaaatagcatgttctttccaggctgtcaggaccctacttagtcatagacataatacgcttacctttacacttgctttgagtattgctcaacttagttgcatcatgggcctaccacat

SEQ ID NO: 3451 - DNA, 122 bp, Homo sapiens
  misc_feature (61)..(62): /note="This region represents a CpG dinucleotide"
  misc_feature (61)..(61): /note="Nucleotide may be methylated to form 5-methylcytosine"
gatatcatttacccatatgttattgcatgccagatattgtgtcagtctgagatacacagacgaatgatccctaccttgggtatcttgtttaacagactatggaagacagacatgtgaataag

SEQ ID NO: 3452 - DNA, 122 bp, Homo sapiens
  misc_feature (61)..(62): /note="This region represents a CpG dinucleotide"
  misc_feature (61)..(61): /note="Nucleotide may be methylated to form 5-methylcytosine"
tcacaaacccaccccacctgtcagagggtagctcctgcaggcagctgggaaggccagcagcgtgtccacatgcagcagggacctaacctgtagaaagtccccaggagagaagtccagagccc

SEQ ID NO: 3453 - DNA, 122 bp, Homo sapiens
  misc_feature (61)..(62): /note="This region represents a CpG dinucleotide"
  misc_feature (61)..(61): /note="Nucleotide may be methylated to form 5-methylcytosine"
attttcttgtgtcttgctttgcagatttaagcagctccagggtgagatacatacggctctcgtgccctcccctctctgaacctagcttgcaccttgctcaaagcagcactcaggaaacgttt

SEQ ID NO: 3454 - DNA, 122 bp, Homo sapiens
  misc_feature (61)..(62): /note="This region represents a CpG dinucleotide"
  misc_feature (61)..(61): /note="Nucleotide may be methylated to form 5-methylcytosine"
tcccttcatggcttgattgctcatttctttttagcactgaataatacttcattgttgggacgtactacagttaatccaatcctgcagcatctgcttcctccatattcctttgtctgttgttt

SEQ ID NO: 3455 - DNA, 122 bp, Homo sapiens
  misc_feature (61)..(62): /note="This region represents a CpG dinucleotide"
  misc_feature (61)..(61): /note="Nucleotide may be methylated to form 5-methylcytosine"
agtgattcacctgcctcggcctcccgaagtgctgggattacaggcgtgagccaccacccccggccaactgctattgttgtaatagattgtaacaaagccagtggtaatgggtagcccaacga

SEQ ID NO: 3456 - DNA, 122 bp, Homo sapiens
  misc_feature (61)..(62): /note="This region represents a CpG dinucleotide"
  misc_feature (61)..(61): /note="Nucleotide may be methylated to form 5-methylcytosine"
cggactctgaaaactctggtatgattttgtgactcagaaaaccaactcacaggccgggtgcggtggctcacgcctgtaatcccagcactttgggaggccgaggcggcggattacgaggttag

SEQ ID NO: 3457 - DNA, 122 bp, Homo sapiens
  misc_feature (61)..(62): /note="This region represents a CpG dinucleotide"
  misc_feature (61)..(61): /note="Nucleotide may be methylated to form 5-methylcytosine"
tttgagctagtctggtggcagaacacctctctcctgatattcaaggacctgtctccaggtcgcttcagttccttgtcttgcctctcgcaatgggctttctgctgaccaagcccattgactca

SEQ ID NO: 3458 - DNA, 122 bp, Homo sapiens
  misc_feature (61)..(62): /note="This region represents a CpG dinucleotide"
  misc_feature (61)..(61): /note="Nucleotide may be methylated to form 5-methylcytosine"
tactcaaaaaatattactcagcacctaccacagggcaggctctgctagacagcgggaaatcgtggcaatgagacagactagatcccaaccttaacaagcttacagacaagtgcagggagaaa

SEQ ID NO: 3459 - DNA, 122 bp, Homo sapiens
  misc_feature (61)..(62): /note="This region represents a CpG dinucleotide"
  misc_feature (61)..(61): /note="Nucleotide may be methylated to form 5-methylcytosine"
gaggtaacactgagtagcaggaaagatttgtgcctcaaatgcttctgtcctagacagtaacggtagaagttattagcacaatatgcaggtgccagcattataggtctggccagcttaggaaa

SEQ ID NO: 3460 - DNA, 122 bp, Homo sapiens
  misc_feature (61)..(62): /note="This region represents a CpG dinucleotide"
  misc_feature (61)..(61): /note="Nucleotide may be methylated to form 5-methylcytosine"
ggagataatgtcaagtagggtgtatgtgtcacagcaatcagaagttaatgcctaccactccgggagaactcatactcctgtggtagtgtttaaggaactgctgacacattcttccagcttta

SEQ ID NO: 3461 - DNA, 122 bp, Homo sapiens
  misc_feature (61)..(62): /note="This region represents a CpG dinucleotide"
  misc_feature (61)..(61): /note="Nucleotide may be methylated to form 5-methylcytosine"
ctatgagggtaagtgacttgcccagttaccaagttgcagagctggaacttgaaccaaggccgctttggctccagagtccatgccgttaaccacttctgtgcatttattgagcaactctgggg

SEQ ID NO: 3462 - DNA, 122 bp, Homo sapiens
  misc_feature (61)..(62): /note="This region represents a CpG dinucleotide"
  misc_feature (61)..(61): /note="Nucleotide may be methylated to form 5-methylcytosine"
aaaaaagaatctaaggatgtgctcacctgcaggagtgtgcaagcacctccttacatgctacgccctggctgcctcactggccttgactcaggtggctaagcacagtagtggctctagcacct

SEQ ID NO: 3463 - DNA, 122 bp, Homo sapiens
  misc_feature (61)..(62): /note="This region represents a CpG dinucleotide"
  misc_feature (61)..(61): /note="Nucleotide may be methylated to form 5-methylcytosine"
agtgtgagcaaacaaatgttccatgtcctgtgcttcagctgaatcagttccaatgttcaacgggatggcattctatgggcagattaacttcatatccatctaattcttcatatacatgctga

SEQ ID NO: 3464 - DNA, 122 bp, Homo sapiens
  misc_feature (61)..(62): /note="This region represents a CpG dinucleotide"
  misc_feature (61)..(61): /note="Nucleotide may be methylated to form 5-methylcytosine"
gaagtaaccagtagattcaggagttagctgggtttgggttcagagttgcctcgctcctgccgctgttatttactaatgtgtgggcagaacagcctggggggttgagagagagagagagagag

SEQ ID NO: 3465 - DNA, 122 bp, Homo sapiens
  misc_feature (61)..(62): /note="This region represents a CpG dinucleotide"
  misc_feature (61)..(61): /note="Nucleotide may be methylated to form 5-methylcytosine"
tcatacatagctgtcctttttctctcattgagggctctgtttattgtcaccccctgctaccgccttctctgacctgcctagctaaaacagcccctcccatatgcagtcactctacatcacag

SEQ ID NO: 3466 - DNA, 122 bp, Homo sapiens
  misc_feature (61)..(62): /note="This region represents a CpG dinucleotide"
  misc_feature (61)..(61): /note="Nucleotide may be methylated to form 5-methylcytosine"
agtaggacgtcaggcttgcaagctctgggattaggccgaccagagcccatatcccagtcccgcctcttactgcctgcttgatctcaagcaagaccgctttgttcatgggcgaaaggagcgcc

SEQ ID NO: 3467 - DNA, 122 bp, Homo sapiens
  misc_feature (61)..(62): /note="This region represents a CpG dinucleotide"
  misc_feature (61)..(61): /note="Nucleotide may be methylated to form 5-methylcytosine"
tgagtcagaggacatgaaaatcctcactgtgcatccttcagagatctgccagaacgacttcgtggccagcagtctcttatctaactactccgcagctagtagtcctcttaagcaaggatgcc

SEQ ID NO: 3468 - DNA, 122 bp, Homo sapiens
  misc_feature (61)..(62): /note="This region represents a CpG dinucleotide"
  misc_feature (61)..(61): /note="Nucleotide may be methylated to form 5-methylcytosine"
cctcccgccccacggggagtcatctgcttgaggaaggaaagacacattgccgggctacagcgcagggcccattgtcatgctgagccacccttgcttccctgcaggcctcctgagtcgcagcc

SEQ ID NO: 3469 - DNA, 122 bp, Homo sapiens
  misc_feature (61)..(62): /note="This region represents a CpG dinucleotide"
  misc_feature (61)..(61): /note="Nucleotide may be methylated to form 5-methylcytosine"
caaatcctgaaaagacacttttcaatcagaaaactgactttttcaaacaagttcagtaaacgtagctccattaagcttttcatagcctgacctatgcattctggaaatgttcgcttttagcc

SEQ ID NO: 3470 - DNA, 122 bp, Homo sapiens
  misc_feature (61)..(62): /note="This region represents a CpG dinucleotide"
  misc_feature (61)..(61): /note="Nucleotide may be methylated to form 5-methylcytosine"
gtctcaactgcagactacaatctaagacactgctgctgactcactgttacacaattaaagcggtttcccaaagtagactcattttctaccacatgaaaatctatcccgaactgttttccaat

SEQ ID NO: 3471 - DNA, 122 bp, Homo sapiens
  misc_feature (61)..(62): /note="This region represents a CpG dinucleotide"
  misc_feature (61)..(61): /note="Nucleotide may be methylated to form 5-methylcytosine"
cctgctctgggcttccttctctgcgctgctcacagcggagacgtggtcatgaggccgggtcgccttggagccagggcctctcagtccctgtggtggtctctggtcagatttggcccaggagg

SEQ ID NO: 3472 - DNA, 122 bp, Homo sapiens
  misc_feature (61)..(62): /note="This region represents a CpG dinucleotide"
  misc_feature (61)..(61): /note="Nucleotide may be methylated to form 5-methylcytosine"
accacatggtgccattagatgctcttgacgtgctgtggttttctggttcactctgctagacggtgcccagggctgttcccggagccgtctgtcattgtacttacaactcacatcacaccccg

SEQ ID NO: 3473 - DNA, 122 bp, Homo sapiens
  misc_feature (61)..(62): /note="This region represents a CpG dinucleotide"
  misc_feature (61)..(61): /note="Nucleotide may be methylated to form 5-methylcytosine"
actaacgtcgctgctgcgttttgcaatcgcgccccgcgcatgcttcttggccccgtgtcccgctcctttaccctgcgggttcgagctccttgggctgagctttttggtttccttgggcttcc

SEQ ID NO: 3474 - DNA, 122 bp, Homo sapiens
  misc_feature (61)..(62): /note="This region represents a CpG dinucleotide"
  misc_feature (61)..(61): /note="Nucleotide may be methylated to form 5-methylcytosine"
ctgtccaggaaacaggggctggtggcatgggtggtgagccactgggacgagcgccaggcccgggtccgctactaccaccaactgagccaacatgtgaccgtggacgtgttcggccggggcgg

SEQ ID NO: 3475 - DNA, 122 bp, Homo sapiens
  misc_feature (61)..(62): /note="This region represents a CpG dinucleotide"
  misc_feature (61)..(61): /note="Nucleotide may be methylated to form 5-methylcytosine"
ttctggccctgaggtgagtgtgctggagccctgttagaggccaaggtcacatagttgcagcgtgagcctcgggtttgtctcgtggcctcagactacacctcacactagtcacaccgctggtg

SEQ ID NO: 3476 - DNA, 122 bp, Homo sapiens
  misc_feature (61)..(62): /note="This region represents a CpG dinucleotide"
  misc_feature (61)..(61): /note="Nucleotide may be methylated to form 5-methylcytosine"
gtgaaaccagtacatggtggaaaaaatgagaacagtgattgcctctggggtaggaggtgacggcaactgactgagaaggaggacaactgaaatttctaggatgatagaaatattcaatctct

SEQ ID NO: 3477 - DNA, 122 bp, Homo sapiens
  misc_feature (61)..(62): /note="This region represents a CpG dinucleotide"
  misc_feature (61)..(61): /note="Nucleotide may be methylated to form 5-methylcytosine"
tggtgttaaatgttagctagaatgtcacaaggccagtccttagggacagtgtgacacacacgtcaccttgaccaccagatgagtaagctgcaccacgtgctgttttcagacttttgaaatct

SEQ ID NO: 3478 - DNA, 122 bp, Homo sapiens
  misc_feature (61)..(62): /note="This region represents a CpG dinucleotide"
  misc_feature (61)..(61): /note="Nucleotide may be methylated to form 5-methylcytosine"
catcttatatccttattctaaggtttattcagtaaacttctaaggtttatacaggaatgacgtggacttgtaaacggccccagagctcaatcctattgggcaactgtgagttggtgcctggg

SEQ ID NO: 3479 - DNA, 122 bp, Homo sapiens
  misc_feature (61)..(62): /note="This region represents a CpG dinucleotide"
  misc_feature (61)..(61): /note="Nucleotide may be methylated to form 5-methylcytosine"
caaatttgagaggaattgcataaaacactggagaaatccaagaggggaagtccacaagggcggtggctccctccatgatctcagagcaagctggtgtcagaacctggacctagagcactgtt

SEQ ID NO: 3480 - DNA, 122 bp, Homo sapiens
  misc_feature (61)..(62): /note="This region represents a CpG dinucleotide"
  misc_feature (61)..(61): /note="Nucleotide may be methylated to form 5-methylcytosine"
tgtgcttgatcactcatcctccttgagagccttctctaacctagtctgaacacatggatacgtctactgcatttccaactctgtgcaccaacaggcggtgtgctggagaaaagaggagcagc

SEQ ID NO: 3481 - DNA, 122 bp, Homo sapiens
  misc_feature (61)..(62): /note="This region represents a CpG dinucleotide"
  misc_feature (61)..(61): /note="Nucleotide may be methylated to form 5-methylcytosine"
caaacttgttatatttaaattttaattcatcatccctgtttttcctgtgctccttatcctcgttaatgacattgcctccctcccagttgccaaggcctctgactctgtattagtttcctacg

SEQ ID NO: 3482 - DNA, 122 bp, Homo sapiens
  misc_feature (61)..(62): /note="This region represents a CpG dinucleotide"
  misc_feature (61)..(61): /note="Nucleotide may be methylated to form 5-methylcytosine"
tcttttgcatttagatcaactgtgggcattatgtattctgctcctggcaagcctgagcgtcgtcttggttctcatttgtggtgttttattcttggttagaatggatgattgagtgattgcca

SEQ ID NO: 3483 - DNA, 122 bp, Homo sapiens
  misc_feature (61)..(62): /note="This region represents a CpG dinucleotide"
  misc_feature (61)..(61): /note="Nucleotide may be methylated to form 5-methylcytosine"
cctatgcacaaattcatttggcgggggggttgtcagccctcttgcattatcttaaaaatacgctcttcttgacctgtggaccaggaaacagagactttcaagacaaggagcaatttcaggtc

SEQ ID NO: 3484 - DNA, 122 bp, Homo sapiens
  misc_feature (61)..(62): /note="This region represents a CpG dinucleotide"
  misc_feature (61)..(61): /note="Nucleotide may be methylated to form 5-methylcytosine"
cagcctctgggcagggattttgttccatgcttctttgtgtctccaccaccaggaggtgtacgctcctgattctccgggtgttcctgtgcatcatccttgagagtgagacctaggttgttggt

SEQ ID NO: 3485 - DNA, 122 bp, Homo sapiens
  misc_feature (61)..(62): /note="This region represents a CpG dinucleotide"
  misc_feature (61)..(61): /note="Nucleotide may be methylated to form 5-methylcytosine"
gtattacttgtcttaaagaatagggtagtattactcactcttgaagtggtactcttgaatcgggtagtattactcttgaatagggtagtattactcacgcctgaatcgctatggcaaaatcc

SEQ ID NO: 3486 - DNA, 122 bp, Homo sapiens
  misc_feature (61)..(62): /note="This region represents a CpG dinucleotide"
  misc_feature (61)..(61): /note="Nucleotide may be methylated to form 5-methylcytosine"
gtgatacagatttttctgagatggacagtgcctctcactgaccccgcccccagtatcctacgaccaaggaaaagaatctcatgtgtcatttctgtgggccacggtagttaaggaaactccat

SEQ ID NO: 3487 - DNA, 122 bp, Homo sapiens
  misc_feature (61)..(62): /note="This region represents a CpG dinucleotide"
  misc_feature (61)..(61): /note="Nucleotide may be methylated to form 5-methylcytosine"
gatcctccaggataacaatgttctcatttccagaagatcattacgcaaggcactttctttcgtcctagtacagataagggtggttcaaaaagactcaaaagtttgcccatgggctgtgcatg

SEQ ID NO: 3488 - DNA, 122 bp, Homo sapiens
  misc_feature (61)..(62): /note="This region represents a CpG dinucleotide"
  misc_feature (61)..(61): /note="Nucleotide may be methylated to form 5-methylcytosine"
ctgtgtcactgacttactctgggggtgaccttgacctggtcccttccctcggcccatttgcgaaacagggaagcctagttaaaagatcactcaggtttaggggtgccagacctagcaaataa

SEQ ID NO: 3489 - DNA, 122 bp, Homo sapiens
  misc_feature (61)..(62): /note="This region represents a CpG dinucleotide"
  misc_feature (61)..(61): /note="Nucleotide may be methylated to form 5-methylcytosine"
taaccactgcattccagcttgggcaacagagcaagaccccgtcttaaataacaacagcaacgaccacaacaacgacaacacccctgaaaaactggataagcagtatgtagcctatcattagt

SEQ ID NO: 3490 - DNA, 122 bp, Homo sapiens
  misc_feature (61)..(62): /note="This region represents a CpG dinucleotide"
  misc_feature (61)..(61): /note="Nucleotide may be methylated to form 5-methylcytosine"
atttgaattatggctccatctattaactgtgtactttaggtcagttgcttctctgcgcctcgatttctgcatctgtaaaatggtaacaacctgtgtaatatggttggggttttaaatattaa

SEQ ID NO: 3491 - DNA, 122 bp, Homo sapiens
  misc_feature (61)..(62): /note="This region represents a CpG dinucleotide"
  misc_feature (61)..(61): /note="Nucleotide may be methylated to form 5-methylcytosine"
acaacatgagatgatcttgctctgggccatgccgggaggaagggagaaggtggctgtcaacgagccaggaagcggcactcctgacactggatctaccaacacccctatctcagacttccagc

SEQ ID NO: 3492 - DNA, 122 bp, Homo sapiens
  misc_feature (61)..(62): /note="This region represents a CpG dinucleotide"
  misc_feature (61)..(61): /note="Nucleotide may be methylated to form 5-methylcytosine"
actatagctcttcattgtcactccctggccatcactggaaaggtcaccaatgtacatgttcgtatattttaaaacagggaacctggtaagtaccaaagaaattcactccaagttcatggtct

SEQ ID NO: 3493 - DNA, 122 bp, Homo sapiens
  misc_feature (61)..(62): /note="This region represents a CpG dinucleotide"
  misc_feature (61)..(61): /note="Nucleotide may be methylated to form 5-methylcytosine"
aaggcaaacccaaacaggatgttgacctgtcagactggcaactgtgaaaaagaccattaacgtccaatgcagatgagcatgaagagaaatgaatacaggagtaaaggaacatgaaccagtat

SEQ ID NO: 3494 - DNA, 122 bp, Homo sapiens
  misc_feature (61)..(62): /note="This region represents a CpG dinucleotide"
  misc_feature (61)..(61): /note="Nucleotide may be methylated to form 5-methylcytosine"
cagactcagtggcccacccaggggcatgagtaatgctgggagctgcaggctggcttcccacgctccctcctgggcctggcccccaggcctggctgactccatggggggcctggcagtatcac

SEQ ID NO: 3495 - DNA, 122 bp, Homo sapiens
  misc_feature (61)..(62): /note="This region represents a CpG dinucleotide"
  misc_feature (61)..(61): /note="Nucleotide may be methylated to form 5-methylcytosine"
aggataacacccatcagagctgcagcagtccagttgtgcaaggcatttaatgcccagtcacgcagtctgaatccaacctgaagtctgcttgtcaagccattagccttatccctgtggcgtct

SEQ ID NO: 3496 - DNA, 122 bp, Homo sapiens
  misc_feature (61)..(62): /note="This region represents a CpG dinucleotide"
  misc_feature (61)..(61): /note="Nucleotide may be methylated to form 5-methylcytosine"
cctaactttttttcataattgactatttcagttaatagccctaggcttcaagaaaggctgcgcatcttggaagtattagggcatgagtcatgagtcttgattcttccaaataaaatatggta

SEQ ID NO: 3497 - DNA, 122 bp, Homo sapiens
  misc_feature (61)..(62): /note="This region represents a CpG dinucleotide"
  misc_feature (61)..(61): /note="Nucleotide may be methylated to form 5-methylcytosine"
gttcttcttcttatggaacctaaatccaccttcaatcttcctgacaatggtaattgtttgcgtgacaggatgagtgacagcatcggatacacagaggtggagggatcctgggagtggtgacg

SEQ ID NO: 3498 - DNA, 122 bp, Homo sapiens
  misc_feature (61)..(62): /note="This region represents a CpG dinucleotide"
  misc_feature (61)..(61): /note="Nucleotide may be methylated to form 5-methylcytosine"
ctaagaaggacacacactgtgttgtgcaattagagaaaaccaggctgagctttcgtcatgcgagatgtaatgccttgaagccaaatgatgcagtatttttagttgtaattactggcttgttc

SEQ ID NO: 3499 - DNA, 122 bp, Homo sapiens
  misc_feature (61)..(62): /note="This region represents a CpG dinucleotide"
  misc_feature (61)..(61): /note="Nucleotide may be methylated to form 5-methylcytosine"
ctaaataagaagcttcctgctatcttgcaatggagtcctggtacttcttcccggccatgacggagatataaccagagaagctcacttgatccttgggtgtgccgagtttcccctggtgttta

SEQ ID NO: 3500 - DNA, 122 bp, Homo sapiens
  misc_feature (61)..(62): /note="This region represents a CpG dinucleotide"
  misc_feature (61)..(61): /note="Nucleotide may be methylated to form 5-methylcytosine"
gcccagagctcttaactctcatgctgagaacagctttgtgtgctgagtgtttcgcacacccgcaggccccgcacgttctgcctgctgttccctgtaatcctgacctcgcctgggagtggcag

SEQ ID NO: 3501 - DNA, 122 bp, Homo sapiens
  misc_feature (61)..(62): /note="This region represents a CpG dinucleotide"
  misc_feature (61)..(61): /note="Nucleotide may be methylated to form 5-methylcytosine"
ccagaggattggctcacagtcctttcctttgtcttcctttgtcttagctgggattataggcgtgcactaccacgcccggctaatttttgtatttttagtagagacagggttttgccatgttg

SEQ ID NO: 3502 - DNA, 122 bp, Homo sapiens
  misc_feature (61)..(62): /note="This region represents a CpG dinucleotide"
  misc_feature (61)..(61): /note="Nucleotide may be methylated to form 5-methylcytosine"
gtgcatctatgcctaggaacagctccatgagaacatgttctctctgtttaagtgattacacgtaaacagggacaaaaatttaaattcaaaccataagtcaccagatttaagaataacctctc

SEQ ID NO: 3503 - DNA, 122 bp, Homo sapiens
  misc_feature (61)..(62): /note="This region represents a CpG dinucleotide"
  misc_feature (61)..(61): /note="Nucleotide may be methylated to form 5-methylcytosine"
taaattatttttctgtacttcagctttatcaggtgaatgtcatgggagatgacaaatccccgtaagtcataggattattttgagtactaaatgaacaaactgaaaagcaactagcagaggac

SEQ ID NO: 3504 - DNA, 122 bp, Homo sapiens
  misc_feature (61)..(62): /note="This region represents a CpG dinucleotide"
  misc_feature (61)..(61): /note="Nucleotide may be methylated to form 5-methylcytosine"
gcgaggaagggtggcaggaacaaaggagaagggaagaaatactagcataatagtaaaaaacggttaatcattattgagcatttggtatgtgtcaggtgctgtgctgaatccctcacatgaat

SEQ ID NO: 3505 - DNA, 122 bp, Homo sapiens
  misc_feature (61)..(62): /note="This region represents a CpG dinucleotide"
  misc_feature (61)..(61): /note="Nucleotide may be methylated to form 5-methylcytosine"
gcttggctgtggggctgtgaggatgagctggaggcaggtggaagcttgatttttgagtgtcgcaaatactggactgatgactcggaacttgacttggtagtggggggcagtggtagtcttgt

SEQ ID NO: 3506 - DNA, 122 bp, Homo sapiens
  misc_feature (61)..(62): /note="This region represents a CpG dinucleotide"
  misc_feature (61)..(61): /note="Nucleotide may be methylated to form 5-methylcytosine"
agtcatcaaatggtgagaagacagatcacaaaaatatgattcataataatgccaaacccacgaagatgatgccacagaaagagaattgcaaaagctgattgttggaggacagttgcatgaac

SEQ ID NO: 3507 - DNA, 122 bp, Homo sapiens
  misc_feature (61)..(62): /note="This region represents a CpG dinucleotide"
  misc_feature (61)..(61): /note="Nucleotide may be methylated to form 5-methylcytosine"
ttggggcagagggagcccggttcctcacacatagcacagtcttgctaagtgaattgtgttcgccaattacttagccattgttgtgtacaccaacactctattagcaattctaagggaaatga

SEQ ID NO: 3508 - DNA, 122 bp, Homo sapiens
  misc_feature (61)..(62): /note="This region represents a CpG dinucleotide"
  misc_feature (61)..(61): /note="Nucleotide may be methylated to form 5-methylcytosine"
tggtgagactccatctctacccaaaatacaaaaaataagctgggtgtggtggttcgcgcccgtagtcccagctactggggaggctgaggcaggattgcttgagccccagaaccagaggttgc

SEQ ID NO: 3509 - DNA, 122 bp, Homo sapiens
  misc_feature (61)..(62): /note="This region represents a CpG dinucleotide"
  misc_feature (61)..(61): /note="Nucleotide may be methylated to form 5-methylcytosine"
caattccttctccttctttctgttcagccatgttcagacatggttttcgtcttcatctttcgtctttgtcaccacataggcaaatagccctaatccttgtcacttctagccaccctaaccac

SEQ ID NO: 3510 - DNA, 122 bp, Homo sapiens
  misc_feature (61)..(62): /note="This region represents a CpG dinucleotide"
  misc_feature (61)..(61): /note="Nucleotide may be methylated to form 5-methylcytosine"
ctactatgacaccttcaaaggagatgactacaatgaggagaatcctactgaacccggcagcgacggcaccatgtcagacaaggaaattactcatgatgtcaaaggtaaccccatgtagagcc

SEQ ID NO: 3511 - DNA, 122 bp, Homo sapiens
  misc_feature (61)..(62): /note="This region represents a CpG dinucleotide"
  misc_feature (61)..(61): /note="Nucleotide may be methylated to form 5-methylcytosine"
agtcaccttgccggctgctcaactgtcccaaaacgtacctgtgggattttaactcatgaacgtgactgaatgatgacacaaagaggctggtgccattgaaaaaataatttactacagttacc

SEQ ID NO: 3512 - DNA, 122 bp, Homo sapiens
  misc_feature (61)..(62): /note="This region represents a CpG dinucleotide"
  misc_feature (61)..(61): /note="Nucleotide may be methylated to form 5-methylcytosine"
gaggaattggcctcatcagatcggttggtgatttcccgcagcagtgcccagcagcctgagcgctcaacctgagaagatgaacagtgagtcattcagatatgatgaaagagcacaggaaaaag

SEQ ID NO: 3513 - DNA, 122 bp, Homo sapiens
  misc_feature (61)..(62): /note="This region represents a CpG dinucleotide"
  misc_feature (61)..(61): /note="Nucleotide may be methylated to form 5-methylcytosine"
tcagactgtgtcccgatatggcactgtgtctctccctaaggtgtgtactctcctgagagacgcttccttggaactgatgctaaggcacatcagaaggatctcagggtggaaaggctcctata

SEQ ID NO: 3514 - DNA, 122 bp, Homo sapiens
  misc_feature (61)..(62): /note="This region represents a CpG dinucleotide"
  misc_feature (61)..(61): /note="Nucleotide may be methylated to form 5-methylcytosine"
ggtcagcatctgggcccagggcagctgcctcattcaggtggtggcagtgtaaggaggagtcgtgtaacgcgtgtcatcagattccagttcagttcctgggcatacaaatatgaagacttcat

SEQ ID NO: 3515 - DNA, 122 bp, Homo sapiens
  misc_feature (61)..(62): /note="This region represents a CpG dinucleotide"
  misc_feature (61)..(61): /note="Nucleotide may be methylated to form 5-methylcytosine"
cccgttgctgagagagaccgggggacacgatagcctgttgctgagagagaccggggaacacggtagcctgttgctgagagaggtcatttcccggatctttgtcctgcgtccgcccacagctg

SEQ ID NO: 3516 - DNA, 122 bp, Homo sapiens
  misc_feature (61)..(62): /note="This region represents a CpG dinucleotide"
  misc_feature (61)..(61): /note="Nucleotide may be methylated to form 5-methylcytosine"
actgctcagcatgtttacatttgaacacacctcaagtgtgactaacaacaaaaaataaagcgcagatattccataaatgagtaagttccagtatggctgcatcctactgcaattaatccttt

SEQ ID NO: 3517 - DNA, 122 bp, Homo sapiens
  misc_feature (61)..(62): /note="This region represents a CpG dinucleotide"
  misc_feature (61)..(61): /note="Nucleotide may be methylated to form 5-methylcytosine"
aataatccctcactcccagataacactggatttgactcaagtggccaaggctatccaaggcggtgagagggtcagtttgtccaggtcttcatgaccctgccttagtaatcctctctgagttg

SEQ ID NO: 3518 - DNA, 122 bp, Homo sapiens
  misc_feature (61)..(62): /note="This region represents a CpG dinucleotide"
  misc_feature (61)..(61): /note="Nucleotide may be methylated to form 5-methylcytosine"
ttaaatccccacaaggaagcaatcgagtcacaattgctaatcctcttgtaagaataagagcgcggagtgtagctggcagattatattgcctgctgtcacgtaacttgtaatagtgaagccag

SEQ ID NO: 3519 - DNA, 122 bp, Homo sapiens
  misc_feature (61)..(62): /note="This region represents a CpG dinucleotide"
  misc_feature (61)..(61): /note="Nucleotide may be methylated to form 5-methylcytosine"
aggtgatctgcctgccttggcctctcaaagtgctgggattacaggcgtgagccactgcaccgagcccataatgacttttatatactataggtgttagtgatttgaatgtccccagttcattt

SEQ ID NO: 3520 - DNA, 122 bp, Homo sapiens
  misc_feature (61)..(62): /note="This region represents a CpG dinucleotide"
  misc_feature (61)..(61): /note="Nucleotide may be methylated to form 5-methylcytosine"
aagagcattatatcctactaatacattgcaatttattttttttgctccctacactctttccggttctctatttatagttcaaaatcacattgaatatccttatacatgtttcctttgcatgt

SEQ ID NO: 3521 - DNA, 122 bp, Homo sapiens
  misc_feature (61)..(62): /note="This region represents a CpG dinucleotide"
  misc_feature (61)..(61): /note="Nucleotide may be methylated to form 5-methylcytosine"
gactcaaatgggaaagaattaagagctcaagtgcctgccttttacaggtctacagggagacgtgaaatgatatttccagtttggggctgggaaagacccagtctattgttcctctggggccc

SEQ ID NO: 3522 - DNA, 122 bp, Homo sapiens
  misc_feature (61)..(62): /note="This region represents a CpG dinucleotide"
  misc_feature (61)..(61): /note="Nucleotide may be methylated to form 5-methylcytosine"
caggccattgtatgctctccaagtccatttattttcccctaaaaattatttactatccttcgaattgccacatttctcccatctcccttgtcctgtgaagaagggtgtataagcatctgtac

SEQ ID NO: 3523 - DNA, 122 bp, Homo sapiens
  misc_feature (61)..(62): /note="This region represents a CpG dinucleotide"
  misc_feature (61)..(61): /note="Nucleotide may be methylated to form 5-methylcytosine"
taggggtatctatccagattattcaaatgagggactggttcaccaggtgcatactccctgcgaaatgctgctcatgatgctccaccaagaggccccatagggaagtgattaaaaatgtggat

SEQ ID NO: 3524 - DNA, 122 bp, Homo sapiens
  misc_feature (61)..(62): /note="This region represents a CpG dinucleotide"
  misc_feature (61)..(61): /note="Nucleotide may be methylated to form 5-methylcytosine"
ggaagtatactgtttactctttattaccttgaaacaatagggtattcactttttcttccccgtaactcagtttaacagtcttcatttgaaagaaacaaggcagaatacattactagtccttc

SEQ ID NO: 3525 - DNA, 122 bp, Homo sapiens
  misc_feature (61)..(62): /note="This region represents a CpG dinucleotide"
  misc_feature (61)..(61): /note="Nucleotide may be methylated to form 5-methylcytosine"
ctggaaacttctgtttcttcctcctttgaacctagtcgccatgctgtgaataagccatgacgcaacatggacaggcccacatggagggcaactgaggttattccaaatatcagcagccaccg

SEQ ID NO: 3526 - DNA, 122 bp, Homo sapiens
  misc_feature (61)..(62): /note="This region represents a CpG dinucleotide"
  misc_feature (61)..(61): /note="Nucleotide may be methylated to form 5-methylcytosine"
aacctctgtaacaatcttataactaatgtccttgcctccaggcttcctggtgcatgtgcacgtatgcacatgcacacatacacacgcagagatttcattccatctacacactacaggcaaaa

SEQ ID NO: 3527 - DNA, 122 bp, Homo sapiens
  misc_feature (61)..(62): /note="This region represents a CpG dinucleotide"
  misc_feature (61)..(61): /note="Nucleotide may be methylated to form 5-methylcytosine"
aacaatgagtgagcagaaatgaagacagacaggccagcaaaaggaagaggaagaaattcacgggcaaagtgcactctgagagaagaatttaatctacagaatgatctgtacccccacggctc

SEQ ID NO: 3528 - DNA, 122 bp, Homo sapiens
  misc_feature (61)..(62): /note="This region represents a CpG dinucleotide"
  misc_feature (61)..(61): /note="Nucleotide may be methylated to form 5-methylcytosine"
attctttaatctctctgctctacaggacttgaaacatagccttaaatgactaagtcttcacgtgagcatgacataacctggaaatcttcctataatggaactggccttgtgaaggtatttat

SEQ ID NO: 3529 - DNA, 122 bp, Homo sapiens
  misc_feature (61)..(62): /note="This region represents a CpG dinucleotide"
  misc_feature (61)..(61): /note="Nucleotide may be methylated to form 5-methylcytosine"
tgcctcaagtgtgcaggaacaagctgtaatggcaaagtagcatgggctcttcagaactaacgaggttaggctgggcgaggtggctcacacctgtaatcccagtattttgggaggccgaggcg

SEQ ID NO: 3530 - DNA, 122 bp, Homo sapiens
  misc_feature (61)..(62): /note="This region represents a CpG dinucleotide"
  misc_feature (61)..(61): /note="Nucleotide may be methylated to form 5-methylcytosine"
caccatgcgcgacctcctggggctccccctccccccacactgtttccacagtgaccaaagcgtcacgtcctgtgacaccagagccattgacgccatatcccgtggccactgggaggggtccc

SEQ ID NO: 3531 - DNA, 122 bp, Homo sapiens
  misc_feature (61)..(62): /note="This region represents a CpG dinucleotide"
  misc_feature (61)..(61): /note="Nucleotide may be methylated to form 5-methylcytosine"
aaccagcctttccttttcctgggcgttggtactcagctctgttaggagggtatatattgccggggtgtggggggtgggggtgtggaagacacctgttgcttttttcttttggaagtggtgcg

SEQ ID NO: 3532 - DNA, 122 bp, Homo sapiens
  misc_feature (61)..(62): /note="This region represents a CpG dinucleotide"
  misc_feature (61)..(61): /note="Nucleotide may be methylated to form 5-methylcytosine"
gagtcatagtcctggttgcttggccactgtgtctggacaaagagctgccgcagcaagtgccgctgctgggcagtctttttgcagctcactttgcctgggagctgctctgccagtttgtttga

SEQ ID NO: 3533 - DNA, 122 bp, Homo sapiens
  misc_feature (61)..(62): /note="This region represents a CpG dinucleotide"
  misc_feature (61)..(61): /note="Nucleotide may be methylated to form 5-methylcytosine"
tgcagacttagcggatcccatgagattttgactaccgtctgtgctcagaacagtttgagccgtatggaggaagtctccgcaccagtcttactgttggtggtcaccaggaagccagcagtgtg

SEQ ID NO: 3534 - DNA, 122 bp, Homo sapiens
  misc_feature (61)..(62): /note="This region represents a CpG dinucleotide"
  misc_feature (61)..(61): /note="Nucleotide may be methylated to form 5-methylcytosine"
aaccaccccagaacaacaatgaaggaaaattccagaatgacaactgtacagcaagtctagcgagcagccagtccagattgaaataagaggaaggaaggctctgggacaaaaactccaaagaa

SEQ ID NO: 3535 - DNA, 122 bp, Homo sapiens
  misc_feature (61)..(62): /note="This region represents a CpG dinucleotide"
  misc_feature (61)..(61): /note="Nucleotide may be methylated to form 5-methylcytosine"
tgattggggaccacgtgtctttgctctatgcttggctttctattgatccatccaggttaccggatcatcctcttgatttgcatatagcacttactctcatggcctggccctacaactctgag

SEQ ID NO: 3536 - DNA, 122 bp, Homo sapiens
  misc_feature (61)..(62): /note="This region represents a CpG dinucleotide"
  misc_feature (61)..(61): /note="Nucleotide may be methylated to form 5-methylcytosine"
gcaggtgcagagggtggggcactgagccacagaagagcattcacgggccttgaaaccccacggaatttgccctgctggatttcagacttgcttgggactggcaacccctttattcctttata

SEQ ID NO: 3537 - DNA, 122 bp, Homo sapiens
  misc_feature (61)..(62): /note="This region represents a CpG dinucleotide"
  misc_feature (61)..(61): /note="Nucleotide may be methylated to form 5-methylcytosine"
ctggttgcattccttactactgtgtgactaacactgttaggcaaaattacctcacctctccgtgctccaactttcacatctgtgaaatggcactagccattatagtattataatacctgccg

SEQ ID NO: 3538 - DNA, 122 bp, Homo sapiens
  misc_feature (61)..(62): /note="This region represents a CpG dinucleotide"
  misc_feature (61)..(61): /note="Nucleotide may be methylated to form 5-methylcytosine"
aagaccagtgctggatgagcctctagtaatgacaacattttagttgttagtggtataatacggaagagatattttgcacaggctgctttggagaactttcaaattatcctttgtttggtaac

SEQ ID NO: 3539 - DNA, 122 bp, Homo sapiens
  misc_feature (61)..(62): /note="This region represents a CpG dinucleotide"
  misc_feature (61)..(61): /note="Nucleotide may be methylated to form 5-methylcytosine"
gcccctgtcggatcccgcacctttctaagcctgtggttgcttcacccgctgcagagcacacgcaacccagcctcagcatcacagccgcagctctgttcagcggagcagccagccagggcgga

SEQ ID NO: 3540 - DNA, 122 bp, Homo sapiens
  misc_feature (61)..(62): /note="This region represents a CpG dinucleotide"
  misc_feature (61)..(61): /note="Nucleotide may be methylated to form 5-methylcytosine"
ctgagttagcaaccatcagagttcatggctaagaatccatggtaccatgtcttgctgtcacgctgcacacagggctaagccaaggcgatactactattcgctgttcaactctccatttatac

SEQ ID NO: 3541 - DNA, 122 bp, Homo sapiens
  misc_feature (61)..(62): /note="This region represents a CpG dinucleotide"
  misc_feature (61)..(61): /note="Nucleotide may be methylated to form 5-methylcytosine"
cttggcatggttttaagtactagggagacagcatagaaaaccctatcctcatggagcccacgctagggtgctgacaaagcaaaaagctgacaatgacgataaagaagcaaagtatttagcac

SEQ ID NO: 3542 - DNA, 122 bp, Homo sapiens
  misc_feature (61)..(62): /note="This region represents a CpG dinucleotide"
  misc_feature (61)..(61): /note="Nucleotide may be methylated to form 5-methylcytosine"
cagtttggtgacttcaggaaactgctttcttagcttggtcatttccttctcaggcaactgcgtgcattgaattcgtttttatgcctggaagaacctgtttacagaattatgtaaagccctgt

SEQ ID NO: 3543 - DNA, 122 bp, Homo sapiens
  misc_feature (61)..(62): /note="This region represents a CpG dinucleotide"
  misc_feature (61)..(61): /note="Nucleotide may be methylated to form 5-methylcytosine"
ccccatgatccgaaattccacctaggtacaggagtgtgtacacacgagcaccaggagacacgcacaagaatattgacggtggcattatctgtcatagtcaaaagctggaaacaatgcatgct

SEQ ID NO: 3544 - DNA, 122 bp, Homo sapiens
  misc_feature (61)..(62): /note="This region represents a CpG dinucleotide"
  misc_feature (61)..(61): /note="Nucleotide may be methylated to form 5-methylcytosine"
agagtgaaactccatcttgagaaaacaaaaaaccagcttcagctgaactccaagccaacacgcagcagcaactactgctatgtgagtgagtcatcttggacttaccagttcagtgaagcctc

SEQ ID NO: 3545 - DNA, 122 bp, Homo sapiens
  misc_feature (61)..(62): /note="This region represents a CpG dinucleotide"
  misc_feature (61)..(61): /note="Nucleotide may be methylated to form 5-methylcytosine"
tgtttttttttttactggaaatttcatgcgttaaatgttgggtaggattaagtgatgagacgacgggtccaaatgtattaatcactgggaagtgttgaagtattaccgaccatcttactcat

SEQ ID NO: 3546 - DNA, 122 bp, Homo sapiens
  misc_feature (61)..(62): /note="This region represents a CpG dinucleotide"
  misc_feature (61)..(61): /note="Nucleotide may be methylated to form 5-methylcytosine"
catcaggatgtgttgccagttttagaatatcagccacagagaagagagtggctgtgacaacgaaggagcttacaaaatgtggacactgcagctatgtgtgtcctggaacctaactttctaaa

SEQ ID NO: 3547 - DNA, 122 bp, Homo sapiens
  misc_feature (61)..(62): /note="This region represents a CpG dinucleotide"
  misc_feature (61)..(61): /note="Nucleotide may be methylated to form 5-methylcytosine"
aagatgcattttgaaaaagctgttccatgagtgccagaacaacatgttcccataaaggagcggaagagcacaggactaatataaagcttttgggaaaccttaaagcaacaggggaaagtccc

SEQ ID NO: 3548 - DNA, 122 bp, Homo sapiens
  misc_feature (61)..(62): /note="This region represents a CpG dinucleotide"
  misc_feature (61)..(61): /note="Nucleotide may be methylated to form 5-methylcytosine"
ttatttttaagtgttcttgtgtccgggccaatagaaaagaacatattccaagagctttctcggacaagagaaagggcatttgaggtttctgcacatatcctctggatacagtgaggcaaaga

SEQ ID NO: 3549 - DNA, 122 bp, Homo sapiens
  misc_feature (61)..(62): /note="This region represents a CpG dinucleotide"
  misc_feature (61)..(61): /note="Nucleotide may be methylated to form 5-methylcytosine"
cactttgggctcttctctttcttcatttcctaattagtcaccaatattgatccagatcctcgtccctacagattgtacattctcaggtaggactaataaccttttatattccccaaagtagc

SEQ ID NO: 3550 - DNA, 122 bp, Homo sapiens
  misc_feature (61)..(62): /note="This region represents a CpG dinucleotide"
  misc_feature (61)..(61): /note="Nucleotide may be methylated to form 5-methylcytosine"
ttttggattctcttctctgcagggtgagaaaccttctgggaattttgaggagagaggtggcgtcataggattaacttctccaaaggctacattggctgctgtgtgcagggtggattctagga

SEQ ID NO: 3551 - DNA, 122 bp, Homo sapiens
  misc_feature (61)..(62): /note="This region represents a CpG dinucleotide"
  misc_feature (61)..(61): /note="Nucleotide may be methylated to form 5-methylcytosine"
ttaacagcaatttctcacttacttaccgaaaaaaagaaagaaagaaagaaagaaaaaagacgccttggtacatttggaaggaagaaagctgaggatcaagagagagacttccagcctggccc

SEQ ID NO: 3552 - DNA, 122 bp, Homo sapiens
  misc_feature (61)..(62): /note="This region represents a CpG dinucleotide"
  misc_feature (61)..(61): /note="Nucleotide may be methylated to form 5-methylcytosine"
gtgtatacttcctgtctgatcctagtcctgagattccagaagacacaaaaacccagttcccgcagggctggagacgaaggcagaggggctgactggctacccagctccatctctgagtgctg

SEQ ID NO: 3553 - DNA, 122 bp, Homo sapiens
  misc_feature (61)..(62): /note="This region represents a CpG dinucleotide"
  misc_feature (61)..(61): /note="Nucleotide may be methylated to form 5-methylcytosine"
tcttgcactcaaaggctgtgagtggatgtggcccagccaccgtctgcttgggtgtgctgccgccagctggcttccagccttctgctctgtttcatcaccttgcagtctccaccccctcacca

SEQ ID NO: 3554 - DNA, 122 bp, Homo sapiens
  misc_feature (61)..(62): /note="This region represents a CpG dinucleotide"
  misc_feature (61)..(61): /note="Nucleotide may be methylated to form 5-methylcytosine"
gaaccctgggaactttgctggagactttcactaataccctgacctgtattttcttcaatgcgcaactcttacctcactcaagttggttaacctctatgtgctttgatagccacggcaataaa

SEQ ID NO: 3555 - DNA, 122 bp, Homo sapiens
  misc_feature (61)..(62): /note="This region represents a CpG dinucleotide"
  misc_feature (61)..(61): /note="Nucleotide may be methylated to form 5-methylcytosine"
gaagtttttgaggaggggattggcagatgtcaccccaaaaaagaaacattttctctaccacgctgaaaagcatagcataagggagaaaatagcaatcaagatgcaagttggcattagactta

SEQ ID NO: 3556 - DNA, 122 bp, Homo sapiens
  misc_feature (61)..(62): /note="This region represents a CpG dinucleotide"
  misc_feature (61)..(61): /note="Nucleotide may be methylated to form 5-methylcytosine"
tctctccagagtcccttccctgcacctccagggcctccccagatggaactggctgggagccgtgctttgttgaaacaaagggaaaacctgtctctcttgggtttgcagctgctgttgaaacc

SEQ ID NO: 3557 - DNA, 122 bp, Homo sapiens
  misc_feature (61)..(62): /note="This region represents a CpG dinucleotide"
  misc_feature (61)..(61): /note="Nucleotide may be methylated to form 5-methylcytosine"
tcttttacaaaattgtttgggctgtcatacgttgtttttagaatcaatttgttatttttacgaaaaacagcatgctgggttttttattgggatagtactgagtctgtagatcaactttaaca

SEQ ID NO: 3558 - DNA, 122 bp, Homo sapiens
  misc_feature (61)..(62): /note="This region represents a CpG dinucleotide"
  misc_feature (61)..(61): /note="Nucleotide may be methylated to form 5-methylcytosine"
gggaagagccacttttgtccaggttgctgggagcttctgtggctcatggtagtccaataacgatgactccaggtgacctctgtcaccattttctattaggcaatgtttcctgcccattcctg

SEQ ID NO: 3559 - DNA, 122 bp, Homo sapiens
  misc_feature (61)..(62): /note="This region represents a CpG dinucleotide"
  misc_feature (61)..(61): /note="Nucleotide may be methylated to form 5-methylcytosine"
caaagtgctgggattataggtgtgagccaccgtgcccggcctggatctgttttcttagcacgcagtgaggaatctttgtacttaaggccagggcaacaaagtcaagaggtcaaggtgtaggg

SEQ ID NO: 3560 - DNA, 122 bp, Homo sapiens
  misc_feature (61)..(62): /note="This region represents a CpG dinucleotide"
  misc_feature (61)..(61): /note="Nucleotide may be methylated to form 5-methylcytosine"
gtataaccataaggaagaatacaattacacaaacctgtaagaacatcattctcggccaggcgcggtggctcacgcctgcaattccagcactttaggaggccgaggcgggcggatcacctgag

SEQ ID NO: 3561 - DNA, 122 bp, Homo sapiens
  misc_feature (61)..(62): /note="This region represents a CpG dinucleotide"
  misc_feature (61)..(61): /note="Nucleotide may be methylated to form 5-methylcytosine"
cattgacggtgccagctgctacgtacaaagactggattcatgtaaggcacctgcttgtgacgtgactacacttctcaatatttaggtatcttaggcttttctcaccgaatccacaattgtgc

SEQ ID NO: 3562 - DNA, 122 bp, Homo sapiens
  misc_feature (61)..(62): /note="This region represents a CpG dinucleotide"
  misc_feature (61)..(61): /note="Nucleotide may be methylated to form 5-methylcytosine"
atttattgagcgtatcaagtattaaatcactaattctcatcagaagtccagagggaattacgcgagtcccatttacaattaagaaaacagacacaaagaaattacaaattttgccccaggtt

SEQ ID NO: 3563 - DNA, 122 bp, Homo sapiens
  misc_feature (61)..(62): /note="This region represents a CpG dinucleotide"
  misc_feature (61)..(61): /note="Nucleotide may be methylated to form 5-methylcytosine"
aggtggagcagttgcagggctagcccctgctcacccaaatgaggtgactcagcagagaggcgaggtggtgtgagagctacaagtgactgctgcttgtagcagccttcttcatttctcacaag

SEQ ID NO: 3564 - DNA, 122 bp, Homo sapiens
  misc_feature (61)..(62): /note="This region represents a CpG dinucleotide"
  misc_feature (61)..(61): /note="Nucleotide may be methylated to form 5-methylcytosine"
aacccacagttttaatcatgcttttgcttggcaagccgatttctctaagccagagtgagccgcaaggagagcccacgggtattcatttcacttactcttttcctgtgccgggtagtttgagg

SEQ ID NO: 3565 - DNA, 122 bp, Homo sapiens
  misc_feature (61)..(62): /note="This region represents a CpG dinucleotide"
  misc_feature (61)..(61): /note="Nucleotide may be methylated to form 5-methylcytosine"
ttttaatagagaaggtttttacttactgaaggttgaagattttgtatgtgtttcccatctcgcagcattgacatgtaattgtagggattttaaaggacatggtattactttcaattgcatca

SEQ ID NO: 3566 - DNA, 122 bp, Homo sapiens
  misc_feature (61)..(62): /note="This region represents a CpG dinucleotide"
  misc_feature (61)..(61): /note="Nucleotide may be methylated to form 5-methylcytosine"
catctgatgctctggtcggactcgggtaggtgtggtaggaacgaggaggaaggatgtcagcgagcaatgtttagaagaaaagaaatcaagctgaacttggtgacacaccacagaagaaggat

SEQ ID NO: 3567 - DNA, 122 bp, Homo sapiens
  misc_feature (61)..(62): /note="This region represents a CpG dinucleotide"
  misc_feature (61)..(61): /note="Nucleotide may be methylated to form 5-methylcytosine"
tgtagtacatacagtactcctgtaacaattctatagccacttcctgatgttgttgcagtgcgctcaagcattgggggtagctgcttggaaggtactgtgatgctaatcatctctgtgggagc

SEQ ID NO: 3568 - DNA, 122 bp, Homo sapiens
  misc_feature (61)..(62): /note="This region represents a CpG dinucleotide"
  misc_feature (61)..(61): /note="Nucleotide may be methylated to form 5-methylcytosine"
tgtttcacagtgtgctcatcatgcccgttttagagatgaagaaaaccatggctcagagagcgcctgtcatttgttcgagtcacaacaaattaaatccaggtctgtctggttagttgtaaagg

SEQ ID NO: 3569 - DNA, 122 bp, Homo sapiens
  misc_feature (61)..(62): /note="This region represents a CpG dinucleotide"
  misc_feature (61)..(61): /note="Nucleotide may be methylated to form 5-methylcytosine"
agcccctccaccactgcacagtgacatttacctcttagtctcctgtgtcactggatgaggcgtccttgctgctgggcttacccttccacctctgcccttgttccctttccttcctgtctcct

SEQ ID NO: 3570 - DNA, 122 bp, Homo sapiens
  misc_feature (61)..(62): /note="This region represents a CpG dinucleotide"
  misc_feature (61)..(61): /note="Nucleotide may be methylated to form 5-methylcytosine"
ctttttttttttttttttgagacagggtctcactctgctgcccaggctggagtacagagacgtgatcacagcacacggcgacctacctacacctcccgggctcaagctatgctcctgcctca

SEQ ID NO: 3571 - DNA, 122 bp, Homo sapiens
  misc_feature (61)..(62): /note="This region represents a CpG dinucleotide"
  misc_feature (61)..(61): /note="Nucleotide may be methylated to form 5-methylcytosine"
ccgccacctccaggggcagcctctgctgccggctcacatgtgaggagggagctgctgccccggcctctgagagaagcccagtctgttctggtcaagcaagaagcaagtggaccagggaggag

SEQ ID NO: 3572 - DNA, 122 bp, Homo sapiens
  misc_feature (61)..(62): /note="This region represents a CpG dinucleotide"
  misc_feature (61)..(61): /note="Nucleotide may be methylated to form 5-methylcytosine"
ttatcccctggactcctgggtgacaaaggtcagttgcctgccctgcagcttgctgtggttcgtagctccgaagctcccaataagctctcggcctgaggaaacaccctcccttggtggttgca

SEQ ID NO: 3573 - DNA, 122 bp, Homo sapiens
  misc_feature (61)..(62): /note="This region represents a CpG dinucleotide"
  misc_feature (61)..(61): /note="Nucleotide may be methylated to form 5-methylcytosine"
tgcttacagtatgtgaaatactctcaccagaacaaaggtcccagcgtcaataagtcaaaccgcagactctgacagctgagtgaatagcagaggccagagtccacttgaagtgttcacactct

SEQ ID NO: 3574 - DNA, 122 bp, Homo sapiens
  misc_feature (61)..(62): /note="This region represents a CpG dinucleotide"
  misc_feature (61)..(61): /note="Nucleotide may be methylated to form 5-methylcytosine"
cagcaggcctgggagagcctcacgcggcttaagcacgggagtcggaatcacttcagagcccgcctgccgctttcttttcaaaattcgggcctttagattggatccaggaaaggaagtcattt

SEQ ID NO: 3575 - DNA, 122 bp, Homo sapiens
  misc_feature (61)..(62): /note="This region represents a CpG dinucleotide"
  misc_feature (61)..(61): /note="Nucleotide may be methylated to form 5-methylcytosine"
aggtttgtgtaggttaagaaactagacctcagaaatgatttcatgtcttggataaagtcacgcataaccccacaaggtaaaagctgtatcaggtttgattggcaagtgagtgcctcatgcat

SEQ ID NO: 3576 - DNA, 122 bp, Homo sapiens
  misc_feature (61)..(62): /note="This region represents a CpG dinucleotide"
  misc_feature (61)..(61): /note="Nucleotide may be methylated to form 5-methylcytosine"
gaaatgactcacttccgcatggacaagcatgagatggcaaagccgaaatcaatccacaagcgtcctgagatactgaaaatgggacgcagctgtatcgctggaaatgtgtggatcaactgaac

SEQ ID NO: 3577 - DNA, 122 bp, Homo sapiens
  misc_feature (61)..(62): /note="This region represents a CpG dinucleotide"
  misc_feature (61)..(61): /note="Nucleotide may be methylated to form 5-methylcytosine"
aagacaagacggtgtttcatcagccagtgttgcagaactcggcccctctcaggctctgcacgtaccccatcccccgacaaagcctagctctccctctctttctgattcatgggaactaccta

SEQ ID NO: 3578 - DNA, 122 bp, Homo sapiens
  misc_feature (61)..(62): /note="This region represents a CpG dinucleotide"
  misc_feature (61)..(61): /note="Nucleotide may be methylated to form 5-methylcytosine"
tatgacactctgtcgcaatgctgaactggcagtgagtcacagctcccagtcagccacgcacgagattccatgggtaaataactgatattgtatagtgtattgtgttgcaagatgattttgcc

SEQ ID NO: 3579 - DNA, 122 bp, Homo sapiens
  misc_feature (61)..(62): /note="This region represents a CpG dinucleotide"
  misc_feature (61)..(61): /note="Nucleotide may be methylated to form 5-methylcytosine"
aaaaagaatgttatgctctgttgatgcttttggtgactatgacacaggggccctgtcttccgcagaccctgcagggccaggctggcatagacccagctgagcaaccgtcgcctgagagcttt

SEQ ID NO: 3580 - DNA, 122 bp, Homo sapiens
  misc_feature (61)..(62): /note="This region represents a CpG dinucleotide"
  misc_feature (61)..(61): /note="Nucleotide may be methylated to form 5-methylcytosine"
ggggagattatcctggattatctagatggggctggtataatcaccaaggtctttaaagcacggcagaagatcagaggaagagacaatgtcactatggaagcactgggggaaaaggctatatg

SEQ ID NO: 3581 - DNA, 122 bp, Homo sapiens
  misc_feature (61)..(62): /note="This region represents a CpG dinucleotide"
  misc_feature (61)..(61): /note="Nucleotide may be methylated to form 5-methylcytosine"
tttgggtttcacaaggtgggttgtgccatctgtggccctggtggaaccggtccggcagagcggacaagtggcgtggtcccccttcccttcctcaacctgctgtttccttgaaggccagccca

SEQ ID NO: 3582 - DNA, 122 bp, Homo sapiens
  misc_feature (61)..(62): /note="This region represents a CpG dinucleotide"
  misc_feature (61)..(61): /note="Nucleotide may be methylated to form 5-methylcytosine"
tttaaaaattcctctggtaatcctagtgcctatcagggctggaaaccactgaagcagagccgtactgcagggcccaagagcatacaaagctagttatttggatccaaagttggtcaagtgtg

SEQ ID NO: 3583 - DNA, 122 bp, Homo sapiens
  misc_feature (61)..(62): /note="This region represents a CpG dinucleotide"
  misc_feature (61)..(61): /note="Nucleotide may be methylated to form 5-methylcytosine"
cactgtggggagaggaggagaggtggagggggtgggtgccccaggggaagttggtgtggccgggaggagcgtggtaatcagcccggtgcatctgcctactcagcagcagcagtggctgcagt

SEQ ID NO: 3584 - DNA, 122 bp, Homo sapiens
  misc_feature (61)..(62): /note="This region represents a CpG dinucleotide"
  misc_feature (61)..(61): /note="Nucleotide may be methylated to form 5-methylcytosine"
cgggcgctcgctcgggggcctacagaatggcgtgtttcggggttgtggcgggccgaggggcggggtcgcagcaaggccccgcctgtcccctcctgggcctctcaaagtctgagccccgctcc

SEQ ID NO: 3585 - DNA, 122 bp, Homo sapiens
  misc_feature (61)..(62): /note="This region represents a CpG dinucleotide"
  misc_feature (61)..(61): /note="Nucleotide may be methylated to form 5-methylcytosine"
ggtcatatcctcagtctcagtcactcagctggtgagtggcagaagcaggatttcaacagacgggtgcaaagcagagccctgctcctagtctctgagctgagtgccgacttagggaggcaatg

SEQ ID NO: 3586 - DNA, 122 bp, Homo sapiens
  misc_feature (61)..(62): /note="This region represents a CpG dinucleotide"
  misc_feature (61)..(61): /note="Nucleotide may be methylated to form 5-methylcytosine"
catttattcatctgcccattaatcaaaatgtattgaggtaatactatctgccaggcactgcgttctttgtatcagtgtgggcacaaaagaggaagtgaacagttatcctcaaggctgtggca

SEQ ID NO: 3587 - DNA, 122 bp, Homo sapiens
  misc_feature (61)..(62): /note="This region represents a CpG dinucleotide"
  misc_feature (61)..(61): /note="Nucleotide may be methylated to form 5-methylcytosine"
ttgttaataggtcttctttcataatcattcaggggttgggcttaggctccctgagtcaaccgctattgtgaaatcctatctttttagggtgtctgcccaagcacagtgcatgaatgtataag

SEQ ID NO: 3588 - DNA, 122 bp, Homo sapiens
  misc_feature (61)..(62): /note="This region represents a CpG dinucleotide"
  misc_feature (61)..(61): /note="Nucleotide may be methylated to form 5-methylcytosine"
acagatataaataatttccaaaatgactcactaaagcagcacaccaggttttcctctgggcgtctcctcctttcaggctcctacagctgcaaattcaccacattcaataataagacaaaaac

SEQ ID NO: 3589 - DNA, 122 bp, Homo sapiens
  misc_feature (61)..(62): /note="This region represents a CpG dinucleotide"
  misc_feature (61)..(61): /note="Nucleotide may be methylated to form 5-methylcytosine"
tctggacttacacctcactccgtgactcacctattcataagtgtctcgggaactttcctccgagtgtgtgtggtatagtaacactcaagagaacataattccgagcatgtgtcataaactaa

SEQ ID NO: 3590 - DNA, 122 bp, Homo sapiens
  misc_feature (61)..(62): /note="This region represents a CpG dinucleotide"
  misc_feature (61)..(61): /note="Nucleotide may be methylated to form 5-methylcytosine"
aaaaacttgaaactgcttaaaagctaaagggaagaaacccaatagaagaagttggcaatacgactgcaaatggggacagtaagagctaactgtaaactggaaatgtctgtatgaaatgatgt

SEQ ID NO: 3591 - DNA, 122 bp, Homo sapiens
  misc_feature (61)..(62): /note="This region represents a CpG dinucleotide"
  misc_feature (61)..(61): /note="Nucleotide may be methylated to form 5-methylcytosine"
agccttagaggctgcccacattccttggctcatggcctcttctccactgaaagccagcagcgttggctctctctgtgcctttcttctagagtcacatttctttctgactacttgactgtctt

SEQ ID NO: 3592 - DNA, 122 bp, Homo sapiens
  misc_feature (61)..(62): /note="This region represents a CpG dinucleotide"
  misc_feature (61)..(61): /note="Nucleotide may be methylated to form 5-methylcytosine"
acctaatgtcaatcaaggaaagcataacaaattagagtcagctatccattctcctatgaacgatcagcaaatctcacaggagtcaaggaatagtactgttgtgagtagtgatacattacaga

SEQ ID NO: 3593 - DNA, 122 bp, Homo sapiens
  misc_feature (61)..(62): /note="This region represents a CpG dinucleotide"
  misc_feature (61)..(61): /note="Nucleotide may be methylated to form 5-methylcytosine"
cactgtggccttgtgacttggtcggcatttcgtagtctgctgaaggtgggtgctgggttccgctttggtggggagacctgttgcctacagcacccacccccgcccgacgcccccgcatgtcc

SEQ ID NO: 3594 - DNA, 122 bp, Homo sapiens
  misc_feature (61)..(62): /note="This region represents a CpG dinucleotide"
  misc_feature (61)..(61): /note="Nucleotide may be methylated to form 5-methylcytosine"
tactcattccatctagcacatgggaggtgctcaccaatgttgcataagcacacaagtgagcgtgcctgcaggatggcagacagaaaaatgttttgcaggagatgcagcaacataagcagatc

SEQ ID NO: 3595 - DNA, 122 bp, Homo sapiens
  misc_feature (61)..(62): /note="This region represents a CpG dinucleotide"
  misc_feature (61)..(61): /note="Nucleotide may be methylated to form 5-methylcytosine"
tttcaactcagggaagaagattaaaattgctcagtctccttggcttgcagagatttctcgcggggatcatcaggggtgtgcttaaccctccaggcagcacagtaaaacaggcctagcggccg

SEQ ID NO: 3596 - DNA, 122 bp, Homo sapiens
  misc_feature (61)..(62): /note="This region represents a CpG dinucleotide"
  misc_feature (61)..(61): /note="Nucleotide may be methylated to form 5-methylcytosine"
gcacatcactcaacctcactggtttcagttttgttgcccatatttggtgctgatgttatccgacatccctttcaaacattctattaaaaacctcaagctacacgagtgcacgtggtttaaag

SEQ ID NO: 3597 - DNA, 122 bp, Homo sapiens
  misc_feature (61)..(62): /note="This region represents a CpG dinucleotide"
  misc_feature (61)..(61): /note="Nucleotide may be methylated to form 5-methylcytosine"
tagctccccattccctgtctgtgatgtagaggcagttgagttttcaacctttgttgaaaacgaggaaaagagaacattggtttgaaatgatcttttgtagtaaatatttaacaccatggcag

SEQ ID NO: 3598 - DNA, 122 bp, Homo sapiens
  misc_feature (61)..(62): /note="This region represents a CpG dinucleotide"
  misc_feature (61)..(61): /note="Nucleotide may be methylated to form 5-methylcytosine"
caagtttgtcatttctgcaacccccaggtctgaccagtttggaacctgggctttctgagccggtctagtgggttggttgagagatgggggtttttctggtaactgcatttggtgctagccag

SEQ ID NO: 3599 - DNA, 122 bp, Homo sapiens
  misc_feature (61)..(62): /note="This region represents a CpG dinucleotide"
  misc_feature (61)..(61): /note="Nucleotide may be methylated to form 5-methylcytosine"
cagctgtaacaaactactgcaaacttcatggcttaaaacaatgcaaatttgtcctcttaccgtcccagaggttggaagtttgaaatgggtcttatgagctaaaatcaagatgtgggcagggc

SEQ ID NO: 3600 - DNA, 122 bp, Homo sapiens
  misc_feature (61)..(62): /note="This region represents a CpG dinucleotide"
  misc_feature (61)..(61): /note="Nucleotide may be methylated to form 5-methylcytosine"
caaatttctaaagcagggagattctgaaaagtcgcccgtctggttctcaaagcagtcgcccgtcctggttctccaggatgcctgggtcagagcatgaataaccaccccgctccccacgcacg

SEQ ID NO: 3601 - DNA, 122 bp, Homo sapiens
  misc_feature (61)..(62): /note="This region represents a CpG dinucleotide"
  misc_feature (61)..(61): /note="Nucleotide may be methylated to form 5-methylcytosine"
agtgaagctggttggtccacaccactataattcaaggtactaccttataacagtcactcacgtggcaaaaatattatctgagtcagtaaaatagtttctgatttgctagccttgtaaaccta

SEQ ID NO: 3602 - DNA, 122 bp, Homo sapiens
  misc_feature (61)..(62): /note="This region represents a CpG dinucleotide"
  misc_feature (61)..(61): /note="Nucleotide may be methylated to form 5-methylcytosine"
agatagtcactcaacctcacctgtccaaaagcagaagagaaacgtaatacagcaaagcaacgtgcagtctgtttcacaggctacatgactcaggaaatgaagaaggatttagatctttacaa

SEQ ID NO: 3603 - DNA, 122 bp, Homo sapiens
  misc_feature (61)..(62): /note="This region represents a CpG dinucleotide"
  misc_feature (61)..(61): /note="Nucleotide may be methylated to form 5-methylcytosine"
cacttgcccttcccttccatacctttgcctggtgaaccacacttgactcacctcttaccacgcctttctgggctggaccctagcacctgggatattcctttgccacaggcacaccctcctta

SEQ ID NO: 3604 - DNA, 122 bp, Homo sapiens
  misc_feature (61)..(62): /note="This region represents a CpG dinucleotide"
  misc_feature (61)..(61): /note="Nucleotide may be methylated to form 5-methylcytosine"
gtttttacctgttgtctctgagtaattaacagagtgccactttccctctcaaaagtgtcccgtttggatgacaaataacatggcatccttcctgtaggtgaaacagccaaaatgattgctcc

SEQ ID NO: 3605 - DNA, 122 bp, Homo sapiens
  misc_feature (61)..(62): /note="This region represents a CpG dinucleotide"
  misc_feature (61)..(61): /note="Nucleotide may be methylated to form 5-methylcytosine"
ggcctctctgtctatcattttttgacctcaggtcagagcgatagaaagggggaaaactaccgacacagctcctgccatgaagtcctggagaagaataagtgactgtttgtcccgcatgggtt

SEQ ID NO: 3606 - DNA, 122 bp, Homo sapiens
  misc_feature (61)..(62): /note="This region represents a CpG dinucleotide"
  misc_feature (61)..(61): /note="Nucleotide may be methylated to form 5-methylcytosine"
taattactgggcaggaagtgtcctctaagcctctaagcagggcagatgggcaggaggatgcggagatgaacatgactcaggccttgctctcaaggccctaacagcctggcagggagcgagat

SEQ ID NO: 3607 - DNA, 122 bp, Homo sapiens
  misc_feature (61)..(62): /note="This region represents a CpG dinucleotide"
  misc_feature (61)..(61): /note="Nucleotide may be methylated to form 5-methylcytosine"
tcaagagtggctaagcagagcctcagtcttttgtgacgtagccacaggagtcataactgtcgtttctgcaatatcctgttgattacacaggataggtcagccctattcattgtgggaggtga

SEQ ID NO: 3608 - DNA, 122 bp, Homo sapiens
  misc_feature (61)..(62): /note="This region represents a CpG dinucleotide"
  misc_feature (61)..(61): /note="Nucleotide may be methylated to form 5-methylcytosine"
ttggtgtggcaagttggctgctagaagactttgactggtagagaaataaatgcttaaatccgacctgcaacaagattgttctggctttgtcagcaggcttcttgacctgttgcttctagaac

SEQ ID NO: 3609 - DNA, 122 bp, Homo sapiens
  misc_feature (61)..(62): /note="This region represents a CpG dinucleotide"
  misc_feature (61)..(61): /note="Nucleotide may be methylated to form 5-methylcytosine"
ggcgaatggcagcacctggctggaaaaggagtgaggggaagtatgggtggctgattgtgacggaaacacaaggctgtacagcactggccatgttccttgagtcaaaatgatccaggtggctt

SEQ ID NO: 3610 - DNA, 122 bp, Homo sapiens
  misc_feature (61)..(62): /note="This region represents a CpG dinucleotide"
  misc_feature (61)..(61): /note="Nucleotide may be methylated to form 5-methylcytosine"
ttgccctggtttccttttgtcactgtgtggtagaatgctgactcaccaacttacaggatacggcaattttccattgcagaatccattatgttgcaatagtaaacgctgaaagatttcataga

SEQ ID NO: 3611 - DNA, 122 bp, Homo sapiens
  misc_feature (61)..(62): /note="This region represents a CpG dinucleotide"
  misc_feature (61)..(61): /note="Nucleotide may be methylated to form 5-methylcytosine"
gctcaggcccaccctgtgctgtgcaggttgggaaaccgagggcagacggttcaagccttgcgcagggtcacatgctgggccctggcccccatccagaccttgttgctttcaccagagggcag

SEQ ID NO: 3612 - DNA, 122 bp, Homo sapiens
  misc_feature (61)..(62): /note="This region represents a CpG dinucleotide"
  misc_feature (61)..(61): /note="Nucleotide may be methylated to form 5-methylcytosine"
gttcccaaattccattacgtcattcttgcaccacaggggttttaacagctctcttgccctcgcttctgggagcctcaagcatgcgtgtcacagactgattctgcaattcctgtgaaacctgt

SEQ ID NO: 3613 - DNA, 122 bp, Homo sapiens
  misc_feature (61)..(62): /note="This region represents a CpG dinucleotide"
  misc_feature (61)..(61): /note="Nucleotide may be methylated to form 5-methylcytosine"
ccaaagggcgtgggttgccaaatgcttaggaacttccgctttcagtgtttagcaggttagcggggaaatattagtcccattatttaagctgagatttgcgaggcctacacgttttttttttc

SEQ ID NO: 3614 - DNA, 122 bp, Homo sapiens
  misc_feature (61)..(62): /note="This region represents a CpG dinucleotide"
  misc_feature (61)..(61): /note="Nucleotide may be methylated to form 5-methylcytosine"
ttgactgttctccgtctctggttaagacgcactgaagacaaattgcagttgaggcttacacgtgggtcaggagctatcacctgttgcaggagagagcttacacactattactaaagtcaata

SEQ ID NO: 3615 - DNA, 122 bp, Homo sapiens
  misc_feature (61)..(62): /note="This region represents a CpG dinucleotide"
  misc_feature (61)..(61): /note="Nucleotide may be methylated to form 5-methylcytosine"
ctgctgagagcaaaactgatccagtgcacactccaaagtggataatccctgccagcaggtcgcttgtgcctccggaggttgccttttaacacaattaatgatgatgacgatgacggtgataa

SEQ ID NO: 3616 - DNA, 122 bp, Homo sapiens
  misc_feature (61)..(62): /note="This region represents a CpG dinucleotide"
  misc_feature (61)..(61): /note="Nucleotide may be methylated to form 5-methylcytosine"
acaggcttaagccaccgcgcccagcctactctgttttattaaagagaactgaagttctgacgggttcagaacctctcacaaagtggctgaaggaacaccagctttagcagaaactgatgaaa

SEQ ID NO: 3617 - DNA, 122 bp, Homo sapiens
  misc_feature (61)..(62): /note="This region represents a CpG dinucleotide"
  misc_feature (61)..(61): /note="Nucleotide may be methylated to form 5-methylcytosine"
attcatgaacatttaccagattctccaaagggcgtgggttgccaaatgcttaggaacttccgctttcagtgtttagcaggttagcggggaaatattagtcccattatttaagctgagatttg

SEQ ID NO: 3618 - DNA, 122 bp, Homo sapiens
  misc_feature (61)..(62): /note="This region represents a CpG dinucleotide"
  misc_feature (61)..(61): /note="Nucleotide may be methylated to form 5-methylcytosine"
gcctcagaatcagagatgaaggaaattttagagactcgacctaattccataatttagagacgaggaggctgaagtcctttagtgtgaaatgatttactagacctcaatagctcatatggtga

SEQ ID NO: 3619 - DNA, 122 bp, Homo sapiens
  misc_feature (61)..(62): /note="This region represents a CpG dinucleotide"
  misc_feature (61)..(61): /note="Nucleotide may be methylated to form 5-methylcytosine"
tgcaagtacaataacaagtttcacagggccattctttacaatacactttaatatctatgacgcaatgccaaaactcacatcagtgaaattaattctacaaggcacaaaacacaagtgtacaa

SEQ ID NO: 3620 - DNA, 122 bp, Homo sapiens
  misc_feature (61)..(62): /note="This region represents a CpG dinucleotide"
  misc_feature (61)..(61): /note="Nucleotide may be methylated to form 5-methylcytosine"
tgtagcctaaacattggcttttaatattcatcctcatgtcttactctctccttgcttcctcgtactggatggtgactgtgtgaatggacagaagggtttggcagagctttgctggtaccact

SEQ ID NO: 3621 - DNA, 122 bp, Homo sapiens
  misc_feature (61)..(62): /note="This region represents a CpG dinucleotide"
  misc_feature (61)..(61): /note="Nucleotide may be methylated to form 5-methylcytosine"
ttaactcaccagtacaatagtagtaatactcattgtaagttgctgaattttgcaacttaacgaatgacaagaacatggcataggtcagtgatgcatgttatgcttaattttgagtgagtgac

SEQ ID NO: 3622 - DNA, 122 bp, Homo sapiens
  misc_feature (61)..(62): /note="This region represents a CpG dinucleotide"
  misc_feature (61)..(61): /note="Nucleotide may be methylated to form 5-methylcytosine"
tgcctccctgttggggtccacgggcagcctgtccatgggtgctttgtcctttcaggctggcgtgcaggtgcccaacccacactcctgccccacaggcacaacaggcaggacaggccccatag

SEQ ID NO: 3623 - DNA, 122 bp, Homo sapiens
  misc_feature (61)..(62): /note="This region represents a CpG dinucleotide"
  misc_feature (61)..(61): /note="Nucleotide may be methylated to form 5-methylcytosine"
gcttacctgcatctggtgtcaagaatcagaatgggagagacagaacctggagaaaggctgcgtcttcagagtggggctccactcctccagctccagggctggacctgaaggttgtctttcca

SEQ ID NO: 3624 - DNA, 122 bp, Homo sapiens
  misc_feature (61)..(62): /note="This region represents a CpG dinucleotide"
  misc_feature (61)..(61): /note="Nucleotide may be methylated to form 5-methylcytosine"
gacctggtgaaatcctatttcagacctaatctgggagcctgcaagtgacaacagcctttgcggtccttagacagcttggcctggaggagaacacatgaaagaaaggtttgtttctgcttaat

SEQ ID NO: 3625 - DNA, 122 bp, Homo sapiens
  misc_feature (61)..(62): /note="This region represents a CpG dinucleotide"
  misc_feature (61)..(61): /note="Nucleotide may be methylated to form 5-methylcytosine"
cactgagcaggaacaacgcgtattaaacttgtatttacagagctgattcacaaatgtagccgcagcagctgcggctggaaaaaatttcactttctagatcaggttgttcctctctgagtggc

SEQ ID NO: 3626 - DNA, 122 bp, Homo sapiens
  misc_feature (61)..(62): /note="This region represents a CpG dinucleotide"
  misc_feature (61)..(61): /note="Nucleotide may be methylated to form 5-methylcytosine"
gggctcccgtggatgctggtaccactcttccttaatctgggtgctggttactcaacgtttcgtgaaaattcacgtatctgtacactaatgagttatacatttttccgtatatatgtcatact

SEQ ID NO: 3627 - DNA, 122 bp, Homo sapiens
  misc_feature (61)..(62): /note="This region represents a CpG dinucleotide"
  misc_feature (61)..(61): /note="Nucleotide may be methylated to form 5-methylcytosine"
ggagccaggcttatgtgtgaccaagcttcttagcagagcatttgggcaaggcctttacaccgcatgggagtctggagttttcagtaacttgccacacaggaaggccacacagctggtaggca

SEQ ID NO: 3628 - DNA, 122 bp, Homo sapiens
  misc_feature (61)..(62): /note="This region represents a CpG dinucleotide"
  misc_feature (61)..(61): /note="Nucleotide may be methylated to form 5-methylcytosine"
tgagctggtttcagcacaccagtgtagtcttggtctcctttgtcatttttttctgaatgccgtctttccagtatgcaggctttgactaagcatttaggcagaactgaaacattcaaattaat

SEQ ID NO: 3629 - DNA, 122 bp, Homo sapiens
  misc_feature (61)..(62): /note="This region represents a CpG dinucleotide"
  misc_feature (61)..(61): /note="Nucleotide may be methylated to form 5-methylcytosine"
cttgcgtctctcttttctacacctcagttttgttgttttcccattgcatcaatgtttatacgtagagctgttcagaaaaagcagaagctggagacaggaaaactactaatcacaacagaaac

SEQ ID NO: 3630 - DNA, 122 bp, Homo sapiens
  misc_feature (61)..(62): /note="This region represents a CpG dinucleotide"
  misc_feature (61)..(61): /note="Nucleotide may be methylated to form 5-methylcytosine"
acctacagctgatgggctagtctgacaccctgttcaaggccaactcacagttccaggtgacgtgaataactgccctggcctggccattcacccttgcctgcaggtgtcccacacccagaagt

SEQ ID NO: 3631 - DNA, 122 bp, Homo sapiens
  misc_feature (61)..(62): /note="This region represents a CpG dinucleotide"
  misc_feature (61)..(61): /note="Nucleotide may be methylated to form 5-methylcytosine"
ttggagaagacaccagcagcaaattcttgctgggccttctgaaagctggcacctgtgcggcggtataaggagtggatctgcaagtagaggacaaagacattaccgcccattccagccactgg

SEQ ID NO: 3632 - DNA, 122 bp, Homo sapiens
  misc_feature (61)..(62): /note="This region represents a CpG dinucleotide"
  misc_feature (61)..(61): /note="Nucleotide may be methylated to form 5-methylcytosine"
cttacccctgcctgagtctgtggatcctcacctagatgtggggcccatagatctgcccagcgcatttgctgcctcatgttcccaggcacctgactgtaggccatagcctcaccctgcacagg

SEQ ID NO: 3633 - DNA, 122 bp, Homo sapiens
  misc_feature (61)..(62): /note="This region represents a CpG dinucleotide"
  misc_feature (61)..(61): /note="Nucleotide may be methylated to form 5-methylcytosine"
tagcaggatcatgaaacttaatgagcctcttcagaactctgtggaaagaagtgccggtggcggttggctaagacataaatctgggctacaccaatgttgtccctgaagtcatctactataga

SEQ ID NO: 3634 - DNA, 122 bp, Homo sapiens
  misc_feature (61)..(62): /note="This region represents a CpG dinucleotide"
  misc_feature (61)..(61): /note="Nucleotide may be methylated to form 5-methylcytosine"
tcaccaggtggcacgtggtaggaatctgggtcatgctgtgtaaccttcctggttaggccacgaagaagtgagagaagtgcagtccatatgatttggtccataaatacaaaacttctccttga

SEQ ID NO: 3635 - DNA, 122 bp, Homo sapiens
  misc_feature (61)..(62): /note="This region represents a CpG dinucleotide"
  misc_feature (61)..(61): /note="Nucleotide may be methylated to form 5-methylcytosine"
ggaacagtcaatgagtcaacagcctgtctgcatgggtaccttctgtattgttcaccttcacgcatggagtaaggcctgatctaaaaactaccaccagcccgaagccatccctggcagagaaa

SEQ ID NO: 3636 - DNA, 122 bp, Homo sapiens
  misc_feature (61)..(62): /note="This region represents a CpG dinucleotide"
  misc_feature (61)..(61): /note="Nucleotide may be methylated to form 5-methylcytosine"
cctgatctgaccaggaaatgaagtccacgtttcaggagggggtggggtggggtgaggtgtcgagtccctccacccagggtgccaggctcagcaggccctgccctaatggctggctgatgttt

SEQ ID NO: 3637 - DNA, 122 bp, Homo sapiens
  misc_feature (61)..(62): /note="This region represents a CpG dinucleotide"
  misc_feature (61)..(61): /note="Nucleotide may be methylated to form 5-methylcytosine"
ccccttccaaaagagaattatcaggtccaaactgtcaatagtgctgaggttgagaaatcacgatctagaagtacaggctttgcttgtagcccttgatctgcaagaatcctactttacagtaa

SEQ ID NO: 3638 - DNA, 122 bp, Homo sapiens
  misc_feature (61)..(62): /note="This region represents a CpG dinucleotide"
  misc_feature (61)..(61): /note="Nucleotide may be methylated to form 5-methylcytosine"
ccatgtgggtgagtcatctcacaagcagatactcaagtatatcaagccttcagatgactgcggcccaagccaatatcttgagtgcatcttcttgagagaccctgagccaggaccatctagca

SEQ ID NO: 3639 - DNA, 122 bp, Homo sapiens
  misc_feature (61)..(62): /note="This region represents a CpG dinucleotide"
  misc_feature (61)..(61): /note="Nucleotide may be methylated to form 5-methylcytosine"
aaagacaggggcagggagagctattaggaagctccttggatggcccagacatgaggtcatcggggctggaaatactgcgtgacaatgggagatggcagggtaaggaaagaacatatgcaaga

SEQ ID NO: 3640 - DNA, 122 bp, Homo sapiens
  misc_feature (61)..(62): /note="This region represents a CpG dinucleotide"
  misc_feature (61)..(61): /note="Nucleotide may be methylated to form 5-methylcytosine"
gaggtgctggctctgagctgtctgagtgccagggccacagatgactgcaggcagacacttcgtccttgctcctcccgccctcttgctcctgcagggcacctgggttttgggtgccttactcc

SEQ ID NO: 3641 - DNA, 122 bp, Homo sapiens
  misc_feature (61)..(62): /note="This region represents a CpG dinucleotide"
  misc_feature (61)..(61): /note="Nucleotide may be methylated to form 5-methylcytosine"
aaacttgttctcccaggatccagactggaaatggggtttatagggccctgactgccagggcgcagaggggagggaggagctgggaaggggaacctgctagcactgctcttcttcttgagaaa

SEQ ID NO: 3642 - DNA, 122 bp, Homo sapiens
  misc_feature (61)..(62): /note="This region represents a CpG dinucleotide"
  misc_feature (61)..(61): /note="Nucleotide may be methylated to form 5-methylcytosine"
accctgggctccaccaccccagggttgattcaaaatgatgcgtgaaaggctggcattatacgaagctatgtcttgtttagaggaagtgaactgtcacgctggaaacactaataaaaccgagg

SEQ ID NO: 3643 - DNA, 122 bp, Homo sapiens
  misc_feature (61)..(62): /note="This region represents a CpG dinucleotide"
  misc_feature (61)..(61): /note="Nucleotide may be methylated to form 5-methylcytosine"
ctagattctcctgactgctggcattccttggcttatggttgtatcactccagtatctgcccgtgccttcatatcgccttctctgtggatgtgtcacatctccttctgcttttctcttataag

SEQ ID NO: 3644 - DNA, 122 bp, Homo sapiens
  misc_feature (61)..(62): /note="This region represents a CpG dinucleotide"
  misc_feature (61)..(61): /note="Nucleotide may be methylated to form 5-methylcytosine"
ctagcatagttgaatgtattccctttcctaccaggagttcagaggatcattaaagactcacgctggccatagggtgagtaataagatgctgttttctgggcgtcgccaaaatcatagaccac

SEQ ID NO: 3645 - DNA, 122 bp, Homo sapiens
  misc_feature (61)..(62): /note="This region represents a CpG dinucleotide"
  misc_feature (61)..(61): /note="Nucleotide may be methylated to form 5-methylcytosine"
tattgagagctccaattccacctctgctcttccagtctaaagatttctttcttctggcagcgtgggctttggagtaagatagacctgtatgtgaatcttggcctcaccacttactagcttta

SEQ ID NO: 3646 - DNA, 122 bp, Homo sapiens
  misc_feature (61)..(62): /note="This region represents a CpG dinucleotide"
  misc_feature (61)..(61): /note="Nucleotide may be methylated to form 5-methylcytosine"
ggaaaacaaaaaacgaacgacaatcagatgctccgtgtctcccaaactgcacacgctttacggagaaggagagttgcaccggggcttgtcaatggcagagccttcctgaaagtcaggttctc

SEQ ID NO: 3647 - DNA, 122 bp, Homo sapiens
  misc_feature (61)..(62): /note="This region represents a CpG dinucleotide"
  misc_feature (61)..(61): /note="Nucleotide may be methylated to form 5-methylcytosine"
agtgccctggaaggaagttgctcaatctaagtggaaaccaaaccctagctttggtttcctcgggaaattttgcagtaactacttctctataattagtgagcgtgggtttgaccaagccctta

SEQ ID NO: 3648 - DNA, 122 bp, Homo sapiens
  misc_feature (61)..(62): /note="This region represents a CpG dinucleotide"
  misc_feature (61)..(61): /note="Nucleotide may be methylated to form 5-methylcytosine"
ctctgagtgtgtttgtgctgggttcttacaccttgaggcatgattttcctgtctcacagacgaagatgttgaggctccaagaggttacgtgcctttcaggaacccatattaagtggtaacaa

SEQ ID NO: 3649 - DNA, 122 bp, Homo sapiens
  misc_feature (61)..(62): /note="This region represents a CpG dinucleotide"
  misc_feature (61)..(61): /note="Nucleotide may be methylated to form 5-methylcytosine"
ctcccatcttaaaggctctgttaaagttccatttcttccacaaagcatcctctttctaatcggctgtatttctgtcctgtcttctgttttagacaatacttactattgtcaagtgtggtatt

SEQ ID NO: 3650 - DNA, 122 bp, Homo sapiens
  misc_feature (61)..(62): /note="This region represents a CpG dinucleotide"
  misc_feature (61)..(61): /note="Nucleotide may be methylated to form 5-methylcytosine"
acataatcaccataaccagtaccatcaagtttaaagtcagtgaagcgtaaaatgactttacggtgatcaccagtgtctattaaccaggtgcaattgcttccaggaggataaaagtctggata

SEQ ID NO: 3651 - DNA, 122 bp, Homo sapiens
  misc_feature (61)..(62): /note="This region represents a CpG dinucleotide"
  misc_feature (61)..(61): /note="Nucleotide may be methylated to form 5-methylcytosine"
ccctccctcagtcaaatcagtgtagcaaaatgtattacccagtcacaacacaggatgttgcgaggaaacaagggtggtagcaacaaatgcagcctattctgaacactgcaaggtgcatgcac

SEQ ID NO: 3652 - DNA, 122 bp, Homo sapiens
  misc_feature (61)..(62): /note="This region represents a CpG dinucleotide"
  misc_feature (61)..(61): /note="Nucleotide may be methylated to form 5-methylcytosine"
gttcctaccccagatttcctgagggcagccatggagcatagagtgggctctgtgccagcccgtgttctcctattgaggtagagttcacaggctgcaaaggggaagccttttcagagacagct

SEQ ID NO: 3653 - DNA, 122 bp, Homo sapiens
  misc_feature (61)..(62): /note="This region represents a CpG dinucleotide"
  misc_feature (61)..(61): /note="Nucleotide may be methylated to form 5-methylcytosine"
agtcccatgcccagagaacctcatcactcccaggcaaactggggccactgatcactccagcgggaaatcgtatactatcgtggcttaggtcctagatctgctactcaccagccacttgacac

SEQ ID NO: 3654 - DNA, 122 bp, Homo sapiens
  misc_feature (61)..(62): /note="This region represents a CpG dinucleotide"
  misc_feature (61)..(61): /note="Nucleotide may be methylated to form 5-methylcytosine"
cctagattcatttaatccttcagatgagcctgctgtctgtccctgtatatgcagaacatgcgcagaaaaaaagtgagcctcagaaaaattaaatagcttgttcaaggtcatacagcttgtaa

SEQ ID NO: 3655 - DNA, 122 bp, Homo sapiens
  misc_feature (61)..(62): /note="This region represents a CpG dinucleotide"
  misc_feature (61)..(61): /note="Nucleotide may be methylated to form 5-methylcytosine"
ataagcttcctgagagcatgaataagcctttctgtcttattcatcattgtatcccctgttcggtacctagaacagtgcttggcatgttgcaggcactgaaatatttattgaatgaataaatg

SEQ ID NO: 3656 - DNA, 122 bp, Homo sapiens
  misc_feature (61)..(62): /note="This region represents a CpG dinucleotide"
  misc_feature (61)..(61): /note="Nucleotide may be methylated to form 5-methylcytosine"
aaagggctggtggcagggatcaggggacatgactggaagcaaagaagtcagttaggatgccgtggtgttcatctacacaatggatgacagtgacctgagttaaggaaaggaaagtggagagg

SEQ ID NO: 3657 - DNA, 122 bp, Homo sapiens
  misc_feature (61)..(62): /note="This region represents a CpG dinucleotide"
  misc_feature (61)..(61): /note="Nucleotide may be methylated to form 5-methylcytosine"
cctcaggtgatccacccgcctcgacctcccaaggtgctgggattacaggcatgagccacccggccttcctcatcataatgtgtatgtccaaaatgtatgcatcagcagtaaaagtgaaagcc

SEQ ID NO: 3658 - DNA, 122 bp, Homo sapiens
  misc_feature (61)..(62): /note="This region represents a CpG dinucleotide"
  misc_feature (61)..(61): /note="Nucleotide may be methylated to form 5-methylcytosine"
cattgcactccagcttgggcaacaagagcaaaattccgtccaaaaaaaaacaaaaacaaacgaacaaaaaaacaggccaggggcggtgcctcaagcctgtaatcctagcactttgggagggt

SEQ ID NO: 3659 - DNA, 122 bp, Homo sapiens
  misc_feature (61)..(62): /note="This region represents a CpG dinucleotide"
  misc_feature (61)..(61): /note="Nucleotide may be methylated to form 5-methylcytosine"
ctctctctgcattgctcagccctcggttgatcccttcaatgaccttctcaatggggtcatcgctggccgcccatccagacagggcccccagtagcagaaggagggagcaggagccgaccaga

SEQ ID NO: 3660 - DNA, 122 bp, Homo sapiens
  misc_feature (61)..(62): /note="This region represents a CpG dinucleotide"
  misc_feature (61)..(61): /note="Nucleotide may be methylated to form 5-methylcytosine"
ctgagctagtgcaaaacaagtgtccatagtaatcctgtggcagcccaatgctgccttcgtcgctacctctccacccctcaaatcaccatccattggcagtagcctctgccacccaggttcaa

SEQ ID NO: 3661 - DNA, 122 bp, Homo sapiens
  misc_feature (61)..(62): /note="This region represents a CpG dinucleotide"
  misc_feature (61)..(61): /note="Nucleotide may be methylated to form 5-methylcytosine"
aagcatggtgtcagcacctgctggtgaaggccttcaatagctcctactcatgtcagaaggcgtaggagagcctgtctgtagagatcatatagtgagagacagggaagtgccaggctcttttt

SEQ ID NO: 3662 - DNA, 122 bp, Homo sapiens
  misc_feature (61)..(62): /note="This region represents a CpG dinucleotide"
  misc_feature (61)..(61): /note="Nucleotide may be methylated to form 5-methylcytosine"
ttcaacctcatctcatgcaatgattttatatattgctgtcatggcatttatcctgcattacggtaatctgcattagaatgtgtgctgttaggaatatgaaacattgtctaatttgcttcttt

SEQ ID NO: 3663 - DNA, 122 bp, Homo sapiens
  misc_feature (61)..(62): /note="This region represents a CpG dinucleotide"
  misc_feature (61)..(61): /note="Nucleotide may be methylated to form 5-methylcytosine"
cattcccctctgtatttctttctagtggccacattattctagtttctgcatccatcttcacgttgcacctccttttctgtgtatcttttataaagacacttgtcattggatttagggcctac

SEQ ID NO: 3664 - DNA, 122 bp, Homo sapiens
  misc_feature (61)..(62): /note="This region represents a CpG dinucleotide"
  misc_feature (61)..(61): /note="Nucleotide may be methylated to form 5-methylcytosine"
ataaaggtggggagaatattacataaacaatacagctggcaccatctccagccctggatacgccccacaacgtgtggagcagcctcaggctcagcttcctgcgactctcatcataaaagagc

SEQ ID NO: 3665 - DNA, 122 bp, Homo sapiens
  misc_feature (61)..(62): /note="This region represents a CpG dinucleotide"
  misc_feature (61)..(61): /note="Nucleotide may be methylated to form 5-methylcytosine"
agaggaaatcatcctctctctgaacccgtgtagcattttatccagggatttatgtcttcccgcctcagcttgtggctatttgttggctttacctcctctgatgaactgtatgctcctgagga

SEQ ID NO: 3666 - DNA, 122 bp, Homo sapiens
  misc_feature (61)..(62): /note="This region represents a CpG dinucleotide"
  misc_feature (61)..(61): /note="Nucleotide may be methylated to form 5-methylcytosine"
cctgctgcgcaccaagtccgcttgctgaggagaagggtgtctcacctggcacaagggccccgctccagagtggccgcacccagagcagcttctgtgacacccagaaccccagggtacgtgag

SEQ ID NO: 3667 - DNA, 122 bp, Homo sapiens
  misc_feature (61)..(62): /note="This region represents a CpG dinucleotide"
  misc_feature (61)..(61): /note="Nucleotide may be methylated to form 5-methylcytosine"
ggagtgagtgtatggaaagagttggggaggaaatggcccagcaatgaggtcagtaacaggcggaaaggggacaattgcattttatttatggtcatgaaatgcttgtcccccaccccaccctt

SEQ ID NO: 3668 - DNA, 122 bp, Homo sapiens
  misc_feature (61)..(62): /note="This region represents a CpG dinucleotide"
  misc_feature (61)..(61): /note="Nucleotide may be methylated to form 5-methylcytosine"
gtaaataaattaactttcaacatcctttttggtctttatgactcaataattgtgactcaacgatataaacttaggaagatgaaattcagatttcagttgagaagcaatgctgtttcacctcc

SEQ ID NO: 3669 - DNA, 122 bp, Homo sapiens
  misc_feature (61)..(62): /note="This region represents a CpG dinucleotide"
  misc_feature (61)..(61): /note="Nucleotide may be methylated to form 5-methylcytosine"
gagagagcctgtctatctgtggatgaagtcacttcttagaaggaaatacagccaagatgacgaagatgatgtagacatcatcttgcattgcttgaagccagattcacttcctgacttcctaa

SEQ ID NO: 3670 - DNA, 122 bp, Homo sapiens
  misc_feature (61)..(62): /note="This region represents a CpG dinucleotide"
  misc_feature (61)..(61): /note="Nucleotide may be methylated to form 5-methylcytosine"
tcagctgtgattttgtttgattttagggattattctttttctgaatctgagcaatgttagcgtgtaaaatactcacgcccacagctttgactgggtgagaagttatcataaatcatattgag

SEQ ID NO: 3671 - DNA, 122 bp, Homo sapiens
  misc_feature (61)..(62): /note="This region represents a CpG dinucleotide"
  misc_feature (61)..(61): /note="Nucleotide may be methylated to form 5-methylcytosine"
aaccaaggtctcagggccctggaaaaggtgtgttctaatcacaagtgctatttccccacccgctcccatgacgggtcagctgcaggcatcagcttcagagaagtgggcttctagggctcctg

SEQ ID NO: 3672 - DNA, 122 bp, Homo sapiens
  misc_feature (61)..(62): /note="This region represents a CpG dinucleotide"
  misc_feature (61)..(61): /note="Nucleotide may be methylated to form 5-methylcytosine"
aagacctgttccctagtcttgattctgctgttggcttactgtgtcaccttgggcaggtctcgtcatctttgatgtctcacagttgcttcatctgttaaacagggagctcagtgtctgtttgt

SEQ ID NO: 3673 - DNA, 122 bp, Homo sapiens
  misc_feature (61)..(62): /note="This region represents a CpG dinucleotide"
  misc_feature (61)..(61): /note="Nucleotide may be methylated to form 5-methylcytosine"
gcagagggggcattcctggttaggtgttgctagattgcaattcagagcaacctccttcaacggaaagtctatctaactagtaactggcagattcacatcacgaaaaacaaactgtaataata

SEQ ID NO: 3674 - DNA, 122 bp, Homo sapiens
  misc_feature (61)..(62): /note="This region represents a CpG dinucleotide"
  misc_feature (61)..(61): /note="Nucleotide may be methylated to form 5-methylcytosine"
ctcccaaaggcttcttgctggggtcagttctgcgggagagtctgtatttgccagtcagtacgtttggagtgatctagctgccactaaccagcctttgccccccgggatccctgttgtgaaac

SEQ ID NO: 3675 - DNA, 122 bp, Homo sapiens
  misc_feature (61)..(62): /note="This region represents a CpG dinucleotide"
  misc_feature (61)..(61): /note="Nucleotide may be methylated to form 5-methylcytosine"
cctgtctcccctccccagttctcacagcccgaggaagatgctgcggcgattcccactttacggctaatgccaggcccaggtatgccatactgctgtcagggctctcaccaccccaccttggg

SEQ ID NO: 3676 - DNA, 122 bp, Homo sapiens
  misc_feature (61)..(62): /note="This region represents a CpG dinucleotide"
  misc_feature (61)..(61): /note="Nucleotide may be methylated to form 5-methylcytosine"
gaaggattactcttattacttaatcagtggcatgttcctgatgctgaaaaaccatcctgacgcacatgccatgcatgatgagtgttaggtgtccccactgctggatgaacacgtccactgtt

SEQ ID NO: 3677 - DNA, 122 bp, Homo sapiens
  misc_feature (61)..(62): /note="This region represents a CpG dinucleotide"
  misc_feature (61)..(61): /note="Nucleotide may be methylated to form 5-methylcytosine"
aaaagtggttatgtggttactctctatataagggcaatcaggtccttaaggttgagttcacgcccacagcttggggtctggcagaagtacaatactctgacagtgtcttcctgaatgactca

SEQ ID NO: 3678 - DNA, 122 bp, Homo sapiens
  misc_feature (61)..(62): /note="This region represents a CpG dinucleotide"
  misc_feature (61)..(61): /note="Nucleotide may be methylated to form 5-methylcytosine"
gaagagggaaggcgttggccccggggaacgaagagctgagtcacatgctcaacgtgaccacggctgttctgacactgcgccagggctggcacccacactgaacgtgcaccacccagatggca

SEQ ID NO: 3679 - DNA, 122 bp, Homo sapiens
  misc_feature (61)..(62): /note="This region represents a CpG dinucleotide"
  misc_feature (61)..(61): /note="Nucleotide may be methylated to form 5-methylcytosine"
aaacaaaaccgcatccttgagcaagccctcaaaccgagtccatttcccggcctcctcccccgtggtctgcgtatttccacagagctcaaaatcagaccaggccagagctccccaaacatttg

SEQ ID NO: 3680 - DNA, 122 bp, Homo sapiens
  misc_feature (61)..(62): /note="This region represents a CpG dinucleotide"
  misc_feature (61)..(61): /note="Nucleotide may be methylated to form 5-methylcytosine"
gcaagcgttttatgatgactgcattgattattgttatcaagatttcaccccttggtctggcgtggtggctcatgcctgtaatctcaacactttgggaggcccaggcaggaggatcacttgag

SEQ ID NO: 3681 - DNA, 122 bp, Homo sapiens
  misc_feature (61)..(62): /note="This region represents a CpG dinucleotide"
  misc_feature (61)..(61): /note="Nucleotide may be methylated to form 5-methylcytosine"
cttctgccccccaccgggggagctgtgtaggtttctcctttggaaaatttattgttggggcgattgctattattgccggctgtaagggaagataagacacaaaaatcctttgtctttgtgca

SEQ ID NO: 3682 - DNA, 122 bp, Homo sapiens
  misc_feature (61)..(62): /note="This region represents a CpG dinucleotide"
  misc_feature (61)..(61): /note="Nucleotide may be methylated to form 5-methylcytosine"
acaccactccactatccctgctacctgcaatataaaaaaaattaaccagatgctgcctgccgtctagtgttgcccaataggtgacaactgttatgaaacatctactgttagttgagctatta

SEQ ID NO: 3683 - DNA, 122 bp, Homo sapiens
  misc_feature (61)..(62): /note="This region represents a CpG dinucleotide"
  misc_feature (61)..(61): /note="Nucleotide may be methylated to form 5-methylcytosine"
gtgatctttagcaagttacttaatacctctgaaactcaatgtttcacatcattcacatctcgatgaaaataataatacctacatcacaggattgttgtgagaagtaaatgaaacattatgtg

SEQ ID NO: 3684 - DNA, 122 bp, Homo sapiens
  misc_feature (61)..(62): /note="This region represents a CpG dinucleotide"
  misc_feature (61)..(61): /note="Nucleotide may be methylated to form 5-methylcytosine"
tatatgcatgagccactgtgcccagccctcaatcctttgaattgtatgaaagttgagtcacgctgctcagcagcataatggaaaagaaataattctaactttggcatgaagacctaaagtac

SEQ ID NO: 3685 - DNA, 122 bp, Homo sapiens
  misc_feature (61)..(62): /note="This region represents a CpG dinucleotide"
  misc_feature (61)..(61): /note="Nucleotide may be methylated to form 5-methylcytosine"
acaagattggcatggaagagataaagctaaggtggagttcaacagctcaggaggaggagtcgaagaaacctgggtttaggcaggtaggttctcatgtgaaagtcagtcagagaaatctcagt

SEQ ID NO: 3686 - DNA, 122 bp, Homo sapiens
  misc_feature (61)..(62): /note="This region represents a CpG dinucleotide"
  misc_feature (61)..(61): /note="Nucleotide may be methylated to form 5-methylcytosine"
caccatgttggtcaggctgatctcataacaatgccttcctaaacaatgcctaagcctgggcgtggtggttcacacctgtaatcccagcactttgggaggctcaggtgagtggatcacttgag

SEQ ID NO: 3687 - DNA, 122 bp, Homo sapiens
  misc_feature (61)..(62): /note="This region represents a CpG dinucleotide"
  misc_feature (61)..(61): /note="Nucleotide may be methylated to form 5-methylcytosine"
ttgtacatgttgattcattcacaccacatcccaagaaataatgctcttcctatgagattacgtataagaaaagtgcttttgaagggtgaatcattgtttattgtctctaatacacagtgcct

SEQ ID NO: 3688 - DNA, 122 bp, Homo sapiens
  misc_feature (61)..(62): /note="This region represents a CpG dinucleotide"
  misc_feature (61)..(61): /note="Nucleotide may be methylated to form 5-methylcytosine"
ctcgggtgatccgcccacttcggcttcccaaagtgctgggattatagacgtgagccaccgcgcccggcctggagtaacattttatagctagacagcagcctatgacaggatttcaaggactt

SEQ ID NO: 3689 - DNA, 122 bp, Homo sapiens
  misc_feature (61)..(62): /note="This region represents a CpG dinucleotide"
  misc_feature (61)..(61): /note="Nucleotide may be methylated to form 5-methylcytosine"
tcctgaagtgctaggattacaggcgtgagccatggtgcccggcctgttgatgagattctacgtgaaatatattgggcgttacctaagcactcagtcagtggtagttcttatagttgttgctt

SEQ ID NO: 3690 - DNA, 122 bp, Homo sapiens
  misc_feature (61)..(62): /note="This region represents a CpG dinucleotide"
  misc_feature (61)..(61): /note="Nucleotide may be methylated to form 5-methylcytosine"
gtagtggaggagactgacacagtgaataaaacaatccaaaacctgaaagctggctccagccgaggcctgatgatgtaaccatcctgtccccaaatcactggaacaaactccaagcacaacta

SEQ ID NO: 3691 - DNA, 122 bp, Homo sapiens
  misc_feature (61)..(62): /note="This region represents a CpG dinucleotide"
  misc_feature (61)..(61): /note="Nucleotide may be methylated to form 5-methylcytosine"
tcaactgagtaaagagtctccatcataagaaagagttgtataacctgtcttctacctgcacggctgagccctggccaagcaggtcattttagccatctcaatgagcgaggcacttcatggtg

SEQ ID NO: 3692 - DNA, 122 bp, Homo sapiens
  misc_feature (61)..(62): /note="This region represents a CpG dinucleotide"
  misc_feature (61)..(61): /note="Nucleotide may be methylated to form 5-methylcytosine"
ctgtgcacctcttcccagggccgcgttcggtgtgtcatgctggtagcttgcgatcagccacggaaggaatatttacactaaggaaattggccaatgcaacaatcagggctttactattttat

SEQ ID NO: 3693 - DNA, 122 bp, Homo sapiens
  misc_feature (61)..(62): /note="This region represents a CpG dinucleotide"
  misc_feature (61)..(61): /note="Nucleotide may be methylated to form 5-methylcytosine"
accacgccaggcagccaggccagaactcaccacaccaggaagccaggccaggagtcaccacgccaggcagccagggcactgagcgcatgacctatgctgactcatttaatcctcctgaccac

SEQ ID NO: 3694 - DNA, 122 bp, Homo sapiens
  misc_feature (61)..(62): /note="This region represents a CpG dinucleotide"
  misc_feature (61)..(61): /note="Nucleotide may be methylated to form 5-methylcytosine"
gatcttgcagttccatcccccatcaacattcatgggtgaaggctgcatgtgtgtgtgacacgataggtaagaattagctgctttccaaattaagacagagtgagtttcacttctgaataata

SEQ ID NO: 3695 - DNA, 122 bp, Homo sapiens
  misc_feature (61)..(62): /note="This region represents a CpG dinucleotide"
  misc_feature (61)..(61): /note="Nucleotide may be methylated to form 5-methylcytosine"
gacagcccatgacccagagacagcacacgtcggaggaaagccacagaatgaaagggcaaccgacccaagaaggagcagagcctgacaaacagatgttgaggaaagcagactcgatggaggag

SEQ ID NO: 3696 - DNA, 122 bp, Homo sapiens
  misc_feature (61)..(62): /note="This region represents a CpG dinucleotide"
  misc_feature (61)..(61): /note="Nucleotide may be methylated to form 5-methylcytosine"
tccatggatcagccacagtgactcaggggccctcaaaggaggccttactcacatgtagaacggcaaggcctgccagctcaccagagcagggttcctgtaaatcctgccaaccagtagatcta

SEQ ID NO: 3697 - DNA, 122 bp, Homo sapiens
  misc_feature (61)..(62): /note="This region represents a CpG dinucleotide"
  misc_feature (61)..(61): /note="Nucleotide may be methylated to form 5-methylcytosine"
agggtcaggcagagaggaatgctggggtgggtgagcttctattttatatggggtaatctgcggaaattgctcggataagatgccatcagaacagagacctgaaggaagtgaaaagtcatgca

SEQ ID NO: 3698 - DNA, 122 bp, Homo sapiens
  misc_feature (61)..(62): /note="This region represents a CpG dinucleotide"
  misc_feature (61)..(61): /note="Nucleotide may be methylated to form 5-methylcytosine"
tgatgttagcctgcctcacgcaattcatccacagtccttcccagaagttttcaaaaaccacgatgttgttttcaatgaaggccgacactctccactgaggcatgacagtgacagccactgtg

SEQ ID NO: 3699 - DNA, 122 bp, Homo sapiens
  misc_feature (61)..(62): /note="This region represents a CpG dinucleotide"
  misc_feature (61)..(61): /note="Nucleotide may be methylated to form 5-methylcytosine"
attccagcagcctcagtttcatagatcgttttcttatgcacattagataggacagtataacgtcctctcatgggccaatagggtgaatcaaaagctgcatagtcagtgcatctcaaacttaa

SEQ ID NO: 3700 - DNA, 122 bp, Homo sapiens
  misc_feature (61)..(62): /note="This region represents a CpG dinucleotide"
  misc_feature (61)..(61): /note="Nucleotide may be methylated to form 5-methylcytosine"
acatttgggaaagggacccatgtattcattatatctggtgagtcatcccaggtggcaccacgtgcaaccccatgggccagtgtcactaatcctttctctggagatatcacttattactatgg

SEQ ID NO: 3701 - DNA, 122 bp, Homo sapiens
  misc_feature (61)..(62): /note="This region represents a CpG dinucleotide"
  misc_feature (61)..(61): /note="Nucleotide may be methylated to form 5-methylcytosine"
ctgcttgatacagaacaaaaagagcttaacaggaccaacagggcttaagcccagacttgacgtaacagaaatgtgccaataggtaataggtaatttttctttctctgacttgttttgttttc

SEQ ID NO: 3702 - DNA, 122 bp, Homo sapiens
  misc_feature (61)..(62): /note="This region represents a CpG dinucleotide"
  misc_feature (61)..(61): /note="Nucleotide may be methylated to form 5-methylcytosine"
gtcaaatagattagggttcagctctcacagctgccacttactggttatgaatttgagtcacgtttcttaatcctactgaagtaggctgataatgactccaacaatttgtccacatcctaatc

SEQ ID NO: 3703 - DNA, 122 bp, Homo sapiens
  misc_feature (61)..(62): /note="This region represents a CpG dinucleotide"
  misc_feature (61)..(61): /note="Nucleotide may be methylated to form 5-methylcytosine"
cagcccactgaatgcttcctgagggccaggcctgagcccaggctttactcatatgcaccccgccccattaggagtgtcaagctgatgagtatggcctaagaggcctcattccagagggatct

SEQ ID NO: 3704 - DNA, 122 bp, Homo sapiens
  misc_feature (61)..(62): /note="This region represents a CpG dinucleotide"
  misc_feature (61)..(61): /note="Nucleotide may be methylated to form 5-methylcytosine"
tgtgtactcatcaccccatgacaacaagtcatgggagatgtttgaagagatgattaccaccgcagaggagttctaccagtccctggggattccttaccacattgtgaatattgtctcaggta

SEQ ID NO: 3705 - DNA, 122 bp, Homo sapiens
  misc_feature (61)..(62): /note="This region represents a CpG dinucleotide"
  misc_feature (61)..(61): /note="Nucleotide may be methylated to form 5-methylcytosine"
ggcggcatttttataagtaattccttatttctgcctgaagaccacaaagcctcctggaggcgtaactgctcagaccggtcttcagggaatatttaaggacttagtggaatttatgaacaata

SEQ ID NO: 3706 - DNA, 122 bp, Homo sapiens
  misc_feature (61)..(62): /note="This region represents a CpG dinucleotide"
  misc_feature (61)..(61): /note="Nucleotide may be methylated to form 5-methylcytosine"
ccaatgcaaatgagtcagaggatttgcttcagacactgagataattgtgtaactctacagcggaaaatgccattggagagtacttgctgacctcacagttgaaaaaaactatttaaaagatg

SEQ ID NO: 3707 - DNA, 122 bp, Homo sapiens
  misc_feature (61)..(62): /note="This region represents a CpG dinucleotide"
  misc_feature (61)..(61): /note="Nucleotide may be methylated to form 5-methylcytosine"
taattcatatgtaattaccagtatagtcatcaaagttgactcttcctctcattgtgttcacgacagactctggctgctcaaatatttccttctgcataaatgaactgaagttgcctatagta

SEQ ID NO: 3708 - DNA, 122 bp, Homo sapiens
  misc_feature (61)..(62): /note="This region represents a CpG dinucleotide"
  misc_feature (61)..(61): /note="Nucleotide may be methylated to form 5-methylcytosine"
ctgactgaatcagaagctttgttaatacctctgttagagcatgtgttatgctgctgttcacgctggaagctgagctccttatagcgacacttgcagcatgttgatctctatattcccagcac

SEQ ID NO: 3709 - DNA, 122 bp, Homo sapiens
  misc_feature (61)..(62): /note="This region represents a CpG dinucleotide"
  misc_feature (61)..(61): /note="Nucleotide may be methylated to form 5-methylcytosine"
tggagaaggatggcatggccttccaggaggccctagacccagggccctttggtgagaacccgttttctccttccttccccagcctgtcttgtcccatccctgcccctccacagagtgctaga

SEQ ID NO: 3710 - DNA, 122 bp, Homo sapiens
  misc_feature (61)..(62): /note="This region represents a CpG dinucleotide"
  misc_feature (61)..(61): /note="Nucleotide may be methylated to form 5-methylcytosine"
catttctccctttcaggtaatggcaccgaagcctcctttcgctatgtttgaacagcgccacgctttcctatatatttttatagcagagcctaaggcacagcctggcacagtgcgggaaacag

SEQ ID NO: 3711 - DNA, 122 bp, Homo sapiens
  misc_feature (61)..(62): /note="This region represents a CpG dinucleotide"
  misc_feature (61)..(61): /note="Nucleotide may be methylated to form 5-methylcytosine"
ttcttttaaagcaattaacttgcagagatttgcaggagattgaaatgaacaccacagaaacgaagcaccctgccccaagcacaggttcttggaatgcctgtagagaagtgaggactgcctgc

SEQ ID NO: 3712 - DNA, 122 bp, Homo sapiens
  misc_feature (61)..(62): /note="This region represents a CpG dinucleotide"
  misc_feature (61)..(61): /note="Nucleotide may be methylated to form 5-methylcytosine"
tgatgccaaaaataccttggtgattcgtgaacaacctgatgttttgcccctgggctgccacgtgtctgaggacaagctgggtgctgcttacacctgcatagttcctccgggcagcaggctca

SEQ ID NO: 3713 - DNA, 122 bp, Homo sapiens
  misc_feature (61)..(62): /note="This region represents a CpG dinucleotide"
  misc_feature (61)..(61): /note="Nucleotide may be methylated to form 5-methylcytosine"
attagcttcaaaaaaagtgactcagtgcagttgaacattcacttactaaacataattaaccgtctcttattataaagttaatactatgggctattgtgatgtcatgattgcttttggtttta

SEQ ID NO: 3714 - DNA, 122 bp, Homo sapiens
  misc_feature (61)..(62): /note="This region represents a CpG dinucleotide"
  misc_feature (61)..(61): /note="Nucleotide may be methylated to form 5-methylcytosine"
aagacattcttggaagccttaccggtaggttcagtggtgtgctggtcaatgcttaacaaccggctccaccctccaacctcccctccctgccaccccaaaaaagaaaaagagagagaggcccc

SEQ ID NO: 3715 - DNA, 122 bp, Homo sapiens
  misc_feature (61)..(62): /note="This region represents a CpG dinucleotide"
  misc_feature (61)..(61): /note="Nucleotide may be methylated to form 5-methylcytosine"
aggcggtcctggctgccatggggatgggcgatgccttcagtgagcacaaagccgactactcgggaatgtcgtcaggctccgggttgtacgcccagaagttcctgcacagttcctttgtggca

SEQ ID NO: 3716 - DNA, 122 bp, Homo sapiens
  misc_feature (61)..(62): /note="This region represents a CpG dinucleotide"
  misc_feature (61)..(61): /note="Nucleotide may be methylated to form 5-methylcytosine"
agtttaattatgaaaagaattacacttatgccttgattcagaagggagggagggaggaagcgatgcaaactccaaagcaccactgagtctcaccactgggggatcctacagagaaactggga

SEQ ID NO: 3717 - DNA, 122 bp, Homo sapiens
  misc_feature (61)..(62): /note="This region represents a CpG dinucleotide"
  misc_feature (61)..(61): /note="Nucleotide may be methylated to form 5-methylcytosine"
tgaatgttcactttcattccatagcagcatcatacagccctgtgcataacaggaagtgcacgtttgttaaatgagaaactagtaacacttctggtagctgaatgacttaactactggtaaac

SEQ ID NO: 3718 - DNA, 122 bp, Homo sapiens
  misc_feature (61)..(62): /note="This region represents a CpG dinucleotide"
  misc_feature (61)..(61): /note="Nucleotide may be methylated to form 5-methylcytosine"
taaatgtcttctggaggtgactttgaagtggttagaccacctctggaagcgaagcttccacgtttgttcagtgagttaaaggacatagaaaacctgagaaggaagttctaggccagtctggt

SEQ ID NO: 3719 - DNA, 122 bp, Homo sapiens
  misc_feature (61)..(62): /note="This region represents a CpG dinucleotide"
  misc_feature (61)..(61): /note="Nucleotide may be methylated to form 5-methylcytosine"
gtgcccctgcctggaaccagccatggcatttacatcatgatgtcagtttgactcaacgtccgtcactgcacttacatcacttcataagcaatttcccaacatttctgacgctgtagtcacaa

SEQ ID NO: 3720 - DNA, 122 bp, Homo sapiens
  misc_feature (61)..(62): /note="This region represents a CpG dinucleotide"
  misc_feature (61)..(61): /note="Nucleotide may be methylated to form 5-methylcytosine"
caagacactaggcagcgtcctgaacgctggagatctagcagcaagcacgcaaggttctcacgctcacattctagtgagagcgtacattccaatgagagagagtaattaagtaaataataatt

SEQ ID NO: 3721 - DNA, 122 bp, Homo sapiens
  misc_feature (61)..(62): /note="This region represents a CpG dinucleotide"
  misc_feature (61)..(61): /note="Nucleotide may be methylated to form 5-methylcytosine"
ccttcgaccccccgacactcacactggaggctcccgcacaacagctcagacctaccttgccgttcattattgcgcaagcatttcaccttgggcaacttgatgagctgtttacagtcatcagc

SEQ ID NO: 3722 - DNA, 122 bp, Homo sapiens
  misc_feature (61)..(62): /note="This region represents a CpG dinucleotide"
  misc_feature (61)..(61): /note="Nucleotide may be methylated to form 5-methylcytosine"
agccagctaatctcagagtcggctgctcactgctccactgagctggagaaagcctgtttacgctagcctgagccctcgatgtgagagctttttaaggaccttgtaatttttctggaattaaa

SEQ ID NO: 3723 - DNA, 122 bp, Homo sapiens
  misc_feature (61)..(62): /note="This region represents a CpG dinucleotide"
  misc_feature (61)..(61): /note="Nucleotide may be methylated to form 5-methylcytosine"
attatggtaataactgactcaggcaagggtcatcaattgatattaagctcttggaaacggcgtgtgttgaggaacaggctatttaattactttcgaagtatctccccagaaagcacttatta

SEQ ID NO: 3724 - DNA, 122 bp, Homo sapiens
  misc_feature (61)..(62): /note="This region represents a CpG dinucleotide"
  misc_feature (61)..(61): /note="Nucleotide may be methylated to form 5-methylcytosine"
aagcctgtcactttttaaaatgctatcaaattaggaatgaatgagagaactgtaaaatatcggaaagaaatgcataaaaatgaagaaagattttgcaatcaggtggcttcataagtttctag

SEQ ID NO: 3725 - DNA, 122 bp, Homo sapiens
  misc_feature (61)..(62): /note="This region represents a CpG dinucleotide"
  misc_feature (61)..(61): /note="Nucleotide may be methylated to form 5-methylcytosine"
atgattcacatacacacatgaataacttaattctttgaatagttcttagaatgtccatcacgaaaacttaaaaatacattgagaaaacccctaaaacaatatagaatatactttgtactttt

SEQ ID NO: 3726 - DNA, 122 bp, Homo sapiens
  misc_feature (61)..(62): /note="This region represents a CpG dinucleotide"
  misc_feature (61)..(61): /note="Nucleotide may be methylated to form 5-methylcytosine"
ccggctgttccgcgtccccttgccggctcacaatgtgctgaccctcccggccccgccgcgcgcctcacaggtctctcgacctccgcgctccctcaggaagtgacagactccaggccccttcc

SEQ ID NO: 3727 - DNA, 122 bp, Homo sapiens
  misc_feature (61)..(62): /note="This region represents a CpG dinucleotide"
  misc_feature (61)..(61): /note="Nucleotide may be methylated to form 5-methylcytosine"
atgcctaccccttgccatttcagaggatccaggggtgtgtagggtgctcctgagtcaccccgaatcacccccagccagttagacaggaagccattagcgagaggacaggacagtgactaagg

SEQ ID NO: 3728 - DNA, 122 bp, Homo sapiens
  misc_feature (61)..(62): /note="This region represents a CpG dinucleotide"
  misc_feature (61)..(61): /note="Nucleotide may be methylated to form 5-methylcytosine"
tgccgagtcagctccatgacagcgctgtaggactcagctaggaggtgctgctgctcctcacgctcccgctgtagggctgccttccagtcgggccctgcccgctccccggcccccttccctgt

SEQ ID NO: 3729 - DNA, 122 bp, Homo sapiens
  misc_feature (61)..(62): /note="This region represents a CpG dinucleotide"
  misc_feature (61)..(61): /note="Nucleotide may be methylated to form 5-methylcytosine"
accaacactgatttgacttccaccagcaggctcagcagcacagcctctagatgttttgctcgtttcatcgccaggcggtactctttcccacggtactataaagcaattcctgtttttcactt

SEQ ID NO: 3730 - DNA, 122 bp, Homo sapiens
  misc_feature (61)..(62): /note="This region represents a CpG dinucleotide"
  misc_feature (61)..(61): /note="Nucleotide may be methylated to form 5-methylcytosine"
aaagccagacagcttgactctacagcatgtgtccttaatcattcctttaaattgtctcgacgcttgcgcatgttcaggggtctttgggtggagtgcacagaggggcagaacctttttgccca

SEQ ID NO: 3731 - DNA, 122 bp, Homo sapiens
  misc_feature (61)..(62): /note="This region represents a CpG dinucleotide"
  misc_feature (61)..(61): /note="Nucleotide may be methylated to form 5-methylcytosine"
ggggagggagcaaccctgactgtgggtcgatagacgaaaatttctccctgtcctcttgctcgtaaaatgtttgtggccaacatattgcacaacattcccagagaggccacaaaaggcagtgc

SEQ ID NO: 3732 - DNA, 122 bp, Homo sapiens
  misc_feature (61)..(62): /note="This region represents a CpG dinucleotide"
  misc_feature (61)..(61): /note="Nucleotide may be methylated to form 5-methylcytosine"
acagggaggtgagaggagaggggaccacggaaacaaggaagtgaaaagagctggaacctacgacagttaagaatttacaatttcagagacaggcagtcttgggggaaaaggcctgtattaaa

SEQ ID NO: 3733 - DNA, 122 bp, Homo sapiens
  misc_feature (61)..(62): /note="This region represents a CpG dinucleotide"
  misc_feature (61)..(61): /note="Nucleotide may be methylated to form 5-methylcytosine"
ggtctccctttgtcattctaggggagttcccacaggcaggggctgtgctcagtgctggtgcggcagcagggctgacacctccagcatcctgagaactcagccacatggggatctgcggcatc

SEQ ID NO: 3734 - DNA, 122 bp, Homo sapiens
  misc_feature (61)..(62): /note="This region represents a CpG dinucleotide"
  misc_feature (61)..(61): /note="Nucleotide may be methylated to form 5-methylcytosine"
aagaccaaacttaactggagcctgtgactaatgtgccaggagcaatgcaaatcctcctcacgtcatcttggttgttctccccagtttaccacagccaccacccttctgagtcccattcccaa

SEQ ID NO: 3735 - DNA, 122 bp, Homo sapiens
  misc_feature (61)..(62): /note="This region represents a CpG dinucleotide"
  misc_feature (61)..(61): /note="Nucleotide may be methylated to form 5-methylcytosine"
cttctctcaaggatcatagtcaggggcaatctattgttcaataactaaaaaagtgcctcacgcatgttgtaacagttttatatttgtttatggcaggaaggctagtccagtaatagttgctt

SEQ ID NO: 3736 - DNA, 122 bp, Homo sapiens
  misc_feature (61)..(62): /note="This region represents a CpG dinucleotide"
  misc_feature (61)..(61): /note="Nucleotide may be methylated to form 5-methylcytosine"
gaatactgtagggttttttgtttgtttttaaagtcgaatatattaggaggtgaggattagcgttgggggagataggatcagttgcccagaggctcccatatttaggtaaatgtatgttaatc

SEQ ID NO: 3737 - DNA, 122 bp, Homo sapiens
  misc_feature (61)..(62): /note="This region represents a CpG dinucleotide"
  misc_feature (61)..(61): /note="Nucleotide may be methylated to form 5-methylcytosine"
ttctgcatcatgatattcaaataatgcattttagtcagccccttcctggacatctgagctcgtttggcacagtcgatgatgttctccttcacagttagttcctggttcataactcccacatc

SEQ ID NO: 3738 - DNA, 122 bp, Homo sapiens
  misc_feature (61)..(62): /note="This region represents a CpG dinucleotide"
  misc_feature (61)..(61): /note="Nucleotide may be methylated to form 5-methylcytosine"
acctctgatgctgctgaccctggagatagactagagttctcagcctaggtgtgtccatggcgtcaggaaacccttggtcctctactctcatgcgtgtgtccgccctcactctccaggtcctc

SEQ ID NO: 3739 - DNA, 122 bp, Homo sapiens
  misc_feature (61)..(62): /note="This region represents a CpG dinucleotide"
  misc_feature (61)..(61): /note="Nucleotide may be methylated to form 5-methylcytosine"
aatatatgagctgctggaaccagttctgcttccagacaaggagtgatttgctggcatggacgtgtccatgtgaagggtggtgatcacatggcctagatatatgctatccatcagtccagcct

SEQ ID NO: 3740 - DNA, 122 bp, Homo sapiens
  misc_feature (61)..(62): /note="This region represents a CpG dinucleotide"
  misc_feature (61)..(61): /note="Nucleotide may be methylated to form 5-methylcytosine"
aagatggactcttgcattatagccatctgagaagcccatggttagagtggtcacctcttacggaacctgaggaggctgacaaaacatgtgcccgactaaaacacttcatcagatcatggaaa

SEQ ID NO: 3741 - DNA, 122 bp, Homo sapiens
  misc_feature (61)..(62): /note="This region represents a CpG dinucleotide"
  misc_feature (61)..(61): /note="Nucleotide may be methylated to form 5-methylcytosine"
gatttaaatgctgttcttactcagaggactctgttgagcacactttgcttgtcatgataccgttttgcctagagatcattcattgctttagtcataatctgatgattgcaaaacttctcctt

SEQ ID NO: 3742 - DNA, 122 bp, Homo sapiens
  misc_feature (61)..(62): /note="This region represents a CpG dinucleotide"
  misc_feature (61)..(61): /note="Nucleotide may be methylated to form 5-methylcytosine"
ggcacggcagatggtgatgccccttgcttctggatggacacaggtagacactatgtggtccgtggatgtctcacgacagagctcaacagaaaagccccaggctggaggcgaggcactaagca

SEQ ID NO: 3743 - DNA, 122 bp, Homo sapiens
  misc_feature (61)..(62): /note="This region represents a CpG dinucleotide"
  misc_feature (61)..(61): /note="Nucleotide may be methylated to form 5-methylcytosine"
cccagccatggtctggtttcttaaccaccgtgtcctgtggcctcttgtgcagtccaagcacgtatcacagcattttgtttccccattggtcagtacttgtcagggacatcacttatcttcct

SEQ ID NO: 3744 - DNA, 122 bp, Homo sapiens
  misc_feature (61)..(62): /note="This region represents a CpG dinucleotide"
  misc_feature (61)..(61): /note="Nucleotide may be methylated to form 5-methylcytosine"
gaaattcatacagggcacatgagaaacaaggaatgtttgggacactgtcacacaacagagcggcctggggagacatctgtgatgtgctaccccagacttgaccctggaacagaaaaaggatg

SEQ ID NO: 3745 - DNA, 122 bp, Homo sapiens
  misc_feature (61)..(62): /note="This region represents a CpG dinucleotide"
  misc_feature (61)..(61): /note="Nucleotide may be methylated to form 5-methylcytosine"
actcattaggattttcttttcaagagagcaaagaacctaaataaagatccttgaatttagcgtacaatacccaggagtcatcggagcagcagcaatttgggggaacttcaagtgtggtattt

SEQ ID NO: 3746 - DNA, 122 bp, Homo sapiens
  misc_feature (61)..(62): /note="This region represents a CpG dinucleotide"
  misc_feature (61)..(61): /note="Nucleotide may be methylated to form 5-methylcytosine"
gtgatctcacatcctatttatgcccaagaagcagctattaggaccgtctactagagtctgcgagggaacaaagagcagtatattggacagattaggcgggccctggtgcaccaggcagttcc

SEQ ID NO: 3747 - DNA, 122 bp, Homo sapiens
  misc_feature (61)..(62): /note="This region represents a CpG dinucleotide"
  misc_feature (61)..(61): /note="Nucleotide may be methylated to form 5-methylcytosine"
aggcagtgctcaaggtgttaggacgggaaagaacagccttgctaaaaatcactgctatcacggggagcttacattctagtagagaaatgtgcatgattaataagacattgataagcaaagtg

SEQ ID NO: 3748 - DNA, 122 bp, Homo sapiens
  misc_feature (61)..(62): /note="This region represents a CpG dinucleotide"
  misc_feature (61)..(61): /note="Nucleotide may be methylated to form 5-methylcytosine"
acactgtctgtaccagctctcaaaggactatgtggctcagagctgtctgccaaccctgagcgagtcatctaagaccaaaatatgacagaggcaaccttctgcattctctgagttagtgggtc

SEQ ID NO: 3749 - DNA, 122 bp, Homo sapiens
  misc_feature (61)..(62): /note="This region represents a CpG dinucleotide"
  misc_feature (61)..(61): /note="Nucleotide may be methylated to form 5-methylcytosine"
acttgctccactgggcccctgcagggatgctgtggtcctcccactggcaggcttcagcttcggccttgccatatgccccaacacaaccctccagttgccccaggggctatattggctggtca

SEQ ID NO: 3750 - DNA, 122 bp, Homo sapiens
  misc_feature (61)..(62): /note="This region represents a CpG dinucleotide"
  misc_feature (61)..(61): /note="Nucleotide may be methylated to form 5-methylcytosine"
gctccgggtccccgcggcgtcggagaggcttctgcctagcgcctctctgctgcgcgaggtcgtcccggccttacaaaaggagctcctcgctggtgagctcaagaccccaggcgggctctccc

SEQ ID NO: 3751 - DNA, 122 bp, Homo sapiens
  misc_feature (61)..(62): /note="This region represents a CpG dinucleotide"
  misc_feature (61)..(61): /note="Nucleotide may be methylated to form 5-methylcytosine"
acctctagagaattaaagtgatttcttcaagagccaggcttgcaggggaaatctaagggccggcagcctttcatgcacagacagctcagctctggcctttgttctaagagacagcagccagc

SEQ ID NO: 3752 - DNA, 122 bp, Homo sapiens
  misc_feature (61)..(62): /note="This region represents a CpG dinucleotide"
  misc_feature (61)..(61): /note="Nucleotide may be methylated to form 5-methylcytosine"
ttaaccaaaattagtaatgtgcaagacatcatcctaagtactttaggtctatcctcacggcgctcctaccatgcaggtataactgtatcccaaaaaaagaaagtgaggcagagaggagttat

SEQ ID NO: 3753 - DNA, 122 bp, Homo sapiens
  misc_feature (61)..(62): /note="This region represents a CpG dinucleotide"
  misc_feature (61)..(61): /note="Nucleotide may be methylated to form 5-methylcytosine"
tgttctgtagagagcagacactaggcccgctagagaatcctgaggcagcacgatgacacccgtacgcaagcagcatgaacggaggtggactcggtgcagctttgctgtcttagaaaatggac

SEQ ID NO: 3754 - DNA, 122 bp, Homo sapiens
  misc_feature (61)..(62): /note="This region represents a CpG dinucleotide"
  misc_feature (61)..(61): /note="Nucleotide may be methylated to form 5-methylcytosine"
tagccctcaatggctcttgtttgacactacctaaaaattctttgcagtaaattttgtactcggataggttggttcttggccacacagaacaatgtattcttgcagaaggccaaaagaacact

SEQ ID NO: 3755 - DNA, 122 bp, Homo sapiens
  misc_feature (61)..(62): /note="This region represents a CpG dinucleotide"
  misc_feature (61)..(61): /note="Nucleotide may be methylated to form 5-methylcytosine"
cgctggtgtggtttgtgagtaatccacaagtgatcacagtcagagcaacatctactccagcgaattcagggatgtctgtcccctgccccagtgactaatggcatttcaactgtcagattagg

SEQ ID NO: 3756 - DNA, 122 bp, Homo sapiens
  misc_feature (61)..(62): /note="This region represents a CpG dinucleotide"
  misc_feature (61)..(61): /note="Nucleotide may be methylated to form 5-methylcytosine"
aaaggccaaaattccctgactcatgcatgtggcaattctggcttcttaagaaacactcagcgtgttttagaatggtctgggaagtcaaatacaaggggaaagcctgactagtcccactgtgt

SEQ ID NO: 3757 - DNA, 122 bp, Homo sapiens
  misc_feature (61)..(62): /note="This region represents a CpG dinucleotide"
  misc_feature (61)..(61): /note="Nucleotide may be methylated to form 5-methylcytosine"
aaagtatgtgcctgcttcgtacactgaggattctcagaaactggtaaggattcctcttcacgatggcaaactaagactgggattagaaaaacccctggtcacaggaaagtggtcagcaatag

SEQ ID NO: 3758 - DNA, 122 bp, Homo sapiens
  misc_feature (61)..(62): /note="This region represents a CpG dinucleotide"
  misc_feature (61)..(61): /note="Nucleotide may be methylated to form 5-methylcytosine"
ctttaaacttagattctgtagccagtgctttaggcctggcattcctgtggctttggtaaccgtccccacattgtctaaaatccttcaaaagaatctctcattgttgcagagcttgagtagtg

SEQ ID NO: 3759 - DNA, 122 bp, Homo sapiens
  misc_feature (61)..(62): /note="This region represents a CpG dinucleotide"
  misc_feature (61)..(61): /note="Nucleotide may be methylated to form 5-methylcytosine"
ttctcatccaacgtcttcactgaggataggaaagccctttctctccaattgtgaactgcacgcatgtgtgtaagctatgcttgcatagcaaagtccacttgggcattagagtcaaagttgtt

SEQ ID NO: 3760 - DNA, 122 bp, Homo sapiens
  misc_feature (61)..(62): /note="This region represents a CpG dinucleotide"
  misc_feature (61)..(61): /note="Nucleotide may be methylated to form 5-methylcytosine"
ggattaacagaggcttttacaactctgcttaccctctttttcttgattctagggctggtacgagccaagcccattattctaggtcctaatctgtttggtggagttgttactccacttctctg

SEQ ID NO: 3761 - DNA, 122 bp, Homo sapiens
  misc_feature (61)..(62): /note="This region represents a CpG dinucleotide"
  misc_feature (61)..(61): /note="Nucleotide may be methylated to form 5-methylcytosine"
aagtgtaacatgacagaggttcctagccaagcacatgcacagaatctcatctttctctggcgacacccttgtccatagtaggtttgccaggattcacctgacacttgctcccaggactgact

SEQ ID NO: 3762 - DNA, 122 bp, Homo sapiens
  misc_feature (61)..(62): /note="This region represents a CpG dinucleotide"
  misc_feature (61)..(61): /note="Nucleotide may be methylated to form 5-methylcytosine"
ttggtcggacggtgattctcactcttcctattgacttctactttgtgtcagcaagttcagcgtgggccccgtatgctgccgtggatctgatcagctgaggcctgagacacaggaccaggtac

SEQ ID NO: 3763 - DNA, 122 bp, Homo sapiens
  misc_feature (61)..(62): /note="This region represents a CpG dinucleotide"
  misc_feature (61)..(61): /note="Nucleotide may be methylated to form 5-methylcytosine"
acagtggaaccagggattagcaccagggatgtctagggcagcggctactacaatgggatccggaggaaatacacatccctctttcagtgaccagcagccaccagcctgaccgtgcagagagc

SEQ ID NO: 3764 - DNA, 122 bp, Homo sapiens
  misc_feature (61)..(62): /note="This region represents a CpG dinucleotide"
  misc_feature (61)..(61): /note="Nucleotide may be methylated to form 5-methylcytosine"
gtgagtcaattaaacctctttcctttatatttacccagtctcaggtagtatactttatagcggtgtgagaatggactaatacattaggtgttcaagaaatattagtgattatcattatatta

SEQ ID NO: 3765 - DNA, 122 bp, Homo sapiens
  misc_feature (61)..(62): /note="This region represents a CpG dinucleotide"
  misc_feature (61)..(61): /note="Nucleotide may be methylated to form 5-methylcytosine"
aggaaattgctgatgttgaaataaacatttccttccatgaggatgactaattctgtaaagcgtctctgctcaaagcacagaccctgaaccggagttatcggtgccacctgctgaatcggaac

SEQ ID NO: 3766 - DNA, 122 bp, Homo sapiens
  misc_feature (61)..(62): /note="This region represents a CpG dinucleotide"
  misc_feature (61)..(61): /note="Nucleotide may be methylated to form 5-methylcytosine"
agcgggcgcctgcatggtggggagggagggagctggctaagaccccgcccctctagaccccgccctcagggagtcagacgccgtcaggagcgggacaacgcctcaactcagttccttcccct

SEQ ID NO: 3767 - DNA, 122 bp, Homo sapiens
  misc_feature (61)..(62): /note="This region represents a CpG dinucleotide"
  misc_feature (61)..(61): /note="Nucleotide may be methylated to form 5-methylcytosine"
ccgtggagctggcagggatcacaggatcctggcttctgagtacttaccaggccagagtcacgtacctggtagaactggtactggagacactggagcagatccgactgaggaagagaaggagg

SEQ ID NO: 3768 - DNA, 122 bp, Homo sapiens
  misc_feature (61)..(62): /note="This region represents a CpG dinucleotide"
  misc_feature (61)..(61): /note="Nucleotide may be methylated to form 5-methylcytosine"
gctattcctacgctttgtgcaaaaagccttcttcctattatgacagtgctagctgcagaccgcaatttagttacaactgtggtaagcaaaatgtgtgtccaaattgattaatcttatatcca

SEQ ID NO: 3769 - DNA, 122 bp, Homo sapiens
  misc_feature (61)..(62): /note="This region represents a CpG dinucleotide"
  misc_feature (61)..(61): /note="Nucleotide may be methylated to form 5-methylcytosine"
acctaactgacagcagcaatactgatgtttatttcactcccttaggcaattcttacactacgtgaccttccaaaggcaaaaagagttggttaataacacagacatagcatcactgtcttcaa

SEQ ID NO: 3770 - DNA, 122 bp, Homo sapiens
  misc_feature (61)..(62): /note="This region represents a CpG dinucleotide"
  misc_feature (61)..(61): /note="Nucleotide may be methylated to form 5-methylcytosine"
cacttgcaatttgctaggctggcaactgcacactctggctctagggaggatcactggggacgcaattcctggctggttcctgttttgaaagagagacagtaggacttgatgggtcggggcca

SEQ ID NO: 3771 - DNA, 122 bp, Homo sapiens
  misc_feature (61)..(62): /note="This region represents a CpG dinucleotide"
  misc_feature (61)..(61): /note="Nucleotide may be methylated to form 5-methylcytosine"
ctccaggctcttaatctcattcacttggctggtcatggctaataactaacactcattgggcgcttaatgtttggcaggcagcattctcagtgttttatgcagattcattcatttagtcatca

SEQ ID NO: 3772 - DNA, 122 bp, Homo sapiens
  misc_feature (61)..(62): /note="This region represents a CpG dinucleotide"
  misc_feature (61)..(61): /note="Nucleotide may be methylated to form 5-methylcytosine"
aggaaagcacaagagccagtgtaacaccaaaaccactcctactcgtattcaaaaactgtgcgatttgagagtgatgtaatttcaaagaagtcacttcatcttaagaggtacaagaggccagg

SEQ ID NO: 3773 - DNA, 122 bp, Homo sapiens
  misc_feature (61)..(62): /note="This region represents a CpG dinucleotide"
  misc_feature (61)..(61): /note="Nucleotide may be methylated to form 5-methylcytosine"
aatggagtccaaaggaagtctatgagcagggttaaagttatgctggaagtcaggaaccaccggaacaggttgggaaaagagcagaaagttgaaactgttaagagctcatggttagtgtcctg

SEQ ID NO: 3774 - DNA, 122 bp, Homo sapiens
  misc_feature (61)..(62): /note="This region represents a CpG dinucleotide"
  misc_feature (61)..(61): /note="Nucleotide may be methylated to form 5-methylcytosine"
tatttttttccctgtaagtcagaaacctgtacttttccttctaggcgtctggcgccctgccgtatgagagtctcagctcttgctggggtcatttcttccatcttcctttccttctttcctct

SEQ ID NO: 3775 - DNA, 122 bp, Homo sapiens
  misc_feature (61)..(62): /note="This region represents a CpG dinucleotide"
  misc_feature (61)..(61): /note="Nucleotide may be methylated to form 5-methylcytosine"
tttgataaacctttcttcaagaggctagattcacactaagtagatgctctgaggatccttcgtctctgatttcatctttctgctttagtgcaaacacctgtcctacagtgttaactatcacc

SEQ ID NO: 3776 - DNA, 122 bp, Homo sapiens
  misc_feature (61)..(62): /note="This region represents a CpG dinucleotide"
  misc_feature (61)..(61): /note="Nucleotide may be methylated to form 5-methylcytosine"
ttgcctgagtcactaagttccttaaaagataaatgactctattccctgccttttcttacacgtaaggtaatatctgatggggttagtgatgatgcctctgtaatctataaccagctgtactc

SEQ ID NO: 3777 - DNA, 122 bp, Homo sapiens
  misc_feature (61)..(62): /note="This region represents a CpG dinucleotide"
  misc_feature (61)..(61): /note="Nucleotide may be methylated to form 5-methylcytosine"
ctgccggcctggacagggaagacaagggcctgggatcagcaggacttggaaaggaaatgacggaagcccatagcttatgaagtgattagtcagagtgcttgaagaacaccatgcacattccc

SEQ ID NO: 3778 - DNA, 122 bp, Homo sapiens
  misc_feature (61)..(62): /note="This region represents a CpG dinucleotide"
  misc_feature (61)..(61): /note="Nucleotide may be methylated to form 5-methylcytosine"
gagggaagtgcattatgagggctctgtcctaagtcagctcccatccaccaagggtggtaacgctaagcttttactctctgcttaaaccatccagcaagtcatcaaagttacaaaagcccctg

SEQ ID NO: 3779 - DNA, 122 bp, Homo sapiens
  misc_feature (61)..(62): /note="This region represents a CpG dinucleotide"
  misc_feature (61)..(61): /note="Nucleotide may be methylated to form 5-methylcytosine"
tttaagggagactgggacatcggaagaaaaaaggggtgatgcagagctcaaatctgtacacgcttgtttgaggtgatagcagacatccagatgaagaaaaccagcagacaggtgaaaatctt

SEQ ID NO: 3780 - DNA, 122 bp, Homo sapiens
  misc_feature (61)..(62): /note="This region represents a CpG dinucleotide"
  misc_feature (61)..(61): /note="Nucleotide may be methylated to form 5-methylcytosine"
ctttgtaattcagcattgactgaccagagctttggtcctatgaacgtacctatcctcaaacgcatttactctcaaaggcaaggacaatagtctggtagatgctgagtcagccctgttgctct

SEQ ID NO: 3781 - DNA, 122 bp, Homo sapiens
  misc_feature (61)..(62): /note="This region represents a CpG dinucleotide"
  misc_feature (61)..(61): /note="Nucleotide may be methylated to form 5-methylcytosine"
gttctaatctctctcctaacagtcagagaagctgagctacaaatctggacttttcctccacgtaaaacataaagcctgtggctcccaagttgtcactgattaccacccttacagccatcatc

SEQ ID NO: 3782 - DNA, 122 bp, Homo sapiens
  misc_feature (61)..(62): /note="This region represents a CpG dinucleotide"
  misc_feature (61)..(61): /note="Nucleotide may be methylated to form 5-methylcytosine"
cacacccagcttttttcttcatagtgtccttcgatgcataaaaagttttccatttaatgacgtctagtttatctgcttttttttcccttctttatctgctttttttttttccccttctttca

SEQ ID NO: 3783 - DNA, 122 bp, Homo sapiens
  misc_feature (61)..(62): /note="This region represents a CpG dinucleotide"
  misc_feature (61)..(61): /note="Nucleotide may be methylated to form 5-methylcytosine"
gaaggcttgggtgcaggctttggagaatcctctggctctctccctgctcaagaggagaaacgcagaagttatgactgatgacatcagcagttctcaaacctgagcttgctttagaagcacct

SEQ ID NO: 3784 - DNA, 122 bp, Homo sapiens
  misc_feature (61)..(62): /note="This region represents a CpG dinucleotide"
  misc_feature (61)..(61): /note="Nucleotide may be methylated to form 5-methylcytosine"
tcctggcagaccctccttatttggaatgctggctaagcattttgccatctactctccacacggccaacagcagttgctagtgtgtgtttaagcttgttttgtttctgctttttaaaggaatc

SEQ ID NO: 3785 - DNA, 122 bp, Homo sapiens
  misc_feature (61)..(62): /note="This region represents a CpG dinucleotide"
  misc_feature (61)..(61): /note="Nucleotide may be methylated to form 5-methylcytosine"
atgcatagggtagacattcagcatatgtcaagtctctaacgtcaagcctctactagaaatcggtcaccgcatgtttaatggcaataatagacataatcccacacagtcattttgcaggtgga

SEQ ID NO: 3786 - DNA, 122 bp, Homo sapiens
  misc_feature (61)..(62): /note="This region represents a CpG dinucleotide"
  misc_feature (61)..(61): /note="Nucleotide may be methylated to form 5-methylcytosine"
tggataaaagccctaagaaggggaactatccaactctacttagtaatgccaagtggagcacgccagatgcagctgctgatgtgcttcatctacaagccatgagggactcactttatgatgat

SEQ ID NO: 3787 - DNA, 122 bp, Homo sapiens
  misc_feature (61)..(62): /note="This region represents a CpG dinucleotide"
  misc_feature (61)..(61): /note="Nucleotide may be methylated to form 5-methylcytosine"
gttacccagtgctcctgtatccttttaatatgcttctgttttgagcacttccttatttcccggcaccataagttcaggcttatcgtgtactttccttgcctcaagtcctggtttgagtcatt

SEQ ID NO: 3788 - DNA, 122 bp, Homo sapiens
  misc_feature (61)..(62): /note="This region represents a CpG dinucleotide"
  misc_feature (61)..(61): /note="Nucleotide may be methylated to form 5-methylcytosine"
tataaactgaatacaaatataagggagcatcagccggctcattcaattagtcactatatacgctcctaagaaaggtaatgagaaaaattatggaatgacctggctgaatacttgaacccaca

SEQ ID NO: 3789 - DNA, 122 bp, Homo sapiens
  misc_feature (61)..(62): /note="This region represents a CpG dinucleotide"
  misc_feature (61)..(61): /note="Nucleotide may be methylated to form 5-methylcytosine"
gtgtcttactcattgtcaatttcaggaaattccccaagggatattcctgaatgttgagtccgtctagcttaaaatgactcaagtcatgtagcagttctcccagaattctgtttcatagacta

SEQ ID NO: 3790 - DNA, 122 bp, Homo sapiens
  misc_feature (61)..(62): /note="This region represents a CpG dinucleotide"
  misc_feature (61)..(61): /note="Nucleotide may be methylated to form 5-methylcytosine"
aggagaattgcttgagcccaggaggcagtgattgcagtgagctgagatcacgccactgcacgccagcctgacaacagagcgagagactctatctcaaaaagaaaataaaagctcttcttgtc

SEQ ID NO: 3791 - DNA, 122 bp, Homo sapiens
  misc_feature (61)..(62): /note="This region represents a CpG dinucleotide"
  misc_feature (61)..(61): /note="Nucleotide may be methylated to form 5-methylcytosine"
ccagtgtggggagtagacaatctgggtggtggacaacagctgctggcttccaccctgacacggctgcatttcattagtgggtaaactgattgctcagagtatgtttatgtgtgggtgtggtt

SEQ ID NO: 3792 - DNA, 122 bp, Homo sapiens
  misc_feature (61)..(62): /note="This region represents a CpG dinucleotide"
  misc_feature (61)..(61): /note="Nucleotide may be methylated to form 5-methylcytosine"
tctaggaagctgcactaatgcagatgttgcgttctcagcctgctcatagagtgtgttaaacgtgagaggtggggagtgtggcaggcaggctgaggacagaacagaggatctgaatagcatgc

SEQ ID NO: 3793 - DNA, 122 bp, Homo sapiens
  misc_feature (61)..(62): /note="This region represents a CpG dinucleotide"
  misc_feature (61)..(61): /note="Nucleotide may be methylated to form 5-methylcytosine"
ggcctatctcacagccacagcatagtattttcttttttttcttgctgtgactgcaccttacgccatagatggcatccaggacgcagagcagtcagtatttaggtactgtttttcacattcct

SEQ ID NO: 3794 - DNA, 122 bp, Homo sapiens
  misc_feature (61)..(62): /note="This region represents a CpG dinucleotide"
  misc_feature (61)..(61): /note="Nucleotide may be methylated to form 5-methylcytosine"
ttgtttaaccacacccttgactttctgttcagaacacactttcctaagaatgaatcttctcgttttagcttcttttgcaaaatgaataggcagagaatttcccaaatcatgaaatcctggtt

SEQ ID NO: 3795 - DNA, 122 bp, Homo sapiens
  misc_feature (61)..(62): /note="This region represents a CpG dinucleotide"
  misc_feature (61)..(61): /note="Nucleotide may be methylated to form 5-methylcytosine"
gcatgatctcagctcactgcagcatcaacttcctgggctcagatgatcctcccacctcagcgcctctgtagctgggactgtgggcgttcaccacaacaccaggctaatttttttgtattttc

SEQ ID NO: 3796 - DNA, 122 bp, Homo sapiens
  misc_feature (61)..(62): /note="This region represents a CpG dinucleotide"
  misc_feature (61)..(61): /note="Nucleotide may be methylated to form 5-methylcytosine"
ataaggtcacattttgaggtatagaggattagaacatcaacataaatgttaggagggacacgatgcaaccataacagtggtgaaggctcaggaatggacagctgtagacttggccacaccca

SEQ ID NO: 3797 - DNA, 122 bp, Homo sapiens
  misc_feature (61)..(62): /note="This region represents a CpG dinucleotide"
  misc_feature (61)..(61): /note="Nucleotide may be methylated to form 5-methylcytosine"
aggaaaaattttaactaatgcagttagatttgaactatgcaaatctccatcaatttctcacgtctcctttttttcctccttctctttctcttttgttttctgctcaccaacctgcttgtcat

SEQ ID NO: 3798 - DNA, 122 bp, Homo sapiens
  misc_feature (61)..(62): /note="This region represents a CpG dinucleotide"
  misc_feature (61)..(61): /note="Nucleotide may be methylated to form 5-methylcytosine"
ttgtgttttttttcctcgtggagtgacgcaaaccttcattcctgaatggtctgagtcattcgtagtcctgcctggattgggctgctgtactttcccattgaccttaatcacagggcatggta

SEQ ID NO: 3799 - DNA, 122 bp, Homo sapiens
  misc_feature (61)..(62): /note="This region represents a CpG dinucleotide"
  misc_feature (61)..(61): /note="Nucleotide may be methylated to form 5-methylcytosine"
tctctcgttgttgcttcacagcccttttggcatcacccatttatttaactaggataaaaacgaatattggtatagcgattccacagtttacaaagtgcttttgtatccactgtctcacttga

SEQ ID NO: 3800 - DNA, 122 bp, Homo sapiens
  misc_feature (61)..(62): /note="This region represents a CpG dinucleotide"
  misc_feature (61)..(61): /note="Nucleotide may be methylated to form 5-methylcytosine"
gaatgtcaaaataaggaagagagagtggttgataatcagtagagagaggtttctaactcacggaagtgtttgcaatacaacctctttgtacatcagctgtgtggaacaacatacttgtcact

SEQ ID NO: 3801 - DNA, 122 bp, Homo sapiens
  misc_feature (61)..(62): /note="This region represents a CpG dinucleotide"
  misc_feature (61)..(61): /note="Nucleotide may be methylated to form 5-methylcytosine"
tatcacttgacatctgactttatagcttaggaagggcttaacctcacattctgtggcttgcgcctcttacaacattctgcagggctgagtaagcaaggcagggaattttacacccatttagg

SEQ ID NO: 3802 - DNA, 122 bp, Homo sapiens
  misc_feature (61)..(62): /note="This region represents a CpG dinucleotide"
  misc_feature (61)..(61): /note="Nucleotide may be methylated to form 5-methylcytosine"
tcacccactcaaccaaccacatatatcctcgtccctacccacgtactcaagtgtaacgtccgtatgcatatctatttgcggccacctcccaacctgtcatttactggtagtgcctctgacag

SEQ ID NO: 3803 - DNA, 122 bp, Homo sapiens
  misc_feature (61)..(62): /note="This region represents a CpG dinucleotide"
  misc_feature (61)..(61): /note="Nucleotide may be methylated to form 5-methylcytosine"
atatagtcacttaccttcactgaattcatttagcaactcttccttggtccaattacatgacgttattagaaaaaagccttttactttcaacaccctggagagagatttcacatattgcttcc

SEQ ID NO: 3804 - DNA, 122 bp, Homo sapiens
  misc_feature (61)..(62): /note="This region represents a CpG dinucleotide"
  misc_feature (61)..(61): /note="Nucleotide may be methylated to form 5-methylcytosine"
gaaacaggcttaggttatatggctttcccaaggtcatcctggtcacagagctagtaaggacgacttggaattgacccatggtgtagcatgtctgaagtccaaggtcttacctccctctgcta

SEQ ID NO: 3805 - DNA, 122 bp, Homo sapiens
  misc_feature (61)..(62): /note="This region represents a CpG dinucleotide"
  misc_feature (61)..(61): /note="Nucleotide may be methylated to form 5-methylcytosine"
catattttctttcctttttctaatttctccttgggccatttccaaaaagccctaataccccgactgatagaaatggataccttgctgtgcactggtactactgtgattcatggaaagctgat

SEQ ID NO: 3806 - DNA, 122 bp, Homo sapiens
  misc_feature (61)..(62): /note="This region represents a CpG dinucleotide"
  misc_feature (61)..(61): /note="Nucleotide may be methylated to form 5-methylcytosine"
aggccagtccctttctgtgaagactcacaaggccttactcgttgcgtaacatcccaaagccgtagttacgtcatctgtaaaatggagataaaaatcccacttcacatggttgttggggtgat

SEQ ID NO: 3807 - DNA, 122 bp, Homo sapiens
  misc_feature (61)..(62): /note="This region represents a CpG dinucleotide"
  misc_feature (61)..(61): /note="Nucleotide may be methylated to form 5-methylcytosine"
tcaccaaatgtcagttgctgtggtagttattatttttcacagccttcactgtcccagatacgtaacaatgaagaatggcttgcctcgaagcatttccctcagtccagagggggagatttggg

SEQ ID NO: 3808 - DNA, 122 bp, Homo sapiens
  misc_feature (61)..(62): /note="This region represents a CpG dinucleotide"
  misc_feature (61)..(61): /note="Nucleotide may be methylated to form 5-methylcytosine"
aagacagcaacaataagtaagcacagagtccgggttgatacagttcaggacatttggtatcgcaaaaccccagaatattagagctataaaggccctgacttaacagatgaagaaactgagac

SEQ ID NO: 3809 - DNA, 122 bp, Homo sapiens
  misc_feature (61)..(62): /note="This region represents a CpG dinucleotide"
  misc_feature (61)..(61): /note="Nucleotide may be methylated to form 5-methylcytosine"
ggcctcaagcagtcctcccatgttggcctcacagagtgctgagattgcaggtgtgagccacggctctcagccctaaatccactttagttggttaggaattggtggcaatgcaggagtgactc

SEQ ID NO: 3810 - DNA, 122 bp, Homo sapiens
  misc_feature (61)..(62): /note="This region represents a CpG dinucleotide"
  misc_feature (61)..(61): /note="Nucleotide may be methylated to form 5-methylcytosine"
ctatgacaccttcaaaggagatgactacaatgaggagaatcctactgaacccggcagcgacggcaccatgtcagacaaggaaattactcatgatgtcaaaggtaaccccatgtagagccatg

SEQ ID NO: 3811 - DNA, 122 bp, Homo sapiens
  misc_feature (61)..(62): /note="This region represents a CpG dinucleotide"
  misc_feature (61)..(61): /note="Nucleotide may be methylated to form 5-methylcytosine"
tcacaagcaacctagatatccatccgaagaggagaagcagactgtgctgcctccacgccacggaatagtattcagccgtgaaaaggaatgacactgacaggccaccacaaggaagagcctca

SEQ ID NO: 3812 - DNA, 122 bp, Homo sapiens
  misc_feature (61)..(62): /note="This region represents a CpG dinucleotide"
  misc_feature (61)..(61): /note="Nucleotide may be methylated to form 5-methylcytosine"
tctttctttggcctctcagcttcctgggactctggggcaggtttggatagtcctgccaaccgcagaacactcatcaaggtgggagtggaaactgctgcagagaagaatcccatttgtgtttg

SEQ ID NO: 3813 - DNA, 122 bp, Homo sapiens
  misc_feature (61)..(62): /note="This region represents a CpG dinucleotide"
  misc_feature (61)..(61): /note="Nucleotide may be methylated to form 5-methylcytosine"
aagccttttctcaggccactgaatataggcttatgtaaacaggcagtataactcagtaggcggagatgaaacatttgcacttctctccaagcattataatgagaaagcaaaactctttatac

SEQ ID NO: 3814 - DNA, 122 bp, Homo sapiens
  misc_feature (61)..(62): /note="This region represents a CpG dinucleotide"
  misc_feature (61)..(61): /note="Nucleotide may be methylated to form 5-methylcytosine"
tggaagcactactggctttcaagctttcacaattctctgaaggattctgcaacaccacagcgtgagtaatgaggacatgtcataagtactatgtacaacttgtaatgaaggttgtagatcaa

SEQ ID NO: 3815 - DNA, 122 bp, Homo sapiens
  misc_feature (61)..(62): /note="This region represents a CpG dinucleotide"
  misc_feature (61)..(61): /note="Nucleotide may be methylated to form 5-methylcytosine"
ctgggttctggcctttttggtaatgttattcagctgtttctctcaggaacttcctaataacgtactttagcactattaacaaaaggaccacatggtgaatttcagtgttccagaggtgattc

SEQ ID NO: 3816 - DNA, 122 bp, Homo sapiens
  misc_feature (61)..(62): /note="This region represents a CpG dinucleotide"
  misc_feature (61)..(61): /note="Nucleotide may be methylated to form 5-methylcytosine"
ctctcaacttgatctctttaaagctgctgggtcagcctccctggcacctcctctttcacacgcaagagcaagaaatggctttttggtttttttgggttttttttgagacagagtcttgccct

SEQ ID NO: 3817 - DNA, 122 bp, Homo sapiens
  misc_feature (61)..(62): /note="This region represents a CpG dinucleotide"
  misc_feature (61)..(61): /note="Nucleotide may be methylated to form 5-methylcytosine"
gtcataaagaacttgattttgccaacttcctcactggatcaaaggcctttgtcagactttcgccactgtttgtcttatgcagcaagatctctctcagtgacacggctgggaagtaaagtatc

SEQ ID NO: 3818 - DNA, 122 bp, Homo sapiens
  misc_feature (61)..(62): /note="This region represents a CpG dinucleotide"
  misc_feature (61)..(61): /note="Nucleotide may be methylated to form 5-methylcytosine"
cacaccccctccatctagtagcgtgtgggaagacagggtgctgggctgggactctagggccggctagttggcctctagcctgagctggagtctcactcagcctcatgagtagctgggattac

SEQ ID NO: 3819 - DNA, 122 bp, Homo sapiens
  misc_feature (61)..(62): /note="This region represents a CpG dinucleotide"
  misc_feature (61)..(61): /note="Nucleotide may be methylated to form 5-methylcytosine"
gaaaaaaaaaaaaagtcacagagcatttatcactgatgtttcctgttcccacccacaagccgctctcactactactttagttatgatagcacagtgttcacggaagttttaaaaatcaaaaa

SEQ ID NO: 3820 - DNA, 122 bp, Homo sapiens
  misc_feature (61)..(62): /note="This region represents a CpG dinucleotide"
  misc_feature (61)..(61): /note="Nucleotide may be methylated to form 5-methylcytosine"
ctatggggctcttgtgccctctgggggcctctggggagctgctactgggctgggccctctcggtccctgagcctagaccaggtgagttactagcagggacaggaggagaaatgggaaagcta

SEQ ID NO: 3821 - DNA, 122 bp, Homo sapiens
  misc_feature (61)..(62): /note="This region represents a CpG dinucleotide"
  misc_feature (61)..(61): /note="Nucleotide may be methylated to form 5-methylcytosine"
ggtgaggtggggcaggctataaggccacacggcgcagaagggcggctctgtgggagagggcggctcgcagtcaacagggatgacagcccccgggctggcctcgggcagcccacatgcgcagg

SEQ ID NO: 3822 - DNA, 122 bp, Homo sapiens
  misc_feature (61)..(62): /note="This region represents a CpG dinucleotide"
  misc_feature (61)..(61): /note="Nucleotide may be methylated to form 5-methylcytosine"
gagttaacaatgcttcaaggatagtcagccagctaagccggacagacactgatggattggcgtccttctctgaactgccttcgagagtctggaggcctttgcagctgaataccaaagagact

SEQ ID NO: 3823 - DNA, 122 bp, Homo sapiens
  misc_feature (61)..(62): /note="This region represents a CpG dinucleotide"
  misc_feature (61)..(61): /note="Nucleotide may be methylated to form 5-methylcytosine"
gcctgatttaagataggaggaaactgaggcaaaggaggataagcaatgtgtccaagcctacgcctctgatgagtataggtctgggatttgaactcaagcagtccggccccagaggccttagt

SEQ ID NO: 3824 - DNA, 122 bp, Homo sapiens
  misc_feature (61)..(62): /note="This region represents a CpG dinucleotide"
  misc_feature (61)..(61): /note="Nucleotide may be methylated to form 5-methylcytosine"
gtgggtgtgggtggtagaggacaggcgagtcacctagctcctggataaactcagtgtgtgcgcagtggaaagcagtttgttgtgtttgcatatttgtgtcagagctttcatttaaagcaaca

SEQ ID NO: 3825 - DNA, 122 bp, Homo sapiens
  misc_feature (61)..(62): /note="This region represents a CpG dinucleotide"
  misc_feature (61)..(61): /note="Nucleotide may be methylated to form 5-methylcytosine"
gattacaggtgtcagccaccgtgcccggccaatacataattctttagtgaggggaaaaggcgggggataggattatagttgcttactgagacctgaacttaagccccagtctctcatatatt

SEQ ID NO: 3826 - DNA, 122 bp, Homo sapiens
  misc_feature (61)..(62): /note="This region represents a CpG dinucleotide"
  misc_feature (61)..(61): /note="Nucleotide may be methylated to form 5-methylcytosine"
ctcccttctccgcccagctggtgcagaggaaagacagtctggggaagaagcaggaggtgtcggtactgccacctagaagtgaccccaccagcggtgcgctcttagacaagactggccttgag

SEQ ID NO: 3827 - DNA, 122 bp, Homo sapiens
  misc_feature (61)..(62): /note="This region represents a CpG dinucleotide"
  misc_feature (61)..(61): /note="Nucleotide may be methylated to form 5-methylcytosine"
tcgaaccggggaactctgcatattttcctcctgggtttgtggggtgtggacagcacggagcgtgatgaaaggatacaggcggctgggcgtggtggctcacgcctgtaatcccagcactttgg

SEQ ID NO: 3828 - DNA, 122 bp, Homo sapiens
  misc_feature (61)..(62): /note="This region represents a CpG dinucleotide"
  misc_feature (61)..(61): /note="Nucleotide may be methylated to form 5-methylcytosine"
gttgaaatcatcaacagctaagtctactagcaaaatgtgactctcactgctccccagatccggcaggaagaacacttgcacataacagatgtatggaacacacccaacaagctgttgcatat

SEQ ID NO: 3829 - DNA, 122 bp, Homo sapiens
  misc_feature (61)..(62): /note="This region represents a CpG dinucleotide"
  misc_feature (61)..(61): /note="Nucleotide may be methylated to form 5-methylcytosine"
catgaaaacagtgcttaacattgacttaggtcttgactgcatgccaggtagtgtctcacacgcttcacatgtatgaactcacttgatctttatgacagtcctataagatggtgctattatta

SEQ ID NO: 3830 - DNA, 122 bp, Homo sapiens
  misc_feature (61)..(62): /note="This region represents a CpG dinucleotide"
  misc_feature (61)..(61): /note="Nucleotide may be methylated to form 5-methylcytosine"
gggctgaggcctcagattctgcatttctaacaagttcctgtcacgccagcctctctggcccgtggatcacactgtgagggccaggtgtggtggtgcatgactataatccaaacactttgtga

SEQ ID NO: 3831 - DNA, 122 bp, Homo sapiens
  misc_feature (61)..(62): /note="This region represents a CpG dinucleotide"
  misc_feature (61)..(61): /note="Nucleotide may be methylated to form 5-methylcytosine"
ccaagacaggtatgagcttcctgcaataaccaagctgtgcttccttctgggttgtccaaccgttgcaagtcaagatcactgcctcaccttagctacctggtactgcaacacctatgcatcct

SEQ ID NO: 3832 - DNA, 122 bp, Homo sapiens
  misc_feature (61)..(62): /note="This region represents a CpG dinucleotide"
  misc_feature (61)..(61): /note="Nucleotide may be methylated to form 5-methylcytosine"
ttaatatgtggcttaaacccagcactcagacatctgagaacacgcattggattcctgaggcgtcacagcaatgctcagcaggctggctgccacatggtggcccaagaagcaggtgcttgtta

SEQ ID NO: 3833 - DNA, 122 bp, Homo sapiens
  misc_feature (61)..(62): /note="This region represents a CpG dinucleotide"
  misc_feature (61)..(61): /note="Nucleotide may be methylated to form 5-methylcytosine"
ttcaagcaaagcctgatgagctggtccatgtctcctctgatccctgtcagccctgacctgcgctggctcttcacaaatggttaggaaggagactagaacagaaattatatccaacccccaac

SEQ ID NO: 3834 - DNA, 122 bp, Homo sapiens
  misc_feature (61)..(62): /note="This region represents a CpG dinucleotide"
  misc_feature (61)..(61): /note="Nucleotide may be methylated to form 5-methylcytosine"
aagtgaatcaccctgtccctgtatggcctctgagagatggtgctgctgctatgtgtctttcgaattgtatttgcagggttcatgggggttgaccttttcctctcaggaactgtatctgaaac

SEQ ID NO: 3835 - DNA, 122 bp, Homo sapiens
  misc_feature (61)..(62): /note="This region represents a CpG dinucleotide"
  misc_feature (61)..(61): /note="Nucleotide may be methylated to form 5-methylcytosine"
cttcattgcccagtgttttcaaagtccccacgtgtgttggttattctttagtaaagtagacgtgacaatgctcgttggctgttattgtgaagcttgacttataatactgggattttgagatc

SEQ ID NO: 3836 - DNA, 122 bp, Homo sapiens
  misc_feature (61)..(62): /note="This region represents a CpG dinucleotide"
  misc_feature (61)..(61): /note="Nucleotide may be methylated to form 5-methylcytosine"
aactttatgttcattttttaagaagtcaagtatctcctcattttggcatttgatgagtaacgggagaaaacctgagaagagacagaagtaatgcaaaggtcaccgtatcttccagcataagt

SEQ ID NO: 3837 - DNA, 122 bp, Homo sapiens
  misc_feature (61)..(62): /note="This region represents a CpG dinucleotide"
  misc_feature (61)..(61): /note="Nucleotide may be methylated to form 5-methylcytosine"
ggtccttatatgtgtacaacattaaaatgaaaggctttgtcttgcattgtgaggtacaggcggaagttggaatcaggttttaggattctgtctctcattagctgaataatgtgaggattaac

SEQ ID NO: 3838 - DNA, 122 bp, Homo sapiens
  misc_feature (61)..(62): /note="This region represents a CpG dinucleotide"
  misc_feature (61)..(61): /note="Nucleotide may be methylated to form 5-methylcytosine"
aattcctccacttaacagtcactgcttggggttaaggctctgcctctgtagaaatcttcccgtacaagctaactacaagtggtaggctcttcttatcctaagctcttaatcagtcattaact

SEQ ID NO: 3839 - DNA, 122 bp, Homo sapiens
  misc_feature (61)..(62): /note="This region represents a CpG dinucleotide"
  misc_feature (61)..(61): /note="Nucleotide may be methylated to form 5-methylcytosine"
ctaactgagatgcaccaggcataggcttagccatctttcttttctactgactcataagaacgagtcagggaaatgtgtgttgcttcttcaagctctgcaggcaatggttatgtgcagtcttg

SEQ ID NO: 3840 - DNA, 122 bp, Homo sapiens
  misc_feature (61)..(62): /note="This region represents a CpG dinucleotide"
  misc_feature (61)..(61): /note="Nucleotide may be methylated to form 5-methylcytosine"
atgagccgcagggaggcatctgtgatgtccaggcctgccaggcgcagctccacgatgttccggagcttgctccgattgtccatctgacctggtggggcaggaaggagggggcaacccgtcaa

SEQ ID NO: 3841 - DNA, 122 bp, Homo sapiens
  misc_feature (61)..(62): /note="This region represents a CpG dinucleotide"
  misc_feature (61)..(61): /note="Nucleotide may be methylated to form 5-methylcytosine"
ggtctggtgtttgaagacagcttgaccttggatgagatcatgcctatgtcaggtcacccacgctccatgcacctgactcatcagtgttagttcaaatagagcattggttagaaatcacccac

SEQ ID NO: 3842 - DNA, 122 bp, Homo sapiens
  misc_feature (61)..(62): /note="This region represents a CpG dinucleotide"
  misc_feature (61)..(61): /note="Nucleotide may be methylated to form 5-methylcytosine"
gagatgagccgggaagtacacggacagggagtgtggggcgcggccagggaggttccgcgacgccctcccctgactctcactccagctaccagggtgagggtgaatcaccccgattttagctt

SEQ ID NO: 3843 - DNA, 122 bp, Homo sapiens
  misc_feature (61)..(62): /note="This region represents a CpG dinucleotide"
  misc_feature (61)..(61): /note="Nucleotide may be methylated to form 5-methylcytosine"
agacctttgggcgaggacagtgaagatgaggacagtaaagctcggcagctttgattcaaacgtagcacttgcagaaagacctgtggttgtaccttaatgtaagtactgaaaaaagcacagta

SEQ ID NO: 3844 - DNA, 122 bp, Homo sapiens
  misc_feature (61)..(62): /note="This region represents a CpG dinucleotide"
  misc_feature (61)..(61): /note="Nucleotide may be methylated to form 5-methylcytosine"
acaagaagtttttacataaacagacacagtaccagagggttattgctatgggcagtcacacgtacacgacacccagtcagtattgcttttctcagtgccagtgcctaagtaagtctgacctg

SEQ ID NO: 3845 - DNA, 122 bp, Homo sapiens
  misc_feature (61)..(62): /note="This region represents a CpG dinucleotide"
  misc_feature (61)..(61): /note="Nucleotide may be methylated to form 5-methylcytosine"
cagtcatcctagctctggacaactctgagtgactcatgggggccgtggtctgacagactgcgtcttcctcccaccagcccaatgcaaccccacagctgcccagaacaagcctgtttctttct

SEQ ID NO: 3846 - DNA, 122 bp, Homo sapiens
  misc_feature (61)..(62): /note="This region represents a CpG dinucleotide"
  misc_feature (61)..(61): /note="Nucleotide may be methylated to form 5-methylcytosine"
gtcccagcaactagggaggatgaagtgggaggattgcttgagcctgggaggtcgaggctgcggtgagctgtgatagcaccattgcacaatctaaactgggccacagagcaagacctcgtctc

SEQ ID NO: 3847 - DNA, 122 bp, Homo sapiens
  misc_feature (61)..(62): /note="This region represents a CpG dinucleotide"
  misc_feature (61)..(61): /note="Nucleotide may be methylated to form 5-methylcytosine"
ggcggggacccagctgcgccccttcccgcggccctcctagggcctgggtgcttggaggctcgaggccccaagatccatgtcgcccggaatcccggtgcctaggccttgtcgcgggccctggg

SEQ ID NO: 3848 - DNA, 122 bp, Homo sapiens
  misc_feature (61)..(62): /note="This region represents a CpG dinucleotide"
  misc_feature (61)..(61): /note="Nucleotide may be methylated to form 5-methylcytosine"
ttgtcctgtacagcctgtctgtagatgcttcacatgactaagcaacagtctgtgtttgctcgtgcagctgtggacagcttagtgaccaacttacatttgttttttcctccttatgtaccata

SEQ ID NO: 3849 - DNA, 122 bp, Homo sapiens
  misc_feature (61)..(62): /note="This region represents a CpG dinucleotide"
  misc_feature (61)..(61): /note="Nucleotide may be methylated to form 5-methylcytosine"
tgaaagcagacttctctattgagggctgtcccataatgactcataagaacttagtcctgccgagcgcagtggctcatgcctataaccccagcactttgggaggccgaggcaggcggatcacc

SEQ ID NO: 3850 - DNA, 122 bp, Homo sapiens
  misc_feature (61)..(62): /note="This region represents a CpG dinucleotide"
  misc_feature (61)..(61): /note="Nucleotide may be methylated to form 5-methylcytosine"
aatagatggagagagatggatcagggcagggcaggggtggagaagtgagctagtgcagtccgggcggatgctttagaaataccctggaagtggtaataaaggcctaagttagtatgactgca

SEQ ID NO: 3851 - DNA, 122 bp, Homo sapiens
  misc_feature (61)..(62): /note="This region represents a CpG dinucleotide"
  misc_feature (61)..(61): /note="Nucleotide may be methylated to form 5-methylcytosine"
cttgtagttctctctttctgacatatttttccttgttacttttgtctgtctgtctcctttcgttatccagatctcaagcttaaatattacatctttagaaaggtcttccctaaccacccaat

SEQ ID NO: 3852 - DNA, 122 bp, Homo sapiens
  misc_feature (61)..(62): /note="This region represents a CpG dinucleotide"
  misc_feature (61)..(61): /note="Nucleotide may be methylated to form 5-methylcytosine"
aagcgctgagtggaattctggggggtgtgcacgcacgtgctttttacctgtgtttccactcggcctattttttccttctctcctatagggagcatgattgagcggatattagtgtcgtgcaa

SEQ ID NO: 3853 - DNA, 122 bp, Homo sapiens
  misc_feature (61)..(62): /note="This region represents a CpG dinucleotide"
  misc_feature (61)..(61): /note="Nucleotide may be methylated to form 5-methylcytosine"
cgccgggctgcggcggcggagtggtggcgacagcggattccgtgcccggtggccgcgcgccgcccggctgttccgcgtccccttgccggctcacaatgtgctgaccctcccggccccgccgc

SEQ ID NO: 3854 - DNA, 122 bp, Homo sapiens
  misc_feature (61)..(62): /note="This region represents a CpG dinucleotide"
  misc_feature (61)..(61): /note="Nucleotide may be methylated to form 5-methylcytosine"
acaaaagtaaatcattgaaatgtagtcattctcttaatcatctaatggttttattacttacgtatagacaaatgcacacagggcaccctgttgtcttcagtaaggtcattgagtaatcatta

SEQ ID NO: 3855 - DNA, 122 bp, Homo sapiens
  misc_feature (61)..(62): /note="This region represents a CpG dinucleotide"
  misc_feature (61)..(61): /note="Nucleotide may be methylated to form 5-methylcytosine"
tgcaaaatcactgtttctcatttatgggctccatcctagcgctcttactgattactcaaccgcaaccctgtcctgaactttattctttttttctgtgttggcctggatattgttgtttctct

SEQ ID NO: 3856 - DNA, 122 bp, Homo sapiens
  misc_feature (61)..(62): /note="This region represents a CpG dinucleotide"
  misc_feature (61)..(61): /note="Nucleotide may be methylated to form 5-methylcytosine"
tgggcccaagagatcactgagctggcacagggcccaggcagagacttcctacagctgcaccggcatgacagctacgccccaccccggcctgggaccttggcccggtggtgagacactgacat

SEQ ID NO: 3857 - DNA, 122 bp, Homo sapiens
  misc_feature (61)..(62): /note="This region represents a CpG dinucleotide"
  misc_feature (61)..(61): /note="Nucleotide may be methylated to form 5-methylcytosine"
ttacgtgttctaacttgcaagtctctttccctcttactctgctaagaataaaagaaaaggcggaaggaagagatgaaaagggggtcattccaactcattaaaacagggaaaaaccaactatt

SEQ ID NO: 3858 - DNA, 122 bp, Homo sapiens
  misc_feature (61)..(62): /note="This region represents a CpG dinucleotide"
  misc_feature (61)..(61): /note="Nucleotide may be methylated to form 5-methylcytosine"
cctaaaatctcccctaccaggcagcttccttttcttcaggctctccttctcccagaactacgatctaagcttccttggtgaggagacacaggactagtgccctcacatttttagccttcaga

SEQ ID NO: 3859 - DNA, 122 bp, Homo sapiens
  misc_feature (61)..(62): /note="This region represents a CpG dinucleotide"
  misc_feature (61)..(61): /note="Nucleotide may be methylated to form 5-methylcytosine"
agtgatccgcctgcctcggcttcccaaagtgctgggattactggcatgagccactgcgcccgacctccattttttgattattatcattggggtcactgtggcaggtgtgaagcaataccaca

SEQ ID NO: 3860 - DNA, 122 bp, Homo sapiens
  misc_feature (61)..(62): /note="This region represents a CpG dinucleotide"
  misc_feature (61)..(61): /note="Nucleotide may be methylated to form 5-methylcytosine"
agttcatgtccatgtatctttctgctatgaatgcccagcgcaggcccctcccacgttcagcgcaggctcgccaacgcctaccactcagtgttccaaactgggtgcctttgaaagcactgcac

SEQ ID NO: 3861 - DNA, 122 bp, Homo sapiens
  misc_feature (61)..(62): /note="This region represents a CpG dinucleotide"
  misc_feature (61)..(61): /note="Nucleotide may be methylated to form 5-methylcytosine"
tttgagctttgacttctccccagccaattaagatcaaaagctatggggatgtacacaacccgtagagtttactacacccaataccttttactacacccaatactacactcaataccttcctc

SEQ ID NO: 3862 - DNA, 122 bp, Homo sapiens
  misc_feature (61)..(62): /note="This region represents a CpG dinucleotide"
  misc_feature (61)..(61): /note="Nucleotide may be methylated to form 5-methylcytosine"
ggcactgtgggcgggagggcgggtggaaggagagcctcagggggctgcccagggtgcacacgctccccaaatccagcctgacactcctgtgtcctctgcagccagatgaaaggtggccccag

SEQ ID NO: 3863 - DNA, 122 bp, Homo sapiens
  misc_feature (61)..(62): /note="This region represents a CpG dinucleotide"
  misc_feature (61)..(61): /note="Nucleotide may be methylated to form 5-methylcytosine"
gtcccccttgagctaaataattatctcttgaagccacttgctatgctctagactaactcacgccaagtagccataaatgccatataccctatagctcaacaacgtgtagccaatcactaacc

SEQ ID NO: 3864 - DNA, 122 bp, Homo sapiens
  misc_feature (61)..(62): /note="This region represents a CpG dinucleotide"
  misc_feature (61)..(61): /note="Nucleotide may be methylated to form 5-methylcytosine"
tcattcatttatctattcaccaatattaagcacccactgtgtaggaggcactgttctaggcgctgcagatacagaagtaaacaaaatgacaaagtcctagttacacattctaggaaataaga

SEQ ID NO: 3865 - DNA, 122 bp, Homo sapiens
  misc_feature (61)..(62): /note="This region represents a CpG dinucleotide"
  misc_feature (61)..(61): /note="Nucleotide may be methylated to form 5-methylcytosine"
tgatgttcacacaacaatgaaattgcatttttcaaaagataaccccattgttcagcaacacgtgacttactttgggcagtgcaatgaaaaaagctgaaggataattatttatttcatgattg

SEQ ID NO: 3866 - DNA, 122 bp, Homo sapiens
  misc_feature (61)..(62): /note="This region represents a CpG dinucleotide"
  misc_feature (61)..(61): /note="Nucleotide may be methylated to form 5-methylcytosine"
cattcaccaaagtgtgaattactcagtctataaaccactagtgtagcagcaatacagtcacggttaacctttgcccagcctcatcaaattctcttttctctgtgaagattaggcaagcatgt

SEQ ID NO: 3867 - DNA, 122 bp, Homo sapiens
  misc_feature (61)..(62): /note="This region represents a CpG dinucleotide"
  misc_feature (61)..(61): /note="Nucleotide may be methylated to form 5-methylcytosine"
acagctgctgctccaaaaccacaatacctttaaaatgacattttaaggaaacagatacggcgtggctttagccatagttagatgtagctaacactgaattaaaggggcttttctttttatac

SEQ ID NO: 3868 - DNA, 122 bp, Homo sapiens
  misc_feature (61)..(62): /note="This region represents a CpG dinucleotide"
  misc_feature (61)..(61): /note="Nucleotide may be methylated to form 5-methylcytosine"
ttgtttagttaaggtaacagaaacttcaactggtgtttcaattggaggaaatttaatacacggtatagttacaaaagggtcagaaagcctagaatagccaaaagagaaaagtaaacttcctt

SEQ ID NO: 3869 - DNA, 122 bp, Homo sapiens
  misc_feature (61)..(62): /note="This region represents a CpG dinucleotide"
  misc_feature (61)..(61): /note="Nucleotide may be methylated to form 5-methylcytosine"
atttttcttccttagtaaaaacaaccccttggtcttagattctgctcttgtacagtcatccgtacagtggccagggcttaagctctggtactgtatgagtatgcaaacaagcagatttcaca

SEQ ID NO: 3870 - DNA, 122 bp, Homo sapiens
  misc_feature (61)..(62): /note="This region represents a CpG dinucleotide"
  misc_feature (61)..(61): /note="Nucleotide may be methylated to form 5-methylcytosine"
taacgcattataattagcatatagtgagcagtgagcacaaccagaggtcgggatttgcctcgcttctttaccccaacctgttttgtcagcagggcctttgtgacctgactttgtgctgacct

SEQ ID NO: 3871 - DNA, 122 bp, Homo sapiens
  misc_feature (61)..(62): /note="This region represents a CpG dinucleotide"
  misc_feature (61)..(61): /note="Nucleotide may be methylated to form 5-methylcytosine"
agtagctatactggtttgcattcccactaggaatgaatcaaagttcccactgctgctgggcgtggtagctcacgcctgtaatcccagcactttgggaggccgaggcaggcagatcacttgag

SEQ ID NO: 3872 - DNA, 122 bp, Homo sapiens
  misc_feature (61)..(62): /note="This region represents a CpG dinucleotide"
  misc_feature (61)..(61): /note="Nucleotide may be methylated to form 5-methylcytosine"
cccaagagcttgaagcctcgtgagcagagccaactattgctaaacactataaccaggggacgctcagggatccagctgcctctcacatctgggaagatttcctggaaccaagacaccctggc

SEQ ID NO: 3873 - DNA, 122 bp, Homo sapiens
  misc_feature (61)..(62): /note="This region represents a CpG dinucleotide"
  misc_feature (61)..(61): /note="Nucleotide may be methylated to form 5-methylcytosine"
gtacaggagtgagtcatagcttgtgccctgtgccctgcaggggaatttggggaagtgtgccgtggtcgactgaaacagcctggccgccgagaggtgtttgtggccatcaagacgctgaaggt

SEQ ID NO: 3874 - DNA, 122 bp, Homo sapiens
  misc_feature (61)..(62): /note="This region represents a CpG dinucleotide"
  misc_feature (61)..(61): /note="Nucleotide may be methylated to form 5-methylcytosine"
tgttgcaactcccctgtctggataattcagctctgtctgagcagtggttcaaggagaacccgctgggtggttagaatcagcttcactttcaaagggcctacaatgtcctcattaatttcttc

SEQ ID NO: 3875 - DNA, 122 bp, Homo sapiens
  misc_feature (61)..(62): /note="This region represents a CpG dinucleotide"
  misc_feature (61)..(61): /note="Nucleotide may be methylated to form 5-methylcytosine"
ctacatgatgaatgtgtcggccactgaccaggccccgcccttcaaccagggcttctgcagcgtctacatcactctgctcaacgagctggacgaggccgtgcagttctccaatgcctcatacg

SEQ ID NO: 3876 - DNA, 122 bp, Homo sapiens
  misc_feature (61)..(62): /note="This region represents a CpG dinucleotide"
  misc_feature (61)..(61): /note="Nucleotide may be methylated to form 5-methylcytosine"
cttgggatgaatctgataagcaaatcatgaaatgattatttagacacaagatgtgttgctcgacagtatgcctaaagtatatcatgactaaggaatgaatgctacttaatgttgaaatcaga

SEQ ID NO: 3877 - DNA, 122 bp, Homo sapiens
  misc_feature (61)..(62): /note="This region represents a CpG dinucleotide"
  misc_feature (61)..(61): /note="Nucleotide may be methylated to form 5-methylcytosine"
tcccaggcacatgttgtgcaactgagccatggggctagggtagaaagccgtagtgagatacggtcccgcgtctcaaagagtcagcattcaaggggcgtgtgtgtataatacaaggcggagaa

SEQ ID NO: 3878 - DNA, 122 bp, Homo sapiens
  misc_feature (61)..(62): /note="This region represents a CpG dinucleotide"
  misc_feature (61)..(61): /note="Nucleotide may be methylated to form 5-methylcytosine"
tgaaaattaggaaaccatgctgttggcaatctcttcttcataattgtatgggagtagcaccgagtctgctgtttttggcaatcacagacaggttggtgactctgtagagagcagaggtgtgt

SEQ ID NO: 3879 - DNA, 122 bp, Homo sapiens
  misc_feature (61)..(62): /note="This region represents a CpG dinucleotide"
  misc_feature (61)..(61): /note="Nucleotide may be methylated to form 5-methylcytosine"
gacacggccagtaagctgtggagtctggatttgaactaggctctcttggagtttggagcccggtcttttcatttctggcagagacctgtggcttcagggggcggagcccagcccatggggga

SEQ ID NO: 3880 - DNA, 122 bp, Homo sapiens
  misc_feature (61)..(62): /note="This region represents a CpG dinucleotide"
  misc_feature (61)..(61): /note="Nucleotide may be methylated to form 5-methylcytosine"
gattacaggcatgcaccactgcacctagccacacttctcattttcaaaacttaactacaacgctacagtgatcaaagcagtgtggtgatggcataaggacagatcatacagaacaatggaat

SEQ ID NO: 3881 - DNA, 122 bp, Homo sapiens
  misc_feature (61)..(62): /note="This region represents a CpG dinucleotide"
  misc_feature (61)..(61): /note="Nucleotide may be methylated to form 5-methylcytosine"
ttttatctcttttccatgaaatcacactggcagacttcttgtacaaatgtcatgccgtgtcgtttctcatccagcaccacatcccctgtggctagcaggttgaagcaagcttcctgaatatt

SEQ ID NO: 3882 - DNA, 122 bp, Homo sapiens
  misc_feature (61)..(62): /note="This region represents a CpG dinucleotide"
  misc_feature (61)..(61): /note="Nucleotide may be methylated to form 5-methylcytosine"
cttctgatcttgggcaatcaaactcacatgtctgcagtcagctggggttgggaaagcgggcgtcatctgaaggctggtgactggaatatcctcctttacaagtttggcagttggctggtcat

SEQ ID NO: 3883 - DNA, 122 bp, Homo sapiens
  misc_feature (61)..(62): /note="This region represents a CpG dinucleotide"
  misc_feature (61)..(61): /note="Nucleotide may be methylated to form 5-methylcytosine"
ggcaggggctgggctggatgtggtctccctagggccattgttgcttctgttacatgatcccgccagctcacctgggacagaacgtgcattttccactctccctcctccccgcagtgagagaa

SEQ ID NO: 3884 - DNA, 122 bp, Homo sapiens
  misc_feature (61)..(62): /note="This region represents a CpG dinucleotide"
  misc_feature (61)..(61): /note="Nucleotide may be methylated to form 5-methylcytosine"
ctgttgacagacaccagcacaaaggaaatgaatagagtccccctcagttctcacacagagcgaagaatgactcagtgtactgctgctttggtgctctgtttgtacagtgtatacagcttttg

SEQ ID NO: 3885 - DNA, 122 bp, Homo sapiens
  misc_feature (61)..(62): /note="This region represents a CpG dinucleotide"
  misc_feature (61)..(61): /note="Nucleotide may be methylated to form 5-methylcytosine"
cttgggtattacgtaaccatgatgcgaatgactggtacaaatccaagtaacacttcaatacgtttgtaagggattataattgaaaagtcaccattcccctggaaccttaataataaaatgtt

SEQ ID NO: 3886 - DNA, 122 bp, Homo sapiens
  misc_feature (61)..(62): /note="This region represents a CpG dinucleotide"
  misc_feature (61)..(61): /note="Nucleotide may be methylated to form 5-methylcytosine"
ggataactcagcttgacctgattcacagcttcttaaagcactgtgtataaacacaactttcgtattgatttttctatacatccaaatttccccttgatctttcaaccacagtagttctgaaa

SEQ ID NO: 3887 - DNA, 122 bp, Homo sapiens
  misc_feature (61)..(62): /note="This region represents a CpG dinucleotide"
  misc_feature (61)..(61): /note="Nucleotide may be methylated to form 5-methylcytosine"
atcactccatttcaagggaccaaaagccctattaacttaattcccttattttatagctgacggaatttaggcccagggaggaaatgctttgtacaaaactcactgctggtggctgacgttgg

SEQ ID NO: 3888 - DNA, 122 bp, Homo sapiens
  misc_feature (61)..(62): /note="This region represents a CpG dinucleotide"
  misc_feature (61)..(61): /note="Nucleotide may be methylated to form 5-methylcytosine"
tttttttttttaaagaatttttttttggccgcgcgtggtggctcaacgcctgtaatctcccgggttcaagtgattctcctgcctcagcctcccaagtagctgggaactacaggcgcgtgcca

SEQ ID NO: 3889 - DNA, 122 bp, Homo sapiens
  misc_feature (61)..(62): /note="This region represents a CpG dinucleotide"
  misc_feature (61)..(61): /note="Nucleotide may be methylated to form 5-methylcytosine"
cctgctccactattttctctccagttgctcaagccacagttcctagatgacctttgacaccgttctctcctacacacccttgcacatattcagagcttagtcacatctcattgtctacactg

SEQ ID NO: 3890 - DNA, 122 bp, Homo sapiens
  misc_feature (61)..(62): /note="This region represents a CpG dinucleotide"
  misc_feature (61)..(61): /note="Nucleotide may be methylated to form 5-methylcytosine"
tgttgcctggattaatttgggaatcatttcctactgacaacacagcaaaatcgacagcctcgtgctccaaagcaccaagtcagcaaaaaatgtttgtgcatattaaaatctatctcattatt

SEQ ID NO: 3891 - DNA, 122 bp, Homo sapiens
  misc_feature (61)..(62): /note="This region represents a CpG dinucleotide"
  misc_feature (61)..(61): /note="Nucleotide may be methylated to form 5-methylcytosine"
gacaaaatcgattttggcttttcctgaaaatggatcttattttgagaaccacagttgacacggctgtgggaagtgttgcttattcttggcaagaaaactaccctgaaaaggtgcttatgatc

SEQ ID NO: 3892 - DNA, 122 bp, Homo sapiens
  misc_feature (61)..(62): /note="This region represents a CpG dinucleotide"
  misc_feature (61)..(61): /note="Nucleotide may be methylated to form 5-methylcytosine"
cgagcagtggagcctacatgaggtggctctctgtatatcatgcatacatacatgcatgtacgtatgtctaggtgttatgtaaaacactatttaaatcccataagattcaagacttggtaaga

SEQ ID NO: 3893 - DNA, 122 bp, Homo sapiens
  misc_feature (61)..(62): /note="This region represents a CpG dinucleotide"
  misc_feature (61)..(61): /note="Nucleotide may be methylated to form 5-methylcytosine"
accgctctgtccctacaacacaaaacaaagacctgccactgtgctaaagaaacttgaaaacgtgctgtcagcagccaagcacagaatgacacaatacagtggacaatacagtgggcacacaa

SEQ ID NO: 3894 - DNA, 122 bp, Homo sapiens
  misc_feature (61)..(62): /note="This region represents a CpG dinucleotide"
  misc_feature (61)..(61): /note="Nucleotide may be methylated to form 5-methylcytosine"
agttgccacataaattctagctcaattcctgtatcattatctccaattccaaattagtgacgtccagaatgatggggttttattgtattatctggaaaaaattaatgtatcaaagctttaaa

SEQ ID NO: 3895 - DNA, 122 bp, Homo sapiens
  misc_feature (61)..(62): /note="This region represents a CpG dinucleotide"
  misc_feature (61)..(61): /note="Nucleotide may be methylated to form 5-methylcytosine"
cacgtggagacggacactgagggcgcggcgggcgcggggcctggggggcgcctgacacgccggccgtccttcagctcgcaccacctcatgccctgcgacactctggcgcgccgccgcctggc

SEQ ID NO: 3896 - DNA, 122 bp, Homo sapiens
  misc_feature (61)..(62): /note="This region represents a CpG dinucleotide"
  misc_feature (61)..(61): /note="Nucleotide may be methylated to form 5-methylcytosine"
gcctggctcacaagatttaacagatttcctaggaactcaattgatttcctctttctcagccgcatttgccctccctggagaggataaaagctatttaacttgatgggtggagatctgagcaa

SEQ ID NO: 3897 - DNA, 122 bp, Homo sapiens
  misc_feature (61)..(62): /note="This region represents a CpG dinucleotide"
  misc_feature (61)..(61): /note="Nucleotide may be methylated to form 5-methylcytosine"
gccgggtaggatggctccgtgtccagagagcggcttagtggagtggtaagaggcacattccgattgcctcgctccctggagctgcctccagcactaccattaacttggataaatcccataaa

SEQ ID NO: 3898 - DNA, 122 bp, Homo sapiens
  misc_feature (61)..(62): /note="This region represents a CpG dinucleotide"
  misc_feature (61)..(61): /note="Nucleotide may be methylated to form 5-methylcytosine"
actttatccaagagagaattctgagattggtttctattcttgagtattccatgaactagccgtatgatgtatgattcaaccacttactgtaagtctcaaatttattcatttgcaaatgagac

SEQ ID NO: 3899 - DNA, 122 bp, Homo sapiens
  misc_feature (61)..(62): /note="This region represents a CpG dinucleotide"
  misc_feature (61)..(61): /note="Nucleotide may be methylated to form 5-methylcytosine"
ttgaagagcatgtaatgaagaaactatgtgtagagtgtgggcaggtccacgtgcatgacacggtatgactcccagggatcagcaacagtggggagtcattactactctggggctgaagggca

SEQ ID NO: 3900 - DNA, 122 bp, Homo sapiens
  misc_feature (61)..(62): /note="This region represents a CpG dinucleotide"
  misc_feature (61)..(61): /note="Nucleotide may be methylated to form 5-methylcytosine"
acccccatttctgtccccattgtgccccgatgttacatcacacactatgattaaattggacgtcagtgcttaaattgttatgaccacgcacacattctctgctgaaccagtagtgctctgca

SEQ ID NO: 3901 - DNA, 122 bp, Homo sapiens
  misc_feature (61)..(62): /note="This region represents a CpG dinucleotide"
  misc_feature (61)..(61): /note="Nucleotide may be methylated to form 5-methylcytosine"
cagctgatgtccacatactcccttgagacttgaaatcacaaacaaatatccatgtgtacacgcacattcatttttgtaacgcatccttgttcttaatggcatgttgcaaaatttacaacagt

SEQ ID NO: 3902 - DNA, 122 bp, Homo sapiens
  misc_feature (61)..(62): /note="This region represents a CpG dinucleotide"
  misc_feature (61)..(61): /note="Nucleotide may be methylated to form 5-methylcytosine"
cctggggttacataaggtgctgttccagttataagacagactcatgccctgagacggccccgcctcccctcgtcctgctacgttatgtctttgactttgtgaagtcactcctcctgtcactg

SEQ ID NO: 3903 - DNA, 122 bp, Homo sapiens
  misc_feature (61)..(62): /note="This region represents a CpG dinucleotide"
  misc_feature (61)..(61): /note="Nucleotide may be methylated to form 5-methylcytosine"
atcagagatgtggaaataataggcgcgtgtatatgtaagtatgagatattcatctcacagcgcctgtcatgtaggaggtgatttaaaattattaaaggaaggaaaacagtatcctgtcccag

SEQ ID NO: 3904 - DNA, 122 bp, Homo sapiens
  misc_feature (61)..(62): /note="This region represents a CpG dinucleotide"
  misc_feature (61)..(61): /note="Nucleotide may be methylated to form 5-methylcytosine"
cagatgagcattataacctcctaagctctaccctacatggtttaaaaacctgccctaagacgacaactggaatgtgatctgttcagaaggtggaacagggcagttattcaagaagttatctg

SEQ ID NO: 3905 - DNA, 122 bp, Homo sapiens
  misc_feature (61)..(62): /note="This region represents a CpG dinucleotide"
  misc_feature (61)..(61): /note="Nucleotide may be methylated to form 5-methylcytosine"
agaatcgtgactgggaaagaagagatgctaggagtaaccccgagggcagctttacattcacggataagcacagtggcatttgactcgtgcattgactggaagccaaaccctgcatttgtgac

SEQ ID NO: 3906 - DNA, 122 bp, Homo sapiens
  misc_feature (61)..(62): /note="This region represents a CpG dinucleotide"
  misc_feature (61)..(61): /note="Nucleotide may be methylated to form 5-methylcytosine"
tccaattgtgacaaccggaaatgtctctaagaattgccaaatgcctagtgaaatcatcctcgctccacttttggcaaccactgtttcacatgatacctgtttttttgaggtgctttagtatt

SEQ ID NO: 3907 - DNA, 122 bp, Homo sapiens
  misc_feature (61)..(62): /note="This region represents a CpG dinucleotide"
  misc_feature (61)..(61): /note="Nucleotide may be methylated to form 5-methylcytosine"
catcttcgtgtatgtgcatgcatttgtgtgtgtgtgtgtgtgtgtgtgtgtgtatacgtacgcgtgttgggattaggggtgctctctgatgggctacagagacaataatgagagatatttgg

SEQ ID NO: 3908 - DNA, 122 bp, Homo sapiens
  misc_feature (61)..(62): /note="This region represents a CpG dinucleotide"
  misc_feature (61)..(61): /note="Nucleotide may be methylated to form 5-methylcytosine"
gattcagctgccacgtggatgaaccttgagtaccttaagctaagtgaaataagtcagtcacgaaagaatactgtgtgattccacttgtttgaggtacctggagtagtcatagttctagagac

SEQ ID NO: 3909 - DNA, 122 bp, Homo sapiens
  misc_feature (61)..(62): /note="This region represents a CpG dinucleotide"
  misc_feature (61)..(61): /note="Nucleotide may be methylated to form 5-methylcytosine"
tacccatgtcctttaagattacagtcctggccctgtgataagccagatgcagatccacatcgtactcattcactgaaagagaggcgttggctttgtctgatgctagctttttcttaggcgca

SEQ ID NO: 3910 - DNA, 122 bp, Homo sapiens
  misc_feature (61)..(62): /note="This region represents a CpG dinucleotide"
  misc_feature (61)..(61): /note="Nucleotide may be methylated to form 5-methylcytosine"
gggcctttccctcctcacctgtaaaactgttagtttggcccaatcatgtagaagcttctccgccccacacacatacacactcctgtctttagagtctgtctgggcacagggcagctccctac

SEQ ID NO: 3911 - DNA, 122 bp, Homo sapiens
  misc_feature (61)..(62): /note="This region represents a CpG dinucleotide"
  misc_feature (61)..(61): /note="Nucleotide may be methylated to form 5-methylcytosine"
tcaccttggttttagaaatttcccgttgctgtggttgtaaggatacatgattctggcacacggcctcttagcacagttttgatggacagtagcagcttctggctagtctccctgtttcagtt

SEQ ID NO: 3912 - DNA, 122 bp, Homo sapiens
  misc_feature (61)..(62): /note="This region represents a CpG dinucleotide"
  misc_feature (61)..(61): /note="Nucleotide may be methylated to form 5-methylcytosine"
aggttccggagctgttggacaagtctcttattccccatgctacacaacctgaaagcaaggcgttctccttgaaaatgaaaggagattgtttcgggtatctttctggggtggcgtctggagac

SEQ ID NO: 3913 - DNA, 122 bp, Homo sapiens
  misc_feature (61)..(62): /note="This region represents a CpG dinucleotide"
  misc_feature (61)..(61): /note="Nucleotide may be methylated to form 5-methylcytosine"
gtcacacaacctctctgggcctgcttcctgatgattagattagaatgcctagagagagtgcgatcactgtcaactcctgcagttgctcaggagaagcaattggatgctgggctttcctgttg

SEQ ID NO: 3914 - DNA, 122 bp, Homo sapiens
  misc_feature (61)..(62): /note="This region represents a CpG dinucleotide"
  misc_feature (61)..(61): /note="Nucleotide may be methylated to form 5-methylcytosine"
caacagggcacctttatgggatccttcagcctaccttttgtctggcataccaactgtcatcgtggtcaagttttatttctcattcccacctgcacctcacatcctcccaagcttgtccaact

SEQ ID NO: 3915 - DNA, 122 bp, Homo sapiens
  misc_feature (61)..(62): /note="This region represents a CpG dinucleotide"
  misc_feature (61)..(61): /note="Nucleotide may be methylated to form 5-methylcytosine"
gagtgatttacccttcttgttgcccctgaaccttgctggagaaactggttctttctatttcgtggagggaatggctcttttcttgaagattcacttcccttctcctggcctcagtctcatca

SEQ ID NO: 3916 - DNA, 122 bp, Homo sapiens
  misc_feature (61)..(62): /note="This region represents a CpG dinucleotide"
  misc_feature (61)..(61): /note="Nucleotide may be methylated to form 5-methylcytosine"
aataagcttctgtcaccaagtttcccaggatccaaacccaccactcaactgattgattaacgaaggttttgggtgtgacagatatctgggttttcatatcagtcataagtcagattatgttc

SEQ ID NO: 3917 - DNA, 122 bp, Homo sapiens
  misc_feature (61)..(62): /note="This region represents a CpG dinucleotide"
  misc_feature (61)..(61): /note="Nucleotide may be methylated to form 5-methylcytosine"
ctccgttgcacgtaccctaacaaccacccaaggagggggtgttgtctttgtatcccagaacggttaagcagcttacttgggatcacacagtaagtagcgtggcaagaacttgcactcaagct

SEQ ID NO: 3918 - DNA, 122 bp, Homo sapiens
  misc_feature (61)..(62): /note="This region represents a CpG dinucleotide"
  misc_feature (61)..(61): /note="Nucleotide may be methylated to form 5-methylcytosine"
ggactgccttctcgagactgtgagctgtcagtgactaagggttcatcatttttatgctctcggtacttggcacagagctaaacgaatcaggccttgcattataaagcactgatctatctact

SEQ ID NO: 3919 - DNA, 122 bp, Homo sapiens
  misc_feature (61)..(62): /note="This region represents a CpG dinucleotide"
  misc_feature (61)..(61): /note="Nucleotide may be methylated to form 5-methylcytosine"
gcagcttgcacaatcactgagctgccaactcggagttcttggagcagtgctgacagtgagcgcagtgttggtgtttacttgagtcatcgtcgtgtggtcatgatgacgagtcacaaagattt

SEQ ID NO: 3920 - DNA, 122 bp, Homo sapiens
  misc_feature (61)..(62): /note="This region represents a CpG dinucleotide"
  misc_feature (61)..(61): /note="Nucleotide may be methylated to form 5-methylcytosine"
gtggagtctcatctgcgtgtgcctcacttgcaccccagatgcaggaccctggaaagtagccgtctctgggttttctactccagggataacatgacctgctggattaatgtgctgaaggacat

SEQ ID NO: 3921 - DNA, 122 bp, Homo sapiens
  misc_feature (61)..(62): /note="This region represents a CpG dinucleotide"
  misc_feature (61)..(61): /note="Nucleotide may be methylated to form 5-methylcytosine"
aggagtggctgcattcaggtggcttcatttttttctgtcgattgggagaggaatttaatgcgttagcagtgcgcatgggccagcctgaattgtttctgcaaagattactcttccaaaagtca

SEQ ID NO: 3922 - DNA, 122 bp, Homo sapiens
  misc_feature (61)..(62): /note="This region represents a CpG dinucleotide"
  misc_feature (61)..(61): /note="Nucleotide may be methylated to form 5-methylcytosine"
gctttgattttcacatgtaccatctcctgcagctaagcttctgtgttaacctcctgtcatcgtctctttcatgggcagcccagtaagccacacctcctgagactcatgcgcttgtacagtct

SEQ ID NO: 3923 - DNA, 122 bp, Homo sapiens
  misc_feature (61)..(62): /note="This region represents a CpG dinucleotide"
  misc_feature (61)..(61): /note="Nucleotide may be methylated to form 5-methylcytosine"
ggttaatccctctgtggaaacattgggttgaaagcccggaggaggtcaggggtctgattacggcttctgtttacatataaacttcctggtcctaggagacaatcggaggggtgggggaaggg

SEQ ID NO: 3924 - DNA, 122 bp, Homo sapiens
  misc_feature (61)..(62): /note="This region represents a CpG dinucleotide"
  misc_feature (61)..(61): /note="Nucleotide may be methylated to form 5-methylcytosine"
ctaggaacgcacagcctgagtctcatcaggagggaatgtgagataaacaggaagggaggacggggaaccaggatgcatcaaaaatgtccatgtgacaaaagacaaaggcagagcaatcatcc

SEQ ID NO: 3925 - DNA, 122 bp, Homo sapiens
  misc_feature (61)..(62): /note="This region represents a CpG dinucleotide"
  misc_feature (61)..(61): /note="Nucleotide may be methylated to form 5-methylcytosine"
ttacagggagggaagcaaggcccagagaagccaagcgacttattcaaggtcacacagtgacggcagagtcaggaccagacatggatgtgtcttgattcatgattcagtacagtcttgggctt

SEQ ID NO: 3926 - DNA, 122 bp, Homo sapiens
  misc_feature (61)..(62): /note="This region represents a CpG dinucleotide"
  misc_feature (61)..(61): /note="Nucleotide may be methylated to form 5-methylcytosine"
tcacgcagtctgaatccaacctgaagtctgcttgtcaagccattagccttatccctgtggcgtctgcatggagaaggaaagccttttttacctccaaattctcacaaaaatccagcgtggga

SEQ ID NO: 3927 - DNA, 122 bp, Homo sapiens
  misc_feature (61)..(62): /note="This region represents a CpG dinucleotide"
  misc_feature (61)..(61): /note="Nucleotide may be methylated to form 5-methylcytosine"
aaagcaaagatggaaagaacggtacaaatgtcttacaggcccaatcatgccatcacatcacgctaccaccaagaagctggactggctaagcagtacacaatcacctggtcagctgcattcca

SEQ ID NO: 3928 - DNA, 122 bp, Homo sapiens
  misc_feature (61)..(62): /note="This region represents a CpG dinucleotide"
  misc_feature (61)..(61): /note="Nucleotide may be methylated to form 5-methylcytosine"
tgcaggcaggggtgggcagtggtgtccttggctgcacctgaatcactaactcagtgtgagcgacctttgctgtgacaggcccaagctccactccttcctcacagggagtgtcccgtctccat

SEQ ID NO: 3929 - DNA, 122 bp, Homo sapiens
  misc_feature (61)..(62): /note="This region represents a CpG dinucleotide"
  misc_feature (61)..(61): /note="Nucleotide may be methylated to form 5-methylcytosine"
ctatcgaagtgaatggagtcgttcttaaccaaggtaagccatagggtcctaaggacccatcgtgtgtaattaatatgaaatgttgacgattcacttgttgaaatggcatattcaatgtgaca

SEQ ID NO: 3930 - DNA, 122 bp, Homo sapiens
  misc_feature (61)..(62): /note="This region represents a CpG dinucleotide"
  misc_feature (61)..(61): /note="Nucleotide may be methylated to form 5-methylcytosine"
catttctattttcttccttgtctgaggcttctttatcaagggaattcgaaaagacacattcgtacctttgggcacaggaactggttcctggactttttcaatgttgttcttgtttctgggcc

SEQ ID NO: 3931 - DNA, 122 bp, Homo sapiens
  misc_feature (61)..(62): /note="This region represents a CpG dinucleotide"
  misc_feature (61)..(61): /note="Nucleotide may be methylated to form 5-methylcytosine"
cctcactctcaggtctctttaccttggcttaccttgacattgggcatgtatttagagaagcgctcatattccttgctgatctgaaaagccaactcccgagtgtgacacatcaccagtacaga

SEQ ID NO: 3932 - DNA, 122 bp, Homo sapiens
  misc_feature (61)..(62): /note="This region represents a CpG dinucleotide"
  misc_feature (61)..(61): /note="Nucleotide may be methylated to form 5-methylcytosine"
aaggcagagggagcatgtgcaggagcacgagagcacttgtcacgttgagagaacgttacacggtttagaactggtagagtgtaggccgggcgcggtggctcacacctgtaatcccagcactt

SEQ ID NO: 3933 - DNA, 122 bp, Homo sapiens
  misc_feature (61)..(62): /note="This region represents a CpG dinucleotide"
  misc_feature (61)..(61): /note="Nucleotide may be methylated to form 5-methylcytosine"
ctttcctcactgtgtgaagttccggctccttgcccaagctgggtacaatgtcccgtacaacggggaaacctgatacacacgatgatatccggtgatgcagctacacacctcagggacaactc

SEQ ID NO: 3934 - DNA, 122 bp, Homo sapiens
  misc_feature (61)..(62): /note="This region represents a CpG dinucleotide"
  misc_feature (61)..(61): /note="Nucleotide may be methylated to form 5-methylcytosine"
cacagtactcattgcagaagtgccaggcttctcaatcacgctgtgggggatggtggccttcgccactgaaaggctgcccaggaacagaggtgaccctcccctccaggagtcaatgtcagact

SEQ ID NO: 3935 - DNA, 122 bp, Homo sapiens
  misc_feature (61)..(62): /note="This region represents a CpG dinucleotide"
  misc_feature (61)..(61): /note="Nucleotide may be methylated to form 5-methylcytosine"
tgctgaaattgtgaagcctcaacttcttcatgtgcaagagaaattaatgtactgtaatctcgatgtctgtgttgaggaccctccttgtaaattcaagtctctggcctctgccctttgaatgg

SEQ ID NO: 3936 - DNA, 122 bp, Homo sapiens
  misc_feature (61)..(62): /note="This region represents a CpG dinucleotide"
  misc_feature (61)..(61): /note="Nucleotide may be methylated to form 5-methylcytosine"
caataacggctcctccctgtgaatgtgaatgtgattgagagccttaggaaagctttcatgcggcatccggtctcttgccatttggccgtccctcatgtgaggacacagcattcctttccacc

SEQ ID NO: 3937 - DNA, 122 bp, Homo sapiens
  misc_feature (61)..(62): /note="This region represents a CpG dinucleotide"
  misc_feature (61)..(61): /note="Nucleotide may be methylated to form 5-methylcytosine"
taagaccgactggctccctacccttaaggtgcttgcattccagtacacatgtgcctgttgcggcacagggtggagacattaaacaagcagacaatatagggcattgctcagaaagtgacatg

SEQ ID NO: 3938 - DNA, 122 bp, Homo sapiens
  misc_feature (61)..(62): /note="This region represents a CpG dinucleotide"
  misc_feature (61)..(61): /note="Nucleotide may be methylated to form 5-methylcytosine"
ctgtttgacaaatgtcacgtaagaagaagcccatgatactgaggatggtataggaggggccgtatccaggttgaaggagtcaaatatgacagctgccgtgagaattacaatcagaaaaccat

SEQ ID NO: 3939 - DNA, 122 bp, Homo sapiens
  misc_feature (61)..(62): /note="This region represents a CpG dinucleotide"
  misc_feature (61)..(61): /note="Nucleotide may be methylated to form 5-methylcytosine"
cagaacagttcacggcaaagacttggccctggggctcctaaatccaagctgcctccccggcgccccaagccccagcctcgctctgggagtcatgattcccgtggagactccttcaaccacat

SEQ ID NO: 3940 - DNA, 122 bp, Homo sapiens
  misc_feature (61)..(62): /note="This region represents a CpG dinucleotide"
  misc_feature (61)..(61): /note="Nucleotide may be methylated to form 5-methylcytosine"
tagccctccccagcctgtgggcacagcaccagacacaaggagatgtgagaatggccacagcggcccacatttgggcttaagctctggggtcagactgcctaacttagaatccttattctgcc

SEQ ID NO: 3941 - DNA, 122 bp, Homo sapiens
  misc_feature (61)..(62): /note="This region represents a CpG dinucleotide"
  misc_feature (61)..(61): /note="Nucleotide may be methylated to form 5-methylcytosine"
ctcaacactgctggaatgtgttattttgaaatctgacaatgaactacagaatggtaaaagcggaagagcctttgagacaaattagtctagcccagagtagggaagaaaaagagagggaggct

SEQ ID NO: 3942 - DNA, 122 bp, Homo sapiens
  misc_feature (61)..(62): /note="This region represents a CpG dinucleotide"
  misc_feature (61)..(61): /note="Nucleotide may be methylated to form 5-methylcytosine"
cactttctcccttgctcttcctgggcagcatcttgaaagcatgcttacactcttgcctctcgttcacacctgacctcctccaacctgacttacatccatcactttacaaaagtagctcctcc

SEQ ID NO: 3943 - DNA, 122 bp, Homo sapiens
  misc_feature (61)..(62): /note="This region represents a CpG dinucleotide"
  misc_feature (61)..(61): /note="Nucleotide may be methylated to form 5-methylcytosine"
ttccgtgtaaaaccacagtgtgactgtatttcctgcacacactttgcatcccacacagcccggacacactgcagcactggaggggcacaatgccttgctttaaaacatggctcagaagaacc

SEQ ID NO: 3944 - DNA, 122 bp, Homo sapiens
  misc_feature (61)..(62): /note="This region represents a CpG dinucleotide"
  misc_feature (61)..(61): /note="Nucleotide may be methylated to form 5-methylcytosine"
tctagtccttcaaacaacactgtagtgtagatcttgttggttctttcagagaaggggaaacggaaactcacagaagcaactagaggagtgagtagaagcccaggtatgctctagacaggcct

SEQ ID NO: 3945 - DNA, 122 bp, Homo sapiens
  misc_feature (61)..(62): /note="This region represents a CpG dinucleotide"
  misc_feature (61)..(61): /note="Nucleotide may be methylated to form 5-methylcytosine"
cagatcatgcccatcctgtgcagaaggtcactataggaacacatggcacagggaagaaaacgcccatagaaattcacatggtgcttgtctaaaccgaaggcaggtgagatccacccactgtc

SEQ ID NO: 3946 - DNA, 122 bp, Homo sapiens
  misc_feature (61)..(62): /note="This region represents a CpG dinucleotide"
  misc_feature (61)..(61): /note="Nucleotide may be methylated to form 5-methylcytosine"
tttcagctaagacaccacactggaagggacattacataacaaaggtctttaatactatcacggagcttacaataagtataatctgacagaaggcagggagtcaccgttatgagatcagaaaa

SEQ ID NO: 3947 - DNA, 122 bp, Homo sapiens
  misc_feature (61)..(62): /note="This region represents a CpG dinucleotide"
  misc_feature (61)..(61): /note="Nucleotide may be methylated to form 5-methylcytosine"
taaaaacttgacttggttgttatatagaccaggtttccagcccatctgtgccacagagtgcgttgggcaaggacttcacctttccaggatcacttctcccatctgtgaatcttggtttttgg

SEQ ID NO: 3948 - DNA, 122 bp, Homo sapiens
  misc_feature (61)..(62): /note="This region represents a CpG dinucleotide"
  misc_feature (61)..(61): /note="Nucleotide may be methylated to form 5-methylcytosine"
ggttaggtgtcacgtgtgagggcacttccctgataacagtgggagctggattcagccacacgtttaggtcagtctgcattcctgttttcttccacttccccctgacaagacctcttgggcca

SEQ ID NO: 3949 - DNA, 122 bp, Homo sapiens
  misc_feature (61)..(62): /note="This region represents a CpG dinucleotide"
  misc_feature (61)..(61): /note="Nucleotide may be methylated to form 5-methylcytosine"
tttctaaatcgcctttgtaatcatcacatacatgatggtgattcattcaatacatgttgccgtgttgagaaggctgacatttttcttaccactattgtaatttctccataaagccctggtac

SEQ ID NO: 3950 - DNA, 122 bp, Homo sapiens
  misc_feature (61)..(62): /note="This region represents a CpG dinucleotide"
  misc_feature (61)..(61): /note="Nucleotide may be methylated to form 5-methylcytosine"
tacaagtataaaactcctaagaggcagtgcacaatacagatgtagttctgagctatcacacggccaccagcagcaccctactaaatagctgtgggaaagagacaggtctgacacataaatgg

SEQ ID NO: 3951 - DNA, 122 bp, Homo sapiens
  misc_feature (61)..(62): /note="This region represents a CpG dinucleotide"
  misc_feature (61)..(61): /note="Nucleotide may be methylated to form 5-methylcytosine"
gcagaaactgctgtttcatttcaggcaatgcctgacgatgcttcaggcaatctgtaacttcgtaaacgtcatccctggacctctcctaatgatgtggctatgggaggggtgcatagcgatct

SEQ ID NO: 3952 - DNA, 122 bp, Homo sapiens
  misc_feature (61)..(62): /note="This region represents a CpG dinucleotide"
  misc_feature (61)..(61): /note="Nucleotide may be methylated to form 5-methylcytosine"
acatccttctctgcagccacaccccaacacacggagcaagaatggagagatggctcctagcgaaaactagactactgagaggaggggaaagaatgctgagcaggcaaaacaacagatgatcc

SEQ ID NO: 3953 - DNA, 122 bp, Homo sapiens
  misc_feature (61)..(62): /note="This region represents a CpG dinucleotide"
  misc_feature (61)..(61): /note="Nucleotide may be methylated to form 5-methylcytosine"
gaactaagtatttttgtgcatgtgttattgagagcattacaggaatctgtagggtaagtgcgtaggaatagaattgctgggttgaatgacacatgcatctgaaatattgatagatagtgcag

SEQ ID NO: 3954 - DNA, 122 bp, Homo sapiens
  misc_feature (61)..(62): /note="This region represents a CpG dinucleotide"
  misc_feature (61)..(61): /note="Nucleotide may be methylated to form 5-methylcytosine"
gataaatagccaatatgagtcaagaggaaggatgtgaactaaacggacagtatacagtaccgtattctgtagcttgctgctttcagctgtgttcctatattttgaattcatctaccaccact

SEQ ID NO: 3955 - DNA, 122 bp, Homo sapiens
  misc_feature (61)..(62): /note="This region represents a CpG dinucleotide"
  misc_feature (61)..(61): /note="Nucleotide may be methylated to form 5-methylcytosine"
ccacgaccaatttcccttagtcatggcatgagtcagctgtgagggctgatggcacaccaccgaatactctgctgtggcgccactagcctccatttaccttcttctccaacgttttccagcct

SEQ ID NO: 3956 - DNA, 122 bp, Homo sapiens
  misc_feature (61)..(62): /note="This region represents a CpG dinucleotide"
  misc_feature (61)..(61): /note="Nucleotide may be methylated to form 5-methylcytosine"
ccttccacatcataacgccttctagggctaagtgtctgactcattttgtctccagtgatgcgtgtgttagtccattctcacgctgctataaagaactacctgagactggataatttatgaag

SEQ ID NO: 3957 - DNA, 122 bp, Homo sapiens
  misc_feature (61)..(62): /note="This region represents a CpG dinucleotide"
  misc_feature (61)..(61): /note="Nucleotide may be methylated to form 5-methylcytosine"
ctccagggtttatgtgttaaatttcagctatgtcgtgtactcacagcttagtgcttcagacggttatggggaactaggaattcttaaaggggtaggacaggatgtccttttctatcgctcaa

SEQ ID NO: 3958 - DNA, 122 bp, Homo sapiens
  misc_feature (61)..(62): /note="This region represents a CpG dinucleotide"
  misc_feature (61)..(61): /note="Nucleotide may be methylated to form 5-methylcytosine"
ggaactatttcaggcatataggatacagcaatggcttgctcaatttattgagacttgtttcgtggctcagcatatagtctgtcttggtgaatgctccacattcccaccaacagacttataaa

SEQ ID NO: 3959 - DNA, 122 bp, Homo sapiens
  misc_feature (61)..(62): /note="This region represents a CpG dinucleotide"
  misc_feature (61)..(61): /note="Nucleotide may be methylated to form 5-methylcytosine"
taacgtaattaaaacacctggcacacgatgggcactaacataatatttccttttctccaccgtctttaccccttttccttcagctcccctaaaccttttcaggtccagcttttttgagtggc

SEQ ID NO: 3960 - DNA, 122 bp, Homo sapiens
  misc_feature (61)..(62): /note="This region represents a CpG dinucleotide"
  misc_feature (61)..(61): /note="Nucleotide may be methylated to form 5-methylcytosine"
ccaggtccttcacgctggcctcttccctgccgggctgggctccccaatgccttcagagttcgttgtgccgagctctggagatcctgccggacaggtcctgcagatgcttcttcacctgtgga

SEQ ID NO: 3961 - DNA, 122 bp, Homo sapiens
  misc_feature (61)..(62): /note="This region represents a CpG dinucleotide"
  misc_feature (61)..(61): /note="Nucleotide may be methylated to form 5-methylcytosine"
gggccaagggagcgtctctgcgagggcaggcgtgcatacacaccagcggcccccagccaacgccctgacccagtacacataggcagcaaaggaggtgagcctttccctttaattatgccaat

SEQ ID NO: 3962 - DNA, 122 bp, Homo sapiens
  misc_feature (61)..(62): /note="This region represents a CpG dinucleotide"
  misc_feature (61)..(61): /note="Nucleotide may be methylated to form 5-methylcytosine"
caagggagagaccaggtggaggtaattgaatcatgggcgtggtttcctccatgctgttctcgtaacaagtgagttctcgggagatctgatgttattataagtgtttggtagtttctctcgca

SEQ ID NO: 3963 - DNA, 122 bp, Homo sapiens
  misc_feature (61)..(62): /note="This region represents a CpG dinucleotide"
  misc_feature (61)..(61): /note="Nucleotide may be methylated to form 5-methylcytosine"
acaatggatttatgtaaagcatcacttaaccaaagttttcatggtcaatgccagctctttcgggtccaaggtgattaggacacacctgtatgaagtacagtctggcagccacagagaggaag

SEQ ID NO: 3964 - DNA, 122 bp, Homo sapiens
  misc_feature (61)..(62): /note="This region represents a CpG dinucleotide"
  misc_feature (61)..(61): /note="Nucleotide may be methylated to form 5-methylcytosine"
cctggccattgggccccatgggatgaaggcagaaaaggaagctgagcctggtgtctgagacggcccctcaattacgccatctgatctgtgactctgtggagggcaaggtttcttttgccacc

SEQ ID NO: 3965 - DNA, 122 bp, Homo sapiens
  misc_feature (61)..(62): /note="This region represents a CpG dinucleotide"
  misc_feature (61)..(61): /note="Nucleotide may be methylated to form 5-methylcytosine"
atttaacggtctggaggcccaaggcagcttcctcttgggtaactggctgctaggaaggtgcgggccgggccagtgcccctgccaggcttgggagaggaggggccaagcctccaggcccggaa

SEQ ID NO: 3966 - DNA, 122 bp, Homo sapiens
  misc_feature (61)..(62): /note="This region represents a CpG dinucleotide"
  misc_feature (61)..(61): /note="Nucleotide may be methylated to form 5-methylcytosine"
aacttgttgaagtcacaaagagagttagtaagacttaggctatggcttaactcaggtctgcggagctacaaaggccactttctgcttactgagttatctgctgatgaatcagagaaaaaatg

SEQ ID NO: 3967 - DNA, 122 bp, Homo sapiens
  misc_feature (61)..(62): /note="This region represents a CpG dinucleotide"
  misc_feature (61)..(61): /note="Nucleotide may be methylated to form 5-methylcytosine"
ctgaggctggggtgtccacctgagtccgtggagggaggagcgactacggtgcggtgggggcgaggccactcagggctttgtgacctagacagaggatttatgtgggtgattagctgtcacgt

SEQ ID NO: 3968 - DNA, 122 bp, Homo sapiens
  misc_feature (61)..(62): /note="This region represents a CpG dinucleotide"
  misc_feature (61)..(61): /note="Nucleotide may be methylated to form 5-methylcytosine"
tgtcagatgtcgagggcagtcatatgcacggggatagcaatttgcctggactcatctccacgcctgaagaggcaggtatgagtcaggggtgagtgttgaagagtgtgatgaatgggtggaag

SEQ ID NO: 3969 - DNA, 122 bp, Homo sapiens
  misc_feature (61)..(62): /note="This region represents a CpG dinucleotide"
  misc_feature (61)..(61): /note="Nucleotide may be methylated to form 5-methylcytosine"
gtcacctaatctcagtgacattccatcatgtttgccataccctatttgtcagaagcaagtcgtttgctccatcccacactcaaagggaggggattgcacaaggctgtgtattccaggagatg

SEQ ID NO: 3970 - DNA, 122 bp, Homo sapiens
  misc_feature (61)..(62): /note="This region represents a CpG dinucleotide"
  misc_feature (61)..(61): /note="Nucleotide may be methylated to form 5-methylcytosine"
caccacagattcgtctgggtcatttcagactccaggaaaatgtgtcactcgatttgtttccgagcaatgttttgtattttattgtatacatgtatatctaattgtaatctgatttctctagg

SEQ ID NO: 3971 - DNA, 122 bp, Homo sapiens
  misc_feature (61)..(62): /note="This region represents a CpG dinucleotide"
  misc_feature (61)..(61): /note="Nucleotide may be methylated to form 5-methylcytosine"
ccaagtgatcaaggctaacatcaccagtggtgagtcatgttgacatcgtcatgttgacctcgtcctccccgctatggtacgatatgaaggacacttcacttctgtggtattttcccccaaaa

SEQ ID NO: 3972 - DNA, 122 bp, Homo sapiens
  misc_feature (61)..(62): /note="This region represents a CpG dinucleotide"
  misc_feature (61)..(61): /note="Nucleotide may be methylated to form 5-methylcytosine"
gtgcatttctgtctactgagaaacaccaggtagaaaactgcaccaagctgaattgagcttcgtggtaatacacaaaaaatgcacacagctcagctcaacaagtgcactgagtcacaccaaac

SEQ ID NO: 3973 - DNA, 122 bp, Homo sapiens
  misc_feature (61)..(62): /note="This region represents a CpG dinucleotide"
  misc_feature (61)..(61): /note="Nucleotide may be methylated to form 5-methylcytosine"
ctcagacttttctggttgtaaagttccacatcctgggatatctctcagtcccacagaagtcggaacaactgcccaacctacaaaggaatagaaagaagactacaaacgttgcctaagcacaa

SEQ ID NO: 3974 - DNA, 122 bp, Homo sapiens
  misc_feature (61)..(62): /note="This region represents a CpG dinucleotide"
  misc_feature (61)..(61): /note="Nucleotide may be methylated to form 5-methylcytosine"
acatatgcctcagggtgctctggccggatctgcaagcctcattcatctggtcagagttctcgtgtggcagctcctgcagcttgcagagcttcacaaccccgggctggaggcagacagagccc

SEQ ID NO: 3975 - DNA, 122 bp, Homo sapiens
  misc_feature (61)..(62): /note="This region represents a CpG dinucleotide"
  misc_feature (61)..(61): /note="Nucleotide may be methylated to form 5-methylcytosine"
tacacagagcggcgtgttttgacgcggaccacagcaaacgcgtcaggtcacgggcatttacgcgtatctgagagcaacgtctttatcatcagcacggtgcgttccctgcaaaggtaatgaat

SEQ ID NO: 3976 - DNA, 122 bp, Homo sapiens
  misc_feature (61)..(62): /note="This region represents a CpG dinucleotide"
  misc_feature (61)..(61): /note="Nucleotide may be methylated to form 5-methylcytosine"
gaaaggaaaggtttgaaaatcttacaggaaacgtcacgtggacgaggtggacacagcgctcgttcgccctcctgcacgtccgctgagccgcagggacaggcaacacgctgtggcgagtcctc

SEQ ID NO: 3977 - DNA, 122 bp, Homo sapiens
  misc_feature (61)..(62): /note="This region represents a CpG dinucleotide"
  misc_feature (61)..(61): /note="Nucleotide may be methylated to form 5-methylcytosine"
ctataccatttcctgtaagtctcttgccttaggctttaccccatttttcaatgactcaagcgtcttctaattgggccagtcctgcctcttgggctcctttgatcatctggttttcccttctg

SEQ ID NO: 3978 - DNA, 122 bp, Homo sapiens
  misc_feature (61)..(62): /note="This region represents a CpG dinucleotide"
  misc_feature (61)..(61): /note="Nucleotide may be methylated to form 5-methylcytosine"
gtgtgtatgtgtgcctatgggtgtacatgtgcatgtgtgtgcacaagtatgtatgtgaaacgatgctgattaaacaggatgattatccaataccaatcaacttggataatctgattatccaa

SEQ ID NO: 3979 - DNA, 122 bp, Homo sapiens
  misc_feature (61)..(62): /note="This region represents a CpG dinucleotide"
  misc_feature (61)..(61): /note="Nucleotide may be methylated to form 5-methylcytosine"
cctcctgtcctggttgctctgtgctggactaacttgaagagcagtgatgaaacttccgctcgcttctatggaaatatgagtcagggataagctcccctcctcaccacccatattgggaggag

SEQ ID NO: 3980 - DNA, 122 bp, Homo sapiens
  misc_feature (61)..(62): /note="This region represents a CpG dinucleotide"
  misc_feature (61)..(61): /note="Nucleotide may be methylated to form 5-methylcytosine"
acactaccacgggctcagcccacagggctgcagtggcggcagggagcctgaggcaggagccgtgctctctgtctgaagctgctgtcgttccagatgggcaggacaaactctagctgcgtttt

SEQ ID NO: 3981 - DNA, 122 bp, Homo sapiens
  misc_feature (61)..(62): /note="This region represents a CpG dinucleotide"
  misc_feature (61)..(61): /note="Nucleotide may be methylated to form 5-methylcytosine"
cttcttcattgaatgaaatatcagtttgatctcagtatgtccctgcctaaaccctatagtcgcaagttctctatatgataaaggttgtactgcatgatatgtcctaaaaggcttggtgactg

SEQ ID NO: 3982 - DNA, 122 bp, Homo sapiens
  misc_feature (61)..(62): /note="This region represents a CpG dinucleotide"
  misc_feature (61)..(61): /note="Nucleotide may be methylated to form 5-methylcytosine"
aaccaaccactttccttacttttcccaaggactaagtaactattagagcagacattaaaccgtaaccaccaccagctatacccgatgactcaactcaggttataattaggggaaggaaacgc

SEQ ID NO: 3983 - DNA, 122 bp, Homo sapiens
  misc_feature (61)..(62): /note="This region represents a CpG dinucleotide"
  misc_feature (61)..(61): /note="Nucleotide may be methylated to form 5-methylcytosine"
cccctccaagccagagagcccagatagccctcagtggggctggtgagagtcacagttctccgcacgtggccaggaagttgagcaagagtaacccaaccacataaggtatggtgcaaacctgg

SEQ ID NO: 3984 - DNA, 122 bp, Homo sapiens
  misc_feature (61)..(62): /note="This region represents a CpG dinucleotide"
  misc_feature (61)..(61): /note="Nucleotide may be methylated to form 5-methylcytosine"
aatactgctctaaggcttttcctgtattactcatcagttagttagcagaggatgtccccacgcccgagcacacactgtgcatccatcaggctagctccatgaggaaggtaagaggatgtcag

SEQ ID NO: 3985 - DNA, 122 bp, Homo sapiens
  misc_feature (61)..(62): /note="This region represents a CpG dinucleotide"
  misc_feature (61)..(61): /note="Nucleotide may be methylated to form 5-methylcytosine"
caacagtaacttacctcgagtgtgatttatcatatgattttagtaaacagattacgctagcgacagttgctaagaagtctgttttaaatttttggtgcaaaaggaaaaagtgattaacttga

SEQ ID NO: 3986 - DNA, 122 bp, Homo sapiens
  misc_feature (61)..(62): /note="This region represents a CpG dinucleotide"
  misc_feature (61)..(61): /note="Nucleotide may be methylated to form 5-methylcytosine"
gccatgctcctttcctcaggtttgcaataagccatttcagaagatttctgagcagtgacacggcagcaaagaatgaagtgataaaatagtaattacataatttgaactaggttaatgttaac

SEQ ID NO: 3987 - DNA, 122 bp, Homo sapiens
  misc_feature (61)..(62): /note="This region represents a CpG dinucleotide"
  misc_feature (61)..(61): /note="Nucleotide may be methylated to form 5-methylcytosine"
actaaaatggaggtgtggaaagaatgccagttaataaacataaaaggcatgatactattgcggaatcacttataactcctaatgtaacaacagattcagtgaaggactgtatcaaggagttg

SEQ ID NO: 3988 - DNA, 122 bp, Homo sapiens
  misc_feature (61)..(62): /note="This region represents a CpG dinucleotide"
  misc_feature (61)..(61): /note="Nucleotide may be methylated to form 5-methylcytosine"
aagtgtggggcctggccaggagcaggtggtgccggggaatgagtatagggcttatggtgccgtggcctgtctgctgcctggtctgtcctaaggccagtggccctgtccctaggctgtggggc

SEQ ID NO: 3989 - DNA, 122 bp, Homo sapiens
  misc_feature (61)..(62): /note="This region represents a CpG dinucleotide"
  misc_feature (61)..(61): /note="Nucleotide may be methylated to form 5-methylcytosine"
aacacttcctgcttcactgggtggttgagaggatcaaataagatagaaaaggaattgctacgtaacacctaaagcaaggcccaactgctagttgtggctgctgctgttacttggagagaaga

SEQ ID NO: 3990 - DNA, 122 bp, Homo sapiens
  misc_feature (61)..(62): /note="This region represents a CpG dinucleotide"
  misc_feature (61)..(61): /note="Nucleotide may be methylated to form 5-methylcytosine"
gacatggaaagaattttgatgacatcactgagccactgatcttaccatgcctggaacctacgctggactacttagttatgtgaaaaaaagtaaatttcttcccttaccatttcagtctgttt

SEQ ID NO: 3991 - DNA, 122 bp, Homo sapiens
  misc_feature (61)..(62): /note="This region represents a CpG dinucleotide"
  misc_feature (61)..(61): /note="Nucleotide may be methylated to form 5-methylcytosine"
ggtgactcagggaggggcaggacacaccccagagggagagatgtaagccttagagaaaggcgactcctggcctattcagcagttggggacactccttggtcagggaccaagccagggttctg

SEQ ID NO: 3992 - DNA, 122 bp, Homo sapiens
  misc_feature (61)..(62): /note="This region represents a CpG dinucleotide"
  misc_feature (61)..(61): /note="Nucleotide may be methylated to form 5-methylcytosine"
ctaattgcagtcgtggctctttttgagatgacaaacagactgcatgtggatgatcttcagcgtaaggcatgcttctgattgctgctttcctactgccagtgctgaacattcaccttaacccc

SEQ ID NO: 3993 - DNA, 122 bp, Homo sapiens
  misc_feature (61)..(62): /note="This region represents a CpG dinucleotide"
  misc_feature (61)..(61): /note="Nucleotide may be methylated to form 5-methylcytosine"
tacagatgtaattattggtagagccacaattcatacctagactcttacctcttagttcagcgttctttctgaatccctatcataatccatatcctgaattgtctctttggtacaggaaccta

SEQ ID NO: 3994 - DNA, 122 bp, Homo sapiens
  misc_feature (61)..(62): /note="This region represents a CpG dinucleotide"
  misc_feature (61)..(61): /note="Nucleotide may be methylated to form 5-methylcytosine"
tgaacttctgaccttaggtgatccgcctgcctcagcctcccaaagtgctgggactacaggcgtgagccaccgcagtcttaaatggttaatgaggattaggaaatctatcaattattcaacag

SEQ ID NO: 3995 - DNA, 122 bp, Homo sapiens
  misc_feature (61)..(62): /note="This region represents a CpG dinucleotide"
  misc_feature (61)..(61): /note="Nucleotide may be methylated to form 5-methylcytosine"
catataggttggtttcttcctctcaaattctctgatctctcagctgactataggctttagcggtgccctgtgtgatgacagcagggttttggatatagtaagtaggagccacttttggtatc

SEQ ID NO: 3996 - DNA, 122 bp, Homo sapiens
  misc_feature (61)..(62): /note="This region represents a CpG dinucleotide"
  misc_feature (61)..(61): /note="Nucleotide may be methylated to form 5-methylcytosine"
tgctgaataaagatcccttgcacttcaggaaaaccgaggtgaacatgttcagagcaaagacggatatggcccctcatcctgtgctgatgctgaccttggaacacagctgctatcaaggaaga

SEQ ID NO: 3997 - DNA, 122 bp, Homo sapiens
  misc_feature (61)..(62): /note="This region represents a CpG dinucleotide"
  misc_feature (61)..(61): /note="Nucleotide may be methylated to form 5-methylcytosine"
ctacccagacacgattcagttcggctctatttagaaagatgaattaaaagctagcactgccgtacatccaaccctttggattaggaaaatagtcagagtgcaggtgtggcataatatgcaac

SEQ ID NO: 3998 - DNA, 122 bp, Homo sapiens
  misc_feature (61)..(62): /note="This region represents a CpG dinucleotide"
  misc_feature (61)..(61): /note="Nucleotide may be methylated to form 5-methylcytosine"
ctgatccgcatcgacttggccgtgggcgacgtggtcaagacctggcgtttcagcaacatgcgccagtggaatgtcaactgggacatccggcaggtgggcccagacccagggtatatggatgg

SEQ ID NO: 3999 - DNA, 122 bp, Homo sapiens
  misc_feature (61)..(62): /note="This region represents a CpG dinucleotide"
  misc_feature (61)..(61): /note="Nucleotide may be methylated to form 5-methylcytosine"
ggcaggcttgtcccagagctaggctgtgatgcccagaacctaccgggcatctgcttggctcggctgtaccaggtgggccacgtcattgagctggacattccggcgtatgagatccacagccc

SEQ ID NO: 4000 - DNA, 122 bp, Homo sapiens
  misc_feature (61)..(62): /note="This region represents a CpG dinucleotide"
  misc_feature (61)..(61): /note="Nucleotide may be methylated to form 5-methylcytosine"
cataagtcagaaatgacgtcacggttacagccacgatactgatgacagccattcacaacacgctgggccagtgcgaaatcctgtcttgctgactgcccatgccagtctaggagggggtgtta

SEQ ID NO: 4001 - DNA, 122 bp, Homo sapiens
  misc_feature (61)..(62): /note="This region represents a CpG dinucleotide"
  misc_feature (61)..(61): /note="Nucleotide may be methylated to form 5-methylcytosine"
cataccagaatatttataaaatccaatttttgctgagcccttactacatggcaatcactacgttctgtgccccacatgtcttgtttcagttaatcatcacaaccaccccacaaggcagagac

SEQ ID NO: 4002 - DNA, 122 bp, Homo sapiens
  misc_feature (61)..(62): /note="This region represents a CpG dinucleotide"
  misc_feature (61)..(61): /note="Nucleotide may be methylated to form 5-methylcytosine"
gcaggggttctgatggagtcagtacagttaggaaatttcttccttcctggcttatgatgacggcttcaatgatgcaataactagccaaggtcacacaggaaaggagaaagtgagagagggag

SEQ ID NO: 4003 - DNA, 122 bp, Homo sapiens
  misc_feature (61)..(62): /note="This region represents a CpG dinucleotide"
  misc_feature (61)..(61): /note="Nucleotide may be methylated to form 5-methylcytosine"
ctcacccgtgattgccagcctgcaggttggttcactgggtgctgctgcttctcagaattccgtgactaagccaggagtggtgtttgttctttactgataggtattcttctgcctgctctgct

SEQ ID NO: 4004 - DNA, 122 bp, Homo sapiens
  misc_feature (61)..(62): /note="This region represents a CpG dinucleotide"
  misc_feature (61)..(61): /note="Nucleotide may be methylated to form 5-methylcytosine"
aatgattaaaaccacgtggggcttgtttcctcacacgtgacctcccgacaaagtgcagagcggggagccaaggaaaggtgaacccaggggtctgtaggcccagggaagagtaggacccacga

SEQ ID NO: 4005 - DNA, 122 bp, Homo sapiens
  misc_feature (61)..(62): /note="This region represents a CpG dinucleotide"
  misc_feature (61)..(61): /note="Nucleotide may be methylated to form 5-methylcytosine"
tcctgagcattggtcacctggggaggaaggtgactagaggactcctcccagaaaaaaacccgattcataagggcaggagaaaccaggaaatggcaaggcctttgcttgcaactgtccatccc

SEQ ID NO: 4006 - DNA, 122 bp, Homo sapiens
  misc_feature (61)..(62): /note="This region represents a CpG dinucleotide"
  misc_feature (61)..(61): /note="Nucleotide may be methylated to form 5-methylcytosine"
tatttggcggaaaaattgaaccaatgagtctctacactctacgactctggacacaatagacgacagtaggactaaggggaagtctgcactgtgacctgcaaaacatgtgcccctgtccaata

SEQ ID NO: 4007 - DNA, 122 bp, Homo sapiens
  misc_feature (61)..(62): /note="This region represents a CpG dinucleotide"
  misc_feature (61)..(61): /note="Nucleotide may be methylated to form 5-methylcytosine"
gaagaattacatgacaatgaagtaggcagcagagcagaacacagagaaggcattaagtagcggagacacagatgagctgagtcaccatgacagaacactatagtagggagcagtggatattt

SEQ ID NO: 4008 - DNA, 122 bp, Homo sapiens
  misc_feature (61)..(62): /note="This region represents a CpG dinucleotide"
  misc_feature (61)..(61): /note="Nucleotide may be methylated to form 5-methylcytosine"
taagaattcaggtgcggcttgcggactcctcagtcctgcctagagatccctgcagcccaacgccccacctcagtgctcctgagcccaatggggctcctgcgatcaaagcaggacttgtcact

SEQ ID NO: 4009 - DNA, 122 bp, Homo sapiens
  misc_feature (61)..(62): /note="This region represents a CpG dinucleotide"
  misc_feature (61)..(61): /note="Nucleotide may be methylated to form 5-methylcytosine"
gcggccagccggctggggtgctgactctcagctctcttgtttttgtgcctgccaggcactcgcaggcttctgggaagaagactgtgtgggaggatgaagccaaattgggctgcagtttgaaa

SEQ ID NO: 4010 - DNA, 122 bp, Homo sapiens
  misc_feature (61)..(62): /note="This region represents a CpG dinucleotide"
  misc_feature (61)..(61): /note="Nucleotide may be methylated to form 5-methylcytosine"
ttgtaatcaagaaagggcagcagaaccagctggagaaggtgccccatgaacatactcaggcgccacctctggacagtctcatgttgactcagcagaacctggacgtgtgtgttttgaaagca

SEQ ID NO: 4011 - DNA, 122 bp, Homo sapiens
  misc_feature (61)..(62): /note="This region represents a CpG dinucleotide"
  misc_feature (61)..(61): /note="Nucleotide may be methylated to form 5-methylcytosine"
tattgagctggtgctgataatgtggaatattcgcactgtgaaactccaccgagctgcatgcgtgtgactcatgtgctcctgtacccatgctattctttgatgataacatctttcataccttc

SEQ ID NO: 4012 - DNA, 122 bp, Homo sapiens
  misc_feature (61)..(62): /note="This region represents a CpG dinucleotide"
  misc_feature (61)..(61): /note="Nucleotide may be methylated to form 5-methylcytosine"
ctaggttgaatgggtttctgctccctgcaatcaagtgaaccctaatataaatggagtgggcgttcccactagctatgggtcacccccttcgaaagcacgcctccagccatcagtgctgactt

SEQ ID NO: 4013 - DNA, 122 bp, Homo sapiens
  misc_feature (61)..(62): /note="This region represents a CpG dinucleotide"
  misc_feature (61)..(61): /note="Nucleotide may be methylated to form 5-methylcytosine"
atgaagggagagagagacacaagctgagaactggctgtgccttgaagctagcagagaagacgaaggacacgctggcagggaggtgggaggagcccctgggggaagacagcatcaccgcaagt

SEQ ID NO: 4014 - DNA, 122 bp, Homo sapiens
  misc_feature (61)..(62): /note="This region represents a CpG dinucleotide"
  misc_feature (61)..(61): /note="Nucleotide may be methylated to form 5-methylcytosine"
aacaggaagaaggcatgccaagagattaacactagtcatccctgcactgtgggactacagcggctattttattctttatttttcagatattcaaaattgttttataattttttttctttttt

SEQ ID NO: 4015 - DNA, 122 bp, Homo sapiens
  misc_feature (61)..(62): /note="This region represents a CpG dinucleotide"
  misc_feature (61)..(61): /note="Nucleotide may be methylated to form 5-methylcytosine"
aaggtccagtaggacctgacccttgcactctgccaactgctcccagctatgtccagcacacggcagcatacccagatgtccaggcacacccggccatcccagcggcaggaaggacctgcact

SEQ ID NO: 4016 - DNA, 122 bp, Homo sapiens
  misc_feature (61)..(62): /note="This region represents a CpG dinucleotide"
  misc_feature (61)..(61): /note="Nucleotide may be methylated to form 5-methylcytosine"
acagttttgtaatattaattacatcctcattgttttgcaatgattaccactatccatctacggaagtctttccatcttgcaaaactggaactacgacccattaaacaataactctccatttc

SEQ ID NO: 4017 - DNA, 122 bp, Homo sapiens
  misc_feature (61)..(62): /note="This region represents a CpG dinucleotide"
  misc_feature (61)..(61): /note="Nucleotide may be methylated to form 5-methylcytosine"
aatttgacatcagctctaattcaacacagctgaaaatttctgcccaaacattcaggcctacgggttttgatcatgaggtgagttaagcaaattatatttgaaatattgcctggctgagtcgg

SEQ ID NO: 4018 - DNA, 122 bp, Homo sapiens
  misc_feature (61)..(62): /note="This region represents a CpG dinucleotide"
  misc_feature (61)..(61): /note="Nucleotide may be methylated to form 5-methylcytosine"
tgcactgtgtagggaggcatttcttcacctctttgcagagatgttcagcccatgatcttacgtaacattgcacccacgccctccacccacataaggattatgcaattgcgtgtaggattcct

SEQ ID NO: 4019 - DNA, 122 bp, Homo sapiens
  misc_feature (61)..(62): /note="This region represents a CpG dinucleotide"
  misc_feature (61)..(61): /note="Nucleotide may be methylated to form 5-methylcytosine"
tgcttaaagaacttccccttaataaaaacaacattcttggttatgtgacccacagcaaatcggcttcagctgcgtttttatttagcaatttgtgtttggtgttttcgcttagagatgctccc

SEQ ID NO: 4020 - DNA, 122 bp, Homo sapiens
  misc_feature (61)..(62): /note="This region represents a CpG dinucleotide"
  misc_feature (61)..(61): /note="Nucleotide may be methylated to form 5-methylcytosine"
atacagaaatcggtgctgctcccaacagcagatcaaggcagtcgtcaggaactcaggatccggggtgagtgtcctcatcttgccttggggatgggtggcccaggtctttggcagaagtcaca

SEQ ID NO: 4021 - DNA, 122 bp, Homo sapiens
  misc_feature (61)..(62): /note="This region represents a CpG dinucleotide"
  misc_feature (61)..(61): /note="Nucleotide may be methylated to form 5-methylcytosine"
caatgcaatgtcaaaaaaaaaacaaaaaaacctcctaagttatagatggctcaacagtaacgtacatctgattgccttgagctttgcatgggattaagaaaagagggttagaattaagtgat

SEQ ID NO: 4022 - DNA, 122 bp, Homo sapiens
  misc_feature (61)..(62): /note="This region represents a CpG dinucleotide"
  misc_feature (61)..(61): /note="Nucleotide may be methylated to form 5-methylcytosine"
gtacatgggtgtggatccacttatacgtgggtttggtctgcctgggagctattcctggtgcgtgattatcaagctaatagccattaaaaatctactaatcagctccatcccagaacttgctt

SEQ ID NO: 4023 - DNA, 122 bp, Homo sapiens
  misc_feature (61)..(62): /note="This region represents a CpG dinucleotide"
  misc_feature (61)..(61): /note="Nucleotide may be methylated to form 5-methylcytosine"
tgatctttcattgacttctgtgtgaaccaaatccctaagaatctcagacatggacacttacgcatcatcatagttatactgtttctacattatgcaggtttcccagaagaaaataaattcct

SEQ ID NO: 4024 - DNA, 122 bp, Homo sapiens
  misc_feature (61)..(62): /note="This region represents a CpG dinucleotide"
  misc_feature (61)..(61): /note="Nucleotide may be methylated to form 5-methylcytosine"
cagctaagccatatctcacaagccagagagagaccacaggctctgaggacactcaccttgcgtgctgggccacacccacagagccagcaggaccagcctccagaccatcctgcctcctgcag

SEQ ID NO: 4025 - DNA, 122 bp, Homo sapiens
  misc_feature (61)..(62): /note="This region represents a CpG dinucleotide"
  misc_feature (61)..(61): /note="Nucleotide may be methylated to form 5-methylcytosine"
aatctgacatgttgtaatacactgttagagacatattgtggctataagattaatgatagccgtaaggcccatgcaaacatcttgcagggctgacactatgtgtcaattagcagtatgatgca

SEQ ID NO: 4026 - DNA, 122 bp, Homo sapiens
  misc_feature (61)..(62): /note="This region represents a CpG dinucleotide"
  misc_feature (61)..(61): /note="Nucleotide may be methylated to form 5-methylcytosine"
atagtgctaaggaaagcagattccaacagcaatcatactgtaaaggttagacaaagatgacgactgtgctacaggcaaacacttcatggaaactgcagaaaatggggcacggagagtagggg

SEQ ID NO: 4027 - DNA, 122 bp, Homo sapiens
  misc_feature (61)..(62): /note="This region represents a CpG dinucleotide"
  misc_feature (61)..(61): /note="Nucleotide may be methylated to form 5-methylcytosine"
aactggtcagtcatcagataaactcttccaattgttcacatgttcctcaacaggataccacgtaatagactgacagctcatcagtcttcaatgaggatagggaaatgtctccctccagccat

SEQ ID NO: 4028 - DNA, 122 bp, Homo sapiens
  misc_feature (61)..(62): /note="This region represents a CpG dinucleotide"
  misc_feature (61)..(61): /note="Nucleotide may be methylated to form 5-methylcytosine"
tgctcttcccataacatgtttcccattaaaagtcactgactgtccgggtgcggtggctcacgtctgtaatcccagcactttgggaggccaaggcgggtggatcacctgagctcaggagtttg

SEQ ID NO: 4029 - DNA, 122 bp, Homo sapiens
  misc_feature (61)..(62): /note="This region represents a CpG dinucleotide"
  misc_feature (61)..(61): /note="Nucleotide may be methylated to form 5-methylcytosine"
acaccagctctgtgagcatgaacactcagactaggggagaggccccgacagttggctgtgcgtgcccagaactgcctatccaagtagacttctgctgtcaagccagagacactaaggaacac

SEQ ID NO: 4030 - DNA, 122 bp, Homo sapiens
  misc_feature (61)..(62): /note="This region represents a CpG dinucleotide"
  misc_feature (61)..(61): /note="Nucleotide may be methylated to form 5-methylcytosine"
ctgccacagttcttatatacttaaggcttacatcaccactcagaggacttacatcattttcgcccttaagaagagatatttggccgggcgtggtggctcacgcctgtaatcccagcactctg

SEQ ID NO: 4031 - DNA, 122 bp, Homo sapiens
  misc_feature (61)..(62): /note="This region represents a CpG dinucleotide"
  misc_feature (61)..(61): /note="Nucleotide may be methylated to form 5-methylcytosine"
tgaaactgcacatcgtaatatacacattcagagcgggctattggctaaatgaaggcaatgcgtgtggaagtctgatttgccaccttcagggcaggcgtcttatatcctaattcagaaagatg

SEQ ID NO: 4032 - DNA, 122 bp, Homo sapiens
  misc_feature (61)..(62): /note="This region represents a CpG dinucleotide"
  misc_feature (61)..(61): /note="Nucleotide may be methylated to form 5-methylcytosine"
aataaagacataagcaccactaaatttttacattacaaaatacttgctgagctagttaaacgagagcatttaagtggaaataaatgatgtctctaaaatagaatgttcaaaataacaatgga

SEQ ID NO: 4033 - DNA, 122 bp, Homo sapiens
  misc_feature (61)..(62): /note="This region represents a CpG dinucleotide"
  misc_feature (61)..(61): /note="Nucleotide may be methylated to form 5-methylcytosine"
aaaacaggaagttaacaaactaaagcaggccttgcagctggtatacgtcttactcaagctcgtcttgtgaccttgtcatgttgcccagaacagagaaactggagttgttgtgaagtaacctt

SEQ ID NO: 4034 - DNA, 122 bp, Homo sapiens
  misc_feature (61)..(62): /note="This region represents a CpG dinucleotide"
  misc_feature (61)..(61): /note="Nucleotide may be methylated to form 5-methylcytosine"
caaatttggcagctgaaatgcaagtctgaattatgtcatcttcctggtcatcagtgtcaccgtcctgtctgacagttcccttgcgggctccttttaccggtttattcagatcagagtcattt

SEQ ID NO: 4035 - DNA, 122 bp, Homo sapiens
  misc_feature (61)..(62): /note="This region represents a CpG dinucleotide"
  misc_feature (61)..(61): /note="Nucleotide may be methylated to form 5-methylcytosine"
ttttacccatgtgccatgcttcctgcattgtttaaatatggtcattcaggactttttctgcgagcacaaaagcattgagaatatgttagtggctgccaggaaaacttgtcatcattttagtc

SEQ ID NO: 4036 - DNA, 122 bp, Homo sapiens
  misc_feature (61)..(62): /note="This region represents a CpG dinucleotide"
  misc_feature (61)..(61): /note="Nucleotide may be methylated to form 5-methylcytosine"
tgcttactgcaatcttgcatatgttagcattggtcttgtgtgactcgtaactagaacgtacgtgaggaaggcaaattctctgggtcagaacacagcatcactggagttcccacttacagcac

SEQ ID NO: 4037 - DNA, 122 bp, Homo sapiens
  misc_feature (61)..(62): /note="This region represents a CpG dinucleotide"
  misc_feature (61)..(61): /note="Nucleotide may be methylated to form 5-methylcytosine"
aaaggcaacatttcacagtctcactctgagctaagtgtagtcacatgactaacttctgtccgctgaactatgaatgaaagtgtcgtgtggggtgtgctgcagtgccacttactggaagatgt

SEQ ID NO: 4038 - DNA, 122 bp, Homo sapiens
  misc_feature (61)..(62): /note="This region represents a CpG dinucleotide"
  misc_feature (61)..(61): /note="Nucleotide may be methylated to form 5-methylcytosine"
gtgtggaaacaactcttggtgcggcacacctattgtagagttcttgcttttccttttgatcggagaggggtagggtgcctgggaactagggctggagcagaatctctacctgaaacagtaag

SEQ ID NO: 4039 - DNA, 122 bp, Homo sapiens
  misc_feature (61)..(62): /note="This region represents a CpG dinucleotide"
  misc_feature (61)..(61): /note="Nucleotide may be methylated to form 5-methylcytosine"
gcaactcttagtcattttagcctaaaagtcatcatctgtcataagctcttaatcatactacgttcccttgcataatattcacaagatcctacttttggagagtggtgttggccgctcctagc

SEQ ID NO: 4040 - DNA, 122 bp, Homo sapiens
  misc_feature (61)..(62): /note="This region represents a CpG dinucleotide"
  misc_feature (61)..(61): /note="Nucleotide may be methylated to form 5-methylcytosine"
agggagaggggaaagcagagagaaaggcaggaaggtaagcagaaaggagaaaaaagggaccggaagaagaaagacaataatagataatatttattgcatctggcacagttctttgcacatat

SEQ ID NO: 4041 - DNA, 122 bp, Homo sapiens
  misc_feature (61)..(62): /note="This region represents a CpG dinucleotide"
  misc_feature (61)..(61): /note="Nucleotide may be methylated to form 5-methylcytosine"
agtcctctgccggcatccagccctgatgattgattctaatccaggccgcttctgaggacacgaggaaaaggctgttagcataggccctactgcgtacctggcagacccaagttcatcatctc

SEQ ID NO: 4042 - DNA, 122 bp, Homo sapiens
  misc_feature (61)..(62): /note="This region represents a CpG dinucleotide"
  misc_feature (61)..(61): /note="Nucleotide may be methylated to form 5-methylcytosine"
ctcccttcaggaatttgctcctctacataacaatgggcagctggtacccagagcacctgccgcatggcctggcctgccagatgcagataaggagagatgatgactccttgtcttgagtcacc

SEQ ID NO: 4043 - DNA, 122 bp, Homo sapiens
  misc_feature (61)..(62): /note="This region represents a CpG dinucleotide"
  misc_feature (61)..(61): /note="Nucleotide may be methylated to form 5-methylcytosine"
ccctttccactttagacaaacaccagcagttcccctttagttcaatggtattcgcacaggcgttatgaaagctgttaagattcagaaccattgtcagaggacttggcagaatgtaacctaat

SEQ ID NO: 4044 - DNA, 122 bp, Homo sapiens
  misc_feature (61)..(62): /note="This region represents a CpG dinucleotide"
  misc_feature (61)..(61): /note="Nucleotide may be methylated to form 5-methylcytosine"
ggttgtcgtgtttacagtttttttccacatcacgagttcaggacatgataacataataaacgaggttttctacaaagccaaggatctgaatgacaaaggaaggacaactagagattagggat

SEQ ID NO: 4045 - DNA, 122 bp, Homo sapiens
  misc_feature (61)..(62): /note="This region represents a CpG dinucleotide"
  misc_feature (61)..(61): /note="Nucleotide may be methylated to form 5-methylcytosine"
tgttccacccagacccatacaatcaaatgtgttgactcttggttctgtgagtcttatcaccgacccaaaggacaacatctgttcatcagcatgtagtgtagcatgactaggtattggatgaa

SEQ ID NO: 4046 - DNA, 122 bp, Homo sapiens
  misc_feature (61)..(62): /note="This region represents a CpG dinucleotide"
  misc_feature (61)..(61): /note="Nucleotide may be methylated to form 5-methylcytosine"
tgttacactatgacaaaacatctggcatatgataacacagcaaacgagagcgacagattacgcagctctagggcagagtttctcaaccttggcactgacttatacgtaaagcacttactaca

SEQ ID NO: 4047 - DNA, 122 bp, Homo sapiens
  misc_feature (61)..(62): /note="This region represents a CpG dinucleotide"
  misc_feature (61)..(61): /note="Nucleotide may be methylated to form 5-methylcytosine"
gcaacttgatgagctgtttacagtcatcagctgcaaagacaaaaggttaagccaattgagcgcccagggatggacctacgtgttacaattgtgtgcactgcaggtgaacctgaagggtaggt

SEQ ID NO: 4048 - DNA, 122 bp, Homo sapiens
  misc_feature (61)..(62): /note="This region represents a CpG dinucleotide"
  misc_feature (61)..(61): /note="Nucleotide may be methylated to form 5-methylcytosine"
ccctcgccttatttcaaaaaaactagcaaggggtggattcgacatttttcctacttcctacgtatcaggctctcaggagctttatgcacattgttttattgaatcctcagaacttctcaggc

SEQ ID NO: 4049 - DNA, 122 bp, Homo sapiens
  misc_feature (61)..(62): /note="This region represents a CpG dinucleotide"
  misc_feature (61)..(61): /note="Nucleotide may be methylated to form 5-methylcytosine"
catagagcaaggaatgagggaaggggaaggagtgcagagcttccgtgccctccctgggcacgccacactccaggaagtgccaggtgttcagctatccagaagctctctgaaccctgtcctct

SEQ ID NO: 4050 - DNA, 122 bp, Homo sapiens
  misc_feature (61)..(62): /note="This region represents a CpG dinucleotide"
  misc_feature (61)..(61): /note="Nucleotide may be methylated to form 5-methylcytosine"
tgggtcattctcttgcttaaccccagagttgctctcattttgaattgagacacattcctccgcttaacctagcttagacacaaacttcaacaaacttctctgaacccttacttgccaagaaa

SEQ ID NO: 4051 - DNA, 122 bp, Homo sapiens
  misc_feature (61)..(62): /note="This region represents a CpG dinucleotide"
  misc_feature (61)..(61): /note="Nucleotide may be methylated to form 5-methylcytosine"
ggttgtgcttgttgggggacttggagaggcagagcacgttcgactcttcactgaccgtctcgcggtacgagacgaccgggtcagatttctgcaaaaagaggttaagtcccactcttgcctgg

SEQ ID NO: 4052 - DNA, 122 bp, Homo sapiens
  misc_feature (61)..(62): /note="This region represents a CpG dinucleotide"
  misc_feature (61)..(61): /note="Nucleotide may be methylated to form 5-methylcytosine"
gcatgcacccgcagctgctggagctgctcaaccagctggacgagcgcaggcgtaggtgcccgcgccacggggcctcggctcaggggcagccaggtgttgtgagcgccatcctgggccagggc

SEQ ID NO: 4053 - DNA, 122 bp, Homo sapiens
  misc_feature (61)..(62): /note="This region represents a CpG dinucleotide"
  misc_feature (61)..(61): /note="Nucleotide may be methylated to form 5-methylcytosine"
ttcaggatagtaagtcaccgcagttccctggcagttctagaggtgccgtcagggagctagcgattagagtcgaaagacttagaaagccacctggtgttctattgtactgtggctgggctgaa

SEQ ID NO: 4054 - DNA, 122 bp, Homo sapiens
  misc_feature (61)..(62): /note="This region represents a CpG dinucleotide"
  misc_feature (61)..(61): /note="Nucleotide may be methylated to form 5-methylcytosine"
agtggcaataggcacctgttcgcacaggtgaacgagctcactcacgccaaacctgcaacacgaaacatcgacagtcatcgcccctctgcgtggagatgggctctgggtgccccggtggggtg

SEQ ID NO: 4055 - DNA, 122 bp, Homo sapiens
  misc_feature (61)..(62): /note="This region represents a CpG dinucleotide"
  misc_feature (61)..(61): /note="Nucleotide may be methylated to form 5-methylcytosine"
ctatggtaaggatgtgctttgggtggtgtgggcctggagcagagccatgcacagcaggcccgtccagatctgacggtgtcttgacggtggccccggctgacctgcagacgcatgggcaagaa

SEQ ID NO: 4056 - DNA, 122 bp, Homo sapiens
  misc_feature (61)..(62): /note="This region represents a CpG dinucleotide"
  misc_feature (61)..(61): /note="Nucleotide may be methylated to form 5-methylcytosine"
gtgttcccagctataattatctgttcagaggttgcctcccaccacctgggggcagagcagcgtggaaggaactgggggaggcccttgccaggaccataaagatgagctcagcttccaggagg

SEQ ID NO: 4057 - DNA, 122 bp, Homo sapiens
  misc_feature (61)..(62): /note="This region represents a CpG dinucleotide"
  misc_feature (61)..(61): /note="Nucleotide may be methylated to form 5-methylcytosine"
gagaaacaaaccactctgccaagagatgggcaaggggcctcttgtggccctcccggtggacggctgcatctacagtcctttgcctaaaaccaacaatcctgcctgaccccagtccctgtgag

SEQ ID NO: 4058 - DNA, 122 bp, Homo sapiens
  misc_feature (61)..(62): /note="This region represents a CpG dinucleotide"
  misc_feature (61)..(61): /note="Nucleotide may be methylated to form 5-methylcytosine"
atatctgggacttgttcttcaagtcttatcttttattgtagcacaaaaccttttggcctccgttatgcaaattcgagataccagtcatttgaggaagaagtagagaagggagggaaaacagg

SEQ ID NO: 4059 - DNA, 122 bp, Homo sapiens
  misc_feature (61)..(62): /note="This region represents a CpG dinucleotide"
  misc_feature (61)..(61): /note="Nucleotide may be methylated to form 5-methylcytosine"
caaacgccaaccccatcctggtccagtcatctacctgggctctgcaataacagtggtgcacgagtgaaaaagtgagcagatgcaagctcccccagaacgtttcagtcccagagcagcttagt

SEQ ID NO: 4060 - DNA, 122 bp, Homo sapiens
  misc_feature (61)..(62): /note="This region represents a CpG dinucleotide"
  misc_feature (61)..(61): /note="Nucleotide may be methylated to form 5-methylcytosine"
acgtgtgttaattaggctcttccaggttagcctaggagataggagggaaaaaacagagagcgcctcagcaggctgctgaggcctgaaaggaaggttattcacaggcaacctgggcgtggttt

SEQ ID NO: 4061 - DNA, 122 bp, Homo sapiens
  misc_feature (61)..(62): /note="This region represents a CpG dinucleotide"
  misc_feature (61)..(61): /note="Nucleotide may be methylated to form 5-methylcytosine"
gctgcagccacccaatcttgtgatgtgtgtccttcaatggacagggagaccatcacactccgcttgggtttttttcttcattgtgatgcaatccagagagttcttcctgccaggaagggtaa

SEQ ID NO: 4062 - DNA, 122 bp, Homo sapiens
  misc_feature (61)..(62): /note="This region represents a CpG dinucleotide"
  misc_feature (61)..(61): /note="Nucleotide may be methylated to form 5-methylcytosine"
tagtgaggagctgtggaacttctgattcagaccatgagtcagaggaaccaaattctcacccgggagaccagccctttcctcagtcgagccatcagtgcttcatctgggtcctctcacttaga

SEQ ID NO: 4063 - DNA, 122 bp, Homo sapiens
  misc_feature (61)..(62): /note="This region represents a CpG dinucleotide"
  misc_feature (61)..(61): /note="Nucleotide may be methylated to form 5-methylcytosine"
tcatccagcctgattagcacagtatcatcgagctactgaatccatgtgatgttttgtaaacgaagattgcttcagactctgtcatgatggagggcataaaagaacacaacccgggacaacac

SEQ ID NO: 4064 - DNA, 122 bp, Homo sapiens
  misc_feature (61)..(62): /note="This region represents a CpG dinucleotide"
  misc_feature (61)..(61): /note="Nucleotide may be methylated to form 5-methylcytosine"
cgaaaagatttctgattagcaggtcacataagttacatctgacaagtcttgtcagaactccgtcagtaccagtgacacacactagaccataccacaggccacattttatccctggaacacag

SEQ ID NO: 4065 - DNA, 122 bp, Homo sapiens
  misc_feature (61)..(62): /note="This region represents a CpG dinucleotide"
  misc_feature (61)..(61): /note="Nucleotide may be methylated to form 5-methylcytosine"
gtctatattcagaggaggaactgctgggtcatagatgatatttcataggtattgccaaaccgttctctggagaagtggtatgggtttaccctgggattcttctatggagggaatagttgagc

SEQ ID NO: 4066 - DNA, 122 bp, Homo sapiens
  misc_feature (61)..(62): /note="This region represents a CpG dinucleotide"
  misc_feature (61)..(61): /note="Nucleotide may be methylated to form 5-methylcytosine"
aaatgatgggaatttggcctataggtgaatcaccaggcttgtggctcagctcaaagcatacgccctgctgaacggaggagtggcattatgtgcacacagagaaggcagcaccgttccctgtc

SEQ ID NO: 4067 - DNA, 122 bp, Homo sapiens
  misc_feature (61)..(62): /note="This region represents a CpG dinucleotide"
  misc_feature (61)..(61): /note="Nucleotide may be methylated to form 5-methylcytosine"
aacaagtaacaaacaatccagctgtcaatgacttaagcaataagggcattctttacctcacgtaacaaggattcaaggggcctgattactttagaagcacaatgatgtcattaggatcctgg

SEQ ID NO: 4068 - DNA, 122 bp, Homo sapiens
  misc_feature (61)..(62): /note="This region represents a CpG dinucleotide"
  misc_feature (61)..(61): /note="Nucleotide may be methylated to form 5-methylcytosine"
tttgactcatgcgttacagaaggtccagccggtggctcactcttgctttgctgaggtcatcgtgccagaaaaaaagaacagcggcagtggcggcggcttatctggcatgggccacacacctg

SEQ ID NO: 4069 - DNA, 122 bp, Homo sapiens
  misc_feature (61)..(62): /note="This region represents a CpG dinucleotide"
  misc_feature (61)..(61): /note="Nucleotide may be methylated to form 5-methylcytosine"
gcaactgctcagcccggctgttgtgctgcagaagcagccaaaggcacgtgggtcagtgagcgtggctgtgtcccagtgaaacaattttcagaaacaggctgcgcaggattggcaggacttgg

SEQ ID NO: 4070 - DNA, 122 bp, Homo sapiens
  misc_feature (61)..(62): /note="This region represents a CpG dinucleotide"
  misc_feature (61)..(61): /note="Nucleotide may be methylated to form 5-methylcytosine"
agctgagggacaccaaaacctgccttgtcacgtccccgccctgggttcccatggttgagtcgctctcactcacaagctgtgtggcttggggcaagggcttaacttgccaggcctctctttcc

SEQ ID NO: 4071 - DNA, 122 bp, Homo sapiens
  misc_feature (61)..(62): /note="This region represents a CpG dinucleotide"
  misc_feature (61)..(61): /note="Nucleotide may be methylated to form 5-methylcytosine"
agctgagctgtcatacaacttaatcctttcgcaagtgatagacatcagatccagttctcccgtgcggcaaggtaaagcttgcactatccttgcccaaaatttacgtcacctacttaatgtgg

SEQ ID NO: 4072 - DNA, 122 bp, Homo sapiens
  misc_feature (61)..(62): /note="This region represents a CpG dinucleotide"
  misc_feature (61)..(61): /note="Nucleotide may be methylated to form 5-methylcytosine"
ctctcagtcaggggcctcttctgagcaattgtctctatctagtctgtggttccaagactgcgtgggaggaatgctggggcctttttacctcccatttccatccccaggggcctcactgcctc

SEQ ID NO: 4073 - DNA, 122 bp, Homo sapiens
  misc_feature (61)..(62): /note="This region represents a CpG dinucleotide"
  misc_feature (61)..(61): /note="Nucleotide may be methylated to form 5-methylcytosine"
gattaggagtacagctcatatctgacactggtatgatctggagcatgatttcatcatcatcgtgttcataggtggccctagttttgctttgatgaatcatccttggtggtagcattgggctc

SEQ ID NO: 4074 - DNA, 122 bp, Homo sapiens
  misc_feature (61)..(62): /note="This region represents a CpG dinucleotide"
  misc_feature (61)..(61): /note="Nucleotide may be methylated to form 5-methylcytosine"
cttaaaaataacagtaaaaacaagaaacacactgcactatattggtaaacctcaaactcacgtaagtcagttacctgccccgatgggagtttagaagttggtgctactactcttagtactgc

SEQ ID NO: 4075 - DNA, 122 bp, Homo sapiens
  misc_feature (61)..(62): /note="This region represents a CpG dinucleotide"
  misc_feature (61)..(61): /note="Nucleotide may be methylated to form 5-methylcytosine"
gtctgcggtggtttggcagtagcttagcctcaaggataaaggagagccatgactactcaccgctagagcaagacacactctagccatagttctaattcaagacagtgtattgcagtagccgt

SEQ ID NO: 4076 - DNA, 122 bp, Homo sapiens
  misc_feature (61)..(62): /note="This region represents a CpG dinucleotide"
  misc_feature (61)..(61): /note="Nucleotide may be methylated to form 5-methylcytosine"
tcccagtgtcttgaagagctgtcaagaccacagcctcctgaagctgtgattaaaggcacacggtgccagcagcacttagaattccctgcctccagtagcttacacttcagtgtctccaccct

SEQ ID NO: 4077 - DNA, 122 bp, Homo sapiens
  misc_feature (61)..(62): /note="This region represents a CpG dinucleotide"
  misc_feature (61)..(61): /note="Nucleotide may be methylated to form 5-methylcytosine"
gttaaatttattgttgttttttatcttgaagctgccagaaaaaattataatgaactactacgagaagtataagcctcgaatgaatgagctggaagcttttaatatggtaaatctcagagtta

SEQ ID NO: 4078 - DNA, 122 bp, Homo sapiens
  misc_feature (61)..(62): /note="This region represents a CpG dinucleotide"
  misc_feature (61)..(61): /note="Nucleotide may be methylated to form 5-methylcytosine"
ctataaaatccacatggtgtcttttcaaaccacagaaaccccaagaaccaaaagttttgccgtatcatattgcataagtcatagggtcacttttatgacaacctgaacctgctggagagccc

SEQ ID NO: 4079 - DNA, 122 bp, Homo sapiens
  misc_feature (61)..(62): /note="This region represents a CpG dinucleotide"
  misc_feature (61)..(61): /note="Nucleotide may be methylated to form 5-methylcytosine"
atttccttgtcatgtgatgctataccaaagtcaggttgaaaagtaagccacattatgctgcgttaagaaaagaaacctggtcaagtagccaagatggccaaataggaacagctccagtctac

SEQ ID NO: 4080 - DNA, 122 bp, Homo sapiens
  misc_feature (61)..(62): /note="This region represents a CpG dinucleotide"
  misc_feature (61)..(61): /note="Nucleotide may be methylated to form 5-methylcytosine"
ttcatgtgagcttgttccttcagagctcttggctacaggattgcaaacaacatcctaaaacgtggagctgcaaaccttggtgatttaaatgctcgctgccaggcaaattgcggtgacataaa

SEQ ID NO: 4081 - DNA, 122 bp, Homo sapiens
  misc_feature (61)..(62): /note="This region represents a CpG dinucleotide"
  misc_feature (61)..(61): /note="Nucleotide may be methylated to form 5-methylcytosine"
gatggagctgcctgttcaaatccttgtggatgtcataagattagcagctttcctctgagtcggcctcaaagacttcctttgcaattgttcctaagctagctcaagggataggcagtgaagtt

SEQ ID NO: 4082 - DNA, 122 bp, Homo sapiens
  misc_feature (61)..(62): /note="This region represents a CpG dinucleotide"
  misc_feature (61)..(61): /note="Nucleotide may be methylated to form 5-methylcytosine"
ctggttcctgttcctgggcatccccaaggagaaggccccaagtcgtgtgtccactgcagacgtcatgactcacaggactgggattgtggctaaaaggagtctcaatggttcagctcctctcc

SEQ ID NO: 4083 - DNA, 122 bp, Homo sapiens
  misc_feature (61)..(62): /note="This region represents a CpG dinucleotide"
  misc_feature (61)..(61): /note="Nucleotide may be methylated to form 5-methylcytosine"
cccttccttgcttccttgttgtgtgaccatgggcagtttgctttgcttctgtgacccatgcggctttgtcattgcaaatggtaggaaatcccaagagctatcacccggggaagaagctgaca

SEQ ID NO: 4084 - DNA, 122 bp, Homo sapiens
  misc_feature (61)..(62): /note="This region represents a CpG dinucleotide"
  misc_feature (61)..(61): /note="Nucleotide may be methylated to form 5-methylcytosine"
ggctcctaaccatctctctgacatcatcttgtgtaactctttctctgaatcactgaccttcgctagccacattcattttttctcagtttttttagctcttaaagttctttcccatctcaggg

SEQ ID NO: 4085 - DNA, 122 bp, Homo sapiens
  misc_feature (61)..(62): /note="This region represents a CpG dinucleotide"
  misc_feature (61)..(61): /note="Nucleotide may be methylated to form 5-methylcytosine"
gattcatcctccttgctcatccatttaaggtgaattgtgggtctaaagtaggtgactcaacgctggtcagcaagaccttgctgggatggttcacccaagagcattgctcttaggtgatgctg

SEQ ID NO: 4086 - DNA, 122 bp, Homo sapiens
  misc_feature (61)..(62): /note="This region represents a CpG dinucleotide"
  misc_feature (61)..(61): /note="Nucleotide may be methylated to form 5-methylcytosine"
acccgtctgagagttgacttcataatcgagatggctacgaagtgactaatggacaggtagcgtaaaacgcacggatacactagacaaaggaatgattcatatcctggatgagacagagtggg

SEQ ID NO: 4087 - DNA, 122 bp, Homo sapiens
  misc_feature (61)..(62): /note="This region represents a CpG dinucleotide"
  misc_feature (61)..(61): /note="Nucleotide may be methylated to form 5-methylcytosine"
atctgcctctgccatgttgggcaactcaggccgagcatttacatgagagggcaatggcctcgttacctcactcttgctccatccctctctccagctgacaatggcatacaccagggccacac

SEQ ID NO: 4088 - DNA, 122 bp, Homo sapiens
  misc_feature (61)..(62): /note="This region represents a CpG dinucleotide"
  misc_feature (61)..(61): /note="Nucleotide may be methylated to form 5-methylcytosine"
gaacttgggtttgctcatggcttcctccttccttttggctgtttaattctttagtttccacgtaatttaggtctttgctttgtttttctatcaaattcctttccttccttccttcttccttt

SEQ ID NO: 4089 - DNA, 122 bp, Homo sapiens
  misc_feature (61)..(62): /note="This region represents a CpG dinucleotide"
  misc_feature (61)..(61): /note="Nucleotide may be methylated to form 5-methylcytosine"
tgagtatgctctatgatgtttgcacaatgacaacatcgcctaatgatgctcttctcagaacgtatccccattaagtgacacatgactgtaattgtgcaagaaaaggagttcttgtataatta

SEQ ID NO: 4090 - DNA, 122 bp, Homo sapiens
  misc_feature (61)..(62): /note="This region represents a CpG dinucleotide"
  misc_feature (61)..(61): /note="Nucleotide may be methylated to form 5-methylcytosine"
gtatcttcaacaatgtttacagactttttatagctcttctcacatgaagtgtttaccctccgtttgtggcttatcatgaactgaccagcaatatgttctgatgaacaaataaagtttttctt

SEQ ID NO: 4091 - DNA, 122 bp, Homo sapiens
  misc_feature (61)..(62): /note="This region represents a CpG dinucleotide"
  misc_feature (61)..(61): /note="Nucleotide may be methylated to form 5-methylcytosine"
gttcagagtcattttgcaggaaagagtaactgctggtgctactggcagggccactgtttgcgttttctcattccctccctcatccttcctgctgcaaacaggagatgttggcggatgctgtc

SEQ ID NO: 4092 - DNA, 122 bp, Homo sapiens
  misc_feature (61)..(62): /note="This region represents a CpG dinucleotide"
  misc_feature (61)..(61): /note="Nucleotide may be methylated to form 5-methylcytosine"
cccacggtcctctgactacaggtgtgagccatcatgcccggccccggggcgctggtgtgacgttgggatcccatggtcctctgactacaggtgtgagccatcatgcccggccccggggcgcg

SEQ ID NO: 4093 - DNA, 122 bp, Homo sapiens
  misc_feature (61)..(62): /note="This region represents a CpG dinucleotide"
  misc_feature (61)..(61): /note="Nucleotide may be methylated to form 5-methylcytosine"
gtgatatatataggactccacccaggtctatcctataatgaaagcctgacctacttttttcgaaaccatactctttcccaaggagtctgaatatcttaataggataggtggccagtgaaatt

SEQ ID NO: 4094 - DNA, 122 bp, Homo sapiens
  misc_feature (61)..(62): /note="This region represents a CpG dinucleotide"
  misc_feature (61)..(61): /note="Nucleotide may be methylated to form 5-methylcytosine"
tcccactattctacagaatatactctgaattgatcaagccagtcttcccacttctctctgcgtgagccaagccttttctcatttccctgctttcaattatccaggagtggtaaattcaaaca

SEQ ID NO: 4095 - DNA, 122 bp, Homo sapiens
  misc_feature (61)..(62): /note="This region represents a CpG dinucleotide"
  misc_feature (61)..(61): /note="Nucleotide may be methylated to form 5-methylcytosine"
acaccttgcactgcttctgggtttactgttgcctcgttttaaagtgggactttctcttgacggaagtgtgttaagaattggaaaattccctatcagtagactagcaccatcttgacagcctt

SEQ ID NO: 4096 - DNA, 122 bp, Homo sapiens
  misc_feature (61)..(62): /note="This region represents a CpG dinucleotide"
  misc_feature (61)..(61): /note="Nucleotide may be methylated to form 5-methylcytosine"
cagctatagaggaagtatgcatttactacaaaatgtttaccacaggaaaattttagtcatcgttaatcttccctcagtcttagctctttagtttgaaagagaattgtaagataatttgtatt

SEQ ID NO: 4097 - DNA, 122 bp, Homo sapiens
  misc_feature (61)..(62): /note="This region represents a CpG dinucleotide"
  misc_feature (61)..(61): /note="Nucleotide may be methylated to form 5-methylcytosine"
ctgccctgtcacagtgaaaagcgatactgggcagaactcacccaacacccaaggagggaacgctgagacaagccatagccagagaggaatcatccagcagaaattgagttctggcaagcctc

SEQ ID NO: 4098 - DNA, 122 bp, Homo sapiens
  misc_feature (61)..(62): /note="This region represents a CpG dinucleotide"
  misc_feature (61)..(61): /note="Nucleotide may be methylated to form 5-methylcytosine"
gattctaacgacacctcagcacttgccagcacaggccctgcgtgtgagaacatctcctgccgctcccacttcctcatcgcgggtgtaacagcgctgcacgccggtgcccctcagaacaggaa

SEQ ID NO: 4099 - DNA, 122 bp, Homo sapiens
  misc_feature (61)..(62): /note="This region represents a CpG dinucleotide"
  misc_feature (61)..(61): /note="Nucleotide may be methylated to form 5-methylcytosine"
gtaagccaccgggcccagccaaggctgagtcttaatgggcttttgatttcagtctccttccgttcccaggtcaataaacaataggcttttccaatcttttcatgccgccaatttctggcctt

SEQ ID NO: 4100 - DNA, 122 bp, Homo sapiens
  misc_feature (61)..(62): /note="This region represents a CpG dinucleotide"
  misc_feature (61)..(61): /note="Nucleotide may be methylated to form 5-methylcytosine"
attatttaaatgagcaatgtactactacacatacattgtgcaattgcatcatatcctttgcgcaatctattctgcagagtcttcagcaaccagggcgtttgtgtcctgtagacaggctagga

SEQ ID NO: 4101 - DNA, 122 bp, Homo sapiens
  misc_feature (61)..(62): /note="This region represents a CpG dinucleotide"
  misc_feature (61)..(61): /note="Nucleotide may be methylated to form 5-methylcytosine"
aagacatgttgaagttctaactcccagtaccttagaatgcacccttttcggagatagggtcgttacagaggtgatcaaatgaagatgaggctatcagggtgtgtcctaatcttctatgatga

SEQ ID NO: 4102 - DNA, 122 bp, Homo sapiens
  misc_feature (61)..(62): /note="This region represents a CpG dinucleotide"
  misc_feature (61)..(61): /note="Nucleotide may be methylated to form 5-methylcytosine"
acgtatgtatttcccaaacgtgagttgagtaactggctccagttgttactgatggcatgccgtgcttgtgccatatctgtgttctctgataactgctaaatcaactgctgcctaaagtagtg

SEQ ID NO: 4103 - DNA, 122 bp, Homo sapiens
  misc_feature (61)..(62): /note="This region represents a CpG dinucleotide"
  misc_feature (61)..(61): /note="Nucleotide may be methylated to form 5-methylcytosine"
gctcaggcccagcttgcgcaagttcagcagccggaaaaaaggctgtgggcagggaggacacggactctgtggcagagaccactgcagagcagagaagagctcctggacacgtgagtgtcaca

SEQ ID NO: 4104 - DNA, 122 bp, Homo sapiens
  misc_feature (61)..(62): /note="This region represents a CpG dinucleotide"
  misc_feature (61)..(61): /note="Nucleotide may be methylated to form 5-methylcytosine"
tgaaaaaaaagcaatgatatcatgtgactaccaagatgcatcactttccaagatatccttcgctaactagtccaccaaaaaacataaacctagttctataaagacttatttattggtcagtg

SEQ ID NO: 4105 - DNA, 122 bp, Homo sapiens
  misc_feature (61)..(62): /note="This region represents a CpG dinucleotide"
  misc_feature (61)..(61): /note="Nucleotide may be methylated to form 5-methylcytosine"
tggtttggaggcttccctggagaaagaagagcagccgtctcctggagagggaagagcagccgtctcctggagcaggaatcttaagcaccagaaaagcccataacacagagtcgacgaggctg

SEQ ID NO: 4106 - DNA, 122 bp, Homo sapiens
  misc_feature (61)..(62): /note="This region represents a CpG dinucleotide"
  misc_feature (61)..(61): /note="Nucleotide may be methylated to form 5-methylcytosine"
catcatgcacccatcacccagcacagtccaggtgtgttgtaccatgggtgttaggtggcacgatggtggtgatgaggatgtaatccactggcttaaaccctgcccagctcacatactccctc

SEQ ID NO: 4107 - DNA, 122 bp, Homo sapiens
  misc_feature (61)..(62): /note="This region represents a CpG dinucleotide"
  misc_feature (61)..(61): /note="Nucleotide may be methylated to form 5-methylcytosine"
agaactggcacagccacttatgagctgcagtgacacataaatgcccttcatctctataaacgtcagtttccttttctgtaaaatggggggtagtaacacctgcttccttggcttgttttgag

SEQ ID NO: 4108 - DNA, 122 bp, Homo sapiens
  misc_feature (61)..(62): /note="This region represents a CpG dinucleotide"
  misc_feature (61)..(61): /note="Nucleotide may be methylated to form 5-methylcytosine"
accacaggtgggtggggatgaaactctagtcagttggcagccttactcatttgcagctcccgtgaatgaggtggtgaaacctggggtgaaactcagggtggagaaacatttttggatttcat

SEQ ID NO: 4109 - DNA, 122 bp, Homo sapiens
  misc_feature (61)..(62): /note="This region represents a CpG dinucleotide"
  misc_feature (61)..(61): /note="Nucleotide may be methylated to form 5-methylcytosine"
gctaagacttcaccagaagcagggtggagtggagcagccagtcctcatggtcaccacacacggactttatgaaagacagaaccaagagaggaattgatattggcaagaatgggaaattgaga

SEQ ID NO: 4110 - DNA, 122 bp, Homo sapiens
  misc_feature (61)..(62): /note="This region represents a CpG dinucleotide"
  misc_feature (61)..(61): /note="Nucleotide may be methylated to form 5-methylcytosine"
tggctggtagaacccatttcactttgaattctgcccagaaaccacaggaggatcagtccacggaagagaaaaatctaattggttacagggacttagcatctgcccagaagacattcatgccc

SEQ ID NO: 4111 - DNA, 122 bp, Homo sapiens
  misc_feature (61)..(62): /note="This region represents a CpG dinucleotide"
  misc_feature (61)..(61): /note="Nucleotide may be methylated to form 5-methylcytosine"
agtcctggggatcttccgatttcctgtgacagggcaacaaattgccgatgtgagtacaaacgggtaggcaggcagcttaaagatgagaatgctggggcgagggcattatgtcacagttcatg

SEQ ID NO: 4112 - DNA, 122 bp, Homo sapiens
  misc_feature (61)..(62): /note="This region represents a CpG dinucleotide"
  misc_feature (61)..(61): /note="Nucleotide may be methylated to form 5-methylcytosine"
gaagtcaagcacgaatctaagacatagattatttttatatagctaatgaagagtatgttacgaaattgttgggtttttggggtattgagggtggcaaattttgtgaatcatgcatgcttcac

SEQ ID NO: 4113 - DNA, 122 bp, Homo sapiens
  misc_feature (61)..(62): /note="This region represents a CpG dinucleotide"
  misc_feature (61)..(61): /note="Nucleotide may be methylated to form 5-methylcytosine"
tgggtacagaattcatctcaactacttcctccttcggcttctcgttcttgctgaaattctcgtctggctggtacctgaattagagagagtagggcaagattaacccaggtccctgttcatcc

SEQ ID NO: 4114 - DNA, 122 bp, Homo sapiens
  misc_feature (61)..(62): /note="This region represents a CpG dinucleotide"
  misc_feature (61)..(61): /note="Nucleotide may be methylated to form 5-methylcytosine"
tcctctttctgtacagccagtgtaagaacgcagcctgtgggtaagtaccaggaggcctaccgcaacgtgttttatcagcaaggtctttgtgacctgtaccttgtgtcgacctcctatctcat

SEQ ID NO: 4115 - DNA, 122 bp, Homo sapiens
  misc_feature (61)..(62): /note="This region represents a CpG dinucleotide"
  misc_feature (61)..(61): /note="Nucleotide may be methylated to form 5-methylcytosine"
gatcacctgaggtcgggcattcgagaccagcctgaccaacatggtaaaaccccatctctacgaaaagtacccaaaaaattagccaggtgaggtggcagatgcctttaatcccagctactggg

SEQ ID NO: 4116 - DNA, 122 bp, Homo sapiens
  misc_feature (61)..(62): /note="This region represents a CpG dinucleotide"
  misc_feature (61)..(61): /note="Nucleotide may be methylated to form 5-methylcytosine"
tttatcattatgtgtgatgtgagcttagagcctagctctaagctccccaaaggtggtgaccgtataatcatttcccacccccattacctaggacaggactctggccacagtggagggtcaga

SEQ ID NO: 4117 - DNA, 122 bp, Homo sapiens
  misc_feature (61)..(62): /note="This region represents a CpG dinucleotide"
  misc_feature (61)..(61): /note="Nucleotide may be methylated to form 5-methylcytosine"
gtgcatggcgttgttctctatttggttcttaagctgtaaacctggaaatcacccttgactcgtcctccttgtttatgactgacatctagtcattttttaggtcttccttaactatgtcttga

SEQ ID NO: 4118 - DNA, 122 bp, Homo sapiens
  misc_feature (61)..(62): /note="This region represents a CpG dinucleotide"
  misc_feature (61)..(61): /note="Nucleotide may be methylated to form 5-methylcytosine"
tatcttccatttctttcctcatgtttgtgttttcctttaaatccctgagcacattcataacgattgtcttatgtcttaatctgctaattccatcatctttgtcacacttgtgtctgtttcta

SEQ ID NO: 4119 - DNA, 122 bp, Homo sapiens
  misc_feature (61)..(62): /note="This region represents a CpG dinucleotide"
  misc_feature (61)..(61): /note="Nucleotide may be methylated to form 5-methylcytosine"
ctgctaggaaacaggcctctccactacagtgctgagtcaccaagttacatgtgaactcaacgtgatgggagaactcagggcagaaagaacaggccacagggtgggttcggcgctgttctccc

SEQ ID NO: 4120 - DNA, 122 bp, Homo sapiens
  misc_feature (61)..(62): /note="This region represents a CpG dinucleotide"
  misc_feature (61)..(61): /note="Nucleotide may be methylated to form 5-methylcytosine"
tcactcattgtgagaaaagactaagactatctcaaagcacttagcacagtggtaggcacacgctacctttgaaataagtgcctgtcagtaagctgacttggaaaagggctctaacacaattc

SEQ ID NO: 4121 - DNA, 122 bp, Homo sapiens
  misc_feature (61)..(62): /note="This region represents a CpG dinucleotide"
  misc_feature (61)..(61): /note="Nucleotide may be methylated to form 5-methylcytosine"
gtagacgtgatgtcaagaactctgaattagaatgccttgcctttgtccttgtcacatctccgtgacctcatctgcctagtttagtgcctacattgcaggttcatttgaaactcacctcttct

SEQ ID NO: 4122 - DNA, 122 bp, Homo sapiens
  misc_feature (61)..(62): /note="This region represents a CpG dinucleotide"
  misc_feature (61)..(61): /note="Nucleotide may be methylated to form 5-methylcytosine"
ttgtcaccacagacagccagaaggtcaagcagctggcctccaccttgcttccttctggtgcgcatatataggagcctgattagcatgtagaatcctagcagaatgggagtctttgaaatagg

SEQ ID NO: 4123 - DNA, 122 bp, Homo sapiens
  misc_feature (61)..(62): /note="This region represents a CpG dinucleotide"
  misc_feature (61)..(61): /note="Nucleotide may be methylated to form 5-methylcytosine"
caactgaccaatccatccagtttgccttgggctgtaccaattttagcaatgaaagtcacacgtcctgtgaaacctcttagactcaggcaaacccggaacattgatcttcctagcttgggctg

SEQ ID NO: 4124 - DNA, 122 bp, Homo sapiens
  misc_feature (61)..(62): /note="This region represents a CpG dinucleotide"
  misc_feature (61)..(61): /note="Nucleotide may be methylated to form 5-methylcytosine"
ctgggattacaggcatgagccaccttgcccagccaatattctatttcaaaaaggaatattcggaaaccaaagaaaagagaactcttggaaactaaaaatatgaaattaaaaatataaaaatt

SEQ ID NO: 4125 - DNA, 122 bp, Homo sapiens
  misc_feature (61)..(62): /note="This region represents a CpG dinucleotide"
  misc_feature (61)..(61): /note="Nucleotide may be methylated to form 5-methylcytosine"
atccacaggccagtcatgcccctccactgccgctgctccagctgagcacaaggaagtggacgcaaagaatctgacgactctggtgatgacatggctttggactttttgacccgacctgtttt

SEQ ID NO: 4126 - DNA, 122 bp, Homo sapiens
  misc_feature (61)..(62): /note="This region represents a CpG dinucleotide"
  misc_feature (61)..(61): /note="Nucleotide may be methylated to form 5-methylcytosine"
cttattacaagagtcactttttgagtcatctacacgtatttccagagtacgctgtctccacgtccatctgaagcatttgtgatgtggcaccccttgaatttgtgtatgttgtcactggaaac

SEQ ID NO: 4127 - DNA, 122 bp, Homo sapiens
  misc_feature (61)..(62): /note="This region represents a CpG dinucleotide"
  misc_feature (61)..(61): /note="Nucleotide may be methylated to form 5-methylcytosine"
agaaaaaagaattccagagagagttgtatgatttcacaatgcatactccaaagccccgaacgatcaactcactcatcttgcctcaggagtttttgttgctgtaaacaagagctacttttcca

SEQ ID NO: 4128 - DNA, 122 bp, Homo sapiens
  misc_feature (61)..(62): /note="This region represents a CpG dinucleotide"
  misc_feature (61)..(61): /note="Nucleotide may be methylated to form 5-methylcytosine"
taactactagctgagagcaactatttactaaacaactattcctatatgccacactggctacgcttttaaaacatattatttcacttaatcctcctaacaactttatgggatagatgttatca

SEQ ID NO: 4129 - DNA, 122 bp, Homo sapiens
  misc_feature (61)..(62): /note="This region represents a CpG dinucleotide"
  misc_feature (61)..(61): /note="Nucleotide may be methylated to form 5-methylcytosine"
gcacacatagatctggaaacaacatacctttaagtactactctggctccttttgaatgagcgtagcacataagttctgagtcatattttccaaatgttgccacagttgtaatctgtgaccaa

SEQ ID NO: 4130 - DNA, 122 bp, Homo sapiens
  misc_feature (61)..(62): /note="This region represents a CpG dinucleotide"
  misc_feature (61)..(61): /note="Nucleotide may be methylated to form 5-methylcytosine"
cttctccatctccatgtcaggacgtgcactcgccgatgaagtgtccacccaagatggcgacgggtgagcacgggcacgtgtggcccgggcgaggtctgtgtggtgctgaacgcctcctctgc

SEQ ID NO: 4131 - DNA, 122 bp, Homo sapiens
  misc_feature (61)..(62): /note="This region represents a CpG dinucleotide"
  misc_feature (61)..(61): /note="Nucleotide may be methylated to form 5-methylcytosine"
tacagtgtataaccttatgggacctcatgtggactcatcactgactgaaacattgttatgcggtgtgggactgtatttggctaaactagtaaggtatgctaatcatcccttatatttcctct

SEQ ID NO: 4132 - DNA, 122 bp, Homo sapiens
  misc_feature (61)..(62): /note="This region represents a CpG dinucleotide"
  misc_feature (61)..(61): /note="Nucleotide may be methylated to form 5-methylcytosine"
cagggcactccgtgtgctctagtcctttttagatgagaatgagccatcttcctcctactccggggcctttgcacatgcaaatgcttctgtgtgaatcaaccttcctttagcccaagtaaatt

SEQ ID NO: 4133 - DNA, 122 bp, Homo sapiens
  misc_feature (61)..(62): /note="This region represents a CpG dinucleotide"
  misc_feature (61)..(61): /note="Nucleotide may be methylated to form 5-methylcytosine"
cttcaatcacccagaagccaaccaggaactagaaacagaaagcttctgcagaactgatcacgactcatcagaggccgtgagagcaaggaaagaatcaggaactgccacaaattggaagagtc

SEQ ID NO: 4134 - DNA, 122 bp, Homo sapiens
  misc_feature (61)..(62): /note="This region represents a CpG dinucleotide"
  misc_feature (61)..(61): /note="Nucleotide may be methylated to form 5-methylcytosine"
cttctttttatctcttttccatgaaatcacactggcagacttcttgtacaaatgtcatgccgtgtcgtttctcatccagcaccacatcccctgtggctagcaggttgaagcaagcttcctga

SEQ ID NO: 4135 - DNA, 122 bp, Homo sapiens
  misc_feature (61)..(62): /note="This region represents a CpG dinucleotide"
  misc_feature (61)..(61): /note="Nucleotide may be methylated to form 5-methylcytosine"
gctcaggggcccttcacacacatacctttgggaccaacgctgtttcgtctgcagcaatggcgtgcctggctttcatgcttgtggtttgtaccatagttgtgatgttgtctagaattcccatg

SEQ ID NO: 4136 - DNA, 122 bp, Homo sapiens
  misc_feature (61)..(62): /note="This region represents a CpG dinucleotide"
  misc_feature (61)..(61): /note="Nucleotide may be methylated to form 5-methylcytosine"
ctgccaggtgttcacccctatcccacggacatcctgcattcctggccgcttggcgccccacggaccgatggacagacagcactgcagccacagagcgtcgcacagtagccaccgcgctggcc

SEQ ID NO: 4137 - DNA, 122 bp, Homo sapiens
  misc_feature (61)..(62): /note="This region represents a CpG dinucleotide"
  misc_feature (61)..(61): /note="Nucleotide may be methylated to form 5-methylcytosine"
agttgaatcactgtatcactgtgaatacctttatggggcaagtcaaccattttcaggaaacgaaggctacaatgacagcattttacttaggaaggctaaacgagtcacatgaagagaataaa

SEQ ID NO: 4138 - DNA, 122 bp, Homo sapiens
  misc_feature (61)..(62): /note="This region represents a CpG dinucleotide"
  misc_feature (61)..(61): /note="Nucleotide may be methylated to form 5-methylcytosine"
tgaaaattgagcaaaagcttgaagcaggtgatggagctggccaaggtgctgagggaagagcgttgtaggctgaatcaacaggataaaggcattaggagactccctggtgagtctgaggctct

SEQ ID NO: 4139 - DNA, 122 bp, Homo sapiens
  misc_feature (61)..(62): /note="This region represents a CpG dinucleotide"
  misc_feature (61)..(61): /note="Nucleotide may be methylated to form 5-methylcytosine"
gactttctccaaccttcttttagaaaaggagttacccaaatgaagttgtaatgaagaaaacgggacaaagcaaataataatgagtctacagctgaggtaatttatcatgagggttatcatga

SEQ ID NO: 4140 - DNA, 122 bp, Homo sapiens
  misc_feature (61)..(62): /note="This region represents a CpG dinucleotide"
  misc_feature (61)..(61): /note="Nucleotide may be methylated to form 5-methylcytosine"
atctctgctgccatctccactccagccgagcctcctcccaccaccacgatgaaccgtgagcgctggacctggagaagaggacatgtgaaacagggacatatgaaacacacctacacatccac

SEQ ID NO: 4141 - DNA, 122 bp, Homo sapiens
  misc_feature (61)..(62): /note="This region represents a CpG dinucleotide"
  misc_feature (61)..(61): /note="Nucleotide may be methylated to form 5-methylcytosine"
catacttctgatccttggagtgaccctcagtgtctaaaaatcctattaaaaacgttgctgcgtgagctactcacttgtttgattaacatgaaagggagtttaatgtaaacaatacttctgga

SEQ ID NO: 4142 - DNA, 122 bp, Homo sapiens
  misc_feature (61)..(62): /note="This region represents a CpG dinucleotide"
  misc_feature (61)..(61): /note="Nucleotide may be methylated to form 5-methylcytosine"
tgtctcaaaaaaaaaaaaaaaaaaaaaaaaaaagaggagggcattgtgtgggcaaaagtgcggaggaggaaaagtatagggtgtgtttgtggaacagtcctggtgcaattaatggctaagcc

SEQ ID NO: 4143 - DNA, 122 bp, Homo sapiens
  misc_feature (61)..(62): /note="This region represents a CpG dinucleotide"
  misc_feature (61)..(61): /note="Nucleotide may be methylated to form 5-methylcytosine"
aattgcccagaaggggatgaggacaatcctgaagcccttcctgactgaaggcacgtctctcgctgcagaggcacagctcccagctctggctgcagaagcccagatggatcagggcctagagc

SEQ ID NO: 4144 - DNA, 122 bp, Homo sapiens
  misc_feature (61)..(62): /note="This region represents a CpG dinucleotide"
  misc_feature (61)..(61): /note="Nucleotide may be methylated to form 5-methylcytosine"
tcgtggcgtcctcactagccacttcctaggggcagacagtagtgcagtgttccacggtagcgtactacataaaccatccatctccatcacagcccgtcacactcctgtccaagaaatgttgc

SEQ ID NO: 4145 - DNA, 122 bp, Homo sapiens
  misc_feature (61)..(62): /note="This region represents a CpG dinucleotide"
  misc_feature (61)..(61): /note="Nucleotide may be methylated to form 5-methylcytosine"
caggctgcctgaggcagccgaagcaggcactgctttaggaatgcttcaccccctggcctacgcaggggatgcaacaactggccagccttggcccagcctccatgctgattggggaccacgtg

SEQ ID NO: 4146 - DNA, 122 bp, Homo sapiens
  misc_feature (61)..(62): /note="This region represents a CpG dinucleotide"
  misc_feature (61)..(61): /note="Nucleotide may be methylated to form 5-methylcytosine"
ttcatgggaactcattctttgccctaggtgctttatgaacattctcccatttaatgcccccgattacagggtactccactggcctttctggttacagggcatccaaggcagtctgcatactg

SEQ ID NO: 4147 - DNA, 122 bp, Homo sapiens
  misc_feature (61)..(62): /note="This region represents a CpG dinucleotide"
  misc_feature (61)..(61): /note="Nucleotide may be methylated to form 5-methylcytosine"
caacaacaggaagtacaggtgcagtgtggggacctgggccaggcaggcactccgcaaaggcgagttccagagcccacaggtgcccgagctgcccttgcagtggctggttccacagtcacctt

SEQ ID NO: 4148 - DNA, 122 bp, Homo sapiens
  misc_feature (61)..(62): /note="This region represents a CpG dinucleotide"
  misc_feature (61)..(61): /note="Nucleotide may be methylated to form 5-methylcytosine"
tgaaggactggacacgaggcgtgaaaagcactgaggaatcaaggatgacttggaggtttccggcctgagcaaccagaaggctcaagttgccatgacgggaggctgaaagagcaagtggatct

SEQ ID NO: 4149 - DNA, 122 bp, Homo sapiens
  misc_feature (61)..(62): /note="This region represents a CpG dinucleotide"
  misc_feature (61)..(61): /note="Nucleotide may be methylated to form 5-methylcytosine"
tcaacccaacacgcatttcagtgagtcagaactcaagcttcctcagaaacaaggttgcttcgtcgtgctcaaggtatgatcacagcagggccacagcccaagctcaagactcaaaaaacttt

SEQ ID NO: 4150 - DNA, 122 bp, Homo sapiens
  misc_feature (61)..(62): /note="This region represents a CpG dinucleotide"
  misc_feature (61)..(61): /note="Nucleotide may be methylated to form 5-methylcytosine"
aggaagatgcagcctctgagcaagttgatggctatctcaaaacctcgaaacctgtctctacgtgaacaaagagaggttctgagagcagatatgtcttggcagcaggaaaccaaccccgtcgt

SEQ ID NO: 4151 - DNA, 122 bp, Homo sapiens
  misc_feature (61)..(62): /note="This region represents a CpG dinucleotide"
  misc_feature (61)..(61): /note="Nucleotide may be methylated to form 5-methylcytosine"
cacccgcctcggcctcccaaagtgctgggattacaggagtgagccaccatgcccagcccacggatgtttacagagcttctgaagacacttggggttcaaaaagcactgcttccatttgcaat

SEQ ID NO: 4152 - DNA, 122 bp, Homo sapiens
  misc_feature (61)..(62): /note="This region represents a CpG dinucleotide"
  misc_feature (61)..(61): /note="Nucleotide may be methylated to form 5-methylcytosine"
ctgtgatttagagagaaaatttgtctcttaaggctgacaaaatcctgtggtcttggtccccgtgcttcaagcctacaaggaattccagtagaatattaaaaggattctgagtctccctagga

SEQ ID NO: 4153 - DNA, 122 bp, Homo sapiens
  misc_feature (61)..(62): /note="This region represents a CpG dinucleotide"
  misc_feature (61)..(61): /note="Nucleotide may be methylated to form 5-methylcytosine"
aaaacactttaggctgagcaaatgccactagatatgcaaatgtgtatcactatgtgattccgttgacagagagttcaaaaacaggcaaaactggccaggcacggtagttcacgcctgtattc

SEQ ID NO: 4154 - DNA, 122 bp, Homo sapiens
  misc_feature (61)..(62): /note="This region represents a CpG dinucleotide"
  misc_feature (61)..(61): /note="Nucleotide may be methylated to form 5-methylcytosine"
gacacccttccataccaacccaggaaaaagtgattcagctccggtccaccctgggtgcagcggtccttctgccaagatgccttcatatcatacagctattattttcgggaggattccaagtg

SEQ ID NO: 4155 - DNA, 122 bp, Homo sapiens
  misc_feature (61)..(62): /note="This region represents a CpG dinucleotide"
  misc_feature (61)..(61): /note="Nucleotide may be methylated to form 5-methylcytosine"
tgaatgacaatcccccacaggtgaccatgtctgcactcaccagccccatcccagagaactcgcctgagatagtagttgctgttttcagcgtttcagatcctgactccggaaacaatgggaag

SEQ ID NO: 4156 - DNA, 122 bp, Homo sapiens
  misc_feature (61)..(62): /note="This region represents a CpG dinucleotide"
  misc_feature (61)..(61): /note="Nucleotide may be methylated to form 5-methylcytosine"
actttccaatctacagagcaccttcacatttaacatctcactggattattatgatggcaccgtgagctaaaacactgaggcactggcatcatggctaccaacagacatgaagaaactgaggc

SEQ ID NO: 4157 - DNA, 122 bp, Homo sapiens
  misc_feature (61)..(62): /note="This region represents a CpG dinucleotide"
  misc_feature (61)..(61): /note="Nucleotide may be methylated to form 5-methylcytosine"
cccaagtctgacaggctattaaacactcaagtggagatgtgaagtagacagtaggatagacgtctgaagctcaggggacaggccaagactgcagatataaatttaagagtcgactgcatgta

SEQ ID NO: 4158 - DNA, 122 bp, Homo sapiens
  misc_feature (61)..(62): /note="This region represents a CpG dinucleotide"
  misc_feature (61)..(61): /note="Nucleotide may be methylated to form 5-methylcytosine"
agtcatgagaaaaccggccacagggcatcaggccagcactcctcaaaactgtcaaagtcacggaaaacaggaaagtccaagaaactgtcagagaccagaggacaatgaatagagaggtgaca

SEQ ID NO: 4159 - DNA, 122 bp, Homo sapiens
  misc_feature (61)..(62): /note="This region represents a CpG dinucleotide"
  misc_feature (61)..(61): /note="Nucleotide may be methylated to form 5-methylcytosine"
tcactcctgtgtcagtcacaggcaattagggctaatggctcaacatgtctttatgtagggcgtgtgtgagggttactgttctcggggattgggcacttcctgtttccaggcagctggaaaac

SEQ ID NO: 4160 - DNA, 122 bp, Homo sapiens
  misc_feature (61)..(62): /note="This region represents a CpG dinucleotide"
  misc_feature (61)..(61): /note="Nucleotide may be methylated to form 5-methylcytosine"
agaaaggttaatttgtgatgagtgatgggtggacagcaggcccggagtcagggagtctggcgaggtagtctgtgtaatttgaaggattgctgggaagggtaaggaattacctcattagcctt

SEQ ID NO: 4161 - DNA, 122 bp, Homo sapiens
  misc_feature (61)..(62): /note="This region represents a CpG dinucleotide"
  misc_feature (61)..(61): /note="Nucleotide may be methylated to form 5-methylcytosine"
ctgggattacaggagtgaaccatcgcgcccggccagttctcagaattctgacactggggccgggagactagaagaatcttccagcgcagggcaggtgccaggaggccctgatacgggctgca

SEQ ID NO: 4162 - DNA, 122 bp, Homo sapiens
  misc_feature (61)..(62): /note="This region represents a CpG dinucleotide"
  misc_feature (61)..(61): /note="Nucleotide may be methylated to form 5-methylcytosine"
ggttttctgctcagaaagggatgacacactgggagagctagctaagggccccgacgaagacgaccctggggacacagccaatggcactgtacttaatacttgtgctgctggaacaggggact

SEQ ID NO: 4163 - DNA, 122 bp, Homo sapiens
  misc_feature (61)..(62): /note="This region represents a CpG dinucleotide"
  misc_feature (61)..(61): /note="Nucleotide may be methylated to form 5-methylcytosine"
accagttgcagactcattaccctgcattccagtttgtgctgatgaaaatcagtttcagtccgtggcctggaattcatgtacagcacttcctgtagcctcttatataaacacatcaaaaaaat

SEQ ID NO: 4164 - DNA, 122 bp, Homo sapiens
  misc_feature (61)..(62): /note="This region represents a CpG dinucleotide"
  misc_feature (61)..(61): /note="Nucleotide may be methylated to form 5-methylcytosine"
cctctagcttccttgacatcgcccctagtttcaggcacagcctctctcccagttacgaggcgagacaggattctgaagggggaaaggatatgtattctacacaacaggtcaacgccctctca

SEQ ID NO: 4165 - DNA, 122 bp, Homo sapiens
  misc_feature (61)..(62): /note="This region represents a CpG dinucleotide"
  misc_feature (61)..(61): /note="Nucleotide may be methylated to form 5-methylcytosine"
tttctttgaagaatgagcaccttcagcaatggaaacctgtttctgaagctgcttctgtggcgtttcacccatgaggacttaggactgagtagatccaatgagagggagtggatggcattgtt

SEQ ID NO: 4166 - DNA, 122 bp, Homo sapiens
  misc_feature (61)..(62): /note="This region represents a CpG dinucleotide"
  misc_feature (61)..(61): /note="Nucleotide may be methylated to form 5-methylcytosine"
gtagtgggactggatatagagaaggagatgctggtagaagccaataccagcaaccaggtgcgtcctgtaggcacattccaaagtgctccggctgtggatgtgctacagattgcgaaagggaa

SEQ ID NO: 4167 - DNA, 122 bp, Homo sapiens
  misc_feature (61)..(62): /note="This region represents a CpG dinucleotide"
  misc_feature (61)..(61): /note="Nucleotide may be methylated to form 5-methylcytosine"
gttccacatgactggggaggcatcacaatcatggtggaagacgaaggaacagcaaagttacgtcttacacagtgacagataagagagcttctgcaggagaatggctctttataaaaccatca

SEQ ID NO: 4168 - DNA, 122 bp, Homo sapiens
  misc_feature (61)..(62): /note="This region represents a CpG dinucleotide"
  misc_feature (61)..(61): /note="Nucleotide may be methylated to form 5-methylcytosine"
ctaggtcatcactgattccagattctccttattccagactccaccccctgcagtgttctacgtcttctgaaagggccggtgcagggcgcccatgacttgtcatttttcctaggtcagcacat

SEQ ID NO: 4169 - DNA, 122 bp, Homo sapiens
  misc_feature (61)..(62): /note="This region represents a CpG dinucleotide"
  misc_feature (61)..(61): /note="Nucleotide may be methylated to form 5-methylcytosine"
aaatttaagatgggaaataaaatcaaactaagggtatagtcaacacacaatcgcagctagcggtagcctacaagtgtgatcctgagcttctaaggagctggggaaaaaatgtgattaataag

SEQ ID NO: 4170 - DNA, 122 bp, Homo sapiens
  misc_feature (61)..(62): /note="This region represents a CpG dinucleotide"
  misc_feature (61)..(61): /note="Nucleotide may be methylated to form 5-methylcytosine"
aggccattatcattctattggaggcagtccatttgcatttctatggacaactgtcatttacggagttgcacaagagctcaaagacaataaaagacagagattctgggtgcggtggcttggtg

SEQ ID NO: 4171 - DNA, 122 bp, Homo sapiens
  misc_feature (61)..(62): /note="This region represents a CpG dinucleotide"
  misc_feature (61)..(61): /note="Nucleotide may be methylated to form 5-methylcytosine"
ggcaagccatccaacctctctgagcctcaatgtttctcagctgtcaaatggagaattcatcgtatcctcatggggttattgtcaggatgtgcgaaataggatggtgggttaaaagacgttgt

SEQ ID NO: 4172 - DNA, 122 bp, Homo sapiens
  misc_feature (61)..(62): /note="This region represents a CpG dinucleotide"
  misc_feature (61)..(61): /note="Nucleotide may be methylated to form 5-methylcytosine"
tctcctaactggaagtgacaaggcaggcagctctagcctcatgacaagcgtggtggctcacgcctgtaatcccagcactttgggaggccgaagcaggtggattacctgaggtcgggagttca

SEQ ID NO: 4173 - DNA, 122 bp, Homo sapiens
  misc_feature (61)..(62): /note="This region represents a CpG dinucleotide"
  misc_feature (61)..(61): /note="Nucleotide may be methylated to form 5-methylcytosine"
gtggagtcgggataagggctgtagccggtactgtctaagccacgtggggcacagtgagcacgtaaggctctgactcccagcaatgggcccagttccctgaaggcagcgctgcctttctcagc

SEQ ID NO: 4174 - DNA, 122 bp, Homo sapiens
  misc_feature (61)..(62): /note="This region represents a CpG dinucleotide"
  misc_feature (61)..(61): /note="Nucleotide may be methylated to form 5-methylcytosine"
cttggctcggagccactattgtctgtaaaaggtataactaccctgctgatgctgtacatacggatggcttgcttgctcccagagagagaacaaagccatgttgaaacttcttacaattcctc

SEQ ID NO: 4175 - DNA, 122 bp, Homo sapiens
  misc_feature (61)..(62): /note="This region represents a CpG dinucleotide"
  misc_feature (61)..(61): /note="Nucleotide may be methylated to form 5-methylcytosine"
aggggcacactcaaggcggggtaggcagctcacagacagcctttcttactgctgcctgggcgcctggaggctgggaggaaaatctatacgcagccatggaaggatgcaaggaggcgggtgga

SEQ ID NO: 4176 - DNA, 122 bp, Homo sapiens
  misc_feature (61)..(62): /note="This region represents a CpG dinucleotide"
  misc_feature (61)..(61): /note="Nucleotide may be methylated to form 5-methylcytosine"
tgtgtgtgtgtgtgtgtgtgtgtcagaggtcagccctgatgtaattgccaccgaggtcaccgtggatgaggtcattgtgggtgaggttacagtgcaagagctgtcttttggtgctgttctgg

SEQ ID NO: 4177 - DNA, 122 bp, Homo sapiens
  misc_feature (61)..(62): /note="This region represents a CpG dinucleotide"
  misc_feature (61)..(61): /note="Nucleotide may be methylated to form 5-methylcytosine"
tcctcctgccttggtcttccaaagtgttcagattacaggtatgagccactgtgcctggctcgttggttaagcaatttttatgggaatgatgtaatcgtcagcacttagcattgactagattt

SEQ ID NO: 4178 - DNA, 122 bp, Homo sapiens
  misc_feature (61)..(62): /note="This region represents a CpG dinucleotide"
  misc_feature (61)..(61): /note="Nucleotide may be methylated to form 5-methylcytosine"
tgtcatcttgttacattgaaagatacttattttattgtctcccatggccaagacacttttcgaggattagacacttatttcaaatatcccgggatgccatcaaaatataacattcactaagg

SEQ ID NO: 4179 - DNA, 122 bp, Homo sapiens
  misc_feature (61)..(62): /note="This region represents a CpG dinucleotide"
  misc_feature (61)..(61): /note="Nucleotide may be methylated to form 5-methylcytosine"
ttccagggtagacttgggatcagagcatacaggctgccaggatccaggcctcacagtgggcgtgggctgctggggaggcccaacccctggggctctatggatctgcctccatttccccaaag

SEQ ID NO: 4180 - DNA, 122 bp, Homo sapiens
  misc_feature (61)..(62): /note="This region represents a CpG dinucleotide"
  misc_feature (61)..(61): /note="Nucleotide may be methylated to form 5-methylcytosine"
gttgggagaggaaggctaagatggcctgaggtttcctggaatttgcgtgacctccagtggcgttcagtattttgtgtcttacctgttggtttctgcagactgtgtggcctcagcaacagagg

SEQ ID NO: 4181 - DNA, 122 bp, Homo sapiens
  misc_feature (61)..(62): /note="This region represents a CpG dinucleotide"
  misc_feature (61)..(61): /note="Nucleotide may be methylated to form 5-methylcytosine"
gaaccgagcctcagaatctactcaccccagccagtcaccaccgatttggccaactgggcacgcaggtggaaacctacctgttggcctgtctggcgctaccacccacagacccatgctggtgg

SEQ ID NO: 4182 - DNA, 122 bp, Homo sapiens
  misc_feature (61)..(62): /note="This region represents a CpG dinucleotide"
  misc_feature (61)..(61): /note="Nucleotide may be methylated to form 5-methylcytosine"
tagagatgtctgtgtcacgtacccaagagctgaagtcagacttcagaaaatgctccttgacgctctactcttctgagtaacagaactgtggggaagggaatcctagctccctctgtagtgaa

SEQ ID NO: 4183 - DNA, 122 bp, Homo sapiens
  misc_feature (61)..(62): /note="This region represents a CpG dinucleotide"
  misc_feature (61)..(61): /note="Nucleotide may be methylated to form 5-methylcytosine"
tgcaggagagaaaaaaaccaaactgtagaaaaaagcagaatcgtggtgtcactgagtgaacgtatgtatccagccctgcagatgcctgagatccaccctcaggctgtaccttttccactgaa

SEQ ID NO: 4184 - DNA, 122 bp, Homo sapiens
  misc_feature (61)..(62): /note="This region represents a CpG dinucleotide"
  misc_feature (61)..(61): /note="Nucleotide may be methylated to form 5-methylcytosine"
ccattgctcttacataatcaaagtgctcaggctctcgctgatgaatccagagactaaccacgtaatctagaagaaattcatctttgtccccaaggctcccagcatttggcaattattgaaca

SEQ ID NO: 4185 - DNA, 122 bp, Homo sapiens
  misc_feature (61)..(62): /note="This region represents a CpG dinucleotide"
  misc_feature (61)..(61): /note="Nucleotide may be methylated to form 5-methylcytosine"
aggtatccctcagtgttcttctatttataaggaacagaaaacccaacttaaattgacttacgtaaaaagagtttgttggttggtgtaattgaaaagtacatggttaactagcttcaggcata

SEQ ID NO: 4186 - DNA, 122 bp, Homo sapiens
  misc_feature (61)..(62): /note="This region represents a CpG dinucleotide"
  misc_feature (61)..(61): /note="Nucleotide may be methylated to form 5-methylcytosine"
ggaggtggggaggactgcttgagactaggactcaagcaatcaacactgtctcgggctgggcgcggtggctcacgcctgtcatcccagccctttgggaggccgaggcgggcggatcacctgag

SEQ ID NO: 4187 - DNA, 122 bp, Homo sapiens
  misc_feature (61)..(62): /note="This region represents a CpG dinucleotide"
  misc_feature (61)..(61): /note="Nucleotide may be methylated to form 5-methylcytosine"
cagatgctggatgctgacgttgcactgcctctgagctgggctggctgacccgcacttgcacgccccggagagtgagcactccctgcaattctgcactccgtgtgcctcatttgccccaccct

SEQ ID NO: 4188 - DNA, 122 bp, Homo sapiens
  misc_feature (61)..(62): /note="This region represents a CpG dinucleotide"
  misc_feature (61)..(61): /note="Nucleotide may be methylated to form 5-methylcytosine"
gcagcatccctcatgctaaatggtgacacttctcagtgacaatcagcctgaaggaggtgacgcccagcttgccggccgtgggtgtgcccctaggctgtgccacgaggcaccctgaaaagcag

SEQ ID NO: 4189 - DNA, 122 bp, Homo sapiens
  misc_feature (61)..(62): /note="This region represents a CpG dinucleotide"
  misc_feature (61)..(61): /note="Nucleotide may be methylated to form 5-methylcytosine"
atcctgggtactaatgctgaaaatgcatatattccaaggaatggtagccatcatatcccccgtatgagacagaacgattgaaccagatcctacacagcttgcctcaaatccctgggcaagac

SEQ ID NO: 4190 - DNA, 122 bp, Homo sapiens
  misc_feature (61)..(62): /note="This region represents a CpG dinucleotide"
  misc_feature (61)..(61): /note="Nucleotide may be methylated to form 5-methylcytosine"
tcagcaaaattagaccccctggtttcccaagagatgtcatttttaactcttttctacaggcgcctggagcacagggcttcccagaagtctgattcaatgctattttgagctgggttagattg

SEQ ID NO: 4191 - DNA, 122 bp, Homo sapiens
  misc_feature (61)..(62): /note="This region represents a CpG dinucleotide"
  misc_feature (61)..(61): /note="Nucleotide may be methylated to form 5-methylcytosine"
agaggcagagccgcacagcagggagaggctgtggctctggagctgagcctcctgggtttacgtcccaccctgctgctgttggcttgatgacctgggcgaatcatctacctctctgggcttca

SEQ ID NO: 4192 - DNA, 122 bp, Homo sapiens
  misc_feature (61)..(62): /note="This region represents a CpG dinucleotide"
  misc_feature (61)..(61): /note="Nucleotide may be methylated to form 5-methylcytosine"
tgggattacaggtgtgagccaccgcacccagccttaataaggacttatgaacagaagccacgtctccagccatggtggatcccagcaccatcccccagagccagggattacatacagtaggg

SEQ ID NO: 4193 - DNA, 122 bp, Homo sapiens
  misc_feature (61)..(62): /note="This region represents a CpG dinucleotide"
  misc_feature (61)..(61): /note="Nucleotide may be methylated to form 5-methylcytosine"
aatatggcaggagttccttcttttcctggctcagtgatgtgccaccatgtggatggacgacgttgtgttgatccgggcacccgccgatgtctctgccttcaggctgttgtgggttgcgccgc

SEQ ID NO: 4194 - DNA, 122 bp, Homo sapiens
  misc_feature (61)..(62): /note="This region represents a CpG dinucleotide"
  misc_feature (61)..(61): /note="Nucleotide may be methylated to form 5-methylcytosine"
aggctgaggcaggagaatcacatgaacccgggaggtggaggttgcagtgagctgagactgcgcaactgcactccagccagggcgacaaagcgtgactgtttcaaaaaaaaaaaaaaaagtta

SEQ ID NO: 4195 - DNA, 122 bp, Homo sapiens
  misc_feature (61)..(62): /note="This region represents a CpG dinucleotide"
  misc_feature (61)..(61): /note="Nucleotide may be methylated to form 5-methylcytosine"
tgtcatttcaatagatcaccttgatgccaaaaaggcgggggagctctccaccctgtttgacgtgggcggaatctttggtgagttcattaagacttgttctgctgcaacaataatttcgcaag

SEQ ID NO: 4196 - DNA, 122 bp, Homo sapiens
  misc_feature (61)..(62): /note="This region represents a CpG dinucleotide"
  misc_feature (61)..(61): /note="Nucleotide may be methylated to form 5-methylcytosine"
taagcacatatgtgctctgccacattgcaatattgtggactcattcacagtggaaaccaccggcagaccatctccctagagatctcacagagtattgctcattctgggattaactgaccatg

SEQ ID NO: 4197 - DNA, 122 bp, Homo sapiens
  misc_feature (61)..(62): /note="This region represents a CpG dinucleotide"
  misc_feature (61)..(61): /note="Nucleotide may be methylated to form 5-methylcytosine"
gggttgaggggtgggtgtctgttgctcactcacagtgaagcaatgactgcagggcatgttcgcaggaggcctctagcaagtttctcaatgggcccctgcagtacttccttctccaggcagct

SEQ ID NO: 4198 - DNA, 122 bp, Homo sapiens
  misc_feature (61)..(62): /note="This region represents a CpG dinucleotide"
  misc_feature (61)..(61): /note="Nucleotide may be methylated to form 5-methylcytosine"
cctcccctagtctgggattggaagagactttcttaaggaggtggctttgcagctgagacgcgaaggagaagttccagttaaccaggtaaagagacgagagaatgtatcaggcagtgggaact

SEQ ID NO: 4199 - DNA, 122 bp, Homo sapiens
  misc_feature (61)..(62): /note="This region represents a CpG dinucleotide"
  misc_feature (61)..(61): /note="Nucleotide may be methylated to form 5-methylcytosine"
ggccccatgagatcagagagggtggggagtatctggaggattttgcatccatagtgaggacgaagctgagataagcagagtttaataaacagccgctgtctttactaccactactcatttct

SEQ ID NO: 4200 - DNA, 122 bp, Homo sapiens
  misc_feature (61)..(62): /note="This region represents a CpG dinucleotide"
  misc_feature (61)..(61): /note="Nucleotide may be methylated to form 5-methylcytosine"
acttccaccaaatgctgtgttttgttattgttgccattattctattcatcattcattcaacgcttctgagtatcctcagtgattcacttggcattgtgctagggactcactccacaccctta

SEQ ID NO: 4201 - DNA, 122 bp, Homo sapiens
  misc_feature (61)..(62): /note="This region represents a CpG dinucleotide"
  misc_feature (61)..(61): /note="Nucleotide may be methylated to form 5-methylcytosine"
attcctgcgtcaaaaatccagcttgtgggctgaaacctctcaatcctgacaaataagtctcgcaactacatctgagataattacatttagtggcaattcctgctaggcaattaattgcttga

SEQ ID NO: 4202 - DNA, 122 bp, Homo sapiens
  misc_feature (61)..(62): /note="This region represents a CpG dinucleotide"
  misc_feature (61)..(61): /note="Nucleotide may be methylated to form 5-methylcytosine"
agcggtgtcggggccagatgcccccccacacccactgcatgtagctgaagagcacgatgacgctgaggaaggtgaagttgctggcaacacctatgaaggcgcaggtcatcgggaagttgtat

SEQ ID NO: 4203 - DNA, 122 bp, Homo sapiens
  misc_feature (61)..(62): /note="This region represents a CpG dinucleotide"
  misc_feature (61)..(61): /note="Nucleotide may be methylated to form 5-methylcytosine"
tgtagccctttctctgcaactgtgcttggagtttggatttcattttagtctcaccgtctccgtttttctctgactgcccagaactccagaaatcaggagacggagacattttgtcagttttg

SEQ ID NO: 4204 - DNA, 122 bp, Homo sapiens
  misc_feature (61)..(62): /note="This region represents a CpG dinucleotide"
  misc_feature (61)..(61): /note="Nucleotide may be methylated to form 5-methylcytosine"
gaagcagcctgaggctgtcaccagatgcccagtcttgaatcttacagctcatagcagagccgtgagctaaataaaccttttttcttcataaattgcccagcctcaagtattcttttatagca

SEQ ID NO: 4205 - DNA, 122 bp, Homo sapiens
  misc_feature (61)..(62): /note="This region represents a CpG dinucleotide"
  misc_feature (61)..(61): /note="Nucleotide may be methylated to form 5-methylcytosine"
tgtcagaggctgtctgaccacgcgtgaggctcgttgatggtgataggtttctatgtgtgacgctaaaacgccaggaaagaaaaggatagaaactgctaaacatgagtggaaatgagtgaaat

SEQ ID NO: 4206 - DNA, 122 bp, Homo sapiens
  misc_feature (61)..(62): /note="This region represents a CpG dinucleotide"
  misc_feature (61)..(61): /note="Nucleotide may be methylated to form 5-methylcytosine"
gtcttttcagccctgtgcactgtaacaccctgccacaccatattgcaacatcctgtggaacggcagcatattctgagaacctcaggccagaatctggtttgctgctgtcagagcttggctat

SEQ ID NO: 4207 - DNA, 122 bp, Homo sapiens
  misc_feature (61)..(62): /note="This region represents a CpG dinucleotide"
  misc_feature (61)..(61): /note="Nucleotide may be methylated to form 5-methylcytosine"
aaaataagtgcctcccacacaccctccctcccacctccagagtccccacattcccaggagcgggctggtctcattccatgatcctgcagggcctgctgggcgtgacatcaccagtcaccatg

SEQ ID NO: 4208 - DNA, 122 bp, Homo sapiens
  misc_feature (61)..(62): /note="This region represents a CpG dinucleotide"
  misc_feature (61)..(61): /note="Nucleotide may be methylated to form 5-methylcytosine"
tgaggcagaagtgctcagtcagaactgatgagtccagatgagaagcttgacttttaaccccggccctcggggctgcaccctaccctctgggaaacaattccagccagaagagtttacactca

SEQ ID NO: 4209 - DNA, 122 bp, Homo sapiens
  misc_feature (61)..(62): /note="This region represents a CpG dinucleotide"
  misc_feature (61)..(61): /note="Nucleotide may be methylated to form 5-methylcytosine"
tcatataagcaaaattgaaacagcctgaggacattactgaggacaaactgtactggttgacgcacaggttctgagctatcgttaaatggtgagaagcaattttaaagccctcttataaagtc

SEQ ID NO: 4210 - DNA, 122 bp, Homo sapiens
  misc_feature (61)..(62): /note="This region represents a CpG dinucleotide"
  misc_feature (61)..(61): /note="Nucleotide may be methylated to form 5-methylcytosine"
tttatctacacacataggccccagatttagcccagtttgctgatccctggctgtatatgacgtgagaatttggatcagtgaatttattatttctacctaaataagttggggaactaaatgtt

SEQ ID NO: 4211 - DNA, 122 bp, Homo sapiens
  misc_feature (61)..(62): /note="This region represents a CpG dinucleotide"
  misc_feature (61)..(61): /note="Nucleotide may be methylated to form 5-methylcytosine"
cgtagcccatagtcaactatagaatcagttggaatcaataacacctctggcttagcatcccgaaggctcacatcagacctttaaaaaacatattttgagaaagtagcctcatcggtcctaag

SEQ ID NO: 4212 - DNA, 122 bp, Homo sapiens
  misc_feature (61)..(62): /note="This region represents a CpG dinucleotide"
  misc_feature (61)..(61): /note="Nucleotide may be methylated to form 5-methylcytosine"
ggctgaggtaaacattcttcatgactcagtgggattggagctcagttgcataattccatgcgttatgtaatcacagctacataaccataacatgggaggctcatcatctggctccaagccac

SEQ ID NO: 4213 - DNA, 122 bp, Homo sapiens
  misc_feature (61)..(62): /note="This region represents a CpG dinucleotide"
  misc_feature (61)..(61): /note="Nucleotide may be methylated to form 5-methylcytosine"
ggttcgaactcaacctcttcattcttggcttgttataagacaccatggcaacagagaatacgtaggacatgtttctgccctcagggaggttgcagagggtggaggagacaaaacatccacag

SEQ ID NO: 4214 - DNA, 122 bp, Homo sapiens
  misc_feature (61)..(62): /note="This region represents a CpG dinucleotide"
  misc_feature (61)..(61): /note="Nucleotide may be methylated to form 5-methylcytosine"
ctaagagccaagaggcgctggggacctgtaagtacttgctaatgagggcttgttagtgtacgttcttcctgaatactgatggaagccccaagaataatggggctgtcctggaaggaccctac

SEQ ID NO: 4215 - DNA, 122 bp, Homo sapiens
  misc_feature (61)..(62): /note="This region represents a CpG dinucleotide"
  misc_feature (61)..(61): /note="Nucleotide may be methylated to form 5-methylcytosine"
attaggtcatagtagtcacatgaactgaaatgtcaccagttgttacaacaccaaacccaacgccacatgtagactgatgttagagaacacagaacatgagtaagcaggggttctgagataga

SEQ ID NO: 4216 - DNA, 122 bp, Homo sapiens
  misc_feature (61)..(62): /note="This region represents a CpG dinucleotide"
  misc_feature (61)..(61): /note="Nucleotide may be methylated to form 5-methylcytosine"
accacccaccagaagagcatccaaagataataatctatgagaaaggagaccacaaaaatgcggatactgaatttctggcaggaccttggagcttatgtttaaagaagtgattgtcccttaga

SEQ ID NO: 4217 - DNA, 122 bp, Homo sapiens
  misc_feature (61)..(62): /note="This region represents a CpG dinucleotide"
  misc_feature (61)..(61): /note="Nucleotide may be methylated to form 5-methylcytosine"
tttgagtaatgccttaaaccatgagacaagtcaccagggagcaaacctgtttgtcagttacgggtactgtgtaatccaatactctaattaaaaacgtaagagaaagagaaggtaccaggaaa

SEQ ID NO: 4218 - DNA, 122 bp, Homo sapiens
  misc_feature (61)..(62): /note="This region represents a CpG dinucleotide"
  misc_feature (61)..(61): /note="Nucleotide may be methylated to form 5-methylcytosine"
ttctaactcacagatgggaaaacaaagtgtcgatgaggttgactaacttgcgtaagagtgcgtggttagtaagtgacagctgggattttaaactagattgtctgagtctgtgctcttaatcc

SEQ ID NO: 4219 - DNA, 122 bp, Homo sapiens
  misc_feature (61)..(62): /note="This region represents a CpG dinucleotide"
  misc_feature (61)..(61): /note="Nucleotide may be methylated to form 5-methylcytosine"
gtgaggcctacttcatctagtggttgaaacacaggtctagatttggtttcctggagtccacgtcacacccaagctgagcgagataatcacagaaacttgtcagtgttctttctcttctagca

SEQ ID NO: 4220 - DNA, 122 bp, Homo sapiens
  misc_feature (61)..(62): /note="This region represents a CpG dinucleotide"
  misc_feature (61)..(61): /note="Nucleotide may be methylated to form 5-methylcytosine"
ccttgagaaaaacacaggagggattgggaggatgtagaaattcctatttgtaagggtttgcgatctgggtatatgtccactgagccgtgaacttactgtctcgagttctgtattctagttgg

SEQ ID NO: 4221 - DNA, 122 bp, Homo sapiens
  misc_feature (61)..(62): /note="This region represents a CpG dinucleotide"
  misc_feature (61)..(61): /note="Nucleotide may be methylated to form 5-methylcytosine"
aatgtaataaataataaatgtaaaaacaatattatatatatttgagatgctaggtcaccacggaatgaggtgacaacatggtatagaagacaacatagtttatagtttcgtaatacttgttt

SEQ ID NO: 4222 - DNA, 122 bp, Homo sapiens
  misc_feature (61)..(62): /note="This region represents a CpG dinucleotide"
  misc_feature (61)..(61): /note="Nucleotide may be methylated to form 5-methylcytosine"
ctcttcctgtcccctctttgctgatctggactcagcctggtattcttgtcacaaggtcatcgcctaggtgagctcagctcagcgtgaaacaaaacagctcatctgaaggcaccacacagtcc

SEQ ID NO: 4223 - DNA, 122 bp, Homo sapiens
  misc_feature (61)..(62): /note="This region represents a CpG dinucleotide"
  misc_feature (61)..(61): /note="Nucleotide may be methylated to form 5-methylcytosine"
ttctaaggtgtgtcaccatctcttgacatttgacctgtgaaagcattagttccctgacagcgtatgactgtactctagaaaggtgttgtctgaatttttacttcccaatcagtattctcact

SEQ ID NO: 4224 - DNA, 122 bp, Homo sapiens
  misc_feature (61)..(62): /note="This region represents a CpG dinucleotide"
  misc_feature (61)..(61): /note="Nucleotide may be methylated to form 5-methylcytosine"
ccccaggccattttatatcatttgtcatacgttaaccttcttactgctttccatcccacacgtgcttgctcatcatggccaccaggctctgcttgtttcctaatcttttatttttttgagat

SEQ ID NO: 4225 - DNA, 122 bp, Homo sapiens
  misc_feature (61)..(62): /note="This region represents a CpG dinucleotide"
  misc_feature (61)..(61): /note="Nucleotide may be methylated to form 5-methylcytosine"
acaaatgagaccatacaatatgtggcttccttttgtatgtgtctggcttctttcacttagcggattgtttctgaggttcatatgttgtagcatgtgtcagcacttcattcctttttattgcc

SEQ ID NO: 4226 - DNA, 122 bp, Homo sapiens
  misc_feature (61)..(62): /note="This region represents a CpG dinucleotide"
  misc_feature (61)..(61): /note="Nucleotide may be methylated to form 5-methylcytosine"
agcatgggtagcctgagaaagcttccaccttttgatgacagggcccaaccccagacttcacggcctgtcactctttgaggactctatagagggctccataagaaccagggctgctgagtgag

SEQ ID NO: 4227 - DNA, 122 bp, Homo sapiens
  misc_feature (61)..(62): /note="This region represents a CpG dinucleotide"
  misc_feature (61)..(61): /note="Nucleotide may be methylated to form 5-methylcytosine"
aatctattaggcaatttctgcagtgggaggagaacacaaatactgctattctagttcttccgcttcctggtggctggtgatcccaggctatgattccagaaggcccaagcttctgcacacct

SEQ ID NO: 4228 - DNA, 122 bp, Homo sapiens
  misc_feature (61)..(62): /note="This region represents a CpG dinucleotide"
  misc_feature (61)..(61): /note="Nucleotide may be methylated to form 5-methylcytosine"
tttggttttctaatgcctgtaaattagagcttctgagccatgtggggagcaacccctacccgcaaaggagtgatgtaatgtctgggggctgcaatggttttttcctttgagatggataccat

SEQ ID NO: 4229 - DNA, 122 bp, Homo sapiens
  misc_feature (61)..(62): /note="This region represents a CpG dinucleotide"
  misc_feature (61)..(61): /note="Nucleotide may be methylated to form 5-methylcytosine"
ttcagccttgagaagctttctcagcatgagtagtgttgtggtaaagagcttgaatgctgacgtcagactaattagtttctaatcttggctttgcaacagattagccatgtgatttggtggca

SEQ ID NO: 4230 - DNA, 122 bp, Homo sapiens
  misc_feature (61)..(62): /note="This region represents a CpG dinucleotide"
  misc_feature (61)..(61): /note="Nucleotide may be methylated to form 5-methylcytosine"
tgtagcaataagtaatagtatttcgtaataagtagtaagtaattgctacttgccagacaccgttctgagggcttcttgtatgttaactcatttaatcttcacaacaaccttttaaggaaggt

SEQ ID NO: 4231 - DNA, 122 bp, Homo sapiens
  misc_feature (61)..(62): /note="This region represents a CpG dinucleotide"
  misc_feature (61)..(61): /note="Nucleotide may be methylated to form 5-methylcytosine"
atcaataatgagtagcgactgttattatccccattttacagatatgaaactgaggtatgacgtaattacttaacttgcttgaggtcacacaggttgtaatggaagagcgaggatttatacca

SEQ ID NO: 4232 - DNA, 122 bp, Homo sapiens
  misc_feature (61)..(62): /note="This region represents a CpG dinucleotide"
  misc_feature (61)..(61): /note="Nucleotide may be methylated to form 5-methylcytosine"
tcataattcagatgtcacctcctcagagaggtcttccctgactgctctagctaaaattaccgcctctcctccactccccaacagcagatacatatattatttttctccctgtaactctaact

SEQ ID NO: 4233 - DNA, 122 bp, Homo sapiens
  misc_feature (61)..(62): /note="This region represents a CpG dinucleotide"
  misc_feature (61)..(61): /note="Nucleotide may be methylated to form 5-methylcytosine"
gactcaactggaaggaagtgctgctgccagtgtgaagaagccagcctgaggtgacagaaacggaagcaaacaggaagcagccagtcttttcttcctcctcctgtcatacggtctctctcaag

SEQ ID NO: 4234 - DNA, 122 bp, Homo sapiens
  misc_feature (61)..(62): /note="This region represents a CpG dinucleotide"
  misc_feature (61)..(61): /note="Nucleotide may be methylated to form 5-methylcytosine"
ctaacattgttctaacattgttcattccttctaacattcccttccgctttgaggttgatacgaagatctatgatttaacgtttgtcaaatactctaggcttctcagatgaaagacaacatta

SEQ ID NO: 4235 - DNA, 122 bp, Homo sapiens
  misc_feature (61)..(62): /note="This region represents a CpG dinucleotide"
  misc_feature (61)..(61): /note="Nucleotide may be methylated to form 5-methylcytosine"
ctaccagatgacaaaacactattaccaaacagctgggtgaccttaggaaaatcactcaaccgctcctgcctacggatttcctcatctgcggggccctgcagagctgttgcaaggatgaaatg

SEQ ID NO: 4236 - DNA, 122 bp, Homo sapiens
  misc_feature (61)..(62): /note="This region represents a CpG dinucleotide"
  misc_feature (61)..(61): /note="Nucleotide may be methylated to form 5-methylcytosine"
gaaataaagtgttgggaaggatgactgggagagaattactatagggttttcctgtgcctccggctgggaaagccccttaggcttagctttctgtgccatcacaacctttttcttcctccagt

SEQ ID NO: 4237 - DNA, 122 bp, Homo sapiens
  misc_feature (61)..(62): /note="This region represents a CpG dinucleotide"
  misc_feature (61)..(61): /note="Nucleotide may be methylated to form 5-methylcytosine"
ctgcactaggggctcatccctcacttgcaggatgggcgtgcagaggagctgggcagaaatcggtatttctaatgcccagtcactgggtcaacaaaggaaaacaacccaacccaaccatgagt

SEQ ID NO: 4238 - DNA, 122 bp, Homo sapiens
  misc_feature (61)..(62): /note="This region represents a CpG dinucleotide"
  misc_feature (61)..(61): /note="Nucleotide may be methylated to form 5-methylcytosine"
tcttccttgttttggtggcaggcaagtgtctgtggtcaggagccatggagactcgtgccacggactgcgaagccacccagccatctggcccaagctcctgtgaccggaagagcttgttttgc

SEQ ID NO: 4239 - DNA, 122 bp, Homo sapiens
  misc_feature (61)..(62): /note="This region represents a CpG dinucleotide"
  misc_feature (61)..(61): /note="Nucleotide may be methylated to form 5-methylcytosine"
cctccctaccctgcttttgttctccatagcagttatcatcatgggacctactgtcagaggcgtttgaaccagagtgactccatcttgaacaggagctggggagaatgaggctgagacctgct

SEQ ID NO: 4240 - DNA, 122 bp, Homo sapiens
  misc_feature (61)..(62): /note="This region represents a CpG dinucleotide"
  misc_feature (61)..(61): /note="Nucleotide may be methylated to form 5-methylcytosine"
tgagtgagagcatacgacgtttggtttttccattcctgagttacttcacttagaataatacggaactagactgattttaaaagccgagcagaacaagtcacaccctactataaactctaaga

SEQ ID NO: 4241 - DNA, 122 bp, Homo sapiens
  misc_feature (61)..(62): /note="This region represents a CpG dinucleotide"
  misc_feature (61)..(61): /note="Nucleotide may be methylated to form 5-methylcytosine"
gaatactcctcagggcaggttgcaactagattgtgaagtgagtgatgcaactggctctttcgccactcatgcttatcattcagtgccccatcctcacccttggctgtcacacactggagcct

SEQ ID NO: 4242 - DNA, 122 bp, Homo sapiens
  misc_feature (61)..(62): /note="This region represents a CpG dinucleotide"
  misc_feature (61)..(61): /note="Nucleotide may be methylated to form 5-methylcytosine"
ggtagagtctaagttgtttccggtctgagccttcaagttgctgggctgtccttggcgtggcgagtcccaggagaaccagtgagacaagactggtggttctcaaagactcatatgtcccttac

SEQ ID NO: 4243 - DNA, 122 bp, Homo sapiens
  misc_feature (61)..(62): /note="This region represents a CpG dinucleotide"
  misc_feature (61)..(61): /note="Nucleotide may be methylated to form 5-methylcytosine"
aaccctgggatccatgatcccacacccagggccatggtgagggtgcaccaagtgttaccacggtcagagaatacagaataaaagagtcttcagccctgggaggttagggaaggatggaagaa

SEQ ID NO: 4244 - DNA, 122 bp, Homo sapiens
  misc_feature (61)..(62): /note="This region represents a CpG dinucleotide"
  misc_feature (61)..(61): /note="Nucleotide may be methylated to form 5-methylcytosine"
aagtgctgggattacaggcatgagtcaccacgcccggccctagattgtttaagtctttaacgaaatcccatttcttctcattccttagtcctttcccagccgtagcaaaaacaaacaaaaaa

SEQ ID NO: 4245 - DNA, 122 bp, Homo sapiens
  misc_feature (61)..(62): /note="This region represents a CpG dinucleotide"
  misc_feature (61)..(61): /note="Nucleotide may be methylated to form 5-methylcytosine"
tgcgccccgagggtctgttccgcttatggcgcccgccgggagtctccctttcttcgcaagcgttaacctgcgttttactcgtaaaaatttgctttctaggcttcgtataattgttctggtct

SEQ ID NO: 4246 - DNA, 122 bp, Homo sapiens
  misc_feature (61)..(62): /note="This region represents a CpG dinucleotide"
  misc_feature (61)..(61): /note="Nucleotide may be methylated to form 5-methylcytosine"
ctagtatagttgctgctttggcatccattttgggcctgcggtaagttattgaaacccagtcgtaccctatcacctttggtctagttaaaatgttccctccctgtgtggttgtttgtgaaaca

SEQ ID NO: 4247 - DNA, 122 bp, Homo sapiens
  misc_feature (61)..(62): /note="This region represents a CpG dinucleotide"
  misc_feature (61)..(61): /note="Nucleotide may be methylated to form 5-methylcytosine"
gctgagagtgataagaagataacagcaagacagacagagtgagagcgacaggctgacttacgtaacctggtggaaagtgatacaggcagattcgctgatgggaaacaaacagaaagggagtc

SEQ ID NO: 4248 - DNA, 122 bp, Homo sapiens
  misc_feature (61)..(62): /note="This region represents a CpG dinucleotide"
  misc_feature (61)..(61): /note="Nucleotide may be methylated to form 5-methylcytosine"
aacaattgactggattagtggatgctgaaagcattcagcaaatggcaccctaaaatatgccgctggtttgccactgacttcaaaatgaggtcacttgggcacagcacatgcagggaggggct

SEQ ID NO: 4249 - DNA, 122 bp, Homo sapiens
  misc_feature (61)..(62): /note="This region represents a CpG dinucleotide"
  misc_feature (61)..(61): /note="Nucleotide may be methylated to form 5-methylcytosine"
ataaatgcttaccatcaagcaagcaaacaaatgaatacatgtagtagactatatatgaaacgagaggtagtgagaaattgaagtaaagacaaagatatgacactaagaatcacaaaagaatc

SEQ ID NO: 4250 - DNA, 122 bp, Homo sapiens
  misc_feature (61)..(62): /note="This region represents a CpG dinucleotide"
  misc_feature (61)..(61): /note="Nucleotide may be methylated to form 5-methylcytosine"
gcaacaaactatcagtcatgctaaagagcagaacaaaggaaatgtatattaaactatcagcgctgcaaacataggaaggtaccaggagaagattaaagacattgtattattcatccttgcag

SEQ ID NO: 4251 - DNA, 122 bp, Homo sapiens
  misc_feature (61)..(62): /note="This region represents a CpG dinucleotide"
  misc_feature (61)..(61): /note="Nucleotide may be methylated to form 5-methylcytosine"
caagtcttcttagagctggggccaagtgacttctccttgactcctctgagcaaagcccagcgccagccacagcacaggaacctgggcaggcagtccaccctcagggcctgcctgtgaccact

SEQ ID NO: 4252 - DNA, 122 bp, Homo sapiens
  misc_feature (61)..(62): /note="This region represents a CpG dinucleotide"
  misc_feature (61)..(61): /note="Nucleotide may be methylated to form 5-methylcytosine"
ccctgtctttgataggaaacaccagatgcaacaattagctctgctgtcatctaggaatatcgtagccattgttgttgctgctgtaagctagaaatactgctgctgccatggcagaactgtga

SEQ ID NO: 4253 - DNA, 122 bp, Homo sapiens
  misc_feature (61)..(62): /note="This region represents a CpG dinucleotide"
  misc_feature (61)..(61): /note="Nucleotide may be methylated to form 5-methylcytosine"
gattaggaaatggaggcacggagggattaaatgcttagtcagggtcacactactaatgagcggcagagccaggatgttgactcagatggtcagactccaaaccttgagttcctaatcactat

SEQ ID NO: 4254 - DNA, 122 bp, Homo sapiens
  misc_feature (61)..(62): /note="This region represents a CpG dinucleotide"
  misc_feature (61)..(61): /note="Nucleotide may be methylated to form 5-methylcytosine"
gctttggtagtttttccacattgctctcaaattttcatatattttgcttatttactggcccgtgtgtgacagtagtcacacaaatagtacctattattgtctaacttggggatgccatgggg

SEQ ID NO: 4255 - DNA, 122 bp, Homo sapiens
  misc_feature (61)..(62): /note="This region represents a CpG dinucleotide"
  misc_feature (61)..(61): /note="Nucleotide may be methylated to form 5-methylcytosine"
tgaacttttataatcagtttaaattactgggtttcacagcaaccagttatcctaaaatggcggccacacctatcatgaaagagctatgggcttaaggacttaccgatgtgcggctgatgagc

SEQ ID NO: 4256 - DNA, 122 bp, Homo sapiens
  misc_feature (61)..(62): /note="This region represents a CpG dinucleotide"
  misc_feature (61)..(61): /note="Nucleotide may be methylated to form 5-methylcytosine"
tagtgatcatgacttattttaggttccttacttgtagaccaatgctgtcactcagctctacgttgagtaatatgtgtatcattcactgcatttattaataagctcctatttacctcacagta

SEQ ID NO: 4257 - DNA, 122 bp, Homo sapiens
  misc_feature (61)..(62): /note="This region represents a CpG dinucleotide"
  misc_feature (61)..(61): /note="Nucleotide may be methylated to form 5-methylcytosine"
ttaaatgctttgctcctgaccttctgtgattaaaatctgttccgtttgcagggttcggtgcgcttggatttagtgtattttgttggtacagtaaaaaagagaactgcttctctataggtgac

SEQ ID NO: 4258 - DNA, 122 bp, Homo sapiens
  misc_feature (61)..(62): /note="This region represents a CpG dinucleotide"
  misc_feature (61)..(61): /note="Nucleotide may be methylated to form 5-methylcytosine"
ggcagtctcagtctattaaaacaattcatgcccaatcgtatcctacaaaccagaggaaggcgtctcacctgccagcggtggcaccatttcttccacggttgagttatgtggtgtgagcaacc

SEQ ID NO: 4259 - DNA, 122 bp, Homo sapiens
  misc_feature (61)..(62): /note="This region represents a CpG dinucleotide"
  misc_feature (61)..(61): /note="Nucleotide may be methylated to form 5-methylcytosine"
aacacccaacctctgatcaggtggctcttcttgttatgtttggggcctcttactcattcccgggcagtgttcctcggcaatatgcctgtgacaagcgtttgctgtatttgttgttcgactta

SEQ ID NO: 4260 - DNA, 122 bp, Homo sapiens
  misc_feature (61)..(62): /note="This region represents a CpG dinucleotide"
  misc_feature (61)..(61): /note="Nucleotide may be methylated to form 5-methylcytosine"
ttaaaatgaaatcatcctggattatctgggtgggcccaatataatcataagggtcctttacgtgtggaagagggaggcagtgttcagattcaaagatctgaagatgttacactgctgccttt

SEQ ID NO: 4261 - DNA, 122 bp, Homo sapiens
  misc_feature (61)..(62): /note="This region represents a CpG dinucleotide"
  misc_feature (61)..(61): /note="Nucleotide may be methylated to form 5-methylcytosine"
gataggctttctaaaaagaattatttttatttgggaataaagcattgcaatgggaatatgcgtgccaaggtaaactatgtgcttattcaggtaggtaaagtaagacaaagtttaaaaaaata

SEQ ID NO: 4262 - DNA, 122 bp, Homo sapiens
  misc_feature (61)..(62): /note="This region represents a CpG dinucleotide"
  misc_feature (61)..(61): /note="Nucleotide may be methylated to form 5-methylcytosine"
tgaccgaaccaactgtggggctggctgggccctgggtggagggaagagagaggagctgatcgggtttcccagctttgaagtaaagaatgagccagaatgaagaagctcctgatcaaaggctg

SEQ ID NO: 4263 - DNA, 122 bp, Homo sapiens
  misc_feature (61)..(62): /note="This region represents a CpG dinucleotide"
  misc_feature (61)..(61): /note="Nucleotide may be methylated to form 5-methylcytosine"
ggccttcaggagcacgagggttttattgaacttatgggctggggtgcccagatggctccacgagcacccacgctccactgttagttctgtttgttctgggcttacaagtgttgcaacacctg

SEQ ID NO: 4264 - DNA, 122 bp, Homo sapiens
  misc_feature (61)..(62): /note="This region represents a CpG dinucleotide"
  misc_feature (61)..(61): /note="Nucleotide may be methylated to form 5-methylcytosine"
gtgtgcagagggccctagagctgagaggccgcggacggagtaacagctggattctgaggacgtggaagaggccacaccacgcagcagaaggaaggaggaagtgtacccggagctgaaaccag

SEQ ID NO: 4265 - DNA, 122 bp, Homo sapiens
  misc_feature (61)..(62): /note="This region represents a CpG dinucleotide"
  misc_feature (61)..(61): /note="Nucleotide may be methylated to form 5-methylcytosine"
taaagtggaagaagaaaatacccagatctttctgcatagtcaagtggcttatgttttgcacgcattggaaagaagggaaaacaaaagctgtcttagaagacgaaatcaatcacatgaggagt

SEQ ID NO: 4266 - DNA, 122 bp, Homo sapiens
  misc_feature (61)..(62): /note="This region represents a CpG dinucleotide"
  misc_feature (61)..(61): /note="Nucleotide may be methylated to form 5-methylcytosine"
aattctgttaaatgggacttttaatactctctcaagtcttgtttttattcctcctctctccgctgtaattcataacctcatcctctctaccctgaactatttatttattttgtgtgtgtgtg

SEQ ID NO: 4267 - DNA, 122 bp, Homo sapiens
  misc_feature (61)..(62): /note="This region represents a CpG dinucleotide"
  misc_feature (61)..(61): /note="Nucleotide may be methylated to form 5-methylcytosine"
aggctgagactagggcatcaaatcctaatagcctctgtttactgagcacacagtctgtgccgtgtcctgtgctgaggacttgataggcattatctcttttaatcctcccaattcctggtggg

SEQ ID NO: 4268 - DNA, 122 bp, Homo sapiens
  misc_feature (61)..(62): /note="This region represents a CpG dinucleotide"
  misc_feature (61)..(61): /note="Nucleotide may be methylated to form 5-methylcytosine"
gagggactcagctgtgagtcagcagctgtggcaatatcagcacagtactgtgccccagtacggaagggagatctgaacaatgcatcatagcatcccataacacattacaggtgttaggggct

SEQ ID NO: 4269 - DNA, 122 bp, Homo sapiens
  misc_feature (61)..(62): /note="This region represents a CpG dinucleotide"
  misc_feature (61)..(61): /note="Nucleotide may be methylated to form 5-methylcytosine"
ttttccacaaaagaaaatttcctacatttttcctttttcacccctcccagaggtacaaagcggaatagaccaaatgggtgagtgattacataaggcagttcttgcctattcagtggggagaa

SEQ ID NO: 4270 - DNA, 122 bp, Homo sapiens
  misc_feature (61)..(62): /note="This region represents a CpG dinucleotide"
  misc_feature (61)..(61): /note="Nucleotide may be methylated to form 5-methylcytosine"
gacattttgtgattggcttctttcacttaatgttttcaaagttcatccatatccaggcgccgtggctcacgcctgtaatcccagcactttgggaggccaaggcgggtggatcacctgaggtc

SEQ ID NO: 4271 - DNA, 122 bp, Homo sapiens
  misc_feature (61)..(62): /note="This region represents a CpG dinucleotide"
  misc_feature (61)..(61): /note="Nucleotide may be methylated to form 5-methylcytosine"
gatttaccccagcaaggatgtcttctttcagatggatatgagtaagttagtttctgccctcgttctgtttcttccttctcctgctctgatgttggcacatccttaggaagtcagctactcca

SEQ ID NO: 4272 - DNA, 122 bp, Homo sapiens
  misc_feature (61)..(62): /note="This region represents a CpG dinucleotide"
  misc_feature (61)..(61): /note="Nucleotide may be methylated to form 5-methylcytosine"
taaatatggggattataatggtgatccactttatatgactgacaaccaaataagtgaatacgtgtatagcaggtattaaccatatgcttagccgacctatttcaacctcctaaccaaccaga

SEQ ID NO: 4273 - DNA, 122 bp, Homo sapiens
  misc_feature (61)..(62): /note="This region represents a CpG dinucleotide"
  misc_feature (61)..(61): /note="Nucleotide may be methylated to form 5-methylcytosine"
catctccacaccactttcttgtagctttcgttaaattaataaaagtgcaatttcagcatacgccactaaactggcaagcatttgcaggggtggattttgtagcgacagcacttacccaatgg

SEQ ID NO: 4274 - DNA, 122 bp, Homo sapiens
  misc_feature (61)..(62): /note="This region represents a CpG dinucleotide"
  misc_feature (61)..(61): /note="Nucleotide may be methylated to form 5-methylcytosine"
aacctgggagcccaggatgtaccccatactgctgacagcagtgtctgtgtgggagctgggcgacaggatattttcaagttttacaggtgattccagagtgtaatggagaaccccttctcttt

SEQ ID NO: 4275 - DNA, 122 bp, Homo sapiens
  misc_feature (61)..(62): /note="This region represents a CpG dinucleotide"
  misc_feature (61)..(61): /note="Nucleotide may be methylated to form 5-methylcytosine"
tgtgtttctctgtgattctcttgcccttttccttatggtctgcaactacagtcatcatgtcgcaatctagacaggaaggagaaaaggcctaaagggctaacctcctagctgagtcagccgct

SEQ ID NO: 4276 - DNA, 122 bp, Homo sapiens
  misc_feature (61)..(62): /note="This region represents a CpG dinucleotide"
  misc_feature (61)..(61): /note="Nucleotide may be methylated to form 5-methylcytosine"
ttaagtgcaggaactagatgacataatctgctatgcagtttccagctgttaagttctaaacgctaagccagagagagacaggtttagcatcagtaataacatatgagaatagtcccccaggc

SEQ ID NO: 4277 - DNA, 122 bp, Homo sapiens
  misc_feature (61)..(62): /note="This region represents a CpG dinucleotide"
  misc_feature (61)..(61): /note="Nucleotide may be methylated to form 5-methylcytosine"
acaagtgtgagccactgtgcctagcctggaaagtcttaacccataggaacttactgatcacgaatgaattcattaagattaccatatggcgaatataagagttaatacctgagacttcactt

SEQ ID NO: 4278 - DNA, 122 bp, Homo sapiens
  misc_feature (61)..(62): /note="This region represents a CpG dinucleotide"
  misc_feature (61)..(61): /note="Nucleotide may be methylated to form 5-methylcytosine"
ctaatgttatccctcccccagccccccagcccccaacaggccccagtgtgtgatgtttcccgccctgtgtccaagtcagatctggctatttctaaaggccaggatgactcattttttcaagg

SEQ ID NO: 4279 - DNA, 122 bp, Homo sapiens
  misc_feature (61)..(62): /note="This region represents a CpG dinucleotide"
  misc_feature (61)..(61): /note="Nucleotide may be methylated to form 5-methylcytosine"
cctagaaattaccacatgcattcttaacttaccaaagtgtcatgctcataaatacctttacggaaggatagagtttcctgagatggaggcaggaagagagaacattccaagctagatgaaca

SEQ ID NO: 4280 - DNA, 122 bp, Homo sapiens
  misc_feature (61)..(62): /note="This region represents a CpG dinucleotide"
  misc_feature (61)..(61): /note="Nucleotide may be methylated to form 5-methylcytosine"
aaatatttcaaagagttgctgagagatgttaacggtacagtccatcgagagtacctggcacgtagtagagacttgacaagtgccacctccgcttgccagcccctaaacttgggctccctcac

SEQ ID NO: 4281 - DNA, 122 bp, Homo sapiens
  misc_feature (61)..(62): /note="This region represents a CpG dinucleotide"
  misc_feature (61)..(61): /note="Nucleotide may be methylated to form 5-methylcytosine"
aaccgtccaccttggaacctccaccttcctgtgctcgtcttagaggaattctagaactgtcgttggaggaacaccgctgttttctagaggtcccacagccgtccttctgttcatgcggagta

SEQ ID NO: 4282 - DNA, 122 bp, Homo sapiens
  misc_feature (61)..(62): /note="This region represents a CpG dinucleotide"
  misc_feature (61)..(61): /note="Nucleotide may be methylated to form 5-methylcytosine"
cccaacctgtctttatgttttataacagctcccttcctgacccttcaggcccaggggtggcgacagtgtcactagcctggagaactgtttccagcacctgccggtagccttgcagagcacta

SEQ ID NO: 4283 - DNA, 122 bp, Homo sapiens
  misc_feature (61)..(62): /note="This region represents a CpG dinucleotide"
  misc_feature (61)..(61): /note="Nucleotide may be methylated to form 5-methylcytosine"
cattgacttcaggagtccagcttcactaatttatctagggcttcctggttttccagttcccgtcatcaaagcactcagggcaccctacaaccgaaatttcccttcccaagggaattctcctg

SEQ ID NO: 4284 - DNA, 122 bp, Homo sapiens
  misc_feature (61)..(62): /note="This region represents a CpG dinucleotide"
  misc_feature (61)..(61): /note="Nucleotide may be methylated to form 5-methylcytosine"
ctgagatcatatttataaatgatgccagtatatctttcctcaatatgagaaggaagatagcgtgtgcatggaattaagtgcttggcattgcgcaagaataatctgcccacattacagcaata

SEQ ID NO: 4285 - DNA, 122 bp, Homo sapiens
  misc_feature (61)..(62): /note="This region represents a CpG dinucleotide"
  misc_feature (61)..(61): /note="Nucleotide may be methylated to form 5-methylcytosine"
gatgactatgattaagctttttaaagtaatgaaccagattaacaaatcactataccatcacgaactaatcatcatatacagaataatttcataatctgcccactcctttttgcttttacata

SEQ ID NO: 4286 - DNA, 122 bp, Homo sapiens
  misc_feature (61)..(62): /note="This region represents a CpG dinucleotide"
  misc_feature (61)..(61): /note="Nucleotide may be methylated to form 5-methylcytosine"
ccccagttttcaaaagacgtaactgagtcacagaaaccaagctcaaccactggagtgtaccgctatttaaagatgcctgatgacagtgtggtttgaatttgcaaaacccagaataaacatgg

SEQ ID NO: 4287 - DNA, 122 bp, Homo sapiens
  misc_feature (61)..(62): /note="This region represents a CpG dinucleotide"
  misc_feature (61)..(61): /note="Nucleotide may be methylated to form 5-methylcytosine"
ttttcctttttagttttggctcttggtgctctgagagctaccacttcctgccagctggttcgttaccgcagggaaaatgagggacttttgggggcagatgtgtttccattccactatcataa

SEQ ID NO: 4288 - DNA, 122 bp, Homo sapiens
  misc_feature (61)..(62): /note="This region represents a CpG dinucleotide"
  misc_feature (61)..(61): /note="Nucleotide may be methylated to form 5-methylcytosine"
taagtatgcagttttatgacattaactacatgtgcattgttatgcaaccatctaggatgacgttctaacctcatttcaagcttagccgcattcactatctttccaggactagggtagttttc

SEQ ID NO: 4289 - DNA, 122 bp, Homo sapiens
  misc_feature (61)..(62): /note="This region represents a CpG dinucleotide"
  misc_feature (61)..(61): /note="Nucleotide may be methylated to form 5-methylcytosine"
tgggaggaccttcaaggagccaggctccccggcaccagtaggtcttgttcagctgtgaatcggagctaaggtggaatcagattatgacttaatttccctgctaatgcctccctgtctcatag

SEQ ID NO: 4290 - DNA, 122 bp, Homo sapiens
  misc_feature (61)..(62): /note="This region represents a CpG dinucleotide"
  misc_feature (61)..(61): /note="Nucleotide may be methylated to form 5-methylcytosine"
tagctcactgtaacatattctactactagagtttcatattcattgcttgtcttcctaatacgtagatataaactcaggcgagcaggctatttctgttcttgttgttcgctgctgtctccctg

SEQ ID NO: 4291 - DNA, 122 bp, Homo sapiens
  misc_feature (61)..(62): /note="This region represents a CpG dinucleotide"
  misc_feature (61)..(61): /note="Nucleotide may be methylated to form 5-methylcytosine"
tgccttcctctcccaaaattctaccacagcagggcttttaaaatcactgtagtcatcatacgcttcaggtcaagagccccatggacacgtgaagcacttactcactagtgttataagcattt

SEQ ID NO: 4292 - DNA, 122 bp, Homo sapiens
  misc_feature (61)..(62): /note="This region represents a CpG dinucleotide"
  misc_feature (61)..(61): /note="Nucleotide may be methylated to form 5-methylcytosine"
ctgggtggctttcccagcctctctacctgcttccttcttgacagcctgatggtggccatacgtcccttgggctgtggtgactgggcctctgggagctgcccttccacttctgcattttaaca

SEQ ID NO: 4293 - DNA, 122 bp, Homo sapiens
  misc_feature (61)..(62): /note="This region represents a CpG dinucleotide"
  misc_feature (61)..(61): /note="Nucleotide may be methylated to form 5-methylcytosine"
agcctcccattgcttcactacacggggcgtagcctgttgtcctacttttagtgctaagaccgatcagtgtgttaaggttttagtgctaagattgatcagtggtttcaggtggagctgccgac

SEQ ID NO: 4294 - DNA, 122 bp, Homo sapiens
  misc_feature (61)..(62): /note="This region represents a CpG dinucleotide"
  misc_feature (61)..(61): /note="Nucleotide may be methylated to form 5-methylcytosine"
ctgtggctgcctcattccttgggtgaagagtccatgccttgggtgtcatgaatgactcggcgtccaaagggtttatgtagcttttcctgagctctcccttgtgtgaggccaaagcacagtgc

SEQ ID NO: 4295 - DNA, 122 bp, Homo sapiens
  misc_feature (61)..(62): /note="This region represents a CpG dinucleotide"
  misc_feature (61)..(61): /note="Nucleotide may be methylated to form 5-methylcytosine"
gccatctgattgtgggcatattacaccacttcctcacagggtgtgacacagagggagcaccgcaacatcttttactccacagaaatgaagaggaacatgtaggtcatgtgataaaaactgat

SEQ ID NO: 4296 - DNA, 122 bp, Homo sapiens
  misc_feature (61)..(62): /note="This region represents a CpG dinucleotide"
  misc_feature (61)..(61): /note="Nucleotide may be methylated to form 5-methylcytosine"
gtcacggcccccgtttacacaagagtaaagctgaggcctggagaaatccagtcacctgcccgagggccacacaactggtccggtgagggctgtgagtaaccctggatgtccctctgcagagt

SEQ ID NO: 4297 - DNA, 122 bp, Homo sapiens
  misc_feature (61)..(62): /note="This region represents a CpG dinucleotide"
  misc_feature (61)..(61): /note="Nucleotide may be methylated to form 5-methylcytosine"
accagttaagagactgttgcaggcactgtagcaataactggttcaggcatgaatcactggcggatgcaaaatccctagggtgataatttgtcagcaaacaggatagtcatggtttcaaagta

SEQ ID NO: 4298 - DNA, 122 bp, Homo sapiens
  misc_feature (61)..(62): /note="This region represents a CpG dinucleotide"
  misc_feature (61)..(61): /note="Nucleotide may be methylated to form 5-methylcytosine"
ggacacctaaaccaagagatttgcagacagaggaagtgatactgaagctttaagctgtaacgttagggattattgtcagttagacagacaaagaggaaggaaaagaatggtaaggctatgag

SEQ ID NO: 4299 - DNA, 122 bp, Homo sapiens
  misc_feature (61)..(62): /note="This region represents a CpG dinucleotide"
  misc_feature (61)..(61): /note="Nucleotide may be methylated to form 5-methylcytosine"
acagttgtgagccaccacacctggcttgaatgtagattttaataattgaatttattctgccgtgttgatagaataactgaatatcagtaaattgtgtaacagtggtggatactgttgcataa

SEQ ID NO: 4300 - DNA, 122 bp, Homo sapiens
  misc_feature (61)..(62): /note="This region represents a CpG dinucleotide"
  misc_feature (61)..(61): /note="Nucleotide may be methylated to form 5-methylcytosine"
tcgtggcaccttttaccacctgatatgttcaatggctctatgtttgtttgtagtaagtctcgcctgactagaatataagacccatgggagaagagactttctgctctacccttggcacatac

SEQ ID NO: 4301 - DNA, 122 bp, Homo sapiens
  misc_feature (61)..(62): /note="This region represents a CpG dinucleotide"
  misc_feature (61)..(61): /note="Nucleotide may be methylated to form 5-methylcytosine"
gcactatttttaaaggaggtcattagtgagtcatgtttaagctcaatgcttagccatcatcgccatttgggtgcttgttgggaaggtcctaaattgagcggcctttgggcacagatctctgt

SEQ ID NO: 4302 - DNA, 122 bp, Homo sapiens
  misc_feature (61)..(62): /note="This region represents a CpG dinucleotide"
  misc_feature (61)..(61): /note="Nucleotide may be methylated to form 5-methylcytosine"
tactgactttgaggtttaggggctgggctcaccctcgtgagcaaagccacaggtgcttcccgccctcatggagcttgcaggcttgaggcgggtttagtttactcacagatagtcacacagat

SEQ ID NO: 4303 - DNA, 122 bp, Homo sapiens
  misc_feature (61)..(62): /note="This region represents a CpG dinucleotide"
  misc_feature (61)..(61): /note="Nucleotide may be methylated to form 5-methylcytosine"
acacctcactgttgtcggggagtgccaggagagaatgcttgctgcgaagctgtcagcacacggcctggaatagagtgagtgctccatatctggaagttatgattaattctgcatcctagggt

SEQ ID NO: 4304 - DNA, 122 bp, Homo sapiens
  misc_feature (61)..(62): /note="This region represents a CpG dinucleotide"
  misc_feature (61)..(61): /note="Nucleotide may be methylated to form 5-methylcytosine"
ctacacatatgcataaacatgcgcatgtctccctacctcttgcctcatccactttttccacgcttcctcaataggttgcccaagaaaagaattacatcagtgctgagaggaaaatatttgtg

SEQ ID NO: 4305 - DNA, 122 bp, Homo sapiens
  misc_feature (61)..(62): /note="This region represents a CpG dinucleotide"
  misc_feature (61)..(61): /note="Nucleotide may be methylated to form 5-methylcytosine"
cagataaaggacgaaagtaggacttgggtataataatctctccaatggtatgggtaggggcgtgaggaagtagcagctgctgttaaggacccaagggctcataactgtctctactggctttt

SEQ ID NO: 4306 - DNA, 122 bp, Homo sapiens
  misc_feature (61)..(62): /note="This region represents a CpG dinucleotide"
  misc_feature (61)..(61): /note="Nucleotide may be methylated to form 5-methylcytosine"
gatgaacctgttcacctacgagaagggctactgcttcgtgtactacctgtcccagctctgcggagacccacagcgctttgatgactttctccgagtgagcagccccctgcccgggacggccc

SEQ ID NO: 4307 - DNA, 122 bp, Homo sapiens
  misc_feature (61)..(62): /note="This region represents a CpG dinucleotide"
  misc_feature (61)..(61): /note="Nucleotide may be methylated to form 5-methylcytosine"
tgtcataagcagttttccacattgctacatggtcatcatcttattctaattgttgcacaacgttccaatgagtgaataatttaatcatcattaccctaatgtaagtcacttacatggttgct

SEQ ID NO: 4308 - DNA, 122 bp, Homo sapiens
  misc_feature (61)..(62): /note="This region represents a CpG dinucleotide"
  misc_feature (61)..(61): /note="Nucleotide may be methylated to form 5-methylcytosine"
atccaaccagttcaaacacacttctaggacaaaacctagaaatgagcatactgaccagaacgtcaaagtaaagttaaagtaaaaaatgaatgaggggtatggtagaatcatgagttagttaa

SEQ ID NO: 4309 - DNA, 122 bp, Homo sapiens
  misc_feature (61)..(62): /note="This region represents a CpG dinucleotide"
  misc_feature (61)..(61): /note="Nucleotide may be methylated to form 5-methylcytosine"
gattacatgcatgagccactgcatccagcagcaataacaatttctgtcataccatataatcgtatctcctttttgcccattaatttagtaattatctttccttcaattaagctaagtcctta

SEQ ID NO: 4310 - DNA, 122 bp, Homo sapiens
  misc_feature (61)..(62): /note="This region represents a CpG dinucleotide"
  misc_feature (61)..(61): /note="Nucleotide may be methylated to form 5-methylcytosine"
ttgtgcttccaggtttgtgcatgtatcagaatggtagaacaggcttctacaagcatcccacgcagtggtatcagtgaagtcatggggcataaagtgaaagatacatggtgtagttatgacaa

SEQ ID NO: 4311 - DNA, 122 bp, Homo sapiens
  misc_feature (61)..(62): /note="This region represents a CpG dinucleotide"
  misc_feature (61)..(61): /note="Nucleotide may be methylated to form 5-methylcytosine"
aaaacacacacacacacacacacacacgcacgcacaaaaaattagtataaaattatgtatcgaagtctcagaagtttatgcattatagaagtcatgagtatcaaaattgtggctcaagttgg

SEQ ID NO: 4312 - DNA, 122 bp, Homo sapiens
  misc_feature (61)..(62): /note="This region represents a CpG dinucleotide"
  misc_feature (61)..(61): /note="Nucleotide may be methylated to form 5-methylcytosine"
tcttgatggctgagttttgtggggccaccttaaattttgcacaggggtgagatcctcactcgcctcaccctagaacccgttctgctgtgtgtactgggcacattttttgttgttgttttgtt

SEQ ID NO: 4313 - DNA, 122 bp, Homo sapiens
  misc_feature (61)..(62): /note="This region represents a CpG dinucleotide"
  misc_feature (61)..(61): /note="Nucleotide may be methylated to form 5-methylcytosine"
tcatgtgagtcagctttgaagcgaatcctccagcccagtcaggttttcagacaactccagcgttggccaaaatcttgactacaacctcaggagaaaccctggccagaactacccagataagc

SEQ ID NO: 4314 - DNA, 122 bp, Homo sapiens
  misc_feature (61)..(62): /note="This region represents a CpG dinucleotide"
  misc_feature (61)..(61): /note="Nucleotide may be methylated to form 5-methylcytosine"
tcttcctcccctggttactcatctgtgaaataattggattaggcagcaggtttcaactcacgtgtcagttctaacccgattgagaacaaatgcctgaagaaggacattgggaaggtccctga

SEQ ID NO: 4315 - DNA, 122 bp, Homo sapiens
  misc_feature (61)..(62): /note="This region represents a CpG dinucleotide"
  misc_feature (61)..(61): /note="Nucleotide may be methylated to form 5-methylcytosine"
gatcactacatttaaagcagtccaatagtggaacaggctgcctcacaaatagtgagctctcgtttcctctacacagattctactatgggccaggatctcagccaagcagtggagccagaggc

SEQ ID NO: 4316 - DNA, 122 bp, Homo sapiens
  misc_feature (61)..(62): /note="This region represents a CpG dinucleotide"
  misc_feature (61)..(61): /note="Nucleotide may be methylated to form 5-methylcytosine"
acctgtcccccaggatgcggatcagagggccagtgatgctgaccacggagggcctcagggcgtcagccgaggtcaggcggattaccaagcctaaggctttggctgcctcctccttctgctca

SEQ ID NO: 4317 - DNA, 122 bp, Homo sapiens
  misc_feature (61)..(62): /note="This region represents a CpG dinucleotide"
  misc_feature (61)..(61): /note="Nucleotide may be methylated to form 5-methylcytosine"
tgaaatatatgtagtatgaaactggagacacagccccattttaacaccaaattattcttccgtatgaagatctatgattcatggtaatagtcagtgttaatagagtaatgttatttggttaa

SEQ ID NO: 4318 - DNA, 122 bp, Homo sapiens
  misc_feature (61)..(62): /note="This region represents a CpG dinucleotide"
  misc_feature (61)..(61): /note="Nucleotide may be methylated to form 5-methylcytosine"
ctttccaaaatgcagtgcacttctctggagttaattcaactatcagtaactgagaactttcggattcttcttgagagttgaaaggtgacaagtaaccttctgttcagttagctcgcaaaaga

SEQ ID NO: 4319 - DNA, 122 bp, Homo sapiens
  misc_feature (61)..(62): /note="This region represents a CpG dinucleotide"
  misc_feature (61)..(61): /note="Nucleotide may be methylated to form 5-methylcytosine"
ggaaaagcaagtaagatcctttacaacttaattcatataaaaacccaagttcgggccaggcgcagtggctcatgcctgtaatcctagcactttgggaggccgaggcgggtggatcacttgag

SEQ ID NO: 4320 - DNA, 122 bp, Homo sapiens
  misc_feature (61)..(62): /note="This region represents a CpG dinucleotide"
  misc_feature (61)..(61): /note="Nucleotide may be methylated to form 5-methylcytosine"
tgggagatcgccacactggccgagcagccctaccagggcttgtccaacgagcaagtccttcgcttcgtcatggagggcggccttctggacaagccagacaactgtcctgacatgctgtacgt

SEQ ID NO: 4321 - DNA, 122 bp, Homo sapiens
  misc_feature (61)..(62): /note="This region represents a CpG dinucleotide"
  misc_feature (61)..(61): /note="Nucleotide may be methylated to form 5-methylcytosine"
atggtcctgaggcagtttctggaaaacccattattgaagccataggctgtggtctaagtacgcatagccagtgggataatgttatattgcagagttatttgagtagttcaatttaaggaagg

SEQ ID NO: 4322 - DNA, 122 bp, Homo sapiens
  misc_feature (61)..(62): /note="This region represents a CpG dinucleotide"
  misc_feature (61)..(61): /note="Nucleotide may be methylated to form 5-methylcytosine"
ccgtaacattcaaattggccaaatcaaggagaagctctcagaaaagcacagagcatgcatcgtcaaatctaaaaaactgtcaaagggtaatgaattattccccaaagctttcaggatctgca

SEQ ID NO: 4323 - DNA, 122 bp, Homo sapiens
  misc_feature (61)..(62): /note="This region represents a CpG dinucleotide"
  misc_feature (61)..(61): /note="Nucleotide may be methylated to form 5-methylcytosine"
aagctcacaagtgccagcctgacgtgagtagtgctaatatcaaatctgacaacttccgttcggagtcaggcaggcagaatggtatagggggcagagctttggcatcatacgaacctgggttt

SEQ ID NO: 4324 - DNA, 122 bp, Homo sapiens
  misc_feature (61)..(62): /note="This region represents a CpG dinucleotide"
  misc_feature (61)..(61): /note="Nucleotide may be methylated to form 5-methylcytosine"
tgtatgactaaggagcatcaagtgactaccaaacccaaactccccatcaagcactgggtacgaactgtgagtaaaaacttcctggccaggggcagtggctcatgcctgtaatcccagcactt

SEQ ID NO: 4325 - DNA, 122 bp, Homo sapiens
  misc_feature (61)..(62): /note="This region represents a CpG dinucleotide"
  misc_feature (61)..(61): /note="Nucleotide may be methylated to form 5-methylcytosine"
ctcctctcagaatttcaatccccagaccccagtgggtttgaccctggggaggagcaagggcgattactgactccactgccatgcattggccgccccaggcaaaggtggtgcaggcagagtgg

SEQ ID NO: 4326 - DNA, 122 bp, Homo sapiens
  misc_feature (61)..(62): /note="This region represents a CpG dinucleotide"
  misc_feature (61)..(61): /note="Nucleotide may be methylated to form 5-methylcytosine"
cggtagtgttaaaagtcatagagtggtcaagcgtccaggacatttggcaacaaggagcagcgtttgttattttagagagagctggcttagcagagggtggaggcaaagccagatgatgaagg

SEQ ID NO: 4327 - DNA, 122 bp, Homo sapiens
  misc_feature (61)..(62): /note="This region represents a CpG dinucleotide"
  misc_feature (61)..(61): /note="Nucleotide may be methylated to form 5-methylcytosine"
aaggaggaaggggatatcttcccaaccagctggatcagctgaatcagccttggtaatcaacgtgacaacacattgcatctacatcttaactagggattattttaaagaatgcctgtaaagct

SEQ ID NO: 4328 - DNA, 122 bp, Homo sapiens
  misc_feature (61)..(62): /note="This region represents a CpG dinucleotide"
  misc_feature (61)..(61): /note="Nucleotide may be methylated to form 5-methylcytosine"
gatagtggcctgggagtcaagtgacctgggtctcatctagggaccattattaatttccttcgtgatcatggaaaagacacgtcacctttctggacttcagtaccttcctctgaaagtactgg

SEQ ID NO: 4329 - DNA, 122 bp, Homo sapiens
  misc_feature (61)..(62): /note="This region represents a CpG dinucleotide"
  misc_feature (61)..(61): /note="Nucleotide may be methylated to form 5-methylcytosine"
cactcatcagtctcccaaaatgctgggattacatgcatgagccactgcacctggccttgacgcacattaattcagacgtagtcattttggtatgggactgagtgctaagctgtgcaatgcca

SEQ ID NO: 4330 - DNA, 122 bp, Homo sapiens
  misc_feature (61)..(62): /note="This region represents a CpG dinucleotide"
  misc_feature (61)..(61): /note="Nucleotide may be methylated to form 5-methylcytosine"
ggtgactgggcttttactattaatgtaaactgcctgggacgcagcccctgccatgggaaacgcagggcacttcctgttctcagcatagagtgacaaggaaatttactcagagcggttactct

SEQ ID NO: 4331 - DNA, 122 bp, Homo sapiens
  misc_feature (61)..(62): /note="This region represents a CpG dinucleotide"
  misc_feature (61)..(61): /note="Nucleotide may be methylated to form 5-methylcytosine"
acattttctcatgtacttattctccgtccctcaagccttccagcaccctgtgaaatagggcgggcattattactaagcccattttcacagaggatgaggatgacagggcagggagttgccca

SEQ ID NO: 4332 - DNA, 122 bp, Homo sapiens
  misc_feature (61)..(62): /note="This region represents a CpG dinucleotide"
  misc_feature (61)..(61): /note="Nucleotide may be methylated to form 5-methylcytosine"
tcctctgttgaattatgtcatatttctttctttcaatactatatttcaggctcattcctccgtaaggaattcccatagtaatagcacctggtatgtccctttagtcatccaaagaataccac

SEQ ID NO: 4333 - DNA, 122 bp, Homo sapiens
  misc_feature (61)..(62): /note="This region represents a CpG dinucleotide"
  misc_feature (61)..(61): /note="Nucleotide may be methylated to form 5-methylcytosine"
atatataataaacatttgttattactgtgtatatttatataatgaatatcagactcactacgtgctcagcagcatcctgatgtgttcacaggaattgcatagttgagataccctatgaacca

SEQ ID NO: 4334 - DNA, 122 bp, Homo sapiens
  misc_feature (61)..(62): /note="This region represents a CpG dinucleotide"
  misc_feature (61)..(61): /note="Nucleotide may be methylated to form 5-methylcytosine"
ctctgtggggtggagtcagggctctgtggggtgtactcagggctctctggggtgaagtcacggctctgttgggtggagtcagggctctgggtggagtcagagctttgtgggtggagtcgggg

SEQ ID NO: 4335 - DNA, 122 bp, Homo sapiens
  misc_feature (61)..(62): /note="This region represents a CpG dinucleotide"
  misc_feature (61)..(61): /note="Nucleotide may be methylated to form 5-methylcytosine"
atgtggaaagagaaaggggttttttgctattaggcaaatcaggattaaaatctctcatcacgtagtgtaatctggggtggatcattcggcctctctgtaacttttgtttatgtatctgtagt

SEQ ID NO: 4336 - DNA, 122 bp, Homo sapiens
  misc_feature (61)..(62): /note="This region represents a CpG dinucleotide"
  misc_feature (61)..(61): /note="Nucleotide may be methylated to form 5-methylcytosine"
gcagcttccggaagcaggtactgacctggtggctccacctggagccactgcccgagcctgcgaggtcaccaacagcctccgcaagatttccacacgtgtggctctccactgctcagggggca

SEQ ID NO: 4337 - DNA, 122 bp, Homo sapiens
  misc_feature (61)..(62): /note="This region represents a CpG dinucleotide"
  misc_feature (61)..(61): /note="Nucleotide may be methylated to form 5-methylcytosine"
ttaagatcaatgtgttttaggctcaagggctgtcataacagttaatcctatttccccagccgtctattgcaatgtatttatgaaaagtcgattttatcagttaattagctggtccttaggaa

SEQ ID NO: 4338 - DNA, 122 bp, Homo sapiens
  misc_feature (61)..(62): /note="This region represents a CpG dinucleotide"
  misc_feature (61)..(61): /note="Nucleotide may be methylated to form 5-methylcytosine"
caatgccctaatctagagaattacatagttctaagcacagcaaatctcctacaaacagatcgggattcaaatatttcattctacagtcttgggatcctcaatgcaagggacaggctgtaagc

SEQ ID NO: 4339 - DNA, 122 bp, Homo sapiens
  misc_feature (61)..(62): /note="This region represents a CpG dinucleotide"
  misc_feature (61)..(61): /note="Nucleotide may be methylated to form 5-methylcytosine"
aaagacctgcctaggagtgtcttgtgaatgcgatttgcataacggtttaggcccagctgacgtcaagggctccttatagctccaggtcagttgtagccctggatgtagttcctgccacgcaa

SEQ ID NO: 4340 - DNA, 122 bp, Homo sapiens
  misc_feature (61)..(62): /note="This region represents a CpG dinucleotide"
  misc_feature (61)..(61): /note="Nucleotide may be methylated to form 5-methylcytosine"
ctcattccccagatttcaggatcaaaaatagccctcggaaatcaacagtgctcagatagacggaggcttgcagatgccagaacaggctcacatgacaaacccacctccgccccctttacttt

SEQ ID NO: 4341 - DNA, 122 bp, Homo sapiens
  misc_feature (61)..(62): /note="This region represents a CpG dinucleotide"
  misc_feature (61)..(61): /note="Nucleotide may be methylated to form 5-methylcytosine"
ctgcggagaggagaaagggggtcacagcagctggggccactgggccatgcccatccccatcggcatttcttttcctgtccacattctctgcacatgacacacaacataaatgttgtatttcc

SEQ ID NO: 4342 - DNA, 122 bp, Homo sapiens
  misc_feature (61)..(62): /note="This region represents a CpG dinucleotide"
  misc_feature (61)..(61): /note="Nucleotide may be methylated to form 5-methylcytosine"
cgggtgcccttgtcttttctttgtcttgtgactgacctggatttctggaggaactgtcctcgtcttagaatgatctgttgcttttcttctgagattagaggtattagattctctcccaagag

SEQ ID NO: 4343 - DNA, 122 bp, Homo sapiens
  misc_feature (61)..(62): /note="This region represents a CpG dinucleotide"
  misc_feature (61)..(61): /note="Nucleotide may be methylated to form 5-methylcytosine"
atgttcctggggatccacccttatagaagttaccttttagagagaggagacagacaaatacgtgtaatgctcaagttgtgataagtacgatgaagaagtacaaagcagaagggagggcgcgg

SEQ ID NO: 4344 - DNA, 122 bp, Homo sapiens
  misc_feature (61)..(62): /note="This region represents a CpG dinucleotide"
  misc_feature (61)..(61): /note="Nucleotide may be methylated to form 5-methylcytosine"
taaatagcaactgtagtcagagggagagaggcccagggaggaacaataatctaactaagacgcttgacattggaaactcctggagggcagggcagagatcatgcaggagatttaacagcacc

SEQ ID NO: 4345 - DNA, 122 bp, Homo sapiens
  misc_feature (61)..(62): /note="This region represents a CpG dinucleotide"
  misc_feature (61)..(61): /note="Nucleotide may be methylated to form 5-methylcytosine"
catatacccaactttctattatttatctcttcttcgaaatctcagagcctttaaactcaacgcagccgaagctaagcctatgagctcaccccagaacctagtcctcttcctgtgtttcctgt

SEQ ID NO: 4346 - DNA, 122 bp, Homo sapiens
  misc_feature (61)..(62): /note="This region represents a CpG dinucleotide"
  misc_feature (61)..(61): /note="Nucleotide may be methylated to form 5-methylcytosine"
gacacaggtgtttgcaagcagctgtcgtcacgtggctctctggactgggggcgtttgtcacggtcatctgtaggcctctgaatgtcagggtgcgggtttggttacaagggattattaggctg

SEQ ID NO: 4347 - DNA, 122 bp, Homo sapiens
  misc_feature (61)..(62): /note="This region represents a CpG dinucleotide"
  misc_feature (61)..(61): /note="Nucleotide may be methylated to form 5-methylcytosine"
caaaaccataacaggagtcactgtccacttgatgactcagggcctcctggacaggaaccacgtgatgtacctctccttgaataaagttcccaggaagggtttacctctgtgcacaaggttta

SEQ ID NO: 4348 - DNA, 122 bp, Homo sapiens
  misc_feature (61)..(62): /note="This region represents a CpG dinucleotide"
  misc_feature (61)..(61): /note="Nucleotide may be methylated to form 5-methylcytosine"
ttcaaaaacaaaactaactcctaatctcccaaatgtctggtttatgcctattccagatgacggtgttatttaattctgacctaagattgaggcactgctatatctattaactttaaaataag

SEQ ID NO: 4349 - DNA, 122 bp, Homo sapiens
  misc_feature (61)..(62): /note="This region represents a CpG dinucleotide"
  misc_feature (61)..(61): /note="Nucleotide may be methylated to form 5-methylcytosine"
ggagtgataaacaatcatttgggataattgcccgagagcagcctccactctcccagaggccgtggggcagaaattccaagtccctgcctctgagaagggggtcctttggccacctccctccg

SEQ ID NO: 4350 - DNA, 122 bp, Homo sapiens
  misc_feature (61)..(62): /note="This region represents a CpG dinucleotide"
  misc_feature (61)..(61): /note="Nucleotide may be methylated to form 5-methylcytosine"
ttagataagcaagtgattattgtcatgggtcacatgatttaacactttggcaaagcccggcgatgacacccatctgctttgaagatgcattcctggaaccttgtaaagggatggttcacagg

SEQ ID NO: 4351 - DNA, 122 bp, Homo sapiens
  misc_feature (61)..(62): /note="This region represents a CpG dinucleotide"
  misc_feature (61)..(61): /note="Nucleotide may be methylated to form 5-methylcytosine"
ctcatccaccaaatctgaaggccttaaaattgtgtgttgggaggatgtgaattgggaggacggtgtcactagactgtggattagggatggtaaagtagggaggatgctattttgcaactata

SEQ ID NO: 4352 - DNA, 122 bp, Homo sapiens
  misc_feature (61)..(62): /note="This region represents a CpG dinucleotide"
  misc_feature (61)..(61): /note="Nucleotide may be methylated to form 5-methylcytosine"
cccagctactcaggaggctgaggaaagaagatcaattgagcccaggaggctgcagtgaaccgtggtcataccctgtactccggcctgtgtgacagaaggagatcttatctccaaaaaaagtc

SEQ ID NO: 4353 - DNA, 122 bp, Homo sapiens
  misc_feature (61)..(62): /note="This region represents a CpG dinucleotide"
  misc_feature (61)..(61): /note="Nucleotide may be methylated to form 5-methylcytosine"
agagggcaaggtgtgactcaaccaactttatccagtgcaagcactttgtaggattagctccgagagccctatggggtaggcacagctgtcactgttttagagatgagaaaattgaggtgcaa

SEQ ID NO: 4354 - DNA, 122 bp, Homo sapiens
  misc_feature (61)..(62): /note="This region represents a CpG dinucleotide"
  misc_feature (61)..(61): /note="Nucleotide may be methylated to form 5-methylcytosine"
acctgtagggccttagtgtggctttcaggctgactcagccacttgctgattggatgacctcgccggttaaggcatcctctttgagctcttgtttccttatagaaaacatgcaactaaaaacc

SEQ ID NO: 4355 - DNA, 122 bp, Homo sapiens
  misc_feature (61)..(62): /note="This region represents a CpG dinucleotide"
  misc_feature (61)..(61): /note="Nucleotide may be methylated to form 5-methylcytosine"
agatggcagccagcttggccacttggacgtgcaggttatgcaatgtgagcatcctaataccgtcttcccctcccacagccgccacccggctgcctcaccctggagctgggattgtccagggc

SEQ ID NO: 4356 - DNA, 122 bp, Homo sapiens
  misc_feature (61)..(62): /note="This region represents a CpG dinucleotide"
  misc_feature (61)..(61): /note="Nucleotide may be methylated to form 5-methylcytosine"
agtgttgggattacaggtgtgagccaccgcacccggcctctgagaaatatttagattgtacgcctcaaatgggcagggactgtgtcttacacttttgtatttatgctacagcttacctaata

SEQ ID NO: 4357 - DNA, 122 bp, Homo sapiens
  misc_feature (61)..(62): /note="This region represents a CpG dinucleotide"
  misc_feature (61)..(61): /note="Nucleotide may be methylated to form 5-methylcytosine"
atctggatttttctgtttctcagtttaccagatgcctcctttcttccaagctttgcaccacgcctggaacagatcttggctcatggcagtctcagtaaatactggttgaatgaatcagtgag

SEQ ID NO: 4358 - DNA, 122 bp, Homo sapiens
  misc_feature (61)..(62): /note="This region represents a CpG dinucleotide"
  misc_feature (61)..(61): /note="Nucleotide may be methylated to form 5-methylcytosine"
cttaacctaaagatcgagtccacggtgggagtactgggctccaagtcagggcagtgaaggcgcaaggtagtagactaacacccctccacctgcactggcacatcctccatgcatttggcaat

SEQ ID NO: 4359 - DNA, 122 bp, Homo sapiens
  misc_feature (61)..(62): /note="This region represents a CpG dinucleotide"
  misc_feature (61)..(61): /note="Nucleotide may be methylated to form 5-methylcytosine"
caatatattgcatttgaatgaagacaacagcctcctacttggtcttctagcagtggtttacgtggtttttggtagtctctgctgaggtttatcttgccagtctcccctctagactctcccca

SEQ ID NO: 4360 - DNA, 122 bp, Homo sapiens
  misc_feature (61)..(62): /note="This region represents a CpG dinucleotide"
  misc_feature (61)..(61): /note="Nucleotide may be methylated to form 5-methylcytosine"
gctgagctggtggaggcggtggggtgcacgctcaggcagtctggctccagtcagtccatgcggctgctctactgtgtccaatggatggcagctgctatttgtgttatattatttctccttcc

SEQ ID NO: 4361 - DNA, 122 bp, Homo sapiens
  misc_feature (61)..(62): /note="This region represents a CpG dinucleotide"
  misc_feature (61)..(61): /note="Nucleotide may be methylated to form 5-methylcytosine"
ttaatgaaactactgagtgatgggaggaaaaaaggagagaatgctacttaacaggttcagcgatagcctaatagtagaattaggtacttaatctgggttctcaaggatgaatccgtatttga

SEQ ID NO: 4362 - DNA, 122 bp, Homo sapiens
  misc_feature (61)..(62): /note="This region represents a CpG dinucleotide"
  misc_feature (61)..(61): /note="Nucleotide may be methylated to form 5-methylcytosine"
ctcttctggtaaccaaatgtgtgcactaacacagaaaccctatcaggcaggatgggagctcgcctctgccctggtgcactccccagagcatcatttcctccaccgtctccccctggcctagg

SEQ ID NO: 4363 - DNA, 122 bp, Homo sapiens
  misc_feature (61)..(62): /note="This region represents a CpG dinucleotide"
  misc_feature (61)..(61): /note="Nucleotide may be methylated to form 5-methylcytosine"
cttggcaaagtccaaactactaagtgattgcctgtatctttgcatgaccaccagctgctacgcaggtgaaaaaatttattttttcctttcctttttttttttttaaataacaactgacatct

SEQ ID NO: 4364 - DNA, 122 bp, Homo sapiens
  misc_feature (61)..(62): /note="This region represents a CpG dinucleotide"
  misc_feature (61)..(61): /note="Nucleotide may be methylated to form 5-methylcytosine"
agtttaggatgatgcctcatccaagttcaccccaacctgaggtcttactgacctaagaggcgcattcacaacagccagcttatcattgaataaggtaattgtgttctgtttttcaaagagca

SEQ ID NO: 4365 - DNA, 122 bp, Homo sapiens
  misc_feature (61)..(62): /note="This region represents a CpG dinucleotide"
  misc_feature (61)..(61): /note="Nucleotide may be methylated to form 5-methylcytosine"
gagttcaggttcatccacttagcatcagcaattgactaagttcttcaaaaccagttctgacgccaaagtcctacttcctacttcctctgccaccctggcactgtggccacagcctaccttga

SEQ ID NO: 4366 - DNA, 122 bp, Homo sapiens
  misc_feature (61)..(62): /note="This region represents a CpG dinucleotide"
  misc_feature (61)..(61): /note="Nucleotide may be methylated to form 5-methylcytosine"
tgaactcctgagctcaagcaaccctcctttcttggcctcccaaagtgttaggattacaggcgtgagccaccacgcccagtggcttcagttcatttctatgcaaggcagagctgctgacatca

SEQ ID NO: 4367 - DNA, 122 bp, Homo sapiens
  misc_feature (61)..(62): /note="This region represents a CpG dinucleotide"
  misc_feature (61)..(61): /note="Nucleotide may be methylated to form 5-methylcytosine"
aagtagaaattcttgtttcttaccatagctgtgaagaagacctaacccttaagaaaggtacgtatattaaataaataccttgttctaaaaactaccaattaaaatacaatgattctgcatta

SEQ ID NO: 4368 - DNA, 122 bp, Homo sapiens
  misc_feature (61)..(62): /note="This region represents a CpG dinucleotide"
  misc_feature (61)..(61): /note="Nucleotide may be methylated to form 5-methylcytosine"
aggtgtgagccaccacacccggctctgatgtttacaatattataccaacaagggttggatcgtgtgtgacttatctagaggttaagagcaaaagttatgaaatcacagtgccatcatgggag

SEQ ID NO: 4369 - DNA, 122 bp, Homo sapiens
  misc_feature (61)..(62): /note="This region represents a CpG dinucleotide"
  misc_feature (61)..(61): /note="Nucleotide may be methylated to form 5-methylcytosine"
ggaaagaaagaaggcaagcataaaaggaataattcttatgcttgctcagtgatgaagtaacgactccagatacaatggcttatgcagtcaaacaggctttcactgtaacaatagaaacagct

SEQ ID NO: 4370 - DNA, 122 bp, Homo sapiens
  misc_feature (61)..(62): /note="This region represents a CpG dinucleotide"
  misc_feature (61)..(61): /note="Nucleotide may be methylated to form 5-methylcytosine"
tcttaaatagatgagggatcctcattgatgccaccttagggatgaagaaatgaggtctagcgatggcaagtaacacacccaaggtcacaaagcgagtcagtggcacagcctgcactagaatc

SEQ ID NO: 4371 - DNA, 122 bp, Homo sapiens
  misc_feature (61)..(62): /note="This region represents a CpG dinucleotide"
  misc_feature (61)..(61): /note="Nucleotide may be methylated to form 5-methylcytosine"
ccaacagcatgtgctcacttcatgtctgtgtctctcattttggtaattcttacagtagttcgaactttcttattaatattatcatatctgttatggtgatctgtgatcaccaatctttgatg

SEQ ID NO: 4372 - DNA, 122 bp, Homo sapiens
  misc_feature (61)..(62): /note="This region represents a CpG dinucleotide"
  misc_feature (61)..(61): /note="Nucleotide may be methylated to form 5-methylcytosine"
gtgagactaccagacaggaccattgggaatacctatgcatagttctgtgttcataagcaacgctggcatttgatatttgtaaactagtacttttttttcctatatctccttttaggctttgt

SEQ ID NO: 4373 - DNA, 122 bp, Homo sapiens
  misc_feature (61)..(62): /note="This region represents a CpG dinucleotide"
  misc_feature (61)..(61): /note="Nucleotide may be methylated to form 5-methylcytosine"
ggctaggtatcagagacatctcctctgtctccatcaggttgtttttccatggaattaaggcgtgtatctgtccactgataggggtgttttctctcacaccctgtccttaaacatagtcagtc

SEQ ID NO: 4374 - DNA, 122 bp, Homo sapiens
  misc_feature (61)..(62): /note="This region represents a CpG dinucleotide"
  misc_feature (61)..(61): /note="Nucleotide may be methylated to form 5-methylcytosine"
ctatcctgcccctgtctgcctagccactccttttctaggtagagtggaccttgctgttcacgtcatagatggccattccgtgtacctagactcctttttattcctttgccaacaagtaattg

SEQ ID NO: 4375 - DNA, 122 bp, Homo sapiens
  misc_feature (61)..(62): /note="This region represents a CpG dinucleotide"
  misc_feature (61)..(61): /note="Nucleotide may be methylated to form 5-methylcytosine"
acaaacaaggaaacaaagaaacaaataattctgctttccgataggtgctggttttacttccgctggctgagctgttgttcctgaggtcagaccccagccagtcttttgtgtacgtgcaggac

SEQ ID NO: 4376 - DNA, 122 bp, Homo sapiens
  misc_feature (61)..(62): /note="This region represents a CpG dinucleotide"
  misc_feature (61)..(61): /note="Nucleotide may be methylated to form 5-methylcytosine"
agaagacatggatctgcttcacccttcttaatggacatggattattctctctgggcttttcgagtgctgtgacgttttctgtcattaaccaagacattttccaccactaggtcctggatgga

SEQ ID NO: 4377 - DNA, 122 bp, Homo sapiens
  misc_feature (61)..(62): /note="This region represents a CpG dinucleotide"
  misc_feature (61)..(61): /note="Nucleotide may be methylated to form 5-methylcytosine"
ttgaagtagctcctgtgaaggctaggagagagaattagggaaacaaggattgttgtacagcgggtcacgtgaggttgaggacattcaatttcaggtcataccagtctgcttagttgtgtgat

SEQ ID NO: 4378 - DNA, 122 bp, Homo sapiens
  misc_feature (61)..(62): /note="This region represents a CpG dinucleotide"
  misc_feature (61)..(61): /note="Nucleotide may be methylated to form 5-methylcytosine"
tttcattcagggtctggctccgtctcagtaactccttggggaaagcgatggagaagggctcgctcacgcagcacttctggcagtccctgaaggaccactacctcaagtctcccaggctggag

SEQ ID NO: 4379 - DNA, 122 bp, Homo sapiens
  misc_feature (61)..(62): /note="This region represents a CpG dinucleotide"
  misc_feature (61)..(61): /note="Nucleotide may be methylated to form 5-methylcytosine"
ctagagacgacagagaaaccagaagagccacaactcaaaataaaaaagatgagttatatacgcctacatatgaatgaggaagatttttggaattaatgcttagccagaaaaaccgaaaaaga

SEQ ID NO: 4380 - DNA, 122 bp, Homo sapiens
  misc_feature (61)..(62): /note="This region represents a CpG dinucleotide"
  misc_feature (61)..(61): /note="Nucleotide may be methylated to form 5-methylcytosine"
atttcccaccccaacactctcgcttggctaattctcaagtctgaagaggaagatactttacgtaagcaggtcagctcaaggcctcttgatgtgtgtctgtttctgatttgtttttgtgttgt

SEQ ID NO: 4381 - DNA, 122 bp, Homo sapiens
  misc_feature (61)..(62): /note="This region represents a CpG dinucleotide"
  misc_feature (61)..(61): /note="Nucleotide may be methylated to form 5-methylcytosine"
tgttcgtgtctaatcagggaggtgccctttaatgagagtgccataattcttttggtcctacggatgcataatcattatagatggacaattttccatagaagagagcaggctggtggggctgt

SEQ ID NO: 4382 - DNA, 122 bp, Homo sapiens
  misc_feature (61)..(62): /note="This region represents a CpG dinucleotide"
  misc_feature (61)..(61): /note="Nucleotide may be methylated to form 5-methylcytosine"
aggtggggaggttctagtgggtcatcaaatctagcctctcccatctgatgcaagaatcggcgttacaacttctctgacgttgctcaaccagcttctccttgaacacccccagatgtgagcta

SEQ ID NO: 4383 - DNA, 122 bp, Homo sapiens
  misc_feature (61)..(62): /note="This region represents a CpG dinucleotide"
  misc_feature (61)..(61): /note="Nucleotide may be methylated to form 5-methylcytosine"
ttctgtggctgtgtttactaaagtgagttctgcgcttacattcacacactgcaaactgcacgtacgatgtaagtgtacttgtcatgtagagttttaccaaaactatattagattatactctg

SEQ ID NO: 4384 - DNA, 122 bp, Homo sapiens
  misc_feature (61)..(62): /note="This region represents a CpG dinucleotide"
  misc_feature (61)..(61): /note="Nucleotide may be methylated to form 5-methylcytosine"
gtactgtgctgaggaattatgtgtaatcacttcatcttcatgctgcgcctacatggtgaacgtgcagtaggcatgatgtgtaccattttacagatgagtaaacaggcactgagattaagtgg

SEQ ID NO: 4385 - DNA, 122 bp, Homo sapiens
  misc_feature (61)..(62): /note="This region represents a CpG dinucleotide"
  misc_feature (61)..(61): /note="Nucleotide may be methylated to form 5-methylcytosine"
catgaaccatttgttttttcaacaaatattgttgagtgagcactaggaatgaaccatgcacgagacagagtatctgctctcacggagcttatcttctagtggggaaaccagacaaacatgtc

SEQ ID NO: 4386 - DNA, 122 bp, Homo sapiens
  misc_feature (61)..(62): /note="This region represents a CpG dinucleotide"
  misc_feature (61)..(61): /note="Nucleotide may be methylated to form 5-methylcytosine"
gtgcgatcttggctcactgcaacctccgcctcctgggttcaagcaattctcctgcctcagcgccccaggtagctaggattacaagcgtctgccaccaagcccagctaatttttgtattctta

SEQ ID NO: 4387 - DNA, 122 bp, Homo sapiens
  misc_feature (61)..(62): /note="This region represents a CpG dinucleotide"
  misc_feature (61)..(61): /note="Nucleotide may be methylated to form 5-methylcytosine"
ttcctttctcagactcattctgactttgaggaagtagtccagagtagtggaagggcttagcggtcctgtctccaggaagcccttatgggaggaggctctcagaacttaaattgtggggtact

SEQ ID NO: 4388 - DNA, 122 bp, Homo sapiens
  misc_feature (61)..(62): /note="This region represents a CpG dinucleotide"
  misc_feature (61)..(61): /note="Nucleotide may be methylated to form 5-methylcytosine"
tctcttctcaaattgtgaatgctgctgtttaattgattcacttagcatttgaaactgtcacgcattaataattgcgaaatcctgtagatactgcgtgagtgtgtcatgcttaaatgtgtagt

SEQ ID NO: 4389 - DNA, 122 bp, Homo sapiens
  misc_feature (61)..(62): /note="This region represents a CpG dinucleotide"
  misc_feature (61)..(61): /note="Nucleotide may be methylated to form 5-methylcytosine"
tctgatgagcttagatctcttcctgccctaatagtctatacttctatgacagcctttgaccgtcacttgctttaatccttctaagccctttgaaggcaaggccgaagagttggtcttcttaa

SEQ ID NO: 4390 - DNA, 122 bp, Homo sapiens
  misc_feature (61)..(62): /note="This region represents a CpG dinucleotide"
  misc_feature (61)..(61): /note="Nucleotide may be methylated to form 5-methylcytosine"
ccggacactaagagtcaccctattatatatcagctaatattatgcggcactcactaccaacgagaatctgctaaggacttggcaggcatcatctcgttgattattcacagcagcctgtatta

SEQ ID NO: 4391 - DNA, 122 bp, Homo sapiens
  misc_feature (61)..(62): /note="This region represents a CpG dinucleotide"
  misc_feature (61)..(61): /note="Nucleotide may be methylated to form 5-methylcytosine"
cacgcactgcacacttttgcagcttggcagcagccggctaaaccatgcggcccaagggtgcgggaggctgcacggcccaggctcgtacaagtcattctaggaagttcccgcaaagacaacac

SEQ ID NO: 4392 - DNA, 122 bp, Homo sapiens
  misc_feature (61)..(62): /note="This region represents a CpG dinucleotide"
  misc_feature (61)..(61): /note="Nucleotide may be methylated to form 5-methylcytosine"
ggcaggtgcatcacttgagctcatgaattcactacccgcctgggcaatatgttgaaaccccgtctctacaacaacaaaaaatagtttgctaaatgtttcctccttatttttttctttctttt

SEQ ID NO: 4393 - DNA, 122 bp, Homo sapiens
  misc_feature (61)..(62): /note="This region represents a CpG dinucleotide"
  misc_feature (61)..(61): /note="Nucleotide may be methylated to form 5-methylcytosine"
taagatctgggaggatcccagattaaagcttcctatgtcttcttcctgtgagtcagtacacgtcaccttcctagcacatcaatgggtaaaaatatgtacagaatattgtcaaccagggaaac

SEQ ID NO: 4394 - DNA, 122 bp, Homo sapiens
  misc_feature (61)..(62): /note="This region represents a CpG dinucleotide"
  misc_feature (61)..(61): /note="Nucleotide may be methylated to form 5-methylcytosine"
ctgctggaggctgcccaggatcttctcacccaagagatgaatcagccgagtcaccacctgcgggcagacacaggagccaagagccacacgttttaaactgagaaacactgggaaccaaagac

SEQ ID NO: 4395 - DNA, 122 bp, Homo sapiens
  misc_feature (61)..(62): /note="This region represents a CpG dinucleotide"
  misc_feature (61)..(61): /note="Nucleotide may be methylated to form 5-methylcytosine"
accatctgacccacatggttcttgaagctgagctcatgcctgctctgggtctcctgcatgcgctacttcctggtccggacttcctccatctaaccaactactcatcatcagctttttaatct

SEQ ID NO: 4396 - DNA, 122 bp, Homo sapiens
  misc_feature (61)..(62): /note="This region represents a CpG dinucleotide"
  misc_feature (61)..(61): /note="Nucleotide may be methylated to form 5-methylcytosine"
ccccgcaactacacacaccagacctccaaattactgctcttcgattaggaataatatactcgctgaacctacagcccaaagcagaaaggctgggccagcccagtagtcctgaatcagctgca

SEQ ID NO: 4397 - DNA, 122 bp, Homo sapiens
  misc_feature (61)..(62): /note="This region represents a CpG dinucleotide"
  misc_feature (61)..(61): /note="Nucleotide may be methylated to form 5-methylcytosine"
tcaaggatagtttattgagacagattaataggaaattatgatgcagtgttgtaagtgctacgatgagtgctgaatcaaatctcatatcccagagtagtcttcatggcgctgtcactaattga

SEQ ID NO: 4398 - DNA, 122 bp, Homo sapiens
  misc_feature (61)..(62): /note="This region represents a CpG dinucleotide"
  misc_feature (61)..(61): /note="Nucleotide may be methylated to form 5-methylcytosine"
aggcagggcagtgggagcaggtgccgtggcttaaagcaggcctgtctgaatccttagcagcgatctccaagggcaccataaccttgcaagaaagaggctgccaggcctacatcagatgcaga

SEQ ID NO: 4399 - DNA, 122 bp, Homo sapiens
  misc_feature (61)..(62): /note="This region represents a CpG dinucleotide"
  misc_feature (61)..(61): /note="Nucleotide may be methylated to form 5-methylcytosine"
ttgtttcctgacttgccctgatgtaggccaccctgaaaatcaggaactccaacttctacacggtggcagtgaccagcctgtccagccagattcagtacatgaacacagtggtcagtacatat

SEQ ID NO: 4400 - DNA, 122 bp, Homo sapiens
  misc_feature (61)..(62): /note="This region represents a CpG dinucleotide"
  misc_feature (61)..(61): /note="Nucleotide may be methylated to form 5-methylcytosine"
atcctgcttttcatttcttaataggctatgcttcacttgggtttatctgttctttccttacgattagattaagattgtgcaatcttggctggaatataacataagtgatgtgtgtttttcag

SEQ ID NO: 4401 - DNA, 122 bp, Homo sapiens
  misc_feature (61)..(62): /note="This region represents a CpG dinucleotide"
  misc_feature (61)..(61): /note="Nucleotide may be methylated to form 5-methylcytosine"
cctgcagatatttgaaaggctgccatgaggaagaggaactaggcttttcccttgtggtttcggaaggcagtgctgaagctaacaacgtgaggctggcgtttccctaagactcacatggactg

SEQ ID NO: 4402 - DNA, 122 bp, Homo sapiens
  misc_feature (61)..(62): /note="This region represents a CpG dinucleotide"
  misc_feature (61)..(61): /note="Nucleotide may be methylated to form 5-methylcytosine"
ggaactggggttccgtggagcaggtggggcgcagaggaaccgagctgtggaatggggttccgtggagcaggttgagtgtgccggtcgtggacgggtcgtgggcgggactccccagtgtgtca

SEQ ID NO: 4403 - DNA, 122 bp, Homo sapiens
  misc_feature (61)..(62): /note="This region represents a CpG dinucleotide"
  misc_feature (61)..(61): /note="Nucleotide may be methylated to form 5-methylcytosine"
aaatcagttgtggcccaactagactgcctggatataatatccttttggactggatcatgtcgtttcattgcagtcaggatggctaagcatggtgatggatcataactgaccaaacagacagg

SEQ ID NO: 4404 - DNA, 122 bp, Homo sapiens
  misc_feature (61)..(62): /note="This region represents a CpG dinucleotide"
  misc_feature (61)..(61): /note="Nucleotide may be methylated to form 5-methylcytosine"
acaaggacaaaaattagagatactgtcagttgttaatcaagcttggcaatttggggccaacggctacaggagttattgtttggcttcctggaccagtttctagaaacagcggtcagacttcc

SEQ ID NO: 4405 - DNA, 122 bp, Homo sapiens
  misc_feature (61)..(62): /note="This region represents a CpG dinucleotide"
  misc_feature (61)..(61): /note="Nucleotide may be methylated to form 5-methylcytosine"
gtgatgaactgagtgaaattctctccccagacttcagtcactctttgttttaaaatcctccgttagtgcgttgcttgcggaagcatgtggtttcacaattcccagtacacatttttgccctg

SEQ ID NO: 4406 - DNA, 122 bp, Homo sapiens
  misc_feature (61)..(62): /note="This region represents a CpG dinucleotide"
  misc_feature (61)..(61): /note="Nucleotide may be methylated to form 5-methylcytosine"
gcaacttattagtaagtttctctcttaaaacgtttccggctgggtgcagtggctcacactcgtaataccagcactttgggaggctgaggcgggcagatcacctgaggtcaggagtttgagac

SEQ ID NO: 4407 - DNA, 122 bp, Homo sapiens
  misc_feature (61)..(62): /note="This region represents a CpG dinucleotide"
  misc_feature (61)..(61): /note="Nucleotide may be methylated to form 5-methylcytosine"
tctgtgtgaaggtcacccttggtaagatctggtggctttgggattcattcctgggagcagcgttgggtatacacccatctgtgcacatcctctccgccaaccagcagatgcttgtcagatag

SEQ ID NO: 4408 - DNA, 122 bp, Homo sapiens
  misc_feature (61)..(62): /note="This region represents a CpG dinucleotide"
  misc_feature (61)..(61): /note="Nucleotide may be methylated to form 5-methylcytosine"
tccctcgccacttttacattgtccttttcgagtgtctttcacagccctgtggctttaatgcgttgctgtcttcccaattcacagttcagtttcatcagcactcctgtttcctgttttgtcac

SEQ ID NO: 4409 - DNA, 122 bp, Homo sapiens
  misc_feature (61)..(62): /note="This region represents a CpG dinucleotide"
  misc_feature (61)..(61): /note="Nucleotide may be methylated to form 5-methylcytosine"
agggctggatggactcatggagcctcagggcgggttggggaagctggcgaggccgagccccgctttgggcttctgggcgccctgacctcgctcccggaaccctggggactgggaggcgggag

SEQ ID NO: 4410 - DNA, 122 bp, Homo sapiens
  misc_feature (61)..(62): /note="This region represents a CpG dinucleotide"
  misc_feature (61)..(61): /note="Nucleotide may be methylated to form 5-methylcytosine"
cctagccagatgtttttaatttgccaaccttatccagaaagagaaatcacatataatttacgtgtccgtgcttattcaggaggttggcaatttattccaaatgtttactgcaattaggtttt

SEQ ID NO: 4411 - DNA, 122 bp, Homo sapiens
  misc_feature (61)..(62): /note="This region represents a CpG dinucleotide"
  misc_feature (61)..(61): /note="Nucleotide may be methylated to form 5-methylcytosine"
atgatgttcacataatttatgacagtgattttccagcagatggcactaagtgtcttgttccgaaaagattagtgtatttgacaattttgcaaattggatgtgtcttttcagaggagcattgt

SEQ ID NO: 4412 - DNA, 122 bp, Homo sapiens
  misc_feature (61)..(62): /note="This region represents a CpG dinucleotide"
  misc_feature (61)..(61): /note="Nucleotide may be methylated to form 5-methylcytosine"
ggagggagaagggggcttcagcacacggcagcgcgtggcccctgggcccgaccccttctccggcagcgcagcagtcctccaccttgtcttgctaattcccagccactgccccgcctcaggtc

SEQ ID NO: 4413 - DNA, 122 bp, Homo sapiens
  misc_feature (61)..(62): /note="This region represents a CpG dinucleotide"
  misc_feature (61)..(61): /note="Nucleotide may be methylated to form 5-methylcytosine"
agcaaatcaagacctttgtttatttccacatacctgtacacacatgggtatgtgcatacacgcacacacagagcttcaaggagccagctttaagaaaatgcctgcctaaaacacccccactt

SEQ ID NO: 4414 - DNA, 122 bp, Homo sapiens
  misc_feature (61)..(62): /note="This region represents a CpG dinucleotide"
  misc_feature (61)..(61): /note="Nucleotide may be methylated to form 5-methylcytosine"
agttatacacccttcctgaatatgctgcatatgattctgcctccttgtgtctgcatttgccgtccctgcagtcaatatcctacagttcttcacaaactagttcagacatccatgaatccctc

SEQ ID NO: 4415 - DNA, 122 bp, Homo sapiens
  misc_feature (61)..(62): /note="This region represents a CpG dinucleotide"
  misc_feature (61)..(61): /note="Nucleotide may be methylated to form 5-methylcytosine"
cagcaagctcacaagtgccagcctgacgtgagtagtgctaatatcaaatctgacaacttccgttcggagtcaggcaggcagaatggtatagggggcagagctttggcatcatacgaacctgg

SEQ ID NO: 4416 - DNA, 122 bp, Homo sapiens
  misc_feature (61)..(62): /note="This region represents a CpG dinucleotide"
  misc_feature (61)..(61): /note="Nucleotide may be methylated to form 5-methylcytosine"
cccctccgggtggcggcaagggcgccggtggcccaggctcagggcctctgtctggcgccacgtcctgctgcccagagctggggcgctcttctgggctgacttccaaaagtggcttctcctcg

SEQ ID NO: 4417 - DNA, 122 bp, Homo sapiens
  misc_feature (61)..(62): /note="This region represents a CpG dinucleotide"
  misc_feature (61)..(61): /note="Nucleotide may be methylated to form 5-methylcytosine"
gagtgctgaggtagttagttgacaccaccagttcattcagttcactaccttttcaatgttcgttagttctttcctgttctcacttcccttctggacatttaactaccagtgtctttgagcac

SEQ ID NO: 4418 - DNA, 122 bp, Homo sapiens
  misc_feature (61)..(62): /note="This region represents a CpG dinucleotide"
  misc_feature (61)..(61): /note="Nucleotide may be methylated to form 5-methylcytosine"
tcctcacaacaacctaatggggtaggcgctactattatccctaaggctgagatgaggaaacggaggcatagtagggtgaggtaacttccccaaggtcacaaagctggtaggcaaaagagcca

SEQ ID NO: 4419 - DNA, 122 bp, Homo sapiens
  misc_feature (61)..(62): /note="This region represents a CpG dinucleotide"
  misc_feature (61)..(61): /note="Nucleotide may be methylated to form 5-methylcytosine"
tgcctcatacaaaatggaaattcaaatagtgtttattgatagggttattatggtgcttcacggagattttgcaagtaaagcacatagcataaggcctgatgcagcataagtgctcaataaat

SEQ ID NO: 4420 - DNA, 122 bp, Homo sapiens
  misc_feature (61)..(62): /note="This region represents a CpG dinucleotide"
  misc_feature (61)..(61): /note="Nucleotide may be methylated to form 5-methylcytosine"
caaacagctcacacctgcccttagggagctgctggagcctcagggagccacactgtagtgcgcagcctcaaagtcagtgcaggtcagggtcacccccacctgcacttctcctaatgtcctgt

SEQ ID NO: 4421 - DNA, 122 bp, Homo sapiens
  misc_feature (61)..(62): /note="This region represents a CpG dinucleotide"
  misc_feature (61)..(61): /note="Nucleotide may be methylated to form 5-methylcytosine"
tttgtagctctgttaatcttctggcaccactgttgcatatgcttactgtgcgtgtcaccacgcctggctgtccttgaccaaagtgttatgtggtgcttgactgcataatcataacccaagtg

SEQ ID NO: 4422 - DNA, 122 bp, Homo sapiens
  misc_feature (61)..(62): /note="This region represents a CpG dinucleotide"
  misc_feature (61)..(61): /note="Nucleotide may be methylated to form 5-methylcytosine"
actacactacaacctgtgacatcagggcatcagcatttgtgactaagtttaccaccttctcgcagacagtttgaactttttccaactgtcctgataacgtgctttacagcaaaagggcccag

SEQ ID NO: 4423 - DNA, 122 bp, Homo sapiens
  misc_feature (61)..(62): /note="This region represents a CpG dinucleotide"
  misc_feature (61)..(61): /note="Nucleotide may be methylated to form 5-methylcytosine"
agagcttcattgagacaaccgtctccttttagaggaaatggagcttgggagtggttaatacgtcacacatttaggttaaagtaaagctgacactagccccacagaaactttaatttgtgtag

SEQ ID NO: 4424 - DNA, 122 bp, Homo sapiens
  misc_feature (61)..(62): /note="This region represents a CpG dinucleotide"
  misc_feature (61)..(61): /note="Nucleotide may be methylated to form 5-methylcytosine"
ttcagataccttaggaatactgtaatcaccgtggcaaaccatagttctgatgactcaatccgtttcaggttgacttactgtggatttcctcgtttccttcaatgtaatatataaaccacacc

SEQ ID NO: 4425 - DNA, 122 bp, Homo sapiens
  misc_feature (61)..(62): /note="This region represents a CpG dinucleotide"
  misc_feature (61)..(61): /note="Nucleotide may be methylated to form 5-methylcytosine"
tgggcaatgagagcatgtgggagctccacttacgggcagccttggctggtttctgttgagcgtcttcaccgttatctacgagtccagaaacatccagcagagggattgtgcatcgatattgc

SEQ ID NO: 4426 - DNA, 122 bp, Homo sapiens
  misc_feature (61)..(62): /note="This region represents a CpG dinucleotide"
  misc_feature (61)..(61): /note="Nucleotide may be methylated to form 5-methylcytosine"
taattaatttttaagtgaaaattaagacaacactatcagagcattttacacccccagattcgaggaattgaaaagtctgacaacacccagtgctatcaaggatataaaataacagaaactgc

SEQ ID NO: 4427 - DNA, 122 bp, Homo sapiens
  misc_feature (61)..(62): /note="This region represents a CpG dinucleotide"
  misc_feature (61)..(61): /note="Nucleotide may be methylated to form 5-methylcytosine"
tccacccaggaagctctagtagcagtgaatttcacattgccctgactaatagcagctctgcgccagaaaccatattcagtcccattaccttgttgaatcctcaagtttgatgactttgtcta

SEQ ID NO: 4428 - DNA, 122 bp, Homo sapiens
  misc_feature (61)..(62): /note="This region represents a CpG dinucleotide"
  misc_feature (61)..(61): /note="Nucleotide may be methylated to form 5-methylcytosine"
cccatctgccctaagaacaaagagcttgtaaaccaataaattgggtggaggccgagagctcggggccgtcagcaagcctccagctccggtcccctggacccgccttttagactcttattctg

SEQ ID NO: 4429 - DNA, 122 bp, Homo sapiens
  misc_feature (61)..(62): /note="This region represents a CpG dinucleotide"
  misc_feature (61)..(61): /note="Nucleotide may be methylated to form 5-methylcytosine"
cttggggagcaggctgggcccaaggagtggcaccgagaaggcttttttgggcagccctgccgccaagcgccccgcagctcctgcctgagggctcgggtcccctcggccacaggtgagcttgg

SEQ ID NO: 4430 - DNA, 122 bp, Homo sapiens
  misc_feature (61)..(62): /note="This region represents a CpG dinucleotide"
  misc_feature (61)..(61): /note="Nucleotide may be methylated to form 5-methylcytosine"
atttctcaccactggtgccagatggagggtgtcgtcatactgaagtcaggcctctgcccacgtgtcatacagttttttttgtctgtctcttctattttggcagttagacattaagaggggat

SEQ ID NO: 4431 - DNA, 122 bp, Homo sapiens
  misc_feature (61)..(62): /note="This region represents a CpG dinucleotide"
  misc_feature (61)..(61): /note="Nucleotide may be methylated to form 5-methylcytosine"
atatctagccaggcctgaagccttctgaggtaactgcccacatgttgagatggcccaggacgtgtggttgattctgagatgggacagagcttcttggaataaaacactccgtgggccatgtc

SEQ ID NO: 4432 - DNA, 122 bp, Homo sapiens
  misc_feature (61)..(62): /note="This region represents a CpG dinucleotide"
  misc_feature (61)..(61): /note="Nucleotide may be methylated to form 5-methylcytosine"
cttgttagaaatgcaaattcttgcgccctatcccagacctactatatcagcaactcttagcgggtggggagggtagggctgagctctgtaagtcatactgaagttgagacccactggtctat

SEQ ID NO: 4433 - DNA, 122 bp, Homo sapiens
  misc_feature (61)..(62): /note="This region represents a CpG dinucleotide"
  misc_feature (61)..(61): /note="Nucleotide may be methylated to form 5-methylcytosine"
actgtgagtcagctaacatcccagaacgaggtccttcgaaatagcttccgagatcaagtgcgacatttgcaggaagaacacagaaagacagtggagacattacagcagcagctctccaagat

SEQ ID NO: 4434 - DNA, 122 bp, Homo sapiens
  misc_feature (61)..(62): /note="This region represents a CpG dinucleotide"
  misc_feature (61)..(61): /note="Nucleotide may be methylated to form 5-methylcytosine"
tgcaaaaaagagcattttgaatgataagcacaattgaaagcctaaggcaagactttaaagcgcagtgggaactgcttagtcattagcctgtatgtgctgctgccacttcaagtttgcaagaa

SEQ ID NO: 4435 - DNA, 122 bp, Homo sapiens
  misc_feature (61)..(62): /note="This region represents a CpG dinucleotide"
  misc_feature (61)..(61): /note="Nucleotide may be methylated to form 5-methylcytosine"
agacttcaagtgaggacacgccctccgccagctagccggcccatcccttatctcgttccgcggggcaaagatgaggagagaccgaccctctgctcgcttcttcagctttgaggagcagccac

SEQ ID NO: 4436 - DNA, 122 bp, Homo sapiens
  misc_feature (61)..(62): /note="This region represents a CpG dinucleotide"
  misc_feature (61)..(61): /note="Nucleotide may be methylated to form 5-methylcytosine"
cacaacaataattgtggtttagactctttacagcacactgatattggcatctcatttcaacgtaattttgaccacatagctccctaacaaataggtcagccagtttcaggagtttagatgct

SEQ ID NO: 4437 - DNA, 122 bp, Homo sapiens
  misc_feature (61)..(62): /note="This region represents a CpG dinucleotide"
  misc_feature (61)..(61): /note="Nucleotide may be methylated to form 5-methylcytosine"
ttatgggttattttttatctctaaaaaaaaataaggcctaaaacttttcaatgacttacccgaagtcaggggttgagtaagtatgatactgtgatgttgaaatccatgtcttcttatgtcat

SEQ ID NO: 4438 - DNA, 122 bp, Homo sapiens
  misc_feature (61)..(62): /note="This region represents a CpG dinucleotide"
  misc_feature (61)..(61): /note="Nucleotide may be methylated to form 5-methylcytosine"
ggtttccaactccagtcttcgcagcattcccagaatgccatacaggtatagttctatctgcggcagatactaatccctcaaatgaagaacactgtgagttatgggaggtgtatttctttgtc

SEQ ID NO: 4439 - DNA, 122 bp, Homo sapiens
  misc_feature (61)..(62): /note="This region represents a CpG dinucleotide"
  misc_feature (61)..(61): /note="Nucleotide may be methylated to form 5-methylcytosine"
caaggacaggctgctggggatgggtgtggtgctggtgggggccttctgcctggctgggagcgggggcggctgccctgccctcgctgccaccctctgccctccctgactctggggatctcctc

SEQ ID NO: 4440 - DNA, 122 bp, Homo sapiens
  misc_feature (61)..(62): /note="This region represents a CpG dinucleotide"
  misc_feature (61)..(61): /note="Nucleotide may be methylated to form 5-methylcytosine"
tgagggcccagcctgcagtggttgtcatcctcactgactaagagggagtggatctaatcccggtgcattcgcctggcattcagcatcctgcctgtctagccttatcgccactctcctccctc

SEQ ID NO: 4441 - DNA, 122 bp, Homo sapiens
  misc_feature (61)..(62): /note="This region represents a CpG dinucleotide"
  misc_feature (61)..(61): /note="Nucleotide may be methylated to form 5-methylcytosine"
ccaatcagttgtgaccaggatggtggtagtcacatggcataggggaatcaaatggttccccgtaaccatctgattgttaggaggagcttgcctagtgcatgcatctataaagaaggatgtga

SEQ ID NO: 4442 - DNA, 122 bp, Homo sapiens
  misc_feature (61)..(62): /note="This region represents a CpG dinucleotide"
  misc_feature (61)..(61): /note="Nucleotide may be methylated to form 5-methylcytosine"
ttcaacatttcctcaaatctttcagccactgtggtggttagatctgaagacaagcctgggcgcggtggctcacacctgtaatcccagcactttgagaggccgaggcgggccgatcacttgag

SEQ ID NO: 4443 - DNA, 122 bp, Homo sapiens
  misc_feature (61)..(62): /note="This region represents a CpG dinucleotide"
  misc_feature (61)..(61): /note="Nucleotide may be methylated to form 5-methylcytosine"
gatgtaaataggcagttgttgttacataggtctgaaactcagaggttgcctctgtgttggcgatgtcagttggaagccattaattcactgatggtatttaaaatagtgagaggggaggaaat

SEQ ID NO: 4444 - DNA, 122 bp, Homo sapiens
  misc_feature (61)..(62): /note="This region represents a CpG dinucleotide"
  misc_feature (61)..(61): /note="Nucleotide may be methylated to form 5-methylcytosine"
cacagacagagtctgggttcttactcacctgggcaggctatgggtggggtggggtgagaacgcactcagcagcctcagagggacataggaagaaaggagtgaggaaaactcccaggaattta

SEQ ID NO: 4445 - DNA, 122 bp, Homo sapiens
  misc_feature (61)..(62): /note="This region represents a CpG dinucleotide"
  misc_feature (61)..(61): /note="Nucleotide may be methylated to form 5-methylcytosine"
aaggattatacacttttaagaactcctgtgaagcaatccaatgagatttgtaacctcccccgttgctggcctctcctgcatttgattccaggctctagagaacagtgattctcaactctttt

SEQ ID NO: 4446 - DNA, 122 bp, Homo sapiens
  misc_feature (61)..(62): /note="This region represents a CpG dinucleotide"
  misc_feature (61)..(61): /note="Nucleotide may be methylated to form 5-methylcytosine"
taaaggaggatcactcttttcctcctctccattttccaaattgtatcctgatggtggttacgttactgctctaattgaggggatataaaggtgactaagaaagccaccacaggccgggtgtg

SEQ ID NO: 4447 - DNA, 122 bp, Homo sapiens
  misc_feature (61)..(62): /note="This region represents a CpG dinucleotide"
  misc_feature (61)..(61): /note="Nucleotide may be methylated to form 5-methylcytosine"
ctgcaggcggaagagcatggaggcgtacttacttctgtgtaacacagggtgtgtgaagatcgctcctttccctttacttttcttcttcttgccctggattccctcccagctccaaccttttt

SEQ ID NO: 4448 - DNA, 122 bp, Homo sapiens
  misc_feature (61)..(62): /note="This region represents a CpG dinucleotide"
  misc_feature (61)..(61): /note="Nucleotide may be methylated to form 5-methylcytosine"
cagtacatccagtatatttagtgcagctaggcctgcttctatatggaagttcttgctcagcgtgtgcttaccactaaatgacagaaagtggaaaataattggctgagcaggaaagttagagg

SEQ ID NO: 4449 - DNA, 122 bp, Homo sapiens
  misc_feature (61)..(62): /note="This region represents a CpG dinucleotide"
  misc_feature (61)..(61): /note="Nucleotide may be methylated to form 5-methylcytosine"
accgcctgcacggccagcccgctcctgaggctgctgatttgggtctgggaagaacagtcacggcttctgctggccagcggggtggcgggcaccagccacgaggtgtctgtggtgctggcctc

SEQ ID NO: 4450 - DNA, 122 bp, Homo sapiens
  misc_feature (61)..(62): /note="This region represents a CpG dinucleotide"
  misc_feature (61)..(61): /note="Nucleotide may be methylated to form 5-methylcytosine"
tgattacgtgagtgaagaggtgtggtaccgagtcattcagatcgtcatcaaccgggacgacgtgcagggctacgcggccaagactgtgttcgaggtatggcccgcaggatggcaggaaggat

SEQ ID NO: 4451 - DNA, 122 bp, Homo sapiens
  misc_feature (61)..(62): /note="This region represents a CpG dinucleotide"
  misc_feature (61)..(61): /note="Nucleotide may be methylated to form 5-methylcytosine"
tgaaactctgaccaagtgttgtgtaatagcattaaagttatggcatttaaaagcacattgcgtatacaatgctgggctccaaagaggcagaagagatagttcctatcctcttagagctgtga

SEQ ID NO: 4452 - DNA, 122 bp, Homo sapiens
  misc_feature (61)..(62): /note="This region represents a CpG dinucleotide"
  misc_feature (61)..(61): /note="Nucleotide may be methylated to form 5-methylcytosine"
gtgcagagaagggaattttaactttccatatatcctgactcattaatcctcaagttaacccgttaccaaaaacagccaacctctcaaacctttaaaggtttatgcgcacatcatatttcacc

SEQ ID NO: 4453 - DNA, 122 bp, Homo sapiens
  misc_feature (61)..(62): /note="This region represents a CpG dinucleotide"
  misc_feature (61)..(61): /note="Nucleotide may be methylated to form 5-methylcytosine"
gctctgtggacatcactgcccatgaagccagaaaattcatgtctaagccatgtgaggtcacgctgaagaaacaactcatggtcagaacaataggagaggttattaagagatattaactgcct

SEQ ID NO: 4454 - DNA, 122 bp, Homo sapiens
  misc_feature (61)..(62): /note="This region represents a CpG dinucleotide"
  misc_feature (61)..(61): /note="Nucleotide may be methylated to form 5-methylcytosine"
tagctaagcctcgaagcgaagctgggatgtagctggcacctgcatggccatgggctgggccgacatagtctcagaactgatctgggcactgtggctgattggcaagtgttaagtaggccagg

SEQ ID NO: 4455 - DNA, 122 bp, Homo sapiens
  misc_feature (61)..(62): /note="This region represents a CpG dinucleotide"
  misc_feature (61)..(61): /note="Nucleotide may be methylated to form 5-methylcytosine"
gcaccatcctctggtactcccagggtgcatgctgggacacagagagcctcttgctttccacgtagttggtcagctggccctgattctggataacatcacccctggctcagcaagcctggctg

SEQ ID NO: 4456 - DNA, 122 bp, Homo sapiens
  misc_feature (61)..(62): /note="This region represents a CpG dinucleotide"
  misc_feature (61)..(61): /note="Nucleotide may be methylated to form 5-methylcytosine"
ggtcacagcatgactcacagtatcttacacaccttggatgtatatacgcacttcttatgtcgtaagtaatccagagggaggagtttgctagagctagtccagagttcagccatcttagggct

SEQ ID NO: 4457 - DNA, 122 bp, Homo sapiens
  misc_feature (61)..(62): /note="This region represents a CpG dinucleotide"
  misc_feature (61)..(61): /note="Nucleotide may be methylated to form 5-methylcytosine"
gagccttgcaaacaggcctggagacatgcgaagataggagttcatcctggcgtcagtacacggtgcctgcctaacacccaatgccagcccactgctgcgtgccaggcagcaccctggagcag

SEQ ID NO: 4458 - DNA, 122 bp, Homo sapiens
  misc_feature (61)..(62): /note="This region represents a CpG dinucleotide"
  misc_feature (61)..(61): /note="Nucleotide may be methylated to form 5-methylcytosine"
agcagagaattcatcagtagggcaatttctgccggctgttggagaatcagcacatgccagcgtgagacactataatgaatcattatcgttagtaattcataacggattcattccaagaaaat

SEQ ID NO: 4459 - DNA, 122 bp, Homo sapiens
  misc_feature (61)..(62): /note="This region represents a CpG dinucleotide"
  misc_feature (61)..(61): /note="Nucleotide may be methylated to form 5-methylcytosine"
tccactctcttcccacttgacctcatttttaaaacaagcagtttcacccacagatccactcgagtgcagtgtgtcatctccctctgggccttctatgcatttgctcatactggttcctgtat

SEQ ID NO: 4460 - DNA, 122 bp, Homo sapiens
  misc_feature (61)..(62): /note="This region represents a CpG dinucleotide"
  misc_feature (61)..(61): /note="Nucleotide may be methylated to form 5-methylcytosine"
ctctcaggctgggcacatgccaaaacagatccagggctaaattctaaagtattgttgctgcgctgcagtggtttcctgaagggttatccccctcctagctcccagcactttggggtagagat

SEQ ID NO: 4461 - DNA, 122 bp, Homo sapiens
  misc_feature (61)..(62): /note="This region represents a CpG dinucleotide"
  misc_feature (61)..(61): /note="Nucleotide may be methylated to form 5-methylcytosine"
tgggatttgtgcccttatagaaagggacacaacatgagatgatcttgctctgggccatgccgggaggaagggagaaggtggctgtcaacgagccaggaagcggcactcctgacactggatct

SEQ ID NO: 4462 - DNA, 122 bp, Homo sapiens
  misc_feature (61)..(62): /note="This region represents a CpG dinucleotide"
  misc_feature (61)..(61): /note="Nucleotide may be methylated to form 5-methylcytosine"
gaatctgtgtgctcatctactgtgcccagagcaaatcctttctaaattctggatgtgctacgtgtgatgttagtggttggttaagagacaggtatctccagaaataaaacacgaaaggcaga

SEQ ID NO: 4463 - DNA, 122 bp, Homo sapiens
  misc_feature (61)..(62): /note="This region represents a CpG dinucleotide"
  misc_feature (61)..(61): /note="Nucleotide may be methylated to form 5-methylcytosine"
ccctgggggagctgaaacagaacctgtccaggagctggcatgacgtgcaggtctctagcgcgtaggtacctgccccaggcgcacccctgggggctgaagagaacgggcaccacacgtgcccc

SEQ ID NO: 4464 - DNA, 122 bp, Homo sapiens
  misc_feature (61)..(62): /note="This region represents a CpG dinucleotide"
  misc_feature (61)..(61): /note="Nucleotide may be methylated to form 5-methylcytosine"
ctgatgaggctggaaaaacatcaggaattaaacttatggccagctcatcagaggagcatgcggcatccacaggatactctggttgttttttctgttgaaaaaaatttccaagaattttttac

SEQ ID NO: 4465 - DNA, 122 bp, Homo sapiens
  misc_feature (61)..(62): /note="This region represents a CpG dinucleotide"
  misc_feature (61)..(61): /note="Nucleotide may be methylated to form 5-methylcytosine"
aatcagttcccttcctctgggaactttctctgtcaccctgcctgagggcagaacctcccgcgtggctcttccagattgccatttccatgattatgtgcattattttttaatttttattatat

SEQ ID NO: 4466 - DNA, 122 bp, Homo sapiens
  misc_feature (61)..(62): /note="This region represents a CpG dinucleotide"
  misc_feature (61)..(61): /note="Nucleotide may be methylated to form 5-methylcytosine"
tggggtgggtggtccattcttggggacaaggcaggtcatcctgctgaatgtgtgtctctgcgatgtgccctttgggaaaaggaggaacaaggacagcaggatggctgcaggcacctgaccaa

SEQ ID NO: 4467 - DNA, 122 bp, Homo sapiens
  misc_feature (61)..(62): /note="This region represents a CpG dinucleotide"
  misc_feature (61)..(61): /note="Nucleotide may be methylated to form 5-methylcytosine"
caacattgttatttctgaaaagtaaatcacaacaaggcccactctttccctaggacctctcgtagcctggctcatcctgagtttctctggataaatattcctgagccctgtgccttggaagg

SEQ ID NO: 4468 - DNA, 122 bp, Homo sapiens
  misc_feature (61)..(62): /note="This region represents a CpG dinucleotide"
  misc_feature (61)..(61): /note="Nucleotide may be methylated to form 5-methylcytosine"
ttgtgaaatttcctaaatactatcagcctgcatatctccattttatccaagattacaccacggaagacttactttgttctaaaaataaaagccagaaacaatccttatgagtagggaagcta

SEQ ID NO: 4469 - DNA, 122 bp, Homo sapiens
  misc_feature (61)..(62): /note="This region represents a CpG dinucleotide"
  misc_feature (61)..(61): /note="Nucleotide may be methylated to form 5-methylcytosine"
cccctaaatttaggaaaaggggtggaggacagagacagctgcccaggctcctctcctcctcgctgagctcccaccaccctgtcagctgaggggctggcacaaggtccacccaaatccacagt

SEQ ID NO: 4470 - DNA, 122 bp, Homo sapiens
  misc_feature (61)..(62): /note="This region represents a CpG dinucleotide"
  misc_feature (61)..(61): /note="Nucleotide may be methylated to form 5-methylcytosine"
ctcacaagaagacagtatctttagattgcttaataatagttctcctccttctcaaaagcccgtcacctccccacaattacatattgccctagcttctttcctgcctcctccttttccttcct

SEQ ID NO: 4471 - DNA, 122 bp, Homo sapiens
  misc_feature (61)..(62): /note="This region represents a CpG dinucleotide"
  misc_feature (61)..(61): /note="Nucleotide may be methylated to form 5-methylcytosine"
ttgcttattatgtagtaatcattattttaagcctttacaactaacggtttgattaaatcacgtaacactgaggtagatactattatcccttgcctgttgaggagaaagctgactcacacaaa

SEQ ID NO: 4472 - DNA, 122 bp, Homo sapiens
  misc_feature (61)..(62): /note="This region represents a CpG dinucleotide"
  misc_feature (61)..(61): /note="Nucleotide may be methylated to form 5-methylcytosine"
tatatctctgtggtatattctgtatcactagagaagtggaacagcatttagggtctagtgcgtaatcttgttgctatgttgaagaatggatgtaggcaatttattgcattcatacctgccag

SEQ ID NO: 4473 - DNA, 122 bp, Homo sapiens
  misc_feature (61)..(62): /note="This region represents a CpG dinucleotide"
  misc_feature (61)..(61): /note="Nucleotide may be methylated to form 5-methylcytosine"
tggcacagggtgagcaatgagtcaattaattacagctgcttaatctataatggatgctgacgcgtagtgagcaggaacttagctttgtcacactgcaccacgagactcctttgcaagctaat

SEQ ID NO: 4474 - DNA, 122 bp, Homo sapiens
  misc_feature (61)..(62): /note="This region represents a CpG dinucleotide"
  misc_feature (61)..(61): /note="Nucleotide may be methylated to form 5-methylcytosine"
aagatgtttaatgaactcacaattcctcatagctcaggaggcgtcattcatggcagaagacgaaggaagagcaaaaggacatcttacgtggtggcagacaaaagaaagctcctgcagggaaa

SEQ ID NO: 4475 - DNA, 122 bp, Homo sapiens
  misc_feature (61)..(62): /note="This region represents a CpG dinucleotide"
  misc_feature (61)..(61): /note="Nucleotide may be methylated to form 5-methylcytosine"
atccatgaggcaccacccactgaaatcaggcatctccatccaggatcgcatgggacagcacgtttctgacccagcctgtggctctgctccttccacaagcacttggggccaggcccatccac

SEQ ID NO: 4476 - DNA, 122 bp, Homo sapiens
  misc_feature (61)..(62): /note="This region represents a CpG dinucleotide"
  misc_feature (61)..(61): /note="Nucleotide may be methylated to form 5-methylcytosine"
ggccagggggtctcgccgccgtcccccccccgcgggggcgtgctgcagcctgcgaggggacgacggtgtccctgtgttgtgcctccccgtccccagcccgctgatccagttccacctgctgc

SEQ ID NO: 4477 - DNA, 122 bp, Homo sapiens
  misc_feature (61)..(62): /note="This region represents a CpG dinucleotide"
  misc_feature (61)..(61): /note="Nucleotide may be methylated to form 5-methylcytosine"
taaatacgtttggaaaataaggaatctccatccctcttaacctttgttctcagtgactcacgtaataccagtgtattagtaatgttttaattatccctggaattcaaaattagggaccgtcc

SEQ ID NO: 4478 - DNA, 122 bp, Homo sapiens
  misc_feature (61)..(62): /note="This region represents a CpG dinucleotide"
  misc_feature (61)..(61): /note="Nucleotide may be methylated to form 5-methylcytosine"
ccagcacccacagggttcattgcacaatgtccttgtttatacaactccagagctgccctccgtttcccctgaagttgcaaggtttcactaatgcaatagttaggaggaatgagagacaatat

SEQ ID NO: 4479 - DNA, 122 bp, Homo sapiens
  misc_feature (61)..(62): /note="This region represents a CpG dinucleotide"
  misc_feature (61)..(61): /note="Nucleotide may be methylated to form 5-methylcytosine"
tcacatcttgccttgtttccccacagggcagctgtgcggagggtagtggcagccatgaaccggatggaccagaagaagcacgagaagttttcaaaccagtttaactacgcactgaactagag

SEQ ID NO: 4480 - DNA, 122 bp, Homo sapiens
  misc_feature (61)..(62): /note="This region represents a CpG dinucleotide"
  misc_feature (61)..(61): /note="Nucleotide may be methylated to form 5-methylcytosine"
tatcagtgggctatgttcaggtccagagacaaaagagctgtcaacttaaactaacctgtgcggtgcctcagctcctggacttactggttgatgcaaccttagggaaagcctgtgtgcatcaa

SEQ ID NO: 4481 - DNA, 122 bp, Homo sapiens
  misc_feature (61)..(62): /note="This region represents a CpG dinucleotide"
  misc_feature (61)..(61): /note="Nucleotide may be methylated to form 5-methylcytosine"
tgggggcacgtttctcagccttgctcctagcagcctggcttccagccatgccaggcctgccgccccacagggcttctgtctgctgtgagcactgttgtccctttggctccctctcagggctt

SEQ ID NO: 4482 - DNA, 122 bp, Homo sapiens
  misc_feature (61)..(62): /note="This region represents a CpG dinucleotide"
  misc_feature (61)..(61): /note="Nucleotide may be methylated to form 5-methylcytosine"
gcagggggcgtgttttccttgtttaggacgtgcctccaaggcctgtctagcatgaggctccgctcagcaaatattcactgaaatgtgaacaacaaagctctgccttcaggatgtggataatc

SEQ ID NO: 4483 - DNA, 122 bp, Homo sapiens
  misc_feature (61)..(62): /note="This region represents a CpG dinucleotide"
  misc_feature (61)..(61): /note="Nucleotide may be methylated to form 5-methylcytosine"
agcacttttttccccatccctataaaaaaaaaaaaaaaaaagagagagagagagagggagcgagagggagatgatctcattcgatcctgtgaaggactgctactcagtaaggaagaagtcct

SEQ ID NO: 4484 - DNA, 122 bp, Homo sapiens
  misc_feature (61)..(62): /note="This region represents a CpG dinucleotide"
  misc_feature (61)..(61): /note="Nucleotide may be methylated to form 5-methylcytosine"
ttgcctttactttgaagactggttcaattcggagtggtagaagatgctcaagatgtagaacgtggaagccttttgagtctagagaagtctttgatgatgttctccttggctgctgcccataa

SEQ ID NO: 4485 - DNA, 122 bp, Homo sapiens
  misc_feature (61)..(62): /note="This region represents a CpG dinucleotide"
  misc_feature (61)..(61): /note="Nucleotide may be methylated to form 5-methylcytosine"
ttcactcacacttgacattgtcgcgtttttttcatttcagccacactgatgaatgtgtaacggcttctcatgttttaatttgcatttccctgatgactaatgatagtgactgttcctgcatc

SEQ ID NO: 4486 - DNA, 122 bp, Homo sapiens
  misc_feature (61)..(62): /note="This region represents a CpG dinucleotide"
  misc_feature (61)..(61): /note="Nucleotide may be methylated to form 5-methylcytosine"
tttgaaagaactacaataaagtcacctgtggattgacccacatgccttagctctgaaacacgcaaactggctaactggggaatccactcccatgccattctctaatatttgttcatctaaac

SEQ ID NO: 4487 - DNA, 122 bp, Homo sapiens
  misc_feature (61)..(62): /note="This region represents a CpG dinucleotide"
  misc_feature (61)..(61): /note="Nucleotide may be methylated to form 5-methylcytosine"
ttcttggtcattcttaaggccatggcaggagcacagttcaaaatccaattcacaaggcaacgtctggaagaaagaatcaagtatgtgtgtagtgcatgatgtacctcagctactgtagtgaa

SEQ ID NO: 4488 - DNA, 122 bp, Homo sapiens
  misc_feature (61)..(62): /note="This region represents a CpG dinucleotide"
  misc_feature (61)..(61): /note="Nucleotide may be methylated to form 5-methylcytosine"
ggctggtcatgacatacttataacacagactgaggaacttgaactttagcctaaagaagacgcagaggagtttaagttcagtcaatgacatgatctcatctgtgatttacatttcaggaagg

SEQ ID NO: 4489 - DNA, 122 bp, Homo sapiens
  misc_feature (61)..(62): /note="This region represents a CpG dinucleotide"
  misc_feature (61)..(61): /note="Nucleotide may be methylated to form 5-methylcytosine"
accacatggtaggcatcttaagtggatgcagaccattgccccatggacatgtatgaaaaccgttttggtgaaagcatgtggcacgaggcctgacaaacaccatggaactctcctaatgaact

SEQ ID NO: 4490 - DNA, 122 bp, Homo sapiens
  misc_feature (61)..(62): /note="This region represents a CpG dinucleotide"
  misc_feature (61)..(61): /note="Nucleotide may be methylated to form 5-methylcytosine"
cagtaggaattttgtagctctgttaatcttctggcaccactgttgcatatgcttactgtgcgtgtcaccacgcctggctgtccttgaccaaagtgttatgtggtgcttgactgcataatcat

SEQ ID NO: 4491 - DNA, 122 bp, Homo sapiens
  misc_feature (61)..(62): /note="This region represents a CpG dinucleotide"
  misc_feature (61)..(61): /note="Nucleotide may be methylated to form 5-methylcytosine"
ggatttgaggtaacttaggaaactgctctcaatacggaattttaaagttggtgaggaagtcgacagaaggggaagtcacagtaggaaaatcaaggtactatcaggatgaagtcagcacgcag

SEQ ID NO: 4492 - DNA, 122 bp, Homo sapiens
  misc_feature (61)..(62): /note="This region represents a CpG dinucleotide"
  misc_feature (61)..(61): /note="Nucleotide may be methylated to form 5-methylcytosine"
aggtcatggccctgtcattccagaggaggctggagcagctcttcaggaaatgtggatgtgcgaagaggacaagcctggctgagcctaaaaggggctcttcagactcttctggagacctgcac

SEQ ID NO: 4493 - DNA, 122 bp, Homo sapiens
  misc_feature (61)..(62): /note="This region represents a CpG dinucleotide"
  misc_feature (61)..(61): /note="Nucleotide may be methylated to form 5-methylcytosine"
attaaatagtgctagatactggaaaagtgacaacatttataactcatatattaccatgcacggggaaaacagtatacacattattaaatctaatataatccacttttttaatgagttaaaaa

SEQ ID NO: 4494 - DNA, 122 bp, Homo sapiens
  misc_feature (61)..(62): /note="This region represents a CpG dinucleotide"
  misc_feature (61)..(61): /note="Nucleotide may be methylated to form 5-methylcytosine"
gaaaattaaataaaagccactgggttgggcctgagcctcttggggcttttccaaagccctcgtgtgggcagaaatgagaatcacaggtttggggaacaatcctagttgcttgggaaagtatc

SEQ ID NO: 4495 - DNA, 122 bp, Homo sapiens
  misc_feature (61)..(62): /note="This region represents a CpG dinucleotide"
  misc_feature (61)..(61): /note="Nucleotide may be methylated to form 5-methylcytosine"
tgattctgggtgaaggtcacagcatgactcacagtatcttacacaccttggatgtatatacgcacttcttatgtcgtaagtaatccagagggaggagtttgctagagctagtccagagttca

SEQ ID NO: 4496 - DNA, 122 bp, Homo sapiens
  misc_feature (61)..(62): /note="This region represents a CpG dinucleotide"
  misc_feature (61)..(61): /note="Nucleotide may be methylated to form 5-methylcytosine"
ctcatctcctactgccctccctctccctctctgctcttgcaatagctggaataggccaggcgcgcttcatgctcaggaccttgaatgctttgtgccttgatattgccttgccacacttccca

SEQ ID NO: 4497 - DNA, 122 bp, Homo sapiens
  misc_feature (61)..(62): /note="This region represents a CpG dinucleotide"
  misc_feature (61)..(61): /note="Nucleotide may be methylated to form 5-methylcytosine"
cagtatcaccccacgggctggcctcctatccaggttctgcctgatgatgggttgagctgtcgcaccagccaggccctgtctgtgctgtcctctcggctgtaaaataaagaggccgtggtctg

SEQ ID NO: 4498 - DNA, 122 bp, Homo sapiens
  misc_feature (61)..(62): /note="This region represents a CpG dinucleotide"
  misc_feature (61)..(61): /note="Nucleotide may be methylated to form 5-methylcytosine"
tagagaaagaaggccatattcaagagatgcttttaaggcagatggaatagacagtgatatcgataggatataagtagtgaggaggaaaaaagaattaaggataacacccagatttttagctt

SEQ ID NO: 4499 - DNA, 122 bp, Homo sapiens
  misc_feature (61)..(62): /note="This region represents a CpG dinucleotide"
  misc_feature (61)..(61): /note="Nucleotide may be methylated to form 5-methylcytosine"
acctcacattctggcagaggagacgaatggcagcataagacaaccggtatttgcataaggcgctgaaggagcataacgaaaggagaaagtctggaagccattgtccaacccttggtttcctg

SEQ ID NO: 4500 - DNA, 122 bp, Homo sapiens
  misc_feature (61)..(62): /note="This region represents a CpG dinucleotide"
  misc_feature (61)..(61): /note="Nucleotide may be methylated to form 5-methylcytosine"
cttaaaagccatctggtccctgggccttccatcatcagcattgctgctgattcattgtgccgccttctaggtaaagaggcctcatattctttcatgccaaggatgaggggccaggaaatcca

SEQ ID NO: 4501 - DNA, 122 bp, Homo sapiens
  misc_feature (61)..(62): /note="This region represents a CpG dinucleotide"
  misc_feature (61)..(61): /note="Nucleotide may be methylated to form 5-methylcytosine"
gcccagcctctaggactaaattcttggccattgtgctacactacttggcactcacggacacgttcttaagcttgttctccatggccccaactagtccagtgggttcagtagatgagggtgca

SEQ ID NO: 4502 - DNA, 122 bp, Homo sapiens
  misc_feature (61)..(62): /note="This region represents a CpG dinucleotide"
  misc_feature (61)..(61): /note="Nucleotide may be methylated to form 5-methylcytosine"
cattttggccaatgcaaatcatctactctcctctgacaagcctactcatcataacccgcacgtcttgaatcttcctagaagatgaaatcagaccagtcttgcgggctctacatggttacaac

SEQ ID NO: 4503 - DNA, 122 bp, Homo sapiens
  misc_feature (61)..(62): /note="This region represents a CpG dinucleotide"
  misc_feature (61)..(61): /note="Nucleotide may be methylated to form 5-methylcytosine"
gccattgcccttattgggccttgcctcaggagttcctctgtgtatctctggtccagattccggaggaaacctgtttgacttgagtagatgccattgcccttattgggccttgcctcaggagt

SEQ ID NO: 4504 - DNA, 122 bp, Homo sapiens
  misc_feature (61)..(62): /note="This region represents a CpG dinucleotide"
  misc_feature (61)..(61): /note="Nucleotide may be methylated to form 5-methylcytosine"
tccaccttgccataggctgttagtccaaaggcaacttacgccagcttgcagccagatggccgggggagccactgtgccttacgccctaactactgtaaaggctgcatgtggattcaggaaga

SEQ ID NO: 4505 - DNA, 122 bp, Homo sapiens
  misc_feature (61)..(62): /note="This region represents a CpG dinucleotide"
  misc_feature (61)..(61): /note="Nucleotide may be methylated to form 5-methylcytosine"
aaataagtagttttggaaaccacgaagtgctgtgccagtgatagttaccagctcctagtacgctgtctgccagccctggctggggctgaatgaatgaatgtgaataaccttccttctaaaat

SEQ ID NO: 4506 - DNA, 122 bp, Homo sapiens
  misc_feature (61)..(62): /note="This region represents a CpG dinucleotide"
  misc_feature (61)..(61): /note="Nucleotide may be methylated to form 5-methylcytosine"
gtgataggcaggtttgtggagtttctatcaggcctgcaggctgccctgggacattgctcacgggtgtggagactgtcaagatagcctgaatattaaccaagttgatcatccaagtccatact

SEQ ID NO: 4507 - DNA, 122 bp, Homo sapiens
  misc_feature (61)..(62): /note="This region represents a CpG dinucleotide"
  misc_feature (61)..(61): /note="Nucleotide may be methylated to form 5-methylcytosine"
caatgggcagccctgccaagctagcttgactagatgggttgtctcataatcctgagacaacgcagacgctctgcatcccttatcaccacctttcaacctactggggctctgtgattgattta

SEQ ID NO: 4508 - DNA, 122 bp, Homo sapiens
  misc_feature (61)..(62): /note="This region represents a CpG dinucleotide"
  misc_feature (61)..(61): /note="Nucleotide may be methylated to form 5-methylcytosine"
ggtttgcacagaaagacaatttcaaggacttatcttgaatacaacaaagggcaaccttgccgtaaatacatttaattatctgtcaatccctccagttctcttctactaaattgtgtgtgact

SEQ ID NO: 4509 - DNA, 122 bp, Homo sapiens
  misc_feature (61)..(62): /note="This region represents a CpG dinucleotide"
  misc_feature (61)..(61): /note="Nucleotide may be methylated to form 5-methylcytosine"
cctggctaattttttttttttttaacttttagtagagatggggtctcaccatgttgcccacgctagtcttgaacttggcctcccaaaatgctgggattacaaggcctgtgccaccatgccca

SEQ ID NO: 4510 - DNA, 122 bp, Homo sapiens
  misc_feature (61)..(62): /note="This region represents a CpG dinucleotide"
  misc_feature (61)..(61): /note="Nucleotide may be methylated to form 5-methylcytosine"
aattgaggaagaaccagccccaatgtggtcatgccatatgacactgcagaacccctagttcggaatggagtcaaaactgaaaagataaggcaaccaggctgatttattgtctgggtccctag

SEQ ID NO: 4511 - DNA, 122 bp, Homo sapiens
  misc_feature (61)..(62): /note="This region represents a CpG dinucleotide"
  misc_feature (61)..(61): /note="Nucleotide may be methylated to form 5-methylcytosine"
aggtctataatagtactgtgctaaaggaccagtttctttttattttcagtaagtagcagacgtaggtaggtgtacagcttgtgacatatgcaacatgaacaggtctatatcctctctataat

SEQ ID NO: 4512 - DNA, 122 bp, Homo sapiens
  misc_feature (61)..(62): /note="This region represents a CpG dinucleotide"
  misc_feature (61)..(61): /note="Nucleotide may be methylated to form 5-methylcytosine"
ttaaccacaggaggcagtatagcctatgagataaccatagaagcacatcttcaaattccacgtcatctcacagatggtcatctcaattgctgcaggccataggtaaacccacagccacacgg

SEQ ID NO: 4513 - DNA, 122 bp, Homo sapiens
  misc_feature (61)..(62): /note="This region represents a CpG dinucleotide"
  misc_feature (61)..(61): /note="Nucleotide may be methylated to form 5-methylcytosine"
ttctctaaggccttggcgatgaccctggctgcttccacgcccactgtgttgccttccagacgcagagcctccaagctgtcaaagtcttcaatctctttaatcacatctttagctgccaggga

SEQ ID NO: 4514 - DNA, 122 bp, Homo sapiens
  misc_feature (61)..(62): /note="This region represents a CpG dinucleotide"
  misc_feature (61)..(61): /note="Nucleotide may be methylated to form 5-methylcytosine"
taggacaagagaatggtaatgtggcattctagtgagaggaaatggcataagaaaaggcaacgctgtgtgggaaaaggcgacattctgaaggttaaaagaaatgaacaatttgggccgggcgc

SEQ ID NO: 4515 - DNA, 122 bp, Homo sapiens
  misc_feature (61)..(62): /note="This region represents a CpG dinucleotide"
  misc_feature (61)..(61): /note="Nucleotide may be methylated to form 5-methylcytosine"
tcatcttgcattgcttgaagccagattcacttcctgacttcctaattctatgagccagttcgttagttgggttttccttatttagttggggttcctttacttgtagtcataagaatcttaaa

SEQ ID NO: 4516 - DNA, 122 bp, Homo sapiens
  misc_feature (61)..(62): /note="This region represents a CpG dinucleotide"
  misc_feature (61)..(61): /note="Nucleotide may be methylated to form 5-methylcytosine"
agcgcaacagcacaaatgctgggagtcaagctctgacaccaccagctcctagttgtgtaacgctgggcaaggtccttaacctctcggtttctccatgtgcaagtgaagagtcacttcctcag

SEQ ID NO: 4517 - DNA, 122 bp, Homo sapiens
  misc_feature (61)..(62): /note="This region represents a CpG dinucleotide"
  misc_feature (61)..(61): /note="Nucleotide may be methylated to form 5-methylcytosine"
gcttttggtgcctcatcataccttttgggatctgttaacctgtacacatttctgtagtctcgtcattaaactatcttgctgatgacctcttctgagtatttaatttacatcctgattgattt

SEQ ID NO: 4518 - DNA, 122 bp, Homo sapiens
  misc_feature (61)..(62): /note="This region represents a CpG dinucleotide"
  misc_feature (61)..(61): /note="Nucleotide may be methylated to form 5-methylcytosine"
ccccagctcccctgttcaccccacccatatctgccttgtgcatggcaggaagtggggacacgaaggcaaatcagagccctgtgatcccatcagaacacacggactggcggtgggtggtctct

SEQ ID NO: 4519 - DNA, 122 bp, Homo sapiens
  misc_feature (61)..(62): /note="This region represents a CpG dinucleotide"
  misc_feature (61)..(61): /note="Nucleotide may be methylated to form 5-methylcytosine"
catctatcaaaattacaggcgcttagactctttgacctggcaatttcatttccaggaattcgttctatggatatccttgcacatgtaggaaatgttgtgtgcataagatcagttattacagc

SEQ ID NO: 4520 - DNA, 122 bp, Homo sapiens
  misc_feature (61)..(62): /note="This region represents a CpG dinucleotide"
  misc_feature (61)..(61): /note="Nucleotide may be methylated to form 5-methylcytosine"
agctagcactctgtcactgttagtaggtgtccggcagccaaaccattttgctctgtgctccgctggcaaggacttgcggcatcgattgctcaggatgcaggcagcctgcagcaaggtgtgtc

SEQ ID NO: 4521 - DNA, 122 bp, Homo sapiens
  misc_feature (61)..(62): /note="This region represents a CpG dinucleotide"
  misc_feature (61)..(61): /note="Nucleotide may be methylated to form 5-methylcytosine"
gaatcaaatatgacacttcctccaaaatatgtaatgatgatctttcagggattaaattcacgcttaggtttgtatagtgtgcatgttatagggaagaggaaatgaaaggttgagataagtct

SEQ ID NO: 4522 - DNA, 122 bp, Homo sapiens
  misc_feature (61)..(62): /note="This region represents a CpG dinucleotide"
  misc_feature (61)..(61): /note="Nucleotide may be methylated to form 5-methylcytosine"
aaatccaggagtagaaattgcaggattgtagggtaagtgtgtttatagtttttaaagtaacggcctattttgcattcccactggcaatgcatgagaattccagggctccaaatccttgttga

SEQ ID NO: 4523 - DNA, 122 bp, Homo sapiens
  misc_feature (61)..(62): /note="This region represents a CpG dinucleotide"
  misc_feature (61)..(61): /note="Nucleotide may be methylated to form 5-methylcytosine"
tgtgtatgaggtcaggcaagtcaccaaactgcactgtctcaatttcctcctttgatataacgcatgataatatttggaaggcagatagcatagtggtttaaggacacagactcagaagccaa

SEQ ID NO: 4524 - DNA, 122 bp, Homo sapiens
  misc_feature (61)..(62): /note="This region represents a CpG dinucleotide"
  misc_feature (61)..(61): /note="Nucleotide may be methylated to form 5-methylcytosine"
aggatggatgtatcttggaccaagatgacatccgtgttgcccatgacctgctgcttattacgtcagcttcctgggcactgcaagctggtgaagccttaccagctaagcctaagacactgcta

SEQ ID NO: 4525 - DNA, 122 bp, Homo sapiens
  misc_feature (61)..(62): /note="This region represents a CpG dinucleotide"
  misc_feature (61)..(61): /note="Nucleotide may be methylated to form 5-methylcytosine"
cgttctcagcgccatgcttggctggtgactggtcatgcaccattggcagggcctggagcacgtgcaaggaacagagttcccggctctgcacactcaacatgtgtgtttcatactgtcacctg

SEQ ID NO: 4526 - DNA, 122 bp, Homo sapiens
  misc_feature (61)..(62): /note="This region represents a CpG dinucleotide"
  misc_feature (61)..(61): /note="Nucleotide may be methylated to form 5-methylcytosine"
agaacttccggggctcataaaggatctccactgtccatcactcacttccttccttcggtgcgatgactgactggcttcttgactctcaggaaatcagtgtctggggagaagagacaaggagg

SEQ ID NO: 4527 - DNA, 122 bp, Homo sapiens
  misc_feature (61)..(62): /note="This region represents a CpG dinucleotide"
  misc_feature (61)..(61): /note="Nucleotide may be methylated to form 5-methylcytosine"
accgtctatgagctggagccttcctggggtggagacccacctgggattagaatttctctgcgtcgtggctctgacatgccattcttgggaagcagcctgtgtgggccccagcccagtgaggc

SEQ ID NO: 4528 - DNA, 122 bp, Homo sapiens
  misc_feature (61)..(62): /note="This region represents a CpG dinucleotide"
  misc_feature (61)..(61): /note="Nucleotide may be methylated to form 5-methylcytosine"
cacattcacttgtgcacggcattcttttgctcacaaattagtcacagggccagccagatacgagaggagaggactacagaagagttcaatcactggaaggcatgaatcactggagagttgtc

SEQ ID NO: 4529 - DNA, 122 bp, Homo sapiens
  misc_feature (61)..(62): /note="This region represents a CpG dinucleotide"
  misc_feature (61)..(61): /note="Nucleotide may be methylated to form 5-methylcytosine"
cagcagacctggattcaagttccagctgcagagcttgctgagcgtgtctaaccttgggtacgtcactccacgttgctgctctggccctcagacagctcatctgtaaaatggggatgaccagg

SEQ ID NO: 4530 - DNA, 122 bp, Homo sapiens
  misc_feature (61)..(62): /note="This region represents a CpG dinucleotide"
  misc_feature (61)..(61): /note="Nucleotide may be methylated to form 5-methylcytosine"
tcgtttacacaatatggatcctggtggagctttgagggctttattaataatagcatctgacggtttattgaatatgtggtgcccaattactggatttgacagtaaaaggtatatattaatga

SEQ ID NO: 4531 - DNA, 122 bp, Homo sapiens
  misc_feature (61)..(62): /note="This region represents a CpG dinucleotide"
  misc_feature (61)..(61): /note="Nucleotide may be methylated to form 5-methylcytosine"
ccttagatataagagtaaatattttgttctgccctcaattcaaatatgccctcaggagagcgacatcaacagtcatgcggttactgtatggcaggctttgtctggaaccaagcactgaaact

SEQ ID NO: 4532 - DNA, 122 bp, Homo sapiens
  misc_feature (61)..(62): /note="This region represents a CpG dinucleotide"
  misc_feature (61)..(61): /note="Nucleotide may be methylated to form 5-methylcytosine"
aatttgtcacttcattcttaaccatattatctctgctgcttaagtgagccctggttctgacgacctgaattctactcaaactagttatgcgaccttgaataagtcatctcacctttcgctaa

SEQ ID NO: 4533 - DNA, 122 bp, Homo sapiens
  misc_feature (61)..(62): /note="This region represents a CpG dinucleotide"
  misc_feature (61)..(61): /note="Nucleotide may be methylated to form 5-methylcytosine"
agcaacttgttagtcagaaggaattaagaatctttgcttccactttagctccagcccagacgtcctgaacttagagccaagcctacggcacctctgcaggtcacagagagatgcagaattgt

SEQ ID NO: 4534 - DNA, 122 bp, Homo sapiens
  misc_feature (61)..(62): /note="This region represents a CpG dinucleotide"
  misc_feature (61)..(61): /note="Nucleotide may be methylated to form 5-methylcytosine"
tggggtagggtgtattctcgctttatttacgaagctcataacaatcctgcactgaagatacgatcaccattttacggatgaaggagactgaggatcagtgattaaagaacttgcctaacttc

SEQ ID NO: 4535 - DNA, 122 bp, Homo sapiens
  misc_feature (61)..(62): /note="This region represents a CpG dinucleotide"
  misc_feature (61)..(61): /note="Nucleotide may be methylated to form 5-methylcytosine"
agtctgggcacagttccaggtcattaaggttaccacatagcaggatgacttggaagatctcgaagctaaagcctccagaaggctttagtcagagaaaggcaaggcctccctgcccgctcatc

SEQ ID NO: 4536 - DNA, 122 bp, Homo sapiens
  misc_feature (61)..(62): /note="This region represents a CpG dinucleotide"
  misc_feature (61)..(61): /note="Nucleotide may be methylated to form 5-methylcytosine"
taaagggaatcccccgatgatggtaactgactaaaaatccctgggacaacacttgtgaaccgtattcaataggctgtctaacgtccacaaggtaaacaggaacagatacttgcaaagtgaag

SEQ ID NO: 4537 - DNA, 122 bp, Homo sapiens
  misc_feature (61)..(62): /note="This region represents a CpG dinucleotide"
  misc_feature (61)..(61): /note="Nucleotide may be methylated to form 5-methylcytosine"
ctcaaaggtgaagaaaggccagatatgcctgttggaagcaggtatccctggaacctgcagcggggcagctcaggaggtggcttacacttacttaagcaagtgacttacatttacttaagcaa

SEQ ID NO: 4538 - DNA, 122 bp, Homo sapiens
  misc_feature (61)..(62): /note="This region represents a CpG dinucleotide"
  misc_feature (61)..(61): /note="Nucleotide may be methylated to form 5-methylcytosine"
ccctaagggcaggaatctcagccattgtactatatcatcagcagctgaaacagctcctggcgcctgggaggactctgaatattttcagcataatgcatgtatgcgtgggtgagcaaatccct

SEQ ID NO: 4539 - DNA, 122 bp, Homo sapiens
  misc_feature (61)..(62): /note="This region represents a CpG dinucleotide"
  misc_feature (61)..(61): /note="Nucleotide may be methylated to form 5-methylcytosine"
cagtgaaatcattctgaagccaaaacatgcctaactacgtgaaacagcattctcaccttacgggcaaaagttgtgtaataatatacatagtgtaagcttttgcttgaatcatctgaattgga

SEQ ID NO: 4540 - DNA, 122 bp, Homo sapiens
  misc_feature (61)..(62): /note="This region represents a CpG dinucleotide"
  misc_feature (61)..(61): /note="Nucleotide may be methylated to form 5-methylcytosine"
ggagtcctaatggatgagattagtgtccttataaaagaagccccagagagctgccctgcccgtaccaccatgtgaggacacagcaagaaggtgccatctatgaccagaaggccctcaccaga

SEQ ID NO: 4541 - DNA, 122 bp, Homo sapiens
  misc_feature (61)..(62): /note="This region represents a CpG dinucleotide"
  misc_feature (61)..(61): /note="Nucleotide may be methylated to form 5-methylcytosine"
ttcaatgtgctctttcagcaccattcaatctgctgagtcatgtggcccaagatcagcttgcgtagaagcttagagctgccacagaagcttctgttgctctggaatccattcaaatctatggg

SEQ ID NO: 4542 - DNA, 122 bp, Homo sapiens
  misc_feature (61)..(62): /note="This region represents a CpG dinucleotide"
  misc_feature (61)..(61): /note="Nucleotide may be methylated to form 5-methylcytosine"
caacactaacccaacttctaccacgcacagcaaggctgtgctatttaggcgtggatcacacgcacactgcgccaacttctaagctaacaatggacaaccaaagcctccggaactctgtcttg

SEQ ID NO: 4543 - DNA, 122 bp, Homo sapiens
  misc_feature (61)..(62): /note="This region represents a CpG dinucleotide"
  misc_feature (61)..(61): /note="Nucleotide may be methylated to form 5-methylcytosine"
agcacaggttctgcgctccccattcctctgattagaagttgctttctctactgaggctaacgtatgtcattctcagatttgaaagtcttttttttctcttattctcagactaagagccaaag

SEQ ID NO: 4544 - DNA, 122 bp, Homo sapiens
  misc_feature (61)..(62): /note="This region represents a CpG dinucleotide"
  misc_feature (61)..(61): /note="Nucleotide may be methylated to form 5-methylcytosine"
caaagttggacacatgggtcatgatttctaagctcctagattcctgcttaatctgcctttcgaatcatagggctttctggtatcttcagagctgtttccaggtgctctcagtagacagagtt

SEQ ID NO: 4545 - DNA, 122 bp, Homo sapiens
  misc_feature (61)..(62): /note="This region represents a CpG dinucleotide"
  misc_feature (61)..(61): /note="Nucleotide may be methylated to form 5-methylcytosine"
tcatgtgcttctggtggaagaataaattggtacaaccacattggggaacaatttgtagtacgtgtatgtaggagtcaagtcattattgacagcagaatgtcccagacattgttgaaaggggg

SEQ ID NO: 4546 - DNA, 122 bp, Homo sapiens
  misc_feature (61)..(62): /note="This region represents a CpG dinucleotide"
  misc_feature (61)..(61): /note="Nucleotide may be methylated to form 5-methylcytosine"
aaacttttgctagcctgtctacaccttcatcctagttctccaatttctccactggattcacggtcagtctgaatacattaagctgagtggaagggcagcccacacccatttgttacagctag

SEQ ID NO: 4547 - DNA, 122 bp, Homo sapiens
  misc_feature (61)..(62): /note="This region represents a CpG dinucleotide"
  misc_feature (61)..(61): /note="Nucleotide may be methylated to form 5-methylcytosine"
gagagaatctggtaaagaccaggttcacctggctgggatcatcactttcgcaagagccttcgccagtcttttgctttatctaggagccagctgacctcatcttattttcctataacttggct

SEQ ID NO: 4548 - DNA, 122 bp, Homo sapiens
  misc_feature (61)..(62): /note="This region represents a CpG dinucleotide"
  misc_feature (61)..(61): /note="Nucleotide may be methylated to form 5-methylcytosine"
ttccttatgaatcaactggggacagtaatacctcacagggttgtgaaagtaaatgagtaacgcaaattaatgcacctaccacagcacctggcacaggatgaatcataaatgaaaaactttaa

SEQ ID NO: 4549 - DNA, 122 bp, Homo sapiens
  misc_feature (61)..(62): /note="This region represents a CpG dinucleotide"
  misc_feature (61)..(61): /note="Nucleotide may be methylated to form 5-methylcytosine"
ctgatttctgtacgtcatttcccctttttcatctataaatattcttttaccaagtggctgcgctggagtctctgtgactctgctgtgattctggggttgcccaattcatgaatcattaattg

SEQ ID NO: 4550 - DNA, 122 bp, Homo sapiens
  misc_feature (61)..(62): /note="This region represents a CpG dinucleotide"
  misc_feature (61)..(61): /note="Nucleotide may be methylated to form 5-methylcytosine"
tttttataaataaagtgatagtggaatatagccatgcccatttgtttaaggaaaagcttgcggactcctgactcagtgtgttatcagttaggcagagagctaataagaaacatacaggccca

SEQ ID NO: 4551 - DNA, 122 bp, Homo sapiens
  misc_feature (61)..(62): /note="This region represents a CpG dinucleotide"
  misc_feature (61)..(61): /note="Nucleotide may be methylated to form 5-methylcytosine"
cctgaaagacactgtaaaggcatttggatgagattttccaccatctgatgcagttgcttccgctagagtttagggtttcgtcatctgaggtctgctgatctaaatctctctgcacgtgtgcc

SEQ ID NO: 4552 - DNA, 122 bp, Homo sapiens
  misc_feature (61)..(62): /note="This region represents a CpG dinucleotide"
  misc_feature (61)..(61): /note="Nucleotide may be methylated to form 5-methylcytosine"
tatgtgttcaatccattcaaattagacaaatacttatggagtgctactatgtgccagccacgttctaggatctgctgactcagcagtgaactaaacagacaaaaatccctgctttcgtggag

SEQ ID NO: 4553 - DNA, 122 bp, Homo sapiens
  misc_feature (61)..(62): /note="This region represents a CpG dinucleotide"
  misc_feature (61)..(61): /note="Nucleotide may be methylated to form 5-methylcytosine"
aataacaggtgagacaacagaggtaagtaactataggatttattgctcatgctgaattgacgagtgtcagtaggagaagcaattagtcagcagttgcagatactctctagagcagtgcttct

SEQ ID NO: 4554 - DNA, 122 bp, Homo sapiens
  misc_feature (61)..(62): /note="This region represents a CpG dinucleotide"
  misc_feature (61)..(61): /note="Nucleotide may be methylated to form 5-methylcytosine"
tgtcttaacctcctctgcccccagagtatcccagcacttcctacactgcccggcatctggcggctcaaagcacgcctactaattggtaaaaggaaatacaaagaaggtacatctgttatatc

SEQ ID NO: 4555 - DNA, 122 bp, Homo sapiens
  misc_feature (61)..(62): /note="This region represents a CpG dinucleotide"
  misc_feature (61)..(61): /note="Nucleotide may be methylated to form 5-methylcytosine"
cctgctgacagtagctggtacctgttacctactcagagtgtcacatgccacaagccagagcgtcttggcagttctcagcaccttgacatcacttccttgctaccactcagagcggcagtgac

SEQ ID NO: 4556 - DNA, 122 bp, Homo sapiens
  misc_feature (61)..(62): /note="This region represents a CpG dinucleotide"
  misc_feature (61)..(61): /note="Nucleotide may be methylated to form 5-methylcytosine"
aagaaagggcccttatgaatcatcttcaagttcctcccttccaagaacagagatgctaggcgacttgcccagaggcacacagccagcatgtagcaggattcatgcctgtgggagctggggtt

SEQ ID NO: 4557 - DNA, 122 bp, Homo sapiens
  misc_feature (61)..(62): /note="This region represents a CpG dinucleotide"
  misc_feature (61)..(61): /note="Nucleotide may be methylated to form 5-methylcytosine"
tcttatgaggaaatctgtaggtgtttatgaggcagcaaatgccaaccagagaggaggaagcgctcagcaggaatgccataatagataatcctcacacatagtggagaacaaagggaggaatg

SEQ ID NO: 4558 - DNA, 122 bp, Homo sapiens
  misc_feature (61)..(62): /note="This region represents a CpG dinucleotide"
  misc_feature (61)..(61): /note="Nucleotide may be methylated to form 5-methylcytosine"
gcctttaagaagatcatgttagccatcaaatcaaggcaaatgacataagcaagacgtgcacgtcaccactagcaaaaggtaactcgggtaaggcctggcaaggcaaatgatcaccacatgat

SEQ ID NO: 4559 - DNA, 122 bp, Homo sapiens
  misc_feature (61)..(62): /note="This region represents a CpG dinucleotide"
  misc_feature (61)..(61): /note="Nucleotide may be methylated to form 5-methylcytosine"
gagccaaatatccttatcctttcttggtcctgatgaattctgaagctgttacttgctcttcggtggatactttgactggcagggtggggaaggtgtcacaggaggatatttctgctggcact

SEQ ID NO: 4560 - DNA, 122 bp, Homo sapiens
  misc_feature (61)..(62): /note="This region represents a CpG dinucleotide"
  misc_feature (61)..(61): /note="Nucleotide may be methylated to form 5-methylcytosine"
tgattgttagtgcctcttatggggcctggcccagcccccctttcatggttggcagttgtacgagaagctgcagagaaggcacatgatccgttctatgcttgtgtgacaaactgttagcagaa

SEQ ID NO: 4561 - DNA, 122 bp, Homo sapiens
  misc_feature (61)..(62): /note="This region represents a CpG dinucleotide"
  misc_feature (61)..(61): /note="Nucleotide may be methylated to form 5-methylcytosine"
cggccgtctgcaggcctgcggctggagcctgcccgccaagtacaagcaggtgcgggcgggcgctgcggggaccgggcggggccccgcagaggcggggcgggggtaaggggcggggcgctgtg

SEQ ID NO: 4562 - DNA, 122 bp, Homo sapiens
  misc_feature (61)..(62): /note="This region represents a CpG dinucleotide"
  misc_feature (61)..(61): /note="Nucleotide may be methylated to form 5-methylcytosine"
ttgcctccaggattttggacagattgacctttctgcctggaatgctcttccccattagcccgtgtttctccttcaggtctcagggatcttaaagatcacttcctctagggagtctctctgat

SEQ ID NO: 4563 - DNA, 122 bp, Homo sapiens
  misc_feature (61)..(62): /note="This region represents a CpG dinucleotide"
  misc_feature (61)..(61): /note="Nucleotide may be methylated to form 5-methylcytosine"
gacagaaataagcaactatcagaggtccaagaaaggggctgtactgtgctgatgtcattacgtgtacactctgtggatgatcatgtctgggaactcctatggcccaacctctttgtcctgag

SEQ ID NO: 4564 - DNA, 122 bp, Homo sapiens
  misc_feature (61)..(62): /note="This region represents a CpG dinucleotide"
  misc_feature (61)..(61): /note="Nucleotide may be methylated to form 5-methylcytosine"
catgatctacccgcctcggcctcccaaagtgctgggattacaggcgtgagccaccgcgcccggccaagttattcttttaagtggcagcttaaccctagcacagcagatttattttctgaggt

SEQ ID NO: 4565 - DNA, 122 bp, Homo sapiens
  misc_feature (61)..(62): /note="This region represents a CpG dinucleotide"
  misc_feature (61)..(61): /note="Nucleotide may be methylated to form 5-methylcytosine"
ccagcacttaacagttctgactcatcattcagggcacaaatggtttccttagcaaccttgcgaaagacagtgcttgaaacttctttctttatccatcaaaacccaaagaggtatattaaaat

SEQ ID NO: 4566 - DNA, 122 bp, Homo sapiens
  misc_feature (61)..(62): /note="This region represents a CpG dinucleotide"
  misc_feature (61)..(61): /note="Nucleotide may be methylated to form 5-methylcytosine"
accagcaggctcgggctgccacatgctctcagatcccagagtgttgggtttggtgtctagcgcaagagtggcacagggccccagggccctgccctcgacacacagtgctgagtcccatggcc

SEQ ID NO: 4567 - DNA, 122 bp, Homo sapiens
  misc_feature (61)..(62): /note="This region represents a CpG dinucleotide"
  misc_feature (61)..(61): /note="Nucleotide may be methylated to form 5-methylcytosine"
caggcctgtctattccaggacatacggcagggagctgcatggggtgctcatggccggccacgtggggaggggtgtgcccattctgcaggatttctgaggcacagtagtatcatggaaactgg

SEQ ID NO: 4568 - DNA, 122 bp, Homo sapiens
  misc_feature (61)..(62): /note="This region represents a CpG dinucleotide"
  misc_feature (61)..(61): /note="Nucleotide may be methylated to form 5-methylcytosine"
cacaggtagacacacccacacaacatcgcggtgacacacaaacatcctgccagagccagacgcatccctgaggccccatcaggtcacagccggagtcacagtgtcacatgcacctgtcaaat

SEQ ID NO: 4569 - DNA, 122 bp, Homo sapiens
  misc_feature (61)..(62): /note="This region represents a CpG dinucleotide"
  misc_feature (61)..(61): /note="Nucleotide may be methylated to form 5-methylcytosine"
atgacttgggatttgatgggagctcagggagccaaggaaggcaaagagaagcaggagccccgccacacacattgcaagtggtggattgctggctgtggttttcctggaaggctcttaaatgg

SEQ ID NO: 4570 - DNA, 122 bp, Homo sapiens
  misc_feature (61)..(62): /note="This region represents a CpG dinucleotide"
  misc_feature (61)..(61): /note="Nucleotide may be methylated to form 5-methylcytosine"
gcacagtaacacactgcattgttttacatgtatctttgcctcacttcccttttttttccacgcttatttccctgttcttatgccttgcaaatacagtgtcagcactttaatccttgcttaaa

SEQ ID NO: 4571 - DNA, 122 bp, Homo sapiens
  misc_feature (61)..(62): /note="This region represents a CpG dinucleotide"
  misc_feature (61)..(61): /note="Nucleotide may be methylated to form 5-methylcytosine"
ttctgctcccagatgttcctgcagcagccagctgtatccctgagcttcagcagcacccagcgacctgaggctcagcagcagctacagcaaaggtcagctgcagtgactcagccccagctcgg

SEQ ID NO: 4572 - DNA, 122 bp, Homo sapiens
  misc_feature (61)..(62): /note="This region represents a CpG dinucleotide"
  misc_feature (61)..(61): /note="Nucleotide may be methylated to form 5-methylcytosine"
ggtggggcccagaagatactgactactcattaatacctaaccttgctttgtctgtatccacgtaaagacacctcgtttactctctattgttggctcatgagcgttggactataattcatgcc

SEQ ID NO: 4573 - DNA, 122 bp, Homo sapiens
  misc_feature (61)..(62): /note="This region represents a CpG dinucleotide"
  misc_feature (61)..(61): /note="Nucleotide may be methylated to form 5-methylcytosine"
ataagattgccagtggccagcagaagacgaaagggaatgcctgcctaggagagaagagcacgccttgtgcaaacatcaaagcgctgcttctaagaggggtaatttttatattgctattggca

SEQ ID NO: 4574 - DNA, 122 bp, Homo sapiens
  misc_feature (61)..(62): /note="This region represents a CpG dinucleotide"
  misc_feature (61)..(61): /note="Nucleotide may be methylated to form 5-methylcytosine"
tctggttttggtagaaccaccctgcatagctgtgccacacagggagtttctctcctagctcgtgaccagcagtacactgttgttgcatgttagttttgctaggtttgtaatggaatgatggc

SEQ ID NO: 4575 - DNA, 122 bp, Homo sapiens
  misc_feature (61)..(62): /note="This region represents a CpG dinucleotide"
  misc_feature (61)..(61): /note="Nucleotide may be methylated to form 5-methylcytosine"
agtatcttaagtaaactgaaatgacttctgaattgctgtggtcaggcagttccctcagggcgaagcatggatctcaaccatcagggcagccccagcaataaggatggctcctgccacacaga

SEQ ID NO: 4576 - DNA, 122 bp, Homo sapiens
  misc_feature (61)..(62): /note="This region represents a CpG dinucleotide"
  misc_feature (61)..(61): /note="Nucleotide may be methylated to form 5-methylcytosine"
caaggctacaagaaaacctggcctttccctgacactgccttggccttgattgcctcagtgcggagagtaaaacaagctgtcagactcagctcctgccctatccttgagctctaataacctca

SEQ ID NO: 4577 - DNA, 122 bp, Homo sapiens
  misc_feature (61)..(62): /note="This region represents a CpG dinucleotide"
  misc_feature (61)..(61): /note="Nucleotide may be methylated to form 5-methylcytosine"
ggggcctaaggaagcctaagagctcatcacacctttggtctgagtcacctccttgcgaggcgcacctcttcctcttcctaactttagttgctaacactgtgccaggtccgtcttctcagggg

SEQ ID NO: 4578 - DNA, 122 bp, Homo sapiens
  misc_feature (61)..(62): /note="This region represents a CpG dinucleotide"
  misc_feature (61)..(61): /note="Nucleotide may be methylated to form 5-methylcytosine"
tacaggctttggagtctgagtttttgaataggagcaccaccgcttaacgtcaccacctgacgttagtaagggtgtcaggacttcatttcattatctctgaagtgagggatcatatgccttcc

SEQ ID NO: 4579 - DNA, 122 bp, Homo sapiens
  misc_feature (61)..(62): /note="This region represents a CpG dinucleotide"
  misc_feature (61)..(61): /note="Nucleotide may be methylated to form 5-methylcytosine"
accaacatacagagaggtttgaaaacgtgtctgagctgggtttggaatgcaggtcttactcggcccagtctgtgcttttgctctgagatcatattgctgtctttagaaggatgaagctgttt

SEQ ID NO: 4580 - DNA, 122 bp, Homo sapiens
  misc_feature (61)..(62): /note="This region represents a CpG dinucleotide"
  misc_feature (61)..(61): /note="Nucleotide may be methylated to form 5-methylcytosine"
catgtcacccttggctccctatattgtctcttcatctggtttcttagctcctccttttcccgcttccaccgagtttttgtactgctcctgtcactttgcttctcagaagttcagaagcaatt

SEQ ID NO: 4581 - DNA, 122 bp, Homo sapiens
  misc_feature (61)..(62): /note="This region represents a CpG dinucleotide"
  misc_feature (61)..(61): /note="Nucleotide may be methylated to form 5-methylcytosine"
gacttattgcagtgtctttttgaatgtgtttttacatgtcaactccactttacatgctttcgtatgaaggaatgacttgtgcccagagcagatgcatgcaactgtgtgtacatgtctgagtg

SEQ ID NO: 4582 - DNA, 122 bp, Homo sapiens
  misc_feature (61)..(62): /note="This region represents a CpG dinucleotide"
  misc_feature (61)..(61): /note="Nucleotide may be methylated to form 5-methylcytosine"
gagagatttgaagtatgaggaagactcaagtgccattgctgcttgaagatggcagcaccacgtgagaaggaatacctcaaggaactgaaagtggcccttgcctaacagtcagcaaggaaaga

SEQ ID NO: 4583 - DNA, 122 bp, Homo sapiens
  misc_feature (61)..(62): /note="This region represents a CpG dinucleotide"
  misc_feature (61)..(61): /note="Nucleotide may be methylated to form 5-methylcytosine"
ggcagggctctgttctttcctatattttcccttccttcacacactaatctctttggattacgcaaacccccaagttgttgggcaattgtgtaccagagagtagagggagatgagaggcctta

SEQ ID NO: 4584 - DNA, 122 bp, Homo sapiens
  misc_feature (61)..(62): /note="This region represents a CpG dinucleotide"
  misc_feature (61)..(61): /note="Nucleotide may be methylated to form 5-methylcytosine"
gccgagttctgtttcctcttgggttgggacatgctgctgagtacgtcaggcctcgggtggcgctcattgggtaagacgataacagagcagggccactcccttctcactttgctgccagaggt

SEQ ID NO: 4585 - DNA, 122 bp, Homo sapiens
  misc_feature (61)..(62): /note="This region represents a CpG dinucleotide"
  misc_feature (61)..(61): /note="Nucleotide may be methylated to form 5-methylcytosine"
ccctccctccatgagtaagtcaccaaactgggacagaaggacagacagttggccggactccggccccatgactggctcataaaagccaccagcaattacagtgatgctgaggttgtgccggc

SEQ ID NO: 4586 - DNA, 122 bp, Homo sapiens
  misc_feature (61)..(62): /note="This region represents a CpG dinucleotide"
  misc_feature (61)..(61): /note="Nucleotide may be methylated to form 5-methylcytosine"
tcctattctccttcttcccattgattatgggtgtggctgaaccactcagaaattcatcaccggtaaccaagtgagttcaatggtctttgaatgggttgcaggctgtgggtgtggtgtggtgg

SEQ ID NO: 4587 - DNA, 122 bp, Homo sapiens
  misc_feature (61)..(62): /note="This region represents a CpG dinucleotide"
  misc_feature (61)..(61): /note="Nucleotide may be methylated to form 5-methylcytosine"
ctttactccccaagtccagctcttggctcaaaagggctctgcaggttggtacaaaggctgcggaaaggcgaagtcgcggtacaatcggtgttaactacatgtgcagccaccgtcttcttagt

SEQ ID NO: 4588 - DNA, 122 bp, Homo sapiens
  misc_feature (61)..(62): /note="This region represents a CpG dinucleotide"
  misc_feature (61)..(61): /note="Nucleotide may be methylated to form 5-methylcytosine"
ttatggcctttgatctcaaatttacttttaaagaagaaaaaggaatggtgacttttagtacggctgattgccacagtcatagtgataagatgctctgctcttgaacgtcagtacacattgca

SEQ ID NO: 4589 - DNA, 122 bp, Homo sapiens
  misc_feature (61)..(62): /note="This region represents a CpG dinucleotide"
  misc_feature (61)..(61): /note="Nucleotide may be methylated to form 5-methylcytosine"
cagctcttagcatcttagcatcttaacataccaaagaaactttctggtttgctggggagacgaggacatgataaagctgaagattgtgaaccactcaaaaaggagcacagattaaagtaatt

SEQ ID NO: 4590 - DNA, 122 bp, Homo sapiens
  misc_feature (61)..(62): /note="This region represents a CpG dinucleotide"
  misc_feature (61)..(61): /note="Nucleotide may be methylated to form 5-methylcytosine"
ggaaagcttcctatatgaagtgaaatatgaattgagcatttcagagtgaaggacatgccacgcagagggattagcataaattgggtgtatctgtacagcacctggtaagttctgttaattat

SEQ ID NO: 4591 - DNA, 122 bp, Homo sapiens
  misc_feature (61)..(62): /note="This region represents a CpG dinucleotide"
  misc_feature (61)..(61): /note="Nucleotide may be methylated to form 5-methylcytosine"
cctactcctctgatggactccccaatttcagttcatggcaacttcatctttcccgttgctcggaacaaaaagcctcttttgattacaccccacacccaatctgatggcaaactggtttgtgt

SEQ ID NO: 4592 - DNA, 122 bp, Homo sapiens
  misc_feature (61)..(62): /note="This region represents a CpG dinucleotide"
  misc_feature (61)..(61): /note="Nucleotide may be methylated to form 5-methylcytosine"
gcattagcatgacaggaacaggaacattgctcagctcattgatctgaaaagcaaggagaacgtaaggctctcagccaggaggccacctgcctcagagacactaagctacaatgtggatgcca

SEQ ID NO: 4593 - DNA, 122 bp, Homo sapiens
  misc_feature (61)..(62): /note="This region represents a CpG dinucleotide"
  misc_feature (61)..(61): /note="Nucleotide may be methylated to form 5-methylcytosine"
cccctattttacagataaggaaactaaatgtcagagagttcaataattttcccaagatcacgaagccaataagtgatggagtcatgacttaaattcaggtcttttggtgacacaacccagac

SEQ ID NO: 4594 - DNA, 122 bp, Homo sapiens
  misc_feature (61)..(62): /note="This region represents a CpG dinucleotide"
  misc_feature (61)..(61): /note="Nucleotide may be methylated to form 5-methylcytosine"
agtcattagtttcattctacagctatacagagagctcatgtaaattcctgaaggctgcaccgcctacaagtggtggggctggagttcgcacgttgctcttgtgccctggagtgatggcagca

SEQ ID NO: 4595 - DNA, 122 bp, Homo sapiens
  misc_feature (61)..(62): /note="This region represents a CpG dinucleotide"
  misc_feature (61)..(61): /note="Nucleotide may be methylated to form 5-methylcytosine"
gtgtatatgcagaggtatgccaggctctgccccttaaagtttgggggccggcggaggcggcgccgtggccgggagaaagtgtctctcatttaggagggtttgcaggtccagagtaaagtcac

SEQ ID NO: 4596 - DNA, 122 bp, Homo sapiens
  misc_feature (61)..(62): /note="This region represents a CpG dinucleotide"
  misc_feature (61)..(61): /note="Nucleotide may be methylated to form 5-methylcytosine"
cgcagatctcattttacagatgagaaaactgaggctcaagatttatagcttaggcaagggcgcctatctagtaagtggtaaaggtatgagtcaaagcccatagtatgaaccatattatgcta

SEQ ID NO: 4597 - DNA, 122 bp, Homo sapiens
  misc_feature (61)..(62): /note="This region represents a CpG dinucleotide"
  misc_feature (61)..(61): /note="Nucleotide may be methylated to form 5-methylcytosine"
atgaaatgcaaggaaaggagaaaaacattatgacataagtattaagaaagatgctgtttacgggaactctgaaagactggaattcagagccgctaccaattaagaaagttaatgatgacttg

SEQ ID NO: 4598 - DNA, 122 bp, Homo sapiens
  misc_feature (61)..(62): /note="This region represents a CpG dinucleotide"
  misc_feature (61)..(61): /note="Nucleotide may be methylated to form 5-methylcytosine"
ggatactggctgtttggaattattcatgctacctgttcccattagcagatagtggtatggcgtttgctgaccctagctgtcactcagtggtaggagcacagcgtttattcttcctgtttcag

SEQ ID NO: 4599 - DNA, 122 bp, Homo sapiens
  misc_feature (61)..(62): /note="This region represents a CpG dinucleotide"
  misc_feature (61)..(61): /note="Nucleotide may be methylated to form 5-methylcytosine"
aggttaagcaacttgcccagcatcacacagctagtaaatggtgagcctaagatgccttcacgggtctgggagtccaccgtctatgctcttaaccatcaagctgacctgttttacctgctgtg

SEQ ID NO: 4600 - DNA, 122 bp, Homo sapiens
  misc_feature (61)..(62): /note="This region represents a CpG dinucleotide"
  misc_feature (61)..(61): /note="Nucleotide may be methylated to form 5-methylcytosine"
caaggctcctgggtctttgcttgccttttcaaaagtgtttcaggcagtgaaacaggaacccgcataaaagctgggttcagataacaccgagatgggtcagcagctttgaatcccaacactcg

SEQ ID NO: 4601 - DNA, 122 bp, Homo sapiens
  misc_feature (61)..(62): /note="This region represents a CpG dinucleotide"
  misc_feature (61)..(61): /note="Nucleotide may be methylated to form 5-methylcytosine"
ttgagttttgtgctatgcttttcagcttccaggggacccaagtgttcattccaaagggatcgcttgaaaaatataatctcaggatttacaaatcaaacccaaaatacaaggataagcaggcc

SEQ ID NO: 4602 - DNA, 122 bp, Homo sapiens
  misc_feature (61)..(62): /note="This region represents a CpG dinucleotide"
  misc_feature (61)..(61): /note="Nucleotide may be methylated to form 5-methylcytosine"
aatcgaaaatctgatgatcccaactgggtacttttcaggaaaggagtgggaggctgcccacgtatattgagtgcctacagtgtgccagggcacctgctgatttatttgattcatacagtagc

SEQ ID NO: 4603 - DNA, 122 bp, Homo sapiens
  misc_feature (61)..(62): /note="This region represents a CpG dinucleotide"
  misc_feature (61)..(61): /note="Nucleotide may be methylated to form 5-methylcytosine"
tacagtgtactggatggaggcagaatgtgaacacagacacagattgtgcaaattggggtgcggctgttgagatgacaactattgtttctttagggagaagttctccaaaaaattcctccctg

SEQ ID NO: 4604 - DNA, 122 bp, Homo sapiens
  misc_feature (61)..(62): /note="This region represents a CpG dinucleotide"
  misc_feature (61)..(61): /note="Nucleotide may be methylated to form 5-methylcytosine"
taacactttagcctctgctaatcacttgctggtatcagatgagcctcttcccctccctggcgtgttttgtggttttatgtgttaacttcagagatgcactgacatgcgtcagtgaaaaagga

SEQ ID NO: 4605 - DNA, 122 bp, Homo sapiens
  misc_feature (61)..(62): /note="This region represents a CpG dinucleotide"
  misc_feature (61)..(61): /note="Nucleotide may be methylated to form 5-methylcytosine"
cctgccagacctgcagcctccagaactatgaggcaagggcttcctgttgctcaagcctggcggtttgtggtgctttgtaaagtgggtagtcctagcaaagccaggcaggatctgcagggtcg

SEQ ID NO: 4606 - DNA, 122 bp, Homo sapiens
  misc_feature (61)..(62): /note="This region represents a CpG dinucleotide"
  misc_feature (61)..(61): /note="Nucleotide may be methylated to form 5-methylcytosine"
tcagtaggggttttgatgctgcaaggccttggagggcattttcaaaggtctacccttgcccgcccctgctgttaggaacacaggaacagggaaagaatgtgccagttacttctggaacagat

SEQ ID NO: 4607 - DNA, 122 bp, Homo sapiens
  misc_feature (61)..(62): /note="This region represents a CpG dinucleotide"
  misc_feature (61)..(61): /note="Nucleotide may be methylated to form 5-methylcytosine"
gtttgactgattgggtcaaattacacaagatctagctagatattcagattccctccaatgcgtctgtgttgtgtaatcctccctgccttgtaaaggaacagatctgattggccagggattgc

SEQ ID NO: 4608 - DNA, 122 bp, Homo sapiens
  misc_feature (61)..(62): /note="This region represents a CpG dinucleotide"
  misc_feature (61)..(61): /note="Nucleotide may be methylated to form 5-methylcytosine"
ctccttgagtagcaagatcatccaggatttaagtgactcttgcttcggtttcctaaaaagcgccctggaggttcccaggctttaccgaagaaccaataaggtcagcgccatttatgggagag

SEQ ID NO: 4609 - DNA, 122 bp, Homo sapiens
  misc_feature (61)..(62): /note="This region represents a CpG dinucleotide"
  misc_feature (61)..(61): /note="Nucleotide may be methylated to form 5-methylcytosine"
cgatggttagcattttctaagtgaagcatatctgagcctattccaggcctgactgacacccgctgagttcgtaattgtagcttgagcacaggtccttagcagataatgtcctaccggttctt

SEQ ID NO: 4610 - DNA, 122 bp, Homo sapiens
  misc_feature (61)..(62): /note="This region represents a CpG dinucleotide"
  misc_feature (61)..(61): /note="Nucleotide may be methylated to form 5-methylcytosine"
tcatcgtgggtcaggtggtagtacttggccgactggtccagcacagctgagtcctgaggccggaccgaagacagtgagcagggcagccctaggcctgcctgcctgcctgcccgcttgcccgc

SEQ ID NO: 4611 - DNA, 122 bp, Homo sapiens
  misc_feature (61)..(62): /note="This region represents a CpG dinucleotide"
  misc_feature (61)..(61): /note="Nucleotide may be methylated to form 5-methylcytosine"
gagagagtagggggaccgctgagctctgtccacagactagagcaggaaaggggggaaaggcggcgatagaggttagcaggaatgtttaattatcaggagcaggaacagaactgagggcatgc

SEQ ID NO: 4612 - DNA, 122 bp, Homo sapiens
  misc_feature (61)..(62): /note="This region represents a CpG dinucleotide"
  misc_feature (61)..(61): /note="Nucleotide may be methylated to form 5-methylcytosine"
accctcatgctggaagcattcaagaacacagaggagcacagccccacccagccatgtccacgtgtaaagatctaatgtcccagagagaggaaaatatgcaagctttagaaacatgacagaat

SEQ ID NO: 4613 - DNA, 122 bp, Homo sapiens
  misc_feature (61)..(62): /note="This region represents a CpG dinucleotide"
  misc_feature (61)..(61): /note="Nucleotide may be methylated to form 5-methylcytosine"
aaaacctttctgggaaaatccaagttgcctgaactactgttgggaggaagtatggtaacacgtgaagatgactctggtcctttgggttaagtgatgacttaacaaaattcatcaggattcca

SEQ ID NO: 4614 - DNA, 122 bp, Homo sapiens
  misc_feature (61)..(62): /note="This region represents a CpG dinucleotide"
  misc_feature (61)..(61): /note="Nucleotide may be methylated to form 5-methylcytosine"
cacgtgactgcggagagtgtggatgtgaggccagtgaaagttatctacctggagaagtgacgagtatgttgtttggatgagtcaaagcttatgtgcctcacttagtgtgcgttgccttgcag

SEQ ID NO: 4615 - DNA, 122 bp, Homo sapiens
  misc_feature (61)..(62): /note="This region represents a CpG dinucleotide"
  misc_feature (61)..(61): /note="Nucleotide may be methylated to form 5-methylcytosine"
agagactcctcttcctctctttgactcatcttaaataagcatgttcaatttcaaaacaaacgtgactcattttgactaaaagccctaccaccaacagctactacagcttacaacaaaccggt

SEQ ID NO: 4616 - DNA, 122 bp, Homo sapiens
  misc_feature (61)..(62): /note="This region represents a CpG dinucleotide"
  misc_feature (61)..(61): /note="Nucleotide may be methylated to form 5-methylcytosine"
acagcctgaatctgtgtgtccctcccaaaattcatatactgaaattctaactcctaatgtcgttgcattaggaggtggcatctttgggaggtaatcggggttagagaccatgagggtggtgc

SEQ ID NO: 4617 - DNA, 122 bp, Homo sapiens
  misc_feature (61)..(62): /note="This region represents a CpG dinucleotide"
  misc_feature (61)..(61): /note="Nucleotide may be methylated to form 5-methylcytosine"
tcttggtactccagccacatcaccctttcagttctactaatattgaatgcagaattagcacgtgccatccctcacccttcttgatcctttgactcttagctaatgaggattttctcagggaa

SEQ ID NO: 4618 - DNA, 122 bp, Homo sapiens
  misc_feature (61)..(62): /note="This region represents a CpG dinucleotide"
  misc_feature (61)..(61): /note="Nucleotide may be methylated to form 5-methylcytosine"
ttggcctgattcaggcggggtgctaagctttgaagcaaagggcctgttgtttctgccctccgctaaggtaggcagtggaggaggggcgggaggatggcgtaacctcttaggagtgatggctt

SEQ ID NO: 4619 - DNA, 122 bp, Homo sapiens
  misc_feature (61)..(62): /note="This region represents a CpG dinucleotide"
  misc_feature (61)..(61): /note="Nucleotide may be methylated to form 5-methylcytosine"
tgctctcctgccagcctcaggcaggatccagcctgcagaggacaaatgggcagccctggtcgtgtgtggggaggagatgtgagggcgtgaggaggctgggcaaccttggccactcagtgcct

SEQ ID NO: 4620 - DNA, 122 bp, Homo sapiens
  misc_feature (61)..(62): /note="This region represents a CpG dinucleotide"
  misc_feature (61)..(61): /note="Nucleotide may be methylated to form 5-methylcytosine"
atcaagacaatgggagaatgactccaaaggcacttcagagatctttgaggctgccactctcgtcacaggcccggagtgctagggccttgagggaagaacgtttcaaaggagatcccagggca

SEQ ID NO: 4621 - DNA, 122 bp, Homo sapiens
  misc_feature (61)..(62): /note="This region represents a CpG dinucleotide"
  misc_feature (61)..(61): /note="Nucleotide may be methylated to form 5-methylcytosine"
ccgtaaaatgggcatagtaagaatatgtacttcatggggtgttggacaggtaaactgaggcgaatgcatctgagtcataatgggtgatgtgtattgaatgcaagctgcctgccaagccttgg

SEQ ID NO: 4622 - DNA, 122 bp, Homo sapiens
  misc_feature (61)..(62): /note="This region represents a CpG dinucleotide"
  misc_feature (61)..(61): /note="Nucleotide may be methylated to form 5-methylcytosine"
ttaggatttggatgtgatcccaaatttctacaccctgaagctcagtcttctgtcatttggcgtgttagctttctgtcaggaaaccttttgctgttctttttttaatgtgtccagggctcttt

SEQ ID NO: 4623 - DNA, 122 bp, Homo sapiens
  misc_feature (61)..(62): /note="This region represents a CpG dinucleotide"
  misc_feature (61)..(61): /note="Nucleotide may be methylated to form 5-methylcytosine"
cgatgtgctgctcttctcaggagagtttcaaatggcaacttcagctttctaaaacccctacgttctgaatatacctgtgtttctgcacagcatacgttttgaaacagcctaggaaatatatt

SEQ ID NO: 4624 - DNA, 122 bp, Homo sapiens
  misc_feature (61)..(62): /note="This region represents a CpG dinucleotide"
  misc_feature (61)..(61): /note="Nucleotide may be methylated to form 5-methylcytosine"
gtaaatataatttagtgtctgtgggctatatggtctctgtcacaactgtgcagactttgccgtctcatcacaaaggcagccgtagacaacacattaacgaatgagttcgaatgagttactgt

SEQ ID NO: 4625 - DNA, 122 bp, Homo sapiens
  misc_feature (61)..(62): /note="This region represents a CpG dinucleotide"
  misc_feature (61)..(61): /note="Nucleotide may be methylated to form 5-methylcytosine"
ttcgctactttggcagcataataaatgactaagcacctgattatgcacctaatcatttctcgtcttcgactgttaattctttcatttaagtacttgtctccccagtaagtaaaataagccac

SEQ ID NO: 4626 - DNA, 122 bp, Homo sapiens
  misc_feature (61)..(62): /note="This region represents a CpG dinucleotide"
  misc_feature (61)..(61): /note="Nucleotide may be methylated to form 5-methylcytosine"
gtttgccatgtgagaaatggaagaaaggcaggcaaaaaaagaacaagccaagagtcccagcggagacttggccaagtgtcctgggctgctggaacattcccctttgaaggtacaagccatct

SEQ ID NO: 4627 - DNA, 122 bp, Homo sapiens
  misc_feature (61)..(62): /note="This region represents a CpG dinucleotide"
  misc_feature (61)..(61): /note="Nucleotide may be methylated to form 5-methylcytosine"
cagagaaagctctgaccccaagagaaaccgacatcatacacacacacacacacacacacacgcagggcagaggaatatgtggtttctcaaacggattcctaaaacatacatatatatataat

SEQ ID NO: 4628 - DNA, 122 bp, Homo sapiens
  misc_feature (61)..(62): /note="This region represents a CpG dinucleotide"
  misc_feature (61)..(61): /note="Nucleotide may be methylated to form 5-methylcytosine"
taggtcggggtggagcctcagaggctgtatctgaatgagcccctaagtggatctgctgctcggaagaggtcagtgtggaaaagcctgtcttcccaggctgttccacagaatccaaaacaggc

SEQ ID NO: 4629 - DNA, 122 bp, Homo sapiens
  misc_feature (61)..(62): /note="This region represents a CpG dinucleotide"
  misc_feature (61)..(61): /note="Nucleotide may be methylated to form 5-methylcytosine"
ttttctttgtggttttaagcagaaaatcacacatgttcatgctgcctcaatctgacatgtcgtattaacccttttcatgtgactttcataaggcaggatattgcaggccattcaggagatgt

SEQ ID NO: 4630 - DNA, 122 bp, Homo sapiens
  misc_feature (61)..(62): /note="This region represents a CpG dinucleotide"
  misc_feature (61)..(61): /note="Nucleotide may be methylated to form 5-methylcytosine"
tattggcggaaaggattatgaggtcgtataactgcactcccgtcagcagcccgcgtctgccgcccacgtacatgcacgccatgtggtgagtgtttcaggatcctccaggtgccgtgctcccc

SEQ ID NO: 4631 - DNA, 122 bp, Homo sapiens
  misc_feature (61)..(62): /note="This region represents a CpG dinucleotide"
  misc_feature (61)..(61): /note="Nucleotide may be methylated to form 5-methylcytosine"
atagtgtgcttctgggtggggccacaggaccagtgggcggtccaggtagagccatgcgaacgcccgaaaagacgtctcaaaaggccaatcttaggttaaaccacagtgatgttatctgtagg

SEQ ID NO: 4632 - DNA, 122 bp, Homo sapiens
  misc_feature (61)..(62): /note="This region represents a CpG dinucleotide"
  misc_feature (61)..(61): /note="Nucleotide may be methylated to form 5-methylcytosine"
tgaaaggcagctaagggaacaggaaagatcactggcatctagtcctagttcaattatggacgaaccatgtgatcttgggcctcctggacctcagtttcctcatatgcaaatgctagggttgg

SEQ ID NO: 4633 - DNA, 122 bp, Homo sapiens
  misc_feature (61)..(62): /note="This region represents a CpG dinucleotide"
  misc_feature (61)..(61): /note="Nucleotide may be methylated to form 5-methylcytosine"
atccgcccgcctcggcctcccaaagtgctgagattacgggtgtgagccaccgcgcccagccgatcctccagaatgttttgcaacaggttgagaagccctggggtagaagtgaaacaagactc

SEQ ID NO: 4634 - DNA, 122 bp, Homo sapiens
  misc_feature (61)..(62): /note="This region represents a CpG dinucleotide"
  misc_feature (61)..(61): /note="Nucleotide may be methylated to form 5-methylcytosine"
attacagttgagagcagagcaaatcctttaattgtataagagcatcagattaagcagtaacgtccatgcagttcattctgctagctggtagtctcttctcagaaacaaatgtttactaagta

SEQ ID NO: 4635 - DNA, 122 bp, Homo sapiens
  misc_feature (61)..(62): /note="This region represents a CpG dinucleotide"
  misc_feature (61)..(61): /note="Nucleotide may be methylated to form 5-methylcytosine"
acagagtaaatccaggatttcctctccaagcagtgagtaaatgtcatctatgtaagtactcgttattcctgttgttgacttgatttacacagaaaaaaaaatcgtacctgaaaaatacattt

SEQ ID NO: 4636 - DNA, 122 bp, Homo sapiens
  misc_feature (61)..(62): /note="This region represents a CpG dinucleotide"
  misc_feature (61)..(61): /note="Nucleotide may be methylated to form 5-methylcytosine"
cttgcccaaggccacatgtttgcatggtggtgattacaccacatggccttttgaaactgacgcttttgttcctgaactctctcctctttttaaatcatcattaccacttctctacccaccac

SEQ ID NO: 4637 - DNA, 122 bp, Homo sapiens
  misc_feature (61)..(62): /note="This region represents a CpG dinucleotide"
  misc_feature (61)..(61): /note="Nucleotide may be methylated to form 5-methylcytosine"
ttttaaaaactctgacctttgaatcacttagaccttgagaaaccctccaggagttacacacggcattaacattttgaagtgtacaggaagcagttagttgagaaaatagttttccatgtttc

SEQ ID NO: 4638 - DNA, 122 bp, Homo sapiens
  misc_feature (61)..(62): /note="This region represents a CpG dinucleotide"
  misc_feature (61)..(61): /note="Nucleotide may be methylated to form 5-methylcytosine"
caactctcaaccttaattccgtctcatgacatggtgaccgctcatgatctcatgatctcacgtctctggacttcacccttcccctgcctgcaatgtccttcttagtccctcctcggctggtc

SEQ ID NO: 4639 - DNA, 122 bp, Homo sapiens
  misc_feature (61)..(62): /note="This region represents a CpG dinucleotide"
  misc_feature (61)..(61): /note="Nucleotide may be methylated to form 5-methylcytosine"
tttagatatgttcagattcacaaataccattgtgttacagtcgcctgcagtgttcagtaccgtctcatgctgtacgggtatgaggcctaggagcaacaggctgtacagcatgacttaggtgt

SEQ ID NO: 4640 - DNA, 122 bp, Homo sapiens
  misc_feature (61)..(62): /note="This region represents a CpG dinucleotide"
  misc_feature (61)..(61): /note="Nucleotide may be methylated to form 5-methylcytosine"
gaatggtcttttgtttatatatatatatatatatatatatatatatatatatttttaaatcggagtcttgtcacccaggctggtatgcaatgacgtgatctcggctcactgtaaccttcacc

SEQ ID NO: 4641 - DNA, 122 bp, Homo sapiens
  misc_feature (61)..(62): /note="This region represents a CpG dinucleotide"
  misc_feature (61)..(61): /note="Nucleotide may be methylated to form 5-methylcytosine"
aaaaagtctacatgacatgacagatgtagtttctcttctggcttaacctgctgacagtaccgtacataggaatagatttaagactttcaaacatctgttaatttaccatatgcttttaaaac

SEQ ID NO: 4642 - DNA, 122 bp, Homo sapiens
  misc_feature (61)..(62): /note="This region represents a CpG dinucleotide"
  misc_feature (61)..(61): /note="Nucleotide may be methylated to form 5-methylcytosine"
aaagtggtgaggaaactgaatcatggttttgtataactggaatttctctaaaaaccagtacggtctgactggtagacacacatggtttctcagctgtagcaagtgagaacacaaagtctgta

SEQ ID NO: 4643 - DNA, 122 bp, Homo sapiens
  misc_feature (61)..(62): /note="This region represents a CpG dinucleotide"
  misc_feature (61)..(61): /note="Nucleotide may be methylated to form 5-methylcytosine"
ttaaaaaattccaaactcatgggtcatgatttgaagaaaatttcccttcctcctgcctggcgcacagaaggtaacgtcaaaagctgggaaagggaacagggcagcagcagacattgaccttt

SEQ ID NO: 4644 - DNA, 122 bp, Homo sapiens
  misc_feature (61)..(62): /note="This region represents a CpG dinucleotide"
  misc_feature (61)..(61): /note="Nucleotide may be methylated to form 5-methylcytosine"
ggtggggggcccgtctgccgtgtgcgcctcgtgtggccacacaggttggagcagcccaggcgtcaccacttactcacagagcgttgctctctgaagggacccacatgtgggtgtccacaccc

SEQ ID NO: 4645 - DNA, 122 bp, Homo sapiens
  misc_feature (61)..(62): /note="This region represents a CpG dinucleotide"
  misc_feature (61)..(61): /note="Nucleotide may be methylated to form 5-methylcytosine"
atgaaaacaaatagaacacataattaatattcttcctgcagcttctgaaaggcctttaggcggaacatcagtgctcattttactatctatattcaggctgcgttttgacaccatgatatttt

SEQ ID NO: 4646 - DNA, 122 bp, Homo sapiens
  misc_feature (61)..(62): /note="This region represents a CpG dinucleotide"
  misc_feature (61)..(61): /note="Nucleotide may be methylated to form 5-methylcytosine"
ccgaggctcctcaggcatctctctccatctccctgtggtcttgacacatgcactctccagcgtggcagcctcagggtgctggacctctgactgtcagctcaacaccatcacccgcagcccat

SEQ ID NO: 4647 - DNA, 122 bp, Homo sapiens
  misc_feature (61)..(62): /note="This region represents a CpG dinucleotide"
  misc_feature (61)..(61): /note="Nucleotide may be methylated to form 5-methylcytosine"
ggccagtgttctgtttacaaaactccagagtgtgacataccacatcagcattcatatctgcgctaagcctggagggaaacggtgcaaaacaaaggctattcagatctcttaggcattaggaa

SEQ ID NO: 4648 - DNA, 122 bp, Homo sapiens
  misc_feature (61)..(62): /note="This region represents a CpG dinucleotide"
  misc_feature (61)..(61): /note="Nucleotide may be methylated to form 5-methylcytosine"
tccccggaagcagtcagggcctgcgggggtttatgtcacaccctggctgcacgtggggatcgtgtctaagctttttggaaatgtcgatgccggactccgccccagacctggagctaggaact

SEQ ID NO: 4649 - DNA, 122 bp, Homo sapiens
  misc_feature (61)..(62): /note="This region represents a CpG dinucleotide"
  misc_feature (61)..(61): /note="Nucleotide may be methylated to form 5-methylcytosine"
ctgttacaagagacctcctttggataaatctgaacacgctcccatggcagacctatggggcggtagacaagaggccagcagagctgtcccaggccctggtgacacctccatgcccaggtgaa

SEQ ID NO: 4650 - DNA, 122 bp, Homo sapiens
  misc_feature (61)..(62): /note="This region represents a CpG dinucleotide"
  misc_feature (61)..(61): /note="Nucleotide may be methylated to form 5-methylcytosine"
gacatgagtctcacagatgactctgaagcccagccttcacaagtgaaactcaggtgctaacgttcattttgtaactctaggacctagcacagagaccagcaacatagtaggtgcacactaaa

SEQ ID NO: 4651 - DNA, 122 bp, Homo sapiens
  misc_feature (61)..(62): /note="This region represents a CpG dinucleotide"
  misc_feature (61)..(61): /note="Nucleotide may be methylated to form 5-methylcytosine"
tggttgggtcagaggtgaaatcataagaagtagaagctgtcctcttgcactgagttggttcgtggatccccaggttgatgagtcagggtggggccatccacttgtcagaaatgcaaaaacct

SEQ ID NO: 4652 - DNA, 122 bp, Homo sapiens
  misc_feature (61)..(62): /note="This region represents a CpG dinucleotide"
  misc_feature (61)..(61): /note="Nucleotide may be methylated to form 5-methylcytosine"
tgacctgtcagctctgggcaggtgtttccaggtgtgggctgaactcttaacaccggatgacgtgtttcaaggggccctgctgacgcagcattcactgacaatgaatcaccccaagaggacat

SEQ ID NO: 4653 - DNA, 122 bp, Homo sapiens
  misc_feature (61)..(62): /note="This region represents a CpG dinucleotide"
  misc_feature (61)..(61): /note="Nucleotide may be methylated to form 5-methylcytosine"
ataaggagcacacaacctagatccctcacatacgcagttcacaatagggttcacagttcacgatagagttcatgctcctctgagaagctaatgctgctgctcatctgacaggagacagagct

SEQ ID NO: 4654 - DNA, 122 bp, Homo sapiens
  misc_feature (61)..(62): /note="This region represents a CpG dinucleotide"
  misc_feature (61)..(61): /note="Nucleotide may be methylated to form 5-methylcytosine"
cagaagttcttccaagaagaggttgagactttaatgtagcatgacacattgaggccacttcggctggtcagcagtgtttgtgaacagtgtgtcaagtcacctgaccaagcagaggttaggaa

SEQ ID NO: 4655 - DNA, 122 bp, Homo sapiens
  misc_feature (61)..(62): /note="This region represents a CpG dinucleotide"
  misc_feature (61)..(61): /note="Nucleotide may be methylated to form 5-methylcytosine"
ccaatttcttttttttattgttcacatcagagtgccttagtgtgttcagcacttcctttgcgctctcccatgtgtgtgactcagtctgctgagttggtttatcatctgaccttcacttggtg

SEQ ID NO: 4656 - DNA, 122 bp, Homo sapiens
  misc_feature (61)..(62): /note="This region represents a CpG dinucleotide"
  misc_feature (61)..(61): /note="Nucleotide may be methylated to form 5-methylcytosine"
aggacaaggagttttccagagaagaaggaccttcgaggcagaggacacattagatccagacggtcttcaccaactgtgaggatactactctgcccagcccaagatgattgagtcactcctac

SEQ ID NO: 4657 - DNA, 122 bp, Homo sapiens
  misc_feature (61)..(62): /note="This region represents a CpG dinucleotide"
  misc_feature (61)..(61): /note="Nucleotide may be methylated to form 5-methylcytosine"
tagctcttcccaggcccttactactcctgggactcccctgctccctctgctgtcctgctgcgagtctctgacctggcccaggctcttgctcagccatgtggttcctacctcctacctcatgc

SEQ ID NO: 4658 - DNA, 122 bp, Homo sapiens
  misc_feature (61)..(62): /note="This region represents a CpG dinucleotide"
  misc_feature (61)..(61): /note="Nucleotide may be methylated to form 5-methylcytosine"
tggataaaaccttgggtcgaggccattttgccgtggttaaacttgccaggcatgtctttacgggtgaaaaggtggcagtaaaagttattgacaagacaaaactggacactctagctactggt

SEQ ID NO: 4659 - DNA, 122 bp, Homo sapiens
  misc_feature (61)..(62): /note="This region represents a CpG dinucleotide"
  misc_feature (61)..(61): /note="Nucleotide may be methylated to form 5-methylcytosine"
agcatcctctgtgtctcagaccttgtgttaagtaactcaggcatgctgacatacatcaggcgtgggtttggcctctttataatatacagtcatatgtcacttaacaatgaagatgggttctg

SEQ ID NO: 4660 - DNA, 122 bp, Homo sapiens
  misc_feature (61)..(62): /note="This region represents a CpG dinucleotide"
  misc_feature (61)..(61): /note="Nucleotide may be methylated to form 5-methylcytosine"
agaccagtcacacctggcctatctgatggtctagacatacacttttaagaatatcaacaacgggaaatgcaggctgggcacagtggctcatgcctgtaatcccagcattttgcaaggccaag

SEQ ID NO: 4661 - DNA, 122 bp, Homo sapiens
  misc_feature (61)..(62): /note="This region represents a CpG dinucleotide"
  misc_feature (61)..(61): /note="Nucleotide may be methylated to form 5-methylcytosine"
tgactaagagaagattcaatttggcaaatgtcttgaggacttaccattttctaatgacaacgctaggccctggggaaatcaagatcaaaatcaaaatcaggaagagcgattatctctgtctt

SEQ ID NO: 4662 - DNA, 122 bp, Homo sapiens
  misc_feature (61)..(62): /note="This region represents a CpG dinucleotide"
  misc_feature (61)..(61): /note="Nucleotide may be methylated to form 5-methylcytosine"
attgctgctatgaagactactactacattgcacaacatcctaactcactttataatttctcgcaacttcttttctcccaccatagagataattctttaacatctgaacacatcctattggaa

SEQ ID NO: 4663 - DNA, 122 bp, Homo sapiens
  misc_feature (61)..(62): /note="This region represents a CpG dinucleotide"
  misc_feature (61)..(61): /note="Nucleotide may be methylated to form 5-methylcytosine"
tttgaatgttgggaaataacctaaatgcccaacaacaggtaacatatgaaacagttgtggcgttaagaggtattacaagaggaaccagtacctggatttcaacaaatctcttgaatctgcta

SEQ ID NO: 4664 - DNA, 122 bp, Homo sapiens
  misc_feature (61)..(62): /note="This region represents a CpG dinucleotide"
  misc_feature (61)..(61): /note="Nucleotide may be methylated to form 5-methylcytosine"
cccagcccagcaactccatggtaatatctctacccactactgactagtgacctgtttcaccggcccagcaagaagatgacccagagccttagccaaagacaggcaccctccagcttccttct

SEQ ID NO: 4665 - DNA, 122 bp, Homo sapiens
  misc_feature (61)..(62): /note="This region represents a CpG dinucleotide"
  misc_feature (61)..(61): /note="Nucleotide may be methylated to form 5-methylcytosine"
gcagccctgactccagctaatgcgatttctggtcttctttccacaggtgtgtagctgggacggtgctggtctgagctggaccttgtctgatggcttcctccaaccctcctccacagcctgcc

SEQ ID NO: 4666 - DNA, 122 bp, Homo sapiens
  misc_feature (61)..(62): /note="This region represents a CpG dinucleotide"
  misc_feature (61)..(61): /note="Nucleotide may be methylated to form 5-methylcytosine"
cacgacgcccccgtcacgacgcgcccccttcgtcacgtccccctcacgacctccccctcacgacgccttcctcacgacgtgccctcctcacgacgtccccgtcacgacgccctccacacgac

SEQ ID NO: 4667 - DNA, 122 bp, Homo sapiens
  misc_feature (61)..(62): /note="This region represents a CpG dinucleotide"
  misc_feature (61)..(61): /note="Nucleotide may be methylated to form 5-methylcytosine"
atcctccttttccaggatcatggtgtagaccaagagtacctgcagtcacgccaggaatgacgtccattcttacctcacccatctgtttttgcacaatttgcatttagatgtagcaaactaaa

SEQ ID NO: 4668 - DNA, 122 bp, Homo sapiens
  misc_feature (61)..(62): /note="This region represents a CpG dinucleotide"
  misc_feature (61)..(61): /note="Nucleotide may be methylated to form 5-methylcytosine"
gtgtacatagagttaagcatccaagaaaggttttgataggtccaggagatagaaactgtgcgcaaagtaggtggagcattgagcaagtaaaaatcccattttgcttgtctaggatctattac

SEQ ID NO: 4669 - DNA, 122 bp, Homo sapiens
  misc_feature (61)..(62): /note="This region represents a CpG dinucleotide"
  misc_feature (61)..(61): /note="Nucleotide may be methylated to form 5-methylcytosine"
tagagcctctcgtttcctcatttgtaatatgtgatcagaaatctgtcattctcggcctgccgcggtggctcactgctataatcccagcattttgggaggccaaggcaggcagatcacttgag

SEQ ID NO: 4670 - DNA, 122 bp, Homo sapiens
  misc_feature (61)..(62): /note="This region represents a CpG dinucleotide"
  misc_feature (61)..(61): /note="Nucleotide may be methylated to form 5-methylcytosine"
caacagttctagggcctggctattcctctctcccagaggggcaggggaggcttgggctggcggggcatccccatcccggactaagccccagagctgagtcagtcactcatcccacagccttg

SEQ ID NO: 4671 - DNA, 122 bp, Homo sapiens
  misc_feature (61)..(62): /note="This region represents a CpG dinucleotide"
  misc_feature (61)..(61): /note="Nucleotide may be methylated to form 5-methylcytosine"
gtttgcctttacctttttcaaatagcaaattcaacaaagcagcctgaatcatgtgctgcacgctgggtgttggtacctccctcagggtggcagctgactaactgcaactgtggattaaggaa

SEQ ID NO: 4672 - DNA, 122 bp, Homo sapiens
  misc_feature (61)..(62): /note="This region represents a CpG dinucleotide"
  misc_feature (61)..(61): /note="Nucleotide may be methylated to form 5-methylcytosine"
acctcaggtgatccgcccaccttggcctcccaaagtgctgggattacaggcgtgagccaccgtgcccagccaagctggcttgtttttagtggaaagtgccgtgagtgtgttagggaacaggc

SEQ ID NO: 4673 - DNA, 122 bp, Homo sapiens
  misc_feature (61)..(62): /note="This region represents a CpG dinucleotide"
  misc_feature (61)..(61): /note="Nucleotide may be methylated to form 5-methylcytosine"
aattcttacactcctttgcgtctattaaaccaagaggataagcaacctggtaatttagcacggtcatgagcatttatctacacagtgggctccaaatgggtgtctgaaggtgagttgagtgt

SEQ ID NO: 4674 - DNA, 122 bp, Homo sapiens
  misc_feature (61)..(62): /note="This region represents a CpG dinucleotide"
  misc_feature (61)..(61): /note="Nucleotide may be methylated to form 5-methylcytosine"
tagttatattttggaacattgtttatagaatgaggaaaattcaacaatgttgtctgcagacgcaaggcacattcactgatgagacacatggctcatgctgaaaacatctggtctgtcaaata

SEQ ID NO: 4675 - DNA, 122 bp, Homo sapiens
  misc_feature (61)..(62): /note="This region represents a CpG dinucleotide"
  misc_feature (61)..(61): /note="Nucleotide may be methylated to form 5-methylcytosine"
ggcccggctgattttcaacattaccaaatatctaatcagtgtccctcaccacgattgttgcgtaatgtgcttcgtttcgttttcagtttgcgtgactcaggatgcaaatcaagccataggtc

SEQ ID NO: 4676 - DNA, 122 bp, Homo sapiens
  misc_feature (61)..(62): /note="This region represents a CpG dinucleotide"
  misc_feature (61)..(61): /note="Nucleotide may be methylated to form 5-methylcytosine"
ttctcggtaggctctgtgcctgaggggctcccaccctgtctttgaaatatgcaagggacacgaaggccaacatgaagctcatcttcactcctgtgtcaggaaactattcctgaagggtacag

SEQ ID NO: 4677 - DNA, 122 bp, Homo sapiens
  misc_feature (61)..(62): /note="This region represents a CpG dinucleotide"
  misc_feature (61)..(61): /note="Nucleotide may be methylated to form 5-methylcytosine"
gcttctctttttgagacatttcaagtacttttctcagtattatgaggtagattacatgtacgaatgactcaacatttctgaggctgcttaagagtgttttctggtaagcctagccactacat

SEQ ID NO: 4678 - DNA, 122 bp, Homo sapiens
  misc_feature (61)..(62): /note="This region represents a CpG dinucleotide"
  misc_feature (61)..(61): /note="Nucleotide may be methylated to form 5-methylcytosine"
tctcagaagctgtgtgtgtgtgtgtgtgtgtgtgtgtgtgtgtgtgtgtgtgcgcgcgcgcgcgtagatgcacaaaagctccgcgtggcaggtggtctcctgtaacacggctgagggggcgg

SEQ ID NO: 4679 - DNA, 122 bp, Homo sapiens
  misc_feature (61)..(62): /note="This region represents a CpG dinucleotide"
  misc_feature (61)..(61): /note="Nucleotide may be methylated to form 5-methylcytosine"
ctctccccttctctccaaccacagtcccccaggaagggggaggaccaaacgttggtggggcggatattgagggtggcagaaatccttgccatgagctcctgcaaccagaagtcccggttgag

SEQ ID NO: 4680 - DNA, 122 bp, Homo sapiens
  misc_feature (61)..(62): /note="This region represents a CpG dinucleotide"
  misc_feature (61)..(61): /note="Nucleotide may be methylated to form 5-methylcytosine"
ggcggcccctcccgggctgggtcccgccccgccctgccctgtccttgaatccaaggcgggcgcagtgcgatcgcgctgcccaggcccgcacccgaccattcctccgtctctctggccgcctc

SEQ ID NO: 4681 - DNA, 122 bp, Homo sapiens
  misc_feature (61)..(62): /note="This region represents a CpG dinucleotide"
  misc_feature (61)..(61): /note="Nucleotide may be methylated to form 5-methylcytosine"
ttgctatgttacccaggctggtcttgaattcctgtcctcaagaaatcctcccgcctctgccgcccagtgtcatgattaaaggcgtgagccaccacacccaactttcaactcccaacccgctc

SEQ ID NO: 4682 - DNA, 122 bp, Homo sapiens
  misc_feature (61)..(62): /note="This region represents a CpG dinucleotide"
  misc_feature (61)..(61): /note="Nucleotide may be methylated to form 5-methylcytosine"
agaaaggagcctcccaatagatatgctctgtgaaatgatcagtgctctctcattccatgccgatgaccaacacttattaaaaaacagttgatcaagtaattccagtgaaagaagaggatctc

SEQ ID NO: 4683 - DNA, 122 bp, Homo sapiens
  misc_feature (61)..(62): /note="This region represents a CpG dinucleotide"
  misc_feature (61)..(61): /note="Nucleotide may be methylated to form 5-methylcytosine"
ggctctgattggtaaagttgctataagaagcctgagaaccatgtaatttatctctagctgcgagatatcaatgccttatgctttgtgtttgcttccaccgtgtagagttggggaaagcatat

SEQ ID NO: 4684 - DNA, 122 bp, Homo sapiens
  misc_feature (61)..(62): /note="This region represents a CpG dinucleotide"
  misc_feature (61)..(61): /note="Nucleotide may be methylated to form 5-methylcytosine"
aaagaaaagccaaagtagctggagttcagtgagtcaaaggaagtggtagaagttgagatacgatagctagacagggccagatacctagggctgcatagattttgttctaattctaatataag

SEQ ID NO: 4685 - DNA, 122 bp, Homo sapiens
  misc_feature (61)..(62): /note="This region represents a CpG dinucleotide"
  misc_feature (61)..(61): /note="Nucleotide may be methylated to form 5-methylcytosine"
ttacattagccagcaaggtcttcggcattactagactaacaggcaggtgactcacttggtcgcccaggctggagtcctgtggtgtgatcttggctcactgcaacctctgcctctcaggttca

SEQ ID NO: 4686 - DNA, 122 bp, Homo sapiens
  misc_feature (61)..(62): /note="This region represents a CpG dinucleotide"
  misc_feature (61)..(61): /note="Nucleotide may be methylated to form 5-methylcytosine"
gatagtgattcatgtccttacaaaacaaacagctatctttctaacccttcatagcttaggcggggcctccaccacagagctacctttggtcggctctgcagactttgatgatgagactctag

SEQ ID NO: 4687 - DNA, 122 bp, Homo sapiens
  misc_feature (61)..(62): /note="This region represents a CpG dinucleotide"
  misc_feature (61)..(61): /note="Nucleotide may be methylated to form 5-methylcytosine"
gcctgtggaacatcataagctatataggctacgcagacggcagcctgccatcttcttgcacgtacacacccacacacaacatcaaccatcgacaaatgaagcaaaggccaaggaatgggttg

SEQ ID NO: 4688 - DNA, 122 bp, Homo sapiens
  misc_feature (61)..(62): /note="This region represents a CpG dinucleotide"
  misc_feature (61)..(61): /note="Nucleotide may be methylated to form 5-methylcytosine"
ggttatgaaaaagtttactactcacatgaggccttctagggaaagcaaagcgggcacccacgccagtctgttgggcttcagtgaaaggacgaacaagtggctctggtttttgttgtggttat

SEQ ID NO: 4689 - DNA, 122 bp, Homo sapiens
  misc_feature (61)..(62): /note="This region represents a CpG dinucleotide"
  misc_feature (61)..(61): /note="Nucleotide may be methylated to form 5-methylcytosine"
atccctttacacatgaggcaataatcacactctcatttaatacttactgaacagtcaccacgagctgcagacaaagtttacgagaaaaatagaaagatcagggcgcctactctcattgagct

SEQ ID NO: 4690 - DNA, 122 bp, Homo sapiens
  misc_feature (61)..(62): /note="This region represents a CpG dinucleotide"
  misc_feature (61)..(61): /note="Nucleotide may be methylated to form 5-methylcytosine"
aaaaaacccttggaggtgaacttgttcatttcctcccctgaaagtgtgaattttttcagccgtatccccataaggtgctacccagcccttttccccacattgatggtgatgacacatacttg

SEQ ID NO: 4691 - DNA, 122 bp, Homo sapiens
  misc_feature (61)..(62): /note="This region represents a CpG dinucleotide"
  misc_feature (61)..(61): /note="Nucleotide may be methylated to form 5-methylcytosine"
gcctgcgctcacaggcgtgtgcgtggggaagtgtttgggccgccgtgtacacagcaggcacgccataaacgcttcttggatggctccatgcgagggaagggagggagggcagagttcaggcc

SEQ ID NO: 4692 - DNA, 122 bp, Homo sapiens
  misc_feature (61)..(62): /note="This region represents a CpG dinucleotide"
  misc_feature (61)..(61): /note="Nucleotide may be methylated to form 5-methylcytosine"
gatgtgacgccatgacaagtcaggctggtcataattggccccagttaactcgcatagatgcgtcaccctttcatacacactccagggcaagaaattttgtattgtttctttgaagttatcca

SEQ ID NO: 4693 - DNA, 122 bp, Homo sapiens
  misc_feature (61)..(62): /note="This region represents a CpG dinucleotide"
  misc_feature (61)..(61): /note="Nucleotide may be methylated to form 5-methylcytosine"
tcattggcctttataaactgacttagtgctcttaatttgatccctggtcatcagtgttcccggtaaccaccatctgtaagtagtcctcaaaacaaaggattaaactgaatagagtcaaatga

SEQ ID NO: 4694 - DNA, 122 bp, Homo sapiens
  misc_feature (61)..(62): /note="This region represents a CpG dinucleotide"
  misc_feature (61)..(61): /note="Nucleotide may be methylated to form 5-methylcytosine"
cttcacagaacccgtcataaggcactagaggacagagctcagcagggcttcacagctcggcgtgtctgtgccctgcttgcctagcaagttgaaagcatgtgataagctgaaaggatgcagac

SEQ ID NO: 4695 - DNA, 122 bp, Homo sapiens
  misc_feature (61)..(62): /note="This region represents a CpG dinucleotide"
  misc_feature (61)..(61): /note="Nucleotide may be methylated to form 5-methylcytosine"
aagggggtggagaacatgacgctgggctcctttgacggcggagcccagctatgtggcccacgccctcagccctggagataatttggttcattcacatgttggtgatgacagagatactgcag

SEQ ID NO: 4696 - DNA, 122 bp, Homo sapiens
  misc_feature (61)..(62): /note="This region represents a CpG dinucleotide"
  misc_feature (61)..(61): /note="Nucleotide may be methylated to form 5-methylcytosine"
tggtaaggagggcatgatggaaagccggcgtggagggagagaggaggcacgcgcgtgcagcgccgtgacgtgcatttagttacacgacggcttctggaggcccacaactgattaatatacac

SEQ ID NO: 4697 - DNA, 122 bp, Homo sapiens
  misc_feature (61)..(62): /note="This region represents a CpG dinucleotide"
  misc_feature (61)..(61): /note="Nucleotide may be methylated to form 5-methylcytosine"
tacatgctcattagtgcgtgtaagtacatgcttttcaccccagaacactcatgatctttacgtcatctttctgcctcagctgctctttcatctggatcatggaatgttgcagggttaacaca

SEQ ID NO: 4698 - DNA, 122 bp, Homo sapiens
  misc_feature (61)..(62): /note="This region represents a CpG dinucleotide"
  misc_feature (61)..(61): /note="Nucleotide may be methylated to form 5-methylcytosine"
cttagcatgaggcaagctctgcctaacattttacatgcattaactcacataatctttacacgtactctctgaggtattgtcacctctactatttaaatcatggctttagagaggttatgtca

SEQ ID NO: 4699 - DNA, 122 bp, Homo sapiens
  misc_feature (61)..(62): /note="This region represents a CpG dinucleotide"
  misc_feature (61)..(61): /note="Nucleotide may be methylated to form 5-methylcytosine"
aattttctcaacagcatctgctttcttatcagagttctttctgaaacataaacttgacctcgtcatttccctacttgtatgatcaccatgggttgctcctgccttaagagtacactcctgcc

SEQ ID NO: 4700 - DNA, 122 bp, Homo sapiens
  misc_feature (61)..(62): /note="This region represents a CpG dinucleotide"
  misc_feature (61)..(61): /note="Nucleotide may be methylated to form 5-methylcytosine"
aatcattattcatcaccaaaattctactgaattttaccttatggaaattcatcacatctgcgtagaaaatatattaaagagagttctgtgctaggaatcaagaaatccaggttctacttctg

SEQ ID NO: 4701 - DNA, 122 bp, Homo sapiens
  misc_feature (61)..(62): /note="This region represents a CpG dinucleotide"
  misc_feature (61)..(61): /note="Nucleotide may be methylated to form 5-methylcytosine"
gtgatgaggattaaatgaggtaatacatctgaagtgctgccacttcctatgaactgagcacgtgtaagcagttgtcatcagtttgcagttgctgtttcatgctaaagtgataagagttatgg

SEQ ID NO: 4702 - DNA, 122 bp, Homo sapiens
  misc_feature (61)..(62): /note="This region represents a CpG dinucleotide"
  misc_feature (61)..(61): /note="Nucleotide may be methylated to form 5-methylcytosine"
agctgcaggagcacttcaaacacaggatgacacacagcagctctgagcacatttcctccacgcactcattcagccagtagattctgagggctcacagagcaggcattcacacacggtcctta

SEQ ID NO: 4703 - DNA, 122 bp, Homo sapiens
  misc_feature (61)..(62): /note="This region represents a CpG dinucleotide"
  misc_feature (61)..(61): /note="Nucleotide may be methylated to form 5-methylcytosine"
ctgccacaggaagccttgaggtctgggatgcttgggacggtgtggtgatctgggtgcagacggcttggaactagcctaacaagtcaggcctgttgccagtgacagagacccacctgcgcaga

SEQ ID NO: 4704 - DNA, 122 bp, Homo sapiens
  misc_feature (61)..(62): /note="This region represents a CpG dinucleotide"
  misc_feature (61)..(61): /note="Nucleotide may be methylated to form 5-methylcytosine"
agttaactgtggtgtaagtgactgggttgcagagccctcagttcccagatatgcagtgggcggcattgctaagacatgccatgcagtgtcagctgatttgtcccttttccttgtgagatcag

SEQ ID NO: 4705 - DNA, 122 bp, Homo sapiens
  misc_feature (61)..(62): /note="This region represents a CpG dinucleotide"
  misc_feature (61)..(61): /note="Nucleotide may be methylated to form 5-methylcytosine"
tctgctgggcatccgcctccactgggaagataaatacttgaatgacctggaggacagctacggacagcagtgggtgagtagaagggataaggtaggagctgagaccagtaagagtgagagtg

SEQ ID NO: 4706 - DNA, 122 bp, Homo sapiens
  misc_feature (61)..(62): /note="This region represents a CpG dinucleotide"
  misc_feature (61)..(61): /note="Nucleotide may be methylated to form 5-methylcytosine"
ggtccggttgttaatctctctgctaaaaccacagcagctctcacacaaaacaagcttacacgacacaatcatgcggtattaaagttagggttgagtcatgccaatttccctttgattttttg

SEQ ID NO: 4707 - DNA, 122 bp, Homo sapiens
  misc_feature (61)..(62): /note="This region represents a CpG dinucleotide"
  misc_feature (61)..(61): /note="Nucleotide may be methylated to form 5-methylcytosine"
aaacctggtcaacaacatatgggatgtcaccagattcagactcagaagtttccataatgccgttgccaacagctagacacagtgagtcatgggggccccagtaaccaaactctcatcacaca

SEQ ID NO: 4708 - DNA, 122 bp, Homo sapiens
  misc_feature (61)..(62): /note="This region represents a CpG dinucleotide"
  misc_feature (61)..(61): /note="Nucleotide may be methylated to form 5-methylcytosine"
cggagctaagcaccctgtagatcctgacaacagccctcccgtgatcccacaagagagacacgattctctccaatgtttaaaaaggaaagtaaaagtcaatggttctaagtagctcacactga

SEQ ID NO: 4709 - DNA, 122 bp, Homo sapiens
  misc_feature (61)..(62): /note="This region represents a CpG dinucleotide"
  misc_feature (61)..(61): /note="Nucleotide may be methylated to form 5-methylcytosine"
cacgtggcctcccgggttcagacaccctaggctgatgctgtggttccatgtgcctgaacacgagcatccgaactcatttccggcctgcctgtccccccatgcaacggctcctgaaaaagggg

SEQ ID NO: 4710 - DNA, 122 bp, Homo sapiens
  misc_feature (61)..(62): /note="This region represents a CpG dinucleotide"
  misc_feature (61)..(61): /note="Nucleotide may be methylated to form 5-methylcytosine"
cacagtgcgtggatgcttcgtgtgtaaatgcttgagccacaaacttgtgagaataagtgacgctggcaactttgatatgctcattcataaggaagaaacttctgtcttttaaattctctgga

SEQ ID NO: 4711 - DNA, 122 bp, Homo sapiens
  misc_feature (61)..(62): /note="This region represents a CpG dinucleotide"
  misc_feature (61)..(61): /note="Nucleotide may be methylated to form 5-methylcytosine"
atgcttttgcatataacaagacttacacgtgactatagattccacttgcaccatgcttttcgtggactcatttgttcagggatgtggatgtaattgacattccattttactaagcacatcgt

SEQ ID NO: 4712 - DNA, 122 bp, Homo sapiens
  misc_feature (61)..(62): /note="This region represents a CpG dinucleotide"
  misc_feature (61)..(61): /note="Nucleotide may be methylated to form 5-methylcytosine"
attatctgtggatagaacaagcataacaggaatccaactctagcaacgccaagtgttcaacgattgttatcaaagcaggtagcttttagattgttgctgtgaatgaccttggctgtctaggc

SEQ ID NO: 4713 - DNA, 122 bp, Homo sapiens
  misc_feature (61)..(62): /note="This region represents a CpG dinucleotide"
  misc_feature (61)..(61): /note="Nucleotide may be methylated to form 5-methylcytosine"
tcgagaacttggtgctgattagaggtgtgattgcattcatggtaatagggatgagtgtcacgaactgctgtgtgttctgctggtgagcttcactgcaatactgcactaaccagtgagtgtaa

SEQ ID NO: 4714 - DNA, 122 bp, Homo sapiens
  misc_feature (61)..(62): /note="This region represents a CpG dinucleotide"
  misc_feature (61)..(61): /note="Nucleotide may be methylated to form 5-methylcytosine"
gaggctcagagaagttaaataaacgttccattgtgtcacaacagtacattttgcagccaccgtatgaattcaaatctgtctctttgcaaactacagactagcagctatgaagaatttctgat

SEQ ID NO: 4715 - DNA, 122 bp, Homo sapiens
  misc_feature (61)..(62): /note="This region represents a CpG dinucleotide"
  misc_feature (61)..(61): /note="Nucleotide may be methylated to form 5-methylcytosine"
actcatctatactgccgcagtggtcaagtgtagcacccttagcttgaatggcatatgcctcggctggcatttcatcacaatcaacattaagtggtagcttgagtcattgtgaggtcacttcc

SEQ ID NO: 4716 - DNA, 122 bp, Homo sapiens
  misc_feature (61)..(62): /note="This region represents a CpG dinucleotide"
  misc_feature (61)..(61): /note="Nucleotide may be methylated to form 5-methylcytosine"
tgaatggactccagttcttggaacacttaatctttctataataaagaactcctggctgggcgcggtgtctcacacctgtaatcccagcactttgggaggccgaggcgggcggatcacctgag

SEQ ID NO: 4717 - DNA, 122 bp, Homo sapiens
  misc_feature (61)..(62): /note="This region represents a CpG dinucleotide"
  misc_feature (61)..(61): /note="Nucleotide may be methylated to form 5-methylcytosine"
ctcaggcacaataaatatagttataccactgcccatcagcccaagtctctttattggaaccgggccccgctggccctggctcaggcatttccatttccattagtgggaccaacccactgggt

SEQ ID NO: 4718 - DNA, 122 bp, Homo sapiens
  misc_feature (61)..(62): /note="This region represents a CpG dinucleotide"
  misc_feature (61)..(61): /note="Nucleotide may be methylated to form 5-methylcytosine"
gaaaaggaaagaaaaaaaggaacaggaaagaaagaaaaaggaaagaaagggaaagaaaggcgtgtccttggaagccactcacacctcactaggactcaggcttggaccttttcccaggaagc

SEQ ID NO: 4719 - DNA, 122 bp, Homo sapiens
  misc_feature (61)..(62): /note="This region represents a CpG dinucleotide"
  misc_feature (61)..(61): /note="Nucleotide may be methylated to form 5-methylcytosine"
tgcagaatggaggcataagccaagggctttgggtccttagtgttgggagtgagtggaccacgtaagggaaaggaaaaaaatctcgggacctccccaaattcttatgcaaaaggaaaggtgaa

SEQ ID NO: 4720 - DNA, 122 bp, Homo sapiens
  misc_feature (61)..(62): /note="This region represents a CpG dinucleotide"
  misc_feature (61)..(61): /note="Nucleotide may be methylated to form 5-methylcytosine"
ctgatgggaaggtaaaacttcggaaaacagcttggccatttttaaaagttaaatatcagccgggtgtggtggctcacgcctgtaatcccagcactttgggaggccgaggcgggcggatcacc

SEQ ID NO: 4721 - DNA, 122 bp, Homo sapiens
  misc_feature (61)..(62): /note="This region represents a CpG dinucleotide"
  misc_feature (61)..(61): /note="Nucleotide may be methylated to form 5-methylcytosine"
tcatggataagccggataagcctggacttcccaagtgatgtcacagtgagacttgagcttcgataaccaagaacttcaagaccaaaccatcatttcaagagattatcgagaaaatgaatgtg

SEQ ID NO: 4722 - DNA, 122 bp, Homo sapiens
  misc_feature (61)..(62): /note="This region represents a CpG dinucleotide"
  misc_feature (61)..(61): /note="Nucleotide may be methylated to form 5-methylcytosine"
ggtgatccacccgcctcggcctcccaaagtgctgggattacaggcatgagccactgcgcccggccgtagtcaacagtttagagtcaacagccccagctgtcactcacaagtgtcattctggg

SEQ ID NO: 4723 - DNA, 122 bp, Homo sapiens
  misc_feature (61)..(62): /note="This region represents a CpG dinucleotide"
  misc_feature (61)..(61): /note="Nucleotide may be methylated to form 5-methylcytosine"
tccagtgtttcatcacatctactttacattagaaaggctgcttacaaattgtctgccagccgtgaagtccaagacttatgcaatgatgccccattgtccagcaagttccccatgctcactgc

SEQ ID NO: 4724 - DNA, 122 bp, Homo sapiens
  misc_feature (61)..(62): /note="This region represents a CpG dinucleotide"
  misc_feature (61)..(61): /note="Nucleotide may be methylated to form 5-methylcytosine"
ttcatcaggtcctgctaggtctttgattttcttgaaagggccttctttatgccttccttccgtccccatttccaccaccctcgactaggccttcctcacctcatccggcatcagtgtgagcc

SEQ ID NO: 4725 - DNA, 122 bp, Homo sapiens
  misc_feature (61)..(62): /note="This region represents a CpG dinucleotide"
  misc_feature (61)..(61): /note="Nucleotide may be methylated to form 5-methylcytosine"
gaaggagttcagcctagtgggtacagtggcccaaaagaggtttggacctagtgctcacagcgcagaggaggaaagttgcaatttcaggtgagaaaacagcaaagacttcttgggagaggtgg

SEQ ID NO: 4726 - DNA, 122 bp, Homo sapiens
  misc_feature (61)..(62): /note="This region represents a CpG dinucleotide"
  misc_feature (61)..(61): /note="Nucleotide may be methylated to form 5-methylcytosine"
ggtcatgacgtcccgctgttggggagctgccacaggacgtggatggcggggcgtggatggcggggcgtggatggtgggacggggatggcggggcgtggatggcagggcgtgtcaggctctgc

SEQ ID NO: 4727 - DNA, 122 bp, Homo sapiens
  misc_feature (61)..(62): /note="This region represents a CpG dinucleotide"
  misc_feature (61)..(61): /note="Nucleotide may be methylated to form 5-methylcytosine"
ctggggaggactgcctctcctttctctcctggagacgtgtcagccttcttgctggacagccgggattgcttgatgcttcactcctcagcccacagtggatcacgagcagcagaccacctgaa

SEQ ID NO: 4728 - DNA, 122 bp, Homo sapiens
  misc_feature (61)..(62): /note="This region represents a CpG dinucleotide"
  misc_feature (61)..(61): /note="Nucleotide may be methylated to form 5-methylcytosine"
gaattgaaaaacagaatagcattttataaagtataagccctaagaaggagaaacaacttccggtttaaaaaaaatgtgttacgtaactgccatggttatgggtagcttagatggctcaatat

SEQ ID NO: 4729 - DNA, 122 bp, Homo sapiens
  misc_feature (61)..(62): /note="This region represents a CpG dinucleotide"
  misc_feature (61)..(61): /note="Nucleotide may be methylated to form 5-methylcytosine"
actgcagcagaaaggggcagagtccctttaggcccttgacaagcacggcggattagtaaccgtataatttaaccctccagttagccttggaggactcggtgtcgcacttccgcccgaactct

SEQ ID NO: 4730 - DNA, 122 bp, Homo sapiens
  misc_feature (61)..(62): /note="This region represents a CpG dinucleotide"
  misc_feature (61)..(61): /note="Nucleotide may be methylated to form 5-methylcytosine"
ctgttacatcacctcatgtgttgcatcactgtggctggctccacagttggaattctgtgtcggggaaaggacagggaatttggggctctgcccaggtgagcagggattctccacagttcagt

SEQ ID NO: 4731 - DNA, 122 bp, Homo sapiens
  misc_feature (61)..(62): /note="This region represents a CpG dinucleotide"
  misc_feature (61)..(61): /note="Nucleotide may be methylated to form 5-methylcytosine"
tgacaacctgagacttcctggttcatagtacagacgtggccttgcccctggacagggctacgctggaggaaagtgtatgctccagaaaggagttaccacttaaggatctaatcagatttatt

SEQ ID NO: 4732 - DNA, 122 bp, Homo sapiens
  misc_feature (61)..(62): /note="This region represents a CpG dinucleotide"
  misc_feature (61)..(61): /note="Nucleotide may be methylated to form 5-methylcytosine"
ccccatcgtttgtccagtcagatccggattcatcacacacacattctgctctctgtataacgagaaaagaaaaaaatgtaagataaaaggaaaaatacttagcaagttgttattaattttta

SEQ ID NO: 4733 - DNA, 122 bp, Homo sapiens
  misc_feature (61)..(62): /note="This region represents a CpG dinucleotide"
  misc_feature (61)..(61): /note="Nucleotide may be methylated to form 5-methylcytosine"
ctatatcagttatctactgctatgtaagtactccaatacttactggcttaatacagcaaccgtacatttactcatgatcctattgtttgtcagtttgagctgaacctagctgagtggctcgg

SEQ ID NO: 4734 - DNA, 122 bp, Homo sapiens
  misc_feature (61)..(62): /note="This region represents a CpG dinucleotide"
  misc_feature (61)..(61): /note="Nucleotide may be methylated to form 5-methylcytosine"
acttacagccatggcaaaaggtgaagaggaagcaaggcagcagaaaggagaagtgccaagcgaagtggggaagagcgccttatgaaaccatcagatctcaccagaactccttcactatcaca

SEQ ID NO: 4735 - DNA, 122 bp, Homo sapiens
  misc_feature (61)..(62): /note="This region represents a CpG dinucleotide"
  misc_feature (61)..(61): /note="Nucleotide may be methylated to form 5-methylcytosine"
aagatatcctttttggtgtctgtcctgtgagatgaacaataatttagtcatgtcacttaacgatgtggacattttgtgagaaatgcattgttaggtgatttcatcatcatgtggacatcata

SEQ ID NO: 4736 - DNA, 122 bp, Homo sapiens
  misc_feature (61)..(62): /note="This region represents a CpG dinucleotide"
  misc_feature (61)..(61): /note="Nucleotide may be methylated to form 5-methylcytosine"
ttatttcagacagcaacatggacttcaaagctgctgagtgctaggtagcaagggagggaacgtgtgctgtgatcatccaggaaggaagcagtgggtggtgaatcagaactcagagaaggcag

SEQ ID NO: 4737 - DNA, 122 bp, Homo sapiens
  misc_feature (61)..(62): /note="This region represents a CpG dinucleotide"
  misc_feature (61)..(61): /note="Nucleotide may be methylated to form 5-methylcytosine"
tccaagatgcaccccaagagcaggacctgcactggtggatgctgagcattctagaaacatcgttaacaggacacagggcagagctggtccctgcagcctcagccctgcagaagaggattcac

SEQ ID NO: 4738 - DNA, 122 bp, Homo sapiens
  misc_feature (61)..(62): /note="This region represents a CpG dinucleotide"
  misc_feature (61)..(61): /note="Nucleotide may be methylated to form 5-methylcytosine"
ctcatctcatgacctctgcagcaagaagtcgagaacttcaaaaaggtcaatatgatcagccgggagcagtttgacacactgacccctgagccccctgtggatcccaaccaggaagttcctcc

SEQ ID NO: 4739 - DNA, 122 bp, Homo sapiens
  misc_feature (61)..(62): /note="This region represents a CpG dinucleotide"
  misc_feature (61)..(61): /note="Nucleotide may be methylated to form 5-methylcytosine"
ttttcgttcttgtgagcagtgtctgagggctgcagacttccaacatcacagaacagtactcgtgattgtccatcttttttactgtaaccgtcctggtgggtgtgcagtggtatctcctggtg

SEQ ID NO: 4740 - DNA, 122 bp, Homo sapiens
  misc_feature (61)..(62): /note="This region represents a CpG dinucleotide"
  misc_feature (61)..(61): /note="Nucleotide may be methylated to form 5-methylcytosine"
catgaaatatgatccattttctctgggaatgtttcatttcctggagctggaaatgcagtgcggttaggtaaactgctccatttctgagccatatgttatagtgttgaagtacagggcaatcc

SEQ ID NO: 4741 - DNA, 122 bp, Homo sapiens
  misc_feature (61)..(62): /note="This region represents a CpG dinucleotide"
  misc_feature (61)..(61): /note="Nucleotide may be methylated to form 5-methylcytosine"
tgtgaggcagatacccattaatctctgtggctggctggagctgggctttatttcagtgcccgcccaggtgtgtcacacctgtatgtgaatgcatactcttcccgcttacttcgtgagtgcag

SEQ ID NO: 4742 - DNA, 122 bp, Homo sapiens
  misc_feature (61)..(62): /note="This region represents a CpG dinucleotide"
  misc_feature (61)..(61): /note="Nucleotide may be methylated to form 5-methylcytosine"
tgtgccaggtgctttacatgttacctcatttaacccatgagatggctatactctcttagccgcatgagacagccatctttctataatcagctctatttcatagcaggaagtgagaaggcaga

SEQ ID NO: 4743 - DNA, 122 bp, Homo sapiens
  misc_feature (61)..(62): /note="This region represents a CpG dinucleotide"
  misc_feature (61)..(61): /note="Nucleotide may be methylated to form 5-methylcytosine"
tccatttgttctctgtttccaaagggcatccgcttcgatcctgaaattccgcaaacactacgactagagtttgctaaggcaaacacgaagatggccaagaacaaactcgtagggactccaaa

SEQ ID NO: 4744 - DNA, 122 bp, Homo sapiens
  misc_feature (61)..(62): /note="This region represents a CpG dinucleotide"
  misc_feature (61)..(61): /note="Nucleotide may be methylated to form 5-methylcytosine"
agacagggagagtcttgtaagtcacagccaagaacctgctttatcctgcaaggagtagagcgctattaagaggcttaaccagccgggcacggtggctcacgcctggaatcccagcactttgg

SEQ ID NO: 4745 - DNA, 122 bp, Homo sapiens
  misc_feature (61)..(62): /note="This region represents a CpG dinucleotide"
  misc_feature (61)..(61): /note="Nucleotide may be methylated to form 5-methylcytosine"
gaatataatgtggcagcaggacgactcctgcagtgaacacaaagggcactgaactcctaacgcttttccccagtggcaagcagcaatggagaaatcagggttccatcctctctgcccatagc

SEQ ID NO: 4746 - DNA, 122 bp, Homo sapiens
  misc_feature (61)..(62): /note="This region represents a CpG dinucleotide"
  misc_feature (61)..(61): /note="Nucleotide may be methylated to form 5-methylcytosine"
gcccaacagggtgggcctggagagcagggctcaaggtatagggtgctcacctggctctcccgccctctgcaggtgtcaggcagagtggccttggaaggcagaggcagcaccctcccacctgt

SEQ ID NO: 4747 - DNA, 122 bp, Homo sapiens
  misc_feature (61)..(62): /note="This region represents a CpG dinucleotide"
  misc_feature (61)..(61): /note="Nucleotide may be methylated to form 5-methylcytosine"
ggcacccttattccaaaaatatcttagagcctctgccaaagatataatactcagtttccacgtctagatttactagttctatgggtatggagtttaggtgtttaacaagtctcaaagtggtt

SEQ ID NO: 4748 - DNA, 122 bp, Homo sapiens
  misc_feature (61)..(62): /note="This region represents a CpG dinucleotide"
  misc_feature (61)..(61): /note="Nucleotide may be methylated to form 5-methylcytosine"
attgtacagcataggcttcaaacctgccacagcagagaaacacctgttgctgctggagcacggccagcacaggtcatctggagcaatgtgacactgtgctgcaaccctgtccgcccgtcaca

SEQ ID NO: 4749 - DNA, 122 bp, Homo sapiens
  misc_feature (61)..(62): /note="This region represents a CpG dinucleotide"
  misc_feature (61)..(61): /note="Nucleotide may be methylated to form 5-methylcytosine"
tatgagggtgaacttagcttgctactcacacactactcaccctgtggaggaagttcgcctcgcttttgtggtgagtcttgctgtaatgatagcttatatttacaaataccgtcggcagtgca

SEQ ID NO: 4750 - DNA, 122 bp, Homo sapiens
  misc_feature (61)..(62): /note="This region represents a CpG dinucleotide"
  misc_feature (61)..(61): /note="Nucleotide may be methylated to form 5-methylcytosine"
gcccttggagatagatgaccaatagtgtagaaaacataagccttcataacaggaaggcagcgactgctctctgggtgtttacgggatctctctgtgttagattagaagataatatttctcca

SEQ ID NO: 4751 - DNA, 122 bp, Homo sapiens
  misc_feature (61)..(62): /note="This region represents a CpG dinucleotide"
  misc_feature (61)..(61): /note="Nucleotide may be methylated to form 5-methylcytosine"
agccccagtgtcctcactgaaaaacaggaaaggtgataacagtgctttctctgttgtcatcggaggattaaataaattactatatatgtaaggtgcctaggcaagtgtcagtcgtgtactac

SEQ ID NO: 4752 - DNA, 122 bp, Homo sapiens
  misc_feature (61)..(62): /note="This region represents a CpG dinucleotide"
  misc_feature (61)..(61): /note="Nucleotide may be methylated to form 5-methylcytosine"
cgcgtcggcggtgagccaaggtatgtcaggagagagtgcgaacccagcccccgggtagcacgaacaccaccgcagacaagggccccgcttgtggggaaatcgcagggccagtgcagccgcag

SEQ ID NO: 4753 - DNA, 122 bp, Homo sapiens
  misc_feature (61)..(62): /note="This region represents a CpG dinucleotide"
  misc_feature (61)..(61): /note="Nucleotide may be methylated to form 5-methylcytosine"
accaagccaggaaggtttgcagatgagccaccacagaatagtgactgcaatttctgcctccgctggtacaggcaactttcgaaaaatggttttttaggctgggagtggtggctcatgcctgt

SEQ ID NO: 4754 - DNA, 122 bp, Homo sapiens
  misc_feature (61)..(62): /note="This region represents a CpG dinucleotide"
  misc_feature (61)..(61): /note="Nucleotide may be methylated to form 5-methylcytosine"
ttgtataatcccctttcctttgagtgtcagtagaacataatcactcttgtgattatgctacgttaaatggcaaaagggagattatctgcgattacctaatcacatgaatctttaaaagcaga

SEQ ID NO: 4755 - DNA, 122 bp, Homo sapiens
  misc_feature (61)..(62): /note="This region represents a CpG dinucleotide"
  misc_feature (61)..(61): /note="Nucleotide may be methylated to form 5-methylcytosine"
cctgagtcatcgttcccctcctgtgccacctccttacaacaaactcgggcacagcacagacgaggatgtgattattgtgtgaagtgaatctgtaagatgagctatgtgtccaatgacttcag

SEQ ID NO: 4756 - DNA, 122 bp, Homo sapiens
  misc_feature (61)..(62): /note="This region represents a CpG dinucleotide"
  misc_feature (61)..(61): /note="Nucleotide may be methylated to form 5-methylcytosine"
tttgtgcagtgatcacaaagtctccacttaatttgagactgttactcagaacacgccttgcgtcacgggggctaatctaagtgtcctagtctatatgactacattacatcatgatgtattga

SEQ ID NO: 4757 - DNA, 122 bp, Homo sapiens
  misc_feature (61)..(62): /note="This region represents a CpG dinucleotide"
  misc_feature (61)..(61): /note="Nucleotide may be methylated to form 5-methylcytosine"
tgcaaaaccatggaaattaaataatttacacctacaattcttggcccttaaaaagcaactcgattctttggaaatgctttgttctttttctattaataaaatacaaattgtaatggccttgg

SEQ ID NO: 4758 - DNA, 122 bp, Homo sapiens
  misc_feature (61)..(62): /note="This region represents a CpG dinucleotide"
  misc_feature (61)..(61): /note="Nucleotide may be methylated to form 5-methylcytosine"
ttcaagtgattctcctgtctaagcctcctgagtagctgggattacaggcttgcaccaccacgcccagctaatgttcgtggttttaggagagagatggagtttcaccatgttggccagcctgg

SEQ ID NO: 4759 - DNA, 122 bp, Homo sapiens
  misc_feature (61)..(62): /note="This region represents a CpG dinucleotide"
  misc_feature (61)..(61): /note="Nucleotide may be methylated to form 5-methylcytosine"
gcacctcctactttgaagcaacactggtgatgatggcataactcaccctttccttagtatcgggtgcaactggcaccaagaacaacacccatgcccaggtgacaactgcgccaatatgggtc

SEQ ID NO: 4760 - DNA, 122 bp, Homo sapiens
  misc_feature (61)..(62): /note="This region represents a CpG dinucleotide"
  misc_feature (61)..(61): /note="Nucleotide may be methylated to form 5-methylcytosine"
ttagaggtaagttgacaatctccttgtaaagatattagcaaaacagtattattatgaccccgcaacaccttagaaatattttcactataatccatcttgtgataattacacctgttttactg

SEQ ID NO: 4761 - DNA, 122 bp, Homo sapiens
  misc_feature (61)..(62): /note="This region represents a CpG dinucleotide"
  misc_feature (61)..(61): /note="Nucleotide may be methylated to form 5-methylcytosine"
aagccaggctccgagccggctgctgggtagagtgccgcaccccagggaacgctcagccctcgtggactcacctctgggcttgcccagcctaagccccgcagtaacagctggggtgaagcctg

SEQ ID NO: 4762 - DNA, 122 bp, Homo sapiens
  misc_feature (61)..(62): /note="This region represents a CpG dinucleotide"
  misc_feature (61)..(61): /note="Nucleotide may be methylated to form 5-methylcytosine"
atactccattaaattcctacagtccacagtgcagggaagtccctaggcccaggatacaatcgctcctgattttgagggcatgtatccaaacacatggcctactgaaaacaaatgcattttaa

SEQ ID NO: 4763 - DNA, 122 bp, Homo sapiens
  misc_feature (61)..(62): /note="This region represents a CpG dinucleotide"
  misc_feature (61)..(61): /note="Nucleotide may be methylated to form 5-methylcytosine"
ccgctgacttgggtgaacagctctgagttccggagagggttcggtctgcggagaagcgcgcgagagacaagcatcctcaaggttctggtacaaaatttggaaaatggacctggcgttgaaat

SEQ ID NO: 4764 - DNA, 122 bp, Homo sapiens
  misc_feature (61)..(62): /note="This region represents a CpG dinucleotide"
  misc_feature (61)..(61): /note="Nucleotide may be methylated to form 5-methylcytosine"
gcccagtttgcaaagagtctagccatgcttgggagctctgaggacaacacggcattgtcacgggcactctcccagctggctgaggtggaagaaaaaattgagcagctccaccaggaacaggc

SEQ ID NO: 4765 - DNA, 122 bp, Homo sapiens
  misc_feature (61)..(62): /note="This region represents a CpG dinucleotide"
  misc_feature (61)..(61): /note="Nucleotide may be methylated to form 5-methylcytosine"
atatattattgtgctcatttgggcacttaagagatagtagctgctgctataaatcctgaccgttactcaatacttagatgtgccacttacttaatcctattactgaagagagaactgaagac

SEQ ID NO: 4766 - DNA, 122 bp, Homo sapiens
  misc_feature (61)..(62): /note="This region represents a CpG dinucleotide"
  misc_feature (61)..(61): /note="Nucleotide may be methylated to form 5-methylcytosine"
taatcacattgagatccccaaaagattaagtaacttgttgaagatgctgtggctactgcacggcaaagttagaattctcacgttgtcaggtccactctgtggctcggttcttaatggtcatg

SEQ ID NO: 4767 - DNA, 122 bp, Homo sapiens
  misc_feature (61)..(62): /note="This region represents a CpG dinucleotide"
  misc_feature (61)..(61): /note="Nucleotide may be methylated to form 5-methylcytosine"
taccaagcgttataaacagcatgtgatccatgggtctgctatcaaaacaaatacatttcacgagatgtgaagcgtcatttaacttgagcaatgacttgagattattacttagggtttagatg

SEQ ID NO: 4768 - DNA, 122 bp, Homo sapiens
  misc_feature (61)..(62): /note="This region represents a CpG dinucleotide"
  misc_feature (61)..(61): /note="Nucleotide may be methylated to form 5-methylcytosine"
attggcagaataaaggcccctgctaaagacgtcctgagaacctgtcaatatgttatgctacgtaacaaagggaattagggttgcaggtggaattaaggttgctattcagctggcctttttat

SEQ ID NO: 4769 - DNA, 122 bp, Homo sapiens
  misc_feature (61)..(62): /note="This region represents a CpG dinucleotide"
  misc_feature (61)..(61): /note="Nucleotide may be methylated to form 5-methylcytosine"
ccagagcacgagagtgacaccaaacacatgggacagcagcaccgagtcttggacaaggggcgcgaaggagtcaaggatgttgccaggcctgtggccgaaactgagaacagaatagagaagca

SEQ ID NO: 4770 - DNA, 122 bp, Homo sapiens
  misc_feature (61)..(62): /note="This region represents a CpG dinucleotide"
  misc_feature (61)..(61): /note="Nucleotide may be methylated to form 5-methylcytosine"
tctctcttaagcccaggaatcagtctcactgggcggggagctcaacagcgctgttagtgtcgttcgctgataattactttcacactagaataccatcttcattcctcatttatacgggaaac

SEQ ID NO: 4771 - DNA, 122 bp, Homo sapiens
  misc_feature (61)..(62): /note="This region represents a CpG dinucleotide"
  misc_feature (61)..(61): /note="Nucleotide may be methylated to form 5-methylcytosine"
aggccgtttccgctgcccatcgtgcaggcatgaggttgtcctggacagacacggtgtctacggcctgcagcgaaacctgctagtggagaacattatcgacatttacaagcaggagtcatcca

SEQ ID NO: 4772 - DNA, 122 bp, Homo sapiens
  misc_feature (61)..(62): /note="This region represents a CpG dinucleotide"
  misc_feature (61)..(61): /note="Nucleotide may be methylated to form 5-methylcytosine"
gtgtgcgctgagctttaagtgctgaacagagttgacttttatgatccctaccctgtgctgcgtgttttacatagattacctcacttaatcagctcatattctgagtcatattattatcctca

SEQ ID NO: 4773 - DNA, 122 bp, Homo sapiens
  misc_feature (61)..(62): /note="This region represents a CpG dinucleotide"
  misc_feature (61)..(61): /note="Nucleotide may be methylated to form 5-methylcytosine"
tgaagtggcaacaatgactgtcatttcctcctcaaatataatgtaaggacatttccaagtcgcttcagtcatttcttcctcctccaccctaccatgtgcttacaaaagtatgctgtaggaga

SEQ ID NO: 4774 - DNA, 122 bp, Homo sapiens
  misc_feature (61)..(62): /note="This region represents a CpG dinucleotide"
  misc_feature (61)..(61): /note="Nucleotide may be methylated to form 5-methylcytosine"
aggcagtttctcctgctcttcaggaatagcacatgggctgtatacttgtgtgcaccaccacgctcagctatttttaaaatactttgtagagatggggtcttgctatgttactcaggctggcc

SEQ ID NO: 4775 - DNA, 122 bp, Homo sapiens
  misc_feature (61)..(62): /note="This region represents a CpG dinucleotide"
  misc_feature (61)..(61): /note="Nucleotide may be methylated to form 5-methylcytosine"
caaacctaatcctctccattacatagctctgcaggctaagttttcaggagacagcacagacggaaaagctccataaagctgttctgatcctcttagcactttgtgcaaggagcacagataag

SEQ ID NO: 4776 - DNA, 122 bp, Homo sapiens
  misc_feature (61)..(62): /note="This region represents a CpG dinucleotide"
  misc_feature (61)..(61): /note="Nucleotide may be methylated to form 5-methylcytosine"
agtagactggcaatcaagaaagtggacagggcccattgctgggtggggtttggggctttacgactgcagtctggcatatgcaatctggcgtatgtggtcaaatcaagcttatgtgtgaatgc

SEQ ID NO: 4777 - DNA, 122 bp, Homo sapiens
  misc_feature (61)..(62): /note="This region represents a CpG dinucleotide"
  misc_feature (61)..(61): /note="Nucleotide may be methylated to form 5-methylcytosine"
catgagtcacacagctgcagctgcatctcctggtcctaaaggacaaagggaccaactgcacgtgtcttagttttgatgtagttttcttagataaaggctagaaaatatctagaaccgaaagc

SEQ ID NO: 4778 - DNA, 122 bp, Homo sapiens
  misc_feature (61)..(62): /note="This region represents a CpG dinucleotide"
  misc_feature (61)..(61): /note="Nucleotide may be methylated to form 5-methylcytosine"
acagaagaatctaaagccagtaatctcctggactttccagttaagtctgtttgagtctatcgccacatccagtgcccagcatagggcttggcacagagcaggcactctgtgaatgttgaatg

SEQ ID NO: 4779 - DNA, 122 bp, Homo sapiens
  misc_feature (61)..(62): /note="This region represents a CpG dinucleotide"
  misc_feature (61)..(61): /note="Nucleotide may be methylated to form 5-methylcytosine"
gtctgggtagctccagctcctcccgggctactgtaacagtagcagcagcagccacgcgcgcgtgtgagcagctcagcaccaggcatgacgtaagcactttgtgtagtcattcatttaatcct

SEQ ID NO: 4780 - DNA, 122 bp, Homo sapiens
  misc_feature (61)..(62): /note="This region represents a CpG dinucleotide"
  misc_feature (61)..(61): /note="Nucleotide may be methylated to form 5-methylcytosine"
tagcttagaagaggatctgttcctgaccagtcccatggaaattgtgactcagcaggacatcgtcctctcagacgcagagaacaaggtaagtctcctccagggaatgacttgatggctcataa

SEQ ID NO: 4781 - DNA, 122 bp, Homo sapiens
  misc_feature (61)..(62): /note="This region represents a CpG dinucleotide"
  misc_feature (61)..(61): /note="Nucleotide may be methylated to form 5-methylcytosine"
gggtcaggatctgccattctttacaagtttccttaacgtattgcgtcaaagcgagacaaccgagtcttactcaaacttgttttaaccggagatggagggttgctgctgtgtcaccgcctgca

SEQ ID NO: 4782 - DNA, 122 bp, Homo sapiens
  misc_feature (61)..(62): /note="This region represents a CpG dinucleotide"
  misc_feature (61)..(61): /note="Nucleotide may be methylated to form 5-methylcytosine"
gtatctggagcaagcagaccgattttcagaaacgcacattgggtaggttacccgtggtgacgcaaaccagacttacttgatctaaatctcctttctccgttgccagttcctccatctctggt

SEQ ID NO: 4783 - DNA, 122 bp, Homo sapiens
  misc_feature (61)..(62): /note="This region represents a CpG dinucleotide"
  misc_feature (61)..(61): /note="Nucleotide may be methylated to form 5-methylcytosine"
aattgcactgtttaggttgctggacaaatccatagtgtaaagctggcctgtatcaagtgacggtcaattcaaacagcaaggcaagttaaaagagggaactccattccacagaaccctagtgt

SEQ ID NO: 4784 - DNA, 122 bp, Homo sapiens
  misc_feature (61)..(62): /note="This region represents a CpG dinucleotide"
  misc_feature (61)..(61): /note="Nucleotide may be methylated to form 5-methylcytosine"
agctttgtgccttgtcgataaagcagtggacatctctccacagggagatatgtttcctcccgtgatatagaggatgttgattcacttgtctcctctctatttcgaaaagatgctctgaagat

SEQ ID NO: 4785 - DNA, 122 bp, Homo sapiens
  misc_feature (61)..(62): /note="This region represents a CpG dinucleotide"
  misc_feature (61)..(61): /note="Nucleotide may be methylated to form 5-methylcytosine"
gagctgtgttaagtgtctcttccatctcttccacaggatgtatgacctgattcattcattcgtgggttcagggggaggtgaccaaagacttcacagtcctccaggagctggaatgttatgat

SEQ ID NO: 4786 - DNA, 122 bp, Homo sapiens
  misc_feature (61)..(62): /note="This region represents a CpG dinucleotide"
  misc_feature (61)..(61): /note="Nucleotide may be methylated to form 5-methylcytosine"
gtagcttactgaatctccagacacaagtgacacaatcttagatcatccattgcttagacacgtaagcaagctcagctcagagtaagagaattactcaacttgctcactttaccattacccat

SEQ ID NO: 4787 - DNA, 122 bp, Homo sapiens
  misc_feature (61)..(62): /note="This region represents a CpG dinucleotide"
  misc_feature (61)..(61): /note="Nucleotide may be methylated to form 5-methylcytosine"
tctcagtgtgtttgcagctgctccaggttatgtggagattgtctgccctgcacacaatgacgtcaaggttataatgtctgcacaacaaacccactgagtctgccagacagggtggttctaca

SEQ ID NO: 4788 - DNA, 122 bp, Homo sapiens
  misc_feature (61)..(62): /note="This region represents a CpG dinucleotide"
  misc_feature (61)..(61): /note="Nucleotide may be methylated to form 5-methylcytosine"
tgcgcggtttagtggaggaggtagaggaggtggaccagctaagagacagttacaaaatgacgtgatgcttgctgttatagcggagtgttcagatgagtcaaggatttaattatcatagctga

SEQ ID NO: 4789 - DNA, 122 bp, Homo sapiens
  misc_feature (61)..(62): /note="This region represents a CpG dinucleotide"
  misc_feature (61)..(61): /note="Nucleotide may be methylated to form 5-methylcytosine"
tggtgctgctactattgggccagttagtttctcttaaagaccaggatgtttggtgtattacgcaggatttgttgagctgcatgtggcagaatattcaaaacaatagcagcttaaaaatacaa

SEQ ID NO: 4790 - DNA, 122 bp, Homo sapiens
  misc_feature (61)..(62): /note="This region represents a CpG dinucleotide"
  misc_feature (61)..(61): /note="Nucleotide may be methylated to form 5-methylcytosine"
cgttccccagggtttctgcgtgacctaaaaacctataatcctgagaaacacccaaatgggcggctcttatagacacttagtacaggaaatgaccggccgaaaaggaacatgagttggctctg

SEQ ID NO: 4791 - DNA, 122 bp, Homo sapiens
  misc_feature (61)..(62): /note="This region represents a CpG dinucleotide"
  misc_feature (61)..(61): /note="Nucleotide may be methylated to form 5-methylcytosine"
gatgtccgcatcctgaaggagagctggctgcgcgggctgtgagtgagacctccctgaccccgcccttttttgttcccctccaggatgctgccggactggaagagctccttgatcctcatggc

SEQ ID NO: 4792 - DNA, 122 bp, Homo sapiens
  misc_feature (61)..(62): /note="This region represents a CpG dinucleotide"
  misc_feature (61)..(61): /note="Nucleotide may be methylated to form 5-methylcytosine"
taatgggtaggtgcaggtagtagataagagtgtagccacataaaccacatgcttagtgaacggttttgttttgtgtgtatgtgagggattagcatctctgagtatattttgttttccctttt

SEQ ID NO: 4793 - DNA, 122 bp, Homo sapiens
  misc_feature (61)..(62): /note="This region represents a CpG dinucleotide"
  misc_feature (61)..(61): /note="Nucleotide may be methylated to form 5-methylcytosine"
caggaattctgtggttaggcttctagggttcaagtctcagctctgcagtctctagctatacggccttctgtggtgcagtagttaagcagggcttacagaatgtcaagatgtaaggtaatctc

SEQ ID NO: 4794 - DNA, 122 bp, Homo sapiens
  misc_feature (61)..(62): /note="This region represents a CpG dinucleotide"
  misc_feature (61)..(61): /note="Nucleotide may be methylated to form 5-methylcytosine"
aggagctgtgcgggcggagcgcggaatgtagcatccacgtggaggtgatcgtggacaggccgctgcaggttttccatgtggaagtggaggtgaaggacattaacgacaacccgccaatattt

SEQ ID NO: 4795 - DNA, 122 bp, Homo sapiens
  misc_feature (61)..(62): /note="This region represents a CpG dinucleotide"
  misc_feature (61)..(61): /note="Nucleotide may be methylated to form 5-methylcytosine"
ttacagcagagctccattctaaggcacttggctctcagttttctcagagtgaacatgcctcgtagcttgggtcctatggcaggagtgcaataggacatggatatgcatcacctgttctataa

SEQ ID NO: 4796 - DNA, 122 bp, Homo sapiens
  misc_feature (61)..(62): /note="This region represents a CpG dinucleotide"
  misc_feature (61)..(61): /note="Nucleotide may be methylated to form 5-methylcytosine"
tgtgttaaagccatgactatcttctcaggcatccaagcttgaatcttcagaactgtctggcgttctcttttcaaagtccacatgatcatcagctgagaaggagcatgactttcaccttattt

SEQ ID NO: 4797 - DNA, 122 bp, Homo sapiens
  misc_feature (61)..(62): /note="This region represents a CpG dinucleotide"
  misc_feature (61)..(61): /note="Nucleotide may be methylated to form 5-methylcytosine"
gccagcacactgtaagtgcccgcccctctgactaccactcacacgactggaccagtcatacgtcgactccacactgctagatgtgggccagccatccacatgtagctagtccacatatggaa

SEQ ID NO: 4798 - DNA, 122 bp, Homo sapiens
  misc_feature (61)..(62): /note="This region represents a CpG dinucleotide"
  misc_feature (61)..(61): /note="Nucleotide may be methylated to form 5-methylcytosine"
ttacgattcttcctttcctatttggcagagtcagacttcctcttttcataaacagaaatacgaagtagccagcaggccaaaattgtcaaaacaaagagtgagaggtaaagagtgaagaacgc

SEQ ID NO: 4799 - DNA, 122 bp, Homo sapiens
  misc_feature (61)..(62): /note="This region represents a CpG dinucleotide"
  misc_feature (61)..(61): /note="Nucleotide may be methylated to form 5-methylcytosine"
tagtgtgctgatggcattgaccatctacactgggttgaatagggccacccccaaaattcacgtctaccaggaacctcagaatgtgaacttatttggaaatagtttctttgcaggtgtaatta

SEQ ID NO: 4800 - DNA, 122 bp, Homo sapiens
  misc_feature (61)..(62): /note="This region represents a CpG dinucleotide"
  misc_feature (61)..(61): /note="Nucleotide may be methylated to form 5-methylcytosine"
gactttgggaggcagaaagatggccaggttaccaggcatacagcggcagtcaggatctaccgctccgagcacagcccagcctgaggaaccaggctcccagagctgccctgctccctggactc

SEQ ID NO: 4801 - DNA, 122 bp, Homo sapiens
  misc_feature (61)..(62): /note="This region represents a CpG dinucleotide"
  misc_feature (61)..(61): /note="Nucleotide may be methylated to form 5-methylcytosine"
tcattgcagacaacactattggacagcactaagtgtggcttccttgtttataagccctctcgccattccacattattctctagctacagcctcatttctctgattctcttccaagccagttt

SEQ ID NO: 4802 - DNA, 122 bp, Homo sapiens
  misc_feature (61)..(62): /note="This region represents a CpG dinucleotide"
  misc_feature (61)..(61): /note="Nucleotide may be methylated to form 5-methylcytosine"
aggccacatagcccatagtgatgaggccaacatgggaattcaggtctgcctgaccttacccgcttcttggtaggttactagattgcatcatcacttgccccatctggaaaatgggtaaagac

SEQ ID NO: 4803 - DNA, 122 bp, Homo sapiens
  misc_feature (61)..(62): /note="This region represents a CpG dinucleotide"
  misc_feature (61)..(61): /note="Nucleotide may be methylated to form 5-methylcytosine"
ctcttcgtggacaaaggcgttcgattttccagaggaggccaagaatgggagccgtgggtccgtagcttggtgtagggcgtgagttccagtggtgagcagtgagacacgctgagctgggctgg

SEQ ID NO: 4804 - DNA, 122 bp, Homo sapiens
  misc_feature (61)..(62): /note="This region represents a CpG dinucleotide"
  misc_feature (61)..(61): /note="Nucleotide may be methylated to form 5-methylcytosine"
atgcttcctagaggcagatttcaacatcccattgcacaattccattcctcctcctcatatcgctttctgccttctttccccacttccctttggagatgaacttggcatgaaaggagagaggc

SEQ ID NO: 4805 - DNA, 122 bp, Homo sapiens
  misc_feature (61)..(62): /note="This region represents a CpG dinucleotide"
  misc_feature (61)..(61): /note="Nucleotide may be methylated to form 5-methylcytosine"
aatactagagtgtttttcactttgctaactttactttctaggtgagctcatccaatctcacggctttaaataatctccttctctgactttccctttgactcctacacttccacatatgtttg

SEQ ID NO: 4806 - DNA, 122 bp, Homo sapiens
  misc_feature (61)..(62): /note="This region represents a CpG dinucleotide"
  misc_feature (61)..(61): /note="Nucleotide may be methylated to form 5-methylcytosine"
aggaacccggggtacgttccctgcctctgcctctgtctggtgggaggagatgattgcctacggtgaaccagtatcaggcttggccagcaagcccgagcaaactgacatctcccttcactgac

SEQ ID NO: 4807 - DNA, 122 bp, Homo sapiens
  misc_feature (61)..(62): /note="This region represents a CpG dinucleotide"
  misc_feature (61)..(61): /note="Nucleotide may be methylated to form 5-methylcytosine"
tatgagtggttttgggagaggccaggctgagctcttactagctccttgcaacaaaacaagcgaatgtgaaaagtcttaaacactcagctttctggtcagaggaaatcccaaaatcagcatga

SEQ ID NO: 4808 - DNA, 122 bp, Homo sapiens
  misc_feature (61)..(62): /note="This region represents a CpG dinucleotide"
  misc_feature (61)..(61): /note="Nucleotide may be methylated to form 5-methylcytosine"
ccgtcatcggggaccagagctcgggcaagagctctgtgctggaggcactgtcaggagtcgcgcttcccagaggcagcggtaagttcaacggaccaccttccctccgcagcaagcagcgccac

SEQ ID NO: 4809 - DNA, 122 bp, Homo sapiens
  misc_feature (61)..(62): /note="This region represents a CpG dinucleotide"
  misc_feature (61)..(61): /note="Nucleotide may be methylated to form 5-methylcytosine"
aaaatatcatctgaggcaccctgggtcccaacccagcagtgttgaatcagattctccaggcgagagcacagggaatttccatctaaacaatgttccaggcattataattgccttaaataggg

SEQ ID NO: 4810 - DNA, 122 bp, Homo sapiens
  misc_feature (61)..(62): /note="This region represents a CpG dinucleotide"
  misc_feature (61)..(61): /note="Nucleotide may be methylated to form 5-methylcytosine"
agaggctaaatgatgtggctatgatgtcacagctaggaactggccgagccaagataagaacgtaggcagcatgactctgaagcctatggtcttaacttgtatgctatatttcctcttgtgta

SEQ ID NO: 4811 - DNA, 122 bp, Homo sapiens
  misc_feature (61)..(62): /note="This region represents a CpG dinucleotide"
  misc_feature (61)..(61): /note="Nucleotide may be methylated to form 5-methylcytosine"
aagcccttagaaaccaagaacaagttctcccaggtgaagctgttggcaggagctgtgaagcgtaagagctcagagagtgacaacagtgtgaaaagactgaaaccggaccctgagccagatga

SEQ ID NO: 4812 - DNA, 122 bp, Homo sapiens
  misc_feature (61)..(62): /note="This region represents a CpG dinucleotide"
  misc_feature (61)..(61): /note="Nucleotide may be methylated to form 5-methylcytosine"
caggctggcctcaagtgatcctcctgcctcacctcccaaagtgctgggattataggcgtgcgccaccatgcccggacaggatatttcttaaaaggagattgttagggaaaatgatgtgagca

SEQ ID NO: 4813 - DNA, 122 bp, Homo sapiens
  misc_feature (61)..(62): /note="This region represents a CpG dinucleotide"
  misc_feature (61)..(61): /note="Nucleotide may be methylated to form 5-methylcytosine"
gttgtgataattctcatttcacagatgagagaactggtgcttagggacacttacagggtgcgttcaaggtcataaaactgctaagagagatggagcagaaactggaacctggtctgtttgat

SEQ ID NO: 4814 - DNA, 122 bp, Homo sapiens
  misc_feature (61)..(62): /note="This region represents a CpG dinucleotide"
  misc_feature (61)..(61): /note="Nucleotide may be methylated to form 5-methylcytosine"
gctctcacaaaggggctctcttgctgggctctatttcttaggaattcgtttgagaaacttcgtattcctctgccctggacacttccaattgtggggtgaggggaaagagaaccaagaaaagt

SEQ ID NO: 4815 - DNA, 122 bp, Homo sapiens
  misc_feature (61)..(62): /note="This region represents a CpG dinucleotide"
  misc_feature (61)..(61): /note="Nucleotide may be methylated to form 5-methylcytosine"
cctcacttctggattagggacagcactttccaatctcttttcctacctttagtctgatttcgcttcaacacatcttacgaaagacctagagtaatttcataatcacattcatgctccaaagc

SEQ ID NO: 4816 - DNA, 122 bp, Homo sapiens
  misc_feature (61)..(62): /note="This region represents a CpG dinucleotide"
  misc_feature (61)..(61): /note="Nucleotide may be methylated to form 5-methylcytosine"
tgggatccaatcagcaaggagggggcatgattaaatccaggctgactcagagatggcaggcgaggacagcaaggagagcagacatctgcaaggatttgggcaactcgttagggaggaatttt

SEQ ID NO: 4817 - DNA, 122 bp, Homo sapiens
  misc_feature (61)..(62): /note="This region represents a CpG dinucleotide"
  misc_feature (61)..(61): /note="Nucleotide may be methylated to form 5-methylcytosine"
aagaatgtttttttttctgttcgtatactttccccaacttctgctggcctggaatcagtacgccctaaccagcccatagatatgtggtcaggtttctagataaggcataggaacacttaggg

SEQ ID NO: 4818 - DNA, 122 bp, Homo sapiens
  misc_feature (61)..(62): /note="This region represents a CpG dinucleotide"
  misc_feature (61)..(61): /note="Nucleotide may be methylated to form 5-methylcytosine"
aggtgacaggcgtgtccccagctgccgcagtgacagtccagggtgctgaccttgctgtgacgggggcagtcctgacagctcacacttggccctggaaagttgaatcacctggtcctaatctc

SEQ ID NO: 4819 - DNA, 122 bp, Homo sapiens
  misc_feature (61)..(62): /note="This region represents a CpG dinucleotide"
  misc_feature (61)..(61): /note="Nucleotide may be methylated to form 5-methylcytosine"
gcaggtggaagaagatgggataagctggcttgctaagtcttttggctttcatttttcatccgtcctggatgcttccttctgttcctcctgcccttgaacatcagactccagattgtttgggc

SEQ ID NO: 4820 - DNA, 122 bp, Homo sapiens
  misc_feature (61)..(62): /note="This region represents a CpG dinucleotide"
  misc_feature (61)..(61): /note="Nucleotide may be methylated to form 5-methylcytosine"
ctcaagtgatacacccatctcagcctcctaaagtgctgggattgcaggcgtgagccaccacgccaggccgtgagcccttatttgagaacaccaactactgctgtgatgaggcagaggggcca

SEQ ID NO: 4821 - DNA, 122 bp, Homo sapiens
  misc_feature (61)..(62): /note="This region represents a CpG dinucleotide"
  misc_feature (61)..(61): /note="Nucleotide may be methylated to form 5-methylcytosine"
atctgttaaacagggagctcagtgtctgtttgtccagcttctcagagttgctgtgcagctcggatgtggcataggaaacagcagacacagggagagggcagcataaggcactgtagggagca

SEQ ID NO: 4822 - DNA, 122 bp, Homo sapiens
  misc_feature (61)..(62): /note="This region represents a CpG dinucleotide"
  misc_feature (61)..(61): /note="Nucleotide may be methylated to form 5-methylcytosine"
ggcttcagggaatggtgccttcattagcaccacattcttgtcaaaagagctaactaacaccgctgctctccactctaccatctatattaattttatttctgattttacagagagatactcag

SEQ ID NO: 4823 - DNA, 122 bp, Homo sapiens
  misc_feature (61)..(62): /note="This region represents a CpG dinucleotide"
  misc_feature (61)..(61): /note="Nucleotide may be methylated to form 5-methylcytosine"
ggaagacgacaccctgtgcctctggctgggtggcaactttgtgccttcatagtctaaaaacgcaccctcagcgttgcagccccaataggactcagttgatgaacaactttccaggaacgtgg

SEQ ID NO: 4824 - DNA, 122 bp, Homo sapiens
  misc_feature (61)..(62): /note="This region represents a CpG dinucleotide"
  misc_feature (61)..(61): /note="Nucleotide may be methylated to form 5-methylcytosine"
attattaattgcctaacatttggtcttctcatttgcctggggatcagagagaatccaggtcgtcaaggcaggaggaagctgttggctaatagctgcagagatttcactctctaagccttcta

SEQ ID NO: 4825 - DNA, 122 bp, Homo sapiens
  misc_feature (61)..(62): /note="This region represents a CpG dinucleotide"
  misc_feature (61)..(61): /note="Nucleotide may be methylated to form 5-methylcytosine"
acgtgtatgtataaatccttcatagtcataggacttatgctcctgaaaaaaccataggcccgtcaccttagcttttggatatgagtcccagtttttctgctttactaatgacatgactctga

SEQ ID NO: 4826 - DNA, 122 bp, Homo sapiens
  misc_feature (61)..(62): /note="This region represents a CpG dinucleotide"
  misc_feature (61)..(61): /note="Nucleotide may be methylated to form 5-methylcytosine"
gactggaaatcctaagtaccatcttccttcaacacagctaatccattcttacatgcctgtcgcacaaaagagagcaacaagtcatggtgtgggtgtggccctcatgggagttggtggcagca

SEQ ID NO: 4827 - DNA, 122 bp, Homo sapiens
  misc_feature (61)..(62): /note="This region represents a CpG dinucleotide"
  misc_feature (61)..(61): /note="Nucleotide may be methylated to form 5-methylcytosine"
tagctgtctgacacccggatcccatgcctaacccaaatgtcactgagccctaaggcacttcgctcctgctggtccaggcagtgtcccctaagattcatcatggcatgttctccatggcctta

SEQ ID NO: 4828 - DNA, 122 bp, Homo sapiens
  misc_feature (61)..(62): /note="This region represents a CpG dinucleotide"
  misc_feature (61)..(61): /note="Nucleotide may be methylated to form 5-methylcytosine"
gccttatgccttaaatattacccagataatacaaaacttctaaaactgctaccagcctcacgttgacagaatgcaacataaaaatggaaatataactacttgggattacagtatataaagtt

SEQ ID NO: 4829 - DNA, 122 bp, Homo sapiens
  misc_feature (61)..(62): /note="This region represents a CpG dinucleotide"
  misc_feature (61)..(61): /note="Nucleotide may be methylated to form 5-methylcytosine"
aacagaagatacctcaaaacaaatgtctgtgcaggagcatagaagtccctgagaagtgaacgagctggagcattcatcctttagctcccatcagtcactggttgacagcagcttatggaggg

SEQ ID NO: 4830 - DNA, 122 bp, Homo sapiens
  misc_feature (61)..(62): /note="This region represents a CpG dinucleotide"
  misc_feature (61)..(61): /note="Nucleotide may be methylated to form 5-methylcytosine"
cttccagggcactcaatatattcctcaagaatttctgcacatggagcagccagtactctccgcccaggaccttcatcatccttagtgtctttcagtgttcatgattcatttagatgatgcag

SEQ ID NO: 4831 - DNA, 122 bp, Homo sapiens
  misc_feature (61)..(62): /note="This region represents a CpG dinucleotide"
  misc_feature (61)..(61): /note="Nucleotide may be methylated to form 5-methylcytosine"
agctttcccactggcccatgtctgaggccatcatctctgtggccagtgcacaggggaggacgctgcaccagtttaggaactgcactaaccacaaggagagtaagaagcaggagtgaaatggc

SEQ ID NO: 4832 - DNA, 122 bp, Homo sapiens
  misc_feature (61)..(62): /note="This region represents a CpG dinucleotide"
  misc_feature (61)..(61): /note="Nucleotide may be methylated to form 5-methylcytosine"
tcatttatataaatgtggatatccccagagaatcactagtgtagatgatcttatatgtttcgttcaactctgagaaactatgaatccataaggtgtggttgattgcagaaggacaatgatct

SEQ ID NO: 4833 - DNA, 122 bp, Homo sapiens
  misc_feature (61)..(62): /note="This region represents a CpG dinucleotide"
  misc_feature (61)..(61): /note="Nucleotide may be methylated to form 5-methylcytosine"
aagattgcaaatctccaaaaatacaacaaacaacatgggaaagtctcatcagattttcctcgcatttgttggcactaagcctgttttgtcagggaatacttacaacagggccactttcaaag

SEQ ID NO: 4834 - DNA, 122 bp, Homo sapiens
  misc_feature (61)..(62): /note="This region represents a CpG dinucleotide"
  misc_feature (61)..(61): /note="Nucleotide may be methylated to form 5-methylcytosine"
ggctggccttgggtgagaggggacacctggatggcaaactgatggaggctggccttgcagcgcccagaggcacccacctgtgggagttcatccgggacatcctcatccacccggagctcaac

SEQ ID NO: 4835 - DNA, 122 bp, Homo sapiens
  misc_feature (61)..(62): /note="This region represents a CpG dinucleotide"
  misc_feature (61)..(61): /note="Nucleotide may be methylated to form 5-methylcytosine"
agactatcctcgacgttgcaatcagagccacatcagctgggtccctctcaggatattccacgcttatgacagtgagctagttatctgatggaaacagaggtgagacatttgggtgtattttc

SEQ ID NO: 4836 - DNA, 122 bp, Homo sapiens
  misc_feature (61)..(62): /note="This region represents a CpG dinucleotide"
  misc_feature (61)..(61): /note="Nucleotide may be methylated to form 5-methylcytosine"
aaggcaggaaactttattgaataatcttttctttggggtagagaagttgagaaaccaaagcgtatccaggtcagagaggagagagatccgaccggaagagaagagcacagagggcccaccat

SEQ ID NO: 4837 - DNA, 122 bp, Homo sapiens
  misc_feature (61)..(62): /note="This region represents a CpG dinucleotide"
  misc_feature (61)..(61): /note="Nucleotide may be methylated to form 5-methylcytosine"
cgctgaacacagcccagtttgcaaagagtctagccatgcttgggagctctgaggacaacacggcattgtcacgggcactctcccagctggctgaggtggaagaaaaaattgagcagctccac

SEQ ID NO: 4838 - DNA, 122 bp, Homo sapiens
  misc_feature (61)..(62): /note="This region represents a CpG dinucleotide"
  misc_feature (61)..(61): /note="Nucleotide may be methylated to form 5-methylcytosine"
cctcgaggagtttccccttgtgtaaaccggtatcgcgtcccttccagctctgacatcctgcggttctagaatacccattgattgaaagagctgtggccaaacaggaaggacagagtaagagc

SEQ ID NO: 4839 - DNA, 122 bp, Homo sapiens
  misc_feature (61)..(62): /note="This region represents a CpG dinucleotide"
  misc_feature (61)..(61): /note="Nucleotide may be methylated to form 5-methylcytosine"
atcacatttctgactgttcaaagggatttcagtttcttttagaaattgggtgttgtaaagcgatgtttctattcctagattgtcagttgaatataacttagacttgttgttcttgtctttct

SEQ ID NO: 4840 - DNA, 122 bp, Homo sapiens
  misc_feature (61)..(62): /note="This region represents a CpG dinucleotide"
  misc_feature (61)..(61): /note="Nucleotide may be methylated to form 5-methylcytosine"
ttttattttttggcagtgacaaagtctcactatgctgctcagactgatatcaaactcctacgctcaagcaatcctctcgcctccacttcccaaagtgctgagattacaggcgtgagtgagcc

SEQ ID NO: 4841 - DNA, 122 bp, Homo sapiens
  misc_feature (61)..(62): /note="This region represents a CpG dinucleotide"
  misc_feature (61)..(61): /note="Nucleotide may be methylated to form 5-methylcytosine"
ttcccaaacaaggagcatccaaagacacagtgacttgagctatagatagtaaaaatcatacgagagttgaactgagtcaggtttaggaagcaagtttggttgcatcaattaagcaggctctt

SEQ ID NO: 4842 - DNA, 122 bp, Homo sapiens
  misc_feature (61)..(62): /note="This region represents a CpG dinucleotide"
  misc_feature (61)..(61): /note="Nucleotide may be methylated to form 5-methylcytosine"
ctgagagttggaagctctgagtcatgactgagttggaagcttacatgttgatttacaaggcgtctttgcccattacatttatttacatgtccagaggtcatggcctgaaaggcttggctcca

SEQ ID NO: 4843 - DNA, 122 bp, Homo sapiens
  misc_feature (61)..(62): /note="This region represents a CpG dinucleotide"
  misc_feature (61)..(61): /note="Nucleotide may be methylated to form 5-methylcytosine"
gatggctcacacctgtaatcccaacactttggaaggccacaccaggaggatcattgaagccgtgagttcaatatcagacttggcaacatagcaagacaccatctctacacaaaataaaaaac

SEQ ID NO: 4844 - DNA, 122 bp, Homo sapiens
  misc_feature (61)..(62): /note="This region represents a CpG dinucleotide"
  misc_feature (61)..(61): /note="Nucleotide may be methylated to form 5-methylcytosine"
tattctctgcatctattctctgcctccatgcgtctcgggaatcatggattacgtgaccttcgtgctgtggcttctctcacgtagcacagtgtttgcggggctcacccacattgactcatgca

SEQ ID NO: 4845 - DNA, 122 bp, Homo sapiens
  misc_feature (61)..(62): /note="This region represents a CpG dinucleotide"
  misc_feature (61)..(61): /note="Nucleotide may be methylated to form 5-methylcytosine"
tcatgcaattgagtgctatgaaagtgcaatgagagaatataggaggagaacctaagtctacgggaaagcagaatatcacggaaacacccttggagaaagaatatttaagaactgaaaaatac

SEQ ID NO: 4846 - DNA, 122 bp, Homo sapiens
  misc_feature (61)..(62): /note="This region represents a CpG dinucleotide"
  misc_feature (61)..(61): /note="Nucleotide may be methylated to form 5-methylcytosine"
agcagccttttggaaaacaatccggcaagagccaggaaaatggcagctgcaggccaggtgcggtggcagtggctcatgcctgtaatcccagcactctgggaggccgagatgggtggatcacc

SEQ ID NO: 4847 - DNA, 122 bp, Homo sapiens
  misc_feature (61)..(62): /note="This region represents a CpG dinucleotide"
  misc_feature (61)..(61): /note="Nucleotide may be methylated to form 5-methylcytosine"
ttcctggaacacccttaccgggtggaggttgttaccacacttccatttccctggctcttacgaattcaggctgtgcctcaccatgtattcataactcttctcttgcctccccaaatgcattc

SEQ ID NO: 4848 - DNA, 122 bp, Homo sapiens
  misc_feature (61)..(62): /note="This region represents a CpG dinucleotide"
  misc_feature (61)..(61): /note="Nucleotide may be methylated to form 5-methylcytosine"
aaacccttgcgatgctgggcagcagcagtgagctgcagctcccagtcagctatatggtcacgagagtagataaccataccctacagtgtactgtgctgccagatgattttgcccaactgcag

SEQ ID NO: 4849 - DNA, 122 bp, Homo sapiens
  misc_feature (61)..(62): /note="This region represents a CpG dinucleotide"
  misc_feature (61)..(61): /note="Nucleotide may be methylated to form 5-methylcytosine"
tagcacataaggggagtggctggaaggtccactgttcttgtttagggagagcttttcaggcgtggtgcagccagctgttgaaagtgcttctccagggtgactctattagctcttggggaagc

SEQ ID NO: 4850 - DNA, 122 bp, Homo sapiens
  misc_feature (61)..(62): /note="This region represents a CpG dinucleotide"
  misc_feature (61)..(61): /note="Nucleotide may be methylated to form 5-methylcytosine"
tccatcagcaaactgcagttggtatctcctttaaaatgcaccaagaatcaggtcacttctcgacacacacattgcactcccattactcacagggattgctgcatagcctcctccctagtttc

SEQ ID NO: 4851 - DNA, 122 bp, Homo sapiens
  misc_feature (61)..(62): /note="This region represents a CpG dinucleotide"
  misc_feature (61)..(61): /note="Nucleotide may be methylated to form 5-methylcytosine"
aatgggatcttaggccaggagcctattgttttcccatttgggctggttaagccatttatccggtactgccaagggaagcaacagggctggctcatacacccactttccctttggttgatatc

SEQ ID NO: 4852 - DNA, 122 bp, Homo sapiens
  misc_feature (61)..(62): /note="This region represents a CpG dinucleotide"
  misc_feature (61)..(61): /note="Nucleotide may be methylated to form 5-methylcytosine"
gagatgttacttaacttgaaggcctctttgtggaagaaagatttgtcttccaacattttgcgtcagcagtgctgaagtgccactctgtggaagttgcttcttatggccttcctgccacaaaa

SEQ ID NO: 4853 - DNA, 122 bp, Homo sapiens
  misc_feature (61)..(62): /note="This region represents a CpG dinucleotide"
  misc_feature (61)..(61): /note="Nucleotide may be methylated to form 5-methylcytosine"
atttcccaaggtaacacagcaagaacaaagctgagatttggatccacgtctttctgactgcgaagtctgtgtgtgatcattgtttccattgtcctcaattatggtacattgtatcacagtaa

SEQ ID NO: 4854 - DNA, 122 bp, Homo sapiens
  misc_feature (61)..(62): /note="This region represents a CpG dinucleotide"
  misc_feature (61)..(61): /note="Nucleotide may be methylated to form 5-methylcytosine"
ctcctctgtgctctcaccccaggcttgcctggcggggacagcagacaccaagtgaggtggcgacagactggtctgctgagcggattagtggggtagagtttccccagggtggaggtgtgaag

SEQ ID NO: 4855 - DNA, 122 bp, Homo sapiens
  misc_feature (61)..(62): /note="This region represents a CpG dinucleotide"
  misc_feature (61)..(61): /note="Nucleotide may be methylated to form 5-methylcytosine"
cccagtgtctcagctcagtcctgcaggtcacacactgcttaactccagggtgccaagtcacgccatattctatgtgctcaagagcagtgctacttgagttgagcagtgcacagcttgtgcac

SEQ ID NO: 4856 - DNA, 122 bp, Homo sapiens
  misc_feature (61)..(62): /note="This region represents a CpG dinucleotide"
  misc_feature (61)..(61): /note="Nucleotide may be methylated to form 5-methylcytosine"
agagcaaaaagagaacctggaagtgttcccaaatttaacatctgcaggcagataggatgacgaaatgtattagtactgaggaataactttctcccgtcttcttggaaaacatctggggtatt

SEQ ID NO: 4857 - DNA, 122 bp, Homo sapiens
  misc_feature (61)..(62): /note="This region represents a CpG dinucleotide"
  misc_feature (61)..(61): /note="Nucleotide may be methylated to form 5-methylcytosine"
gattgctggctaattgtgaaaggagactcaggcttttaacactgcaggaatttcaaactgcggtctcagtggccagagtgtcttaccagggagcagacctaatgtatccagtttaaaagggc

SEQ ID NO: 4858 - DNA, 122 bp, Homo sapiens
  misc_feature (61)..(62): /note="This region represents a CpG dinucleotide"
  misc_feature (61)..(61): /note="Nucleotide may be methylated to form 5-methylcytosine"
gagctatgtaatctggcaccgagcaggtgcctgaacaattacagttatgactgtgactcccgtttcctcttctgaggtcttttcaattctccccgccttcaccctgcccagccaggacagcc

SEQ ID NO: 4859 - DNA, 122 bp, Homo sapiens
  misc_feature (61)..(62): /note="This region represents a CpG dinucleotide"
  misc_feature (61)..(61): /note="Nucleotide may be methylated to form 5-methylcytosine"
gagtgactcagccagctgatgtcagatagcctctgtcatgggccccattagtgccactctcgaagactggtctagctattgctgctgcaaatgcccaacctgccagaaacagaaactgttac

SEQ ID NO: 4860 - DNA, 122 bp, Homo sapiens
  misc_feature (61)..(62): /note="This region represents a CpG dinucleotide"
  misc_feature (61)..(61): /note="Nucleotide may be methylated to form 5-methylcytosine"
caggaatggatactgctgctgtcgttgtgtgtgacatatcccttagcctccttgttggtccgtcctctggccctatgtcttcatggctcttgcccctcttccttcttcactatctgactcaa

SEQ ID NO: 4861 - DNA, 122 bp, Homo sapiens
  misc_feature (61)..(62): /note="This region represents a CpG dinucleotide"
  misc_feature (61)..(61): /note="Nucleotide may be methylated to form 5-methylcytosine"
gggttgagaagacattgaccagaccaaaaggagaattgaaagtacttcccctgaacttcacgactagttggtctggctagatcaccttattgtgaaactccagatgacaagccctttccatt

SEQ ID NO: 4862 - DNA, 122 bp, Homo sapiens
  misc_feature (61)..(62): /note="This region represents a CpG dinucleotide"
  misc_feature (61)..(61): /note="Nucleotide may be methylated to form 5-methylcytosine"
aaatattataatgaataattctactataattctactatgatcaggtcatttttgtttcttcggttggaaaggcagggcaggatatgttgtaatgctggtgtttatttcctatgaggctgagt

SEQ ID NO: 4863 - DNA, 122 bp, Homo sapiens
  misc_feature (61)..(62): /note="This region represents a CpG dinucleotide"
  misc_feature (61)..(61): /note="Nucleotide may be methylated to form 5-methylcytosine"
tcccatgctgctgaagtgtcttagctggcttagctcaacatttctgttgtgtggttaacacggtcctgttctaagccttaagaacccatgactagaacaatgggatgatgcagcccagcggg

SEQ ID NO: 4864 - DNA, 122 bp, Homo sapiens
  misc_feature (61)..(62): /note="This region represents a CpG dinucleotide"
  misc_feature (61)..(61): /note="Nucleotide may be methylated to form 5-methylcytosine"
cattccattaagccacttgttgttgggaattctctcaaactgatctgcaattcagaaccacggtgagcaacctgttgcctcaccagactgcctggaactgagcttgaatgttgcttgggcaa

SEQ ID NO: 4865 - DNA, 122 bp, Homo sapiens
  misc_feature (61)..(62): /note="This region represents a CpG dinucleotide"
  misc_feature (61)..(61): /note="Nucleotide may be methylated to form 5-methylcytosine"
gagcccagacgtctacgccaggtcctaattcagttggttcaactgggctgggtgtggacacgtgttgtccagtgagtcatgaatatggataggggtcacacagaataaacttgaccattctt

SEQ ID NO: 4866 - DNA, 122 bp, Homo sapiens
  misc_feature (61)..(62): /note="This region represents a CpG dinucleotide"
  misc_feature (61)..(61): /note="Nucleotide may be methylated to form 5-methylcytosine"
caccacacagacactcacatactcacagacacattctattggttctactggtctggagaacgctgactcatacattgactaataggatccatggaactattgaacaaccaaaccattgaaag

SEQ ID NO: 4867 - DNA, 122 bp, Homo sapiens
  misc_feature (61)..(62): /note="This region represents a CpG dinucleotide"
  misc_feature (61)..(61): /note="Nucleotide may be methylated to form 5-methylcytosine"
ttttctgttctacatcttactctcttttaaagatacagacccaggatttacagtgactgacggacacaggaggctgagaaatagtctaattcaagagactgttgaaactcgttacttggtaa

SEQ ID NO: 4868 - DNA, 122 bp, Homo sapiens
  misc_feature (61)..(62): /note="This region represents a CpG dinucleotide"
  misc_feature (61)..(61): /note="Nucleotide may be methylated to form 5-methylcytosine"
ttaagtagagaaacttgggtgcctttgtcttttggcttagatcacttcgtcaggcccaaacgcaaacctgatagcacagaccagtttctccagaaagatcagatggaagcagcaacatgcgg

SEQ ID NO: 4869 - DNA, 122 bp, Homo sapiens
  misc_feature (61)..(62): /note="This region represents a CpG dinucleotide"
  misc_feature (61)..(61): /note="Nucleotide may be methylated to form 5-methylcytosine"
gacaggcaacacccagggcgtaagttaaaggttttcctgaaagcaaaaaggaaaacccagcgttaagttaagcagtaactaacacaattgagttgtagagagaaggttcgtaactcactgag

SEQ ID NO: 4870 - DNA, 122 bp, Homo sapiens
  misc_feature (61)..(62): /note="This region represents a CpG dinucleotide"
  misc_feature (61)..(61): /note="Nucleotide may be methylated to form 5-methylcytosine"
ctgggattataggcatgagccactgtgccccgcccagtctcaggtatttcttcatagcagcgtgaaaatgaactaatatgtatcccagaaccagaaaatgtgagagtaggaagacaatttac

SEQ ID NO: 4871 - DNA, 122 bp, Homo sapiens
  misc_feature (61)..(62): /note="This region represents a CpG dinucleotide"
  misc_feature (61)..(61): /note="Nucleotide may be methylated to form 5-methylcytosine"
gccttggccacccaaagtcctgggattacaggtgtgagccaccgcacccagccaggattacggtctctggctgactgagcctgggtcatgccaaagcagcccttgcacatctcccatgcctc

SEQ ID NO: 4872 - DNA, 122 bp, Homo sapiens
  misc_feature (61)..(62): /note="This region represents a CpG dinucleotide"
  misc_feature (61)..(61): /note="Nucleotide may be methylated to form 5-methylcytosine"
gcctctcaacattttaaattagtgctgtcataaaccaggatatctggtcagaactgggcacggagactgcaaatgtgagctactactcacaggacagacaatagtgttaacaaacacaggct

SEQ ID NO: 4873 - DNA, 122 bp, Homo sapiens
  misc_feature (61)..(62): /note="This region represents a CpG dinucleotide"
  misc_feature (61)..(61): /note="Nucleotide may be methylated to form 5-methylcytosine"
gggggagaataaccactgtgtaatggttcaagttgctctgggtttaaagatctttagaagcgtgtaaagattatcttttggtttcacagttactgatgaacgcctacacagcccttctgtta

SEQ ID NO: 4874 - DNA, 122 bp, Homo sapiens
  misc_feature (61)..(62): /note="This region represents a CpG dinucleotide"
  misc_feature (61)..(61): /note="Nucleotide may be methylated to form 5-methylcytosine"
gattgtcaaggtcacctgaccagtgactgcagaggctggattggcctgtgggcctgagtccgtaccccttttcactggctcctcctggaggccacatgtaccttgcgcttcctggggcttgg

SEQ ID NO: 4875 - DNA, 122 bp, Homo sapiens
  misc_feature (61)..(62): /note="This region represents a CpG dinucleotide"
  misc_feature (61)..(61): /note="Nucleotide may be methylated to form 5-methylcytosine"
atgatagtacgtaagaaatacaagtaagaagagtaaattttgtcttataccctttaaaagcgtaaagtgctaaacaagtgaaataagagtgaatgaaataaaggtaagtcttttataatggt

SEQ ID NO: 4876 - DNA, 122 bp, Homo sapiens
  misc_feature (61)..(62): /note="This region represents a CpG dinucleotide"
  misc_feature (61)..(61): /note="Nucleotide may be methylated to form 5-methylcytosine"
agaacctgcagcttctaatatgaacatcaaatgaccccaactcattccctgtgagggctccgtgtgtgatctcatccccatgcctcctctgcactgtcatcttggtttctgtctctccttct

SEQ ID NO: 4877 - DNA, 122 bp, Homo sapiens
  misc_feature (61)..(62): /note="This region represents a CpG dinucleotide"
  misc_feature (61)..(61): /note="Nucleotide may be methylated to form 5-methylcytosine"
gcaggcagacaggatggggtaaagttaacagttgggctttgtccctcccccaatctcagccggggacagaggaaggacattttgtgctacagcagctgttttcatactggtcagaccaaggt

SEQ ID NO: 4878 - DNA, 122 bp, Homo sapiens
  misc_feature (61)..(62): /note="This region represents a CpG dinucleotide"
  misc_feature (61)..(61): /note="Nucleotide may be methylated to form 5-methylcytosine"
actcatgttaacagcataaagatccacctagggtttgccagtggtaagcagtgagcctgacgcaattatcggctatgcctatcagcctatttttctggctggtttggtgtgattacagtggt

SEQ ID NO: 4879 - DNA, 122 bp, Homo sapiens
  misc_feature (61)..(62): /note="This region represents a CpG dinucleotide"
  misc_feature (61)..(61): /note="Nucleotide may be methylated to form 5-methylcytosine"
gagagatgcagctcagctttcatgatctaatcagtcccgcttgtgtttgttgccatgttacgagtatgtgctcatggccctgtctgctactagcagtgaatcatgcttgcaaataaataaac

SEQ ID NO: 4880 - DNA, 122 bp, Homo sapiens
  misc_feature (61)..(62): /note="This region represents a CpG dinucleotide"
  misc_feature (61)..(61): /note="Nucleotide may be methylated to form 5-methylcytosine"
aggatctgggagtgaaggactggtcgtacctcaatgcactgctcaccctggcagaaatgacggccttctgctcctggcacaaagctcttaagtctcagaatgaaagaaaaaaaaactttcta

SEQ ID NO: 4881 - DNA, 122 bp, Homo sapiens
  misc_feature (61)..(62): /note="This region represents a CpG dinucleotide"
  misc_feature (61)..(61): /note="Nucleotide may be methylated to form 5-methylcytosine"
tcaagagatgtatctgcctttcccaggacggtcagcctcctatgaagacataatcatagacgtgtgcaccaatttgcacgtcaaactaagaagtgttgtgaaagaggcttgtaaaagtacct

SEQ ID NO: 4882 - DNA, 122 bp, Homo sapiens
  misc_feature (61)..(62): /note="This region represents a CpG dinucleotide"
  misc_feature (61)..(61): /note="Nucleotide may be methylated to form 5-methylcytosine"
tagggacgggatggcgtccacacagaagcaatgtgaacaatgccccctggagttgtacaacgtggggccttgttgagcagtactgtttcgcaacacatagtagcaagaatcctctttgtaag

SEQ ID NO: 4883 - DNA, 122 bp, Homo sapiens
  misc_feature (61)..(62): /note="This region represents a CpG dinucleotide"
  misc_feature (61)..(61): /note="Nucleotide may be methylated to form 5-methylcytosine"
tctgtgaaatatcaagaaaatggcttaagaaaggtgaatggcttgctcaagttcacacagcgaggaatttgctgacagaattccagagtgtggtttagccccaacacggccttcatcccggg

SEQ ID NO: 4884 - DNA, 122 bp, Homo sapiens
  misc_feature (61)..(62): /note="This region represents a CpG dinucleotide"
  misc_feature (61)..(61): /note="Nucleotide may be methylated to form 5-methylcytosine"
ggggttgggttctgtgcaggtgtggaggcgtcaccagggctgaattcatgggcacctccccgcagacactgtaggcctattcaatagaacctgctctccagtcaaggctgccaactcagagg

SEQ ID NO: 4885 - DNA, 122 bp, Homo sapiens
  misc_feature (61)..(62): /note="This region represents a CpG dinucleotide"
  misc_feature (61)..(61): /note="Nucleotide may be methylated to form 5-methylcytosine"
ggaggatctgctgcatttgctggggagtgataacttgaggtgtcatcatagccactgacacgggaacctagaatgttaatgaaggataaataggaagccaggaaatcagaagcacgcagcct

SEQ ID NO: 4886 - DNA, 122 bp, Homo sapiens
  misc_feature (61)..(62): /note="This region represents a CpG dinucleotide"
  misc_feature (61)..(61): /note="Nucleotide may be methylated to form 5-methylcytosine"
tctttggactgaatactatacttcaactttatgtccattgtcttatttgattttcccagccgttgatgagtaatataccattatccttgcttagcaaatgatgaaagcagggttcagagagg

SEQ ID NO: 4887 - DNA, 122 bp, Homo sapiens
  misc_feature (61)..(62): /note="This region represents a CpG dinucleotide"
  misc_feature (61)..(61): /note="Nucleotide may be methylated to form 5-methylcytosine"
gacccctccctctaactctgcagttggcttactttcatacagagcttggcccgtgcagggcgttcagtaagcgtgtgttgagcagatgagcagatgagtgagtcaatgcatgccatgttctt

SEQ ID NO: 4888 - DNA, 122 bp, Homo sapiens
  misc_feature (61)..(62): /note="This region represents a CpG dinucleotide"
  misc_feature (61)..(61): /note="Nucleotide may be methylated to form 5-methylcytosine"
ttaggaattaggaagcttgggctctaacctgtttctgtcactgaaggtttgcagggcccacgtatgagtcatgtctctgctctgcatcctatctgctcactaggcataacagaactgacctt

SEQ ID NO: 4889 - DNA, 122 bp, Homo sapiens
  misc_feature (61)..(62): /note="This region represents a CpG dinucleotide"
  misc_feature (61)..(61): /note="Nucleotide may be methylated to form 5-methylcytosine"
ttctgggcgtatgagagtattatacctctctactaccttagagttaggcagagttgtgggcggaaggaacatgagtcacttttgggctgaagcaagactcttcagtgttctcttatgtggtg

SEQ ID NO: 4890 - DNA, 122 bp, Homo sapiens
  misc_feature (61)..(62): /note="This region represents a CpG dinucleotide"
  misc_feature (61)..(61): /note="Nucleotide may be methylated to form 5-methylcytosine"
agaaaggctggttgcaggcagaaccagatggttgcagtccacacggggaagcaaattggccgtgacatttcagccatgtgaggtttatttaggattagctaagaattctcagccttgactcc

SEQ ID NO: 4891 - DNA, 122 bp, Homo sapiens
  misc_feature (61)..(62): /note="This region represents a CpG dinucleotide"
  misc_feature (61)..(61): /note="Nucleotide may be methylated to form 5-methylcytosine"
tgaaatcacaagctgtaatcaccagagcagtgtaacagaattcctgggtcatgagatagccgtgactgttctgactcatgtcacacaaggggaaaattagcgtgtttctagtcctaagagtt

SEQ ID NO: 4892 - DNA, 122 bp, Homo sapiens
  misc_feature (61)..(62): /note="This region represents a CpG dinucleotide"
  misc_feature (61)..(61): /note="Nucleotide may be methylated to form 5-methylcytosine"
atatctctgactaacatttgggctagtcatgaagagaagaaaaggaagtgacaaagaagacgctctggaataaaccctaggaagtatgtgcctggctgggtgatctagtaaaacagcctggg

SEQ ID NO: 4893 - DNA, 122 bp, Homo sapiens
  misc_feature (61)..(62): /note="This region represents a CpG dinucleotide"
  misc_feature (61)..(61): /note="Nucleotide may be methylated to form 5-methylcytosine"
ctctgccccagtgtttattcctagtagcccatttagttctccccacaagctgatgaggtgcgtatgctgtcatcctcctttttcagacaaagcacagagcggtgaggtctcttgcctaaggt

SEQ ID NO: 4894 - DNA, 122 bp, Homo sapiens
  misc_feature (61)..(62): /note="This region represents a CpG dinucleotide"
  misc_feature (61)..(61): /note="Nucleotide may be methylated to form 5-methylcytosine"
gcaaagaatgattcattaatcgtgcagcctcccaagccagagtaggcttaggaactccagcgcagccatgtggtagaagatttatagacaggaaaaggaaagtaatgcacagaaaatggaaa

SEQ ID NO: 4895 - DNA, 122 bp, Homo sapiens
  misc_feature (61)..(62): /note="This region represents a CpG dinucleotide"
  misc_feature (61)..(61): /note="Nucleotide may be methylated to form 5-methylcytosine"
tggggtgcagcagtcaaaacaccagtgtgaacaggacattgagaatggccggacaggaagcgagcctgggcactgacagcctcaagcagggatagacctgcaaagaaatccccaagcccgct

SEQ ID NO: 4896 - DNA, 122 bp, Homo sapiens
  misc_feature (61)..(62): /note="This region represents a CpG dinucleotide"
  misc_feature (61)..(61): /note="Nucleotide may be methylated to form 5-methylcytosine"
aatgaggccctccaacagtacgcaaacaatgtgagtttcacagaatcaagcagccctggtcggtcaaaatcatttttagtttactctgggagcaaaaaacacaggataaataattttatgtt

SEQ ID NO: 4897 - DNA, 122 bp, Homo sapiens
  misc_feature (61)..(62): /note="This region represents a CpG dinucleotide"
  misc_feature (61)..(61): /note="Nucleotide may be methylated to form 5-methylcytosine"
ttgagtcttggtttccttgcctgtgaaatgggaagaatgactcatttcctgactaccttgcgtggttgggcaaatatcatttaggataattggtctgaaatgactctatggacttccaagcc

SEQ ID NO: 4898 - DNA, 122 bp, Homo sapiens
  misc_feature (61)..(62): /note="This region represents a CpG dinucleotide"
  misc_feature (61)..(61): /note="Nucleotide may be methylated to form 5-methylcytosine"
ggggcactctgggaggcagcagtgatctgcctgagtctttttcctggggtgggggcactccgctcagctcaccaggacacagtgaggtgccagtgagggtttgggtggaaaagccttttgag

SEQ ID NO: 4899 - DNA, 122 bp, Homo sapiens
  misc_feature (61)..(62): /note="This region represents a CpG dinucleotide"
  misc_feature (61)..(61): /note="Nucleotide may be methylated to form 5-methylcytosine"
tctttcttaagcctccttgttcctcagagcaggcagtgcaggctatgggattccccaggacggagaggcctctgccccggctgcttgatgcaaggctcagagaggccactaggtttctacca

SEQ ID NO: 4900 - DNA, 122 bp, Homo sapiens
  misc_feature (61)..(62): /note="This region represents a CpG dinucleotide"
  misc_feature (61)..(61): /note="Nucleotide may be methylated to form 5-methylcytosine"
gctggtgtgagtaagtggaaagccattttagagaagccagaattgggttgccatctgtcacgcatgggctttgctccttacacatattggtgaataaaatgtttaacaggctgtagccggaa

SEQ ID NO: 4901 - DNA, 122 bp, Homo sapiens
  misc_feature (61)..(62): /note="This region represents a CpG dinucleotide"
  misc_feature (61)..(61): /note="Nucleotide may be methylated to form 5-methylcytosine"
agctcactcctgtggctcatgagtttgtgctggcttttaataggaggactcagttccaatcgtgtgaccttctccatagagcttcttgagtatccttattatgtgaccactgacttccttca

SEQ ID NO: 4902 - DNA, 122 bp, Homo sapiens
  misc_feature (61)..(62): /note="This region represents a CpG dinucleotide"
  misc_feature (61)..(61): /note="Nucleotide may be methylated to form 5-methylcytosine"
aacttgcttaagcttctatggccaataatagtgagcagactccagtctgactccaaagcccgtgctattcccctcacacctctctcccttccccagctcaaaaaggcctatttttctaactg

SEQ ID NO: 4903 - DNA, 122 bp, Homo sapiens
  misc_feature (61)..(62): /note="This region represents a CpG dinucleotide"
  misc_feature (61)..(61): /note="Nucleotide may be methylated to form 5-methylcytosine"
ttacccattttaagaaagttaacagcaaagtacaggggcatagctcagctacttacatcacgtaatgtggaagaaacaatggattagaaatcagaacatgtggctactggtttggactctcc

SEQ ID NO: 4904 - DNA, 122 bp, Homo sapiens
  misc_feature (61)..(62): /note="This region represents a CpG dinucleotide"
  misc_feature (61)..(61): /note="Nucleotide may be methylated to form 5-methylcytosine"
gtgcaggcacctgctgcccacaggcctttgggtggtgtgagaacaccagaatcaggttaccgtcactgagttgccaaaccacattctgattctaatgctggccagctgtgtgcccttgggtc

SEQ ID NO: 4905 - DNA, 122 bp, Homo sapiens
  misc_feature (61)..(62): /note="This region represents a CpG dinucleotide"
  misc_feature (61)..(61): /note="Nucleotide may be methylated to form 5-methylcytosine"
tcccaaactgtttcaacatgatccctgctggcaggagtcagagatggctggtgtacaagacggttgagaaagcccatgacatacagttagtggctggttgagatagtttccaaatataaata

SEQ ID NO: 4906 - DNA, 122 bp, Homo sapiens
  misc_feature (61)..(62): /note="This region represents a CpG dinucleotide"
  misc_feature (61)..(61): /note="Nucleotide may be methylated to form 5-methylcytosine"
gtatctatgcccaggctgtaaaagattggaatctttgctcatggagcctgggagctgccacgtaagagcctgtattcaaaaagagctggctgagcccagccttcagccatttctgctaaggt

SEQ ID NO: 4907 - DNA, 122 bp, Homo sapiens
  misc_feature (61)..(62): /note="This region represents a CpG dinucleotide"
  misc_feature (61)..(61): /note="Nucleotide may be methylated to form 5-methylcytosine"
tctctaggggcatgtgtgtgtgtttcccaatgagagactgggtttggcatgggaagagggcggaaggtaaagctaggtataaaggagcagatataatgtaaggcttattttcatcctgtttt

SEQ ID NO: 4908 - DNA, 122 bp, Homo sapiens
  misc_feature (61)..(62): /note="This region represents a CpG dinucleotide"
  misc_feature (61)..(61): /note="Nucleotide may be methylated to form 5-methylcytosine"
agcacctagcatcttagtgtggagctgaacaggtactgcctgtgtttcagagagctcagccgctgttacagaatactgcaggctgcatggtttacgcaatagaaatttatttcttgtagctc

SEQ ID NO: 4909 - DNA, 122 bp, Homo sapiens
  misc_feature (61)..(62): /note="This region represents a CpG dinucleotide"
  misc_feature (61)..(61): /note="Nucleotide may be methylated to form 5-methylcytosine"
cctccccccaccccggcctctcaaaatgctgggattacaggcgtgagccactgagcccggcgtggtgttgcatttttaagaatcccttggctcaacacttcatctgagttttctttacaatt

SEQ ID NO: 4910 - DNA, 122 bp, Homo sapiens
  misc_feature (61)..(62): /note="This region represents a CpG dinucleotide"
  misc_feature (61)..(61): /note="Nucleotide may be methylated to form 5-methylcytosine"
agaggagggtgtgcgaggagacccaaggcgggatctaggctttggaacgttggaggtttccggccacagaggcagggcctccggggagccaagaggggcggggagagacacacacagagaag

SEQ ID NO: 4911 - DNA, 122 bp, Homo sapiens
  misc_feature (61)..(62): /note="This region represents a CpG dinucleotide"
  misc_feature (61)..(61): /note="Nucleotide may be methylated to form 5-methylcytosine"
ctggattcttgcacactgctcagtgatgtggtggaatgcaatatggaagtgggaacagcacgagaatgaaggcaggctttgccactctgactagctctgtgaccttggcaatccactcgatc

SEQ ID NO: 4912 - DNA, 122 bp, Homo sapiens
  misc_feature (61)..(62): /note="This region represents a CpG dinucleotide"
  misc_feature (61)..(61): /note="Nucleotide may be methylated to form 5-methylcytosine"
gcatcaaactgtccccaagctcaaggccagaggaagagcaggttgggagagggcggggtgcggacaagcatttgctaagagggagaggcagttaccagcttattttgttcatggtctgtgtc

SEQ ID NO: 4913 - DNA, 122 bp, Homo sapiens
  misc_feature (61)..(62): /note="This region represents a CpG dinucleotide"
  misc_feature (61)..(61): /note="Nucleotide may be methylated to form 5-methylcytosine"
aatacattccaagacccccagagggtgtctgaaagcacagatagtaccaaaccctacctacgctgtacatgacagtcgacctgataatcgagttggctattaagtgactaatggctgggtag

SEQ ID NO: 4914 - DNA, 122 bp, Homo sapiens
  misc_feature (61)..(62): /note="This region represents a CpG dinucleotide"
  misc_feature (61)..(61): /note="Nucleotide may be methylated to form 5-methylcytosine"
tatagttatcacctctaacacatgagataaatcatgtaattggctgggcgtggtggcccacgcctgtaatcccagcactttgggaggcaggtggatcacctgaggtcaggagtccaagacca

SEQ ID NO: 4915 - DNA, 122 bp, Homo sapiens
  misc_feature (61)..(62): /note="This region represents a CpG dinucleotide"
  misc_feature (61)..(61): /note="Nucleotide may be methylated to form 5-methylcytosine"
atgataaacaggtgtgatattcctgagtccctaggtagctataaggccagttagcctgggcggcttcagcctcctgctggtgacttcacctcgctgcctttcagtttcatcctctctaaaac

SEQ ID NO: 4916 - DNA, 122 bp, Homo sapiens
  misc_feature (61)..(62): /note="This region represents a CpG dinucleotide"
  misc_feature (61)..(61): /note="Nucleotide may be methylated to form 5-methylcytosine"
cataggagcatcatcatggtgctccattttgcatataacttggtgtctacatgtaggggacgtgtttcgtggtttagtgagaaagggaaagccaagacatgctatgatgacatccatatggt

SEQ ID NO: 4917 - DNA, 122 bp, Homo sapiens
  misc_feature (61)..(62): /note="This region represents a CpG dinucleotide"
  misc_feature (61)..(61): /note="Nucleotide may be methylated to form 5-methylcytosine"
aacccatcctgacctggtcttgaccttagcattactaataaggtacttacctcatcatttcgtttctcacttactgaacgtgactataaatcctcctgttactcaagatcttggttttccac

SEQ ID NO: 4918 - DNA, 122 bp, Homo sapiens
  misc_feature (61)..(62): /note="This region represents a CpG dinucleotide"
  misc_feature (61)..(61): /note="Nucleotide may be methylated to form 5-methylcytosine"
tctctattacagatgagacaacaggctcagaaagtttaaagaactcattgaaagtcaccccgatggtaaatggtagatttggattcaacaatgtatgctggcatcagaccagataaacttac

SEQ ID NO: 4919 - DNA, 122 bp, Homo sapiens
  misc_feature (61)..(62): /note="This region represents a CpG dinucleotide"
  misc_feature (61)..(61): /note="Nucleotide may be methylated to form 5-methylcytosine"
catgggtggactgaggctcagactacgggggcacctggttcatgacggagacatcagctgcgtgagtccagtaacagtcgtgcacagagacgaaggtcaggcccttcctgtggcagagcgga

SEQ ID NO: 4920 - DNA, 122 bp, Homo sapiens
  misc_feature (61)..(62): /note="This region represents a CpG dinucleotide"
  misc_feature (61)..(61): /note="Nucleotide may be methylated to form 5-methylcytosine"
aaaagaaaaaaagagagagagggcagaaggatgcttcaaagatgagggggtgtctggtaacgatgataatgatagcatgattcagggcactgtgcaaccaatctggagaagggtggtagggg

SEQ ID NO: 4921 - DNA, 122 bp, Homo sapiens
  misc_feature (61)..(62): /note="This region represents a CpG dinucleotide"
  misc_feature (61)..(61): /note="Nucleotide may be methylated to form 5-methylcytosine"
ttctacccagaatacaaagtgacctttttaaaaatgtaaatcagatcatgtaataccctccggtcccaatttacccttaagaaccagttccttatcaaggcctagaaggtactgcataatcc

SEQ ID NO: 4922 - DNA, 122 bp, Homo sapiens
  misc_feature (61)..(62): /note="This region represents a CpG dinucleotide"
  misc_feature (61)..(61): /note="Nucleotide may be methylated to form 5-methylcytosine"
ttactcgatagtaaaccacccaaaaaattcatagcaaacttctgaccccttttgcttccacgttaacactggaaatgctgagaccagaaagtcagcttgcagagaggtgaaaaatgtctgta

SEQ ID NO: 4923 - DNA, 122 bp, Homo sapiens
  misc_feature (61)..(62): /note="This region represents a CpG dinucleotide"
  misc_feature (61)..(61): /note="Nucleotide may be methylated to form 5-methylcytosine"
gcaggatggttaagcggggcgggtgtgagacagtctggctccgcatctgaatccaggctccgccccatattaacagcggaacctctttgtgcctcagttcctcaactgtcaaatgagaataa

SEQ ID NO: 4924 - DNA, 122 bp, Homo sapiens
  misc_feature (61)..(62): /note="This region represents a CpG dinucleotide"
  misc_feature (61)..(61): /note="Nucleotide may be methylated to form 5-methylcytosine"
gctggctttaaaataggaagttatcctggattatcctataatcacaagaacccttaaaagcggaagagggaattggagaaccagagaaactgcagcatgggaagggcttggcttggtattgc

SEQ ID NO: 4925 - DNA, 122 bp, Homo sapiens
  misc_feature (61)..(62): /note="This region represents a CpG dinucleotide"
  misc_feature (61)..(61): /note="Nucleotide may be methylated to form 5-methylcytosine"
catacctatgactcaactcagaagtcacctcctgcaagaagatgggttggacactgcacccgcttccctccacccccaccacagtgacctgtttgcttggtgtagtggagctggactggcca

SEQ ID NO: 4926 - DNA, 122 bp, Homo sapiens
  misc_feature (61)..(62): /note="This region represents a CpG dinucleotide"
  misc_feature (61)..(61): /note="Nucleotide may be methylated to form 5-methylcytosine"
attcttaagaagctatgaaatgcctctgaaaattccttgcaaccttggagtaacttgatccggagcctagacacttgattctagtccttgattttcttatcactttctgtaaacattgaata

SEQ ID NO: 4927 - DNA, 122 bp, Homo sapiens
  misc_feature (61)..(62): /note="This region represents a CpG dinucleotide"
  misc_feature (61)..(61): /note="Nucleotide may be methylated to form 5-methylcytosine"
aacctcccagggcccaagcgatcctcccatcttagcctcccaaggtgctgggaccacaggcgtgctccccacgcccagctaatttatagaattttttgtagacccggggtttcaacatgcta

SEQ ID NO: 4928 - DNA, 122 bp, Homo sapiens
  misc_feature (61)..(62): /note="This region represents a CpG dinucleotide"
  misc_feature (61)..(61): /note="Nucleotide may be methylated to form 5-methylcytosine"
ccttaagcaacttacgttacgcaataaggcatatacaaaaccagttgcagtgtatagtgacgatgatgtacaatatcagaggtgggataaattactttagtaaagataagcaatgcttgagt

SEQ ID NO: 4929 - DNA, 122 bp, Homo sapiens
  misc_feature (61)..(62): /note="This region represents a CpG dinucleotide"
  misc_feature (61)..(61): /note="Nucleotide may be methylated to form 5-methylcytosine"
agcaatgctcaaaataaaaataacaggaaatgagaattgaggaatattcacataagggaacgatatattgcagttaagatgagtaaactagagctcaatgtattaacagaatgttgagtgaa

SEQ ID NO: 4930 - DNA, 122 bp, Homo sapiens
  misc_feature (61)..(62): /note="This region represents a CpG dinucleotide"
  misc_feature (61)..(61): /note="Nucleotide may be methylated to form 5-methylcytosine"
attcacgctaaatgtcctccagttataaaacctcagaaacaacctgtatgttcaaagtgccgcaccttgcacaactcctatggtgccatgcacagatgagcagagcatggccagatggtcta

SEQ ID NO: 4931 - DNA, 122 bp, Homo sapiens
  misc_feature (61)..(62): /note="This region represents a CpG dinucleotide"
  misc_feature (61)..(61): /note="Nucleotide may be methylated to form 5-methylcytosine"
cttcacagtttttgcatgacctgtgttatgaggttccttgtgatcttaacactgcctacccgtctcagttcctgtctgcctattccccctgtaaagtggaggcatagaggataatagtgtct

SEQ ID NO: 4932 - DNA, 122 bp, Homo sapiens
  misc_feature (61)..(62): /note="This region represents a CpG dinucleotide"
  misc_feature (61)..(61): /note="Nucleotide may be methylated to form 5-methylcytosine"
atgccccgcctggctcctgagcagatcagctgggcctggaccagggcatgggtggctgaccgtcccactgagggcagagagagtagcggcccgtcacaggaagacctgtgcattgcttttcc

SEQ ID NO: 4933 - DNA, 122 bp, Homo sapiens
  misc_feature (61)..(62): /note="This region represents a CpG dinucleotide"
  misc_feature (61)..(61): /note="Nucleotide may be methylated to form 5-methylcytosine"
cctggaaactaatacttcttgtggtgggttggggtgggtggttgtgcatcaagcaacagtcgtcagcagccccatgagtcatgtggaaggagtggccagagaaagagtggatgctctacagc

SEQ ID NO: 4934 - DNA, 122 bp, Homo sapiens
  misc_feature (61)..(62): /note="This region represents a CpG dinucleotide"
  misc_feature (61)..(61): /note="Nucleotide may be methylated to form 5-methylcytosine"
ggaactccttctccagacatgcttcctgaggctggctccctgtggctactgaagctgctccgggacatccagttggcccagttttactggcccatccttgaggagcttaatgtcactcggcc

SEQ ID NO: 4935 - DNA, 122 bp, Homo sapiens
  misc_feature (61)..(62): /note="This region represents a CpG dinucleotide"
  misc_feature (61)..(61): /note="Nucleotide may be methylated to form 5-methylcytosine"
gagtcagaacctgggtggaatcttggctctgccactcattaagcgccatgaccttaagcacgttgcctaaaactctctagcctgcttcctcttctacaaactgcacacacctaccccacagg

SEQ ID NO: 4936 - DNA, 122 bp, Homo sapiens
  misc_feature (61)..(62): /note="This region represents a CpG dinucleotide"
  misc_feature (61)..(61): /note="Nucleotide may be methylated to form 5-methylcytosine"
agcaattatggaaggccaccacttcatcaagtgtgtctgcactgagagtattattcttagcggctaaagcattgctaaagctaagaagccgtttactattggtgaagagttgatcctgcctg

SEQ ID NO: 4937 - DNA, 122 bp, Homo sapiens
  misc_feature (61)..(62): /note="This region represents a CpG dinucleotide"
  misc_feature (61)..(61): /note="Nucleotide may be methylated to form 5-methylcytosine"
gatgctgttaatctataaccataccctgttatagatgacggggttctctataaccaaccccgtgctctctgaaacatgtgctgtgtcaactcagggttaaatggattaagggctgtgcagga

SEQ ID NO: 4938 - DNA, 122 bp, Homo sapiens
  misc_feature (61)..(62): /note="This region represents a CpG dinucleotide"
  misc_feature (61)..(61): /note="Nucleotide may be methylated to form 5-methylcytosine"
gataaaacatccttttagcagcaatctgataaatatggtagaatccttttaaccaacttccgcttaaccaactgtccagattaaccaatgagctccattccccttgtaaatcatactgactg

SEQ ID NO: 4939 - DNA, 122 bp, Homo sapiens
  misc_feature (61)..(62): /note="This region represents a CpG dinucleotide"
  misc_feature (61)..(61): /note="Nucleotide may be methylated to form 5-methylcytosine"
gacaccatgatgagtgatgtagctctcctgctgccagcttacctatcatcggctgtaacacgccctcggcaattttaatgagctgctggtagatctgaatggaaaggtcactcagcacctga

SEQ ID NO: 4940 - DNA, 122 bp, Homo sapiens
  misc_feature (61)..(62): /note="This region represents a CpG dinucleotide"
  misc_feature (61)..(61): /note="Nucleotide may be methylated to form 5-methylcytosine"
aagataacgataacgatgacaatgctggtaatagtgatgacaaaagttagaaccttctgacgcagcttttgacttatgtgctacatccagtgttggagcttggtttttatgggctgggtaag

SEQ ID NO: 4941 - DNA, 122 bp, Homo sapiens
  misc_feature (61)..(62): /note="This region represents a CpG dinucleotide"
  misc_feature (61)..(61): /note="Nucleotide may be methylated to form 5-methylcytosine"
gggacaaaggtgttgaatggtacaggaaacaggagtcttaccagggtcatgctgagtgtacggcccatgacagcatggaacaggtcgtgtgcagctgggccagacacaacaaaaaattcaca

SEQ ID NO: 4942 - DNA, 122 bp, Homo sapiens
  misc_feature (61)..(62): /note="This region represents a CpG dinucleotide"
  misc_feature (61)..(61): /note="Nucleotide may be methylated to form 5-methylcytosine"
tgatctttccatttcattgcattatccatatgacctttttttctcttaccagattgctctcgcattagtcctcagacatgccaggtattgaaatgagtcacttacaaccaaatatagttgac

SEQ ID NO: 4943 - DNA, 122 bp, Homo sapiens
  misc_feature (61)..(62): /note="This region represents a CpG dinucleotide"
  misc_feature (61)..(61): /note="Nucleotide may be methylated to form 5-methylcytosine"
aactccatcacttactagctgtgtgatttggggcaagttggtcaatctctctgtgctgcacgtgcatctcagagtcattgggaagattcagtgacatgaatcatgacatattcaacacatag

SEQ ID NO: 4944 - DNA, 122 bp, Homo sapiens
  misc_feature (61)..(62): /note="This region represents a CpG dinucleotide"
  misc_feature (61)..(61): /note="Nucleotide may be methylated to form 5-methylcytosine"
cggcttttgctggtaacctgaaacttaagtagtcacatgtagttcaaccagctccaaacacggttgtacagtggtaattattctgcagcatttatgggcctaaatttcagtctgaattgcaa

SEQ ID NO: 4945 - DNA, 122 bp, Homo sapiens
  misc_feature (61)..(62): /note="This region represents a CpG dinucleotide"
  misc_feature (61)..(61): /note="Nucleotide may be methylated to form 5-methylcytosine"
agatgagttgcctgcagttttggaggccttcagagcatttcactagacctctgtctgtgtcggtccagtgtctttagccaaggtgagcttgctcgtggtgtgaagtgtgccacgaaaatggg

SEQ ID NO: 4946 - DNA, 122 bp, Homo sapiens
  misc_feature (61)..(62): /note="This region represents a CpG dinucleotide"
  misc_feature (61)..(61): /note="Nucleotide may be methylated to form 5-methylcytosine"
agtcatgtctgagtcagtttttaatctaaagaagctgagcttctgctttatctttgacctcgttctattttttctcctgcttcagttgccaaaggttacagtaatgcatgtgccaaattggt

SEQ ID NO: 4947 - DNA, 122 bp, Homo sapiens
  misc_feature (61)..(62): /note="This region represents a CpG dinucleotide"
  misc_feature (61)..(61): /note="Nucleotide may be methylated to form 5-methylcytosine"
ctcaagcaatccgctcacgtcaacctccccaaatgctgggattacaggcgtgagccaccgcgccaggcctgagtaatcctaatcacaggattttaaaaagaaacttcctgcgccacccatta

SEQ ID NO: 4948 - DNA, 122 bp, Homo sapiens
  misc_feature (61)..(62): /note="This region represents a CpG dinucleotide"
  misc_feature (61)..(61): /note="Nucleotide may be methylated to form 5-methylcytosine"
catgtatttacttatgagttcctctcccaacagagccttctactgaaaggtgttcaataccgtgttcatagagtgaaggtatgaataactgactctaattaatccttaaattgctgtgggag

SEQ ID NO: 4949 - DNA, 122 bp, Homo sapiens
  misc_feature (61)..(62): /note="This region represents a CpG dinucleotide"
  misc_feature (61)..(61): /note="Nucleotide may be methylated to form 5-methylcytosine"
aggcagtctgtctcatctcttaatcatgagtttgtgctacctctcgtctgtggatctaggcgtgaggaggtagaagggagcccctggtcacgcccctgtgccgccttctagtggcatggcct

SEQ ID NO: 4950 - DNA, 122 bp, Homo sapiens
  misc_feature (61)..(62): /note="This region represents a CpG dinucleotide"
  misc_feature (61)..(61): /note="Nucleotide may be methylated to form 5-methylcytosine"
ctgaggaattaaagaaagaagccatctatgttcttcctggggcatcatttgagctcattacgtggacaccgctgcctctgaagctggttctgccacacgcctgacaggccgatcacagcctg

SEQ ID NO: 4951 - DNA, 122 bp, Homo sapiens
  misc_feature (61)..(62): /note="This region represents a CpG dinucleotide"
  misc_feature (61)..(61): /note="Nucleotide may be methylated to form 5-methylcytosine"
caagcaaaaaacagcaggataaagaaagctggaggcaaaagacaaagccaatgcaatccacgcttgtttttcgagtggcactgactcatgtgagacacccactgctaggacacctgacttca

SEQ ID NO: 4952 - DNA, 122 bp, Homo sapiens
  misc_feature (61)..(62): /note="This region represents a CpG dinucleotide"
  misc_feature (61)..(61): /note="Nucleotide may be methylated to form 5-methylcytosine"
tctccacaacaaagaatatccagcccaaaatgtcagtagtgccactgttgataaaccctacgtagatacaaacttgaataagactcttggcttcctcagtgacttaacgttcatcctgtgta

SEQ ID NO: 4953 - DNA, 122 bp, Homo sapiens
  misc_feature (61)..(62): /note="This region represents a CpG dinucleotide"
  misc_feature (61)..(61): /note="Nucleotide may be methylated to form 5-methylcytosine"
gttctaaccttaaatgttgtaagagggatggaggagaatctttcaagttgaacaaactgccgcttgtctgtctagcgttaggagacatttgtccactgtctcatcccattgtcttcaaattg

SEQ ID NO: 4954 - DNA, 122 bp, Homo sapiens
  misc_feature (61)..(62): /note="This region represents a CpG dinucleotide"
  misc_feature (61)..(61): /note="Nucleotide may be methylated to form 5-methylcytosine"
ccgcgcccgcccacatctcttcttacaggtcaactggctttccttgacacccagttacttcgttcttcaggtgttgcaaaactcatcagcaagcacctaggcaattactgttcaaaatatct

SEQ ID NO: 4955 - DNA, 122 bp, Homo sapiens
  misc_feature (61)..(62): /note="This region represents a CpG dinucleotide"
  misc_feature (61)..(61): /note="Nucleotide may be methylated to form 5-methylcytosine"
aggccaacacctggaagatttttgttccacaaaatgtaaaatgcctcatccaggcagcatcgccatcagctggaggcttgttaaaaatacacagtctcaggccccatgtagacctgctgagt

SEQ ID NO: 4956 - DNA, 122 bp, Homo sapiens
  misc_feature (61)..(62): /note="This region represents a CpG dinucleotide"
  misc_feature (61)..(61): /note="Nucleotide may be methylated to form 5-methylcytosine"
tgcaatgtgatccttgttctaatgttgcccacatgccttaagctgacctcctggatgacccgttgcctaagctgaggactgaaggaactagcctgaggaagtggtgagcagtagctaaggca

SEQ ID NO: 4957 - DNA, 122 bp, Homo sapiens
  misc_feature (61)..(62): /note="This region represents a CpG dinucleotide"
  misc_feature (61)..(61): /note="Nucleotide may be methylated to form 5-methylcytosine"
gttctcctacagccatggtaaggactttgacttttactctgagatgaaaagccagaggagcggcatgacctggaattatgttttaactaggatcacattgtctgctgtatggagaataggcc

SEQ ID NO: 4958 - DNA, 122 bp, Homo sapiens
  misc_feature (61)..(62): /note="This region represents a CpG dinucleotide"
  misc_feature (61)..(61): /note="Nucleotide may be methylated to form 5-methylcytosine"
cagaggggaggcaataagccttctctgcattgctggggataacctgaaatgttgcaacctcgtgccggctatttggcaagaccaaaaacattttacaaacacatgggcccagcagatacatt

SEQ ID NO: 4959 - DNA, 122 bp, Homo sapiens
  misc_feature (61)..(62): /note="This region represents a CpG dinucleotide"
  misc_feature (61)..(61): /note="Nucleotide may be methylated to form 5-methylcytosine"
gcagcagcagcagcaggaggggccggggggccatggcggggtcggggcgcaggagctgagcgctgcggccacggccccgggcccccgcaaggcccctttatggcggcgcccggaaaggggac

SEQ ID NO: 4960 - DNA, 122 bp, Homo sapiens
  misc_feature (61)..(62): /note="This region represents a CpG dinucleotide"
  misc_feature (61)..(61): /note="Nucleotide may be methylated to form 5-methylcytosine"
acacagagtgatccgccctcttttccctggtgaatcacgcagcctaactcaccatgttcccggccacgccacagtgaatcacgcagcctaactcaccaggttactggcctaactcaccatgt

SEQ ID NO: 4961 - DNA, 122 bp, Homo sapiens
  misc_feature (61)..(62): /note="This region represents a CpG dinucleotide"
  misc_feature (61)..(61): /note="Nucleotide may be methylated to form 5-methylcytosine"
cagaaaatgagaaatgaatttaaaatgagccaagacttgcaagagggagagggaaaaacacgagagagccccttctattattcctagcccgggaagagccttccagatttcctgggtatctt

SEQ ID NO: 4962 - DNA, 122 bp, Homo sapiens
  misc_feature (61)..(62): /note="This region represents a CpG dinucleotide"
  misc_feature (61)..(61): /note="Nucleotide may be methylated to form 5-methylcytosine"
gtttgtttgtgcctggctgatttcacttagcataatgtcctcaaggcctatctcagtcagcgtgtgtcagagtttccttcctttttgaggctgaataatactcctttacatgtatgtggcac

SEQ ID NO: 4963 - DNA, 122 bp, Homo sapiens
  misc_feature (61)..(62): /note="This region represents a CpG dinucleotide"
  misc_feature (61)..(61): /note="Nucleotide may be methylated to form 5-methylcytosine"
cagaaagagaacaatgcaggccatctatcatagcagcctctaacctagaggtgacttgcccgctgcagcctcatttctcagttctgtaattaccacccctcccacagactggacaccacagc

SEQ ID NO: 4964 - DNA, 122 bp, Homo sapiens
  misc_feature (61)..(62): /note="This region represents a CpG dinucleotide"
  misc_feature (61)..(61): /note="Nucleotide may be methylated to form 5-methylcytosine"
aacctgaggcccgagggatagaggtgcttgtatgaatttgaacaaattgatttgtatgtgcgtatctgttataagctgggccctctgtggcatgagttccaaggaagcccccactccatacc

SEQ ID NO: 4965 - DNA, 122 bp, Homo sapiens
  misc_feature (61)..(62): /note="This region represents a CpG dinucleotide"
  misc_feature (61)..(61): /note="Nucleotide may be methylated to form 5-methylcytosine"
tcataaagctctaagcatgatgttaagaactccaggaatcctggactcacactgtgcttccgtcttcttattaaggctcactgactaagcttctgcaggatgattttcaaatctactgacat

SEQ ID NO: 4966 - DNA, 122 bp, Homo sapiens
  misc_feature (61)..(62): /note="This region represents a CpG dinucleotide"
  misc_feature (61)..(61): /note="Nucleotide may be methylated to form 5-methylcytosine"
ttttcactggttgaacagacacgtgagttcacacatgacaccatctattgggatgagtcacgttgcttgctcaacaactttaaggcctaggatcagtgacagaactccaggagcagcggggt

SEQ ID NO: 4967 - DNA, 122 bp, Homo sapiens
  misc_feature (61)..(62): /note="This region represents a CpG dinucleotide"
  misc_feature (61)..(61): /note="Nucleotide may be methylated to form 5-methylcytosine"
gctcccaaacctgccctccaggccccgcccaccaggtctctggtccctcccaccagcctgcggctctacctaacccatctgcagtcctggggggattcccagtcttgcctaccgggctacag

SEQ ID NO: 4968 - DNA, 122 bp, Homo sapiens
  misc_feature (61)..(62): /note="This region represents a CpG dinucleotide"
  misc_feature (61)..(61): /note="Nucleotide may be methylated to form 5-methylcytosine"
cacgccccttttgaggtgattttcgcttacaaccaagccagaaggaagtcataaagctcacgggccttacatagagaggaagcatcagagagttctcactcacagccctcactgctcagtgc

SEQ ID NO: 4969 - DNA, 122 bp, Homo sapiens
  misc_feature (61)..(62): /note="This region represents a CpG dinucleotide"
  misc_feature (61)..(61): /note="Nucleotide may be methylated to form 5-methylcytosine"
gtgctgggcgtggtgagggcctgacctgctctgctcagcctgtatgataggaaaggtgcacgtgcgttcagacacgtagtgcacaccctccgccacctcctgcatgagagattcctgctcct

SEQ ID NO: 4970 - DNA, 122 bp, Homo sapiens
  misc_feature (61)..(62): /note="This region represents a CpG dinucleotide"
  misc_feature (61)..(61): /note="Nucleotide may be methylated to form 5-methylcytosine"
ctatttgggaggctgaggtggcagtattgcttatacccgctggaaccccggaggtggagacgcagcaccaggtgcttctgtctcgccctttctactccacatttcctcttggtctatttatt

SEQ ID NO: 4971 - DNA, 122 bp, Homo sapiens
  misc_feature (61)..(62): /note="This region represents a CpG dinucleotide"
  misc_feature (61)..(61): /note="Nucleotide may be methylated to form 5-methylcytosine"
aaaggcctcacaatgctccatcaacggtgatctctgctgagcagaggcacaaagaggcaacgtgacatttggtgacagcaacagactaggacttggggttttgtccctaggtggcccctgca

SEQ ID NO: 4972 - DNA, 122 bp, Homo sapiens
  misc_feature (61)..(62): /note="This region represents a CpG dinucleotide"
  misc_feature (61)..(61): /note="Nucleotide may be methylated to form 5-methylcytosine"
attctaagagggaatgagagacaagaaatattcagctgtacaacaacacagagtgatgaacgtaaaggatagcatgagggccaaaattcagttaaggagagtgagtcacttactttaagccc

SEQ ID NO: 4973 - DNA, 122 bp, Homo sapiens
  misc_feature (61)..(62): /note="This region represents a CpG dinucleotide"
  misc_feature (61)..(61): /note="Nucleotide may be methylated to form 5-methylcytosine"
ctaagacatggaagcagagtgactggcctgagctcacagcctgagctgggattcaagcctcgctctttcccaagactattctttccttgtgtttgatcccattaatcatcattctttttttt

SEQ ID NO: 4974 - DNA, 122 bp, Homo sapiens
  misc_feature (61)..(62): /note="This region represents a CpG dinucleotide"
  misc_feature (61)..(61): /note="Nucleotide may be methylated to form 5-methylcytosine"
catctactcacctttcaagtttctcatgccagtgcctgactccattagttacccatattacgcatgtgaaaaacctggtggcacctaagatgtcttcatctcccacagcccctacttacaat

SEQ ID NO: 4975 - DNA, 122 bp, Homo sapiens
  misc_feature (61)..(62): /note="This region represents a CpG dinucleotide"
  misc_feature (61)..(61): /note="Nucleotide may be methylated to form 5-methylcytosine"
gccaatcatatttttctcagaatgaaggtgcaaaaattaaatcatgcatgcaaagcagttcgtaggtgctccatagtatgtggttagccttataatgcttacttaggatccgatgtaggaag

SEQ ID NO: 4976 - DNA, 122 bp, Homo sapiens
  misc_feature (61)..(62): /note="This region represents a CpG dinucleotide"
  misc_feature (61)..(61): /note="Nucleotide may be methylated to form 5-methylcytosine"
tcactagccacctcagccattcacacccagtgggctaaacaaggatacatttataggacacgtgtcactcactgggcagggtggggctggggcagagaggggtatcatttattgtgttaacg

SEQ ID NO: 4977 - DNA, 122 bp, Homo sapiens
  misc_feature (61)..(62): /note="This region represents a CpG dinucleotide"
  misc_feature (61)..(61): /note="Nucleotide may be methylated to form 5-methylcytosine"
gtgaggacacaggccgtcctccggcggggagcacggtggggtcagggtgctgtgtggtcccgcaaagaggcagctgagcttgggcctcaggtcgttccacaccttgctcatctgaaagggaa

SEQ ID NO: 4978 - DNA, 122 bp, Homo sapiens
  misc_feature (61)..(62): /note="This region represents a CpG dinucleotide"
  misc_feature (61)..(61): /note="Nucleotide may be methylated to form 5-methylcytosine"
cagcattatattctaaccaaaaaatgatcacaccaggccatgcaaaactgtacaatattacgagaaaaaccctaaaaaatttataaaatgaatgatattacactatcaaataaaaagacaag

SEQ ID NO: 4979 - DNA, 122 bp, Homo sapiens
  misc_feature (61)..(62): /note="This region represents a CpG dinucleotide"
  misc_feature (61)..(61): /note="Nucleotide may be methylated to form 5-methylcytosine"
ttaaataattcaaacttaaagctgttagaattttaaagtattccagccttaagaggaatacggctatgtggcttgagtcacttgatgtacaactgcaacttctgcctttttttttttccctg

SEQ ID NO: 4980 - DNA, 122 bp, Homo sapiens
  misc_feature (61)..(62): /note="This region represents a CpG dinucleotide"
  misc_feature (61)..(61): /note="Nucleotide may be methylated to form 5-methylcytosine"
tatagggcagcctttcaaacctcacccccgtccagcttgtttccactttgataggaagcacggcaggtaagaatgaatcctacgaaggcgacaactgcaatccaagtcctggtgttgctact

SEQ ID NO: 4981 - DNA, 122 bp, Homo sapiens
  misc_feature (61)..(62): /note="This region represents a CpG dinucleotide"
  misc_feature (61)..(61): /note="Nucleotide may be methylated to form 5-methylcytosine"
gttcctgatcagcagggaggtggaccagcagctgaatgacctaggacatcttcacccacccgtctggcagtggggaggctgctggccagagagacaggtgtctgggttagctgggctgcctc

SEQ ID NO: 4982 - DNA, 122 bp, Homo sapiens
  misc_feature (61)..(62): /note="This region represents a CpG dinucleotide"
  misc_feature (61)..(61): /note="Nucleotide may be methylated to form 5-methylcytosine"
ggaaggtgaaagtaaggaagaaatattttttcctgtagacacagttgtgcttcttacagacgatgcagtaacaaatgaggcaagagtctcagcagcaacagcagtggtagccatggacaaat

SEQ ID NO: 4983 - DNA, 122 bp, Homo sapiens
  misc_feature (61)..(62): /note="This region represents a CpG dinucleotide"
  misc_feature (61)..(61): /note="Nucleotide may be methylated to form 5-methylcytosine"
gtgtgatacaagggccctgactcatcttgagctcaacttagcatttagatatatctggagcgggatagaggcagggctctggggaaagaactcaccttcagggaagaaggaatagagactgg

SEQ ID NO: 4984 - DNA, 122 bp, Homo sapiens
  misc_feature (61)..(62): /note="This region represents a CpG dinucleotide"
  misc_feature (61)..(61): /note="Nucleotide may be methylated to form 5-methylcytosine"
gcatttattataagctatgacatgcctgcctgatgaacaagatgatgaggtccctgtcttcgtagagcttagagattcctatgccttagatgtaagacaactccgcatggaagggcaccttc

SEQ ID NO: 4985 - DNA, 122 bp, Homo sapiens
  misc_feature (61)..(62): /note="This region represents a CpG dinucleotide"
  misc_feature (61)..(61): /note="Nucleotide may be methylated to form 5-methylcytosine"
gccagcacgcagatgacactcatgtaacagcagccatccaggtgagaatgccacttaccacgtgagatcttgctggttatcctgggtgctgccaccactggttttagtcatacagacagttt

SEQ ID NO: 4986 - DNA, 122 bp, Homo sapiens
  misc_feature (61)..(62): /note="This region represents a CpG dinucleotide"
  misc_feature (61)..(61): /note="Nucleotide may be methylated to form 5-methylcytosine"
cagctattgcacactagtaattttctgctctgcgaccgtttttctgcgctgtaataatcacgctaaaagtagtgcaggttttactgcttacaagggagtttttaacaattttcttaaactgt

SEQ ID NO: 4987 - DNA, 122 bp, Homo sapiens
  misc_feature (61)..(62): /note="This region represents a CpG dinucleotide"
  misc_feature (61)..(61): /note="Nucleotide may be methylated to form 5-methylcytosine"
agcccttgagtcagtctgctgagtttgcacccagaactggttaatgctggctcccatgggcggggagtggagactgctgactgctgactatgaggagggaggacaaagtgcagatgctcagc

SEQ ID NO: 4988 - DNA, 122 bp, Homo sapiens
  misc_feature (61)..(62): /note="This region represents a CpG dinucleotide"
  misc_feature (61)..(61): /note="Nucleotide may be methylated to form 5-methylcytosine"
tttttaggatgtggaatctgagtcaggtcagagaggttaaagatcttgccttaagtcacacggcttagtaagggatggagcccagattagaaacgtggtatattacactttgaagcttatgc

SEQ ID NO: 4989 - DNA, 122 bp, Homo sapiens
  misc_feature (61)..(62): /note="This region represents a CpG dinucleotide"
  misc_feature (61)..(61): /note="Nucleotide may be methylated to form 5-methylcytosine"
agggctgattgacaaccactggacgatccatcccactcatctggttgttcagtccttctgcgagtggtcagcactgtcattagcataaagatgctcaccctttgtgcctactcccgaaaggg

SEQ ID NO: 4990 - DNA, 122 bp, Homo sapiens
  misc_feature (61)..(62): /note="This region represents a CpG dinucleotide"
  misc_feature (61)..(61): /note="Nucleotide may be methylated to form 5-methylcytosine"
gaggcttttggtattgcatcacaacaaacgagaccatgaaattgtcttgctagggtttagcgggggatgaccaactcagattgtgcactaacacacaaggtttcctgagtgaaatgactagt

SEQ ID NO: 4991 - DNA, 122 bp, Homo sapiens
  misc_feature (61)..(62): /note="This region represents a CpG dinucleotide"
  misc_feature (61)..(61): /note="Nucleotide may be methylated to form 5-methylcytosine"
tttgaaaactcttgctgagcactgcatgtggtaactcattaaactgtcagaaacatgcaacgcagtaaggaaaatcaggttcagagaggttaagtaacttccctgaggttagacactagtaa

SEQ ID NO: 4992 - DNA, 122 bp, Homo sapiens
  misc_feature (61)..(62): /note="This region represents a CpG dinucleotide"
  misc_feature (61)..(61): /note="Nucleotide may be methylated to form 5-methylcytosine"
gggactgggaatacagcaatgaacagcacaggtctgaatgaggaaggtaggaccgggtcacgaaggtatgccaccagttaacaaagacactctcaaaacaggaaggatggcaagtcgttaaa

SEQ ID NO: 4993 - DNA, 122 bp, Homo sapiens
  misc_feature (61)..(62): /note="This region represents a CpG dinucleotide"
  misc_feature (61)..(61): /note="Nucleotide may be methylated to form 5-methylcytosine"
cccacatctctcccaaatatgactgcataagggctcatgctatgggccagattgacgcttcgtaattggtattagtcatatgtttatgttgtattttttaaaaagtcttaactcctttaaat

SEQ ID NO: 4994 - DNA, 122 bp, Homo sapiens
  misc_feature (61)..(62): /note="This region represents a CpG dinucleotide"
  misc_feature (61)..(61): /note="Nucleotide may be methylated to form 5-methylcytosine"
tgtcatctaatagttaagaattggtagacacaggaaagcaagaattgaggcaagttttgacgatgtgctgataagtgagcccttggttcatgtaaacaaatagttctcctgataagtaatct

SEQ ID NO: 4995 - DNA, 122 bp, Homo sapiens
  misc_feature (61)..(62): /note="This region represents a CpG dinucleotide"
  misc_feature (61)..(61): /note="Nucleotide may be methylated to form 5-methylcytosine"
tggctatgcatattgtgctatttgactagagtgataggattagcaattgtatagaagggacgtgtgaagaaatattttagttcaggcagcatctattgaacaacaggtgtgttcaaaaaaca

SEQ ID NO: 4996 - DNA, 122 bp, Homo sapiens
  misc_feature (61)..(62): /note="This region represents a CpG dinucleotide"
  misc_feature (61)..(61): /note="Nucleotide may be methylated to form 5-methylcytosine"
cttcctcactcatgaatcattctaactttaggcactgtaaaagcctagttgaggacgtatcgctggggaggtagcgtgttatacaagtctcaaatcctaccactgaagcagtgcctactctg

SEQ ID NO: 4997 - DNA, 122 bp, Homo sapiens
  misc_feature (61)..(62): /note="This region represents a CpG dinucleotide"
  misc_feature (61)..(61): /note="Nucleotide may be methylated to form 5-methylcytosine"
tttttagtagagactgggttttaccatgttagccaggatggtctcatctcctgatgatctcgtgatccaccggtctcggcctctcaaagtgctgggattacaggcatgagccaccgccccag

SEQ ID NO: 4998 - DNA, 122 bp, Homo sapiens
  misc_feature (61)..(62): /note="This region represents a CpG dinucleotide"
  misc_feature (61)..(61): /note="Nucleotide may be methylated to form 5-methylcytosine"
accaatcgtctgtggcaaatggagaagtatcgatgcccttcccccttctgattctatttacggctaggtttttaaaagcagcaataaaacaaatgtcgactctttgggggtttactgggtga

SEQ ID NO: 4999 - DNA, 122 bp, Homo sapiens
  misc_feature (61)..(62): /note="This region represents a CpG dinucleotide"
  misc_feature (61)..(61): /note="Nucleotide may be methylated to form 5-methylcytosine"
attgacacagattctcttgcgtaacaccagttgcatgtcagcagggtggctgagctggaccgtcacgcgcacgatcaggaacaaccgctcgtccacgggcgtgcccctgctgagctgagggc

SEQ ID NO: 5000 - DNA, 122 bp, Homo sapiens
  misc_feature (61)..(62): /note="This region represents a CpG dinucleotide"
  misc_feature (61)..(61): /note="Nucleotide may be methylated to form 5-methylcytosine"
atgacaatggacggccacaataaatgttacccagctggtcattctaggaaaagctgataccgcccttcccttcctgttctagtttatggccagccaggctctgaaggttcgacagtctgact

SEQ ID NO: 5001 - DNA, 122 bp, Homo sapiens
  misc_feature (61)..(62): /note="This region represents a CpG dinucleotide"
  misc_feature (61)..(61): /note="Nucleotide may be methylated to form 5-methylcytosine"
tgggtactcacaggcctttgaagcttgcaagacctctgttcttatgtaacagccaacagccgccatctgttacacactcaccacatgcctggcactggggaggcctcctgtgtggattacgt

SEQ ID NO: 5002 - DNA, 122 bp, Homo sapiens
  misc_feature (61)..(62): /note="This region represents a CpG dinucleotide"
  misc_feature (61)..(61): /note="Nucleotide may be methylated to form 5-methylcytosine"
attttttgacagcatctcaagcaaactaagatgtctcttcagcatcagtctgactgctgccgctcctgatttcgtcaagcctgagtcagacctcagttctggacatcacagttattttaaag

SEQ ID NO: 5003 - DNA, 122 bp, Homo sapiens
  misc_feature (61)..(62): /note="This region represents a CpG dinucleotide"
  misc_feature (61)..(61): /note="Nucleotide may be methylated to form 5-methylcytosine"
gttaggaaaatgtaggctaccagtagaaaatgacattctctattaataagatctgaggtgcgacacacataattgtcccaatttttaagattgatggggagcatgaagcatttttttaatgt

SEQ ID NO: 5004 - DNA, 122 bp, Homo sapiens
  misc_feature (61)..(62): /note="This region represents a CpG dinucleotide"
  misc_feature (61)..(61): /note="Nucleotide may be methylated to form 5-methylcytosine"
gacaccctgtcttccccagtggcctagtctaagcactctgcagccacaatctagttcatccggccccttggaatgccagcgcagctaagggaggagctccttgggtccacccagctccccag

SEQ ID NO: 5005 - DNA, 122 bp, Homo sapiens
  misc_feature (61)..(62): /note="This region represents a CpG dinucleotide"
  misc_feature (61)..(61): /note="Nucleotide may be methylated to form 5-methylcytosine"
ttgtaaattgaggacaagaatacccatctcatgaggctactgaaaggattaaatgtaaagcgttttgcaagtgcctcatctgtggcaagccttcatgtttgttatacagtaggtatgagata

SEQ ID NO: 5006 - DNA, 122 bp, Homo sapiens
  misc_feature (61)..(62): /note="This region represents a CpG dinucleotide"
  misc_feature (61)..(61): /note="Nucleotide may be methylated to form 5-methylcytosine"
gctggcttcctggccttgtgaaatcttctagaggcaggaagaagcctgagcgctccctgacgccacttgagtttgacttcatgggtttgccgtgtgcccctgaacaaaccagttatcctctc

SEQ ID NO: 5007 - DNA, 122 bp, Homo sapiens
  misc_feature (61)..(62): /note="This region represents a CpG dinucleotide"
  misc_feature (61)..(61): /note="Nucleotide may be methylated to form 5-methylcytosine"
agagtcatatatttgtgggatctgcctgtgtgcatttgtcattcatggaacacccaaaggcgcttagaactccaaagacccagcaccactggcataaagaacgaggcgagtaagaccagtga

SEQ ID NO: 5008 - DNA, 122 bp, Homo sapiens
  misc_feature (61)..(62): /note="This region represents a CpG dinucleotide"
  misc_feature (61)..(61): /note="Nucleotide may be methylated to form 5-methylcytosine"
tgtttgctcagctgctcagccctggaccttgtcatactggttgaatggacggacaggtaacgtaaacaagtaaggaagacaagacaaggaagttaagagttcgaggtaatgagacatttgag

SEQ ID NO: 5009 - DNA, 122 bp, Homo sapiens
  misc_feature (61)..(62): /note="This region represents a CpG dinucleotide"
  misc_feature (61)..(61): /note="Nucleotide may be methylated to form 5-methylcytosine"
tacacatacttacatcactctgaatttgattgacattcctcgtatgctcaagactcatggcgtcaggtaggtatgtgtaatgatgcaatggctgtttgtagttgacattggtagcgacatcc

SEQ ID NO: 5010 - DNA, 122 bp, Homo sapiens
  misc_feature (61)..(62): /note="This region represents a CpG dinucleotide"
  misc_feature (61)..(61): /note="Nucleotide may be methylated to form 5-methylcytosine"
ctgataccacaaagaagctttttaatgaagttagcctttgcctttctcaatgccactatgcgcctggcttgttttgcccactttctgttttcaaagctaggtatgatcaggaaacacgtggt

SEQ ID NO: 5011 - DNA, 122 bp, Homo sapiens
  misc_feature (61)..(62): /note="This region represents a CpG dinucleotide"
  misc_feature (61)..(61): /note="Nucleotide may be methylated to form 5-methylcytosine"
agtccccagggactggagatgtggggtcatggtgactcctgagtggaaaagggacactgacggatctcaggtcatcgagcctagggctcagactcaacctacatgttgaagttttaaagagg

SEQ ID NO: 5012 - DNA, 122 bp, Homo sapiens
  misc_feature (61)..(62): /note="This region represents a CpG dinucleotide"
  misc_feature (61)..(61): /note="Nucleotide may be methylated to form 5-methylcytosine"
tgaggccccggtgtactccagtgcaagcactgaggctgtgtcaacaagactaaacacagacgaaaactgaaagattcagtaagtcaacactttggggtttgtggagggagggaaaggccatt

SEQ ID NO: 5013 - DNA, 122 bp, Homo sapiens
  misc_feature (61)..(62): /note="This region represents a CpG dinucleotide"
  misc_feature (61)..(61): /note="Nucleotide may be methylated to form 5-methylcytosine"
ctttgacctttgtcttttccctttgcttttagattttggctctctatttgacttggagcacgacttaccagatgaattaatcaactctacagaattgggactaaccaatggtggtgatatta

SEQ ID NO: 5014 - DNA, 122 bp, Homo sapiens
  misc_feature (61)..(62): /note="This region represents a CpG dinucleotide"
  misc_feature (61)..(61): /note="Nucleotide may be methylated to form 5-methylcytosine"
gcagagcgggtcgcagtcagtggcactggtccacatataaaagaagctcttaagagcgtacgataaagcctttgagaatattaatgtgatgtcaaggccttcagccagtccaaaagtattta

SEQ ID NO: 5015 - DNA, 122 bp, Homo sapiens
  misc_feature (61)..(62): /note="This region represents a CpG dinucleotide"
  misc_feature (61)..(61): /note="Nucleotide may be methylated to form 5-methylcytosine"
ttacgttaagtgaaataagtcaggcacagaaagacaaatactacatgttctcaccatatgcggaagcttaagaagttgacttcacagaagtagagtataaatagtggttattagaggctggg

SEQ ID NO: 5016 - DNA, 122 bp, Homo sapiens
  misc_feature (61)..(62): /note="This region represents a CpG dinucleotide"
  misc_feature (61)..(61): /note="Nucleotide may be methylated to form 5-methylcytosine"
gttcctcggaaaatgttcttgttatgggcatcgatgacccctggtaaatccggtggacaccgtgacattatgcacgtgattcttgtgttgcaacccacacttttgacttttcccagcttatc

SEQ ID NO: 5017 - DNA, 122 bp, Homo sapiens
  misc_feature (61)..(62): /note="This region represents a CpG dinucleotide"
  misc_feature (61)..(61): /note="Nucleotide may be methylated to form 5-methylcytosine"
aatcttattaaactaacctatcaaatctaatcttattaaatcccaaacactggcagggcacggtggctcactcctgtaatcccagcactttgggaggtcgaggcaggtggatcacctgaggt

SEQ ID NO: 5018 - DNA, 122 bp, Homo sapiens
  misc_feature (61)..(62): /note="This region represents a CpG dinucleotide"
  misc_feature (61)..(61): /note="Nucleotide may be methylated to form 5-methylcytosine"
aacctactattgtgccactcattgaatttcagccagtcaagggcagtcaactgttcaaagcgtgtttaaataaggcaaatgccaactataaccaatccagccgtttctgtacctcacttcct

SEQ ID NO: 5019 - DNA, 122 bp, Homo sapiens
  misc_feature (61)..(62): /note="This region represents a CpG dinucleotide"
  misc_feature (61)..(61): /note="Nucleotide may be methylated to form 5-methylcytosine"
tatgtatgattttttatacaaagcataaagatgatttgtaccaaactcaggacactgtggcgagcttaacacgagggtattgaatcatacgtaagtggtaattcctagattatgcaatctcc

SEQ ID NO: 5020 - DNA, 122 bp, Homo sapiens
  misc_feature (61)..(62): /note="This region represents a CpG dinucleotide"
  misc_feature (61)..(61): /note="Nucleotide may be methylated to form 5-methylcytosine"
aaaggatgtattcccaaaaatgcatgggtggcttaccctttataactcatcaacataagacgtcagaggtggctgggcgtggtggttcacgcctgtaatcccagcactttgggaggccgagg

SEQ ID NO: 5021 - DNA, 122 bp, Homo sapiens
  misc_feature (61)..(62): /note="This region represents a CpG dinucleotide"
  misc_feature (61)..(61): /note="Nucleotide may be methylated to form 5-methylcytosine"
agagatccaccagtgcagttttgcttaatcctcatgataaccctatgtggagagttctcacgttgtcaacaggatagagatgagaagacagaggcttagagaagttaaataacttacccagc

SEQ ID NO: 5022 - DNA, 122 bp, Homo sapiens
  misc_feature (61)..(62): /note="This region represents a CpG dinucleotide"
  misc_feature (61)..(61): /note="Nucleotide may be methylated to form 5-methylcytosine"
acgcacgttatctcatttaagccctacaaaatactatgaggtcagtaccagcattgtttccgtttatagatgaggcaaatgagactcagagagcaaagcaacttgctcaagttctttttttg

SEQ ID NO: 5023 - DNA, 122 bp, Homo sapiens
  misc_feature (61)..(62): /note="This region represents a CpG dinucleotide"
  misc_feature (61)..(61): /note="Nucleotide may be methylated to form 5-methylcytosine"
tgacgggaaatcaattaatcttgatgtattattttatgcagaacagggtgcaagaacctgcggagagaatggctacagctgttcttgttggtcaggccatatattatcgttggcgggtttga

SEQ ID NO: 5024 - DNA, 122 bp, Homo sapiens
  misc_feature (61)..(62): /note="This region represents a CpG dinucleotide"
  misc_feature (61)..(61): /note="Nucleotide may be methylated to form 5-methylcytosine"
acagttctgaaggtaaatgttatctctatagatgaggaactgagctcgggcaggttgagtcgcttgtcaaggtgacacagtaattgagtggtggcactgggatttaaatccagacctgtctg

SEQ ID NO: 5025 - DNA, 122 bp, Homo sapiens
  misc_feature (61)..(62): /note="This region represents a CpG dinucleotide"
  misc_feature (61)..(61): /note="Nucleotide may be methylated to form 5-methylcytosine"
ctgttccacttcactgagcaattactgaacagacgagctgtacagactctaaatgaacatcgtcactacctctcacttgttttttgcttctgacctctttaaaggttcggacaaagtaggta

SEQ ID NO: 5026 - DNA, 122 bp, Homo sapiens
  misc_feature (61)..(62): /note="This region represents a CpG dinucleotide"
  misc_feature (61)..(61): /note="Nucleotide may be methylated to form 5-methylcytosine"
cagtccccagtgattaaaccttcctgttgggactgcactctcacagagatataagacatacgtgatcagcacaagtatgtacctacccagccctggctttactgtgcctagtcagccaggcc

SEQ ID NO: 5027 - DNA, 122 bp, Homo sapiens
  misc_feature (61)..(62): /note="This region represents a CpG dinucleotide"
  misc_feature (61)..(61): /note="Nucleotide may be methylated to form 5-methylcytosine"
gattataaatcctttaagtccaaactaaaagcccaaacagaaatgtagtcaccgtagccacgcactgcttgcttcttaaccaagtaaggcaatgaattgtggttattctcatagtagcaata

SEQ ID NO: 5028 - DNA, 122 bp, Homo sapiens
  misc_feature (61)..(62): /note="This region represents a CpG dinucleotide"
  misc_feature (61)..(61): /note="Nucleotide may be methylated to form 5-methylcytosine"
agaacacagagggcaggaacagctgtggcctcgggccagatacctgcattctgtgtgaggcggttaaatgctgacaaggtgtggattgactgtgacaagttagagttgcccgtggtgaaacc

SEQ ID NO: 5029 - DNA, 122 bp, Homo sapiens
  misc_feature (61)..(62): /note="This region represents a CpG dinucleotide"
  misc_feature (61)..(61): /note="Nucleotide may be methylated to form 5-methylcytosine"
atacactagcacatactttgtgctgtctgaaattaagtagcacggtgtggcaatcaaatgcgcaagacttagccggtttagcaagtatcagaaacttaggtgaacagaaacatcaacaacaa

SEQ ID NO: 5030 - DNA, 122 bp, Homo sapiens
  misc_feature (61)..(62): /note="This region represents a CpG dinucleotide"
  misc_feature (61)..(61): /note="Nucleotide may be methylated to form 5-methylcytosine"
cggttctcagaccttctcaggtatgatttcattaatcctcctaatcctctcagtaggcaacggtaccatttccactttagagacaagaacattgaagcttggagaggttaaagacctctcca

SEQ ID NO: 5031 - DNA, 122 bp, Homo sapiens
  misc_feature (61)..(62): /note="This region represents a CpG dinucleotide"
  misc_feature (61)..(61): /note="Nucleotide may be methylated to form 5-methylcytosine"
tcattttctccagtttatggagagaggaaacaggctgatgagatgtaacttgtcagtggtcgtattagtaaatggagttgttgggacctgaacaaggtcttctgatgtaatccgtggttctt

SEQ ID NO: 5032 - DNA, 122 bp, Homo sapiens
  misc_feature (61)..(62): /note="This region represents a CpG dinucleotide"
  misc_feature (61)..(61): /note="Nucleotide may be methylated to form 5-methylcytosine"
cctgttcctctgatttaaggaaattagaacactgaaaatgtttaatttttgataaaggaacgagagaaaagaaagcatgaaagaattctgagtgaagaacttgttgctgctgtgacctatct

SEQ ID NO: 5033 - DNA, 122 bp, Homo sapiens
  misc_feature (61)..(62): /note="This region represents a CpG dinucleotide"
  misc_feature (61)..(61): /note="Nucleotide may be methylated to form 5-methylcytosine"
aactgattctgggctggactggtatttgtaatttagatgtatctgtagggcgaagccccacggctctataaggcaatgcagggaccagcagccccacagcactgctgctataggagtgtccg

SEQ ID NO: 5034 - DNA, 122 bp, Homo sapiens
  misc_feature (61)..(62): /note="This region represents a CpG dinucleotide"
  misc_feature (61)..(61): /note="Nucleotide may be methylated to form 5-methylcytosine"
attttatcgaagaacccagtacttgcaggcgaattatgttctttgctacctcctccccaccggctgctgtattacagtactaacctcacggaatgtagtacagaataaatgaaataaagtaa

SEQ ID NO: 5035 - DNA, 122 bp, Homo sapiens
  misc_feature (61)..(62): /note="This region represents a CpG dinucleotide"
  misc_feature (61)..(61): /note="Nucleotide may be methylated to form 5-methylcytosine"
taagtgactaatggcaggaggcatccacagcgtagagatgctggacaaagggatgattcacgtctgagcaggacagtgcaagatttcatcacactactgaggacagtacagaatttaattat

SEQ ID NO: 5036 - DNA, 122 bp, Homo sapiens
  misc_feature (61)..(62): /note="This region represents a CpG dinucleotide"
  misc_feature (61)..(61): /note="Nucleotide may be methylated to form 5-methylcytosine"
actgtggcaaccctgactcaggactgtgtcactacagtttctgtttctgcatcatatcaccgtcttctctcctatagtcacatttctttcctgcttctctctttaaggacactcttgattgc

SEQ ID NO: 5037 - DNA, 122 bp, Homo sapiens
  misc_feature (61)..(62): /note="This region represents a CpG dinucleotide"
  misc_feature (61)..(61): /note="Nucleotide may be methylated to form 5-methylcytosine"
ggcggtctccaattcctgggcccacttggaggtaaaataggacccaggaagccaatcccacgccctggtatgaagggaaaaccagggaggaaacatggaactctccaaatacatttccctgt

SEQ ID NO: 5038 - DNA, 122 bp, Homo sapiens
  misc_feature (61)..(62): /note="This region represents a CpG dinucleotide"
  misc_feature (61)..(61): /note="Nucleotide may be methylated to form 5-methylcytosine"
ccttgatctcggacttcccagcctccagaactgtgagcaataaatttgttgtttttaagccgcccagtctgtgatgttttgttttagcatcccagactaagtaagggtttaaaagaggtgat

SEQ ID NO: 5039 - DNA, 122 bp, Homo sapiens
  misc_feature (61)..(62): /note="This region represents a CpG dinucleotide"
  misc_feature (61)..(61): /note="Nucleotide may be methylated to form 5-methylcytosine"
ttacctctagaatgggtactgggtaatgacatatggctcctccctgagttaattgtgcctcgcaaacattcagaaaataaactcaagcacgccccatagctcaaggccaataacacagattg

SEQ ID NO: 5040 - DNA, 122 bp, Homo sapiens
  misc_feature (61)..(62): /note="This region represents a CpG dinucleotide"
  misc_feature (61)..(61): /note="Nucleotide may be methylated to form 5-methylcytosine"
tgaactcctgctttccccacccatggccgctgagcctgcaaaactgcagaactccctgcccgactggtgcctggaatctccagccctgaggacccctgcagtccccctggtccccgcactct

SEQ ID NO: 5041 - DNA, 122 bp, Homo sapiens
  misc_feature (61)..(62): /note="This region represents a CpG dinucleotide"
  misc_feature (61)..(61): /note="Nucleotide may be methylated to form 5-methylcytosine"
gccaaagtgggcagatcacctgaggtcaggagtttgagaccaggaaactgaccaacatgacgaaacccagtctctactaacaatacaataattagtcagctgtggcagcacgcacctgtaat

SEQ ID NO: 5042 - DNA, 122 bp, Homo sapiens
  misc_feature (61)..(62): /note="This region represents a CpG dinucleotide"
  misc_feature (61)..(61): /note="Nucleotide may be methylated to form 5-methylcytosine"
caactggttaggcaagttgccagtgtcaccaatgacggacagttgacttggctaatttgccgtttgctattcatgttacaggtattatatgatgcttctggggttcttgagaaaaatagaga

SEQ ID NO: 5043 - DNA, 122 bp, Homo sapiens
  misc_feature (61)..(62): /note="This region represents a CpG dinucleotide"
  misc_feature (61)..(61): /note="Nucleotide may be methylated to form 5-methylcytosine"
aagcgtaaatcgggcggcgggggctgcagagccttcatctcttcctccgtcccgggatgtcggagagacggcagcccagcctccgccaccgcaaagctgcttaacgggcagcgcgagtccct

SEQ ID NO: 5044 - DNA, 122 bp, Homo sapiens
  misc_feature (61)..(62): /note="This region represents a CpG dinucleotide"
  misc_feature (61)..(61): /note="Nucleotide may be methylated to form 5-methylcytosine"
ttcccttcctgaagaactagtccaaaagtcattatgaaaccaactttgcaaaattatgaccgtgaaagaaatcagacctaaccgaccctatcttgcttctaacccttaagctgccctggttc

SEQ ID NO: 5045 - DNA, 122 bp, Homo sapiens
  misc_feature (61)..(62): /note="This region represents a CpG dinucleotide"
  misc_feature (61)..(61): /note="Nucleotide may be methylated to form 5-methylcytosine"
aagtgtctggagatagttttcgttgtcacagctaaggagggggaggtgctacagacatctcgtgaggtgaggcaaggaacactgactgctgcttaccatcctaccaggcatggggcagcatg

SEQ ID NO: 5046 - DNA, 122 bp, Homo sapiens
  misc_feature (61)..(62): /note="This region represents a CpG dinucleotide"
  misc_feature (61)..(61): /note="Nucleotide may be methylated to form 5-methylcytosine"
tggcctcaagtgatccgcctgcttggcctcccaaagtgctgggattacaggtgtgagccacggcacccagcctgataattcaatttcatctgtctcaactgggctttgtgacccaggtattg

SEQ ID NO: 5047 - DNA, 122 bp, Homo sapiens
  misc_feature (61)..(62): /note="This region represents a CpG dinucleotide"
  misc_feature (61)..(61): /note="Nucleotide may be methylated to form 5-methylcytosine"
agtatctgtttaaaggaatttagtctaagcctctattattaccaataaggaaacaaggcccgaaagaagctaaatgactcgcctaaggtcactcatctaatgagtggctaagtgaagaatag

SEQ ID NO: 5048 - DNA, 122 bp, Homo sapiens
  misc_feature (61)..(62): /note="This region represents a CpG dinucleotide"
  misc_feature (61)..(61): /note="Nucleotide may be methylated to form 5-methylcytosine"
atcataccaggtttctggggtggggctatattgggtacctagtgagtcatgttaatgagccgtgtatagccttaaggccatattggtatccaggagcccgatgatgctctatgctatagctt

SEQ ID NO: 5049 - DNA, 122 bp, Homo sapiens
  misc_feature (61)..(62): /note="This region represents a CpG dinucleotide"
  misc_feature (61)..(61): /note="Nucleotide may be methylated to form 5-methylcytosine"
cttgctcagagtcacactaccagactgcaaactcaggtgctttttattatgcagaatacccgctgcagacctaatcctgccccaggctctggggccagctttgttcgcagggagattttaag

SEQ ID NO: 5050 - DNA, 122 bp, Homo sapiens
  misc_feature (61)..(62): /note="This region represents a CpG dinucleotide"
  misc_feature (61)..(61): /note="Nucleotide may be methylated to form 5-methylcytosine"
gtggatgtgcactgagtcactaggtaaaaacgtctctcctcctgcatggtaagaaccttgcgcaatgtagctccggttatactgtgatcctgggaaaccttggatgggtcctagaagcaact

SEQ ID NO: 5051 - DNA, 122 bp, Homo sapiens
  misc_feature (61)..(62): /note="This region represents a CpG dinucleotide"
  misc_feature (61)..(61): /note="Nucleotide may be methylated to form 5-methylcytosine"
gtgatgacaacagtgcccgcctctgcattaaatgtgatggtgtaggtaaagaacctgctccgtttctggcattggaagggtgcttagtcaatgctagctacacttgtatgataacagagttc

SEQ ID NO: 5052 - DNA, 122 bp, Homo sapiens
  misc_feature (61)..(62): /note="This region represents a CpG dinucleotide"
  misc_feature (61)..(61): /note="Nucleotide may be methylated to form 5-methylcytosine"
catccgtgaaatgggaatgacaccagccttgaaggattgaatgacacaccacttgtggcacgcctaggacagtgcttggcattactcagtaagtgctcagtaaaccactgcgtgtgtgacat

SEQ ID NO: 5053 - DNA, 122 bp, Homo sapiens
  misc_feature (61)..(62): /note="This region represents a CpG dinucleotide"
  misc_feature (61)..(61): /note="Nucleotide may be methylated to form 5-methylcytosine"
gcctaagcatacaaagattatcaaagaaaaaatcaaggaataaacaaaactcacataagccgattctagaggtgtggcctgggctgctctaaagggatttgtggaattactgaggttacctg

SEQ ID NO: 5054 - DNA, 122 bp, Homo sapiens
  misc_feature (61)..(62): /note="This region represents a CpG dinucleotide"
  misc_feature (61)..(61): /note="Nucleotide may be methylated to form 5-methylcytosine"
ttgggaagggcaggtgcctcttcttggggaacatgagtcacctccctttcaaaacccatccgtgtgctggagtcatgggagctcagaacagaaggagagatcctgactgacacccgtagggc

SEQ ID NO: 5055 - DNA, 122 bp, Homo sapiens
  misc_feature (61)..(62): /note="This region represents a CpG dinucleotide"
  misc_feature (61)..(61): /note="Nucleotide may be methylated to form 5-methylcytosine"
tggggcagaaacaaatcacaatggtggaatgtcatcagttaaggctattttcacttctttcgtggatcttcaattgcttcaggggatatgatggcttagcttgggctcagaggcctgacatg

SEQ ID NO: 5056 - DNA, 122 bp, Homo sapiens
  misc_feature (61)..(62): /note="This region represents a CpG dinucleotide"
  misc_feature (61)..(61): /note="Nucleotide may be methylated to form 5-methylcytosine"
ggaacacatcctcagatgagtcagcagtctgccatcttccagattcaagtattgttcaaacgcttttggctaaagattaagcaagaacagagattattcattttctgtgtcataacatcatc

SEQ ID NO: 5057 - DNA, 122 bp, Homo sapiens
  misc_feature (61)..(62): /note="This region represents a CpG dinucleotide"
  misc_feature (61)..(61): /note="Nucleotide may be methylated to form 5-methylcytosine"
agcaagatcacagagattaagtgccattttcttgcatcatatcatgatacagactatgaacgtgactcatcatggttgatggcctggtcatctggctgacacagtgtttatcatatttctcc

SEQ ID NO: 5058 - DNA, 122 bp, Homo sapiens
  misc_feature (61)..(62): /note="This region represents a CpG dinucleotide"
  misc_feature (61)..(61): /note="Nucleotide may be methylated to form 5-methylcytosine"
tgttttctctttacttgaggccaacacataacaatgaaagcactgggctactggtgctttcggattgtgaaagtcaggtggagcctgtttgcactctgagtgcactcattcaagaggtcagt

SEQ ID NO: 5059 - DNA, 122 bp, Homo sapiens
  misc_feature (61)..(62): /note="This region represents a CpG dinucleotide"
  misc_feature (61)..(61): /note="Nucleotide may be methylated to form 5-methylcytosine"
agcaaagcctggggtgtcatgtggtctcccagatctggctctgcaatgtctcagacatgccgttcgattttgaaattctcaaagatgttccaaacagcatgcagttgatttaattttttaaa

SEQ ID NO: 5060 - DNA, 122 bp, Homo sapiens
  misc_feature (61)..(62): /note="This region represents a CpG dinucleotide"
  misc_feature (61)..(61): /note="Nucleotide may be methylated to form 5-methylcytosine"
ccctggcagggctgctgcagggatcaggccagacttgaatgtgaaagggctctgaatagccgagtccagggtgggtgagggaaggtagcatcggcaacctgcgggtgggccctggccacact

SEQ ID NO: 5061 - DNA, 122 bp, Homo sapiens
  misc_feature (61)..(62): /note="This region represents a CpG dinucleotide"
  misc_feature (61)..(61): /note="Nucleotide may be methylated to form 5-methylcytosine"
aggtttttctctggacaaaaaggggcctaccatttagactctcacactcagtcagccctgcgtcaaggtcacaccacatagggccatgagtcatggccaaatcaggcctgccctgcctcctg

SEQ ID NO: 5062 - DNA, 122 bp, Homo sapiens
  misc_feature (61)..(62): /note="This region represents a CpG dinucleotide"
  misc_feature (61)..(61): /note="Nucleotide may be methylated to form 5-methylcytosine"
aggctgcctgcttccagcccctccattcattctgtctgtccacctgcagaccttttgtcacgccccatgctccatcgccactgctcttagtcaggcatgggatctgggagctgagaccctcc

SEQ ID NO: 5063 - DNA, 122 bp, Homo sapiens
  misc_feature (61)..(62): /note="This region represents a CpG dinucleotide"
  misc_feature (61)..(61): /note="Nucleotide may be methylated to form 5-methylcytosine"
gcagtaacagcacatctcacacctgacacacacaatgcgaatcattatttatccttactacgggtgatgcacactaattttaatttcattcgaaaggaaagtactggcctatgacccacaag

SEQ ID NO: 5064 - DNA, 122 bp, Homo sapiens
  misc_feature (61)..(62): /note="This region represents a CpG dinucleotide"
  misc_feature (61)..(61): /note="Nucleotide may be methylated to form 5-methylcytosine"
ttccacatggtcctccccaattaaaatcttggcagcaacttctaggcttactatctgaggcgttgacaccaaaaacagcatcacaaatttctggctcattacccttaaagacttgtctttgc

SEQ ID NO: 5065 - DNA, 122 bp, Homo sapiens
  misc_feature (61)..(62): /note="This region represents a CpG dinucleotide"
  misc_feature (61)..(61): /note="Nucleotide may be methylated to form 5-methylcytosine"
tttcaccattgccgtactcttctctttcacaccctatgcctacgtttaacatgatgttcccggtgcctgggatgaactttgccttcctctttatgtagtgaattccaacttgtcctccaaga

SEQ ID NO: 5066 - DNA, 122 bp, Homo sapiens
  misc_feature (61)..(62): /note="This region represents a CpG dinucleotide"
  misc_feature (61)..(61): /note="Nucleotide may be methylated to form 5-methylcytosine"
cgtgttggggtcagaaccagagggagaaaggctggggacagggatgggcggagggatccacgcgcagagaatgagattgcttaactccagatcatggtgaggctgcacctctgaaactggaa

SEQ ID NO: 5067 - DNA, 122 bp, Homo sapiens
  misc_feature (61)..(62): /note="This region represents a CpG dinucleotide"
  misc_feature (61)..(61): /note="Nucleotide may be methylated to form 5-methylcytosine"
gcattctatgcagttcagttcattcatccaacaaatatttaatgcctgttgtgtgtcagacgttatcctaaagactgaagatgcaaaagggattaagactcaattcctttggccaggcacgg

SEQ ID NO: 5068 - DNA, 122 bp, Homo sapiens
  misc_feature (61)..(62): /note="This region represents a CpG dinucleotide"
  misc_feature (61)..(61): /note="Nucleotide may be methylated to form 5-methylcytosine"
tttgggaaggcatgtactgggtttttcttcattcactcaacaaatatttattaagtgccacgatgtgccaagtactgccctgggcacttggaaaaaccacaatgaacaaaacacaaaagtcc

SEQ ID NO: 5069 - DNA, 122 bp, Homo sapiens
  misc_feature (61)..(62): /note="This region represents a CpG dinucleotide"
  misc_feature (61)..(61): /note="Nucleotide may be methylated to form 5-methylcytosine"
gggatactgtgacctttgtctagagttgatgggggtgtgatttgtgaaataaaacaggaccgtactgcttggaagaaggaaacggaagctgacataatggggattaattagttgattgctgt

SEQ ID NO: 5070 - DNA, 122 bp, Homo sapiens
  misc_feature (61)..(62): /note="This region represents a CpG dinucleotide"
  misc_feature (61)..(61): /note="Nucleotide may be methylated to form 5-methylcytosine"
gctgcatgtagaagcatttaaagacatagaatgctgtgtcacacagaagttgtgtttaaccgattagcagattagttaacaagggcacagacatggcttagacagttgatgaagtgactatt

SEQ ID NO: 5071 - DNA, 122 bp, Homo sapiens
  misc_feature (61)..(62): /note="This region represents a CpG dinucleotide"
  misc_feature (61)..(61): /note="Nucleotide may be methylated to form 5-methylcytosine"
caacctcctttccaaccatgctcatgtacttgctgggcacgttttacaatttcctgtctccgtgcctttgttcatagtatttcctatggctggaaagttgcttttcctctaccctcccaacc

SEQ ID NO: 5072 - DNA, 122 bp, Homo sapiens
  misc_feature (61)..(62): /note="This region represents a CpG dinucleotide"
  misc_feature (61)..(61): /note="Nucleotide may be methylated to form 5-methylcytosine"
ccaggtttggggattcctgggactgaaagacagaacaaccaaatccaagtcagtatgtcacgctgcagtgtaaagtaggtgacatcacccagcagtgctctgcccaggcccagccagggcgt

SEQ ID NO: 5073 - DNA, 122 bp, Homo sapiens
  misc_feature (61)..(62): /note="This region represents a CpG dinucleotide"
  misc_feature (61)..(61): /note="Nucleotide may be methylated to form 5-methylcytosine"
gccacactggcctttctggtcctgcaacatggcatgcttgcttttgccctggggcctttgcgttggctgtttctgcttctgagatgctctgccccatctcttcacccctaactcttgtcact

SEQ ID NO: 5074 - DNA, 122 bp, Homo sapiens
  misc_feature (61)..(62): /note="This region represents a CpG dinucleotide"
  misc_feature (61)..(61): /note="Nucleotide may be methylated to form 5-methylcytosine"
attatggcggccatcctgtagcagggcctgatgtaaacattcctctgctactgtgggtgtcgtgtcaaaacattagcgattgtgtgtctgagccatcagattaacagaatctgcaaacacta

SEQ ID NO: 5075 - DNA, 122 bp, Homo sapiens
  misc_feature (61)..(62): /note="This region represents a CpG dinucleotide"
  misc_feature (61)..(61): /note="Nucleotide may be methylated to form 5-methylcytosine"
ctttccttcagtttccagtaacttgttcctcatttctgtataaatcctcaccagaatagccgggcatggtggctcacacctgtaatcccagcactttgggaggctgaggtgggcggattgcc

SEQ ID NO: 5076 - DNA, 122 bp, Homo sapiens
  misc_feature (61)..(62): /note="This region represents a CpG dinucleotide"
  misc_feature (61)..(61): /note="Nucleotide may be methylated to form 5-methylcytosine"
aggaggttgtccataattgactttaagcagcaatcagtaaaacattgagctcttcagctccgcctttcttgtaagtttatcatttcttcttagtggttgtgaacatcatgtgataatgtatt

SEQ ID NO: 5077 - DNA, 122 bp, Homo sapiens
  misc_feature (61)..(62): /note="This region represents a CpG dinucleotide"
  misc_feature (61)..(61): /note="Nucleotide may be methylated to form 5-methylcytosine"
attgtatgctccatgacaatgatgacagcaactaatgacacatttcccagatcatatcctcgtcattaagtgacacgtgactgtagcataatatgtaaacaatactaatttaatcaaaaatt

SEQ ID NO: 5078 - DNA, 122 bp, Homo sapiens
  misc_feature (61)..(62): /note="This region represents a CpG dinucleotide"
  misc_feature (61)..(61): /note="Nucleotide may be methylated to form 5-methylcytosine"
ttcatgtacacattttttggagatgtaagttttcatgtggacgtaagttttcatttctcacgaatatacacctaggaatggaattgctggcccatatggtaactctgtagttaaccttttga

SEQ ID NO: 5079 - DNA, 122 bp, Homo sapiens
  misc_feature (61)..(62): /note="This region represents a CpG dinucleotide"
  misc_feature (61)..(61): /note="Nucleotide may be methylated to form 5-methylcytosine"
ttgttttcaaatcttttttgtttaggaattcatgaagaaagtagaagaaaagcgagtggacgttaactcagcagtagccatgggagaagtcatcctggctgtctgccaccccgattgcatca

SEQ ID NO: 5080 - DNA, 122 bp, Homo sapiens
  misc_feature (61)..(62): /note="This region represents a CpG dinucleotide"
  misc_feature (61)..(61): /note="Nucleotide may be methylated to form 5-methylcytosine"
ccagtgcctagaatagtgcctgacacaaagcaaataattaatacgcactgaatgagcaaacgacagacaggcattagctcatttcctgtagtcttgccggggtaggtctgctgcagctttat

SEQ ID NO: 5081 - DNA, 122 bp, Homo sapiens
  misc_feature (61)..(62): /note="This region represents a CpG dinucleotide"
  misc_feature (61)..(61): /note="Nucleotide may be methylated to form 5-methylcytosine"
aatcttactcctcactcaagaacttcctgctggcatatatgatgacttagcttttttccccgacagatcgactatgttgatctaacttttctaagccagtttctgtctgatatgccagcttg

SEQ ID NO: 5082 - DNA, 122 bp, Homo sapiens
  misc_feature (61)..(62): /note="This region represents a CpG dinucleotide"
  misc_feature (61)..(61): /note="Nucleotide may be methylated to form 5-methylcytosine"
ttgggagctcccttctggcaggggcagccactggattgcctcatctttctccccattgcccggatgccaagggcaggacgggggaatggtgtgtcttcggggatgagagagaggcatcagga

SEQ ID NO: 5083 - DNA, 122 bp, Homo sapiens
  misc_feature (61)..(62): /note="This region represents a CpG dinucleotide"
  misc_feature (61)..(61): /note="Nucleotide may be methylated to form 5-methylcytosine"
gaagttggcagtgaagctctagccgcaaggatgttcacatgccagcatgttcacctaaagcgagagtatatatgcaactggctgagatccaaagaaggaaactgtgctaaagagagatagct

SEQ ID NO: 5084 - DNA, 122 bp, Homo sapiens
  misc_feature (61)..(62): /note="This region represents a CpG dinucleotide"
  misc_feature (61)..(61): /note="Nucleotide may be methylated to form 5-methylcytosine"
ggcaacgatctcatccagcccctgctgggatggggtgtcatggggaccttgagctgcagtcgtaagcaggactggggcagcctgagtcagacagtggccttggggaggagtggatttggtcc

SEQ ID NO: 5085 - DNA, 122 bp, Homo sapiens
  misc_feature (61)..(62): /note="This region represents a CpG dinucleotide"
  misc_feature (61)..(61): /note="Nucleotide may be methylated to form 5-methylcytosine"
ccaaagtgctgggattacgggcgtgagccactgcacctggcctctaaggtgtggtttttacggtaaatgttctgaagagctcagagaaagggaagacagatgagctggaattgtcagtggaa

SEQ ID NO: 5086 - DNA, 122 bp, Homo sapiens
  misc_feature (61)..(62): /note="This region represents a CpG dinucleotide"
  misc_feature (61)..(61): /note="Nucleotide may be methylated to form 5-methylcytosine"
ttaaattctcaaaaatgccttcttacagttgttccaagcagaatccaaaacaagtccctacgttgcatttgggtgatacgtcactttagtctttccccaccctcttgcctcttttttttttt

SEQ ID NO: 5087 - DNA, 122 bp, Homo sapiens
  misc_feature (61)..(62): /note="This region represents a CpG dinucleotide"
  misc_feature (61)..(61): /note="Nucleotide may be methylated to form 5-methylcytosine"
gtatctgtgtgtgtatatgtaagaggcagaggaaaagcattgcacaaagagaaagctgcacgcaggcaaaggctatggtattctcagaaaaggtgtgcctggccctctcggtaaagaggcca

SEQ ID NO: 5088 - DNA, 122 bp, Homo sapiens
  misc_feature (61)..(62): /note="This region represents a CpG dinucleotide"
  misc_feature (61)..(61): /note="Nucleotide may be methylated to form 5-methylcytosine"
tgctgatatgctcctggagccagtgccctgtgctaatagattctatcacagcactgaccacgctctaatgatagcaattgttaacttgtttgtttctctcaccaagaagtcacgaactgtgg

SEQ ID NO: 5089 - DNA, 122 bp, Homo sapiens
  misc_feature (61)..(62): /note="This region represents a CpG dinucleotide"
  misc_feature (61)..(61): /note="Nucleotide may be methylated to form 5-methylcytosine"
attctgcaactttagtttagttgctccatccttccaattgctcacacctgaagtcttcatcgtctgtgacttttgtctttttctcatgtcttatacctaatccttcagggttttgtgctgtc

SEQ ID NO: 5090 - DNA, 122 bp, Homo sapiens
  misc_feature (61)..(62): /note="This region represents a CpG dinucleotide"
  misc_feature (61)..(61): /note="Nucleotide may be methylated to form 5-methylcytosine"
tttctttagcgattgttctagggattacaacacacaccctaacttttcacagtgcacctacggtgcttatgacaccacttgggcaataaggcagtaaaaaggaatgaagcacagacatgggc

SEQ ID NO: 5091 - DNA, 122 bp, Homo sapiens
  misc_feature (61)..(62): /note="This region represents a CpG dinucleotide"
  misc_feature (61)..(61): /note="Nucleotide may be methylated to form 5-methylcytosine"
gagcaaagtcgttaaaagccatcctgcggattggagcaggagttctctgcccggataagacggggagacactggggaaaggtaagctagagggtggcggctgcactgcaggtcttctcgggg

SEQ ID NO: 5092 - DNA, 122 bp, Homo sapiens
  misc_feature (61)..(62): /note="This region represents a CpG dinucleotide"
  misc_feature (61)..(61): /note="Nucleotide may be methylated to form 5-methylcytosine"
cctgcaaagttccagatttctgatctctttcaatctgcattcctgaataaggacatgacacggagcagtgaccctgctgacctgtgatgaacatgtacccacgagtgagaaataaacccttg

SEQ ID NO: 5093 - DNA, 122 bp, Homo sapiens
  misc_feature (61)..(62): /note="This region represents a CpG dinucleotide"
  misc_feature (61)..(61): /note="Nucleotide may be methylated to form 5-methylcytosine"
aaaggtctgtatcaggacactgggcattgccactgtgctaggtgcacacacctgactgatcgtcttgtgggctcccgcatttcctgttgctccaggcatcagatatatccctgggatccctc

SEQ ID NO: 5094 - DNA, 122 bp, Homo sapiens
  misc_feature (61)..(62): /note="This region represents a CpG dinucleotide"
  misc_feature (61)..(61): /note="Nucleotide may be methylated to form 5-methylcytosine"
atgtggcagactctccttccttttgaaggctgagtaatactccattgtgtggctacacaacgtttatccactcacccgtcggtggacacctgggctgctttcaccttttggctgttgtgaat

SEQ ID NO: 5095 - DNA, 122 bp, Homo sapiens
  misc_feature (61)..(62): /note="This region represents a CpG dinucleotide"
  misc_feature (61)..(61): /note="Nucleotide may be methylated to form 5-methylcytosine"
agcagagctgggtcacttgactccacccaatatccctaaatgcaaacatcccctacagaccgaggctggcaccttagagctggagtccatgcccgctctgaccaggagaagccaacctggtc

SEQ ID NO: 5096 - DNA, 122 bp, Homo sapiens
  misc_feature (61)..(62): /note="This region represents a CpG dinucleotide"
  misc_feature (61)..(61): /note="Nucleotide may be methylated to form 5-methylcytosine"
catgacttctgttagaagatccagccgagggtgtgtattgtgtgtaagatcttttgcaaccgatactcatgagagttctgttggccactgttgagacagcctctattgggaagattctgtaa

SEQ ID NO: 5097 - DNA, 122 bp, Homo sapiens
  misc_feature (61)..(62): /note="This region represents a CpG dinucleotide"
  misc_feature (61)..(61): /note="Nucleotide may be methylated to form 5-methylcytosine"
ctcctgcggacagccctgtgtaccaagaggaggagctgagtgaggtcatttgggagccaccgaaaagttctaagcagggaagtgaagcaatcagatgtgtgtttagtaaagacaacttcagc

SEQ ID NO: 5098 - DNA, 122 bp, Homo sapiens
  misc_feature (61)..(62): /note="This region represents a CpG dinucleotide"
  misc_feature (61)..(61): /note="Nucleotide may be methylated to form 5-methylcytosine"
gcaggcttccaggccaccagggcatgggcaggactcagcccgccatgggcgcctgctcagcgggaaatgcgattcccaggggtcactggttctcaactgggaggaaacacctgtcatctctt

SEQ ID NO: 5099 - DNA, 122 bp, Homo sapiens
  misc_feature (61)..(62): /note="This region represents a CpG dinucleotide"
  misc_feature (61)..(61): /note="Nucleotide may be methylated to form 5-methylcytosine"
agttaaatgagttgtgagctgattagcttgttaatcaagatctcattggaaagtttcatacgtagttatgtttgtgttactgtaagcaaagaattaaagtacatctaacctggacattctta

SEQ ID NO: 5100 - DNA, 122 bp, Homo sapiens
  misc_feature (61)..(62): /note="This region represents a CpG dinucleotide"
  misc_feature (61)..(61): /note="Nucleotide may be methylated to form 5-methylcytosine"
atactcgaaagcctgcttagccagtcggccgggcccgtccaccgtcttgccgtcgtcgtccggcccccagctggcactgtaaatgtcgatgtagttgggtctgatgcccagcgactttgcct

SEQ ID NO: 5101 - DNA, 122 bp, Homo sapiens
  misc_feature (61)..(62): /note="This region represents a CpG dinucleotide"
  misc_feature (61)..(61): /note="Nucleotide may be methylated to form 5-methylcytosine"
tcacagttttggaggctgggaagtccaagatccaggcactgatagattcagcgtctggtccgctccatagatggcgccttgtgcctgtgtcctcacatggtagaatgagtaaaagcagggag

SEQ ID NO: 5102 - DNA, 122 bp, Homo sapiens
  misc_feature (61)..(62): /note="This region represents a CpG dinucleotide"
  misc_feature (61)..(61): /note="Nucleotide may be methylated to form 5-methylcytosine"
gtgattgagcaacacctgattcaactcttggctacaaaatccagccatttcttcatgtcccgctgcacccaaccttcatgctgtgacatgtagctctcattgctcattcactttctcatatt

SEQ ID NO: 5103 - DNA, 122 bp, Homo sapiens
  misc_feature (61)..(62): /note="This region represents a CpG dinucleotide"
  misc_feature (61)..(61): /note="Nucleotide may be methylated to form 5-methylcytosine"
ttaacatagcatttaaagagcggcatgaattagaggaaagacatggaacacacaggtagtcggtttgagatcatcggcttaaaagtatcctaggatggtaatgacccagaagtatttccagt

SEQ ID NO: 5104 - DNA, 122 bp, Homo sapiens
  misc_feature (61)..(62): /note="This region represents a CpG dinucleotide"
  misc_feature (61)..(61): /note="Nucleotide may be methylated to form 5-methylcytosine"
ggcagggtgtggtcttgggtgtctggcttctcactctgcgtcatgtgttggagactcagccgtgttgtggagcgtgtttgtttattctttcaaatcctcatgcagcattccattctgtggat

SEQ ID NO: 5105 - DNA, 122 bp, Homo sapiens
  misc_feature (61)..(62): /note="This region represents a CpG dinucleotide"
  misc_feature (61)..(61): /note="Nucleotide may be methylated to form 5-methylcytosine"
agtcacggaaacacaaatactctatgattccacttatatagtgtatagtcatcacattcacggggacatgaaaacatgggccgcccagtcctgaaaacatggccacacccctctcccccatc

SEQ ID NO: 5106 - DNA, 122 bp, Homo sapiens
  misc_feature (61)..(62): /note="This region represents a CpG dinucleotide"
  misc_feature (61)..(61): /note="Nucleotide may be methylated to form 5-methylcytosine"
ctgttttgttatgtgtattttgctgggatggaaaatgttaatttggtttcccatgcagcccgtcaggcagcatcttgcaaataaagaatcttgtcttacagggtgattttctcttgtaaaat

SEQ ID NO: 5107 - DNA, 122 bp, Homo sapiens
  misc_feature (61)..(62): /note="This region represents a CpG dinucleotide"
  misc_feature (61)..(61): /note="Nucleotide may be methylated to form 5-methylcytosine"
gtttctagagtactactatgcttccatgctaattcaacccacgtatgttgacgacacatgcggatcctaaaatgccatgattcatctgaggctgccacagttgtgcagcttagggatgtacc

SEQ ID NO: 5108 - DNA, 122 bp, Homo sapiens
  misc_feature (61)..(62): /note="This region represents a CpG dinucleotide"
  misc_feature (61)..(61): /note="Nucleotide may be methylated to form 5-methylcytosine"
ggaacagaagtcagttaccttctgatcaggcccaggcagtggggcccaaggagctctttgcgtgcgaatgctttgctttctcaggctaagtagcaatggagaggaaagccagaatactgtgt

SEQ ID NO: 5109 - DNA, 122 bp, Homo sapiens
  misc_feature (61)..(62): /note="This region represents a CpG dinucleotide"
  misc_feature (61)..(61): /note="Nucleotide may be methylated to form 5-methylcytosine"
ctcccaaagtgctgggattacaggcttaatcccagagccacaatacaaagccaccatgcccggcctctgaattttttttttttttaatttttcttatttattttgagacaggttcttgttct

SEQ ID NO: 5110 - DNA, 122 bp, Homo sapiens
  misc_feature (61)..(62): /note="This region represents a CpG dinucleotide"
  misc_feature (61)..(61): /note="Nucleotide may be methylated to form 5-methylcytosine"
atacattaaaccatttgggagtatttacttaggaaggagatgaaagaagtaccagcttagcgggcattgtgaagcaccatgagaatgtataagggagagctcacaaatgcctaattccttag

SEQ ID NO: 5111 - DNA, 122 bp, Homo sapiens
  misc_feature (61)..(62): /note="This region represents a CpG dinucleotide"
  misc_feature (61)..(61): /note="Nucleotide may be methylated to form 5-methylcytosine"
ctcaagttatgtgatagtgcctggatcttaagcccttcaaaacttatgttgaaatttgatcgccagtgttggaggtggggcctgatgggaggtgtttgtgtcctcatattgagaaacttctc

SEQ ID NO: 5112 - DNA, 122 bp, Homo sapiens
  misc_feature (61)..(62): /note="This region represents a CpG dinucleotide"
  misc_feature (61)..(61): /note="Nucleotide may be methylated to form 5-methylcytosine"
aataacttggccagagctgcagggcagagctgcctctggctttccttgcccatgggtgtacgatcactcagccacagcacccagaaagaccagcttcttcaaagctgcacagacgcacatag

SEQ ID NO: 5113 - DNA, 122 bp, Homo sapiens
  misc_feature (61)..(62): /note="This region represents a CpG dinucleotide"
  misc_feature (61)..(61): /note="Nucleotide may be methylated to form 5-methylcytosine"
catgaagacctggttctggttcatagattaactaactagccagttcactaatcccactcacgagggcagaatcctcatgacctaagtacctcccaaaagcccagcctcctaactacatcaca

SEQ ID NO: 5114 - DNA, 122 bp, Homo sapiens
  misc_feature (61)..(62): /note="This region represents a CpG dinucleotide"
  misc_feature (61)..(61): /note="Nucleotide may be methylated to form 5-methylcytosine"
ccaagtctcagtgaaagtgaaaattgctgaacatttcaagattgttctaatggccaaagccgtaggactgacaggtgtcactcagcatttctagtcaatggaactctaacagaaatgaaggc

SEQ ID NO: 5115 - DNA, 122 bp, Homo sapiens
  misc_feature (61)..(62): /note="This region represents a CpG dinucleotide"
  misc_feature (61)..(61): /note="Nucleotide may be methylated to form 5-methylcytosine"
ggggttacagcagaggggtggcacatctccttggggtaataaagtgttctaaagtggttacggtggtggcagatgcacaactctgagaacagactctaaaccactgagttgtttaccttagg

SEQ ID NO: 5116 - DNA, 122 bp, Homo sapiens
  misc_feature (61)..(62): /note="This region represents a CpG dinucleotide"
  misc_feature (61)..(61): /note="Nucleotide may be methylated to form 5-methylcytosine"
atttatttttcttttttttttcctctttctttttttaaactccatcctggtagtaggtggcgctgtaggtttttgtgtgccttactgaacattacctagatctagggcttaagcggcagatt

SEQ ID NO: 5117 - DNA, 122 bp, Homo sapiens
  misc_feature (61)..(62): /note="This region represents a CpG dinucleotide"
  misc_feature (61)..(61): /note="Nucleotide may be methylated to form 5-methylcytosine"
tgagtagtatctgtagtgtagatatactggacaaagggatgattcacgtcccaggtgggacggagaggacagcgagaaatttcatcacactacttagaattgtgtgcaatttaaaacttatg

SEQ ID NO: 5118 - DNA, 122 bp, Homo sapiens
  misc_feature (61)..(62): /note="This region represents a CpG dinucleotide"
  misc_feature (61)..(61): /note="Nucleotide may be methylated to form 5-methylcytosine"
ttgagcaggcttagaactggctggtttgaagaatttcagtggggccggtggggagggtggcgactcagagggttgtccttagtcatctggtacttggccctggggcaatgaggacaggtgca

SEQ ID NO: 5119 - DNA, 122 bp, Homo sapiens
  misc_feature (61)..(62): /note="This region represents a CpG dinucleotide"
  misc_feature (61)..(61): /note="Nucleotide may be methylated to form 5-methylcytosine"
gccactgagatcatatctgtgtgcttggggaagggagagtgccgggattatcagacattgcgttagaactcagtgccctgtcacagtggaatgcaacacagggtggaactcagctggtgccc

SEQ ID NO: 5120 - DNA, 122 bp, Homo sapiens
  misc_feature (61)..(62): /note="This region represents a CpG dinucleotide"
  misc_feature (61)..(61): /note="Nucleotide may be methylated to form 5-methylcytosine"
gtttttgaaaagcaggaacattgtgttgaccttactcatagtatctttcacaggactgtgcgcatgcacacactaggatgttctacaattcaattagagttctgtacattttaatatgtgta

SEQ ID NO: 5121 - DNA, 122 bp, Homo sapiens
  misc_feature (61)..(62): /note="This region represents a CpG dinucleotide"
  misc_feature (61)..(61): /note="Nucleotide may be methylated to form 5-methylcytosine"
gaatgcggtgactgatgtcccaactcttaacttctgactcaaagttatactcatcacttccggccacctttcattggctgaagcaactcgcagggctatactatactttagtcaggtgggga

SEQ ID NO: 5122 - DNA, 122 bp, Homo sapiens
  misc_feature (61)..(62): /note="This region represents a CpG dinucleotide"
  misc_feature (61)..(61): /note="Nucleotide may be methylated to form 5-methylcytosine"
agctttggagctagatacagctatggagtcaggtagactgaactcacgtgtcagctcagccgtttttctagctttgtgaccttaggcaagttactcaacctctctgtttcctcatctattca

SEQ ID NO: 5123 - DNA, 122 bp, Homo sapiens
  misc_feature (61)..(62): /note="This region represents a CpG dinucleotide"
  misc_feature (61)..(61): /note="Nucleotide may be methylated to form 5-methylcytosine"
aagcagccttctgtgggttgtggtttcagtgtcagctcccagttcccctttcaaagccttcgctgtgctgtttgaacctgccccacgtgtgtgccccgcaccccaccccggtctcccctgag

SEQ ID NO: 5124 - DNA, 122 bp, Homo sapiens
  misc_feature (61)..(62): /note="This region represents a CpG dinucleotide"
  misc_feature (61)..(61): /note="Nucleotide may be methylated to form 5-methylcytosine"
atcacctatatttcccttggaaaataccttcttagggtacagcaggcattagatacccagcgcatgcctgaatgtcaatcctccatgttctcacctgtgagtccacgatccccacccctagg

SEQ ID NO: 5125 - DNA, 122 bp, Homo sapiens
  misc_feature (61)..(62): /note="This region represents a CpG dinucleotide"
  misc_feature (61)..(61): /note="Nucleotide may be methylated to form 5-methylcytosine"
cctgcaccagccttgtcttactaaatgttggagtagtttaactttggctccctcttctggcgggttgtaggattctgcacttttggagagaaaatacctaagattactgctatttcccaatt

SEQ ID NO: 5126 - DNA, 122 bp, Homo sapiens
  misc_feature (61)..(62): /note="This region represents a CpG dinucleotide"
  misc_feature (61)..(61): /note="Nucleotide may be methylated to form 5-methylcytosine"
caattcagagtccacacacagccccaactcccagatgccaaacccaactcctggatctttcgggaagctgtcgccctctggccagtcttccttgaatggcagttctgcccatgggccctcac

SEQ ID NO: 5127 - DNA, 122 bp, Homo sapiens
  misc_feature (61)..(62): /note="This region represents a CpG dinucleotide"
  misc_feature (61)..(61): /note="Nucleotide may be methylated to form 5-methylcytosine"
gagctggtatcaggcttcatcctcgcagggctaaccccaacagtggcactgaacattcaacgcaccaataaacctaggcaaagactgtttcactgagctgagggaggggccggggctgaggc

SEQ ID NO: 5128 - DNA, 122 bp, Homo sapiens
  misc_feature (61)..(62): /note="This region represents a CpG dinucleotide"
  misc_feature (61)..(61): /note="Nucleotide may be methylated to form 5-methylcytosine"
tacatataactgaactcccgtaggattgggtgaagtctcttgagagcagctcactgtgggcgtgcggcaagagatcaacatttatctcagctgcttatatgtggtctaagtggatttggtag

SEQ ID NO: 5129 - DNA, 122 bp, Homo sapiens
  misc_feature (61)..(62): /note="This region represents a CpG dinucleotide"
  misc_feature (61)..(61): /note="Nucleotide may be methylated to form 5-methylcytosine"
tcactctgattcttttccattcaagtctattttatttcatttctaaacacactggttgcccgccaggcatggtggctcacgcctataatccaggcgctttgggaggctgaggcggacagatc

SEQ ID NO: 5130 - DNA, 122 bp, Homo sapiens
  misc_feature (61)..(62): /note="This region represents a CpG dinucleotide"
  misc_feature (61)..(61): /note="Nucleotide may be methylated to form 5-methylcytosine"
agtcctgagccaattccctgtggctcctcaagttggctgtgtggacttgggcaaatgtcccgccaaatccgaagccttgcttcctcctctatggggtaagagtaacaattcttacaacagga

SEQ ID NO: 5131 - DNA, 122 bp, Homo sapiens
  misc_feature (61)..(62): /note="This region represents a CpG dinucleotide"
  misc_feature (61)..(61): /note="Nucleotide may be methylated to form 5-methylcytosine"
taagatgccatacatggtgaaaaagtcaccttaccacagtgaaatgatgtgatgactaagcggacagacagatgttaatgaggaacatggtccagctgctgcaaagtagcaaagcttcccag

SEQ ID NO: 5132 - DNA, 122 bp, Homo sapiens
  misc_feature (61)..(62): /note="This region represents a CpG dinucleotide"
  misc_feature (61)..(61): /note="Nucleotide may be methylated to form 5-methylcytosine"
aatgacaagagaaaaagctgcttgaaccactgagtcaccttatggaggccaagggcctagcggagtcaccctgcccacactagacgttgcttagagttcagcttgaagccatgtgatgtggg

SEQ ID NO: 5133 - DNA, 122 bp, Homo sapiens
  misc_feature (61)..(62): /note="This region represents a CpG dinucleotide"
  misc_feature (61)..(61): /note="Nucleotide may be methylated to form 5-methylcytosine"
taatacagtgcctgaagcttagacagggcttactaaacacatctgactaattctcagcagcgtgttggaagagccctcattagtattaatagcagagctgggttttgaccccagacttatag

SEQ ID NO: 5134 - DNA, 122 bp, Homo sapiens
  misc_feature (61)..(62): /note="This region represents a CpG dinucleotide"
  misc_feature (61)..(61): /note="Nucleotide may be methylated to form 5-methylcytosine"
accaaaaaggcaacagacaggatgattctaggtatatgaaatacttagaataggcaaatccgtagatcagaaagcagattagtggttaccagggccttagggtagggttgaaatggggagtg

SEQ ID NO: 5135 - DNA, 122 bp, Homo sapiens
  misc_feature (61)..(62): /note="This region represents a CpG dinucleotide"
  misc_feature (61)..(61): /note="Nucleotide may be methylated to form 5-methylcytosine"
cccatgattgagtctggaatgtcccacctcttctcctttgcctggttaactcccacatgccgtaagactcaccttgagtgtcttctctacaaggcctgcctgaccctgacagcttgcttgga

SEQ ID NO: 5136 - DNA, 122 bp, Homo sapiens
  misc_feature (61)..(62): /note="This region represents a CpG dinucleotide"
  misc_feature (61)..(61): /note="Nucleotide may be methylated to form 5-methylcytosine"
attattcattgaatgataggacaaacattcataaaacatacgtctatctctgcaaaatatcgtgtgctcacttatgtgtcttcttttgactaaaatgaaagctttgtcgatctgccttgtac

SEQ ID NO: 5137 - DNA, 122 bp, Homo sapiens
  misc_feature (61)..(62): /note="This region represents a CpG dinucleotide"
  misc_feature (61)..(61): /note="Nucleotide may be methylated to form 5-methylcytosine"
taagacaggtgctaagtgctttaacatatattaactcatttaatcctctcaacaactatacgaaggaggtgctaatctgcccactttacaggtgaagaaataaggacacagaaaaattaagt

SEQ ID NO: 5138 - DNA, 122 bp, Homo sapiens
  misc_feature (61)..(62): /note="This region represents a CpG dinucleotide"
  misc_feature (61)..(61): /note="Nucleotide may be methylated to form 5-methylcytosine"
cagacacgaagattgcatgagcattattattggcaaatcgggaaccttgcttctctactgcgtgctctgaaaggaggaagaatgctagggttttttccctggaagggagaaaagagtaaaca

SEQ ID NO: 5139 - DNA, 122 bp, Homo sapiens
  misc_feature (61)..(62): /note="This region represents a CpG dinucleotide"
  misc_feature (61)..(61): /note="Nucleotide may be methylated to form 5-methylcytosine"
gcatattatctaaaagtgtcatgaaaccctgggcagcggacctcaaaggacagtccctggcgtccgaatgagtggcatcaccagagagcttgttagaaatgcaaaccttccggcctcaccag

SEQ ID NO: 5140 - DNA, 122 bp, Homo sapiens
  misc_feature (61)..(62): /note="This region represents a CpG dinucleotide"
  misc_feature (61)..(61): /note="Nucleotide may be methylated to form 5-methylcytosine"
agtatatgcagagagcctcagaccatgatgcacgcctgacaattttgcagaaggaaaagacgaaggaaggaggattaggtggaaagaacctaagactacagtgcaggtctgcgaaagtctca

SEQ ID NO: 5141 - DNA, 122 bp, Homo sapiens
  misc_feature (61)..(62): /note="This region represents a CpG dinucleotide"
  misc_feature (61)..(61): /note="Nucleotide may be methylated to form 5-methylcytosine"
tggtcctcttccctccccactggcctcctcctttctccagagggcaccacctttgccctgcgccagacagccaggcccttgccaggccaagagttgagtcagacttcagttcaccaacatgc

SEQ ID NO: 5142 - DNA, 122 bp, Homo sapiens
  misc_feature (61)..(62): /note="This region represents a CpG dinucleotide"
  misc_feature (61)..(61): /note="Nucleotide may be methylated to form 5-methylcytosine"
ggcttgaggggagaatgtgtcctttgactcttccagcttctggtgactataagcattcctcggcttgcggttacatcactccaatctccgcctccatgagcacactgcttcctccttttctg

SEQ ID NO: 5143 - DNA, 122 bp, Homo sapiens
  misc_feature (61)..(62): /note="This region represents a CpG dinucleotide"
  misc_feature (61)..(61): /note="Nucleotide may be methylated to form 5-methylcytosine"
acttacttgcaactcagcacagcctttgttggagatgtccaggcagctcaaagctggagccgctgaggcaagcctgcagaagggctaggctggtgatgaggagcaaggcgtggttgagtcct

SEQ ID NO: 5144 - DNA, 122 bp, Homo sapiens
  misc_feature (61)..(62): /note="This region represents a CpG dinucleotide"
  misc_feature (61)..(61): /note="Nucleotide may be methylated to form 5-methylcytosine"
ccagaattttcttcctttttaaggccgaataatattccattgtatggctagatcatatttcgcttacccattcatctgtccatggactgtctgagtaaccttttggctattgtgaatcatgc

SEQ ID NO: 5145 - DNA, 122 bp, Homo sapiens
  misc_feature (61)..(62): /note="This region represents a CpG dinucleotide"
  misc_feature (61)..(61): /note="Nucleotide may be methylated to form 5-methylcytosine"
gtagtccttaagattataaagaacctgaaaaattcctatcacccaatgatgtcgtaaccacggtaagttgtagtgcactgcattactcacatatttttggtgatgctggagaaaaacaaacc

SEQ ID NO: 5146 - DNA, 122 bp, Homo sapiens
  misc_feature (61)..(62): /note="This region represents a CpG dinucleotide"
  misc_feature (61)..(61): /note="Nucleotide may be methylated to form 5-methylcytosine"
tctggggtcggtcctaaaataaaaggtgagttcctgaatgatgggactaaagaggagagacggaacaataatgtaaggttttcagagggagtagtcacaaaagctttcagaggaagtactgg

SEQ ID NO: 5147 - DNA, 122 bp, Homo sapiens
  misc_feature (61)..(62): /note="This region represents a CpG dinucleotide"
  misc_feature (61)..(61): /note="Nucleotide may be methylated to form 5-methylcytosine"
tttatccacttacccaaggtcacacagctaggagctagcagagttgggattcaagctggacgtgtctgtcttgttaccatgaaactattgggatcatcagtcagaatcttttcttttttttt

SEQ ID NO: 5148 - DNA, 122 bp, Homo sapiens
  misc_feature (61)..(62): /note="This region represents a CpG dinucleotide"
  misc_feature (61)..(61): /note="Nucleotide may be methylated to form 5-methylcytosine"
tggaggagctgtcagaggaggaccgcttcatgctatgcttcagccgcatcccgcgcctgccggagcgcatgaccacactcaccttcctgggcaacttcccggacacagcccagctgctcatg

SEQ ID NO: 5149 - DNA, 122 bp, Homo sapiens
  misc_feature (61)..(62): /note="This region represents a CpG dinucleotide"
  misc_feature (61)..(61): /note="Nucleotide may be methylated to form 5-methylcytosine"
cctctgagatgcttttggctgcaacccagggccattaatctcagtgatatattcttcatccggatgcatcatctttgtgtcttctggtaggactatttgaggaatgttcctagacattcatt

SEQ ID NO: 5150 - DNA, 122 bp, Homo sapiens
  misc_feature (61)..(62): /note="This region represents a CpG dinucleotide"
  misc_feature (61)..(61): /note="Nucleotide may be methylated to form 5-methylcytosine"
cgtcacaccatgtcatgtagctttttcttcgcatatctgttgattgcttgcacttctgcccgtcctcatactagggcttagttcagcacttctccctggactggatttagactctgatgccc

SEQ ID NO: 5151 - DNA, 122 bp, Homo sapiens
  misc_feature (61)..(62): /note="This region represents a CpG dinucleotide"
  misc_feature (61)..(61): /note="Nucleotide may be methylated to form 5-methylcytosine"
acatttatttctcagaacatgctacaggggtagatatatgtccaaaatgtttgtcctacacgtgaccaaatacaggtacagagaatatcaacatctgtgacctgtctagagtcacagtcatg

SEQ ID NO: 5152 - DNA, 122 bp, Homo sapiens
  misc_feature (61)..(62): /note="This region represents a CpG dinucleotide"
  misc_feature (61)..(61): /note="Nucleotide may be methylated to form 5-methylcytosine"
gcaagcagcaatgtcccacagcctggaagctttccctgggcgtgttcactccttagaatgcgtcacactaagcccggggacagacagctgccacatgtcctttgaataggttgtgtgtagga

SEQ ID NO: 5153 - DNA, 122 bp, Homo sapiens
  misc_feature (61)..(62): /note="This region represents a CpG dinucleotide"
  misc_feature (61)..(61): /note="Nucleotide may be methylated to form 5-methylcytosine"
ttagcagaacacaattttggactcttacttggtgtgagcaagactacacagagaagttgccgaaaacagctttctgcacagcagggaatgcttgaagacaaaatggggaggaagaagcaaac

SEQ ID NO: 5154 - DNA, 122 bp, Homo sapiens
  misc_feature (61)..(62): /note="This region represents a CpG dinucleotide"
  misc_feature (61)..(61): /note="Nucleotide may be methylated to form 5-methylcytosine"
tgggcaggggctcaggaatgggagttgctgattggctggggatgaaatcataggagtgtgcgaaatggtcctcatgtagagttcacctctgggtggggccacaggatcagttgagtcatgag

SEQ ID NO: 5155 - DNA, 122 bp, Homo sapiens
  misc_feature (61)..(62): /note="This region represents a CpG dinucleotide"
  misc_feature (61)..(61): /note="Nucleotide may be methylated to form 5-methylcytosine"
gaggaggaaagggcttgaaagaatcccgagcttctaaagatcatccctctctgggccaggcgtggtggctcatgcctgtaatcccagcactttgggaagccgaggtggatgaatcatttagg

SEQ ID NO: 5156 - DNA, 122 bp, Homo sapiens
  misc_feature (61)..(62): /note="This region represents a CpG dinucleotide"
  misc_feature (61)..(61): /note="Nucleotide may be methylated to form 5-methylcytosine"
ttacatcccagtcattaccatggcttacaaggctccacacagtctgatccctgcctacagcgttggtctcacttcctacaattctctccctcgcttgctccacttactcatctcagccacat

SEQ ID NO: 5157 - DNA, 122 bp, Homo sapiens
  misc_feature (61)..(62): /note="This region represents a CpG dinucleotide"
  misc_feature (61)..(61): /note="Nucleotide may be methylated to form 5-methylcytosine"
ctgtccaactgtagatcaaactgtgttggctaataatgcttccttctaattaaactctcacgcctgcaacagtaagcttgcaagtgggaacccatggctcccaggatgtgtgtgtcctcaca

SEQ ID NO: 5158 - DNA, 122 bp, Homo sapiens
  misc_feature (61)..(62): /note="This region represents a CpG dinucleotide"
  misc_feature (61)..(61): /note="Nucleotide may be methylated to form 5-methylcytosine"
tgatgggacactctggttctatttcctgagatactttgtaccaatttgaaggtaagataacgaggcctctggggaaaagagaggcaatttatacagaaagtttccaggctgactcacaaagc

SEQ ID NO: 5159 - DNA, 122 bp, Homo sapiens
  misc_feature (61)..(62): /note="This region represents a CpG dinucleotide"
  misc_feature (61)..(61): /note="Nucleotide may be methylated to form 5-methylcytosine"
gatgtgtgcattcatgagctcaggtgagttttacctgttgagtcaggtggcatatggggccgagacccaggctgatgctgaggaactgtgggatctaccacagtccaccttcatccactgca

SEQ ID NO: 5160 - DNA, 122 bp, Homo sapiens
  misc_feature (61)..(62): /note="This region represents a CpG dinucleotide"
  misc_feature (61)..(61): /note="Nucleotide may be methylated to form 5-methylcytosine"
aatgatccccaggtctgtgttaatctctcatggaaagccacagactcacccaaagataggcgtatgaagatcgaagctctcctagcaacatgaaatcctccacgttgcagctgctacgccct

SEQ ID NO: 5161 - DNA, 122 bp, Homo sapiens
  misc_feature (61)..(62): /note="This region represents a CpG dinucleotide"
  misc_feature (61)..(61): /note="Nucleotide may be methylated to form 5-methylcytosine"
gctatggggaaagaaactggagacaaaggtgtcaaccccagcagggcctggggagggaagcggccctgtacatcctcactctggtgggacctcagtcccctggccacagtgtgctccgggct

SEQ ID NO: 5162 - DNA, 122 bp, Homo sapiens
  misc_feature (61)..(62): /note="This region represents a CpG dinucleotide"
  misc_feature (61)..(61): /note="Nucleotide may be methylated to form 5-methylcytosine"
tcctgaaaacatggtttcctgggcctcgactctgagcaggcagcagatgtggcaaggtgacgacagtgaggcctaggcagggaagacagaattcaactctgtttattaatctgttggctcat

SEQ ID NO: 5163 - DNA, 122 bp, Homo sapiens
  misc_feature (61)..(62): /note="This region represents a CpG dinucleotide"
  misc_feature (61)..(61): /note="Nucleotide may be methylated to form 5-methylcytosine"
gctacaggctggatttggcctgcaagctgtgattcattgacttcagcctagagtgtgatccgtcctagtgaatgttccacatacacttgaaaagaatgtatattcttcttctgttgcagttg

SEQ ID NO: 5164 - DNA, 122 bp, Homo sapiens
  misc_feature (61)..(62): /note="This region represents a CpG dinucleotide"
  misc_feature (61)..(61): /note="Nucleotide may be methylated to form 5-methylcytosine"
tgacaagatgacattagtagtgacaacagtcaccattgctaagcctggcagcttcaggcacgcttaaaactcccatgagaaggcagaggctctgaggcccaggaggctctgaggccaaggag

SEQ ID NO: 5165 - DNA, 122 bp, Homo sapiens
  misc_feature (61)..(62): /note="This region represents a CpG dinucleotide"
  misc_feature (61)..(61): /note="Nucleotide may be methylated to form 5-methylcytosine"
ctttaaacttcaggaagtcacagtagaatcacaatgtcagacacagtctacgaaacgcttcgtatatgttacctcatttgatctttgtaatcaacccatgaggcaggtggggtgtggcgggt

SEQ ID NO: 5166 - DNA, 122 bp, Homo sapiens
  misc_feature (61)..(62): /note="This region represents a CpG dinucleotide"
  misc_feature (61)..(61): /note="Nucleotide may be methylated to form 5-methylcytosine"
tgttgctgctgctgttgtctttcctgttctattacaagtcagattcctttgtgtctcacccgtggtgtctgcggtgaggaccaaaagactctcccacatggttgccatatttctcagcattc

SEQ ID NO: 5167 - DNA, 122 bp, Homo sapiens
  misc_feature (61)..(62): /note="This region represents a CpG dinucleotide"
  misc_feature (61)..(61): /note="Nucleotide may be methylated to form 5-methylcytosine"
ctataccatctaggtttgtgaaagtaaactctatgtttttacaatgacgtaatcacctaacgacgcatttctcagaggatctccccatagttaagccaggcgtgactgtatatgtatattta

SEQ ID NO: 5168 - DNA, 122 bp, Homo sapiens
  misc_feature (61)..(62): /note="This region represents a CpG dinucleotide"
  misc_feature (61)..(61): /note="Nucleotide may be methylated to form 5-methylcytosine"
cattcaggaacactgtaacaactagaggccacagggcaacttctttagtacaggagtgaacgtgagtcacagtgttgtcactgaggtcatctttgcactgaaggttagaaactcaaaacaaa

SEQ ID NO: 5169 - DNA, 122 bp, Homo sapiens
  misc_feature (61)..(62): /note="This region represents a CpG dinucleotide"
  misc_feature (61)..(61): /note="Nucleotide may be methylated to form 5-methylcytosine"
atttgctttgtaccacttcctctacctcaagagcaagccttgatcctagcacggctaacacgaggtgagattcgtgagacctaactcccgggctgactctgaactgtcgttttagagggagt

SEQ ID NO: 5170 - DNA, 122 bp, Homo sapiens
  misc_feature (61)..(62): /note="This region represents a CpG dinucleotide"
  misc_feature (61)..(61): /note="Nucleotide may be methylated to form 5-methylcytosine"
gatgggcgcgtggcctgtgcacgcatgcaggcctgcacactcacatgcacgcacacacaccggacaggttaatccccgtatcattggctgccacgggttgcctaagaagcttaacagggcat

SEQ ID NO: 5171 - DNA, 122 bp, Homo sapiens
  misc_feature (61)..(62): /note="This region represents a CpG dinucleotide"
  misc_feature (61)..(61): /note="Nucleotide may be methylated to form 5-methylcytosine"
aagttcagcttgtatttaaagatgagtcagtttgaggcatgaaggtccaaatgtacagatcgtaggctgacagtaggtaggcaaataacgatagtaagtttaaggaaacaagttataataaa

SEQ ID NO: 5172 - DNA, 122 bp, Homo sapiens
  misc_feature (61)..(62): /note="This region represents a CpG dinucleotide"
  misc_feature (61)..(61): /note="Nucleotide may be methylated to form 5-methylcytosine"
atccttcacttcttagcttagatttctcttctgctgagaagccttcactggcccctacatcgtcagctatgggaaccctcttatgtgtagtctctatctccccctcttctagcacttgtcac

SEQ ID NO: 5173 - DNA, 122 bp, Homo sapiens
  misc_feature (61)..(62): /note="This region represents a CpG dinucleotide"
  misc_feature (61)..(61): /note="Nucleotide may be methylated to form 5-methylcytosine"
aaattaacccagctgccctctcagttacaagtccatcccatccaaactccatgccaggtgcgaaaggctctccaggtcaacttgccctgccaacctctaaatgtccttctgtgcctctgcca

SEQ ID NO: 5174 - DNA, 122 bp, Homo sapiens
  misc_feature (61)..(62): /note="This region represents a CpG dinucleotide"
  misc_feature (61)..(61): /note="Nucleotide may be methylated to form 5-methylcytosine"
tccatgtggtatgatttcaagacaataaaaatcctacacactgacaagattcattgccttcggcctctctatatgttctgggttttgttcgtgccagatctgaggacagagagagtgtgaaa

SEQ ID NO: 5175 - DNA, 122 bp, Homo sapiens
  misc_feature (61)..(62): /note="This region represents a CpG dinucleotide"
  misc_feature (61)..(61): /note="Nucleotide may be methylated to form 5-methylcytosine"
gcttaaaggattataccatggacttccccaagggaggatcttctgttgatcttagcagtacgggtgtttgacaaggatagtgaaaaagtgaggtagatttaaaagttacaaataagccttgc

SEQ ID NO: 5176 - DNA, 122 bp, Homo sapiens
  misc_feature (61)..(62): /note="This region represents a CpG dinucleotide"
  misc_feature (61)..(61): /note="Nucleotide may be methylated to form 5-methylcytosine"
cacctcctttgtgaagttttcccaggtagtgctaaccacacccttcttctgtgacctcaccgtgacaggtacagatggctaccggtgccctggcactgccttgggaatgagtgtgttttaat

SEQ ID NO: 5177 - DNA, 122 bp, Homo sapiens
  misc_feature (61)..(62): /note="This region represents a CpG dinucleotide"
  misc_feature (61)..(61): /note="Nucleotide may be methylated to form 5-methylcytosine"
ctctgcagcctcatggttagtggtaggcccagaggaggccaagggcagtaggcaagacaacggatagagaagagtagtgaattccagctatgtggagtttccagcttggcgaattccagcca

SEQ ID NO: 5178 - DNA, 122 bp, Homo sapiens
  misc_feature (61)..(62): /note="This region represents a CpG dinucleotide"
  misc_feature (61)..(61): /note="Nucleotide may be methylated to form 5-methylcytosine"
acaagcatctgagtggtgcggggaaagaaagctcagcgttgtttataacaagagtcatcacggaccaggaagaacaaagcagcaagaactgacaaagaagatgatacccagagcacaaggaa

SEQ ID NO: 5179 - DNA, 122 bp, Homo sapiens
  misc_feature (61)..(62): /note="This region represents a CpG dinucleotide"
  misc_feature (61)..(61): /note="Nucleotide may be methylated to form 5-methylcytosine"
ggcagcaatgggcatagctgggtgttccatttagcagcctcaccagaatcactggattctcgtggaggaggaagagcgctccaagggaagaggggaggggacagaagagaggggaaagggtg

SEQ ID NO: 5180 - DNA, 122 bp, Homo sapiens
  misc_feature (61)..(62): /note="This region represents a CpG dinucleotide"
  misc_feature (61)..(61): /note="Nucleotide may be methylated to form 5-methylcytosine"
aaagaggccaggttgtgtaacttggcaggttggcttacaggccagcacggtgttttgtttcgttatggcctatgaatgcctaccagtgctttaaactgactcaccctggctggatggcagtt

SEQ ID NO: 5181 - DNA, 122 bp, Homo sapiens
  misc_feature (61)..(62): /note="This region represents a CpG dinucleotide"
  misc_feature (61)..(61): /note="Nucleotide may be methylated to form 5-methylcytosine"
tcaatctccccgagcttcaacttgacctaacgatgatttctgtcatctcccctccacttgcgcagtctattcctgcagtgatggtgtcataccagcccatggaacagtgcccatcaaacaag

SEQ ID NO: 5182 - DNA, 122 bp, Homo sapiens
  misc_feature (61)..(62): /note="This region represents a CpG dinucleotide"
  misc_feature (61)..(61): /note="Nucleotide may be methylated to form 5-methylcytosine"
gaccctttgagaacatcccagacgttgatagtgtaatcattgtatccagcaaacagcaggcgaccttgaagcagggtgagatgatagctgttaagccagttccttgcttcctgtttctcatt

SEQ ID NO: 5183 - DNA, 122 bp, Homo sapiens
  misc_feature (61)..(62): /note="This region represents a CpG dinucleotide"
  misc_feature (61)..(61): /note="Nucleotide may be methylated to form 5-methylcytosine"
aagtgaggatatgcaaagagagcactaaccagcctttctttaggctccaaagatactcatcggactgtgactcatctgatcattggttgaaatatgagtgacacagcatatgatatacattc

SEQ ID NO: 5184 - DNA, 122 bp, Homo sapiens
  misc_feature (61)..(62): /note="This region represents a CpG dinucleotide"
  misc_feature (61)..(61): /note="Nucleotide may be methylated to form 5-methylcytosine"
ctcgaatacctgacctcgtgatccacccgcctcagcctcccaaagtgctgggattacaggcgtgagccaccacacctgggcttaaccttgttttaacatgaggaaacatacttgagaggttg

SEQ ID NO: 5185 - DNA, 122 bp, Homo sapiens
  misc_feature (61)..(62): /note="This region represents a CpG dinucleotide"
  misc_feature (61)..(61): /note="Nucleotide may be methylated to form 5-methylcytosine"
tgagcactttgtgtacattaatctaatttaatcctcatagcagccacgtgaggtagctaccgctgaactgaggcttagtaagattaagtaacttgcccaaggtcatacagctagtaagtggc

SEQ ID NO: 5186 - DNA, 122 bp, Homo sapiens
  misc_feature (61)..(62): /note="This region represents a CpG dinucleotide"
  misc_feature (61)..(61): /note="Nucleotide may be methylated to form 5-methylcytosine"
ctccggtgatccacctgcattggcctcccaaagtgctgggattacaggcgtgagccactgcgcctgaccggttacttaactttctcaaggtcccacagctagtaagtgaggaagctctggca

SEQ ID NO: 5187 - DNA, 122 bp, Homo sapiens
  misc_feature (61)..(62): /note="This region represents a CpG dinucleotide"
  misc_feature (61)..(61): /note="Nucleotide may be methylated to form 5-methylcytosine"
cactctctctctcttcctgctctgctacggtaagacgtgctttgctttccctttgccttccgccatgattctaagtttcctgaggcctccccagccatgcagaactgtgagtcaatctaacc

SEQ ID NO: 5188 - DNA, 122 bp, Homo sapiens
  misc_feature (61)..(62): /note="This region represents a CpG dinucleotide"
  misc_feature (61)..(61): /note="Nucleotide may be methylated to form 5-methylcytosine"
ataaattacttactgaaatagagcttgtgacagattcccagttggtctctgaagctgctgcgggttggaaatcttcctggaaggcaaagaaacatctgtgagtcagtcaaacctctgttcaa

SEQ ID NO: 5189 - DNA, 122 bp, Homo sapiens
  misc_feature (61)..(62): /note="This region represents a CpG dinucleotide"
  misc_feature (61)..(61): /note="Nucleotide may be methylated to form 5-methylcytosine"
gcagtctgtgtgggcacgatatatttggcagctaccactctactgactcatttgggctctcgttaggcaaagtcctcattctcatttagcacgcgctgctggtttacaccatagttcccatc

SEQ ID NO: 5190 - DNA, 122 bp, Homo sapiens
  misc_feature (61)..(62): /note="This region represents a CpG dinucleotide"
  misc_feature (61)..(61): /note="Nucleotide may be methylated to form 5-methylcytosine"
agccaacattggtgttttactgatgccagatatgactgcatggagctctattaaatagggcgtggtttggttgggagttacgtctttattttgaatttgtggatttttaagataagtgtcag

SEQ ID NO: 5191 - DNA, 122 bp, Homo sapiens
  misc_feature (61)..(62): /note="This region represents a CpG dinucleotide"
  misc_feature (61)..(61): /note="Nucleotide may be methylated to form 5-methylcytosine"
ttatcatctaactcctctaaaacaacatgtctgtctctttttctgtacacttacgacaagcgtatcaataagcctagtgcctaagactaaggtaaaacaaataaccattctttgtctcataa

SEQ ID NO: 5192 - DNA, 122 bp, Homo sapiens
  misc_feature (61)..(62): /note="This region represents a CpG dinucleotide"
  misc_feature (61)..(61): /note="Nucleotide may be methylated to form 5-methylcytosine"
tacgtgagggcagcggtggctaggtccaaagaggaggctttcaaggcaagagaaggcaggcgctcccagcaccagcgtgcagtggaaataaagacacctgtagccttgtgatataagtgaca

SEQ ID NO: 5193 - DNA, 122 bp, Homo sapiens
  misc_feature (61)..(62): /note="This region represents a CpG dinucleotide"
  misc_feature (61)..(61): /note="Nucleotide may be methylated to form 5-methylcytosine"
tggagaggattttggaatgtcgcatagctcctggctgggcaaggtggctgggagtcatcccgcctgcaggtagacagagggtgtggagctcagggatcatgagtaagcagtgggaagtggac

SEQ ID NO: 5194 - DNA, 122 bp, Homo sapiens
  misc_feature (61)..(62): /note="This region represents a CpG dinucleotide"
  misc_feature (61)..(61): /note="Nucleotide may be methylated to form 5-methylcytosine"
acctcatgatccacccgcctcggcctcccaaagtgctgggattacaggcgtgagccaccgcgcccggccaggagtggcattttaaaagacctggacatcaggagacctgtcccagtgttccc

SEQ ID NO: 5195 - DNA, 122 bp, Homo sapiens
  misc_feature (61)..(62): /note="This region represents a CpG dinucleotide"
  misc_feature (61)..(61): /note="Nucleotide may be methylated to form 5-methylcytosine"
gctgttcaataatatactgcatcatttgaaatgtgagtgttctaagtaagctatctagtacgatgcagctgatgtcagcagcctttccacaaagctactaattacagaagagacaggccccg

SEQ ID NO: 5196 - DNA, 122 bp, Homo sapiens
  misc_feature (61)..(62): /note="This region represents a CpG dinucleotide"
  misc_feature (61)..(61): /note="Nucleotide may be methylated to form 5-methylcytosine"
aaaccttcatgaatgggccatcctgtgcctgcaatcacagggaggtggggccgacagccacgggtcacgtaactgaggccaaacacaagaagctggcctggatcaatgagtcagggagagct

SEQ ID NO: 5197 - DNA, 122 bp, Homo sapiens
  misc_feature (61)..(62): /note="This region represents a CpG dinucleotide"
  misc_feature (61)..(61): /note="Nucleotide may be methylated to form 5-methylcytosine"
ggccaaatcctgtccctggaagagccacaaagtaggaagcctgggtacaggcctggcaagcgagaacaatgtgtcactgcaggactttggagctctcagctttggagtcagttaagaccagt

SEQ ID NO: 5198 - DNA, 122 bp, Homo sapiens
  misc_feature (61)..(62): /note="This region represents a CpG dinucleotide"
  misc_feature (61)..(61): /note="Nucleotide may be methylated to form 5-methylcytosine"
ctcctgacattgctaaagatgatcatgaagacatttatccagtctctcctgcctccctttcgcccatcccttcagaagcttatgtcaagtgtgacaggctaggtgatgaatgggtagaaagt

SEQ ID NO: 5199 - DNA, 122 bp, Homo sapiens
  misc_feature (61)..(62): /note="This region represents a CpG dinucleotide"
  misc_feature (61)..(61): /note="Nucleotide may be methylated to form 5-methylcytosine"
ttgaagtgtccgatccagtccttcaactcagagcactcctatctgtgacacctctgcccacgcatccagtatgtgcagcacacctgctctgtgactgacactcttgcagaagtggggccact

SEQ ID NO: 5200 - DNA, 122 bp, Homo sapiens
  misc_feature (61)..(62): /note="This region represents a CpG dinucleotide"
  misc_feature (61)..(61): /note="Nucleotide may be methylated to form 5-methylcytosine"
aaatcaataagtcagtgaatgttggcaggtgttcagagattttttctgtgtgtcattcaccgtggcacagttaagtaactgcttatgattaagtttttcacagtctcagaaaataaggagtt

SEQ ID NO: 5201 - DNA, 122 bp, Homo sapiens
  misc_feature (61)..(62): /note="This region represents a CpG dinucleotide"
  misc_feature (61)..(61): /note="Nucleotide may be methylated to form 5-methylcytosine"
caataaaagatgtaggatttgaattagaattcttgctactgaatctgtgttcttaaccaccgctttctagagagaaagaggacaaagaaggcaagtcagttctcagccctgagaattccacc

SEQ ID NO: 5202 - DNA, 122 bp, Homo sapiens
  misc_feature (61)..(62): /note="This region represents a CpG dinucleotide"
  misc_feature (61)..(61): /note="Nucleotide may be methylated to form 5-methylcytosine"
catgctattatttgaaaaatccaggaaacaaatggttgaatcctagttagccaataaatacgtggctttgtagtattagtctcttgggcttcagttttatcaccaagaataataatgcagcc

SEQ ID NO: 5203 - DNA, 122 bp, Homo sapiens
  misc_feature (61)..(62): /note="This region represents a CpG dinucleotide"
  misc_feature (61)..(61): /note="Nucleotide may be methylated to form 5-methylcytosine"
tcagccccaagtgtggactcccaagccttagcagctgtagagagcaactggctacttagccgcagccctggagccacccctggtcctaaatttcgggcaccactgccctccaggcatcctgg

SEQ ID NO: 5204 - DNA, 122 bp, Homo sapiens
  misc_feature (61)..(62): /note="This region represents a CpG dinucleotide"
  misc_feature (61)..(61): /note="Nucleotide may be methylated to form 5-methylcytosine"
gaactgtaatctccataatccctacgtgccaggtagggacctggtaggaggtgattggcccgtggtggcagtttccctcatgctgttctcgtgatagcacgtgagttctcgtgagatctgat

SEQ ID NO: 5205 - DNA, 122 bp, Homo sapiens
  misc_feature (61)..(62): /note="This region represents a CpG dinucleotide"
  misc_feature (61)..(61): /note="Nucleotide may be methylated to form 5-methylcytosine"
tgtctgtgtctgcctgtctctcaggctttctcaggtaacttccacttaagttgtagctgacgcctgtaatcccagggctttgggaggccaaggtaggatcgcttgaggccaggagttcaaga

SEQ ID NO: 5206 - DNA, 122 bp, Homo sapiens
  misc_feature (61)..(62): /note="This region represents a CpG dinucleotide"
  misc_feature (61)..(61): /note="Nucleotide may be methylated to form 5-methylcytosine"
cttcctggtctgtgctaggtctaggctgggcactggggatgcagaagtgtgagtcagccacggtgactcaaggaatcaccgagacacctgcagaaatattccttgggcagcgggttggtacc

SEQ ID NO: 5207 - DNA, 122 bp, Homo sapiens
  misc_feature (61)..(62): /note="This region represents a CpG dinucleotide"
  misc_feature (61)..(61): /note="Nucleotide may be methylated to form 5-methylcytosine"
cctcctccctcctgccatgtgatgacacagcaaaaagatgtgacttataaaacaggaagccggccctcaccacacacaccaaatctgctaatgtcttggtcttggacttgcagcctccagaa

SEQ ID NO: 5208 - DNA, 122 bp, Homo sapiens
  misc_feature (61)..(62): /note="This region represents a CpG dinucleotide"
  misc_feature (61)..(61): /note="Nucleotide may be methylated to form 5-methylcytosine"
aaaacaaaaaccctggaacatagaagttcagaactttcctctcttcacagagttcctcctcgcatcatttcatgttgatcctcttatccccagtgtcttctgcctgaaggcctattttgtct

SEQ ID NO: 5209 - DNA, 122 bp, Homo sapiens
  misc_feature (61)..(62): /note="This region represents a CpG dinucleotide"
  misc_feature (61)..(61): /note="Nucleotide may be methylated to form 5-methylcytosine"
cccagcttcttaatattggtacattggggattaagttgcaacatgaattttggaggagcacggacattaaagccatagcactggcattcaataagtgtatattgtagctattataataatat

SEQ ID NO: 5210 - DNA, 122 bp, Homo sapiens
  misc_feature (61)..(62): /note="This region represents a CpG dinucleotide"
  misc_feature (61)..(61): /note="Nucleotide may be methylated to form 5-methylcytosine"
ccatgcctgagttagcagggcagggacacttcacggtgctgagtaatactacctagtacacgcacagcattttgaaggttccccttggtgatttcattacaatcttcatcgctcttggcctg

SEQ ID NO: 5211 - DNA, 122 bp, Homo sapiens
  misc_feature (61)..(62): /note="This region represents a CpG dinucleotide"
  misc_feature (61)..(61): /note="Nucleotide may be methylated to form 5-methylcytosine"
atgctgacacattgggcacccagaaaagtctgccgtgcagaatgaacagtgagcaccaggcgtgaggcagaggctctggaggatgtctcacggtgtcctttctgggaatttgcctaaccctt

SEQ ID NO: 5212 - DNA, 122 bp, Homo sapiens
  misc_feature (61)..(62): /note="This region represents a CpG dinucleotide"
  misc_feature (61)..(61): /note="Nucleotide may be methylated to form 5-methylcytosine"
attgttaataaagtgatggtggaaacaacactcttttttactttgacaactcaatacttacgagtccacagttactaacacaatgacacagcaatatagtacacaaagaaggttactagtca

SEQ ID NO: 5213 - DNA, 122 bp, Homo sapiens
  misc_feature (61)..(62): /note="This region represents a CpG dinucleotide"
  misc_feature (61)..(61): /note="Nucleotide may be methylated to form 5-methylcytosine"
cttctctgacaggtgtattgccctttatattcatgttgcccagcagtgttcctggcctagcgtagctgccaataaaattgattgatttgatttgaatcatattcagcaccctggagtcactg

SEQ ID NO: 5214 - DNA, 122 bp, Homo sapiens
  misc_feature (61)..(62): /note="This region represents a CpG dinucleotide"
  misc_feature (61)..(61): /note="Nucleotide may be methylated to form 5-methylcytosine"
ctggacatgctgctatgcctctctggctcctgggtgcctggatgatcagataaagcatcacgctgacctgggcttctcacctgtttagcaataaactatgaagcaggatgccagcaataaac

SEQ ID NO: 5215 - DNA, 122 bp, Homo sapiens
  misc_feature (61)..(62): /note="This region represents a CpG dinucleotide"
  misc_feature (61)..(61): /note="Nucleotide may be methylated to form 5-methylcytosine"
tcattacagggctgcagtgaatagccagtacttctttcccattggtcaagttgctgtgctcgctaagcagcaactgctcaggtcaggtgagagtggtcattattgaggaaataaaggttggg

SEQ ID NO: 5216 - DNA, 122 bp, Homo sapiens
  misc_feature (61)..(62): /note="This region represents a CpG dinucleotide"
  misc_feature (61)..(61): /note="Nucleotide may be methylated to form 5-methylcytosine"
tctcaattctgttctctgcccattagttcaacaatcctgagtagggcttgctctgctgcccggacatttagaaaggccaggcgaggctgaggcaggcagatcacctgaggtcaggagtttga

SEQ ID NO: 5217 - DNA, 122 bp, Homo sapiens
  misc_feature (61)..(62): /note="This region represents a CpG dinucleotide"
  misc_feature (61)..(61): /note="Nucleotide may be methylated to form 5-methylcytosine"
agaatgaccactgcactctagcctgagtgacagggtaagactttgaaaaaaaaaaagttgcgagtgatcatccacaccaaatgctggtggttttgcattttgactctggacagagttaggcc

SEQ ID NO: 5218 - DNA, 122 bp, Homo sapiens
  misc_feature (61)..(62): /note="This region represents a CpG dinucleotide"
  misc_feature (61)..(61): /note="Nucleotide may be methylated to form 5-methylcytosine"
tggcacatacagtgtggaaacactggacaaaggatgattcacatcccaggcaggtaagagcgggacagcgcaagacttcatcatgtgactcaggatgttacacaatttaaaacttacaaatt

SEQ ID NO: 5219 - DNA, 122 bp, Homo sapiens
  misc_feature (61)..(62): /note="This region represents a CpG dinucleotide"
  misc_feature (61)..(61): /note="Nucleotide may be methylated to form 5-methylcytosine"
tagccaagcaaagaaaggggaaagtggaaatcagggaaatagaacatcaaatgtaaaagacgagagagaaagcacattacctgagaggaagcctaaagtcagtaagagtggattaaagtatg

SEQ ID NO: 5220 - DNA, 122 bp, Homo sapiens
  misc_feature (61)..(62): /note="This region represents a CpG dinucleotide"
  misc_feature (61)..(61): /note="Nucleotide may be methylated to form 5-methylcytosine"
caagaaaataacaattttaattatttgagaatggacaacttcctgtgtctggtatgttaacgagtgaatctatagtgtcagtctggtaggagagtatggtagaatagtcattaatgtctttc

SEQ ID NO: 5221 - DNA, 122 bp, Homo sapiens
  misc_feature (61)..(62): /note="This region represents a CpG dinucleotide"
  misc_feature (61)..(61): /note="Nucleotide may be methylated to form 5-methylcytosine"
gagctgtgcggctcctggtgagaggcacacttatctgggatgcagtctggggagtcctggcgaggcagcttccacctgctggaggaggggccggggcggagctaagatgcggaggagggtga

SEQ ID NO: 5222 - DNA, 122 bp, Homo sapiens
  misc_feature (61)..(62): /note="This region represents a CpG dinucleotide"
  misc_feature (61)..(61): /note="Nucleotide may be methylated to form 5-methylcytosine"
ccattatctcttttctccataccaatattacaagtacagcctagagtggtcacactgtcacggcaatttgctatagtccatatgtgtgctctccaacttcagctgaaccctcagtcctacat

SEQ ID NO: 5223 - DNA, 122 bp, Homo sapiens
  misc_feature (61)..(62): /note="This region represents a CpG dinucleotide"
  misc_feature (61)..(61): /note="Nucleotide may be methylated to form 5-methylcytosine"
cacaggatttccttgtgattgatcctgaataaaatcaagctgagtatctgctgtgcccaacggacaatgaattgctggttatgcccagtccctaacctggagcaggctttcagccagttcca

SEQ ID NO: 5224 - DNA, 122 bp, Homo sapiens
  misc_feature (61)..(62): /note="This region represents a CpG dinucleotide"
  misc_feature (61)..(61): /note="Nucleotide may be methylated to form 5-methylcytosine"
cttcaggaagaagaggaagtggtaaaatatgttcgctgcccacagttcacagtatatagacggagtgatgagccacaaatacaagtaacaatagtggaaagaaaatagaatcagtgccataa

SEQ ID NO: 5225 - DNA, 122 bp, Homo sapiens
  misc_feature (61)..(62): /note="This region represents a CpG dinucleotide"
  misc_feature (61)..(61): /note="Nucleotide may be methylated to form 5-methylcytosine"
accagtgagactagaatagctcccgatgaattattcttatctctctactaaatgtgagcacgtcagtattttaatctcaattatgtttaccctcaaagtcctagagaacttaaacgacattg

SEQ ID NO: 5226 - DNA, 122 bp, Homo sapiens
  misc_feature (61)..(62): /note="This region represents a CpG dinucleotide"
  misc_feature (61)..(61): /note="Nucleotide may be methylated to form 5-methylcytosine"
cctgttagtcaacagccagatgccaacagataatcacattagactcatcagcaagcacaccgtgcacacaagttccactcccatgtacaggttcctgtcccatgtacacaagcctgcacaca

SEQ ID NO: 5227 - DNA, 122 bp, Homo sapiens
  misc_feature (61)..(62): /note="This region represents a CpG dinucleotide"
  misc_feature (61)..(61): /note="Nucleotide may be methylated to form 5-methylcytosine"
cttttagaaactcagaaaagggaataaaattcagggtagatgctgaacaatgagaggttacgattgttgagatgaaaatttagggatcaatgccaagtttggaagtaggaacacacaaaaca

SEQ ID NO: 5228 - DNA, 122 bp, Homo sapiens
  misc_feature (61)..(62): /note="This region represents a CpG dinucleotide"
  misc_feature (61)..(61): /note="Nucleotide may be methylated to form 5-methylcytosine"
gatcatcttctgtagcacacggtgaataataaacagatgattaagtaacatagttatagacggtgataaaagctgcacacttttaagatgaagactgggaggcatcagcctccatgaagaag

SEQ ID NO: 5229 - DNA, 122 bp, Homo sapiens
  misc_feature (61)..(62): /note="This region represents a CpG dinucleotide"
  misc_feature (61)..(61): /note="Nucleotide may be methylated to form 5-methylcytosine"
cgaacacgaagagatcactgggcgttttgaggaaaggaacgtcagagtgggtctctgacacggagtgagctgagtgttgcagcctgtctagtcagcagtaactgcttcccacaccacgtgac

SEQ ID NO: 5230 - DNA, 122 bp, Homo sapiens
  misc_feature (61)..(62): /note="This region represents a CpG dinucleotide"
  misc_feature (61)..(61): /note="Nucleotide may be methylated to form 5-methylcytosine"
tgtatactaagtgccagttgttctaagtccttttacgtgtattaactcatttaatccttacgagagccctgtaggtcttatccacattttgcaatgaagaaacagggacagaaagattacat

SEQ ID NO: 5231 - DNA, 122 bp, Homo sapiens
  misc_feature (61)..(62): /note="This region represents a CpG dinucleotide"
  misc_feature (61)..(61): /note="Nucleotide may be methylated to form 5-methylcytosine"
tggggatattgggatccctgtctcagtgcggcaacatgggaggcatctagtgcgacagagcggcctcacccaagtgatgtgtcatgatgaggataatgttcatggagactgatttccatttg

SEQ ID NO: 5232 - DNA, 122 bp, Homo sapiens
  misc_feature (61)..(62): /note="This region represents a CpG dinucleotide"
  misc_feature (61)..(61): /note="Nucleotide may be methylated to form 5-methylcytosine"
gttatgtacttgtgggtcatgatgttaaatgtgcttttccaagaatagccaagataaatccgaaaaagaaaaacaagcagggacgacttgccctaccagagttcagaacttgtcatgaaact

SEQ ID NO: 5233 - DNA, 122 bp, Homo sapiens
  misc_feature (61)..(62): /note="This region represents a CpG dinucleotide"
  misc_feature (61)..(61): /note="Nucleotide may be methylated to form 5-methylcytosine"
ttacaaagttgagcgtgagcaatggagagaagccagtccagattggaacagtgtgactcacgagatggggttgagcacactgtcatcaccagctgccctctactgctgtactatcttttaca

SEQ ID NO: 5234 - DNA, 122 bp, Homo sapiens
  misc_feature (61)..(62): /note="This region represents a CpG dinucleotide"
  misc_feature (61)..(61): /note="Nucleotide may be methylated to form 5-methylcytosine"
gggctgagctgtaatgggcggggcttaggactggtataggcataggcgggccttggaaggcgaaggcctcaacctcaagggaaggtgtgagtggaggggcgtggcccgcacctggagggcgg

SEQ ID NO: 5235 - DNA, 122 bp, Homo sapiens
  misc_feature (61)..(62): /note="This region represents a CpG dinucleotide"
  misc_feature (61)..(61): /note="Nucleotide may be methylated to form 5-methylcytosine"
cagacccacaataaaaaaagctgtggattttggaacattcccgacttcaggttttcgaatcggggaggctggacctgtatacctttccccctcatccatatgacaaacccggtaggtcgaca

SEQ ID NO: 5236 - DNA, 122 bp, Homo sapiens
  misc_feature (61)..(62): /note="This region represents a CpG dinucleotide"
  misc_feature (61)..(61): /note="Nucleotide may be methylated to form 5-methylcytosine"
ttagagaagatagtaattgggaaagacatcttcttaagatctaagtttctatgtctacctcggttactaggtggggccggatattactaacagggatgtgttgttccaagaaagcttgaact

SEQ ID NO: 5237 - DNA, 122 bp, Homo sapiens
  misc_feature (61)..(62): /note="This region represents a CpG dinucleotide"
  misc_feature (61)..(61): /note="Nucleotide may be methylated to form 5-methylcytosine"
ctagaaaatgtgtgaacttaaaacaactatgagtccctgagccacaatctctttctccttcgaggccagcttctcccgtggccttgcttctctctctctcactttgcccatgctgttcgctg

SEQ ID NO: 5238 - DNA, 122 bp, Homo sapiens
  misc_feature (61)..(62): /note="This region represents a CpG dinucleotide"
  misc_feature (61)..(61): /note="Nucleotide may be methylated to form 5-methylcytosine"
aaaagtctaaaccctgggtgtgcatgttaattcgtatttctctatccacacctgggaacccgcctctcaaagcagtcacttccaagaaggaggaatgtttgtgctgtgtagggcatctgtgg

SEQ ID NO: 5239 - DNA, 122 bp, Homo sapiens
  misc_feature (61)..(62): /note="This region represents a CpG dinucleotide"
  misc_feature (61)..(61): /note="Nucleotide may be methylated to form 5-methylcytosine"
attcagatgttctctggggcctcagctcatgattaattcatcaagtattggttgagctctcgtcacatgtcagggatcatgccttgtgttgaggcttacaatggaaagcaagaactacaaga

SEQ ID NO: 5240 - DNA, 122 bp, Homo sapiens
  misc_feature (61)..(62): /note="This region represents a CpG dinucleotide"
  misc_feature (61)..(61): /note="Nucleotide may be methylated to form 5-methylcytosine"
agagcctgcaggaaggaaaagaaaattatgccagcataatgcacttacgagaaatagatacgtgcggtgcagggagaaatgctttgatattaaaatttttgtaacttaaaaaggcatgaaaa

SEQ ID NO: 5241 - DNA, 122 bp, Homo sapiens
  misc_feature (61)..(62): /note="This region represents a CpG dinucleotide"
  misc_feature (61)..(61): /note="Nucleotide may be methylated to form 5-methylcytosine"
cccattgcctttgcaaacccggccagcgggctctgtgggacttctactttagggtgtggccgctgggggcccagctgttgcatgtcctctccacttctgaagagaggaagcaccctgggctg

SEQ ID NO: 5242 - DNA, 122 bp, Homo sapiens
  misc_feature (61)..(62): /note="This region represents a CpG dinucleotide"
  misc_feature (61)..(61): /note="Nucleotide may be methylated to form 5-methylcytosine"
cttttctactctgtttactaagaaactctgagttcttttagtttgattagagtgaaaacccggatcactgcttcctgtgtttcagacctactgccagaattttattttttcaggggcaaaat

SEQ ID NO: 5243 - DNA, 122 bp, Homo sapiens
  misc_feature (61)..(62): /note="This region represents a CpG dinucleotide"
  misc_feature (61)..(61): /note="Nucleotide may be methylated to form 5-methylcytosine"
gcttcagtggtattaccagttttccaaagtgtttataccgatttacagaccttttggcaacgtatgagagttccatttcttcctgtacttaccaatacttgcttgcttgctctcttcctccc

SEQ ID NO: 5244 - DNA, 122 bp, Homo sapiens
  misc_feature (61)..(62): /note="This region represents a CpG dinucleotide"
  misc_feature (61)..(61): /note="Nucleotide may be methylated to form 5-methylcytosine"
ctgaatctaatacccatctgataatgcaacttagttcagtgcctcctttagtgcttaaaacgtgttgtcttttctgcttaattaatctgccttgatcacttctccttattctcattgttcag

SEQ ID NO: 5245 - DNA, 122 bp, Homo sapiens
  misc_feature (61)..(62): /note="This region represents a CpG dinucleotide"
  misc_feature (61)..(61): /note="Nucleotide may be methylated to form 5-methylcytosine"
gcaccccaggttcatgcaggtaacacaggagtcacacccaggaggtctgatgccagaatccggagtctaggctgctgcctggggtaggatctcccaggtcaaagagggaaccaacattacct

SEQ ID NO: 5246 - DNA, 122 bp, Homo sapiens
  misc_feature (61)..(62): /note="This region represents a CpG dinucleotide"
  misc_feature (61)..(61): /note="Nucleotide may be methylated to form 5-methylcytosine"
aggcccccacttcgcaggtcagatgtgtggttcacctcctgtccagccttcccaggcctgcgcaggagcctaccacctgctcactggtttgtaagtcattcaggggctgggcgcttatagag

SEQ ID NO: 5247 - DNA, 122 bp, Homo sapiens
  misc_feature (61)..(62): /note="This region represents a CpG dinucleotide"
  misc_feature (61)..(61): /note="Nucleotide may be methylated to form 5-methylcytosine"
agcagacctgggagttccattcaggtgagcagggctgttgctcagcaggtgagcctgccccgccatggagactcagcgctagagtgagaaccacatctgctcacaccaggggcctgaaccct

SEQ ID NO: 5248 - DNA, 122 bp, Homo sapiens
  misc_feature (61)..(62): /note="This region represents a CpG dinucleotide"
  misc_feature (61)..(61): /note="Nucleotide may be methylated to form 5-methylcytosine"
caaccacgcccagcctgtatttcacaatctccagtttctttgaggtccacagaccttttgcggaataattcctccctcaacattagctcatagcttctatcttcttttctgcatctaactct

SEQ ID NO: 5249 - DNA, 122 bp, Homo sapiens
  misc_feature (61)..(62): /note="This region represents a CpG dinucleotide"
  misc_feature (61)..(61): /note="Nucleotide may be methylated to form 5-methylcytosine"
gagtgcagtggcatgaccacggctcagtgcaggcttgacttccagggctcaagcaatactcgcacctcaggttttccagtagctgggaaaacaggtgcgcaccacaatgccctgctaatttt

SEQ ID NO: 5250 - DNA, 122 bp, Homo sapiens
  misc_feature (61)..(62): /note="This region represents a CpG dinucleotide"
  misc_feature (61)..(61): /note="Nucleotide may be methylated to form 5-methylcytosine"
ttagaaaaagcctctgtcagtgacaagttaatcagtttaagatagttcaaaagtgtccttcgagtgcttagtttcttcaagtgctttaaagtgctttagaaacaagttacagttggtggaaa

SEQ ID NO: 5251 - DNA, 122 bp, Homo sapiens
  misc_feature (61)..(62): /note="This region represents a CpG dinucleotide"
  misc_feature (61)..(61): /note="Nucleotide may be methylated to form 5-methylcytosine"
ctctaaagattctggtatatccagcccaaccagcccattttaattgaaaatttactgctacgtaataaaagacgttaataacatgtacaatatagatacaggaaaaaaaagtttgagtttaa

SEQ ID NO: 5252 - DNA, 122 bp, Homo sapiens
  misc_feature (61)..(62): /note="This region represents a CpG dinucleotide"
  misc_feature (61)..(61): /note="Nucleotide may be methylated to form 5-methylcytosine"
agtaaggctgagacctacagagctgcattctcaagtggtgaggcattcttagtcacaggacgcgatacaggtcaaaggccttgctggtgaaaggatgtggtaaagaagctggtcaaaaccca

SEQ ID NO: 5253 - DNA, 122 bp, Homo sapiens
  misc_feature (61)..(62): /note="This region represents a CpG dinucleotide"
  misc_feature (61)..(61): /note="Nucleotide may be methylated to form 5-methylcytosine"
aactgcaaaattatcgctgtttatgataaggctttggcacaaaacaagcggcatacccagcgtgaataaataaaatatatacaggctgggtgcagtggctcacgcctgtaatcccagcactt

SEQ ID NO: 5254 - DNA, 122 bp, Homo sapiens
  misc_feature (61)..(62): /note="This region represents a CpG dinucleotide"
  misc_feature (61)..(61): /note="Nucleotide may be methylated to form 5-methylcytosine"
atcccagttcttcttctttctggctctgcaacctggggtgagtggcctactttgtacctccgtttccactttcagagcctgcctatgacagcatttacttaatagcattggtgagcagagtc

SEQ ID NO: 5255 - DNA, 122 bp, Homo sapiens
  misc_feature (61)..(62): /note="This region represents a CpG dinucleotide"
  misc_feature (61)..(61): /note="Nucleotide may be methylated to form 5-methylcytosine"
cctcagaagatgagagccagaattcaggatgtgaaccgtgggggtggggtggagtcaatgcgcaatgggcaaaaatgtgtactctgtaaagtgttgaattatctgccggaagagggaaatgt

SEQ ID NO: 5256 - DNA, 122 bp, Homo sapiens
  misc_feature (61)..(62): /note="This region represents a CpG dinucleotide"
  misc_feature (61)..(61): /note="Nucleotide may be methylated to form 5-methylcytosine"
gcgcaggagaggcaaaaatgtaatagtggtgagtttgatatagattgtgatgacatgccccgtgctgcccccaaaggtctttctatgcagtggggacagtgagagctgaggcagagtggcac

SEQ ID NO: 5257 - DNA, 122 bp, Homo sapiens
  misc_feature (61)..(62): /note="This region represents a CpG dinucleotide"
  misc_feature (61)..(61): /note="Nucleotide may be methylated to form 5-methylcytosine"
agtttgagtacaacttagcgaggtcctctgcaagacagcaatcaaggtgtcagacaggagcgtggtttcatctgaggaaaaatctccttgccaactcacatggccttgagcagcattcagtt

SEQ ID NO: 5258 - DNA, 122 bp, Homo sapiens
  misc_feature (61)..(62): /note="This region represents a CpG dinucleotide"
  misc_feature (61)..(61): /note="Nucleotide may be methylated to form 5-methylcytosine"
tcagtaagttctcatcattagactgtaagcttcttgaggtcttagaagcttacagtctaacgtagcttagagctgtgctgtccaacacagtagctatgagtcacatgtggtgagtacaaatt

SEQ ID NO: 5259 - DNA, 122 bp, Homo sapiens
  misc_feature (61)..(62): /note="This region represents a CpG dinucleotide"
  misc_feature (61)..(61): /note="Nucleotide may be methylated to form 5-methylcytosine"
actaaaagctgaaggactgtgctgaggctttgtagtagccactttatggaatgggacaagcggcatggagggcacaagtcagtgttgagatccccactaagcttagaaaccattggtatgtg

SEQ ID NO: 5260 - DNA, 122 bp, Homo sapiens
  misc_feature (61)..(62): /note="This region represents a CpG dinucleotide"
  misc_feature (61)..(61): /note="Nucleotide may be methylated to form 5-methylcytosine"
gatcttggtctcaccacttggtgtctccttgggtggataactgtgagccacagtctcattcgtaaaaggagcctaatagcatagttgtggatataaaacaggatgacacagtaaacacttga

SEQ ID NO: 5261 - DNA, 122 bp, Homo sapiens
  misc_feature (61)..(62): /note="This region represents a CpG dinucleotide"
  misc_feature (61)..(61): /note="Nucleotide may be methylated to form 5-methylcytosine"
atagaagggggagagcaaggaagtaaggcctcagactcaatgacacagctccctgacaatcgctccattccttcagcaggatgtacacagagatataactttctacagcatccactgcagct

SEQ ID NO: 5262 - DNA, 122 bp, Homo sapiens
  misc_feature (61)..(62): /note="This region represents a CpG dinucleotide"
  misc_feature (61)..(61): /note="Nucleotide may be methylated to form 5-methylcytosine"
tctgctctccgaccatggacctggtcccagcctctactggctgtgttgcaatgtagtgatcgtgaataagaggtgcagtcaggaagagtcatcttcgctagtgcacaaacaaaagtgtctgt

SEQ ID NO: 5263 - DNA, 122 bp, Homo sapiens
  misc_feature (61)..(62): /note="This region represents a CpG dinucleotide"
  misc_feature (61)..(61): /note="Nucleotide may be methylated to form 5-methylcytosine"
gaaagacgagatcctgggcatcgccaacaaccgactgatccgcatcgacttggccgtgggcgacgtggtcaagacctggcgtttcagcaacatgcgccagtggaatgtcaactgggacatcc

SEQ ID NO: 5264 - DNA, 122 bp, Homo sapiens
  misc_feature (61)..(62): /note="This region represents a CpG dinucleotide"
  misc_feature (61)..(61): /note="Nucleotide may be methylated to form 5-methylcytosine"
actcacagtaggggaatggggccaatctgcagagatggtccagctgacaccaggggccagcggcaccgaccatcagcaacatcagacacagggatcaaatgggagagtcacctcccaagtcc

SEQ ID NO: 5265 - DNA, 122 bp, Homo sapiens
  misc_feature (61)..(62): /note="This region represents a CpG dinucleotide"
  misc_feature (61)..(61): /note="Nucleotide may be methylated to form 5-methylcytosine"
ccggatccacatccactcaatcgccctagtagggcctccagagcactcctgcaagcgtcacgtggtttcacagatcccaggcagaggcagggcaagtgttactaccaccaccagtgaggaaa

SEQ ID NO: 5266 - DNA, 122 bp, Homo sapiens
  misc_feature (61)..(62): /note="This region represents a CpG dinucleotide"
  misc_feature (61)..(61): /note="Nucleotide may be methylated to form 5-methylcytosine"
taacattctattaagcatttatattggtaccaccccatgcggaaacacacaatttgcagacgtcttaaagagtattcttggccgggtgcggtggctcacgcctgtaatcccagcactttggg

SEQ ID NO: 5267 - DNA, 122 bp, Homo sapiens
  misc_feature (61)..(62): /note="This region represents a CpG dinucleotide"
  misc_feature (61)..(61): /note="Nucleotide may be methylated to form 5-methylcytosine"
tgccaggcaatattctaaatgccagtgatatgctggtgaaccagacaagcttccctgcctcgtggagctgacaggtacagaaatggtgttttagagaggctgattcaccagctgtggtcacc

SEQ ID NO: 5268 - DNA, 122 bp, Homo sapiens
  misc_feature (61)..(62): /note="This region represents a CpG dinucleotide"
  misc_feature (61)..(61): /note="Nucleotide may be methylated to form 5-methylcytosine"
ccaagccttccttttattcccttagtcctccatactgctgctctgtgttggcattaatcacgttgtcgtctgcgtgttggatttaccctattgtctctctctgagcctcttgagggcaggaa

SEQ ID NO: 5269 - DNA, 122 bp, Homo sapiens
  misc_feature (61)..(62): /note="This region represents a CpG dinucleotide"
  misc_feature (61)..(61): /note="Nucleotide may be methylated to form 5-methylcytosine"
attacaggcatgagccactgcacccagccggattatgtgattttctaaatgataggagtacgatagattttattcatagtaaatgcgtgagcgtgtgtatgtgtgtgcgtgtgtgtgtgtgt

SEQ ID NO: 5270 - DNA, 122 bp, Homo sapiens
  misc_feature (61)..(62): /note="This region represents a CpG dinucleotide"
  misc_feature (61)..(61): /note="Nucleotide may be methylated to form 5-methylcytosine"
ctaagaaagcttagtgtagtatttctaagatttaaaatcttaatgttactcttagaattacgtgtaaaaatgtataccaaagtagcttaaactgatcaaggagacaaggctgaaaacagagc

SEQ ID NO: 5271 - DNA, 122 bp, Homo sapiens
  misc_feature (61)..(62): /note="This region represents a CpG dinucleotide"
  misc_feature (61)..(61): /note="Nucleotide may be methylated to form 5-methylcytosine"
ttcagagaaagctcaatgacctattaataacagaattaacatttgcaagtattttatttacgactgaaagtaactaggtgtgggtgcaatgtctcacacccataatcccagcatgttagagg

SEQ ID NO: 5272 - DNA, 122 bp, Homo sapiens
  misc_feature (61)..(62): /note="This region represents a CpG dinucleotide"
  misc_feature (61)..(61): /note="Nucleotide may be methylated to form 5-methylcytosine"
agggctttcccggtgtcacctcctgccctggcctgggaagtgtcgtggggacagctgctccggagactcctggctgccaggcttgacttgggcttgattgatttagcctgttacctggaaag

SEQ ID NO: 5273 - DNA, 122 bp, Homo sapiens
  misc_feature (61)..(62): /note="This region represents a CpG dinucleotide"
  misc_feature (61)..(61): /note="Nucleotide may be methylated to form 5-methylcytosine"
ataattaaatcatagctacaaattacccagcactaactacttgggcattgtgctaaatggcgcacacttgtgatctaatttaatcctcaaaaacaactctaagaaatgagcaatattatcct

SEQ ID NO: 5274 - DNA, 122 bp, Homo sapiens
  misc_feature (61)..(62): /note="This region represents a CpG dinucleotide"
  misc_feature (61)..(61): /note="Nucleotide may be methylated to form 5-methylcytosine"
ggtggtttttatagtttcaggtgttacatttgtctttaatccattttgtgttgattgttgcgtaagaggtgagacaaagatctattttcattgttctgtttgtgaatatccagttttcccaa

SEQ ID NO: 5275 - DNA, 122 bp, Homo sapiens
  misc_feature (61)..(62): /note="This region represents a CpG dinucleotide"
  misc_feature (61)..(61): /note="Nucleotide may be methylated to form 5-methylcytosine"
cgccaaggcctcggggcagggctgctcctttcacctccaggtcagagcagggctgagagccggagggtggagggggtggcacttcgagtcttatctccttgtctgtaaaatgggcatactca

SEQ ID NO: 5276 - DNA, 122 bp, Homo sapiens
  misc_feature (61)..(62): /note="This region represents a CpG dinucleotide"
  misc_feature (61)..(61): /note="Nucleotide may be methylated to form 5-methylcytosine"
cccaccggaaggggacagtggcctggctagcaggaagtgaatggacttggaacgagtggacggatggagaccaattagccctgaggcgttaggtgctgcccatcctctgcagccttggcttc

SEQ ID NO: 5277 - DNA, 122 bp, Homo sapiens
  misc_feature (61)..(62): /note="This region represents a CpG dinucleotide"
  misc_feature (61)..(61): /note="Nucleotide may be methylated to form 5-methylcytosine"
ccacgtgttctgtgccagtgcggccgcacctgtgattaaggcctacagcccggagctgatcgtccacccagttctgtgagtcgctctgcgccggcttctcgtaggttctctttccctcctgc

SEQ ID NO: 5278 - DNA, 122 bp, Homo sapiens
  misc_feature (61)..(62): /note="This region represents a CpG dinucleotide"
  misc_feature (61)..(61): /note="Nucleotide may be methylated to form 5-methylcytosine"
agtgatagaaaaaaaggactcaacctgctcttggtggctttgaaaatggagagaaggagccgtgagccagagaatgtgggtggcctttagaagagcaggaaaaaagaagcagattagtgtga

SEQ ID NO: 5279 - DNA, 122 bp, Homo sapiens
  misc_feature (61)..(62): /note="This region represents a CpG dinucleotide"
  misc_feature (61)..(61): /note="Nucleotide may be methylated to form 5-methylcytosine"
ttagatgagatcatgagggtggggcctcaagaagaggagacacaagagctctcctttccgcgggcacacaccacaggcatgcaccacaggcacacaccgaggaaaggccacatgaggacaga

SEQ ID NO: 5280 - DNA, 122 bp, Homo sapiens
  misc_feature (61)..(62): /note="This region represents a CpG dinucleotide"
  misc_feature (61)..(61): /note="Nucleotide may be methylated to form 5-methylcytosine"
aaataccagggtaaacacaatttgtgtgtgttgctcaaacgttgcataattctacaccctcgttatagagagattaagctcatttgaaggttgaggtcagtccctggtctgctaattaccca

SEQ ID NO: 5281 - DNA, 122 bp, Homo sapiens
  misc_feature (61)..(62): /note="This region represents a CpG dinucleotide"
  misc_feature (61)..(61): /note="Nucleotide may be methylated to form 5-methylcytosine"
tacagaaagtaggaagctgtgggatgttcctcccactgtcacacacactgtcctgtcctacgtaacaagtgttgccttatttctcaataagtgaatataaattaaacaaaaaaaaatagttg

SEQ ID NO: 5282 - DNA, 122 bp, Homo sapiens
  misc_feature (61)..(62): /note="This region represents a CpG dinucleotide"
  misc_feature (61)..(61): /note="Nucleotide may be methylated to form 5-methylcytosine"
aaatgtcttaaatcaatgcctcacaaccataaatcataatcataaaactacagcttaggtcgggcgctgtgtctcaggcctgtaatcccagcactttggaaggccaaggcgggcggatcacg

SEQ ID NO: 5283 - DNA, 122 bp, Homo sapiens
  misc_feature (61)..(62): /note="This region represents a CpG dinucleotide"
  misc_feature (61)..(61): /note="Nucleotide may be methylated to form 5-methylcytosine"
agctgtgagccattgcgtctggctcacaaatgatttaaacagacagagcacaatccaaagcgaggattttccaggcaactcccaagccctggcccagaaaaactcacacataaaaaacactc

SEQ ID NO: 5284 - DNA, 122 bp, Homo sapiens
  misc_feature (61)..(62): /note="This region represents a CpG dinucleotide"
  misc_feature (61)..(61): /note="Nucleotide may be methylated to form 5-methylcytosine"
gccccaaaaagcccatggtcttgtgtatcttgtatggagggagggatgtaaacaatataacgtgataaatatgctggcctagaagtggcaactcattcatacgtggagattctagaaaggct

SEQ ID NO: 5285 - DNA, 122 bp, Homo sapiens
  misc_feature (61)..(62): /note="This region represents a CpG dinucleotide"
  misc_feature (61)..(61): /note="Nucleotide may be methylated to form 5-methylcytosine"
atgattttcctcctaaagcctcctttgctcccagcttcagaagcaaactctgcaagggtacgagtgtggcaaaaagagaaatggagatttctctcttttgctgcaatcccaaggcgtcaacg

SEQ ID NO: 5286 - DNA, 122 bp, Homo sapiens
  misc_feature (61)..(62): /note="This region represents a CpG dinucleotide"
  misc_feature (61)..(61): /note="Nucleotide may be methylated to form 5-methylcytosine"
aacagagtcctccatcgctgaagagacttaaccaaggtcaccagcctgtcctcttccactcgcacttacacagtgcatgtaaggagtccaggagctttttatggaactaactaatgaaggaa

SEQ ID NO: 5287 - DNA, 122 bp, Homo sapiens
  misc_feature (61)..(62): /note="This region represents a CpG dinucleotide"
  misc_feature (61)..(61): /note="Nucleotide may be methylated to form 5-methylcytosine"
ggcctcgtgatccacccgcctcagctcccaaagggctgggattacaggtgtgagccaccacgcctggctgaaactccctcttggtacttgtgtccgaggccccctcagtcaggaccttgagt

SEQ ID NO: 5288 - DNA, 122 bp, Homo sapiens
  misc_feature (61)..(62): /note="This region represents a CpG dinucleotide"
  misc_feature (61)..(61): /note="Nucleotide may be methylated to form 5-methylcytosine"
ggctacataattccaacgaactcatcttgttcagtctgccacaggccctgcccttgatgacgtcccacaggtcctgcccttgatgaggccccacaggacactcagaaagctgcatgaccagg

SEQ ID NO: 5289 - DNA, 122 bp, Homo sapiens
  misc_feature (61)..(62): /note="This region represents a CpG dinucleotide"
  misc_feature (61)..(61): /note="Nucleotide may be methylated to form 5-methylcytosine"
tcctttccttcttttcctttttcctttttcttctttgagacagggtgttacttattctgtcgtccaggctggagtgtagtggcgctatcacagctcactgcagcctccacctcccaggctca

SEQ ID NO: 5290 - DNA, 122 bp, Homo sapiens
  misc_feature (61)..(62): /note="This region represents a CpG dinucleotide"
  misc_feature (61)..(61): /note="Nucleotide may be methylated to form 5-methylcytosine"
gtctccttccaccaaagctgcaccgtctgtcagtgaagcacaaacagttcaggagcaaggcgctgcaggcccatacatttccttccaaatacttattcactaaagcacatgaaacaggaaaa

SEQ ID NO: 5291 - DNA, 122 bp, Homo sapiens
  misc_feature (61)..(62): /note="This region represents a CpG dinucleotide"
  misc_feature (61)..(61): /note="Nucleotide may be methylated to form 5-methylcytosine"
atagcaaaccaacctcagatttcaattttgtcaaggatgatacaagaactagtagtgtctcggtgactgtggtctactcagagctccatcacagctaccctgagcccaaggcagtcaggtgt

SEQ ID NO: 5292 - DNA, 122 bp, Homo sapiens
  misc_feature (61)..(62): /note="This region represents a CpG dinucleotide"
  misc_feature (61)..(61): /note="Nucleotide may be methylated to form 5-methylcytosine"
cctcccatctcgggttccaggaggatcacaagctattcagcaggcaagactcagattagccgctgttcaagctctggcatgcatggtatatatggatacatccaaggtcaccagggcactat

SEQ ID NO: 5293 - DNA, 122 bp, Homo sapiens
  misc_feature (61)..(62): /note="This region represents a CpG dinucleotide"
  misc_feature (61)..(61): /note="Nucleotide may be methylated to form 5-methylcytosine"
tatatttgttcaacctaagccatgtccttcgagaagcagattagcacagtgaatcatggacgttagttttcctgttaccagactggtctggctaagctacatctttcaggaaaacctgctgt

SEQ ID NO: 5294 - DNA, 122 bp, Homo sapiens
  misc_feature (61)..(62): /note="This region represents a CpG dinucleotide"
  misc_feature (61)..(61): /note="Nucleotide may be methylated to form 5-methylcytosine"
tttgctgtgcgctggtgaccaaactgagttaggaaagacagaacacacacatacgcaacacgtcatagaaagcaggtttattactcacagacaggcaatgagggacaacagaagcctaggat

SEQ ID NO: 5295 - DNA, 122 bp, Homo sapiens
  misc_feature (61)..(62): /note="This region represents a CpG dinucleotide"
  misc_feature (61)..(61): /note="Nucleotide may be methylated to form 5-methylcytosine"
acgtcatggggctctgacccaggccacagcatgggtgagccctaaggacgtcacgctcagcgcgagaagccggacacaaaaggccaaacagggtgtgatcccatttctatgaaatgtccagg

SEQ ID NO: 5296 - DNA, 122 bp, Homo sapiens
  misc_feature (61)..(62): /note="This region represents a CpG dinucleotide"
  misc_feature (61)..(61): /note="Nucleotide may be methylated to form 5-methylcytosine"
aagagggaaagacagactaacgtatcacaagtaaacatgacatgaaagaaaactgataaacgtagtggcaagtagtagatgtttaggtgactcaaataaggatcagatgtatgcaattacaa

SEQ ID NO: 5297 - DNA, 122 bp, Homo sapiens
  misc_feature (61)..(62): /note="This region represents a CpG dinucleotide"
  misc_feature (61)..(61): /note="Nucleotide may be methylated to form 5-methylcytosine"
ctgcagggtttcagcttggcagccaggctctgaactgcagtgctgtcaggcaggtgaacccgctggcaccacaatccagaaaacatatctcctgattcctcaggtgttctacacgtttgaat

SEQ ID NO: 5298 - DNA, 122 bp, Homo sapiens
  misc_feature (61)..(62): /note="This region represents a CpG dinucleotide"
  misc_feature (61)..(61): /note="Nucleotide may be methylated to form 5-methylcytosine"
ggggtggctacatcaggcagactgctttgcctattcaggacagtcatgcgggagtgacctcgtgaagatcttcagagtccaggccccaggcatttaccatctcaccagaatggccatgtcat

SEQ ID NO: 5299 - DNA, 122 bp, Homo sapiens
  misc_feature (61)..(62): /note="This region represents a CpG dinucleotide"
  misc_feature (61)..(61): /note="Nucleotide may be methylated to form 5-methylcytosine"
aggattcttctaactataagatttgttgagctagcatttgccggcaagcactgcacatcacgttctaaatattcctattatttcatcttcataatagcctgggaggtatgtgctgctctaat

SEQ ID NO: 5300 - DNA, 122 bp, Homo sapiens
  misc_feature (61)..(62): /note="This region represents a CpG dinucleotide"
  misc_feature (61)..(61): /note="Nucleotide may be methylated to form 5-methylcytosine"
tgtcactgaaacctttcccagccttggtcttcccctctgtgaaatggagtctcacaggatcgccgtgagaactgaatgactaactctatggaaaatgcttccaaaacagccctcagtaggtg

SEQ ID NO: 5301 - DNA, 122 bp, Homo sapiens
  misc_feature (61)..(62): /note="This region represents a CpG dinucleotide"
  misc_feature (61)..(61): /note="Nucleotide may be methylated to form 5-methylcytosine"
agaacccaaccagaaaaccacaggagtaaatgatgttgcaaagcccaggtcctgtcttcacggaaatcttaagtattgtggttaatgccaggcagagtctatgtaacgattttaaatggcct

SEQ ID NO: 5302 - DNA, 122 bp, Homo sapiens
  misc_feature (61)..(62): /note="This region represents a CpG dinucleotide"
  misc_feature (61)..(61): /note="Nucleotide may be methylated to form 5-methylcytosine"
gaatcatcaaggttttcccatcttgactgtgttgaggtttatcccagcttgacttcccttcgtgtcttagcacatcctggtccactttccctgctatcagttgttaagtatttagagaatgc

SEQ ID NO: 5303 - DNA, 122 bp, Homo sapiens
  misc_feature (61)..(62): /note="This region represents a CpG dinucleotide"
  misc_feature (61)..(61): /note="Nucleotide may be methylated to form 5-methylcytosine"
ctctctccatggttcctcacacaacagatggttctgtttgtgcaaactccatggtagttacgttggtcaaccaaaaagactgctttttcgttatcttgtttggtcactttcccaccagatag

SEQ ID NO: 5304 - DNA, 122 bp, Homo sapiens
  misc_feature (61)..(62): /note="This region represents a CpG dinucleotide"
  misc_feature (61)..(61): /note="Nucleotide may be methylated to form 5-methylcytosine"
gctgccagcctgggcagtgggtgagaagccgctctgctgggttacacatggcaggcccagcgccctgcaggctcagggaggagctctgccctgacccagccgaatctcacccatgcaggtgg

SEQ ID NO: 5305 - DNA, 122 bp, Homo sapiens
  misc_feature (61)..(62): /note="This region represents a CpG dinucleotide"
  misc_feature (61)..(61): /note="Nucleotide may be methylated to form 5-methylcytosine"
atatttttcaaatgagtgaatggtgactaagacacgcatttggaaccagacagacccaggcgtgaatactgttatgccaaccatgaccatgcagcctctctgtgactaatttcctcactggg

SEQ ID NO: 5306 - DNA, 122 bp, Homo sapiens
  misc_feature (61)..(62): /note="This region represents a CpG dinucleotide"
  misc_feature (61)..(61): /note="Nucleotide may be methylated to form 5-methylcytosine"
aggtagtagaaattcgtgtttgacattaaaaagcagtcagttatgcaattctgtgtttcccgctgcaaccagctccagggtgccctgacactgacagctcagcagaagggcacgaggtacct

SEQ ID NO: 5307 - DNA, 122 bp, Homo sapiens
  misc_feature (61)..(62): /note="This region represents a CpG dinucleotide"
  misc_feature (61)..(61): /note="Nucleotide may be methylated to form 5-methylcytosine"
caatggaaacttctactgaattctttctagcctgtggtcagagttggttttgttcacatacgtagtttattatgttgggtttcaggaatgtgccagtgactctgcaaggtgctggggatgta

SEQ ID NO: 5308 - DNA, 122 bp, Homo sapiens
  misc_feature (61)..(62): /note="This region represents a CpG dinucleotide"
  misc_feature (61)..(61): /note="Nucleotide may be methylated to form 5-methylcytosine"
tatgcgagctccaagtttgaactgtagaaatttctgctcccacatatcttccaaatcttgcgccagcaatatatcctgttcatcttcttcatcatgaaggtcagctttcttctttgccagtc

SEQ ID NO: 5309 - DNA, 122 bp, Homo sapiens
  misc_feature (61)..(62): /note="This region represents a CpG dinucleotide"
  misc_feature (61)..(61): /note="Nucleotide may be methylated to form 5-methylcytosine"
aatttttctgcctatctttaatatgatacatgagatttgcttttaaaaaaacaagcggggcggagagaggaaatggaagattatagttggctgaatcaaaattggcaatccattcattgtta

SEQ ID NO: 5310 - DNA, 122 bp, Homo sapiens
  misc_feature (61)..(62): /note="This region represents a CpG dinucleotide"
  misc_feature (61)..(61): /note="Nucleotide may be methylated to form 5-methylcytosine"
aaaatgtgatgtagcatagtgatgcttcctcccctggccaatattcagggaaccacccagcgcacaggaggaaagcctgggtgaaaatcacagctccgcctcctgcagccctgtgacctcag

SEQ ID NO: 5311 - DNA, 122 bp, Homo sapiens
  misc_feature (61)..(62): /note="This region represents a CpG dinucleotide"
  misc_feature (61)..(61): /note="Nucleotide may be methylated to form 5-methylcytosine"
gcagctgcctggatttggcctgtgggttgtagtttgccaacccttgctctaaatcattagcggagaaagaataacagcatgatgtattataaaagcagccaatccagatggctaaaaatatt

SEQ ID NO: 5312 - DNA, 122 bp, Homo sapiens
  misc_feature (61)..(62): /note="This region represents a CpG dinucleotide"
  misc_feature (61)..(61): /note="Nucleotide may be methylated to form 5-methylcytosine"
tcaattgccccttcatctcagagcagttagttctctgctaactctaggcaggaaacaggccggacagtggttacgaacttccaagattacagactgcctccatgactaagagactgctcagc

SEQ ID NO: 5313 - DNA, 122 bp, Homo sapiens
  misc_feature (61)..(62): /note="This region represents a CpG dinucleotide"
  misc_feature (61)..(61): /note="Nucleotide may be methylated to form 5-methylcytosine"
tgttaaacaccgatgtgcgctttgcatggggctcctctgggatacgcgtaatttaaattacgacatgagcatttcattttgtattggctggtacacagtaaatggagcaagcgggagccggc

SEQ ID NO: 5314 - DNA, 122 bp, Homo sapiens
  misc_feature (61)..(62): /note="This region represents a CpG dinucleotide"
  misc_feature (61)..(61): /note="Nucleotide may be methylated to form 5-methylcytosine"
gccacttaatttctctggccagtctgaatttaaatggctaaacatttcttccctagcctgcggggtcagtagttagtaatcacggcaggtatgcatgactctcaccaattatgagtataatt

SEQ ID NO: 5315 - DNA, 122 bp, Homo sapiens
  misc_feature (61)..(62): /note="This region represents a CpG dinucleotide"
  misc_feature (61)..(61): /note="Nucleotide may be methylated to form 5-methylcytosine"
tcaaatcttactggcagcaaggtcagagtagttaagaacagtagctaacagcatgggctacgttgggtaataaggtagctgtgggactttaggcaaattgttaatcctctctgattctcaat

SEQ ID NO: 5316 - DNA, 122 bp, Homo sapiens
  misc_feature (61)..(62): /note="This region represents a CpG dinucleotide"
  misc_feature (61)..(61): /note="Nucleotide may be methylated to form 5-methylcytosine"
agaaatgcaaaacagcctgaaccctctgcgagtgaaaacatgtatgtgtgcaactgtcaacgtacccctccttccttcccgctcttccctggagaaggtagaatagggagaggaaagccttg

SEQ ID NO: 5317 - DNA, 122 bp, Homo sapiens
  misc_feature (61)..(62): /note="This region represents a CpG dinucleotide"
  misc_feature (61)..(61): /note="Nucleotide may be methylated to form 5-methylcytosine"
ttgtcttcagtgtcgcagtagccacctctaaactcgcctcctccacccagggtgttttgtcgtagcctaccgtgggcgtggacttgacatttatctgggctcacaagcctgcagggctgtct

SEQ ID NO: 5318 - DNA, 122 bp, Homo sapiens
  misc_feature (61)..(62): /note="This region represents a CpG dinucleotide"
  misc_feature (61)..(61): /note="Nucleotide may be methylated to form 5-methylcytosine"
tacaatctatattatctcatatatagatttcttcctcactttatttgctcacttctgtcacgcatttaaaatgtcacagagaccaaaatagagtggctttctggtggaactcatggcagtca

SEQ ID NO: 5319 - DNA, 122 bp, Homo sapiens
  misc_feature (61)..(62): /note="This region represents a CpG dinucleotide"
  misc_feature (61)..(61): /note="Nucleotide may be methylated to form 5-methylcytosine"
cagagtgccatgcaagaagcagacccaactgttgaggagtggcagtcataaagcccgatccgccagaaaaaaacctaccaggaaatgaattcaccttagacttctgatccctcaaataatac

SEQ ID NO: 5320 - DNA, 122 bp, Homo sapiens
  misc_feature (61)..(62): /note="This region represents a CpG dinucleotide"
  misc_feature (61)..(61): /note="Nucleotide may be methylated to form 5-methylcytosine"
gataaagaaaaaggcatgggggaaaaggatgaaaacctagaaaccagtggagatgagcaacgagaagctcagcacttaggtggaggcataaacaggagaccaatctggtctgaggagatggc

SEQ ID NO: 5321 - DNA, 122 bp, Homo sapiens
  misc_feature (61)..(62): /note="This region represents a CpG dinucleotide"
  misc_feature (61)..(61): /note="Nucleotide may be methylated to form 5-methylcytosine"
agatcccatcagctcagctttccagaaaacatcatgctgtccacgatactgatgacattacggtaactagatcatgagcaggaagtagcaaatgcttcggatgccttctatgcaaagaaggg

SEQ ID NO: 5322 - DNA, 122 bp, Homo sapiens
  misc_feature (61)..(62): /note="This region represents a CpG dinucleotide"
  misc_feature (61)..(61): /note="Nucleotide may be methylated to form 5-methylcytosine"
ggcaagtcccttatcccctcggaggacctgtttcttccttctgtaggatgacgtggagctcgctggaggttcccctgacatgatgcagcacacttcctgagtgctcagcagggcagagctca

SEQ ID NO: 5323 - DNA, 122 bp, Homo sapiens
  misc_feature (61)..(62): /note="This region represents a CpG dinucleotide"
  misc_feature (61)..(61): /note="Nucleotide may be methylated to form 5-methylcytosine"
ccagtaacaccactcggtggaaagtggcttatggctcttttatacaataggagacacttgcgtggggcactaataactcatgtgagtcagacagacactcttcctgttgggtttaagaatac

SEQ ID NO: 5324 - DNA, 122 bp, Homo sapiens
  misc_feature (61)..(62): /note="This region represents a CpG dinucleotide"
  misc_feature (61)..(61): /note="Nucleotide may be methylated to form 5-methylcytosine"
tcctttcccacccacaatgagatgaacactgtgggtgtgcctttgatccctaggcctccccgacccagtgacagagctcagtctgggaagcatgtggcaaggggaaagaaatagatccaagg

SEQ ID NO: 5325 - DNA, 122 bp, Homo sapiens
  misc_feature (61)..(62): /note="This region represents a CpG dinucleotide"
  misc_feature (61)..(61): /note="Nucleotide may be methylated to form 5-methylcytosine"
ggcacacagatcatttagttaagaactttggtgtcatttaatagaagacaaaacaaaccacgagaggcatgagaggaatgatctatgcaatgactaagatacctgctagcagatgtttagct

SEQ ID NO: 5326 - DNA, 122 bp, Homo sapiens
  misc_feature (61)..(62): /note="This region represents a CpG dinucleotide"
  misc_feature (61)..(61): /note="Nucleotide may be methylated to form 5-methylcytosine"
tgtagtcttttctgtctggcttccttctcttggcataatgttttcaagatgcacctgtgtcgtgccaggtgtcaggacctcattcttctttatggctgagtcatattccatcatatggatca

SEQ ID NO: 5327 - DNA, 122 bp, Homo sapiens
  misc_feature (61)..(62): /note="This region represents a CpG dinucleotide"
  misc_feature (61)..(61): /note="Nucleotide may be methylated to form 5-methylcytosine"
atgtaattcattatctacttcataaagacaaggttgtttctgcacactgtaccgaggtgacggacacaggaggtgaacattggtacagcactgttatccaatctataggccttcgtatgagg

SEQ ID NO: 5328 - DNA, 122 bp, Homo sapiens
  misc_feature (61)..(62): /note="This region represents a CpG dinucleotide"
  misc_feature (61)..(61): /note="Nucleotide may be methylated to form 5-methylcytosine"
cccttctaaagagtagtttaagacctcctgtggtaactgctctattttccagggacaatacgtaggggacagaggaacacagcagaattttgaaacaggatatacaatcacaataagagaag

SEQ ID NO: 5329 - DNA, 122 bp, Homo sapiens
  misc_feature (61)..(62): /note="This region represents a CpG dinucleotide"
  misc_feature (61)..(61): /note="Nucleotide may be methylated to form 5-methylcytosine"
atcacccatgaagcttcattcaactccctcttgcatcatctaatagagggtccgaccatacgacatctggtttgtctgagacagccctggtatatataatttttcctggtgtaaatgtgtca

SEQ ID NO: 5330 - DNA, 122 bp, Homo sapiens
  misc_feature (61)..(62): /note="This region represents a CpG dinucleotide"
  misc_feature (61)..(61): /note="Nucleotide may be methylated to form 5-methylcytosine"
tcaccttcccccacgtgagttgagtccctgcccaggtggaaatcactgatgtgctccaggcgctggagagcccaaaaaagagtgggagtttcctagaagccaggggaggggaggtgcgtggt

SEQ ID NO: 5331 - DNA, 122 bp, Homo sapiens
  misc_feature (61)..(62): /note="This region represents a CpG dinucleotide"
  misc_feature (61)..(61): /note="Nucleotide may be methylated to form 5-methylcytosine"
gctaatcgtcctgctgtgttaggaacccatgagacaatgctgtaacatttagctttctgacgtccaaagcatctagatcagtccccaattaaacaggtattaatcacaaagactctaaaagc

SEQ ID NO: 5332 - DNA, 122 bp, Homo sapiens
  misc_feature (61)..(62): /note="This region represents a CpG dinucleotide"
  misc_feature (61)..(61): /note="Nucleotide may be methylated to form 5-methylcytosine"
gaagtgttgatggttaaacaagagaacatccgtgtgatttgcatattgccattagtcattcgtgggtctgcagtcaaatttagtaacctggtgtttaattcaaacataggcatatttttgtt

SEQ ID NO: 5333 - DNA, 122 bp, Homo sapiens
  misc_feature (61)..(62): /note="This region represents a CpG dinucleotide"
  misc_feature (61)..(61): /note="Nucleotide may be methylated to form 5-methylcytosine"
ctccacgcctaattaagtcagatctgtccaagttctcgtaacagtatacaaatcctttctcgctctcagcagtttgtaattatgtattcgggtcagtctccttactagacggtaagctctat

SEQ ID NO: 5334 - DNA, 122 bp, Homo sapiens
  misc_feature (61)..(62): /note="This region represents a CpG dinucleotide"
  misc_feature (61)..(61): /note="Nucleotide may be methylated to form 5-methylcytosine"
gcaacggcccaactgaactcaagataggtaacatctatcactctctgcaatctgcaagctcgtcactctgcctgggaagattagattagtaagcacccggtcatcggaaaaatccagctcca

SEQ ID NO: 5335 - DNA, 122 bp, Homo sapiens
  misc_feature (61)..(62): /note="This region represents a CpG dinucleotide"
  misc_feature (61)..(61): /note="Nucleotide may be methylated to form 5-methylcytosine"
ttttttgtatttttttgtagatacagggtttcactatgtagccaaggctagtcttgaattcgtgagctcaagtgaatcaccggccttggcctctcaagtctaggattacaggtgagccacca

SEQ ID NO: 5336 - DNA, 122 bp, Homo sapiens
  misc_feature (61)..(62): /note="This region represents a CpG dinucleotide"
  misc_feature (61)..(61): /note="Nucleotide may be methylated to form 5-methylcytosine"
ctcaccccagtgcgggggaagccgctcaaccctacgctccgccgcgggccgccccctccccgcgcactaaaataaccccctgctgccggcccagcgcgcggctcactagcgttcctgcggct

SEQ ID NO: 5337 - DNA, 122 bp, Homo sapiens
  misc_feature (61)..(62): /note="This region represents a CpG dinucleotide"
  misc_feature (61)..(61): /note="Nucleotide may be methylated to form 5-methylcytosine"
attttggttgaactttgctttcagaactagaactacctgctatccaagacttgttaaccacgttttcatgggcaaattacaaaaccctttcaaccccagtttcctcttctataaactagtgg

SEQ ID NO: 5338 - DNA, 122 bp, Homo sapiens
  misc_feature (61)..(62): /note="This region represents a CpG dinucleotide"
  misc_feature (61)..(61): /note="Nucleotide may be methylated to form 5-methylcytosine"
atcggagtgagggacatttgccagggtcaagtgcagacttgctcagctctggtttgagcacgggttgctcaacacatatttgctcatctcctatctgtgttttcatcaggtacaattccgta

SEQ ID NO: 5339 - DNA, 122 bp, Homo sapiens
  misc_feature (61)..(62): /note="This region represents a CpG dinucleotide"
  misc_feature (61)..(61): /note="Nucleotide may be methylated to form 5-methylcytosine"
gaagtggagttttctccagaggttcctgatgagaactcagctagtcagcaccttgatctccgctgggcgaggtctgtgcagagccacaggcaggcagtgtgacttctaaccttcagaatcgg

SEQ ID NO: 5340 - DNA, 122 bp, Homo sapiens
  misc_feature (61)..(62): /note="This region represents a CpG dinucleotide"
  misc_feature (61)..(61): /note="Nucleotide may be methylated to form 5-methylcytosine"
tagaaatcttgctcaccagatcacttttttatttgtgcttcctgctcatgagattgctagcggttactgccctcccacttccaaactaagagatagggatctgctcctaacggtcaactcgg

SEQ ID NO: 5341 - DNA, 122 bp, Homo sapiens
  misc_feature (61)..(62): /note="This region represents a CpG dinucleotide"
  misc_feature (61)..(61): /note="Nucleotide may be methylated to form 5-methylcytosine"
gtgaggaagacggaagttccggagaaggagcggggcatgaaaatggggaaacttgaagtgcggtcagacaactgggatcagtgcgaatctagtggctggtttctgccactgagcagtcagga

SEQ ID NO: 5342 - DNA, 122 bp, Homo sapiens
  misc_feature (61)..(62): /note="This region represents a CpG dinucleotide"
  misc_feature (61)..(61): /note="Nucleotide may be methylated to form 5-methylcytosine"
gtagaatagggcctggcaaaacctttgctagcaaagcgccttttgtgccgggctgtggctcgctatcgacatctcgtccgttaccaaggctgggtttcctactgatttccctcctcctctgc

SEQ ID NO: 5343 - DNA, 122 bp, Homo sapiens
  misc_feature (61)..(62): /note="This region represents a CpG dinucleotide"
  misc_feature (61)..(61): /note="Nucleotide may be methylated to form 5-methylcytosine"
ttgttatttagatagtaagtaaactcttctgttctgctgaataataccttggctactctacgctattaaaccacaaagcttcatttagtaattcaagaccaaaatgcaatagtaaagcattc

SEQ ID NO: 5344 - DNA, 122 bp, Homo sapiens
  misc_feature (61)..(62): /note="This region represents a CpG dinucleotide"
  misc_feature (61)..(61): /note="Nucleotide may be methylated to form 5-methylcytosine"
tatttctgtcacttgccagcattatccatatgattcaagagagagcctttattactcatccgaccaagcttgcagtgaaactttttgtaagaaaaggaatggtgtgttgagaattaaaatta

SEQ ID NO: 5345 - DNA, 122 bp, Homo sapiens
  misc_feature (61)..(62): /note="This region represents a CpG dinucleotide"
  misc_feature (61)..(61): /note="Nucleotide may be methylated to form 5-methylcytosine"
tcatgaaaagcaggaaagccaggatctcagagctactgcaaaagttccttctccaccagacgagcaccaagaagctgagaatgctgtttcctcaggtaaacgtggaataaatggtatgtcaa

SEQ ID NO: 5346 - DNA, 122 bp, Homo sapiens
  misc_feature (61)..(62): /note="This region represents a CpG dinucleotide"
  misc_feature (61)..(61): /note="Nucleotide may be methylated to form 5-methylcytosine"
gggaagggcggcaaacactgttgtgcttggatacgaaaaccaaggcctgattagcgtaagcgtttgttgaaaaagcattttctctgcacactaatctctacatatcctgtggggaaatcctt

SEQ ID NO: 5347 - DNA, 122 bp, Homo sapiens
  misc_feature (61)..(62): /note="This region represents a CpG dinucleotide"
  misc_feature (61)..(61): /note="Nucleotide may be methylated to form 5-methylcytosine"
taatttaatgaattcgcaattgaggatatgagtcaggaggaattcaggagattggggttacgaaacttctaagagagaattttgttgtccattccaaagctggcattcttcctttgcaagag

SEQ ID NO: 5348 - DNA, 122 bp, Homo sapiens
  misc_feature (61)..(62): /note="This region represents a CpG dinucleotide"
  misc_feature (61)..(61): /note="Nucleotide may be methylated to form 5-methylcytosine"
tgattatgattttgcaatatgctttcactctcctctggtggcaattcagtcagctaatctcggtgagatattaaaagtgaaactgtagtaggggcccagcctgcctgcaggaggacactatc

SEQ ID NO: 5349 - DNA, 122 bp, Homo sapiens
  misc_feature (61)..(62): /note="This region represents a CpG dinucleotide"
  misc_feature (61)..(61): /note="Nucleotide may be methylated to form 5-methylcytosine"
tattttcttgagattaaaacccatctgtgggaaactatccgatgacctaagaagctcagccgtcagtttccagtctgaactttcctagtgtgcctaaaggaattcgaataacctacagtata

SEQ ID NO: 5350 - DNA, 122 bp, Homo sapiens
  misc_feature (61)..(62): /note="This region represents a CpG dinucleotide"
  misc_feature (61)..(61): /note="Nucleotide may be methylated to form 5-methylcytosine"
agcattgggctgagagtcacccagtctgggctccaaggaatgctgagctcagtagcggagcgtaacaacttagcattgttagaaatgtcctgtttcttactgtcatctctcagaggactctg

SEQ ID NO: 5351 - DNA, 122 bp, Homo sapiens
  misc_feature (61)..(62): /note="This region represents a CpG dinucleotide"
  misc_feature (61)..(61): /note="Nucleotide may be methylated to form 5-methylcytosine"
aaattaacattgacaagttagtctgtaacacctggggcaatccaatattgtacaactgtacggaaattgcagacttgacttcttcaattgcaaggtcaatggtgaaaaaaactgactctgct

SEQ ID NO: 5352 - DNA, 122 bp, Homo sapiens
  misc_feature (61)..(62): /note="This region represents a CpG dinucleotide"
  misc_feature (61)..(61): /note="Nucleotide may be methylated to form 5-methylcytosine"
ctttatcaaaaatggcaagaggccacatactacaataacggaacaaatacttccttttaccgtacagtaaattccttcctctgattggctaaagcttcagtgcatggttcacaagaacaaaa

SEQ ID NO: 5353 - DNA, 122 bp, Homo sapiens
  misc_feature (61)..(62): /note="This region represents a CpG dinucleotide"
  misc_feature (61)..(61): /note="Nucleotide may be methylated to form 5-methylcytosine"
acagtctgtgatagtcacctaactgttctattctgacactagccttactttcctcttaatcgtcagtctccttcttccagtattggtttatctcattcccctattcggaagtatttagttgg

SEQ ID NO: 5354 - DNA, 122 bp, Homo sapiens
  misc_feature (61)..(62): /note="This region represents a CpG dinucleotide"
  misc_feature (61)..(61): /note="Nucleotide may be methylated to form 5-methylcytosine"
ataattcagttctcaagcagcaactcagtaacttgatatctacaactcttgctgcattctcggtagagaatgtcttttcaactcacttcctttttggtttgacagttttaatcagatgcatt

SEQ ID NO: 5355 - DNA, 122 bp, Homo sapiens
  misc_feature (61)..(62): /note="This region represents a CpG dinucleotide"
  misc_feature (61)..(61): /note="Nucleotide may be methylated to form 5-methylcytosine"
tgggtgtgagtgttttgtggctctgaagtcctgtattctgactttgcttttcctttgcgccgcttgtctggtctaatgatctcactacggaaattatcaccagtcagcagactgtcattcgt

SEQ ID NO: 5356 - DNA, 122 bp, Homo sapiens
  misc_feature (61)..(62): /note="This region represents a CpG dinucleotide"
  misc_feature (61)..(61): /note="Nucleotide may be methylated to form 5-methylcytosine"
gacatctgcgtgagctgtttatctcagtgtctggcacatataattgccaccaactttctccggcatctacaagcaaagttgtttggccaaacaggccaaccctggggcagcctgtgaaaatg

SEQ ID NO: 5357 - DNA, 122 bp, Homo sapiens
  misc_feature (61)..(62): /note="This region represents a CpG dinucleotide"
  misc_feature (61)..(61): /note="Nucleotide may be methylated to form 5-methylcytosine"
tataaaccatgccctaggcctatcctaactttgcaactacatagaagaaaacaggcttagcgatctggtgattcattcaaggtcaaagatcttgtatgtggcattgcttggtgtcgtcacag

SEQ ID NO: 5358 - DNA, 122 bp, Homo sapiens
  misc_feature (61)..(62): /note="This region represents a CpG dinucleotide"
  misc_feature (61)..(61): /note="Nucleotide may be methylated to form 5-methylcytosine"
cagctgagagctatcagcccccagcaatctcagaagtggctggatttcctgaaagagaaacgtaggctgtatacaacagcctgaattgcaatagctatggttaatatgtttaataattagaa

SEQ ID NO: 5359 - DNA, 122 bp, Homo sapiens
  misc_feature (61)..(62): /note="This region represents a CpG dinucleotide"
  misc_feature (61)..(61): /note="Nucleotide may be methylated to form 5-methylcytosine"
caaagtgctgggattacaggcgtgaggcaccatgcccggcggctcaggctatatttctagcggacagggctgttctagaattatgactggcctccagtcatctccgcagaacaaagcaaaga

SEQ ID NO: 5360 - DNA, 122 bp, Homo sapiens
  misc_feature (61)..(62): /note="This region represents a CpG dinucleotide"
  misc_feature (61)..(61): /note="Nucleotide may be methylated to form 5-methylcytosine"
ctgaggctcaggatgaggatttgatccagggctgctaattcttctgacagagcacagccacgtggcttatgcctgcagcaggcccttcccaaaggctgttcaggccagggcaaggtgctgag

SEQ ID NO: 5361 - DNA, 122 bp, Homo sapiens
  misc_feature (61)..(62): /note="This region represents a CpG dinucleotide"
  misc_feature (61)..(61): /note="Nucleotide may be methylated to form 5-methylcytosine"
agtagaggtggggcctgatgctgtgattgacagcctggttaatcggctaaactcagtaggcgtgtcccatgcaccacaaggaattggggaggaacaattcccaaaggaaggaggttgctgtt

SEQ ID NO: 5362 - DNA, 122 bp, Homo sapiens
  misc_feature (61)..(62): /note="This region represents a CpG dinucleotide"
  misc_feature (61)..(61): /note="Nucleotide may be methylated to form 5-methylcytosine"
atcatcataactgtttaactaaaattttaaaacatatttcttacctggtatgactaagtacggcctgccctaggaaggaaagcatataaggccattatgaacatgctctactgcattagcag

SEQ ID NO: 5363 - DNA, 122 bp, Homo sapiens
  misc_feature (61)..(62): /note="This region represents a CpG dinucleotide"
  misc_feature (61)..(61): /note="Nucleotide may be methylated to form 5-methylcytosine"
ttcaagggattttcctgcctcagcctgctgagcagctgggattacaggcatgagccaccgcgcccagcctgcatgggctcattctcttatctgacatggagagagaaaagggtgcagacatc

SEQ ID NO: 5364 - DNA, 122 bp, Homo sapiens
  misc_feature (61)..(62): /note="This region represents a CpG dinucleotide"
  misc_feature (61)..(61): /note="Nucleotide may be methylated to form 5-methylcytosine"
gcatatcatatttaattatatctttttcctctgactaaataaagcatcactggctgggtgcggtggctcaagcctgtaatcccagcactttgggaggctgaggtgggtggatcacctgaggt

SEQ ID NO: 5365 - DNA, 122 bp, Homo sapiens
  misc_feature (61)..(62): /note="This region represents a CpG dinucleotide"
  misc_feature (61)..(61): /note="Nucleotide may be methylated to form 5-methylcytosine"
agacaggatctcactattgttgccaagtctggtcttgaacggtccttggggtcaagtgatcgtcccatctccacctcccaaagtgctgggattacagaagtgagccaccttgctcagcctgt

SEQ ID NO: 5366 - DNA, 122 bp, Homo sapiens
  misc_feature (61)..(62): /note="This region represents a CpG dinucleotide"
  misc_feature (61)..(61): /note="Nucleotide may be methylated to form 5-methylcytosine"
catctcaactcttatgataaattagtacagtgcctagaacaagaaaaagcacttaataagcggtatctaattttactaggatgtgaacgtcagcaaggttaaaggatgatttaagggatgtt

SEQ ID NO: 5367 - DNA, 122 bp, Homo sapiens
  misc_feature (61)..(62): /note="This region represents a CpG dinucleotide"
  misc_feature (61)..(61): /note="Nucleotide may be methylated to form 5-methylcytosine"
attcatcataaaattgaacccattcaaaatgtcctaacctaaagcactttgttagttatccgccttaaaaggcattgattcatctctgcatgtgttggagtataaatggcaagcctcagaga

SEQ ID NO: 5368 - DNA, 122 bp, Homo sapiens
  misc_feature (61)..(62): /note="This region represents a CpG dinucleotide"
  misc_feature (61)..(61): /note="Nucleotide may be methylated to form 5-methylcytosine"
cctaagatagtccttaagtacaaggacatctcactagacttcattgtcttgtgaaaggagcggtatttcaggaattaactactcatttaataaagcaaaaaggctggatgtgatagctcaca

SEQ ID NO: 5369 - DNA, 122 bp, Homo sapiens
  misc_feature (61)..(62): /note="This region represents a CpG dinucleotide"
  misc_feature (61)..(61): /note="Nucleotide may be methylated to form 5-methylcytosine"
tgatccttacaagaaatatcctggtgcgaaaaacgaccaaaaccacatagccagcctccacgctgttcagagaaagctggcttagcaatgttgtatggtttttggatgcgctgcgttactca

SEQ ID NO: 5370 - DNA, 122 bp, Homo sapiens
  misc_feature (61)..(62): /note="This region represents a CpG dinucleotide"
  misc_feature (61)..(61): /note="Nucleotide may be methylated to form 5-methylcytosine"
cttggttctttccacaggtccctgagaacaatggaaataactcgtggccccacaatgacacggagattgccaacagcacacccaacccgaagcctgcagccagcagcccggaaacaccctct

SEQ ID NO: 5371 - DNA, 122 bp, Homo sapiens
  misc_feature (61)..(62): /note="This region represents a CpG dinucleotide"
  misc_feature (61)..(61): /note="Nucleotide may be methylated to form 5-methylcytosine"
caccccaagaacactcagcagctgattcagcttaatgtgcaaatccccaggaacacaatgcgtgaagtgaggtacacgggcaattggggccaaggtgcagcagaacttcccaccagcagggg

SEQ ID NO: 5372 - DNA, 122 bp, Homo sapiens
  misc_feature (61)..(62): /note="This region represents a CpG dinucleotide"
  misc_feature (61)..(61): /note="Nucleotide may be methylated to form 5-methylcytosine"
agctatgccactgaggcctcagaagggttcagggaggttaggtcaggctggaggcaacctcgtcctgcctacacttccctgagagttccctctccctaactgatgatctctactgcctctca

SEQ ID NO: 5373 - DNA, 122 bp, Homo sapiens
  misc_feature (61)..(62): /note="This region represents a CpG dinucleotide"
  misc_feature (61)..(61): /note="Nucleotide may be methylated to form 5-methylcytosine"
tcagaatggctttggaaatccctgcctccacctcccggagattctgattcagtacaccaacggtaggtcaggagaatctgtttctaacaagcttcaaagtgatgcagacactactgctttgt

SEQ ID NO: 5374 - DNA, 122 bp, Homo sapiens
  misc_feature (61)..(62): /note="This region represents a CpG dinucleotide"
  misc_feature (61)..(61): /note="Nucleotide may be methylated to form 5-methylcytosine"
ttattatttcctatattcagtaggtgtggctttacaacaagattacatctttgggccgggcgtggtggctcaggcctgtaatcccagcactttgggaggccaaggcaggcagatcatctgag

SEQ ID NO: 5375 - DNA, 122 bp, Homo sapiens
  misc_feature (61)..(62): /note="This region represents a CpG dinucleotide"
  misc_feature (61)..(61): /note="Nucleotide may be methylated to form 5-methylcytosine"
ataacgctgccaggtctttcaaatgctgaggcatttcctcatagctccaagtagctgctgcgggtcagattctgcttgaaccgagggttcaattacaacatccgtatgctttccagcccact

SEQ ID NO: 5376 - DNA, 122 bp, Homo sapiens
  misc_feature (61)..(62): /note="This region represents a CpG dinucleotide"
  misc_feature (61)..(61): /note="Nucleotide may be methylated to form 5-methylcytosine"
ttcctctattgtgacccttcaaaaatcctacctgttttcaaagacatcatcctcattgttcgtaacccccaccaccaacaacaaaaaagccagattgaggcacccgctgacaaagcaactct

SEQ ID NO: 5377 - DNA, 122 bp, Homo sapiens
  misc_feature (61)..(62): /note="This region represents a CpG dinucleotide"
  misc_feature (61)..(61): /note="Nucleotide may be methylated to form 5-methylcytosine"
gatgctttgagtggctggtaggaggtcatggtgacctccctgggttggtgagcaggtgaacgctgcatgtgtcaatggatgtgaatgccaagaagaaaataactcaggaaagaggaggggga

SEQ ID NO: 5378 - DNA, 122 bp, Homo sapiens
  misc_feature (61)..(62): /note="This region represents a CpG dinucleotide"
  misc_feature (61)..(61): /note="Nucleotide may be methylated to form 5-methylcytosine"
tcccagaatcccctaggcctctgggtatccccaaaccacaggattcccaagaccgcattacggcttcacatgcaatgacttgtaggctggtaaatgccacgagactaagatggcgcgttaaa

SEQ ID NO: 5379 - DNA, 122 bp, Homo sapiens
  misc_feature (61)..(62): /note="This region represents a CpG dinucleotide"
  misc_feature (61)..(61): /note="Nucleotide may be methylated to form 5-methylcytosine"
cattatgaagagaaagactgggtacatgcacccatagtaggtgtcactcttggcataagacgtttaacagaatccctacctgacaacatacattacctatatgtcagctctgtttcaaattc

SEQ ID NO: 5380 - DNA, 122 bp, Homo sapiens
  misc_feature (61)..(62): /note="This region represents a CpG dinucleotide"
  misc_feature (61)..(61): /note="Nucleotide may be methylated to form 5-methylcytosine"
actgatagttaaattcaaaagtcactcctagaatcagtttcagcacacattaaattcactcgtcttggatgaagccagtgaaaattttaagacaaaaacaagatttattatcaaatactggt

SEQ ID NO: 5381 - DNA, 122 bp, Homo sapiens
  misc_feature (61)..(62): /note="This region represents a CpG dinucleotide"
  misc_feature (61)..(61): /note="Nucleotide may be methylated to form 5-methylcytosine"
gactcccaccccacccgcaatacagggttgaggcctctgttgcaggtttttcttgattttcgttactggatagcctcagtccttcttaggtgagatcatgctgttcttcttccttcatatat

SEQ ID NO: 5382 - DNA, 122 bp, Homo sapiens
  misc_feature (61)..(62): /note="This region represents a CpG dinucleotide"
  misc_feature (61)..(61): /note="Nucleotide may be methylated to form 5-methylcytosine"
gcatcagaatttggggccaggtgtgggttacacacagggtctaaggtcgatagcccagaccgtctgaggctatgatgccctgccctctccaccgcaatcctgttcctttgctgtggagaatc

SEQ ID NO: 5383 - DNA, 122 bp, Homo sapiens
  misc_feature (61)..(62): /note="This region represents a CpG dinucleotide"
  misc_feature (61)..(61): /note="Nucleotide may be methylated to form 5-methylcytosine"
catgcaggaggatgtgcgcagtctataggccaacatggcattttatgtaagtgacttaagcgtcccacggaggagcctggaaccaccctccatggatactgaggaatttataaacgcaaatc

SEQ ID NO: 5384 - DNA, 122 bp, Homo sapiens
  misc_feature (61)..(62): /note="This region represents a CpG dinucleotide"
  misc_feature (61)..(61): /note="Nucleotide may be methylated to form 5-methylcytosine"
cccatgttcaaggccagctggagtcgtaggaaaatagacgtggggcggagtaagaccgggcggttaagcctgcatagggtggagctccaagcccccagagtcccgcccctcggccgccctcc

SEQ ID NO: 5385 - DNA, 122 bp, Homo sapiens
  misc_feature (61)..(62): /note="This region represents a CpG dinucleotide"
  misc_feature (61)..(61): /note="Nucleotide may be methylated to form 5-methylcytosine"
ttgcctgaggtcacacagctaataagccatgaattaagccaaatctttctgagcctaagtcgtgtcttcaagttaatagtaccagactgtctgtactttcaattctttccactccaaaaagg

SEQ ID NO: 5386 - DNA, 122 bp, Homo sapiens
  misc_feature (61)..(62): /note="This region represents a CpG dinucleotide"
  misc_feature (61)..(61): /note="Nucleotide may be methylated to form 5-methylcytosine"
aaaagaatactgatttagtcatcacccactaagctccaggcacttttgcttatgtcacctcgcaccacctacagtacactgtaaccgcagagaatgacacactggcctctgactaccctaca

SEQ ID NO: 5387 - DNA, 122 bp, Homo sapiens
  misc_feature (61)..(62): /note="This region represents a CpG dinucleotide"
  misc_feature (61)..(61): /note="Nucleotide may be methylated to form 5-methylcytosine"
gctgtcaggtgaggtttccccaggggaccctccagagggctgtttatgtgcaaatctacacgtccctttctctactggggaagaacagagataaggagcggacgtgctcaaagggtgagtca

SEQ ID NO: 5388 - DNA, 122 bp, Homo sapiens
  misc_feature (61)..(62): /note="This region represents a CpG dinucleotide"
  misc_feature (61)..(61): /note="Nucleotide may be methylated to form 5-methylcytosine"
tctgtcccccttctcctatccactcctccctttaacccacacggcccaagcctggagaaacgacttggtttcccacactatagacagagcgctggggtaaaaaaacctgcaacttttgagag

SEQ ID NO: 5389 - DNA, 122 bp, Homo sapiens
  misc_feature (61)..(62): /note="This region represents a CpG dinucleotide"
  misc_feature (61)..(61): /note="Nucleotide may be methylated to form 5-methylcytosine"
caacatggcctgctgtatgtcacagagaggactgtattatatttgtaagagtattagtgacgtgtgagaggctatacataatgcctgtgaacaaacaaaagtcaccttggttattgactcat

SEQ ID NO: 5390 - DNA, 122 bp, Homo sapiens
  misc_feature (61)..(62): /note="This region represents a CpG dinucleotide"
  misc_feature (61)..(61): /note="Nucleotide may be methylated to form 5-methylcytosine"
tcacaaaggcccacatattgtacaacgccactcatataacatgttcaaaacaggcaaaaccggcctggcacagtggctcacccctgtaatcccagcactttaggaggccaaggcgggcagat

SEQ ID NO: 5391 - DNA, 122 bp, Homo sapiens
  misc_feature (61)..(62): /note="This region represents a CpG dinucleotide"
  misc_feature (61)..(61): /note="Nucleotide may be methylated to form 5-methylcytosine"
ccagcaactccctcgctgggtccgatatcccccttcacctcccttttagctggcactgcacgaatgcctccacagagaggctgacagtacagcagtcacctcccagctgtcttcggtgcatc

SEQ ID NO: 5392 - DNA, 122 bp, Homo sapiens
  misc_feature (61)..(62): /note="This region represents a CpG dinucleotide"
  misc_feature (61)..(61): /note="Nucleotide may be methylated to form 5-methylcytosine"
ttccctacagaatcagctttactctcctgtgttttgccagaagaaacatttcataaaactcgtctttgaatctattggaaagatgttcttgagggtgtggcttcccactttccacagggtct

SEQ ID NO: 5393 - DNA, 122 bp, Homo sapiens
  misc_feature (61)..(62): /note="This region represents a CpG dinucleotide"
  misc_feature (61)..(61): /note="Nucleotide may be methylated to form 5-methylcytosine"
tcccccctgccagccagtgcctccactcccaggtccctccactgtcacacagaccctgggcggcctctaagcccagaaattccaaggctaggccagaataattggggtgggtgggggcaggg

SEQ ID NO: 5394 - DNA, 122 bp, Homo sapiens
  misc_feature (61)..(62): /note="This region represents a CpG dinucleotide"
  misc_feature (61)..(61): /note="Nucleotide may be methylated to form 5-methylcytosine"
aagctacctttataagataaccagttccagagtaaaagagtaaatactgactgcatgatgcgataaaagactagcaatgtggggaaccagtacagcaaaccatatgattaagaggagggatc

SEQ ID NO: 5395 - DNA, 122 bp, Homo sapiens
  misc_feature (61)..(62): /note="This region represents a CpG dinucleotide"
  misc_feature (61)..(61): /note="Nucleotide may be methylated to form 5-methylcytosine"
agaagatgaagactaaggccaagctgcaaatggccaggctatttattgcaaaaatacttccgcaaagaacctatctgcaaatacccacagagggtttttccctcttttgggtgccaattctt

SEQ ID NO: 5396 - DNA, 122 bp, Homo sapiens
  misc_feature (61)..(62): /note="This region represents a CpG dinucleotide"
  misc_feature (61)..(61): /note="Nucleotide may be methylated to form 5-methylcytosine"
cccagtgcctctcctggtggtcctcccagtctagagggtcacggcccccccgccctcctccgtctctggcaagctgaccttgactaacccaggaatacagggtcatcctcattcctaagtaa

SEQ ID NO: 5397 - DNA, 122 bp, Homo sapiens
  misc_feature (61)..(62): /note="This region represents a CpG dinucleotide"
  misc_feature (61)..(61): /note="Nucleotide may be methylated to form 5-methylcytosine"
aacctacctttcaggcatataaacttcaaatccactctacaactgtgcctgagctgtaggcgtggcaggaaaaagcagaatgctgcaaggctcctcgagtcaaatcctttgggatttgagca

SEQ ID NO: 5398 - DNA, 122 bp, Homo sapiens
  misc_feature (61)..(62): /note="This region represents a CpG dinucleotide"
  misc_feature (61)..(61): /note="Nucleotide may be methylated to form 5-methylcytosine"
actacccttctgggtgtggctgtaggggggtttgtcctctggaaaggcatccagcgccgccgaaggagtaaaacgagtcctgtgacccaacagccacagcagaaagtgctgggcagtagaga

SEQ ID NO: 5399 - DNA, 122 bp, Homo sapiens
  misc_feature (61)..(62): /note="This region represents a CpG dinucleotide"
  misc_feature (61)..(61): /note="Nucleotide may be methylated to form 5-methylcytosine"
cagatgctggtaactttggcaattatcattttgtttggtgaacagtagtaaaacagtgtgcggtaaaagtgtttagagagagaggataaataaattgaacagttttgcaatgcaaagtggtt

SEQ ID NO: 5400 - DNA, 122 bp, Homo sapiens
  misc_feature (61)..(62): /note="This region represents a CpG dinucleotide"
  misc_feature (61)..(61): /note="Nucleotide may be methylated to form 5-methylcytosine"
atgattttggaatttagaactaaggttgctgggagctgagccatgttcatggcagaggaacggaacttccctttgtggaagttcctggatcttccagagcctggggagttttcctcttcctt

SEQ ID NO: 5401 - DNA, 122 bp, Homo sapiens
  misc_feature (61)..(62): /note="This region represents a CpG dinucleotide"
  misc_feature (61)..(61): /note="Nucleotide may be methylated to form 5-methylcytosine"
gagtttcctggctgggagcccctgcagccagagggctgggataaagctcccctcttctgacgcactgctggatttccacagcttccctggccaggaaagcactttgcaggtgggggaaagtg

SEQ ID NO: 5402 - DNA, 122 bp, Homo sapiens
  misc_feature (61)..(62): /note="This region represents a CpG dinucleotide"
  misc_feature (61)..(61): /note="Nucleotide may be methylated to form 5-methylcytosine"
gctgatcactgctgcatgaggcagtgtcataaacccctccttgatgctctctggctggagcggccagttgagtgactcatggagcttgtcatctcagggcctccttccctgatgcacacggc

SEQ ID NO: 5403 - DNA, 122 bp, Homo sapiens
  misc_feature (61)..(62): /note="This region represents a CpG dinucleotide"
  misc_feature (61)..(61): /note="Nucleotide may be methylated to form 5-methylcytosine"
gatttttgcttcagaaaaatgtttcttttctgaaactccagctgtctctcattcataaaacggtgttttaataaggtggttgtttagtatgaaacaatgatagcgctaataatgaatcacta

SEQ ID NO: 5404 - DNA, 122 bp, Homo sapiens
  misc_feature (61)..(62): /note="This region represents a CpG dinucleotide"
  misc_feature (61)..(61): /note="Nucleotide may be methylated to form 5-methylcytosine"
agtgaggggccttggcgtcttgggttcctgagagatgacattgccatatgtggctcttcacgactgtcccacaggccctcagctggaatgtggcagaactgggagctgaatccaggacagtg

SEQ ID NO: 5405 - DNA, 122 bp, Homo sapiens
  misc_feature (61)..(62): /note="This region represents a CpG dinucleotide"
  misc_feature (61)..(61): /note="Nucleotide may be methylated to form 5-methylcytosine"
ttcaagcatattcttaattatttaaaaaagaactgaaagtctacttcaggcaacacatcacgggaagtagctgtgactcagttcctgtctttatgagctaagtcacatggggacaagcaggg

SEQ ID NO: 5406 - DNA, 122 bp, Homo sapiens
  misc_feature (61)..(62): /note="This region represents a CpG dinucleotide"
  misc_feature (61)..(61): /note="Nucleotide may be methylated to form 5-methylcytosine"
aaatcagctaacagagataaactagtagctggttcttaaaagagggatttgtttacactacgtaatttttatcagtgggacaacctgtttgcctgcctgagatcttattacttattaatgca

SEQ ID NO: 5407 - DNA, 122 bp, Homo sapiens
  misc_feature (61)..(62): /note="This region represents a CpG dinucleotide"
  misc_feature (61)..(61): /note="Nucleotide may be methylated to form 5-methylcytosine"
aaagggcaggtggcgggtaaagggtgtcttgacaagccagctggacctgtgggtgaacagcgcttaaaccctctgggattctaggaaagtcagcagtcattagttgaaggcttctctggagg

SEQ ID NO: 5408 - DNA, 122 bp, Homo sapiens
  misc_feature (61)..(62): /note="This region represents a CpG dinucleotide"
  misc_feature (61)..(61): /note="Nucleotide may be methylated to form 5-methylcytosine"
catcttggttttagctgggttctttaccacatcctgttctgaccagactgttttgttcagcggggtcatgactggtgcctgggaagcaagtcctgctgatctcctgcctcagaagggagggg

SEQ ID NO: 5409 - DNA, 122 bp, Homo sapiens
  misc_feature (61)..(62): /note="This region represents a CpG dinucleotide"
  misc_feature (61)..(61): /note="Nucleotide may be methylated to form 5-methylcytosine"
tccttgtcctgccaccaaatggcagcttctccatttccgtgcctcagaagtaagtcagcacgccagccagtaagcaccccatctcgtccacagtttgggatactcgtgagaacaagcgtgta

SEQ ID NO: 5410 - DNA, 122 bp, Homo sapiens
  misc_feature (61)..(62): /note="This region represents a CpG dinucleotide"
  misc_feature (61)..(61): /note="Nucleotide may be methylated to form 5-methylcytosine"
aatagaaaggacagattgctcagcagtgtaactcacttcaaagtaacttcctttaccaagcgatagtgtctacttgtcacacaggaagtgaagacttggcaaaattttcgctgggtagtttc

SEQ ID NO: 5411 - DNA, 122 bp, Homo sapiens
  misc_feature (61)..(62): /note="This region represents a CpG dinucleotide"
  misc_feature (61)..(61): /note="Nucleotide may be methylated to form 5-methylcytosine"
caagagtctccagaggcaaggaggcatggttagaaaacagcccattcagcagacactggacggtacagatcctatccctggggtgttcataaccaggacagatcagattctaggccaccaat

SEQ ID NO: 5412 - DNA, 122 bp, Homo sapiens
  misc_feature (61)..(62): /note="This region represents a CpG dinucleotide"
  misc_feature (61)..(61): /note="Nucleotide may be methylated to form 5-methylcytosine"
caaacttgtgggctcaagagatactcccgccttggcctcccaaagttctgggattacaggcgtgaacctccacacccagccaaggaacttttaaagttggaggaggcctttataagttgtat

SEQ ID NO: 5413 - DNA, 122 bp, Homo sapiens
  misc_feature (61)..(62): /note="This region represents a CpG dinucleotide"
  misc_feature (61)..(61): /note="Nucleotide may be methylated to form 5-methylcytosine"
acagtgaatcgattgataggatttctccagcacttgtgcactgatgaggaaagggagggacggcccttgtcctcctgtctgtgaaccgggactaaagcccaaggacccagcagggcacttca

SEQ ID NO: 5414 - DNA, 122 bp, Homo sapiens
  misc_feature (61)..(62): /note="This region represents a CpG dinucleotide"
  misc_feature (61)..(61): /note="Nucleotide may be methylated to form 5-methylcytosine"
ggattttctgcctgggatgatgcaatttccaggagctcattacaccataaaggagacgcacgccccttttcttaggaaacaatcttctgtctgttggaggtctcttgctctccagtttaaaa

SEQ ID NO: 5415 - DNA, 122 bp, Homo sapiens
  misc_feature (61)..(62): /note="This region represents a CpG dinucleotide"
  misc_feature (61)..(61): /note="Nucleotide may be methylated to form 5-methylcytosine"
tcttaattcagtttgactgagattaaaactattattaatctccatttcccaacacacacgcgcaggtaagaagggaaatgtagctaaacaatttaaagtaaccagattatctgccctctgat

SEQ ID NO: 5416 - DNA, 122 bp, Homo sapiens
  misc_feature (61)..(62): /note="This region represents a CpG dinucleotide"
  misc_feature (61)..(61): /note="Nucleotide may be methylated to form 5-methylcytosine"
atccccacaggagaaagtcccataaaagacctctagaaaggacaagtcattacctaatcacgcaaggccttcagcgactggcttgcccacacttgagtctgaaaatcaggggccattgaagg

SEQ ID NO: 5417 - DNA, 122 bp, Homo sapiens
  misc_feature (61)..(62): /note="This region represents a CpG dinucleotide"
  misc_feature (61)..(61): /note="Nucleotide may be methylated to form 5-methylcytosine"
ctccagatgatctcaatgcttgctcaagtttgagaaccactgaaccgcagtatgactctccgtgtcacctggctaactctgcctcactttcaggtctcagtgtagacaccacctcttctagg

SEQ ID NO: 5418 - DNA, 122 bp, Homo sapiens
  misc_feature (61)..(62): /note="This region represents a CpG dinucleotide"
  misc_feature (61)..(61): /note="Nucleotide may be methylated to form 5-methylcytosine"
gcgcgcgctccgtggcccgcctgtcgcccgagacccgggagcgcgcgcggagctggtgcgcgctggactggcgcctgtacgagcatttcaaccgcaccctctgggcgcagctgcgcgccgag

SEQ ID NO: 5419 - DNA, 122 bp, Homo sapiens
  misc_feature (61)..(62): /note="This region represents a CpG dinucleotide"
  misc_feature (61)..(61): /note="Nucleotide may be methylated to form 5-methylcytosine"
caaataaccggcagttgagggagccttggtaagggggaaatagggactcacatcactttacgtttcaagatctgcagggaagtgctaggtggcaggagtcctctgaacttcccagtgcacct

SEQ ID NO: 5420 - DNA, 122 bp, Homo sapiens
  misc_feature (61)..(62): /note="This region represents a CpG dinucleotide"
  misc_feature (61)..(61): /note="Nucleotide may be methylated to form 5-methylcytosine"
cttcccagtagggctgtgctgtgagccctagccatgtgagaccactgacacttaatgtcacgttcagtagaggaggattcaattctctggttgctgcatctcaggtgctcagtagctaggtc

SEQ ID NO: 5421 - DNA, 122 bp, Homo sapiens
  misc_feature (61)..(62): /note="This region represents a CpG dinucleotide"
  misc_feature (61)..(61): /note="Nucleotide may be methylated to form 5-methylcytosine"
ggctgcttattgcctgtgattcatttcccctctagagtcagacttttctctgttcaaactcgcttagttatgtgcaatggtttgcttaacttgcctcatttcccttgggcaaatgagatggg

SEQ ID NO: 5422 - DNA, 122 bp, Homo sapiens
  misc_feature (61)..(62): /note="This region represents a CpG dinucleotide"
  misc_feature (61)..(61): /note="Nucleotide may be methylated to form 5-methylcytosine"
tcttgccaaacccgttttctgtactgcagctctcttggccttttgagttctttgacatgccgcattccctcttgccatggaaacccacaggttgtcctctccctggaatgcatgtcttcacc

SEQ ID NO: 5423 - DNA, 122 bp, Homo sapiens
  misc_feature (61)..(62): /note="This region represents a CpG dinucleotide"
  misc_feature (61)..(61): /note="Nucleotide may be methylated to form 5-methylcytosine"
atctttttagatcaggtactactccctaggaagcaggactattactctgacacctcatctcgctcctctgccctgccaaaccaggctcaaactcctgctgtcctggctctcactgcccaaac

SEQ ID NO: 5424 - DNA, 122 bp, Homo sapiens
  misc_feature (61)..(62): /note="This region represents a CpG dinucleotide"
  misc_feature (61)..(61): /note="Nucleotide may be methylated to form 5-methylcytosine"
tcatcccagccccttctaaacctcagttgctccagggtacaaaacaggcatcaacccaatcgcaccgggctggcgctggtggaaggtttaaagagaaggtgaccattccagcggctcgtgag

SEQ ID NO: 5425 - DNA, 122 bp, Homo sapiens
  misc_feature (61)..(62): /note="This region represents a CpG dinucleotide"
  misc_feature (61)..(61): /note="Nucleotide may be methylated to form 5-methylcytosine"
aattactaaatggagcatgactctttttccagacaacaggcccaaccatgagaattagaacgtcacttggcagctggatcccttttctgtcctcagagacgatgacacctcaggaaagtgct

SEQ ID NO: 5426 - DNA, 122 bp, Homo sapiens
  misc_feature (61)..(62): /note="This region represents a CpG dinucleotide"
  misc_feature (61)..(61): /note="Nucleotide may be methylated to form 5-methylcytosine"
cctgaattaccctgtaagggaagtaccattataaccccaactgacaaacgaggaaactgacgtctagagagaagtaagttgtctagattttagaggctgtgatctttaccaccatgcacttg

SEQ ID NO: 5427 - DNA, 122 bp, Homo sapiens
  misc_feature (61)..(62): /note="This region represents a CpG dinucleotide"
  misc_feature (61)..(61): /note="Nucleotide may be methylated to form 5-methylcytosine"
aaagaaattctctgacctaccttgtgggttgtaggtcctgccccatactggagaggaagacgtgctacatagagaagctaagaaaaatttgaacagacaggccgtgctgggttttctgcctc

SEQ ID NO: 5428 - DNA, 122 bp, Homo sapiens
  misc_feature (61)..(62): /note="This region represents a CpG dinucleotide"
  misc_feature (61)..(61): /note="Nucleotide may be methylated to form 5-methylcytosine"
ccctcctttcctcttgttaaatgatgattgacacacccgggctcaatttccagttcattacgtaacactctgagcaagtcatttaccctctctgagctgaagtctttttggctgtacaatgg

SEQ ID NO: 5429 - DNA, 122 bp, Homo sapiens
  misc_feature (61)..(62): /note="This region represents a CpG dinucleotide"
  misc_feature (61)..(61): /note="Nucleotide may be methylated to form 5-methylcytosine"
tggaacagaggtgaatgtatgctggccactcttgcccctccaggagtcactgtctataaccgcataacacccaagaataccagaagtaagtgagtaataggagtaattctggcaggaattgg

SEQ ID NO: 5430 - DNA, 122 bp, Homo sapiens
  misc_feature (61)..(62): /note="This region represents a CpG dinucleotide"
  misc_feature (61)..(61): /note="Nucleotide may be methylated to form 5-methylcytosine"
cctcctggccgcctgacgcccgctttcccaggcagagctggtgcacgaggacatcgagagcgcgttggccgactgccggctgggcaagaagatgcggccgcagaccctgaagtagggcagcg

SEQ ID NO: 5431 - DNA, 122 bp, Homo sapiens
  misc_feature (61)..(62): /note="This region represents a CpG dinucleotide"
  misc_feature (61)..(61): /note="Nucleotide may be methylated to form 5-methylcytosine"
caaagtgctgggattacaggcgtgagccaccgcacccggccatcattagtcatttttctacgagttattaggcataaattgtgaaacattcacaggagggattgtgtgtttgagatcatctc

SEQ ID NO: 5432 - DNA, 122 bp, Homo sapiens
  misc_feature (61)..(62): /note="This region represents a CpG dinucleotide"
  misc_feature (61)..(61): /note="Nucleotide may be methylated to form 5-methylcytosine"
ctaattttgctcccagtgttctcaactcttcaagcaccgtttttacagaaaggctaatggcgtttaaaagtttattgtctcagctggggtggtggctcacgcctgtaatcccagcactttgg

SEQ ID NO: 5433 - DNA, 122 bp, Homo sapiens
  misc_feature (61)..(62): /note="This region represents a CpG dinucleotide"
  misc_feature (61)..(61): /note="Nucleotide may be methylated to form 5-methylcytosine"
aggaatcatcccagataattctgcttacgccagctaaacaacttgcatcattaaataaaccgtcttctgactgtatttatgaaatgttatgtctacctatcaatgagactacattatgcaaa

SEQ ID NO: 5434 - DNA, 122 bp, Homo sapiens
  misc_feature (61)..(62): /note="This region represents a CpG dinucleotide"
  misc_feature (61)..(61): /note="Nucleotide may be methylated to form 5-methylcytosine"
gcgctgggaagtgttctgtggctccatctggcactgttgcaagtgtgtaagtaagtcctacgtatgtgaatatctcatgccaatcctgatctagtcaaatcctaaacatatcataaagctag

SEQ ID NO: 5435 - DNA, 122 bp, Homo sapiens
  misc_feature (61)..(62): /note="This region represents a CpG dinucleotide"
  misc_feature (61)..(61): /note="Nucleotide may be methylated to form 5-methylcytosine"
agtagcaaccgtgtaaatccaattactcctaagtgaattaagcttaccctagcctgacagcgtttgtcagtgcttgagcacactgcacagtatatgagaaacagcttgtaaataatattcct

SEQ ID NO: 5436 - DNA, 122 bp, Homo sapiens
  misc_feature (61)..(62): /note="This region represents a CpG dinucleotide"
  misc_feature (61)..(61): /note="Nucleotide may be methylated to form 5-methylcytosine"
ggacactccctagcagtattatctcaagcatgtcacttaccctttctaagcttcctttgtcgaatggagataaagatatcccttaactcatcaggttgttgtaagaattaaatgagatagtg

SEQ ID NO: 5437 - DNA, 122 bp, Homo sapiens
  misc_feature (61)..(62): /note="This region represents a CpG dinucleotide"
  misc_feature (61)..(61): /note="Nucleotide may be methylated to form 5-methylcytosine"
agcagatacttattgctcttctagttattatactgttatgtgctggagatacaaatgtcacgttatgacaccagccttccaggagattttagtctagtgtgttagtcatacaactatgcaca

SEQ ID NO: 5438 - DNA, 122 bp, Homo sapiens
  misc_feature (61)..(62): /note="This region represents a CpG dinucleotide"
  misc_feature (61)..(61): /note="Nucleotide may be methylated to form 5-methylcytosine"
ggtcaaggcccaaaaggaaagttccagaagtgagcgcagacctttggacctcagtctgtacggagatcgagtcaccgtctattcaatccaggttttgttccacttgctgatgattagacatc

SEQ ID NO: 5439 - DNA, 122 bp, Homo sapiens
  misc_feature (61)..(62): /note="This region represents a CpG dinucleotide"
  misc_feature (61)..(61): /note="Nucleotide may be methylated to form 5-methylcytosine"
acttggaaaaaccacaatgaacaaaacacaaaagtccctgcatcatgaaggctatgatcgcggagtgtttcagactgccatgctcctccagagagaaagaacaccttatcatgtgcctgtca

SEQ ID NO: 5440 - DNA, 122 bp, Homo sapiens
  misc_feature (61)..(62): /note="This region represents a CpG dinucleotide"
  misc_feature (61)..(61): /note="Nucleotide may be methylated to form 5-methylcytosine"
cctgcatcggcttccggagtgtggaaccaccattcaaagctgttaaagacatggaagtgccgtggatgacgccatagctcagctctgccagcaacttaaccaaggttccagttccggaatat

SEQ ID NO: 5441 - DNA, 122 bp, Homo sapiens
  misc_feature (61)..(62): /note="This region represents a CpG dinucleotide"
  misc_feature (61)..(61): /note="Nucleotide may be methylated to form 5-methylcytosine"
tctggaagaagaaataataggatttggtatctaggggatggagcctgagggaagggttaacgatgacttaaaggaattgagcatgagcagttaggagaatggtattaccattaactgaggtt

SEQ ID NO: 5442 - DNA, 122 bp, Homo sapiens
  misc_feature (61)..(62): /note="This region represents a CpG dinucleotide"
  misc_feature (61)..(61): /note="Nucleotide may be methylated to form 5-methylcytosine"
tcaggacctcacccctccccaaagccctcttcaagccggtgactcacagatgtacaggggcgagttgctgggctctgagaagtcatccacataggagatcccaaatggctgaataggcactg

SEQ ID NO: 5443 - DNA, 122 bp, Homo sapiens
  misc_feature (61)..(62): /note="This region represents a CpG dinucleotide"
  misc_feature (61)..(61): /note="Nucleotide may be methylated to form 5-methylcytosine"
gaaattggggttatctaatgttaacctaaaagcaactcaagagacacaggctcggccaggcgcagtggctcatgcctgtaatcccagtactttgggaggctgaggcagatggatcacttgag

SEQ ID NO: 5444 - DNA, 122 bp, Homo sapiens
  misc_feature (61)..(62): /note="This region represents a CpG dinucleotide"
  misc_feature (61)..(61): /note="Nucleotide may be methylated to form 5-methylcytosine"
aacagctaccacatgtggctccaatctgatttcattcctgtgggtttctgggccacttcacgaagtttttgcagctggatctttgatcacagtgctttgtctattaggttagaaatttgtct

SEQ ID NO: 5445 - DNA, 122 bp, Homo sapiens
  misc_feature (61)..(62): /note="This region represents a CpG dinucleotide"
  misc_feature (61)..(61): /note="Nucleotide may be methylated to form 5-methylcytosine"
ctgggattaggtccatgttagagtatgatcctcttatatgttgctagatttgatttcttgcgctatctttacctggctttgatgcaggtaaataccctgatgtcagggtaatacaggatgca

SEQ ID NO: 5446 - DNA, 122 bp, Homo sapiens
  misc_feature (61)..(62): /note="This region represents a CpG dinucleotide"
  misc_feature (61)..(61): /note="Nucleotide may be methylated to form 5-methylcytosine"
ttgcccaactggtctcaagtgatcctcctgtgtcatcctcccagagtgttaggattaaggcgtgagccatggctgctagcctgccattcttttcttagcacttgaaaaatcttgtgctgctt

SEQ ID NO: 5447 - DNA, 122 bp, Homo sapiens
  misc_feature (61)..(62): /note="This region represents a CpG dinucleotide"
  misc_feature (61)..(61): /note="Nucleotide may be methylated to form 5-methylcytosine"
caaggattcaggtttgtagctcaatggggaagttggggctgaagataacgaccttaagagcgatcagcacagaaatatgagctgagcctataggcatgggtgggatcattaaggaaacatct

SEQ ID NO: 5448 - DNA, 122 bp, Homo sapiens
  misc_feature (61)..(62): /note="This region represents a CpG dinucleotide"
  misc_feature (61)..(61): /note="Nucleotide may be methylated to form 5-methylcytosine"
tagacagagttcttcaacaagcgtttccaacaactgctaaaccttagctctaatgtacaccgtgaaaagggaaaatcctctttctaagcccatttatgatttattagcttattcatttgact

SEQ ID NO: 5449 - DNA, 122 bp, Homo sapiens
  misc_feature (61)..(62): /note="This region represents a CpG dinucleotide"
  misc_feature (61)..(61): /note="Nucleotide may be methylated to form 5-methylcytosine"
tacaggactgacaggtaactttcagaaacaattccagggttcagagtatgcacacctgtacgtatcagcagaatgaataatgagagagcaatgaacaatattagataaaagctaggagaact

SEQ ID NO: 5450 - DNA, 122 bp, Homo sapiens
  misc_feature (61)..(62): /note="This region represents a CpG dinucleotide"
  misc_feature (61)..(61): /note="Nucleotide may be methylated to form 5-methylcytosine"
ttggaaacacttaatgcgctctccaaatggggagtctgttggggaggccctggcgggagccggggctacatccaggtcctcggcttggtggccttgttcacttatttgttcaggaagcagca

SEQ ID NO: 5451 - DNA, 122 bp, Homo sapiens
  misc_feature (61)..(62): /note="This region represents a CpG dinucleotide"
  misc_feature (61)..(61): /note="Nucleotide may be methylated to form 5-methylcytosine"
cagatttctattgaaacctcccaacttcagagccaggatgagaaagactggtttgccaagcggtttgaggaactgcaaaaggagacgtttaccacagaagagcgaaaacatctgtcgaaact

SEQ ID NO: 5452 - DNA, 122 bp, Homo sapiens
  misc_feature (61)..(62): /note="This region represents a CpG dinucleotide"
  misc_feature (61)..(61): /note="Nucleotide may be methylated to form 5-methylcytosine"
ccccgggtgccagaatgtgtgtgaatcttctacctactaccgactcatgtctctaagatacgttgacagacctatttgtcatgtctctttagtctgtggtgtggtgtaatacaaagagcact

SEQ ID NO: 5453 - DNA, 122 bp, Homo sapiens
  misc_feature (61)..(62): /note="This region represents a CpG dinucleotide"
  misc_feature (61)..(61): /note="Nucleotide may be methylated to form 5-methylcytosine"
cagcaaaaaataaagcatgggcatgtgatttggtttgctcatgaaatgggaaaagcagctcgtgtcactgctgagcagaagctttagaggctgtgaacagttctttgtgactcaccatgctc

SEQ ID NO: 5454 - DNA, 122 bp, Homo sapiens
  misc_feature (61)..(62): /note="This region represents a CpG dinucleotide"
  misc_feature (61)..(61): /note="Nucleotide may be methylated to form 5-methylcytosine"
ccccataccatatatgataatgctgaaaaagtttgaagtattgccagaattaccaaaatgcgccacagagacaggaagtaagcacatgctgttggaaacaaatggcagcagtagacttactg

SEQ ID NO: 5455 - DNA, 122 bp, Homo sapiens
  misc_feature (61)..(62): /note="This region represents a CpG dinucleotide"
  misc_feature (61)..(61): /note="Nucleotide may be methylated to form 5-methylcytosine"
atctgatttaagccacagtatttatgtttctattacaacatttaaaacagaatcacaggccgggcacagtggctcacggctataatcccagcactttgggaggccaaggcaggtggatcacc

SEQ ID NO: 5456 - DNA, 122 bp, Homo sapiens
  misc_feature (61)..(62): /note="This region represents a CpG dinucleotide"
  misc_feature (61)..(61): /note="Nucleotide may be methylated to form 5-methylcytosine"
gggctgctggtgccttgagtcccacagatgattcattaggaaaagccagatataccaaagcggtttactcagagtcaggggtgtagctctggctgcctgtcagctcccttggatactatatt

SEQ ID NO: 5457 - DNA, 122 bp, Homo sapiens
  misc_feature (61)..(62): /note="This region represents a CpG dinucleotide"
  misc_feature (61)..(61): /note="Nucleotide may be methylated to form 5-methylcytosine"
actcacctggacccatgcaagagactcctaactcagctgcttctttcatctgctgccctgcggggcatttgtgtattctcaacagggcagggattctgttacaatgtaaaccagagcctgct

SEQ ID NO: 5458 - DNA, 122 bp, Homo sapiens
  misc_feature (61)..(62): /note="This region represents a CpG dinucleotide"
  misc_feature (61)..(61): /note="Nucleotide may be methylated to form 5-methylcytosine"
ccttccctcccctcccctcatgacctcgactcccttcccttctccctggaaggagcggggcggaagatcgagccccagcgctgccccacaaccaggctggatttaaagcctgtgcagtaggc

SEQ ID NO: 5459 - DNA, 122 bp, Homo sapiens
  misc_feature (61)..(62): /note="This region represents a CpG dinucleotide"
  misc_feature (61)..(61): /note="Nucleotide may be methylated to form 5-methylcytosine"
ccttcacagcaacgcctagattagtgtttgactgagtaactgtggactctagcctggccacgtcaacacataacactagcctcacagataggaatagtgaaagcaaacactttatggggttc

SEQ ID NO: 5460 - DNA, 122 bp, Homo sapiens
  misc_feature (61)..(62): /note="This region represents a CpG dinucleotide"
  misc_feature (61)..(61): /note="Nucleotide may be methylated to form 5-methylcytosine"
tgcgaaaccttttacacacattatttcattaaatctttttctttgagacagaatctctgtcgcctaggctggaatgcagtggtgcaatctcagcttgctgcaatttccgcctgctaggttca

SEQ ID NO: 5461 - DNA, 122 bp, Homo sapiens
  misc_feature (61)..(62): /note="This region represents a CpG dinucleotide"
  misc_feature (61)..(61): /note="Nucleotide may be methylated to form 5-methylcytosine"
ggcaggaaaagtctgtctcttcagagaacttgagtgctttctcttatcagataaaaggaacgagcgaacattggtatatttcacctttggcccttgctcggtgacaaatttggttcttagcc

SEQ ID NO: 5462 - DNA, 122 bp, Homo sapiens
  misc_feature (61)..(62): /note="This region represents a CpG dinucleotide"
  misc_feature (61)..(61): /note="Nucleotide may be methylated to form 5-methylcytosine"
ttataggtgtgaaaacagtgagagagggaaatcaactccatgacggtggggcacagaaagcgtgaaccatgattcagagccttacagtcaactgtcatgtgtatgtgtcatactcaaggcaa

SEQ ID NO: 5463 - DNA, 122 bp, Homo sapiens
  misc_feature (61)..(62): /note="This region represents a CpG dinucleotide"
  misc_feature (61)..(61): /note="Nucleotide may be methylated to form 5-methylcytosine"
ggcatcatggttcttagttctcagcaggagaactccacactgtcttcaaacaaatacttacggggaaggttagaggttcactcaaaggtcatttctttggatactagtcagaatgtttacat

SEQ ID NO: 5464 - DNA, 122 bp, Homo sapiens
  misc_feature (61)..(62): /note="This region represents a CpG dinucleotide"
  misc_feature (61)..(61): /note="Nucleotide may be methylated to form 5-methylcytosine"
atttcctgaccagcaatgtcagaaacctgaaacaccagcatgaggtgaggtgagaggccacggagctgcctcctgtattgccgcccgggccatactagaaaaacacaggacagtcagaagac

SEQ ID NO: 5465 - DNA, 122 bp, Homo sapiens
  misc_feature (61)..(62): /note="This region represents a CpG dinucleotide"
  misc_feature (61)..(61): /note="Nucleotide may be methylated to form 5-methylcytosine"
ttgcacaagcaaatgaaaattgttactgctcaaagcatttttgaaattcttttgagattacgtgtacgtagtttccatggcatgtaagaaaatcttggtcgggcacagtggcttaagcctgt

SEQ ID NO: 5466 - DNA, 122 bp, Homo sapiens
  misc_feature (61)..(62): /note="This region represents a CpG dinucleotide"
  misc_feature (61)..(61): /note="Nucleotide may be methylated to form 5-methylcytosine"
ttttcctgcagctttagaagctttagaaggcactctgctcactcaggggcaagtggtaagcgctctttcccctctagtgtttgtgactcaggagtttcgaaacaggaagtagagctggctgg

SEQ ID NO: 5467 - DNA, 122 bp, Homo sapiens
  misc_feature (61)..(62): /note="This region represents a CpG dinucleotide"
  misc_feature (61)..(61): /note="Nucleotide may be methylated to form 5-methylcytosine"
aaatatttggccatcggccttgtgattaccatgattctttaaagtcttctctcaaaaccacgtcaagagatccttttaagatgctggtgactcacctgcacaaaatcctcaaatgactttca

SEQ ID NO: 5468 - DNA, 122 bp, Homo sapiens
  misc_feature (61)..(62): /note="This region represents a CpG dinucleotide"
  misc_feature (61)..(61): /note="Nucleotide may be methylated to form 5-methylcytosine"
gatcaaaggagccagcagctcctgaatttcacagctgccaaactcctgccacagtctcagcgccctaaatcccagagctaagggactgtcagtgccaggtttccaggtttccagatgatctg

SEQ ID NO: 5469 - DNA, 122 bp, Homo sapiens
  misc_feature (61)..(62): /note="This region represents a CpG dinucleotide"
  misc_feature (61)..(61): /note="Nucleotide may be methylated to form 5-methylcytosine"
accttgtgatccgcccaccttggcctcccaaagtgctaggattacaggcgtgagccactgcgcccggccaaaagcatgaattttggagtcaagacaggccctggtcaaatcctggggcagtg

SEQ ID NO: 5470 - DNA, 122 bp, Homo sapiens
  misc_feature (61)..(62): /note="This region represents a CpG dinucleotide"
  misc_feature (61)..(61): /note="Nucleotide may be methylated to form 5-methylcytosine"
aattaaccgtggctaaacaactatgtagaaaaacaggaaagtgcttacaaaataatgttgcgttcaagaaaattagagatagtgatttcatgtttataaccagtatatgtggatatatggtt

SEQ ID NO: 5471 - DNA, 122 bp, Homo sapiens
  misc_feature (61)..(62): /note="This region represents a CpG dinucleotide"
  misc_feature (61)..(61): /note="Nucleotide may be methylated to form 5-methylcytosine"
aaggatctggaaaaggcagtttcctgagcccatgttattcccccagccatccaggccctgcgctctgtgctcaatgccttctctgtggtgaaccggaaaaacatgtttgtttaccaggagcg

SEQ ID NO: 5472 - DNA, 122 bp, Homo sapiens
  misc_feature (61)..(62): /note="This region represents a CpG dinucleotide"
  misc_feature (61)..(61): /note="Nucleotide may be methylated to form 5-methylcytosine"
ttcccaatatacccaagcattgtttgcaggttaaaaataccatctggctaaatcctgctgcgttgggctggggatttgggcctggctgcctatgtgtgaaaatcattgctgaaaattcttca

SEQ ID NO: 5473 - DNA, 122 bp, Homo sapiens
  misc_feature (61)..(62): /note="This region represents a CpG dinucleotide"
  misc_feature (61)..(61): /note="Nucleotide may be methylated to form 5-methylcytosine"
ctctgtcaggaggattccggatgatttagtcacaaaacagtgactagaacaaaatccttacgcatgtacatacttctgattatgaaagccaattatgcttgttgggaaatttttaagtaagc

SEQ ID NO: 5474 - DNA, 122 bp, Homo sapiens
  misc_feature (61)..(62): /note="This region represents a CpG dinucleotide"
  misc_feature (61)..(61): /note="Nucleotide may be methylated to form 5-methylcytosine"
gccccataaagtctggcctcaaggctgcagcccatttggaaaacgttttaatttcacttgcgtgttttttcaatttgattattaagtgccgtttacacatggacggggaaagcctgttttca

SEQ ID NO: 5475 - DNA, 122 bp, Homo sapiens
  misc_feature (61)..(62): /note="This region represents a CpG dinucleotide"
  misc_feature (61)..(61): /note="Nucleotide may be methylated to form 5-methylcytosine"
gcattaggacagaagtcctcaaaaggaactaaaatgttgaaacatgctcatctggggaaacgggatcagagaaagaagatgtatcatgctcagtcacagaaagtcaccacatacttttcttc

SEQ ID NO: 5476 - DNA, 122 bp, Homo sapiens
  misc_feature (61)..(62): /note="This region represents a CpG dinucleotide"
  misc_feature (61)..(61): /note="Nucleotide may be methylated to form 5-methylcytosine"
gttgtgacttatctatcaacaaaactaaacaaacaaagatccttttcaaaatgccatgcccgtaagcacactgggcagacctgcagagacaggaaaggggccaggtccccacaagccctgca

SEQ ID NO: 5477 - DNA, 122 bp, Homo sapiens
  misc_feature (61)..(62): /note="This region represents a CpG dinucleotide"
  misc_feature (61)..(61): /note="Nucleotide may be methylated to form 5-methylcytosine"
agggcctatatgtgttgaacacaagatacttacctgtgactgtttctaatcccactatggcgtctccaaatgactcatgtgctagcttctcacattttgaataagtgtgcactgaatgtcat

SEQ ID NO: 5478 - DNA, 122 bp, Homo sapiens
  misc_feature (61)..(62): /note="This region represents a CpG dinucleotide"
  misc_feature (61)..(61): /note="Nucleotide may be methylated to form 5-methylcytosine"
ggaaatgactaccctgtggtcgaccacagcctctgatgaccaaaacccactttgtgcaggcggtgctgcgaccaggctcgatctgtcatcgagaacattctgctcccaacctggcacggcat

SEQ ID NO: 5479 - DNA, 122 bp, Homo sapiens
  misc_feature (61)..(62): /note="This region represents a CpG dinucleotide"
  misc_feature (61)..(61): /note="Nucleotide may be methylated to form 5-methylcytosine"
tcatttgtaaggttttaggtgagccactcttacatcatccaggtttgccttagctggttacgtaagaggccacatggtgaacataatccaagctttaaatacttcaaactgtaagaataaat

SEQ ID NO: 5480 - DNA, 122 bp, Homo sapiens
  misc_feature (61)..(62): /note="This region represents a CpG dinucleotide"
  misc_feature (61)..(61): /note="Nucleotide may be methylated to form 5-methylcytosine"
cagagtaccaaattcctttcttgcattgttttgcatcatgcaagcttctgatggattgtacgctcctagatagtgatagtgcattcaacactgtgctatatacagaataagcttttgaaaga

SEQ ID NO: 5481 - DNA, 122 bp, Homo sapiens
  misc_feature (61)..(62): /note="This region represents a CpG dinucleotide"
  misc_feature (61)..(61): /note="Nucleotide may be methylated to form 5-methylcytosine"
gagtcttggctattattgatgattttgcattgtcatatacattttcaagccaaatccaatcggttagtccagttccactataaaccctgttgggattacattgattctatagagcagtactg

SEQ ID NO: 5482 - DNA, 122 bp, Homo sapiens
  misc_feature (61)..(62): /note="This region represents a CpG dinucleotide"
  misc_feature (61)..(61): /note="Nucleotide may be methylated to form 5-methylcytosine"
ctgatttctcagaagatcagataaacaatgtggttttggtctgatgatgtggaatcttagcgtaagtggctccattttgattttgtccgttctgttggggctcagcccaaaacaatgacctc

SEQ ID NO: 5483 - DNA, 122 bp, Homo sapiens
  misc_feature (61)..(62): /note="This region represents a CpG dinucleotide"
  misc_feature (61)..(61): /note="Nucleotide may be methylated to form 5-methylcytosine"
taactcagcatgttcccggccacatcccggtgaaccatgcagcctaactcaccacgttcccggccacacagggccaagaacagcccaggcaatgttaaggagcattgcatggaggagccact

SEQ ID NO: 5484 - DNA, 122 bp, Homo sapiens
  misc_feature (61)..(62): /note="This region represents a CpG dinucleotide"
  misc_feature (61)..(61): /note="Nucleotide may be methylated to form 5-methylcytosine"
ctggtcagctctgagtcattcccttatcaggcactgatgaggaggcctgctccttgttagcgggaagggagattggccagatagttgccatgcacacaaagccccaataggcagctctgttt

SEQ ID NO: 5485 - DNA, 122 bp, Homo sapiens
  misc_feature (61)..(62): /note="This region represents a CpG dinucleotide"
  misc_feature (61)..(61): /note="Nucleotide may be methylated to form 5-methylcytosine"
aatctgataggattggtgtcttcataagaacagacttgctctctctctgtggtcacatgacgacacagtgagcagacagccttctgcaagccaggaagagcaccctcactaacaacctaatt

SEQ ID NO: 5486 - DNA, 122 bp, Homo sapiens
  misc_feature (61)..(62): /note="This region represents a CpG dinucleotide"
  misc_feature (61)..(61): /note="Nucleotide may be methylated to form 5-methylcytosine"
gtggagctcagatattttaaaggatgagttacagtgtacttaagttctctagcacagttgcggttaaagagctatttgaaacagtaagaatgaaatccctgggtaaataggcttcagggagg

SEQ ID NO: 5487 - DNA, 122 bp, Homo sapiens
  misc_feature (61)..(62): /note="This region represents a CpG dinucleotide"
  misc_feature (61)..(61): /note="Nucleotide may be methylated to form 5-methylcytosine"
gaatccaacagcctcgcccggaactgtggctgcaaggggatctgtaaaacacagtattgccgcatttgtattttaggttctaaaatacaggaaaataaacaaaaggaggtgagaatggaagc

SEQ ID NO: 5488 - DNA, 122 bp, Homo sapiens
  misc_feature (61)..(62): /note="This region represents a CpG dinucleotide"
  misc_feature (61)..(61): /note="Nucleotide may be methylated to form 5-methylcytosine"
gttgaatgaataaacttccattaaaggatatcctttgttttagtctctctaaggctctaccggatgactgaaacactaaactcaaggtattttgtaaataagcaacaatggcctaatgagtc

SEQ ID NO: 5489 - DNA, 122 bp, Homo sapiens
  misc_feature (61)..(62): /note="This region represents a CpG dinucleotide"
  misc_feature (61)..(61): /note="Nucleotide may be methylated to form 5-methylcytosine"
ccttgaaccttaattcctcagtacacttgagtataaaatacttttgagtcatatttcaaccgacaggctaaataagaggaggttttgatggctgtgagcagttgtgtggttcagagcagaga

SEQ ID NO: 5490 - DNA, 122 bp, Homo sapiens
  misc_feature (61)..(62): /note="This region represents a CpG dinucleotide"
  misc_feature (61)..(61): /note="Nucleotide may be methylated to form 5-methylcytosine"
gaagggctagtcctgagctttggaaatgagcatgctcactcactgactcgcattctctcacgtgcacacactctctctctctctctcaggctggattggccagaccaattggaggaacttgc

SEQ ID NO: 5491 - DNA, 122 bp, Homo sapiens
  misc_feature (61)..(62): /note="This region represents a CpG dinucleotide"
  misc_feature (61)..(61): /note="Nucleotide may be methylated to form 5-methylcytosine"
ccactacagtttcatcagtaaaatggggcggtaacattacctccctcccagagccacagacgggattaaatgagctaaggatgaaaagggcctggcactctgacaatcccataccactagga

SEQ ID NO: 5492 - DNA, 122 bp, Homo sapiens
  misc_feature (61)..(62): /note="This region represents a CpG dinucleotide"
  misc_feature (61)..(61): /note="Nucleotide may be methylated to form 5-methylcytosine"
cattaaagagaaagggtacgttgaaagtgggattgcatagatttcccatgaccactgccacgctttgaagggaaactgctcagctgagcactgcttcctggaatgagcaaggccatctgccc

SEQ ID NO: 5493 - DNA, 122 bp, Homo sapiens
  misc_feature (61)..(62): /note="This region represents a CpG dinucleotide"
  misc_feature (61)..(61): /note="Nucleotide may be methylated to form 5-methylcytosine"
accaagaattcctgaattccaattctggttttgttactaattcttattatccattctcctcgcaccatcccccacccagtttttctttgtctctttttctcacgggaaacaccatgtgattt

SEQ ID NO: 5494 - DNA, 122 bp, Homo sapiens
  misc_feature (61)..(62): /note="This region represents a CpG dinucleotide"
  misc_feature (61)..(61): /note="Nucleotide may be methylated to form 5-methylcytosine"
ctcccgtgactcagtgacatcaggttggtccacatcctagcagttctcttggtgttcctgcgtgatcaaaggatgactgccacaccccagcctgctgacctcagccctggcgtgggcatagg

SEQ ID NO: 5495 - DNA, 122 bp, Homo sapiens
  misc_feature (61)..(62): /note="This region represents a CpG dinucleotide"
  misc_feature (61)..(61): /note="Nucleotide may be methylated to form 5-methylcytosine"
taactacaattccagtttttctctctctgagaatggattgctttggctggggattactcacggtgaacttgctttgcggggagagttgccgactgtcttaattacattttggtaatctcctt

SEQ ID NO: 5496 - DNA, 122 bp, Homo sapiens
  misc_feature (61)..(62): /note="This region represents a CpG dinucleotide"
  misc_feature (61)..(61): /note="Nucleotide may be methylated to form 5-methylcytosine"
actgtgaagtgttacacaatcttctcttttaggcaagcctggccattgtgacacccagtgcgacaggcaggggttgtaagttgcatcatagcaccttggagcacttgctcaaggtaccaagt

SEQ ID NO: 5497 - DNA, 122 bp, Homo sapiens
  misc_feature (61)..(62): /note="This region represents a CpG dinucleotide"
  misc_feature (61)..(61): /note="Nucleotide may be methylated to form 5-methylcytosine"
cagatggctaccgcccaaggtgatgtatgactaccactacttgagagacacgatgctgaacgcttccaaattccagaccaagggaactatgaaaaataagtgttgtttcaagccactaaatt

SEQ ID NO: 5498 - DNA, 122 bp, Homo sapiens
  misc_feature (61)..(62): /note="This region represents a CpG dinucleotide"
  misc_feature (61)..(61): /note="Nucleotide may be methylated to form 5-methylcytosine"
atcacattggaaacaaacagacacggtatactcaggattatgcaaattactgacagcctacgtttaacttctttcagctccactcaaaaaaaagaaagtcctaatgcaagtaattgaaagtg

SEQ ID NO: 5499 - DNA, 122 bp, Homo sapiens
  misc_feature (61)..(62): /note="This region represents a CpG dinucleotide"
  misc_feature (61)..(61): /note="Nucleotide may be methylated to form 5-methylcytosine"
aagcgctggtcccacgccagccagaaaccaccagctgctcgtcccatgtgaaacaggcagcgctgtcccaagccctcattaagaaaggagaattaaggaagcaattcccgtgattcccacga

SEQ ID NO: 5500 - DNA, 122 bp, Homo sapiens
  misc_feature (61)..(62): /note="This region represents a CpG dinucleotide"
  misc_feature (61)..(61): /note="Nucleotide may be methylated to form 5-methylcytosine"
gcaaggtggagttgcaccagctcacaagatggatagacagagctgggggaagtgtcccagcgggtttttgcagtctgtcagaggagctgcagctgtaaccacccatctgtgcatccttggct

SEQ ID NO: 5501 - DNA, 122 bp, Homo sapiens
  misc_feature (61)..(62): /note="This region represents a CpG dinucleotide"
  misc_feature (61)..(61): /note="Nucleotide may be methylated to form 5-methylcytosine"
cctagaaagtaccaagtctgtagttgcaaggtgattacacagcatttgcatttgggcagccgggtggaaggatgattcagaatgagatacttgcttttgttcgcaaaacagatgcgatgtgc

SEQ ID NO: 5502 - DNA, 122 bp, Homo sapiens
  misc_feature (61)..(62): /note="This region represents a CpG dinucleotide"
  misc_feature (61)..(61): /note="Nucleotide may be methylated to form 5-methylcytosine"
cacacttgacagaatcactgcctgattcttctttagatgcaatgagtcacaccacagattcgtctgggtcatttcagactccaggaaaatgtgtcactcgatttgtttccgagcaatgtttt

SEQ ID NO: 5503 - DNA, 122 bp, Homo sapiens
  misc_feature (61)..(62): /note="This region represents a CpG dinucleotide"
  misc_feature (61)..(61): /note="Nucleotide may be methylated to form 5-methylcytosine"
gggaagatgacttcactgggagctgagatgacctcactgggcgccctccttcagcagatgcgaggacaggcccacaggcctaaagtcaattagaggcagatttccaagcagaatctacttct

SEQ ID NO: 5504 - DNA, 122 bp, Homo sapiens
  misc_feature (61)..(62): /note="This region represents a CpG dinucleotide"
  misc_feature (61)..(61): /note="Nucleotide may be methylated to form 5-methylcytosine"
aacttccctccacgaaaggcataatttaggggagacaggcaggttaattactaactatcacgccaggctgaatgccatggatgctataataagtgtacaaactacatggtggggatgctggg

SEQ ID NO: 5505 - DNA, 122 bp, Homo sapiens
  misc_feature (61)..(62): /note="This region represents a CpG dinucleotide"
  misc_feature (61)..(61): /note="Nucleotide may be methylated to form 5-methylcytosine"
acttatcctgacaatccaactcaagtgttctttgctctgtgaggctttcctcattctccacgttgattgaggaactcccttctctttgcttccaaggactttgtacacaacctgatgacagt

SEQ ID NO: 5506 - DNA, 122 bp, Homo sapiens
  misc_feature (61)..(62): /note="This region represents a CpG dinucleotide"
  misc_feature (61)..(61): /note="Nucleotide may be methylated to form 5-methylcytosine"
tgcaaagcgctgtggttggtgggatattttgtttgtgtttaaaaagtgaagtcttcctcccggcccgtgtttcaggcacggcaacctcacgtgctggttcatctacatttttaagctgaata

SEQ ID NO: 5507 - DNA, 122 bp, Homo sapiens
  misc_feature (61)..(62): /note="This region represents a CpG dinucleotide"
  misc_feature (61)..(61): /note="Nucleotide may be methylated to form 5-methylcytosine"
gaggaggaactgctgagggcagggccatgagctcagagctggggacaatggccctgctatcggggcacttccacaatggctgctcatcagtcctggcagagactaaagggcagacttttttt

SEQ ID NO: 5508 - DNA, 122 bp, Homo sapiens
  misc_feature (61)..(62): /note="This region represents a CpG dinucleotide"
  misc_feature (61)..(61): /note="Nucleotide may be methylated to form 5-methylcytosine"
agagaaacctattaatgggtctgacttgatttaaattagccacagcaagatcaaaccaatcggaagatcacattccttccattaagtactgatgactaactcccaagacaaaacacttctaa

SEQ ID NO: 5509 - DNA, 122 bp, Homo sapiens
  misc_feature (61)..(62): /note="This region represents a CpG dinucleotide"
  misc_feature (61)..(61): /note="Nucleotide may be methylated to form 5-methylcytosine"
ttgccccactgcgcatgtcccttgcagtcaaaggtcctgccctacttttcctaacacacacgcacacacacaccctttccggttccttctcctcggagcaggtaaattacttggctcaggtt

SEQ ID NO: 5510 - DNA, 122 bp, Homo sapiens
  misc_feature (61)..(62): /note="This region represents a CpG dinucleotide"
  misc_feature (61)..(61): /note="Nucleotide may be methylated to form 5-methylcytosine"
cctgcccttcctgttgtggccatctctatcacacagagctgggtcctgacttctgtttgccgtgtaggttttcagtaactgacagaatacaatagcagctaccattgattgctgcttactaa

SEQ ID NO: 5511 - DNA, 122 bp, Homo sapiens
  misc_feature (61)..(62): /note="This region represents a CpG dinucleotide"
  misc_feature (61)..(61): /note="Nucleotide may be methylated to form 5-methylcytosine"
ctcttatctgcctgccagagaagacagctactggtattgacagttctcctgcaccgagggcggccagccggctggggtgctgactctcagctctcttgtttttgtgcctgccaggcactcgc

SEQ ID NO: 5512 - DNA, 122 bp, Homo sapiens
  misc_feature (61)..(62): /note="This region represents a CpG dinucleotide"
  misc_feature (61)..(61): /note="Nucleotide may be methylated to form 5-methylcytosine"
aaatgatgtaacttgtgccagtgttatgggaagttaaagatccatctacaagggttaatacgcccttgtttgttacatgagtaggaggatttcacccatttagattagctcagcatttaaag

SEQ ID NO: 5513 - DNA, 122 bp, Homo sapiens
  misc_feature (61)..(62): /note="This region represents a CpG dinucleotide"
  misc_feature (61)..(61): /note="Nucleotide may be methylated to form 5-methylcytosine"
acctgtaatcccagcactttgggaggcccgaggttggcagatcacttgaggttagcggctcgagaccagcctggccaacatggtgaaaccctgtctctactaaaaatacaaaaattacctgg

SEQ ID NO: 5514 - DNA, 122 bp, Homo sapiens
  misc_feature (61)..(62): /note="This region represents a CpG dinucleotide"
  misc_feature (61)..(61): /note="Nucleotide may be methylated to form 5-methylcytosine"
gtaggtttgttaccaccagcatcaccacaaacacgtgagtaatgtgttgtgacattgcaacggctgtgtcaccagacgataggaatttttcaattccattataatcttacggaaccactgtc

SEQ ID NO: 5515 - DNA, 122 bp, Homo sapiens
  misc_feature (61)..(62): /note="This region represents a CpG dinucleotide"
  misc_feature (61)..(61): /note="Nucleotide may be methylated to form 5-methylcytosine"
tttgaattgctttcacaaagctatacaatctttgatgtgggtacaccctctgcctcctggcggaagcataaacaaaaagaaaggatttccctcaaattaatcccactggattcctacaaatt

SEQ ID NO: 5516 - DNA, 122 bp, Homo sapiens
  misc_feature (61)..(62): /note="This region represents a CpG dinucleotide"
  misc_feature (61)..(61): /note="Nucleotide may be methylated to form 5-methylcytosine"
ctttcagtcccatctcgtcttctgctcagtgaacagtttttgcactggcaggagccaggtcgaacagttccataaactgcttttttatggttctcagtagagcagaggtttgaaattagaga

SEQ ID NO: 5517 - DNA, 122 bp, Homo sapiens
  misc_feature (61)..(62): /note="This region represents a CpG dinucleotide"
  misc_feature (61)..(61): /note="Nucleotide may be methylated to form 5-methylcytosine"
atacagtcactatctgcacctgtcctgccctgcaggcctggagcctcctgagggcaggtccggtacaggtttaacccatgccctgatgctcagtcagcccagaggctggcacagaacagtgc

SEQ ID NO: 5518 - DNA, 122 bp, Homo sapiens
  misc_feature (61)..(62): /note="This region represents a CpG dinucleotide"
  misc_feature (61)..(61): /note="Nucleotide may be methylated to form 5-methylcytosine"
tcggctcctcggaggacctgtccagtgactcggagagtcatctcccagaagagccagctccgctgtcgccccagcaggccttcaggaggcgagcaaacaccctgagtcacttccccatcgaa

SEQ ID NO: 5519 - DNA, 122 bp, Homo sapiens
  misc_feature (61)..(62): /note="This region represents a CpG dinucleotide"
  misc_feature (61)..(61): /note="Nucleotide may be methylated to form 5-methylcytosine"
ctggaatccacacttacaactgtgtgaccttgggcaagtgtattcacttctctgagactccgtgtaaagtggcgttaggggagacagaaaatccacctcccggctgggcgcggtggctcaca

SEQ ID NO: 5520 - DNA, 122 bp, Homo sapiens
  misc_feature (61)..(62): /note="This region represents a CpG dinucleotide"
  misc_feature (61)..(61): /note="Nucleotide may be methylated to form 5-methylcytosine"
ctccagcctgggtgacagagcaagactctcagccaaaaaaaaaaaaaaaaagaagtgaagcggggaaaaaaacaacagaataaaccaaacaaataaggaaaaataggccacgtgtggtggct

SEQ ID NO: 5521 - DNA, 122 bp, Homo sapiens
  misc_feature (61)..(62): /note="This region represents a CpG dinucleotide"
  misc_feature (61)..(61): /note="Nucleotide may be methylated to form 5-methylcytosine"
agctgcaccgttttacattctcactagtaatgtatgacggcttcaatttctccacatcctcgccaacatttcgtgtagctcttattgtttttgttaaagtaattctagtgggtgtgatgtag

SEQ ID NO: 5522 - DNA, 122 bp, Homo sapiens
  misc_feature (61)..(62): /note="This region represents a CpG dinucleotide"
  misc_feature (61)..(61): /note="Nucleotide may be methylated to form 5-methylcytosine"
ctccccagagcttgtgccctgactcactgactacgtcagcctcctcccaaggcataaatccgatcaacttttggttcattgtattaagaaagacttatgaagacaagggaaatgatgaaaga

SEQ ID NO: 5523 - DNA, 122 bp, Homo sapiens
  misc_feature (61)..(62): /note="This region represents a CpG dinucleotide"
  misc_feature (61)..(61): /note="Nucleotide may be methylated to form 5-methylcytosine"
agtccatccccctgaggtgctaagccattctcatcctgctctgctagctgggaaatgtcccgtcaggtgccccacctcctgtttctatctgtcaaaaccctcttcacttgtcaagtcccagc

SEQ ID NO: 5524 - DNA, 122 bp, Homo sapiens
  misc_feature (61)..(62): /note="This region represents a CpG dinucleotide"
  misc_feature (61)..(61): /note="Nucleotide may be methylated to form 5-methylcytosine"
ttgccatcttaactgcatgagtgtgtaatgctgtaagtgaccctgtggcaaaaagacaagcgcagagtgggaatgactcagcttgggccctgatcatactacatccaggtgtgataatgaat

SEQ ID NO: 5525 - DNA, 122 bp, Homo sapiens
  misc_feature (61)..(62): /note="This region represents a CpG dinucleotide"
  misc_feature (61)..(61): /note="Nucleotide may be methylated to form 5-methylcytosine"
gggatttagggagcatccgtatcagtttattgtgactgtattatgtaggcgtcattgatacgatgcaaactcactttaaatgccaacaggcatcagcaggtggagatagtaaggttagcgcc

SEQ ID NO: 5526 - DNA, 122 bp, Homo sapiens
  misc_feature (61)..(62): /note="This region represents a CpG dinucleotide"
  misc_feature (61)..(61): /note="Nucleotide may be methylated to form 5-methylcytosine"
caggaaacaaaatgcactcattcaatttcttcaagttgagtggagacctcctggatgccacgtgtcagctttacctgctagaaacacacgctcacctcgctgtccaagaccctggaaagggg

SEQ ID NO: 5527 - DNA, 122 bp, Homo sapiens
  misc_feature (61)..(62): /note="This region represents a CpG dinucleotide"
  misc_feature (61)..(61): /note="Nucleotide may be methylated to form 5-methylcytosine"
aaccttcagatggtaaagtctctgccagctgtggctacctgcctgattctggggacggggcgctttgatggagatcctgagctgtctggaagtgaatttttctctgacagaatgtccttttg

SEQ ID NO: 5528 - DNA, 122 bp, Homo sapiens
  misc_feature (61)..(62): /note="This region represents a CpG dinucleotide"
  misc_feature (61)..(61): /note="Nucleotide may be methylated to form 5-methylcytosine"
atataaagggaactgggaatgaaaaggtttgactgagttgacatcccactgacaactatacgatagcagtagggttgtgaattctggtgagtcattcattagctgtcaatctctgtcatagg

SEQ ID NO: 5529 - DNA, 122 bp, Homo sapiens
  misc_feature (61)..(62): /note="This region represents a CpG dinucleotide"
  misc_feature (61)..(61): /note="Nucleotide may be methylated to form 5-methylcytosine"
ggtactaagcgttagtgtcgtgttaggacacatattgcttttcatccacagttcctggctcgtaactcccatagcccttgttccagtcttttgttgtaatgttgggtggggttaggcctcag

SEQ ID NO: 5530 - DNA, 122 bp, Homo sapiens
  misc_feature (61)..(62): /note="This region represents a CpG dinucleotide"
  misc_feature (61)..(61): /note="Nucleotide may be methylated to form 5-methylcytosine"
tttcatatggctgttcataactttccagttccacccttactaaccctgggtgactcctcacgactccaggaaacttaggttgtgaaacactgctctgaagccataagctgtctagacctggg

SEQ ID NO: 5531 - DNA, 122 bp, Homo sapiens
  misc_feature (61)..(62): /note="This region represents a CpG dinucleotide"
  misc_feature (61)..(61): /note="Nucleotide may be methylated to form 5-methylcytosine"
aatcaacttgaatgacagtctaggctgcaaggacttcaagccctagtgctgtgctgggctcggaactagtggacttggagagcacatgccccaatgagacatcagccagggcagctaaagga

SEQ ID NO: 5532 - DNA, 122 bp, Homo sapiens
  misc_feature (61)..(62): /note="This region represents a CpG dinucleotide"
  misc_feature (61)..(61): /note="Nucleotide may be methylated to form 5-methylcytosine"
agaggtgaaaataaaagtatatgactggctgagtgtaacaaaactacatgacaggaattacgactcacatacagcctggagtcacctttctgttacaccctgttcatcagtgatggaaaggc

SEQ ID NO: 5533 - DNA, 122 bp, Homo sapiens
  misc_feature (61)..(62): /note="This region represents a CpG dinucleotide"
  misc_feature (61)..(61): /note="Nucleotide may be methylated to form 5-methylcytosine"
ttgctggtatattcgaaatatgttcaccagatctacctatagctccacctgaaaaaattccgcaccgcttcccaatttatgaagggattgcacaataatttaacacaaattctgtcaagcat

SEQ ID NO: 5534 - DNA, 122 bp, Homo sapiens
  misc_feature (61)..(62): /note="This region represents a CpG dinucleotide"
  misc_feature (61)..(61): /note="Nucleotide may be methylated to form 5-methylcytosine"
aggaggccgggcgcggtgtctcacgcctgtaatcccagcactttgggaggccgaggccggcggatcagctgagttcgggagtttgacaacagcttggccaacagtgaaaccccgtctctact

SEQ ID NO: 5535 - DNA, 122 bp, Homo sapiens
  misc_feature (61)..(62): /note="This region represents a CpG dinucleotide"
  misc_feature (61)..(61): /note="Nucleotide may be methylated to form 5-methylcytosine"
gtcaccctccctttatcctctttgcccaaagcttcatgtgacagattaaattcttgtaatcgcttttcctgtgtcattcctctaatccttttaccattctattttgcctttgtggtgtttat

SEQ ID NO: 5536 - DNA, 122 bp, Homo sapiens
  misc_feature (61)..(62): /note="This region represents a CpG dinucleotide"
  misc_feature (61)..(61): /note="Nucleotide may be methylated to form 5-methylcytosine"
tgtagccaatgaggcaggatgaaaatcagaaagagcggtgtcccagaagccaaggggaaacgacattttgatagggaaggagttatctgttgcctgtgtcaaatgtggctgaagatccagtt

SEQ ID NO: 5537 - DNA, 122 bp, Homo sapiens
  misc_feature (61)..(62): /note="This region represents a CpG dinucleotide"
  misc_feature (61)..(61): /note="Nucleotide may be methylated to form 5-methylcytosine"
aatctgctactgtattcaacactctaagggagtgaggagtttacttgattcagcggtaaacgcagagctctggtaggaggtattaatactacttatcagcaaaggttactagcttgcaaaat

SEQ ID NO: 5538 - DNA, 122 bp, Homo sapiens
  misc_feature (61)..(62): /note="This region represents a CpG dinucleotide"
  misc_feature (61)..(61): /note="Nucleotide may be methylated to form 5-methylcytosine"
aaatctgagttaactactaattgctcctcggtataaatcaagcttatgaagccagagtcccgtgcacgggtcctgttctgccatggtgtgtcgctgcgatgcgtgaaggagatcctcactgt

SEQ ID NO: 5539 - DNA, 122 bp, Homo sapiens
  misc_feature (61)..(62): /note="This region represents a CpG dinucleotide"
  misc_feature (61)..(61): /note="Nucleotide may be methylated to form 5-methylcytosine"
ttctgattcagtaggactggaacagggcttctgagcctgcatttctaaccagctggtccgcggactacaccaagagttgcacaactgcaggcactaatgactctttattgattatttaaccc

SEQ ID NO: 5540 - DNA, 122 bp, Homo sapiens
  misc_feature (61)..(62): /note="This region represents a CpG dinucleotide"
  misc_feature (61)..(61): /note="Nucleotide may be methylated to form 5-methylcytosine"
tgcacaccatgacggttgtgcatgattcatttattagggagacagaccagatgcgtgggacggccctgctcaccatcaaggcagatctgtgggcagacagagcattgggttctgctgtgggt

SEQ ID NO: 5541 - DNA, 122 bp, Homo sapiens
  misc_feature (61)..(62): /note="This region represents a CpG dinucleotide"
  misc_feature (61)..(61): /note="Nucleotide may be methylated to form 5-methylcytosine"
gccaggctcactggagtggaagcgtgcactctcatctgtgaggctaggctgttccctggccgtcacctcaccctttcatctctgcttacctgcatctggtgtcaagaatcagaatgggagag

SEQ ID NO: 5542 - DNA, 122 bp, Homo sapiens
  misc_feature (61)..(62): /note="This region represents a CpG dinucleotide"
  misc_feature (61)..(61): /note="Nucleotide may be methylated to form 5-methylcytosine"
tggattagagaatagtattggatcaatgctgagtttcccgtgtctaccatgcaggagttacgtaagtcttgcactgtaaaagagcatccttgttcttaggaaatacaccctgaagtatttag

SEQ ID NO: 5543 - DNA, 122 bp, Homo sapiens
  misc_feature (61)..(62): /note="This region represents a CpG dinucleotide"
  misc_feature (61)..(61): /note="Nucleotide may be methylated to form 5-methylcytosine"
agtcagtgccagttaccaccccaaagctccctgaaagcacattacaatgagggtgagtcccggccaggctgaagcattgagcttctttccagtcccaagcactgtcagagactagtgtggtt

SEQ ID NO: 5544 - DNA, 122 bp, Homo sapiens
  misc_feature (61)..(62): /note="This region represents a CpG dinucleotide"
  misc_feature (61)..(61): /note="Nucleotide may be methylated to form 5-methylcytosine"
cccggtttataggaagtggagctgctgtctcagcctaggcatgtctgcctctttgcccttcgccatactgcttctcctctcctagccatgatggtgggagaatgcactgaaatgatgaatga

SEQ ID NO: 5545 - DNA, 122 bp, Homo sapiens
  misc_feature (61)..(62): /note="This region represents a CpG dinucleotide"
  misc_feature (61)..(61): /note="Nucleotide may be methylated to form 5-methylcytosine"
ctgggagaagcgtttctgttcgcggaacctgaacttcaggttcggagacgaggaggtggccgtcccccgtcccgcccccaacccgatgagggcgttgtcagccagggggcctgccaggtgtt

SEQ ID NO: 5546 - DNA, 122 bp, Homo sapiens
  misc_feature (61)..(62): /note="This region represents a CpG dinucleotide"
  misc_feature (61)..(61): /note="Nucleotide may be methylated to form 5-methylcytosine"
gtgatgcaactgtgacaatagctcacagatacacccccaaagagcaactgaagattcatacgcagctggcagatattatcatagttgctgcaggtaagtccttagtgactgttattttttgg

SEQ ID NO: 5547 - DNA, 122 bp, Homo sapiens
  misc_feature (61)..(62): /note="This region represents a CpG dinucleotide"
  misc_feature (61)..(61): /note="Nucleotide may be methylated to form 5-methylcytosine"
aaccagtgttattgattgactgaagaacactatgcatagattttgaggagcttaaagtgccgtaggtgtaattgcgaaatgcctttaacacattgcatatagaggtattttccacttagtac

SEQ ID NO: 5548 - DNA, 122 bp, Homo sapiens
  misc_feature (61)..(62): /note="This region represents a CpG dinucleotide"
  misc_feature (61)..(61): /note="Nucleotide may be methylated to form 5-methylcytosine"
ctatactttcataaaactggcaatacagtagatttgtttataccagcatcaccacaaatgcgtgagtaatgcattgtgccaagacagtataacaggtatgatgccactagctaataggaatt

SEQ ID NO: 5549 - DNA, 122 bp, Homo sapiens
  misc_feature (61)..(62): /note="This region represents a CpG dinucleotide"
  misc_feature (61)..(61): /note="Nucleotide may be methylated to form 5-methylcytosine"
gatcagtgcctgccatactgtcagcactagtcgttactattttcactggttgaacagacacgtgagttcacacatgacaccatctattgggatgagtcacgttgcttgctcaacaactttaa

SEQ ID NO: 5550 - DNA, 122 bp, Homo sapiens
  misc_feature (61)..(62): /note="This region represents a CpG dinucleotide"
  misc_feature (61)..(61): /note="Nucleotide may be methylated to form 5-methylcytosine"
gaatgaggctttccagtctgtcttgtggaaacagccaatattcccagccgtctctgagcacgacacaattacagtcatgtgttgcttaatgacagagatatgttctgaggaatgcaccttta

SEQ ID NO: 5551 - DNA, 122 bp, Homo sapiens
  misc_feature (61)..(62): /note="This region represents a CpG dinucleotide"
  misc_feature (61)..(61): /note="Nucleotide may be methylated to form 5-methylcytosine"
gaaacaaattctccagccctgagatgactgcagcctgggctgacagcttgacagcagcctcgtgagaggccctgagccagaattacccagctaaacccctcccagactgctgacccatagaa

SEQ ID NO: 5552 - DNA, 122 bp, Homo sapiens
  misc_feature (61)..(62): /note="This region represents a CpG dinucleotide"
  misc_feature (61)..(61): /note="Nucleotide may be methylated to form 5-methylcytosine"
tagaaggtcctgctggaaggcttgctctcaaacaacaaagacctatgaatgacactctgacgggtttggctttattcttaaaggcactaggattctgctatgtgtaaagtcgtaacatgatt

SEQ ID NO: 5553 - DNA, 122 bp, Homo sapiens
  misc_feature (61)..(62): /note="This region represents a CpG dinucleotide"
  misc_feature (61)..(61): /note="Nucleotide may be methylated to form 5-methylcytosine"
ctaaaaagaaataattcacaggaagatgccaggaagtttcaggaaacatcttatatctatcgtctgccaaaacacatgatctctttttttttttttttttttttttgagacggaatctcaca

SEQ ID NO: 5554 - DNA, 122 bp, Homo sapiens
  misc_feature (61)..(62): /note="This region represents a CpG dinucleotide"
  misc_feature (61)..(61): /note="Nucleotide may be methylated to form 5-methylcytosine"
cattccccagcaagggagaaataattcagattacatcctcctgctgttggatcagggcagcgcatttcaatttaagcccatacagccagagacaggttcatgtagaatggaataaattaata

SEQ ID NO: 5555 - DNA, 122 bp, Homo sapiens
  misc_feature (61)..(62): /note="This region represents a CpG dinucleotide"
  misc_feature (61)..(61): /note="Nucleotide may be methylated to form 5-methylcytosine"
tcctataccatgaaggcctcatacagaccaggagcctgaggcgccgcctgctgtcccgcacgctgccatctgagcccaggtggcctccagtgtagttacctcagcccacagcaaggcacagt

SEQ ID NO: 5556 - DNA, 122 bp, Homo sapiens
  misc_feature (61)..(62): /note="This region represents a CpG dinucleotide"
  misc_feature (61)..(61): /note="Nucleotide may be methylated to form 5-methylcytosine"
aacttgactagagatagacttcagtgtatgcaaaattgtattagagcttataggatagcacgtatttcatgctgttatcagagtagggaggttgatctagatttgcttattctttttagttg

SEQ ID NO: 5557 - DNA, 122 bp, Homo sapiens
  misc_feature (61)..(62): /note="This region represents a CpG dinucleotide"
  misc_feature (61)..(61): /note="Nucleotide may be methylated to form 5-methylcytosine"
gtgaatcccttttccccggcttcgctgtcaggcaggctctctccctgtggtactctgatccgttctcagacaggctcttggtgtggtaagcccttaaagcagtaactgcagtgggagagaga

SEQ ID NO: 5558 - DNA, 122 bp, Homo sapiens
  misc_feature (61)..(62): /note="This region represents a CpG dinucleotide"
  misc_feature (61)..(61): /note="Nucleotide may be methylated to form 5-methylcytosine"
taccctcatttgcttcatgcaacattcattctgacacgtattatgttagtcctcttgtaccgtagatgaaaaacctaacaaagccattttccaggcacgtttccaagtagagctctacatgt

SEQ ID NO: 5559 - DNA, 122 bp, Homo sapiens
  misc_feature (61)..(62): /note="This region represents a CpG dinucleotide"
  misc_feature (61)..(61): /note="Nucleotide may be methylated to form 5-methylcytosine"
tatgggcttacagacctgagccaccgtgtccagccggttgactctctgattagcctttcacggaatatacagtttacctgtgacaaaggtagaggaatagtcacttatgcctttgtctggct

SEQ ID NO: 5560 - DNA, 122 bp, Homo sapiens
  misc_feature (61)..(62): /note="This region represents a CpG dinucleotide"
  misc_feature (61)..(61): /note="Nucleotide may be methylated to form 5-methylcytosine"
ggaaaactaatgcacacttttttcatcatcattttctgaaatctatttttaaattctggacgtggttgaggacacagtgaatagtttcatatcctgcagctctggtattggtaggtggcttt

SEQ ID NO: 5561 - DNA, 122 bp, Homo sapiens
  misc_feature (61)..(62): /note="This region represents a CpG dinucleotide"
  misc_feature (61)..(61): /note="Nucleotide may be methylated to form 5-methylcytosine"
gaaataatttatcttttacagtaaaagtatagagtattacatcataaaatacattggctacggtgttagttcttggacatctggttctagattacagtgactcagtagagtttgtgatgatc

SEQ ID NO: 5562 - DNA, 122 bp, Homo sapiens
  misc_feature (61)..(62): /note="This region represents a CpG dinucleotide"
  misc_feature (61)..(61): /note="Nucleotide may be methylated to form 5-methylcytosine"
ggcagtgtggcccctgtgagtgtgcaatcctgttggggtagctggcaactgccctcaaaccgtctcggacctgtgcgctgggcttcgcatcctgccccgtcatgccttccccacaggcccag

SEQ ID NO: 5563 - DNA, 122 bp, Homo sapiens
  misc_feature (61)..(62): /note="This region represents a CpG dinucleotide"
  misc_feature (61)..(61): /note="Nucleotide may be methylated to form 5-methylcytosine"
gataggtcacgcaggatgaggactgagaactctgagagctgatcattaggtttagcagtgcgtttaagtcatcagtgactgacaagaacaactgcaggcgtgcatctgatggggatgggttc

SEQ ID NO: 5564 - DNA, 122 bp, Homo sapiens
  misc_feature (61)..(62): /note="This region represents a CpG dinucleotide"
  misc_feature (61)..(61): /note="Nucleotide may be methylated to form 5-methylcytosine"
taacattcaataaatggtgtcatgtactagtcattctacaacttgcttttctaacccttacgtttttgaattttacctttgctggaaatataactctagttcattaattccaatttaattca

SEQ ID NO: 5565 - DNA, 122 bp, Homo sapiens
  misc_feature (61)..(62): /note="This region represents a CpG dinucleotide"
  misc_feature (61)..(61): /note="Nucleotide may be methylated to form 5-methylcytosine"
aacatttgtcaccagaaatccactacttccctaacttgatcgacaacacttactgatgtacggatattgacacagtacaggtttaagtgagaggtaaagccagctggtcttctgggtcggtt

SEQ ID NO: 5566 - DNA, 122 bp, Homo sapiens
  misc_feature (61)..(62): /note="This region represents a CpG dinucleotide"
  misc_feature (61)..(61): /note="Nucleotide may be methylated to form 5-methylcytosine"
caagaggccttacctgggggggccagtgtgcagagggccctagagctgagaggccgcggacggagtaacagctggattctgaggacgtggaagaggccacaccacgcagcagaaggaaggag

SEQ ID NO: 5567 - DNA, 122 bp, Homo sapiens
  misc_feature (61)..(62): /note="This region represents a CpG dinucleotide"
  misc_feature (61)..(61): /note="Nucleotide may be methylated to form 5-methylcytosine"
ccctcagcggcggtggagcgtggactccggcgcctggcggggtaaggcccgcggcaagggcgctgcatccggacatcgctgcgtggtgcccagacgctggctcccgagaacgggcacgagcc

SEQ ID NO: 5568 - DNA, 122 bp, Homo sapiens
  misc_feature (61)..(62): /note="This region represents a CpG dinucleotide"
  misc_feature (61)..(61): /note="Nucleotide may be methylated to form 5-methylcytosine"
cgataagcctgtggtatttccagctcctgcatatcttgatgcagttgagtgagaatgaagcgattccacctctgaatgagcctggccagattgcccttgcctgaggcctcatctgagtcagc

SEQ ID NO: 5569 - DNA, 122 bp, Homo sapiens
  misc_feature (61)..(62): /note="This region represents a CpG dinucleotide"
  misc_feature (61)..(61): /note="Nucleotide may be methylated to form 5-methylcytosine"
actgacattctcaccttctttagggtagggcatctaaggccctggcagatgaagatgctacgaaagaagaggaatcaactcatcattaaggcatcatgagtcaaaggcgtcagctacatgca

SEQ ID NO: 5570 - DNA, 122 bp, Homo sapiens
  misc_feature (61)..(62): /note="This region represents a CpG dinucleotide"
  misc_feature (61)..(61): /note="Nucleotide may be methylated to form 5-methylcytosine"
cctaaggaaccctgtgcagggcctgcatcccggaaggcctccaccagcccgaacctggcccgtccgccctagatggggcaatcggcgtttctcccgggacagcctcctccctggcctcctgg

SEQ ID NO: 5571 - DNA, 122 bp, Homo sapiens
  misc_feature (61)..(62): /note="This region represents a CpG dinucleotide"
  misc_feature (61)..(61): /note="Nucleotide may be methylated to form 5-methylcytosine"
cccacccagcttgtcatggtttacttctgattggatataactagatgataacagggatcacgctgcatccattgaggagaaagatgattcaaccctctcgcgggctgctggggaatcgatat

SEQ ID NO: 5572 - DNA, 122 bp, Homo sapiens
  misc_feature (61)..(62): /note="This region represents a CpG dinucleotide"
  misc_feature (61)..(61): /note="Nucleotide may be methylated to form 5-methylcytosine"
atgcccttaaggcctgagaatattcgagacaaccatctggtcttttcccaagccaagcaccgcccttccttgactcactcccatggacccaggtatctccaggcagccacctcctgccctta

SEQ ID NO: 5573 - DNA, 122 bp, Homo sapiens
  misc_feature (61)..(62): /note="This region represents a CpG dinucleotide"
  misc_feature (61)..(61): /note="Nucleotide may be methylated to form 5-methylcytosine"
gaaacaccaagttgttatgcaaagccacaggagttaagaatttagacaaggccaacacttcgctaacaagattcacttagagtccaccagttaattgtcaactaagatctgctgagaatccc

SEQ ID NO: 5574 - DNA, 122 bp, Homo sapiens
  misc_feature (61)..(62): /note="This region represents a CpG dinucleotide"
  misc_feature (61)..(61): /note="Nucleotide may be methylated to form 5-methylcytosine"
ggcagccgagatgctttatggattgatccacgcccgctacatccttaccaaccgtggcatcgcccagatggtgaggcctctctgctcctacctgcctccttctgagcagtaagagacacagg

SEQ ID NO: 5575 - DNA, 122 bp, Homo sapiens
  misc_feature (61)..(62): /note="This region represents a CpG dinucleotide"
  misc_feature (61)..(61): /note="Nucleotide may be methylated to form 5-methylcytosine"
ccttgttcagtagaatcctgttaagtgggtttatcaagaatcctctacacttgatgtctccgcttagtgattttccattcactgaccccgaggaacttcgctccttggctatgaatcctgag

SEQ ID NO: 5576 - DNA, 122 bp, Homo sapiens
  misc_feature (61)..(62): /note="This region represents a CpG dinucleotide"
  misc_feature (61)..(61): /note="Nucleotide may be methylated to form 5-methylcytosine"
ttaaaaaatattctttgtcttttggataactttctaggcatatctccgttgtgtaatttacggcacttcctgcatttgggccacttagtgatgattttggtggatggtgatggcaaggttag

SEQ ID NO: 5577 - DNA, 122 bp, Homo sapiens
  misc_feature (61)..(62): /note="This region represents a CpG dinucleotide"
  misc_feature (61)..(61): /note="Nucleotide may be methylated to form 5-methylcytosine"
cataagagccaataatacactcagatctcataatctagagtgctgggccatcagctaatccgccctgccccacctgaacagtcatcaccaactgagcaggaatggagggatgcccagaagtc

SEQ ID NO: 5578 - DNA, 122 bp, Homo sapiens
  misc_feature (61)..(62): /note="This region represents a CpG dinucleotide"
  misc_feature (61)..(61): /note="Nucleotide may be methylated to form 5-methylcytosine"
cactgtctgtgttattctgcatatgtaattctgactcctccaagcagaagttagaattggcgcaaacctgctatcataacgctgtcaacaacactgcagatcgcaaagattaaacttaccct

SEQ ID NO: 5579 - DNA, 122 bp, Homo sapiens
  misc_feature (61)..(62): /note="This region represents a CpG dinucleotide"
  misc_feature (61)..(61): /note="Nucleotide may be methylated to form 5-methylcytosine"
atgatgccagagagagattactgtgaacaaagcaacaggatgtgaaataactggtgttttcgaaacaatgagacaaatttagggtggccggcatgaggcaaccaagagtggaatgggtgtgg

SEQ ID NO: 5580 - DNA, 122 bp, Homo sapiens
  misc_feature (61)..(62): /note="This region represents a CpG dinucleotide"
  misc_feature (61)..(61): /note="Nucleotide may be methylated to form 5-methylcytosine"
tctaagcttcagtttccctcatgcatgaagtggacacaatacacacacaaaaactgcttacgtgttcttagagttttgagatttgtagggaggtttcctgtttcttattgcttaatattggt

SEQ ID NO: 5581 - DNA, 122 bp, Homo sapiens
  misc_feature (61)..(62): /note="This region represents a CpG dinucleotide"
  misc_feature (61)..(61): /note="Nucleotide may be methylated to form 5-methylcytosine"
taaaaagaaaagttgcatatctctcactttaagtcaaaagctagatgtgattaagcttagcgggaaaggcatgttgaaagccaagacaggccagaacctagcctaggccacttgtaccgaac

SEQ ID NO: 5582 - DNA, 122 bp, Homo sapiens
  misc_feature (61)..(62): /note="This region represents a CpG dinucleotide"
  misc_feature (61)..(61): /note="Nucleotide may be methylated to form 5-methylcytosine"
cacttatccacagtgtgaatgttcagccactcctgttttttgtcactatctgaaactactcgtggcccctatttcctgtctggatcactggtgttttccatgacttaaccctggtgagctgt

SEQ ID NO: 5583 - DNA, 122 bp, Homo sapiens
  misc_feature (61)..(62): /note="This region represents a CpG dinucleotide"
  misc_feature (61)..(61): /note="Nucleotide may be methylated to form 5-methylcytosine"
agtgatgtgctcagggttgtactttgggaagatcactaggctctgactgtgtgcctgttgcgcccacaggcaactgcatgctccttgaggctgagaacttctgattcatcccagaatctccc

SEQ ID NO: 5584 - DNA, 122 bp, Homo sapiens
  misc_feature (61)..(62): /note="This region represents a CpG dinucleotide"
  misc_feature (61)..(61): /note="Nucleotide may be methylated to form 5-methylcytosine"
tctcttccaggttctcgcttatgtaaattctaattcacagtgccctggccccacatgtctcgtaaaccaggcctgatattgtaaaccttcgccattcacagagggttttagctttgcctttg

SEQ ID NO: 5585 - DNA, 122 bp, Homo sapiens
  misc_feature (61)..(62): /note="This region represents a CpG dinucleotide"
  misc_feature (61)..(61): /note="Nucleotide may be methylated to form 5-methylcytosine"
ctttggggccaggctcaaactgagaatttgtggacacctcagagtcccttgcctgatcgccggcctctgaccacagcctgtgcccagcacttcctgtcttctctcttgcagtctcagctcta

SEQ ID NO: 5586 - DNA, 122 bp, Homo sapiens
  misc_feature (61)..(62): /note="This region represents a CpG dinucleotide"
  misc_feature (61)..(61): /note="Nucleotide may be methylated to form 5-methylcytosine"
cattatgctaagtgaaagtaggcagtcacaaaaaaaacaaatattagtattccatatacacgaaaggttcagaataggcaaatatattaagaatgcatattggttgttgcttcgtgctactg

SEQ ID NO: 5587 - DNA, 122 bp, Homo sapiens
  misc_feature (61)..(62): /note="This region represents a CpG dinucleotide"
  misc_feature (61)..(61): /note="Nucleotide may be methylated to form 5-methylcytosine"
accatctgatctgctcattctgttgttcaaatggggaaacagaggcccagtgaggcctagcggcttgtttaaggtcacgctatggaagaagtgacttgaactcacttctgattctgaggtga

SEQ ID NO: 5588 - DNA, 122 bp, Homo sapiens
  misc_feature (61)..(62): /note="This region represents a CpG dinucleotide"
  misc_feature (61)..(61): /note="Nucleotide may be methylated to form 5-methylcytosine"
tttgagttggtagtgacagcatcattttcaccagtggctccagtgaccttccagtcccagcggagccatctgaggtcacccagcctgctttgagctagtagctttatgactggcaaagaaat

SEQ ID NO: 5589 - DNA, 122 bp, Homo sapiens
  misc_feature (61)..(62): /note="This region represents a CpG dinucleotide"
  misc_feature (61)..(61): /note="Nucleotide may be methylated to form 5-methylcytosine"
agtagaaccagaaagatctttctctattacagagtcatggaaagttcttacgtaagcacacgtgaagttgttgttgataccttactgtgggtgtgtcaacatctggatatacgtgtatgaaa

SEQ ID NO: 5590 - DNA, 122 bp, Homo sapiens
  misc_feature (61)..(62): /note="This region represents a CpG dinucleotide"
  misc_feature (61)..(61): /note="Nucleotide may be methylated to form 5-methylcytosine"
ggtatcccttggataccttgggggatatccaaggtatatgggggatcccttgccaagatacgtctccagagagactcaaaggtttgagctcctaagagcaaggctaggcagggactcgccca

SEQ ID NO: 5591 - DNA, 122 bp, Homo sapiens
  misc_feature (61)..(62): /note="This region represents a CpG dinucleotide"
  misc_feature (61)..(61): /note="Nucleotide may be methylated to form 5-methylcytosine"
gaggccaggtggagggatttcactttcagtcactttgctgcagatgtctccgccagtgggcgctggctgccagagaaagtccccagacaaaggatgcaggtgctggacttagaaatcctgca

SEQ ID NO: 5592 - DNA, 122 bp, Homo sapiens
  misc_feature (61)..(62): /note="This region represents a CpG dinucleotide"
  misc_feature (61)..(61): /note="Nucleotide may be methylated to form 5-methylcytosine"
atgcagcagacacggccagaggatgacgctgcacacgtgagcagggtcaggaggtacacacgtaccacaagcatgaagcacctcctacgtgcctgactgggcgaggtcccagctgccctcag

SEQ ID NO: 5593 - DNA, 122 bp, Homo sapiens
  misc_feature (61)..(62): /note="This region represents a CpG dinucleotide"
  misc_feature (61)..(61): /note="Nucleotide may be methylated to form 5-methylcytosine"
tcaaggtttctaagatttactattcatacaattacaattgtcattaagagttttcgctggcgtaagtggcacaacacctttgcaatgagcaaacatagtacttatgcatgagttcagggtac

SEQ ID NO: 5594 - DNA, 122 bp, Homo sapiens
  misc_feature (61)..(62): /note="This region represents a CpG dinucleotide"
  misc_feature (61)..(61): /note="Nucleotide may be methylated to form 5-methylcytosine"
tctcctaagctccattcatggcaagtgccctacacagtaataccatttttcatctttttccgtctgtctcccaagctggagtgcagtgatgcaatcatagcttactctcaactttcaattcc

SEQ ID NO: 5595 - DNA, 122 bp, Homo sapiens
  misc_feature (61)..(62): /note="This region represents a CpG dinucleotide"
  misc_feature (61)..(61): /note="Nucleotide may be methylated to form 5-methylcytosine"
ttaggaactcagacccttgattcttctgtgcactcattgagcaaatatttaccgtacaaccgtcaggtgccaggccctgggtggtggtggggaactcaaggacaagactgatggtccctatc

SEQ ID NO: 5596 - DNA, 122 bp, Homo sapiens
  misc_feature (61)..(62): /note="This region represents a CpG dinucleotide"
  misc_feature (61)..(61): /note="Nucleotide may be methylated to form 5-methylcytosine"
acatttcgggaagagacgggaaagggagattcagaggagcagagatcagcaaacattttccgtaaagggccaggtatgaataatttaggctttgtgatccaccagtctctgttggaatgact

SEQ ID NO: 5597 - DNA, 122 bp, Homo sapiens
  misc_feature (61)..(62): /note="This region represents a CpG dinucleotide"
  misc_feature (61)..(61): /note="Nucleotide may be methylated to form 5-methylcytosine"
tcctgcagaacgggtctctgggcctgagcccaccatcagggttggcagccacctccggggcggtgctatctttgctatggtatctctgcttagtaataagaactaaggtgtatgggagctca

SEQ ID NO: 5598 - DNA, 122 bp, Homo sapiens
  misc_feature (61)..(62): /note="This region represents a CpG dinucleotide"
  misc_feature (61)..(61): /note="Nucleotide may be methylated to form 5-methylcytosine"
ggttcaagggattttcctgcctcagcctgctgagcagctgggattacaggcatgagccaccgcgcccagcctgcatgggctcattctcttatctgacatggagagagaaaagggtgcagaca

SEQ ID NO: 5599 - DNA, 122 bp, Homo sapiens
  misc_feature (61)..(62): /note="This region represents a CpG dinucleotide"
  misc_feature (61)..(61): /note="Nucleotide may be methylated to form 5-methylcytosine"
taggtctagagacagctataggagaggcaaggtatcctcagtctactacctccatgacaccggataaacacatatcaactggcttcaatgggatgcatagattgtagaattagaaagacttg

SEQ ID NO: 5600 - DNA, 122 bp, Homo sapiens
  misc_feature (61)..(62): /note="This region represents a CpG dinucleotide"
  misc_feature (61)..(61): /note="Nucleotide may be methylated to form 5-methylcytosine"
ctgcaagattgtccttgataatcttttcacagcaataaaagcactgacgaagagtcagggcgttgtcatcaaagagactaaactgctgcagactacaactttcccaggacaaaaatattcaa

SEQ ID NO: 5601 - DNA, 122 bp, Homo sapiens
  misc_feature (61)..(62): /note="This region represents a CpG dinucleotide"
  misc_feature (61)..(61): /note="Nucleotide may be methylated to form 5-methylcytosine"
tggcctcacagacggccctcctctagatgcagtgggcccagagggtgagacggagtgttgcgggccgccagtgggccagctgctcctgccctgcgcaggctctgcccctcctttgaggaagt

SEQ ID NO: 5602 - DNA, 122 bp, Homo sapiens
  misc_feature (61)..(62): /note="This region represents a CpG dinucleotide"
  misc_feature (61)..(61): /note="Nucleotide may be methylated to form 5-methylcytosine"
ggtgattgtgatatagggcttctctaagccttagttctctaaaaggtgatatcggactggcgatatctgagtcttgggattgttgtgtgaattggtggtttattagaaatagcatgatttta

SEQ ID NO: 5603 - DNA, 122 bp, Homo sapiens
  misc_feature (61)..(62): /note="This region represents a CpG dinucleotide"
  misc_feature (61)..(61): /note="Nucleotide may be methylated to form 5-methylcytosine"
gtgactcaacatataatctacatcctaggggcagtggcacgaacataagtgttcaagatacgtggttggctggagatattgaagggaactaccacccttgcattaataagttgcatgaagtt

SEQ ID NO: 5604 - DNA, 122 bp, Homo sapiens
  misc_feature (61)..(62): /note="This region represents a CpG dinucleotide"
  misc_feature (61)..(61): /note="Nucleotide may be methylated to form 5-methylcytosine"
gaatgaggctttggcttcctgctccatccttgtcccctcttccttctagttgtctgggtacgaggcagctgtgccaatcacggagaagtcaaacccactgacccaggatctagacaaagcag

SEQ ID NO: 5605 - DNA, 122 bp, Homo sapiens
  misc_feature (61)..(62): /note="This region represents a CpG dinucleotide"
  misc_feature (61)..(61): /note="Nucleotide may be methylated to form 5-methylcytosine"
aagaggaaagtccttctgccagactgagctaggacactgattggatctagccttcagactcggaccgaaacatcagctccccttgggtctcaagcctgctggcgttcagactggaacttaca

SEQ ID NO: 5606 - DNA, 122 bp, Homo sapiens
  misc_feature (61)..(62): /note="This region represents a CpG dinucleotide"
  misc_feature (61)..(61): /note="Nucleotide may be methylated to form 5-methylcytosine"
tcctcattaaactctcatagccttatgtgttttccctgtgagcacttaaagcagtaaacacgtaattttacagttaatattaatgtctagactaggtggcggcaaactacagcccatgggcc

SEQ ID NO: 5607 - DNA, 122 bp, Homo sapiens
  misc_feature (61)..(62): /note="This region represents a CpG dinucleotide"
  misc_feature (61)..(61): /note="Nucleotide may be methylated to form 5-methylcytosine"
cctagagctgagagtgtggtcaaacctacacaaatcacatgcctaagaatgtgagaagggcgttcccctatgggaaacctaggtgcttttggcaggagaaggaaaaacaatggtagagaagc

SEQ ID NO: 5608 - DNA, 122 bp, Homo sapiens
  misc_feature (61)..(62): /note="This region represents a CpG dinucleotide"
  misc_feature (61)..(61): /note="Nucleotide may be methylated to form 5-methylcytosine"
aggctttgtcttcctgcagggtggaactctggcattgtagggattaaaatgaaggatgtacggtacaaatgtgcaaagcttcagagaggatggaaggggcctgggcttctccattatcttga

SEQ ID NO: 5609 - DNA, 122 bp, Homo sapiens
  misc_feature (61)..(62): /note="This region represents a CpG dinucleotide"
  misc_feature (61)..(61): /note="Nucleotide may be methylated to form 5-methylcytosine"
cctctccacatggcagctcacaccttggaagcctgcttcatcaaagccaggagttaagagcgtgaaaacaaggtagaaattacagctttcataaccgcatcttggatgtggctacacatcac

SEQ ID NO: 5610 - DNA, 122 bp, Homo sapiens
  misc_feature (61)..(62): /note="This region represents a CpG dinucleotide"
  misc_feature (61)..(61): /note="Nucleotide may be methylated to form 5-methylcytosine"
gttataggtcccatgtgttgggtcttcctgcgaggccttcacaaagatgattttgtcattcgctgaaagcgtgaagtgaatcaacggcctcctcttgctccgcagcactttattcacactgt

SEQ ID NO: 5611 - DNA, 122 bp, Homo sapiens
  misc_feature (61)..(62): /note="This region represents a CpG dinucleotide"
  misc_feature (61)..(61): /note="Nucleotide may be methylated to form 5-methylcytosine"
ttatctgatgtgcccgaactggactctgatattgagcaagaagctcaaatcaattatgatcgccaggtcggtaagcagggagcaatgaaaatttgtaaccccagaaggggatctcattcctg

SEQ ID NO: 5612 - DNA, 122 bp, Homo sapiens
  misc_feature (61)..(62): /note="This region represents a CpG dinucleotide"
  misc_feature (61)..(61): /note="Nucleotide may be methylated to form 5-methylcytosine"
attgggtctcaaattagaacaagggccaggatttgaggtgttcaaggaattcaaaatagacgtgattggatttgaatggttgacagctttcttgaatatgcagtatgacgccactgggattt

SEQ ID NO: 5613 - DNA, 122 bp, Homo sapiens
  misc_feature (61)..(62): /note="This region represents a CpG dinucleotide"
  misc_feature (61)..(61): /note="Nucleotide may be methylated to form 5-methylcytosine"
ctgttgaggaactactcctgtcctagaatctggcaatctggttttaacagcaggggcccacggatggcatgtgaacaaccctggattgagtgatgatgaatgattcagaggtggacaggagc

SEQ ID NO: 5614 - DNA, 122 bp, Homo sapiens
  misc_feature (61)..(62): /note="This region represents a CpG dinucleotide"
  misc_feature (61)..(61): /note="Nucleotide may be methylated to form 5-methylcytosine"
caattcaactgaagatgactcatcttttcattaaaaggaagatccattcactgtttctagcgcttcacttagtggcaacattaagtctttagagaagtttgagttaggatgagtgcagctgg

SEQ ID NO: 5615 - DNA, 122 bp, Homo sapiens
  misc_feature (61)..(62): /note="This region represents a CpG dinucleotide"
  misc_feature (61)..(61): /note="Nucleotide may be methylated to form 5-methylcytosine"
gcctctggggatccagatgcttgcttcccacagagttagggcataagattcgccaaggatcgtagaatggggtgtggtgaaggaggagaactctggcatatctgattggagttggaatgaaa

SEQ ID NO: 5616 - DNA, 122 bp, Homo sapiens
  misc_feature (61)..(62): /note="This region represents a CpG dinucleotide"
  misc_feature (61)..(61): /note="Nucleotide may be methylated to form 5-methylcytosine"
ctgcttggggccagcctgaggcctgaccgggcggaactgcgtcgggtgggcttgggcctacgtcggcccaggccccactggaggccaggcccgtccgggaggcgctgcctggcgggccacgt

SEQ ID NO: 5617 - DNA, 122 bp, Homo sapiens
  misc_feature (61)..(62): /note="This region represents a CpG dinucleotide"
  misc_feature (61)..(61): /note="Nucleotide may be methylated to form 5-methylcytosine"
gcataatgttctgcttctgtgagcatatcatttgtgccttgatgactcagagtcttacagcgtctgaacatgactatatgactataggtttaattcccagcatatggtcatgaaggcaaaca

SEQ ID NO: 5618 - DNA, 122 bp, Homo sapiens
  misc_feature (61)..(62): /note="This region represents a CpG dinucleotide"
  misc_feature (61)..(61): /note="Nucleotide may be methylated to form 5-methylcytosine"
ccttgagaattgctcacccaggcgggagggctgctccttccacacagcacagcctgtaaacgtcactctctgtcatcgtttataagcatgatgactgggttttcacgcttccccataggatg

SEQ ID NO: 5619 - DNA, 122 bp, Homo sapiens
  misc_feature (61)..(62): /note="This region represents a CpG dinucleotide"
  misc_feature (61)..(61): /note="Nucleotide may be methylated to form 5-methylcytosine"
gaagatgtgcaggcaggtgaaacctgatccccgtggccattgtagagaccaagaacaacacggaatgtttacacagtggtttgattttaatagacagaagggctgagtttaagacagcaaaa

SEQ ID NO: 5620 - DNA, 122 bp, Homo sapiens
  misc_feature (61)..(62): /note="This region represents a CpG dinucleotide"
  misc_feature (61)..(61): /note="Nucleotide may be methylated to form 5-methylcytosine"
caggtgaagggcatggacacttgagtcaggtgactggtccaccacatgcagattgtgtcccgttgacaaaattttgtagcctttctatgccttgatcttgttgtctatgaagggaggatgac

SEQ ID NO: 5621 - DNA, 122 bp, Homo sapiens
  misc_feature (61)..(62): /note="This region represents a CpG dinucleotide"
  misc_feature (61)..(61): /note="Nucleotide may be methylated to form 5-methylcytosine"
gacaagtcaggattgtgcctccagtcagaaggaccatgaagagagagaagagggcagagccgtgcatggggctgctccccaggacctgagcaggaacctggagttttcaggtgagaggctca

SEQ ID NO: 5622 - DNA, 122 bp, Homo sapiens
  misc_feature (61)..(62): /note="This region represents a CpG dinucleotide"
  misc_feature (61)..(61): /note="Nucleotide may be methylated to form 5-methylcytosine"
ggcatcgctggctctcccaccctcaagctccccggcgggctctctatctcccccatctttcggtgtcgagacccgtcactgtcatacttcaataaaagaaggggcttttctttttaaagcat

SEQ ID NO: 5623 - DNA, 122 bp, Homo sapiens
  misc_feature (61)..(62): /note="This region represents a CpG dinucleotide"
  misc_feature (61)..(61): /note="Nucleotide may be methylated to form 5-methylcytosine"
tttgcagccctgagccccagggatggaaggcgtgagtccagcattgtgagacagcagtgccgagagccttctctgagtaaggcaggaagccttcccaattccagtctccaagttttattctt

SEQ ID NO: 5624 - DNA, 122 bp, Homo sapiens
  misc_feature (61)..(62): /note="This region represents a CpG dinucleotide"
  misc_feature (61)..(61): /note="Nucleotide may be methylated to form 5-methylcytosine"
atgtcaactaaaaccacaatgaggtatcactacacacccatcagcatgactaaagtgaaacgtaaaaacaacatcaaatgctggcaaggctgtggagaagtgatattactcatatactgctg

SEQ ID NO: 5625 - DNA, 122 bp, Homo sapiens
  misc_feature (61)..(62): /note="This region represents a CpG dinucleotide"
  misc_feature (61)..(61): /note="Nucleotide may be methylated to form 5-methylcytosine"
accttttgttttacgtgaagtgtgagtaaatatagctcctgtatcagaatcttgtggtcgcgtttgttaatatggaaagacttgcaaaatactgatgggtatgttgtgaaacaattttggtg

SEQ ID NO: 5626 - DNA, 122 bp, Homo sapiens
  misc_feature (61)..(62): /note="This region represents a CpG dinucleotide"
  misc_feature (61)..(61): /note="Nucleotide may be methylated to form 5-methylcytosine"
catgtggcttgatttttagtgaaataccatagtgtcacaactagtgctgtctctgccccacgccaaaaggaaaagtcaagtgaaataggctgggtagaattcccccagggtaggcaaaatgc

SEQ ID NO: 5627 - DNA, 122 bp, Homo sapiens
  misc_feature (61)..(62): /note="This region represents a CpG dinucleotide"
  misc_feature (61)..(61): /note="Nucleotide may be methylated to form 5-methylcytosine"
taatccccgcattgtacagcagggaaactgagtcacagagcagcttaggtgctggctcaacgcctcagtctggtaatggaattacatgagagctttagctctggagcagcctgtctgctgtg

SEQ ID NO: 5628 - DNA, 122 bp, Homo sapiens
  misc_feature (61)..(62): /note="This region represents a CpG dinucleotide"
  misc_feature (61)..(61): /note="Nucleotide may be methylated to form 5-methylcytosine"
attataggcgtgagccaccgtgcctggcctgtaattcctttttaatacctgcttcacatgcgatgatttgttcaggatctatttacaccaggaggctgtctgctcccagtggacagggtctg

SEQ ID NO: 5629 - DNA, 122 bp, Homo sapiens
  misc_feature (61)..(62): /note="This region represents a CpG dinucleotide"
  misc_feature (61)..(61): /note="Nucleotide may be methylated to form 5-methylcytosine"
aactgaatcatattttcctactgactgactaacagtaatttaagactctaattggtcttccgttagctgtcatttattgtaattctttgtgaaatgcacatgatctttaacataaaatatct

SEQ ID NO: 5630 - DNA, 122 bp, Homo sapiens
  misc_feature (61)..(62): /note="This region represents a CpG dinucleotide"
  misc_feature (61)..(61): /note="Nucleotide may be methylated to form 5-methylcytosine"
tctttaagctgatagatgaggtccacctgttcatttagtcacacctcatggcttctaagacgttccagatgacgggttatgcaactgtgaatctgagctttgacctctcgcaagttatcttt

SEQ ID NO: 5631 - DNA, 122 bp, Homo sapiens
  misc_feature (61)..(62): /note="This region represents a CpG dinucleotide"
  misc_feature (61)..(61): /note="Nucleotide may be methylated to form 5-methylcytosine"
gtctgactctcacctagcaattttcacaattccttaagtaacacaagtgaacacacatcacgtagtggttgagagcaagggctctggagtgagaggacgctggggttcaattcaggctctcc

SEQ ID NO: 5632 - DNA, 122 bp, Homo sapiens
  misc_feature (61)..(62): /note="This region represents a CpG dinucleotide"
  misc_feature (61)..(61): /note="Nucleotide may be methylated to form 5-methylcytosine"
ctctttttcagcaaactgggctgccgtatctcttcccacatgggggcctcagtttgctcccgtataggagttggttgaaatgggaaatctctaagactcgtctagtttcccagttttttaag

SEQ ID NO: 5633 - DNA, 122 bp, Homo sapiens
  misc_feature (61)..(62): /note="This region represents a CpG dinucleotide"
  misc_feature (61)..(61): /note="Nucleotide may be methylated to form 5-methylcytosine"
aaacagccttctgttgctaaaggaaacaggacgcttctggattcacgtatgtaagagcagcgagaagctacaaaggaagccctgggtccacaggcacaccctaagcctttccaggcagatgc

SEQ ID NO: 5634 - DNA, 122 bp, Homo sapiens
  misc_feature (61)..(62): /note="This region represents a CpG dinucleotide"
  misc_feature (61)..(61): /note="Nucleotide may be methylated to form 5-methylcytosine"
caggcgtgagtcaccatacccggccctcgattatcttttaagcaggggatctgacatcaccgggtcagcattcctggttggcaaaaatcaacagagctgtggtagggaccacgagctccaga

SEQ ID NO: 5635 - DNA, 122 bp, Homo sapiens
  misc_feature (61)..(62): /note="This region represents a CpG dinucleotide"
  misc_feature (61)..(61): /note="Nucleotide may be methylated to form 5-methylcytosine"
tgtttaagaaagataatggcagcagaattttggaggtaaatgacagagaagtaaattgaacgacagggagacctgctgtgaggttattataaagatgccaataagacatgatggaagccgga

SEQ ID NO: 5636 - DNA, 122 bp, Homo sapiens
  misc_feature (61)..(62): /note="This region represents a CpG dinucleotide"
  misc_feature (61)..(61): /note="Nucleotide may be methylated to form 5-methylcytosine"
tcaggtgatccacctacctcggcctgggattacagtgctgggattacaggcatgagccaccgctctcagccagggtgtaacattttaaggtacatgatttataaaaagcttttttaaatagc

SEQ ID NO: 5637 - DNA, 122 bp, Homo sapiens
  misc_feature (61)..(62): /note="This region represents a CpG dinucleotide"
  misc_feature (61)..(61): /note="Nucleotide may be methylated to form 5-methylcytosine"
taggagaacaatttgggcatccataccgtttgatggagcaactttatccctaatttatagcgcaacgtgtgcaaaacaagcacatggatagaatagtcaatgtggcagcatctgtaagtcga

SEQ ID NO: 5638 - DNA, 122 bp, Homo sapiens
  misc_feature (61)..(62): /note="This region represents a CpG dinucleotide"
  misc_feature (61)..(61): /note="Nucleotide may be methylated to form 5-methylcytosine"
gctcataaggataaggatactaagaagcgccgtattttatggggcatttcctacgtgctacgctctattctaagcattgggtgtggaggatctctcataaacctcagaatagctctttgagg

SEQ ID NO: 5639 - DNA, 122 bp, Homo sapiens
  misc_feature (61)..(62): /note="This region represents a CpG dinucleotide"
  misc_feature (61)..(61): /note="Nucleotide may be methylated to form 5-methylcytosine"
ttgagctctgagctgtgcttcctcttcctgagctggcctctagtaagtgctcaataaacacgatggggagagggacactgaagcctaatctgcctgggtggaggatgaagcaagtaaaagga

SEQ ID NO: 5640 - DNA, 122 bp, Homo sapiens
  misc_feature (61)..(62): /note="This region represents a CpG dinucleotide"
  misc_feature (61)..(61): /note="Nucleotide may be methylated to form 5-methylcytosine"
ttaactgccacattacctgactcatctattaaagaatctacagaaagataaacatgacagcgctgcgttttaaagtacgcttatacctactaggttaagtaaattacacactggaagtacaa

SEQ ID NO: 5641 - DNA, 122 bp, Homo sapiens
  misc_feature (61)..(62): /note="This region represents a CpG dinucleotide"
  misc_feature (61)..(61): /note="Nucleotide may be methylated to form 5-methylcytosine"
ggcctccctaaggttttgctcagccagttcctcttactgttttgcctcatgcagttcagccgcttggttagatctgcccctggggccgagttcatttctacagtcacgtccccactggactg

SEQ ID NO: 5642 - DNA, 122 bp, Homo sapiens
  misc_feature (61)..(62): /note="This region represents a CpG dinucleotide"
  misc_feature (61)..(61): /note="Nucleotide may be methylated to form 5-methylcytosine"
tccagccaacaaccacatgagtaagcttagtagccaaccttccagccccagctgagccatcggatgactgtagccacagatggcagcttgactgccatctcctgaaagatgatgagtcagaa

SEQ ID NO: 5643 - DNA, 122 bp, Homo sapiens
  misc_feature (61)..(62): /note="This region represents a CpG dinucleotide"
  misc_feature (61)..(61): /note="Nucleotide may be methylated to form 5-methylcytosine"
ctcaggaattaaacaaacttccatgtcttttcatatatttgattctcatatgaacctttgcgagaagaaggatggatgggtattatcttggagccaaggctggggatttaatgagcattctg

SEQ ID NO: 5644 - DNA, 122 bp, Homo sapiens
  misc_feature (61)..(62): /note="This region represents a CpG dinucleotide"
  misc_feature (61)..(61): /note="Nucleotide may be methylated to form 5-methylcytosine"
tcctctgcacctgaaccctcctagtctttattctgggagcagcgcgggaggcagtggagacgtggaagcaggctccggctgctgggcctgcatgaccggtttccctgcagaagattctgcgc

SEQ ID NO: 5645 - DNA, 122 bp, Homo sapiens
  misc_feature (61)..(62): /note="This region represents a CpG dinucleotide"
  misc_feature (61)..(61): /note="Nucleotide may be methylated to form 5-methylcytosine"
tgttgaaggaaggaataaaaggaaaggaagaaagggacaagaaggaagggaaggaaggaacgtctacagagcaggaatttactaagcactgaggatgtgaagataaaaaatatggcaaatta

SEQ ID NO: 5646 - DNA, 122 bp, Homo sapiens
  misc_feature (61)..(62): /note="This region represents a CpG dinucleotide"
  misc_feature (61)..(61): /note="Nucleotide may be methylated to form 5-methylcytosine"
acacagtaggaagctgaatgggcaggctgactacttgctcagcacattgcaacatcagggcgctcttgtcagcctggattatgtagggcctgttattgtcaaactgtctgcctaatctttaa

SEQ ID NO: 5647 - DNA, 122 bp, Homo sapiens
  misc_feature (61)..(62): /note="This region represents a CpG dinucleotide"
  misc_feature (61)..(61): /note="Nucleotide may be methylated to form 5-methylcytosine"
cgtttctgccactgctgtcgatgctgatgtggaacctctactacatgttcgtggtggagccggagcgcatgctcactgccaccgagagccgcctggactacccggaccacgcccgctcggcc

SEQ ID NO: 5648 - DNA, 122 bp, Homo sapiens
  misc_feature (61)..(62): /note="This region represents a CpG dinucleotide"
  misc_feature (61)..(61): /note="Nucleotide may be methylated to form 5-methylcytosine"
catgccaggcagtcagggatcctgctcctgtttcctcagagggtgagcagttccatccaccgcttcttgctttgtcaaatgggtaatcctggcagctgccaggctcattgctatttgcaact

SEQ ID NO: 5649 - DNA, 122 bp, Homo sapiens
  misc_feature (61)..(62): /note="This region represents a CpG dinucleotide"
  misc_feature (61)..(61): /note="Nucleotide may be methylated to form 5-methylcytosine"
ttgataagcctaagtttttaaagaatcagggaaggaccaggatttgctaaacactagtggcgtgccagtccctggactaagtagataggtacttggcatgtgtcttgatttaatcctcacaa

SEQ ID NO: 5650 - DNA, 122 bp, Homo sapiens
  misc_feature (61)..(62): /note="This region represents a CpG dinucleotide"
  misc_feature (61)..(61): /note="Nucleotide may be methylated to form 5-methylcytosine"
atggagaagagtggactgggcagactggggagcaaactcagcaactcagcagacactggccgggaatgcagacactagctggcaatactggtccagaatactggcaaaggctgggccagaat

SEQ ID NO: 5651 - DNA, 122 bp, Homo sapiens
  misc_feature (61)..(62): /note="This region represents a CpG dinucleotide"
  misc_feature (61)..(61): /note="Nucleotide may be methylated to form 5-methylcytosine"
tgtcatcactccagatgtcttaggcctcctcttctgaaactactgtcaaaatctctggcacgtttttgaatatcctcaatgaagaaaaatcttaatcttttttgaggaagaattggatcttt

SEQ ID NO: 5652 - DNA, 122 bp, Homo sapiens
  misc_feature (61)..(62): /note="This region represents a CpG dinucleotide"
  misc_feature (61)..(61): /note="Nucleotide may be methylated to form 5-methylcytosine"
tgttttcattttgttgcactttgttttaaaattaatatcttgaaaggtagtgcattcacacgattcaaaagccagaaagcatgaaaagacacacactgggaatgttttcctcccatctttgt

SEQ ID NO: 5653 - DNA, 122 bp, Homo sapiens
  misc_feature (61)..(62): /note="This region represents a CpG dinucleotide"
  misc_feature (61)..(61): /note="Nucleotide may be methylated to form 5-methylcytosine"
gccaggagaggtgtggctggctgtgtgaccctgggctggccacctttctgcaccaggcctcggtcctctcatctgcccaatgggaggctggcttctcctggggtcaggcacctaggcacccc

SEQ ID NO: 5654 - DNA, 122 bp, Homo sapiens
  misc_feature (61)..(62): /note="This region represents a CpG dinucleotide"
  misc_feature (61)..(61): /note="Nucleotide may be methylated to form 5-methylcytosine"
catgtaataatgctaacagtggtaataaaaacccagccacgttgagtgttccaggtttcacgcactgtgccaaatgtttcacatttgccatttcactcaatcctcgtggccgttttacaacc

SEQ ID NO: 5655 - DNA, 122 bp, Homo sapiens
  misc_feature (61)..(62): /note="This region represents a CpG dinucleotide"
  misc_feature (61)..(61): /note="Nucleotide may be methylated to form 5-methylcytosine"
attcaaagcttctgggtttaaggaaggattctgtagcctaaacccatgacaaatgagaggcggcaatgactcgtgagtagctaagactggattgatctctgttgttttgaatattggactta

SEQ ID NO: 5656 - DNA, 122 bp, Homo sapiens
  misc_feature (61)..(62): /note="This region represents a CpG dinucleotide"
  misc_feature (61)..(61): /note="Nucleotide may be methylated to form 5-methylcytosine"
aactttccacctcagttcccctaaatgaaatcaatgtctaaccacatgaccctcagttaccgaaagcattaccaaaaacaaaggcagattattagattgtggtgataactgtacaactctgt

SEQ ID NO: 5657 - DNA, 122 bp, Homo sapiens
  misc_feature (61)..(62): /note="This region represents a CpG dinucleotide"
  misc_feature (61)..(61): /note="Nucleotide may be methylated to form 5-methylcytosine"
ctcaagtagtactgccatctcagcctcccagagtgtgggggttataggtgtgagccaccacgcctggcctactatgagaaatctgtatggtcagcacattcttgccccatgggcaagcctat

SEQ ID NO: 5658 - DNA, 122 bp, Homo sapiens
  misc_feature (61)..(62): /note="This region represents a CpG dinucleotide"
  misc_feature (61)..(61): /note="Nucleotide may be methylated to form 5-methylcytosine"
ccccttgggatgattgctcagcaagtgatgactcagacaggtgtagccctgggaggaacacggagtcacaagtgcatttgaaatgatgatcagtgtgtcctgcaactcacattaattctcac

SEQ ID NO: 5659 - DNA, 122 bp, Homo sapiens
  misc_feature (61)..(62): /note="This region represents a CpG dinucleotide"
  misc_feature (61)..(61): /note="Nucleotide may be methylated to form 5-methylcytosine"
acatgactgacagcagaaggcagacaggctcataggtagaaaggggcgggtccctggtgacgccctgccttcaagccaagaccagcccaaaacctggggacctggctgtcagttccaggtga

SEQ ID NO: 5660 - DNA, 122 bp, Homo sapiens
  misc_feature (61)..(62): /note="This region represents a CpG dinucleotide"
  misc_feature (61)..(61): /note="Nucleotide may be methylated to form 5-methylcytosine"
aatcactgtgccttgcatagatattaggcatagaaataagcctgccacaaagctctcctccgtgctgtggtgctcatggagccatgcagggcacagagacagcaaaactcagctggaggcct

SEQ ID NO: 5661 - DNA, 122 bp, Homo sapiens
  misc_feature (61)..(62): /note="This region represents a CpG dinucleotide"
  misc_feature (61)..(61): /note="Nucleotide may be methylated to form 5-methylcytosine"
ctcaattgcctttccagctctaggactctagaatcttcttattgtcaattctgcatctgccgtggcagtcctgcctatcctggcttctcagcaatcaccctccccaccagccgcaaggttag

SEQ ID NO: 5662 - DNA, 122 bp, Homo sapiens
  misc_feature (61)..(62): /note="This region represents a CpG dinucleotide"
  misc_feature (61)..(61): /note="Nucleotide may be methylated to form 5-methylcytosine"
gtaatgagcatcttcatccctttccttcaagattagaagaatatcattcttatggtattccgaaacatatgactcaaacacttgaccaaccagtgtaacttgatcgctattcatcttgaatc

SEQ ID NO: 5663 - DNA, 122 bp, Homo sapiens
  misc_feature (61)..(62): /note="This region represents a CpG dinucleotide"
  misc_feature (61)..(61): /note="Nucleotide may be methylated to form 5-methylcytosine"
tgcagagggtggtgagcatctgggatgtgatgacagtgcatccgctccaggagcaggtgccgtgagtgtcttctcactgctttccccagtgcctagcacagaacaagtgcccaataaaaata

SEQ ID NO: 5664 - DNA, 122 bp, Homo sapiens
  misc_feature (61)..(62): /note="This region represents a CpG dinucleotide"
  misc_feature (61)..(61): /note="Nucleotide may be methylated to form 5-methylcytosine"
agtgaggttaactgtacttctataggtcactcagtgagtcaacgactgagctatgattaacgttgacagctggtgagctgctaggctgttgctaactgagcaacattgacattcattttgat

SEQ ID NO: 5665 - DNA, 122 bp, Homo sapiens
  misc_feature (61)..(62): /note="This region represents a CpG dinucleotide"
  misc_feature (61)..(61): /note="Nucleotide may be methylated to form 5-methylcytosine"
catatagtaaccaatcaccaacagactattaaagaaaagcaatgtgattggtcatgattacgatgtacatatgtttctacagagtgatttatggactgaggagctagcagcaaagtttgtac

SEQ ID NO: 5666 - DNA, 122 bp, Homo sapiens
  misc_feature (61)..(62): /note="This region represents a CpG dinucleotide"
  misc_feature (61)..(61): /note="Nucleotide may be methylated to form 5-methylcytosine"
tctctctgaataatgatgagtaagcagtctttcaggccttcctcccaacctcaggtgatccgcccgcctccgccttccaaagtgctgggattataggtgtgagccaccgcgccgggccattt

SEQ ID NO: 5667 - DNA, 122 bp, Homo sapiens
  misc_feature (61)..(62): /note="This region represents a CpG dinucleotide"
  misc_feature (61)..(61): /note="Nucleotide may be methylated to form 5-methylcytosine"
atctgtgaaatgggatgatgatacaatacatacctgtcaagccaggcttagatgagatcacgtgtgaagggcactccccaggctggcatcacaggcagatttccatcagagtggagtgctgg

SEQ ID NO: 5668 - DNA, 122 bp, Homo sapiens
  misc_feature (61)..(62): /note="This region represents a CpG dinucleotide"
  misc_feature (61)..(61): /note="Nucleotide may be methylated to form 5-methylcytosine"
tcactctctagtcaactgcacttgctactaaactgtgattcactggctgttagtggtatccgcatattcaggatgcaacaccctctctagtcaactgctctttccactaaactgtgattcac

SEQ ID NO: 5669 - DNA, 122 bp, Homo sapiens
  misc_feature (61)..(62): /note="This region represents a CpG dinucleotide"
  misc_feature (61)..(61): /note="Nucleotide may be methylated to form 5-methylcytosine"
cagagtggagcaccaggagggagaggagcaccacggcaggaaggaccgggatcttcatggcgtcaagtttggggtgctctgaggcggggcctcagtgcttgctctttatattgccaaggagg

SEQ ID NO: 5670 - DNA, 122 bp, Homo sapiens
  misc_feature (61)..(62): /note="This region represents a CpG dinucleotide"
  misc_feature (61)..(61): /note="Nucleotide may be methylated to form 5-methylcytosine"
cccctccaagatttttctaattctctgaaactaagttccgcttcgaccctacccaggccacgtggtactttcttgtcaatggtttcttgctgagaacgggctgaccactgccaggcagacag

SEQ ID NO: 5671 - DNA, 122 bp, Homo sapiens
  misc_feature (61)..(62): /note="This region represents a CpG dinucleotide"
  misc_feature (61)..(61): /note="Nucleotide may be methylated to form 5-methylcytosine"
ggattacagttgtcccatccatacactggtctgtgttggcttttgtcacctgggcatgtgcggccaccatcttgactgctcagctagttctgtacctgggttctagaatgatgtcataatga

SEQ ID NO: 5672 - DNA, 122 bp, Homo sapiens
  misc_feature (61)..(62): /note="This region represents a CpG dinucleotide"
  misc_feature (61)..(61): /note="Nucleotide may be methylated to form 5-methylcytosine"
atggggagggaagagccccagcaaaaagaaacctatccaaataatatcaaatccacctgacgtgaatctgcttgggacaaagtaggtatcacatcaggatgtttctggctgcaaatgacaaa

SEQ ID NO: 5673 - DNA, 122 bp, Homo sapiens
  misc_feature (61)..(62): /note="This region represents a CpG dinucleotide"
  misc_feature (61)..(61): /note="Nucleotide may be methylated to form 5-methylcytosine"
aggaggttactgctgggtctggggctgactgcccggcgttggttgaatccaataaaccgacggggaaggacgcctcctaagcggagccattggcagccgtagcatcagccccagcccaaggg

SEQ ID NO: 5674 - DNA, 122 bp, Homo sapiens
  misc_feature (61)..(62): /note="This region represents a CpG dinucleotide"
  misc_feature (61)..(61): /note="Nucleotide may be methylated to form 5-methylcytosine"
ccctgtcacatggctagcaagcaggccaggcaggatgagagctcaggccttgtgacttcccgttcagtgctctccactgttcctctcagttgataagtggtcctgagaccacctgtgctcct

SEQ ID NO: 5675 - DNA, 122 bp, Homo sapiens
  misc_feature (61)..(62): /note="This region represents a CpG dinucleotide"
  misc_feature (61)..(61): /note="Nucleotide may be methylated to form 5-methylcytosine"
atttgccaaactcttcttaaggctttaattaggtctgatgtgccagtttatgccagaagccggaggaattgatatgattttgaggcagtggcacatggtcctactagacattggcaagtgaa

SEQ ID NO: 5676 - DNA, 122 bp, Homo sapiens
  misc_feature (61)..(62): /note="This region represents a CpG dinucleotide"
  misc_feature (61)..(61): /note="Nucleotide may be methylated to form 5-methylcytosine"
ttctcattttcattttgaaattaccaacacaatcacagacttcttgtttacagacactcacgtaacacttgcccaacaatgagcaaccctgtgcttagtcattcagtgattaaactttaaat

SEQ ID NO: 5677 - DNA, 122 bp, Homo sapiens
  misc_feature (61)..(62): /note="This region represents a CpG dinucleotide"
  misc_feature (61)..(61): /note="Nucleotide may be methylated to form 5-methylcytosine"
ggacacattattattaactaaaatccactttcttcacttttactgcctttttctgttccacgatcccatccagatgccacattacatttagttgtccttgttattttttattagtcatagtc

SEQ ID NO: 5678 - DNA, 122 bp, Homo sapiens
  misc_feature (61)..(62): /note="This region represents a CpG dinucleotide"
  misc_feature (61)..(61): /note="Nucleotide may be methylated to form 5-methylcytosine"
ggaaaactgcctactcaagcctcagcaatggtggacgccccgcccctgaccaagctcaagcgtcccaggtggacttcaggctgctgttctggcaatgagaatttcaagccagtggatcttag

SEQ ID NO: 5679 - DNA, 122 bp, Homo sapiens
  misc_feature (61)..(62): /note="This region represents a CpG dinucleotide"
  misc_feature (61)..(61): /note="Nucleotide may be methylated to form 5-methylcytosine"
ttaaaggagattaaaattcttttctattactgggtatctcaaataaagatattcctgtaccgtaaagggttatggtttaaaaaaaaaaaactcagacacacttaaagtaacacatttcaaac

SEQ ID NO: 5680 - DNA, 122 bp, Homo sapiens
  misc_feature (61)..(62): /note="This region represents a CpG dinucleotide"
  misc_feature (61)..(61): /note="Nucleotide may be methylated to form 5-methylcytosine"
gtgttatctcctcactctgtctttagggcctgcctttaactaagcaggagctcaagacagcgtaagtttcaaagacattatgatgcttttacagaagtccctttcaaaaacaacttctgtat

SEQ ID NO: 5681 - DNA, 122 bp, Homo sapiens
  misc_feature (61)..(62): /note="This region represents a CpG dinucleotide"
  misc_feature (61)..(61): /note="Nucleotide may be methylated to form 5-methylcytosine"
ctgatgtaactcaaattgcttacatggtaatacataactcctactctcaactgccttctccgttccatgtgtagaatgagttagttctctttaaattccctgatgtcaaacctgtcactgaa

SEQ ID NO: 5682 - DNA, 122 bp, Homo sapiens
  misc_feature (61)..(62): /note="This region represents a CpG dinucleotide"
  misc_feature (61)..(61): /note="Nucleotide may be methylated to form 5-methylcytosine"
cggtatggtgcctgggcagtcccgggttgttaagggtgagagttctaaagccaggctgcccgtattcagagactggctttgctaaggaaccttgggcaagttacttaacctgtttcgtcatc

SEQ ID NO: 5683 - DNA, 122 bp, Homo sapiens
  misc_feature (61)..(62): /note="This region represents a CpG dinucleotide"
  misc_feature (61)..(61): /note="Nucleotide may be methylated to form 5-methylcytosine"
ctcatgtttgtccttatctccaaggcaaaatacaaacactgtttcagggagctgcttctccgctccaagacaaatgagctgttgaagtgtcatgattttaaaatctggtgatatacataaag

SEQ ID NO: 5684 - DNA, 122 bp, Homo sapiens
  misc_feature (61)..(62): /note="This region represents a CpG dinucleotide"
  misc_feature (61)..(61): /note="Nucleotide may be methylated to form 5-methylcytosine"
cctgatatgtctgtatgacaaagccagagtcatctgtctcttcaacttgcatctgactcacgtgtgaggctgcaggagtcaggctgcctttcctctttgccattcttcacagccaggagtca

SEQ ID NO: 5685 - DNA, 122 bp, Homo sapiens
  misc_feature (61)..(62): /note="This region represents a CpG dinucleotide"
  misc_feature (61)..(61): /note="Nucleotide may be methylated to form 5-methylcytosine"
agtcccaaagcatttttatcaccaccaaagtaatcttgtacctgttaatcagtagctgcccgtattaccttcaacccagccccagaacaccaatctgtgtcctgtctctgtggacttaccta

SEQ ID NO: 5686 - DNA, 122 bp, Homo sapiens
  misc_feature (61)..(62): /note="This region represents a CpG dinucleotide"
  misc_feature (61)..(61): /note="Nucleotide may be methylated to form 5-methylcytosine"
tttttttgtgtgaaccttgtcaagttttacttgctagcaaccaattcaaaaagaatgatacgctctgcataggccacaggacacacccctatagggtgcacatgaccctcctgctgctgttt

SEQ ID NO: 5687 - DNA, 122 bp, Homo sapiens
  misc_feature (61)..(62): /note="This region represents a CpG dinucleotide"
  misc_feature (61)..(61): /note="Nucleotide may be methylated to form 5-methylcytosine"
gggagcctgttcagaaatttctcagcagtcatcctggagcctacaggcagagttgggaaccggggcccaggaaggactatgagtggtggtggagcccccctggagtttgttctgcagtcccc

SEQ ID NO: 5688 - DNA, 122 bp, Homo sapiens
  misc_feature (61)..(62): /note="This region represents a CpG dinucleotide"
  misc_feature (61)..(61): /note="Nucleotide may be methylated to form 5-methylcytosine"
cgcttcctgtctcttcctcccaagggagacccctgtcctggctctgactggggttgagttcgccagttttgacttatgtgtagagtccggcagcatcattttttggcatttaactcgtcaca

SEQ ID NO: 5689 - DNA, 122 bp, Homo sapiens
  misc_feature (61)..(62): /note="This region represents a CpG dinucleotide"
  misc_feature (61)..(61): /note="Nucleotide may be methylated to form 5-methylcytosine"
ttttttctcctgcttctcagaaggcctctgctgagcacgatctctgtgggggtaggagctcggcatgtgtgtattgacagacaggctcatgccctttctcgtggctattttcagctctctgg

SEQ ID NO: 5690 - DNA, 122 bp, Homo sapiens
  misc_feature (61)..(62): /note="This region represents a CpG dinucleotide"
  misc_feature (61)..(61): /note="Nucleotide may be methylated to form 5-methylcytosine"
gccaagacaaaaaggatttgcagtgccgtgatctgctagtgccttaaaatactgccatctcgtcttctgtctctgggagctctagggctccaatctaagctcgctgcagtttgaatactgca

SEQ ID NO: 5691 - DNA, 122 bp, Homo sapiens
  misc_feature (61)..(62): /note="This region represents a CpG dinucleotide"
  misc_feature (61)..(61): /note="Nucleotide may be methylated to form 5-methylcytosine"
ttctaggctaagctcagccataaccagatggctttgggcaggcaagctgtccagcttctccgggtctcatttccttcacttatacatcagaggacctgattagaggcccctaatatctatgt

SEQ ID NO: 5692 - DNA, 122 bp, Homo sapiens
  misc_feature (61)..(62): /note="This region represents a CpG dinucleotide"
  misc_feature (61)..(61): /note="Nucleotide may be methylated to form 5-methylcytosine"
aatgactctttcctgtttgagccacatcacccttcgttgtatgaaggcttaagtggcttccgtggtgagaatcttactctgtgtcataccctaattgaccttggagctggctttgctgtgta

SEQ ID NO: 5693 - DNA, 122 bp, Homo sapiens
  misc_feature (61)..(62): /note="This region represents a CpG dinucleotide"
  misc_feature (61)..(61): /note="Nucleotide may be methylated to form 5-methylcytosine"
acgggaagtgaggcaggtttgagaaacacttggggaactggaactacaaggttcagagcccgatcaggtgtgggaggttattgcattgtgaagaaatagattgatgctatgacggaagaaca

SEQ ID NO: 5694 - DNA, 122 bp, Homo sapiens
  misc_feature (61)..(62): /note="This region represents a CpG dinucleotide"
  misc_feature (61)..(61): /note="Nucleotide may be methylated to form 5-methylcytosine"
agagactgctttttttgcttcagggatgctgctgctgtcacagccattccacatcatctacgttatagactccacctaatttttttaaactagaccatctgtctgcctaatttacctgtctt

SEQ ID NO: 5695 - DNA, 122 bp, Homo sapiens
  misc_feature (61)..(62): /note="This region represents a CpG dinucleotide"
  misc_feature (61)..(61): /note="Nucleotide may be methylated to form 5-methylcytosine"
gaaccattcacccttgcatctggctgtgcaccttactcacacgtccctttcatatgtctgcgttggctgttgaagagctcctactgcaagtatgcaagtgtggggagaaaagaaagaaaatg

SEQ ID NO: 5696 - DNA, 122 bp, Homo sapiens
  misc_feature (61)..(62): /note="This region represents a CpG dinucleotide"
  misc_feature (61)..(61): /note="Nucleotide may be methylated to form 5-methylcytosine"
ccctccctggccaggtcaattctcgagagagcctggagtgtgcatgctggctgctggccccgggtccagcatggcttgagatcagctttggaggatcttggaatgtggtcataaggactcaa

SEQ ID NO: 5697 - DNA, 122 bp, Homo sapiens
  misc_feature (61)..(62): /note="This region represents a CpG dinucleotide"
  misc_feature (61)..(61): /note="Nucleotide may be methylated to form 5-methylcytosine"
cacatgggaaagagatgggtaggttctctttaaaagggtttaattcttgtattattttaacggacaagggaaatgcaaacacattgtttaaaagctgccacagaatgacacaaatcctgctt

SEQ ID NO: 5698 - DNA, 122 bp, Homo sapiens
  misc_feature (61)..(62): /note="This region represents a CpG dinucleotide"
  misc_feature (61)..(61): /note="Nucleotide may be methylated to form 5-methylcytosine"
gtctgcctggcgacctcccagagggcgagatgcctccgagggagcgtggagcgggcctcccggccttggcaggcagctaggatgaagatctttccagctctagctgcctggaaggaaactgg

SEQ ID NO: 5699 - DNA, 122 bp, Homo sapiens
  misc_feature (61)..(62): /note="This region represents a CpG dinucleotide"
  misc_feature (61)..(61): /note="Nucleotide may be methylated to form 5-methylcytosine"
gcaccaggctaatactgttcaataatgggtcgccaaaaaaggaaggaagcaggtaagaagcgcagcagccaagttcataaccctgctgctgacagtgtcaacatccacctcctgctgagtgc

SEQ ID NO: 5700 - DNA, 122 bp, Homo sapiens
  misc_feature (61)..(62): /note="This region represents a CpG dinucleotide"
  misc_feature (61)..(61): /note="Nucleotide may be methylated to form 5-methylcytosine"
atcaaaagcagagactctctttaaccagtacagcctcttttccagagaatgccaaggagacgctaacccagtttggtcctgagctggtttccatctccatgattcatgccataaatgtcatc

SEQ ID NO: 5701 - DNA, 122 bp, Homo sapiens
  misc_feature (61)..(62): /note="This region represents a CpG dinucleotide"
  misc_feature (61)..(61): /note="Nucleotide may be methylated to form 5-methylcytosine"
ctcgccctggcttcctccctctttccctgcagcttacctggccattgtatggaaacccggcgttccaggaagcagggtcacagccaatggcctggacagtcaggactgtactccatagcccg

SEQ ID NO: 5702 - DNA, 122 bp, Homo sapiens
  misc_feature (61)..(62): /note="This region represents a CpG dinucleotide"
  misc_feature (61)..(61): /note="Nucleotide may be methylated to form 5-methylcytosine"
agtggctggcaggaagagctttgagcaccttcttgggatctcagctaaggggcagcctgtcgcttacaagcttgtcttggtcatcagcagctgcacatctgtcttaaagtcaaccaggaagt

SEQ ID NO: 5703 - DNA, 122 bp, Homo sapiens
  misc_feature (61)..(62): /note="This region represents a CpG dinucleotide"
  misc_feature (61)..(61): /note="Nucleotide may be methylated to form 5-methylcytosine"
aatcttgctttaaaaccagttgtgggtggagtaaggagtcaccatggtgtggcatttatgcgaccaggggttcaaattgagttacttctgttgcaacatttggtaagctgactcagcaatca

SEQ ID NO: 5704 - DNA, 122 bp, Homo sapiens
  misc_feature (61)..(62): /note="This region represents a CpG dinucleotide"
  misc_feature (61)..(61): /note="Nucleotide may be methylated to form 5-methylcytosine"
atgtagagggtccatatggcctcagaatgacctgtgagtctcaccagttcctataacaaacgccacagatgcctcatgtgaagagcaagttttgtaaggaagctctggcattgagtgaagtc

SEQ ID NO: 5705 - DNA, 122 bp, Homo sapiens
  misc_feature (61)..(62): /note="This region represents a CpG dinucleotide"
  misc_feature (61)..(61): /note="Nucleotide may be methylated to form 5-methylcytosine"
atgtttccggcaagaggaaatggtgtctgactaatctctgagagttctttcagaatgggacggaataggttattacagcacatggggaagccaatgaccagaactctggaggttaaagcact

SEQ ID NO: 5706 - DNA, 122 bp, Homo sapiens
  misc_feature (61)..(62): /note="This region represents a CpG dinucleotide"
  misc_feature (61)..(61): /note="Nucleotide may be methylated to form 5-methylcytosine"
aggacccaatgcataatgcatattgactgttaactctctcctctctggaatttcttgcctcgtgagaaagttcagaacttcccacacacttaatatccaaacactttcttcacgcttagctc

SEQ ID NO: 5707 - DNA, 122 bp, Homo sapiens
  misc_feature (61)..(62): /note="This region represents a CpG dinucleotide"
  misc_feature (61)..(61): /note="Nucleotide may be methylated to form 5-methylcytosine"
ggaaaccatttaaacagccatattctgtcatattagtagtaaagtttcccatgccaaaggcgatggccacacacagcatgtcatgactcaagagttgagcaccaggtttgggcgaggtggcc

SEQ ID NO: 5708 - DNA, 122 bp, Homo sapiens
  misc_feature (61)..(62): /note="This region represents a CpG dinucleotide"
  misc_feature (61)..(61): /note="Nucleotide may be methylated to form 5-methylcytosine"
aaccaccttcccagcctgagcacaccacagttaaatacacccaaaggagaattaaaaagtcggtcagtatctgtctatcctatcttgatgtgagaattttcataggaaatgggatcaaacag

SEQ ID NO: 5709 - DNA, 122 bp, Homo sapiens
  misc_feature (61)..(62): /note="This region represents a CpG dinucleotide"
  misc_feature (61)..(61): /note="Nucleotide may be methylated to form 5-methylcytosine"
ctgattagcccgttgttttccctgctccctggtggctgggaggctcccagcgaagcctggcggccttgctgcagccattccactgctcaggaatatggctctgaatggatactgtcaccctt

SEQ ID NO: 5710 - DNA, 122 bp, Homo sapiens
  misc_feature (61)..(62): /note="This region represents a CpG dinucleotide"
  misc_feature (61)..(61): /note="Nucleotide may be methylated to form 5-methylcytosine"
ggatcccccactcggggacttcctcttcctctcagggcaggtgcagctgccacagtgagacgggcaccccgacccgggcatggaggggggcaaggggcccaggctcagagacttcctgagtg

SEQ ID NO: 5711 - DNA, 122 bp, Homo sapiens
  misc_feature (61)..(62): /note="This region represents a CpG dinucleotide"
  misc_feature (61)..(61): /note="Nucleotide may be methylated to form 5-methylcytosine"
cccatcttagtaaatggcagttcatccttctggttgctgtgacccaaagccttagagtcacgctgactcttcacttccatatttgccctcttagaggcgaatctcaacacagcagacagagt

SEQ ID NO: 5712 - DNA, 122 bp, Homo sapiens
  misc_feature (61)..(62): /note="This region represents a CpG dinucleotide"
  misc_feature (61)..(61): /note="Nucleotide may be methylated to form 5-methylcytosine"
tatggccaccctgactaaagcgtgacctccttttgctgcacgttttattcttagagcttgcgttcagcgccacaccaccacctatcacactggagagacaaatagttcatatctgccaaatc

SEQ ID NO: 5713 - DNA, 122 bp, Homo sapiens
  misc_feature (61)..(62): /note="This region represents a CpG dinucleotide"
  misc_feature (61)..(61): /note="Nucleotide may be methylated to form 5-methylcytosine"
cataacaaccctatgaggtcagaagtattgttatccccactttacagatgaagaagatggcgtgcaagaggattaaataagatgcccatggttacgcaaatcattagtggctgagattagga

SEQ ID NO: 5714 - DNA, 122 bp, Homo sapiens
  misc_feature (61)..(62): /note="This region represents a CpG dinucleotide"
  misc_feature (61)..(61): /note="Nucleotide may be methylated to form 5-methylcytosine"
tccactcaaggactaggaactgaatctctgcacccttaaaaccactctcttagccgggcgcggtggctcatacctgtaatcccagcactttgggaggccaaggcaggtggatcacgaggtca

SEQ ID NO: 5715 - DNA, 122 bp, Homo sapiens
  misc_feature (61)..(62): /note="This region represents a CpG dinucleotide"
  misc_feature (61)..(61): /note="Nucleotide may be methylated to form 5-methylcytosine"
gtgtgacctctccgaagcctccagggatgatactactccctggggtgcttatgccaaccacgttagagacaatggtttctgtacccattgcctggggctgccataataaagtgccacacact

SEQ ID NO: 5716 - DNA, 122 bp, Homo sapiens
  misc_feature (61)..(62): /note="This region represents a CpG dinucleotide"
  misc_feature (61)..(61): /note="Nucleotide may be methylated to form 5-methylcytosine"
acacatttctgagtcaaccttacatcctgcaaatcagctgttttgttccagctttagctgcgccccaagccaatgtgtcatgtacttctagtttatgtggttgtgctgaaatgtgtgcattt

SEQ ID NO: 5717 - DNA, 122 bp, Homo sapiens
  misc_feature (61)..(62): /note="This region represents a CpG dinucleotide"
  misc_feature (61)..(61): /note="Nucleotide may be methylated to form 5-methylcytosine"
gtcacccccagctcactggggaatctaggccatgccagtggcaagctggccccagtcccccggcttgctggagtagcaggaaagggcaagaacaaaacccagaccccagctggttctggaaa

SEQ ID NO: 5718 - DNA, 122 bp, Homo sapiens
  misc_feature (61)..(62): /note="This region represents a CpG dinucleotide"
  misc_feature (61)..(61): /note="Nucleotide may be methylated to form 5-methylcytosine"
tcctgacacacacaggattgtacatttcctggagccattcttcctacaacaccacatttacgaaaagcagctaacacatgagtgagcttaagggcttcagctgtgatcctactaatcctgtc

SEQ ID NO: 5719 - DNA, 122 bp, Homo sapiens
  misc_feature (61)..(62): /note="This region represents a CpG dinucleotide"
  misc_feature (61)..(61): /note="Nucleotide may be methylated to form 5-methylcytosine"
ccctcatgcttcctgggatcaactcccaagttacctgcttgtacccaagtctgtctcaggcgctgctttggatggagcccagactcagaatgttacctcacttgcctgcacctcagttttct

SEQ ID NO: 5720 - DNA, 122 bp, Homo sapiens
  misc_feature (61)..(62): /note="This region represents a CpG dinucleotide"
  misc_feature (61)..(61): /note="Nucleotide may be methylated to form 5-methylcytosine"
caagtatgttccatttactatcttggaacagtcataattggtattagaccaagtttttcccgtcaaaaccaaaagacaatggaaatgctaaacaccaaatgtcagtaaaccaaaaaagtcaa

SEQ ID NO: 5721 - DNA, 122 bp, Homo sapiens
  misc_feature (61)..(62): /note="This region represents a CpG dinucleotide"
  misc_feature (61)..(61): /note="Nucleotide may be methylated to form 5-methylcytosine"
agccttttgtgacctattggacttgggcccaaacagagctcagaacttaaaaactccagccgctcccctgggactgaaaaacagcaatgttggggaaccagggagtgctggggaaaccacag

SEQ ID NO: 5722 - DNA, 122 bp, Homo sapiens
  misc_feature (61)..(62): /note="This region represents a CpG dinucleotide"
  misc_feature (61)..(61): /note="Nucleotide may be methylated to form 5-methylcytosine"
ttggataagcttcttttccttggcgctgactcatctttcctggtgtcagaagctgagattcgtcactgtttgctacaacagctcaaggaaagaagggaaaaataattagtactgaagtcaca

SEQ ID NO: 5723 - DNA, 122 bp, Homo sapiens
  misc_feature (61)..(62): /note="This region represents a CpG dinucleotide"
  misc_feature (61)..(61): /note="Nucleotide may be methylated to form 5-methylcytosine"
tgctcctatgagaatctaatgctgccactgatctgacaggaggcggagctctgatagtaacgcttgctcacccactggcccaccatcctgctggcctcgggctgtattcctaacaggccatg

SEQ ID NO: 5724 - DNA, 122 bp, Homo sapiens
  misc_feature (61)..(62): /note="This region represents a CpG dinucleotide"
  misc_feature (61)..(61): /note="Nucleotide may be methylated to form 5-methylcytosine"
taaaataacatttcaagtcagcatagtgtggtggttaagataagccaggggcttcggaatcgttgatccttggcttcatattctggttctgtcacttcctattaatagctgtgtgcccttgg

SEQ ID NO: 5725 - DNA, 122 bp, Homo sapiens
  misc_feature (61)..(62): /note="This region represents a CpG dinucleotide"
  misc_feature (61)..(61): /note="Nucleotide may be methylated to form 5-methylcytosine"
tgattcacaggaacattaagaaaaccttgccaggctaagcaattccaggcagccttcagccgccaccaccggtgatgaatcacagaggctgctgccagagatgggacattttgggactctgc

SEQ ID NO: 5726 - DNA, 122 bp, Homo sapiens
  misc_feature (61)..(62): /note="This region represents a CpG dinucleotide"
  misc_feature (61)..(61): /note="Nucleotide may be methylated to form 5-methylcytosine"
tgctcagtgtcttagaacttagactaaagactggaaacaccagctcagggaatattccatcgtggtcatctgattgctggaacatgaaacttggagcacatctgcagtgaaatgggggagga

SEQ ID NO: 5727 - DNA, 122 bp, Homo sapiens
  misc_feature (61)..(62): /note="This region represents a CpG dinucleotide"
  misc_feature (61)..(61): /note="Nucleotide may be methylated to form 5-methylcytosine"
ctcccgggcccaggctcctcatcagccagagcaactgaatcacgggcctgctgcagggggcgtcaccctgcctgctcaaggggaagagggagctgggcctgtctgccggcttgacaccacct

SEQ ID NO: 5728 - DNA, 122 bp, Homo sapiens
  misc_feature (61)..(62): /note="This region represents a CpG dinucleotide"
  misc_feature (61)..(61): /note="Nucleotide may be methylated to form 5-methylcytosine"
taactttttatggatacataatattttacatatgtatgggatatctgtgatattttgttacgtgcataggatgtgtaatgattaagtcagagcattagtggtatccatcactttgggaattt

SEQ ID NO: 5729 - DNA, 122 bp, Homo sapiens
  misc_feature (61)..(62): /note="This region represents a CpG dinucleotide"
  misc_feature (61)..(61): /note="Nucleotide may be methylated to form 5-methylcytosine"
agtcttggtttcagagttcagcaagggatatgcatggtggtggtagcgttgggacagaagcggggcactacttgagagttttgaaatatgtaatttgtcacagcaaggacaagggcaagtga

SEQ ID NO: 5730 - DNA, 122 bp, Homo sapiens
  misc_feature (61)..(62): /note="This region represents a CpG dinucleotide"
  misc_feature (61)..(61): /note="Nucleotide may be methylated to form 5-methylcytosine"
tgatggcagaggtaaggagctggctctccaggacagatgtcctcaggttacatgtgcagccgtcaggcttctgcctgagccacctccaagcaaatctgcagccttctggactctgtaatgca

SEQ ID NO: 5731 - DNA, 122 bp, Homo sapiens
  misc_feature (61)..(62): /note="This region represents a CpG dinucleotide"
  misc_feature (61)..(61): /note="Nucleotide may be methylated to form 5-methylcytosine"
cccctgtatgatgacacagaaacctgaatgtcagcagcttctgcctgacactgcccatggcgagctccactgctcttccagggagtcccgggcagctgccagcagggaaggccctggagttt

SEQ ID NO: 5732 - DNA, 122 bp, Homo sapiens
  misc_feature (61)..(62): /note="This region represents a CpG dinucleotide"
  misc_feature (61)..(61): /note="Nucleotide may be methylated to form 5-methylcytosine"
tcctgacagaagagtacgaatgtctaccaaagttcagctttttgcattacttgtttttaacgtcaggaactgaatgttgcgcaaggatggtttttgtaaaagccagggatggcgtggcttcc

SEQ ID NO: 5733 - DNA, 122 bp, Homo sapiens
  misc_feature (61)..(62): /note="This region represents a CpG dinucleotide"
  misc_feature (61)..(61): /note="Nucleotide may be methylated to form 5-methylcytosine"
aggttattcctcaccatgtttggaggcttccagggatctacagaatataacttgcaaatacgtgatgtagataattccagcttttgagtgcctatgggaaagttgactgagttaatcctctg

SEQ ID NO: 5734 - DNA, 122 bp, Homo sapiens
  misc_feature (61)..(62): /note="This region represents a CpG dinucleotide"
  misc_feature (61)..(61): /note="Nucleotide may be methylated to form 5-methylcytosine"
tcgtgcgggcattgccgggctttcagagccccagtttctccctcaccccacccctttccacgtgctacctatagagaaggcagtgagcctggaggagctgatggcccagatagatagaagac

SEQ ID NO: 5735 - DNA, 122 bp, Homo sapiens
  misc_feature (61)..(62): /note="This region represents a CpG dinucleotide"
  misc_feature (61)..(61): /note="Nucleotide may be methylated to form 5-methylcytosine"
gctgaaaggcaactcataaaataaaacaccacaatgggtgactgggccaattgctttccacgctctgacctgcccacctccatgcaggtttgcaggggaggaatcatgtggcaaagacggca

SEQ ID NO: 5736 - DNA, 122 bp, Homo sapiens
  misc_feature (61)..(62): /note="This region represents a CpG dinucleotide"
  misc_feature (61)..(61): /note="Nucleotide may be methylated to form 5-methylcytosine"
tgttttataggggaggtaattgagcagaacttaggacagttacatgctttgcttcagttgcggggctgggatttggacctggctcctggcctgacacaggtcctcagcttccaccagccttg

SEQ ID NO: 5737 - DNA, 122 bp, Homo sapiens
  misc_feature (61)..(62): /note="This region represents a CpG dinucleotide"
  misc_feature (61)..(61): /note="Nucleotide may be methylated to form 5-methylcytosine"
caaatacttggcactctgtagcagtgtctctcacagtaatgctttgtttcttaacatgaccgtgaggactgcttggtcacaggcaaatactgtcctttatcagccaggacattcttaacaat

SEQ ID NO: 5738 - DNA, 122 bp, Homo sapiens
  misc_feature (61)..(62): /note="This region represents a CpG dinucleotide"
  misc_feature (61)..(61): /note="Nucleotide may be methylated to form 5-methylcytosine"
aggcctcggggagggcaccccctaagaccacagtggccaagatcacagtggccacggccacggccacagtcatggtggccacggccacagccactaatcaggaggccaggccaccctgcctc

SEQ ID NO: 5739 - DNA, 122 bp, Homo sapiens
  misc_feature (61)..(62): /note="This region represents a CpG dinucleotide"
  misc_feature (61)..(61): /note="Nucleotide may be methylated to form 5-methylcytosine"
tgttagtcaccttagagtaggtgactgacccgtccacctgtttagatcataaaccctacacgggcaagggcctactctgacatggtatcatgttcttagcacccagcagggagccctgcccc

SEQ ID NO: 5740 - DNA, 122 bp, Homo sapiens
  misc_feature (61)..(62): /note="This region represents a CpG dinucleotide"
  misc_feature (61)..(61): /note="Nucleotide may be methylated to form 5-methylcytosine"
tgggattacaggtgtgagtcactgcaccagggccattcagtcttataaactgccatttaccggaggtcaagaataatttataatggaccaattgtaatgaacgtttattgtattttaccctt

SEQ ID NO: 5741 - DNA, 122 bp, Homo sapiens
  misc_feature (61)..(62): /note="This region represents a CpG dinucleotide"
  misc_feature (61)..(61): /note="Nucleotide may be methylated to form 5-methylcytosine"
gtgcagactggagccagatggtacacccagaccttcccagcttaagccacctggtctcagcgaggcccaggccacctggatgcggggatgccacttagcttccatgtgtgtcagcttccttt

SEQ ID NO: 5742 - DNA, 122 bp, Homo sapiens
  misc_feature (61)..(62): /note="This region represents a CpG dinucleotide"
  misc_feature (61)..(61): /note="Nucleotide may be methylated to form 5-methylcytosine"
cagctctggcagaaaatgatggtgacagaaaatgacatttcaggaatggcttttaaggcacgaggagcaatagcctgaggataatcagagttgttaggctactctcctgtcctggaaagtga

SEQ ID NO: 5743 - DNA, 122 bp, Homo sapiens
  misc_feature (61)..(62): /note="This region represents a CpG dinucleotide"
  misc_feature (61)..(61): /note="Nucleotide may be methylated to form 5-methylcytosine"
gatctgtagacaaataagaaggtggaatatctgttgggtgaatgttatctatgtcttttacggtctgcttccatacagcaatagcctagggcaagggcaaggtcagaaaaattttagctttc

SEQ ID NO: 5744 - DNA, 122 bp, Homo sapiens
  misc_feature (61)..(62): /note="This region represents a CpG dinucleotide"
  misc_feature (61)..(61): /note="Nucleotide may be methylated to form 5-methylcytosine"
gcactcagggatgttttctcggacctcacccagagctatacgtaggatcaaatggaaatacgggatcattaactcagccctggaatgcagtctagcagcattgatgaagcagttgccatagt

SEQ ID NO: 5745 - DNA, 122 bp, Homo sapiens
  misc_feature (61)..(62): /note="This region represents a CpG dinucleotide"
  misc_feature (61)..(61): /note="Nucleotide may be methylated to form 5-methylcytosine"
ctgagatttgtgagccaggtttaggccagaagcctggggctgaggacactcctgcgggagcgtgaggatagcctctcttcccgccctatttgcaagctcagatgtctgttcattcactagaa

SEQ ID NO: 5746 - DNA, 122 bp, Homo sapiens
  misc_feature (61)..(62): /note="This region represents a CpG dinucleotide"
  misc_feature (61)..(61): /note="Nucleotide may be methylated to form 5-methylcytosine"
caggattaagccagatttacaaaatgggaagcttgcctgaagctgttgatgctgccaggccgaaggccactctagtggacagtgagtcagcagatgatgaactcacaaacttgaactggctt

SEQ ID NO: 5747 - DNA, 122 bp, Homo sapiens
  misc_feature (61)..(62): /note="This region represents a CpG dinucleotide"
  misc_feature (61)..(61): /note="Nucleotide may be methylated to form 5-methylcytosine"
ggcaagatcatctaaagcacaccacagcttgggatggtgtgcatgaatccaaaactttaacgtaaaactagactttgaggcatggtatatgagataggagagaagcatttctcaattttcta

SEQ ID NO: 5748 - DNA, 122 bp, Homo sapiens
  misc_feature (61)..(62): /note="This region represents a CpG dinucleotide"
  misc_feature (61)..(61): /note="Nucleotide may be methylated to form 5-methylcytosine"
tggtttttgtttttgtttttttaactgacagataacagtgtatgtatttatcatgtgcaacgtgacatattcttgaaaaatgcaagaggagcggatgttaagcactttcaccacaaaaatga

SEQ ID NO: 5749 - DNA, 122 bp, Homo sapiens
  misc_feature (61)..(62): /note="This region represents a CpG dinucleotide"
  misc_feature (61)..(61): /note="Nucleotide may be methylated to form 5-methylcytosine"
ccttattgtgtttgatactgagataggcagccctaaagtggggcttgggctgtggccttccggttgtcgagtgcgcatgcatttttccttccacagaaaacatacaaccatgtttctgccaa

SEQ ID NO: 5750 - DNA, 122 bp, Homo sapiens
  misc_feature (61)..(62): /note="This region represents a CpG dinucleotide"
  misc_feature (61)..(61): /note="Nucleotide may be methylated to form 5-methylcytosine"
gaaacaggagtcttaccagggtcatgctgagtgtacggcccatgacagcatggaacaggtcgtgtgcagctgggccagacacaacaaaaaattcacagatgaaaaggtattcgcggcaggaa

SEQ ID NO: 5751 - DNA, 122 bp, Homo sapiens
  misc_feature (61)..(62): /note="This region represents a CpG dinucleotide"
  misc_feature (61)..(61): /note="Nucleotide may be methylated to form 5-methylcytosine"
tggggcctttggggctgggtttgtgtcttccccaggctggccagtgctcctgggtggggtcgcggcggctctgggcgactcctcatttgcagagtcagcacaggcagggcccttcccaacag

SEQ ID NO: 5752 - DNA, 122 bp, Homo sapiens
  misc_feature (61)..(62): /note="This region represents a CpG dinucleotide"
  misc_feature (61)..(61): /note="Nucleotide may be methylated to form 5-methylcytosine"
agtacctgagtcatatcatcagtctcttgaacaaaccggacaccagttcttgatctcattcgtttaataccctgtggatccccatagtccttgagaggtgaggtaggtggaaaatgatggag

SEQ ID NO: 5753 - DNA, 122 bp, Homo sapiens
  misc_feature (61)..(62): /note="This region represents a CpG dinucleotide"
  misc_feature (61)..(61): /note="Nucleotide may be methylated to form 5-methylcytosine"
aaacattcctaagaacagagagcaacaacataaccttctgactcaagatagtctctgttccggtaatttgatgacaaatagtgttgctgatcagcagaatatagagtggaaagggcggcttt

SEQ ID NO: 5754 - DNA, 122 bp, Homo sapiens
  misc_feature (61)..(62): /note="This region represents a CpG dinucleotide"
  misc_feature (61)..(61): /note="Nucleotide may be methylated to form 5-methylcytosine"
ttgatgttgaaattactttaaagacctgttgattatgtggtattagggccattgtgacctcgctgtagctaagatcagtccactgcagcaggagtttcaagaacagcagcacaaaaataatg

SEQ ID NO: 5755 - DNA, 122 bp, Homo sapiens
  misc_feature (61)..(62): /note="This region represents a CpG dinucleotide"
  misc_feature (61)..(61): /note="Nucleotide may be methylated to form 5-methylcytosine"
ttgccacagctaatgagtggcagcactagcatttgagtccaggtctatctgattcccagtcgcagccacttagccccagactgtgccgctttccgcatagctgtcctgccatggatattatc

SEQ ID NO: 5756 - DNA, 122 bp, Homo sapiens
  misc_feature (61)..(62): /note="This region represents a CpG dinucleotide"
  misc_feature (61)..(61): /note="Nucleotide may be methylated to form 5-methylcytosine"
aaggaaaaagaacccttaaacccaagcatttaagaattatataatgctttcctggccgggcgcagtggctcatgcctgtaatcccagcactttgggaggccaaggtgggcagatcacctgag

SEQ ID NO: 5757 - DNA, 122 bp, Homo sapiens
  misc_feature (61)..(62): /note="This region represents a CpG dinucleotide"
  misc_feature (61)..(61): /note="Nucleotide may be methylated to form 5-methylcytosine"
tccaaattgcagaacttgtgtcttggtttctttcctagtcgttaagcatctctgcttacccgtcctgagttgagtgtgttccagatgtagtctcgtaacttctcatctgacacatctttgcc

SEQ ID NO: 5758 - DNA, 122 bp, Homo sapiens
  misc_feature (61)..(62): /note="This region represents a CpG dinucleotide"
  misc_feature (61)..(61): /note="Nucleotide may be methylated to form 5-methylcytosine"
ctggttttgagggaggatgaccttaaactctctcactcccaagctgggtgcaaaggtgaccgagctcaaagcccagcctccaagtatcacgactgccctgttctagaaatcatttctgggag

SEQ ID NO: 5759 - DNA, 122 bp, Homo sapiens
  misc_feature (61)..(62): /note="This region represents a CpG dinucleotide"
  misc_feature (61)..(61): /note="Nucleotide may be methylated to form 5-methylcytosine"
gcctcgccttactccagataggtctttggagaatgtgcatgtaggatagaatggctaaaacgaagacaagccaaacagttagagtgatcaaagggaaaccaaggggacaatgggaaaacaag

SEQ ID NO: 5760 - DNA, 122 bp, Homo sapiens
  misc_feature (61)..(62): /note="This region represents a CpG dinucleotide"
  misc_feature (61)..(61): /note="Nucleotide may be methylated to form 5-methylcytosine"
gcccaggagcagggagcagataatctggtaactggtgaaattccagagccaggctgaggccgggaactcttccccacccgcttcctcgttccagcttcctcaccatctactcatgcataccc

SEQ ID NO: 5761 - DNA, 122 bp, Homo sapiens
  misc_feature (61)..(62): /note="This region represents a CpG dinucleotide"
  misc_feature (61)..(61): /note="Nucleotide may be methylated to form 5-methylcytosine"
tcctaggagtgggagacagagtgaacaaacctcagtgtctatagcaacaggcacaagacacgcaggcaggacacacctcactgggccaacacccaatcctgaacagtaggaggtaggcttct

SEQ ID NO: 5762 - DNA, 122 bp, Homo sapiens
  misc_feature (61)..(62): /note="This region represents a CpG dinucleotide"
  misc_feature (61)..(61): /note="Nucleotide may be methylated to form 5-methylcytosine"
acacagaccacccgacagcatctctgacacttacagaatgccagtggaggctcagagaggcgtgggaagaatgtatctggccagaccacagggcagagagagggagggagggagggagggaa

SEQ ID NO: 5763 - DNA, 122 bp, Homo sapiens
  misc_feature (61)..(62): /note="This region represents a CpG dinucleotide"
  misc_feature (61)..(61): /note="Nucleotide may be methylated to form 5-methylcytosine"
tcacgcacaggcatctggtcaccctcctcccaattgtgcaactaagactggggagagcatcgtgaacaggcatcttgctcactcctgaaattgcagtccttggcacatacaaggcacccagt

SEQ ID NO: 5764 - DNA, 122 bp, Homo sapiens
  misc_feature (61)..(62): /note="This region represents a CpG dinucleotide"
  misc_feature (61)..(61): /note="Nucleotide may be methylated to form 5-methylcytosine"
gtgatcctactaatcctgtcttgcttttcaagacttctgtactcagacacaaaaacacaacgtaactctttaaaatccaagtactaaaatagcacccagagcctacatcttctttcaaaggc

SEQ ID NO: 5765 - DNA, 122 bp, Homo sapiens
  misc_feature (61)..(62): /note="This region represents a CpG dinucleotide"
  misc_feature (61)..(61): /note="Nucleotide may be methylated to form 5-methylcytosine"
ctcaggaatctgttgaaagagatgcgccctgaaaaaggaggataaaaccaagaaagaagacgacacgggatccaggaaataagagatttagcacagaaagaaaaagtaaaataaccctgtcg

SEQ ID NO: 5766 - DNA, 122 bp, Homo sapiens
  misc_feature (61)..(62): /note="This region represents a CpG dinucleotide"
  misc_feature (61)..(61): /note="Nucleotide may be methylated to form 5-methylcytosine"
ttgtgtcactagccgcactaagcacttccccactagtggccccatgtggttgtgtgtcatcgctgactacctgttacaggtgaggaagctgggtggtgcagagacagaaagccggtggccca

SEQ ID NO: 5767 - DNA, 122 bp, Homo sapiens
  misc_feature (61)..(62): /note="This region represents a CpG dinucleotide"
  misc_feature (61)..(61): /note="Nucleotide may be methylated to form 5-methylcytosine"
agttttacctgtatattcggtggaagatttcaggtgagcagaagttctgggaggattaagcgtcgagggagatcttgagaatgaacacagttgaaaatgaaatcagtccagttgtaagtaat

SEQ ID NO: 5768 - DNA, 122 bp, Homo sapiens
  misc_feature (61)..(62): /note="This region represents a CpG dinucleotide"
  misc_feature (61)..(61): /note="Nucleotide may be methylated to form 5-methylcytosine"
ttcactatttaaaagttttatttttcttatatcaggcctagaagcaacttccacatcagacgcactgtttacaaaaaaaaaaaaaaaaaaaaaaaaggtcccataaagccacaggtcctctg

SEQ ID NO: 5769 - DNA, 122 bp, Homo sapiens
  misc_feature (61)..(62): /note="This region represents a CpG dinucleotide"
  misc_feature (61)..(61): /note="Nucleotide may be methylated to form 5-methylcytosine"
tcagctgggaacattgcccaagattctgtaggtaagaataaagaaagaatggattaccaacggaagtctctgtcacaatgtctgtgctttagtctggcaaagctaaattaagctgcagcaac

SEQ ID NO: 5770 - DNA, 122 bp, Homo sapiens
  misc_feature (61)..(62): /note="This region represents a CpG dinucleotide"
  misc_feature (61)..(61): /note="Nucleotide may be methylated to form 5-methylcytosine"
ctcaagtgatccacccacttcggcctcccaaagagctgggattacaggcatgagccactgcgcccggccacatcctcgaattttaagcctcagctaaggaatgattgatttctctccaagca

SEQ ID NO: 5771 - DNA, 122 bp, Homo sapiens
  misc_feature (61)..(62): /note="This region represents a CpG dinucleotide"
  misc_feature (61)..(61): /note="Nucleotide may be methylated to form 5-methylcytosine"
acgatgtgcagaggctacctgtagtgatggtgctgagtcaagcctgtcaaccactgtgctcgttagtgaccaaggctgctttgacaggctgccagcttgtcagtggtttgcagccccccaga

SEQ ID NO: 5772 - DNA, 122 bp, Homo sapiens
  misc_feature (61)..(62): /note="This region represents a CpG dinucleotide"
  misc_feature (61)..(61): /note="Nucleotide may be methylated to form 5-methylcytosine"
cccctttgggctcaagtgagagtgacccatagagacaatactcagttttgctctcccattcgccatccagtgcagattatgcaatttgtcttcccacaccctcttcctcaacactgcttacc

SEQ ID NO: 5773 - DNA, 122 bp, Homo sapiens
  misc_feature (61)..(62): /note="This region represents a CpG dinucleotide"
  misc_feature (61)..(61): /note="Nucleotide may be methylated to form 5-methylcytosine"
atgttagtgactattaggaaataaataatatttcccagaagtgccataagatcattcatacgtcttatagtttgatgagttgctttgcattttgccaaggtggactactgtttgattctgta

SEQ ID NO: 5774 - DNA, 122 bp, Homo sapiens
  misc_feature (61)..(62): /note="This region represents a CpG dinucleotide"
  misc_feature (61)..(61): /note="Nucleotide may be methylated to form 5-methylcytosine"
aaaaataaatccgggacatgccattccccccccccgccccctgcccccattgcctgtccccgtccccaccccttgtcattgcattgtgaactcttggacttgatagtgaggttgctggttgc

SEQ ID NO: 5775 - DNA, 122 bp, Homo sapiens
  misc_feature (61)..(62): /note="This region represents a CpG dinucleotide"
  misc_feature (61)..(61): /note="Nucleotide may be methylated to form 5-methylcytosine"
ctaccaataactaagtgcaggttaatttactgtagcaggagatggaaagcagagctcaggcgtatgatactgcctaagtaaatgttgacagaaagaaactgaagaggaagggaaaagcatga

SEQ ID NO: 5776 - DNA, 122 bp, Homo sapiens
  misc_feature (61)..(62): /note="This region represents a CpG dinucleotide"
  misc_feature (61)..(61): /note="Nucleotide may be methylated to form 5-methylcytosine"
tgcaggttacaaaatcaccacaccaagaaaacagctgcatttttatagactagcaatgaacgatctgaaaggaccgtttacattaacatcaaagagaataaaatagtaggaatacacttaac

SEQ ID NO: 5777 - DNA, 122 bp, Homo sapiens
  misc_feature (61)..(62): /note="This region represents a CpG dinucleotide"
  misc_feature (61)..(61): /note="Nucleotide may be methylated to form 5-methylcytosine"
cttctggggcttgagtcataatgaaaagctcactgtcttctttgccgctcttggtggcctcgtggcttctctaattccctggccttagcatggaagcctctttatcattctgctctgtatga

SEQ ID NO: 5778 - DNA, 122 bp, Homo sapiens
  misc_feature (61)..(62): /note="This region represents a CpG dinucleotide"
  misc_feature (61)..(61): /note="Nucleotide may be methylated to form 5-methylcytosine"
ttcactgagaggtgagctttgctacccccagaatggcctccatctgcgttgctttgcattcgggcatgtggtgggagggggcagctcctcctattcacccacagcaaggcaaaacccggtcc

SEQ ID NO: 5779 - DNA, 122 bp, Homo sapiens
  misc_feature (61)..(62): /note="This region represents a CpG dinucleotide"
  misc_feature (61)..(61): /note="Nucleotide may be methylated to form 5-methylcytosine"
ctgaaaagacagtgagagaaggcagcaggcaaacctgggctattaaccacccaaagccagcgcctcctggcagaaatcttagtgtttctggttgtagacactcagcttggcagaggttgaga

SEQ ID NO: 5780 - DNA, 122 bp, Homo sapiens
  misc_feature (61)..(62): /note="This region represents a CpG dinucleotide"
  misc_feature (61)..(61): /note="Nucleotide may be methylated to form 5-methylcytosine"
tgataagattataaaagatttctctcgaattctcaacttttggtgaggcctctactctctcgccaaacagctgagtttttaatggattgtgtctcaagacaatcaaattggcacctttgaca

SEQ ID NO: 5781 - DNA, 122 bp, Homo sapiens
  misc_feature (61)..(62): /note="This region represents a CpG dinucleotide"
  misc_feature (61)..(61): /note="Nucleotide may be methylated to form 5-methylcytosine"
ccactgtttctctggcgtctgaatgctgactcattccccgggcaaccccagtttcaattccgatagctctctgacattttgtcactctgcatagttgagatgggacacctctcaggttagcc

SEQ ID NO: 5782 - DNA, 122 bp, Homo sapiens
  misc_feature (61)..(62): /note="This region represents a CpG dinucleotide"
  misc_feature (61)..(61): /note="Nucleotide may be methylated to form 5-methylcytosine"
tacgacatgagcatttcattttgtattggctggtacacagtaaatggagcaagcgggagccggctgatttccagagagacagaaaactcgaaaactgcagctgagagtcatttattccctcc

SEQ ID NO: 5783 - DNA, 122 bp, Homo sapiens
  misc_feature (61)..(62): /note="This region represents a CpG dinucleotide"
  misc_feature (61)..(61): /note="Nucleotide may be methylated to form 5-methylcytosine"
ctggcttcaagactctgtgagaagacagcagtgcttggagtgctggattctggccacttccgcaggctccactgacttataaagcctgcagataacaggaattactggatttctccttgcaa

SEQ ID NO: 5784 - DNA, 122 bp, Homo sapiens
  misc_feature (61)..(62): /note="This region represents a CpG dinucleotide"
  misc_feature (61)..(61): /note="Nucleotide may be methylated to form 5-methylcytosine"
ggaggctgtggtcccgagctcaaaagatgcaggcttgaggtcttaactgcttccatttagcgcacaagcccacgtccctgacaccagccacaggaggattctgcactcccatggtctctctg

SEQ ID NO: 5785 - DNA, 122 bp, Homo sapiens
  misc_feature (61)..(62): /note="This region represents a CpG dinucleotide"
  misc_feature (61)..(61): /note="Nucleotide may be methylated to form 5-methylcytosine"
tgtgtcaccctgtagtgatgccaggtggcctggccatcttggttcatccagggtggaacacgttgttcctggtgagctgtgtcgtgcccatcactccctcagagatgccagagcctgtcctg

SEQ ID NO: 5786 - DNA, 122 bp, Homo sapiens
  misc_feature (61)..(62): /note="This region represents a CpG dinucleotide"
  misc_feature (61)..(61): /note="Nucleotide may be methylated to form 5-methylcytosine"
aggatcacattctaccttgtgtgtccctagctccccgcacagtgcttgatacataggaaacgtctgctgaaatgcagagctgcacagaactcaagaaaaaaaaagggaggctacaaacccag

SEQ ID NO: 5787 - DNA, 122 bp, Homo sapiens
  misc_feature (61)..(62): /note="This region represents a CpG dinucleotide"
  misc_feature (61)..(61): /note="Nucleotide may be methylated to form 5-methylcytosine"
cacccggcctaaatcttaccttcttaatgagcttcccaggccttcctatctaaaattgcacgtccctgctacactgtaacttcctaaacccttccctggtttattattctccttaaccctga

SEQ ID NO: 5788 - DNA, 122 bp, Homo sapiens
  misc_feature (61)..(62): /note="This region represents a CpG dinucleotide"
  misc_feature (61)..(61): /note="Nucleotide may be methylated to form 5-methylcytosine"
gaccagtaggtcaccggaatgagtcaccgaggtaacacactagcagtgccgaatgaacagcggctgtcatattgacccactaaaacaccaggtggacaggggattatcattggaggcccaga

SEQ ID NO: 5789 - DNA, 122 bp, Homo sapiens
  misc_feature (61)..(62): /note="This region represents a CpG dinucleotide"
  misc_feature (61)..(61): /note="Nucleotide may be methylated to form 5-methylcytosine"
cttgatagaatcaagaatatttgttacaatggggaagtacagtttttggatgaggagctacgaaagactgctgatctgttaacttaaggtccagctgctgcactgcctctgatgaaaagcat

SEQ ID NO: 5790 - DNA, 122 bp, Homo sapiens
  misc_feature (61)..(62): /note="This region represents a CpG dinucleotide"
  misc_feature (61)..(61): /note="Nucleotide may be methylated to form 5-methylcytosine"
ggatttatcttagcaccgattaaggcttacccacaaggcaaggctctttctgtgtcctcacgctgtcactcctaaaactttccagaactacaagtgacccagctctcagtcaggaagggctc

SEQ ID NO: 5791 - DNA, 122 bp, Homo sapiens
  misc_feature (61)..(62): /note="This region represents a CpG dinucleotide"
  misc_feature (61)..(61): /note="Nucleotide may be methylated to form 5-methylcytosine"
ggtttttttgtttttgtttttttttgttttttttttttcttacaaaatagccatagtttgcgcaacccgttttggagagggcaagtacaaacaatctgttgttactgccttatataacagca

SEQ ID NO: 5792 - DNA, 122 bp, Homo sapiens
  misc_feature (61)..(62): /note="This region represents a CpG dinucleotide"
  misc_feature (61)..(61): /note="Nucleotide may be methylated to form 5-methylcytosine"
cagtgactaaggggaaaactgacccccttctttctaggagtctggagctctccagagccccgtccccagccctgggcagctgggagtgaagggcaccaggcccctgaaagcccaagtcaagt

SEQ ID NO: 5793 - DNA, 122 bp, Homo sapiens
  misc_feature (61)..(62): /note="This region represents a CpG dinucleotide"
  misc_feature (61)..(61): /note="Nucleotide may be methylated to form 5-methylcytosine"
tatgaagcaataggaaacacagagccgtcagagcgggaaagccctggaggcacgagtcagcgatgacaccacagggtattcaaggagcaccaatggcctgcaggtggcagaaacaatggagg

SEQ ID NO: 5794 - DNA, 122 bp, Homo sapiens
  misc_feature (61)..(62): /note="This region represents a CpG dinucleotide"
  misc_feature (61)..(61): /note="Nucleotide may be methylated to form 5-methylcytosine"
actagggctgtttgaccacccaggaactggaactagctggttgttacacccaaatctcttcggatgctgggctcctaaacgtgtcactgtgcagatgcagttgggagtaggcaggtgaagag

SEQ ID NO: 5795 - DNA, 122 bp, Homo sapiens
  misc_feature (61)..(62): /note="This region represents a CpG dinucleotide"
  misc_feature (61)..(61): /note="Nucleotide may be methylated to form 5-methylcytosine"
ccagaatgttccaacatagatatggaggctccgaggcagagtgatctggtaaattgaacacgacctcagtcttagatcccagatgtaaggataagtctcaaccagtctccccagccttactg

SEQ ID NO: 5796 - DNA, 122 bp, Homo sapiens
  misc_feature (61)..(62): /note="This region represents a CpG dinucleotide"
  misc_feature (61)..(61): /note="Nucleotide may be methylated to form 5-methylcytosine"
agtagtgatccccccattatccatggggatacattccaggatcctcggtttcttcctatacgactgcattgtataggccaggtagcttatacagcatggatacactggacaaagggatgatt

SEQ ID NO: 5797 - DNA, 122 bp, Homo sapiens
  misc_feature (61)..(62): /note="This region represents a CpG dinucleotide"
  misc_feature (61)..(61): /note="Nucleotide may be methylated to form 5-methylcytosine"
ccctaaactagaagagctagtcagcctctgccaggaactagcttgaatccacaaatgccacgcttgtcaggcccatcctggctttgcatccccactctctctccaccctcaagcctgccttt

SEQ ID NO: 5798 - DNA, 122 bp, Homo sapiens
  misc_feature (61)..(62): /note="This region represents a CpG dinucleotide"
  misc_feature (61)..(61): /note="Nucleotide may be methylated to form 5-methylcytosine"
gtcagtcatgatgtttcagcctctgcccttttcctgtatcaaccctgatggataatagggcgtgggttctgtctgttatcagggtgtggtcccctgtgaatgaagcactcccagccactgag

SEQ ID NO: 5799 - DNA, 122 bp, Homo sapiens
  misc_feature (61)..(62): /note="This region represents a CpG dinucleotide"
  misc_feature (61)..(61): /note="Nucleotide may be methylated to form 5-methylcytosine"
ttcacctcttactgagtaaccataggcaagtcacgaacttctctaagcctcaaactgatacgtaaaaggaaggagggagggaaataatcaccaccttacaggcatgtggatactgtctgttt

SEQ ID NO: 5800 - DNA, 122 bp, Homo sapiens
  misc_feature (61)..(62): /note="This region represents a CpG dinucleotide"
  misc_feature (61)..(61): /note="Nucleotide may be methylated to form 5-methylcytosine"
aaataaaaatttgcaactgaattggaaaaaatctgacactgaaggatgaaatgtagctttcgtagcatgagatttgtggcacaaactgaccagaggaaggaaatctgatgatctagatagat

SEQ ID NO: 5801 - DNA, 122 bp, Homo sapiens
  misc_feature (61)..(62): /note="This region represents a CpG dinucleotide"
  misc_feature (61)..(61): /note="Nucleotide may be methylated to form 5-methylcytosine"
gtgtcagaagttccagtttgtgctgactcaggaggacagaggctccgtgggctggaaccccggacaggagagggtgtgtgagccccgtcccctgcccagccaggaggaaatcccccgctccg

SEQ ID NO: 5802 - DNA, 122 bp, Homo sapiens
  misc_feature (61)..(62): /note="This region represents a CpG dinucleotide"
  misc_feature (61)..(61): /note="Nucleotide may be methylated to form 5-methylcytosine"
aaggaatactagtatgagagagaagtgagacggagaaggtaaaccagccaataaagggtgcgtcatgataccctcccaatcatagtggaaggctagaatttaatcctacaggagaattcgag

SEQ ID NO: 5803 - DNA, 122 bp, Homo sapiens
  misc_feature (61)..(62): /note="This region represents a CpG dinucleotide"
  misc_feature (61)..(61): /note="Nucleotide may be methylated to form 5-methylcytosine"
tttaaaatttcgcttgctgccttggttgctgtgatgtcacttgcccatccctagactgttcgccatggatttccctatcaaccctcagccctggcctttgatcctgtacagaagatcctggc

SEQ ID NO: 5804 - DNA, 122 bp, Homo sapiens
  misc_feature (61)..(62): /note="This region represents a CpG dinucleotide"
  misc_feature (61)..(61): /note="Nucleotide may be methylated to form 5-methylcytosine"
ctgtcccattaaagctgaagatgtggcttgtggaacagggggcagttagtcagcataaggcgtaagttgcaattgtttagtgttgctgatcttgaggtcagtgcttgtttagatgctagaga

SEQ ID NO: 5805 - DNA, 122 bp, Homo sapiens
  misc_feature (61)..(62): /note="This region represents a CpG dinucleotide"
  misc_feature (61)..(61): /note="Nucleotide may be methylated to form 5-methylcytosine"
tatagcttagaagggttagggacttgctagagctcactaatacgtggtgaaatcaggcttcggcactacccaatactgcctcaacaggggactttgtataagtgacccaatggcagttgggc

SEQ ID NO: 5806 - DNA, 122 bp, Homo sapiens
  misc_feature (61)..(62): /note="This region represents a CpG dinucleotide"
  misc_feature (61)..(61): /note="Nucleotide may be methylated to form 5-methylcytosine"
gaagaactcagtggagaattctaaagcatggggtccacctgaagagtcccagactgatgccgtctcttctacagccactggtgtcattgttaatcttgtccagtcacatgtcaatgtaactc

SEQ ID NO: 5807 - DNA, 122 bp, Homo sapiens
  misc_feature (61)..(62): /note="This region represents a CpG dinucleotide"
  misc_feature (61)..(61): /note="Nucleotide may be methylated to form 5-methylcytosine"
ccacttccagaattgtgcaacaggtgacctccaggataactatggcttatcttacagcaacgtagttcatctaggatagaaaattgtacctttatccctggtaccttctgactacagatgac

SEQ ID NO: 5808 - DNA, 122 bp, Homo sapiens
  misc_feature (61)..(62): /note="This region represents a CpG dinucleotide"
  misc_feature (61)..(61): /note="Nucleotide may be methylated to form 5-methylcytosine"
tatggtgatgcacactccagctctgtctcgctcccctctcagcacagtcccccaactccccgcattttgggcctggctttatccagggctggcattatccaggcccaggtgtggccaaaggg

SEQ ID NO: 5809 - DNA, 122 bp, Homo sapiens
  misc_feature (61)..(62): /note="This region represents a CpG dinucleotide"
  misc_feature (61)..(61): /note="Nucleotide may be methylated to form 5-methylcytosine"
aagcatttgacataattaaagaacagcaagtcagtgccacttaaacggtaatccaaccaccgccagtcagtgaacagctttttactgctccatgaacaggtaagtatagaaattgtgagtaa

SEQ ID NO: 5810 - DNA, 122 bp, Homo sapiens
  misc_feature (61)..(62): /note="This region represents a CpG dinucleotide"
  misc_feature (61)..(61): /note="Nucleotide may be methylated to form 5-methylcytosine"
agaagctcattacccatttgaaagactagggggaccgttaattatggaatccactgctgacgtttaggtaatcagaaaataaaggaatcacgggatcctgtggtgattcacaggaagtgggt

SEQ ID NO: 5811 - DNA, 122 bp, Homo sapiens
  misc_feature (61)..(62): /note="This region represents a CpG dinucleotide"
  misc_feature (61)..(61): /note="Nucleotide may be methylated to form 5-methylcytosine"
aaaggaccagtaacttctgctgctgatgtagctgccacagggattagggctggtgaggcacgtgtttaagtctcaggttccttaatgccagatgtgtagtctcagtcaatttcctcatttct

SEQ ID NO: 5812 - DNA, 122 bp, Homo sapiens
  misc_feature (61)..(62): /note="This region represents a CpG dinucleotide"
  misc_feature (61)..(61): /note="Nucleotide may be methylated to form 5-methylcytosine"
tcgtctcccaggagacatctcgccgtgcaaaatggcacgccacgaggtggagtacctgcccgacgagaaacaagaggcgggactgcaactcccagaagcctccgcggccaaggcctcaggcc

SEQ ID NO: 5813 - DNA, 122 bp, Homo sapiens
  misc_feature (61)..(62): /note="This region represents a CpG dinucleotide"
  misc_feature (61)..(61): /note="Nucleotide may be methylated to form 5-methylcytosine"
tccactgtaaagttttcaaatttgaatccatttgtccaaaggaaacattcagtatcttcacgcctttctcatatgtctggctgtgaaatcttgggcaaattacatcacctctcagaacctca

SEQ ID NO: 5814 - DNA, 122 bp, Homo sapiens
  misc_feature (61)..(62): /note="This region represents a CpG dinucleotide"
  misc_feature (61)..(61): /note="Nucleotide may be methylated to form 5-methylcytosine"
aggtatgacagagtggtttgccctttctgtcattctcccatgtgaggacacaacaagaggcgccatctataaagaaaagactgggccttcaccagacaccacatctgcctgcaccttgacct

SEQ ID NO: 5815 - DNA, 122 bp, Homo sapiens
  misc_feature (61)..(62): /note="This region represents a CpG dinucleotide"
  misc_feature (61)..(61): /note="Nucleotide may be methylated to form 5-methylcytosine"
cgcagtatacgcccaagagcagcgggggcaaagggcaaggcatgccgtctttccaaagcacggagtcaccagacaagtccacgcctgaagacgaatgttgtaatgttcagcttttgaagaac

SEQ ID NO: 5816 - DNA, 122 bp, Homo sapiens
  misc_feature (61)..(62): /note="This region represents a CpG dinucleotide"
  misc_feature (61)..(61): /note="Nucleotide may be methylated to form 5-methylcytosine"
aggttcctcagcccttcacattctgagttcagaacaccatgctgaggcacagtcatgagacgtgggagaggaacacccagcagacatttctagaagaaaagggttattctgtctcctaagcc

SEQ ID NO: 5817 - DNA, 122 bp, Homo sapiens
  misc_feature (61)..(62): /note="This region represents a CpG dinucleotide"
  misc_feature (61)..(61): /note="Nucleotide may be methylated to form 5-methylcytosine"
ctatccacctgtcggcccctcccacaaggctgtgcacgcccaggagcaggcactctgacacgtccagtgtgagcatcattaagagcccaattgctagccaagcctggctgtgcacctcacct

SEQ ID NO: 5818 - DNA, 122 bp, Homo sapiens
  misc_feature (61)..(62): /note="This region represents a CpG dinucleotide"
  misc_feature (61)..(61): /note="Nucleotide may be methylated to form 5-methylcytosine"
ggttagtattctatatcaactgactcttagtctatcttgagagtggcaaaatgggaatggcgaagaaagggagagaattcctaggtttgtcctgtctccagacaggaagttggattagtgct

SEQ ID NO: 5819 - DNA, 122 bp, Homo sapiens
  misc_feature (61)..(62): /note="This region represents a CpG dinucleotide"
  misc_feature (61)..(61): /note="Nucleotide may be methylated to form 5-methylcytosine"
aggaagcaaaagtgggcatggattctgaggtcaggcaggcctgcattcaaatcctgtctccgtccttaagtagctgtgtgaccttgggcgtgttggttaacctctctgcacctgtttcctcc

SEQ ID NO: 5820 - DNA, 122 bp, Homo sapiens
  misc_feature (61)..(62): /note="This region represents a CpG dinucleotide"
  misc_feature (61)..(61): /note="Nucleotide may be methylated to form 5-methylcytosine"
agggcctaaggtggacagacaactgattcatttaaatacatgagacaaatgcttaaaatacgtattttaaaaaaggctacctgagtaccaagcaaggttgaccaggctgactagctgggttg

SEQ ID NO: 5821 - DNA, 122 bp, Homo sapiens
  misc_feature (61)..(62): /note="This region represents a CpG dinucleotide"
  misc_feature (61)..(61): /note="Nucleotide may be methylated to form 5-methylcytosine"
aagtgtgcagaaaaatgagtcaccttcaatatgaaggatgtgagttgtgtacactgacaacggtctcaaagatacaacattattgcaggaggaatgcctgtgtacagagtggaccatcttat

SEQ ID NO: 5822 - DNA, 122 bp, Homo sapiens
  misc_feature (61)..(62): /note="This region represents a CpG dinucleotide"
  misc_feature (61)..(61): /note="Nucleotide may be methylated to form 5-methylcytosine"
ggtgattcatggattaacagattacactcatgacccaattacatcttaaaggccccatcacgctaccacactggagatgaagtttcaacatgagttttggagaggacaaatattaagccata

SEQ ID NO: 5823 - DNA, 122 bp, Homo sapiens
  misc_feature (61)..(62): /note="This region represents a CpG dinucleotide"
  misc_feature (61)..(61): /note="Nucleotide may be methylated to form 5-methylcytosine"
gagcattgtgtgtaatgacaaaaacagctacaaactacttagctgttcatcaagagagggcggattaaaatgagtcatggccattcctataaaggaacgctttctaaggggaatgctgtggg

SEQ ID NO: 5824 - DNA, 122 bp, Homo sapiens
  misc_feature (61)..(62): /note="This region represents a CpG dinucleotide"
  misc_feature (61)..(61): /note="Nucleotide may be methylated to form 5-methylcytosine"
agattggaaggggagaagctgactgctgtccctctctttgctgaccagaggcttctagtacgcagcaggcaggagacgagtgaggagaagcttttagatttaaatcatgatggcagtgttaa

SEQ ID NO: 5825 - DNA, 122 bp, Homo sapiens
  misc_feature (61)..(62): /note="This region represents a CpG dinucleotide"
  misc_feature (61)..(61): /note="Nucleotide may be methylated to form 5-methylcytosine"
ttatatcccgctctttaaacttccccatgtatactcaatattatgtttcactacaaaagacgtatttttaaacatgaagaggcatccctgactctctctctcccttacatctggagaaaact

SEQ ID NO: 5826 - DNA, 122 bp, Homo sapiens
  misc_feature (61)..(62): /note="This region represents a CpG dinucleotide"
  misc_feature (61)..(61): /note="Nucleotide may be methylated to form 5-methylcytosine"
gctcacagactatgggaggggcagaatgtgaacaaaagattataatcttatggtagataccgtaattgaggaacagaacattgtagaaccacagaagagggaacaattaactttacttgggg

SEQ ID NO: 5827 - DNA, 122 bp, Homo sapiens
  misc_feature (61)..(62): /note="This region represents a CpG dinucleotide"
  misc_feature (61)..(61): /note="Nucleotide may be methylated to form 5-methylcytosine"
taaaagctatatggcctttcctgatctggctttggaaggcatccagcctcacttccactacgttctattagtaacaggcaaatcataagaccagctcaagcttcaaggaaaggggaattaat

SEQ ID NO: 5828 - DNA, 122 bp, Homo sapiens
  misc_feature (61)..(62): /note="This region represents a CpG dinucleotide"
  misc_feature (61)..(61): /note="Nucleotide may be methylated to form 5-methylcytosine"
gacaggctccattgcaaatgtcctgacaaactatgagctgtttctcaatcatgttatcagcggtgcaaaatccagtgtcagcacacagccactgccaggagacagtgtgagcaccaacacac

SEQ ID NO: 5829 - DNA, 122 bp, Homo sapiens
  misc_feature (61)..(62): /note="This region represents a CpG dinucleotide"
  misc_feature (61)..(61): /note="Nucleotide may be methylated to form 5-methylcytosine"
tatttccaaacacatgtctataagcacctgggagtcccaacaagtttgttttgggctgggcgcagtggctcacgcctgtaatcccagcactttgggaggtcaaggagggtggatcacatgag

SEQ ID NO: 5830 - DNA, 122 bp, Homo sapiens
  misc_feature (61)..(62): /note="This region represents a CpG dinucleotide"
  misc_feature (61)..(61): /note="Nucleotide may be methylated to form 5-methylcytosine"
ccgcttgtctggtctaatgatctcactacggaaattatcaccagtcagcagactgtcattcgtgtccgcgacttgggttttgttcttccaagtgtttggcagctacagaatttctggccagc

SEQ ID NO: 5831 - DNA, 122 bp, Homo sapiens
  misc_feature (61)..(62): /note="This region represents a CpG dinucleotide"
  misc_feature (61)..(61): /note="Nucleotide may be methylated to form 5-methylcytosine"
ctccggcctgggcacctgagccctagaatgagacagcccggcggtcccgcggcgcgctggcgccctcgccctcgcgctccatggtctcgaagagcagccgcaccagcgccggccgtccctgg

SEQ ID NO: 5832 - DNA, 122 bp, Homo sapiens
  misc_feature (61)..(62): /note="This region represents a CpG dinucleotide"
  misc_feature (61)..(61): /note="Nucleotide may be methylated to form 5-methylcytosine"
cttcgataaacacaactggaggggcagctaagccacggcagtccccggcaggtttggccacgccagaactcggtatatgtttatctacatggacttcggaacagtgaattagcagcgggcat

SEQ ID NO: 5833 - DNA, 122 bp, Homo sapiens
  misc_feature (61)..(62): /note="This region represents a CpG dinucleotide"
  misc_feature (61)..(61): /note="Nucleotide may be methylated to form 5-methylcytosine"
ttagagtggccctgcttttgacagcatgaccttgagctagtcccttcatctgctccttaacgaggcaggatgacataatttctcagggcctctgtctctcaatagcccatgcacctgactca

SEQ ID NO: 5834 - DNA, 122 bp, Homo sapiens
  misc_feature (61)..(62): /note="This region represents a CpG dinucleotide"
  misc_feature (61)..(61): /note="Nucleotide may be methylated to form 5-methylcytosine"
ccttttgcatggcaccattacagcttggtaactaccagccagctttgctattcttgtgggcgttggcacctctcatcacttcctccccacccatctttcaaatgtctgaagtgttgcgttgg

SEQ ID NO: 5835 - DNA, 122 bp, Homo sapiens
  misc_feature (61)..(62): /note="This region represents a CpG dinucleotide"
  misc_feature (61)..(61): /note="Nucleotide may be methylated to form 5-methylcytosine"
taacaattagagctgcttgaacatgggatgaatagctttgaagtatggtgagtttctcaccgctgaagatgttgaaatagcctgaatgggtaacttccttgagcaggctgaacaagggctta

SEQ ID NO: 5836 - DNA, 122 bp, Homo sapiens
  misc_feature (61)..(62): /note="This region represents a CpG dinucleotide"
  misc_feature (61)..(61): /note="Nucleotide may be methylated to form 5-methylcytosine"
tatgatggatctgtcattttgtcactcagctcaccataaatacatacaactttcatagaccggtcctgccaggcaacagcacttgtattctggagctttctgaattatatatttgctctctt

SEQ ID NO: 5837 - DNA, 122 bp, Homo sapiens
  misc_feature (61)..(62): /note="This region represents a CpG dinucleotide"
  misc_feature (61)..(61): /note="Nucleotide may be methylated to form 5-methylcytosine"
ccattcgactctcagtccaaaaaaccacactcctattgtgaaaattagacctttgagcagcgttccatgtgtttattctacttgtatcaaagaggctttcatctccctagagcaaattatta

SEQ ID NO: 5838 - DNA, 122 bp, Homo sapiens
  misc_feature (61)..(62): /note="This region represents a CpG dinucleotide"
  misc_feature (61)..(61): /note="Nucleotide may be methylated to form 5-methylcytosine"
cacccccaggtccctggcgaccaccaggaactgcggcttagagctaatgtgccacagtggcgagggaggaatgtgagctgagagtacttgagattaacacatatacaggcctgcattaggtc

SEQ ID NO: 5839 - DNA, 122 bp, Homo sapiens
  misc_feature (61)..(62): /note="This region represents a CpG dinucleotide"
  misc_feature (61)..(61): /note="Nucleotide may be methylated to form 5-methylcytosine"
cacatgaaaatcatcattcctgttttacagatgaagaaactgaggtccagagaagttaaacgaccttcctaagattacacagcttagtaagtggcagaaccacagctggaagccaggtcctt

SEQ ID NO: 5840 - DNA, 122 bp, Homo sapiens
  misc_feature (61)..(62): /note="This region represents a CpG dinucleotide"
  misc_feature (61)..(61): /note="Nucleotide may be methylated to form 5-methylcytosine"
tctgagttcaccctccagaccatgatgttctatagcagatcttggcaacacatcaggttccgggaaagtacatgaatcatgatgggactctttaatctgtacctctgaacttcataaaaaac

SEQ ID NO: 5841 - DNA, 122 bp, Homo sapiens
  misc_feature (61)..(62): /note="This region represents a CpG dinucleotide"
  misc_feature (61)..(61): /note="Nucleotide may be methylated to form 5-methylcytosine"
aactaatgatgactggggcaggagctacaagtcgaacaggagctccaagaccatttctcgcgcctgcattcactacaagggcaccagtttggtcatagtaagcagcaggagccaacaccgga

SEQ ID NO: 5842 - DNA, 122 bp, Homo sapiens
  misc_feature (61)..(62): /note="This region represents a CpG dinucleotide"
  misc_feature (61)..(61): /note="Nucleotide may be methylated to form 5-methylcytosine"
agaaacctgtggttccagggagcctgcagccgaggggtggtgcaggtcaggcaagactaccgtgtccagttgggctggttgttcactccactagggtgactgggcaagcagtaagtgagctg

SEQ ID NO: 5843 - DNA, 122 bp, Homo sapiens
  misc_feature (61)..(62): /note="This region represents a CpG dinucleotide"
  misc_feature (61)..(61): /note="Nucleotide may be methylated to form 5-methylcytosine"
acaagataagcagaagctgcccatgcacacacatgttggcaaagccatgtgcggtgttaccgtgggccttggggaagatgcagtgtagaaggagtgtgtgcactggtgtgtggccctgggag

SEQ ID NO: 5844 - DNA, 122 bp, Homo sapiens
  misc_feature (61)..(62): /note="This region represents a CpG dinucleotide"
  misc_feature (61)..(61): /note="Nucleotide may be methylated to form 5-methylcytosine"
tcgtaggtttgaaacttaagagtatgtgcttaatctagtaatcatatgtctggtgactaacgagttttgacttgcttaagaaattgtcaccagtagagtactgtgggtctggttaaaaggtg

SEQ ID NO: 5845 - DNA, 122 bp, Homo sapiens
  misc_feature (61)..(62): /note="This region represents a CpG dinucleotide"
  misc_feature (61)..(61): /note="Nucleotide may be methylated to form 5-methylcytosine"
gcagagcactccctcccactaacttgttctgcatgtgtagagtctccccattttttttaacgcaaccctttcccctttttcctaccccacagctctgttccatgtaagttgccaacagtttc

SEQ ID NO: 5846 - DNA, 122 bp, Homo sapiens
  misc_feature (61)..(62): /note="This region represents a CpG dinucleotide"
  misc_feature (61)..(61): /note="Nucleotide may be methylated to form 5-methylcytosine"
ccccttggttcacctatttaacagattgaaactccaatcttcacagtgagaggaaggagacgggggaggaatctatctgcttctgtcttagtcaccttgggctgccatagcaaaataccata

SEQ ID NO: 5847 - DNA, 122 bp, Homo sapiens
  misc_feature (61)..(62): /note="This region represents a CpG dinucleotide"
  misc_feature (61)..(61): /note="Nucleotide may be methylated to form 5-methylcytosine"
cttccttccttctatgacttatctcagaatgacgttacaattgttattgtgtttgagtgccgacgctgaggcattggctagaaacttctataattaggtgttttctgacactagacaaaatt

SEQ ID NO: 5848 - DNA, 122 bp, Homo sapiens
  misc_feature (61)..(62): /note="This region represents a CpG dinucleotide"
  misc_feature (61)..(61): /note="Nucleotide may be methylated to form 5-methylcytosine"
atctctgccgtcatcttctcatggtgctttccctgtgggtgtgtctttgtccaacttctgcgttttcataaggacactggtcaaactaggtcagggccaaccctaatgacttcatcttagct

SEQ ID NO: 5849 - DNA, 122 bp, Homo sapiens
  misc_feature (61)..(62): /note="This region represents a CpG dinucleotide"
  misc_feature (61)..(61): /note="Nucleotide may be methylated to form 5-methylcytosine"
acatcagtttacaaaataaaagttcttacgtaagaaatgttagtcaccagtgtgatgaaacgtagaatgaaaccttaaactgtgttaatagaaatgtggtgtcagaatcatagatggtagtg

SEQ ID NO: 5850 - DNA, 122 bp, Homo sapiens
  misc_feature (61)..(62): /note="This region represents a CpG dinucleotide"
  misc_feature (61)..(61): /note="Nucleotide may be methylated to form 5-methylcytosine"
accagaaggctcaagttgccatgacgggaggctgaaagagcaagtggatctaggacgtgtcgagtctgagacgtctgatcgacatgaaagaggtgacattgagagggcaagtgcagccagcg

SEQ ID NO: 5851 - DNA, 122 bp, Homo sapiens
  misc_feature (61)..(62): /note="This region represents a CpG dinucleotide"
  misc_feature (61)..(61): /note="Nucleotide may be methylated to form 5-methylcytosine"
ctgagttatttatgagttgacgactcactagctggctttttgctgcctctgtccagagaacgttatagtgacacgacggccctaaggtgctgcacagttagggtggcaggactttggcacac

SEQ ID NO: 5852 - DNA, 122 bp, Homo sapiens
  misc_feature (61)..(62): /note="This region represents a CpG dinucleotide"
  misc_feature (61)..(61): /note="Nucleotide may be methylated to form 5-methylcytosine"
tcctcccaaccctaggatttgatggtccttattttctgagtaacattaggttcctaatggcggtcactcttagtggctatgactgagggaggtgtcaaattatgttctacagtgtgagttca

SEQ ID NO: 5853 - DNA, 122 bp, Homo sapiens
  misc_feature (61)..(62): /note="This region represents a CpG dinucleotide"
  misc_feature (61)..(61): /note="Nucleotide may be methylated to form 5-methylcytosine"
gtagtccagagagcagtgtgtgccaccctcccagatttctctgattccttggagcaaagtcgcttaattgggagtcagcacagcctcctccctcattagcactggcctgcagtgacaggccc

SEQ ID NO: 5854 - DNA, 122 bp, Homo sapiens
  misc_feature (61)..(62): /note="This region represents a CpG dinucleotide"
  misc_feature (61)..(61): /note="Nucleotide may be methylated to form 5-methylcytosine"
ctgaattcattccattacaccatattgctgtgcgtgtgtgtgcacgtgtgtgcttgcgcccgcatgtatgttgaatgggagtgtgggcaggtcagctagaacatcagctgcaattcaccagg

SEQ ID NO: 5855 - DNA, 122 bp, Homo sapiens
  misc_feature (61)..(62): /note="This region represents a CpG dinucleotide"
  misc_feature (61)..(61): /note="Nucleotide may be methylated to form 5-methylcytosine"
ctgtctgtacacacacgcatttcaccaggcgcagtgcagactgtctcatgcccatgtgggcgctgggatgcttcctgtacagatgtctcatgccttcagttacacataggtgttcctgttta

SEQ ID NO: 5856 - DNA, 122 bp, Homo sapiens
  misc_feature (61)..(62): /note="This region represents a CpG dinucleotide"
  misc_feature (61)..(61): /note="Nucleotide may be methylated to form 5-methylcytosine"
ggatggcaattcatgatttacaaagcacctaagcgaaataatatatcccatcttaatcctcgtaaacacctcataattattacatgattgcagaagaggaaacaaaagcccagagaactgaa

SEQ ID NO: 5857 - DNA, 122 bp, Homo sapiens
  misc_feature (61)..(62): /note="This region represents a CpG dinucleotide"
  misc_feature (61)..(61): /note="Nucleotide may be methylated to form 5-methylcytosine"
aaaggcaaatccgaattccaaatcagtcattgatatgaacatgaaatccccaaggaagcacgttccaagctgagtaagaatgataagggttagatgagttgtcaattgcttcacagcatatt

SEQ ID NO: 5858 - DNA, 122 bp, Homo sapiens
  misc_feature (61)..(62): /note="This region represents a CpG dinucleotide"
  misc_feature (61)..(61): /note="Nucleotide may be methylated to form 5-methylcytosine"
ctctgcggctggagaatccagttctaagctggttcacttatgcagctggcaagtggtagtcgctctaggcaggaaatctcacttcctcaatatgtaaacctcttcacaggtttattggagtg

SEQ ID NO: 5859 - DNA, 122 bp, Homo sapiens
  misc_feature (61)..(62): /note="This region represents a CpG dinucleotide"
  misc_feature (61)..(61): /note="Nucleotide may be methylated to form 5-methylcytosine"
aagttgaggtggtttcaatacagctcttcttagacaggcagatggactttacaacatatgcgtgtcctgcccaagcttatactacactggtaatcctcataaagtaaaaatacctcttagtc

SEQ ID NO: 5860 - DNA, 122 bp, Homo sapiens
  misc_feature (61)..(62): /note="This region represents a CpG dinucleotide"
  misc_feature (61)..(61): /note="Nucleotide may be methylated to form 5-methylcytosine"
catgggacagggttcagagccgctggactgcctggcagggcttgcgcacgtttgagagcacggtgctcccgtttccatcccagctgcagtcctcatcctcttgactgtggcttctttccctc

SEQ ID NO: 5861 - DNA, 122 bp, Homo sapiens
  misc_feature (61)..(62): /note="This region represents a CpG dinucleotide"
  misc_feature (61)..(61): /note="Nucleotide may be methylated to form 5-methylcytosine"
gcattgagtaatgtcttgtaacagagctgattgaattcctgaatgagttgaatggcagcacgatagcaataacatctgaccagcctaccataggtggttctattactacctatgtagtcata

SEQ ID NO: 5862 - DNA, 122 bp, Homo sapiens
  misc_feature (61)..(62): /note="This region represents a CpG dinucleotide"
  misc_feature (61)..(61): /note="Nucleotide may be methylated to form 5-methylcytosine"
tgtgtgccaagcccaaaccaggttggagtggctctgggttgaggacctgcccttcctttacgtggtccacaggcagcaagacctgaaaatgccctctcctactatttctaaggcattctcaa

SEQ ID NO: 5863 - DNA, 122 bp, Homo sapiens
  misc_feature (61)..(62): /note="This region represents a CpG dinucleotide"
  misc_feature (61)..(61): /note="Nucleotide may be methylated to form 5-methylcytosine"
agtccctccacctgggcaccaggtgtaagcctgacctgtgccgtgtacacagtgctcattcgtgccctgagacaggaagctacagagatccagaccaacagctcacagtaagcttgggccag

SEQ ID NO: 5864 - DNA, 122 bp, Homo sapiens
  misc_feature (61)..(62): /note="This region represents a CpG dinucleotide"
  misc_feature (61)..(61): /note="Nucleotide may be methylated to form 5-methylcytosine"
gaggaatccaaaggccagtgcaccatgcagcctgggactgaatgattggcattgtcatctcgtcattccaggacatgaccactatgtggcaggaaaggatgtggcagaagggcaggctatgg

SEQ ID NO: 5865 - DNA, 122 bp, Homo sapiens
  misc_feature (61)..(62): /note="This region represents a CpG dinucleotide"
  misc_feature (61)..(61): /note="Nucleotide may be methylated to form 5-methylcytosine"
acaaccaccagggaaaggctgtgttggttccttaatcctacaccctgcagggcggccccgcggctttctagcttgtttcctgacccgtgggtcttcctgtcactccacgggagaccgcagaa

SEQ ID NO: 5866 - DNA, 122 bp, Homo sapiens
  misc_feature (61)..(62): /note="This region represents a CpG dinucleotide"
  misc_feature (61)..(61): /note="Nucleotide may be methylated to form 5-methylcytosine"
tcatctgtccaatgggaatagtcatcctcccatcacaggtcatgaatgagacaacactggcgtagcacttcatacaggctgcgctttgtggtaaatgctcaacaagtgggcgttgttctcat

SEQ ID NO: 5867 - DNA, 122 bp, Homo sapiens
  misc_feature (61)..(62): /note="This region represents a CpG dinucleotide"
  misc_feature (61)..(61): /note="Nucleotide may be methylated to form 5-methylcytosine"
tcaattttgagatgtaacaaaaatggcatcttatctaggtttgactatttgttgagcacacgctgtgtgttgcatcttgggctacacgtgccacacaggaagcaatttataagatgcaggct

SEQ ID NO: 5868 - DNA, 122 bp, Homo sapiens
  misc_feature (61)..(62): /note="This region represents a CpG dinucleotide"
  misc_feature (61)..(61): /note="Nucleotide may be methylated to form 5-methylcytosine"
ttcaccagcttctgaagtggttttcttgactcagcactgtcaattaagatctgttcactgcggcagggttgatgttcttgaaacagtactgtcatcacttcatcaacatactcggacctctt

SEQ ID NO: 5869 - DNA, 122 bp, Homo sapiens
  misc_feature (61)..(62): /note="This region represents a CpG dinucleotide"
  misc_feature (61)..(61): /note="Nucleotide may be methylated to form 5-methylcytosine"
gggaggatgtagaaattcctatttgtaagggtttgcgatctgggtatatgtccactgagccgtgaacttactgtctcgagttctgtattctagttgggactgttctgctaactgctggaggg

SEQ ID NO: 5870 - DNA, 122 bp, Homo sapiens
  misc_feature (61)..(62): /note="This region represents a CpG dinucleotide"
  misc_feature (61)..(61): /note="Nucleotide may be methylated to form 5-methylcytosine"
ccccggcctgagccttcatagggcacaagactggaatgtcagcaagaccggcacaagtggcgtcaactccaggagaccacctggcaggggctggcaccatgggctaagaatcaggcaactta

SEQ ID NO: 5871 - DNA, 122 bp, Homo sapiens
  misc_feature (61)..(62): /note="This region represents a CpG dinucleotide"
  misc_feature (61)..(61): /note="Nucleotide may be methylated to form 5-methylcytosine"
taactttccacacctaagcaacaaaacgaccagaggctactctctttgaccttttctgaacgacaaatgggaaattgggtgtcaacaacaaatcagactgattgcaggtggagtcttctttt

SEQ ID NO: 5872 - DNA, 122 bp, Homo sapiens
  misc_feature (61)..(62): /note="This region represents a CpG dinucleotide"
  misc_feature (61)..(61): /note="Nucleotide may be methylated to form 5-methylcytosine"
ggcctccacccaacatccagtatgcaactgaggcctcttgccaacagctgtgtgagtgaacgtggaaactgatgctccggtcccagacaggccttcggaagacggcagctgccacctcatgg

SEQ ID NO: 5873 - DNA, 122 bp, Homo sapiens
  misc_feature (61)..(62): /note="This region represents a CpG dinucleotide"
  misc_feature (61)..(61): /note="Nucleotide may be methylated to form 5-methylcytosine"
tactcgatgccctgcttggggctgctcagtgtggccagtggggatgtggtatcagctggacggaggcctggctactcctgatctgaggtaccttgacattgaccagcccttgcctggtgtgg

SEQ ID NO: 5874 - DNA, 122 bp, Homo sapiens
  misc_feature (61)..(62): /note="This region represents a CpG dinucleotide"
  misc_feature (61)..(61): /note="Nucleotide may be methylated to form 5-methylcytosine"
catagtgaccgttctcctagggaaagcttttcacacattcaaatctgttgctacaggcagcgttcgtgcacacacaaacagatccaagtaagcggtggctgcaacccagtcctgagtcaatg

SEQ ID NO: 5875 - DNA, 122 bp, Homo sapiens
  misc_feature (61)..(62): /note="This region represents a CpG dinucleotide"
  misc_feature (61)..(61): /note="Nucleotide may be methylated to form 5-methylcytosine"
caacctctgtctgccaggttcaagtgatcttgtgcctcttgtgcctattgggactacaggcgtgcaccaccacgcccggctaattctttttttttttttttagtagagatggggtttctcta

SEQ ID NO: 5876 - DNA, 122 bp, Homo sapiens
  misc_feature (61)..(62): /note="This region represents a CpG dinucleotide"
  misc_feature (61)..(61): /note="Nucleotide may be methylated to form 5-methylcytosine"
cgggcgccgggaggggatgctgaggctgatggagctgcctccagggctagggccactcaccggaggagggcggggcctgcacttgaagtcaggccgcacctgtctgtttttggaagggtagc

SEQ ID NO: 5877 - DNA, 122 bp, Homo sapiens
  misc_feature (61)..(62): /note="This region represents a CpG dinucleotide"
  misc_feature (61)..(61): /note="Nucleotide may be methylated to form 5-methylcytosine"
tgccacctgcttcttagcatcaatatgctaaggacagacacactgacttgatctctgctccgtaaacacaaccacccttaattccctgcctctcccagctgagtcattgtactcactggctc

SEQ ID NO: 5878 - DNA, 122 bp, Homo sapiens
  misc_feature (61)..(62): /note="This region represents a CpG dinucleotide"
  misc_feature (61)..(61): /note="Nucleotide may be methylated to form 5-methylcytosine"
ccccaggaaggctttaaatgctgatgcctaagcctcacccatagattctgattctacttccgtcagtatcgaatgcctctccccaggtgctcctgctgccctatgagcattgagaaccctga

SEQ ID NO: 5879 - DNA, 122 bp, Homo sapiens
  misc_feature (61)..(62): /note="This region represents a CpG dinucleotide"
  misc_feature (61)..(61): /note="Nucleotide may be methylated to form 5-methylcytosine"
gtatatagataaatagctctttgaggaagacgcggtcgtaggtgttgcggatcgctgatccgcacgctcctgctactgactcaccgctgttcgccctcgccgaggaaccagtcgctcaggaa

SEQ ID NO: 5880 - DNA, 122 bp, Homo sapiens
  misc_feature (61)..(62): /note="This region represents a CpG dinucleotide"
  misc_feature (61)..(61): /note="Nucleotide may be methylated to form 5-methylcytosine"
gagaacacgtgtgtaataggtggcacctgcctggctgtataaccaggtggcatccctctccgtctttgcaatctcttcctggattgtctgggatccagatcacattctggttcaatggacat

SEQ ID NO: 5881 - DNA, 122 bp, Homo sapiens
  misc_feature (61)..(62): /note="This region represents a CpG dinucleotide"
  misc_feature (61)..(61): /note="Nucleotide may be methylated to form 5-methylcytosine"
atctcaagggaggaagtgaacaattacctaatgagcttgctgtgccttaagaagagggagcggtaactggcactgagatctggggcttgacgttgactcctagccctcccactcagtacatg

SEQ ID NO: 5882 - DNA, 122 bp, Homo sapiens
  misc_feature (61)..(62): /note="This region represents a CpG dinucleotide"
  misc_feature (61)..(61): /note="Nucleotide may be methylated to form 5-methylcytosine"
gtttaaggttaagtaagcctttcatccttgcttaatcctaaaaccctacatttaagtacacggcaaagaaaacgtacaatgcaaaggcaagggcatgcttgaagaatgcaaagcagcaaagg

SEQ ID NO: 5883 - DNA, 122 bp, Homo sapiens
  misc_feature (61)..(62): /note="This region represents a CpG dinucleotide"
  misc_feature (61)..(61): /note="Nucleotide may be methylated to form 5-methylcytosine"
tatttttagtagagatggggttttgccacgttggccaggctggtctcaagctcccaacctcgagtgatccacctaccacgcctcccaagttgctaggattacaggcatgagccaccatgccc

SEQ ID NO: 5884 - DNA, 122 bp, Homo sapiens
  misc_feature (61)..(62): /note="This region represents a CpG dinucleotide"
  misc_feature (61)..(61): /note="Nucleotide may be methylated to form 5-methylcytosine"
ttgctggaccagaagagccttcctttcctcttgtcagctgaactggctctaagtgcagagcgtcatacagatttgcccaatacactagtcattttcagtgcccatgattcagctgccatggt

SEQ ID NO: 5885 - DNA, 122 bp, Homo sapiens
  misc_feature (61)..(62): /note="This region represents a CpG dinucleotide"
  misc_feature (61)..(61): /note="Nucleotide may be methylated to form 5-methylcytosine"
ggagggtgagaccaggcagggcagggcaggctgcaggaatgacccaggacaggtgggcagcggaggaggagaacgcggaggaactgcaaattcctgcctctcccagcaactgtgaagggacc

SEQ ID NO: 5886 - DNA, 122 bp, Homo sapiens
  misc_feature (61)..(62): /note="This region represents a CpG dinucleotide"
  misc_feature (61)..(61): /note="Nucleotide may be methylated to form 5-methylcytosine"
gagcttgagtaagaagtcttgggtgtagggatacagggtgggaatacaggtcaaaggaaccggttcagttgtttcagttagtcaccgaggaagtgatgccacagcactgtatttttaggaaa

SEQ ID NO: 5887 - DNA, 122 bp, Homo sapiens
  misc_feature (61)..(62): /note="This region represents a CpG dinucleotide"
  misc_feature (61)..(61): /note="Nucleotide may be methylated to form 5-methylcytosine"
aaagaggcagagcagctttgccaccggcttatggagcatggcatcatccagcatggtgagcgtattgggcagcttttgctgcaggaacaaacagccagccccaaatcttgtgtcttacaaca

SEQ ID NO: 5888 - DNA, 122 bp, Homo sapiens
  misc_feature (61)..(62): /note="This region represents a CpG dinucleotide"
  misc_feature (61)..(61): /note="Nucleotide may be methylated to form 5-methylcytosine"
gagattccgaaaacatgttcttgtttgcgagatgactacagatgctgccttcccactgtgcgttctgtcttgtctctctccctttctacccatctggtcgttgaaaccaaatgaaccttctc

SEQ ID NO: 5889 - DNA, 122 bp, Homo sapiens
  misc_feature (61)..(62): /note="This region represents a CpG dinucleotide"
  misc_feature (61)..(61): /note="Nucleotide may be methylated to form 5-methylcytosine"
atcttgttcgttactgttaactgccacattcagcccaatgcctagctctgaatatgcactcgtaagtattggctgaatgaattaatcattttgttattagtaataatgactctgccactctg

SEQ ID NO: 5890 - DNA, 122 bp, Homo sapiens
  misc_feature (61)..(62): /note="This region represents a CpG dinucleotide"
  misc_feature (61)..(61): /note="Nucleotide may be methylated to form 5-methylcytosine"
ctgtttggatctcgttaatctctgcaaaatccctgtgcccacaagctggcgtccaaaactcgcttctactggattgaagaatggcctacttcagttcaccaggggctcctaagggagacttt

SEQ ID NO: 5891 - DNA, 122 bp, Homo sapiens
  misc_feature (61)..(62): /note="This region represents a CpG dinucleotide"
  misc_feature (61)..(61): /note="Nucleotide may be methylated to form 5-methylcytosine"
actttagagaaaaagcaattttgattggatttctgattttaaacctgtccaaagaacatacgctgcttgcttagacaatagaagtggtcgagattgaaaaaggaggaaaaataaaaaacaaa

SEQ ID NO: 5892 - DNA, 122 bp, Homo sapiens
  misc_feature (61)..(62): /note="This region represents a CpG dinucleotide"
  misc_feature (61)..(61): /note="Nucleotide may be methylated to form 5-methylcytosine"
ccaactcacaaaaccatgccactgtgggagcagaagttgggagtccagagacctgtctttcgacttccctttgtaggggtgactccagcagcacctgagtcacctctacaaaccctggggct

SEQ ID NO: 5893 - DNA, 122 bp, Homo sapiens
  misc_feature (61)..(62): /note="This region represents a CpG dinucleotide"
  misc_feature (61)..(61): /note="Nucleotide may be methylated to form 5-methylcytosine"
tttcttcagtgtgtgaaaaatcctgaggattcatcttgcacatctgagatctgagccagtcgctgtggttgttttagctccttgactccttgtggtttatgtcatcatacatgactcagcat

SEQ ID NO: 5894 - DNA, 122 bp, Homo sapiens
  misc_feature (61)..(62): /note="This region represents a CpG dinucleotide"
  misc_feature (61)..(61): /note="Nucleotide may be methylated to form 5-methylcytosine"
gtccttgggccaggccctttattgtgtccaggacattatccaaacaggtttggcacagggcgtctcaatgagtgggcttagagcaagcagacacgagtttcagaaggtcatgctgtgactag

SEQ ID NO: 5895 - DNA, 122 bp, Homo sapiens
  misc_feature (61)..(62): /note="This region represents a CpG dinucleotide"
  misc_feature (61)..(61): /note="Nucleotide may be methylated to form 5-methylcytosine"
gagctgattatgggcaatatcataacctcatttattcagacaagctacccaaatcacagacgttctttaactggccacttttaagaaaatacttgccaaataatgggcttgttaaatagcaa

SEQ ID NO: 5896 - DNA, 122 bp, Homo sapiens
  misc_feature (61)..(62): /note="This region represents a CpG dinucleotide"
  misc_feature (61)..(61): /note="Nucleotide may be methylated to form 5-methylcytosine"
acaaactaactgctggactgcagcgaaacccgacccctgtttggaggcactccaggtttccggaggattgtcatctccatagctgcggcaagaaactaaataagacccatttatgcacagtg

SEQ ID NO: 5897 - DNA, 122 bp, Homo sapiens
  misc_feature (61)..(62): /note="This region represents a CpG dinucleotide"
  misc_feature (61)..(61): /note="Nucleotide may be methylated to form 5-methylcytosine"
gtaggtattaatgcctgtattctatagacgaggaaactgaggctcagggagattgagtcacgtgcccaatgtcacgtagctggtaaatgacagaactaggatttgaaaccagatgagctggg

SEQ ID NO: 5898 - DNA, 122 bp, Homo sapiens
  misc_feature (61)..(62): /note="This region represents a CpG dinucleotide"
  misc_feature (61)..(61): /note="Nucleotide may be methylated to form 5-methylcytosine"
gcctaagtcttaatgatctaccaagctgcacagaagcaaatcctcattctttgactccctcgggcccaactagacatgaagctgctgaagtcctagagatggacttttccagcttgctgata

SEQ ID NO: 5899 - DNA, 122 bp, Homo sapiens
  misc_feature (61)..(62): /note="This region represents a CpG dinucleotide"
  misc_feature (61)..(61): /note="Nucleotide may be methylated to form 5-methylcytosine"
ctgtgttgaagcccaggctttggacttaggaagcctgggtttggagccacatcccagctgcgtgagccggggcaggcggctgagctctgtgagccacagtcttctcatctgaaaatggggct

SEQ ID NO: 5900 - DNA, 122 bp, Homo sapiens
  misc_feature (61)..(62): /note="This region represents a CpG dinucleotide"
  misc_feature (61)..(61): /note="Nucleotide may be methylated to form 5-methylcytosine"
tgctgtacaggtttgtagcccaggggcaacaggtgatcccctctaacctggatgtgtggtcgcctgtaccatctaggtctgtgtgaacacactctctggtgttcctatcatgacaaaatcct

SEQ ID NO: 5901 - DNA, 122 bp, Homo sapiens
  misc_feature (61)..(62): /note="This region represents a CpG dinucleotide"
  misc_feature (61)..(61): /note="Nucleotide may be methylated to form 5-methylcytosine"
aacgctttcttagcactgctccccgcaggcagccccaccgtcagcagagctgggtcctggcggttaccttggctaggcttagccatatccgtgtcctggcatccccaggggtgtttgtggtg

SEQ ID NO: 5902 - DNA, 122 bp, Homo sapiens
  misc_feature (61)..(62): /note="This region represents a CpG dinucleotide"
  misc_feature (61)..(61): /note="Nucleotide may be methylated to form 5-methylcytosine"
cagatactgaggtcacccattgtgttcaagttcctttaatttatctgaaatgagtctgggcgtggtggctcacgcctgtaatcccagcactttgggaagccaagccgggtggatcacttgag

SEQ ID NO: 5903 - DNA, 122 bp, Homo sapiens
  misc_feature (61)..(62): /note="This region represents a CpG dinucleotide"
  misc_feature (61)..(61): /note="Nucleotide may be methylated to form 5-methylcytosine"
agccaacaccttggggtagcttttacctttactaacagatctcagcatggtatgctactccgtaccatgagtggctgttaccaatgccatgggttcttgtaatcacccaggatagaaatcaa

SEQ ID NO: 5904 - DNA, 122 bp, Homo sapiens
  misc_feature (61)..(62): /note="This region represents a CpG dinucleotide"
  misc_feature (61)..(61): /note="Nucleotide may be methylated to form 5-methylcytosine"
tatgagcaagttttgtgccctctctgtgcctcagtttcctctatctgcacaatggtgatacgtgctgaataatttttgctattattactattgcttcattcctacaagatggaggccctatt

SEQ ID NO: 5905 - DNA, 122 bp, Homo sapiens
  misc_feature (61)..(62): /note="This region represents a CpG dinucleotide"
  misc_feature (61)..(61): /note="Nucleotide may be methylated to form 5-methylcytosine"
cattaccctccaggggcctgagaggtcgagtcatttgtccaagtttgggtggtaagtaagcggcagtgccaggaggcaaacccacaagtagtgccttatcactaagtcacattgttacacaa

SEQ ID NO: 5906 - DNA, 122 bp, Homo sapiens
  misc_feature (61)..(62): /note="This region represents a CpG dinucleotide"
  misc_feature (61)..(61): /note="Nucleotide may be methylated to form 5-methylcytosine"
ctggttgtactagtcaaataacttgtagtcgtttgtgactcatcttgcttcctgtaccatcgctaaggtccacagatactccttgcaaaatatacccataatctcttcatttctctccacct

SEQ ID NO: 5907 - DNA, 122 bp, Homo sapiens
  misc_feature (61)..(62): /note="This region represents a CpG dinucleotide"
  misc_feature (61)..(61): /note="Nucleotide may be methylated to form 5-methylcytosine"
gaaatgtaattagtaggagatttattgcaaggaattggcttatgtgattgtggggcctggcgagtctgaaatgggctgggcaagccatcagaaacaacaggcattaggaactctctggcatg

SEQ ID NO: 5908 - DNA, 122 bp, Homo sapiens
  misc_feature (61)..(62): /note="This region represents a CpG dinucleotide"
  misc_feature (61)..(61): /note="Nucleotide may be methylated to form 5-methylcytosine"
acttggaagctagcctgggaggaggttggcaatcgtttaagttggtggagataactgaagcgctttagcatttgaacagcaaggggaatcagagggacaaaaggagtatgggagcctcaagg

SEQ ID NO: 5909 - DNA, 122 bp, Homo sapiens
  misc_feature (61)..(62): /note="This region represents a CpG dinucleotide"
  misc_feature (61)..(61): /note="Nucleotide may be methylated to form 5-methylcytosine"
cgccaagatgcacccatttattaaatccttctccaagatacacctgtttattaaaccttccgccaagatacacccatttatgaaacccttcgccatgatgcacctgtttattaaacccttcc

SEQ ID NO: 5910 - DNA, 122 bp, Homo sapiens
  misc_feature (61)..(62): /note="This region represents a CpG dinucleotide"
  misc_feature (61)..(61): /note="Nucleotide may be methylated to form 5-methylcytosine"
cgactctccagctctctcttctccaagcaaggtactccaccaaagtatagctgttgacatcggagagacttgtgcccatgagactttcaacatcagggtgtggcttgaaggccagagttagc

SEQ ID NO: 5911 - DNA, 122 bp, Homo sapiens
  misc_feature (61)..(62): /note="This region represents a CpG dinucleotide"
  misc_feature (61)..(61): /note="Nucleotide may be methylated to form 5-methylcytosine"
tcaaacaccagggtttgcgtgattttatctttaccccgcaacagcaacagaagccggtggcgcctgtaaacgagtgaaggtcacctgtatatttgtaaatacttcctgccggttcagcctgt

SEQ ID NO: 5912 - DNA, 122 bp, Homo sapiens
  misc_feature (61)..(62): /note="This region represents a CpG dinucleotide"
  misc_feature (61)..(61): /note="Nucleotide may be methylated to form 5-methylcytosine"
ccaattgtcatgcctctcgtgggttagttgtaaatggaacacaactctagcatgacattgcgacttaaaagagcatatccagtatttcgatgatcattctggaaatatatttcctcttcaaa

SEQ ID NO: 5913 - DNA, 122 bp, Homo sapiens
  misc_feature (61)..(62): /note="This region represents a CpG dinucleotide"
  misc_feature (61)..(61): /note="Nucleotide may be methylated to form 5-methylcytosine"
aaaaagacactcgtattgcttctttccaggttccaccctatggtggattcttctacatcacgcttggaattcattaactccataatcctgtttctgaggaaccataactttgatggactgga

SEQ ID NO: 5914 - DNA, 122 bp, Homo sapiens
  misc_feature (61)..(62): /note="This region represents a CpG dinucleotide"
  misc_feature (61)..(61): /note="Nucleotide may be methylated to form 5-methylcytosine"
accgtatggttggaaagtgtctgaaggtaggagtgcctttttctgatttgctccaagtcacggttcaggcttacaggggctatttcccttgcaggatgttctattacctctgggtgccctga

SEQ ID NO: 5915 - DNA, 122 bp, Homo sapiens
  misc_feature (61)..(62): /note="This region represents a CpG dinucleotide"
  misc_feature (61)..(61): /note="Nucleotide may be methylated to form 5-methylcytosine"
cccacccgtcttcctgaaccatcgagaaattacgtcttaccaaatcctactgaggactggcgaagaacaaaagggaaccaaatcacagatagatgtgaaggcagatagacaattcaactgtt

SEQ ID NO: 5916 - DNA, 122 bp, Homo sapiens
  misc_feature (61)..(62): /note="This region represents a CpG dinucleotide"
  misc_feature (61)..(61): /note="Nucleotide may be methylated to form 5-methylcytosine"
acatccctatgtgaaaaatgacaaagcactttttcctcttacagtaagcctaggacaatgcgtagcaaagcttgtggttgtcaccactgatatttttatcccttcaaactttcaaaggtggc

SEQ ID NO: 5917 - DNA, 122 bp, Homo sapiens
  misc_feature (61)..(62): /note="This region represents a CpG dinucleotide"
  misc_feature (61)..(61): /note="Nucleotide may be methylated to form 5-methylcytosine"
cagtgacatgcatgttttgtctgacaacctgtacttaccactgacctctgtcaatatgcacgttatttataatccctcttaatgtgccacctcagatcctctctgctccacctgtctctggg

SEQ ID NO: 5918 - DNA, 122 bp, Homo sapiens
  misc_feature (61)..(62): /note="This region represents a CpG dinucleotide"
  misc_feature (61)..(61): /note="Nucleotide may be methylated to form 5-methylcytosine"
tcttgcttcttcaaacaggaagtgtcctctgatgccatcttcagggtgtcagtgtgctaacgtgacaagggactatcctaggagtccgaagcacagctcttagactcaccagccacattttt

SEQ ID NO: 5919 - DNA, 122 bp, Homo sapiens
  misc_feature (61)..(62): /note="This region represents a CpG dinucleotide"
  misc_feature (61)..(61): /note="Nucleotide may be methylated to form 5-methylcytosine"
agcttgtgccatatattgccattttctccaaggggtgttaaataatttcccacctctgcacgttattatgactctcagtactcacatcgctctggaggtcataggcctgccgagcatggatg

SEQ ID NO: 5920 - DNA, 122 bp, Homo sapiens
  misc_feature (61)..(62): /note="This region represents a CpG dinucleotide"
  misc_feature (61)..(61): /note="Nucleotide may be methylated to form 5-methylcytosine"
aagggtcactaccagaggccttcatccaaagaaatcatctctaggtgaaatttcaggcatcgaagaaaataagtgggtgtgagtagaaggatgtaggaatggggtggggacaggaggcagag

SEQ ID NO: 5921 - DNA, 122 bp, Homo sapiens
  misc_feature (61)..(62): /note="This region represents a CpG dinucleotide"
  misc_feature (61)..(61): /note="Nucleotide may be methylated to form 5-methylcytosine"
gtgatggcttattatcatggttaaccagtctgtcttgaatttgcagcctgagctgaccagcgcttatcctcatgtgaccttgggtgaattaatggacatctctgaacctccattttctcctg

SEQ ID NO: 5922 - DNA, 122 bp, Homo sapiens
  misc_feature (61)..(62): /note="This region represents a CpG dinucleotide"
  misc_feature (61)..(61): /note="Nucleotide may be methylated to form 5-methylcytosine"
tctaccagccaccttctacctataggatcaagaccagactccttggcacaatggcctgctcgcaacctgctgctccaggacttccttttgccctttcccactagattccagacacaacagtg

SEQ ID NO: 5923 - DNA, 122 bp, Homo sapiens
  misc_feature (61)..(62): /note="This region represents a CpG dinucleotide"
  misc_feature (61)..(61): /note="Nucleotide may be methylated to form 5-methylcytosine"
cagccagtcacttcctggtaaatattttcattttctttgctcagtgtcttttttggagggcgtgccatgcgatactgcctctccttcacttgagcaatttctgtattttccaagtcagatat

SEQ ID NO: 5924 - DNA, 122 bp, Homo sapiens
  misc_feature (61)..(62): /note="This region represents a CpG dinucleotide"
  misc_feature (61)..(61): /note="Nucleotide may be methylated to form 5-methylcytosine"
tgaactcctgacctcaagcgatccacccgcctcagtctcccaaagtgctgggattccaggcgtgagccagcgtgcccagcctgctgactgtattcttacaatgtgacttaacatgtttgttt

SEQ ID NO: 5925 - DNA, 122 bp, Homo sapiens
  misc_feature (61)..(62): /note="This region represents a CpG dinucleotide"
  misc_feature (61)..(61): /note="Nucleotide may be methylated to form 5-methylcytosine"
taacaagggtgataatgagcatagtggatttactaactagacaccagtgatcaagtaggtcggaaattaagcctttgtagttgacaaggaaactaaagtggttagctaaggttaaaagacac

SEQ ID NO: 5926 - DNA, 122 bp, Homo sapiens
  misc_feature (61)..(62): /note="This region represents a CpG dinucleotide"
  misc_feature (61)..(61): /note="Nucleotide may be methylated to form 5-methylcytosine"
cactcccaggctttgtaggacaagccaccctgatcatcatcctctctgtgtgtaagacagcgtagaatggcacttgggccatccatgggaaccataaaaggcaaagaaaagaaaatagaaaa

SEQ ID NO: 5927 - DNA, 122 bp, Homo sapiens
  misc_feature (61)..(62): /note="This region represents a CpG dinucleotide"
  misc_feature (61)..(61): /note="Nucleotide may be methylated to form 5-methylcytosine"
atattaaggcatctttttctttcatttgcgcacaatgctgatttttgcagtcctattttacgccttaatgtgacaacttcctggtttttttttttttaaacccagaacttaactattacaac

SEQ ID NO: 5928 - DNA, 122 bp, Homo sapiens
  misc_feature (61)..(62): /note="This region represents a CpG dinucleotide"
  misc_feature (61)..(61): /note="Nucleotide may be methylated to form 5-methylcytosine"
cacaaaacacagaaatgggggttctcacactacagattaaggagtgtcccaggccgggcacggtggctcacacctgtaatcccagcactttgggaggctgaggcaggtggatcacctgaggt

SEQ ID NO: 5929 - DNA, 122 bp, Homo sapiens
  misc_feature (61)..(62): /note="This region represents a CpG dinucleotide"
  misc_feature (61)..(61): /note="Nucleotide may be methylated to form 5-methylcytosine"
caggcatttattctggaagcctgaccaagcctgctgactgggctgggctgtagactgtagcgttcatcagtgattttctttggccagagtgagcaccactctaagcagagtctttcagaact

SEQ ID NO: 5930 - DNA, 122 bp, Homo sapiens
  misc_feature (61)..(62): /note="This region represents a CpG dinucleotide"
  misc_feature (61)..(61): /note="Nucleotide may be methylated to form 5-methylcytosine"
gacagtgaagtaaaatggcctgctcatacattactaacaagaatataggccaggcacggtcgctcacgcctgtaatcccagtactttgggaggccgaggcgggtggatcatctgaggtcagg

SEQ ID NO: 5931 - DNA, 122 bp, Homo sapiens
  misc_feature (61)..(62): /note="This region represents a CpG dinucleotide"
  misc_feature (61)..(61): /note="Nucleotide may be methylated to form 5-methylcytosine"
cagtgacaatccagggaccattccctgggaaggcaaattctggggcctgtgtaactgccacgtggcaaaggcacctaacttgcaggaagggcatctgagaaggcttcctggaggaagtgaca

SEQ ID NO: 5932 - DNA, 122 bp, Homo sapiens
  misc_feature (61)..(62): /note="This region represents a CpG dinucleotide"
  misc_feature (61)..(61): /note="Nucleotide may be methylated to form 5-methylcytosine"
gggaatttatgtccaggtgagtttaaggaaaggaaggacttgggacccaggtcaaatagccgccacctggcaccattgaagtgctgtcaagttctgttggctgctactgcatcaggcaaatt

SEQ ID NO: 5933 - DNA, 122 bp, Homo sapiens
  misc_feature (61)..(62): /note="This region represents a CpG dinucleotide"
  misc_feature (61)..(61): /note="Nucleotide may be methylated to form 5-methylcytosine"
ttagggctggaagggatgtgacagacgatcttgccaagcccggcccttcttctacaaggacgtcttcagagatctggaggaggaaagggccttgccctgagttcgctgagccagaacaatag

SEQ ID NO: 5934 - DNA, 122 bp, Homo sapiens
  misc_feature (61)..(62): /note="This region represents a CpG dinucleotide"
  misc_feature (61)..(61): /note="Nucleotide may be methylated to form 5-methylcytosine"
ccactgagaagttgatcctgttattattattcgcagcgacatttcctggcttagacctagcgtactgggtaatgcccatatgttcagaacagtcaatactgcaacggcgaaagggaaaggct

SEQ ID NO: 5935 - DNA, 122 bp, Homo sapiens
  misc_feature (61)..(62): /note="This region represents a CpG dinucleotide"
  misc_feature (61)..(61): /note="Nucleotide may be methylated to form 5-methylcytosine"
gcgtcagaagcaaaggactgtattactcataacagtagtcagagtatcagcattttcttgcgccagctgcttgagtcccaactgtcacagggcattgtgaagtcagatgacacctgaacagg

SEQ ID NO: 5936 - DNA, 122 bp, Homo sapiens
  misc_feature (61)..(62): /note="This region represents a CpG dinucleotide"
  misc_feature (61)..(61): /note="Nucleotide may be methylated to form 5-methylcytosine"
cctgacctcaccttaatagagatcctcccattttggccttggaggtttaatatatagtcacggaagtgtactgaaatagtcataagaaggaatgttctccatacaactttaaagttgtacag

SEQ ID NO: 5937 - DNA, 122 bp, Homo sapiens
  misc_feature (61)..(62): /note="This region represents a CpG dinucleotide"
  misc_feature (61)..(61): /note="Nucleotide may be methylated to form 5-methylcytosine"
gaaaacctgagcatttgcaggcatctggttaaagcagggtctgtgtgtacaattttaaaacgggtaatatgtcatgctcttagttcatcttcacaacaaaactatgagtaagcggtattagc

SEQ ID NO: 5938 - DNA, 122 bp, Homo sapiens
  misc_feature (61)..(62): /note="This region represents a CpG dinucleotide"
  misc_feature (61)..(61): /note="Nucleotide may be methylated to form 5-methylcytosine"
gaactacaggccctggtggggcctgctccctgtcgccagcaaagttgctgagagagcacacgccagccacggtggtgaagtcatagaaatgctatgcccccacaggccacaggaattgtgga

SEQ ID NO: 5939 - DNA, 122 bp, Homo sapiens
  misc_feature (61)..(62): /note="This region represents a CpG dinucleotide"
  misc_feature (61)..(61): /note="Nucleotide may be methylated to form 5-methylcytosine"
tctctgcctgaaaagctcttcttgccaccagttcacttagatcctagagagctcattagccgtccccatctcaatgtctagttcaaattcaatttttacaagttcttctttagagtacttag

SEQ ID NO: 5940 - DNA, 122 bp, Homo sapiens
  misc_feature (61)..(62): /note="This region represents a CpG dinucleotide"
  misc_feature (61)..(61): /note="Nucleotide may be methylated to form 5-methylcytosine"
ccccttgcactctgtcaagtaggattaaaacttttcagactcaagtattttcctttttctcgtggctctccagatattattagctgtttcttcaagaggctttagaggcagagattcttgag

SEQ ID NO: 5941 - DNA, 122 bp, Homo sapiens
  misc_feature (61)..(62): /note="This region represents a CpG dinucleotide"
  misc_feature (61)..(61): /note="Nucleotide may be methylated to form 5-methylcytosine"
catgtggcccaagaaggtatgtccagcttcctccttgcatcttgcggcacaacacctttgcggtatggtgcctgggcagtcccgggttgttaagggtgagagttctaaagccaggctgcccg

SEQ ID NO: 5942 - DNA, 122 bp, Homo sapiens
  misc_feature (61)..(62): /note="This region represents a CpG dinucleotide"
  misc_feature (61)..(61): /note="Nucleotide may be methylated to form 5-methylcytosine"
ctgcttcttttcctgtatttcccatcttggtgagtcaccagcaccaaagcctgttgttctcgcacataaacaggtcttgaacccatctccccctctttatggtccttgcttgagtacaggtc

SEQ ID NO: 5943 - DNA, 122 bp, Homo sapiens
  misc_feature (61)..(62): /note="This region represents a CpG dinucleotide"
  misc_feature (61)..(61): /note="Nucleotide may be methylated to form 5-methylcytosine"
tgcagggcagtccttctgtaacctgaaccagaccttgctgctcctctgtgccactccctccggtggcttctcatcaccatggcctgcaaggctctgtgtgacctgtcttctggcactccctg

SEQ ID NO: 5944 - DNA, 122 bp, Homo sapiens
  misc_feature (61)..(62): /note="This region represents a CpG dinucleotide"
  misc_feature (61)..(61): /note="Nucleotide may be methylated to form 5-methylcytosine"
ctcgcccctctcaccccccagaggcagctcccatgcatccaagcaaggcacccaggattccgggcttcaaaagaccaggcatggggcccataacaaatttcttgccataacaagacttctta

SEQ ID NO: 5945 - DNA, 122 bp, Homo sapiens
  misc_feature (61)..(62): /note="This region represents a CpG dinucleotide"
  misc_feature (61)..(61): /note="Nucleotide may be methylated to form 5-methylcytosine"
agtcccgtctgggagtgacaggagacagtgacagataatcaggcattagactctcataagcgcacaccctagatccctcagatgcacagttcacaatagggtttgagctcctatgagaagct

SEQ ID NO: 5946 - DNA, 122 bp, Homo sapiens
  misc_feature (61)..(62): /note="This region represents a CpG dinucleotide"
  misc_feature (61)..(61): /note="Nucleotide may be methylated to form 5-methylcytosine"
tgacactgacaaaaccagcctgttttaaaacatgcaatgaacacaccaaactatgtgactcgtgcaggtacgaatgaattcaatttttctacacccacattcttaggcccaaaaataactca

SEQ ID NO: 5947 - DNA, 122 bp, Homo sapiens
  misc_feature (61)..(62): /note="This region represents a CpG dinucleotide"
  misc_feature (61)..(61): /note="Nucleotide may be methylated to form 5-methylcytosine"
ggaacagtaggagaactctccacatttatcttgaggcttcaggcttttcaacatcatcttcgaaagtacagcattaggaaactgtgctgactcaacaacccccagattctagtttatgctgc

SEQ ID NO: 5948 - DNA, 122 bp, Homo sapiens
  misc_feature (61)..(62): /note="This region represents a CpG dinucleotide"
  misc_feature (61)..(61): /note="Nucleotide may be methylated to form 5-methylcytosine"
tttttaaagacaaggtcttgctctgtcatccagctggagtgcagtggtgtgatgacagctcgcagatcacagcaacctcgaccacctggggtcatgggattctcctgcctcagccttccaag

SEQ ID NO: 5949 - DNA, 122 bp, Homo sapiens
  misc_feature (61)..(62): /note="This region represents a CpG dinucleotide"
  misc_feature (61)..(61): /note="Nucleotide may be methylated to form 5-methylcytosine"
tagtaaatagtattgcataaacacacacaaacacacaatgcagtaatttctcacattttgcgtaatcaaactgggataatgactttatgattcccttatataactataaagaaatatttcat

SEQ ID NO: 5950 - DNA, 122 bp, Homo sapiens
  misc_feature (61)..(62): /note="This region represents a CpG dinucleotide"
  misc_feature (61)..(61): /note="Nucleotide may be methylated to form 5-methylcytosine"
gcttccattccccagctgctaggagtgttggctgctcccttctccagagaactgtgttcacgcaaggggccctgccactcctgggaggttacgacatctccattccactcccctgcctagca

SEQ ID NO: 5951 - DNA, 122 bp, Homo sapiens
  misc_feature (61)..(62): /note="This region represents a CpG dinucleotide"
  misc_feature (61)..(61): /note="Nucleotide may be methylated to form 5-methylcytosine"
gcacaggtgtgaccagaatggactaatcacccagaatgcagcttgttaaggggcttagcacgcaggcctggtcacacttggttcattccagggccttactcatcagggaggaacctggggga

SEQ ID NO: 5952 - DNA, 122 bp, Homo sapiens
  misc_feature (61)..(62): /note="This region represents a CpG dinucleotide"
  misc_feature (61)..(61): /note="Nucleotide may be methylated to form 5-methylcytosine"
actgctagacctggaaactgaaggagagtaataaggatttacaacaatagtcatggggaacggaaaaaggaatcatcaaatgagggattaattgccgagcagcattgaaagtctaactttca

SEQ ID NO: 5953 - DNA, 122 bp, Homo sapiens
  misc_feature (61)..(62): /note="This region represents a CpG dinucleotide"
  misc_feature (61)..(61): /note="Nucleotide may be methylated to form 5-methylcytosine"
ttaaagagcaattataatacagcgtgatatgtgctattaggggaggaggtaaagggctgacggaatacaggctccacaggaggacataagtggagcatctaacccagactagagagaggctt

SEQ ID NO: 5954 - DNA, 122 bp, Homo sapiens
  misc_feature (61)..(62): /note="This region represents a CpG dinucleotide"
  misc_feature (61)..(61): /note="Nucleotide may be methylated to form 5-methylcytosine"
agttgctaaatttgtgttcccattttaaattgaccaattttggggtgtgacacttttgagcggttgaattgggagaatgaagataagtaatttacctgtccaggatcaaaagaagcctagaa

SEQ ID NO: 5955 - DNA, 122 bp, Homo sapiens
  misc_feature (61)..(62): /note="This region represents a CpG dinucleotide"
  misc_feature (61)..(61): /note="Nucleotide may be methylated to form 5-methylcytosine"
aaaaactgaagtctgcccaagccaggtgtttcttgttggcagcctgctctctaatgactccgctctcatagagcagctgcctactagtcagctttgtatggcctattgttgctgcacacccc

SEQ ID NO: 5956 - DNA, 122 bp, Homo sapiens
  misc_feature (61)..(62): /note="This region represents a CpG dinucleotide"
  misc_feature (61)..(61): /note="Nucleotide may be methylated to form 5-methylcytosine"
actgactcagcagtatctcttgctgcagttattggcacatgatattgactgggaagtgtacggactggtaatctaacgtctttagagagagtcacattgtcaagcctggctggcaatggcct

SEQ ID NO: 5957 - DNA, 122 bp, Homo sapiens
  misc_feature (61)..(62): /note="This region represents a CpG dinucleotide"
  misc_feature (61)..(61): /note="Nucleotide may be methylated to form 5-methylcytosine"
tgcacactcacatgcacgcacacacaccggacaggttaatccccgtatcattggctgccacgggttgcctaagaagcttaacagggcatgttctgacttcaacaatgacctgctaatggttt

SEQ ID NO: 5958 - DNA, 122 bp, Homo sapiens
  misc_feature (61)..(62): /note="This region represents a CpG dinucleotide"
  misc_feature (61)..(61): /note="Nucleotide may be methylated to form 5-methylcytosine"
aactcgatccaggagtctgctgcaaaacaacactcctgcaccatctagtgctgaactacacggcttaagcacaaatcaagtggctaaagagtttgtaaacaaggctgggcgcggtggctgac

SEQ ID NO: 5959 - DNA, 122 bp, Homo sapiens
  misc_feature (61)..(62): /note="This region represents a CpG dinucleotide"
  misc_feature (61)..(61): /note="Nucleotide may be methylated to form 5-methylcytosine"
gggttgaggtgacctgctcagggtctctgagcaggctggagcagcgggctgagggctctgcgatgggggcagctgctccaggaaggctgaagggctgctccaccctggttcaccctcctttt

SEQ ID NO: 5960 - DNA, 122 bp, Homo sapiens
  misc_feature (61)..(62): /note="This region represents a CpG dinucleotide"
  misc_feature (61)..(61): /note="Nucleotide may be methylated to form 5-methylcytosine"
aaagcaggcctgcagccacttagggtgcgtctgaattacacttagccaggagttgatatacggaaactgatcccaggtgcccaggctgttccccaagcctggtgactacccgaaacatttag

SEQ ID NO: 5961 - DNA, 122 bp, Homo sapiens
  misc_feature (61)..(62): /note="This region represents a CpG dinucleotide"
  misc_feature (61)..(61): /note="Nucleotide may be methylated to form 5-methylcytosine"
gagcagaatctaccacagggtgtagccaagctgccgagccactgggagagcagagcacagcgcctatagctggggtggtgctgagactcaccttgaggatcaggcacatggcgccacagtga

SEQ ID NO: 5962 - DNA, 122 bp, Homo sapiens
  misc_feature (61)..(62): /note="This region represents a CpG dinucleotide"
  misc_feature (61)..(61): /note="Nucleotide may be methylated to form 5-methylcytosine"
tgtccatttccttgagtttctctgttatcttcattacttccttccttgtacttgcttcagcgcattagtcagggcccagtcaggaaacaaaaaccacaccggcaatttgaatagcaacttgt

SEQ ID NO: 5963 - DNA, 122 bp, Homo sapiens
  misc_feature (61)..(62): /note="This region represents a CpG dinucleotide"
  misc_feature (61)..(61): /note="Nucleotide may be methylated to form 5-methylcytosine"
atatacttatggcacgcatggtatggaaaaagttattcttgctagacattatgaaatacacgaagatgagtaagatctggccctaggtcttggttgtaaaacataattatgtgacatacgta

SEQ ID NO: 5964 - DNA, 122 bp, Homo sapiens
  misc_feature (61)..(62): /note="This region represents a CpG dinucleotide"
  misc_feature (61)..(61): /note="Nucleotide may be methylated to form 5-methylcytosine"
gaagccaggtacatgaccttggaaaactggtctctcatctatatgacaagtctaccatcccgcctcacagggtgcttgcaggtcagagggtaggtttgtggacatcacagtagagaagaacg

SEQ ID NO: 5965 - DNA, 122 bp, Homo sapiens
  misc_feature (61)..(62): /note="This region represents a CpG dinucleotide"
  misc_feature (61)..(61): /note="Nucleotide may be methylated to form 5-methylcytosine"
aatttatattttaggtgacttctaagtattaccatcataaagaacactgtgggctgggcacggtggctcatacctgtaatcccagcactttgggaggctgaggtggtccctggagctcagga

SEQ ID NO: 5966 - DNA, 122 bp, Homo sapiens
  misc_feature (61)..(62): /note="This region represents a CpG dinucleotide"
  misc_feature (61)..(61): /note="Nucleotide may be methylated to form 5-methylcytosine"
cttcttaaaaaaaaaaaaaaaaaagccatcactgacagtcaatggtcctggaatataccacgggtctgaggtcccccaaggtggaactacatcttgggtttatctactccaagcttgctaag

SEQ ID NO: 5967 - DNA, 122 bp, Homo sapiens
  misc_feature (61)..(62): /note="This region represents a CpG dinucleotide"
  misc_feature (61)..(61): /note="Nucleotide may be methylated to form 5-methylcytosine"
tataactgaactcccgtaggattgggtgaagtctcttgagagcagctcactgtgggcgtgcggcaagagatcaacatttatctcagctgcttatatgtggtctaagtggatttggtagtgcc

SEQ ID NO: 5968 - DNA, 122 bp, Homo sapiens
  misc_feature (61)..(62): /note="This region represents a CpG dinucleotide"
  misc_feature (61)..(61): /note="Nucleotide may be methylated to form 5-methylcytosine"
accaggttatatgtttaattatcttgtttatggcctgcctccctactactctagactggccgctccccaaggggaaggaatctatcttgttcactgctgtgtcctcagtatttacaataggg

SEQ ID NO: 5969 - DNA, 122 bp, Homo sapiens
  misc_feature (61)..(62): /note="This region represents a CpG dinucleotide"
  misc_feature (61)..(61): /note="Nucleotide may be methylated to form 5-methylcytosine"
gctgtggcactgcctacccatcaggggtgtggtgaggtcactggaaagggtgacctaatacgttgctaatgctcagatggggattgctgggagtgttgcctttctcagttgtcacagggcca

SEQ ID NO: 5970 - DNA, 122 bp, Homo sapiens
  misc_feature (61)..(62): /note="This region represents a CpG dinucleotide"
  misc_feature (61)..(61): /note="Nucleotide may be methylated to form 5-methylcytosine"
tgagttgcacatcctgtagatgagcgcaaagagatgagtaaaaaataaccaaacactgtacgtgagaagtcataatctttaaagatacaggatttgtcttaagagtaatggctttaaaaact

SEQ ID NO: 5971 - DNA, 122 bp, Homo sapiens
  misc_feature (61)..(62): /note="This region represents a CpG dinucleotide"
  misc_feature (61)..(61): /note="Nucleotide may be methylated to form 5-methylcytosine"
agtgctggagacacacgtgatcgttggactcctgggcaatcctaattgcctcctgcagggcgagctctgcctgttgactaatgacagactaaacattaatatcccattaataatcacaaaca

SEQ ID NO: 5972 - DNA, 122 bp, Homo sapiens
  misc_feature (61)..(62): /note="This region represents a CpG dinucleotide"
  misc_feature (61)..(61): /note="Nucleotide may be methylated to form 5-methylcytosine"
atccacccgcctcagcctccgaaagtgctgggattacaggcgtgagccaccgcgcccggccgacactgagctaagacttcatgaagaagtggatcaggcttgaggctcaagtgctagcaaac

SEQ ID NO: 5973 - DNA, 122 bp, Homo sapiens
  misc_feature (61)..(62): /note="This region represents a CpG dinucleotide"
  misc_feature (61)..(61): /note="Nucleotide may be methylated to form 5-methylcytosine"
tggcaaagcaggctttatcaggcctgaggttcagagagtttagggatttacccaaggttgcggagcagtcagcagaattgagatttgaccctgatctatccagctgtggaaagattctctgc

SEQ ID NO: 5974 - DNA, 122 bp, Homo sapiens
  misc_feature (61)..(62): /note="This region represents a CpG dinucleotide"
  misc_feature (61)..(61): /note="Nucleotide may be methylated to form 5-methylcytosine"
gtccctcccctgccctgttctgggagttgctgatgagagctcttggaatcctggccagtgcgctttcctgaggctggtgtgagcttgggaggagctgaggggcactgtggcagcactgactc

SEQ ID NO: 5975 - DNA, 122 bp, Homo sapiens
  misc_feature (61)..(62): /note="This region represents a CpG dinucleotide"
  misc_feature (61)..(61): /note="Nucleotide may be methylated to form 5-methylcytosine"
ctttcacggagctggccaggatagtgctgctgcggcacaggttgaactggctcgggaggccgagcaaggtactgagcttgcaagacctctgctgccgcaccatcgtgtcctgcacacctgtg

SEQ ID NO: 5976 - DNA, 122 bp, Homo sapiens
  misc_feature (61)..(62): /note="This region represents a CpG dinucleotide"
  misc_feature (61)..(61): /note="Nucleotide may be methylated to form 5-methylcytosine"
gtcccccaaacaacaagctacagtacaaccaggtctatggttttcgggccgggccggctccgggccacaagaccgcctaggtcggccgctgccgggtttcacatttctccttcccaaggtgg

SEQ ID NO: 5977 - DNA, 122 bp, Homo sapiens
  misc_feature (61)..(62): /note="This region represents a CpG dinucleotide"
  misc_feature (61)..(61): /note="Nucleotide may be methylated to form 5-methylcytosine"
agggtgaggatgagctgaggaagccaggtacaggcaggagtgaaatggagagattaagaacgagacaggttcatgtctcacctggagctgagttctgcagaaatggccttggaggaggagac

SEQ ID NO: 5978 - DNA, 122 bp, Homo sapiens
  misc_feature (61)..(62): /note="This region represents a CpG dinucleotide"
  misc_feature (61)..(61): /note="Nucleotide may be methylated to form 5-methylcytosine"
ggctttagtaagattaccaaggaagggatctcataatgctgtagtaatagtttacatgtgcgacatgagctagtgtttgtacatgtgacagaccttgtttctggattttattaaggctggtt

SEQ ID NO: 5979 - DNA, 122 bp, Homo sapiens
  misc_feature (61)..(62): /note="This region represents a CpG dinucleotide"
  misc_feature (61)..(61): /note="Nucleotide may be methylated to form 5-methylcytosine"
acctgggaattagcctgaggtttagtccttaccctatcacttactagctatgtgactttgcgtaaattgtttactctgtttcctcatctgaggagatgatattaatacctcataggttcaaa

SEQ ID NO: 5980 - DNA, 122 bp, Homo sapiens
  misc_feature (61)..(62): /note="This region represents a CpG dinucleotide"
  misc_feature (61)..(61): /note="Nucleotide may be methylated to form 5-methylcytosine"
cacctgtttcaaattctcactgtgggttttattgtcaagttctgatgtggctgaaggtgacggaatgatctggttgcttccaggagtctccttcaagaagtgctgattctgttaagaggaaa

SEQ ID NO: 5981 - DNA, 122 bp, Homo sapiens
  misc_feature (61)..(62): /note="This region represents a CpG dinucleotide"
  misc_feature (61)..(61): /note="Nucleotide may be methylated to form 5-methylcytosine"
gacaagacatgttgctctaaattctactgattcaatacttttctattcttaccaacaaagcgtaacaggctgtgagaaacatgcctgaccacacacgaaactggagaaggcagtgggtgcag

SEQ ID NO: 5982 - DNA, 122 bp, Homo sapiens
  misc_feature (61)..(62): /note="This region represents a CpG dinucleotide"
  misc_feature (61)..(61): /note="Nucleotide may be methylated to form 5-methylcytosine"
gcccacactgaccagtcatcggaagtgggctatccctggggacacgcgaaccttagcctacggcagtacccagggagtgactcagccatgagccatcagcaggcaacacccgcaaccactga

SEQ ID NO: 5983 - DNA, 122 bp, Homo sapiens
  misc_feature (61)..(62): /note="This region represents a CpG dinucleotide"
  misc_feature (61)..(61): /note="Nucleotide may be methylated to form 5-methylcytosine"
ggacatcgtcagaaatattgggctggagagggagatcaggaagggatcagtacatgttgtcgagaaataagtgacatgatgtgcaattatgtatgtgctcaccactctatactcaacgccca

SEQ ID NO: 5984 - DNA, 122 bp, Homo sapiens
  misc_feature (61)..(62): /note="This region represents a CpG dinucleotide"
  misc_feature (61)..(61): /note="Nucleotide may be methylated to form 5-methylcytosine"
tatgagcttcactggcttcaagtgcctgtacccaatatgttcctggtttcaatgagtaatcgctgactatgtctctatcctgtaatttcttcagcttgtgtcacagtgagacagtgagcatg

SEQ ID NO: 5985 - DNA, 122 bp, Homo sapiens
  misc_feature (61)..(62): /note="This region represents a CpG dinucleotide"
  misc_feature (61)..(61): /note="Nucleotide may be methylated to form 5-methylcytosine"
ctggcttctccttccaatctccaggtttctctctctttctgccttctttctgtcagttaccgtcattgatcacttaaagaaagacagggcctacccctgtctgctgcgtgacctcagccctc

SEQ ID NO: 5986 - DNA, 122 bp, Homo sapiens
  misc_feature (61)..(62): /note="This region represents a CpG dinucleotide"
  misc_feature (61)..(61): /note="Nucleotide may be methylated to form 5-methylcytosine"
ggaatgtaaaatagtgcagccaccttggaaaacagtctatcagctcctcagatggttaaacgtagcgtcaccggatgactcagcaattctattctgaggcatctacctaagagaaatgaaaa

SEQ ID NO: 5987 - DNA, 122 bp, Homo sapiens
  misc_feature (61)..(62): /note="This region represents a CpG dinucleotide"
  misc_feature (61)..(61): /note="Nucleotide may be methylated to form 5-methylcytosine"
tggacatctctgatccttgctgaaatttcaggcataatctcatgtatagtagctttctttcgtaatttctcatggataataaagagccccgcctagtctaaacttatacatccagtccagtc

SEQ ID NO: 5988 - DNA, 122 bp, Homo sapiens
  misc_feature (61)..(62): /note="This region represents a CpG dinucleotide"
  misc_feature (61)..(61): /note="Nucleotide may be methylated to form 5-methylcytosine"
acagctttgctgtttgctagctttgtgacctcaagcaagttactgaaattcctgtccctccgttactgcatccataaaagggcagttgcaaaactagtacctgcctcatcagggtgttgtgg

SEQ ID NO: 5989 - DNA, 122 bp, Homo sapiens
  misc_feature (61)..(62): /note="This region represents a CpG dinucleotide"
  misc_feature (61)..(61): /note="Nucleotide may be methylated to form 5-methylcytosine"
tgctgggactgtccttgagtctagcagatgcgtcagcctctttacttcctcccagaaagtcgacctcctgtgctcgctctgtggagatcaggcaccggccactgtgcgctgatcccagctca

SEQ ID NO: 5990 - DNA, 122 bp, Homo sapiens
  misc_feature (61)..(62): /note="This region represents a CpG dinucleotide"
  misc_feature (61)..(61): /note="Nucleotide may be methylated to form 5-methylcytosine"
gtgcactctgactacatcacagatgatagttcagtcctgcacctacaaactggcaggctccgtgctgggctctgggcatatgaaaataagcaccacaggcaaaatgcctgctcttgtgagat

SEQ ID NO: 5991 - DNA, 122 bp, Homo sapiens
  misc_feature (61)..(62): /note="This region represents a CpG dinucleotide"
  misc_feature (61)..(61): /note="Nucleotide may be methylated to form 5-methylcytosine"
tcaggccagcagcctcatttgagagcttcttcaaaagacatattagactctcaggcctgccgcagacctactgaatcagagcctgcattcaaacaagatcccaggggatttgtatgcaaatt

SEQ ID NO: 5992 - DNA, 122 bp, Homo sapiens
  misc_feature (61)..(62): /note="This region represents a CpG dinucleotide"
  misc_feature (61)..(61): /note="Nucleotide may be methylated to form 5-methylcytosine"
tccctaaattaccaagttacgcaaagaggagctgaccttgaacaacatctggcagtattacgtgttgtgcaagaacaggaaagacaaataccaagctctgtgcaacatttatggtggcatca

SEQ ID NO: 5993 - DNA, 122 bp, Homo sapiens
  misc_feature (61)..(62): /note="This region represents a CpG dinucleotide"
  misc_feature (61)..(61): /note="Nucleotide may be methylated to form 5-methylcytosine"
ggaacttctgtttttaaagtcaaaaggcaatctaaaatgttggcagacttctcactgccacgactcacgacagtttgccatcctgggggaaatacacccagcattagacctttcctcccgac

SEQ ID NO: 5994 - DNA, 122 bp, Homo sapiens
  misc_feature (61)..(62): /note="This region represents a CpG dinucleotide"
  misc_feature (61)..(61): /note="Nucleotide may be methylated to form 5-methylcytosine"
ccaatgttcactacaagcagtggatagggatcatccaggttaaaaggcatcttttggcatcgctcaggttctgaggcattagcaaaataatagcactcggcttgtccattgaaactgacaga

SEQ ID NO: 5995 - DNA, 122 bp, Homo sapiens
  misc_feature (61)..(62): /note="This region represents a CpG dinucleotide"
  misc_feature (61)..(61): /note="Nucleotide may be methylated to form 5-methylcytosine"
aaactcagcagctttccttccagtttaataaatccagacccttgtggcttatataacacgcgtgatgacaagtaatgataactcacgaagaaaaggaagaaaactttttttgtctttctgac

SEQ ID NO: 5996 - DNA, 122 bp, Homo sapiens
  misc_feature (61)..(62): /note="This region represents a CpG dinucleotide"
  misc_feature (61)..(61): /note="Nucleotide may be methylated to form 5-methylcytosine"
agctgttctacacactggcctggcgaagttattttcaactcatctcaagccagccatgaacgtaagagagaagtctgtgtgtgcagttccctctgggcagtgagaccagctacagaggccac

SEQ ID NO: 5997 - DNA, 122 bp, Homo sapiens
  misc_feature (61)..(62): /note="This region represents a CpG dinucleotide"
  misc_feature (61)..(61): /note="Nucleotide may be methylated to form 5-methylcytosine"
gctcagtgacaggagcctgggtgtgaactttcaagtcagggatcccagaggcaacagatacgttccacctctctgagcctcgcatgctttacaagtgccagaaatggacgttggatacggag

SEQ ID NO: 5998 - DNA, 122 bp, Homo sapiens
  misc_feature (61)..(62): /note="This region represents a CpG dinucleotide"
  misc_feature (61)..(61): /note="Nucleotide may be methylated to form 5-methylcytosine"
gaatagtagaagaattgagaaatatggtggcagacacactgaacttaaagtgaaggtttacgtgaagtagcaggagtaacgtcaatacgttgaagttacaaagcctgccaaatcttccaaaa

SEQ ID NO: 5999 - DNA, 122 bp, Homo sapiens
  misc_feature (61)..(62): /note="This region represents a CpG dinucleotide"
  misc_feature (61)..(61): /note="Nucleotide may be methylated to form 5-methylcytosine"
ggtactgcctcaatggtgaatgacagtcatttttctctctcccacttctaacacagccagcgtaagaaaccgtccttttccataatatccatatttttagcgtgtgaagactggctccaaaa

SEQ ID NO: 6000 - DNA, 122 bp, Homo sapiens
  misc_feature (61)..(62): /note="This region represents a CpG dinucleotide"
  misc_feature (61)..(61): /note="Nucleotide may be methylated to form 5-methylcytosine"
gccatggcatcttccccgtttagatttcctgactctttgtttatcttctttgtcaatgtgcgtctgaaccttcccaacagagtttaaaatgttcaacttcaaagctaaattctgatggaaaa

SEQ ID NO: 6001 - DNA, 122 bp, Homo sapiens
  misc_feature (61)..(62): /note="This region represents a CpG dinucleotide"
  misc_feature (61)..(61): /note="Nucleotide may be methylated to form 5-methylcytosine"
tgtgttttgatagagaagtgggacgccttcataaaggaaaccgaggacatcaacacgctccgggagtgtgtgcagatcctgtttaacagcagatatggtgagtgggcggcgcggcccgccgt

SEQ ID NO: 6002 - DNA, 122 bp, Homo sapiens
  misc_feature (61)..(62): /note="This region represents a CpG dinucleotide"
  misc_feature (61)..(61): /note="Nucleotide may be methylated to form 5-methylcytosine"
cacggtgggtggccatctttggagagtacaatctgccacactccccttgaatgatgctcacgtctagctgggaagacatacatgagcatgcagcaataaagtgcacaaaccgtcacacaggt

SEQ ID NO: 6003 - DNA, 122 bp, Homo sapiens
  misc_feature (61)..(62): /note="This region represents a CpG dinucleotide"
  misc_feature (61)..(61): /note="Nucleotide may be methylated to form 5-methylcytosine"
taccagtggctgaaacaatcagcacccatgcccatgagtagaggctgaccgtgagtcactcggagaatctctgtatcttcctatttccaagaaatcagtgaaaagttgtgcaacttttttag

SEQ ID NO: 6004 - DNA, 122 bp, Homo sapiens
  misc_feature (61)..(62): /note="This region represents a CpG dinucleotide"
  misc_feature (61)..(61): /note="Nucleotide may be methylated to form 5-methylcytosine"
cagcccgcctcagactcccaaagtgctgggattacaggcatgagccaccacacccggcctcgatcctcattttacagatgaaacaagttcagtgaggttaggacattgccgaaggccccata

SEQ ID NO: 6005 - DNA, 122 bp, Homo sapiens
  misc_feature (61)..(62): /note="This region represents a CpG dinucleotide"
  misc_feature (61)..(61): /note="Nucleotide may be methylated to form 5-methylcytosine"
aagctctaaaatgtgattcttcacatgactcaactgtgactccggcatctgggtagggctcgcacctcccccattcccatgcccagggctgcactgttcacagactagcccagggccgcagt

SEQ ID NO: 6006 - DNA, 122 bp, Homo sapiens
  misc_feature (61)..(62): /note="This region represents a CpG dinucleotide"
  misc_feature (61)..(61): /note="Nucleotide may be methylated to form 5-methylcytosine"
tagaggtggacactcaggtcattccagggctcctcagtggctgtgactgaagcttttgtgcggctctacaaggcggggttgctgtaccggaaccatcagcttgtcaactggtcatgtgcttt

SEQ ID NO: 6007 - DNA, 122 bp, Homo sapiens
  misc_feature (61)..(62): /note="This region represents a CpG dinucleotide"
  misc_feature (61)..(61): /note="Nucleotide may be methylated to form 5-methylcytosine"
ccggccgagggacccacccaaggccacacagggaggcggcctcaggatcatgggcagctccgtctggttccttcccaggctccgggccatatcatcagcaccctcccctcatcctgccccgc

SEQ ID NO: 6008 - DNA, 122 bp, Homo sapiens
  misc_feature (61)..(62): /note="This region represents a CpG dinucleotide"
  misc_feature (61)..(61): /note="Nucleotide may be methylated to form 5-methylcytosine"
taaggattgcttggttagccaagagtttagttactggcttggctgatggctcagcagacacgcaggcctttctttccctcctagtttaggttgaatgactcatactcaccaggttgaggcta

SEQ ID NO: 6009 - DNA, 122 bp, Homo sapiens
  misc_feature (61)..(62): /note="This region represents a CpG dinucleotide"
  misc_feature (61)..(61): /note="Nucleotide may be methylated to form 5-methylcytosine"
gaaggccagaggggtggcagagggccgtcctcagacaacattctttccaaaggcagggtgcgtggacagggaagggcttggatgcctgacccagggcaaggctcagtgtacacagttggagc

SEQ ID NO: 6010 - DNA, 122 bp, Homo sapiens
  misc_feature (61)..(62): /note="This region represents a CpG dinucleotide"
  misc_feature (61)..(61): /note="Nucleotide may be methylated to form 5-methylcytosine"
ggactcttaatcttttgccatggctctgcactcacatagaaggcacctgtggcaattgagcgcctgcaatttcactataagctttacttagcagcactcagaatgttaagtagataaacggg

SEQ ID NO: 6011 - DNA, 122 bp, Homo sapiens
  misc_feature (61)..(62): /note="This region represents a CpG dinucleotide"
  misc_feature (61)..(61): /note="Nucleotide may be methylated to form 5-methylcytosine"
gataaatgggtgaacagaatgtgatccacccatacaacagaatgtgactcagccatggaacgtcatggggctctgacccaggccacagcatgggtgagccctaaggacgtcacgctcagcgc

SEQ ID NO: 6012 - DNA, 122 bp, Homo sapiens
  misc_feature (61)..(62): /note="This region represents a CpG dinucleotide"
  misc_feature (61)..(61): /note="Nucleotide may be methylated to form 5-methylcytosine"
caacactgaggattacaattcaacatgagtcttgggcagggacacaaatccaaaccatatcgggcatccttgattcttaacaaagtcgtggttgagtaagctgctgtttcctagaacacaat

SEQ ID NO: 6013 - DNA, 122 bp, Homo sapiens
  misc_feature (61)..(62): /note="This region represents a CpG dinucleotide"
  misc_feature (61)..(61): /note="Nucleotide may be methylated to form 5-methylcytosine"
aatcacgtatactatcttctttaattaatgtaatagtgaaatttcaaaatattatgcaagcgtggtgctaacctgcttgtaaaggcagagcttgtggtgatttcatcattgtaagttcccac

SEQ ID NO: 6014 - DNA, 122 bp, Homo sapiens
  misc_feature (61)..(62): /note="This region represents a CpG dinucleotide"
  misc_feature (61)..(61): /note="Nucleotide may be methylated to form 5-methylcytosine"
ttcagcataccactgctttcctgacttccactggtaggcaggaagcttggctctttgggccggcacaggccttctcagtatggaagtaggattacacaccattgagtgtgtaatcaaatcag

SEQ ID NO: 6015 - DNA, 122 bp, Homo sapiens
  misc_feature (61)..(62): /note="This region represents a CpG dinucleotide"
  misc_feature (61)..(61): /note="Nucleotide may be methylated to form 5-methylcytosine"
gggtgtcctttggccacaatcctcaggattattttttctctgtgctgttcactgtaacatcgtccaccctctgagatcttgcttttcagtctactggtatctccacttctctctgcagcgtg

SEQ ID NO: 6016 - DNA, 122 bp, Homo sapiens
  misc_feature (61)..(62): /note="This region represents a CpG dinucleotide"
  misc_feature (61)..(61): /note="Nucleotide may be methylated to form 5-methylcytosine"
agggttagaaatggcaacactccataaggattagcttgtgggggttaaggaaaggacctacgctcttctgggatgactagcaagttttgaacttgaaaaagggtggtgtcatttatgaaact

SEQ ID NO: 6017 - DNA, 122 bp, Homo sapiens
  misc_feature (61)..(62): /note="This region represents a CpG dinucleotide"
  misc_feature (61)..(61): /note="Nucleotide may be methylated to form 5-methylcytosine"
aagttaattcctttttatcctgagtttattttaggagctagttaaattgcagggagagtacgtgaggttatactcactacttcaaagagaaggaaactgaagtaggaagaggtgcccagtaa

SEQ ID NO: 6018 - DNA, 122 bp, Homo sapiens
  misc_feature (61)..(62): /note="This region represents a CpG dinucleotide"
  misc_feature (61)..(61): /note="Nucleotide may be methylated to form 5-methylcytosine"
tctgtcagctacagcatgaaaaattcagtgtcctgcagattccccatcgcagtgaatcatcgcatcagccagagagcaagctgactaatgattgctatgctgcagacaatgaagatgatata

SEQ ID NO: 6019 - DNA, 122 bp, Homo sapiens
  misc_feature (61)..(62): /note="This region represents a CpG dinucleotide"
  misc_feature (61)..(61): /note="Nucleotide may be methylated to form 5-methylcytosine"
ctgggccagccagctggagagaagacatacagatgtagctggctggagtttgaggggtaacggggctgtgcagtcagcctagtatcctgcagtgggctacagactggaagtctccccctctg

SEQ ID NO: 6020 - DNA, 122 bp, Homo sapiens
  misc_feature (61)..(62): /note="This region represents a CpG dinucleotide"
  misc_feature (61)..(61): /note="Nucleotide may be methylated to form 5-methylcytosine"
gcaagtgagctggtcacataggcacattccagctacctaaccagcctcagccctcaaaatcgtcagctccaccaaaaccgagtgctaggcaaaaatctgattattttgttaaacaacgctga

SEQ ID NO: 6021 - DNA, 122 bp, Homo sapiens
  misc_feature (61)..(62): /note="This region represents a CpG dinucleotide"
  misc_feature (61)..(61): /note="Nucleotide may be methylated to form 5-methylcytosine"
agcctgccccggccagccaagtcaagttctatgagcgtgaccggcgggcggggtggacctcgccctgtgagcagcagcattgaccccagtctcctcagcaccaagcagggaggccttacgcc

SEQ ID NO: 6022 - DNA, 122 bp, Homo sapiens
  misc_feature (61)..(62): /note="This region represents a CpG dinucleotide"
  misc_feature (61)..(61): /note="Nucleotide may be methylated to form 5-methylcytosine"
aattattgtcttcagggagttctctagaggctgcgggcgtgcactgctcaaatccacttgcgtgagaagctcatgaggagggtagttagctgacagtttccagctgcggcccctctggctct

SEQ ID NO: 6023 - DNA, 122 bp, Homo sapiens
  misc_feature (61)..(62): /note="This region represents a CpG dinucleotide"
  misc_feature (61)..(61): /note="Nucleotide may be methylated to form 5-methylcytosine"
tttgtagacagggtatcaccatgttgccaaggctggttttgaacccctgggctcaacatccgcctcctcggtgctgggattacaggcatgagccaccatacccagcccaaaggaaggaaatt

SEQ ID NO: 6024 - DNA, 122 bp, Homo sapiens
  misc_feature (61)..(62): /note="This region represents a CpG dinucleotide"
  misc_feature (61)..(61): /note="Nucleotide may be methylated to form 5-methylcytosine"
tgaattgtaacaagacttgaaatacaggacttttttaatctagtggttctttatttataacgtaggctgaagcaattgttacaatgtaggagggagacacattacacaattgttatttatac

SEQ ID NO: 6025 - DNA, 122 bp, Homo sapiens
  misc_feature (61)..(62): /note="This region represents a CpG dinucleotide"
  misc_feature (61)..(61): /note="Nucleotide may be methylated to form 5-methylcytosine"
tcatgacattggcaatttcaaataggaagcaatcccattgaaaggttgtgaacaccctttcgagatctttctccttgtgggccccgcatacttgcaactacattctttctcctgaaccaggc

SEQ ID NO: 6026 - DNA, 122 bp, Homo sapiens
  misc_feature (61)..(62): /note="This region represents a CpG dinucleotide"
  misc_feature (61)..(61): /note="Nucleotide may be methylated to form 5-methylcytosine"
agggaggaacattattaactgtagctcccttttccccgactcagacttgccctttaaggacgtcagcaatcacatgtctggcaccttccaccagaagtaagcatgactctccctttcaggtg

SEQ ID NO: 6027 - DNA, 122 bp, Homo sapiens
  misc_feature (61)..(62): /note="This region represents a CpG dinucleotide"
  misc_feature (61)..(61): /note="Nucleotide may be methylated to form 5-methylcytosine"
tgtaaccaggcttgagtggtaagagacgtctcaacaggcctgattctgctcagctgcccacgccctcatcaccctttcaaaggtgaggagagctgcatcctcaagagacaggagcaatgact

SEQ ID NO: 6028 - DNA, 122 bp, Homo sapiens
  misc_feature (61)..(62): /note="This region represents a CpG dinucleotide"
  misc_feature (61)..(61): /note="Nucleotide may be methylated to form 5-methylcytosine"
cagtgcacaaaggaaggcatgagtaatgccaattaaggggcacctgtggaaaacaactggcggcatgatttggctggaactgaagagtaaacgaagttaaatagggcaccagggattggaaa

SEQ ID NO: 6029 - DNA, 122 bp, Homo sapiens
  misc_feature (61)..(62): /note="This region represents a CpG dinucleotide"
  misc_feature (61)..(61): /note="Nucleotide may be methylated to form 5-methylcytosine"
actcagataatcacattagttttgtcattaaaagatcccttttatagaaagtacctaaaccgcttaaaccacccagagaggttgcatacattatcaaacaccaagacaaacaaaagggattt

SEQ ID NO: 6030 - DNA, 122 bp, Homo sapiens
  misc_feature (61)..(62): /note="This region represents a CpG dinucleotide"
  misc_feature (61)..(61): /note="Nucleotide may be methylated to form 5-methylcytosine"
ttgaaatctgaatttttctggccccaagccaggtactcagataacctgtaattaaaactccggtcctctgcctcatgtctttatgactttccctcctgtgtcctgctttcagagcaaccata

SEQ ID NO: 6031 - DNA, 122 bp, Homo sapiens
  misc_feature (61)..(62): /note="This region represents a CpG dinucleotide"
  misc_feature (61)..(61): /note="Nucleotide may be methylated to form 5-methylcytosine"
caggtgatccacccgccttggcctccccaagtgccaggattacaggtgtttgagtcacgtcgcctggccagggaccacatgttgaatagagaggggttaagcagaagggatggccagagagc

SEQ ID NO: 6032 - DNA, 122 bp, Homo sapiens
  misc_feature (61)..(62): /note="This region represents a CpG dinucleotide"
  misc_feature (61)..(61): /note="Nucleotide may be methylated to form 5-methylcytosine"
tttcagcctctgcctgcaagactgagctgcttttacctgcttcttttcccagcctggctccgtctgcattacagactcagggctctgtgtaggatgagctccataatcaaggtcctgctgac

SEQ ID NO: 6033 - DNA, 122 bp, Homo sapiens
  misc_feature (61)..(62): /note="This region represents a CpG dinucleotide"
  misc_feature (61)..(61): /note="Nucleotide may be methylated to form 5-methylcytosine"
gttgcaaaatgcatgaagtcactacttagaggtatacttaataagggaggatgaaagtgacgcaaatgcagttctcaggatcagaagagtaacttgccagcaagcatgtattttaattgtcc

SEQ ID NO: 6034 - DNA, 122 bp, Homo sapiens
  misc_feature (61)..(62): /note="This region represents a CpG dinucleotide"
  misc_feature (61)..(61): /note="Nucleotide may be methylated to form 5-methylcytosine"
gagcaggcagcttctccccagagagcctcagggcaaggctggggaacagagtgttatagacgtcagaggctgacaggcacaaacctcggcacatctcacacacagaaaggcacatacaagag

SEQ ID NO: 6035 - DNA, 122 bp, Homo sapiens
  misc_feature (61)..(62): /note="This region represents a CpG dinucleotide"
  misc_feature (61)..(61): /note="Nucleotide may be methylated to form 5-methylcytosine"
catggccttgccagatttccagcttccagcctgcaggatgctgagacagtaaatcctcaccgttttaagccaccaagtttgtggtgatctgttacagcagcttcagtaaacacatacaacct

SEQ ID NO: 6036 - DNA, 122 bp, Homo sapiens
  misc_feature (61)..(62): /note="This region represents a CpG dinucleotide"
  misc_feature (61)..(61): /note="Nucleotide may be methylated to form 5-methylcytosine"
ccccatgttggaatcccagctctgccattcacagctgtaaaattcagagcaagtaacttccgtggcctcagtttcctcatcttaaaatgggcattgtgacatttatctcctaggatcacaat

SEQ ID NO: 6037 - DNA, 122 bp, Homo sapiens
  misc_feature (61)..(62): /note="This region represents a CpG dinucleotide"
  misc_feature (61)..(61): /note="Nucleotide may be methylated to form 5-methylcytosine"
attcaatgcaggtcaactctcctggggttgtcctgagcaatgcctccagatccgtgttgacggtgcctacttggccttgggggacaacccactgaatacacaagagtgtcttctgcaagcag

SEQ ID NO: 6038 - DNA, 122 bp, Homo sapiens
  misc_feature (61)..(62): /note="This region represents a CpG dinucleotide"
  misc_feature (61)..(61): /note="Nucleotide may be methylated to form 5-methylcytosine"
agcctgcaccctgatcccctgctcctctgcctccatcccctgctgggcctctgcaggagacggtccaggcccacactgcttagagaggtttccaagagtacatgatctgttagggattgttt

SEQ ID NO: 6039 - DNA, 122 bp, Homo sapiens
  misc_feature (61)..(62): /note="This region represents a CpG dinucleotide"
  misc_feature (61)..(61): /note="Nucleotide may be methylated to form 5-methylcytosine"
atgttgacttctgagtaatcccagttctgggaggcctctaacatttccagtttggccgggcgcggtggctcacccctgtaatcccagcactttggtgattctccccggggcctgaaagcttg

SEQ ID NO: 6040 - DNA, 122 bp, Homo sapiens
  misc_feature (61)..(62): /note="This region represents a CpG dinucleotide"
  misc_feature (61)..(61): /note="Nucleotide may be methylated to form 5-methylcytosine"
gtgtttagtttgggcagttttcaagtctgcgtggccttttgttgttattgttggccctcacgtctccaccattcatgcacacaggctcccaggcagccaggcatgtgtggaatgtttatcaa

SEQ ID NO: 6041 - DNA, 122 bp, Homo sapiens
  misc_feature (61)..(62): /note="This region represents a CpG dinucleotide"
  misc_feature (61)..(61): /note="Nucleotide may be methylated to form 5-methylcytosine"
aatgaaccaagacttcctcaagcttagctaagcctcaaatgagaaaggcaacactttctgcgaacatgtcacagtgctggatagcacaaaggctgacctcaagaaaaggctgattcagtaag

SEQ ID NO: 6042 - DNA, 122 bp, Homo sapiens
  misc_feature (61)..(62): /note="This region represents a CpG dinucleotide"
  misc_feature (61)..(61): /note="Nucleotide may be methylated to form 5-methylcytosine"
atcagaatatactggaaaaaatttctcccccagatgttacaacattgccatttagtgcagcgctacttgagagcagatggcgatgagtcaggatttaacaaagaccttaatggctcttctgc

SEQ ID NO: 6043 - DNA, 122 bp, Homo sapiens
  misc_feature (61)..(62): /note="This region represents a CpG dinucleotide"
  misc_feature (61)..(61): /note="Nucleotide may be methylated to form 5-methylcytosine"
catggcgtcatcactatcagtcaaactgtcaccagcggttcactgtgatgatacatctgacgtgcattgaaagaccaaggacctgctgcacttgactgtcatggcagcaatgatgatgacag

SEQ ID NO: 6044 - DNA, 122 bp, Homo sapiens
  misc_feature (61)..(62): /note="This region represents a CpG dinucleotide"
  misc_feature (61)..(61): /note="Nucleotide may be methylated to form 5-methylcytosine"
agtcttgctctgtagcccaggctggagtgcagtggtgcaatctcggctcactacaacctccgtgtggctataacttttgcagtttgaggtgtgtcagcaagactaacatgaatttctttttc

SEQ ID NO: 6045 - DNA, 122 bp, Homo sapiens
  misc_feature (61)..(62): /note="This region represents a CpG dinucleotide"
  misc_feature (61)..(61): /note="Nucleotide may be methylated to form 5-methylcytosine"
gctattgaagggttgcccaggtatctgtatagaaaaccaacctaacctggtcaaagtaaacgagtacaactggatgtttgtagtcattacacaggaaaccaccatgctaatctatctatgaa

SEQ ID NO: 6046 - DNA, 122 bp, Homo sapiens
  misc_feature (61)..(62): /note="This region represents a CpG dinucleotide"
  misc_feature (61)..(61): /note="Nucleotide may be methylated to form 5-methylcytosine"
aactccacatggtggacacttgtcactgggaatgattcaggctttaatggggctgctgggcgggagcacagggcttgagggccagaggaagtggagcaggaactgtggcaagaggtagaggg

SEQ ID NO: 6047 - DNA, 122 bp, Homo sapiens
  misc_feature (61)..(62): /note="This region represents a CpG dinucleotide"
  misc_feature (61)..(61): /note="Nucleotide may be methylated to form 5-methylcytosine"
aaagtatataaacccacaaaacaaatactttaatgtacttttgtgtatttctttttcttacgttattccattggctggaacctccagtacaatgttaaatagaagtgatgacagcagaaatc

SEQ ID NO: 6048 - DNA, 122 bp, Homo sapiens
  misc_feature (61)..(62): /note="This region represents a CpG dinucleotide"
  misc_feature (61)..(61): /note="Nucleotide may be methylated to form 5-methylcytosine"
gatagtgattcctctgatggatctaagcaaagtacagtgaaaatgattcaccattctagacggcattaagaacatttgtgattcatgggaaaaagtaaaaatatcaacattaggctggtgag

SEQ ID NO: 6049 - DNA, 122 bp, Homo sapiens
  misc_feature (61)..(62): /note="This region represents a CpG dinucleotide"
  misc_feature (61)..(61): /note="Nucleotide may be methylated to form 5-methylcytosine"
cgagggacacaagtacattgtcgtttctggggaataagaggtgtaggtgccagtagggtgcggtcactcacaagtcactatgtcccagtccaaaagcccaggagtggggtggaaacttcaca

SEQ ID NO: 6050 - DNA, 122 bp, Homo sapiens
  misc_feature (61)..(62): /note="This region represents a CpG dinucleotide"
  misc_feature (61)..(61): /note="Nucleotide may be methylated to form 5-methylcytosine"
ttgtttggatagtatgaaaggacaaagtatcagcactcagaaatgtcaacctttgaacctcgaacactttctgatttataaaaagaatccttccaaaaagatgcaggagccctaatgtaatc

SEQ ID NO: 6051 - DNA, 122 bp, Homo sapiens
  misc_feature (61)..(62): /note="This region represents a CpG dinucleotide"
  misc_feature (61)..(61): /note="Nucleotide may be methylated to form 5-methylcytosine"
ccaaaagtacttttcaagatttagatggcaaacagccatccccacccttgtctaggaagtcgtattcgcaggtcacaggaaggcgtcaggtcaggcttgaagcagccggggtgtgggcaggg

SEQ ID NO: 6052 - DNA, 122 bp, Homo sapiens
  misc_feature (61)..(62): /note="This region represents a CpG dinucleotide"
  misc_feature (61)..(61): /note="Nucleotide may be methylated to form 5-methylcytosine"
aaactgctgctgggaaagagttgaagcaggagcagacggtgttgcaattcaattcagtggcgaggtgcgcctttccataggtgtggttagttatgacaggtattggttcctggctctactgc

SEQ ID NO: 6053 - DNA, 122 bp, Homo sapiens
  misc_feature (61)..(62): /note="This region represents a CpG dinucleotide"
  misc_feature (61)..(61): /note="Nucleotide may be methylated to form 5-methylcytosine"
tcctaatccctgttctggccggtgattcagctccaggtggaggctgtgcagaaacagccccggtcatctttgtgtgaaatacatttgtcgtcttcattttcttttttcttctgctggtatct

SEQ ID NO: 6054 - DNA, 122 bp, Homo sapiens
  misc_feature (61)..(62): /note="This region represents a CpG dinucleotide"
  misc_feature (61)..(61): /note="Nucleotide may be methylated to form 5-methylcytosine"
ggccagctttgcagcctcagcaaattctctgacattcaatgagcctgagtcactgaacttcgtcaatgagagtttctcatccctaagggcagtggctgctccctatatctgctattcctatg

SEQ ID NO: 6055 - DNA, 122 bp, Homo sapiens
  misc_feature (61)..(62): /note="This region represents a CpG dinucleotide"
  misc_feature (61)..(61): /note="Nucleotide may be methylated to form 5-methylcytosine"
aacttccttgggttgttatgaggattaaatgagttaacattagtaatgctcttggaacagcgtctgacacatcataagcacaaaagtgtttgttagataaaaagtgattttttttcctgcct

SEQ ID NO: 6056 - DNA, 122 bp, Homo sapiens
  misc_feature (61)..(62): /note="This region represents a CpG dinucleotide"
  misc_feature (61)..(61): /note="Nucleotide may be methylated to form 5-methylcytosine"
caggcactcctttgcttgtttacagtcctctatgataaagtgaacactcataaccctggacgcactcttcctgtgtctaattaaattcaagtacccttttcttcaggtttgacttctgggtt

SEQ ID NO: 6057 - DNA, 122 bp, Homo sapiens
  misc_feature (61)..(62): /note="This region represents a CpG dinucleotide"
  misc_feature (61)..(61): /note="Nucleotide may be methylated to form 5-methylcytosine"
ttgttattgcaggcttggagcacacctcactaatttggaaggcccagcgcagaggaaccacgcccagcccagcaatgagaaagcttgtgttctagttccagttctggtactgagacactctg

SEQ ID NO: 6058 - DNA, 122 bp, Homo sapiens
  misc_feature (61)..(62): /note="This region represents a CpG dinucleotide"
  misc_feature (61)..(61): /note="Nucleotide may be methylated to form 5-methylcytosine"
agtgtgggtggataggtcttgcatgacaaatccactctaacatttcacaatctccctaagcgtttgaatttcttcctctgcattataccaaggcaagtctgacattttcagttcacttactg

SEQ ID NO: 6059 - DNA, 122 bp, Homo sapiens
  misc_feature (61)..(62): /note="This region represents a CpG dinucleotide"
  misc_feature (61)..(61): /note="Nucleotide may be methylated to form 5-methylcytosine"
cttaagccctagaagtctaggcagtaatgagctgtgaccatgccactgaactccagcctacgtgacagagactctgtctcaaaaaagaaaaaaaaaaagtcatatcaccaatgagatctgac

SEQ ID NO: 6060 - DNA, 122 bp, Homo sapiens
  misc_feature (61)..(62): /note="This region represents a CpG dinucleotide"
  misc_feature (61)..(61): /note="Nucleotide may be methylated to form 5-methylcytosine"
tggctgcgtgaacatcatgacaaagacctagatgaggcagcctactacacacctgtacaacgtgggactgtactgaatactgtaggcaattgtgacacaatggtaagtattaatatttgtgg

SEQ ID NO: 6061 - DNA, 122 bp, Homo sapiens
  misc_feature (61)..(62): /note="This region represents a CpG dinucleotide"
  misc_feature (61)..(61): /note="Nucleotide may be methylated to form 5-methylcytosine"
aaagagaatgagagttaacatttgggtgcctcctgcatgctagccattttgtttacacaccgtgcatgagaataggtattaaagaaaaattcctgtggcaatacttgtgaataggtatacaa

SEQ ID NO: 6062 - DNA, 122 bp, Homo sapiens
  misc_feature (61)..(62): /note="This region represents a CpG dinucleotide"
  misc_feature (61)..(61): /note="Nucleotide may be methylated to form 5-methylcytosine"
tttggcaagatggtcagggcagtttttaaacacctcatgtagctgtccagggttcctgagcgcccaagtattaattcacctcatttttgagcaggattcttccttctgtgaaagcaagagaa

SEQ ID NO: 6063 - DNA, 122 bp, Homo sapiens
  misc_feature (61)..(62): /note="This region represents a CpG dinucleotide"
  misc_feature (61)..(61): /note="Nucleotide may be methylated to form 5-methylcytosine"
cagctgatctcaaggcttcaaatggagccctcaggctgtcagaggcttactgtggccaaccgacctttacttcacagaaggacaagttagccatcctggtgaatgggcaaagtcaagcagct

SEQ ID NO: 6064 - DNA, 122 bp, Homo sapiens
  misc_feature (61)..(62): /note="This region represents a CpG dinucleotide"
  misc_feature (61)..(61): /note="Nucleotide may be methylated to form 5-methylcytosine"
tggcagtggaaaacatctgggtgatctccacccaacccccacgcctgctcagccttcctccgggtcaggccaggtcagctgttctgcccaagctacaggcacagctgctagcccactgctgt

SEQ ID NO: 6065 - DNA, 122 bp, Homo sapiens
  misc_feature (61)..(62): /note="This region represents a CpG dinucleotide"
  misc_feature (61)..(61): /note="Nucleotide may be methylated to form 5-methylcytosine"
aaaacaaacaaagaaaaaaaacaagggagcttgaaaactgagggatgctgtaggattctgcggcctgctaaccgattatgtgtattaatcagataggctaattgttgtaaccaccctctaat

SEQ ID NO: 6066 - DNA, 122 bp, Homo sapiens
  misc_feature (61)..(62): /note="This region represents a CpG dinucleotide"
  misc_feature (61)..(61): /note="Nucleotide may be methylated to form 5-methylcytosine"
tctcttcatattaggtatggctcccataccctgtctttggctccagtcatatttaaaccccgcacctaccctcatcatgtaattttagttcatgcatttgtcactactattcccgttttact

SEQ ID NO: 6067 - DNA, 122 bp, Homo sapiens
  misc_feature (61)..(62): /note="This region represents a CpG dinucleotide"
  misc_feature (61)..(61): /note="Nucleotide may be methylated to form 5-methylcytosine"
ggtggggctggcccagagcttgaaaagttcacaggaggtgttcagagcaattgtgcctagcgcctgatctaatctgttgtcagagtgtgatctattgtcagagtgtgatctattgtcagagt

SEQ ID NO: 6068 - DNA, 122 bp, Homo sapiens
  misc_feature (61)..(62): /note="This region represents a CpG dinucleotide"
  misc_feature (61)..(61): /note="Nucleotide may be methylated to form 5-methylcytosine"
atgtgactgatcatgacatcagtgattcctaattccaaactgtaaaaaacactcccagaacgctgacaacatattagatactcccagaaccacccttccttcacctcccaatctaatgtttg

SEQ ID NO: 6069 - DNA, 122 bp, Homo sapiens
  misc_feature (61)..(62): /note="This region represents a CpG dinucleotide"
  misc_feature (61)..(61): /note="Nucleotide may be methylated to form 5-methylcytosine"
atatatacttacaatggaacctagcacttctaggtatttatccaagagaaatgaaacatacgcccatgaaaagacttacgcatgaatgttcatggcattatttatagtggccccaatctgaa

SEQ ID NO: 6070 - DNA, 122 bp, Homo sapiens
  misc_feature (61)..(62): /note="This region represents a CpG dinucleotide"
  misc_feature (61)..(61): /note="Nucleotide may be methylated to form 5-methylcytosine"
ataaatctttatgtaatcttagtttgggttgttgcatcactcctggaatataaaatattacggactgtggaatttatgaggcctgacatgttatgagttctcaaagatggttcagcagcagt

SEQ ID NO: 6071 - DNA, 122 bp, Homo sapiens
  misc_feature (61)..(62): /note="This region represents a CpG dinucleotide"
  misc_feature (61)..(61): /note="Nucleotide may be methylated to form 5-methylcytosine"
catagtctttttttctatacagattgttccttacaatggcattatgtcccctaaacccatcgtaacttgtaaataccttaagtctaaaatgtgtttagcacacctaacctaaatgtcatagc

SEQ ID NO: 6072 - DNA, 122 bp, Homo sapiens
  misc_feature (61)..(62): /note="This region represents a CpG dinucleotide"
  misc_feature (61)..(61): /note="Nucleotide may be methylated to form 5-methylcytosine"
agctcctcccatatggtggacatggaaagttgtttagtctgtctaatatgatgatgatgccgattaccatgagcatcactgaaggtactgtgtgtacagagcctagcctgcagtctgggtgt

SEQ ID NO: 6073 - DNA, 122 bp, Homo sapiens
  misc_feature (61)..(62): /note="This region represents a CpG dinucleotide"
  misc_feature (61)..(61): /note="Nucleotide may be methylated to form 5-methylcytosine"
agttgaggggataagtacacactgacacacttgaagcacgaaataacaaggcatgcaatacgctgctaagtggtgagaagtagagagtgcaagaggggcttggaaaaggaagatcagagaag

SEQ ID NO: 6074 - DNA, 122 bp, Homo sapiens
  misc_feature (61)..(62): /note="This region represents a CpG dinucleotide"
  misc_feature (61)..(61): /note="Nucleotide may be methylated to form 5-methylcytosine"
gtggtgtgttcacacagtacagtgctacacagctgtgaacattcatgaactatagctacccgtgacagagacaggaagcagccaaatgcctaggtagataggggcaagtccctggtgaaacc

SEQ ID NO: 6075 - DNA, 122 bp, Homo sapiens
  misc_feature (61)..(62): /note="This region represents a CpG dinucleotide"
  misc_feature (61)..(61): /note="Nucleotide may be methylated to form 5-methylcytosine"
gtcctcatagtttctttactaacagctctgacttcccttcccaacctctcttagtacatgcggaagatgagaacagtggacaacggctttgctaagccctgaattgttccgaagtttgaagt

SEQ ID NO: 6076 - DNA, 122 bp, Homo sapiens
  misc_feature (61)..(62): /note="This region represents a CpG dinucleotide"
  misc_feature (61)..(61): /note="Nucleotide may be methylated to form 5-methylcytosine"
ttcctcttcctcttttaggctgacaacatggtttttgaaaggatgagaaagcacttagagcggttaggtactccagatgttagatcacctgctccaagatttcagctgagacttgcaaattt

SEQ ID NO: 6077 - DNA, 122 bp, Homo sapiens
  misc_feature (61)..(62): /note="This region represents a CpG dinucleotide"
  misc_feature (61)..(61): /note="Nucleotide may be methylated to form 5-methylcytosine"
taaacctctttccattataagttacccagtctcggatatgtccctctagcagtgtagaaacggactaatacagtagtcatcagattggcaaaaacaattttggcaagtacatgaagcatttg

SEQ ID NO: 6078 - DNA, 122 bp, Homo sapiens
  misc_feature (61)..(62): /note="This region represents a CpG dinucleotide"
  misc_feature (61)..(61): /note="Nucleotide may be methylated to form 5-methylcytosine"
tctgcgttgtgtgtttcgcattccggaagcaaattactcatctgattttacttcagctgacgctgattttaaatgtgacttggaatcctcagaataattagctgcctaatttggaggttcat

SEQ ID NO: 6079 - DNA, 122 bp, Homo sapiens
  misc_feature (61)..(62): /note="This region represents a CpG dinucleotide"
  misc_feature (61)..(61): /note="Nucleotide may be methylated to form 5-methylcytosine"
atatacatattttcctcattagtgggatggagtaacgctgagctgggcaaaagaaaggtccgaatttgcctggtaatattgccacaacttgaaagtggatgattttcctcctaaagcctcct

SEQ ID NO: 6080 - DNA, 122 bp, Homo sapiens
  misc_feature (61)..(62): /note="This region represents a CpG dinucleotide"
  misc_feature (61)..(61): /note="Nucleotide may be methylated to form 5-methylcytosine"
ctcacagccctatgcactctagtttctgtttaccaggcacatgggccaatacccttgtttcgaaaacaggaagagcattgctgtgaatgagaagtcagtggggactttggaaggaaactaat

SEQ ID NO: 6081 - DNA, 122 bp, Homo sapiens
  misc_feature (61)..(62): /note="This region represents a CpG dinucleotide"
  misc_feature (61)..(61): /note="Nucleotide may be methylated to form 5-methylcytosine"
ttaaacaaatcccagtctctttaaacaaaatctgcagcttaacaagagcctcaggtgattcgtatgcacattaaagtctgaggagtactggtctttagggaccacagctgccaacctgacag

SEQ ID NO: 6082 - DNA, 122 bp, Homo sapiens
  misc_feature (61)..(62): /note="This region represents a CpG dinucleotide"
  misc_feature (61)..(61): /note="Nucleotide may be methylated to form 5-methylcytosine"
ctcgatctcctgaccttgtgatccgcctgcctctgcctcccagagtgctgggattacaggcgtgagccacttctggctttttgagacactagaggagctggcattactggacctgtgatgtg

SEQ ID NO: 6083 - DNA, 122 bp, Homo sapiens
  misc_feature (61)..(62): /note="This region represents a CpG dinucleotide"
  misc_feature (61)..(61): /note="Nucleotide may be methylated to form 5-methylcytosine"
cccatgacagcccagaatgaaccagcctggctctccctgaattgatttggtaagtccctgcgttaactggctagcttcctgtaggctggcagtgggggcaccagtgtgaggtgaaaggactc

SEQ ID NO: 6084 - DNA, 122 bp, Homo sapiens
  misc_feature (61)..(62): /note="This region represents a CpG dinucleotide"
  misc_feature (61)..(61): /note="Nucleotide may be methylated to form 5-methylcytosine"
gagccttctccacctccgtgatgcctccgggttcgtgcatggccacttgtgctgcgtgagcgtcgtaggtttaggggaacagaagtagagggatttacatgagcttttaaaatcccaaatag

SEQ ID NO: 6085 - DNA, 122 bp, Homo sapiens
  misc_feature (61)..(62): /note="This region represents a CpG dinucleotide"
  misc_feature (61)..(61): /note="Nucleotide may be methylated to form 5-methylcytosine"
ttgcagcaagtacagcctcagctgtcatctgtgccctagggcagggttcagtaggttaggcgttaagagacagtgtacctcataagaagtggtcaggtttctttctgagtttcagttcttca

SEQ ID NO: 6086 - DNA, 122 bp, Homo sapiens
  misc_feature (61)..(62): /note="This region represents a CpG dinucleotide"
  misc_feature (61)..(61): /note="Nucleotide may be methylated to form 5-methylcytosine"
aggaggagtacccagttcaattccactgggtcactatgtaacaaggaaggaaatgcagaccgatgaattctgctgccctggactccttacaagtctagagggggaacagatggaggttctag

SEQ ID NO: 6087 - DNA, 122 bp, Homo sapiens
  misc_feature (61)..(62): /note="This region represents a CpG dinucleotide"
  misc_feature (61)..(61): /note="Nucleotide may be methylated to form 5-methylcytosine"
ttatagcagataccagtaggatcccagattcttcctggcctttatctgttccttcaaaaacgctgtgcaagtctgggcatcttcccaccctgcctctcccttcttctttctctctccacccc

SEQ ID NO: 6088 - DNA, 122 bp, Homo sapiens
  misc_feature (61)..(62): /note="This region represents a CpG dinucleotide"
  misc_feature (61)..(61): /note="Nucleotide may be methylated to form 5-methylcytosine"
gtcatttggcaatttggtccttgtgtgagcatcatagggcaaacttacacaaacctacatcgtaaggtgtactatgcacctaggcaatatggtacagcctgttgctcttaggctacaaacct

SEQ ID NO: 6089 - DNA, 122 bp, Homo sapiens
  misc_feature (61)..(62): /note="This region represents a CpG dinucleotide"
  misc_feature (61)..(61): /note="Nucleotide may be methylated to form 5-methylcytosine"
tccttccctagctgtgaatacggcccaggggtgtggcctgaaagtggcctgtgtctcagccgccgtatcggacgagtcagtggctggagacagtggtgtgtacgaggcttccgtgcagaggt

SEQ ID NO: 6090 - DNA, 122 bp, Homo sapiens
  misc_feature (61)..(62): /note="This region represents a CpG dinucleotide"
  misc_feature (61)..(61): /note="Nucleotide may be methylated to form 5-methylcytosine"
ccagggggcatttgttgctaagcaaccaagacttctgttaaatcccttcttaaagagtgtcggcaatatgcactatcaaataaacccagctttgcaagatgataccttcctaattgactaag

SEQ ID NO: 6091 - DNA, 122 bp, Homo sapiens
  misc_feature (61)..(62): /note="This region represents a CpG dinucleotide"
  misc_feature (61)..(61): /note="Nucleotide may be methylated to form 5-methylcytosine"
tgggtccaaacccagcatttgctgccaatttctgcaaaggatatactctagagactcacgcgtcctcctaccttgtacagctggacgtcgtagcatttaaagagctggcacacgtcaggcaa

SEQ ID NO: 6092 - DNA, 122 bp, Homo sapiens
  misc_feature (61)..(62): /note="This region represents a CpG dinucleotide"
  misc_feature (61)..(61): /note="Nucleotide may be methylated to form 5-methylcytosine"
gagaccactgtttgtaatacactgaaggaaacttaaaatggacttttctcctagaaaagacgtggtaattccaggctattaattggtgattcagtcggatagtcatctgtttttcttcaaca

SEQ ID NO: 6093 - DNA, 122 bp, Homo sapiens
  misc_feature (61)..(62): /note="This region represents a CpG dinucleotide"
  misc_feature (61)..(61): /note="Nucleotide may be methylated to form 5-methylcytosine"
cttaaaccatgaggctgcatagctctggttgatgactgaaggccaaattgcatgcagtaccggggacaggattggtaccgtcacctgtaagcttgggcctggtgggagtggacagacctgcc

SEQ ID NO: 6094 - DNA, 122 bp, Homo sapiens
  misc_feature (61)..(62): /note="This region represents a CpG dinucleotide"
  misc_feature (61)..(61): /note="Nucleotide may be methylated to form 5-methylcytosine"
acctcaggtgatccacccgccttggcttcccaaagtgctgggattacaggcgggagctaccgcaccctgcctgagactttgtcttcagttacaagtgcagtgagtgacgaggggagggaaga

SEQ ID NO: 6095 - DNA, 122 bp, Homo sapiens
  misc_feature (61)..(62): /note="This region represents a CpG dinucleotide"
  misc_feature (61)..(61): /note="Nucleotide may be methylated to form 5-methylcytosine"
gcgtggatccgttggacaaagggatgattcatgcctccggttggacagatccagatgcctcgagatttcatcatgctactcagaacaacatgcaattaaaaactttccaactgttcatttct

SEQ ID NO: 6096 - DNA, 122 bp, Homo sapiens
  misc_feature (61)..(62): /note="This region represents a CpG dinucleotide"
  misc_feature (61)..(61): /note="Nucleotide may be methylated to form 5-methylcytosine"
ttattttggattgtcgtgtgcccaaataaaaagtgtatcgcaatgtgagaaggagagggccgctattgggagaactagttccctctgctaagtgacctttctagttgctttcatggctccaa

SEQ ID NO: 6097 - DNA, 122 bp, Homo sapiens
  misc_feature (61)..(62): /note="This region represents a CpG dinucleotide"
  misc_feature (61)..(61): /note="Nucleotide may be methylated to form 5-methylcytosine"
agaaaaatttatttcaagcctagaaacccataccaatcatagtaaagacattttcaaacacgtaagactcagaaagtgagcctcaatcagaataaatcacttaagactattaaatatatttc

SEQ ID NO: 6098 - DNA, 122 bp, Homo sapiens
  misc_feature (61)..(62): /note="This region represents a CpG dinucleotide"
  misc_feature (61)..(61): /note="Nucleotide may be methylated to form 5-methylcytosine"
tatttttacctaagggcttatatgaataagcccaatgactatcaaacacaataaaagctgcgtaactgctacctcacccatggaaaaaatgtatgattaactcattgggcaatgcagaatga

SEQ ID NO: 6099 - DNA, 122 bp, Homo sapiens
  misc_feature (61)..(62): /note="This region represents a CpG dinucleotide"
  misc_feature (61)..(61): /note="Nucleotide may be methylated to form 5-methylcytosine"
ccaaatcctgaattggcattggccaatttctgtggtgtaactactcccaagctacacagacgtgactttactggctgaggacttgggcagaggtgcacacagtcagactgagaggggggcat

SEQ ID NO: 6100 - DNA, 122 bp, Homo sapiens
  misc_feature (61)..(62): /note="This region represents a CpG dinucleotide"
  misc_feature (61)..(61): /note="Nucleotide may be methylated to form 5-methylcytosine"
ctccaggtggctcagccggcacctgatggtcagcagcacacatcagacacgcagctcaaccgtccagttcctccggatcttactgctggcacccatattgaggtggaaggaagcctttgggt

SEQ ID NO: 6101 - DNA, 122 bp, Homo sapiens
  misc_feature (61)..(62): /note="This region represents a CpG dinucleotide"
  misc_feature (61)..(61): /note="Nucleotide may be methylated to form 5-methylcytosine"
atctcacaaagccagcccagttatgacagagtcatgacttacgaagctcagctgagtgaccgtttcctctttttaatactgttctcagctctttaaatgtttgaacatagctaccatttctc

SEQ ID NO: 6102 - DNA, 122 bp, Homo sapiens
  misc_feature (61)..(62): /note="This region represents a CpG dinucleotide"
  misc_feature (61)..(61): /note="Nucleotide may be methylated to form 5-methylcytosine"
tatgcacaaatactttttacttggcaaaccgcggagctcaggctttttatcgcttgcctacgaaatggaaggtgaacctgtcagcagatgatgcctgtcaattaacaatggttctcgcgaat

SEQ ID NO: 6103 - DNA, 122 bp, Homo sapiens
  misc_feature (61)..(62): /note="This region represents a CpG dinucleotide"
  misc_feature (61)..(61): /note="Nucleotide may be methylated to form 5-methylcytosine"
tcttcctttcctctcctctcccacttatgaagggagtccagtcagaaacatgtttgtctacgaggtagtatatctggtatttctgaggaattcggttattatataggattatagaatattca

SEQ ID NO: 6104 - DNA, 122 bp, Homo sapiens
  misc_feature (61)..(62): /note="This region represents a CpG dinucleotide"
  misc_feature (61)..(61): /note="Nucleotide may be methylated to form 5-methylcytosine"
atttgccagtaaatttgctgagtctcaactgctctccacacattctggtgagtgcaggaacgcatgagctctgcttcccttcagctgagtcacttcagagggcagggctcctttgttggaga

SEQ ID NO: 6105 - DNA, 122 bp, Homo sapiens
  misc_feature (61)..(62): /note="This region represents a CpG dinucleotide"
  misc_feature (61)..(61): /note="Nucleotide may be methylated to form 5-methylcytosine"
atgacacgatgagagctggctcctgttcaaggcggatccgcagtcttcaagacagaagtacgcttgatgtggcttcagaagtgaggggtgagtaacagcagcagacccaggcacaggccaca

SEQ ID NO: 6106 - DNA, 122 bp, Homo sapiens
  misc_feature (61)..(62): /note="This region represents a CpG dinucleotide"
  misc_feature (61)..(61): /note="Nucleotide may be methylated to form 5-methylcytosine"
tcagctgaccctagagtgtggtcaagtccatacttactaatggtgagtagaagccttacacgtagataaagacatggacatgatgtagactgtgggccatcaactccaagccccattttaaa

SEQ ID NO: 6107 - DNA, 122 bp, Homo sapiens
  misc_feature (61)..(62): /note="This region represents a CpG dinucleotide"
  misc_feature (61)..(61): /note="Nucleotide may be methylated to form 5-methylcytosine"
accagatcggctttgagcgggagtggcacaaattcctgctggagtacattgcgcccatgacggagaagctctaccccggctactacaccagggtgggcaagcctggggcatagccaggatgc

SEQ ID NO: 6108 - DNA, 122 bp, Homo sapiens
  misc_feature (61)..(62): /note="This region represents a CpG dinucleotide"
  misc_feature (61)..(61): /note="Nucleotide may be methylated to form 5-methylcytosine"
gacgcaggtggaggagaggccctcacctgtcttcaccgcatggcgtgtggaaggcggggccggcatgttctgagggcgggggctgaggcgtgcacctgtgtgtggaggtgacgggtgtcctc

SEQ ID NO: 6109 - DNA, 122 bp, Homo sapiens
  misc_feature (61)..(62): /note="This region represents a CpG dinucleotide"
  misc_feature (61)..(61): /note="Nucleotide may be methylated to form 5-methylcytosine"
atggggcccgcctgttcagaatcaagtgtgtgaccaggtgaggacgccaggcccgtttggcgctaagcagacacagatcaggctatgacaactaacttgttttttgaatagtgggattttat

SEQ ID NO: 6110 - DNA, 122 bp, Homo sapiens
  misc_feature (61)..(62): /note="This region represents a CpG dinucleotide"
  misc_feature (61)..(61): /note="Nucleotide may be methylated to form 5-methylcytosine"
acatgctaggattacaggcatgagccaccacccagcccaacccttaaaacttttaactgacgcttagcatggcaccaaaataatatttattgaatgtattctggtgccaacctctggatgca

SEQ ID NO: 6111 - DNA, 122 bp, Homo sapiens
  misc_feature (61)..(62): /note="This region represents a CpG dinucleotide"
  misc_feature (61)..(61): /note="Nucleotide may be methylated to form 5-methylcytosine"
tcgccctgcacgcacttgtgagctaagctaatatgattcaatgcagaacacaacacaggtcgaggagtgaatcattctgccagggacgtgcaagtgacacagctggagggcgtgtgaagcat

SEQ ID NO: 6112 - DNA, 122 bp, Homo sapiens
  misc_feature (61)..(62): /note="This region represents a CpG dinucleotide"
  misc_feature (61)..(61): /note="Nucleotide may be methylated to form 5-methylcytosine"
aaaggaggcgactctggacattctcatcaccttatttaaagcggggtacgctgactaatacgtgaagctgtgcattaatggcctaaattaagttacaggtatgaattttacataaaacagat

SEQ ID NO: 6113 - DNA, 122 bp, Homo sapiens
  misc_feature (61)..(62): /note="This region represents a CpG dinucleotide"
  misc_feature (61)..(61): /note="Nucleotide may be methylated to form 5-methylcytosine"
ctgaaggcctattcactgtcagcttgagaccttagctggagttgtgtaacatcttcacaccgcctaggcttcctcacagtgtgatgactaagtccccagtgccagcataccaggaaagagtg

SEQ ID NO: 6114 - DNA, 122 bp, Homo sapiens
  misc_feature (61)..(62): /note="This region represents a CpG dinucleotide"
  misc_feature (61)..(61): /note="Nucleotide may be methylated to form 5-methylcytosine"
tcgtcacggtgaccttggaaagcttcccggtgtctgaatcatttccagcaggtgctggtgcgctcacaacatcagaaggggaaggacgtgaagtcatctgagggcagggtgaaatcagcgag

SEQ ID NO: 6115 - DNA, 122 bp, Homo sapiens
  misc_feature (61)..(62): /note="This region represents a CpG dinucleotide"
  misc_feature (61)..(61): /note="Nucleotide may be methylated to form 5-methylcytosine"
agcttaccttcccaaacagattccccagatggccacacccttctgtagcactcattctgacgcatctgcctgatttatgctggagggcatttgtttcaaacaaatgtgtgttgagctacaaa

SEQ ID NO: 6116 - DNA, 122 bp, Homo sapiens
  misc_feature (61)..(62): /note="This region represents a CpG dinucleotide"
  misc_feature (61)..(61): /note="Nucleotide may be methylated to form 5-methylcytosine"
aaaagtggggaagacactaaattatacagatagattggaaataacattaggtaagaatcgcgccggttttacccacactggaaagagctgagaggtatgcatagctcttttattgctctgag

SEQ ID NO: 6117 - DNA, 122 bp, Homo sapiens
  misc_feature (61)..(62): /note="This region represents a CpG dinucleotide"
  misc_feature (61)..(61): /note="Nucleotide may be methylated to form 5-methylcytosine"
ctcctgacttccactactcactgcatgaggattattctgtggaaaccagagtactaaggacgaggcgctggatgatttggtcaaagtcaaatgtgccaagtcagcatcgagcagctattttt

SEQ ID NO: 6118 - DNA, 122 bp, Homo sapiens
  misc_feature (61)..(62): /note="This region represents a CpG dinucleotide"
  misc_feature (61)..(61): /note="Nucleotide may be methylated to form 5-methylcytosine"
ctcctagcccacttcaaagcctgctttagggtgctcactgtcacacctcagtgaggttagcgagtcagattaatgccaagacactaatgctattgttcttggcaaatggaacagcactaaaa

SEQ ID NO: 6119 - DNA, 122 bp, Homo sapiens
  misc_feature (61)..(62): /note="This region represents a CpG dinucleotide"
  misc_feature (61)..(61): /note="Nucleotide may be methylated to form 5-methylcytosine"
ctggcaagctgaagtggaggatgattgagcagactcgagaagaaggcactcagccagcagcgaggagcagctggcaccaagagagccgttccccaaagccctgcaaactgctggccaccaac

SEQ ID NO: 6120 - DNA, 122 bp, Homo sapiens
  misc_feature (61)..(62): /note="This region represents a CpG dinucleotide"
  misc_feature (61)..(61): /note="Nucleotide may be methylated to form 5-methylcytosine"
aggttccccagcctggagcctggctggttcctgccttttgtaccagtgtctgtgtgggtgcgtctgggggcagctggcagcatgggagatgactgtggctggtgcttatggggctgggccca

SEQ ID NO: 6121 - DNA, 122 bp, Homo sapiens
  misc_feature (61)..(62): /note="This region represents a CpG dinucleotide"
  misc_feature (61)..(61): /note="Nucleotide may be methylated to form 5-methylcytosine"
agccaagggatgcaggaactgggtaacttcctgttacacccacagacgaagttatgtcaacgtagctttcctttacttttcagtctccagatcctgttctcttccagtttttccagaggctt

SEQ ID NO: 6122 - DNA, 122 bp, Homo sapiens
  misc_feature (61)..(62): /note="This region represents a CpG dinucleotide"
  misc_feature (61)..(61): /note="Nucleotide may be methylated to form 5-methylcytosine"
aatcacctgggaaagagccttggacccaacacattagctttccagttgttttctttgatacgtcccagatctgtgaacttgcacaagccactcccattctgcttttttttgttgttgttgag

SEQ ID NO: 6123 - DNA, 122 bp, Homo sapiens
  misc_feature (61)..(62): /note="This region represents a CpG dinucleotide"
  misc_feature (61)..(61): /note="Nucleotide may be methylated to form 5-methylcytosine"
tgcccaatgtacggcattccttgtggtgaaccacagggctggcccaggattcttagatgtcggaggaggcgaagatgccacgtccagcagaaagagctgcacagtggcggccgcgcgtcaga

SEQ ID NO: 6124 - DNA, 122 bp, Homo sapiens
  misc_feature (61)..(62): /note="This region represents a CpG dinucleotide"
  misc_feature (61)..(61): /note="Nucleotide may be methylated to form 5-methylcytosine"
tagagttggaaagtaaatttaccatctagtcctcattttacacatagggagcctggtggacggaactgggaagcaatgtgtcagagtacagtatgtggtgaggtcactaaacaggttcagtt

SEQ ID NO: 6125 - DNA, 122 bp, Homo sapiens
  misc_feature (61)..(62): /note="This region represents a CpG dinucleotide"
  misc_feature (61)..(61): /note="Nucleotide may be methylated to form 5-methylcytosine"
cccagcataaagaagatgcatgaaactaagtcatagctgctgcagtcagcactcagtgaccgcagctgatataaaatgtaagagaagccataaacctttgttggtcttggggttgtttgtta

SEQ ID NO: 6126 - DNA, 122 bp, Homo sapiens
  misc_feature (61)..(62): /note="This region represents a CpG dinucleotide"
  misc_feature (61)..(61): /note="Nucleotide may be methylated to form 5-methylcytosine"
tctgtgggtgtggagggaggggactgagcaaagcctcagggaggccacatacgttctcagcgccatgcttggctggtgactggtcatgcaccattggcagggcctggagcacgtgcaaggaa

SEQ ID NO: 6127 - DNA, 122 bp, Homo sapiens
  misc_feature (61)..(62): /note="This region represents a CpG dinucleotide"
  misc_feature (61)..(61): /note="Nucleotide may be methylated to form 5-methylcytosine"
gaagcaaaagcagaaacccttgataaacccatcagaccttgtgagacttactcactatcacgagaacagcacaggaaagaccagcacaggaaagaccggcccccatgattcaattacctccc

SEQ ID NO: 6128 - DNA, 122 bp, Homo sapiens
  misc_feature (61)..(62): /note="This region represents a CpG dinucleotide"
  misc_feature (61)..(61): /note="Nucleotide may be methylated to form 5-methylcytosine"
actctagcagcattttacagaaccatgtttttctcttacagtatttatcaactcctacctcgtatggccaatttcccattaggcatgttaacaacagatagaggagattaaggataatctca

SEQ ID NO: 6129 - DNA, 122 bp, Homo sapiens
  misc_feature (61)..(62): /note="This region represents a CpG dinucleotide"
  misc_feature (61)..(61): /note="Nucleotide may be methylated to form 5-methylcytosine"
tccccccatatctccatctcttctcactggctatctatggtctgtgggtgaaccaagggacgttcctcctttgccatgaactttcagaggactgatgactcctgagcctgacttacagtctt

SEQ ID NO: 6130 - DNA, 122 bp, Homo sapiens
  misc_feature (61)..(62): /note="This region represents a CpG dinucleotide"
  misc_feature (61)..(61): /note="Nucleotide may be methylated to form 5-methylcytosine"
aatacagctttagtttctgtccactttgaggtctgatcatatgtcatgttttatttactacggtccttcatgaaacttcgaaaccacatagccacaagagaggaaatgaacccttcaagacc

SEQ ID NO: 6131 - DNA, 122 bp, Homo sapiens
  misc_feature (61)..(62): /note="This region represents a CpG dinucleotide"
  misc_feature (61)..(61): /note="Nucleotide may be methylated to form 5-methylcytosine"
gcacgctcaggatcccataagcttcttcggaagctttccagctcttgttttagcaggcagcgcaggcactgctgggtcatcgtgaccatgggcaggcttggattgatttgctgctggtgtgg

SEQ ID NO: 6132 - DNA, 122 bp, Homo sapiens
  misc_feature (61)..(62): /note="This region represents a CpG dinucleotide"
  misc_feature (61)..(61): /note="Nucleotide may be methylated to form 5-methylcytosine"
aacaggttgtacccactggcagtcagagtgacatactagccaaagattgctggagacctacgggcatgggcatctgcctggtgcccaagcctgacacccagctctggttgggaacgcagtgt

SEQ ID NO: 6133 - DNA, 122 bp, Homo sapiens
  misc_feature (61)..(62): /note="This region represents a CpG dinucleotide"
  misc_feature (61)..(61): /note="Nucleotide may be methylated to form 5-methylcytosine"
ggggaggcctgaagttcctttagcttgtccatgtgaaacagaggaagagcccacaaggaacgcattcatctcagagttaggtgaccttggctttgggatctagttgctcattacttccactt

SEQ ID NO: 6134 - DNA, 122 bp, Homo sapiens
  misc_feature (61)..(62): /note="This region represents a CpG dinucleotide"
  misc_feature (61)..(61): /note="Nucleotide may be methylated to form 5-methylcytosine"
gaagacaaatggtcaggcttccttgtcaaacattttgaatcagggactccaccaaacacccgctccaccacaatgtgattctaagcctgggcttttggtttatggattggattcaggtttac

SEQ ID NO: 6135 - DNA, 122 bp, Homo sapiens
  misc_feature (61)..(62): /note="This region represents a CpG dinucleotide"
  misc_feature (61)..(61): /note="Nucleotide may be methylated to form 5-methylcytosine"
agagccccctggcatgttgggagtggggtgaggcagggagttatcgaagaggaagagaagcggagaaataaggaagcccagtgtcaaagcttaaaatgcccgtttctacaccctgcaccagc

SEQ ID NO: 6136 - DNA, 122 bp, Homo sapiens
  misc_feature (61)..(62): /note="This region represents a CpG dinucleotide"
  misc_feature (61)..(61): /note="Nucleotide may be methylated to form 5-methylcytosine"
tgcagctcaggccatggagatgggctgcctgcttgtcataaattgtaggcaaactcccttcgttctgttgttggtcccagtgggcttgagctcctgggaaccaaggctttcagttccacaaa

SEQ ID NO: 6137 - DNA, 122 bp, Homo sapiens
  misc_feature (61)..(62): /note="This region represents a CpG dinucleotide"
  misc_feature (61)..(61): /note="Nucleotide may be methylated to form 5-methylcytosine"
caggtgagcagagtggggatcaggtgcagcggcacctctccccagcgctgtgatgttgggcgagtcactgcgtctcgggcattggtgtcctgtcagtaaagagataataatggctgtacctc

SEQ ID NO: 6138 - DNA, 122 bp, Homo sapiens
  misc_feature (61)..(62): /note="This region represents a CpG dinucleotide"
  misc_feature (61)..(61): /note="Nucleotide may be methylated to form 5-methylcytosine"
ggctctcagaccttcagcctcagactaggggctgcactgtcggctcccctggttctgaggcgttcagacttggactgagccacgttaccggctcctctggttctgcggcttgtaaacagcct

SEQ ID NO: 6139 - DNA, 122 bp, Homo sapiens
  misc_feature (61)..(62): /note="This region represents a CpG dinucleotide"
  misc_feature (61)..(61): /note="Nucleotide may be methylated to form 5-methylcytosine"
ggaaactgtctccagaagcttccctccccacgacagataatgagcagcaagtgcttctggcgacttagggtgatgtgaaatcacgctgggaatcctgctcctcctcaggtcctggcagtttc

SEQ ID NO: 6140 - DNA, 122 bp, Homo sapiens
  misc_feature (61)..(62): /note="This region represents a CpG dinucleotide"
  misc_feature (61)..(61): /note="Nucleotide may be methylated to form 5-methylcytosine"
gcttcatgctgaaaaggaaatgttggcaagttgttgctttgtaaagatcaacactatcaccgtaacagctgtcactcaaagtggaggaagtgaaatgcaaatttggtgagtaattagttttg

SEQ ID NO: 6141 - DNA, 122 bp, Homo sapiens
  misc_feature (61)..(62): /note="This region represents a CpG dinucleotide"
  misc_feature (61)..(61): /note="Nucleotide may be methylated to form 5-methylcytosine"
ttttacaagtttctccagactatgtagctgggtcagagtccttggcaggtgttgccctttcgttcctttatctcctggattatagtgtgggccagaaggtcctaggagaggggtctggagtc

SEQ ID NO: 6142 - DNA, 122 bp, Homo sapiens
  misc_feature (61)..(62): /note="This region represents a CpG dinucleotide"
  misc_feature (61)..(61): /note="Nucleotide may be methylated to form 5-methylcytosine"
acacaaatgctacatgattccacttgcctgaagaatctaaaataattaaacttggccaggcgtggcggctcacacctgtcattccagcactttgggaggctggggagggtggattgcttgag

SEQ ID NO: 6143 - DNA, 122 bp, Homo sapiens
  misc_feature (61)..(62): /note="This region represents a CpG dinucleotide"
  misc_feature (61)..(61): /note="Nucleotide may be methylated to form 5-methylcytosine"
aatcggttttaacaagctctccgagtgatattgacgcatgttcaagtttaggaaccaccacgctgtaaagtatagcacttcatgggcttataatgagcacttactaattcctacagtaagac

SEQ ID NO: 6144 - DNA, 122 bp, Homo sapiens
  misc_feature (61)..(62): /note="This region represents a CpG dinucleotide"
  misc_feature (61)..(61): /note="Nucleotide may be methylated to form 5-methylcytosine"
actcttggccaaggtttttggtgtcagtgtgttcctaggacatggtgtcctaaagtacaacggagtgattttctaaagaaccaggacacatgctctagcaagacggatgtgtggggcaaaat

SEQ ID NO: 6145 - DNA, 122 bp, Homo sapiens
  misc_feature (61)..(62): /note="This region represents a CpG dinucleotide"
  misc_feature (61)..(61): /note="Nucleotide may be methylated to form 5-methylcytosine"
ccctctccacacctaccacgtgagtgtcaggtgaggcacaggtagctctagtctgactaccgtagtttccaattccctggccataatggctcagtccaggggtagaattatggccccaactg

SEQ ID NO: 6146 - DNA, 122 bp, Homo sapiens
  misc_feature (61)..(62): /note="This region represents a CpG dinucleotide"
  misc_feature (61)..(61): /note="Nucleotide may be methylated to form 5-methylcytosine"
agctcgccctgttcaagtgttccagaattgtgagctcgcgtacacatacaaaattccttccgcagtgctcacttccaattcacagcccatggcaagtcgggtaaggccctcctgagtcactg

SEQ ID NO: 6147 - DNA, 122 bp, Homo sapiens
  misc_feature (61)..(62): /note="This region represents a CpG dinucleotide"
  misc_feature (61)..(61): /note="Nucleotide may be methylated to form 5-methylcytosine"
ctaagcctcctgagcacaggaatagggtgttcctcggtcactgctaaagctccattgtctcgcttggaaagcacttagtccacagtttctaatgaatgaatgagtgagtgagggaataatct

SEQ ID NO: 6148 - DNA, 122 bp, Homo sapiens
  misc_feature (61)..(62): /note="This region represents a CpG dinucleotide"
  misc_feature (61)..(61): /note="Nucleotide may be methylated to form 5-methylcytosine"
aggatcctgtcccaattactctgtattgcacacaggacagcctcaaactggacagagaaacgagaattagtgacagtggaatgaggaaagctagcatgtctcatcagcacctcagtggtgga

SEQ ID NO: 6149 - DNA, 122 bp, Homo sapiens
  misc_feature (61)..(62): /note="This region represents a CpG dinucleotide"
  misc_feature (61)..(61): /note="Nucleotide may be methylated to form 5-methylcytosine"
gccaggcatggtggcaggtgcctgtaatcctagctactcgggatgctgagtgtggagaatcgcttgaacctgggaggcagaggttgcagtaagccaaggttgcgtcattgcactccagcctg

SEQ ID NO: 6150 - DNA, 122 bp, Homo sapiens
  misc_feature (61)..(62): /note="This region represents a CpG dinucleotide"
  misc_feature (61)..(61): /note="Nucleotide may be methylated to form 5-methylcytosine"
tccctgatcaatgttctttctcatttccaggtctcacattgcctttagtcgtcagttcctcggcctttctttgtctttcatgaccttgatatctgtgaacagtcctggtcaggtattgtgca

SEQ ID NO: 6151 - DNA, 122 bp, Homo sapiens
  misc_feature (61)..(62): /note="This region represents a CpG dinucleotide"
  misc_feature (61)..(61): /note="Nucleotide may be methylated to form 5-methylcytosine"
cctttggggtgaatcatgcttccagactgctctcttttgacttagcagttagtttgtcagcgtatagcctggatcacacggaaggctggaataagagaattttaccaggaccactctttgat

SEQ ID NO: 6152 - DNA, 122 bp, Homo sapiens
  misc_feature (61)..(62): /note="This region represents a CpG dinucleotide"
  misc_feature (61)..(61): /note="Nucleotide may be methylated to form 5-methylcytosine"
caccttcccctctgcttggccggcgccattcttccaaaccactctccgccaaagattccacggacagtcacctacaagacaacccagccgtcctttcagcagcggatcccgccccgcagcca

SEQ ID NO: 6153 - DNA, 122 bp, Homo sapiens
  misc_feature (61)..(62): /note="This region represents a CpG dinucleotide"
  misc_feature (61)..(61): /note="Nucleotide may be methylated to form 5-methylcytosine"
gacatattgtacatgggaagctgtttattttttattactgaaaagtacagtatttggttgcgattgaagtcagccattctgtagctgtaaacagcctgaagctaggcagctgtattctttac

SEQ ID NO: 6154 - DNA, 122 bp, Homo sapiens
  misc_feature (61)..(62): /note="This region represents a CpG dinucleotide"
  misc_feature (61)..(61): /note="Nucleotide may be methylated to form 5-methylcytosine"
tttgtattttttgttgagacgggctctccctatgtttccttggctgattttgaattccagcgctcaagcgatccgcccatcttggcctcccaaagagctgggattacaggcatgagccatga

SEQ ID NO: 6155 - DNA, 122 bp, Homo sapiens
  misc_feature (61)..(62): /note="This region represents a CpG dinucleotide"
  misc_feature (61)..(61): /note="Nucleotide may be methylated to form 5-methylcytosine"
ccaaggtcacatggctgttaggtggcagaggcagccttctgcctagatggtgccactccacggtacatgcttcatcactgcacttggctagcagagaaggaaatcagagacttcaggatgtg

SEQ ID NO: 6156 - DNA, 122 bp, Homo sapiens
  misc_feature (61)..(62): /note="This region represents a CpG dinucleotide"
  misc_feature (61)..(61): /note="Nucleotide may be methylated to form 5-methylcytosine"
agctcatatgtcttggaatgctttgactcatgaattgtttctcctgataatgttacatcacgtaactacctctgtctaattggttagtatctgctggaagagacaggcagccagcctaatga

SEQ ID NO: 6157 - DNA, 122 bp, Homo sapiens
  misc_feature (61)..(62): /note="This region represents a CpG dinucleotide"
  misc_feature (61)..(61): /note="Nucleotide may be methylated to form 5-methylcytosine"
cagctaccctgagcccaaggcagtcaggtgtggtctgatttcataaggtcttcagtgagacggacctggatggggattctggttctaccactgtgagaactatctttgccctattttctctt

SEQ ID NO: 6158 - DNA, 122 bp, Homo sapiens
  misc_feature (61)..(62): /note="This region represents a CpG dinucleotide"
  misc_feature (61)..(61): /note="Nucleotide may be methylated to form 5-methylcytosine"
tgagggcagggattatgacatattcatctccaggtccctttggcctaatttagggactgacgtgtcatagccagtaaatgttggttggattggattgaatggtaataaagagcattttctta

SEQ ID NO: 6159 - DNA, 122 bp, Homo sapiens
  misc_feature (61)..(62): /note="This region represents a CpG dinucleotide"
  misc_feature (61)..(61): /note="Nucleotide may be methylated to form 5-methylcytosine"
gccggatgtttgagtttggtttttgtgatcgagcggagctgggaggggccgcccgggagccgccgccttatcgggctgtccccgcgctgtctcccgctgccccggcctcccaggctggcggc

SEQ ID NO: 6160 - DNA, 122 bp, Homo sapiens
  misc_feature (61)..(62): /note="This region represents a CpG dinucleotide"
  misc_feature (61)..(61): /note="Nucleotide may be methylated to form 5-methylcytosine"
caaaggaggaatttgaggcccagaaaagttaagtactttgtccaagtcacacagctggtacgtggaagagccaagattccaactcaggccatctgactcatcggccaggtttctcaccagca

SEQ ID NO: 6161 - DNA, 122 bp, Homo sapiens
  misc_feature (61)..(62): /note="This region represents a CpG dinucleotide"
  misc_feature (61)..(61): /note="Nucleotide may be methylated to form 5-methylcytosine"
agtattgtaaatctatcccacacacaaaaaaacatacactagagtttcttcatagctcaacgtcaatgatactttctggaaaataatcacccatcagggctccctcccccaagcatgctgta

SEQ ID NO: 6162 - DNA, 122 bp, Homo sapiens
  misc_feature (61)..(62): /note="This region represents a CpG dinucleotide"
  misc_feature (61)..(61): /note="Nucleotide may be methylated to form 5-methylcytosine"
caatcctgcctgtccatctcaatgacatctactatccctgatcaacacggcaccttaaggcgcccttcacagtgaaagcaacttatttccaaagcaggcattttgccttccattgctcctcc

SEQ ID NO: 6163 - DNA, 122 bp, Homo sapiens
  misc_feature (61)..(62): /note="This region represents a CpG dinucleotide"
  misc_feature (61)..(61): /note="Nucleotide may be methylated to form 5-methylcytosine"
agtcatagcttttctttctttgctcatgaacctgatgactactttaactacaagagcttccgtaaaggattgcacgcatgaatgcacatgtgcacacacacatacatatgcacagatacgca

SEQ ID NO: 6164 - DNA, 122 bp, Homo sapiens
  misc_feature (61)..(62): /note="This region represents a CpG dinucleotide"
  misc_feature (61)..(61): /note="Nucleotide may be methylated to form 5-methylcytosine"
ggagggaaggaaagtgtgtacagacacgcctagttgtctgactaaatggcctttcccaaacgccttctctcctgctgttttttctatagaaagagaaatatgaaatactttcccagccacca

SEQ ID NO: 6165 - DNA, 122 bp, Homo sapiens
  misc_feature (61)..(62): /note="This region represents a CpG dinucleotide"
  misc_feature (61)..(61): /note="Nucleotide may be methylated to form 5-methylcytosine"
gcaagacagacagctttgattttctctctttctctgagcgtgagcaagccagcacaggagcgcctatatagcatccgcagggcagttataccttctttaaacaatagtggccctgagcccag

SEQ ID NO: 6166 - DNA, 122 bp, Homo sapiens
  misc_feature (61)..(62): /note="This region represents a CpG dinucleotide"
  misc_feature (61)..(61): /note="Nucleotide may be methylated to form 5-methylcytosine"
gtgtgaggtgaatgtataagccaagaatgagtcagtagattcttcagcagctctgccctgcgctgatcctctagagttggaaagggctgctgttgtgccactgggtcagtgccaaaagcaga

SEQ ID NO: 6167 - DNA, 122 bp, Homo sapiens
  misc_feature (61)..(62): /note="This region represents a CpG dinucleotide"
  misc_feature (61)..(61): /note="Nucleotide may be methylated to form 5-methylcytosine"
acctctggcagaggtgctaatgaacagcagaatggccacaaggcagcatacccaacgtagcgaagaggcaagggagtgaggtaatcctccagctgaatataaaccactgataatgccagctt

SEQ ID NO: 6168 - DNA, 122 bp, Homo sapiens
  misc_feature (61)..(62): /note="This region represents a CpG dinucleotide"
  misc_feature (61)..(61): /note="Nucleotide may be methylated to form 5-methylcytosine"
attctccatgtctttggtctatcagagtcttgcttttacttccatttctgtttccagccacggtgactgagtcacagcaacacaggctgctccaaggcctctgttctctgctgactctgcag

SEQ ID NO: 6169 - DNA, 122 bp, Homo sapiens
  misc_feature (61)..(62): /note="This region represents a CpG dinucleotide"
  misc_feature (61)..(61): /note="Nucleotide may be methylated to form 5-methylcytosine"
ccagagcatacctgcaagggactcattgtctaatggaaatatctcttgacctcatgtgtgcgtaggaagagcacaagcagctgtgtgctgactgtcatcctgattctgacacagtgaccggg

SEQ ID NO: 6170 - DNA, 122 bp, Homo sapiens
  misc_feature (61)..(62): /note="This region represents a CpG dinucleotide"
  misc_feature (61)..(61): /note="Nucleotide may be methylated to form 5-methylcytosine"
gatactgcgatcctgtgccaggttattactgtgacaattacttaatattctctgtgctcacgatatcactccttccagaagatctttagggaaaacttagttcagtttctaggaggtttttg

SEQ ID NO: 6171 - DNA, 122 bp, Homo sapiens
  misc_feature (61)..(62): /note="This region represents a CpG dinucleotide"
  misc_feature (61)..(61): /note="Nucleotide may be methylated to form 5-methylcytosine"
actcagttgatgtatgaagggcagttgccttggaaagtcaatccacctgcattggacttacgagagcaggaaacaaacgcctgttattttaagccattgagatattgggattgtcttttctg

SEQ ID NO: 6172 - DNA, 122 bp, Homo sapiens
  misc_feature (61)..(62): /note="This region represents a CpG dinucleotide"
  misc_feature (61)..(61): /note="Nucleotide may be methylated to form 5-methylcytosine"
tttaaccattcttttggctatgcttatgttgtactgcttcagcctcacattctcatagaccgctttggatttcccagtgtgttcccacctcattcaagtgacatgccttcctccaatctagc

SEQ ID NO: 6173 - DNA, 122 bp, Homo sapiens
  misc_feature (61)..(62): /note="This region represents a CpG dinucleotide"
  misc_feature (61)..(61): /note="Nucleotide may be methylated to form 5-methylcytosine"
tttgaggttacagcatggaaggaaagagctgagcttcaaaggccgcagaagaagaacaggcggagttaacaggaaaaaccacagtcaggccctctgggagaggctggggttgcatggagggc

SEQ ID NO: 6174 - DNA, 122 bp, Homo sapiens
  misc_feature (61)..(62): /note="This region represents a CpG dinucleotide"
  misc_feature (61)..(61): /note="Nucleotide may be methylated to form 5-methylcytosine"
ccctggccgccctcgccacgtgccgaggacacagggcacagtgtcgggcgtgtcaagcgtcgaggcctccctacagagcaggtctgcccacctgctttcttggcactcgtgggcatctaaga

SEQ ID NO: 6175 - DNA, 122 bp, Homo sapiens
  misc_feature (61)..(62): /note="This region represents a CpG dinucleotide"
  misc_feature (61)..(61): /note="Nucleotide may be methylated to form 5-methylcytosine"
ttattccccctagtgaccccactgaactctactgaaaaccttgcctcatcctcctgcccacgcctggccaaccccactgggaacagtcatctgcagggacaagcacaaattccaccctctgt

SEQ ID NO: 6176 - DNA, 122 bp, Homo sapiens
  misc_feature (61)..(62): /note="This region represents a CpG dinucleotide"
  misc_feature (61)..(61): /note="Nucleotide may be methylated to form 5-methylcytosine"
tgagaccttgtctttacaacaaagaaacacacacacaaaaactggctgggagtggtaacacgtgcctatagtctcagcgactcaggaggctgaggtgggaggatcacttgagccccagaggt

SEQ ID NO: 6177 - DNA, 122 bp, Homo sapiens
  misc_feature (61)..(62): /note="This region represents a CpG dinucleotide"
  misc_feature (61)..(61): /note="Nucleotide may be methylated to form 5-methylcytosine"
agaggcccaggagccagtctgccaaagtgatctcagagatgacatcattgtccaccattgcgttagtccctaaggcgactcagacagaaacaaagggaaggagagaagccaggcagacggag

SEQ ID NO: 6178 - DNA, 122 bp, Homo sapiens
  misc_feature (61)..(62): /note="This region represents a CpG dinucleotide"
  misc_feature (61)..(61): /note="Nucleotide may be methylated to form 5-methylcytosine"
ctttcttagctgccctggctggtgtttcatgtccaccagctctgcgttcagcacagcactcggacttgcctaggaattgtaagatttcttttcaaatttattgaggaccccaaagcacttca

SEQ ID NO: 6179 - DNA, 122 bp, Homo sapiens
  misc_feature (61)..(62): /note="This region represents a CpG dinucleotide"
  misc_feature (61)..(61): /note="Nucleotide may be methylated to form 5-methylcytosine"
cagaaacagaaagcaaagactgacagttcattcgttctttaaacaaattacatagctgtacgtttatttactgatgcatgaagggttgcagtgaagagcaaaatgtttaccctaactacttt

SEQ ID NO: 6180 - DNA, 122 bp, Homo sapiens
  misc_feature (61)..(62): /note="This region represents a CpG dinucleotide"
  misc_feature (61)..(61): /note="Nucleotide may be methylated to form 5-methylcytosine"
gaagcctttttcctaaggtttctcatgtgtagagcaaagcctttttatttttagctgttacggtcatagacgggttgcacagcagtgaatgggtttggacctgaaatgcaggagcttgatgt

SEQ ID NO: 6181 - DNA, 122 bp, Homo sapiens
  misc_feature (61)..(62): /note="This region represents a CpG dinucleotide"
  misc_feature (61)..(61): /note="Nucleotide may be methylated to form 5-methylcytosine"
catgtgatgccttatgacatttatttcataatcttgtcacatcctcactttatgatttctcgtatgtaatttaaaaaattacataatatctaacctgctagtttgtaagttctttgaggaca

SEQ ID NO: 6182 - DNA, 122 bp, Homo sapiens
  misc_feature (61)..(62): /note="This region represents a CpG dinucleotide"
  misc_feature (61)..(61): /note="Nucleotide may be methylated to form 5-methylcytosine"
ggtccactgcctagaaacacaagccattgtgaatcattacaccagatattcagcactctacgcagctaatccccacacacggcactcccacatccctcttctctcagcccatccagccagga

SEQ ID NO: 6183 - DNA, 122 bp, Homo sapiens
  misc_feature (61)..(62): /note="This region represents a CpG dinucleotide"
  misc_feature (61)..(61): /note="Nucleotide may be methylated to form 5-methylcytosine"
ctgacatttgagcaaaaggtggtgactcagccaactggagaactcacaacaagttctacccgtctggggttgttaccagctggcccttccagaatcacagtctaggctacatagtgaagatc

SEQ ID NO: 6184 - DNA, 122 bp, Homo sapiens
  misc_feature (61)..(62): /note="This region represents a CpG dinucleotide"
  misc_feature (61)..(61): /note="Nucleotide may be methylated to form 5-methylcytosine"
agggccttttggtttcttggtgaccaggtgttttgcaaatgaacagagagccaagggtggcgcagtagttttcaggtgactcaggaggtagcttgtctgattcttaaggtaaaatcgagatt

SEQ ID NO: 6185 - DNA, 122 bp, Homo sapiens
  misc_feature (61)..(62): /note="This region represents a CpG dinucleotide"
  misc_feature (61)..(61): /note="Nucleotide may be methylated to form 5-methylcytosine"
catgatccgcctgcctcggcctcccaaagtgttgggattacaggtgtgagccaccgcacccggcctctgagaaatatttagattgtacgcctcaaatgggcagggactgtgtcttacacttt

SEQ ID NO: 6186 - DNA, 122 bp, Homo sapiens
  misc_feature (61)..(62): /note="This region represents a CpG dinucleotide"
  misc_feature (61)..(61): /note="Nucleotide may be methylated to form 5-methylcytosine"
ttgtggagacagggttttgccaaggtgcccaggcaggaactcgggctcaagtgatctgcccgcctcagcctctcagagtgcaaggattacgtgagccaccatgccttggcatgatacatttc

SEQ ID NO: 6187 - DNA, 122 bp, Homo sapiens
  misc_feature (61)..(62): /note="This region represents a CpG dinucleotide"
  misc_feature (61)..(61): /note="Nucleotide may be methylated to form 5-methylcytosine"
aaaagaaagaaagaaaaggaagggaaggaaggaagggagaaagaaagaaagataatgtcacggtatgaccatatgcatggcatttgaaatattgttgagtcatagcttcatcactgggatgt

SEQ ID NO: 6188 - DNA, 122 bp, Homo sapiens
  misc_feature (61)..(62): /note="This region represents a CpG dinucleotide"
  misc_feature (61)..(61): /note="Nucleotide may be methylated to form 5-methylcytosine"
gctgcttggtcaaaaaataataataactctcggtggcgctgctggtggtgcctgagaagtcgctgttgcagtgcttgcatcctccgcatgctaatgaagctgtgatgtcagcaagtcagtca

SEQ ID NO: 6189 - DNA, 122 bp, Homo sapiens
  misc_feature (61)..(62): /note="This region represents a CpG dinucleotide"
  misc_feature (61)..(61): /note="Nucleotide may be methylated to form 5-methylcytosine"
gcactttcctgacatcttggttaggagccaggatgcattcacatgccacagaattctatacgctaataaccagtgctactacaactcagcagaaggtggcttgaaagactggaagtcaactt

SEQ ID NO: 6190 - DNA, 122 bp, Homo sapiens
  misc_feature (61)..(62): /note="This region represents a CpG dinucleotide"
  misc_feature (61)..(61): /note="Nucleotide may be methylated to form 5-methylcytosine"
gagctgggttaccccagctgttaaaatggccttacacagctgctcaccaagaatttagttcgtgattattatagttacacctttaagtcaactatgacaaaaatgacacagtaattacaggt

SEQ ID NO: 6191 - DNA, 122 bp, Homo sapiens
  misc_feature (61)..(62): /note="This region represents a CpG dinucleotide"
  misc_feature (61)..(61): /note="Nucleotide may be methylated to form 5-methylcytosine"
ccctgagtttcttttgaagccaacctctgacccacaatgggtggcagggactgtggctggcgcctgataaatgacacttatcttggtgtgcctcatgaggtcattgtggacaatcaggtttg

SEQ ID NO: 6192 - DNA, 122 bp, Homo sapiens
  misc_feature (61)..(62): /note="This region represents a CpG dinucleotide"
  misc_feature (61)..(61): /note="Nucleotide may be methylated to form 5-methylcytosine"
cagggacaggcccggactgacatttctggaaaacccagtgtgtgcaaggttaggttaccacggtccataccaatgaggaaattaggctgtagagagaagtaacttgtctaaggcaccgcagt

SEQ ID NO: 6193 - DNA, 122 bp, Homo sapiens
  misc_feature (61)..(62): /note="This region represents a CpG dinucleotide"
  misc_feature (61)..(61): /note="Nucleotide may be methylated to form 5-methylcytosine"
ccattattctaggtcctaatctgtttggtggagttgttactccacttctctgaccttgcgcgtagggcctgggcactcctaggaattaggggcagggtggggttagggctgaaacccatttg

SEQ ID NO: 6194 - DNA, 122 bp, Homo sapiens
  misc_feature (61)..(62): /note="This region represents a CpG dinucleotide"
  misc_feature (61)..(61): /note="Nucleotide may be methylated to form 5-methylcytosine"
tgttcctcagagcaggcagtgcaggctatgggattccccaggacggagaggcctctgccccggctgcttgatgcaaggctcagagaggccactaggtttctaccatgtgctgtctcaggcaa

SEQ ID NO: 6195 - DNA, 122 bp, Homo sapiens
  misc_feature (61)..(62): /note="This region represents a CpG dinucleotide"
  misc_feature (61)..(61): /note="Nucleotide may be methylated to form 5-methylcytosine"
tgcaagcctgccatgaaactggaagaactgggaggtcagcccagttttcaaactcagactcgccaaattggtgtccttcctgaggctctcaacctcagagttaaggaatgtgttactagcag

SEQ ID NO: 6196 - DNA, 122 bp, Homo sapiens
  misc_feature (61)..(62): /note="This region represents a CpG dinucleotide"
  misc_feature (61)..(61): /note="Nucleotide may be methylated to form 5-methylcytosine"
ctgttttctctttcattatttatcactctctaaccatctccagctgggtgagtaaacaggcgcattggcccataatgaggaacagactgctgccgtggggctgccggaggggcgcgtgtgtg

SEQ ID NO: 6197 - DNA, 122 bp, Homo sapiens
  misc_feature (61)..(62): /note="This region represents a CpG dinucleotide"
  misc_feature (61)..(61): /note="Nucleotide may be methylated to form 5-methylcytosine"
ttgtctgattttataggagaatcttcttctgaactgtttggtgcttcagatctaagacaacgcttaattctttttaaaactggtgaaacaggttctgtttgccttctctcacaattttctat

SEQ ID NO: 6198 - DNA, 122 bp, Homo sapiens
  misc_feature (61)..(62): /note="This region represents a CpG dinucleotide"
  misc_feature (61)..(61): /note="Nucleotide may be methylated to form 5-methylcytosine"
agcatggtggtacagggtagggagtcctacactggttctgattctgccactcacaagctacgttttcattctttctctgagccttgattttcccttctataaagtgaagggttagatcaaat

SEQ ID NO: 6199 - DNA, 122 bp, Homo sapiens
  misc_feature (61)..(62): /note="This region represents a CpG dinucleotide"
  misc_feature (61)..(61): /note="Nucleotide may be methylated to form 5-methylcytosine"
gttataggaaagaaagatgtgacaatccctttgccccagcctccatgtaaggatatcatacgtgcataaggggatactgcccaataaattcagctgagttaaagtgttaaactagtactttg

SEQ ID NO: 6200 - DNA, 122 bp, Homo sapiens
  misc_feature (61)..(62): /note="This region represents a CpG dinucleotide"
  misc_feature (61)..(61): /note="Nucleotide may be methylated to form 5-methylcytosine"
ggctgcaccatatagcctaggtgtgcagtagactattctgtcatagtttgtgtaagtgcacgctgtgatggtcacacaatgatgaaatcacataatgatgcatttctcagaatgtgttcctg

SEQ ID NO: 6201 - DNA, 122 bp, Homo sapiens
  misc_feature (61)..(62): /note="This region represents a CpG dinucleotide"
  misc_feature (61)..(61): /note="Nucleotide may be methylated to form 5-methylcytosine"
ggattaaactagaaaatgcacaggagaagacatcaagcccaggcatactgcgacatgttccgttatgaattgtgcctgtgctgacccttttccctctccctctcaaatcatgtattgctttt

SEQ ID NO: 6202 - DNA, 122 bp, Homo sapiens
  misc_feature (61)..(62): /note="This region represents a CpG dinucleotide"
  misc_feature (61)..(61): /note="Nucleotide may be methylated to form 5-methylcytosine"
aatggggataaccctagtgtctcctgtacagggctgttgggaggatgaaatgggatgatacgtgtgaagcacttgaaatattgcttaccacactgtacatgggccaacaggtgtgtgtaatg

SEQ ID NO: 6203 - DNA, 122 bp, Homo sapiens
  misc_feature (61)..(62): /note="This region represents a CpG dinucleotide"
  misc_feature (61)..(61): /note="Nucleotide may be methylated to form 5-methylcytosine"
ccatcacgttgtcagccaggttctttgcaaagcacggatgtgatgaaactacccaaggctcgtggaagaaccacctgaggggatcagaagtataacaatatatgtcattcacgtgcagagcc

SEQ ID NO: 6204 - DNA, 122 bp, Homo sapiens
  misc_feature (61)..(62): /note="This region represents a CpG dinucleotide"
  misc_feature (61)..(61): /note="Nucleotide may be methylated to form 5-methylcytosine"
ctggctgtgtctgcagctgggggacagggcaggctgagggcatggccacctgtccgcacccgcagatcatcctcatgctgactaagaagtgccaggagcagcagcaggacaccaaggaggcc

SEQ ID NO: 6205 - DNA, 122 bp, Homo sapiens
  misc_feature (61)..(62): /note="This region represents a CpG dinucleotide"
  misc_feature (61)..(61): /note="Nucleotide may be methylated to form 5-methylcytosine"
atcattgccactggtggtacaatgctggtgccaagactgtgtgccaggctcgttgcttcgcgtccgttacttcatctcagcagacaactctcaatatccccattctacggatggggaaatga

SEQ ID NO: 6206 - DNA, 122 bp, Homo sapiens
  misc_feature (61)..(62): /note="This region represents a CpG dinucleotide"
  misc_feature (61)..(61): /note="Nucleotide may be methylated to form 5-methylcytosine"
tagtgaacagaatactctgaccttgggtcatcagtatgaacaagagttattgcatcagctcgtagtatgcatcatggccttaggaggtatgcaggaactgttaaacacaaattaacccagga

SEQ ID NO: 6207 - DNA, 122 bp, Homo sapiens
  misc_feature (61)..(62): /note="This region represents a CpG dinucleotide"
  misc_feature (61)..(61): /note="Nucleotide may be methylated to form 5-methylcytosine"
tggcttctgtctctggtgccaaacccccaggcaagggaagtcccatgaggaaatttatcccgcctcaaatctgaaatcctcctcacaatcgtcaggagttgctgaggattctgggcttagtc

SEQ ID NO: 6208 - DNA, 122 bp, Homo sapiens
  misc_feature (61)..(62): /note="This region represents a CpG dinucleotide"
  misc_feature (61)..(61): /note="Nucleotide may be methylated to form 5-methylcytosine"
catctcatagctactttaccctgcctgcatttaatgaggctggccctgtgataggtgtcccgtaaatattaattaaataaattcatatctagttttcaattgctgataatgaccatattgga

SEQ ID NO: 6209 - DNA, 122 bp, Homo sapiens
  misc_feature (61)..(62): /note="This region represents a CpG dinucleotide"
  misc_feature (61)..(61): /note="Nucleotide may be methylated to form 5-methylcytosine"
gacttagtctggtgcttaggtgtacggaagtgtgcaacctagcacctagaacctttcctgcgttaatgtcgtcattcatcacccaccactgcttacataattccattagaagctatgattca

SEQ ID NO: 6210 - DNA, 122 bp, Homo sapiens
  misc_feature (61)..(62): /note="This region represents a CpG dinucleotide"
  misc_feature (61)..(61): /note="Nucleotide may be methylated to form 5-methylcytosine"
ttccctagctataccccctacccaaaccaggcgacctccccactttcttctccatcattgcggtttgtacttatgtacacacccatctggcatggttgtgtggttgatgaaactgggctcct

SEQ ID NO: 6211 - DNA, 122 bp, Homo sapiens
  misc_feature (61)..(62): /note="This region represents a CpG dinucleotide"
  misc_feature (61)..(61): /note="Nucleotide may be methylated to form 5-methylcytosine"
gagctcagagtcactggaagctccgcctgtgagtgcattggtgactggcttcattcattccgcatcgtgtcatccactatgtggataaacgtgtaagtgctccatccctttttgtgggtgaa

SEQ ID NO: 6212 - DNA, 122 bp, Homo sapiens
  misc_feature (61)..(62): /note="This region represents a CpG dinucleotide"
  misc_feature (61)..(61): /note="Nucleotide may be methylated to form 5-methylcytosine"
gagagagaactggagaaggttaagctttgtgccttattacagctgggcccttccagatcccgtgactaagaactgccatgtcctgactgagaagcagggaggcgtgtgacacacaggaaggg

SEQ ID NO: 6213 - DNA, 122 bp, Homo sapiens
  misc_feature (61)..(62): /note="This region represents a CpG dinucleotide"
  misc_feature (61)..(61): /note="Nucleotide may be methylated to form 5-methylcytosine"
ttgggtgttctgttatctgttatctgttctgtcactgttctgttatctgactatcactcacgtgcaagctccaagggagacttgaatgaaagttcttaaaaacagaagtaaagcacagtagg

SEQ ID NO: 6214 - DNA, 122 bp, Homo sapiens
  misc_feature (61)..(62): /note="This region represents a CpG dinucleotide"
  misc_feature (61)..(61): /note="Nucleotide may be methylated to form 5-methylcytosine"
gaactgtgggaaaaaccctgccttcaagggtttccaggccatgggaagcctaggatataacgcaggcaacttcagaatcatcagtccaccttgggatggtcagcccataaggatgaagaaac

SEQ ID NO: 6215 - DNA, 122 bp, Homo sapiens
  misc_feature (61)..(62): /note="This region represents a CpG dinucleotide"
  misc_feature (61)..(61): /note="Nucleotide may be methylated to form 5-methylcytosine"
catgcacacacccacacatgctcatagtcagacagcactgcatccctcacttccatgttacgacactttaatcaagttcacaagctcctccacaaccttggccagtcttccagagcctcatg

SEQ ID NO: 6216 - DNA, 122 bp, Homo sapiens
  misc_feature (61)..(62): /note="This region represents a CpG dinucleotide"
  misc_feature (61)..(61): /note="Nucleotide may be methylated to form 5-methylcytosine"
gcatgactcctgtgggagctgtctgcagagggattgctgggtgcagagtcactgcctctccgtctgtcaactgctgctgctccagaataaacaggcagccgggcttctcgcggttgtggaga

SEQ ID NO: 6217 - DNA, 122 bp, Homo sapiens
  misc_feature (61)..(62): /note="This region represents a CpG dinucleotide"
  misc_feature (61)..(61): /note="Nucleotide may be methylated to form 5-methylcytosine"
agaggggaaagcaccatgagtgtcaaaatacaaatccagactgggcattgctccataaagcgttgtttgaaatgaacttctggcagagacgcaacagcctgaactagatcctgcttcacatt

SEQ ID NO: 6218 - DNA, 122 bp, Homo sapiens
  misc_feature (61)..(62): /note="This region represents a CpG dinucleotide"
  misc_feature (61)..(61): /note="Nucleotide may be methylated to form 5-methylcytosine"
acactgaagcagcaaaaaattaaatcaaaaaatacgaagagataaataagaaaagggtagcgtgatcatgattactgtcactggatttactggtctgtctcagccataggtaccaggacatt

SEQ ID NO: 6219 - DNA, 122 bp, Homo sapiens
  misc_feature (61)..(62): /note="This region represents a CpG dinucleotide"
  misc_feature (61)..(61): /note="Nucleotide may be methylated to form 5-methylcytosine"
cattttcttaagcagtgaaccatgcagaatactgttgctaaacatcgtttctgccttcctcgtgttctcttggtagtttttactgtttggcttgatcctgctgaggaatgtgcttaccactg

SEQ ID NO: 6220 - DNA, 122 bp, Homo sapiens
  misc_feature (61)..(62): /note="This region represents a CpG dinucleotide"
  misc_feature (61)..(61): /note="Nucleotide may be methylated to form 5-methylcytosine"
gatgcagtcttgctgtgttgctggggctggtatcaaactcctggcttcaagtactcttcccgcctctgcctcccaaagagctaggattacaagtgtgagtcaccatgcccggcctccctggt

SEQ ID NO: 6221 - DNA, 122 bp, Homo sapiens
  misc_feature (61)..(62): /note="This region represents a CpG dinucleotide"
  misc_feature (61)..(61): /note="Nucleotide may be methylated to form 5-methylcytosine"
ctgctccatttacgggagtggccactacatcacctttgatgggaagtactacgactttgacggacactgctcctacgtggctgttcaggtgtggtcacgggcactgcctggtcgggctgctt

SEQ ID NO: 6222 - DNA, 122 bp, Homo sapiens
  misc_feature (61)..(62): /note="This region represents a CpG dinucleotide"
  misc_feature (61)..(61): /note="Nucleotide may be methylated to form 5-methylcytosine"
agatggttgggtcttcctgtccccagaactcccggcagcgctcactgtcttgccggtgcacgtccgtcattggtcctagagcctggatgtctgggggacatctcctcacttgtgtcctaaca

SEQ ID NO: 6223 - DNA, 122 bp, Homo sapiens
  misc_feature (61)..(62): /note="This region represents a CpG dinucleotide"
  misc_feature (61)..(61): /note="Nucleotide may be methylated to form 5-methylcytosine"
gaaatgtgatcacattcttcaacttgtcctgtgctgttgatcacacagcttcttgtcttgcgttacatgatgcaagctattgccagttccaagaatgcttaaccttaacaggtctttgaagc

SEQ ID NO: 6224 - DNA, 122 bp, Homo sapiens
  misc_feature (61)..(62): /note="This region represents a CpG dinucleotide"
  misc_feature (61)..(61): /note="Nucleotide may be methylated to form 5-methylcytosine"
gtcttaaaggtcacccagtgtccttgcctatctgggcctgtctctgttcaagtggcaaggcggaccatcccctttatcactgacttgcagcttgcctgggttttgtaaaaagcttgtcattg

SEQ ID NO: 6225 - DNA, 122 bp, Homo sapiens
  misc_feature (61)..(62): /note="This region represents a CpG dinucleotide"
  misc_feature (61)..(61): /note="Nucleotide may be methylated to form 5-methylcytosine"
tccacaaacgtaatttggttttatcaaaaacttcctgcattcttcttgcttctctcactccgttgcaggctgcagtgaaagcagacttccttgatgagtcggggaagtggatgatatccccg

SEQ ID NO: 6226 - DNA, 122 bp, Homo sapiens
  misc_feature (61)..(62): /note="This region represents a CpG dinucleotide"
  misc_feature (61)..(61): /note="Nucleotide may be methylated to form 5-methylcytosine"
gtaaaggctggctttcatcaccaccagcgggctaacctcctacatatatctgtgtgtctacggcaaggtcgacagaacccatatataaggaaatactgatactgaaaaacttgaaaaacctg

SEQ ID NO: 6227 - DNA, 122 bp, Homo sapiens
  misc_feature (61)..(62): /note="This region represents a CpG dinucleotide"
  misc_feature (61)..(61): /note="Nucleotide may be methylated to form 5-methylcytosine"
cttaccccagggaccaggcacagggcctcacagagcccagtgtgggtccctgggacagagcggcagagggagggtcactccaggagcagacttggcagcatgtctgggcctggcaccagcct

SEQ ID NO: 6228 - DNA, 122 bp, Homo sapiens
  misc_feature (61)..(62): /note="This region represents a CpG dinucleotide"
  misc_feature (61)..(61): /note="Nucleotide may be methylated to form 5-methylcytosine"
cagctgctaagtatgtatatgccaattatgcattctggcactggggaaatgaccacaggacgagtccagggacccactggaccgaggtcagacctgagctaaaactctattaattacctgac

SEQ ID NO: 6229 - DNA, 122 bp, Homo sapiens
  misc_feature (61)..(62): /note="This region represents a CpG dinucleotide"
  misc_feature (61)..(61): /note="Nucleotide may be methylated to form 5-methylcytosine"
gcagagtcagtcacagagaagagaatgcaggacagtaagcccagcgctcaaagccactgtcgccttgaggccactggtggatccaaatgaatgtgctcataaatgcactgcctgtctgatgg

SEQ ID NO: 6230 - DNA, 122 bp, Homo sapiens
  misc_feature (61)..(62): /note="This region represents a CpG dinucleotide"
  misc_feature (61)..(61): /note="Nucleotide may be methylated to form 5-methylcytosine"
cttgaagttcagctgggccaaatgaggggaacagggaacccagagctctcagcctcccagcgcccagacctggcatttgtacagctgtgtctgacatgtaattctttcgacataacttctta

SEQ ID NO: 6231 - DNA, 122 bp, Homo sapiens
  misc_feature (61)..(62): /note="This region represents a CpG dinucleotide"
  misc_feature (61)..(61): /note="Nucleotide may be methylated to form 5-methylcytosine"
taatgacgtcatttctatgaatggatttggagctttgaaacactttagcctgaaaagaaacgtctagaacacagccggctcaaatcggagaccaattgacttcaatgagtcttaagtacaca

SEQ ID NO: 6232 - DNA, 122 bp, Homo sapiens
  misc_feature (61)..(62): /note="This region represents a CpG dinucleotide"
  misc_feature (61)..(61): /note="Nucleotide may be methylated to form 5-methylcytosine"
gcaagacctccaggggattctcatgcactctcaaatgtgagaatcaccgcagtgaagcaacgccttttacaggggctgagaaaggtgaagtctcaccgcatctggttaccattcctgtgtgc

SEQ ID NO: 6233 - DNA, 122 bp, Homo sapiens
  misc_feature (61)..(62): /note="This region represents a CpG dinucleotide"
  misc_feature (61)..(61): /note="Nucleotide may be methylated to form 5-methylcytosine"
gtgtcaaaattaaaccctttcttctgacagaagacctaatacttgaactcagattacagtcgtgtgttgcttaacaacaggcatacattctgagaaatgcatcatcaggcaattttgtcatt

SEQ ID NO: 6234 - DNA, 122 bp, Homo sapiens
  misc_feature (61)..(62): /note="This region represents a CpG dinucleotide"
  misc_feature (61)..(61): /note="Nucleotide may be methylated to form 5-methylcytosine"
atggctctagggagggaccaccgatggttaccaggccagccactgtgagaaaaccaggtacgaggtgtattctacctgaagtaccaacgcgactgccccagggttcctgtccttccctccca

SEQ ID NO: 6235 - DNA, 122 bp, Homo sapiens
  misc_feature (61)..(62): /note="This region represents a CpG dinucleotide"
  misc_feature (61)..(61): /note="Nucleotide may be methylated to form 5-methylcytosine"
gactcagtaatctatgggtagggcactaggatttgcacttccagcatgtacctcggggaccgccaggacctctttaagaaacccagtaggtaggcagtctgggcacttcctatcacccttca

SEQ ID NO: 6236 - DNA, 122 bp, Homo sapiens
  misc_feature (61)..(62): /note="This region represents a CpG dinucleotide"
  misc_feature (61)..(61): /note="Nucleotide may be methylated to form 5-methylcytosine"
aaccctctgtaaacactcaatgtgttctcaccttgttatcattcccaatgatgtcgaatgcgtggttgccctctccagtataaaagtttgatgcagctttgcctggatgtacctgtctataa

SEQ ID NO: 6237 - DNA, 122 bp, Homo sapiens
  misc_feature (61)..(62): /note="This region represents a CpG dinucleotide"
  misc_feature (61)..(61): /note="Nucleotide may be methylated to form 5-methylcytosine"
atgcccttcaccctggggtgtccctctgccagctcagcctgcaaaccatgatcccttgtacgactgcagcccagctgtgttgcagaagtaaaggtgtctgcccccatgaagccagcccagag

SEQ ID NO: 6238 - DNA, 122 bp, Homo sapiens
  misc_feature (61)..(62): /note="This region represents a CpG dinucleotide"
  misc_feature (61)..(61): /note="Nucleotide may be methylated to form 5-methylcytosine"
tagcaaatggaagcaatgggtcccaggagttcgtttctgtatgcggctctaactctgccacgaaggccaggacagatagtgtgcagtgctctgtcatgtctaccagagaaaatgatgcaaca

SEQ ID NO: 6239 - DNA, 122 bp, Homo sapiens
  misc_feature (61)..(62): /note="This region represents a CpG dinucleotide"
  misc_feature (61)..(61): /note="Nucleotide may be methylated to form 5-methylcytosine"
gatgggttggtcaccacacttaccacaagaataattcacagaaatttgaacactctattccgtagtatctctggaaatatcagctgtaatccattttgttgaattatatggaaagcctcatt

SEQ ID NO: 6240 - DNA, 122 bp, Homo sapiens
  misc_feature (61)..(62): /note="This region represents a CpG dinucleotide"
  misc_feature (61)..(61): /note="Nucleotide may be methylated to form 5-methylcytosine"
gtccgtgagggagacccacaccgtacagactctctaagtaatggctttcttccacatagacgtgaatgtttaaaggccagtgaacaccacccctatgcactcaggcctaagcttaatcagcc

SEQ ID NO: 6241 - DNA, 122 bp, Homo sapiens
  misc_feature (61)..(62): /note="This region represents a CpG dinucleotide"
  misc_feature (61)..(61): /note="Nucleotide may be methylated to form 5-methylcytosine"
aagttgcaaggcaaactcatgaagcattccgtatgttctttgagcagtggcactgtggctcgaaccaatgtccagcttccacactctctgcttggaagaggattacccttatttggaagtct

SEQ ID NO: 6242 - DNA, 122 bp, Homo sapiens
  misc_feature (61)..(62): /note="This region represents a CpG dinucleotide"
  misc_feature (61)..(61): /note="Nucleotide may be methylated to form 5-methylcytosine"
taaatgaaatagtctaagtaggtcgagtgcttaacacagtcctgactcatcgaaagtgctcgcttcatggcactgcttaatactgttgttattgttactgtatttcctccgatacccatgac

SEQ ID NO: 6243 - DNA, 122 bp, Homo sapiens
  misc_feature (61)..(62): /note="This region represents a CpG dinucleotide"
  misc_feature (61)..(61): /note="Nucleotide may be methylated to form 5-methylcytosine"
gtcatgtgggattaactggactcaactgtccagcataccttaggtatgaacatgaaggtgcgcaagatcatgcccaaaggttcactagtagtagatggcttataaaatacctgctcataggc

SEQ ID NO: 6244 - DNA, 122 bp, Homo sapiens
  misc_feature (61)..(62): /note="This region represents a CpG dinucleotide"
  misc_feature (61)..(61): /note="Nucleotide may be methylated to form 5-methylcytosine"
ttcccaaggtgtaggtgtcagacatttgtttcttcattaccgctcacttcctaaagagtacgtagattcacagctattttgcatgttttctagacggtccaaatgtcatcactatcgcctag

SEQ ID NO: 6245 - DNA, 122 bp, Homo sapiens
  misc_feature (61)..(62): /note="This region represents a CpG dinucleotide"
  misc_feature (61)..(61): /note="Nucleotide may be methylated to form 5-methylcytosine"
ctgtcagtattgtaatgaaataattcattatgtaattaattgcttagtgtgcataagcgccgtaatggcagaggctatgtctcttgttcatagtcataacaccattgcctggcttggtgctt

SEQ ID NO: 6246 - DNA, 122 bp, Homo sapiens
  misc_feature (61)..(62): /note="This region represents a CpG dinucleotide"
  misc_feature (61)..(61): /note="Nucleotide may be methylated to form 5-methylcytosine"
ctcaggtgatccacctgcctcggcctcccaaagtgctgggattacaggcgtgagctacctcgcccagccattgtcattactattgttattgtgctggttgttcagcctggaagtttctccag

SEQ ID NO: 6247 - DNA, 122 bp, Homo sapiens
  misc_feature (61)..(62): /note="This region represents a CpG dinucleotide"
  misc_feature (61)..(61): /note="Nucleotide may be methylated to form 5-methylcytosine"
ccttgggttacctgccagacagacataccaagggccttgtttcttctctttctctactctcgcaccctcaacgtgagcttcattctgggattggctcccctcgtggttatacaggctggagg

SEQ ID NO: 6248 - DNA, 122 bp, Homo sapiens
  misc_feature (61)..(62): /note="This region represents a CpG dinucleotide"
  misc_feature (61)..(61): /note="Nucleotide may be methylated to form 5-methylcytosine"
ccatgaatccagatgaacaaattccactccttttttgaacatatatccctctccttggcacgcctttgtctcatttcacatgcttcctcccgattggtccttaccttttacctgtttaacat

SEQ ID NO: 6249 - DNA, 122 bp, Homo sapiens
  misc_feature (61)..(62): /note="This region represents a CpG dinucleotide"
  misc_feature (61)..(61): /note="Nucleotide may be methylated to form 5-methylcytosine"
accccaaactgcctcaatacactgacaggtcagtaggtggccaagagatcccaaactgatcgttttatcttggaatgactctgggctttactgtcagaatcctcctaatttacaccattgcc

SEQ ID NO: 6250 - DNA, 122 bp, Homo sapiens
  misc_feature (61)..(62): /note="This region represents a CpG dinucleotide"
  misc_feature (61)..(61): /note="Nucleotide may be methylated to form 5-methylcytosine"
gacctccctctgcagtgcttgttacaaactaggtcttccggcaggctctgtggtgttcaccgtggccagacccaggccattaactgatttactgttttcaaagaacactgttcatggggtgg

SEQ ID NO: 6251 - DNA, 122 bp, Homo sapiens
  misc_feature (61)..(62): /note="This region represents a CpG dinucleotide"
  misc_feature (61)..(61): /note="Nucleotide may be methylated to form 5-methylcytosine"
tgtgaccacgggcaaggcacttattcttctaattgccagtggcctcattcataaagcaggcgtcctaatacccgcccaaggctgcggtgcctagcatgtgacctggcccacagaggcactcg

SEQ ID NO: 6252 - DNA, 122 bp, Homo sapiens
  misc_feature (61)..(62): /note="This region represents a CpG dinucleotide"
  misc_feature (61)..(61): /note="Nucleotide may be methylated to form 5-methylcytosine"
tatgaggtcgtataactgcactcccgtcagcagcccgcgtctgccgcccacgtacatgcacgccatgtggtgagtgtttcaggatcctccaggtgccgtgctcccccgccctccgtggcact

SEQ ID NO: 6253 - DNA, 122 bp, Homo sapiens
  misc_feature (61)..(62): /note="This region represents a CpG dinucleotide"
  misc_feature (61)..(61): /note="Nucleotide may be methylated to form 5-methylcytosine"
tgctgttgcacacattaatgacacaaatggccaatgacaaaccagtgcaacacagagtaccgcacaggcctgtactcagctccaggatcccaaagaaaggaaggattatttctgccggaggg

SEQ ID NO: 6254 - DNA, 122 bp, Homo sapiens
  misc_feature (61)..(62): /note="This region represents a CpG dinucleotide"
  misc_feature (61)..(61): /note="Nucleotide may be methylated to form 5-methylcytosine"
tagggagccatcataaggtctgtccaccttcagaattgtgcctggggtggctcctcctaacgttctcctcttaattgccttcttatcctccacccctagggaaagatcttcagaccaaaaag

SEQ ID NO: 6255 - DNA, 122 bp, Homo sapiens
  misc_feature (61)..(62): /note="This region represents a CpG dinucleotide"
  misc_feature (61)..(61): /note="Nucleotide may be methylated to form 5-methylcytosine"
ccatgcaagattgacgaggtagcatgccacatcatgcagcatctgtaagccacggtgagacgtatgctccctacttcaaaacatgtgcaccatatttgaattgtatatgatttgggatattg

SEQ ID NO: 6256 - DNA, 122 bp, Homo sapiens
  misc_feature (61)..(62): /note="This region represents a CpG dinucleotide"
  misc_feature (61)..(61): /note="Nucleotide may be methylated to form 5-methylcytosine"
tagccgaatcacacttaacacacattgaatgtgcacacacctacttaagtgcgtattctgcgttatgcccatgggatgcaggaagaaggcacacactacttcctcacctccccttcaaaaca

SEQ ID NO: 6257 - DNA, 122 bp, Homo sapiens
  misc_feature (61)..(62): /note="This region represents a CpG dinucleotide"
  misc_feature (61)..(61): /note="Nucleotide may be methylated to form 5-methylcytosine"
tgtgcagagccctggctgtaaacgcgcttccctctcaggtgtgcacctgctctccccgtgcggctcatcagctctgctgcacaggcacagaaatgtgttctgcagctacaacctgccccacc

SEQ ID NO: 6258 - DNA, 122 bp, Homo sapiens
  misc_feature (61)..(62): /note="This region represents a CpG dinucleotide"
  misc_feature (61)..(61): /note="Nucleotide may be methylated to form 5-methylcytosine"
tacgagtttatttacttatagtccttagtcaagtgttctgttcctaagtgaaacagaaagcggccttgaaggaaaggagcttaatgacgctagatccagatcttgtagtcaacattaaaacc

SEQ ID NO: 6259 - DNA, 122 bp, Homo sapiens
  misc_feature (61)..(62): /note="This region represents a CpG dinucleotide"
  misc_feature (61)..(61): /note="Nucleotide may be methylated to form 5-methylcytosine"
acacttttaatagaccccagagctgtggtgacagcatgcccttcccagtttttccacagacggtgctcctgaaattttccatagacagtgtattcttgtggttaattagttatctgagcaat

SEQ ID NO: 6260 - DNA, 122 bp, Homo sapiens
  misc_feature (61)..(62): /note="This region represents a CpG dinucleotide"
  misc_feature (61)..(61): /note="Nucleotide may be methylated to form 5-methylcytosine"
aatgggtttgggaagcggagactccttcctctctctatgaccatgccgtgatcgtgtctgcggtcaccactcgacgcatcctcatttctacccgaacccaggagccgaacgctagatcgggg

SEQ ID NO: 6261 - DNA, 122 bp, Homo sapiens
  misc_feature (61)..(62): /note="This region represents a CpG dinucleotide"
  misc_feature (61)..(61): /note="Nucleotide may be methylated to form 5-methylcytosine"
gttttttgctgtttctaaaaatcaattccatcttcggtggacggagatttcctgtcactacggcttttcaaaagcatgtactcccgattcttagggtagttcccagcaggcgattacagctg

SEQ ID NO: 6262 - DNA, 122 bp, Homo sapiens
  misc_feature (61)..(62): /note="This region represents a CpG dinucleotide"
  misc_feature (61)..(61): /note="Nucleotide may be methylated to form 5-methylcytosine"
ctggacaagaactgcctggcaactaaaatccacaaggatctactgaaagctacaatttggcgctatggggtcataaaaaggctttagacacttagtatcctggttgcctggaggagtttacc

SEQ ID NO: 6263 - DNA, 122 bp, Homo sapiens
  misc_feature (61)..(62): /note="This region represents a CpG dinucleotide"
  misc_feature (61)..(61): /note="Nucleotide may be methylated to form 5-methylcytosine"
tctcaaaaaaaaaaaaaaaaaaaaaaaagcaaaggctaggtgcagtggctcacaccagtacgccagtaatcctcagtaatcctaggactttgagaggctgaggtgtgtggatcgcttgagcc

SEQ ID NO: 6264 - DNA, 122 bp, Homo sapiens
  misc_feature (61)..(62): /note="This region represents a CpG dinucleotide"
  misc_feature (61)..(61): /note="Nucleotide may be methylated to form 5-methylcytosine"
cgacaccattagagcaaggctcagtgtctcgagctttagtttaattctcaacccattgatcgctcttgcagtcagcttaacagttgaatgcaatgctgtattttgttttttttttttttttt

SEQ ID NO: 6265 - DNA, 122 bp, Homo sapiens
  misc_feature (61)..(62): /note="This region represents a CpG dinucleotide"
  misc_feature (61)..(61): /note="Nucleotide may be methylated to form 5-methylcytosine"
tactttgtgtctaacaaaaagaatcctatggatgactgactacacagctgcaattggtaacgaagtaatacaataggtgaaattggctcttgcagaacagaaatagagtttcagtttactat

SEQ ID NO: 6266 - DNA, 122 bp, Homo sapiens
  misc_feature (61)..(62): /note="This region represents a CpG dinucleotide"
  misc_feature (61)..(61): /note="Nucleotide may be methylated to form 5-methylcytosine"
taaaaaccagaaggaaaagaatttcaggatggcaaagggatgggcatggtagtggtaagacgatgaggtgtgaggggcagaggaataagaaatttaatggtttttattcagactttattatt

SEQ ID NO: 6267 - DNA, 122 bp, Homo sapiens
  misc_feature (61)..(62): /note="This region represents a CpG dinucleotide"
  misc_feature (61)..(61): /note="Nucleotide may be methylated to form 5-methylcytosine"
cttgaaatgcttgtgctctttcctgatctggacttggactgagatgcacctacctttgcacgttacactcagagcacaagtgattctgctggggaggtcaagagggaaccaggaagttatga

SEQ ID NO: 6268 - DNA, 122 bp, Homo sapiens
  misc_feature (61)..(62): /note="This region represents a CpG dinucleotide"
  misc_feature (61)..(61): /note="Nucleotide may be methylated to form 5-methylcytosine"
ctgcctggggttcacccagttctatctggctttgcaactcatactggttttattgtcctgcgctactgctccaactagtatgaaaaactagtttacaagtagatgagaagagggcaatgaca

SEQ ID NO: 6269 - DNA, 122 bp, Homo sapiens
  misc_feature (61)..(62): /note="This region represents a CpG dinucleotide"
  misc_feature (61)..(61): /note="Nucleotide may be methylated to form 5-methylcytosine"
taggagtttgttcttgcaggcattactaaaacagcttcaaaacatcttatggccatgggtcgtgactggcaaggaatgtgccttgctggttttaagctggagttgattttaaaatggtgtca

SEQ ID NO: 6270 - DNA, 122 bp, Homo sapiens
  misc_feature (61)..(62): /note="This region represents a CpG dinucleotide"
  misc_feature (61)..(61): /note="Nucleotide may be methylated to form 5-methylcytosine"
tgaaccagatctgacttcaagcctgagttcctaacaaagataggaagaacaaggcaaccccggatgatacagtagccagacacttgctagtaaaggccagaacactgactcactaagctctg

SEQ ID NO: 6271 - DNA, 122 bp, Homo sapiens
  misc_feature (61)..(62): /note="This region represents a CpG dinucleotide"
  misc_feature (61)..(61): /note="Nucleotide may be methylated to form 5-methylcytosine"
gttttggccatatcccaaaaccattaaatcagaatctctgggattaggacccaggcacttcgatctttttaagctccccaagtgattctaatgtgtagccaagacagaaaaccactgttaat

SEQ ID NO: 6272 - DNA, 122 bp, Homo sapiens
  misc_feature (61)..(62): /note="This region represents a CpG dinucleotide"
  misc_feature (61)..(61): /note="Nucleotide may be methylated to form 5-methylcytosine"
cacatgcccttttgtcctcccgagctctaagcctagcagctgcctgtcatagaatgttcacggacattgaaatggttcacttgcatggggtgcagagtcacactcacctaccttatgggcag

SEQ ID NO: 6273 - DNA, 122 bp, Homo sapiens
  misc_feature (61)..(62): /note="This region represents a CpG dinucleotide"
  misc_feature (61)..(61): /note="Nucleotide may be methylated to form 5-methylcytosine"
actccttcagacatctttctatgctgtgacccatctaagctgcgtcttctttctagttaccgtaattaattgcaccttggaacacaaaagaaacagaaggaggaggatgtagtggggaggac

SEQ ID NO: 6274 - DNA, 122 bp, Homo sapiens
  misc_feature (61)..(62): /note="This region represents a CpG dinucleotide"
  misc_feature (61)..(61): /note="Nucleotide may be methylated to form 5-methylcytosine"
gaatcctgctaggactgggtcctttacttcaaggcaacaacagtttctcttctggcctagcgtatgtctagaaatgtcatctgggagttagggcctggaatggaggcctcacgactgcctgg

SEQ ID NO: 6275 - DNA, 122 bp, Homo sapiens
  misc_feature (61)..(62): /note="This region represents a CpG dinucleotide"
  misc_feature (61)..(61): /note="Nucleotide may be methylated to form 5-methylcytosine"
atgagccaccgcgcccagccaaaccagtcttcttaagtcaggggaggcccacactcctgccgtgtggatctcatttcctagcacttgagctctagcacctgtggaaaagagagctcctggaa

SEQ ID NO: 6276 - DNA, 122 bp, Homo sapiens
  misc_feature (61)..(62): /note="This region represents a CpG dinucleotide"
  misc_feature (61)..(61): /note="Nucleotide may be methylated to form 5-methylcytosine"
ctggcttactctgtgccttgcaccattggcaactctcaggtaagtgaatcattcagtcttcgccacacacgtccctacagggctttacaaatgggcatgccatggtgcacagaggtgacata

SEQ ID NO: 6277 - DNA, 122 bp, Homo sapiens
  misc_feature (61)..(62): /note="This region represents a CpG dinucleotide"
  misc_feature (61)..(61): /note="Nucleotide may be methylated to form 5-methylcytosine"
agctgtgtcttagcaggatccccagggcattgcctcacagtcagggtggtgcaaaagtcccgcctggcatcctggtgagtggaccaggagggggcaggtgaaggcgatattattggtccttc

SEQ ID NO: 6278 - DNA, 122 bp, Homo sapiens
  misc_feature (61)..(62): /note="This region represents a CpG dinucleotide"
  misc_feature (61)..(61): /note="Nucleotide may be methylated to form 5-methylcytosine"
cagattagtgacagagccagatctgaaatcatgcaatccagctcctgatgaataagcccacgcaggctgcactgagccttcatgcaggctgggtgtgtgcttggtaagtcagatcctggcct

SEQ ID NO: 6279 - DNA, 122 bp, Homo sapiens
  misc_feature (61)..(62): /note="This region represents a CpG dinucleotide"
  misc_feature (61)..(61): /note="Nucleotide may be methylated to form 5-methylcytosine"
tttagttcttggtaattctacccaagtctgaaaggaaatcaagatgactgtccacattgacgcaaatcacaggacatggaggcaatgtcaggcatttaatgttgtaaaagttgcaaaccaga

SEQ ID NO: 6280 - DNA, 122 bp, Homo sapiens
  misc_feature (61)..(62): /note="This region represents a CpG dinucleotide"
  misc_feature (61)..(61): /note="Nucleotide may be methylated to form 5-methylcytosine"
ttgtgagtagcagagattaccttgtactgtgagaggattttaccttgatgtgtgtactggcggatgagagctacaaagttaaagctgactgaggacagtttacaggaagcagtcttcactgt

SEQ ID NO: 6281 - DNA, 122 bp, Homo sapiens
  misc_feature (61)..(62): /note="This region represents a CpG dinucleotide"
  misc_feature (61)..(61): /note="Nucleotide may be methylated to form 5-methylcytosine"
aacactttgatggatggtagagttaacaggctccttgcctgcagctgcttcagacaagagcgtccccaagccctgggcctgacctggaatgtggggatggaaggggagggggaggaaccaag

SEQ ID NO: 6282 - DNA, 122 bp, Homo sapiens
  misc_feature (61)..(62): /note="This region represents a CpG dinucleotide"
  misc_feature (61)..(61): /note="Nucleotide may be methylated to form 5-methylcytosine"
attaaatgaattaatacatataaaatgcttagaggagtgcccggcatatggtaagcccttcgtgtttgttagtcatcatttttttagttcctattatgtgccaaactttgtgctagactctt

SEQ ID NO: 6283 - DNA, 122 bp, Homo sapiens
  misc_feature (61)..(62): /note="This region represents a CpG dinucleotide"
  misc_feature (61)..(61): /note="Nucleotide may be methylated to form 5-methylcytosine"
tttctagattattctgccaaggcctgttgtatgtgtgaaccaccaagctagatcatagaacgtcttcaatatttaagaaaatcagtaattggcaatagagagccaagtatagtttttgacca

SEQ ID NO: 6284 - DNA, 122 bp, Homo sapiens
  misc_feature (61)..(62): /note="This region represents a CpG dinucleotide"
  misc_feature (61)..(61): /note="Nucleotide may be methylated to form 5-methylcytosine"
cctggatgggaaggattgtgccaggcatgggttcccgcagtgtgttcccctggctggcagcgtcgcggcacctgggagtcattaggcagcaagggagggaattgcgattctgggcggggctc

SEQ ID NO: 6285 - DNA, 122 bp, Homo sapiens
  misc_feature (61)..(62): /note="This region represents a CpG dinucleotide"
  misc_feature (61)..(61): /note="Nucleotide may be methylated to form 5-methylcytosine"
ccatagtagagaaatggactaagggctttaatccctgagtttctgagctgtcgaattgtccgaatatttctcatcatattcagcagttctgtatgagctgaatgagtcagcaggacctaagg

SEQ ID NO: 6286 - DNA, 122 bp, Homo sapiens
  misc_feature (61)..(62): /note="This region represents a CpG dinucleotide"
  misc_feature (61)..(61): /note="Nucleotide may be methylated to form 5-methylcytosine"
gagctgaaatctggtacagaaagcccggtgcagaaagtgtttctgacagagagaacagcacgtccaaaggccctgaggtcggaaccaccttggcatatttgaagaactgggggaaggcccaa

SEQ ID NO: 6287 - DNA, 122 bp, Homo sapiens
  misc_feature (61)..(62): /note="This region represents a CpG dinucleotide"
  misc_feature (61)..(61): /note="Nucleotide may be methylated to form 5-methylcytosine"
ggactgtggctttatccctgaggccaggcttcatgtccagatggccatgccagaggttgacgtggcagagaaggagtgtgacacaggccagtggagcgagtggagccagcctgtgtgcttcc

SEQ ID NO: 6288 - DNA, 122 bp, Homo sapiens
  misc_feature (61)..(62): /note="This region represents a CpG dinucleotide"
  misc_feature (61)..(61): /note="Nucleotide may be methylated to form 5-methylcytosine"
tgagtatgataggaatgtgacatgtaagcacgaacaacaccaactgggtgatggggagaacgcactagagtgacgtgttcaatgaacacagggatcatttctcagtgccaggcaatgttctc

SEQ ID NO: 6289 - DNA, 122 bp, Homo sapiens
  misc_feature (61)..(62): /note="This region represents a CpG dinucleotide"
  misc_feature (61)..(61): /note="Nucleotide may be methylated to form 5-methylcytosine"
agtaagagccttccataccgaaagaattctgagtggttcttgacctgggctgcagtctagcgtcaccacgtaaaagggagtatatggagcacctggacatatcatgcatgactggtgggagt

SEQ ID NO: 6290 - DNA, 122 bp, Homo sapiens
  misc_feature (61)..(62): /note="This region represents a CpG dinucleotide"
  misc_feature (61)..(61): /note="Nucleotide may be methylated to form 5-methylcytosine"
cagtgtgcttgttgagctggattgcacctgggatcacacctggagcaggttacgtaaccacgtaggagttttcctacctgggaaatgaagctcataagctctgcctacctcacaggttcctg

SEQ ID NO: 6291 - DNA, 122 bp, Homo sapiens
  misc_feature (61)..(62): /note="This region represents a CpG dinucleotide"
  misc_feature (61)..(61): /note="Nucleotide may be methylated to form 5-methylcytosine"
aaatatcagctattatgatttgcaaatgaggaaacagacttagtgactcacccaaggtcacgcccaagtgaatgtggttcctgaccaccacatcccactgcctgtctgggaggcttggtgat

SEQ ID NO: 6292 - DNA, 122 bp, Homo sapiens
  misc_feature (61)..(62): /note="This region represents a CpG dinucleotide"
  misc_feature (61)..(61): /note="Nucleotide may be methylated to form 5-methylcytosine"
tttgcgtaaggacactttgatgtttatgcaacaacaaaacagtctcatgacacatctttccggacataaccctgttataaggcaatgcatgactatattacacttaatttgtgagaatggaa

SEQ ID NO: 6293 - DNA, 122 bp, Homo sapiens
  misc_feature (61)..(62): /note="This region represents a CpG dinucleotide"
  misc_feature (61)..(61): /note="Nucleotide may be methylated to form 5-methylcytosine"
attggaatgcaattctacattccagggagttgcattttacaattcctgtcatcgaggcaccgtcatgatgtagttgtcattgctgaggtatgtacagcattggtcacacctgttcataggaa

SEQ ID NO: 6294 - DNA, 122 bp, Homo sapiens
  misc_feature (61)..(62): /note="This region represents a CpG dinucleotide"
  misc_feature (61)..(61): /note="Nucleotide may be methylated to form 5-methylcytosine"
tttcttcacatcctccttccgatcaaggagatcaatcttggactcctagaagtcatagaacggaagaggacctcttgtggttgaaaatgagaatatgctcaactaatataagttaaattttg

SEQ ID NO: 6295 - DNA, 122 bp, Homo sapiens
  misc_feature (61)..(62): /note="This region represents a CpG dinucleotide"
  misc_feature (61)..(61): /note="Nucleotide may be methylated to form 5-methylcytosine"
tcagtctgttaccccactgctgggcccttctccacccaagttcccttcccccagatagctcgaagggcttgtgctcatcctaggtcactaagttttctcactgaaacacaggagaccttctc

SEQ ID NO: 6296 - DNA, 122 bp, Homo sapiens
  misc_feature (61)..(62): /note="This region represents a CpG dinucleotide"
  misc_feature (61)..(61): /note="Nucleotide may be methylated to form 5-methylcytosine"
ggctgattcccattgcacaataatacagcgtcataaatcaagccaaggacagcagcctgtcgtctttacttaaaatgatgaaagtttgctcattatgggtattcttgcattcatcttaattt

SEQ ID NO: 6297 - DNA, 122 bp, Homo sapiens
  misc_feature (61)..(62): /note="This region represents a CpG dinucleotide"
  misc_feature (61)..(61): /note="Nucleotide may be methylated to form 5-methylcytosine"
gccaaaggaaaatagatcaagggatttgtgattcattccctacttcagcatttctcaaagcgtgggctgtggattggctggaacagaataacatgagtcactggatttaaatcagattctga

SEQ ID NO: 6298 - DNA, 122 bp, Homo sapiens
  misc_feature (61)..(62): /note="This region represents a CpG dinucleotide"
  misc_feature (61)..(61): /note="Nucleotide may be methylated to form 5-methylcytosine"
tgcaaaatgagttagccagaatgtatgtcctgtgccccatcatccagagaacttgcagagcgtgttctaaagcagttgtgccatcccatagtcagcccaacaggcctcttttgtgcacaggc

SEQ ID NO: 6299 - DNA, 122 bp, Homo sapiens
  misc_feature (61)..(62): /note="This region represents a CpG dinucleotide"
  misc_feature (61)..(61): /note="Nucleotide may be methylated to form 5-methylcytosine"
gtcaatatcatgaaagacaaagattgaggaagtgttgcagattaaaggagactgcagacacgtgacaactgaatgcaatgcatgatgtgggattatcttttgctttaaagcaaaatgctgtt

SEQ ID NO: 6300 - DNA, 122 bp, Homo sapiens
  misc_feature (61)..(62): /note="This region represents a CpG dinucleotide"
  misc_feature (61)..(61): /note="Nucleotide may be methylated to form 5-methylcytosine"
cacctcaacagttatcaccctagtctaagttatcatttctttcctggattgcagcaacagcgctctaattgaccttcctgcttctagccttaccactttttacttattctctgccagccacc

SEQ ID NO: 6301 - DNA, 122 bp, Homo sapiens
  misc_feature (61)..(62): /note="This region represents a CpG dinucleotide"
  misc_feature (61)..(61): /note="Nucleotide may be methylated to form 5-methylcytosine"
gctattgggggaaggggctcagaggagatacccaccatgtacactgctgaccttatacaccgctgagctagaacgactggaagaaccttattagtgaggtgattaaggaggtggatgacaag

SEQ ID NO: 6302 - DNA, 122 bp, Homo sapiens
  misc_feature (61)..(62): /note="This region represents a CpG dinucleotide"
  misc_feature (61)..(61): /note="Nucleotide may be methylated to form 5-methylcytosine"
cataatacaaaacatgctgttaggagcctaattcaaagatttcctgtcaccaataaagagcgtacagaacttctgcctaaaacagaaagaggaaatgtgtttgcagttgaagctggtatgta

SEQ ID NO: 6303 - DNA, 122 bp, Homo sapiens
  misc_feature (61)..(62): /note="This region represents a CpG dinucleotide"
  misc_feature (61)..(61): /note="Nucleotide may be methylated to form 5-methylcytosine"
taacccaggcctgcctgctctgagctgacctttcctggcacctgcaaaattaggatgacacgttaggaacttcctggggttcttaagggaattagaagagggacctgagtgcaaagggcttt

SEQ ID NO: 6304 - DNA, 122 bp, Homo sapiens
  misc_feature (61)..(62): /note="This region represents a CpG dinucleotide"
  misc_feature (61)..(61): /note="Nucleotide may be methylated to form 5-methylcytosine"
gatgccagctgtacatttctcttcacaggtgagtacattccttggcgctttaagtgatcacgtgccttccgaatgccaggtgcggcgcccgctctgcgctgctcgctgcaactgctcccacc

SEQ ID NO: 6305 - DNA, 122 bp, Homo sapiens
  misc_feature (61)..(62): /note="This region represents a CpG dinucleotide"
  misc_feature (61)..(61): /note="Nucleotide may be methylated to form 5-methylcytosine"
agtctgtgctcagtgggcaaatggcagcgttctcacctgatttttgtattgtccaaggaccgtggtatctgcagatgcagcctagcacaaatgcacatgctttttgctcaggagcctgcagc

SEQ ID NO: 6306 - DNA, 122 bp, Homo sapiens
  misc_feature (61)..(62): /note="This region represents a CpG dinucleotide"
  misc_feature (61)..(61): /note="Nucleotide may be methylated to form 5-methylcytosine"
ggctttctgccagtgggaggtggtaagttcagggctgtgcctatccctgggaaggaagagcgcctggtctcaatgagctcattgctgggcaatccagagcctccggggctggagtctctgga

SEQ ID NO: 6307 - DNA, 122 bp, Homo sapiens
  misc_feature (61)..(62): /note="This region represents a CpG dinucleotide"
  misc_feature (61)..(61): /note="Nucleotide may be methylated to form 5-methylcytosine"
cagtgcctcttctcagaggttggctcttcttagttttctctccctggtcactgcacctggcgatgcttagttcatgcttagtggggttcctggtgagccacaggatccccagctcttagtca

SEQ ID NO: 6308 - DNA, 122 bp, Homo sapiens
  misc_feature (61)..(62): /note="This region represents a CpG dinucleotide"
  misc_feature (61)..(61): /note="Nucleotide may be methylated to form 5-methylcytosine"
attgcaaaacacaggaaaatgtatgtttcaagaagtgggtgactgtgctgagagttactacgggatcaagtaagataaggacttaagacattctaaggaaattaccagcaagaacatccatg

SEQ ID NO: 6309 - DNA, 122 bp, Homo sapiens
  misc_feature (61)..(62): /note="This region represents a CpG dinucleotide"
  misc_feature (61)..(61): /note="Nucleotide may be methylated to form 5-methylcytosine"
gtagctgcaaggccctgactaatcacttgtatattctcatgacaagcctagtccctggtacgtaagtagttaagactactttcagaatgcagtcttaaaatatattatagaagatgggtgca

SEQ ID NO: 6310 - DNA, 122 bp, Homo sapiens
  misc_feature (61)..(62): /note="This region represents a CpG dinucleotide"
  misc_feature (61)..(61): /note="Nucleotide may be methylated to form 5-methylcytosine"
caggctcttttaagcacaggtctcatgccctagaaacctgcacaggtctcatgccctgggcggactgcacaggtgtcatatgccctgcctctggcagagggagcccctcccaaatggggctg

SEQ ID NO: 6311 - DNA, 122 bp, Homo sapiens
  misc_feature (61)..(62): /note="This region represents a CpG dinucleotide"
  misc_feature (61)..(61): /note="Nucleotide may be methylated to form 5-methylcytosine"
ttatcatacttttgagtctggatgaattttgtcttagggcggagagctcatcagttctaccggtcttggagaacaagattttctaaagggaaaggaagattcttgaacatattgtgaaagag

SEQ ID NO: 6312 - DNA, 122 bp, Homo sapiens
  misc_feature (61)..(62): /note="This region represents a CpG dinucleotide"
  misc_feature (61)..(61): /note="Nucleotide may be methylated to form 5-methylcytosine"
caaatctatatgaaggatcgaattgcattgaactagcaaacacacacacacacacgcacacgcaaaaactgatgaaagctgaacaaggtctgtagtctagtcaacagtactgcactatgtga

SEQ ID NO: 6313 - DNA, 122 bp, Homo sapiens
  misc_feature (61)..(62): /note="This region represents a CpG dinucleotide"
  misc_feature (61)..(61): /note="Nucleotide may be methylated to form 5-methylcytosine"
gtctggaggattttcctctgaggaaggtaagattgaaggtatctggactggggaaacttccggcacagttgtgaacagataagccagactgaaaatgctgaaaatgaggggattaagtgacc

SEQ ID NO: 6314 - DNA, 122 bp, Homo sapiens
  misc_feature (61)..(62): /note="This region represents a CpG dinucleotide"
  misc_feature (61)..(61): /note="Nucleotide may be methylated to form 5-methylcytosine"
tgtgttgctgttttactgcctgccctggtcctgatccctgtcattaatagagctgggtggcgtctggaatgaatcagagcttctttgatgaaatggcatactccccatcatcaggccgaggt

SEQ ID NO: 6315 - DNA, 122 bp, Homo sapiens
  misc_feature (61)..(62): /note="This region represents a CpG dinucleotide"
  misc_feature (61)..(61): /note="Nucleotide may be methylated to form 5-methylcytosine"
actgaggatgtgttcttaacctagggatcaaaggcaagtcagggagcagctcctcctcctcgggctgtagctgcagggcatgggaaaggtctccatgctggcggactgttggaaaatgcaga

SEQ ID NO: 6316 - DNA, 122 bp, Homo sapiens
  misc_feature (61)..(62): /note="This region represents a CpG dinucleotide"
  misc_feature (61)..(61): /note="Nucleotide may be methylated to form 5-methylcytosine"
cacacacatacacacacacacaccctgtgccctgggtagaggcagtggcacagctgtgggcgctttgcttttctgctcttcctggttccacatctagaattttgtgacttggtgagggggtg

SEQ ID NO: 6317 - DNA, 122 bp, Homo sapiens
  misc_feature (61)..(62): /note="This region represents a CpG dinucleotide"
  misc_feature (61)..(61): /note="Nucleotide may be methylated to form 5-methylcytosine"
tcgtgttaccttcatttactgagtgcttgctaggcattacaaaattatgaagcacctcctcgtgttgggtttaggaatatagagcaatgaacaaaacagacaaggggccggctctccagaat

SEQ ID NO: 6318 - DNA, 122 bp, Homo sapiens
  misc_feature (61)..(62): /note="This region represents a CpG dinucleotide"
  misc_feature (61)..(61): /note="Nucleotide may be methylated to form 5-methylcytosine"
tgataattgggtgctcacgcatgcgtgtgtgagatgtgtcaccctcaaaccttgttatgacgtcagcacattacccgtctaacatgaacttagaagaagcaaaaccaaaaacaaatccagcc

SEQ ID NO: 6319 - DNA, 122 bp, Homo sapiens
  misc_feature (61)..(62): /note="This region represents a CpG dinucleotide"
  misc_feature (61)..(61): /note="Nucleotide may be methylated to form 5-methylcytosine"
ttagatttctcacctgaacttgaagcacaggctagactactgagctcctaacttgtgggtcgcacaggcacctcaaacctcacacatcccacactgaacacacactgtcttccctccaaagg

SEQ ID NO: 6320 - DNA, 122 bp, Homo sapiens
  misc_feature (61)..(62): /note="This region represents a CpG dinucleotide"
  misc_feature (61)..(61): /note="Nucleotide may be methylated to form 5-methylcytosine"
tgcctctgcagtgaaagccacagtcagccacagacacaggctcagaggccctctgactcacgagcaggcacaagaacatcactgcatagcccagaaaaggctgacaaaagccaaaaacccac

SEQ ID NO: 6321 - DNA, 122 bp, Homo sapiens
  misc_feature (61)..(62): /note="This region represents a CpG dinucleotide"
  misc_feature (61)..(61): /note="Nucleotide may be methylated to form 5-methylcytosine"
gaggacctgtgtaaagtacttcctacagggtgatgctgctgaacaaccactctgctttggcgtctcctttggctgagctacagagcagagtttccctggctgaggatggtagtcccatctcc

SEQ ID NO: 6322 - DNA, 122 bp, Homo sapiens
  misc_feature (61)..(62): /note="This region represents a CpG dinucleotide"
  misc_feature (61)..(61): /note="Nucleotide may be methylated to form 5-methylcytosine"
aagcttagccagaagggtttatcccaaacaaagcaatgcacattggcattggaatgaaagcggacaggcaaatgggggaagcaagtcaaaaactttgcagttaccagagcggcattgcagag

SEQ ID NO: 6323 - DNA, 122 bp, Homo sapiens
  misc_feature (61)..(62): /note="This region represents a CpG dinucleotide"
  misc_feature (61)..(61): /note="Nucleotide may be methylated to form 5-methylcytosine"
gccagaaggacaaggaggtagaaaggaattgcaaccagaatctatggtgtatggttaatacgtgttacatgctaactgcaatgaggtcttgaatgccgagttgctcacagactcacccagca

SEQ ID NO: 6324 - DNA, 122 bp, Homo sapiens
  misc_feature (61)..(62): /note="This region represents a CpG dinucleotide"
  misc_feature (61)..(61): /note="Nucleotide may be methylated to form 5-methylcytosine"
ccctgccatctgcacagcacatgccctcaggtccagaagagactgggcagagcaggtgttcgtatccatttttcagacctgcaagctgtggctcagagagcaaagagtcccacccagggtta

SEQ ID NO: 6325 - DNA, 122 bp, Homo sapiens
  misc_feature (61)..(62): /note="This region represents a CpG dinucleotide"
  misc_feature (61)..(61): /note="Nucleotide may be methylated to form 5-methylcytosine"
ctgtgtagtaatcctgtttcacatcgggaatgctgtagtaggcagtgatttcattatccacgtgatcaagcttgaagagatcagaggatgaccaacagtgccttctgggtggtgcacactaa

SEQ ID NO: 6326 - DNA, 122 bp, Homo sapiens
  misc_feature (61)..(62): /note="This region represents a CpG dinucleotide"
  misc_feature (61)..(61): /note="Nucleotide may be methylated to form 5-methylcytosine"
ctcaggtaatctgcctgccttggcctcccaaagtgctgggattataggcttgagccaccacgcccagcccacactggtaaattctataatcattagttgtatggaaaagtacctagcgcatt

SEQ ID NO: 6327 - DNA, 122 bp, Homo sapiens
  misc_feature (61)..(62): /note="This region represents a CpG dinucleotide"
  misc_feature (61)..(61): /note="Nucleotide may be methylated to form 5-methylcytosine"
tgatcctaaagagtagatgtgcaatgggctgggttcttgtggccggccccgggcgtctgacgtgtctcaccgttacagagagctggtctgcattgtccgggcatggccaggattcagagagg

SEQ ID NO: 6328 - DNA, 122 bp, Homo sapiens
  misc_feature (61)..(62): /note="This region represents a CpG dinucleotide"
  misc_feature (61)..(61): /note="Nucleotide may be methylated to form 5-methylcytosine"
cagttaatcccagcacggtaccttcaatctgatctcctggcctgaatgtcatctgactcacgtaaatgtcatgaacaggaacagactgtggactatgaccatgttcaggaatcattccatgg

SEQ ID NO: 6329 - DNA, 122 bp, Homo sapiens
  misc_feature (61)..(62): /note="This region represents a CpG dinucleotide"
  misc_feature (61)..(61): /note="Nucleotide may be methylated to form 5-methylcytosine"
agcacctggatcttagacttcccagcctccagaactatgggaaatatgtttttaagtacccggtccatggcattttgtcactgcagtctgagctggtaaaacacagagttttattggctttt

SEQ ID NO: 6330 - DNA, 122 bp, Homo sapiens
  misc_feature (61)..(62): /note="This region represents a CpG dinucleotide"
  misc_feature (61)..(61): /note="Nucleotide may be methylated to form 5-methylcytosine"
agcttgagctctgaaggagctggagaccgagtaactcaggtcagccatatgggcactccccgcctatgtgatcaacccctaaccacagctctggacacaaagtctcaggtgagcttcccagt

SEQ ID NO: 6331 - DNA, 122 bp, Homo sapiens
  misc_feature (61)..(62): /note="This region represents a CpG dinucleotide"
  misc_feature (61)..(61): /note="Nucleotide may be methylated to form 5-methylcytosine"
gattctcactgaaatctcactgccctcctggaaatattaccggatgttttactgtcatagcgaagtgagagtaagctgctcactgaggatcaaagagcttgtgacagacctaagactcaagt

SEQ ID NO: 6332 - DNA, 122 bp, Homo sapiens
  misc_feature (61)..(62): /note="This region represents a CpG dinucleotide"
  misc_feature (61)..(61): /note="Nucleotide may be methylated to form 5-methylcytosine"
ctacttagtgttaagccacagtggccatcagtgacatgagctgcactttgggagcagggccgtctcctaggtggcactgtgcatgagcagtgaagctggaaggggggatttttgttgctttt

SEQ ID NO: 6333 - DNA, 122 bp, Homo sapiens
  misc_feature (61)..(62): /note="This region represents a CpG dinucleotide"
  misc_feature (61)..(61): /note="Nucleotide may be methylated to form 5-methylcytosine"
gatgtttagtaaaaccaaggtcatacaaacactgagtcatcgtgaacaaagcagccagtacgttcatatttccaaagacaggcatcccgtccctctgcctctgtaccaagaattcagccaac

SEQ ID NO: 6334 - DNA, 122 bp, Homo sapiens
  misc_feature (61)..(62): /note="This region represents a CpG dinucleotide"
  misc_feature (61)..(61): /note="Nucleotide may be methylated to form 5-methylcytosine"
tgaaaggggcacctgcgggaacctgcacagatgcagctgcctggtgggattacagcagtccgcccagccactgcccagggcgcctggaagcctgtcaagggcatagtcctttgtggctgatg

SEQ ID NO: 6335 - DNA, 122 bp, Homo sapiens
  misc_feature (61)..(62): /note="This region represents a CpG dinucleotide"
  misc_feature (61)..(61): /note="Nucleotide may be methylated to form 5-methylcytosine"
tggagaaagatgtttcagaagaaacagcatgtcagcaagattgtgtgatgctacacatgacgctggctttgatatgactaagttgtacaatttatggaacaaggagagagtaaaaggagaga

SEQ ID NO: 6336 - DNA, 122 bp, Homo sapiens
  misc_feature (61)..(62): /note="This region represents a CpG dinucleotide"
  misc_feature (61)..(61): /note="Nucleotide may be methylated to form 5-methylcytosine"
tcagatttgggattaacaaacttccacttagacattctgcctgactgacctcaggcatttcgcactctgaatgtcaaacccaactcattgtcatctctgaagctgctcacttaattctcctc

SEQ ID NO: 6337 - DNA, 122 bp, Homo sapiens
  misc_feature (61)..(62): /note="This region represents a CpG dinucleotide"
  misc_feature (61)..(61): /note="Nucleotide may be methylated to form 5-methylcytosine"
cagccacaggtgaggcggcctgatggcctggggcaaaggccctcggtccagtctcttccccgtccaccccaagtctgacttctctcaggagggactcatgaacacgtgccctgagcaccccc

SEQ ID NO: 6338 - DNA, 122 bp, Homo sapiens
  misc_feature (61)..(62): /note="This region represents a CpG dinucleotide"
  misc_feature (61)..(61): /note="Nucleotide may be methylated to form 5-methylcytosine"
tatctgaggcctcctgctaacagtcaacaccaactcatcaggcatgtgagtgagccaccacggaactggatcctccagccccactgaagcctttagatgactgcatgactgcaaccctggcc

SEQ ID NO: 6339 - DNA, 122 bp, Homo sapiens
  misc_feature (61)..(62): /note="This region represents a CpG dinucleotide"
  misc_feature (61)..(61): /note="Nucleotide may be methylated to form 5-methylcytosine"
ccttccagaagacctggtttataacagtgcataaggctttttctcaaaatagttatataccgcacaaggaagaggtgtggctgttgtgtcacaggagacctaggggccaggtttgggaaaag

SEQ ID NO: 6340 - DNA, 122 bp, Homo sapiens
  misc_feature (61)..(62): /note="This region represents a CpG dinucleotide"
  misc_feature (61)..(61): /note="Nucleotide may be methylated to form 5-methylcytosine"
tcgatgctattccagcctttcagatggcctgttgtgtgacgctggctgtgtctcaatttccggtttgatcaatggttttacattacttcagccacaaaatctttcatgtgcttgcaacaaat

SEQ ID NO: 6341 - DNA, 122 bp, Homo sapiens
  misc_feature (61)..(62): /note="This region represents a CpG dinucleotide"
  misc_feature (61)..(61): /note="Nucleotide may be methylated to form 5-methylcytosine"
cctaatccccagttacactggctttctgggagattccagaatgtcaggtgcccattcccccgatgggcctttgcaccgacccatccctgaacctggaccatgtgtctccctgctcttcaacg

SEQ ID NO: 6342 - DNA, 122 bp, Homo sapiens
  misc_feature (61)..(62): /note="This region represents a CpG dinucleotide"
  misc_feature (61)..(61): /note="Nucleotide may be methylated to form 5-methylcytosine"
gagcccatttccctgcagcacagttacatcatcatcaagagaatgcattccccaaatccacggcttcctaatccattagcacaacaggctggtggagagcttggctttctcagtcacatggg

SEQ ID NO: 6343 - DNA, 122 bp, Homo sapiens
  misc_feature (61)..(62): /note="This region represents a CpG dinucleotide"
  misc_feature (61)..(61): /note="Nucleotide may be methylated to form 5-methylcytosine"
cagatgtgatattctccatttttactggcattatcagtgaaactgtgtctgtaccatattcgttgactaacacatctttcaggtttcagtatgaataagctgcattctgcatgtatgttcag

SEQ ID NO: 6344 - DNA, 122 bp, Homo sapiens
  misc_feature (61)..(62): /note="This region represents a CpG dinucleotide"
  misc_feature (61)..(61): /note="Nucleotide may be methylated to form 5-methylcytosine"
accggtctgtgtctgttttcttctcccttttcactctagcccttcttaggcatcccaatgcgagtagtaaaacataaatcatgcaatatcataagatactgctacagctcttgccctgccct

SEQ ID NO: 6345 - DNA, 122 bp, Homo sapiens
  misc_feature (61)..(62): /note="This region represents a CpG dinucleotide"
  misc_feature (61)..(61): /note="Nucleotide may be methylated to form 5-methylcytosine"
aaccaccatacaattcaaacaaaactcttctttgggctggaactagcctgccctagactgcgtggagtgtggagaaaggagcccgcctcaggctgggagagatcagggaaggttcttgaagg

SEQ ID NO: 6346 - DNA, 122 bp, Homo sapiens
  misc_feature (61)..(62): /note="This region represents a CpG dinucleotide"
  misc_feature (61)..(61): /note="Nucleotide may be methylated to form 5-methylcytosine"
tctccttcctggtggcttaagtagttgttcacagactttacatattcccatgtgacctgacgaagcaatataggaagtgctgagagcatggtagattagctaagtcctgaggttggaacaat

SEQ ID NO: 6347 - DNA, 122 bp, Homo sapiens
  misc_feature (61)..(62): /note="This region represents a CpG dinucleotide"
  misc_feature (61)..(61): /note="Nucleotide may be methylated to form 5-methylcytosine"
cgatggcttggcttgggcacagaggcctgacagtaacaatgtatgtggtattagcaattacgccaataacacatcccacagggttggtatgaggattaagggctagactatatccactcaat

SEQ ID NO: 6348 - DNA, 122 bp, Homo sapiens
  misc_feature (61)..(62): /note="This region represents a CpG dinucleotide"
  misc_feature (61)..(61): /note="Nucleotide may be methylated to form 5-methylcytosine"
atcaccatctgggatccagtaagctcccccatggggcctaaactagactaagttggtttccgtcactcacagccagaggagtcctgcctaagaaattgggaaagagagcggagaagacaaaa

SEQ ID NO: 6349 - DNA, 122 bp, Homo sapiens
  misc_feature (61)..(62): /note="This region represents a CpG dinucleotide"
  misc_feature (61)..(61): /note="Nucleotide may be methylated to form 5-methylcytosine"
ctctgaagagccactgcatattgcacagtgcacgagatgaatccaaaatgaatcagacagcggctccaataaatgctgaggccatgcaaagaacactgggagtgaagagaaggcgcagtgaa

SEQ ID NO: 6350 - DNA, 122 bp, Homo sapiens
  misc_feature (61)..(62): /note="This region represents a CpG dinucleotide"
  misc_feature (61)..(61): /note="Nucleotide may be methylated to form 5-methylcytosine"
gttgcatcttgtgtaattctagtacaatatcaaaaccagtcctctttttgttccaaagttcgcaggcccttctttgtcactccactactatattataatctggttttctgtttatattgtat

SEQ ID NO: 6351 - DNA, 122 bp, Homo sapiens
  misc_feature (61)..(62): /note="This region represents a CpG dinucleotide"
  misc_feature (61)..(61): /note="Nucleotide may be methylated to form 5-methylcytosine"
tgagtcaccgcacctggctggaagccatagtcttataacctgagcttagaagtgacatttcgtcactgctatttgatagaatcaagtcattaagttgaggggacagtattatattaatacaa

SEQ ID NO: 6352 - DNA, 122 bp, Homo sapiens
  misc_feature (61)..(62): /note="This region represents a CpG dinucleotide"
  misc_feature (61)..(61): /note="Nucleotide may be methylated to form 5-methylcytosine"
gtatcagccttggtgacatacccctcaggttattacagcactatttgggagtggctctcccgccttcagaagaacaaaaagcaaggcctccaaaattatttctaggctctcagctaataact

SEQ ID NO: 6353 - DNA, 122 bp, Homo sapiens
  misc_feature (61)..(62): /note="This region represents a CpG dinucleotide"
  misc_feature (61)..(61): /note="Nucleotide may be methylated to form 5-methylcytosine"
ggcgctgtagcactccctggccagtacccaggacacctgagctccccaccagcttccacacgcagcaagcaccgcatgtgcttgctccccactgggcctggtccacagctgcacacgccaac

SEQ ID NO: 6354 - DNA, 122 bp, Homo sapiens
  misc_feature (61)..(62): /note="This region represents a CpG dinucleotide"
  misc_feature (61)..(61): /note="Nucleotide may be methylated to form 5-methylcytosine"
gtttggcttctctttctacctcagagaactggcggcagctcttccctgaagaagttgctgcggcctggtgatggggaatctccctgtgtttgctcagagctgaaattccacccacttccaac

SEQ ID NO: 6355 - DNA, 122 bp, Homo sapiens
  misc_feature (61)..(62): /note="This region represents a CpG dinucleotide"
  misc_feature (61)..(61): /note="Nucleotide may be methylated to form 5-methylcytosine"
ctagcatacacattaggcacttgacctaatttaaaataatgattgcaaagaggactatgacgtagtggaaaggacatagcattagcagttaagaagcctgaattctaggcttagtctgccac

SEQ ID NO: 6356 - DNA, 122 bp, Homo sapiens
  misc_feature (61)..(62): /note="This region represents a CpG dinucleotide"
  misc_feature (61)..(61): /note="Nucleotide may be methylated to form 5-methylcytosine"
tcaaaaacctttaagaatgaaacattaggcaaatgccagggccactctcagaaaactacacgctagttgtagtaattagctccaggcatgcccttcccgccccctgttattaaacagcatga

SEQ ID NO: 6357 - DNA, 122 bp, Homo sapiens
  misc_feature (61)..(62): /note="This region represents a CpG dinucleotide"
  misc_feature (61)..(61): /note="Nucleotide may be methylated to form 5-methylcytosine"
tagtctctggacctgggtttcctctctgtagcaggatgaacaggctaggtcagtgcttctcgagcctttctaccagagaacatgaaggtcttaatgagagagggcagagaacacacatatca

SEQ ID NO: 6358 - DNA, 122 bp, Homo sapiens
  misc_feature (61)..(62): /note="This region represents a CpG dinucleotide"
  misc_feature (61)..(61): /note="Nucleotide may be methylated to form 5-methylcytosine"
agagaatgcttcacggatggcaacaattccttgcctttggacaccaagtaggggtggttgcggcaggatccgggtgctttaaaaccttcaggtagattcagatcacctgtaataatgaaaag

SEQ ID NO: 6359 - DNA, 122 bp, Homo sapiens
  misc_feature (61)..(62): /note="This region represents a CpG dinucleotide"
  misc_feature (61)..(61): /note="Nucleotide may be methylated to form 5-methylcytosine"
aggcaacactatcccagcatctcccagaacaggaactcggtatgagctaactgttagccacgttcttagcaaaagaacatgtgaactacacagtggaggctgcatgcacacttgggtgcaaa

SEQ ID NO: 6360 - DNA, 122 bp, Homo sapiens
  misc_feature (61)..(62): /note="This region represents a CpG dinucleotide"
  misc_feature (61)..(61): /note="Nucleotide may be methylated to form 5-methylcytosine"
gttctcagtgaagagtcatccattgagtgagcaatgagcttgatgggactctcctggatccgctctgtgccactacactgagtcatataccggagacactgtgactacaagttctgttacag

SEQ ID NO: 6361 - DNA, 122 bp, Homo sapiens
  misc_feature (61)..(62): /note="This region represents a CpG dinucleotide"
  misc_feature (61)..(61): /note="Nucleotide may be methylated to form 5-methylcytosine"
cgccacactacctccacgtactcattcagcaaacatttatgttacagctactatgagtcacgtgctgtttcagatgctggagaaacagtgaagatgaagacaaaatccctctgagaatggag

SEQ ID NO: 6362 - DNA, 122 bp, Homo sapiens
  misc_feature (61)..(62): /note="This region represents a CpG dinucleotide"
  misc_feature (61)..(61): /note="Nucleotide may be methylated to form 5-methylcytosine"
ttagggcctgcttcctcataggtgaggctttctcactgtaacctcatatggccgaaggggcgagggagtctctcaggtctcttttataaaagcactgatctcattcctaaggcctctgccct

SEQ ID NO: 6363 - DNA, 122 bp, Homo sapiens
  misc_feature (61)..(62): /note="This region represents a CpG dinucleotide"
  misc_feature (61)..(61): /note="Nucleotide may be methylated to form 5-methylcytosine"
actagtgtaacatataaaataaaatactgcctgactttcattgttgttgttaaaagataacgtaacattgagcaggccttcagtaatgttaagtatttgaattaggccttgatttgtattct

SEQ ID NO: 6364 - DNA, 122 bp, Homo sapiens
  misc_feature (61)..(62): /note="This region represents a CpG dinucleotide"
  misc_feature (61)..(61): /note="Nucleotide may be methylated to form 5-methylcytosine"
tagattcctccaccacacccaatactctctacctttgtgttccagaaggctggagtaaaacgcattggagtttgcccgctgtcatcttcagcccattcattcaatgagtacttattaaaccc

SEQ ID NO: 6365 - DNA, 122 bp, Homo sapiens
  misc_feature (61)..(62): /note="This region represents a CpG dinucleotide"
  misc_feature (61)..(61): /note="Nucleotide may be methylated to form 5-methylcytosine"
attcataaactgtcagttgtccatgacgtgctctctgatcctctcagaaaatgtattattcgttcttgagacttcactaacagtcattatcagaacaatattgtcagtatatttttcaacac

SEQ ID NO: 6366 - DNA, 122 bp, Homo sapiens
  misc_feature (61)..(62): /note="This region represents a CpG dinucleotide"
  misc_feature (61)..(61): /note="Nucleotide may be methylated to form 5-methylcytosine"
tcacctttcagagtgagctaatagacacctgagcagcatttgccaaagcagtagccttagcgttctcaccttcagactgtattagaaaggctgagaggaggcactgaagattagagaggaat

SEQ ID NO: 6367 - DNA, 122 bp, Homo sapiens
  misc_feature (61)..(62): /note="This region represents a CpG dinucleotide"
  misc_feature (61)..(61): /note="Nucleotide may be methylated to form 5-methylcytosine"
agggtcacaccttattttcaagagtttccatgctctgtgctaattccctgaattgttatgcgggctggagcttttgatttaatgttcattgcagaactgaagtctaaacattaaaacatatc

SEQ ID NO: 6368 - DNA, 122 bp, Homo sapiens
  misc_feature (61)..(62): /note="This region represents a CpG dinucleotide"
  misc_feature (61)..(61): /note="Nucleotide may be methylated to form 5-methylcytosine"
tatagtcaaggatggaagcaggaggataatagagttgcagtgcgtatgctaaacaaaagacgactttcattccaaggaaatgagatagagacagcacgagtcttacttctgttgttttccat

SEQ ID NO: 6369 - DNA, 122 bp, Homo sapiens
  misc_feature (61)..(62): /note="This region represents a CpG dinucleotide"
  misc_feature (61)..(61): /note="Nucleotide may be methylated to form 5-methylcytosine"
tcacccaggaaacatgcaaaattgtcagcacttgtttatttaatggcaccttgcaaaccacgttcacaccacagtgcaggagctgctcatctaaggagctaagaccctcctgatggctctga

SEQ ID NO: 6370 - DNA, 122 bp, Homo sapiens
  misc_feature (61)..(62): /note="This region represents a CpG dinucleotide"
  misc_feature (61)..(61): /note="Nucleotide may be methylated to form 5-methylcytosine"
cagtccaataaaaatattttaaactagtgattctcctaaagcaatcagtgatttaacacacgtaacttggctgcagtccctgcagtgacacaggccagattgtgtcataatgtggaaacaac

SEQ ID NO: 6371 - DNA, 122 bp, Homo sapiens
  misc_feature (61)..(62): /note="This region represents a CpG dinucleotide"
  misc_feature (61)..(61): /note="Nucleotide may be methylated to form 5-methylcytosine"
acgtctgaatcatctgcagacattaagtcagcaacagtagtaagaatgtcctccagatctcgccctcaaaccagcaggaacggtggcttctgatagcttggtagaaatgcaaactcaggccc

SEQ ID NO: 6372 - DNA, 122 bp, Homo sapiens
  misc_feature (61)..(62): /note="This region represents a CpG dinucleotide"
  misc_feature (61)..(61): /note="Nucleotide may be methylated to form 5-methylcytosine"
acaggtatgcactggtaacatgcagatgatttcatccagctaagctggttggagtaggagcgataccaaagggtacacccatctgtgagtcacatcttgaaaaacactgagaggaaccttct

SEQ ID NO: 6373 - DNA, 122 bp, Homo sapiens
  misc_feature (61)..(62): /note="This region represents a CpG dinucleotide"
  misc_feature (61)..(61): /note="Nucleotide may be methylated to form 5-methylcytosine"
tgactggagacagcccagcggaggccacagcctgagaccaagccctggccctggaatcttcggtagctaaagatgtaaatgccaatgtgacaccaggaagggacctcgggatggggaaggga

SEQ ID NO: 6374 - DNA, 122 bp, Homo sapiens
  misc_feature (61)..(62): /note="This region represents a CpG dinucleotide"
  misc_feature (61)..(61): /note="Nucleotide may be methylated to form 5-methylcytosine"
cctgcactaaaaaattaagattgtacctcttcaaagaattatgaatattacgtaagataacgtgtgtgaagtgcctaagcccattcctggcacatactgcaaaccagatatgtgtcgggatt

SEQ ID NO: 6375 - DNA, 122 bp, Homo sapiens
  misc_feature (61)..(62): /note="This region represents a CpG dinucleotide"
  misc_feature (61)..(61): /note="Nucleotide may be methylated to form 5-methylcytosine"
ccctctcctctcagtttcaccttgaacgagagaaagagaaagggaggcagatgacagctccgtccagcacagaacggggtgtcctgtgaagtggtgagctccctgttcctgggagtatgtaa

SEQ ID NO: 6376 - DNA, 122 bp, Homo sapiens
  misc_feature (61)..(62): /note="This region represents a CpG dinucleotide"
  misc_feature (61)..(61): /note="Nucleotide may be methylated to form 5-methylcytosine"
tttcatccaaaaatctttcttttgacaccccggagccaatagcagaggaagagctggtgccggcctactcagctgtctgctaaagaaattccccaggctctggttgagtgttttggcccata

SEQ ID NO: 6377 - DNA, 122 bp, Homo sapiens
  misc_feature (61)..(62): /note="This region represents a CpG dinucleotide"
  misc_feature (61)..(61): /note="Nucleotide may be methylated to form 5-methylcytosine"
tctacctgttctgagtcaacagttccaggatgaacctcgcctaaaagtcttccaggggagcgagagtggaatgtctggcttaaggatgcagtctgaccccacagctcacagtggcaggaaag

SEQ ID NO: 6378 - DNA, 122 bp, Homo sapiens
  misc_feature (61)..(62): /note="This region represents a CpG dinucleotide"
  misc_feature (61)..(61): /note="Nucleotide may be methylated to form 5-methylcytosine"
gtttctacaatgggctcaggattatgcagacaaattacataagaacacctgcttgatatgcggacttacgcctctttccagtggctccagcctccagtggtgggtatcctccttccaaggtc

SEQ ID NO: 6379 - DNA, 122 bp, Homo sapiens
  misc_feature (61)..(62): /note="This region represents a CpG dinucleotide"
  misc_feature (61)..(61): /note="Nucleotide may be methylated to form 5-methylcytosine"
tatgtagtctattttctaatctggctaaaaccggtttggttctcatgactctgtaatacacgggtagtacagaaaacctcagtgcttaaaggggaaacaaaactaaaataacttactggtct

SEQ ID NO: 6380 - DNA, 122 bp, Homo sapiens
  misc_feature (61)..(62): /note="This region represents a CpG dinucleotide"
  misc_feature (61)..(61): /note="Nucleotide may be methylated to form 5-methylcytosine"
gcctgaagcagcaggatgatgattcacagggtgaggcacatagtcctcatggctctcctccgcttcccacatgtcactgcaccatcgcctcacacagcagtcaccatagctcttgtaatttc

SEQ ID NO: 6381 - DNA, 122 bp, Homo sapiens
  misc_feature (61)..(62): /note="This region represents a CpG dinucleotide"
  misc_feature (61)..(61): /note="Nucleotide may be methylated to form 5-methylcytosine"
caggtgtcctttcccagtagagtcttatggacagtgattaattctctcagcaacagtgtgcgatgacaggcatgaagtattgcaaccaggaagctcacctgagccttggtgtcctgggtttt

SEQ ID NO: 6382 - DNA, 122 bp, Homo sapiens
  misc_feature (61)..(62): /note="This region represents a CpG dinucleotide"
  misc_feature (61)..(61): /note="Nucleotide may be methylated to form 5-methylcytosine"
actgcggggtctctggagaggcttgctgcatgctgtggccaagtcagcagtgcactggggcgggcagggctggctggccttgggtgagaggggacacctggatggcaaactgatggaggctg

SEQ ID NO: 6383 - DNA, 122 bp, Homo sapiens
  misc_feature (61)..(62): /note="This region represents a CpG dinucleotide"
  misc_feature (61)..(61): /note="Nucleotide may be methylated to form 5-methylcytosine"
gctgtggcaatccagtttatgcagaacatactgatcccaggcttggtgtaagcgcatgctcgtcaatattttaaacccgtaaccggactttcttccgtggtatttttagaaataccagtaga

SEQ ID NO: 6384 - DNA, 122 bp, Homo sapiens
  misc_feature (61)..(62): /note="This region represents a CpG dinucleotide"
  misc_feature (61)..(61): /note="Nucleotide may be methylated to form 5-methylcytosine"
tcaggaaggtgttttgagatttgtagagtctgtgaacagataagaatcgaattctcacttcgtcactctagaaactgctgaccttagagagacttttctgtggccaggcttatgtctgagga

SEQ ID NO: 6385 - DNA, 122 bp, Homo sapiens
  misc_feature (61)..(62): /note="This region represents a CpG dinucleotide"
  misc_feature (61)..(61): /note="Nucleotide may be methylated to form 5-methylcytosine"
tttgcctctttcttggaacacaggatagaggtcaggcttctgattccggagtcagatggccgagttcagtcttggccatgccactcctagctagatgaccttgggcaaatcacgtgacctcc

SEQ ID NO: 6386 - DNA, 122 bp, Homo sapiens
  misc_feature (61)..(62): /note="This region represents a CpG dinucleotide"
  misc_feature (61)..(61): /note="Nucleotide may be methylated to form 5-methylcytosine"
agaatagaatccagtgactaaaggtcctaagacattaggagtcaggagtcctgccctgtgcgataagacctgagaagttatggacaggacactaaatgggtctgccacatcccttctgggtc

SEQ ID NO: 6387 - DNA, 122 bp, Homo sapiens
  misc_feature (61)..(62): /note="This region represents a CpG dinucleotide"
  misc_feature (61)..(61): /note="Nucleotide may be methylated to form 5-methylcytosine"
atgggcttttctgtggggtgaaaactcaggcctcaaatccctgcatccgtgaaccttgttcgcaccagcactgcggagagagggctccaggacatagaagggagaatgagggcgtggtgggt

SEQ ID NO: 6388 - DNA, 122 bp, Homo sapiens
  misc_feature (61)..(62): /note="This region represents a CpG dinucleotide"
  misc_feature (61)..(61): /note="Nucleotide may be methylated to form 5-methylcytosine"
ttctgacagtcaagccctagtatctggcactgctatctgggaggaatccctttaagggcacgatgcctgataaaagacacacgtgcttgctagttctttggaagcatctgaaagagggatgt

SEQ ID NO: 6389 - DNA, 122 bp, Homo sapiens
  misc_feature (61)..(62): /note="This region represents a CpG dinucleotide"
  misc_feature (61)..(61): /note="Nucleotide may be methylated to form 5-methylcytosine"
ccatctccatcacctattctaagtaaatcattgtgtctttcacccctgtgtaaaccaatacgtagacttccagaatcatgcattcagtgaaagaagctggaccaattgcattttgtgaagag

SEQ ID NO: 6390 - DNA, 122 bp, Homo sapiens
  misc_feature (61)..(62): /note="This region represents a CpG dinucleotide"
  misc_feature (61)..(61): /note="Nucleotide may be methylated to form 5-methylcytosine"
tcacttcatagactgagagatggggaggaacttgcctgagggccagtaggaaatcagtggcggagccagtggttggacaaaattactgctgagttctgtttttgttctgtctatgactcttc

SEQ ID NO: 6391 - DNA, 122 bp, Homo sapiens
  misc_feature (61)..(62): /note="This region represents a CpG dinucleotide"
  misc_feature (61)..(61): /note="Nucleotide may be methylated to form 5-methylcytosine"
aaactacatcttttgcttctaaaacagcttttctggtgccaggcatctgattccagcacacgctgtgctccagagttattcccaatgacgtgtgtagctctttgttttttttttaggatgaa

SEQ ID NO: 6392 - DNA, 122 bp, Homo sapiens
  misc_feature (61)..(62): /note="This region represents a CpG dinucleotide"
  misc_feature (61)..(61): /note="Nucleotide may be methylated to form 5-methylcytosine"
atgaatgtggttttcagccagggagtctagacttctttgatagataccttgctccatgcccgccttctctcctggaaaccacttttctggacccagcagggtggtggtgctcagtcagggct

SEQ ID NO: 6393 - DNA, 122 bp, Homo sapiens
  misc_feature (61)..(62): /note="This region represents a CpG dinucleotide"
  misc_feature (61)..(61): /note="Nucleotide may be methylated to form 5-methylcytosine"
tcacttctgttgaacatggccacttttgttttgaataagaaaacctaatcatctcaattacgataataacctcgaagttgcattactgacgagggtgtcatgaaagtgagtcaatagtggaa

SEQ ID NO: 6394 - DNA, 122 bp, Homo sapiens
  misc_feature (61)..(62): /note="This region represents a CpG dinucleotide"
  misc_feature (61)..(61): /note="Nucleotide may be methylated to form 5-methylcytosine"
cccaaggcccttcatgtgtacaactccagcaggctgagtggcttcttgcagctggcatgccgtggggccccctcttgtgcaggcagcagaggagaaggccttaaggtgtccattctcgctgt

SEQ ID NO: 6395 - DNA, 122 bp, Homo sapiens
  misc_feature (61)..(62): /note="This region represents a CpG dinucleotide"
  misc_feature (61)..(61): /note="Nucleotide may be methylated to form 5-methylcytosine"
tggagttgtgacactgcaaaatggcagtgtcaggagccttccatgggctgcatcaggcagcgccagcctgcaaatcgctcagagtgcttaaaatctggggcacacctggaaggctcgggcct

SEQ ID NO: 6396 - DNA, 122 bp, Homo sapiens
  misc_feature (61)..(62): /note="This region represents a CpG dinucleotide"
  misc_feature (61)..(61): /note="Nucleotide may be methylated to form 5-methylcytosine"
cagagtcttacaggccactcgaggacgatttccttatagcagacgactgactatacttctcgagcagtgtttgctgagtgacatattaactcttgcttatggttccttgggaggagaaggcc

SEQ ID NO: 6397 - DNA, 122 bp, Homo sapiens
  misc_feature (61)..(62): /note="This region represents a CpG dinucleotide"
  misc_feature (61)..(61): /note="Nucleotide may be methylated to form 5-methylcytosine"
aatatacctagtgtgatccatccacacaatggaatatcactcagccatgaaaaggctgggcgaggtggctcatgtctgtaatcccagcactttgggaggccgaggcaggtagatcacgaggt

SEQ ID NO: 6398 - DNA, 122 bp, Homo sapiens
  misc_feature (61)..(62): /note="This region represents a CpG dinucleotide"
  misc_feature (61)..(61): /note="Nucleotide may be methylated to form 5-methylcytosine"
ggctttaaaactaattacctaagccacgttcaatctgacaggaggtattattggagctagcgcatcagtcagatcacttaattacttcataaatcctgggtcttagcatagattttaaagca

SEQ ID NO: 6399 - DNA, 122 bp, Homo sapiens
  misc_feature (61)..(62): /note="This region represents a CpG dinucleotide"
  misc_feature (61)..(61): /note="Nucleotide may be methylated to form 5-methylcytosine"
cacagcaaaattttaatcccagattggttcttctttgcatcttgctataattttttgtaccgttacatctgtgtacttagagaatgcaaatttactgccatattcatccaaaccaaatacaa

SEQ ID NO: 6400 - DNA, 122 bp, Homo sapiens
  misc_feature (61)..(62): /note="This region represents a CpG dinucleotide"
  misc_feature (61)..(61): /note="Nucleotide may be methylated to form 5-methylcytosine"
ttctagcaatgccctttttaagtaatacagcctcagggcaatcccttaattaatattttccgctgtttgaagtaggtatttttatctccatcttataaatgaatgaaatggacctgagcatg

SEQ ID NO: 6401 - DNA, 122 bp, Homo sapiens
  misc_feature (61)..(62): /note="This region represents a CpG dinucleotide"
  misc_feature (61)..(61): /note="Nucleotide may be methylated to form 5-methylcytosine"
aggaatcatgagctgatcctcataagattaagatcttctttactacactagcgtggttagcgtggaattttgctgattcatcaagtacgacattgaaaatatagcagtgaagaaagcagtta

SEQ ID NO: 6402 - DNA, 122 bp, Homo sapiens
  misc_feature (61)..(62): /note="This region represents a CpG dinucleotide"
  misc_feature (61)..(61): /note="Nucleotide may be methylated to form 5-methylcytosine"
gtatgaatttacaaacaggacctgaccattaagagcctgccaccaccaatgacccagatgcggtaaagcttgcaaaaccttgacgccctttgatgctcacagcaactgaggtggcaggcaga

SEQ ID NO: 6403 - DNA, 122 bp, Homo sapiens
  misc_feature (61)..(62): /note="This region represents a CpG dinucleotide"
  misc_feature (61)..(61): /note="Nucleotide may be methylated to form 5-methylcytosine"
tagggtttacacagtggacaaatgaatatctaacttcagagtcaccagtgtgctaggttgcgtgctagtcaacccagtaattccttccagatccagcttccctttttcatttcctcagatac

SEQ ID NO: 6404 - DNA, 122 bp, Homo sapiens
  misc_feature (61)..(62): /note="This region represents a CpG dinucleotide"
  misc_feature (61)..(61): /note="Nucleotide may be methylated to form 5-methylcytosine"
tagtgagccggctcccgtgttgtgcctggcattgggttatgagctttacatacacgctctcgcccttgcaacatcctggagaggaaggtagaaatgcctccagttaaaagatgtggaaattt

SEQ ID NO: 6405 - DNA, 122 bp, Homo sapiens
  misc_feature (61)..(62): /note="This region represents a CpG dinucleotide"
  misc_feature (61)..(61): /note="Nucleotide may be methylated to form 5-methylcytosine"
gctgcaattaatctgctccatggctccaatcaaagcaaggattctgtaggatggattctccgccttcctgcaggaaagggggctctagctctctagtgacagcatccttcagagggaccctt

SEQ ID NO: 6406 - DNA, 122 bp, Homo sapiens
  misc_feature (61)..(62): /note="This region represents a CpG dinucleotide"
  misc_feature (61)..(61): /note="Nucleotide may be methylated to form 5-methylcytosine"
gccatgacccaggacacaccttgtgaggcagcttgaaaaaccagcagccagggatgtccacgtcgttgtaaggtccattgccatggtgatagctgggctgggtgtccttggggccaccacgg

SEQ ID NO: 6407 - DNA, 122 bp, Homo sapiens
  misc_feature (61)..(62): /note="This region represents a CpG dinucleotide"
  misc_feature (61)..(61): /note="Nucleotide may be methylated to form 5-methylcytosine"
caatagaggaagctattttaaaagcttagactggaactttgaatggtagagacaggaaggcggggaatatgattagattcatttgagagagagatttaacaggatttagtatcttgatttat

SEQ ID NO: 6408 - DNA, 122 bp, Homo sapiens
  misc_feature (61)..(62): /note="This region represents a CpG dinucleotide"
  misc_feature (61)..(61): /note="Nucleotide may be methylated to form 5-methylcytosine"
ctcctgggtgaggcaaacattttgagtcagttgagagggatcgctcattcactcttgcagcgggaaggcagagaagtttcagtttatcttctgttctgtctcaatcagttgggtagaatgag

SEQ ID NO: 6409 - DNA, 122 bp, Homo sapiens
  misc_feature (61)..(62): /note="This region represents a CpG dinucleotide"
  misc_feature (61)..(61): /note="Nucleotide may be methylated to form 5-methylcytosine"
cacacaaatgtacatacaattccaggttgctcacagaccccctctaggagatgttactgtcgctcattcgtatttccggttctactcctcttccgggcacactggagaattacacttccttg

SEQ ID NO: 6410 - DNA, 122 bp, Homo sapiens
  misc_feature (61)..(62): /note="This region represents a CpG dinucleotide"
  misc_feature (61)..(61): /note="Nucleotide may be methylated to form 5-methylcytosine"
aatattctgggaagtcggcagagtcggaagcaccaggcatctgttttcccacctagacaacgatggcactggcagaatctgtctgatgtaactattatgaaactttgcagtcatttgaaagc

SEQ ID NO: 6411 - DNA, 122 bp, Homo sapiens
  misc_feature (61)..(62): /note="This region represents a CpG dinucleotide"
  misc_feature (61)..(61): /note="Nucleotide may be methylated to form 5-methylcytosine"
atacttatattcttaagcaacatgtggaaacacatcctacagcacgttggccttttaaagcgtctttgaaatggcttcattactcaatgccaaggtttccaacagctggtaagaaggaactg

SEQ ID NO: 6412 - DNA, 122 bp, Homo sapiens
  misc_feature (61)..(62): /note="This region represents a CpG dinucleotide"
  misc_feature (61)..(61): /note="Nucleotide may be methylated to form 5-methylcytosine"
tgcaagcatggtagtagtgccttgaaaaaaaaaaccagtcgatttaagtagtagattgtgcggttcagtagcatggaacaaagttcattgtcatatcctggacagaacatttcttggatctt

SEQ ID NO: 6413 - DNA, 122 bp, Homo sapiens
  misc_feature (61)..(62): /note="This region represents a CpG dinucleotide"
  misc_feature (61)..(61): /note="Nucleotide may be methylated to form 5-methylcytosine"
ctggttgagtaagggaggaggctcgtcctgaacgtgcacagccgctcctaactccgtcaacggaatttcactcaactccgagactgaagcattttattggcagcatttagaatcggggaaaa

SEQ ID NO: 6414 - DNA, 122 bp, Homo sapiens
  misc_feature (61)..(62): /note="This region represents a CpG dinucleotide"
  misc_feature (61)..(61): /note="Nucleotide may be methylated to form 5-methylcytosine"
tgatcgagaatagtggactaaatgcaaacctgtcctgcctgttttgagagcatctccaggcgccaggctcttggtctcctgcaggtgatctcatactatcatagccctaggaggcagcagtg

SEQ ID NO: 6415 - DNA, 122 bp, Homo sapiens
  misc_feature (61)..(62): /note="This region represents a CpG dinucleotide"
  misc_feature (61)..(61): /note="Nucleotide may be methylated to form 5-methylcytosine"
tgtttaaacctctcctggtgttttgtgctcaagaagttggtatcgggttgttttaacagtcgtcatctttatcaagtaatacggaaaaactgggcagagcttttaaagaatgaatgacgatg

SEQ ID NO: 6416 - DNA, 122 bp, Homo sapiens
  misc_feature (61)..(62): /note="This region represents a CpG dinucleotide"
  misc_feature (61)..(61): /note="Nucleotide may be methylated to form 5-methylcytosine"
gctagcaggtctaaattcaaggcatgtgccacatccttgaagaagtgatcgacggccgggcgtggtggctcacgcctgtaatcctagcactttaggaggccgaggcaggaggattgcttgag

SEQ ID NO: 6417 - DNA, 122 bp, Homo sapiens
  misc_feature (61)..(62): /note="This region represents a CpG dinucleotide"
  misc_feature (61)..(61): /note="Nucleotide may be methylated to form 5-methylcytosine"
gagtgggaggtgtggtcactggtccaccaggaagacagctaagggcattcgttgagtccacgtgatgactttctgctctgagtgaggcccctggatggctgggaggaaggaagcagctctgc

SEQ ID NO: 6418 - DNA, 122 bp, Homo sapiens
  misc_feature (61)..(62): /note="This region represents a CpG dinucleotide"
  misc_feature (61)..(61): /note="Nucleotide may be methylated to form 5-methylcytosine"
cgtagggttcctaggttctggcttcactgctctggaggagggtgttgacaatgagtggcacgttgcctgtgcctttgagcaagagagcttttcaaaagcagagatacaggagggttcaggat

SEQ ID NO: 6419 - DNA, 122 bp, Homo sapiens
  misc_feature (61)..(62): /note="This region represents a CpG dinucleotide"
  misc_feature (61)..(61): /note="Nucleotide may be methylated to form 5-methylcytosine"
caaacgggttatgccccatcccctgcttgcttctccagagccacctctcatccccatcctcggcttcagacacgcagttcctcaatcttgcagtgtgtactccaggctttgagcctttccat

SEQ ID NO: 6420 - DNA, 122 bp, Homo sapiens
  misc_feature (61)..(62): /note="This region represents a CpG dinucleotide"
  misc_feature (61)..(61): /note="Nucleotide may be methylated to form 5-methylcytosine"
ggagcagcaggtgctaatgaaatcctctctctggggttccagcctttggattatgagactcgcccagcgcaaagcctcatcattgtcgtggagaatgaggagaggctcgtcttctgtgagag

SEQ ID NO: 6421 - DNA, 122 bp, Homo sapiens
  misc_feature (61)..(62): /note="This region represents a CpG dinucleotide"
  misc_feature (61)..(61): /note="Nucleotide may be methylated to form 5-methylcytosine"
ttttctcctaccttgaggctgacattgcaggtggtaccctgggctaggtcagagcagctccggccatccagaggcctgggaaggaagcacacggggaagagaatgaagtagcctcctcctgt

SEQ ID NO: 6422 - DNA, 122 bp, Homo sapiens
  misc_feature (61)..(62): /note="This region represents a CpG dinucleotide"
  misc_feature (61)..(61): /note="Nucleotide may be methylated to form 5-methylcytosine"
tctttgctgcttctgctgacaattttgtaaggtaattaaattggctgattgaagtcacagcggtcatggggcgataaagaccatttggatttaatggaatttaaaacaacagagcacagaac

SEQ ID NO: 6423 - DNA, 122 bp, Homo sapiens
  misc_feature (61)..(62): /note="This region represents a CpG dinucleotide"
  misc_feature (61)..(61): /note="Nucleotide may be methylated to form 5-methylcytosine"
atcttattatgttacccacactggagtccattggtgcaatcatgactcactgtaccattacgtaacaaactcctaggctcaagcagtcctcctgagtagctgggactacggatgtgcactac

SEQ ID NO: 6424 - DNA, 122 bp, Homo sapiens
  misc_feature (61)..(62): /note="This region represents a CpG dinucleotide"
  misc_feature (61)..(61): /note="Nucleotide may be methylated to form 5-methylcytosine"
tgtagccttctgtgactagcttctttcacttagcatcaggtttctcaggttccttcatgtcgtgatatgacttaactttatcttatgaccgaatagtattccattgtatggatataccacat

SEQ ID NO: 6425 - DNA, 122 bp, Homo sapiens
  misc_feature (61)..(62): /note="This region represents a CpG dinucleotide"
  misc_feature (61)..(61): /note="Nucleotide may be methylated to form 5-methylcytosine"
ctgggaagttatgaactagttgcctcacctctgaatgcactttcaatatatctctttaagcgtttctccttcaaagtgtgcacgatgttatgctttctcagtagagaacaatgtagagacat

SEQ ID NO: 6426 - DNA, 122 bp, Homo sapiens
  misc_feature (61)..(62): /note="This region represents a CpG dinucleotide"
  misc_feature (61)..(61): /note="Nucleotide may be methylated to form 5-methylcytosine"
tttcctgatccacatttcatttgtggttgtcatcctattataaaagttgaatcctcaggccgggcgcggtggcttacgcctgtaatcccagcactttgggaggccgaggcgggcggatcacg

SEQ ID NO: 6427 - DNA, 122 bp, Homo sapiens
  misc_feature (61)..(62): /note="This region represents a CpG dinucleotide"
  misc_feature (61)..(61): /note="Nucleotide may be methylated to form 5-methylcytosine"
gccaagctatttttaacaatcagatctcgagggaaccaataagacaagaactcatgatctcggcaccaagccattcttaagggatgtgccccatgactcaaacacctctcattggccccacc

SEQ ID NO: 6428 - DNA, 122 bp, Homo sapiens
  misc_feature (61)..(62): /note="This region represents a CpG dinucleotide"
  misc_feature (61)..(61): /note="Nucleotide may be methylated to form 5-methylcytosine"
tacatgtctctggaaggtggggctctttatgtcctcaccacacccgagaacgcgagcagccgttgccaggccctgtcggcgggaggagcgtccttggtgacgtgaacacagacctccctctt

SEQ ID NO: 6429 - DNA, 122 bp, Homo sapiens
  misc_feature (61)..(62): /note="This region represents a CpG dinucleotide"
  misc_feature (61)..(61): /note="Nucleotide may be methylated to form 5-methylcytosine"
ggaaagaaaggtcatggagtcactgagtcccacctatggctgagcttgacaaacaagaaacgcagagtaaactccatttcttcaactttgaaactgattccctctctgttaatccctgaagt

SEQ ID NO: 6430 - DNA, 122 bp, Homo sapiens
  misc_feature (61)..(62): /note="This region represents a CpG dinucleotide"
  misc_feature (61)..(61): /note="Nucleotide may be methylated to form 5-methylcytosine"
tgcacagtgattcacttgggacattatctcaggttcctcatgccagtggcaattgtagaacgtgacaaattgtctgacaattgtggtgcttccctataattagagatggtgcttctcctact

SEQ ID NO: 6431 - DNA, 122 bp, Homo sapiens
  misc_feature (61)..(62): /note="This region represents a CpG dinucleotide"
  misc_feature (61)..(61): /note="Nucleotide may be methylated to form 5-methylcytosine"
taagaatccagtatagctttctctatatttcctcttagaattaatgcttgagagaaacaacgggtgcctgacatactggaacctgcccattgctattttctgatgctcttctccgtccaata

SEQ ID NO: 6432 - DNA, 122 bp, Homo sapiens
  misc_feature (61)..(62): /note="This region represents a CpG dinucleotide"
  misc_feature (61)..(61): /note="Nucleotide may be methylated to form 5-methylcytosine"
aaaggagtgagaacattcagatatccttcaaatggaaagggacaatagtgaattcctgatcgggcaatctggggctggcttagaaagcttctaaagcactcctgctctctataccaacctga

SEQ ID NO: 6433 - DNA, 122 bp, Homo sapiens
  misc_feature (61)..(62): /note="This region represents a CpG dinucleotide"
  misc_feature (61)..(61): /note="Nucleotide may be methylated to form 5-methylcytosine"
aatactgcaaaggcaattgcagaatggggtctggattatgttgtcctgacatctgtggatcgagatggttagtgtgtcatcatggcctctaccagaaactggctctaaatgatgacatcatc

SEQ ID NO: 6434 - DNA, 122 bp, Homo sapiens
  misc_feature (61)..(62): /note="This region represents a CpG dinucleotide"
  misc_feature (61)..(61): /note="Nucleotide may be methylated to form 5-methylcytosine"
tccagttctccttgtactttaaatctcactgacttcccttctgcctccagttagtggaaacgccctgcttttaaagggctcacctgactgagtcaggtccacctgcactttctctccatatg

SEQ ID NO: 6435 - DNA, 122 bp, Homo sapiens
  misc_feature (61)..(62): /note="This region represents a CpG dinucleotide"
  misc_feature (61)..(61): /note="Nucleotide may be methylated to form 5-methylcytosine"
gttaaatttttagcaattgaactgcactttatatcagggattatccatgtctacataatacgtggcatattaggcagagtagaataatgcccctccttccccacaagatgtctctgtcctag

SEQ ID NO: 6436 - DNA, 122 bp, Homo sapiens
  misc_feature (61)..(62): /note="This region represents a CpG dinucleotide"
  misc_feature (61)..(61): /note="Nucleotide may be methylated to form 5-methylcytosine"
gacgtggttgccttttcattttgtcctgccccttggcttgttctttctgatccaacacagcggagtctgcttgttcattggccaaatgtcaacaagtcaccataaagggctgccaaggaaaa

SEQ ID NO: 6437 - DNA, 122 bp, Homo sapiens
  misc_feature (61)..(62): /note="This region represents a CpG dinucleotide"
  misc_feature (61)..(61): /note="Nucleotide may be methylated to form 5-methylcytosine"
cctcagctggccagcaggacttgactgcaacctgatttaaagtattaacatacctagggccgggctcagtggtttggtggctcatgcctgtaatcccaacactttcggaggctgacgtgggc

SEQ ID NO: 6438 - DNA, 122 bp, Homo sapiens
  misc_feature (61)..(62): /note="This region represents a CpG dinucleotide"
  misc_feature (61)..(61): /note="Nucleotide may be methylated to form 5-methylcytosine"
ctccagcttgaaagggttttatttagaaagctacgaattggtttttggaagtgtgtcattcgcttcttccctggtgactagatgtatcacgtagtaagaagtaagaatgcaggaaacagaaa

SEQ ID NO: 6439 - DNA, 122 bp, Homo sapiens
  misc_feature (61)..(62): /note="This region represents a CpG dinucleotide"
  misc_feature (61)..(61): /note="Nucleotide may be methylated to form 5-methylcytosine"
aggcgtgagccaccgcgcctgtccagatgtttgggttagaggtcctcaaaaccactcccacgtatgatgattcactaggaggattcacaggactcagcatatagttatactcatggctaagg

SEQ ID NO: 6440 - DNA, 122 bp, Homo sapiens
  misc_feature (61)..(62): /note="This region represents a CpG dinucleotide"
  misc_feature (61)..(61): /note="Nucleotide may be methylated to form 5-methylcytosine"
tgacggttcctgctggccaagaacagcactgggtatttgcatgggcaaagactttaacagcgtgaacaggattttctgaacaagtctggaaataaaatacctaccagctttcagagtaaatt

SEQ ID NO: 6441 - DNA, 122 bp, Homo sapiens
  misc_feature (61)..(62): /note="This region represents a CpG dinucleotide"
  misc_feature (61)..(61): /note="Nucleotide may be methylated to form 5-methylcytosine"
ggtcacagccacacactgtagagagacaagttcacatctggtcattatctgccacactgccgggcagcactgcctttgagtgaatactgactggttgctcaccctgtgatctcaatggtttg

SEQ ID NO: 6442 - DNA, 122 bp, Homo sapiens
  misc_feature (61)..(62): /note="This region represents a CpG dinucleotide"
  misc_feature (61)..(61): /note="Nucleotide may be methylated to form 5-methylcytosine"
catttccctaagcctactgagccctgggtggagactggctacataaagaaaggcttcacacgcttgagagaagttggttcagacctgggaaggcttgtgtcagctcccccttctgctgcgct

SEQ ID NO: 6443 - DNA, 122 bp, Homo sapiens
  misc_feature (61)..(62): /note="This region represents a CpG dinucleotide"
  misc_feature (61)..(61): /note="Nucleotide may be methylated to form 5-methylcytosine"
tgtgctggggctggttttcctccaggacgaccttgctggccacgtgggccaagccgggggcgctcttagaatgtggatctgagcagggagaggtgtgaggtgtcctgagggctgtgggggtg

SEQ ID NO: 6444 - DNA, 122 bp, Homo sapiens
  misc_feature (61)..(62): /note="This region represents a CpG dinucleotide"
  misc_feature (61)..(61): /note="Nucleotide may be methylated to form 5-methylcytosine"
ggggcgtgggccaggagggccccaagactgcaggaggcggatcgggaggttccctatgagcgtccaggcgcacgctgtcgctccagaggctgatgtggagcaggaggcagagggcgcagtga

SEQ ID NO: 6445 - DNA, 122 bp, Homo sapiens
  misc_feature (61)..(62): /note="This region represents a CpG dinucleotide"
  misc_feature (61)..(61): /note="Nucleotide may be methylated to form 5-methylcytosine"
aatgacatgccaacttcattccttttattgccagatcagctccctagaggtcagagtgaccgtgtcacttgtctggtcacagagccagagagaacatgaactgggagatcaggtcagttgga

SEQ ID NO: 6446 - DNA, 122 bp, Homo sapiens
  misc_feature (61)..(62): /note="This region represents a CpG dinucleotide"
  misc_feature (61)..(61): /note="Nucleotide may be methylated to form 5-methylcytosine"
tcccttagagagtcccaaaagctctgagaatactgtaacagaaacctgctaaacctgatgcgtccaaactcatgagaccaggtggcacctactaacatctcaaagaatgggactcctatgga

SEQ ID NO: 6447 - DNA, 122 bp, Homo sapiens
  misc_feature (61)..(62): /note="This region represents a CpG dinucleotide"
  misc_feature (61)..(61): /note="Nucleotide may be methylated to form 5-methylcytosine"
aatggagttttggagctgaatgggcctgagaaagcaagtgagtcagcatcgttttacatgcgaggaagctgaatctcacgaagtgaaattccttgcctaggtcaaatgttagttggcagcaa

SEQ ID NO: 6448 - DNA, 122 bp, Homo sapiens
  misc_feature (61)..(62): /note="This region represents a CpG dinucleotide"
  misc_feature (61)..(61): /note="Nucleotide may be methylated to form 5-methylcytosine"
cctttgagcgcagctggtgcaataaacaggagctcgcagagtcccgtggccgcggaggggcgccagactccggggaagagccagagcgaggtccgacgaatcgggctctgctggcgaccagc

SEQ ID NO: 6449 - DNA, 122 bp, Homo sapiens
  misc_feature (61)..(62): /note="This region represents a CpG dinucleotide"
  misc_feature (61)..(61): /note="Nucleotide may be methylated to form 5-methylcytosine"
tttgggaccttgcaacctgggttggaggaagcctctcacgtaattccgatgtgtgctaaacgtcgcgaaccactggaataatacctatatgtaggtttgtgttaacgtgccatcaattatgt

SEQ ID NO: 6450 - DNA, 122 bp, Homo sapiens
  misc_feature (61)..(62): /note="This region represents a CpG dinucleotide"
  misc_feature (61)..(61): /note="Nucleotide may be methylated to form 5-methylcytosine"
ggccctcatgcctacagttagaggaagggacagaacttgcatgcacaccaggccacctaacgatgacacacaagatgagcattgtcaaccccatgttatggctgagggactcagcctcagag

SEQ ID NO: 6451 - DNA, 122 bp, Homo sapiens
  misc_feature (61)..(62): /note="This region represents a CpG dinucleotide"
  misc_feature (61)..(61): /note="Nucleotide may be methylated to form 5-methylcytosine"
tcttattctgtgaattacataagtgtattgttttacaatttacaaaaaatttccacacaccgtgagtcactggattctcccaacttccctataggacagataaagcagataatttaatattt

SEQ ID NO: 6452 - DNA, 122 bp, Homo sapiens
  misc_feature (61)..(62): /note="This region represents a CpG dinucleotide"
  misc_feature (61)..(61): /note="Nucleotide may be methylated to form 5-methylcytosine"
aacattagccttgttaatttttcagaaatgcacggggggctgtgacaatggggaagcgaccgcagatatgctttactgcagctcagctcttccccagttttaaatgccaccagagcctcagc

SEQ ID NO: 6453 - DNA, 122 bp, Homo sapiens
  misc_feature (61)..(62): /note="This region represents a CpG dinucleotide"
  misc_feature (61)..(61): /note="Nucleotide may be methylated to form 5-methylcytosine"
gctccccttcctttctctctctcccttcccggctcctagactgggtctaggcaggagcttcgccatgatgtcaggagggaaggagatgcctctgggcctcgtaccacagcctcagctctctc

SEQ ID NO: 6454 - DNA, 122 bp, Homo sapiens
  misc_feature (61)..(62): /note="This region represents a CpG dinucleotide"
  misc_feature (61)..(61): /note="Nucleotide may be methylated to form 5-methylcytosine"
atacgtgctcagatccaaactggaggtggaaagggcatatggggagggtgttaagtagaacggcctttggcgaggaaggcatcatagtgatctaattaaaagactagcatccacctgggtat

SEQ ID NO: 6455 - DNA, 122 bp, Homo sapiens
  misc_feature (61)..(62): /note="This region represents a CpG dinucleotide"
  misc_feature (61)..(61): /note="Nucleotide may be methylated to form 5-methylcytosine"
acaggcaggggaatccaaatggaacattgctgaagctaacacaaaactcaaccttgacaccgtaacacattccccgagggtgggactccctcccgcatcacagtcaaatgcagtgtctctaa

SEQ ID NO: 6456 - DNA, 122 bp, Homo sapiens
  misc_feature (61)..(62): /note="This region represents a CpG dinucleotide"
  misc_feature (61)..(61): /note="Nucleotide may be methylated to form 5-methylcytosine"
gcctgagtgaggcatgatgggtctcactcagtttctgggacatctgtctcgatgccctttcgtcaaccccatggctctctcagagcctgtcctcataccttcaactgctccccacccataac

SEQ ID NO: 6457 - DNA, 122 bp, Homo sapiens
  misc_feature (61)..(62): /note="This region represents a CpG dinucleotide"
  misc_feature (61)..(61): /note="Nucleotide may be methylated to form 5-methylcytosine"
tgagaggaaaccaggaacacgggccctggaggtcaagcgaagacttgtcatcacctgcatcgcctgctggaggcagagctcatcagatggagaatgtggattcacactcagaggtcgttggc

SEQ ID NO: 6458 - DNA, 122 bp, Homo sapiens
  misc_feature (61)..(62): /note="This region represents a CpG dinucleotide"
  misc_feature (61)..(61): /note="Nucleotide may be methylated to form 5-methylcytosine"
tagatatgagccactgtgcccggccctcatcagattcttcaagccaccatgacccaaaagcggtaagaattactcatcagcaagtggtaggaaagcaatctgattaaacaaatgcttccggc

SEQ ID NO: 6459 - DNA, 122 bp, Homo sapiens
  misc_feature (61)..(62): /note="This region represents a CpG dinucleotide"
  misc_feature (61)..(61): /note="Nucleotide may be methylated to form 5-methylcytosine"
tcacttggttagtaagtggctgggatgccttgcttggagatgtgtttctagctgcttagacggcatcgcctctcaggcgaggtgctcagtgagtgtcaaaaccaaaagttgagccgggcaca

SEQ ID NO: 6460 - DNA, 122 bp, Homo sapiens
  misc_feature (61)..(62): /note="This region represents a CpG dinucleotide"
  misc_feature (61)..(61): /note="Nucleotide may be methylated to form 5-methylcytosine"
attttcatgtgatgattcacactggcgtatcaggtctaaattgaaagtctgtatttgtatcgccttgtctctgtgtaagtgaggtacttttaactagtttgacatttatccttttagtcttt

SEQ ID NO: 6461 - DNA, 122 bp, Homo sapiens
  misc_feature (61)..(62): /note="This region represents a CpG dinucleotide"
  misc_feature (61)..(61): /note="Nucleotide may be methylated to form 5-methylcytosine"
tctgggtggaccaaggccacgtagtcattgcaggtggtgacattgcccaaggctgagagccgctcctccacccgcctaatctgcactgtgtctgggaggctgttgcgaatgtgttgcagctc

SEQ ID NO: 6462 - DNA, 122 bp, Homo sapiens
  misc_feature (61)..(62): /note="This region represents a CpG dinucleotide"
  misc_feature (61)..(61): /note="Nucleotide may be methylated to form 5-methylcytosine"
agccgctgtctctgccaggtcagactgggaactgtatggtgtgcagagatgtatcagacacgggcctactgcctgagacactggccatcctgttggacaggaatgacacagaaagcagaaac

SEQ ID NO: 6463 - DNA, 122 bp, Homo sapiens
  misc_feature (61)..(62): /note="This region represents a CpG dinucleotide"
  misc_feature (61)..(61): /note="Nucleotide may be methylated to form 5-methylcytosine"
gacatttgcacatgctgcttccacctctatccctagctaactgctactcatctttagcttcgatatgactccttcaggcaagccttccttgacttcccagactaggtcaggttatcccttga

SEQ ID NO: 6464 - DNA, 122 bp, Homo sapiens
  misc_feature (61)..(62): /note="This region represents a CpG dinucleotide"
  misc_feature (61)..(61): /note="Nucleotide may be methylated to form 5-methylcytosine"
agtttcttatctgcttgtcattaagcagatatccacgaatctacacttttgtaccaaacacgtaaaacagatcccctatttatttagatggttatttaatgtcgaaagaaatattaagctta

SEQ ID NO: 6465 - DNA, 122 bp, Homo sapiens
  misc_feature (61)..(62): /note="This region represents a CpG dinucleotide"
  misc_feature (61)..(61): /note="Nucleotide may be methylated to form 5-methylcytosine"
agcaataataccagaatgccaatatcacacaacgcatacctcctgtgcaggctgggctttcgctgtgtttactgacgagccatctttcaaatgaatatttgcttctgtagtagaattgactc

SEQ ID NO: 6466 - DNA, 122 bp, Homo sapiens
  misc_feature (61)..(62): /note="This region represents a CpG dinucleotide"
  misc_feature (61)..(61): /note="Nucleotide may be methylated to form 5-methylcytosine"
atttattaatcaaaccatcaaaccccattatatagttgtaggaactgaggtccatgaaggcgatgtttattgcctaagatcaagcagtgagttagtggtgactcagacacggctaagtagat

SEQ ID NO: 6467 - DNA, 122 bp, Homo sapiens
  misc_feature (61)..(62): /note="This region represents a CpG dinucleotide"
  misc_feature (61)..(61): /note="Nucleotide may be methylated to form 5-methylcytosine"
caggtcacacagcctgtatatatgtcagctgaccttgaaacttggtctagcacaagccctcgatgtgagaggcactctctttcactaatagatgaaccagatttcagttttaaaagcccagt

SEQ ID NO: 6468 - DNA, 122 bp, Homo sapiens
  misc_feature (61)..(62): /note="This region represents a CpG dinucleotide"
  misc_feature (61)..(61): /note="Nucleotide may be methylated to form 5-methylcytosine"
actgctcaattattgttatgctgatactatagatgaagctactgagactcagagaagtcacggcggcagcaagttgcagagctggaaacaaacacaaatctctttgactcccaagctccttc

SEQ ID NO: 6469 - DNA, 122 bp, Homo sapiens
  misc_feature (61)..(62): /note="This region represents a CpG dinucleotide"
  misc_feature (61)..(61): /note="Nucleotide may be methylated to form 5-methylcytosine"
gcccttcctcccagccttgccccgcgcctcctccccgcccctggcttttatgtgttgagacgatgccctcagagccttcatcgctgtggagcaaaggaagccgcctcccacagggagccagg

SEQ ID NO: 6470 - DNA, 122 bp, Homo sapiens
  misc_feature (61)..(62): /note="This region represents a CpG dinucleotide"
  misc_feature (61)..(61): /note="Nucleotide may be methylated to form 5-methylcytosine"
tatatatctggagacattcagctctgtacacacagataagccttaagcttgcagagactgcgtagtattcagttgtccccataccacaatgtgctgtgtctgtcccctattaatggacgtgg

SEQ ID NO: 6471 - DNA, 122 bp, Homo sapiens
  misc_feature (61)..(62): /note="This region represents a CpG dinucleotide"
  misc_feature (61)..(61): /note="Nucleotide may be methylated to form 5-methylcytosine"
ctcatgcattctgcgggtcaggaaatgtggggtatgacttcgcaatatcctgcttcaaggcgtctcacaaagctgcaagccaggtgtctaccagagctggagtctcatctgaaggctcaact

SEQ ID NO: 6472 - DNA, 122 bp, Homo sapiens
  misc_feature (61)..(62): /note="This region represents a CpG dinucleotide"
  misc_feature (61)..(61): /note="Nucleotide may be methylated to form 5-methylcytosine"
acagctcccaaagaggcccggctcaagccccaggcctcgcgtccctaggcttcttgagttcggaaaaaggtcctacaccggcttcggtcataagaagcaaaagcctaggaagcccttggatt

SEQ ID NO: 6473 - DNA, 122 bp, Homo sapiens
  misc_feature (61)..(62): /note="This region represents a CpG dinucleotide"
  misc_feature (61)..(61): /note="Nucleotide may be methylated to form 5-methylcytosine"
gtgagcccaggctggcccagctggctgtgtgggaagggcagaagctgccctggcctttggcgtcagccacgtgcactttgtcagactgccatctgctgagcacttgttagcaattccctctg

SEQ ID NO: 6474 - DNA, 122 bp, Homo sapiens
  misc_feature (61)..(62): /note="This region represents a CpG dinucleotide"
  misc_feature (61)..(61): /note="Nucleotide may be methylated to form 5-methylcytosine"
actgggatcaactgtcaggcctccagccccagaacacattaatgactagaaactcagaagcgatactccagtgatgttccctgtagtccaagcagtttccttgagtgtggccagtttataac

SEQ ID NO: 6475 - DNA, 122 bp, Homo sapiens
  misc_feature (61)..(62): /note="This region represents a CpG dinucleotide"
  misc_feature (61)..(61): /note="Nucleotide may be methylated to form 5-methylcytosine"
aatcactgctaagctctcttcatgtctatctgtaccacagtttcccatcttagactgtgacgtcagctggcaagggctggctgttggccgattcatcatgactgacatggtgtgtcacaaag

SEQ ID NO: 6476 - DNA, 122 bp, Homo sapiens
  misc_feature (61)..(62): /note="This region represents a CpG dinucleotide"
  misc_feature (61)..(61): /note="Nucleotide may be methylated to form 5-methylcytosine"
agaacgagacagtcaccctaggttcctgtttttcatgaccttgttatttgtaagacataacgaggaagacataaagcttccttgttagctgtaagggagacatataaagtaagaactaacga

SEQ ID NO: 6477 - DNA, 122 bp, Homo sapiens
  misc_feature (61)..(62): /note="This region represents a CpG dinucleotide"
  misc_feature (61)..(61): /note="Nucleotide may be methylated to form 5-methylcytosine"
catttgagaaagtcagcaaaatgttttgttagtcttttattcaccattttaagaatataacgtttatccagttggtgtcggataaaatcgggaaagaaaaatatgactgcactatagactca

SEQ ID NO: 6478 - DNA, 122 bp, Homo sapiens
  misc_feature (61)..(62): /note="This region represents a CpG dinucleotide"
  misc_feature (61)..(61): /note="Nucleotide may be methylated to form 5-methylcytosine"
taccatagtccaacaccagtagtcctcgatttatagaaattctactcacctgatggactgcgacacactcccagagtcacacagagttccagagttcattggcacagtgactaatgagtatt

SEQ ID NO: 6479 - DNA, 122 bp, Homo sapiens
  misc_feature (61)..(62): /note="This region represents a CpG dinucleotide"
  misc_feature (61)..(61): /note="Nucleotide may be methylated to form 5-methylcytosine"
aaagggaatctctgcattttgcttgtcagtcctgaggccagtgacagctgtgcttttctacgttactaaaagaaggtttggcatcaatgtttaaaaaaatataaaaaagtgcatctctcatc

SEQ ID NO: 6480 - DNA, 122 bp, Homo sapiens
  misc_feature (61)..(62): /note="This region represents a CpG dinucleotide"
  misc_feature (61)..(61): /note="Nucleotide may be methylated to form 5-methylcytosine"
gagaggccattgaaaggtttcaagccagagaaatgatgtgagctggctgctgcattgaggcgtaaccacaggggattagggcagaaacaacacttaaaaggcttttgcagtaatccaagtga

SEQ ID NO: 6481 - DNA, 122 bp, Homo sapiens
  misc_feature (61)..(62): /note="This region represents a CpG dinucleotide"
  misc_feature (61)..(61): /note="Nucleotide may be methylated to form 5-methylcytosine"
aagcatgtggaattgctgtgactggccagtactgcctttgcctgtagataagatcaggtgcgtccaggatggtatggccgtagattgcctttgcctttagaccaaccttccctgcatactca

SEQ ID NO: 6482 - DNA, 122 bp, Homo sapiens
  misc_feature (61)..(62): /note="This region represents a CpG dinucleotide"
  misc_feature (61)..(61): /note="Nucleotide may be methylated to form 5-methylcytosine"
gtaatctcacaacacaagtcattttggcatccacagtcagatgtcacctggggtcacagtcgcctgtatgcggtggaaagttctaagcagttgcagttgcttttgtgatatgccagttgact

SEQ ID NO: 6483 - DNA, 122 bp, Homo sapiens
  misc_feature (61)..(62): /note="This region represents a CpG dinucleotide"
  misc_feature (61)..(61): /note="Nucleotide may be methylated to form 5-methylcytosine"
tggcctcctggcctctcacccttctccagctccacagggaacagctccaacctctccacacgcttctccagctcgtactcagcagaggctgccatgggatccacatcctcgttgcgacgatc

SEQ ID NO: 6484 - DNA, 122 bp, Homo sapiens
  misc_feature (61)..(62): /note="This region represents a CpG dinucleotide"
  misc_feature (61)..(61): /note="Nucleotide may be methylated to form 5-methylcytosine"
attgtgtgaagggggcgtggctctcacccccagcagtgctgggagcaattggcaaggtgacgcctcctgtctttgcaataccagagaagagcatggactgcaacctctttcccttccttgga

SEQ ID NO: 6485 - DNA, 122 bp, Homo sapiens
  misc_feature (61)..(62): /note="This region represents a CpG dinucleotide"
  misc_feature (61)..(61): /note="Nucleotide may be methylated to form 5-methylcytosine"
ctgtctttcaaaatgacaggcacaagacctgtccctttcactcctgctggtactcagtgacgtacagtcatgcatctttcaacatcaagaatatgttctgagaaatgtgtcatttggtgatt

SEQ ID NO: 6486 - DNA, 122 bp, Homo sapiens
  misc_feature (61)..(62): /note="This region represents a CpG dinucleotide"
  misc_feature (61)..(61): /note="Nucleotide may be methylated to form 5-methylcytosine"
agagagagagagagggagaaatttaaaagtattaagtcacccatcctacctgagcacccacgagctgcagcaatgctgagttcacagggaggagctcaatgtctgtattgatagtggtctgg

SEQ ID NO: 6487 - DNA, 122 bp, Homo sapiens
  misc_feature (61)..(62): /note="This region represents a CpG dinucleotide"
  misc_feature (61)..(61): /note="Nucleotide may be methylated to form 5-methylcytosine"
ccagatatacctgttcgcagagtgtctgtctcagaatcaccctttgacaatacggatacacgtgcacacccatttacaaactcacctatcaagatgtcttttgcttttaatcatcactgtca

SEQ ID NO: 6488 - DNA, 122 bp, Homo sapiens
  misc_feature (61)..(62): /note="This region represents a CpG dinucleotide"
  misc_feature (61)..(61): /note="Nucleotide may be methylated to form 5-methylcytosine"
gtactagaaactaattctcactccactccacagaaacagggctcagcaggctggagtgatcgacaaggcaggtgtagacatgtccaagttcaggagtcatttctagcatcaccacagtctga

SEQ ID NO: 6489 - DNA, 122 bp, Homo sapiens
  misc_feature (61)..(62): /note="This region represents a CpG dinucleotide"
  misc_feature (61)..(61): /note="Nucleotide may be methylated to form 5-methylcytosine"
aaatgaggcacagagtggttgacttgccagtcatcactcactggtaatccatgttagacacgaatcctatcagtctgatcctatagcctagtgaaggttgaatgtcattaactaagtggtaa

SEQ ID NO: 6490 - DNA, 122 bp, Homo sapiens
  misc_feature (61)..(62): /note="This region represents a CpG dinucleotide"
  misc_feature (61)..(61): /note="Nucleotide may be methylated to form 5-methylcytosine"
aagccgcaggaatctcaaacacagcctcatcagccctgcctaactcctttggtggcttgacgtggttaatttcaaacaccttagcagggcttaggctgaacgggcccctcgttgccctccta

SEQ ID NO: 6491 - DNA, 122 bp, Homo sapiens
  misc_feature (61)..(62): /note="This region represents a CpG dinucleotide"
  misc_feature (61)..(61): /note="Nucleotide may be methylated to form 5-methylcytosine"
attcctgaattcattccattacaccatattgctgtgcgtgtgtgtgcacgtgtgtgcttgcgcccgcatgtatgttgaatgggagtgtgggcaggtcagctagaacatcagctgcaattcac

SEQ ID NO: 6492 - DNA, 122 bp, Homo sapiens
  misc_feature (61)..(62): /note="This region represents a CpG dinucleotide"
  misc_feature (61)..(61): /note="Nucleotide may be methylated to form 5-methylcytosine"
actgactgggaacaatgggcaagaacacaggcaaaaatggtagcccaagaaagcaagtgacgtctgtgtgtacagagctgacactgattgttaccagtggctttacagtgctcagagattca

SEQ ID NO: 6493 - DNA, 122 bp, Homo sapiens
  misc_feature (61)..(62): /note="This region represents a CpG dinucleotide"
  misc_feature (61)..(61): /note="Nucleotide may be methylated to form 5-methylcytosine"
acaatgcctagggagatctttgtccagaaaggtgagttcagagagcctgctgtctgaccacgcttccccttccctgggcgcagatccttaaaagtgttaagtgaacactgctgagttcactt

SEQ ID NO: 6494 - DNA, 122 bp, Homo sapiens
  misc_feature (61)..(62): /note="This region represents a CpG dinucleotide"
  misc_feature (61)..(61): /note="Nucleotide may be methylated to form 5-methylcytosine"
acactgtagacactgctggcctattagtcactctgtagccctctgagctctcagatcaaccgttgcagtatcactgtgcctgtgttcaagtaactcttattttacttcataagggcaccaaa

SEQ ID NO: 6495 - DNA, 122 bp, Homo sapiens
  misc_feature (61)..(62): /note="This region represents a CpG dinucleotide"
  misc_feature (61)..(61): /note="Nucleotide may be methylated to form 5-methylcytosine"
taccactcccagcagtaagaaagcatttggtgtttacaataaaatgatttagtgccttagcgaagggaatttagctttcaggaaatggtttaggactcgcagtggattttgctgaataagca

SEQ ID NO: 6496 - DNA, 122 bp, Homo sapiens
  misc_feature (61)..(62): /note="This region represents a CpG dinucleotide"
  misc_feature (61)..(61): /note="Nucleotide may be methylated to form 5-methylcytosine"
ctgtccacctcttagcctgatttgtagtctaaggctcaaacatctcatcaatgagcaacccgcttttgcctccctcctctccgtctgcaggattcagggtcactgatcttattccacaactg

SEQ ID NO: 6497 - DNA, 122 bp, Homo sapiens
  misc_feature (61)..(62): /note="This region represents a CpG dinucleotide"
  misc_feature (61)..(61): /note="Nucleotide may be methylated to form 5-methylcytosine"
atctttgggggcctattagctcaatgccagggtactgaggcaggacaagggctccccaggcgggatgaatacatgaagattcacataatggacagctccaggggttggcaaacaactgccca

SEQ ID NO: 6498 - DNA, 122 bp, Homo sapiens
  misc_feature (61)..(62): /note="This region represents a CpG dinucleotide"
  misc_feature (61)..(61): /note="Nucleotide may be methylated to form 5-methylcytosine"
ggaacccagcaaggatccagctgggttgtaatggaaacaatgcaaccaacaatccttgagcgagccgggatagatgtggcctcatcactgaagatttcatctgagacctctgcaaatatcca

SEQ ID NO: 6499 - DNA, 122 bp, Homo sapiens
  misc_feature (61)..(62): /note="This region represents a CpG dinucleotide"
  misc_feature (61)..(61): /note="Nucleotide may be methylated to form 5-methylcytosine"
cttccacttccagggtgcctttcatcccagcacacctcaaaaccaaacaaccctggcctgcgctcaggatttcccttggccctgggggaggaatgtagccgttgttagcagccccggacccc

SEQ ID NO: 6500 - DNA, 122 bp, Homo sapiens
  misc_feature (61)..(62): /note="This region represents a CpG dinucleotide"
  misc_feature (61)..(61): /note="Nucleotide may be methylated to form 5-methylcytosine"
aaaacagcagtgctgaaaggtatccgtatccacagccacacaaaaaagagaagatcttcacgtcacccacctaaggacagcccaaaacactgctgctgttctggaggcagcccaaatatcct

SEQ ID NO: 6501 - DNA, 122 bp, Homo sapiens
  misc_feature (61)..(62): /note="This region represents a CpG dinucleotide"
  misc_feature (61)..(61): /note="Nucleotide may be methylated to form 5-methylcytosine"
aggcactgacccagaaggctgccacagaaacactgactcatgggccctgttcctgtgtctcgggctcagggataaatttggttacagataccaagcctctagaaaaacaaaagacaaaggta

SEQ ID NO: 6502 - DNA, 122 bp, Homo sapiens
  misc_feature (61)..(62): /note="This region represents a CpG dinucleotide"
  misc_feature (61)..(61): /note="Nucleotide may be methylated to form 5-methylcytosine"
gtgacttgtttctaaccaaaagaatgtggcaagtgatactaagtcacctctgaggttaggcgacaaaggctgtgtacaccctgccttcctctctctagcttgctcactgggatggtagccag

SEQ ID NO: 6503 - DNA, 122 bp, Homo sapiens
  misc_feature (61)..(62): /note="This region represents a CpG dinucleotide"
  misc_feature (61)..(61): /note="Nucleotide may be methylated to form 5-methylcytosine"
gataagatcatttcactcctgagagaggatcttccttctcctaaagcctcctaaacctcacggcccacacccagtctctccgacgtgaagggacgctgtcctaggggcgccggggagcccag

SEQ ID NO: 6504 - DNA, 122 bp, Homo sapiens
  misc_feature (61)..(62): /note="This region represents a CpG dinucleotide"
  misc_feature (61)..(61): /note="Nucleotide may be methylated to form 5-methylcytosine"
ttagcacataattgactctcagtacttctttgcaactggatggctgacttgaatcccaggcgaagaagccttggttttgttcagcatgtaaaagattatcactgaaaggttttgagtagggc

SEQ ID NO: 6505 - DNA, 122 bp, Homo sapiens
  misc_feature (61)..(62): /note="This region represents a CpG dinucleotide"
  misc_feature (61)..(61): /note="Nucleotide may be methylated to form 5-methylcytosine"
gttctcattcctgtcatcttattccattcttaccacagtgctcagaagcagggagggtggcggtttggcaggatagatgtcatctccatgttactaataaggaaactgaggcccagggaagt

SEQ ID NO: 6506 - DNA, 122 bp, Homo sapiens
  misc_feature (61)..(62): /note="This region represents a CpG dinucleotide"
  misc_feature (61)..(61): /note="Nucleotide may be methylated to form 5-methylcytosine"
atttcatccatatcctcagtcctagattaagtaatcttagggcacacttacggcttctgacgttaatgccacctttgtttcctaaagccctgatgatgatggaactgtgcatgttaaagcag

SEQ ID NO: 6507 - DNA, 122 bp, Homo sapiens
  misc_feature (61)..(62): /note="This region represents a CpG dinucleotide"
  misc_feature (61)..(61): /note="Nucleotide may be methylated to form 5-methylcytosine"
acatgtcaaactggcctaccttagccagatgtgatgggtgtggtccagtgttggagagtccggatctgtctcaggattgtgttaatacctggaacatgcacaaagatacatacatacctgga

SEQ ID NO: 6508 - DNA, 122 bp, Homo sapiens
  misc_feature (61)..(62): /note="This region represents a CpG dinucleotide"
  misc_feature (61)..(61): /note="Nucleotide may be methylated to form 5-methylcytosine"
cctttctttattttgcttccactttctaaattcttttatccaccggctgattcattacttcgttgaatctttagggagtgtctccttcatgtcaggaatgcttggtggtcaagacaacgcag

SEQ ID NO: 6509 - DNA, 122 bp, Homo sapiens
  misc_feature (61)..(62): /note="This region represents a CpG dinucleotide"
  misc_feature (61)..(61): /note="Nucleotide may be methylated to form 5-methylcytosine"
tgccccatgagggcccaaatgagggaactggtatgatattcacagagaggtgacatcacccgctgaagatcacacagcaagtccctgggccacctggatcccggccacagctccaccctgct

SEQ ID NO: 6510 - DNA, 122 bp, Homo sapiens
  misc_feature (61)..(62): /note="This region represents a CpG dinucleotide"
  misc_feature (61)..(61): /note="Nucleotide may be methylated to form 5-methylcytosine"
tcctgattggctaaccatggtactggggtgagaaagctgagactagtggtgttgctagagcgaggttgtcttgacttagaagagctgattgtgaaattttcagaaattttgcttgctgatta

SEQ ID NO: 6511 - DNA, 122 bp, Homo sapiens
  misc_feature (61)..(62): /note="This region represents a CpG dinucleotide"
  misc_feature (61)..(61): /note="Nucleotide may be methylated to form 5-methylcytosine"
cttagaaaatggacacagagcttgtccagctaaataaacctgcctgatttggagccatttcgtgttggggattgtttgctactacaccacaccctgggtgatctggcgggtgcattgcctta

SEQ ID NO: 6512 - DNA, 122 bp, Homo sapiens
  misc_feature (61)..(62): /note="This region represents a CpG dinucleotide"
  misc_feature (61)..(61): /note="Nucleotide may be methylated to form 5-methylcytosine"
ctgggaatgacaggggtgtaggccaggaaatggctctgtgaaggctgcctagaactgaatcgaacatgaggatgagtcagtgtcaagactcccagtggggccatcggatcattactgcatga

SEQ ID NO: 6513 - DNA, 122 bp, Homo sapiens
  misc_feature (61)..(62): /note="This region represents a CpG dinucleotide"
  misc_feature (61)..(61): /note="Nucleotide may be methylated to form 5-methylcytosine"
cccggggctctgggagggggaggcatggactgttcctcatttgcctcggatttctcaattcgcattctgccccaggcacgtggaaggtaacactgcaatgggtctcttcatgcagatggggc

SEQ ID NO: 6514 - DNA, 122 bp, Homo sapiens
  misc_feature (61)..(62): /note="This region represents a CpG dinucleotide"
  misc_feature (61)..(61): /note="Nucleotide may be methylated to form 5-methylcytosine"
ccatttgcccttcccagtcaacactgcaccctgccctgcatggcctgaggggaagctgtacgttgcatcccagagaaactgccttgatgaaactgctccaactactcctcttagtcactgct

SEQ ID NO: 6515 - DNA, 122 bp, Homo sapiens
  misc_feature (61)..(62): /note="This region represents a CpG dinucleotide"
  misc_feature (61)..(61): /note="Nucleotide may be methylated to form 5-methylcytosine"
ttcacaccattaacaatgaccagctgtgaagaagcagatcaccccacctgaggacagccccgaaggaagaggtgcttttaccaccacccaaggatgaaagcagtgatttctccttcaaatcc

SEQ ID NO: 6516 - DNA, 122 bp, Homo sapiens
  misc_feature (61)..(62): /note="This region represents a CpG dinucleotide"
  misc_feature (61)..(61): /note="Nucleotide may be methylated to form 5-methylcytosine"
ggtaatacctgtttgcttatccttctttgtccagctctgggatgttaccattccttcaggcgtgctgttttctccttaggcagtcttacacacactcatgacttccttccattgtcctccac

SEQ ID NO: 6517 - DNA, 122 bp, Homo sapiens
  misc_feature (61)..(62): /note="This region represents a CpG dinucleotide"
  misc_feature (61)..(61): /note="Nucleotide may be methylated to form 5-methylcytosine"
gcagcactcagagtggctgagtaacctatccaaggacacccagagggaatgcaaacttaacgtgctcctaacatcttccccgtgctcactccatcctagccatactggcccccttctgttcc

SEQ ID NO: 6518 - DNA, 122 bp, Homo sapiens
  misc_feature (61)..(62): /note="This region represents a CpG dinucleotide"
  misc_feature (61)..(61): /note="Nucleotide may be methylated to form 5-methylcytosine"
ataagatcctagagcattgtatcccaaacctgagtacatactggaatcatctggggatctcgttacaagggcaaatttccaggcaacattccacatctaaagttattatattccctggaggt

SEQ ID NO: 6519 - DNA, 122 bp, Homo sapiens
  misc_feature (61)..(62): /note="This region represents a CpG dinucleotide"
  misc_feature (61)..(61): /note="Nucleotide may be methylated to form 5-methylcytosine"
aaatatgatctcgagtctaagtgtgcagccttataggagcttacatatcctataggcatccgaaagtccagatgccttctcattttgggtggtgtgcttaggtgtattaataccattctctg

SEQ ID NO: 6520 - DNA, 122 bp, Homo sapiens
  misc_feature (61)..(62): /note="This region represents a CpG dinucleotide"
  misc_feature (61)..(61): /note="Nucleotide may be methylated to form 5-methylcytosine"
aaaacctcaaaggattgctcttatgatcagatgagtcaatatacactaaggctcctggaacggtacctggtagttagtggcaaaaccaactatgataatgatgaagtgattcatggaactct

SEQ ID NO: 6521 - DNA, 122 bp, Homo sapiens
  misc_feature (61)..(62): /note="This region represents a CpG dinucleotide"
  misc_feature (61)..(61): /note="Nucleotide may be methylated to form 5-methylcytosine"
caagccaatgcagaatgccatctggaggatgcatgcccaagtcatgcaacagcctcctgtcgggatgtatcaggaactttgcaacagaacaactaataacatcttaagctccatttgtctag

SEQ ID NO: 6522 - DNA, 122 bp, Homo sapiens
  misc_feature (61)..(62): /note="This region represents a CpG dinucleotide"
  misc_feature (61)..(61): /note="Nucleotide may be methylated to form 5-methylcytosine"
acccattttatagacaatgaaagaaaagctcaaaaagcttccatcacttgcccagacttacggtggaaaggattccaaccaagatttgtggaattccctgttcagagctccctccccaacat

SEQ ID NO: 6523 - DNA, 122 bp, Homo sapiens
  misc_feature (61)..(62): /note="This region represents a CpG dinucleotide"
  misc_feature (61)..(61): /note="Nucleotide may be methylated to form 5-methylcytosine"
agttagtaccgggaattccagtttatcctttacgcagtttcccttaatgttgacatcttacgtaacaatgacacaatgatcacaataaagaaattaacattagagcaacagtattaactaac

SEQ ID NO: 6524 - DNA, 122 bp, Homo sapiens
  misc_feature (61)..(62): /note="This region represents a CpG dinucleotide"
  misc_feature (61)..(61): /note="Nucleotide may be methylated to form 5-methylcytosine"
tcagtaaatgtgagctgtcattacctttaggacaaaagcaacatttacaatccagtctctcgcttctctctttttttttgaaacgaagtctcactctgttgcccaggctggagtgcagtggc

SEQ ID NO: 6525 - DNA, 122 bp, Homo sapiens
  misc_feature (61)..(62): /note="This region represents a CpG dinucleotide"
  misc_feature (61)..(61): /note="Nucleotide may be methylated to form 5-methylcytosine"
ccagcacttgtgcactgatgaggaaagggagggacggcccttgtcctcctgtctgtgaaccgggactaaagcccaaggacccagcagggcacttcaccatgaagtggcgggtgtggtccagg

SEQ ID NO: 6526 - DNA, 122 bp, Homo sapiens
  misc_feature (61)..(62): /note="This region represents a CpG dinucleotide"
  misc_feature (61)..(61): /note="Nucleotide may be methylated to form 5-methylcytosine"
ctgctctcccatccccttgaggggcaagaatgatttttaattttttaccgtgtaaatacacgagattaacttagagagttggatttttggctagtaaagcagcaagaatataggtgtgtggg

SEQ ID NO: 6527 - DNA, 122 bp, Homo sapiens
  misc_feature (61)..(62): /note="This region represents a CpG dinucleotide"
  misc_feature (61)..(61): /note="Nucleotide may be methylated to form 5-methylcytosine"
ggagctgtataagtaggaggaaggggaggtgttacagaagccgctgtccatggtgccacacggacacttcagctccagcttgcagagcttgcaggactagggttattaaaagcctgacatgc

SEQ ID NO: 6528 - DNA, 122 bp, Homo sapiens
  misc_feature (61)..(62): /note="This region represents a CpG dinucleotide"
  misc_feature (61)..(61): /note="Nucleotide may be methylated to form 5-methylcytosine"
agctaactcaagcctaaccccttatgaaaggtggatttcctgtacaactgttctgacaagcggaggattaggcacttcatacattctgcttgggtaagagactcacgacagaagtgaatcac

SEQ ID NO: 6529 - DNA, 122 bp, Homo sapiens
  misc_feature (61)..(62): /note="This region represents a CpG dinucleotide"
  misc_feature (61)..(61): /note="Nucleotide may be methylated to form 5-methylcytosine"
tgattcatcccagaacaaaggacgtcttaaaaacctctcattacaggaactctcctcctacgacagagataagtggtaggcctggcagtgaacttaaagagtatcaaacaatcccttgacta

SEQ ID NO: 6530 - DNA, 122 bp, Homo sapiens
  misc_feature (61)..(62): /note="This region represents a CpG dinucleotide"
  misc_feature (61)..(61): /note="Nucleotide may be methylated to form 5-methylcytosine"
caggagtccaccctcttttccattcacatcctgcagaaggaactactgagtcacaaagtacgtgaataaagttgccaaggccatggctcagttctaagctggatggaaacgctttggaaact

SEQ ID NO: 6531 - DNA, 122 bp, Homo sapiens
  misc_feature (61)..(62): /note="This region represents a CpG dinucleotide"
  misc_feature (61)..(61): /note="Nucleotide may be methylated to form 5-methylcytosine"
catgaccccatcctcctggacacagtggattggaacagagatgaaagagacaggaagagacggagacacacatagaggcagagagaggaaaaaagggcaaagccagcaggtagtcagacaaa

SEQ ID NO: 6532 - DNA, 122 bp, Homo sapiens
  misc_feature (61)..(62): /note="This region represents a CpG dinucleotide"
  misc_feature (61)..(61): /note="Nucleotide may be methylated to form 5-methylcytosine"
ataagaatcatgaaagcctgtatggcttgttcagctgggtactggtatgccagcacaggacgtggcagatagtaagcaatcaacaaatatttgtcacaggatgaacgagaggcagacctctg

SEQ ID NO: 6533 - DNA, 122 bp, Homo sapiens
  misc_feature (61)..(62): /note="This region represents a CpG dinucleotide"
  misc_feature (61)..(61): /note="Nucleotide may be methylated to form 5-methylcytosine"
taaaactcctggctgggctggagcctggttgatacaggaagaagtgcaggtgctagaggacgcaccagcttgtgcaataatatcactagcatttgagagctatggtggtgacagcacataca

SEQ ID NO: 6534 - DNA, 122 bp, Homo sapiens
  misc_feature (61)..(62): /note="This region represents a CpG dinucleotide"
  misc_feature (61)..(61): /note="Nucleotide may be methylated to form 5-methylcytosine"
tgtatgaccttggatgagtcacctctcagaacctcacgtactcatctgtaaatgggtcatcgtgagtatgcctttgtcatgggaggttaccagagttaaaggggaaaatggaaagctctttg

SEQ ID NO: 6535 - DNA, 122 bp, Homo sapiens
  misc_feature (61)..(62): /note="This region represents a CpG dinucleotide"
  misc_feature (61)..(61): /note="Nucleotide may be methylated to form 5-methylcytosine"
ttaagcctagcacagagcctggcacaaagtaattgacaaatgtgggaaggactgaacgcacggacgatgcacagcaacatatgcagatgctgatgggaagcaaaactcaggcagaaaaaccg

SEQ ID NO: 6536 - DNA, 122 bp, Homo sapiens
  misc_feature (61)..(62): /note="This region represents a CpG dinucleotide"
  misc_feature (61)..(61): /note="Nucleotide may be methylated to form 5-methylcytosine"
ttgcggcctctcctcccttctcacccatcctgtggcctcagctctgcacctccctggcagcgctcatcttggaagcctcctgaatgtcatcaaaacactggcttctcctttcccaagggagg

SEQ ID NO: 6537 - DNA, 122 bp, Homo sapiens
  misc_feature (61)..(62): /note="This region represents a CpG dinucleotide"
  misc_feature (61)..(61): /note="Nucleotide may be methylated to form 5-methylcytosine"
actggtatgtatgcctgagcaattcttgcttcctttcaagagtatataatcttggccaggcgcggtggcttatgcctgtaatcacagcactgttggaggccaaggtggatggaccggatcac

SEQ ID NO: 6538 - DNA, 122 bp, Homo sapiens
  misc_feature (61)..(62): /note="This region represents a CpG dinucleotide"
  misc_feature (61)..(61): /note="Nucleotide may be methylated to form 5-methylcytosine"
cttaccacatgcaccaaacagactgcaactggcagcccttgcctctttccacacccacagcgagacgccctatgaggaggccaccttgagaagagtcaactctcaactcttcatgccagtaa

SEQ ID NO: 6539 - DNA, 122 bp, Homo sapiens
  misc_feature (61)..(62): /note="This region represents a CpG dinucleotide"
  misc_feature (61)..(61): /note="Nucleotide may be methylated to form 5-methylcytosine"
atcacccaggtgctgctggatgaggaaagacaggccatggcgaaatcccgccggctggagcgcagcaccaacagcttcagttactcatcataccacaccctggaggaggtaggtctggccgg

SEQ ID NO: 6540 - DNA, 122 bp, Homo sapiens
  misc_feature (61)..(62): /note="This region represents a CpG dinucleotide"
  misc_feature (61)..(61): /note="Nucleotide may be methylated to form 5-methylcytosine"
cctgagggatcagaagctggcagggccctggattagggcagcaccacgggtttccataaacgctccttcgtgtctctctttgcatgtcctcagagcgggatgccttcgacacgctgttcgac

SEQ ID NO: 6541 - DNA, 122 bp, Homo sapiens
  misc_feature (61)..(62): /note="This region represents a CpG dinucleotide"
  misc_feature (61)..(61): /note="Nucleotide may be methylated to form 5-methylcytosine"
taaaaatgtgtttctgttaagacacaactagtttcgtaagtcgctctattgcataacatgcggaatctctatatccagtgtgctgctaactagcactcgagaagaagagggggataattaca

SEQ ID NO: 6542 - DNA, 122 bp, Homo sapiens
  misc_feature (61)..(62): /note="This region represents a CpG dinucleotide"
  misc_feature (61)..(61): /note="Nucleotide may be methylated to form 5-methylcytosine"
aggaagcgctgggggccctggaggctaggcgcctggctctcagggaaagtgactgcctaacgcaacacaataggcacattacagcccttgccttagagggagattagggtatctgcctagca

SEQ ID NO: 6543 - DNA, 122 bp, Homo sapiens
  misc_feature (61)..(62): /note="This region represents a CpG dinucleotide"
  misc_feature (61)..(61): /note="Nucleotide may be methylated to form 5-methylcytosine"
caagtattggcccacagaaagagtcactgaaggaaggactactgcatccctaataatgagcggacctgtaataggatttcactgcagtgctgccttattttgtagagaaacctttttagaaa

SEQ ID NO: 6544 - DNA, 122 bp, Homo sapiens
  misc_feature (61)..(62): /note="This region represents a CpG dinucleotide"
  misc_feature (61)..(61): /note="Nucleotide may be methylated to form 5-methylcytosine"
ctgccctgaagcccattagccatgtctgttcactcctgaaccctggttgagggcagagttcgtgttctcgtccaatatttcatgcctgttagagaggttttatctatgcaaagcacacaacc

SEQ ID NO: 6545 - DNA, 122 bp, Homo sapiens
  misc_feature (61)..(62): /note="This region represents a CpG dinucleotide"
  misc_feature (61)..(61): /note="Nucleotide may be methylated to form 5-methylcytosine"
gctgtcttcctagcttgcagacaagtgccttctcaatgtgtcctcacatggcctttcttccgtgcatgagtgaagagaaagctctctggcatcacccttttctcataagggcactaatccta

SEQ ID NO: 6546 - DNA, 122 bp, Homo sapiens
  misc_feature (61)..(62): /note="This region represents a CpG dinucleotide"
  misc_feature (61)..(61): /note="Nucleotide may be methylated to form 5-methylcytosine"
tcttcatcctggggtgtgtgaaacttcctgagactttgcataaatgcttatgtttagtcacgagtttgttggtgaagactatgttaacaactttacagaaagtttggagaatagagaagaaa

SEQ ID NO: 6547 - DNA, 122 bp, Homo sapiens
  misc_feature (61)..(62): /note="This region represents a CpG dinucleotide"
  misc_feature (61)..(61): /note="Nucleotide may be methylated to form 5-methylcytosine"
cttggggaagtcctgacccttatctgactccagtcttgtgtggaatctactgtggaaatgcggaaacttcatgcaattatttctgtttgtgcagctggtttggctggggttgaacgtcttcc

SEQ ID NO: 6548 - DNA, 122 bp, Homo sapiens
  misc_feature (61)..(62): /note="This region represents a CpG dinucleotide"
  misc_feature (61)..(61): /note="Nucleotide may be methylated to form 5-methylcytosine"
tcttcatgctcctccagggcaaactacaccctccttggcaggagcagggagcaagctgagcggtcaaggcagctaaacctgccagccacacagaccagctcacaggactggagagtaatggt

SEQ ID NO: 6549 - DNA, 122 bp, Homo sapiens
  misc_feature (61)..(62): /note="This region represents a CpG dinucleotide"
  misc_feature (61)..(61): /note="Nucleotide may be methylated to form 5-methylcytosine"
tctgcctccaggttccattgccccgcctgtgtcccagcaccccacctgctctggcggccacgccttgctggccctccaatatctgcagcgaggcttcttagagctgttccagcctttcctcc

SEQ ID NO: 6550 - DNA, 122 bp, Homo sapiens
  misc_feature (61)..(62): /note="This region represents a CpG dinucleotide"
  misc_feature (61)..(61): /note="Nucleotide may be methylated to form 5-methylcytosine"
gacacacacccacgtgccctgggctttctggattggcctgcagtgactggcagacagtgacggcagaacaccctgtgacatcacccatgccacggggagctcaccgtgtcacctgctctgac

SEQ ID NO: 6551 - DNA, 122 bp, Homo sapiens
  misc_feature (61)..(62): /note="This region represents a CpG dinucleotide"
  misc_feature (61)..(61): /note="Nucleotide may be methylated to form 5-methylcytosine"
ctcctgcttccctgccccacccctgctgccagtggtgcctctgtgcatggctcacgtggccgagggctagccactgcatgaggacaggcatcctcactgccctgcccagagtgcacataatc

SEQ ID NO: 6552 - DNA, 122 bp, Homo sapiens
  misc_feature (61)..(62): /note="This region represents a CpG dinucleotide"
  misc_feature (61)..(61): /note="Nucleotide may be methylated to form 5-methylcytosine"
tactatttcttctaaaaggactaaatggagtgatactgctggtactggcaagaaccagtacgactcattcagctcaacaacagagtgacaatggcctgtagaaggattcactcacttgagga

SEQ ID NO: 6553 - DNA, 122 bp, Homo sapiens
  misc_feature (61)..(62): /note="This region represents a CpG dinucleotide"
  misc_feature (61)..(61): /note="Nucleotide may be methylated to form 5-methylcytosine"
aaacaacaatacaaatacaaactaacccttgtccagtgagtattacatgccaagaggcaccgttccaagtgctttacatataattaactaatttcagcctcacaaaatccaccctatgggct

SEQ ID NO: 6554 - DNA, 122 bp, Homo sapiens
  misc_feature (61)..(62): /note="This region represents a CpG dinucleotide"
  misc_feature (61)..(61): /note="Nucleotide may be methylated to form 5-methylcytosine"
ctggaatttctgggctcaagtgatcctgtttgagcccaggattacagctgagattacaggcggtcaccaccacagttggcctcattccagttttaaagatgaggaaactaattcagagaggt

SEQ ID NO: 6555 - DNA, 122 bp, Homo sapiens
  misc_feature (61)..(62): /note="This region represents a CpG dinucleotide"
  misc_feature (61)..(61): /note="Nucleotide may be methylated to form 5-methylcytosine"
caccaccaggctatctagttgaaacaggagttatgactggataagtgtcaagaacataaacggaaactgtctctgaagcacagggcataaagcagccttaaagctgaagatggagtagaagc

SEQ ID NO: 6556 - DNA, 122 bp, Homo sapiens
  misc_feature (61)..(62): /note="This region represents a CpG dinucleotide"
  misc_feature (61)..(61): /note="Nucleotide may be methylated to form 5-methylcytosine"
gccccgcatcagctaccgagaggtatccatccttacccccgactgcccatggtgcctacgcggcaacctcacaaccggtctgctgagctgggtggaggagaggttccacccaccccagaagg

SEQ ID NO: 6557 - DNA, 122 bp, Homo sapiens
  misc_feature (61)..(62): /note="This region represents a CpG dinucleotide"
  misc_feature (61)..(61): /note="Nucleotide may be methylated to form 5-methylcytosine"
gaaaattcaatatccaaatgacagacagtggaaattagctgtgattttccctgctctgtgcgaagagctggcatttcctcatttatccattcatccaacaaatatttattgagcaactaata

SEQ ID NO: 6558 - DNA, 122 bp, Homo sapiens
  misc_feature (61)..(62): /note="This region represents a CpG dinucleotide"
  misc_feature (61)..(61): /note="Nucleotide may be methylated to form 5-methylcytosine"
ttaggagggaccacagatggaacggtcatgaaagtctccaaggcatgacatcaaagctgacgacagaaggaagaactcgcaccttggccaggcacagtggctcaggcctataatctcagcac

SEQ ID NO: 6559 - DNA, 122 bp, Homo sapiens
  misc_feature (61)..(62): /note="This region represents a CpG dinucleotide"
  misc_feature (61)..(61): /note="Nucleotide may be methylated to form 5-methylcytosine"
ggaccgcagcgcggcccagccccgggcacccgcctcggacgctcgggcgccaggaggcttcgctggaggggctgggccaaggagattaagaagaaaacgactttctgcaggaggaagagccc

SEQ ID NO: 6560 - DNA, 122 bp, Homo sapiens
  misc_feature (61)..(62): /note="This region represents a CpG dinucleotide"
  misc_feature (61)..(61): /note="Nucleotide may be methylated to form 5-methylcytosine"
tttgtgttttcaaacacacaaacatatttcactacctggcttctcagaactgattcgaagcgataagttggaaagcaacaaggccgtaaaaggagtcaaatgcatacagcaggaaaccacag

SEQ ID NO: 6561 - DNA, 122 bp, Homo sapiens
  misc_feature (61)..(62): /note="This region represents a CpG dinucleotide"
  misc_feature (61)..(61): /note="Nucleotide may be methylated to form 5-methylcytosine"
ctggagaatatattttagcatccctgtgatgaaacttgagggctgtttctgcagtaggtgcgacacttgttgacacgacacgctggggaggccctggcaagggggcctggtgaaatgcagcc

SEQ ID NO: 6562 - DNA, 122 bp, Homo sapiens
  misc_feature (61)..(62): /note="This region represents a CpG dinucleotide"
  misc_feature (61)..(61): /note="Nucleotide may be methylated to form 5-methylcytosine"
aacctctctaatttccttgatgctaagacccttaacatccaaacttctaatcctggtgttcgaggctccccacagttgatcgataacaccacatttggtggtcccctcccctctgcctcttc

SEQ ID NO: 6563 - DNA, 122 bp, Homo sapiens
  misc_feature (61)..(62): /note="This region represents a CpG dinucleotide"
  misc_feature (61)..(61): /note="Nucleotide may be methylated to form 5-methylcytosine"
cttttggaaggaacaggcagagctgcgaggagactctgctgtgttcttccacagaggtggcgcagctgaatcaccagggcttggcccagaaatgtgactgggattccaagcacagcctcttt

SEQ ID NO: 6564 - DNA, 122 bp, Homo sapiens
  misc_feature (61)..(62): /note="This region represents a CpG dinucleotide"
  misc_feature (61)..(61): /note="Nucleotide may be methylated to form 5-methylcytosine"
accagctcacatccaagaagcagcaagccaatatctgatatcatcagggatgaaacaccacgcccattctcagctaacatgatgtgctctcgggtctagctccaatacagtcattctttctg

SEQ ID NO: 6565 - DNA, 122 bp, Homo sapiens
  misc_feature (61)..(62): /note="This region represents a CpG dinucleotide"
  misc_feature (61)..(61): /note="Nucleotide may be methylated to form 5-methylcytosine"
ctggctatggagcttagatgagagtttaagggattggactcagggcagggccagtttctacgtgtttagcaatagggttgattgtgttttcaagcaacctaaacagctttatcagggaatgt

SEQ ID NO: 6566 - DNA, 122 bp, Homo sapiens
  misc_feature (61)..(62): /note="This region represents a CpG dinucleotide"
  misc_feature (61)..(61): /note="Nucleotide may be methylated to form 5-methylcytosine"
catctacatctatatgctaatatgtaccaaactagatggtacacaccgaaatgtctgtaacgctaaatagttgaggatgactcatcatttatttgagatgagaagcttaatgatctgaatgg

SEQ ID NO: 6567 - DNA, 122 bp, Homo sapiens
  misc_feature (61)..(62): /note="This region represents a CpG dinucleotide"
  misc_feature (61)..(61): /note="Nucleotide may be methylated to form 5-methylcytosine"
ctgtgtccctgtcaaatctcatgtaaaattgtaatccccagtgttggaagtggggcctggcgggaagtatttggatcacgagggcagatcattcatgaatggcttaaagccatccccttggt

SEQ ID NO: 6568 - DNA, 122 bp, Homo sapiens
  misc_feature (61)..(62): /note="This region represents a CpG dinucleotide"
  misc_feature (61)..(61): /note="Nucleotide may be methylated to form 5-methylcytosine"
atacagacttacaccatgactaaaggttcttttaatctttgttccctatctctgtctttccgtaaaatggtccatctaaattttcttaccttcctaaagtggaatgaggattatctattaaa

SEQ ID NO: 6569 - DNA, 122 bp, Homo sapiens
  misc_feature (61)..(62): /note="This region represents a CpG dinucleotide"
  misc_feature (61)..(61): /note="Nucleotide may be methylated to form 5-methylcytosine"
tcccgagggcaccttgggtcacatcaaacgccggtacccgcaggtgcggcctgttgtgggcggggcagagaggcggaggcgggactccgggggggtgggggccgggcctagtgtgtgggcgg

SEQ ID NO: 6570 - DNA, 122 bp, Homo sapiens
  misc_feature (61)..(62): /note="This region represents a CpG dinucleotide"
  misc_feature (61)..(61): /note="Nucleotide may be methylated to form 5-methylcytosine"
ctgctgggtgacctgcagagcaacatgctgagcagctgggattaggggcttcctgccaggcgtctgatggcagcacttcgtttaaaccggacaacaaacaaaaacatgtgctcattattttg

SEQ ID NO: 6571 - DNA, 122 bp, Homo sapiens
  misc_feature (61)..(62): /note="This region represents a CpG dinucleotide"
  misc_feature (61)..(61): /note="Nucleotide may be methylated to form 5-methylcytosine"
aaggtacaaaagagtgactccctggttcttggtgttgcaaccccgggatgatgagtcaaccgtgctcgctcagctgagaatactgctctttctctcactgtcctcaaggaagaatgtggaaa

SEQ ID NO: 6572 - DNA, 122 bp, Homo sapiens
  misc_feature (61)..(62): /note="This region represents a CpG dinucleotide"
  misc_feature (61)..(61): /note="Nucleotide may be methylated to form 5-methylcytosine"
ccagctgactcgattctccccagacttcatcctacctacccaaaagcaatcccactctatcgccagtttcagcctcacaccgtatcttttgctctgaagatgagactgccaaactggtgaag

SEQ ID NO: 6573 - DNA, 122 bp, Homo sapiens
  misc_feature (61)..(62): /note="This region represents a CpG dinucleotide"
  misc_feature (61)..(61): /note="Nucleotide may be methylated to form 5-methylcytosine"
gagcctgaggaatgactcaactgatgaaatgacgttgggaaagtcgtgatcatccacaaacggcagggtacatcagcccagccagaaacaggaacttggttcacattccaaggagggcacaa

SEQ ID NO: 6574 - DNA, 122 bp, Homo sapiens
  misc_feature (61)..(62): /note="This region represents a CpG dinucleotide"
  misc_feature (61)..(61): /note="Nucleotide may be methylated to form 5-methylcytosine"
gacttataagactaggtcataaaaggtattgcagctgcctcctcatcctcacacttggatcgcttgcactaggaggagccagctactgtgtcatgaggaactcaagtggccctgtggaaagg

SEQ ID NO: 6575 - DNA, 122 bp, Homo sapiens
  misc_feature (61)..(62): /note="This region represents a CpG dinucleotide"
  misc_feature (61)..(61): /note="Nucleotide may be methylated to form 5-methylcytosine"
caagtggcttatgttttgcacgcattggaaagaagggaaaacaaaagctgtcttagaagacgaaatcaatcacatgaggagtggcactgctccagagagctgaggtcttcctcttaggaatt

SEQ ID NO: 6576 - DNA, 122 bp, Homo sapiens
  misc_feature (61)..(62): /note="This region represents a CpG dinucleotide"
  misc_feature (61)..(61): /note="Nucleotide may be methylated to form 5-methylcytosine"
ctcaagtgatccacctgccttggcctcccaaggtgttgggattacaggcatgagctaccacgcctgacctgattattgttcttgttgcattatttctgactggtggctgtctttaaatctca

SEQ ID NO: 6577 - DNA, 122 bp, Homo sapiens
  misc_feature (61)..(62): /note="This region represents a CpG dinucleotide"
  misc_feature (61)..(61): /note="Nucleotide may be methylated to form 5-methylcytosine"
tgttcgagtgtcattagtaatagcacctcctctctcaaaagtgccttatttgaggctgggcgtggtgactcacacccataatcccagcactttgggaggccagggtgggaggatcacttgaa

SEQ ID NO: 6578 - DNA, 122 bp, Homo sapiens
  misc_feature (61)..(62): /note="This region represents a CpG dinucleotide"
  misc_feature (61)..(61): /note="Nucleotide may be methylated to form 5-methylcytosine"
gtctcatctgatcttgcacagtgaaagctactcatggaagaactcccttagcagggaagccgttagagtgaaatctttcctaacattgactctggtttgtggaagtatatgacatttttctc

SEQ ID NO: 6579 - DNA, 122 bp, Homo sapiens
  misc_feature (61)..(62): /note="This region represents a CpG dinucleotide"
  misc_feature (61)..(61): /note="Nucleotide may be methylated to form 5-methylcytosine"
ttccttgtctcagtttctaggactctattctattatgctatcactagtcctaatgggaggcgacctcatgcccgtcttacccaatagagcagactaggttgagtgctgtacctggaagttcc

SEQ ID NO: 6580 - DNA, 122 bp, Homo sapiens
  misc_feature (61)..(62): /note="This region represents a CpG dinucleotide"
  misc_feature (61)..(61): /note="Nucleotide may be methylated to form 5-methylcytosine"
ttttaagtggtttacgacacacaggaaagaagtcatacttataatttcaaaatcaggcaacgctgcaattcaaattgtatgggaaaaggttttatctaaaagcagagctcacagggctaaga

SEQ ID NO: 6581 - DNA, 122 bp, Homo sapiens
  misc_feature (61)..(62): /note="This region represents a CpG dinucleotide"
  misc_feature (61)..(61): /note="Nucleotide may be methylated to form 5-methylcytosine"
agtgaatgagtgcttcttaatcctaaaaacacaatggctgaattatctttctccatgtggcgctgaatcacccatctggtttggagctagagttgcttcctggtgagagaggaagcaactct

SEQ ID NO: 6582 - DNA, 122 bp, Homo sapiens
  misc_feature (61)..(62): /note="This region represents a CpG dinucleotide"
  misc_feature (61)..(61): /note="Nucleotide may be methylated to form 5-methylcytosine"
ttttctgagtaagggcttgcctctaatcaagtcaaacagaagcctgtgtcactgtcctgacgctataagtagttaaagtcaggctgataaaaatatatggacaaggctatgaatgaaatagg

SEQ ID NO: 6583 - DNA, 122 bp, Homo sapiens
  misc_feature (61)..(62): /note="This region represents a CpG dinucleotide"
  misc_feature (61)..(61): /note="Nucleotide may be methylated to form 5-methylcytosine"
tgagtacgtgtcacgcacgcataacagtcctgggcacatagcacacactgtggggccagccgctgtcagaattctcctgttcctcagtgtgcgggtgggtcggcctaaagagtgctgctttc

SEQ ID NO: 6584 - DNA, 122 bp, Homo sapiens
  misc_feature (61)..(62): /note="This region represents a CpG dinucleotide"
  misc_feature (61)..(61): /note="Nucleotide may be methylated to form 5-methylcytosine"
cttgaatctttcctaggtgatcttaatgtgcagccagggctgagaactgctgggtgtggacggtggagcctggagttagtattctacgagtagacttaattggctttacggtgcattttttt

SEQ ID NO: 6585 - DNA, 122 bp, Homo sapiens
  misc_feature (61)..(62): /note="This region represents a CpG dinucleotide"
  misc_feature (61)..(61): /note="Nucleotide may be methylated to form 5-methylcytosine"
gctggggacgaaactgcagtgaccagtgggtgtggctgggtccagcctccagatctggcccgcacgatgccttgcaggatggacaggatgacagacagggacgaagcagagacctctacaga

SEQ ID NO: 6586 - DNA, 122 bp, Homo sapiens
  misc_feature (61)..(62): /note="This region represents a CpG dinucleotide"
  misc_feature (61)..(61): /note="Nucleotide may be methylated to form 5-methylcytosine"
tcccaatcggccaactgacaacccttccctcgccccagatttgctaggatggtctgggaccgccgggcggcccctctacctgccccttcagctttagtcccgagcctctcggggtttcaatt

SEQ ID NO: 6587 - DNA, 122 bp, Homo sapiens
  misc_feature (61)..(62): /note="This region represents a CpG dinucleotide"
  misc_feature (61)..(61): /note="Nucleotide may be methylated to form 5-methylcytosine"
gggtttagctgtcttgagggctggtgcctgttctgttcattcagcttccctctgatgatgcgtggcagagtgtgggaggacacgtgcctagcatttttacaatatgccttttcttttagccc

SEQ ID NO: 6588 - DNA, 122 bp, Homo sapiens
  misc_feature (61)..(62): /note="This region represents a CpG dinucleotide"
  misc_feature (61)..(61): /note="Nucleotide may be methylated to form 5-methylcytosine"
catgccattgtttacaaggggaattgggtgaataaatgtagacagattacagtaaatccacgttgcctgcaaaagtgactaaggtgtatcctttactgataaagtaaggatgaaatgtggaa

SEQ ID NO: 6589 - DNA, 122 bp, Homo sapiens
  misc_feature (61)..(62): /note="This region represents a CpG dinucleotide"
  misc_feature (61)..(61): /note="Nucleotide may be methylated to form 5-methylcytosine"
tatttagatcctctgtgctctagggagaaggcagtgtctcagctccagccgtggcttactcgctgtaagacctgggccagatgatgtaatctctgcatgtctcagtggctcatcaaaaaaaa

SEQ ID NO: 6590 - DNA, 122 bp, Homo sapiens
  misc_feature (61)..(62): /note="This region represents a CpG dinucleotide"
  misc_feature (61)..(61): /note="Nucleotide may be methylated to form 5-methylcytosine"
tcccagtcaatccatcaggatttaaagaggcaggtgagtctacttaacctgacaccaccacgcagaaaacagattagagtccaaaggagcttttgtgctaagcctgcttctggtattaagac

SEQ ID NO: 6591 - DNA, 122 bp, Homo sapiens
  misc_feature (61)..(62): /note="This region represents a CpG dinucleotide"
  misc_feature (61)..(61): /note="Nucleotide may be methylated to form 5-methylcytosine"
tccagggagggaactgagaagccgcgagggacaggcccccaacggagatgctgatgaggccggcagccttccagcttccagcgccatcttccttgggagtttgggaaactcagtgcctccag

SEQ ID NO: 6592 - DNA, 122 bp, Homo sapiens
  misc_feature (61)..(62): /note="This region represents a CpG dinucleotide"
  misc_feature (61)..(61): /note="Nucleotide may be methylated to form 5-methylcytosine"
tatgacaacttactctggtaggtactgtttttagcttctttaaacagatgcagaaggtggcggtgtagagaggttttaaaaggcaagttcacccacatagtaagtggtatagctggagttgc

SEQ ID NO: 6593 - DNA, 122 bp, Homo sapiens
  misc_feature (61)..(62): /note="This region represents a CpG dinucleotide"
  misc_feature (61)..(61): /note="Nucleotide may be methylated to form 5-methylcytosine"
acatggtgccgtctgagggattcctccatccagtcaggagacaaccccagacaaaaccaacggagaggcactctggagaagacacaccctggagaagacacaccctggagaagacgcacccc

SEQ ID NO: 6594 - DNA, 122 bp, Homo sapiens
  misc_feature (61)..(62): /note="This region represents a CpG dinucleotide"
  misc_feature (61)..(61): /note="Nucleotide may be methylated to form 5-methylcytosine"
tgtacatctgctttggcaatagggaaacggatgatgcaaatttgagtagataaatgcatacgtgtctttaaaaagtctaattagtgggaaattgcaggccaggcgcacacagggttgaggca

SEQ ID NO: 6595 - DNA, 122 bp, Homo sapiens
  misc_feature (61)..(62): /note="This region represents a CpG dinucleotide"
  misc_feature (61)..(61): /note="Nucleotide may be methylated to form 5-methylcytosine"
ggaaaatgttaatttgtactagaaacctctcaaggcaggaaactgatgaaactctagcaacgctaggcagcacatgaagaggaaacaaaagcagaagaaatgaacagttgtaattaattaaa

SEQ ID NO: 6596 - DNA, 122 bp, Homo sapiens
  misc_feature (61)..(62): /note="This region represents a CpG dinucleotide"
  misc_feature (61)..(61): /note="Nucleotide may be methylated to form 5-methylcytosine"
tttaggtcagaaaaagtaggccatcaataactataattagtgcagcatctgtaggatgctcgattctactttaactacatagaataatttaatctcactgaaattataattaaatgagatca

SEQ ID NO: 6597 - DNA, 122 bp, Homo sapiens
  misc_feature (61)..(62): /note="This region represents a CpG dinucleotide"
  misc_feature (61)..(61): /note="Nucleotide may be methylated to form 5-methylcytosine"
ataatcacaaggataataatgaggcaatccttccatttctctcaaactggtcaggcctttcgtggatactcagtccaatctggcaacacaatgtttgagctgcatggagaacttggagaggg

SEQ ID NO: 6598 - DNA, 122 bp, Homo sapiens
  misc_feature (61)..(62): /note="This region represents a CpG dinucleotide"
  misc_feature (61)..(61): /note="Nucleotide may be methylated to form 5-methylcytosine"
actcaaaacacaaactttcaaaaagggaaagtcataaccctctagtcatcagggcaattacggaataacattgctggagtaaggttttctcaatgcccaagagatgagctggcaatgccaca

SEQ ID NO: 6599 - DNA, 122 bp, Homo sapiens
  misc_feature (61)..(62): /note="This region represents a CpG dinucleotide"
  misc_feature (61)..(61): /note="Nucleotide may be methylated to form 5-methylcytosine"
gcttttgtgggtgtccccattcttgtttaatggcatcatcttttatgtagtcatccatgccgcaagtcaccaaatcatcttttaaaaaataagaaaaaaaccttctcttttcgttttataga

SEQ ID NO: 6600 - DNA, 122 bp, Homo sapiens
  misc_feature (61)..(62): /note="This region represents a CpG dinucleotide"
  misc_feature (61)..(61): /note="Nucleotide may be methylated to form 5-methylcytosine"
attttactgatgatgttaccgagacttgaagaatcaaggcacctgcccaactactgagaacgcccaaccaccgagtggtggagccaggactcaactcaagtctgccccacttcaaagcccgt

SEQ ID NO: 6601 - DNA, 122 bp, Homo sapiens
  misc_feature (61)..(62): /note="This region represents a CpG dinucleotide"
  misc_feature (61)..(61): /note="Nucleotide may be methylated to form 5-methylcytosine"
gaaagttgttcacacttggtttcacctctcatcacatgctgagtattgaagccttactggcggtagctgacacagaaatgggtctgctatcagaatatgttcttagtaaatataaagtttga

SEQ ID NO: 6602 - DNA, 122 bp, Homo sapiens
  misc_feature (61)..(62): /note="This region represents a CpG dinucleotide"
  misc_feature (61)..(61): /note="Nucleotide may be methylated to form 5-methylcytosine"
gctgagtctagaaagttgtggagtctcctgttaaaatgcaaccatgcctggattataggacgatgtgatgatgtaacactaagtggaagtaggttccctgtgaaggaggagaggagcagtgc

SEQ ID NO: 6603 - DNA, 122 bp, Homo sapiens
  misc_feature (61)..(62): /note="This region represents a CpG dinucleotide"
  misc_feature (61)..(61): /note="Nucleotide may be methylated to form 5-methylcytosine"
ttgcctgcctctgtgagcgctgtagacctcatatgaggactgctattgttagaggagaagcgtcctgagagactctgctggacttaagtgtggcgagatacatatctgtttcttggagtttc

SEQ ID NO: 6604 - DNA, 122 bp, Homo sapiens
  misc_feature (61)..(62): /note="This region represents a CpG dinucleotide"
  misc_feature (61)..(61): /note="Nucleotide may be methylated to form 5-methylcytosine"
tagagaagcatctagaaacagccacaggcagagcaggtcctgctcagccccctggctggacggctgtcccacgttgaataatgatgatatgtttgtcacagctggccattctgtactactta

SEQ ID NO: 6605 - DNA, 122 bp, Homo sapiens
  misc_feature (61)..(62): /note="This region represents a CpG dinucleotide"
  misc_feature (61)..(61): /note="Nucleotide may be methylated to form 5-methylcytosine"
ccatgaaggaagtttgcttttgtgtctgacttcctcattccaaccccagagaaggaacttcgaaagacagatgaagatgaagcccacatgtcagtcctctgcatattctcaattcttctatc

SEQ ID NO: 6606 - DNA, 122 bp, Homo sapiens
  misc_feature (61)..(62): /note="This region represents a CpG dinucleotide"
  misc_feature (61)..(61): /note="Nucleotide may be methylated to form 5-methylcytosine"
tttaattagaagtgcatgctgcttcagggagactccccactcctgactcaggaatgactgcgagtggaacccccgcctcagggaaaattactacatgggaaaatatgcttgggcctacatga

SEQ ID NO: 6607 - DNA, 122 bp, Homo sapiens
  misc_feature (61)..(62): /note="This region represents a CpG dinucleotide"
  misc_feature (61)..(61): /note="Nucleotide may be methylated to form 5-methylcytosine"
cattgaatatttcactaccttgatgtcttagcaggctgcaatgggagtttctcctgcagacgttgaaggcataagctgccatgttgtgacaagcctgtgagatgccacatgggaagaagctg

SEQ ID NO: 6608 - DNA, 122 bp, Homo sapiens
  misc_feature (61)..(62): /note="This region represents a CpG dinucleotide"
  misc_feature (61)..(61): /note="Nucleotide may be methylated to form 5-methylcytosine"
aacttttaaaaggtccacttcttttcctcatctttgcagctctcactctcaatgagatcacgtataaattgagtcctccttccaaatctcttaccttagaaaggaaactgctattttgctgt

SEQ ID NO: 6609 - DNA, 122 bp, Homo sapiens
  misc_feature (61)..(62): /note="This region represents a CpG dinucleotide"
  misc_feature (61)..(61): /note="Nucleotide may be methylated to form 5-methylcytosine"
tccccttcttgggacagacatcctaagtccagtaattccggtgcttccaataaaaaacaccgcgagtttcttctctgccctaagcaggagcagggggattgcagtgtgagaggcgtcctcct

SEQ ID NO: 6610 - DNA, 122 bp, Homo sapiens
  misc_feature (61)..(62): /note="This region represents a CpG dinucleotide"
  misc_feature (61)..(61): /note="Nucleotide may be methylated to form 5-methylcytosine"
cagtgaactgagaactgccctgcagaattactcataatgcagtacattctccttctcttacggtctcacaaactgcttcctccaaaatggcttttctttataaatccctgttttgtcacact

SEQ ID NO: 6611 - DNA, 122 bp, Homo sapiens
  misc_feature (61)..(62): /note="This region represents a CpG dinucleotide"
  misc_feature (61)..(61): /note="Nucleotide may be methylated to form 5-methylcytosine"
atgtgtcatgatctgttctaggtgtctaacaaacataatctcatttaatcccaataacagcgttagaaatagaccttggagttgtaaggaaaatgagcacttagataaaggatttttcagca

SEQ ID NO: 6612 - DNA, 122 bp, Homo sapiens
  misc_feature (61)..(62): /note="This region represents a CpG dinucleotide"
  misc_feature (61)..(61): /note="Nucleotide may be methylated to form 5-methylcytosine"
agggagacagcccccaggatacccgctaacgaccgagacgcctggatcatcgctggtcaccgtctgtgtgtgtaatctgacgtgatgaaagcaaagtcaaccaacaggcagaacctgcgcct

SEQ ID NO: 6613 - DNA, 122 bp, Homo sapiens
  misc_feature (61)..(62): /note="This region represents a CpG dinucleotide"
  misc_feature (61)..(61): /note="Nucleotide may be methylated to form 5-methylcytosine"
tggcacatttgaagacataaatttgctgtggaacaaaccatacactgttctcaatcttatcgtagcatttgaatggtatgtgtatgcgtgcagtacagggagaagggtgtataggcctgtca

SEQ ID NO: 6614 - DNA, 122 bp, Homo sapiens
  misc_feature (61)..(62): /note="This region represents a CpG dinucleotide"
  misc_feature (61)..(61): /note="Nucleotide may be methylated to form 5-methylcytosine"
tgggatagcagaacccttttttcacccaacaactgttagcagattaggatggctgggcagcgggggaagggtgggggcatactcctttcctataattcccttctctgaacctcatggaattt

SEQ ID NO: 6615 - DNA, 122 bp, Homo sapiens
  misc_feature (61)..(62): /note="This region represents a CpG dinucleotide"
  misc_feature (61)..(61): /note="Nucleotide may be methylated to form 5-methylcytosine"
gtctaaatacatgtttatgtaaccattaactgctggatggtaagcttctgtgcagccctccgtctcttgggattaaaaaaaatgcatccagtcgggcgcggtggctcactcttgtaatccca

SEQ ID NO: 6616 - DNA, 122 bp, Homo sapiens
  misc_feature (61)..(62): /note="This region represents a CpG dinucleotide"
  misc_feature (61)..(61): /note="Nucleotide may be methylated to form 5-methylcytosine"
gatttcctgatcaccatggcaacacacaggggtgggtactgtggtttctctgcctgaagacgcactcgtcaaagactacttggtgttacagaattctggtgcagtgaagcaacagttctggg

SEQ ID NO: 6617 - DNA, 122 bp, Homo sapiens
  misc_feature (61)..(62): /note="This region represents a CpG dinucleotide"
  misc_feature (61)..(61): /note="Nucleotide may be methylated to form 5-methylcytosine"
caccagttgctggtggctgtttcaaaggccactaggagatgctgcttccccatgactgaccgtctacacactcttgttcatatcaattcagatcacaagaatcgacagcgagtgagtgaaca

SEQ ID NO: 6618 - DNA, 122 bp, Homo sapiens
  misc_feature (61)..(62): /note="This region represents a CpG dinucleotide"
  misc_feature (61)..(61): /note="Nucleotide may be methylated to form 5-methylcytosine"
cttgggtcctatgactgctctgccatgttgctttgccgacctcgcccctgggaaggggaccgggcaaggccacttccagagggttgtgggtgatttttttaagggtctgcgggtcccttggg

SEQ ID NO: 6619 - DNA, 122 bp, Homo sapiens
  misc_feature (61)..(62): /note="This region represents a CpG dinucleotide"
  misc_feature (61)..(61): /note="Nucleotide may be methylated to form 5-methylcytosine"
aataatttataggccatcttaaagaagaaatagaagctatcagctatgtatggacttcaccgttgtttttttgtgtttgtagacaagctatcttaggtcactgctttagcaaattaaattag

SEQ ID NO: 6620 - DNA, 122 bp, Homo sapiens
  misc_feature (61)..(62): /note="This region represents a CpG dinucleotide"
  misc_feature (61)..(61): /note="Nucleotide may be methylated to form 5-methylcytosine"
tggcacaaaacaagtgctcaatccttacttgctgaattaacaaattaatgaatccctgaacgtggaagagaagttgttctggaaatgttatagtgcaggtaaaagtggatcaagagcatgta

SEQ ID NO: 6621 - DNA, 122 bp, Homo sapiens
  misc_feature (61)..(62): /note="This region represents a CpG dinucleotide"
  misc_feature (61)..(61): /note="Nucleotide may be methylated to form 5-methylcytosine"
gcctcagcaagaaaagagcaggtctgtgagagcatctaaggcaagaagtggccctggcttcgaagtggaatgttaaattaaaccatttgctgactgataacttgggcaggtggcttcatctc

SEQ ID NO: 6622 - DNA, 122 bp, Homo sapiens
  misc_feature (61)..(62): /note="This region represents a CpG dinucleotide"
  misc_feature (61)..(61): /note="Nucleotide may be methylated to form 5-methylcytosine"
taataggtttaatgatttcataacatttgtctccctccctgtgagatttccttgttacaccgtcttgaacagtttgcaaagcttgctatgatgttcttctagtttatattaaaatattgagg

SEQ ID NO: 6623 - DNA, 122 bp, Homo sapiens
  misc_feature (61)..(62): /note="This region represents a CpG dinucleotide"
  misc_feature (61)..(61): /note="Nucleotide may be methylated to form 5-methylcytosine"
acagagacaaagaaagcattgtggcttagctcttctcaacctacagttccaagacccccccgggaggttttgggtgcagcagctctatgggtatattctgaaatgccactgggctctggtgc

SEQ ID NO: 6624 - DNA, 122 bp, Homo sapiens
  misc_feature (61)..(62): /note="This region represents a CpG dinucleotide"
  misc_feature (61)..(61): /note="Nucleotide may be methylated to form 5-methylcytosine"
cccgcacccttcatgacgtgctgccagagaagccacggagtcgtgctaagtgaccacttccgtgtgaagaaggacactccccggtgccttctggatggatgtcccatgggctccagaatcaa

SEQ ID NO: 6625 - DNA, 122 bp, Homo sapiens
  misc_feature (61)..(62): /note="This region represents a CpG dinucleotide"
  misc_feature (61)..(61): /note="Nucleotide may be methylated to form 5-methylcytosine"
gctggagaaattcccattagaagaatcacaatgaagtctcctaagaatctgacagaaaaccgcatcctctttggtatgtagctgtcattcttttggaaaacagtagtttgattgccactggg

SEQ ID NO: 6626 - DNA, 122 bp, Homo sapiens
  misc_feature (61)..(62): /note="This region represents a CpG dinucleotide"
  misc_feature (61)..(61): /note="Nucleotide may be methylated to form 5-methylcytosine"
gactcttcaacctacaaatggcagccttgcagggaaatgagacggctctcttcaacaatacgtgatattctgttttgtggagataccataactgattaattcctgtgagatgaagcgtactg

SEQ ID NO: 6627 - DNA, 122 bp, Homo sapiens
  misc_feature (61)..(62): /note="This region represents a CpG dinucleotide"
  misc_feature (61)..(61): /note="Nucleotide may be methylated to form 5-methylcytosine"
ttctccaaagacgatgcaatgtttataaaactcaggatgagcttgactcacgataacagacggagcgatcaggggaggcaatgttagctgttatgggctaatttatatcccccaccaaccac

SEQ ID NO: 6628 - DNA, 122 bp, Homo sapiens
  misc_feature (61)..(62): /note="This region represents a CpG dinucleotide"
  misc_feature (61)..(61): /note="Nucleotide may be methylated to form 5-methylcytosine"
tggcgcgggggggggcggggaggcgggctcagtgcaggcgtggcccctccctgtcacctgcgcagtcccctccccaccgggcagcgtccatcacccgcccccatggaccacggaggcccggt

SEQ ID NO: 6629 - DNA, 122 bp, Homo sapiens
  misc_feature (61)..(62): /note="This region represents a CpG dinucleotide"
  misc_feature (61)..(61): /note="Nucleotide may be methylated to form 5-methylcytosine"
agtgtccagttagattgttgcctatgcaactgtctctgaatgagtacttttcctggctgccgagccacacacttgactcatcagccttcttagcgattctgtgagccacgtgatagtcattc

SEQ ID NO: 6630 - DNA, 122 bp, Homo sapiens
  misc_feature (61)..(62): /note="This region represents a CpG dinucleotide"
  misc_feature (61)..(61): /note="Nucleotide may be methylated to form 5-methylcytosine"
cacgatccgccggccttggcctcccaaagtgctgggattacagttgtgagccactgtgcccggccataatctgtatttaaacataaggaaacatcaggccaggcgtggtggctcatgcctgt

SEQ ID NO: 6631 - DNA, 122 bp, Homo sapiens
  misc_feature (61)..(62): /note="This region represents a CpG dinucleotide"
  misc_feature (61)..(61): /note="Nucleotide may be methylated to form 5-methylcytosine"
gactacctaaaagttgtctgagggaggctgtgcactgggtgatcttgtgaggcaggtggacgtctattctgccaagatcttgtgggcccagtttgagaatgggttttaagttttagtccttt

SEQ ID NO: 6632 - DNA, 122 bp, Homo sapiens
  misc_feature (61)..(62): /note="This region represents a CpG dinucleotide"
  misc_feature (61)..(61): /note="Nucleotide may be methylated to form 5-methylcytosine"
attttccgcttcaggacttctttcaccaggcccttgtctgggccctgtttgactttttctcgtccgattaagtacaagcactttggggtaaggagcaggtctcgctttacaccctgtaagga

SEQ ID NO: 6633 - DNA, 122 bp, Homo sapiens
  misc_feature (61)..(62): /note="This region represents a CpG dinucleotide"
  misc_feature (61)..(61): /note="Nucleotide may be methylated to form 5-methylcytosine"
gaggagaggcaaattatctcaacacaccagaacttaggccctttacctgtttgatgagatcgtagaatccatcctgcgagtcacagaggacagtagggaagatcaaatgaagtcatgtaaat

SEQ ID NO: 6634 - DNA, 122 bp, Homo sapiens
  misc_feature (61)..(62): /note="This region represents a CpG dinucleotide"
  misc_feature (61)..(61): /note="Nucleotide may be methylated to form 5-methylcytosine"
acagtcaacaaatgaatagaagggtgtgtgttctctgtccaagtggactccaaacccactcggtgttgttctctctgtgccctgcagggcgcacacagtgtcgtcagcacacggagctcttt

SEQ ID NO: 6635 - DNA, 122 bp, Homo sapiens
  misc_feature (61)..(62): /note="This region represents a CpG dinucleotide"
  misc_feature (61)..(61): /note="Nucleotide may be methylated to form 5-methylcytosine"
tgtcctcttctagctatttcattcagctggctttccagtctatcagaaaaatgccatcatcggctgggtgtggtgactctcacctataatcccaacactttgggaggctgaggtgggcggat

SEQ ID NO: 6636 - DNA, 122 bp, Homo sapiens
  misc_feature (61)..(62): /note="This region represents a CpG dinucleotide"
  misc_feature (61)..(61): /note="Nucleotide may be methylated to form 5-methylcytosine"
ctcaggtgatctgcctgcctcggattcccaaagtgctgggattacaggcatgagccaccgcgcccggcctaagatttgttcttaatgtgatggtgtaattggccagatctggatctgaaatt

SEQ ID NO: 6637 - DNA, 122 bp, Homo sapiens
  misc_feature (61)..(62): /note="This region represents a CpG dinucleotide"
  misc_feature (61)..(61): /note="Nucleotide may be methylated to form 5-methylcytosine"
tgaatggcaccctagccccactgtcttctgggtggcttcaggatccttgaggaggttggccgtgtaggttcccctcaggtaggacctaggtgagctggggagtcttaactcacccagggcag

SEQ ID NO: 6638 - DNA, 122 bp, Homo sapiens
  misc_feature (61)..(62): /note="This region represents a CpG dinucleotide"
  misc_feature (61)..(61): /note="Nucleotide may be methylated to form 5-methylcytosine"
ggtgaagattgaaccaatcatcaaggagcttacacttgacgtgggaatcacgtaagttaccgctaaaccacaaaggtagaccagcctcccacagccacaacctgggcactgagggaggagcc

SEQ ID NO: 6639 - DNA, 122 bp, Homo sapiens
  misc_feature (61)..(62): /note="This region represents a CpG dinucleotide"
  misc_feature (61)..(61): /note="Nucleotide may be methylated to form 5-methylcytosine"
gctaaaacttggctaaaagtcttgctgcccctttgtggacagtttgctaactctccatcccggcgacttcacacctcaggttcttgttgttcacgggtgctatcctgtcttatttcacaaat

SEQ ID NO: 6640 - DNA, 122 bp, Homo sapiens
  misc_feature (61)..(62): /note="This region represents a CpG dinucleotide"
  misc_feature (61)..(61): /note="Nucleotide may be methylated to form 5-methylcytosine"
cagctcttgacaaagcctctaaattataccttttataattccgttattctttttgtgctgcgaagtcttatgctgtgtgttaatgcaaggcaattagctttatcaggaagaaaagaaaaact

SEQ ID NO: 6641 - DNA, 122 bp, Homo sapiens
  misc_feature (61)..(62): /note="This region represents a CpG dinucleotide"
  misc_feature (61)..(61): /note="Nucleotide may be methylated to form 5-methylcytosine"
gagggtgaggtgggcggatcacttgaggtccggagttcaaaaccagcctggccaacatagcgaaaacccatctctacaaaaaacaatagaattagctggccgggcgtgggggctcacgcctg

SEQ ID NO: 6642 - DNA, 122 bp, Homo sapiens
  misc_feature (61)..(62): /note="This region represents a CpG dinucleotide"
  misc_feature (61)..(61): /note="Nucleotide may be methylated to form 5-methylcytosine"
tgggagtgtgcaccctggagtccttgccgtaggatattgactaatagaaaacaactccagcgctgtccagtttaaaatcctcagagaagaacgaggggaaaactgggtaggtacgggtagct

SEQ ID NO: 6643 - DNA, 122 bp, Homo sapiens
  misc_feature (61)..(62): /note="This region represents a CpG dinucleotide"
  misc_feature (61)..(61): /note="Nucleotide may be methylated to form 5-methylcytosine"
aaatatattcttagaatccttactatgcattacttactaaatgccagccatggagataggcgcaaaatgtgaacaatgagcaaaacagaatagtctttgctcactgtgctggtagggcagga

SEQ ID NO: 6644 - DNA, 122 bp, Homo sapiens
  misc_feature (61)..(62): /note="This region represents a CpG dinucleotide"
  misc_feature (61)..(61): /note="Nucleotide may be methylated to form 5-methylcytosine"
tgttgagaacataaggaactggtaatctaggtttacagctgccaaatctaatctaagtatcggtgctctagtttttaatgattttatgtcagactgaataagatcctcattaagctaagggc

SEQ ID NO: 6645 - DNA, 122 bp, Homo sapiens
  misc_feature (61)..(62): /note="This region represents a CpG dinucleotide"
  misc_feature (61)..(61): /note="Nucleotide may be methylated to form 5-methylcytosine"
acaaattgcgctgcattatgtctgaatcatgttctgtgacaagtcatattacaagtggtacggttatattatgcaatgtatgtgataatgtgtgagaacaaacgaagcaggctacgtaaaag

SEQ ID NO: 6646 - DNA, 122 bp, Homo sapiens
  misc_feature (61)..(62): /note="This region represents a CpG dinucleotide"
  misc_feature (61)..(61): /note="Nucleotide may be methylated to form 5-methylcytosine"
agaagttccaggaatcaagttttgaacgcattaatggacttgggaaatgatttgtcagcacgtggaaatgaggacttaggtttcttgtgtaacagcttggctaacaaagcaagtttgtgcct

SEQ ID NO: 6647 - DNA, 122 bp, Homo sapiens
  misc_feature (61)..(62): /note="This region represents a CpG dinucleotide"
  misc_feature (61)..(61): /note="Nucleotide may be methylated to form 5-methylcytosine"
agtaatgtggaaaactatcacttgaatattaagcctaacaagtacctgtcagcacagcagcggaagtttgcagtgacctgaaataccacacccaagggcattaagttcaaaagctaatactg

SEQ ID NO: 6648 - DNA, 122 bp, Homo sapiens
  misc_feature (61)..(62): /note="This region represents a CpG dinucleotide"
  misc_feature (61)..(61): /note="Nucleotide may be methylated to form 5-methylcytosine"
aggcctgattgggaaaaaccctgttccttgtatggatctcaaaactttccttgtcaatcccgccacccaattcagtatttaactgagttaacatgtagccacatgatactagccataatact

SEQ ID NO: 6649 - DNA, 122 bp, Homo sapiens
  misc_feature (61)..(62): /note="This region represents a CpG dinucleotide"
  misc_feature (61)..(61): /note="Nucleotide may be methylated to form 5-methylcytosine"
cagtcctgggaaggggacggtgccggggaggatgtccgcatcctgaaggagagctggctgcgcgggctgtgagtgagacctccctgaccccgcccttttttgttcccctccaggatgctgcc

SEQ ID NO: 6650 - DNA, 122 bp, Homo sapiens
  misc_feature (61)..(62): /note="This region represents a CpG dinucleotide"
  misc_feature (61)..(61): /note="Nucleotide may be methylated to form 5-methylcytosine"
ccccaaaggagagtgagggcagctgggggttcaatcacatagaacataaacctagccatgcgtaagcctcccggaacagaggctctcctgattcacacctcagagctccctgctggctgcag

SEQ ID NO: 6651 - DNA, 122 bp, Homo sapiens
  misc_feature (61)..(62): /note="This region represents a CpG dinucleotide"
  misc_feature (61)..(61): /note="Nucleotide may be methylated to form 5-methylcytosine"
aatcctataagatcagggcccacccttgtgacctcatttaaacttaattgcttccataaacgccctatctccaaatacagttacactgggggttagggcttcagtgtatgaattggaagagg

SEQ ID NO: 6652 - DNA, 122 bp, Homo sapiens
  misc_feature (61)..(62): /note="This region represents a CpG dinucleotide"
  misc_feature (61)..(61): /note="Nucleotide may be methylated to form 5-methylcytosine"
ataagttccctgacagagggagtcacttgtgtgtgtatgtggtatcctttcccatacctgcggtgttgggctcatggcatccacttaatgaacgcttgctgtcagtcattgatttggagtct

SEQ ID NO: 6653 - DNA, 122 bp, Homo sapiens
  misc_feature (61)..(62): /note="This region represents a CpG dinucleotide"
  misc_feature (61)..(61): /note="Nucleotide may be methylated to form 5-methylcytosine"
aaaacagaagccaggtctctttataacctggtgtccaaagtgacagcccatggcttttgccgtagcccattcattagcattgagtcactcagtccatcccacactcaagggagggggttaca

SEQ ID NO: 6654 - DNA, 122 bp, Homo sapiens
  misc_feature (61)..(62): /note="This region represents a CpG dinucleotide"
  misc_feature (61)..(61): /note="Nucleotide may be methylated to form 5-methylcytosine"
ctagtttctaatgagactctctacagccttcgtttcttgcagcatgtctgagtgtccattcgctctgctgaagaaatagtgatgggtgtgatcaaggaatactgcctgagatgagtggtatt

SEQ ID NO: 6655 - DNA, 122 bp, Homo sapiens
  misc_feature (61)..(62): /note="This region represents a CpG dinucleotide"
  misc_feature (61)..(61): /note="Nucleotide may be methylated to form 5-methylcytosine"
tgagtcagagtgagtccaggttcacctgatggccagaatcatgccctttatagtgccccacgacactcacagccctgcagggcagaagggtctataagtggcccctcgcatgattcaagatg

SEQ ID NO: 6656 - DNA, 122 bp, Homo sapiens
  misc_feature (61)..(62): /note="This region represents a CpG dinucleotide"
  misc_feature (61)..(61): /note="Nucleotide may be methylated to form 5-methylcytosine"
atctttaatattcgaatggcacatgtgcatttgaggaaacctagattgcctcaggccacacggaaagcatttacatctgaaccactttacataggattgcaagttaaagcaaattctaaata

SEQ ID NO: 6657 - DNA, 122 bp, Homo sapiens
  misc_feature (61)..(62): /note="This region represents a CpG dinucleotide"
  misc_feature (61)..(61): /note="Nucleotide may be methylated to form 5-methylcytosine"
gatcagggagttgactgcccaaaggtaggatgatcctgcttggaatgaacataacagaggcggcagatgacaaggcaggaggggttaacgacttttccttttatagaaggcggatccagggt

SEQ ID NO: 6658 - DNA, 122 bp, Homo sapiens
  misc_feature (61)..(62): /note="This region represents a CpG dinucleotide"
  misc_feature (61)..(61): /note="Nucleotide may be methylated to form 5-methylcytosine"
gcccaaagtcacacagccaacaggcagggaagctaggaggaagctcagaactgattccagcgccacatcataaccacaatgcggcctcccgagtgtagccacgtcataaccacaatgcgggg

SEQ ID NO: 6659 - DNA, 122 bp, Homo sapiens
  misc_feature (61)..(62): /note="This region represents a CpG dinucleotide"
  misc_feature (61)..(61): /note="Nucleotide may be methylated to form 5-methylcytosine"
tgcaatcccccagcccttgggtggcaacacaaagcacctctcatactataatgctctgggcggccccaggctcagctctaatcgtgcagagcctgacctcgcctcgggggagccggctggac

SEQ ID NO: 6660 - DNA, 122 bp, Homo sapiens
  misc_feature (61)..(62): /note="This region represents a CpG dinucleotide"
  misc_feature (61)..(61): /note="Nucleotide may be methylated to form 5-methylcytosine"
accggtttccctcctctctattttgctctccttgaatccacactctataacattatggcccggactttcagaagcacatctgattatgtcaccttcctaccataaatcatttagcacttctt

SEQ ID NO: 6661 - DNA, 122 bp, Homo sapiens
  misc_feature (61)..(62): /note="This region represents a CpG dinucleotide"
  misc_feature (61)..(61): /note="Nucleotide may be methylated to form 5-methylcytosine"
cagcccttcctcttccccaacctacacatgtcagagttgggtggaaccttagaactcacccgctcatcttctaagtgaggaaatcaagaccagagaggggaagtgattcacccaatctaaca

SEQ ID NO: 6662 - DNA, 122 bp, Homo sapiens
  misc_feature (61)..(62): /note="This region represents a CpG dinucleotide"
  misc_feature (61)..(61): /note="Nucleotide may be methylated to form 5-methylcytosine"
gactttggggttgtatttaatacagctcttgtgatattcttatggaaatgataatccttacgggctaaatggcagaaaaatcaggaagatacatgactaagtaaatacgcctaataatgcag

SEQ ID NO: 6663 - DNA, 122 bp, Homo sapiens
  misc_feature (61)..(62): /note="This region represents a CpG dinucleotide"
  misc_feature (61)..(61): /note="Nucleotide may be methylated to form 5-methylcytosine"
attctgatgcctgctcaagtttagagctgctgggcggtaagcctgggacacggcagttctcgttagtgtgtaatgagagtgatgagggaatcaattagccaattactctaccttggaaaaga

SEQ ID NO: 6664 - DNA, 122 bp, Homo sapiens
  misc_feature (61)..(62): /note="This region represents a CpG dinucleotide"
  misc_feature (61)..(61): /note="Nucleotide may be methylated to form 5-methylcytosine"
accccccaggctagcacagccctaatgcaggaggtctaggggcctactgcctgctgtgatcgtaaccatcagccctcgtgaacctcacccttctgtaattctccctttgaggatgggtggac

SEQ ID NO: 6665 - DNA, 122 bp, Homo sapiens
  misc_feature (61)..(62): /note="This region represents a CpG dinucleotide"
  misc_feature (61)..(61): /note="Nucleotide may be methylated to form 5-methylcytosine"
agcagtgtagcctcttcaggaagtggtgggagtgaacacttagaagatcagaccactgctcgtaacacattccaagaagaaggtagtgggatgaaaggtgagtgactaaatgagaaaccact

SEQ ID NO: 6666 - DNA, 122 bp, Homo sapiens
  misc_feature (61)..(62): /note="This region represents a CpG dinucleotide"
  misc_feature (61)..(61): /note="Nucleotide may be methylated to form 5-methylcytosine"
taattcatggtggaggcaaggcaggcttgctttctctggcattcctctaggcttctcactcgccagcttttggctgcttctgttatctaggccaagcagagtcaatgaccctgagatgtgga

SEQ ID NO: 6667 - DNA, 122 bp, Homo sapiens
  misc_feature (61)..(62): /note="This region represents a CpG dinucleotide"
  misc_feature (61)..(61): /note="Nucleotide may be methylated to form 5-methylcytosine"
cgatcccagcttcattcattttatggcctaatgagtctgccatgtgtatgcaccacagtccgctcatccagtcatcagctgacgggtatgtgggctgctcccactttttggctattgtgaat

SEQ ID NO: 6668 - DNA, 122 bp, Homo sapiens
  misc_feature (61)..(62): /note="This region represents a CpG dinucleotide"
  misc_feature (61)..(61): /note="Nucleotide may be methylated to form 5-methylcytosine"
ctacactaggaaactaagcatccagctgggcaaggtgggagtggcttaggcttagagcaacgtagattcaaatcctgagcctgccactggctggctgtgtgacactgggcgagttctgctca

SEQ ID NO: 6669 - DNA, 122 bp, Homo sapiens
  misc_feature (61)..(62): /note="This region represents a CpG dinucleotide"
  misc_feature (61)..(61): /note="Nucleotide may be methylated to form 5-methylcytosine"
ctgcccattcaggatatgaaggggcagatggtggttggcatgtgttttccctgccagtgccgtcctaaatcagttccagctagtgaccatttgtgccagtggtgccacaggcacggggaaga

SEQ ID NO: 6670 - DNA, 122 bp, Homo sapiens
  misc_feature (61)..(62): /note="This region represents a CpG dinucleotide"
  misc_feature (61)..(61): /note="Nucleotide may be methylated to form 5-methylcytosine"
aatccactcagacatgccccactttcctctggctctttcctccctggctaatgatatcttcgtgtcgtgactgatgacagtagggaaacactggtttgctcatcaactcctgaaatacaaga

SEQ ID NO: 6671 - DNA, 122 bp, Homo sapiens
  misc_feature (61)..(62): /note="This region represents a CpG dinucleotide"
  misc_feature (61)..(61): /note="Nucleotide may be methylated to form 5-methylcytosine"
tgcaaactgcactctttcttcctaactacctgaccttgaggaaaactggtcaatctagaacgctgacaagtttctttttctctctgtcgcccaggctggagcgcagtggtgtgatcttggct

SEQ ID NO: 6672 - DNA, 122 bp, Homo sapiens
  misc_feature (61)..(62): /note="This region represents a CpG dinucleotide"
  misc_feature (61)..(61): /note="Nucleotide may be methylated to form 5-methylcytosine"
gcaagctgcagccgggctcatgcaccaagactggtcaccgtttaagcagccagcatttagcgaggacctcaggcattacctgcttagtttgctctctctgaaatacctctagctgctccacc

SEQ ID NO: 6673 - DNA, 122 bp, Homo sapiens
  misc_feature (61)..(62): /note="This region represents a CpG dinucleotide"
  misc_feature (61)..(61): /note="Nucleotide may be methylated to form 5-methylcytosine"
agggccagctagtcttaggctaaagggatggtatatgggtggacacttggaggggtagttcgcagttatctcttcatccaaagcatgacctgaggccaaagcatgacctgaggccggtcctg

SEQ ID NO: 6674 - DNA, 122 bp, Homo sapiens
  misc_feature (61)..(62): /note="This region represents a CpG dinucleotide"
  misc_feature (61)..(61): /note="Nucleotide may be methylated to form 5-methylcytosine"
ggcagtggaacatgcaaggcactgactgagcatgcaggatcagctccatctcattatgtacgtagatagaggtggagacaggaaaaagactaagccagacgtggtggctcacacctgtaatc

SEQ ID NO: 6675 - DNA, 122 bp, Homo sapiens
  misc_feature (61)..(62): /note="This region represents a CpG dinucleotide"
  misc_feature (61)..(61): /note="Nucleotide may be methylated to form 5-methylcytosine"
gtataagtgatgtggtgagttctaggtatagcccttaactagtttggcaggttgctgcctcggagccacaaactgctatgtaagaagtccaggctactttgctgaagagacaggccaaatag

SEQ ID NO: 6676 - DNA, 122 bp, Homo sapiens
  misc_feature (61)..(62): /note="This region represents a CpG dinucleotide"
  misc_feature (61)..(61): /note="Nucleotide may be methylated to form 5-methylcytosine"
cagattttgtcagcagatagagccttaatgtagtttgggctgggtgcggtggctcaggcccgtaatcccagcactttgggaggccgaggtgggtggatcacctgaggtcaggagttcaagac

SEQ ID NO: 6677 - DNA, 122 bp, Homo sapiens
  misc_feature (61)..(62): /note="This region represents a CpG dinucleotide"
  misc_feature (61)..(61): /note="Nucleotide may be methylated to form 5-methylcytosine"
ccaagcttctccctccaccagcaatggcctgcccgcccaacagcaagtactccctgtgtgcgaagccatgccctgacacctgccattcaggattctccggcatgttctgctcagaccggtgc

SEQ ID NO: 6678 - DNA, 122 bp, Homo sapiens
  misc_feature (61)..(62): /note="This region represents a CpG dinucleotide"
  misc_feature (61)..(61): /note="Nucleotide may be methylated to form 5-methylcytosine"
gcctttgtaaataaagttttattggaacacagccacacccattcatctgtgtcacatctacggctgctttgtcactacaacagcaaagttgagtagttgcagcacagactttgcgtggccca

SEQ ID NO: 6679 - DNA, 122 bp, Homo sapiens
  misc_feature (61)..(62): /note="This region represents a CpG dinucleotide"
  misc_feature (61)..(61): /note="Nucleotide may be methylated to form 5-methylcytosine"
agaatacaattcaggattacgtaagagtggcatatgtgtgtgtgattagcccatagaaggcggaaacccagctgacatggggttagtctcaaagttctactaaggcctaagaacaagaaaca

SEQ ID NO: 6680 - DNA, 122 bp, Homo sapiens
  misc_feature (61)..(62): /note="This region represents a CpG dinucleotide"
  misc_feature (61)..(61): /note="Nucleotide may be methylated to form 5-methylcytosine"
ggtatttcccatcaggactctgttcagagaacatatggagaaattagcactttcagactccgtgttgttaagctgtccctaccaaacacaagcaaacctcctgctatctacaggtctaactg

SEQ ID NO: 6681 - DNA, 122 bp, Homo sapiens
  misc_feature (61)..(62): /note="This region represents a CpG dinucleotide"
  misc_feature (61)..(61): /note="Nucleotide may be methylated to form 5-methylcytosine"
ggcatctgttgctcttataaggtcacttcctttcttggtcacctcttaggcagaggtggccgctcccattctcttgccccataactcacttgtcatagagcctgcttatctgatacatgttg

SEQ ID NO: 6682 - DNA, 122 bp, Homo sapiens
  misc_feature (61)..(62): /note="This region represents a CpG dinucleotide"
  misc_feature (61)..(61): /note="Nucleotide may be methylated to form 5-methylcytosine"
aggccctgccgctgcacgcccagggcatcagtacacatctggacatgtgagggacagtggcgcttggcccttgctgctcctcggagcctgaccactgcccctccctattccacgggacactg

SEQ ID NO: 6683 - DNA, 122 bp, Homo sapiens
  misc_feature (61)..(62): /note="This region represents a CpG dinucleotide"
  misc_feature (61)..(61): /note="Nucleotide may be methylated to form 5-methylcytosine"
gggagagcttggggtgagcacatcccactctgatgccagctgtccctgcggcagaggtggcgccttccaggcctgggagggcccagctcaatggcagtgccttcattttaatctctagttaa

SEQ ID NO: 6684 - DNA, 122 bp, Homo sapiens
  misc_feature (61)..(62): /note="This region represents a CpG dinucleotide"
  misc_feature (61)..(61): /note="Nucleotide may be methylated to form 5-methylcytosine"
gaccccaggagcctcactacctgtccccatagagctcctaaccagatgcaacagtgactgcgtcaccattccccacttttcccaactacgcagtgacaaacctaccagctttaccccacttc

SEQ ID NO: 6685 - DNA, 122 bp, Homo sapiens
  misc_feature (61)..(62): /note="This region represents a CpG dinucleotide"
  misc_feature (61)..(61): /note="Nucleotide may be methylated to form 5-methylcytosine"
gaacagggagaacaagctctacctctccaaggagttctacacggagatccttgagagtgacggtgccatccatctgttcctccttctccaaaagcagcatgaagagccggccttccatgtct

SEQ ID NO: 6686 - DNA, 122 bp, Homo sapiens
  misc_feature (61)..(62): /note="This region represents a CpG dinucleotide"
  misc_feature (61)..(61): /note="Nucleotide may be methylated to form 5-methylcytosine"
gctaccaggatagagagatgaccaaactctagaccgggaacaagtcgaacaagtcagtgacggagaagagctagccactatctctaggtcagagcaaagttctgggttcaatagaagtgcaa

SEQ ID NO: 6687 - DNA, 122 bp, Homo sapiens
  misc_feature (61)..(62): /note="This region represents a CpG dinucleotide"
  misc_feature (61)..(61): /note="Nucleotide may be methylated to form 5-methylcytosine"
gccatgaagcataacagggattaggatgggacaccctggtggccattattctcctaaccacgcaagtcactgtgtaacttggggcaagttacttaacctgtctgagtggcagtttactaatc

SEQ ID NO: 6688 - DNA, 122 bp, Homo sapiens
  misc_feature (61)..(62): /note="This region represents a CpG dinucleotide"
  misc_feature (61)..(61): /note="Nucleotide may be methylated to form 5-methylcytosine"
ctctagttgttatctttcttcatctctgtctggaagactcatcttcatcccagcaacaaacgtaactgagtccaaatagggaacagattactggcttgtgagagagcctcacaggaaccatg

SEQ ID NO: 6689 - DNA, 122 bp, Homo sapiens
  misc_feature (61)..(62): /note="This region represents a CpG dinucleotide"
  misc_feature (61)..(61): /note="Nucleotide may be methylated to form 5-methylcytosine"
gatcaggcagaggatttgaaaaatgactgccaaaattctttctgagctttgctgagtgaacgtggaaggatttagagaagaaatccttaaagatttagtagcattttcacctgggactgttc

SEQ ID NO: 6690 - DNA, 122 bp, Homo sapiens
  misc_feature (61)..(62): /note="This region represents a CpG dinucleotide"
  misc_feature (61)..(61): /note="Nucleotide may be methylated to form 5-methylcytosine"
tctgttacttgcaacagaaacaatttttacttacacaggaaggggaggctccttagaggacgtgggagtattgttaccagaagaccgtacattggatacagggcagaaaaaacaatagattc

SEQ ID NO: 6691 - DNA, 122 bp, Homo sapiens
  misc_feature (61)..(62): /note="This region represents a CpG dinucleotide"
  misc_feature (61)..(61): /note="Nucleotide may be methylated to form 5-methylcytosine"
gagcaaaactcaagaaagccaaataaaagcatattcagcaaaaacaagaaactccacaaccgccaataccggagggtggagtcaccaccagtgtcggcctgagaaatgcagacacactaccc

SEQ ID NO: 6692 - DNA, 122 bp, Homo sapiens
  misc_feature (61)..(62): /note="This region represents a CpG dinucleotide"
  misc_feature (61)..(61): /note="Nucleotide may be methylated to form 5-methylcytosine"
tttttataagagaaattgcttttattccaggtactattgttgcataaccaccaccctgaacgtagtggtgtaaacaacagccgcttgactgtgctcagggattctttggaccttggacgggg

SEQ ID NO: 6693 - DNA, 122 bp, Homo sapiens
  misc_feature (61)..(62): /note="This region represents a CpG dinucleotide"
  misc_feature (61)..(61): /note="Nucleotide may be methylated to form 5-methylcytosine"
atagaaaatgttggtcagaagcactacaagtctcccaataagagaatctaggagacctgacgtttaacacttaggcttttggagataaaagtttcagagctaaaattctatctaaactatca

SEQ ID NO: 6694 - DNA, 122 bp, Homo sapiens
  misc_feature (61)..(62): /note="This region represents a CpG dinucleotide"
  misc_feature (61)..(61): /note="Nucleotide may be methylated to form 5-methylcytosine"
agaattggcttctaatgtgcctgacattaggatcacctgggtatcttttacaacctccaacgctcaggccacacccagacctattgaatcagaatctctgggttagaaaacaggcatcagta

SEQ ID NO: 6695 - DNA, 122 bp, Homo sapiens
  misc_feature (61)..(62): /note="This region represents a CpG dinucleotide"
  misc_feature (61)..(61): /note="Nucleotide may be methylated to form 5-methylcytosine"
ccgagcagcgggatctggggtcggcagttgctccatctccagctctttcaaggaattgagcgtggagtctggcaatttcaacagagtatatcttcttctatacctgaatgaaggattattct

SEQ ID NO: 6696 - DNA, 122 bp, Homo sapiens
  misc_feature (61)..(62): /note="This region represents a CpG dinucleotide"
  misc_feature (61)..(61): /note="Nucleotide may be methylated to form 5-methylcytosine"
tatgagttttcacttcccttttcttctaaggttttgcttggaatctgccatcagcaatgccgaggcctggccttggtggaaatggaggtgctgcttaacttttcttccaaaacatagtacaa

SEQ ID NO: 6697 - DNA, 122 bp, Homo sapiens
  misc_feature (61)..(62): /note="This region represents a CpG dinucleotide"
  misc_feature (61)..(61): /note="Nucleotide may be methylated to form 5-methylcytosine"
tttgcatggagcagcagtgcattagctactttcaaaacatctgactgatcccagattacacgagacaaaggcctggatcctttgcctttagacaggtgcataatagtgtgaattttctgaaa

SEQ ID NO: 6698 - DNA, 122 bp, Homo sapiens
  misc_feature (61)..(62): /note="This region represents a CpG dinucleotide"
  misc_feature (61)..(61): /note="Nucleotide may be methylated to form 5-methylcytosine"
ttccttttttgaagcaagatcttgctctcttgcccaggtcggagtgcagtggcatgaccacggctcagtgcaggcttgacttccagggctcaagcaatactcgcacctcaggttttccagta

SEQ ID NO: 6699 - DNA, 122 bp, Homo sapiens
  misc_feature (61)..(62): /note="This region represents a CpG dinucleotide"
  misc_feature (61)..(61): /note="Nucleotide may be methylated to form 5-methylcytosine"
aaaatcctataatccatacaaccattaaatggcaataaatactaagcttactataaatcacgtactgtgctacatactgggaatttaaaaagaaaaaataaagattaaaacagagtccctac

SEQ ID NO: 6700 - DNA, 122 bp, Homo sapiens
  misc_feature (61)..(62): /note="This region represents a CpG dinucleotide"
  misc_feature (61)..(61): /note="Nucleotide may be methylated to form 5-methylcytosine"
ttcttatccctaggtttatttgtatttcctatctattgcctttgtaaaaaacagagaaaacgatcacggacaggtatgcactggtaacatgcagatgatttcatccagctaagctggttgga

SEQ ID NO: 6701 - DNA, 122 bp, Homo sapiens
  misc_feature (61)..(62): /note="This region represents a CpG dinucleotide"
  misc_feature (61)..(61): /note="Nucleotide may be methylated to form 5-methylcytosine"
gtttttgctttccagatgctcgggagccattctgcaggcaagcagacctatttgcagggacgggcaattgttgctgtggtgcaatgaagcaagtggggctgggaaagaatccttaagaagat

SEQ ID NO: 6702 - DNA, 122 bp, Homo sapiens
  misc_feature (61)..(62): /note="This region represents a CpG dinucleotide"
  misc_feature (61)..(61): /note="Nucleotide may be methylated to form 5-methylcytosine"
ggccggagacaaagtgcatcaccaggacatgtccagccctgcttcagccgcaccaacatgcgtgaccacctggaaacacctggccccactctggccacccagggttggtgggggttctgcca

SEQ ID NO: 6703 - DNA, 122 bp, Homo sapiens
  misc_feature (61)..(62): /note="This region represents a CpG dinucleotide"
  misc_feature (61)..(61): /note="Nucleotide may be methylated to form 5-methylcytosine"
tgatgcaacaaggaggaatcacctacatcaaggccagcaaactagtttggtaaaggccagcgagtcagcattttaggctttgtgggccagtctctgtctctgcgacagtctgtcacaactat

SEQ ID NO: 6704 - DNA, 122 bp, Homo sapiens
  misc_feature (61)..(62): /note="This region represents a CpG dinucleotide"
  misc_feature (61)..(61): /note="Nucleotide may be methylated to form 5-methylcytosine"
gtaggcaggtgaatacggttttattcagcagcagctgtcattgacaacttacttacactacgttacagtatgcacctttatcttggctgtctgctctggctctatggctccttctgccctca

SEQ ID NO: 6705 - DNA, 122 bp, Homo sapiens
  misc_feature (61)..(62): /note="This region represents a CpG dinucleotide"
  misc_feature (61)..(61): /note="Nucleotide may be methylated to form 5-methylcytosine"
aaccaggctgtgcgctcttcatggcaggtgctggctattactgagaccagccatctggttcgttccttccacaaacaagtggaacaagtttgttgttgttgtttttgaggcagagtctcact

SEQ ID NO: 6706 - DNA, 122 bp, Homo sapiens
  misc_feature (61)..(62): /note="This region represents a CpG dinucleotide"
  misc_feature (61)..(61): /note="Nucleotide may be methylated to form 5-methylcytosine"
gtccttcatcgaggagcgccgggcaagggagaaccggctcaaccagcagaagaagctgatcgacaagatccacacgaaggagaccagcgagaagtaccgccgggtaagccccaggccagggc

SEQ ID NO: 6707 - DNA, 122 bp, Homo sapiens
  misc_feature (61)..(62): /note="This region represents a CpG dinucleotide"
  misc_feature (61)..(61): /note="Nucleotide may be methylated to form 5-methylcytosine"
ggcacttctctaagcagcaccatgctgtataaaacaggcatagggctcacatcaggcatacggctcacatcagcacacaatggccacgcggctcacaccaggcgcatggcacgtgacaggca

SEQ ID NO: 6708 - DNA, 122 bp, Homo sapiens
  misc_feature (61)..(62): /note="This region represents a CpG dinucleotide"
  misc_feature (61)..(61): /note="Nucleotide may be methylated to form 5-methylcytosine"
tcccaccccagtctcccaagcaactgggactactctactttttttgcagagatagggtttcgccatgttgcccaggctggtctcaaactcctgagctcaagcaattctcctgcctcggcctg

SEQ ID NO: 6709 - DNA, 122 bp, Homo sapiens
  misc_feature (61)..(62): /note="This region represents a CpG dinucleotide"
  misc_feature (61)..(61): /note="Nucleotide may be methylated to form 5-methylcytosine"
agtgaagtgtcatcaaattacttaaccattgtcagtaggccgcctgtgctatttcacctgcgttaacaatcgtctagaacttgcctaatgttcctcattcttgtgctttctttactcttgag

SEQ ID NO: 6710 - DNA, 122 bp, Homo sapiens
  misc_feature (61)..(62): /note="This region represents a CpG dinucleotide"
  misc_feature (61)..(61): /note="Nucleotide may be methylated to form 5-methylcytosine"
atatgccaaacactaagctacgtgtttcacgtaggtcatttcacaggatcctgaaaacaacgctttccttaatatctccattttgcagaagaggaaagggaggctcacaggatgtggaactc

SEQ ID NO: 6711 - DNA, 122 bp, Homo sapiens
  misc_feature (61)..(62): /note="This region represents a CpG dinucleotide"
  misc_feature (61)..(61): /note="Nucleotide may be methylated to form 5-methylcytosine"
tatagtaattagagttataccaacagagctgctcttatgtatactttgatttccctgagtcgtgtatataaatgacattggaaactctcggtgttatgaaccagcagattttacatatcaga

SEQ ID NO: 6712 - DNA, 122 bp, Homo sapiens
  misc_feature (61)..(62): /note="This region represents a CpG dinucleotide"
  misc_feature (61)..(61): /note="Nucleotide may be methylated to form 5-methylcytosine"
ataggcactagtgggaggagaataaaagggagatgcattaattcctggtatgacaaactacgtgatagaactagagcagtggtctgaaaactttttctgtgaaaggccacatagtaaatatt

SEQ ID NO: 6713 - DNA, 122 bp, Homo sapiens
  misc_feature (61)..(62): /note="This region represents a CpG dinucleotide"
  misc_feature (61)..(61): /note="Nucleotide may be methylated to form 5-methylcytosine"
agccactgagcccggcccagtctttttcttaaaaaatctgctcacaattccaattatttgcgcaatgctgtactaagtacaagagaaaggtgtttcctctcagccaggacagaaggtaggaa

SEQ ID NO: 6714 - DNA, 122 bp, Homo sapiens
  misc_feature (61)..(62): /note="This region represents a CpG dinucleotide"
  misc_feature (61)..(61): /note="Nucleotide may be methylated to form 5-methylcytosine"
ctgaagcagagacatccaaggagggccctagacgtggatgtttcctattgtactttcttccgcgttgtcttctcagtagttcttttcctggcatcacaacttctgtttttatagtatatctg

SEQ ID NO: 6715 - DNA, 122 bp, Homo sapiens
  misc_feature (61)..(62): /note="This region represents a CpG dinucleotide"
  misc_feature (61)..(61): /note="Nucleotide may be methylated to form 5-methylcytosine"
aaatttatcttaaagttattggcaggtcagaagcctgatacggatctcattgggctaaaacgaaggagttggcagggctgtgtgttcctttctgtaggctctgggcaggatccatttcctgc

SEQ ID NO: 6716 - DNA, 122 bp, Homo sapiens
  misc_feature (61)..(62): /note="This region represents a CpG dinucleotide"
  misc_feature (61)..(61): /note="Nucleotide may be methylated to form 5-methylcytosine"
ccaagctggatgaagatgagctgtaactggtgaaaaccatgggggtggtgctgactcagccgcctattccccaaggagcttcagggcagtccttctggcactgctccagaattcctccttct

SEQ ID NO: 6717 - DNA, 122 bp, Homo sapiens
  misc_feature (61)..(62): /note="This region represents a CpG dinucleotide"
  misc_feature (61)..(61): /note="Nucleotide may be methylated to form 5-methylcytosine"
ctctcatgtgtcttcaccctgccctcctctttggccctaaccacatttgagctctcatcgcgtcatgccttaggtgtctcaatagctcctggcatgactccctgctttagcttctgccttaa

SEQ ID NO: 6718 - DNA, 122 bp, Homo sapiens
  misc_feature (61)..(62): /note="This region represents a CpG dinucleotide"
  misc_feature (61)..(61): /note="Nucleotide may be methylated to form 5-methylcytosine"
aacttctcatcattatctgacccaccaactgtaaagttggatgtacacagcagcaatccacgtggtttatccaagatcaggctcaaccagattttgaagccacaagtaagttgcatgggctt

SEQ ID NO: 6719 - DNA, 122 bp, Homo sapiens
  misc_feature (61)..(62): /note="This region represents a CpG dinucleotide"
  misc_feature (61)..(61): /note="Nucleotide may be methylated to form 5-methylcytosine"
tgttgctggggagctcagactactcaaggccatggtgctgggagactccatatctgggtacggatatttagtctaagcaggcctcaggtcatgggaccctctagttgactctgctaacaaag

SEQ ID NO: 6720 - DNA, 122 bp, Homo sapiens
  misc_feature (61)..(62): /note="This region represents a CpG dinucleotide"
  misc_feature (61)..(61): /note="Nucleotide may be methylated to form 5-methylcytosine"
ttcattgctctccagcacatgctaagaatttagcttccaccgccttaagtaaacactctgcgataccagtcctaaaaaagtcactgtggcaggggctgtggtgcttgtgaacattccatctg

SEQ ID NO: 6721 - DNA, 122 bp, Homo sapiens
  misc_feature (61)..(62): /note="This region represents a CpG dinucleotide"
  misc_feature (61)..(61): /note="Nucleotide may be methylated to form 5-methylcytosine"
cttgatctcctgacctcgtgatcctcccactttggcctcccaaagtgctgggattacaggcgtgagccaccatgcctgacctgtttaatgtttaaaatatgccgtaaagaaaatccagctgg

SEQ ID NO: 6722 - DNA, 122 bp, Homo sapiens
  misc_feature (61)..(62): /note="This region represents a CpG dinucleotide"
  misc_feature (61)..(61): /note="Nucleotide may be methylated to form 5-methylcytosine"
atagcactcatttctaccaagtatctatgcatttgttttctgattacaatgttagttccacgacagaagggttttagtcttcagctatgtatccctggaaaagagcctgggggccaggtgtg

SEQ ID NO: 6723 - DNA, 122 bp, Homo sapiens
  misc_feature (61)..(62): /note="This region represents a CpG dinucleotide"
  misc_feature (61)..(61): /note="Nucleotide may be methylated to form 5-methylcytosine"
aggagctggggaacctgggagctgtgctctgtctgggagcgcgctgcggctctggctcagcgtccttgaggataaagaaggaacatgcctaactttgcccatttgcatttcatatccatcat

SEQ ID NO: 6724 - DNA, 122 bp, Homo sapiens
  misc_feature (61)..(62): /note="This region represents a CpG dinucleotide"
  misc_feature (61)..(61): /note="Nucleotide may be methylated to form 5-methylcytosine"
aaatttggggactgctgaatgacagaaagtacagtcaacttctttattgcaggatttctccgagcctttgatatacagttgtgctttccggattgtcaagactgggatgcagggtacagctc

SEQ ID NO: 6725 - DNA, 122 bp, Homo sapiens
  misc_feature (61)..(62): /note="This region represents a CpG dinucleotide"
  misc_feature (61)..(61): /note="Nucleotide may be methylated to form 5-methylcytosine"
ttatttcctttgagagactgcttcttacccttggcaaaatctttgagtcattactccacgcgctaggtggagcaatagcctgaatctgagtttttccagtgtgaaactactgccctattaga

SEQ ID NO: 6726 - DNA, 122 bp, Homo sapiens
  misc_feature (61)..(62): /note="This region represents a CpG dinucleotide"
  misc_feature (61)..(61): /note="Nucleotide may be methylated to form 5-methylcytosine"
gcaaatgcaatagaccatctgtaaaaggaagctgttgatctgacttccagagcatgctggcgacaaggttgaagggacaggacagagctcctactactaaaatgaatggcaatgtcattttc

SEQ ID NO: 6727 - DNA, 122 bp, Homo sapiens
  misc_feature (61)..(62): /note="This region represents a CpG dinucleotide"
  misc_feature (61)..(61): /note="Nucleotide may be methylated to form 5-methylcytosine"
gagacagacaaacttctgggtgccattggcagagggcagccaggtcacagagtcatccaacgttatgaagaaattagcccagatagtaaaacccaggacagctttaccatgagcaggccagt

SEQ ID NO: 6728 - DNA, 122 bp, Homo sapiens
  misc_feature (61)..(62): /note="This region represents a CpG dinucleotide"
  misc_feature (61)..(61): /note="Nucleotide may be methylated to form 5-methylcytosine"
cttaacaacactcactgtttcttccagaggttatgagtcagacatgaactgggagaaaggcgaaggccagcccttcgaatactttgtttatggagctgcctgttccgaggttgaaatagact

SEQ ID NO: 6729 - DNA, 122 bp, Homo sapiens
  misc_feature (61)..(62): /note="This region represents a CpG dinucleotide"
  misc_feature (61)..(61): /note="Nucleotide may be methylated to form 5-methylcytosine"
ctaacactagagccttttaaagccaagcttaacactccctttgtgctttgcagcaagtaacgtgaaacaaatctcttttctcagaaagcaatctccttttgaatcctctgtcagagtaaaaa

SEQ ID NO: 6730 - DNA, 122 bp, Homo sapiens
  misc_feature (61)..(62): /note="This region represents a CpG dinucleotide"
  misc_feature (61)..(61): /note="Nucleotide may be methylated to form 5-methylcytosine"
atctgcaaaagtacatattgaaatatgcaaatggtatatagcatgtgagtgtcagattcacggaaattaaatcaaatacaggggagagaaaagaaacagagtgcattaaagctaactttatg

SEQ ID NO: 6731 - DNA, 122 bp, Homo sapiens
  misc_feature (61)..(62): /note="This region represents a CpG dinucleotide"
  misc_feature (61)..(61): /note="Nucleotide may be methylated to form 5-methylcytosine"
ttaaccaggatgttaaattttcacccacacctctggcttaaccaaatgttactgtgatagcgtggtatctgacacaattaatctaatacattatgagtaaagttgctatctggatgcacaat

SEQ ID NO: 6732 - DNA, 122 bp, Homo sapiens
  misc_feature (61)..(62): /note="This region represents a CpG dinucleotide"
  misc_feature (61)..(61): /note="Nucleotide may be methylated to form 5-methylcytosine"
ggggagaggtggtgccagtgtctcaggacagggtgacagttcagagaggtgacctgacaacgtgcctggccaccccaagcttctggatagagagagttttgtactcagttcttacagagtat

SEQ ID NO: 6733 - DNA, 122 bp, Homo sapiens
  misc_feature (61)..(62): /note="This region represents a CpG dinucleotide"
  misc_feature (61)..(61): /note="Nucleotide may be methylated to form 5-methylcytosine"
aaattcatttcttgtcgccacctagattaacaaatctcagattaagaactggccttttttcgcctcctctttgaattcactgtctaaagaaacggccattgccctttccgtaaaccaggaca

SEQ ID NO: 6734 - DNA, 122 bp, Homo sapiens
  misc_feature (61)..(62): /note="This region represents a CpG dinucleotide"
  misc_feature (61)..(61): /note="Nucleotide may be methylated to form 5-methylcytosine"
acttttcataatggttgcatcccagctctaaaatttgtttatttcttctttcacatactccgtcttttcagaaaggatttgatagagatgacacatttgttattgttcctaagctctggctt

SEQ ID NO: 6735 - DNA, 122 bp, Homo sapiens
  misc_feature (61)..(62): /note="This region represents a CpG dinucleotide"
  misc_feature (61)..(61): /note="Nucleotide may be methylated to form 5-methylcytosine"
gctgttttttaaacatgcactatgctcttaatgtcaattgtcctatgatctatgaggccacgtgactcatgcttgctgacaggatgcaggcacaagtgttgcgcaggcacaccctcactttg

SEQ ID NO: 6736 - DNA, 122 bp, Homo sapiens
  misc_feature (61)..(62): /note="This region represents a CpG dinucleotide"
  misc_feature (61)..(61): /note="Nucleotide may be methylated to form 5-methylcytosine"
cctcctgctctgtggctgttttcttagactttccttgcattagaggactgtcttagcttgcgaggctgtaacaaagtaccacaggctagtgactcacgaacaacacaagccacagtcctgga

SEQ ID NO: 6737 - DNA, 122 bp, Homo sapiens
  misc_feature (61)..(62): /note="This region represents a CpG dinucleotide"
  misc_feature (61)..(61): /note="Nucleotide may be methylated to form 5-methylcytosine"
tcctctgaaggctgagacgtgcggccttgcctcggctttgcctgcttgtaagacacagtccgcactctctacctccaaggaaccccggggttcctcctgcccggcttcaccctcctatttcc

SEQ ID NO: 6738 - DNA, 122 bp, Homo sapiens
  misc_feature (61)..(62): /note="This region represents a CpG dinucleotide"
  misc_feature (61)..(61): /note="Nucleotide may be methylated to form 5-methylcytosine"
gcctgctccccgtcccacccctccctgagcacgccaccccgccctctccctctctgagagcgagatacccggccagacaccctcacctgcggtgcccagctgcccaggctgaggcaagagaa

SEQ ID NO: 6739 - DNA, 122 bp, Homo sapiens
  misc_feature (61)..(62): /note="This region represents a CpG dinucleotide"
  misc_feature (61)..(61): /note="Nucleotide may be methylated to form 5-methylcytosine"
tgggaggtgaaggctgggacccagaacagcagagactctgtcgatgatgtggaaagaccgcggctgcagtttgggcaggctgagccagggttgggtcttgcatgttgagaggctggcctgcg

SEQ ID NO: 6740 - DNA, 122 bp, Homo sapiens
  misc_feature (61)..(62): /note="This region represents a CpG dinucleotide"
  misc_feature (61)..(61): /note="Nucleotide may be methylated to form 5-methylcytosine"
tcttccccccaacatctggtcccactggaaggtctgcaggggcaatgacacgcacagagccgtcacctcctgtgatgacaatgccttcttctggacacctcccacaggacctgcctgcagct

SEQ ID NO: 6741 - DNA, 122 bp, Homo sapiens
  misc_feature (61)..(62): /note="This region represents a CpG dinucleotide"
  misc_feature (61)..(61): /note="Nucleotide may be methylated to form 5-methylcytosine"
gttgcaaattcttctgcatttcccatgcaatagcaaagcaagttgatcccataagctatccgtaagcttcaccaaatccaagagaatctatgcatagctgacttaggaaacagtaggtattt

SEQ ID NO: 6742 - DNA, 122 bp, Homo sapiens
  misc_feature (61)..(62): /note="This region represents a CpG dinucleotide"
  misc_feature (61)..(61): /note="Nucleotide may be methylated to form 5-methylcytosine"
taccatattacccaatgccatttctaagagttatatacccaaaagaattgaaaacaggaacgcaaacaaatatatggacacatgtgttcatagcactgttcacaagagtcaaaaggtggaaa

SEQ ID NO: 6743 - DNA, 122 bp, Homo sapiens
  misc_feature (61)..(62): /note="This region represents a CpG dinucleotide"
  misc_feature (61)..(61): /note="Nucleotide may be methylated to form 5-methylcytosine"
acattggaagccttagataacctctctgagcctctttcttcatctgtagaatgttgtatacgtattagtaccaacttctttggggtgtgagtgtgaacttagataatgcatgcctataatgt

SEQ ID NO: 6744 - DNA, 122 bp, Homo sapiens
  misc_feature (61)..(62): /note="This region represents a CpG dinucleotide"
  misc_feature (61)..(61): /note="Nucleotide may be methylated to form 5-methylcytosine"
ggtgatttgctcggatgcaggcagcagaggtttgttattagtgctctaagagaggcaatacggcaaacagccctgctctggagccagactgcttgggtttgaatcccagctttgccactccc

SEQ ID NO: 6745 - DNA, 122 bp, Homo sapiens
  misc_feature (61)..(62): /note="This region represents a CpG dinucleotide"
  misc_feature (61)..(61): /note="Nucleotide may be methylated to form 5-methylcytosine"
tggccaagtgagctggaggatccatgcctgagggcccacagatgactcggcaaagacagacgcatggagaaccaggcacatcccagactccacaccagcttgacattgttgaatcctcaaat

SEQ ID NO: 6746 - DNA, 122 bp, Homo sapiens
  misc_feature (61)..(62): /note="This region represents a CpG dinucleotide"
  misc_feature (61)..(61): /note="Nucleotide may be methylated to form 5-methylcytosine"
ggcctgagaatgaagctgaggcagtgccaaaatatgccagtgatactgagacccagatcccgccatgcctggtcttttccattacatgagctcatacagtttctactggcacaagccaggct

SEQ ID NO: 6747 - DNA, 122 bp, Homo sapiens
  misc_feature (61)..(62): /note="This region represents a CpG dinucleotide"
  misc_feature (61)..(61): /note="Nucleotide may be methylated to form 5-methylcytosine"
tcttcctaaccagtcttatttttccactgctcataagccactagttctgcttttcacttgcgtaaggtcttaagcaactttccagctcagaaactaccattgcttcccagagcacaaacatg

SEQ ID NO: 6748 - DNA, 122 bp, Homo sapiens
  misc_feature (61)..(62): /note="This region represents a CpG dinucleotide"
  misc_feature (61)..(61): /note="Nucleotide may be methylated to form 5-methylcytosine"
tcctggtagaaatgacacccctgtgaaatctgcttcatagatgacattaggtgaccacaacgattagtgtaccatgaacctcagaaccactggagctgtgggtgccaaaccctgtgggacct

SEQ ID NO: 6749 - DNA, 122 bp, Homo sapiens
  misc_feature (61)..(62): /note="This region represents a CpG dinucleotide"
  misc_feature (61)..(61): /note="Nucleotide may be methylated to form 5-methylcytosine"
cccttggaatgagaagacagccacagagaatccaaaaaccaacaggcgtggctgtgttcccgtaaaacttaaaacaggcgcctggctccagggtcgttttgccaacccccgtcttactgatc

SEQ ID NO: 6750 - DNA, 122 bp, Homo sapiens
  misc_feature (61)..(62): /note="This region represents a CpG dinucleotide"
  misc_feature (61)..(61): /note="Nucleotide may be methylated to form 5-methylcytosine"
gtgtttcttcttgaagacggaattttgaaaagcttctgattcttctgttgcatcatcctccgtgacacctcataatgcagatggccaccacgcccagccagggcatggacaggcaaccacct

SEQ ID NO: 6751 - DNA, 122 bp, Homo sapiens
  misc_feature (61)..(62): /note="This region represents a CpG dinucleotide"
  misc_feature (61)..(61): /note="Nucleotide may be methylated to form 5-methylcytosine"
tgcaaaaatcctgattcctggcctctcttgaagaatttggttgtcttgcaacatgtcctgcgttgccatatggccgcaactacttgcatctccacccagttaatctgctctggggcctacaa

SEQ ID NO: 6752 - DNA, 122 bp, Homo sapiens
  misc_feature (61)..(62): /note="This region represents a CpG dinucleotide"
  misc_feature (61)..(61): /note="Nucleotide may be methylated to form 5-methylcytosine"
cacatggtactaggactatacaggtacttatgggggaagtggaaagatacatgggtgactcgtacagcagtaggaattcctacagagtaagagatagtgtgcacgtgtcttctcagcagctc

SEQ ID NO: 6753 - DNA, 122 bp, Homo sapiens
  misc_feature (61)..(62): /note="This region represents a CpG dinucleotide"
  misc_feature (61)..(61): /note="Nucleotide may be methylated to form 5-methylcytosine"
catttttccagcaactgcagttcatgtgagcaggaaggcatacagcatggccgagctccacggtgggcggaggggaggacagaaaagggactgagaaaaggatggaaggggctgggtgtgga

SEQ ID NO: 6754 - DNA, 122 bp, Homo sapiens
  misc_feature (61)..(62): /note="This region represents a CpG dinucleotide"
  misc_feature (61)..(61): /note="Nucleotide may be methylated to form 5-methylcytosine"
aaagaggatgactaaacctccaagtcatattttactctttaaggattgagatgtgcattgcgatgaactaacttttaagtggtttacgacacacaggaaagaagtcatacttataatttcaa

SEQ ID NO: 6755 - DNA, 122 bp, Homo sapiens
  misc_feature (61)..(62): /note="This region represents a CpG dinucleotide"
  misc_feature (61)..(61): /note="Nucleotide may be methylated to form 5-methylcytosine"
tacatacattttactgtcaggagcaccttctatatgccaaacactaagctacgtgtttcacgtaggtcatttcacaggatcctgaaaacaacgctttccttaatatctccattttgcagaag

SEQ ID NO: 6756 - DNA, 122 bp, Homo sapiens
  misc_feature (61)..(62): /note="This region represents a CpG dinucleotide"
  misc_feature (61)..(61): /note="Nucleotide may be methylated to form 5-methylcytosine"
ggttggcatcgtttgtcattctctttatgttctcatatgtgagatcgtgggggtgaaatacgcatctcactgtgggctgtggtcggaagtttgaaaaacaccctggcattttgcctgtcttc

SEQ ID NO: 6757 - DNA, 122 bp, Homo sapiens
  misc_feature (61)..(62): /note="This region represents a CpG dinucleotide"
  misc_feature (61)..(61): /note="Nucleotide may be methylated to form 5-methylcytosine"
gtgaataaaactggagtccaggactttggatccaggcggcagggaggaaggaggcctgaacgagaatccaccagcctgtgctctgggcttaggtcactaagaggaatgaaggctgccacttt

SEQ ID NO: 6758 - DNA, 122 bp, Homo sapiens
  misc_feature (61)..(62): /note="This region represents a CpG dinucleotide"
  misc_feature (61)..(61): /note="Nucleotide may be methylated to form 5-methylcytosine"
ctgattccagggaaatgagctaggccattattatatcatctccaaatgccctgtcttatccgtccaaggtgcaagatgccttttttgacccactgattggtaggagacatgtccagactgga

SEQ ID NO: 6759 - DNA, 122 bp, Homo sapiens
  misc_feature (61)..(62): /note="This region represents a CpG dinucleotide"
  misc_feature (61)..(61): /note="Nucleotide may be methylated to form 5-methylcytosine"
ttaagaacaactgagttacagcaataaaactaattacatgtgcacgcctcagccaggaagcggatgatgtagccataattacacattcagacagggaagtaaaggcagtcccatttaggact

SEQ ID NO: 6760 - DNA, 122 bp, Homo sapiens
  misc_feature (61)..(62): /note="This region represents a CpG dinucleotide"
  misc_feature (61)..(61): /note="Nucleotide may be methylated to form 5-methylcytosine"
cattcacaggtgagagacagaacaatgtagtcaagtcagttcatcagcatgttggcaaatcggagtcccaggcttggagaagacctttgcagtgaaggcatgtggaaagagaatgtggcaag

SEQ ID NO: 6761 - DNA, 122 bp, Homo sapiens
  misc_feature (61)..(62): /note="This region represents a CpG dinucleotide"
  misc_feature (61)..(61): /note="Nucleotide may be methylated to form 5-methylcytosine"
tccaggcacccatatctatgtgggactatattgctgtaatgcagtcatgaaaatctgcggcgagggcctggactttctgaactcaataagccctctgggtaggggctaacatttctacaagg

SEQ ID NO: 6762 - DNA, 122 bp, Homo sapiens
  misc_feature (61)..(62): /note="This region represents a CpG dinucleotide"
  misc_feature (61)..(61): /note="Nucleotide may be methylated to form 5-methylcytosine"
taggcaggtgtgtgaattgtacaaaaccagacatgctattcagaggccttttgcaaaatacgttgcgcttcttagagcccaagcacaaaggaattgaggaaaccaaggcttcaagtccccag

SEQ ID NO: 6763 - DNA, 122 bp, Homo sapiens
  misc_feature (61)..(62): /note="This region represents a CpG dinucleotide"
  misc_feature (61)..(61): /note="Nucleotide may be methylated to form 5-methylcytosine"
gtatggcgagatgaaactgaccttcacgccttagctgggatatttataatcccgacagggcgtgccaggtgaggggagggtacgtttccatttcctctgagccaccccgtttaaacagtgca

SEQ ID NO: 6764 - DNA, 122 bp, Homo sapiens
  misc_feature (61)..(62): /note="This region represents a CpG dinucleotide"
  misc_feature (61)..(61): /note="Nucleotide may be methylated to form 5-methylcytosine"
cctgccaggaaaactacagtcaagtgtctcttggtggagagtcagttttgcccaagtcaccgtgtaatactgtttggggaaagtttctcattttctgttttttttttttttttttttttttt

SEQ ID NO: 6765 - DNA, 122 bp, Homo sapiens
  misc_feature (61)..(62): /note="This region represents a CpG dinucleotide"
  misc_feature (61)..(61): /note="Nucleotide may be methylated to form 5-methylcytosine"
gtccatttccctccctgccataaggagagtggatgcttctttcaaccatgccaagaaaggcgagatgatgtccaagagaacaattcatagagattagattagtgctgcagaaaaggcagaat

SEQ ID NO: 6766 - DNA, 122 bp, Homo sapiens
  misc_feature (61)..(62): /note="This region represents a CpG dinucleotide"
  misc_feature (61)..(61): /note="Nucleotide may be methylated to form 5-methylcytosine"
gttgctattgatatttcacaggctctgatgcagagaagcttgtccccagtgctccatccacgaagggagcaagttgctccccattcatgactcaaaacaccctggaggaagattatgtttac

SEQ ID NO: 6767 - DNA, 122 bp, Homo sapiens
  misc_feature (61)..(62): /note="This region represents a CpG dinucleotide"
  misc_feature (61)..(61): /note="Nucleotide may be methylated to form 5-methylcytosine"
aggactaagtctttgtaaacaatcacaacagacactgaccatggtgaacatcatcccatacgtcagagtaacatgccctcacatgggttctgatggagaagaacagctcccccatgctgagc

SEQ ID NO: 6768 - DNA, 122 bp, Homo sapiens
  misc_feature (61)..(62): /note="This region represents a CpG dinucleotide"
  misc_feature (61)..(61): /note="Nucleotide may be methylated to form 5-methylcytosine"
aagcacaaccacaaactaagacacaattacactgtaatcccaaaacgtgtataagtcatccggcacacacacacctctgtttgcgcattctccctgattcaaccacatcaaccataaacact

SEQ ID NO: 6769 - DNA, 122 bp, Homo sapiens
  misc_feature (61)..(62): /note="This region represents a CpG dinucleotide"
  misc_feature (61)..(61): /note="Nucleotide may be methylated to form 5-methylcytosine"
aaaaacttaacaaaagctccctccaccaagccactgagattcatggctcattggatggagcgtgctgccacaggaacacacaaccttccctgtaaagaaatttaccggagggcaatgaccaa

SEQ ID NO: 6770 - DNA, 122 bp, Homo sapiens
  misc_feature (61)..(62): /note="This region represents a CpG dinucleotide"
  misc_feature (61)..(61): /note="Nucleotide may be methylated to form 5-methylcytosine"
catgatttattgtaatttttacttaattctgcctccttctgtaggccctggttccaagaacgtcttttgggcccgatgcctccatggctcagatacttgggaacagcaatttgccataatgt

SEQ ID NO: 6771 - DNA, 122 bp, Homo sapiens
  misc_feature (61)..(62): /note="This region represents a CpG dinucleotide"
  misc_feature (61)..(61): /note="Nucleotide may be methylated to form 5-methylcytosine"
aagtgctggaattacaggcgtgagccaaggcgcccgtaatcccagcttatgtttgcaagtcgagcaaggttcagcacatttatgaggcctaactggctttgtctgctcaggaattctttagg

SEQ ID NO: 6772 - DNA, 122 bp, Homo sapiens
  misc_feature (61)..(62): /note="This region represents a CpG dinucleotide"
  misc_feature (61)..(61): /note="Nucleotide may be methylated to form 5-methylcytosine"
ccccaagagttcaagacaagcctgggcaacacagcaagacctcatctctactaaattagccgagtgtggttgccagcacctgtagtctccgggaggctgaggtggtaggatcacttgagcac

SEQ ID NO: 6773 - DNA, 122 bp, Homo sapiens
  misc_feature (61)..(62): /note="This region represents a CpG dinucleotide"
  misc_feature (61)..(61): /note="Nucleotide may be methylated to form 5-methylcytosine"
aacctctcccaattttctgggcacagcccagagtgctgactgaggcagccaccaggagggcgccagcaaggcagacagcatggctgctgatcacagagctaacagctcgacatctgcaggct

SEQ ID NO: 6774 - DNA, 122 bp, Homo sapiens
  misc_feature (61)..(62): /note="This region represents a CpG dinucleotide"
  misc_feature (61)..(61): /note="Nucleotide may be methylated to form 5-methylcytosine"
acacttcaaactaagtctgtggaatgacacatgcatcacccattggcagaagacacagcacgtactattacaaagctgatgtttagtctcaagcaaaaataaactgtaattcagtcaaaact

SEQ ID NO: 6775 - DNA, 122 bp, Homo sapiens
  misc_feature (61)..(62): /note="This region represents a CpG dinucleotide"
  misc_feature (61)..(61): /note="Nucleotide may be methylated to form 5-methylcytosine"
tagtattctttatctcataagtaagattgtccccatttcacagatgaaggctcagagtgtcgtgaaagttagagcacccaagttgcacgactggcgagtccagagccggctctgtgtgctgt

SEQ ID NO: 6776 - DNA, 122 bp, Homo sapiens
  misc_feature (61)..(62): /note="This region represents a CpG dinucleotide"
  misc_feature (61)..(61): /note="Nucleotide may be methylated to form 5-methylcytosine"
cctaaagaagttgtttccgtgccctggggcacgggcatccagggacaacatattacaaggcggtctgttggggtgtggaagacactagaacctttatctgtatttaacccatccatttctaa

SEQ ID NO: 6777 - DNA, 122 bp, Homo sapiens
  misc_feature (61)..(62): /note="This region represents a CpG dinucleotide"
  misc_feature (61)..(61): /note="Nucleotide may be methylated to form 5-methylcytosine"
cctcggcctctcaaaatgctgggattacaggcgtgagccactgtgcccagccctagcaaacgttcatcaaatgtctatagcagtggccgggtgctgtggctcacacctctggtcccagcact

SEQ ID NO: 6778 - DNA, 122 bp, Homo sapiens
  misc_feature (61)..(62): /note="This region represents a CpG dinucleotide"
  misc_feature (61)..(61): /note="Nucleotide may be methylated to form 5-methylcytosine"
acaggtcacaaaaccagttggagcctcggtgacctcatgcataccttgagttgttactgacgcctaactcacatgtttgcataaacatcaagtaggatggagactgagaaaacagtttggaa

SEQ ID NO: 6779 - DNA, 122 bp, Homo sapiens
  misc_feature (61)..(62): /note="This region represents a CpG dinucleotide"
  misc_feature (61)..(61): /note="Nucleotide may be methylated to form 5-methylcytosine"
tccagattctccttattccagactccaccccctgcagtgttctacgtcttctgaaagggccggtgcagggcgcccatgacttgtcatttttcctaggtcagcacatccttgttctcaccact

SEQ ID NO: 6780 - DNA, 122 bp, Homo sapiens
  misc_feature (61)..(62): /note="This region represents a CpG dinucleotide"
  misc_feature (61)..(61): /note="Nucleotide may be methylated to form 5-methylcytosine"
atgtgaaccaccacgcccagacttaaaatgcttttacttcaaaatatgacctgattttcccgttgtttttttttctctaattctttctagcttttatctctgttaatctctgaatgtttcac

SEQ ID NO: 6781 - DNA, 122 bp, Homo sapiens
  misc_feature (61)..(62): /note="This region represents a CpG dinucleotide"
  misc_feature (61)..(61): /note="Nucleotide may be methylated to form 5-methylcytosine"
tcttggatcttggatcactttatgacttgatctgaccaatggaatgctgcagaagtgacacggtaagtgctaggcacagtgactcacacctgtaatcccagcactttgggaggccaaggcag

SEQ ID NO: 6782 - DNA, 122 bp, Homo sapiens
  misc_feature (61)..(62): /note="This region represents a CpG dinucleotide"
  misc_feature (61)..(61): /note="Nucleotide may be methylated to form 5-methylcytosine"
ttgccgagattggaaactgaatcttactcagaaaacagttacgggccgtacagtgactcacgtctgtaatcccagcactttgggaggcagacacagatgaatcatttaaggtcaggagtttg

SEQ ID NO: 6783 - DNA, 122 bp, Homo sapiens
  misc_feature (61)..(62): /note="This region represents a CpG dinucleotide"
  misc_feature (61)..(61): /note="Nucleotide may be methylated to form 5-methylcytosine"
gatctcatttaatctcagttccattctttgaatttgctatgtaccctgctgtccaaatgacggcactgagtcagtgagaggtttcataacttgcccaaggccacagaactggatggagaaag

SEQ ID NO: 6784 - DNA, 122 bp, Homo sapiens
  misc_feature (61)..(62): /note="This region represents a CpG dinucleotide"
  misc_feature (61)..(61): /note="Nucleotide may be methylated to form 5-methylcytosine"
caatacctgacccaaaccaggtcagattctctaatcctggactttagaattgtgatctgacggcaggtaaggccagctctaagagtagctcagtctttagcacttaaatttgagaactagtg

SEQ ID NO: 6785 - DNA, 122 bp, Homo sapiens
  misc_feature (61)..(62): /note="This region represents a CpG dinucleotide"
  misc_feature (61)..(61): /note="Nucleotide may be methylated to form 5-methylcytosine"
agaggtgtggggagagcagttaggaggtgccagtggagcaagcacccacacacgctgtggcggaactctgtgatgagcacccagagcaactgggaccagtggtgcaactgttgccgaggcca

SEQ ID NO: 6786 - DNA, 122 bp, Homo sapiens
  misc_feature (61)..(62): /note="This region represents a CpG dinucleotide"
  misc_feature (61)..(61): /note="Nucleotide may be methylated to form 5-methylcytosine"
gagtgtgtgatatgcttttgtgagtcatctgtccagcatacaattaatgagtgactatttcgtactgagtgcagtgaacattgcaacagtaatgattgctgtcacttgctgagattttatta

SEQ ID NO: 6787 - DNA, 122 bp, Homo sapiens
  misc_feature (61)..(62): /note="This region represents a CpG dinucleotide"
  misc_feature (61)..(61): /note="Nucleotide may be methylated to form 5-methylcytosine"
tatctgcaagccaaggagagagacctcagaaaaaaaccaaccctgaaactgtgagaagtacgttctgttaagccgcccagtccatggcactttgctgtggcagccctagaatactcgcacat

SEQ ID NO: 6788 - DNA, 122 bp, Homo sapiens
  misc_feature (61)..(62): /note="This region represents a CpG dinucleotide"
  misc_feature (61)..(61): /note="Nucleotide may be methylated to form 5-methylcytosine"
tgaaggataaaagccagtctctcttcgtggcaggcaactagctggttattcctctgattgcgtcacaaagggaaatctgtatattcaccccagatttctaaaagaagcaagaaacttcaagt

SEQ ID NO: 6789 - DNA, 122 bp, Homo sapiens
  misc_feature (61)..(62): /note="This region represents a CpG dinucleotide"
  misc_feature (61)..(61): /note="Nucleotide may be methylated to form 5-methylcytosine"
tgctaactatctttatgttcagagctcattcagtacagggtgttctccaggataaaacctcgggactctctctccaaccggccctgtcccttgggtgactacctgaggcttctctttacctt

SEQ ID NO: 6790 - DNA, 122 bp, Homo sapiens
  misc_feature (61)..(62): /note="This region represents a CpG dinucleotide"
  misc_feature (61)..(61): /note="Nucleotide may be methylated to form 5-methylcytosine"
gcacctggcccctagttcttatctgcttctcagctgctgccccagctcttgcatcatgcccgtgataaagcagtgtgaaggtggagcagaatttaggcttttcctccataccatactgcccc

SEQ ID NO: 6791 - DNA, 122 bp, Homo sapiens
  misc_feature (61)..(62): /note="This region represents a CpG dinucleotide"
  misc_feature (61)..(61): /note="Nucleotide may be methylated to form 5-methylcytosine"
ccagattagttattgcttcccatttgcttgatattggcctggttagttatcttctaaccccgtttcttcaccgctaaagtaagtaataatgactgtcctttctcacagggtgattgtgtggt

SEQ ID NO: 6792 - DNA, 122 bp, Homo sapiens
  misc_feature (61)..(62): /note="This region represents a CpG dinucleotide"
  misc_feature (61)..(61): /note="Nucleotide may be methylated to form 5-methylcytosine"
aaggagctgtcaaagggccatttatcttgcaaaatacctccctgtcttgcaaaaggctgccgtgaggcaatttctcatccagctggtttccagtgacctcactctcattcaggtgcagatac

SEQ ID NO: 6793 - DNA, 122 bp, Homo sapiens
  misc_feature (61)..(62): /note="This region represents a CpG dinucleotide"
  misc_feature (61)..(61): /note="Nucleotide may be methylated to form 5-methylcytosine"
atgctgaaaatatatggactgcttaaagcctattatgaatcagccaacactggggagagacgcactggctgcatcctcaccggacgggtcatcctggctgctaagacctagacccacccggg

SEQ ID NO: 6794 - DNA, 122 bp, Homo sapiens
  misc_feature (61)..(62): /note="This region represents a CpG dinucleotide"
  misc_feature (61)..(61): /note="Nucleotide may be methylated to form 5-methylcytosine"
tctcttgtttaatcttcctaacaatccttaccttgcagatgaggaagcagaggtacagggcgtcacatggtgagtaccgagcagagctgagatatgaacccagacatctgtgcctgtcacca

SEQ ID NO: 6795 - DNA, 122 bp, Homo sapiens
  misc_feature (61)..(62): /note="This region represents a CpG dinucleotide"
  misc_feature (61)..(61): /note="Nucleotide may be methylated to form 5-methylcytosine"
ccttcttcttatcattatcattatcagcagtagtagtaacagataatgactatcaattgacgtgggagacaattacaattacatgtcattgtgaaactcattaggtgactgtgatttagagt

SEQ ID NO: 6796 - DNA, 122 bp, Homo sapiens
  misc_feature (61)..(62): /note="This region represents a CpG dinucleotide"
  misc_feature (61)..(61): /note="Nucleotide may be methylated to form 5-methylcytosine"
aggcctggatctgataaccggctctgatgccaccatccctgaggccaggcaagtcccagccgggctacagcactgttgtgagaatgcagatgaggttgtaaaggtgaagcacgtgtcacgct

SEQ ID NO: 6797 - DNA, 122 bp, Homo sapiens
  misc_feature (61)..(62): /note="This region represents a CpG dinucleotide"
  misc_feature (61)..(61): /note="Nucleotide may be methylated to form 5-methylcytosine"
tttagttcagtttgtgtgttgtgcagccataccattaactgagcaggttcttttcctcaccgtctggtctgaatttccttgtcctgcggaaaggcattgcctgccacgccttgttgagttct

SEQ ID NO: 6798 - DNA, 122 bp, Homo sapiens
  misc_feature (61)..(62): /note="This region represents a CpG dinucleotide"
  misc_feature (61)..(61): /note="Nucleotide may be methylated to form 5-methylcytosine"
atagggaattataacacagtgtcatcaagttcgtggtagaagtacaggatgcagcagggccgcatcagctaccttatgcagcgctgttgggtcatggatgacttcttagagaaagtgacagc

SEQ ID NO: 6799 - DNA, 122 bp, Homo sapiens
  misc_feature (61)..(62): /note="This region represents a CpG dinucleotide"
  misc_feature (61)..(61): /note="Nucleotide may be methylated to form 5-methylcytosine"
cacacacaggattttgagttgggtgttaccctacttatctggtaagtgtagaaaatgagacgaaaagacttactgacctgcccaaggtcatgaaactaataaaggaaggagaggggacccaa

SEQ ID NO: 6800 - DNA, 122 bp, Homo sapiens
  misc_feature (61)..(62): /note="This region represents a CpG dinucleotide"
  misc_feature (61)..(61): /note="Nucleotide may be methylated to form 5-methylcytosine"
gctgggcccaaggagccaggtactttaatgaaccagaacctggaggcacactactcacaacgaaagcatgtgaccatgaatgagttgctctcttcagccaaggatgattcccagacaggtct

SEQ ID NO: 6801 - DNA, 122 bp, Homo sapiens
  misc_feature (61)..(62): /note="This region represents a CpG dinucleotide"
  misc_feature (61)..(61): /note="Nucleotide may be methylated to form 5-methylcytosine"
ctaaaagcacactagcatttttgccttaaataaaccttccataaaaggtgcttggcaggccgggcatggtggctcaagccggtaatcccagcaccttgggaggccgaggcaggtggatcatc

SEQ ID NO: 6802 - DNA, 122 bp, Homo sapiens
  misc_feature (61)..(62): /note="This region represents a CpG dinucleotide"
  misc_feature (61)..(61): /note="Nucleotide may be methylated to form 5-methylcytosine"
tccttcatgcttaaaagcactaatctttcagaaatgctgtagtggtgttctgtgcctggacgtaactgaccaagccagttaggtcagccaagcaggttaatcaatgtggtttgctatcagct

SEQ ID NO: 6803 - DNA, 122 bp, Homo sapiens
  misc_feature (61)..(62): /note="This region represents a CpG dinucleotide"
  misc_feature (61)..(61): /note="Nucleotide may be methylated to form 5-methylcytosine"
cagttggggagttcggatgtccccttctggggctttcatcttctaacctcctctcccaagcgctcagccaaagggcagcacagagcaccctaccctaaggtgtgacgccccagctggcagga

SEQ ID NO: 6804 - DNA, 122 bp, Homo sapiens
  misc_feature (61)..(62): /note="This region represents a CpG dinucleotide"
  misc_feature (61)..(61): /note="Nucleotide may be methylated to form 5-methylcytosine"
caccttgtattgtcagcacaatcattttcctgtcattaggcatgcccttagtagtcatatcgactcattgatgggctgtttatgctcacacttgagctgctaatcacaattgttaaaccagg

SEQ ID NO: 6805 - DNA, 122 bp, Homo sapiens
  misc_feature (61)..(62): /note="This region represents a CpG dinucleotide"
  misc_feature (61)..(61): /note="Nucleotide may be methylated to form 5-methylcytosine"
atgtctctgggtatgctgttgccatttgttgcagttcaccagatgctggcctgcctttgccggtttaggaagagattatagcttgaaccattgtctgaatgctgctttgacctagtaaatcc

SEQ ID NO: 6806 - DNA, 122 bp, Homo sapiens
  misc_feature (61)..(62): /note="This region represents a CpG dinucleotide"
  misc_feature (61)..(61): /note="Nucleotide may be methylated to form 5-methylcytosine"
cctgacggaggtcctttcttgggcccatgcctctgcacatgttgggcatgttgtagttgtcgttactagcaagacacacctaccctttaagaccagtctaaatgccaccttgttccctccat

SEQ ID NO: 6807 - DNA, 122 bp, Homo sapiens
  misc_feature (61)..(62): /note="This region represents a CpG dinucleotide"
  misc_feature (61)..(61): /note="Nucleotide may be methylated to form 5-methylcytosine"
ctagttaacccatgtcaggtgcatggcacagggcttggtgcgcagtcagggatatgtaagcgctggctgtgattaccatcaggtgtcaggagatttcagcaaatcctacttgtgaagcctca

SEQ ID NO: 6808 - DNA, 122 bp, Homo sapiens
  misc_feature (61)..(62): /note="This region represents a CpG dinucleotide"
  misc_feature (61)..(61): /note="Nucleotide may be methylated to form 5-methylcytosine"
ttggaaaggaaagctttatttctcagaaagggtggcagcctccctcccgggtggccattccggcaggctaggaaacacagcctcaggccagaagccagaaaactgcactttgaagttcagag

SEQ ID NO: 6809 - DNA, 122 bp, Homo sapiens
  misc_feature (61)..(62): /note="This region represents a CpG dinucleotide"
  misc_feature (61)..(61): /note="Nucleotide may be methylated to form 5-methylcytosine"
gtggcaagttcacggtcaagctaagcttaaacaaggcttgattcaggctcatgattcagccgctagactctactgcctcttgcacaagtagcaactcactgctctccctgccctcttgatgt

SEQ ID NO: 6810 - DNA, 122 bp, Homo sapiens
  misc_feature (61)..(62): /note="This region represents a CpG dinucleotide"
  misc_feature (61)..(61): /note="Nucleotide may be methylated to form 5-methylcytosine"
ttcttttgttttggaattctgaatatgcaactttggatttggtagcctaagcctgaaaagcgactagttgtcagtgagaagtaaagcaaatgtacccagagttgattcagatcttaaaatga

SEQ ID NO: 6811 - DNA, 122 bp, Homo sapiens
  misc_feature (61)..(62): /note="This region represents a CpG dinucleotide"
  misc_feature (61)..(61): /note="Nucleotide may be methylated to form 5-methylcytosine"
gtagcagaatatcatgattctgagctaccaacagaaaatgcattgcattggcttactctacgtcatcagggtcacagtgatcctgcaacatgattgaaattccagggtaaaatgtctgtagc

SEQ ID NO: 6812 - DNA, 122 bp, Homo sapiens
  misc_feature (61)..(62): /note="This region represents a CpG dinucleotide"
  misc_feature (61)..(61): /note="Nucleotide may be methylated to form 5-methylcytosine"
tttcttcacttggcttaaaggccacagcattctggtttgcctcctctgacacctcactgacgccgctcacactccttcactagcttctggttacttatctggcttcttaatgccagtgtgtc

SEQ ID NO: 6813 - DNA, 122 bp, Homo sapiens
  misc_feature (61)..(62): /note="This region represents a CpG dinucleotide"
  misc_feature (61)..(61): /note="Nucleotide may be methylated to form 5-methylcytosine"
gcatgtggacaagtgaccagtctccagttgactgtaaaggctggctttcatcaccaccagcgggctaacctcctacatatatctgtgtgtctacggcaaggtcgacagaacccatatataag

SEQ ID NO: 6814 - DNA, 122 bp, Homo sapiens
  misc_feature (61)..(62): /note="This region represents a CpG dinucleotide"
  misc_feature (61)..(61): /note="Nucleotide may be methylated to form 5-methylcytosine"
gcagaccctggtccaccttcttggagtggaagccagcggtgcagaaggggacccctgaggcgcagaggcaagtaacagtgccaggggagtggtcagggcagatcctttccttctcaggaggc

SEQ ID NO: 6815 - DNA, 122 bp, Homo sapiens
  misc_feature (61)..(62): /note="This region represents a CpG dinucleotide"
  misc_feature (61)..(61): /note="Nucleotide may be methylated to form 5-methylcytosine"
ccagcactgcccgagccggcgagggcctctgtgcaccagctccattgccaggcaggcctgcgcagatctataaattgatggaattcaaagcctccagcatcgattaccgttataacaaacag

SEQ ID NO: 6816 - DNA, 122 bp, Homo sapiens
  misc_feature (61)..(62): /note="This region represents a CpG dinucleotide"
  misc_feature (61)..(61): /note="Nucleotide may be methylated to form 5-methylcytosine"
cttccactaccgcagccagttgcagaaccacatgctcaagcaccagaacgtgcgacccttcgtgtgcactgaatgcggcatggagttcagccagattcaccacctcaagcagcactccctca

SEQ ID NO: 6817 - DNA, 122 bp, Homo sapiens
  misc_feature (61)..(62): /note="This region represents a CpG dinucleotide"
  misc_feature (61)..(61): /note="Nucleotide may be methylated to form 5-methylcytosine"
ggaagaatgctgaatctatagaccatgtccttcaggtctgaacctgagatgcttcactagcgctatgactgattatgagtgatgattcaaagcacagcctgactcagattcctggaaatgag

SEQ ID NO: 6818 - DNA, 122 bp, Homo sapiens
  misc_feature (61)..(62): /note="This region represents a CpG dinucleotide"
  misc_feature (61)..(61): /note="Nucleotide may be methylated to form 5-methylcytosine"
ggcctacatcctttgtctgttaggtgcttccacatccttatgtcttaaatggccaaaatacgtcacccccactgccaaaacacacaggtcactcgaggtcacaatctggaacataggctggc

SEQ ID NO: 6819 - DNA, 122 bp, Homo sapiens
  misc_feature (61)..(62): /note="This region represents a CpG dinucleotide"
  misc_feature (61)..(61): /note="Nucleotide may be methylated to form 5-methylcytosine"
agatatcagcttcagcctcttaaaggactgcagactcatactggtcaaaaacaaacactccgcaaaccgaaaacaactcagtcattgcctggagtttagtattaagggaaaaagtgttttgt

SEQ ID NO: 6820 - DNA, 122 bp, Homo sapiens
  misc_feature (61)..(62): /note="This region represents a CpG dinucleotide"
  misc_feature (61)..(61): /note="Nucleotide may be methylated to form 5-methylcytosine"
tgatagcatcttggatgcagtgatggtgcttcggaagcctgttaccttctgctgcctccacgtgttgcagtttcatttgggaaacacttattgttttagtcacatacaactctaaaaggagg

SEQ ID NO: 6821 - DNA, 122 bp, Homo sapiens
  misc_feature (61)..(62): /note="This region represents a CpG dinucleotide"
  misc_feature (61)..(61): /note="Nucleotide may be methylated to form 5-methylcytosine"
gcaagaatgtgggaatattttagcattagaatcagctaatcttctacttgaattagacaacggcattttccattaagtggtagatggattaaatggaatccttggcctgagggcttcttcaa

SEQ ID NO: 6822 - DNA, 122 bp, Homo sapiens
  misc_feature (61)..(62): /note="This region represents a CpG dinucleotide"
  misc_feature (61)..(61): /note="Nucleotide may be methylated to form 5-methylcytosine"
ctcatagtttatttacttaggaccaacacggagctggtaaacgacgtatagcatcttgcacgtgctatttatttcctgtctcttctagagcctggcactgtgccacacatcttcacagacaa

SEQ ID NO: 6823 - DNA, 122 bp, Homo sapiens
  misc_feature (61)..(62): /note="This region represents a CpG dinucleotide"
  misc_feature (61)..(61): /note="Nucleotide may be methylated to form 5-methylcytosine"
cccagtcactggtgcagtaaccacagccgaggagctggatcgtgagaccaagagcacccacgtcttcagggtcacggcgcaggaccacggcatgccccgacgaagtgccctggctacactca

SEQ ID NO: 6824 - DNA, 122 bp, Homo sapiens
  misc_feature (61)..(62): /note="This region represents a CpG dinucleotide"
  misc_feature (61)..(61): /note="Nucleotide may be methylated to form 5-methylcytosine"
cattatccaagatattctctatattggagcaagtcagatcctgtcccaccatttatcagtcgggaatggaagggacataaggagaaacacagagaagccctccggcagctcaccacgtaagt

SEQ ID NO: 6825 - DNA, 122 bp, Homo sapiens
  misc_feature (61)..(62): /note="This region represents a CpG dinucleotide"
  misc_feature (61)..(61): /note="Nucleotide may be methylated to form 5-methylcytosine"
ggaactgtgtccactccaaacatctgtctatccctcaaatcctggcttttgcatcaccatcgccagttctggggaaaggtgtgttacctttcttctcagcaggctaattcagatgagagtca

SEQ ID NO: 6826 - DNA, 122 bp, Homo sapiens
  misc_feature (61)..(62): /note="This region represents a CpG dinucleotide"
  misc_feature (61)..(61): /note="Nucleotide may be methylated to form 5-methylcytosine"
gcaatacatgtagataactcgctgtcacagacactgcttgatttccttctgtctgacttgcgtaattttcctggcagaggcacaactgtctttgtcctttgttatcatcaacttacatttaa

SEQ ID NO: 6827 - DNA, 122 bp, Homo sapiens
  misc_feature (61)..(62): /note="This region represents a CpG dinucleotide"
  misc_feature (61)..(61): /note="Nucleotide may be methylated to form 5-methylcytosine"
caggcccctggaggctggggagcagctccacatgttgagctgagtcgagttcagtgtggccgtaggcaggccctggagctctgggccagctgcacagccagagagagcccttgagggaggga

SEQ ID NO: 6828 - DNA, 122 bp, Homo sapiens
  misc_feature (61)..(62): /note="This region represents a CpG dinucleotide"
  misc_feature (61)..(61): /note="Nucleotide may be methylated to form 5-methylcytosine"
ggacagaaaccttatatcccaggcaaagccttagcaatgctgctgatgtcatatgctcatcgttgtcaagaattgaaaattaagatagtgatgaggtggtggcaggacaaatttcttctttt

SEQ ID NO: 6829 - DNA, 122 bp, Homo sapiens
  misc_feature (61)..(62): /note="This region represents a CpG dinucleotide"
  misc_feature (61)..(61): /note="Nucleotide may be methylated to form 5-methylcytosine"
cagaaatctcaacccttgggagcccttgggtggggcctgggcaggtccctgggcagtagccgtctgtagtgggcggctcatctgctgacaacagtatgacgaacaaatagcattttgtaccc

SEQ ID NO: 6830 - DNA, 122 bp, Homo sapiens
  misc_feature (61)..(62): /note="This region represents a CpG dinucleotide"
  misc_feature (61)..(61): /note="Nucleotide may be methylated to form 5-methylcytosine"
cttatactcatttcttatatacctcatatcatgcccataaaacctgagggcataaactctcgctgttccatggttctctgcatatatctctgcatgcagaggccttcagctgaagtttactg

SEQ ID NO: 6831 - DNA, 122 bp, Homo sapiens
  misc_feature (61)..(62): /note="This region represents a CpG dinucleotide"
  misc_feature (61)..(61): /note="Nucleotide may be methylated to form 5-methylcytosine"
ctagcttctcccagtctctctgcctcaccttctgggtgtggagaacttggtcagccactgcggaagcctgagctccctgcaaccaccagttcctctcttccctaaaacacgagcactgatct

SEQ ID NO: 6832 - DNA, 122 bp, Homo sapiens
  misc_feature (61)..(62): /note="This region represents a CpG dinucleotide"
  misc_feature (61)..(61): /note="Nucleotide may be methylated to form 5-methylcytosine"
tgctgggagagcacatcacataactgctcacatcacagggcacttttacagcttagaaagcgcctggctcaccctctgggtgctcccaaatgccacccgggagaccataggccgaggatgag

SEQ ID NO: 6833 - DNA, 122 bp, Homo sapiens
  misc_feature (61)..(62): /note="This region represents a CpG dinucleotide"
  misc_feature (61)..(61): /note="Nucleotide may be methylated to form 5-methylcytosine"
agtttgtgcttgtctgactacatggtcttaaaaccaaggtccttgtcttgaatacacaaccgtcaccacacaaagtccaagactgccaggtcattgctcatcaccagatggctctgtaaatc

SEQ ID NO: 6834 - DNA, 122 bp, Homo sapiens
  misc_feature (61)..(62): /note="This region represents a CpG dinucleotide"
  misc_feature (61)..(61): /note="Nucleotide may be methylated to form 5-methylcytosine"
gtttggagcttgcctgtgttgatgggattaaggcagggatgatttatgtgtaaatttatgcgttagtaacagcagtaaccgctgtagttacactagggttctaagagcaaatgttgattaaa

SEQ ID NO: 6835 - DNA, 122 bp, Homo sapiens
  misc_feature (61)..(62): /note="This region represents a CpG dinucleotide"
  misc_feature (61)..(61): /note="Nucleotide may be methylated to form 5-methylcytosine"
tgctaaccagggaagctccaccaagccttggtgtccagattttttcttgagggttggtcacgtaggcatagcatgactgatagcccatgtggctgaccttcagttttcagcccctccaaaga

SEQ ID NO: 6836 - DNA, 122 bp, Homo sapiens
  misc_feature (61)..(62): /note="This region represents a CpG dinucleotide"
  misc_feature (61)..(61): /note="Nucleotide may be methylated to form 5-methylcytosine"
ccattcaggtgagcagggctgttgctcagcaggtgagcctgccccgccatggagactcagcgctagagtgagaaccacatctgctcacaccaggggcctgaaccctgctaaccccacggggg

SEQ ID NO: 6837 - DNA, 122 bp, Homo sapiens
  misc_feature (61)..(62): /note="This region represents a CpG dinucleotide"
  misc_feature (61)..(61): /note="Nucleotide may be methylated to form 5-methylcytosine"
cagactcatgtgcctgcacagtccctaaatgtcactcatacagtgagggatggctttgtgcgttccccatgacagttactaagttattgcctctcactccaaacccaggcttctctgcttgg

SEQ ID NO: 6838 - DNA, 122 bp, Homo sapiens
  misc_feature (61)..(62): /note="This region represents a CpG dinucleotide"
  misc_feature (61)..(61): /note="Nucleotide may be methylated to form 5-methylcytosine"
taaaatctacatattaatccctctggtcaagctggaacttccaccacctggttttcttttcgccctttctttgttccttcccctcccccattgcctcaggatatctgaaattttctcctcaa

SEQ ID NO: 6839 - DNA, 122 bp, Homo sapiens
  misc_feature (61)..(62): /note="This region represents a CpG dinucleotide"
  misc_feature (61)..(61): /note="Nucleotide may be methylated to form 5-methylcytosine"
cctacactgaggccacgaaagctcagagaaagcagcagatggcagaggtaatgagactaacgttcaggggttctattaaaagatgtgtgaaattatgttgaaaagtttaaactgcccggcac

SEQ ID NO: 6840 - DNA, 122 bp, Homo sapiens
  misc_feature (61)..(62): /note="This region represents a CpG dinucleotide"
  misc_feature (61)..(61): /note="Nucleotide may be methylated to form 5-methylcytosine"
ttgtcaaaagtcacaatactgggtggagcttggattcgaactcaggcagtgggtcacccgcggcaggcgcgggctttgggtcgagccaggggcattaggtgaggagaggcactaggcgagga

SEQ ID NO: 6841 - DNA, 122 bp, Homo sapiens
  misc_feature (61)..(62): /note="This region represents a CpG dinucleotide"
  misc_feature (61)..(61): /note="Nucleotide may be methylated to form 5-methylcytosine"
gtccagcggatccctttggtcacttagctgtctcggttgtcagatcaactgtcctgttgtcgcattgcttgtgtttgtcacccttatttcacttaataatgatcccaaagcacaaatagtgt

SEQ ID NO: 6842 - DNA, 122 bp, Homo sapiens
  misc_feature (61)..(62): /note="This region represents a CpG dinucleotide"
  misc_feature (61)..(61): /note="Nucleotide may be methylated to form 5-methylcytosine"
ggtgaggacgggaaaagtgaataatgactgggtgtggccccgccagccacataaatcatccgctctgttaacatcaggtcactgtctccactccccgcttcccagctattgaaatatctatt

SEQ ID NO: 6843 - DNA, 122 bp, Homo sapiens
  misc_feature (61)..(62): /note="This region represents a CpG dinucleotide"
  misc_feature (61)..(61): /note="Nucleotide may be methylated to form 5-methylcytosine"
ccatctaaagaaatacataaaaaatcaagcatttgtggcccatactcttcctgccatgcccgttggtctctacctcatggctcacatggcatgtaatagcgagtcagtgtttttgttttaca

SEQ ID NO: 6844 - DNA, 122 bp, Homo sapiens
  misc_feature (61)..(62): /note="This region represents a CpG dinucleotide"
  misc_feature (61)..(61): /note="Nucleotide may be methylated to form 5-methylcytosine"
tttattcgttcacaacaaccacacatactctatttttctttgcttgcggaagaatgtcatcgtgaggcagaacaaatatgacaatttaaatgcgtaccccggggcttaagtagcacaatgcc

SEQ ID NO: 6845 - DNA, 122 bp, Homo sapiens
  misc_feature (61)..(62): /note="This region represents a CpG dinucleotide"
  misc_feature (61)..(61): /note="Nucleotide may be methylated to form 5-methylcytosine"
tatttatgcagtgcatgtaaacattgaaagcaaattcacatcaccaaggaaaatgatccccgtaacatgtctaaaaatcatctgtgactcagtgatatgattagtcctgtgaaagcgttcag

SEQ ID NO: 6846 - DNA, 122 bp, Homo sapiens
  misc_feature (61)..(62): /note="This region represents a CpG dinucleotide"
  misc_feature (61)..(61): /note="Nucleotide may be methylated to form 5-methylcytosine"
ttaacagcaaacaggatcactcttcaccagtattaaagggtttctcagctttagcaatgccgttagctactaagaatgatgctctcagtgcagacacatttgatgaagtggtggccttcagt

SEQ ID NO: 6847 - DNA, 122 bp, Homo sapiens
  misc_feature (61)..(62): /note="This region represents a CpG dinucleotide"
  misc_feature (61)..(61): /note="Nucleotide may be methylated to form 5-methylcytosine"
tacccaacagaccatttctcctgccatctcattctttagtcatcactaggggaaatcctccgtaaaggaaaggcagtcttagtaaagaaccattaaggaactgagatcaactctttacctga

SEQ ID NO: 6848 - DNA, 122 bp, Homo sapiens
  misc_feature (61)..(62): /note="This region represents a CpG dinucleotide"
  misc_feature (61)..(61): /note="Nucleotide may be methylated to form 5-methylcytosine"
cagaagggggaaggacttttttctatctctccggttagagttcctcatcccaacatgtgacgcaattgctgtggcagctcatccagggtgaactcacacatgtttcagacaacttaaacctt

SEQ ID NO: 6849 - DNA, 122 bp, Homo sapiens
  misc_feature (61)..(62): /note="This region represents a CpG dinucleotide"
  misc_feature (61)..(61): /note="Nucleotide may be methylated to form 5-methylcytosine"
agaggtggggctggagttgctttccctgaaccaacaagacaattctgactcagagcattacgttggccaccaattggatggctccccaaagaggcctctgagaagtatctattctcaggcta

SEQ ID NO: 6850 - DNA, 122 bp, Homo sapiens
  misc_feature (61)..(62): /note="This region represents a CpG dinucleotide"
  misc_feature (61)..(61): /note="Nucleotide may be methylated to form 5-methylcytosine"
agagtctattgtaacaagtttctttgtcttcatacagcacctgttactgtgcaacaagaccgtgtttttgaacacctggcataacatgaaactgttaggttatattgtggctaatcctgaag

SEQ ID NO: 6851 - DNA, 122 bp, Homo sapiens
  misc_feature (61)..(62): /note="This region represents a CpG dinucleotide"
  misc_feature (61)..(61): /note="Nucleotide may be methylated to form 5-methylcytosine"
actacagcccatcttcttcttctagagctaccaagggattaatagcatatcacacctaggcgtgctatggtgggaagcagaatgccaggggaacgtgtacttcattcaagtcattgcaaatt

SEQ ID NO: 6852 - DNA, 122 bp, Homo sapiens
  misc_feature (61)..(62): /note="This region represents a CpG dinucleotide"
  misc_feature (61)..(61): /note="Nucleotide may be methylated to form 5-methylcytosine"
accactgtaattcacattctgtgtctcatattcattcctctgaagccacttcgccagactcgttctcccatttatcctttaaacaggggaatgtagatcctttagattttatcacccagttt

SEQ ID NO: 6853 - DNA, 122 bp, Homo sapiens
  misc_feature (61)..(62): /note="This region represents a CpG dinucleotide"
  misc_feature (61)..(61): /note="Nucleotide may be methylated to form 5-methylcytosine"
gttacatcatcaaatcttataagaccccgtatatgacctcaactactgggcttcaaattacgtataaactcaaggctttgacattctaagacctcaggctatggcagggctacactgccagc

SEQ ID NO: 6854 - DNA, 122 bp, Homo sapiens
  misc_feature (61)..(62): /note="This region represents a CpG dinucleotide"
  misc_feature (61)..(61): /note="Nucleotide may be methylated to form 5-methylcytosine"
cttacagagcagttgtgtcaccctgatgaatcacagaatgcggtatgttctgcaggtctgcgtgaactgctgtgtgaaagcagcttagcagtgtcggtgggtaatgaacatgggtgtgggtt

SEQ ID NO: 6855 - DNA, 122 bp, Homo sapiens
  misc_feature (61)..(62): /note="This region represents a CpG dinucleotide"
  misc_feature (61)..(61): /note="Nucleotide may be methylated to form 5-methylcytosine"
gcttgatgcttttctgcatactctgaggggatagaacatctctcataaaacctgcacctccgctaggtagggagataagcaagaaaacaggactgaattcactgaagagcaaaacttgccta

SEQ ID NO: 6856 - DNA, 122 bp, Homo sapiens
  misc_feature (61)..(62): /note="This region represents a CpG dinucleotide"
  misc_feature (61)..(61): /note="Nucleotide may be methylated to form 5-methylcytosine"
caaaggctttggagctacacaggcaaggtttccagacccagttctgccacttcttaacttcgtgacactgggcaagacgcttctcttctctgaggctcagcttcatcttggggttactaaga

SEQ ID NO: 6857 - DNA, 122 bp, Homo sapiens
  misc_feature (61)..(62): /note="This region represents a CpG dinucleotide"
  misc_feature (61)..(61): /note="Nucleotide may be methylated to form 5-methylcytosine"
ccctttcagaaagagcacactgatcagtgggtggagcttctggctgcatcctaaaggtgtcgcaaggtccccacctagcctacctaccgcgtgactcacatgttactgctaaagggatgcct

SEQ ID NO: 6858 - DNA, 122 bp, Homo sapiens
  misc_feature (61)..(62): /note="This region represents a CpG dinucleotide"
  misc_feature (61)..(61): /note="Nucleotide may be methylated to form 5-methylcytosine"
ttaaatctacctcaacattgtgccaaacactgaagcagcaaaaaattaaatcaaaaaatacgaagagataaataagaaaagggtagcgtgatcatgattactgtcactggatttactggtct

SEQ ID NO: 6859 - DNA, 122 bp, Homo sapiens
  misc_feature (61)..(62): /note="This region represents a CpG dinucleotide"
  misc_feature (61)..(61): /note="Nucleotide may be methylated to form 5-methylcytosine"
agggctgagacagtgaggctggtgtggcaacggtgctgccctgagcccctgatctggctccgacactcactagccgtgggaccccaggcaagtcactgagcctgggctggattttctcatct

SEQ ID NO: 6860 - DNA, 122 bp, Homo sapiens
  misc_feature (61)..(62): /note="This region represents a CpG dinucleotide"
  misc_feature (61)..(61): /note="Nucleotide may be methylated to form 5-methylcytosine"
aaagaatgcagcagaagcagacacacctttacactcggggtgagtagtcggagagcaccacgtgatagagcagccagcgggaagagccaacaggtcaaccgggtccagggagctaagaaaac

SEQ ID NO: 6861 - DNA, 122 bp, Homo sapiens
  misc_feature (61)..(62): /note="This region represents a CpG dinucleotide"
  misc_feature (61)..(61): /note="Nucleotide may be methylated to form 5-methylcytosine"
agacaagccagagcattagatgcatggtccacttttttgttttcatcaggagagagaatccgctgtatggggtggttcctcccagttgcttcacagtatattgcataaaggagggacatgaa

SEQ ID NO: 6862 - DNA, 122 bp, Homo sapiens
  misc_feature (61)..(62): /note="This region represents a CpG dinucleotide"
  misc_feature (61)..(61): /note="Nucleotide may be methylated to form 5-methylcytosine"
actgctgttggtatatgccatggcctcctgccaacctaccagccttcgatccttcagttccgacaggtctcacactctgagccatgcctcctacctgagggacagtgccgtgatggatgact

SEQ ID NO: 6863 - DNA, 122 bp, Homo sapiens
  misc_feature (61)..(62): /note="This region represents a CpG dinucleotide"
  misc_feature (61)..(61): /note="Nucleotide may be methylated to form 5-methylcytosine"
ggctcttgagggcaaggactgtggaaaggggagattttcacaatctcagtacctaggacacggccacacacccctggcctcgctgagtcttcaggatgtccctgcccaaggatgaggctagg

SEQ ID NO: 6864 - DNA, 122 bp, Homo sapiens
  misc_feature (61)..(62): /note="This region represents a CpG dinucleotide"
  misc_feature (61)..(61): /note="Nucleotide may be methylated to form 5-methylcytosine"
ctacacactgtattttctttaagtcattcttcctactaacttattcatctcacaacatcacgagatcatttctattactgtacttatttcgcagatgaggggcctgatgtaccaagaggtta

SEQ ID NO: 6865 - DNA, 122 bp, Homo sapiens
  misc_feature (61)..(62): /note="This region represents a CpG dinucleotide"
  misc_feature (61)..(61): /note="Nucleotide may be methylated to form 5-methylcytosine"
tgattttgtgttggttggcctccagctaggagttggtgctctcaagaatgcatcagtatacggaggatcaggcagtgggtgagacctactcctggccttaaagctcccaagagattatgtat

SEQ ID NO: 6866 - DNA, 122 bp, Homo sapiens
  misc_feature (61)..(62): /note="This region represents a CpG dinucleotide"
  misc_feature (61)..(61): /note="Nucleotide may be methylated to form 5-methylcytosine"
ctttccttctcgcttgacaatgaaggcattctttttcactgcttaacccaagagtagctacgctggctggctcagaattgcatgacactggtcaggtatgtaagcaactcagtgcctttcct

SEQ ID NO: 6867 - DNA, 122 bp, Homo sapiens
  misc_feature (61)..(62): /note="This region represents a CpG dinucleotide"
  misc_feature (61)..(61): /note="Nucleotide may be methylated to form 5-methylcytosine"
acctgggtaaaaataaagcccaggcaatatgactgcaccttttccattccatgctgcaatcgcatttacatctcgaaattgactctaatgaccaaggcaaggtcaactagaaaaatccactc

SEQ ID NO: 6868 - DNA, 122 bp, Homo sapiens
  misc_feature (61)..(62): /note="This region represents a CpG dinucleotide"
  misc_feature (61)..(61): /note="Nucleotide may be methylated to form 5-methylcytosine"
tttcttgcctcatggaaatgatgtgagattaaaggacatgatgcatttagatgccaagaacggtgcctggcacacaggaagcacccattagtcattcactgctatgtttctcttgtttttgt

SEQ ID NO: 6869 - DNA, 122 bp, Homo sapiens
  misc_feature (61)..(62): /note="This region represents a CpG dinucleotide"
  misc_feature (61)..(61): /note="Nucleotide may be methylated to form 5-methylcytosine"
tggagtaggaaagaatgacacaatttggcacctttaaccagaagatctttaatgagctggcgtgggggtggaggggacagagaggaaggaaggacagttaggattttggcagtaacacaaag

SEQ ID NO: 6870 - DNA, 122 bp, Homo sapiens
  misc_feature (61)..(62): /note="This region represents a CpG dinucleotide"
  misc_feature (61)..(61): /note="Nucleotide may be methylated to form 5-methylcytosine"
aaatagttaagatcaactggtaaacccagtggagaaaccaatctggttagtcaggtataccgtacaattaacagtttcatcccaataaataaaacaaattttgggatatatatttgcttgcc

SEQ ID NO: 6871 - DNA, 122 bp, Homo sapiens
  misc_feature (61)..(62): /note="This region represents a CpG dinucleotide"
  misc_feature (61)..(61): /note="Nucleotide may be methylated to form 5-methylcytosine"
acagctgatggggatgaggtgtaactcacacatcctaaaagcttcaacagggcactggagcgccgctgaccaagttactggcattttctattgccaggaagccgcattctcctctctgctaa

SEQ ID NO: 6872 - DNA, 122 bp, Homo sapiens
  misc_feature (61)..(62): /note="This region represents a CpG dinucleotide"
  misc_feature (61)..(61): /note="Nucleotide may be methylated to form 5-methylcytosine"
gagctcctcccgggtgttctcaccttcgagagctcagtgtgtcatggtcagcagatgaggcgctgaggtgtagagatgagcaagtcataaccctgcctttggctgtagacttgctgtgtagc

SEQ ID NO: 6873 - DNA, 122 bp, Homo sapiens
  misc_feature (61)..(62): /note="This region represents a CpG dinucleotide"
  misc_feature (61)..(61): /note="Nucleotide may be methylated to form 5-methylcytosine"
tgtgtgttttacctggaaataaaacagctgcacccctagggcaggcaggtgaagagacagcgatgatctcattgcctgcccagcccattttcctcgtgacccacgttgcagctggcatgcag

SEQ ID NO: 6874 - DNA, 122 bp, Homo sapiens
  misc_feature (61)..(62): /note="This region represents a CpG dinucleotide"
  misc_feature (61)..(61): /note="Nucleotide may be methylated to form 5-methylcytosine"
tgatttttttaattctctctcctgaagcccaggtaggatacaaaaccaagtctggtggcacgtatgaggaggagctcaggacacgagcaggacctgggtagcagggttagcttgtccttggt

SEQ ID NO: 6875 - DNA, 122 bp, Homo sapiens
  misc_feature (61)..(62): /note="This region represents a CpG dinucleotide"
  misc_feature (61)..(61): /note="Nucleotide may be methylated to form 5-methylcytosine"
gcagagtgtcttgtcatttccagagaaaccagacagcaggtttgatgtgggtgagaaatgcgcatgcctgcttttgtaattggtaaggctgtctaaggatttgattccttgtgagccacatg

SEQ ID NO: 6876 - DNA, 122 bp, Homo sapiens
  misc_feature (61)..(62): /note="This region represents a CpG dinucleotide"
  misc_feature (61)..(61): /note="Nucleotide may be methylated to form 5-methylcytosine"
aagtaggtgtcagagtaagagatgtgtgtaggaatgtctgtctctctttctgtgcctagacgcaaccaggagagagctgctggctgttctttgctgctataggcattaaatgcttttctggc

SEQ ID NO: 6877 - DNA, 122 bp, Homo sapiens
  misc_feature (61)..(62): /note="This region represents a CpG dinucleotide"
  misc_feature (61)..(61): /note="Nucleotide may be methylated to form 5-methylcytosine"
tctgggttccctaacacctttttctaagctaatgctccttgacgataatgagaaaggaggcggggaatggatgaagtttcataactgagtgaagaggcaggttcaggataaaaggcccagtt

SEQ ID NO: 6878 - DNA, 122 bp, Homo sapiens
  misc_feature (61)..(62): /note="This region represents a CpG dinucleotide"
  misc_feature (61)..(61): /note="Nucleotide may be methylated to form 5-methylcytosine"
acccccagaatcacgatgatcaggagcaccagaattcctatccccagcagaagcttacagcgcttatccccgtcttccatgggcactctgcaatagtcatacgaagtagatgccatccagat

SEQ ID NO: 6879 - DNA, 122 bp, Homo sapiens
  misc_feature (61)..(62): /note="This region represents a CpG dinucleotide"
  misc_feature (61)..(61): /note="Nucleotide may be methylated to form 5-methylcytosine"
ctcatcactcattccagaaactgagcaggttcttgattcattcagcttcttagcttctcacgttcggtcactctccaaatcccatttattcttcctcccagctcaatctctgttgaatctat

SEQ ID NO: 6880 - DNA, 122 bp, Homo sapiens
  misc_feature (61)..(62): /note="This region represents a CpG dinucleotide"
  misc_feature (61)..(61): /note="Nucleotide may be methylated to form 5-methylcytosine"
tgaatatgataatccaggcaacattgttagcacagaaccctacacatgttgttagctattcgttaagaataaatgtatacagatcaggcatttgattgcaaccatcaaagcaccagtattca

SEQ ID NO: 6881 - DNA, 122 bp, Homo sapiens
  misc_feature (61)..(62): /note="This region represents a CpG dinucleotide"
  misc_feature (61)..(61): /note="Nucleotide may be methylated to form 5-methylcytosine"
ctcaggtgatccacctgccttggcctcccaaagtgctgggattacaggcgtgagccactgcgtgcagcaaataaatgctctttgaatagatggttgggcttgcatgagatggtgagagaagt

SEQ ID NO: 6882 - DNA, 122 bp, Homo sapiens
  misc_feature (61)..(62): /note="This region represents a CpG dinucleotide"
  misc_feature (61)..(61): /note="Nucleotide may be methylated to form 5-methylcytosine"
ctcctcagttttgtggagcctgatctcttttccaaggaagaggtgggagattttattcaacgctaccaggatattgagaaagaatctgagtcaggcaagttcctttcctgcaaatcatcccc

SEQ ID NO: 6883 - DNA, 122 bp, Homo sapiens
  misc_feature (61)..(62): /note="This region represents a CpG dinucleotide"
  misc_feature (61)..(61): /note="Nucleotide may be methylated to form 5-methylcytosine"
aaaccaatgctctcgccctttctttaaagtggggaccatggaccagcaacatcagcaacacgtggaggcttattagaaaggtagaatctcaggctccacctgctgagtcagaatctgtattt

SEQ ID NO: 6884 - DNA, 122 bp, Homo sapiens
  misc_feature (61)..(62): /note="This region represents a CpG dinucleotide"
  misc_feature (61)..(61): /note="Nucleotide may be methylated to form 5-methylcytosine"
gggggccacataatcagatgagccactttgggcagccaaagtgagtggatcaccggaggtcgggaattggaaaccagcctggccaacattgtgaaaccctgtctctactaaaaaacaaaaaa

SEQ ID NO: 6885 - DNA, 122 bp, Homo sapiens
  misc_feature (61)..(62): /note="This region represents a CpG dinucleotide"
  misc_feature (61)..(61): /note="Nucleotide may be methylated to form 5-methylcytosine"
gtgggaggacacgtgcctagcatttttacaatatgccttttcttttagccctgaatctaccgtgtcgagggcattcttttgtgtatctggtggctcttaggagtttgggatctaatagtacc

SEQ ID NO: 6886 - DNA, 122 bp, Homo sapiens
  misc_feature (61)..(62): /note="This region represents a CpG dinucleotide"
  misc_feature (61)..(61): /note="Nucleotide may be methylated to form 5-methylcytosine"
attctctctgtggagccaatatactctgcacttcctacagtcaaaatactctgaagaagacggagattctaaggtccaagccttagggcaggagctcatttttgcttccttcagaatgagtt

SEQ ID NO: 6887 - DNA, 122 bp, Homo sapiens
  misc_feature (61)..(62): /note="This region represents a CpG dinucleotide"
  misc_feature (61)..(61): /note="Nucleotide may be methylated to form 5-methylcytosine"
gatgagccaccagcctcccagtctcaggtggaattcgtgagctggtgcaggtcaggtacccgtggtggtgatgaaacactgatcagaataggcgctcggtgccactgtcacaggagtgcagg

SEQ ID NO: 6888 - DNA, 122 bp, Homo sapiens
  misc_feature (61)..(62): /note="This region represents a CpG dinucleotide"
  misc_feature (61)..(61): /note="Nucleotide may be methylated to form 5-methylcytosine"
aacctacctgagcgctgtagctgctgttgcaccattgccagatgcagaggtgttccaggacgagggtttaagagagggtgactagcagcaggtaaagggtaaaagggctgacccaggatggg

SEQ ID NO: 6889 - DNA, 122 bp, Homo sapiens
  misc_feature (61)..(62): /note="This region represents a CpG dinucleotide"
  misc_feature (61)..(61): /note="Nucleotide may be methylated to form 5-methylcytosine"
caggcttcctttcccctgccgtgaaccttcagaacctgtctgtgcgactcatgcggctgtcgagggcagtaatcctctaaatggttgaactacagtggacttccttgagtagtttttaaaaa

SEQ ID NO: 6890 - DNA, 122 bp, Homo sapiens
  misc_feature (61)..(62): /note="This region represents a CpG dinucleotide"
  misc_feature (61)..(61): /note="Nucleotide may be methylated to form 5-methylcytosine"
gtaccttagtttcctcacctgtaaagccaggatggccatgcaagtatcattcagagtaggcgtgaggtttcaataagccagattaggtgatgcacttaccacagtgcctgcacccgttaagt

SEQ ID NO: 6891 - DNA, 122 bp, Homo sapiens
  misc_feature (61)..(62): /note="This region represents a CpG dinucleotide"
  misc_feature (61)..(61): /note="Nucleotide may be methylated to form 5-methylcytosine"
gcagcgcctagaaacacctcccagctgccgcctacttgcccaggctcaccctgccctacacgggcgcaccgcctcagggcttcctgaaacagcctcacttaccagcgcggccaggatatcag

SEQ ID NO: 6892 - DNA, 122 bp, Homo sapiens
  misc_feature (61)..(62): /note="This region represents a CpG dinucleotide"
  misc_feature (61)..(61): /note="Nucleotide may be methylated to form 5-methylcytosine"
tgcagggatttcaaaacacttaacaaaaattgctctaagtaggccgggcacagtggctgacgcatgtaatcccagtactttaggaggccggggtgggcggatcacctgaggtcaggagttcg

SEQ ID NO: 6893 - DNA, 122 bp, Homo sapiens
  misc_feature (61)..(62): /note="This region represents a CpG dinucleotide"
  misc_feature (61)..(61): /note="Nucleotide may be methylated to form 5-methylcytosine"
tgttcagttgaaagccaagttattttgagctgagcaaaatgaggattcaaattacaggagcgcagagtaaacttttggcatattagcggacatcttggtaagtttctcaggacagtgttttt

SEQ ID NO: 6894 - DNA, 122 bp, Homo sapiens
  misc_feature (61)..(62): /note="This region represents a CpG dinucleotide"
  misc_feature (61)..(61): /note="Nucleotide may be methylated to form 5-methylcytosine"
gatctggcctatctgtcactaaccactaccagttctagaaaacatgctaaataagaaatacgttccagagaaagatacagaggaatcagaggatttgacagataaaagagttctattattgc

SEQ ID NO: 6895 - DNA, 122 bp, Homo sapiens
  misc_feature (61)..(62): /note="This region represents a CpG dinucleotide"
  misc_feature (61)..(61): /note="Nucleotide may be methylated to form 5-methylcytosine"
tgactggtccccagatgccatacaacacttaaatgcagcccagtaatggttcctgaccaccgcacctccactccaagaacacatagctgatgcagctgccgagctatttcctagcctaatta

SEQ ID NO: 6896 - DNA, 122 bp, Homo sapiens
  misc_feature (61)..(62): /note="This region represents a CpG dinucleotide"
  misc_feature (61)..(61): /note="Nucleotide may be methylated to form 5-methylcytosine"
ctcaagagataacaaaagcacccgcctcctaggatgacatgagttcatgtgcacagagtgcgtagaacaagtgagtcagcttactcagtgattacaggaagtgtctacggggttatccctgc

SEQ ID NO: 6897 - DNA, 122 bp, Homo sapiens
  misc_feature (61)..(62): /note="This region represents a CpG dinucleotide"
  misc_feature (61)..(61): /note="Nucleotide may be methylated to form 5-methylcytosine"
ttcaagtaagactactgcgtgaagactacacatattgcaaaacctacttactaagcttcccggttctctttcttctggatcttgctcctggatcatgctctccccctatttcatttctcttt

SEQ ID NO: 6898 - DNA, 122 bp, Homo sapiens
  misc_feature (61)..(62): /note="This region represents a CpG dinucleotide"
  misc_feature (61)..(61): /note="Nucleotide may be methylated to form 5-methylcytosine"
cagtgaagtggggagacaacaggcatctgaggccactgcagtgctgcttctgattatgaacgtttcaccatgttgtgaaggtgcagctgaatcaagccaggattaactggtcagcacctgga

SEQ ID NO: 6899 - DNA, 122 bp, Homo sapiens
  misc_feature (61)..(62): /note="This region represents a CpG dinucleotide"
  misc_feature (61)..(61): /note="Nucleotide may be methylated to form 5-methylcytosine"
cttcacttactgctgggttgcagctgggctttttctagaacaggacacttggttacactacgttaccaggtgtcgattgccagaggaaaagacttttgaaaaagaagttcagttcacagaac

SEQ ID NO: 6900 - DNA, 122 bp, Homo sapiens
  misc_feature (61)..(62): /note="This region represents a CpG dinucleotide"
  misc_feature (61)..(61): /note="Nucleotide may be methylated to form 5-methylcytosine"
aaacttatcccataaatgacacctccaaaagagcttgccctatattaaacaaccctatcacgtgacacagttgggaaatgggaaattctatctaattttggtattaggacatatgcaacagt

SEQ ID NO: 6901 - DNA, 122 bp, Homo sapiens
  misc_feature (61)..(62): /note="This region represents a CpG dinucleotide"
  misc_feature (61)..(61): /note="Nucleotide may be methylated to form 5-methylcytosine"
gcttacttgtagcattgtcacataacatggtgtgctttggactttgctgaactttagtcccgtaagtccatttgctttgtgattcttggactttttaaactttggaatttcaaagttttaat

SEQ ID NO: 6902 - DNA, 122 bp, Homo sapiens
  misc_feature (61)..(62): /note="This region represents a CpG dinucleotide"
  misc_feature (61)..(61): /note="Nucleotide may be methylated to form 5-methylcytosine"
caagagatcaaactgcagatcccacgctggttcttctgggaggtcggagaagacatggatcgcagtgagagagaggcccttggagtcagcaaacacaacgcgcttcttggcttggttgtgtg

SEQ ID NO: 6903 - DNA, 122 bp, Homo sapiens
  misc_feature (61)..(62): /note="This region represents a CpG dinucleotide"
  misc_feature (61)..(61): /note="Nucleotide may be methylated to form 5-methylcytosine"
attctttttcctaccatctcttttttttctgtaacacttcataggaaaatgcagagatttcgatggtgttttatggcagtattcccaggaacattaaaacttcataaacttcgtatcatgtg

SEQ ID NO: 6904 - DNA, 122 bp, Homo sapiens
  misc_feature (61)..(62): /note="This region represents a CpG dinucleotide"
  misc_feature (61)..(61): /note="Nucleotide may be methylated to form 5-methylcytosine"
agccactgcaccagcctgtttttttcttttaaatcatcttgacctcaacatcttagtcaacgcttatatgaaattttagcaaaacagtgattgaaaagcggagaatgtaaagtcccagagtt

SEQ ID NO: 6905 - DNA, 122 bp, Homo sapiens
  misc_feature (61)..(62): /note="This region represents a CpG dinucleotide"
  misc_feature (61)..(61): /note="Nucleotide may be methylated to form 5-methylcytosine"
gccaagagtggaccttagtgcaagccagggacattagtcagtaataatgttccacgctgacgcacaaatgaaagttattttatttgtgtgaacaggagagctgacatggtctgtattgatat

SEQ ID NO: 6906 - DNA, 122 bp, Homo sapiens
  misc_feature (61)..(62): /note="This region represents a CpG dinucleotide"
  misc_feature (61)..(61): /note="Nucleotide may be methylated to form 5-methylcytosine"
ccgcaccctgtctctgtcataactcatggcatcgctgtctgttttgcagagccaggcagccgcagagaagtcaaggcagattccagagttctcaaaaaatgcctacttagtgataagaagga

SEQ ID NO: 6907 - DNA, 122 bp, Homo sapiens
  misc_feature (61)..(62): /note="This region represents a CpG dinucleotide"
  misc_feature (61)..(61): /note="Nucleotide may be methylated to form 5-methylcytosine"
gtatccgccttacgtaaccacatggagtgatggaaatgggtgagcagcccggaatgtaggcggtggcctggcccatgcatctccagagaccatgaagactgctcaagccctacataggatgt

SEQ ID NO: 6908 - DNA, 122 bp, Homo sapiens
  misc_feature (61)..(62): /note="This region represents a CpG dinucleotide"
  misc_feature (61)..(61): /note="Nucleotide may be methylated to form 5-methylcytosine"
tcagagagcatgaaaaggtgagactaaggaggaaattcttttcacagagaagctcagagccgaaccaatccttggctgtagagaaggaggagctttcagagtttgctggttccaagcttttt

SEQ ID NO: 6909 - DNA, 122 bp, Homo sapiens
  misc_feature (61)..(62): /note="This region represents a CpG dinucleotide"
  misc_feature (61)..(61): /note="Nucleotide may be methylated to form 5-methylcytosine"
ggcagcagtgtgaagtcttatgttgaagaaaaacctgcagtcacaggaccatcctgcggacgctgcctgaaccgtctcgcagcccagcaaagtccgaaggcgtgtctgaactcggccacatt

SEQ ID NO: 6910 - DNA, 122 bp, Homo sapiens
  misc_feature (61)..(62): /note="This region represents a CpG dinucleotide"
  misc_feature (61)..(61): /note="Nucleotide may be methylated to form 5-methylcytosine"
tctcccttattcttcttaagaccagctccactgtgcacctgatgctagtaagcgttgggacgtgctgggagactcccctattcaggggacaaccctgacagatctgagcaatgatgacattt

SEQ ID NO: 6911 - DNA, 122 bp, Homo sapiens
  misc_feature (61)..(62): /note="This region represents a CpG dinucleotide"
  misc_feature (61)..(61): /note="Nucleotide may be methylated to form 5-methylcytosine"
tgcacctggccctagaaggaagatttaacagtaaaatatacttaaatgctgggctacctccgcagactagctcagcctctttgggtctcaaatcagcctggccgggaggctgagtggaggtt

SEQ ID NO: 6912 - DNA, 122 bp, Homo sapiens
  misc_feature (61)..(62): /note="This region represents a CpG dinucleotide"
  misc_feature (61)..(61): /note="Nucleotide may be methylated to form 5-methylcytosine"
tcaggaaggggtgctgaccaaggggcatcctgatgctcatgaacatcatgggggaagacgcgacagacaactggcaaagagtttggagttggatctgtcatactacatagaaagcaagcaaa

SEQ ID NO: 6913 - DNA, 122 bp, Homo sapiens
  misc_feature (61)..(62): /note="This region represents a CpG dinucleotide"
  misc_feature (61)..(61): /note="Nucleotide may be methylated to form 5-methylcytosine"
atagcttattgtttaggtaagaacaacagaacagagaggcagagggattcccgaggtttgcggagcggatcggtaagggtgagccccgaacctgtcttcgctcagttccatagtcgacagcc

SEQ ID NO: 6914 - DNA, 122 bp, Homo sapiens
  misc_feature (61)..(62): /note="This region represents a CpG dinucleotide"
  misc_feature (61)..(61): /note="Nucleotide may be methylated to form 5-methylcytosine"
agaaattggcacaggttagagttgtagaaaaacaatgccgggtgcggtggcacatgcctgcggtcacagcagtagctgatgcaagaggattgcatgagaccagcagttcaaggctagcaatt

SEQ ID NO: 6915 - DNA, 122 bp, Homo sapiens
  misc_feature (61)..(62): /note="This region represents a CpG dinucleotide"
  misc_feature (61)..(61): /note="Nucleotide may be methylated to form 5-methylcytosine"
gacccatgagcactgacagttaatgtgcccagcacactgtggggcacagtcagcactcagcgcgcggccaccagccacattctttaaagaacaattcaagtgccacctccttcaggaagtcc

SEQ ID NO: 6916 - DNA, 122 bp, Homo sapiens
  misc_feature (61)..(62): /note="This region represents a CpG dinucleotide"
  misc_feature (61)..(61): /note="Nucleotide may be methylated to form 5-methylcytosine"
gtggctgtttcccttaatgttttgtttgctggtgagtttctgctgtcagtttcctcattccgtctatcacctgattgagacttggagcatgtatactgatagctgtaagaatttttttccag

SEQ ID NO: 6917 - DNA, 122 bp, Homo sapiens
  misc_feature (61)..(62): /note="This region represents a CpG dinucleotide"
  misc_feature (61)..(61): /note="Nucleotide may be methylated to form 5-methylcytosine"
aggcacaatgaatccaacagcatcctcttcttcggcagattttcttctccttaagatgatcgttgccatggcattgctgcttttagcaaaaaacaactaccagtgttactcatatgattatg

SEQ ID NO: 6918 - DNA, 122 bp, Homo sapiens
  misc_feature (61)..(62): /note="This region represents a CpG dinucleotide"
  misc_feature (61)..(61): /note="Nucleotide may be methylated to form 5-methylcytosine"
gtggatgaggcagcaaagggtaagcagcttcttgaacagcccaaacctgtgcaggccagacgttccagcacgatggggtcagcccatgtgtttgtgtgacaaagagtcttctagacctcagg

SEQ ID NO: 6919 - DNA, 122 bp, Homo sapiens
  misc_feature (61)..(62): /note="This region represents a CpG dinucleotide"
  misc_feature (61)..(61): /note="Nucleotide may be methylated to form 5-methylcytosine"
tagaagatgagcaagccttggtcatagtccaggaagacacccaccttgtcaagcttgtcccggacgttaagccgcgtccagggctccgtgcaggcgctgtactggttgccatcgtgcatcac

SEQ ID NO: 6920 - DNA, 122 bp, Homo sapiens
  misc_feature (61)..(62): /note="This region represents a CpG dinucleotide"
  misc_feature (61)..(61): /note="Nucleotide may be methylated to form 5-methylcytosine"
ctctattgtgaatcctctcttcctccccagccagatctataaattagaaataatattatgcgtcctggctagtctcactacagcttaatgaggttatttctaagaaatcctttcatttcaaa

SEQ ID NO: 6921 - DNA, 122 bp, Homo sapiens
  misc_feature (61)..(62): /note="This region represents a CpG dinucleotide"
  misc_feature (61)..(61): /note="Nucleotide may be methylated to form 5-methylcytosine"
gtttttgtgaaatttatttttggtgccagtctacataaaatagggcaatatgatagagcacgtatgtgtgtgctgagaagagtgaggagttgtgcaatacttcagctaggataggcaggaag

SEQ ID NO: 6922 - DNA, 122 bp, Homo sapiens
  misc_feature (61)..(62): /note="This region represents a CpG dinucleotide"
  misc_feature (61)..(61): /note="Nucleotide may be methylated to form 5-methylcytosine"
agagctggcaatcgaaaatggtgtggtcagaaagacaatgacatccgcccacttcctcgacgccagctgagctcccaggatgtgcctcaagtcatcctgggccacctggcctcaaccatgcc

SEQ ID NO: 6923 - DNA, 122 bp, Homo sapiens
  misc_feature (61)..(62): /note="This region represents a CpG dinucleotide"
  misc_feature (61)..(61): /note="Nucleotide may be methylated to form 5-methylcytosine"
ttttttctctactccaatatttataacagattacctttgccagttctctaaccacacttccgtaagatctttaataccataagatataattatcttcatctgaaaacctaactagttagtgc

SEQ ID NO: 6924 - DNA, 122 bp, Homo sapiens
  misc_feature (61)..(62): /note="This region represents a CpG dinucleotide"
  misc_feature (61)..(61): /note="Nucleotide may be methylated to form 5-methylcytosine"
gttggctgcaggtctatgtgaatagatctttgttaaactctggagtaaaaatatgctgcccgtaggagccttgttgataataacgcttcaaatgcgttactcaccttgcaatcatcaaatgc

SEQ ID NO: 6925 - DNA, 122 bp, Homo sapiens
  misc_feature (61)..(62): /note="This region represents a CpG dinucleotide"
  misc_feature (61)..(61): /note="Nucleotide may be methylated to form 5-methylcytosine"
ccacaggtcacgatgagtaagcactgcattgacacaggcttctccatctccatgtcaggacgtgcactcgccgatgaagtgtccacccaagatggcgacgggtgagcacgggcacgtgtggc

SEQ ID NO: 6926 - DNA, 122 bp, Homo sapiens
  misc_feature (61)..(62): /note="This region represents a CpG dinucleotide"
  misc_feature (61)..(61): /note="Nucleotide may be methylated to form 5-methylcytosine"
agtaatcatgcttcctatttgtatagctctttacaaatgatttggaggtatgttaactcacggttcagtggagaggataagatactcattctctgcaaataaggaattgaggctcagccagg

SEQ ID NO: 6927 - DNA, 122 bp, Homo sapiens
  misc_feature (61)..(62): /note="This region represents a CpG dinucleotide"
  misc_feature (61)..(61): /note="Nucleotide may be methylated to form 5-methylcytosine"
ggtgagaagcccttctatacaggttccctccccgagctaagcaaaagcgttgaggtgacacgtgtcacctgttcctagaggatctgcactgaaggcggggcaagcaggacctgctgtacaca

SEQ ID NO: 6928 - DNA, 122 bp, Homo sapiens
  misc_feature (61)..(62): /note="This region represents a CpG dinucleotide"
  misc_feature (61)..(61): /note="Nucleotide may be methylated to form 5-methylcytosine"
tgagtggaggcagatcaagtgctgacgtgtctgggacatgacaaaggcacagcagacactcgtcattcctactattagcagaaattgcagcattcatacccatagccaaccctgggtgaatc

SEQ ID NO: 6929 - DNA, 122 bp, Homo sapiens
  misc_feature (61)..(62): /note="This region represents a CpG dinucleotide"
  misc_feature (61)..(61): /note="Nucleotide may be methylated to form 5-methylcytosine"
actgagggagtgggtcagcttggatcaacgccagcactctggatgtcagcagtggccaagcgtcttccttctgactctgtaaagctggagcaatcctcttattgcacaggtactggcactgt

SEQ ID NO: 6930 - DNA, 122 bp, Homo sapiens
  misc_feature (61)..(62): /note="This region represents a CpG dinucleotide"
  misc_feature (61)..(61): /note="Nucleotide may be methylated to form 5-methylcytosine"
tgaacacactgggactagtagatttttctgaacctgtccttaaagctcttctcgaaaccacgtgttgatcctctgtctattttctcatctctctgtttctccctccaccctcattcttcctc

SEQ ID NO: 6931 - DNA, 122 bp, Homo sapiens
  misc_feature (61)..(62): /note="This region represents a CpG dinucleotide"
  misc_feature (61)..(61): /note="Nucleotide may be methylated to form 5-methylcytosine"
ctttcatatagctttcaaactacctagcaggattaagcaaccaaatgcctttggaagtgacgcatttgacaatgcatcttcgcaatgggtctccttccttccctgatatacaagccctgtac

SEQ ID NO: 6932 - DNA, 122 bp, Homo sapiens
  misc_feature (61)..(62): /note="This region represents a CpG dinucleotide"
  misc_feature (61)..(61): /note="Nucleotide may be methylated to form 5-methylcytosine"
tcctagaaggagaaatggatgctaggagaaatcaagacggaataaatacatattcagaaacgggtgagaggtcaaagtttacacagacctagatgtctgtaaatacaagcacacataataat

SEQ ID NO: 6933 - DNA, 122 bp, Homo sapiens
  misc_feature (61)..(62): /note="This region represents a CpG dinucleotide"
  misc_feature (61)..(61): /note="Nucleotide may be methylated to form 5-methylcytosine"
tttactttaaaaatttggaaaagtaagcaccatgagttcattgatatgagtaggaacctgcgtcatcctgtggtatttgtgaatattgtgggctcttttatcaatttcatttgtttctaagt

SEQ ID NO: 6934 - DNA, 122 bp, Homo sapiens
  misc_feature (61)..(62): /note="This region represents a CpG dinucleotide"
  misc_feature (61)..(61): /note="Nucleotide may be methylated to form 5-methylcytosine"
ccccaccacccaggtctatgatggtgatcacctgtacacgactctgcactccagtgactacgtcactcagtggtaacagagagcaaagctctaccatctggtcatcctctcagcttgcccag

SEQ ID NO: 6935 - DNA, 122 bp, Homo sapiens
  misc_feature (61)..(62): /note="This region represents a CpG dinucleotide"
  misc_feature (61)..(61): /note="Nucleotide may be methylated to form 5-methylcytosine"
cctaagtcctatgcatctttatgctaccccatgagggagcagctgcaagtcatgaacacacgtccatcatgcagcatcatgggtgtggcacccaaaggatgagctggaaaatgaaacattat

SEQ ID NO: 6936 - DNA, 122 bp, Homo sapiens
  misc_feature (61)..(62): /note="This region represents a CpG dinucleotide"
  misc_feature (61)..(61): /note="Nucleotide may be methylated to form 5-methylcytosine"
gaaaatacttggtatgattcagtctttttaaatttgtaagacttgttttgtaagctaacacgtgatctgttctagagaatgttttgccagcacttgagaagaatgctattgcgtttgggtgg

SEQ ID NO: 6937 - DNA, 122 bp, Homo sapiens
  misc_feature (61)..(62): /note="This region represents a CpG dinucleotide"
  misc_feature (61)..(61): /note="Nucleotide may be methylated to form 5-methylcytosine"
aaccccatcccaaggacagactgcacagcgtcagaagggacacgccctggggcttgggtgcgtgtatgtctgtgaatgtttgcatgtattttcagcgtttgcttcctcccctcaccactacc

SEQ ID NO: 6938 - DNA, 122 bp, Homo sapiens
  misc_feature (61)..(62): /note="This region represents a CpG dinucleotide"
  misc_feature (61)..(61): /note="Nucleotide may be methylated to form 5-methylcytosine"
gaggccaaccaaccccatcactaaaatctggactctgtgctgattgttgtggactttttgcgtgttcatcctccctgcagacaactgaagattcattctctccagagggtagaagagaagat

SEQ ID NO: 6939 - DNA, 122 bp, Homo sapiens
  misc_feature (61)..(62): /note="This region represents a CpG dinucleotide"
  misc_feature (61)..(61): /note="Nucleotide may be methylated to form 5-methylcytosine"
gattacaggtgcacgccaccacaccctgctaattttttttttttgtacttttagtagagacgagctttcaccgtgctggacaggctggtcttgaatgcctcacctgcaatgacctgcctgcc

SEQ ID NO: 6940 - DNA, 122 bp, Homo sapiens
  misc_feature (61)..(62): /note="This region represents a CpG dinucleotide"
  misc_feature (61)..(61): /note="Nucleotide may be methylated to form 5-methylcytosine"
ttcaataacagtcttaatcttttggccacacctcttatctttatttataaaatttgctaccgcatgcaaaacacctcaagggcttgatatgcatagcttttgtactgtcatcaaaaccctgg

SEQ ID NO: 6941 - DNA, 122 bp, Homo sapiens
  misc_feature (61)..(62): /note="This region represents a CpG dinucleotide"
  misc_feature (61)..(61): /note="Nucleotide may be methylated to form 5-methylcytosine"
gctgcaaggcttaaatgaggtaaaatcacattcgtggttcatcacatgggcttaagcttccgacagctctgaatttggaaccatgctctgtaactattagctggccttggcagaatactaaa

SEQ ID NO: 6942 - DNA, 122 bp, Homo sapiens
  misc_feature (61)..(62): /note="This region represents a CpG dinucleotide"
  misc_feature (61)..(61): /note="Nucleotide may be methylated to form 5-methylcytosine"
agctgttggtattaattcagtgacaccatgatgtcaaggatgatgtttctggaattctcccgatttccttttaagtctcaagtagctgctgtaacttctggcaccattcaaaaatatttatt

SEQ ID NO: 6943 - DNA, 122 bp, Homo sapiens
  misc_feature (61)..(62): /note="This region represents a CpG dinucleotide"
  misc_feature (61)..(61): /note="Nucleotide may be methylated to form 5-methylcytosine"
gcagattttgttttatgtccatcagggagccagtgaggtgtataaagcagaagagtgacacggtctgattggcaattttaaaaggtcactattgctactgcatggagcctggactagaaaga

SEQ ID NO: 6944 - DNA, 122 bp, Homo sapiens
  misc_feature (61)..(62): /note="This region represents a CpG dinucleotide"
  misc_feature (61)..(61): /note="Nucleotide may be methylated to form 5-methylcytosine"
tcatcaagtcatagctatagaatgtacattattaccatgaaattgcgtcatttcctatgccgtaatgataaagtagaagtccacagttacgtaaggcaataatctgccagggcagttaaact

SEQ ID NO: 6945 - DNA, 122 bp, Homo sapiens
  misc_feature (61)..(62): /note="This region represents a CpG dinucleotide"
  misc_feature (61)..(61): /note="Nucleotide may be methylated to form 5-methylcytosine"
ctgtcaatttctgtccctgttacctgcaaggttgactcagctttcggtttctctctaccacgcctccatacccagggcaaagtctgctgcctgcacacaggtagctactggctgagttcttt

SEQ ID NO: 6946 - DNA, 122 bp, Homo sapiens
  misc_feature (61)..(62): /note="This region represents a CpG dinucleotide"
  misc_feature (61)..(61): /note="Nucleotide may be methylated to form 5-methylcytosine"
gtacgctgctggaacgccggagtgcaaaggcttttagggctacattgcaaccctcgggctcgatttcgccctttgggctgtcgagtaaacatttgcttttcacacagtgtgacccctttctc

SEQ ID NO: 6947 - DNA, 122 bp, Homo sapiens
  misc_feature (61)..(62): /note="This region represents a CpG dinucleotide"
  misc_feature (61)..(61): /note="Nucleotide may be methylated to form 5-methylcytosine"
tacttaaccctttgagcccttctcatccatacaggaaggagaagagtagcacctgcctcacgtgtttaaccagaaagaggacctcaggctccagtgatggatcgggacatgtcttgtcctga

SEQ ID NO: 6948 - DNA, 122 bp, Homo sapiens
  misc_feature (61)..(62): /note="This region represents a CpG dinucleotide"
  misc_feature (61)..(61): /note="Nucleotide may be methylated to form 5-methylcytosine"
aaggcaggaagtttctaaatgcctgaggagaaaaaggagagggcctgccagagaaataatcgggggcaactactcccaaacattgcctaggttctgcactggaaggagctaattagggtagg

SEQ ID NO: 6949 - DNA, 122 bp, Homo sapiens
  misc_feature (61)..(62): /note="This region represents a CpG dinucleotide"
  misc_feature (61)..(61): /note="Nucleotide may be methylated to form 5-methylcytosine"
ttccaactgatactggagttgtttgctttgaacaatgtgactttgtttctttgtcagacacggccagcagcatagctgttgcttaggaaaggaacaaacacattaggagcttgctaaaagtc

SEQ ID NO: 6950 - DNA, 122 bp, Homo sapiens
  misc_feature (61)..(62): /note="This region represents a CpG dinucleotide"
  misc_feature (61)..(61): /note="Nucleotide may be methylated to form 5-methylcytosine"
ggtgatctgcctgcctcagcctcccaaagtgctgggattataggtgtgagccactgcgtccggcatgtgtcagatttttaaatggcactttttatgtagcaatataaatttttttaaaaatt

SEQ ID NO: 6951 - DNA, 122 bp, Homo sapiens
  misc_feature (61)..(62): /note="This region represents a CpG dinucleotide"
  misc_feature (61)..(61): /note="Nucleotide may be methylated to form 5-methylcytosine"
ccccactgatgccaggtcctggtatcattgctgtctgactactcacacaccatgaggtagcgtccctgcttttttttttttttttttcctgagacagagtctcgctctgtcacccaggctgg

SEQ ID NO: 6952 - DNA, 122 bp, Homo sapiens
  misc_feature (61)..(62): /note="This region represents a CpG dinucleotide"
  misc_feature (61)..(61): /note="Nucleotide may be methylated to form 5-methylcytosine"
taggcagtctgtgaacctgcaggaacaagccagtgagtcagggcaccaagtgtggacatacggctatctggattaaatatctgtaaatatctgacccttttgaggttttgagactttattct

SEQ ID NO: 6953 - DNA, 122 bp, Homo sapiens
  misc_feature (61)..(62): /note="This region represents a CpG dinucleotide"
  misc_feature (61)..(61): /note="Nucleotide may be methylated to form 5-methylcytosine"
cgacttagcattgggctccattataattgctctgtctttgatctgtcctttcactttctacgtctaactcagtgcaaatgcatgctacagtatctcttaagaaacactatattattcccata

SEQ ID NO: 6954 - DNA, 122 bp, Homo sapiens
  misc_feature (61)..(62): /note="This region represents a CpG dinucleotide"
  misc_feature (61)..(61): /note="Nucleotide may be methylated to form 5-methylcytosine"
gtcaccactttgtttaactacctcagtgggtccctaaactttaataaactctgtaagacccgtatgctctgccccacccatctctctggcctccttttaccagtgaaacccagccccagcag

SEQ ID NO: 6955 - DNA, 122 bp, Homo sapiens
  misc_feature (61)..(62): /note="This region represents a CpG dinucleotide"
  misc_feature (61)..(61): /note="Nucleotide may be methylated to form 5-methylcytosine"
gaagggaatgacaggagctgactcatgccctagcaggacttctctgtctgctgtgttgagcgctggtgatgggggcgtgggaagaagttaggagccattacagaggtcccggtgggccatga

SEQ ID NO: 6956 - DNA, 122 bp, Homo sapiens
  misc_feature (61)..(62): /note="This region represents a CpG dinucleotide"
  misc_feature (61)..(61): /note="Nucleotide may be methylated to form 5-methylcytosine"
gggtgtctttgccttcctagaacttcctgatgataagaagcctgtaaacaccagtgtgtccgtcagtatttggaatcttgtttattacatagtcctcaggttcattgtcaaaaaattcttta

SEQ ID NO: 6957 - DNA, 122 bp, Homo sapiens
  misc_feature (61)..(62): /note="This region represents a CpG dinucleotide"
  misc_feature (61)..(61): /note="Nucleotide may be methylated to form 5-methylcytosine"
ctgggacccctgctgttttaaaatcctagaaggccccagtcacacgttgtcaataatagccgtcggaggtgaggagtgaagaagggctgttcaggaaacagtttgagcccttcaagtggaca

SEQ ID NO: 6958 - DNA, 122 bp, Homo sapiens
  misc_feature (61)..(62): /note="This region represents a CpG dinucleotide"
  misc_feature (61)..(61): /note="Nucleotide may be methylated to form 5-methylcytosine"
ttataaagggatggaacaggaaggtttctagctggtcaggctacccaaagaagaaagaaacgtgtttacccagcatttgccccatctcgaactgtgtgctgctggctggacaagaggcagga

SEQ ID NO: 6959 - DNA, 122 bp, Homo sapiens
  misc_feature (61)..(62): /note="This region represents a CpG dinucleotide"
  misc_feature (61)..(61): /note="Nucleotide may be methylated to form 5-methylcytosine"
aaactcaaagctgatactgtgtgtgtatgttgtcgttccagtgcctcatggcgtgggagtcgattattccactactgcaggagaaacaagaggccaagtaaagttctttcttgggacggaga

SEQ ID NO: 6960 - DNA, 122 bp, Homo sapiens
  misc_feature (61)..(62): /note="This region represents a CpG dinucleotide"
  misc_feature (61)..(61): /note="Nucleotide may be methylated to form 5-methylcytosine"
caccacatagtactagtctcctttaattactttacctctggaaaggatgactcatttgagcgtaaatttgggaagaataaatggggtgtgttcaattcagctccactagagaggtttcatag

SEQ ID NO: 6961 - DNA, 122 bp, Homo sapiens
  misc_feature (61)..(62): /note="This region represents a CpG dinucleotide"
  misc_feature (61)..(61): /note="Nucleotide may be methylated to form 5-methylcytosine"
caaagaggaggccaggctggagcgggccgagaaatccctggagaaggacgccgccttgttcgacgagttcgtcagggagaatgactgcagctccgtgcaggccatgagagcgtgagcctgcg

SEQ ID NO: 6962 - DNA, 122 bp, Homo sapiens
  misc_feature (61)..(62): /note="This region represents a CpG dinucleotide"
  misc_feature (61)..(61): /note="Nucleotide may be methylated to form 5-methylcytosine"
atgtatcttgcctttgtttgctttcgttgcatgtgggatattgcggggtgggggagaaggcgagttcctgagccttcagtagaccagatgagaatgaggtatggaatgtggggaaacattca

SEQ ID NO: 6963 - DNA, 122 bp, Homo sapiens
  misc_feature (61)..(62): /note="This region represents a CpG dinucleotide"
  misc_feature (61)..(61): /note="Nucleotide may be methylated to form 5-methylcytosine"
gtgcagtcagaggagaattatgaaacaagagaccgttgatttctccaccactcccacatgcgggccactctcactgcgcatgcagcctgcagtcatgctgcccagtgccaggattcccactg

SEQ ID NO: 6964 - DNA, 122 bp, Homo sapiens
  misc_feature (61)..(62): /note="This region represents a CpG dinucleotide"
  misc_feature (61)..(61): /note="Nucleotide may be methylated to form 5-methylcytosine"
ctcaggtgatccgcccgccttggcctcccaaagtactgggattacaggcgtgagtcaccacgcccgtcccattgtgtgttttaaggcagcaacaggggagcattaaaccaagcatgaggccc

SEQ ID NO: 6965 - DNA, 122 bp, Homo sapiens
  misc_feature (61)..(62): /note="This region represents a CpG dinucleotide"
  misc_feature (61)..(61): /note="Nucleotide may be methylated to form 5-methylcytosine"
ggggagaagttaccactcttgaagcaaccagctttcacctgaactaatagagtgagaatgcgttacctcagcacaagtcattcatgagggagccgcccccatgactcaaatgtttcccatta

SEQ ID NO: 6966 - DNA, 122 bp, Homo sapiens
  misc_feature (61)..(62): /note="This region represents a CpG dinucleotide"
  misc_feature (61)..(61): /note="Nucleotide may be methylated to form 5-methylcytosine"
ctagttaagaccatgtcttctttgttcaccattgaacagtactcagctaagcacagggcacgtattgagtactcaaccagtatgtgaggaaagactggttagaggtataaatgaatgaatga

SEQ ID NO: 6967 - DNA, 122 bp, Homo sapiens
  misc_feature (61)..(62): /note="This region represents a CpG dinucleotide"
  misc_feature (61)..(61): /note="Nucleotide may be methylated to form 5-methylcytosine"
tcagtcagttactgtttgtgggcagagatctgagaggaacattctcatggacacctgtggcgactttgtaatgtgtcaactcaagctagtctaaagtacatttctcaagactcccttaccca

SEQ ID NO: 6968 - DNA, 122 bp, Homo sapiens
  misc_feature (61)..(62): /note="This region represents a CpG dinucleotide"
  misc_feature (61)..(61): /note="Nucleotide may be methylated to form 5-methylcytosine"
gtggcggtgaaggcttgagggccacggaggaagatccgacgacagccgacggccttcgttcgcttccgccctgcacagctggttcttcaagaacctgagccgcaaggacgcggagcggcagc

SEQ ID NO: 6969 - DNA, 122 bp, Homo sapiens
  misc_feature (61)..(62): /note="This region represents a CpG dinucleotide"
  misc_feature (61)..(61): /note="Nucleotide may be methylated to form 5-methylcytosine"
caccttgataatcccaggcttcttggctaatcttagcgccttggcccagagcagtcacatcggcaaaaaattcccgcccacttctcctcccagttccacccctcacagcagctgctcacatc

SEQ ID NO: 6970 - DNA, 122 bp, Homo sapiens
  misc_feature (61)..(62): /note="This region represents a CpG dinucleotide"
  misc_feature (61)..(61): /note="Nucleotide may be methylated to form 5-methylcytosine"
ctttagcacagcggttgctgtgaggattaaatgagatgctttgtgtaaagccctgtgcagcgtgtgacccacagtgagtgctcagttcatagtggttgctgctgtctgttatgataacactg

SEQ ID NO: 6971 - DNA, 122 bp, Homo sapiens
  misc_feature (61)..(62): /note="This region represents a CpG dinucleotide"
  misc_feature (61)..(61): /note="Nucleotide may be methylated to form 5-methylcytosine"
cacgattatatttcacctgggacatgctggtaagtgccccaggctgctaattacctgtaacgtcctctgacatttagcctgcccacgcaaaagccctgttaagtagacccacaacctattac

SEQ ID NO: 6972 - DNA, 122 bp, Homo sapiens
  misc_feature (61)..(62): /note="This region represents a CpG dinucleotide"
  misc_feature (61)..(61): /note="Nucleotide may be methylated to form 5-methylcytosine"
gaagtaatgcccctaccacagacatccatgtcttaatccctggaacctacaaatatgttacgtcaatggaaaggaagattttaggttgcagatggattaaaattatgagtgagctgaagctg

SEQ ID NO: 6973 - DNA, 122 bp, Homo sapiens
  misc_feature (61)..(62): /note="This region represents a CpG dinucleotide"
  misc_feature (61)..(61): /note="Nucleotide may be methylated to form 5-methylcytosine"
tggaaatggcttttgaatctacagcacattcttttggacctcctcagcacaggaacatctcgttcctttagggatttgatagttgggaagagccagaagtcacttggctggaggtctagagt

SEQ ID NO: 6974 - DNA, 122 bp, Homo sapiens
  misc_feature (61)..(62): /note="This region represents a CpG dinucleotide"
  misc_feature (61)..(61): /note="Nucleotide may be methylated to form 5-methylcytosine"
actgtaggagccttagagtatgccattggctttcatatacattgtcttattgaatctcaacgtcaactctgctcaaatggtgttactatctgaggcccagagagggtaagtgatttgactga

SEQ ID NO: 6975 - DNA, 122 bp, Homo sapiens
  misc_feature (61)..(62): /note="This region represents a CpG dinucleotide"
  misc_feature (61)..(61): /note="Nucleotide may be methylated to form 5-methylcytosine"
tagcctttccaaggcagggccagggaacctgtgttttcagcatgctccccaggtggttctcgggtagtctgtggactggtaaaacctgctccaatgctctttcctcaatgaataagggatgc

SEQ ID NO: 6976 - DNA, 122 bp, Homo sapiens
  misc_feature (61)..(62): /note="This region represents a CpG dinucleotide"
  misc_feature (61)..(61): /note="Nucleotide may be methylated to form 5-methylcytosine"
gttgtggagaagtttttgactacatctggatagtatttacaatgactagcatcaacagggcgtcaatcagagctgctgggattgaaatctattgtgttggaattattataaaaagcaagaga

SEQ ID NO: 6977 - DNA, 122 bp, Homo sapiens
  misc_feature (61)..(62): /note="This region represents a CpG dinucleotide"
  misc_feature (61)..(61): /note="Nucleotide may be methylated to form 5-methylcytosine"
caaaagtatctatagtgacactgaaaccacagagaagaacacagactctggaaccaggtgcgcgggggttctgggaagataagtaggaactcaccagggcacagagatgggggtcacctagg

SEQ ID NO: 6978 - DNA, 122 bp, Homo sapiens
  misc_feature (61)..(62): /note="This region represents a CpG dinucleotide"
  misc_feature (61)..(61): /note="Nucleotide may be methylated to form 5-methylcytosine"
gccagcaccttagcatgaatcaagccattgtcaccaaactctgctagtagtcattgtgttcgtcatcatcatgcgcttccagtgtaaactttaaaaaatgccagtttcatttaagaatgtct

SEQ ID NO: 6979 - DNA, 122 bp, Homo sapiens
  misc_feature (61)..(62): /note="This region represents a CpG dinucleotide"
  misc_feature (61)..(61): /note="Nucleotide may be methylated to form 5-methylcytosine"
catgtcctgtgccagattctcgctggtgcccgagacactccccgatggagggttagggctcggagccctttaactccttcggcacagtggagaaaggtttaggaaatagcagaacaaacgca

SEQ ID NO: 6980 - DNA, 122 bp, Homo sapiens
  misc_feature (61)..(62): /note="This region represents a CpG dinucleotide"
  misc_feature (61)..(61): /note="Nucleotide may be methylated to form 5-methylcytosine"
catcctggccaaaaataaaagcttcttaagctgggtgactctaagtttgtgtgtggtttacgcttggacatgcgttacttttatgacataaaagtgacttcaatctggtaagatatatttat

SEQ ID NO: 6981 - DNA, 122 bp, Homo sapiens
  misc_feature (61)..(62): /note="This region represents a CpG dinucleotide"
  misc_feature (61)..(61): /note="Nucleotide may be methylated to form 5-methylcytosine"
gggatggttagaaaaggtgcttatgtacttccactctttctcttatatccctgccactatcgtgggaacatacccaggctagcctactgggagaataagagaattacatgagagacagctga

SEQ ID NO: 6982 - DNA, 122 bp, Homo sapiens
  misc_feature (61)..(62): /note="This region represents a CpG dinucleotide"
  misc_feature (61)..(61): /note="Nucleotide may be methylated to form 5-methylcytosine"
aattggaaattactcaaatcctatgtcaaaatatcactgcataggctgggctcagtggctcgtgcctgtaatcccagcactttgggaaggcaaggcaggtggaacacttgaggtcaggagtt

SEQ ID NO: 6983 - DNA, 122 bp, Homo sapiens
  misc_feature (61)..(62): /note="This region represents a CpG dinucleotide"
  misc_feature (61)..(61): /note="Nucleotide may be methylated to form 5-methylcytosine"
aggacacagggcatggaggggattggagagagaaagtagccagagggatctagggttccacgcagggagaaaacaagggcagtaatgaagtaacttgtcttcttgtgactctcagcctctcc

SEQ ID NO: 6984 - DNA, 122 bp, Homo sapiens
  misc_feature (61)..(62): /note="This region represents a CpG dinucleotide"
  misc_feature (61)..(61): /note="Nucleotide may be methylated to form 5-methylcytosine"
caggccttcctcatctctgtatctgccaccacactgagctcaggcttagcacccactaggcgtcagcaagtgcttctcaaatgaatgaaccaatgaatgagcaagtggatgagccattgacc

SEQ ID NO: 6985 - DNA, 122 bp, Homo sapiens
  misc_feature (61)..(62): /note="This region represents a CpG dinucleotide"
  misc_feature (61)..(61): /note="Nucleotide may be methylated to form 5-methylcytosine"
ggcccctggagagaagagttaatgggatcaaggctggctcatgagttatcagctactccacgaagctgagtctcatagattaatgcagaactggcaagcttaaagtcctggggaaaaggctg

SEQ ID NO: 6986 - DNA, 122 bp, Homo sapiens
  misc_feature (61)..(62): /note="This region represents a CpG dinucleotide"
  misc_feature (61)..(61): /note="Nucleotide may be methylated to form 5-methylcytosine"
catagctgaggagtggcagagcatgtctttgtgcagggcttcaagatccttttcatgatgcgatgttgtcttcaagacaggggctgaaagcctgccactccaggtcttccttgataagacct

SEQ ID NO: 6987 - DNA, 122 bp, Homo sapiens
  misc_feature (61)..(62): /note="This region represents a CpG dinucleotide"
  misc_feature (61)..(61): /note="Nucleotide may be methylated to form 5-methylcytosine"
ctccggaagagtctggttttgactggcgtctctgtcctctcacttaggtcgctgagattacgggtgttgtggaaactgccaaagtttaccaactaggtggcaccagaacaaacaaagggctg

SEQ ID NO: 6988 - DNA, 122 bp, Homo sapiens
  misc_feature (61)..(62): /note="This region represents a CpG dinucleotide"
  misc_feature (61)..(61): /note="Nucleotide may be methylated to form 5-methylcytosine"
aattatactgcatagcaaactagcccaaaagtcagtggcttacaataataggcattcacgcgtcttgctcatgagtcacagtctacttagttttaggtttcagggtggctttatttctgctc

SEQ ID NO: 6989 - DNA, 122 bp, Homo sapiens
  misc_feature (61)..(62): /note="This region represents a CpG dinucleotide"
  misc_feature (61)..(61): /note="Nucleotide may be methylated to form 5-methylcytosine"
gtgtgttctggcccagagcctactgggccacgatttgtgtatcttttgtaaagtgccatgcgtgagccggatcggccctgacataattactggaatattttaatatgaagaagagtctctga

SEQ ID NO: 6990 - DNA, 122 bp, Homo sapiens
  misc_feature (61)..(62): /note="This region represents a CpG dinucleotide"
  misc_feature (61)..(61): /note="Nucleotide may be methylated to form 5-methylcytosine"
tttccccaaagaagaagctgggcataaagagtgattttctcagggtctcataatcagtaacggagcagaattcaactacaggacctccctgggaacctgttctctttccttgtcctgatgtg

SEQ ID NO: 6991 - DNA, 122 bp, Homo sapiens
  misc_feature (61)..(62): /note="This region represents a CpG dinucleotide"
  misc_feature (61)..(61): /note="Nucleotide may be methylated to form 5-methylcytosine"
acttttaaattgcttctttattaactacaataacacaaggtatctttcatttctttcatacgcaacttctttctgagtcttccaattctttgtcacccttctcctgaggtcagggaaaatat

SEQ ID NO: 6992 - DNA, 122 bp, Homo sapiens
  misc_feature (61)..(62): /note="This region represents a CpG dinucleotide"
  misc_feature (61)..(61): /note="Nucleotide may be methylated to form 5-methylcytosine"
cagatatcagccaggcccagattcgaggcatagctccattacttagtggctttgacttaccgtgtaagactccatttcctcatctgtaaaatgaggagaaccggccagccgggcgcagtgac

SEQ ID NO: 6993 - DNA, 122 bp, Homo sapiens
  misc_feature (61)..(62): /note="This region represents a CpG dinucleotide"
  misc_feature (61)..(61): /note="Nucleotide may be methylated to form 5-methylcytosine"
ggaattgacacactatgtcatacatttgccccagtgtcaatatctgctgattcatggagtcgtgttttatatactagctctgctcatgacctgtgtgccctctgaccagagctatgctcatg

SEQ ID NO: 6994 - DNA, 122 bp, Homo sapiens
  misc_feature (61)..(62): /note="This region represents a CpG dinucleotide"
  misc_feature (61)..(61): /note="Nucleotide may be methylated to form 5-methylcytosine"
ttcctgcaccctccccttaagtggcttccagtaagctaccaaaccctggtggcgcctgcacgccccagggcaagccagcctgaccttctcctcagagcctgagtcagggctttccccatctc

SEQ ID NO: 6995 - DNA, 122 bp, Homo sapiens
  misc_feature (61)..(62): /note="This region represents a CpG dinucleotide"
  misc_feature (61)..(61): /note="Nucleotide may be methylated to form 5-methylcytosine"
accagacggtctggaaaatcccgaagcagaagcccgtattcatctaggcattcaagatctcgtagcaggcacagattgtctagatccagaagtcgtcattctagtatttctcctagcacact

SEQ ID NO: 6996 - DNA, 122 bp, Homo sapiens
  misc_feature (61)..(62): /note="This region represents a CpG dinucleotide"
  misc_feature (61)..(61): /note="Nucleotide may be methylated to form 5-methylcytosine"
gttcagtaaatatttgttgaatgaaaggataaattctcatttatcttagggcatttgtaacggggcaaccagatggcttcaggaggcacctctgaagattctgcattgctcagattatgcat

SEQ ID NO: 6997 - DNA, 122 bp, Homo sapiens
  misc_feature (61)..(62): /note="This region represents a CpG dinucleotide"
  misc_feature (61)..(61): /note="Nucleotide may be methylated to form 5-methylcytosine"
gggggaaggcggtgagatgacaccacagggcattaagccagggccccagatcaggtgtgacgtggaaaccaagcatgcttcagggaaggcctggcagcagagacccgacttctgggcaggca

SEQ ID NO: 6998 - DNA, 122 bp, Homo sapiens
  misc_feature (61)..(62): /note="This region represents a CpG dinucleotide"
  misc_feature (61)..(61): /note="Nucleotide may be methylated to form 5-methylcytosine"
gatgagtaacactatattatgaaaaagaggatattgttagtatgaagaagtatgagtaatcgaaggattgtatgagtagctgttccaaactgccaattactggcttgtcaacaatgattcca

SEQ ID NO: 6999 - DNA, 122 bp, Homo sapiens
  misc_feature (61)..(62): /note="This region represents a CpG dinucleotide"
  misc_feature (61)..(61): /note="Nucleotide may be methylated to form 5-methylcytosine"
gggatgctgctgttagaaaaattaaactaatactttggatcattttcaaccactgcacagcgtaattttaaatatgcaaacctgatgaatttaatcagaataaaaatcacattaacatacag

SEQ ID NO: 7000 - DNA, 122 bp, Homo sapiens
  misc_feature (61)..(62): /note="This region represents a CpG dinucleotide"
  misc_feature (61)..(61): /note="Nucleotide may be methylated to form 5-methylcytosine"
ctcaagcagtcctccttattcagcttcttgaggagctgggattatgagcattagccaccacgcccagccagtgtgaacattttgatcttgtgatatctgtaagacgtctaagtgttgttgga

SEQ ID NO: 7001 - DNA, 122 bp, Homo sapiens
  misc_feature (61)..(62): /note="This region represents a CpG dinucleotide"
  misc_feature (61)..(61): /note="Nucleotide may be methylated to form 5-methylcytosine"
taactttgactttcatatatgtatacaaggcctgcttttccttacgtttcagtaagcatacggtctcttttggcaccagcttaatggtatgctatgtatcttttatttgcgccaagtcttac

SEQ ID NO: 7002 - DNA, 122 bp, Homo sapiens
  misc_feature (61)..(62): /note="This region represents a CpG dinucleotide"
  misc_feature (61)..(61): /note="Nucleotide may be methylated to form 5-methylcytosine"
agtagtttgctgacccctgtcctgcagataatctccccaatcccatggatttaaatgtcacgtgtgtgctgacacacaggtttgggctggaaatacagtcctgatatctcccataattccag

SEQ ID NO: 7003 - DNA, 122 bp, Homo sapiens
  misc_feature (61)..(62): /note="This region represents a CpG dinucleotide"
  misc_feature (61)..(61): /note="Nucleotide may be methylated to form 5-methylcytosine"
agtgaaataattttctcaatctccccctctgctaagtggcagagtcaggactagaatgtgcgtctctctgacgccatatcctgaactcagatactgtgactggattattcacaacttaatcc

SEQ ID NO: 7004 - DNA, 122 bp, Homo sapiens
  misc_feature (61)..(62): /note="This region represents a CpG dinucleotide"
  misc_feature (61)..(61): /note="Nucleotide may be methylated to form 5-methylcytosine"
ccccccaccgccacaagacaggcagaggaggaggaggtgaggatgtgggaaggaaattctcggtttaaaaaaaccacattgtggttctaaatgtcatcaaaggtgaaacttgcttccttagc

SEQ ID NO: 7005 - DNA, 122 bp, Homo sapiens
  misc_feature (61)..(62): /note="This region represents a CpG dinucleotide"
  misc_feature (61)..(61): /note="Nucleotide may be methylated to form 5-methylcytosine"
catttcttagcaaatttaccatgatcagagtctggccttaactgaccaggaagaggactccgtcattcatgcagagatgaaaatacttattagtaatcaactgatgctgatccaatgcagaa

SEQ ID NO: 7006 - DNA, 122 bp, Homo sapiens
  misc_feature (61)..(62): /note="This region represents a CpG dinucleotide"
  misc_feature (61)..(61): /note="Nucleotide may be methylated to form 5-methylcytosine"
gctgaagcaatgaggccctctggccattttgaaagcattgttgcctcacaaatgctgtgacgacattgataccaggctagctgagtcttaacacctcactccattctggaattacagcttcc

SEQ ID NO: 7007 - DNA, 122 bp, Homo sapiens
  misc_feature (61)..(62): /note="This region represents a CpG dinucleotide"
  misc_feature (61)..(61): /note="Nucleotide may be methylated to form 5-methylcytosine"
atcacctggaggtagcattctgaaagggcaagccccaaaacacaagcgttcttcaagctgcgtcttatatcaagcttgctgacatcccattggccaaagcaagtcacatggccaaatttcaa

SEQ ID NO: 7008 - DNA, 122 bp, Homo sapiens
  misc_feature (61)..(62): /note="This region represents a CpG dinucleotide"
  misc_feature (61)..(61): /note="Nucleotide may be methylated to form 5-methylcytosine"
tcataccctagcctggaactactaaatctgtctgcattttaaccagatccccaggtgatccgatgcattggaaagtgtgagaaggcctgggcggggataggaggatgaacctgcaacaggaa

SEQ ID NO: 7009 - DNA, 122 bp, Homo sapiens
  misc_feature (61)..(62): /note="This region represents a CpG dinucleotide"
  misc_feature (61)..(61): /note="Nucleotide may be methylated to form 5-methylcytosine"
tattgcaatttgttttgcgtgcttggtctgtccctcactagacgatgtactccttcagggcgtgtcttattattccttgttctgtacccgggccttgcacaatattttgcacacaaatgact

SEQ ID NO: 7010 - DNA, 122 bp, Homo sapiens
  misc_feature (61)..(62): /note="This region represents a CpG dinucleotide"
  misc_feature (61)..(61): /note="Nucleotide may be methylated to form 5-methylcytosine"
ttcatgaaatttcagctttaaagtgttggcagaagcagagattcttgagtcttttctaaccgatgcatacttgaacttgaaataatcaattctttctttttcataaactgctataataatca

SEQ ID NO: 7011 - DNA, 122 bp, Homo sapiens
  misc_feature (61)..(62): /note="This region represents a CpG dinucleotide"
  misc_feature (61)..(61): /note="Nucleotide may be methylated to form 5-methylcytosine"
cctagagggcaaacagtggactggtggaaaacaacagccataaatcacactgtcaggcggcggggagaggagcgaagcacaggcacatgaaggccattcacaggaaacacagtacagccgct

SEQ ID NO: 7012 - DNA, 122 bp, Homo sapiens
  misc_feature (61)..(62): /note="This region represents a CpG dinucleotide"
  misc_feature (61)..(61): /note="Nucleotide may be methylated to form 5-methylcytosine"
acactccctgcctcctagaagagactagaatgcttaaggcatttgcccaaggtcacttagcgctttagttaatgatgaagctgatgttcaagcccaagtctgcctgaggacagaacctgtgc

SEQ ID NO: 7013 - DNA, 122 bp, Homo sapiens
  misc_feature (61)..(62): /note="This region represents a CpG dinucleotide"
  misc_feature (61)..(61): /note="Nucleotide may be methylated to form 5-methylcytosine"
tattttgtgactctcagctctttgagaaggcagtgtgtctcagaaagccagcggtaaaagcgatggttgctaagggaacaattgaattgctgacactgagacatgtaatgtgactgaaaact

SEQ ID NO: 7014 - DNA, 122 bp, Homo sapiens
  misc_feature (61)..(62): /note="This region represents a CpG dinucleotide"
  misc_feature (61)..(61): /note="Nucleotide may be methylated to form 5-methylcytosine"
gccgggctacagcactgttgtgagaatgcagatgaggttgtaaaggtgaagcacgtgtcacgcttctctcaataaagccatcattgctgttaggattgtcattaggaaaggctttgggccgg

SEQ ID NO: 7015 - DNA, 122 bp, Homo sapiens
  misc_feature (61)..(62): /note="This region represents a CpG dinucleotide"
  misc_feature (61)..(61): /note="Nucleotide may be methylated to form 5-methylcytosine"
atgttcctctactgcaaggcaatcctgtatgtgtgcatcatttggccctgttcacatcatcgtttgggaaatggagttcagggaagtggctcaaatgttgacactggctactgctactgctg

SEQ ID NO: 7016 - DNA, 122 bp, Homo sapiens
  misc_feature (61)..(62): /note="This region represents a CpG dinucleotide"
  misc_feature (61)..(61): /note="Nucleotide may be methylated to form 5-methylcytosine"
aaatgcagctcctgtccatgggtccctgccctgttccttaaccatgagagcagatgcccccgtttccagggaacacataagcaggtgcagttcacaagtgaatcacttgccctgggaaggtg

SEQ ID NO: 7017 - DNA, 122 bp, Homo sapiens
  misc_feature (61)..(62): /note="This region represents a CpG dinucleotide"
  misc_feature (61)..(61): /note="Nucleotide may be methylated to form 5-methylcytosine"
cctggggataatcagcacccttgtcatgatctgcatggccactcctgtcttcaccatcatcgtcattcctcttggcattatttatgtatctgttcaggtaggtttggaaatggctaagtcat

SEQ ID NO: 7018 - DNA, 122 bp, Homo sapiens
  misc_feature (61)..(62): /note="This region represents a CpG dinucleotide"
  misc_feature (61)..(61): /note="Nucleotide may be methylated to form 5-methylcytosine"
taagggacttgtttcttcctcttaccaaacggaggtgtggctcatgaggactcagccttgcgtcctggctgtggctgtgtctttttgctgtcaaatgctgtgaacgccgtccggtgtagggt

SEQ ID NO: 7019 - DNA, 122 bp, Homo sapiens
  misc_feature (61)..(62): /note="This region represents a CpG dinucleotide"
  misc_feature (61)..(61): /note="Nucleotide may be methylated to form 5-methylcytosine"
gtcccctggtgattacctgtaggaaggtgatcccttttggatcattttcacacccaacttcgcctcttctatactgcacatttactaactccttcagtgggtgtgtgctcagagaatggata

SEQ ID NO: 7020 - DNA, 122 bp, Homo sapiens
  misc_feature (61)..(62): /note="This region represents a CpG dinucleotide"
  misc_feature (61)..(61): /note="Nucleotide may be methylated to form 5-methylcytosine"
gggggaggactgtgggagagagagttgagcatgaaaagcctgaaactcactgtgttcaagcgccacagccatccctggtgtgctaaccacagccctggcctggagccagcccctcaactcac

SEQ ID NO: 7021 - DNA, 122 bp, Homo sapiens
  misc_feature (61)..(62): /note="This region represents a CpG dinucleotide"
  misc_feature (61)..(61): /note="Nucleotide may be methylated to form 5-methylcytosine"
ggcgtgaaccacctcaccaggcctggtgtatagattctaaagtcagtttagccacagccacgtggaaccaaccttcagctgcctccccatccagtcaaatgatgcaatcccaacagaacact

SEQ ID NO: 7022 - DNA, 122 bp, Homo sapiens
  misc_feature (61)..(62): /note="This region represents a CpG dinucleotide"
  misc_feature (61)..(61): /note="Nucleotide may be methylated to form 5-methylcytosine"
tgtgacagtcaagagcctctgctcagttggccgtgagttgactgacagccaaggcagatgcgcctaggcaaacgctcccaccacacccaggccctgctgcactccagaggcctccaacgctg

SEQ ID NO: 7023 - DNA, 122 bp, Homo sapiens
  misc_feature (61)..(62): /note="This region represents a CpG dinucleotide"
  misc_feature (61)..(61): /note="Nucleotide may be methylated to form 5-methylcytosine"
gcagcagcttgaggcagtcgggctggttgtagagtgctgcgtagtgcagagccgtgttcccgtcagcagccttggcatccaggtgaccactggggagaggagggttcagggagaaaggaagg

SEQ ID NO: 7024 - DNA, 122 bp, Homo sapiens
  misc_feature (61)..(62): /note="This region represents a CpG dinucleotide"
  misc_feature (61)..(61): /note="Nucleotide may be methylated to form 5-methylcytosine"
tcatcacttccaaacagttcttacctaagacatgcctcatccttggtaatcacactttcacgatcctatttcttttttctgtttgtttgtttgttttgttttttaaacggagtctcactctg

SEQ ID NO: 7025 - DNA, 122 bp, Homo sapiens
  misc_feature (61)..(62): /note="This region represents a CpG dinucleotide"
  misc_feature (61)..(61): /note="Nucleotide may be methylated to form 5-methylcytosine"
ggatgactgtatcagaagcgacattcaggatgtctttgtaacaacatttcctatggactgcgtaacttctggcttctgtgccaacatttctgtagaaagaacacaaaaaatactaataattg

SEQ ID NO: 7026 - DNA, 122 bp, Homo sapiens
  misc_feature (61)..(62): /note="This region represents a CpG dinucleotide"
  misc_feature (61)..(61): /note="Nucleotide may be methylated to form 5-methylcytosine"
cagggaggtcaggtagattagatcaggtggatcttgcacagacatcaacaagacatgggacgtgcattctgcctgcaagtggccttgcagttataggcaaatgtcatcctgtcatcctttat

SEQ ID NO: 7027 - DNA, 122 bp, Homo sapiens
  misc_feature (61)..(62): /note="This region represents a CpG dinucleotide"
  misc_feature (61)..(61): /note="Nucleotide may be methylated to form 5-methylcytosine"
ttctcttccagctgcccacaggcacaataacatcatgttctagaacatcatctggaattgcgtcactgtagagcacttctgtctcaggagaagcattatctcttctttttatatgcttatac

SEQ ID NO: 7028 - DNA, 122 bp, Homo sapiens
  misc_feature (61)..(62): /note="This region represents a CpG dinucleotide"
  misc_feature (61)..(61): /note="Nucleotide may be methylated to form 5-methylcytosine"
ttacctcttagctcctagttttactgacttccatgtctggaattaccagcacttctttttcgtacatatggattatatgaactaaatgtattgtttcttccctcactactgaaaatctattc

SEQ ID NO: 7029 - DNA, 122 bp, Homo sapiens
  misc_feature (61)..(62): /note="This region represents a CpG dinucleotide"
  misc_feature (61)..(61): /note="Nucleotide may be methylated to form 5-methylcytosine"
ccagctccgcctcctgcagagcttggttgccagggctgggtcaggctgcctgggcgttgccgtctgacctgtgcacagatgtggccaggtgaggacacaagctgttgtctcgtttgctgtgt

SEQ ID NO: 7030 - DNA, 122 bp, Homo sapiens
  misc_feature (61)..(62): /note="This region represents a CpG dinucleotide"
  misc_feature (61)..(61): /note="Nucleotide may be methylated to form 5-methylcytosine"
ggcaggtgtcccttggtagcctacgggctgtcttatgtcagctgcttaactagggcgtgccggggaagtaaatgatctcactgacactttgctccacatataaaataagtcacttaccccag

SEQ ID NO: 7031 - DNA, 122 bp, Homo sapiens
  misc_feature (61)..(62): /note="This region represents a CpG dinucleotide"
  misc_feature (61)..(61): /note="Nucleotide may be methylated to form 5-methylcytosine"
aactgactgacagcaaaggtcatcccacaggaacactggatgtgtaaacgtggagatctgcggagtggcagagcaggagagggcgctaaggggcatttgatccaacctccttctttcacttt

SEQ ID NO: 7032 - DNA, 122 bp, Homo sapiens
  misc_feature (61)..(62): /note="This region represents a CpG dinucleotide"
  misc_feature (61)..(61): /note="Nucleotide may be methylated to form 5-methylcytosine"
ttttttaaagtatctgttgaacactggtaaattttgttccccgcctctctggtaatcgctcgacctgttctttccagcaggtatttctcctgcagaacctgctggctggcccccgcccttat

SEQ ID NO: 7033 - DNA, 122 bp, Homo sapiens
  misc_feature (61)..(62): /note="This region represents a CpG dinucleotide"
  misc_feature (61)..(61): /note="Nucleotide may be methylated to form 5-methylcytosine"
aggagaagactcagtcccttagtgaggccctttgctgctgactgggcgattaagtctgagcgttggagaattctaatgcaggaactgagtttgaggaagggcagacagctatgatcttggag

SEQ ID NO: 7034 - DNA, 122 bp, Homo sapiens
  misc_feature (61)..(62): /note="This region represents a CpG dinucleotide"
  misc_feature (61)..(61): /note="Nucleotide may be methylated to form 5-methylcytosine"
tccccacctagaggcagattcagtgtatgaggaccattttccacactcctaagattacatcgccaatcagcagcatccattccctagtcctgtgcccaccaaactatccttgaaaaacctta

SEQ ID NO: 7035 - DNA, 122 bp, Homo sapiens
  misc_feature (61)..(62): /note="This region represents a CpG dinucleotide"
  misc_feature (61)..(61): /note="Nucleotide may be methylated to form 5-methylcytosine"
aacttgtgatcctttcttgaagcaaggtaactcacacctcctttacaaggactccggaggcgttctctgatacagtgaaacaggctgagtcagaagcagtaagggacagctgactcctgatc

SEQ ID NO: 7036 - DNA, 122 bp, Homo sapiens
  misc_feature (61)..(62): /note="This region represents a CpG dinucleotide"
  misc_feature (61)..(61): /note="Nucleotide may be methylated to form 5-methylcytosine"
gacttgcagatgaattatatatgagtgagaaaacaggtctgcatggaatttccactctagcgaggaaggtggatgatacacaaataattgcatgtgtgctagcattgtccatgggcaatgag

SEQ ID NO: 7037 - DNA, 122 bp, Homo sapiens
  misc_feature (61)..(62): /note="This region represents a CpG dinucleotide"
  misc_feature (61)..(61): /note="Nucleotide may be methylated to form 5-methylcytosine"
gatccctgaaaaggcccttaattcagctctatgagccattttcagagcagtttttcaatccgttctataataataatgatcatatatgacatatatatatattttgagatggagtctcactc

SEQ ID NO: 7038 - DNA, 122 bp, Homo sapiens
  misc_feature (61)..(62): /note="This region represents a CpG dinucleotide"
  misc_feature (61)..(61): /note="Nucleotide may be methylated to form 5-methylcytosine"
aaatatgcaataatagccaagaagagtattaaaaagaagaataagctgggtgtggcagcacgtgtctgttctagctacttgagagactgaagtgagagaatctttgaacccataggttcaag

SEQ ID NO: 7039 - DNA, 122 bp, Homo sapiens
  misc_feature (61)..(62): /note="This region represents a CpG dinucleotide"
  misc_feature (61)..(61): /note="Nucleotide may be methylated to form 5-methylcytosine"
tcctcaaaacaacaatataaggtagataccattattctcctcatgttacaaattaggaaacgtaggcacagtaaagtaaagtgacttatagaaagccacatagctagtgagtggtggagaca

SEQ ID NO: 7040 - DNA, 122 bp, Homo sapiens
  misc_feature (61)..(62): /note="This region represents a CpG dinucleotide"
  misc_feature (61)..(61): /note="Nucleotide may be methylated to form 5-methylcytosine"
gcatctagagcagggcctggcacaaagtaggagctcaataaacatttatgaatgagtgtgcgctgagatgacctttttttttttttttattgagagggagccttgctctgtcacccaggcta

SEQ ID NO: 7041 - DNA, 122 bp, Homo sapiens
  misc_feature (61)..(62): /note="This region represents a CpG dinucleotide"
  misc_feature (61)..(61): /note="Nucleotide may be methylated to form 5-methylcytosine"
agaagagtctacttctttaattcaagatcaagtttctcttcataatgaccttgtagccctcgctcctcagacttgctggctgactggacccacaagaaatacaggtaccaaattgtgggctt

SEQ ID NO: 7042 - DNA, 122 bp, Homo sapiens
  misc_feature (61)..(62): /note="This region represents a CpG dinucleotide"
  misc_feature (61)..(61): /note="Nucleotide may be methylated to form 5-methylcytosine"
gatatttaaaggacacaggaagtacaggcacttccttccccgactgtaaaatctggttggcgtactaagtcatagaaatataaatagttcagtacccatataaagaggtgtgactaagaacc

SEQ ID NO: 7043 - DNA, 122 bp, Homo sapiens
  misc_feature (61)..(62): /note="This region represents a CpG dinucleotide"
  misc_feature (61)..(61): /note="Nucleotide may be methylated to form 5-methylcytosine"
cctaaactgagatgggccctccaggcaaggccagcattacctcagtcctcggaaatgcatcgctctgcttgggggaatggccacacgtggctgagccccaggtggtgccaaggacaggagga

SEQ ID NO: 7044 - DNA, 122 bp, Homo sapiens
  misc_feature (61)..(62): /note="This region represents a CpG dinucleotide"
  misc_feature (61)..(61): /note="Nucleotide may be methylated to form 5-methylcytosine"
aaatgatttgtccacagccacattccaataggtggctaagcacaaactcaggttgtttgacgctagaacttaatgctacttgtgaccagtcaatcgccatgctacctcatacagaccctcac

SEQ ID NO: 7045 - DNA, 122 bp, Homo sapiens
  misc_feature (61)..(62): /note="This region represents a CpG dinucleotide"
  misc_feature (61)..(61): /note="Nucleotide may be methylated to form 5-methylcytosine"
ctcaggggacccgcccgcctcggcctccgaaagtgctgggattacaggcgtgagccaccgcgcccagcaagcttgcaggtttttacatttctttgaaggcacatgtttcctttcacaagagt

SEQ ID NO: 7046 - DNA, 122 bp, Homo sapiens
  misc_feature (61)..(62): /note="This region represents a CpG dinucleotide"
  misc_feature (61)..(61): /note="Nucleotide may be methylated to form 5-methylcytosine"
cagtccaagaagtccagtttcttaagtaacataagacagctggcctccaaatgacaagcccgcaaaatcaccagggagttatatggtgagttcactgaaggaagctatactgtaagaacaca

SEQ ID NO: 7047 - DNA, 122 bp, Homo sapiens
  misc_feature (61)..(62): /note="This region represents a CpG dinucleotide"
  misc_feature (61)..(61): /note="Nucleotide may be methylated to form 5-methylcytosine"
ccactacagacctataagcaaactatgatattataaatccccattttacaagtaaagacacggagactgacagtgtctgcatctaggaagttcctgcaaccacaaagttgcagagctaagat

SEQ ID NO: 7048 - DNA, 122 bp, Homo sapiens
  misc_feature (61)..(62): /note="This region represents a CpG dinucleotide"
  misc_feature (61)..(61): /note="Nucleotide may be methylated to form 5-methylcytosine"
caaaaaatatttgctgaatgcctactacggacactgctgtgctgggagctggtgaatcagcgatgaactatgggagctggtgagtcagtgatgaaccggacagccaagtactgacctttaag

SEQ ID NO: 7049 - DNA, 122 bp, Homo sapiens
  misc_feature (61)..(62): /note="This region represents a CpG dinucleotide"
  misc_feature (61)..(61): /note="Nucleotide may be methylated to form 5-methylcytosine"
tttatgatccttgtcaaaaggtgttcggccggctctaattatccaggtttcagctgccaccgcttccatctcagcacagcatctctgccctggaagatgtcaaacaagattgctgttgtcag

SEQ ID NO: 7050 - DNA, 122 bp, Homo sapiens
  misc_feature (61)..(62): /note="This region represents a CpG dinucleotide"
  misc_feature (61)..(61): /note="Nucleotide may be methylated to form 5-methylcytosine"
acaggaccccattgtgtgggtggaatgggagggcccctgccagttcaggaaaggtggtgccgcctcagggaggcccaagtccttgtcagcagctccacaaaagtgcaagtgtcatcacattc

SEQ ID NO: 7051 - DNA, 122 bp, Homo sapiens
  misc_feature (61)..(62): /note="This region represents a CpG dinucleotide"
  misc_feature (61)..(61): /note="Nucleotide may be methylated to form 5-methylcytosine"
tcgtgaaactccaagttagttttactaactatatcaagcttcatgtaaccttcaacttcccgtttcatcaggcacaaaccttcattattgttcaccattgtaattaggtagcattttaagac

SEQ ID NO: 7052 - DNA, 122 bp, Homo sapiens
  misc_feature (61)..(62): /note="This region represents a CpG dinucleotide"
  misc_feature (61)..(61): /note="Nucleotide may be methylated to form 5-methylcytosine"
gaggcacctatatgagaagctttgtgatcccttttatttcaagaaggcttctatttgggacgtggagcttacggttaatccacatttcagagggtattattgcaaattagtcaacaaatctc

SEQ ID NO: 7053 - DNA, 122 bp, Homo sapiens
  misc_feature (61)..(62): /note="This region represents a CpG dinucleotide"
  misc_feature (61)..(61): /note="Nucleotide may be methylated to form 5-methylcytosine"
aggggaagaaagttgaaatactaaaagtgggaggagagagggagagtgtgggagcaaggccgggacccaccccaaaagagattggaatacatgtgcagctttagttcatggcctgccaaata

SEQ ID NO: 7054 - DNA, 122 bp, Homo sapiens
  misc_feature (61)..(62): /note="This region represents a CpG dinucleotide"
  misc_feature (61)..(61): /note="Nucleotide may be methylated to form 5-methylcytosine"
gtgactgtgtcaccataccactgcagggcagctcccagacagggaatggcttcagggaaacggagggagagaaaaaaaggaatcagcagtttccaccactttctctagcttgcagcagactt

SEQ ID NO: 7055 - DNA, 122 bp, Homo sapiens
  misc_feature (61)..(62): /note="This region represents a CpG dinucleotide"
  misc_feature (61)..(61): /note="Nucleotide may be methylated to form 5-methylcytosine"
taccatgaatccctctaatcttctcctgagttcctcaaaccgctgtcatactgattaatacgtaacctactgacactgaaaaggacactgctttgtttctgaatcatgaagttttgctgatt

SEQ ID NO: 7056 - DNA, 122 bp, Homo sapiens
  misc_feature (61)..(62): /note="This region represents a CpG dinucleotide"
  misc_feature (61)..(61): /note="Nucleotide may be methylated to form 5-methylcytosine"
gggtggggtcataggagccatccttcagctttgcctggggtctctggtggagggcagttccgtcaacaaaagccagggtgggatcaggccaacttggtgtgggttggaggactcaggccttg

SEQ ID NO: 7057 - DNA, 122 bp, Homo sapiens
  misc_feature (61)..(62): /note="This region represents a CpG dinucleotide"
  misc_feature (61)..(61): /note="Nucleotide may be methylated to form 5-methylcytosine"
aatgacacagtactccagtgtatcctaatctcttccaggacagtgtttctcaaactaatgcgcatacaaatcaccctgggatcttattaaaacccagattctgattgaacaggtctggcctg

SEQ ID NO: 7058 - DNA, 122 bp, Homo sapiens
  misc_feature (61)..(62): /note="This region represents a CpG dinucleotide"
  misc_feature (61)..(61): /note="Nucleotide may be methylated to form 5-methylcytosine"
ccatgtagcttggagcttgtgccagcatttccattacaaaaatcctataatccaaagccacggcaaattgaataaatagctaataattaagttgttgcccctctcctattccagaaaaataa

SEQ ID NO: 7059 - DNA, 122 bp, Homo sapiens
  misc_feature (61)..(62): /note="This region represents a CpG dinucleotide"
  misc_feature (61)..(61): /note="Nucleotide may be methylated to form 5-methylcytosine"
agtgagaggggtggaggcagggtgggcggggcaggggcagaggctggagtgggtgtatctcggggaccttcatgcctcatggcctccaccctcagctatgattccaacctcaacgcgtcccg

SEQ ID NO: 7060 - DNA, 122 bp, Homo sapiens
  misc_feature (61)..(62): /note="This region represents a CpG dinucleotide"
  misc_feature (61)..(61): /note="Nucleotide may be methylated to form 5-methylcytosine"
gcgcgtgctgtttggcaacaacctgaacttctggctgcacaagcttgtcttcgtggatgccgtggccttcctcacggggaagcgcctctccctgccattggaccgctacatcctggtggaca

SEQ ID NO: 7061 - DNA, 122 bp, Homo sapiens
  misc_feature (61)..(62): /note="This region represents a CpG dinucleotide"
  misc_feature (61)..(61): /note="Nucleotide may be methylated to form 5-methylcytosine"
ggctcctttcccgggtggactgcattcctatcattcctgagagcatgctctgctctgatccgtaacttatctgacctcaggaaggcttgagaacatgtaaagaaagcaaatgagctgggtat

SEQ ID NO: 7062 - DNA, 122 bp, Homo sapiens
  misc_feature (61)..(62): /note="This region represents a CpG dinucleotide"
  misc_feature (61)..(61): /note="Nucleotide may be methylated to form 5-methylcytosine"
acactaggaggcaagggctgactacacgattgctcatcctctctctctaatcctctctaacgtagttttccaaccttcaaccaagaatgaaggattttggtttttcactgcaatttaagaga

SEQ ID NO: 7063 - DNA, 122 bp, Homo sapiens
  misc_feature (61)..(62): /note="This region represents a CpG dinucleotide"
  misc_feature (61)..(61): /note="Nucleotide may be methylated to form 5-methylcytosine"
tctttgatgatcataaagtgatgagcaggaaaatctctgcatcaatgtcctctgctgttccgtttcaagtcaaattcaaaacatgtcagccatactcatcattcacactcacactcattcac

SEQ ID NO: 7064 - DNA, 122 bp, Homo sapiens
  misc_feature (61)..(62): /note="This region represents a CpG dinucleotide"
  misc_feature (61)..(61): /note="Nucleotide may be methylated to form 5-methylcytosine"
gtgcaggtatatagtactcattcagcaagtgcatgtttgccttcttcccagaattagaggcgcactacagggattggaaggagaaggaagtgaatgaaagtcaactcggagaggataaaagg

SEQ ID NO: 7065 - DNA, 122 bp, Homo sapiens
  misc_feature (61)..(62): /note="This region represents a CpG dinucleotide"
  misc_feature (61)..(61): /note="Nucleotide may be methylated to form 5-methylcytosine"
ggtgatttgttacaacatcagtaggaaactaatacacctccctgctcctgtttataacttcgtccctgtcctaaaatcccagcacctgggagtattcacggctatccatggactgaccacac

SEQ ID NO: 7066 - DNA, 122 bp, Homo sapiens
  misc_feature (61)..(62): /note="This region represents a CpG dinucleotide"
  misc_feature (61)..(61): /note="Nucleotide may be methylated to form 5-methylcytosine"
ggttttcgtgactgcaagaagggggatcccaagcacgggaagcggaaacgaggccggccccgaaagctgagcaaagagtactgggactgtctcgagggcaagaagagcaagcacggtgagct

SEQ ID NO: 7067 - DNA, 122 bp, Homo sapiens
  misc_feature (61)..(62): /note="This region represents a CpG dinucleotide"
  misc_feature (61)..(61): /note="Nucleotide may be methylated to form 5-methylcytosine"
tcttcctattagggtacctgtttcctgatatatcaaacatagtcactgggacagggactgcgtataccaggaagctcctctgtttcaggtgtgtctcctttgcaatacctgaagactttcat

SEQ ID NO: 7068 - DNA, 122 bp, Homo sapiens
  misc_feature (61)..(62): /note="This region represents a CpG dinucleotide"
  misc_feature (61)..(61): /note="Nucleotide may be methylated to form 5-methylcytosine"
gtaattcgttgactggaattagcatttatgatgacctacaaactagtcagacctcttgagcgcacagcagtcttaggtgagtaatgattgcttattagagaggactggatatgttttaaatg

SEQ ID NO: 7069 - DNA, 122 bp, Homo sapiens
  misc_feature (61)..(62): /note="This region represents a CpG dinucleotide"
  misc_feature (61)..(61): /note="Nucleotide may be methylated to form 5-methylcytosine"
atataccttgacctgtagggatgtgtccatgagggaatgaatgtcccagtgttgctccagcgatacccctggccacaaagacacgcctgaaattgctgagggcttaaggcactggaaggcct

SEQ ID NO: 7070 - DNA, 122 bp, Homo sapiens
  misc_feature (61)..(62): /note="This region represents a CpG dinucleotide"
  misc_feature (61)..(61): /note="Nucleotide may be methylated to form 5-methylcytosine"
cacacatttgaaaggccagaggaaccccgaaccccacccaccgcccatgcatctccctgccgcccacggagatgcctccggttcaagacaaaaatcctttagcatgcttagctgtttcttgt

SEQ ID NO: 7071 - DNA, 122 bp, Homo sapiens
  misc_feature (61)..(62): /note="This region represents a CpG dinucleotide"
  misc_feature (61)..(61): /note="Nucleotide may be methylated to form 5-methylcytosine"
agatggcatcctcttccaatataaagctgtttcatccacgttaaaaaatctattgttggccgggcacgttggctcacgcctgtaatcccaggactttgggaggccgaggcaggcggatcaca

SEQ ID NO: 7072 - DNA, 122 bp, Homo sapiens
  misc_feature (61)..(62): /note="This region represents a CpG dinucleotide"
  misc_feature (61)..(61): /note="Nucleotide may be methylated to form 5-methylcytosine"
agtcagcatcctggcactgcagcgcagatctcagctcctcccaagagccccagggtgtggcgagagaaaaggtcatgagcaaacacctctggctgaaagtagccggaaaggcctggctactt

SEQ ID NO: 7073 - DNA, 122 bp, Homo sapiens
  misc_feature (61)..(62): /note="This region represents a CpG dinucleotide"
  misc_feature (61)..(61): /note="Nucleotide may be methylated to form 5-methylcytosine"
gcttttccataagctataatgactcttcacctatttcacaatattgctaaaggcaggtcccgttcatcttcaaataaactgggatgagtaaaactattcatgaaatacttacaatttgctaa

SEQ ID NO: 7074 - DNA, 122 bp, Homo sapiens
  misc_feature (61)..(62): /note="This region represents a CpG dinucleotide"
  misc_feature (61)..(61): /note="Nucleotide may be methylated to form 5-methylcytosine"
agctatatccagctctagaagttgcactggcagtgtgaggtgatttgtgcttggcagtggcggcagtaatagtttcattgggccaattctatgcctttggctctgaagcctctaacactggt

SEQ ID NO: 7075 - DNA, 122 bp, Homo sapiens
  misc_feature (61)..(62): /note="This region represents a CpG dinucleotide"
  misc_feature (61)..(61): /note="Nucleotide may be methylated to form 5-methylcytosine"
cgagacctcactgtgttgcccaggctggtcttgaaatcctgggctcaagcaatcctcccacgttggcctctataataatttttggatgttaatagatgatgaaatgtgccttagggagcact

SEQ ID NO: 7076 - DNA, 122 bp, Homo sapiens
  misc_feature (61)..(62): /note="This region represents a CpG dinucleotide"
  misc_feature (61)..(61): /note="Nucleotide may be methylated to form 5-methylcytosine"
tctttattaccactgttactacaagtttgctgactttcagccacagtggatggaaaagtacgcctgttgcaacatgacgtgagtcagttgttcataaataatgggattgcaccgtcagctct

SEQ ID NO: 7077 - DNA, 122 bp, Homo sapiens
  misc_feature (61)..(62): /note="This region represents a CpG dinucleotide"
  misc_feature (61)..(61): /note="Nucleotide may be methylated to form 5-methylcytosine"
cccggttgagttagctgtaagaatcaacctcccaggattactaccaggtgcaaagaagagcgtgcacataaaagccacgctgtaaactgtacaacactacagacatatgaaggatgattctc

SEQ ID NO: 7078 - DNA, 122 bp, Homo sapiens
  misc_feature (61)..(62): /note="This region represents a CpG dinucleotide"
  misc_feature (61)..(61): /note="Nucleotide may be methylated to form 5-methylcytosine"
aaaataaactgtatttctcctgaggcataagtatttctaaaaaggaggctacaggagttacgggctcagtaataacaggaagtggtatctgtgcaaaggcttaaaactgttgagccccacca

SEQ ID NO: 7079 - DNA, 122 bp, Homo sapiens
  misc_feature (61)..(62): /note="This region represents a CpG dinucleotide"
  misc_feature (61)..(61): /note="Nucleotide may be methylated to form 5-methylcytosine"
aaggcagtactactctctctacgtctgtcactaagaggctaggttgcaaaacatggatctcgtttcaatatctgtttctttaggcttcaagaaacaagatctaaagcttcctttcctagtat

SEQ ID NO: 7080 - DNA, 122 bp, Homo sapiens
  misc_feature (61)..(62): /note="This region represents a CpG dinucleotide"
  misc_feature (61)..(61): /note="Nucleotide may be methylated to form 5-methylcytosine"
gagggggcctccaccactggacagaaatgtagaaaaacaggaaggcagaagatgagcaaacggacagtcaggagcacagaaagacaagtagaaatatgcacaggtgggcatgctgctcagct

SEQ ID NO: 7081 - DNA, 122 bp, Homo sapiens
  misc_feature (61)..(62): /note="This region represents a CpG dinucleotide"
  misc_feature (61)..(61): /note="Nucleotide may be methylated to form 5-methylcytosine"
tgacttagagatgagtaaatcaccggttattacaagaagtttccaaaagctgtgttgctgcggtgaaacctgctaaaaacaaggtgactcatgctgttgtttagaagctggatgacagaaac

SEQ ID NO: 7082 - DNA, 122 bp, Homo sapiens
  misc_feature (61)..(62): /note="This region represents a CpG dinucleotide"
  misc_feature (61)..(61): /note="Nucleotide may be methylated to form 5-methylcytosine"
cctcacccaagcctcttctaaaaaccatgttgaatgaatccacgttctggaaccccgaggcgggagaagtagggagctgttcgtttaagcagcatacacctaaattgggggtttaaacatta

SEQ ID NO: 7083 - DNA, 122 bp, Homo sapiens
  misc_feature (61)..(62): /note="This region represents a CpG dinucleotide"
  misc_feature (61)..(61): /note="Nucleotide may be methylated to form 5-methylcytosine"
tacggttatgtaaacagctttttcttgattcacttgccaggcttatacctttccccatcacgctagacagacagttctttgcagaaagctttctgatgggtgctacagatacagtggtggta

SEQ ID NO: 7084 - DNA, 122 bp, Homo sapiens
  misc_feature (61)..(62): /note="This region represents a CpG dinucleotide"
  misc_feature (61)..(61): /note="Nucleotide may be methylated to form 5-methylcytosine"
gcactttaccctgccttaccacatgacactctaaggtaggcatcattatgaatcctacaccgcgataaaaaagaggcttagagattttacgcaacttgtccacaggcataaagctaataaac

SEQ ID NO: 7085 - DNA, 122 bp, Homo sapiens
  misc_feature (61)..(62): /note="This region represents a CpG dinucleotide"
  misc_feature (61)..(61): /note="Nucleotide may be methylated to form 5-methylcytosine"
gatccacattgtaggctctgatgcaatacctatgctggggtagtcctcaagctaagaggccgtttctactttagagacttaatgaccatctagtttggtgttttcctcaggtccattatctc

SEQ ID NO: 7086 - DNA, 122 bp, Homo sapiens
  misc_feature (61)..(62): /note="This region represents a CpG dinucleotide"
  misc_feature (61)..(61): /note="Nucleotide may be methylated to form 5-methylcytosine"
ccaggaccttcatcatccttagtgtctttcagtgttcatgattcatttagatgatgcagccgccatcccagttccttgacttcctcttctcatagggcagccttggaagtgtgtctatacat

SEQ ID NO: 7087 - DNA, 122 bp, Homo sapiens
  misc_feature (61)..(62): /note="This region represents a CpG dinucleotide"
  misc_feature (61)..(61): /note="Nucleotide may be methylated to form 5-methylcytosine"
aacaaggaggaacgggtttgccagcagttctggtgtggcagctgtggcggcaatgccaaccggtttgaaaccaaggaagaatgtgaggcttggtgtgtcccaatacagtaacagtacaagca

SEQ ID NO: 7088 - DNA, 122 bp, Homo sapiens
  misc_feature (61)..(62): /note="This region represents a CpG dinucleotide"
  misc_feature (61)..(61): /note="Nucleotide may be methylated to form 5-methylcytosine"
gtagaagtcttccatgtcaaaatgctgcaggattaagttccaactgcttagatcagcatacgaagtctatctcaatctctctagtctagtgattcataaagttggaggcaggttatttcacc

SEQ ID NO: 7089 - DNA, 122 bp, Homo sapiens
  misc_feature (61)..(62): /note="This region represents a CpG dinucleotide"
  misc_feature (61)..(61): /note="Nucleotide may be methylated to form 5-methylcytosine"
agctgcccctgagctttctcataaaatattgatttccccattggaaatttccaagaagaccgtatatgaccatctagcagcaatgttgttgagagattcttgctttgggtgggaaaccagac

SEQ ID NO: 7090 - DNA, 122 bp, Homo sapiens
  misc_feature (61)..(62): /note="This region represents a CpG dinucleotide"
  misc_feature (61)..(61): /note="Nucleotide may be methylated to form 5-methylcytosine"
tgtcataactgctgacattcatcttgattactttagttaaaataaatagttatacttgggcggctttcagagaatacatcatagtagatgtaatgctggaaagcaatgggctcttggttttt

SEQ ID NO: 7091 - DNA, 122 bp, Homo sapiens
  misc_feature (61)..(62): /note="This region represents a CpG dinucleotide"
  misc_feature (61)..(61): /note="Nucleotide may be methylated to form 5-methylcytosine"
gtctagtaaagaaaggtccctggatccgagtgtttagtctgtctccccagcagtgctgatcgcatatttactgcaactaggcaaccacttcctcagatactgaaagtgtgagacttcccaat

SEQ ID NO: 7092 - DNA, 122 bp, Homo sapiens
  misc_feature (61)..(62): /note="This region represents a CpG dinucleotide"
  misc_feature (61)..(61): /note="Nucleotide may be methylated to form 5-methylcytosine"
gtgtatagcccaaactcttcttgagcaccctacctggtttttgtcccatttttttgcatccggttttgtccagtggaccttagtcacaaggtgtaggcagggctgctgaaccaaggcccaaa

SEQ ID NO: 7093 - DNA, 122 bp, Homo sapiens
  misc_feature (61)..(62): /note="This region represents a CpG dinucleotide"
  misc_feature (61)..(61): /note="Nucleotide may be methylated to form 5-methylcytosine"
tatctaattttcacatagttacaatcttagcatagacaagactttataatcttttttttgcgtctaatgttacataagccttttttttccacacccacttcacatttttaaaccctaatgtg

SEQ ID NO: 7094 - DNA, 122 bp, Homo sapiens
  misc_feature (61)..(62): /note="This region represents a CpG dinucleotide"
  misc_feature (61)..(61): /note="Nucleotide may be methylated to form 5-methylcytosine"
gaatagcttctacccggtaaatgaggtgatccactattactaataggtatttcaggcaaccgattggagacatttctgtgtgatcaacttgaacactttgaaatggtgttagtcctggattt

SEQ ID NO: 7095 - DNA, 122 bp, Homo sapiens
  misc_feature (61)..(62): /note="This region represents a CpG dinucleotide"
  misc_feature (61)..(61): /note="Nucleotide may be methylated to form 5-methylcytosine"
tatgctgggagctcccattgttgttaacctgcatcagcagtgtttcagaatgtcggtgcccgtgagctgcctgggttggaagaacaacattgttcatgaggcgtgtgcccttgggcgtgtct

SEQ ID NO: 7096 - DNA, 122 bp, Homo sapiens
  misc_feature (61)..(62): /note="This region represents a CpG dinucleotide"
  misc_feature (61)..(61): /note="Nucleotide may be methylated to form 5-methylcytosine"
gttaattttgttgaaggcagagttctacagaagcataagcaggtgataactgagtaaatccgggaagactctgatgaggaggtgaattaggcttttgaagagtaaacaagttttcactgagt

SEQ ID NO: 7097 - DNA, 122 bp, Homo sapiens
  misc_feature (61)..(62): /note="This region represents a CpG dinucleotide"
  misc_feature (61)..(61): /note="Nucleotide may be methylated to form 5-methylcytosine"
agtagaattaagagtttgagttaatcccctcagtattccatattcttttagataaagaggcggaggaagtactgctccctggctgtgattactgatgacacagtatagctgcttataattct

SEQ ID NO: 7098 - DNA, 122 bp, Homo sapiens
  misc_feature (61)..(62): /note="This region represents a CpG dinucleotide"
  misc_feature (61)..(61): /note="Nucleotide may be methylated to form 5-methylcytosine"
aaacactaaaggatcataaatgctgagagtggaaggtgatataatttgaaaagaggagagcggatcataagaggaaagaaaggaagcaggaaacaatctgttgtcacatactggttgacacg

SEQ ID NO: 7099 - DNA, 122 bp, Homo sapiens
  misc_feature (61)..(62): /note="This region represents a CpG dinucleotide"
  misc_feature (61)..(61): /note="Nucleotide may be methylated to form 5-methylcytosine"
atcccggctctagttagcagctgtgtggctttgggcaagttgcataaccactttgggcctcgtatgtaaagcgaagatgataatagcatctgtcctttcacaaggatgtctattgtgcagta

SEQ ID NO: 7100 - DNA, 122 bp, Homo sapiens
  misc_feature (61)..(62): /note="This region represents a CpG dinucleotide"
  misc_feature (61)..(61): /note="Nucleotide may be methylated to form 5-methylcytosine"
gaaaacctcggaggagaattggcctgaccttcattagtcatctggaccaacgatgattcacgtagctgaagagaaaggtgaggtccagagaggagcaggtgcctgccccaggtcacacagca

SEQ ID NO: 7101 - DNA, 122 bp, Homo sapiens
  misc_feature (61)..(62): /note="This region represents a CpG dinucleotide"
  misc_feature (61)..(61): /note="Nucleotide may be methylated to form 5-methylcytosine"
gttttctttatccaggatcccttctatccccagctagagccactagatcactaaatcaatcgtatgtgcaggctgcctctgatttatttccctcgctgctgctggcctgcccctgcctttta

SEQ ID NO: 7102 - DNA, 122 bp, Homo sapiens
  misc_feature (61)..(62): /note="This region represents a CpG dinucleotide"
  misc_feature (61)..(61): /note="Nucleotide may be methylated to form 5-methylcytosine"
ccagctaaagtctgtaacaagagatgaacaaacatcgagtcatcctagctgggctggtttcgccagagacaaggtgatgagatgctttaagcctgatatgattacaggcttataacttctga

SEQ ID NO: 7103 - DNA, 122 bp, Homo sapiens
  misc_feature (61)..(62): /note="This region represents a CpG dinucleotide"
  misc_feature (61)..(61): /note="Nucleotide may be methylated to form 5-methylcytosine"
agtggccctcctttggaggtaacagatgcctttcctaagaactcaaagttctcttttcagcgtgctgtgacttgaatatggaaatcattttaatttcttcttttctcttatggggaaatttc

SEQ ID NO: 7104 - DNA, 122 bp, Homo sapiens
  misc_feature (61)..(62): /note="This region represents a CpG dinucleotide"
  misc_feature (61)..(61): /note="Nucleotide may be methylated to form 5-methylcytosine"
cctatttatcctgtaagctgaattcctgccatttcccaaagatcccacaaaatgactccacgtgttcctacttcatggtaatttggaatagggggtaatgcatttgttttccacaaatcctc

SEQ ID NO: 7105 - DNA, 122 bp, Homo sapiens
  misc_feature (61)..(62): /note="This region represents a CpG dinucleotide"
  misc_feature (61)..(61): /note="Nucleotide may be methylated to form 5-methylcytosine"
ccattgtggctcatcattttacaatcccacaaacggtgtacaaggttttcagtttctccacgccctcatcaacacttgttattttctgtttctttgatatgggctatccttatgagtgtgag

SEQ ID NO: 7106 - DNA, 122 bp, Homo sapiens
  misc_feature (61)..(62): /note="This region represents a CpG dinucleotide"
  misc_feature (61)..(61): /note="Nucleotide may be methylated to form 5-methylcytosine"
cctgcttggatggagggtcttggctgactcccaaggagtgctttcagctgcacttggggccgcttctctcccttctgttgcaggctttctttcagagagctaggcgaggctgggctggtgtg

SEQ ID NO: 7107 - DNA, 122 bp, Homo sapiens
  misc_feature (61)..(62): /note="This region represents a CpG dinucleotide"
  misc_feature (61)..(61): /note="Nucleotide may be methylated to form 5-methylcytosine"
gctgggcctgttagccaagtcgctgctgggtcttggccattggtgtgtgcaattcacagccgggcagctgctgcagacacccagtcatatacttgtataggaagaacagctggctagcattt

SEQ ID NO: 7108 - DNA, 122 bp, Homo sapiens
  misc_feature (61)..(62): /note="This region represents a CpG dinucleotide"
  misc_feature (61)..(61): /note="Nucleotide may be methylated to form 5-methylcytosine"
agtccaaaggcaacttacgccagcttgcagccagatggccgggggagccactgtgccttacgccctaactactgtaaaggctgcatgtggattcaggaagagtcttgacatgaaagggaagt

SEQ ID NO: 7109 - DNA, 122 bp, Homo sapiens
  misc_feature (61)..(62): /note="This region represents a CpG dinucleotide"
  misc_feature (61)..(61): /note="Nucleotide may be methylated to form 5-methylcytosine"
acattgattgagtattttctaaatgtcatggcttgtgctaagccgtggctgcatcacccacgtaactctccttacaaccacgcctcatgaggctgttaagaataaggttagactgcctgagt

SEQ ID NO: 7110 - DNA, 122 bp, Homo sapiens
  misc_feature (61)..(62): /note="This region represents a CpG dinucleotide"
  misc_feature (61)..(61): /note="Nucleotide may be methylated to form 5-methylcytosine"
tttacttattaaggtgatgaggataactggtttgctcactttatgaatacaaggctgttacgatgaccaaagtcatggaaccagtccaggctaccaggatgagctccaccagagcagggatt

SEQ ID NO: 7111 - DNA, 122 bp, Homo sapiens
  misc_feature (61)..(62): /note="This region represents a CpG dinucleotide"
  misc_feature (61)..(61): /note="Nucleotide may be methylated to form 5-methylcytosine"
aacccctctgttgggtaacatgaaaagactgtattcctctaagatgttgggattgatatacgtgatttaatctgcaataggtggaataaccaggggaactggttatgaatatgtgaatgcaa

SEQ ID NO: 7112 - DNA, 122 bp, Homo sapiens
  misc_feature (61)..(62): /note="This region represents a CpG dinucleotide"
  misc_feature (61)..(61): /note="Nucleotide may be methylated to form 5-methylcytosine"
ctctgtagtaggtgggtgacctggcacttctctgctgaatcagaggatgctgcatgctcacgtttcctgtgggctgagtgaatacatgaagctctatcatgcatacttcttattcatgcaac

SEQ ID NO: 7113 - DNA, 122 bp, Homo sapiens
  misc_feature (61)..(62): /note="This region represents a CpG dinucleotide"
  misc_feature (61)..(61): /note="Nucleotide may be methylated to form 5-methylcytosine"
actggggtaactggttttccttttggtaaaaaccaagttacactcctgtttcataagccacgttgttaatattaatcgtgtgcttatgtggcaggtatgagtacacacccctcaaatctcca

SEQ ID NO: 7114 - DNA, 122 bp, Homo sapiens
  misc_feature (61)..(62): /note="This region represents a CpG dinucleotide"
  misc_feature (61)..(61): /note="Nucleotide may be methylated to form 5-methylcytosine"
agaacttgttctttgcctattccatgggccagagcagtttcttagtgcaccagagtgctacgttggtaagaaaacctacttctagttctgcctgtgccattaactagctacgggacctggag

SEQ ID NO: 7115 - DNA, 122 bp, Homo sapiens
  misc_feature (61)..(62): /note="This region represents a CpG dinucleotide"
  misc_feature (61)..(61): /note="Nucleotide may be methylated to form 5-methylcytosine"
attatttttccttggtgagtcctactcttgacttcgctagctaacaggacagtaacacaacgcaaggataaagtgacacgccaccacgcctagctcggtgcatgttggctaacagacgatgg

SEQ ID NO: 7116 - DNA, 122 bp, Homo sapiens
  misc_feature (61)..(62): /note="This region represents a CpG dinucleotide"
  misc_feature (61)..(61): /note="Nucleotide may be methylated to form 5-methylcytosine"
aaatcaaagtaaaaaaactttgattgcttttgacaaactcaaagggcagcttctccctgccggaagggatgaagaaagcccaattctcttaagaacaacaaatgattgtctacagtgaccga

SEQ ID NO: 7117 - DNA, 122 bp, Homo sapiens
  misc_feature (61)..(62): /note="This region represents a CpG dinucleotide"
  misc_feature (61)..(61): /note="Nucleotide may be methylated to form 5-methylcytosine"
ctgcaaattgtgtcagcaccttggagcctccgaatctctcagcaggcagtggcatgtgtgcgtcttcatgggtgcgtgcatgtacatgcagcaagtttcgctgaagattcaagttagtgaag

SEQ ID NO: 7118 - DNA, 122 bp, Homo sapiens
  misc_feature (61)..(62): /note="This region represents a CpG dinucleotide"
  misc_feature (61)..(61): /note="Nucleotide may be methylated to form 5-methylcytosine"
aatgagcagacactacctgaaaatcaaccacgtaacgttcagttattccattcaaacccgcgtcctgtttttttttcttgaacagtgcaaacattattacatacttcaattattcttatcat

SEQ ID NO: 7119 - DNA, 122 bp, Homo sapiens
  misc_feature (61)..(62): /note="This region represents a CpG dinucleotide"
  misc_feature (61)..(61): /note="Nucleotide may be methylated to form 5-methylcytosine"
cagtgaggtattgtctcactctcttgcatcaccataagctccctgctgtggaagagaaggcgtgggcacacacagctagctacaggaagtcccatcaaacctgggacatgcccacagaagca

SEQ ID NO: 7120 - DNA, 122 bp, Homo sapiens
  misc_feature (61)..(62): /note="This region represents a CpG dinucleotide"
  misc_feature (61)..(61): /note="Nucleotide may be methylated to form 5-methylcytosine"
tttgttctggttgataggggactttttcaaaaaatagaggtttcatttgaataagaatgacgtcaagttacaaacgttttaaaagagaatgactcggttgggtgtggtggctcatgcctgta

SEQ ID NO: 7121 - DNA, 122 bp, Homo sapiens
  misc_feature (61)..(62): /note="This region represents a CpG dinucleotide"
  misc_feature (61)..(61): /note="Nucleotide may be methylated to form 5-methylcytosine"
ataagttataaattgcacactgttctgagtagtgtgatgaaatgtcacaccatcctactccgtcctgcccaggatgtgaatctgaatcattcctttgtccagcatctccatgctgtatatgc

SEQ ID NO: 7122 - DNA, 122 bp, Homo sapiens
  misc_feature (61)..(62): /note="This region represents a CpG dinucleotide"
  misc_feature (61)..(61): /note="Nucleotide may be methylated to form 5-methylcytosine"
tttatgctccacctatgagtgcctgagtagaaaataatcttttgtaacactttcttttgacgtgattaagactcacagaagttgcagtaatagtacagaggattcccgtgtctccgataatt

SEQ ID NO: 7123 - DNA, 122 bp, Homo sapiens
  misc_feature (61)..(62): /note="This region represents a CpG dinucleotide"
  misc_feature (61)..(61): /note="Nucleotide may be methylated to form 5-methylcytosine"
gccaacatcataaaatcatgagagcaaaaaggacctagtttacctactggaggttagctacgcaatgatgataaattagcagggagttgttaatgtgcctacatgacccatgactagttagc

SEQ ID NO: 7124 - DNA, 122 bp, Homo sapiens
  misc_feature (61)..(62): /note="This region represents a CpG dinucleotide"
  misc_feature (61)..(61): /note="Nucleotide may be methylated to form 5-methylcytosine"
ggggtatgggctttggaatcacactgtctggattcaagcctgattctgctgagtgacctgcgacaggttacctaaacacccagattccctagctgtgcagtggaggaagtggtagtatctac

SEQ ID NO: 7125 - DNA, 122 bp, Homo sapiens
  misc_feature (61)..(62): /note="This region represents a CpG dinucleotide"
  misc_feature (61)..(61): /note="Nucleotide may be methylated to form 5-methylcytosine"
tcctctaagcccctcctcattctgtagctcagtgtgggaatggatgttcacagtgattaacgctgcacagtgattaacgctgaatcatgaagaaaagctaagtgatgttcaagactctctgt

SEQ ID NO: 7126 - DNA, 122 bp, Homo sapiens
  misc_feature (61)..(62): /note="This region represents a CpG dinucleotide"
  misc_feature (61)..(61): /note="Nucleotide may be methylated to form 5-methylcytosine"
tgtccgctagggaactctaggctaaatagtcattcagacaagtaagacctgatcaggtcgcgcttggcatcatattgacatagaaggatattgcgcaggaaacagcatgccagcagagcaat

SEQ ID NO: 7127 - DNA, 122 bp, Homo sapiens
  misc_feature (61)..(62): /note="This region represents a CpG dinucleotide"
  misc_feature (61)..(61): /note="Nucleotide may be methylated to form 5-methylcytosine"
ccattaatgattcaccacctgttgcaagttcaataagttatccacacaccaaattgtggtcgcagaattcagtgagataaactaagttagaaagatttggggtgaataaatgtttgctaaat

SEQ ID NO: 7128 - DNA, 122 bp, Homo sapiens
  misc_feature (61)..(62): /note="This region represents a CpG dinucleotide"
  misc_feature (61)..(61): /note="Nucleotide may be methylated to form 5-methylcytosine"
actttgtaaatgactgattcctaagcccaatattgaatgcttagtacgtgacaatctctgcgctgagaattccacatgcctcacttcagctcatctgagtgtcagcgctacatagggaagtt

SEQ ID NO: 7129 - DNA, 122 bp, Homo sapiens
  misc_feature (61)..(62): /note="This region represents a CpG dinucleotide"
  misc_feature (61)..(61): /note="Nucleotide may be methylated to form 5-methylcytosine"
accactgatgaatcagtgccactcacatcctgggtaattctagggacactagttggacaacgctgacatctgaagaggtggcagggcggaacatggatccctttaaggctactttattgtcg

SEQ ID NO: 7130 - DNA, 122 bp, Homo sapiens
  misc_feature (61)..(62): /note="This region represents a CpG dinucleotide"
  misc_feature (61)..(61): /note="Nucleotide may be methylated to form 5-methylcytosine"
aaaactgactgactcataagtgaatgttcacaaaggtgcaagaataaagcaattcctctgcgtaatctaggagggtggatgattaactgaccaacatctgctaaggccagtctagccttaaa

SEQ ID NO: 7131 - DNA, 122 bp, Homo sapiens
  misc_feature (61)..(62): /note="This region represents a CpG dinucleotide"
  misc_feature (61)..(61): /note="Nucleotide may be methylated to form 5-methylcytosine"
gaatggactatggcagaaatgacagtcataaaatacaccatggcttcttcttgctttcaccgtgttgggttgttggttctggaaaaagccagctgctatataggggggttctcaagaaacgc

SEQ ID NO: 7132 - DNA, 122 bp, Homo sapiens
  misc_feature (61)..(62): /note="This region represents a CpG dinucleotide"
  misc_feature (61)..(61): /note="Nucleotide may be methylated to form 5-methylcytosine"
ctgacaatcttttccactctaatgtcctatgactcaacagtagcaatgcatttccacaggcggtaaaaatattctagactcttcccttccagcgctcactgtttacttcctctgcacttccc

SEQ ID NO: 7133 - DNA, 122 bp, Homo sapiens
  misc_feature (61)..(62): /note="This region represents a CpG dinucleotide"
  misc_feature (61)..(61): /note="Nucleotide may be methylated to form 5-methylcytosine"
caggaaagggcaaggctgccacagcgtgggtgctgggtggggtcaacccctttgagcctccgtgacatcatctgtcataatttgtccctgaggatccaggcctgggtggctccttctctcat

SEQ ID NO: 7134 - DNA, 122 bp, Homo sapiens
  misc_feature (61)..(62): /note="This region represents a CpG dinucleotide"
  misc_feature (61)..(61): /note="Nucleotide may be methylated to form 5-methylcytosine"
actttttacagccttacaaaaaccctaaggtggttgctacagaatcgtaacccagcttgacgagtgagtatactgaggtttagtgaagtacctgattaagaatacagttaaccagctgcaga

SEQ ID NO: 7135 - DNA, 122 bp, Homo sapiens
  misc_feature (61)..(62): /note="This region represents a CpG dinucleotide"
  misc_feature (61)..(61): /note="Nucleotide may be methylated to form 5-methylcytosine"
aaacttagatggtatagcctactacacatctaggctttattatatagcttattgctcttacgctacaaacctgtatagcatgttactatatttagtactatagacaattgtaacagaatggt

SEQ ID NO: 7136 - DNA, 122 bp, Homo sapiens
  misc_feature (61)..(62): /note="This region represents a CpG dinucleotide"
  misc_feature (61)..(61): /note="Nucleotide may be methylated to form 5-methylcytosine"
gaacattgctcaagatctgcaaagcagctgtgatgtgtgcggggtgtactggaagttgaacgggactcctcaagcagcctaatgagttgggattgaggattgcatacacaagggaactcgca

SEQ ID NO: 7137 - DNA, 122 bp, Homo sapiens
  misc_feature (61)..(62): /note="This region represents a CpG dinucleotide"
  misc_feature (61)..(61): /note="Nucleotide may be methylated to form 5-methylcytosine"
tggagagctgtattcgggtgctgtctgatgtaggtaagataccaagtcagtttggatatacgtgatgaaaatgaattgtctgacagtagtaaggctgccatttattgagcactcattacaac

SEQ ID NO: 7138 - DNA, 122 bp, Homo sapiens
  misc_feature (61)..(62): /note="This region represents a CpG dinucleotide"
  misc_feature (61)..(61): /note="Nucleotide may be methylated to form 5-methylcytosine"
tgtgctctgatcacgaatccagtaggccttaagtagtaggcattcaatggatgtttgttgcggctctgctttgcaggtgaacaggatttgttttttaaccagagagttaagggattttccgg

SEQ ID NO: 7139 - DNA, 122 bp, Homo sapiens
  misc_feature (61)..(62): /note="This region represents a CpG dinucleotide"
  misc_feature (61)..(61): /note="Nucleotide may be methylated to form 5-methylcytosine"
gagaggtagggcatttagggtgtgactgggtcatgagggcttagtgtgccattggattgacgggttatcatgagagtgggctagcatgctcagccctcaccatgtgataccctgcactgcct

SEQ ID NO: 7140 - DNA, 122 bp, Homo sapiens
  misc_feature (61)..(62): /note="This region represents a CpG dinucleotide"
  misc_feature (61)..(61): /note="Nucleotide may be methylated to form 5-methylcytosine"
gaggcaggaatcgtactctgcgaatgaacaagaccagatgcccagtggagaccagaatttcgcattcctctgagccttggttgtaatttctctgtctaggttggctgtaatctgagcataaa

SEQ ID NO: 7141 - DNA, 122 bp, Homo sapiens
  misc_feature (61)..(62): /note="This region represents a CpG dinucleotide"
  misc_feature (61)..(61): /note="Nucleotide may be methylated to form 5-methylcytosine"
tttggtgaccttttatgaccatcaagttcacaatgctggtgggctgccttttaatccctccgcagacaaaggccctaaataaacacagatcccttcctgggaaaaagtccactctggttaaa

SEQ ID NO: 7142 - DNA, 122 bp, Homo sapiens
  misc_feature (61)..(62): /note="This region represents a CpG dinucleotide"
  misc_feature (61)..(61): /note="Nucleotide may be methylated to form 5-methylcytosine"
tggcagacgatgggtgttagtccaggcttggggttgtgttccggtcacctgctcctctgacgcaggcagtgagacccatttctcagaacacttgggacagagcccagcccttgggtggaggt

SEQ ID NO: 7143 - DNA, 122 bp, Homo sapiens
  misc_feature (61)..(62): /note="This region represents a CpG dinucleotide"
  misc_feature (61)..(61): /note="Nucleotide may be methylated to form 5-methylcytosine"
ttaaatattaagaacaagaagagtcggctgcttttaaaatgtcactcttctggcggggtgcggtggctcatgcctttaatcccagcactttgggagggtgaggcaggcaggtcattgaggtc

SEQ ID NO: 7144 - DNA, 122 bp, Homo sapiens
  misc_feature (61)..(62): /note="This region represents a CpG dinucleotide"
  misc_feature (61)..(61): /note="Nucleotide may be methylated to form 5-methylcytosine"
ccttccataccgaaagaattctgagtggttcttgacctgggctgcagtctagcgtcaccacgtaaaagggagtatatggagcacctggacatatcatgcatgactggtgggagtataaagtg

SEQ ID NO: 7145 - DNA, 122 bp, Homo sapiens
  misc_feature (61)..(62): /note="This region represents a CpG dinucleotide"
  misc_feature (61)..(61): /note="Nucleotide may be methylated to form 5-methylcytosine"
ggcctgaatgacgtgacctttcaaccatctttctaaagaatattgtgaattacaccccttcgcatgtaagaaaagtttctgctggtatctaaggaatattgtctcatgggacctcagctgag

SEQ ID NO: 7146 - DNA, 122 bp, Homo sapiens
  misc_feature (61)..(62): /note="This region represents a CpG dinucleotide"
  misc_feature (61)..(61): /note="Nucleotide may be methylated to form 5-methylcytosine"
gagctggaagccagcactgggctcttccgcacagaggctcccacccatagaccaggagtacgaacccaaccgtgctgctctagacatgggccctgggatgatcacccaacctctgtgtcccg

SEQ ID NO: 7147 - DNA, 122 bp, Homo sapiens
  misc_feature (61)..(62): /note="This region represents a CpG dinucleotide"
  misc_feature (61)..(61): /note="Nucleotide may be methylated to form 5-methylcytosine"
agaagtgtctggcttctgctctgaaagattctgatttattggtctgggatatgacctgagcgatgggatttttagaagtttcccaggtgattataatacgaagccaaggttgagaaccacag

SEQ ID NO: 7148 - DNA, 122 bp, Homo sapiens
  misc_feature (61)..(62): /note="This region represents a CpG dinucleotide"
  misc_feature (61)..(61): /note="Nucleotide may be methylated to form 5-methylcytosine"
tgacacacaacacctcctcccagatattactggcaacagctaattgtgaccccatctaaacgcagtggaaatgaggactgggaattgttgctcctgatgggcaggtacttcctagcaacagc

SEQ ID NO: 7149 - DNA, 122 bp, Homo sapiens
  misc_feature (61)..(62): /note="This region represents a CpG dinucleotide"
  misc_feature (61)..(61): /note="Nucleotide may be methylated to form 5-methylcytosine"
tgcaggtgtggccagttgatcccctgtggagacagtaaagattaagaggatcataaactgcgtccagcggctgccccgggagaaatctcctcaagccagagcctgtgctgtgaggggcttcg

SEQ ID NO: 7150 - DNA, 122 bp, Homo sapiens
  misc_feature (61)..(62): /note="This region represents a CpG dinucleotide"
  misc_feature (61)..(61): /note="Nucleotide may be methylated to form 5-methylcytosine"
accaatggaaactccaccaacatcataacagtttacaattacaattacagttacaaatgccgtggcattgtcctgaaactaccctatatgatctaaacgggagaggatccctcaattctggg

SEQ ID NO: 7151 - DNA, 122 bp, Homo sapiens
  misc_feature (61)..(62): /note="This region represents a CpG dinucleotide"
  misc_feature (61)..(61): /note="Nucleotide may be methylated to form 5-methylcytosine"
aaccagcagtgctccatcccttctcagctggggcctgagaacacgtgagtgagaaagtttcgccctgttgcctcagccgaaagctagggaatcctagctcacatatcaggttccttaagcaa

SEQ ID NO: 7152 - DNA, 122 bp, Homo sapiens
  misc_feature (61)..(62): /note="This region represents a CpG dinucleotide"
  misc_feature (61)..(61): /note="Nucleotide may be methylated to form 5-methylcytosine"
gacttctctgggagaggctgctgtaatctaagccgttagggaatcccgcccttcagtttacgttctggagtgaagccacacaggtgcgtcgctgatcatggccaccgaggtaagaggtagga

SEQ ID NO: 7153 - DNA, 122 bp, Homo sapiens
  misc_feature (61)..(62): /note="This region represents a CpG dinucleotide"
  misc_feature (61)..(61): /note="Nucleotide may be methylated to form 5-methylcytosine"
tcaatccacatgcttcttccccagacctccttaactgcaattttgcagtcttgctcttcacgagtccctgagcaatcagctgaactgttcactactgcctgggattcctgacctcaggccac

SEQ ID NO: 7154 - DNA, 122 bp, Homo sapiens
  misc_feature (61)..(62): /note="This region represents a CpG dinucleotide"
  misc_feature (61)..(61): /note="Nucleotide may be methylated to form 5-methylcytosine"
cttcatttaaccccagtgactacctaaaaggccgtattcaaatagtcgtattaggccaggcgcagtggctcacgcctgtaattctagcactttgggaagccgaggcagatggattgcctgag

SEQ ID NO: 7155 - DNA, 122 bp, Homo sapiens
  misc_feature (61)..(62): /note="This region represents a CpG dinucleotide"
  misc_feature (61)..(61): /note="Nucleotide may be methylated to form 5-methylcytosine"
catcagccaggcgcggtggctcacgcctgtaatcccagcactttgggaggccgaggcaggcggatcacctgatgaagcagtaccattgcatacctcattttacagacaaggaaacggaggct

SEQ ID NO: 7156 - DNA, 122 bp, Homo sapiens
  misc_feature (61)..(62): /note="This region represents a CpG dinucleotide"
  misc_feature (61)..(61): /note="Nucleotide may be methylated to form 5-methylcytosine"
cctgcctgtgggccttctaggtttgttcaccatcacagccaggcctcccgggtgcactcacgagaggaatgggggacacacctacacacccacacccaaagccactgtccccccatcatgtc

SEQ ID NO: 7157 - DNA, 122 bp, Homo sapiens
  misc_feature (61)..(62): /note="This region represents a CpG dinucleotide"
  misc_feature (61)..(61): /note="Nucleotide may be methylated to form 5-methylcytosine"
ttggtctggccagtcagggcaagagtgcagggtcacaaggtccaaagcatggcaactaagcgtcaaaaacccttcagggtgagatttggaaatggacagatatctgtcaaaagagagttatg

SEQ ID NO: 7158 - DNA, 122 bp, Homo sapiens
  misc_feature (61)..(62): /note="This region represents a CpG dinucleotide"
  misc_feature (61)..(61): /note="Nucleotide may be methylated to form 5-methylcytosine"
cccaactttccagctcatctccagcctgtgcttctccccgactcaactcattttcaaccacgtgctaggcctccacccttggatgtcgaagagccatctccagttccacccagttcatcttc

SEQ ID NO: 7159 - DNA, 122 bp, Homo sapiens
  misc_feature (61)..(62): /note="This region represents a CpG dinucleotide"
  misc_feature (61)..(61): /note="Nucleotide may be methylated to form 5-methylcytosine"
ggaaggccagcatttgagtgacagagatgcttgccctatcctgttgctggcttctttctccgtccctgtgtcaagctgtggctagatttctcaatgagggcaaagggcgagaggagtgagaa

SEQ ID NO: 7160 - DNA, 122 bp, Homo sapiens
  misc_feature (61)..(62): /note="This region represents a CpG dinucleotide"
  misc_feature (61)..(61): /note="Nucleotide may be methylated to form 5-methylcytosine"
ggccaagcccagcctgactcatggcaagccttcaacagatgtcagtaaaaggaactcaaccgtcaaatgcatagaatgaacatggggtcaactctcctccgtagctctcttccgcatgtggg

SEQ ID NO: 7161 - DNA, 122 bp, Homo sapiens
  misc_feature (61)..(62): /note="This region represents a CpG dinucleotide"
  misc_feature (61)..(61): /note="Nucleotide may be methylated to form 5-methylcytosine"
aagcaacattcatcatgttcaccctaaggcttctggagcttgctggctggctgactggctcgccaggtacatttaagaagcctgtgcttggggatgtttcttaactgcagacggttccttta

SEQ ID NO: 7162 - DNA, 122 bp, Homo sapiens
  misc_feature (61)..(62): /note="This region represents a CpG dinucleotide"
  misc_feature (61)..(61): /note="Nucleotide may be methylated to form 5-methylcytosine"
ctgcagctcaagcgctacatgattctaccaccttcagaaatctagtttggaggcagtgaccgtatcagaaagacttgtgttaaatcagtccgccctttaacttgcgcaaaggcatggcgcgg

SEQ ID NO: 7163 - DNA, 122 bp, Homo sapiens
  misc_feature (61)..(62): /note="This region represents a CpG dinucleotide"
  misc_feature (61)..(61): /note="Nucleotide may be methylated to form 5-methylcytosine"
gcagaggcgtgagactgccggccagccctgctgtgtacactgatagaattagtgagcgagcgtcccactctgatggaatccagatggaactcgtcactgtcactgcggtggagacggtgggg

SEQ ID NO: 7164 - DNA, 122 bp, Homo sapiens
  misc_feature (61)..(62): /note="This region represents a CpG dinucleotide"
  misc_feature (61)..(61): /note="Nucleotide may be methylated to form 5-methylcytosine"
taaagtggtaattaggcctgattatcatgcaaggcagccctggttaaattggaatgtagccggagagacgaaaggctggatggagagtttgctatgctggagacatgctttgatgtctgcag

SEQ ID NO: 7165 - DNA, 122 bp, Homo sapiens
  misc_feature (61)..(62): /note="This region represents a CpG dinucleotide"
  misc_feature (61)..(61): /note="Nucleotide may be methylated to form 5-methylcytosine"
aagtgacttcctacagctgcccagctggcacatggcacagccagaatagaatcctgctcacgggattccaaatccaaaactctcccagtaacaacaatggtggtggccacagcaacaccaat

SEQ ID NO: 7166 - DNA, 122 bp, Homo sapiens
  misc_feature (61)..(62): /note="This region represents a CpG dinucleotide"
  misc_feature (61)..(61): /note="Nucleotide may be methylated to form 5-methylcytosine"
tgtactttgcctcttgagaaattaaatctgattacaacagagctaagtatttttcagcaacggttagactgacattgtaaatacacaatctgatagttggggctggcctcatgggcctgcaa

SEQ ID NO: 7167 - DNA, 122 bp, Homo sapiens
  misc_feature (61)..(62): /note="This region represents a CpG dinucleotide"
  misc_feature (61)..(61): /note="Nucleotide may be methylated to form 5-methylcytosine"
gcgtgctgtctacgagtgccagctcctgagggttggcagataaatgctctggatgcctcacgcctcagggggtgttcaaggattccatgctgtctttcagagatctccagaaagatccagct

SEQ ID NO: 7168 - DNA, 122 bp, Homo sapiens
  misc_feature (61)..(62): /note="This region represents a CpG dinucleotide"
  misc_feature (61)..(61): /note="Nucleotide may be methylated to form 5-methylcytosine"
gctccacttcctccgagctccagacagcacatctcagctgtgttgggccttacaaggctgcggtcaacaggcacccaggtgatgaggtctttctcagcctgttgttctcttgttagcccttt

SEQ ID NO: 7169 - DNA, 122 bp, Homo sapiens
  misc_feature (61)..(62): /note="This region represents a CpG dinucleotide"
  misc_feature (61)..(61): /note="Nucleotide may be methylated to form 5-methylcytosine"
ccaccactggttccacattgatactgagcactctgcttgcacctggttctggctgcagggcgctgtccctgggagctcatcattcattgcagggacagaggacagcagaagaccttataatg

SEQ ID NO: 7170 - DNA, 122 bp, Homo sapiens
  misc_feature (61)..(62): /note="This region represents a CpG dinucleotide"
  misc_feature (61)..(61): /note="Nucleotide may be methylated to form 5-methylcytosine"
aatattttctgaatgtctaccatatgccaggctcagcactgggcactggaaacttaacaacggtataggaggcatccactaagtattttttgtcctcatttgaaccaaaattaggatgaaat

SEQ ID NO: 7171 - DNA, 122 bp, Homo sapiens
  misc_feature (61)..(62): /note="This region represents a CpG dinucleotide"
  misc_feature (61)..(61): /note="Nucleotide may be methylated to form 5-methylcytosine"
gatgtctgttcttccagtttttggcagtgcagaggagcctggaaagagcttgatgagagacgcaaaaagctcaaagacaaaaatgcaaggccggccaggcgtggtggctcacgcctgtaatc

SEQ ID NO: 7172 - DNA, 122 bp, Homo sapiens
  misc_feature (61)..(62): /note="This region represents a CpG dinucleotide"
  misc_feature (61)..(61): /note="Nucleotide may be methylated to form 5-methylcytosine"
gaaaggggaagttcacatgaggcctgtggttgacttctcaaccctgctggcaggggcacacgccagtaaggaaattgcaatccctaaataaacggtaggctgggaacctgagcaccagcaag

SEQ ID NO: 7173 - DNA, 122 bp, Homo sapiens
  misc_feature (61)..(62): /note="This region represents a CpG dinucleotide"
  misc_feature (61)..(61): /note="Nucleotide may be methylated to form 5-methylcytosine"
ttaaggctcccatggcaggccagtcagacgtgtgggcaggaggacagctgaagagtgactcgcatttgcttgccaagcctgactctctgaagcttcccttttgtcttcttctgtaaatatga

SEQ ID NO: 7174 - DNA, 122 bp, Homo sapiens
  misc_feature (61)..(62): /note="This region represents a CpG dinucleotide"
  misc_feature (61)..(61): /note="Nucleotide may be methylated to form 5-methylcytosine"
caggggaaacccagctgggccgaagccaggggctgtgtatttcaggaggaggtgacagagcggcagcagcaccaactcaactgtcagtatctgtggggccagctaagagaaggcagctatct

SEQ ID NO: 7175 - DNA, 122 bp, Homo sapiens
  misc_feature (61)..(62): /note="This region represents a CpG dinucleotide"
  misc_feature (61)..(61): /note="Nucleotide may be methylated to form 5-methylcytosine"
tctcacagctcctatattctgcttcttcctacagatccatttcctgtctattggcagcttcgtctgcattatcattgtttcttgtctcttgaactttggttggcaacttgcaatccttttga

SEQ ID NO: 7176 - DNA, 122 bp, Homo sapiens
  misc_feature (61)..(62): /note="This region represents a CpG dinucleotide"
  misc_feature (61)..(61): /note="Nucleotide may be methylated to form 5-methylcytosine"
gataatacttaccttgtactgtaaggattaaatgatataatacacatcatgtgtttagaacggtgcctggcacctaggctattattatttgctatccccgactgtctgtctcccttttcttt

SEQ ID NO: 7177 - DNA, 122 bp, Homo sapiens
  misc_feature (61)..(62): /note="This region represents a CpG dinucleotide"
  misc_feature (61)..(61): /note="Nucleotide may be methylated to form 5-methylcytosine"
gcatgaaagggagacacgggcaaggacataagctcatttccttctggggcttgaggagttcgtcaacaacattttagtgattcagtaatgagttgctggttccctagaggcgaaacaggtct

SEQ ID NO: 7178 - DNA, 122 bp, Homo sapiens
  misc_feature (61)..(62): /note="This region represents a CpG dinucleotide"
  misc_feature (61)..(61): /note="Nucleotide may be methylated to form 5-methylcytosine"
agggaagaggaccatttgagtagaagaagcaacacgagtagagatttggcagtttaacagcgtatagttaagtcccaaggattgcaagtggtttggcagggttgggctgagaagaaggagtc

SEQ ID NO: 7179 - DNA, 122 bp, Homo sapiens
  misc_feature (61)..(62): /note="This region represents a CpG dinucleotide"
  misc_feature (61)..(61): /note="Nucleotide may be methylated to form 5-methylcytosine"
acagctccacctaaacccacgggtgacttaaaagctgaagccttgtcataatcattgtcacgtactcttattatgatgaaactttgctcctctttttgctgaggagattcacctaagttact

SEQ ID NO: 7180 - DNA, 122 bp, Homo sapiens
  misc_feature (61)..(62): /note="This region represents a CpG dinucleotide"
  misc_feature (61)..(61): /note="Nucleotide may be methylated to form 5-methylcytosine"
tgtggttccaattcagagacagaccaatggaacagctcagagcctcaaaggagatttacacgagaaggaaataaaatgtacaacagaagtcagtaagggaaggaaaatctatttaaaaatga

SEQ ID NO: 7181 - DNA, 122 bp, Homo sapiens
  misc_feature (61)..(62): /note="This region represents a CpG dinucleotide"
  misc_feature (61)..(61): /note="Nucleotide may be methylated to form 5-methylcytosine"
cacccatccttttaaatgttgtctgtcaagattctgtccttggcctttgatatttccaaacgctctgtatcttccctagatgatctcatcaatgtctaagacctcaaatatcacccatgtgt

SEQ ID NO: 7182 - DNA, 122 bp, Homo sapiens
  misc_feature (61)..(62): /note="This region represents a CpG dinucleotide"
  misc_feature (61)..(61): /note="Nucleotide may be methylated to form 5-methylcytosine"
ttctctggatgtaccaacatttatgaaatgaaagcgtagaagagagcaagggtttgaacgcgtgtagacctgtagtatttgtttgtttttattggctaactagtaaatatagctctggggct

SEQ ID NO: 7183 - DNA, 122 bp, Homo sapiens
  misc_feature (61)..(62): /note="This region represents a CpG dinucleotide"
  misc_feature (61)..(61): /note="Nucleotide may be methylated to form 5-methylcytosine"
caagatgcaaaaattgagtttcaaagaggaaaggccacatgcccagcgggacaggaaatacgagaagagtcaggatgtgaacccacactacgtgactctaaagtcagtgctcaataggctac

SEQ ID NO: 7184 - DNA, 122 bp, Homo sapiens
  misc_feature (61)..(62): /note="This region represents a CpG dinucleotide"
  misc_feature (61)..(61): /note="Nucleotide may be methylated to form 5-methylcytosine"
atgcctttctgatttatccaagttgttgcaggtatcaatacttccctttctggctgggcacggtggctcatgcctgtaattccagcacttttggaggtgagtcaggggggatcacttgaggt

SEQ ID NO: 7185 - DNA, 122 bp, Homo sapiens
  misc_feature (61)..(62): /note="This region represents a CpG dinucleotide"
  misc_feature (61)..(61): /note="Nucleotide may be methylated to form 5-methylcytosine"
gggaaaaaaaaaagtatttatgaaactcctacggtagcagaataagcctccagggcccttcgagcaatcccaggtattctcttcctctttcagttccacttagagaaaaactactctgtggc

SEQ ID NO: 7186 - DNA, 122 bp, Homo sapiens
  misc_feature (61)..(62): /note="This region represents a CpG dinucleotide"
  misc_feature (61)..(61): /note="Nucleotide may be methylated to form 5-methylcytosine"
cccaaagcactgggattacagacgtgagccaccacacccgaccaacacacacctttttaacgtatcattgaatgacatgggaagcacgcatgaagccctcctgcacacgaaataccacagtc

SEQ ID NO: 7187 - DNA, 122 bp, Homo sapiens
  misc_feature (61)..(62): /note="This region represents a CpG dinucleotide"
  misc_feature (61)..(61): /note="Nucleotide may be methylated to form 5-methylcytosine"
taaaatatgcctgcttcagtccaacacttccctttttctgagggtcgaaagttaataaaacgcacttctctgggtgtttattttctgtacaccattatacctgtcatgaattctttgttttt

SEQ ID NO: 7188 - DNA, 122 bp, Homo sapiens
  misc_feature (61)..(62): /note="This region represents a CpG dinucleotide"
  misc_feature (61)..(61): /note="Nucleotide may be methylated to form 5-methylcytosine"
gttgaaaatggagactcaactcaatttaggagctatcccatcataactagtagcaaaacacgtcactacttgagtctcaacaaaagacagaaaaggtatgaagttggggaacaaatagctgc

SEQ ID NO: 7189 - DNA, 122 bp, Homo sapiens
  misc_feature (61)..(62): /note="This region represents a CpG dinucleotide"
  misc_feature (61)..(61): /note="Nucleotide may be methylated to form 5-methylcytosine"
atgaacattttccttttgtgtgtcatgcatattcaacataatcccactcaaagtcccaggcgttgctttagtatacattgcctcatacatccctactgttgttgccagaaaatttaattcaa

SEQ ID NO: 7190 - DNA, 122 bp, Homo sapiens
  misc_feature (61)..(62): /note="This region represents a CpG dinucleotide"
  misc_feature (61)..(61): /note="Nucleotide may be methylated to form 5-methylcytosine"
taattgcagttcagtaatgcctcctttcccttgaaatgtaaccacattcagctatgactacgctggttctcaggagcagaggaaaaatatatgatgtaatgggatgagttttttggggcact

SEQ ID NO: 7191 - DNA, 122 bp, Homo sapiens
  misc_feature (61)..(62): /note="This region represents a CpG dinucleotide"
  misc_feature (61)..(61): /note="Nucleotide may be methylated to form 5-methylcytosine"
ctctgccggggagcgccagactcagatgaaaggtattatgacattcgagatgaataatgacgtaagaaggacttactctattgtatatcacggtgcagtatcaaaacattttgtcccatgag

SEQ ID NO: 7192 - DNA, 122 bp, Homo sapiens
  misc_feature (61)..(62): /note="This region represents a CpG dinucleotide"
  misc_feature (61)..(61): /note="Nucleotide may be methylated to form 5-methylcytosine"
ccacttaatccttacaacttctctgggagtgaaatcctgcttttacagccatttcatagacgaggaggctgaggcaccaacagggtaatttgccaaggtcacaaagctaagggaacacagga

SEQ ID NO: 7193 - DNA, 122 bp, Homo sapiens
  misc_feature (61)..(62): /note="This region represents a CpG dinucleotide"
  misc_feature (61)..(61): /note="Nucleotide may be methylated to form 5-methylcytosine"
tcacaatcatttagtgactgagagggattgatatcatggctatgaaaaaaaagaaaaaggcgatactggaactttgaaactcagtcttctgactctggggttttgccaagaatcagcagcta

SEQ ID NO: 7194 - DNA, 122 bp, Homo sapiens
  misc_feature (61)..(62): /note="This region represents a CpG dinucleotide"
  misc_feature (61)..(61): /note="Nucleotide may be methylated to form 5-methylcytosine"
taattctacctgtggctaggaggattcttctgagtattaggcaagggaacatatgtcaaacgcttagcacattgcccagcacgtaaagcgcttagccagtgtttgcagctgtatgataatcc

SEQ ID NO: 7195 - DNA, 122 bp, Homo sapiens
  misc_feature (61)..(62): /note="This region represents a CpG dinucleotide"
  misc_feature (61)..(61): /note="Nucleotide may be methylated to form 5-methylcytosine"
ggaaaatattagtttacattcttcagttccctggtgactgaccatattaggcctgagcaacgtatcttaccacacttgctaatctgtggatttctaaaagtggataattagtccagacagtt

SEQ ID NO: 7196 - DNA, 122 bp, Homo sapiens
  misc_feature (61)..(62): /note="This region represents a CpG dinucleotide"
  misc_feature (61)..(61): /note="Nucleotide may be methylated to form 5-methylcytosine"
ccttcctcaaactgctttgtaaacagagcacttccctgctgggcaaggctggatcctctgcgtttctatctgcttcacttgacctttggccttttctctatcctcatcgctgtttaatacaa

SEQ ID NO: 7197 - DNA, 122 bp, Homo sapiens
  misc_feature (61)..(62): /note="This region represents a CpG dinucleotide"
  misc_feature (61)..(61): /note="Nucleotide may be methylated to form 5-methylcytosine"
aatgactaagtataaaacctcctccagggttttgctgtctgcttttaagaacatgcaacccgaaagcagacaactatgtaagttagaacaggggatttatgagaggtgattaggcagtgcct

SEQ ID NO: 7198 - DNA, 122 bp, Homo sapiens
  misc_feature (61)..(62): /note="This region represents a CpG dinucleotide"
  misc_feature (61)..(61): /note="Nucleotide may be methylated to form 5-methylcytosine"
gcccttggatccatccatccttaagattcccagttatgttagccaactaaacttcactttcgcttaatctagtttaagttggtttatgccaaatataaccaagagttctggctcaaccactt

SEQ ID NO: 7199 - DNA, 122 bp, Homo sapiens
  misc_feature (61)..(62): /note="This region represents a CpG dinucleotide"
  misc_feature (61)..(61): /note="Nucleotide may be methylated to form 5-methylcytosine"
cactgcctgaggctgccagctcgtgctctacctgcagccatcacctgcagtgggagaagccggaatcccctaatcacctccagcaaagcagcagataagcaccttgtagttcaacccaggag

SEQ ID NO: 7200 - DNA, 122 bp, Homo sapiens
  misc_feature (61)..(62): /note="This region represents a CpG dinucleotide"
  misc_feature (61)..(61): /note="Nucleotide may be methylated to form 5-methylcytosine"
aaaaggtgtggtgtggcagggacacacagagtaaggtcaaaggcaaaacagctgggagagcggtggagccagacagatgaaaagtcctcaaagagaattaggggcgagatcagggtagaaag

SEQ ID NO: 7201 - DNA, 122 bp, Homo sapiens
  misc_feature (61)..(62): /note="This region represents a CpG dinucleotide"
  misc_feature (61)..(61): /note="Nucleotide may be methylated to form 5-methylcytosine"
aatgaagcagtgcaggttaggggcaagagcatcagcttgggcatcacacaggactgggaacgtgtgggccatgctgctagcacatagttgaatagctgtgggccaattgctggatctctctg

SEQ ID NO: 7202 - DNA, 122 bp, Homo sapiens
  misc_feature (61)..(62): /note="This region represents a CpG dinucleotide"
  misc_feature (61)..(61): /note="Nucleotide may be methylated to form 5-methylcytosine"
tctaaaacctgttccacctgcagccctctctatttcacttgatggcagttttatccttctcgttattcaggataaaaacctgagactcattcttgtttttcctctttctcttatatcccaca

SEQ ID NO: 7203 - DNA, 122 bp, Homo sapiens
  misc_feature (61)..(62): /note="This region represents a CpG dinucleotide"
  misc_feature (61)..(61): /note="Nucleotide may be methylated to form 5-methylcytosine"
ttattctgctctgggctgcagtgttgttagggaaaacatacgtacacaaactgacatgtgcgtgtatgtgtgcaaatgcatgtacacatacataccacagaccaacagtttcttaccagaac

SEQ ID NO: 7204 - DNA, 122 bp, Homo sapiens
  misc_feature (61)..(62): /note="This region represents a CpG dinucleotide"
  misc_feature (61)..(61): /note="Nucleotide may be methylated to form 5-methylcytosine"
tcacaaactgaggcatgtccatgttttggtggtctcatggtttgtcactggccactctgccgaggggccccaagctgactctcaacctgctggactgggtgactcttgtctgtgcagagagg

SEQ ID NO: 7205 - DNA, 122 bp, Homo sapiens
  misc_feature (61)..(62): /note="This region represents a CpG dinucleotide"
  misc_feature (61)..(61): /note="Nucleotide may be methylated to form 5-methylcytosine"
cacacacacacacaccttttagcacaagcatgttctcaaaagagagtgcagcagtcaaaccgagaatgagtaagtccactccagaatgctaacatcagctcaaaacccaagtaagccagcag

SEQ ID NO: 7206 - DNA, 122 bp, Homo sapiens
  misc_feature (61)..(62): /note="This region represents a CpG dinucleotide"
  misc_feature (61)..(61): /note="Nucleotide may be methylated to form 5-methylcytosine"
tcataatccaggatctgtttgacagcttctgacttcagtgtgactatccatgtcagatgacgtcattgctaaaccatgtgtcttgggttgtgagaaaagctaggagaatcaacaggaaggcc

SEQ ID NO: 7207 - DNA, 122 bp, Homo sapiens
  misc_feature (61)..(62): /note="This region represents a CpG dinucleotide"
  misc_feature (61)..(61): /note="Nucleotide may be methylated to form 5-methylcytosine"
cttgttgcttgagggcacttatggtctctgtgggccaaatctcctcataagctatctgaccgtcaggtgctggtctcccaggagtcccagggaattgattccaaagctgggaagaggcagtc

SEQ ID NO: 7208 - DNA, 122 bp, Homo sapiens
  misc_feature (61)..(62): /note="This region represents a CpG dinucleotide"
  misc_feature (61)..(61): /note="Nucleotide may be methylated to form 5-methylcytosine"
cgaaccccaggctgtctgctcctgagggggctctggggcatggtgacattccccagtgggcgaggaagctgaggtcactgtctgctttcaacacttgtccctgagtcactgcctgggcctga

SEQ ID NO: 7209 - DNA, 122 bp, Homo sapiens
  misc_feature (61)..(62): /note="This region represents a CpG dinucleotide"
  misc_feature (61)..(61): /note="Nucleotide may be methylated to form 5-methylcytosine"
tgtgactcaccatgctatccatatgttgaggaaaatatactcctctgctctaaaagttcacgttcccatgcaaccatatgatcgctaatgagggcttccatgtgtcctaaatattgagaagt

SEQ ID NO: 7210 - DNA, 122 bp, Homo sapiens
  misc_feature (61)..(62): /note="This region represents a CpG dinucleotide"
  misc_feature (61)..(61): /note="Nucleotide may be methylated to form 5-methylcytosine"
cttcacacactgctccaccagggcacttcaatcctaactgacttaaggactggtttgctgcgtaatgacatagaatttcaaactctgtactcaatctacagcctcttcagatgaaagactaa

SEQ ID NO: 7211 - DNA, 122 bp, Homo sapiens
  misc_feature (61)..(62): /note="This region represents a CpG dinucleotide"
  misc_feature (61)..(61): /note="Nucleotide may be methylated to form 5-methylcytosine"
actggggtcaccagggaaaggtgctggcaaaccccaggccttgtttccctgcctccttcacgctgtcttccctccttccctctctcccctctccttgcatgtctatactcaattctccctct

SEQ ID NO: 7212 - DNA, 122 bp, Homo sapiens
  misc_feature (61)..(62): /note="This region represents a CpG dinucleotide"
  misc_feature (61)..(61): /note="Nucleotide may be methylated to form 5-methylcytosine"
aagaattagagaatggaattcagagtgaccacagaacctggaaagtgtggaaggaaactgcgaaaaaagagagccagaaagggagaggcctgaattctgtttatgaactctacccaagtccc

SEQ ID NO: 7213 - DNA, 122 bp, Homo sapiens
  misc_feature (61)..(62): /note="This region represents a CpG dinucleotide"
  misc_feature (61)..(61): /note="Nucleotide may be methylated to form 5-methylcytosine"
gtgcgttagtgttggctctgtcgttctgtcaaagtgtggacagcaaatagctgtcctggccgttcctgggtggagttggggatgttgagccatctgctgaagggcagctcttcccgtgagtc

SEQ ID NO: 7214 - DNA, 122 bp, Homo sapiens
  misc_feature (61)..(62): /note="This region represents a CpG dinucleotide"
  misc_feature (61)..(61): /note="Nucleotide may be methylated to form 5-methylcytosine"
aggaacggggttcttagcctctctggccttggtgcacttgtctgctcccaggacgtttctcgatggctctccccgaggactgggagtacccagcctggtgcctccaccctgtcttagcacag

SEQ ID NO: 7215 - DNA, 122 bp, Homo sapiens
  misc_feature (61)..(62): /note="This region represents a CpG dinucleotide"
  misc_feature (61)..(61): /note="Nucleotide may be methylated to form 5-methylcytosine"
ggcagcttaagaagcctcactggccaactgggaaacatccgctgtccaaatattataggacggactattcaaccgcatccctgagctctggtgaaataggcatgcagtataatggaattaac

SEQ ID NO: 7216 - DNA, 122 bp, Homo sapiens
  misc_feature (61)..(62): /note="This region represents a CpG dinucleotide"
  misc_feature (61)..(61): /note="Nucleotide may be methylated to form 5-methylcytosine"
agccaggctgaactccagctgtggattctgagtctgaacttaaccattgtgctagactcccgccttatgagtgcagtaactgcccagatgacctgtaatcctctaaacgttcaccacaagtt

SEQ ID NO: 7217 - DNA, 122 bp, Homo sapiens
  misc_feature (61)..(62): /note="This region represents a CpG dinucleotide"
  misc_feature (61)..(61): /note="Nucleotide may be methylated to form 5-methylcytosine"
aggtcaagaagaactgtaaatcttcttttatgacgtttccaatgggagagcctagttctacggataagagagtggaactattgggttggttatcattctgaaatcagtattcccttttatag

SEQ ID NO: 7218 - DNA, 122 bp, Homo sapiens
  misc_feature (61)..(62): /note="This region represents a CpG dinucleotide"
  misc_feature (61)..(61): /note="Nucleotide may be methylated to form 5-methylcytosine"
agcatcaggcaatgctattggtgccaagaactggctctgcctagaggccccaccaagaagcgaaatccctttgctcagaagtcaggttacattacagaaagaaatgaattttaaacattcca

SEQ ID NO: 7219 - DNA, 122 bp, Homo sapiens
  misc_feature (61)..(62): /note="This region represents a CpG dinucleotide"
  misc_feature (61)..(61): /note="Nucleotide may be methylated to form 5-methylcytosine"
tggagatgctgagtgcagctcatcacgaggactgacatcatcacatatgtaagggcctggcgtgtgccgggccctcaacaggtgtggctaatattagcatgcttgctcctccctcgactgct

SEQ ID NO: 7220 - DNA, 122 bp, Homo sapiens
  misc_feature (61)..(62): /note="This region represents a CpG dinucleotide"
  misc_feature (61)..(61): /note="Nucleotide may be methylated to form 5-methylcytosine"
acctaagaaaacagggcagctatgactcactgggccctgctgtatcaggtactgtctcagcgctttatgtgcaccatctgatgtcatcctcccaacaattctacaaacagttactactctct

SEQ ID NO: 7221 - DNA, 122 bp, Homo sapiens
  misc_feature (61)..(62): /note="This region represents a CpG dinucleotide"
  misc_feature (61)..(61): /note="Nucleotide may be methylated to form 5-methylcytosine"
gggaagtgttggagccgggattcaattcaagctgttggcttcagattcccagttcatactcgctccctctatgaaacctccacccatccatttggaaaatgttgctagctagcttcaccttc

SEQ ID NO: 7222 - DNA, 122 bp, Homo sapiens
  misc_feature (61)..(62): /note="This region represents a CpG dinucleotide"
  misc_feature (61)..(61): /note="Nucleotide may be methylated to form 5-methylcytosine"
gggggagacagttactaaacatgacaatgaatgcatcattataaattgtgataagtgttacgaagaaaagaacaggctgctacgagaagacttagcatataagagactgtcagaattttttg

SEQ ID NO: 7223 - DNA, 122 bp, Homo sapiens
  misc_feature (61)..(62): /note="This region represents a CpG dinucleotide"
  misc_feature (61)..(61): /note="Nucleotide may be methylated to form 5-methylcytosine"
agttcagtccctagcgactaacagtgagcagaggaagtaaagggggagttgtaagagaggcggtatcaacagcctgctgatgaaagaggcgactctgcagaaagaggcaacttgacatatca

SEQ ID NO: 7224 - DNA, 122 bp, Homo sapiens
  misc_feature (61)..(62): /note="This region represents a CpG dinucleotide"
  misc_feature (61)..(61): /note="Nucleotide may be methylated to form 5-methylcytosine"
catgaatggacaaagctacgtggattgagcttttgttttacaaatggagaaataaagagacgtagtcatttgcctagagtcacaaagtaagcagaagactggaaacttggacctgggttttg

SEQ ID NO: 7225 - DNA, 122 bp, Homo sapiens
  misc_feature (61)..(62): /note="This region represents a CpG dinucleotide"
  misc_feature (61)..(61): /note="Nucleotide may be methylated to form 5-methylcytosine"
caaacagagagcttgtacaggagaactcctccttttccaaaaccatcagataccttgagacgtattcactatcatgagaacagcactggaaagaccttcccccatgattcaattacttccca

SEQ ID NO: 7226 - DNA, 122 bp, Homo sapiens
  misc_feature (61)..(62): /note="This region represents a CpG dinucleotide"
  misc_feature (61)..(61): /note="Nucleotide may be methylated to form 5-methylcytosine"
actaatgtgtttttaaccagttactgtagttcccacagtaagcaagttaggtaatgtatacgcatatttgagtgtcagaattaggcccatttcttctctatgtcagtacaagggctatgatg

SEQ ID NO: 7227 - DNA, 122 bp, Homo sapiens
  misc_feature (61)..(62): /note="This region represents a CpG dinucleotide"
  misc_feature (61)..(61): /note="Nucleotide may be methylated to form 5-methylcytosine"
gttgcactttttgcttcctcagcttcgtgagactgtttgtgtggtcataacccactggtccgctacaacgtgcctgagggtggtcagggtgctgctctttgcttgtttttgtgttctcatca

SEQ ID NO: 7228 - DNA, 122 bp, Homo sapiens
  misc_feature (61)..(62): /note="This region represents a CpG dinucleotide"
  misc_feature (61)..(61): /note="Nucleotide may be methylated to form 5-methylcytosine"
caggcagagaaagagaggcgtgtccctgctcttgaaacaggccccctggatccaggctcacgaggaaagttctgccaagtcttggtcactaaagagccaaaaattttaggtgttgttctggt

SEQ ID NO: 7229 - DNA, 122 bp, Homo sapiens
  misc_feature (61)..(62): /note="This region represents a CpG dinucleotide"
  misc_feature (61)..(61): /note="Nucleotide may be methylated to form 5-methylcytosine"
agctgagattgtgccactgcactccaacctcagcaacagagcaacactatgtctcaaaaacgagtgcaaactttggagcctggccattcaggttcaagttctggctcaaccattgtgacctt

SEQ ID NO: 7230 - DNA, 122 bp, Homo sapiens
  misc_feature (61)..(62): /note="This region represents a CpG dinucleotide"
  misc_feature (61)..(61): /note="Nucleotide may be methylated to form 5-methylcytosine"
agagtattattgcatcatacctctggctttttcctttgcatggagccctaatcctcttttcggcctggttaactcctatttattttccaggtctctgcttccttgagaagcctactcctgat

SEQ ID NO: 7231 - DNA, 122 bp, Homo sapiens
  misc_feature (61)..(62): /note="This region represents a CpG dinucleotide"
  misc_feature (61)..(61): /note="Nucleotide may be methylated to form 5-methylcytosine"
cttgaaacattgtttatgcataaataaattcaccactctgaaaagtattctgacaaggcacggcatgtgttggcatctgcaagtcagcctgtactgagttttcactacccacaagaggtggt

SEQ ID NO: 7232 - DNA, 122 bp, Homo sapiens
  misc_feature (61)..(62): /note="This region represents a CpG dinucleotide"
  misc_feature (61)..(61): /note="Nucleotide may be methylated to form 5-methylcytosine"
tactttcttttctcctaagagagaacacccttgtgagctaggcagggcaagtggagcaatcgcaatttgcagatgagttaattgatgctcaagcaatgagatgacttctcagggcccttggc

SEQ ID NO: 7233 - DNA, 122 bp, Homo sapiens
  misc_feature (61)..(62): /note="This region represents a CpG dinucleotide"
  misc_feature (61)..(61): /note="Nucleotide may be methylated to form 5-methylcytosine"
gtgggggtggggtgtggaccgaggctggctggagctggagcagtgtcctcagccactggccgggaaggctttgttagactaagcgtggcctgaggatgcctcagtgccaagtcacaccatga

SEQ ID NO: 7234 - DNA, 122 bp, Homo sapiens
  misc_feature (61)..(62): /note="This region represents a CpG dinucleotide"
  misc_feature (61)..(61): /note="Nucleotide may be methylated to form 5-methylcytosine"
aacttttaatatgtaaataagtgtgacagtagccagaatactccaaaccacttctcccctcgtaatccttaaacaaggaacctttgacgtaggcagaattccaggatgaggctgcaggaaac

SEQ ID NO: 7235 - DNA, 122 bp, Homo sapiens
  misc_feature (61)..(62): /note="This region represents a CpG dinucleotide"
  misc_feature (61)..(61): /note="Nucleotide may be methylated to form 5-methylcytosine"
gccgtgagccgctgcactgttccacttgggcttctgctacatttatcaagctgttgtaaacgtttccatattcccccacgcctcagtatttagcgagggctccttatgtgtgacacgccctg

SEQ ID NO: 7236 - DNA, 122 bp, Homo sapiens
  misc_feature (61)..(62): /note="This region represents a CpG dinucleotide"
  misc_feature (61)..(61): /note="Nucleotide may be methylated to form 5-methylcytosine"
attcattgtgcctttcctttcctgtgagtcacggcctacctaagagaaagcttagtaacacgcaaggaaaattcaaaacacattgaggctctttaatgtacgtgatacttcagctgagataa

SEQ ID NO: 7237 - DNA, 122 bp, Homo sapiens
  misc_feature (61)..(62): /note="This region represents a CpG dinucleotide"
  misc_feature (61)..(61): /note="Nucleotide may be methylated to form 5-methylcytosine"
ttgccagctgcaggaaggtggaggcagaagaagtaaaaagggaacaagaggtgaggtttacgttctgcctaagtggaacagagtagaactttgcacaaactccttaatcttgcctagaggca

SEQ ID NO: 7238 - DNA, 122 bp, Homo sapiens
  misc_feature (61)..(62): /note="This region represents a CpG dinucleotide"
  misc_feature (61)..(61): /note="Nucleotide may be methylated to form 5-methylcytosine"
tttttcagagatggaggcagaggttgaatgattcatacagagtctcacagctgatgacagcgccagtagtagaagctgctctgactctcaatcttgtctcctctagtgccacatgcttgttg

SEQ ID NO: 7239 - DNA, 122 bp, Homo sapiens
  misc_feature (61)..(62): /note="This region represents a CpG dinucleotide"
  misc_feature (61)..(61): /note="Nucleotide may be methylated to form 5-methylcytosine"
catggtgtatatgtgccacattttctttgtccagtctacttctcatacagactatttctacgcctttcattcacctggtggaaactctatcctttttcctgaagttggcatttctcctgaca

SEQ ID NO: 7240 - DNA, 122 bp, Homo sapiens
  misc_feature (61)..(62): /note="This region represents a CpG dinucleotide"
  misc_feature (61)..(61): /note="Nucleotide may be methylated to form 5-methylcytosine"
caaaggagtcatttcccaacttcagtattttgaaacattagatatcctgtttccttacaacgtgaccatcttgcagataagcactgctagatcatctgcacattcgagtaaatcctgttgtg

SEQ ID NO: 7241 - DNA, 122 bp, Homo sapiens
  misc_feature (61)..(62): /note="This region represents a CpG dinucleotide"
  misc_feature (61)..(61): /note="Nucleotide may be methylated to form 5-methylcytosine"
cggatccctccttcccactccacctgctcaacctgtcagaaacagacctggtccgttttccgtcctcttgccctggcacacagatggtacctggttcattggagatctctgctcagactccc

SEQ ID NO: 7242 - DNA, 122 bp, Homo sapiens
  misc_feature (61)..(62): /note="This region represents a CpG dinucleotide"
  misc_feature (61)..(61): /note="Nucleotide may be methylated to form 5-methylcytosine"
taagaccagcccagttgccttatctgacatggaatctttttcctgtctggcttgcagcagcgaagtgtttctggtcaggttgcctccaccaaacctgattgaagcaaaagggtgacatgctc

SEQ ID NO: 7243 - DNA, 122 bp, Homo sapiens
  misc_feature (61)..(62): /note="This region represents a CpG dinucleotide"
  misc_feature (61)..(61): /note="Nucleotide may be methylated to form 5-methylcytosine"
tttccctcactaattctggtgaagtgattttgttttacagtaacacgaaagagaaatcagcggggacagtgattacccaacaggcaggatcatcttggaattagagaacttaagaaccactg

SEQ ID NO: 7244 - DNA, 122 bp, Homo sapiens
  misc_feature (61)..(62): /note="This region represents a CpG dinucleotide"
  misc_feature (61)..(61): /note="Nucleotide may be methylated to form 5-methylcytosine"
gttcagccctgtgagcccccagttgcttcacatgtagtatgtgactcatggataaggccacgttcaccctgattcatctatgatgagctaacgcctagctggctcgtggttggaccttagaa

SEQ ID NO: 7245 - DNA, 122 bp, Homo sapiens
  misc_feature (61)..(62): /note="This region represents a CpG dinucleotide"
  misc_feature (61)..(61): /note="Nucleotide may be methylated to form 5-methylcytosine"
ttcctcctgcaaaaatgaaacagtcaagatgaggaagacctgatcagtagcacagtgaagcgattgaagagtatgggctccagagtgagattagctgaattcatccttagccttgagatccc

SEQ ID NO: 7246 - DNA, 122 bp, Homo sapiens
  misc_feature (61)..(62): /note="This region represents a CpG dinucleotide"
  misc_feature (61)..(61): /note="Nucleotide may be methylated to form 5-methylcytosine"
tgctgaatgaaaatcatgcatcaggcacctccccacaaagcctgccccagtcacctctgccggaagtggccactcctatagagaccccaagaatagggctttgttacacccctgggctgggt

SEQ ID NO: 7247 - DNA, 122 bp, Homo sapiens
  misc_feature (61)..(62): /note="This region represents a CpG dinucleotide"
  misc_feature (61)..(61): /note="Nucleotide may be methylated to form 5-methylcytosine"
cccctggaccatttcctagtgtataaaatcttcccactgctgttggaatcccagatgacacggggaggcaggagacactttgagggccctggcctctagaagccctaagagaatgcctgctt

SEQ ID NO: 7248 - DNA, 122 bp, Homo sapiens
  misc_feature (61)..(62): /note="This region represents a CpG dinucleotide"
  misc_feature (61)..(61): /note="Nucleotide may be methylated to form 5-methylcytosine"
ggagtcctgagtccacctggggctggtcttgggagccctgatacgggctttgtgactcaacgcctatgaccaggaaccaagagtcctcagtgggaagacaccctgtgcttcactgactcatt

SEQ ID NO: 7249 - DNA, 122 bp, Homo sapiens
  misc_feature (61)..(62): /note="This region represents a CpG dinucleotide"
  misc_feature (61)..(61): /note="Nucleotide may be methylated to form 5-methylcytosine"
cttcaggaagccaaccttgaccagaaagctgctgtcgctgtcctgggtggccatgaccaccgagtcatgaagcctctcatcaaagcagacgtggctctgggagtattacaggtcgagaaaat

SEQ ID NO: 7250 - DNA, 122 bp, Homo sapiens
  misc_feature (61)..(62): /note="This region represents a CpG dinucleotide"
  misc_feature (61)..(61): /note="Nucleotide may be methylated to form 5-methylcytosine"
caactgtgtttttaacggataagtgtccatgacaacaggaaaaaatgccacagcagtgcacgcaacactgttagcagactcaaagagattagggtagaattagcctagtgattccttccttc

SEQ ID NO: 7251 - DNA, 122 bp, Homo sapiens
  misc_feature (61)..(62): /note="This region represents a CpG dinucleotide"
  misc_feature (61)..(61): /note="Nucleotide may be methylated to form 5-methylcytosine"
gagccccgttggcagagggtggtgcccagaggaccttctgccacttcagagtgcacagggcgctggggccagcctatatagcctggggcaggggtggaggcagcaaagcaagcagctgctgg

SEQ ID NO: 7252 - DNA, 122 bp, Homo sapiens
  misc_feature (61)..(62): /note="This region represents a CpG dinucleotide"
  misc_feature (61)..(61): /note="Nucleotide may be methylated to form 5-methylcytosine"
acacagcaaaagcaggagcaagagagagcaagggaggaggtgccacacacttttaaacgacgagatctcatgagaactcactacagtgaagacagtaccaagaggcatggtgctataccatt

SEQ ID NO: 7253 - DNA, 122 bp, Homo sapiens
  misc_feature (61)..(62): /note="This region represents a CpG dinucleotide"
  misc_feature (61)..(61): /note="Nucleotide may be methylated to form 5-methylcytosine"
attttgagattcctgtgccctcactcacgcaaggaggaagtcacctggctccagtgaacacgtgtggaacagaaatcagggccactgaaaagccaccacccacttgagagggcttgttctca

SEQ ID NO: 7254 - DNA, 122 bp, Homo sapiens
  misc_feature (61)..(62): /note="This region represents a CpG dinucleotide"
  misc_feature (61)..(61): /note="Nucleotide may be methylated to form 5-methylcytosine"
cttattatgcgccaggtactgtgctgaggaattatgtgtaatcacttcatcttcatgctgcgcctacatggtgaacgtgcagtaggcatgatgtgtaccattttacagatgagtaaacaggc

SEQ ID NO: 7255 - DNA, 122 bp, Homo sapiens
  misc_feature (61)..(62): /note="This region represents a CpG dinucleotide"
  misc_feature (61)..(61): /note="Nucleotide may be methylated to form 5-methylcytosine"
attcaaggtcaccaaaccagaacccaggtctctcaacgcttaacagctgaatgacacacacggcactgcacagagagacacataagacagctcatgtgggcctaaccagataccagtttcac

SEQ ID NO: 7256 - DNA, 122 bp, Homo sapiens
  misc_feature (61)..(62): /note="This region represents a CpG dinucleotide"
  misc_feature (61)..(61): /note="Nucleotide may be methylated to form 5-methylcytosine"
agccattcatttgcttttgaaggtgatcttgtaatagagtgatcctgctcactagtaatgcggcccagtgagcatccaggaatctggttgagcaattcagtgtgccctccttttgggaaaaa

SEQ ID NO: 7257 - DNA, 122 bp, Homo sapiens
  misc_feature (61)..(62): /note="This region represents a CpG dinucleotide"
  misc_feature (61)..(61): /note="Nucleotide may be methylated to form 5-methylcytosine"
caaagctttatcctctgagtattattaccaaccttaacaagtttctaaacttgacccaagcgtatgtttttatatacttcacttaatcggcattcttttattgaactcccacctgtgtgcca

SEQ ID NO: 7258 - DNA, 122 bp, Homo sapiens
  misc_feature (61)..(62): /note="This region represents a CpG dinucleotide"
  misc_feature (61)..(61): /note="Nucleotide may be methylated to form 5-methylcytosine"
cttgactcagttcctccttgctgccacttcagaaggcaggtattatgggttccacctttacgattgaagtcaaatctcagagaggttaagtatgctgttcaagggcatccagccatgcggaa

SEQ ID NO: 7259 - DNA, 122 bp, Homo sapiens
  misc_feature (61)..(62): /note="This region represents a CpG dinucleotide"
  misc_feature (61)..(61): /note="Nucleotide may be methylated to form 5-methylcytosine"
gagggatggatcagaggctgagtcaggcctgtgtcacacattccattcctgagtagaagacggaatccactcagtacatttcactggagtgtactattaccagtaaaagggggtaaaaaatt

SEQ ID NO: 7260 - DNA, 122 bp, Homo sapiens
  misc_feature (61)..(62): /note="This region represents a CpG dinucleotide"
  misc_feature (61)..(61): /note="Nucleotide may be methylated to form 5-methylcytosine"
aacatgggttccccaacctccaatttctttccatctatagggttgttctgtagagcagggcgcccacacccaggctgcacacttgagtcacctggggagccccacccaattaaatcccaatc

SEQ ID NO: 7261 - DNA, 122 bp, Homo sapiens
  misc_feature (61)..(62): /note="This region represents a CpG dinucleotide"
  misc_feature (61)..(61): /note="Nucleotide may be methylated to form 5-methylcytosine"
tttcatctaattcaacaaatgtattttctgctgtgtcagagacagccttaagaagaatttcggtcgggaacaacatgcagaaactggttctcagtaaaaaagctactttttgaagttaccat

SEQ ID NO: 7262 - DNA, 122 bp, Homo sapiens
  misc_feature (61)..(62): /note="This region represents a CpG dinucleotide"
  misc_feature (61)..(61): /note="Nucleotide may be methylated to form 5-methylcytosine"
gacgaaggcttcctgtggtttgggttgatgtatctctctgtcttgcaacactgagttccccgttgtctgggcggaagccagtcagacggaagcccggcttctgtggtgcctgccctggtggc

SEQ ID NO: 7263 - DNA, 122 bp, Homo sapiens
  misc_feature (61)..(62): /note="This region represents a CpG dinucleotide"
  misc_feature (61)..(61): /note="Nucleotide may be methylated to form 5-methylcytosine"
ttacttagctttggcatttcccctagtaattcccaaggcaaaaccaggaattgtcagagacgtgaccagacatgtattaaaattctagtgcaattgggaaacttggtcttcctgatttgttt

SEQ ID NO: 7264 - DNA, 122 bp, Homo sapiens
  misc_feature (61)..(62): /note="This region represents a CpG dinucleotide"
  misc_feature (61)..(61): /note="Nucleotide may be methylated to form 5-methylcytosine"
cgaggcgtccagcacgcgccgcgggggcagcctgggccagaccgctaggagcggccccgccgctctggagcccggcccttccgagagcctcactgcctccagccctctcaagttaaacgaac

SEQ ID NO: 7265 - DNA, 122 bp, Homo sapiens
  misc_feature (61)..(62): /note="This region represents a CpG dinucleotide"
  misc_feature (61)..(61): /note="Nucleotide may be methylated to form 5-methylcytosine"
ggtaatccgcctgcctccatctcccaaattgctgggattacaggcatgagccaccacacccggcctaaaactagagacttcttaactaccttagagagtatagatagggctgggcatggcgg

SEQ ID NO: 7266 - DNA, 122 bp, Homo sapiens
  misc_feature (61)..(62): /note="This region represents a CpG dinucleotide"
  misc_feature (61)..(61): /note="Nucleotide may be methylated to form 5-methylcytosine"
ctcaaaaagaaagaaagaaagaaagaagtcaatcctgggatttatccagtttactgagagcgtgagttaagtaagcacgtagctttctgtatagaacttttgagatctgttgtatttctggt

SEQ ID NO: 7267 - DNA, 122 bp, Homo sapiens
  misc_feature (61)..(62): /note="This region represents a CpG dinucleotide"
  misc_feature (61)..(61): /note="Nucleotide may be methylated to form 5-methylcytosine"
caattcctgcacagctctgagcaccgggccaggttcaaagtacaatcatgcattgcctaacgatgcagatgcattctgaaaacagaatccttaggtgattttgtcgctctgtgaactctgta

SEQ ID NO: 7268 - DNA, 122 bp, Homo sapiens
  misc_feature (61)..(62): /note="This region represents a CpG dinucleotide"
  misc_feature (61)..(61): /note="Nucleotide may be methylated to form 5-methylcytosine"
gccggtgcccgaaattgggctcctgcacacagtggcccgctacaagttctacctggctttcgagaactcgcagcacctggattatatcaccgagaagctctggcgcaacgcgttgctcgctg

SEQ ID NO: 7269 - DNA, 122 bp, Homo sapiens
  misc_feature (61)..(62): /note="This region represents a CpG dinucleotide"
  misc_feature (61)..(61): /note="Nucleotide may be methylated to form 5-methylcytosine"
cttatgtaactcatgtgctcctgagtaagtcagccacttgacctccaagaggctgagttccgtcactggaaaatgagagtgtttacaatacacttccttttcggcctcacaattaactctga

SEQ ID NO: 7270 - DNA, 122 bp, Homo sapiens
  misc_feature (61)..(62): /note="This region represents a CpG dinucleotide"
  misc_feature (61)..(61): /note="Nucleotide may be methylated to form 5-methylcytosine"
atttgttgcaaggatgtttaccgcagggataaatataaaagtgaaggctgaaaacactctcgtggcttagtaacacactgttagagaatgctgtgtacttattaaaaatagtgtttacaaat

SEQ ID NO: 7271 - DNA, 122 bp, Homo sapiens
  misc_feature (61)..(62): /note="This region represents a CpG dinucleotide"
  misc_feature (61)..(61): /note="Nucleotide may be methylated to form 5-methylcytosine"
aaccctggcccagcttccgtgggtggctccagtagggctgctggtgacccatcttgctttcgggagtgcaatgaggcaaaaggctttgctatgatttaacatagcctatatttgacacataa

SEQ ID NO: 7272 - DNA, 122 bp, Homo sapiens
  misc_feature (61)..(62): /note="This region represents a CpG dinucleotide"
  misc_feature (61)..(61): /note="Nucleotide may be methylated to form 5-methylcytosine"
ctctattgctgcttctgtttttaaatcattgctcacatgcagctgttgcggcttgcctctcgcatttcttgctgaagtttgtaagattcctcgttacttttattagtgacccccaaatctga

SEQ ID NO: 7273 - DNA, 122 bp, Homo sapiens
  misc_feature (61)..(62): /note="This region represents a CpG dinucleotide"
  misc_feature (61)..(61): /note="Nucleotide may be methylated to form 5-methylcytosine"
tcacaggacctgaccggctaatctgtgaaggatgactcattcatcaatgctgaagatgaccgcagcactgagctgcagctctgtcttccaccaggcttcctttgcacaacgtcacccaattt

SEQ ID NO: 7274 - DNA, 122 bp, Homo sapiens
  misc_feature (61)..(62): /note="This region represents a CpG dinucleotide"
  misc_feature (61)..(61): /note="Nucleotide may be methylated to form 5-methylcytosine"
cataattaaaataccagtgggtgctaagtgctatcacagatatgtatgcagatttgtaggcgcactaggaggaagtagtggaaggcatcacagaggggtgacttttgagcacagggtcttgt

SEQ ID NO: 7275 - DNA, 122 bp, Homo sapiens
  misc_feature (61)..(62): /note="This region represents a CpG dinucleotide"
  misc_feature (61)..(61): /note="Nucleotide may be methylated to form 5-methylcytosine"
tggcccagttgggacccttccctgccattttccctgggccccagtgcaagctgtaaacagcggtcaccaggccagccctgtgtttgctggcagcactgaacttggccccttttcccactgag

SEQ ID NO: 7276 - DNA, 122 bp, Homo sapiens
  misc_feature (61)..(62): /note="This region represents a CpG dinucleotide"
  misc_feature (61)..(61): /note="Nucleotide may be methylated to form 5-methylcytosine"
aaaagtgtcttcaattttaaataatttgagaatacttacctggttagtaggctaaactaacgtagtagggaagagagtgtaagaaaagtgctgttgaattcatcattcccattagcaccagt

SEQ ID NO: 7277 - DNA, 122 bp, Homo sapiens
  misc_feature (61)..(62): /note="This region represents a CpG dinucleotide"
  misc_feature (61)..(61): /note="Nucleotide may be methylated to form 5-methylcytosine"
acagcagaagcatggctctttagggaactgtgaggtaaccacactgcctagaccggcttacgtcctaggaaacagctgaaatttatagcaaaatacctgctagcacctcaaatgagaatgtc

SEQ ID NO: 7278 - DNA, 122 bp, Homo sapiens
  misc_feature (61)..(62): /note="This region represents a CpG dinucleotide"
  misc_feature (61)..(61): /note="Nucleotide may be methylated to form 5-methylcytosine"
atgtatgagggggtgctatatggatgagtgtgggcacattgtgtgtggcaggtgtgtatacgtgtgtatgtatagttgtgggtatgtattggtgaaaatcataatctcccatgacacaatcc

SEQ ID NO: 7279 - DNA, 122 bp, Homo sapiens
  misc_feature (61)..(62): /note="This region represents a CpG dinucleotide"
  misc_feature (61)..(61): /note="Nucleotide may be methylated to form 5-methylcytosine"
ccctgtagaaatgttagtccacctgtggctgcaaattgccattatccaacttgttaagtgcggcatttcttcctaatattcacaagtcacacaatgagtcaatatcactcctactctggggt

SEQ ID NO: 7280 - DNA, 122 bp, Homo sapiens
  misc_feature (61)..(62): /note="This region represents a CpG dinucleotide"
  misc_feature (61)..(61): /note="Nucleotide may be methylated to form 5-methylcytosine"
ccttgcctgtgttccaggttccagtaaactcctggcttactgagggcagtgtctgtctttcgtcctccagcagtgtctagaacagtgccttgctcataggcactgagtcagtacccatctgg

SEQ ID NO: 7281 - DNA, 122 bp, Homo sapiens
  misc_feature (61)..(62): /note="This region represents a CpG dinucleotide"
  misc_feature (61)..(61): /note="Nucleotide may be methylated to form 5-methylcytosine"
gatcccatggtgcctcagtttccttcttgtgaagcaggtacaataagagtttctacttcacggggatactgtcctgagctcacagaaggcaattgatcactgccactattattgcctcctaa

SEQ ID NO: 7282 - DNA, 122 bp, Homo sapiens
  misc_feature (61)..(62): /note="This region represents a CpG dinucleotide"
  misc_feature (61)..(61): /note="Nucleotide may be methylated to form 5-methylcytosine"
acaggcctcacccagttcccacacaatctaaagggctggtctcactcccaccatgccctccgcccccacccccaagagcactaagtctatttccaggcagtgggcaagcagggctgagaatt

SEQ ID NO: 7283 - DNA, 122 bp, Homo sapiens
  misc_feature (61)..(62): /note="This region represents a CpG dinucleotide"
  misc_feature (61)..(61): /note="Nucleotide may be methylated to form 5-methylcytosine"
tatccataactggtatgacagggaatctcaaaaaaggaaatatcctgttctgaggtctcccgctggattaagtgctcatgactcacagaggccctgccttagctctcagtttcagtgactta

SEQ ID NO: 7284 - DNA, 122 bp, Homo sapiens
  misc_feature (61)..(62): /note="This region represents a CpG dinucleotide"
  misc_feature (61)..(61): /note="Nucleotide may be methylated to form 5-methylcytosine"
aactgagagaagaaactcatgcctacctctgtgatcccataaggtcttacatgtgcttctcggccttactagttcacacatgtcatcctggtctgtagctaatttgagtacaagtctacatc

SEQ ID NO: 7285 - DNA, 122 bp, Homo sapiens
  misc_feature (61)..(62): /note="This region represents a CpG dinucleotide"
  misc_feature (61)..(61): /note="Nucleotide may be methylated to form 5-methylcytosine"
cactgttaccaccttgcttgctggcaccgtgcaatccaaggacgcctggattaggataaacgccttaagtacagtgctgacacaatccagtcctagtgcttaagtcagaggggcccagccct

SEQ ID NO: 7286 - DNA, 122 bp, Homo sapiens
  misc_feature (61)..(62): /note="This region represents a CpG dinucleotide"
  misc_feature (61)..(61): /note="Nucleotide may be methylated to form 5-methylcytosine"
caccacgtaagtgaaggatttgtgtatgatgagctctaggctcccctgagatctaactaacgttctaggatagggacatgggctctggactcagaccatgagagtttacatccctgtttcat

SEQ ID NO: 7287 - DNA, 122 bp, Homo sapiens
  misc_feature (61)..(62): /note="This region represents a CpG dinucleotide"
  misc_feature (61)..(61): /note="Nucleotide may be methylated to form 5-methylcytosine"
tgacgcccttctggtgaccttacatgaacattaagcccagacagcagctccacccacctgcgcagctgatctagcagccccatctggctagggagcagagtcagcaattctgccaacctgag

SEQ ID NO: 7288 - DNA, 122 bp, Homo sapiens
  misc_feature (61)..(62): /note="This region represents a CpG dinucleotide"
  misc_feature (61)..(61): /note="Nucleotide may be methylated to form 5-methylcytosine"
atggggctttggagaagtgagctctgggtttaacagtaggactggggatggctcagactgcggaccttcagtgagcctctgccacctgccaggcactccgcagagcctttcacagacattcc

SEQ ID NO: 7289 - DNA, 122 bp, Homo sapiens
  misc_feature (61)..(62): /note="This region represents a CpG dinucleotide"
  misc_feature (61)..(61): /note="Nucleotide may be methylated to form 5-methylcytosine"
aggactggcattcgctcactcattcaacaaatattaattgagtgaacgtgtgactttccacgtagataacatggagatctgcaaagtgactaataggcatctgaaggctaacgtagttgaag

SEQ ID NO: 7290 - DNA, 122 bp, Homo sapiens
  misc_feature (61)..(62): /note="This region represents a CpG dinucleotide"
  misc_feature (61)..(61): /note="Nucleotide may be methylated to form 5-methylcytosine"
gacgatgacagtgtacatcaaagaaggccatgaaatacctttagaagccatgaggaatcacgagcaagccagaattaggagaaagcaaagtcaatagcaagagcagaaggaaggtaacataa

SEQ ID NO: 7291 - DNA, 122 bp, Homo sapiens
  misc_feature (61)..(62): /note="This region represents a CpG dinucleotide"
  misc_feature (61)..(61): /note="Nucleotide may be methylated to form 5-methylcytosine"
ttgctaagagactaatgacatcctcagttccaatggccagctagaaagcctgagccttgacgtgttaatgcaatgattcaaccactgacgtggctcctcaccatccatcacccaaggcaaag

SEQ ID NO: 7292 - DNA, 122 bp, Homo sapiens
  misc_feature (61)..(62): /note="This region represents a CpG dinucleotide"
  misc_feature (61)..(61): /note="Nucleotide may be methylated to form 5-methylcytosine"
atatagtgattggccagaaaacagtaaggtaaaaagccattgtcctaagtgtttgaaaggcgaggacagagtatttagtttgagtgcattgtctccagccagagtagtgagtaaatacaaga

SEQ ID NO: 7293 - DNA, 122 bp, Homo sapiens
  misc_feature (61)..(62): /note="This region represents a CpG dinucleotide"
  misc_feature (61)..(61): /note="Nucleotide may be methylated to form 5-methylcytosine"
acaatcttctgaagcaaccctttgaggcatagggattttctgagtaaatgagtcaggtctcggtattgagcaatggctgctacaaggaaaccttgaggccccattgcaaatgtcatgctcct

SEQ ID NO: 7294 - DNA, 122 bp, Homo sapiens
  misc_feature (61)..(62): /note="This region represents a CpG dinucleotide"
  misc_feature (61)..(61): /note="Nucleotide may be methylated to form 5-methylcytosine"
acctgtgggtcacagtcctcaggatatgttgtaactcatttaaccctcaaaatcaccttccgaggtatgagcagagttattcaccctgctcagaaaactggtgttgagaaatgttcagaaac

SEQ ID NO: 7295 - DNA, 122 bp, Homo sapiens
  misc_feature (61)..(62): /note="This region represents a CpG dinucleotide"
  misc_feature (61)..(61): /note="Nucleotide may be methylated to form 5-methylcytosine"
tataaattacccaatctgtggtagtctgttatagtaacagcaaacaggccgggacacatacgcaacgtgatattcaagggagtgtgacagaattgcctatggaataaaaataagcaaatcgg

SEQ ID NO: 7296 - DNA, 122 bp, Homo sapiens
  misc_feature (61)..(62): /note="This region represents a CpG dinucleotide"
  misc_feature (61)..(61): /note="Nucleotide may be methylated to form 5-methylcytosine"
gactgacaactggattctaccactcactggttctgtgaccatggacaagttcagattcctcgtctgtaaaatgggaatgataaagcagattcaatgagacagtgtatgaaacgtgtagatag

SEQ ID NO: 7297 - DNA, 122 bp, Homo sapiens
  misc_feature (61)..(62): /note="This region represents a CpG dinucleotide"
  misc_feature (61)..(61): /note="Nucleotide may be methylated to form 5-methylcytosine"
gcgtgagccaccacgctcagcctgctgggtggctttttctttttttctgacatagggtctcgctctgttgcccaggctggagtacagatctccatttactgccgccttgacttgctaggttc

SEQ ID NO: 7298 - DNA, 122 bp, Homo sapiens
  misc_feature (61)..(62): /note="This region represents a CpG dinucleotide"
  misc_feature (61)..(61): /note="Nucleotide may be methylated to form 5-methylcytosine"
acacaggacatatattagggtcctcattttaaagacggagactctagactcatggggtgacgtgagattaagatttgggacacataacatgaaacagctagaggaaattgctaaagcaggag

SEQ ID NO: 7299 - DNA, 122 bp, Homo sapiens
  misc_feature (61)..(62): /note="This region represents a CpG dinucleotide"
  misc_feature (61)..(61): /note="Nucleotide may be methylated to form 5-methylcytosine"
ctcaagtgtgtagctatgtctccatcgttgttatgagtcacctctctctgaataaggaaacggaggcaaattacttgcagtgagctctctgtttagatagcagctaaagtcaaatctcttca

SEQ ID NO: 7300 - DNA, 122 bp, Homo sapiens
  misc_feature (61)..(62): /note="This region represents a CpG dinucleotide"
  misc_feature (61)..(61): /note="Nucleotide may be methylated to form 5-methylcytosine"
agaaaggaatgccacaaccatgacacaattttttcaaacaaaattctttacctcatttctcgttcttcatgttgagcgataaggttgctataaaaattctccagtgtcactttggtcattgt

SEQ ID NO: 7301 - DNA, 122 bp, Homo sapiens
  misc_feature (61)..(62): /note="This region represents a CpG dinucleotide"
  misc_feature (61)..(61): /note="Nucleotide may be methylated to form 5-methylcytosine"
ccacacactggctgaatatagaagggaatgaagctccagaagatgatagggccacatgaccgagtaatcctagtcctgactgactgcatggaaccaagacattagggagaaatctgttttta

SEQ ID NO: 7302 - DNA, 122 bp, Homo sapiens
  misc_feature (61)..(62): /note="This region represents a CpG dinucleotide"
  misc_feature (61)..(61): /note="Nucleotide may be methylated to form 5-methylcytosine"
gcttggctaggcgtggacttctaggttgcaaatgacccttgctacgagtttgcaaggggccgctgcatttcagcccagcatccctgccgcaggcctgatactccaggcttgatgtgcacatc

SEQ ID NO: 7303 - DNA, 122 bp, Homo sapiens
  misc_feature (61)..(62): /note="This region represents a CpG dinucleotide"
  misc_feature (61)..(61): /note="Nucleotide may be methylated to form 5-methylcytosine"
gtagaggctcccttctcctgcccagctctgagtggtgagacagaggctccacctttggcacggcaccacggagaatgctgggatcccaatcacccttgccttggcttgtaaggtggtggttt

SEQ ID NO: 7304 - DNA, 122 bp, Homo sapiens
  misc_feature (61)..(62): /note="This region represents a CpG dinucleotide"
  misc_feature (61)..(61): /note="Nucleotide may be methylated to form 5-methylcytosine"
tgcctgtctccatcccaccttggacatgaatcattctgccctgtgtctccacactgtagacgctgcccgtcattgagtcactttggagctgtctcagttaccggattaactgtcgtagtatc

SEQ ID NO: 7305 - DNA, 122 bp, Homo sapiens
  misc_feature (61)..(62): /note="This region represents a CpG dinucleotide"
  misc_feature (61)..(61): /note="Nucleotide may be methylated to form 5-methylcytosine"
ataaacaacaaaaaaagctactcacggttgtgttgtgggtggctgggcactgggagctgccgggggctgaggagtcccagttgttttctgtcctctcccaggacctggccgtgggtgccact

SEQ ID NO: 7306 - DNA, 122 bp, Homo sapiens
  misc_feature (61)..(62): /note="This region represents a CpG dinucleotide"
  misc_feature (61)..(61): /note="Nucleotide may be methylated to form 5-methylcytosine"
gagcaaatagttgtagcagtttcttccagatggctagattacaccacaggcagtatgtaccgcaagtagcagctgcactgacagcttcctgatttcctagctttctaattacatttagggac

SEQ ID NO: 7307 - DNA, 122 bp, Homo sapiens
  misc_feature (61)..(62): /note="This region represents a CpG dinucleotide"
  misc_feature (61)..(61): /note="Nucleotide may be methylated to form 5-methylcytosine"
acaggatttacaggccacaagagttaaagtattatttaaatgggttgctcaactggaacacggaggcacaggcattttatatattcataggaagcactaaagtcttgtggaatgagaatgaa

SEQ ID NO: 7308 - DNA, 122 bp, Homo sapiens
  misc_feature (61)..(62): /note="This region represents a CpG dinucleotide"
  misc_feature (61)..(61): /note="Nucleotide may be methylated to form 5-methylcytosine"
actcaccactgacttaagcaatgcagagcacataagcactaagagactccttcggcagggcgtggtggctcctgcctgtaatcccagcactttgggagggtgaggtgggtggataacaaggt

SEQ ID NO: 7309 - DNA, 122 bp, Homo sapiens
  misc_feature (61)..(62): /note="This region represents a CpG dinucleotide"
  misc_feature (61)..(61): /note="Nucleotide may be methylated to form 5-methylcytosine"
caacgacataaacgaagtcacttcctggattggctttcctaatggcctggagcatctgctcgtcctctaggcaccgggcactgaagccggacaggggctggctgctccggcagatggaggcc

SEQ ID NO: 7310 - DNA, 122 bp, Homo sapiens
  misc_feature (61)..(62): /note="This region represents a CpG dinucleotide"
  misc_feature (61)..(61): /note="Nucleotide may be methylated to form 5-methylcytosine"
caccaccaaacacatctgcaggtcccttcttgtgtttaaaactatatgtctgtggctgggcgtggtggcttacgcctgtaatcccagcactttgggaggctgaggggggtgggtcacttgac

SEQ ID NO: 7311 - DNA, 122 bp, Homo sapiens
  misc_feature (61)..(62): /note="This region represents a CpG dinucleotide"
  misc_feature (61)..(61): /note="Nucleotide may be methylated to form 5-methylcytosine"
ttgtaaagatggaggaaacctctaacactgaccctgtatgggagatgactcaattatccacgccttggtacagttgcaaattatttccctttgtctgaagtgggtggatgccagcgccttca

SEQ ID NO: 7312 - DNA, 122 bp, Homo sapiens
  misc_feature (61)..(62): /note="This region represents a CpG dinucleotide"
  misc_feature (61)..(61): /note="Nucleotide may be methylated to form 5-methylcytosine"
ctcccatgaattaagaggcaaacgtgctccaaagtgcattaacctttatggattttttttcggttttcatgttccactgatttatggtcttaaatatgcctgttgctgctgtttctgaatga

SEQ ID NO: 7313 - DNA, 122 bp, Homo sapiens
  misc_feature (61)..(62): /note="This region represents a CpG dinucleotide"
  misc_feature (61)..(61): /note="Nucleotide may be methylated to form 5-methylcytosine"
ccttatgagcacagagcaaaatgtcctcattttacctggtttaattttttttttcttccacggcctcttttactgggagacctctgagttttgatgtgtcatgacagataggagaggtcata

SEQ ID NO: 7314 - DNA, 122 bp, Homo sapiens
  misc_feature (61)..(62): /note="This region represents a CpG dinucleotide"
  misc_feature (61)..(61): /note="Nucleotide may be methylated to form 5-methylcytosine"
gcctgctccatccttcccttcccttctacccacaactgacttgctttataatggaagaagcgttttaatgcctgccatgaaatcctgtcatctggacaggaagggcaagctccctggctgaa

SEQ ID NO: 7315 - DNA, 122 bp, Homo sapiens
  misc_feature (61)..(62): /note="This region represents a CpG dinucleotide"
  misc_feature (61)..(61): /note="Nucleotide may be methylated to form 5-methylcytosine"
gggaacacccagtaacgattccttcagtgatcccggttctccaaactcttgcctcaaaggcggcctgccccggtgctgtcagccgtgaatggggactcacttcttgggaaaagaggcttttg

SEQ ID NO: 7316 - DNA, 122 bp, Homo sapiens
  misc_feature (61)..(62): /note="This region represents a CpG dinucleotide"
  misc_feature (61)..(61): /note="Nucleotide may be methylated to form 5-methylcytosine"
accctgaaagttattggcaaagagtaactggcagagcagagattccaacccaggcaatctcgctacagaggtggactttacctcttcatggcattctgaggcggctcctgcaatgaataata

SEQ ID NO: 7317 - DNA, 122 bp, Homo sapiens
  misc_feature (61)..(62): /note="This region represents a CpG dinucleotide"
  misc_feature (61)..(61): /note="Nucleotide may be methylated to form 5-methylcytosine"
taacagtgccagaccatttcatgccctgcaggtgttgctgcttctgtcactgctgctgaccgctctgccttcctgcaccaatgggcaaagcaagagaaacttagggaaaagcaaaggtagag

SEQ ID NO: 7318 - DNA, 122 bp, Homo sapiens
  misc_feature (61)..(62): /note="This region represents a CpG dinucleotide"
  misc_feature (61)..(61): /note="Nucleotide may be methylated to form 5-methylcytosine"
ccagccagccagtgggaagctccaggagggctggaggccagtagtgtggggacagatctgcgtgatcttccccagcagacgtgcccctgctcctggagggttctttctgtggccacgtgggg

SEQ ID NO: 7319 - DNA, 122 bp, Homo sapiens
  misc_feature (61)..(62): /note="This region represents a CpG dinucleotide"
  misc_feature (61)..(61): /note="Nucleotide may be methylated to form 5-methylcytosine"
tccacctccattccacattttgatgcctgctaggttgagaatgactgttgtaatgagtaacgattaatgaagggaatggattctatccctcataaatgttacagagtaaagatagttgagaa

SEQ ID NO: 7320 - DNA, 122 bp, Homo sapiens
  misc_feature (61)..(62): /note="This region represents a CpG dinucleotide"
  misc_feature (61)..(61): /note="Nucleotide may be methylated to form 5-methylcytosine"
gcaagcaggcttacagaagcagaacaaaggcagttaattaaattgcgacaggtctcgcaacgcaggcatagcttgtgatcatgcagctgcacagtagggaaaacaggaacttacaaaacttg

SEQ ID NO: 7321 - DNA, 122 bp, Homo sapiens
  misc_feature (61)..(62): /note="This region represents a CpG dinucleotide"
  misc_feature (61)..(61): /note="Nucleotide may be methylated to form 5-methylcytosine"
catggcagtctttctagcagatgccagatgctctctaggcattttctactaacttgtctgcggagacatatgaggtcaaatttagctgcccttcctggtctataatgaaccaatgcaggata

SEQ ID NO: 7322 - DNA, 122 bp, Homo sapiens
  misc_feature (61)..(62): /note="This region represents a CpG dinucleotide"
  misc_feature (61)..(61): /note="Nucleotide may be methylated to form 5-methylcytosine"
cagtacttagttaaaggaactgaatagtttgtgcaacattccctgtctttgtctgtgttacggccctggcctcccagaattgtgggtgattcaggggaaatgagagccacatgtttctgaat

SEQ ID NO: 7323 - DNA, 122 bp, Homo sapiens
  misc_feature (61)..(62): /note="This region represents a CpG dinucleotide"
  misc_feature (61)..(61): /note="Nucleotide may be methylated to form 5-methylcytosine"
actgcagcacctgccagatcagcccccaaatttctccaaatgcattttatgcaagagaaccgtaaaatgtgacttacattaaatgggatgcccgtaaaaaaggagctttgtggatgacagta

SEQ ID NO: 7324 - DNA, 122 bp, Homo sapiens
  misc_feature (61)..(62): /note="This region represents a CpG dinucleotide"
  misc_feature (61)..(61): /note="Nucleotide may be methylated to form 5-methylcytosine"
acagcaattcctggaggtatcaatcagcaaagccattctgcagggcaacttggcagcttccgtttgtacttaatataggtgtgcccctgccgacctagcagtttcacttcttgatagctaca

SEQ ID NO: 7325 - DNA, 122 bp, Homo sapiens
  misc_feature (61)..(62): /note="This region represents a CpG dinucleotide"
  misc_feature (61)..(61): /note="Nucleotide may be methylated to form 5-methylcytosine"
cactcaatatgttggctttgtttagtgactaagccaaagaaaaaatttaatcagtgagaacgtgtctgtaattatgttctaatccaaaataagagggtgagaaatttttcacctcaccgaga

SEQ ID NO: 7326 - DNA, 122 bp, Homo sapiens
  misc_feature (61)..(62): /note="This region represents a CpG dinucleotide"
  misc_feature (61)..(61): /note="Nucleotide may be methylated to form 5-methylcytosine"
ctctcctaatcgttttcctaggatatttccacagtggatgacaccctgcctcagtccttgcgcagctggattacatgcttcctggggataatcagcacccttgtcatgatctgcatggccac

SEQ ID NO: 7327 - DNA, 122 bp, Homo sapiens
  misc_feature (61)..(62): /note="This region represents a CpG dinucleotide"
  misc_feature (61)..(61): /note="Nucleotide may be methylated to form 5-methylcytosine"
cggggtttcaccacgttggctggcatggtcttgatctcttgacctcatgatctgcccattcggtctcccaaagtgctgggattacaggtgtgagcgaccgcacccagccccattaattatat

SEQ ID NO: 7328 - DNA, 122 bp, Homo sapiens
  misc_feature (61)..(62): /note="This region represents a CpG dinucleotide"
  misc_feature (61)..(61): /note="Nucleotide may be methylated to form 5-methylcytosine"
catacaagtcactctggttagagtaagcaaggaattagatatctacaaaatatttgaaagcgttgaggaagcagtttctagactgagcctccagagatatctcccagaattataccatagaa

SEQ ID NO: 7329 - DNA, 122 bp, Homo sapiens
  misc_feature (61)..(62): /note="This region represents a CpG dinucleotide"
  misc_feature (61)..(61): /note="Nucleotide may be methylated to form 5-methylcytosine"
tgctctggtggacggggcaggtcaatgaaagcagcaacttgagctccttccagcaggtgccgccttgcatcacctatgatcccatgtgtcattcacgtgtatgattgtatatgatcctctga

SEQ ID NO: 7330 - DNA, 122 bp, Homo sapiens
  misc_feature (61)..(62): /note="This region represents a CpG dinucleotide"
  misc_feature (61)..(61): /note="Nucleotide may be methylated to form 5-methylcytosine"
tggcgcaaggagagaatgtgatttagattaggagtgttatatcccagtttaaaggtcatgcgattatagtgcccatttagggagtattgcatcactgactagggagattctctttcaatgaa

SEQ ID NO: 7331 - DNA, 122 bp, Homo sapiens
  misc_feature (61)..(62): /note="This region represents a CpG dinucleotide"
  misc_feature (61)..(61): /note="Nucleotide may be methylated to form 5-methylcytosine"
taccatcttggtttgtgtaagtgcactctgtgatgtttgcacaaagataaaatcacttagcgacacatttctcagactgtgtcctcatcattaggtgacacatgactatgtttacaggtagc

SEQ ID NO: 7332 - DNA, 122 bp, Homo sapiens
  misc_feature (61)..(62): /note="This region represents a CpG dinucleotide"
  misc_feature (61)..(61): /note="Nucleotide may be methylated to form 5-methylcytosine"
cagcctcctggctttggagctcagatcctgcctcctcagctaactagcagtgtgaccttacgcaagttaacttaacctctctgtgcctcggtctcctcctgcataaagtgatgatactactg

SEQ ID NO: 7333 - DNA, 122 bp, Homo sapiens
  misc_feature (61)..(62): /note="This region represents a CpG dinucleotide"
  misc_feature (61)..(61): /note="Nucleotide may be methylated to form 5-methylcytosine"
agaggccagcagagctttctaaatctcgggtacagtgactgaagcactgggctgggagtccgagtgcctgagctgtggtctggttctgctgcctactaagctgaatgacccaaaagcctctc

SEQ ID NO: 7334 - DNA, 122 bp, Homo sapiens
  misc_feature (61)..(62): /note="This region represents a CpG dinucleotide"
  misc_feature (61)..(61): /note="Nucleotide may be methylated to form 5-methylcytosine"
cctcactcagaggagaggagcccacccctcccaggacacctggctgagccggaacagcagcgcaggggagctgtgacagcagagagcagcaccaggtcacacaagcagccgccccggaagga

SEQ ID NO: 7335 - DNA, 122 bp, Homo sapiens
  misc_feature (61)..(62): /note="This region represents a CpG dinucleotide"
  misc_feature (61)..(61): /note="Nucleotide may be methylated to form 5-methylcytosine"
agagtgagttagttcccagtgtggcctcgtgtgtgcttttggccgcatcgtttccagtttcgccatccccaaagaggatcatctcccaggaagcttactggtccaaggaggatgagacaccc

SEQ ID NO: 7336 - DNA, 122 bp, Homo sapiens
  misc_feature (61)..(62): /note="This region represents a CpG dinucleotide"
  misc_feature (61)..(61): /note="Nucleotide may be methylated to form 5-methylcytosine"
aatgagagcaatagcagtttattagtcacatatgctcatacctgggaggataacactgcacgccatgaactgcttcatgggagttgcactcagaaacaggtattaccaggagctgtgggagg

SEQ ID NO: 7337 - DNA, 122 bp, Homo sapiens
  misc_feature (61)..(62): /note="This region represents a CpG dinucleotide"
  misc_feature (61)..(61): /note="Nucleotide may be methylated to form 5-methylcytosine"
tcacagtaacagcctctgcccagcaatttccttttcagcctgcagggtcctcacgctcaccggtctggtcacagggttcaccctgttttgccagctgccagctcatccagccttcctaagtg

SEQ ID NO: 7338 - DNA, 122 bp, Homo sapiens
  misc_feature (61)..(62): /note="This region represents a CpG dinucleotide"
  misc_feature (61)..(61): /note="Nucleotide may be methylated to form 5-methylcytosine"
aggtcttaggtgtatgctgtgtgtgtgtgtgcaaaggcttggggagaaggattggtgtcacgtgcggggcagtgtaaaaaacttaactgcttcccacctgggcacaaaatgaaaagaaagac

SEQ ID NO: 7339 - DNA, 122 bp, Homo sapiens
  misc_feature (61)..(62): /note="This region represents a CpG dinucleotide"
  misc_feature (61)..(61): /note="Nucleotide may be methylated to form 5-methylcytosine"
tgcagctcctcactctgggccccaggctgatggaacgatcatgtcaaatgttgaggtcatcgtggcagagggagagagtcctggaggatactgcacctgcaattaggtgctctgatctggaa

SEQ ID NO: 7340 - DNA, 122 bp, Homo sapiens
  misc_feature (61)..(62): /note="This region represents a CpG dinucleotide"
  misc_feature (61)..(61): /note="Nucleotide may be methylated to form 5-methylcytosine"
cgggaggccaaagcaggcagatcacttgggctgagttcaagaccagcaccggcaacatggcgaaacacaatacaaaaaatgcaataatcagccgggcgtggtggggcacacctgtagttcca

SEQ ID NO: 7341 - DNA, 122 bp, Homo sapiens
  misc_feature (61)..(62): /note="This region represents a CpG dinucleotide"
  misc_feature (61)..(61): /note="Nucleotide may be methylated to form 5-methylcytosine"
cagctccagcttcagctccagctccaggtcgggctccagctccagccgcagcttaggcagcggaggttctgtgtcccaggtgaggaggccccagaatctgaatgagctgcattcattccctt

SEQ ID NO: 7342 - DNA, 122 bp, Homo sapiens
  misc_feature (61)..(62): /note="This region represents a CpG dinucleotide"
  misc_feature (61)..(61): /note="Nucleotide may be methylated to form 5-methylcytosine"
ggaagctgtgtgttcaccgtttaaaatagaactttcatttgtatgccttcgtacagcctacgtagcactataccatattctttttttacctttgttcagcaccttctcactagtgggtgctg

SEQ ID NO: 7343 - DNA, 122 bp, Homo sapiens
  misc_feature (61)..(62): /note="This region represents a CpG dinucleotide"
  misc_feature (61)..(61): /note="Nucleotide may be methylated to form 5-methylcytosine"
tctgggtggggtcagtctgaatgacatctcaaaaaataatcttaggctctataatagtgacggtatctgtgaaactctaatatctgagacaggtctcagttaatttggaaagtttattttgc

SEQ ID NO: 7344 - DNA, 122 bp, Homo sapiens
  misc_feature (61)..(62): /note="This region represents a CpG dinucleotide"
  misc_feature (61)..(61): /note="Nucleotide may be methylated to form 5-methylcytosine"
agcagggcccttgcaacagggcaccttaagtcacatgctaggaaatgccttgtaaggtgccgtttaaccctaaggcatcctatttattgtaaacctgctcttcaaaaaaaaggccatgggtg

SEQ ID NO: 7345 - DNA, 122 bp, Homo sapiens
  misc_feature (61)..(62): /note="This region represents a CpG dinucleotide"
  misc_feature (61)..(61): /note="Nucleotide may be methylated to form 5-methylcytosine"
gacagagacagaggtgactcaggaagagtcagcgtggggtttgcttagaaaaatctcccacgcaatttgagcttaggttgggccaaaacggacatcctgggaagctcacattgtggacaata

SEQ ID NO: 7346 - DNA, 122 bp, Homo sapiens
  misc_feature (61)..(62): /note="This region represents a CpG dinucleotide"
  misc_feature (61)..(61): /note="Nucleotide may be methylated to form 5-methylcytosine"
tctacctggccagttttcttaaaggctctctcaggacatctcctagcgcaaagctcacagcgtgaagtactattgtagacaataggggctgggcaccacagctcatgcctgtaatcccagca

SEQ ID NO: 7347 - DNA, 122 bp, Homo sapiens
  misc_feature (61)..(62): /note="This region represents a CpG dinucleotide"
  misc_feature (61)..(61): /note="Nucleotide may be methylated to form 5-methylcytosine"
tggtataagcaaaaggctgaaccagaaaaagtgctgactcccctttgttctgttttctcccgtggaacggtgttccagtcgagggtcagcatagacattttggggcatcattttcacagctg

SEQ ID NO: 7348 - DNA, 122 bp, Homo sapiens
  misc_feature (61)..(62): /note="This region represents a CpG dinucleotide"
  misc_feature (61)..(61): /note="Nucleotide may be methylated to form 5-methylcytosine"
atttgtcattcaacaggagagttttaatccatgtaatctctctgagtctctgttttaccacggataagatggggataatactatctagcatcttgaagaactatttgaggattagaagtaat

SEQ ID NO: 7349 - DNA, 122 bp, Homo sapiens
  misc_feature (61)..(62): /note="This region represents a CpG dinucleotide"
  misc_feature (61)..(61): /note="Nucleotide may be methylated to form 5-methylcytosine"
acccagcctgtcccactggctcctcccagcacaggcacctatgtggcatgtggtgatgtacgctgcgtgccatgagtccatgtcctatgcctcacaaatgctgtggttcactgcactgttca

SEQ ID NO: 7350 - DNA, 122 bp, Homo sapiens
  misc_feature (61)..(62): /note="This region represents a CpG dinucleotide"
  misc_feature (61)..(61): /note="Nucleotide may be methylated to form 5-methylcytosine"
agaagattctgcaactggctgaatgggacaaggagcactggataagcagaaaggcagagccgaagatcacaggcagacgctgagcttgagtgagagagaactgtgctgccactcactacagc

SEQ ID NO: 7351 - DNA, 122 bp, Homo sapiens
  misc_feature (61)..(62): /note="This region represents a CpG dinucleotide"
  misc_feature (61)..(61): /note="Nucleotide may be methylated to form 5-methylcytosine"
gctcttctgtcattgccacctaattgtaggcctctgcttgctagttgtatccactgtttacgttatagagaaatcttttcacatatgtaaggactttatatctgtgtgtgtgcccattcatt

SEQ ID NO: 7352 - DNA, 122 bp, Homo sapiens
  misc_feature (61)..(62): /note="This region represents a CpG dinucleotide"
  misc_feature (61)..(61): /note="Nucleotide may be methylated to form 5-methylcytosine"
aaataggaggaaaataagcagagacacaaaaatgactcaagtgttgaaaaatatgatccacgcaactaaaaatacattgcaactgagtttgaagaggaaaagactgggtgtcaacattccag

SEQ ID NO: 7353 - DNA, 122 bp, Homo sapiens
  misc_feature (61)..(62): /note="This region represents a CpG dinucleotide"
  misc_feature (61)..(61): /note="Nucleotide may be methylated to form 5-methylcytosine"
tagccagggtggaacaccactgttgaggagacaccccagagacaccgaactggttcatcgcggccacttatgaatcagctggctctgcctgtcatgccgcgaaccagtcaagaaatacctgc

SEQ ID NO: 7354 - DNA, 122 bp, Homo sapiens
  misc_feature (61)..(62): /note="This region represents a CpG dinucleotide"
  misc_feature (61)..(61): /note="Nucleotide may be methylated to form 5-methylcytosine"
aatttcatcctgaaataaaacacaaattgttcagcatgcttgccccaaattattcttccccgcttcacagcatatggccctgaagatctctttgctcgcttgatttctattgcagaatgaat

SEQ ID NO: 7355 - DNA, 122 bp, Homo sapiens
  misc_feature (61)..(62): /note="This region represents a CpG dinucleotide"
  misc_feature (61)..(61): /note="Nucleotide may be methylated to form 5-methylcytosine"
atccatggggctttagagactttgccaaagcagtgcgactgctcccaggttgttgtcagccgtcaagagtgagtgcacctccctgggcagacttctgctgccccagtgcccaggaataggca

SEQ ID NO: 7356 - DNA, 122 bp, Homo sapiens
  misc_feature (61)..(62): /note="This region represents a CpG dinucleotide"
  misc_feature (61)..(61): /note="Nucleotide may be methylated to form 5-methylcytosine"
acctgccctgcctacaggttatgattcagaggaggaggaagagagcaggcccatgagttacgatgagaagcggcagctgagcctggacatcaacaaattacctggggagaagctgggccgag

SEQ ID NO: 7357 - DNA, 122 bp, Homo sapiens
  misc_feature (61)..(62): /note="This region represents a CpG dinucleotide"
  misc_feature (61)..(61): /note="Nucleotide may be methylated to form 5-methylcytosine"
cctgcatatagcaccagtctcattaacacaccctaatactggcctttcctccttgcctgtcgcactcttcctgcttcctctctccggcttctagggatcaccctaaatacaccaccagcagg

SEQ ID NO: 7358 - DNA, 122 bp, Homo sapiens
  misc_feature (61)..(62): /note="This region represents a CpG dinucleotide"
  misc_feature (61)..(61): /note="Nucleotide may be methylated to form 5-methylcytosine"
tatgcaatcccactgcatatgaccatggcagtagaacaagttcaattactacactggatgcgttaagtgtgctttcctagcagaaagcaccagggtggagtcaacagttcacatgctaatac

SEQ ID NO: 7359 - DNA, 122 bp, Homo sapiens
  misc_feature (61)..(62): /note="This region represents a CpG dinucleotide"
  misc_feature (61)..(61): /note="Nucleotide may be methylated to form 5-methylcytosine"
ggggagatggtgagaatcacttagttatcatttgcaaagcacaaggcataacgtctgctgcgtagtaaactctcaataaggattagtgatcattgttcccagtgaataacataatgggaacc

SEQ ID NO: 7360 - DNA, 122 bp, Homo sapiens
  misc_feature (61)..(62): /note="This region represents a CpG dinucleotide"
  misc_feature (61)..(61): /note="Nucleotide may be methylated to form 5-methylcytosine"
ctgaaactcagactcttcttggaccttgagctggctggcttttagtctagaactacacatcggttctcctaaatctccaggttgctaattgcagatcttgggacttctgagcctccaataat

SEQ ID NO: 7361 - DNA, 122 bp, Homo sapiens
  misc_feature (61)..(62): /note="This region represents a CpG dinucleotide"
  misc_feature (61)..(61): /note="Nucleotide may be methylated to form 5-methylcytosine"
aggcggcgctcctgccgcatcctcttcatccacacagacactggaatcttctccccactacggctgatgatgtccacctgtggaaacagacaggttcacacctgcatgccatgaacccaaaa

SEQ ID NO: 7362 - DNA, 122 bp, Homo sapiens
  misc_feature (61)..(62): /note="This region represents a CpG dinucleotide"
  misc_feature (61)..(61): /note="Nucleotide may be methylated to form 5-methylcytosine"
ttggcgggattactttgaggaccagccccttctgtatcccccaggctttgacggaagagtcgtggtgtatcccagcaaccagactttaaaggactacctcagctggcgacaagcagattgtg

SEQ ID NO: 7363 - DNA, 122 bp, Homo sapiens
  misc_feature (61)..(62): /note="This region represents a CpG dinucleotide"
  misc_feature (61)..(61): /note="Nucleotide may be methylated to form 5-methylcytosine"
ttagagaaggtttctaaaactgctaccaactcctgacatccagtaaacatgcagtgaattcgtttaatggtttagcaaataagatgactaacagaagaaacagactgtcttaatcccaaaag

SEQ ID NO: 7364 - DNA, 122 bp, Homo sapiens
  misc_feature (61)..(62): /note="This region represents a CpG dinucleotide"
  misc_feature (61)..(61): /note="Nucleotide may be methylated to form 5-methylcytosine"
aaaggccagtctttaaaaactgagtgatctctaaacactctgcactagtcataccaccaccgtcccgttcaagagtctgtgcctctaaggctgttcattctgtctagttcatgatccctttc

SEQ ID NO: 7365 - DNA, 122 bp, Homo sapiens
  misc_feature (61)..(62): /note="This region represents a CpG dinucleotide"
  misc_feature (61)..(61): /note="Nucleotide may be methylated to form 5-methylcytosine"
gacactgtctcatgtgagtattgtaaagattaaatgagctaatgcatgtaaagctcttagcgtagtgcttggcatgcagtaagcactcagtacatgttagctggtacagctgtcttgtgaat

SEQ ID NO: 7366 - DNA, 122 bp, Homo sapiens
  misc_feature (61)..(62): /note="This region represents a CpG dinucleotide"
  misc_feature (61)..(61): /note="Nucleotide may be methylated to form 5-methylcytosine"
gggaaataatcctagaacatgagtgagtcataagcaacatgagtcctacccttcagcacacgagaggaagcagaagtttgtctatcctatagtgtcccaaagttgaatgtaggagtaaaagc

SEQ ID NO: 7367 - DNA, 122 bp, Homo sapiens
  misc_feature (61)..(62): /note="This region represents a CpG dinucleotide"
  misc_feature (61)..(61): /note="Nucleotide may be methylated to form 5-methylcytosine"
ttatttgtttattttgtaacttacactttcctcccactcctgatgttaaacatgcagcttcgcccaagtgtgaacttcagagagtattccatcagttactctccctctgtggtctgcacaat

SEQ ID NO: 7368 - DNA, 122 bp, Homo sapiens
  misc_feature (61)..(62): /note="This region represents a CpG dinucleotide"
  misc_feature (61)..(61): /note="Nucleotide may be methylated to form 5-methylcytosine"
tcgcttcctctgtcatggagttcttctgatgacaacattttaaacatccgccagccaggacggttcagtaaatgctgacccatccatgtcatgatatggtaggaagccatttaaaggaatga

SEQ ID NO: 7369 - DNA, 122 bp, Homo sapiens
  misc_feature (61)..(62): /note="This region represents a CpG dinucleotide"
  misc_feature (61)..(61): /note="Nucleotide may be methylated to form 5-methylcytosine"
atatcttgcccctcagagattccacctcctcagcctggtgatgctgtagggatgctgggtcggcttaagcaacattgcctgtccaggtccttcccattcagttggctcccttggaagccttc

SEQ ID NO: 7370 - DNA, 122 bp, Homo sapiens
  misc_feature (61)..(62): /note="This region represents a CpG dinucleotide"
  misc_feature (61)..(61): /note="Nucleotide may be methylated to form 5-methylcytosine"
gcagcacccgcccagtcacgtctgtcatctcatctttgaccatgattccaaattcacggacgtatggatctgtgttgaaacttgcacttcgcatctggcaaagggaaacaagaaaacgcacg

SEQ ID NO: 7371 - DNA, 122 bp, Homo sapiens
  misc_feature (61)..(62): /note="This region represents a CpG dinucleotide"
  misc_feature (61)..(61): /note="Nucleotide may be methylated to form 5-methylcytosine"
aaacttacattgctccattggtatagacagtatcgcttccttccacatactgcacctgagcgggatagacatgttgtacctgctgcacagtctgtacctgctgtacctgaaaaacaagtatt

SEQ ID NO: 7372 - DNA, 122 bp, Homo sapiens
  misc_feature (61)..(62): /note="This region represents a CpG dinucleotide"
  misc_feature (61)..(61): /note="Nucleotide may be methylated to form 5-methylcytosine"
gataatcagagagtggagtgagtgcattttgcaagctacaaggtgccttcccaagggaagcgtgaagtcacctgggtgaaggtattgggaagtgaggccctgtcacagatcctgccccacaa

SEQ ID NO: 7373 - DNA, 122 bp, Homo sapiens
  misc_feature (61)..(62): /note="This region represents a CpG dinucleotide"
  misc_feature (61)..(61): /note="Nucleotide may be methylated to form 5-methylcytosine"
ggattgttgatatgtttgtttttgttgcaatggtaggtcactctagttcttacgtctgggcgtagaataacattacttgcacaagggtgctggcggtaggagctttgcaagagattgtaaaa

SEQ ID NO: 7374 - DNA, 122 bp, Homo sapiens
  misc_feature (61)..(62): /note="This region represents a CpG dinucleotide"
  misc_feature (61)..(61): /note="Nucleotide may be methylated to form 5-methylcytosine"
ctgaacaaggggaagtttgcgcaatcactaacacatcatactgtatctgaattaacacctcgggccaagtggaaagatgaatcaaaaaatttaaaaagaaagccacctggtgttctaaggta

SEQ ID NO: 7375 - DNA, 122 bp, Homo sapiens
  misc_feature (61)..(62): /note="This region represents a CpG dinucleotide"
  misc_feature (61)..(61): /note="Nucleotide may be methylated to form 5-methylcytosine"
aattagctctgcttttcaaggagcagtaccattcagtaaaagattactgtctagtattaccggctcacccttgaattctttcctgggcaaagccaagaaccttcccagggtaagccccaatt

SEQ ID NO: 7376 - DNA, 122 bp, Homo sapiens
  misc_feature (61)..(62): /note="This region represents a CpG dinucleotide"
  misc_feature (61)..(61): /note="Nucleotide may be methylated to form 5-methylcytosine"
cttctcttaagggcagtcaggtgcattgggacctaatttctaagcatgtgaatagtgacacgtcgagcttacagcaggccttaggatcaccaggctgactcactgtcatacagattccaact

SEQ ID NO: 7377 - DNA, 122 bp, Homo sapiens
  misc_feature (61)..(62): /note="This region represents a CpG dinucleotide"
  misc_feature (61)..(61): /note="Nucleotide may be methylated to form 5-methylcytosine"
aatatactatagtgtcactggagccacaactggattatggatgtgactcacctagtgatgcgccatccttttcaataacatctgataattgcagagatgactacatcagactagttgagcca

SEQ ID NO: 7378 - DNA, 122 bp, Homo sapiens
  misc_feature (61)..(62): /note="This region represents a CpG dinucleotide"
  misc_feature (61)..(61): /note="Nucleotide may be methylated to form 5-methylcytosine"
aactggtgggatgattatctctatcagggactgtttagagagagatactctgacctgaaccgctgtaactattaattgaccagtttgatgcgcaacactttctggtgcagctttatttacca

SEQ ID NO: 7379 - DNA, 122 bp, Homo sapiens
  misc_feature (61)..(62): /note="This region represents a CpG dinucleotide"
  misc_feature (61)..(61): /note="Nucleotide may be methylated to form 5-methylcytosine"
agttacttcacttttctgagcttcagttacaccatatccaaaattaataaaataacatttcgtgattgctttgagcataaaataagcgatgtcaaaacctggcatataataagtatagaaca

SEQ ID NO: 7380 - DNA, 122 bp, Homo sapiens
  misc_feature (61)..(62): /note="This region represents a CpG dinucleotide"
  misc_feature (61)..(61): /note="Nucleotide may be methylated to form 5-methylcytosine"
cgcacctgaatctggggagtatctagaggaggagcatgaaagttagaagtacctggcagacgaacagctagggcaggagcatatctgccagtggagcacctgaaccaggggagtccttgggg

SEQ ID NO: 7381 - DNA, 122 bp, Homo sapiens
  misc_feature (61)..(62): /note="This region represents a CpG dinucleotide"
  misc_feature (61)..(61): /note="Nucleotide may be methylated to form 5-methylcytosine"
ttgattccacagtgccccggtggtgcagtcagtggaagcagctgtaatctatggggtcatcgttggcaggtgcccggcacagggcttgtcactgcttgtatattatctctagtcgcaaatgc

SEQ ID NO: 7382 - DNA, 122 bp, Homo sapiens
  misc_feature (61)..(62): /note="This region represents a CpG dinucleotide"
  misc_feature (61)..(61): /note="Nucleotide may be methylated to form 5-methylcytosine"
cacacatttctgctgactcttgtacctggggcagcaggataatcaccaacacactcttaacgagaaacaacacaccaagcaccgtggagctgtcctaggcaacactcgcggtctcaggctgc

SEQ ID NO: 7383 - DNA, 122 bp, Homo sapiens
  misc_feature (61)..(62): /note="This region represents a CpG dinucleotide"
  misc_feature (61)..(61): /note="Nucleotide may be methylated to form 5-methylcytosine"
cagggactgggccacatcccctcttccagctttaagatctgggatttgagactgcatcaccggcctcaacactaagacttctttgcaggcctaagctctggaatgccacagaagcccccagg

SEQ ID NO: 7384 - DNA, 122 bp, Homo sapiens
  misc_feature (61)..(62): /note="This region represents a CpG dinucleotide"
  misc_feature (61)..(61): /note="Nucleotide may be methylated to form 5-methylcytosine"
taaatccatgagtagtaagggtataaagggcttccctggggaggaaacgtggcacagaaacggaactaagattaattaaggatgggcaataggatggtaggcattattcccattgtactcat

SEQ ID NO: 7385 - DNA, 122 bp, Homo sapiens
  misc_feature (61)..(62): /note="This region represents a CpG dinucleotide"
  misc_feature (61)..(61): /note="Nucleotide may be methylated to form 5-methylcytosine"
tttaatgaagccttcttataagcaggaattgctccatactttctggccagatataaacctcgcaatttacatcatcacattctatttatgaatcactatttggagtcgagtcacactgagtc

SEQ ID NO: 7386 - DNA, 122 bp, Homo sapiens
  misc_feature (61)..(62): /note="This region represents a CpG dinucleotide"
  misc_feature (61)..(61): /note="Nucleotide may be methylated to form 5-methylcytosine"
gatctgtcaggatatgggcttatatgccgcttccccccacccacctccctgaggttggtacgatttatgcttgtgcaggaacttgccctctaagttcaaggtggatgcacactgactctgcc

SEQ ID NO: 7387 - DNA, 122 bp, Homo sapiens
  misc_feature (61)..(62): /note="This region represents a CpG dinucleotide"
  misc_feature (61)..(61): /note="Nucleotide may be methylated to form 5-methylcytosine"
ctcatgttttctacaacaaagctcaaacaataaccacaacacttcctgcctctctcttaccggaaatagtgtctctgtgagaaacttgaagtcttggaagttctcaggctgaagtcaagctg

SEQ ID NO: 7388 - DNA, 122 bp, Homo sapiens
  misc_feature (61)..(62): /note="This region represents a CpG dinucleotide"
  misc_feature (61)..(61): /note="Nucleotide may be methylated to form 5-methylcytosine"
actgtaggcttatttcctcattactaaggccattccagattcctaagctttacctggtcccgcccatagcttcatttcctactatgcctccaccctatttcccagtcatccagaataacttg

SEQ ID NO: 7389 - DNA, 122 bp, Homo sapiens
  misc_feature (61)..(62): /note="This region represents a CpG dinucleotide"
  misc_feature (61)..(61): /note="Nucleotide may be methylated to form 5-methylcytosine"
atgacggagagctttgggctgaaccccaggagtcctctaaacctgcctgagacagatctacgcagaacaccactaggtaaatctggtcaggtaaagaatttccatgtcctgaggccaaataa

SEQ ID NO: 7390 - DNA, 122 bp, Homo sapiens
  misc_feature (61)..(62): /note="This region represents a CpG dinucleotide"
  misc_feature (61)..(61): /note="Nucleotide may be methylated to form 5-methylcytosine"
ctgaaagccccgggctgtttcagaacccggtcagggtaaccgtcaggcctgcggtcaccgcgctgcaatcccaggaggccttgcgtcagcggccattatatcaataaggaagtacaatcacc

SEQ ID NO: 7391 - DNA, 122 bp, Homo sapiens
  misc_feature (61)..(62): /note="This region represents a CpG dinucleotide"
  misc_feature (61)..(61): /note="Nucleotide may be methylated to form 5-methylcytosine"
caagagcagtattcttcctcatctgattcttccttgaagaaggaggtatttctcacttggcggcactaggaaaccaaggtcacagcccattttccaggtgaggaacttgaaaggtgaaagat

SEQ ID NO: 7392 - DNA, 122 bp, Homo sapiens
  misc_feature (61)..(62): /note="This region represents a CpG dinucleotide"
  misc_feature (61)..(61): /note="Nucleotide may be methylated to form 5-methylcytosine"
gaagtgaaggcagctttgtgggactgagccctgtaacctgtgaggtctgcattaacttgacgcaattagtgacagaattaaagcgaattataggacacccagatgatgtcagtgaacttaat

SEQ ID NO: 7393 - DNA, 122 bp, Homo sapiens
  misc_feature (61)..(62): /note="This region represents a CpG dinucleotide"
  misc_feature (61)..(61): /note="Nucleotide may be methylated to form 5-methylcytosine"
taatcataatattattgttacttagacctttggcttggggaggctggatttacaaacctacgattcaccaagagtcttagcagtctgagaggtcgccttctgttaaaaggtggctgctgtag

SEQ ID NO: 7394 - DNA, 122 bp, Homo sapiens
  misc_feature (61)..(62): /note="This region represents a CpG dinucleotide"
  misc_feature (61)..(61): /note="Nucleotide may be methylated to form 5-methylcytosine"
gggaaactgattcataccaattttatttatagattttcctgtcttttcccttcctttgcccgccctttgtaaatagaaaaacaggatcttgatcctctttaatgaataatagctgtccaaag

SEQ ID NO: 7395 - DNA, 122 bp, Homo sapiens
  misc_feature (61)..(62): /note="This region represents a CpG dinucleotide"
  misc_feature (61)..(61): /note="Nucleotide may be methylated to form 5-methylcytosine"
aattaataatgtctcacttaaaaagcaatgtcaactaacaggagaaaacatgaatgactacgagtcaatgctggacacaggaaatgacctagatgtcaccagagacagctcagagaccttga

SEQ ID NO: 7396 - DNA, 122 bp, Homo sapiens
  misc_feature (61)..(62): /note="This region represents a CpG dinucleotide"
  misc_feature (61)..(61): /note="Nucleotide may be methylated to form 5-methylcytosine"
tggactaacttttatgcaacacaggaggcctcagcctgacattcaaggctggactcagaccgcccaacccatttcctggactaacttttatgcaacacaagaggcctcagcctgacattcaa

SEQ ID NO: 7397 - DNA, 122 bp, Homo sapiens
  misc_feature (61)..(62): /note="This region represents a CpG dinucleotide"
  misc_feature (61)..(61): /note="Nucleotide may be methylated to form 5-methylcytosine"
agtggggcaggtgaactgaccagcgtcttcccagctttagtcactgcagtggcaatgaggcgctctccacacccccagttatgtgacaggctagagccctggtgttctctcttcagaacccc

SEQ ID NO: 7398 - DNA, 122 bp, Homo sapiens
  misc_feature (61)..(62): /note="This region represents a CpG dinucleotide"
  misc_feature (61)..(61): /note="Nucleotide may be methylated to form 5-methylcytosine"
taaataacttgcctaggctcatactcctgctaaatcttacagccaggattaaaaccaaggcggtctgacttcagagcctgtgccctgaaccacaaaaccatgctgcctctctgagtatgaag

SEQ ID NO: 7399 - DNA, 122 bp, Homo sapiens
  misc_feature (61)..(62): /note="This region represents a CpG dinucleotide"
  misc_feature (61)..(61): /note="Nucleotide may be methylated to form 5-methylcytosine"
agagtgggaggaaggaaaagaaaagataattgatgagcaaataagaaaataagatgtcgacgagatgaaggcagtaaaagaggagggaaagataaagcagtttaggggatgcaaccgaattg

SEQ ID NO: 7400 - DNA, 122 bp, Homo sapiens
  misc_feature (61)..(62): /note="This region represents a CpG dinucleotide"
  misc_feature (61)..(61): /note="Nucleotide may be methylated to form 5-methylcytosine"
tagaatgtcttgtttttaaagaggatttgctggatgtgtaatactcttaagaaatgctgccgatgcttaccgttttgtggaatatcattctctgggtttttctagatactgctttatttctc

SEQ ID NO: 7401 - DNA, 122 bp, Homo sapiens
  misc_feature (61)..(62): /note="This region represents a CpG dinucleotide"
  misc_feature (61)..(61): /note="Nucleotide may be methylated to form 5-methylcytosine"
gtgatccacctgcctcagtctcccaaaatgctgggattacaggctgtgagctaccacacccggccaaccaagttgacttctgattaaccagcttttagggaaggcctctaagatttccagtt

SEQ ID NO: 7402 - DNA, 122 bp, Homo sapiens
  misc_feature (61)..(62): /note="This region represents a CpG dinucleotide"
  misc_feature (61)..(61): /note="Nucleotide may be methylated to form 5-methylcytosine"
tatttctttatagcagtgtgaaaatggtctaatacacttgtcttgaactcctgcctcaagcgatcctctggaaccttggcctcccagagtgctgggattacaggcatgtgccactacgccct

SEQ ID NO: 7403 - DNA, 122 bp, Homo sapiens
  misc_feature (61)..(62): /note="This region represents a CpG dinucleotide"
  misc_feature (61)..(61): /note="Nucleotide may be methylated to form 5-methylcytosine"
gctattggctttttatttcactctccctttttttccacatttgctgtagaaatctatccacgggtacagtggttaagttgctgtttctagagctatggtgagaggaacagcgatctgtgcat

SEQ ID NO: 7404 - DNA, 122 bp, Homo sapiens
  misc_feature (61)..(62): /note="This region represents a CpG dinucleotide"
  misc_feature (61)..(61): /note="Nucleotide may be methylated to form 5-methylcytosine"
tgggatttactttaatacaatttagcatgaaatgatatggcagaagcagttaagatgacacgtgtggaaagatcctgataattggtgaatatgagtaatgggtagaaaggtgaactcactat

SEQ ID NO: 7405 - DNA, 122 bp, Homo sapiens
  misc_feature (61)..(62): /note="This region represents a CpG dinucleotide"
  misc_feature (61)..(61): /note="Nucleotide may be methylated to form 5-methylcytosine"
ggctctatgcaactgtaccaggccgtagactcaccaagccagtcctggctgtagaaagaacgtgggaactctgggccatgtggattttcacaagctgagttgttgagagacctggactacct

SEQ ID NO: 7406 - DNA, 122 bp, Homo sapiens
  misc_feature (61)..(62): /note="This region represents a CpG dinucleotide"
  misc_feature (61)..(61): /note="Nucleotide may be methylated to form 5-methylcytosine"
gaagcaggaagaggccgctggacctggacgggaggacgacacctggattactgggtgtggcgccttccaccaacagtgctggccacatgtgaacagcacctggtagccttggaggctgtgag

SEQ ID NO: 7407 - DNA, 122 bp, Homo sapiens
  misc_feature (61)..(62): /note="This region represents a CpG dinucleotide"
  misc_feature (61)..(61): /note="Nucleotide may be methylated to form 5-methylcytosine"
tattaagtcatgactcatctccttttgctaaaatggtgactagctcttctatttccttttcgttccctgtgtgcaccatgttctttatatgcttttactttggcacattctgtctgtctgtg

SEQ ID NO: 7408 - DNA, 122 bp, Homo sapiens
  misc_feature (61)..(62): /note="This region represents a CpG dinucleotide"
  misc_feature (61)..(61): /note="Nucleotide may be methylated to form 5-methylcytosine"
ctgggttgaaggcagcagagctagagttagaagccctgtttaccctggtgaatcctaatccgtgtcccaagcatcatgtcttctgtgactcacatccatcactcacccaactgtgtggactt

SEQ ID NO: 7409 - DNA, 122 bp, Homo sapiens
  misc_feature (61)..(62): /note="This region represents a CpG dinucleotide"
  misc_feature (61)..(61): /note="Nucleotide may be methylated to form 5-methylcytosine"
tcacccctagcagactgataaaacttagtaatgaagaatagtagagaaaacagaactttacggtatgttgttgggaatgtaaaatgtgtataaacatgttgggaaaaaattggcattatctt

SEQ ID NO: 7410 - DNA, 122 bp, Homo sapiens
  misc_feature (61)..(62): /note="This region represents a CpG dinucleotide"
  misc_feature (61)..(61): /note="Nucleotide may be methylated to form 5-methylcytosine"
ctttcctgatgttcagctccgggaggaacagagcgagcatgggaatgttgagataaagggcgttgtgcaacatggtgaacaatgtcctcagcttcgtcagtgacactgacacattcttcaat

SEQ ID NO: 7411 - DNA, 122 bp, Homo sapiens
  misc_feature (61)..(62): /note="This region represents a CpG dinucleotide"
  misc_feature (61)..(61): /note="Nucleotide may be methylated to form 5-methylcytosine"
ccaattaaaatggatgaacaagcaaaatgaaaacatacctatggaccaacccaaggttaccgtcaggtggtgaaggacttcagaatcacttacctgaagcattgtgtttctcagcagcaaag

SEQ ID NO: 7412 - DNA, 122 bp, Homo sapiens
  misc_feature (61)..(62): /note="This region represents a CpG dinucleotide"
  misc_feature (61)..(61): /note="Nucleotide may be methylated to form 5-methylcytosine"
gccaaaggtcacatggctcaggaccaagtgcagaaccaggacagcaagcctctgtcctggcggttctcacccagtctggacccaaaggcaggaaagtgttaagaaacacttgctggcaatga

SEQ ID NO: 7413 - DNA, 122 bp, Homo sapiens
  misc_feature (61)..(62): /note="This region represents a CpG dinucleotide"
  misc_feature (61)..(61): /note="Nucleotide may be methylated to form 5-methylcytosine"
aatgagaatggaagatttcatttggaaatggccctgtgagtacgtgcttattttcagaggcgttccccataactgacagcagtcaatgacttctgattgggcaatggcctggccagccacac

SEQ ID NO: 7414 - DNA, 122 bp, Homo sapiens
  misc_feature (61)..(62): /note="This region represents a CpG dinucleotide"
  misc_feature (61)..(61): /note="Nucleotide may be methylated to form 5-methylcytosine"
aggaacatccttaatgacccagatttcttttaaccttcaagatgcaagtcatcccttaaacgcagtcataagcccagaggcaaagttaatgacctgtagttccttctgtgcaggagtgagat

SEQ ID NO: 7415 - DNA, 122 bp, Homo sapiens
  misc_feature (61)..(62): /note="This region represents a CpG dinucleotide"
  misc_feature (61)..(61): /note="Nucleotide may be methylated to form 5-methylcytosine"
ttaatttattacatgttttcacttgtgattgtcacataaatcccgtaagatatgcagtttcggctgacattgacaagttgatcttgaggaaatgcagaaaaaccttaacagtcttgaataag

SEQ ID NO: 7416 - DNA, 122 bp, Homo sapiens
  misc_feature (61)..(62): /note="This region represents a CpG dinucleotide"
  misc_feature (61)..(61): /note="Nucleotide may be methylated to form 5-methylcytosine"
acacaggctttggcacagagaacaggcacagagacatctgacctccttgttaaacaggtgcgtcaacacaccagtgaaaccaacaaacctcacactcacctcaaatgtcctgtgcagggtgg

SEQ ID NO: 7417 - DNA, 122 bp, Homo sapiens
  misc_feature (61)..(62): /note="This region represents a CpG dinucleotide"
  misc_feature (61)..(61): /note="Nucleotide may be methylated to form 5-methylcytosine"
taggcctcttcctacaccagtggtgcttcctctccagaggtaatatttcccaacatgcctcgttcttaaaaccctatggccaactctccctaccctgacggaaaggactttagatttgaagc

SEQ ID NO: 7418 - DNA, 122 bp, Homo sapiens
  misc_feature (61)..(62): /note="This region represents a CpG dinucleotide"
  misc_feature (61)..(61): /note="Nucleotide may be methylated to form 5-methylcytosine"
agggagtgtcttcagcatggatcctctggacaaaggtatgatttcattccccgggctggacggagcaggatgccaagagatttcatcatgctactcagaaaggtgtatggtgtaaaacttat

SEQ ID NO: 7419 - DNA, 122 bp, Homo sapiens
  misc_feature (61)..(62): /note="This region represents a CpG dinucleotide"
  misc_feature (61)..(61): /note="Nucleotide may be methylated to form 5-methylcytosine"
ttctgcttagatctttgggtttttccatttgtacagtctccttattaatgtccctcccaacgtaaagtcctgtttgatcttagagctaatgagtaaagctgggtggggcaaaaagcccgaga

SEQ ID NO: 7420 - DNA, 122 bp, Homo sapiens
  misc_feature (61)..(62): /note="This region represents a CpG dinucleotide"
  misc_feature (61)..(61): /note="Nucleotide may be methylated to form 5-methylcytosine"
gccttaagtaatctgcctgcctccacctcccaaagtgctgggataacaggcctgagtcaccgcacccagcctcaccactggcttttgagcaggagagtatcttggtagtgagcttcaggatc

SEQ ID NO: 7421 - DNA, 122 bp, Homo sapiens
  misc_feature (61)..(62): /note="This region represents a CpG dinucleotide"
  misc_feature (61)..(61): /note="Nucleotide may be methylated to form 5-methylcytosine"
catgtaatgtacagagtagctgtaccttacaacttgatcataaagttgttctctgcaaaacgaaactagttgggaaagacagaatcaatatgatgaaagaagtggtcataccaggagacaca

SEQ ID NO: 7422 - DNA, 122 bp, Homo sapiens
  misc_feature (61)..(62): /note="This region represents a CpG dinucleotide"
  misc_feature (61)..(61): /note="Nucleotide may be methylated to form 5-methylcytosine"
cccacaacgtccctctgcagtcactgacagataccccaggttccttcctgtcttcctccccgccaccccagtgtgttacagctgatttgtacagccctggacaagcccatggttaaatagct

SEQ ID NO: 7423 - DNA, 122 bp, Homo sapiens
  misc_feature (61)..(62): /note="This region represents a CpG dinucleotide"
  misc_feature (61)..(61): /note="Nucleotide may be methylated to form 5-methylcytosine"
ggattatagaatgttctgtttcttcattactactggaccagcctggaggccaaagacgcacggagccttcccatgtgggtcaagtgcccccccaggattccagactgcctacttctcagagt

SEQ ID NO: 7424 - DNA, 122 bp, Homo sapiens
  misc_feature (61)..(62): /note="This region represents a CpG dinucleotide"
  misc_feature (61)..(61): /note="Nucleotide may be methylated to form 5-methylcytosine"
atccttttctcaaggtggtgagtagaaatctaatgtgtgccttccttgtaatcatccttgcgtatgacaaaggtgtcttaagactttagtgtagcagttactaggaacagaacaggaaatgc

SEQ ID NO: 7425 - DNA, 122 bp, Homo sapiens
  misc_feature (61)..(62): /note="This region represents a CpG dinucleotide"
  misc_feature (61)..(61): /note="Nucleotide may be methylated to form 5-methylcytosine"
cgaagggcagggtgtgcacctgcactgtttgccactgaatcttgcacgggacctagtacacgggacatgtctaaatgcttgctgagtcaaggaatgagactggcttaacccaagtctcattt

SEQ ID NO: 7426 - DNA, 122 bp, Homo sapiens
  misc_feature (61)..(62): /note="This region represents a CpG dinucleotide"
  misc_feature (61)..(61): /note="Nucleotide may be methylated to form 5-methylcytosine"
attgtcttaattaagcatgttgaacaaatgactaaatacatgttttgaaaagtggcaactcgcttgataatgccaaaacctttaaagaaccctactgggggcaggatttaagaccatttttg

SEQ ID NO: 7427 - DNA, 122 bp, Homo sapiens
  misc_feature (61)..(62): /note="This region represents a CpG dinucleotide"
  misc_feature (61)..(61): /note="Nucleotide may be methylated to form 5-methylcytosine"
accaggattggttgtgcggccttgtccagggctggcactgataagatccaaggcggtgtccgctgaatgaaccaggctgctgaccagggtgctgtgagcaattcccatcgcttccctctggg

SEQ ID NO: 7428 - DNA, 122 bp, Homo sapiens
  misc_feature (61)..(62): /note="This region represents a CpG dinucleotide"
  misc_feature (61)..(61): /note="Nucleotide may be methylated to form 5-methylcytosine"
gaaaccgcggggctaggctggcaatgccttatagctgagcctgctgcaggggagcagggtcggggtgctccacagtgagccaggacaggttctcctggctcccctttgtctgtgtcacctca

SEQ ID NO: 7429 - DNA, 122 bp, Homo sapiens
  misc_feature (61)..(62): /note="This region represents a CpG dinucleotide"
  misc_feature (61)..(61): /note="Nucleotide may be methylated to form 5-methylcytosine"
tctccgccaggtccattctcctttctccactctggaatgccctcctcccaccaaggcccacgccagatggaggtggatgccacacccacaccttaaggttatgttctgcttccccagagaga

SEQ ID NO: 7430 - DNA, 122 bp, Homo sapiens
  misc_feature (61)..(62): /note="This region represents a CpG dinucleotide"
  misc_feature (61)..(61): /note="Nucleotide may be methylated to form 5-methylcytosine"
gagaggcctaggtaggaggactgcttgagcttaggagttcgagattagcctgggcaacaccgtgaaaccccatctccacaaaaaacagacaaaattagccaggcatggtggggtgtgcctct

SEQ ID NO: 7431 - DNA, 122 bp, Homo sapiens
  misc_feature (61)..(62): /note="This region represents a CpG dinucleotide"
  misc_feature (61)..(61): /note="Nucleotide may be methylated to form 5-methylcytosine"
aagagatggtaactcctgaaccagatctttggctgagacaatgagaggtgatgagagaggcgatgagccagatcttcggctaaggcgattagtcagaggcaagaagtccaggctggaagtat

SEQ ID NO: 7432 - DNA, 122 bp, Homo sapiens
  misc_feature (61)..(62): /note="This region represents a CpG dinucleotide"
  misc_feature (61)..(61): /note="Nucleotide may be methylated to form 5-methylcytosine"
caagcagcacattgtggtaggcagaattctgagatgctccccaagattcctgcttcctgacgtacacaccctctacagtactctctccttgaatgtgagcaggacatgtgaatacaatggga

SEQ ID NO: 7433 - DNA, 122 bp, Homo sapiens
  misc_feature (61)..(62): /note="This region represents a CpG dinucleotide"
  misc_feature (61)..(61): /note="Nucleotide may be methylated to form 5-methylcytosine"
gtgagcagcctgcggaggaagagcctctcagacagctaatgacaggttccttctccctggcgcggccacctcccctctccagcgggtggagatggagaacctgtcggccggcctcagggtga

SEQ ID NO: 7434 - DNA, 122 bp, Homo sapiens
  misc_feature (61)..(62): /note="This region represents a CpG dinucleotide"
  misc_feature (61)..(61): /note="Nucleotide may be methylated to form 5-methylcytosine"
cttggcagtggagtggtaacagctaatggctctttctacctggcatgcagcttcctgtaacgactattattaatagagccaggctgatcgtgaggcgccagaaaaggtgtatggtggaattt

SEQ ID NO: 7435 - DNA, 122 bp, Homo sapiens
  misc_feature (61)..(62): /note="This region represents a CpG dinucleotide"
  misc_feature (61)..(61): /note="Nucleotide may be methylated to form 5-methylcytosine"
tgacttaactacatttaaagacagagtaggaaaagagaatgaggcctcattttgcggaagcgaaggctgcctgagagccagctgcagtaaacactaaagaaaaagaacaatgactgagaaaa

SEQ ID NO: 7436 - DNA, 122 bp, Homo sapiens
  misc_feature (61)..(62): /note="This region represents a CpG dinucleotide"
  misc_feature (61)..(61): /note="Nucleotide may be methylated to form 5-methylcytosine"
ggccaggagctcggagggacactgcattgattagggcgcaaaccagctttagctcgtcatcgttgtgtgcttagaggaagttcacctgctttggcctccactctgagggtggggtcaccacc

SEQ ID NO: 7437 - DNA, 122 bp, Homo sapiens
  misc_feature (61)..(62): /note="This region represents a CpG dinucleotide"
  misc_feature (61)..(61): /note="Nucleotide may be methylated to form 5-methylcytosine"
gtcaaccaggccactgcctacccggccctgtcctgctccaccactccctgtgctcaggtacgcagcacatctgtgccacgccactccctgtgccccaggcacacggtacatctgtgctatga

SEQ ID NO: 7438 - DNA, 122 bp, Homo sapiens
  misc_feature (61)..(62): /note="This region represents a CpG dinucleotide"
  misc_feature (61)..(61): /note="Nucleotide may be methylated to form 5-methylcytosine"
cgaaatacttctcttgaaatctttcagcttaaataatgaacctttagtcacacagtcactcgtatggctatttttctttggtttaaggcggtcatcaccaaccagtgtgtgtttgcactctg

SEQ ID NO: 7439 - DNA, 122 bp, Homo sapiens
  misc_feature (61)..(62): /note="This region represents a CpG dinucleotide"
  misc_feature (61)..(61): /note="Nucleotide may be methylated to form 5-methylcytosine"
aagtcaacacataaagagtgtaggctaaagtgtttcatgaggagagagggtgtcatgacacgtaactggaactgagtaaagtagcaaaagaaagagaagagaagccaaaggttttgttttta

SEQ ID NO: 7440 - DNA, 122 bp, Homo sapiens
  misc_feature (61)..(62): /note="This region represents a CpG dinucleotide"
  misc_feature (61)..(61): /note="Nucleotide may be methylated to form 5-methylcytosine"
tgtttggtttatttacttcccccacttgctcatgaacctgtttgtcactacagtaggtgacgctgtttaagtcccagtcccatttaattaagagaatgtgtgtgtatgtgtatgtatttgtg

SEQ ID NO: 7441 - DNA, 122 bp, Homo sapiens
  misc_feature (61)..(62): /note="This region represents a CpG dinucleotide"
  misc_feature (61)..(61): /note="Nucleotide may be methylated to form 5-methylcytosine"
catgatgccactatgacctctgccctttaacccttagccttactttacattcctgactaccgattggctgagggattgtctaatagaatgccacacaaccagtctcaggatttcagcaccac

SEQ ID NO: 7442 - DNA, 122 bp, Homo sapiens
  misc_feature (61)..(62): /note="This region represents a CpG dinucleotide"
  misc_feature (61)..(61): /note="Nucleotide may be methylated to form 5-methylcytosine"
agtgtccatgcgtcaccttgctggtgatgcttcactggatcacttggttccggggttgtccgcacgtctccctgtagtgcaggtgctccttcctgtttccaattagcctgtgggatgggact

SEQ ID NO: 7443 - DNA, 122 bp, Homo sapiens
  misc_feature (61)..(62): /note="This region represents a CpG dinucleotide"
  misc_feature (61)..(61): /note="Nucleotide may be methylated to form 5-methylcytosine"
tttacactgcgttaggtattatgagtaatctagagatgatttaaagtgtacaggaggatgcgtgtgggtgatatgcaagtactatgccattttatgtcaaggacttgagcattctcaatttt

SEQ ID NO: 7444 - DNA, 122 bp, Homo sapiens
  misc_feature (61)..(62): /note="This region represents a CpG dinucleotide"
  misc_feature (61)..(61): /note="Nucleotide may be methylated to form 5-methylcytosine"
taatgaaaccagatgggtaagtcatttcctgagcaacaggtatcaggagaaaagaaagagcgaatcgaggacaagtattttagtggcacatatgctgcgcctcttagtcactctggataatg

SEQ ID NO: 7445 - DNA, 122 bp, Homo sapiens
  misc_feature (61)..(62): /note="This region represents a CpG dinucleotide"
  misc_feature (61)..(61): /note="Nucleotide may be methylated to form 5-methylcytosine"
ctcccagactcatgtcctgccatacccggtaattagtgacgtttctccaaaggcaagtttcgtaagatggcccttggtccccggcctcccttcctcatggtgatgatgcgttcagagtcagg

SEQ ID NO: 7446 - DNA, 122 bp, Homo sapiens
  misc_feature (61)..(62): /note="This region represents a CpG dinucleotide"
  misc_feature (61)..(61): /note="Nucleotide may be methylated to form 5-methylcytosine"
agtcaccctactgcaagctcagatgggaagaacttttgtggctcagcttccctgatcagacgacacaggcacccaatgactctagcactcagtgacaaggaagacaagtagctttcccagcc

SEQ ID NO: 7447 - DNA, 122 bp, Homo sapiens
  misc_feature (61)..(62): /note="This region represents a CpG dinucleotide"
  misc_feature (61)..(61): /note="Nucleotide may be methylated to form 5-methylcytosine"
gcaagatcaaagcgccagtgattcagctcctggtgagggctgtcttcctgtcttgctgatcgccatgttgtagctgtgttctcacatggcacagagaaagagggagagacagaaagggggag

SEQ ID NO: 7448 - DNA, 122 bp, Homo sapiens
  misc_feature (61)..(62): /note="This region represents a CpG dinucleotide"
  misc_feature (61)..(61): /note="Nucleotide may be methylated to form 5-methylcytosine"
agaagctcacaccagctcgggttcagcagcctccctctccacacagcagcagcggggtcacgtcatccagcttgtgcataatgtaactgcttgtgtttagccttttcaggcgttccccaggg

SEQ ID NO: 7449 - DNA, 122 bp, Homo sapiens
  misc_feature (61)..(62): /note="This region represents a CpG dinucleotide"
  misc_feature (61)..(61): /note="Nucleotide may be methylated to form 5-methylcytosine"
agcaaacaatgaatcataaaaacattgcaaaattttcctgtaggcaaaactgtcttcttccgaaatacattaaataattgctaattcatcaatgtgtttatcaaactgtttttccccaaaga

SEQ ID NO: 7450 - DNA, 122 bp, Homo sapiens
  misc_feature (61)..(62): /note="This region represents a CpG dinucleotide"
  misc_feature (61)..(61): /note="Nucleotide may be methylated to form 5-methylcytosine"
gagttactaatgacttctatcaaatcaccttttgctgactcccgtgttagtcctggatagcgtccttggcacacttgatttcagattttgacaggtgataaaagcacatattgagattgctg

SEQ ID NO: 7451 - DNA, 122 bp, Homo sapiens
  misc_feature (61)..(62): /note="This region represents a CpG dinucleotide"
  misc_feature (61)..(61): /note="Nucleotide may be methylated to form 5-methylcytosine"
atgggttttaacactctttctcattatgacttctcaagactagcctactaacccttgacacgcaactctaggtagagttgcaacacagttttccagcacagtgagacctgaataatccaggg

SEQ ID NO: 7452 - DNA, 122 bp, Homo sapiens
  misc_feature (61)..(62): /note="This region represents a CpG dinucleotide"
  misc_feature (61)..(61): /note="Nucleotide may be methylated to form 5-methylcytosine"
ctggccttctgcccacaggctccatcatactatgatagtgaactctctgcattatagttgcgctttttagaacagtaatgatccaaaagaaaaggatctaccagcattactttaattatatt

SEQ ID NO: 7453 - DNA, 122 bp, Homo sapiens
  misc_feature (61)..(62): /note="This region represents a CpG dinucleotide"
  misc_feature (61)..(61): /note="Nucleotide may be methylated to form 5-methylcytosine"
aaaagtgtcaaatgccttgatgtctcccacagatcctagccaagagtcatactacaaattcgcaaaggaagattaagtttttcagataacaattaaagtaacaattaatccattgagataat

SEQ ID NO: 7454 - DNA, 122 bp, Homo sapiens
  misc_feature (61)..(62): /note="This region represents a CpG dinucleotide"
  misc_feature (61)..(61): /note="Nucleotide may be methylated to form 5-methylcytosine"
caggtgcaaaactgagcctcagttgactcatttggaaatagcagagttgtggtttactgacgtggaagcactggattggggcagacttattgtgtgcaacatgggccacattaacttggaaa

SEQ ID NO: 7455 - DNA, 122 bp, Homo sapiens
  misc_feature (61)..(62): /note="This region represents a CpG dinucleotide"
  misc_feature (61)..(61): /note="Nucleotide may be methylated to form 5-methylcytosine"
catagttcaagagactgcaaagaagaggctccttaaggggtgtggacaggattaagagaacgagcagggttgctgaggcacccagagactagcaacagtggcagtcattaccaccccaggcc

SEQ ID NO: 7456 - DNA, 122 bp, Homo sapiens
  misc_feature (61)..(62): /note="This region represents a CpG dinucleotide"
  misc_feature (61)..(61): /note="Nucleotide may be methylated to form 5-methylcytosine"
caaagagatgaaatttggggaactgctgggtagagccatgaggctggtcccaaaggtcaccgggatttgaagccatcaggtaggacaggagcagaggtgggaaaggaaatgggccaagggcg

SEQ ID NO: 7457 - DNA, 122 bp, Homo sapiens
  misc_feature (61)..(62): /note="This region represents a CpG dinucleotide"
  misc_feature (61)..(61): /note="Nucleotide may be methylated to form 5-methylcytosine"
ctgcttggtttgtgtcaggcatttcctggtcccttgtgtctgccgggcttgtggaggaggcgtgtggaagcttttttctgagccatccgccctgtggaagccacacaggcaaggccagagga

SEQ ID NO: 7458 - DNA, 122 bp, Homo sapiens
  misc_feature (61)..(62): /note="This region represents a CpG dinucleotide"
  misc_feature (61)..(61): /note="Nucleotide may be methylated to form 5-methylcytosine"
acacaacaggaagtcaataaatgtttgctgcatggctcagtgttcatcaacctttaagcacgagaccaaaagattgcaaagatgcttcatgctgtgacctctagcctccgggaaggactcat

SEQ ID NO: 7459 - DNA, 122 bp, Homo sapiens
  misc_feature (61)..(62): /note="This region represents a CpG dinucleotide"
  misc_feature (61)..(61): /note="Nucleotide may be methylated to form 5-methylcytosine"
aattaggataagccttatggttaattgaatgttgagtgtacaggttaaatcccattataacgaactccaggggactggccaaattattttgttgtactgggattagactttattaaatattg

SEQ ID NO: 7460 - DNA, 122 bp, Homo sapiens
  misc_feature (61)..(62): /note="This region represents a CpG dinucleotide"
  misc_feature (61)..(61): /note="Nucleotide may be methylated to form 5-methylcytosine"
acccagtggactcattgtgagcagactctgaacagactcatggacatgactcatggcctccgtatgctttcatttcgaaaggagagtcatgatgtttcttcagatctttaggtatcagtgtt

SEQ ID NO: 7461 - DNA, 122 bp, Homo sapiens
  misc_feature (61)..(62): /note="This region represents a CpG dinucleotide"
  misc_feature (61)..(61): /note="Nucleotide may be methylated to form 5-methylcytosine"
ctatttaaaccacttttacatgtgtttgcattttttttcctaaaagaaacctttaggatccgaacaaggtttaatgtgttagtcattgggatccagatagaaaggcaggactgttgtttgaa

SEQ ID NO: 7462 - DNA, 122 bp, Homo sapiens
  misc_feature (61)..(62): /note="This region represents a CpG dinucleotide"
  misc_feature (61)..(61): /note="Nucleotide may be methylated to form 5-methylcytosine"
actgagtctcaggttaaataacttcctcaaagtcacctcactggtaagtggcagagccaacgttgtaatgaagcctatgtgactccagaggctgtcctaatacaacatggttaattacctcc

SEQ ID NO: 7463 - DNA, 122 bp, Homo sapiens
  misc_feature (61)..(62): /note="This region represents a CpG dinucleotide"
  misc_feature (61)..(61): /note="Nucleotide may be methylated to form 5-methylcytosine"
tggtatatctaaacaggaacaaacatgtacaagactcagttcaaactagaaggcccttttcgcgaatgttttttaaagtgagtggtaaactgcaaaagtcacaatatgagatccattcctcc

SEQ ID NO: 7464 - DNA, 122 bp, Homo sapiens
  misc_feature (61)..(62): /note="This region represents a CpG dinucleotide"
  misc_feature (61)..(61): /note="Nucleotide may be methylated to form 5-methylcytosine"
taaagggctcactcatcccatgctgctgttctgcaaggtaccatattactaagtacagctcgtgttcacagtaggtgccaacacatttcagagatgaggaaatgggagcccagagaggtcaa

SEQ ID NO: 7465 - DNA, 122 bp, Homo sapiens
  misc_feature (61)..(62): /note="This region represents a CpG dinucleotide"
  misc_feature (61)..(61): /note="Nucleotide may be methylated to form 5-methylcytosine"
ggtgatccgcctgtctcggcctcccaaagtgctaggattacaggcatgagccaccatgcccggccctagtgggtgcaaccttaagcaagacagaggatatttactttcctatatcgatatga

SEQ ID NO: 7466 - DNA, 122 bp, Homo sapiens
  misc_feature (61)..(62): /note="This region represents a CpG dinucleotide"
  misc_feature (61)..(61): /note="Nucleotide may be methylated to form 5-methylcytosine"
agccaatctggagttttgaaaattaaaccacaaaaatgcaaaaggataaagcctgacgtacgtatatgattgcaagaggtcatgtatccaggtcaagacaaagtcccctgggaataagatag

SEQ ID NO: 7467 - DNA, 122 bp, Homo sapiens
  misc_feature (61)..(62): /note="This region represents a CpG dinucleotide"
  misc_feature (61)..(61): /note="Nucleotide may be methylated to form 5-methylcytosine"
gagtgatacaaattgttgacgtactgattaatgtaagacctactgacaaagaacaaaggacgcagatttatttctgagtcatgaggttttactgattgtcacacaggtagacattttagcac

SEQ ID NO: 7468 - DNA, 122 bp, Homo sapiens
  misc_feature (61)..(62): /note="This region represents a CpG dinucleotide"
  misc_feature (61)..(61): /note="Nucleotide may be methylated to form 5-methylcytosine"
ttttggactcagattgagccactactggcttatttcttccccagcttgcagacggcttgacgtgggacttcttcgccttgttattgtgtgagccagttctccctaataagctccctttcata

SEQ ID NO: 7469 - DNA, 122 bp, Homo sapiens
  misc_feature (61)..(62): /note="This region represents a CpG dinucleotide"
  misc_feature (61)..(61): /note="Nucleotide may be methylated to form 5-methylcytosine"
agaaatacaggatgtaaataaaatcttcattaagcaaggtatatgtaaactctacaagtacggcaggttaatgaccataaggagagaatggccctcacctctggatgctgtggcagggacat

SEQ ID NO: 7470 - DNA, 122 bp, Homo sapiens
  misc_feature (61)..(62): /note="This region represents a CpG dinucleotide"
  misc_feature (61)..(61): /note="Nucleotide may be methylated to form 5-methylcytosine"
tcaggcatttacatatatttttctgatgaattacttcttactcattttggtttttcccaccgtaatatgttgcttctggtgaaccagtgactatttaatgaatcagcgagtcaaacaagtac

SEQ ID NO: 7471 - DNA, 122 bp, Homo sapiens
  misc_feature (61)..(62): /note="This region represents a CpG dinucleotide"
  misc_feature (61)..(61): /note="Nucleotide may be methylated to form 5-methylcytosine"
gaaggttgcactggattcacccagatcaacaccaagattagtattgagatcttggccaagcgctgtggctcaagcctgtaatcccagcactttgggaggccgaggcaggcagatcacctgag

SEQ ID NO: 7472 - DNA, 122 bp, Homo sapiens
  misc_feature (61)..(62): /note="This region represents a CpG dinucleotide"
  misc_feature (61)..(61): /note="Nucleotide may be methylated to form 5-methylcytosine"
tctattcatatctattctggctaacttccaatctgtttgctccagttttagtgattgttccgtaatgcaaacctgatcatgtcacccttgcttaaatatctttagtacagataaacccactt

SEQ ID NO: 7473 - DNA, 122 bp, Homo sapiens
  misc_feature (61)..(62): /note="This region represents a CpG dinucleotide"
  misc_feature (61)..(61): /note="Nucleotide may be methylated to form 5-methylcytosine"
tgcctggttagcaacagtgactggtttaagagtaagtatgcacctctgcagagtcagtcacgtagaacctcacctactaacctgcagattggtccaggaagtgagaacgtgacctaaaccag

SEQ ID NO: 7474 - DNA, 122 bp, Homo sapiens
  misc_feature (61)..(62): /note="This region represents a CpG dinucleotide"
  misc_feature (61)..(61): /note="Nucleotide may be methylated to form 5-methylcytosine"
ggacaggagtcacactgctggaggcggaaaggtggaggaagagctgaggaaaccaggacacggatgcagaccagtttttcaagagattcgacagcaaaggggagggttaaagtacagcagag

SEQ ID NO: 7475 - DNA, 122 bp, Homo sapiens
  misc_feature (61)..(62): /note="This region represents a CpG dinucleotide"
  misc_feature (61)..(61): /note="Nucleotide may be methylated to form 5-methylcytosine"
cttaatctgtctctgtccggctgtgtcttgtgccagctcttttcttctctttaaaatgttcgcttttatcacttcctggtattactatttctactatttagtctctgctaattcttctcaaa

SEQ ID NO: 7476 - DNA, 122 bp, Homo sapiens
  misc_feature (61)..(62): /note="This region represents a CpG dinucleotide"
  misc_feature (61)..(61): /note="Nucleotide may be methylated to form 5-methylcytosine"
cctttgtaaaactcagttaaatgcagtgctccctcctcactgttagttttctgtggctgccgtaaggaagccatcaacttagtgattcacagcaacacagatgtcttctcttacagttctgt

SEQ ID NO: 7477 - DNA, 122 bp, Homo sapiens
  misc_feature (61)..(62): /note="This region represents a CpG dinucleotide"
  misc_feature (61)..(61): /note="Nucleotide may be methylated to form 5-methylcytosine"
gtaactttgggttcagaagtctatggcctgctggtgctcccaaatctctcatagtgcttgcgttctggcctgtatgattatggcttcctcaccctactggcagagggcacagaggaggcctt

SEQ ID NO: 7478 - DNA, 122 bp, Homo sapiens
  misc_feature (61)..(62): /note="This region represents a CpG dinucleotide"
  misc_feature (61)..(61): /note="Nucleotide may be methylated to form 5-methylcytosine"
gccccaccctgactcaccgggggcagtgctgacagctggttccggtcaagccacagctcccgaagattgggcagagcccccagagtgtctggctgcaagaaggaacagagaaaatagtgact

SEQ ID NO: 7479 - DNA, 122 bp, Homo sapiens
  misc_feature (61)..(62): /note="This region represents a CpG dinucleotide"
  misc_feature (61)..(61): /note="Nucleotide may be methylated to form 5-methylcytosine"
ataagaagaaaagcacaaacagaaaaataaagccatgtgtaagaaaggcagggattagaacgatatagctgcaggccaaggaaccccaaggattgtcagtcatcctagaagcaacagagaag

SEQ ID NO: 7480 - DNA, 122 bp, Homo sapiens
  misc_feature (61)..(62): /note="This region represents a CpG dinucleotide"
  misc_feature (61)..(61): /note="Nucleotide may be methylated to form 5-methylcytosine"
tgtcaatgttggccttgaggctagacgtgaagtcaaattcacctagtcacatgtaataaacgtagggagaggaatagtttctctgggaaaatcagacatgaacctaggagaaatggattctg

SEQ ID NO: 7481 - DNA, 122 bp, Homo sapiens
  misc_feature (61)..(62): /note="This region represents a CpG dinucleotide"
  misc_feature (61)..(61): /note="Nucleotide may be methylated to form 5-methylcytosine"
tatgcagacagtccttcaaaaggtaagcagtccacagcccagcagaatgctttctttgagcgtcttggcctgaaaattttctattattctctcctttggcgctaacttcccaaaacttaatc

SEQ ID NO: 7482 - DNA, 122 bp, Homo sapiens
  misc_feature (61)..(62): /note="This region represents a CpG dinucleotide"
  misc_feature (61)..(61): /note="Nucleotide may be methylated to form 5-methylcytosine"
agaaaggcaacttagaacatctcagaaatcaaagaaccttcagctactctagacagatgccggacatgtgagtagaaggaaagagcaaacagtgtcttgcttttcttagcagctgaaatgca

SEQ ID NO: 7483 - DNA, 122 bp, Homo sapiens
  misc_feature (61)..(62): /note="This region represents a CpG dinucleotide"
  misc_feature (61)..(61): /note="Nucleotide may be methylated to form 5-methylcytosine"
tcactccagtgttttcaatcttcatatctccttacttctttatccttgactttcttgcctcgctcttataaggtcattatatttagggctcatccagataatccaggataatctccccattt

SEQ ID NO: 7484 - DNA, 122 bp, Homo sapiens
  misc_feature (61)..(62): /note="This region represents a CpG dinucleotide"
  misc_feature (61)..(61): /note="Nucleotide may be methylated to form 5-methylcytosine"
ctacagcttactggcaggcaggatagctggttgcccaatctgctctttatctccatagcacggcagccaggctggttacataagtgactgcagtcatgcgttgcttaaccatagggttaggt

SEQ ID NO: 7485 - DNA, 122 bp, Homo sapiens
  misc_feature (61)..(62): /note="This region represents a CpG dinucleotide"
  misc_feature (61)..(61): /note="Nucleotide may be methylated to form 5-methylcytosine"
gagaaatccaagaaccctaaatgtataaggagtgaagcaatgttgaaatggacttacaaacggatgcagctatattctccagtggagacagccagtgccaacttttgtgcttattccaaatt

SEQ ID NO: 7486 - DNA, 122 bp, Homo sapiens
  misc_feature (61)..(62): /note="This region represents a CpG dinucleotide"
  misc_feature (61)..(61): /note="Nucleotide may be methylated to form 5-methylcytosine"
ttcaaaaaatactgccacttaccagagattctgacgagtgaggagtggccagggcattcacggtttaaaagtcctccggatgattttaatggacacctggttcattgtgtgaaaaccacttt

SEQ ID NO: 7487 - DNA, 122 bp, Homo sapiens
  misc_feature (61)..(62): /note="This region represents a CpG dinucleotide"
  misc_feature (61)..(61): /note="Nucleotide may be methylated to form 5-methylcytosine"
tggagggcgaaggtggcacctagatcctgcagtcacatggggctaatcaattttcctgcccgccagggttccatttgagtcatctgggttttattttgattcagcctctttaactggctgct

SEQ ID NO: 7488 - DNA, 122 bp, Homo sapiens
  misc_feature (61)..(62): /note="This region represents a CpG dinucleotide"
  misc_feature (61)..(61): /note="Nucleotide may be methylated to form 5-methylcytosine"
actgatagcaaatgatcccttggtgaatggggtacaatccaggattgactggaatccttccgttagctctatcattgcctacatgtcacttgtttcttttcccaggaatgagacattggaat

SEQ ID NO: 7489 - DNA, 122 bp, Homo sapiens
  misc_feature (61)..(62): /note="This region represents a CpG dinucleotide"
  misc_feature (61)..(61): /note="Nucleotide may be methylated to form 5-methylcytosine"
gcctgaattaatgaatgctttcaaagttttgcaacagttgaatcaccagttcccatcaagcgtgactgaagcagaattagctcattctgaatgctgaagccatctacacacacacacacaca

SEQ ID NO: 7490 - DNA, 122 bp, Homo sapiens
  misc_feature (61)..(62): /note="This region represents a CpG dinucleotide"
  misc_feature (61)..(61): /note="Nucleotide may be methylated to form 5-methylcytosine"
ggggtcagagctggagtttacctcctgctcaagacactggctgctgggtcagaggagattcggacacatcacctggtttaaccccaggactctatgtgaccttcatcccagccctgactcag

SEQ ID NO: 7491 - DNA, 122 bp, Homo sapiens
  misc_feature (61)..(62): /note="This region represents a CpG dinucleotide"
  misc_feature (61)..(61): /note="Nucleotide may be methylated to form 5-methylcytosine"
ttggattaactagtttagcactgattgtttgtgatgctaagattcttccttccctctcaccgagatgtgtgtgcttggatgacaaggaaagatggagtccccagcagttgttgaaacacagc

SEQ ID NO: 7492 - DNA, 122 bp, Homo sapiens
  misc_feature (61)..(62): /note="This region represents a CpG dinucleotide"
  misc_feature (61)..(61): /note="Nucleotide may be methylated to form 5-methylcytosine"
gatttggtttcactctctgctgtatccttgcacctagcacagtgctcagcagccagtaggcgctgaataattgttgaaggacgacaggtgtgcagtgactgtgtgctgggcatggcagatgc

SEQ ID NO: 7493 - DNA, 122 bp, Homo sapiens
  misc_feature (61)..(62): /note="This region represents a CpG dinucleotide"
  misc_feature (61)..(61): /note="Nucleotide may be methylated to form 5-methylcytosine"
aggccatctagttaatatccacagaacagatctgctgattagtgaaagcttcctgcacagcgggggcccatggtgagcaatcatttggcacacctgctgtctcatgatctgtgaccattcca

SEQ ID NO: 7494 - DNA, 122 bp, Homo sapiens
  misc_feature (61)..(62): /note="This region represents a CpG dinucleotide"
  misc_feature (61)..(61): /note="Nucleotide may be methylated to form 5-methylcytosine"
acagcaccacaaatgacaatgcacacacccacccagaaggcagctgactgaatccctggacgtatatccctggtacttagcaggaccagcactcctgtactctgaatttacttctggaagaa

SEQ ID NO: 7495 - DNA, 122 bp, Homo sapiens
  misc_feature (61)..(62): /note="This region represents a CpG dinucleotide"
  misc_feature (61)..(61): /note="Nucleotide may be methylated to form 5-methylcytosine"
gggtcttgattctgtgactccaccaggtgtcaaggtctctgaaccggctgcccttagacacgtgcctgaactcaaagcagtcatactgttaagggatagacttggtgctgtaaacttagcca

SEQ ID NO: 7496 - DNA, 122 bp, Homo sapiens
  misc_feature (61)..(62): /note="This region represents a CpG dinucleotide"
  misc_feature (61)..(61): /note="Nucleotide may be methylated to form 5-methylcytosine"
gtcgttgtccagctggccaagggctcctgggattagaggcgggaagtgggatctcaaggccgcactggcttgtgatgtcactttgcaagaactgcttttttttccacagtccatcccatctt

SEQ ID NO: 7497 - DNA, 122 bp, Homo sapiens
  misc_feature (61)..(62): /note="This region represents a CpG dinucleotide"
  misc_feature (61)..(61): /note="Nucleotide may be methylated to form 5-methylcytosine"
ggcagctctgggactatggggacaacaaccatcaccaccaccccatgcctgggactcagccgcaaagatggtgttttaactgatgggggagttgatactgtttgaaacctccccaggggatt

SEQ ID NO: 7498 - DNA, 122 bp, Homo sapiens
  misc_feature (61)..(62): /note="This region represents a CpG dinucleotide"
  misc_feature (61)..(61): /note="Nucleotide may be methylated to form 5-methylcytosine"
tgctgccaaaggcgtgaacttctgtgtctccaccccagtgcaccctcctctcaatgcatacgcccattggagttttgtcagggagtccttcccacatgactatctcagtatgaaggaggagt

SEQ ID NO: 7499 - DNA, 122 bp, Homo sapiens
  misc_feature (61)..(62): /note="This region represents a CpG dinucleotide"
  misc_feature (61)..(61): /note="Nucleotide may be methylated to form 5-methylcytosine"
gaggtgcttggtaaggagctctgaatcatatacatggggaataaaccacagcagagcctacgacaagaaggtgaggaacacagcagccgtctgttgtcatacagcagctcccttggagaaga

SEQ ID NO: 7500 - DNA, 122 bp, Homo sapiens
  misc_feature (61)..(62): /note="This region represents a CpG dinucleotide"
  misc_feature (61)..(61): /note="Nucleotide may be methylated to form 5-methylcytosine"
ttacatttcctgggtcactttgaccttctcaaaggccgcagccaccattgagctggtattcgctcatgctgacatcctactccaaccctctctgcctcatcaaatacagccttgattttggt

SEQ ID NO: 7501 - DNA, 122 bp, Homo sapiens
  misc_feature (61)..(62): /note="This region represents a CpG dinucleotide"
  misc_feature (61)..(61): /note="Nucleotide may be methylated to form 5-methylcytosine"
tacaggtgtgagccaccacgcccagccaacaattcttatttgcttactctgtagatggcacggtgctggatgatttacctgcattattttatttactccaaaaaccctaagggtactattat

SEQ ID NO: 7502 - DNA, 122 bp, Homo sapiens
  misc_feature (61)..(62): /note="This region represents a CpG dinucleotide"
  misc_feature (61)..(61): /note="Nucleotide may be methylated to form 5-methylcytosine"
acatgagtcagtaaaggaggagacaagtagggccccatctgctgcagccaggaccggtggcgcccattgtgtcatgtctgtcccaccctcgtgagcagcagagccagagctgagcacagcct

SEQ ID NO: 7503 - DNA, 122 bp, Homo sapiens
  misc_feature (61)..(62): /note="This region represents a CpG dinucleotide"
  misc_feature (61)..(61): /note="Nucleotide may be methylated to form 5-methylcytosine"
cagagccaccctcctttttaaacagctacttgcctcggcaaagtgcctctatctccccaacgctttccaggtggttaagagtcactcaaaagctgtgtgatcttggccaagttactgaacct

SEQ ID NO: 7504 - DNA, 122 bp, Homo sapiens
  misc_feature (61)..(62): /note="This region represents a CpG dinucleotide"
  misc_feature (61)..(61): /note="Nucleotide may be methylated to form 5-methylcytosine"
gggtctagttaattggtcatccacctgtgactccttactcaatgatttgatttggctctacgtccccacccaaatctcaccttgaattgtaataatccccacgtattgtgggagggacctgc

SEQ ID NO: 7505 - DNA, 122 bp, Homo sapiens
  misc_feature (61)..(62): /note="This region represents a CpG dinucleotide"
  misc_feature (61)..(61): /note="Nucleotide may be methylated to form 5-methylcytosine"
aaatcactgaatccaacaactttatttcaaaggcaggtaaactactgtccagacaggtgacgtgactcacccatgatgatggcctgggattagaagccaagtcttccattcctggccctgag

SEQ ID NO: 7506 - DNA, 122 bp, Homo sapiens
  misc_feature (61)..(62): /note="This region represents a CpG dinucleotide"
  misc_feature (61)..(61): /note="Nucleotide may be methylated to form 5-methylcytosine"
tatgctgaagtcctaaattcactggagttctgaatcaactcaccctgggattgactgttacgtgaaatagtaaatgtcattttgcttaagtcatttttagttgtgttttcagttacttgtag

SEQ ID NO: 7507 - DNA, 122 bp, Homo sapiens
  misc_feature (61)..(62): /note="This region represents a CpG dinucleotide"
  misc_feature (61)..(61): /note="Nucleotide may be methylated to form 5-methylcytosine"
ctgtgagttatgctgtcattgtgtctaataaatcctcctccaaagggcccagcctggcctcggtaatacaggtgtttctgtttctgtccactcacctctgagtcaaagcattaaatgcagag

SEQ ID NO: 7508 - DNA, 122 bp, Homo sapiens
  misc_feature (61)..(62): /note="This region represents a CpG dinucleotide"
  misc_feature (61)..(61): /note="Nucleotide may be methylated to form 5-methylcytosine"
ctcatggctcttgtcaggacacatagtatcccactgatccaaagatctgacctgtatgtgcgtgtcctgcctggcatccaagctgccaggatttcatgctccccaagctgaggttacaccac

SEQ ID NO: 7509 - DNA, 122 bp, Homo sapiens
  misc_feature (61)..(62): /note="This region represents a CpG dinucleotide"
  misc_feature (61)..(61): /note="Nucleotide may be methylated to form 5-methylcytosine"
tgagccgtgtagatgtacagctgaaaaaacgctttctaaaatcattaccagtccaggcaccggtggcttatgcctgtaatcccagtgcaggaggatcagttgaggccaggagcctgaggcca

SEQ ID NO: 7510 - DNA, 122 bp, Homo sapiens
  misc_feature (61)..(62): /note="This region represents a CpG dinucleotide"
  misc_feature (61)..(61): /note="Nucleotide may be methylated to form 5-methylcytosine"
atttccattgtgtagatcggaaaacagtctccaagggattaagtatcttacccaataattcgtagccaacaagtattaaaggcagacctcagactcaggtctgtctggttccagggctttgt

SEQ ID NO: 7511 - DNA, 122 bp, Homo sapiens
  misc_feature (61)..(62): /note="This region represents a CpG dinucleotide"
  misc_feature (61)..(61): /note="Nucleotide may be methylated to form 5-methylcytosine"
atcagagtggtttgtccactagatggtggccatctacaccatccctggccctctcctatccggaaacctttattctgagcacccagtaacataggtggaagttgaagttttgtttttcaggt

SEQ ID NO: 7512 - DNA, 122 bp, Homo sapiens
  misc_feature (61)..(62): /note="This region represents a CpG dinucleotide"
  misc_feature (61)..(61): /note="Nucleotide may be methylated to form 5-methylcytosine"
tggaagtagcagaagcctctgtgagccatccttcatgcagaactagtcaggagcagctcccgctcagccaagagagtgaagcatgcccatcgcccagctcagccaggtaagtactagggaaa

SEQ ID NO: 7513 - DNA, 122 bp, Homo sapiens
  misc_feature (61)..(62): /note="This region represents a CpG dinucleotide"
  misc_feature (61)..(61): /note="Nucleotide may be methylated to form 5-methylcytosine"
tttgggatgacctcaaacacttgtgcttggcgagtttatgtctgggtgcctggacacatgcgggaataaacacacacacacacacacacacacacacacacacacacacacacacacacgag

SEQ ID NO: 7514 - DNA, 122 bp, Homo sapiens
  misc_feature (61)..(62): /note="This region represents a CpG dinucleotide"
  misc_feature (61)..(61): /note="Nucleotide may be methylated to form 5-methylcytosine"
aatgtactgagggcacagtgcctggttgtcagtggggattaaacacacagtcaatcccagcgctgggacaatgcaagggagtccagtaacccctgagctgtgtattagagcaaagactaaat

SEQ ID NO: 7515 - DNA, 122 bp, Homo sapiens
  misc_feature (61)..(62): /note="This region represents a CpG dinucleotide"
  misc_feature (61)..(61): /note="Nucleotide may be methylated to form 5-methylcytosine"
cttcagctattccatggtgtatttatcatctcctcacataacagattaggaacttgagctcggaggaacttccggagtttggctccaggctccttcactcactccccgaatgaccttgagta

SEQ ID NO: 7516 - DNA, 122 bp, Homo sapiens
  misc_feature (61)..(62): /note="This region represents a CpG dinucleotide"
  misc_feature (61)..(61): /note="Nucleotide may be methylated to form 5-methylcytosine"
tccggcctccaatcaataaactttcacttctccaaccttacgcaatgcccttctcacccccgtcaagtcctgtaatactgccccagcttctgtgagtacatgttggctaggtcctgcaactt

SEQ ID NO: 7517 - DNA, 122 bp, Homo sapiens
  misc_feature (61)..(62): /note="This region represents a CpG dinucleotide"
  misc_feature (61)..(61): /note="Nucleotide may be methylated to form 5-methylcytosine"
agacagcatttcacatgtgttgtcacaacttgctgttcaagggattaagtgtgtcctgtgcgattaattgggagaagactctgggaacttgcaccatgtttcctctggattttgccccatga

SEQ ID NO: 7518 - DNA, 122 bp, Homo sapiens
  misc_feature (61)..(62): /note="This region represents a CpG dinucleotide"
  misc_feature (61)..(61): /note="Nucleotide may be methylated to form 5-methylcytosine"
tagcccaggagcaatgggccataccatatagcctaggtgtggagtagactagaccatccacgtttgtgtaattacaatctatgattttgtaaaatgatgaaattgcctaatgaagcatttct

SEQ ID NO: 7519 - DNA, 122 bp, Homo sapiens
  misc_feature (61)..(62): /note="This region represents a CpG dinucleotide"
  misc_feature (61)..(61): /note="Nucleotide may be methylated to form 5-methylcytosine"
ttcagaaaccaaagttacacagctgtgaagtcaagattctaactcagtttttttgcttcgcggtataagctttgaatcaccttgcagtacttaaagctgcagcttcaagtgaatcatgataa

SEQ ID NO: 7520 - DNA, 122 bp, Homo sapiens
  misc_feature (61)..(62): /note="This region represents a CpG dinucleotide"
  misc_feature (61)..(61): /note="Nucleotide may be methylated to form 5-methylcytosine"
aaaccataaacttatttatctgaatgactttctgtttagggatactaagaaaagaagttacgtgaggtaatcatgctggtgctgaggttaagtttgtgcagtttcacttcttccttaatagt

SEQ ID NO: 7521 - DNA, 122 bp, Homo sapiens
  misc_feature (61)..(62): /note="This region represents a CpG dinucleotide"
  misc_feature (61)..(61): /note="Nucleotide may be methylated to form 5-methylcytosine"
agaatttaccctgttttcttcatgtgtccatctattaatgacagctcttaccccagcagacgataatatttaataatgattgttccaggactgttacgagcatgtcgtattcactttctttg

SEQ ID NO: 7522 - DNA, 122 bp, Homo sapiens
  misc_feature (61)..(62): /note="This region represents a CpG dinucleotide"
  misc_feature (61)..(61): /note="Nucleotide may be methylated to form 5-methylcytosine"
gaaatgatgatgtttgcataacaacaaaattgcccagtgaagcaattttcacaatgtgtccgtgtagttaagtgacacatgactgtggctcagcacttctggtcatctagagagtaggacag

SEQ ID NO: 7523 - DNA, 122 bp, Homo sapiens
  misc_feature (61)..(62): /note="This region represents a CpG dinucleotide"
  misc_feature (61)..(61): /note="Nucleotide may be methylated to form 5-methylcytosine"
actatgcttcacatcaaaatattcccaaataatagtatagcatcactacactttttacctcgtgtgtattgttcaactctataatctagcttgcttcctcatccctccactgacactatgct

SEQ ID NO: 7524 - DNA, 122 bp, Homo sapiens
  misc_feature (61)..(62): /note="This region represents a CpG dinucleotide"
  misc_feature (61)..(61): /note="Nucleotide may be methylated to form 5-methylcytosine"
tagttgagacgcacagagttctgggccatctcggcctcagggtggcggctagtgaggtggcgcagagcgcagacggcaggctccgtgatgtcgtccttgtcaccagcacgcaggatggcatg

SEQ ID NO: 7525 - DNA, 122 bp, Homo sapiens
  misc_feature (61)..(62): /note="This region represents a CpG dinucleotide"
  misc_feature (61)..(61): /note="Nucleotide may be methylated to form 5-methylcytosine"
ggtaagaagtaaaaccttctgttaaaacattcctcataaacgtcatcccttatactcatccgttagcttatatggaagtcttgtgaatggtttgaaattctaaaaatggttttctgttctag

SEQ ID NO: 7526 - DNA, 122 bp, Homo sapiens
  misc_feature (61)..(62): /note="This region represents a CpG dinucleotide"
  misc_feature (61)..(61): /note="Nucleotide may be methylated to form 5-methylcytosine"
tttactgcaataccatggtctcagtgaattgttttgtctgtgccgcaagctggaagcacccgttgggtgattgtacaaggacagtttcagaagctctccacttcctttctcccgcagccttg

SEQ ID NO: 7527 - DNA, 122 bp, Homo sapiens
  misc_feature (61)..(62): /note="This region represents a CpG dinucleotide"
  misc_feature (61)..(61): /note="Nucleotide may be methylated to form 5-methylcytosine"
tcacacaccagcctagccccagaggacagggtcttgagcctgtctctgaagcactgctcccgtctccatcctgactcatcctgagacacagttactgaatgtttactgtgggccaggctctc

SEQ ID NO: 7528 - DNA, 122 bp, Homo sapiens
  misc_feature (61)..(62): /note="This region represents a CpG dinucleotide"
  misc_feature (61)..(61): /note="Nucleotide may be methylated to form 5-methylcytosine"
aatccaaaggtaggtctctagtgagggacagtagggctctagtcattccatcgatgtgatcgctgggcaaagggagggtggaggaccttgggctgacctcagggatggtgccagagagaacg

SEQ ID NO: 7529 - DNA, 122 bp, Homo sapiens
  misc_feature (61)..(62): /note="This region represents a CpG dinucleotide"
  misc_feature (61)..(61): /note="Nucleotide may be methylated to form 5-methylcytosine"
gcccttaggcagattcacacagcattcttgcctttccctgggggactgacttcaaatgtccgtcacattcctttcctatagcatataggccctgggtcttgggggtaatggcatggggatcc

SEQ ID NO: 7530 - DNA, 122 bp, Homo sapiens
  misc_feature (61)..(62): /note="This region represents a CpG dinucleotide"
  misc_feature (61)..(61): /note="Nucleotide may be methylated to form 5-methylcytosine"
catctggggaaaggcagaggctgtaagcagcctagcggacatggggcaacctagagggagcggaacctggtcatgtttacaggaaagggctcagtccctgggtgtgtcccaacagacctgac

SEQ ID NO: 7531 - DNA, 122 bp, Homo sapiens
  misc_feature (61)..(62): /note="This region represents a CpG dinucleotide"
  misc_feature (61)..(61): /note="Nucleotide may be methylated to form 5-methylcytosine"
acttcctgtgttggtttcctgtgaagtcagaaaatatttcccaatctgcttgacggtaaacgaatatgctgacattctggtttttcatatgtgagaggtagggaagcctaacattaagtagc

SEQ ID NO: 7532 - DNA, 122 bp, Homo sapiens
  misc_feature (61)..(62): /note="This region represents a CpG dinucleotide"
  misc_feature (61)..(61): /note="Nucleotide may be methylated to form 5-methylcytosine"
agccagagagtggcctctgtcattgctcattcagttcctgagtcaggccttattgggcaacgtggttgaatttcatgactgtgtttcctaaactgaacaatctagttagcatgcacctcctc

SEQ ID NO: 7533 - DNA, 122 bp, Homo sapiens
  misc_feature (61)..(62): /note="This region represents a CpG dinucleotide"
  misc_feature (61)..(61): /note="Nucleotide may be methylated to form 5-methylcytosine"
ttttcaaacctgtgaccttgtgcaagttcctcaaccttgccaagtctcaagagttttattcgtaaaggacaatggtatctaccacattaaggttactgtaaataataaattgtattttagtt

SEQ ID NO: 7534 - DNA, 122 bp, Homo sapiens
  misc_feature (61)..(62): /note="This region represents a CpG dinucleotide"
  misc_feature (61)..(61): /note="Nucleotide may be methylated to form 5-methylcytosine"
tggacagaaggctgtgactaactttattggcatctctctagagacataagtaggcttcaccgccaatttgcctaaggtgttcagcaggactattgaaggcctggcagctgccggaggagagc

SEQ ID NO: 7535 - DNA, 122 bp, Homo sapiens
  misc_feature (61)..(62): /note="This region represents a CpG dinucleotide"
  misc_feature (61)..(61): /note="Nucleotide may be methylated to form 5-methylcytosine"
ggaatccattcttttaagccagggtttaaaactcttcaagcaagtcatctgcaaaggtaccgcttctaccattttaaagataggattatgttccctaggacaactggatgagccctaggaac

SEQ ID NO: 7536 - DNA, 122 bp, Homo sapiens
  misc_feature (61)..(62): /note="This region represents a CpG dinucleotide"
  misc_feature (61)..(61): /note="Nucleotide may be methylated to form 5-methylcytosine"
cgtcaatgttgttgctgactacgatgaggactgactccagccagggcacctggaacctgccgcgtgggtggagaaagggtgggggccacccctcgggtcttcctgattcaccctggtgtccc

SEQ ID NO: 7537 - DNA, 122 bp, Homo sapiens
  misc_feature (61)..(62): /note="This region represents a CpG dinucleotide"
  misc_feature (61)..(61): /note="Nucleotide may be methylated to form 5-methylcytosine"
agacctaacttctttcaaaccaggccatgaatcagacaggacttccaggccagaggagcacgtcaatggaggactttcaaagagaaagcactgataatagtggcgttaaagaaactggccag

SEQ ID NO: 7538 - DNA, 122 bp, Homo sapiens
  misc_feature (61)..(62): /note="This region represents a CpG dinucleotide"
  misc_feature (61)..(61): /note="Nucleotide may be methylated to form 5-methylcytosine"
agatacagtgaggctctggaatcagactactggactccaaactcttgctgactgtgtgatcgtggataagttaggtgacttcgctggcctcttcgtccctttataaaacaggaataatgctt

SEQ ID NO: 7539 - DNA, 122 bp, Homo sapiens
  misc_feature (61)..(62): /note="This region represents a CpG dinucleotide"
  misc_feature (61)..(61): /note="Nucleotide may be methylated to form 5-methylcytosine"
tgactcatctctgggacaaaacaccaggcccaagatctggcacaaagtaaatgctcagtgcgtttgttgatactgaacctccacttggtcacttctaatgatggggagctcactttctccca

SEQ ID NO: 7540 - DNA, 122 bp, Homo sapiens
  misc_feature (61)..(62): /note="This region represents a CpG dinucleotide"
  misc_feature (61)..(61): /note="Nucleotide may be methylated to form 5-methylcytosine"
agttcgctgccagaaattcaggtggtaacctcagtcttctggcaaacttccaagagcatgcgattaccagtgatgctcctaaaatgttccttgtaagttctgcttttcctaggctgtgccca

SEQ ID NO: 7541 - DNA, 122 bp, Homo sapiens
  misc_feature (61)..(62): /note="This region represents a CpG dinucleotide"
  misc_feature (61)..(61): /note="Nucleotide may be methylated to form 5-methylcytosine"
aggaagcaaccaccatcctaggctagaggagcagaaggggtatagtgtcacctatagccacggtccctgcccacctggagctgctggagtcccactgctgctactcctatttggaaccactg

SEQ ID NO: 7542 - DNA, 122 bp, Homo sapiens
  misc_feature (61)..(62): /note="This region represents a CpG dinucleotide"
  misc_feature (61)..(61): /note="Nucleotide may be methylated to form 5-methylcytosine"
ttttgtgtaatactcttttgagccactgatagccagcagattggatttttcagagcctttcgttccaaagagatctaatattaagcacacagcttagtaaatcccttcaacaagttctcatg

SEQ ID NO: 7543 - DNA, 122 bp, Homo sapiens
  misc_feature (61)..(62): /note="This region represents a CpG dinucleotide"
  misc_feature (61)..(61): /note="Nucleotide may be methylated to form 5-methylcytosine"
tgtgtcattacttgtcatgaattactcctgacattcttagcaacataaatgagtcagttacgtaagatgtctggcatagcctgatagtccttggaatggagggtctatctctgttgcagaca

SEQ ID NO: 7544 - DNA, 122 bp, Homo sapiens
  misc_feature (61)..(62): /note="This region represents a CpG dinucleotide"
  misc_feature (61)..(61): /note="Nucleotide may be methylated to form 5-methylcytosine"
cagaggacgcaattccacctcaaaggcgcagggtggaggaggatggaagagcagcaggcacggtcagtgttggtatcttgggatctctgaaatgttgactgttgactttcttttctccttcc

SEQ ID NO: 7545 - DNA, 122 bp, Homo sapiens
  misc_feature (61)..(62): /note="This region represents a CpG dinucleotide"
  misc_feature (61)..(61): /note="Nucleotide may be methylated to form 5-methylcytosine"
tgcttaggtttgaggtttctactacatcatttcccttttctcttaacaataccagcttctcggccgggcatggtggctcacgcctgttaatcccagcactttgggaggccaaggcgggcgga

SEQ ID NO: 7546 - DNA, 122 bp, Homo sapiens
  misc_feature (61)..(62): /note="This region represents a CpG dinucleotide"
  misc_feature (61)..(61): /note="Nucleotide may be methylated to form 5-methylcytosine"
acttgcaaaacctgctagggacaccacagctcacatctggagggggttcccctttgcaaacggaaaaggcaatatgattttttttttcattttaggatttgtgtgaacctaagttcggtacc

SEQ ID NO: 7547 - DNA, 122 bp, Homo sapiens
  misc_feature (61)..(62): /note="This region represents a CpG dinucleotide"
  misc_feature (61)..(61): /note="Nucleotide may be methylated to form 5-methylcytosine"
atattctctgagtgtcaaaatggatatgactcagctgtgatccaccaaaagatgaggcagcgtgttaattcaaccctcactctctctatcagcatatggcaaggtttatggctgccaaaaaa

SEQ ID NO: 7548 - DNA, 122 bp, Homo sapiens
  misc_feature (61)..(62): /note="This region represents a CpG dinucleotide"
  misc_feature (61)..(61): /note="Nucleotide may be methylated to form 5-methylcytosine"
gagattctggcctctagtgattctcctgccttggcctcctgactcactggggattatagacgtgagtcaccgtgcccggcaacactttttaaatggatacagtctaggtagaagaatcaaga

SEQ ID NO: 7549 - DNA, 122 bp, Homo sapiens
  misc_feature (61)..(62): /note="This region represents a CpG dinucleotide"
  misc_feature (61)..(61): /note="Nucleotide may be methylated to form 5-methylcytosine"
tatccctagcactggggtaaatcctgactggtttcagctagtcacatgggtcccattctccgtaggtgatgactgtaggggtgagccagagacctagttctggtcagtgagattagtgggag

SEQ ID NO: 7550 - DNA, 122 bp, Homo sapiens
  misc_feature (61)..(62): /note="This region represents a CpG dinucleotide"
  misc_feature (61)..(61): /note="Nucleotide may be methylated to form 5-methylcytosine"
aagtagagtgagtcaccctcagcacctctgtaagggctcagagatgctgtgatgtggcgtcgtgacagtgcattccaggaagggggatggatggtgaaggggataagatggcagcccacatg

SEQ ID NO: 7551 - DNA, 122 bp, Homo sapiens
  misc_feature (61)..(62): /note="This region represents a CpG dinucleotide"
  misc_feature (61)..(61): /note="Nucleotide may be methylated to form 5-methylcytosine"
tactaactcactgggaaacattcctgattcggcctaattgccttgcctttgacatcctaccggtcaaaccagtcagtgacctgaattaagcccagctgtttggcccacattaccatgctaat

SEQ ID NO: 7552 - DNA, 122 bp, Homo sapiens
  misc_feature (61)..(62): /note="This region represents a CpG dinucleotide"
  misc_feature (61)..(61): /note="Nucleotide may be methylated to form 5-methylcytosine"
tccataatcatgtcatctgtcattccaaatgtcacatgcaggatgtttcgaaatgcattacgatccagtccaacaaccagaccttgcctctctactcctcccaccaagtcataaaaaagctt

SEQ ID NO: 7553 - DNA, 122 bp, Homo sapiens
  misc_feature (61)..(62): /note="This region represents a CpG dinucleotide"
  misc_feature (61)..(61): /note="Nucleotide may be methylated to form 5-methylcytosine"
gctttagtacttatagtgctcatgctactgtcagctactcacaatagactgtgagggcctcgtggacctacatggcctagtgcaaagtaattgcgtaatctgtattacaaaggcagtatgag

SEQ ID NO: 7554 - DNA, 122 bp, Homo sapiens
  misc_feature (61)..(62): /note="This region represents a CpG dinucleotide"
  misc_feature (61)..(61): /note="Nucleotide may be methylated to form 5-methylcytosine"
gaaaagcgctcatttgtcaggcttctgtggaacttgattttctgtgcctgattgtcactacgtcactctgctctgagtcagtcatcaggagtcccctgactgcccagtgcccagtgatgggc

SEQ ID NO: 7555 - DNA, 122 bp, Homo sapiens
  misc_feature (61)..(62): /note="This region represents a CpG dinucleotide"
  misc_feature (61)..(61): /note="Nucleotide may be methylated to form 5-methylcytosine"
tcattcaaaggtgtgcttaaagccatctgtgggagacctcagctgcctggatcttgagtacgtgtgattaactgccttgtgtattagcaacccctgggaagatcccactgatgaacagggtg

SEQ ID NO: 7556 - DNA, 122 bp, Homo sapiens
  misc_feature (61)..(62): /note="This region represents a CpG dinucleotide"
  misc_feature (61)..(61): /note="Nucleotide may be methylated to form 5-methylcytosine"
tattttccactactaagtggcagggctgcattcaaacccaggcagtgttttttcagtgctcgtaactattatgcaacacacaacaaaaccttcaactatgaacacctctatcaccagagaac

SEQ ID NO: 7557 - DNA, 122 bp, Homo sapiens
  misc_feature (61)..(62): /note="This region represents a CpG dinucleotide"
  misc_feature (61)..(61): /note="Nucleotide may be methylated to form 5-methylcytosine"
tagaggtgtgagccacggcacctgccccaatcaacaggtatttattgagcatctactatacgccaggcactggtaaagactgtgagaatgcagtattgaacaagacaaagctctctgttctg

SEQ ID NO: 7558 - DNA, 122 bp, Homo sapiens
  misc_feature (61)..(62): /note="This region represents a CpG dinucleotide"
  misc_feature (61)..(61): /note="Nucleotide may be methylated to form 5-methylcytosine"
gtggttctgagacagttacaggagtgctgtgcgtcacaggaggggccggaggcgctgctacggttcacagaggagagaaaggacaagtcatcatcacatcactgcatgggatttcagagcgt

SEQ ID NO: 7559 - DNA, 122 bp, Homo sapiens
  misc_feature (61)..(62): /note="This region represents a CpG dinucleotide"
  misc_feature (61)..(61): /note="Nucleotide may be methylated to form 5-methylcytosine"
aggttatatgtttcggttactgtgctctcactcaaaactggcaaacagattttttgtttacgcaaattaaactcaatcttggcaacctgctccatggatgctggtttgggaggactaatgtc

SEQ ID NO: 7560 - DNA, 122 bp, Homo sapiens
  misc_feature (61)..(62): /note="This region represents a CpG dinucleotide"
  misc_feature (61)..(61): /note="Nucleotide may be methylated to form 5-methylcytosine"
tgaaagagagaaacaggcactaaacactaagctttgtgtgaagctgtgactaaggaactgcggttagctgtcttgttccccaagtgagctcataacctgccatgggcaagttttatatcagg

SEQ ID NO: 7561 - DNA, 122 bp, Homo sapiens
  misc_feature (61)..(62): /note="This region represents a CpG dinucleotide"
  misc_feature (61)..(61): /note="Nucleotide may be methylated to form 5-methylcytosine"
gccagtgtagtgaaaccataaaagatgcagacatttccaaacacaagctgacactgggaccgagaaccacctctttcctacagcacccaaccactctcccaagtctgggcatcagacattgc

SEQ ID NO: 7562 - DNA, 122 bp, Homo sapiens
  misc_feature (61)..(62): /note="This region represents a CpG dinucleotide"
  misc_feature (61)..(61): /note="Nucleotide may be methylated to form 5-methylcytosine"
ctggggagggtgacctgctctccttagtctactgattcaaatgtgaatcttgtttaagaacgccttcagagacacacccagaataatgtgccaccaaatgtttgtgtaccctgtggctcagc

SEQ ID NO: 7563 - DNA, 122 bp, Homo sapiens
  misc_feature (61)..(62): /note="This region represents a CpG dinucleotide"
  misc_feature (61)..(61): /note="Nucleotide may be methylated to form 5-methylcytosine"
ggccacagacagtggggcgtgggcttccagagggctccacccaaaatagagatttacaaacgcaggtgacttgggagtgacactggcatctgggaatggatcctgtgcttgggccctcacga

SEQ ID NO: 7564 - DNA, 122 bp, Homo sapiens
  misc_feature (61)..(62): /note="This region represents a CpG dinucleotide"
  misc_feature (61)..(61): /note="Nucleotide may be methylated to form 5-methylcytosine"
gaattatttggtgccattgagttccttattgtttccctctgacctagatttctgggtgtgcgccagtaacacgactgtgattgttgctgctttataacattgtctgtggtcagtccaaacaa

SEQ ID NO: 7565 - DNA, 122 bp, Homo sapiens
  misc_feature (61)..(62): /note="This region represents a CpG dinucleotide"
  misc_feature (61)..(61): /note="Nucleotide may be methylated to form 5-methylcytosine"
ttcgcttctttcctaatagacaagagtttaagtgccgtaatcatagcaactgtgggcaaacgagggaagttagaaagaagccgctctaggaaacaagtacaaagcagaatgcatacccactc

SEQ ID NO: 7566 - DNA, 122 bp, Homo sapiens
  misc_feature (61)..(62): /note="This region represents a CpG dinucleotide"
  misc_feature (61)..(61): /note="Nucleotide may be methylated to form 5-methylcytosine"
ttcactatccagtaagtttttcagcacttactgaatcattcccatggactaacttcagcccgccttccagtgaatttctcagctgcctactacatactttttgtgaaccagttacaactaaa

SEQ ID NO: 7567 - DNA, 122 bp, Homo sapiens
  misc_feature (61)..(62): /note="This region represents a CpG dinucleotide"
  misc_feature (61)..(61): /note="Nucleotide may be methylated to form 5-methylcytosine"
aactcaactcttactcctccagatctgctccagccctgatggctgcttgtgttgtcaaaacgaaacattgctgtctggtgaaggagaacacccacatccttgctgagtcagcaggctcaggg

SEQ ID NO: 7568 - DNA, 122 bp, Homo sapiens
  misc_feature (61)..(62): /note="This region represents a CpG dinucleotide"
  misc_feature (61)..(61): /note="Nucleotide may be methylated to form 5-methylcytosine"
gggctgatgctggacatgacaacaaagagtctttctctgctgcatccagatgttacgaggcgattaaacttgggtttaactgacccaggagaatcaactggctgctagagcagccctgcttc

SEQ ID NO: 7569 - DNA, 122 bp, Homo sapiens
  misc_feature (61)..(62): /note="This region represents a CpG dinucleotide"
  misc_feature (61)..(61): /note="Nucleotide may be methylated to form 5-methylcytosine"
aacactgagacagagggactaataacttgcccaagggcacacagctcacaaatagcaaaacggtggtcatgagctgaaagacttatgtgtttctgctctatgtgataatatagggtggtgca

SEQ ID NO: 7570 - DNA, 122 bp, Homo sapiens
  misc_feature (61)..(62): /note="This region represents a CpG dinucleotide"
  misc_feature (61)..(61): /note="Nucleotide may be methylated to form 5-methylcytosine"
gtgaaaggcacattgtcatgatggtttttctttctgtggtttatccttatttcctggcttcgcccacaagcacagattctcagcctcttgcctttgtctactttcttttgaacatttatttg

SEQ ID NO: 7571 - DNA, 122 bp, Homo sapiens
  misc_feature (61)..(62): /note="This region represents a CpG dinucleotide"
  misc_feature (61)..(61): /note="Nucleotide may be methylated to form 5-methylcytosine"
ggcaagaacgatgccatcggcaaagtctttgtgggctacaacagcaccggcgcggagctgcgacactggtcagacatgctggccaaccccaggcgacctattgcccagtggcacaccctgca

SEQ ID NO: 7572 - DNA, 122 bp, Homo sapiens
  misc_feature (61)..(62): /note="This region represents a CpG dinucleotide"
  misc_feature (61)..(61): /note="Nucleotide may be methylated to form 5-methylcytosine"
gacttgtcagagttggttggcagggactttttctcctgagttagcacatagagatatgaacgggcagagataacacaaattagcaaagatacaagcatatctgcagaggaacagatttcctt

SEQ ID NO: 7573 - DNA, 122 bp, Homo sapiens
  misc_feature (61)..(62): /note="This region represents a CpG dinucleotide"
  misc_feature (61)..(61): /note="Nucleotide may be methylated to form 5-methylcytosine"
ccaaaaataaaaataaaacctgtacaaattagagcatttatttttcttccatgtagaaaacgagtctggtcagtccacgccttgtgtggcattccatgatgtcatcaggaacccagcctctt

SEQ ID NO: 7574 - DNA, 122 bp, Homo sapiens
  misc_feature (61)..(62): /note="This region represents a CpG dinucleotide"
  misc_feature (61)..(61): /note="Nucleotide may be methylated to form 5-methylcytosine"
taaatttttgttgtgtggccccggaatctggggtagactctgtgactcacattactgtcacgtttccttgtctttcaagtgagaaagctagcagttaaagtgactcctagtagaagtccatc

SEQ ID NO: 7575 - DNA, 122 bp, Homo sapiens
  misc_feature (61)..(62): /note="This region represents a CpG dinucleotide"
  misc_feature (61)..(61): /note="Nucleotide may be methylated to form 5-methylcytosine"
cctcgcttcatatcaccttgaacacaagttgaaaacctaaacctttgcagcatgtgcttacgtagaaacttatgcaattcaaacagaagtcatgcagctgggacgggctcagattgcctgat

SEQ ID NO: 7576 - DNA, 122 bp, Homo sapiens
  misc_feature (61)..(62): /note="This region represents a CpG dinucleotide"
  misc_feature (61)..(61): /note="Nucleotide may be methylated to form 5-methylcytosine"
gaccttctatttggaaaccagaacaaacaaggaaacaaagaaacaaataattctgctttccgataggtgctggttttacttccgctggctgagctgttgttcctgaggtcagaccccagcca

SEQ ID NO: 7577 - DNA, 122 bp, Homo sapiens
  misc_feature (61)..(62): /note="This region represents a CpG dinucleotide"
  misc_feature (61)..(61): /note="Nucleotide may be methylated to form 5-methylcytosine"
tattgtgcgcgagttgatagtgtgcacgagttgataatgcgtgcgagttgatagtgtgtgcgaattgatagggtgcatgagtcaggctactctgattactggctttgcctgcactgcctgtt

SEQ ID NO: 7578 - DNA, 122 bp, Homo sapiens
  misc_feature (61)..(62): /note="This region represents a CpG dinucleotide"
  misc_feature (61)..(61): /note="Nucleotide may be methylated to form 5-methylcytosine"
gccagctccaaatgtttttctccctgtcttcagcttacattctcctacttcttatatcaacgtcgtatcaagcattgagaaatgcttccatttgagccagtctggctgcttgctactcagga

SEQ ID NO: 7579 - DNA, 122 bp, Homo sapiens
  misc_feature (61)..(62): /note="This region represents a CpG dinucleotide"
  misc_feature (61)..(61): /note="Nucleotide may be methylated to form 5-methylcytosine"
tctttacattcccactaggagaaatttcttaaaagccagcagacctaaaccagtcaaacacggtaacttgtcaaacatgtgctgtgttaaatggcagcaagctgctaggaagttggtatcaa

SEQ ID NO: 7580 - DNA, 122 bp, Homo sapiens
  misc_feature (61)..(62): /note="This region represents a CpG dinucleotide"
  misc_feature (61)..(61): /note="Nucleotide may be methylated to form 5-methylcytosine"
ctctgggacatgagatatgggtcaagtgagtgtgtacctggcccgcccaggtacaggtgacggtaaacaggccaagtctgggtgtacctgtggacaggagagtccaggctaggtgattagag

SEQ ID NO: 7581 - DNA, 122 bp, Homo sapiens
  misc_feature (61)..(62): /note="This region represents a CpG dinucleotide"
  misc_feature (61)..(61): /note="Nucleotide may be methylated to form 5-methylcytosine"
tttgtaatttcagggcttaagcactattatcctaatccaagttcacagtcctgttgttgtcgaggagggttcaaaatcatttggagataatcaagctcagacagcttaggataggtgagaag

SEQ ID NO: 7582 - DNA, 122 bp, Homo sapiens
  misc_feature (61)..(62): /note="This region represents a CpG dinucleotide"
  misc_feature (61)..(61): /note="Nucleotide may be methylated to form 5-methylcytosine"
atatcatgtggcaaagaggagatgtcattagaccataagcaaaaaaaaaaaagcattgcacgggcattaacacaacatttaagtgtcctcctcaaggagccacaggcacagggagtggtgca

SEQ ID NO: 7583 - DNA, 122 bp, Homo sapiens
  misc_feature (61)..(62): /note="This region represents a CpG dinucleotide"
  misc_feature (61)..(61): /note="Nucleotide may be methylated to form 5-methylcytosine"
tgccctcctgtcccctccccgcaggggcacagtggagacgcaggggctctgggcccgtaccgccaactcgggtcacacctgaacgctgctgccagccgatgccccagccctgcacgccaccc

SEQ ID NO: 7584 - DNA, 122 bp, Homo sapiens
  misc_feature (61)..(62): /note="This region represents a CpG dinucleotide"
  misc_feature (61)..(61): /note="Nucleotide may be methylated to form 5-methylcytosine"
gcaggtggagttttctttgtagctgggcccggaggtagcggaggtcttgctgatcaagcccgtgagccaggcccaggtagagggtaaggaggaaagcaaggaggagacggtccgtgcccagg

SEQ ID NO: 7585 - DNA, 122 bp, Homo sapiens
  misc_feature (61)..(62): /note="This region represents a CpG dinucleotide"
  misc_feature (61)..(61): /note="Nucleotide may be methylated to form 5-methylcytosine"
taagagagagaaggtcaggcccttgtgagccagaagggatttgagagatgatgaaagctacgtatgttacccataacctaaggacttctggcaaggtggcctacctgagctggagtcatgcc

SEQ ID NO: 7586 - DNA, 122 bp, Homo sapiens
  misc_feature (61)..(62): /note="This region represents a CpG dinucleotide"
  misc_feature (61)..(61): /note="Nucleotide may be methylated to form 5-methylcytosine"
aataaaaggcgcttctgagaaaccttggcagagatggtcagagaggcacatttagtatgacgcagtacaagttagtgttgaagggtttaattcctcggagctctactttcctcatctgtaaa

SEQ ID NO: 7587 - DNA, 122 bp, Homo sapiens
  misc_feature (61)..(62): /note="This region represents a CpG dinucleotide"
  misc_feature (61)..(61): /note="Nucleotide may be methylated to form 5-methylcytosine"
tccttccaccctgaggcctggctttgtcctttgtctgcaacttgtcagggtttttccctacgcctgggctccagatggctcttggctcacccagggccttttgctattgtgtgactcacaga

SEQ ID NO: 7588 - DNA, 122 bp, Homo sapiens
  misc_feature (61)..(62): /note="This region represents a CpG dinucleotide"
  misc_feature (61)..(61): /note="Nucleotide may be methylated to form 5-methylcytosine"
cctggttcagggaggaacatgatgtgcttggtttgggatgcatcacactggaaacgcccacggaacctcaggagcagatgacagggagaggtcacaactgagatctcaatgttggtcaaagc

SEQ ID NO: 7589 - DNA, 122 bp, Homo sapiens
  misc_feature (61)..(62): /note="This region represents a CpG dinucleotide"
  misc_feature (61)..(61): /note="Nucleotide may be methylated to form 5-methylcytosine"
ccaggacgcagagcagtcagtatttaggtactgtttttcacattccttacatgggaatcacgtcaacaggattcaatttgtgactcaaccattaatactttgtgacactggctaatttattg

SEQ ID NO: 7590 - DNA, 122 bp, Homo sapiens
  misc_feature (61)..(62): /note="This region represents a CpG dinucleotide"
  misc_feature (61)..(61): /note="Nucleotide may be methylated to form 5-methylcytosine"
tcttcctaagaggggaaattccatgcccggggaagttctggaagaagagcattttttccccgcccttcagtgaactaggtcattgctgaagctggagaatatattttagcatccctgtgatg

SEQ ID NO: 7591 - DNA, 122 bp, Homo sapiens
  misc_feature (61)..(62): /note="This region represents a CpG dinucleotide"
  misc_feature (61)..(61): /note="Nucleotide may be methylated to form 5-methylcytosine"
ggaacttcatgcactccaatcttgctgagaaaaagtgaggctgaagagtcaggcaggatgcgataacaaagccttactaagacgcctgggatttagcctgcaggcaggcagtgggaaggcaa

SEQ ID NO: 7592 - DNA, 122 bp, Homo sapiens
  misc_feature (61)..(62): /note="This region represents a CpG dinucleotide"
  misc_feature (61)..(61): /note="Nucleotide may be methylated to form 5-methylcytosine"
cctatcactaatctggcccttgggaatagaagcatctattatgaatgggcccagaggaggcgtctcctaagtgaagctgccttcgacattctgctgagggttccaagtattcacacaagagc

SEQ ID NO: 7593 - DNA, 122 bp, Homo sapiens
  misc_feature (61)..(62): /note="This region represents a CpG dinucleotide"
  misc_feature (61)..(61): /note="Nucleotide may be methylated to form 5-methylcytosine"
cctgtgaaatgatcctgccctaggcagctgcgttcccagaggagtgtccacctgggagcacgccacaagcccagaggaacattctgatttcctaatggaaccagatgtcccagtttgggcaa

SEQ ID NO: 7594 - DNA, 122 bp, Homo sapiens
  misc_feature (61)..(62): /note="This region represents a CpG dinucleotide"
  misc_feature (61)..(61): /note="Nucleotide may be methylated to form 5-methylcytosine"
gagatttagattcagagaagcatgagtcacctcaccccagattctgcaggttcagataagcgatagtatcttgagcatcaaagtaagcaatgaaagggcttgaccagcttttagttgatccc

SEQ ID NO: 7595 - DNA, 122 bp, Homo sapiens
  misc_feature (61)..(62): /note="This region represents a CpG dinucleotide"
  misc_feature (61)..(61): /note="Nucleotide may be methylated to form 5-methylcytosine"
ttgtgacaagctggggacggaccaagaaggtggtgctgaggcagcactaatatgaattagcgttacaacaatgtcccagcccaagaagagagtgaatttacctttccttcacatttttgttc

SEQ ID NO: 7596 - DNA, 122 bp, Homo sapiens
  misc_feature (61)..(62): /note="This region represents a CpG dinucleotide"
  misc_feature (61)..(61): /note="Nucleotide may be methylated to form 5-methylcytosine"
tcaggccccaagagattaagtttctttcatcagcaaccatggcaagatctgtttgccttgcgcacttggtcttttacgcattatggacagctgaagttcatgcaggccttacggtgtgcttc

SEQ ID NO: 7597 - DNA, 122 bp, Homo sapiens
  misc_feature (61)..(62): /note="This region represents a CpG dinucleotide"
  misc_feature (61)..(61): /note="Nucleotide may be methylated to form 5-methylcytosine"
gcgccaggcccgggtccgctactaccaccaactgagccaacatgtgaccgtggacgtgttcggccggggcgggccggggcagccggtgcccgaaattgggctcctgcacacagtggcccgct

SEQ ID NO: 7598 - DNA, 122 bp, Homo sapiens
  misc_feature (61)..(62): /note="This region represents a CpG dinucleotide"
  misc_feature (61)..(61): /note="Nucleotide may be methylated to form 5-methylcytosine"
ataaaggcaaaactcacccttctggttctataatcctatccaaatggagtcttcatctaccgcatactatcctaactaatgctacaggattatcaggaatacagatataaagacactgcaag

SEQ ID NO: 7599 - DNA, 122 bp, Homo sapiens
  misc_feature (61)..(62): /note="This region represents a CpG dinucleotide"
  misc_feature (61)..(61): /note="Nucleotide may be methylated to form 5-methylcytosine"
aagagctctgaaattgtaaatgtatcaccccctccttcttcccccactccccacccctgccggcttttaaactatggcagtagaaaaataggtttcaactttctaggagcacatctctccta

SEQ ID NO: 7600 - DNA, 122 bp, Homo sapiens
  misc_feature (61)..(62): /note="This region represents a CpG dinucleotide"
  misc_feature (61)..(61): /note="Nucleotide may be methylated to form 5-methylcytosine"
aaaattgctgactaccttcgatagcttgcttaacccattggatctgcggtgacttctcttcgtgatgagctgttatgaagtgcatatgagatgatgcatggaatgcctggagcatagtgagg

SEQ ID NO: 7601 - DNA, 122 bp, Homo sapiens
  misc_feature (61)..(62): /note="This region represents a CpG dinucleotide"
  misc_feature (61)..(61): /note="Nucleotide may be methylated to form 5-methylcytosine"
tgacccgttggggaagtgactggaaggccggcagctgtttccagtctataaggactgacccgtcagggaagtgactggaaggcagacagcgtgtttcttagctcttgtttccatccacactt

SEQ ID NO: 7602 - DNA, 122 bp, Homo sapiens
  misc_feature (61)..(62): /note="This region represents a CpG dinucleotide"
  misc_feature (61)..(61): /note="Nucleotide may be methylated to form 5-methylcytosine"
tcttttttttttttttttgcttactatgtcttggggtttctccaggtggtagaggttgctcggaggtctgactcccagctggcttgaaagcagtgattgttcatgttttgggggatcgttga

SEQ ID NO: 7603 - DNA, 122 bp, Homo sapiens
  misc_feature (61)..(62): /note="This region represents a CpG dinucleotide"
  misc_feature (61)..(61): /note="Nucleotide may be methylated to form 5-methylcytosine"
tgtcctgacttcaatttcagaccctagaagtacttatatgtaaaaaattgtgtcagtccacgtaagaaaactactgtgggagtgtttacaaatgattatcttgtgcataagcttctaagatt

SEQ ID NO: 7604 - DNA, 122 bp, Homo sapiens
  misc_feature (61)..(62): /note="This region represents a CpG dinucleotide"
  misc_feature (61)..(61): /note="Nucleotide may be methylated to form 5-methylcytosine"
gtaagcttgtgcttggcttggagccactattgtctgtaaaaggtacaactacgctgctgacgctgtacatacatcttgcgctcatggctcatggccagagagagagtaaatccatgttgaaa

SEQ ID NO: 7605 - DNA, 122 bp, Homo sapiens
  misc_feature (61)..(62): /note="This region represents a CpG dinucleotide"
  misc_feature (61)..(61): /note="Nucleotide may be methylated to form 5-methylcytosine"
atgccagccacttctgcgaggtgaacagaccatcccaaaagatcctgagctggccgggcgcggtggctcacgcctgtaatcccagcactttgggaggccaagggggggcggatcacgaggtc

SEQ ID NO: 7606 - DNA, 122 bp, Homo sapiens
  misc_feature (61)..(62): /note="This region represents a CpG dinucleotide"
  misc_feature (61)..(61): /note="Nucleotide may be methylated to form 5-methylcytosine"
ctgatgtactcagagaaaagtctctaacaactctagtctagactagaggttctcaaagtgcggtccccagatgaacagtgcaaacttcacctgggaacttgttggaaatgtaaattcttgga

SEQ ID NO: 7607 - DNA, 122 bp, Homo sapiens
  misc_feature (61)..(62): /note="This region represents a CpG dinucleotide"
  misc_feature (61)..(61): /note="Nucleotide may be methylated to form 5-methylcytosine"
acacacagccacaggtctattcccacatatgtgtgtttgccaccggtttgccctctctaccgagtcacagaagaatattaaagtttgtgagccctttaaagccaaacaggcacatttttcct

SEQ ID NO: 7608 - DNA, 122 bp, Homo sapiens
  misc_feature (61)..(62): /note="This region represents a CpG dinucleotide"
  misc_feature (61)..(61): /note="Nucleotide may be methylated to form 5-methylcytosine"
tttgagactgagttcctcagggttgagagcactgctcattcaattttgtaatcccttccccgaggatgcattcaataatgttttgctgaactctttaatgaataaatgaaagcatgctgggg

SEQ ID NO: 7609 - DNA, 122 bp, Homo sapiens
  misc_feature (61)..(62): /note="This region represents a CpG dinucleotide"
  misc_feature (61)..(61): /note="Nucleotide may be methylated to form 5-methylcytosine"
agcacctgttgaactcatcactggggacgtgaaggactaatagacacttgctaatgtgaacgtacagtatgtgtgctcaggtgtgagcatgtatatgataataaaaagcactgagggatggt

SEQ ID NO: 7610 - DNA, 122 bp, Homo sapiens
  misc_feature (61)..(62): /note="This region represents a CpG dinucleotide"
  misc_feature (61)..(61): /note="Nucleotide may be methylated to form 5-methylcytosine"
agaatattaaagtttgtgagccctttaaagccaaacaggcacatttttccttctccccgacggacattttaatgtcactgcagtagctgaagtcttaggtgtcgttaacccacgtgcctacc

SEQ ID NO: 7611 - DNA, 122 bp, Homo sapiens
  misc_feature (61)..(62): /note="This region represents a CpG dinucleotide"
  misc_feature (61)..(61): /note="Nucleotide may be methylated to form 5-methylcytosine"
tatgccaccctcccctatggtggacagacaataaatgctgacaaaatgttgtgcaagttacgtgttcattgccaacaatcttgagacatggaaagctggtatctaatttttcattaaacaag

SEQ ID NO: 7612 - DNA, 122 bp, Homo sapiens
  misc_feature (61)..(62): /note="This region represents a CpG dinucleotide"
  misc_feature (61)..(61): /note="Nucleotide may be methylated to form 5-methylcytosine"
agggctttcctttgaatttctgactcacacttcctactagggcatagacatcaggtgtcccgcatatagtacatagggatatgaggcaatctagtgtagttagtgtcaagagcataggctct

SEQ ID NO: 7613 - DNA, 122 bp, Homo sapiens
  misc_feature (61)..(62): /note="This region represents a CpG dinucleotide"
  misc_feature (61)..(61): /note="Nucleotide may be methylated to form 5-methylcytosine"
cacctgaggctggacacagtgactcacgcctccgacctcagcacctgggagtcccggagacgatcactttagcacaagacctcagcagcgacctgggcaacacagtgagactctgtctctaa

SEQ ID NO: 7614 - DNA, 122 bp, Homo sapiens
  misc_feature (61)..(62): /note="This region represents a CpG dinucleotide"
  misc_feature (61)..(61): /note="Nucleotide may be methylated to form 5-methylcytosine"
gaggagagggagggtggaggcctggcagtttacaggggcctgggagtggttagactcaggcggtgaacatggtgtgatgatgttatggtgactcagtatgccatctatccatattgtatgga

SEQ ID NO: 7615 - DNA, 122 bp, Homo sapiens
  misc_feature (61)..(62): /note="This region represents a CpG dinucleotide"
  misc_feature (61)..(61): /note="Nucleotide may be methylated to form 5-methylcytosine"
ctgccgctgcctcttctctgcaggtacacttgctgaaggaccagttggctgctgaggctgcggcgcggctggaggcccaggctcgcgtgcatcagcttttgctgcagaacaaggacatgctc

SEQ ID NO: 7616 - DNA, 122 bp, Homo sapiens
  misc_feature (61)..(62): /note="This region represents a CpG dinucleotide"
  misc_feature (61)..(61): /note="Nucleotide may be methylated to form 5-methylcytosine"
tgaggtccgcactcggcgcagactgaagtgctccagaactaaccacctccgcagacgcaacggagccaggaggggcctcaggggcctccaaccgcatggctcttcccagctttcccggacac

SEQ ID NO: 7617 - DNA, 122 bp, Homo sapiens
  misc_feature (61)..(62): /note="This region represents a CpG dinucleotide"
  misc_feature (61)..(61): /note="Nucleotide may be methylated to form 5-methylcytosine"
attttttatgatgcagaattgtacagcatgtgcaacgcgatgcggatgtgttaacatcaccgtgagaaacttaacttttgaatatccttgttttgggaggtacacattttacaacttcagca

SEQ ID NO: 7618 - DNA, 122 bp, Homo sapiens
  misc_feature (61)..(62): /note="This region represents a CpG dinucleotide"
  misc_feature (61)..(61): /note="Nucleotide may be methylated to form 5-methylcytosine"
ctggtccaggagtactaacacaatctgaagaattatctacagccatagtccaatacttcacgttgtgatttgttttaaacaaaatcagaatgcctttaaaatgctaatttggaagataacta

SEQ ID NO: 7619 - DNA, 122 bp, Homo sapiens
  misc_feature (61)..(62): /note="This region represents a CpG dinucleotide"
  misc_feature (61)..(61): /note="Nucleotide may be methylated to form 5-methylcytosine"
gagaactagaaggcactcaagggcaaggtgaggacctacaagccaatggaaaaccctcttcgttacagggcaggggattagccaatgtaagtttcatcactagaaacatcctagtggacctt

SEQ ID NO: 7620 - DNA, 122 bp, Homo sapiens
  misc_feature (61)..(62): /note="This region represents a CpG dinucleotide"
  misc_feature (61)..(61): /note="Nucleotide may be methylated to form 5-methylcytosine"
gtcctccttaggcttgctgagcctccaagtactgcatggtaagtctggtgactgctatttcgtgttcactcctgtgcacagaaatatacaggtactggttttttctatggtggggggtccct

SEQ ID NO: 7621 - DNA, 122 bp, Homo sapiens
  misc_feature (61)..(62): /note="This region represents a CpG dinucleotide"
  misc_feature (61)..(61): /note="Nucleotide may be methylated to form 5-methylcytosine"
ttaagtgcagactccaggtggctcagccggcacctgatggtcagcagcacacatcagacacgcagctcaaccgtccagttcctccggatcttactgctggcacccatattgaggtggaagga

SEQ ID NO: 7622 - DNA, 122 bp, Homo sapiens
  misc_feature (61)..(62): /note="This region represents a CpG dinucleotide"
  misc_feature (61)..(61): /note="Nucleotide may be methylated to form 5-methylcytosine"
ttgcaccatgccctccagggtatggagaactgaaaggttcactacacaacaacccagacacgccagcttagcccagacacgccaacttgttaattttcattgagaaataacgttgcagcttt

SEQ ID NO: 7623 - DNA, 122 bp, Homo sapiens
  misc_feature (61)..(62): /note="This region represents a CpG dinucleotide"
  misc_feature (61)..(61): /note="Nucleotide may be methylated to form 5-methylcytosine"
tctagcacagtggatatgcttcaagttaaaacatgtccatcacagttacgtgttgcataacgctagagatacattctgagaaatgcatcattgggtgactttgtccttgtgcagacttgata

SEQ ID NO: 7624 - DNA, 122 bp, Homo sapiens
  misc_feature (61)..(62): /note="This region represents a CpG dinucleotide"
  misc_feature (61)..(61): /note="Nucleotide may be methylated to form 5-methylcytosine"
cggcgaggggatgaagccatttcaggttatgcacttgatcccaaagagttttttgtgcttcgctctctaagtgactcataagcagaattcagagaactgttctcattagaatcttgttccct

SEQ ID NO: 7625 - DNA, 122 bp, Homo sapiens
  misc_feature (61)..(62): /note="This region represents a CpG dinucleotide"
  misc_feature (61)..(61): /note="Nucleotide may be methylated to form 5-methylcytosine"
gatcacacagctagtaaaactaaaactaaactcggctaatcaggctctaaagtctgtgcccgtagcctcacaatatgctgcccattgaaatcagacagacagatgagatgtggtatgacctc

SEQ ID NO: 7626 - DNA, 122 bp, Homo sapiens
  misc_feature (61)..(62): /note="This region represents a CpG dinucleotide"
  misc_feature (61)..(61): /note="Nucleotide may be methylated to form 5-methylcytosine"
ccacactttacagataatgaatctgaagtttccatccacccatcccctcctccgctcaggcgctcaccaaatcttacactcatgaggtgctcagtagcctgtgctttggggcagcccacact

SEQ ID NO: 7627 - DNA, 122 bp, Homo sapiens
  misc_feature (61)..(62): /note="This region represents a CpG dinucleotide"
  misc_feature (61)..(61): /note="Nucleotide may be methylated to form 5-methylcytosine"
agagcaaacaaaagtcagggaggacttcctggagtagagaccatcaaagctacccaaatgcgaggccctcagggccttggaaaccaagtgcagcaatattggtatgtcattgtacatagtta

SEQ ID NO: 7628 - DNA, 122 bp, Homo sapiens
  misc_feature (61)..(62): /note="This region represents a CpG dinucleotide"
  misc_feature (61)..(61): /note="Nucleotide may be methylated to form 5-methylcytosine"
cgtcaagcagaatgccagccgggcacccccaggcacctcgtagaccacgcccagaatcagcggtggagaagcaccgatcgctaacggcacaaatgggcggtcagaacaccagcaacacacat

SEQ ID NO: 7629 - DNA, 122 bp, Homo sapiens
  misc_feature (61)..(62): /note="This region represents a CpG dinucleotide"
  misc_feature (61)..(61): /note="Nucleotide may be methylated to form 5-methylcytosine"
agttttctgcctgtggacagagacacgcttggaggcatccccgcgggcttggtcccctggcgtgtgtcatcaggcctgtcccctctcactcctcgagccccgcctggtgtcctctcctgttc

SEQ ID NO: 7630 - DNA, 122 bp, Homo sapiens
  misc_feature (61)..(62): /note="This region represents a CpG dinucleotide"
  misc_feature (61)..(61): /note="Nucleotide may be methylated to form 5-methylcytosine"
tgaggcaatttctcatccagctggtttccagtgacctcactctcattcaggtgcagataccgactataaaaatgtttagctatagtttagagttggctcctcaacagagctatttctacttg

SEQ ID NO: 7631 - DNA, 122 bp, Homo sapiens
  misc_feature (61)..(62): /note="This region represents a CpG dinucleotide"
  misc_feature (61)..(61): /note="Nucleotide may be methylated to form 5-methylcytosine"
ctaattgcctcttgagcatttacagtcaccctactagaaccttcccttccatccctgagtcgggcggggctgccacttcctcctcctcccactcctcctcttaaatttcccgttgttccagg

SEQ ID NO: 7632 - DNA, 122 bp, Homo sapiens
  misc_feature (61)..(62): /note="This region represents a CpG dinucleotide"
  misc_feature (61)..(61): /note="Nucleotide may be methylated to form 5-methylcytosine"
tcatcctgacgacagctgatgccaacctgaattcagccagtcaggattgagggcacttcacgttccagggagagcaaataaaatcctttggttaggccaggtgtggtggctcatgcctgtaa

SEQ ID NO: 7633 - DNA, 122 bp, Homo sapiens
  misc_feature (61)..(62): /note="This region represents a CpG dinucleotide"
  misc_feature (61)..(61): /note="Nucleotide may be methylated to form 5-methylcytosine"
aacacattcatttgtttgacaaataccttcccaaaactattttaaaacacagctgctgggcgggacgcagtggctcacacctgtaatcccaggactttgggtggccgaggcgggtgaatcac

SEQ ID NO: 7634 - DNA, 122 bp, Homo sapiens
  misc_feature (61)..(62): /note="This region represents a CpG dinucleotide"
  misc_feature (61)..(61): /note="Nucleotide may be methylated to form 5-methylcytosine"
agcctctttgcttagaattgcacaattttccagtaatgtatgaaacagctggcagccttgcgcaggaaaactggatagaggtgagtccctgagggagtatgtttgtcctgggtaaaagcaag

SEQ ID NO: 7635 - DNA, 122 bp, Homo sapiens
  misc_feature (61)..(62): /note="This region represents a CpG dinucleotide"
  misc_feature (61)..(61): /note="Nucleotide may be methylated to form 5-methylcytosine"
caacaaaaaccataaacagtgtgtctgactcatcagtcctcatgccttccaggcccatctcgcctgctaaccatttgtgtgacttttcagaatcactttccttttcttggcctacttttcct

SEQ ID NO: 7636 - DNA, 122 bp, Homo sapiens
  misc_feature (61)..(62): /note="This region represents a CpG dinucleotide"
  misc_feature (61)..(61): /note="Nucleotide may be methylated to form 5-methylcytosine"
gactgaggcagagaccagctctgtcctttaccagctggtgacctcagctaagtcatttaacgcactcaacctttagtttttcatctgcagaatggatataatggaaactaaacccacaggat

SEQ ID NO: 7637 - DNA, 122 bp, Homo sapiens
  misc_feature (61)..(62): /note="This region represents a CpG dinucleotide"
  misc_feature (61)..(61): /note="Nucleotide may be methylated to form 5-methylcytosine"
tcccctatccctgcttctccagctcaggctcttcttgtcttggtgtgtcactgtgagcatcgtgtttctgagctcagctctgagtgtctgccctaatcctcgcccctcataaaagcataccg

SEQ ID NO: 7638 - DNA, 122 bp, Homo sapiens
  misc_feature (61)..(62): /note="This region represents a CpG dinucleotide"
  misc_feature (61)..(61): /note="Nucleotide may be methylated to form 5-methylcytosine"
ccataaggaatgctgtttggccttttgtttcttagtgccagactgcaccagctgcatgcacgtaaggaaggaggacagttcacgaagggtttcacaggtcatggtcacgactctggctttca

SEQ ID NO: 7639 - DNA, 122 bp, Homo sapiens
  misc_feature (61)..(62): /note="This region represents a CpG dinucleotide"
  misc_feature (61)..(61): /note="Nucleotide may be methylated to form 5-methylcytosine"
aaaagagaagaaaaggaatcattgctctagcccccaggagtgctgctgttggtagacagccgtaccctggcagctcctccagggatgagcttagctggggacagctgccttgcccacagtca

SEQ ID NO: 7640 - DNA, 122 bp, Homo sapiens
  misc_feature (61)..(62): /note="This region represents a CpG dinucleotide"
  misc_feature (61)..(61): /note="Nucleotide may be methylated to form 5-methylcytosine"
atagcaagtctcaccatgtgttgaaataatttatttcaacacttaatgcatcacctgtcccgtatttccacatgttgtgtcatcaccatttgacctcaacccattgttaaatatttaatagt

SEQ ID NO: 7641 - DNA, 122 bp, Homo sapiens
  misc_feature (61)..(62): /note="This region represents a CpG dinucleotide"
  misc_feature (61)..(61): /note="Nucleotide may be methylated to form 5-methylcytosine"
agagagtggtaggactggaattcaaatcctgatttgcctgataacaaaacttactttccccgctttaccctgtagactcatgtttggctctgtccagtggttgtcattggacatatcccaca

SEQ ID NO: 7642 - DNA, 122 bp, Homo sapiens
  misc_feature (61)..(62): /note="This region represents a CpG dinucleotide"
  misc_feature (61)..(61): /note="Nucleotide may be methylated to form 5-methylcytosine"
atagaccaggaaaagcttctgtcttgtcaaaagccgcatctctatgatgttgttcccaggcgtgttcccaaggttatcaaggggtgctctggttgctcccagaagactctgaatgtgttggc

SEQ ID NO: 7643 - DNA, 122 bp, Homo sapiens
  misc_feature (61)..(62): /note="This region represents a CpG dinucleotide"
  misc_feature (61)..(61): /note="Nucleotide may be methylated to form 5-methylcytosine"
acagcctgcagagcctcgagccaaataaacctcttagcgtcaggtgttcctttatagcagcgcaacagactaagacagtgatgcaactggaagtgcaggagcattaaccagcttaaacccaa

SEQ ID NO: 7644 - DNA, 122 bp, Homo sapiens
  misc_feature (61)..(62): /note="This region represents a CpG dinucleotide"
  misc_feature (61)..(61): /note="Nucleotide may be methylated to form 5-methylcytosine"
gatgagacaggaatatataatttcaggctacaaagacaagaagtcaaagacagcctgaggcgagactcttggcaagccaaaagaaaacatgattttcctgaaaggctgtaggcagctccctc

SEQ ID NO: 7645 - DNA, 122 bp, Homo sapiens
  misc_feature (61)..(62): /note="This region represents a CpG dinucleotide"
  misc_feature (61)..(61): /note="Nucleotide may be methylated to form 5-methylcytosine"
cattttattgtgcaatattattacaccactttacaaatagaccatttattccaggctgaccgtaaaagtcattcccggctgggtgcagtggctcaagcctgtaatcccaatactttgggagt

SEQ ID NO: 7646 - DNA, 122 bp, Homo sapiens
  misc_feature (61)..(62): /note="This region represents a CpG dinucleotide"
  misc_feature (61)..(61): /note="Nucleotide may be methylated to form 5-methylcytosine"
gaggcagaaattgaagtcatgagcccaaagacagggaatgccgctgccacccaaaaatgacggaagcaaggacctagagcctctggaaggagcaaagccagccaacaccttgatctcagccc

SEQ ID NO: 7647 - DNA, 122 bp, Homo sapiens
  misc_feature (61)..(62): /note="This region represents a CpG dinucleotide"
  misc_feature (61)..(61): /note="Nucleotide may be methylated to form 5-methylcytosine"
aagatctcaccaaggctttcctagttcttccactcaagtctgatttagtgctcagctgggcgcttaacgaattcatgcctgttgtgaaagccctaatccaggatttcattgtacctaaatga

SEQ ID NO: 7648 - DNA, 122 bp, Homo sapiens
  misc_feature (61)..(62): /note="This region represents a CpG dinucleotide"
  misc_feature (61)..(61): /note="Nucleotide may be methylated to form 5-methylcytosine"
ggcaggcagtataatttggtatgactgtatcagttaaggttcttcccaggatgaaacagacggtatgtgcaaagactttaactgaagccttcaagtgaaggaacaatttacaggggtgtgga

SEQ ID NO: 7649 - DNA, 122 bp, Homo sapiens
  misc_feature (61)..(62): /note="This region represents a CpG dinucleotide"
  misc_feature (61)..(61): /note="Nucleotide may be methylated to form 5-methylcytosine"
cagcttgcatgtcaatctagtccactgtaagctggagaaagttacatgaattctcatcgacggcctcagcaatgtgcctcaagtgtcactgtgagatcattccctgcttcctggagacatgc

SEQ ID NO: 7650 - DNA, 122 bp, Homo sapiens
  misc_feature (61)..(62): /note="This region represents a CpG dinucleotide"
  misc_feature (61)..(61): /note="Nucleotide may be methylated to form 5-methylcytosine"
accagagtgataataacagtagcaactaacagcacttattaagtgccagacactgctccacgcgcttttacctagagtatttcatataatccttacaaagccttattgtctcccttaataga

SEQ ID NO: 7651 - DNA, 122 bp, Homo sapiens
  misc_feature (61)..(62): /note="This region represents a CpG dinucleotide"
  misc_feature (61)..(61): /note="Nucleotide may be methylated to form 5-methylcytosine"
gaacttaggccttaggattaagtagacttaggtttggttccaaactctaccacttgctaccgtgtcaccacttacagctctgtcattatcactagttgtccttcccaatgtcccttaactac

SEQ ID NO: 7652 - DNA, 122 bp, Homo sapiens
  misc_feature (61)..(62): /note="This region represents a CpG dinucleotide"
  misc_feature (61)..(61): /note="Nucleotide may be methylated to form 5-methylcytosine"
accgacattcctaaacttaagtgtttctttcttccttctcctcttattaatatttcagcacgcgtgttcagtaacaccaaacggtggttccctttcaagaggaagtgagaaagaggaaatgt

SEQ ID NO: 7653 - DNA, 122 bp, Homo sapiens
  misc_feature (61)..(62): /note="This region represents a CpG dinucleotide"
  misc_feature (61)..(61): /note="Nucleotide may be methylated to form 5-methylcytosine"
cccagaaagtgactcagtgcaagaggacagttttgactccttacgatttcatctctgacccgaccaattatcactcctgactcagtggtcccctacccaccaaattatccttaaaaacacca

SEQ ID NO: 7654 - DNA, 122 bp, Homo sapiens
  misc_feature (61)..(62): /note="This region represents a CpG dinucleotide"
  misc_feature (61)..(61): /note="Nucleotide may be methylated to form 5-methylcytosine"
gcatgagttttagacaagcctttctagcctgcttcattttcccaccttgcaagtgcctcccgcctcctactcagcaagttttaaatcagactattgtctcccctcatgacacagatgcgttg

SEQ ID NO: 7655 - DNA, 122 bp, Homo sapiens
  misc_feature (61)..(62): /note="This region represents a CpG dinucleotide"
  misc_feature (61)..(61): /note="Nucleotide may be methylated to form 5-methylcytosine"
gtgcttaggtctggaagggccagtggagtacgcagtgaggaaggaggatctggcccagcacgcctgggaaatgacacttcaggctttatcagaagctaactgggtcaccagtgtgatggggg

SEQ ID NO: 7656 - DNA, 122 bp, Homo sapiens
  misc_feature (61)..(62): /note="This region represents a CpG dinucleotide"
  misc_feature (61)..(61): /note="Nucleotide may be methylated to form 5-methylcytosine"
tgttttgatgagatacagctggcaagcagcaatgcttcaggaagtctatcactaaagtagcggtttcactagatcttctgccagccctagtgcctcgccgggaacttgttcattggtctatc

SEQ ID NO: 7657 - DNA, 122 bp, Homo sapiens
  misc_feature (61)..(62): /note="This region represents a CpG dinucleotide"
  misc_feature (61)..(61): /note="Nucleotide may be methylated to form 5-methylcytosine"
cctggttgcacataaacattacgcaacagtaaactagtacttttatgtcactgcacacatcgctgcctacactgaactcactaaatcacagataagagggcacttgtacagtggggatggca

SEQ ID NO: 7658 - DNA, 122 bp, Homo sapiens
  misc_feature (61)..(62): /note="This region represents a CpG dinucleotide"
  misc_feature (61)..(61): /note="Nucleotide may be methylated to form 5-methylcytosine"
atgcctgggcagtccaggacttgacttcttactcctagtgctccaaaataatccaatgaccgcaatctaagggactgtgcagatgaagcagggacttactcctgcctcttcctggtagcttt

SEQ ID NO: 7659 - DNA, 122 bp, Homo sapiens
  misc_feature (61)..(62): /note="This region represents a CpG dinucleotide"
  misc_feature (61)..(61): /note="Nucleotide may be methylated to form 5-methylcytosine"
tccagccctccccaccgcctggccaccgaagacagaggacagaggcgtggttggcagccacgcgcccttgaggagaccacacacctaggtaaacactggctggaaagacccaaggttgtcaa

SEQ ID NO: 7660 - DNA, 122 bp, Homo sapiens
  misc_feature (61)..(62): /note="This region represents a CpG dinucleotide"
  misc_feature (61)..(61): /note="Nucleotide may be methylated to form 5-methylcytosine"
ctcccattgcctcttgctggcctgtggtttctctcgtcctctaagaacactcctgttggacgagtgggaagaatgactaacatcggtcacaatctttgagcacttaatgctgtgcatgtcac

SEQ ID NO: 7661 - DNA, 122 bp, Homo sapiens
  misc_feature (61)..(62): /note="This region represents a CpG dinucleotide"
  misc_feature (61)..(61): /note="Nucleotide may be methylated to form 5-methylcytosine"
atttccttcaaatctcagaatccctgggagcttgtaaggaacatttagtaaccccatccccgtcgctaccctcaatggtcctgcctttcggagatatcataccattttccttttctcaatga

SEQ ID NO: 7662 - DNA, 122 bp, Homo sapiens
  misc_feature (61)..(62): /note="This region represents a CpG dinucleotide"
  misc_feature (61)..(61): /note="Nucleotide may be methylated to form 5-methylcytosine"
tcttcctcagatttacataataggactcattgcagaccggaaatttcagcatttcaacaccgttctggaggcttacatccaacagcatttcagtgcgaccttggcttacaagtaagtaattg

SEQ ID NO: 7663 - DNA, 122 bp, Homo sapiens
  misc_feature (61)..(62): /note="This region represents a CpG dinucleotide"
  misc_feature (61)..(61): /note="Nucleotide may be methylated to form 5-methylcytosine"
tgtatattttcttctttcagaggagtttcatttatgcgtgagtcacctatgagttcactacgagtcattggcaatctaggatcactttaatctaatttcagggtttgagagattatctgcat

SEQ ID NO: 7664 - DNA, 122 bp, Homo sapiens
  misc_feature (61)..(62): /note="This region represents a CpG dinucleotide"
  misc_feature (61)..(61): /note="Nucleotide may be methylated to form 5-methylcytosine"
actgtgtgacttcagagaagtcacttagcctttatgcctcagttttctcatttgtcaaaccgggatttgccagccctcaaaggataattgtagggattgcataaaataacagataaaaaagt

SEQ ID NO: 7665 - DNA, 122 bp, Homo sapiens
  misc_feature (61)..(62): /note="This region represents a CpG dinucleotide"
  misc_feature (61)..(61): /note="Nucleotide may be methylated to form 5-methylcytosine"
gcttgcaacactaactcaggcttctagtggtctgatgagcttaaaaatcaattaataagccgggcgcggtggctcaaacctgtaatcccagcactttgggaggccgaggcgggcggatcacg

SEQ ID NO: 7666 - DNA, 122 bp, Homo sapiens
  misc_feature (61)..(62): /note="This region represents a CpG dinucleotide"
  misc_feature (61)..(61): /note="Nucleotide may be methylated to form 5-methylcytosine"
ggaggcagatctaagaattgcatgaggttctatgtattccctctctgtctcctattccatcgtaaccttctcccccacataaagatgtgcttcaacttttctggataaaaagggacagattt

SEQ ID NO: 7667 - DNA, 122 bp, Homo sapiens
  misc_feature (61)..(62): /note="This region represents a CpG dinucleotide"
  misc_feature (61)..(61): /note="Nucleotide may be methylated to form 5-methylcytosine"
ataaattagaggaagcaatttcggaacaacggaaccttcaaactataaatactgaattatcgaacacttgccaggcacttcagcagaagacaaggaaactgaagagtgagtagcaaatattc

SEQ ID NO: 7668 - DNA, 122 bp, Homo sapiens
  misc_feature (61)..(62): /note="This region represents a CpG dinucleotide"
  misc_feature (61)..(61): /note="Nucleotide may be methylated to form 5-methylcytosine"
aaatcacactcactggtgtgaatgggagtttttttggctcaggggcccagcatgcaggtacgtacctggtacaggcaaagccagcctgaaagcactaaacactattcctcagcactgtttct

SEQ ID NO: 7669 - DNA, 122 bp, Homo sapiens
  misc_feature (61)..(62): /note="This region represents a CpG dinucleotide"
  misc_feature (61)..(61): /note="Nucleotide may be methylated to form 5-methylcytosine"
gagttaggtctggccccttcactagctgccctcacttctgcaagaagggaagagtcagagcgagaaagagaaggacaggatacgatagtcagataaacatcagcagtgcaaagcagaactcg

SEQ ID NO: 7670 - DNA, 122 bp, Homo sapiens
  misc_feature (61)..(62): /note="This region represents a CpG dinucleotide"
  misc_feature (61)..(61): /note="Nucleotide may be methylated to form 5-methylcytosine"
ttctcagttaagctttatactggtggtgcagctaagagtagcatcacatcagcaatagctcgtaataaaaaataatcatgggatgaacttgatgtatactcagcatcagaagaaccaacaat

SEQ ID NO: 7671 - DNA, 122 bp, Homo sapiens
  misc_feature (61)..(62): /note="This region represents a CpG dinucleotide"
  misc_feature (61)..(61): /note="Nucleotide may be methylated to form 5-methylcytosine"
gagccccaccagagcagatgagctggaagtgcagcagagttagagcctgggctggactgtcggtggggtagagtctaagttgtttccggtctgagccttcaagttgctgggctgtccttggc

SEQ ID NO: 7672 - DNA, 122 bp, Homo sapiens
  misc_feature (61)..(62): /note="This region represents a CpG dinucleotide"
  misc_feature (61)..(61): /note="Nucleotide may be methylated to form 5-methylcytosine"
tgattcatttttataagattagactggctgttttgcaacaggtggatgagagtgaaacaacggcagaagtggttaaaatagctatgacagaattaagaaagactaggatggaggtcatggca

SEQ ID NO: 7673 - DNA, 122 bp, Homo sapiens
  misc_feature (61)..(62): /note="This region represents a CpG dinucleotide"
  misc_feature (61)..(61): /note="Nucleotide may be methylated to form 5-methylcytosine"
gcatgaagaaagattctcatgttgctaagatttcttgcaccgctcttaagcttctgattacgcagaagctggattaactatctcacagtagcagggcagacagtagcatggcagacagcatg

SEQ ID NO: 7674 - DNA, 122 bp, Homo sapiens
  misc_feature (61)..(62): /note="This region represents a CpG dinucleotide"
  misc_feature (61)..(61): /note="Nucleotide may be methylated to form 5-methylcytosine"
tttatatttatatacacagagagcgcacgaggccagggaggaagtggtatctttggctttcgttctcatttgattactaataaggtgtaaaattgctgctgctgtgatgattggacactcag

SEQ ID NO: 7675 - DNA, 122 bp, Homo sapiens
  misc_feature (61)..(62): /note="This region represents a CpG dinucleotide"
  misc_feature (61)..(61): /note="Nucleotide may be methylated to form 5-methylcytosine"
tgtatggtgatactaatatgatggctagtgtgattattctatagctagttggagcagtcacgatacacacacccaaagaatgagaagttggattgatccaaggaaggattttgccagacagg

SEQ ID NO: 7676 - DNA, 122 bp, Homo sapiens
  misc_feature (61)..(62): /note="This region represents a CpG dinucleotide"
  misc_feature (61)..(61): /note="Nucleotide may be methylated to form 5-methylcytosine"
ctcagtgccatcgggattagagctaatgagttggaagaagttaacaatgcttcgggccagcggaggcccaggagacctctcaggccccgcgttgtggccgcctttcaccactgaggtgtaat

SEQ ID NO: 7677 - DNA, 122 bp, Homo sapiens
  misc_feature (61)..(62): /note="This region represents a CpG dinucleotide"
  misc_feature (61)..(61): /note="Nucleotide may be methylated to form 5-methylcytosine"
tctgacctgaggacagtaagcctatggctctctcacaccagggtgtggagactaaatgcacgcaggggctcctggcctcaccggctctaggaacctctctccagcgacagtagtaggaatga

SEQ ID NO: 7678 - DNA, 122 bp, Homo sapiens
  misc_feature (61)..(62): /note="This region represents a CpG dinucleotide"
  misc_feature (61)..(61): /note="Nucleotide may be methylated to form 5-methylcytosine"
cactgcacaatgtaaacttttgaccctcaactttttgacctgcagttgtaacgcactaaccgcaaagatacacaaagccgagcctcttctttcagggggaaggggccccccagcatctcagg

SEQ ID NO: 7679 - DNA, 122 bp, Homo sapiens
  misc_feature (61)..(62): /note="This region represents a CpG dinucleotide"
  misc_feature (61)..(61): /note="Nucleotide may be methylated to form 5-methylcytosine"
gtaggttagaaaacaggaggaacagaggattgggtggggcctaaaggaattctacagttccgagtgtaggagggaaaagagcaactaacttcttatcagcaagccacaggaagtgtttttaa

SEQ ID NO: 7680 - DNA, 122 bp, Homo sapiens
  misc_feature (61)..(62): /note="This region represents a CpG dinucleotide"
  misc_feature (61)..(61): /note="Nucleotide may be methylated to form 5-methylcytosine"
ggattatagtgtgagccgccacgcccggccgctgggattgcaggcctgagctcccgtgcccggccatcgttgatgtttttatgaatcacttttagattttgtagattaacctcttccatcat

SEQ ID NO: 7681 - DNA, 122 bp, Homo sapiens
  misc_feature (61)..(62): /note="This region represents a CpG dinucleotide"
  misc_feature (61)..(61): /note="Nucleotide may be methylated to form 5-methylcytosine"
ctgcctagaactgaatcgaacatgaggatgagtcagtgtcaagactcccagtggggccatcggatcattactgcatgatcgtcttaagcctttgttagtgaatccctcagactcacgccttc

SEQ ID NO: 7682 - DNA, 122 bp, Homo sapiens
  misc_feature (61)..(62): /note="This region represents a CpG dinucleotide"
  misc_feature (61)..(61): /note="Nucleotide may be methylated to form 5-methylcytosine"
gatttgagtgcacaaggacaggcaggcatcctagctcctgaccttgggccaatattttctcgctatgggtctcagttgcctcatcacagaccacctgatttcaaagcccttgtcaccctgaa

SEQ ID NO: 7683 - DNA, 122 bp, Homo sapiens
  misc_feature (61)..(62): /note="This region represents a CpG dinucleotide"
  misc_feature (61)..(61): /note="Nucleotide may be methylated to form 5-methylcytosine"
aggaacagggtgccacgagctcttggtaacggagcagcgagacctgcagctacatctggtcgggcaggaagagtgggaagttgggctgggtggcacagaagcccaggggagcagcagcacag

SEQ ID NO: 7684 - DNA, 122 bp, Homo sapiens
  misc_feature (61)..(62): /note="This region represents a CpG dinucleotide"
  misc_feature (61)..(61): /note="Nucleotide may be methylated to form 5-methylcytosine"
ctaagtactagtttcctgaaagtcctgaaaagtaagccgaaatgcaagttcaaggtatcacgggctgaacttaatgaggaaggagtgacataatttggataggtccttagtttcagagttct

SEQ ID NO: 7685 - DNA, 122 bp, Homo sapiens
  misc_feature (61)..(62): /note="This region represents a CpG dinucleotide"
  misc_feature (61)..(61): /note="Nucleotide may be methylated to form 5-methylcytosine"
cataagataagtataatgtgtatcatgtcaagagctcagcacagggcctggcccattgtacgactccaccatcaaggcaggaggtcgaatggacatctgtccactctggaaacacacccacc

SEQ ID NO: 7686 - DNA, 122 bp, Homo sapiens
  misc_feature (61)..(62): /note="This region represents a CpG dinucleotide"
  misc_feature (61)..(61): /note="Nucleotide may be methylated to form 5-methylcytosine"
catgtgccatgttggtgtgctgcacccattaactcatcaagagcagttaaacttcttacacggcaattggctctgcccagagagagcattctttaagagaaagaaaatggggctggccaggg

SEQ ID NO: 7687 - DNA, 122 bp, Homo sapiens
  misc_feature (61)..(62): /note="This region represents a CpG dinucleotide"
  misc_feature (61)..(61): /note="Nucleotide may be methylated to form 5-methylcytosine"
aattctgcacctttaataaagttttatgggacaggaaggtgactggcattgacattgtaacgaggaatgggtggtgccacctttgctgtgtcttaccagaaatacctgtggcaggtaaattt

SEQ ID NO: 7688 - DNA, 122 bp, Homo sapiens
  misc_feature (61)..(62): /note="This region represents a CpG dinucleotide"
  misc_feature (61)..(61): /note="Nucleotide may be methylated to form 5-methylcytosine"
ttcctctttactgatatcttcacatgcttattgccttattcattttctaaagtgtgccagcgtctttcagaagtcagctaaattagtgcagttgctcatccatcagacagttttgttataaa

SEQ ID NO: 7689 - DNA, 122 bp, Homo sapiens
  misc_feature (61)..(62): /note="This region represents a CpG dinucleotide"
  misc_feature (61)..(61): /note="Nucleotide may be methylated to form 5-methylcytosine"
gggacttgaggtgacgcatttcacctctctgtgcctcagttctctgagttggtggagctgcgtcaaactcactcctaacccagaatactgagtggactggtgaactacactctcagctgcag

SEQ ID NO: 7690 - DNA, 122 bp, Homo sapiens
  misc_feature (61)..(62): /note="This region represents a CpG dinucleotide"
  misc_feature (61)..(61): /note="Nucleotide may be methylated to form 5-methylcytosine"
ctggtgaatcatcagggcctaggacaaacatcactcacttggtcatctgaaggccaggaacgattgtgtcattatgtatgtgcatttctcaactaagccttcaagagggtgatgggacgaga

SEQ ID NO: 7691 - DNA, 122 bp, Homo sapiens
  misc_feature (61)..(62): /note="This region represents a CpG dinucleotide"
  misc_feature (61)..(61): /note="Nucleotide may be methylated to form 5-methylcytosine"
ttcaagtgattctcctgcctcagcctcccgagtagctgggattacaggcatgtgccaccacggcaggctaattttgtattttaagtagagatggggttgctccatgttggtcaggctggtct

SEQ ID NO: 7692 - DNA, 122 bp, Homo sapiens
  misc_feature (61)..(62): /note="This region represents a CpG dinucleotide"
  misc_feature (61)..(61): /note="Nucleotide may be methylated to form 5-methylcytosine"
aaagggcacggatccgcgggtcagcaagcccgacgaatttacaccaatgacccgccgtgtcgccagtctcagaccagggcacaacacgccaaccctgcagaccacccccacctccccagcca

SEQ ID NO: 7693 - DNA, 122 bp, Homo sapiens
  misc_feature (61)..(62): /note="This region represents a CpG dinucleotide"
  misc_feature (61)..(61): /note="Nucleotide may be methylated to form 5-methylcytosine"
ctggagtacgacagtggtagcctgaagatggaacctgggacttctaagtggcggagggagcggcctgagagctgtgatgattcatccaagggtggagaactgaaaaagcccatcagcctggg

SEQ ID NO: 7694 - DNA, 122 bp, Homo sapiens
  misc_feature (61)..(62): /note="This region represents a CpG dinucleotide"
  misc_feature (61)..(61): /note="Nucleotide may be methylated to form 5-methylcytosine"
agtgattcgcctgcctcgggctcccaaagtgttgggattacaggcgttagccaccgtgcccgccccatagtaggtatttagtaagcatttgctgagtaagcaaagattactcacttccaaag

SEQ ID NO: 7695 - DNA, 122 bp, Homo sapiens
  misc_feature (61)..(62): /note="This region represents a CpG dinucleotide"
  misc_feature (61)..(61): /note="Nucleotide may be methylated to form 5-methylcytosine"
acaaatgggatcattagacacaacctgttctacgcccacttagaattctttaacagcttccgaatgactcagagtggaatgtaattctttagcaggacttgcgaagccctttgagatgtggc

SEQ ID NO: 7696 - DNA, 122 bp, Homo sapiens
  misc_feature (61)..(62): /note="This region represents a CpG dinucleotide"
  misc_feature (61)..(61): /note="Nucleotide may be methylated to form 5-methylcytosine"
agacctcgtgatccgcccgcctcggcctcccaaagtgctgggattacaggcatgaaccaccgcgccctgccaggatccttttaaaactacaaatatgggtgggcgtggtggctcacccttgt

SEQ ID NO: 7697 - DNA, 122 bp, Homo sapiens
  misc_feature (61)..(62): /note="This region represents a CpG dinucleotide"
  misc_feature (61)..(61): /note="Nucleotide may be methylated to form 5-methylcytosine"
gatgggttgcatggagaccaacgcttacaaggcgagggaacagcagggctgaggaagggacggggaagccgtaaaaatgcagcttcccacttgctgcaataggatccctatcactactcaga

SEQ ID NO: 7698 - DNA, 122 bp, Homo sapiens
  misc_feature (61)..(62): /note="This region represents a CpG dinucleotide"
  misc_feature (61)..(61): /note="Nucleotide may be methylated to form 5-methylcytosine"
ttaccaaggtatgcatgtgttgtcaggcattgctgtcctggctccaggcggcaggactgccggtccacacagcccagcacagggaccttgtagcaggagtgacagcgaatgtcagctgggaa

SEQ ID NO: 7699 - DNA, 122 bp, Homo sapiens
  misc_feature (61)..(62): /note="This region represents a CpG dinucleotide"
  misc_feature (61)..(61): /note="Nucleotide may be methylated to form 5-methylcytosine"
caggggaagtatgaattatgaaaccagccctgtgtgtgagctcacaggatgtgcactcaacgtaccatagaaggaatcaaagaggctatcctggaggaagtaactattcttcctgaagggcc

SEQ ID NO: 7700 - DNA, 122 bp, Homo sapiens
  misc_feature (61)..(62): /note="This region represents a CpG dinucleotide"
  misc_feature (61)..(61): /note="Nucleotide may be methylated to form 5-methylcytosine"
atttcagtaaaactttgctgaggagcagctacgtgcaaatgctgttctagatcgtgttagcgggaggaagatgatttcaacaaggaagaatttggcattaatcctgcccttgtagggctcag

SEQ ID NO: 7701 - DNA, 122 bp, Homo sapiens
  misc_feature (61)..(62): /note="This region represents a CpG dinucleotide"
  misc_feature (61)..(61): /note="Nucleotide may be methylated to form 5-methylcytosine"
agctgcaggattcactcttccggggcacagatgcctgagaaacttcagagaggcagaaggcgtgagtctgagcagccatcatctgggcatcaaggggttaacccatccctgagggctgggcc

SEQ ID NO: 7702 - DNA, 122 bp, Homo sapiens
  misc_feature (61)..(62): /note="This region represents a CpG dinucleotide"
  misc_feature (61)..(61): /note="Nucleotide may be methylated to form 5-methylcytosine"
gggacaggacctgggttggggccagcaagggtgacaccccaagtggaaactgagttaccccgtgaagaagacgagttctatttatggtcagaatgccacgctcaagggccagtgaaggcctg

SEQ ID NO: 7703 - DNA, 122 bp, Homo sapiens
  misc_feature (61)..(62): /note="This region represents a CpG dinucleotide"
  misc_feature (61)..(61): /note="Nucleotide may be methylated to form 5-methylcytosine"
tattggtctacaatttgaaggtactttcataaaaaaatagcttgttgattcacttgcacacgggacttttgtgacaagaggctaagtttaatgacttagctcttttgggaggggaagtataa

SEQ ID NO: 7704 - DNA, 122 bp, Homo sapiens
  misc_feature (61)..(62): /note="This region represents a CpG dinucleotide"
  misc_feature (61)..(61): /note="Nucleotide may be methylated to form 5-methylcytosine"
cccgccctgctgatgggacaacagtcttggcagaagactcaagctccctctggcaggtgccgcagctgggcctggccctggaggatgtgcagtctggacacccccacatcaggaacaccccg

SEQ ID NO: 7705 - DNA, 122 bp, Homo sapiens
  misc_feature (61)..(62): /note="This region represents a CpG dinucleotide"
  misc_feature (61)..(61): /note="Nucleotide may be methylated to form 5-methylcytosine"
atactgaatagtgcatttgcatctgcaactcactgagtgctttgtgagctggaccagtaccgtcctttctacagttgaaaacaaattctggttgtggggaagaaaacaggcaaagctgtggc

SEQ ID NO: 7706 - DNA, 122 bp, Homo sapiens
  misc_feature (61)..(62): /note="This region represents a CpG dinucleotide"
  misc_feature (61)..(61): /note="Nucleotide may be methylated to form 5-methylcytosine"
caagtctgtaatccatgaccttttgttacctgtgtgtttgctaggaaatatccggatgtgcgccagaggagataaaatgaggcttagcacaaacatgctgctgcccagacttaacagtggtc

SEQ ID NO: 7707 - DNA, 122 bp, Homo sapiens
  misc_feature (61)..(62): /note="This region represents a CpG dinucleotide"
  misc_feature (61)..(61): /note="Nucleotide may be methylated to form 5-methylcytosine"
tccgcttcaggacttctttcaccaggcccttgtctgggccctgtttgactttttctcgtccgattaagtacaagcactttggggtaaggagcaggtctcgctttacaccctgtaaggagagg

SEQ ID NO: 7708 - DNA, 122 bp, Homo sapiens
  misc_feature (61)..(62): /note="This region represents a CpG dinucleotide"
  misc_feature (61)..(61): /note="Nucleotide may be methylated to form 5-methylcytosine"
gaagtgctattcattcttaaagcagaagcagcagaggagaaatcagagacaccaactctgcggacctgctgaaggaagtgaactacagggcattgttccattccctgagaacagcaaacacc

SEQ ID NO: 7709 - DNA, 122 bp, Homo sapiens
  misc_feature (61)..(62): /note="This region represents a CpG dinucleotide"
  misc_feature (61)..(61): /note="Nucleotide may be methylated to form 5-methylcytosine"
cgtttttatcccatttcttcctgtaggcgtttcaaagtttgcaaaggcagcaaacttttacgtagtgtagttatctgtgcaaagaaattttccaagctgccattgcccccagatggcagaca

SEQ ID NO: 7710 - DNA, 122 bp, Homo sapiens
  misc_feature (61)..(62): /note="This region represents a CpG dinucleotide"
  misc_feature (61)..(61): /note="Nucleotide may be methylated to form 5-methylcytosine"
cggtggaagaggttgcggaagagctgacgtaggtaagagtagtcgggcttgtcgtcaaaccgcagggagcggcagaagttgaggtatgttgagaattcggctggagggtgttgcagaggata

SEQ ID NO: 7711 - DNA, 122 bp, Homo sapiens
  misc_feature (61)..(62): /note="This region represents a CpG dinucleotide"
  misc_feature (61)..(61): /note="Nucleotide may be methylated to form 5-methylcytosine"
ggaaggagttttcagtggggatggaatccaggctgcaaagagaaagcatttgtatgtgaacgcttctggaaaattacttaaagctgggctcagtggcacacgcctgtagtcccagctgccca

SEQ ID NO: 7712 - DNA, 122 bp, Homo sapiens
  misc_feature (61)..(62): /note="This region represents a CpG dinucleotide"
  misc_feature (61)..(61): /note="Nucleotide may be methylated to form 5-methylcytosine"
ccatgagctctcacccatgtatcagctgccttgctagatcctgtttctcagcaccagcagcggggagggccatcttcatgagaaagttcacagtcatcattggtcagcagagataggaagga

SEQ ID NO: 7713 - DNA, 122 bp, Homo sapiens
  misc_feature (61)..(62): /note="This region represents a CpG dinucleotide"
  misc_feature (61)..(61): /note="Nucleotide may be methylated to form 5-methylcytosine"
atctttctgtaggatctctgcattatccccactggtatgatgcttggtcaagcgggtgaccgcaccctgcctgcagtttgtaacactgcgtcatgacattgtcaaacatcactccatcactc

SEQ ID NO: 7714 - DNA, 122 bp, Homo sapiens
  misc_feature (61)..(62): /note="This region represents a CpG dinucleotide"
  misc_feature (61)..(61): /note="Nucleotide may be methylated to form 5-methylcytosine"
tttccaccatggttgagaatccctgagctgcagccttatgcttttcatgcagagtgagttcgtgagtgtgaatgacacacacagataagcagacagagctgacgggatgctaatgacatcta

SEQ ID NO: 7715 - DNA, 122 bp, Homo sapiens
  misc_feature (61)..(62): /note="This region represents a CpG dinucleotide"
  misc_feature (61)..(61): /note="Nucleotide may be methylated to form 5-methylcytosine"
ggagagaatggggaagtattgttcaaggagtaaagagtctcagttttgcaggatgaaaagcgttctgtggatagatgctggtgatgttgtgcaacaatgtaaatattcttaatgtcactgaa

SEQ ID NO: 7716 - DNA, 122 bp, Homo sapiens
  misc_feature (61)..(62): /note="This region represents a CpG dinucleotide"
  misc_feature (61)..(61): /note="Nucleotide may be methylated to form 5-methylcytosine"
acaggcatgggcgagaggccactgaacttctctatgaagctgcagccaagcaggtggctccgtgtcccctcttcttccccatcacccctcccttgaccgtcagtgtgagagtttgttgaggc

SEQ ID NO: 7717 - DNA, 122 bp, Homo sapiens
  misc_feature (61)..(62): /note="This region represents a CpG dinucleotide"
  misc_feature (61)..(61): /note="Nucleotide may be methylated to form 5-methylcytosine"
gctgtccagccacacccttggcattctctcccaatctgaggtactgagagttaagcacttcgatgtagcagtttggcggggtggagcgcggggggggacacaattcacagctgaaatatttc

SEQ ID NO: 7718 - DNA, 122 bp, Homo sapiens
  misc_feature (61)..(62): /note="This region represents a CpG dinucleotide"
  misc_feature (61)..(61): /note="Nucleotide may be methylated to form 5-methylcytosine"
gtttgccgaatcgcccttccatggtaagccattaggcatgaggccaatgatggttgtacacgcatgcactcacacgtgcactctcacatgcctcctgaccaaaactggataaacagaggaaa

SEQ ID NO: 7719 - DNA, 122 bp, Homo sapiens
  misc_feature (61)..(62): /note="This region represents a CpG dinucleotide"
  misc_feature (61)..(61): /note="Nucleotide may be methylated to form 5-methylcytosine"
aaaggctcctggagatgtgggaggaggctgtgcttagtaggagcaggttcctagacatcacggagatgaacatgactgtggttgtggacaagagcaacaacacatatcatataaagggcttt

SEQ ID NO: 7720 - DNA, 122 bp, Homo sapiens
  misc_feature (61)..(62): /note="This region represents a CpG dinucleotide"
  misc_feature (61)..(61): /note="Nucleotide may be methylated to form 5-methylcytosine"
tccttttatagcaagatcccaagctgatcccaaaagcccattcagaaggattttattatgcgagtcaccaaaaatcagttacaggcaagtttgcctttacgttaacagctaaggagcctcca

SEQ ID NO: 7721 - DNA, 122 bp, Homo sapiens
  misc_feature (61)..(62): /note="This region represents a CpG dinucleotide"
  misc_feature (61)..(61): /note="Nucleotide may be methylated to form 5-methylcytosine"
agagggaggagatgtaggtctgggcttccacagggacctggtattttaggatcagggtaccgctggcctgaggcttggatcattcagagcctgggggtggaatggctggcagcctgtggccc

SEQ ID NO: 7722 - DNA, 122 bp, Homo sapiens
  misc_feature (61)..(62): /note="This region represents a CpG dinucleotide"
  misc_feature (61)..(61): /note="Nucleotide may be methylated to form 5-methylcytosine"
ctgtctcaactgcccaaacctgctgttattgcacgaaaggggccttaggcaatctgtaaacgaacaggcaaagctgtgttctaatgctgctttttttgtttgtttttacaaaatcaagtggt

SEQ ID NO: 7723 - DNA, 122 bp, Homo sapiens
  misc_feature (61)..(62): /note="This region represents a CpG dinucleotide"
  misc_feature (61)..(61): /note="Nucleotide may be methylated to form 5-methylcytosine"
gattttggtggatagtcagatggaatcaggttgaagggcacctaaagcttaatccctgctcgtgagtctttatgtgcctttgggcaaatatcttactttctacatgaagtttttctccttgg

SEQ ID NO: 7724 - DNA, 122 bp, Homo sapiens
  misc_feature (61)..(62): /note="This region represents a CpG dinucleotide"
  misc_feature (61)..(61): /note="Nucleotide may be methylated to form 5-methylcytosine"
tctcctctaggactgtattttgagcctgaaccaatttcttccacgcccaattatttgcaacggggagaattttccagttgtgtttcatgtgaagaaaactcaagctgcctcgaccagatctt

SEQ ID NO: 7725 - DNA, 122 bp, Homo sapiens
  misc_feature (61)..(62): /note="This region represents a CpG dinucleotide"
  misc_feature (61)..(61): /note="Nucleotide may be methylated to form 5-methylcytosine"
gggccctatggagccaaagggagtaaacagaatagtactgttctgggttgttgagggattcggtgagattccctaggtaggttttggtcaacaagcaggcatttcataatcctctctacctc

SEQ ID NO: 7726 - DNA, 122 bp, Homo sapiens
  misc_feature (61)..(62): /note="This region represents a CpG dinucleotide"
  misc_feature (61)..(61): /note="Nucleotide may be methylated to form 5-methylcytosine"
cgcatccccacctggcagtgggagaggacagggaggagcaggtgtcaggagtcaccctcacgcccagcagcacccgcccagcaagggtgtcatcctgaaccctgccccagggccgggaggag

SEQ ID NO: 7727 - DNA, 122 bp, Homo sapiens
  misc_feature (61)..(62): /note="This region represents a CpG dinucleotide"
  misc_feature (61)..(61): /note="Nucleotide may be methylated to form 5-methylcytosine"
gcccagcccaggccttgtaattgtagcagaggatttggcttccctcagcctatggatctgcgccctgaaggatgaacaggaattagtgaagcaattctctattgagaaggagcaattctcta

SEQ ID NO: 7728 - DNA, 122 bp, Homo sapiens
  misc_feature (61)..(62): /note="This region represents a CpG dinucleotide"
  misc_feature (61)..(61): /note="Nucleotide may be methylated to form 5-methylcytosine"
cccagagcctgactgcaccgtcccgctgccctgagggcctgggaggggcgcccctgagaacgagccctgtcttggcccttttacagtacaccaggggccagccagccacaggggccggggcc

SEQ ID NO: 7729 - DNA, 122 bp, Homo sapiens
  misc_feature (61)..(62): /note="This region represents a CpG dinucleotide"
  misc_feature (61)..(61): /note="Nucleotide may be methylated to form 5-methylcytosine"
aggtggggcctgatgggaggtgtttgtgtcctcatattgagaaacttctctatttgtttccgggagatctgattgtttttaagaaagcctgttacctcctctcactctctgtgtttgtccct

SEQ ID NO: 7730 - DNA, 122 bp, Homo sapiens
  misc_feature (61)..(62): /note="This region represents a CpG dinucleotide"
  misc_feature (61)..(61): /note="Nucleotide may be methylated to form 5-methylcytosine"
tgagccaccgcgccaggcctgagtaatcctaatcacaggattttaaaaagaaacttcctgcgccacccattaaacaatatctcctaccaatttggtagtaaatattttgctaatagtaccta

SEQ ID NO: 7731 - DNA, 122 bp, Homo sapiens
  misc_feature (61)..(62): /note="This region represents a CpG dinucleotide"
  misc_feature (61)..(61): /note="Nucleotide may be methylated to form 5-methylcytosine"
tggcttcctgtgcccctctttacagaacacctttctgcaatgattgtgctttcctcctgccgtgctgcccagctcaccatgactcactgctggttggtataccaaagaggacttgcaaagca

SEQ ID NO: 7732 - DNA, 122 bp, Homo sapiens
  misc_feature (61)..(62): /note="This region represents a CpG dinucleotide"
  misc_feature (61)..(61): /note="Nucleotide may be methylated to form 5-methylcytosine"
tgctggagacctttcagaacctggcctcagtaggtaaggatgacatcattccttccttcacgtagttattgagagaacaagtatttcttacacatcagacctgttccaaggcttggaatgtg

SEQ ID NO: 7733 - DNA, 122 bp, Homo sapiens
  misc_feature (61)..(62): /note="This region represents a CpG dinucleotide"
  misc_feature (61)..(61): /note="Nucleotide may be methylated to form 5-methylcytosine"
aacacctctgatagtcttgctctgtcacccaggctggagtgttgttggttcactggaacacgagtatttatgttttatttcttaagcttagtgatgtgtgtcagacctctgagcccaagcaa

SEQ ID NO: 7734 - DNA, 122 bp, Homo sapiens
  misc_feature (61)..(62): /note="This region represents a CpG dinucleotide"
  misc_feature (61)..(61): /note="Nucleotide may be methylated to form 5-methylcytosine"
cttgagtttttgttctctcttactgtcatctgctaatactataatatctgccccaaggggcgtgtgaatcattcttttccttcactctaaacatacgctaacaattccttttattgtcctct

SEQ ID NO: 7735 - DNA, 122 bp, Homo sapiens
  misc_feature (61)..(62): /note="This region represents a CpG dinucleotide"
  misc_feature (61)..(61): /note="Nucleotide may be methylated to form 5-methylcytosine"
atacacaatattatagacgtatgaagaaggacctgcacttcctacacatgaaagtagttacgatttatagagccctgatttggtcccaggtgctgtgttacaagtgctaagctactgagtca

SEQ ID NO: 7736 - DNA, 122 bp, Homo sapiens
  misc_feature (61)..(62): /note="This region represents a CpG dinucleotide"
  misc_feature (61)..(61): /note="Nucleotide may be methylated to form 5-methylcytosine"
acttgtaaactgtccatgaatcacactatacagctcacttctcaggctatccatgtgaagcgcaaagctttctaagccatctagccacaggctctcccctaagaccacttctgtatattcca

SEQ ID NO: 7737 - DNA, 122 bp, Homo sapiens
  misc_feature (61)..(62): /note="This region represents a CpG dinucleotide"
  misc_feature (61)..(61): /note="Nucleotide may be methylated to form 5-methylcytosine"
cagaccccctctaggagatgttactgtcgctcattcgtatttccggttctactcctcttccgggcacactggagaattacacttccttgctgacttgagataagtcacagctttggccaatg

SEQ ID NO: 7738 - DNA, 122 bp, Homo sapiens
  misc_feature (61)..(62): /note="This region represents a CpG dinucleotide"
  misc_feature (61)..(61): /note="Nucleotide may be methylated to form 5-methylcytosine"
taaatgagtggcttctctcagtcaaagtggtaccagctggcccctggctgcagctcaccacggccaactgtgtgacatagtaacagttaacctccactgactggtcaccgtgctccaggcac

SEQ ID NO: 7739 - DNA, 122 bp, Homo sapiens
  misc_feature (61)..(62): /note="This region represents a CpG dinucleotide"
  misc_feature (61)..(61): /note="Nucleotide may be methylated to form 5-methylcytosine"
agccacctctcagggacagtggctgccccagcctcgccccgtcctgcccctgctccgtgacgctccctggaactcagtcattctctggggaaccaacagccctcagaactgagttgcagctg

SEQ ID NO: 7740 - DNA, 122 bp, Homo sapiens
  misc_feature (61)..(62): /note="This region represents a CpG dinucleotide"
  misc_feature (61)..(61): /note="Nucleotide may be methylated to form 5-methylcytosine"
ctgatgagcttcctggatgcagaggaagacagcatggagcacatgcaaatcactgcatgacgtggaaccaggatcacttaggaggctgatgacacaatgaaaaggaaggtcactgctaacag

SEQ ID NO: 7741 - DNA, 122 bp, Homo sapiens
  misc_feature (61)..(62): /note="This region represents a CpG dinucleotide"
  misc_feature (61)..(61): /note="Nucleotide may be methylated to form 5-methylcytosine"
ctgagtaaatattaattgatttcaactggcattggcttacagtatccttacatgaaccaccgtagctccgagtcttgcaagattcatttccttatcacacttcaggttgattttatgggagt

SEQ ID NO: 7742 - DNA, 122 bp, Homo sapiens
  misc_feature (61)..(62): /note="This region represents a CpG dinucleotide"
  misc_feature (61)..(61): /note="Nucleotide may be methylated to form 5-methylcytosine"
atcattaagcagtttcttggctatgttcccatcatggtgaaatccaagctttgcaacttacgtaaccttcccccacaagccctcattgagcaccatgaggaggcagaggtaatgacgggcgt

SEQ ID NO: 7743 - DNA, 122 bp, Homo sapiens
  misc_feature (61)..(62): /note="This region represents a CpG dinucleotide"
  misc_feature (61)..(61): /note="Nucleotide may be methylated to form 5-methylcytosine"
tcgagggcggggacggcagagggagccagcggccgggggtgggccaggagcactgcggggcgcaagcccgggtcagttctgcgcgttgggttcgcccactttctgagcgcctgcgaagagcg

SEQ ID NO: 7744 - DNA, 122 bp, Homo sapiens
  misc_feature (61)..(62): /note="This region represents a CpG dinucleotide"
  misc_feature (61)..(61): /note="Nucleotide may be methylated to form 5-methylcytosine"
cacagagtcgagaattttgagactagtggtaacttctttcgccagtccctaatgacatcacgttagagggtgtgggacagtgtgattaactctaagtgtttaaggtcttttgcaataggcat

SEQ ID NO: 7745 - DNA, 122 bp, Homo sapiens
  misc_feature (61)..(62): /note="This region represents a CpG dinucleotide"
  misc_feature (61)..(61): /note="Nucleotide may be methylated to form 5-methylcytosine"
ctacaatcaactacctacctaacctaaagtaagtgctatacccaaacagcttcagtacttcgttctttcaagccaaatgctcaagaagaatgacagaagcccagtgaaaagacagacatgga

SEQ ID NO: 7746 - DNA, 122 bp, Homo sapiens
  misc_feature (61)..(62): /note="This region represents a CpG dinucleotide"
  misc_feature (61)..(61): /note="Nucleotide may be methylated to form 5-methylcytosine"
ttactgagatcagatctcactatactgcccatgctgaagtgcagtggctattcacaggtacgatcatgggccagtgtcatgatcaagtgcagccttgaactcctgggctcaagtgatcttcc

SEQ ID NO: 7747 - DNA, 122 bp, Homo sapiens
  misc_feature (61)..(62): /note="This region represents a CpG dinucleotide"
  misc_feature (61)..(61): /note="Nucleotide may be methylated to form 5-methylcytosine"
catggcaaaggaggaattagtaacacagggttctttctttccagcctgaatcccaaatgacgtcagtgcaaagggcagggtttctttgtacagaaacagctgacaagaaagccatggaattt

SEQ ID NO: 7748 - DNA, 122 bp, Homo sapiens
  misc_feature (61)..(62): /note="This region represents a CpG dinucleotide"
  misc_feature (61)..(61): /note="Nucleotide may be methylated to form 5-methylcytosine"
cccaggagttggagagcaacatcacaacaccccatttctactaataatcaaaaaattggccgggcatggtggcatgtgcctgtagtcccagctacttgggaggctgaggcaggagaatcgct

SEQ ID NO: 7749 - DNA, 122 bp, Homo sapiens
  misc_feature (61)..(62): /note="This region represents a CpG dinucleotide"
  misc_feature (61)..(61): /note="Nucleotide may be methylated to form 5-methylcytosine"
ctcctctttgtcttcagcatctatgcttcttattgctaattaaacttcagctatcccttccgccttctggctcttagtcatgccaagtgtgtggcaactttaggacttttgcaaagctgttc

SEQ ID NO: 7750 - DNA, 122 bp, Homo sapiens
  misc_feature (61)..(62): /note="This region represents a CpG dinucleotide"
  misc_feature (61)..(61): /note="Nucleotide may be methylated to form 5-methylcytosine"
tttcaaatgagggtgtggattttggggaagaacaccacagaggtgattgccctatcatcacgtcattgcagggcgtacatgatattgatatgtcttattcatggtgatgtcagccagacctc

SEQ ID NO: 7751 - DNA, 122 bp, Homo sapiens
  misc_feature (61)..(62): /note="This region represents a CpG dinucleotide"
  misc_feature (61)..(61): /note="Nucleotide may be methylated to form 5-methylcytosine"
catcttattatctctgtagcctgggactctacagtttcatttcctggtatctccttgttccgccactcgttagccatcaatctacaggatgtggactagaagagaagataggaaacagctgc

SEQ ID NO: 7752 - DNA, 122 bp, Homo sapiens
  misc_feature (61)..(62): /note="This region represents a CpG dinucleotide"
  misc_feature (61)..(61): /note="Nucleotide may be methylated to form 5-methylcytosine"
ccaagcaagccacagccagcatgtcagaaagcaagattcaagtcagggtccccttggcttcgactggctctactggatcaaacagctccagcggggacagaggcagcaggaaagagcttcct

SEQ ID NO: 7753 - DNA, 122 bp, Homo sapiens
  misc_feature (61)..(62): /note="This region represents a CpG dinucleotide"
  misc_feature (61)..(61): /note="Nucleotide may be methylated to form 5-methylcytosine"
taggccatggatcatctctgcagagaatcctaccatgctgcattcttgctttaaacctttcgccctctaaaacaatgcccaagagccaatgttagtcatggtcttcctgtatttgctctagg

SEQ ID NO: 7754 - DNA, 122 bp, Homo sapiens
  misc_feature (61)..(62): /note="This region represents a CpG dinucleotide"
  misc_feature (61)..(61): /note="Nucleotide may be methylated to form 5-methylcytosine"
aggccatctgacttcagaatctgagctctaaccaccatgttatacagtttagcctgctcacgttggttcttagcacttgcaactaagacgtattagctaaatagggctcctcagtctggccc

SEQ ID NO: 7755 - DNA, 122 bp, Homo sapiens
  misc_feature (61)..(62): /note="This region represents a CpG dinucleotide"
  misc_feature (61)..(61): /note="Nucleotide may be methylated to form 5-methylcytosine"
agcctactccacagcttctccgcagccaggaaggttcctttctgcttgcttgcttttctacgcggccactgaaagcagctgtgacgatatgtaggtcatactaaccacaaatattaccaaga

SEQ ID NO: 7756 - DNA, 122 bp, Homo sapiens
  misc_feature (61)..(62): /note="This region represents a CpG dinucleotide"
  misc_feature (61)..(61): /note="Nucleotide may be methylated to form 5-methylcytosine"
aatatttttggagtcaggggtctcaccatattgcccaggctggtttgaactggtttcaagcgatcctcccacaccccgagtagctgaaattacaggtgtggagccaccgtgcccagctgtta

SEQ ID NO: 7757 - DNA, 122 bp, Homo sapiens
  misc_feature (61)..(62): /note="This region represents a CpG dinucleotide"
  misc_feature (61)..(61): /note="Nucleotide may be methylated to form 5-methylcytosine"
atccacccgcctcggcctcccaaagtgctgggattacaggcatgagccactgcgcccggccgtagtcaacagtttagagtcaacagccccagctgtcactcacaagtgtcattctgggtgtg

SEQ ID NO: 7758 - DNA, 122 bp, Homo sapiens
  misc_feature (61)..(62): /note="This region represents a CpG dinucleotide"
  misc_feature (61)..(61): /note="Nucleotide may be methylated to form 5-methylcytosine"
tataagaggttgctgacctaatgccagctgactcagtgactgaatctgtgatgttctcaacgtcaccatggggccagggctctgacccactaacacagacctgattctgatctgggaactcc

SEQ ID NO: 7759 - DNA, 122 bp, Homo sapiens
  misc_feature (61)..(62): /note="This region represents a CpG dinucleotide"
  misc_feature (61)..(61): /note="Nucleotide may be methylated to form 5-methylcytosine"
aggttggctgtggttcagctgtgtcactaggctgaacttactcaataagccacataacttcgagtcaggttccagtccattgtatgtgttattttcaaaatctaggctaaaggaggaacagt

SEQ ID NO: 7760 - DNA, 122 bp, Homo sapiens
  misc_feature (61)..(62): /note="This region represents a CpG dinucleotide"
  misc_feature (61)..(61): /note="Nucleotide may be methylated to form 5-methylcytosine"
tatgccaacacacaagcctccatgcctggaaccagcccaagccccagacctcttgcaccacgctctgaggacaatgggtcccagagaacagcaagttagctcctgactccatctgcagctcc

SEQ ID NO: 7761 - DNA, 122 bp, Homo sapiens
  misc_feature (61)..(62): /note="This region represents a CpG dinucleotide"
  misc_feature (61)..(61): /note="Nucleotide may be methylated to form 5-methylcytosine"
tccggggccagtgaggggcttgtctgccttctcacaggtgaagacgccagactcacagggcgcccgtgtttgctcatccgctttgactcagctcaccggaaagaagtttgctaatctttgtg

SEQ ID NO: 7762 - DNA, 122 bp, Homo sapiens
  misc_feature (61)..(62): /note="This region represents a CpG dinucleotide"
  misc_feature (61)..(61): /note="Nucleotide may be methylated to form 5-methylcytosine"
gagtgagtttgagtaagtcacctcacttctctcaacctcagtttcctcagtggtagaatgcgagttctgataccttacaggttgcagtgaggattcccgtcaatataagggtctcagcacat

SEQ ID NO: 7763 - DNA, 122 bp, Homo sapiens
  misc_feature (61)..(62): /note="This region represents a CpG dinucleotide"
  misc_feature (61)..(61): /note="Nucleotide may be methylated to form 5-methylcytosine"
gttaatccacaaatatttcttgaacaaataaagtttgtctgtcttagaatgatctatactcgatgagaggttggactatctcatgtctaagtactatgaccaagctggaggttacatgacct

SEQ ID NO: 7764 - DNA, 122 bp, Homo sapiens
  misc_feature (61)..(62): /note="This region represents a CpG dinucleotide"
  misc_feature (61)..(61): /note="Nucleotide may be methylated to form 5-methylcytosine"
gggaaaagttaacattgcttcaccccgtgccataaatggatgacactttcaggattgtggcgctaaagacagagagtctgagaaaaactggaaagcagcaagcttgcctcatgaacagaaca

SEQ ID NO: 7765 - DNA, 122 bp, Homo sapiens
  misc_feature (61)..(62): /note="This region represents a CpG dinucleotide"
  misc_feature (61)..(61): /note="Nucleotide may be methylated to form 5-methylcytosine"
tccacccaaatactgaaaatcataagcaatgactgccattaaattatggatgactctgcccgccagttgtttgcaagcagagtaaatagaccatcagggacagggtaaagtgaaacttaata

SEQ ID NO: 7766 - DNA, 122 bp, Homo sapiens
  misc_feature (61)..(62): /note="This region represents a CpG dinucleotide"
  misc_feature (61)..(61): /note="Nucleotide may be methylated to form 5-methylcytosine"
gtcttaatgggtctgggcctggctggtagggagctgagcagcttgtagaacaccagctcacgcagcatgtgatggggactggccccaggctataggttaataattgatcagacccaaccaca

SEQ ID NO: 7767 - DNA, 122 bp, Homo sapiens
  misc_feature (61)..(62): /note="This region represents a CpG dinucleotide"
  misc_feature (61)..(61): /note="Nucleotide may be methylated to form 5-methylcytosine"
ccggagtccacctcaccgacttacctgatttctctaggactggttctgtgattgcagaaccgtgggttcctcagactgcgtctgtctgtccttcaccaggccagggccgctgaggagcatgc

SEQ ID NO: 7768 - DNA, 122 bp, Homo sapiens
  misc_feature (61)..(62): /note="This region represents a CpG dinucleotide"
  misc_feature (61)..(61): /note="Nucleotide may be methylated to form 5-methylcytosine"
acaaccatgtaactttctgtatttagtcaactttctgatctctcagttttcttaagtgaccgaaaacccaataaagacaacacaaggctggttgcagtgactcatgcctgtaatctcaacag

SEQ ID NO: 7769 - DNA, 122 bp, Homo sapiens
  misc_feature (61)..(62): /note="This region represents a CpG dinucleotide"
  misc_feature (61)..(61): /note="Nucleotide may be methylated to form 5-methylcytosine"
tactgtgaggacccagagggacataagtgcagacagtgctgactctcccaggagtttactcgtgagtaggggtggcagagaagccatgtgtgtaaaaatgcaaggtagaaagggctttgtct

SEQ ID NO: 7770 - DNA, 122 bp, Homo sapiens
  misc_feature (61)..(62): /note="This region represents a CpG dinucleotide"
  misc_feature (61)..(61): /note="Nucleotide may be methylated to form 5-methylcytosine"
ccctagccaggagcctgcctggttggaggctggtcagtgacgttgctgtggagaccaggacggtccagcaagtgaccatggcactggccccaggtggctgctgggtgctgccctgggagcaa

SEQ ID NO: 7771 - DNA, 122 bp, Homo sapiens
  misc_feature (61)..(62): /note="This region represents a CpG dinucleotide"
  misc_feature (61)..(61): /note="Nucleotide may be methylated to form 5-methylcytosine"
tgctttgctcctaagagctctagacctggcttctgtgggactagaaaaagccaggactcacggccaaactcatgtacagtaaagaaagatgttcaaatgctgtaatgggtgagaagagcgaa

SEQ ID NO: 7772 - DNA, 122 bp, Homo sapiens
  misc_feature (61)..(62): /note="This region represents a CpG dinucleotide"
  misc_feature (61)..(61): /note="Nucleotide may be methylated to form 5-methylcytosine"
accggaaacagaatgtgctgactaagcaacctgagcaacctcatgatgactgttcacatacgtaatgagtttctgtaggtaatcatttttgaaagattttgctagactaattttaactctgg

SEQ ID NO: 7773 - DNA, 122 bp, Homo sapiens
  misc_feature (61)..(62): /note="This region represents a CpG dinucleotide"
  misc_feature (61)..(61): /note="Nucleotide may be methylated to form 5-methylcytosine"
caagtttcttcaggcaggaggaatagcacacacaaaggtaccacctgggaaggattcaagcgtgcacatagcaaaagggacccacttggtgggatggttttgtggggacattgttaaaaaaa

SEQ ID NO: 7774 - DNA, 122 bp, Homo sapiens
  misc_feature (61)..(62): /note="This region represents a CpG dinucleotide"
  misc_feature (61)..(61): /note="Nucleotide may be methylated to form 5-methylcytosine"
aagtgttcccagaggaaggtcatacacccattaaactctgctgttttgcctcttagtgaacgtgccttagtccacttgcccaactccaaagatcttaccaggaagctgctgattaccagttt

SEQ ID NO: 7775 - DNA, 122 bp, Homo sapiens
  misc_feature (61)..(62): /note="This region represents a CpG dinucleotide"
  misc_feature (61)..(61): /note="Nucleotide may be methylated to form 5-methylcytosine"
cgtgacaggatgagtgacagcatcggatacacagaggtggagggatcctgggagtggtgacgacctgacaatatctgagcttatatgcaccagattgagggagagctggggggagtgcagtg

SEQ ID NO: 7776 - DNA, 122 bp, Homo sapiens
  misc_feature (61)..(62): /note="This region represents a CpG dinucleotide"
  misc_feature (61)..(61): /note="Nucleotide may be methylated to form 5-methylcytosine"
gccaggcgaaaaggctgggaatcaattctccaacagccacatatgatgcaagagtccactcgcaacaaagcctacgacacaccaaatatcagaaacgaaagtctctgagaacttgtgcaaat

SEQ ID NO: 7777 - DNA, 122 bp, Homo sapiens
  misc_feature (61)..(62): /note="This region represents a CpG dinucleotide"
  misc_feature (61)..(61): /note="Nucleotide may be methylated to form 5-methylcytosine"
aaggagtggacttagcagctgagtcaaacggggaggagggagttggtgttctggtactcccgagctcctaagctcctaagctatgcagaattacagttctttggtaacagaaaaaacaaagt

SEQ ID NO: 7778 - DNA, 122 bp, Homo sapiens
  misc_feature (61)..(62): /note="This region represents a CpG dinucleotide"
  misc_feature (61)..(61): /note="Nucleotide may be methylated to form 5-methylcytosine"
aaccaaaaccagtagcacatgaaaaagcttatccaccctgatcaagttggcttccacatacgtaaatcaataaatgtaatccatcacataaatagaacccataaattcccacataaattgtg

SEQ ID NO: 7779 - DNA, 122 bp, Homo sapiens
  misc_feature (61)..(62): /note="This region represents a CpG dinucleotide"
  misc_feature (61)..(61): /note="Nucleotide may be methylated to form 5-methylcytosine"
ctttagaggctgctgcccctggattcaatgattatcattttcatcacagcatttactgagcgtttatgacatacctggaaatatctcaagacccagcctcttcacttactagctatgtaacc

SEQ ID NO: 7780 - DNA, 122 bp, Homo sapiens
  misc_feature (61)..(62): /note="This region represents a CpG dinucleotide"
  misc_feature (61)..(61): /note="Nucleotide may be methylated to form 5-methylcytosine"
tctttctaacccaaggctcaaggtaagcctgcattcttgtgactctttctgacagtcaatcgtaacaaatcatgctacctcggctaactgtcttcacttgatgttctacccagaaaagcaca

SEQ ID NO: 7781 - DNA, 122 bp, Homo sapiens
  misc_feature (61)..(62): /note="This region represents a CpG dinucleotide"
  misc_feature (61)..(61): /note="Nucleotide may be methylated to form 5-methylcytosine"
taaaaatccaaacagcatttttctccttcttctctttggtcagactgctcaatgcttttacgcttcctcctccgccccctgcttgcgtccatcccccaccccacaccccaccccatgcaaca

SEQ ID NO: 7782 - DNA, 122 bp, Homo sapiens
  misc_feature (61)..(62): /note="This region represents a CpG dinucleotide"
  misc_feature (61)..(61): /note="Nucleotide may be methylated to form 5-methylcytosine"
aacaccagtagacccagagacaggggactgaaaaagcaagatgacagcaatcctgacttacggcctacttgagcccagagccctgcctggaagcacacggctccactggcacagcctgtgcc

SEQ ID NO: 7783 - DNA, 122 bp, Homo sapiens
  misc_feature (61)..(62): /note="This region represents a CpG dinucleotide"
  misc_feature (61)..(61): /note="Nucleotide may be methylated to form 5-methylcytosine"
acaccagaggcaggcaaagccacacctgtgggtgcaggccacacgcaggctgcacagacccgggacaggtctgagctctgaggcgtgcggcccatctccgcggcaggagcttctgtctgagc

SEQ ID NO: 7784 - DNA, 122 bp, Homo sapiens
  misc_feature (61)..(62): /note="This region represents a CpG dinucleotide"
  misc_feature (61)..(61): /note="Nucleotide may be methylated to form 5-methylcytosine"
cccacaaggcatattcaaggactgagtccccatctggagcttgaggtccttgttcaagctcgtgtagttgtaggagaattcactccctagaagttacagggcggaggcctttggctcctaga

SEQ ID NO: 7785 - DNA, 122 bp, Homo sapiens
  misc_feature (61)..(62): /note="This region represents a CpG dinucleotide"
  misc_feature (61)..(61): /note="Nucleotide may be methylated to form 5-methylcytosine"
atgataacatatcaaaacccaaatctcagtggcttaaaacatcaaggtttatttcctactcgtgctacatgttcatgtggaggagagggagctctgctccacagaatcactcaggaatccag

SEQ ID NO: 7786 - DNA, 122 bp, Homo sapiens
  misc_feature (61)..(62): /note="This region represents a CpG dinucleotide"
  misc_feature (61)..(61): /note="Nucleotide may be methylated to form 5-methylcytosine"
aacccttcacaatctggaactggaaagagatttctagcccccacgaggaacaaagcttgacgatgaggaaatgacaacctcccttgtttgctaactattctcaggctaaaaagagagtgctg

SEQ ID NO: 7787 - DNA, 122 bp, Homo sapiens
  misc_feature (61)..(62): /note="This region represents a CpG dinucleotide"
  misc_feature (61)..(61): /note="Nucleotide may be methylated to form 5-methylcytosine"
agtggtatttggaacaatattgctgctgatcagagggtccaagggagatgtaggtgccgacgtcactgagatcctgatctggccacgtttgaacgaactatttaagcccgacctcacttcct

SEQ ID NO: 7788 - DNA, 122 bp, Homo sapiens
  misc_feature (61)..(62): /note="This region represents a CpG dinucleotide"
  misc_feature (61)..(61): /note="Nucleotide may be methylated to form 5-methylcytosine"
gataagcaaaagcagtccccacaggtgtctgggcatgtggcatgggtggggtggccagcacgctacaggggcttcctatgcgcttgggatacacaggggctggaggcttcccaggagtttgt

SEQ ID NO: 7789 - DNA, 122 bp, Homo sapiens
  misc_feature (61)..(62): /note="This region represents a CpG dinucleotide"
  misc_feature (61)..(61): /note="Nucleotide may be methylated to form 5-methylcytosine"
ttatgtgctaaaccattagctctgactcaaatccagcttcctagtctctcatcagccctccgcctgggctaatgagcagaggtgaaatcactggataagtggctctcaaagtgtggccctca

SEQ ID NO: 7790 - DNA, 122 bp, Homo sapiens
  misc_feature (61)..(62): /note="This region represents a CpG dinucleotide"
  misc_feature (61)..(61): /note="Nucleotide may be methylated to form 5-methylcytosine"
agttctctctgctgtctgacctgaaccccaactcagaagcagcagaccaacttggtctcccggtatctccagccttccctcaggcctaggcttgctcctcagtctgcaccccaggaccttcc

SEQ ID NO: 7791 - DNA, 122 bp, Homo sapiens
  misc_feature (61)..(62): /note="This region represents a CpG dinucleotide"
  misc_feature (61)..(61): /note="Nucleotide may be methylated to form 5-methylcytosine"
gcagcacatcacagcatctgctacatcagatctttctgtatttcatgacctttcagcttccgttgctgctgctcattgctaaagtctttcccaattcaaatcactgacagtgagaatctgat

SEQ ID NO: 7792 - DNA, 122 bp, Homo sapiens
  misc_feature (61)..(62): /note="This region represents a CpG dinucleotide"
  misc_feature (61)..(61): /note="Nucleotide may be methylated to form 5-methylcytosine"
agagattagcacgttggaaccaccaacatgtcaccttgtggtgtgaggtcatctcgacttcgtaagccctcagcatacccaggcttctcccaaaatctgtgagttgcagcagccacagagag

SEQ ID NO: 7793 - DNA, 122 bp, Homo sapiens
  misc_feature (61)..(62): /note="This region represents a CpG dinucleotide"
  misc_feature (61)..(61): /note="Nucleotide may be methylated to form 5-methylcytosine"
tgcgcgtgcctgtgagccccgggactccccagggtcctgggcactggggctgtggatcctcggaggaactcagagtggttcccctgaatttcccggccctggcgacgaggtgctggtcccag

SEQ ID NO: 7794 - DNA, 122 bp, Homo sapiens
  misc_feature (61)..(62): /note="This region represents a CpG dinucleotide"
  misc_feature (61)..(61): /note="Nucleotide may be methylated to form 5-methylcytosine"
aaaaaagaatactaacacaagctgcctctaggcctcgtttgatctagacactactcctcccggtcaggtcaggctcaaatcatctctaggtgacctcaaatcttactggcagcaaggtcaga

SEQ ID NO: 7795 - DNA, 122 bp, Homo sapiens
  misc_feature (61)..(62): /note="This region represents a CpG dinucleotide"
  misc_feature (61)..(61): /note="Nucleotide may be methylated to form 5-methylcytosine"
gctaggcagagacgccccaggccatgttagagctttgagtgaggcctggtaacagggaggcgctgtcacctactggccttgccaatccagctccaagatgctgagcctgaagctccccaggc

SEQ ID NO: 7796 - DNA, 122 bp, Homo sapiens
  misc_feature (61)..(62): /note="This region represents a CpG dinucleotide"
  misc_feature (61)..(61): /note="Nucleotide may be methylated to form 5-methylcytosine"
cagtccttagtttttgctttctatctcattttcattgagaatttaaagtggaatttataacgaatttgtcagacctggtaagcatttgatatatgctagtttagtgactaaccaaacccaac

SEQ ID NO: 7797 - DNA, 122 bp, Homo sapiens
  misc_feature (61)..(62): /note="This region represents a CpG dinucleotide"
  misc_feature (61)..(61): /note="Nucleotide may be methylated to form 5-methylcytosine"
cagtggctggctaacaatcaaaaataggttttggtaatgttgggtaacgttgctcaaatacggctatattatgcagagcacatggcaatcgttgaagagtaaaacacagataattccacttc

SEQ ID NO: 7798 - DNA, 122 bp, Homo sapiens
  misc_feature (61)..(62): /note="This region represents a CpG dinucleotide"
  misc_feature (61)..(61): /note="Nucleotide may be methylated to form 5-methylcytosine"
tggatgtggggggctttgcccagctggtgtgaggctggggtctgtgtgtgtctgccctgccgtgcggcccgctgtgtgtttgtgcaacacaattgtgtcccaggaaggtgtgtgacaatctc

SEQ ID NO: 7799 - DNA, 122 bp, Homo sapiens
  misc_feature (61)..(62): /note="This region represents a CpG dinucleotide"
  misc_feature (61)..(61): /note="Nucleotide may be methylated to form 5-methylcytosine"
atgacatagctactgtgacatagtgttaagctatgtcagaaggagccatgacaatgtcaacggttgaaagtcaggagctgaggatgtcaatgaccaatgagaaggaagcatatacagtgtgg

SEQ ID NO: 7800 - DNA, 122 bp, Homo sapiens
  misc_feature (61)..(62): /note="This region represents a CpG dinucleotide"
  misc_feature (61)..(61): /note="Nucleotide may be methylated to form 5-methylcytosine"
taaacactgaaagagagcttgttaaaatttcacaatatgacacaccttagattaggcaggcgatatagtcaggtttttcacttgaaaattcaattacaggtaggcacggtggcttatgcctg

SEQ ID NO: 7801 - DNA, 122 bp, Homo sapiens
  misc_feature (61)..(62): /note="This region represents a CpG dinucleotide"
  misc_feature (61)..(61): /note="Nucleotide may be methylated to form 5-methylcytosine"
tcctaaagaagttgaaaatagaactaccttatgacccagcaaccccctctgctgggtatacgcccagagatgaaatcaccaccttgtaaaatatctgcactcccatgttcactccagcatta

SEQ ID NO: 7802 - DNA, 122 bp, Homo sapiens
  misc_feature (61)..(62): /note="This region represents a CpG dinucleotide"
  misc_feature (61)..(61): /note="Nucleotide may be methylated to form 5-methylcytosine"
gaaaacagtgtcccttggcttaaaacaaatggtgtcctcttagtctcccgtcccagtgggcgttagatgtcggggcaggcggctgcacacttaattctccgcgggggcattggcctgtctgc

SEQ ID NO: 7803 - DNA, 122 bp, Homo sapiens
  misc_feature (61)..(62): /note="This region represents a CpG dinucleotide"
  misc_feature (61)..(61): /note="Nucleotide may be methylated to form 5-methylcytosine"
gactccctatcagactcacagtctcaagttagcagctcacagtggataaggcggtgtgagcgctagacctcaaggcctgaatatgatttggccagtgctcttggctcaatccctgctccatg

SEQ ID NO: 7804 - DNA, 122 bp, Homo sapiens
  misc_feature (61)..(62): /note="This region represents a CpG dinucleotide"
  misc_feature (61)..(61): /note="Nucleotide may be methylated to form 5-methylcytosine"
aggaagtgctggaatcctcggtggcctaaccccggccctcaggacagaacagaaggcaggcggccccggccaggacatgcccagtggaatttcagaggcactttcgggaacacagcgccttc

SEQ ID NO: 7805 - DNA, 122 bp, Homo sapiens
  misc_feature (61)..(62): /note="This region represents a CpG dinucleotide"
  misc_feature (61)..(61): /note="Nucleotide may be methylated to form 5-methylcytosine"
aggaaaacatctactggttcctcactaaggaacagatgaacatccttatcagagaagttacggggatatgtttgttttggcttggcatgtatttctcttactccattctagagagtcccatc

SEQ ID NO: 7806 - DNA, 122 bp, Homo sapiens
  misc_feature (61)..(62): /note="This region represents a CpG dinucleotide"
  misc_feature (61)..(61): /note="Nucleotide may be methylated to form 5-methylcytosine"
atggtattaggaatgtgatctatcataacaaatgggaccaaggcacgagctgccatttcacgggagtggtagacaggtgagtgaccacacctggggagaaataaaaacacaagaccattcaa

SEQ ID NO: 7807 - DNA, 122 bp, Homo sapiens
  misc_feature (61)..(62): /note="This region represents a CpG dinucleotide"
  misc_feature (61)..(61): /note="Nucleotide may be methylated to form 5-methylcytosine"
tgctgtgggatgagctttctgagagcctgacctgattggggcaactccttgcctgaggaacgcttggctctaggtgaaggcccagccattggcacagcccctggattcttccctacctggct

SEQ ID NO: 7808 - DNA, 122 bp, Homo sapiens
  misc_feature (61)..(62): /note="This region represents a CpG dinucleotide"
  misc_feature (61)..(61): /note="Nucleotide may be methylated to form 5-methylcytosine"
caccaagccattcatgagggatctattcccatgatccagacacctcccattaggcctcaccgccaatcttggggatcagatttcaacatgaggcttgaggggaatacatatccaaactatag

SEQ ID NO: 7809 - DNA, 122 bp, Homo sapiens
  misc_feature (61)..(62): /note="This region represents a CpG dinucleotide"
  misc_feature (61)..(61): /note="Nucleotide may be methylated to form 5-methylcytosine"
aaaaaagtgtgtccttcatgggttacactttcatatttttatgcagtgttaagttagctacgttatggggaacttgggttttattcctgctcgtgcatgatgtatgtttcagaacttatttg

SEQ ID NO: 7810 - DNA, 122 bp, Homo sapiens
  misc_feature (61)..(62): /note="This region represents a CpG dinucleotide"
  misc_feature (61)..(61): /note="Nucleotide may be methylated to form 5-methylcytosine"
tgagcctcacaagtacctgcatgttgctccactccttttcccagaccacctggagtcctccgcaatccagcaatgaatgggctagaacctggtcctctggcaccctgcatagggagatggct

SEQ ID NO: 7811 - DNA, 122 bp, Homo sapiens
  misc_feature (61)..(62): /note="This region represents a CpG dinucleotide"
  misc_feature (61)..(61): /note="Nucleotide may be methylated to form 5-methylcytosine"
caaatcttatttaagccagcccttcacagggtgttgggtcagctaatcaggagggtataccgactacatttgagcatcttttccatttcatgcatgttccctagtcctgcccctaggagcat

SEQ ID NO: 7812 - DNA, 122 bp, Homo sapiens
  misc_feature (61)..(62): /note="This region represents a CpG dinucleotide"
  misc_feature (61)..(61): /note="Nucleotide may be methylated to form 5-methylcytosine"
ctgaatcagaatataaatactgacaagatgccccgggattcatatgcacagtagagctggcgaagttccattgtagcctgtgattgttttctgcaacttagtatttctgagttttcccaagg

SEQ ID NO: 7813 - DNA, 122 bp, Homo sapiens
  misc_feature (61)..(62): /note="This region represents a CpG dinucleotide"
  misc_feature (61)..(61): /note="Nucleotide may be methylated to form 5-methylcytosine"
agctctttctctgcctatcctgttctttctcctgagcgcaccccggcagtgccagcagtgcggcgtcttcagcatgccaggagcatgtctggctccttggtgctccttccggagtcctgtgg

SEQ ID NO: 7814 - DNA, 122 bp, Homo sapiens
  misc_feature (61)..(62): /note="This region represents a CpG dinucleotide"
  misc_feature (61)..(61): /note="Nucleotide may be methylated to form 5-methylcytosine"
gagcagtgaggatgaccagagatcactttcatcaccatcttggatttggtgtgttttggccggcttgtttagcgcatcctgtttatcagcagggtatttatgacctgtatcttatgatacca

SEQ ID NO: 7815 - DNA, 122 bp, Homo sapiens
  misc_feature (61)..(62): /note="This region represents a CpG dinucleotide"
  misc_feature (61)..(61): /note="Nucleotide may be methylated to form 5-methylcytosine"
ggtttcacattgggaatccatgtcacacccagtgcatgaagttgacatgaggggtcgatccgtcgtttagtcaatattcactaagctcataatatgttttatgcacaacactgagtcctaga

SEQ ID NO: 7816 - DNA, 122 bp, Homo sapiens
  misc_feature (61)..(62): /note="This region represents a CpG dinucleotide"
  misc_feature (61)..(61): /note="Nucleotide may be methylated to form 5-methylcytosine"
cagtaaaaataagtgaatggtcctgaatagaagcctactgagaagtgagttcaacattaacgtgtgtgtatgcggatgagtcatctggaaatttaaacttgccattcaaagaaggcctccta

SEQ ID NO: 7817 - DNA, 122 bp, Homo sapiens
  misc_feature (61)..(62): /note="This region represents a CpG dinucleotide"
  misc_feature (61)..(61): /note="Nucleotide may be methylated to form 5-methylcytosine"
aagttctacctggctttcgagaactcgcagcacctggattatatcaccgagaagctctggcgcaacgcgttgctcgctggggcggtgccggtggtgctgggcccagaccgtgccaactacga

SEQ ID NO: 7818 - DNA, 122 bp, Homo sapiens
  misc_feature (61)..(62): /note="This region represents a CpG dinucleotide"
  misc_feature (61)..(61): /note="Nucleotide may be methylated to form 5-methylcytosine"
ctccactttagacagaaggaagtaaggtcaaagaggttaaataacttgctcagggttagccgtctataatcccggttgggcaaggattcaaaataggggtgtctattgcaggagcctgtcct

SEQ ID NO: 7819 - DNA, 122 bp, Homo sapiens
  misc_feature (61)..(62): /note="This region represents a CpG dinucleotide"
  misc_feature (61)..(61): /note="Nucleotide may be methylated to form 5-methylcytosine"
gtaaaacacgtttttagctcctccattgttcaggacactctgggagaactgaagaagatgcgaaagtataaaacagtcctgcccttaggagcttacggattaattgaagacagggcataaac

SEQ ID NO: 7820 - DNA, 122 bp, Homo sapiens
  misc_feature (61)..(62): /note="This region represents a CpG dinucleotide"
  misc_feature (61)..(61): /note="Nucleotide may be methylated to form 5-methylcytosine"
ttgacctctacttacttaacattagggaaatatcacagacccatgacagtggaggttttgcgacccttcagtgtatccttgtagtttcagagatgacttccaggtttccttgaaatgaaatg

SEQ ID NO: 7821 - DNA, 122 bp, Homo sapiens
  misc_feature (61)..(62): /note="This region represents a CpG dinucleotide"
  misc_feature (61)..(61): /note="Nucleotide may be methylated to form 5-methylcytosine"
aatgtggtagatacagagatatgatggcatattattgatcaataaaaggaaaagaggcaacgagcacatgaaaagacgctgaactcattagtcactaggaaaatgcaaatcaaaactacaaa

SEQ ID NO: 7822 - DNA, 122 bp, Homo sapiens
  misc_feature (61)..(62): /note="This region represents a CpG dinucleotide"
  misc_feature (61)..(61): /note="Nucleotide may be methylated to form 5-methylcytosine"
aggtatcatggaaaacctttaaggaaataggctgagttgactgagaagctcagagacaagcgtgtggctagcgataacaatgactgtcaggtttgttcagacctagcttatctatagaaagc

SEQ ID NO: 7823 - DNA, 122 bp, Homo sapiens
  misc_feature (61)..(62): /note="This region represents a CpG dinucleotide"
  misc_feature (61)..(61): /note="Nucleotide may be methylated to form 5-methylcytosine"
aacctttggggccaggctcaaactgagaatttgtggacacctcagagtcccttgcctgatcgccggcctctgaccacagcctgtgcccagcacttcctgtcttctctcttgcagtctcagct

SEQ ID NO: 7824 - DNA, 122 bp, Homo sapiens
  misc_feature (61)..(62): /note="This region represents a CpG dinucleotide"
  misc_feature (61)..(61): /note="Nucleotide may be methylated to form 5-methylcytosine"
cagcatcagagccgctgagtgatggtgaggtgtatgagggtggagacataaatcatatgacggtatctaaagccatgagacaagatgacctggggagtaaacatcactgttcttctgctcac

SEQ ID NO: 7825 - DNA, 122 bp, Homo sapiens
  misc_feature (61)..(62): /note="This region represents a CpG dinucleotide"
  misc_feature (61)..(61): /note="Nucleotide may be methylated to form 5-methylcytosine"
atcccctgccaaggtattatagggcaaaggacacaataaccagttctgcaggaaggtgagcgaagccttccactaagtaacatttgggctgggtattgaaagatgtgtaggagttcaccaag

SEQ ID NO: 7826 - DNA, 122 bp, Homo sapiens
  misc_feature (61)..(62): /note="This region represents a CpG dinucleotide"
  misc_feature (61)..(61): /note="Nucleotide may be methylated to form 5-methylcytosine"
tacccgctgggttttctgttccagcccagccaaggacaagtaacattctggaggagtcttcgcccaagggccattagctgagggaacctccctgagctcctttcctgtcgtgctgctttctg

SEQ ID NO: 7827 - DNA, 122 bp, Homo sapiens
  misc_feature (61)..(62): /note="This region represents a CpG dinucleotide"
  misc_feature (61)..(61): /note="Nucleotide may be methylated to form 5-methylcytosine"
accttgcagctcttgttctattatgtgctgtgtccctacacttaatcctgaaaactcttacgggatttgtcactttacagctaaggaagtttagcttgaagaggctgccaattctgccgaag

SEQ ID NO: 7828 - DNA, 122 bp, Homo sapiens
  misc_feature (61)..(62): /note="This region represents a CpG dinucleotide"
  misc_feature (61)..(61): /note="Nucleotide may be methylated to form 5-methylcytosine"
ggccttcataagtataaaaagtttcactgttatattattttgatcacggctgataacagacggccatcacaaacaccctctgacagaagtggaggaggaagtgtgaaactaaggttcaggag

SEQ ID NO: 7829 - DNA, 122 bp, Homo sapiens
  misc_feature (61)..(62): /note="This region represents a CpG dinucleotide"
  misc_feature (61)..(61): /note="Nucleotide may be methylated to form 5-methylcytosine"
acaacttgcctgatgtcacacagcttcatacagtggttaagcaacttgtctgaggccacacgtggcacacagaggttgaacttacctgaggccacacagctgcacagagagcttaagtaact

SEQ ID NO: 7830 - DNA, 122 bp, Homo sapiens
  misc_feature (61)..(62): /note="This region represents a CpG dinucleotide"
  misc_feature (61)..(61): /note="Nucleotide may be methylated to form 5-methylcytosine"
tcctctgtggttacatgggtcatattgcctgtatatcactctcttctgcagtctaccaagcgttataaacagcatgtgatccatgggtctgctatcaaaacaaatacatttcacgagatgtg

SEQ ID NO: 7831 - DNA, 122 bp, Homo sapiens
  misc_feature (61)..(62): /note="This region represents a CpG dinucleotide"
  misc_feature (61)..(61): /note="Nucleotide may be methylated to form 5-methylcytosine"
tagagagatggactctaactggatgaatatacaaagctctgctttctgagaagcaggatacgtctgctgagagacagctgggagtgaactaagcttcattctgcaatctttttgctgacatt

SEQ ID NO: 7832 - DNA, 122 bp, Homo sapiens
  misc_feature (61)..(62): /note="This region represents a CpG dinucleotide"
  misc_feature (61)..(61): /note="Nucleotide may be methylated to form 5-methylcytosine"
cagtagttgataaagacaggcttacttaaagttcgaattgcctcaatcagagataacgggcgagtcccttttggcagtgagatatgaaaacaggagaatgatctgttatcagagtgaacatg

SEQ ID NO: 7833 - DNA, 122 bp, Homo sapiens
  misc_feature (61)..(62): /note="This region represents a CpG dinucleotide"
  misc_feature (61)..(61): /note="Nucleotide may be methylated to form 5-methylcytosine"
gttggatcctgactccagctatgtcatgactgcacaatcagtcagagacaagtagttacacgctcctaaataaagaagagcactctaatggccaaatgagttgagcatctaacatactaaaa

SEQ ID NO: 7834 - DNA, 122 bp, Homo sapiens
  misc_feature (61)..(62): /note="This region represents a CpG dinucleotide"
  misc_feature (61)..(61): /note="Nucleotide may be methylated to form 5-methylcytosine"
ttttgtactacaacagcagagctgagtcacattgttgtgccagacagacaccatatggcccgcaaagccctcagatatttactatgtggccctctacagaaaaacatgccaacccctgctct

SEQ ID NO: 7835 - DNA, 122 bp, Homo sapiens
  misc_feature (61)..(62): /note="This region represents a CpG dinucleotide"
  misc_feature (61)..(61): /note="Nucleotide may be methylated to form 5-methylcytosine"
attaattgaccacccactgtgtagccagctatgtgctaaatgctgaaaaaaataagaatacgttgcaaccctgtcattgaggaggcatattagttagatttctgctgtgacaatattgcata

SEQ ID NO: 7836 - DNA, 122 bp, Homo sapiens
  misc_feature (61)..(62): /note="This region represents a CpG dinucleotide"
  misc_feature (61)..(61): /note="Nucleotide may be methylated to form 5-methylcytosine"
ctttttctccatgaggccaaggcttgtcttccaatgagcagctccttacaataactaagccggcttctgcttgtaccttcccagacacctccactggcaaaacctttccattgagcaatctt

SEQ ID NO: 7837 - DNA, 122 bp, Homo sapiens
  misc_feature (61)..(62): /note="This region represents a CpG dinucleotide"
  misc_feature (61)..(61): /note="Nucleotide may be methylated to form 5-methylcytosine"
gactacttaaaatatgctaggaatttttcatctatttcctttagctatcaccatacactacggtaaatattgtttctgacttacagatgaggcaaatgaggcttgaagagcttaaatacctt

SEQ ID NO: 7838 - DNA, 122 bp, Homo sapiens
  misc_feature (61)..(62): /note="This region represents a CpG dinucleotide"
  misc_feature (61)..(61): /note="Nucleotide may be methylated to form 5-methylcytosine"
tggacaccaaagactcaggtgagcttccctagtgagcaatactctgtgtatactgtcacgcgttgtggccaagagaaggtaacactgtctatgactccaccagcaatgatggccagaagctc

SEQ ID NO: 7839 - DNA, 122 bp, Homo sapiens
  misc_feature (61)..(62): /note="This region represents a CpG dinucleotide"
  misc_feature (61)..(61): /note="Nucleotide may be methylated to form 5-methylcytosine"
gcactgggctgggtgtctgccttccctggaggctgcactgcctgagccggtgacaggctgcggactggcctgtcgggcggcagggcagagcgagcaggaagcgctggttccttctccatttc

SEQ ID NO: 7840 - DNA, 122 bp, Homo sapiens
  misc_feature (61)..(62): /note="This region represents a CpG dinucleotide"
  misc_feature (61)..(61): /note="Nucleotide may be methylated to form 5-methylcytosine"
tgaaagaagcctcttaaataaatcctacacgctgtaatatttctgccacgaaacagaacacgtgtgccaggataactcccggcaaagaaagttacagaaaccaaaagagtaaacagaattct

SEQ ID NO: 7841 - DNA, 122 bp, Homo sapiens
  misc_feature (61)..(62): /note="This region represents a CpG dinucleotide"
  misc_feature (61)..(61): /note="Nucleotide may be methylated to form 5-methylcytosine"
tccctccccttctcccctcaccagattcttatgtggtttcccagagatattctaggtatacgcagcaaatgtatatcaacatgttttcacttcccccactcccacaccctccccctttcttt

SEQ ID NO: 7842 - DNA, 122 bp, Homo sapiens
  misc_feature (61)..(62): /note="This region represents a CpG dinucleotide"
  misc_feature (61)..(61): /note="Nucleotide may be methylated to form 5-methylcytosine"
aattcacttgtctaacatgagcttatttgactagtagacctacatagaatcaaagttgtacgtctgccttatgtctaatgctgacaactctgaaggcatattggttttttaaactaaaccaa

SEQ ID NO: 7843 - DNA, 122 bp, Homo sapiens
  misc_feature (61)..(62): /note="This region represents a CpG dinucleotide"
  misc_feature (61)..(61): /note="Nucleotide may be methylated to form 5-methylcytosine"
taatgataatggtggtagtagtagctgcaggagcagcaggattaaaagcaggatcatttacgaggaaaagcccaagagagaaaagtatgagtcagaagtaatgatccctacagttgggagcc

SEQ ID NO: 7844 - DNA, 122 bp, Homo sapiens
  misc_feature (61)..(62): /note="This region represents a CpG dinucleotide"
  misc_feature (61)..(61): /note="Nucleotide may be methylated to form 5-methylcytosine"
tcttatggggccaccatcgtatatgcaatctgtcattgacccaaaggtcattatgcagcacgtgactgtaaagtaaaaggctaggcaggatctttatgaagcaaaatacacttgtgaaagac

SEQ ID NO: 7845 - DNA, 122 bp, Homo sapiens
  misc_feature (61)..(62): /note="This region represents a CpG dinucleotide"
  misc_feature (61)..(61): /note="Nucleotide may be methylated to form 5-methylcytosine"
tgcaatactcatctgtctaaggcccagctagtgtttcagatttcatcttactttaaaaagcggcagcaagattatatagttacctagtgctaatcccataagaattaaatacatagagcctc

SEQ ID NO: 7846 - DNA, 122 bp, Homo sapiens
  misc_feature (61)..(62): /note="This region represents a CpG dinucleotide"
  misc_feature (61)..(61): /note="Nucleotide may be methylated to form 5-methylcytosine"
ttaagcctagctgaaattcttttcaaggttggtcattctcaaatgccagagagggttgcccggctctctctgctcttgccccattccattcacaacaggaggtggggaatgagctcagatga

SEQ ID NO: 7847 - DNA, 122 bp, Homo sapiens
  misc_feature (61)..(62): /note="This region represents a CpG dinucleotide"
  misc_feature (61)..(61): /note="Nucleotide may be methylated to form 5-methylcytosine"
tgtgcatgactccagtggaatctgcatgcaatgctcagggcagggtttggcgctgcctcacgaagccattacatttctagacaaagaattaacagtttgtagtgagtgggttatctgttatt

SEQ ID NO: 7848 - DNA, 122 bp, Homo sapiens
  misc_feature (61)..(62): /note="This region represents a CpG dinucleotide"
  misc_feature (61)..(61): /note="Nucleotide may be methylated to form 5-methylcytosine"
ctgaatacaccccttctgttaaaatgcagcctaggattacactagctttgttcacagccacgtaacaccactgactcacatgaagactgaagacaacacaaccccccacatcttgttcacaa

SEQ ID NO: 7849 - DNA, 122 bp, Homo sapiens
  misc_feature (61)..(62): /note="This region represents a CpG dinucleotide"
  misc_feature (61)..(61): /note="Nucleotide may be methylated to form 5-methylcytosine"
ggccttgcgcaaacactgcacttgtatcgggctttgctaaggtggagcgcagaccctgcacgttctgtttagcaatgaaagatgtaaacagtgccttaacagtggggccatctccctgccct

SEQ ID NO: 7850 - DNA, 122 bp, Homo sapiens
  misc_feature (61)..(62): /note="This region represents a CpG dinucleotide"
  misc_feature (61)..(61): /note="Nucleotide may be methylated to form 5-methylcytosine"
gttgcctccttccatctgcagcagccattctttgtgttgtacttcattaagttatcactccgtaaaataagcatcaaagataaacagatttgcaaatatttatatcattctgtctctcttgc

SEQ ID NO: 7851 - DNA, 122 bp, Homo sapiens
  misc_feature (61)..(62): /note="This region represents a CpG dinucleotide"
  misc_feature (61)..(61): /note="Nucleotide may be methylated to form 5-methylcytosine"
atagcatttggctagcttgttcttcagctcttctgacatggatgacacagcaacaaggcccgtgtcagatcaaatgccagtgccttgatctcagacttctcagcttccagattgtgagaaat

SEQ ID NO: 7852 - DNA, 122 bp, Homo sapiens
  misc_feature (61)..(62): /note="This region represents a CpG dinucleotide"
  misc_feature (61)..(61): /note="Nucleotide may be methylated to form 5-methylcytosine"
gaaaatcaagaaagccagactctttagtaacccttgcttgtgagaactaatccattcccacgacagcaagaatgagaactcactcaccccagtaggagggcattagtttattcatgtgggat

SEQ ID NO: 7853 - DNA, 122 bp, Homo sapiens
  misc_feature (61)..(62): /note="This region represents a CpG dinucleotide"
  misc_feature (61)..(61): /note="Nucleotide may be methylated to form 5-methylcytosine"
aggttgttagattggagcatcagatctggaaaacctagctcagtgctttaaaaacattaacgtgctgatgaatcaatgaatcacctgggagtcaggttaaaatccaggttctgatttagtaa

SEQ ID NO: 7854 - DNA, 122 bp, Homo sapiens
  misc_feature (61)..(62): /note="This region represents a CpG dinucleotide"
  misc_feature (61)..(61): /note="Nucleotide may be methylated to form 5-methylcytosine"
aagaagagggtggcttataaatgggctggctcagcatgtctcagcattgtttgtaacttacgcattcattcaacacccattgattgaggatatactatgttggtggtgccggaggatgtgaa

SEQ ID NO: 7855 - DNA, 122 bp, Homo sapiens
  misc_feature (61)..(62): /note="This region represents a CpG dinucleotide"
  misc_feature (61)..(61): /note="Nucleotide may be methylated to form 5-methylcytosine"
ggcatgctggtggaaattgggggaggaatgggtcaaattaatctccattcagcccccactcggtctttccaatgcctgctcagcaataagtgactcactgatggcttctgtgatgccacagc

SEQ ID NO: 7856 - DNA, 122 bp, Homo sapiens
  misc_feature (61)..(62): /note="This region represents a CpG dinucleotide"
  misc_feature (61)..(61): /note="Nucleotide may be methylated to form 5-methylcytosine"
tccccagaaattgtgatttaactggcctcagggtgcatcctgggcatcaagattctagagcgtggtagagtttgaagaccgctagtctaacaagtctgctcccagttgcttgctgattctct

SEQ ID NO: 7857 - DNA, 122 bp, Homo sapiens
  misc_feature (61)..(62): /note="This region represents a CpG dinucleotide"
  misc_feature (61)..(61): /note="Nucleotide may be methylated to form 5-methylcytosine"
acaaaacaatacaatgactcaaatacaagagacatttatttcttggtcaaatagtgaaggcgggcatttaaaatctgtctgctaattccaacatctgagtcatcttgaagttaggtctttat

SEQ ID NO: 7858 - DNA, 122 bp, Homo sapiens
  misc_feature (61)..(62): /note="This region represents a CpG dinucleotide"
  misc_feature (61)..(61): /note="Nucleotide may be methylated to form 5-methylcytosine"
ggcctagagaagtgaagtaacttaccccagggctaagtgggaagtggctcaaaagcaagccggtgttctaatccaaggtgatgagaagacctgccccagatagctgtgtttgtttttgatct

SEQ ID NO: 7859 - DNA, 122 bp, Homo sapiens
  misc_feature (61)..(62): /note="This region represents a CpG dinucleotide"
  misc_feature (61)..(61): /note="Nucleotide may be methylated to form 5-methylcytosine"
gtaataggtcctgtcacctctggccagggagatgtgcttctgaggtgcacacatggctgccgtgacccacacttgtggtgtgggaaggcagttttcaggacaatgggatgacccatgggctg

SEQ ID NO: 7860 - DNA, 122 bp, Homo sapiens
  misc_feature (61)..(62): /note="This region represents a CpG dinucleotide"
  misc_feature (61)..(61): /note="Nucleotide may be methylated to form 5-methylcytosine"
caatagggtaatcagctgttattgtgagtctgagagtctctgtcgaaacagagagtgagccgcatcagggagggagggagaaatggatgaggtgatgcaaaagtgctcccatttcccaaccc

SEQ ID NO: 7861 - DNA, 122 bp, Homo sapiens
  misc_feature (61)..(62): /note="This region represents a CpG dinucleotide"
  misc_feature (61)..(61): /note="Nucleotide may be methylated to form 5-methylcytosine"
gatgcatttctaaactgtttggtgtgtctgtttctgtgcatcctgcatagcatctacctacgtacaattgcatctgtttcctggtcttgtctatactgtctcacgtttgactgctgaacaga

SEQ ID NO: 7862 - DNA, 122 bp, Homo sapiens
  misc_feature (61)..(62): /note="This region represents a CpG dinucleotide"
  misc_feature (61)..(61): /note="Nucleotide may be methylated to form 5-methylcytosine"
gtgaaccaccgtgcccggccagagcacgagctttttaacctctgttgaggaaacggggaccggtcacggtagctcaggcctgtaatcctagcacttcgggaggctgaggcgggaggatcgct

SEQ ID NO: 7863 - DNA, 122 bp, Homo sapiens
  misc_feature (61)..(62): /note="This region represents a CpG dinucleotide"
  misc_feature (61)..(61): /note="Nucleotide may be methylated to form 5-methylcytosine"
aagcaagcagaaatggaacagagtgacccagacatgtttgtctgggtctttatgctacaccgccttccctacctcacagctttattcttgatttatctcccacagctgactctctgccagcc

SEQ ID NO: 7864 - DNA, 122 bp, Homo sapiens
  misc_feature (61)..(62): /note="This region represents a CpG dinucleotide"
  misc_feature (61)..(61): /note="Nucleotide may be methylated to form 5-methylcytosine"
gcagttagaggactgaggtttcttttctggctgtcagccaggggtcactttctggttttacgcttggctccctcctcttcaaagcctgcaactgtgcttagaatccttttcataagctgaat

SEQ ID NO: 7865 - DNA, 122 bp, Homo sapiens
  misc_feature (61)..(62): /note="This region represents a CpG dinucleotide"
  misc_feature (61)..(61): /note="Nucleotide may be methylated to form 5-methylcytosine"
tcccaacatatatgaccttttgtggttccctcccacattggctctggcttggccatgtgacgcttggtctagtagggcattagcaagtatgacacatgcatttgggatttgcttgcttggaa

SEQ ID NO: 7866 - DNA, 122 bp, Homo sapiens
  misc_feature (61)..(62): /note="This region represents a CpG dinucleotide"
  misc_feature (61)..(61): /note="Nucleotide may be methylated to form 5-methylcytosine"
cacctggacgagcagttcacggtgcccgtggaaatgatgcaggcccgcacgtacccgctgcgctggttcttgctggagcagcctgagatccaggtcacccttggttgtccagcaggctgggc

SEQ ID NO: 7867 - DNA, 122 bp, Homo sapiens
  misc_feature (61)..(62): /note="This region represents a CpG dinucleotide"
  misc_feature (61)..(61): /note="Nucleotide may be methylated to form 5-methylcytosine"
ccagagatgcagaaccagaaagatacatacacagtcataccttgtttaacgatgggaatacgttctgagaaatgagtcatgaggttattttgtcattgtgtgaacatcagagtgtacttaca

SEQ ID NO: 7868 - DNA, 122 bp, Homo sapiens
  misc_feature (61)..(62): /note="This region represents a CpG dinucleotide"
  misc_feature (61)..(61): /note="Nucleotide may be methylated to form 5-methylcytosine"
tgaggccttttctaattctcagacctgtctaaatgtcctcagtgatcctcagtcgtttaacgccactcccaaactgtcatttgttcagtttataacaaaccgggctggttgacaactcagtg

SEQ ID NO: 7869 - DNA, 122 bp, Homo sapiens
  misc_feature (61)..(62): /note="This region represents a CpG dinucleotide"
  misc_feature (61)..(61): /note="Nucleotide may be methylated to form 5-methylcytosine"
ttttcccttttctctaagctctgatgtaaggtagtgtctcaggtaattgactcatctgcccgtatttgttcattacagctgttgctaggaagttattatgtaaatggccctgctcctcaatc

SEQ ID NO: 7870 - DNA, 122 bp, Homo sapiens
  misc_feature (61)..(62): /note="This region represents a CpG dinucleotide"
  misc_feature (61)..(61): /note="Nucleotide may be methylated to form 5-methylcytosine"
atccatagttatggaaggaagcccagtgaagttctggggcacagcctggctgtttgaagacggttgtaagccaagctgctgtggccatgagaaaggcacccagtggttcctgtgataaagac

SEQ ID NO: 7871 - DNA, 122 bp, Homo sapiens
  misc_feature (61)..(62): /note="This region represents a CpG dinucleotide"
  misc_feature (61)..(61): /note="Nucleotide may be methylated to form 5-methylcytosine"
agcttctgtgaaaaccctgtgaggcaggtaaggtgagtcccaggaggttttcccagatggcgcagctaattagtgttgctggtagcattaggagtagactgcagactcctggggccccagcc

SEQ ID NO: 7872 - DNA, 122 bp, Homo sapiens
  misc_feature (61)..(62): /note="This region represents a CpG dinucleotide"
  misc_feature (61)..(61): /note="Nucleotide may be methylated to form 5-methylcytosine"
gccgtgcccggaccctccccagctttaaaaacccttgcccataagccactgggaagccgtcggggaatctgggttttaagcacgagctgagctgcccgattctccctgtttggagtcctgcg

SEQ ID NO: 7873 - DNA, 122 bp, Homo sapiens
  misc_feature (61)..(62): /note="This region represents a CpG dinucleotide"
  misc_feature (61)..(61): /note="Nucleotide may be methylated to form 5-methylcytosine"
tatttattgggtgctctgctaagcgctgttctgagttttacaagtagtaacttgtctaatcgtcacaataatactgtgaggttgctgctgttattctcattttatggacgagaatgtcaaag

SEQ ID NO: 7874 - DNA, 122 bp, Homo sapiens
  misc_feature (61)..(62): /note="This region represents a CpG dinucleotide"
  misc_feature (61)..(61): /note="Nucleotide may be methylated to form 5-methylcytosine"
ttcaatctagcctctgcaacagccaagtcatcacagcgcaatcaaatccagctgggaccacggaagatgactccatatcctgtggatactctgcttggcacaatgtgggtgggagccaatga

SEQ ID NO: 7875 - DNA, 122 bp, Homo sapiens
  misc_feature (61)..(62): /note="This region represents a CpG dinucleotide"
  misc_feature (61)..(61): /note="Nucleotide may be methylated to form 5-methylcytosine"
agcatttattaaccacttactctgtgcttagcactttctgtgaatcctctctgaatgtcacgacagctctgcaaagagagaactaagtctcatttcacagatgggaaaactgagactgggag

SEQ ID NO: 7876 - DNA, 122 bp, Homo sapiens
  misc_feature (61)..(62): /note="This region represents a CpG dinucleotide"
  misc_feature (61)..(61): /note="Nucleotide may be methylated to form 5-methylcytosine"
tgcccaaggtcatacttggagctggtattccagtttagttctttccacttcacaactctgcgtaaaagagtatcttgttataaatcccagtcacttctcagaacctctttccaagaaccgtt

SEQ ID NO: 7877 - DNA, 122 bp, Homo sapiens
  misc_feature (61)..(62): /note="This region represents a CpG dinucleotide"
  misc_feature (61)..(61): /note="Nucleotide may be methylated to form 5-methylcytosine"
agcttccatttcctcctgtgtaaaagcagactgttaaaaccgctacttcctaaaggctgtcgtgggaattaaagtatgacacatgcttatctcagtgtctagcacagggaagcatcaataaa

SEQ ID NO: 7878 - DNA, 122 bp, Homo sapiens
  misc_feature (61)..(62): /note="This region represents a CpG dinucleotide"
  misc_feature (61)..(61): /note="Nucleotide may be methylated to form 5-methylcytosine"
ggttgatgtcttgtgtttgccatgttccgctgggaggctaaatctgtaagaaaacaaatacgcttggagggaggagactgcccttaagccccactcaatcacaagtcagctggcccattgtg

SEQ ID NO: 7879 - DNA, 122 bp, Homo sapiens
  misc_feature (61)..(62): /note="This region represents a CpG dinucleotide"
  misc_feature (61)..(61): /note="Nucleotide may be methylated to form 5-methylcytosine"
acaacctcccttgtttgctaactattctcaggctaaaaagagagtgctgacaaaccacagcggaagtcaggagctgagaaaacatgttgtgtggagtaagaaagggtcaccctgttcaaaag

SEQ ID NO: 7880 - DNA, 122 bp, Homo sapiens
  misc_feature (61)..(62): /note="This region represents a CpG dinucleotide"
  misc_feature (61)..(61): /note="Nucleotide may be methylated to form 5-methylcytosine"
aaatggtccaaaggaattcaaagtcatatcttttatctgagggataagaaaaagagaatgcggacgttgttccttgtgaccacagccaccacccccatcaacttgccaagcacagagtaaat

SEQ ID NO: 7881 - DNA, 122 bp, Homo sapiens
  misc_feature (61)..(62): /note="This region represents a CpG dinucleotide"
  misc_feature (61)..(61): /note="Nucleotide may be methylated to form 5-methylcytosine"
accaaacaacaatgaagcagctcctcacttgagacttcaccaatagtaatttaaactatgcgttctcattaaactctaataccttaattctgttattgtattaacaagttatgagattctaa

SEQ ID NO: 7882 - DNA, 122 bp, Homo sapiens
  misc_feature (61)..(62): /note="This region represents a CpG dinucleotide"
  misc_feature (61)..(61): /note="Nucleotide may be methylated to form 5-methylcytosine"
ctgagacccgctcatcccctcctctgcaaactcaggcaccttcctaccctcctgacctgccggagtgcctgcctcttcaccaggtgcaactaactgggccacaacagttgctgcatgttccc

SEQ ID NO: 7883 - DNA, 122 bp, Homo sapiens
  misc_feature (61)..(62): /note="This region represents a CpG dinucleotide"
  misc_feature (61)..(61): /note="Nucleotide may be methylated to form 5-methylcytosine"
cttcaccgtcttcacagtgttgatttttattctggagcttgatgcatcatggtcacaggtcggctagcactgttccaggcatgacaatgtcacacagtcatgcccattgggcaggaagctgg

SEQ ID NO: 7884 - DNA, 122 bp, Homo sapiens
  misc_feature (61)..(62): /note="This region represents a CpG dinucleotide"
  misc_feature (61)..(61): /note="Nucleotide may be methylated to form 5-methylcytosine"
aatgttactgactgggttttcatactaggatccaaccatcttcccatgacacataggtcccgctggtttttaaaacatgccaaggaagtacacggttgaaaatgctgctgatgtctgcaagt

SEQ ID NO: 7885 - DNA, 122 bp, Homo sapiens
  misc_feature (61)..(62): /note="This region represents a CpG dinucleotide"
  misc_feature (61)..(61): /note="Nucleotide may be methylated to form 5-methylcytosine"
cagcaggtacaaggcataagaagagagagattttagtgcatccttaggacaattcttttacgcagccaaaccctccagcagcaggtcttgcagccttggcaggtagtgagtgcggtgttgct

SEQ ID NO: 7886 - DNA, 122 bp, Homo sapiens
  misc_feature (61)..(62): /note="This region represents a CpG dinucleotide"
  misc_feature (61)..(61): /note="Nucleotide may be methylated to form 5-methylcytosine"
acagttctgaagatgactacttagccttggcttaggatgtttcctagaactgatgatatgcgtttcctaagaaacatctctttctttggaagctatgactaatttaccctctctcctcctct

SEQ ID NO: 7887 - DNA, 122 bp, Homo sapiens
  misc_feature (61)..(62): /note="This region represents a CpG dinucleotide"
  misc_feature (61)..(61): /note="Nucleotide may be methylated to form 5-methylcytosine"
atgctcaaagttggattgggcttaagtatgttaatccagagaatgactgtgtattttcagcgctgagctaggacaagcagagtattaagatttgccttagcaggcactattgtgagaaggaa

SEQ ID NO: 7888 - DNA, 122 bp, Homo sapiens
  misc_feature (61)..(62): /note="This region represents a CpG dinucleotide"
  misc_feature (61)..(61): /note="Nucleotide may be methylated to form 5-methylcytosine"
gcttgaaagtggtgctgcatttagggcagggcacacccagccataggcaacccctttgagcgatgggagaagtagcataagaaggatgccaagaagaacaataggttcttcaactcagtgtg

SEQ ID NO: 7889 - DNA, 122 bp, Homo sapiens
  misc_feature (61)..(62): /note="This region represents a CpG dinucleotide"
  misc_feature (61)..(61): /note="Nucleotide may be methylated to form 5-methylcytosine"
atcaaagctctgtttctgaggccattcacaacatcaaacccaacttacctggaatctaggcgatcagaacctggatgctcttacatattattcaagagaaccaatggtttagagctcaggct

SEQ ID NO: 7890 - DNA, 122 bp, Homo sapiens
  misc_feature (61)..(62): /note="This region represents a CpG dinucleotide"
  misc_feature (61)..(61): /note="Nucleotide may be methylated to form 5-methylcytosine"
taaagtgagacttgacactggttgcttgtgcccttgctatcaaggtgggccctgctgggacgtcagcctttccatgagcaagttggcttttccactactcagcaatttccccagcagctggc

SEQ ID NO: 7891 - DNA, 122 bp, Homo sapiens
  misc_feature (61)..(62): /note="This region represents a CpG dinucleotide"
  misc_feature (61)..(61): /note="Nucleotide may be methylated to form 5-methylcytosine"
gagccactgtgcccagctagttgcttacttcttaagtgacctaatggtgacttcagtgctcgagggcacttcctaggctatttggtggccctcagtaataaagagattgtataatcttgtat

SEQ ID NO: 7892 - DNA, 122 bp, Homo sapiens
  misc_feature (61)..(62): /note="This region represents a CpG dinucleotide"
  misc_feature (61)..(61): /note="Nucleotide may be methylated to form 5-methylcytosine"
tcttggatgactcaacatgtctaataagcaccaggcacaatgcctagtacaagtacctgtcgcccaggagtacactggcgtgatcatggctcactgcagccttgacctcctgggcccaagca

SEQ ID NO: 7893 - DNA, 122 bp, Homo sapiens
  misc_feature (61)..(62): /note="This region represents a CpG dinucleotide"
  misc_feature (61)..(61): /note="Nucleotide may be methylated to form 5-methylcytosine"
gctgagaggaccggctgggtggcctcagcttcaccactgacatgctctcagaacaggttccggggctgtccctgtccctctgtcatcacagataagctggagttgactgattcagagagcac

SEQ ID NO: 7894 - DNA, 122 bp, Homo sapiens
  misc_feature (61)..(62): /note="This region represents a CpG dinucleotide"
  misc_feature (61)..(61): /note="Nucleotide may be methylated to form 5-methylcytosine"
gaccagaatagattcgttctggctcgtacttctggacaccaccagtctaaccagcaaaatcgaatatcggttctgagcttaatccttttaatagtgtttccatttacattaattgtgtcatt

SEQ ID NO: 7895 - DNA, 122 bp, Homo sapiens
  misc_feature (61)..(62): /note="This region represents a CpG dinucleotide"
  misc_feature (61)..(61): /note="Nucleotide may be methylated to form 5-methylcytosine"
aacaaaaggggtgggggttcccagcaggaaggctcacacctgcaggaggccacacgtgagcgtgtgtacatgtgcgtgtgtgcttgtgcagggcgctcccagcctccaggtgatctgctgcc

SEQ ID NO: 7896 - DNA, 122 bp, Homo sapiens
  misc_feature (61)..(62): /note="This region represents a CpG dinucleotide"
  misc_feature (61)..(61): /note="Nucleotide may be methylated to form 5-methylcytosine"
gaagcatagagaagttcaactcatccaagttcccaaagaaactgaacagggatctgaatacgggcaggtctgtccagctgcagagcccagagcccttgatgccacctaaaactgcctcccgg

SEQ ID NO: 7897 - DNA, 122 bp, Homo sapiens
  misc_feature (61)..(62): /note="This region represents a CpG dinucleotide"
  misc_feature (61)..(61): /note="Nucleotide may be methylated to form 5-methylcytosine"
gcgatttcatcattgtgtgaacatcatcagagtgcacttaaacaaaactagatggtataacgtgttgcacacctaggctgtgtggtcatatgatatggcctgttgcttctagactacgaatc

SEQ ID NO: 7898 - DNA, 122 bp, Homo sapiens
  misc_feature (61)..(62): /note="This region represents a CpG dinucleotide"
  misc_feature (61)..(61): /note="Nucleotide may be methylated to form 5-methylcytosine"
cacatgcgtgaacacgccagttaaaaaaaagtaatagtcttgaaggttgtctgataggcacgtagactggcagttctgctgagtgttttgggtctttgtgttgcatcaaaccagtagaagga

SEQ ID NO: 7899 - DNA, 122 bp, Homo sapiens
  misc_feature (61)..(62): /note="This region represents a CpG dinucleotide"
  misc_feature (61)..(61): /note="Nucleotide may be methylated to form 5-methylcytosine"
gtctaatgaacatggcaggtatttgggactaagagcagaattatggtgcaagagcttacacgtagcatgggagtccaacagatgcagagtcagttccctgactcaccagctgaccttgggca

SEQ ID NO: 7900 - DNA, 122 bp, Homo sapiens
  misc_feature (61)..(62): /note="This region represents a CpG dinucleotide"
  misc_feature (61)..(61): /note="Nucleotide may be methylated to form 5-methylcytosine"
ttcacagagccttctctacaagtggactgctacatcttcagagcgagtcatgtcttgggccgtatgttccattttaatgtctcagtcagaagggagtgagctgcaactccatccatccaggc

SEQ ID NO: 7901 - DNA, 122 bp, Homo sapiens
  misc_feature (61)..(62): /note="This region represents a CpG dinucleotide"
  misc_feature (61)..(61): /note="Nucleotide may be methylated to form 5-methylcytosine"
gctggtgggcctgggttctgttgcacttcttggggaggagcatgacaacagcagtgccagcgtaggtgcagagaggcagaaggtggggccatgctgcagatgggaggggcaagcaggaccca

SEQ ID NO: 7902 - DNA, 122 bp, Homo sapiens
  misc_feature (61)..(62): /note="This region represents a CpG dinucleotide"
  misc_feature (61)..(61): /note="Nucleotide may be methylated to form 5-methylcytosine"
gtgagccagcaagtacttctgactcaacctggacatccaaatccatctgggtcgctactgcggttttgcagttgctactgaagtttaaacacctgtggagacactactgggtcttgaggctg

SEQ ID NO: 7903 - DNA, 122 bp, Homo sapiens
  misc_feature (61)..(62): /note="This region represents a CpG dinucleotide"
  misc_feature (61)..(61): /note="Nucleotide may be methylated to form 5-methylcytosine"
tgggcaggtataatcccggaagcctttctgcaagaggtagcatgattcagccaaaggcatcgggaggacattagggcaagggcataacagcatcagggtaaaggtgcctggcatgagtgtgc

SEQ ID NO: 7904 - DNA, 122 bp, Homo sapiens
  misc_feature (61)..(62): /note="This region represents a CpG dinucleotide"
  misc_feature (61)..(61): /note="Nucleotide may be methylated to form 5-methylcytosine"
tggagtcgctctggttcaaacacctctgacagtcttagttgtctgcaggcagagactggccgtatgcaccttatatacccctcagtctgactcaaagtgcatgggtgtgtgctctcttgggt

SEQ ID NO: 7905 - DNA, 122 bp, Homo sapiens
  misc_feature (61)..(62): /note="This region represents a CpG dinucleotide"
  misc_feature (61)..(61): /note="Nucleotide may be methylated to form 5-methylcytosine"
tttagatgtctttttaggctttttgcatatctgacaactggatgactccacccagactagcgactctatggtccccacccagaagctgactcagcaactgttttccacagctccaggattgc

SEQ ID NO: 7906 - DNA, 122 bp, Homo sapiens
  misc_feature (61)..(62): /note="This region represents a CpG dinucleotide"
  misc_feature (61)..(61): /note="Nucleotide may be methylated to form 5-methylcytosine"
gtacattccactttccttaataggaacatccttccctaatctttcaagtctaaagataaacgtcacctctttagaaagcagtgcagtaagtgtccttaccttctccccaccctccttctgca

SEQ ID NO: 7907 - DNA, 122 bp, Homo sapiens
  misc_feature (61)..(62): /note="This region represents a CpG dinucleotide"
  misc_feature (61)..(61): /note="Nucleotide may be methylated to form 5-methylcytosine"
ttgagggtgagtgtcaatttcatggttggaggccaactcttcttcccttctctctgcagccgtcatttcaccaagctgataatgttcggggaacccgccatcacgggctggtggagaggcca

SEQ ID NO: 7908 - DNA, 122 bp, Homo sapiens
  misc_feature (61)..(62): /note="This region represents a CpG dinucleotide"
  misc_feature (61)..(61): /note="Nucleotide may be methylated to form 5-methylcytosine"
tgtccagctcaacgtgggcggctctctgtactacaccactgtgcgggccctgacccgccacgacaccatgctcaaggccatgttcagtgggcgcatggaggtgctgaccgacaaagaaggtg

SEQ ID NO: 7909 - DNA, 122 bp, Homo sapiens
  misc_feature (61)..(62): /note="This region represents a CpG dinucleotide"
  misc_feature (61)..(61): /note="Nucleotide may be methylated to form 5-methylcytosine"
tcttgttgctgtgctttggacagaggatcctccaagtacatgtgagtgagccttcctggacgtgaggctttaccttcctctacagtggagactcagcacagctcccaccccacccggcagac

SEQ ID NO: 7910 - DNA, 122 bp, Homo sapiens
  misc_feature (61)..(62): /note="This region represents a CpG dinucleotide"
  misc_feature (61)..(61): /note="Nucleotide may be methylated to form 5-methylcytosine"
ataattatgaagaggctgctagctagctaattcagggaagtgaacactgaaacttccaggcgtgaaggcagcagggctggagtgtagcaggcaggcaggcgcctcccaagaggccacctctt

SEQ ID NO: 7911 - DNA, 122 bp, Homo sapiens
  misc_feature (61)..(62): /note="This region represents a CpG dinucleotide"
  misc_feature (61)..(61): /note="Nucleotide may be methylated to form 5-methylcytosine"
atgcagatgagtactttgaaaaattaagagagacatttactttttaagctaccactaagacggtctctgaccggataaagataacttgagcaggcgaatttgtttaacaaaggtggtgacat

SEQ ID NO: 7912 - DNA, 122 bp, Homo sapiens
  misc_feature (61)..(62): /note="This region represents a CpG dinucleotide"
  misc_feature (61)..(61): /note="Nucleotide may be methylated to form 5-methylcytosine"
tttgaggaagtgccctggccctagggggcctatactcctcagcagcctctccccactgtacgtctctttgcatttggcagcaagggggaatagtttggacaaggaacctgctgctgcaatgg

SEQ ID NO: 7913 - DNA, 122 bp, Homo sapiens
  misc_feature (61)..(62): /note="This region represents a CpG dinucleotide"
  misc_feature (61)..(61): /note="Nucleotide may be methylated to form 5-methylcytosine"
tgttgtaaggattgaatgagttaataaacagcaagtgcttagaagaaagggcctggctcacgttaaatgctctgtgagcattagctattagtattgttgttgctgctgttgttgttgttaca

SEQ ID NO: 7914 - DNA, 122 bp, Homo sapiens
  misc_feature (61)..(62): /note="This region represents a CpG dinucleotide"
  misc_feature (61)..(61): /note="Nucleotide may be methylated to form 5-methylcytosine"
gaaagcaggtgaggtttactgtatagatgggtgtgcccctaccccacactgaggcttcctcgtctgagcaaactgaggcccagagaggggaaggaagcaggactaccatggtgactcaaaga

SEQ ID NO: 7915 - DNA, 122 bp, Homo sapiens
  misc_feature (61)..(62): /note="This region represents a CpG dinucleotide"
  misc_feature (61)..(61): /note="Nucleotide may be methylated to form 5-methylcytosine"
agagaggaactgaacagtgtgtgttaagaatggagcctgtgaatcactccttgtgaatcacggcactttatcactgccctttccttagacctactgaagacagcctggacaacctggcatgg

SEQ ID NO: 7916 - DNA, 122 bp, Homo sapiens
  misc_feature (61)..(62): /note="This region represents a CpG dinucleotide"
  misc_feature (61)..(61): /note="Nucleotide may be methylated to form 5-methylcytosine"
ttgtgctatctcatttaattcttacaagctttaaaaatagtgccagaaacattgtaagcacgtgtttgtttgagggcctcaggtgtacaaattggctgatgacaaactactggccctagcag

SEQ ID NO: 7917 - DNA, 122 bp, Homo sapiens
  misc_feature (61)..(62): /note="This region represents a CpG dinucleotide"
  misc_feature (61)..(61): /note="Nucleotide may be methylated to form 5-methylcytosine"
gtccctgaaggtggcatgggccctcagcactgtgcctgctggcttagtgggaaagtcagccgtggctccccctacaacagtcatctggtatggcaggaaaagcaagagttttgaagcctggc

SEQ ID NO: 7918 - DNA, 122 bp, Homo sapiens
  misc_feature (61)..(62): /note="This region represents a CpG dinucleotide"
  misc_feature (61)..(61): /note="Nucleotide may be methylated to form 5-methylcytosine"
agggatgtggccagtccacttggagagcgcttccaggttaacaggcttgatgacctggtccgtggaccgctcgatcctggggagagaggagacgctggagagggtagggcagacccagatgg

SEQ ID NO: 7919 - DNA, 122 bp, Homo sapiens
  misc_feature (61)..(62): /note="This region represents a CpG dinucleotide"
  misc_feature (61)..(61): /note="Nucleotide may be methylated to form 5-methylcytosine"
ttagtctgttagaatggtggggagtcggctcagatttgagcatggcttaaagtgggagagcgttattagaagccagcctagtggggattgctgagatctcatctgctgaatgacagcaaagt

SEQ ID NO: 7920 - DNA, 122 bp, Homo sapiens
  misc_feature (61)..(62): /note="This region represents a CpG dinucleotide"
  misc_feature (61)..(61): /note="Nucleotide may be methylated to form 5-methylcytosine"
gcagctgcatgacagcacccactaacttgaggaagccagccgaggggccagcttcctgagcgtgattcaaaccggaactaagggtgcagctgacaagagtttgtcaacagccattgaagtaa

SEQ ID NO: 7921 - DNA, 122 bp, Homo sapiens
  misc_feature (61)..(62): /note="This region represents a CpG dinucleotide"
  misc_feature (61)..(61): /note="Nucleotide may be methylated to form 5-methylcytosine"
ttatcttgttgctcaagttattccaactttgaccactaagagttccttcaggttggcttccgtgtccttttgacatgacttcatactatttggagcactttcttactttctgacacacagga

SEQ ID NO: 7922 - DNA, 122 bp, Homo sapiens
  misc_feature (61)..(62): /note="This region represents a CpG dinucleotide"
  misc_feature (61)..(61): /note="Nucleotide may be methylated to form 5-methylcytosine"
gcctaagcagatcatttctaacctgttcccaggcaatgtggatccgctggtccaggcccacgccttggtggctgcttagatgagtcagcacatgcatctcaatgattagagagggaaccagg

SEQ ID NO: 7923 - DNA, 122 bp, Homo sapiens
  misc_feature (61)..(62): /note="This region represents a CpG dinucleotide"
  misc_feature (61)..(61): /note="Nucleotide may be methylated to form 5-methylcytosine"
ctcaggtgatccgcccgccttggcctcccaaagtgctgggattacaggcatgagccaccgcgctcggctagacctgacaggttttaaaaggattactggttgctgtgttaaaacagactgca

SEQ ID NO: 7924 - DNA, 122 bp, Homo sapiens
  misc_feature (61)..(62): /note="This region represents a CpG dinucleotide"
  misc_feature (61)..(61): /note="Nucleotide may be methylated to form 5-methylcytosine"
tatcatgagagagtgacagtcagggtgaggcatgccagctactgcaatgagcaagctcaccgtgtctgtgtgtgcaacaaccacccaacactatgtattccagatgcctctccctctggtcc

SEQ ID NO: 7925 - DNA, 122 bp, Homo sapiens
  misc_feature (61)..(62): /note="This region represents a CpG dinucleotide"
  misc_feature (61)..(61): /note="Nucleotide may be methylated to form 5-methylcytosine"
caggatttaaacctagctgtctggcttcagaaccaaagcttttaaccaactatgccagtacgtaatgaagcacaaaggagcttataaaaaggcacaccaaatctatcagagaagatgcagag

SEQ ID NO: 7926 - DNA, 122 bp, Homo sapiens
  misc_feature (61)..(62): /note="This region represents a CpG dinucleotide"
  misc_feature (61)..(61): /note="Nucleotide may be methylated to form 5-methylcytosine"
ctaagaatatacccatccttacatgtcagtgtcattatagacaacatgaaaatcttgaaacgtaagacagtaatgagacagccagatgggaggggttccctggagaaactccaaccagcctg

SEQ ID NO: 7927 - DNA, 122 bp, Homo sapiens
  misc_feature (61)..(62): /note="This region represents a CpG dinucleotide"
  misc_feature (61)..(61): /note="Nucleotide may be methylated to form 5-methylcytosine"
acaactgtccgtctttctctctatcacaactcgcaatgacaaagtataaaaactgtaactcgctttctattccagccagaggccactgaaattcccacaactgtctgaaacacagacagctt

SEQ ID NO: 7928 - DNA, 122 bp, Homo sapiens
  misc_feature (61)..(62): /note="This region represents a CpG dinucleotide"
  misc_feature (61)..(61): /note="Nucleotide may be methylated to form 5-methylcytosine"
ctatgtattattattagtattactcgagctggaggctttgggtcactccacttagcctctcgccaattccacaatcttccttctctagtcctagaaccaggcctttgcaccctgctaggaga

SEQ ID NO: 7929 - DNA, 122 bp, Homo sapiens
  misc_feature (61)..(62): /note="This region represents a CpG dinucleotide"
  misc_feature (61)..(61): /note="Nucleotide may be methylated to form 5-methylcytosine"
cttactcatgggcagtacagggagtcagttctagtgagcagaatgtcatgtgttctctctcggcactttgcaaactatcgcgagtcatgctacagttttttctttctttttaaatttccaac

SEQ ID NO: 7930 - DNA, 122 bp, Homo sapiens
  misc_feature (61)..(62): /note="This region represents a CpG dinucleotide"
  misc_feature (61)..(61): /note="Nucleotide may be methylated to form 5-methylcytosine"
taagccacagtgcagaagtggacccattactcacactaccttcaaaggacacagagttctcgctgctcaaaggaaggggttagtcatcacctactgctaagaccaaaagccttggggcatca

SEQ ID NO: 7931 - DNA, 122 bp, Homo sapiens
  misc_feature (61)..(62): /note="This region represents a CpG dinucleotide"
  misc_feature (61)..(61): /note="Nucleotide may be methylated to form 5-methylcytosine"
tattgagtccatctctgactcattattagccaacactttgtgtctggctggcagcttttccgtaagtggtaaggtcagcctcatacagtattgcacagcctttcccattccttttgcgtcag

SEQ ID NO: 7932 - DNA, 122 bp, Homo sapiens
  misc_feature (61)..(62): /note="This region represents a CpG dinucleotide"
  misc_feature (61)..(61): /note="Nucleotide may be methylated to form 5-methylcytosine"
cctcggctgcttgcagctgccttccaggaagtgctggaacagcagaagcagctagcagtgcgctcaagaagtggtcagcagttgggagcagctggaggaggggaggccagtgagcaagtatc

SEQ ID NO: 7933 - DNA, 122 bp, Homo sapiens
  misc_feature (61)..(62): /note="This region represents a CpG dinucleotide"
  misc_feature (61)..(61): /note="Nucleotide may be methylated to form 5-methylcytosine"
ttccatctccagcgagacagatgcgaggaagggaagagggatgccctgtgtgcatctgcccgcactgcgagtccttgccactccttagatcaacggagccagagatcttgccaccaacacac

SEQ ID NO: 7934 - DNA, 122 bp, Homo sapiens
  misc_feature (61)..(62): /note="This region represents a CpG dinucleotide"
  misc_feature (61)..(61): /note="Nucleotide may be methylated to form 5-methylcytosine"
tggaacctggttcggtactgggggaagatgctctcccctaacccttccagatactgtgcacggagatcacaggaagcctagactcaagctgtcatttaaggtcctcagggggctgtgctgac

SEQ ID NO: 7935 - DNA, 122 bp, Homo sapiens
  misc_feature (61)..(62): /note="This region represents a CpG dinucleotide"
  misc_feature (61)..(61): /note="Nucleotide may be methylated to form 5-methylcytosine"
ttctgatgtgctcaatctggggaagagaactgaaaccaaaaacccagcagggatgaatgacgtcttagtcatggaactgacaggagctgtgaaacaggccactcagaagtgaggcagagact

SEQ ID NO: 7936 - DNA, 122 bp, Homo sapiens
  misc_feature (61)..(62): /note="This region represents a CpG dinucleotide"
  misc_feature (61)..(61): /note="Nucleotide may be methylated to form 5-methylcytosine"
tgggaaaataggcaaaaacagtcctgtgcaaactataacatatgttgaccttactcgttacggcaattagatccagcttgcctctgatgattcagtgctgccacctggcttctgccacttca

SEQ ID NO: 7937 - DNA, 122 bp, Homo sapiens
  misc_feature (61)..(62): /note="This region represents a CpG dinucleotide"
  misc_feature (61)..(61): /note="Nucleotide may be methylated to form 5-methylcytosine"
ctcactatgagcactcaccttaaaggttattatctgcctcttgaagaagcacttactcagcggatcctgtaacatgtggttctgccactttgtccataactgattagaccagggcaagcctc

SEQ ID NO: 7938 - DNA, 122 bp, Homo sapiens
  misc_feature (61)..(62): /note="This region represents a CpG dinucleotide"
  misc_feature (61)..(61): /note="Nucleotide may be methylated to form 5-methylcytosine"
agcagtgactgcctgatgtacgacactacttggtactcatcagttgaccagctggacctgcgtgtcctccagtttgccctacccctcagcatgctgatcgccatgggtgccctgctgctctg

SEQ ID NO: 7939 - DNA, 122 bp, Homo sapiens
  misc_feature (61)..(62): /note="This region represents a CpG dinucleotide"
  misc_feature (61)..(61): /note="Nucleotide may be methylated to form 5-methylcytosine"
tgacacaagtgactctattttgaatcatacaacttccaggacatgaacattaattgaacacgttcatcacaaggacaagattcgttttaagtccagttaacaatgcaactgactcctccaga

SEQ ID NO: 7940 - DNA, 122 bp, Homo sapiens
  misc_feature (61)..(62): /note="This region represents a CpG dinucleotide"
  misc_feature (61)..(61): /note="Nucleotide may be methylated to form 5-methylcytosine"
taaaatacttttgtacagctctgattcgtagcttcctttttcctagtcagcaagcaatttcgcattaggatatgactcaaggacatacggttcattgcaatgatcatcaaatcacatagtgg

SEQ ID NO: 7941 - DNA, 122 bp, Homo sapiens
  misc_feature (61)..(62): /note="This region represents a CpG dinucleotide"
  misc_feature (61)..(61): /note="Nucleotide may be methylated to form 5-methylcytosine"
tgtaaataagtaatgccttagattgataaaagtcaatgctgggttgggtagaacatgtcacgcaccccacaggaagatgggttctgggtccaccaattctgttgttccaggaattgattcca

SEQ ID NO: 7942 - DNA, 122 bp, Homo sapiens
  misc_feature (61)..(62): /note="This region represents a CpG dinucleotide"
  misc_feature (61)..(61): /note="Nucleotide may be methylated to form 5-methylcytosine"
acagggcttccccttctctgtcatgaaaacaggatagaaaaagcttgtggccagggagcccggggcctgagtgaggcattgtgtcatctctcgctctgagctcatcctagaggcagacacat

SEQ ID NO: 7943 - DNA, 122 bp, Homo sapiens
  misc_feature (61)..(62): /note="This region represents a CpG dinucleotide"
  misc_feature (61)..(61): /note="Nucleotide may be methylated to form 5-methylcytosine"
gaatgttatttagaaagccagggatagagatcctggtctgggtgtatgtgtgagtcaggacgtccccatgcctctggatccggttgatgtgccttactgcccagcatccattcactcttctc

SEQ ID NO: 7944 - DNA, 122 bp, Homo sapiens
  misc_feature (61)..(62): /note="This region represents a CpG dinucleotide"
  misc_feature (61)..(61): /note="Nucleotide may be methylated to form 5-methylcytosine"
taaggaatctcttaagcagcaagcaaaaaatatgattcataaacaagtgaaaatgagtcacgtagcagtaaacagaactggggccagaaaggcagctttggagttgtccccattcatttcaa

SEQ ID NO: 7945 - DNA, 122 bp, Homo sapiens
  misc_feature (61)..(62): /note="This region represents a CpG dinucleotide"
  misc_feature (61)..(61): /note="Nucleotide may be methylated to form 5-methylcytosine"
cacttaactttgtgctcagaactgatgctgacttcaagtgtgatctggtcatcaggttgccggtatccaatatgagactttaccaacttagaggcggatgaatcatcagtaccatttcttcc

SEQ ID NO: 7946 - DNA, 122 bp, Homo sapiens
  misc_feature (61)..(62): /note="This region represents a CpG dinucleotide"
  misc_feature (61)..(61): /note="Nucleotide may be methylated to form 5-methylcytosine"
ttgctcactccccaggtgggcgggggccccttctgctgcctgcctggctcagcggcacggcgccaggctgctgtgacctgtgcagacaaagccgcttagcacagcctcattggcacctgtcc

SEQ ID NO: 7947 - DNA, 122 bp, Homo sapiens
  misc_feature (61)..(62): /note="This region represents a CpG dinucleotide"
  misc_feature (61)..(61): /note="Nucleotide may be methylated to form 5-methylcytosine"
caccagctaaatgtcagacaaagcacaagggaattggagcttgatcaatttcaaaggtttcgttcttagctacagagactgctctgattacctgaagggcatgtactgcttgggaatgctgc

SEQ ID NO: 7948 - DNA, 122 bp, Homo sapiens
  misc_feature (61)..(62): /note="This region represents a CpG dinucleotide"
  misc_feature (61)..(61): /note="Nucleotide may be methylated to form 5-methylcytosine"
cactgatcttaacttgatcacagtagatccattgctaagccacataagtcatgggtagaccgtaacataactgacaaaatgttttggcactagggaaggtttaaagacttttctgcaggtgc

SEQ ID NO: 7949 - DNA, 122 bp, Homo sapiens
  misc_feature (61)..(62): /note="This region represents a CpG dinucleotide"
  misc_feature (61)..(61): /note="Nucleotide may be methylated to form 5-methylcytosine"
agtagaatttgctgcgggagagctcactctagaaggggttctcaacgtctggcttccagacgagcagcaacagcattcactgggaacttgcataagtggaaattaggtgttgctcagcctta

SEQ ID NO: 7950 - DNA, 122 bp, Homo sapiens
  misc_feature (61)..(62): /note="This region represents a CpG dinucleotide"
  misc_feature (61)..(61): /note="Nucleotide may be methylated to form 5-methylcytosine"
aaagcaaccattaaattaataaaccagaggtaagcagagtcacttggtgagatctccatacggagtcactgagtgaagcaggaaagtgtatgatgtaatccagtctttgcacaacaatgatt

SEQ ID NO: 7951 - DNA, 122 bp, Homo sapiens
  misc_feature (61)..(62): /note="This region represents a CpG dinucleotide"
  misc_feature (61)..(61): /note="Nucleotide may be methylated to form 5-methylcytosine"
aatactaattcattactttttaaatttggaaaacataaaaagggaggtacaagaagcattcgtgtttatatgctttgactcagcaattccacatctagggattggatatgcacagatttagc

SEQ ID NO: 7952 - DNA, 122 bp, Homo sapiens
  misc_feature (61)..(62): /note="This region represents a CpG dinucleotide"
  misc_feature (61)..(61): /note="Nucleotide may be methylated to form 5-methylcytosine"
tgggtttgtgtcttccccaggctggccagtgctcctgggtggggtcgcggcggctctgggcgactcctcatttgcagagtcagcacaggcagggcccttcccaacagtggcagcctcgtgac

SEQ ID NO: 7953 - DNA, 122 bp, Homo sapiens
  misc_feature (61)..(62): /note="This region represents a CpG dinucleotide"
  misc_feature (61)..(61): /note="Nucleotide may be methylated to form 5-methylcytosine"
cccctttgtgggcctcggctttctcatccatcaaacaagaataggatgatgagaacaacgcgtcctccaggccttcaaagagttattgatggggttaaaggccacagtgttgactaagatgc

SEQ ID NO: 7954 - DNA, 122 bp, Homo sapiens
  misc_feature (61)..(62): /note="This region represents a CpG dinucleotide"
  misc_feature (61)..(61): /note="Nucleotide may be methylated to form 5-methylcytosine"
ggaagaggatccttctgtttactcaatcactcaacaaaaatttatcgtcagctaactgcccggaacatcagaggtgagtaagacaggtccctgcccttatgtcctttagagtccctggggaa

SEQ ID NO: 7955 - DNA, 122 bp, Homo sapiens
  misc_feature (61)..(62): /note="This region represents a CpG dinucleotide"
  misc_feature (61)..(61): /note="Nucleotide may be methylated to form 5-methylcytosine"
ctgtaatactactgacttggtcttggaattgcaacatagactgattatgaccccatccaccgctgcagatgaactgacaaaaaaaaggagaagggagtgtaaacagaccatttttctcaaaa

SEQ ID NO: 7956 - DNA, 122 bp, Homo sapiens
  misc_feature (61)..(62): /note="This region represents a CpG dinucleotide"
  misc_feature (61)..(61): /note="Nucleotide may be methylated to form 5-methylcytosine"
agaagactaggaggattaattctattcatgaagaggaagcacatctcgagagaagatgcccggactggggactggaaacccacggtccgcctctgtgacaccagcatcaagcctgaggcctc

SEQ ID NO: 7957 - DNA, 122 bp, Homo sapiens
  misc_feature (61)..(62): /note="This region represents a CpG dinucleotide"
  misc_feature (61)..(61): /note="Nucleotide may be methylated to form 5-methylcytosine"
cacaaagaaagacaagaaaaataaaacaggaatgacacttcccttaagcaacttacgttacgcaataaggcatatacaaaaccagttgcagtgtatagtgacgatgatgtacaatatcagag

SEQ ID NO: 7958 - DNA, 122 bp, Homo sapiens
  misc_feature (61)..(62): /note="This region represents a CpG dinucleotide"
  misc_feature (61)..(61): /note="Nucleotide may be methylated to form 5-methylcytosine"
cccggcctgtccttgccctccccggaggtgcctggatgggagcagcagcaccgagggggccgacacctggggctctgactctccccggggactgaaatgagcagggaggtggcatccctgca

SEQ ID NO: 7959 - DNA, 122 bp, Homo sapiens
  misc_feature (61)..(62): /note="This region represents a CpG dinucleotide"
  misc_feature (61)..(61): /note="Nucleotide may be methylated to form 5-methylcytosine"
ccagcttggacaacatagggagactccatctcaaataatttactgatatttgtaaataaacgaacagggtggtttcagactgtgataaatactaagcaaatcagggtaatgtgactcagggt

SEQ ID NO: 7960 - DNA, 122 bp, Homo sapiens
  misc_feature (61)..(62): /note="This region represents a CpG dinucleotide"
  misc_feature (61)..(61): /note="Nucleotide may be methylated to form 5-methylcytosine"
tggcttgacctctttaaggctcagtgtcccgctctgtaaaaaggggattaaaagtgaaagcgtgttgaaagcacttagcactgcagttggtaggaagtaaatgctcaatgtgcgcctctgtg

SEQ ID NO: 7961 - DNA, 122 bp, Homo sapiens
  misc_feature (61)..(62): /note="This region represents a CpG dinucleotide"
  misc_feature (61)..(61): /note="Nucleotide may be methylated to form 5-methylcytosine"
aggggaagagaagaatggaaagttgcaccagctcttaacagcctcaactcagagatgacacgtgtctcttctgctcccaatccctcagccagaattagtaatgtgggctgctgaaaaatgtc

SEQ ID NO: 7962 - DNA, 122 bp, Homo sapiens
  misc_feature (61)..(62): /note="This region represents a CpG dinucleotide"
  misc_feature (61)..(61): /note="Nucleotide may be methylated to form 5-methylcytosine"
gctgtgtcataaggcatggagatttgacaagaaagggcaggtaggatgctcatgatattgcgtggcccaggtcaaagcttagtaatgttggcttttgtcatgtaggggaggaatatcttttc

SEQ ID NO: 7963 - DNA, 122 bp, Homo sapiens
  misc_feature (61)..(62): /note="This region represents a CpG dinucleotide"
  misc_feature (61)..(61): /note="Nucleotide may be methylated to form 5-methylcytosine"
taaggagtctagggcttagagaactgtcttgccccaggtaatagcaaaatagaggcagagcggagacaggttttctgacgataagcctagtgtttctgccagcacaccatcaataagcagat

SEQ ID NO: 7964 - DNA, 122 bp, Homo sapiens
  misc_feature (61)..(62): /note="This region represents a CpG dinucleotide"
  misc_feature (61)..(61): /note="Nucleotide may be methylated to form 5-methylcytosine"
tgcctgcccaaaggcttctggctgggcttgctcttcctggacacttggtgctgtggtctgcgtgtttctcacctccgaaactcgtgttgaaatgtaattctcaacgtagcaggatggagggg

SEQ ID NO: 7965 - DNA, 122 bp, Homo sapiens
  misc_feature (61)..(62): /note="This region represents a CpG dinucleotide"
  misc_feature (61)..(61): /note="Nucleotide may be methylated to form 5-methylcytosine"
ctgtgctaatgctcattgtatttttccccaccagacagtggcaatataatttgtgagtatcgtcttgcttcaactcatccgtcatgactttctcacagctattaaaacatgttttacaagca

SEQ ID NO: 7966 - DNA, 122 bp, Homo sapiens
  misc_feature (61)..(62): /note="This region represents a CpG dinucleotide"
  misc_feature (61)..(61): /note="Nucleotide may be methylated to form 5-methylcytosine"
gactgcctgctgggtgggccacccatgccctgaatgaccccatcttctctcagatgcctacgacatggctaagctcctgtgtgacaagtattacatggcctcacctgacctggagatccagg

SEQ ID NO: 7967 - DNA, 122 bp, Homo sapiens
  misc_feature (61)..(62): /note="This region represents a CpG dinucleotide"
  misc_feature (61)..(61): /note="Nucleotide may be methylated to form 5-methylcytosine"
cttgttgcctaattttaagttacttaacttctctgtatctccattgcttcatctgtaaaacgggcgtaattacagaaccagcctcacaagggttgtgaaaatgtaatgagtaactacataaa

SEQ ID NO: 7968 - DNA, 122 bp, Homo sapiens
  misc_feature (61)..(62): /note="This region represents a CpG dinucleotide"
  misc_feature (61)..(61): /note="Nucleotide may be methylated to form 5-methylcytosine"
gggaagtagagaagaggcagatagagacaaggggaaaaaaatccaacacggatggacagacgtatctggtttaaatcccagggcagcctgggccagttctactcaaatagagtgtgtcctgg

SEQ ID NO: 7969 - DNA, 122 bp, Homo sapiens
  misc_feature (61)..(62): /note="This region represents a CpG dinucleotide"
  misc_feature (61)..(61): /note="Nucleotide may be methylated to form 5-methylcytosine"
cttgcttcctctcactctgacatatgatagacacagcaagaagcaggttggggccaggtgcggtggctcatgcctttaatctcagcaactggggaggccacggtgagtgaatcatctgaggt

SEQ ID NO: 7970 - DNA, 122 bp, Homo sapiens
  misc_feature (61)..(62): /note="This region represents a CpG dinucleotide"
  misc_feature (61)..(61): /note="Nucleotide may be methylated to form 5-methylcytosine"
tcaagggccttgggcaggccaggcatgtgcagcgatgcatacatgtaggacacagagctacgagcccaggttccaatccaaggtgcacagtctcaggagctccccaggagctagcatctctc

SEQ ID NO: 7971 - DNA, 122 bp, Homo sapiens
  misc_feature (61)..(62): /note="This region represents a CpG dinucleotide"
  misc_feature (61)..(61): /note="Nucleotide may be methylated to form 5-methylcytosine"
aggcaagaagtctgctgacctcgcagtacccgaattttgtttctgaattccacatcacagcgctgtccttggccaagtacaacatgaagatgctacatgttggcccagcaggaaggggcaca

SEQ ID NO: 7972 - DNA, 122 bp, Homo sapiens
  misc_feature (61)..(62): /note="This region represents a CpG dinucleotide"
  misc_feature (61)..(61): /note="Nucleotide may be methylated to form 5-methylcytosine"
ggggagccagaagcatggagaccactgggtagataaggtttcaccggcagacagctgtggcgctttcctctcctcaggatcagggatggggaggggaggagagcaagtctttcctgaaaccc

SEQ ID NO: 7973 - DNA, 122 bp, Homo sapiens
  misc_feature (61)..(62): /note="This region represents a CpG dinucleotide"
  misc_feature (61)..(61): /note="Nucleotide may be methylated to form 5-methylcytosine"
tataaccttatttaaccttaattacttccttaaagtcctcatctctgaatatagccacatcgggggatagggcttcaacataagaattggttgagggggcagcagatacaaacattcagtca

SEQ ID NO: 7974 - DNA, 122 bp, Homo sapiens
  misc_feature (61)..(62): /note="This region represents a CpG dinucleotide"
  misc_feature (61)..(61): /note="Nucleotide may be methylated to form 5-methylcytosine"
gatttatggattcaacaggtgtggggcggaaggccttttcctgccgagggtgcggcccagcgccaccccgctcagtctcagcgggacacctccacagccagtaggaagggcagttcaaaatt

SEQ ID NO: 7975 - DNA, 122 bp, Homo sapiens
  misc_feature (61)..(62): /note="This region represents a CpG dinucleotide"
  misc_feature (61)..(61): /note="Nucleotide may be methylated to form 5-methylcytosine"
aacctcatcttacctccagccaccaggcaggagtcaatgcgagcagcaaagtttcccgagcgctctcatccactgtgagtcacttaatactcaggacaaatgggtgaggtcactggggccca

SEQ ID NO: 7976 - DNA, 122 bp, Homo sapiens
  misc_feature (61)..(62): /note="This region represents a CpG dinucleotide"
  misc_feature (61)..(61): /note="Nucleotide may be methylated to form 5-methylcytosine"
ccatcctaaccagtgctggaatattcgttaatgctgccatccctaatgagtcacaattaacgtggtttagtgtaattctattgtgaggcacagcatgctcacctagcaaaaccagagcacac

SEQ ID NO: 7977 - DNA, 122 bp, Homo sapiens
  misc_feature (61)..(62): /note="This region represents a CpG dinucleotide"
  misc_feature (61)..(61): /note="Nucleotide may be methylated to form 5-methylcytosine"
aactttagagaattctaattctcctgtgccagagtttagccatgggattggtattagtaacgctgactcacagtctacttgtgatgcagaaagaggaaactcagagcaggcggaaatgagag

SEQ ID NO: 7978 - DNA, 122 bp, Homo sapiens
  misc_feature (61)..(62): /note="This region represents a CpG dinucleotide"
  misc_feature (61)..(61): /note="Nucleotide may be methylated to form 5-methylcytosine"
aatttattaaatccatctttattctctattaagaactgaatgattatccccaaactgccacgtacaaataggcctgccatctgctttagctatgataagccctggtttagatagatccctcg

SEQ ID NO: 7979 - DNA, 122 bp, Homo sapiens
  misc_feature (61)..(62): /note="This region represents a CpG dinucleotide"
  misc_feature (61)..(61): /note="Nucleotide may be methylated to form 5-methylcytosine"
cgcagtgtcatggtggcatctttccaagcatttgagtggccaggttaggccctgccaggtcgccgactgctctggggaaggagaagtcctgcagggatgtgacagtggctttggtttgctcc

SEQ ID NO: 7980 - DNA, 122 bp, Homo sapiens
  misc_feature (61)..(62): /note="This region represents a CpG dinucleotide"
  misc_feature (61)..(61): /note="Nucleotide may be methylated to form 5-methylcytosine"
gtctgtaaaagtactagaagaaataccttaacaaagtgaaaagtggacccaagagtaagacgtggatgccagcaagtaaatcagtctggtccgttaaaagaaaatcaacctgagagaaatcc

SEQ ID NO: 7981 - DNA, 122 bp, Homo sapiens
  misc_feature (61)..(62): /note="This region represents a CpG dinucleotide"
  misc_feature (61)..(61): /note="Nucleotide may be methylated to form 5-methylcytosine"
gtaagtcccagccttatttttacccagcccctattcaagatggagtagctcttggtcaaacgcctctgacatatttcacccttcctttttataagagaacccttaatcctaagtgttctaga

SEQ ID NO: 7982 - DNA, 122 bp, Homo sapiens
  misc_feature (61)..(62): /note="This region represents a CpG dinucleotide"
  misc_feature (61)..(61): /note="Nucleotide may be methylated to form 5-methylcytosine"
cttataaggacccttgtgattatattagactcacctgtataatccaggataagctcaccacgtcaagatcagttgattagcaaacttaatcctgcccacttccttaattctcccttgaattg

SEQ ID NO: 7983 - DNA, 122 bp, Homo sapiens
  misc_feature (61)..(62): /note="This region represents a CpG dinucleotide"
  misc_feature (61)..(61): /note="Nucleotide may be methylated to form 5-methylcytosine"
gtacgttcagaggtctagtgcctacagtgctagtaactgctgccagggtgcatcctgctgcgtgagctgcatgcctcagcatgacattcctgttacatcagcttccgtggtctgttcgcatt

SEQ ID NO: 7984 - DNA, 122 bp, Homo sapiens
  misc_feature (61)..(62): /note="This region represents a CpG dinucleotide"
  misc_feature (61)..(61): /note="Nucleotide may be methylated to form 5-methylcytosine"
cattttaggttttgccgagtctatcctgcttatctctgttcccatggggacatgtatagacgtgtttcatatttagagcagctgggctgaactacgtctcagcaggtgtttcctgtgaaagg

SEQ ID NO: 7985 - DNA, 122 bp, Homo sapiens
  misc_feature (61)..(62): /note="This region represents a CpG dinucleotide"
  misc_feature (61)..(61): /note="Nucleotide may be methylated to form 5-methylcytosine"
tgaacattatgtatttttttctttaaccctttgccactcccatttcgcagatgaggataccgaggctctgagtcatacagttagtgatttgaaaccagatctttctgactgtaggatctaag

SEQ ID NO: 7986 - DNA, 122 bp, Homo sapiens
  misc_feature (61)..(62): /note="This region represents a CpG dinucleotide"
  misc_feature (61)..(61): /note="Nucleotide may be methylated to form 5-methylcytosine"
tggggaacccaggaggatgcgactcagggtgtctggacaagcgtgggggtggggacaatacgtaagcaccaggccacaaggagagctccagctatgcactagctgcgatgttagatgaggaa

SEQ ID NO: 7987 - DNA, 122 bp, Homo sapiens
  misc_feature (61)..(62): /note="This region represents a CpG dinucleotide"
  misc_feature (61)..(61): /note="Nucleotide may be methylated to form 5-methylcytosine"
gaatagttgtgggcaggctcgtccttaggctgtattggcaactgggtttgtagctggacccgctggtggtgcacgggctgcagaaaagaggaagaaaggaagcacaaaagctctgtctggga

SEQ ID NO: 7988 - DNA, 122 bp, Homo sapiens
  misc_feature (61)..(62): /note="This region represents a CpG dinucleotide"
  misc_feature (61)..(61): /note="Nucleotide may be methylated to form 5-methylcytosine"
agttatgctgttagtcataaggttctttgtctctgactcaggaatcttgggtcttccacccgtaatggacaaagttattaacctgtaagcagggtaatcaaatcctgataccaggtaaggta

SEQ ID NO: 7989 - DNA, 122 bp, Homo sapiens
  misc_feature (61)..(62): /note="This region represents a CpG dinucleotide"
  misc_feature (61)..(61): /note="Nucleotide may be methylated to form 5-methylcytosine"
gagggagaagtcccatcaggacgtagatgtgaccagaggagaaatgctggtggaggacaccggcccccgtggcacttggtttctgttgtgtcgctgggctgggctcaccctagagtctgaag

SEQ ID NO: 7990 - DNA, 122 bp, Homo sapiens
  misc_feature (61)..(62): /note="This region represents a CpG dinucleotide"
  misc_feature (61)..(61): /note="Nucleotide may be methylated to form 5-methylcytosine"
ttgcgtcatgagatattgaaaaacacacataactttttttaaaatttgttctgggccaggcgtgtaatcccagtaatttgtgcagctgagatgggaggatcgcttgatctcaggagttcaag

SEQ ID NO: 7991 - DNA, 122 bp, Homo sapiens
  misc_feature (61)..(62): /note="This region represents a CpG dinucleotide"
  misc_feature (61)..(61): /note="Nucleotide may be methylated to form 5-methylcytosine"
tccagtgcattctgatctaatctcttctggccccaagaggggacttacccagataagaggcgctcttcagagaaagtgagagggtgccacagcagggctttcacccaccaataagctgatga

SEQ ID NO: 7992 - DNA, 122 bp, Homo sapiens
  misc_feature (61)..(62): /note="This region represents a CpG dinucleotide"
  misc_feature (61)..(61): /note="Nucleotide may be methylated to form 5-methylcytosine"
aggccacttaagccacggagcccttgtctaacaggacaatatttatagggattgcatcatcgcatagtcgaactgttcttctcagactgagatcatcctttagtttgctgggatatttttta

SEQ ID NO: 7993 - DNA, 122 bp, Homo sapiens
  misc_feature (61)..(62): /note="This region represents a CpG dinucleotide"
  misc_feature (61)..(61): /note="Nucleotide may be methylated to form 5-methylcytosine"
gtgcccgttattggccaattgtctcctacagccacagtggatcttttctacttggctctgcggtgttaaggctgggagtttgcaaattctcttgggtgtgggatctgggtgtcccaggctct

SEQ ID NO: 7994 - DNA, 122 bp, Homo sapiens
  misc_feature (61)..(62): /note="This region represents a CpG dinucleotide"
  misc_feature (61)..(61): /note="Nucleotide may be methylated to form 5-methylcytosine"
aatcttcagctctcaagctacagcaaggacttcggaaacgagcagagctgcagctgagatcgaggcagggacttagccctcttgtttcctggactgaccctgctccaactgttcctaaaact

SEQ ID NO: 7995 - DNA, 122 bp, Homo sapiens
  misc_feature (61)..(62): /note="This region represents a CpG dinucleotide"
  misc_feature (61)..(61): /note="Nucleotide may be methylated to form 5-methylcytosine"
ttaaaaatcatctggcagatttaaacccagttgcctcggtgttagccagatttaattctgcggttgttaagtaaatccatagggtctgatccatcatggtgactatggagggtgaaatataa

SEQ ID NO: 7996 - DNA, 122 bp, Homo sapiens
  misc_feature (61)..(62): /note="This region represents a CpG dinucleotide"
  misc_feature (61)..(61): /note="Nucleotide may be methylated to form 5-methylcytosine"
aaggccgggcatgtgccccactggaagtgtctggaatccatggcttcaatagacctttgacgagtgggaagttggaaccatgatgaaatactgccctctagactgatctcaggaggacaatt

SEQ ID NO: 7997 - DNA, 122 bp, Homo sapiens
  misc_feature (61)..(62): /note="This region represents a CpG dinucleotide"
  misc_feature (61)..(61): /note="Nucleotide may be methylated to form 5-methylcytosine"
gcgagatcttttcctcagccaactaagggaacacagtcaggcaaagtgtacttttataaacgtcttggggccgggcgtggtggctcacatctgtaatcccagcactgggagttcgaggcggg

SEQ ID NO: 7998 - DNA, 122 bp, Homo sapiens
  misc_feature (61)..(62): /note="This region represents a CpG dinucleotide"
  misc_feature (61)..(61): /note="Nucleotide may be methylated to form 5-methylcytosine"
taccaggcaaaagaagtaccaggctctaggggcagactgctggattatgactcaagttgacgcaggaagataacaaatccagtcctctccccagaggaattgagacctaggagtggccttct

SEQ ID NO: 7999 - DNA, 122 bp, Homo sapiens
  misc_feature (61)..(62): /note="This region represents a CpG dinucleotide"
  misc_feature (61)..(61): /note="Nucleotide may be methylated to form 5-methylcytosine"
aagaactgggttccagagaaacccagagcaggggctgttccccatccactgaccccagcacgcccagccacacccaccaggcaaaccgccaccaggcttagggcagaaggctccccaggctg

SEQ ID NO: 8000 - DNA, 122 bp, Homo sapiens
  misc_feature (61)..(62): /note="This region represents a CpG dinucleotide"
  misc_feature (61)..(61): /note="Nucleotide may be methylated to form 5-methylcytosine"
aagcctgggaaagtgggaagggaggggaagaaactgggacagacacctgggtcagcggctcgcccagggccccgaaccctgtgtcccagagctgagaagtcctgccccccttacctcaataa

SEQ ID NO: 8001 - DNA, 122 bp, Homo sapiens
  misc_feature (61)..(62): /note="This region represents a CpG dinucleotide"
  misc_feature (61)..(61): /note="Nucleotide may be methylated to form 5-methylcytosine"
ctcttatacagctgatgatctaacccatccttcaagttcttcaaggatggtgtcttcacacgctcttaatcacccattcaacctttagtttaccttgctgcctagaattcttaccttataca

SEQ ID NO: 8002 - DNA, 122 bp, Homo sapiens
  misc_feature (61)..(62): /note="This region represents a CpG dinucleotide"
  misc_feature (61)..(61): /note="Nucleotide may be methylated to form 5-methylcytosine"
cttaggctcagggaattgaccagggaactccaggatcagaatgcacaaggcactgtccaacgtccagcagcagggcatatgtgggtccttggggccatattcctttaacctgtggacacttc

SEQ ID NO: 8003 - DNA, 122 bp, Homo sapiens
  misc_feature (61)..(62): /note="This region represents a CpG dinucleotide"
  misc_feature (61)..(61): /note="Nucleotide may be methylated to form 5-methylcytosine"
tagcctcattttccacatgagaagggtttagtaagggtttagtaagagaagggtttagtacgttgctcaaggcctcagaggcaggaaatactggaaccaagattcttaccaggcagtctaaa

SEQ ID NO: 8004 - DNA, 122 bp, Homo sapiens
  misc_feature (61)..(62): /note="This region represents a CpG dinucleotide"
  misc_feature (61)..(61): /note="Nucleotide may be methylated to form 5-methylcytosine"
agttcacgtgccacctggaggcagtggtagtcatccatgccttctcggtgaggcactgtacgccagagtgactttaaagtatgaggaagccattagcactgctccagggaccacatattttt

SEQ ID NO: 8005 - DNA, 122 bp, Homo sapiens
  misc_feature (61)..(62): /note="This region represents a CpG dinucleotide"
  misc_feature (61)..(61): /note="Nucleotide may be methylated to form 5-methylcytosine"
gtgagaactccatgggaatgaaaactgctgcctgcacagaagccttgccacccagctcttcgggcgagtcatgttcagttctgccctcctcccaggcacacacctccggatgttctggaaga

SEQ ID NO: 8006 - DNA, 122 bp, Homo sapiens
  misc_feature (61)..(62): /note="This region represents a CpG dinucleotide"
  misc_feature (61)..(61): /note="Nucleotide may be methylated to form 5-methylcytosine"
tgaaggggtggagacactaaagaaagctccagggcaaggatggtcagctacagcatggcccggaagtgcccaacccagtggccatcctctccccaaccccacacccactgagtcagaacctc

SEQ ID NO: 8007 - DNA, 122 bp, Homo sapiens
  misc_feature (61)..(62): /note="This region represents a CpG dinucleotide"
  misc_feature (61)..(61): /note="Nucleotide may be methylated to form 5-methylcytosine"
catattaaatgtttaccatcatgcatgatgtgtgttttttagctcctaatcctttttccccgctcattctgcatttcatagtccccttaagggaaaaaaattagtatgagccatattgatct

SEQ ID NO: 8008 - DNA, 122 bp, Homo sapiens
  misc_feature (61)..(62): /note="This region represents a CpG dinucleotide"
  misc_feature (61)..(61): /note="Nucleotide may be methylated to form 5-methylcytosine"
tagttataatggtataataacaatagctaatatttattaggcactctgtgtcatgaagtacgcaaagtgtttacatgaattaagccatttaaactcttaatgactcagtgaggcaggttctg

SEQ ID NO: 8009 - DNA, 122 bp, Homo sapiens
  misc_feature (61)..(62): /note="This region represents a CpG dinucleotide"
  misc_feature (61)..(61): /note="Nucleotide may be methylated to form 5-methylcytosine"
agtttatgaactcggtgcagtgagacctctagactgacacgtacaacagagatgcagtttcgtctaactggcacctgtcccttccattacttgctgggcctgcttctgtcccatgcagcact

SEQ ID NO: 8010 - DNA, 122 bp, Homo sapiens
  misc_feature (61)..(62): /note="This region represents a CpG dinucleotide"
  misc_feature (61)..(61): /note="Nucleotide may be methylated to form 5-methylcytosine"
cgagatgaacagaaacaagagttaggcggctgccttctaaagctgacccaagacagcaagcgtggccacaggtaattaaaagaaagaaatacatcgccctttacacacccacagtgttcaga

SEQ ID NO: 8011 - DNA, 122 bp, Homo sapiens
  misc_feature (61)..(62): /note="This region represents a CpG dinucleotide"
  misc_feature (61)..(61): /note="Nucleotide may be methylated to form 5-methylcytosine"
acaaaagccccagccctcagcaaagcagacatgatccacattataatttaatatgagctacgtgtaataaccagcattccattttggacaagggtggtgaagaagtaagagattcagtgacc

SEQ ID NO: 8012 - DNA, 122 bp, Homo sapiens
  misc_feature (61)..(62): /note="This region represents a CpG dinucleotide"
  misc_feature (61)..(61): /note="Nucleotide may be methylated to form 5-methylcytosine"
attgcagttctgttggtggactttaactagtgttccagccatagctggtcatctatgccgcgctgccccagagagagggtgcgagggctaatgggttagtcatgcccctgtaaaggtgacca

SEQ ID NO: 8013 - DNA, 122 bp, Homo sapiens
  misc_feature (61)..(62): /note="This region represents a CpG dinucleotide"
  misc_feature (61)..(61): /note="Nucleotide may be methylated to form 5-methylcytosine"
ccaaggcctgcagggttttaagcagggttggcagtagggcaagatcaggcttaatggatccgaaagatcagtcacctacagtgttgaaaaggaatctgaggtctgagctggacaacgggtgg

SEQ ID NO: 8014 - DNA, 122 bp, Homo sapiens
  misc_feature (61)..(62): /note="This region represents a CpG dinucleotide"
  misc_feature (61)..(61): /note="Nucleotide may be methylated to form 5-methylcytosine"
gtcatcagaggcctggttggaatacagagtgttaattcttccatatctaagcctctttgtcgaaattccctttgtctcctgccccaagtcattaaacactaatcccatcactcttcctaatc

SEQ ID NO: 8015 - DNA, 122 bp, Homo sapiens
  misc_feature (61)..(62): /note="This region represents a CpG dinucleotide"
  misc_feature (61)..(61): /note="Nucleotide may be methylated to form 5-methylcytosine"
tgtcctccttaaatgcagcaccaactctgtaaacacacagcaggagctctagatacaccacgtttgtacacatttactgagtctacatttccatgtcaccttcaggaagagtggattggctt

SEQ ID NO: 8016 - DNA, 122 bp, Homo sapiens
  misc_feature (61)..(62): /note="This region represents a CpG dinucleotide"
  misc_feature (61)..(61): /note="Nucleotide may be methylated to form 5-methylcytosine"
gggaggcagcagccccacccaccgtggcccagcagagctgacagcctcaggcaccacccgcgtgctgccaggtacagaacctcaagatcggaagcacagctcacaggaaaaagctgcctgtg

SEQ ID NO: 8017 - DNA, 122 bp, Homo sapiens
  misc_feature (61)..(62): /note="This region represents a CpG dinucleotide"
  misc_feature (61)..(61): /note="Nucleotide may be methylated to form 5-methylcytosine"
agaggaagtaaagggggagttgtaagagaggcggtatcaacagcctgctgatgaaagaggcgactctgcagaaagaggcaacttgacatatcaggactttaaccgctgtagaaatagctcag

SEQ ID NO: 8018 - DNA, 122 bp, Homo sapiens
  misc_feature (61)..(62): /note="This region represents a CpG dinucleotide"
  misc_feature (61)..(61): /note="Nucleotide may be methylated to form 5-methylcytosine"
tctatgtttcaaaacattttatttacagaaacagaaagtgggttgggtttggctgtaagtcgtagtttgccaaactctgttgttgtatcctgcaaccttgctaagcttgttagtcctagtag

SEQ ID NO: 8019 - DNA, 122 bp, Homo sapiens
  misc_feature (61)..(62): /note="This region represents a CpG dinucleotide"
  misc_feature (61)..(61): /note="Nucleotide may be methylated to form 5-methylcytosine"
ctatgagaggcaggtaactatggtggaagctccatgggctgatgcctccttgtttccctgcgcagccctggagccaggtgacttggtgatgactaaattattattgctcctcagttccgtgt

SEQ ID NO: 8020 - DNA, 122 bp, Homo sapiens
  misc_feature (61)..(62): /note="This region represents a CpG dinucleotide"
  misc_feature (61)..(61): /note="Nucleotide may be methylated to form 5-methylcytosine"
gggtgagtccttctcacgcttcaaatttctcctccccgctcttctgtctcttctctttgacgcacctgggaaagcttctgtgcttttaaggactcatgtgattagtttggtctcacccaggt

SEQ ID NO: 8021 - DNA, 122 bp, Homo sapiens
  misc_feature (61)..(62): /note="This region represents a CpG dinucleotide"
  misc_feature (61)..(61): /note="Nucleotide may be methylated to form 5-methylcytosine"
agggatgtaaacaatataacgtgataaatatgctggcctagaagtggcaactcattcatacgtggagattctagaaaggcttcccagaagtgatggctaatgggaaacctgaaggacttgtc

SEQ ID NO: 8022 - DNA, 122 bp, Homo sapiens
  misc_feature (61)..(62): /note="This region represents a CpG dinucleotide"
  misc_feature (61)..(61): /note="Nucleotide may be methylated to form 5-methylcytosine"
tactgagtgtgaggaatcttgtgtggctgctgaggaatttagctgccactttccaggcaccggaacaatgtgcccattcgtggattaaggaaaccatgacctcaagcctcctaatcctcctc

SEQ ID NO: 8023 - DNA, 122 bp, Homo sapiens
  misc_feature (61)..(62): /note="This region represents a CpG dinucleotide"
  misc_feature (61)..(61): /note="Nucleotide may be methylated to form 5-methylcytosine"
acatccacattatgtgcacgaagaaacatgcccacatctgcatgtgtgtgcacacaatcacgtatgcctgcctggcctggtttatatggggagtgatggaagaaggccattggcctctccag

SEQ ID NO: 8024 - DNA, 122 bp, Homo sapiens
  misc_feature (61)..(62): /note="This region represents a CpG dinucleotide"
  misc_feature (61)..(61): /note="Nucleotide may be methylated to form 5-methylcytosine"
taactaaccacagcaactcacaccatgccatggaaggcactcaaaaattttatgttgaagcgataagtggatggcaaaggcaccccaattttcaggattgatttcctccaactgtaattagt

SEQ ID NO: 8025 - DNA, 122 bp, Homo sapiens
  misc_feature (61)..(62): /note="This region represents a CpG dinucleotide"
  misc_feature (61)..(61): /note="Nucleotide may be methylated to form 5-methylcytosine"
tagcttgtcttgcaggtcactcatgaggattacatgagacgctacatgtgaaggcacttacggtgggtcttagtgtttacagaaggaaaaggtaatcattaacacacgtattccaccttcca

SEQ ID NO: 8026 - DNA, 122 bp, Homo sapiens
  misc_feature (61)..(62): /note="This region represents a CpG dinucleotide"
  misc_feature (61)..(61): /note="Nucleotide may be methylated to form 5-methylcytosine"
tgcctggattttacaagagattttaatgttcatgattaaactggccgtaccagatttcaccgaagcccatttattgtgcattggctgtagccttcccagcaggcattccaatgctcttttaa

SEQ ID NO: 8027 - DNA, 122 bp, Homo sapiens
  misc_feature (61)..(62): /note="This region represents a CpG dinucleotide"
  misc_feature (61)..(61): /note="Nucleotide may be methylated to form 5-methylcytosine"
cgggctgaccttgactgttgactccaggaatgtgtgcaaatccttgactcccatgaggaccgcattcccctggtgatcatgcacaaactggttagttgaggcaaaggcatgtgacccaagct

SEQ ID NO: 8028 - DNA, 122 bp, Homo sapiens
  misc_feature (61)..(62): /note="This region represents a CpG dinucleotide"
  misc_feature (61)..(61): /note="Nucleotide may be methylated to form 5-methylcytosine"
tattaaaaacaactttatcttgaattcttacagattttacagagctcttgcttgtgggagcgtaggtccaattgaatagttcattggtgcattcattccttaagtatttggatatactgggc

SEQ ID NO: 8029 - DNA, 122 bp, Homo sapiens
  misc_feature (61)..(62): /note="This region represents a CpG dinucleotide"
  misc_feature (61)..(61): /note="Nucleotide may be methylated to form 5-methylcytosine"
tcacacccttctaaaggtactgattctttgtcctcagtttcccttaagcctgtcactagccggtaactggaaaaaataataactttacagcagttgatgtacgaatgatctaaaggtatcag

SEQ ID NO: 8030 - DNA, 122 bp, Homo sapiens
  misc_feature (61)..(62): /note="This region represents a CpG dinucleotide"
  misc_feature (61)..(61): /note="Nucleotide may be methylated to form 5-methylcytosine"
aaacagtgggatcatctgtgaaacagtggaatcaccccaagaacaaactgtcagacagaccgtcctgtcgtggcatgacttgaacataaccgtcccacgtggggacgcattccgcaccggtt

SEQ ID NO: 8031 - DNA, 122 bp, Homo sapiens
  misc_feature (61)..(62): /note="This region represents a CpG dinucleotide"
  misc_feature (61)..(61): /note="Nucleotide may be methylated to form 5-methylcytosine"
cataagtagtacagcctgctctttatggcgagcagctagggagagggataaggaaagaagcggccagggtacagccaaataagcctgtaatagaggcagattaatcatcaaaacaaggccgg

SEQ ID NO: 8032 - DNA, 122 bp, Homo sapiens
  misc_feature (61)..(62): /note="This region represents a CpG dinucleotide"
  misc_feature (61)..(61): /note="Nucleotide may be methylated to form 5-methylcytosine"
tcagcgttctcagatgtaaacaatagtgtaataaccacattttctggtttctgtatttaacgcttggacatcttagggccttgctgacctcagaaggataggccctttcagggcgagccaat

SEQ ID NO: 8033 - DNA, 122 bp, Homo sapiens
  misc_feature (61)..(62): /note="This region represents a CpG dinucleotide"
  misc_feature (61)..(61): /note="Nucleotide may be methylated to form 5-methylcytosine"
tctacatgactcagagagtcactatgagctcagggagagccggctccctgtaactgctggcgagtctcagtgggcgcatgactcctgtgcacatgccacagtcaaatgtagacaagtggcaa

SEQ ID NO: 8034 - DNA, 122 bp, Homo sapiens
  misc_feature (61)..(62): /note="This region represents a CpG dinucleotide"
  misc_feature (61)..(61): /note="Nucleotide may be methylated to form 5-methylcytosine"
cagtcatcctaataaagcagcatggtcacaggatgagccagcctgaatctgcagcttcttcgtgcaaaacctgagtttctgtgtctctttaattaaaacgatttgcagctcttcattccttt

SEQ ID NO: 8035 - DNA, 122 bp, Homo sapiens
  misc_feature (61)..(62): /note="This region represents a CpG dinucleotide"
  misc_feature (61)..(61): /note="Nucleotide may be methylated to form 5-methylcytosine"
cttcccaagggccatgcgagcactggccaggagcctttgcatggcatatggagcaaatgccgtctgccacttggtgtctgaattttttttgctcttgtcctttagtgattcctgagtgtgtt

SEQ ID NO: 8036 - DNA, 122 bp, Homo sapiens
  misc_feature (61)..(62): /note="This region represents a CpG dinucleotide"
  misc_feature (61)..(61): /note="Nucleotide may be methylated to form 5-methylcytosine"
cagctgcagtgaaagtgtcctggcagctggctcttgagacatagaaaagcaaaattgccacgtaagctggcaactgagtagtcatgctgaagtccaatgagtgctgaaaaacagagcatgtc

SEQ ID NO: 8037 - DNA, 122 bp, Homo sapiens
  misc_feature (61)..(62): /note="This region represents a CpG dinucleotide"
  misc_feature (61)..(61): /note="Nucleotide may be methylated to form 5-methylcytosine"
tgcaacaggattagtctattattccctttcttgtgtttactgagaaagcctccacttcaacgttccatgaagtgtgttccattaaataccaaagtataggcaaaaagttctgtggtcaaata

SEQ ID NO: 8038 - DNA, 122 bp, Homo sapiens
  misc_feature (61)..(62): /note="This region represents a CpG dinucleotide"
  misc_feature (61)..(61): /note="Nucleotide may be methylated to form 5-methylcytosine"
acagtggactggtggaaaacaacagccataaatcacactgtcaggcggcggggagaggagcgaagcacaggcacatgaaggccattcacaggaaacacagtacagccgcttcctaggcagga

SEQ ID NO: 8039 - DNA, 122 bp, Homo sapiens
  misc_feature (61)..(62): /note="This region represents a CpG dinucleotide"
  misc_feature (61)..(61): /note="Nucleotide may be methylated to form 5-methylcytosine"
gcatgctgtaacttatgtgaccagttcctcatgtagcaggtgttcatcatttccactgttcggtatggaaacacctgtcaaaggtgacatatgcaaatgctatcctggaaatcatgccccat

SEQ ID NO: 8040 - DNA, 122 bp, Homo sapiens
  misc_feature (61)..(62): /note="This region represents a CpG dinucleotide"
  misc_feature (61)..(61): /note="Nucleotide may be methylated to form 5-methylcytosine"
gtgactcacccaaagtcacacaccaatatttggtgaccctggatttcctgactccacatccgctgctctctcaacaccactaggtaaggcattaactaaccattaagaattcctctctaaga

SEQ ID NO: 8041 - DNA, 122 bp, Homo sapiens
  misc_feature (61)..(62): /note="This region represents a CpG dinucleotide"
  misc_feature (61)..(61): /note="Nucleotide may be methylated to form 5-methylcytosine"
ccttctcaaaaaataaataaaaggatactatggtgatacccagtttacactttgggaaaccgaggttgtcatttcactgaagtgaggtcactcgctcttgtatgactcaatatgactcttgt

SEQ ID NO: 8042 - DNA, 122 bp, Homo sapiens
  misc_feature (61)..(62): /note="This region represents a CpG dinucleotide"
  misc_feature (61)..(61): /note="Nucleotide may be methylated to form 5-methylcytosine"
tgttggttaagctggtcttgatccacctgcctcagcctcccaaagtgctgagattataggcgtaagccactgtgcctggtgtaatcttaactgctttttaggaaatggtgtaagaaaaggct

SEQ ID NO: 8043 - DNA, 122 bp, Homo sapiens
  misc_feature (61)..(62): /note="This region represents a CpG dinucleotide"
  misc_feature (61)..(61): /note="Nucleotide may be methylated to form 5-methylcytosine"
ggttgcatcaagcattcagtccagttcattattcatcaaactgttagttagtggagctcacgttgggcatttcctctcagctcttaagaagagatagtaaaatgtgaagctttaatttttag

SEQ ID NO: 8044 - DNA, 122 bp, Homo sapiens
  misc_feature (61)..(62): /note="This region represents a CpG dinucleotide"
  misc_feature (61)..(61): /note="Nucleotide may be methylated to form 5-methylcytosine"
ttgcactgcaaataatccttttcattctggtcacctgcatgctcttcactcaggtgaccacgtggcttacttcctcactcccttccagtctttgctcaaaagtcatctcctcaatgagacct

SEQ ID NO: 8045 - DNA, 122 bp, Homo sapiens
  misc_feature (61)..(62): /note="This region represents a CpG dinucleotide"
  misc_feature (61)..(61): /note="Nucleotide may be methylated to form 5-methylcytosine"
cattcctccagtgacttggtgtcctcttgaccagacatgagctcccaaaccagaacttcacgctctacctttgggattcagcccctaggataagggagactaaagcctaccatgtgccacgc

SEQ ID NO: 8046 - DNA, 122 bp, Homo sapiens
  misc_feature (61)..(62): /note="This region represents a CpG dinucleotide"
  misc_feature (61)..(61): /note="Nucleotide may be methylated to form 5-methylcytosine"
attatttatcctcccatccataagcctgtgtttccagttcaaggatttaggtcagcaagacgcagacccaaaaaccattcatttaataacccaagaaagaaggcaagcagggtggcccaaat

SEQ ID NO: 8047 - DNA, 122 bp, Homo sapiens
  misc_feature (61)..(62): /note="This region represents a CpG dinucleotide"
  misc_feature (61)..(61): /note="Nucleotide may be methylated to form 5-methylcytosine"
aggacaagaaaaagctgaacaaatgcagggtggttgtggggtgtttgtgagggaagggagcggatgctgagagagctcaggaagtgccataggaccactcaccacaccctgttgtcttgaat

SEQ ID NO: 8048 - DNA, 122 bp, Homo sapiens
  misc_feature (61)..(62): /note="This region represents a CpG dinucleotide"
  misc_feature (61)..(61): /note="Nucleotide may be methylated to form 5-methylcytosine"
agggcatcagactaatttgtaagtgtattttgaattgatagaaggagggttatttaaaagcggatagaatgttgttacaacaggcatgttgggtgtggctaataacactcatgcagtgaact

SEQ ID NO: 8049 - DNA, 122 bp, Homo sapiens
  misc_feature (61)..(62): /note="This region represents a CpG dinucleotide"
  misc_feature (61)..(61): /note="Nucleotide may be methylated to form 5-methylcytosine"
gcacagagtttactaaaccctttcacatccattaagtcatttgaggcaatattattacctcgtttttacagatgggagaactgaacttcaaaaaagtgtaaggggctgagagcagtggctca

SEQ ID NO: 8050 - DNA, 122 bp, Homo sapiens
  misc_feature (61)..(62): /note="This region represents a CpG dinucleotide"
  misc_feature (61)..(61): /note="Nucleotide may be methylated to form 5-methylcytosine"
cctctctcacatcattggcaggcctgggaatttcccacaggccatctgggtgtgttctgccgtcctgtctcccaagttttttgcagcattgtttcttgttaattagctcttagaatagcaac

SEQ ID NO: 8051 - DNA, 122 bp, Homo sapiens
  misc_feature (61)..(62): /note="This region represents a CpG dinucleotide"
  misc_feature (61)..(61): /note="Nucleotide may be methylated to form 5-methylcytosine"
ccattaagtgacacctgactgtactttatagcagagtactcccagttcctccctcttgtccgttatatgattgctgtcattaatttcacttatctataagctataatcaccaaatacattat

SEQ ID NO: 8052 - DNA, 122 bp, Homo sapiens
  misc_feature (61)..(62): /note="This region represents a CpG dinucleotide"
  misc_feature (61)..(61): /note="Nucleotide may be methylated to form 5-methylcytosine"
ctagtatatagtaactcatttaatctttataaatcccttgaggcagacacaattagtgaccgaattttgtagatgacaaactgggtgtagagctgtctagtaatttggacaaggaatacagg

SEQ ID NO: 8053 - DNA, 122 bp, Homo sapiens
  misc_feature (61)..(62): /note="This region represents a CpG dinucleotide"
  misc_feature (61)..(61): /note="Nucleotide may be methylated to form 5-methylcytosine"
cacagagtagatctcgtgtcctcaatgatagcagcacccattctccaagagctgtgtgttcgtcctgattcacagaaatctctccccttccaattgttcccgtattagtaagaggaaataca

SEQ ID NO: 8054 - DNA, 122 bp, Homo sapiens
  misc_feature (61)..(62): /note="This region represents a CpG dinucleotide"
  misc_feature (61)..(61): /note="Nucleotide may be methylated to form 5-methylcytosine"
ccccatgtgtaaactttccttgtacttcttaatggagcaactgggaaatgaaagatggtgcgaaggaggctgaaggaacatccacagaccagtactgctggtgtcattcatctgagtcatct

SEQ ID NO: 8055 - DNA, 122 bp, Homo sapiens
  misc_feature (61)..(62): /note="This region represents a CpG dinucleotide"
  misc_feature (61)..(61): /note="Nucleotide may be methylated to form 5-methylcytosine"
tagcaaagcaagtgttgaaacttaacactgaatactaaactgattccctaccggatctgccggaagagaagcatgcagccatttgggaagctgagggtcaaggtcatttatattccaggtat

SEQ ID NO: 8056 - DNA, 122 bp, Homo sapiens
  misc_feature (61)..(62): /note="This region represents a CpG dinucleotide"
  misc_feature (61)..(61): /note="Nucleotide may be methylated to form 5-methylcytosine"
cagctccctacaatggttgaatcaagctcttgagctctaaatccctacattaaaacctcacgcaaccttgcaagtggaataaaatacctaaagcagcttctgttttcctggtcaaaccttga

SEQ ID NO: 8057 - DNA, 122 bp, Homo sapiens
  misc_feature (61)..(62): /note="This region represents a CpG dinucleotide"
  misc_feature (61)..(61): /note="Nucleotide may be methylated to form 5-methylcytosine"
actcttaaaacagttttgttggataggtactattatttccagttttgcctagcgaaactgcgagctggagaggttaagtgactcgcctaaggtcagatagctaaaaagtagaaaaactggga

SEQ ID NO: 8058 - DNA, 122 bp, Homo sapiens
  misc_feature (61)..(62): /note="This region represents a CpG dinucleotide"
  misc_feature (61)..(61): /note="Nucleotide may be methylated to form 5-methylcytosine"
ctccgaaaaggtaagtcgattcccagtactcaccctgatccatctccctccttctcctgtcggtcaaggcccttcaactagtcaccagtacgattcgagacctaattgcctcttgagcattt

SEQ ID NO: 8059 - DNA, 122 bp, Homo sapiens
  misc_feature (61)..(62): /note="This region represents a CpG dinucleotide"
  misc_feature (61)..(61): /note="Nucleotide may be methylated to form 5-methylcytosine"
agggtacagggacactcaaagagtgatttgcttctctcagctcttgcattggcaggagctcggaaggacaacctctgagttcctcctcccaaaactagagtccttgaatctgacaacttgac

SEQ ID NO: 8060 - DNA, 122 bp, Homo sapiens
  misc_feature (61)..(62): /note="This region represents a CpG dinucleotide"
  misc_feature (61)..(61): /note="Nucleotide may be methylated to form 5-methylcytosine"
ctgctgtcagatgcacgtgagactcagctgtactcaccggcgaaataaacgttttggctccgggaaggcagaaaacgtccactttgagagaaactcacaccctgcataagccactaaccggt

SEQ ID NO: 8061 - DNA, 122 bp, Homo sapiens
  misc_feature (61)..(62): /note="This region represents a CpG dinucleotide"
  misc_feature (61)..(61): /note="Nucleotide may be methylated to form 5-methylcytosine"
ccttcccttttatgagctggccttgaccccatttctttttctttttttgagacggatttccgctctcgtccctcaggctgaagtgcaatggcacgatctcagctcactgcaacctccgcctc

SEQ ID NO: 8062 - DNA, 122 bp, Homo sapiens
  misc_feature (61)..(62): /note="This region represents a CpG dinucleotide"
  misc_feature (61)..(61): /note="Nucleotide may be methylated to form 5-methylcytosine"
tctctaatccttatagcaactctataagttgctataagaaagtgatattattcttgaaaccgacacttcagaaggttgagtcacctacctaagaccacacagctaatagggccaaaccagga

SEQ ID NO: 8063 - DNA, 122 bp, Homo sapiens
  misc_feature (61)..(62): /note="This region represents a CpG dinucleotide"
  misc_feature (61)..(61): /note="Nucleotide may be methylated to form 5-methylcytosine"
ggtggggtagagtctaagttgtttccggtctgagccttcaagttgctgggctgtccttggcgtggcgagtcccaggagaaccagtgagacaagactggtggttctcaaagactcatatgtcc

SEQ ID NO: 8064 - DNA, 122 bp, Homo sapiens
  misc_feature (61)..(62): /note="This region represents a CpG dinucleotide"
  misc_feature (61)..(61): /note="Nucleotide may be methylated to form 5-methylcytosine"
ccagggctgctcagacagttccacagatgagtcaggatcccatactccttccagctttatcgcctgccaccgtaaggatgtggctctcgttagcattatctaagacggcagatggggctcta

SEQ ID NO: 8065 - DNA, 122 bp, Homo sapiens
  misc_feature (61)..(62): /note="This region represents a CpG dinucleotide"
  misc_feature (61)..(61): /note="Nucleotide may be methylated to form 5-methylcytosine"
atgggacaggaagagtttgcacttggttttttgtgaaagaatgttagaaatacgtgaaaccgttggtagtattttgactatcacctgaaaggtactaaatgttaaactagtaatttgcaatc

SEQ ID NO: 8066 - DNA, 122 bp, Homo sapiens
  misc_feature (61)..(62): /note="This region represents a CpG dinucleotide"
  misc_feature (61)..(61): /note="Nucleotide may be methylated to form 5-methylcytosine"
tcctgcttctgaatgacacgtgtcccaggctgtgctacttaggcacatagttccaggacacgcaatcccagatcccagttgtctgctggatttgctgcagggcttgcttctgactccctccc

SEQ ID NO: 8067 - DNA, 122 bp, Homo sapiens
  misc_feature (61)..(62): /note="This region represents a CpG dinucleotide"
  misc_feature (61)..(61): /note="Nucleotide may be methylated to form 5-methylcytosine"
acgttttttatgggaaggtcgtggcggcagctacacagggcttcttacacgagctgagagcgacatctggtccagacagatgacaggtgcaaaatgaagcaggatgtttcagggattgtcgt

SEQ ID NO: 8068 - DNA, 122 bp, Homo sapiens
  misc_feature (61)..(62): /note="This region represents a CpG dinucleotide"
  misc_feature (61)..(61): /note="Nucleotide may be methylated to form 5-methylcytosine"
gaagggccggtttgcccggagctcttgagaaatctcactccccgtggacttgcaccctgtcgccactcccctgacctgccctgaggctggggtgcagcagggaattgcaacagccccccacc

SEQ ID NO: 8069 - DNA, 122 bp, Homo sapiens
  misc_feature (61)..(62): /note="This region represents a CpG dinucleotide"
  misc_feature (61)..(61): /note="Nucleotide may be methylated to form 5-methylcytosine"
cattaaactctgcatataaccaaaagtcttctgtggtagatcaggagtaaaaccaggtaccgatcattgatgaccaaattttgtgggttttgaggcaccaatggataatcccttgtagtatt

SEQ ID NO: 8070 - DNA, 122 bp, Homo sapiens
  misc_feature (61)..(62): /note="This region represents a CpG dinucleotide"
  misc_feature (61)..(61): /note="Nucleotide may be methylated to form 5-methylcytosine"
aaatccacaatcaagcccttgttgatgcaaatgttagtcgcccaaagcagaatgggttaacgaattactgcagtggttttaggtgcatgggtttgacccatgtaaatcattttaataagtaa

SEQ ID NO: 8071 - DNA, 122 bp, Homo sapiens
  misc_feature (61)..(62): /note="This region represents a CpG dinucleotide"
  misc_feature (61)..(61): /note="Nucleotide may be methylated to form 5-methylcytosine"
atatgcaaccatctttgctattgtaaactcttcaaaaccctttttcattaattcacaccacgtatgtcagccttttgtattactaatcctagcatatgattatagattagtcagtctacttt

SEQ ID NO: 8072 - DNA, 122 bp, Homo sapiens
  misc_feature (61)..(62): /note="This region represents a CpG dinucleotide"
  misc_feature (61)..(61): /note="Nucleotide may be methylated to form 5-methylcytosine"
gaatcaagttccaccacttgactactactttcctttgatttgattgttagttctgctaaccgtgacaactgtcacgatgtgagacaaaggagaatgattataattgtgtctgggtcagtgtc

SEQ ID NO: 8073 - DNA, 122 bp, Homo sapiens
  misc_feature (61)..(62): /note="This region represents a CpG dinucleotide"
  misc_feature (61)..(61): /note="Nucleotide may be methylated to form 5-methylcytosine"
gaggcctaagatggagacctagagcctacagcacgtttggctggaatgcagaatgtgtaacgaggaaaggcagctctgccaccctgtagaaggccatcctggtcaatgactcagcttctctg

SEQ ID NO: 8074 - DNA, 122 bp, Homo sapiens
  misc_feature (61)..(62): /note="This region represents a CpG dinucleotide"
  misc_feature (61)..(61): /note="Nucleotide may be methylated to form 5-methylcytosine"
atatgcattggcactgttatccccattttacagatgaggaaactaaggtgagagaggctgcgtaatatgtctgaggtcatagagctattgagtggatgagtcaggattcattctggcaccag

SEQ ID NO: 8075 - DNA, 122 bp, Homo sapiens
  misc_feature (61)..(62): /note="This region represents a CpG dinucleotide"
  misc_feature (61)..(61): /note="Nucleotide may be methylated to form 5-methylcytosine"
attgcatcacattttatgacctaatcttgtaagttgcacagcactacatcctctgcatgccgtagattacaaacaagtcactaaggttcatccagattcaagggaagatatgtagacttcat

SEQ ID NO: 8076 - DNA, 122 bp, Homo sapiens
  misc_feature (61)..(62): /note="This region represents a CpG dinucleotide"
  misc_feature (61)..(61): /note="Nucleotide may be methylated to form 5-methylcytosine"
ctctatgcctttacccaatcagttttgaaaacatattttattttcttttttttctccatgcgtgacctgctattgtcaatggccatttggaattcccaaaggattggtagaggtatgcagtt

SEQ ID NO: 8077 - DNA, 122 bp, Homo sapiens
  misc_feature (61)..(62): /note="This region represents a CpG dinucleotide"
  misc_feature (61)..(61): /note="Nucleotide may be methylated to form 5-methylcytosine"
gatgaggctcaaaaaggccattcatctgaagaagctcaatttcctgaagtcacagaaatacgcagagcaagtatctgaacccaagtcagatgatggtttgacaaagaggttggaatctgcta

SEQ ID NO: 8078 - DNA, 122 bp, Homo sapiens
  misc_feature (61)..(62): /note="This region represents a CpG dinucleotide"
  misc_feature (61)..(61): /note="Nucleotide may be methylated to form 5-methylcytosine"
gagtgtgagctgcatgatgctgccttgcagcagccctttgctgacctaactgggctctggcgagcacccagtgaagtggatgacaaaaaggcatgacaaagatcaagcaactcaagaaaggt

SEQ ID NO: 8079 - DNA, 122 bp, Homo sapiens
  misc_feature (61)..(62): /note="This region represents a CpG dinucleotide"
  misc_feature (61)..(61): /note="Nucleotide may be methylated to form 5-methylcytosine"
ggcagggatggtgagtctagctttcagtttcctgtacctggctgacatgattttcttcaccgtcacttgctctggctggtatttgtatccatatagaaaaatataaacataacaaaagcttt

SEQ ID NO: 8080 - DNA, 122 bp, Homo sapiens
  misc_feature (61)..(62): /note="This region represents a CpG dinucleotide"
  misc_feature (61)..(61): /note="Nucleotide may be methylated to form 5-methylcytosine"
agtctgtgtcccttcttagagcctaactctgttcctcagccctcccgcccagtgacacttcgtaggactcattgcccaggaatcctgctcagtcattgcattgcccggctctgacctgggat

SEQ ID NO: 8081 - DNA, 122 bp, Homo sapiens
  misc_feature (61)..(62): /note="This region represents a CpG dinucleotide"
  misc_feature (61)..(61): /note="Nucleotide may be methylated to form 5-methylcytosine"
gatctacaaaccagcccccaggagcagcaggccctggcaacctctgtgctatggagtccacgcagaacagggacttcaaagtgcttggggtgtgctggcttgggagtcatttcgctgagaac

SEQ ID NO: 8082 - DNA, 122 bp, Homo sapiens
  misc_feature (61)..(62): /note="This region represents a CpG dinucleotide"
  misc_feature (61)..(61): /note="Nucleotide may be methylated to form 5-methylcytosine"
tacaggcagtcaccaccacacccagctaaatttcttttgtgttgctatttttattagaaacggggtttcacctttttacacaagctggccttgaactcctggactcaagcgatctgcccttc

SEQ ID NO: 8083 - DNA, 122 bp, Homo sapiens
  misc_feature (61)..(62): /note="This region represents a CpG dinucleotide"
  misc_feature (61)..(61): /note="Nucleotide may be methylated to form 5-methylcytosine"
aaatgaattggtcatcaaaaattagactttcctctcacctgtgcagctggctctgtcacgcggcctctgctgctcaccaccagcacatacctggcccaggagtggctgccagtcaatgcgca

SEQ ID NO: 8084 - DNA, 122 bp, Homo sapiens
  misc_feature (61)..(62): /note="This region represents a CpG dinucleotide"
  misc_feature (61)..(61): /note="Nucleotide may be methylated to form 5-methylcytosine"
taatatagcagatgtttacttactgagcactccctgggtgtcaggtgctatacacattggcgtcaatacagtcagggatgagaccaacatagcccctgccctccaggagcttacagtcttgt

SEQ ID NO: 8085 - DNA, 122 bp, Homo sapiens
  misc_feature (61)..(62): /note="This region represents a CpG dinucleotide"
  misc_feature (61)..(61): /note="Nucleotide may be methylated to form 5-methylcytosine"
ctggaaaggacagtgatggcagagtttacttagtcagtgattcatttgtactctcaactccgcctttgttcaagttttcctaataccgagttaatatatatgttttggcctggaagattgat

SEQ ID NO: 8086 - DNA, 122 bp, Homo sapiens
  misc_feature (61)..(62): /note="This region represents a CpG dinucleotide"
  misc_feature (61)..(61): /note="Nucleotide may be methylated to form 5-methylcytosine"
acacattaatattcatggttagagaggaagttgtacatataactacgcccttttcactaccgctgctgcattggatcattgagtctaactagttgtgcccagtagtgagtgagatggtcaga

SEQ ID NO: 8087 - DNA, 122 bp, Homo sapiens
  misc_feature (61)..(62): /note="This region represents a CpG dinucleotide"
  misc_feature (61)..(61): /note="Nucleotide may be methylated to form 5-methylcytosine"
ccctccaggtgcaacacctgacaacatccatcggcaacttcgtccatgaacacatcacgccggggactcaagcacgttaaactgctccaattggtagctaaacgagagattgcaaaacatgc

SEQ ID NO: 8088 - DNA, 122 bp, Homo sapiens
  misc_feature (61)..(62): /note="This region represents a CpG dinucleotide"
  misc_feature (61)..(61): /note="Nucleotide may be methylated to form 5-methylcytosine"
tttgtcctaacctgccttgtgttaatcattcatttaatgaatattcactgagaccgattacgtatctggtgttctacaaggcactgcgcatattcagaggcatattcatctttgtcacagct

SEQ ID NO: 8089 - DNA, 122 bp, Homo sapiens
  misc_feature (61)..(62): /note="This region represents a CpG dinucleotide"
  misc_feature (61)..(61): /note="Nucleotide may be methylated to form 5-methylcytosine"
ggcctccctgtaagacagtgagttgtctgcgagctctgctctgagccctggcacatggagcgactcagttacacttaatcagctcttagaggcactggctgggcatggtggctcaacgcctg

SEQ ID NO: 8090 - DNA, 122 bp, Homo sapiens
  misc_feature (61)..(62): /note="This region represents a CpG dinucleotide"
  misc_feature (61)..(61): /note="Nucleotide may be methylated to form 5-methylcytosine"
gttgggccaaatggaactgccattattgtaggtcaagaacaggtcaatatcggccaggcacggtggctcacacctgtaatcccagcactttaggaggccgaggcaggtggatcacgaggtca

SEQ ID NO: 8091 - DNA, 122 bp, Homo sapiens
  misc_feature (61)..(62): /note="This region represents a CpG dinucleotide"
  misc_feature (61)..(61): /note="Nucleotide may be methylated to form 5-methylcytosine"
gaaatacatccaaaaagttagcattggagtgttagaaactagaatagacctctccgccaccgagctgctgtgtcacgccctcagcctgctagggagtgacaagcccaagtcattcttgatcc

SEQ ID NO: 8092 - DNA, 122 bp, Homo sapiens
  misc_feature (61)..(62): /note="This region represents a CpG dinucleotide"
  misc_feature (61)..(61): /note="Nucleotide may be methylated to form 5-methylcytosine"
aacttaagaacaacctctgccccaccaccccccaagcacacccagagctgcaggctctagcgcatcccagccagtgtctcctgcagctcagcaggtaaagggccccggtgagggaggcagag

SEQ ID NO: 8093 - DNA, 122 bp, Homo sapiens
  misc_feature (61)..(62): /note="This region represents a CpG dinucleotide"
  misc_feature (61)..(61): /note="Nucleotide may be methylated to form 5-methylcytosine"
gaggttcccaagcctggcagcagatccttaaggctgattcattcagcacatctgattgagcgtgtctgacttggcaaatgggaatgaactagaagatcagtgccttggagctgcagtatgtg

SEQ ID NO: 8094 - DNA, 122 bp, Homo sapiens
  misc_feature (61)..(62): /note="This region represents a CpG dinucleotide"
  misc_feature (61)..(61): /note="Nucleotide may be methylated to form 5-methylcytosine"
gacctgtcatttccatttatgtaatggattttgaactcaaaagccctgtaaatacataagcgatcttgaaccaagccccattgtgaaaggcaggattgaggaatatgaaacaaattatgctt

SEQ ID NO: 8095 - DNA, 122 bp, Homo sapiens
  misc_feature (61)..(62): /note="This region represents a CpG dinucleotide"
  misc_feature (61)..(61): /note="Nucleotide may be methylated to form 5-methylcytosine"
cctgatgtattgcacttaccacactgtattctaattgtttattttctagtttacctctggcgctagagtgtgagatttttaaaggcagagattatttcttctggttctggggcacacctagt

SEQ ID NO: 8096 - DNA, 122 bp, Homo sapiens
  misc_feature (61)..(62): /note="This region represents a CpG dinucleotide"
  misc_feature (61)..(61): /note="Nucleotide may be methylated to form 5-methylcytosine"
tcatggcatttcctttttccataattgttttaccttaagttgccacccagagataagcttcgcccacagtatatttctctaatgccaccagactggcatttttgtaattcaaatattctctt

SEQ ID NO: 8097 - DNA, 122 bp, Homo sapiens
  misc_feature (61)..(62): /note="This region represents a CpG dinucleotide"
  misc_feature (61)..(61): /note="Nucleotide may be methylated to form 5-methylcytosine"
ggtgacccgcctgcctcggcctcccaaagtgctgggattacaggcgttagccactgtgcccggccagtgatttagttctgattaagtcctgcccccggccctccggacatgtttctcatccc

SEQ ID NO: 8098 - DNA, 122 bp, Homo sapiens
  misc_feature (61)..(62): /note="This region represents a CpG dinucleotide"
  misc_feature (61)..(61): /note="Nucleotide may be methylated to form 5-methylcytosine"
aatgccagaggcaggagacagatgggtccaagggccagagagcctgctccagtggctcctcggagtgagatgggtcagagagggaggcaggagaccagaaaataccaaggaagaaaaatcta

SEQ ID NO: 8099 - DNA, 122 bp, Homo sapiens
  misc_feature (61)..(62): /note="This region represents a CpG dinucleotide"
  misc_feature (61)..(61): /note="Nucleotide may be methylated to form 5-methylcytosine"
atcagacaggctggggagcacatccctagaatgaaacaactctaaggtatgtcaggtgagcgaagaggacacccgacagagctgaagtgccccagattagacggctgcccccgccggcatgg

SEQ ID NO: 8100 - DNA, 122 bp, Homo sapiens
  misc_feature (61)..(62): /note="This region represents a CpG dinucleotide"
  misc_feature (61)..(61): /note="Nucleotide may be methylated to form 5-methylcytosine"
catgagccacttcacccagcccaatcactgtcttttaattgtggaattttacttggcaagcgtctccttgtcaacatagtaagacttttttcccctacattatttttatatttatataacaa

SEQ ID NO: 8101 - DNA, 122 bp, Homo sapiens
  misc_feature (61)..(62): /note="This region represents a CpG dinucleotide"
  misc_feature (61)..(61): /note="Nucleotide may be methylated to form 5-methylcytosine"
aattgaatatgatgtcagcatggaacaatctaatgattcattaagagtcaaccataatgacggtgaagagtcaaaaaccagtgctcaagtatttgaggtatggattcagctgggaacctttt

SEQ ID NO: 8102 - DNA, 122 bp, Homo sapiens
  misc_feature (61)..(62): /note="This region represents a CpG dinucleotide"
  misc_feature (61)..(61): /note="Nucleotide may be methylated to form 5-methylcytosine"
aaaaacaggaatgacttcttcgaattggtgcactagagaaatgttttccagtcgcctaagcgtttaagcatggtaaacagattaccatattagttgcccagaccttgcaaaacttcatagtg

SEQ ID NO: 8103 - DNA, 122 bp, Homo sapiens
  misc_feature (61)..(62): /note="This region represents a CpG dinucleotide"
  misc_feature (61)..(61): /note="Nucleotide may be methylated to form 5-methylcytosine"
atttgaaggaacagggaaatacaaattttaaaaagacaaattttctgtagttgtataaagcgacatctacatttaatggacatgctaggctgttgtgggagaaatgtggttagagatgagga

SEQ ID NO: 8104 - DNA, 122 bp, Homo sapiens
  misc_feature (61)..(62): /note="This region represents a CpG dinucleotide"
  misc_feature (61)..(61): /note="Nucleotide may be methylated to form 5-methylcytosine"
caagctgaatgcaggcctcacctccccactgtgttgcttccgtgggctactcagagtcaccgggaagttcccacaggagtcataatcactgaatcactctctggctttctagttaatgtttt

SEQ ID NO: 8105 - DNA, 122 bp, Homo sapiens
  misc_feature (61)..(62): /note="This region represents a CpG dinucleotide"
  misc_feature (61)..(61): /note="Nucleotide may be methylated to form 5-methylcytosine"
gtctctacactcagtacccctgggctgggctgggcagctgtagatcgcaacacattttcacgccttcctcttgagcctttccgtgggttgtttgcatgctcagagtgtgtgtgggctgtgga

SEQ ID NO: 8106 - DNA, 122 bp, Homo sapiens
  misc_feature (61)..(62): /note="This region represents a CpG dinucleotide"
  misc_feature (61)..(61): /note="Nucleotide may be methylated to form 5-methylcytosine"
ggaactttgacccacagaaacctggcatttgacttgcttcggtgagtccaacctgtgtcacgagtgcctgtttcaagggtaataaaggacctggctgtttgcttacagcaaatggaggtggt

SEQ ID NO: 8107 - DNA, 122 bp, Homo sapiens
  misc_feature (61)..(62): /note="This region represents a CpG dinucleotide"
  misc_feature (61)..(61): /note="Nucleotide may be methylated to form 5-methylcytosine"
ctccgacaagcagattctaaacatctatgacctgtgcaacaagttcatagcctatagcaccgtctttgaggatgtagtggatgtgcttgctgagtggggctccctgtacgtgctgacgcggg

SEQ ID NO: 8108 - DNA, 122 bp, Homo sapiens
  misc_feature (61)..(62): /note="This region represents a CpG dinucleotide"
  misc_feature (61)..(61): /note="Nucleotide may be methylated to form 5-methylcytosine"
atcctggggctgggtcctcaaacacatccatctccacagtggaaaatgaacctgacagcacgggacatggaaacttgggtggatacattttggtgatgggtgggggtgagggaatcctgcag

SEQ ID NO: 8109 - DNA, 122 bp, Homo sapiens
  misc_feature (61)..(62): /note="This region represents a CpG dinucleotide"
  misc_feature (61)..(61): /note="Nucleotide may be methylated to form 5-methylcytosine"
ggtgatccgccctcctcggcctcccaaagtgctgggattacaggtgtgagccacggtgcacggcccctggagaggttttaatggcccagcctcacacccaggtctggcctcccaggccacca

SEQ ID NO: 8110 - DNA, 122 bp, Homo sapiens
  misc_feature (61)..(62): /note="This region represents a CpG dinucleotide"
  misc_feature (61)..(61): /note="Nucleotide may be methylated to form 5-methylcytosine"
tgagcggagcactgggcacctcctatccttacatccacagcaacctgacaacctcccaggcgggcgtggagtttgaccagttccaccaccggcgtctatctgggttctctacgtgccgggcc

SEQ ID NO: 8111 - DNA, 122 bp, Homo sapiens
  misc_feature (61)..(62): /note="This region represents a CpG dinucleotide"
  misc_feature (61)..(61): /note="Nucleotide may be methylated to form 5-methylcytosine"
tttctgtcagcctggaaagttgatgactaaggcctttctagtcactcctgttcttggtttcgtgaaaagaatggtgcctgtattttcatcctcgagacagcaggatagcgtagacattgtgt

SEQ ID NO: 8112 - DNA, 122 bp, Homo sapiens
  misc_feature (61)..(62): /note="This region represents a CpG dinucleotide"
  misc_feature (61)..(61): /note="Nucleotide may be methylated to form 5-methylcytosine"
ggaatctttggctgctgctcctagtaaagagtgagtcactgtgagtctttttcctgaggccgatttctgcagagaagaatccttccctgtgttgcatgtggggcaggtctgcattatggagt

SEQ ID NO: 8113 - DNA, 122 bp, Homo sapiens
  misc_feature (61)..(62): /note="This region represents a CpG dinucleotide"
  misc_feature (61)..(61): /note="Nucleotide may be methylated to form 5-methylcytosine"
ggccttgcctctacagtcctctttggcctagtggcctcctcccttgtggattggctgggtcgcaagaattcttgtgtcctcttctccctgacttactcactatgctgcttaaccaaactctc

SEQ ID NO: 8114 - DNA, 122 bp, Homo sapiens
  misc_feature (61)..(62): /note="This region represents a CpG dinucleotide"
  misc_feature (61)..(61): /note="Nucleotide may be methylated to form 5-methylcytosine"
gtccattattttattttcccttatagcctgtgtaagtgtagtgccccttgtcattatgctcggcaaagcacaaaccttagcccacttggacttccttcctctccttctcctccccacctgca

SEQ ID NO: 8115 - DNA, 122 bp, Homo sapiens
  misc_feature (61)..(62): /note="This region represents a CpG dinucleotide"
  misc_feature (61)..(61): /note="Nucleotide may be methylated to form 5-methylcytosine"
cctgtggacaacagctggggttccaagccagcttgctggtgagcttctctttctgaaggccgctctatggacttcagacttgccaagctggcccccacccacaatttcacaagcgaatttct

SEQ ID NO: 8116 - DNA, 122 bp, Homo sapiens
  misc_feature (61)..(62): /note="This region represents a CpG dinucleotide"
  misc_feature (61)..(61): /note="Nucleotide may be methylated to form 5-methylcytosine"
acctcgtgatctgcctgcctctgcctccgaaagtgctgggattataggcatgagccaccacgcctgggctggatttcttaaatatggtgattcagtgacattttgctgtgtaattattggca

SEQ ID NO: 8117 - DNA, 122 bp, Homo sapiens
  misc_feature (61)..(62): /note="This region represents a CpG dinucleotide"
  misc_feature (61)..(61): /note="Nucleotide may be methylated to form 5-methylcytosine"
tttgggctgctcaaaatgaatttcctggataattttcctaagccctcactgactcctactcgcatgtattgctaggagccagctttcactcctgggactggtttgggcttccagaaagcatg

SEQ ID NO: 8118 - DNA, 122 bp, Homo sapiens
  misc_feature (61)..(62): /note="This region represents a CpG dinucleotide"
  misc_feature (61)..(61): /note="Nucleotide may be methylated to form 5-methylcytosine"
gcccagaaggcaagaattgcagcaggtgtgggaaattgaatggtgtggctgctcttctcccgagctgtcagctgttggcaggctgaatgaatctagctctagagctggctgcagacaatgca

SEQ ID NO: 8119 - DNA, 122 bp, Homo sapiens
  misc_feature (61)..(62): /note="This region represents a CpG dinucleotide"
  misc_feature (61)..(61): /note="Nucleotide may be methylated to form 5-methylcytosine"
tttgaaattacttgtattgctcaagttctgtatgcttttgttggttgagtttgctcataacgtttagtaagaccgagtccctacttcctgcagccccattcagctgcaggtgtgatttccac

SEQ ID NO: 8120 - DNA, 122 bp, Homo sapiens
  misc_feature (61)..(62): /note="This region represents a CpG dinucleotide"
  misc_feature (61)..(61): /note="Nucleotide may be methylated to form 5-methylcytosine"
tttcagcaaacctctctctttccctcagcctttgctctgcctgcttcctgggcttggggccgcagaggccagcgaggctcccttcattccctccaccaaagcgaggtcttccctgcccccac

SEQ ID NO: 8121 - DNA, 122 bp, Homo sapiens
  misc_feature (61)..(62): /note="This region represents a CpG dinucleotide"
  misc_feature (61)..(61): /note="Nucleotide may be methylated to form 5-methylcytosine"
catcattttctcttgtgcttgatttaatctcatgctgttttgttcctcacggtccctaagcgtacagaatccatggctaatgttgccaaagagaagccacattgagtgattgtattagtcca

SEQ ID NO: 8122 - DNA, 122 bp, Homo sapiens
  misc_feature (61)..(62): /note="This region represents a CpG dinucleotide"
  misc_feature (61)..(61): /note="Nucleotide may be methylated to form 5-methylcytosine"
aggggtagattagctagttgtgtaacactcattagcatagcaaactggtggacgtgctgacgcaggccgcctgcctcagcagctgggtcggtcagaattgctttaacaatctttgtcctctt

SEQ ID NO: 8123 - DNA, 122 bp, Homo sapiens
  misc_feature (61)..(62): /note="This region represents a CpG dinucleotide"
  misc_feature (61)..(61): /note="Nucleotide may be methylated to form 5-methylcytosine"
atatcctgaatcagggagatcctcaggggaggcatgagtgagctggcatcagacttcctacgttctgaatcaagaagtattcctagaataaacaagttggtcatgtccaaagagatctgaat

SEQ ID NO: 8124 - DNA, 122 bp, Homo sapiens
  misc_feature (61)..(62): /note="This region represents a CpG dinucleotide"
  misc_feature (61)..(61): /note="Nucleotide may be methylated to form 5-methylcytosine"
ctcacctgtcggatgcatcactgaacaatagttctgaatctccccacacttagggctgtgcggctgagagcattaagatcccatgagaaagagtgagccagcatttcatcatgataggtgtg

SEQ ID NO: 8125 - DNA, 122 bp, Homo sapiens
  misc_feature (61)..(62): /note="This region represents a CpG dinucleotide"
  misc_feature (61)..(61): /note="Nucleotide may be methylated to form 5-methylcytosine"
ctcaggattgtgttaatacctggaacatgcacaaagatacatacatacctggacagattccgtgttaagcttctatcactttttcttcctcatctaatagcagaaagtgctgattatgtcat

SEQ ID NO: 8126 - DNA, 122 bp, Homo sapiens
  misc_feature (61)..(62): /note="This region represents a CpG dinucleotide"
  misc_feature (61)..(61): /note="Nucleotide may be methylated to form 5-methylcytosine"
tgctgtcctggaagtaaacaaacacaactgaggagctcagggtgacctctaggagccaagcgtggtctctggccagcatttagtaaaaaaaatagggagtgtcccacaactacaagaaactg

SEQ ID NO: 8127 - DNA, 122 bp, Homo sapiens
  misc_feature (61)..(62): /note="This region represents a CpG dinucleotide"
  misc_feature (61)..(61): /note="Nucleotide may be methylated to form 5-methylcytosine"
agttgctttgagtggtgttgttctcccttgcaacctttgacctattatgaagataaataacggatgctggcaaggtggtggagaaaagggaacacttacacgcttccagttagaacactctt

SEQ ID NO: 8128 - DNA, 122 bp, Homo sapiens
  misc_feature (61)..(62): /note="This region represents a CpG dinucleotide"
  misc_feature (61)..(61): /note="Nucleotide may be methylated to form 5-methylcytosine"
gagacaagtggatgataatgcacttactcattaaggagctggctgctaggtaagttcctgcggtgccaatatataagtagtaaaatggcactggaacattaatgagtcagaaaaaatgcatt

SEQ ID NO: 8129 - DNA, 122 bp, Homo sapiens
  misc_feature (61)..(62): /note="This region represents a CpG dinucleotide"
  misc_feature (61)..(61): /note="Nucleotide may be methylated to form 5-methylcytosine"
agatgactgccaggattccagatattatcacaacactttccccttggaatttattggctacgactgagtcatgtggccactcatagatgcaagggaggctgagtaagcaagtgtcagacata

SEQ ID NO: 8130 - DNA, 122 bp, Homo sapiens
  misc_feature (61)..(62): /note="This region represents a CpG dinucleotide"
  misc_feature (61)..(61): /note="Nucleotide may be methylated to form 5-methylcytosine"
attaaaatattcctgtcaaaattattagtattgaaattaggcttggacacgagagagaaccgtatttgagtgatgtgagaagactaaatcttttccacatgagtcagcactgccatactaat

SEQ ID NO: 8131 - DNA, 122 bp, Homo sapiens
  misc_feature (61)..(62): /note="This region represents a CpG dinucleotide"
  misc_feature (61)..(61): /note="Nucleotide may be methylated to form 5-methylcytosine"
cacttgcccttaaccagctgtacttgagctcaagtccagcttacttggactgagctgttacgttcatccctgattcattcattgaacaaatagttattgagtgcctgtcatgtgccagccct

SEQ ID NO: 8132 - DNA, 122 bp, Homo sapiens
  misc_feature (61)..(62): /note="This region represents a CpG dinucleotide"
  misc_feature (61)..(61): /note="Nucleotide may be methylated to form 5-methylcytosine"
tcccatggcctttcatctgtgtgtgtgcatccctaatgtctcttcccctttttataaggacgtgagtcctatccaattagggtcccacccttatgagctcattcagccttaattacttcttc

SEQ ID NO: 8133 - DNA, 122 bp, Homo sapiens
  misc_feature (61)..(62): /note="This region represents a CpG dinucleotide"
  misc_feature (61)..(61): /note="Nucleotide may be methylated to form 5-methylcytosine"
gggcagcctggccagcctggcttgtctttgcagtgtcctgtgctgggccaggtgtccagccgggctgggaacggacctttctctcccatggccgggcctggcagctcttactggcaagaagt

SEQ ID NO: 8134 - DNA, 122 bp, Homo sapiens
  misc_feature (61)..(62): /note="This region represents a CpG dinucleotide"
  misc_feature (61)..(61): /note="Nucleotide may be methylated to form 5-methylcytosine"
acacacacagatatacacacaggtacataaacacagatacagcagcaggaagtctcaccacgctgcacctcctcaagtatataccacaccttcacatacagcagcaggaagtctcaccgcgc

SEQ ID NO: 8135 - DNA, 122 bp, Homo sapiens
  misc_feature (61)..(62): /note="This region represents a CpG dinucleotide"
  misc_feature (61)..(61): /note="Nucleotide may be methylated to form 5-methylcytosine"
ccttctgtctcttgcaatgagttagcatttacagttgaaatggggctcagcacccacccacgtagtcagtcttcagcaaaccagacatgtttctagattttatatacatatgatgtaagctc

SEQ ID NO: 8136 - DNA, 122 bp, Homo sapiens
  misc_feature (61)..(62): /note="This region represents a CpG dinucleotide"
  misc_feature (61)..(61): /note="Nucleotide may be methylated to form 5-methylcytosine"
tgtgacattaatgtgcaacagcagaacgtgtttcaacattatcagtgcagtttctctccacggtagtgatggtttcctgcagatgcacttagtctgacttcatcaaaatggaaatgttaaca

SEQ ID NO: 8137 - DNA, 122 bp, Homo sapiens
  misc_feature (61)..(62): /note="This region represents a CpG dinucleotide"
  misc_feature (61)..(61): /note="Nucleotide may be methylated to form 5-methylcytosine"
gcacttacacaaacctagatggtatcacctactacaggcctaggctagatggtatatagccgattgctcctagtctacaaacctgttcagtatgctacttttctgaatactgtagtcagttg

SEQ ID NO: 8138 - DNA, 122 bp, Homo sapiens
  misc_feature (61)..(62): /note="This region represents a CpG dinucleotide"
  misc_feature (61)..(61): /note="Nucleotide may be methylated to form 5-methylcytosine"
tgagtcatactcatttgaggctttgttttctgttatatggctcactttctatctttgacacgtgttgtttaatcatcatagtcttctgaagtacactggtgttaggtatttaatagtgaagg

SEQ ID NO: 8139 - DNA, 122 bp, Homo sapiens
  misc_feature (61)..(62): /note="This region represents a CpG dinucleotide"
  misc_feature (61)..(61): /note="Nucleotide may be methylated to form 5-methylcytosine"
gaaacaccctgactttggctaacacccttggttctgagggcagggctccttgcagtctatcgcctcccagcacatggcaactaactccccacacccactgctgggggtggagccaccagagg

SEQ ID NO: 8140 - DNA, 122 bp, Homo sapiens
  misc_feature (61)..(62): /note="This region represents a CpG dinucleotide"
  misc_feature (61)..(61): /note="Nucleotide may be methylated to form 5-methylcytosine"
ttcttatttgccatgagccgaggaatgcacaggtactaactagatggtgtggacagctgacgcaaactgggcatatacaatgggacacacctgtactaggatgaaaggcacagcctagaggg

SEQ ID NO: 8141 - DNA, 122 bp, Homo sapiens
  misc_feature (61)..(62): /note="This region represents a CpG dinucleotide"
  misc_feature (61)..(61): /note="Nucleotide may be methylated to form 5-methylcytosine"
atcacttcctgctgcctcagcacagggctggagctgagtcaggccggccaggccacccatcgcaaaggctgtcattaggactgattgtcagagataatgtaaagccttaggaaatgtcactg

SEQ ID NO: 8142 - DNA, 122 bp, Homo sapiens
  misc_feature (61)..(62): /note="This region represents a CpG dinucleotide"
  misc_feature (61)..(61): /note="Nucleotide may be methylated to form 5-methylcytosine"
ttcttacgacctgtttttcagctttgacctcctttttgcattccatatttgtctggcaaccgcttagtcacactctctacttcagtgtcaaattgacattttgaatttaaaatgttaaaagc

SEQ ID NO: 8143 - DNA, 122 bp, Homo sapiens
  misc_feature (61)..(62): /note="This region represents a CpG dinucleotide"
  misc_feature (61)..(61): /note="Nucleotide may be methylated to form 5-methylcytosine"
ataattatttgactacattttactattatctgtgctctgaagattacttgcttctacttacgtctggtatggtggaaataccatataataatgtgtgactaagcatctcttcccaactccat

SEQ ID NO: 8144 - DNA, 122 bp, Homo sapiens
  misc_feature (61)..(62): /note="This region represents a CpG dinucleotide"
  misc_feature (61)..(61): /note="Nucleotide may be methylated to form 5-methylcytosine"
tcttggcaccagagctgtgttctatgttgagccactttatcctagagagaaccataggcccggtaggacaccaagatcccagaagtggacaatccatccattaccagaggaccttgggccac

SEQ ID NO: 8145 - DNA, 122 bp, Homo sapiens
  misc_feature (61)..(62): /note="This region represents a CpG dinucleotide"
  misc_feature (61)..(61): /note="Nucleotide may be methylated to form 5-methylcytosine"
tcccttctccagggctctctggctccagggcagctgttctgtgagaggagtgtcaggtcccgttacaggaagagcacagatcaggagtctgatgtttctgagccagttctttcacatactag

SEQ ID NO: 8146 - DNA, 122 bp, Homo sapiens
  misc_feature (61)..(62): /note="This region represents a CpG dinucleotide"
  misc_feature (61)..(61): /note="Nucleotide may be methylated to form 5-methylcytosine"
gatgaccacgggtttaaccttcttatcccagagacacccaattctagagctttatggagccgtacttccccctgaatcctagctctaggacatagatcatgactctcagcccttttacccag

SEQ ID NO: 8147 - DNA, 122 bp, Homo sapiens
  misc_feature (61)..(62): /note="This region represents a CpG dinucleotide"
  misc_feature (61)..(61): /note="Nucleotide may be methylated to form 5-methylcytosine"
gccaaaacaacagatgtctgctctacaggctctgaacttgttttctgtgcagtgacaagccgtaaaccacttggagtttatccttcagcttggtggcatcctgaatgagactgtccctgtct

SEQ ID NO: 8148 - DNA, 122 bp, Homo sapiens
  misc_feature (61)..(62): /note="This region represents a CpG dinucleotide"
  misc_feature (61)..(61): /note="Nucleotide may be methylated to form 5-methylcytosine"
cttctgagctagtgcaaaacaagtgtccatagtaatcctgtggcagcccaatgctgccttcgtcgctacctctccacccctcaaatcaccatccattggcagtagcctctgccacccaggtt

SEQ ID NO: 8149 - DNA, 122 bp, Homo sapiens
  misc_feature (61)..(62): /note="This region represents a CpG dinucleotide"
  misc_feature (61)..(61): /note="Nucleotide may be methylated to form 5-methylcytosine"
gaatactcttggcttatccatgagtgatagagcctacagactgtgactaagaagggcttccgtagataaatatctctcaagaggtcgttattatctcaaaccactgaatttatccttgtgat

SEQ ID NO: 8150 - DNA, 122 bp, Homo sapiens
  misc_feature (61)..(62): /note="This region represents a CpG dinucleotide"
  misc_feature (61)..(61): /note="Nucleotide may be methylated to form 5-methylcytosine"
ctaggcacagactcaacagaaatgcctgcatatagtcaccaaaaggcatgttcatagtagcgttattcatggtagtcaaaaactgaaaacaacccgaatgtccattaaaaaaggatggatga

SEQ ID NO: 8151 - DNA, 122 bp, Homo sapiens
  misc_feature (61)..(62): /note="This region represents a CpG dinucleotide"
  misc_feature (61)..(61): /note="Nucleotide may be methylated to form 5-methylcytosine"
tgtctcaacaaagaaaagaaaacaaaacaaaatcttcgaaatagcactagtggatttgggcgttacatggtgtcttaggatacctttagctgactcagctggcttaaacaatagggaactat

SEQ ID NO: 8152 - DNA, 122 bp, Homo sapiens
  misc_feature (61)..(62): /note="This region represents a CpG dinucleotide"
  misc_feature (61)..(61): /note="Nucleotide may be methylated to form 5-methylcytosine"
gctgctgtgagagccgatcatgtatctcatgtgagagcacctgaaaaatcataaagcacacgtgaacatcaattattggctagcacaggcatttttgatttaggagcttgagaaagagggag

SEQ ID NO: 8153 - DNA, 122 bp, Homo sapiens
  misc_feature (61)..(62): /note="This region represents a CpG dinucleotide"
  misc_feature (61)..(61): /note="Nucleotide may be methylated to form 5-methylcytosine"
cccacctcaggcatgtcaataaaccacaggcatgaaatcttcctcatagttcttggagggcgtgtttggctggacacatccatgctccatagttaaacctttagagaactacccaaaaatcc

SEQ ID NO: 8154 - DNA, 122 bp, Homo sapiens
  misc_feature (61)..(62): /note="This region represents a CpG dinucleotide"
  misc_feature (61)..(61): /note="Nucleotide may be methylated to form 5-methylcytosine"
acagtcacacatacctggaagaagcaatggtccctgcatttctgtggtacgggtatcccacgccagccagccctggaagctctctactgtgccgtaagccaaccacctttcctagctcaaga

SEQ ID NO: 8155 - DNA, 122 bp, Homo sapiens
  misc_feature (61)..(62): /note="This region represents a CpG dinucleotide"
  misc_feature (61)..(61): /note="Nucleotide may be methylated to form 5-methylcytosine"
ctcaggtgatccacccaccttggcctcccaaagtgttgaaattacaggtgtgagccactgcgcttggcctaaaggacattttgggaaccggtgttaatgtctattgaaaccttttatttttg

SEQ ID NO: 8156 - DNA, 122 bp, Homo sapiens
  misc_feature (61)..(62): /note="This region represents a CpG dinucleotide"
  misc_feature (61)..(61): /note="Nucleotide may be methylated to form 5-methylcytosine"
aactgttagtggcttaaagacaaaatatgccatctcttatcatgaatgttagggaatgaacgaaagatgccaaggctaccgaagtcatgtcattaaagaatcaatgtttgaaaatcctgttt

SEQ ID NO: 8157 - DNA, 122 bp, Homo sapiens
  misc_feature (61)..(62): /note="This region represents a CpG dinucleotide"
  misc_feature (61)..(61): /note="Nucleotide may be methylated to form 5-methylcytosine"
acacctttctttctcaacataattaatgaggctcatcaaaaccctagaaaacaagcccagcgcaccagccactctcattgacatgttaatagggggtcaggtgctcctgacctcacagcagg

SEQ ID NO: 8158 - DNA, 122 bp, Homo sapiens
  misc_feature (61)..(62): /note="This region represents a CpG dinucleotide"
  misc_feature (61)..(61): /note="Nucleotide may be methylated to form 5-methylcytosine"
aatggcctggaaaagccagctgggcctcagagagcaggagaaaaagattttggcatcctccgctgcccctcctggctgaataccttcatgctgaatccaagggagtgatcataaaaactgga

SEQ ID NO: 8159 - DNA, 122 bp, Homo sapiens
  misc_feature (61)..(62): /note="This region represents a CpG dinucleotide"
  misc_feature (61)..(61): /note="Nucleotide may be methylated to form 5-methylcytosine"
tctggtgtaacttcagttctgccagtaagccactaggctgactgtgttgcctcctggaagcgtctctgtttccaagcaggcaatgactaatgacgcttgtcacctgttatcttccatgaagt

SEQ ID NO: 8160 - DNA, 122 bp, Homo sapiens
  misc_feature (61)..(62): /note="This region represents a CpG dinucleotide"
  misc_feature (61)..(61): /note="Nucleotide may be methylated to form 5-methylcytosine"
gggacaagagaggagactggcctttatataacagggagtttggcttggcaaaaggagaggcgagcaattagttgagaatcatcttgggtttggtttgcctcgtaggcattaagttacttctt

SEQ ID NO: 8161 - DNA, 122 bp, Homo sapiens
  misc_feature (61)..(62): /note="This region represents a CpG dinucleotide"
  misc_feature (61)..(61): /note="Nucleotide may be methylated to form 5-methylcytosine"
gcactgcacatacaataggaccatgtgactaagagactattatgcagccatttaaagtgacggtctttaaatgatataacaacatggaaaaatactaaggatttatcaagtggggaagaaag

SEQ ID NO: 8162 - DNA, 122 bp, Homo sapiens
  misc_feature (61)..(62): /note="This region represents a CpG dinucleotide"
  misc_feature (61)..(61): /note="Nucleotide may be methylated to form 5-methylcytosine"
cagcctgtccccggaagacctgcaggccctggggagtgccatcagtatggtcacccagcacggcagcaccaccctcaccatccccagtcctgatgccgacctggccacatctggcacacata

SEQ ID NO: 8163 - DNA, 122 bp, Homo sapiens
  misc_feature (61)..(62): /note="This region represents a CpG dinucleotide"
  misc_feature (61)..(61): /note="Nucleotide may be methylated to form 5-methylcytosine"
atattctagtcaaggatacagatagcaaacaagataaataagtaaagcattagtatgttacgatacttgcccaggtgaaccagaaaaatctgagactgagtataggaatttggggaagcttg

SEQ ID NO: 8164 - DNA, 122 bp, Homo sapiens
  misc_feature (61)..(62): /note="This region represents a CpG dinucleotide"
  misc_feature (61)..(61): /note="Nucleotide may be methylated to form 5-methylcytosine"
cgtgggtcccctcttcctaggagccttcctggggcatcccgcactgcccctcagctccagcgccgtcaggactcggctcagcaccgcttcgccagtgcctcccccaccagcagggagttcca

SEQ ID NO: 8165 - DNA, 122 bp, Homo sapiens
  misc_feature (61)..(62): /note="This region represents a CpG dinucleotide"
  misc_feature (61)..(61): /note="Nucleotide may be methylated to form 5-methylcytosine"
tgaaaataatcaacaggaaggagcagcgggggaggaaaaaggcagagaaacccctggcaacgaggagacaaatgaagttctgggtgcttgaagccatggagacagtaactcaaatggtttga

SEQ ID NO: 8166 - DNA, 122 bp, Homo sapiens
  misc_feature (61)..(62): /note="This region represents a CpG dinucleotide"
  misc_feature (61)..(61): /note="Nucleotide may be methylated to form 5-methylcytosine"
aagaaaggagaaatggagcctacctgtctttctagccttatctcctacccagcgcctactcgtcccttagaccacagccagactggatgactcgattccccaaacatgcctggtgtgctgtc

SEQ ID NO: 8167 - DNA, 122 bp, Homo sapiens
  misc_feature (61)..(62): /note="This region represents a CpG dinucleotide"
  misc_feature (61)..(61): /note="Nucleotide may be methylated to form 5-methylcytosine"
gtcgcacttaaagtcagctgattatggatttttattacttgtatgatgccttcacagcaacgcctagattagtgtttgattgcataactagggtagggcctagccaaactgatgcatcaaaa

SEQ ID NO: 8168 - DNA, 122 bp, Homo sapiens
  misc_feature (61)..(62): /note="This region represents a CpG dinucleotide"
  misc_feature (61)..(61): /note="Nucleotide may be methylated to form 5-methylcytosine"
atttgtgtctgatgcaatagggcaatgaagtgtccttgtggtccctggtgaccttctcatcgctcaatcccaaggcctttttttagtcttcatccaatttaacctcttggcaacatgtgaca

SEQ ID NO: 8169 - DNA, 122 bp, Homo sapiens
  misc_feature (61)..(62): /note="This region represents a CpG dinucleotide"
  misc_feature (61)..(61): /note="Nucleotide may be methylated to form 5-methylcytosine"
caaaacaacacatgaagacaggtcctcaaccttgttgtccttaagttatagatgagaaaacggaagagtctagagaggctgaggacctcgcctaagctcacacagttaacaagggccagagc

SEQ ID NO: 8170 - DNA, 122 bp, Homo sapiens
  misc_feature (61)..(62): /note="This region represents a CpG dinucleotide"
  misc_feature (61)..(61): /note="Nucleotide may be methylated to form 5-methylcytosine"
tctttccatctggtgccatggcttaattcatcccttacattttggtcatagctctgccatcgctttgcttgattcctgagacagaggatgggttctagacccaaaatgattctaggattagg

SEQ ID NO: 8171 - DNA, 122 bp, Homo sapiens
  misc_feature (61)..(62): /note="This region represents a CpG dinucleotide"
  misc_feature (61)..(61): /note="Nucleotide may be methylated to form 5-methylcytosine"
ctcttaatctactcccattgctctagcccattctgttaacagatagaagagtagtgctttcgcacgccccaatttgctccctgatgactaatggctgtttagtttcatcttcttctggggcc

SEQ ID NO: 8172 - DNA, 122 bp, Homo sapiens
  misc_feature (61)..(62): /note="This region represents a CpG dinucleotide"
  misc_feature (61)..(61): /note="Nucleotide may be methylated to form 5-methylcytosine"
gggagtggtggagacgctggacaaagggatgattcacgtcctgggtgggaccgagcgggacggtgggagatttcatcaggctactcagaacagtgtgcaatttaaaacctgttgattgttta

SEQ ID NO: 8173 - DNA, 122 bp, Homo sapiens
  misc_feature (61)..(62): /note="This region represents a CpG dinucleotide"
  misc_feature (61)..(61): /note="Nucleotide may be methylated to form 5-methylcytosine"
aaaagtcagcatcaaacaccctaacttcagagtaaatggtaaaatatctctaataaaatacgacactttgacatgtagtgataaatgtgtcaaggctatgggccttcacctggtttgaggtt

SEQ ID NO: 8174 - DNA, 122 bp, Homo sapiens
  misc_feature (61)..(62): /note="This region represents a CpG dinucleotide"
  misc_feature (61)..(61): /note="Nucleotide may be methylated to form 5-methylcytosine"
atgtcaaaatataagacttcgccatcagtgctctggggccaggactcagttcaggatgttcgtggcatatttcaccaggctttctcagtcacatgagcaaagactctttttttcattagcaa

SEQ ID NO: 8175 - DNA, 122 bp, Homo sapiens
  misc_feature (61)..(62): /note="This region represents a CpG dinucleotide"
  misc_feature (61)..(61): /note="Nucleotide may be methylated to form 5-methylcytosine"
acatgaggatgagtcagtgtcaagactcccagtggggccatcggatcattactgcatgatcgtcttaagcctttgttagtgaatccctcagactcacgccttcttctctccaggcctgaaca

SEQ ID NO: 8176 - DNA, 122 bp, Homo sapiens
  misc_feature (61)..(62): /note="This region represents a CpG dinucleotide"
  misc_feature (61)..(61): /note="Nucleotide may be methylated to form 5-methylcytosine"
gctggtcctcatctacctgattcagaaagagccagctattgtcatctgattttagctggacggtacagggcttactgcccaggtttaccaggtaccagcctaggctagacctgttctgtgca

SEQ ID NO: 8177 - DNA, 122 bp, Homo sapiens
  misc_feature (61)..(62): /note="This region represents a CpG dinucleotide"
  misc_feature (61)..(61): /note="Nucleotide may be methylated to form 5-methylcytosine"
aattgacacacacactacctcccaactctccttccacaggccacctcctaatttttattacgtgtcactgggtagagtattgttctagtgcttctactggttctacatctaaatctttagct

SEQ ID NO: 8178 - DNA, 122 bp, Homo sapiens
  misc_feature (61)..(62): /note="This region represents a CpG dinucleotide"
  misc_feature (61)..(61): /note="Nucleotide may be methylated to form 5-methylcytosine"
gcacactgtgcaaggctgtgggttacataagtccatatgtgaaggcggtcttgccacaggcgatggttcaatattgctgtggggagaacaactgcccatatctccctgaggtctcaaggcta

SEQ ID NO: 8179 - DNA, 122 bp, Homo sapiens
  misc_feature (61)..(62): /note="This region represents a CpG dinucleotide"
  misc_feature (61)..(61): /note="Nucleotide may be methylated to form 5-methylcytosine"
tcaggcccaggggccgtggtggacagtgttgccaggttagcataacttgaggtctgagcacgtagacacccacttaccctccacctacaaaagaaaatcctgccagagatacactaccaaga

SEQ ID NO: 8180 - DNA, 122 bp, Homo sapiens
  misc_feature (61)..(62): /note="This region represents a CpG dinucleotide"
  misc_feature (61)..(61): /note="Nucleotide may be methylated to form 5-methylcytosine"
gctcaccaattttctttcagctgatttacatagcacctaaatgtgagaaaatcccaacaacggtctcagcctcatggttgaaacagcacctgtcaaagtgaggcattatgccattaggaagc

SEQ ID NO: 8181 - DNA, 122 bp, Homo sapiens
  misc_feature (61)..(62): /note="This region represents a CpG dinucleotide"
  misc_feature (61)..(61): /note="Nucleotide may be methylated to form 5-methylcytosine"
aatggggaggggggagcctcccagggcatccaggctgcctaaccaaggatgaaagtccaacgccaggcagtaattcagtcttgttattcttgttgagcaggccatgacatgtgctctggatt

SEQ ID NO: 8182 - DNA, 122 bp, Homo sapiens
  misc_feature (61)..(62): /note="This region represents a CpG dinucleotide"
  misc_feature (61)..(61): /note="Nucleotide may be methylated to form 5-methylcytosine"
gctgactcagcactgagcccaggctaggggttcctggatggctttctgggccatccaggtcgtgctgaggagttggggatatagccctgccacctgcccgagtcacagggaggagactttaa

SEQ ID NO: 8183 - DNA, 122 bp, Homo sapiens
  misc_feature (61)..(62): /note="This region represents a CpG dinucleotide"
  misc_feature (61)..(61): /note="Nucleotide may be methylated to form 5-methylcytosine"
gtataccatggtagtcccataagattctaatggagctgaaaaattcctattgcctagtgacgttgtcgccattgcagtgtcttagtgcaattcattactcatgtgtttgtggtgatgctggt

SEQ ID NO: 8184 - DNA, 122 bp, Homo sapiens
  misc_feature (61)..(62): /note="This region represents a CpG dinucleotide"
  misc_feature (61)..(61): /note="Nucleotide may be methylated to form 5-methylcytosine"
ccatgttgggaagacagacacataaaaccatggctctaaggcctacgctgagaacagtgccgtggccatgcacagatttctaagaaaatagtatctgtggagtaagcccttgtgactcagcc

SEQ ID NO: 8185 - DNA, 122 bp, Homo sapiens
  misc_feature (61)..(62): /note="This region represents a CpG dinucleotide"
  misc_feature (61)..(61): /note="Nucleotide may be methylated to form 5-methylcytosine"
tccaaaatcccttgcaacatcctgagtgacaggagtgccttttcttctaatgaagtgactcgctgggctcctggacagcatcaggatgagggctggtcaccaggaagaccaagccaggattt

SEQ ID NO: 8186 - DNA, 122 bp, Homo sapiens
  misc_feature (61)..(62): /note="This region represents a CpG dinucleotide"
  misc_feature (61)..(61): /note="Nucleotide may be methylated to form 5-methylcytosine"
tttcctgatcagctggtggctctgcttcactccataagtaggctgggtggctctgctgcacgtgactcccatcctcttcctggaaccagtgggctaaccagaacatatttaactcttggaga

SEQ ID NO: 8187 - DNA, 122 bp, Homo sapiens
  misc_feature (61)..(62): /note="This region represents a CpG dinucleotide"
  misc_feature (61)..(61): /note="Nucleotide may be methylated to form 5-methylcytosine"
atatactttctccttccaaagcaacaactattgtcttgaaccccagtgatagacatcttacgctggttttaggtatacacatataacagcaaatacagattgttctcagataaagttgttaa

SEQ ID NO: 8188 - DNA, 122 bp, Homo sapiens
  misc_feature (61)..(62): /note="This region represents a CpG dinucleotide"
  misc_feature (61)..(61): /note="Nucleotide may be methylated to form 5-methylcytosine"
catccccacattcacgtatcaagtcaacaagcttctcttttcctatggagttgcctaaagcgttaagcacagcagttaatcatatcctactgtaaattactttaattagataatagatcact

SEQ ID NO: 8189 - DNA, 122 bp, Homo sapiens
  misc_feature (61)..(62): /note="This region represents a CpG dinucleotide"
  misc_feature (61)..(61): /note="Nucleotide may be methylated to form 5-methylcytosine"
agttttctcccccgacatctgttgagtctgcatgtgggcaatgtttcttgctagcttcttcgtgtattcactctctctggttccctttcatcataaaaccctgctgttgcccaagttttggc

SEQ ID NO: 8190 - DNA, 122 bp, Homo sapiens
  misc_feature (61)..(62): /note="This region represents a CpG dinucleotide"
  misc_feature (61)..(61): /note="Nucleotide may be methylated to form 5-methylcytosine"
agtatatgaccccgctctggttcagtattcttatccccaccccaaataaagagaatcacacgaccttattgtgataataaatagcaactgtagtcagagggagagaggcccagggaggaaca

SEQ ID NO: 8191 - DNA, 122 bp, Homo sapiens
  misc_feature (61)..(62): /note="This region represents a CpG dinucleotide"
  misc_feature (61)..(61): /note="Nucleotide may be methylated to form 5-methylcytosine"
agagccttaattatggatgactcttggtaattccaagaagattatccagtatgtgtgtcacgtgggtcccttgccttttacctattgaccatttcaccacttgaaagtactttatatcctca

SEQ ID NO: 8192 - DNA, 122 bp, Homo sapiens
  misc_feature (61)..(62): /note="This region represents a CpG dinucleotide"
  misc_feature (61)..(61): /note="Nucleotide may be methylated to form 5-methylcytosine"
gtccagctaccctgaggctgccatgttatgaggaagcccaagccacacagagaggtcatacgtaggtactctcgtcagcagtcctggtcttcaagtcatagcagcctagaagcctcaggatg

SEQ ID NO: 8193 - DNA, 122 bp, Homo sapiens
  misc_feature (61)..(62): /note="This region represents a CpG dinucleotide"
  misc_feature (61)..(61): /note="Nucleotide may be methylated to form 5-methylcytosine"
tgctggtgtcggcctggtcagagggcaggtgaagctaatggctgccatgcagtgaattcacggggctaccttgttctacttctctctacctcctccctcctggcttctggtcccaggtgtct

SEQ ID NO: 8194 - DNA, 122 bp, Homo sapiens
  misc_feature (61)..(62): /note="This region represents a CpG dinucleotide"
  misc_feature (61)..(61): /note="Nucleotide may be methylated to form 5-methylcytosine"
actcctgtcttcctgagcgcagggaggctgcagggtaattgcttttggatcttccaaatgcgggtgagacaaatccacagcagcctgtaattatcaagcatgtatgtggtgtgtatcgagta

SEQ ID NO: 8195 - DNA, 122 bp, Homo sapiens
  misc_feature (61)..(62): /note="This region represents a CpG dinucleotide"
  misc_feature (61)..(61): /note="Nucleotide may be methylated to form 5-methylcytosine"
caagattatatatactattcctgaccttaccaggtaggtaagattctttgtgcttaattccgcactcaggacagacttggtgagtctgttgcttattttcctgtatcttattagtgagggaa

SEQ ID NO: 8196 - DNA, 122 bp, Homo sapiens
  misc_feature (61)..(62): /note="This region represents a CpG dinucleotide"
  misc_feature (61)..(61): /note="Nucleotide may be methylated to form 5-methylcytosine"
ccagattcgtcccagagtttatcaccaggctcctccatccacctgcccagtcctgctgagcgagcttcagctaaaggctcagcccacagcagagcactccaggccccggggctccgcctttg

SEQ ID NO: 8197 - DNA, 122 bp, Homo sapiens
  misc_feature (61)..(62): /note="This region represents a CpG dinucleotide"
  misc_feature (61)..(61): /note="Nucleotide may be methylated to form 5-methylcytosine"
tgtgtgctgtttctggatagaaaggcttaagttcttctgggacaaaaaatgtcaaagaaccgagacatttttagaaagaaaataaggaagacagcttggtatctttgtagatgaaatgatat

SEQ ID NO: 8198 - DNA, 122 bp, Homo sapiens
  misc_feature (61)..(62): /note="This region represents a CpG dinucleotide"
  misc_feature (61)..(61): /note="Nucleotide may be methylated to form 5-methylcytosine"
acacattattttaaaatgacagaaaattcaactccctcggttactggcccagctaagcgacgtcactgcattgcagttcagcgctgaagcttgggagagtcccacactccttactgcaagcg

SEQ ID NO: 8199 - DNA, 122 bp, Homo sapiens
  misc_feature (61)..(62): /note="This region represents a CpG dinucleotide"
  misc_feature (61)..(61): /note="Nucleotide may be methylated to form 5-methylcytosine"
ccaaaccaagactggaaaccattgagctcacctgtgcactttgcaaacttcgaagtgcagcgcacagggcaacagctgtgagtaatgtgaactgtaaccatcatgattcacgaccttgagaa

SEQ ID NO: 8200 - DNA, 122 bp, Homo sapiens
  misc_feature (61)..(62): /note="This region represents a CpG dinucleotide"
  misc_feature (61)..(61): /note="Nucleotide may be methylated to form 5-methylcytosine"
aaggaaagtgctgagttgcctacaggatatccgggtgaaaacatccagcagttatttatccgcctgggacagtactgacctttaagacttactgtatctcctgaatagcctatttggacttc

SEQ ID NO: 8201 - DNA, 122 bp, Homo sapiens
  misc_feature (61)..(62): /note="This region represents a CpG dinucleotide"
  misc_feature (61)..(61): /note="Nucleotide may be methylated to form 5-methylcytosine"
cctccctagttacaaggaaacttgctgagtctcagctttctcaactgaagatgaggctaacgtcatccatggcagcgtaatgagggccggtggagcccagggtgaggtgcactggagacctt

SEQ ID NO: 8202 - DNA, 122 bp, Homo sapiens
  misc_feature (61)..(62): /note="This region represents a CpG dinucleotide"
  misc_feature (61)..(61): /note="Nucleotide may be methylated to form 5-methylcytosine"
tgtggtaatgacagcatagaagactatgtgtctcctgctatgatgacagcatccttagagcgtggctcttcagtcatttttcctgatgtgatggtgattccagctgaccagtcactatagcc

SEQ ID NO: 8203 - DNA, 122 bp, Homo sapiens
  misc_feature (61)..(62): /note="This region represents a CpG dinucleotide"
  misc_feature (61)..(61): /note="Nucleotide may be methylated to form 5-methylcytosine"
tcatccacctctaattgctgggtggacagcccagcaggtgatgtagcttcactgtttgttcggcagggggactgcagggacccatctctaatatgacccttgagccctgcggcaaggatctg

SEQ ID NO: 8204 - DNA, 122 bp, Homo sapiens
  misc_feature (61)..(62): /note="This region represents a CpG dinucleotide"
  misc_feature (61)..(61): /note="Nucleotide may be methylated to form 5-methylcytosine"
gcccctatcaacatgtcttgaaggtgtggccactggccgtttgcatcacctttctgtctacgtagcacctgtcagtgacccctgaccccagagcacctgcccttagccttgagaagcctgta

SEQ ID NO: 8205 - DNA, 122 bp, Homo sapiens
  misc_feature (61)..(62): /note="This region represents a CpG dinucleotide"
  misc_feature (61)..(61): /note="Nucleotide may be methylated to form 5-methylcytosine"
gtgagtagaatcattcaagggctcagcatgagtagaatcattaaagggcctggcttcagacgtcttagcctcaactgaaagagaaaagtaaatgttttctaaccaacaatttaccttataca

SEQ ID NO: 8206 - DNA, 122 bp, Homo sapiens
  misc_feature (61)..(62): /note="This region represents a CpG dinucleotide"
  misc_feature (61)..(61): /note="Nucleotide may be methylated to form 5-methylcytosine"
cttgcccaggccagcaagaccccaccctgacccaaggaaggtcttcaaggatctagctttcgtgccttccactccatttcatgggagcctaactcctcttaaaggatcagtgaagttgtggt

SEQ ID NO: 8207 - DNA, 122 bp, Homo sapiens
  misc_feature (61)..(62): /note="This region represents a CpG dinucleotide"
  misc_feature (61)..(61): /note="Nucleotide may be methylated to form 5-methylcytosine"
agaatccatcattttaaaatgtcctgtgaatatgtgcatggattcagaaatgagcctgtacgcttggggatccgcctgccctggagcaggatcattctaaaaactgtccttttataactcag

SEQ ID NO: 8208 - DNA, 122 bp, Homo sapiens
  misc_feature (61)..(62): /note="This region represents a CpG dinucleotide"
  misc_feature (61)..(61): /note="Nucleotide may be methylated to form 5-methylcytosine"
taactaatgggagatatgtgtgtcatcaaaacaagggagtaaaccaagaaagggaagatgcgaaatccaaagacaaggttctcacagaggaaaaaggtgaaggaaattcttaggatggtagc

SEQ ID NO: 8209 - DNA, 122 bp, Homo sapiens
  misc_feature (61)..(62): /note="This region represents a CpG dinucleotide"
  misc_feature (61)..(61): /note="Nucleotide may be methylated to form 5-methylcytosine"
actgccagtactgcagtgggaaaatgagctttcaaaggtacgtttcttttatagagtgtccggtaggaattccctggggacatttatctcatggaaataggagaaggactgactgggtatct

SEQ ID NO: 8210 - DNA, 122 bp, Homo sapiens
  misc_feature (61)..(62): /note="This region represents a CpG dinucleotide"
  misc_feature (61)..(61): /note="Nucleotide may be methylated to form 5-methylcytosine"
acctcaggtgatccgcccacctcggcctcccaaagtgctgggattacaggcgtgagccaccgtgcctggcctaaaaatgcctggctaaatttgttaggggccacaaccccagatttacctgc

SEQ ID NO: 8211 - DNA, 122 bp, Homo sapiens
  misc_feature (61)..(62): /note="This region represents a CpG dinucleotide"
  misc_feature (61)..(61): /note="Nucleotide may be methylated to form 5-methylcytosine"
gtcggtagagatgagagctgccagtgggcaccgagattcacagctgggtgtagactctgccgcaactggctgagagaaaaagaggtttgatatgggagcagctgcttccaacccctgctaga

SEQ ID NO: 8212 - DNA, 122 bp, Homo sapiens
  misc_feature (61)..(62): /note="This region represents a CpG dinucleotide"
  misc_feature (61)..(61): /note="Nucleotide may be methylated to form 5-methylcytosine"
gcagtaagtccttgtaatataattggacactgagcaaattgcagtctcaaagccagccctcgtaacctttatactactaagttcaataaaagtgcagaagacaatgaagaagaaacatgact

SEQ ID NO: 8213 - DNA, 122 bp, Homo sapiens
  misc_feature (61)..(62): /note="This region represents a CpG dinucleotide"
  misc_feature (61)..(61): /note="Nucleotide may be methylated to form 5-methylcytosine"
gaatcattactttttcaacagaaatgccattttcatgattggcatttctaaatccttcagcgtcagagaagattctagaacttctcatttgtggctagtttcagggtagaacagctcttctt

SEQ ID NO: 8214 - DNA, 122 bp, Homo sapiens
  misc_feature (61)..(62): /note="This region represents a CpG dinucleotide"
  misc_feature (61)..(61): /note="Nucleotide may be methylated to form 5-methylcytosine"
agttgaaccagatggggctggttctgcgcttacataactggtccaactgtttctgtacctcgcttctgttttctggacatctatttcctttttcttttcttatttttaaattttaatgatta

SEQ ID NO: 8215 - DNA, 122 bp, Homo sapiens
  misc_feature (61)..(62): /note="This region represents a CpG dinucleotide"
  misc_feature (61)..(61): /note="Nucleotide may be methylated to form 5-methylcytosine"
atcattaccttcatctgcactgcatcagggctacaagctacttctgccttagaaattgtacgtgtccctctaatagcccagtgaagtggggccctcacagattaattactatttccatttgg

SEQ ID NO: 8216 - DNA, 122 bp, Homo sapiens
  misc_feature (61)..(62): /note="This region represents a CpG dinucleotide"
  misc_feature (61)..(61): /note="Nucleotide may be methylated to form 5-methylcytosine"
attctcgggatcaacttagatttatccagattcatgtaggatcctctaagtccatgcctacgtgagcaagcaggaaggagggatgctgtgggcatgtaatcaccagtgtcttcaccatgccc

SEQ ID NO: 8217 - DNA, 122 bp, Homo sapiens
  misc_feature (61)..(62): /note="This region represents a CpG dinucleotide"
  misc_feature (61)..(61): /note="Nucleotide may be methylated to form 5-methylcytosine"
agtatttccattcattatataatcatggggttgatcgaatccctgactgggcatctttctcgtctccctgctgtgaagtaacatatgggccctcctgctggttaagcacttgagtcaccttc

SEQ ID NO: 8218 - DNA, 122 bp, Homo sapiens
  misc_feature (61)..(62): /note="This region represents a CpG dinucleotide"
  misc_feature (61)..(61): /note="Nucleotide may be methylated to form 5-methylcytosine"
gtcatgaagcttttgccttatgctttctaataacagctttatagttttagtcctatgtttcgatctttgatccattttgaggtcattttgtacatagtattaagtaagagtaatgtcattct

SEQ ID NO: 8219 - DNA, 122 bp, Homo sapiens
  misc_feature (61)..(62): /note="This region represents a CpG dinucleotide"
  misc_feature (61)..(61): /note="Nucleotide may be methylated to form 5-methylcytosine"
tgtctagatcttgggaagaagacatcagtatgtttgcaggaggatcatgaagcacatgatcgttgcatgaaaaatgttgcttcctgcctgttcaaactgtccaattttggagggtggggtgg

SEQ ID NO: 8220 - DNA, 122 bp, Homo sapiens
  misc_feature (61)..(62): /note="This region represents a CpG dinucleotide"
  misc_feature (61)..(61): /note="Nucleotide may be methylated to form 5-methylcytosine"
agctggtgcaagcaaggccctgaagcttaagatttgttagcttcagggttgatctgcctacgcaggagaggtctgagtatgtgcaaaatcccaagtggtggttcaaggaagtacaaacaggt

SEQ ID NO: 8221 - DNA, 122 bp, Homo sapiens
  misc_feature (61)..(62): /note="This region represents a CpG dinucleotide"
  misc_feature (61)..(61): /note="Nucleotide may be methylated to form 5-methylcytosine"
gcttttgtccaaggcttgtgctattcctcaaacactcttcattgctgttccaatggttgacgtgtaggagatccatcatactccctgctgcctttgctgctgtgtttgcttaaagctaaccc

SEQ ID NO: 8222 - DNA, 122 bp, Homo sapiens
  misc_feature (61)..(62): /note="This region represents a CpG dinucleotide"
  misc_feature (61)..(61): /note="Nucleotide may be methylated to form 5-methylcytosine"
tgtacaccctaagggaatgcaaggcatggcccagatccttcaggatgaagcatccagttacgtaagcattgttttagttttaaaacatgctgttaattaccatccctctatacttatttata

SEQ ID NO: 8223 - DNA, 122 bp, Homo sapiens
  misc_feature (61)..(62): /note="This region represents a CpG dinucleotide"
  misc_feature (61)..(61): /note="Nucleotide may be methylated to form 5-methylcytosine"
aatatatttattacagctaaaagatggcggcaaggcagcccaggcaaatgtaagaataggcgatgtggttctcagcattgatggaataaatgcacaaggaatgactcatcttgaagcccaga

SEQ ID NO: 8224 - DNA, 122 bp, Homo sapiens
  misc_feature (61)..(62): /note="This region represents a CpG dinucleotide"
  misc_feature (61)..(61): /note="Nucleotide may be methylated to form 5-methylcytosine"
gattcttttccttaactgtattaacttcaggtgtcaggaaacccggatcactcctgacagcggcctagcgatcacttgggcttgaccttgacattgagtaacagtgatagtaacttctatta

SEQ ID NO: 8225 - DNA, 122 bp, Homo sapiens
  misc_feature (61)..(62): /note="This region represents a CpG dinucleotide"
  misc_feature (61)..(61): /note="Nucleotide may be methylated to form 5-methylcytosine"
tggcttgaccccagtgacaggattggtggctggtccatcaggaatgcctggctcctgctgcgttttggagctggtgctgccggcccgtttgcctaggcacactcacagggcacctcccagtt

SEQ ID NO: 8226 - DNA, 122 bp, Homo sapiens
  misc_feature (61)..(62): /note="This region represents a CpG dinucleotide"
  misc_feature (61)..(61): /note="Nucleotide may be methylated to form 5-methylcytosine"
gtctgaaatgcatttcgaggagaacaagtaaaacctgccctcttagagttcaaagtttcccggagacagctgaggccgatagcttattgtttaggtaagaacaacagaacagagaggcagag

SEQ ID NO: 8227 - DNA, 122 bp, Homo sapiens
  misc_feature (61)..(62): /note="This region represents a CpG dinucleotide"
  misc_feature (61)..(61): /note="Nucleotide may be methylated to form 5-methylcytosine"
tgattcagtaggcctggggcgaggcctaagattctgcacttctaagagaggctgatgatgcgtgtccacaggccactcacagaagcaaggctgtaggtgaaagcagataggaaactctaggt

SEQ ID NO: 8228 - DNA, 122 bp, Homo sapiens
  misc_feature (61)..(62): /note="This region represents a CpG dinucleotide"
  misc_feature (61)..(61): /note="Nucleotide may be methylated to form 5-methylcytosine"
tcaaatttggtgtaccagatttaaccctagaggatgaataacatctgagacatttggtctcgtccagggagcgttataaaaagctttcagcagagtgatgtcatgtgtccttacaagggaaa

SEQ ID NO: 8229 - DNA, 122 bp, Homo sapiens
  misc_feature (61)..(62): /note="This region represents a CpG dinucleotide"
  misc_feature (61)..(61): /note="Nucleotide may be methylated to form 5-methylcytosine"
tgactcccagcctgtcactccctgaggtcaggagctgagttccatggtttccaagccccacggtctggctagttaggagcccagttaagcaggctcatgactccaccccaggcttccaggct

SEQ ID NO: 8230 - DNA, 122 bp, Homo sapiens
  misc_feature (61)..(62): /note="This region represents a CpG dinucleotide"
  misc_feature (61)..(61): /note="Nucleotide may be methylated to form 5-methylcytosine"
cagcttggccaacatggcaaaaccctgtctttactaaaactacaaaaattagccagtcgtcgtggtgcatgtctgtagtcccagctacttgggaggctgaggcacaagaatctcttgaaccc

SEQ ID NO: 8231 - DNA, 122 bp, Homo sapiens
  misc_feature (61)..(62): /note="This region represents a CpG dinucleotide"
  misc_feature (61)..(61): /note="Nucleotide may be methylated to form 5-methylcytosine"
tcattatagctattccttttcctagcttctctatttttgccaatgtaacttttccatccccgtgactaagagatgaataagagatgtaagaggaagagctggtttggcgcagagcacagtga

SEQ ID NO: 8232 - DNA, 122 bp, Homo sapiens
  misc_feature (61)..(62): /note="This region represents a CpG dinucleotide"
  misc_feature (61)..(61): /note="Nucleotide may be methylated to form 5-methylcytosine"
ccatgtttgtcttgctcaccactgtgttccagggccttgcacaacccctggcacacaagccgatgcagcagttgctaagtgagtgattaaataggacaaacatgtaagctggggagattctt

SEQ ID NO: 8233 - DNA, 122 bp, Homo sapiens
  misc_feature (61)..(62): /note="This region represents a CpG dinucleotide"
  misc_feature (61)..(61): /note="Nucleotide may be methylated to form 5-methylcytosine"
ttggtaacaatgctgaggtaatgaaaatgaactcagctgccactgttggcacagacacagcggaaggaagaagtattatttgattcaaagcattctcatttaggggagaaaaaattataatg

SEQ ID NO: 8234 - DNA, 122 bp, Homo sapiens
  misc_feature (61)..(62): /note="This region represents a CpG dinucleotide"
  misc_feature (61)..(61): /note="Nucleotide may be methylated to form 5-methylcytosine"
tgctccaagctccgctgtcctcactccacaaggtccggggcggtggccaggatccacacccgcagagcatatttgctgcctgagttgcccaatcttctcagcggccagtccccacactgctc

SEQ ID NO: 8235 - DNA, 122 bp, Homo sapiens
  misc_feature (61)..(62): /note="This region represents a CpG dinucleotide"
  misc_feature (61)..(61): /note="Nucleotide may be methylated to form 5-methylcytosine"
agaggtgattgtgtcatgagggctccacccttatgaatgggatcagcaccctgataaaagcgcttaagtttgaagggaaagggctctttcttgcccttccacgttccaccatgtgagggcac

SEQ ID NO: 8236 - DNA, 122 bp, Homo sapiens
  misc_feature (61)..(62): /note="This region represents a CpG dinucleotide"
  misc_feature (61)..(61): /note="Nucleotide may be methylated to form 5-methylcytosine"
ccttgtaatctgcttcttcccacatctgttgttaaacacttttctaattactctgtttagcgtttcttctgctttctctggtgacacatgatttctttcaaaattgggccccaaatttaagt

SEQ ID NO: 8237 - DNA, 122 bp, Homo sapiens
  misc_feature (61)..(62): /note="This region represents a CpG dinucleotide"
  misc_feature (61)..(61): /note="Nucleotide may be methylated to form 5-methylcytosine"
gtcggcagcacagagactagaactatgatgatcctatcttcccagctacctgtcagaacacgtagtctggtaatccagcaactccattagcccagatatttattccacttactctgtgccag

SEQ ID NO: 8238 - DNA, 122 bp, Homo sapiens
  misc_feature (61)..(62): /note="This region represents a CpG dinucleotide"
  misc_feature (61)..(61): /note="Nucleotide may be methylated to form 5-methylcytosine"
gggtcacacctgaacgctgctgccagccgatgccccagccctgcacgccacccactatcccggcacgctccctctgcagatggtcgccgcacctacaagccctggccgcacccaacctgtgt

SEQ ID NO: 8239 - DNA, 122 bp, Homo sapiens
  misc_feature (61)..(62): /note="This region represents a CpG dinucleotide"
  misc_feature (61)..(61): /note="Nucleotide may be methylated to form 5-methylcytosine"
gtgaagctttattgtttctgagactctacctgggctcagggttcaaaatcaaaagcttcccgcaggtaagattagctaagtgaaaaccactgcactttctctaaagtagaatggcttaaaaa

SEQ ID NO: 8240 - DNA, 122 bp, Homo sapiens
  misc_feature (61)..(62): /note="This region represents a CpG dinucleotide"
  misc_feature (61)..(61): /note="Nucleotide may be methylated to form 5-methylcytosine"
aaaacagatggaatggcagcattttgtgtctgtcttctggagcgtttactagagaattcacggctccttatagttactgatgggtatgcatttggatgaattttctgccatgacaacaggta

SEQ ID NO: 8241 - DNA, 122 bp, Homo sapiens
  misc_feature (61)..(62): /note="This region represents a CpG dinucleotide"
  misc_feature (61)..(61): /note="Nucleotide may be methylated to form 5-methylcytosine"
ccagtgaggtaggtcctattattatcccatttttacacctgaagaaactgcagctgagagcggttaagtaatttgcctaagtcacacttcaaaccccatatttaaatttgattactccagga

SEQ ID NO: 8242 - DNA, 122 bp, Homo sapiens
  misc_feature (61)..(62): /note="This region represents a CpG dinucleotide"
  misc_feature (61)..(61): /note="Nucleotide may be methylated to form 5-methylcytosine"
gctcacaagtccctgttgtatcagcgacttgctttctcagcagttgagtcatgccaagtccgcctgacctgcctggttggcttctccaacagctgaaggccccatgctgaggctgccctgct

SEQ ID NO: 8243 - DNA, 122 bp, Homo sapiens
  misc_feature (61)..(62): /note="This region represents a CpG dinucleotide"
  misc_feature (61)..(61): /note="Nucleotide may be methylated to form 5-methylcytosine"
taggttcttacacaacctattactcattcatctaacaaatattttttgtgctaagcaatacgccaagggcttagatacaatggtgatcaacataactatggtctgtgttcctccagacagcc

SEQ ID NO: 8244 - DNA, 122 bp, Homo sapiens
  misc_feature (61)..(62): /note="This region represents a CpG dinucleotide"
  misc_feature (61)..(61): /note="Nucleotide may be methylated to form 5-methylcytosine"
ggtgaggctccgacaacgcccaggagcacctgtgatgccgtcattaggaacctacctcgtcgccccgattccatcccctcccgacacctgactgcgcgtgttctcctttgcagttctttcct

SEQ ID NO: 8245 - DNA, 122 bp, Homo sapiens
  misc_feature (61)..(62): /note="This region represents a CpG dinucleotide"
  misc_feature (61)..(61): /note="Nucleotide may be methylated to form 5-methylcytosine"
cttcctttaaacagaccatataggcatttgcctgtgaacttagtaacctacagcctagtccgttgtctatcctgctagttgccacacacactctttctcaatacctaactcttcatgttctc

SEQ ID NO: 8246 - DNA, 122 bp, Homo sapiens
  misc_feature (61)..(62): /note="This region represents a CpG dinucleotide"
  misc_feature (61)..(61): /note="Nucleotide may be methylated to form 5-methylcytosine"
tgtctaacagataattcaagagatagtgcatcaagcatgcaaggctcagggcaggacaaacgggacatggctcataagaggagctgcaacaggctttggcatccaacacacctggttttgag

SEQ ID NO: 8247 - DNA, 122 bp, Homo sapiens
  misc_feature (61)..(62): /note="This region represents a CpG dinucleotide"
  misc_feature (61)..(61): /note="Nucleotide may be methylated to form 5-methylcytosine"
tctcaccagggtttcatcacaccatcacatatgttaagatccgtgcattcatgggagaggcggttcctaagatgaggtgacagatttcaaccttgtggcagcctactctggcttcctggtat

SEQ ID NO: 8248 - DNA, 122 bp, Homo sapiens
  misc_feature (61)..(62): /note="This region represents a CpG dinucleotide"
  misc_feature (61)..(61): /note="Nucleotide may be methylated to form 5-methylcytosine"
aacaaatgtgtaagctgtatgctaacacatacagtttaactggacaatcgcttactgaatcgtgtagtaagattgcagatggtatttagggaaggaaaagatcaacagataagtttgcctga

SEQ ID NO: 8249 - DNA, 122 bp, Homo sapiens
  misc_feature (61)..(62): /note="This region represents a CpG dinucleotide"
  misc_feature (61)..(61): /note="Nucleotide may be methylated to form 5-methylcytosine"
caaagaaaggactctgcccaagtcacatgttctccttcacatgagagaaggaagcacagacgtgctggccatccctgagaacaggaagtgaaaggtgtaggaccagaaaagagaatgtgggg

SEQ ID NO: 8250 - DNA, 122 bp, Homo sapiens
  misc_feature (61)..(62): /note="This region represents a CpG dinucleotide"
  misc_feature (61)..(61): /note="Nucleotide may be methylated to form 5-methylcytosine"
cagtgctgacctgcccccaaggttaaaggtgcaagaagggacgaggacccaactcccccacgtgttccacgagcacccagtaaaccagccttgttccaagaagtggctcgtgatggggaaat

SEQ ID NO: 8251 - DNA, 122 bp, Homo sapiens
  misc_feature (61)..(62): /note="This region represents a CpG dinucleotide"
  misc_feature (61)..(61): /note="Nucleotide may be methylated to form 5-methylcytosine"
agtgctatagcttgaatgtttttgtcccgtcccaaattcatgtgttggaatcttagtcaccgacacaataatgttgggaggtggggcctaatgggtggtgtttaggtcttgagagctccagt

SEQ ID NO: 8252 - DNA, 122 bp, Homo sapiens
  misc_feature (61)..(62): /note="This region represents a CpG dinucleotide"
  misc_feature (61)..(61): /note="Nucleotide may be methylated to form 5-methylcytosine"
agggttttggtaggattaaatgagttaatacatgtaacacatttagaacaatgcatgacacgtaataagcatttagtaaaagctattattagtatacatgtgtgaaacaggaaaataatttt

SEQ ID NO: 8253 - DNA, 122 bp, Homo sapiens
  misc_feature (61)..(62): /note="This region represents a CpG dinucleotide"
  misc_feature (61)..(61): /note="Nucleotide may be methylated to form 5-methylcytosine"
aaaagccaggaaataatgtgaccttcattgtatggatgaggatcagacatggaaaagtttcggaacttgcacagagtcacccaactagaaagtggtagagctgggattctgactgcaaagct

SEQ ID NO: 8254 - DNA, 122 bp, Homo sapiens
  misc_feature (61)..(62): /note="This region represents a CpG dinucleotide"
  misc_feature (61)..(61): /note="Nucleotide may be methylated to form 5-methylcytosine"
gccaccacgcccagcctgcccttatttaacttatgaaacctttcagcatttcttagtctccgtactgagactaagcaggtactgtactgcctcccaggggttcagcgaggaggaaactgtgg

SEQ ID NO: 8255 - DNA, 122 bp, Homo sapiens
  misc_feature (61)..(62): /note="This region represents a CpG dinucleotide"
  misc_feature (61)..(61): /note="Nucleotide may be methylated to form 5-methylcytosine"
atgggacaggagaagggaacgggctttcttttcaggccagcgtggcagcgggcggtagggcgaaagggagaaggaaacgagggtttattccgttgcccactccgcggtaagcgacgttgtag

SEQ ID NO: 8256 - DNA, 122 bp, Homo sapiens
  misc_feature (61)..(62): /note="This region represents a CpG dinucleotide"
  misc_feature (61)..(61): /note="Nucleotide may be methylated to form 5-methylcytosine"
aacctctttaccgccttggtttccttgtaggattaagtcagcaaatgcatgcaaattacacgagtgctcaaggtgagtgcttcaaaaacattgctgtcaccctttatgcaatcacctttttc

SEQ ID NO: 8257 - DNA, 122 bp, Homo sapiens
  misc_feature (61)..(62): /note="This region represents a CpG dinucleotide"
  misc_feature (61)..(61): /note="Nucleotide may be methylated to form 5-methylcytosine"
ggcacctctgtctccaacccagccccatgtgtcaaatgccttctgggtgtctccagagagcgagctgtctcttggcttcctcacctctcgcctcccacgtgcctcatatcactccatgatca

SEQ ID NO: 8258 - DNA, 122 bp, Homo sapiens
  misc_feature (61)..(62): /note="This region represents a CpG dinucleotide"
  misc_feature (61)..(61): /note="Nucleotide may be methylated to form 5-methylcytosine"
ggcaaatatttgcttttgttatcaaaggtactatgcttgctgggccctggaacaccagtgcgtggtcatgggaatcagagacttcaatgggtgcatatttctaaaggcttttgccctcggag

SEQ ID NO: 8259 - DNA, 122 bp, Homo sapiens
  misc_feature (61)..(62): /note="This region represents a CpG dinucleotide"
  misc_feature (61)..(61): /note="Nucleotide may be methylated to form 5-methylcytosine"
agcacagctttatacaacaaacacagtaaagactgatttgcctccaccctcctctgaaagcgagcaaatagatttgactgaggaacagaaggatgactcagaatggttaagcagcgatgtga

SEQ ID NO: 8260 - DNA, 122 bp, Homo sapiens
  misc_feature (61)..(62): /note="This region represents a CpG dinucleotide"
  misc_feature (61)..(61): /note="Nucleotide may be methylated to form 5-methylcytosine"
gagcacatgtgatataatcatttaatgtcatttaaaggagggaggagttctgaaggtgggcgctctaactcttgggataggaccaagggaatgaagcccccaggggcttggggaaaggcgtg

SEQ ID NO: 8261 - DNA, 122 bp, Homo sapiens
  misc_feature (61)..(62): /note="This region represents a CpG dinucleotide"
  misc_feature (61)..(61): /note="Nucleotide may be methylated to form 5-methylcytosine"
aagtaagaaatgttcacgtggaatagctgccattaatatgggtgacctcaaggttagtatcgctcagggaatgcctttcattgttctgtattgtttgtttcccttttgtgaaattctgtggc

SEQ ID NO: 8262 - DNA, 122 bp, Homo sapiens
  misc_feature (61)..(62): /note="This region represents a CpG dinucleotide"
  misc_feature (61)..(61): /note="Nucleotide may be methylated to form 5-methylcytosine"
ccatatcaatgtagagaattatgaaacacaggtgggagtcagtagaaagtgaagaaacagcgccacaaatgagtaaagcaggtctagcaggcttgtctgttgagttactgactactggcatg

SEQ ID NO: 8263 - DNA, 122 bp, Homo sapiens
  misc_feature (61)..(62): /note="This region represents a CpG dinucleotide"
  misc_feature (61)..(61): /note="Nucleotide may be methylated to form 5-methylcytosine"
attttagcttctagcaaaaagatttacacccaagtcacctgacaaatattacttgtggaacggagacaatcttcaatagacatcagctttttgaacaatgaatactgagtcaaccctggagg

SEQ ID NO: 8264 - DNA, 122 bp, Homo sapiens
  misc_feature (61)..(62): /note="This region represents a CpG dinucleotide"
  misc_feature (61)..(61): /note="Nucleotide may be methylated to form 5-methylcytosine"
ggaagaggttacctgagacttgacttaacctccttgggagggaacatgctttcactgttgcgaattgttaagtcaggtccagagtgatccagtcacttatcatgagtcatacagtaaccaga

SEQ ID NO: 8265 - DNA, 122 bp, Homo sapiens
  misc_feature (61)..(62): /note="This region represents a CpG dinucleotide"
  misc_feature (61)..(61): /note="Nucleotide may be methylated to form 5-methylcytosine"
tcaatatctttattcgtcagggaaatgcagattaaaaccacaatcccacaaaataatacacgcccacgaaatgactgaaataccaaaggtgggcaagcattgagcaatggaactctcccaca

SEQ ID NO: 8266 - DNA, 122 bp, Homo sapiens
  misc_feature (61)..(62): /note="This region represents a CpG dinucleotide"
  misc_feature (61)..(61): /note="Nucleotide may be methylated to form 5-methylcytosine"
catgggatctggaaacagagcggaggaaggagctcgggaatggtcttgctcaatccttcccggcctctgctcatcggaatcacccagagggcttttaagcttagacaaaacactctgatgtt

SEQ ID NO: 8267 - DNA, 122 bp, Homo sapiens
  misc_feature (61)..(62): /note="This region represents a CpG dinucleotide"
  misc_feature (61)..(61): /note="Nucleotide may be methylated to form 5-methylcytosine"
gaggaaataggctcagagaggttaagtaactatattacacctaacagtatgccccactaacgaatgaggaaataggctcagagaagttaagtaacttgacgtcagttatccagctactaagt

SEQ ID NO: 8268 - DNA, 122 bp, Homo sapiens
  misc_feature (61)..(62): /note="This region represents a CpG dinucleotide"
  misc_feature (61)..(61): /note="Nucleotide may be methylated to form 5-methylcytosine"
gagcggtgtcttgctaggccggttggggtacttgcggggccggatgggcttgagggtgagcggcggctggggcaggctgccaaagcccgggtggatctgcttgtctttgaatgccttgatgg

SEQ ID NO: 8269 - DNA, 122 bp, Homo sapiens
  misc_feature (61)..(62): /note="This region represents a CpG dinucleotide"
  misc_feature (61)..(61): /note="Nucleotide may be methylated to form 5-methylcytosine"
tttcctaccctttttcataccatgaagacaaaacaagtcagaggaggagtgttgtggggacgcccgtcatctcaagtttttgaaataggggcagccatcaagaaagttgcttcaaggatggg

SEQ ID NO: 8270 - DNA, 122 bp, Homo sapiens
  misc_feature (61)..(62): /note="This region represents a CpG dinucleotide"
  misc_feature (61)..(61): /note="Nucleotide may be methylated to form 5-methylcytosine"
gattcatcatagaagcctatggttttatttattgacactgctgtacaattttccctgtagcgagtcatagttggctgaagagagagtcgaagattaagtacaaaactttctaaacatcctgt

SEQ ID NO: 8271 - DNA, 122 bp, Homo sapiens
  misc_feature (61)..(62): /note="This region represents a CpG dinucleotide"
  misc_feature (61)..(61): /note="Nucleotide may be methylated to form 5-methylcytosine"
gaatcttgaggcctaggaagatgatgattctctcagagagtttatgcttatgctcctgtccggcatggacgataccccagcccaggatcaccccagaccaagcacatgacttaccatgactc

SEQ ID NO: 8272 - DNA, 122 bp, Homo sapiens
  misc_feature (61)..(62): /note="This region represents a CpG dinucleotide"
  misc_feature (61)..(61): /note="Nucleotide may be methylated to form 5-methylcytosine"
gcctgacattcaaggctagactgagactgcccaacccatttccctaacctacccttgcttcgtatcattctactgcctcccgttcttcttgtcgtatcatcctactgcctcccgttcttctt

SEQ ID NO: 8273 - DNA, 122 bp, Homo sapiens
  misc_feature (61)..(62): /note="This region represents a CpG dinucleotide"
  misc_feature (61)..(61): /note="Nucleotide may be methylated to form 5-methylcytosine"
tcagatctaagcacatatcttaggttttctggagtgatcctgacatttaggtattttgtgcgagtcagacagtctgtccttgtgtttggcttggaaaacatgtttgccgtaactagagctag

SEQ ID NO: 8274 - DNA, 122 bp, Homo sapiens
  misc_feature (61)..(62): /note="This region represents a CpG dinucleotide"
  misc_feature (61)..(61): /note="Nucleotide may be methylated to form 5-methylcytosine"
tatattgcctgcctctctaagtggaccgtaggctcaatgtgggcggggtctttgcctacacggttcaccattgcacccgtcatgcgtggagtgtggtatgtgctcaataaatcttgttgaat

SEQ ID NO: 8275 - DNA, 122 bp, Homo sapiens
  misc_feature (61)..(62): /note="This region represents a CpG dinucleotide"
  misc_feature (61)..(61): /note="Nucleotide may be methylated to form 5-methylcytosine"
atgcctattattgatgtcatcagaaattacccttttggtgatagtacaagtgcttcattacgcaggttaacaggaaaagtgaagcaggtgtggtagttaatccacaaaatccatattggctc

SEQ ID NO: 8276 - DNA, 122 bp, Homo sapiens
  misc_feature (61)..(62): /note="This region represents a CpG dinucleotide"
  misc_feature (61)..(61): /note="Nucleotide may be methylated to form 5-methylcytosine"
tacctgcagccctgagaagtaagagatccgcagaacctgggtttcccaagtttattttctcgggtagctctcactgcctaaggaatttcccttgtgctcccgcccagtgatgttggagaaga

SEQ ID NO: 8277 - DNA, 122 bp, Homo sapiens
  misc_feature (61)..(62): /note="This region represents a CpG dinucleotide"
  misc_feature (61)..(61): /note="Nucleotide may be methylated to form 5-methylcytosine"
ttttctcacgggcaaaatgcagttaatgccagggcatggctgggaggtcaaatgaggtgacggaggtaagtaatgcctgacagtgagaagctccatgatggttagctctattctcccacatg

SEQ ID NO: 8278 - DNA, 122 bp, Homo sapiens
  misc_feature (61)..(62): /note="This region represents a CpG dinucleotide"
  misc_feature (61)..(61): /note="Nucleotide may be methylated to form 5-methylcytosine"
ttcccctcttttaatggggcttttaattagcaatggggctaatctcctaggatccaatcccgtgacaggcattttcctgcatgattatgtagcaagtcataaagaagaactgctacactcat

SEQ ID NO: 8279 - DNA, 122 bp, Homo sapiens
  misc_feature (61)..(62): /note="This region represents a CpG dinucleotide"
  misc_feature (61)..(61): /note="Nucleotide may be methylated to form 5-methylcytosine"
atctgcctgcctcggcctcccaaagtgctgggattacaggcgtgagtcaccacgccgggccggtaaggcttttgaaaagagatataagacctgattatggagctggccctcttagtcccatt

SEQ ID NO: 8280 - DNA, 122 bp, Homo sapiens
  misc_feature (61)..(62): /note="This region represents a CpG dinucleotide"
  misc_feature (61)..(61): /note="Nucleotide may be methylated to form 5-methylcytosine"
aggcatgggtggggcatcctaaaaaatggtaaatgagccagtggctgggctgctaagccacgtcttgggaataactagcccatagaggcagctgcttgattagaaaactgaatgccagaaac

SEQ ID NO: 8281 - DNA, 122 bp, Homo sapiens
  misc_feature (61)..(62): /note="This region represents a CpG dinucleotide"
  misc_feature (61)..(61): /note="Nucleotide may be methylated to form 5-methylcytosine"
taaaggtcgtcatctgggcaaatgaaccactctgacttggagattaggggctcagacagccgtggatgagagtccagctctactacttattagccttgattaggtgagtattaccctgtatt

SEQ ID NO: 8282 - DNA, 122 bp, Homo sapiens
  misc_feature (61)..(62): /note="This region represents a CpG dinucleotide"
  misc_feature (61)..(61): /note="Nucleotide may be methylated to form 5-methylcytosine"
acacacgtgaaatttgaaagggaggcagagatgagcttcctgcagcagggagagttgacacgcaggttctgacagacacaggatttgcatgggttagatgaatgctgcactctctagatgca

SEQ ID NO: 8283 - DNA, 122 bp, Homo sapiens
  misc_feature (61)..(62): /note="This region represents a CpG dinucleotide"
  misc_feature (61)..(61): /note="Nucleotide may be methylated to form 5-methylcytosine"
tacttcagattacttttattacctgagagacttcatctgcataacaagatagctttcggccgggtgtgtttgctcatgcttgtaatcccagcattttgggaggctgaggcagccagatcacc

SEQ ID NO: 8284 - DNA, 122 bp, Homo sapiens
  misc_feature (61)..(62): /note="This region represents a CpG dinucleotide"
  misc_feature (61)..(61): /note="Nucleotide may be methylated to form 5-methylcytosine"
gccgctattccttgatattggaatttaaaataattaaagtctcagtcacaagtgctaagacgagatcctctaggtcacagcagccacagtctgacccaaagggcttagcataaaaagtggtg

SEQ ID NO: 8285 - DNA, 122 bp, Homo sapiens
  misc_feature (61)..(62): /note="This region represents a CpG dinucleotide"
  misc_feature (61)..(61): /note="Nucleotide may be methylated to form 5-methylcytosine"
tcctccctaccccacttactcaggacacaccaggagggtgcagaaggactggctgcccaacggaaggagattttatcactgatattgcttgaacttactggtgtgtggcaattaaaatggtt

SEQ ID NO: 8286 - DNA, 122 bp, Homo sapiens
  misc_feature (61)..(62): /note="This region represents a CpG dinucleotide"
  misc_feature (61)..(61): /note="Nucleotide may be methylated to form 5-methylcytosine"
gcatataccaaaactcttgtaacactgggtatagtgactcacctctgtaatctagcacttcgtgaggacaaagtgggaggatggcttgaggccaggaggttgagaacagcctgggcaacata

SEQ ID NO: 8287 - DNA, 122 bp, Homo sapiens
  misc_feature (61)..(62): /note="This region represents a CpG dinucleotide"
  misc_feature (61)..(61): /note="Nucleotide may be methylated to form 5-methylcytosine"
catacatcagtttcaggtcactgagtcctgccaaattgtcctccagaatggctatactagcgtttgctctcaccagtgttgccccaacacctggtgttattttctaagtttttaacctatgg

SEQ ID NO: 8288 - DNA, 122 bp, Homo sapiens
  misc_feature (61)..(62): /note="This region represents a CpG dinucleotide"
  misc_feature (61)..(61): /note="Nucleotide may be methylated to form 5-methylcytosine"
aggtgtgttcagggtggtatggccttagacaagtgttctgtcttaagagtgtctcctggccgggtgtggtggctcatgcctgtaatcccagcactttgggaggccaaggcaggcagattgcc

SEQ ID NO: 8289 - DNA, 122 bp, Homo sapiens
  misc_feature (61)..(62): /note="This region represents a CpG dinucleotide"
  misc_feature (61)..(61): /note="Nucleotide may be methylated to form 5-methylcytosine"
gagctgtggtttcacacagctaagaagtggccagaggcagcttttgaatccctggtcaggcgtctgtgttgagataacctgaaattcctgttgccaagcatgactttctcatcagaccttac

SEQ ID NO: 8290 - DNA, 122 bp, Homo sapiens
  misc_feature (61)..(62): /note="This region represents a CpG dinucleotide"
  misc_feature (61)..(61): /note="Nucleotide may be methylated to form 5-methylcytosine"
tgtgaaaataaaatccagcttggtgactgttaatgtttaattgcatcataagcaggcattcgctgaaaagttatgcagtcagtgcctagtatgtgtgaaatgtcatcagcctgctatgggca

SEQ ID NO: 8291 - DNA, 122 bp, Homo sapiens
  misc_feature (61)..(62): /note="This region represents a CpG dinucleotide"
  misc_feature (61)..(61): /note="Nucleotide may be methylated to form 5-methylcytosine"
acccgctaacgaccgagacgcctggatcatcgctggtcaccgtctgtgtgtgtaatctgacgtgatgaaagcaaagtcaaccaacaggcagaacctgcgcctaattgtctgggcttcacttt

SEQ ID NO: 8292 - DNA, 122 bp, Homo sapiens
  misc_feature (61)..(62): /note="This region represents a CpG dinucleotide"
  misc_feature (61)..(61): /note="Nucleotide may be methylated to form 5-methylcytosine"
aactttcagctcagctggttccagagtttcacaacccagctctgtcttgcttacatctgacgtgctacttcactggtgtgacctccagtgtgcttagtggataatgacactgcataatcccc

SEQ ID NO: 8293 - DNA, 122 bp, Homo sapiens
  misc_feature (61)..(62): /note="This region represents a CpG dinucleotide"
  misc_feature (61)..(61): /note="Nucleotide may be methylated to form 5-methylcytosine"
cgataggtgacatttactgagcacttactatgagtcagcctctatcctaagggctttatccgtactctaatcctatgataatagtattgttttacagatgagaaagcagagtcttagaatag

SEQ ID NO: 8294 - DNA, 122 bp, Homo sapiens
  misc_feature (61)..(62): /note="This region represents a CpG dinucleotide"
  misc_feature (61)..(61): /note="Nucleotide may be methylated to form 5-methylcytosine"
gtgggattaagttatcgagaatagcctccttgtgatctgacgcagactcactggctgggccgtgtcttccaccagggcatctgagttgactactgagttgtatgctagtcacccagattcca

SEQ ID NO: 8295 - DNA, 122 bp, Homo sapiens
  misc_feature (61)..(62): /note="This region represents a CpG dinucleotide"
  misc_feature (61)..(61): /note="Nucleotide may be methylated to form 5-methylcytosine"
acaacacggttgatttaaagggcgagtcttttgtgccttgcagtcccaaatgctcagccccgtttctacatagagaacagatactgtatacagtacaaagattgaggcaggctacaccagta

SEQ ID NO: 8296 - DNA, 122 bp, Homo sapiens
  misc_feature (61)..(62): /note="This region represents a CpG dinucleotide"
  misc_feature (61)..(61): /note="Nucleotide may be methylated to form 5-methylcytosine"
ctgctgcattcttaataatttgtaataatttttgaacagggaggtccctgctctttgattcggtacaaggctttacaaattatgcagctggttccatttgctggacaagtggcttatccacc

SEQ ID NO: 8297 - DNA, 122 bp, Homo sapiens
  misc_feature (61)..(62): /note="This region represents a CpG dinucleotide"
  misc_feature (61)..(61): /note="Nucleotide may be methylated to form 5-methylcytosine"
actggcactgagacaatgatggcactggtctgatgttgattccatgctgacggtacactccgctaggtctctggctgggacacaagggtcaatccgctgcagatgttgctcttcaagaattt

SEQ ID NO: 8298 - DNA, 122 bp, Homo sapiens
  misc_feature (61)..(62): /note="This region represents a CpG dinucleotide"
  misc_feature (61)..(61): /note="Nucleotide may be methylated to form 5-methylcytosine"
actagcctcatgatgtttttgttttccagcaactttgctgcttaaagtgtgatccaaagacgagcagtacaggcctcacatgggcttgttagaaatacagatcccaggcccagccttaccta

SEQ ID NO: 8299 - DNA, 122 bp, Homo sapiens
  misc_feature (61)..(62): /note="This region represents a CpG dinucleotide"
  misc_feature (61)..(61): /note="Nucleotide may be methylated to form 5-methylcytosine"
accattcatccgcccattgggatagcccaggctctgagctcagcactccacccgtcactgcgattgcactaatcctcacccacccttgcaggcaggtattactgtgggcacagagaagtttg

SEQ ID NO: 8300 - DNA, 122 bp, Homo sapiens
  misc_feature (61)..(62): /note="This region represents a CpG dinucleotide"
  misc_feature (61)..(61): /note="Nucleotide may be methylated to form 5-methylcytosine"
tggaagccagtcacaccaccagagcagcttcattctgtgaagaagttccaatgatccgcccgccttggcctcccaaagtgctcggattataggcgtgagccaccacacccggccctaataca

SEQ ID NO: 8301 - DNA, 122 bp, Homo sapiens
  misc_feature (61)..(62): /note="This region represents a CpG dinucleotide"
  misc_feature (61)..(61): /note="Nucleotide may be methylated to form 5-methylcytosine"
gctccaccctctccctattagctgtgtttccttgggcatgtcactgtacctctttgaacccgattcctatctgtgaaataaggataatatgagcccctgcttcatgagcaaatgtgcctggc

SEQ ID NO: 8302 - DNA, 122 bp, Homo sapiens
  misc_feature (61)..(62): /note="This region represents a CpG dinucleotide"
  misc_feature (61)..(61): /note="Nucleotide may be methylated to form 5-methylcytosine"
tgcaccttgtcaagctggtccccagtgtgtgtgacttcagcctgcactagaccatttgaccgacctaatcattttgttcgtaagagcttcaagaacatctaattgagcattcccagcctttg

SEQ ID NO: 8303 - DNA, 122 bp, Homo sapiens
  misc_feature (61)..(62): /note="This region represents a CpG dinucleotide"
  misc_feature (61)..(61): /note="Nucleotide may be methylated to form 5-methylcytosine"
cctagacattttatctttcccagctcaagatggataaactcagaatgacaggccaggcaccgtggctcatgcctgtaatcccagcactttgggaggcggaggcgggtggatcacttgagacc

SEQ ID NO: 8304 - DNA, 122 bp, Homo sapiens
  misc_feature (61)..(62): /note="This region represents a CpG dinucleotide"
  misc_feature (61)..(61): /note="Nucleotide may be methylated to form 5-methylcytosine"
ctttcagtatggaaaataatcagcaagccttttttgtaccataagtaaaatggattgtgacgcacttagagcaagtgtagacagactacagcctgcaggcccaatctggccactgcctggtt

SEQ ID NO: 8305 - DNA, 122 bp, Homo sapiens
  misc_feature (61)..(62): /note="This region represents a CpG dinucleotide"
  misc_feature (61)..(61): /note="Nucleotide may be methylated to form 5-methylcytosine"
aaggtgaaacatggctcattgcatcatattaatagcatgcaaatctaagcccagtgatgccgtgcaatggctacgatcaagggcaatagaatggatcgtgcatgagctcccaggccacacac

SEQ ID NO: 8306 - DNA, 122 bp, Homo sapiens
  misc_feature (61)..(62): /note="This region represents a CpG dinucleotide"
  misc_feature (61)..(61): /note="Nucleotide may be methylated to form 5-methylcytosine"
ctaatccatagggtgccccaaagattaaatgagaaagtgtattagaggcatagcatataacgagtgctcagaaagcccagcagttattttctaaatggacaggtgccaggcaccagtggctt

SEQ ID NO: 8307 - DNA, 122 bp, Homo sapiens
  misc_feature (61)..(62): /note="This region represents a CpG dinucleotide"
  misc_feature (61)..(61): /note="Nucleotide may be methylated to form 5-methylcytosine"
ggggaaaccggcagacaggttctgatcgagcccttcatcccagtcacaggtggcaggtgccgggcgccacgacctcactgtgcagggcgcacgctctctccccgccctcccacaccccagcg

SEQ ID NO: 8308 - DNA, 122 bp, Homo sapiens
  misc_feature (61)..(62): /note="This region represents a CpG dinucleotide"
  misc_feature (61)..(61): /note="Nucleotide may be methylated to form 5-methylcytosine"
ccttttcatctttgtggttctttctgtgggcccctgtgcccgtgatctgccatgagtcagcgtctaaggatcccccaggcctcctgtctgtaaattattaacacctctcctgtcctctgttt

SEQ ID NO: 8309 - DNA, 122 bp, Homo sapiens
  misc_feature (61)..(62): /note="This region represents a CpG dinucleotide"
  misc_feature (61)..(61): /note="Nucleotide may be methylated to form 5-methylcytosine"
ttcatttacaaaaacaggcagctagcccatgggccatagtttgcctacccttgagctagacgctctgcaaatagcaatgactttatttcccacattccattctttacaactctgatttctgt

SEQ ID NO: 8310 - DNA, 122 bp, Homo sapiens
  misc_feature (61)..(62): /note="This region represents a CpG dinucleotide"
  misc_feature (61)..(61): /note="Nucleotide may be methylated to form 5-methylcytosine"
ccaccatgaaacagagagacactgggtgcatcccattgccacaaactcagaaggatccaacgtaatatttgcaggatttgtgcccagaacattttatccaaatctaccaagacaagacaaat

SEQ ID NO: 8311 - DNA, 122 bp, Homo sapiens
  misc_feature (61)..(62): /note="This region represents a CpG dinucleotide"
  misc_feature (61)..(61): /note="Nucleotide may be methylated to form 5-methylcytosine"
accttgtgatccacccgccttggcctcccaaagtgctgggattacaggcgtgagccaccacgcccggcctagcagtggttttctcaaacgagtctggatcagattcacctgaagggcttgtt

SEQ ID NO: 8312 - DNA, 122 bp, Homo sapiens
  misc_feature (61)..(62): /note="This region represents a CpG dinucleotide"
  misc_feature (61)..(61): /note="Nucleotide may be methylated to form 5-methylcytosine"
ccttgccaaactctgccaacttggttagagtcctggctggcagcagctgtatttcagggccgggccaagactgacgctgaacactgaacatgccactcacactaacatcgttctctgttcta

SEQ ID NO: 8313 - DNA, 122 bp, Homo sapiens
  misc_feature (61)..(62): /note="This region represents a CpG dinucleotide"
  misc_feature (61)..(61): /note="Nucleotide may be methylated to form 5-methylcytosine"
attaaagaatttgcttttagctatatgcccagtaaatagccaggtcaggatttgaatccacgtcgtcactctaaagctctttgtattgcacagactttggcatggaagttagaaaattctaa

SEQ ID NO: 8314 - DNA, 122 bp, Homo sapiens
  misc_feature (61)..(62): /note="This region represents a CpG dinucleotide"
  misc_feature (61)..(61): /note="Nucleotide may be methylated to form 5-methylcytosine"
cgttatcttgaggcggagctgctgcctcaggctgctgttagtgacttccagaaccctgttcgtctgctggagctgctgagacacctgcagatctgtttggccacagagatttggtggatgtc

SEQ ID NO: 8315 - DNA, 122 bp, Homo sapiens
  misc_feature (61)..(62): /note="This region represents a CpG dinucleotide"
  misc_feature (61)..(61): /note="Nucleotide may be methylated to form 5-methylcytosine"
gtcttaatcttataagtaatatttcctgtgtatgcatctgctaagtccctccagaactcacgttgaaacttaatctcaaagaggcaggacactgaggaggagattaggtcatgagtgctcct

SEQ ID NO: 8316 - DNA, 122 bp, Homo sapiens
  misc_feature (61)..(62): /note="This region represents a CpG dinucleotide"
  misc_feature (61)..(61): /note="Nucleotide may be methylated to form 5-methylcytosine"
ggactttctctgtcagagtttggagaaaacactcatgcatttgattcacagccaggagtccgcttgccttttactgatcttctgtttgtcagcagtttccacattaagacagttgagtgagt

SEQ ID NO: 8317 - DNA, 122 bp, Homo sapiens
  misc_feature (61)..(62): /note="This region represents a CpG dinucleotide"
  misc_feature (61)..(61): /note="Nucleotide may be methylated to form 5-methylcytosine"
aagaaaatagctgtatggcataaagtctacttgagggaaaagaacaacccggcacggttacgttcaatcagacactaaacagagtgcacgcccacccaggggacactgaggtcgctgggcca

SEQ ID NO: 8318 - DNA, 122 bp, Homo sapiens
  misc_feature (61)..(62): /note="This region represents a CpG dinucleotide"
  misc_feature (61)..(61): /note="Nucleotide may be methylated to form 5-methylcytosine"
ggagaagagaagacgtgcagccagacacctgccgccttgtcaggcctgtgtcgccgcctccgcagcccgaaatcatcctgccctccaaggcaccgccctgatgctccaggtgaaggctgaag

SEQ ID NO: 8319 - DNA, 122 bp, Homo sapiens
  misc_feature (61)..(62): /note="This region represents a CpG dinucleotide"
  misc_feature (61)..(61): /note="Nucleotide may be methylated to form 5-methylcytosine"
tgggttagttgagattctgttgggttattttattatgaagtctgtttgtttttttaattacgagagagtgctctttatagaaaatgtgtaacattgagaaaggtagaaaagatgaatcaggc

SEQ ID NO: 8320 - DNA, 122 bp, Homo sapiens
  misc_feature (61)..(62): /note="This region represents a CpG dinucleotide"
  misc_feature (61)..(61): /note="Nucleotide may be methylated to form 5-methylcytosine"
tgttcaggagcccatgttcttcctgctacagtgtgctaccatggtatcaccaggtttccacgttagccacttactcccaagtattacatatgtaaccagtgcttgcttcagtgatcctttaa

SEQ ID NO: 8321 - DNA, 122 bp, Homo sapiens
  misc_feature (61)..(62): /note="This region represents a CpG dinucleotide"
  misc_feature (61)..(61): /note="Nucleotide may be methylated to form 5-methylcytosine"
ggtgcccagccctttatacattatcctttaagccatctacaacgaacactctcataacaacgcaaaaaagaaacaaagggccaaagtgaagaagtgaacaccaccctcttttcatgccctca

SEQ ID NO: 8322 - DNA, 122 bp, Homo sapiens
  misc_feature (61)..(62): /note="This region represents a CpG dinucleotide"
  misc_feature (61)..(61): /note="Nucleotide may be methylated to form 5-methylcytosine"
cacagcaatttctttgtataaggcttgtgactcttcttacatctttaaaattccctccctcgcccattttagcagcacctgaaaagtattagtctttttggaaatgtaccaaaagcttgcct

SEQ ID NO: 8323 - DNA, 122 bp, Homo sapiens
  misc_feature (61)..(62): /note="This region represents a CpG dinucleotide"
  misc_feature (61)..(61): /note="Nucleotide may be methylated to form 5-methylcytosine"
cagcccctggatatgggcagggcacctaggaaagctgaaaaacaagtagttgcatttggccgggctgtgtttcagatgaagaactggaagacaaccccaaccagagtgacctgattgagcag

SEQ ID NO: 8324 - DNA, 122 bp, Homo sapiens
  misc_feature (61)..(62): /note="This region represents a CpG dinucleotide"
  misc_feature (61)..(61): /note="Nucleotide may be methylated to form 5-methylcytosine"
tcggtgaagccttttgtgggcctgacatctaactctgtgcctgcgcagccagggtgtgtgcgtgtgtgtgtgtgagcgcgcgtgggggtgaacaggtgtgcacaggctctcggcacgggtgg

SEQ ID NO: 8325 - DNA, 122 bp, Homo sapiens
  misc_feature (61)..(62): /note="This region represents a CpG dinucleotide"
  misc_feature (61)..(61): /note="Nucleotide may be methylated to form 5-methylcytosine"
atatacaatcccaggattagcctctctaccatgggctttgtagctgaacacctcttgcctcgtcattcccttaattcaacatttttatcttgtgttcaaaatatatattttacatttatgta

SEQ ID NO: 8326 - DNA, 122 bp, Homo sapiens
  misc_feature (61)..(62): /note="This region represents a CpG dinucleotide"
  misc_feature (61)..(61): /note="Nucleotide may be methylated to form 5-methylcytosine"
tccttccttatggtaacaatgacttcctgatccacctttgtctatgaagcttggctgccacgcatgagtctcactttgatggacagttattgacaggtcttcttctgagaattactgttctg

SEQ ID NO: 8327 - DNA, 122 bp, Homo sapiens
  misc_feature (61)..(62): /note="This region represents a CpG dinucleotide"
  misc_feature (61)..(61): /note="Nucleotide may be methylated to form 5-methylcytosine"
ttattttctgacgggctggctggcctgcactggtgagttctctctcaggtcacagcagaccgaaccactaggcttaccagtgactaatctcacagcaggcatacccagctcatgctcttcct

SEQ ID NO: 8328 - DNA, 122 bp, Homo sapiens
  misc_feature (61)..(62): /note="This region represents a CpG dinucleotide"
  misc_feature (61)..(61): /note="Nucleotide may be methylated to form 5-methylcytosine"
agaggaagtgtgtagccatctcggcttaattggaagacatgtgaaggtgatgggtaaatacgtagctgacatgtgtcacatgagtaatataggtgttgccctgtagactcactgtgttgcca

SEQ ID NO: 8329 - DNA, 122 bp, Homo sapiens
  misc_feature (61)..(62): /note="This region represents a CpG dinucleotide"
  misc_feature (61)..(61): /note="Nucleotide may be methylated to form 5-methylcytosine"
aaaaaatatggcccaagatttacaaaaatatccctaaaacattccacatgcgtctcaaggcggagggtaattgttatgaacaaatccacacaaactcttgtgccaagagcaacaagttgagg

SEQ ID NO: 8330 - DNA, 122 bp, Homo sapiens
  misc_feature (61)..(62): /note="This region represents a CpG dinucleotide"
  misc_feature (61)..(61): /note="Nucleotide may be methylated to form 5-methylcytosine"
ctatttcttaattcggtcaagttgatacctaaaactaaccatcacattaaacaagttatgcgcttctaaaaaaaaatggtgtgacagaaataagatagacattgccattccaaaatggagaa

SEQ ID NO: 8331 - DNA, 122 bp, Homo sapiens
  misc_feature (61)..(62): /note="This region represents a CpG dinucleotide"
  misc_feature (61)..(61): /note="Nucleotide may be methylated to form 5-methylcytosine"
tcatgttctctgcccttcccgctctgtgcccttggcagctcccctcccacccggtcactccgtccagcaagcacgcagacagcaagcccgcgccgctgacgcccgcctaccacacgctgccc

SEQ ID NO: 8332 - DNA, 122 bp, Homo sapiens
  misc_feature (61)..(62): /note="This region represents a CpG dinucleotide"
  misc_feature (61)..(61): /note="Nucleotide may be methylated to form 5-methylcytosine"
gcaactggctctgatggattagtaggtgcctgagaagtcattttgaaagggtctgaggctcggtctgggctcagtgaagagttctgtgattaattagtgatgtctgcccttggcttgggtgg

SEQ ID NO: 8333 - DNA, 122 bp, Homo sapiens
  misc_feature (61)..(62): /note="This region represents a CpG dinucleotide"
  misc_feature (61)..(61): /note="Nucleotide may be methylated to form 5-methylcytosine"
caaaacttgtgaggcagtagcgcgcctgagcctcagggcttagcagcaggttgtacagggcgatccacacttgcccgtccaacttgctcagcttttgctgctctgagggggccacagtatgc

SEQ ID NO: 8334 - DNA, 122 bp, Homo sapiens
  misc_feature (61)..(62): /note="This region represents a CpG dinucleotide"
  misc_feature (61)..(61): /note="Nucleotide may be methylated to form 5-methylcytosine"
tagagtccctatccctttatgaagtctttatgaacagactcgatgtgtttccagggctgacgtgaggcatagtttctgccctggtcatcacaggagagtgattccaataaaataagaataaa

SEQ ID NO: 8335 - DNA, 122 bp, Homo sapiens
  misc_feature (61)..(62): /note="This region represents a CpG dinucleotide"
  misc_feature (61)..(61): /note="Nucleotide may be methylated to form 5-methylcytosine"
gaccaaggccatgcacacatgcataggcattgacaactatgaaaaggctgctgcttggggcgtggtggctcatgcctgtaatcccagcactatgggaggccgaggcaggcatatcacctgag

SEQ ID NO: 8336 - DNA, 122 bp, Homo sapiens
  misc_feature (61)..(62): /note="This region represents a CpG dinucleotide"
  misc_feature (61)..(61): /note="Nucleotide may be methylated to form 5-methylcytosine"
taaaaagaggagccggaggataagtctacgctgggacctacttagtcattacaaatgatacgtactaatgataaagaggacgccagaggataagtgtattcatctgtctcagcattgtccag

SEQ ID NO: 8337 - DNA, 122 bp, Homo sapiens
  misc_feature (61)..(62): /note="This region represents a CpG dinucleotide"
  misc_feature (61)..(61): /note="Nucleotide may be methylated to form 5-methylcytosine"
aatttttaaaaattcaatataatgtttatagaatggtattacattgttatcagtcttagacgtagggttataatggagctgaaaaaattcctgttgcctaatgacttaacattgtagtgtaa

SEQ ID NO: 8338 - DNA, 122 bp, Homo sapiens
  misc_feature (61)..(62): /note="This region represents a CpG dinucleotide"
  misc_feature (61)..(61): /note="Nucleotide may be methylated to form 5-methylcytosine"
tctcagagcagtcagtgagtcaactgcgaaggcgctgagtaacgaactacgagatctgagcggcatctcacacaggacactgaagaaaggcattttgtagacggatgactgccctgccagtg

SEQ ID NO: 8339 - DNA, 122 bp, Homo sapiens
  misc_feature (61)..(62): /note="This region represents a CpG dinucleotide"
  misc_feature (61)..(61): /note="Nucleotide may be methylated to form 5-methylcytosine"
tgccagctctggcaggacgcagccgcaggctcagaatcaacacgcaattccctgcacaggcgtctgcagagcaaggttcaggcctgcttcatcagtaattctcaaaggtgatgaactctacg

SEQ ID NO: 8340 - DNA, 122 bp, Homo sapiens
  misc_feature (61)..(62): /note="This region represents a CpG dinucleotide"
  misc_feature (61)..(61): /note="Nucleotide may be methylated to form 5-methylcytosine"
caacagccaagcttcttggtagttttctatactcatttagtcactttcttaccttccattcgctcaaaccttctccaatctaggttccagccccatcactcagcagacattattctcattaa

SEQ ID NO: 8341 - DNA, 122 bp, Homo sapiens
  misc_feature (61)..(62): /note="This region represents a CpG dinucleotide"
  misc_feature (61)..(61): /note="Nucleotide may be methylated to form 5-methylcytosine"
atgaaaatgctttgatctggagacaggaagtacttgcccccaggacagattcacaggaggcgaactgcagggaatttacaaatggcattgtatgtgtccagtagtctaagggttcaaagata

SEQ ID NO: 8342 - DNA, 122 bp, Homo sapiens
  misc_feature (61)..(62): /note="This region represents a CpG dinucleotide"
  misc_feature (61)..(61): /note="Nucleotide may be methylated to form 5-methylcytosine"
cttcatcagcttcatggtaaatctgcctctgacaggcaattgtgcaattcacaatccaggcgtatttgttgagcactttcagagacattaagtctgggtccttatccaatggactttcttga

SEQ ID NO: 8343 - DNA, 122 bp, Homo sapiens
  misc_feature (61)..(62): /note="This region represents a CpG dinucleotide"
  misc_feature (61)..(61): /note="Nucleotide may be methylated to form 5-methylcytosine"
ttccagtgtcacctgcaggatgccatgggatacccatgagcccaggcaaatctcccaagacgctgccaagccactctgcagagctgctctgggtcctgccccaggtgctgtgtgagggagct

SEQ ID NO: 8344 - DNA, 122 bp, Homo sapiens
  misc_feature (61)..(62): /note="This region represents a CpG dinucleotide"
  misc_feature (61)..(61): /note="Nucleotide may be methylated to form 5-methylcytosine"
acgctgtgggtctggccggaacctctttcctttgtgcacctgtgcccagcccatgcacaacgcagagctgacaccaagtgagcatctgtcactaagtgaggcaggcaaatgaggtaacactc

SEQ ID NO: 8345 - DNA, 122 bp, Homo sapiens
  misc_feature (61)..(62): /note="This region represents a CpG dinucleotide"
  misc_feature (61)..(61): /note="Nucleotide may be methylated to form 5-methylcytosine"
gaataagatatactttgtacttaccttgtaattaccaggagaacttccctgcagacaaagcgtgtataaatgaatagctacaacagatggcataagcctaagcttcttgttacaaatgtcac

SEQ ID NO: 8346 - DNA, 122 bp, Homo sapiens
  misc_feature (61)..(62): /note="This region represents a CpG dinucleotide"
  misc_feature (61)..(61): /note="Nucleotide may be methylated to form 5-methylcytosine"
acttctctgccacttggtggtgggtgaagataatccctctcatgattaagaatacggtaacgatgaatgacagagccttgggagaagccttgggagaattaaaaactaaaaactttaaaaaa

SEQ ID NO: 8347 - DNA, 122 bp, Homo sapiens
  misc_feature (61)..(62): /note="This region represents a CpG dinucleotide"
  misc_feature (61)..(61): /note="Nucleotide may be methylated to form 5-methylcytosine"
tgagagtcacccatcaccatccatctggtggaaacattacaggagcaagtggataaaagacgattttgctgtaagatcagaacggaaaaagacgagcccacaaagaaaatctagagggagga

SEQ ID NO: 8348 - DNA, 122 bp, Homo sapiens
  misc_feature (61)..(62): /note="This region represents a CpG dinucleotide"
  misc_feature (61)..(61): /note="Nucleotide may be methylated to form 5-methylcytosine"
aaagtggcttgaggtctcagaggcagctctctcagcctgtaccctccatcctttcattcacgtccatgtagacattatcactcagggaagtgagtgttccatactggggaagtccccttggg

SEQ ID NO: 8349 - DNA, 122 bp, Homo sapiens
  misc_feature (61)..(62): /note="This region represents a CpG dinucleotide"
  misc_feature (61)..(61): /note="Nucleotide may be methylated to form 5-methylcytosine"
gaaatccattaacgagctcctgggctgggcacgtggtgtgaggtaaccgatcacttctgtcgtctgaaactttggagacattgattttcagactcacaggcgcgactgagaagtgaggctcg

SEQ ID NO: 8350 - DNA, 122 bp, Homo sapiens
  misc_feature (61)..(62): /note="This region represents a CpG dinucleotide"
  misc_feature (61)..(61): /note="Nucleotide may be methylated to form 5-methylcytosine"
ttctaatacaggactcaagctaaacgttacatcacatgacatgatttctaagggacactacgtcacatttaggtgtcaggtcaggctcttggtgacacaccattgaactagattgcacaagg

SEQ ID NO: 8351 - DNA, 122 bp, Homo sapiens
  misc_feature (61)..(62): /note="This region represents a CpG dinucleotide"
  misc_feature (61)..(61): /note="Nucleotide may be methylated to form 5-methylcytosine"
caagtattgtttgttgttcctcctaagtatctttcaaatcaaccgctttgtctctccttacgtagacactattttgcaattcttgattgggcaatttagcagcctcctaaaccagtcactcc

SEQ ID NO: 8352 - DNA, 122 bp, Homo sapiens
  misc_feature (61)..(62): /note="This region represents a CpG dinucleotide"
  misc_feature (61)..(61): /note="Nucleotide may be methylated to form 5-methylcytosine"
ctccagctgtgcgacagccaaggctacactgtttggctcacatacttccttattttgttccgcatgagaaaaagggcagaaggagccatgtggggtcactcaggagactgagggtgcaccag

SEQ ID NO: 8353 - DNA, 122 bp, Homo sapiens
  misc_feature (61)..(62): /note="This region represents a CpG dinucleotide"
  misc_feature (61)..(61): /note="Nucleotide may be methylated to form 5-methylcytosine"
tgacattttgtttcattaaagaagctaatagtcaaaccaagaacttccagctaatcattccgtgtcttctcacacggagtgcttctgaaccagttttttcacctcctgttcttatacatttg

SEQ ID NO: 8354 - DNA, 122 bp, Homo sapiens
  misc_feature (61)..(62): /note="This region represents a CpG dinucleotide"
  misc_feature (61)..(61): /note="Nucleotide may be methylated to form 5-methylcytosine"
ctgggaggggaccaggcagccttcctggaagaggtggcagctcaggttggccctgaagggcgggcaggagttcgccaggcagaaggcatttggaggtgaggaggtgggcgtgtttttagatt

SEQ ID NO: 8355 - DNA, 122 bp, Homo sapiens
  misc_feature (61)..(62): /note="This region represents a CpG dinucleotide"
  misc_feature (61)..(61): /note="Nucleotide may be methylated to form 5-methylcytosine"
caacgattaaaaactaatactgagtgcttactctggtactgtgctgaaaactttaaatcccgtcaaactccctcaacaaccctatgattcaggtattattactatgttcattttgcagtggg

SEQ ID NO: 8356 - DNA, 122 bp, Homo sapiens
  misc_feature (61)..(62): /note="This region represents a CpG dinucleotide"
  misc_feature (61)..(61): /note="Nucleotide may be methylated to form 5-methylcytosine"
cagatgattttgtgattaaatacggcttctgattacttcctttcactcgtcttaggtcatcgtccactcaacctgccagtgcatctagatgactcatacatttatgctcttctgcccatttc

SEQ ID NO: 8357 - DNA, 122 bp, Homo sapiens
  misc_feature (61)..(62): /note="This region represents a CpG dinucleotide"
  misc_feature (61)..(61): /note="Nucleotide may be methylated to form 5-methylcytosine"
gaaagggcctccaagttaatggtggcatgaataattcaccggcccctagaattagtaagccgatccctgggtacttcctttactcactgtaaagtgacggatctggtgtcaccaggtttaca

SEQ ID NO: 8358 - DNA, 122 bp, Homo sapiens
  misc_feature (61)..(62): /note="This region represents a CpG dinucleotide"
  misc_feature (61)..(61): /note="Nucleotide may be methylated to form 5-methylcytosine"
gttaggaaagacaagttctggcctacaaaggcacaaaaaggggagttatgatctggtttgcgatgctcagggaagaggcatttaacctcagcctgagtaatgaagaagtctaactccagggg

SEQ ID NO: 8359 - DNA, 122 bp, Homo sapiens
  misc_feature (61)..(62): /note="This region represents a CpG dinucleotide"
  misc_feature (61)..(61): /note="Nucleotide may be methylated to form 5-methylcytosine"
gtggggaatctgtggaaggagcgggctgccctcccagaaagcgtgagttctcaggtgtggcgtctggccatctcctgcggcaggtggagtgctcctcctggctatgcttctcccaggcctca

SEQ ID NO: 8360 - DNA, 122 bp, Homo sapiens
  misc_feature (61)..(62): /note="This region represents a CpG dinucleotide"
  misc_feature (61)..(61): /note="Nucleotide may be methylated to form 5-methylcytosine"
gggattttgctccagtattcactgtgagaaccaggtcaagctcctggaggtaaaaattcacgcaagtatggggccccagtgactgagtcatcctggagtttttaactttactctaaaagttg

SEQ ID NO: 8361 - DNA, 122 bp, Homo sapiens
  misc_feature (61)..(62): /note="This region represents a CpG dinucleotide"
  misc_feature (61)..(61): /note="Nucleotide may be methylated to form 5-methylcytosine"
ttctggaatttggcccaagacatcaccaggaatgaatcaccagtcaccattacctgtcaccgatgattttgcaaattgcagttttgctcaagaaagggaatgtcctgaatatggttttcttt

SEQ ID NO: 8362 - DNA, 122 bp, Homo sapiens
  misc_feature (61)..(62): /note="This region represents a CpG dinucleotide"
  misc_feature (61)..(61): /note="Nucleotide may be methylated to form 5-methylcytosine"
gctggagagtggcttcttagtattcttgcacagcaggtccgagtggcatccagactcaaacgggccgtgctcaggcccaacgctggcatgattcttgagtcattaggaaggattccttactg

SEQ ID NO: 8363 - DNA, 122 bp, Homo sapiens
  misc_feature (61)..(62): /note="This region represents a CpG dinucleotide"
  misc_feature (61)..(61): /note="Nucleotide may be methylated to form 5-methylcytosine"
ttttgaaaatacctcaaacaacatatataaatcagaccaaggatattaatctcaggccaccgccatagtgaggctttgaagccaggggaaggtggtgagaccttcttgtttgttaaggaaga

SEQ ID NO: 8364 - DNA, 122 bp, Homo sapiens
  misc_feature (61)..(62): /note="This region represents a CpG dinucleotide"
  misc_feature (61)..(61): /note="Nucleotide may be methylated to form 5-methylcytosine"
cagcagtcttttgcaaagcctttcaaatgccccacagtcctgagcagagttcatatggaacgtggccttgtccaggttgccttgaccgcagtgactttcctcatgctctttcctctgctcta

SEQ ID NO: 8365 - DNA, 122 bp, Homo sapiens
  misc_feature (61)..(62): /note="This region represents a CpG dinucleotide"
  misc_feature (61)..(61): /note="Nucleotide may be methylated to form 5-methylcytosine"
ctatgactattttgctgcatttcccttcagtgcctttacttttttctttgtattatgttgcgcaggttatttagaacctttcttgtcagcctttccccacctgccaccaaccttctctttcc

SEQ ID NO: 8366 - DNA, 122 bp, Homo sapiens
  misc_feature (61)..(62): /note="This region represents a CpG dinucleotide"
  misc_feature (61)..(61): /note="Nucleotide may be methylated to form 5-methylcytosine"
gtgaattttctaaaaattagtcctggttcagacaaaccactgcacccagtgcttggtcaacgtattaggattattaaagtcacagatgactttgacactctaggatctagaattatgtaatg

SEQ ID NO: 8367 - DNA, 122 bp, Homo sapiens
  misc_feature (61)..(62): /note="This region represents a CpG dinucleotide"
  misc_feature (61)..(61): /note="Nucleotide may be methylated to form 5-methylcytosine"
gagctggcctttcctgaatttctccatcttatcctgcttaatctcatcagaggacctttgcgtgcaaagctacctctaaaatattctctgtctagtcaaacctattcccagctcaagtgaca

SEQ ID NO: 8368 - DNA, 122 bp, Homo sapiens
  misc_feature (61)..(62): /note="This region represents a CpG dinucleotide"
  misc_feature (61)..(61): /note="Nucleotide may be methylated to form 5-methylcytosine"
tacagtcttatgatagacgtgcttctcaaacataaatgtgcacacgaatcgcctgggaatcgtattaacatgcagattctgattcactgggcctgggaggagcctgaggttctgcagttcta

SEQ ID NO: 8369 - DNA, 122 bp, Homo sapiens
  misc_feature (61)..(62): /note="This region represents a CpG dinucleotide"
  misc_feature (61)..(61): /note="Nucleotide may be methylated to form 5-methylcytosine"
tcagcatccctccaggctgtaactcctggaaacctcaggtggagattcctggcagcagtgcgtggcctgaagatctctgcagggtaatttctacagtctctgtcactgactatgacagtgca

SEQ ID NO: 8370 - DNA, 122 bp, Homo sapiens
  misc_feature (61)..(62): /note="This region represents a CpG dinucleotide"
  misc_feature (61)..(61): /note="Nucleotide may be methylated to form 5-methylcytosine"
gtggggacagacacgcacagaaatcagcatagcctcgagataaatgcagttgtttctcttcgtggacaaaggcgttcgattttccagaggaggccaagaatgggagccgtgggtccgtagct

SEQ ID NO: 8371 - DNA, 122 bp, Homo sapiens
  misc_feature (61)..(62): /note="This region represents a CpG dinucleotide"
  misc_feature (61)..(61): /note="Nucleotide may be methylated to form 5-methylcytosine"
accagcacacaaggaagggagtgaccacacaggctgacgtaattgaccctgatcataaggcgataaggctgtgtaatgctgtgagggcagagaagaatttcaaattcatgtaatccactgag

SEQ ID NO: 8372 - DNA, 122 bp, Homo sapiens
  misc_feature (61)..(62): /note="This region represents a CpG dinucleotide"
  misc_feature (61)..(61): /note="Nucleotide may be methylated to form 5-methylcytosine"
gtatttcttcatggcccagaaaaactcctatgtaacttcccttagagaaatgaaactgaacgggaagcagaagtagttactggatgatgttggacctgggaattctgaatgagtcagttcaa

SEQ ID NO: 8373 - DNA, 122 bp, Homo sapiens
  misc_feature (61)..(62): /note="This region represents a CpG dinucleotide"
  misc_feature (61)..(61): /note="Nucleotide may be methylated to form 5-methylcytosine"
gaaaccagacaagctagagttgtcaccacaccctggactcagagaacttgggtacttcaccgacggccacctcccatcgccctttcattcttcatgggcagggccttgcaagccttggtgat

SEQ ID NO: 8374 - DNA, 122 bp, Homo sapiens
  misc_feature (61)..(62): /note="This region represents a CpG dinucleotide"
  misc_feature (61)..(61): /note="Nucleotide may be methylated to form 5-methylcytosine"
aggtgatccacccgtcttggcctcccaaagtgctgggattacaggcatgagccactgcgccggaccagagttgggtttagattacagaatgaggaattcagattagatttaagaggggttgg

SEQ ID NO: 8375 - DNA, 122 bp, Homo sapiens
  misc_feature (61)..(62): /note="This region represents a CpG dinucleotide"
  misc_feature (61)..(61): /note="Nucleotide may be methylated to form 5-methylcytosine"
agtagaattatagcgttctcagctcccacacagtggcacacccctgagaaggttgagtcacgacctgtcatccgctgatcctagttaatgcatggtccccgcacagccaggcttaccttctg

SEQ ID NO: 8376 - DNA, 122 bp, Homo sapiens
  misc_feature (61)..(62): /note="This region represents a CpG dinucleotide"
  misc_feature (61)..(61): /note="Nucleotide may be methylated to form 5-methylcytosine"
cctctgtcttcccagaatgccatgcccagtctcatctttgatcgggtaaaacccaggctacggaggcactttgtaaattgtaaagtactttacagacttaaaggattaatagagtagtagta

SEQ ID NO: 8377 - DNA, 122 bp, Homo sapiens
  misc_feature (61)..(62): /note="This region represents a CpG dinucleotide"
  misc_feature (61)..(61): /note="Nucleotide may be methylated to form 5-methylcytosine"
ccatggctcaatctgattagatcatggcttataccatgtatctacttcttaattctgttccggttctttggtctgagcatttaggttgcgcctgtggttgcatgcttggttcttctgggcac

SEQ ID NO: 8378 - DNA, 122 bp, Homo sapiens
  misc_feature (61)..(62): /note="This region represents a CpG dinucleotide"
  misc_feature (61)..(61): /note="Nucleotide may be methylated to form 5-methylcytosine"
gttgaaattgtaatgcatgacctggatttcctctcaataaggcctgtgatcagtgactgccgaaatggggagctgagggatgttgttcttttctttcccattgtcagtgatactgattgcca

SEQ ID NO: 8379 - DNA, 122 bp, Homo sapiens
  misc_feature (61)..(62): /note="This region represents a CpG dinucleotide"
  misc_feature (61)..(61): /note="Nucleotide may be methylated to form 5-methylcytosine"
gtgacatcatgtaactactaagagtaggtcacagaaagcacagcttccgccttgcttgctcgctcactcttgaatcaccagctgccatgtaacagcctgacttcctggagcctgccattttg

SEQ ID NO: 8380 - DNA, 122 bp, Homo sapiens
  misc_feature (61)..(62): /note="This region represents a CpG dinucleotide"
  misc_feature (61)..(61): /note="Nucleotide may be methylated to form 5-methylcytosine"
ttcagctgggcttatggggcacggagtgacaaaagtgctaagttacctccgatgaggcaacgtgtgggcctttgtatccattagtgaccattcatttgatggtgcctgacctcagggaaggg

SEQ ID NO: 8381 - DNA, 122 bp, Homo sapiens
  misc_feature (61)..(62): /note="This region represents a CpG dinucleotide"
  misc_feature (61)..(61): /note="Nucleotide may be methylated to form 5-methylcytosine"
tttcttctggcagcactcccagaaactaaggtaaagtctccgttattcctgagggggatccggatggcttatcatgtccatcacactccacaatgctatataataccataaaactttgcaaa

SEQ ID NO: 8382 - DNA, 122 bp, Homo sapiens
  misc_feature (61)..(62): /note="This region represents a CpG dinucleotide"
  misc_feature (61)..(61): /note="Nucleotide may be methylated to form 5-methylcytosine"
gcacgggaagcggaaacgaggccggccccgaaagctgagcaaagagtactgggactgtctcgagggcaagaagagcaagcacggtgagctccgggggcacgtgggtcctccctgcgccgggc

SEQ ID NO: 8383 - DNA, 122 bp, Homo sapiens
  misc_feature (61)..(62): /note="This region represents a CpG dinucleotide"
  misc_feature (61)..(61): /note="Nucleotide may be methylated to form 5-methylcytosine"
tacaaatgaaagagcactaatgcctacattaacacctgtttgtcattatcttcaatttaacggctttatttcagacacgaagtatctgacaaattatccatccaaattcactggtcaggaca

SEQ ID NO: 8384 - DNA, 122 bp, Homo sapiens
  misc_feature (61)..(62): /note="This region represents a CpG dinucleotide"
  misc_feature (61)..(61): /note="Nucleotide may be methylated to form 5-methylcytosine"
aggttagcattcatttccacaggcatccatataggcctatggctagaacacctgtgtcttcggtcagtggtgtcaattgtgaccatctcattattatgaaagcatgtgtcacctatgccttt

SEQ ID NO: 8385 - DNA, 122 bp, Homo sapiens
  misc_feature (61)..(62): /note="This region represents a CpG dinucleotide"
  misc_feature (61)..(61): /note="Nucleotide may be methylated to form 5-methylcytosine"
aacctttcctagatgtcaaccccaggctaccctgatggctgtccccaccttgagtcactgcgtggcacttgcgtgtgccatcccaggaggcccttgctcactgctgtcacactttcttgact

SEQ ID NO: 8386 - DNA, 122 bp, Homo sapiens
  misc_feature (61)..(62): /note="This region represents a CpG dinucleotide"
  misc_feature (61)..(61): /note="Nucleotide may be methylated to form 5-methylcytosine"
tataacataaaatcaaccatttaaaagtgaatgattcagcggcagttaacacattcacaacgttttgcaaccactatttccatctagttccaaaacattttcatcactccaaagggaaaccc

SEQ ID NO: 8387 - DNA, 122 bp, Homo sapiens
  misc_feature (61)..(62): /note="This region represents a CpG dinucleotide"
  misc_feature (61)..(61): /note="Nucleotide may be methylated to form 5-methylcytosine"
ctctggtgatctgcctgcctcagcctcccaaagtgctgggattataggtgtgagccactgcgtccggcatgtgtcagatttttaaatggcactttttatgtagcaatataaatttttttaaa

SEQ ID NO: 8388 - DNA, 122 bp, Homo sapiens
  misc_feature (61)..(62): /note="This region represents a CpG dinucleotide"
  misc_feature (61)..(61): /note="Nucleotide may be methylated to form 5-methylcytosine"
tgattttgctgaacaagaggtatatgtaggtgaggggagcagcgggtaggagtggacccacggaagtggtgggaaataagcctgaataatagacacaaatggcctattgtgcgagtgtggct

SEQ ID NO: 8389 - DNA, 122 bp, Homo sapiens
  misc_feature (61)..(62): /note="This region represents a CpG dinucleotide"
  misc_feature (61)..(61): /note="Nucleotide may be methylated to form 5-methylcytosine"
aaagctctatgagatccgaatgagcagcatccggcctcagagctaatctgtcagattttgcgtctgagtcagaacttactggttattaatgctgtctgtctttgtggccaagagtctagcaa

SEQ ID NO: 8390 - DNA, 122 bp, Homo sapiens
  misc_feature (61)..(62): /note="This region represents a CpG dinucleotide"
  misc_feature (61)..(61): /note="Nucleotide may be methylated to form 5-methylcytosine"
tcatctctgacgcttactggcttgagtcagccctttctgtcgcataccgtgcagcttgcccgaggctgcccaggtttctgcactgagagtcccaaacaaactgggcagttggtgaatgagct

SEQ ID NO: 8391 - DNA, 122 bp, Homo sapiens
  misc_feature (61)..(62): /note="This region represents a CpG dinucleotide"
  misc_feature (61)..(61): /note="Nucleotide may be methylated to form 5-methylcytosine"
aattagtctgaatgctacatctggcatggttacatcatttgaactctctgacaacactaacgaccaatctggagaacaggaatctgagtatgaacaagaacaaggagaggatgaactggttt

SEQ ID NO: 8392 - DNA, 122 bp, Homo sapiens
  misc_feature (61)..(62): /note="This region represents a CpG dinucleotide"
  misc_feature (61)..(61): /note="Nucleotide may be methylated to form 5-methylcytosine"
tattcttgcacagcaggtccgagtggcatccagactcaaacgggccgtgctcaggcccaacgctggcatgattcttgagtcattaggaaggattccttactgtggagacccctgtcttctgg

SEQ ID NO: 8393 - DNA, 122 bp, Homo sapiens
  misc_feature (61)..(62): /note="This region represents a CpG dinucleotide"
  misc_feature (61)..(61): /note="Nucleotide may be methylated to form 5-methylcytosine"
ctccagttgtgtgactgatttcactgcgtggctaactccactgttgcctgactccagctgcgtgacttcagctgtgtgactccatgtatgtgaccctagctgtgtgactccaactttcagtt

SEQ ID NO: 8394 - DNA, 122 bp, Homo sapiens
  misc_feature (61)..(62): /note="This region represents a CpG dinucleotide"
  misc_feature (61)..(61): /note="Nucleotide may be methylated to form 5-methylcytosine"
aacaggcagaacctgccgctgggggactgtccctgctctggcagccgcatgaagacacaccgagcgagacacactgctgagcgtatctgcgtatttcagcatttgtcagctaaccgtgtctc

SEQ ID NO: 8395 - DNA, 122 bp, Homo sapiens
  misc_feature (61)..(62): /note="This region represents a CpG dinucleotide"
  misc_feature (61)..(61): /note="Nucleotide may be methylated to form 5-methylcytosine"
gatgaggaaattgtaggctccacccctgaggacaatagcggactgagatagcttaggaggcggtgaattcatgagcagcacaggtctttagcagaaacaagttgactgctggttgtgatgtt

SEQ ID NO: 8396 - DNA, 122 bp, Homo sapiens
  misc_feature (61)..(62): /note="This region represents a CpG dinucleotide"
  misc_feature (61)..(61): /note="Nucleotide may be methylated to form 5-methylcytosine"
cagtagagatcccaggtagagcaatttacctgcacattgttgccagggaacaagggaaggcgagtcaaactatttggggatttagctgagctttgaaataactgaaaagctatgcttcaatt

SEQ ID NO: 8397 - DNA, 122 bp, Homo sapiens
  misc_feature (61)..(62): /note="This region represents a CpG dinucleotide"
  misc_feature (61)..(61): /note="Nucleotide may be methylated to form 5-methylcytosine"
agcaagggtgtggctttgtccccgcactcagctcttcctaccctccctactcttggttagcggaatctgcccttgtggcctaatttgcaatttctcgtgtgtccaggttctccccgccacat

SEQ ID NO: 8398 - DNA, 122 bp, Homo sapiens
  misc_feature (61)..(62): /note="This region represents a CpG dinucleotide"
  misc_feature (61)..(61): /note="Nucleotide may be methylated to form 5-methylcytosine"
tggctcagtctaagccttgacttaattctagaaacccagagctcagcactgtgcctcatacgtaaatactctgtaaatgttagcaaatgatattagggtatgatgtgccaaggcaaactggt

SEQ ID NO: 8399 - DNA, 122 bp, Homo sapiens
  misc_feature (61)..(62): /note="This region represents a CpG dinucleotide"
  misc_feature (61)..(61): /note="Nucleotide may be methylated to form 5-methylcytosine"
gtaagcctttcatccttgcttaatcctaaaaccctacatttaagtacacggcaaagaaaacgtacaatgcaaaggcaagggcatgcttgaagaatgcaaagcagcaaaggattctcaagaaa

SEQ ID NO: 8400 - DNA, 122 bp, Homo sapiens
  misc_feature (61)..(62): /note="This region represents a CpG dinucleotide"
  misc_feature (61)..(61): /note="Nucleotide may be methylated to form 5-methylcytosine"
tctttctctctaccactgactcacagagtttgaggttcaatttcacctccctctgagagccgcttgtcttcaagtcccagttcacagccacccatcccgggagccccacccctgttccgcat

SEQ ID NO: 8401 - DNA, 122 bp, Homo sapiens
  misc_feature (61)..(62): /note="This region represents a CpG dinucleotide"
  misc_feature (61)..(61): /note="Nucleotide may be methylated to form 5-methylcytosine"
gaccatcttctggttcattgtgagggtctcattaattcccatgaactcattcaaccaacacgtgcttgttgggctggtacagaagatgaacaaaggcagaggacacagattcaccatgattt

SEQ ID NO: 8402 - DNA, 122 bp, Homo sapiens
  misc_feature (61)..(62): /note="This region represents a CpG dinucleotide"
  misc_feature (61)..(61): /note="Nucleotide may be methylated to form 5-methylcytosine"
ggtagcaacagtcagaggtcattctcagcagggattcactgactgcttaagctggatgagcgaccagggtgtgaccgtgtaagcatccggcaccaacagtccataggaactgtgtcgaaaca

SEQ ID NO: 8403 - DNA, 122 bp, Homo sapiens
  misc_feature (61)..(62): /note="This region represents a CpG dinucleotide"
  misc_feature (61)..(61): /note="Nucleotide may be methylated to form 5-methylcytosine"
ttccatttactgagctagtgactctgctgcagctgctttgggtgttggctcctgaaggcccgcaaatgcctctacttctgaggaaattgccctgtgctaataggggagacacctcacccagg

SEQ ID NO: 8404 - DNA, 122 bp, Homo sapiens
  misc_feature (61)..(62): /note="This region represents a CpG dinucleotide"
  misc_feature (61)..(61): /note="Nucleotide may be methylated to form 5-methylcytosine"
gctggtgactggtcatgcaccattggcagggcctggagcacgtgcaaggaacagagttcccggctctgcacactcaacatgtgtgtttcatactgtcacctggctggctcctctttctgggt

SEQ ID NO: 8405 - DNA, 122 bp, Homo sapiens
  misc_feature (61)..(62): /note="This region represents a CpG dinucleotide"
  misc_feature (61)..(61): /note="Nucleotide may be methylated to form 5-methylcytosine"
ctgatcccttctgtgtttcccaagcttgcccaactagagaaaggagtactacagttgaggcggtgctcattgctgtgtcctccccacatgaccaagtggaatttctcaagagcaaggtcaaa

SEQ ID NO: 8406 - DNA, 122 bp, Homo sapiens
  misc_feature (61)..(62): /note="This region represents a CpG dinucleotide"
  misc_feature (61)..(61): /note="Nucleotide may be methylated to form 5-methylcytosine"
ggaatcagacaattaaaaaggagtgactttagtaaggcatgaatgaggtcacaggtaatgcgggtcagatcatgtagggctttgttgtaagtcattaataggtcattgaaaggactttagct

SEQ ID NO: 8407 - DNA, 122 bp, Homo sapiens
  misc_feature (61)..(62): /note="This region represents a CpG dinucleotide"
  misc_feature (61)..(61): /note="Nucleotide may be methylated to form 5-methylcytosine"
gagcacagaaatgtaatccagtttctgtgcccatttctgatttgagttctcacaagtgtacgcatgagtttattgaggctcagctgtacaaaaaatctagtcatcatacccaaatgtcatgg

SEQ ID NO: 8408 - DNA, 122 bp, Homo sapiens
  misc_feature (61)..(62): /note="This region represents a CpG dinucleotide"
  misc_feature (61)..(61): /note="Nucleotide may be methylated to form 5-methylcytosine"
aaagttcagaaaaggcagagtttcttctggcgagtcattcctttctttggctctgtgacccgccctttaggagcatcgtgcagatggactggcttgtccacctggtggccctatcagggtat

SEQ ID NO: 8409 - DNA, 122 bp, Homo sapiens
  misc_feature (61)..(62): /note="This region represents a CpG dinucleotide"
  misc_feature (61)..(61): /note="Nucleotide may be methylated to form 5-methylcytosine"
ttaagaaacctgggttacatcatcacggttctgccatttagtggcaacttaaattgaggacggctaagtcaacttaattgaggactgagaatttagcaactcagaggttagcagtaactttg

SEQ ID NO: 8410 - DNA, 122 bp, Homo sapiens
  misc_feature (61)..(62): /note="This region represents a CpG dinucleotide"
  misc_feature (61)..(61): /note="Nucleotide may be methylated to form 5-methylcytosine"
tcctctttgtcgctgagaatatttcgttgtgtggatctaccagtgtgtttatcccttccccgctcaggcctgtttgggtggtttccagtttggggcgatgacaaatacaggcactaacaaac

SEQ ID NO: 8411 - DNA, 122 bp, Homo sapiens
  misc_feature (61)..(62): /note="This region represents a CpG dinucleotide"
  misc_feature (61)..(61): /note="Nucleotide may be methylated to form 5-methylcytosine"
ctatgtcttcccttctcttgagccatgagttgccacatccacgagcatgcccctgggacacgtgcacaaagagcctgtgcatctgaagctttcacagtgttttgcagagtaggcagttgagc

SEQ ID NO: 8412 - DNA, 122 bp, Homo sapiens
  misc_feature (61)..(62): /note="This region represents a CpG dinucleotide"
  misc_feature (61)..(61): /note="Nucleotide may be methylated to form 5-methylcytosine"
ccctcccagctacaggcatcctaagtcttcccctacttgggactacaggaaggatggtaccgagacagagagtatgtgactcagagcttacacagttcaaggggcaagacaggagccagaca

SEQ ID NO: 8413 - DNA, 122 bp, Homo sapiens
  misc_feature (61)..(62): /note="This region represents a CpG dinucleotide"
  misc_feature (61)..(61): /note="Nucleotide may be methylated to form 5-methylcytosine"
atggttgattctaccttcagccccacatttaaaagtacagtgtaaacacagctaagggaccgcctccttcaaattacacacaaggcacacctactaataggagatgttgtgaaagccaggtg

SEQ ID NO: 8414 - DNA, 122 bp, Homo sapiens
  misc_feature (61)..(62): /note="This region represents a CpG dinucleotide"
  misc_feature (61)..(61): /note="Nucleotide may be methylated to form 5-methylcytosine"
tctcacacctcacgaagacccgcagatgccacaaactaactgctggactgcagcgaaacccgacccctgtttggaggcactccaggtttccggaggattgtcatctccatagctgcggcaag

SEQ ID NO: 8415 - DNA, 122 bp, Homo sapiens
  misc_feature (61)..(62): /note="This region represents a CpG dinucleotide"
  misc_feature (61)..(61): /note="Nucleotide may be methylated to form 5-methylcytosine"
agcaatgagcacctcctagtgatccaagcactgcccctcctacccacataagcagtaagacgatccaggaggaggcgtaactagttaggacaagaaggaaggtgttttgttttgttttttaa

SEQ ID NO: 8416 - DNA, 122 bp, Homo sapiens
  misc_feature (61)..(62): /note="This region represents a CpG dinucleotide"
  misc_feature (61)..(61): /note="Nucleotide may be methylated to form 5-methylcytosine"
gtctgggtgtgtctgcttctcttcatgattggattcaggtcatgcattcttgggcatcagcgccattgacttggtgtgttgttccccatgcatcagatcagatgtcctgtgccatctgtcct

SEQ ID NO: 8417 - DNA, 122 bp, Homo sapiens
  misc_feature (61)..(62): /note="This region represents a CpG dinucleotide"
  misc_feature (61)..(61): /note="Nucleotide may be methylated to form 5-methylcytosine"
ctgtaagatgggcgaggccaaggaagagtcatttcctccatggtgaagaacataatgctacgcaacttcaagcaaattaaaaaacagttgtggttggccaggcatggtggctcacacctgta

SEQ ID NO: 8418 - DNA, 122 bp, Homo sapiens
  misc_feature (61)..(62): /note="This region represents a CpG dinucleotide"
  misc_feature (61)..(61): /note="Nucleotide may be methylated to form 5-methylcytosine"
cactaactacaaagaaatgaaatggaggctgtttctgccagcagaagattcccctcctaccgccctgcccaagaacctcacctgcatcagctatttctcccataccactgtctgcatgtttc

SEQ ID NO: 8419 - DNA, 122 bp, Homo sapiens
  misc_feature (61)..(62): /note="This region represents a CpG dinucleotide"
  misc_feature (61)..(61): /note="Nucleotide may be methylated to form 5-methylcytosine"
ccccccttagccaacacaaagaagccctggggctgtgaacagccttgcctgcttggagaccgaccctcttaccaaggaaacaggagctcagcatggtgtacctccagctcctgggacttgtt

SEQ ID NO: 8420 - DNA, 122 bp, Homo sapiens
  misc_feature (61)..(62): /note="This region represents a CpG dinucleotide"
  misc_feature (61)..(61): /note="Nucleotide may be methylated to form 5-methylcytosine"
ttagtcactgtgtttctgcttacagtatgtgaaatactctcaccagaacaaaggtcccagcgtcaataagtcaaaccgcagactctgacagctgagtgaatagcagaggccagagtccactt

SEQ ID NO: 8421 - DNA, 122 bp, Homo sapiens
  misc_feature (61)..(62): /note="This region represents a CpG dinucleotide"
  misc_feature (61)..(61): /note="Nucleotide may be methylated to form 5-methylcytosine"
tcctacagctctttgttggttgttttgctggcactcaccaggaagcagagttcaccctggcggaagaggtttgagccctctccagcgcaggcagctgtgttcaggacctctggagaatgcag

SEQ ID NO: 8422 - DNA, 122 bp, Homo sapiens
  misc_feature (61)..(62): /note="This region represents a CpG dinucleotide"
  misc_feature (61)..(61): /note="Nucleotide may be methylated to form 5-methylcytosine"
tcagaaatggacatgtgacccaatcaaagccagagatgcagaaactcttgctgggactttcggagaaaagactcactctcaactcctcaaagttgggtggatgtgaggccagagttgctgtt

SEQ ID NO: 8423 - DNA, 122 bp, Homo sapiens
  misc_feature (61)..(62): /note="This region represents a CpG dinucleotide"
  misc_feature (61)..(61): /note="Nucleotide may be methylated to form 5-methylcytosine"
gatgtgtcaccgccttgtcagacgagtgcatgacagagacttgggtgcattttctttgtgcgtggggtgaatggcagtgttggtagtgtgtttggcttggctctcacacaggagattcacct

SEQ ID NO: 8424 - DNA, 122 bp, Homo sapiens
  misc_feature (61)..(62): /note="This region represents a CpG dinucleotide"
  misc_feature (61)..(61): /note="Nucleotide may be methylated to form 5-methylcytosine"
ggatgttcttctttgctgtaaagtcactcactggatgagtattaaagaaagccttgtggccgggcgtggtggcttatgcctataatcccagcactttggaaggccaaggcgggtggatcact

SEQ ID NO: 8425 - DNA, 122 bp, Homo sapiens
  misc_feature (61)..(62): /note="This region represents a CpG dinucleotide"
  misc_feature (61)..(61): /note="Nucleotide may be methylated to form 5-methylcytosine"
tgacctcgtgatctgcccgcctcagcctcccaaagtgctgggattacaggcatgagccaccgtgcctggccacatttctgtatatcttgcaagcagacacactgtctgtcttttatttgatc

SEQ ID NO: 8426 - DNA, 122 bp, Homo sapiens
  misc_feature (61)..(62): /note="This region represents a CpG dinucleotide"
  misc_feature (61)..(61): /note="Nucleotide may be methylated to form 5-methylcytosine"
agaagccaacagctcacctgtgataaatcagcccattgaaggtcaatgcagtgaagtaaacggggttcgcataactgcgaatgtgcaactgcacaaactcaaggaagcaattttcagtgaca

SEQ ID NO: 8427 - DNA, 122 bp, Homo sapiens
  misc_feature (61)..(62): /note="This region represents a CpG dinucleotide"
  misc_feature (61)..(61): /note="Nucleotide may be methylated to form 5-methylcytosine"
cttatcctgccttatatgtcaataaccttaatttaccttctgatcatctccttggctgcccgtgctgtctgaaaatcagccttttcttaaaatggcaaatagtggggaaaagtagcatctaa

SEQ ID NO: 8428 - DNA, 122 bp, Homo sapiens
  misc_feature (61)..(62): /note="This region represents a CpG dinucleotide"
  misc_feature (61)..(61): /note="Nucleotide may be methylated to form 5-methylcytosine"
gattcagagggtgacactacacacgcagccggtttgctgcggaggaacacggggctggggcgtctgctgcttttagagcaggcctgccctttgtccaggagggaggtatcgctgtatcctcc

SEQ ID NO: 8429 - DNA, 122 bp, Homo sapiens
  misc_feature (61)..(62): /note="This region represents a CpG dinucleotide"
  misc_feature (61)..(61): /note="Nucleotide may be methylated to form 5-methylcytosine"
ggtccaacattatttcctgaaatgagcttttctttttctttcttttgtcagacaggatctcgctctctggcccaggcaggagggcagtggtgcaatctcggctcactgcaacttccgcctct

SEQ ID NO: 8430 - DNA, 122 bp, Homo sapiens
  misc_feature (61)..(62): /note="This region represents a CpG dinucleotide"
  misc_feature (61)..(61): /note="Nucleotide may be methylated to form 5-methylcytosine"
tgctggcttcgtgtgaggtcatctatgtgcatggaccggcccctagaatcctccccagcccggttcacagatgacaaacctgaggcaagaaggctcataggtcaatgcagccaggaggggtc

SEQ ID NO: 8431 - DNA, 122 bp, Homo sapiens
  misc_feature (61)..(62): /note="This region represents a CpG dinucleotide"
  misc_feature (61)..(61): /note="Nucleotide may be methylated to form 5-methylcytosine"
gaatctctgtcactggggcaagaaattacagctgtgaacctgctggttagtgttctgtgccgaggccttgaacttatgattaacgtggttgacgtttctgtccagctcatcccatgctcagt

SEQ ID NO: 8432 - DNA, 122 bp, Homo sapiens
  misc_feature (61)..(62): /note="This region represents a CpG dinucleotide"
  misc_feature (61)..(61): /note="Nucleotide may be methylated to form 5-methylcytosine"
cctgtgccccaaaagggggctgaaggcgggtcctcacagcagaaaaagctccacttcctccgagctccagacagcacatctcagctgtgttgggccttacaaggctgcggtcaacaggcacc

SEQ ID NO: 8433 - DNA, 122 bp, Homo sapiens
  misc_feature (61)..(62): /note="This region represents a CpG dinucleotide"
  misc_feature (61)..(61): /note="Nucleotide may be methylated to form 5-methylcytosine"
gaattgttcagaatagtgtagcctagtggcttgtactttttcccatatgagtttctacttcgtggaaagggtttatgcacatcaagaggtatttgccaccatacatagacttgcttgctcag

SEQ ID NO: 8434 - DNA, 122 bp, Homo sapiens
  misc_feature (61)..(62): /note="This region represents a CpG dinucleotide"
  misc_feature (61)..(61): /note="Nucleotide may be methylated to form 5-methylcytosine"
ctgcatgagatgagaggccaatggagaatgttgagtaaagaactgacctgatctagtttacgttttaaacagtctattctggaatttgtgttgagaaaagctacagagggataaagaggatc

SEQ ID NO: 8435 - DNA, 122 bp, Homo sapiens
  misc_feature (61)..(62): /note="This region represents a CpG dinucleotide"
  misc_feature (61)..(61): /note="Nucleotide may be methylated to form 5-methylcytosine"
gcccactgaatcatctctaggggtgaggtcagtatcttatttttaagcagctttgaaaagcgacaggctggttctaataaaccagcttcttcaatctgcaggattttgatagaaaactccct

SEQ ID NO: 8436 - DNA, 122 bp, Homo sapiens
  misc_feature (61)..(62): /note="This region represents a CpG dinucleotide"
  misc_feature (61)..(61): /note="Nucleotide may be methylated to form 5-methylcytosine"
ctcaagtgatctgcctgccttggcctcctacagtgctgggattacaggtgtgagccaccacgcccggccctctgagtcaagatttcttagggaaactgtccaggtgtcctaagagggctctg

SEQ ID NO: 8437 - DNA, 122 bp, Homo sapiens
  misc_feature (61)..(62): /note="This region represents a CpG dinucleotide"
  misc_feature (61)..(61): /note="Nucleotide may be methylated to form 5-methylcytosine"
gctggggggacaacactctgaaactgcgtgaatatcctgttcctcatcaaattcatgaagcgctactgtctcatcatgggctggcctggctgaaataatccttgcgacagaggctgccaggc

SEQ ID NO: 8438 - DNA, 122 bp, Homo sapiens
  misc_feature (61)..(62): /note="This region represents a CpG dinucleotide"
  misc_feature (61)..(61): /note="Nucleotide may be methylated to form 5-methylcytosine"
tctggcaggaaatgagaaggtaaaaggtcagatcagagttatggtcttgtaactgcattgcgaagtgatgggtgtgaagagagggaattaagccttgaatcacagaaaggaaggctcccatc

SEQ ID NO: 8439 - DNA, 122 bp, Homo sapiens
  misc_feature (61)..(62): /note="This region represents a CpG dinucleotide"
  misc_feature (61)..(61): /note="Nucleotide may be methylated to form 5-methylcytosine"
ctagatcttctaaaatacaggatggaatatgatttcctaggagtgggaagtggtagcatccggctgagaacctaggggtggaggaataggtctgagtcagacaccatggagaatgtgatgag

SEQ ID NO: 8440 - DNA, 122 bp, Homo sapiens
  misc_feature (61)..(62): /note="This region represents a CpG dinucleotide"
  misc_feature (61)..(61): /note="Nucleotide may be methylated to form 5-methylcytosine"
tccaagtaataagagtggctaatcccaggaatgtgtcaccagaggttattttgtaatagtcgtgtgttaaattccttatttgtctatataacttctcaaatccttctgcctctacagttata

SEQ ID NO: 8441 - DNA, 122 bp, Homo sapiens
  misc_feature (61)..(62): /note="This region represents a CpG dinucleotide"
  misc_feature (61)..(61): /note="Nucleotide may be methylated to form 5-methylcytosine"
gacaaacaaacatctgctctttcattacacaaagaaatttccaagcacctccctccccctcgctcctgggatgtgtatgcttgtttattttgcaactgtatttagtcatggaatttccagaa

SEQ ID NO: 8442 - DNA, 122 bp, Homo sapiens
  misc_feature (61)..(62): /note="This region represents a CpG dinucleotide"
  misc_feature (61)..(61): /note="Nucleotide may be methylated to form 5-methylcytosine"
tctgcagcacccagcacaaagcctgagcaaggcagatgcagggaatgcttgcagcatgaacgagccaatgagtaaggcagcttcccagcagagcacatgtgaatcagcagtatttcccactc

SEQ ID NO: 8443 - DNA, 122 bp, Homo sapiens
  misc_feature (61)..(62): /note="This region represents a CpG dinucleotide"
  misc_feature (61)..(61): /note="Nucleotide may be methylated to form 5-methylcytosine"
ggcattggacttggtctttgtgggactgggatctgtgggtagaaagaatagggctgaacacgaaacatacctttctgccagagctgctgctgtgatggcgcctgggccccctgaagcctcct

SEQ ID NO: 8444 - DNA, 122 bp, Homo sapiens
  misc_feature (61)..(62): /note="This region represents a CpG dinucleotide"
  misc_feature (61)..(61): /note="Nucleotide may be methylated to form 5-methylcytosine"
gtcttctctgtgccttggtttcctcctgtataagacagggaaacagggatgctctcttcacgggtggttataggcattaagtgaatttaatggcacagcacctaggattgtgcctgacatac

SEQ ID NO: 8445 - DNA, 122 bp, Homo sapiens
  misc_feature (61)..(62): /note="This region represents a CpG dinucleotide"
  misc_feature (61)..(61): /note="Nucleotide may be methylated to form 5-methylcytosine"
gacaagtaggccaagcaggctctgactcatagaggttgctgcctgcttgtgccctgtgtgcgccttttgagtaaagagcacagtccaccaagtccagctctgcatgctcaagtgctattgaa

SEQ ID NO: 8446 - DNA, 122 bp, Homo sapiens
  misc_feature (61)..(62): /note="This region represents a CpG dinucleotide"
  misc_feature (61)..(61): /note="Nucleotide may be methylated to form 5-methylcytosine"
ctgctttgtaggggcaccccactggctgatggaaaaacttgctgaaggacgcaggttggccgtagctggtcagtaaaagcaacctgctaggtagcagagaaatatgctaaaggatgcagggc

SEQ ID NO: 8447 - DNA, 122 bp, Homo sapiens
  misc_feature (61)..(62): /note="This region represents a CpG dinucleotide"
  misc_feature (61)..(61): /note="Nucleotide may be methylated to form 5-methylcytosine"
gttgctttctagacacctcttcctgagtcacttcacccctaaaaccaaccttctctcctacgtgaagagttataaaacatggcttctgcccccgggagctcataacttagtcagagagacac

SEQ ID NO: 8448 - DNA, 122 bp, Homo sapiens
  misc_feature (61)..(62): /note="This region represents a CpG dinucleotide"
  misc_feature (61)..(61): /note="Nucleotide may be methylated to form 5-methylcytosine"
atttgccatctaaccttaatgactgactgtagtctccctggagatgggattcacaactcacgtgccacttctgccaggagaagtatgccttttcctcaattagaagcaaccactccctctct

SEQ ID NO: 8449 - DNA, 122 bp, Homo sapiens
  misc_feature (61)..(62): /note="This region represents a CpG dinucleotide"
  misc_feature (61)..(61): /note="Nucleotide may be methylated to form 5-methylcytosine"
gcacttctaggtaaccaatagaagcaaatgtaaatctttcctgtaaagatacaccttcatcgcaggcctcaaagaagtcctgctaacaatcatttaaagacaacaaacagtgagtcaaaaat

SEQ ID NO: 8450 - DNA, 122 bp, Homo sapiens
  misc_feature (61)..(62): /note="This region represents a CpG dinucleotide"
  misc_feature (61)..(61): /note="Nucleotide may be methylated to form 5-methylcytosine"
gaagagtgaatcatcttcttgtggtgttttatttgacttcagataacagatttctgccaccggaaaagcagccgttcatatgaagtggatgaacttcctgtcaccgaacaagagctgcagaa

SEQ ID NO: 8451 - DNA, 122 bp, Homo sapiens
  misc_feature (61)..(62): /note="This region represents a CpG dinucleotide"
  misc_feature (61)..(61): /note="Nucleotide may be methylated to form 5-methylcytosine"
aaggtcagagtctggttccaggcttgactaatgttaggtaagtcatttcccttctctggccgtcagcttccacatctttaaaataatggggctaaactagacaagcagagtggtgctgtagg

SEQ ID NO: 8452 - DNA, 122 bp, Homo sapiens
  misc_feature (61)..(62): /note="This region represents a CpG dinucleotide"
  misc_feature (61)..(61): /note="Nucleotide may be methylated to form 5-methylcytosine"
ctgtgctgggggtttggctaggttaacacaaacccaaccaccaggtacagcaggtgttgtcgtcacaatcctgggaaggaaataaggtacacaaaggttaagtaacgtctgatgtctcttgt

SEQ ID NO: 8453 - DNA, 122 bp, Homo sapiens
  misc_feature (61)..(62): /note="This region represents a CpG dinucleotide"
  misc_feature (61)..(61): /note="Nucleotide may be methylated to form 5-methylcytosine"
tctcgcggttgtggagaagcagcccatgctacacagaagaactgcagttgctaaactggccgcatacttcctctgctaggaacgaggaaggcacagggcttgcagaagggcaggttcctgtt

SEQ ID NO: 8454 - DNA, 122 bp, Homo sapiens
  misc_feature (61)..(62): /note="This region represents a CpG dinucleotide"
  misc_feature (61)..(61): /note="Nucleotide may be methylated to form 5-methylcytosine"
aattccttcttgaactgctggttctctctgttgatgccacaggagtattcaaaaataaaccgctttgctgccaacttcaaggcctgggccttcatattaagctctcttctttttctctttcc

SEQ ID NO: 8455 - DNA, 122 bp, Homo sapiens
  misc_feature (61)..(62): /note="This region represents a CpG dinucleotide"
  misc_feature (61)..(61): /note="Nucleotide may be methylated to form 5-methylcytosine"
aagcaggaatagctacacccgctgtgcttatcaggctgagaagtaacaggagctggatagcgggcgttaacacctagcacagtgcctggcatgtcactgaagctctgttcacaagaaccatc

SEQ ID NO: 8456 - DNA, 122 bp, Homo sapiens
  misc_feature (61)..(62): /note="This region represents a CpG dinucleotide"
  misc_feature (61)..(61): /note="Nucleotide may be methylated to form 5-methylcytosine"
caagtttgccaacaccatggagttcgtggaggactacctcaacaatgtagtcagcgaggccgtgccctttgccaacgaggagaagaacaagctcacttttgaggtggctgggggagtgccca

SEQ ID NO: 8457 - DNA, 122 bp, Homo sapiens
  misc_feature (61)..(62): /note="This region represents a CpG dinucleotide"
  misc_feature (61)..(61): /note="Nucleotide may be methylated to form 5-methylcytosine"
ctttgggaatgtaattttgaatataggccagttccaacctcattacacgatattgcatcccgccaaagccaggggaagcaatggcctccccatgcaccaaactgctaataacgtcagccact

SEQ ID NO: 8458 - DNA, 122 bp, Homo sapiens
  misc_feature (61)..(62): /note="This region represents a CpG dinucleotide"
  misc_feature (61)..(61): /note="Nucleotide may be methylated to form 5-methylcytosine"
actggtagctgcagcagcagattaagaatgactgtggtgtgtggcctttaaggattagagcgaggctggcaagtgcacaacagttagcctgctttcagataatggtgcatcgttgtttgaaa

SEQ ID NO: 8459 - DNA, 122 bp, Homo sapiens
  misc_feature (61)..(62): /note="This region represents a CpG dinucleotide"
  misc_feature (61)..(61): /note="Nucleotide may be methylated to form 5-methylcytosine"
tgcacaatcacatgcttttagaatgatgaatttctggaggtatgtagaagtagatattggcgagcagaaatttttggcccacttagaggattttccaatcggctttccaggacctctcaatc

SEQ ID NO: 8460 - DNA, 122 bp, Homo sapiens
  misc_feature (61)..(62): /note="This region represents a CpG dinucleotide"
  misc_feature (61)..(61): /note="Nucleotide may be methylated to form 5-methylcytosine"
tggtcaggataacctagttttcttactgtcaggcctgagtctccgctggcttaatgatgacgtttaaatttccttttctgtcctttcagttgcagggtataagtgtttatctcagaatgtcc

SEQ ID NO: 8461 - DNA, 122 bp, Homo sapiens
  misc_feature (61)..(62): /note="This region represents a CpG dinucleotide"
  misc_feature (61)..(61): /note="Nucleotide may be methylated to form 5-methylcytosine"
tcacttagtgcccgtgattataaagccatacccagtgtgctgtctaatcttattctttaccgttgccatgaacctgtgtgagaactgtctgatggggcaagaagcagacaggcactcagaaa

SEQ ID NO: 8462 - DNA, 122 bp, Homo sapiens
  misc_feature (61)..(62): /note="This region represents a CpG dinucleotide"
  misc_feature (61)..(61): /note="Nucleotide may be methylated to form 5-methylcytosine"
cggtatctcttctacccagtctctctacctgactcttccattctctgttgctgcctttgacggttcatgtgactatgtgggggcacacccagataatccaggatcatcctcattttaaagcc

SEQ ID NO: 8463 - DNA, 122 bp, Homo sapiens
  misc_feature (61)..(62): /note="This region represents a CpG dinucleotide"
  misc_feature (61)..(61): /note="Nucleotide may be methylated to form 5-methylcytosine"
ccccatctaggctactgcccagaagctgaaacataactcaagagagtcatgaccgtgttacgggaaaacccgttctggagctgggacctactcctccttaatggctgcctccagaaacagga

SEQ ID NO: 8464 - DNA, 122 bp, Homo sapiens
  misc_feature (61)..(62): /note="This region represents a CpG dinucleotide"
  misc_feature (61)..(61): /note="Nucleotide may be methylated to form 5-methylcytosine"
ttcccttatttaaccacatgttccatgcacagatggtatttatcttcaggagatgactcacgcccttgtcaacatacctttctatattaaatatccctatcacatacaaactggacctcaga

SEQ ID NO: 8465 - DNA, 122 bp, Homo sapiens
  misc_feature (61)..(62): /note="This region represents a CpG dinucleotide"
  misc_feature (61)..(61): /note="Nucleotide may be methylated to form 5-methylcytosine"
ttatagatgtgagccaccgtgcctggcccactatgaagccctttcacactgtctgccacacgacaactactgttggggctcagaaaatgtcaccccaatatctggtgctttggcatgctaag

SEQ ID NO: 8466 - DNA, 122 bp, Homo sapiens
  misc_feature (61)..(62): /note="This region represents a CpG dinucleotide"
  misc_feature (61)..(61): /note="Nucleotide may be methylated to form 5-methylcytosine"
aataatccccaagccagggagaggggaaggaagcctttgctggatgcaaaggcccagctacgtaacctccaaatgagcatgaaaaaaatcacatataagaagagaggctttaaagacacatg

SEQ ID NO: 8467 - DNA, 122 bp, Homo sapiens
  misc_feature (61)..(62): /note="This region represents a CpG dinucleotide"
  misc_feature (61)..(61): /note="Nucleotide may be methylated to form 5-methylcytosine"
gccttggtcatagtccaggaagacacccaccttgtcaagcttgtcccggacgttaagccgcgtccagggctccgtgcaggcgctgtactggttgccatcgtgcatcacgatgcagtagaagc

SEQ ID NO: 8468 - DNA, 122 bp, Homo sapiens
  misc_feature (61)..(62): /note="This region represents a CpG dinucleotide"
  misc_feature (61)..(61): /note="Nucleotide may be methylated to form 5-methylcytosine"
tgattataaaacattgcgcttctcatttcctttcccttcctgctactctcaactaacccacgctatcacttgacaggcatgtgaataggataaagtaaatctgggcagcaccacaggcagga

SEQ ID NO: 8469 - DNA, 122 bp, Homo sapiens
  misc_feature (61)..(62): /note="This region represents a CpG dinucleotide"
  misc_feature (61)..(61): /note="Nucleotide may be methylated to form 5-methylcytosine"
aatcttggtttccaaatccttgtgtctcctataataggaagccaggactgcaggacaacacgtggtcaaggagacctgaaaatcaggtctgagagcatttagcctggccttgggagatttcc

SEQ ID NO: 8470 - DNA, 122 bp, Homo sapiens
  misc_feature (61)..(62): /note="This region represents a CpG dinucleotide"
  misc_feature (61)..(61): /note="Nucleotide may be methylated to form 5-methylcytosine"
atggcacctacctgctgctggccccctttcttcagggtccccaatttctctctcttccctcgtttctgtctgtgttctctgccattaagggcagcttataaacaccatgttcctgtctttat

SEQ ID NO: 8471 - DNA, 122 bp, Homo sapiens
  misc_feature (61)..(62): /note="This region represents a CpG dinucleotide"
  misc_feature (61)..(61): /note="Nucleotide may be methylated to form 5-methylcytosine"
tgagctcagatgaggaattcgacagtgtctacgatccctcgtccattgcatcactgcttacggagagcaacctacagaccagctcctgttagctcgtggtcctcaaggactcagaaaccagg

SEQ ID NO: 8472 - DNA, 122 bp, Homo sapiens
  misc_feature (61)..(62): /note="This region represents a CpG dinucleotide"
  misc_feature (61)..(61): /note="Nucleotide may be methylated to form 5-methylcytosine"
atgtggacctgcttgcctcttcccgccactggccgcctgtctatgtggtagatatggccacgtcagtggccctgtgtgctgacctctgctacccagagctgactaaccagatgtgggggagg

SEQ ID NO: 8473 - DNA, 122 bp, Homo sapiens
  misc_feature (61)..(62): /note="This region represents a CpG dinucleotide"
  misc_feature (61)..(61): /note="Nucleotide may be methylated to form 5-methylcytosine"
agatgggacattcacgatttacaacctgaaacacctctgacagaatagcaggcatcttgacgtaaggtcaaatagagagaacacccacatggactatgtcctaagtcaatcagataaaggat

SEQ ID NO: 8474 - DNA, 122 bp, Homo sapiens
  misc_feature (61)..(62): /note="This region represents a CpG dinucleotide"
  misc_feature (61)..(61): /note="Nucleotide may be methylated to form 5-methylcytosine"
gggcaggagaataacaggcggtgccctggaggaacactgcatgctgctgaggaaggagggcggccttggcgatgatgtcaccatgaagcacttggaattgagacagaacattctcacttggg

SEQ ID NO: 8475 - DNA, 122 bp, Homo sapiens
  misc_feature (61)..(62): /note="This region represents a CpG dinucleotide"
  misc_feature (61)..(61): /note="Nucleotide may be methylated to form 5-methylcytosine"
ttatctttttgccttgcctgtttcctcatctctaagaatcttcgcctcctccctgccccacgaggagggtgagagaattcactgagtaatgtccacttagcacttagcttgcaaggggggaa

SEQ ID NO: 8476 - DNA, 122 bp, Homo sapiens
  misc_feature (61)..(62): /note="This region represents a CpG dinucleotide"
  misc_feature (61)..(61): /note="Nucleotide may be methylated to form 5-methylcytosine"
ctcctggcagaaggcgaaggtggaatgtcccagctgcctactaggcaatagtgcctatggcgaaaacagctcctggctggcagggggaagctgatttgggaggcgccatcactaagtaatgg

SEQ ID NO: 8477 - DNA, 122 bp, Homo sapiens
  misc_feature (61)..(62): /note="This region represents a CpG dinucleotide"
  misc_feature (61)..(61): /note="Nucleotide may be methylated to form 5-methylcytosine"
aacaatcatctgataatactcatagatcctgtgagtcattcagacagtgcatggcaaggacggctaacttctgctccacatgtctggggctttttagctgtaaagattcaacagcttggtgc

SEQ ID NO: 8478 - DNA, 122 bp, Homo sapiens
  misc_feature (61)..(62): /note="This region represents a CpG dinucleotide"
  misc_feature (61)..(61): /note="Nucleotide may be methylated to form 5-methylcytosine"
aggtttcagtgagggtggttggagagcgaggaggatgaaatggagactctctattctggacgtggcaggtttgctatggccattgtaccttccggctgacatgtcagttagcaggtggataa

SEQ ID NO: 8479 - DNA, 122 bp, Homo sapiens
  misc_feature (61)..(62): /note="This region represents a CpG dinucleotide"
  misc_feature (61)..(61): /note="Nucleotide may be methylated to form 5-methylcytosine"
tcatcctgggcttgcaagcaacctagatttgtagcctaggtacttaatccttatacatcccgcctgctttatcctcaccctcatggatcagagtcagcctttagttgcattgaacagactga

SEQ ID NO: 8480 - DNA, 122 bp, Homo sapiens
  misc_feature (61)..(62): /note="This region represents a CpG dinucleotide"
  misc_feature (61)..(61): /note="Nucleotide may be methylated to form 5-methylcytosine"
ttgaactaggagtgaccaatctaaactaaaaaggtcaagcaggggcaggaagttgagtttcgcaatgaaagcattaacaacctgtgctttgggttttgagctgaaaagaaactgttcccagg

SEQ ID NO: 8481 - DNA, 122 bp, Homo sapiens
  misc_feature (61)..(62): /note="This region represents a CpG dinucleotide"
  misc_feature (61)..(61): /note="Nucleotide may be methylated to form 5-methylcytosine"
aattagaagaagaactactatttgaattcatgatttctttattacaattatctactgctgcgtaataaatcatcccaaaatataacggcttaaactaacaacaatcattttattatctttca

SEQ ID NO: 8482 - DNA, 122 bp, Homo sapiens
  misc_feature (61)..(62): /note="This region represents a CpG dinucleotide"
  misc_feature (61)..(61): /note="Nucleotide may be methylated to form 5-methylcytosine"
gagaggccaagaatctgaacagacaggccctgctgggtttccatactcagtctattaggtcgtactctttttgtccaatcacatttctacacagttgaccatgctttgttcatgcctatcca

SEQ ID NO: 8483 - DNA, 122 bp, Homo sapiens
  misc_feature (61)..(62): /note="This region represents a CpG dinucleotide"
  misc_feature (61)..(61): /note="Nucleotide may be methylated to form 5-methylcytosine"
tcacaatgaatgagaaatggattctgcccacaagtaacttagcctggggtggggacatggcgcacctaattagctgggttgaggctgacatttctgttaggaacttgaagtacaggtatttt

SEQ ID NO: 8484 - DNA, 122 bp, Homo sapiens
  misc_feature (61)..(62): /note="This region represents a CpG dinucleotide"
  misc_feature (61)..(61): /note="Nucleotide may be methylated to form 5-methylcytosine"
ctaccatgtataaaacacacagatgcagctcaaagaaactttggtcatcgctccatggctcggttccctcatatgtaaaatgcaaataataatgtatcttcctttgaggaaaactgtgaaga

SEQ ID NO: 8485 - DNA, 122 bp, Homo sapiens
  misc_feature (61)..(62): /note="This region represents a CpG dinucleotide"
  misc_feature (61)..(61): /note="Nucleotide may be methylated to form 5-methylcytosine"
tgggatgcggagattcagggtggtggaggcggcctggagcctgctggggatgtgtctgcacgccccaaagtgagctcaccaggctggcccctgcaggcccatctgggctcctcctgggcctc

SEQ ID NO: 8486 - DNA, 122 bp, Homo sapiens
  misc_feature (61)..(62): /note="This region represents a CpG dinucleotide"
  misc_feature (61)..(61): /note="Nucleotide may be methylated to form 5-methylcytosine"
tttcggtgggagttgcttgcacttctacttgtcactccatttgtccgtgtattaatgacacgcctgtacatccatccatccatcattcattaaaattgtgctgagcattttccatgtcccag

SEQ ID NO: 8487 - DNA, 122 bp, Homo sapiens
  misc_feature (61)..(62): /note="This region represents a CpG dinucleotide"
  misc_feature (61)..(61): /note="Nucleotide may be methylated to form 5-methylcytosine"
caaagggacaaagccacatgtcaggaaagtggccaggcagttgccctgagggctgagcatcgtatctggagcccttcagggacctgcactattcagttggtcagccctcctcacagcggttc

SEQ ID NO: 8488 - DNA, 122 bp, Homo sapiens
  misc_feature (61)..(62): /note="This region represents a CpG dinucleotide"
  misc_feature (61)..(61): /note="Nucleotide may be methylated to form 5-methylcytosine"
acagaatgtacccaaatggctttaatgctaaatggcccagccagaagggtgaggcacctccgcttgtcaggtcagagtgggaaggaacagtgaacaactgctgacattctctcaccgtatgc

SEQ ID NO: 8489 - DNA, 122 bp, Homo sapiens
  misc_feature (61)..(62): /note="This region represents a CpG dinucleotide"
  misc_feature (61)..(61): /note="Nucleotide may be methylated to form 5-methylcytosine"
ctcaacttccttttgcctttcaaatctctcatgagtgcatcagatttaatgaggcctactcgcatcatccagaactctaacttgagggagtctgagtttgtagctggagagcatttttaaca

SEQ ID NO: 8490 - DNA, 122 bp, Homo sapiens
  misc_feature (61)..(62): /note="This region represents a CpG dinucleotide"
  misc_feature (61)..(61): /note="Nucleotide may be methylated to form 5-methylcytosine"
aggtacttctcattccatgtcactgtcattcactgccctctcattctctccctctctgcacgcgcagaaccacagagcacagactcgagcaagctaaatcgctatttgcagagcctgtggct

SEQ ID NO: 8491 - DNA, 122 bp, Homo sapiens
  misc_feature (61)..(62): /note="This region represents a CpG dinucleotide"
  misc_feature (61)..(61): /note="Nucleotide may be methylated to form 5-methylcytosine"
acactgcctggggtgataaatactttactcaattataaactaagcaagcagacaggttgacggaaaaaaaaacttaccctgctaagtcctcagcttccttccttctctctttcctccaagtg

SEQ ID NO: 8492 - DNA, 122 bp, Homo sapiens
  misc_feature (61)..(62): /note="This region represents a CpG dinucleotide"
  misc_feature (61)..(61): /note="Nucleotide may be methylated to form 5-methylcytosine"
aaatgtaattgttgacagagcatgaactatgattgacatgaggtcagaaagtccaaaggtcgcagggttagtgattcatatcagcttgtcagagcctttcctgtaatacactccatacttgg

SEQ ID NO: 8493 - DNA, 122 bp, Homo sapiens
  misc_feature (61)..(62): /note="This region represents a CpG dinucleotide"
  misc_feature (61)..(61): /note="Nucleotide may be methylated to form 5-methylcytosine"
aaactttcaaatcctgaagtccctgcttagctggtctctaaacttaaaagtctttcaggccgggcaccatggctcacacctataatcccagcactattgtgaggcccaggtgggcatgagcc

SEQ ID NO: 8494 - DNA, 122 bp, Homo sapiens
  misc_feature (61)..(62): /note="This region represents a CpG dinucleotide"
  misc_feature (61)..(61): /note="Nucleotide may be methylated to form 5-methylcytosine"
tagcttggtttggctcaagatgaccaagagtcaggcttcatccttgggcttacttcactccggaagctcatggagtgacaggagcaggctaccccctgccaggtaatttgcctcctaatatt

SEQ ID NO: 8495 - DNA, 122 bp, Homo sapiens
  misc_feature (61)..(62): /note="This region represents a CpG dinucleotide"
  misc_feature (61)..(61): /note="Nucleotide may be methylated to form 5-methylcytosine"
gactcatcatgaaaagacgtttcttcactgcttccttccagcccatttcgcaaagcagcacgcatgtttaatgcaacaatggtatcatccacactgttgctgttgctgtgtttatttccagc

SEQ ID NO: 8496 - DNA, 122 bp, Homo sapiens
  misc_feature (61)..(62): /note="This region represents a CpG dinucleotide"
  misc_feature (61)..(61): /note="Nucleotide may be methylated to form 5-methylcytosine"
acatgccatgtattttccagagagactgtgaccttaagtgatcaacccataactatgcagcgaagcatgggagactaggaggagccctgtgcttttgtatctaaagcttatcgccatctcgc

SEQ ID NO: 8497 - DNA, 122 bp, Homo sapiens
  misc_feature (61)..(62): /note="This region represents a CpG dinucleotide"
  misc_feature (61)..(61): /note="Nucleotide may be methylated to form 5-methylcytosine"
gagaatttgtgcaattcttgtcactgtcatcttctgagcttagtgctatttaatgcccatcgctcacagggagcagctgaggcccagagaaaagggagtagaaggcattgtctagtccaagg

SEQ ID NO: 8498 - DNA, 122 bp, Homo sapiens
  misc_feature (61)..(62): /note="This region represents a CpG dinucleotide"
  misc_feature (61)..(61): /note="Nucleotide may be methylated to form 5-methylcytosine"
gacttccctgctctggatgtactggattctgctgattttcttgccctgcaagcttatcttcgcctgcagggagtttttcctgttcctctgaaggaacagccttccccaggtcaacaagtggt

SEQ ID NO: 8499 - DNA, 122 bp, Homo sapiens
  misc_feature (61)..(62): /note="This region represents a CpG dinucleotide"
  misc_feature (61)..(61): /note="Nucleotide may be methylated to form 5-methylcytosine"
atcacctgcagatgcggttaagcaacttgcagaggccccagggctgagccaccgcagaaccggagctggaaaccagtcctatgactcctgaggcagtgctctttctactacctggccatggc

SEQ ID NO: 8500 - DNA, 122 bp, Homo sapiens
  misc_feature (61)..(62): /note="This region represents a CpG dinucleotide"
  misc_feature (61)..(61): /note="Nucleotide may be methylated to form 5-methylcytosine"
cagtctgggattatcttggagagctgcacgatccagttgttgatcttgtctcggcggcgacgctccactgtggggcaaagtggaggacaaggtgactcagtgaaaactcgccacaagtccca

SEQ ID NO: 8501 - DNA, 122 bp, Homo sapiens
  misc_feature (61)..(62): /note="This region represents a CpG dinucleotide"
  misc_feature (61)..(61): /note="Nucleotide may be methylated to form 5-methylcytosine"
actattcctgtaagttatgtattcagtgaaaggttaattagaaactcaaaagaatgcagtcgtacctatgacctggaaacccaggtcataggtatgtatcagtgaaaggctaattagaaact

SEQ ID NO: 8502 - DNA, 122 bp, Homo sapiens
  misc_feature (61)..(62): /note="This region represents a CpG dinucleotide"
  misc_feature (61)..(61): /note="Nucleotide may be methylated to form 5-methylcytosine"
aacatatcattgctagggagtatgatggagggaaaaagacaggttatggagggccttaaacggtatctaaggattatagatttgattatttacagatgggggagctgttgaaggctttctcg

SEQ ID NO: 8503 - DNA, 122 bp, Homo sapiens
  misc_feature (61)..(62): /note="This region represents a CpG dinucleotide"
  misc_feature (61)..(61): /note="Nucleotide may be methylated to form 5-methylcytosine"
acctgaggatcaggccgtcaccttttgcaacttttcttctaaagggaaataagatgatatcgttcctatcctggggagcttgctctccaagttagtagtagttccagcagagagattgggga

SEQ ID NO: 8504 - DNA, 122 bp, Homo sapiens
  misc_feature (61)..(62): /note="This region represents a CpG dinucleotide"
  misc_feature (61)..(61): /note="Nucleotide may be methylated to form 5-methylcytosine"
ctgctgtacaggttttagcctaggagtctctaccacatcgcctaggtgtatagtaggctacgctatctaggtttgtgtaagtacaccctatgatgttcacacaacaatatcacccagtgaca

SEQ ID NO: 8505 - DNA, 122 bp, Homo sapiens
  misc_feature (61)..(62): /note="This region represents a CpG dinucleotide"
  misc_feature (61)..(61): /note="Nucleotide may be methylated to form 5-methylcytosine"
taagtgttctccatgtaccattttgtttagtcctcaccataatcttattgctgtcatctccgttttgtaggtgagaaaacctaggcccagagggtttaagccacttgactgaggtcacacag

SEQ ID NO: 8506 - DNA, 122 bp, Homo sapiens
  misc_feature (61)..(62): /note="This region represents a CpG dinucleotide"
  misc_feature (61)..(61): /note="Nucleotide may be methylated to form 5-methylcytosine"
accctagaaagtggggtggctacatcaggcagactgctttgcctattcaggacagtcatgcgggagtgacctcgtgaagatcttcagagtccaggccccaggcatttaccatctcaccagaa

SEQ ID NO: 8507 - DNA, 122 bp, Homo sapiens
  misc_feature (61)..(62): /note="This region represents a CpG dinucleotide"
  misc_feature (61)..(61): /note="Nucleotide may be methylated to form 5-methylcytosine"
ggcgtccattgcaacatcagggagaggagtgaagccacaaggatgacatggtctatggcacgtccggctgctactgctgctgcccatgacacactcctggagcccaggcagagtctgtgttt

SEQ ID NO: 8508 - DNA, 122 bp, Homo sapiens
  misc_feature (61)..(62): /note="This region represents a CpG dinucleotide"
  misc_feature (61)..(61): /note="Nucleotide may be methylated to form 5-methylcytosine"
gacctcaggcaaggcgcttaatgttgctgcacctctattggaagaattcagtgaggaatgcgtgatagggccaaggtagagacttaacagatccaagctcagcatcccttcccatatttatt

SEQ ID NO: 8509 - DNA, 122 bp, Homo sapiens
  misc_feature (61)..(62): /note="This region represents a CpG dinucleotide"
  misc_feature (61)..(61): /note="Nucleotide may be methylated to form 5-methylcytosine"
gccactcgggaagctgaggtgggaggatttttttgagccattgggggatcgaggctgcagcgaaatgagattgcaccagtgcgctccatctggtggcagagtgaaaccctctcaacaacaac

SEQ ID NO: 8510 - DNA, 122 bp, Homo sapiens
  misc_feature (61)..(62): /note="This region represents a CpG dinucleotide"
  misc_feature (61)..(61): /note="Nucleotide may be methylated to form 5-methylcytosine"
taaaaatcattatttcattccatcttttcatcattgttaacactaaaccatttggagtcacgttggcaactggatttcatcttgagacttgtcattgaggaatcattttgttgtgtagcaat

SEQ ID NO: 8511 - DNA, 122 bp, Homo sapiens
  misc_feature (61)..(62): /note="This region represents a CpG dinucleotide"
  misc_feature (61)..(61): /note="Nucleotide may be methylated to form 5-methylcytosine"
ttgctgccacattatgtcacaaatccagtcacttttcattgctgtcagtctagtgtctcacgtcatcatcctttctcccctagatgactgtagtaacttctcaacttttccctctctatggt

SEQ ID NO: 8512 - DNA, 122 bp, Homo sapiens
  misc_feature (61)..(62): /note="This region represents a CpG dinucleotide"
  misc_feature (61)..(61): /note="Nucleotide may be methylated to form 5-methylcytosine"
ctgcacttacagaaggggtggggaaagagtgatcacagtgacttcgctgcacagccacagcggggatgagacagcaagtgctaaacagctgcacgaattcgtttgcatttactatgtttcaa

SEQ ID NO: 8513 - DNA, 122 bp, Homo sapiens
  misc_feature (61)..(62): /note="This region represents a CpG dinucleotide"
  misc_feature (61)..(61): /note="Nucleotide may be methylated to form 5-methylcytosine"
tgaacagcctggctatgaggtcatgacaatgacctcacaaacaggaattctcatgttagtcgccctctgggctgaagcctcaccactttaaaggaatctggagctgatgactcaagaaatgt

SEQ ID NO: 8514 - DNA, 122 bp, Homo sapiens
  misc_feature (61)..(62): /note="This region represents a CpG dinucleotide"
  misc_feature (61)..(61): /note="Nucleotide may be methylated to form 5-methylcytosine"
gttttcttgctcccaaggaactgccagcaatttgcagattaactttagccaatagctctacgagacagagaaacttcacacatttccctgggctgggctatgttctcagttctagtataagc

SEQ ID NO: 8515 - DNA, 122 bp, Homo sapiens
  misc_feature (61)..(62): /note="This region represents a CpG dinucleotide"
  misc_feature (61)..(61): /note="Nucleotide may be methylated to form 5-methylcytosine"
ttgagatcagcaccaggcaacataaagagactctgtctctacaaaaaaccctcaaaacgacgaacgcccacaaaaaccacaaaacaaatagatgtgaaggagatgaggaagtgagccctgtg

SEQ ID NO: 8516 - DNA, 122 bp, Homo sapiens
  misc_feature (61)..(62): /note="This region represents a CpG dinucleotide"
  misc_feature (61)..(61): /note="Nucleotide may be methylated to form 5-methylcytosine"
ggggaaccacatgttccctggctctggtgaggagaagttaggagacttggacttgtgggacgattctaaggtggtgctactgtccagtgtcacaaaggatatccaggcaccgtgcaaagccc

SEQ ID NO: 8517 - DNA, 122 bp, Homo sapiens
  misc_feature (61)..(62): /note="This region represents a CpG dinucleotide"
  misc_feature (61)..(61): /note="Nucleotide may be methylated to form 5-methylcytosine"
tttttattccctaatgtcttgggcagactttaccaatgaggtgcttcttccaacaaggaacggtttccaacatcttaggcttgaagacaggatgcaccaggaggctttgccctgagcccttc

SEQ ID NO: 8518 - DNA, 122 bp, Homo sapiens
  misc_feature (61)..(62): /note="This region represents a CpG dinucleotide"
  misc_feature (61)..(61): /note="Nucleotide may be methylated to form 5-methylcytosine"
agccttgaagaagattccagagccttctgaaacctcagtttcagaccctagttttgcaatcgcttaactcctgatgtatcagttaagattataaaagccttgaagaaggttccagttccttc

SEQ ID NO: 8519 - DNA, 122 bp, Homo sapiens
  misc_feature (61)..(62): /note="This region represents a CpG dinucleotide"
  misc_feature (61)..(61): /note="Nucleotide may be methylated to form 5-methylcytosine"
tgcctctccaccctattttttgtcttggttgtaagtagacagcagacatattttctttcccgaaggtatcaatcccatgcacagtgcaaagcctaagctgtaaaggccacctgctaatggca

SEQ ID NO: 8520 - DNA, 122 bp, Homo sapiens
  misc_feature (61)..(62): /note="This region represents a CpG dinucleotide"
  misc_feature (61)..(61): /note="Nucleotide may be methylated to form 5-methylcytosine"
aaaggtggaaacaacccaaatgcccatcaatggatgaatggatcaacaaagtgtggcctacgtatgcaatggaagattactcagctataaaaagaaatgaagtgctgacacatgctgcaaca

SEQ ID NO: 8521 - DNA, 122 bp, Homo sapiens
  misc_feature (61)..(62): /note="This region represents a CpG dinucleotide"
  misc_feature (61)..(61): /note="Nucleotide may be methylated to form 5-methylcytosine"
ccaaattaagcaaggatagaagatgcttcctattaaaattgcaaaagctggctcaacactcgaccataggacttgtacatgattttccttcctctaacacatataatgagtcaatctacaag

SEQ ID NO: 8522 - DNA, 122 bp, Homo sapiens
  misc_feature (61)..(62): /note="This region represents a CpG dinucleotide"
  misc_feature (61)..(61): /note="Nucleotide may be methylated to form 5-methylcytosine"
tgaaacaggctgctgggacttacccagagtttctgattcagctgatctagggcagagtctcgctctgtcacccaggctggagtgcagtggcaccatctcgactcacttcaacctccgcctcc

SEQ ID NO: 8523 - DNA, 122 bp, Homo sapiens
  misc_feature (61)..(62): /note="This region represents a CpG dinucleotide"
  misc_feature (61)..(61): /note="Nucleotide may be methylated to form 5-methylcytosine"
aatggggccacagttgggcaaaacgcccatcactttaaaaccacctctcggctggaagtacgtaatttttagcgagtcacagaaaaatagggaaacttatgcggcgtttccttggccacttc

SEQ ID NO: 8524 - DNA, 122 bp, Homo sapiens
  misc_feature (61)..(62): /note="This region represents a CpG dinucleotide"
  misc_feature (61)..(61): /note="Nucleotide may be methylated to form 5-methylcytosine"
cacctctaggcaaagaagcaaaagcttttctgtgtgttgaatgcatcattaggtgaaaagcgggtaggctaaaaatcaatatgactacttaccttggttccagttttagacatttttggtgc

SEQ ID NO: 8525 - DNA, 122 bp, Homo sapiens
  misc_feature (61)..(62): /note="This region represents a CpG dinucleotide"
  misc_feature (61)..(61): /note="Nucleotide may be methylated to form 5-methylcytosine"
aaaccctctttttggaagccaagaaggcaaagttccattttttcttggcaaggcactttacgagactctgagtgtctttggactctgtattttggtagcttggaattagcctgggaacactt

SEQ ID NO: 8526 - DNA, 122 bp, Homo sapiens
  misc_feature (61)..(62): /note="This region represents a CpG dinucleotide"
  misc_feature (61)..(61): /note="Nucleotide may be methylated to form 5-methylcytosine"
tcgggaaaacctctctgaccctgtgtttcctcatcagtgaaatgggaatgatgatcctcacgggaatggccttaaggcatttggcagaatgcctgctacactgtggccactcaaccaaaaga

SEQ ID NO: 8527 - DNA, 122 bp, Homo sapiens
  misc_feature (61)..(62): /note="This region represents a CpG dinucleotide"
  misc_feature (61)..(61): /note="Nucleotide may be methylated to form 5-methylcytosine"
ccatttaaatgatcatctttcattcttacaacaaccctacaaagtagtgattcttatgcccgtttaacaaatgaagaaacagagattaagtaacttgacaaaggttactcagctaataacct

SEQ ID NO: 8528 - DNA, 122 bp, Homo sapiens
  misc_feature (61)..(62): /note="This region represents a CpG dinucleotide"
  misc_feature (61)..(61): /note="Nucleotide may be methylated to form 5-methylcytosine"
agagaggctgagtcattcatctgtagccatgccgctaggaaggttagggctgggatatgacggcatgtggcctggctccagattcctgacatcctaaagcaagctgttctcaaactgttgtc

SEQ ID NO: 8529 - DNA, 122 bp, Homo sapiens
  misc_feature (61)..(62): /note="This region represents a CpG dinucleotide"
  misc_feature (61)..(61): /note="Nucleotide may be methylated to form 5-methylcytosine"
tgtttcagatgaagaactggaagacaaccccaaccagagtgacctgattgagcaggcagccgagatgctttatggattgatccacgcccgctacatccttaccaaccgtggcatcgcccaga

SEQ ID NO: 8530 - DNA, 122 bp, Homo sapiens
  misc_feature (61)..(62): /note="This region represents a CpG dinucleotide"
  misc_feature (61)..(61): /note="Nucleotide may be methylated to form 5-methylcytosine"
tgatccacctgccttggcctcccaaagtacagggattacaggtgtgagccactgacctggcggatgaatttttaagactgttgtatgaatgcctgtggggtattgcccaagaataaggtgct

SEQ ID NO: 8531 - DNA, 122 bp, Homo sapiens
  misc_feature (61)..(62): /note="This region represents a CpG dinucleotide"
  misc_feature (61)..(61): /note="Nucleotide may be methylated to form 5-methylcytosine"
ggtgtggaaattactaattttagagtcagattcccctgggttccagccttagctcagtcacgtggaagctgtgcctcactgggcagttacttcacctctgtgatgttttttggaacaccagc

SEQ ID NO: 8532 - DNA, 122 bp, Homo sapiens
  misc_feature (61)..(62): /note="This region represents a CpG dinucleotide"
  misc_feature (61)..(61): /note="Nucleotide may be methylated to form 5-methylcytosine"
gcacacagttgttttcagagcagcaaggccacttcggcaacacccagagcttagggaggacgtggtcaaccagcctttactggggcctgggagactccccactgacacaaactcccttctgg

SEQ ID NO: 8533 - DNA, 122 bp, Homo sapiens
  misc_feature (61)..(62): /note="This region represents a CpG dinucleotide"
  misc_feature (61)..(61): /note="Nucleotide may be methylated to form 5-methylcytosine"
gagtttcagttgactggttacctgaaactagtcaagttacaactggaattgcacagccttcgtcatggtcggtgtgttaatagagcttgctgtgagtgcacctctccctctgatagtaatta

SEQ ID NO: 8534 - DNA, 122 bp, Homo sapiens
  misc_feature (61)..(62): /note="This region represents a CpG dinucleotide"
  misc_feature (61)..(61): /note="Nucleotide may be methylated to form 5-methylcytosine"
tggtaataccgctttccttttggtccttttaggacttcttctactcatcgtcatggagatcgtcaactgtcatggcatggatgggagcgcaatttagcctggaaacgggattacaatgaagc

SEQ ID NO: 8535 - DNA, 122 bp, Homo sapiens
  misc_feature (61)..(62): /note="This region represents a CpG dinucleotide"
  misc_feature (61)..(61): /note="Nucleotide may be methylated to form 5-methylcytosine"
gtatatgtcaacacatatgcccacgtgaatttcaaacaattaaacaagcgtaacacttgtcgtgcttattatgagccaggcatgttctaagtgcttcataagtatggtattaactcacttaa

SEQ ID NO: 8536 - DNA, 122 bp, Homo sapiens
  misc_feature (61)..(62): /note="This region represents a CpG dinucleotide"
  misc_feature (61)..(61): /note="Nucleotide may be methylated to form 5-methylcytosine"
gagacagatggtacatgttaatacttagcacagaccctagtgcatggcaagtgcccatagcgttaattatcattattgctcaagattatacagcagctgttggcagaggtacaacttacttc

SEQ ID NO: 8537 - DNA, 122 bp, Homo sapiens
  misc_feature (61)..(62): /note="This region represents a CpG dinucleotide"
  misc_feature (61)..(61): /note="Nucleotide may be methylated to form 5-methylcytosine"
cctgcaggctgagctggggacactgcactatttatgtggtcaccggggcaacagggagctcgtctggagccttgggacgctatcggtggcagctgaggacaatgagatgaggcaggaagctg

SEQ ID NO: 8538 - DNA, 122 bp, Homo sapiens
  misc_feature (61)..(62): /note="This region represents a CpG dinucleotide"
  misc_feature (61)..(61): /note="Nucleotide may be methylated to form 5-methylcytosine"
atggaagtcaccacattcccctatcctcggacagtgtgctgaactcatatgtatttatgacgtattattcaacagtaacaataatatgctggctgggactcatgccaattggcatggaatga

SEQ ID NO: 8539 - DNA, 122 bp, Homo sapiens
  misc_feature (61)..(62): /note="This region represents a CpG dinucleotide"
  misc_feature (61)..(61): /note="Nucleotide may be methylated to form 5-methylcytosine"
caatataccttaagtgaactctgagaacccaatttggaaataaacctgtatgctgacagtcgtgttctcagcatctctcataaataccaatattctgcaaagtcatccactttcaaaactcc

SEQ ID NO: 8540 - DNA, 122 bp, Homo sapiens
  misc_feature (61)..(62): /note="This region represents a CpG dinucleotide"
  misc_feature (61)..(61): /note="Nucleotide may be methylated to form 5-methylcytosine"
gacaaagagacctgggtttaatccttgcagaccttagctatattgtctaacctcttgggacgtcagtttcctcatctttgaaatgggcatgccaacatccaacttctcatgaggacttatgg

SEQ ID NO: 8541 - DNA, 122 bp, Homo sapiens
  misc_feature (61)..(62): /note="This region represents a CpG dinucleotide"
  misc_feature (61)..(61): /note="Nucleotide may be methylated to form 5-methylcytosine"
atttctgccccactgtaactgcaggttcatccctagaagattgtggtatttctggccatacgcaggaaaggtgccacagatgctcaagtataggcatcagctaccaccccatctgctggtgg

SEQ ID NO: 8542 - DNA, 122 bp, Homo sapiens
  misc_feature (61)..(62): /note="This region represents a CpG dinucleotide"
  misc_feature (61)..(61): /note="Nucleotide may be methylated to form 5-methylcytosine"
gaaggaaggtgcaagggtctccaggaaaggctggctacgtcctcctcagaaagaggctgtcgggcctctgagaacaatctgaacatgaggaactgaaactgaaacagagagtgacccggccg

SEQ ID NO: 8543 - DNA, 122 bp, Homo sapiens
  misc_feature (61)..(62): /note="This region represents a CpG dinucleotide"
  misc_feature (61)..(61): /note="Nucleotide may be methylated to form 5-methylcytosine"
actccttattcaatacatacagttttctccagcaaacaaagcaattcttctattgtagcacgcctcctttactatcattttcctatgtcaccatatctactcctgaacctttaatcactcaa

SEQ ID NO: 8544 - DNA, 122 bp, Homo sapiens
  misc_feature (61)..(62): /note="This region represents a CpG dinucleotide"
  misc_feature (61)..(61): /note="Nucleotide may be methylated to form 5-methylcytosine"
cccatgttctttctccaacctcatgggaacaggcagtgggagcctaaggccaatgagtcacggttagcctagaggatcctttgcagcaagctgtatcacaccccagagtgcctgctgattgg

SEQ ID NO: 8545 - DNA, 122 bp, Homo sapiens
  misc_feature (61)..(62): /note="This region represents a CpG dinucleotide"
  misc_feature (61)..(61): /note="Nucleotide may be methylated to form 5-methylcytosine"
tcatcaagttcgtggtagaagtacaggatgcagcagggccgcatcagctaccttatgcagcgctgttgggtcatggatgacttcttagagaaagtgacagctaagaaagaggcttaagggag

SEQ ID NO: 8546 - DNA, 122 bp, Homo sapiens
  misc_feature (61)..(62): /note="This region represents a CpG dinucleotide"
  misc_feature (61)..(61): /note="Nucleotide may be methylated to form 5-methylcytosine"
ggtgttgctggttttgccagcactgatacacactttaagcagcaagggtcaacagtggatcgtgtggaacgagtcctggcctggggggaaggatttgtttttcaaacatcccagttctatgc

SEQ ID NO: 8547 - DNA, 122 bp, Homo sapiens
  misc_feature (61)..(62): /note="This region represents a CpG dinucleotide"
  misc_feature (61)..(61): /note="Nucleotide may be methylated to form 5-methylcytosine"
aacaagaggaagcacttagactgtagagtagtagagtctgttttatgactttactacaaacgtacacacacacaaaatatgaatccaatacatctccatttctaaatggtgatttacaagga

SEQ ID NO: 8548 - DNA, 122 bp, Homo sapiens
  misc_feature (61)..(62): /note="This region represents a CpG dinucleotide"
  misc_feature (61)..(61): /note="Nucleotide may be methylated to form 5-methylcytosine"
aacatttaataaccctacttagctcaggaaacattgaagaaaccaagtgatgcataattacgttccacgcagtggcttgtctgcctcggcttcttactaaaatgcttgagccagttgcttct

SEQ ID NO: 8549 - DNA, 122 bp, Homo sapiens
  misc_feature (61)..(62): /note="This region represents a CpG dinucleotide"
  misc_feature (61)..(61): /note="Nucleotide may be methylated to form 5-methylcytosine"
agcatcctctatgagtcagctgatttactcattctgtctcactctccttataactaaccccgccaagtagaaactattatgtttccattgtagatcactatactcctaaagaaataagatga

SEQ ID NO: 8550 - DNA, 122 bp, Homo sapiens
  misc_feature (61)..(62): /note="This region represents a CpG dinucleotide"
  misc_feature (61)..(61): /note="Nucleotide may be methylated to form 5-methylcytosine"
cctctgagcaaaaataaccctggaggaagttggtgggtataaatcgtcaatgaataaatacgcatcgctagtaaataggggatggagccccacagggccactcaccccccagggccttgtgg

SEQ ID NO: 8551 - DNA, 122 bp, Homo sapiens
  misc_feature (61)..(62): /note="This region represents a CpG dinucleotide"
  misc_feature (61)..(61): /note="Nucleotide may be methylated to form 5-methylcytosine"
cctctctgaaaccacaccctaacccagcctgctggttggtcatctattttccaggctcttcgtaaccctgggcatatctccatatacacccatcacacctgctattactattggttgatgtg

SEQ ID NO: 8552 - DNA, 122 bp, Homo sapiens
  misc_feature (61)..(62): /note="This region represents a CpG dinucleotide"
  misc_feature (61)..(61): /note="Nucleotide may be methylated to form 5-methylcytosine"
tcctgtcctaccactgtttgtcttgctcattcctcaaacattgctgttctttcaacaagccgtgtttgttcctaccatctttgcacctgccctctgcctagaaagctcttctcctccatggt

SEQ ID NO: 8553 - DNA, 122 bp, Homo sapiens
  misc_feature (61)..(62): /note="This region represents a CpG dinucleotide"
  misc_feature (61)..(61): /note="Nucleotide may be methylated to form 5-methylcytosine"
agggccactctcagaaaactacacgctagttgtagtaattagctccaggcatgcccttcccgccccctgttattaaacagcatgatgtggcagatcaagcactaaactagcaggtagcaaat

SEQ ID NO: 8554 - DNA, 122 bp, Homo sapiens
  misc_feature (61)..(62): /note="This region represents a CpG dinucleotide"
  misc_feature (61)..(61): /note="Nucleotide may be methylated to form 5-methylcytosine"
gggcagcaagctctctgaggccaacccttccacctctcccattggtggccagcactgtagcggggtgagctgtgctctatagaggcttctgaaccactgatctgcacactcctagcgaggca

SEQ ID NO: 8555 - DNA, 122 bp, Homo sapiens
  misc_feature (61)..(62): /note="This region represents a CpG dinucleotide"
  misc_feature (61)..(61): /note="Nucleotide may be methylated to form 5-methylcytosine"
tgagaaggaagggtggagactgtgtcaaacactctgcaggttgtctcctgaagacagttacggaatcctgaacccaagctgagaaggagcctctcaaaacagtgaaagggtttaggaaacag

SEQ ID NO: 8556 - DNA, 122 bp, Homo sapiens
  misc_feature (61)..(62): /note="This region represents a CpG dinucleotide"
  misc_feature (61)..(61): /note="Nucleotide may be methylated to form 5-methylcytosine"
caaatattaaagtggctactgcacataaagcacctaatctagtgcctggcacataggaagcgcaaaagcaatgttggctcacattttccaggagttgcttcctgggtctgcctaggaagtaa

SEQ ID NO: 8557 - DNA, 122 bp, Homo sapiens
  misc_feature (61)..(62): /note="This region represents a CpG dinucleotide"
  misc_feature (61)..(61): /note="Nucleotide may be methylated to form 5-methylcytosine"
gcagggctctaagcccacacacaaaaggacaaaaaagagctaatccattactgccaagtacgagaacccatcaagcttatgttactttccagaaactctgtgggtgaaggagtgaaaaggaa

SEQ ID NO: 8558 - DNA, 122 bp, Homo sapiens
  misc_feature (61)..(62): /note="This region represents a CpG dinucleotide"
  misc_feature (61)..(61): /note="Nucleotide may be methylated to form 5-methylcytosine"
ccagtatcttgcccacattctcctacttattactcttcaattccatttcagagtctgttacgtgaacataattacccttatccctcttgcacaaatctttctttaatctgttggatgactct

SEQ ID NO: 8559 - DNA, 122 bp, Homo sapiens
  misc_feature (61)..(62): /note="This region represents a CpG dinucleotide"
  misc_feature (61)..(61): /note="Nucleotide may be methylated to form 5-methylcytosine"
aaaacactaagtgctgagcctgctacagacaaattattccatgatgctggttggctgttgcgacacagtccacaccccgagatgtggaggcagccagtatccatctcttgctctacctgtta

SEQ ID NO: 8560 - DNA, 122 bp, Homo sapiens
  misc_feature (61)..(62): /note="This region represents a CpG dinucleotide"
  misc_feature (61)..(61): /note="Nucleotide may be methylated to form 5-methylcytosine"
ccttgtcactttgggtgaattattgaacctttgtaagctttagtttcctcatctgtaaaacgcagataatagtacttacctcatagagttgttgagaggattaagtgagtaaatgtaagtaa

SEQ ID NO: 8561 - DNA, 122 bp, Homo sapiens
  misc_feature (61)..(62): /note="This region represents a CpG dinucleotide"
  misc_feature (61)..(61): /note="Nucleotide may be methylated to form 5-methylcytosine"
ccacgcctggcctaaaaataactcatttagtcttgtccttatccagctctttcacaactccgtaaaacagctttgatttttctctccttctactggctctatcttctctgccttcaaacgta

SEQ ID NO: 8562 - DNA, 122 bp, Homo sapiens
  misc_feature (61)..(62): /note="This region represents a CpG dinucleotide"
  misc_feature (61)..(61): /note="Nucleotide may be methylated to form 5-methylcytosine"
ctgcagacccacttgtgttattgtaaatgaatcagaggggcaagaccttgttctttacggcgtgtgatttaaaatcagttttaaggtacctgccaggtgtatttagaggaaaaggcatgaag

SEQ ID NO: 8563 - DNA, 122 bp, Homo sapiens
  misc_feature (61)..(62): /note="This region represents a CpG dinucleotide"
  misc_feature (61)..(61): /note="Nucleotide may be methylated to form 5-methylcytosine"
aggtcagtttaacctgactcacccatggccagaagtgtcacaatgtggacatgactagaccgcctttgcaaatccccaaagcttgaccactcccttggccaactgcagggttgcggttttcg

SEQ ID NO: 8564 - DNA, 122 bp, Homo sapiens
  misc_feature (61)..(62): /note="This region represents a CpG dinucleotide"
  misc_feature (61)..(61): /note="Nucleotide may be methylated to form 5-methylcytosine"
ctctatggtgttggcacaatgatgaaatcacccaatgacacttttctcagaatgtgtgcccgtcaagtgactcatgactgtagttggatgcaaagctgggaaggaaaggtattccacatagc

SEQ ID NO: 8565 - DNA, 122 bp, Homo sapiens
  misc_feature (61)..(62): /note="This region represents a CpG dinucleotide"
  misc_feature (61)..(61): /note="Nucleotide may be methylated to form 5-methylcytosine"
catttgtaaactgtcatggtgctggtgggagtgtagcagtgaggacgaccaggggtcactcgtgagcatcttggttatggtgggttttagctggctttactgcaacctgttttatcagcagt

SEQ ID NO: 8566 - DNA, 122 bp, Homo sapiens
  misc_feature (61)..(62): /note="This region represents a CpG dinucleotide"
  misc_feature (61)..(61): /note="Nucleotide may be methylated to form 5-methylcytosine"
ccacttaactcttctcattcaccaacaggctgaagaactgaaactggccacccagctgaccggaccggtcatgcccgtccggaacgtaagtgaacacttactcaaatccaggcttcagacga

SEQ ID NO: 8567 - DNA, 122 bp, Homo sapiens
  misc_feature (61)..(62): /note="This region represents a CpG dinucleotide"
  misc_feature (61)..(61): /note="Nucleotide may be methylated to form 5-methylcytosine"
acaggcgtgagccaccccacccggccaagaatagttactctttaagatgcaatgttttgccgggtgcagtggctcacgcctgtaatcccagcactttgggagggcgaggcgggtggatcacg

SEQ ID NO: 8568 - DNA, 122 bp, Homo sapiens
  misc_feature (61)..(62): /note="This region represents a CpG dinucleotide"
  misc_feature (61)..(61): /note="Nucleotide may be methylated to form 5-methylcytosine"
tcatgattctgtttccttactcttccatatccaatcatttacaaagctctggtgattttacgtcctaaatgtttcttaatctgcttcttcttcattctcactatgcacgccctaggtcaggc

SEQ ID NO: 8569 - DNA, 122 bp, Homo sapiens
  misc_feature (61)..(62): /note="This region represents a CpG dinucleotide"
  misc_feature (61)..(61): /note="Nucleotide may be methylated to form 5-methylcytosine"
atttacccagaggcatccagcagagtcccatgtatttccagatgtttctggttagaagttcgtataactttcagagaaaatgccctgccctcctggattctggcccagtttgaagagcaccc

SEQ ID NO: 8570 - DNA, 122 bp, Homo sapiens
  misc_feature (61)..(62): /note="This region represents a CpG dinucleotide"
  misc_feature (61)..(61): /note="Nucleotide may be methylated to form 5-methylcytosine"
aatgacatataatcctatacaccaacaggataatatcacgagtgtgtgtggcaacactgccgcatgttaatcctgcctgcctcctgggatgatctttctcatcccagcagagcctacagagc

SEQ ID NO: 8571 - DNA, 122 bp, Homo sapiens
  misc_feature (61)..(62): /note="This region represents a CpG dinucleotide"
  misc_feature (61)..(61): /note="Nucleotide may be methylated to form 5-methylcytosine"
agtctgttcacaaacaacttccttaaaaactgatttccatcttcaaatcagagtaagcatcgtgtacacaaagcccttcctaaatcccatttcctcctccccagcagagcttagttgcttct

SEQ ID NO: 8572 - DNA, 122 bp, Homo sapiens
  misc_feature (61)..(62): /note="This region represents a CpG dinucleotide"
  misc_feature (61)..(61): /note="Nucleotide may be methylated to form 5-methylcytosine"
tctggattaggctttggcttaagaaaatgttgtggctggtttgatcttctacccaaaccacgccaactttctgtgtgtcagcaataaggctgatttatcattcatggagtagcacttttaat

SEQ ID NO: 8573 - DNA, 122 bp, Homo sapiens
  misc_feature (61)..(62): /note="This region represents a CpG dinucleotide"
  misc_feature (61)..(61): /note="Nucleotide may be methylated to form 5-methylcytosine"
gcacctgcatgactggccctcctcccctaggcaaagccaaccggacccagagccacaccgcgtgtgtcaacagcaagcaagtacagagcatgaaaacagctgctattcgaccctctctgtgt

SEQ ID NO: 8574 - DNA, 122 bp, Homo sapiens
  misc_feature (61)..(62): /note="This region represents a CpG dinucleotide"
  misc_feature (61)..(61): /note="Nucleotide may be methylated to form 5-methylcytosine"
gccgcacctgtgcctaggactttacatgtgtatctcatttcatctcttaaatccccgatacgaggtaggttcagttatgatgatcccagttttacaagagaaggaaccatgtgcacagaggc

SEQ ID NO: 8575 - DNA, 122 bp, Homo sapiens
  misc_feature (61)..(62): /note="This region represents a CpG dinucleotide"
  misc_feature (61)..(61): /note="Nucleotide may be methylated to form 5-methylcytosine"
tttccacagtgtgtttgccagtgacctcaaccctgacctgcagggtcaccttctctgggacgagaagtaatcctgtgttgggtcaccctctggtactgagggactcctatttgtggtgccat

SEQ ID NO: 8576 - DNA, 122 bp, Homo sapiens
  misc_feature (61)..(62): /note="This region represents a CpG dinucleotide"
  misc_feature (61)..(61): /note="Nucleotide may be methylated to form 5-methylcytosine"
cagaagcagaaaggaaaacacagattgtttaagtcactagccctgagtcacacagcaatacgtagtgcaattggaatttggcctgggcagtcattccaggaacttgtgttcataaaccctga

SEQ ID NO: 8577 - DNA, 122 bp, Homo sapiens
  misc_feature (61)..(62): /note="This region represents a CpG dinucleotide"
  misc_feature (61)..(61): /note="Nucleotide may be methylated to form 5-methylcytosine"
tgagacgcagggccactccagtggcctgcccggaagtcactccctggcctaccgtcgctccgtctggggtgtgctcctgctgagggagcccctgcttcctggactctacccggcccctgcct

SEQ ID NO: 8578 - DNA, 122 bp, Homo sapiens
  misc_feature (61)..(62): /note="This region represents a CpG dinucleotide"
  misc_feature (61)..(61): /note="Nucleotide may be methylated to form 5-methylcytosine"
agcagtatagaagggtcattcagaagtccaaagtgaaaccatcttaagcaaccatgtttacgcgagatgaaaagctagtggctttaacctgtgggaaaatgtaccacaccctgccaatgcaa

SEQ ID NO: 8579 - DNA, 122 bp, Homo sapiens
  misc_feature (61)..(62): /note="This region represents a CpG dinucleotide"
  misc_feature (61)..(61): /note="Nucleotide may be methylated to form 5-methylcytosine"
tggaaggcaactggtgctggcctaattccctgtggtacaacctgggctttggggccatcacgtctttataatcatttcgcctcatggccctttgccaagtttccttttaagcaatagtttgg

SEQ ID NO: 8580 - DNA, 122 bp, Homo sapiens
  misc_feature (61)..(62): /note="This region represents a CpG dinucleotide"
  misc_feature (61)..(61): /note="Nucleotide may be methylated to form 5-methylcytosine"
ttttttttttgcaatcagatatgttacatcaccactactgccttagtcagctcaggctaccgtaataaaataccatagactggtggcttaaccaacagaaatttatatatattctcacagct

SEQ ID NO: 8581 - DNA, 122 bp, Homo sapiens
  misc_feature (61)..(62): /note="This region represents a CpG dinucleotide"
  misc_feature (61)..(61): /note="Nucleotide may be methylated to form 5-methylcytosine"
cttcacacgttggcagtatttcacgttttggtagtttctctggtcattttcccctgtggccgtctttaataatgagtcatactcagtgtaatagaaataatatccataagcaagaaaatcat

SEQ ID NO: 8582 - DNA, 122 bp, Homo sapiens
  misc_feature (61)..(62): /note="This region represents a CpG dinucleotide"
  misc_feature (61)..(61): /note="Nucleotide may be methylated to form 5-methylcytosine"
gtaggtgctagctatgtgaaaatgagtgggcagagatcagggcaggaggaagagcacaggcgaagactgaggcaggaaacaccatggctgtttgggagagatccagttactgctggtattac

SEQ ID NO: 8583 - DNA, 122 bp, Homo sapiens
  misc_feature (61)..(62): /note="This region represents a CpG dinucleotide"
  misc_feature (61)..(61): /note="Nucleotide may be methylated to form 5-methylcytosine"
cgtgtgcagagttgtgaggctcctctgctgcgaactgcccattccagccttgctgtggaacgactcgccttctgtgggctggtgacacatatcctcacaaaggctgtgttgtcactcgtgtg

SEQ ID NO: 8584 - DNA, 122 bp, Homo sapiens
  misc_feature (61)..(62): /note="This region represents a CpG dinucleotide"
  misc_feature (61)..(61): /note="Nucleotide may be methylated to form 5-methylcytosine"
gcccggcacttggaatttggccgtgaacctagcagacacagtggctgcccatttacatagcgtgcagtcgagtgtgggagtttacagtctagctgtgaaataaacctgtaggtttaattatg

SEQ ID NO: 8585 - DNA, 122 bp, Homo sapiens
  misc_feature (61)..(62): /note="This region represents a CpG dinucleotide"
  misc_feature (61)..(61): /note="Nucleotide may be methylated to form 5-methylcytosine"
gctgcttctgcgtctgacactgggcctgcagtcagctgttctgacagttgggagggaaggcggctgtaaagtgacagagactggggacaaactagagctgcacctatctctctctcacaagc

SEQ ID NO: 8586 - DNA, 122 bp, Homo sapiens
  misc_feature (61)..(62): /note="This region represents a CpG dinucleotide"
  misc_feature (61)..(61): /note="Nucleotide may be methylated to form 5-methylcytosine"
ccagtccagctagagggataggcactgtttccagccctgtgtaagtaccaggcactgttccgtctaatcctttaaaatgatattttctctaaccttgggtagtttcctcaaacacatgtgct

SEQ ID NO: 8587 - DNA, 122 bp, Homo sapiens
  misc_feature (61)..(62): /note="This region represents a CpG dinucleotide"
  misc_feature (61)..(61): /note="Nucleotide may be methylated to form 5-methylcytosine"
gcctttcctggtaggcactcagggaagtgccccagggtgaggaggatttgtgagaactggcgctctgcctcctgggagctttatggcaaagtaacagcaagagaacacagacaaaagacaga

SEQ ID NO: 8588 - DNA, 122 bp, Homo sapiens
  misc_feature (61)..(62): /note="This region represents a CpG dinucleotide"
  misc_feature (61)..(61): /note="Nucleotide may be methylated to form 5-methylcytosine"
ggggacagcaggtgcgccagaaaggtgaacaaagggaggacttcagctctgggaaagctacggctccacccaaagtctgagacaaagaggccaagagccctgcaaagaaacccaaccaaccg

SEQ ID NO: 8589 - DNA, 122 bp, Homo sapiens
  misc_feature (61)..(62): /note="This region represents a CpG dinucleotide"
  misc_feature (61)..(61): /note="Nucleotide may be methylated to form 5-methylcytosine"
caagataatatccaccccacaaagttatcatagaacttaaaagagaaaataaatataaaacgaaacatgagcactgtgactgatgcagagtaataaatgattctggccactactccacctgc

SEQ ID NO: 8590 - DNA, 122 bp, Homo sapiens
  misc_feature (61)..(62): /note="This region represents a CpG dinucleotide"
  misc_feature (61)..(61): /note="Nucleotide may be methylated to form 5-methylcytosine"
tcccagaggcgcctccctggccatagctgagtcaaccacagttgctttcctggaaatgggcgactgcaatgctatttggacttttcagttgatctggggtgatgtaaactcggggagcatct

SEQ ID NO: 8591 - DNA, 122 bp, Homo sapiens
  misc_feature (61)..(62): /note="This region represents a CpG dinucleotide"
  misc_feature (61)..(61): /note="Nucleotide may be methylated to form 5-methylcytosine"
gaaggcttcctggaggaggtggaatcaacatggcttcctgacagatgagtaaaagttaggcgggccaagaggggagggaaaagtgctccaggaagaggaaatctacacataagaaggtctca

SEQ ID NO: 8592 - DNA, 122 bp, Homo sapiens
  misc_feature (61)..(62): /note="This region represents a CpG dinucleotide"
  misc_feature (61)..(61): /note="Nucleotide may be methylated to form 5-methylcytosine"
ccagatccagcttcccagagattacagtcagctcatctggaaaggagcctgtgagatcggcgaagtcctagtgtaacacattccaaggaacacctctgattcattactctttggagactggc

SEQ ID NO: 8593 - DNA, 122 bp, Homo sapiens
  misc_feature (61)..(62): /note="This region represents a CpG dinucleotide"
  misc_feature (61)..(61): /note="Nucleotide may be methylated to form 5-methylcytosine"
cacgtgcagtcaacatgttcctctgcgtgaggcagacctgcatgccagcactgagccaggcgaccacctggtagctggatgatccatcaaggaggctctggtgccctgcttatgtaatagac

SEQ ID NO: 8594 - DNA, 122 bp, Homo sapiens
  misc_feature (61)..(62): /note="This region represents a CpG dinucleotide"
  misc_feature (61)..(61): /note="Nucleotide may be methylated to form 5-methylcytosine"
aatttgcctattgcacaacaaggaaaaacaccttgcagttatgtgaataattttggcttgcgtagcagctgcatgtctaactggtagtttcaggcttcattccacacatatttactgggtat

SEQ ID NO: 8595 - DNA, 122 bp, Homo sapiens
  misc_feature (61)..(62): /note="This region represents a CpG dinucleotide"
  misc_feature (61)..(61): /note="Nucleotide may be methylated to form 5-methylcytosine"
tcttgtggtgtctgagttgcccagaacagtacagctgtagtcagtccgcatctgtgacttcgttcactgtgattctgcatccaagttcaagcatctgatgacataattacacggtctacctt

SEQ ID NO: 8596 - DNA, 122 bp, Homo sapiens
  misc_feature (61)..(62): /note="This region represents a CpG dinucleotide"
  misc_feature (61)..(61): /note="Nucleotide may be methylated to form 5-methylcytosine"
gcctatccttattttcatttttaacatgacacagccagctataaattctgtgggaaacaacgccctgtgggataagatcatcactttctatttttcctttaataaaagtcaccctaaatggg

SEQ ID NO: 8597 - DNA, 122 bp, Homo sapiens
  misc_feature (61)..(62): /note="This region represents a CpG dinucleotide"
  misc_feature (61)..(61): /note="Nucleotide may be methylated to form 5-methylcytosine"
aggaataagtgaatagctattcatccttagaccctgtccaaacagagcaacagtcatatacgccaccatagataaagagatccagagaactctcaaaccctttttccataattggaaattat

SEQ ID NO: 8598 - DNA, 122 bp, Homo sapiens
  misc_feature (61)..(62): /note="This region represents a CpG dinucleotide"
  misc_feature (61)..(61): /note="Nucleotide may be methylated to form 5-methylcytosine"
catctgctcagagacactctgggtctgtgcccaggattgtctagtagaactcatgtcctccgccttttccacttcttgtctcttctcggaatatgcaactttccccctcttgcccttacctg

SEQ ID NO: 8599 - DNA, 122 bp, Homo sapiens
  misc_feature (61)..(62): /note="This region represents a CpG dinucleotide"
  misc_feature (61)..(61): /note="Nucleotide may be methylated to form 5-methylcytosine"
tgatctctcaaatgcttcatacatactccaccctccagttctgtctgggtggttcttacccgtctggcctgctcgtgtgtgtgtgtgcgcgcgtgcacgcgtgtgtaactagcctgatcttt

SEQ ID NO: 8600 - DNA, 122 bp, Homo sapiens
  misc_feature (61)..(62): /note="This region represents a CpG dinucleotide"
  misc_feature (61)..(61): /note="Nucleotide may be methylated to form 5-methylcytosine"
ctcaggtgatccacccgcctccacctcccaaagggctgggattacaggtgtgagccaccgcgccaggccaagttctgttaaacttttagtaaggctgaaggcttaggcatgttttgaccatt

SEQ ID NO: 8601 - DNA, 122 bp, Homo sapiens
  misc_feature (61)..(62): /note="This region represents a CpG dinucleotide"
  misc_feature (61)..(61): /note="Nucleotide may be methylated to form 5-methylcytosine"
gcagatttcatgctgtttcttctttttcttcaaggagtccacatactctagatctacccacgtcaccacattgcctgacacgttggggctgcggctttgaactgccgttttgtttgcatttc

SEQ ID NO: 8602 - DNA, 122 bp, Homo sapiens
  misc_feature (61)..(62): /note="This region represents a CpG dinucleotide"
  misc_feature (61)..(61): /note="Nucleotide may be methylated to form 5-methylcytosine"
tgggtacaggttgtgtcttattcatctctgaatcatcagatcctagtgcagtccttgcctcgcaggagatactggcctagaagcttgctgaatgaatgaatgaatgaatgagcacacaatca

SEQ ID NO: 8603 - DNA, 122 bp, Homo sapiens
  misc_feature (61)..(62): /note="This region represents a CpG dinucleotide"
  misc_feature (61)..(61): /note="Nucleotide may be methylated to form 5-methylcytosine"
agtttttagtggaaatgctaatggcagtgggaaaggttgcctcactttcagagagactctcgctgtctgcacccttttaataattgctcttcctggcaaggctgccacttccctgcctcccc

SEQ ID NO: 8604 - DNA, 122 bp, Homo sapiens
  misc_feature (61)..(62): /note="This region represents a CpG dinucleotide"
  misc_feature (61)..(61): /note="Nucleotide may be methylated to form 5-methylcytosine"
actgaatgtctgggctgtcctgtcttttaccctcaactgtcaggcattggtccccctgcccgcattcaccttcccatgacacttgatcaaaagctgctactcatatggccatggctgagcca

SEQ ID NO: 8605 - DNA, 122 bp, Homo sapiens
  misc_feature (61)..(62): /note="This region represents a CpG dinucleotide"
  misc_feature (61)..(61): /note="Nucleotide may be methylated to form 5-methylcytosine"
ctgaggactcaaaagtgggtatccaaactagctgaagcagctgttccacttctataaacacgtatttttatttaattcttgaaggcagacagccaagttgagacagcattctgcttctgcct

SEQ ID NO: 8606 - DNA, 122 bp, Homo sapiens
  misc_feature (61)..(62): /note="This region represents a CpG dinucleotide"
  misc_feature (61)..(61): /note="Nucleotide may be methylated to form 5-methylcytosine"
ctcagaacctattgttgtattcaactatacttgcacttgctcctatttgccctacatgggcgtaactccttaaaccaagctttgttcagaattcctctgattgatcatttaagtaaatttaa

SEQ ID NO: 8607 - DNA, 122 bp, Homo sapiens
  misc_feature (61)..(62): /note="This region represents a CpG dinucleotide"
  misc_feature (61)..(61): /note="Nucleotide may be methylated to form 5-methylcytosine"
catttgctgaattaaacaaaaatacaaggctttgggatattctttacaggatctaatgctcgaggcggttttcttcctattatcatgcaaacaaaccatttaaataccccaagccacaaaat

SEQ ID NO: 8608 - DNA, 122 bp, Homo sapiens
  misc_feature (61)..(62): /note="This region represents a CpG dinucleotide"
  misc_feature (61)..(61): /note="Nucleotide may be methylated to form 5-methylcytosine"
agaaggtgatgtcatcagggttcagacccaggctctacggctggagtcactgggctatagcggtggtaccatttccaccaagtggccagtagcttatccccactggggtctctcgcctgact

SEQ ID NO: 8609 - DNA, 122 bp, Homo sapiens
  misc_feature (61)..(62): /note="This region represents a CpG dinucleotide"
  misc_feature (61)..(61): /note="Nucleotide may be methylated to form 5-methylcytosine"
ttgatgtcagtctcattgggcctgccgttgctcttcttgggacagaagatctctttgatccggccaattcggtagggctcaggggcatccaggttgctgcctttgatgtagtcggagtattt

SEQ ID NO: 8610 - DNA, 122 bp, Homo sapiens
  misc_feature (61)..(62): /note="This region represents a CpG dinucleotide"
  misc_feature (61)..(61): /note="Nucleotide may be methylated to form 5-methylcytosine"
tcctcccactctccaccctcaagtaggtcaccatgtctattgcttccttctttatgtccacgtgtacccaatgtttagctcctacttataaatgagaacatgcaatatttgattttatgttc

SEQ ID NO: 8611 - DNA, 122 bp, Homo sapiens
  misc_feature (61)..(62): /note="This region represents a CpG dinucleotide"
  misc_feature (61)..(61): /note="Nucleotide may be methylated to form 5-methylcytosine"
tagcagaaactatgttagtcattaaataactgaatatcctactcctgataaacacccttacgtcaaacagcaagtggtacttcccatgcttccttaacaaggtaagaattacctacttcagc

SEQ ID NO: 8612 - DNA, 122 bp, Homo sapiens
  misc_feature (61)..(62): /note="This region represents a CpG dinucleotide"
  misc_feature (61)..(61): /note="Nucleotide may be methylated to form 5-methylcytosine"
tgacccatgcaaagactctccaagaaacactgtactcagggccagaagcgcaggctgcagcgtctgttacagacgaattctgaaagaagatgccaggtagggcacctcagggcctggagggc

SEQ ID NO: 8613 - DNA, 122 bp, Homo sapiens
  misc_feature (61)..(62): /note="This region represents a CpG dinucleotide"
  misc_feature (61)..(61): /note="Nucleotide may be methylated to form 5-methylcytosine"
tcagagagaggatacttgggttttagtcccagcctggaagactctgaccaagccttgcctcgcttctgtaaaatacagttaaacagtcaccgccccgtcaaccccagcaagcaggtgagcac

SEQ ID NO: 8614 - DNA, 122 bp, Homo sapiens
  misc_feature (61)..(62): /note="This region represents a CpG dinucleotide"
  misc_feature (61)..(61): /note="Nucleotide may be methylated to form 5-methylcytosine"
agtatagatgtacttacattctacaaaaatagaacaactaagatagcaaaatcaaaggcccgcagacaacatctaaagcaaaatgaggtgacagaatgtatgtgcataaatcatacatggct

SEQ ID NO: 8615 - DNA, 122 bp, Homo sapiens
  misc_feature (61)..(62): /note="This region represents a CpG dinucleotide"
  misc_feature (61)..(61): /note="Nucleotide may be methylated to form 5-methylcytosine"
tttcattccatttggctcaggtgtcagggatctatatttaacttgtgttaggcatgcgtccgaagagctggaaggctgaggatgtcaatggctttcagatgtcaggataaccttaaggatag

SEQ ID NO: 8616 - DNA, 122 bp, Homo sapiens
  misc_feature (61)..(62): /note="This region represents a CpG dinucleotide"
  misc_feature (61)..(61): /note="Nucleotide may be methylated to form 5-methylcytosine"
ctgctcttctgttacctctgactagactgttccgctgaatcactgaatggcttaatccctcgcttccttcaagtcttcattgaaaaggtgacacttgtgtaaagtcctccctgataaccaag

SEQ ID NO: 8617 - DNA, 122 bp, Homo sapiens
  misc_feature (61)..(62): /note="This region represents a CpG dinucleotide"
  misc_feature (61)..(61): /note="Nucleotide may be methylated to form 5-methylcytosine"
ctgtggctgacactgcaaagaatcccggctcagccacgtccttgttcttgtgcaagccagcgccctgcacctgaaggcccttatgtggagggtgactacatgctctgccttgcctgagtcag

SEQ ID NO: 8618 - DNA, 122 bp, Homo sapiens
  misc_feature (61)..(62): /note="This region represents a CpG dinucleotide"
  misc_feature (61)..(61): /note="Nucleotide may be methylated to form 5-methylcytosine"
attaaaagtatagatgctacttcatcagtttggttttgtttaactattaataagaaaacacgtagtgaagaaatagtacttaacaatcatcctggccgggcatggttgctcacacatataat

SEQ ID NO: 8619 - DNA, 122 bp, Homo sapiens
  misc_feature (61)..(62): /note="This region represents a CpG dinucleotide"
  misc_feature (61)..(61): /note="Nucleotide may be methylated to form 5-methylcytosine"
caagtgaaaagactttcccattatgagatggcctccgtatctagagagccgcaagtcagacgcttcagcagcagcttctgggagcagaactgtgaagctcatatcattagcagcagcatctg

SEQ ID NO: 8620 - DNA, 122 bp, Homo sapiens
  misc_feature (61)..(62): /note="This region represents a CpG dinucleotide"
  misc_feature (61)..(61): /note="Nucleotide may be methylated to form 5-methylcytosine"
cctatgccctcaaattggcagggatccaccattgcccaggttagatcattcaaagtttttcgtcgaagcattctagctatcttccaaacttccatctcacaactgatatggctgccaggaga

SEQ ID NO: 8621 - DNA, 122 bp, Homo sapiens
  misc_feature (61)..(62): /note="This region represents a CpG dinucleotide"
  misc_feature (61)..(61): /note="Nucleotide may be methylated to form 5-methylcytosine"
gattggagatcctttccttaccctgaatgccacatttctaatcaggatagcctgatagtgcgttaacttttacagggccttgtcacactgagtcattgagcttgtgggcaacccaatccctt

SEQ ID NO: 8622 - DNA, 122 bp, Homo sapiens
  misc_feature (61)..(62): /note="This region represents a CpG dinucleotide"
  misc_feature (61)..(61): /note="Nucleotide may be methylated to form 5-methylcytosine"
ggaatgagaaagcacagtgaatcactcagggactagcaacagtgggaagctgttagtacccgtagtcctgaaggcgtgaggggagggaacagtgttaccagagcctgataggagctgagcca

SEQ ID NO: 8623 - DNA, 122 bp, Homo sapiens
  misc_feature (61)..(62): /note="This region represents a CpG dinucleotide"
  misc_feature (61)..(61): /note="Nucleotide may be methylated to form 5-methylcytosine"
ctgtgctgtctagtatggcagctgctagtcacgtgagcacttaaaatgtggctccttggccgagaactggatgtttcattttgtttaactgacatagctccatgtggctcgtagccactgta

SEQ ID NO: 8624 - DNA, 122 bp, Homo sapiens
  misc_feature (61)..(62): /note="This region represents a CpG dinucleotide"
  misc_feature (61)..(61): /note="Nucleotide may be methylated to form 5-methylcytosine"
gggtaaaagaaatcaatacaagaagctcttggaatgtcctttttctctctctctctttagcggctccttatgtatggttttagaaatgctgattctacattaagaatgacagtgattcatgc

SEQ ID NO: 8625 - DNA, 122 bp, Homo sapiens
  misc_feature (61)..(62): /note="This region represents a CpG dinucleotide"
  misc_feature (61)..(61): /note="Nucleotide may be methylated to form 5-methylcytosine"
caaatgtgttaagctgtgttgcaaaatggtctactaccacacccatgtaatctcttgatccggagctcttaaaatgctttattaatctgatgactaggtatagcaaagtggaaaaagcagac

SEQ ID NO: 8626 - DNA, 122 bp, Homo sapiens
  misc_feature (61)..(62): /note="This region represents a CpG dinucleotide"
  misc_feature (61)..(61): /note="Nucleotide may be methylated to form 5-methylcytosine"
tatcccaaattgaggcaaagggcaggtttttgtatcctctcctggactagtcattggatgcggtctgtcctcagggaggggcgtttttttgggcgaggctgcttcctttaatccagggcagg

SEQ ID NO: 8627 - DNA, 122 bp, Homo sapiens
  misc_feature (61)..(62): /note="This region represents a CpG dinucleotide"
  misc_feature (61)..(61): /note="Nucleotide may be methylated to form 5-methylcytosine"
atttttcggaccttgcattctgatgcatcagatggcaccacctggattggcaacctataacgagaaaccagcttgactggtcttgtgacacccccaaccaccaccatctagtaactaactca

SEQ ID NO: 8628 - DNA, 122 bp, Homo sapiens
  misc_feature (61)..(62): /note="This region represents a CpG dinucleotide"
  misc_feature (61)..(61): /note="Nucleotide may be methylated to form 5-methylcytosine"
cctactaactgagcagcagaacttcaggtgtcatctagtcagtataagtggaaaactcatcgttgttttttttttgttgtttgtttgtttgtttttttgagacaaagcctctctctgtcatc

SEQ ID NO: 8629 - DNA, 122 bp, Homo sapiens
  misc_feature (61)..(62): /note="This region represents a CpG dinucleotide"
  misc_feature (61)..(61): /note="Nucleotide may be methylated to form 5-methylcytosine"
ttactgaagctgaaccagcaaagtaccaggatccagcttactggatcgcactgatacatccgtctctattcagataactcacctttcctctgccttcaaaacacagatttgactgccacaag

SEQ ID NO: 8630 - DNA, 122 bp, Homo sapiens
  misc_feature (61)..(62): /note="This region represents a CpG dinucleotide"
  misc_feature (61)..(61): /note="Nucleotide may be methylated to form 5-methylcytosine"
gattcatgcaagatatgagtcaaaacccttcaatggctacacatcacttggactaaaagccgtttccttttcatggcctatgtactcctgaataatctggtcctcggtggacagagccctct

SEQ ID NO: 8631 - DNA, 122 bp, Homo sapiens
  misc_feature (61)..(62): /note="This region represents a CpG dinucleotide"
  misc_feature (61)..(61): /note="Nucleotide may be methylated to form 5-methylcytosine"
ccagacatatctagcaaataaaacaggcctcaatccagaggctagtatttcttctcacatcggaaatgataaagatgctgtgaccacaactttcacagatcgtcatttcactgttttgccac

SEQ ID NO: 8632 - DNA, 122 bp, Homo sapiens
  misc_feature (61)..(62): /note="This region represents a CpG dinucleotide"
  misc_feature (61)..(61): /note="Nucleotide may be methylated to form 5-methylcytosine"
tcggaagccacccccagctcccccggcagcttggagcctcagaaacgcggggcagagacgcgacacggagccgcctggcactgagactccccagtggctgcgccgccttcccgggggcccga

SEQ ID NO: 8633 - DNA, 122 bp, Homo sapiens
  misc_feature (61)..(62): /note="This region represents a CpG dinucleotide"
  misc_feature (61)..(61): /note="Nucleotide may be methylated to form 5-methylcytosine"
gccctctaacagactgcctgggcgtggatcctgactgcagagtagcacttctggctgtgacgtgggcagatggcttaacctccctgtgctcagattcctcacctgtaaaacagttaatggat

SEQ ID NO: 8634 - DNA, 122 bp, Homo sapiens
  misc_feature (61)..(62): /note="This region represents a CpG dinucleotide"
  misc_feature (61)..(61): /note="Nucleotide may be methylated to form 5-methylcytosine"
ccggagtgatggatgcggcaggagtgttcaagcagtgcctctcccatctgcagcttcgtccggtttccagtcaagcactactgcacgcccagcaccccagctcctccaccattcctctgcct

SEQ ID NO: 8635 - DNA, 122 bp, Homo sapiens
  misc_feature (61)..(62): /note="This region represents a CpG dinucleotide"
  misc_feature (61)..(61): /note="Nucleotide may be methylated to form 5-methylcytosine"
aacttgatgtgtccaaaactgaagtcttgatctttcctctaaacctgtttttcttactctcgagcttacttatttatgaaagtgatacagccatccactcagttgcccaaacctagatcaag

SEQ ID NO: 8636 - DNA, 122 bp, Homo sapiens
  misc_feature (61)..(62): /note="This region represents a CpG dinucleotide"
  misc_feature (61)..(61): /note="Nucleotide may be methylated to form 5-methylcytosine"
ggaccactctcacttaactctctctagctgccttaacattctgtttgttcttgtcattctcgcaaagttctaaaacaggctatttgaaattaagcacttccccccagcaactccgtgaatta

SEQ ID NO: 8637 - DNA, 122 bp, Homo sapiens
  misc_feature (61)..(62): /note="This region represents a CpG dinucleotide"
  misc_feature (61)..(61): /note="Nucleotide may be methylated to form 5-methylcytosine"
ttttgcagagtcactacttgcaaggggagggaagcaagggactcctagcccagagggggacggaagagggggcctccatgtctaggtgatgctgctcagcagcacagcagatcctctgggtc

SEQ ID NO: 8638 - DNA, 122 bp, Homo sapiens
  misc_feature (61)..(62): /note="This region represents a CpG dinucleotide"
  misc_feature (61)..(61): /note="Nucleotide may be methylated to form 5-methylcytosine"
aaaaaaggaatgaaagccagcagagagcagaccacaagagcaactagttatgcaagatgccgctatccttgtcaattccttcttcctgcctcagcacagcagaatagcaggtgcaatggttc

SEQ ID NO: 8639 - DNA, 122 bp, Homo sapiens
  misc_feature (61)..(62): /note="This region represents a CpG dinucleotide"
  misc_feature (61)..(61): /note="Nucleotide may be methylated to form 5-methylcytosine"
gaaccagagttgaacctgaattcttggccttgtaaaagcaaggaggagtggaatgaaatacggcaccagattggaaacacactgatccggtaggcctttgcttagatttgcttgattgattt

SEQ ID NO: 8640 - DNA, 122 bp, Homo sapiens
  misc_feature (61)..(62): /note="This region represents a CpG dinucleotide"
  misc_feature (61)..(61): /note="Nucleotide may be methylated to form 5-methylcytosine"
tgagccttaatttgaaatccattattacatcctctgaggtctcattaactacctcaatcacgtagttcttaatttttgttttatttccaggtagatacaaaccaacacttagaatgtgagca

SEQ ID NO: 8641 - DNA, 122 bp, Homo sapiens
  misc_feature (61)..(62): /note="This region represents a CpG dinucleotide"
  misc_feature (61)..(61): /note="Nucleotide may be methylated to form 5-methylcytosine"
ttaataaagcactgtcagtaggtcggcttgtcttctctgtcggccacatcaaaatcaatacgtcccctgtgtattctgccatgattgtctgggctggggaatctaataggattaagtgtttg

SEQ ID NO: 8642 - DNA, 122 bp, Homo sapiens
  misc_feature (61)..(62): /note="This region represents a CpG dinucleotide"
  misc_feature (61)..(61): /note="Nucleotide may be methylated to form 5-methylcytosine"
acaccctcctccgcaaagcctcttgtgatctccagtctgactggacacggcttcttgctgcgcccgtgatcctaagcatggggtgtgggtggtagggaaaagcctggagcagggctgcttgg

SEQ ID NO: 8643 - DNA, 122 bp, Homo sapiens
  misc_feature (61)..(62): /note="This region represents a CpG dinucleotide"
  misc_feature (61)..(61): /note="Nucleotide may be methylated to form 5-methylcytosine"
acatgacctcaggcaaattacttaaatcctctgagcctcagttgcttcatctgaagaatgcgaccagacaggtggattttcaggcatgcaataaggtggcacaccttcaatcagagattctt

SEQ ID NO: 8644 - DNA, 122 bp, Homo sapiens
  misc_feature (61)..(62): /note="This region represents a CpG dinucleotide"
  misc_feature (61)..(61): /note="Nucleotide may be methylated to form 5-methylcytosine"
gttacaattaccaaatatttccaaacaatacattgttttattggatcatcaaacaagttgcggtgtagattggacaagtattagctgaatgttataagtgaggaaactaaggaagagagtag

SEQ ID NO: 8645 - DNA, 122 bp, Homo sapiens
  misc_feature (61)..(62): /note="This region represents a CpG dinucleotide"
  misc_feature (61)..(61): /note="Nucleotide may be methylated to form 5-methylcytosine"
tcctgttcccacccacaagccgctctcactactactttagttatgatagcacagtgttcacggaagttttaaaaatcaaaaaatatttccccttttgtgtttttgtgagagaaggaaaaata

SEQ ID NO: 8646 - DNA, 122 bp, Homo sapiens
  misc_feature (61)..(62): /note="This region represents a CpG dinucleotide"
  misc_feature (61)..(61): /note="Nucleotide may be methylated to form 5-methylcytosine"
tttgcagttaaacatttgtgaaggccctgagctgagaagggatttggtagctcagggcagcgcttcgctaacttgaatgtgctcatgaaccatctgggaatcttgttaaaatgccaagtcct

SEQ ID NO: 8647 - DNA, 122 bp, Homo sapiens
  misc_feature (61)..(62): /note="This region represents a CpG dinucleotide"
  misc_feature (61)..(61): /note="Nucleotide may be methylated to form 5-methylcytosine"
tgcataatcagctcaagtaatgctctcattggattccattagaatgtggctctcatcgctcgcctggactgagacttgagaggaggctgttgccagctgacctcaaggtagcaaaaaagaaa

SEQ ID NO: 8648 - DNA, 122 bp, Homo sapiens
  misc_feature (61)..(62): /note="This region represents a CpG dinucleotide"
  misc_feature (61)..(61): /note="Nucleotide may be methylated to form 5-methylcytosine"
ccctggtgcaaaatagaaaacaggactcctacaggagtatccagctcaatctgtagtggacgcagtgttgctcagtggctcccctagtggccaaattcccccaaaatgactcttctatctgt

SEQ ID NO: 8649 - DNA, 122 bp, Homo sapiens
  misc_feature (61)..(62): /note="This region represents a CpG dinucleotide"
  misc_feature (61)..(61): /note="Nucleotide may be methylated to form 5-methylcytosine"
gggacagaggtgaatatggcacactctctgttcccaaggagccaagtcagccaggggagacggaaaaggacagccttgtgtgaccagtgctgggaccccagccacgcacaggggctgcagaa

SEQ ID NO: 8650 - DNA, 122 bp, Homo sapiens
  misc_feature (61)..(62): /note="This region represents a CpG dinucleotide"
  misc_feature (61)..(61): /note="Nucleotide may be methylated to form 5-methylcytosine"
tcttggtttaatcctgtttctgtggcagatttcagcttactgctcacactctgggtctcacggctcctatgacatcagtttcagtactgtaggtctgatcttcagttgggggtggtgctgga

SEQ ID NO: 8651 - DNA, 122 bp, Homo sapiens
  misc_feature (61)..(62): /note="This region represents a CpG dinucleotide"
  misc_feature (61)..(61): /note="Nucleotide may be methylated to form 5-methylcytosine"
gttggctgtgcaggtgaggcagatggcatggcttgtgcttattttgtttggattagagagcgctgcactcactcagaagtcctcagttgagtcgcagatctgtgacttagtcacactgtgac

SEQ ID NO: 8652 - DNA, 122 bp, Homo sapiens
  misc_feature (61)..(62): /note="This region represents a CpG dinucleotide"
  misc_feature (61)..(61): /note="Nucleotide may be methylated to form 5-methylcytosine"
tgatgactaatgaagccactatttagcattgtatctaggatttccttgccatctgtaaaccgtgacccctcccttcaggcagttttttaacctgaggtggttacctgtttttgtttgctgtc

SEQ ID NO: 8653 - DNA, 122 bp, Homo sapiens
  misc_feature (61)..(62): /note="This region represents a CpG dinucleotide"
  misc_feature (61)..(61): /note="Nucleotide may be methylated to form 5-methylcytosine"
gggtttttgggaatgtagcacctcagtgggcgggccttcagggcatactgtacacattggcgctgtgacacatacaacaggacaggtcagcaccaagaggcccctccctccctctccacacc

SEQ ID NO: 8654 - DNA, 122 bp, Homo sapiens
  misc_feature (61)..(62): /note="This region represents a CpG dinucleotide"
  misc_feature (61)..(61): /note="Nucleotide may be methylated to form 5-methylcytosine"
agcagggtgttgttatccctggcttgttttcttattagtttatgtggggaatgaagtaaacggaatgtgctagacatacatcctgtaatgaggctattagccatttatgggcacctcctttg

SEQ ID NO: 8655 - DNA, 122 bp, Homo sapiens
  misc_feature (61)..(62): /note="This region represents a CpG dinucleotide"
  misc_feature (61)..(61): /note="Nucleotide may be methylated to form 5-methylcytosine"
aatcctcagagttaggcctattttatagatgagaagactgagcctcaaatgtaacttagccgaggacttatatacctgctaagttgcagaactggtatgtgcacccaattatctaagaatct

SEQ ID NO: 8656 - DNA, 122 bp, Homo sapiens
  misc_feature (61)..(62): /note="This region represents a CpG dinucleotide"
  misc_feature (61)..(61): /note="Nucleotide may be methylated to form 5-methylcytosine"
aggagaagtcggccccctgcactgctgtggatgaggtggaggactggagatttgctcatgcgtggagctgacgccaaagcctgtgtgttcaccattgggccacccagcctgttgggcaggac

SEQ ID NO: 8657 - DNA, 122 bp, Homo sapiens
  misc_feature (61)..(62): /note="This region represents a CpG dinucleotide"
  misc_feature (61)..(61): /note="Nucleotide may be methylated to form 5-methylcytosine"
ggtagagccagtccccttgggtggggcagcgaccttcattcgagcagtccagccaggtagcggcagcctcccaggatgagggagctacaggagtaaccacctgcctcctctgggggctcctc

SEQ ID NO: 8658 - DNA, 122 bp, Homo sapiens
  misc_feature (61)..(62): /note="This region represents a CpG dinucleotide"
  misc_feature (61)..(61): /note="Nucleotide may be methylated to form 5-methylcytosine"
tctccctgaccttgactgccaggagcaggctttggaatacaaagaggtggagaagaagggcggtagagaaagggtaacaagctgttcttccagatttcctagcaagtcttagataatggtaa

SEQ ID NO: 8659 - DNA, 122 bp, Homo sapiens
  misc_feature (61)..(62): /note="This region represents a CpG dinucleotide"
  misc_feature (61)..(61): /note="Nucleotide may be methylated to form 5-methylcytosine"
gtgttaggtgggggctttgctagggggccgctgccggcgagctgcttggtgagctgtgcccgtgaacccctgcagatacctgaagcggttcaaggtgatgaagcccaaggttctccgcagct

SEQ ID NO: 8660 - DNA, 122 bp, Homo sapiens
  misc_feature (61)..(62): /note="This region represents a CpG dinucleotide"
  misc_feature (61)..(61): /note="Nucleotide may be methylated to form 5-methylcytosine"
caactataaaatggggatgatagcacttaccccatagggtgatgcttataaagcaattagcgcaaagcctggctcatagtgctctaaagtcatagcaatatgattgctatgaaatgcaaata

SEQ ID NO: 8661 - DNA, 122 bp, Homo sapiens
  misc_feature (61)..(62): /note="This region represents a CpG dinucleotide"
  misc_feature (61)..(61): /note="Nucleotide may be methylated to form 5-methylcytosine"
gccctttcaaacttaatctaacaactattctgagtgctcaggatatgttaggcgctttgacggcactggggctacagtgagaagacacagtcccgatttcttgaagctcacagtctgttgtg

SEQ ID NO: 8662 - DNA, 122 bp, Homo sapiens
  misc_feature (61)..(62): /note="This region represents a CpG dinucleotide"
  misc_feature (61)..(61): /note="Nucleotide may be methylated to form 5-methylcytosine"
tattatccccattttacagatgagaaaactgaggcacagacggtcaagtaacatgctcaacgtcatagagataagtagcagagcaggattcacatcagctggcttggatccagaggctaagc

SEQ ID NO: 8663 - DNA, 122 bp, Homo sapiens
  misc_feature (61)..(62): /note="This region represents a CpG dinucleotide"
  misc_feature (61)..(61): /note="Nucleotide may be methylated to form 5-methylcytosine"
ttagtctctggctactccaagtactgttgctgtgaatgttcttttatgagactcttggtgcgtgaatgtaccaagagtgaaactgctaggtcatgagacatgcacaggttcaacttcaacag

SEQ ID NO: 8664 - DNA, 122 bp, Homo sapiens
  misc_feature (61)..(62): /note="This region represents a CpG dinucleotide"
  misc_feature (61)..(61): /note="Nucleotide may be methylated to form 5-methylcytosine"
ggttagagagcaaggctggtactccaggctaaacagggcctgtctcagcctcagtcctagcgtgcttccagcgggtgttgtcaggatagcaacctagctggagagacagccctcccctctag

SEQ ID NO: 8665 - DNA, 122 bp, Homo sapiens
  misc_feature (61)..(62): /note="This region represents a CpG dinucleotide"
  misc_feature (61)..(61): /note="Nucleotide may be methylated to form 5-methylcytosine"
taagaatctttgtcatctgtctgtacaaaaaaaactggctctataaaagctcctggctgtcgtctatatgtatagtgaaaagtggcttccccagttcttactcaccatcatttcccagctcc

SEQ ID NO: 8666 - DNA, 122 bp, Homo sapiens
  misc_feature (61)..(62): /note="This region represents a CpG dinucleotide"
  misc_feature (61)..(61): /note="Nucleotide may be methylated to form 5-methylcytosine"
atcacccatgtaagcttgtgcttggcttggagccactattgtctgtaaaaggtacaactacgctgctgacgctgtacatacatcttgcgctcatggctcatggccagagagagagtaaatcc

SEQ ID NO: 8667 - DNA, 122 bp, Homo sapiens
  misc_feature (61)..(62): /note="This region represents a CpG dinucleotide"
  misc_feature (61)..(61): /note="Nucleotide may be methylated to form 5-methylcytosine"
tggcaaaaatgggacaggaagagtttgcacttggttttttgtgaaagaatgttagaaatacgtgaaaccgttggtagtattttgactatcacctgaaaggtactaaatgttaaactagtaat

SEQ ID NO: 8668 - DNA, 122 bp, Homo sapiens
  misc_feature (61)..(62): /note="This region represents a CpG dinucleotide"
  misc_feature (61)..(61): /note="Nucleotide may be methylated to form 5-methylcytosine"
cagcagtacatgcgagcacatggacatggggcagggcaccagggagaatggcaagacacacgatgaatagacagagcccagcagcaggtccaagtttgtttacatgtgatgctactctgtgc

SEQ ID NO: 8669 - DNA, 122 bp, Homo sapiens
  misc_feature (61)..(62): /note="This region represents a CpG dinucleotide"
  misc_feature (61)..(61): /note="Nucleotide may be methylated to form 5-methylcytosine"
cttcagcagcagcactgggaaacaagaaggaaggcaatggattgggtctccagcaccgtgcgtggggatgactctttcaggactcaaacacacgctattgtggcattcaggaagaggatttc

SEQ ID NO: 8670 - DNA, 122 bp, Homo sapiens
  misc_feature (61)..(62): /note="This region represents a CpG dinucleotide"
  misc_feature (61)..(61): /note="Nucleotide may be methylated to form 5-methylcytosine"
cactatttggtgaaataaatttgaggaaggacagaggagctcaagagttaatacctaaagcgcacaactactcattggagtgcagggccactggtgaggaacaaacagcagggcatgctaga

SEQ ID NO: 8671 - DNA, 122 bp, Homo sapiens
  misc_feature (61)..(62): /note="This region represents a CpG dinucleotide"
  misc_feature (61)..(61): /note="Nucleotide may be methylated to form 5-methylcytosine"
catgcctttttgtttgtggttattaaaacctggccttcaagaatagccataccagttttccggggattgtgaaatcttctggaaaacagaggcactcatcaactaagacactgcacaaattt

SEQ ID NO: 8672 - DNA, 122 bp, Homo sapiens
  misc_feature (61)..(62): /note="This region represents a CpG dinucleotide"
  misc_feature (61)..(61): /note="Nucleotide may be methylated to form 5-methylcytosine"
atgcaggatcacactggattttacagctgactggaactgtctgtcttcagacgcagcctccgtatgactacatttcataacagaagatccttctttttgattttctcttgtgtgatcatctg

SEQ ID NO: 8673 - DNA, 122 bp, Homo sapiens
  misc_feature (61)..(62): /note="This region represents a CpG dinucleotide"
  misc_feature (61)..(61): /note="Nucleotide may be methylated to form 5-methylcytosine"
agttggaagcctcagatgagctactccagggaaagtgctgggactggcattctggctgcccgtcttcttcccagccttgccttgctgggagacttgacctgtccccctgcactctggccact

SEQ ID NO: 8674 - DNA, 122 bp, Homo sapiens
  misc_feature (61)..(62): /note="This region represents a CpG dinucleotide"
  misc_feature (61)..(61): /note="Nucleotide may be methylated to form 5-methylcytosine"
ctgtctcttctgttcatttcactgtcctgcatggggttatgcttttttctttcaatgaagcgtaggaagtctccttgggaatcatctgtgctgatctctgtgtgtgtgttttaaattgcaat

SEQ ID NO: 8675 - DNA, 122 bp, Homo sapiens
  misc_feature (61)..(62): /note="This region represents a CpG dinucleotide"
  misc_feature (61)..(61): /note="Nucleotide may be methylated to form 5-methylcytosine"
agtgtccttccactcctgtggtattaagtactaaacagcctgaagtgcttcaaacacagacgtcagatgaacttggctcatcccaggcacaaagccacaagcaccatgaatgacgttaagta

SEQ ID NO: 8676 - DNA, 122 bp, Homo sapiens
  misc_feature (61)..(62): /note="This region represents a CpG dinucleotide"
  misc_feature (61)..(61): /note="Nucleotide may be methylated to form 5-methylcytosine"
ctcacatctctccagaagaggcaagcccaatgatttgatccaaatcagggcatattctagcgccactctacatagagatagaggggtttttgtgtgtttgtttgtttttttgtgatggagtt

SEQ ID NO: 8677 - DNA, 122 bp, Homo sapiens
  misc_feature (61)..(62): /note="This region represents a CpG dinucleotide"
  misc_feature (61)..(61): /note="Nucleotide may be methylated to form 5-methylcytosine"
cagaggctgaggcgagattgcttgagcccagaaggcagaggctgcgctgagctgggactgcgtcaccgtgctgcaacctggatgacacagtgagaccgtctctaaaagcctgggtgtggtgt

SEQ ID NO: 8678 - DNA, 122 bp, Homo sapiens
  misc_feature (61)..(62): /note="This region represents a CpG dinucleotide"
  misc_feature (61)..(61): /note="Nucleotide may be methylated to form 5-methylcytosine"
ccgacttccactgggtgtcccaggcagtcagtcatcttgcctccctgagccttcatttcacggtctgtggagtgatggtgacagttgcacctcacacttgtatagataaatgtagtcatgag

SEQ ID NO: 8679 - DNA, 122 bp, Homo sapiens
  misc_feature (61)..(62): /note="This region represents a CpG dinucleotide"
  misc_feature (61)..(61): /note="Nucleotide may be methylated to form 5-methylcytosine"
ttataaaagaaaaagtaagcgtcttacaattctggaacctcctttcctcttgggagtctacgtatgggccccggcttcgtcctgaagcagtgtcaagagtcctgtgccgtctgctcatgccc

SEQ ID NO: 8680 - DNA, 122 bp, Homo sapiens
  misc_feature (61)..(62): /note="This region represents a CpG dinucleotide"
  misc_feature (61)..(61): /note="Nucleotide may be methylated to form 5-methylcytosine"
tcatgacctcaattccctcacctgaaataggaaatgagaatgtttcattgtagccccaagcggtcatgtcaacctagtgcctagtcataattaattgacttttcctgtattacttctttttt

SEQ ID NO: 8681 - DNA, 122 bp, Homo sapiens
  misc_feature (61)..(62): /note="This region represents a CpG dinucleotide"
  misc_feature (61)..(61): /note="Nucleotide may be methylated to form 5-methylcytosine"
aggctgtatccccaacacctggcacacagcaggtgctcagttaatgtttgttcacagggacgctgctgcctctagtgggctgggccctggaggcctgatgagctgagggtggattatcagat

SEQ ID NO: 8682 - DNA, 122 bp, Homo sapiens
  misc_feature (61)..(62): /note="This region represents a CpG dinucleotide"
  misc_feature (61)..(61): /note="Nucleotide may be methylated to form 5-methylcytosine"
caggtagtgctaaccacacccttcttctgtgacctcaccgtgacaggtacagatggctaccggtgccctggcactgccttgggaatgagtgtgttttaatgtctttgtcttccactgcaaga

SEQ ID NO: 8683 - DNA, 122 bp, Homo sapiens
  misc_feature (61)..(62): /note="This region represents a CpG dinucleotide"
  misc_feature (61)..(61): /note="Nucleotide may be methylated to form 5-methylcytosine"
tttccttttacagatgaggcccagagaagctgactgactcaaccagtgtcacactatagtcgtaaaaccagaactatcttatgtagtcactaatttatgaacagcttgggtatctgaagttt

SEQ ID NO: 8684 - DNA, 122 bp, Homo sapiens
  misc_feature (61)..(62): /note="This region represents a CpG dinucleotide"
  misc_feature (61)..(61): /note="Nucleotide may be methylated to form 5-methylcytosine"
aagagaaatgattaggaaggtagataggaattaccgccaagaagtcatgggtagtaaaaccggataggaaaacacagagtacttgatcagctaagattggaaggatattgtcctaaagacaa

SEQ ID NO: 8685 - DNA, 122 bp, Homo sapiens
  misc_feature (61)..(62): /note="This region represents a CpG dinucleotide"
  misc_feature (61)..(61): /note="Nucleotide may be methylated to form 5-methylcytosine"
attttatcttcagatccttagctccttaagggcagagactgtcttgaaactgggcactaccgttagcatggcaaatttcttctgggcatctcctcagacacaccctccaacacccacaccct

SEQ ID NO: 8686 - DNA, 122 bp, Homo sapiens
  misc_feature (61)..(62): /note="This region represents a CpG dinucleotide"
  misc_feature (61)..(61): /note="Nucleotide may be methylated to form 5-methylcytosine"
caaagcactgagagccaagacaacacatttttatagtacatacttttagacagacatgggcgggttcaagatcttgctctacttacaaaatctgtgacctcaggcaaattacttcacttctg

SEQ ID NO: 8687 - DNA, 122 bp, Homo sapiens
  misc_feature (61)..(62): /note="This region represents a CpG dinucleotide"
  misc_feature (61)..(61): /note="Nucleotide may be methylated to form 5-methylcytosine"
ctcttaaagataaatgtgtcttaagaataattatatatcctaacaagtgaccacatccttcgatgtgtggatctgatcctccttcactagaaggctggggataaggcagaggcaacactagc

SEQ ID NO: 8688 - DNA, 122 bp, Homo sapiens
  misc_feature (61)..(62): /note="This region represents a CpG dinucleotide"
  misc_feature (61)..(61): /note="Nucleotide may be methylated to form 5-methylcytosine"
ttttgtcccaatggggagtcagcctcctggggcccagagcaggtggataagggtgtggggcgcacctggaggagcaagtgaggtgccagcatgctttggttctactccaagaaagtctgatt

SEQ ID NO: 8689 - DNA, 122 bp, Homo sapiens
  misc_feature (61)..(62): /note="This region represents a CpG dinucleotide"
  misc_feature (61)..(61): /note="Nucleotide may be methylated to form 5-methylcytosine"
gaaccggcctctggctccaggaggcaattctctttgccaagaccaatggagctggctgtgcgtgctgtctacgagtgccagctcctgagggttggcagataaatgctctggatgcctcacgc

SEQ ID NO: 8690 - DNA, 122 bp, Homo sapiens
  misc_feature (61)..(62): /note="This region represents a CpG dinucleotide"
  misc_feature (61)..(61): /note="Nucleotide may be methylated to form 5-methylcytosine"
ctggatgatgcctccgacgagtacaagatcatcatgctcaaccggcgccacctcagcttccgagtcatcaaggttgggccggccccacctgccctaagccctgccccaaacccccttgggcc

SEQ ID NO: 8691 - DNA, 122 bp, Homo sapiens
  misc_feature (61)..(62): /note="This region represents a CpG dinucleotide"
  misc_feature (61)..(61): /note="Nucleotide may be methylated to form 5-methylcytosine"
gcacattggaccatgattcctattcattctgagaacggttcttgagtaaaaccccaatgtcgcagctggcaatacatagaattaaatcatcttacattattcattcaacaaatacttgagtg

SEQ ID NO: 8692 - DNA, 122 bp, Homo sapiens
  misc_feature (61)..(62): /note="This region represents a CpG dinucleotide"
  misc_feature (61)..(61): /note="Nucleotide may be methylated to form 5-methylcytosine"
caagtcagtccaaccatggcaggctctttgcatatgcgtccagcatagttgatgaacagacgtctacactagaggaaactggctcagttagtcagttcacaaaaccaatcctggccaccatc

SEQ ID NO: 8693 - DNA, 122 bp, Homo sapiens
  misc_feature (61)..(62): /note="This region represents a CpG dinucleotide"
  misc_feature (61)..(61): /note="Nucleotide may be methylated to form 5-methylcytosine"
gtgtaacacactatcagtccatgattcatagtgtccatataaaaaagcaaaatggtcgggcgtggtagctcatgcctgtaatcccagcactttaggaggctgaggtgggtggactgcctgag

SEQ ID NO: 8694 - DNA, 122 bp, Homo sapiens
  misc_feature (61)..(62): /note="This region represents a CpG dinucleotide"
  misc_feature (61)..(61): /note="Nucleotide may be methylated to form 5-methylcytosine"
caggaaggtcttgtcttacaaaactcaaatgcatgtgagatgaatagcactgtttatatacgtgtcatggcttccactggttttgcaagacctcatttgatgatctaagtacatgtgatcat

SEQ ID NO: 8695 - DNA, 122 bp, Homo sapiens
  misc_feature (61)..(62): /note="This region represents a CpG dinucleotide"
  misc_feature (61)..(61): /note="Nucleotide may be methylated to form 5-methylcytosine"
tcatctttcagaattaaatgaagtgatgcacgtaaaatgcttagtgtagtttctgtcatacggcgaataagggtttatgtgcccagtaagggttatctgctattattattgttctggtgatg

SEQ ID NO: 8696 - DNA, 122 bp, Homo sapiens
  misc_feature (61)..(62): /note="This region represents a CpG dinucleotide"
  misc_feature (61)..(61): /note="Nucleotide may be methylated to form 5-methylcytosine"
agcaccccagctcccccacccccaggagcccctcaaccttggcctgctgtcatcctcgtccggccccaatcttcctgcaaatcgggcccttgcaggattcctgctgactcagcagctgggcc

SEQ ID NO: 8697 - DNA, 122 bp, Homo sapiens
  misc_feature (61)..(62): /note="This region represents a CpG dinucleotide"
  misc_feature (61)..(61): /note="Nucleotide may be methylated to form 5-methylcytosine"
gtgggtagtgcttatcagagatggaaataaaattgacaagagttgataatgtattagaagcggaggctaagagagaggtaagcaagataatcactaggtttctgacttgcataattgggcgg

SEQ ID NO: 8698 - DNA, 122 bp, Homo sapiens
  misc_feature (61)..(62): /note="This region represents a CpG dinucleotide"
  misc_feature (61)..(61): /note="Nucleotide may be methylated to form 5-methylcytosine"
tggatgagccatagtcacaggatgctcatgcagtgctctggggttttccagtctattccacgaagggatcacattgaaaagtgtttttctggttagacacgattcttgaagatgcaaagcat

SEQ ID NO: 8699 - DNA, 122 bp, Homo sapiens
  misc_feature (61)..(62): /note="This region represents a CpG dinucleotide"
  misc_feature (61)..(61): /note="Nucleotide may be methylated to form 5-methylcytosine"
tgtccctgtgagcagccctccctttgaatttcctggctctggcaaccaaaatccacaagtcgctttgaattacagtactctggatctgttatttaatgggaatatatcctgaggatatatgc

SEQ ID NO: 8700 - DNA, 122 bp, Homo sapiens
  misc_feature (61)..(62): /note="This region represents a CpG dinucleotide"
  misc_feature (61)..(61): /note="Nucleotide may be methylated to form 5-methylcytosine"
agggtgtgggggttgggggagggatgtgtgacaagcagcctgtgtcttcctgggccctggcggtcaaggccatgatctcagctaagcccagactcacactggagctcttcagcctgagcacc

SEQ ID NO: 8701 - DNA, 122 bp, Homo sapiens
  misc_feature (61)..(62): /note="This region represents a CpG dinucleotide"
  misc_feature (61)..(61): /note="Nucleotide may be methylated to form 5-methylcytosine"
gcccaaactaattatgccctttgattttctcgaagtcacaatgcaaaaccctgggagcttcgaggatgtgccctttctcctccatcctgaactaatggaaatcaaggctgaaggctgagcct

SEQ ID NO: 8702 - DNA, 122 bp, Homo sapiens
  misc_feature (61)..(62): /note="This region represents a CpG dinucleotide"
  misc_feature (61)..(61): /note="Nucleotide may be methylated to form 5-methylcytosine"
agggaggcatagggattttttttcaatggtagtcaccacagacggttgagggtaaattggcgttgttctcaataagggttattgtgaccatggtccaaagtctggcaggaatttttttttat

SEQ ID NO: 8703 - DNA, 122 bp, Homo sapiens
  misc_feature (61)..(62): /note="This region represents a CpG dinucleotide"
  misc_feature (61)..(61): /note="Nucleotide may be methylated to form 5-methylcytosine"
gaaaaccaaactgaaatttcgtaagctacagtagcaagtagaaaaccagcaagcctgggacgaggtgtcacactcttccagaggacatgcttactcacaggcagcaactaggtcgggcaaat

SEQ ID NO: 8704 - DNA, 122 bp, Homo sapiens
  misc_feature (61)..(62): /note="This region represents a CpG dinucleotide"
  misc_feature (61)..(61): /note="Nucleotide may be methylated to form 5-methylcytosine"
cctactcggcccaaatagcattgtgctttataattcattcttttcacatacagtaccctgcgttatcatggctaatgttttcctgctgagctgccatcatcttttgtcaagctgtcagggtt

SEQ ID NO: 8705 - DNA, 122 bp, Homo sapiens
  misc_feature (61)..(62): /note="This region represents a CpG dinucleotide"
  misc_feature (61)..(61): /note="Nucleotide may be methylated to form 5-methylcytosine"
tgagtaggttcttgggtggggacaacaagaccagatgagccagttcaccagtctaggtggcgccagctgatccatcggaatgtacttcctaagaaataccacaaacaccaagcttaggtttt

SEQ ID NO: 8706 - DNA, 122 bp, Homo sapiens
  misc_feature (61)..(62): /note="This region represents a CpG dinucleotide"
  misc_feature (61)..(61): /note="Nucleotide may be methylated to form 5-methylcytosine"
gcttgatatgtaccagatagggctggaacactttgtcataccagttagtgaggaaactatcgaaggttactgaggctcatgtgcaaaggacttgagtcagcttgaaggaggtgccactggtc

SEQ ID NO: 8707 - DNA, 122 bp, Homo sapiens
  misc_feature (61)..(62): /note="This region represents a CpG dinucleotide"
  misc_feature (61)..(61): /note="Nucleotide may be methylated to form 5-methylcytosine"
ctatgaacttttgttgattagtagataatagacagctggagcttcttaataccagacttacgcacctaaccttttggggaaatgtgctccaaaggtctgtggcaaggactctggatccactg

SEQ ID NO: 8708 - DNA, 122 bp, Homo sapiens
  misc_feature (61)..(62): /note="This region represents a CpG dinucleotide"
  misc_feature (61)..(61): /note="Nucleotide may be methylated to form 5-methylcytosine"
gtcagactgtcttgtgggagtggggcatgcagattaaaaatgacttcacagcccctccctcgcaggttagggagcatgacatctattggcagctgggcatctgatggctgagagccaggcac

SEQ ID NO: 8709 - DNA, 122 bp, Homo sapiens
  misc_feature (61)..(62): /note="This region represents a CpG dinucleotide"
  misc_feature (61)..(61): /note="Nucleotide may be methylated to form 5-methylcytosine"
aaatgggttcaatgtaattttgtaagcttttgaagatgcttacccttcccttgtgagacacgatacacattgtctccccttgtgcttagctttgtcctaatatgggaaacaatgataaccac

SEQ ID NO: 8710 - DNA, 122 bp, Homo sapiens
  misc_feature (61)..(62): /note="This region represents a CpG dinucleotide"
  misc_feature (61)..(61): /note="Nucleotide may be methylated to form 5-methylcytosine"
tcagaacagcaaaatctaagatgtgttcaggcaatgaagtgctggagtctcacatactggcgccaagtgagtcattgtttcccagcaattgggacttaacacttgttggaacacaacaaatg

SEQ ID NO: 8711 - DNA, 122 bp, Homo sapiens
  misc_feature (61)..(62): /note="This region represents a CpG dinucleotide"
  misc_feature (61)..(61): /note="Nucleotide may be methylated to form 5-methylcytosine"
ggtgacataagcatgaacagaactgtggaagcactagagcaggatcagcacatcatgcctcggggaagcaggagacagcattatatatggtaattcaaaattaaatggaatcatgagcaacc

SEQ ID NO: 8712 - DNA, 122 bp, Homo sapiens
  misc_feature (61)..(62): /note="This region represents a CpG dinucleotide"
  misc_feature (61)..(61): /note="Nucleotide may be methylated to form 5-methylcytosine"
tcatttttaaaatatctgaagtcctttcatattcatgacctcattcaccatcatgtgagacgggttgggtggctttgttgttgcttaagattctcagaatcctagaagctgaacttcactat

SEQ ID NO: 8713 - DNA, 122 bp, Homo sapiens
  misc_feature (61)..(62): /note="This region represents a CpG dinucleotide"
  misc_feature (61)..(61): /note="Nucleotide may be methylated to form 5-methylcytosine"
caaatcccaagccccagcatatctacaaatacacaaaccttttccctagtggtgttgattcgtaggcacctacttgcatgtatatatgcctttagggagtctggctgaggcatgcctgatct

SEQ ID NO: 8714 - DNA, 122 bp, Homo sapiens
  misc_feature (61)..(62): /note="This region represents a CpG dinucleotide"
  misc_feature (61)..(61): /note="Nucleotide may be methylated to form 5-methylcytosine"
ccttgagaagagtctgattttcagcaccttgatcaatgtgtgacacatacatgcttcatgcgcagagaaggaaatgatttcactacagtgtaattattctcagaattcaatacctgtatttc

SEQ ID NO: 8715 - DNA, 122 bp, Homo sapiens
  misc_feature (61)..(62): /note="This region represents a CpG dinucleotide"
  misc_feature (61)..(61): /note="Nucleotide may be methylated to form 5-methylcytosine"
tcccaagtatgtctgattcagagcctgtgcaatttcctagcaggtcaaaataatgaaggacgcattgccagggtctcctgttccagtgtagcctgcttccttgaggtccctgtacatctcat

SEQ ID NO: 8716 - DNA, 122 bp, Homo sapiens
  misc_feature (61)..(62): /note="This region represents a CpG dinucleotide"
  misc_feature (61)..(61): /note="Nucleotide may be methylated to form 5-methylcytosine"
agatttttttctagcctgaaataagtgagctgtcatccagttctggcacttttgtgcttccgttagtactgcagggagtcatcctcaaagagcattatcaccactgacctgtcaccagaaag

SEQ ID NO: 8717 - DNA, 122 bp, Homo sapiens
  misc_feature (61)..(62): /note="This region represents a CpG dinucleotide"
  misc_feature (61)..(61): /note="Nucleotide may be methylated to form 5-methylcytosine"
aagcagataatacaatccaggaaacatgagcaccagaacataatgccacattcaaaacaacgtcatgctgacatcacacaatggcaccactcacagtcacttttactttccccaagggatag

SEQ ID NO: 8718 - DNA, 122 bp, Homo sapiens
  misc_feature (61)..(62): /note="This region represents a CpG dinucleotide"
  misc_feature (61)..(61): /note="Nucleotide may be methylated to form 5-methylcytosine"
ctggatcaaccacatactggtggacgatgagccagcggtggatcaaaacagattccctaacgatggacagacaggcaatggcgcctaggtactattgttgaagatttcctattttaaatctt

SEQ ID NO: 8719 - DNA, 122 bp, Homo sapiens
  misc_feature (61)..(62): /note="This region represents a CpG dinucleotide"
  misc_feature (61)..(61): /note="Nucleotide may be methylated to form 5-methylcytosine"
ttcaagagcagggcctgggcaaggccaagaaccatgcagaagccttcctggtgaggtggccgtgaagccgaagcagggaggtgggtgagacagagggtggggaggatagtgtctggctcatt

SEQ ID NO: 8720 - DNA, 122 bp, Homo sapiens
  misc_feature (61)..(62): /note="This region represents a CpG dinucleotide"
  misc_feature (61)..(61): /note="Nucleotide may be methylated to form 5-methylcytosine"
tcgtgattacaggcgtgagcccagccaacaatggatgtttttgactctaggtctcttgcacgcaacatctcaagctttccagcagtggtagtgttaccagtggtggaattcacacaaatctg

SEQ ID NO: 8721 - DNA, 122 bp, Homo sapiens
  misc_feature (61)..(62): /note="This region represents a CpG dinucleotide"
  misc_feature (61)..(61): /note="Nucleotide may be methylated to form 5-methylcytosine"
gcttcattatagagttcttattaccagcataacattgcctgccactgactcagagtcacacgtctctgctccacaaagaaagaagctgtccttgccgtgggtgacagccattgagaactaca

SEQ ID NO: 8722 - DNA, 122 bp, Homo sapiens
  misc_feature (61)..(62): /note="This region represents a CpG dinucleotide"
  misc_feature (61)..(61): /note="Nucleotide may be methylated to form 5-methylcytosine"
ccaagtccagctgaatcacctcccatagggcttgtcaatcctgtcacagtgagctatgatcgtgccactgtaccccagcatgggggacagagtgagatcctgtctataaattaaataaagca

SEQ ID NO: 8723 - DNA, 122 bp, Homo sapiens
  misc_feature (61)..(62): /note="This region represents a CpG dinucleotide"
  misc_feature (61)..(61): /note="Nucleotide may be methylated to form 5-methylcytosine"
atgctgagtctccttgtacccacatcacctttttatgaggtcagtgttaccaagaggacccgcacacaggggaggaagaggcaggagaccaaaggaactcagtgcttgcctccagtgatgag

SEQ ID NO: 8724 - DNA, 122 bp, Homo sapiens
  misc_feature (61)..(62): /note="This region represents a CpG dinucleotide"
  misc_feature (61)..(61): /note="Nucleotide may be methylated to form 5-methylcytosine"
gtgttagtctggtaaattgtctgttgacatattcagttgctgactcacaggcgactcaaacggaacatatcccatgtgaatttcaaatctccctttctgcttcatctaaaatttctcttcca

SEQ ID NO: 8725 - DNA, 122 bp, Homo sapiens
  misc_feature (61)..(62): /note="This region represents a CpG dinucleotide"
  misc_feature (61)..(61): /note="Nucleotide may be methylated to form 5-methylcytosine"
cacaaattctgcattcaaatagttccccactacaaagttaattccaacatcttagactagcgttctatgtcatctatctgactcactttaccagtccaactcaattcccttacctcctactt

SEQ ID NO: 8726 - DNA, 122 bp, Homo sapiens
  misc_feature (61)..(62): /note="This region represents a CpG dinucleotide"
  misc_feature (61)..(61): /note="Nucleotide may be methylated to form 5-methylcytosine"
gatttggtttaatcggagcctcagctcatcagttaatttcactgtgtctgatctttcattcgtaaaatgagagataacctatctgacagccagataaagaggaataaagtttgcaaagcact

SEQ ID NO: 8727 - DNA, 122 bp, Homo sapiens
  misc_feature (61)..(62): /note="This region represents a CpG dinucleotide"
  misc_feature (61)..(61): /note="Nucleotide may be methylated to form 5-methylcytosine"
caaatgattcatcctgagaaggcagtcaagtcccatttgtttctcaggactcccaaaagacgtccaggcagaagagttctgggacccgagtcagcatcaagtgccttggacatttactgagc

SEQ ID NO: 8728 - DNA, 122 bp, Homo sapiens
  misc_feature (61)..(62): /note="This region represents a CpG dinucleotide"
  misc_feature (61)..(61): /note="Nucleotide may be methylated to form 5-methylcytosine"
aattaattggagagcttaacctaagcaacctctaaagcagggcgtgaccctgaggaaaagcgaatggaaattctgtgaggggaccagttccaagaaccaaccacagcccttccatgaaaagg

SEQ ID NO: 8729 - DNA, 122 bp, Homo sapiens
  misc_feature (61)..(62): /note="This region represents a CpG dinucleotide"
  misc_feature (61)..(61): /note="Nucleotide may be methylated to form 5-methylcytosine"
ttctctctttatgattaagaagtgactgccacttccatgcacatcctaggggttacctaacgtggctctaaaatgtccttggcaaatgttcttactgcttctccaattacattaaactatgg

SEQ ID NO: 8730 - DNA, 122 bp, Homo sapiens
  misc_feature (61)..(62): /note="This region represents a CpG dinucleotide"
  misc_feature (61)..(61): /note="Nucleotide may be methylated to form 5-methylcytosine"
acttccacccagtgcttgcaatgcttgttctggggcacacctgagactgccccactgtgacgaagccattccccagctagccctgcccctagccattgagtcatcacagctgaggacaagtc

SEQ ID NO: 8731 - DNA, 122 bp, Homo sapiens
  misc_feature (61)..(62): /note="This region represents a CpG dinucleotide"
  misc_feature (61)..(61): /note="Nucleotide may be methylated to form 5-methylcytosine"
aaaagaattcccaaactgccacagcatgaattgaaaacataccatctgcagctgcttagccgcagctactgcccccaaatcaaatgaaaggctcaagaaatgctcagctgtgttcttattgc

SEQ ID NO: 8732 - DNA, 122 bp, Homo sapiens
  misc_feature (61)..(62): /note="This region represents a CpG dinucleotide"
  misc_feature (61)..(61): /note="Nucleotide may be methylated to form 5-methylcytosine"
tctcttcttacctgactcactgtcccaattttggatctcagccacactgggtttagctgacggatgtcatggccatcaagactaatagttccttgttgagaggaaaggaaaggaaagagtca

SEQ ID NO: 8733 - DNA, 122 bp, Homo sapiens
  misc_feature (61)..(62): /note="This region represents a CpG dinucleotide"
  misc_feature (61)..(61): /note="Nucleotide may be methylated to form 5-methylcytosine"
atgctgttacccttagggtagtttctgtgacctgcctagtctcagccttctaggcctgctcgttctctctgctaaactgagagataagccagtgctggatgtcaaaggtggaggcagcaaag

SEQ ID NO: 8734 - DNA, 122 bp, Homo sapiens
  misc_feature (61)..(62): /note="This region represents a CpG dinucleotide"
  misc_feature (61)..(61): /note="Nucleotide may be methylated to form 5-methylcytosine"
ccctctcagagacaaagagtggcagaagcaatctaggagctggagtcatatgaggaaatgcgtatcacttgctcacagactgctgtgagtaaagttcaggatgggtcacctggaagtaggaa

SEQ ID NO: 8735 - DNA, 122 bp, Homo sapiens
  misc_feature (61)..(62): /note="This region represents a CpG dinucleotide"
  misc_feature (61)..(61): /note="Nucleotide may be methylated to form 5-methylcytosine"
tgtcggtgagcgtcttggtcttaaacttcattccaggtgcggtcgacagctgtaggatcacgtaagggtcggcctcactcactgccaaggttaaggaagtcttcgtgagggagtactcccca

SEQ ID NO: 8736 - DNA, 122 bp, Homo sapiens
  misc_feature (61)..(62): /note="This region represents a CpG dinucleotide"
  misc_feature (61)..(61): /note="Nucleotide may be methylated to form 5-methylcytosine"
gctgggattatgggtgtgcactaccacgcccagccaaggcttagacattttagaatgaggcgatcctgatttcagttctaccagagtcatgaccccactatgctgctgatgaagactgggga

SEQ ID NO: 8737 - DNA, 122 bp, Homo sapiens
  misc_feature (61)..(62): /note="This region represents a CpG dinucleotide"
  misc_feature (61)..(61): /note="Nucleotide may be methylated to form 5-methylcytosine"
tggtcaacatctgctctgactggttgtcaaatattctgacattagacacagccccaggcacgtcctgcacacatgcactcacacaatgtcccacagggacacacagtgttcagaattgtcac

SEQ ID NO: 8738 - DNA, 122 bp, Homo sapiens
  misc_feature (61)..(62): /note="This region represents a CpG dinucleotide"
  misc_feature (61)..(61): /note="Nucleotide may be methylated to form 5-methylcytosine"
tacacatcatttctttcatttttggcctgtggataggagcaaagctgtattcagactaaccgggcccaggtacaaacaacctgtagctcattctacctctgattcatctcttgaattctgtt

SEQ ID NO: 8739 - DNA, 122 bp, Homo sapiens
  misc_feature (61)..(62): /note="This region represents a CpG dinucleotide"
  misc_feature (61)..(61): /note="Nucleotide may be methylated to form 5-methylcytosine"
tctgtgcagggcaccagtcttggtaagcaaggtgcaggctggatttgcgtccctgctcaccgccttggtccagggcccttgtgcagtgaacaacctgtccaaccacacaggcagctctgact

SEQ ID NO: 8740 - DNA, 122 bp, Homo sapiens
  misc_feature (61)..(62): /note="This region represents a CpG dinucleotide"
  misc_feature (61)..(61): /note="Nucleotide may be methylated to form 5-methylcytosine"
tgatacacagtgacccagaccgatagaactcatgaattaaaaacaaatgttaatccatttcggcttcatttctatccccgagatttcctaatggttttgtttcccaatccatttgaacaaaa

SEQ ID NO: 8741 - DNA, 122 bp, Homo sapiens
  misc_feature (61)..(62): /note="This region represents a CpG dinucleotide"
  misc_feature (61)..(61): /note="Nucleotide may be methylated to form 5-methylcytosine"
ctcaggttgactcataatatgtcattttgctttgttgggattagtgtatagaaagttaagcgacactattccatgtactttgttaatcggggatagtaagtgaaatatcacattctacctgt

SEQ ID NO: 8742 - DNA, 122 bp, Homo sapiens
  misc_feature (61)..(62): /note="This region represents a CpG dinucleotide"
  misc_feature (61)..(61): /note="Nucleotide may be methylated to form 5-methylcytosine"
gactacaccttctgtagcttgggtttggttcccaagttgtcatgtttcaggaatgaagaacgggatattcaagaagacttctctcaaatgacgggctatttacagagcatttagatctggtt

SEQ ID NO: 8743 - DNA, 122 bp, Homo sapiens
  misc_feature (61)..(62): /note="This region represents a CpG dinucleotide"
  misc_feature (61)..(61): /note="Nucleotide may be methylated to form 5-methylcytosine"
gaccatatgaaccacacaaatcctatataaaggaccaaagacaggtgtaaaatagagaaacgtggcaccccggagaatctgctgactgtgtctattttgcccagggtttcccatatggctgg

SEQ ID NO: 8744 - DNA, 122 bp, Homo sapiens
  misc_feature (61)..(62): /note="This region represents a CpG dinucleotide"
  misc_feature (61)..(61): /note="Nucleotide may be methylated to form 5-methylcytosine"
gaacaatttgggcatccataccgtttgatggagcaactttatccctaatttatagcgcaacgtgtgcaaaacaagcacatggatagaatagtcaatgtggcagcatctgtaagtcgaagatt

SEQ ID NO: 8745 - DNA, 122 bp, Homo sapiens
  misc_feature (61)..(62): /note="This region represents a CpG dinucleotide"
  misc_feature (61)..(61): /note="Nucleotide may be methylated to form 5-methylcytosine"
tggcagccagcaggaaacagggactttctagcactaaagcattagtgctgaggtcctggccgtgcccagaaattgccatgtgggtgctctggagttttgaggttgacaactgcaagttgtgt

SEQ ID NO: 8746 - DNA, 122 bp, Homo sapiens
  misc_feature (61)..(62): /note="This region represents a CpG dinucleotide"
  misc_feature (61)..(61): /note="Nucleotide may be methylated to form 5-methylcytosine"
tgggcactgtcagattaaaggtgcagtggttctaaatgctgtttgttccagccctgtcttcgattgcaacaatgtgagtgtcttgtctgtgctggtggattattaacagaggttattggtct

SEQ ID NO: 8747 - DNA, 122 bp, Homo sapiens
  misc_feature (61)..(62): /note="This region represents a CpG dinucleotide"
  misc_feature (61)..(61): /note="Nucleotide may be methylated to form 5-methylcytosine"
ttgtgtcattctgcaaagagcactatgacttctgggtttccctgagtcaaactggatcatcgtggcctaattagtgtggtgccagcccattcccaaccatctgccagatgcctccaagcccc

SEQ ID NO: 8748 - DNA, 122 bp, Homo sapiens
  misc_feature (61)..(62): /note="This region represents a CpG dinucleotide"
  misc_feature (61)..(61): /note="Nucleotide may be methylated to form 5-methylcytosine"
cacacaatggagtatcattcaatcacaggcaggaacaaagtactgatgcatgccactacacgaatggcccgaaaaccattatgtgaaggaaagaagccaggcaccaaagaccccatattgta

SEQ ID NO: 8749 - DNA, 122 bp, Homo sapiens
  misc_feature (61)..(62): /note="This region represents a CpG dinucleotide"
  misc_feature (61)..(61): /note="Nucleotide may be methylated to form 5-methylcytosine"
ctgccaggccctaggcctagggccccaccctaggaatgttcagcccccaatcatcatcagcggcactggctagagagcaagtctaagggaagctggcctcagtgtttctggaaactcaggaa

SEQ ID NO: 8750 - DNA, 122 bp, Homo sapiens
  misc_feature (61)..(62): /note="This region represents a CpG dinucleotide"
  misc_feature (61)..(61): /note="Nucleotide may be methylated to form 5-methylcytosine"
tggggaacagcatgaccagaatttacagctgaaccaactctgcctcggagctgtcctttgcgcaactgcttgggcagcatcagaatcacctgaaaggtttgctggacccattcctggaggtc

SEQ ID NO: 8751 - DNA, 122 bp, Homo sapiens
  misc_feature (61)..(62): /note="This region represents a CpG dinucleotide"
  misc_feature (61)..(61): /note="Nucleotide may be methylated to form 5-methylcytosine"
gtcagggcctaagggtccaggaatcactgtctaccttaggagtttgttaataaatcgccacggtgagttgggtaatgtttgagagcaaaatgaaataaaatgtcctatatgtgtttaagcta

SEQ ID NO: 8752 - DNA, 122 bp, Homo sapiens
  misc_feature (61)..(62): /note="This region represents a CpG dinucleotide"
  misc_feature (61)..(61): /note="Nucleotide may be methylated to form 5-methylcytosine"
tcccaatcactgacaaagaagtaaaatacattatcaggtgaccaggcaagaatatacttacgacttggtctaaatcttaaggaagacaattaattaactgggaagcatagagcaacaatgag

SEQ ID NO: 8753 - DNA, 122 bp, Homo sapiens
  misc_feature (61)..(62): /note="This region represents a CpG dinucleotide"
  misc_feature (61)..(61): /note="Nucleotide may be methylated to form 5-methylcytosine"
gtgagcatttctgacctgcttaaatttcagagactctccagcctggatttcctcagctgacgcaaccagttgggctgtaccctgagctttaggaattgacaaacagactggtgccaggaagg

SEQ ID NO: 8754 - DNA, 122 bp, Homo sapiens
  misc_feature (61)..(62): /note="This region represents a CpG dinucleotide"
  misc_feature (61)..(61): /note="Nucleotide may be methylated to form 5-methylcytosine"
atactggcctaagcaaagaagagatttatataacagaaacagaaaagttcacagggcttccggtgcaactggattcaggaactcaaacaatgtcatcagaaatctgtctatctctatcgctt

SEQ ID NO: 8755 - DNA, 122 bp, Homo sapiens
  misc_feature (61)..(62): /note="This region represents a CpG dinucleotide"
  misc_feature (61)..(61): /note="Nucleotide may be methylated to form 5-methylcytosine"
atgtttatttgcacaaaatctctaaagtcctagggccaggagactactggtcattttgtccgtcttcctgcctcctagctaggacactttaagtcataataataatattcctgaagggtttc

SEQ ID NO: 8756 - DNA, 122 bp, Homo sapiens
  misc_feature (61)..(62): /note="This region represents a CpG dinucleotide"
  misc_feature (61)..(61): /note="Nucleotide may be methylated to form 5-methylcytosine"
gaaaagcccattaaaaagaaaaaagcctgcaatcaagtgtgccaccacttcaatgcctggcgcctatgcttggatcatctgctctggcacctgcagttacttctgtgtccctcccacaatct

SEQ ID NO: 8757 - DNA, 122 bp, Homo sapiens
  misc_feature (61)..(62): /note="This region represents a CpG dinucleotide"
  misc_feature (61)..(61): /note="Nucleotide may be methylated to form 5-methylcytosine"
tatctgccttacacatttctgttttgccagaccagctccttaatatttaatatgtgatgacgtccagggttttaattttattaaacactgaaagagagcttgttaaaatttcacaatatgac

SEQ ID NO: 8758 - DNA, 122 bp, Homo sapiens
  misc_feature (61)..(62): /note="This region represents a CpG dinucleotide"
  misc_feature (61)..(61): /note="Nucleotide may be methylated to form 5-methylcytosine"
tccctgaccttagctgtcctcaggataaaacttcccacaagatcaacttcagaagctgtacgtgttttgtgtggcttatacaacatggttaaaaaaaatctgagcccagatttaataatggt

SEQ ID NO: 8759 - DNA, 122 bp, Homo sapiens
  misc_feature (61)..(62): /note="This region represents a CpG dinucleotide"
  misc_feature (61)..(61): /note="Nucleotide may be methylated to form 5-methylcytosine"
aaaaaagtaagctgagggctcaagggccacacaggtcttcaagaggcccagcccgggatccgcacacccgagaaccctgtgctgagtcaggatccccttctgtggacacaagataggagtgg

SEQ ID NO: 8760 - DNA, 122 bp, Homo sapiens
  misc_feature (61)..(62): /note="This region represents a CpG dinucleotide"
  misc_feature (61)..(61): /note="Nucleotide may be methylated to form 5-methylcytosine"
gattgatcctaaacttccctcctgcattcatgggagttagctgacaggaaatacacagtgcgaggaagtggtgagtgagagaaaaaaaaaaaacagctaactgataagatcttaattgcaag

SEQ ID NO: 8761 - DNA, 122 bp, Homo sapiens
  misc_feature (61)..(62): /note="This region represents a CpG dinucleotide"
  misc_feature (61)..(61): /note="Nucleotide may be methylated to form 5-methylcytosine"
gctgttggcatgctgggtgcacggtaattagtgtttaccctgaaagctccaaatgcttcccgtggtatttcgccatcccattttgcagatgtggcccacagaggaagcttttgccccacaga

SEQ ID NO: 8762 - DNA, 122 bp, Homo sapiens
  misc_feature (61)..(62): /note="This region represents a CpG dinucleotide"
  misc_feature (61)..(61): /note="Nucleotide may be methylated to form 5-methylcytosine"
tctcagggcgagccaaggttgcttcatgggggccatgagacttcagtatttccctttcgtcgcaaggcatgctggtggagatgacacacgggcagaaaagcttagtggttaagagtttgagc

SEQ ID NO: 8763 - DNA, 122 bp, Homo sapiens
  misc_feature (61)..(62): /note="This region represents a CpG dinucleotide"
  misc_feature (61)..(61): /note="Nucleotide may be methylated to form 5-methylcytosine"
gaagcaacaagatgaaaagatgtcatgggtggagcaaggaaagcagccaattggaagtcacgtgtgtgctaatatcacaaggaagcagaaaccatgaataagcagaggaagtgcattggtgg

SEQ ID NO: 8764 - DNA, 122 bp, Homo sapiens
  misc_feature (61)..(62): /note="This region represents a CpG dinucleotide"
  misc_feature (61)..(61): /note="Nucleotide may be methylated to form 5-methylcytosine"
gaacccacctgtcttcctgagtcatcctgcctcacagggctggttcatgtctctccctaacggtgctctccagaatcagcttctcctggagaagtcaacaaggacacttcatgagctccacc

SEQ ID NO: 8765 - DNA, 122 bp, Homo sapiens
  misc_feature (61)..(62): /note="This region represents a CpG dinucleotide"
  misc_feature (61)..(61): /note="Nucleotide may be methylated to form 5-methylcytosine"
tcttcagagccatctcatggaggcaaaaactaaggatgaccatggggtgcccgcatgactcgccactgcagtgagtggggagaagaaagagccacacccatctgactgcatgttaaatgact

SEQ ID NO: 8766 - DNA, 122 bp, Homo sapiens
  misc_feature (61)..(62): /note="This region represents a CpG dinucleotide"
  misc_feature (61)..(61): /note="Nucleotide may be methylated to form 5-methylcytosine"
acaggcccgagttccaactgtagctctgacataaccagctgtgtgacactgggcaattcacgtaacttctgtgggcatctccacccttgtttgcagatgagatctgcccccagctctaagat

SEQ ID NO: 8767 - DNA, 122 bp, Homo sapiens
  misc_feature (61)..(62): /note="This region represents a CpG dinucleotide"
  misc_feature (61)..(61): /note="Nucleotide may be methylated to form 5-methylcytosine"
aagggggttgaagtatgacagatctaattttgaatcccggttttactctttattagcccccgtgatcctgattacttaatccgtcagagattcaatttcctcatttgtaatgggtatgatgc

SEQ ID NO: 8768 - DNA, 122 bp, Homo sapiens
  misc_feature (61)..(62): /note="This region represents a CpG dinucleotide"
  misc_feature (61)..(61): /note="Nucleotide may be methylated to form 5-methylcytosine"
ggtgtcgtggttggcaggaagtgccacattcagggatattgacttctggctctttctccacgtgactatgagatgaagcaatttctgaagagggttaagataaaaaccttagatgtcatcca

SEQ ID NO: 8769 - DNA, 122 bp, Homo sapiens
  misc_feature (61)..(62): /note="This region represents a CpG dinucleotide"
  misc_feature (61)..(61): /note="Nucleotide may be methylated to form 5-methylcytosine"
gcaggcccagcattcaccccagagaagcccagggagcttggaggagaagtgcctgagtcacgtgctcctttcaagagagttctccagagataacattgcttttcattttacctcctcaggat

SEQ ID NO: 8770 - DNA, 122 bp, Homo sapiens
  misc_feature (61)..(62): /note="This region represents a CpG dinucleotide"
  misc_feature (61)..(61): /note="Nucleotide may be methylated to form 5-methylcytosine"
tctcacacacgttagaaagtgctcaaaaatattagattttatgattatttcctctaccaacgctctgtgattcatcctgagtgcagaacaagtaaagcacgcaggtaaaaacactgcctaca

SEQ ID NO: 8771 - DNA, 122 bp, Homo sapiens
  misc_feature (61)..(62): /note="This region represents a CpG dinucleotide"
  misc_feature (61)..(61): /note="Nucleotide may be methylated to form 5-methylcytosine"
ttcctcatcatttgtatgctcttgagagagtgactcatgtactgttttctattgagttcccgaaagtttataaagagatgacaaacaattggctatgggattgaaataatgcacatgtaaaa

SEQ ID NO: 8772 - DNA, 122 bp, Homo sapiens
  misc_feature (61)..(62): /note="This region represents a CpG dinucleotide"
  misc_feature (61)..(61): /note="Nucleotide may be methylated to form 5-methylcytosine"
tattgtgcttctgacaatataactttggtcagttcattaaatccacacctaagagaaatacgtagtattcagggattaacatttgttggaaattttggttccctggagggagaaggaatatt

SEQ ID NO: 8773 - DNA, 122 bp, Homo sapiens
  misc_feature (61)..(62): /note="This region represents a CpG dinucleotide"
  misc_feature (61)..(61): /note="Nucleotide may be methylated to form 5-methylcytosine"
agagaatttaaaagcagatttgaatatacaattctcaaagcagaaaaccaaacagcaggccgagtgccatggctcacacctgtaatcccagcccttcaggaggctgaggcaagcagattgct

SEQ ID NO: 8774 - DNA, 122 bp, Homo sapiens
  misc_feature (61)..(62): /note="This region represents a CpG dinucleotide"
  misc_feature (61)..(61): /note="Nucleotide may be methylated to form 5-methylcytosine"
ccaactcccgacctcaggtaatccgcccgcctcggcctcccaaagtgctgggattacaggcgttaagtcacctcgcccagcctttgagaaagggattcttcacatgaattgatgtgagcaca

SEQ ID NO: 8775 - DNA, 122 bp, Homo sapiens
  misc_feature (61)..(62): /note="This region represents a CpG dinucleotide"
  misc_feature (61)..(61): /note="Nucleotide may be methylated to form 5-methylcytosine"
cgtggggaccacactttgagaactaccgccttatctcagagatactcttaacttgtgtatcgtgactcctagtcccctggggatgctttactcctcccctaaaacctagtcactcgatgggt

SEQ ID NO: 8776 - DNA, 122 bp, Homo sapiens
  misc_feature (61)..(62): /note="This region represents a CpG dinucleotide"
  misc_feature (61)..(61): /note="Nucleotide may be methylated to form 5-methylcytosine"
ttacatactcaagtcaatgtgtctgcacaataaagatataatgaagctgcaagaaaggaacgggatgttatgaaagccctgaggaaaagatcttttaagaaataaggaataacctgtggcat

SEQ ID NO: 8777 - DNA, 122 bp, Homo sapiens
  misc_feature (61)..(62): /note="This region represents a CpG dinucleotide"
  misc_feature (61)..(61): /note="Nucleotide may be methylated to form 5-methylcytosine"
ctcatcctaagaaatgggttatagtataatccctagttggcagatcaggaaactgaggcacggaaaggtgtcataatttgcctaagtattggtgaagctgggattcaaaaccagaggctgtg

SEQ ID NO: 8778 - DNA, 122 bp, Homo sapiens
  misc_feature (61)..(62): /note="This region represents a CpG dinucleotide"
  misc_feature (61)..(61): /note="Nucleotide may be methylated to form 5-methylcytosine"
gtcctttgtcctgctgtgtcagccttgtgtttgcttttcccatggccagcactgctgattcgccaggtgtttcctcttttatgctctcttaactttagctttaaaagtggagacatagactc

SEQ ID NO: 8779 - DNA, 122 bp, Homo sapiens
  misc_feature (61)..(62): /note="This region represents a CpG dinucleotide"
  misc_feature (61)..(61): /note="Nucleotide may be methylated to form 5-methylcytosine"
aatcagtacagggtcataagctctgaagccaggttgctggggctttgactctctactctgcgtttactagctgtatgacctatgcctcagtttccttaccttcagaaggacctaatagtgcc

SEQ ID NO: 8780 - DNA, 122 bp, Homo sapiens
  misc_feature (61)..(62): /note="This region represents a CpG dinucleotide"
  misc_feature (61)..(61): /note="Nucleotide may be methylated to form 5-methylcytosine"
ttgaatgttagagttgagaaacttaaggcaggaccattcactgtattgcataattccttgcgcagcctgtgaggtggtttccaggcatgtattcataatgtgaacaatgttccctggctttg

SEQ ID NO: 8781 - DNA, 122 bp, Homo sapiens
  misc_feature (61)..(62): /note="This region represents a CpG dinucleotide"
  misc_feature (61)..(61): /note="Nucleotide may be methylated to form 5-methylcytosine"
attggaatactcctgcacttttctccctttgaatcccaccacggaaagaaaattctgtgacgtgtacccagtatttattggagggtatttcctagcaagaaaatgagggcgattgaccaggc

SEQ ID NO: 8782 - DNA, 122 bp, Homo sapiens
  misc_feature (61)..(62): /note="This region represents a CpG dinucleotide"
  misc_feature (61)..(61): /note="Nucleotide may be methylated to form 5-methylcytosine"
ggctgggtgtgtgtgccgcctctgtgtgagcatgtgctagtcacacagctgggatatggccgtgttttggttccagctctttgggctagagccacgccgcagtagtgatagctccatttggg

SEQ ID NO: 8783 - DNA, 122 bp, Homo sapiens
  misc_feature (61)..(62): /note="This region represents a CpG dinucleotide"
  misc_feature (61)..(61): /note="Nucleotide may be methylated to form 5-methylcytosine"
tgttctttctggtcaagctgcatttgattaaaggaaaccgaaatctacttagggttcaggcgattagaataagaggaagagctggcctttctacagcaatgctagcaggaaaatagaaaatg

SEQ ID NO: 8784 - DNA, 122 bp, Homo sapiens
  misc_feature (61)..(62): /note="This region represents a CpG dinucleotide"
  misc_feature (61)..(61): /note="Nucleotide may be methylated to form 5-methylcytosine"
aggctccggcatgagtctgattttatcctgggtgccttgtaggaagctgccaaaggaaagcgagtgagtaacaggtctgatgtaattatatgacaatattacactgtagcaggacaagccac

SEQ ID NO: 8785 - DNA, 122 bp, Homo sapiens
  misc_feature (61)..(62): /note="This region represents a CpG dinucleotide"
  misc_feature (61)..(61): /note="Nucleotide may be methylated to form 5-methylcytosine"
caagcaatttgcccacctcagcctcccaaagtgctggggattagacatgagccactgtcacggcctaatcttgatatttgaaacacatgataggcgttcctcagtcttgctttcaaaggtac

SEQ ID NO: 8786 - DNA, 122 bp, Homo sapiens
  misc_feature (61)..(62): /note="This region represents a CpG dinucleotide"
  misc_feature (61)..(61): /note="Nucleotide may be methylated to form 5-methylcytosine"
gcctggaaggacatttatatattttcatctcgacagacttcccttcctggtcccgtctggcggagtttactatgacaaagaagtggcctttgctgtgccctcactgacctggaaggctgtat

SEQ ID NO: 8787 - DNA, 122 bp, Homo sapiens
  misc_feature (61)..(62): /note="This region represents a CpG dinucleotide"
  misc_feature (61)..(61): /note="Nucleotide may be methylated to form 5-methylcytosine"
tcagtgttctctctgatcttcaatgttccctgtgctggcagctaagatattcagtgagaccgcattacagcccaacttcccttctgcccaatcctgctttccttttttccctttcccatcaa

SEQ ID NO: 8788 - DNA, 122 bp, Homo sapiens
  misc_feature (61)..(62): /note="This region represents a CpG dinucleotide"
  misc_feature (61)..(61): /note="Nucleotide may be methylated to form 5-methylcytosine"
tgctgtgctggggagtgtcataaagtcctcgttagctgaaaggcactcaggggttctgaccgtacccctgcatcctctgcagagcttccttgggtcttcctgactctgcagaagttactcag

SEQ ID NO: 8789 - DNA, 122 bp, Homo sapiens
  misc_feature (61)..(62): /note="This region represents a CpG dinucleotide"
  misc_feature (61)..(61): /note="Nucleotide may be methylated to form 5-methylcytosine"
cctcaagaacgtgtacgcgcaggggcgtttccttgtccgttaataacacaagctacaggccgagcgtggtggctcacacctgtaatcccagcactttgggaggccgagacgggtggatcacg

SEQ ID NO: 8790 - DNA, 122 bp, Homo sapiens
  misc_feature (61)..(62): /note="This region represents a CpG dinucleotide"
  misc_feature (61)..(61): /note="Nucleotide may be methylated to form 5-methylcytosine"
ccatccaaggagacaatttacagttgagttaatctgggtacattagcgagacatggattccggacgacagaccaatttatgttgtttccctgtccccccttagtgctgctctgtgtgagcaa

SEQ ID NO: 8791 - DNA, 122 bp, Homo sapiens
  misc_feature (61)..(62): /note="This region represents a CpG dinucleotide"
  misc_feature (61)..(61): /note="Nucleotide may be methylated to form 5-methylcytosine"
gctctttgaaagcccacaacagctggcagtaagctccactttctttgacaaaagctttgccgccttctggaaaagtaggccataagttcagacagttttttccttaggatgcatgatgacat

SEQ ID NO: 8792 - DNA, 122 bp, Homo sapiens
  misc_feature (61)..(62): /note="This region represents a CpG dinucleotide"
  misc_feature (61)..(61): /note="Nucleotide may be methylated to form 5-methylcytosine"
agagcttggtagtaagcatgacagtaggtaggtgcggcaggaagtgaatcagggaggtggcgatatgtcaccaagccctttgtgtatgctgctccctggacatactcacattgctgcaggaa

SEQ ID NO: 8793 - DNA, 122 bp, Homo sapiens
  misc_feature (61)..(62): /note="This region represents a CpG dinucleotide"
  misc_feature (61)..(61): /note="Nucleotide may be methylated to form 5-methylcytosine"
tcatacggaaaagcacaacgcaaaaactacagcatatattttttccctctaagctttttccgcacccttgtggacttaccctttgctgcgttctgagagtgcacagatgaccaaatagacca

SEQ ID NO: 8794 - DNA, 122 bp, Homo sapiens
  misc_feature (61)..(62): /note="This region represents a CpG dinucleotide"
  misc_feature (61)..(61): /note="Nucleotide may be methylated to form 5-methylcytosine"
cattatagccactaaaagtctgcagaagtgacaatgctcttgcaggtgagggtagtgatgcgaggagtcattttcatgctagttaagaaatatctatcagggctgggcacggtggcttaagc

SEQ ID NO: 8795 - DNA, 122 bp, Homo sapiens
  misc_feature (61)..(62): /note="This region represents a CpG dinucleotide"
  misc_feature (61)..(61): /note="Nucleotide may be methylated to form 5-methylcytosine"
tccttgtaggaaatggtgcctcagggcttctccagtttcaccagtttccagcaactctaacgcctacttccacagtgcaagaagtacaggacagtctggctagctctgtcattaattgttgg

SEQ ID NO: 8796 - DNA, 122 bp, Homo sapiens
  misc_feature (61)..(62): /note="This region represents a CpG dinucleotide"
  misc_feature (61)..(61): /note="Nucleotide may be methylated to form 5-methylcytosine"
gaagacttaggttcaccaactccattttctattgtgagaatatattttcctgtatcattgcgagtaacttgaggaatggtgagtaatgaggatgaatcagtgttttcaatgctgtatctggc

SEQ ID NO: 8797 - DNA, 122 bp, Homo sapiens
  misc_feature (61)..(62): /note="This region represents a CpG dinucleotide"
  misc_feature (61)..(61): /note="Nucleotide may be methylated to form 5-methylcytosine"
tgtgctattgactttttggggcagaaaatttgttgtggacctttcctgtatgttgtaccacgtggaggtttattggtcttcacccgttaggtaccaatagcctctagttgtgacaacccaaa

SEQ ID NO: 8798 - DNA, 122 bp, Homo sapiens
  misc_feature (61)..(62): /note="This region represents a CpG dinucleotide"
  misc_feature (61)..(61): /note="Nucleotide may be methylated to form 5-methylcytosine"
tgtttgttcatgtcaccagcagggtgacattgtcaaccccatggaatgactgagcaatagcgataggaataaggctgaggaagacatctggaggtattgacagggatttgcatgggaggtgc

SEQ ID NO: 8799 - DNA, 122 bp, Homo sapiens
  misc_feature (61)..(62): /note="This region represents a CpG dinucleotide"
  misc_feature (61)..(61): /note="Nucleotide may be methylated to form 5-methylcytosine"
ttcatagcatggaagtcactggtgacctcagcaagggttattagagaggaatcatgaaggcggatctcggagtgagttggataagtaggtgaaaggaaatattggcaagtacagacgattat

SEQ ID NO: 8800 - DNA, 122 bp, Homo sapiens
  misc_feature (61)..(62): /note="This region represents a CpG dinucleotide"
  misc_feature (61)..(61): /note="Nucleotide may be methylated to form 5-methylcytosine"
gttcgggcaggtgagataatacctaacctgaagcaaattatcggatgcagaggcttagagcgagtgacttgtattctttactgaagaatataagacctgggggcttcacttaaacgccaaag

SEQ ID NO: 8801 - DNA, 122 bp, Homo sapiens
  misc_feature (61)..(62): /note="This region represents a CpG dinucleotide"
  misc_feature (61)..(61): /note="Nucleotide may be methylated to form 5-methylcytosine"
agtggtttttagctctttcctgctttttagctccttagcatttagccttgtttcacaggccgctgttacacatgaagaatgctgctgtgtggagtgcccttccttgtattacatgtccttca

SEQ ID NO: 8802 - DNA, 122 bp, Homo sapiens
  misc_feature (61)..(62): /note="This region represents a CpG dinucleotide"
  misc_feature (61)..(61): /note="Nucleotide may be methylated to form 5-methylcytosine"
agtcatatgtgtgacaaaacccagctgcttcaactggaaatgagtttggcagcaatggtccggaacaccaataaattgaatacccaagagctaaaggtcatcctgcccccagaaccagtgct

SEQ ID NO: 8803 - DNA, 122 bp, Homo sapiens
  misc_feature (61)..(62): /note="This region represents a CpG dinucleotide"
  misc_feature (61)..(61): /note="Nucleotide may be methylated to form 5-methylcytosine"
cagactgtgcttcgggaagctgggtgtgagctgttgagtggccagttctcaagatgctgacggatacactgaggtcagcaaaattgcctatgattctggaaggcatgctggctcctgccctg

SEQ ID NO: 8804 - DNA, 122 bp, Homo sapiens
  misc_feature (61)..(62): /note="This region represents a CpG dinucleotide"
  misc_feature (61)..(61): /note="Nucleotide may be methylated to form 5-methylcytosine"
cttctttggccatcatcctgtgaagtggtggcactgcctctcacagtgaggtcactgagccgtctcaggagagtgatgctctgagggaggaacgtgagtgggagctgaagggagaggcatgg

SEQ ID NO: 8805 - DNA, 122 bp, Homo sapiens
  misc_feature (61)..(62): /note="This region represents a CpG dinucleotide"
  misc_feature (61)..(61): /note="Nucleotide may be methylated to form 5-methylcytosine"
cctggagggcagaagctataccttattctactttttacacccaatggctggcagagagctcgccacatagtagatgcccaataaaggtttgtcttgaatttttgctggccagtgtgacccta

SEQ ID NO: 8806 - DNA, 122 bp, Homo sapiens
  misc_feature (61)..(62): /note="This region represents a CpG dinucleotide"
  misc_feature (61)..(61): /note="Nucleotide may be methylated to form 5-methylcytosine"
tggatggtgtgaagcaatctgttttctagcccgagcctgcatagctggtggatcctggaccgtgattaagtgcatcacctaggcttcaatgagatggagtcactgtgtgtccaaacagtggg

SEQ ID NO: 8807 - DNA, 122 bp, Homo sapiens
  misc_feature (61)..(62): /note="This region represents a CpG dinucleotide"
  misc_feature (61)..(61): /note="Nucleotide may be methylated to form 5-methylcytosine"
cactggggtccaggctggcattcccatgccctgttttaccactgccctctccttctatgacgggtacagacatgagatgcttccagccagcctcatccaggtaagcctgtggagcagggatt

SEQ ID NO: 8808 - DNA, 122 bp, Homo sapiens
  misc_feature (61)..(62): /note="This region represents a CpG dinucleotide"
  misc_feature (61)..(61): /note="Nucleotide may be methylated to form 5-methylcytosine"
aggaatcaggaaaggattttcaatatgaaggcttttgatcagacttttctctctagcctacgtaaggtgataataactctgtttgatatctcttggggtcagaatattgatgatgatagatt

SEQ ID NO: 8809 - DNA, 122 bp, Homo sapiens
  misc_feature (61)..(62): /note="This region represents a CpG dinucleotide"
  misc_feature (61)..(61): /note="Nucleotide may be methylated to form 5-methylcytosine"
acacctgcttctgccttggatctgttgcaacatcacatgtctgtagctgctggaggactccgctgtgcactcatgaaagaaaaagtgacaaaggcaaataacatagtattatgaaaatagtt

SEQ ID NO: 8810 - DNA, 122 bp, Homo sapiens
  misc_feature (61)..(62): /note="This region represents a CpG dinucleotide"
  misc_feature (61)..(61): /note="Nucleotide may be methylated to form 5-methylcytosine"
ctctcaaagtggtaggattacagccatgagctaccatgcccggcctgtcatactttttttcggaaacaaaagattagttctgtatttcaacattaacaatgaccacactctgactcaatatt

SEQ ID NO: 8811 - DNA, 122 bp, Homo sapiens
  misc_feature (61)..(62): /note="This region represents a CpG dinucleotide"
  misc_feature (61)..(61): /note="Nucleotide may be methylated to form 5-methylcytosine"
cacgcccggcacaagccatctcctgcactgccaaagttatgggattacaagtgtgacttacggcttctgcattttgtgttgtagtaagagatgcttttacattctgaggtttttaaataatt

SEQ ID NO: 8812 - DNA, 122 bp, Homo sapiens
  misc_feature (61)..(62): /note="This region represents a CpG dinucleotide"
  misc_feature (61)..(61): /note="Nucleotide may be methylated to form 5-methylcytosine"
gcatccacaaagaatttacagaccataaataacacttgtctgaggcattaatgattgacacggtcaaaaagcaaatctgctggctgggtaatcagatcagcactcctgacaccatgcccact

SEQ ID NO: 8813 - DNA, 122 bp, Homo sapiens
  misc_feature (61)..(62): /note="This region represents a CpG dinucleotide"
  misc_feature (61)..(61): /note="Nucleotide may be methylated to form 5-methylcytosine"
atggtgaggtgatctgaatacatattggtaagacagcagtgaaaacagcttccctgtcctcgttcaggttgaaggaaatcccgtcaatagacctgggtcctagggcctgagattgccctttt

SEQ ID NO: 8814 - DNA, 122 bp, Homo sapiens
  misc_feature (61)..(62): /note="This region represents a CpG dinucleotide"
  misc_feature (61)..(61): /note="Nucleotide may be methylated to form 5-methylcytosine"
gacttgaaaaacgccctattatttagactgacctaattcaaagttctttgcagcttacctcgtgctaatcactggcaagtggtctccagctgctctttggttttggttgtttcacgtccttg

SEQ ID NO: 8815 - DNA, 122 bp, Homo sapiens
  misc_feature (61)..(62): /note="This region represents a CpG dinucleotide"
  misc_feature (61)..(61): /note="Nucleotide may be methylated to form 5-methylcytosine"
catgcccagccccaatctctgcatttctgagagctcatagcatctttcatccagggccctcgtaccaccttctttgctgttatcctcatgtgtggtattgtttctccaactgtgagcaactc

SEQ ID NO: 8816 - DNA, 122 bp, Homo sapiens
  misc_feature (61)..(62): /note="This region represents a CpG dinucleotide"
  misc_feature (61)..(61): /note="Nucleotide may be methylated to form 5-methylcytosine"
tgaaaaggatggagctgtgactgaagcaatccagctatttagcctaagcatgtgccaacacgcccagctaattttttgtatctttagtagaggtggggtttcaccatgttggccaagatggt

SEQ ID NO: 8817 - DNA, 122 bp, Homo sapiens
  misc_feature (61)..(62): /note="This region represents a CpG dinucleotide"
  misc_feature (61)..(61): /note="Nucleotide may be methylated to form 5-methylcytosine"
aacccctttcctctctgctctcccctcaaaacaagtttcaggatcttgcaggcctcgcggcgtcgttcttcgttgtggcggcctgtggctctttgaaaaacacgacgaggcctgcaaaatgc

SEQ ID NO: 8818 - DNA, 122 bp, Homo sapiens
  misc_feature (61)..(62): /note="This region represents a CpG dinucleotide"
  misc_feature (61)..(61): /note="Nucleotide may be methylated to form 5-methylcytosine"
cgcccagagtgagctgctcactctgtctgtagggaggtgtcacagcagaaaccgccagatcgctgcccgattcaactcccagtagctatgctgtcacataagaaaactgcccagaggctggg

SEQ ID NO: 8819 - DNA, 122 bp, Homo sapiens
  misc_feature (61)..(62): /note="This region represents a CpG dinucleotide"
  misc_feature (61)..(61): /note="Nucleotide may be methylated to form 5-methylcytosine"
cttacaatgtgtatctaaaagcttcctcctgagtgtctgcctcaggccagggctctctgccgggcaccgaaacctactcatatcaaatgctaactatgaagcaaaacactggccaacaatga

SEQ ID NO: 8820 - DNA, 122 bp, Homo sapiens
  misc_feature (61)..(62): /note="This region represents a CpG dinucleotide"
  misc_feature (61)..(61): /note="Nucleotide may be methylated to form 5-methylcytosine"
aaagactttgttgtagcagcagttgttcactcttcaccagtggacacatttccaggccatcgggcatgtgctcacctagattaggagcctgaggtgcccctcccttcctgtgcacagatctt

SEQ ID NO: 8821 - DNA, 122 bp, Homo sapiens
  misc_feature (61)..(62): /note="This region represents a CpG dinucleotide"
  misc_feature (61)..(61): /note="Nucleotide may be methylated to form 5-methylcytosine"
gacaaaggatgcaggtgctggacttagaaatcctgcagtgtggccaggtgcggtggtgcacgcctgaatcccagcactttgcggggccagcgggagatcacgtgagctactagctttgaatc

SEQ ID NO: 8822 - DNA, 122 bp, Homo sapiens
  misc_feature (61)..(62): /note="This region represents a CpG dinucleotide"
  misc_feature (61)..(61): /note="Nucleotide may be methylated to form 5-methylcytosine"
tatcactttcctgtatctaacactaataccacttaggactgcaatagttttctcagcacacgtcactttgtttccctgcttctccaagtctagggtatgcagtgtgcctgagcttgctggtg

SEQ ID NO: 8823 - DNA, 122 bp, Homo sapiens
  misc_feature (61)..(62): /note="This region represents a CpG dinucleotide"
  misc_feature (61)..(61): /note="Nucleotide may be methylated to form 5-methylcytosine"
aggctatgactacttgttcgtggcatgcactctagttctgctgtgacctttgtacctgtgcgagtttgggaagtaggaacttctgtatttgacgaccatttcccttgttcctggcacagtgc

SEQ ID NO: 8824 - DNA, 122 bp, Homo sapiens
  misc_feature (61)..(62): /note="This region represents a CpG dinucleotide"
  misc_feature (61)..(61): /note="Nucleotide may be methylated to form 5-methylcytosine"
attattgtcaaacatatagaagaccttcgtaattccctgagttaatctgtgtgattcattcgtcacaaattcctgcacctattgtaaccaaagctttcagtcacatcctctgcctcttttaa

SEQ ID NO: 8825 - DNA, 122 bp, Homo sapiens
  misc_feature (61)..(62): /note="This region represents a CpG dinucleotide"
  misc_feature (61)..(61): /note="Nucleotide may be methylated to form 5-methylcytosine"
agatggtgagagatgaaaactgaacaacttaactgtgcgcagaaccaccgtgtggccctgcggagaatgcctctgcaggctcaggccacgtggcaacctttcatgctcttctgggagatgtt

SEQ ID NO: 8826 - DNA, 122 bp, Homo sapiens
  misc_feature (61)..(62): /note="This region represents a CpG dinucleotide"
  misc_feature (61)..(61): /note="Nucleotide may be methylated to form 5-methylcytosine"
gatcaaccagctgtttggccagcaggttcccgaagccagagtcacagcctgtgatgaagacgtacttctctgagaggttgccaaccagattgcagttcttgaaccagcgatacataaatgag

SEQ ID NO: 8827 - DNA, 122 bp, Homo sapiens
  misc_feature (61)..(62): /note="This region represents a CpG dinucleotide"
  misc_feature (61)..(61): /note="Nucleotide may be methylated to form 5-methylcytosine"
ccaagcagtcaggcagaaaaggggaattctcctttcccctacttttttgttctactgttacgctttgtagatcagaccatgcccacttacactggcaggggcaatctgcttcactcggtcca

SEQ ID NO: 8828 - DNA, 122 bp, Homo sapiens
  misc_feature (61)..(62): /note="This region represents a CpG dinucleotide"
  misc_feature (61)..(61): /note="Nucleotide may be methylated to form 5-methylcytosine"
gtctgtatcaactaaaatctcatgaaaatcctccctgataaaatagaaggcatggatttacgttctcccagtatacaaccagctgagcactgactttactacctcctggccactaaaagtat

SEQ ID NO: 8829 - DNA, 122 bp, Homo sapiens
  misc_feature (61)..(62): /note="This region represents a CpG dinucleotide"
  misc_feature (61)..(61): /note="Nucleotide may be methylated to form 5-methylcytosine"
gattaagctggtgagtggtgagagacagcagccttgttcaggctgggcactagtggaagacgcaagatgagccatccaggccttcacagatactgagaaaggcagccagagagccaggaaac

SEQ ID NO: 8830 - DNA, 122 bp, Homo sapiens
  misc_feature (61)..(62): /note="This region represents a CpG dinucleotide"
  misc_feature (61)..(61): /note="Nucleotide may be methylated to form 5-methylcytosine"
atgggtcagggctgaaactagagctgtgagtcatctatatagaggtgattatcattcacacgtgtgaatgagcacctaaatttgaatttggtggcaaaggactagttttagggaacattcac

SEQ ID NO: 8831 - DNA, 122 bp, Homo sapiens
  misc_feature (61)..(62): /note="This region represents a CpG dinucleotide"
  misc_feature (61)..(61): /note="Nucleotide may be methylated to form 5-methylcytosine"
ttaaggaagcatcttgccaggagacacaaagctaacaagagtggagcctgcagctggagccgcagagcctaatcactacacccgcccatctctgctagggtttcatgacttcgtatcgggga

SEQ ID NO: 8832 - DNA, 122 bp, Homo sapiens
  misc_feature (61)..(62): /note="This region represents a CpG dinucleotide"
  misc_feature (61)..(61): /note="Nucleotide may be methylated to form 5-methylcytosine"
tggttccataaaatactcatcttagcccagtgtttcttatcaatgggacaggtcttctgtcgtcacaggcttcaccacaccagcctgtttttcacatttgtgtaactccctggtccctgcaa

SEQ ID NO: 8833 - DNA, 122 bp, Homo sapiens
  misc_feature (61)..(62): /note="This region represents a CpG dinucleotide"
  misc_feature (61)..(61): /note="Nucleotide may be methylated to form 5-methylcytosine"
cctgcctggcagcaatgaggtaattttgacagagtctaaaagaagagcactagaaaggcacgttcaagggacatgctggcactggaacatgccagagagaggcaccaagcagtgttggctca

SEQ ID NO: 8834 - DNA, 122 bp, Homo sapiens
  misc_feature (61)..(62): /note="This region represents a CpG dinucleotide"
  misc_feature (61)..(61): /note="Nucleotide may be methylated to form 5-methylcytosine"
aatataagcggacggggaaccgatttttaaccagatcaagttttcaaatatagattaacacgttttaattgtcctataaactattattcttaaagtcactcttaacaaaacccagacttgga

SEQ ID NO: 8835 - DNA, 122 bp, Homo sapiens
  misc_feature (61)..(62): /note="This region represents a CpG dinucleotide"
  misc_feature (61)..(61): /note="Nucleotide may be methylated to form 5-methylcytosine"
cttgaggccattgcagcccagctttggaagcctggatgaatgtgtcagtccagaagctgccgccagaagtcacacccagaggggcagcttagaacaacacatggcaagaaaagctgctttta

SEQ ID NO: 8836 - DNA, 122 bp, Homo sapiens
  misc_feature (61)..(62): /note="This region represents a CpG dinucleotide"
  misc_feature (61)..(61): /note="Nucleotide may be methylated to form 5-methylcytosine"
aaccatagtacactggattttatgtttaagcagcactgatcctcgatagttcagaactcccgcactgaagtccagcgtaggcaggtaaggacaacctggagccaggcattaatactcacttc

SEQ ID NO: 8837 - DNA, 122 bp, Homo sapiens
  misc_feature (61)..(62): /note="This region represents a CpG dinucleotide"
  misc_feature (61)..(61): /note="Nucleotide may be methylated to form 5-methylcytosine"
cttgaacctgggaggcggaggttgcagtgatcccagcctcggtgacaaaagcaaaaactccgtcaagaagaaagaagaagactcagtaaaatgggacctttggaatcagatataagacttgg

SEQ ID NO: 8838 - DNA, 122 bp, Homo sapiens
  misc_feature (61)..(62): /note="This region represents a CpG dinucleotide"
  misc_feature (61)..(61): /note="Nucleotide may be methylated to form 5-methylcytosine"
acgtaacttaaaaagttgctggctccttcagatgtaagccaaaaatacagttctagtctgcgtcagcccacaaaggatgaacaaaggttggcaagtgctgctcttaaaatgcacacatcttt

SEQ ID NO: 8839 - DNA, 122 bp, Homo sapiens
  misc_feature (61)..(62): /note="This region represents a CpG dinucleotide"
  misc_feature (61)..(61): /note="Nucleotide may be methylated to form 5-methylcytosine"
aaacagagtttgaactgtggctcttcactcactacgagttagtaaactaatgccatagcacgctgctcagtacaatgggtactctgaaagaagtgagtgctccctttctcccctgctgtgaa

SEQ ID NO: 8840 - DNA, 122 bp, Homo sapiens
  misc_feature (61)..(62): /note="This region represents a CpG dinucleotide"
  misc_feature (61)..(61): /note="Nucleotide may be methylated to form 5-methylcytosine"
taatccagactttacttgcaaaatccgttaaagcattaagagttctcccttcgccaggtgcggtggctcatgcctgtaatcccagcaatttgggaggccgagacgggctgatcacttgaggt

SEQ ID NO: 8841 - DNA, 122 bp, Homo sapiens
  misc_feature (61)..(62): /note="This region represents a CpG dinucleotide"
  misc_feature (61)..(61): /note="Nucleotide may be methylated to form 5-methylcytosine"
tgaacgaagtgaggtgacaggctctgtaatcatctgggaaaagggcccaggcagaagaaacggaaactgcaaaggcccagaggccaatacaaacttggcgtgttcaagaacaacaaaaaggc

SEQ ID NO: 8842 - DNA, 122 bp, Homo sapiens
  misc_feature (61)..(62): /note="This region represents a CpG dinucleotide"
  misc_feature (61)..(61): /note="Nucleotide may be methylated to form 5-methylcytosine"
aagcagtattgacaagtcccacccagattgccaatcattatgatcaaatgagctaacatacgtggtacatctagctccaagcaataaatgctaatttcttttgactcttcctctacctactt

SEQ ID NO: 8843 - DNA, 122 bp, Homo sapiens
  misc_feature (61)..(62): /note="This region represents a CpG dinucleotide"
  misc_feature (61)..(61): /note="Nucleotide may be methylated to form 5-methylcytosine"
accatacagctaggtgtgcagtaggctataggtttgtgtaagtatactctatgatgtttgcgcaatgatgaaattgcctaaggacacattactcagaaactatccctgttgttatagtagca

SEQ ID NO: 8844 - DNA, 122 bp, Homo sapiens
  misc_feature (61)..(62): /note="This region represents a CpG dinucleotide"
  misc_feature (61)..(61): /note="Nucleotide may be methylated to form 5-methylcytosine"
gaacagtgtggttcagagcacagggccctggagagcatgccctgaaggctgggctgtagccggttctattactggatacttggacaagtcacttgtccggtgtgaatcatttccttttctga

SEQ ID NO: 8845 - DNA, 122 bp, Homo sapiens
  misc_feature (61)..(62): /note="This region represents a CpG dinucleotide"
  misc_feature (61)..(61): /note="Nucleotide may be methylated to form 5-methylcytosine"
cagctagaattggcaactcaagcccttttggtcaggatcctttgctgggtggaagctcctcgcctactaatgcgggtgccctgtggctgaatctggtgaatccatcaggtccaggttgaaaa

SEQ ID NO: 8846 - DNA, 122 bp, Homo sapiens
  misc_feature (61)..(62): /note="This region represents a CpG dinucleotide"
  misc_feature (61)..(61): /note="Nucleotide may be methylated to form 5-methylcytosine"
ttggggtttttattaaaattcgctatcacgatccctctaggtaacccctacacagccacacgtgagagaatggcttcacaatacatacaaattgtggagatctggctattaaaatgccttga

SEQ ID NO: 8847 - DNA, 122 bp, Homo sapiens
  misc_feature (61)..(62): /note="This region represents a CpG dinucleotide"
  misc_feature (61)..(61): /note="Nucleotide may be methylated to form 5-methylcytosine"
tattgcataagccaaaactatggatgtcatcctggagaagagacttccctctctcctccccgagaaatattatcgccttgtcccagtgactatacctcataggtgtttaatccatccacctc

SEQ ID NO: 8848 - DNA, 122 bp, Homo sapiens
  misc_feature (61)..(62): /note="This region represents a CpG dinucleotide"
  misc_feature (61)..(61): /note="Nucleotide may be methylated to form 5-methylcytosine"
cagagtacagagggttaaattgcaggaggtgaggaagtagagaccatggataaggctactcgcaggaagcctggctaagaacagggagtgagctaacaggaaatactggatcaaattgtatt

SEQ ID NO: 8849 - DNA, 122 bp, Homo sapiens
  misc_feature (61)..(62): /note="This region represents a CpG dinucleotide"
  misc_feature (61)..(61): /note="Nucleotide may be methylated to form 5-methylcytosine"
tttcattcagccagatttacccagagttcagaacaggcatccttgtacatagccatacagcgtttgtttctgacttcagtggtggagaaagtgctactttgcaagatagttgacttccttgt

SEQ ID NO: 8850 - DNA, 122 bp, Homo sapiens
  misc_feature (61)..(62): /note="This region represents a CpG dinucleotide"
  misc_feature (61)..(61): /note="Nucleotide may be methylated to form 5-methylcytosine"
tgctgggattacaggcatgagccaccgcgcccggctcattccaacttttaaaaaaagatacgtgacagttttgagcaaaattaatgacagtgtatttggggaattatgacatatattaaagt

SEQ ID NO: 8851 - DNA, 122 bp, Homo sapiens
  misc_feature (61)..(62): /note="This region represents a CpG dinucleotide"
  misc_feature (61)..(61): /note="Nucleotide may be methylated to form 5-methylcytosine"
tagaaaaggaaaaataatcacaggtatgctacagagttctgctacaaataacaactacaccgtcataatcaggtaaacaatagtgataatcttactaccaatataaatacattgggtgtgag

SEQ ID NO: 8852 - DNA, 122 bp, Homo sapiens
  misc_feature (61)..(62): /note="This region represents a CpG dinucleotide"
  misc_feature (61)..(61): /note="Nucleotide may be methylated to form 5-methylcytosine"
catgctatgatttatctctttaccctcagggtcagtctcatgttatgagattgtggaggtcggagtacctgggcttaaacaccttggcaacgggaggagatggatatgtttggtcttcaagc

SEQ ID NO: 8853 - DNA, 122 bp, Homo sapiens
  misc_feature (61)..(62): /note="This region represents a CpG dinucleotide"
  misc_feature (61)..(61): /note="Nucleotide may be methylated to form 5-methylcytosine"
atgcaggaagacgtctgactctgtggcaagcagctctatgttgcaatctccctgtgaaatcgcctcataagaagagttaaaaggaggaactaaaggaggctgtggagagagacatgtgccct

SEQ ID NO: 8854 - DNA, 122 bp, Homo sapiens
  misc_feature (61)..(62): /note="This region represents a CpG dinucleotide"
  misc_feature (61)..(61): /note="Nucleotide may be methylated to form 5-methylcytosine"
gctcctgaatgggtggaggttccaactgaaattgaagagagcacctgagtttttttccctcgatagataacctgaagcaataggaagaaaactgtctcagaagaggtatggggcaggaaaga

SEQ ID NO: 8855 - DNA, 122 bp, Homo sapiens
  misc_feature (61)..(62): /note="This region represents a CpG dinucleotide"
  misc_feature (61)..(61): /note="Nucleotide may be methylated to form 5-methylcytosine"
taaacatcctggctctaatttggatagttatgaatactgttcctttcatcctctctcatacgtctcctccacccgcaagccatttcctctgtacggtcttctgtcagtctaatgaaagtttc

SEQ ID NO: 8856 - DNA, 122 bp, Homo sapiens
  misc_feature (61)..(62): /note="This region represents a CpG dinucleotide"
  misc_feature (61)..(61): /note="Nucleotide may be methylated to form 5-methylcytosine"
accacaccccacacatgggcctctccatccaacagcacatccaaggcttcagactgctgacgctgtcagaaccggttggttttgaaaagacaaagaaggaatttaacatctgatcccaccct

SEQ ID NO: 8857 - DNA, 122 bp, Homo sapiens
  misc_feature (61)..(62): /note="This region represents a CpG dinucleotide"
  misc_feature (61)..(61): /note="Nucleotide may be methylated to form 5-methylcytosine"
aataagggttactcagacacaagcactgctgtacgacgacagtggatctgatcaccgagacggctgctgagtaactaacgagtggggcgcgtctacactgtggaggtgctggacagagggag

SEQ ID NO: 8858 - DNA, 122 bp, Homo sapiens
  misc_feature (61)..(62): /note="This region represents a CpG dinucleotide"
  misc_feature (61)..(61): /note="Nucleotide may be methylated to form 5-methylcytosine"
aaaatgctatctcacgtgtcatcagtggctctcaagcttcatgagtcagaatcccctggacggtgtgctaaaacacggattgttgggcccctcccagagtttcagattcaggttggggtggg

SEQ ID NO: 8859 - DNA, 122 bp, Homo sapiens
  misc_feature (61)..(62): /note="This region represents a CpG dinucleotide"
  misc_feature (61)..(61): /note="Nucleotide may be methylated to form 5-methylcytosine"
catctttctcccggcttagcttggctctctggccacaggtcaatgactgatgacagttagcgtggccttcaccgtattggggccatggaacggggtagctcctagggtgctggagctcgaac

SEQ ID NO: 8860 - DNA, 122 bp, Homo sapiens
  misc_feature (61)..(62): /note="This region represents a CpG dinucleotide"
  misc_feature (61)..(61): /note="Nucleotide may be methylated to form 5-methylcytosine"
atagagttactgggctgcctggcagtcatgtttttgttctgtcctctatgatgaaaagtgcggattaccatctgtgaatgatgcagctgccattagcactgtcagctcatgccccaagcctg

SEQ ID NO: 8861 - DNA, 122 bp, Homo sapiens
  misc_feature (61)..(62): /note="This region represents a CpG dinucleotide"
  misc_feature (61)..(61): /note="Nucleotide may be methylated to form 5-methylcytosine"
aagatgagctccagtctggacatgtggggttgcaatgccccagggacatctaggggatgacgcccagcagctccactgaggtggcttttggctggaaatggaagtttgggaggagtccccac

SEQ ID NO: 8862 - DNA, 122 bp, Homo sapiens
  misc_feature (61)..(62): /note="This region represents a CpG dinucleotide"
  misc_feature (61)..(61): /note="Nucleotide may be methylated to form 5-methylcytosine"
gaggactcaattcctcaatgagtgaaatcatccatttgctgactcaaacagttactgagtcgtctgtcaacttcctgacctttgtaagtctcctggcccctctcttgtcctttcccctggaa

SEQ ID NO: 8863 - DNA, 122 bp, Homo sapiens
  misc_feature (61)..(62): /note="This region represents a CpG dinucleotide"
  misc_feature (61)..(61): /note="Nucleotide may be methylated to form 5-methylcytosine"
cagcagcagaggcattcattctccaagggtgttctatgagccttattggtcctccctgtacgatcagctgcgaaagaactgccagtgcaatcttgagactagatgaggagttacactgacag

SEQ ID NO: 8864 - DNA, 122 bp, Homo sapiens
  misc_feature (61)..(62): /note="This region represents a CpG dinucleotide"
  misc_feature (61)..(61): /note="Nucleotide may be methylated to form 5-methylcytosine"
ccatccgagaaccacccttcagacccaggcaagccttcagatgactacagccatgactgacgtcttgactacaacctcatgagagtccctgagccaaaactgctcagctgagctgtttctga

SEQ ID NO: 8865 - DNA, 122 bp, Homo sapiens
  misc_feature (61)..(62): /note="This region represents a CpG dinucleotide"
  misc_feature (61)..(61): /note="Nucleotide may be methylated to form 5-methylcytosine"
agctgggatccatgcagctggtggcttgtcggtggcaggccaaggcctgagtcatgtccccgtcacagccttcagtggagggctgacccacagaggaaattacacagcactctgtggcccat

SEQ ID NO: 8866 - DNA, 122 bp, Homo sapiens
  misc_feature (61)..(62): /note="This region represents a CpG dinucleotide"
  misc_feature (61)..(61): /note="Nucleotide may be methylated to form 5-methylcytosine"
tggtgagtagtgttgctgaatatgccgtgtgtcctattaactctgtgacggccacagtcacgtctcctttctgcctcctcctcctcctcctctctgtccagtgactagggagggcaggaagt

SEQ ID NO: 8867 - DNA, 122 bp, Homo sapiens
  misc_feature (61)..(62): /note="This region represents a CpG dinucleotide"
  misc_feature (61)..(61): /note="Nucleotide may be methylated to form 5-methylcytosine"
caaggtggtttttggagggtgcttagttaggaaatgatgaacacagttcaacatgacttgcggccctccccatgggcaagagtatgaacacctgtgactgttcctgaactcactaaggaaag

SEQ ID NO: 8868 - DNA, 122 bp, Homo sapiens
  misc_feature (61)..(62): /note="This region represents a CpG dinucleotide"
  misc_feature (61)..(61): /note="Nucleotide may be methylated to form 5-methylcytosine"
actgaggcccagagaggttactcagcttgccctaggcaatacagccaagagtggcagaaccggaatttgagtccagactgtctcaccccagggtgcatgagcaccacacaccagtatggctg

SEQ ID NO: 8869 - DNA, 122 bp, Homo sapiens
  misc_feature (61)..(62): /note="This region represents a CpG dinucleotide"
  misc_feature (61)..(61): /note="Nucleotide may be methylated to form 5-methylcytosine"
aatctggctcctctaattttaagaacagttaatgctccaccatgccttctttgattggtacgggatttgtctaagcctacctgcatattggggaagggaagatacaggttgagtagtaatgt

SEQ ID NO: 8870 - DNA, 122 bp, Homo sapiens
  misc_feature (61)..(62): /note="This region represents a CpG dinucleotide"
  misc_feature (61)..(61): /note="Nucleotide may be methylated to form 5-methylcytosine"
atgaatacttaggacctgatgagagatctggatggcaccctgcagcacttgccacagatacgattactgtttttaattcttttgcctttgtcttgtgtctagattccaagaaccaggaggtt

SEQ ID NO: 8871 - DNA, 122 bp, Homo sapiens
  misc_feature (61)..(62): /note="This region represents a CpG dinucleotide"
  misc_feature (61)..(61): /note="Nucleotide may be methylated to form 5-methylcytosine"
attcacgcatacatacattttactgtcaggagcaccttctatatgccaaacactaagctacgtgtttcacgtaggtcatttcacaggatcctgaaaacaacgctttccttaatatctccatt

SEQ ID NO: 8872 - DNA, 122 bp, Homo sapiens
  misc_feature (61)..(62): /note="This region represents a CpG dinucleotide"
  misc_feature (61)..(61): /note="Nucleotide may be methylated to form 5-methylcytosine"
cgttcaggcagaagttataccactgttggctgtgagttcagtgttaatgagtcaacaaaacgacacatgcagaaaaaggaagaggaaatttgccaatctgaacatgagttcactcaagtaag

SEQ ID NO: 8873 - DNA, 122 bp, Homo sapiens
  misc_feature (61)..(62): /note="This region represents a CpG dinucleotide"
  misc_feature (61)..(61): /note="Nucleotide may be methylated to form 5-methylcytosine"
gccaacacccttatgacaactccttttccatggcagacacttttagttgtgagcttgtgccgcttgcctagctgcattcaaacagggaggttttaaatatctgaattgttttttctaaacag

SEQ ID NO: 8874 - DNA, 122 bp, Homo sapiens
  misc_feature (61)..(62): /note="This region represents a CpG dinucleotide"
  misc_feature (61)..(61): /note="Nucleotide may be methylated to form 5-methylcytosine"
tttccagccccaagggaagacacccttatggcctggtcttttaaggaaaaggggccaggtcgctgggtggcagaaacttgggcttgggagtcatcaccacttagcagctgcatgagcttatc

SEQ ID NO: 8875 - DNA, 122 bp, Homo sapiens
  misc_feature (61)..(62): /note="This region represents a CpG dinucleotide"
  misc_feature (61)..(61): /note="Nucleotide may be methylated to form 5-methylcytosine"
tcattccttcctctcccaaatagagaagccttggcttgaaaattccagggagtggccatgcgaggtggctcatgcctgtaatcctagccctttgggaagccaaggtgggtaggtcacttgag

SEQ ID NO: 8876 - DNA, 122 bp, Homo sapiens
  misc_feature (61)..(62): /note="This region represents a CpG dinucleotide"
  misc_feature (61)..(61): /note="Nucleotide may be methylated to form 5-methylcytosine"
ggaagaaaacagaagagggagacagggtgaatttcctatttccacgtcagccaaaggtgacgcttctgccagagggaaacttcaggaaagggcatcaaaaaagaaagtaaccccatccagtc

SEQ ID NO: 8877 - DNA, 122 bp, Homo sapiens
  misc_feature (61)..(62): /note="This region represents a CpG dinucleotide"
  misc_feature (61)..(61): /note="Nucleotide may be methylated to form 5-methylcytosine"
tgtgggtgtggcagacattctggcctgtccagttcgaagacaatgacccatgattgaccacggcactcttgcctcagtctctaagtcactgtctcctggggccccctcattcatgccttttc

SEQ ID NO: 8878 - DNA, 122 bp, Homo sapiens
  misc_feature (61)..(62): /note="This region represents a CpG dinucleotide"
  misc_feature (61)..(61): /note="Nucleotide may be methylated to form 5-methylcytosine"
ttggttcattatccaagtgtagaatatgtacttgttttgcttccagccccaaattccctccgtatccactttttcattacattacaatttatcgcctatcaaggcctcttattaaagccagg

SEQ ID NO: 8879 - DNA, 122 bp, Homo sapiens
  misc_feature (61)..(62): /note="This region represents a CpG dinucleotide"
  misc_feature (61)..(61): /note="Nucleotide may be methylated to form 5-methylcytosine"
acttggcccaggactatccagagtctcatgtttagtcacaagaggggctggggcaatccacgagctccacttcaagttgtcaaaggaagtttcttggaaatcacagattattagtcatccaa

SEQ ID NO: 8880 - DNA, 122 bp, Homo sapiens
  misc_feature (61)..(62): /note="This region represents a CpG dinucleotide"
  misc_feature (61)..(61): /note="Nucleotide may be methylated to form 5-methylcytosine"
tgcccattaaagcctcacacccaaggtcctcagggacggcagggctctgaccagcatccacgtgccacaccctgtcccctagaaggctccaaacccactgactctgtgaacaaaggaagggg

SEQ ID NO: 8881 - DNA, 122 bp, Homo sapiens
  misc_feature (61)..(62): /note="This region represents a CpG dinucleotide"
  misc_feature (61)..(61): /note="Nucleotide may be methylated to form 5-methylcytosine"
gagtacttagatcaaacctgttttttcagcagaggcaatggcatttacttcagccacacccgtcatcactgatatttaatgctttctgcctttatactcttccactgagagtaaaaggacct

SEQ ID NO: 8882 - DNA, 122 bp, Homo sapiens
  misc_feature (61)..(62): /note="This region represents a CpG dinucleotide"
  misc_feature (61)..(61): /note="Nucleotide may be methylated to form 5-methylcytosine"
accaggggatggacaggtgtcctaggtatgcccaagaatgatgcaacatccccagccatgcgcatgatggctgaggaatctggggacagctattgtgtggaaagaaaatcttacaaagggaa

SEQ ID NO: 8883 - DNA, 122 bp, Homo sapiens
  misc_feature (61)..(62): /note="This region represents a CpG dinucleotide"
  misc_feature (61)..(61): /note="Nucleotide may be methylated to form 5-methylcytosine"
caataaggttgacactcaatattaaccatcacagtgtgaaattccactgaggagctgtgtcgtggtcttggctagttcttggcctatgctgtcttggggttcagcaccatgggcagctactc

SEQ ID NO: 8884 - DNA, 122 bp, Homo sapiens
  misc_feature (61)..(62): /note="This region represents a CpG dinucleotide"
  misc_feature (61)..(61): /note="Nucleotide may be methylated to form 5-methylcytosine"
aggagaagtggatcaaaggcatgaggcaggcaggcccaacaaagttgttactgacagagccgtaggcaggaagggagtggctggcgatgagtctggaaaaggagttgtgattgggagtcatt

SEQ ID NO: 8885 - DNA, 122 bp, Homo sapiens
  misc_feature (61)..(62): /note="This region represents a CpG dinucleotide"
  misc_feature (61)..(61): /note="Nucleotide may be methylated to form 5-methylcytosine"
tctccaaggcccctcctgccactcccattctggctcttcactatttctgggtcccaagaacgactggcagaagatggtcctggacaaatgagagcaaaaagtaaaaattcccaaacaataag

SEQ ID NO: 8886 - DNA, 122 bp, Homo sapiens
  misc_feature (61)..(62): /note="This region represents a CpG dinucleotide"
  misc_feature (61)..(61): /note="Nucleotide may be methylated to form 5-methylcytosine"
gcttcgccctgctaggattagcgtctgtataaagagagacacctgagagcttcgcctacacgcttccccactgagggaagaccatgtgactatacaacaggaaggtagttgtttacaagcca

SEQ ID NO: 8887 - DNA, 122 bp, Homo sapiens
  misc_feature (61)..(62): /note="This region represents a CpG dinucleotide"
  misc_feature (61)..(61): /note="Nucleotide may be methylated to form 5-methylcytosine"
cgtgattcgctcgcctcagcctcccaaagtgctgggattacaggcatgagtcactgcacccggccgaagagatgtctttctaattcactcacagatgctatataggctagctggggctctgc

SEQ ID NO: 8888 - DNA, 122 bp, Homo sapiens
  misc_feature (61)..(62): /note="This region represents a CpG dinucleotide"
  misc_feature (61)..(61): /note="Nucleotide may be methylated to form 5-methylcytosine"
gcccacctcagcctcccaaagtgctgggattacaggcgtgagccaccgtgcccagccgagcgtgtctgtcttgttcactggtgtattttcttaatgcctggaatgatgtctagcaaacaata

SEQ ID NO: 8889 - DNA, 122 bp, Homo sapiens
  misc_feature (61)..(62): /note="This region represents a CpG dinucleotide"
  misc_feature (61)..(61): /note="Nucleotide may be methylated to form 5-methylcytosine"
gaggcaggagcagctccagggcaggtgtcactggggccctggacagaagcattggtgggccgtgactccacatgcctgagtcaccaggctcagaccagtgcctccttcctgttccaccctac

SEQ ID NO: 8890 - DNA, 122 bp, Homo sapiens
  misc_feature (61)..(62): /note="This region represents a CpG dinucleotide"
  misc_feature (61)..(61): /note="Nucleotide may be methylated to form 5-methylcytosine"
gacttccactactcactgcatgaggattattctgtggaaaccagagtactaaggacgaggcgctggatgatttggtcaaagtcaaatgtgccaagtcagcatcgagcagctatttttgcctt

SEQ ID NO: 8891 - DNA, 122 bp, Homo sapiens
  misc_feature (61)..(62): /note="This region represents a CpG dinucleotide"
  misc_feature (61)..(61): /note="Nucleotide may be methylated to form 5-methylcytosine"
gcctgggacactccatcttaagtccctgtgcctctgctgtgtgttactgagtgcctaggccgtgccagcctgtattcatctgtactatgacctgaagaggcagaggccatcactgttggtcc

SEQ ID NO: 8892 - DNA, 122 bp, Homo sapiens
  misc_feature (61)..(62): /note="This region represents a CpG dinucleotide"
  misc_feature (61)..(61): /note="Nucleotide may be methylated to form 5-methylcytosine"
gactgatatagtagtgaattaattctttgcctcaggaggtgttcatgtcttcattcaccccgaaacatttattgagctgttgcattataccagtcttgctagacactaaagacacaatgatg

SEQ ID NO: 8893 - DNA, 122 bp, Homo sapiens
  misc_feature (61)..(62): /note="This region represents a CpG dinucleotide"
  misc_feature (61)..(61): /note="Nucleotide may be methylated to form 5-methylcytosine"
attcgctcgcctcagcctcccaaagtgctgggattacaggcatgagtcactgcacccggccgaagagatgtctttctaattcactcacagatgctatataggctagctggggctctgcacat

SEQ ID NO: 8894 - DNA, 122 bp, Homo sapiens
  misc_feature (61)..(62): /note="This region represents a CpG dinucleotide"
  misc_feature (61)..(61): /note="Nucleotide may be methylated to form 5-methylcytosine"
tgactggccctgatgctctgtgggctgctgtgactgagcccgagtacttgagcagagcaccgtccacagcctgcaatttcagagttaccttctatggaattggaattaaatgcccagttaat

SEQ ID NO: 8895 - DNA, 122 bp, Homo sapiens
  misc_feature (61)..(62): /note="This region represents a CpG dinucleotide"
  misc_feature (61)..(61): /note="Nucleotide may be methylated to form 5-methylcytosine"
caagcctctgactctgcctttcctccaccctggccactcccgccgccctggactcacacacgcccaggcttcaatgccagctctgtttctgactagctgagtgacttcaggcaggtgacagc

SEQ ID NO: 8896 - DNA, 122 bp, Homo sapiens
  misc_feature (61)..(62): /note="This region represents a CpG dinucleotide"
  misc_feature (61)..(61): /note="Nucleotide may be methylated to form 5-methylcytosine"
cctgtttttcttcttaccattctggctaatttctacttgtctttcaaggctcagcaaggacgagttgggtagaaagccttgcagggtcgtccacttactttcacactgcattgagtcgcctg

SEQ ID NO: 8897 - DNA, 122 bp, Homo sapiens
  misc_feature (61)..(62): /note="This region represents a CpG dinucleotide"
  misc_feature (61)..(61): /note="Nucleotide may be methylated to form 5-methylcytosine"
gtaaaccgaagaaagttgaaagccattcctgctggcccttagtctccactttcatccccacgacggcctgggaaaccatacagagggcaggctcttgtcttcatccctggcccaggcgctca

SEQ ID NO: 8898 - DNA, 122 bp, Homo sapiens
  misc_feature (61)..(62): /note="This region represents a CpG dinucleotide"
  misc_feature (61)..(61): /note="Nucleotide may be methylated to form 5-methylcytosine"
gcataattcaaccagtgacaccagctaacaatgacagggcagggtttcaatccagcagcccggccccagccttttagtctccaccttacactgccttattcgtgtttggttgaaccacatgc

SEQ ID NO: 8899 - DNA, 122 bp, Homo sapiens
  misc_feature (61)..(62): /note="This region represents a CpG dinucleotide"
  misc_feature (61)..(61): /note="Nucleotide may be methylated to form 5-methylcytosine"
agaagcaacattgcacctagctcttctttgccaagcacataactgaggaagaccttgaatcgccatttcaatcacagtagaaagttaaaatgcactaatccatactgtacatgtttttccac

SEQ ID NO: 8900 - DNA, 122 bp, Homo sapiens
  misc_feature (61)..(62): /note="This region represents a CpG dinucleotide"
  misc_feature (61)..(61): /note="Nucleotide may be methylated to form 5-methylcytosine"
tacgatacaattagagtccatcagcagagtgctttattagtccctgccttggctgggtcacgtgtaagatgatcaacttcttgctgcttttttctttaaaaaagttaatctgaacttggcaa

SEQ ID NO: 8901 - DNA, 122 bp, Homo sapiens
  misc_feature (61)..(62): /note="This region represents a CpG dinucleotide"
  misc_feature (61)..(61): /note="Nucleotide may be methylated to form 5-methylcytosine"
taatgtgggtaggccttatccaatcagctggagacctgaatagacaaaaagaccagcctccgggaggaaaaaagaaattctccagcagactgccttcagattttatctgcaacatttgccct

SEQ ID NO: 8902 - DNA, 122 bp, Homo sapiens
  misc_feature (61)..(62): /note="This region represents a CpG dinucleotide"
  misc_feature (61)..(61): /note="Nucleotide may be methylated to form 5-methylcytosine"
ccttcagctgtggtgcaaggtgctaagagctgtgctgtctagtatggcagctgctagtcacgtgagcacttaaaatgtggctccttggccgagaactggatgtttcattttgtttaactgac

SEQ ID NO: 8903 - DNA, 122 bp, Homo sapiens
  misc_feature (61)..(62): /note="This region represents a CpG dinucleotide"
  misc_feature (61)..(61): /note="Nucleotide may be methylated to form 5-methylcytosine"
ctgggagtgtgggaaaggacgcagaccaggcaatgttttctgattagatgggcagggccccgcccgcatggagcagcagaggcagccagctgtaggtccagggggcaggaatgttcacaaac

SEQ ID NO: 8904 - DNA, 122 bp, Homo sapiens
  misc_feature (61)..(62): /note="This region represents a CpG dinucleotide"
  misc_feature (61)..(61): /note="Nucleotide may be methylated to form 5-methylcytosine"
ttccactcttcagcagagtgatgcgtctgttcttggtcatcctcccaagtaattatgtgccgtgcttaagctttgagctttgcacttggactgaactggtttgaatccagctccactagata

SEQ ID NO: 8905 - DNA, 122 bp, Homo sapiens
  misc_feature (61)..(62): /note="This region represents a CpG dinucleotide"
  misc_feature (61)..(61): /note="Nucleotide may be methylated to form 5-methylcytosine"
gtgttgccctggtccagaaggattccttgaacccttgtgcctgcaggacagccaacacaccgctgctccagccctgagtgtaaaacccctcattatggcactagacacatggtacttttcag

SEQ ID NO: 8906 - DNA, 122 bp, Homo sapiens
  misc_feature (61)..(62): /note="This region represents a CpG dinucleotide"
  misc_feature (61)..(61): /note="Nucleotide may be methylated to form 5-methylcytosine"
gcatggccactataaataacctgaggactttggaaggctgactggggcacccagtcaccacgcctaacaaagataatcaaaagcaactaggctgagcatggtggctcacacctgtaatccca

SEQ ID NO: 8907 - DNA, 122 bp, Homo sapiens
  misc_feature (61)..(62): /note="This region represents a CpG dinucleotide"
  misc_feature (61)..(61): /note="Nucleotide may be methylated to form 5-methylcytosine"
ggagagctcaagaatttgaccacatctcaaatgactctcagtaaattccagacacaagggcgtgacattttatgcggcacatagcacatttgaactatgctttgttgaatctccatatcaac

SEQ ID NO: 8908 - DNA, 122 bp, Homo sapiens
  misc_feature (61)..(62): /note="This region represents a CpG dinucleotide"
  misc_feature (61)..(61): /note="Nucleotide may be methylated to form 5-methylcytosine"
ttttgtctcctgcttgtggaatatcttcagttcctggaacctgaggttgtgtcttgcccccgtagcctccattgaatctggcccagtttggtatgatctcctagccacagcctctttgtctc

SEQ ID NO: 8909 - DNA, 122 bp, Homo sapiens
  misc_feature (61)..(62): /note="This region represents a CpG dinucleotide"
  misc_feature (61)..(61): /note="Nucleotide may be methylated to form 5-methylcytosine"
aacagacaggattcagacaagattacagctccaagggttgatctgtgtatttcccttgcacgctgctctcttgctggcaccgaagggcaccccagtccagactggtcagaaacaaacactca

SEQ ID NO: 8910 - DNA, 122 bp, Homo sapiens
  misc_feature (61)..(62): /note="This region represents a CpG dinucleotide"
  misc_feature (61)..(61): /note="Nucleotide may be methylated to form 5-methylcytosine"
tctctggaaccctgtctagcagcaggaatggcgcagtgactcctggaaggcctattcaaccgcaaatctacaattgattgatgactcctttaggttttgcaggaagtcacagcaataatcca

SEQ ID NO: 8911 - DNA, 122 bp, Homo sapiens
  misc_feature (61)..(62): /note="This region represents a CpG dinucleotide"
  misc_feature (61)..(61): /note="Nucleotide may be methylated to form 5-methylcytosine"
taatcatgtgtttggtcttttgtagcggtcagccctcatcctgaagctatcagaaggacacgtgagtcacctcactggtgtaacaaagacactcctatcactcaggaaattccagggctttt

SEQ ID NO: 8912 - DNA, 122 bp, Homo sapiens
  misc_feature (61)..(62): /note="This region represents a CpG dinucleotide"
  misc_feature (61)..(61): /note="Nucleotide may be methylated to form 5-methylcytosine"
tttgttttcttcctttttctaagctgctgagctgtccctggaattgtgcaagaggtcacacggagggactgtcaacagctccctaacgtaggttcctaccccagaaagggggtccaggtttt

SEQ ID NO: 8913 - DNA, 122 bp, Homo sapiens
  misc_feature (61)..(62): /note="This region represents a CpG dinucleotide"
  misc_feature (61)..(61): /note="Nucleotide may be methylated to form 5-methylcytosine"
gtgtctatacccaaagcaccacccggtgattttgaacaaacaggaaacaaatcaacgtagcgtgtggttcctgcagaaggctgctgtcagactgcagtcagtaggggtggagtcctctgggg

SEQ ID NO: 8914 - DNA, 122 bp, Homo sapiens
  misc_feature (61)..(62): /note="This region represents a CpG dinucleotide"
  misc_feature (61)..(61): /note="Nucleotide may be methylated to form 5-methylcytosine"
aattttctgacactaaccatttgttgtaaaatcaaacaacttttcggtgccagaactctccgtctcagaaacatttaattccatgcaaaacatttaattattttatttaaggaaaaaataaa

SEQ ID NO: 8915 - DNA, 122 bp, Homo sapiens
  misc_feature (61)..(62): /note="This region represents a CpG dinucleotide"
  misc_feature (61)..(61): /note="Nucleotide may be methylated to form 5-methylcytosine"
tacctggtggcaggtgtcatttccccattctacacgtacctgaggctcagagtgagacagcgactcacccaagatctcccagctacaaaatggcagagcctgggcctgagctagcatggtca

SEQ ID NO: 8916 - DNA, 122 bp, Homo sapiens
  misc_feature (61)..(62): /note="This region represents a CpG dinucleotide"
  misc_feature (61)..(61): /note="Nucleotide may be methylated to form 5-methylcytosine"
tatgaattggaggggcagggacacatttcagcctgtaacagatgggttgggttacctctgcggaagactaaaatctgagggttagtcactgaggtttcacttctccagtgaaactggctgag

SEQ ID NO: 8917 - DNA, 122 bp, Homo sapiens
  misc_feature (61)..(62): /note="This region represents a CpG dinucleotide"
  misc_feature (61)..(61): /note="Nucleotide may be methylated to form 5-methylcytosine"
gacagatctggctggggtggattcgaatgagtaataacagtagcagagacttgtgcttaccgtgtgcctatccctctgctaaggacttcatgcagaaatggaggcagagaggtgaatgaagt

SEQ ID NO: 8918 - DNA, 122 bp, Homo sapiens
  misc_feature (61)..(62): /note="This region represents a CpG dinucleotide"
  misc_feature (61)..(61): /note="Nucleotide may be methylated to form 5-methylcytosine"
gccgaggcaggcagatcacttgaggtcaggagttcgacagcagccttgccaaaatggcatcgctactaaaaatgcaaaaattagccgggcgtggtagcgggcgcctgtaatcccagctactc

SEQ ID NO: 8919 - DNA, 122 bp, Homo sapiens
  misc_feature (61)..(62): /note="This region represents a CpG dinucleotide"
  misc_feature (61)..(61): /note="Nucleotide may be methylated to form 5-methylcytosine"
acatttctcatgtgagcctacctcacgttcatttcctcttttttccttttaaacagaagtcggatatatcatgcttggctggaattaagcacaataatcccattctcctttgtcagtgactg

SEQ ID NO: 8920 - DNA, 122 bp, Homo sapiens
  misc_feature (61)..(62): /note="This region represents a CpG dinucleotide"
  misc_feature (61)..(61): /note="Nucleotide may be methylated to form 5-methylcytosine"
cccagcatcctcttggttaaatagataaaagaatggctgccataccatgtctgtgaaagccggggagcagcaaccacagagcagaagtcacttctgctgagcttccaaatcccatatgcctg

SEQ ID NO: 8921 - DNA, 122 bp, Homo sapiens
  misc_feature (61)..(62): /note="This region represents a CpG dinucleotide"
  misc_feature (61)..(61): /note="Nucleotide may be methylated to form 5-methylcytosine"
gccttggctggagaacttgggatgtcactctgctgcttacggtcacagagctcgagcaggcgctgtcacttgggccatgtgagccagtgactcattttaggatctggtcctgggcatctaag

SEQ ID NO: 8922 - DNA, 122 bp, Homo sapiens
  misc_feature (61)..(62): /note="This region represents a CpG dinucleotide"
  misc_feature (61)..(61): /note="Nucleotide may be methylated to form 5-methylcytosine"
ttttaatatgcccagcggcatctacttttcaaaatagcaatctcagttatctcatttcatcgtcatcataatcctgagagataggtgtgtcaggattactacaaccatacaaatgagcaacc

SEQ ID NO: 8923 - DNA, 122 bp, Homo sapiens
  misc_feature (61)..(62): /note="This region represents a CpG dinucleotide"
  misc_feature (61)..(61): /note="Nucleotide may be methylated to form 5-methylcytosine"
ttacagttatagcggaaggagaagaaggaccttcttcacatggaggcaagagagagcaagcggggaactgccatacttttaggccatgggaggtggttggagaagattgcatcatgggagag

SEQ ID NO: 8924 - DNA, 122 bp, Homo sapiens
  misc_feature (61)..(62): /note="This region represents a CpG dinucleotide"
  misc_feature (61)..(61): /note="Nucleotide may be methylated to form 5-methylcytosine"
gaacttccattctcccttgggtggaatttatcttccacatcttgagtatttggtgatgaacgttcaagtctttagtgacatgtttgggagactggagattcctaaagtctgtcactgaggac

SEQ ID NO: 8925 - DNA, 122 bp, Homo sapiens
  misc_feature (61)..(62): /note="This region represents a CpG dinucleotide"
  misc_feature (61)..(61): /note="Nucleotide may be methylated to form 5-methylcytosine"
ggacgtggtgcaaagcacagctctttagtttccaaatgaatgaaaatgacatattgaaagcggggctggccacagtatctagctagaaaacaataatgactcacaggaaagacaaagactga

SEQ ID NO: 8926 - DNA, 122 bp, Homo sapiens
  misc_feature (61)..(62): /note="This region represents a CpG dinucleotide"
  misc_feature (61)..(61): /note="Nucleotide may be methylated to form 5-methylcytosine"
gctttatagcaatgcttgaggttgggctgctaacaagctcactcaactagtgtttcctgacggccaacgtcagaataattccatctccatgagaagtacagaaagaaccacaaaccaaacct

SEQ ID NO: 8927 - DNA, 122 bp, Homo sapiens
  misc_feature (61)..(62): /note="This region represents a CpG dinucleotide"
  misc_feature (61)..(61): /note="Nucleotide may be methylated to form 5-methylcytosine"
gctgatggggatgaggtgtaactcacacatcctaaaagcttcaacagggcactggagcgccgctgaccaagttactggcattttctattgccaggaagccgcattctcctctctgctaagct

SEQ ID NO: 8928 - DNA, 122 bp, Homo sapiens
  misc_feature (61)..(62): /note="This region represents a CpG dinucleotide"
  misc_feature (61)..(61): /note="Nucleotide may be methylated to form 5-methylcytosine"
tggctgtgttcctgcaggctggggcagggcggcggctctcggcctcttcgaggaatggggcgggagctgctttgtcagcacagtcccagtgctcatctctctgccagggcccagcagggact

SEQ ID NO: 8929 - DNA, 122 bp, Homo sapiens
  misc_feature (61)..(62): /note="This region represents a CpG dinucleotide"
  misc_feature (61)..(61): /note="Nucleotide may be methylated to form 5-methylcytosine"
gggtcatcgttggcaggtgcccggcacagggcttgtcactgcttgtatattatctctagtcgcaaatgcagatgttattgcccccatttaatagatggggacacaaagcctcaggagaggtt

SEQ ID NO: 8930 - DNA, 122 bp, Homo sapiens
  misc_feature (61)..(62): /note="This region represents a CpG dinucleotide"
  misc_feature (61)..(61): /note="Nucleotide may be methylated to form 5-methylcytosine"
tctgcacaaatccacagcataatgcagcctctgctgggaagtgtaagagcaaatagctcacgcatatgtgtgaagtccaagtttagactatcttccaggaaaggtacaatggcaggcagagg

SEQ ID NO: 8931 - DNA, 122 bp, Homo sapiens
  misc_feature (61)..(62): /note="This region represents a CpG dinucleotide"
  misc_feature (61)..(61): /note="Nucleotide may be methylated to form 5-methylcytosine"
cctaactcatcctctgggtcatgctcctcacaatgcaccaggaccctcctgcccccacgtcggatgttgctcactgcacgcattttaaacaggcactgctattatcctcctcctacagagaa

SEQ ID NO: 8932 - DNA, 122 bp, Homo sapiens
  misc_feature (61)..(62): /note="This region represents a CpG dinucleotide"
  misc_feature (61)..(61): /note="Nucleotide may be methylated to form 5-methylcytosine"
tgaagtggcgggtgtggtccaggatgtccagaggcaaggagagagctggacaggctaaggcggtgccctgcagtggtcaagggcaggactttaatctcagctctaggcggggtacagtggct

SEQ ID NO: 8933 - DNA, 122 bp, Homo sapiens
  misc_feature (61)..(62): /note="This region represents a CpG dinucleotide"
  misc_feature (61)..(61): /note="Nucleotide may be methylated to form 5-methylcytosine"
aaaagaatgcccaacggaccagcacctgccccgtgcagtgcaccatgcctggacttcacacgctctagcttgccaagctctctaagcccatctgaggacaacactgtttacgatgtttattc

SEQ ID NO: 8934 - DNA, 122 bp, Homo sapiens
  misc_feature (61)..(62): /note="This region represents a CpG dinucleotide"
  misc_feature (61)..(61): /note="Nucleotide may be methylated to form 5-methylcytosine"
catggctactgccaaggaaagggaggctggaaatgccatgtaattgtgagttcagcagaacgaaaagcaggtttggtgactaactcgccaggctctgccacaaggtcttcctctgggattag

SEQ ID NO: 8935 - DNA, 122 bp, Homo sapiens
  misc_feature (61)..(62): /note="This region represents a CpG dinucleotide"
  misc_feature (61)..(61): /note="Nucleotide may be methylated to form 5-methylcytosine"
atttgaatcccaactccactactttgtgaagtaaggcgagttacccaatcaccttgcacacgtaatcacctcctcaaaatggttttgcaagaacaagtaagtgaaagcacctgatgcagaac

SEQ ID NO: 8936 - DNA, 122 bp, Homo sapiens
  misc_feature (61)..(62): /note="This region represents a CpG dinucleotide"
  misc_feature (61)..(61): /note="Nucleotide may be methylated to form 5-methylcytosine"
tccagtaaacactttcatacttaaagaaaaagagaacaactattgatgggactttggacacggacagctagaaattccattgaagttagtttgaacttgttgagcatgtttcatttgcaaag

SEQ ID NO: 8937 - DNA, 122 bp, Homo sapiens
  misc_feature (61)..(62): /note="This region represents a CpG dinucleotide"
  misc_feature (61)..(61): /note="Nucleotide may be methylated to form 5-methylcytosine"
agagcatgagtaaatccggggctcaggccagggctcagtagatctgacacctgcatccaacgcaagaaacactgaatgctgaggggaggttcctgggacaaggaccaaaacaccacccctta

SEQ ID NO: 8938 - DNA, 122 bp, Homo sapiens
  misc_feature (61)..(62): /note="This region represents a CpG dinucleotide"
  misc_feature (61)..(61): /note="Nucleotide may be methylated to form 5-methylcytosine"
caccatgaagcaaagtgataacacaaggagaatgcagctctgtcctggaaggagggttgacgactgacagatgatacatgttgagtcaatggaatgaggcagttgcaggctattgttggaac

SEQ ID NO: 8939 - DNA, 122 bp, Homo sapiens
  misc_feature (61)..(62): /note="This region represents a CpG dinucleotide"
  misc_feature (61)..(61): /note="Nucleotide may be methylated to form 5-methylcytosine"
tactgccaggctgacacccatcctccctgtgagcagcgcctagaaacacctcccagctgccgcctacttgcccaggctcaccctgccctacacgggcgcaccgcctcagggcttcctgaaac

SEQ ID NO: 8940 - DNA, 122 bp, Homo sapiens
  misc_feature (61)..(62): /note="This region represents a CpG dinucleotide"
  misc_feature (61)..(61): /note="Nucleotide may be methylated to form 5-methylcytosine"
aacagaaagtattctgctatgaatacatagtttaagttctgggcaaaaaccatctatccccgtatgtagataaaatatttacttactgtgttctgggtctgttttctcctaggtatggcaac

SEQ ID NO: 8941 - DNA, 122 bp, Homo sapiens
  misc_feature (61)..(62): /note="This region represents a CpG dinucleotide"
  misc_feature (61)..(61): /note="Nucleotide may be methylated to form 5-methylcytosine"
gcaaagggattaaatgtgcagcttggctcactcttgctcctggggatctgctgtgatgagcgtgtgctctctttataacaggagctactgtcccttgatactcggtccagtgcgcacacgtg

SEQ ID NO: 8942 - DNA, 122 bp, Homo sapiens
  misc_feature (61)..(62): /note="This region represents a CpG dinucleotide"
  misc_feature (61)..(61): /note="Nucleotide may be methylated to form 5-methylcytosine"
gtcagcttccggagtgaccagagcagggctgttgtcatctcactggcaccttggttccatcgtaggatcagctgggttgcatggtctaggtcctgttggctggtccacttgtcctgggctgc

SEQ ID NO: 8943 - DNA, 122 bp, Homo sapiens
  misc_feature (61)..(62): /note="This region represents a CpG dinucleotide"
  misc_feature (61)..(61): /note="Nucleotide may be methylated to form 5-methylcytosine"
tgacgatggttggtatgagggagttatgaatggagtgactgggctttttcctgggaattacgttgagtctatcatgcattattctgagtaaagctcagcagggctgtgcttgcctcacagga

SEQ ID NO: 8944 - DNA, 122 bp, Homo sapiens
  misc_feature (61)..(62): /note="This region represents a CpG dinucleotide"
  misc_feature (61)..(61): /note="Nucleotide may be methylated to form 5-methylcytosine"
gtcatcttgggcaggtcactctgtccctcagtttccacctttgcaatttgggactagtaacgccatccaactcatagggttgttatgagttgtaatgaggattcagtggatttaacccattt

SEQ ID NO: 8945 - DNA, 122 bp, Homo sapiens
  misc_feature (61)..(62): /note="This region represents a CpG dinucleotide"
  misc_feature (61)..(61): /note="Nucleotide may be methylated to form 5-methylcytosine"
ggatagacctgaacctccactgcagccctgacctcctgtgggtccctttgaaaggacaggcgccccactggtaaggcctcttagtaattccctgggaagtattccttggaacccatcaggat

SEQ ID NO: 8946 - DNA, 122 bp, Homo sapiens
  misc_feature (61)..(62): /note="This region represents a CpG dinucleotide"
  misc_feature (61)..(61): /note="Nucleotide may be methylated to form 5-methylcytosine"
tgggattccacttacccatccttgattttatttgtcctctccacattgtcaatgtccattcggatcttgtacttgacatgatggggcagctcaatgctgcctggagtaattccagtgaacac

SEQ ID NO: 8947 - DNA, 122 bp, Homo sapiens
  misc_feature (61)..(62): /note="This region represents a CpG dinucleotide"
  misc_feature (61)..(61): /note="Nucleotide may be methylated to form 5-methylcytosine"
taagtactcacctttaaatctctattgattggcagcttcctgaaatacagagtcagagagcgtgtccaccacgtcctgagtttggtaccaacccaggtgctgatggaaattccaagtaggga

SEQ ID NO: 8948 - DNA, 122 bp, Homo sapiens
  misc_feature (61)..(62): /note="This region represents a CpG dinucleotide"
  misc_feature (61)..(61): /note="Nucleotide may be methylated to form 5-methylcytosine"
cttgtctgtttagatttgctcagcaaaacttttactttgacactgtaatcccagatataccggagatgactaagctttcagtactcacaggcttaccatcttgaccaggttgtccagggtag

SEQ ID NO: 8949 - DNA, 122 bp, Homo sapiens
  misc_feature (61)..(62): /note="This region represents a CpG dinucleotide"
  misc_feature (61)..(61): /note="Nucleotide may be methylated to form 5-methylcytosine"
acagccaggtgtgggccagctccaactggggcgacttgtggagggtggttcctgggacaacgcccatgccgtgatcaggaacggggtcagcaggagtcaggtggggaagtgccaggtgtcca

SEQ ID NO: 8950 - DNA, 122 bp, Homo sapiens
  misc_feature (61)..(62): /note="This region represents a CpG dinucleotide"
  misc_feature (61)..(61): /note="Nucleotide may be methylated to form 5-methylcytosine"
ggtccaggcccagggggcctgccaggagctgggggcccagctgctgagcctggccagctacgaggaggagcactttgtggccaacatgctcaacaagatcttcgggtactgagccgggctga

SEQ ID NO: 8951 - DNA, 122 bp, Homo sapiens
  misc_feature (61)..(62): /note="This region represents a CpG dinucleotide"
  misc_feature (61)..(61): /note="Nucleotide may be methylated to form 5-methylcytosine"
tggggaagaggaattctggtttctgtgaatcacctcagaggagaaagactggtggaaaaccgaaggatgggagaggtcagagagccccgccttctgagaccttccagtctccttcagtttaa

SEQ ID NO: 8952 - DNA, 122 bp, Homo sapiens
  misc_feature (61)..(62): /note="This region represents a CpG dinucleotide"
  misc_feature (61)..(61): /note="Nucleotide may be methylated to form 5-methylcytosine"
gataaaatgtatccagtatatttctaatgagtaagtatggaaaattactgtactctgagacggtttaggccaagtctgtgttatggctatctttatatagatagtgcatgtttgaagattgg

SEQ ID NO: 8953 - DNA, 122 bp, Homo sapiens
  misc_feature (61)..(62): /note="This region represents a CpG dinucleotide"
  misc_feature (61)..(61): /note="Nucleotide may be methylated to form 5-methylcytosine"
ctgcctggactgtgctgtggcagtgagccagcttctcagccacgtggatgaggtgaacatcgcaggctggataactggattggaggagcttgagtcactgaatgatcttggggaactagctg

SEQ ID NO: 8954 - DNA, 122 bp, Homo sapiens
  misc_feature (61)..(62): /note="This region represents a CpG dinucleotide"
  misc_feature (61)..(61): /note="Nucleotide may be methylated to form 5-methylcytosine"
gtgagtgcaattttacaagcaatgggattattgtgaaatcccttgtagaaataaatgcatcgtgagatagagaagacctcaatgccagtcttcctagatagttggcacttggttacccaaat

SEQ ID NO: 8955 - DNA, 122 bp, Homo sapiens
  misc_feature (61)..(62): /note="This region represents a CpG dinucleotide"
  misc_feature (61)..(61): /note="Nucleotide may be methylated to form 5-methylcytosine"
ctccgagctttcaggaggaaccaacgctgcccgacaccttgattttagctctttaagtatcggtttagacactactgaccttcagaagtgcaagaagataaatctattgttttaagccacca

SEQ ID NO: 8956 - DNA, 122 bp, Homo sapiens
  misc_feature (61)..(62): /note="This region represents a CpG dinucleotide"
  misc_feature (61)..(61): /note="Nucleotide may be methylated to form 5-methylcytosine"
atatcttttaagcagagactcaaacactcaactctatactgaaaagcgacatctagatgacgtgactcaactctgtactgaaaagcgacatctggatgatgtgacacacagggatctgaaac

SEQ ID NO: 8957 - DNA, 122 bp, Homo sapiens
  misc_feature (61)..(62): /note="This region represents a CpG dinucleotide"
  misc_feature (61)..(61): /note="Nucleotide may be methylated to form 5-methylcytosine"
agctggttaggtcccattgccataatggttcatatttcctagttaattaatattgctaaccgtctcatctgaggtcaagcagtccatattaagcttagggagctgtatgagacatcagaacc

SEQ ID NO: 8958 - DNA, 122 bp, Homo sapiens
  misc_feature (61)..(62): /note="This region represents a CpG dinucleotide"
  misc_feature (61)..(61): /note="Nucleotide may be methylated to form 5-methylcytosine"
attcgaatcaggaatggaggcgggaagtacaggtgagcatggtgagtaagcaaagagatacggaagaagcacagcctttatctggaagattaagagaaatatgtcaggaacaggctgtctac

SEQ ID NO: 8959 - DNA, 122 bp, Homo sapiens
  misc_feature (61)..(62): /note="This region represents a CpG dinucleotide"
  misc_feature (61)..(61): /note="Nucleotide may be methylated to form 5-methylcytosine"
agccctgacatcattgcagttccctttttccagaaatgcagtgcccttgaatactttccccgcccattgaaggcaaacagggttttttctggcattctgcacacctgttttgctgccctgcc

SEQ ID NO: 8960 - DNA, 122 bp, Homo sapiens
  misc_feature (61)..(62): /note="This region represents a CpG dinucleotide"
  misc_feature (61)..(61): /note="Nucleotide may be methylated to form 5-methylcytosine"
atatggttaataacaaaatattctttctccaggttgaaattatccaatgacgaaatcaaacgggcaattctaacaatggacgaacaggaagatctgcccaaggacatgttggaacaggtgag

SEQ ID NO: 8961 - DNA, 122 bp, Homo sapiens
  misc_feature (61)..(62): /note="This region represents a CpG dinucleotide"
  misc_feature (61)..(61): /note="Nucleotide may be methylated to form 5-methylcytosine"
ggtggataggaggagctttagggttagacaggcctgggttggaatcccagctctgtgcctcgctgtcactagctgtgtgtcctggggcttgttcttgaacttcactttcctagattgccaag

SEQ ID NO: 8962 - DNA, 122 bp, Homo sapiens
  misc_feature (61)..(62): /note="This region represents a CpG dinucleotide"
  misc_feature (61)..(61): /note="Nucleotide may be methylated to form 5-methylcytosine"
aggaataaagagcaaatttcaacaggtataagcctgaaacttgctcacaaagtgcctctccgtcaacaataattcaccaggtccagacaatgaactgagaaaatctgctagcatcgcctctg

SEQ ID NO: 8963 - DNA, 122 bp, Homo sapiens
  misc_feature (61)..(62): /note="This region represents a CpG dinucleotide"
  misc_feature (61)..(61): /note="Nucleotide may be methylated to form 5-methylcytosine"
ggaagcctgtctcaccagaagtgaatcaggctgtaggtggggacctgaagactgacactccggaatacaattcatttccagtcagaggacagggggtttctccacccagcactgttgacatt

SEQ ID NO: 8964 - DNA, 122 bp, Homo sapiens
  misc_feature (61)..(62): /note="This region represents a CpG dinucleotide"
  misc_feature (61)..(61): /note="Nucleotide may be methylated to form 5-methylcytosine"
acaggacacacatcctgccacacccagcactggtgtgagtgacccgtcccatgaagacagcggacgtgatgagagggcaccagtgttttcacacaatgtgcacacactccagtcaaagactt

SEQ ID NO: 8965 - DNA, 122 bp, Homo sapiens
  misc_feature (61)..(62): /note="This region represents a CpG dinucleotide"
  misc_feature (61)..(61): /note="Nucleotide may be methylated to form 5-methylcytosine"
ttattcataatggatcagccaattcattccttattaatttaatggagtacaagtaagcagcgtaacagcttgagtttaggagtgtttcacaaatggggctttttgtctgtaatcacttaatc

SEQ ID NO: 8966 - DNA, 122 bp, Homo sapiens
  misc_feature (61)..(62): /note="This region represents a CpG dinucleotide"
  misc_feature (61)..(61): /note="Nucleotide may be methylated to form 5-methylcytosine"
aatcacacaacaaacacatgttcacatgcatactagtacaaattgagttccttcagtcaacgaagtgagttacacctgagggcacttgaagcccagtgtgaagtgacttgatcaagattacc

SEQ ID NO: 8967 - DNA, 122 bp, Homo sapiens
  misc_feature (61)..(62): /note="This region represents a CpG dinucleotide"
  misc_feature (61)..(61): /note="Nucleotide may be methylated to form 5-methylcytosine"
gatgcatccacggagatccaaatgcatataatcacttgaatcaagatctagacagggacgcgtgcagcaggcttcatctgactgattcctgacacgggagagaaagcctaagctccgaatca

SEQ ID NO: 8968 - DNA, 122 bp, Homo sapiens
  misc_feature (61)..(62): /note="This region represents a CpG dinucleotide"
  misc_feature (61)..(61): /note="Nucleotide may be methylated to form 5-methylcytosine"
tttaaagtgacaggaacgaaatcattctgaagggagcagggcaaggacatatgcatcatgcgctgaacctttgttcctgaagcattactatggattttggagcattaagtaatttaaagcac

SEQ ID NO: 8969 - DNA, 122 bp, Homo sapiens
  misc_feature (61)..(62): /note="This region represents a CpG dinucleotide"
  misc_feature (61)..(61): /note="Nucleotide may be methylated to form 5-methylcytosine"
atctgatagtggttacgggctattatgcaagatcatgaatccttttcttttttttcatctcgtcagccagtacagaatgaaggatcatgaatcttaaaactgatttcctgagaagtaataag

SEQ ID NO: 8970 - DNA, 122 bp, Homo sapiens
  misc_feature (61)..(62): /note="This region represents a CpG dinucleotide"
  misc_feature (61)..(61): /note="Nucleotide may be methylated to form 5-methylcytosine"
agctggcttcggccggccagacggccttcacgtcgcaggcgccaggctacgcggctgctgcggccctgggccatcaccatcacccgggccacgtcggctcctattccagcgcagccttcaac

SEQ ID NO: 8971 - DNA, 122 bp, Homo sapiens
  misc_feature (61)..(62): /note="This region represents a CpG dinucleotide"
  misc_feature (61)..(61): /note="Nucleotide may be methylated to form 5-methylcytosine"
ggcggccaccccaggccggggcctcattccgttaagtagggccaggtgtctgtcctctcacgcgtccgaggtggctgccggcgtgcgggtgtgactgtcgatgagagctctgagctgggata

SEQ ID NO: 8972 - DNA, 122 bp, Homo sapiens
  misc_feature (61)..(62): /note="This region represents a CpG dinucleotide"
  misc_feature (61)..(61): /note="Nucleotide may be methylated to form 5-methylcytosine"
gaaagccaagtgattaataccattaacagccatacatctcacaattacataaaaattcatcgttggggccgggcgcggtgactcacgcctgtaatcccagcactttggaaggccgaggcggg

SEQ ID NO: 8973 - DNA, 122 bp, Homo sapiens
  misc_feature (61)..(62): /note="This region represents a CpG dinucleotide"
  misc_feature (61)..(61): /note="Nucleotide may be methylated to form 5-methylcytosine"
atgccagccatttcacagagttgccatgaagatgaaatcattcaagccaaaagtgcctgccgcataatagatgctcaatgtatgtttcttgagcagatacatgtaacttatggcactttaca

SEQ ID NO: 8974 - DNA, 122 bp, Homo sapiens
  misc_feature (61)..(62): /note="This region represents a CpG dinucleotide"
  misc_feature (61)..(61): /note="Nucleotide may be methylated to form 5-methylcytosine"
gcatgttcatactgggatcataatagggatctcacctcacactgaaccactgaactgaatcggaggctttgacatgattcagagatactgtaggctacagacccatggaacagccatactga

SEQ ID NO: 8975 - DNA, 122 bp, Homo sapiens
  misc_feature (61)..(62): /note="This region represents a CpG dinucleotide"
  misc_feature (61)..(61): /note="Nucleotide may be methylated to form 5-methylcytosine"
agtcaggtgtcaatggatctcttctgtggccactctaagcagctaggaaacttggctctccgagataggaatataccttccagtaacacctgcctaagttaggatgaggaaaagtaaacttt

SEQ ID NO: 8976 - DNA, 122 bp, Homo sapiens
  misc_feature (61)..(62): /note="This region represents a CpG dinucleotide"
  misc_feature (61)..(61): /note="Nucleotide may be methylated to form 5-methylcytosine"
cactttggagaaaatgggctcgtttgacaggatggcctggtgagggaacacaggtactaacggtaacaggccgatgaacactcaccactggcatcagggtggagctcagctgactggacact

SEQ ID NO: 8977 - DNA, 122 bp, Homo sapiens
  misc_feature (61)..(62): /note="This region represents a CpG dinucleotide"
  misc_feature (61)..(61): /note="Nucleotide may be methylated to form 5-methylcytosine"
gacctgccagggttgtatttccacaagccattatcctatgatgtgaataaactcacaacacgaaaatcagtgattacgtgtttctctgcagctctacctgtgtcttcaaaagcatcccactc

SEQ ID NO: 8978 - DNA, 122 bp, Homo sapiens
  misc_feature (61)..(62): /note="This region represents a CpG dinucleotide"
  misc_feature (61)..(61): /note="Nucleotide may be methylated to form 5-methylcytosine"
tcaggtcagctgtcggccaccaggccagggtttgccactggcaagttggattttgtgttacgtgcctaaccaggagttgtcaccgcttgaggcttaacctggttctgggcggctcggtgtgt

SEQ ID NO: 8979 - DNA, 122 bp, Homo sapiens
  misc_feature (61)..(62): /note="This region represents a CpG dinucleotide"
  misc_feature (61)..(61): /note="Nucleotide may be methylated to form 5-methylcytosine"
tggattaataccaattataaaagggctttgaggctgcaagttcaagctcttcctctctctcgctctctcttttgccttccaccatgggatgactcagcatgaaggccctcaccagacactgg

SEQ ID NO: 8980 - DNA, 122 bp, Homo sapiens
  misc_feature (61)..(62): /note="This region represents a CpG dinucleotide"
  misc_feature (61)..(61): /note="Nucleotide may be methylated to form 5-methylcytosine"
agactcattagagagtgggacatggcctctgtgtgtccttacagtgcagagtttccaagccgaggagctggtggaatgaccgggggtgtgggggtgtaggaggtgcactgaggcggcattat

SEQ ID NO: 8981 - DNA, 122 bp, Homo sapiens
  misc_feature (61)..(62): /note="This region represents a CpG dinucleotide"
  misc_feature (61)..(61): /note="Nucleotide may be methylated to form 5-methylcytosine"
ccccttgctggcccttcagagctacagagggtccttgttccccatcttgtctcttccatgcggttgtgtctgctctattcattggccaggccctgactcagcaccaccactgcctttgggtt

SEQ ID NO: 8982 - DNA, 122 bp, Homo sapiens
  misc_feature (61)..(62): /note="This region represents a CpG dinucleotide"
  misc_feature (61)..(61): /note="Nucleotide may be methylated to form 5-methylcytosine"
gacagctataatcatttgtttgttctaacctgaactttcactagctgcttgctgtccatgcggcctaggcaatcagatgaagcttgaatttcacagttatgtgaattgttctttgtactgca

SEQ ID NO: 8983 - DNA, 122 bp, Homo sapiens
  misc_feature (61)..(62): /note="This region represents a CpG dinucleotide"
  misc_feature (61)..(61): /note="Nucleotide may be methylated to form 5-methylcytosine"
cccttcttctacaaggacgtcttcagagatctggaggaggaaagggccttgccctgagttcgctgagccagaacaataggacttcttctgtagttgtgaaacttgtcagttgttgaagtcag

SEQ ID NO: 8984 - DNA, 122 bp, Homo sapiens
  misc_feature (61)..(62): /note="This region represents a CpG dinucleotide"
  misc_feature (61)..(61): /note="Nucleotide may be methylated to form 5-methylcytosine"
cagctctgaccttgcagactccccaggataatgctcactctcattataggccattgggtacgagggattccagcaattcctgaaaatctatctcgaagtggataatgttcccagacacctaa

SEQ ID NO: 8985 - DNA, 122 bp, Homo sapiens
  misc_feature (61)..(62): /note="This region represents a CpG dinucleotide"
  misc_feature (61)..(61): /note="Nucleotide may be methylated to form 5-methylcytosine"
tgtcatgataaagagtcagatcactgagctctgccaaaaatacctggtttggtagggtctcggctcctgctggctccctggcggatacagtccttctctccagtgtcgtttctcaacctctt

SEQ ID NO: 8986 - DNA, 122 bp, Homo sapiens
  misc_feature (61)..(62): /note="This region represents a CpG dinucleotide"
  misc_feature (61)..(61): /note="Nucleotide may be methylated to form 5-methylcytosine"
ccagtttaaagtcatgcaatttaagagggtgtgaaaaacttggacaaggctctaaactcacgaaaacaacttcaggattaaaggcttggagaacaagctttctgaggaaggtcagagagaat

SEQ ID NO: 8987 - DNA, 122 bp, Homo sapiens
  misc_feature (61)..(62): /note="This region represents a CpG dinucleotide"
  misc_feature (61)..(61): /note="Nucleotide may be methylated to form 5-methylcytosine"
ggtcctgaactgctgacctaaggtgatccgcctgcctgggattacaggtgtgagccaccacgcccagcccagggagcactttaatgcaagttgagaagtactcagcacctcctctgttaccg

SEQ ID NO: 8988 - DNA, 122 bp, Homo sapiens
  misc_feature (61)..(62): /note="This region represents a CpG dinucleotide"
  misc_feature (61)..(61): /note="Nucleotide may be methylated to form 5-methylcytosine"
gatgctgtctctgtaattggcagagagggacatcttgataatggaagtgtgaaggtgtaacgtgtgttaattgatacttcttaatcacttttaggtattaagtcatgatgcaggaatctgcg

SEQ ID NO: 8989 - DNA, 122 bp, Homo sapiens
  misc_feature (61)..(62): /note="This region represents a CpG dinucleotide"
  misc_feature (61)..(61): /note="Nucleotide may be methylated to form 5-methylcytosine"
aaaaaaatcaaggcgctactttgcatttaaaattcatttttgaaacatactggcagcaaacgccacactattgcagttagggaagacaggagagcaaatgtcaggtcttggcaaagtggggt

SEQ ID NO: 8990 - DNA, 122 bp, Homo sapiens
  misc_feature (61)..(62): /note="This region represents a CpG dinucleotide"
  misc_feature (61)..(61): /note="Nucleotide may be methylated to form 5-methylcytosine"
gtaagtgcactctatgatgttcccacaatggcaaaatcaccgatgacacatttcttagaacgtatccctgtcattaagcgacacataactctctatatatcacactaggatcactgaaagct

SEQ ID NO: 8991 - DNA, 122 bp, Homo sapiens
  misc_feature (61)..(62): /note="This region represents a CpG dinucleotide"
  misc_feature (61)..(61): /note="Nucleotide may be methylated to form 5-methylcytosine"
gcagcttcagaacattgacaaaaacaccacgacaatctttttgcaaatctgcttagcagacggatggcctgaatggtcagccaaaccaaacagacacaattaaaagggaatgggttctcagc

SEQ ID NO: 8992 - DNA, 122 bp, Homo sapiens
  misc_feature (61)..(62): /note="This region represents a CpG dinucleotide"
  misc_feature (61)..(61): /note="Nucleotide may be methylated to form 5-methylcytosine"
aatccacccagctgatgttgtatatgcctctcaacctgcttggcttgcacaacctgtaagcgcttttgtaatctgcgggcacggctctcaatgtcagcctgtcgccgcagtaaagctgttat

SEQ ID NO: 8993 - DNA, 122 bp, Homo sapiens
  misc_feature (61)..(62): /note="This region represents a CpG dinucleotide"
  misc_feature (61)..(61): /note="Nucleotide may be methylated to form 5-methylcytosine"
tggctcataactttcttctgagcccatgaagttacttccccagacaagctctgtcatctgcgtgagatgacttatccattagcaaggatgaataatgcctaaacacatcactggatcttccc

SEQ ID NO: 8994 - DNA, 122 bp, Homo sapiens
  misc_feature (61)..(62): /note="This region represents a CpG dinucleotide"
  misc_feature (61)..(61): /note="Nucleotide may be methylated to form 5-methylcytosine"
agctgagttcacacctgtaactgtttggaacggctcctgcagcaaggcagggctcggtaacggtcgctcattatttctgtagcatggtccgctggcttagtgcaggcaaacgggtctgggtc

SEQ ID NO: 8995 - DNA, 122 bp, Homo sapiens
  misc_feature (61)..(62): /note="This region represents a CpG dinucleotide"
  misc_feature (61)..(61): /note="Nucleotide may be methylated to form 5-methylcytosine"
gaggaccacaatttttccatctgtcagatgggcttgggagcctttgtcctggctggctgccggctggcctgggctgggactggcctgggaggtgaggggactgtggcgggaaggaggaagca

SEQ ID NO: 8996 - DNA, 122 bp, Homo sapiens
  misc_feature (61)..(62): /note="This region represents a CpG dinucleotide"
  misc_feature (61)..(61): /note="Nucleotide may be methylated to form 5-methylcytosine"
tgaagagctaattcttccctctaataataatactctttgaccatttactatatgtcaaaccgtattttaaggactttaaaggtattaattcgtttaatcttcacagcaatcctgtgagtagg

SEQ ID NO: 8997 - DNA, 122 bp, Homo sapiens
  misc_feature (61)..(62): /note="This region represents a CpG dinucleotide"
  misc_feature (61)..(61): /note="Nucleotide may be methylated to form 5-methylcytosine"
cttcctccactgaacaataaccatgtcgaccggcaatatcagaaaggtcatccggtgaagcgttcactctgcagttgtgcaccactgggttttgagagtgctggctaaatattttaagtgat

SEQ ID NO: 8998 - DNA, 122 bp, Homo sapiens
  misc_feature (61)..(62): /note="This region represents a CpG dinucleotide"
  misc_feature (61)..(61): /note="Nucleotide may be methylated to form 5-methylcytosine"
ctccacgaggcccttgtttctgcctgtcttgccttctttcttcattcttccatctattctcgcagctccacagccacctttcccttttacaaaatttccctctctagtaaagtaaaaaaatg

SEQ ID NO: 8999 - DNA, 122 bp, Homo sapiens
  misc_feature (61)..(62): /note="This region represents a CpG dinucleotide"
  misc_feature (61)..(61): /note="Nucleotide may be methylated to form 5-methylcytosine"
ggctccactgttggagatctagttgttttagtcactctgttgtctcatgctggagagaagcgacctttcacatgagagttagtcacttgtctatggtgagtcagatgctatcagctgccctt

SEQ ID NO: 9000 - DNA, 122 bp, Homo sapiens
  misc_feature (61)..(62): /note="This region represents a CpG dinucleotide"
  misc_feature (61)..(61): /note="Nucleotide may be methylated to form 5-methylcytosine"
gcggctcacgcttgcttcagtgcagctgtgtatccttctgacatgagcctggggcggttacgtcctggggtcctccactcccagggcaccctcacctacagtgatcccggcttctgaatcac

SEQ ID NO: 9001 - DNA, 122 bp, Homo sapiens
  misc_feature (61)..(62): /note="This region represents a CpG dinucleotide"
  misc_feature (61)..(61): /note="Nucleotide may be methylated to form 5-methylcytosine"
taaaagggtgcctttaatacaatatttaggtaggttgacctgactgcctaatttatatgacgaaatattaaagccctgggtactgtgaggatttcctagtactaaagtttgtccttatgttt

SEQ ID NO: 9002 - DNA, 122 bp, Homo sapiens
  misc_feature (61)..(62): /note="This region represents a CpG dinucleotide"
  misc_feature (61)..(61): /note="Nucleotide may be methylated to form 5-methylcytosine"
gggtagaccccactgagaaagtaacgtttgggcaaagtcttaacgtgagagagttaaccacgccaggccaggctttgcaaaggctcttagatggaagcatacccatcatgtttgaaaaacca

SEQ ID NO: 9003 - DNA, 122 bp, Homo sapiens
  misc_feature (61)..(62): /note="This region represents a CpG dinucleotide"
  misc_feature (61)..(61): /note="Nucleotide may be methylated to form 5-methylcytosine"
acgcaatccacaaaggaaaaggttagccatactgggcaagcaagactttcatgcagggcacgacctgcccaatctcaggtagtggccctgtaaactagatactattgtccagcataatccct

SEQ ID NO: 9004 - DNA, 122 bp, Homo sapiens
  misc_feature (61)..(62): /note="This region represents a CpG dinucleotide"
  misc_feature (61)..(61): /note="Nucleotide may be methylated to form 5-methylcytosine"
actgaacatatcttgtccctgttttccttctgatttcaggacatataatgatttgccttccgtaactgcagatgggtgggggccctcccctttcccttagcacccttcttaaattctttgct

SEQ ID NO: 9005 - DNA, 122 bp, Homo sapiens
  misc_feature (61)..(62): /note="This region represents a CpG dinucleotide"
  misc_feature (61)..(61): /note="Nucleotide may be methylated to form 5-methylcytosine"
tctccaacatcaacacctacaccacattagtcaaaccagtacagcaggccctactcccagcgcctcccaggtacctccagaagcatgctgggtccccacccagggagtccccacggctccgc

SEQ ID NO: 9006 - DNA, 122 bp, Homo sapiens
  misc_feature (61)..(62): /note="This region represents a CpG dinucleotide"
  misc_feature (61)..(61): /note="Nucleotide may be methylated to form 5-methylcytosine"
cagtttagacaggaggtaggaatcttgctaatgaaaggagagcctcaccttcaattaaggcgtcaccagagtgggaaattcatcagccctggtgatggtgacttacgccacacttgagcctt

SEQ ID NO: 9007 - DNA, 122 bp, Homo sapiens
  misc_feature (61)..(62): /note="This region represents a CpG dinucleotide"
  misc_feature (61)..(61): /note="Nucleotide may be methylated to form 5-methylcytosine"
gtgaagccaggccccggctgactcacttctgaccatgaggtgtgccctgccctggtcagccggcctcacaggctcacctgtgtcagcctcctgtgatgctccctgactcgcgggaggagaag

SEQ ID NO: 9008 - DNA, 122 bp, Homo sapiens
  misc_feature (61)..(62): /note="This region represents a CpG dinucleotide"
  misc_feature (61)..(61): /note="Nucleotide may be methylated to form 5-methylcytosine"
cccaatggcagttcaaaacccctcctgactctcagaacggtcaggccctcaacctttctacgcaagtcttaatgactaatgctaggcaggtaacattccagatgtctcaccacctagtcccc

SEQ ID NO: 9009 - DNA, 122 bp, Homo sapiens
  misc_feature (61)..(62): /note="This region represents a CpG dinucleotide"
  misc_feature (61)..(61): /note="Nucleotide may be methylated to form 5-methylcytosine"
ccactttctgtcagagctctggcttgactgtggagttcagaggtttcctaacatagtacacgtcaggactgactcacgatgaagcactccttaaaaaattagaagtgtgtcctcatgttttg

SEQ ID NO: 9010 - DNA, 122 bp, Homo sapiens
  misc_feature (61)..(62): /note="This region represents a CpG dinucleotide"
  misc_feature (61)..(61): /note="Nucleotide may be methylated to form 5-methylcytosine"
tgtgattcttcagttgcttcaggccatccggatacttacacgtgcaagcttgggctcagacgcctgacattgcccatggctggtttgaactcctgagatcaagcaatctaactgccttggcc

SEQ ID NO: 9011 - DNA, 122 bp, Homo sapiens
  misc_feature (61)..(62): /note="This region represents a CpG dinucleotide"
  misc_feature (61)..(61): /note="Nucleotide may be methylated to form 5-methylcytosine"
gggcgtgagccaccatgcccagctctatagtgtctaatacagtgtattaggcgctgggctcgttctctagctttggttttctggagatggggtccaagaatttgcatgcgtaacaagccatc

SEQ ID NO: 9012 - DNA, 122 bp, Homo sapiens
  misc_feature (61)..(62): /note="This region represents a CpG dinucleotide"
  misc_feature (61)..(61): /note="Nucleotide may be methylated to form 5-methylcytosine"
ctgctctcatttttgctaagcagatgactaaatcctggggacaagttttctttaggggatcgctttggactataagccacagtcactggtgttagcataatctctctttttgctatagaaga

SEQ ID NO: 9013 - DNA, 122 bp, Homo sapiens
  misc_feature (61)..(62): /note="This region represents a CpG dinucleotide"
  misc_feature (61)..(61): /note="Nucleotide may be methylated to form 5-methylcytosine"
ggctccagaggccgcacttgacactcctcgaacattgcctcaattactcagtctctggtgcgagccagaattgcaggacctgctaccttgcgctctgctgtgcatacaaagctattaagtcg

SEQ ID NO: 9014 - DNA, 122 bp, Homo sapiens
  misc_feature (61)..(62): /note="This region represents a CpG dinucleotide"
  misc_feature (61)..(61): /note="Nucleotide may be methylated to form 5-methylcytosine"
cagtaccccagagcctccagcctggcagtccgggctccaggtacctctagagggctgtggcgcacactatgcataagtcacagggacactggcatgaactggtaagtccagatgacagtgac

SEQ ID NO: 9015 - DNA, 122 bp, Homo sapiens
  misc_feature (61)..(62): /note="This region represents a CpG dinucleotide"
  misc_feature (61)..(61): /note="Nucleotide may be methylated to form 5-methylcytosine"
tatcatgctgctacgcactttagtaccaggctctctggtggccagttctttgcaggataacgtggaataatgcttatgtaaaatatgacttccaagactaattctcaacttcagactcccca

SEQ ID NO: 9016 - DNA, 122 bp, Homo sapiens
  misc_feature (61)..(62): /note="This region represents a CpG dinucleotide"
  misc_feature (61)..(61): /note="Nucleotide may be methylated to form 5-methylcytosine"
tactggggattaggatttcagcatatgaatttagggcaagggaggaggacataattcagacgtagaaggcagattagttgactgtactggtgtaagtttctacacgaatgagccttgaatga

SEQ ID NO: 9017 - DNA, 122 bp, Homo sapiens
  misc_feature (61)..(62): /note="This region represents a CpG dinucleotide"
  misc_feature (61)..(61): /note="Nucleotide may be methylated to form 5-methylcytosine"
ttcaccagggaaaagacaacatgttatcatgatgacactggctaatccttatgtagcactcgctgtgtgccaactgcctagcctgttctaggaatgttacatatcctaactcctttaattct

SEQ ID NO: 9018 - DNA, 122 bp, Homo sapiens
  misc_feature (61)..(62): /note="This region represents a CpG dinucleotide"
  misc_feature (61)..(61): /note="Nucleotide may be methylated to form 5-methylcytosine"
gctgaggcttcgaggtccaccatcacctcgttttctgccgggcagggactcctgggttggcgctctctaaagccgcttctgtttctaaagttctttgactcatttcttaagcattgcatctg

SEQ ID NO: 9019 - DNA, 122 bp, Homo sapiens
  misc_feature (61)..(62): /note="This region represents a CpG dinucleotide"
  misc_feature (61)..(61): /note="Nucleotide may be methylated to form 5-methylcytosine"
aggtgctgcattagggctttctgtgtttcatctcatcccatacctgccaagcccttcctacggctactttattttagagatgagcaaagtgaggcttgtgcccaaggaaacagagctagcat

SEQ ID NO: 9020 - DNA, 122 bp, Homo sapiens
  misc_feature (61)..(62): /note="This region represents a CpG dinucleotide"
  misc_feature (61)..(61): /note="Nucleotide may be methylated to form 5-methylcytosine"
ttccaatacattgaacacatttcctttaccctccacacacttcttccaaaaggaagcacccgttgagtccttttgagggtgatttgtcttacaactgactgacttagcaggaatttaattag

SEQ ID NO: 9021 - DNA, 122 bp, Homo sapiens
  misc_feature (61)..(62): /note="This region represents a CpG dinucleotide"
  misc_feature (61)..(61): /note="Nucleotide may be methylated to form 5-methylcytosine"
ccacatggccttttatgacttaacctcagaaatcaagctgggtgcggtgactgctggatgcggtggctcaagcctgtaatcccagccctttgagaggctgagttgggcggatcatttgagac

SEQ ID NO: 9022 - DNA, 122 bp, Homo sapiens
  misc_feature (61)..(62): /note="This region represents a CpG dinucleotide"
  misc_feature (61)..(61): /note="Nucleotide may be methylated to form 5-methylcytosine"
gtctaacttgaagtaactctggactgcctctcttggccctcaaatagtcccactctgacacgacttgtccatggagagggcaaaaggagctaaaaagtttgtttgctctcctccttgaactc

SEQ ID NO: 9023 - DNA, 122 bp, Homo sapiens
  misc_feature (61)..(62): /note="This region represents a CpG dinucleotide"
  misc_feature (61)..(61): /note="Nucleotide may be methylated to form 5-methylcytosine"
caccattaagcttcagattgagagaaacaccattgagttggcaaatgctttcgatgtgtacgtgcagaaagtcatatgtatctacaattttccagacagcggcaaagagaaatggaaactct

SEQ ID NO: 9024 - DNA, 122 bp, Homo sapiens
  misc_feature (61)..(62): /note="This region represents a CpG dinucleotide"
  misc_feature (61)..(61): /note="Nucleotide may be methylated to form 5-methylcytosine"
ccctgtcttatagaagcagtgccctagggagaaatctgtgagctcctgctgctgaaataccggtgctgctcaatttccatgctttctgagcttagtgttttggctcttccttagattctgtg

SEQ ID NO: 9025 - DNA, 122 bp, Homo sapiens
  misc_feature (61)..(62): /note="This region represents a CpG dinucleotide"
  misc_feature (61)..(61): /note="Nucleotide may be methylated to form 5-methylcytosine"
aacaggattattggaacctgctgtggcctcagctggacacactggctgcagcctggctggcgcagagggagagagtgacaggaaaatggctgagattaggaaccgcccttgcctctggactt

SEQ ID NO: 9026 - DNA, 122 bp, Homo sapiens
  misc_feature (61)..(62): /note="This region represents a CpG dinucleotide"
  misc_feature (61)..(61): /note="Nucleotide may be methylated to form 5-methylcytosine"
gtggctccaagctcccaggagggagaggctgtcctggggatcacgagaggacccaggcaccgcagctccgccacccttgtctggagcagaatcctgtgatcagaatggtaatctcgggttac

SEQ ID NO: 9027 - DNA, 122 bp, Homo sapiens
  misc_feature (61)..(62): /note="This region represents a CpG dinucleotide"
  misc_feature (61)..(61): /note="Nucleotide may be methylated to form 5-methylcytosine"
ggggctcactgcctgttcctttgtttgtgggacctacccctgggaacactccatgccttgcgtgcttaggggaccagcctttccagcacgacctgtcagttggaatgttgatctgcttctct

SEQ ID NO: 9028 - DNA, 122 bp, Homo sapiens
  misc_feature (61)..(62): /note="This region represents a CpG dinucleotide"
  misc_feature (61)..(61): /note="Nucleotide may be methylated to form 5-methylcytosine"
cctctttgagtctctctcatgcaagggcttgcataatacaaggatcaggactgaagagtgcgtctgtgtcaaggacagaaggctccagtggggcagtttccagtttcagggtgactcagggc

SEQ ID NO: 9029 - DNA, 122 bp, Homo sapiens
  misc_feature (61)..(62): /note="This region represents a CpG dinucleotide"
  misc_feature (61)..(61): /note="Nucleotide may be methylated to form 5-methylcytosine"
gaggccctagacagggagcacctggcaagtcacactcccttgaccacaggactcccactccgctgcttgagtaaacataattatcaagacaatagcagctgtgacttgtcttctggtgccaa

SEQ ID NO: 9030 - DNA, 122 bp, Homo sapiens
  misc_feature (61)..(62): /note="This region represents a CpG dinucleotide"
  misc_feature (61)..(61): /note="Nucleotide may be methylated to form 5-methylcytosine"
ttcagagcaacctccttcaacggaaagtctatctaactagtaactggcagattcacatcacgaaaaacaaactgtaataataggaaaaaataaaggcagacttggctcaaaagggtctcagc

SEQ ID NO: 9031 - DNA, 122 bp, Homo sapiens
  misc_feature (61)..(62): /note="This region represents a CpG dinucleotide"
  misc_feature (61)..(61): /note="Nucleotide may be methylated to form 5-methylcytosine"
agtggcaacaaggccggataagttacatttgtctaaatccagcagctgttggtagtttaacgattgtggaatctccagaggcaagggttgcatttagtgtttgctgaaaccactgttaatta

SEQ ID NO: 9032 - DNA, 122 bp, Homo sapiens
  misc_feature (61)..(62): /note="This region represents a CpG dinucleotide"
  misc_feature (61)..(61): /note="Nucleotide may be methylated to form 5-methylcytosine"
gtgactgtgagattatggctgcttgctttggcctccccaagaaagcagctctatgcaagccgtggctccaggaaaagggaggtgttagtcagttgttcggcttcctcttgtcttaccttcag

SEQ ID NO: 9033 - DNA, 122 bp, Homo sapiens
  misc_feature (61)..(62): /note="This region represents a CpG dinucleotide"
  misc_feature (61)..(61): /note="Nucleotide may be methylated to form 5-methylcytosine"
ccaccagtggtccccttcctttgtattgttgtttctgatctcattttgctcatcccaggacgtgcttaagccaaatgctttgcttttctggagagatgaaatagaggagagccattcatgaa

SEQ ID NO: 9034 - DNA, 122 bp, Homo sapiens
  misc_feature (61)..(62): /note="This region represents a CpG dinucleotide"
  misc_feature (61)..(61): /note="Nucleotide may be methylated to form 5-methylcytosine"
aaggcctccattggattacttaagccttcagaggctgagcaagttgagcaagatggtcagcgtaaaaaacctgatgctgtacaaatctcggagaaagaagtataccagtctaacttgcttat

SEQ ID NO: 9035 - DNA, 122 bp, Homo sapiens
  misc_feature (61)..(62): /note="This region represents a CpG dinucleotide"
  misc_feature (61)..(61): /note="Nucleotide may be methylated to form 5-methylcytosine"
atatctatatagacaacaataaaaacagactgtaattgtagttgcagtgattacaacatacgttagaagcctcaggaaataagtcatcctagagtggctcaatgtctttagagtaagacata

SEQ ID NO: 9036 - DNA, 122 bp, Homo sapiens
  misc_feature (61)..(62): /note="This region represents a CpG dinucleotide"
  misc_feature (61)..(61): /note="Nucleotide may be methylated to form 5-methylcytosine"
tgcccggtggcaccaggcagctgagcaggccctaatcctgtctagggcagccttactcaccggcagatggctgactggctgtaggctggaccttccgttgcagtcagagcctgacccacctg

SEQ ID NO: 9037 - DNA, 122 bp, Homo sapiens
  misc_feature (61)..(62): /note="This region represents a CpG dinucleotide"
  misc_feature (61)..(61): /note="Nucleotide may be methylated to form 5-methylcytosine"
tgaattaatcttgtcattgacaggtaactttgaaatgcctacatttggtgcttagcagtgcgtgtgattctgaagtttaagaatgtctttggagtttctatcagttttttttttttcctctg

SEQ ID NO: 9038 - DNA, 122 bp, Homo sapiens
  misc_feature (61)..(62): /note="This region represents a CpG dinucleotide"
  misc_feature (61)..(61): /note="Nucleotide may be methylated to form 5-methylcytosine"
ccccttttggctcagggtggctccttggcctcactagcaaagaccgctcagagctgaatacggtgtgccctggagagctgcacaaggattaaggaaaaagctgagtgtaactaaagctcttt

SEQ ID NO: 9039 - DNA, 122 bp, Homo sapiens
  misc_feature (61)..(62): /note="This region represents a CpG dinucleotide"
  misc_feature (61)..(61): /note="Nucleotide may be methylated to form 5-methylcytosine"
tctctcaggcacatttgcctcctgccttaacaccctcccttatgctcttttccagagccacgcatgtcccccgtcagtgcacagagtggctcattctaagtggctgtctggctagacctaga

SEQ ID NO: 9040 - DNA, 122 bp, Homo sapiens
  misc_feature (61)..(62): /note="This region represents a CpG dinucleotide"
  misc_feature (61)..(61): /note="Nucleotide may be methylated to form 5-methylcytosine"
taaaattggaataaaagctacccttaaatctgggtctgaactgcttccttgacaggcaagcgcctacgagtacaggttagtcattcaagagtttataaattagtagtctgagctgtgagcca

SEQ ID NO: 9041 - DNA, 122 bp, Homo sapiens
  misc_feature (61)..(62): /note="This region represents a CpG dinucleotide"
  misc_feature (61)..(61): /note="Nucleotide may be methylated to form 5-methylcytosine"
ggcacccaaagccacaaagcttcagctgtagaaggtccaattcagtcattcattaccaggcgcacatataatgtggttaatccgtcctaattgaaggttttttactgcttttgctttttctg

SEQ ID NO: 9042 - DNA, 122 bp, Homo sapiens
  misc_feature (61)..(62): /note="This region represents a CpG dinucleotide"
  misc_feature (61)..(61): /note="Nucleotide may be methylated to form 5-methylcytosine"
caggtggggtaacagatgtccagagattcaagcaagttgctcagagccacatggtagagccgtgactcagccagaaccaaatcctggtcttgcaacttctaaccaaggtcccttttgatcat

SEQ ID NO: 9043 - DNA, 122 bp, Homo sapiens
  misc_feature (61)..(62): /note="This region represents a CpG dinucleotide"
  misc_feature (61)..(61): /note="Nucleotide may be methylated to form 5-methylcytosine"
gactgagtttgcagtccctgatgttatgggctgaacgtttttgtccccccaaaattcatacgctgaagccctgactcacgatgtgctagtatttggaggcagggcctttggaggtgatgagg

SEQ ID NO: 9044 - DNA, 122 bp, Homo sapiens
  misc_feature (61)..(62): /note="This region represents a CpG dinucleotide"
  misc_feature (61)..(61): /note="Nucleotide may be methylated to form 5-methylcytosine"
ccctgccccacacgggacgaagaacctgcagtgccatgttccgtgagccaagggtgaacacggtcgcacctcacgcagtcgtgcagcaggtcctggcagatgatgcatgtcagcgtctcctc

SEQ ID NO: 9045 - DNA, 122 bp, Homo sapiens
  misc_feature (61)..(62): /note="This region represents a CpG dinucleotide"
  misc_feature (61)..(61): /note="Nucleotide may be methylated to form 5-methylcytosine"
acttactcagagttccagagctggacaaaacccatgataaaatatcctgtacctcttgtccgtcccacctccacctgtagttatctgtcactgaataaccacctaaaaatttaatagcctaa

SEQ ID NO: 9046 - DNA, 122 bp, Homo sapiens
  misc_feature (61)..(62): /note="This region represents a CpG dinucleotide"
  misc_feature (61)..(61): /note="Nucleotide may be methylated to form 5-methylcytosine"
cgcccagcctgatgacacaactttggctttcttctgttagcttctttgtccggaaagcaccgctgatattgtcaggttacacactgaatggagggtgactaataagcgatgccagttgcctg

SEQ ID NO: 9047 - DNA, 122 bp, Homo sapiens
  misc_feature (61)..(62): /note="This region represents a CpG dinucleotide"
  misc_feature (61)..(61): /note="Nucleotide may be methylated to form 5-methylcytosine"
atgaggggctggggtatagctgacgccctttagctttatctcctgtcttgactagcaagccgtgggtagtcctgcagatcatgggtggatgattaactgctggaaagcagtcctccttggct

SEQ ID NO: 9048 - DNA, 122 bp, Homo sapiens
  misc_feature (61)..(62): /note="This region represents a CpG dinucleotide"
  misc_feature (61)..(61): /note="Nucleotide may be methylated to form 5-methylcytosine"
gggccaccagcacaattaacatgttcaagcactattactaaccctaaggattaacttggccgggtcagtggctcacacctataatcccagcagtttaggaggctaaggtgggaggattgctt

SEQ ID NO: 9049 - DNA, 122 bp, Homo sapiens
  misc_feature (61)..(62): /note="This region represents a CpG dinucleotide"
  misc_feature (61)..(61): /note="Nucleotide may be methylated to form 5-methylcytosine"
attgtttagaactctcctcttatcaaatctgttaataaatagcctggattgagtttcacccgctctactttctctaaacccatgagctaataaagcaggaaatgattatgaaagaagccaca

SEQ ID NO: 9050 - DNA, 122 bp, Homo sapiens
  misc_feature (61)..(62): /note="This region represents a CpG dinucleotide"
  misc_feature (61)..(61): /note="Nucleotide may be methylated to form 5-methylcytosine"
cctcgtgatccgcccgctgggatccaaagtgctgggattacaggcgtgagccaccgcgcccggcctcatgtaatcgatttaaaacattaatggccgggtgtggtggctcaagcctgttatcc

SEQ ID NO: 9051 - DNA, 122 bp, Homo sapiens
  misc_feature (61)..(62): /note="This region represents a CpG dinucleotide"
  misc_feature (61)..(61): /note="Nucleotide may be methylated to form 5-methylcytosine"
ttcactcagctttcacctgccatgcaaaggagttcaggctgatgcaattttctagtaatccgtagtaatcagaaggtttaacatagtattctgtggtgacttaatataaattgggagatcag

SEQ ID NO: 9052 - DNA, 122 bp, Homo sapiens
  misc_feature (61)..(62): /note="This region represents a CpG dinucleotide"
  misc_feature (61)..(61): /note="Nucleotide may be methylated to form 5-methylcytosine"
tgagacttagcatagaaagccagaggggaaatgccccatatattaacactattcacagtgcgtttcacaaactggtgccagtctgtgaggtatttgcggctgaattgccatgagctaaatac

SEQ ID NO: 9053 - DNA, 122 bp, Homo sapiens
  misc_feature (61)..(62): /note="This region represents a CpG dinucleotide"
  misc_feature (61)..(61): /note="Nucleotide may be methylated to form 5-methylcytosine"
atgtacctgcctcagccacccaaagtgctaggattacaggcatgagccacagtgaccagccgggactggaatttgaacttaggcttgatgactaacttttgcatttgcttttctcactggct

SEQ ID NO: 9054 - DNA, 122 bp, Homo sapiens
  misc_feature (61)..(62): /note="This region represents a CpG dinucleotide"
  misc_feature (61)..(61): /note="Nucleotide may be methylated to form 5-methylcytosine"
gctggagcccgaaatccccttgatgaatgaaactgcacatcgtaatatacacattcagagcgggctattggctaaatgaaggcaatgcgtgtggaagtctgatttgccaccttcagggcagg

SEQ ID NO: 9055 - DNA, 122 bp, Homo sapiens
  misc_feature (61)..(62): /note="This region represents a CpG dinucleotide"
  misc_feature (61)..(61): /note="Nucleotide may be methylated to form 5-methylcytosine"
tacaaagggaaaagagagaaacagcacctgcctgggagcaatgagtcctacttagagtcccgacagccagagacaatgcagacagctctgggcaagtcacttgtctagatctcagctccctt

SEQ ID NO: 9056 - DNA, 122 bp, Homo sapiens
  misc_feature (61)..(62): /note="This region represents a CpG dinucleotide"
  misc_feature (61)..(61): /note="Nucleotide may be methylated to form 5-methylcytosine"
agacattggaagaagaggccagttcctgggtggaggcctggcttgtcctgtagctccagacgtgccagtgtcaggactttcacatgacctggcctaagtcaggggtagtatacatggttctg

SEQ ID NO: 9057 - DNA, 122 bp, Homo sapiens
  misc_feature (61)..(62): /note="This region represents a CpG dinucleotide"
  misc_feature (61)..(61): /note="Nucleotide may be methylated to form 5-methylcytosine"
gcacttggaaaaaccacaatgaacaaaacacaaaagtccctgcatcatgaaggctatgatcgcggagtgtttcagactgccatgctcctccagagagaaagaacaccttatcatgtgcctgt

SEQ ID NO: 9058 - DNA, 122 bp, Homo sapiens
  misc_feature (61)..(62): /note="This region represents a CpG dinucleotide"
  misc_feature (61)..(61): /note="Nucleotide may be methylated to form 5-methylcytosine"
ctgcttaacctgggcaggttgaaagagtagcaggactcgtcctgtcctgcctttgcatagcgaccaattctggagatgatgatggtatcataaagaagatgatgatagccttttttcccttt

SEQ ID NO: 9059 - DNA, 122 bp, Homo sapiens
  misc_feature (61)..(62): /note="This region represents a CpG dinucleotide"
  misc_feature (61)..(61): /note="Nucleotide may be methylated to form 5-methylcytosine"
tatgtaacggagtatctagtcatgaagaaaactggctctggagcctcctacctgacttcacgtactgcctctgcaacttacaaggtgcctggacaaattacttaacctctctgggcccctat

SEQ ID NO: 9060 - DNA, 122 bp, Homo sapiens
  misc_feature (61)..(62): /note="This region represents a CpG dinucleotide"
  misc_feature (61)..(61): /note="Nucleotide may be methylated to form 5-methylcytosine"
gtatataaacaggttacttcaaacatcagctacaaaacagtgagtatataacactggatccgttcacacctgttgactgattgcttgaaaacagctaattgtgaaatgaacttggtatcttc

SEQ ID NO: 9061 - DNA, 122 bp, Homo sapiens
  misc_feature (61)..(62): /note="This region represents a CpG dinucleotide"
  misc_feature (61)..(61): /note="Nucleotide may be methylated to form 5-methylcytosine"
gtattgagatttaaaatcaacaaccatttattaagtccctaccgtgagtcagtctacatacgttagatgcctccatgtgcccggcctgaaggtggtggtgagagagtttttttctggactaa

SEQ ID NO: 9062 - DNA, 122 bp, Homo sapiens
  misc_feature (61)..(62): /note="This region represents a CpG dinucleotide"
  misc_feature (61)..(61): /note="Nucleotide may be methylated to form 5-methylcytosine"
aaataaacattatgtacttggtcttgttattatgaaaaaaaaccctgcctctaaacatggcgagatatatcttgcactaccagtatttcctgatggggctgctgttggccttttagtccaag

SEQ ID NO: 9063 - DNA, 122 bp, Homo sapiens
  misc_feature (61)..(62): /note="This region represents a CpG dinucleotide"
  misc_feature (61)..(61): /note="Nucleotide may be methylated to form 5-methylcytosine"
ttattacagtgtcatatccctggggcacagagcagtgctggcacatagccagagctcaatcgatacatacctaatgaatgaaagtacagtggacatcctaattcagccattctttgctaact

SEQ ID NO: 9064 - DNA, 122 bp, Homo sapiens
  misc_feature (61)..(62): /note="This region represents a CpG dinucleotide"
  misc_feature (61)..(61): /note="Nucleotide may be methylated to form 5-methylcytosine"
tgttctgcttcctaggcaccgaagattacctttcaaccccttgaagttaagtcagaaccacgtgactcattctgccaatgagttgtgagcagtactaatctctcccaagcaaccaaagttga

SEQ ID NO: 9065 - DNA, 122 bp, Homo sapiens
  misc_feature (61)..(62): /note="This region represents a CpG dinucleotide"
  misc_feature (61)..(61): /note="Nucleotide may be methylated to form 5-methylcytosine"
actgtagcctgggtgatttatacagaacagaaatgtatttctcaaggtgtcagtgggttgcgtggtgagggctgctgtctgcttcccatgtggcatcctatggctttatcctccagaaggaa

SEQ ID NO: 9066 - DNA, 122 bp, Homo sapiens
  misc_feature (61)..(62): /note="This region represents a CpG dinucleotide"
  misc_feature (61)..(61): /note="Nucleotide may be methylated to form 5-methylcytosine"
ataagagacagagaaaagataaccttaaagctaagcagggcagaagtaagagagatggaacgagggagaaagagacctcaaagagaaatcactaaataatggctttgaaaatctactcagtt

SEQ ID NO: 9067 - DNA, 122 bp, Homo sapiens
  misc_feature (61)..(62): /note="This region represents a CpG dinucleotide"
  misc_feature (61)..(61): /note="Nucleotide may be methylated to form 5-methylcytosine"
atgtgcgccctcagggcttccagcaggattgagtcaccctgacgatgaccggggagaagccgtgtgctcttcattattttcagctggaggacagagctcagtgcctgactgcctagggtctc

SEQ ID NO: 9068 - DNA, 122 bp, Homo sapiens
  misc_feature (61)..(62): /note="This region represents a CpG dinucleotide"
  misc_feature (61)..(61): /note="Nucleotide may be methylated to form 5-methylcytosine"
gctcctgttgcaagtttctagaactcacaggtggagaatgaaatttcagtttccaaaccacgttcgtgctcctccaggcatgactgtgagcagtattctgatttgccatgaggcctggggat

SEQ ID NO: 9069 - DNA, 122 bp, Homo sapiens
  misc_feature (61)..(62): /note="This region represents a CpG dinucleotide"
  misc_feature (61)..(61): /note="Nucleotide may be methylated to form 5-methylcytosine"
atagctgtatagggcatttcccaggcatggagcttgcaggactggcagctgctctgggtgcgtcagtgagtggtgagtaaccatgacgctgtacacttaggcaacactaggtttataaagaa

SEQ ID NO: 9070 - DNA, 122 bp, Homo sapiens
  misc_feature (61)..(62): /note="This region represents a CpG dinucleotide"
  misc_feature (61)..(61): /note="Nucleotide may be methylated to form 5-methylcytosine"
aaagagcaagtcaatgagaacctgctgggcaggcatggaatctgactcaggagtcactggcgtggcactggtgcagggtgtgaggatcagacacagggtcctccactgccacaggccaggcc

SEQ ID NO: 9071 - DNA, 122 bp, Homo sapiens
  misc_feature (61)..(62): /note="This region represents a CpG dinucleotide"
  misc_feature (61)..(61): /note="Nucleotide may be methylated to form 5-methylcytosine"
aagcaatgcaggcttcctctgctggggcagggaggggctgcttcctcactgttgctggtgcggtgtctggggggagggattccttgttattgctgtatgactgtaagagttccccattaggc

SEQ ID NO: 9072 - DNA, 122 bp, Homo sapiens
  misc_feature (61)..(62): /note="This region represents a CpG dinucleotide"
  misc_feature (61)..(61): /note="Nucleotide may be methylated to form 5-methylcytosine"
attgcatcagttacacactggtggaatgttctctctcagtcagcaatagtcaagtgggggcgagtggggaagggataaatagggcctatctgagcaggtggagctgaacatagtttacaaaa

SEQ ID NO: 9073 - DNA, 122 bp, Homo sapiens
  misc_feature (61)..(62): /note="This region represents a CpG dinucleotide"
  misc_feature (61)..(61): /note="Nucleotide may be methylated to form 5-methylcytosine"
gtaaagcgaaaacaacataaacaggaagtaagcacacaggcagcagtgtgccgatcaaaccgcacccacagccacaggcagtgggccagaggtgacccactagccacagccggccgaccctg

SEQ ID NO: 9074 - DNA, 122 bp, Homo sapiens
  misc_feature (61)..(62): /note="This region represents a CpG dinucleotide"
  misc_feature (61)..(61): /note="Nucleotide may be methylated to form 5-methylcytosine"
cagcgcatgcacaagtttctctaggctctaagctgtgtacctagggctgagatcaccaggcggagagatgtgtgcgttttcccatatacgagattctgccaagttgccatccgtggtcatgc

SEQ ID NO: 9075 - DNA, 122 bp, Homo sapiens
  misc_feature (61)..(62): /note="This region represents a CpG dinucleotide"
  misc_feature (61)..(61): /note="Nucleotide may be methylated to form 5-methylcytosine"
gaatttaggtgctatttgggcagagacctgaatgaagtgagggagtcagtcatgtgataacgtgaatgacaaccagatcctagacagaaaagcaagtgcaaagttcctaaagtagaaacatg

SEQ ID NO: 9076 - DNA, 122 bp, Homo sapiens
  misc_feature (61)..(62): /note="This region represents a CpG dinucleotide"
  misc_feature (61)..(61): /note="Nucleotide may be methylated to form 5-methylcytosine"
acacacacacccttccgggacatagatagtggtagagtgagtgactgtccactccatgcccgagcaggtctccaggcattcagagcacctgcttgcctggttcagcagcctgagtcacccca

SEQ ID NO: 9077 - DNA, 122 bp, Homo sapiens
  misc_feature (61)..(62): /note="This region represents a CpG dinucleotide"
  misc_feature (61)..(61): /note="Nucleotide may be methylated to form 5-methylcytosine"
ggggctgcagatcttcagggatcttcatgaactgaaattcttcacgatagcaccaaggaacggtgcataaaagcaatagtttatggattgcttggacagggcaaaagactccatgatccctc

SEQ ID NO: 9078 - DNA, 122 bp, Homo sapiens
  misc_feature (61)..(62): /note="This region represents a CpG dinucleotide"
  misc_feature (61)..(61): /note="Nucleotide may be methylated to form 5-methylcytosine"
aagagcatcctgcaaggacaggtgttaagtgtgaaccaaggaccatgactaatctagtgccgtgttatctgaggtccgagtgtaaataatatataaaaccacaagacacacagaacaggagt

SEQ ID NO: 9079 - DNA, 122 bp, Homo sapiens
  misc_feature (61)..(62): /note="This region represents a CpG dinucleotide"
  misc_feature (61)..(61): /note="Nucleotide may be methylated to form 5-methylcytosine"
tgagattcaaggctgtcatcttgattggacttatccagggacctagctcaatcttttactcgcttccttacctggttcctcccttaacataccttataccccaggaaaaaggcaatgtatta

SEQ ID NO: 9080 - DNA, 122 bp, Homo sapiens
  misc_feature (61)..(62): /note="This region represents a CpG dinucleotide"
  misc_feature (61)..(61): /note="Nucleotide may be methylated to form 5-methylcytosine"
ggcggcggcacccccaaatagccccacccgggcggtccacgggccgggccctgtgtgctgcggccgccatcccctggaggacagtcagtcggtattcctgggtcctgtctgtccccaaccgt

SEQ ID NO: 9081 - DNA, 122 bp, Homo sapiens
  misc_feature (61)..(62): /note="This region represents a CpG dinucleotide"
  misc_feature (61)..(61): /note="Nucleotide may be methylated to form 5-methylcytosine"
atctatagacagaggtcgcaacaatcctatgattcacatggtgaacaagatatctaccagcgaacattatttaggcaaaatattggaaggttcatgtcttcagataaagtgactgcctggat

SEQ ID NO: 9082 - DNA, 122 bp, Homo sapiens
  misc_feature (61)..(62): /note="This region represents a CpG dinucleotide"
  misc_feature (61)..(61): /note="Nucleotide may be methylated to form 5-methylcytosine"
gtagaggaggtggaccagctaagagacagttacaaaatgacgtgatgcttgctgttatagcggagtgttcagatgagtcaaggatttaattatcatagctgacaatgtacatttttatacat

SEQ ID NO: 9083 - DNA, 122 bp, Homo sapiens
  misc_feature (61)..(62): /note="This region represents a CpG dinucleotide"
  misc_feature (61)..(61): /note="Nucleotide may be methylated to form 5-methylcytosine"
aaagcaagtcaagtgaccaaccccagatccaaggagtgtggaaatagactctgctctagacgctacctcatagaaagaggaattatgagatcacctgaaaaaggatacatgaatacagggtt

SEQ ID NO: 9084 - DNA, 122 bp, Homo sapiens
  misc_feature (61)..(62): /note="This region represents a CpG dinucleotide"
  misc_feature (61)..(61): /note="Nucleotide may be methylated to form 5-methylcytosine"
agtggttgtgcaactggacttactgcttcctcttacatatctgccatcatcaagcgactacgcctgggatagtttacagatgtatgaaaagcaagcagaacagaattgaatcttatcagtgg

SEQ ID NO: 9085 - DNA, 122 bp, Homo sapiens
  misc_feature (61)..(62): /note="This region represents a CpG dinucleotide"
  misc_feature (61)..(61): /note="Nucleotide may be methylated to form 5-methylcytosine"
tccaggatactgtttctgatttgatgcaactatgtcatcttctacctctcatctcaaaaccgtattgcctttaaaatcacatggggcccactgattatctggtatactcaaagtgttctaca

SEQ ID NO: 9086 - DNA, 122 bp, Homo sapiens
  misc_feature (61)..(62): /note="This region represents a CpG dinucleotide"
  misc_feature (61)..(61): /note="Nucleotide may be methylated to form 5-methylcytosine"
gtgcttctgtcccaggcatcctccttaatcctttgacatgagcagccctagaggttgcctcgtgttgtcaccatccttagtcatttaatcaacatatttttatggaaagtctctatgtgctg

SEQ ID NO: 9087 - DNA, 122 bp, Homo sapiens
  misc_feature (61)..(62): /note="This region represents a CpG dinucleotide"
  misc_feature (61)..(61): /note="Nucleotide may be methylated to form 5-methylcytosine"
ctcctgttgtcctgggaaacatctgtgtagctgggcaggtggccctctccattctcactacgggtaaccaggctagccatacctgccagagcttccagtccgatgatccctcttctgtctga

SEQ ID NO: 9088 - DNA, 122 bp, Homo sapiens
  misc_feature (61)..(62): /note="This region represents a CpG dinucleotide"
  misc_feature (61)..(61): /note="Nucleotide may be methylated to form 5-methylcytosine"
cagcagggaggagaaagggtgttcactctgcagtcagaggtggtatgataattttcacagcgtagctttaccaacttgagagcctggtaagttctcaattaacacatgttgaggtacctagt

SEQ ID NO: 9089 - DNA, 122 bp, Homo sapiens
  misc_feature (61)..(62): /note="This region represents a CpG dinucleotide"
  misc_feature (61)..(61): /note="Nucleotide may be methylated to form 5-methylcytosine"
ccctcactcccctgcaggcaggaatccgtgggggtggggatagacaccagagtgtgcctgcgataataggaacccaaaccagcatttgtagaggcttcactgtgtgctaggcactgtgcaaa

SEQ ID NO: 9090 - DNA, 122 bp, Homo sapiens
  misc_feature (61)..(62): /note="This region represents a CpG dinucleotide"
  misc_feature (61)..(61): /note="Nucleotide may be methylated to form 5-methylcytosine"
ggcgaggttgcttggctggtacttacagagcccctgctgtaagcttttgatctgtctgctcgcctcttcgtcatgctgatagtcagtccagagcccagaaatggaagctgaggtctctcatc

SEQ ID NO: 9091 - DNA, 122 bp, Homo sapiens
  misc_feature (61)..(62): /note="This region represents a CpG dinucleotide"
  misc_feature (61)..(61): /note="Nucleotide may be methylated to form 5-methylcytosine"
aaggtagtaagaccgtatagtcagcaaccacatccttagtaataagtgttagtataatcccgtatgtatgaaagactattgtgtaaaaaggacaaaaaattagcatacaacacaaacaccag

SEQ ID NO: 9092 - DNA, 122 bp, Homo sapiens
  misc_feature (61)..(62): /note="This region represents a CpG dinucleotide"
  misc_feature (61)..(61): /note="Nucleotide may be methylated to form 5-methylcytosine"
tatggattaaaactgatgccctcaagttcagatgctttcagaccaagtattaaaacatagcgctctgcttcctcccaagaggaggcgctgactcttcccccagggcacaaacagtattattt

SEQ ID NO: 9093 - DNA, 122 bp, Homo sapiens
  misc_feature (61)..(62): /note="This region represents a CpG dinucleotide"
  misc_feature (61)..(61): /note="Nucleotide may be methylated to form 5-methylcytosine"
tgttcaagaaatcatttactaagggacagcttagtatttgtccatcagttggcttattgacgtaacctgtgtgctaaattcactggaatgtggcgtaatcaaatctggctccttccacttct

SEQ ID NO: 9094 - DNA, 122 bp, Homo sapiens
  misc_feature (61)..(62): /note="This region represents a CpG dinucleotide"
  misc_feature (61)..(61): /note="Nucleotide may be methylated to form 5-methylcytosine"
atcttgagtaagagaaaggacaacagtgcttccatatcacactttacaggtgggtgtgaccgtgaccacagctctgcctattttgtggccctaacctcaccctgctgaggttcttgtttaca

SEQ ID NO: 9095 - DNA, 122 bp, Homo sapiens
  misc_feature (61)..(62): /note="This region represents a CpG dinucleotide"
  misc_feature (61)..(61): /note="Nucleotide may be methylated to form 5-methylcytosine"
ctcctcggagggatgtaaataaccaacccagattagctggcctttccctaaagccttgggcgtcatcaaaagaatgaacaatggtagaatgcgaagcatcccgagggcccagggtgggaacc

SEQ ID NO: 9096 - DNA, 122 bp, Homo sapiens
  misc_feature (61)..(62): /note="This region represents a CpG dinucleotide"
  misc_feature (61)..(61): /note="Nucleotide may be methylated to form 5-methylcytosine"
tccaagtgcctcactcccgggtggcttgatttccaggaatatcagggcagttccctgcaacgcccgctcagacccaggagccttcctggtatcagtcctgatcccagcaaactgcacagatg

SEQ ID NO: 9097 - DNA, 122 bp, Homo sapiens
  misc_feature (61)..(62): /note="This region represents a CpG dinucleotide"
  misc_feature (61)..(61): /note="Nucleotide may be methylated to form 5-methylcytosine"
ctcaggtgatctacccacctcggcctccggaagtgctgggattacaggcgtgagccaccgcgcccagccccaaaagcctttttaaaactatcacaacttcggccgggtgtggtggctcatgc

SEQ ID NO: 9098 - DNA, 122 bp, Homo sapiens
  misc_feature (61)..(62): /note="This region represents a CpG dinucleotide"
  misc_feature (61)..(61): /note="Nucleotide may be methylated to form 5-methylcytosine"
ctctcctgtcttttcattgtctgtctccacctggagagcactgcctttcacaggctctgtcgcttctgggccctcaagttcctctgggagctgctggactgtatctctcccacattctgacc

SEQ ID NO: 9099 - DNA, 122 bp, Homo sapiens
  misc_feature (61)..(62): /note="This region represents a CpG dinucleotide"
  misc_feature (61)..(61): /note="Nucleotide may be methylated to form 5-methylcytosine"
ctcaagtgatccacccgcctcagcctcccaaagtgctgggattacaggtgtgagccactgcgcccgtcctgactcatgcaacttctgcttcaggtaagcagatttaggctgtttattctgtg

SEQ ID NO: 9100 - DNA, 122 bp, Homo sapiens
  misc_feature (61)..(62): /note="This region represents a CpG dinucleotide"
  misc_feature (61)..(61): /note="Nucleotide may be methylated to form 5-methylcytosine"
tcgcttatggaggacatactatctgtcaggacagtgccaggcattttatatgtacgccttcgtttaatccccagagtcatcctgtgagataggtatgaatcatcattttacagataaagaat

SEQ ID NO: 9101 - DNA, 122 bp, Homo sapiens
  misc_feature (61)..(62): /note="This region represents a CpG dinucleotide"
  misc_feature (61)..(61): /note="Nucleotide may be methylated to form 5-methylcytosine"
tggacttggtgttctatgaactatgagctaactaagttacgggaaagcagcctgcacccacggtaagatgaaaaggcagaatcctgggcctgtgcattttaattatagctctactgcctgca

SEQ ID NO: 9102 - DNA, 122 bp, Homo sapiens
  misc_feature (61)..(62): /note="This region represents a CpG dinucleotide"
  misc_feature (61)..(61): /note="Nucleotide may be methylated to form 5-methylcytosine"
tagcatggaagcattcagaactacagagtccatgtttatgccctcaaactgtatatgtgccggagccagtggctcacacctgtaattccagcactttgggaggctgaggagggcggatcacc

SEQ ID NO: 9103 - DNA, 122 bp, Homo sapiens
  misc_feature (61)..(62): /note="This region represents a CpG dinucleotide"
  misc_feature (61)..(61): /note="Nucleotide may be methylated to form 5-methylcytosine"
taactttcattccatttggctcaggtgtcagggatctatatttaacttgtgttaggcatgcgtccgaagagctggaaggctgaggatgtcaatggctttcagatgtcaggataaccttaagg

SEQ ID NO: 9104 - DNA, 122 bp, Homo sapiens
  misc_feature (61)..(62): /note="This region represents a CpG dinucleotide"
  misc_feature (61)..(61): /note="Nucleotide may be methylated to form 5-methylcytosine"
tgttagagatacggttctctcctgaagattgtgactctttaggtgtgttttaatatattacgcaaggttgagaaacactagagtaggaaatgtgagctaactgaaacaaggcagacacagta

SEQ ID NO: 9105 - DNA, 122 bp, Homo sapiens
  misc_feature (61)..(62): /note="This region represents a CpG dinucleotide"
  misc_feature (61)..(61): /note="Nucleotide may be methylated to form 5-methylcytosine"
atagtacttgcctcacacagttgcttcaaggattagcaaaaaagataggcaacacccctgcgtggtactgctaccaccctgcaacacccgcccagtcatcagagagaattgggtggagcacc

SEQ ID NO: 9106 - DNA, 122 bp, Homo sapiens
  misc_feature (61)..(62): /note="This region represents a CpG dinucleotide"
  misc_feature (61)..(61): /note="Nucleotide may be methylated to form 5-methylcytosine"
cgaaaatcaacccccatgctcacagaaggtcctggagaaacctcagcgctggcggggtaacgtgctgtctgctgaaaccgaggagcgtgatgaacctgttctacatctcagccactgaacca

SEQ ID NO: 9107 - DNA, 122 bp, Homo sapiens
  misc_feature (61)..(62): /note="This region represents a CpG dinucleotide"
  misc_feature (61)..(61): /note="Nucleotide may be methylated to form 5-methylcytosine"
gagggagggaagctacatcctgaggaggctgtctgagtgaatctgtagtggaagtacacacgaactccatgcctcgctgtcccagtacccaaagcacagtctggctgccaaggattacctcc

SEQ ID NO: 9108 - DNA, 122 bp, Homo sapiens
  misc_feature (61)..(62): /note="This region represents a CpG dinucleotide"
  misc_feature (61)..(61): /note="Nucleotide may be methylated to form 5-methylcytosine"
catccctgcccccaggatttaggtgagtactaaactagatcaggcaggtgcaatgctcagcgccctgcttggcacccaacaagtgcttggcagtattagtcttttctgccctcattaaccca

SEQ ID NO: 9109 - DNA, 122 bp, Homo sapiens
  misc_feature (61)..(62): /note="This region represents a CpG dinucleotide"
  misc_feature (61)..(61): /note="Nucleotide may be methylated to form 5-methylcytosine"
cctggaagtctttgttcttaaccatccctgaggctgggtgctgtgtacagctcaggtcagcgtgcctgccccttttctttcttcttaataaggccagggaagtgagcacttctctgtccctc

SEQ ID NO: 9110 - DNA, 122 bp, Homo sapiens
  misc_feature (61)..(62): /note="This region represents a CpG dinucleotide"
  misc_feature (61)..(61): /note="Nucleotide may be methylated to form 5-methylcytosine"
acacaggatataagacagccaaaggcaatattccttactcacattactcatgcaaagtctcgtgatgagcagcggcggaagtcatgggataaacaaaaacaaatccatgaccctcgaaacca

SEQ ID NO: 9111 - DNA, 122 bp, Homo sapiens
  misc_feature (61)..(62): /note="This region represents a CpG dinucleotide"
  misc_feature (61)..(61): /note="Nucleotide may be methylated to form 5-methylcytosine"
gggttgcctcaaaactgaggcagccagctgttgggtcaaagcctgtgcatactgctcttccgataccaaatcttggcactactgggtcacagcactgttcttcaagacctttggaacttact

SEQ ID NO: 9112 - DNA, 122 bp, Homo sapiens
  misc_feature (61)..(62): /note="This region represents a CpG dinucleotide"
  misc_feature (61)..(61): /note="Nucleotide may be methylated to form 5-methylcytosine"
acctccaccagcagctattaggtggtagattccggatctggacccacatcctcctagtttcgtaatatttttcccctatacacgatggttagcattttctaagtgaagcatatctgagccta

SEQ ID NO: 9113 - DNA, 122 bp, Homo sapiens
  misc_feature (61)..(62): /note="This region represents a CpG dinucleotide"
  misc_feature (61)..(61): /note="Nucleotide may be methylated to form 5-methylcytosine"
gtgttactacttaacactctatagagaaacagccacataactctggcatgagctgggtcacggggtgttgtcacacacccactcgcctatacttttcttgatgtgaatatttcttggatgaa

SEQ ID NO: 9114 - DNA, 122 bp, Homo sapiens
  misc_feature (61)..(62): /note="This region represents a CpG dinucleotide"
  misc_feature (61)..(61): /note="Nucleotide may be methylated to form 5-methylcytosine"
gtccttaaataaaagaatccaccaaaacatcactgattccagacccttcttaaatattatcgtgtataccagctttattatttagctctgcaatactgctaaattggtcaattacttccctg

SEQ ID NO: 9115 - DNA, 122 bp, Homo sapiens
  misc_feature (61)..(62): /note="This region represents a CpG dinucleotide"
  misc_feature (61)..(61): /note="Nucleotide may be methylated to form 5-methylcytosine"
gggaggagtttgctgggtatgacttggatgagccagagtaaacccaagggagtagtctctcggtccataatctgttgtctgggaactcaggggtgggctggggacggtgggtacaaaggtca

SEQ ID NO: 9116 - DNA, 122 bp, Homo sapiens
  misc_feature (61)..(62): /note="This region represents a CpG dinucleotide"
  misc_feature (61)..(61): /note="Nucleotide may be methylated to form 5-methylcytosine"
acaaggagtagtcagccagctcatagctgtgacttttctgttccgagggaaagcagcttgcgagctgcagtgtccaggagcagagaaaagcacagtcactgaaccctatgaaattttaacaa

SEQ ID NO: 9117 - DNA, 122 bp, Homo sapiens
  misc_feature (61)..(62): /note="This region represents a CpG dinucleotide"
  misc_feature (61)..(61): /note="Nucleotide may be methylated to form 5-methylcytosine"
ggggctgggtgagctggttccacaagatggtttctgcttgacctgggcagctgagccggacgtgggctgtgggtacccaaccgtttggattctcagcagagccctggggaagggaggcactg

SEQ ID NO: 9118 - DNA, 122 bp, Homo sapiens
  misc_feature (61)..(62): /note="This region represents a CpG dinucleotide"
  misc_feature (61)..(61): /note="Nucleotide may be methylated to form 5-methylcytosine"
agagaacgctctagtttctcttcctcttttgttttcttcttcctcttcttttaaggacaccgatgctattggattaggaccccacccttatgaccccatgtaaccttactttcctcttggta

SEQ ID NO: 9119 - DNA, 122 bp, Homo sapiens
  misc_feature (61)..(62): /note="This region represents a CpG dinucleotide"
  misc_feature (61)..(61): /note="Nucleotide may be methylated to form 5-methylcytosine"
gagctaacctcttctttctaaaattattaactttgactactagtttgcatataaccattacgtatgatttacagtgttgggcttttacaaagtgacttgggcattacttccatcctggagtt

SEQ ID NO: 9120 - DNA, 122 bp, Homo sapiens
  misc_feature (61)..(62): /note="This region represents a CpG dinucleotide"
  misc_feature (61)..(61): /note="Nucleotide may be methylated to form 5-methylcytosine"
ttccctgcaatgctatttgtgtgtgattacaccacactcacaaactgatcaaagcatctccgctccctgcatcctgcttgagttagcagtattcgctctggctgctgactcggcaggctcaa

SEQ ID NO: 9121 - DNA, 122 bp, Homo sapiens
  misc_feature (61)..(62): /note="This region represents a CpG dinucleotide"
  misc_feature (61)..(61): /note="Nucleotide may be methylated to form 5-methylcytosine"
ggtgactagcaatttaattactttcatttcttctatcctcagctgctctaccctaaccagcggccctctcctcttcaccttatgagacttctgcactgcttcctccccctggccagagccag

SEQ ID NO: 9122 - DNA, 122 bp, Homo sapiens
  misc_feature (61)..(62): /note="This region represents a CpG dinucleotide"
  misc_feature (61)..(61): /note="Nucleotide may be methylated to form 5-methylcytosine"
gccagggtttgccactggcaagttggattttgtgttacgtgcctaaccaggagttgtcaccgcttgaggcttaacctggttctgggcggctcggtgtgtgtgtcccaaggccatgccacaca

SEQ ID NO: 9123 - DNA, 122 bp, Homo sapiens
  misc_feature (61)..(62): /note="This region represents a CpG dinucleotide"
  misc_feature (61)..(61): /note="Nucleotide may be methylated to form 5-methylcytosine"
tttcttaaccagtactttgcatctgaatcacataatttctcaattcccctaaggataatacgtaactagaactgttctcgatgcatgggaaagaagttgattcattacacatggtgggtacc

SEQ ID NO: 9124 - DNA, 122 bp, Homo sapiens
  misc_feature (61)..(62): /note="This region represents a CpG dinucleotide"
  misc_feature (61)..(61): /note="Nucleotide may be methylated to form 5-methylcytosine"
tggcagattcagtgagggcctgcttagtcatagacggtgactccttgctatgtcctcatgcggcagatggggcaaggcagttctctggttttataagtgcatgactcccattcctaggcttg

SEQ ID NO: 9125 - DNA, 122 bp, Homo sapiens
  misc_feature (61)..(62): /note="This region represents a CpG dinucleotide"
  misc_feature (61)..(61): /note="Nucleotide may be methylated to form 5-methylcytosine"
acaagattagagccaaaccagtcagtcaactgttggtctttttcacgttttactaatactcgtataactagtaagtttcctggcaggttccagttggaaaaactcgagggtaacatcaaatt

SEQ ID NO: 9126 - DNA, 122 bp, Homo sapiens
  misc_feature (61)..(62): /note="This region represents a CpG dinucleotide"
  misc_feature (61)..(61): /note="Nucleotide may be methylated to form 5-methylcytosine"
ccacactatgctgagcactgtgctaagccctgaagatgcagcagtgcataatgatcccttcgttcttggaacttatgtgctcatcagaagagtgtgccaacttgcttagaaataaatcaccc

SEQ ID NO: 9127 - DNA, 122 bp, Homo sapiens
  misc_feature (61)..(62): /note="This region represents a CpG dinucleotide"
  misc_feature (61)..(61): /note="Nucleotide may be methylated to form 5-methylcytosine"
gaaagtaaaggactcaacacagtacacagtcaaagggaattcccccaacaaaggtcaaggcgagtgaatctcagcacaacagccttgcaaaaggtcagaaagcgccagatctggtgtgaagc

SEQ ID NO: 9128 - DNA, 122 bp, Homo sapiens
  misc_feature (61)..(62): /note="This region represents a CpG dinucleotide"
  misc_feature (61)..(61): /note="Nucleotide may be methylated to form 5-methylcytosine"
cgagtgagagtgtttcccactgcaggcttgcctgtctgggtctgcaggctaggaacagggcgcctccttcctgggagcagggagatgtggaaatgtgggtgggaagctgcagggctgggtct

SEQ ID NO: 9129 - DNA, 122 bp, Homo sapiens
  misc_feature (61)..(62): /note="This region represents a CpG dinucleotide"
  misc_feature (61)..(61): /note="Nucleotide may be methylated to form 5-methylcytosine"
gaacaacttggagcagcataagaaaactttctcccaaaaccctcccagctggcttcctcgcgtgtctcttggccagattgtcacatatgtgagcctacaccaatccctggcaaagggaaggg

SEQ ID NO: 9130 - DNA, 122 bp, Homo sapiens
  misc_feature (61)..(62): /note="This region represents a CpG dinucleotide"
  misc_feature (61)..(61): /note="Nucleotide may be methylated to form 5-methylcytosine"
tgagtcaatctgctaagtgagatgactgctaagtgactaatgagcaagtggtatatacagcgtggatcctctagacaaggggatcattcaagtcccaggtggaatggagcaggagggcaagc

SEQ ID NO: 9131 - DNA, 122 bp, Homo sapiens
  misc_feature (61)..(62): /note="This region represents a CpG dinucleotide"
  misc_feature (61)..(61): /note="Nucleotide may be methylated to form 5-methylcytosine"
tgagagatctattgggcattcttttctaggtggaggtaatagaggcataaggtgaaagttcgaaagcattgtgtcctcagattgacatcagggtatatgtgagaaagataggcatggattat

SEQ ID NO: 9132 - DNA, 122 bp, Homo sapiens
  misc_feature (61)..(62): /note="This region represents a CpG dinucleotide"
  misc_feature (61)..(61): /note="Nucleotide may be methylated to form 5-methylcytosine"
tgagctgcagctggggccagagcagctccaaccggcctgctgcaattagagacgtaccggcgggcaggaggcactgggattttctttcttgtgacatacgtggttgtagttttcattttgat

SEQ ID NO: 9133 - DNA, 122 bp, Homo sapiens
  misc_feature (61)..(62): /note="This region represents a CpG dinucleotide"
  misc_feature (61)..(61): /note="Nucleotide may be methylated to form 5-methylcytosine"
gtcctgtgttgtgtgctgaggatggagtttatgtatatatggtaactcattctattcttacgagaaccctgtgaggtggatagtatggatattatagccatgctgcaaatgaagagactgag

SEQ ID NO: 9134 - DNA, 122 bp, Homo sapiens
  misc_feature (61)..(62): /note="This region represents a CpG dinucleotide"
  misc_feature (61)..(61): /note="Nucleotide may be methylated to form 5-methylcytosine"
gcggcagggcctgccccggcttgttctcagggcagcagtggagcaggtgtgtgcctaaggcgttgacttaaagcaggtggcatcacctttctaagcctcattttgctcaattataaaatgag

SEQ ID NO: 9135 - DNA, 122 bp, Homo sapiens
  misc_feature (61)..(62): /note="This region represents a CpG dinucleotide"
  misc_feature (61)..(61): /note="Nucleotide may be methylated to form 5-methylcytosine"
ccccagccccagccccagccgagcacccccggccccgcctgcccggcgttcccttttgtgcggcgctctcccgtccgcatccgcccgatcctctggaactccccgcggacgccggggtccct

SEQ ID NO: 9136 - DNA, 122 bp, Homo sapiens
  misc_feature (61)..(62): /note="This region represents a CpG dinucleotide"
  misc_feature (61)..(61): /note="Nucleotide may be methylated to form 5-methylcytosine"
taaaatgctggacaggcttggtatggagcattcacagggtggggctggcacagagtgggacggagcagtgagaggaacaacattgtctggctaattgcatgacttacagtctgaacaacact

SEQ ID NO: 9137 - DNA, 122 bp, Homo sapiens
  misc_feature (61)..(62): /note="This region represents a CpG dinucleotide"
  misc_feature (61)..(61): /note="Nucleotide may be methylated to form 5-methylcytosine"
agcagagagtagatatatcataaaatatctaactacgtaactacttggggcacatagtgacgtgtgatacccatggggcttgaaaggattttgcaagttagcacaagctagccattgggtga

SEQ ID NO: 9138 - DNA, 122 bp, Homo sapiens
  misc_feature (61)..(62): /note="This region represents a CpG dinucleotide"
  misc_feature (61)..(61): /note="Nucleotide may be methylated to form 5-methylcytosine"
atgagtccaggtactgaagagtcagcacacgatttccagggtggagacatctgaacctctcgcaggtttttagggagaggaagagcttgtaagagcacacaaaagggaaacaacatggcgca

SEQ ID NO: 9139 - DNA, 122 bp, Homo sapiens
  misc_feature (61)..(62): /note="This region represents a CpG dinucleotide"
  misc_feature (61)..(61): /note="Nucleotide may be methylated to form 5-methylcytosine"
aggatttttccttctcaagtttcaggttttgatggagaacagatgtgcacacatctggctcggcaacccccagcctcacctttctacttctccaaaccgtcagacagagcagggagataagg

SEQ ID NO: 9140 - DNA, 122 bp, Homo sapiens
  misc_feature (61)..(62): /note="This region represents a CpG dinucleotide"
  misc_feature (61)..(61): /note="Nucleotide may be methylated to form 5-methylcytosine"
ttgaggtggggcccagcactctgagttttaataagtccagtgagtcagcctgcaggatgacgtatagtttcctgtgtgagaaactgtaggaactgttggtccttagtttgtaactgccatct

SEQ ID NO: 9141 - DNA, 122 bp, Homo sapiens
  misc_feature (61)..(62): /note="This region represents a CpG dinucleotide"
  misc_feature (61)..(61): /note="Nucleotide may be methylated to form 5-methylcytosine"
actgtcactcactagataccatcaccttatatggagtaagactggaaattgtcttagatacgtccttacttccaacattgtctctctcccagcaagaggctatgtgaggaactaagaacaag

SEQ ID NO: 9142 - DNA, 122 bp, Homo sapiens
  misc_feature (61)..(62): /note="This region represents a CpG dinucleotide"
  misc_feature (61)..(61): /note="Nucleotide may be methylated to form 5-methylcytosine"
caaacaaaactgaatgaagttgcttgaaaagaaaattttgcttataggtaagtctctgtacggagagagccaatgcatccagattcaactgctaatcagaaaatctgggttttggcccctgc

SEQ ID NO: 9143 - DNA, 122 bp, Homo sapiens
  misc_feature (61)..(62): /note="This region represents a CpG dinucleotide"
  misc_feature (61)..(61): /note="Nucleotide may be methylated to form 5-methylcytosine"
actgaagcaatcaatgattcatatccaagccatctggtcccaacccattttttttcttctcgtatcttgctatctttctcacttgcaatacaatgatcaaatttatatttgaaacacgtatt

SEQ ID NO: 9144 - DNA, 122 bp, Homo sapiens
  misc_feature (61)..(62): /note="This region represents a CpG dinucleotide"
  misc_feature (61)..(61): /note="Nucleotide may be methylated to form 5-methylcytosine"
gctacagaactcccgcagcgctgcaaatcatatgccaatcctgcatatgaggtacaagaacggcattgggtcagcattttctgagtgtgtttgtaacctgctgtttggtgtatggttacaca

SEQ ID NO: 9145 - DNA, 122 bp, Homo sapiens
  misc_feature (61)..(62): /note="This region represents a CpG dinucleotide"
  misc_feature (61)..(61): /note="Nucleotide may be methylated to form 5-methylcytosine"
tgttctgctctacactcagtggatcctggtccctgctctctacgggaggggcaattaaggcgtgttcaaggttcatctggactctagacttcttccttacatgctgacttttcaatccaagc

SEQ ID NO: 9146 - DNA, 122 bp, Homo sapiens
  misc_feature (61)..(62): /note="This region represents a CpG dinucleotide"
  misc_feature (61)..(61): /note="Nucleotide may be methylated to form 5-methylcytosine"
aaagaaatggaaattatctgaatgcctgacaaagggggattggttaattaaatcacagtacgtctactcaagggaatattgtgtggccattaatctatgacttagaacagggattgtagata

SEQ ID NO: 9147 - DNA, 122 bp, Homo sapiens
  misc_feature (61)..(62): /note="This region represents a CpG dinucleotide"
  misc_feature (61)..(61): /note="Nucleotide may be methylated to form 5-methylcytosine"
ataaaacttgaatcactgacctcacccataaccgttgaattgctttttggtggtggaagccgtgacccagaacagtgctgaggtgtcctttgtccttggtactggcattgtcagatagtgtt

SEQ ID NO: 9148 - DNA, 122 bp, Homo sapiens
  misc_feature (61)..(62): /note="This region represents a CpG dinucleotide"
  misc_feature (61)..(61): /note="Nucleotide may be methylated to form 5-methylcytosine"
tccgacccccagtttcctcatttgcagaatggatgtgttaatacctgtggcctagaattacgtgagatcacacagataaagcagttggccccaaggagcccttaccgtggaagtcaaggctg

SEQ ID NO: 9149 - DNA, 122 bp, Homo sapiens
  misc_feature (61)..(62): /note="This region represents a CpG dinucleotide"
  misc_feature (61)..(61): /note="Nucleotide may be methylated to form 5-methylcytosine"
gatggtctccatctcatgacctcctgatctgcctgcctcccagagtgctgggattacaggcgtgagccaccacacctggccgggtagggtgtaatttccaaagttgacctcacgttgaacct

SEQ ID NO: 9150 - DNA, 122 bp, Homo sapiens
  misc_feature (61)..(62): /note="This region represents a CpG dinucleotide"
  misc_feature (61)..(61): /note="Nucleotide may be methylated to form 5-methylcytosine"
gaagaagagaaagttaatattcacagagttccttctaggagccaggccctgtactgacagcgtaaaaacacggtctttcatttaatcctacaacaaacctgacaaagcagtaccactgcata

SEQ ID NO: 9151 - DNA, 122 bp, Homo sapiens
  misc_feature (61)..(62): /note="This region represents a CpG dinucleotide"
  misc_feature (61)..(61): /note="Nucleotide may be methylated to form 5-methylcytosine"
tacgttttttcctagcatacgttaagacatgtttaccatgagccaccaaaaattctcatgcgagtcaccctttggaaaatgctgaatattagtcccacccttttattttgttgctgcagaca

SEQ ID NO: 9152 - DNA, 122 bp, Homo sapiens
  misc_feature (61)..(62): /note="This region represents a CpG dinucleotide"
  misc_feature (61)..(61): /note="Nucleotide may be methylated to form 5-methylcytosine"
cttgttcctgactttctagtaccaaccgcaatgtaaaactatttgtgctccactgcaagccgagcaccatagattttatgggactgacatactttttttttatttaaaattcttgctttgtg

SEQ ID NO: 9153 - DNA, 122 bp, Homo sapiens
  misc_feature (61)..(62): /note="This region represents a CpG dinucleotide"
  misc_feature (61)..(61): /note="Nucleotide may be methylated to form 5-methylcytosine"
acctgttttacaagtgaggaaactaaagctcagaggggttaagtaatcttttctggatgtcgtcactgtaagtggagagctgtgaccaaagccaagtttcccgataccaaacacagcactac

SEQ ID NO: 9154 - DNA, 122 bp, Homo sapiens
  misc_feature (61)..(62): /note="This region represents a CpG dinucleotide"
  misc_feature (61)..(61): /note="Nucleotide may be methylated to form 5-methylcytosine"
ctgcctctgtgtggttccaacatggcagtttcagggctgctgcgcttcttacatgtggctcgtgctcaaacgcccgtgtctcaagggagcctagaacaagctttgtgaccttctctaggcta

SEQ ID NO: 9155 - DNA, 122 bp, Homo sapiens
  misc_feature (61)..(62): /note="This region represents a CpG dinucleotide"
  misc_feature (61)..(61): /note="Nucleotide may be methylated to form 5-methylcytosine"
cattttgacctaatgagacgctcagccctgtgttctgtaacttaagacatatcaatagcacgcccatgattgtagcagaggttagcatgcctgcattgcagttgtactcagtctatatgagt

SEQ ID NO: 9156 - DNA, 122 bp, Homo sapiens
  misc_feature (61)..(62): /note="This region represents a CpG dinucleotide"
  misc_feature (61)..(61): /note="Nucleotide may be methylated to form 5-methylcytosine"
caggcatctagagatagtttgtacacatgcatcctggcctgatggctgtccctgccaacccggccaactcccatttcctttcataagtgttactcccaaaatcactgtgtcagcagatactt

SEQ ID NO: 9157 - DNA, 122 bp, Homo sapiens
  misc_feature (61)..(62): /note="This region represents a CpG dinucleotide"
  misc_feature (61)..(61): /note="Nucleotide may be methylated to form 5-methylcytosine"
caagtgcagttcagctcatttatgggggtagctataaataaaggaggagaggcatgtgagcgatgttgtaaaagaagaattgacctcactaatgattcatttgggcgataagaggaagtagt

SEQ ID NO: 9158 - DNA, 122 bp, Homo sapiens
  misc_feature (61)..(62): /note="This region represents a CpG dinucleotide"
  misc_feature (61)..(61): /note="Nucleotide may be methylated to form 5-methylcytosine"
cctgctctgctgctgcctgtctctctgagtatgaaggctgggcctgatgggtccagagcacgcagcacagagggcttgtgcttagtagggattgacaaatgcttattcatcacttccttcaa

SEQ ID NO: 9159 - DNA, 122 bp, Homo sapiens
  misc_feature (61)..(62): /note="This region represents a CpG dinucleotide"
  misc_feature (61)..(61): /note="Nucleotide may be methylated to form 5-methylcytosine"
cccatagtacgacctcatactcaatcacaaagcaaacctttggcccggcacagtggctcacgcttgtaatcccagcatattgggaggccaaggctggtggatcacctgaggttaggtgttca

SEQ ID NO: 9160 - DNA, 122 bp, Homo sapiens
  misc_feature (61)..(62): /note="This region represents a CpG dinucleotide"
  misc_feature (61)..(61): /note="Nucleotide may be methylated to form 5-methylcytosine"
ggggagagacacgaccctgcccttagggatctctcaaatgaggcatacccactggactttcgggaaccatcaatctgtttccagacatggattagagatttcaatgcctcaagggctgccag

SEQ ID NO: 9161 - DNA, 122 bp, Homo sapiens
  misc_feature (61)..(62): /note="This region represents a CpG dinucleotide"
  misc_feature (61)..(61): /note="Nucleotide may be methylated to form 5-methylcytosine"
ctttcctcttgggccaatcattgggtatttacattcactgtggtcacctgagccaggtaccgcaattgcatgtcctggagtagaaactgatgtgatacccaagactaacacttagttccttc

SEQ ID NO: 9162 - DNA, 122 bp, Homo sapiens
  misc_feature (61)..(62): /note="This region represents a CpG dinucleotide"
  misc_feature (61)..(61): /note="Nucleotide may be methylated to form 5-methylcytosine"
gtggcctggaaatgtcctggaagtggtggctgcattccaaaggtgagtgttccaagaaagcgggcaagccaggtgaaagtgtatcctgttcctgattcagccttggatcaggtctgtcttac

SEQ ID NO: 9163 - DNA, 122 bp, Homo sapiens
  misc_feature (61)..(62): /note="This region represents a CpG dinucleotide"
  misc_feature (61)..(61): /note="Nucleotide may be methylated to form 5-methylcytosine"
gataaatgcaaacatgatcctcagggatcatatctgaagctgaatttgggattacaaccccgaggacctgggctcatggtgatgttgccaataacaatctcagctgagtagtgaggctgttc

SEQ ID NO: 9164 - DNA, 122 bp, Homo sapiens
  misc_feature (61)..(62): /note="This region represents a CpG dinucleotide"
  misc_feature (61)..(61): /note="Nucleotide may be methylated to form 5-methylcytosine"
ccaagcagtccctgccccattactgaccctgcaactctgtagacaatcagaaccttccagcgtgcaggaatgtttactatttctggccattgtgtactggttactaagctactgccactgag

SEQ ID NO: 9165 - DNA, 122 bp, Homo sapiens
  misc_feature (61)..(62): /note="This region represents a CpG dinucleotide"
  misc_feature (61)..(61): /note="Nucleotide may be methylated to form 5-methylcytosine"
cttgaaccatcactcctcttacatagattcacagaccattcttcagaaagtttggaccaacgatgtcaagtttgccattctatctcctgaatgtgtggcaaacatcactagtcagttattga

SEQ ID NO: 9166 - DNA, 122 bp, Homo sapiens
  misc_feature (61)..(62): /note="This region represents a CpG dinucleotide"
  misc_feature (61)..(61): /note="Nucleotide may be methylated to form 5-methylcytosine"
tggtgtaacgatggcagtctatgaatccccttggttattatctctggggtagccaggtctcgcaagaacagagctcagcaggcctgccagggactaccacaccctctcctgaggatgtcgtg

SEQ ID NO: 9167 - DNA, 122 bp, Homo sapiens
  misc_feature (61)..(62): /note="This region represents a CpG dinucleotide"
  misc_feature (61)..(61): /note="Nucleotide may be methylated to form 5-methylcytosine"
tcagccaagtaatcctcatctcacccagtgagtaagtttgaatgcgcacccttccctgtgcgaggatgaagaaaccaggacctgggtcaagaggattgttctaaattctccaatgaggcaat

SEQ ID NO: 9168 - DNA, 122 bp, Homo sapiens
  misc_feature (61)..(62): /note="This region represents a CpG dinucleotide"
  misc_feature (61)..(61): /note="Nucleotide may be methylated to form 5-methylcytosine"
tcatgggcaatagcaacagatcccacaatactcaaatacaaaaggctacctgagataatgcggtcaggaatgggtgtaacagtgtatgttaatttaatgtcaaatacataatgtatggagaa

SEQ ID NO: 9169 - DNA, 122 bp, Homo sapiens
  misc_feature (61)..(62): /note="This region represents a CpG dinucleotide"
  misc_feature (61)..(61): /note="Nucleotide may be methylated to form 5-methylcytosine"
attgggtggggccctgaaggccgtgctcaagaatgtggatcctttcctgcagacattgggcgtggcgtgatccaacctgtgttccatgagcacatttcctaggctgatctttctcaagcctc

SEQ ID NO: 9170 - DNA, 122 bp, Homo sapiens
  misc_feature (61)..(62): /note="This region represents a CpG dinucleotide"
  misc_feature (61)..(61): /note="Nucleotide may be methylated to form 5-methylcytosine"
ccatttgtgcacaaccttccctttaagcccaagcctctagggctgagcagatctggcaggcggctccgctgaaaaccacctggcagtcctcaaatgggctgccaagagtgctgtccttggct

SEQ ID NO: 9171 - DNA, 122 bp, Homo sapiens
  misc_feature (61)..(62): /note="This region represents a CpG dinucleotide"
  misc_feature (61)..(61): /note="Nucleotide may be methylated to form 5-methylcytosine"
actaactatcaagtgttaatcatactaaactactaccttttagcagaatccaatccttctcgtccatgaacaagctttgttacttctgctgccagtcgtttctgaggaccccgcctttctgg

SEQ ID NO: 9172 - DNA, 122 bp, Homo sapiens
  misc_feature (61)..(62): /note="This region represents a CpG dinucleotide"
  misc_feature (61)..(61): /note="Nucleotide may be methylated to form 5-methylcytosine"
actccctgtgggctggggggcagggccgccgagctggcctgggcagtgctggagacatgacgttgtccatgacgggccgggagcggtcggagtacctgcgctggaagcaggagagggagaag

SEQ ID NO: 9173 - DNA, 122 bp, Homo sapiens
  misc_feature (61)..(62): /note="This region represents a CpG dinucleotide"
  misc_feature (61)..(61): /note="Nucleotide may be methylated to form 5-methylcytosine"
gggagctgataagtggatcaaggagaagagagcagctaagagcaagcagcgaaaccaccacgtctaatggggagggcttcgagcactatacaaaccagcctaaccctgcagcatgaaaactg

SEQ ID NO: 9174 - DNA, 122 bp, Homo sapiens
  misc_feature (61)..(62): /note="This region represents a CpG dinucleotide"
  misc_feature (61)..(61): /note="Nucleotide may be methylated to form 5-methylcytosine"
actgccactcccttggccaccatgcaggtccccacccagtcctttggcctttgctccctccgcctcctctgacctcacctgtgccctcccacagtgcctgaggcttggacgctgtggtcctc

SEQ ID NO: 9175 - DNA, 122 bp, Homo sapiens
  misc_feature (61)..(62): /note="This region represents a CpG dinucleotide"
  misc_feature (61)..(61): /note="Nucleotide may be methylated to form 5-methylcytosine"
ctgcattgtagaatttctcgccctgcaggttatggaagtggatccttcccaggtgatgtgcgagggaagacacatttactatccttgatggggctgattcctttagtttctctagcagcaga

SEQ ID NO: 9176 - DNA, 122 bp, Homo sapiens
  misc_feature (61)..(62): /note="This region represents a CpG dinucleotide"
  misc_feature (61)..(61): /note="Nucleotide may be methylated to form 5-methylcytosine"
ctcccattgacttcacagccacttggagcctgactcacagccacctcccttttccttcctcgcaactgtggagtttaattcttgttgttaattagattaatcagagtgatcgctgcagcgat

SEQ ID NO: 9177 - DNA, 122 bp, Homo sapiens
  misc_feature (61)..(62): /note="This region represents a CpG dinucleotide"
  misc_feature (61)..(61): /note="Nucleotide may be methylated to form 5-methylcytosine"
tacaaccaagagcttcttaagctattaacagccaagtgtcacagccttaaagatttgcaccgtttgctcatctcaggcatgcccccagtcacaaattcctgcaaaataaaccttggttggac

SEQ ID NO: 9178 - DNA, 122 bp, Homo sapiens
  misc_feature (61)..(62): /note="This region represents a CpG dinucleotide"
  misc_feature (61)..(61): /note="Nucleotide may be methylated to form 5-methylcytosine"
tacactatatttggtgctgcaaaggagtcatgctcacttttcccacagtgcagcctgatccgcctgccaacatcacagtcactgccgtggccagaaacccccgctggctcagtgtcacctgg

SEQ ID NO: 9179 - DNA, 122 bp, Homo sapiens
  misc_feature (61)..(62): /note="This region represents a CpG dinucleotide"
  misc_feature (61)..(61): /note="Nucleotide may be methylated to form 5-methylcytosine"
gaggcaggaggattgcttaagcctaggagttcacgaccagcctaagcaacaattgagactcgcctcccaagccttcccaccccgttctctatttaaaataataatagtcatcttaatgggtg

SEQ ID NO: 9180 - DNA, 122 bp, Homo sapiens
  misc_feature (61)..(62): /note="This region represents a CpG dinucleotide"
  misc_feature (61)..(61): /note="Nucleotide may be methylated to form 5-methylcytosine"
ccatttctgtttaacagtgattcattagtttgggctgtagagtggatcagctggtgtttacgaaggtatcattgtaccagtgagtcacagaggcatctactgattctcattcactctcagaa

SEQ ID NO: 9181 - DNA, 122 bp, Homo sapiens
  misc_feature (61)..(62): /note="This region represents a CpG dinucleotide"
  misc_feature (61)..(61): /note="Nucleotide may be methylated to form 5-methylcytosine"
cttaaaataggcctctcttcagggacaaggtggccttataccaagccaaagtgctgagggcgcagggagacccgcgagacagggccccctgaagtcctggcggtttctagccagcctcttga

SEQ ID NO: 9182 - DNA, 122 bp, Homo sapiens
  misc_feature (61)..(62): /note="This region represents a CpG dinucleotide"
  misc_feature (61)..(61): /note="Nucleotide may be methylated to form 5-methylcytosine"
tgtcctcacaggttaagtaacaagcggaatgatgcaacaaaggcagtactactctctctacgtctgtcactaagaggctaggttgcaaaacatggatctcgtttcaatatctgtttctttag

SEQ ID NO: 9183 - DNA, 122 bp, Homo sapiens
  misc_feature (61)..(62): /note="This region represents a CpG dinucleotide"
  misc_feature (61)..(61): /note="Nucleotide may be methylated to form 5-methylcytosine"
cctgaagttaccacccctctggtcaaattcctgtactcaaatattaaattgagacagaatcggagtcagagtccagaaattctttggagtgcaaactttttttttttttttttttaaactca

SEQ ID NO: 9184 - DNA, 122 bp, Homo sapiens
  misc_feature (61)..(62): /note="This region represents a CpG dinucleotide"
  misc_feature (61)..(61): /note="Nucleotide may be methylated to form 5-methylcytosine"
ttcttcactgtcaggttcaggcatgtgcatggctgccctctggttacacaccacattgcacgcaggtgtgtggaacaaaaaggggtagttgctgaaaatataccagctcaaggtttccatta

SEQ ID NO: 9185 - DNA, 122 bp, Homo sapiens
  misc_feature (61)..(62): /note="This region represents a CpG dinucleotide"
  misc_feature (61)..(61): /note="Nucleotide may be methylated to form 5-methylcytosine"
aggatgatgtctgcattgtctggggtgagtcactggctttttcaggcctcttcctgaccccgccacctgtggagcctaccctaacaaggtgtaggggccagaatccaggtcaaggtcatacc

SEQ ID NO: 9186 - DNA, 122 bp, Homo sapiens
  misc_feature (61)..(62): /note="This region represents a CpG dinucleotide"
  misc_feature (61)..(61): /note="Nucleotide may be methylated to form 5-methylcytosine"
agggctgtggggctgtgattcggagctgtgattcatcaataagacccacaggattgtcagcgttcttcagttatgtgtttgtgccttcctcatgagccagggaaaggctggggttaccaccg

SEQ ID NO: 9187 - DNA, 122 bp, Homo sapiens
  misc_feature (61)..(62): /note="This region represents a CpG dinucleotide"
  misc_feature (61)..(61): /note="Nucleotide may be methylated to form 5-methylcytosine"
tatatcacctaatcttcagtcctattctgacattctcttggagagctggttttgccttttcgtttatttgccttttataaaactgaaggctcatcaacttctcagcaaacaggaaaatatat

SEQ ID NO: 9188 - DNA, 122 bp, Homo sapiens
  misc_feature (61)..(62): /note="This region represents a CpG dinucleotide"
  misc_feature (61)..(61): /note="Nucleotide may be methylated to form 5-methylcytosine"
cagtgtggtgctgcttccactgttgtagggtgggaccccaggtggcttgttctaattaagcgtcaacatgaatgatctgttctgtgctgtggttgagtcagaaagggaaagtcatctggcca

SEQ ID NO: 9189 - DNA, 122 bp, Homo sapiens
  misc_feature (61)..(62): /note="This region represents a CpG dinucleotide"
  misc_feature (61)..(61): /note="Nucleotide may be methylated to form 5-methylcytosine"
gggtggtttcacataaactaactccttcaatattcacacagaaatgaggcccggtattggcgttagaatcatcattcagatgagaaaacaggttaggcagcgtggcccggtcacacagtgag

SEQ ID NO: 9190 - DNA, 122 bp, Homo sapiens
  misc_feature (61)..(62): /note="This region represents a CpG dinucleotide"
  misc_feature (61)..(61): /note="Nucleotide may be methylated to form 5-methylcytosine"
cccgaactgcccagttaattgtgaagctataagacagtcctggccagggctcatctccaccgctagctggggatcccaccacatagctagacaggttcctgaatggacttctccttcaggac

SEQ ID NO: 9191 - DNA, 122 bp, Homo sapiens
  misc_feature (61)..(62): /note="This region represents a CpG dinucleotide"
  misc_feature (61)..(61): /note="Nucleotide may be methylated to form 5-methylcytosine"
ctggactcccaagatggattgggtccacacattcctagacctttgacctttatacctgtacgttactctgtacctcgtgggtttaactctgaggttgatagatacaaatagtttctttaaga

SEQ ID NO: 9192 - DNA, 122 bp, Homo sapiens
  misc_feature (61)..(62): /note="This region represents a CpG dinucleotide"
  misc_feature (61)..(61): /note="Nucleotide may be methylated to form 5-methylcytosine"
catttatactgaacttctttttggtttagccaacataaatataccagttctcagccttggcgggagggatacaatgcttcccacaggaaccctgagtcacggggagagtaaatgacttggca

SEQ ID NO: 9193 - DNA, 122 bp, Homo sapiens
  misc_feature (61)..(62): /note="This region represents a CpG dinucleotide"
  misc_feature (61)..(61): /note="Nucleotide may be methylated to form 5-methylcytosine"
ttatgtgacagtgagacagacaaagttattttagttcttcaggatgatgtcaaaatgacacgctgcccttataatgagactcagtattttgtactgtcatggcaggtggcaggttcacttac

SEQ ID NO: 9194 - DNA, 122 bp, Homo sapiens
  misc_feature (61)..(62): /note="This region represents a CpG dinucleotide"
  misc_feature (61)..(61): /note="Nucleotide may be methylated to form 5-methylcytosine"
tggcccgtagagggtagggagagcatagtgtggggaggaagagagctgcacatggtgaaacgcagggcccaacagcaggccctggtcttaggtgctgccaggttcattccaactgctcacag

SEQ ID NO: 9195 - DNA, 122 bp, Homo sapiens
  misc_feature (61)..(62): /note="This region represents a CpG dinucleotide"
  misc_feature (61)..(61): /note="Nucleotide may be methylated to form 5-methylcytosine"
tgatcacattgggaaatggagccactgctttcttgggctgagcttcttgtctgctggctccgggaacacctagtcacctcctcctcacccaggcactgcaaacaggtcattttgatgatcta

SEQ ID NO: 9196 - DNA, 122 bp, Homo sapiens
  misc_feature (61)..(62): /note="This region represents a CpG dinucleotide"
  misc_feature (61)..(61): /note="Nucleotide may be methylated to form 5-methylcytosine"
tctttattcgtcagggaaatgcagattaaaaccacaatcccacaaaataatacacgcccacgaaatgactgaaataccaaaggtgggcaagcattgagcaatggaactctcccacactgctg

SEQ ID NO: 9197 - DNA, 122 bp, Homo sapiens
  misc_feature (61)..(62): /note="This region represents a CpG dinucleotide"
  misc_feature (61)..(61): /note="Nucleotide may be methylated to form 5-methylcytosine"
tgggcaggggatgtggactcttgtcctgtcccaacaacagctccctgtaatgcaaggtcacgtggtagacaagggttagtattaggtaaccttgaatactaattcgtgattctttatcttct

SEQ ID NO: 9198 - DNA, 122 bp, Homo sapiens
  misc_feature (61)..(62): /note="This region represents a CpG dinucleotide"
  misc_feature (61)..(61): /note="Nucleotide may be methylated to form 5-methylcytosine"
atcatatataaattcagccatttccagtgtgaatcacccagaagggagaaaaagtacacacgtaagtggctataatacatggtagaatgtactgtgatgagtcatacaaatacatttttcta

SEQ ID NO: 9199 - DNA, 122 bp, Homo sapiens
  misc_feature (61)..(62): /note="This region represents a CpG dinucleotide"
  misc_feature (61)..(61): /note="Nucleotide may be methylated to form 5-methylcytosine"
aaggcactcttccctcgattctgtcctctgtgattttttccctactgaaggttaagaaaccgagggtcagagaagacgagtgactggcccaggatgacgcggctatgaggttgtcaagcagg

SEQ ID NO: 9200 - DNA, 122 bp, Homo sapiens
  misc_feature (61)..(62): /note="This region represents a CpG dinucleotide"
  misc_feature (61)..(61): /note="Nucleotide may be methylated to form 5-methylcytosine"
cgcactgagtggagactgacagcacagcagagtggtcagacagcagagtgccctaggctgcgcaaagaatgactgacgcttaaaagtgactaaggactttattgagagcctgcctagcttgg

SEQ ID NO: 9201 - DNA, 122 bp, Homo sapiens
  misc_feature (61)..(62): /note="This region represents a CpG dinucleotide"
  misc_feature (61)..(61): /note="Nucleotide may be methylated to form 5-methylcytosine"
tgttctcagacagggatttaagccttctggtctgactcatttttaccctggctgcaaacacgtagctcctccctggccatctcaaactctgagcactgagagagaaaaccagcatcaagaat

SEQ ID NO: 9202 - DNA, 122 bp, Homo sapiens
  misc_feature (61)..(62): /note="This region represents a CpG dinucleotide"
  misc_feature (61)..(61): /note="Nucleotide may be methylated to form 5-methylcytosine"
tatctttttattcagtacaagttgaaattacagttgtattaaaactgactgaaggctgggcgcagtggctcatgcctgtaatcccagcactttgggaggccaaggtaggtagatcacttgag

SEQ ID NO: 9203 - DNA, 122 bp, Homo sapiens
  misc_feature (61)..(62): /note="This region represents a CpG dinucleotide"
  misc_feature (61)..(61): /note="Nucleotide may be methylated to form 5-methylcytosine"
gtagatgacatcaggattcaggactctgaacacaaacacagtgacactgatcagggttgccgaggtgctgtgtttcggtccagaaagtcactgctgcaggggaggggagtatggtcacagcc

SEQ ID NO: 9204 - DNA, 122 bp, Homo sapiens
  misc_feature (61)..(62): /note="This region represents a CpG dinucleotide"
  misc_feature (61)..(61): /note="Nucleotide may be methylated to form 5-methylcytosine"
ctgactgcagaccttgaagaatgtttaatccaatatattatgatcacattacacacattacgtgaaaatatgacctttatgtagagagaatcatagactattggaagtggaaagaaccttgt

SEQ ID NO: 9205 - DNA, 122 bp, Homo sapiens
  misc_feature (61)..(62): /note="This region represents a CpG dinucleotide"
  misc_feature (61)..(61): /note="Nucleotide may be methylated to form 5-methylcytosine"
gctgattggtcaggtaggagatgaaatcacaggggatcaaagggggttcttgcagtcttccgttcctaagtgggatcaaagaactggtggaaccagatcaccagcctggatggtgtcagctg

SEQ ID NO: 9206 - DNA, 122 bp, Homo sapiens
  misc_feature (61)..(62): /note="This region represents a CpG dinucleotide"
  misc_feature (61)..(61): /note="Nucleotide may be methylated to form 5-methylcytosine"
cttacatttttaaaagaaagcatttatgagcaagttcaaacttaacctaaacctgtgtctcgtctcatctcgtctcatctcttttcttttctttctttttttttttgagacagagtcttgct

SEQ ID NO: 9207 - DNA, 122 bp, Homo sapiens
  misc_feature (61)..(62): /note="This region represents a CpG dinucleotide"
  misc_feature (61)..(61): /note="Nucleotide may be methylated to form 5-methylcytosine"
caagggaaggaactgcaggagggaggagccctgtcttattggttctagatccactgaaagcggccacagttctgaggacttgggcaggttccagaaacaatgccaaatctcccttgctagtc

SEQ ID NO: 9208 - DNA, 122 bp, Homo sapiens
  misc_feature (61)..(62): /note="This region represents a CpG dinucleotide"
  misc_feature (61)..(61): /note="Nucleotide may be methylated to form 5-methylcytosine"
gaagcagctgtggatgaggatgatgaggatgaggaagaaggggaggaagtggtggaggaccgagattactactatgacaccttcaaaggagatgactacaatgaggagaatcctactgaacc

SEQ ID NO: 9209 - DNA, 122 bp, Homo sapiens
  misc_feature (61)..(62): /note="This region represents a CpG dinucleotide"
  misc_feature (61)..(61): /note="Nucleotide may be methylated to form 5-methylcytosine"
aggtttacgacttcgcctacttgctgcaggtcagtgactggctttgaggttggtacattccgcattatacccatgttgagacagtctaaaatcccacgtgcttagggtgtgtctcagtccat

SEQ ID NO: 9210 - DNA, 122 bp, Homo sapiens
  misc_feature (61)..(62): /note="This region represents a CpG dinucleotide"
  misc_feature (61)..(61): /note="Nucleotide may be methylated to form 5-methylcytosine"
ctctaagacacatctggtgaaacaggatggcacagaataccttctcacaagtaacacctacgcttgctaaacacacagggagcttctgagaaggacacacttgaaactgctagcaggaatca

SEQ ID NO: 9211 - DNA, 122 bp, Homo sapiens
  misc_feature (61)..(62): /note="This region represents a CpG dinucleotide"
  misc_feature (61)..(61): /note="Nucleotide may be methylated to form 5-methylcytosine"
ttttgtaaggaacatggctatactgcagccaagcaaggataggccgaggtaaacatcctgcgtgactcagccagtttatagcgcaggagcatagctccacttgttgtataatcacagccatg

SEQ ID NO: 9212 - DNA, 122 bp, Homo sapiens
  misc_feature (61)..(62): /note="This region represents a CpG dinucleotide"
  misc_feature (61)..(61): /note="Nucleotide may be methylated to form 5-methylcytosine"
atttcaaacctgactcctgagtcagcagcaactccaaacaactccagattaatagcttttcggcttattgcagtgattcaacagggccatctttagggttttagaacatggccaagtcatta

SEQ ID NO: 9213 - DNA, 122 bp, Homo sapiens
  misc_feature (61)..(62): /note="This region represents a CpG dinucleotide"
  misc_feature (61)..(61): /note="Nucleotide may be methylated to form 5-methylcytosine"
ggcttcaggcagaggctgttcaacccctcgttacagatgtggaaactgggcctaagctcacggcattaatacagcatgggacagggtttcaacacatcatgattgccgggttctgggtgagg

SEQ ID NO: 9214 - DNA, 122 bp, Homo sapiens
  misc_feature (61)..(62): /note="This region represents a CpG dinucleotide"
  misc_feature (61)..(61): /note="Nucleotide may be methylated to form 5-methylcytosine"
aaaacagccttccacagaagtcagacgctgagctacaggaacggctatgcaattgttcgacgtccaacagttgggataggcggagaccggctccagttcaaccagctgtcccaggctgagct

SEQ ID NO: 9215 - DNA, 122 bp, Homo sapiens
  misc_feature (61)..(62): /note="This region represents a CpG dinucleotide"
  misc_feature (61)..(61): /note="Nucleotide may be methylated to form 5-methylcytosine"
actagaaggggaaatgactggtagagagaggaagcccgtgcatgaccttgctttagccagcgaggcagatatatgcaaaaagggtgcagctgtaccaggtacaaaaacagaactgggtcagc

SEQ ID NO: 9216 - DNA, 122 bp, Homo sapiens
  misc_feature (61)..(62): /note="This region represents a CpG dinucleotide"
  misc_feature (61)..(61): /note="Nucleotide may be methylated to form 5-methylcytosine"
ccctgcacctaccagaaatcagctggatgagtcacagtgagattttccacccctgctcaccgccttgcacataggatgggctctgtctgagcctatactttgcctgttggcttgaattggat

SEQ ID NO: 9217 - DNA, 122 bp, Homo sapiens
  misc_feature (61)..(62): /note="This region represents a CpG dinucleotide"
  misc_feature (61)..(61): /note="Nucleotide may be methylated to form 5-methylcytosine"
gacacacctggaaggtgctaagtgcaccgggcagaggaggcccctcctggccagcatgaccgtgcaccggcctgagtgggctcgggtgggaggcgccttcacagcactcagaccaggcttcc

SEQ ID NO: 9218 - DNA, 122 bp, Homo sapiens
  misc_feature (61)..(62): /note="This region represents a CpG dinucleotide"
  misc_feature (61)..(61): /note="Nucleotide may be methylated to form 5-methylcytosine"
tcctgaagtctttcaatctggatagacaggcttcctgttgcataactatcctggaacttgcgttcactgcatttctgaatttgttccactgtttcacagacccaatccacttcatttccttc

SEQ ID NO: 9219 - DNA, 122 bp, Homo sapiens
  misc_feature (61)..(62): /note="This region represents a CpG dinucleotide"
  misc_feature (61)..(61): /note="Nucleotide may be methylated to form 5-methylcytosine"
gagagctgcttgtttaaaagtgtgtagcagaggctcgctgtcttcctcctgcttcagctacgtaagtcgtgcctgcttcttcctcaccttctgccatgattgtaagtttcctgaggcctccc

SEQ ID NO: 9220 - DNA, 122 bp, Homo sapiens
  misc_feature (61)..(62): /note="This region represents a CpG dinucleotide"
  misc_feature (61)..(61): /note="Nucleotide may be methylated to form 5-methylcytosine"
acaatgccaatttagttaattttattatcactgtcatctccatgtaggaggagggactggcgagaggcctcatctgtctacaacagtcattctccactacgggcagtggggatagggtgtcc

SEQ ID NO: 9221 - DNA, 122 bp, Homo sapiens
  misc_feature (61)..(62): /note="This region represents a CpG dinucleotide"
  misc_feature (61)..(61): /note="Nucleotide may be methylated to form 5-methylcytosine"
gctctgaactgctctgtagaaaaacaaacaccacacaatgcaattgatgaatggcaggttcgcgataaatcccaatggttagtattaaaaatgcaaacactgtaacccttgataaaacagag

SEQ ID NO: 9222 - DNA, 122 bp, Homo sapiens
  misc_feature (61)..(62): /note="This region represents a CpG dinucleotide"
  misc_feature (61)..(61): /note="Nucleotide may be methylated to form 5-methylcytosine"
ctattgttcctgaaaaaccagatactccaggaggcggatagatgactagggaatggacagcgcaatgaatgttgattgggcatgcacagtacacaggcactgcactgatttctttccatgag

SEQ ID NO: 9223 - DNA, 122 bp, Homo sapiens
  misc_feature (61)..(62): /note="This region represents a CpG dinucleotide"
  misc_feature (61)..(61): /note="Nucleotide may be methylated to form 5-methylcytosine"
aagacacccaggaaatatttcacaacctatctcagtaacattccaatgtgttacaatcctcgcttttaggaaatccttcattatttccaaagatactgctactgctctacatcctttgtgaa

SEQ ID NO: 9224 - DNA, 122 bp, Homo sapiens
  misc_feature (61)..(62): /note="This region represents a CpG dinucleotide"
  misc_feature (61)..(61): /note="Nucleotide may be methylated to form 5-methylcytosine"
gctctgcctcaaatgagtcattggcactctccaggatcccatgtgtggaagatataataacggcctccaaagatatccacaccctaatctctggaacctaagaatatggtatgacacatgcc

SEQ ID NO: 9225 - DNA, 122 bp, Homo sapiens
  misc_feature (61)..(62): /note="This region represents a CpG dinucleotide"
  misc_feature (61)..(61): /note="Nucleotide may be methylated to form 5-methylcytosine"
ttgagcaagtgttgatcagaataaattatttatgtgagcactgggagctgcctccctatgcgcaaggcaatctgttaaagatttgctatcatgctagtgaatggggggaatggagtagtaca

SEQ ID NO: 9226 - DNA, 122 bp, Homo sapiens
  misc_feature (61)..(62): /note="This region represents a CpG dinucleotide"
  misc_feature (61)..(61): /note="Nucleotide may be methylated to form 5-methylcytosine"
gcatccagcttgggctgcagataacacaaaagcatggaggcaagagtggaggggagcaggcggtgtagcatcctcaaactgcagcttcgctctccgagcctcggtataactgggctgtggtc

SEQ ID NO: 9227 - DNA, 122 bp, Homo sapiens
  misc_feature (61)..(62): /note="This region represents a CpG dinucleotide"
  misc_feature (61)..(61): /note="Nucleotide may be methylated to form 5-methylcytosine"
gaatcagtaactccaatgagcccctattatgtgccaggccttgtacaattctcaggtaatcgtcactggccccagggtaaggcagggcagaatatcctccctatgtcaccagaccagggtca

SEQ ID NO: 9228 - DNA, 122 bp, Homo sapiens
  misc_feature (61)..(62): /note="This region represents a CpG dinucleotide"
  misc_feature (61)..(61): /note="Nucleotide may be methylated to form 5-methylcytosine"
tgaaatagatgggtgtgatgttctctggaatttccagttgatccagctccttttggactgcgcagagccattatgtcattatcctgggtccacctgatttccaaaggggccagactggcaag

SEQ ID NO: 9229 - DNA, 122 bp, Homo sapiens
  misc_feature (61)..(62): /note="This region represents a CpG dinucleotide"
  misc_feature (61)..(61): /note="Nucleotide may be methylated to form 5-methylcytosine"
aatgatagcaaggtcacaggtttaaatctctactccatgatcacaggccctctccctggacgggtcctatggctctggtgtcagcccgaccctttggtaaaaaaacagctgaagtggacatc

SEQ ID NO: 9230 - DNA, 122 bp, Homo sapiens
  misc_feature (61)..(62): /note="This region represents a CpG dinucleotide"
  misc_feature (61)..(61): /note="Nucleotide may be methylated to form 5-methylcytosine"
catttcatctgcacaataactatctgaagtaagggcttgagtagccccattctgccaacgcgactcacaagagttgagtaactcaccgagtggcacccagctagttggtggcagagcctgga

SEQ ID NO: 9231 - DNA, 122 bp, Homo sapiens
  misc_feature (61)..(62): /note="This region represents a CpG dinucleotide"
  misc_feature (61)..(61): /note="Nucleotide may be methylated to form 5-methylcytosine"
tcccaactccacccagggatcctggtgtacgggctgagcctgttatgcttttctgcccttcggccctttggggagccacggcgggaggtggagatccaccggcgatatgtggcccagtcggt

SEQ ID NO: 9232 - DNA, 122 bp, Homo sapiens
  misc_feature (61)..(62): /note="This region represents a CpG dinucleotide"
  misc_feature (61)..(61): /note="Nucleotide may be methylated to form 5-methylcytosine"
atccttgttaattctctgagtcacatcttaagaagtacagtgtatcctgccttctagtgacgggtgtgctttgttgtaggagaaagtatgggcacaacagactgtagagggcagacgtctca

SEQ ID NO: 9233 - DNA, 122 bp, Homo sapiens
  misc_feature (61)..(62): /note="This region represents a CpG dinucleotide"
  misc_feature (61)..(61): /note="Nucleotide may be methylated to form 5-methylcytosine"
ttctcatatggcagttcagggttacaaaacagagtgttccagccaaaaagacagaagctgcgtaacgtttaatgactcagcttcagaagtcatatagtgtcacttctgctgcatcctactgg

SEQ ID NO: 9234 - DNA, 122 bp, Homo sapiens
  misc_feature (61)..(62): /note="This region represents a CpG dinucleotide"
  misc_feature (61)..(61): /note="Nucleotide may be methylated to form 5-methylcytosine"
gtcaaactgtagaaaattacttcacccttatagtcaacattgtttcatctgcagctcttccgtaaaacaggattagctgtaaggcatgaagagcttttccatcttgagtccatctgtgcgac

SEQ ID NO: 9235 - DNA, 122 bp, Homo sapiens
  misc_feature (61)..(62): /note="This region represents a CpG dinucleotide"
  misc_feature (61)..(61): /note="Nucleotide may be methylated to form 5-methylcytosine"
tcttcctacttctgggcattaaatcctgctgtcccacaggacctggataggctgtcctcacgagaagtgggtaaagattcactacaaaaacaacatgactcatgaatggctctggatcccag

SEQ ID NO: 9236 - DNA, 122 bp, Homo sapiens
  misc_feature (61)..(62): /note="This region represents a CpG dinucleotide"
  misc_feature (61)..(61): /note="Nucleotide may be methylated to form 5-methylcytosine"
gccatcacagctcctttctgcctgccggtctgtgacatttcttaaaggccctacaggagccgggatgtcagcacttcctgttgcctgcggccttctgtacacagggcctttaatctcaacca

SEQ ID NO: 9237 - DNA, 122 bp, Homo sapiens
  misc_feature (61)..(62): /note="This region represents a CpG dinucleotide"
  misc_feature (61)..(61): /note="Nucleotide may be methylated to form 5-methylcytosine"
cggttcatgaaggtgcactgggttcacctttaagggcacatggtacaccttccaacatgccgtacctgcttaacctgccttgtctcaccctcccttctctgctgtgggacaacctggatccc

SEQ ID NO: 9238 - DNA, 122 bp, Homo sapiens
  misc_feature (61)..(62): /note="This region represents a CpG dinucleotide"
  misc_feature (61)..(61): /note="Nucleotide may be methylated to form 5-methylcytosine"
cacatgaatttgacttgcaaaaagtgcaaaagggaatggtagaaccagaattactaagtacggcatcagtgtgaatgtgggggaaatttgtgtataacttgctttgttctgctgagctgata

SEQ ID NO: 9239 - DNA, 122 bp, Homo sapiens
  misc_feature (61)..(62): /note="This region represents a CpG dinucleotide"
  misc_feature (61)..(61): /note="Nucleotide may be methylated to form 5-methylcytosine"
taagtggaaaaggggggagatgaacatgaacagaccaaccagccaacaaactggggatgtcgtcattcttctcagatcctgcgaaggctgtagcctctgctcagcactgctgcccgtcctgc

SEQ ID NO: 9240 - DNA, 122 bp, Homo sapiens
  misc_feature (61)..(62): /note="This region represents a CpG dinucleotide"
  misc_feature (61)..(61): /note="Nucleotide may be methylated to form 5-methylcytosine"
tgacacaaccccgccacccagtgacgcaacccccagtgacacaaccctgccacccggtgacgcaacccccagtgacacaacccccagtgacgcaaccccgccacccaatgaagataccacca

SEQ ID NO: 9241 - DNA, 122 bp, Homo sapiens
  misc_feature (61)..(62): /note="This region represents a CpG dinucleotide"
  misc_feature (61)..(61): /note="Nucleotide may be methylated to form 5-methylcytosine"
aagaggtcatcacctgcagatgcggttaagcaacttgcagaggccccagggctgagccaccgcagaaccggagctggaaaccagtcctatgactcctgaggcagtgctctttctactacctg

SEQ ID NO: 9242 - DNA, 122 bp, Homo sapiens
  misc_feature (61)..(62): /note="This region represents a CpG dinucleotide"
  misc_feature (61)..(61): /note="Nucleotide may be methylated to form 5-methylcytosine"
aataaaggactcctgaattagtctcagagtgtggcattctctctatgacttgctcggttacgacatttggaagccccagagagattcgccaccgggtgaagacctgactcattccgggcttc

SEQ ID NO: 9243 - DNA, 122 bp, Homo sapiens
  misc_feature (61)..(62): /note="This region represents a CpG dinucleotide"
  misc_feature (61)..(61): /note="Nucleotide may be methylated to form 5-methylcytosine"
agcttaggcaacagaatcacttacgaaatcctacatcaggctgtgtcactgtgtgaacctcggaaagtctgaagcttatcaagtgaagtctgaaaaattttcctgaattttacacacagggg

SEQ ID NO: 9244 - DNA, 122 bp, Homo sapiens
  misc_feature (61)..(62): /note="This region represents a CpG dinucleotide"
  misc_feature (61)..(61): /note="Nucleotide may be methylated to form 5-methylcytosine"
cagacactcctaaagccattcccaattcccctttcccttgctacctcccaataaataggccggaaagccaaatacctgttagcctagtctccctgcaactagtagtcacatgaccaagctct

SEQ ID NO: 9245 - DNA, 122 bp, Homo sapiens
  misc_feature (61)..(62): /note="This region represents a CpG dinucleotide"
  misc_feature (61)..(61): /note="Nucleotide may be methylated to form 5-methylcytosine"
ggacacacccaaggagcatcatgggccaagacagtgtcaagatgacacaggcttccacaccgtcaccaggctggggctttctgtgtggattcaagaaatttgtggtttttcttttctttttt

SEQ ID NO: 9246 - DNA, 122 bp, Homo sapiens
  misc_feature (61)..(62): /note="This region represents a CpG dinucleotide"
  misc_feature (61)..(61): /note="Nucleotide may be methylated to form 5-methylcytosine"
gtgtgagccactgtgcccaacccaaatcctctttttgtgttccactcttaaataggagtacgtagtgggccgggtgtggtggctcacctctaatcccagcattttgggaggctgaggtggga

SEQ ID NO: 9247 - DNA, 122 bp, Homo sapiens
  misc_feature (61)..(62): /note="This region represents a CpG dinucleotide"
  misc_feature (61)..(61): /note="Nucleotide may be methylated to form 5-methylcytosine"
tgcctggctgctgtggtacttttcaagaacactattcttgcagttggtgaggggaagctacggttccatgagaatacctggtagggcaagaattgggtagagaaggaagtaaagtcaggagg

SEQ ID NO: 9248 - DNA, 122 bp, Homo sapiens
  misc_feature (61)..(62): /note="This region represents a CpG dinucleotide"
  misc_feature (61)..(61): /note="Nucleotide may be methylated to form 5-methylcytosine"
gagagctgccacattcacctacagcccattgttgtactggattaacaagcgacggcgctacggcatgaatgcagccatcaacacgggccctgcccctgctgtcaccaagactgagactgagg

SEQ ID NO: 9249 - DNA, 122 bp, Homo sapiens
  misc_feature (61)..(62): /note="This region represents a CpG dinucleotide"
  misc_feature (61)..(61): /note="Nucleotide may be methylated to form 5-methylcytosine"
tgagcttggagcttttaaaaaactcatttaattagctccctggcagggctcaatcttacacgcaatgtccaagactctctgcagcacctccgcaggagagaatctttgggacagctgtggac

SEQ ID NO: 9250 - DNA, 122 bp, Homo sapiens
  misc_feature (61)..(62): /note="This region represents a CpG dinucleotide"
  misc_feature (61)..(61): /note="Nucleotide may be methylated to form 5-methylcytosine"
cggcatctgcataaattggttaatgggtgctgttgaagagagtgtgatttgtccaatggccgaactcaggagtccttgagtacttgacccaggaagacaggggagagtaggcttagcaatta

SEQ ID NO: 9251 - DNA, 122 bp, Homo sapiens
  misc_feature (61)..(62): /note="This region represents a CpG dinucleotide"
  misc_feature (61)..(61): /note="Nucleotide may be methylated to form 5-methylcytosine"
ctgccacacagcctctaatgcatcagccaccatctcagaagtcaattcagacatttctcacgtgttctgagaaacatggggaagagcccataccaaggtactcacataaagactgtagttta

SEQ ID NO: 9252 - DNA, 122 bp, Homo sapiens
  misc_feature (61)..(62): /note="This region represents a CpG dinucleotide"
  misc_feature (61)..(61): /note="Nucleotide may be methylated to form 5-methylcytosine"
tggtctcccttgaattatgtgctagttcctgaaccaatcactgtcagcaggggaatggaacgctctggttttgtaagtctgagccttactgtataacccatgggccaggggtggatcctgct

SEQ ID NO: 9253 - DNA, 122 bp, Homo sapiens
  misc_feature (61)..(62): /note="This region represents a CpG dinucleotide"
  misc_feature (61)..(61): /note="Nucleotide may be methylated to form 5-methylcytosine"
caagtcacgctagaacagccagcagacaccaagtaaacaccacctaatgatgaacctggtcggaccattcacgccagttggcagatccataatttcatgggggcatcacccggagcaaagcc

SEQ ID NO: 9254 - DNA, 122 bp, Homo sapiens
  misc_feature (61)..(62): /note="This region represents a CpG dinucleotide"
  misc_feature (61)..(61): /note="Nucleotide may be methylated to form 5-methylcytosine"
agcaaaggcttagctaagaaggggaagtaactcacataaggtcagacagcaagttaataacgaagtcagggcaagagcccaggtctcctgacacctggtctagtatttttctgatgtcctaa

SEQ ID NO: 9255 - DNA, 122 bp, Homo sapiens
  misc_feature (61)..(62): /note="This region represents a CpG dinucleotide"
  misc_feature (61)..(61): /note="Nucleotide may be methylated to form 5-methylcytosine"
cgtgatccacctgcctccgcctcccaaagtgctgggattacaggtgtgagccaccacgcccggcctaggtttcacctttgaacccagtggagagctctgttcccaagctgtaccctcttcta

SEQ ID NO: 9256 - DNA, 122 bp, Homo sapiens
  misc_feature (61)..(62): /note="This region represents a CpG dinucleotide"
  misc_feature (61)..(61): /note="Nucleotide may be methylated to form 5-methylcytosine"
gggtaggcatgagaagttagtatcaggaggagggcctgtgtgctaggtaagcgtttaacacggatggactcattaatcccctgaccagggagtttgctataggctgtttcacagtcttaagg

SEQ ID NO: 9257 - DNA, 122 bp, Homo sapiens
  misc_feature (61)..(62): /note="This region represents a CpG dinucleotide"
  misc_feature (61)..(61): /note="Nucleotide may be methylated to form 5-methylcytosine"
taactctgtggtttgcagatgcctttaaggttccaatcataagactggtttgtatattagcgtctaggctctcagcagggacactggtaatcaagcttgtgttcccagtcagaaatccaaag

SEQ ID NO: 9258 - DNA, 122 bp, Homo sapiens
  misc_feature (61)..(62): /note="This region represents a CpG dinucleotide"
  misc_feature (61)..(61): /note="Nucleotide may be methylated to form 5-methylcytosine"
cctactgctcactagagataacctggtacagtgaggaagttgaacttggccccttgacatcgaggtgatcacaggacataaaattgtgtggctttggttttgggatttttggcaacgctttg

SEQ ID NO: 9259 - DNA, 122 bp, Homo sapiens
  misc_feature (61)..(62): /note="This region represents a CpG dinucleotide"
  misc_feature (61)..(61): /note="Nucleotide may be methylated to form 5-methylcytosine"
tttggtttaggaataccactgtctcacaggagtgtcaatcaaaattccacagccattcttcgacactaggaggtgggactgactgatgtacagcagtgatttgacccagcacttggggcaaa

SEQ ID NO: 9260 - DNA, 122 bp, Homo sapiens
  misc_feature (61)..(62): /note="This region represents a CpG dinucleotide"
  misc_feature (61)..(61): /note="Nucleotide may be methylated to form 5-methylcytosine"
cccaggactgaagtttgttaagtgagtgtaatacaaagacaggtcgagcaacaaggcaagcgttttctaactgcagatcatagcttttgtatgccttctgcctggaatgttttctcctagct

SEQ ID NO: 9261 - DNA, 122 bp, Homo sapiens
  misc_feature (61)..(62): /note="This region represents a CpG dinucleotide"
  misc_feature (61)..(61): /note="Nucleotide may be methylated to form 5-methylcytosine"
aagaggcccagcttctacacctggctctgctattagctcacactgtgactttggacaagtcgctccacctgctttggcctcaactttctgatctataaaattaaaggattagaaaagatgat

SEQ ID NO: 9262 - DNA, 122 bp, Homo sapiens
  misc_feature (61)..(62): /note="This region represents a CpG dinucleotide"
  misc_feature (61)..(61): /note="Nucleotide may be methylated to form 5-methylcytosine"
ctcctccgttttgtaggcacttaatgcatggttcctggcttatactctgtgcccagcaaacgtaagcttctatcattagcacctctgactcactgcacagcattaggagactctgtgccctg

SEQ ID NO: 9263 - DNA, 122 bp, Homo sapiens
  misc_feature (61)..(62): /note="This region represents a CpG dinucleotide"
  misc_feature (61)..(61): /note="Nucleotide may be methylated to form 5-methylcytosine"
tcttattccagtgactggagtcatgcaagtcagaaacccagggaagtttcttaattgccacgccttacaatgttaatattacttcatcacatgggttttttttttacagcagtcttttaaag

SEQ ID NO: 9264 - DNA, 122 bp, Homo sapiens
  misc_feature (61)..(62): /note="This region represents a CpG dinucleotide"
  misc_feature (61)..(61): /note="Nucleotide may be methylated to form 5-methylcytosine"
tgggtctatgcttccatagagcagtggcttcgggcacaggcctgagacccagcctgcctgcgggctgctagctgccagctacctctgcactaggaaggtttttaaacagctgaatgcaagct

SEQ ID NO: 9265 - DNA, 122 bp, Homo sapiens
  misc_feature (61)..(62): /note="This region represents a CpG dinucleotide"
  misc_feature (61)..(61): /note="Nucleotide may be methylated to form 5-methylcytosine"
ctgggattacaggcgtgagccaccacgcctggccataaaaattatttaaaatagttaacacgagttcccattgctgacataagcttttgctgatagagcagccgtgttttctgtaataaatc

SEQ ID NO: 9266 - DNA, 122 bp, Homo sapiens
  misc_feature (61)..(62): /note="This region represents a CpG dinucleotide"
  misc_feature (61)..(61): /note="Nucleotide may be methylated to form 5-methylcytosine"
ggatgaataagaaccggcagtgtttagacaggcattctttgattatgtaatcccaggaagcgaagagaagaaggctcagttaccttgcatcagaagcaaagaagaattccacggccttgtcg

SEQ ID NO: 9267 - DNA, 122 bp, Homo sapiens
  misc_feature (61)..(62): /note="This region represents a CpG dinucleotide"
  misc_feature (61)..(61): /note="Nucleotide may be methylated to form 5-methylcytosine"
aagcatgaattttggagtcaagacaggccctggtcaaatcctggggcagtgcagcaccttcgttggatagctctgagcaattgacttaatctttctaagccccagtttcctcatctgtgaag

SEQ ID NO: 9268 - DNA, 122 bp, Homo sapiens
  misc_feature (61)..(62): /note="This region represents a CpG dinucleotide"
  misc_feature (61)..(61): /note="Nucleotide may be methylated to form 5-methylcytosine"
ccacaaggtgccaggactagcatggtgctaggttacctgtggggccctgtggtgtctccacggcattgcagtgacatgctcagtgaaggggacctgttaggcatttcatgagtggctcagag

SEQ ID NO: 9269 - DNA, 122 bp, Homo sapiens
  misc_feature (61)..(62): /note="This region represents a CpG dinucleotide"
  misc_feature (61)..(61): /note="Nucleotide may be methylated to form 5-methylcytosine"
agggcctcggactcttgccttagcagaatcaccaggcagagtcatagagatagaggcttgcgtggctttgctgacacagcttgcttgcctcaagaggcttctgtgggggccagggtggaatg

SEQ ID NO: 9270 - DNA, 122 bp, Homo sapiens
  misc_feature (61)..(62): /note="This region represents a CpG dinucleotide"
  misc_feature (61)..(61): /note="Nucleotide may be methylated to form 5-methylcytosine"
catgcataggtttgatgaagcatggacagccttgtagaaatgtgattggacaaaagggtacgatctagtgtaatccactgagtggcgaaccccagcaagacctgtctgttcagattcttttc

SEQ ID NO: 9271 - DNA, 122 bp, Homo sapiens
  misc_feature (61)..(62): /note="This region represents a CpG dinucleotide"
  misc_feature (61)..(61): /note="Nucleotide may be methylated to form 5-methylcytosine"
ggggagttatttcaacagccctgggattgcaacattctgcatcagaagtggcgctaagcacgccagactgtcctaggtttccttattcttattctgttattgctgagctaaccagggtggtg

SEQ ID NO: 9272 - DNA, 122 bp, Homo sapiens
  misc_feature (61)..(62): /note="This region represents a CpG dinucleotide"
  misc_feature (61)..(61): /note="Nucleotide may be methylated to form 5-methylcytosine"
cactggaccatcacagcacatgttccccagatctgaggctcagcatgtccaaaatgctgacggagcacctgctacacaccaggactaggtacgtagtatgagtgtactaactgggttcctgc

SEQ ID NO: 9273 - DNA, 122 bp, Homo sapiens
  misc_feature (61)..(62): /note="This region represents a CpG dinucleotide"
  misc_feature (61)..(61): /note="Nucleotide may be methylated to form 5-methylcytosine"
acttgactaagcctagcagagcctgcccacttcccctccctagaggccaacccatgttctcgaggcaatgctgtctgccaagatggccccatcccatcaagccctgccttccctcctgattc

SEQ ID NO: 9274 - DNA, 122 bp, Homo sapiens
  misc_feature (61)..(62): /note="This region represents a CpG dinucleotide"
  misc_feature (61)..(61): /note="Nucleotide may be methylated to form 5-methylcytosine"
cagaagtaagtgcctgagtcatacctaggagtttggattgcaccacagagatgctgggagcgtacatcaaaagccttctcctcctccacagagattaggagagaaagagcacaggccgatgc

SEQ ID NO: 9275 - DNA, 122 bp, Homo sapiens
  misc_feature (61)..(62): /note="This region represents a CpG dinucleotide"
  misc_feature (61)..(61): /note="Nucleotide may be methylated to form 5-methylcytosine"
taagtctgagtcattgctcttagtactgacaactcccactgcagtggatcagagacgaggcggaagcagcctggccagcctctcctgggaaggaaggagcattgccccatctcagattcgga

SEQ ID NO: 9276 - DNA, 122 bp, Homo sapiens
  misc_feature (61)..(62): /note="This region represents a CpG dinucleotide"
  misc_feature (61)..(61): /note="Nucleotide may be methylated to form 5-methylcytosine"
ttctctatcttgtttcacagctcgactgcaccagacttttctgtcttgcatgtctggccacgctggaaagtgttcaagaacattatgatgagtaacctgttcctttttccatgactgtctta

SEQ ID NO: 9277 - DNA, 122 bp, Homo sapiens
  misc_feature (61)..(62): /note="This region represents a CpG dinucleotide"
  misc_feature (61)..(61): /note="Nucleotide may be methylated to form 5-methylcytosine"
tggggattttaggcagcgaaaatctcatcacatagccagagaaataatcacaaattcccacgacacacttccaggcggtatcacagctcctggcctgcttgagatctgtgggagtgagtcag

SEQ ID NO: 9278 - DNA, 122 bp, Homo sapiens
  misc_feature (61)..(62): /note="This region represents a CpG dinucleotide"
  misc_feature (61)..(61): /note="Nucleotide may be methylated to form 5-methylcytosine"
agctgggatttacctggcctcgtcactagactaatgggattgtggcacaggtgaacatcccgtcattggagaagaaaggctggattgaaggccaggtgggggaggggtgctaggctgtgggg

SEQ ID NO: 9279 - DNA, 122 bp, Homo sapiens
  misc_feature (61)..(62): /note="This region represents a CpG dinucleotide"
  misc_feature (61)..(61): /note="Nucleotide may be methylated to form 5-methylcytosine"
ggccttcctcaatggggaaaaggtattcccaaatccattttctgcagggaatccacggagcgagagcggtgaaactgatgacaggaaagccctgccttcatgttcatgcttgtattttaact

SEQ ID NO: 9280 - DNA, 122 bp, Homo sapiens
  misc_feature (61)..(62): /note="This region represents a CpG dinucleotide"
  misc_feature (61)..(61): /note="Nucleotide may be methylated to form 5-methylcytosine"
gtacataacattctgtacagggttgtaacccaggagtaataggctataccatacagcctacgtgtgtagtaggctgtgccatctaggtttgtgtaagtacactctacgatgtttgcataatg

SEQ ID NO: 9281 - DNA, 122 bp, Homo sapiens
  misc_feature (61)..(62): /note="This region represents a CpG dinucleotide"
  misc_feature (61)..(61): /note="Nucleotide may be methylated to form 5-methylcytosine"
cctgactgccagccggccccttgatggcggtgcctgtctcagattctgtggtcagtgccacgcagctacctccagaggcagcctgcagcctggccatgtggccccaagctccaggctagagg

SEQ ID NO: 9282 - DNA, 122 bp, Homo sapiens
  misc_feature (61)..(62): /note="This region represents a CpG dinucleotide"
  misc_feature (61)..(61): /note="Nucleotide may be methylated to form 5-methylcytosine"
agttgacagctttgctctctgccaagatcccataaaatattaataacttctgagaatccacgctgagggaatcgccccaaaacacagaaaaggctctagaaaaagccactacatgtaacttt

SEQ ID NO: 9283 - DNA, 122 bp, Homo sapiens
  misc_feature (61)..(62): /note="This region represents a CpG dinucleotide"
  misc_feature (61)..(61): /note="Nucleotide may be methylated to form 5-methylcytosine"
acctcaggtgatccacccacctcagcctcccaaagtgctgggattacaggtgtgagccatcgtgcccagccaagacagactttcaatacacaggaaatggtgagtcccttagaggtttctga

SEQ ID NO: 9284 - DNA, 122 bp, Homo sapiens
  misc_feature (61)..(62): /note="This region represents a CpG dinucleotide"
  misc_feature (61)..(61): /note="Nucleotide may be methylated to form 5-methylcytosine"
ttctctgtccagctttattggtcacacttgcagttagactggtctggccgatggccacaccgcggatgaggaatgtgatggtgtagttgtcaagggcttcatcaagggccctgaaacagagg

SEQ ID NO: 9285 - DNA, 122 bp, Homo sapiens
  misc_feature (61)..(62): /note="This region represents a CpG dinucleotide"
  misc_feature (61)..(61): /note="Nucleotide may be methylated to form 5-methylcytosine"
gcaaactggctgtgctgcctgtttttgtgcagccagctcctgagctaagaaggagtgttacgtgtttatatggttgggggaaaaaatgaaaagaataatgttttgtgatgtgtaaaaattac

SEQ ID NO: 9286 - DNA, 122 bp, Homo sapiens
  misc_feature (61)..(62): /note="This region represents a CpG dinucleotide"
  misc_feature (61)..(61): /note="Nucleotide may be methylated to form 5-methylcytosine"
gtaataagtgtgtgagtgaatcaatgaaggtaaaaatgagtaagtgcctgagtaattgaacgaagagatgattgcataaagcagcaaatgaatttgtaaatcacaatgactaacacttttga

SEQ ID NO: 9287 - DNA, 122 bp, Homo sapiens
  misc_feature (61)..(62): /note="This region represents a CpG dinucleotide"
  misc_feature (61)..(61): /note="Nucleotide may be methylated to form 5-methylcytosine"
acagctactgggaggaatgatgagcacatcaatcggtgactactcataggggcttgggaccgtgttgcctggcacatgggacgcgctccacaactttgtctcctggatgaaatggggacatt

SEQ ID NO: 9288 - DNA, 122 bp, Homo sapiens
  misc_feature (61)..(62): /note="This region represents a CpG dinucleotide"
  misc_feature (61)..(61): /note="Nucleotide may be methylated to form 5-methylcytosine"
attgacggtaacagcgatgatgactcttttgaacaacatgtaagagcctattctgcaccacgccttgctctcaaggaggcttgtaatcaagaaaaaaaaaaaaaaaaaaaaaaaacttggaa

SEQ ID NO: 9289 - DNA, 122 bp, Homo sapiens
  misc_feature (61)..(62): /note="This region represents a CpG dinucleotide"
  misc_feature (61)..(61): /note="Nucleotide may be methylated to form 5-methylcytosine"
aaaaaaagagaatgtaaaaatcgaaagagattgttgtaggaaatctcaacctaatgctgccggggaggaagtgcacctagaaagattaatgagaaacaatgaaaccagctgttagtatctat

SEQ ID NO: 9290 - DNA, 122 bp, Homo sapiens
  misc_feature (61)..(62): /note="This region represents a CpG dinucleotide"
  misc_feature (61)..(61): /note="Nucleotide may be methylated to form 5-methylcytosine"
tataatccattgtgtgaatctactgctacatacacagagccactaaagaattactcataacgcactagtgagcattcttgtacctgtctccaggtaggcttgccagacttttaaatcttttg

SEQ ID NO: 9291 - DNA, 122 bp, Homo sapiens
  misc_feature (61)..(62): /note="This region represents a CpG dinucleotide"
  misc_feature (61)..(61): /note="Nucleotide may be methylated to form 5-methylcytosine"
ccttctgtcctccctgtacaatgaaggagactgaccgtaagtggaaccaggaagtgttgacgtggtcattactgcaaggaaggaggaaaaatagcagccaaaaatgccatttacgtgaaact

SEQ ID NO: 9292 - DNA, 122 bp, Homo sapiens
  misc_feature (61)..(62): /note="This region represents a CpG dinucleotide"
  misc_feature (61)..(61): /note="Nucleotide may be methylated to form 5-methylcytosine"
ggaggctgatgttacagtgagctgagatcgtgccactgcactccagcctaggcgatagagcgagactgtctcaaaagaaaaaaaaggaaagaaagaaccagtgtgatgccagaaggcatgat

SEQ ID NO: 9293 - DNA, 122 bp, Homo sapiens
  misc_feature (61)..(62): /note="This region represents a CpG dinucleotide"
  misc_feature (61)..(61): /note="Nucleotide may be methylated to form 5-methylcytosine"
acgcagaaagatgaaataacttgcccaaggtcacgcaggcccagtataaataacaccagtcgccccaacttattaagctcctactgtgttacctgctatagggtaaagcttttacctgcctt

SEQ ID NO: 9294 - DNA, 122 bp, Homo sapiens
  misc_feature (61)..(62): /note="This region represents a CpG dinucleotide"
  misc_feature (61)..(61): /note="Nucleotide may be methylated to form 5-methylcytosine"
cataggctttctcatctaggttggtgtggcacaccctgatgttctcacaataggaaattgcgtaaggatgcatttctcacaacgtacccccttcactaaccaatgcatgactgtatggattc

SEQ ID NO: 9295 - DNA, 122 bp, Homo sapiens
  misc_feature (61)..(62): /note="This region represents a CpG dinucleotide"
  misc_feature (61)..(61): /note="Nucleotide may be methylated to form 5-methylcytosine"
acgtgatgtgagaacctgaggagctcggcgttcacagcatcaggtaagcctcagtgcagacggcatgtggcagagctgagaatgcacagaatgcaaattcgctgcttcagagctaaacctcc

SEQ ID NO: 9296 - DNA, 122 bp, Homo sapiens
  misc_feature (61)..(62): /note="This region represents a CpG dinucleotide"
  misc_feature (61)..(61): /note="Nucleotide may be methylated to form 5-methylcytosine"
atataaatcctgtggaacaggatatactctagaagaacaggttgtcacagggctgagatacggttctcaaattagagggctagttaagaatcctatttactctaatacagagatagacaaca

SEQ ID NO: 9297 - DNA, 122 bp, Homo sapiens
  misc_feature (61)..(62): /note="This region represents a CpG dinucleotide"
  misc_feature (61)..(61): /note="Nucleotide may be methylated to form 5-methylcytosine"
gggaagccctaactctggagggacagagacaggtaaggttagtttacttccttgagctttcgtcttcagtgctgcttacagccttaggatatctggtattcaggaaaggaggatgaggtagc

SEQ ID NO: 9298 - DNA, 122 bp, Homo sapiens
  misc_feature (61)..(62): /note="This region represents a CpG dinucleotide"
  misc_feature (61)..(61): /note="Nucleotide may be methylated to form 5-methylcytosine"
gctccaacgagtcttggatgtgcgggtggagggcgaaccccctcttaaagctggggcctacggagcagttgctgagatgaaattcaggcctggccccatttaaatccagcccccacctcccc

SEQ ID NO: 9299 - DNA, 122 bp, Homo sapiens
  misc_feature (61)..(62): /note="This region represents a CpG dinucleotide"
  misc_feature (61)..(61): /note="Nucleotide may be methylated to form 5-methylcytosine"
tctaggtaccagataataattaaacacaacagacatgggttcccataccagggctccatccgcaacgtaagcaggaaaagattccaagccatgcacatgattcacaaatgacccttggacat

SEQ ID NO: 9300 - DNA, 122 bp, Homo sapiens
  misc_feature (61)..(62): /note="This region represents a CpG dinucleotide"
  misc_feature (61)..(61): /note="Nucleotide may be methylated to form 5-methylcytosine"
gtgttgctagcatgtgctttactcagtgagcagcagtgactcagcacagggcaggccggccgccgtctgcgtcaggaggctgtaactattttcttacagctataaaggtcacaaacatgacc

SEQ ID NO: 9301 - DNA, 122 bp, Homo sapiens
  misc_feature (61)..(62): /note="This region represents a CpG dinucleotide"
  misc_feature (61)..(61): /note="Nucleotide may be methylated to form 5-methylcytosine"
ggtttatcgcaggctgcagtgataatccctgcggagagtaagggccggcctgggtgtcagcgcagggctagatcccgcctagcagtgggacgggacaggtcggggaggggcctaaaccaatc

SEQ ID NO: 9302 - DNA, 122 bp, Homo sapiens
  misc_feature (61)..(62): /note="This region represents a CpG dinucleotide"
  misc_feature (61)..(61): /note="Nucleotide may be methylated to form 5-methylcytosine"
taacaataataccttccttacagagttgtcatgataaatttcatgagattcacaaaataccgattactgaatttgtcttgctgttaagttctgtttatatttaagtcactatcctgattatt

SEQ ID NO: 9303 - DNA, 122 bp, Homo sapiens
  misc_feature (61)..(62): /note="This region represents a CpG dinucleotide"
  misc_feature (61)..(61): /note="Nucleotide may be methylated to form 5-methylcytosine"
aaagaatgtttgaggccagatcacctacagaagttcaacacgtttgtcccatatagatgacgttaagctgttctgccttcatgttaccctcagcacatgtccccaggcacagttgctgcatt

SEQ ID NO: 9304 - DNA, 122 bp, Homo sapiens
  misc_feature (61)..(62): /note="This region represents a CpG dinucleotide"
  misc_feature (61)..(61): /note="Nucleotide may be methylated to form 5-methylcytosine"
ccccaggcaagatgtgggtttgttttgggaaagggctgttattgtctttgttctaaactgcggattataaactaagtgcctcccaaagtcagttcagctaatgcccaggaatgaataatgac

SEQ ID NO: 9305 - DNA, 122 bp, Homo sapiens
  misc_feature (61)..(62): /note="This region represents a CpG dinucleotide"
  misc_feature (61)..(61): /note="Nucleotide may be methylated to form 5-methylcytosine"
tactgagctcatacatatgtgtcagatacctatgtgtcaggtactatacacaacgcattacgtgattgtcatgtttaatcttcacaccaatcagttgttaattaaccacattttacagacag

SEQ ID NO: 9306 - DNA, 122 bp, Homo sapiens
  misc_feature (61)..(62): /note="This region represents a CpG dinucleotide"
  misc_feature (61)..(61): /note="Nucleotide may be methylated to form 5-methylcytosine"
agttttcccccaccctcttgggtgactggttttcctacagcctaaatctggtgctgaaaacgtcaccgcttctcacttttactttgttagctcatatggtgccaccttaagaagacctactg

SEQ ID NO: 9307 - DNA, 122 bp, Homo sapiens
  misc_feature (61)..(62): /note="This region represents a CpG dinucleotide"
  misc_feature (61)..(61): /note="Nucleotide may be methylated to form 5-methylcytosine"
tttctagagggcctcatatgtcacatacattaactcacttaatccttacaataccactttcggccagatgctataattatccccattttcaaggtgagaaaacagaagtgcagagaggttta

SEQ ID NO: 9308 - DNA, 122 bp, Homo sapiens
  misc_feature (61)..(62): /note="This region represents a CpG dinucleotide"
  misc_feature (61)..(61): /note="Nucleotide may be methylated to form 5-methylcytosine"
tacctttcttttttcctgtctaatcattcacttctttacctcccctttgtctttttctcccgcaaagttaccagaaaggagggtttggtttggtcctcaagtagtactttcttgtatgaagt

SEQ ID NO: 9309 - DNA, 122 bp, Homo sapiens
  misc_feature (61)..(62): /note="This region represents a CpG dinucleotide"
  misc_feature (61)..(61): /note="Nucleotide may be methylated to form 5-methylcytosine"
cttcatttgtggctagtattgcaccccttcagtgtggcaatgtggttctgtcaccagaaacgctgactggcaacttctgtatggttgcaaaaccgggactggattcactgagactgattcct

SEQ ID NO: 9310 - DNA, 122 bp, Homo sapiens
  misc_feature (61)..(62): /note="This region represents a CpG dinucleotide"
  misc_feature (61)..(61): /note="Nucleotide may be methylated to form 5-methylcytosine"
ttcccattatatttcataatcctcttctgatttcattaacctctccataacaaagacgggcgaactcaatctttcattttgcctttttgacttctgggatatcttctcttttctcctggctc

SEQ ID NO: 9311 - DNA, 122 bp, Homo sapiens
  misc_feature (61)..(62): /note="This region represents a CpG dinucleotide"
  misc_feature (61)..(61): /note="Nucleotide may be methylated to form 5-methylcytosine"
taccttgaactctttctcaatattggccagaactgccagttcattgctaagttctaaagccgtcatgactggatcttcactagacaatgacaggtaagccggacttgccaggcctttatagg

SEQ ID NO: 9312 - DNA, 122 bp, Homo sapiens
  misc_feature (61)..(62): /note="This region represents a CpG dinucleotide"
  misc_feature (61)..(61): /note="Nucleotide may be methylated to form 5-methylcytosine"
gaagataatgcgtttgagatgccaatgtgaagtgccaatttgagtcacagctagaaattccggttttgagcaatggatggatatatctgaactggagatacaagtctgggagtcatcaatgc

SEQ ID NO: 9313 - DNA, 122 bp, Homo sapiens
  misc_feature (61)..(62): /note="This region represents a CpG dinucleotide"
  misc_feature (61)..(61): /note="Nucleotide may be methylated to form 5-methylcytosine"
tgcatttgggagacacagaaaaccagtgttgattcatgctcgcatgatctaaagggaaggcgatgtgtcacaggcagcttggatggcttcacaggttacttgcacatttccaggcaaagtgt

SEQ ID NO: 9314 - DNA, 122 bp, Homo sapiens
  misc_feature (61)..(62): /note="This region represents a CpG dinucleotide"
  misc_feature (61)..(61): /note="Nucleotide may be methylated to form 5-methylcytosine"
tagctgggattacaggtgtgcaccaccacgcccagacattgttgtatttcttgtagagaccgggttttgccatgttggccaggctgttctcgaattcctgacctcaagtgatccgccgacct

SEQ ID NO: 9315 - DNA, 122 bp, Homo sapiens
  misc_feature (61)..(62): /note="This region represents a CpG dinucleotide"
  misc_feature (61)..(61): /note="Nucleotide may be methylated to form 5-methylcytosine"
tctgacccagtcagtctcttctgtgcaaccacggtaatcttttgaaagtgcaagtccaatcgtgttttcccgaattaaaaagcttttgctggctgtacatcttcacagaatataccgaatga

SEQ ID NO: 9316 - DNA, 122 bp, Homo sapiens
  misc_feature (61)..(62): /note="This region represents a CpG dinucleotide"
  misc_feature (61)..(61): /note="Nucleotide may be methylated to form 5-methylcytosine"
tgcaaggagaaggaaccatgcatggtaagggtgacacagcaggatccttgggtgtgtccacgttctagaacctcaactgttgccacatctgtctgtccagacatcctggcagcagtaatgcc

SEQ ID NO: 9317 - DNA, 122 bp, Homo sapiens
  misc_feature (61)..(62): /note="This region represents a CpG dinucleotide"
  misc_feature (61)..(61): /note="Nucleotide may be methylated to form 5-methylcytosine"
aggtagcctattcttaagtttcctcctgcactttaaaatcaccctgcttgcacctcttcacgtaggtctttgaggagatgtgcaccttgtctttgccaaggtgtgcctctggcttcctcccc

SEQ ID NO: 9318 - DNA, 122 bp, Homo sapiens
  misc_feature (61)..(62): /note="This region represents a CpG dinucleotide"
  misc_feature (61)..(61): /note="Nucleotide may be methylated to form 5-methylcytosine"
cctggagagattacaaaggcccaactcttcctgttgtgtagagaacagaaccaattggtacgcacttggcaggccagagtttacattagccatgcagtaaagagtgaagaattctgacaggg

SEQ ID NO: 9319 - DNA, 122 bp, Homo sapiens
  misc_feature (61)..(62): /note="This region represents a CpG dinucleotide"
  misc_feature (61)..(61): /note="Nucleotide may be methylated to form 5-methylcytosine"
taaaatgaggctgaaacctactgggctgcattcccagatggttaaggcatttggatgagacgggaggtcaacacaaaatacaggtcataaagacattgctgataaaaggttgcagtaatgga

SEQ ID NO: 9320 - DNA, 122 bp, Homo sapiens
  misc_feature (61)..(62): /note="This region represents a CpG dinucleotide"
  misc_feature (61)..(61): /note="Nucleotide may be methylated to form 5-methylcytosine"
ggtaatccgcccgccttggcctcccaaagtgctgggattacagttgtaagctaccacgcccgagcaaatacatttttagtaaagttctgaggcaaatgatgaaaacagggttagtataaaat

SEQ ID NO: 9321 - DNA, 122 bp, Homo sapiens
  misc_feature (61)..(62): /note="This region represents a CpG dinucleotide"
  misc_feature (61)..(61): /note="Nucleotide may be methylated to form 5-methylcytosine"
ttctggccatggatggcctaaaacactggatgttttcaatacatgacttcatgtcctccacggcatttgcatcccagctccttgtttgcttaatgccttcacactagttgtaagcagtttct

SEQ ID NO: 9322 - DNA, 122 bp, Homo sapiens
  misc_feature (61)..(62): /note="This region represents a CpG dinucleotide"
  misc_feature (61)..(61): /note="Nucleotide may be methylated to form 5-methylcytosine"
cccacccatcgccatcccagaaaccctcccttggacacacctggaaggtgctaagtgcaccgggcagaggaggcccctcctggccagcatgaccgtgcaccggcctgagtgggctcgggtgg

SEQ ID NO: 9323 - DNA, 122 bp, Homo sapiens
  misc_feature (61)..(62): /note="This region represents a CpG dinucleotide"
  misc_feature (61)..(61): /note="Nucleotide may be methylated to form 5-methylcytosine"
caggtggaatccaccttatactaagtatttctcggtacctcgagtcattatgcttcagaccgtgtcttcctgtctagcgcactcatcagtccacatgttggttttgtcacagttgctgacac

SEQ ID NO: 9324 - DNA, 122 bp, Homo sapiens
  misc_feature (61)..(62): /note="This region represents a CpG dinucleotide"
  misc_feature (61)..(61): /note="Nucleotide may be methylated to form 5-methylcytosine"
aactgaatagttaaatgtgactaaagagagaacaggagctggtttgtggtataagaagggcggaactagtacaggcaaggcaagaacaaaaaaagacttgaagtgggcaaggtggaggtcag

SEQ ID NO: 9325 - DNA, 122 bp, Homo sapiens
  misc_feature (61)..(62): /note="This region represents a CpG dinucleotide"
  misc_feature (61)..(61): /note="Nucleotide may be methylated to form 5-methylcytosine"
gagaaattgagtctgtttggaagccaacttaagccttaggaatatagcctttagagcaaacggttttaacccaggtcagcagatggaattcatgggatctatgaacttggacaagaaacact

SEQ ID NO: 9326 - DNA, 122 bp, Homo sapiens
  misc_feature (61)..(62): /note="This region represents a CpG dinucleotide"
  misc_feature (61)..(61): /note="Nucleotide may be methylated to form 5-methylcytosine"
ctataacacagtgttacacagatctctagaacttgtttatcttgcataactgaatctttacgtccattgagcaacaactctctgaaattccacctcccatgagcccctgggaactaccattc

SEQ ID NO: 9327 - DNA, 122 bp, Homo sapiens
  misc_feature (61)..(62): /note="This region represents a CpG dinucleotide"
  misc_feature (61)..(61): /note="Nucleotide may be methylated to form 5-methylcytosine"
atttgtttttatctcttattcactgacatggcttgtttctgtgtccccacccaaatctcacgtcaaattgtagtccccagtgttagtcacctggtgggaggtgactgaagtatggaggtgga

SEQ ID NO: 9328 - DNA, 122 bp, Homo sapiens
  misc_feature (61)..(62): /note="This region represents a CpG dinucleotide"
  misc_feature (61)..(61): /note="Nucleotide may be methylated to form 5-methylcytosine"
gtaatatcagatgtaacctcttgagagagttgtaattgagaagatgtgttgttagtgacacgtcacggaaaatgactcaactgtggcaaaggtgagtctcaagacatgatgcaaacaaaagg

SEQ ID NO: 9329 - DNA, 122 bp, Homo sapiens
  misc_feature (61)..(62): /note="This region represents a CpG dinucleotide"
  misc_feature (61)..(61): /note="Nucleotide may be methylated to form 5-methylcytosine"
tcagtgccagggaaagtgatgtcaggcacaggttagggaagggcagggcagaacacctctcgctggctctgctggaaggtcactcatgcacagtggttctcattaggattaggatgcaagca

SEQ ID NO: 9330 - DNA, 122 bp, Homo sapiens
  misc_feature (61)..(62): /note="This region represents a CpG dinucleotide"
  misc_feature (61)..(61): /note="Nucleotide may be methylated to form 5-methylcytosine"
tgttgaagaaataaatctgagttctggcctggcctttgcactgtgcaaccttggacaaaacgcttctctctgggcctcggtttctccatatggacaatgaggcacttatcgaactttatggg

SEQ ID NO: 9331 - DNA, 122 bp, Homo sapiens
  misc_feature (61)..(62): /note="This region represents a CpG dinucleotide"
  misc_feature (61)..(61): /note="Nucleotide may be methylated to form 5-methylcytosine"
ggtggtcactcagtcccaaatttcccatttctatgactaataccagcatatttaatatgacgttgaacaccttgacctcctttatcttctctttctcatgttcattactaccattactaatt

SEQ ID NO: 9332 - DNA, 122 bp, Homo sapiens
  misc_feature (61)..(62): /note="This region represents a CpG dinucleotide"
  misc_feature (61)..(61): /note="Nucleotide may be methylated to form 5-methylcytosine"
tctcaagcgatcctcccaccttggcttcccatagggctgggattacaggcattagcctcccggcccagtgttttgttttgaagtgtgctttgtctgatattaacatagccactccagcttaa

SEQ ID NO: 9333 - DNA, 122 bp, Homo sapiens
  misc_feature (61)..(62): /note="This region represents a CpG dinucleotide"
  misc_feature (61)..(61): /note="Nucleotide may be methylated to form 5-methylcytosine"
gtgcccggccaacggtgacaattttcttaatccacctacacactgtgtatgtaccattttcgtctgtaagctcaaagccctgtgttttccttcacatttcccttggcctagcacatgttaag

SEQ ID NO: 9334 - DNA, 122 bp, Homo sapiens
  misc_feature (61)..(62): /note="This region represents a CpG dinucleotide"
  misc_feature (61)..(61): /note="Nucleotide may be methylated to form 5-methylcytosine"
ggaagtgactaactagcagccacctcatccatgctgagccttccaggccccacactgagtcggagactgatataaaattctctatgggaaccagggacacttccttcagggttgaggaatcc

SEQ ID NO: 9335 - DNA, 122 bp, Homo sapiens
  misc_feature (61)..(62): /note="This region represents a CpG dinucleotide"
  misc_feature (61)..(61): /note="Nucleotide may be methylated to form 5-methylcytosine"
aatatacaaatttgcctctagaagaagtaacttcctcagggtgctgaaacagaggctgggcgaccatttagaggagagacaggagtcaagattccatgataagaacaatgtacagttgtcag

SEQ ID NO: 9336 - DNA, 122 bp, Homo sapiens
  misc_feature (61)..(62): /note="This region represents a CpG dinucleotide"
  misc_feature (61)..(61): /note="Nucleotide may be methylated to form 5-methylcytosine"
agaacttccgtctgtcccaggatgacatcaagggcattcaggagctctatggtaaacctccgggcgggggttgggggtggagggtgaggaggggggaggtcatgtagcctgggatggaggcc

SEQ ID NO: 9337 - DNA, 122 bp, Homo sapiens
  misc_feature (61)..(62): /note="This region represents a CpG dinucleotide"
  misc_feature (61)..(61): /note="Nucleotide may be methylated to form 5-methylcytosine"
tgtcatagctagtaagtgatggaagcaggctctgaaagctgtctctctggctctgacacacgtactctcaaacacctccttaggaagttactgctaccttttggtaataaatgggagctttt

SEQ ID NO: 9338 - DNA, 122 bp, Homo sapiens
  misc_feature (61)..(62): /note="This region represents a CpG dinucleotide"
  misc_feature (61)..(61): /note="Nucleotide may be methylated to form 5-methylcytosine"
ggcagcgggacctggtagaactggcctcagggctcagtggagttgccagactagactggccgagagaggagccaggacagaatttccaggcagggaagcaggaaatttacttcaaatcactt

SEQ ID NO: 9339 - DNA, 122 bp, Homo sapiens
  misc_feature (61)..(62): /note="This region represents a CpG dinucleotide"
  misc_feature (61)..(61): /note="Nucleotide may be methylated to form 5-methylcytosine"
gaacataagctttaagcaacaagcaatcttgtgttaatctgagctctgttacagctctgccgtaatctcagccaaattgcttcatctgtacgtggtgataccaccatctttgtaatattgtg

SEQ ID NO: 9340 - DNA, 122 bp, Homo sapiens
  misc_feature (61)..(62): /note="This region represents a CpG dinucleotide"
  misc_feature (61)..(61): /note="Nucleotide may be methylated to form 5-methylcytosine"
aatttacagtcatgctttcaaaacacagtgacttggtttgacactgtgaactagctgtatcgtgcaaattggtaaatagacagaatctagtatattatcctgcttttcctacaaaacctgaa

SEQ ID NO: 9341 - DNA, 122 bp, Homo sapiens
  misc_feature (61)..(62): /note="This region represents a CpG dinucleotide"
  misc_feature (61)..(61): /note="Nucleotide may be methylated to form 5-methylcytosine"
actcacctcctctcccatctcttcatctgctcactacatatttattgagcacctactctacgccacattgtgccaagcataggaaatacagtgctgaaaaagtgagtccccatggcctaaag

SEQ ID NO: 9342 - DNA, 122 bp, Homo sapiens
  misc_feature (61)..(62): /note="This region represents a CpG dinucleotide"
  misc_feature (61)..(61): /note="Nucleotide may be methylated to form 5-methylcytosine"
acacacacacagagagaaatcaaactcttctttttcaaggatgcctcttcacactaacaacgacagaagtgtacacttaaacatcctttctattaagaggacaaattctaaaaatttgttat

SEQ ID NO: 9343 - DNA, 122 bp, Homo sapiens
  misc_feature (61)..(62): /note="This region represents a CpG dinucleotide"
  misc_feature (61)..(61): /note="Nucleotide may be methylated to form 5-methylcytosine"
gcatgacaactgccctcctgtcccacagcttgggatgggatgaggtcacagggtggggtccgccccaagatgctggcctggcctggctcagatgagagccctttgggtgtttctcagtttcc

SEQ ID NO: 9344 - DNA, 122 bp, Homo sapiens
  misc_feature (61)..(62): /note="This region represents a CpG dinucleotide"
  misc_feature (61)..(61): /note="Nucleotide may be methylated to form 5-methylcytosine"
gcctcatcctgccacatctgcactctggcaggagccgcctccctgctggcctccctgcttcgagtcatggccacctctagcctcatggtttggaaagcctatacagactaccttgattacat

SEQ ID NO: 9345 - DNA, 122 bp, Homo sapiens
  misc_feature (61)..(62): /note="This region represents a CpG dinucleotide"
  misc_feature (61)..(61): /note="Nucleotide may be methylated to form 5-methylcytosine"
atacctaccagtttgtggttctgactacatcacctatgggaatgaatgtcacttgtgtaccgagagcttgtgagtacctcataagaagaaaatgagatctggagtcagtgctctctactaca

SEQ ID NO: 9346 - DNA, 122 bp, Homo sapiens
  misc_feature (61)..(62): /note="This region represents a CpG dinucleotide"
  misc_feature (61)..(61): /note="Nucleotide may be methylated to form 5-methylcytosine"
gctaagatagtcctgtgatccaggttccagtgattatatgacaaatattgcagttgctaacgtcacaagggccttgggtaataagagaaaaatcagacacctcagcacatgcttttcctggc

SEQ ID NO: 9347 - DNA, 122 bp, Homo sapiens
  misc_feature (61)..(62): /note="This region represents a CpG dinucleotide"
  misc_feature (61)..(61): /note="Nucleotide may be methylated to form 5-methylcytosine"
ctcgccctagctcctctgtctctacctgtctgcctatgaaacagttcaaaactaatatggcgcaatggatggtattatagacttcccacctccctggccagacttcttgggttcaaagtttg

SEQ ID NO: 9348 - DNA, 122 bp, Homo sapiens
  misc_feature (61)..(62): /note="This region represents a CpG dinucleotide"
  misc_feature (61)..(61): /note="Nucleotide may be methylated to form 5-methylcytosine"
ggggtttacgcaaggtagtgatgaaaactaggagagaagtatctgcttccctttagtctgcgctgtggagttctgtgagtcatgttccatagacttacacatcactccagaaacatgcttca

SEQ ID NO: 9349 - DNA, 122 bp, Homo sapiens
  misc_feature (61)..(62): /note="This region represents a CpG dinucleotide"
  misc_feature (61)..(61): /note="Nucleotide may be methylated to form 5-methylcytosine"
aaaagctaaagagattagctaagaagtgcctatatttagatctgctattgagctgggaagcggaggcacagttgtgctgaaatacctctgtaccccatgaaacagtggctgctctgagcttc

SEQ ID NO: 9350 - DNA, 122 bp, Homo sapiens
  misc_feature (61)..(62): /note="This region represents a CpG dinucleotide"
  misc_feature (61)..(61): /note="Nucleotide may be methylated to form 5-methylcytosine"
gcaactccaggctgacatttctgcagggcagccatggacgagaacagagcagtggcagcacgcttagaacaggcctcgctcatgcccagcctgcttcacctgttcacacgtcttgcctggct

SEQ ID NO: 9351 - DNA, 122 bp, Homo sapiens
  misc_feature (61)..(62): /note="This region represents a CpG dinucleotide"
  misc_feature (61)..(61): /note="Nucleotide may be methylated to form 5-methylcytosine"
aaaatcccagttgtgccacacctaactgtgttaccctggacaagtcacttctctctattccgcatctataacacaggagttagttaatgtgcatatggctcttagaacagtgcccagcacat

SEQ ID NO: 9352 - DNA, 122 bp, Homo sapiens
  misc_feature (61)..(62): /note="This region represents a CpG dinucleotide"
  misc_feature (61)..(61): /note="Nucleotide may be methylated to form 5-methylcytosine"
ataaaggccgcacccaaaccatcccagattaagcaggggttcaaccgtggtggggttcagcggctgtaaacctcataaagctgcagacaccctcgtgtgcctgagttgctcaagtggtttgt

SEQ ID NO: 9353 - DNA, 122 bp, Homo sapiens
  misc_feature (61)..(62): /note="This region represents a CpG dinucleotide"
  misc_feature (61)..(61): /note="Nucleotide may be methylated to form 5-methylcytosine"
gtacaatccttgcccttagtaggttaagcagcctcataaacacatcattataatccattgcgttaaacgtagtgctaggtaattgatctgggaaggaaattcatagaagacttcccggaaga

SEQ ID NO: 9354 - DNA, 122 bp, Homo sapiens
  misc_feature (61)..(62): /note="This region represents a CpG dinucleotide"
  misc_feature (61)..(61): /note="Nucleotide may be methylated to form 5-methylcytosine"
tttactcaagtcacagctggccacttcttatgcttatggtctattcttaaatctggactccgttaagaaggatatagaaagatttttacacttgtagaaataaaggaagatatttcagcatg

SEQ ID NO: 9355 - DNA, 122 bp, Homo sapiens
  misc_feature (61)..(62): /note="This region represents a CpG dinucleotide"
  misc_feature (61)..(61): /note="Nucleotide may be methylated to form 5-methylcytosine"
tctttgactatgagttcttgcctcctttagtctggttcttccagtcttgattgtaactcacgtcatacctttaaccccccacctttaagtttaaaaaaatccttattttctgctctccaaaa

SEQ ID NO: 9356 - DNA, 122 bp, Homo sapiens
  misc_feature (61)..(62): /note="This region represents a CpG dinucleotide"
  misc_feature (61)..(61): /note="Nucleotide may be methylated to form 5-methylcytosine"
aaaaaaaagaagaagaagatagtaaatatgttcatcaccccaagtttccttctgcctagtcgtaatctttccttatggcactcatttgcctcaggcaatgccacacctctgctttctgtcac

SEQ ID NO: 9357 - DNA, 122 bp, Homo sapiens
  misc_feature (61)..(62): /note="This region represents a CpG dinucleotide"
  misc_feature (61)..(61): /note="Nucleotide may be methylated to form 5-methylcytosine"
gctggttgcaaactcctggcctcaggtgatccgactgtctcgagttattacttcttgttgcgagcgtgtctcagctgattcggcttaactgtaatttgatggttgattaagcttaagtatgg

SEQ ID NO: 9358 - DNA, 122 bp, Homo sapiens
  misc_feature (61)..(62): /note="This region represents a CpG dinucleotide"
  misc_feature (61)..(61): /note="Nucleotide may be methylated to form 5-methylcytosine"
agatctacattcaaatgctgtctcatcccctttgctaattgtatgatctttgggtgattacgtaacctctctgatcctgtttcctgagctgttaaaaggggaacaaaatgacattccttgaa

SEQ ID NO: 9359 - DNA, 122 bp, Homo sapiens
  misc_feature (61)..(62): /note="This region represents a CpG dinucleotide"
  misc_feature (61)..(61): /note="Nucleotide may be methylated to form 5-methylcytosine"
gtgtggctgttagtgtgtctctctactcccaggagccccatgtctatcaggatctaccaccgctccactggatgtgccactttgtccatcaaaatgctcaccatggatgtgattcagcatga

SEQ ID NO: 9360 - DNA, 122 bp, Homo sapiens
  misc_feature (61)..(62): /note="This region represents a CpG dinucleotide"
  misc_feature (61)..(61): /note="Nucleotide may be methylated to form 5-methylcytosine"
cagacaccacatctatcttgattacatttgtgccatcagtgtctgcagcaggtcttcaaacgtctttgctgaagaaataagtgaagaaataaatggatagacattttgcaagaaggcaggac

SEQ ID NO: 9361 - DNA, 122 bp, Homo sapiens
  misc_feature (61)..(62): /note="This region represents a CpG dinucleotide"
  misc_feature (61)..(61): /note="Nucleotide may be methylated to form 5-methylcytosine"
agctttgataattgctgttcttgtcattgcggtaaatgaggaaacaggcatgaaaggttacgtgctcagccacagccacagagctagtcagtagctggaagagctatgactcaaacatgttt

SEQ ID NO: 9362 - DNA, 122 bp, Homo sapiens
  misc_feature (61)..(62): /note="This region represents a CpG dinucleotide"
  misc_feature (61)..(61): /note="Nucleotide may be methylated to form 5-methylcytosine"
agcaggtccccagttggagtcaggaaaccctagctcaggcctggctcagccacaatatgccgcgtgatgctggacctctgatgccgggactcatggtgacttcacccctctgagcctgtgcc

SEQ ID NO: 9363 - DNA, 122 bp, Homo sapiens
  misc_feature (61)..(62): /note="This region represents a CpG dinucleotide"
  misc_feature (61)..(61): /note="Nucleotide may be methylated to form 5-methylcytosine"
gggattataggcgtgagccaccgtgaccagcctaatgcagggtttatggaggcttcattacgtatagatgattaaatcattggccactggtgactgagctcgatctccagcctctctccctt

SEQ ID NO: 9364 - DNA, 122 bp, Homo sapiens
  misc_feature (61)..(62): /note="This region represents a CpG dinucleotide"
  misc_feature (61)..(61): /note="Nucleotide may be methylated to form 5-methylcytosine"
gcaggaggaaagggggcacaccaggcaacccaggacgaagaaagagacagtcagcagctgcgtcatctgggagggtcagggaggcatatgggtgatctgtcagcactgccattgcctagagg

SEQ ID NO: 9365 - DNA, 122 bp, Homo sapiens
  misc_feature (61)..(62): /note="This region represents a CpG dinucleotide"
  misc_feature (61)..(61): /note="Nucleotide may be methylated to form 5-methylcytosine"
cagaaaatactttccttcagattgcctggtgattaaggtagtggacatctaccaagctcacgcttagggaggacgaacaacaggtttatcaacactatacttcacggagtgtcagtcatgag

SEQ ID NO: 9366 - DNA, 122 bp, Homo sapiens
  misc_feature (61)..(62): /note="This region represents a CpG dinucleotide"
  misc_feature (61)..(61): /note="Nucleotide may be methylated to form 5-methylcytosine"
gttttataaggtgatgtcaacctgatctctaggtgaatagtctgttaagtcatacagtgccgtatgagagcactgcttgtctcttacgtggctgcatctgcagcacctagaatagtgcttag

SEQ ID NO: 9367 - DNA, 122 bp, Homo sapiens
  misc_feature (61)..(62): /note="This region represents a CpG dinucleotide"
  misc_feature (61)..(61): /note="Nucleotide may be methylated to form 5-methylcytosine"
cttactctgggatgacaggtgtatacgaggatgtagctgggcaagccaggcctagtggctcgcacactcatcagttagatggtgggtgctggtgctgctggtgcatcatgcatacaaggctg

SEQ ID NO: 9368 - DNA, 122 bp, Homo sapiens
  misc_feature (61)..(62): /note="This region represents a CpG dinucleotide"
  misc_feature (61)..(61): /note="Nucleotide may be methylated to form 5-methylcytosine"
aattcatggaaacagaaaacagaatgatgggcccaagggctgggcgtggaggcttatgcccgtaattccagcactttgagaggccaaggcgggtggatcatctgaggtcgggagttcgagac

SEQ ID NO: 9369 - DNA, 122 bp, Homo sapiens
  misc_feature (61)..(62): /note="This region represents a CpG dinucleotide"
  misc_feature (61)..(61): /note="Nucleotide may be methylated to form 5-methylcytosine"
caaccctttccaagtgagagctctcccaagggatgcgatgagtcaccattacagtattgacggagcaaaggaggcaagtgtgctgtactacccagaactagcataagactttaagatgaaaa

SEQ ID NO: 9370 - DNA, 122 bp, Homo sapiens
  misc_feature (61)..(62): /note="This region represents a CpG dinucleotide"
  misc_feature (61)..(61): /note="Nucleotide may be methylated to form 5-methylcytosine"
gagagcccggcaggctgtttgttctcggacgtgtgcaaccgctgccggcggggctgtgggcgccgcagcgtggaaggaaggggtgggaaggggtgcattctggaccctcgcattgattggac

SEQ ID NO: 9371 - DNA, 122 bp, Homo sapiens
  misc_feature (61)..(62): /note="This region represents a CpG dinucleotide"
  misc_feature (61)..(61): /note="Nucleotide may be methylated to form 5-methylcytosine"
ctggaaaacacaaacccgaagggaagtttgggctgtaactctggtggcagggtgaccaagcgcagctgcttgaggaagccctgctgtgcctcaacaggatgtaaactcattgtgagcaacac

SEQ ID NO: 9372 - DNA, 122 bp, Homo sapiens
  misc_feature (61)..(62): /note="This region represents a CpG dinucleotide"
  misc_feature (61)..(61): /note="Nucleotide may be methylated to form 5-methylcytosine"
acagccatctcagtcagcagtgtgtcctttgctctctgaaagtgaaagctctatgagatccgaatgagcagcatccggcctcagagctaatctgtcagattttgcgtctgagtcagaactta

SEQ ID NO: 9373 - DNA, 122 bp, Homo sapiens
  misc_feature (61)..(62): /note="This region represents a CpG dinucleotide"
  misc_feature (61)..(61): /note="Nucleotide may be methylated to form 5-methylcytosine"
gtcatcattttggagggagtcagttgaagttctcttctgagagcttcaattttcccattacgccctttatccttgctcatgtgaattacacgggaagcatcagagtcccagggcacccctta

SEQ ID NO: 9374 - DNA, 122 bp, Homo sapiens
  misc_feature (61)..(62): /note="This region represents a CpG dinucleotide"
  misc_feature (61)..(61): /note="Nucleotide may be methylated to form 5-methylcytosine"
aggaattttactgtatcagtggttctcaaccagaggctcttttgccctctagtgaaaccccgtctctactaaaaatacaaaaattagccgggcgtggtggcacatgcctgttaatcccagct

SEQ ID NO: 9375 - DNA, 122 bp, Homo sapiens
  misc_feature (61)..(62): /note="This region represents a CpG dinucleotide"
  misc_feature (61)..(61): /note="Nucleotide may be methylated to form 5-methylcytosine"
attcttctttggctgggctataaccaccccaaacactatgcaaagatgtgactgactgtacgtagtagaggctgatagttgacatctttaagttaaaatacccagatgagggctgggcacaa

SEQ ID NO: 9376 - DNA, 122 bp, Homo sapiens
  misc_feature (61)..(62): /note="This region represents a CpG dinucleotide"
  misc_feature (61)..(61): /note="Nucleotide may be methylated to form 5-methylcytosine"
gacttacttcagcattggacattgtccaccacttcctcacatgggaatctaaaacctgaccgtgtcctgaccttcttcctccccaaagcctttactggcttccccttctgcagctgcttcct

SEQ ID NO: 9377 - DNA, 122 bp, Homo sapiens
  misc_feature (61)..(62): /note="This region represents a CpG dinucleotide"
  misc_feature (61)..(61): /note="Nucleotide may be methylated to form 5-methylcytosine"
ccaaaaggaggaccatcttccaggaatgtccaggcatgtgtgaatccaggaggaacatggcgtgaacctcagcagagactccacccatattagcatgtccttaatagctccccaatgtttgt

SEQ ID NO: 9378 - DNA, 122 bp, Homo sapiens
  misc_feature (61)..(62): /note="This region represents a CpG dinucleotide"
  misc_feature (61)..(61): /note="Nucleotide may be methylated to form 5-methylcytosine"
atttggcacccttcctctgacctcctgtgggatctacgctccccagggtcccttgtcctccggcatcagggtaattttaaccaatgggaagcatgtgagcaagactacaagggagaagccag

SEQ ID NO: 9379 - DNA, 122 bp, Homo sapiens
  misc_feature (61)..(62): /note="This region represents a CpG dinucleotide"
  misc_feature (61)..(61): /note="Nucleotide may be methylated to form 5-methylcytosine"
tgcagggatctcggctttgttgcaccagggttaaatttgacgtaacatatatctaatcaacgccatttgttaggagcgctgactaaaataaatagaagataaggctcctgactcacaagtga

SEQ ID NO: 9380 - DNA, 122 bp, Homo sapiens
  misc_feature (61)..(62): /note="This region represents a CpG dinucleotide"
  misc_feature (61)..(61): /note="Nucleotide may be methylated to form 5-methylcytosine"
ctttgggccttactttcttcaactgaaaaactggttcaacatttattcattcttttattccgtaagccaaaaataaaattcaaagccctctgaccatatgaatggatctctcctcttggcta

SEQ ID NO: 9381 - DNA, 122 bp, Homo sapiens
  misc_feature (61)..(62): /note="This region represents a CpG dinucleotide"
  misc_feature (61)..(61): /note="Nucleotide may be methylated to form 5-methylcytosine"
cccaggaaaggcagcatacaatgtgctgggtgtttcctcatctacaaatctaatcttcgacggctttcaaacagcatgtgagtgtgtttacaagaagatgaacagcactaagaaaatgacat

SEQ ID NO: 9382 - DNA, 122 bp, Homo sapiens
  misc_feature (61)..(62): /note="This region represents a CpG dinucleotide"
  misc_feature (61)..(61): /note="Nucleotide may be methylated to form 5-methylcytosine"
gaggtgggaatattgctaaggcagctccccagagcacctgcaggaggtggttggcaccagcgccagcctgggcaccttcaatttctactcttgttttccatggctcagcaaaacttgttctc

SEQ ID NO: 9383 - DNA, 122 bp, Homo sapiens
  misc_feature (61)..(62): /note="This region represents a CpG dinucleotide"
  misc_feature (61)..(61): /note="Nucleotide may be methylated to form 5-methylcytosine"
gtagcctaggagaacaaacagactccactctaaggagcccaggcattccatgctgatccacgcctgcccagcccggcggcatccccactgtctgtgcatggacaccagccctccctggctcc

SEQ ID NO: 9384 - DNA, 122 bp, Homo sapiens
  misc_feature (61)..(62): /note="This region represents a CpG dinucleotide"
  misc_feature (61)..(61): /note="Nucleotide may be methylated to form 5-methylcytosine"
atttggtttattacattagtctcaccagaccagtacttgcaaaaccctgatggtgctgatcgtagcaggtgatgcatcaccaccaagcatttcaaaaactatttcagccattctaggctaga

SEQ ID NO: 9385 - DNA, 122 bp, Homo sapiens
  misc_feature (61)..(62): /note="This region represents a CpG dinucleotide"
  misc_feature (61)..(61): /note="Nucleotide may be methylated to form 5-methylcytosine"
ctctgtcccaaagccgtcaatagccaggatgacatctccaggacacaggttggcagctgccgccttgcttcctggtgtaatctggaagaaatcatggcactatttaaaaaccaacatcccgc

SEQ ID NO: 9386 - DNA, 122 bp, Homo sapiens
  misc_feature (61)..(62): /note="This region represents a CpG dinucleotide"
  misc_feature (61)..(61): /note="Nucleotide may be methylated to form 5-methylcytosine"
gtgtcattcagagacagttggctgtatccaagggttgccttccctacttcagttgcattgcgtagagcaggctcaacccctccaggggagggtgcccttgcgtacccacagtcaggtgtaga

SEQ ID NO: 9387 - DNA, 122 bp, Homo sapiens
  misc_feature (61)..(62): /note="This region represents a CpG dinucleotide"
  misc_feature (61)..(61): /note="Nucleotide may be methylated to form 5-methylcytosine"
gcacagaagaggccaagccagcagcacttatgtgttgcaatcctgctgcatgacaggcttcgcatccagtgctcctgacctgttttgggtcacagcaggccgaggtcagggccatgtccctg

SEQ ID NO: 9388 - DNA, 122 bp, Homo sapiens
  misc_feature (61)..(62): /note="This region represents a CpG dinucleotide"
  misc_feature (61)..(61): /note="Nucleotide may be methylated to form 5-methylcytosine"
cactgtggccttggcacattgcctggccttcagggttcaggcagtggacatataaccttgcgtaaccaggtgggtgactcaccatgctacagtggggaggcccatatggcaaagcactgaag

SEQ ID NO: 9389 - DNA, 122 bp, Homo sapiens
  misc_feature (61)..(62): /note="This region represents a CpG dinucleotide"
  misc_feature (61)..(61): /note="Nucleotide may be methylated to form 5-methylcytosine"
cttgctagggtcacttgggacacagaattgggggtgacagcccaggacaagaagcctctacgaatgttgcaggtctttccagatgacccaggcaggctcccttgctgatctgctggcgatgt

SEQ ID NO: 9390 - DNA, 122 bp, Homo sapiens
  misc_feature (61)..(62): /note="This region represents a CpG dinucleotide"
  misc_feature (61)..(61): /note="Nucleotide may be methylated to form 5-methylcytosine"
tacagcaggtgttgtcgtcacaatcctgggaaggaaataaggtacacaaaggttaagtaacgtctgatgtctcttgtctagtaagtagcagggatggacttaaacacagaccaatctcactc

SEQ ID NO: 9391 - DNA, 122 bp, Homo sapiens
  misc_feature (61)..(62): /note="This region represents a CpG dinucleotide"
  misc_feature (61)..(61): /note="Nucleotide may be methylated to form 5-methylcytosine"
aatcacagcactgttatccgcagccaggatctctagcatcgtttcatgtgttcagtggaacggggaaacagcttgtcaccctgttagcagagcatgctctcatgtgtcatgtcactcactgg

SEQ ID NO: 9392 - DNA, 122 bp, Homo sapiens
  misc_feature (61)..(62): /note="This region represents a CpG dinucleotide"
  misc_feature (61)..(61): /note="Nucleotide may be methylated to form 5-methylcytosine"
ctggatcttcctgctaaatttctggctggtctacaggcctgctgctggctccagccagatcgtaaccacagtctagctgtgatgttggtcttccccatttgtttggcactaggccccagtcc

SEQ ID NO: 9393 - DNA, 122 bp, Homo sapiens
  misc_feature (61)..(62): /note="This region represents a CpG dinucleotide"
  misc_feature (61)..(61): /note="Nucleotide may be methylated to form 5-methylcytosine"
tggtatgaatgacaggcacattatttctaatcctttttattggttctgtcccaggccttgcgtagtttctttgcatgcatgcaccggtcagtactcagctgaatattaaaggaggttctctg

SEQ ID NO: 9394 - DNA, 122 bp, Homo sapiens
  misc_feature (61)..(62): /note="This region represents a CpG dinucleotide"
  misc_feature (61)..(61): /note="Nucleotide may be methylated to form 5-methylcytosine"
accccgtgatccacccaccttggcctcccaaagtgctgggattacaggtgtgagccaccacgcccggctgctataggttttattattattcagatatgatgaggccaacagatcaggagata

SEQ ID NO: 9395 - DNA, 122 bp, Homo sapiens
  misc_feature (61)..(62): /note="This region represents a CpG dinucleotide"
  misc_feature (61)..(61): /note="Nucleotide may be methylated to form 5-methylcytosine"
aaaagctgggtgtagatgggtcatttattctttgtctaaggattaatcagtccttgttctcgctaatggctctgccatttttctgtgtgttaatccaggaggaattttgttgtcagagaata

SEQ ID NO: 9396 - DNA, 122 bp, Homo sapiens
  misc_feature (61)..(62): /note="This region represents a CpG dinucleotide"
  misc_feature (61)..(61): /note="Nucleotide may be methylated to form 5-methylcytosine"
ggcggggagaggagcgaagcacaggcacatgaaggccattcacaggaaacacagtacagccgcttcctaggcaggatttactgcacctgtaattaattaaaatttccttcaagctaaatctt

SEQ ID NO: 9397 - DNA, 122 bp, Homo sapiens
  misc_feature (61)..(62): /note="This region represents a CpG dinucleotide"
  misc_feature (61)..(61): /note="Nucleotide may be methylated to form 5-methylcytosine"
ttgccctttggaacaactccttcaggaagctgaggcctgtgatttggtaacagacctgctcggtaggccatcttcacacacccctcaatcttgcagttctcttcccgtcataggcctgtgat

SEQ ID NO: 9398 - DNA, 122 bp, Homo sapiens
  misc_feature (61)..(62): /note="This region represents a CpG dinucleotide"
  misc_feature (61)..(61): /note="Nucleotide may be methylated to form 5-methylcytosine"
atcacctcttcatgagtggcagtgtctgagtaagaaaccaggatgtaactttaggtacatcgcctttccaatgacatcatgatttggctttgccagtcatacctcttgccattctccaccct

SEQ ID NO: 9399 - DNA, 122 bp, Homo sapiens
  misc_feature (61)..(62): /note="This region represents a CpG dinucleotide"
  misc_feature (61)..(61): /note="Nucleotide may be methylated to form 5-methylcytosine"
aggctgcagtgagccgagaccatgctactgcactccagcctgggtggcacagcgagactccgtatcaaaacaaagaaaaagatttaaagtccttgggagaggtggagtccacacctctcttc

SEQ ID NO: 9400 - DNA, 122 bp, Homo sapiens
  misc_feature (61)..(62): /note="This region represents a CpG dinucleotide"
  misc_feature (61)..(61): /note="Nucleotide may be methylated to form 5-methylcytosine"
atgggtgccttaatattcctatgggataaatgctttatttggtcaaaaactggaagctgacgctccacttaagagtctaggtcacgcggcaagccagacacttgaaggagcttaaagctttc

SEQ ID NO: 9401 - DNA, 122 bp, Homo sapiens
  misc_feature (61)..(62): /note="This region represents a CpG dinucleotide"
  misc_feature (61)..(61): /note="Nucleotide may be methylated to form 5-methylcytosine"
gactttctttgctgagtcacccaaggcatttcttcatttaaatgttcttccttggccaggcgcagtggctcaggcccaatgcggtggctcacgcctgtaatctcaacactttgggaggccga

SEQ ID NO: 9402 - DNA, 122 bp, Homo sapiens
  misc_feature (61)..(62): /note="This region represents a CpG dinucleotide"
  misc_feature (61)..(61): /note="Nucleotide may be methylated to form 5-methylcytosine"
tgcactgagcagaaatagagggcatgacatgaagactcaccagcaacactgtgacagagacggttctggggtcagctccaagcccactgcgcatacatcatggacaagagcacgttcacacg

SEQ ID NO: 9403 - DNA, 122 bp, Homo sapiens
  misc_feature (61)..(62): /note="This region represents a CpG dinucleotide"
  misc_feature (61)..(61): /note="Nucleotide may be methylated to form 5-methylcytosine"
gggtaggaagtgggtgtggaaggaatggtaggttctatttaaagcctccctactgactcacggaggcatctagggaaatggcttaacttttctgagacttgggttccctcttgttaaaaaaa

SEQ ID NO: 9404 - DNA, 122 bp, Homo sapiens
  misc_feature (61)..(62): /note="This region represents a CpG dinucleotide"
  misc_feature (61)..(61): /note="Nucleotide may be methylated to form 5-methylcytosine"
acgttgagaatgaccactctggatagattcagagggtgaggagcaagtctgtggggcagacggccatgatgctggtgaatcattgcaatatcctggcaagaaataacaaaggcctgaactta

SEQ ID NO: 9405 - DNA, 122 bp, Homo sapiens
  misc_feature (61)..(62): /note="This region represents a CpG dinucleotide"
  misc_feature (61)..(61): /note="Nucleotide may be methylated to form 5-methylcytosine"
ccaatgactcattgaagagatataataacaggctctgggtggtaagtcatcaattcatgacgaaatgtgcaggcatgagataactctttggcggtacttaaggtatctcctgtggctggaag

SEQ ID NO: 9406 - DNA, 122 bp, Homo sapiens
  misc_feature (61)..(62): /note="This region represents a CpG dinucleotide"
  misc_feature (61)..(61): /note="Nucleotide may be methylated to form 5-methylcytosine"
aacactaaaaacaccccaaatatctatcaggagtagaacagataaactgtggtttagtcacgtgcagaggaatattgcacaacaatgaaaaggaagaagtcacacagtagaatgtggcagac

SEQ ID NO: 9407 - DNA, 122 bp, Homo sapiens
  misc_feature (61)..(62): /note="This region represents a CpG dinucleotide"
  misc_feature (61)..(61): /note="Nucleotide may be methylated to form 5-methylcytosine"
aattgagcaaggacaggttgaatgccatgtaatttaaaccaaagccggcaactcctcacacggtcattgttgaaggtttgtgtgacgtaagtactgatgcctgaatcccaacacaaagattc

SEQ ID NO: 9408 - DNA, 122 bp, Homo sapiens
  misc_feature (61)..(62): /note="This region represents a CpG dinucleotide"
  misc_feature (61)..(61): /note="Nucleotide may be methylated to form 5-methylcytosine"
ctctccaaactttccccgtattggcacactacttgtatatctgtgtttctaacagctgcacgtatgctgtaattacaatgatccaagaaataaaaaaacactgagtaacctcctgacttgag

SEQ ID NO: 9409 - DNA, 122 bp, Homo sapiens
  misc_feature (61)..(62): /note="This region represents a CpG dinucleotide"
  misc_feature (61)..(61): /note="Nucleotide may be methylated to form 5-methylcytosine"
tcagagttttgtttgtttgtttcttagcacaacgtattgctgaagctttcaagaaaaccacgattgtaggctttatatcatactgtctgtggttcccatcacataatgcaaatacacctgtt

SEQ ID NO: 9410 - DNA, 122 bp, Homo sapiens
  misc_feature (61)..(62): /note="This region represents a CpG dinucleotide"
  misc_feature (61)..(61): /note="Nucleotide may be methylated to form 5-methylcytosine"
cagagtagtagtacttaatgtccaggtgctaagcttttctccactgccttggttcacagacggctgtcatcagttacgactacctcacttccctgaagagtgtcccttatggctcagaggag

SEQ ID NO: 9411 - DNA, 122 bp, Homo sapiens
  misc_feature (61)..(62): /note="This region represents a CpG dinucleotide"
  misc_feature (61)..(61): /note="Nucleotide may be methylated to form 5-methylcytosine"
atttctggccccacttcggtatgagtgcattttttagccaaagtgccatgttcaagggcacgctttgcctaaggcctatggatttatttcaggattgaatatttgacaagcaaacaggacag

SEQ ID NO: 9412 - DNA, 122 bp, Homo sapiens
  misc_feature (61)..(62): /note="This region represents a CpG dinucleotide"
  misc_feature (61)..(61): /note="Nucleotide may be methylated to form 5-methylcytosine"
agaaaattagtaataagagaaacattaatcatttggcagtggtttttgttggaatcactacgccagcaatttttcaccagtagacaaggatgagtacattataaactgggtgtcattgtgcc

SEQ ID NO: 9413 - DNA, 122 bp, Homo sapiens
  misc_feature (61)..(62): /note="This region represents a CpG dinucleotide"
  misc_feature (61)..(61): /note="Nucleotide may be methylated to form 5-methylcytosine"
gggcagttccaggtgtgcacctgtagtctcatacttggtcccatcttcaactaaccacagcgagctgtgatatctctgccacctgactgagcatcttgaggcaaagattctcttgcttgact

SEQ ID NO: 9414 - DNA, 122 bp, Homo sapiens
  misc_feature (61)..(62): /note="This region represents a CpG dinucleotide"
  misc_feature (61)..(61): /note="Nucleotide may be methylated to form 5-methylcytosine"
gtgtgtgtcaggcaccttgctgggagccttccttggattacctcaatgctgtccttaggacggtatcacaagacaagtgctgttattcccattttatagacaaggaaactaggagtaggaga

SEQ ID NO: 9415 - DNA, 122 bp, Homo sapiens
  misc_feature (61)..(62): /note="This region represents a CpG dinucleotide"
  misc_feature (61)..(61): /note="Nucleotide may be methylated to form 5-methylcytosine"
gcacagcctgcaagacttcatggcatttggtcacagtccttctgtcctgatgacatcaggcgaaagaagtgccacagtgtttccctggggcctgaagagtattaatcacacagtcagatgtt

SEQ ID NO: 9416 - DNA, 122 bp, Homo sapiens
  misc_feature (61)..(62): /note="This region represents a CpG dinucleotide"
  misc_feature (61)..(61): /note="Nucleotide may be methylated to form 5-methylcytosine"
ctgacagtcagcctagcaagaacacacctggcatgagatcgtcatagtttcaccattagacgcccccattcctctcgccaatgcctcatccctcctttagcaaaatgccaccagggaatggg

SEQ ID NO: 9417 - DNA, 122 bp, Homo sapiens
  misc_feature (61)..(62): /note="This region represents a CpG dinucleotide"
  misc_feature (61)..(61): /note="Nucleotide may be methylated to form 5-methylcytosine"
gctatatgtagagctcagaagaaacatctctgctgctgaaatcaaacctggtccaaaaaacgtcacaacggaggaaaggaatagatggctctcgaggacaagatagggactcttaaaacacc

SEQ ID NO: 9418 - DNA, 122 bp, Homo sapiens
  misc_feature (61)..(62): /note="This region represents a CpG dinucleotide"
  misc_feature (61)..(61): /note="Nucleotide may be methylated to form 5-methylcytosine"
gcttattccaagatgtttaacctgttttactggaaagatgaagccatcattaactgggagcgagaagacaacagatagattatatttgaagaggtgagatcatggatatgatagctttcaga

SEQ ID NO: 9419 - DNA, 122 bp, Homo sapiens
  misc_feature (61)..(62): /note="This region represents a CpG dinucleotide"
  misc_feature (61)..(61): /note="Nucleotide may be methylated to form 5-methylcytosine"
tttctctgggacatcttttctttctctgacagataaaaaacacatactcatcctatgcatcgcctcttccatgtaacctttcaccataacatagtccatcctcccctccggaaggaactgac

SEQ ID NO: 9420 - DNA, 122 bp, Homo sapiens
  misc_feature (61)..(62): /note="This region represents a CpG dinucleotide"
  misc_feature (61)..(61): /note="Nucleotide may be methylated to form 5-methylcytosine"
aaacctagtcagctgccactcatataaagtctagcacacacaattatgtactacataatacgtgataatgacaataaatgactatgttgctggcttatgtatttactatactatatttctta

SEQ ID NO: 9421 - DNA, 122 bp, Homo sapiens
  misc_feature (61)..(62): /note="This region represents a CpG dinucleotide"
  misc_feature (61)..(61): /note="Nucleotide may be methylated to form 5-methylcytosine"
ggggtaagagacagtggcaggccttgctctgatcctgaaagcttctgctcagaagtgacacgtcactccctcaaaacacatggtcaggcctgaagataatgagccggaaagtataatcctct

SEQ ID NO: 9422 - DNA, 122 bp, Homo sapiens
  misc_feature (61)..(62): /note="This region represents a CpG dinucleotide"
  misc_feature (61)..(61): /note="Nucleotide may be methylated to form 5-methylcytosine"
taagctctagcagattaggaaaattcacctgtgccaagcacctggattattccaactaaacgaaggataacttgagcaacagcagggtagactgaagtgaatagtaattgatctgataataa

SEQ ID NO: 9423 - DNA, 122 bp, Homo sapiens
  misc_feature (61)..(62): /note="This region represents a CpG dinucleotide"
  misc_feature (61)..(61): /note="Nucleotide may be methylated to form 5-methylcytosine"
ttagaaaatatgattaagtacagagtttattcaagtgcaaggtttgaggatgatcacctgcgaaacacatactccaaaggaatgggatcagtgttggaaagagaggaagctaaggtttcact

SEQ ID NO: 9424 - DNA, 122 bp, Homo sapiens
  misc_feature (61)..(62): /note="This region represents a CpG dinucleotide"
  misc_feature (61)..(61): /note="Nucleotide may be methylated to form 5-methylcytosine"
tgtttaaggcagaaactaaggcctttgatttaaaaactgttgacagatcggagcctaagccgcttctgtttgcagaggagagccatgacttccagtcaagttgaaacatagctttctttata

SEQ ID NO: 9425 - DNA, 122 bp, Homo sapiens
  misc_feature (61)..(62): /note="This region represents a CpG dinucleotide"
  misc_feature (61)..(61): /note="Nucleotide may be methylated to form 5-methylcytosine"
tgccgcccagtgtcatgattaaaggcgtgagccaccacacccaactttcaactcccaacccgctccctggcactctctcaggctctgcacatcccagctgtctggaatcactcccacacctc

SEQ ID NO: 9426 - DNA, 122 bp, Homo sapiens
  misc_feature (61)..(62): /note="This region represents a CpG dinucleotide"
  misc_feature (61)..(61): /note="Nucleotide may be methylated to form 5-methylcytosine"
ggttgtcttcatgcttgctgtttgttttaatgcctctggattttctgctttcctgttcctcgtacaaacctacacttctcccttccccacatgcacactgggccttaaactaaaacaaagag

SEQ ID NO: 9427 - DNA, 122 bp, Homo sapiens
  misc_feature (61)..(62): /note="This region represents a CpG dinucleotide"
  misc_feature (61)..(61): /note="Nucleotide may be methylated to form 5-methylcytosine"
tggtctagattacacagatgtacctttcagtggaaaagagttataacaacatgggtcagacgtgacagtgaatccaccatcttagcaggaggaactattacatgtgaaacagttcaccagca

SEQ ID NO: 9428 - DNA, 122 bp, Homo sapiens
  misc_feature (61)..(62): /note="This region represents a CpG dinucleotide"
  misc_feature (61)..(61): /note="Nucleotide may be methylated to form 5-methylcytosine"
caactaactggtagcttagctgagaagtcactcccagaccctgggagcaagtgtgcctttcgccaatattgggatgatcttcccgtgaccccacagaagctctacgtcatcttacagtctct

SEQ ID NO: 9429 - DNA, 122 bp, Homo sapiens
  misc_feature (61)..(62): /note="This region represents a CpG dinucleotide"
  misc_feature (61)..(61): /note="Nucleotide may be methylated to form 5-methylcytosine"
agaaaatgaaaccacggactggggagactaactgtattactctcactttgtatatgaggacgcagaaccacagagaggttaagacacctgcctaaggctgcacagacaggaggtggcacagc

SEQ ID NO: 9430 - DNA, 122 bp, Homo sapiens
  misc_feature (61)..(62): /note="This region represents a CpG dinucleotide"
  misc_feature (61)..(61): /note="Nucleotide may be methylated to form 5-methylcytosine"
aacaaaacaaaataaaacaaaccctgggtgttaaatcttccatttcttggatttgggtgtcgcagtatgtcataatttttacaaggagttgcaacattgggcagtaacttacaaatgcagta

SEQ ID NO: 9431 - DNA, 122 bp, Homo sapiens
  misc_feature (61)..(62): /note="This region represents a CpG dinucleotide"
  misc_feature (61)..(61): /note="Nucleotide may be methylated to form 5-methylcytosine"
agaaaatgtgtcatcaggtcacacagggagaaagtggctaatctgaagatgggaggcactcgaaagtggcaaggcacttcagagcagagagtttttctgtcattgcagagagatcaaatcag

SEQ ID NO: 9432 - DNA, 122 bp, Homo sapiens
  misc_feature (61)..(62): /note="This region represents a CpG dinucleotide"
  misc_feature (61)..(61): /note="Nucleotide may be methylated to form 5-methylcytosine"
gcagcccgtgccagcttcctgggacagcactggggtgacctgcctgggtggcacacctctcgccagggcaagggctggcttggggcctgtcgcctggagacagcagggtttagaggagggac

SEQ ID NO: 9433 - DNA, 122 bp, Homo sapiens
  misc_feature (61)..(62): /note="This region represents a CpG dinucleotide"
  misc_feature (61)..(61): /note="Nucleotide may be methylated to form 5-methylcytosine"
tttcctcattttacagacagggaaagcaaaaaacataagcatggtaatgcatatataatacgtgtctatggcagaggcattcgaaccagaatgactccatcttgaataggggctggtaaaat

SEQ ID NO: 9434 - DNA, 122 bp, Homo sapiens
  misc_feature (61)..(62): /note="This region represents a CpG dinucleotide"
  misc_feature (61)..(61): /note="Nucleotide may be methylated to form 5-methylcytosine"
aaattctcatagtaggaaagagttacaggagttatatagtaaacctacaccaagaaatttcgtaggaattatatgccaatgaaagaaaatgtaggtaggcaggtcttagtaatgtatatctg

SEQ ID NO: 9435 - DNA, 122 bp, Homo sapiens
  misc_feature (61)..(62): /note="This region represents a CpG dinucleotide"
  misc_feature (61)..(61): /note="Nucleotide may be methylated to form 5-methylcytosine"
cttaacaaaatgtggtgtcacatgggctggggagccacagcctcctcccagctgatgatgcgaagggaaggaagggattttttttttaattgtttttttctttaaaagcccgcggtaaaaat

SEQ ID NO: 9436 - DNA, 122 bp, Homo sapiens
  misc_feature (61)..(62): /note="This region represents a CpG dinucleotide"
  misc_feature (61)..(61): /note="Nucleotide may be methylated to form 5-methylcytosine"
ttttaagatgaagaaacagatttcaagaagttaaatgagttgcccaaggttaaaagctagcgagtggttgaaccctagtgagtctggctccaaaactcatgctcaaatatcctaattctctg

SEQ ID NO: 9437 - DNA, 122 bp, Homo sapiens
  misc_feature (61)..(62): /note="This region represents a CpG dinucleotide"
  misc_feature (61)..(61): /note="Nucleotide may be methylated to form 5-methylcytosine"
tcctgctgatggatgtcttcctaagccagttgggactaagaaacacagttgaagctcatccgtgacagaactaaaatgatcaggcctaaggtcatagcaacaacttgttgctgacacatcag

SEQ ID NO: 9438 - DNA, 122 bp, Homo sapiens
  misc_feature (61)..(62): /note="This region represents a CpG dinucleotide"
  misc_feature (61)..(61): /note="Nucleotide may be methylated to form 5-methylcytosine"
ctatgactcagaagaggcagccataatccctttaggaacataactcccttggactgggaacgacaccaccatccccaacagcaactgtatcagcaagccctgcccaaagagaggctaagctc

SEQ ID NO: 9439 - DNA, 122 bp, Homo sapiens
  misc_feature (61)..(62): /note="This region represents a CpG dinucleotide"
  misc_feature (61)..(61): /note="Nucleotide may be methylated to form 5-methylcytosine"
tcccttcgctcttggaagtctgcttgttccagcaggactcctgcccctcccaggaggcagcgggcaacctgtcagagatctcgacagggaaagaaggaggggatttgaggtccaagaggaag

SEQ ID NO: 9440 - DNA, 122 bp, Homo sapiens
  misc_feature (61)..(62): /note="This region represents a CpG dinucleotide"
  misc_feature (61)..(61): /note="Nucleotide may be methylated to form 5-methylcytosine"
cccagcccagcacacaaccagggcctcatgatgacaattctgcaaaactggtccttggctcgtcctcccttgccaggatgagactgtgcaaagccccacccacaggcagctgctccaggtgt

SEQ ID NO: 9441 - DNA, 122 bp, Homo sapiens
  misc_feature (61)..(62): /note="This region represents a CpG dinucleotide"
  misc_feature (61)..(61): /note="Nucleotide may be methylated to form 5-methylcytosine"
gggagcatttgttaattgatgtattcatccagccagcagacatgtagtgaacgcccatggcgtgccagacacagctctgggcagaggggtgtgggcaggattaggtggagtgttcttccctc

SEQ ID NO: 9442 - DNA, 122 bp, Homo sapiens
  misc_feature (61)..(62): /note="This region represents a CpG dinucleotide"
  misc_feature (61)..(61): /note="Nucleotide may be methylated to form 5-methylcytosine"
agaacttgcaaaaccaaaagacaaacgttgctgagtctgccccgggggcaggggtggatgcggtgccatctggcgtgcagtcactgccagctttttgtgaatagaaaatctctccttcagca

SEQ ID NO: 9443 - DNA, 122 bp, Homo sapiens
  misc_feature (61)..(62): /note="This region represents a CpG dinucleotide"
  misc_feature (61)..(61): /note="Nucleotide may be methylated to form 5-methylcytosine"
ggcaaaccgggctggctggtgctggcgacgtgttgacacaggtcctcgcggcatgctggccggatactccacagcctggagcagaggcaggaggagccggagcggccgagtttgtgagggcc

SEQ ID NO: 9444 - DNA, 122 bp, Homo sapiens
  misc_feature (61)..(62): /note="This region represents a CpG dinucleotide"
  misc_feature (61)..(61): /note="Nucleotide may be methylated to form 5-methylcytosine"
gagtcaatgcacatgatcacacgtcatttgccatgccagagttgtctctcagagagttcacgatatggacggtggtggcctaacattcaccagcatctagactgctaccaagaactgaaaca

SEQ ID NO: 9445 - DNA, 122 bp, Homo sapiens
  misc_feature (61)..(62): /note="This region represents a CpG dinucleotide"
  misc_feature (61)..(61): /note="Nucleotide may be methylated to form 5-methylcytosine"
tcagagcctctgtttcctcatcagtcagtgcctgtgaggataaaaggagacacgtatggacgtgcctggtacatttcatgacctattagaagattgtgaggccaggaagtatgtacctgcag

SEQ ID NO: 9446 - DNA, 122 bp, Homo sapiens
  misc_feature (61)..(62): /note="This region represents a CpG dinucleotide"
  misc_feature (61)..(61): /note="Nucleotide may be methylated to form 5-methylcytosine"
ccccaccccctgcagccctgtccctccaggatgcatggccttgtcctgtgtgggggtggccgagagcactgccccagccctgggtaccttgggcaggaagctggcagaggccagggctgcca

SEQ ID NO: 9447 - DNA, 122 bp, Homo sapiens
  misc_feature (61)..(62): /note="This region represents a CpG dinucleotide"
  misc_feature (61)..(61): /note="Nucleotide may be methylated to form 5-methylcytosine"
ctatcaaaagaactggtgttgaagccaccaacattcctgtgatataactcagagaacctccgtcaacacatataaggacctggcagaatccctgctgattaattcagcattcatcccaagat

SEQ ID NO: 9448 - DNA, 122 bp, Homo sapiens
  misc_feature (61)..(62): /note="This region represents a CpG dinucleotide"
  misc_feature (61)..(61): /note="Nucleotide may be methylated to form 5-methylcytosine"
gtatgaagccatcagctctgccatcccgcagctctggattaatcatggcaaggcgctaaccgatggagatcagtaggagaggactagaaagcttttcatgtacatcacttatttaggcactg

SEQ ID NO: 9449 - DNA, 122 bp, Homo sapiens
  misc_feature (61)..(62): /note="This region represents a CpG dinucleotide"
  misc_feature (61)..(61): /note="Nucleotide may be methylated to form 5-methylcytosine"
actctggcttctgcttttgttttaagggattaacttccctgtcaagtccaagaagacttgcgtatgagaagattacctgatggacttaattctaagattagcttttttcatcaagatggaaa

SEQ ID NO: 9450 - DNA, 122 bp, Homo sapiens
  misc_feature (61)..(62): /note="This region represents a CpG dinucleotide"
  misc_feature (61)..(61): /note="Nucleotide may be methylated to form 5-methylcytosine"
gggggtggacttttcaatctgatagacctgaggcgaaatcagaaaccagtctctcttagccgtggaatgctggataagttacgtcacttttctgggccttcatttttgcagctgagaaagga

SEQ ID NO: 9451 - DNA, 122 bp, Homo sapiens
  misc_feature (61)..(62): /note="This region represents a CpG dinucleotide"
  misc_feature (61)..(61): /note="Nucleotide may be methylated to form 5-methylcytosine"
cacaagagcttgtttagagctacctaagaggagtcttccctggtcccagacttggttgcacgttagaatcagctggggagcttttaaaaatgcctatgcctgccgggtgcagtgactcatgc

SEQ ID NO: 9452 - DNA, 122 bp, Homo sapiens
  misc_feature (61)..(62): /note="This region represents a CpG dinucleotide"
  misc_feature (61)..(61): /note="Nucleotide may be methylated to form 5-methylcytosine"
tggggtctggatgcctggtgtggcctcatgcagactctctgggcaggtaccacagtatgacgcgacagctgctccgcaaggctgacggggtggtgctcatgtacgacatcacctcccaggag

SEQ ID NO: 9453 - DNA, 122 bp, Homo sapiens
  misc_feature (61)..(62): /note="This region represents a CpG dinucleotide"
  misc_feature (61)..(61): /note="Nucleotide may be methylated to form 5-methylcytosine"
gagggagcaaagggcatggaggatttagataacatcttttctcagttaactggaatgaaacggagtggaacaaacacgggcacctactttaggtttattgattttgctttccaagggctaat

SEQ ID NO: 9454 - DNA, 122 bp, Homo sapiens
  misc_feature (61)..(62): /note="This region represents a CpG dinucleotide"
  misc_feature (61)..(61): /note="Nucleotide may be methylated to form 5-methylcytosine"
gttcaacagcaagcagctcctgccaagtgcttagtggctttctgcttgctggggcagtggcgccagtgctggcccaaggcccggccacctcagcaggacagcatgaggacagtccgggcctg

SEQ ID NO: 9455 - DNA, 122 bp, Homo sapiens
  misc_feature (61)..(62): /note="This region represents a CpG dinucleotide"
  misc_feature (61)..(61): /note="Nucleotide may be methylated to form 5-methylcytosine"
cacctaggggtgttaccaaacatttgcgacttaataaaaccctaatagtggctcttgagccgcttgctccagcctgctcctgctctgtgggttgtacttttgggctttgatacatctgtgcc

SEQ ID NO: 9456 - DNA, 122 bp, Homo sapiens
  misc_feature (61)..(62): /note="This region represents a CpG dinucleotide"
  misc_feature (61)..(61): /note="Nucleotide may be methylated to form 5-methylcytosine"
ggtagagtggaaaggttacctaggtttcagtgcttgaaaagatttcagaaagcagtagtacgtctggttagactagaatcagtcctctcctgggggcagtggaatataatattttctgactg

SEQ ID NO: 9457 - DNA, 122 bp, Homo sapiens
  misc_feature (61)..(62): /note="This region represents a CpG dinucleotide"
  misc_feature (61)..(61): /note="Nucleotide may be methylated to form 5-methylcytosine"
gctgcccctgtgtgctgagagggatcagccctccgggaaaacatgcagcaaagctattcacgtgctgtgtttggccaagagattggtggcgggccatttcctccgagaaggagaacctgaaa

SEQ ID NO: 9458 - DNA, 122 bp, Homo sapiens
  misc_feature (61)..(62): /note="This region represents a CpG dinucleotide"
  misc_feature (61)..(61): /note="Nucleotide may be methylated to form 5-methylcytosine"
ttaagagagtgtagaatctcccccttctctcttcttccttctgttgtagcaatgtgaagacgtgcctgcttcccctttgctttctgccataaccgtaagtttcctgaggcctccccagccat

SEQ ID NO: 9459 - DNA, 122 bp, Homo sapiens
  misc_feature (61)..(62): /note="This region represents a CpG dinucleotide"
  misc_feature (61)..(61): /note="Nucleotide may be methylated to form 5-methylcytosine"
tacctactctccttgagtcaggctcagctgccttctccaagtggctgccagagagacatgcggacgataaggacctgagcatgtctctcccctgattcacatccttgggtggcacccccttg

SEQ ID NO: 9460 - DNA, 122 bp, Homo sapiens
  misc_feature (61)..(62): /note="This region represents a CpG dinucleotide"
  misc_feature (61)..(61): /note="Nucleotide may be methylated to form 5-methylcytosine"
tcctgaagttgacctggtgattcatggttctcctcctcaggatgttgagtctatatccatcgttctggacgcacaggtagagctggacagacagggatttgtatatgtttttatcaaccaag

SEQ ID NO: 9461 - DNA, 122 bp, Homo sapiens
  misc_feature (61)..(62): /note="This region represents a CpG dinucleotide"
  misc_feature (61)..(61): /note="Nucleotide may be methylated to form 5-methylcytosine"
agccggagccagggagggcggctctgggaaccacactggataggactccttcctctctgacgttgtggggaatccactgttgcctgctcctgcccttgctgactaaaggcctcttgtgtgtg

SEQ ID NO: 9462 - DNA, 122 bp, Homo sapiens
  misc_feature (61)..(62): /note="This region represents a CpG dinucleotide"
  misc_feature (61)..(61): /note="Nucleotide may be methylated to form 5-methylcytosine"
cttagtctcctagagtcttgtgcagtgacagtgcccaggcagaaaggcgcccagaggaagcgtgtgtttattggatcagtcagacacatctaaggagcatgtggtttatgccatgtgctgtg

SEQ ID NO: 9463 - DNA, 122 bp, Homo sapiens
  misc_feature (61)..(62): /note="This region represents a CpG dinucleotide"
  misc_feature (61)..(61): /note="Nucleotide may be methylated to form 5-methylcytosine"
ctcaagtgatccacctgcttcagactcccaaagtgctgggattacagacgtgagccaccacgcccggccttggggctttaactttgaactccaaagtcagggcgttacccactgttcctggg

SEQ ID NO: 9464 - DNA, 122 bp, Homo sapiens
  misc_feature (61)..(62): /note="This region represents a CpG dinucleotide"
  misc_feature (61)..(61): /note="Nucleotide may be methylated to form 5-methylcytosine"
gccacgttttccaaccctaagagttctatccttggaggcccatgctctgggaccaagtaccgtggtgatgagtatatgcccagtgggagagtgtttctacagagtgtgaaatgagacagagt

SEQ ID NO: 9465 - DNA, 122 bp, Homo sapiens
  misc_feature (61)..(62): /note="This region represents a CpG dinucleotide"
  misc_feature (61)..(61): /note="Nucleotide may be methylated to form 5-methylcytosine"
tgggtgttacgggaacagcataaaaacacaaaacaaaaaaattccatttctcaccaccggcggtgagaaatgggggtggagcctggaactgtggtcacagggctccaagaggagcagccagg

SEQ ID NO: 9466 - DNA, 122 bp, Homo sapiens
  misc_feature (61)..(62): /note="This region represents a CpG dinucleotide"
  misc_feature (61)..(61): /note="Nucleotide may be methylated to form 5-methylcytosine"
gctatacccagactcggtcattattcagccctgtccacatctgaagactcaagttctaaccgttactttcagattgcaacactctagtcttcctcttttctcactcagcttctcctgctaca

SEQ ID NO: 9467 - DNA, 122 bp, Homo sapiens
  misc_feature (61)..(62): /note="This region represents a CpG dinucleotide"
  misc_feature (61)..(61): /note="Nucleotide may be methylated to form 5-methylcytosine"
tgactcagtcaaactctaagctcatctaaactctgagctcatgctttttagtctgtagatcgatgggtttaggtacagagaattttaggacttttctgcaatgttccatagagaaagtttat

SEQ ID NO: 9468 - DNA, 122 bp, Homo sapiens
  misc_feature (61)..(62): /note="This region represents a CpG dinucleotide"
  misc_feature (61)..(61): /note="Nucleotide may be methylated to form 5-methylcytosine"
atgattactgagttttccttcctgtgattttctctcagtgatttctcctttaaaccacaccgtgacatgaactaatatattgggaatgactcagattttccgtatcccgagaaagtgacaaa

SEQ ID NO: 9469 - DNA, 122 bp, Homo sapiens
  misc_feature (61)..(62): /note="This region represents a CpG dinucleotide"
  misc_feature (61)..(61): /note="Nucleotide may be methylated to form 5-methylcytosine"
gcagtgcccagcgtgttgacacccgggagatggcaaaggggatgatgatttctgcagggacgtagaactgcagggcataggtgcacaggatgccggcaatgtagagaagcttgacagactgg

SEQ ID NO: 9470 - DNA, 122 bp, Homo sapiens
  misc_feature (61)..(62): /note="This region represents a CpG dinucleotide"
  misc_feature (61)..(61): /note="Nucleotide may be methylated to form 5-methylcytosine"
cgccccatcccctccctctccgcaggttacctgctcaactggtgcctcctgcaggcaggacgcaacctcagtgctggccccgggcatgcgggcctcgagagggcaggtggcagggccagccg

SEQ ID NO: 9471 - DNA, 122 bp, Homo sapiens
  misc_feature (61)..(62): /note="This region represents a CpG dinucleotide"
  misc_feature (61)..(61): /note="Nucleotide may be methylated to form 5-methylcytosine"
gaaactcatcattctcggtagttggctaaatttaagtagtggcattctcaacatagcttccgccccatatatagcaacccaacagcacccaagatgaaaacagggctgcgaacatgacagac

SEQ ID NO: 9472 - DNA, 122 bp, Homo sapiens
  misc_feature (61)..(62): /note="This region represents a CpG dinucleotide"
  misc_feature (61)..(61): /note="Nucleotide may be methylated to form 5-methylcytosine"
gagacatgatttcaggggctttaatttattcacaaaatgtcgtcgttgaaattcatcgtacgggcccaggaaactcttcacaggtggtgaatgtgccaagcaaagcctcatggccacatcca

SEQ ID NO: 9473 - DNA, 122 bp, Homo sapiens
  misc_feature (61)..(62): /note="This region represents a CpG dinucleotide"
  misc_feature (61)..(61): /note="Nucleotide may be methylated to form 5-methylcytosine"
tgtaaatgttgaaccttttcggcctggtttgttggcaaaggccctggcctatggtgacatcgagagactcatcctaatgtaggggttggtggacctgctccagcagctgctgctgcatcaac

SEQ ID NO: 9474 - DNA, 122 bp, Homo sapiens
  misc_feature (61)..(62): /note="This region represents a CpG dinucleotide"
  misc_feature (61)..(61): /note="Nucleotide may be methylated to form 5-methylcytosine"
tcaccaaactgcccaatgccttaaccagagacattcaaactgcaaaccaggatgagaagtcgatggttccgcactgtagacaggttttcccaagataattgaacaaggggagactcttaccc

SEQ ID NO: 9475 - DNA, 122 bp, Homo sapiens
  misc_feature (61)..(62): /note="This region represents a CpG dinucleotide"
  misc_feature (61)..(61): /note="Nucleotide may be methylated to form 5-methylcytosine"
cttagactataaagtgatgtggctgcttctccatgaagctcatagaatcagtcacgtctacgtcctgacacttccatggtgaacaagttgagggacagggagagctccaatgcctactctga

SEQ ID NO: 9476 - DNA, 122 bp, Homo sapiens
  misc_feature (61)..(62): /note="This region represents a CpG dinucleotide"
  misc_feature (61)..(61): /note="Nucleotide may be methylated to form 5-methylcytosine"
tagtcacacggagagagaagaaaggagattagcagggtgactttcaccctgcaacagtcacgctggagtactctggtgaaggatcaagaatattaccagttttctgatgaagaaaggaatat

SEQ ID NO: 9477 - DNA, 122 bp, Homo sapiens
  misc_feature (61)..(62): /note="This region represents a CpG dinucleotide"
  misc_feature (61)..(61): /note="Nucleotide may be methylated to form 5-methylcytosine"
actcactcagagtcctggcttttccagtgtcagcagcatatgactccactccattcttttcgctaatcaagattatcaggaagcaattaagagtgaaatctgcataaggttaaccttgaatt

SEQ ID NO: 9478 - DNA, 122 bp, Homo sapiens
  misc_feature (61)..(62): /note="This region represents a CpG dinucleotide"
  misc_feature (61)..(61): /note="Nucleotide may be methylated to form 5-methylcytosine"
agctgaagataaattcccaaagtcattggattcaggacaaccatgctggccagggtctggcgagggtcaagttagaaaggaggctgctgcggagccttgcttatctctgcttttctcttcct

SEQ ID NO: 9479 - DNA, 122 bp, Homo sapiens
  misc_feature (61)..(62): /note="This region represents a CpG dinucleotide"
  misc_feature (61)..(61): /note="Nucleotide may be methylated to form 5-methylcytosine"
tgtttgccttattgtcacttgatggtggctacactgtaagccctgtagtcacataccattcgtgatgaagaaacaggaagaaggaagaagaagcaccagaagtcatctgcattttcttctcc

SEQ ID NO: 9480 - DNA, 122 bp, Homo sapiens
  misc_feature (61)..(62): /note="This region represents a CpG dinucleotide"
  misc_feature (61)..(61): /note="Nucleotide may be methylated to form 5-methylcytosine"
gccacagactccgtagatccggtacagtccacacacaggaaattcaggtacagccaggggcggccctgccagggacggtgtggttactgtgtttccatccatttggtgtttcgattttattc

SEQ ID NO: 9481 - DNA, 122 bp, Homo sapiens
  misc_feature (61)..(62): /note="This region represents a CpG dinucleotide"
  misc_feature (61)..(61): /note="Nucleotide may be methylated to form 5-methylcytosine"
ggaggccgtggcaggcagatcacttgaaaagccatccatgatccatccatgatccagcctcgccatccatgatccagcctcgcctctcttttcctcacatatcctgtctactttactcccca

SEQ ID NO: 9482 - DNA, 122 bp, Homo sapiens
  misc_feature (61)..(62): /note="This region represents a CpG dinucleotide"
  misc_feature (61)..(61): /note="Nucleotide may be methylated to form 5-methylcytosine"
ctaagttttcttctagggtgtttatggatttagtctaacatttgtggatgaatgagtcttcgtgtagcattttaaggaggggagatgtacagactcattacagatgaacctgtttgctaagc

SEQ ID NO: 9483 - DNA, 122 bp, Homo sapiens
  misc_feature (61)..(62): /note="This region represents a CpG dinucleotide"
  misc_feature (61)..(61): /note="Nucleotide may be methylated to form 5-methylcytosine"
ataaaccacagtttttcctttgaacagtcaagcggcaggcagctgttatcattcatctcgcgtgaactgaatccaatctcatctaaccatgctgaaccacaaaccacagtatggccttgtct

SEQ ID NO: 9484 - DNA, 122 bp, Homo sapiens
  misc_feature (61)..(62): /note="This region represents a CpG dinucleotide"
  misc_feature (61)..(61): /note="Nucleotide may be methylated to form 5-methylcytosine"
gcaggcctctcttgagtcattaaacttgttctattagattacagaaaatcccagacaactcgccctgccctggctggatttttgtagaatgcagatctctttttttctaacagaggaaaagc

SEQ ID NO: 9485 - DNA, 122 bp, Homo sapiens
  misc_feature (61)..(62): /note="This region represents a CpG dinucleotide"
  misc_feature (61)..(61): /note="Nucleotide may be methylated to form 5-methylcytosine"
aaagcagggctaataatatcaaattcactggataattggggaaattaccagagatgatgacgataagaagcttggtatatacaggatgttagtgggacagttgatgaaatcagaattagact

SEQ ID NO: 9486 - DNA, 122 bp, Homo sapiens
  misc_feature (61)..(62): /note="This region represents a CpG dinucleotide"
  misc_feature (61)..(61): /note="Nucleotide may be methylated to form 5-methylcytosine"
aaaatgactctcttcaagcccccaccctactctgggggatgcaggaagtacagaaggttgcggagtgttagtacaaattgtggaactcaggatagaagcttcaacagtgttgaactgtctat

SEQ ID NO: 9487 - DNA, 122 bp, Homo sapiens
  misc_feature (61)..(62): /note="This region represents a CpG dinucleotide"
  misc_feature (61)..(61): /note="Nucleotide may be methylated to form 5-methylcytosine"
aagaaaaagaaatagaaacttgggagattatgaggattaagctgctacattaagtgtgaacgtcagtccaatacttgatgagtctgcagacacatgaatgggaaccaaagcagccttggggt

SEQ ID NO: 9488 - DNA, 122 bp, Homo sapiens
  misc_feature (61)..(62): /note="This region represents a CpG dinucleotide"
  misc_feature (61)..(61): /note="Nucleotide may be methylated to form 5-methylcytosine"
ttttggctctgagaatggaatcccagagctggagacgagctggatggttcctgtgaatgacggctttctccaggaggagaattagagctaaaattccaggcaaatctgaaggaaagacatgt

SEQ ID NO: 9489 - DNA, 122 bp, Homo sapiens
  misc_feature (61)..(62): /note="This region represents a CpG dinucleotide"
  misc_feature (61)..(61): /note="Nucleotide may be methylated to form 5-methylcytosine"
tagtagtcagttttgcattggaaatatacagtcatgttgcttaacaacagagatatgttccgagaaatgtgtcatcagacagtgtagtcattgtgtgaacaccatagagtgtactcacacaa

SEQ ID NO: 9490 - DNA, 122 bp, Homo sapiens
  misc_feature (61)..(62): /note="This region represents a CpG dinucleotide"
  misc_feature (61)..(61): /note="Nucleotide may be methylated to form 5-methylcytosine"
cttacatagtgtctgagttttaaacacctgtcattatagactttgtcctgccacatgatacgaaacaaggcaaactataatttggtcagaggtcacagccctaaaagcaggtttagttcctg

SEQ ID NO: 9491 - DNA, 122 bp, Homo sapiens
  misc_feature (61)..(62): /note="This region represents a CpG dinucleotide"
  misc_feature (61)..(61): /note="Nucleotide may be methylated to form 5-methylcytosine"
cttgtctctatttctactgcacccccagggacaagccatttcacaatctttaggctttaacggatgcctaattgctcctctgcaatttcattcctggtattttgttgtggttttgttttgca

SEQ ID NO: 9492 - DNA, 122 bp, Homo sapiens
  misc_feature (61)..(62): /note="This region represents a CpG dinucleotide"
  misc_feature (61)..(61): /note="Nucleotide may be methylated to form 5-methylcytosine"
tcagtgccttgtgtactgcattaagtacttgctcagaggtcaagaggaggaactgactcacgcagcattagtggatgttcactaagccttctgttgattgtaacgttagtataggggaaggg

SEQ ID NO: 9493 - DNA, 122 bp, Homo sapiens
  misc_feature (61)..(62): /note="This region represents a CpG dinucleotide"
  misc_feature (61)..(61): /note="Nucleotide may be methylated to form 5-methylcytosine"
atttcttttcataggacactgaatgcatgttgatgttcttatttacagggattagatttacgtgaaacttgtcaggacaaaaagtctggcccatcattatttggagtgctctgtgcattcat

SEQ ID NO: 9494 - DNA, 122 bp, Homo sapiens
  misc_feature (61)..(62): /note="This region represents a CpG dinucleotide"
  misc_feature (61)..(61): /note="Nucleotide may be methylated to form 5-methylcytosine"
attgctagctaatgtgtctgctcagattcacaggagtgctcaagctggtcacagtggtgacgcaatggcttttggtgaataatttcaggctccctgggagggcattgcatgacctcacatgc

SEQ ID NO: 9495 - DNA, 122 bp, Homo sapiens
  misc_feature (61)..(62): /note="This region represents a CpG dinucleotide"
  misc_feature (61)..(61): /note="Nucleotide may be methylated to form 5-methylcytosine"
tatttcatctatgtaagataatgaccagtagagttggacatgtcccccgaacagggatgacgtgacgctgaaaaggagagttgagacctgccatcacatgaaggaagcaaagggaacaattc

SEQ ID NO: 9496 - DNA, 122 bp, Homo sapiens
  misc_feature (61)..(62): /note="This region represents a CpG dinucleotide"
  misc_feature (61)..(61): /note="Nucleotide may be methylated to form 5-methylcytosine"
aagagggatgccctgtgtgcatctgcccgcactgcgagtccttgccactccttagatcaacggagccagagatcttgccaccaacacactggcaaagcagctggtttgtctacactttctgt

SEQ ID NO: 9497 - DNA, 122 bp, Homo sapiens
  misc_feature (61)..(62): /note="This region represents a CpG dinucleotide"
  misc_feature (61)..(61): /note="Nucleotide may be methylated to form 5-methylcytosine"
aaattgaagccatcctactgaacatacacttattcggcagtgaatgtgcatgccagacatcgggctatgccctgaggacagacacgtaaaagacattccttgttcttaagaaactgagagtc

SEQ ID NO: 9498 - DNA, 122 bp, Homo sapiens
  misc_feature (61)..(62): /note="This region represents a CpG dinucleotide"
  misc_feature (61)..(61): /note="Nucleotide may be methylated to form 5-methylcytosine"
ttctacccagactcctccttagaattgcctggggagcttttaaagaatacgtaagcctcacgcttagtcatgcatcacttataagagacagggatgtgttttgagaaatgcattgttaggtg

SEQ ID NO: 9499 - DNA, 122 bp, Homo sapiens
  misc_feature (61)..(62): /note="This region represents a CpG dinucleotide"
  misc_feature (61)..(61): /note="Nucleotide may be methylated to form 5-methylcytosine"
ggagataacaacatcttattttcagtctgaatcatttctcatgacctgttcatttttagccgcatgctcattcttctgtataccatagtcataggtttttgttcatctctgcactgccctgc

SEQ ID NO: 9500 - DNA, 122 bp, Homo sapiens
  misc_feature (61)..(62): /note="This region represents a CpG dinucleotide"
  misc_feature (61)..(61): /note="Nucleotide may be methylated to form 5-methylcytosine"
ccaaatgtcagaaagatctcagtgactgtctttaacgaacagggttgtttatgattcacccggagtcgcctcgccaggcttctcagtatacccaggccgtcctgagcccagcctggccctgc

SEQ ID NO: 9501 - DNA, 122 bp, Homo sapiens
  misc_feature (61)..(62): /note="This region represents a CpG dinucleotide"
  misc_feature (61)..(61): /note="Nucleotide may be methylated to form 5-methylcytosine"
ctgcaatagtgaaagtcgaaagctggtcctaaaacctttcggtggttgtggttgggaatacggtcagtgcctcatgcagcgtcaccttcactcgggtgtgtagctgcaacttgcacagcttc

SEQ ID NO: 9502 - DNA, 122 bp, Homo sapiens
  misc_feature (61)..(62): /note="This region represents a CpG dinucleotide"
  misc_feature (61)..(61): /note="Nucleotide may be methylated to form 5-methylcytosine"
aaatttggaaagtagatatgcctttaaaaaaaaaaaagactgagttgtgaaatgtcataacgtgatggagaagggaagggagaacataatataaatgtaataaaaatattaagccaataata

SEQ ID NO: 9503 - DNA, 122 bp, Homo sapiens
  misc_feature (61)..(62): /note="This region represents a CpG dinucleotide"
  misc_feature (61)..(61): /note="Nucleotide may be methylated to form 5-methylcytosine"
gtggttggtcctgctctgcaaagcctttggagacagtcacctcctgactattctctgagccgttaacctggaggtatggttcttgcctttgggtccaaaacagcagccagagctccagccat

SEQ ID NO: 9504 - DNA, 122 bp, Homo sapiens
  misc_feature (61)..(62): /note="This region represents a CpG dinucleotide"
  misc_feature (61)..(61): /note="Nucleotide may be methylated to form 5-methylcytosine"
taggagctcaacaagtggttaagtctgagatggcatgcattacagcaaagggaggagacacgcaaattgtgatggggaaaagcaaataattctgttttgctaaagcaagaaatgcaggaaga

SEQ ID NO: 9505 - DNA, 122 bp, Homo sapiens
  misc_feature (61)..(62): /note="This region represents a CpG dinucleotide"
  misc_feature (61)..(61): /note="Nucleotide may be methylated to form 5-methylcytosine"
cccccgatgagaaccactgtataatctttactagctgttatattacccttgcagattcaccgttcctcctaagatttggctggccttgaaaagtgttgccgtcatctgacccatttctttct

SEQ ID NO: 9506 - DNA, 122 bp, Homo sapiens
  misc_feature (61)..(62): /note="This region represents a CpG dinucleotide"
  misc_feature (61)..(61): /note="Nucleotide may be methylated to form 5-methylcytosine"
cttaggcagctacaatattaaacaactgctgcttattgtctttgtcaaattccctgctggcggagctgtttgcacaaagtgagctctgattcatgtcaaataaatacaagccctgagaacgg

(The sequence listing continues in the following parts.)

1. A method comprising assaying from a sample from an individual:
the methylation status of a panel of one or more CpGs selected from a panel of CpGs identified at nucleotide positions 61 to 62 in SEQ ID NOs 1 to 14,000.

2. A method according to claim 1, wherein:
(i) the panel of one or more CpGs comprises at least 500 CpGs selected from the CpGs identified at nucleotide positions 61 to 62 in SEQ ID NOs 1 to 14,000 and optionally wherein the panel of one or more CpGs comprises at least the CpGs identified in SEQ ID NOs 1 to 500 and identified at nucleotide positions 61 to 62; or
(ii) the panel of one or more CpGs comprises at least 1000 CpGs selected from the CpGs identified at nucleotide positions 61 to 62 in SEQ ID NOs 1 to 14,000, and optionally wherein the panel of one or more CpGs comprises at least the CpGs identified in SEQ ID NOs 1 to 1000 and identified at nucleotide positions 61 to 62; or,
ii) the panel of one or more CpGs comprises at least 1000 CpGs selected from the CpGs identified at nucleotide positions 61 to 62 in SEQ ID NOs 1 to 14,000, and optionally wherein the panel of one or more CpGs comprises at least the CpGs identified in SEQ ID NOs 1 to 1000 and identified at nucleotide positions 61 to 62; or
iii) the panel of one or more CpGs comprises at least 2000 CpGs selected from the CpGs identified at nucleotide positions 61 to 62 in SEQ ID NOs 1 to 14,000, and optionally wherein the panel of one or more CpGs comprises at least the CpGs identified in SEQ ID NOs 1 to 2000 and identified at nucleotide positions 61 to 62; or
iv) the panel of one or more CpGs comprises at least 10,000 CpGs selected from the CpGs identified at nucleotide positions 61 to 62 in SEQ ID NOs 1 to 14,000, and optionally wherein the panel of one or more CpGs comprises at least the CpGs identified in SEQ ID NOs 1 to 10,000 and identified at nucleotide positions 61 to 62; or
v) the panel of one or more CpGs comprises at least the 14,000 CpGs identified at nucleotide positions 61 to 62 in SEQ ID NOs 1 to 14,000.

3. (canceled)

4. (canceled)

5. (canceled)

6. (canceled)

7. (canceled)

8. (canceled)

9. (canceled)

10. (canceled)

11. (canceled)

12. (canceled)

13. (canceled)

14. (canceled)

15. (canceled)

16. (canceled)

17. (canceled)

18. A method according to claim 1, wherein the step of assaying the methylation status of each CpG in the panel of one or more CpGs comprises:
a. performing a sequencing step to determine the sequence of each CpG;
b. hybridising DNA to an array comprising probes capable of discriminating between methylated and non-methylated forms of the CpGs and applying a detection system to the array so as to determine the methylation status of each CpG; and/or
c. performing a PCR step using methylation-specific primers, wherein the methylation status of the CpG is determined by the presence or absence of a PCR product.

19. A method according to claim 1, wherein the step of assaying the methylation status of each CpG in the panel of one or more CpGs comprises:
a. bisulphite converting the DNA; or
b. performing the steps of oxidising 5-methylcytosine bases (5mC) to 5-carboxylcytosine bases (5caC), preferably by ten-eleven translocation (TET), and/or oxidising 5-hydroxymethylcytosine bases (5hmC) to 5-carboxylcytosine bases (5caC), preferably by ten-eleven translocation (TET); followed by reducing 5-carboxylcytosine bases (5caC) to dihydrouracil bases (DHU), optionally with pyridine borane.

20. A method of treating or preventing cancer in an individual, the method comprising administering one or more treatments to the individual determined to have cancer by the step of performing the method of claim 1 on a sample from the individual.

21.-41. (canceled)

42. A method according to claim 20, further defined as comprising a step of stratifying the individual according to their cancer risk or of having cancer.

43. A method according to claim 42, wherein the individual is stratified as not having cancer or as having a low risk of cancer development, and wherein the individual is subjected to one or more treatments according to their stratification, wherein the one or more treatments comprise intensified screening, preferably wherein the intensified screening comprises any one or more of:
a. a test for a BRCA1 and/or BRCA2 germline mutation;
b. a test for CA125, preferably wherein the test is repeated annually;
c. a test for cell-free tumour DNA methylation in plasma/serum, preferably wherein the test is repeated annually;
d. a test for cell-free tumour DNA methylation in vaginal fluid, preferably wherein the test is repeated annually;
e. a repeat method according to claim 1, preferably wherein the repeat method is performed about two years after the previous method,
preferably wherein the individual being tested by any one or more of b. to d. is post-menopausal.

44. A method according to claim 42, wherein the individual is stratified as having a moderate risk of having cancer or as having a moderate risk of cancer development, and wherein the individual is subjected to one or more treatments according to their stratification, wherein the one or more treatments comprise any one or more of:
a. intensified screening, preferably wherein the intensified screening comprises one or more of:
i. a test for a BRCA1 and/or BRCA2 germline mutation;
ii. a test for CA125, preferably wherein the test is repeated annually;
iii. a test for cell-free tumour DNA methylation in plasma/serum, preferably wherein the test is repeated annually;
iv. a test for cell-free tumour DNA methylation in vaginal fluid, preferably wherein the test is repeated annually
v. a pelvic MRI scan, preferably wherein the individual being subjected to the pelvic MRI scan is post-menopausal, and preferably wherein the scan is repeated annually;
vi. a repeat method according to claim 1, preferably wherein the repeat method is performed about one year after the previous method;
b. administration of one or more of Aspirin, oral contraceptive pill, selective estrogen receptor modulators (SERMS) optionally comprising Anordin, Bazedoxifene, Broparestrol, Broparestrol, Clomifene, Cyclofenil, Lasofoxifene, Ormeloxifene, Ospemifene, Raloxifene or Tamoxifen, and selective progesterone receptor modulators (SPRMs) optionally comprising Mifepristone, Ulipristal, Asoprisnil, Proellex, Onapristone, Asoprisnil and Lonaprisan.

45. A method according to claim 42, wherein the individual is stratified as having cancer or as having a high risk of cancer development, and wherein the individual is subjected to one or more treatments according to their stratification, wherein the one or more treatments comprise any one or more of:
a. intensified screening, preferably wherein the intensified screening comprises one or more of:
i. a test for a BRCA1 and/or BRCA2 germline mutation;
ii. a test for CA125, preferably wherein the test is repeated three-monthly;
iii. a test for cell-free tumour DNA methylation in plasma/serum, preferably wherein the test is repeated annually;
iv. a test for cell-free tumour DNA methylation in vaginal fluid, preferably wherein the test is repeated annually
v. a pelvic MRI scan, preferably wherein the scan is repeated annually;
vi. a repeat method according to claim 1, preferably wherein the repeat method is performed about one year after the previous method;
b. administration of one or more of Aspirin, oral contraceptive pill, selective estrogen receptor modulators (SERMS) optionally comprising Anordin, Bazedoxifene, Broparestrol, Broparestrol, Clomifene, Cyclofenil, Lasofoxifene, Ormeloxifene, Ospemifene, Raloxifene or Tamoxifen, and selective progesterone receptor modulators (SPRMs) optionally comprising Mifepristone, Ulipristal, Asoprisnil, Proellex, Onapristone, Asoprisnil and Lonaprisan; and/or
c. a total hysterectomy and bilateral salpingo-oophorectomy.

46. A method according to claim 42, wherein the one or more treatments that the individual is subjected to are repeated on a monthly, three monthly, six monthly, yearly or two yearly basis following an initial administration.

47. A method of assaying methylation in an individual at multiple time points, the method comprising: (a) performing the method according to claim 1 at a first time point; (b) performing the method according to claim 1 at one or more further time points; and (c) detecting differential methylation status between (a) and (b).

48. A method according to claim 47, wherein the further time points are monthly, three monthly, six monthly, yearly or two yearly basis following an initial assessment; and/or wherein one or more treatments are administered to the individual according to claim 45.

49. A method according to claim 1, wherein the sample is obtained from a tissue comprising epithelial cells, preferably wherein the sample is not obtained from ovarian or endometrial tissue.

50. A method according to claim 49, wherein the sample is obtained from:
a. cervical tissue;
b. vaginal tissue;
c. cervicovaginal tissue; and/or
d. buccal tissue;
preferably wherein the sample is obtained from cervical tissue, most preferably wherein the sample is obtained from tissue from a cervical smear.

51. An array for discriminating between methylated and non-methylated forms of CpGs; the array comprising oligonucleotide probes specific for a methylated form of each CpG in a CpG panel and oligonucleotide probes specific for a non-methylated form of each CpG in the panel; wherein the panel comprises at least 500 CpGs selected from the CpGs identified at nucleotide position 61 to 62 in SEQ ID NOs 1 to 14,000.

52. An array according to claim 51, provided that the array is not an Infinium MethylationEPIC BeadChip array or an Infinium HumanMethylation450, and/or provided that the number of CpG-specific oligonucleotide probes of the array is 482,000 or less, 480,000 or less, 450,000 or less, 440,000 or less, 430,000 or less, 420,000 or less, 410,000 or less, or 400,000 or less; and/or wherein the panel comprises one or more CpGs selected from the CpGs identified at nucleotide positions 61 to 62 in SEQ ID NOs 1 to 14,000; and or wherein the array further comprises one or more oligonucleotides comprising any set of CpGs one or more CpGs selected from the CpGs identified at nucleotide positions 61 to 62 in SEQ ID NOs 1 to 14,000, wherein the one or more oligonucleotides are hybridized to corresponding oligonucleotide probes of the array.

53. A hybridized array, wherein the array is obtainable by hybridizing to an array according to claim 51 a group of oligonucleotides comprising any set of CpGs selected from the CpGs identified at nucleotide positions 61 to 62 in SEQ ID NOs 1 to 14,000.

54. A process for making the hybridized array according to claim 53, comprising contacting an array comprising oligonucleotide probes specific for a methylated form of each CpG in a CpG panel and oligonucleotide probes specific for a non-methylated form of each CpG in the panel; wherein the panel comprises at least 500 CpGs selected from the CpGs identified at nucleotide position 61 to 62 in SEQ ID NOs 1 to 14,000 with a group of oligonucleotides comprising any set of CpGs selected from the CpGs identified at nucleotide positions 61 to 62 in SEQ ID NOs 1 to 14,000.
